United States Patent Application Publication US 2006/0003322 A1 - sequence listing, part 29

SEQ ID NO: 1238769 - RNA, 22 nt, Human
gugggcguuggaagaaacagca

SEQ ID NO: 1238770 - RNA, 23 nt, Human
uaaacuaucuuuuuaaaaagugc

SEQ ID NO: 1238771 - RNA, 23 nt, Human
uaacacuccucgagaaaaguucc

SEQ ID NO: 1238772 - RNA, 21 nt, Human
uaaggaauaaaugaagaacaa

SEQ ID NO: 1238773 - RNA, 24 nt, Human
uaaucagaggaaauuauccaaagc

SEQ ID NO: 1238774 - RNA, 23 nt, Human
uagaaaauuaaggaauaaaugaa

SEQ ID NO: 1238775 - RNA, 18 nt, Human
uagaaugucaucucugau

SEQ ID NO: 1238776 - RNA, 20 nt, Human
uagaaugucaucucugaugg

SEQ ID NO: 1238777 - RNA, 23 nt, Human
uaggcccuaaggaaugaagcaga

SEQ ID NO: 1238778 - RNA, 22 nt, Human
uauccaaagcugguuacugacc

SEQ ID NO: 1238779 - RNA, 23 nt, Human
uaucuuuuuaaaaagugcuuugu

SEQ ID NO: 1238780 - RNA, 20 nt, Human
ucacugugucuucuuggcag

SEQ ID NO: 1238781 - RNA, 18 nt, Human
ucagaagugagcacauca

SEQ ID NO: 1238782 - RNA, 21 nt, Human
ucagcagacucccucaggggc

SEQ ID NO: 1238783 - RNA, 18 nt, Human
ucaggacuguggaccccu

SEQ ID NO: 1238784 - RNA, 21 nt, Human
ucaggggcugcuucucuugga

SEQ ID NO: 1238785 - RNA, 21 nt, Human
ucccucaggggcugcuucucu

SEQ ID NO: 1238786 - RNA, 18 nt, Human
uccucgagaaaaguuccu

SEQ ID NO: 1238787 - RNA, 20 nt, Human
ucugaaacauaaaauuaagu

SEQ ID NO: 1238788 - RNA, 21 nt, Human
ucuuggcaggcagagcuuacu

SEQ ID NO: 1238789 - RNA, 24 nt, Human
ugaaaaggaacaugcaagagagca

SEQ ID NO: 1238790 - RNA, 24 nt, Human
ugacaagcaagggaauuucagcug

SEQ ID NO: 1238791 - RNA, 20 nt, Human
ugaccagaccuggccaugcu

SEQ ID NO: 1238792 - RNA, 22 nt, Human
ugacccaaaaggaaaccaucga

SEQ ID NO: 1238793 - RNA, 23 nt, Human
ugacgaacauuuaucaugaccag

SEQ ID NO: 1238794 - RNA, 18 nt, Human
ugagaaacaaacugaaag

SEQ ID NO: 1238795 - RNA, 20 nt, Human
ugagaggaggcaacacaugu

SEQ ID NO: 1238796 - RNA, 21 nt, Human
ugagcacaucacccgccuccu

SEQ ID NO: 1238797 - RNA, 23 nt, Human
ugaggagaacauuaguucuuuca

SEQ ID NO: 1238798 - RNA, 21 nt, Human
ugaguucagugagcuagaagu

SEQ ID NO: 1238799 - RNA, 19 nt, Human
ugcaagagagcaaggaaaa

SEQ ID NO: 1238800 - RNA, 19 nt, Human
ugcaugagaauauuuuuau

SEQ ID NO: 1238801 - RNA, 18 nt, Human
ugccuuugaaauuaucca

SEQ ID NO: 1238802 - RNA, 19 nt, Human
ugcuaagcaugaugaguga

SEQ ID NO: 1238803 - RNA, 22 nt, Human
uggaccccucucacugugucuu

SEQ ID NO: 1238804 - RNA, 22 nt, Human
uggcagccaggccuuuuccuag

SEQ ID NO: 1238805 - RNA, 26 nt, Human
uggcaggcagagcuuacugacccccu

SEQ ID NO: 1238806 - RNA, 19 nt, Human
uggucaauaggcccuuuuc

SEQ ID NO: 1238807 - RNA, 19 nt, Human
uguugaaguuguguaccau

SEQ ID NO: 1238808 - RNA, 18 nt, Human
uuaaaaacaauucuugaa

SEQ ID NO: 1238809 - RNA, 22 nt, Human
uucaucaacaugaaguuccagg

SEQ ID NO: 1238810 - RNA, 23 nt, Human
uucuuggcaggcagagcuuacug

SEQ ID NO: 1238811 - RNA, 18 nt, Human
uugaaguuguguaccaug

SEQ ID NO: 1238812 - RNA, 23 nt, Human
uuuguauccucuucauccucugu

SEQ ID NO: 1238813 - RNA, 19 nt, Human
uuuuuuaacaauagucuga

SEQ ID NO: 1238814 - RNA, 18 nt, Human
uuuuuugguuuuuguuuu

SEQ ID NO: 1238815 - RNA, 19 nt, Human
aaagugcuaggauuacagg

SEQ ID NO: 1238816 - RNA, 24 nt, Human
aaagugcuaggauuacaggcauga

SEQ ID NO: 1238817 - RNA, 20 nt, Human
aaccccugaccucgugaucc

SEQ ID NO: 1238818 - RNA, 26 nt, Human
aagugcuaggauuacaggcaugagcc

SEQ ID NO: 1238819 - RNA, 21 nt, Human
acaccaggcuaauuuuuguau

SEQ ID NO: 1238820 - RNA, 22 nt, Human
accauguuggucaggcuggucu

SEQ ID NO: 1238821 - RNA, 21 nt, Human
acgggguuucaccauguuggu

SEQ ID NO: 1238822 - RNA, 23 nt, Human
acgggguuucaccauguugguca

SEQ ID NO: 1238823 - RNA, 24 nt, Human
acgggguuucaccauguuggucag

SEQ ID NO: 1238824 - RNA, 24 nt, Human
auuuuuguauuuuuaguagagacg

SEQ ID NO: 1238825 - RNA, 24 nt, Human
caaagugcuaggauuacaggcaug

SEQ ID NO: 1238826 - RNA, 19 nt, Human
caagaaugcugcaggaacc

SEQ ID NO: 1238827 - RNA, 20 nt, Human
caagaaugcugcaggaaccc

SEQ ID NO: 1238828 - RNA, 23 nt, Human
caagaaugcugcaggaacccauu

SEQ ID NO: 1238829 - RNA, 24 nt, Human
caccacaccaggcuaauuuuugua

SEQ ID NO: 1238830 - RNA, 21 nt, Human
caccauguuggucaggcuggu

SEQ ID NO: 1238831 - RNA, 23 nt, Human
caccauguuggucaggcuggucu

SEQ ID NO: 1238832 - RNA, 24 nt, Human
caccauguuggucaggcuggucuu

SEQ ID NO: 1238833 - RNA, 24 nt, Human
cauguuggucaggcuggucuugaa

SEQ ID NO: 1238834 - RNA, 19 nt, Human
ccaaagugcuaggauuaca

SEQ ID NO: 1238835 - RNA, 24 nt, Human
ccaaagugcuaggauuacaggcau

SEQ ID NO: 1238836 - RNA, 24 nt, Human
ccccugaccucgugauccaucugc

SEQ ID NO: 1238837 - RNA, 21 nt, Human
ccugaccucgugauccaucug

SEQ ID NO: 1238838 - RNA, 23 nt, Human
cugccucggccucccaaagugcu

SEQ ID NO: 1238839 - RNA, 22 nt, Human
gaccucgugauccaucugccuc

SEQ ID NO: 1238840 - RNA, 22 nt, Human
gaccucgugauccaucugccuc

SEQ ID NO: 1238841 - RNA, 24 nt, Human
gaccucgugauccaucugccucgg

SEQ ID NO: 1238842 - RNA, 23 nt, Human
gagacgggguuucaccauguugg

SEQ ID NO: 1238843 - RNA, 24 nt, Human
gagacgggguuucaccauguuggu

SEQ ID NO: 1238844 - RNA, 18 nt, Human
gauuacaggcaugagcca

SEQ ID NO: 1238845 - RNA, 21 nt, Human
gauuacaggcaugagccacug

SEQ ID NO: 1238846 - RNA, 24 nt, Human
gauuacaggcaugagccacugugc

SEQ ID NO: 1238847 - RNA, 23 nt, Human
gcuggucuugaaccccugaccuc

SEQ ID NO: 1238848 - RNA, 22 nt, Human
ggauuacaggcaugagccacug

SEQ ID NO: 1238849 - RNA, 24 nt, Human
ggauuacaggcaugagccacugug

SEQ ID NO: 1238850 - RNA, 24 nt, Human
ggcuggucuugaaccccugaccuc

SEQ ID NO: 1238851 - RNA, 23 nt, Human
gggguuucaccauguuggucagg

SEQ ID NO: 1238852 - RNA, 22 nt, Human
ggguuucaccauguuggucagg

SEQ ID NO: 1238853 - RNA, 19 nt, Human
ggucuugaaccccugaccu

SEQ ID NO: 1238854 - RNA, 23 nt, Human
guagagacgggguuucaccaugu

SEQ ID NO: 1238855 - RNA, 24 nt, Human
gugauccaucugccucggccuccc

SEQ ID NO: 1238856 - RNA, 18 nt, Human
uaaagaaacugcagcaca

SEQ ID NO: 1238857 - RNA, 19 nt, Human
uaaagaaacugcagcacag

SEQ ID NO: 1238858 - RNA, 24 nt, Human
uaauuuuuguauuuuuaguagaga

SEQ ID NO: 1238859 - RNA, 22 nt, Human
uacaggcaugagccacugugcc

SEQ ID NO: 1238860 - RNA, 22 nt, Human
uagagacgggguuucaccaugu

SEQ ID NO: 1238861 - RNA, 22 nt, Human
uaggauuacaggcaugagccac

SEQ ID NO: 1238862 - RNA, 22 nt, Human
uaggauuacaggcaugagccac

SEQ ID NO: 1238863 - RNA, 23 nt, Human
uaggauuacaggcaugagccacu

SEQ ID NO: 1238864 - RNA, 24 nt, Human
uaggauuacaggcaugagccacug

SEQ ID NO: 1238865 - RNA, 24 nt, Human
uaguagagacgggguuucaccaug

SEQ ID NO: 1238866 - RNA, 26 nt, Human
uaguagagacgggguuucaccauguu

SEQ ID NO: 1238867 - RNA, 24 nt, Human
ucccaaagugcuaggauuacaggc

SEQ ID NO: 1238868 - RNA, 18 nt, Human
ucggccucccaaagugcu

SEQ ID NO: 1238869 - RNA, 21 nt, Human
ugccucggccucccaaagugc

SEQ ID NO: 1238870 - RNA, 23 nt, Human
ugccucggccucccaaagugcua

SEQ ID NO: 1238871 - RNA, 24 nt, Human
ugccucggccucccaaagugcuag

SEQ ID NO: 1238872 - RNA, 24 nt, Human
uggucaggcuggucuugaaccccu

SEQ ID NO: 1238873 - RNA, 21 nt, Human
uguauuuuuaguagagacggg

SEQ ID NO: 1238874 - RNA, 24 nt, Human
uguguaccaccacaccaggcuaau

SEQ ID NO: 1238875 - RNA, 18 nt, Human
uuaguagagacgggguuu

SEQ ID NO: 1238876 - RNA, 22 nt, Human
uuaguagagacgggguuucacc

SEQ ID NO: 1238877 - RNA, 24 nt, Human
uuaguagagacgggguuucaccau

SEQ ID NO: 1238878 - RNA, 23 nt, Human
uuguauuuuuaguagagacgggg

SEQ ID NO: 1238879 - RNA, 24 nt, Human
uuucaccauguuggucaggcuggu

SEQ ID NO: 1238880 - RNA, 24 nt, Human
uuuuuaguagagacgggguuucac

SEQ ID NO: 1238881 - RNA, 20 nt, Human
uuuuuguauuuuuaguagag

SEQ ID NO: 1238882 - RNA, 23 nt, Human
aacaaaagcgccuucuuaacacc

SEQ ID NO: 1238883 - RNA, 18 nt, Human
auagacauauuugcagag

SEQ ID NO: 1238884 - RNA, 23 nt, Human
caccauuaauggccucugaaauc

SEQ ID NO: 1238885 - RNA, 21 nt, Human
caugggccugugacaugaaac

SEQ ID NO: 1238886 - RNA, 18 nt, Human
cuuuaccauuccauuaaa

SEQ ID NO: 1238887 - RNA, 27 nt, Human
gaaaccaaugaaauaaaaaccagacaa

SEQ ID NO: 1238888 - RNA, 25 nt, Human
gaacugaacuagaacugaaaaguaa

SEQ ID NO: 1238889 - RNA, 22 nt, Human
gccucugaaaucaacaucagug

SEQ ID NO: 1238890 - RNA, 19 nt, Human
uauguaaagaaaauggcuu

SEQ ID NO: 1238891 - RNA, 22 nt, Human
ucaagaacugaacuagaacuga

SEQ ID NO: 1238892 - RNA, 20 nt, Human
ucaauagacauauuugcaga

SEQ ID NO: 1238893 - RNA, 27 nt, Human
ucuuucauuuuugucauuuuuaugugg

SEQ ID NO: 1238894 - RNA, 22 nt, Human
ugaaaccaaugaaauaaaaacc

SEQ ID NO: 1238895 - RNA, 24 nt, Human
ugaaauaaaaaccagacaauuuua

SEQ ID NO: 1238896 - RNA, 22 nt, Human
ugggccugugacaugaaaccag

SEQ ID NO: 1238897 - RNA, 21 nt, Human
agaaauccuuguuauagaacu

SEQ ID NO: 1238898 - RNA, 22 nt, Human
caaacugauaggguuuaaagca

SEQ ID NO: 1238899 - RNA, 21 nt, Human
ccuacacauaaacaagaggaa

SEQ ID NO: 1238900 - RNA, 18 nt, Human
ccuugagggaaggaaaag

SEQ ID NO: 1238901 - RNA, 20 nt, Human
ccuugagggaaggaaaagaa

SEQ ID NO: 1238902 - RNA, 19 nt, Human
cugccuacacauaaacaag

SEQ ID NO: 1238903 - RNA, 19 nt, Human
gcuggaggcaggaacucca

SEQ ID NO: 1238904 - RNA, 18 nt, Human
gggaaggaaaagaacaaa

SEQ ID NO: 1238905 - RNA, 22 nt, Human
guccaaauggaauccaaaucaa

SEQ ID NO: 1238906 - RNA, 21 nt, Human
uaaaaaaacagcuucugugca

SEQ ID NO: 1238907 - RNA, 24 nt, Human
uaagaacuuuccacagccuauaac

SEQ ID NO: 1238908 - RNA, 21 nt, Human
uccuugagggaaggaaaagaa

SEQ ID NO: 1238909 - RNA, 21 nt, Human
uggauagaagagaccacaguu

SEQ ID NO: 1238910 - RNA, 26 nt, Human
agaguucccauuggauuccuccacuc

SEQ ID NO: 1238911 - RNA, 19 nt, Human
caaaaaaccagccccugga

SEQ ID NO: 1238912 - RNA, 20 nt, Human
cagaguucccauuggauucc

SEQ ID NO: 1238913 - RNA, 19 nt, Human
cagccuccaggguuaauca

SEQ ID NO: 1238914 - RNA, 19 nt, Human
ccuagaccaaggcagccuc

SEQ ID NO: 1238915 - RNA, 23 nt, Human
ggguaguagagucuuggccagag

SEQ ID NO: 1238916 - RNA, 21 nt, Human
uaggagagauuaucuucacuc

SEQ ID NO: 1238917 - RNA, 26 nt, Human
uaggagagauuaucuucacucuuguu

SEQ ID NO: 1238918 - RNA, 23 nt, Human
uccacuccuggauuucucagaua

SEQ ID NO: 1238919 - RNA, 24 nt, Human
uggauuccuccacuccuggauuuc

SEQ ID NO: 1238920 - RNA, 25 nt, Human
uggccagaguucccauuggauuccu

SEQ ID NO: 1238921 - RNA, 21 nt, Human
uucaaaaaaccagccccugga

SEQ ID NO: 1238922 - RNA, 20 nt, Human
uucuucuuuuggugucuggg

SEQ ID NO: 1238923 - RNA, 20 nt, Human
uucuucuuuuggugucuggg

SEQ ID NO: 1238924 - RNA, 22 nt, Human
uucuucuuuuggugucugggua

SEQ ID NO: 1238925 - RNA, 26 nt, Human
uuuggugucuggguaguagagucuug

SEQ ID NO: 1238926 - RNA, 24 nt, Human
aaaauucugggauuacaggcguga

SEQ ID NO: 1238927 - RNA, 23 nt, Human
aaacaccacaaaucuaccaucuu

SEQ ID NO: 1238928 - RNA, 24 nt, Human
aaagugcugggauuacaggcguga

SEQ ID NO: 1238929 - RNA, 21 nt, Human
aacaccacaaaucuaccaucu

SEQ ID NO: 1238930 - RNA, 19 nt, Human
aagaguuagagaucagccu

SEQ ID NO: 1238931 - RNA, 25 nt, Human
aagcgauccucccaccucagccucc

SEQ ID NO: 1238932 - RNA, 19 nt, Human
aagugcugggauuacaggc

SEQ ID NO: 1238933 - RNA, 19 nt, Human
aagugcugggauuacaggc

SEQ ID NO: 1238934 - RNA, 26 nt, Human
aagugcugggauuacaggcgugagcc

SEQ ID NO: 1238935 - RNA, 22 nt, Human
acaaccuccaccucccggguuc

SEQ ID NO: 1238936 - RNA, 21 nt, Human
acagaaugugcuccuuugccu

SEQ ID NO: 1238937 - RNA, 21 nt, Human
acaggcacccaccaccacacc

SEQ ID NO: 1238938 - RNA, 24 nt, Human
acaggcgugagcaacuguaacaug

SEQ ID NO: 1238939 - RNA, 24 nt, Human
accaucuuggcuaggcuggucuug

SEQ ID NO: 1238940 - RNA, 23 nt, Human
accauguuggucaggcuggucuc

SEQ ID NO: 1238941 - RNA, 23 nt, Human
accucagccuccuaaaauucugg

SEQ ID NO: 1238942 - RNA, 26 nt, Human
accucgugacucgauauucaaggcca

SEQ ID NO: 1238943 - RNA, 18 nt, Human
acucuccuaccuccuucu

SEQ ID NO: 1238944 - RNA, 22 nt, Human
agaggaaggauugcuugaggcc

SEQ ID NO: 1238945 - RNA, 21 nt, Human
agcugccagagaaagcaacca

SEQ ID NO: 1238946 - RNA, 22 nt, Human
agcugccagagaaagcaaccac

SEQ ID NO: 1238947 - RNA, 23 nt, Human
agcuggacauggugaugcacgcc

SEQ ID NO: 1238948 - RNA, 20 nt, Human
aggaaggauugcuugaggcc

SEQ ID NO: 1238949 - RNA, 21 nt, Human
aggagcugcauuccuucuggg

SEQ ID NO: 1238950 - RNA, 19 nt, Human
aggaggagggcuagcugcc

SEQ ID NO: 1238951 - RNA, 20 nt, Human
aggcuaaggugggaggauug

SEQ ID NO: 1238952 - RNA, 22 nt, Human
aggucuuauuauguugcccagg

SEQ ID NO: 1238953 - RNA, 22 nt, Human
aguagaaaugggguuucaccau

SEQ ID NO: 1238954 - RNA, 23 nt, Human
aguagcuggaauuauagggaugu

SEQ ID NO: 1238955 - RNA, 18 nt, Human
aguagcugggauuacagg

SEQ ID NO: 1238956 - RNA, 18 nt, Human
agugcugggauuacaggc

SEQ ID NO: 1238957 - RNA, 24 nt, Human
augauccacccuccucggccuccc

SEQ ID NO: 1238958 - RNA, 20 nt, Human
augggguuucaccaucuugg

SEQ ID NO: 1238959 - RNA, 22 nt, Human
augggguuucaccaucuuggcu

SEQ ID NO: 1238960 - RNA, 24 nt, Human
augggguuucaccaucuuggcuag

SEQ ID NO: 1238961 - RNA, 21 nt, Human
augggguuucaccauguuggu

SEQ ID NO: 1238962 - RNA, 24 nt, Human
augggguuucaccauguuggucag

SEQ ID NO: 1238963 - RNA, 19 nt, Human
auguugcccaggcuggucu

SEQ ID NO: 1238964 - RNA, 24 nt, Human
auguuuguauuuuuaguagagaug

SEQ ID NO: 1238965 - RNA, 22 nt, Human
auucucugccuccugaguagcu

SEQ ID NO: 1238966 - RNA, 21 nt, Human
auuuuuuguuguugcuacaac

SEQ ID NO: 1238967 - RNA, 26 nt, Human
caaacuccugaccucaagugguccaa

SEQ ID NO: 1238968 - RNA, 24 nt, Human
caaacugcuaggauuacaggagug

SEQ ID NO: 1238969 - RNA, 24 nt, Human
caaagugcugggauuacaggcgug

SEQ ID NO: 1238970 - RNA, 19 nt, Human
caacaaguugggaggccaa

SEQ ID NO: 1238971 - RNA, 23 nt, Human
caaccuccaccucccggguucaa

SEQ ID NO: 1238972 - RNA, 23 nt, Human
caacuaggucuauuaaggcuaaa

SEQ ID NO: 1238973 - RNA, 22 nt, Human
caagcaauucuccugccucggc

SEQ ID NO: 1238974 - RNA, 19 nt, Human
caagugauucucugccucc

SEQ ID NO: 1238975 - RNA, 20 nt, Human
caagugguccaugugccuca

SEQ ID NO: 1238976 - RNA, 22 nt, Human
caagugguccaugugccucagc

SEQ ID NO: 1238977 - RNA, 21 nt, Human
caccaucuuggcuaggcuggu

SEQ ID NO: 1238978 - RNA, 24 nt, Human
caccaucuuggcuaggcuggucuu

SEQ ID NO: 1238979 - RNA, 21 nt, Human
caccauguuggucaggcuggu

SEQ ID NO: 1238980 - RNA, 24 nt, Human
caccauguuggucaggcuggucuc

SEQ ID NO: 1238981 - RNA, 18 nt, Human
cacccaccaccacaccug

SEQ ID NO: 1238982 - RNA, 18 nt, Human
cacgccuguaguuccagc

SEQ ID NO: 1238983 - RNA, 21 nt, Human
cacuacaaccuccaccucccg

SEQ ID NO: 1238984 - RNA, 23 nt, Human
cacugcaaugucugccuuuuggg

SEQ ID NO: 1238985 - RNA, 21 nt, Human
cagcuucuagaagccaccccu

SEQ ID NO: 1238986 - RNA, 22 nt, Human
caguucugggggccagaagccc

SEQ ID NO: 1238987 - RNA, 24 nt, Human
caucuguaaucccaacaaguuggg

SEQ ID NO: 1238988 - RNA, 20 nt, Human
ccaaagugcugggauuacag

SEQ ID NO: 1238989 - RNA, 22 nt, Human
ccaaagugcugggauuacaggc

SEQ ID NO: 1238990 - RNA, 22 nt, Human
ccaaagugcugggauuacaggc

SEQ ID NO: 1238991 - RNA, 24 nt, Human
ccaaagugcugggauuacaggcgu

SEQ ID NO: 1238992 - RNA, 19 nt, Human
ccaccccuauuccuugacu

SEQ ID NO: 1238993 - RNA, 26 nt, Human
ccaccucccggguucaagcaauucuu

SEQ ID NO: 1238994 - RNA, 19 nt, Human
ccacugcaccuggccccaa

SEQ ID NO: 1238995 - RNA, 24 nt, Human
cccaucuguaaucccaacaaguug

SEQ ID NO: 1238996 - RNA, 19 nt, Human
cccgaguagcuggaauuau

SEQ ID NO: 1238997 - RNA, 23 nt, Human
cccggguucaagcaauucuccug

SEQ ID NO: 1238998 - RNA, 25 nt, Human
ccuaaaauucugggauuacaggcgu

SEQ ID NO: 1238999 - RNA, 25 nt, Human
ccucaccugcugaacuccaggaggc

SEQ ID NO: 1239000 - RNA, 21 nt, Human
ccucaugauccacccuccucg

SEQ ID NO: 1239001 - RNA, 23 nt, Human
ccucccaccucagccuccuaaaa

SEQ ID NO: 1239002 - RNA, 24 nt, Human
ccucccggguucaagcaauucucc

SEQ ID NO: 1239003 - RNA, 25 nt, Human
ccuccuaaaauucugggauuacagg

SEQ ID NO: 1239004 - RNA, 18 nt, Human
ccucucugaccucuucuu

SEQ ID NO: 1239005 - RNA, 21 nt, Human
ccugaccucaagugguccaug

SEQ ID NO: 1239006 - RNA, 23 nt, Human
ccugaguagcugggauuacaggc

SEQ ID NO: 1239007 - RNA, 24 nt, Human
ccugaguagcugggauuacaggca

SEQ ID NO: 1239008 - RNA, 23 nt, Human
ccugccucggccucccgaguagc

SEQ ID NO: 1239009 - RNA, 18 nt, Human
ccugggcuuaagcgaucc

SEQ ID NO: 1239010 - RNA, 22 nt, Human
ccuguaguuccagcuacugggg

SEQ ID NO: 1239011 - RNA, 21 nt, Human
ccuuuuggguucaagugauuc

SEQ ID NO: 1239012 - RNA, 22 nt, Human
cgccuguaguuccagcuacugg

SEQ ID NO: 1239013 - RNA, 23 nt, Human
cgccuguaguuccagcuacuggg

SEQ ID NO: 1239014 - RNA, 24 nt, Human
cuaaaauucugggauuacaggcgu

SEQ ID NO: 1239015 - RNA, 18 nt, Human
cuacaaccuccaccuccc

SEQ ID NO: 1239016 - RNA, 23 nt, Human
cuacaaccuccaccucccggguu

SEQ ID NO: 1239017 - RNA, 23 nt, Human
cucaagugguccaugugccucag

SEQ ID NO: 1239018 - RNA, 19 nt, Human
cucaccugcugaacuccag

SEQ ID NO: 1239019 - RNA, 24 nt, Human
cucacuacaaccuccaccucccgg

SEQ ID NO: 1239020 - RNA, 25 nt, Human
cucacuacaaccuccaccucccggg

SEQ ID NO: 1239021 - RNA, 19 nt, Human
cucacugcaaugucugccu

SEQ ID NO: 1239022 - RNA, 25 nt, Human
cucagccuccuaaaauucugggauu

SEQ ID NO: 1239023 - RNA, 23 nt, Human
cuccugggcuuaagcgauccucc

SEQ ID NO: 1239024 - RNA, 18 nt, Human
cucuuguagcccaggcug

SEQ ID NO: 1239025 - RNA, 19 nt, Human
cucuuguagcccaggcugg

SEQ ID NO: 1239026 - RNA, 22 nt, Human
cucuuguagcccaggcuggagu

SEQ ID NO: 1239027 - RNA, 23 nt, Human
cugaguagcugggauuacaggca

SEQ ID NO: 1239028 - RNA, 23 nt, Human
cugccucggccucccgaguagcu

SEQ ID NO: 1239029 - RNA, 23 nt, Human
cugccuuuuggguucaagugauu

SEQ ID NO: 1239030 - RNA, 23 nt, Human
cugggggccagaagcccaacuag

SEQ ID NO: 1239031 - RNA, 24 nt, Human
cuuaagcgauccucccaccucagc

SEQ ID NO: 1239032 - RNA, 21 nt, Human
cuuccaaacugcuaggauuac

SEQ ID NO: 1239033 - RNA, 19 nt, Human
cuuguagcccaggcuggag

SEQ ID NO: 1239034 - RNA, 24 nt, Human
cuuguagcccaggcuggagugcaa

SEQ ID NO: 1239035 - RNA, 25 nt, Human
cuuucagccucaccugcugaacucc

SEQ ID NO: 1239036 - RNA, 24 nt, Human
gaaaugggguuucaccauguuggu

SEQ ID NO: 1239037 - RNA, 24 nt, Human
gaccucaagugguccaugugccuc

SEQ ID NO: 1239038 - RNA, 22 nt, Human
gaccucaugauccacccuccuc

SEQ ID NO: 1239039 - RNA, 21 nt, Human
gaccucuucuuccauuaccac

SEQ ID NO: 1239040 - RNA, 18 nt, Human
gagaugggguuucaccau

SEQ ID NO: 1239041 - RNA, 24 nt, Human
gagaugggguuucaccaucuuggc

SEQ ID NO: 1239042 - RNA, 25 nt, Human
gaguagcugggauuacaggcaccca

SEQ ID NO: 1239043 - RNA, 21 nt, Human
gagugcaauggcacaaucuca

SEQ ID NO: 1239044 - RNA, 18 nt, Human
gauuacaggagugagcca

SEQ ID NO: 1239045 - RNA, 22 nt, Human
gauuacaggagugagccacugc

SEQ ID NO: 1239046 - RNA, 23 nt, Human
gauuacaggagugagccacugca

SEQ ID NO: 1239047 - RNA, 21 nt, Human
gauuacaggcgugagcaacug

SEQ ID NO: 1239048 - RNA, 22 nt, Human
gauuacaggcgugagcaacugu

SEQ ID NO: 1239049 - RNA, 18 nt, Human
gauuacaggcgugagcca

SEQ ID NO: 1239050 - RNA, 22 nt, Human
gauuacaggcgugagccacugc

SEQ ID NO: 1239051 - RNA, 22 nt, Human
gauuacaggcgugagccacugc

SEQ ID NO: 1239052 - RNA, 23 nt, Human
gauugcuugaggccaagaguuag

SEQ ID NO: 1239053 - RNA, 19 nt, Human
gcaucaaacaccacaaauc

SEQ ID NO: 1239054 - RNA, 19 nt, Human
gcccaggcuggagugcaau

SEQ ID NO: 1239055 - RNA, 23 nt, Human
gcccaggcuggagugcaauggca

SEQ ID NO: 1239056 - RNA, 21 nt, Human
gccucggccucccgaguagcu

SEQ ID NO: 1239057 - RNA, 23 nt, Human
gcuacaacaaaguacccuacauu

SEQ ID NO: 1239058 - RNA, 20 nt, Human
gcucacugcaaugucugccu

SEQ ID NO: 1239059 - RNA, 24 nt, Human
gcucuuguagcccaggcuggagug

SEQ ID NO: 1239060 - RNA, 19 nt, Human
gcuggagugcaauggcaca

SEQ ID NO: 1239061 - RNA, 23 nt, Human
gcuggucucaaacuccugaccuc

SEQ ID NO: 1239062 - RNA, 24 nt, Human
ggacauggugaugcacgccuguag

SEQ ID NO: 1239063 - RNA, 22 nt, Human
ggaugcuguugagcuaacaggg

SEQ ID NO: 1239064 - RNA, 22 nt, Human
ggauuacaggagugagccacug

SEQ ID NO: 1239065 - RNA, 21 nt, Human
ggccaaagaggaaggauugcu

SEQ ID NO: 1239066 - RNA, 24 nt, Human
ggcuggucucaaacuccugaccuc

SEQ ID NO: 1239067 - RNA, 24 nt, Human
ggcuggucuugaacuucugaccuc

SEQ ID NO: 1239068 - RNA, 20 nt, Human
gggaaaauaggaagacccug

SEQ ID NO: 1239069 - RNA, 21 nt, Human
ggggaggcucuagacagaaug

SEQ ID NO: 1239070 - RNA, 19 nt, Human
gggguuucaccaucuuggc

SEQ ID NO: 1239071 - RNA, 22 nt, Human
gggguuucaccauguuggucag

SEQ ID NO: 1239072 - RNA, 19 nt, Human
ggguucaagugauucucug

SEQ ID NO: 1239073 - RNA, 19 nt, Human
gguccaugugccucagccu

SEQ ID NO: 1239074 - RNA, 22 nt, Human
ggucuugaacuucugaccucau

SEQ ID NO: 1239075 - RNA, 24 nt, Human
ggugaugcacgccuguaguuccag

SEQ ID NO: 1239076 - RNA, 19 nt, Human
gugccucagccuuccaaac

SEQ ID NO: 1239077 - RNA, 24 nt, Human
gugguccaugugccucagccuucc

SEQ ID NO: 1239078 - RNA, 22 nt, Human
guugcuacaacaaaguacccua

SEQ ID NO: 1239079 - RNA, 20 nt, Human
uaagcgauccucccaccuca

SEQ ID NO: 1239080 - RNA, 27 nt, Human
uaagcgauccucccaccucagccuccu

SEQ ID NO: 1239081 - RNA, 21 nt, Human
uaagcuccugggcuuaagcga

SEQ ID NO: 1239082 - RNA, 18 nt, Human
uaaggugggaggauugcu

SEQ ID NO: 1239083 - RNA, 24 nt, Human
uaauguuuguauuuuuaguagaga

SEQ ID NO: 1239084 - RNA, 22 nt, Human
uacaggagugagccacugcacc

SEQ ID NO: 1239085 - RNA, 22 nt, Human
uacaggagugagccacugcacc

SEQ ID NO: 1239086 - RNA, 23 nt, Human
uacaggagugagccacugcaccu

SEQ ID NO: 1239087 - RNA, 23 nt, Human
uacaggagugagccacugcaccu

SEQ ID NO: 1239088 - RNA, 23 nt, Human
uacaggcgugagccacugcgucu

SEQ ID NO: 1239089 - RNA, 22 nt, Human
uagaaaugggguuucaccaugu

SEQ ID NO: 1239090 - RNA, 18 nt, Human
uagcccaggcuggagugc

SEQ ID NO: 1239091 - RNA, 22 nt, Human
uaggauuacaggagugagccac

SEQ ID NO: 1239092 - RNA, 22 nt, Human
uaggauuacaggagugagccac

SEQ ID NO: 1239093 - RNA, 24 nt, Human
uaggauuacaggagugagccacug

SEQ ID NO: 1239094 - RNA, 24 nt, Human
uaguagaaaugggguuucaccaug

SEQ ID NO: 1239095 - RNA, 26 nt, Human
uaguagaaaugggguuucaccauguu

SEQ ID NO: 1239096 - RNA, 19 nt, Human
uaguagagaugggguuuca

SEQ ID NO: 1239097 - RNA, 23 nt, Human
uaguagagaugggguuucaccau

SEQ ID NO: 1239098 - RNA, 26 nt, Human
uaguagagaugggguuucaccaucuu

SEQ ID NO: 1239099 - RNA, 23 nt, Human
uauguugcccaggcuggucuuaa

SEQ ID NO: 1239100 - RNA, 24 nt, Human
uauguugcccaggcuggucuuaag

SEQ ID NO: 1239101 - RNA, 22 nt, Human
uauuauguugcccaggcugguc

SEQ ID NO: 1239102 - RNA, 24 nt, Human
ucacuacaaccuccaccucccggg

SEQ ID NO: 1239103 - RNA, 25 nt, Human
ucacuacaaccuccaccucccgggu

SEQ ID NO: 1239104 - RNA, 27 nt, Human
ucacuacaaccuccaccucccggguuc

SEQ ID NO: 1239105 - RNA, 24 nt, Human
ucacugcaaugucugccuuuuggg

SEQ ID NO: 1239106 - RNA, 27 nt, Human
ucacuuucucuaauucugacucuccua

SEQ ID NO: 1239107 - RNA, 21 nt, Human
uccacccuccucggccuccca

SEQ ID NO: 1239108 - RNA, 24 nt, Human
ucccaaagugcugggauuacaggc

SEQ ID NO: 1239109 - RNA, 24 nt, Human
ucccagcuucuagaagccaccccc

SEQ ID NO: 1239110 - RNA, 21 nt, Human
ucccggguucaagcaauucuc

SEQ ID NO: 1239111 - RNA, 24 nt, Human
ucccggguucaagcaauucuccug

SEQ ID NO: 1239112 - RNA, 25 nt, Human
ucccucucugaccucuucuuccauu

SEQ ID NO: 1239113 - RNA, 24 nt, Human
uccuaaaauucugggauuacaggc

SEQ ID NO: 1239114 - RNA, 25 nt, Human
uccuaaaauucugggauuacaggcg

SEQ ID NO: 1239115 - RNA, 20 nt, Human
uccucccaccucagccuccc

SEQ ID NO: 1239116 - RNA, 21 nt, Human
uccucggccucccaaagugcu

SEQ ID NO: 1239117 - RNA, 24 nt, Human
uccugaguagcugggauuacaggc

SEQ ID NO: 1239118 - RNA, 21 nt, Human
uccugggcuuaagcgauccuc

SEQ ID NO: 1239119 - RNA, 24 nt, Human
uccugggcuuaagcgauccuccca

SEQ ID NO: 1239120 - RNA, 23 nt, Human
ucggccucccgaguagcuggaau

SEQ ID NO: 1239121 - RNA, 21 nt, Human
ucuagaagccaccccuauucc

SEQ ID NO: 1239122 - RNA, 24 nt, Human
ucucaaacuccugaccucaagugg

SEQ ID NO: 1239123 - RNA, 23 nt, Human
ucuccuaccuccuucucuuauaa

SEQ ID NO: 1239124 - RNA, 19 nt, Human
ucucggucgcccaggcuaa

SEQ ID NO: 1239125 - RNA, 21 nt, Human
ucucuaauucugacucuccua

SEQ ID NO: 1239126 - RNA, 18 nt, Human
ucucugaccucuucuucc

SEQ ID NO: 1239127 - RNA, 19 nt, Human
ucucuuauaaagauccuug

SEQ ID NO: 1239128 - RNA, 23 nt, Human
ucuuauuauguugcccaggcugg

SEQ ID NO: 1239129 - RNA, 24 nt, Human
ucuuauuauguugcccaggcuggu

SEQ ID NO: 1239130 - RNA, 18 nt, Human
ucuuguagcccaggcugg

SEQ ID NO: 1239131 - RNA, 24 nt, Human
ugaccucaagugguccaugugccu

SEQ ID NO: 1239132 - RNA, 24 nt, Human
ugaggucuuauuauguugcccagg

SEQ ID NO: 1239133 - RNA, 18 nt, Human
ugaugcacgccuguaguu

SEQ ID NO: 1239134 - RNA, 20 nt, Human
ugaugcacgccuguaguucc

SEQ ID NO: 1239135 - RNA, 24 nt, Human
ugcccaggcuggucuuaagcuccu

SEQ ID NO: 1239136 - RNA, 28 nt, Human
ugcccaggcuggucuuaagcuccugggc

SEQ ID NO: 1239137 - RNA, 24 nt, Human
ugccucagccuuccaaacugcuag

SEQ ID NO: 1239138 - RNA, 20 nt, Human
ugccucggccucccgaguaa

SEQ ID NO: 1239139 - RNA, 21 nt, Human
ugccucggccucccgaguagc

SEQ ID NO: 1239140 - RNA, 24 nt, Human
ugccucggccucccgaguagcugg

SEQ ID NO: 1239141 - RNA, 22 nt, Human
ugccuuuuggguucaagugauu

SEQ ID NO: 1239142 - RNA, 24 nt, Human
ugcugggauuacaggcgugagcca

SEQ ID NO: 1239143 - RNA, 24 nt, Human
uggagugcaauggcacaaucucag

SEQ ID NO: 1239144 - RNA, 24 nt, Human
uggcacaaucucagcucacuacaa

SEQ ID NO: 1239145 - RNA, 24 nt, Human
uggcuaggcuggucuugaacuucu

SEQ ID NO: 1239146 - RNA, 22 nt, Human
ugggaggccaaagaggaaggau

SEQ ID NO: 1239147 - RNA, 19 nt, Human
ugggauuacaggcacccac

SEQ ID NO: 1239148 - RNA, 21 nt, Human
ugggauuacaggcacccacca

SEQ ID NO: 1239149 - RNA, 24 nt, Human
ugggauuacaggcacccaccacca

SEQ ID NO: 1239150 - RNA, 18 nt, Human
ugggauuacaggcgugag

SEQ ID NO: 1239151 - RNA, 18 nt, Human
ugggauuacaggcgugag

SEQ ID NO: 1239152 - RNA, 19 nt, Human
ugggauuacaggcgugagc

SEQ ID NO: 1239153 - RNA, 19 nt, Human
ugggauuacaggcgugagc

SEQ ID NO: 1239154 - RNA, 19 nt, Human
ugggauuacaggcgugagc

SEQ ID NO: 1239155 - RNA, 20 nt, Human
ugggauuacaggcgugagca

SEQ ID NO: 1239156 - RNA, 22 nt, Human
ugggauuacaggcgugagcaac

SEQ ID NO: 1239157 - RNA, 23 nt, Human
ugggauuacaggcgugagcaacu

SEQ ID NO: 1239158 - RNA, 24 nt, Human
ugggauuacaggcgugagcaacug

SEQ ID NO: 1239159 - RNA, 27 nt, Human
ugggauuacaggcgugagcaacuguaa

SEQ ID NO: 1239160 - RNA, 21 nt, Human
ugggauuacaggcgugagcca

SEQ ID NO: 1239161 - RNA, 22 nt, Human
ugggauuacaggcgugagccac

SEQ ID NO: 1239162 - RNA, 22 nt, Human
ugggauuacaggcgugagccac

SEQ ID NO: 1239163 - RNA, 24 nt, Human
ugggauuacaggcgugagccacug

SEQ ID NO: 1239164 - RNA, 24 nt, Human
ugggauuacaggcgugagccacug

SEQ ID NO: 1239165 - RNA, 25 nt, Human
ugggggaggcucuagacagaaugug

SEQ ID NO: 1239166 - RNA, 24 nt, Human
ugggggcucccaucuguaauccca

SEQ ID NO: 1239167 - RNA, 24 nt, Human
ugggguuucaccaucuuggcuagg

SEQ ID NO: 1239168 - RNA, 24 nt, Human
ugggguuucaccauguuggucagg

SEQ ID NO: 1239169 - RNA, 18 nt, Human
uggguucaagugauucuc

SEQ ID NO: 1239170 - RNA, 20 nt, Human
uggguucaagugauucucuu

SEQ ID NO: 1239171 - RNA, 24 nt, Human
uggucaggcuggucucaaacuccu

SEQ ID NO: 1239172 - RNA, 20 nt, Human
ugguccaugugccucagccu

SEQ ID NO: 1239173 - RNA, 24 nt, Human
uggugaugcacgccuguaguucca

SEQ ID NO: 1239174 - RNA, 21 nt, Human
ugugauugguggguauggggg

SEQ ID NO: 1239175 - RNA, 21 nt, Human
ugugcuccuuugccuuuccca

SEQ ID NO: 1239176 - RNA, 21 nt, Human
uguuuguauuuuuaguagaga

SEQ ID NO: 1239177 - RNA, 18 nt, Human
uuaaggcuaaagucaagg

SEQ ID NO: 1239178 - RNA, 18 nt, Human
uuaguagaaaugggguuu

SEQ ID NO: 1239179 - RNA, 22 nt, Human
uuaguagaaaugggguuucacc

SEQ ID NO: 1239180 - RNA, 24 nt, Human
uuaguagaaaugggguuucaccau

SEQ ID NO: 1239181 - RNA, 18 nt, Human
uuaguagagaugggguuu

SEQ ID NO: 1239182 - RNA, 22 nt, Human
uuaguagagaugggguuucacc

SEQ ID NO: 1239183 - RNA, 24 nt, Human
uuaguagagaugggguuucaccau

SEQ ID NO: 1239184 - RNA, 23 nt, Human
uuauagggaugucucacaacgcc

SEQ ID NO: 1239185 - RNA, 21 nt, Human
uucaagcaauucuccugccuc

SEQ ID NO: 1239186 - RNA, 24 nt, Human
uucaagcaauucuccugccucggc

SEQ ID NO: 1239187 - RNA, 22 nt, Human
uucaggaggagggcuagcugcc

SEQ ID NO: 1239188 - RNA, 20 nt, Human
uugaggccaagaguuagaga

SEQ ID NO: 1239189 - RNA, 23 nt, Human
uuguauuuuuaguagagaugggg

SEQ ID NO: 1239190 - RNA, 24 nt, Human
uuucaccaucuuggcuaggcuggu

SEQ ID NO: 1239191 - RNA, 24 nt, Human
uuucaccauguuggucaggcuggu

SEQ ID NO: 1239192 - RNA, 22 nt, Human
uuugccuuucccagcuucuaga

SEQ ID NO: 1239193 - RNA, 24 nt, Human
uuuggcucuuguagcccaggcugg

SEQ ID NO: 1239194 - RNA, 18 nt, Human
uuuguauuuuuaguagag

SEQ ID NO: 1239195 - RNA, 18 nt, Human
uuuuguuguugcuacaac

SEQ ID NO: 1239196 - RNA, 24 nt, Human
uuuuuaguagaaaugggguuucac

SEQ ID NO: 1239197 - RNA, 24 nt, Human
uuuuuaguagagaugggguuucac

SEQ ID NO: 1239198 - RNA, 24 nt, Human
uuuuugaggcuuggaacuuucagc

SEQ ID NO: 1239199 - RNA, 24 nt, Human
uuuuuuuuuuuaaacggaguuugg

SEQ ID NO: 1239200 - RNA, 23 nt, Human
aaacaauaccaucccauauugca

SEQ ID NO: 1239201 - RNA, 23 nt, Human
aaacugccauccacaaauaaacu

SEQ ID NO: 1239202 - RNA, 24 nt, Human
aaagugcugggauuacagguguga

SEQ ID NO: 1239203 - RNA, 24 nt, Human
aagcaauucuccugcuuuggccuc

SEQ ID NO: 1239204 - RNA, 18 nt, Human
aagugcugggauuacagg

SEQ ID NO: 1239205 - RNA, 19 nt, Human
aagugcugggauuacaggu

SEQ ID NO: 1239206 - RNA, 26 nt, Human
aagugcugggauuacaggugugagcc

SEQ ID NO: 1239207 - RNA, 20 nt, Human
aaugcaguggugcgaucuug

SEQ ID NO: 1239208 - RNA, 24 nt, Human
aaugcaguggugcgaucuugguuc

SEQ ID NO: 1239209 - RNA, 21 nt, Human
acacaaucccagacaacccca

SEQ ID NO: 1239210 - RNA, 20 nt, Human
acagaaaacugccauccaca

SEQ ID NO: 1239211 - RNA, 18 nt, Human
acaggguuucaccauguu

SEQ ID NO: 1239212 - RNA, 21 nt, Human
acaggguuucaccauguuggc

SEQ ID NO: 1239213 - RNA, 24 nt, Human
acaggguuucaccauguuggccag

SEQ ID NO: 1239214 - RNA, 24 nt, Human
accauguuggccaggcuggucucg

SEQ ID NO: 1239215 - RNA, 19 nt, Human
agaaaagaagcuucccaag

SEQ ID NO: 1239216 - RNA, 23 nt, Human
agaacagaaaagaagcuucccaa

SEQ ID NO: 1239217 - RNA, 20 nt, Human
agaagcuucccaagaggcac

SEQ ID NO: 1239218 - RNA, 24 nt, Human
agagggagucucgcucuauugcuu

SEQ ID NO: 1239219 - RNA, 18 nt, Human
agcaauucuccugcuuug

SEQ ID NO: 1239220 - RNA, 24 nt, Human
aggaagcaaaaauaaacuugcaag

SEQ ID NO: 1239221 - RNA, 20 nt, Human
aggcacucauuuuaaaaaua

SEQ ID NO: 1239222 - RNA, 23 nt, Human
aguagcugggauuacaggcacau

SEQ ID NO: 1239223 - RNA, 23 nt, Human
aguagcugggauuacaggcacau

SEQ ID NO: 1239224 - RNA, 19 nt, Human
agugauccacccaccucag

SEQ ID NO: 1239225 - RNA, 18 nt, Human
caaaaauaaacuugcaag

SEQ ID NO: 1239226 - RNA, 21 nt, Human
caaaacaauccaagagcuacc

SEQ ID NO: 1239227 - RNA, 24 nt, Human
caaagugcugggauuacaggugug

SEQ ID NO: 1239228 - RNA, 23 nt, Human
caaccuccaccucccggguucaa

SEQ ID NO: 1239229 - RNA, 22 nt, Human
caagcaauucuccugcuuuggc

SEQ ID NO: 1239230 - RNA, 19 nt, Human
caagugauccacccaccuc

SEQ ID NO: 1239231 - RNA, 20 nt, Human
cacacaaucccagacaaccc

SEQ ID NO: 1239232 - RNA, 21 nt, Human
caccauguuggccaggcuggu

SEQ ID NO: 1239233 - RNA, 24 nt, Human
caccauguuggccaggcuggucuc

SEQ ID NO: 1239234 - RNA, 27 nt, Human
caccauguuggccaggcuggucucgaa

SEQ ID NO: 1239235 - RNA, 22 nt, Human
cacccaccucagccucccaaag

SEQ ID NO: 1239236 - RNA, 23 nt, Human
cacccaccucagccucccaaagu

SEQ ID NO: 1239237 - RNA, 24 nt, Human
caccucagccucccaaagugcugg

SEQ ID NO: 1239238 - RNA, 21 nt, Human
cacugcaaccuccaccucccg

SEQ ID NO: 1239239 - RNA, 23 nt, Human
cacugcaaccuccaccucccggg

SEQ ID NO: 1239240 - RNA, 19 nt, Human
cacugcacuggccuaagau

SEQ ID NO: 1239241 - RNA, 23 nt, Human
cagacaaccccaaauaacuuuau

SEQ ID NO: 1239242 - RNA, 21 nt, Human
caggcacaugcaccaacccug

SEQ ID NO: 1239243 - RNA, 24 nt, Human
cagggaacuguuagaacagaaaag

SEQ ID NO: 1239244 - RNA, 24 nt, Human
caggguuucaccauguuggccagg

SEQ ID NO: 1239245 - RNA, 24 nt, Human
cauguuggccaggcuggucucgaa

SEQ ID NO: 1239246 - RNA, 21 nt, Human
ccaaagugcugggauuacagg

SEQ ID NO: 1239247 - RNA, 21 nt, Human
ccaaagugcugggauuacagg

SEQ ID NO: 1239248 - RNA, 24 nt, Human
ccaaagugcugggauuacaggugu

SEQ ID NO: 1239249 - RNA, 26 nt, Human
ccacccaccucagccucccaaagugc

SEQ ID NO: 1239250 - RNA, 27 nt, Human
ccaccucccggguucaagcaauucuuu

SEQ ID NO: 1239251 - RNA, 21 nt, Human
ccauccacaaauaaacuacca

SEQ ID NO: 1239252 - RNA, 24 nt, Human
ccauccacaaauaaacuaccaagg

SEQ ID NO: 1239253 - RNA, 21 nt, Human
cccaaaacuacagaaaacugc

SEQ ID NO: 1239254 - RNA, 23 nt, Human
cccggguucaagcaauucuccug

SEQ ID NO: 1239255 - RNA, 24 nt, Human
ccucccggguucaagcaauucucc

SEQ ID NO: 1239256 - RNA, 24 nt, Human
ccugaccucaagugauccacccac

SEQ ID NO: 1239257 - RNA, 23 nt, Human
ccugaguagcugggauuacaggc

SEQ ID NO: 1239258 - RNA, 24 nt, Human
ccugaguagcugggauuacaggca

SEQ ID NO: 1239259 - RNA, 24 nt, Human
cucaagugauccacccaccucagc

SEQ ID NO: 1239260 - RNA, 21 nt, Human
cucgcucuauugcuuaggcug

SEQ ID NO: 1239261 - RNA, 23 nt, Human
cugaguagcugggauuacaggca

SEQ ID NO: 1239262 - RNA, 18 nt, Human
cugcaaccuccaccuccc

SEQ ID NO: 1239263 - RNA, 23 nt, Human
cugcaaccuccaccucccggguu

SEQ ID NO: 1239264 - RNA, 22 nt, Human
cugccauauugaucaaucaugu

SEQ ID NO: 1239265 - RNA, 23 nt, Human
cugcuuuggccuccugaguagcu

SEQ ID NO: 1239266 - RNA, 21 nt, Human
gaaaaaaagcaauuuaaaaac

SEQ ID NO: 1239267 - RNA, 24 nt, Human
gaccucaagugauccacccaccuc

SEQ ID NO: 1239268 - RNA, 23 nt, Human
gagggagucucgcucuauugcuu

SEQ ID NO: 1239269 - RNA, 18 nt, Human
gauuacaggugugagcca

SEQ ID NO: 1239270 - RNA, 22 nt, Human
gauuacaggugugagccacugc

SEQ ID NO: 1239271 - RNA, 23 nt, Human
gauuacaggugugagccacugca

SEQ ID NO: 1239272 - RNA, 22 nt, Human
gcaaccuccaccucccggguuc

SEQ ID NO: 1239273 - RNA, 23 nt, Human
gcuggucucgaacuccugaccuc

SEQ ID NO: 1239274 - RNA, 20 nt, Human
gcuuaggcuggaaugcagug

SEQ ID NO: 1239275 - RNA, 19 nt, Human
ggaaaaacaguucuaaugg

SEQ ID NO: 1239276 - RNA, 24 nt, Human
ggcuggucucgaacuccugaccuc

SEQ ID NO: 1239277 - RNA, 22 nt, Human
ggguuucaccauguuggccagg

SEQ ID NO: 1239278 - RNA, 19 nt, Human
ggucucgaacuccugaccu

SEQ ID NO: 1239279 - RNA, 24 nt, Human
gugauccacccaccucagccuccc

SEQ ID NO: 1239280 - RNA, 18 nt, Human
guuuauuuaagguuuucu

SEQ ID NO: 1239281 - RNA, 22 nt, Human
uaaacaaccauuucauuuuuuc

SEQ ID NO: 1239282 - RNA, 22 nt, Human
uaaauaggaauggcaguaacac

SEQ ID NO: 1239283 - RNA, 19 nt, Human
uaaaugcagaccucucaaa

SEQ ID NO: 1239284 - RNA, 26 nt, Human
uaauuuuucuguauuuuuaguagaga

SEQ ID NO: 1239285 - RNA, 21 nt, Human
uacaggugugagccacugcac

SEQ ID NO: 1239286 - RNA, 21 nt, Human
uacaggugugagccacugcac

SEQ ID NO: 1239287 - RNA, 22 nt, Human
uacaggugugagccacugcacu

SEQ ID NO: 1239288 - RNA, 21 nt, Human
uaccuuaugaaaaaaagcaau

SEQ ID NO: 1239289 - RNA, 22 nt, Human
uagagacaggguuucaccaugu

SEQ ID NO: 1239290 - RNA, 24 nt, Human
uaguagagacaggguuucaccaug

SEQ ID NO: 1239291 - RNA, 25 nt, Human
uaguagagacaggguuucaccaugu

SEQ ID NO: 1239292 - RNA, 18 nt, Human
uauaaaauuaguaaacaa

SEQ ID NO: 1239293 - RNA, 23 nt, Human
uauaucagcaaaggcagaaagaa

SEQ ID NO: 1239294 - RNA, 25 nt, Human
ucaaucaggccagaaauuaucacaa

SEQ ID NO: 1239295 - RNA, 23 nt, Human
ucacugcaaccuccaccucccgg

SEQ ID NO: 1239296 - RNA, 23 nt, Human
ucacugcaaccuccaccucccgg

SEQ ID NO: 1239297 - RNA, 23 nt, Human
ucacugcaaccuccaccucccgg

SEQ ID NO: 1239298 - RNA, 24 nt, Human
ucacugcaaccuccaccucccggg

SEQ ID NO: 1239299 - RNA, 26 nt, Human
ucacugcaaccuccaccucccggguu

SEQ ID NO: 1239300 - RNA, 18 nt, Human
ucagccucccaaagugcu

SEQ ID NO: 1239301 - RNA, 22 nt, Human
ucaucugccauauugaucaauc

SEQ ID NO: 1239302 - RNA, 22 nt, Human
uccaagagcuaccacagucccc

SEQ ID NO: 1239303 - RNA, 21 nt, Human
uccacccaccucagccuccca

SEQ ID NO: 1239304 - RNA, 23 nt, Human
ucccaaagugcugggauuacagg

SEQ ID NO: 1239305 - RNA, 19 nt, Human
uccccaaaacuacagaaaa

SEQ ID NO: 1239306 - RNA, 21 nt, Human
ucccggguucaagcaauucuc

SEQ ID NO: 1239307 - RNA, 24 nt, Human
ucccggguucaagcaauucuccug

SEQ ID NO: 1239308 - RNA, 24 nt, Human
uccugaguagcugggauuacaggc

SEQ ID NO: 1239309 - RNA, 21 nt, Human
ucucgaacuccugaccucaag

SEQ ID NO: 1239310 - RNA, 19 nt, Human
ucucgcucuauugcuuagg

SEQ ID NO: 1239311 - RNA, 23 nt, Human
ucucgcucuauugcuuaggcugg

SEQ ID NO: 1239312 - RNA, 24 nt, Human
ucucgcucuauugcuuaggcugga

SEQ ID NO: 1239313 - RNA, 22 nt, Human
ucuuucacacaaucccagacaa

SEQ ID NO: 1239314 - RNA, 19 nt, Human
ugaaauuucuagaagcuca

SEQ ID NO: 1239315 - RNA, 24 nt, Human
ugauccacccaccucagccuccca

SEQ ID NO: 1239316 - RNA, 24 nt, Human
ugcugggauuacaggugugagcca

SEQ ID NO: 1239317 - RNA, 24 nt, Human
ugcuuaggcuggaaugcaguggug

SEQ ID NO: 1239318 - RNA, 20 nt, Human
ugcuuuggccuccugaguaa

SEQ ID NO: 1239319 - RNA, 24 nt, Human
uggaaugcaguggugcgaucuugg

SEQ ID NO: 1239320 - RNA, 24 nt, Human
uggccaggcuggucucgaacuccu

SEQ ID NO: 1239321 - RNA, 20 nt, Human
uggccuccugaguagcuggg

SEQ ID NO: 1239322 - RNA, 19 nt, Human
ugggauuacaggcacauca

SEQ ID NO: 1239323 - RNA, 23 nt, Human
ugggauuacaggcacaugcacca

SEQ ID NO: 1239324 - RNA, 18 nt, Human
ugggauuacaggugugag

SEQ ID NO: 1239325 - RNA, 19 nt, Human
ugggauuacaggugugagc

SEQ ID NO: 1239326 - RNA, 21 nt, Human
ugggauuacaggugugagcca

SEQ ID NO: 1239327 - RNA, 22 nt, Human
ugggauuacaggugugagccac

SEQ ID NO: 1239328 - RNA, 22 nt, Human
ugggauuacaggugugagccac

SEQ ID NO: 1239329 - RNA, 24 nt, Human
ugggauuacaggugugagccacug

SEQ ID NO: 1239330 - RNA, 18 nt, Human
ugguagauggugccuucu

SEQ ID NO: 1239331 - RNA, 24 nt, Human
uuacaggugugagccacugcacug

SEQ ID NO: 1239332 - RNA, 24 nt, Human
uuaguagagacaggguuucaccau

SEQ ID NO: 1239333 - RNA, 24 nt, Human
uucagcuguaauuugcaaaacaau

SEQ ID NO: 1239334 - RNA, 23 nt, Human
uucagugucugcugaggacccac

SEQ ID NO: 1239335 - RNA, 20 nt, Human
uugguagauggugccuucuc

SEQ ID NO: 1239336 - RNA, 22 nt, Human
uuucacacaaucccagacaacc

SEQ ID NO: 1239337 - RNA, 24 nt, Human
uuucaccauguuggccaggcuggu

SEQ ID NO: 1239338 - RNA, 21 nt, Human
uuucuguauuuuuaguagaga

SEQ ID NO: 1239339 - RNA, 28 nt, Human
uuugcaaaacaauccaagagcuaccacu

SEQ ID NO: 1239340 - RNA, 24 nt, Human
uuuggccuccugaguagcugggau

SEQ ID NO: 1239341 - RNA, 21 nt, Human
uuuucuguauuuuuaguagag

SEQ ID NO: 1239342 - RNA, 24 nt, Human
uuuucuguauuuuuaguagagaca

SEQ ID NO: 1239343 - RNA, 24 nt, Human
uuuuuaguagagacaggguuucac

SEQ ID NO: 1239344 - RNA, 21 nt, Human
aaacaggggccaaaauugaac

SEQ ID NO: 1239345 - RNA, 26 nt, Human
aagccaaggcacaguuugucgaagaa

SEQ ID NO: 1239346 - RNA, 23 nt, Human
aaucauauccaccaaauguugug

SEQ ID NO: 1239347 - RNA, 21 nt, Human
accaggcguccgccgcccccc

SEQ ID NO: 1239348 - RNA, 20 nt, Human
accuagaauggugccugaua

SEQ ID NO: 1239349 - RNA, 22 nt, Human
agcaaaugacaggaaaagucaa

SEQ ID NO: 1239350 - RNA, 19 nt, Human
aguuugucgaagaagucgg

SEQ ID NO: 1239351 - RNA, 20 nt, Human
auaauggaagcaaucauauc

SEQ ID NO: 1239352 - RNA, 23 nt, Human
auggugccugauacagaaagguu

SEQ ID NO: 1239353 - RNA, 22 nt, Human
auugaaaauuucuuaauuacuu

SEQ ID NO: 1239354 - RNA, 24 nt, Human
caaaccccuaagcuuuacuuuccu

SEQ ID NO: 1239355 - RNA, 18 nt, Human
caaauuuuccacagcagc

SEQ ID NO: 1239356 - RNA, 24 nt, Human
cagcaaaugacaggaaaagucaag

SEQ ID NO: 1239357 - RNA, 19 nt, Human
cagcagacgccgauaccac

SEQ ID NO: 1239358 - RNA, 20 nt, Human
cagccccacaacaacggccc

SEQ ID NO: 1239359 - RNA, 19 nt, Human
cagcgccagcgcgcagccc

SEQ ID NO: 1239360 - RNA, 22 nt, Human
caggcguccgccgccccccgga

SEQ ID NO: 1239361 - RNA, 23 nt, Human
cauaacugacucccacuuuacag

SEQ ID NO: 1239362 - RNA, 19 nt, Human
caucaaauuuccuguugcu

SEQ ID NO: 1239363 - RNA, 23 nt, Human
cauuggguggccaacugccauuc

SEQ ID NO: 1239364 - RNA, 23 nt, Human
ccacagcagcuuucaaaaccugu

SEQ ID NO: 1239365 - RNA, 30 nt, Human
ccaccaucugagcacuaauuucuugacuuu

SEQ ID NO: 1239366 - RNA, 23 nt, Human
ccagaggcgguccagcuucuucc

SEQ ID NO: 1239367 - RNA, 20 nt, Human
ccccccggaccaugcuuucc

SEQ ID NO: 1239368 - RNA, 20 nt, Human
cccccggaccaugcuuuccg

SEQ ID NO: 1239369 - RNA, 21 nt, Human
cccccggaccaugcuuuccgc

SEQ ID NO: 1239370 - RNA, 18 nt, Human
ccgccgccccccggacca

SEQ ID NO: 1239371 - RNA, 18 nt, Human
ccgccgccccccggacca

SEQ ID NO: 1239372 - RNA, 21 nt, Human
ccgccgccccccggaccaugc

SEQ ID NO: 1239373 - RNA, 19 nt, Human
cgcgcagccccacaacaac

SEQ ID NO: 1239374 - RNA, 23 nt, Human
cucaaccaccuauuggcuacaca

SEQ ID NO: 1239375 - RNA, 23 nt, Human
cuccagaggcgguccagcuucuu

SEQ ID NO: 1239376 - RNA, 20 nt, Human
cuguugccccuugcuuucaa

SEQ ID NO: 1239377 - RNA, 18 nt, Human
cuuuccucugaagauagg

SEQ ID NO: 1239378 - RNA, 18 nt, Human
gcagccccacaacaacgg

SEQ ID NO: 1239379 - RNA, 18 nt, Human
ggcgguccagcuucuucc

SEQ ID NO: 1239380 - RNA, 18 nt, Human
gguucuauauaaauguau

SEQ ID NO: 1239381 - RNA, 22 nt, Human
guagaagacaaugcauggacaa

SEQ ID NO: 1239382 - RNA, 22 nt, Human
guuccaguuuugaauucucacu

SEQ ID NO: 1239383 - RNA, 23 nt, Human
uaaauccaaugccuccuuccaaa

SEQ ID NO: 1239384 - RNA, 22 nt, Human
uaauaauauugucuuuuggcac

SEQ ID NO: 1239385 - RNA, 21 nt, Human
uacagcaucccgcccugcagc

SEQ ID NO: 1239386 - RNA, 19 nt, Human
uacuccuagaagccaaggc

SEQ ID NO: 1239387 - RNA, 19 nt, Human
uagaagacaaugcauggac

SEQ ID NO: 1239388 - RNA, 19 nt, Human
uaggugcuagaccuuuggc

SEQ ID NO: 1239389 - RNA, 24 nt, Human
ucaaccaccuauuggcuacacaac

SEQ ID NO: 1239390 - RNA, 22 nt, Human
ucagucauuaaauccaaugccu

SEQ ID NO: 1239391 - RNA, 23 nt, Human
ucagucauuaaauccaaugccuc

SEQ ID NO: 1239392 - RNA, 21 nt, Human
ucccgcgacggccucucucuu

SEQ ID NO: 1239393 - RNA, 24 nt, Human
uccgcucccgcgacggccucucuc

SEQ ID NO: 1239394 - RNA, 22 nt, Human
uccuugacuauuuugucuucuu

SEQ ID NO: 1239395 - RNA, 27 nt, Human
ucugugguaccuagaauggugccugau

SEQ ID NO: 1239396 - RNA, 21 nt, Human
ugaagaaacuacuagagccaa

SEQ ID NO: 1239397 - RNA, 18 nt, Human
uggaucaagcaaaucugu

SEQ ID NO: 1239398 - RNA, 25 nt, Human
uuaaacuaguggguucacaaacccc

SEQ ID NO: 1239399 - RNA, 22 nt, Human
uucacaaaccccuaagcuuuac

SEQ ID NO: 1239400 - RNA, 21 nt, Human
uuccucugauauuuuacaaau

SEQ ID NO: 1239401 - RNA, 19 nt, Human
uucucacucaaccaccuau

SEQ ID NO: 1239402 - RNA, 20 nt, Human
uugauuugaagaaacuacua

SEQ ID NO: 1239403 - RNA, 21 nt, Human
uugauuugaagaaacuacuag

SEQ ID NO: 1239404 - RNA, 22 nt, Human
uugucuucuuucaacaaagucu

SEQ ID NO: 1239405 - RNA, 22 nt, Human
uuuccaucaaggagucuacaca

SEQ ID NO: 1239406 - RNA, 20 nt, Human
uuuggcaaacaauggcagca

SEQ ID NO: 1239407 - RNA, 21 nt, Human
uuuucauuuauuccauuaacu

SEQ ID NO: 1239408 - RNA, 24 nt, Human
aaagugcugggauuacaggcguga

SEQ ID NO: 1239409 - RNA, 18 nt, Human
aacagcuccagagaccaa

SEQ ID NO: 1239410 - RNA, 18 nt, Human
aaggauggggugcgaugg

SEQ ID NO: 1239411 - RNA, 25 nt, Human
aagucugggcagaaaccggagccgg

SEQ ID NO: 1239412 - RNA, 19 nt, Human
aagugcugggauuacaggc

SEQ ID NO: 1239413 - RNA, 19 nt, Human
aagugcugggauuacaggc

SEQ ID NO: 1239414 - RNA, 26 nt, Human
aagugcugggauuacaggcgugagcc

SEQ ID NO: 1239415 - RNA, 23 nt, Human
agaacagcuccagagaccagccc

SEQ ID NO: 1239416 - RNA, 22 nt, Human
agagauaggacccaaccaaauc

SEQ ID NO: 1239417 - RNA, 19 nt, Human
agaucccagggugccucuc

SEQ ID NO: 1239418 - RNA, 24 nt, Human
agauggcaagccccggacugaaca

SEQ ID NO: 1239419 - RNA, 23 nt, Human
agcacaagcuccgagcuggcacc

SEQ ID NO: 1239420 - RNA, 24 nt, Human
agcgcagugucgcgaucucggcuc

SEQ ID NO: 1239421 - RNA, 18 nt, Human
aggaagaaggagcccggc

SEQ ID NO: 1239422 - RNA, 20 nt, Human
agggaaggaggaucgcuccc

SEQ ID NO: 1239423 - RNA, 21 nt, Human
agggaggaagaaggagcccgg

SEQ ID NO: 1239424 - RNA, 22 nt, Human
aguagagauuggguuucuccau

SEQ ID NO: 1239425 - RNA, 18 nt, Human
aguagcugggauuauagg

SEQ ID NO: 1239426 - RNA, 19 nt, Human
aucuggggccgagccgcuc

SEQ ID NO: 1239427 - RNA, 24 nt, Human
auuggguuucuccauguuggucag

SEQ ID NO: 1239428 - RNA, 24 nt, Human
auugugugugugugugugugugug

SEQ ID NO: 1239429 - RNA, 24 nt, Human
caaagugcugggauuacaggcgug

SEQ ID NO: 1239430 - RNA, 19 nt, Human
caaauccuuggccucgcca

SEQ ID NO: 1239431 - RNA, 22 nt, Human
caagccccggacugaacauuuu

SEQ ID NO: 1239432 - RNA, 21 nt, Human
caagcgcccccaucacucuuu

SEQ ID NO: 1239433 - RNA, 19 nt, Human
caagcuccgagcuggcacc

SEQ ID NO: 1239434 - RNA, 21 nt, Human
caagugucccucuucuagucc

SEQ ID NO: 1239435 - RNA, 26 nt, Human
cacagcacaagcuccgagcuggcacc

SEQ ID NO: 1239436 - RNA, 21 nt, Human
caccccuccccagucggcucg

SEQ ID NO: 1239437 - RNA, 18 nt, Human
caccgggaaaacugccga

SEQ ID NO: 1239438 - RNA, 23 nt, Human
cacgcccaggcauccacuuggcc

SEQ ID NO: 1239439 - RNA, 24 nt, Human
cacuacgcccggcuaauuuuugua

SEQ ID NO: 1239440 - RNA, 18 nt, Human
cagaacagcuccagagaa

SEQ ID NO: 1239441 - RNA, 18 nt, Human
cagaacagcuccagagac

SEQ ID NO: 1239442 - RNA, 24 nt, Human
cagagauaggacccaaccaaaucc

SEQ ID NO: 1239443 - RNA, 24 nt, Human
cagcccuggguccccaucuguccu

SEQ ID NO: 1239444 - RNA, 19 nt, Human
caggaccugccgcgagccc

SEQ ID NO: 1239445 - RNA, 22 nt, Human
cauaaaaggaccuagacgucca

SEQ ID NO: 1239446 - RNA, 24 nt, Human
cauguuggucaggcuggucuugaa

SEQ ID NO: 1239447 - RNA, 20 nt, Human
ccaaagugcugggauuacag

SEQ ID NO: 1239448 - RNA, 22 nt, Human
ccaaagugcugggauuacaggc

SEQ ID NO: 1239449 - RNA, 22 nt, Human
ccaaagugcugggauuacaggc

SEQ ID NO: 1239450 - RNA, 24 nt, Human
ccaaagugcugggauuacaggcgu

SEQ ID NO: 1239451 - RNA, 22 nt, Human
ccaacccugcggcucccucugu

SEQ ID NO: 1239452 - RNA, 22 nt, Human
ccacaccccuccccagucggcu

SEQ ID NO: 1239453 - RNA, 21 nt, Human
ccagacagccugcuuugcggg

SEQ ID NO: 1239454 - RNA, 19 nt, Human
ccauguuggucaggcuggu

SEQ ID NO: 1239455 - RNA, 21 nt, Human
ccauguuggucaggcuggucu

SEQ ID NO: 1239456 - RNA, 21 nt, Human
cccaaccaaauccuuggccuc

SEQ ID NO: 1239457 - RNA, 20 nt, Human
ccccaucuguccuccccucc

SEQ ID NO: 1239458 - RNA, 25 nt, Human
ccccgcgcccaagccccggugccuc

SEQ ID NO: 1239459 - RNA, 22 nt, Human
ccccuccaagcugguagcuccc

SEQ ID NO: 1239460 - RNA, 23 nt, Human
cccgaguagcugggauuauaggc

SEQ ID NO: 1239461 - RNA, 24 nt, Human
cccgaguagcugggauuauaggcg

SEQ ID NO: 1239462 - RNA, 23 nt, Human
cccggguucaagcuauuuuccug

SEQ ID NO: 1239463 - RNA, 21 nt, Human
cccguaggcggcucgcggcuu

SEQ ID NO: 1239464 - RNA, 20 nt, Human
cccuccaagcugguagcucc

SEQ ID NO: 1239465 - RNA, 18 nt, Human
ccgcgcccucuuggucug

SEQ ID NO: 1239466 - RNA, 19 nt, Human
ccgcgcccucuuggucugu

SEQ ID NO: 1239467 - RNA, 20 nt, Human
ccgcucaggaccugccgcga

SEQ ID NO: 1239468 - RNA, 20 nt, Human
ccggugccucugcccuagcc

SEQ ID NO: 1239469 - RNA, 20 nt, Human
ccucccugcgcccgccgcuc

SEQ ID NO: 1239470 - RNA, 21 nt, Human
ccucggcguccacaccccucc

SEQ ID NO: 1239471 - RNA, 22 nt, Human
ccucguuccucugcugcucccc

SEQ ID NO: 1239472 - RNA, 18 nt, Human
ccucugcccuagccgagg

SEQ ID NO: 1239473 - RNA, 19 nt, Human
ccucugcggucuucccggg

SEQ ID NO: 1239474 - RNA, 22 nt, Human
ccucuucggcggccgcgagagc

SEQ ID NO: 1239475 - RNA, 21 nt, Human
ccugcgcccgccgcucagaaa

SEQ ID NO: 1239476 - RNA, 22 nt, Human
cgaggccucugcggucuucccg

SEQ ID NO: 1239477 - RNA, 21 nt, Human
cgcccaggcauccacuuggcc

SEQ ID NO: 1239478 - RNA, 23 nt, Human
cgccgcgaagugacccacccucc

SEQ ID NO: 1239479 - RNA, 24 nt, Human
cgccucggccucccaaagugcugg

SEQ ID NO: 1239480 - RNA, 24 nt, Human
cgcgaagugacccacccucccccg

SEQ ID NO: 1239481 - RNA, 19 nt, Human
cgcgcccaagccccggugc

SEQ ID NO: 1239482 - RNA, 20 nt, Human
cgcucccucccucccuugcu

SEQ ID NO: 1239483 - RNA, 21 nt, Human
cggcguccacaccccucccca

SEQ ID NO: 1239484 - RNA, 23 nt, Human
cggcucgcggcuuccccuuuccu

SEQ ID NO: 1239485 - RNA, 24 nt, Human
cgggacagcgggaucccucccagg

SEQ ID NO: 1239486 - RNA, 19 nt, Human
cgggagagggagggaggga

SEQ ID NO: 1239487 - RNA, 28 nt, Human
cggggcauugugugugugugugugugug

SEQ ID NO: 1239488 - RNA, 24 nt, Human
cggguucaagcuauuuuccugucu

SEQ ID NO: 1239489 - RNA, 24 nt, Human
cucagccucccgaguagcugggau

SEQ ID NO: 1239490 - RNA, 23 nt, Human
cuccagagaccagcccuggccag

SEQ ID NO: 1239491 - RNA, 22 nt, Human
cuccagguuccagacagccugc

SEQ ID NO: 1239492 - RNA, 24 nt, Human
cuccauguuggucaggcuggucuu

SEQ ID NO: 1239493 - RNA, 19 nt, Human
cucccaggagccaagccgc

SEQ ID NO: 1239494 - RNA, 26 nt, Human
cucccgaccucaguugauccgcccgc

SEQ ID NO: 1239495 - RNA, 21 nt, Human
cuccugcuucccgaacuacag

SEQ ID NO: 1239496 - RNA, 21 nt, Human
cucgaaacuccugaucucgag

SEQ ID NO: 1239497 - RNA, 19 nt, Human
cucggcguccacaccccuc

SEQ ID NO: 1239498 - RNA, 23 nt, Human
cucggcguccacaccccucccca

SEQ ID NO: 1239499 - RNA, 20 nt, Human
cucuuguugcccaggcugga

SEQ ID NO: 1239500 - RNA, 23 nt, Human
cucuuguugcccaggcuggagcg

SEQ ID NO: 1239501 - RNA, 18 nt, Human
cugaucucgagcacagca

SEQ ID NO: 1239502 - RNA, 18 nt, Human
cugcgcccgccgcucaga

SEQ ID NO: 1239503 - RNA, 22 nt, Human
cugcggcucccucugugacccg

SEQ ID NO: 1239504 - RNA, 18 nt, Human
cuggcgggcucgggacag

SEQ ID NO: 1239505 - RNA, 23 nt, Human
cugucucagccucccgaguagcu

SEQ ID NO: 1239506 - RNA, 22 nt, Human
cuguucgccccauaaaaggacc

SEQ ID NO: 1239507 - RNA, 26 nt, Human
cuuccugcuuuauuccugcaucugau

SEQ ID NO: 1239508 - RNA, 19 nt, Human
cuuggccccuaccccuggc

SEQ ID NO: 1239509 - RNA, 20 nt, Human
gaaaacccucgaaacuccug

SEQ ID NO: 1239510 - RNA, 25 nt, Human
gaacagcuccagagaccagcccugg

SEQ ID NO: 1239511 - RNA, 18 nt, Human
gaaggggaggaggagagg

SEQ ID NO: 1239512 - RNA, 19 nt, Human
gaaggggaggaggagaggg

SEQ ID NO: 1239513 - RNA, 20 nt, Human
gacagggugccuugcacucc

SEQ ID NO: 1239514 - RNA, 24 nt, Human
gaccucaguugauccgcccgccuc

SEQ ID NO: 1239515 - RNA, 18 nt, Human
gacucgcgcucccucccu

SEQ ID NO: 1239516 - RNA, 19 nt, Human
gacucgcgcucccucccuc

SEQ ID NO: 1239517 - RNA, 18 nt, Human
gauuacaggcgugagcca

SEQ ID NO: 1239518 - RNA, 22 nt, Human
gauuacaggcgugagccaccgc

SEQ ID NO: 1239519 - RNA, 22 nt, Human
gauuacaggcgugagccaccgc

SEQ ID NO: 1239520 - RNA, 21 nt, Human
gcauccacuuggccggacaac

SEQ ID NO: 1239521 - RNA, 23 nt, Human
gccaagcgcccccaucacucugg

SEQ ID NO: 1239522 - RNA, 22 nt, Human
gcccaggcuggagcgcaguguc

SEQ ID NO: 1239523 - RNA, 22 nt, Human
gcccggcuaauuuuuguauuuu

SEQ ID NO: 1239524 - RNA, 19 nt, Human
gccgggagagggagggagg

SEQ ID NO: 1239525 - RNA, 22 nt, Human
gcgcucccucccucccuugcuc

SEQ ID NO: 1239526 - RNA, 21 nt, Human
gcucuuguugcccaggcugga

SEQ ID NO: 1239527 - RNA, 23 nt, Human
gcuggucuugaacucccgaccuc

SEQ ID NO: 1239528 - RNA, 18 nt, Human
ggacaacuuucuuccucc

SEQ ID NO: 1239529 - RNA, 23 nt, Human
ggcagaaaccggagccgggccug

SEQ ID NO: 1239530 - RNA, 20 nt, Human
ggcauugugugugugugugu

SEQ ID NO: 1239531 - RNA, 18 nt, Human
ggccucugcggucuuccc

SEQ ID NO: 1239532 - RNA, 20 nt, Human
ggcugaugugugcuaaagcu

SEQ ID NO: 1239533 - RNA, 24 nt, Human
ggcuggucuugaacucccgaccuc

SEQ ID NO: 1239534 - RNA, 23 nt, Human
gggcgggugggcgggcgagcggg

SEQ ID NO: 1239535 - RNA, 21 nt, Human
ggguuucuccauguuggucag

SEQ ID NO: 1239536 - RNA, 18 nt, Human
guagcugggauuauaggc

SEQ ID NO: 1239537 - RNA, 24 nt, Human
gucuguuucggaaagcgcucuggg

SEQ ID NO: 1239538 - RNA, 18 nt, Human
gugaaguggucugcuccg

SEQ ID NO: 1239539 - RNA, 18 nt, Human
gugggaaggggaggagga

SEQ ID NO: 1239540 - RNA, 24 nt, Human
gugggaaggggaggaggagaggga

SEQ ID NO: 1239541 - RNA, 21 nt, Human
gugugugugugugugugugug

SEQ ID NO: 1239542 - RNA, 21 nt, Human
gugugugugugugugugugug

SEQ ID NO: 1239543 - RNA, 24 nt, Human
uaauuuuuguauuuuuaguagaga

SEQ ID NO: 1239544 - RNA, 23 nt, Human
uacaggcgugagccaccgcgccc

SEQ ID NO: 1239545 - RNA, 18 nt, Human
uaccccuggcgggcucgg

SEQ ID NO: 1239546 - RNA, 21 nt, Human
uaggaaggauggggugcgaug

SEQ ID NO: 1239547 - RNA, 24 nt, Human
uaguagagacaagcauaucgaacg

SEQ ID NO: 1239548 - RNA, 24 nt, Human
uaguagagauuggguuucuccaug

SEQ ID NO: 1239549 - RNA, 24 nt, Human
ucaccgcaaucuccgccucccggg

SEQ ID NO: 1239550 - RNA, 25 nt, Human
ucaccgcaaucuccgccucccgggu

SEQ ID NO: 1239551 - RNA, 20 nt, Human
ucagccucccgaguagcugg

SEQ ID NO: 1239552 - RNA, 24 nt, Human
uccacaccccuccccagucggcuc

SEQ ID NO: 1239553 - RNA, 24 nt, Human
uccauguuggucaggcuggucuug

SEQ ID NO: 1239554 - RNA, 24 nt, Human
ucccaaagugcugggauuacaggc

SEQ ID NO: 1239555 - RNA, 19 nt, Human
ucccaggagccaagccgcc

SEQ ID NO: 1239556 - RNA, 19 nt, Human
uccccaucuguccuccccu

SEQ ID NO: 1239557 - RNA, 20 nt, Human
uccccgcgcccaagccccgg

SEQ ID NO: 1239558 - RNA, 24 nt, Human
ucccgaguagcugggauuauaggc

SEQ ID NO: 1239559 - RNA, 21 nt, Human
ucccggguucaagcuauuuuc

SEQ ID NO: 1239560 - RNA, 24 nt, Human
ucccggguucaagcuauuuuccug

SEQ ID NO: 1239561 - RNA, 18 nt, Human
ucccuucguccgucuccu

SEQ ID NO: 1239562 - RNA, 24 nt, Human
ucccuucguccgucuccucccccg

SEQ ID NO: 1239563 - RNA, 19 nt, Human
uccgggcgcaucgaaaccg

SEQ ID NO: 1239564 - RNA, 27 nt, Human
uccuuggccucgccaagcgcccccauc

SEQ ID NO: 1239565 - RNA, 18 nt, Human
ucggccucccaaagugcu

SEQ ID NO: 1239566 - RNA, 21 nt, Human
ucuucggcggccgcgagagcg

SEQ ID NO: 1239567 - RNA, 20 nt, Human
ugaacucccgaccucaguug

SEQ ID NO: 1239568 - RNA, 19 nt, Human
ugacccgggaccagccccg

SEQ ID NO: 1239569 - RNA, 19 nt, Human
ugaccugcgaccucccugc

SEQ ID NO: 1239570 - RNA, 20 nt, Human
ugagcagcgcugugucuguu

SEQ ID NO: 1239571 - RNA, 19 nt, Human
ugaggaguugguaguagag

SEQ ID NO: 1239572 - RNA, 23 nt, Human
ugauccgcccgccucggccuccc

SEQ ID NO: 1239573 - RNA, 18 nt, Human
ugcaucugauuauugggc

SEQ ID NO: 1239574 - RNA, 21 nt, Human
ugcccuagccgaggccucugc

SEQ ID NO: 1239575 - RNA, 19 nt, Human
ugccgcgagccccggggug

SEQ ID NO: 1239576 - RNA, 23 nt, Human
ugccucugcccuagccgaggccu

SEQ ID NO: 1239577 - RNA, 23 nt, Human
ugccuugcacucccucacgccca

SEQ ID NO: 1239578 - RNA, 24 nt, Human
ugcgggaagcgggcuguggagaaa

SEQ ID NO: 1239579 - RNA, 24 nt, Human
ugcugggauuacaggcgugagcca

SEQ ID NO: 1239580 - RNA, 24 nt, Human
ugcuuuauuccugcaucugauuaa

SEQ ID NO: 1239581 - RNA, 21 nt, Human
ugcuuuuuuucuuccuuagga

SEQ ID NO: 1239582 - RNA, 19 nt, Human
uggaagcacuccggcggag

SEQ ID NO: 1239583 - RNA, 20 nt, Human
uggaauaggcaacaaaugga

SEQ ID NO: 1239584 - RNA, 19 nt, Human
uggagcgcagugucgcgau

SEQ ID NO: 1239585 - RNA, 24 nt, Human
uggagcgcagugucgcgaucucgg

SEQ ID NO: 1239586 - RNA, 19 nt, Human
uggcaccgggcugagucaa

SEQ ID NO: 1239587 - RNA, 22 nt, Human
ugggaaggggaggaggagaggg

SEQ ID NO: 1239588 - RNA, 18 nt, Human
ugggauuacaggcgugag

SEQ ID NO: 1239589 - RNA, 19 nt, Human
ugggauuacaggcgugagc

SEQ ID NO: 1239590 - RNA, 21 nt, Human
ugggauuacaggcgugagcca

SEQ ID NO: 1239591 - RNA, 22 nt, Human
ugggauuacaggcgugagccac

SEQ ID NO: 1239592 - RNA, 23 nt, Human
ugggauuacaggcgugagccacc

SEQ ID NO: 1239593 - RNA, 24 nt, Human
ugggauuacaggcgugagccaccg

SEQ ID NO: 1239594 - RNA, 18 nt, Human
ugggauuauaggcgcgcg

SEQ ID NO: 1239595 - RNA, 22 nt, Human
ugggauuauaggcgcgcgccac

SEQ ID NO: 1239596 - RNA, 22 nt, Human
ugggauuauaggcgcgcgccac

SEQ ID NO: 1239597 - RNA, 24 nt, Human
ugggauuauaggcgcgcgccacua

SEQ ID NO: 1239598 - RNA, 19 nt, Human
ugggcgggcgagcgggcac

SEQ ID NO: 1239599 - RNA, 21 nt, Human
ugggggaggcggcgggggagg

SEQ ID NO: 1239600 - RNA, 23 nt, Human
uggguuucuccauguuggucagg

SEQ ID NO: 1239601 - RNA, 18 nt, Human
ugguagcucccgcgcccu

SEQ ID NO: 1239602 - RNA, 23 nt, Human
uggucaggcuggucuugaacucc

SEQ ID NO: 1239603 - RNA, 20 nt, Human
uggucugcuccggauggcuc

SEQ ID NO: 1239604 - RNA, 21 nt, Human
uggugggcgcucccucuccuc

SEQ ID NO: 1239605 - RNA, 24 nt, Human
uguccuccccuccaagcugguaau

SEQ ID NO: 1239606 - RNA, 24 nt, Human
ugucucagccucccgaguagcugg

SEQ ID NO: 1239607 - RNA, 18 nt, Human
ugugagcagcgcuguguc

SEQ ID NO: 1239608 - RNA, 22 nt, Human
ugugugugugugugagcagcgc

SEQ ID NO: 1239609 - RNA, 18 nt, Human
ugugugugugugugugug

SEQ ID NO: 1239610 - RNA, 18 nt, Human
ugugugugugugugugug

SEQ ID NO: 1239611 - RNA, 18 nt, Human
ugugugugugugugugug

SEQ ID NO: 1239612 - RNA, 18 nt, Human
ugugugugugugugugug

SEQ ID NO: 1239613 - RNA, 18 nt, Human
ugugugugugugugugug

SEQ ID NO: 1239614 - RNA, 18 nt, Human
ugugugugugugugugug

SEQ ID NO: 1239615 - RNA, 18 nt, Human
ugugugugugugugugug

SEQ ID NO: 1239616 - RNA, 21 nt, Human
ugugugugugugugugugugu

SEQ ID NO: 1239617 - RNA, 21 nt, Human
ugugugugugugugugugugu

SEQ ID NO: 1239618 - RNA, 21 nt, Human
ugugugugugugugugugugu

SEQ ID NO: 1239619 - RNA, 21 nt, Human
ugugugugugugugugugugu

SEQ ID NO: 1239620 - RNA, 21 nt, Human
ugugugugugugugugugugu

SEQ ID NO: 1239621 - RNA, 21 nt, Human
ugugugugugugugugugugu

SEQ ID NO: 1239622 - RNA, 21 nt, Human
ugugugugugugugugugugu

SEQ ID NO: 1239623 - RNA, 21 nt, Human
ugugugugugugugugugugu

SEQ ID NO: 1239624 - RNA, 21 nt, Human
ugugugugugugugugugugu

SEQ ID NO: 1239625 - RNA, 21 nt, Human
ugugugugugugugugugugu

SEQ ID NO: 1239626 - RNA, 21 nt, Human
ugugugugugugugugugugu

SEQ ID NO: 1239627 - RNA, 21 nt, Human
ugugugugugugugugugugu

SEQ ID NO: 1239628 - RNA, 22 nt, Human
ugugugugugugugugugugug

SEQ ID NO: 1239629 - RNA, 22 nt, Human
ugugugugugugugugugugug

SEQ ID NO: 1239630 - RNA, 22 nt, Human
ugugugugugugugugugugug

SEQ ID NO: 1239631 - RNA, 18 nt, Human
uuaguagagauuggguuu

SEQ ID NO: 1239632 - RNA, 24 nt, Human
uuaguagagauuggguuucuccau

SEQ ID NO: 1239633 - RNA, 21 nt, Human
uucaagcuauuuuccugucuc

SEQ ID NO: 1239634 - RNA, 19 nt, Human
uuccagacagccugcuuug

SEQ ID NO: 1239635 - RNA, 18 nt, Human
uuccuccagguuccagac

SEQ ID NO: 1239636 - RNA, 26 nt, Human
uuccucggcguucaccgagcgccgcg

SEQ ID NO: 1239637 - RNA, 19 nt, Human
uuccucugcugcuccccgc

SEQ ID NO: 1239638 - RNA, 23 nt, Human
uugcucuuguugcccaggcugga

SEQ ID NO: 1239639 - RNA, 24 nt, Human
uuggguuucuccauguuggucagg

SEQ ID NO: 1239640 - RNA, 20 nt, Human
uuucaaacaaauacaaaguu

SEQ ID NO: 1239641 - RNA, 19 nt, Human
uuucagagaaagucugggc

SEQ ID NO: 1239642 - RNA, 20 nt, Human
uuucagagaaagucugggca

SEQ ID NO: 1239643 - RNA, 21 nt, Human
uuucuccauguuggucaggcu

SEQ ID NO: 1239644 - RNA, 24 nt, Human
uuugcucuuguugcccaggcugga

SEQ ID NO: 1239645 - RNA, 24 nt, Human
uuuugcucuuguugcccaggcugg

SEQ ID NO: 1239646 - RNA, 19 nt, Human
uuuuuaguagagauugggu

SEQ ID NO: 1239647 - RNA, 20 nt, Human
uuuuuguauuuuuaguagag

SEQ ID NO: 1239648 - RNA, 25 nt, Human
acaggacuccccggcgggcggcggg

SEQ ID NO: 1239649 - RNA, 22 nt, Human
agcugggcaagcagcauuuggu

SEQ ID NO: 1239650 - RNA, 21 nt, Human
aggacuccccggcgggcggcg

SEQ ID NO: 1239651 - RNA, 25 nt, Human
aggcggcggcgaagucgggcggcgg

SEQ ID NO: 1239652 - RNA, 24 nt, Human
ccggcuccaggcggcggcgaaguc

SEQ ID NO: 1239653 - RNA, 24 nt, Human
gaggucgcggccagccggcuccag

SEQ ID NO: 1239654 - RNA, 22 nt, Human
gcgggcggcugaggucgcggcc

SEQ ID NO: 1239655 - RNA, 21 nt, Human
gcuccggcagacgagggcaaa

SEQ ID NO: 1239656 - RNA, 19 nt, Human
ggcggcggggcgcgcgggc

SEQ ID NO: 1239657 - RNA, 19 nt, Human
ggcggcggggcgcgcgggc

SEQ ID NO: 1239658 - RNA, 20 nt, Human
gggcggcggggcgcgcgggc

SEQ ID NO: 1239659 - RNA, 18 nt, Human
uaagagggggcauaggug

SEQ ID NO: 1239660 - RNA, 23 nt, Human
ucgcggccagccggcuccaggcg

SEQ ID NO: 1239661 - RNA, 21 nt, Human
uuaaugagcuugaugaagucc

SEQ ID NO: 1239662 - RNA, 24 nt, Human
uuugcucucuguacgccagcuggg

SEQ ID NO: 1239663 - RNA, 18 nt, Human
aaccccgagguggauggu

SEQ ID NO: 1239664 - RNA, 19 nt, Human
aaccccgagguggaugguc

SEQ ID NO: 1239665 - RNA, 23 nt, Human
aagcaagugaacacccugacagg

SEQ ID NO: 1239666 - RNA, 21 nt, Human
acaaggcagcaaaaguuggaa

SEQ ID NO: 1239667 - RNA, 20 nt, Human
acccccggaucccugcaagc

SEQ ID NO: 1239668 - RNA, 22 nt, Human
accccgagguggauggucugaa

SEQ ID NO: 1239669 - RNA, 22 nt, Human
agacaauaaaagcaagugaaca

SEQ ID NO: 1239670 - RNA, 23 nt, Human
agacaauaaaagcaagugaacac

SEQ ID NO: 1239671 - RNA, 23 nt, Human
agcaagugaacacccugacagga

SEQ ID NO: 1239672 - RNA, 19 nt, Human
aggauguuuuaggagaagc

SEQ ID NO: 1239673 - RNA, 21 nt, Human
aggcagcaaaaguuggaagcc

SEQ ID NO: 1239674 - RNA, 24 nt, Human
aucugccuuaggcgggaaaugcug

SEQ ID NO: 1239675 - RNA, 25 nt, Human
caaccccgagguggauggucugaag

SEQ ID NO: 1239676 - RNA, 21 nt, Human
caagugaacacccugacagga

SEQ ID NO: 1239677 - RNA, 21 nt, Human
caauaaaagcaagugaacacc

SEQ ID NO: 1239678 - RNA, 21 nt, Human
cacuacacaaggcagcaaaag

SEQ ID NO: 1239679 - RNA, 18 nt, Human
ccccggaucccugcaagc

SEQ ID NO: 1239680 - RNA, 20 nt, Human
cucaccucucugcacuucca

SEQ ID NO: 1239681 - RNA, 23 nt, Human
cuggagacaggggccucggucaa

SEQ ID NO: 1239682 - RNA, 18 nt, Human
gaccucaaccagcaggau

SEQ ID NO: 1239683 - RNA, 19 nt, Human
gcuggagacaggggccucg

SEQ ID NO: 1239684 - RNA, 20 nt, Human
gggaaaugcuguugcuggau

SEQ ID NO: 1239685 - RNA, 21 nt, Human
uaaaagcaagugaacacccug

SEQ ID NO: 1239686 - RNA, 23 nt, Human
uaagccugcuuguagccagugau

SEQ ID NO: 1239687 - RNA, 23 nt, Human
uagccgcaggaagcggccuugcu

SEQ ID NO: 1239688 - RNA, 20 nt, Human
uaugcagacaauaaaagcaa

SEQ ID NO: 1239689 - RNA, 19 nt, Human
ucccugcaagcagucgccu

SEQ ID NO: 1239690 - RNA, 21 nt, Human
ucuuacaacaauuaaauguau

SEQ ID NO: 1239691 - RNA, 26 nt, Human
ugcagacaauaaaagcaagugaacac

SEQ ID NO: 1239692 - RNA, 21 nt, Human
ugccuaagccugcuuguagcc

SEQ ID NO: 1239693 - RNA, 18 nt, Human
ugcggcgagugucucacc

SEQ ID NO: 1239694 - RNA, 19 nt, Human
uggaagccuggagugccua

SEQ ID NO: 1239695 - RNA, 19 nt, Human
uggucauguggauuuccag

SEQ ID NO: 1239696 - RNA, 23 nt, Human
ugucucaccucucugcacuucca

SEQ ID NO: 1239697 - RNA, 21 nt, Human
uuagccgcaggaagcggccuu

SEQ ID NO: 1239698 - RNA, 24 nt, Human
uugcaaccccgagguggauggucu

SEQ ID NO: 1239699 - RNA, 19 nt, Human
aaacagccacagaagucag

SEQ ID NO: 1239700 - RNA, 27 nt, Human
aaacagccacagaagucagaaccaaau

SEQ ID NO: 1239701 - RNA, 24 nt, Human
aaaguacuaagauuacaggcauga

SEQ ID NO: 1239702 - RNA, 23 nt, Human
aaagucuuucuaaggcagcauau

SEQ ID NO: 1239703 - RNA, 21 nt, Human
aagaugccuuuccuauaauug

SEQ ID NO: 1239704 - RNA, 22 nt, Human
aagucaaauagauguggccaaa

SEQ ID NO: 1239705 - RNA, 23 nt, Human
acaagaaauaaugacuucuuuca

SEQ ID NO: 1239706 - RNA, 18 nt, Human
acaggguuucaccguguu

SEQ ID NO: 1239707 - RNA, 19 nt, Human
acaggguuucaccguguua

SEQ ID NO: 1239708 - RNA, 20 nt, Human
acaggguuucaccguguuag

SEQ ID NO: 1239709 - RNA, 24 nt, Human
acaggguuucaccguguuagccag

SEQ ID NO: 1239710 - RNA, 18 nt, Human
acagugcuaacagcaaac

SEQ ID NO: 1239711 - RNA, 20 nt, Human
accugccaggccccucccca

SEQ ID NO: 1239712 - RNA, 20 nt, Human
acugcaagcuccgccuccug

SEQ ID NO: 1239713 - RNA, 21 nt, Human
agaaaaauucucuauaaaagc

SEQ ID NO: 1239714 - RNA, 18 nt, Human
agacaggguuucaccgug

SEQ ID NO: 1239715 - RNA, 20 nt, Human
agacugaaauauacagcaac

SEQ ID NO: 1239716 - RNA, 19 nt, Human
agagacaggguuucaccgu

SEQ ID NO: 1239717 - RNA, 22 nt, Human
agauuacaggcaugagcaacug

SEQ ID NO: 1239718 - RNA, 21 nt, Human
agccacagaagucagaaccaa

SEQ ID NO: 1239719 - RNA, 21 nt, Human
agcccuggccagcccggccuc

SEQ ID NO: 1239720 - RNA, 19 nt, Human
agcuauugcuaauggaagg

SEQ ID NO: 1239721 - RNA, 22 nt, Human
aggaaaaauggagaaauaaugc

SEQ ID NO: 1239722 - RNA, 25 nt, Human
aggcuggagugcaguggcgugaucu

SEQ ID NO: 1239723 - RNA, 20 nt, Human
aguagagacaggguuucacc

SEQ ID NO: 1239724 - RNA, 20 nt, Human
agugauccuccugccucagc

SEQ ID NO: 1239725 - RNA, 19 nt, Human
agugcaguggcgugaucuc

SEQ ID NO: 1239726 - RNA, 20 nt, Human
agugcaguggcgugaucucg

SEQ ID NO: 1239727 - RNA, 23 nt, Human
agugcaguggcgugaucucggcu

SEQ ID NO: 1239728 - RNA, 24 nt, Human
agugcaguggcgugaucucggcuc

SEQ ID NO: 1239729 - RNA, 24 nt, Human
caaaguacuaagauuacaggcaug

SEQ ID NO: 1239730 - RNA, 23 nt, Human
caacaaacacuguaaaaugcuau

SEQ ID NO: 1239731 - RNA, 20 nt, Human
cacaaucaucuuuaucuuag

SEQ ID NO: 1239732 - RNA, 22 nt, Human
cacaccauucuccugccucagc

SEQ ID NO: 1239733 - RNA, 19 nt, Human
cacccccuccugcguccgc

SEQ ID NO: 1239734 - RNA, 18 nt, Human
caccguguuagccaggau

SEQ ID NO: 1239735 - RNA, 24 nt, Human
caccguguuagccaggauggucuc

SEQ ID NO: 1239736 - RNA, 24 nt, Human
caggguuucaccguguuagccagg

SEQ ID NO: 1239737 - RNA, 19 nt, Human
caggugcccgccaccaugc

SEQ ID NO: 1239738 - RNA, 21 nt, Human
caggugcccgccaccaugcuc

SEQ ID NO: 1239739 - RNA, 22 nt, Human
cagugcuaacagcaaacugaca

SEQ ID NO: 1239740 - RNA, 22 nt, Human
cagugucucauuguugcccagg

SEQ ID NO: 1239741 - RNA, 24 nt, Human
caugauaaggcucuccaggaaaaa

SEQ ID NO: 1239742 - RNA, 19 nt, Human
cauuguugcccaggcuggu

SEQ ID NO: 1239743 - RNA, 22 nt, Human
cauuguugcccaggcuggucuc

SEQ ID NO: 1239744 - RNA, 24 nt, Human
ccaaaguacuaagauuacaggcau

SEQ ID NO: 1239745 - RNA, 19 nt, Human
ccaaguaaucaaucaucau

SEQ ID NO: 1239746 - RNA, 21 nt, Human
ccacaccauucuccugccuca

SEQ ID NO: 1239747 - RNA, 21 nt, Human
ccacagaagucagaaccaaau

SEQ ID NO: 1239748 - RNA, 23 nt, Human
ccaccuggaccuguaagccucug

SEQ ID NO: 1239749 - RNA, 19 nt, Human
ccagccauacacaaucauc

SEQ ID NO: 1239750 - RNA, 21 nt, Human
cccaggcuggagugcaguggc

SEQ ID NO: 1239751 - RNA, 22 nt, Human
cccaggcuggagugcaguggcg

SEQ ID NO: 1239752 - RNA, 23 nt, Human
cccagguggcugggacuacaggu

SEQ ID NO: 1239753 - RNA, 24 nt, Human
cccagguggcugggacuacaggug

SEQ ID NO: 1239754 - RNA, 19 nt, Human
ccccagacacacccccucc

SEQ ID NO: 1239755 - RNA, 18 nt, Human
cccuauauuuuaaacagc

SEQ ID NO: 1239756 - RNA, 23 nt, Human
cccucaaguuauccgggcuucua

SEQ ID NO: 1239757 - RNA, 23 nt, Human
cccuggccagcccggccucucca

SEQ ID NO: 1239758 - RNA, 19 nt, Human
ccgaagcccuggccagccc

SEQ ID NO: 1239759 - RNA, 24 nt, Human
ccucccagguggcugggacuacag

SEQ ID NO: 1239760 - RNA, 22 nt, Human
ccuccccagacacacccccucc

SEQ ID NO: 1239761 - RNA, 24 nt, Human
ccuccuggguccacaccauucucc

SEQ ID NO: 1239762 - RNA, 22 nt, Human
ccugccaggccccuccccagac

SEQ ID NO: 1239763 - RNA, 23 nt, Human
ccugccucagccucccagguggc

SEQ ID NO: 1239764 - RNA, 24 nt, Human
ccugccucagccucccagguggcu

SEQ ID NO: 1239765 - RNA, 21 nt, Human
ccuggccuugagugauccucc

SEQ ID NO: 1239766 - RNA, 22 nt, Human
ccuggccuugagugauccuccu

SEQ ID NO: 1239767 - RNA, 22 nt, Human
ccuugagugauccuccugccuc

SEQ ID NO: 1239768 - RNA, 19 nt, Human
cgccuccuggguccacacc

SEQ ID NO: 1239769 - RNA, 24 nt, Human
cgcucugucgcccaggcuggagug

SEQ ID NO: 1239770 - RNA, 25 nt, Human
cggaggccgaagcccuggccagccc

SEQ ID NO: 1239771 - RNA, 24 nt, Human
cucagccucccagguggcugggac

SEQ ID NO: 1239772 - RNA, 23 nt, Human
cuccaccuggaccuguaagccuc

SEQ ID NO: 1239773 - RNA, 21 nt, Human
cucccaaaguacuaagauuac

SEQ ID NO: 1239774 - RNA, 22 nt, Human
cucccagccauacacaaucauc

SEQ ID NO: 1239775 - RNA, 20 nt, Human
cuccugccucagccucccag

SEQ ID NO: 1239776 - RNA, 19 nt, Human
cuccugcguccgccccgcc

SEQ ID NO: 1239777 - RNA, 18 nt, Human
cuccuggguccacaccau

SEQ ID NO: 1239778 - RNA, 21 nt, Human
cuccuggguccacaccauucu

SEQ ID NO: 1239779 - RNA, 24 nt, Human
cucgcucugucgcccaggcuggag

SEQ ID NO: 1239780 - RNA, 22 nt, Human
cuggaccuguaagccucuggcc

SEQ ID NO: 1239781 - RNA, 19 nt, Human
cuggguuccucugcaauug

SEQ ID NO: 1239782 - RNA, 18 nt, Human
cuguaagccucuggccgc

SEQ ID NO: 1239783 - RNA, 25 nt, Human
cuguaagccucuggccgcgaaacuc

SEQ ID NO: 1239784 - RNA, 20 nt, Human
cuucugggaccugccaggcc

SEQ ID NO: 1239785 - RNA, 24 nt, Human
cuugagugauccuccugccucagc

SEQ ID NO: 1239786 - RNA, 21 nt, Human
gaagucagaaccaaauucagg

SEQ ID NO: 1239787 - RNA, 22 nt, Human
gaccucaugauccgccgugccc

SEQ ID NO: 1239788 - RNA, 22 nt, Human
gacuacaggugcccgccaccau

SEQ ID NO: 1239789 - RNA, 22 nt, Human
gauuacaggcaugagcaacugc

SEQ ID NO: 1239790 - RNA, 21 nt, Human
gccacagaagucagaaccaaa

SEQ ID NO: 1239791 - RNA, 20 nt, Human
gcccaggcuggagugcagug

SEQ ID NO: 1239792 - RNA, 24 nt, Human
gccucagccucccagguggcuggg

SEQ ID NO: 1239793 - RNA, 23 nt, Human
gccuccuggguccacaccauucu

SEQ ID NO: 1239794 - RNA, 25 nt, Human
gcucugucgcccaggcuggagugca

SEQ ID NO: 1239795 - RNA, 23 nt, Human
ggaccugccaggccccuccccag

SEQ ID NO: 1239796 - RNA, 22 nt, Human
ggccuugagugauccuccugcc

SEQ ID NO: 1239797 - RNA, 22 nt, Human
ggcuggagugcaguggcgugau

SEQ ID NO: 1239798 - RNA, 24 nt, Human
ggcuggucucaaacuccuggccuu

SEQ ID NO: 1239799 - RNA, 20 nt, Human
ggucucaauuuccugaccuc

SEQ ID NO: 1239800 - RNA, 24 nt, Human
gugauccuccugccucagccuccc

SEQ ID NO: 1239801 - RNA, 21 nt, Human
gugaucucggcucacugcaag

SEQ ID NO: 1239802 - RNA, 22 nt, Human
uaaaagugggaagaacuuauuu

SEQ ID NO: 1239803 - RNA, 22 nt, Human
uaaacagccacagaagucagaa

SEQ ID NO: 1239804 - RNA, 23 nt, Human
uaaacagccacagaagucagaac

SEQ ID NO: 1239805 - RNA, 19 nt, Human
uaagauuacaggcaugagc

SEQ ID NO: 1239806 - RNA, 23 nt, Human
uaagauuacaggcaugagcaacu

SEQ ID NO: 1239807 - RNA, 23 nt, Human
uaauaugcauuucuuccauuaca

SEQ ID NO: 1239808 - RNA, 23 nt, Human
uacuaagauuacaggcaugagca

SEQ ID NO: 1239809 - RNA, 22 nt, Human
uagagacaggguuucaccgugu

SEQ ID NO: 1239810 - RNA, 21 nt, Human
uaguagagacaggguuucacc

SEQ ID NO: 1239811 - RNA, 24 nt, Human
uaguagagacaggguuucaccgug

SEQ ID NO: 1239812 - RNA, 26 nt, Human
uaguagagacaggguuucaccguguu

SEQ ID NO: 1239813 - RNA, 20 nt, Human
uaguagaucaccuggugaga

SEQ ID NO: 1239814 - RNA, 24 nt, Human
ucaccguguuagccaggauggucu

SEQ ID NO: 1239815 - RNA, 18 nt, Human
ucacugcaagcuccgccu

SEQ ID NO: 1239816 - RNA, 23 nt, Human
ucacugcaagcuccgccuccugg

SEQ ID NO: 1239817 - RNA, 24 nt, Human
ucacugcaagcuccgccuccuggg

SEQ ID NO: 1239818 - RNA, 20 nt, Human
ucagguuuccaacaaacacu

SEQ ID NO: 1239819 - RNA, 25 nt, Human
uccaggaaaaaauauucacaagaaa

SEQ ID NO: 1239820 - RNA, 24 nt, Human
ucccaaaguacuaagauuacaggc

SEQ ID NO: 1239821 - RNA, 24 nt, Human
ucccagguggcugggacuacaggu

SEQ ID NO: 1239822 - RNA, 22 nt, Human
uccccagacacacccccuccug

SEQ ID NO: 1239823 - RNA, 24 nt, Human
uccccucauauucagccuucaacc

SEQ ID NO: 1239824 - RNA, 27 nt, Human
uccuccugccucagccucccaaaguac

SEQ ID NO: 1239825 - RNA, 19 nt, Human
uccugaccucaugauccgc

SEQ ID NO: 1239826 - RNA, 24 nt, Human
uccuggguccacaccauucuccug

SEQ ID NO: 1239827 - RNA, 22 nt, Human
ucgcccaggcuggagugcagug

SEQ ID NO: 1239828 - RNA, 24 nt, Human
ucgcucugucgcccaggcuggagu

SEQ ID NO: 1239829 - RNA, 21 nt, Human
ucucauuguugcccaggcugg

SEQ ID NO: 1239830 - RNA, 22 nt, Human
ucucauuguugcccaggcuggu

SEQ ID NO: 1239831 - RNA, 26 nt, Human
ucuccugccucagccucccagguggc

SEQ ID NO: 1239832 - RNA, 19 nt, Human
ucucgcucugucgcccagg

SEQ ID NO: 1239833 - RNA, 23 nt, Human
ucucgcucugucgcccaggcugg

SEQ ID NO: 1239834 - RNA, 24 nt, Human
ucucgcucugucgcccaggcugga

SEQ ID NO: 1239835 - RNA, 26 nt, Human
ucucgcucugucgcccaggcuggagu

SEQ ID NO: 1239836 - RNA, 27 nt, Human
ucucgcucugucgcccaggcuggagug

SEQ ID NO: 1239837 - RNA, 18 nt, Human
ucugcaauugcugucaug

SEQ ID NO: 1239838 - RNA, 25 nt, Human
ucugcauauaacuuaauaugcauuu

SEQ ID NO: 1239839 - RNA, 24 nt, Human
ucugucgcccaggcuggagugcag

SEQ ID NO: 1239840 - RNA, 22 nt, Human
ucuuauuucuuuucuuuuucuu

SEQ ID NO: 1239841 - RNA, 22 nt, Human
ugaaaaauacuucaguuuuauc

SEQ ID NO: 1239842 - RNA, 22 nt, Human
ugagacggagucucgcucuguc

SEQ ID NO: 1239843 - RNA, 27 nt, Human
ugagugauccuccugccucagccuccc

SEQ ID NO: 1239844 - RNA, 27 nt, Human
ugagugauccuccugccucagccuccc

SEQ ID NO: 1239845 - RNA, 24 nt, Human
ugcccaggcuggucucaaacuccu

SEQ ID NO: 1239846 - RNA, 24 nt, Human
ugccucagccucccaaaguacuaa

SEQ ID NO: 1239847 - RNA, 24 nt, Human
ugccucagccucccagguggcugg

SEQ ID NO: 1239848 - RNA, 19 nt, Human
uggagugcaguggcgugau

SEQ ID NO: 1239849 - RNA, 23 nt, Human
uggagugcaguggcgugaucucg

SEQ ID NO: 1239850 - RNA, 24 nt, Human
uggagugcaguggcgugaucucgg

SEQ ID NO: 1239851 - RNA, 23 nt, Human
uggccaaaucaauauaucccuug

SEQ ID NO: 1239852 - RNA, 20 nt, Human
uggccuugagugauccuccu

SEQ ID NO: 1239853 - RNA, 24 nt, Human
uggccuugagugauccuccugccu

SEQ ID NO: 1239854 - RNA, 20 nt, Human
uggcgugaucucggcucacu

SEQ ID NO: 1239855 - RNA, 20 nt, Human
uggcugggacuacaggugcc

SEQ ID NO: 1239856 - RNA, 21 nt, Human
ugggacuacaggugcccgcca

SEQ ID NO: 1239857 - RNA, 22 nt, Human
ugggacuacaggugcccgccac

SEQ ID NO: 1239858 - RNA, 24 nt, Human
ugggacuacaggugcccgccacca

SEQ ID NO: 1239859 - RNA, 25 nt, Human
ugggacuacaggugcccgccaccau

SEQ ID NO: 1239860 - RNA, 20 nt, Human
uggguccacaccauucuccu

SEQ ID NO: 1239861 - RNA, 22 nt, Human
ugucucauuguugcccaggcug

SEQ ID NO: 1239862 - RNA, 20 nt, Human
ugucuuguuagacuuccccu

SEQ ID NO: 1239863 - RNA, 22 nt, Human
uguugcccaggcuggucucaaa

SEQ ID NO: 1239864 - RNA, 22 nt, Human
uuaacacagucauaaauauccc

SEQ ID NO: 1239865 - RNA, 18 nt, Human
uuaauaucugcauauaac

SEQ ID NO: 1239866 - RNA, 22 nt, Human
uuaguagagacaggguuucacc

SEQ ID NO: 1239867 - RNA, 24 nt, Human
uuaguagagacaggguuucaccgu

SEQ ID NO: 1239868 - RNA, 25 nt, Human
uucccgacgccggaggccgaagccc

SEQ ID NO: 1239869 - RNA, 22 nt, Human
uucuccugccucagccucccag

SEQ ID NO: 1239870 - RNA, 22 nt, Human
uuguugcccaggcuggucucaa

SEQ ID NO: 1239871 - RNA, 23 nt, Human
uuguugcccaggcuggucucaaa

SEQ ID NO: 1239872 - RNA, 19 nt, Human
uuucaccguguuagccagg

SEQ ID NO: 1239873 - RNA, 19 nt, Human
uuuccaaaaguacaaacag

SEQ ID NO: 1239874 - RNA, 19 nt, Human
uuuccaaaaguacaaacag

SEQ ID NO: 1239875 - RNA, 25 nt, Human
uuuuguuuuuuugagacggagucuc

SEQ ID NO: 1239876 - RNA, 24 nt, Human
uuuuuaguagagacaggguuucac

SEQ ID NO: 1239877 - RNA, 21 nt, Human
uuuuuguauuuuuaguagaga

SEQ ID NO: 1239878 - RNA, 21 nt, Human
uuuuuuguauuuuuaguagag

SEQ ID NO: 1239879 - RNA, 24 nt, Human
uuuuuuguauuuuuaguagagaca

SEQ ID NO: 1239880 - RNA, 21 nt, Human
aaaggcucaauuccugccuuc

SEQ ID NO: 1239881 - RNA, 22 nt, Human
aacacaagaaaagaaugacuca

SEQ ID NO: 1239882 - RNA, 24 nt, Human
aacaggaacucaccaccaggucua

SEQ ID NO: 1239883 - RNA, 19 nt, Human
aagacaaggcagaaaagca

SEQ ID NO: 1239884 - RNA, 23 nt, Human
aagaggucaaaucagcugugccc

SEQ ID NO: 1239885 - RNA, 18 nt, Human
aaggauggggagucagcc

SEQ ID NO: 1239886 - RNA, 22 nt, Human
aaggugauuucauugcuacaga

SEQ ID NO: 1239887 - RNA, 22 nt, Human
aauggaggaauguuuuucugaa

SEQ ID NO: 1239888 - RNA, 23 nt, Human
acagggaaggaaaaaaauaccag

SEQ ID NO: 1239889 - RNA, 24 nt, Human
acccaacuccccauuccuugccuu

SEQ ID NO: 1239890 - RNA, 25 nt, Human
acccugaaaucgccuuugcaaaaau

SEQ ID NO: 1239891 - RNA, 23 nt, Human
acccugguguagaauauuaaucu

SEQ ID NO: 1239892 - RNA, 19 nt, Human
accuuccucuaggauuguu

SEQ ID NO: 1239893 - RNA, 19 nt, Human
acuccccagugccuaaggu

SEQ ID NO: 1239894 - RNA, 25 nt, Human
acuugccacccaggaaugaaaauaa

SEQ ID NO: 1239895 - RNA, 26 nt, Human
agaaauacugaagaggucaaaucagc

SEQ ID NO: 1239896 - RNA, 19 nt, Human
agcaaaugaacggcaugaa

SEQ ID NO: 1239897 - RNA, 23 nt, Human
agcuguguggccucaggcaaauu

SEQ ID NO: 1239898 - RNA, 19 nt, Human
aggaaaaaaauaccaggaa

SEQ ID NO: 1239899 - RNA, 23 nt, Human
aggaacucaccaccaggucuacc

SEQ ID NO: 1239900 - RNA, 18 nt, Human
aggaaugaaaauaacacc

SEQ ID NO: 1239901 - RNA, 18 nt, Human
aggaauggguggguggaa

SEQ ID NO: 1239902 - RNA, 20 nt, Human
aggaugaaagaauggaagga

SEQ ID NO: 1239903 - RNA, 21 nt, Human
aggauggggagucagccaggu

SEQ ID NO: 1239904 - RNA, 23 nt, Human
auuacugucccuuaccuucugga

SEQ ID NO: 1239905 - RNA, 19 nt, Human
caaaaauuauaucagugag

SEQ ID NO: 1239906 - RNA, 22 nt, Human
caacccaacuccccauuccuug

SEQ ID NO: 1239907 - RNA, 24 nt, Human
caacccaacuccccauuccuugcc

SEQ ID NO: 1239908 - RNA, 21 nt, Human
cacaagaaaagaaugacucau

SEQ ID NO: 1239909 - RNA, 22 nt, Human
cacaaugugccaggccuguggu

SEQ ID NO: 1239910 - RNA, 23 nt, Human
cacccaggaaugaaaauaacacc

SEQ ID NO: 1239911 - RNA, 22 nt, Human
cagaagcucacauccacugggc

SEQ ID NO: 1239912 - RNA, 19 nt, Human
cagagacaggaggcugaag

SEQ ID NO: 1239913 - RNA, 19 nt, Human
cagccuacuggggaagugg

SEQ ID NO: 1239914 - RNA, 26 nt, Human
ccaagacaauuauuccagcgugaccc

SEQ ID NO: 1239915 - RNA, 22 nt, Human
ccagggaagccaaaagacugga

SEQ ID NO: 1239916 - RNA, 27 nt, Human
cccaccacaagcuggugagguaagggc

SEQ ID NO: 1239917 - RNA, 21 nt, Human
cccaggaaugaaaauaacacc

SEQ ID NO: 1239918 - RNA, 20 nt, Human
ccucuaggaucagauuauuc

SEQ ID NO: 1239919 - RNA, 22 nt, Human
ccuucuggaaacauuucacugu

SEQ ID NO: 1239920 - RNA, 19 nt, Human
cuagccaacccaacucccc

SEQ ID NO: 1239921 - RNA, 19 nt, Human
gaaaauaacaccuuccucu

SEQ ID NO: 1239922 - RNA, 18 nt, Human
gacaaggcagaaaagcaa

SEQ ID NO: 1239923 - RNA, 21 nt, Human
gacaaggcagaaaagcaacug

SEQ ID NO: 1239924 - RNA, 22 nt, Human
gcacauacguucaggccuaaaa

SEQ ID NO: 1239925 - RNA, 19 nt, Human
gcccugaaggauggggagu

SEQ ID NO: 1239926 - RNA, 21 nt, Human
ggaaaggugugcugggcagaa

SEQ ID NO: 1239927 - RNA, 23 nt, Human
ggcagcaggaacugagggaagga

SEQ ID NO: 1239928 - RNA, 21 nt, Human
ggcucaauuccugccuucaga

SEQ ID NO: 1239929 - RNA, 22 nt, Human
ggcuuuguaagugaaacuguga

SEQ ID NO: 1239930 - RNA, 24 nt, Human
ggcuuuguaagugaaacugugaga

SEQ ID NO: 1239931 - RNA, 20 nt, Human
gggaagugguugaggguggg

SEQ ID NO: 1239932 - RNA, 18 nt, Human
gggggcuuuguaagugaa

SEQ ID NO: 1239933 - RNA, 19 nt, Human
gugguugaggguggggugg

SEQ ID NO: 1239934 - RNA, 21 nt, Human
uaacaaugccucuaggaucag

SEQ ID NO: 1239935 - RNA, 20 nt, Human
uaagaacacuaugcacauac

SEQ ID NO: 1239936 - RNA, 19 nt, Human
uaagacaaggcagaaaagc

SEQ ID NO: 1239937 - RNA, 23 nt, Human
uaagacaaggcagaaaagcaacu

SEQ ID NO: 1239938 - RNA, 19 nt, Human
uaagugaaacugugagaag

SEQ ID NO: 1239939 - RNA, 18 nt, Human
uacaagcuguguggccuc

SEQ ID NO: 1239940 - RNA, 20 nt, Human
uacaagcuguguggccucag

SEQ ID NO: 1239941 - RNA, 23 nt, Human
uaccuuccaaguccacugcuccu

SEQ ID NO: 1239942 - RNA, 24 nt, Human
uacugaagaggucaaaucagcugu

SEQ ID NO: 1239943 - RNA, 19 nt, Human
uagcuaguaguaacagcaa

SEQ ID NO: 1239944 - RNA, 19 nt, Human
uagcucccuuuucucaccc

SEQ ID NO: 1239945 - RNA, 20 nt, Human
uaggaucagauuauucaggu

SEQ ID NO: 1239946 - RNA, 19 nt, Human
uaguagaauuacuugggcu

SEQ ID NO: 1239947 - RNA, 27 nt, Human
uaguugacuccccagugccuaagguuu

SEQ ID NO: 1239948 - RNA, 18 nt, Human
uauagggcuaaagggugu

SEQ ID NO: 1239949 - RNA, 21 nt, Human
uauggcagugggggagaucug

SEQ ID NO: 1239950 - RNA, 19 nt, Human
uauuccagcgugacccagg

SEQ ID NO: 1239951 - RNA, 20 nt, Human
ucaaugguaacacaagaaaa

SEQ ID NO: 1239952 - RNA, 19 nt, Human
ucacaggguacccaccaca

SEQ ID NO: 1239953 - RNA, 23 nt, Human
ucagggaaagcuuccggggaacc

SEQ ID NO: 1239954 - RNA, 27 nt, Human
ucagugagaauauuauggcaguggggg

SEQ ID NO: 1239955 - RNA, 22 nt, Human
ucaugcagcugaacaauaggcc

SEQ ID NO: 1239956 - RNA, 20 nt, Human
uccggaugcaagauauaggg

SEQ ID NO: 1239957 - RNA, 19 nt, Human
ugaaaauaacaccuuccuc

SEQ ID NO: 1239958 - RNA, 24 nt, Human
ugaaaauaacaccuuccucuagga

SEQ ID NO: 1239959 - RNA, 20 nt, Human
ugagggugggguggggcugg

SEQ ID NO: 1239960 - RNA, 19 nt, Human
ugagguaaacgcuaugaca

SEQ ID NO: 1239961 - RNA, 25 nt, Human
ugcaaaacagggaaggaaaaaaaua

SEQ ID NO: 1239962 - RNA, 26 nt, Human
ugcaaaacagggaaggaaaaaaauac

SEQ ID NO: 1239963 - RNA, 19 nt, Human
ugccuaagguuuguaacac

SEQ ID NO: 1239964 - RNA, 23 nt, Human
ugccuuuagcuuucaagcugccu

SEQ ID NO: 1239965 - RNA, 28 nt, Human
ugcuacagauuucaaugguaacacaaga

SEQ ID NO: 1239966 - RNA, 26 nt, Human
ugcugcaaaacagggaaggaaaaaaa

SEQ ID NO: 1239967 - RNA, 18 nt, Human
uggaaacauuucacugug

SEQ ID NO: 1239968 - RNA, 21 nt, Human
uggaacaauauuuaguuggca

SEQ ID NO: 1239969 - RNA, 20 nt, Human
uggaagaggccacuaaagca

SEQ ID NO: 1239970 - RNA, 18 nt, Human
uggcccgagguggcucag

SEQ ID NO: 1239971 - RNA, 20 nt, Human
ugggguggggcuggaacaau

SEQ ID NO: 1239972 - RNA, 24 nt, Human
ugggguggggcuggaacaauauuu

SEQ ID NO: 1239973 - RNA, 19 nt, Human
uggguggguggaagaggcc

SEQ ID NO: 1239974 - RNA, 22 nt, Human
ugguaucacaggguacccacca

SEQ ID NO: 1239975 - RNA, 21 nt, Human
uggugagguaagggccucagc

SEQ ID NO: 1239976 - RNA, 24 nt, Human
ugguugagggugggguggggcugg

SEQ ID NO: 1239977 - RNA, 18 nt, Human
ugugagaggcacaguggu

SEQ ID NO: 1239978 - RNA, 24 nt, Human
ugugccaggccugugguggguucu

SEQ ID NO: 1239979 - RNA, 19 nt, Human
uguggccucaggcaaauua

SEQ ID NO: 1239980 - RNA, 20 nt, Human
uguuaguguguuuuaugugu

SEQ ID NO: 1239981 - RNA, 20 nt, Human
uuaacaaagauagccaaggc

SEQ ID NO: 1239982 - RNA, 24 nt, Human
uuaauauuaacaaagauagccaag

SEQ ID NO: 1239983 - RNA, 18 nt, Human
uuacccacuaaaaacuac

SEQ ID NO: 1239984 - RNA, 20 nt, Human
uuacuugggcuuucuuacua

SEQ ID NO: 1239985 - RNA, 20 nt, Human
uuuucucacccugaaaucgc

SEQ ID NO: 1239986 - RNA, 20 nt, Human
aaaaagaaacaagacuugaa

SEQ ID NO: 1239987 - RNA, 24 nt, Human
aaaaagucgccucaauaccagaaa

SEQ ID NO: 1239988 - RNA, 23 nt, Human
aaaacaaaccaauacaaccacaa

SEQ ID NO: 1239989 - RNA, 24 nt, Human
aaaagaaacaagacuugaaaugug

SEQ ID NO: 1239990 - RNA, 24 nt, Human
aaaagaaacuacaaaaaguaucau

SEQ ID NO: 1239991 - RNA, 26 nt, Human
aaaaggaagcaguucaucuuucaaaa

SEQ ID NO: 1239992 - RNA, 20 nt, Human
aaacaaaccaauacaaccac

SEQ ID NO: 1239993 - RNA, 23 nt, Human
aaacagaugacggcaauauugau

SEQ ID NO: 1239994 - RNA, 21 nt, Human
aaacaucuugacccaaaucaa

SEQ ID NO: 1239995 - RNA, 19 nt, Human
aaaccaauacaaccacaaa

SEQ ID NO: 1239996 - RNA, 24 nt, Human
aaauaguaaugaaagauuuugaac

SEQ ID NO: 1239997 - RNA, 24 nt, Human
aacaaaccaauacaaccacaaaua

SEQ ID NO: 1239998 - RNA, 19 nt, Human
aacaagacuugaaaugugg

SEQ ID NO: 1239999 - RNA, 22 nt, Human
aacugcgcgcgccccgagccuc

SEQ ID NO: 1240000 - RNA, 19 nt, Human
aagagguaccaccaucacc

SEQ ID NO: 1240001 - RNA, 29 nt, Human
aagcaaaagaagagaugaagagggacccc

SEQ ID NO: 1240002 - RNA, 22 nt, Human
aagcgaaggcagcggcccagag

SEQ ID NO: 1240003 - RNA, 23 nt, Human
aauaaaaugagaaacagcuuuga

SEQ ID NO: 1240004 - RNA, 19 nt, Human
acaaccacaaauacuaccu

SEQ ID NO: 1240005 - RNA, 23 nt, Human
accacaaauacuacccacacaca

SEQ ID NO: 1240006 - RNA, 24 nt, Human
accacaaauacuacccacacacaa

SEQ ID NO: 1240007 - RNA, 26 nt, Human
acucuauaauucaaacuauuuagcug

SEQ ID NO: 1240008 - RNA, 20 nt, Human
acuguucacugaguacuccg

SEQ ID NO: 1240009 - RNA, 19 nt, Human
agaaauaaaaugagaaaca

SEQ ID NO: 1240010 - RNA, 19 nt, Human
agcgcccagccgccggcag

SEQ ID NO: 1240011 - RNA, 22 nt, Human
aguaauuaagcaaaagaagaga

SEQ ID NO: 1240012 - RNA, 21 nt, Human
auaaaguauacuaaacaguaa

SEQ ID NO: 1240013 - RNA, 20 nt, Human
auacaaccacaaauacuacc

SEQ ID NO: 1240014 - RNA, 24 nt, Human
auacagcucaaacugcucuuaacu

SEQ ID NO: 1240015 - RNA, 24 nt, Human
auacuacccacacacaacccugaa

SEQ ID NO: 1240016 - RNA, 18 nt, Human
auccaacaacuaaaagca

SEQ ID NO: 1240017 - RNA, 22 nt, Human
caaaagaagagaugaagacuua

SEQ ID NO: 1240018 - RNA, 21 nt, Human
caaauaccagcauuuaaauuu

SEQ ID NO: 1240019 - RNA, 23 nt, Human
caaauacuacccacacacaaccc

SEQ ID NO: 1240020 - RNA, 19 nt, Human
caacaacuaaaagcacaca

SEQ ID NO: 1240021 - RNA, 20 nt, Human
caagaaauaaaaugagaaaa

SEQ ID NO: 1240022 - RNA, 21 nt, Human
caagcugcacagguguaacuu

SEQ ID NO: 1240023 - RNA, 26 nt, Human
caauaccagaaaauaguaaugaaaga

SEQ ID NO: 1240024 - RNA, 22 nt, Human
cacaacccugaaacauaaguug

SEQ ID NO: 1240025 - RNA, 19 nt, Human
cacacaacagcagauaaau

SEQ ID NO: 1240026 - RNA, 20 nt, Human
cacacauaaacaucagaaac

SEQ ID NO: 1240027 - RNA, 21 nt, Human
cacagguguaacuugaggcac

SEQ ID NO: 1240028 - RNA, 19 nt, Human
cagcucaaacugcucuuaa

SEQ ID NO: 1240029 - RNA, 21 nt, Human
cagugggcugugggcuacgag

SEQ ID NO: 1240030 - RNA, 21 nt, Human
ccaauacaaccacaaauacua

SEQ ID NO: 1240031 - RNA, 18 nt, Human
ccacauaccacucaaagc

SEQ ID NO: 1240032 - RNA, 22 nt, Human
ccauuuaggagaccucaguuau

SEQ ID NO: 1240033 - RNA, 22 nt, Human
cccagaggccgggcgucccccu

SEQ ID NO: 1240034 - RNA, 21 nt, Human
ccccgagccucggcagcgccc

SEQ ID NO: 1240035 - RNA, 23 nt, Human
cccgagccucggcagcgcccagc

SEQ ID NO: 1240036 - RNA, 19 nt, Human
ccgcggcugguggggccug

SEQ ID NO: 1240037 - RNA, 25 nt, Human
ccggagccgcggcugguggggccug

SEQ ID NO: 1240038 - RNA, 18 nt, Human
cgaaggcagcggcccaga

SEQ ID NO: 1240039 - RNA, 23 nt, Human
cgccccgagccucggcagcgccc

SEQ ID NO: 1240040 - RNA, 23 nt, Human
cgggcgucccccuuucgcgccuc

SEQ ID NO: 1240041 - RNA, 19 nt, Human
cuaucaaaacucagaccca

SEQ ID NO: 1240042 - RNA, 24 nt, Human
cuccaaaaacaaaaaacaaaccaa

SEQ ID NO: 1240043 - RNA, 23 nt, Human
gaaacuuuucuuggcacaacuag

SEQ ID NO: 1240044 - RNA, 18 nt, Human
gagaaagcgaaggcagcc

SEQ ID NO: 1240045 - RNA, 23 nt, Human
gagccgcggcugguggggccugg

SEQ ID NO: 1240046 - RNA, 19 nt, Human
gagccucggcagcgcccag

SEQ ID NO: 1240047 - RNA, 18 nt, Human
gccccgagccucggcagc

SEQ ID NO: 1240048 - RNA, 19 nt, Human
gccccgagccucggcagcg

SEQ ID NO: 1240049 - RNA, 20 nt, Human
ggcagacgccaacugcgcgc

SEQ ID NO: 1240050 - RNA, 21 nt, Human
gugggggcggcacagucuugg

SEQ ID NO: 1240051 - RNA, 25 nt, Human
uaaaagaaacuacaaaaaguaucau

SEQ ID NO: 1240052 - RNA, 21 nt, Human
uaaaagcacacaacagcagau

SEQ ID NO: 1240053 - RNA, 22 nt, Human
uaaaagcacacaacagcagaua

SEQ ID NO: 1240054 - RNA, 20 nt, Human
uaaacagaugacggcaauau

SEQ ID NO: 1240055 - RNA, 23 nt, Human
uaagaaaauagcacauccaccag

SEQ ID NO: 1240056 - RNA, 25 nt, Human
uaagagguaccaccaucaccagaac

SEQ ID NO: 1240057 - RNA, 26 nt, Human
uaagcaaaagaagagaugaagacuua

SEQ ID NO: 1240058 - RNA, 18 nt, Human
uacagcucaaacugcucu

SEQ ID NO: 1240059 - RNA, 22 nt, Human
uauccaacaacuaaaagcacac

SEQ ID NO: 1240060 - RNA, 22 nt, Human
ucaaaacucagacccaagcugc

SEQ ID NO: 1240061 - RNA, 27 nt, Human
ucacuccacaaaauuuuaaguaaacag

SEQ ID NO: 1240062 - RNA, 21 nt, Human
ucaguaauuaagcaaaagaag

SEQ ID NO: 1240063 - RNA, 20 nt, Human
uccaaaaacaaaaaacaaac

SEQ ID NO: 1240064 - RNA, 26 nt, Human
uccacaaaauuuuaaguaaacagaca

SEQ ID NO: 1240065 - RNA, 19 nt, Human
ugaaaagacacuccaaaaa

SEQ ID NO: 1240066 - RNA, 23 nt, Human
ugaaaagacacuccaaaaagaaa

SEQ ID NO: 1240067 - RNA, 24 nt, Human
ugaggcacuaacaaucuuccuacc

SEQ ID NO: 1240068 - RNA, 23 nt, Human
ugauuaaaaagaugcucaggcug

SEQ ID NO: 1240069 - RNA, 21 nt, Human
ugggaguguuaaacagaugac

SEQ ID NO: 1240070 - RNA, 20 nt, Human
ugggaugauaguuugaaaag

SEQ ID NO: 1240071 - RNA, 18 nt, Human
ugguggggccugggaagu

SEQ ID NO: 1240072 - RNA, 20 nt, Human
uguccauuuauaaagcucaa

SEQ ID NO: 1240073 - RNA, 19 nt, Human
uguuuuaagaaagggccag

SEQ ID NO: 1240074 - RNA, 18 nt, Human
uguuuugcucuacauuaa

SEQ ID NO: 1240075 - RNA, 21 nt, Human
uuaaggcaucuuuuacuccca

SEQ ID NO: 1240076 - RNA, 21 nt, Human
uuagcugaagucaguuaacga

SEQ ID NO: 1240077 - RNA, 20 nt, Human
uuauauucuccuauuccaca

SEQ ID NO: 1240078 - RNA, 24 nt, Human
uugaauacuugaaaagacacucca

SEQ ID NO: 1240079 - RNA, 23 nt, Human
aaacagugcgcuaaccgggucug

SEQ ID NO: 1240080 - RNA, 20 nt, Human
acagguuguuccauucaggu

SEQ ID NO: 1240081 - RNA, 24 nt, Human
caacagguuguuccauucagguuu

SEQ ID NO: 1240082 - RNA, 18 nt, Human
cacaagcgcucuuugcuc

SEQ ID NO: 1240083 - RNA, 28 nt, Human
cucuuugcucucucaacagguuguucca

SEQ ID NO: 1240084 - RNA, 21 nt, Human
gcucuuugcucucucaacagg

SEQ ID NO: 1240085 - RNA, 21 nt, Human
ucccgugugccacaaacacaa

SEQ ID NO: 1240086 - RNA, 24 nt, Human
ugccacaaacacaagcgcucuuug

SEQ ID NO: 1240087 - RNA, 23 nt, Human
uugcucucucaacagguuguucc

SEQ ID NO: 1240088 - RNA, 19 nt, Human
aauuucccuccagaauccc

SEQ ID NO: 1240089 - RNA, 23 nt, Human
agggcgggaccaaagcgggagga

SEQ ID NO: 1240090 - RNA, 23 nt, Human
caaauccggggcgggggagccgg

SEQ ID NO: 1240091 - RNA, 21 nt, Human
cacugccaagcaagucaagag

SEQ ID NO: 1240092 - RNA, 20 nt, Human
cagaaguguggagagaauaa

SEQ ID NO: 1240093 - RNA, 18 nt, Human
caucaucuucacugccaa

SEQ ID NO: 1240094 - RNA, 27 nt, Human
caucuucacugccaagcaagucaagag

SEQ ID NO: 1240095 - RNA, 21 nt, Human
cccggccugcuccucuucuuc

SEQ ID NO: 1240096 - RNA, 28 nt, Human
ccuccagaaucccgcgcugggagcggag

SEQ ID NO: 1240097 - RNA, 23 nt, Human
cgggaccaaagcgggaggacugg

SEQ ID NO: 1240098 - RNA, 25 nt, Human
cuggcgcgguuuccaagucucccuc

SEQ ID NO: 1240099 - RNA, 23 nt, Human
cuucuucccagagcucaaacugg

SEQ ID NO: 1240100 - RNA, 20 nt, Human
gagcucaaacugggcagcag

SEQ ID NO: 1240101 - RNA, 22 nt, Human
gggccgagccucagggcgggac

SEQ ID NO: 1240102 - RNA, 19 nt, Human
gucccggccugcuccucuu

SEQ ID NO: 1240103 - RNA, 18 nt, Human
uacccguugggccuggcg

SEQ ID NO: 1240104 - RNA, 21 nt, Human
uagguacccguugggccuggc

SEQ ID NO: 1240105 - RNA, 24 nt, Human
uccauggccuguugucucuggagc

SEQ ID NO: 1240106 - RNA, 21 nt, Human
ucccagagcucaaacugggca

SEQ ID NO: 1240107 - RNA, 21 nt, Human
ucccgcgcugggagcggaagc

SEQ ID NO: 1240108 - RNA, 21 nt, Human
ucucaggaagaccuagauuuc

SEQ ID NO: 1240109 - RNA, 25 nt, Human
ucuucuucccagagcucaaacuggg

SEQ ID NO: 1240110 - RNA, 18 nt, Human
ugaauauuaucuuuaaau

SEQ ID NO: 1240111 - RNA, 27 nt, Human
ugcuuuucccgaauucuuccccuucca

SEQ ID NO: 1240112 - RNA, 18 nt, Human
ugggagcggaagcccgcg

SEQ ID NO: 1240113 - RNA, 18 nt, Human
uguugucucuggagcgcu

SEQ ID NO: 1240114 - RNA, 18 nt, Human
uucuucccagagcucaaa

SEQ ID NO: 1240115 - RNA, 19 nt, Human
aaauaaaaugaaagucuau

SEQ ID NO: 1240116 - RNA, 23 nt, Human
cauuauguaaaaagcucgcaucu

SEQ ID NO: 1240117 - RNA, 21 nt, Human
gggaauccaugaguugguagg

SEQ ID NO: 1240118 - RNA, 23 nt, Human
ucuugggaauccaugaguuggua

SEQ ID NO: 1240119 - RNA, 25 nt, Human
uugcuggguuguucuuucauuaugu

SEQ ID NO: 1240120 - RNA, 23 nt, Human
aacacacacccugccccagcaca

SEQ ID NO: 1240121 - RNA, 22 nt, Human
aacacugcucugcuuccuuggu

SEQ ID NO: 1240122 - RNA, 18 nt, Human
aagaggccuugaggcaaa

SEQ ID NO: 1240123 - RNA, 21 nt, Human
aagcccagacugacaaagcaa

SEQ ID NO: 1240124 - RNA, 18 nt, Human
aaggccggaggucgcucc

SEQ ID NO: 1240125 - RNA, 23 nt, Human
aauccucuccagacccaggccug

SEQ ID NO: 1240126 - RNA, 19 nt, Human
acaaaauccucuccagacc

SEQ ID NO: 1240127 - RNA, 22 nt, Human
acaaaauccucuccagacccag

SEQ ID NO: 1240128 - RNA, 23 nt, Human
acaaaauccucuccagacccagg

SEQ ID NO: 1240129 - RNA, 22 nt, Human
acacaaaauccucuccagaccc

SEQ ID NO: 1240130 - RNA, 22 nt, Human
acauacagcucacauuuugcuu

SEQ ID NO: 1240131 - RNA, 21 nt, Human
acgccucaaacaccccauuua

SEQ ID NO: 1240132 - RNA, 21 nt, Human
agaacacacacccugccccag

SEQ ID NO: 1240133 - RNA, 20 nt, Human
agcacuuguugccccaggac

SEQ ID NO: 1240134 - RNA, 21 nt, Human
agcacuuguugccccaggacc

SEQ ID NO: 1240135 - RNA, 22 nt, Human
agcaucuauuuguccuggcaac

SEQ ID NO: 1240136 - RNA, 18 nt, Human
aggaggaaguuuuauaau

SEQ ID NO: 1240137 - RNA, 24 nt, Human
aggcacacucgcugucgacccaaa

SEQ ID NO: 1240138 - RNA, 22 nt, Human
caaaauccucuccagacccagg

SEQ ID NO: 1240139 - RNA, 23 nt, Human
cacaaaauccucuccagacccuu

SEQ ID NO: 1240140 - RNA, 19 nt, Human
cacauccccacagacaccc

SEQ ID NO: 1240141 - RNA, 20 nt, Human
cacauccccacagacacccu

SEQ ID NO: 1240142 - RNA, 24 nt, Human
cacauccccacagacacccuccca

SEQ ID NO: 1240143 - RNA, 22 nt, Human
caccaacagccacccauacgcc

SEQ ID NO: 1240144 - RNA, 21 nt, Human
cacccucccacagaacacaca

SEQ ID NO: 1240145 - RNA, 19 nt, Human
cacccugccccagcacagg

SEQ ID NO: 1240146 - RNA, 27 nt, Human
cagaacacacacccugccccagcacag

SEQ ID NO: 1240147 - RNA, 19 nt, Human
cagacacccucccacagaa

SEQ ID NO: 1240148 - RNA, 18 nt, Human
cagacccaggccugcccc

SEQ ID NO: 1240149 - RNA, 19 nt, Human
cagccacccauacgccuca

SEQ ID NO: 1240150 - RNA, 26 nt, Human
cagccacccauacgccucaaacaccc

SEQ ID NO: 1240151 - RNA, 24 nt, Human
caggaggaaguuuuauaauccauc

SEQ ID NO: 1240152 - RNA, 25 nt, Human
ccaacagccacccauacgccucaaa

SEQ ID NO: 1240153 - RNA, 24 nt, Human
ccacccauacgccucaaacacccc

SEQ ID NO: 1240154 - RNA, 21 nt, Human
ccacccugauagucacauccc

SEQ ID NO: 1240155 - RNA, 20 nt, Human
ccagcacaggcccacccuga

SEQ ID NO: 1240156 - RNA, 18 nt, Human
cccacagaacacacaccc

SEQ ID NO: 1240157 - RNA, 23 nt, Human
cccacagaacacacacccugccc

SEQ ID NO: 1240158 - RNA, 22 nt, Human
cccacccugauagucacauccc

SEQ ID NO: 1240159 - RNA, 21 nt, Human
cccagacugacaaagcaaaaa

SEQ ID NO: 1240160 - RNA, 20 nt, Human
cccauacgccucaaacaccc

SEQ ID NO: 1240161 - RNA, 21 nt, Human
cccauacgccucaaacacccc

SEQ ID NO: 1240162 - RNA, 20 nt, Human
cccauccccagcacaggccc

SEQ ID NO: 1240163 - RNA, 23 nt, Human
ccucccacagaacacacacccug

SEQ ID NO: 1240164 - RNA, 19 nt, Human
ccugccccauccccagcac

SEQ ID NO: 1240165 - RNA, 25 nt, Human
ccuggcaacacagcacuuguugccc

SEQ ID NO: 1240166 - RNA, 21 nt, Human
cgacccaaacacaaagacuaa

SEQ ID NO: 1240167 - RNA, 21 nt, Human
cuacagagucacuguaaucag

SEQ ID NO: 1240168 - RNA, 22 nt, Human
cuccccacaccaacagccaccc

SEQ ID NO: 1240169 - RNA, 19 nt, Human
cugaagaggccuugaggca

SEQ ID NO: 1240170 - RNA, 23 nt, Human
cugccccagcacaggcacacucg

SEQ ID NO: 1240171 - RNA, 20 nt, Human
gaacacacacccugcccccc

SEQ ID NO: 1240172 - RNA, 24 nt, Human
gacaucugcaguaaugucauugaa

SEQ ID NO: 1240173 - RNA, 23 nt, Human
gacccaaacacaaagacuaaugg

SEQ ID NO: 1240174 - RNA, 18 nt, Human
gcccaagcaagaugaugc

SEQ ID NO: 1240175 - RNA, 18 nt, Human
gccccaggacccagcuuc

SEQ ID NO: 1240176 - RNA, 25 nt, Human
gccccaggacccagcuucuucagcg

SEQ ID NO: 1240177 - RNA, 24 nt, Human
gccccauccccagcacaggcccac

SEQ ID NO: 1240178 - RNA, 24 nt, Human
guaaaaguuucacaguuuuccagg

SEQ ID NO: 1240179 - RNA, 22 nt, Human
gucacauccccacagacacccu

SEQ ID NO: 1240180 - RNA, 21 nt, Human
gucuuauuuaagguagccuuu

SEQ ID NO: 1240181 - RNA, 23 nt, Human
uaaaaagugcccuuuuguaagga

SEQ ID NO: 1240182 - RNA, 22 nt, Human
uaaacugaaaaauuaugaagga

SEQ ID NO: 1240183 - RNA, 21 nt, Human
uaacaaggucaaaagcaagac

SEQ ID NO: 1240184 - RNA, 18 nt, Human
uagacaucugcaguaaug

SEQ ID NO: 1240185 - RNA, 19 nt, Human
uaguuuuaaagcaaaauca

SEQ ID NO: 1240186 - RNA, 22 nt, Human
ucaacaucgaauccuuuuagcu

SEQ ID NO: 1240187 - RNA, 19 nt, Human
ucacuguagacaucugcag

SEQ ID NO: 1240188 - RNA, 20 nt, Human
ucacuguagacaucugcagu

SEQ ID NO: 1240189 - RNA, 20 nt, Human
ucaguguaugcauuuuucug

SEQ ID NO: 1240190 - RNA, 21 nt, Human
uccccacaccaacagccaccc

SEQ ID NO: 1240191 - RNA, 19 nt, Human
ucgacccaaacacaaagac

SEQ ID NO: 1240192 - RNA, 18 nt, Human
ugaaaacuguuugugaaa

SEQ ID NO: 1240193 - RNA, 20 nt, Human
ugcucugcuuccuuggugua

SEQ ID NO: 1240194 - RNA, 21 nt, Human
uggaaagauuacgucguggua

SEQ ID NO: 1240195 - RNA, 24 nt, Human
uggcaacacagcacuuguugcccc

SEQ ID NO: 1240196 - RNA, 21 nt, Human
uuaguaauaaaggcauguuuu

SEQ ID NO: 1240197 - RNA, 27 nt, Human
uucacacaaaauccucuccagacccaa

SEQ ID NO: 1240198 - RNA, 22 nt, Human
uugccuuuguuggguccuggaa

SEQ ID NO: 1240199 - RNA, 22 nt, Human
uuuagcuguaauaauuuaugaa

SEQ ID NO: 1240200 - RNA, 20 nt, Human
uuuucugucggcugcuaacu

SEQ ID NO: 1240201 - RNA, 26 nt, Human
uuuugcuuuaaagaguaaacugaaaa

SEQ ID NO: 1240202 - RNA, 22 nt, Human
aaaaauagcaauaaaagccuac

SEQ ID NO: 1240203 - RNA, 20 nt, Human
aaaagcacagcugagucccg

SEQ ID NO: 1240204 - RNA, 23 nt, Human
aaaaggauaggcacagccuuugg

SEQ ID NO: 1240205 - RNA, 20 nt, Human
aaacugcugggauuacaggc

SEQ ID NO: 1240206 - RNA, 24 nt, Human
aaacugcugggauuacaggcguga

SEQ ID NO: 1240207 - RNA, 19 nt, Human
aaauagcaauaaaagccua

SEQ ID NO: 1240208 - RNA, 21 nt, Human
aaauggaaacugacauaaaaa

SEQ ID NO: 1240209 - RNA, 18 nt, Human
aagcuccuucuugcccaa

SEQ ID NO: 1240210 - RNA, 29 nt, Human
aaguuuccaggaagcuuaguguucgggga

SEQ ID NO: 1240211 - RNA, 23 nt, Human
aauagaaaaugaggaaaguccau

SEQ ID NO: 1240212 - RNA, 27 nt, Human
acacagugguggccaagggcugucucc

SEQ ID NO: 1240213 - RNA, 23 nt, Human
acaggcgcccgccauuacgcccg

SEQ ID NO: 1240214 - RNA, 18 nt, Human
acgggguuucacuauguu

SEQ ID NO: 1240215 - RNA, 23 nt, Human
acgggguuucacuauguuggcca

SEQ ID NO: 1240216 - RNA, 24 nt, Human
acgggguuucacuauguuggccag

SEQ ID NO: 1240217 - RNA, 18 nt, Human
acuauguuggccaggcug

SEQ ID NO: 1240218 - RNA, 25 nt, Human
acucugucgcccgggcuggagucca

SEQ ID NO: 1240219 - RNA, 22 nt, Human
acugccaaaggacacucagagg

SEQ ID NO: 1240220 - RNA, 20 nt, Human
agacacaaaagcacagcuga

SEQ ID NO: 1240221 - RNA, 26 nt, Human
agacaguaaauggaaacugacauaaa

SEQ ID NO: 1240222 - RNA, 20 nt, Human
aggcgcccgccauuacgccc

SEQ ID NO: 1240223 - RNA, 22 nt, Human
aggcggcucugcagcccaaagc

SEQ ID NO: 1240224 - RNA, 18 nt, Human
aguagcugggaauacagg

SEQ ID NO: 1240225 - RNA, 21 nt, Human
aguccauucugacaacuggcu

SEQ ID NO: 1240226 - RNA, 24 nt, Human
caaacugcugggauuacaggcgug

SEQ ID NO: 1240227 - RNA, 18 nt, Human
caaagagacacaaaagca

SEQ ID NO: 1240228 - RNA, 24 nt, Human
caaagagacacaaaagcacagcug

SEQ ID NO: 1240229 - RNA, 20 nt, Human
caaccuccgccucccggauu

SEQ ID NO: 1240230 - RNA, 22 nt, Human
caagccauucuccugccucagc

SEQ ID NO: 1240231 - RNA, 24 nt, Human
caaguuuaggucuagggaaguuuc

SEQ ID NO: 1240232 - RNA, 23 nt, Human
cacacgggaaaucgagguaccac

SEQ ID NO: 1240233 - RNA, 23 nt, Human
cacagugguggccaagggcuguc

SEQ ID NO: 1240234 - RNA, 23 nt, Human
cacaugcaaccaaaauagagaau

SEQ ID NO: 1240235 - RNA, 20 nt, Human
caccggagcgcgcaacaauc

SEQ ID NO: 1240236 - RNA, 23 nt, Human
caccgugccgggcccucucucuu

SEQ ID NO: 1240237 - RNA, 20 nt, Human
caccucugccuccugcucag

SEQ ID NO: 1240238 - RNA, 21 nt, Human
caccucugccuccugcucagc

SEQ ID NO: 1240239 - RNA, 21 nt, Human
cacuauguuggccaggcuggu

SEQ ID NO: 1240240 - RNA, 22 nt, Human
cacuauguuggccaggcugguc

SEQ ID NO: 1240241 - RNA, 22 nt, Human
cacucugucgcccgggcuggag

SEQ ID NO: 1240242 - RNA, 21 nt, Human
cacugcaaccuccgccucccg

SEQ ID NO: 1240243 - RNA, 18 nt, Human
cagaagagauggaaccaa

SEQ ID NO: 1240244 - RNA, 19 nt, Human
cagaagagauggaaccaaa

SEQ ID NO: 1240245 - RNA, 21 nt, Human
cagcccuugaaacucugccgg

SEQ ID NO: 1240246 - RNA, 21 nt, Human
caggcgcccgccauuacgccc

SEQ ID NO: 1240247 - RNA, 22 nt, Human
ccaaacugcugggauuacaggc

SEQ ID NO: 1240248 - RNA, 22 nt, Human
ccaaacugcugggauuacaggc

SEQ ID NO: 1240249 - RNA, 24 nt, Human
ccaaacugcugggauuacaggcgu

SEQ ID NO: 1240250 - RNA, 23 nt, Human
ccagccccaaguaaagcgacaaa

SEQ ID NO: 1240251 - RNA, 19 nt, Human
cccccuucggccucccaaa

SEQ ID NO: 1240252 - RNA, 23 nt, Human
cccgaguagcugggaauacaggc

SEQ ID NO: 1240253 - RNA, 22 nt, Human
ccgagccuggggcaccuucgcu

SEQ ID NO: 1240254 - RNA, 24 nt, Human
ccgcggccccuccccugcgcgucc

SEQ ID NO: 1240255 - RNA, 19 nt, Human
ccucuucuucuuuucuuuu

SEQ ID NO: 1240256 - RNA, 23 nt, Human
ccugccucagccucccgaguagc

SEQ ID NO: 1240257 - RNA, 23 nt, Human
ccuguugagucaaaggcaaaggc

SEQ ID NO: 1240258 - RNA, 18 nt, Human
cgccagagcuggaaaggg

SEQ ID NO: 1240259 - RNA, 19 nt, Human
cgcccgggcuggaguccag

SEQ ID NO: 1240260 - RNA, 19 nt, Human
cgccucccggauucaagcc

SEQ ID NO: 1240261 - RNA, 18 nt, Human
cgcucccaccgccccagc

SEQ ID NO: 1240262 - RNA, 24 nt, Human
cgggguuucacuauguuggccagg

SEQ ID NO: 1240263 - RNA, 21 nt, Human
cuauuuaaaaggauaggcaca

SEQ ID NO: 1240264 - RNA, 24 nt, Human
cucacucugucgcccgggcuggag

SEQ ID NO: 1240265 - RNA, 24 nt, Human
cucagaagccacaacauuuucccc

SEQ ID NO: 1240266 - RNA, 19 nt, Human
cucauaauagaaaaugagg

SEQ ID NO: 1240267 - RNA, 21 nt, Human
cucccaaacugcugggauuac

SEQ ID NO: 1240268 - RNA, 22 nt, Human
cuccugaccucgugauucgccc

SEQ ID NO: 1240269 - RNA, 18 nt, Human
cuccuguugagucaaagg

SEQ ID NO: 1240270 - RNA, 19 nt, Human
cugaaugucuuuccucagg

SEQ ID NO: 1240271 - RNA, 30 nt, Human
cugacauaaaaauagcaauaaaagccuacu

SEQ ID NO: 1240272 - RNA, 23 nt, Human
cugccucagccucccgaguagcu

SEQ ID NO: 1240273 - RNA, 19 nt, Human
cugucgcccgggcuggagu

SEQ ID NO: 1240274 - RNA, 18 nt, Human
gaaaagguuuccaccuuc

SEQ ID NO: 1240275 - RNA, 24 nt, Human
gaaaguccauucugacaacuggcu

SEQ ID NO: 1240276 - RNA, 21 nt, Human
gaagccacaacauuuucccca

SEQ ID NO: 1240277 - RNA, 21 nt, Human
gaauguaacaggcaagcauaa

SEQ ID NO: 1240278 - RNA, 18 nt, Human
gaccucgugauucgcccc

SEQ ID NO: 1240279 - RNA, 22 nt, Human
gagaauaauagaauaugggccg

SEQ ID NO: 1240280 - RNA, 19 nt, Human
gagcgcgcaacaaucacuu

SEQ ID NO: 1240281 - RNA, 18 nt, Human
gauuacaggcgugagcca

SEQ ID NO: 1240282 - RNA, 20 nt, Human
gauuacaggcgugagccacc

SEQ ID NO: 1240283 - RNA, 21 nt, Human
gauuacaggcgugagccaccg

SEQ ID NO: 1240284 - RNA, 22 nt, Human
gcaaccuccgccucccggauuc

SEQ ID NO: 1240285 - RNA, 20 nt, Human
gcacacgggaaaucgaggua

SEQ ID NO: 1240286 - RNA, 20 nt, Human
gcccgggcuggaguccagcg

SEQ ID NO: 1240287 - RNA, 20 nt, Human
gccgguccggccgcggcccc

SEQ ID NO: 1240288 - RNA, 23 nt, Human
gcuggucuggaacuccugaccuc

SEQ ID NO: 1240289 - RNA, 19 nt, Human
gcuuccucuucuucuuuuc

SEQ ID NO: 1240290 - RNA, 21 nt, Human
gcuuccucuucuucuuuucuu

SEQ ID NO: 1240291 - RNA, 18 nt, Human
ggaacugaaugucuuucc

SEQ ID NO: 1240292 - RNA, 18 nt, Human
ggcugcuuccucuucuuc

SEQ ID NO: 1240293 - RNA, 24 nt, Human
ggcuggucuggaacuccugaccuc

SEQ ID NO: 1240294 - RNA, 23 nt, Human
gggguuucacuauguuggccagg

SEQ ID NO: 1240295 - RNA, 19 nt, Human
gucccgaagcuggcacacg

SEQ ID NO: 1240296 - RNA, 18 nt, Human
gugagacaguaaauggaa

SEQ ID NO: 1240297 - RNA, 21 nt, Human
uaaaaauagcaauaaaagccu

SEQ ID NO: 1240298 - RNA, 22 nt, Human
uacaggcgugagccaccgugcc

SEQ ID NO: 1240299 - RNA, 22 nt, Human
uagacacgggguuucacuaugu

SEQ ID NO: 1240300 - RNA, 24 nt, Human
uaguagacacgggguuucacuaug

SEQ ID NO: 1240301 - RNA, 18 nt, Human
uaugcagaagagauggaa

SEQ ID NO: 1240302 - RNA, 18 nt, Human
uaugcagaagagauggaa

SEQ ID NO: 1240303 - RNA, 18 nt, Human
uaugcagaagagauggaa

SEQ ID NO: 1240304 - RNA, 19 nt, Human
uaugcagaagagauggaac

SEQ ID NO: 1240305 - RNA, 20 nt, Human
uaugcagaagagauggaacc

SEQ ID NO: 1240306 - RNA, 22 nt, Human
uauguuggccaggcuggucugg

SEQ ID NO: 1240307 - RNA, 23 nt, Human
uauguuggccaggcuggucugga

SEQ ID NO: 1240308 - RNA, 24 nt, Human
uauguuggccaggcuggucuggaa

SEQ ID NO: 1240309 - RNA, 19 nt, Human
ucaaagagacacaaaagca

SEQ ID NO: 1240310 - RNA, 19 nt, Human
ucaaagagacacaaaagca

SEQ ID NO: 1240311 - RNA, 25 nt, Human
ucaagccauucuccugccucagccu

SEQ ID NO: 1240312 - RNA, 24 nt, Human
ucaauacauaauggaauggguaug

SEQ ID NO: 1240313 - RNA, 22 nt, Human
ucacuauguuggccaggcuggu

SEQ ID NO: 1240314 - RNA, 18 nt, Human
ucacugcaaccuccgccu

SEQ ID NO: 1240315 - RNA, 19 nt, Human
ucacugcaaccuccgccuc

SEQ ID NO: 1240316 - RNA, 23 nt, Human
ucacugcaaccuccgccucccgg

SEQ ID NO: 1240317 - RNA, 24 nt, Human
ucacugcaaccuccgccucccgga

SEQ ID NO: 1240318 - RNA, 27 nt, Human
ucacugcaaccuccgccucccggauuc

SEQ ID NO: 1240319 - RNA, 22 nt, Human
ucagaggccagggaauguaaca

SEQ ID NO: 1240320 - RNA, 20 nt, Human
ucagccucccgaguagcugg

SEQ ID NO: 1240321 - RNA, 23 nt, Human
uccagccccaaguaaagcgacaa

SEQ ID NO: 1240322 - RNA, 24 nt, Human
ucccaaacugcugggauuacaggc

SEQ ID NO: 1240323 - RNA, 24 nt, Human
ucccgaguagcugggaauacaggc

SEQ ID NO: 1240324 - RNA, 21 nt, Human
ucccggauucaagccauucuc

SEQ ID NO: 1240325 - RNA, 24 nt, Human
ucccggauucaagccauucuccug

SEQ ID NO: 1240326 - RNA, 18 nt, Human
ucucacucugucgcccgg

SEQ ID NO: 1240327 - RNA, 23 nt, Human
ucucacucugucgcccgggcugg

SEQ ID NO: 1240328 - RNA, 24 nt, Human
ucucacucugucgcccgggcugga

SEQ ID NO: 1240329 - RNA, 24 nt, Human
ucuccugccucagccucccgagua

SEQ ID NO: 1240330 - RNA, 24 nt, Human
ucuuuaguagacacgggguuucac

SEQ ID NO: 1240331 - RNA, 18 nt, Human
ucuuuuuuuuuuuuuuuu

SEQ ID NO: 1240332 - RNA, 22 nt, Human
ugaaugucuuuccucaggccuc

SEQ ID NO: 1240333 - RNA, 21 nt, Human
ugacauaaaaauagcaauaaa

SEQ ID NO: 1240334 - RNA, 24 nt, Human
ugauucgcccccuucggccuccca

SEQ ID NO: 1240335 - RNA, 18 nt, Human
ugccaggcggcucugcag

SEQ ID NO: 1240336 - RNA, 21 nt, Human
ugccaggcggcucugcagccc

SEQ ID NO: 1240337 - RNA, 24 nt, Human
ugccucagccucccgaguagcugg

SEQ ID NO: 1240338 - RNA, 24 nt, Human
ugcugggauuacaggcgugagcca

SEQ ID NO: 1240339 - RNA, 26 nt, Human
uggaaaggggagguccagccccaagu

SEQ ID NO: 1240340 - RNA, 24 nt, Human
uggaguccagcgacgcgaucucgg

SEQ ID NO: 1240341 - RNA, 24 nt, Human
uggccaggcuggucuggaacuccu

SEQ ID NO: 1240342 - RNA, 19 nt, Human
ugggaauacaggcgcccgc

SEQ ID NO: 1240343 - RNA, 21 nt, Human
ugggaauacaggcgcccgcca

SEQ ID NO: 1240344 - RNA, 22 nt, Human
ugggaauacaggcgcccgccau

SEQ ID NO: 1240345 - RNA, 22 nt, Human
ugggacggagucucacucuguc

SEQ ID NO: 1240346 - RNA, 18 nt, Human
ugggauuacaggcgugag

SEQ ID NO: 1240347 - RNA, 21 nt, Human
ugggauuacaggcgugagcca

SEQ ID NO: 1240348 - RNA, 22 nt, Human
ugggauuacaggcgugagccac

SEQ ID NO: 1240349 - RNA, 23 nt, Human
ugggauuacaggcgugagccacc

SEQ ID NO: 1240350 - RNA, 23 nt, Human
ugggauuacaggcgugagccacc

SEQ ID NO: 1240351 - RNA, 24 nt, Human
ugggauuacaggcgugagccaccg

SEQ ID NO: 1240352 - RNA, 21 nt, Human
ugucgcccgggcuggagucca

SEQ ID NO: 1240353 - RNA, 21 nt, Human
uuaguagacacgggguuucac

SEQ ID NO: 1240354 - RNA, 24 nt, Human
uuaguagacacgggguuucacuau

SEQ ID NO: 1240355 - RNA, 21 nt, Human
uucaagccauucuccugccuc

SEQ ID NO: 1240356 - RNA, 25 nt, Human
uuccccgagccuggggcaccuucgc

SEQ ID NO: 1240357 - RNA, 22 nt, Human
uucgcucccaccgccccagcug

SEQ ID NO: 1240358 - RNA, 21 nt, Human
uuggaacugaaugucuuuccu

SEQ ID NO: 1240359 - RNA, 24 nt, Human
uuucacuauguuggccaggcuggu

SEQ ID NO: 1240360 - RNA, 21 nt, Human
uuuugaccacaugcaaccaaa

SEQ ID NO: 1240361 - RNA, 26 nt, Human
uuuuuuuuuuuugggacggagucuca

SEQ ID NO: 1240362 - RNA, 22 nt, Human
uuuuuuuuuuuuuugggacgga

SEQ ID NO: 1240363 - RNA, 24 nt, Human
uuuuuuuuuuuuuuuuuuuuuggg

SEQ ID NO: 1240364 - RNA, 24 nt, Human
aaacaccaccuucucucaagagcc

SEQ ID NO: 1240365 - RNA, 20 nt, Human
aagcaccaggcauacuugac

SEQ ID NO: 1240366 - RNA, 21 nt, Human
accugugguuuucagggcggg

SEQ ID NO: 1240367 - RNA, 24 nt, Human
acuucguguuucaggcaucugccg

SEQ ID NO: 1240368 - RNA, 23 nt, Human
agccaaacaccaccuucucucag

SEQ ID NO: 1240369 - RNA, 18 nt, Human
aggaccacaggcagagcu

SEQ ID NO: 1240370 - RNA, 28 nt, Human
aggaguaugccugucuccaacaagaggg

SEQ ID NO: 1240371 - RNA, 25 nt, Human
aggccuguggugccgugggagauga

SEQ ID NO: 1240372 - RNA, 21 nt, Human
caaacaccaccuucucucaaa

SEQ ID NO: 1240373 - RNA, 23 nt, Human
cacagggcauggcucugggacag

SEQ ID NO: 1240374 - RNA, 22 nt, Human
cacagucuucugcaaaauaucc

SEQ ID NO: 1240375 - RNA, 18 nt, Human
caccuucucucaagagcc

SEQ ID NO: 1240376 - RNA, 19 nt, Human
caggaguaugccugucucc

SEQ ID NO: 1240377 - RNA, 18 nt, Human
caggccuguggugccgug

SEQ ID NO: 1240378 - RNA, 19 nt, Human
cagggcauggcucugggac

SEQ ID NO: 1240379 - RNA, 21 nt, Human
cagggcggggcccaggaccac

SEQ ID NO: 1240380 - RNA, 23 nt, Human
ccacugccaagcucuaagacagu

SEQ ID NO: 1240381 - RNA, 21 nt, Human
ccagaagugguuguuuuccuc

SEQ ID NO: 1240382 - RNA, 22 nt, Human
cccagccaaacaccaccuucuc

SEQ ID NO: 1240383 - RNA, 22 nt, Human
cccaugugaccaggccuguggu

SEQ ID NO: 1240384 - RNA, 20 nt, Human
ccuccuguggucucugaagg

SEQ ID NO: 1240385 - RNA, 25 nt, Human
cgaaugacacaaagccugacccugc

SEQ ID NO: 1240386 - RNA, 19 nt, Human
cggggcccaggaccacagg

SEQ ID NO: 1240387 - RNA, 23 nt, Human
gaaugacacaaagccugacccug

SEQ ID NO: 1240388 - RNA, 19 nt, Human
gcaaaauaucccacagaag

SEQ ID NO: 1240389 - RNA, 18 nt, Human
gccuguggugccguggga

SEQ ID NO: 1240390 - RNA, 20 nt, Human
gcucugggacagagccaugu

SEQ ID NO: 1240391 - RNA, 20 nt, Human
gggcccaggaccacaggcag

SEQ ID NO: 1240392 - RNA, 21 nt, Human
gugcuggcaggggugaggggu

SEQ ID NO: 1240393 - RNA, 24 nt, Human
uacucucggagagugugacggagc

SEQ ID NO: 1240394 - RNA, 19 nt, Human
ucuccaacaagagggcugu

SEQ ID NO: 1240395 - RNA, 19 nt, Human
ucucggccuaucuagaggg

SEQ ID NO: 1240396 - RNA, 18 nt, Human
ugacacaaagccugaccc

SEQ ID NO: 1240397 - RNA, 20 nt, Human
uggcaccacugccaagcucu

SEQ ID NO: 1240398 - RNA, 18 nt, Human
ugguggcccagccaaaca

SEQ ID NO: 1240399 - RNA, 18 nt, Human
uguccuugucccagaagu

SEQ ID NO: 1240400 - RNA, 24 nt, Human
ugugacggagccucccgagggcuu

SEQ ID NO: 1240401 - RNA, 21 nt, Human
ugugcuggcaggggugagggg

SEQ ID NO: 1240402 - RNA, 24 nt, Human
uugguggcccagccaaacaccacc

SEQ ID NO: 1240403 - RNA, 23 nt, Human
uuugguggcccagccaaacacca

SEQ ID NO: 1240404 - RNA, 22 nt, Human
aaaaauuguuaugcuaaacaau

SEQ ID NO: 1240405 - RNA, 24 nt, Human
aaacaaacaaacaaaaaaagcuuu

SEQ ID NO: 1240406 - RNA, 21 nt, Human
aagagcaccacauuguacugg

SEQ ID NO: 1240407 - RNA, 24 nt, Human
aagagcaccacauuguacugguuu

SEQ ID NO: 1240408 - RNA, 24 nt, Human
aagcugaggcaggagaauugcuug

SEQ ID NO: 1240409 - RNA, 24 nt, Human
aauugcuugaaccugggaggcgga

SEQ ID NO: 1240410 - RNA, 19 nt, Human
acaaagauauucugccuuc

SEQ ID NO: 1240411 - RNA, 18 nt, Human
acacacacacacacacac

SEQ ID NO: 1240412 - RNA, 19 nt, Human
acaggcagcaaccauacaa

SEQ ID NO: 1240413 - RNA, 19 nt, Human
acagugaggguuucaugga

SEQ ID NO: 1240414 - RNA, 22 nt, Human
acaguuaaaugaugucucuguc

SEQ ID NO: 1240415 - RNA, 24 nt, Human
accacacuccagccuggcugacag

SEQ ID NO: 1240416 - RNA, 21 nt, Human
acccuccccuccccucuccau

SEQ ID NO: 1240417 - RNA, 22 nt, Human
accuugugaucacagauugcca

SEQ ID NO: 1240418 - RNA, 22 nt, Human
acgacaaaagaugcaaucugaa

SEQ ID NO: 1240419 - RNA, 19 nt, Human
acuagcauguauacauuac

SEQ ID NO: 1240420 - RNA, 21 nt, Human
acugcacgugugccucugccu

SEQ ID NO: 1240421 - RNA, 23 nt, Human
agaaggcagacgugauuuuccaa

SEQ ID NO: 1240422 - RNA, 22 nt, Human
agaauugcuugaaccugggagg

SEQ ID NO: 1240423 - RNA, 21 nt, Human
agacacaccccaggaccugga

SEQ ID NO: 1240424 - RNA, 18 nt, Human
agagcuggaaacagaagc

SEQ ID NO: 1240425 - RNA, 24 nt, Human
agcaugacgacaaaagaugcaauc

SEQ ID NO: 1240426 - RNA, 21 nt, Human
agccgagauugugccaccaca

SEQ ID NO: 1240427 - RNA, 19 nt, Human
agccuggcugacagagaga

SEQ ID NO: 1240428 - RNA, 23 nt, Human
aggcagacgugauuuuccaaaau

SEQ ID NO: 1240429 - RNA, 22 nt, Human
aggcaggagaauugcuugaacc

SEQ ID NO: 1240430 - RNA, 24 nt, Human
aggcaggagaauugcuugaaccug

SEQ ID NO: 1240431 - RNA, 21 nt, Human
aggcggagguugcagugagcc

SEQ ID NO: 1240432 - RNA, 24 nt, Human
aggcggagguugcagugagccgag

SEQ ID NO: 1240433 - RNA, 21 nt, Human
aggguuucauggaggccgugc

SEQ ID NO: 1240434 - RNA, 24 nt, Human
auacacacacacacacacacauuc

SEQ ID NO: 1240435 - RNA, 18 nt, Human
auccugaacaguguucca

SEQ ID NO: 1240436 - RNA, 21 nt, Human
augcaaucugaagcuggugga

SEQ ID NO: 1240437 - RNA, 24 nt, Human
auugugccaccacacuccagccug

SEQ ID NO: 1240438 - RNA, 21 nt, Human
caagacagaugaugggaaagc

SEQ ID NO: 1240439 - RNA, 18 nt, Human
caagagcaccacauugua

SEQ ID NO: 1240440 - RNA, 25 nt, Human
caagucucuaagcugaccaaugagc

SEQ ID NO: 1240441 - RNA, 18 nt, Human
caaguuccgugagccuag

SEQ ID NO: 1240442 - RNA, 18 nt, Human
cacacacacacacacaca

SEQ ID NO: 1240443 - RNA, 24 nt, Human
cacacacacacacacauucacuuc

SEQ ID NO: 1240444 - RNA, 24 nt, Human
caccacacuccagccuggcugaca

SEQ ID NO: 1240445 - RNA, 20 nt, Human
cacccuccccuccccucucc

SEQ ID NO: 1240446 - RNA, 19 nt, Human
caccuggcuucucugggag

SEQ ID NO: 1240447 - RNA, 24 nt, Human
caccuguaguuccagcuacucagg

SEQ ID NO: 1240448 - RNA, 21 nt, Human
cacgcagcccuguaucucuac

SEQ ID NO: 1240449 - RNA, 23 nt, Human
cacugcaugaaccuuuaagaaau

SEQ ID NO: 1240450 - RNA, 21 nt, Human
cacuucucaaaaacugaucca

SEQ ID NO: 1240451 - RNA, 22 nt, Human
cagagcuggaaacagaagccaa

SEQ ID NO: 1240452 - RNA, 24 nt, Human
cagcagggauucgauuccaccaua

SEQ ID NO: 1240453 - RNA, 18 nt, Human
caggaagccugcccugau

SEQ ID NO: 1240454 - RNA, 18 nt, Human
cauggaggccgugcacag

SEQ ID NO: 1240455 - RNA, 21 nt, Human
ccaaaacuuagaccucaguaa

SEQ ID NO: 1240456 - RNA, 19 nt, Human
ccacaggagaaaugaacaa

SEQ ID NO: 1240457 - RNA, 25 nt, Human
ccaccuguaguuccagcuacucagg

SEQ ID NO: 1240458 - RNA, 19 nt, Human
ccauauccugucagucugc

SEQ ID NO: 1240459 - RNA, 18 nt, Human
ccuccugcuccaggaagc

SEQ ID NO: 1240460 - RNA, 18 nt, Human
ccugaacaguguuccagg

SEQ ID NO: 1240461 - RNA, 19 nt, Human
ccugggaggcggagguugc

SEQ ID NO: 1240462 - RNA, 21 nt, Human
ccuguaguuccagcuacucag

SEQ ID NO: 1240463 - RNA, 20 nt, Human
cuaagcugaccaaugagcau

SEQ ID NO: 1240464 - RNA, 21 nt, Human
cugcaaguuccgugagccuag

SEQ ID NO: 1240465 - RNA, 19 nt, Human
cugcacacagggacaggug

SEQ ID NO: 1240466 - RNA, 24 nt, Human
cugcacgugugccucugccacacu

SEQ ID NO: 1240467 - RNA, 19 nt, Human
cuuccuacgucuucugcau

SEQ ID NO: 1240468 - RNA, 23 nt, Human
cuuuguucuacauccccaagaag

SEQ ID NO: 1240469 - RNA, 18 nt, Human
gaagauacuaaauuccac

SEQ ID NO: 1240470 - RNA, 22 nt, Human
gacaggggggcuaaagauucau

SEQ ID NO: 1240471 - RNA, 18 nt, Human
gacauggcgggggugugg

SEQ ID NO: 1240472 - RNA, 19 nt, Human
gaccaaugagcaugacagg

SEQ ID NO: 1240473 - RNA, 18 nt, Human
gacuuuguucuacauccc

SEQ ID NO: 1240474 - RNA, 23 nt, Human
gagauugugccaccacacuccag

SEQ ID NO: 1240475 - RNA, 19 nt, Human
gagcacagucacaauucau

SEQ ID NO: 1240476 - RNA, 21 nt, Human
gagccacaggacgggagcugg

SEQ ID NO: 1240477 - RNA, 21 nt, Human
gagcugccauccauuugcugc

SEQ ID NO: 1240478 - RNA, 21 nt, Human
gagguugcagugagccgagau

SEQ ID NO: 1240479 - RNA, 23 nt, Human
gagguugcagugagccgagauug

SEQ ID NO: 1240480 - RNA, 21 nt, Human
gaugaugggaaagcaugagga

SEQ ID NO: 1240481 - RNA, 22 nt, Human
gcagcccgaggucuuggaaucc

SEQ ID NO: 1240482 - RNA, 21 nt, Human
gccugcacccuccccuccccu

SEQ ID NO: 1240483 - RNA, 20 nt, Human
gcuggaaacagaagccaaca

SEQ ID NO: 1240484 - RNA, 18 nt, Human
ggagaccauuuucuuuau

SEQ ID NO: 1240485 - RNA, 22 nt, Human
ggagguugcagugagccgagau

SEQ ID NO: 1240486 - RNA, 24 nt, Human
ggagguugcagugagccgagauug

SEQ ID NO: 1240487 - RNA, 25 nt, Human
guaguuuuuuaaucuccacaggaga

SEQ ID NO: 1240488 - RNA, 21 nt, Human
gugccucugccacacuuucug

SEQ ID NO: 1240489 - RNA, 19 nt, Human
guugacuuccugaaagugu

SEQ ID NO: 1240490 - RNA, 20 nt, Human
guugacuuccugaaaguguc

SEQ ID NO: 1240491 - RNA, 24 nt, Human
guugcagugagccgagauugugcc

SEQ ID NO: 1240492 - RNA, 24 nt, Human
guuugauaacagccuuucuuucac

SEQ ID NO: 1240493 - RNA, 20 nt, Human
uaaccuguagaaaugugauu

SEQ ID NO: 1240494 - RNA, 21 nt, Human
uaagcacuaaccgcuuccucc

SEQ ID NO: 1240495 - RNA, 21 nt, Human
uaagguugaacccaagagauc

SEQ ID NO: 1240496 - RNA, 22 nt, Human
uagcauaacucaaugaaucacu

SEQ ID NO: 1240497 - RNA, 19 nt, Human
uagcuugaaaaugcugccu

SEQ ID NO: 1240498 - RNA, 26 nt, Human
uaggaugaugauagccaggggcaaau

SEQ ID NO: 1240499 - RNA, 19 nt, Human
uaggaugccaaccaucccu

SEQ ID NO: 1240500 - RNA, 24 nt, Human
uagguaugguggcaccaccuguag

SEQ ID NO: 1240501 - RNA, 25 nt, Human
uaucucuacuaaaaagaggaaaaau

SEQ ID NO: 1240502 - RNA, 21 nt, Human
ucaaaccaaaauguagauggu

SEQ ID NO: 1240503 - RNA, 22 nt, Human
ucaaugcuccuaacuuguauca

SEQ ID NO: 1240504 - RNA, 22 nt, Human
ucaaugucuuguuccacugcag

SEQ ID NO: 1240505 - RNA, 19 nt, Human
ucacaggcagcaaccauac

SEQ ID NO: 1240506 - RNA, 19 nt, Human
ucaguuuaacccuuugagc

SEQ ID NO: 1240507 - RNA, 21 nt, Human
ucauaauuaaucucagaucaa

SEQ ID NO: 1240508 - RNA, 20 nt, Human
uccacaggagaaaugaacaa

SEQ ID NO: 1240509 - RNA, 22 nt, Human
uccagguagccaaagcuggucu

SEQ ID NO: 1240510 - RNA, 24 nt, Human
ucccaaaaugacuccgauuuggug

SEQ ID NO: 1240511 - RNA, 22 nt, Human
uccccuggccuucaccuggcuu

SEQ ID NO: 1240512 - RNA, 18 nt, Human
uccuccuccaccuucccu

SEQ ID NO: 1240513 - RNA, 24 nt, Human
ucuaaacaaacaaacaaaaaaagc

SEQ ID NO: 1240514 - RNA, 20 nt, Human
ucugcaagucucuaagcuga

SEQ ID NO: 1240515 - RNA, 21 nt, Human
ucugccucuucucaaaccaaa

SEQ ID NO: 1240516 - RNA, 23 nt, Human
ugaaaacgcuauucaaguucuua

SEQ ID NO: 1240517 - RNA, 24 nt, Human
ugaaccugggaggcggagguugca

SEQ ID NO: 1240518 - RNA, 24 nt, Human
ugaaucugugggagaccauuuucu

SEQ ID NO: 1240519 - RNA, 22 nt, Human
ugacuuccugaaaguguccuuc

SEQ ID NO: 1240520 - RNA, 19 nt, Human
ugagccgagauugugccac

SEQ ID NO: 1240521 - RNA, 24 nt, Human
ugaggcaggagaauugcuugaacc

SEQ ID NO: 1240522 - RNA, 24 nt, Human
ugaggcaggagaauugcuugaacc

SEQ ID NO: 1240523 - RNA, 19 nt, Human
ugcaacucagccucagccu

SEQ ID NO: 1240524 - RNA, 18 nt, Human
ugcacaggacugccccca

SEQ ID NO: 1240525 - RNA, 23 nt, Human
ugcacaggacugcccccaucugc

SEQ ID NO: 1240526 - RNA, 26 nt, Human
ugcacaggcauacacacacacacaca

SEQ ID NO: 1240527 - RNA, 22 nt, Human
ugcacccuccccuccccucucc

SEQ ID NO: 1240528 - RNA, 25 nt, Human
ugcagaaugaagcugaugugcacaa

SEQ ID NO: 1240529 - RNA, 20 nt, Human
ugccaaggauaaaaauccag

SEQ ID NO: 1240530 - RNA, 20 nt, Human
ugccucugccacacuuucug

SEQ ID NO: 1240531 - RNA, 21 nt, Human
ugcuugaaccugggaggcgga

SEQ ID NO: 1240532 - RNA, 22 nt, Human
uggaaagauacauaaccaaaag

SEQ ID NO: 1240533 - RNA, 21 nt, Human
uggaauccugaacaguguucc

SEQ ID NO: 1240534 - RNA, 25 nt, Human
uggaggcagcagcaugacgacaaaa

SEQ ID NO: 1240535 - RNA, 22 nt, Human
uggagggcgagcugcccaaaug

SEQ ID NO: 1240536 - RNA, 20 nt, Human
uggaugacccaaaacuuaga

SEQ ID NO: 1240537 - RNA, 23 nt, Human
uggcacaaaauugugcacagaua

SEQ ID NO: 1240538 - RNA, 21 nt, Human
uggcaccaccuguaguuccag

SEQ ID NO: 1240539 - RNA, 18 nt, Human
uggcuugucuuccuacgu

SEQ ID NO: 1240540 - RNA, 29 nt, Human
ugggaggcggagguugcagugacaacggu

SEQ ID NO: 1240541 - RNA, 24 nt, Human
ugggaggcggagguugcagugagc

SEQ ID NO: 1240542 - RNA, 21 nt, Human
ugggauguggaggcagcagca

SEQ ID NO: 1240543 - RNA, 25 nt, Human
ugggggucuucaauaauuuccuagu

SEQ ID NO: 1240544 - RNA, 21 nt, Human
uggugacaagguaaagaguag

SEQ ID NO: 1240545 - RNA, 22 nt, Human
ugguggcaccaccuguaguucc

SEQ ID NO: 1240546 - RNA, 23 nt, Human
ugguggcaccaccuguaguucca

SEQ ID NO: 1240547 - RNA, 27 nt, Human
uguauauuaucacuaauuggauacuuu

SEQ ID NO: 1240548 - RNA, 23 nt, Human
ugucagucugcacaggcauacac

SEQ ID NO: 1240549 - RNA, 19 nt, Human
uguccuguguucacagugg

SEQ ID NO: 1240550 - RNA, 22 nt, Human
ugucuuccuacgucuucugcau

SEQ ID NO: 1240551 - RNA, 20 nt, Human
uguuccacugcagcccgagg

SEQ ID NO: 1240552 - RNA, 19 nt, Human
uuaaaaauacuuuccaaaa

SEQ ID NO: 1240553 - RNA, 20 nt, Human
uuacuuggaguauuucaugu

SEQ ID NO: 1240554 - RNA, 21 nt, Human
uuacuuggaguauuucaugua

SEQ ID NO: 1240555 - RNA, 18 nt, Human
uuagcuagguaugguggc

SEQ ID NO: 1240556 - RNA, 18 nt, Human
uuaggaugccaaccaucc

SEQ ID NO: 1240557 - RNA, 19 nt, Human
uuaugguaaagaaugugag

SEQ ID NO: 1240558 - RNA, 22 nt, Human
uucacaggcagcaaccauacaa

SEQ ID NO: 1240559 - RNA, 20 nt, Human
uucaccuggcuucucuggga

SEQ ID NO: 1240560 - RNA, 21 nt, Human
uucauggaggccgugcacagg

SEQ ID NO: 1240561 - RNA, 18 nt, Human
uuccaacugugaaucugu

SEQ ID NO: 1240562 - RNA, 24 nt, Human
uuccagcuacucaggaagcugagg

SEQ ID NO: 1240563 - RNA, 23 nt, Human
uuccccuggccuucaccuggcuu

SEQ ID NO: 1240564 - RNA, 21 nt, Human
uuccugaaaguguccucucca

SEQ ID NO: 1240565 - RNA, 24 nt, Human
uugaaccugggaggcggagguugc

SEQ ID NO: 1240566 - RNA, 19 nt, Human
uugcagugagccgagauug

SEQ ID NO: 1240567 - RNA, 22 nt, Human
uugcagugagccgagauugugc

SEQ ID NO: 1240568 - RNA, 24 nt, Human
uugcuugaaccugggaggcggagg

SEQ ID NO: 1240569 - RNA, 22 nt, Human
uugugcacagauaaaaguugug

SEQ ID NO: 1240570 - RNA, 22 nt, Human
uuucauguccuguguucacagu

SEQ ID NO: 1240571 - RNA, 23 nt, Human
uuuccaaaaaaaaaaaaaaugua

SEQ ID NO: 1240572 - RNA, 21 nt, Human
uuuguaauugguagagacauu

SEQ ID NO: 1240573 - RNA, 19 nt, Human
agagaugggguuucaccgu

SEQ ID NO: 1240574 - RNA, 21 nt, Human
aggcgccccucugagagucuc

SEQ ID NO: 1240575 - RNA, 24 nt, Human
auccugaccucgugauccgcccgc

SEQ ID NO: 1240576 - RNA, 18 nt, Human
augggguuucaccguguu

SEQ ID NO: 1240577 - RNA, 19 nt, Human
augggguuucaccguguua

SEQ ID NO: 1240578 - RNA, 20 nt, Human
augggguuucaccguguuag

SEQ ID NO: 1240579 - RNA, 18 nt, Human
caccguguuagccaggau

SEQ ID NO: 1240580 - RNA, 24 nt, Human
caccguguuagccaggauggucuc

SEQ ID NO: 1240581 - RNA, 25 nt, Human
cagcggcgaggcgcgcggccggagc

SEQ ID NO: 1240582 - RNA, 21 nt, Human
caguggcgcgcgaggaacagg

SEQ ID NO: 1240583 - RNA, 18 nt, Human
cccccagcccucgccgcc

SEQ ID NO: 1240584 - RNA, 23 nt, Human
cccgggcuacugcugccgcuccc

SEQ ID NO: 1240585 - RNA, 24 nt, Human
cgcgcggccggagcaggucugcug

SEQ ID NO: 1240586 - RNA, 18 nt, Human
cgcggcgcccggagcccc

SEQ ID NO: 1240587 - RNA, 22 nt, Human
gaccucgugauccgcccgccuc

SEQ ID NO: 1240588 - RNA, 22 nt, Human
gaccucgugauccgcccgccuc

SEQ ID NO: 1240589 - RNA, 24 nt, Human
gaccucgugauccgcccgccucgg

SEQ ID NO: 1240590 - RNA, 24 nt, Human
gagaugggguuucaccguguuagc

SEQ ID NO: 1240591 - RNA, 18 nt, Human
gcgcggccggagcagguc

SEQ ID NO: 1240592 - RNA, 18 nt, Human
gcggccggagcaggucug

SEQ ID NO: 1240593 - RNA, 22 nt, Human
gggguuucaccguguuagccag

SEQ ID NO: 1240594 - RNA, 20 nt, Human
ggucucgauauccugaccuc

SEQ ID NO: 1240595 - RNA, 26 nt, Human
gguggugggcgccgaugggagggaag

SEQ ID NO: 1240596 - RNA, 24 nt, Human
gugauccgcccgccucggccuucc

SEQ ID NO: 1240597 - RNA, 21 nt, Human
uaguagagaugggguuucacc

SEQ ID NO: 1240598 - RNA, 24 nt, Human
uaguagagaugggguuucaccgug

SEQ ID NO: 1240599 - RNA, 26 nt, Human
uaguagagaugggguuucaccguguu

SEQ ID NO: 1240600 - RNA, 24 nt, Human
ucaccguguuagccaggauggucu

SEQ ID NO: 1240601 - RNA, 28 nt, Human
ucgccgcccgggcuacugcugccgcucc

SEQ ID NO: 1240602 - RNA, 18 nt, Human
ucggccuuccaaagugcu

SEQ ID NO: 1240603 - RNA, 27 nt, Human
uggcgcgcgaggaacagguuggggugg

SEQ ID NO: 1240604 - RNA, 24 nt, Human
ugggguuucaccguguuagccagg

SEQ ID NO: 1240605 - RNA, 21 nt, Human
uguauuuuuaguagagauggg

SEQ ID NO: 1240606 - RNA, 18 nt, Human
uuaguagagaugggguuu

SEQ ID NO: 1240607 - RNA, 22 nt, Human
uuaguagagaugggguuucacc

SEQ ID NO: 1240608 - RNA, 24 nt, Human
uuaguagagaugggguuucaccgu

SEQ ID NO: 1240609 - RNA, 23 nt, Human
uuguauuuuuaguagagaugggg

SEQ ID NO: 1240610 - RNA, 19 nt, Human
uuucaccguguuagccagg

SEQ ID NO: 1240611 - RNA, 24 nt, Human
uuuuuaguagagaugggguuucac

SEQ ID NO: 1240612 - RNA, 21 nt, Human
uuuuuguauuuuuaguagaga

SEQ ID NO: 1240613 - RNA, 21 nt, Human
uuuuuuguauuuuuaguagag

SEQ ID NO: 1240614 - RNA, 24 nt, Human
uuuuuuguauuuuuaguagagaug

SEQ ID NO: 1240615 - RNA, 24 nt, Human
uuuuuuuuguauuuuuaguagaga

SEQ ID NO: 1240616 - RNA, 18 nt, Human
uuuuuuuuuuuuuuuuug

SEQ ID NO: 1240617 - RNA, 24 nt, Human
uuuuuuuuuuuuuuuuuguauuuu

SEQ ID NO: 1240618 - RNA, 21 nt, Human
aaaccaaaaaugucugcacac

SEQ ID NO: 1240619 - RNA, 22 nt, Human
aaggaaaaaaaaaguuuaaaaa

SEQ ID NO: 1240620 - RNA, 25 nt, Human
aaggaaaaaaaaaguuuaaaaaaaa

SEQ ID NO: 1240621 - RNA, 24 nt, Human
acagcagcaccaugagaaaaaagc

SEQ ID NO: 1240622 - RNA, 18 nt, Human
accaucuucuucccucca

SEQ ID NO: 1240623 - RNA, 21 nt, Human
accaucuucuucccuccaucc

SEQ ID NO: 1240624 - RNA, 21 nt, Human
agaaauuucagaggauuuaga

SEQ ID NO: 1240625 - RNA, 24 nt, Human
agaaauuucagaggauuuagacaa

SEQ ID NO: 1240626 - RNA, 23 nt, Human
aggaaaaaaaaaguuuaaaaaaa

SEQ ID NO: 1240627 - RNA, 24 nt, Human
aggaaaaaaaaaguuuaaaaaaaa

SEQ ID NO: 1240628 - RNA, 22 nt, Human
aggaagaggcuucucggccgcg

SEQ ID NO: 1240629 - RNA, 19 nt, Human
cagcaccaugagaaaaaag

SEQ ID NO: 1240630 - RNA, 26 nt, Human
cagcagcaccaugagaaaaaagcucu

SEQ ID NO: 1240631 - RNA, 22 nt, Human
ccauccaccaaaaaacuaaagu

SEQ ID NO: 1240632 - RNA, 18 nt, Human
cccuccauccaccaaaaa

SEQ ID NO: 1240633 - RNA, 22 nt, Human
cccucuugccgucgccgcgggu

SEQ ID NO: 1240634 - RNA, 18 nt, Human
ccgcggagccacuugggg

SEQ ID NO: 1240635 - RNA, 22 nt, Human
ccugaauucagaaggaaaaaaa

SEQ ID NO: 1240636 - RNA, 21 nt, Human
cggagccacuuggggccucag

SEQ ID NO: 1240637 - RNA, 23 nt, Human
cugcacacauggucccccaaaau

SEQ ID NO: 1240638 - RNA, 21 nt, Human
cuucucggccgcggagccacu

SEQ ID NO: 1240639 - RNA, 22 nt, Human
cuuggggccucaguucucgccc

SEQ ID NO: 1240640 - RNA, 18 nt, Human
gaaaaaagcucuccuucg

SEQ ID NO: 1240641 - RNA, 18 nt, Human
gccccaggaagaggcuuc

SEQ ID NO: 1240642 - RNA, 18 nt, Human
gccucaguucucgcccuc

SEQ ID NO: 1240643 - RNA, 21 nt, Human
gccucaguucucgcccucuug

SEQ ID NO: 1240644 - RNA, 23 nt, Human
gccucaguucucgcccucuugcc

SEQ ID NO: 1240645 - RNA, 19 nt, Human
ggcaucgcgguuccaacgg

SEQ ID NO: 1240646 - RNA, 22 nt, Human
uaacacagcagcaccaugagaa

SEQ ID NO: 1240647 - RNA, 22 nt, Human
uagacaaagcagguagauuaaa

SEQ ID NO: 1240648 - RNA, 23 nt, Human
ucacuaggcuaacacagcagcac

SEQ ID NO: 1240649 - RNA, 22 nt, Human
ugaauucagaaggaaaaaaaaa

SEQ ID NO: 1240650 - RNA, 20 nt, Human
ugagaaaaaagcucuccuuc

SEQ ID NO: 1240651 - RNA, 22 nt, Human
uggacaaaacacuuuacugcca

SEQ ID NO: 1240652 - RNA, 24 nt, Human
ugucugcacacauggucccccaaa

SEQ ID NO: 1240653 - RNA, 23 nt, Human
uuaaaaaaaaaccaaaaaugucu

SEQ ID NO: 1240654 - RNA, 22 nt, Human
uucagaaggaaaaaaaaaguuu

SEQ ID NO: 1240655 - RNA, 26 nt, Human
uucagaaggaaaaaaaaaguuuaaaa

SEQ ID NO: 1240656 - RNA, 24 nt, Human
uucucggccgcggagccacuuggg

SEQ ID NO: 1240657 - RNA, 19 nt, Human
aaaagccuugcagcauacc

SEQ ID NO: 1240658 - RNA, 21 nt, Human
aauaucacagaggaaaauuuc

SEQ ID NO: 1240659 - RNA, 19 nt, Human
acuuaucugaguuuacaca

SEQ ID NO: 1240660 - RNA, 23 nt, Human
acuuuggcccauucccccccacc

SEQ ID NO: 1240661 - RNA, 24 nt, Human
agggcugggauuucaggcuuaggu

SEQ ID NO: 1240662 - RNA, 21 nt, Human
auuucaggcuuaggucuucug

SEQ ID NO: 1240663 - RNA, 20 nt, Human
cuuccuuuccuggaagucau

SEQ ID NO: 1240664 - RNA, 20 nt, Human
cuugcagucuaaaauaucac

SEQ ID NO: 1240665 - RNA, 20 nt, Human
gacuuuggcccauucccccc

SEQ ID NO: 1240666 - RNA, 18 nt, Human
gcccauucccccccaccc

SEQ ID NO: 1240667 - RNA, 19 nt, Human
gcccauucccccccacccc

SEQ ID NO: 1240668 - RNA, 21 nt, Human
gcccuggaaccugcccucauu

SEQ ID NO: 1240669 - RNA, 25 nt, Human
gcccuggaaccugcccucauuucuu

SEQ ID NO: 1240670 - RNA, 18 nt, Human
ggagaagaggggaugacu

SEQ ID NO: 1240671 - RNA, 27 nt, Human
gggcacagguuugagcaguuccugagg

SEQ ID NO: 1240672 - RNA, 27 nt, Human
guuaggggcagggcugggauuucaggc

SEQ ID NO: 1240673 - RNA, 19 nt, Human
uaggucuucugguucccca

SEQ ID NO: 1240674 - RNA, 20 nt, Human
ucccagagaaaggugacuua

SEQ ID NO: 1240675 - RNA, 21 nt, Human
ugagcaguuccugaggagaag

SEQ ID NO: 1240676 - RNA, 24 nt, Human
ugcagucuaaaauaucacagagga

SEQ ID NO: 1240677 - RNA, 21 nt, Human
uggcccauucccccccacccc

SEQ ID NO: 1240678 - RNA, 23 nt, Human
uuauauaccaugcuuccuuuccu

SEQ ID NO: 1240679 - RNA, 21 nt, Human
uuggcccauucccccccaccc

SEQ ID NO: 1240680 - RNA, 20 nt, Human
uuucaggcccuggaaccuga

SEQ ID NO: 1240681 - RNA, 19 nt, Human
uuucaggcuuaggucuucu

SEQ ID NO: 1240682 - RNA, 26 nt, Human
uuuggcccauucccccccaccccuuu

SEQ ID NO: 1240683 - RNA, 23 nt, Human
aaaggagagaggguuaaggaaau

SEQ ID NO: 1240684 - RNA, 19 nt, Human
aaagugcugggauuacagg

SEQ ID NO: 1240685 - RNA, 24 nt, Human
aaagugcugggauuacaggcuuga

SEQ ID NO: 1240686 - RNA, 19 nt, Human
aacccaucuccugacucug

SEQ ID NO: 1240687 - RNA, 19 nt, Human
aaccuccaccuugcaaguu

SEQ ID NO: 1240688 - RNA, 20 nt, Human
aagaaggaagaaagcaugga

SEQ ID NO: 1240689 - RNA, 19 nt, Human
aagugcugggauuacaggc

SEQ ID NO: 1240690 - RNA, 19 nt, Human
aagugcugggauuacaggc

SEQ ID NO: 1240691 - RNA, 26 nt, Human
aagugcugggauuacaggcuugagcc

SEQ ID NO: 1240692 - RNA, 22 nt, Human
acagcccaggcagugacugaau

SEQ ID NO: 1240693 - RNA, 24 nt, Human
acuguguuggccaggcuggucuug

SEQ ID NO: 1240694 - RNA, 18 nt, Human
agaaagcauggaucugcu

SEQ ID NO: 1240695 - RNA, 19 nt, Human
agacaggguccugcuuccu

SEQ ID NO: 1240696 - RNA, 20 nt, Human
agaugaggggucaugggguu

SEQ ID NO: 1240697 - RNA, 22 nt, Human
agaugaggggucaugggguugg

SEQ ID NO: 1240698 - RNA, 18 nt, Human
agccuaggaaugccuggu

SEQ ID NO: 1240699 - RNA, 20 nt, Human
aggagguuuaaguaagaaaa

SEQ ID NO: 1240700 - RNA, 20 nt, Human
aggauacuggguuaaacaaa

SEQ ID NO: 1240701 - RNA, 18 nt, Human
aggcccagaaccacacag

SEQ ID NO: 1240702 - RNA, 19 nt, Human
aguagagaugggguuucac

SEQ ID NO: 1240703 - RNA, 23 nt, Human
aguagcugggacuacaggcaugu

SEQ ID NO: 1240704 - RNA, 18 nt, Human
agucaugauaauucaggc

SEQ ID NO: 1240705 - RNA, 21 nt, Human
agugcaguggcgugauuucag

SEQ ID NO: 1240706 - RNA, 23 nt, Human
agugcaguggcgugauuucagcu

SEQ ID NO: 1240707 - RNA, 24 nt, Human
agugcaguggcgugauuucagcuc

SEQ ID NO: 1240708 - RNA, 18 nt, Human
auaaaaugugugacuacc

SEQ ID NO: 1240709 - RNA, 24 nt, Human
auccaccugccacagccucccaaa

SEQ ID NO: 1240710 - RNA, 24 nt, Human
aucuaguugggcagcaaaaucugg

SEQ ID NO: 1240711 - RNA, 21 nt, Human
aucuggcuauuucuagaaaug

SEQ ID NO: 1240712 - RNA, 22 nt, Human
augccucagccucccgaguagc

SEQ ID NO: 1240713 - RNA, 21 nt, Human
augccuccuccugggucugac

SEQ ID NO: 1240714 - RNA, 23 nt, Human
augggguuucacuguguuggcca

SEQ ID NO: 1240715 - RNA, 24 nt, Human
augggguuucacuguguuggccag

SEQ ID NO: 1240716 - RNA, 24 nt, Human
caaagugcugggauuacaggcuug

SEQ ID NO: 1240717 - RNA, 20 nt, Human
caacugagcaguuguccccu

SEQ ID NO: 1240718 - RNA, 26 nt, Human
caacugagcaguuguccccuacaagc

SEQ ID NO: 1240719 - RNA, 23 nt, Human
caagucaguuucauuauggccaa

SEQ ID NO: 1240720 - RNA, 20 nt, Human
cacacagcccaggcagugac

SEQ ID NO: 1240721 - RNA, 24 nt, Human
cacacagcccaggcagugacugaa

SEQ ID NO: 1240722 - RNA, 24 nt, Human
caccacaccuggcuaauuuuugua

SEQ ID NO: 1240723 - RNA, 23 nt, Human
caccugccacagccucccaaagu

SEQ ID NO: 1240724 - RNA, 19 nt, Human
cacuguguuggccaggcug

SEQ ID NO: 1240725 - RNA, 21 nt, Human
cacuguguuggccaggcuggu

SEQ ID NO: 1240726 - RNA, 24 nt, Human
cacuguguuggccaggcuggucuu

SEQ ID NO: 1240727 - RNA, 21 nt, Human
cagaaaagaugaggggucaug

SEQ ID NO: 1240728 - RNA, 19 nt, Human
cagccuggagagcuggcaa

SEQ ID NO: 1240729 - RNA, 18 nt, Human
caggugauccaccugcca

SEQ ID NO: 1240730 - RNA, 21 nt, Human
cagugguuggggauggggagg

SEQ ID NO: 1240731 - RNA, 24 nt, Human
caugccucagccucccgaguagcu

SEQ ID NO: 1240732 - RNA, 23 nt, Human
cauggagcagggagacggaaucc

SEQ ID NO: 1240733 - RNA, 19 nt, Human
cauuauggccaauuuucua

SEQ ID NO: 1240734 - RNA, 19 nt, Human
ccaaagugcugggauuaca

SEQ ID NO: 1240735 - RNA, 20 nt, Human
ccaaagugcugggauuacag

SEQ ID NO: 1240736 - RNA, 22 nt, Human
ccaaagugcugggauuacaggc

SEQ ID NO: 1240737 - RNA, 23 nt, Human
ccaaagugcugggauuacaggcu

SEQ ID NO: 1240738 - RNA, 20 nt, Human
ccacagccucccaaagugcu

SEQ ID NO: 1240739 - RNA, 20 nt, Human
ccaccacaccuggcuaauuu

SEQ ID NO: 1240740 - RNA, 21 nt, Human
ccagucuggcuagaaucaccu

SEQ ID NO: 1240741 - RNA, 23 nt, Human
ccagucuggcuagaaucaccuga

SEQ ID NO: 1240742 - RNA, 24 nt, Human
cccaaagugcugggauuacaggcu

SEQ ID NO: 1240743 - RNA, 23 nt, Human
cccgaguagcugggacuacaggc

SEQ ID NO: 1240744 - RNA, 24 nt, Human
cccgaguagcugggacuacaggca

SEQ ID NO: 1240745 - RNA, 21 nt, Human
ccuacaagccacuaaagcccc

SEQ ID NO: 1240746 - RNA, 21 nt, Human
ccugaccucaggugauccacc

SEQ ID NO: 1240747 - RNA, 23 nt, Human
ccugaccucaggugauccaccug

SEQ ID NO: 1240748 - RNA, 27 nt, Human
ccugaccucaggugauccaccugccac

SEQ ID NO: 1240749 - RNA, 20 nt, Human
ccugggcaucuaggacaggg

SEQ ID NO: 1240750 - RNA, 23 nt, Human
cggccgacucucuaccagaaacu

SEQ ID NO: 1240751 - RNA, 21 nt, Human
cuaaaaccaggaggacagauc

SEQ ID NO: 1240752 - RNA, 21 nt, Human
cuagacccccauauccaagga

SEQ ID NO: 1240753 - RNA, 19 nt, Human
cucacuguaaccuccaccu

SEQ ID NO: 1240754 - RNA, 23 nt, Human
cucacuguaaccuccaccuugca

SEQ ID NO: 1240755 - RNA, 24 nt, Human
cucagccucccgaguagcugggac

SEQ ID NO: 1240756 - RNA, 24 nt, Human
cuccugacucuguggaaugccugc

SEQ ID NO: 1240757 - RNA, 19 nt, Human
cuccugggucugaccaucu

SEQ ID NO: 1240758 - RNA, 20 nt, Human
cuccugggucugaccaucug

SEQ ID NO: 1240759 - RNA, 24 nt, Human
cugccacagccucccaaagugcug

SEQ ID NO: 1240760 - RNA, 23 nt, Human
cuguaaccuccaccuugcaaguu

SEQ ID NO: 1240761 - RNA, 22 nt, Human
cuuuggcuaagccuaggaaugc

SEQ ID NO: 1240762 - RNA, 19 nt, Human
gaacagaugcaagauugcc

SEQ ID NO: 1240763 - RNA, 20 nt, Human
gaacauaaauaggaacaagu

SEQ ID NO: 1240764 - RNA, 22 nt, Human
gaccucaggugauccaccugcc

SEQ ID NO: 1240765 - RNA, 23 nt, Human
gacucuguggaaugccugcagag

SEQ ID NO: 1240766 - RNA, 24 nt, Human
gagaugggguuucacuguguuggc

SEQ ID NO: 1240767 - RNA, 22 nt, Human
gaggggucaugggguuggggag

SEQ ID NO: 1240768 - RNA, 20 nt, Human
gaguagcugggacuacaggc

SEQ ID NO: 1240769 - RNA, 25 nt, Human
gaguagcugggacuacaggcaugug

SEQ ID NO: 1240770 - RNA, 22 nt, Human
gauggaguggagugcaguggcg

SEQ ID NO: 1240771 - RNA, 21 nt, Human
gauggggagaggagagcuuug

SEQ ID NO: 1240772 - RNA, 18 nt, Human
gauuacaggcuugagcca

SEQ ID NO: 1240773 - RNA, 22 nt, Human
gauuacaggcuugagccagugc

SEQ ID NO: 1240774 - RNA, 23 nt, Human
gauuacaggcuugagccagugca

SEQ ID NO: 1240775 - RNA, 21 nt, Human
gauucucaugccucagccucc

SEQ ID NO: 1240776 - RNA, 20 nt, Human
gccucagccucccgaguagc

SEQ ID NO: 1240777 - RNA, 24 nt, Human
gcgauucucaugccucagccuccc

SEQ ID NO: 1240778 - RNA, 18 nt, Human
gcucauggacauauuuua

SEQ ID NO: 1240779 - RNA, 19 nt, Human
gcucucccacuuucuacuu

SEQ ID NO: 1240780 - RNA, 21 nt, Human
gcugggauuacaggcuugagc

SEQ ID NO: 1240781 - RNA, 23 nt, Human
gcuggucuugaacuccugaccuc

SEQ ID NO: 1240782 - RNA, 24 nt, Human
ggaaggcccagaaccacacagccc

SEQ ID NO: 1240783 - RNA, 19 nt, Human
ggacuacaggcaugugcca

SEQ ID NO: 1240784 - RNA, 19 nt, Human
ggcaaugccuccuccuggg

SEQ ID NO: 1240785 - RNA, 24 nt, Human
ggcuggucuugaacuccugaccuc

SEQ ID NO: 1240786 - RNA, 18 nt, Human
gggaaaugaccgaaggga

SEQ ID NO: 1240787 - RNA, 23 nt, Human
gggcaggaacauguuccaaaggc

SEQ ID NO: 1240788 - RNA, 24 nt, Human
gggcugccugccugugagggaccu

SEQ ID NO: 1240789 - RNA, 22 nt, Human
gggguuucacuguguuggccag

SEQ ID NO: 1240790 - RNA, 23 nt, Human
gggguuucacuguguuggccagg

SEQ ID NO: 1240791 - RNA, 19 nt, Human
ggucuugaacuccugaccu

SEQ ID NO: 1240792 - RNA, 18 nt, Human
guauuauaaaauggaauc

SEQ ID NO: 1240793 - RNA, 24 nt, Human
gugauccaccugccacagccuccc

SEQ ID NO: 1240794 - RNA, 18 nt, Human
guggagggcugccugccu

SEQ ID NO: 1240795 - RNA, 21 nt, Human
guggagggcugccugccugug

SEQ ID NO: 1240796 - RNA, 21 nt, Human
guuuaaguaagaaaauaugug

SEQ ID NO: 1240797 - RNA, 20 nt, Human
uaaaauggaaucaggaacau

SEQ ID NO: 1240798 - RNA, 20 nt, Human
uaaagcccccaaucuuuacc

SEQ ID NO: 1240799 - RNA, 27 nt, Human
uaaagcccccaaucuuuaccugugaac

SEQ ID NO: 1240800 - RNA, 22 nt, Human
uaaaucauggccaugcauuggg

SEQ ID NO: 1240801 - RNA, 24 nt, Human
uaauuuuuguauuauuaguagaga

SEQ ID NO: 1240802 - RNA, 22 nt, Human
uacagaauuuauguuagacagg

SEQ ID NO: 1240803 - RNA, 22 nt, Human
uacaggcaugugccaccacacc

SEQ ID NO: 1240804 - RNA, 19 nt, Human
uaccugugaacccaucucc

SEQ ID NO: 1240805 - RNA, 20 nt, Human
uacugaggggaaaugaccga

SEQ ID NO: 1240806 - RNA, 23 nt, Human
uagcagugguuggggauggggag

SEQ ID NO: 1240807 - RNA, 24 nt, Human
uaggacagggucuuuuaaccuguc

SEQ ID NO: 1240808 - RNA, 20 nt, Human
uaguagagaugggguuucac

SEQ ID NO: 1240809 - RNA, 24 nt, Human
uaguagagaugggguuucacugug

SEQ ID NO: 1240810 - RNA, 23 nt, Human
uauaaaauggaaucaggaacaua

SEQ ID NO: 1240811 - RNA, 18 nt, Human
ucacuguaaccuccaccu

SEQ ID NO: 1240812 - RNA, 18 nt, Human
ucacuguaaccuccaccu

SEQ ID NO: 1240813 - RNA, 20 nt, Human
ucacuguaaccuccaccuug

SEQ ID NO: 1240814 - RNA, 24 nt, Human
ucacuguaaccuccaccuugcaag

SEQ ID NO: 1240815 - RNA, 22 nt, Human
ucacuguguuggccaggcuggu

SEQ ID NO: 1240816 - RNA, 23 nt, Human
ucagccucccgaguagcugggac

SEQ ID NO: 1240817 - RNA, 21 nt, Human
ucaggaggugugucuucuggg

SEQ ID NO: 1240818 - RNA, 21 nt, Human
ucaggcagcucagcuccacag

SEQ ID NO: 1240819 - RNA, 24 nt, Human
ucccaaagugcugggauuacaggc

SEQ ID NO: 1240820 - RNA, 24 nt, Human
ucccgaguagcugggacuacaggc

SEQ ID NO: 1240821 - RNA, 20 nt, Human
ucgugcccaugcuccugccu

SEQ ID NO: 1240822 - RNA, 22 nt, Human
ucuaccagaaacuuuucuucca

SEQ ID NO: 1240823 - RNA, 21 nt, Human
ucuaugauggaguagggaggc

SEQ ID NO: 1240824 - RNA, 21 nt, Human
ucucaggaggugugucuucug

SEQ ID NO: 1240825 - RNA, 19 nt, Human
ucucccacuuucuacuuga

SEQ ID NO: 1240826 - RNA, 19 nt, Human
ucugcccaaccaacgaagu

SEQ ID NO: 1240827 - RNA, 23 nt, Human
ucuugaacuccugaccucaggug

SEQ ID NO: 1240828 - RNA, 23 nt, Human
ugacaccaaugaugauacugagg

SEQ ID NO: 1240829 - RNA, 19 nt, Human
ugaccucaggugauccacc

SEQ ID NO: 1240830 - RNA, 20 nt, Human
ugaccucaggugauccaccu

SEQ ID NO: 1240831 - RNA, 24 nt, Human
ugacucuaaugaagggagagguau

SEQ ID NO: 1240832 - RNA, 21 nt, Human
ugacugaauucuuccuaguca

SEQ ID NO: 1240833 - RNA, 20 nt, Human
ugagauggaguggagugcag

SEQ ID NO: 1240834 - RNA, 31 nt, Human
ugagcaaacagccuggagagcuggcaaugcu

SEQ ID NO: 1240835 - RNA, 26 nt, Human
ugcaacugagcaguuguccccuacaa

SEQ ID NO: 1240836 - RNA, 24 nt, Human
ugccacagccucccaaagugcugg

SEQ ID NO: 1240837 - RNA, 24 nt, Human
ugccucagccucccgaguagcugg

SEQ ID NO: 1240838 - RNA, 22 nt, Human
uggaaugccugcagaggcaugg

SEQ ID NO: 1240839 - RNA, 24 nt, Human
uggagagcuggcaaugccuccucc

SEQ ID NO: 1240840 - RNA, 23 nt, Human
uggagugcaguggcgugauuuca

SEQ ID NO: 1240841 - RNA, 24 nt, Human
uggagugcaguggcgugauuucag

SEQ ID NO: 1240842 - RNA, 24 nt, Human
uggccaggcuggucuugaacuccu

SEQ ID NO: 1240843 - RNA, 22 nt, Human
uggcggagaugaugacucuaau

SEQ ID NO: 1240844 - RNA, 24 nt, Human
uggcgugauuucagcucacuguaa

SEQ ID NO: 1240845 - RNA, 18 nt, Human
ugggacuacaggcaugug

SEQ ID NO: 1240846 - RNA, 21 nt, Human
ugggacuacaggcaugugcca

SEQ ID NO: 1240847 - RNA, 22 nt, Human
ugggacuacaggcaugugccac

SEQ ID NO: 1240848 - RNA, 24 nt, Human
ugggacuacaggcaugugccacca

SEQ ID NO: 1240849 - RNA, 18 nt, Human
ugggauuacaggcuugag

SEQ ID NO: 1240850 - RNA, 19 nt, Human
ugggauuacaggcuugagc

SEQ ID NO: 1240851 - RNA, 21 nt, Human
ugggauuacaggcuugagcca

SEQ ID NO: 1240852 - RNA, 31 nt, Human
ugggauuacaggcuugagccagugcacccgg

SEQ ID NO: 1240853 - RNA, 20 nt, Human
uggggauggggagaggagag

SEQ ID NO: 1240854 - RNA, 24 nt, Human
uggggauggggagaggagagcuuu

SEQ ID NO: 1240855 - RNA, 24 nt, Human
ugggguuucacuguguuggccagg

SEQ ID NO: 1240856 - RNA, 20 nt, Human
uggucccuggagccacuccc

SEQ ID NO: 1240857 - RNA, 18 nt, Human
ugguuggggauggggaga

SEQ ID NO: 1240858 - RNA, 19 nt, Human
ugguuggggauggggagag

SEQ ID NO: 1240859 - RNA, 23 nt, Human
uguaaaucauggccaugcauugg

SEQ ID NO: 1240860 - RNA, 24 nt, Human
uguauuauaaaauggaaucaggaa

SEQ ID NO: 1240861 - RNA, 20 nt, Human
ugugugacuaccugauuccu

SEQ ID NO: 1240862 - RNA, 24 nt, Human
uguguuggccaggcuggucuugaa

SEQ ID NO: 1240863 - RNA, 23 nt, Human
uuaaugauccuuccaaguucaga

SEQ ID NO: 1240864 - RNA, 18 nt, Human
uuaguagagaugggguuu

SEQ ID NO: 1240865 - RNA, 21 nt, Human
uuaguagagaugggguuucac

SEQ ID NO: 1240866 - RNA, 21 nt, Human
uuaguagagaugggguuucac

SEQ ID NO: 1240867 - RNA, 24 nt, Human
uuaguagagaugggguuucacugu

SEQ ID NO: 1240868 - RNA, 24 nt, Human
uuauuaguagagaugggguuucac

SEQ ID NO: 1240869 - RNA, 22 nt, Human
uuccaauaugaaggaagcaugg

SEQ ID NO: 1240870 - RNA, 24 nt, Human
uuucacuguguuggccaggcuggu

SEQ ID NO: 1240871 - RNA, 20 nt, Human
uuuuuguauuauuaguagag

SEQ ID NO: 1240872 - RNA, 23 nt, Human
uuuuuguauuauuaguagagaug

SEQ ID NO: 1240873 - RNA, 24 nt, Human
aaaaaagaaaaccaaaguggucca

SEQ ID NO: 1240874 - RNA, 24 nt, Human
aaaaaguacugauuuuaaaaacua

SEQ ID NO: 1240875 - RNA, 23 nt, Human
aaaaccaaagugguccacaaaac

SEQ ID NO: 1240876 - RNA, 18 nt, Human
aaacaaacaguucugaga

SEQ ID NO: 1240877 - RNA, 20 nt, Human
aaagaaaaccaaaguggucc

SEQ ID NO: 1240878 - RNA, 24 nt, Human
aacaguucugagaccauucuucca

SEQ ID NO: 1240879 - RNA, 21 nt, Human
aacuuuuuuaacaggucucaa

SEQ ID NO: 1240880 - RNA, 24 nt, Human
aagaaaaccaaagugguccacaaa

SEQ ID NO: 1240881 - RNA, 21 nt, Human
accacaugcaaaaaagaaaac

SEQ ID NO: 1240882 - RNA, 20 nt, Human
acccaguguguaagccagaa

SEQ ID NO: 1240883 - RNA, 23 nt, Human
acguucacgcucagcuuucaguu

SEQ ID NO: 1240884 - RNA, 24 nt, Human
auaccaguuucaaauucgccaaca

SEQ ID NO: 1240885 - RNA, 19 nt, Human
caacaccagcagcaaccau

SEQ ID NO: 1240886 - RNA, 22 nt, Human
caaccaucaggacagcacagcc

SEQ ID NO: 1240887 - RNA, 18 nt, Human
caaggagauaucaauggu

SEQ ID NO: 1240888 - RNA, 22 nt, Human
caccagcagcaaccaucaggac

SEQ ID NO: 1240889 - RNA, 21 nt, Human
cagcaaccaucaggacagcac

SEQ ID NO: 1240890 - RNA, 19 nt, Human
cagcacagccugagauguc

SEQ ID NO: 1240891 - RNA, 23 nt, Human
cagccuccuucucaaauuuuuca

SEQ ID NO: 1240892 - RNA, 26 nt, Human
caugcaaaaaagaaaaccaaaguggu

SEQ ID NO: 1240893 - RNA, 23 nt, Human
ccacugauuaagaguuggguggc

SEQ ID NO: 1240894 - RNA, 22 nt, Human
ccagaagggcaugcucucaggu

SEQ ID NO: 1240895 - RNA, 24 nt, Human
ccaguagugguggacuugcccgaa

SEQ ID NO: 1240896 - RNA, 18 nt, Human
ccaguuucaaauucgcca

SEQ ID NO: 1240897 - RNA, 21 nt, Human
ccaguuucaaauucgccaaca

SEQ ID NO: 1240898 - RNA, 23 nt, Human
ccaguuucaaauucgccaacacc

SEQ ID NO: 1240899 - RNA, 23 nt, Human
cguucacgcucagcuuucaguuu

SEQ ID NO: 1240900 - RNA, 19 nt, Human
cucaggucugcccauucuu

SEQ ID NO: 1240901 - RNA, 26 nt, Human
cugagaugucccuguaaucauguuuu

SEQ ID NO: 1240902 - RNA, 22 nt, Human
gaaaaaaaagccauuuucccau

SEQ ID NO: 1240903 - RNA, 19 nt, Human
gaguccuuucccaucucag

SEQ ID NO: 1240904 - RNA, 22 nt, Human
gcaaccaucaggacagcacagc

SEQ ID NO: 1240905 - RNA, 23 nt, Human
gccaccacauuuguaggucagau

SEQ ID NO: 1240906 - RNA, 24 nt, Human
ggaguccuuucccaucucagcagc

SEQ ID NO: 1240907 - RNA, 25 nt, Human
ggguggcagguauuagggauaauau

SEQ ID NO: 1240908 - RNA, 25 nt, Human
gucaaguuguuuccauuaaaaagua

SEQ ID NO: 1240909 - RNA, 21 nt, Human
guucuuuugucgaugccacca

SEQ ID NO: 1240910 - RNA, 20 nt, Human
guuucaaauucgccaacacc

SEQ ID NO: 1240911 - RNA, 23 nt, Human
uaaaacuaccacaugcaaaaaag

SEQ ID NO: 1240912 - RNA, 24 nt, Human
uaacaggucucaaaauucugugac

SEQ ID NO: 1240913 - RNA, 23 nt, Human
uaagccagaagggcaugcucuca

SEQ ID NO: 1240914 - RNA, 24 nt, Human
uaauaacuuaaaacuaccacaugc

SEQ ID NO: 1240915 - RNA, 23 nt, Human
uaccacaugcaaaaaagaaaacc

SEQ ID NO: 1240916 - RNA, 21 nt, Human
uaccacguucacgcucagcuu

SEQ ID NO: 1240917 - RNA, 20 nt, Human
ucaauggugauaccacguuc

SEQ ID NO: 1240918 - RNA, 21 nt, Human
ucacaacaccuguguucuggu

SEQ ID NO: 1240919 - RNA, 23 nt, Human
ucaggacagcacagccugagaug

SEQ ID NO: 1240920 - RNA, 23 nt, Human
uccacaaaacauucuccuuuccu

SEQ ID NO: 1240921 - RNA, 27 nt, Human
ucccaucucagcagccuccuucucaaa

SEQ ID NO: 1240922 - RNA, 19 nt, Human
ucgaugccaccacauuugu

SEQ ID NO: 1240923 - RNA, 18 nt, Human
ucuuuugucgaugccacc

SEQ ID NO: 1240924 - RNA, 18 nt, Human
ugagaccauucuuccacc

SEQ ID NO: 1240925 - RNA, 24 nt, Human
ugcaaaaaagaaaaccaaaguggu

SEQ ID NO: 1240926 - RNA, 23 nt, Human
ugcauuguuaucauuaaccaguc

SEQ ID NO: 1240927 - RNA, 24 nt, Human
ugcauuguuaucauuaaccagucu

SEQ ID NO: 1240928 - RNA, 19 nt, Human
ugcccgaauuuacgugucc

SEQ ID NO: 1240929 - RNA, 22 nt, Human
uggcagguauuagggauaauau

SEQ ID NO: 1240930 - RNA, 24 nt, Human
uggcuuuuagggguaguuuucaca

SEQ ID NO: 1240931 - RNA, 22 nt, Human
ugguccacaaaacauucuccuu

SEQ ID NO: 1240932 - RNA, 23 nt, Human
ugguggacuugcccgaauuuacg

SEQ ID NO: 1240933 - RNA, 21 nt, Human
ugugggaaaaaaaagccauuu

SEQ ID NO: 1240934 - RNA, 21 nt, Human
uguucugguggcaaacccauu

SEQ ID NO: 1240935 - RNA, 24 nt, Human
uuaaacuuuuuuaacaggucucaa

SEQ ID NO: 1240936 - RNA, 24 nt, Human
uuaaauggccaauugaaacaaaca

SEQ ID NO: 1240937 - RNA, 26 nt, Human
uucacuacuaaacuuaaaagguuuuc

SEQ ID NO: 1240938 - RNA, 18 nt, Human
uuccaccacugauuaaga

SEQ ID NO: 1240939 - RNA, 22 nt, Human
uucccauuuuggcuuuuagggg

SEQ ID NO: 1240940 - RNA, 23 nt, Human
uucuccuuuccuucugaagguuu

SEQ ID NO: 1240941 - RNA, 21 nt, Human
uugaugaagucucugaguccu

SEQ ID NO: 1240942 - RNA, 20 nt, Human
uuucaaauucgccaacacca

SEQ ID NO: 1240943 - RNA, 26 nt, Human
uuucccauuuuggcuuuuaggggaag

SEQ ID NO: 1240944 - RNA, 20 nt, Human
aaagcugcucaaaagauucu

SEQ ID NO: 1240945 - RNA, 22 nt, Human
acacccagcacaugcaggaaac

SEQ ID NO: 1240946 - RNA, 23 nt, Human
acccuguguccugaacacagucc

SEQ ID NO: 1240947 - RNA, 19 nt, Human
acgcaggaaggugccucuc

SEQ ID NO: 1240948 - RNA, 22 nt, Human
acuccccugccuuccucucccu

SEQ ID NO: 1240949 - RNA, 19 nt, Human
agcccagugccaaggcacg

SEQ ID NO: 1240950 - RNA, 20 nt, Human
agcugcagagcagguugaac

SEQ ID NO: 1240951 - RNA, 19 nt, Human
aggugccucucuagcccag

SEQ ID NO: 1240952 - RNA, 19 nt, Human
caaaagcugcucaaaagau

SEQ ID NO: 1240953 - RNA, 22 nt, Human
caaacucuuaucuuggcaaaca

SEQ ID NO: 1240954 - RNA, 24 nt, Human
caaacucuuaucuuggcaaacacu

SEQ ID NO: 1240955 - RNA, 26 nt, Human
caaaugauacuugcuuuuccuucuug

SEQ ID NO: 1240956 - RNA, 28 nt, Human
cacaggauucacgcaggaagggacauac

SEQ ID NO: 1240957 - RNA, 22 nt, Human
cacaugcaggaaaccaaauuca

SEQ ID NO: 1240958 - RNA, 18 nt, Human
caccagcagcgcaugggc

SEQ ID NO: 1240959 - RNA, 20 nt, Human
cagcaccacaggccuggggu

SEQ ID NO: 1240960 - RNA, 22 nt, Human
cagcaccgggggucagagaaaa

SEQ ID NO: 1240961 - RNA, 18 nt, Human
cagcaggacaugaacaga

SEQ ID NO: 1240962 - RNA, 19 nt, Human
caggagaugccugguccac

SEQ ID NO: 1240963 - RNA, 24 nt, Human
caguggaggcuggacgugaccccg

SEQ ID NO: 1240964 - RNA, 19 nt, Human
caugcagggccugugcgug

SEQ ID NO: 1240965 - RNA, 21 nt, Human
caugcagggccugugcguggc

SEQ ID NO: 1240966 - RNA, 20 nt, Human
ccaccucuggguccaggccu

SEQ ID NO: 1240967 - RNA, 20 nt, Human
ccaggaagggcaggagagug

SEQ ID NO: 1240968 - RNA, 22 nt, Human
ccaguggaggcuggacgugacc

SEQ ID NO: 1240969 - RNA, 23 nt, Human
cccacacccagcacaugcaggaa

SEQ ID NO: 1240970 - RNA, 18 nt, Human
cccacagaaaaacagaac

SEQ ID NO: 1240971 - RNA, 21 nt, Human
cccccaggccacugagacccc

SEQ ID NO: 1240972 - RNA, 25 nt, Human
ccccgcccacacccagcacaugcag

SEQ ID NO: 1240973 - RNA, 23 nt, Human
ccccggcuggaacccaaaggggc

SEQ ID NO: 1240974 - RNA, 18 nt, Human
cccggcuggaacccaaag

SEQ ID NO: 1240975 - RNA, 20 nt, Human
cccugccuuccucucccucc

SEQ ID NO: 1240976 - RNA, 22 nt, Human
cccuguguccugaacacagucc

SEQ ID NO: 1240977 - RNA, 29 nt, Human
ccgcccacacccagcacaugcaggaaacc

SEQ ID NO: 1240978 - RNA, 20 nt, Human
ccuccagagacggagacaag

SEQ ID NO: 1240979 - RNA, 24 nt, Human
ccucuguagcacugaguaacgcuc

SEQ ID NO: 1240980 - RNA, 19 nt, Human
ccucuuggaaacagggagg

SEQ ID NO: 1240981 - RNA, 23 nt, Human
ccugccucuaggauucuuucucu

SEQ ID NO: 1240982 - RNA, 24 nt, Human
ccugccucuaggauucuuucucuc

SEQ ID NO: 1240983 - RNA, 18 nt, Human
ccuuccucucccuccuuc

SEQ ID NO: 1240984 - RNA, 19 nt, Human
ccuuccucucccuccuucc

SEQ ID NO: 1240985 - RNA, 23 nt, Human
ccuuuuccucuuucucuuguccc

SEQ ID NO: 1240986 - RNA, 21 nt, Human
cgcccacacccagcacaugca

SEQ ID NO: 1240987 - RNA, 20 nt, Human
cuacugaguaacuacuacgu

SEQ ID NO: 1240988 - RNA, 19 nt, Human
cuccccugccuuccucucc

SEQ ID NO: 1240989 - RNA, 20 nt, Human
cucuuggaaacagggaggcu

SEQ ID NO: 1240990 - RNA, 21 nt, Human
cugcagcaccacaggccuggg

SEQ ID NO: 1240991 - RNA, 24 nt, Human
cuggcacaggaccagcaccggggg

SEQ ID NO: 1240992 - RNA, 18 nt, Human
cugugcguggccccgccc

SEQ ID NO: 1240993 - RNA, 19 nt, Human
cuucuucccaggucacagg

SEQ ID NO: 1240994 - RNA, 20 nt, Human
cuuugcucugggcacccaga

SEQ ID NO: 1240995 - RNA, 19 nt, Human
gagcagguugaacgggcca

SEQ ID NO: 1240996 - RNA, 20 nt, Human
gagcagguugaacgggccac

SEQ ID NO: 1240997 - RNA, 18 nt, Human
gaggccccaaaccaccag

SEQ ID NO: 1240998 - RNA, 19 nt, Human
gaggcuauuuauagcagcu

SEQ ID NO: 1240999 - RNA, 20 nt, Human
gagggacuggaaacguggug

SEQ ID NO: 1241000 - RNA, 18 nt, Human
gcagcgcaugggcaccag

SEQ ID NO: 1241001 - RNA, 19 nt, Human
gccccaaaccaccagcagc

SEQ ID NO: 1241002 - RNA, 19 nt, Human
gccccaaaccaccagcagc

SEQ ID NO: 1241003 - RNA, 24 nt, Human
gccucuaggauucuuucucuccca

SEQ ID NO: 1241004 - RNA, 23 nt, Human
gcuucuucccaggucacaggugg

SEQ ID NO: 1241005 - RNA, 24 nt, Human
ggaaacagggaggcuauuuauagc

SEQ ID NO: 1241006 - RNA, 21 nt, Human
ggaagggcaggagaguggagc

SEQ ID NO: 1241007 - RNA, 24 nt, Human
ggaccagcaccgggggucagagaa

SEQ ID NO: 1241008 - RNA, 22 nt, Human
ggaguccucccaugcagggccu

SEQ ID NO: 1241009 - RNA, 22 nt, Human
ggucuguggggcuugaucuggu

SEQ ID NO: 1241010 - RNA, 24 nt, Human
guacuccaaaugauacuugcuuuu

SEQ ID NO: 1241011 - RNA, 21 nt, Human
guggccccgcccacacccagc

SEQ ID NO: 1241012 - RNA, 19 nt, Human
uaaaguacaguggcuccuu

SEQ ID NO: 1241013 - RNA, 21 nt, Human
uaaaguacaguggcuccuuuu

SEQ ID NO: 1241014 - RNA, 20 nt, Human
uacuacgugcuggcacagga

SEQ ID NO: 1241015 - RNA, 21 nt, Human
uagaacguuguacugguccuc

SEQ ID NO: 1241016 - RNA, 18 nt, Human
ucaagacagaacauagug

SEQ ID NO: 1241017 - RNA, 27 nt, Human
ucagcaaaccucuacugaguaacuacc

SEQ ID NO: 1241018 - RNA, 19 nt, Human
ucccaggucacagguggcc

SEQ ID NO: 1241019 - RNA, 23 nt, Human
ucccccaggccacugagacccca

SEQ ID NO: 1241020 - RNA, 18 nt, Human
uccccugccuuccucucc

SEQ ID NO: 1241021 - RNA, 23 nt, Human
ucgcuucuucccaggucacaggu

SEQ ID NO: 1241022 - RNA, 26 nt, Human
ucucuuguccccuucucaagacagaa

SEQ ID NO: 1241023 - RNA, 26 nt, Human
ucuuaucuuggcaaacacugugguuc

SEQ ID NO: 1241024 - RNA, 21 nt, Human
ucuuggcaaacacugugguuc

SEQ ID NO: 1241025 - RNA, 23 nt, Human
ugcaaaauaaaguacaguggcuc

SEQ ID NO: 1241026 - RNA, 19 nt, Human
ugcagcaccacaggccugg

SEQ ID NO: 1241027 - RNA, 25 nt, Human
ugcagcaccacaggccuggggugag

SEQ ID NO: 1241028 - RNA, 18 nt, Human
ugccugguccaccucugg

SEQ ID NO: 1241029 - RNA, 23 nt, Human
ugccugguccaccucugggucca

SEQ ID NO: 1241030 - RNA, 18 nt, Human
ugcgcacaggauucacgc

SEQ ID NO: 1241031 - RNA, 23 nt, Human
uggaggcuggacgugaccccggc

SEQ ID NO: 1241032 - RNA, 23 nt, Human
uggcacaggaccagcaccggggg

SEQ ID NO: 1241033 - RNA, 20 nt, Human
uggcccagcuuugcucuggg

SEQ ID NO: 1241034 - RNA, 19 nt, Human
uggggacgugugcaucucc

SEQ ID NO: 1241035 - RNA, 19 nt, Human
uguguccugaacacagucc

SEQ ID NO: 1241036 - RNA, 24 nt, Human
uucccccaggccacugagaccccc

SEQ ID NO: 1241037 - RNA, 21 nt, Human
uuugcucugggcacccagaca

SEQ ID NO: 1241038 - RNA, 24 nt, Human
uuugcucugggcacccagacaccc

SEQ ID NO: 1241039 - RNA, 23 nt, Human
aaaaaagcacaaaaauagaaaau

SEQ ID NO: 1241040 - RNA, 19 nt, Human
aaaaguaguuuuagacaaa

SEQ ID NO: 1241041 - RNA, 24 nt, Human
aaaauaaauugucuuuuucuuuuu

SEQ ID NO: 1241042 - RNA, 23 nt, Human
aaacaacacggccuuccucagcc

SEQ ID NO: 1241043 - RNA, 22 nt, Human
aaagagaaagaaacugcaaaag

SEQ ID NO: 1241044 - RNA, 22 nt, Human
aaagagaucuaggaaauaaguc

SEQ ID NO: 1241045 - RNA, 19 nt, Human
aaagauaggaaggagggaa

SEQ ID NO: 1241046 - RNA, 18 nt, Human
aaagggaccucacaggua

SEQ ID NO: 1241047 - RNA, 24 nt, Human
aaagugcugggauuauaggucuga

SEQ ID NO: 1241048 - RNA, 19 nt, Human
aaaugccuguuugggauuc

SEQ ID NO: 1241049 - RNA, 19 nt, Human
aaaugccuguuugggauuc

SEQ ID NO: 1241050 - RNA, 24 nt, Human
aacaacacggccuuccucagccuc

SEQ ID NO: 1241051 - RNA, 18 nt, Human
aacacaccugacacagga

SEQ ID NO: 1241052 - RNA, 21 nt, Human
aacugcaaaagguggcaaaug

SEQ ID NO: 1241053 - RNA, 18 nt, Human
aagaaagagaucuaggaa

SEQ ID NO: 1241054 - RNA, 24 nt, Human
aagaagggccuaccagcgaaggga

SEQ ID NO: 1241055 - RNA, 22 nt, Human
aagcuuccagcaucuacaacuc

SEQ ID NO: 1241056 - RNA, 18 nt, Human
aagugcugggauuauagg

SEQ ID NO: 1241057 - RNA, 26 nt, Human
aagugcugggauuauaggucugagcc

SEQ ID NO: 1241058 - RNA, 24 nt, Human
aaguggacuuacaauaaauaaaac

SEQ ID NO: 1241059 - RNA, 24 nt, Human
aauuugcuguauuuuuaguagaga

SEQ ID NO: 1241060 - RNA, 19 nt, Human
acaccugacacaggagccc

SEQ ID NO: 1241061 - RNA, 21 nt, Human
acaccugacacaggagcccca

SEQ ID NO: 1241062 - RNA, 21 nt, Human
acagaacauucuccaggauag

SEQ ID NO: 1241063 - RNA, 19 nt, Human
acagugcuggggggacaua

SEQ ID NO: 1241064 - RNA, 18 nt, Human
accaguggcuggauauuc

SEQ ID NO: 1241065 - RNA, 18 nt, Human
accauguuggccaggccg

SEQ ID NO: 1241066 - RNA, 19 nt, Human
acuacagcccaacuacauu

SEQ ID NO: 1241067 - RNA, 18 nt, Human
acuccuggguuguuuugg

SEQ ID NO: 1241068 - RNA, 20 nt, Human
acuuauggaaagagaaagaa

SEQ ID NO: 1241069 - RNA, 26 nt, Human
acuuguggccuugcauagccaguggc

SEQ ID NO: 1241070 - RNA, 18 nt, Human
agaacgugcauucuucuc

SEQ ID NO: 1241071 - RNA, 20 nt, Human
agacaaaaaggaaggcuuga

SEQ ID NO: 1241072 - RNA, 19 nt, Human
agacaaacaacacggccuu

SEQ ID NO: 1241073 - RNA, 19 nt, Human
agagggggugucuggagcc

SEQ ID NO: 1241074 - RNA, 19 nt, Human
agauaggaaggagggaagg

SEQ ID NO: 1241075 - RNA, 20 nt, Human
agauaggaaggagggaaggu

SEQ ID NO: 1241076 - RNA, 23 nt, Human
agcugcuaagcagaggaaaacuu

SEQ ID NO: 1241077 - RNA, 23 nt, Human
aggaggauuguuuauuuuaggua

SEQ ID NO: 1241078 - RNA, 19 nt, Human
aggcagaaaaguaacagac

SEQ ID NO: 1241079 - RNA, 22 nt, Human
aggcagaaaaguaacagaccag

SEQ ID NO: 1241080 - RNA, 23 nt, Human
aggcagaaaaguaacagaccaga

SEQ ID NO: 1241081 - RNA, 24 nt, Human
aggucugagccaccaucacaccca

SEQ ID NO: 1241082 - RNA, 24 nt, Human
aggugauccacccaccuuggacuc

SEQ ID NO: 1241083 - RNA, 24 nt, Human
agugcugggauuauaggucugagc

SEQ ID NO: 1241084 - RNA, 19 nt, Human
aucaugcuuaagaaggcug

SEQ ID NO: 1241085 - RNA, 21 nt, Human
auggaaagagaaagaaacugc

SEQ ID NO: 1241086 - RNA, 18 nt, Human
augggguuucaccauguu

SEQ ID NO: 1241087 - RNA, 22 nt, Human
augggguuucaccauguuggcc

SEQ ID NO: 1241088 - RNA, 20 nt, Human
auucauaccugacuaggauc

SEQ ID NO: 1241089 - RNA, 18 nt, Human
caaagugcugggauuaua

SEQ ID NO: 1241090 - RNA, 21 nt, Human
caacagacacacccucuaggc

SEQ ID NO: 1241091 - RNA, 21 nt, Human
caauguaaacacaccugacac

SEQ ID NO: 1241092 - RNA, 20 nt, Human
caccaguggcuggauauucc

SEQ ID NO: 1241093 - RNA, 18 nt, Human
caccauguuggccaggcc

SEQ ID NO: 1241094 - RNA, 21 nt, Human
caccauguuggccaggccggu

SEQ ID NO: 1241095 - RNA, 24 nt, Human
caccauguuggccaggccggucuc

SEQ ID NO: 1241096 - RNA, 27 nt, Human
caccauguuggccaggccggucucaaa

SEQ ID NO: 1241097 - RNA, 22 nt, Human
cacccaccuuggacucccaaag

SEQ ID NO: 1241098 - RNA, 23 nt, Human
cacccaccuuggacucccaaagu

SEQ ID NO: 1241099 - RNA, 18 nt, Human
cacuacaacuacagccca

SEQ ID NO: 1241100 - RNA, 24 nt, Human
cagcggaaggggcagcaaugucug

SEQ ID NO: 1241101 - RNA, 21 nt, Human
cagugccgggcccauggugcc

SEQ ID NO: 1241102 - RNA, 24 nt, Human
caugcuuaagaaggcuggggaaag

SEQ ID NO: 1241103 - RNA, 24 nt, Human
cauguuggccaggccggucucaaa

SEQ ID NO: 1241104 - RNA, 18 nt, Human
ccaaagugcugggauuau

SEQ ID NO: 1241105 - RNA, 20 nt, Human
ccaaagugcugggauuauag

SEQ ID NO: 1241106 - RNA, 22 nt, Human
ccaaagugcugggauuauaggu

SEQ ID NO: 1241107 - RNA, 20 nt, Human
ccaccacgcccagcuaauuu

SEQ ID NO: 1241108 - RNA, 18 nt, Human
ccaccaucacacccagcc

SEQ ID NO: 1241109 - RNA, 20 nt, Human
ccagcaucuacaacucuagu

SEQ ID NO: 1241110 - RNA, 22 nt, Human
ccaguuguucaaaauaaaccuc

SEQ ID NO: 1241111 - RNA, 19 nt, Human
cccaccuuggacucccaaa

SEQ ID NO: 1241112 - RNA, 27 nt, Human
ccucacacaaacaaaauaugcuggaau

SEQ ID NO: 1241113 - RNA, 24 nt, Human
ccugaccucaggugauccacccac

SEQ ID NO: 1241114 - RNA, 18 nt, Human
ccuucauccuugcucugg

SEQ ID NO: 1241115 - RNA, 21 nt, Human
ccuugccuguuacuuuucuug

SEQ ID NO: 1241116 - RNA, 20 nt, Human
ccuugccuugccuguuacuu

SEQ ID NO: 1241117 - RNA, 19 nt, Human
cgccugaggagcagcuucc

SEQ ID NO: 1241118 - RNA, 24 nt, Human
cgugaugggcuggugacaugcauc

SEQ ID NO: 1241119 - RNA, 22 nt, Human
cugagccaccaucacacccagc

SEQ ID NO: 1241120 - RNA, 18 nt, Human
cuguaggcaagggaaaga

SEQ ID NO: 1241121 - RNA, 23 nt, Human
cuguauuuuuaguagagaugggg

SEQ ID NO: 1241122 - RNA, 19 nt, Human
cuguggugacugaagaagg

SEQ ID NO: 1241123 - RNA, 21 nt, Human
gacacauuauuuucuauguuc

SEQ ID NO: 1241124 - RNA, 19 nt, Human
gacaggucacauaaucuag

SEQ ID NO: 1241125 - RNA, 23 nt, Human
gaccucaggugauccacccaccu

SEQ ID NO: 1241126 - RNA, 18 nt, Human
gagaugggguuucaccau

SEQ ID NO: 1241127 - RNA, 24 nt, Human
gagaugggguuucaccauguuggc

SEQ ID NO: 1241128 - RNA, 21 nt, Human
gagcauagcacaacuuguggc

SEQ ID NO: 1241129 - RNA, 24 nt, Human
gagcccauuccuuuggccuuggcu

SEQ ID NO: 1241130 - RNA, 19 nt, Human
gaggugccacagcucaaaa

SEQ ID NO: 1241131 - RNA, 19 nt, Human
gagguuccaguccuucuac

SEQ ID NO: 1241132 - RNA, 21 nt, Human
gauuauaggucugagccacca

SEQ ID NO: 1241133 - RNA, 22 nt, Human
gcagaacgugcauucuucucau

SEQ ID NO: 1241134 - RNA, 18 nt, Human
gcagcggaaggggcagca

SEQ ID NO: 1241135 - RNA, 23 nt, Human
gccggucucaaacuccugaccuc

SEQ ID NO: 1241136 - RNA, 23 nt, Human
gcuuccagcaucuacaacucuag

SEQ ID NO: 1241137 - RNA, 22 nt, Human
ggcaagggaaagauaggaagga

SEQ ID NO: 1241138 - RNA, 21 nt, Human
ggcacaaguggcaauggcugu

SEQ ID NO: 1241139 - RNA, 24 nt, Human
ggccggucucaaacuccugaccuc

SEQ ID NO: 1241140 - RNA, 19 nt, Human
gggcacaaguggcaauggc

SEQ ID NO: 1241141 - RNA, 22 nt, Human
gggguuucaccauguuggccag

SEQ ID NO: 1241142 - RNA, 18 nt, Human
ggguuucaccauguuggc

SEQ ID NO: 1241143 - RNA, 23 nt, Human
guagagaugggguuucaccaugu

SEQ ID NO: 1241144 - RNA, 24 nt, Human
gugauccacccaccuuggacuccc

SEQ ID NO: 1241145 - RNA, 21 nt, Human
guuucccuccuagacuuucuu

SEQ ID NO: 1241146 - RNA, 24 nt, Human
uaaacacaccugacacaggagccc

SEQ ID NO: 1241147 - RNA, 19 nt, Human
uaaauaaaacaaaagcagc

SEQ ID NO: 1241148 - RNA, 20 nt, Human
uaagucaaaaaagcacaaaa

SEQ ID NO: 1241149 - RNA, 23 nt, Human
uaaguggacuuacaauaaauaaa

SEQ ID NO: 1241150 - RNA, 22 nt, Human
uaauagcuggggacuccaacac

SEQ ID NO: 1241151 - RNA, 23 nt, Human
uaauugcauauuuauuuuuaaau

SEQ ID NO: 1241152 - RNA, 24 nt, Human
uaauuugcuguauuuuuaguagag

SEQ ID NO: 1241153 - RNA, 22 nt, Human
uacaauaaauaaaacaaaagca

SEQ ID NO: 1241154 - RNA, 20 nt, Human
uaccagcgaagggacuccau

SEQ ID NO: 1241155 - RNA, 24 nt, Human
uacuuuucuuggagugaauaauug

SEQ ID NO: 1241156 - RNA, 22 nt, Human
uagacaaacaacacggccuucc

SEQ ID NO: 1241157 - RNA, 26 nt, Human
uagacaaacaacacggccuuccucag

SEQ ID NO: 1241158 - RNA, 22 nt, Human
uagagaugggguuucaccaugu

SEQ ID NO: 1241159 - RNA, 23 nt, Human
uagcuggggacuccaacacccac

SEQ ID NO: 1241160 - RNA, 18 nt, Human
uaggaaggagggaaggug

SEQ ID NO: 1241161 - RNA, 25 nt, Human
uaggccacaaaacaaaucucaaaag

SEQ ID NO: 1241162 - RNA, 24 nt, Human
uaguagagaugggguuucaccaug

SEQ ID NO: 1241163 - RNA, 26 nt, Human
uaguagagaugggguuucaccauguu

SEQ ID NO: 1241164 - RNA, 18 nt, Human
ucaaagaggugccacagc

SEQ ID NO: 1241165 - RNA, 23 nt, Human
ucacacaaacaaaauaugcugga

SEQ ID NO: 1241166 - RNA, 19 nt, Human
ucagcaagaagguaggaca

SEQ ID NO: 1241167 - RNA, 19 nt, Human
ucaguagguguagucccag

SEQ ID NO: 1241168 - RNA, 22 nt, Human
ucaguggauucgcauccaaaaa

SEQ ID NO: 1241169 - RNA, 24 nt, Human
ucauuugcuuucaaaugauucaga

SEQ ID NO: 1241170 - RNA, 25 nt, Human
uccaaaaagcugagcauuaaacaaa

SEQ ID NO: 1241171 - RNA, 23 nt, Human
ucccaaagugcugggauuauagg

SEQ ID NO: 1241172 - RNA, 21 nt, Human
uccucagccucuaccugaguc

SEQ ID NO: 1241173 - RNA, 22 nt, Human
uccuggguuguuuugggaggag

SEQ ID NO: 1241174 - RNA, 19 nt, Human
uccuuuggccuuggcuucu

SEQ ID NO: 1241175 - RNA, 18 nt, Human
ucuaggaaauaagucacc

SEQ ID NO: 1241176 - RNA, 28 nt, Human
ucuguaaccgguggccaaaccggggucc

SEQ ID NO: 1241177 - RNA, 22 nt, Human
ugaaauuccauagucuugugcc

SEQ ID NO: 1241178 - RNA, 24 nt, Human
ugaagaauuccaaucuucaaaaaa

SEQ ID NO: 1241179 - RNA, 20 nt, Human
ugacacaggagccccaguua

SEQ ID NO: 1241180 - RNA, 20 nt, Human
ugacacuuuaggcuacuguu

SEQ ID NO: 1241181 - RNA, 21 nt, Human
ugaccucaggugauccaccca

SEQ ID NO: 1241182 - RNA, 24 nt, Human
ugaccucaggugauccacccaccu

SEQ ID NO: 1241183 - RNA, 24 nt, Human
ugauccacccaccuuggacuccca

SEQ ID NO: 1241184 - RNA, 20 nt, Human
ugccacagcucaaaaguaga

SEQ ID NO: 1241185 - RNA, 18 nt, Human
ugccggcauuaagaauca

SEQ ID NO: 1241186 - RNA, 23 nt, Human
uggaagagggggugucuggagcc

SEQ ID NO: 1241187 - RNA, 20 nt, Human
uggaucugaagauucaaaga

SEQ ID NO: 1241188 - RNA, 24 nt, Human
uggccaggccggucucaaacuccu

SEQ ID NO: 1241189 - RNA, 19 nt, Human
uggcuaaauacggacauuu

SEQ ID NO: 1241190 - RNA, 18 nt, Human
ugggauuauaggucugag

SEQ ID NO: 1241191 - RNA, 21 nt, Human
ugggauuauaggucugagcca

SEQ ID NO: 1241192 - RNA, 22 nt, Human
ugggauuauaggucugagccac

SEQ ID NO: 1241193 - RNA, 24 nt, Human
ugggauuauaggucugagccacca

SEQ ID NO: 1241194 - RNA, 25 nt, Human
ugggauuauaggucugagccaccau

SEQ ID NO: 1241195 - RNA, 24 nt, Human
ugggguuucaccauguuggccagg

SEQ ID NO: 1241196 - RNA, 22 nt, Human
ugucuggagcccauuccuuugg

SEQ ID NO: 1241197 - RNA, 21 nt, Human
ugucuuuuucuuuuuuuuccu

SEQ ID NO: 1241198 - RNA, 23 nt, Human
ugugaagaagugagauucgauga

SEQ ID NO: 1241199 - RNA, 24 nt, Human
uguggugacugaagaagggccuac

SEQ ID NO: 1241200 - RNA, 25 nt, Human
uguucaaaauaaaccucuaaaugau

SEQ ID NO: 1241201 - RNA, 22 nt, Human
uguuuucauuugcuuucaaaug

SEQ ID NO: 1241202 - RNA, 25 nt, Human
uuaagaaggcuggggaaagaguaac

SEQ ID NO: 1241203 - RNA, 18 nt, Human
uuacaaugagaacuuuug

SEQ ID NO: 1241204 - RNA, 20 nt, Human
uuacaaugagaacuuuuguu

SEQ ID NO: 1241205 - RNA, 18 nt, Human
uuaguagagaugggguuu

SEQ ID NO: 1241206 - RNA, 22 nt, Human
uuaguagagaugggguuucacc

SEQ ID NO: 1241207 - RNA, 24 nt, Human
uuaguagagaugggguuucaccau

SEQ ID NO: 1241208 - RNA, 21 nt, Human
uuauaggucugagccaccauc

SEQ ID NO: 1241209 - RNA, 23 nt, Human
uucaugaauggcaggcauccugu

SEQ ID NO: 1241210 - RNA, 31 nt, Human
uuccuuuggccuuggcuucucaaacagccuu

SEQ ID NO: 1241211 - RNA, 23 nt, Human
uugccuguuacuuuucuuggagu

SEQ ID NO: 1241212 - RNA, 19 nt, Human
uuggacucccaaagugcug

SEQ ID NO: 1241213 - RNA, 24 nt, Human
uuucaccauguuggccaggccggu

SEQ ID NO: 1241214 - RNA, 24 nt, Human
uuugcuguauuuuuaguagagaug

SEQ ID NO: 1241215 - RNA, 24 nt, Human
uuuuuaguagagaugggguuucac

SEQ ID NO: 1241216 - RNA, 18 nt, Human
uuuuuguaaguggacuua

SEQ ID NO: 1241217 - RNA, 19 nt, Human
aauguguccccuacaaugu

SEQ ID NO: 1241218 - RNA, 21 nt, Human
acuaccgucuacugaagggcu

SEQ ID NO: 1241219 - RNA, 20 nt, Human
aggaaaaacagguuuuagaa

SEQ ID NO: 1241220 - RNA, 21 nt, Human
aggcaaaagugaaaauacauc

SEQ ID NO: 1241221 - RNA, 22 nt, Human
aggcaaaagugaaaauacaucc

SEQ ID NO: 1241222 - RNA, 21 nt, Human
agguuuuagaaauuacauacu

SEQ ID NO: 1241223 - RNA, 20 nt, Human
auacuugguaaagaagaacc

SEQ ID NO: 1241224 - RNA, 22 nt, Human
caccacucagcagccaaggacu

SEQ ID NO: 1241225 - RNA, 22 nt, Human
caccagaaggccugcgggcucc

SEQ ID NO: 1241226 - RNA, 26 nt, Human
caggacuaaaaaaucaggacuucuuc

SEQ ID NO: 1241227 - RNA, 23 nt, Human
cauacuugguaaagaagaaccag

SEQ ID NO: 1241228 - RNA, 21 nt, Human
ccagcggcugacauuucccag

SEQ ID NO: 1241229 - RNA, 18 nt, Human
ccccggaccccagacuca

SEQ ID NO: 1241230 - RNA, 18 nt, Human
ccgccacagcuguccagg

SEQ ID NO: 1241231 - RNA, 22 nt, Human
ccgcccgcuuccgccuccccgc

SEQ ID NO: 1241232 - RNA, 20 nt, Human
ccgccugcucucggccccgg

SEQ ID NO: 1241233 - RNA, 18 nt, Human
ccgcuuccgccuccccgc

SEQ ID NO: 1241234 - RNA, 19 nt, Human
ccggguccccucucuuucc

SEQ ID NO: 1241235 - RNA, 27 nt, Human
ccuuguaaauuaggcaaaagugaaaau

SEQ ID NO: 1241236 - RNA, 23 nt, Human
cgcagcggcggccacucgggguc

SEQ ID NO: 1241237 - RNA, 21 nt, Human
cgcucagagacgacagcgcug

SEQ ID NO: 1241238 - RNA, 21 nt, Human
cuacugucaccacucagcagc

SEQ ID NO: 1241239 - RNA, 18 nt, Human
cucggccccggaccccag

SEQ ID NO: 1241240 - RNA, 19 nt, Human
cucggggucugccgggucc

SEQ ID NO: 1241241 - RNA, 20 nt, Human
cuucuucaaguuucucacua

SEQ ID NO: 1241242 - RNA, 20 nt, Human
gaaaggaaaauccgucuaca

SEQ ID NO: 1241243 - RNA, 24 nt, Human
gaagaaccaggacuaaaaaaucag

SEQ ID NO: 1241244 - RNA, 20 nt, Human
gcagcggcggccacucgggg

SEQ ID NO: 1241245 - RNA, 18 nt, Human
gccccggaccccagacuc

SEQ ID NO: 1241246 - RNA, 21 nt, Human
gcucucggccccggaccccag

SEQ ID NO: 1241247 - RNA, 21 nt, Human
ggcaaaagugaaaauacaucc

SEQ ID NO: 1241248 - RNA, 21 nt, Human
ggguccccucucuuuccgccu

SEQ ID NO: 1241249 - RNA, 18 nt, Human
gucuggacgggaccggga

SEQ ID NO: 1241250 - RNA, 23 nt, Human
uaaagaagaaccaggacuaaaaa

SEQ ID NO: 1241251 - RNA, 23 nt, Human
ucggggucugccggguccccucu

SEQ ID NO: 1241252 - RNA, 22 nt, Human
ucuacuaggaaagaauagaggu

SEQ ID NO: 1241253 - RNA, 19 nt, Human
ucugccggguccccucucu

SEQ ID NO: 1241254 - RNA, 24 nt, Human
ucugccggguccccucucuuuccg

SEQ ID NO: 1241255 - RNA, 20 nt, Human
ucuggacgggaccgggaaac

SEQ ID NO: 1241256 - RNA, 25 nt, Human
ugcucucggccccggaccccagacu

SEQ ID NO: 1241257 - RNA, 24 nt, Human
uggaccaauaaauauuaaaaauua

SEQ ID NO: 1241258 - RNA, 18 nt, Human
ugggccccgcagcggcgg

SEQ ID NO: 1241259 - RNA, 19 nt, Human
uguccagguucugggaucc

SEQ ID NO: 1241260 - RNA, 20 nt, Human
uguggaccaauaaauauuaa

SEQ ID NO: 1241261 - RNA, 21 nt, Human
uuacauacuugguaaagaaga

SEQ ID NO: 1241262 - RNA, 20 nt, Human
uuaggcucaccguccgaucu

SEQ ID NO: 1241263 - RNA, 23 nt, Human
uuaguagagaaugaggauaacuu

SEQ ID NO: 1241264 - RNA, 22 nt, Human
uugggccccgcagcggcggcca

SEQ ID NO: 1241265 - RNA, 24 nt, Human
uuuuaaacaauguguccccuacaa

SEQ ID NO: 1241266 - RNA, 24 nt, Human
aagucaagaguggcaauaggucua

SEQ ID NO: 1241267 - RNA, 20 nt, Human
aagucaaugaagucccugag

SEQ ID NO: 1241268 - RNA, 23 nt, Human
acuccacugucuuggcauuggcu

SEQ ID NO: 1241269 - RNA, 20 nt, Human
acugucuuggcauuggcugg

SEQ ID NO: 1241270 - RNA, 22 nt, Human
caaaaacugcacaguccccagg

SEQ ID NO: 1241271 - RNA, 27 nt, Human
caauaggucuauuuucucccucagcuc

SEQ ID NO: 1241272 - RNA, 21 nt, Human
caugagaagcauguaggccuc

SEQ ID NO: 1241273 - RNA, 19 nt, Human
ccacuccacugucuuggca

SEQ ID NO: 1241274 - RNA, 20 nt, Human
ccacugagcaagauuuucug

SEQ ID NO: 1241275 - RNA, 19 nt, Human
ccauggcaccugguaucac

SEQ ID NO: 1241276 - RNA, 23 nt, Human
cugaagacugguuggcucccucu

SEQ ID NO: 1241277 - RNA, 18 nt, Human
gaagagcuacuaaauuuu

SEQ ID NO: 1241278 - RNA, 19 nt, Human
ggcauuggcuggauguagc

SEQ ID NO: 1241279 - RNA, 22 nt, Human
guaggccuccuuuaggacaucc

SEQ ID NO: 1241280 - RNA, 18 nt, Human
guucucuucuuuucuuag

SEQ ID NO: 1241281 - RNA, 25 nt, Human
uaaguauaauucuagcugugggguu

SEQ ID NO: 1241282 - RNA, 18 nt, Human
uagaagaaagaauuucag

SEQ ID NO: 1241283 - RNA, 23 nt, Human
uagcugugggguuuucacagacg

SEQ ID NO: 1241284 - RNA, 18 nt, Human
uaggacauccacagucuc

SEQ ID NO: 1241285 - RNA, 18 nt, Human
uaguuaaaacuuccccua

SEQ ID NO: 1241286 - RNA, 20 nt, Human
ucaaaaacugcacagucccc

SEQ ID NO: 1241287 - RNA, 30 nt, Human
ucaagaguggcaauaggucuauuuucuccu

SEQ ID NO: 1241288 - RNA, 23 nt, Human
ucagccaucuugcucugccuucc

SEQ ID NO: 1241289 - RNA, 20 nt, Human
uccacugucuuggcauuggc

SEQ ID NO: 1241290 - RNA, 19 nt, Human
uccccaggggaaaauucuc

SEQ ID NO: 1241291 - RNA, 20 nt, Human
uccccuacagaagauauaau

SEQ ID NO: 1241292 - RNA, 23 nt, Human
ucugaaagugcuuucuugugugg

SEQ ID NO: 1241293 - RNA, 18 nt, Human
ucuugaacuuagaagaaa

SEQ ID NO: 1241294 - RNA, 21 nt, Human
ugagcaagauuuucuggauga

SEQ ID NO: 1241295 - RNA, 20 nt, Human
ugcuggaggguucuauucag

SEQ ID NO: 1241296 - RNA, 24 nt, Human
uggcucccucugggaaggagugac

SEQ ID NO: 1241297 - RNA, 27 nt, Human
uggcuggauguagccguugaauuuuca

SEQ ID NO: 1241298 - RNA, 23 nt, Human
ugugggguuuucacagacgccuu

SEQ ID NO: 1241299 - RNA, 21 nt, Human
uguucuugaacuuagaagaaa

SEQ ID NO: 1241300 - RNA, 21 nt, Human
uuuccagucccacuccacugu

SEQ ID NO: 1241301 - RNA, 18 nt, Human
uuucucccucagcucuug

SEQ ID NO: 1241302 - RNA, 19 nt, Human
accucugaguugucuuuga

SEQ ID NO: 1241303 - RNA, 22 nt, Human
ccucugaguugucuuugagaug

SEQ ID NO: 1241304 - RNA, 24 nt, Human
aaaaaaaaaaaaaaagacagaaaa

SEQ ID NO: 1241305 - RNA, 19 nt, Human
aaacagacacagaaaaauc

SEQ ID NO: 1241306 - RNA, 22 nt, Human
aacaccugacccugcuaacacc

SEQ ID NO: 1241307 - RNA, 23 nt, Human
aacaccuugaucuaacccugcua

SEQ ID NO: 1241308 - RNA, 21 nt, Human
aaccauauuuggaaacagggu

SEQ ID NO: 1241309 - RNA, 26 nt, Human
aacccugcuaacaccugacccugcua

SEQ ID NO: 1241310 - RNA, 23 nt, Human
aagaagaggagauuaagacagaa

SEQ ID NO: 1241311 - RNA, 27 nt, Human
aagacaaaaaccaugagaaaagccaga

SEQ ID NO: 1241312 - RNA, 20 nt, Human
aagacagaaacaugcaaaga

SEQ ID NO: 1241313 - RNA, 21 nt, Human
aagacagaaacaugcaaagau

SEQ ID NO: 1241314 - RNA, 25 nt, Human
aagaguuaauuaagguaaaggaggu

SEQ ID NO: 1241315 - RNA, 23 nt, Human
aaucugauaaaagacaaaaacca

SEQ ID NO: 1241316 - RNA, 25 nt, Human
acaaaaaaaaaaaaaaagacagaaa

SEQ ID NO: 1241317 - RNA, 27 nt, Human
acagaaaauuauaguuaacacuggaga

SEQ ID NO: 1241318 - RNA, 20 nt, Human
accauauuuggaaacagggu

SEQ ID NO: 1241319 - RNA, 20 nt, Human
accuucagcuucccaggcuc

SEQ ID NO: 1241320 - RNA, 21 nt, Human
agacagaaaauuauaguuaac

SEQ ID NO: 1241321 - RNA, 23 nt, Human
aggaagauuaucagacacaaaau

SEQ ID NO: 1241322 - RNA, 19 nt, Human
auaaaagacaaaaaccaug

SEQ ID NO: 1241323 - RNA, 20 nt, Human
aucugauaaaagacaaaaac

SEQ ID NO: 1241324 - RNA, 19 nt, Human
augagaaaagccagaagug

SEQ ID NO: 1241325 - RNA, 22 nt, Human
caaguucuaaagccccccaccc

SEQ ID NO: 1241326 - RNA, 24 nt, Human
cacagacacugugugggauauccu

SEQ ID NO: 1241327 - RNA, 25 nt, Human
caccuugaucuuggacuuccagccc

SEQ ID NO: 1241328 - RNA, 21 nt, Human
cagaggaagaggccauccaga

SEQ ID NO: 1241329 - RNA, 23 nt, Human
cagcccccagaauuguaagaaaa

SEQ ID NO: 1241330 - RNA, 25 nt, Human
cauuuuuguccugaugccuugagag

SEQ ID NO: 1241331 - RNA, 24 nt, Human
ccccaaccuucagcuucccaggcu

SEQ ID NO: 1241332 - RNA, 24 nt, Human
cccccaaccuucagcuucccaggc

SEQ ID NO: 1241333 - RNA, 20 nt, Human
cccccagaauuguaagaaaa

SEQ ID NO: 1241334 - RNA, 25 nt, Human
cccuucaccacuguuguucgaguuc

SEQ ID NO: 1241335 - RNA, 20 nt, Human
ccucugaguguugggggagg

SEQ ID NO: 1241336 - RNA, 21 nt, Human
ccuucagcuucccaggcucau

SEQ ID NO: 1241337 - RNA, 23 nt, Human
cggcccccaaccuucagcuuccc

SEQ ID NO: 1241338 - RNA, 18 nt, Human
cuaaagccccccacccca

SEQ ID NO: 1241339 - RNA, 22 nt, Human
cuaaagccccccaccccaauaa

SEQ ID NO: 1241340 - RNA, 24 nt, Human
cuaacaccugacccugcuaacacc

SEQ ID NO: 1241341 - RNA, 22 nt, Human
cucaugcugagaauuucccuuc

SEQ ID NO: 1241342 - RNA, 23 nt, Human
cuugaucuaacccugcuaacacc

SEQ ID NO: 1241343 - RNA, 24 nt, Human
gaagaggccauccagaagcccagg

SEQ ID NO: 1241344 - RNA, 20 nt, Human
gaagcauugaggaaaggaag

SEQ ID NO: 1241345 - RNA, 24 nt, Human
gaguguugggggaggccccuucuc

SEQ ID NO: 1241346 - RNA, 20 nt, Human
gauggagaaguaagaaggga

SEQ ID NO: 1241347 - RNA, 18 nt, Human
gccccccaccccaauaac

SEQ ID NO: 1241348 - RNA, 21 nt, Human
gccccccaccccaauaacuca

SEQ ID NO: 1241349 - RNA, 23 nt, Human
uaaacagacacagaaaaaucagg

SEQ ID NO: 1241350 - RNA, 24 nt, Human
uaaacagacacagaaaaaucagga

SEQ ID NO: 1241351 - RNA, 23 nt, Human
uaaagccccccaccccaauaacu

SEQ ID NO: 1241352 - RNA, 22 nt, Human
uaaaguuucauuaaugcuucuc

SEQ ID NO: 1241353 - RNA, 22 nt, Human
uaacccugcuaacaccugaccc

SEQ ID NO: 1241354 - RNA, 22 nt, Human
uaacuucagaagcaauuuccug

SEQ ID NO: 1241355 - RNA, 18 nt, Human
uacaaaaaaaaaaaaaaa

SEQ ID NO: 1241356 - RNA, 23 nt, Human
uacaaaaaaaaaaaaaaagacag

SEQ ID NO: 1241357 - RNA, 18 nt, Human
uacaguaacuucagaagc

SEQ ID NO: 1241358 - RNA, 22 nt, Human
uagcagugauuauugcagcuaa

SEQ ID NO: 1241359 - RNA, 18 nt, Human
uaggauacaaaaaaaaaa

SEQ ID NO: 1241360 - RNA, 21 nt, Human
uaggauacaaaaaaaaaaaaa

SEQ ID NO: 1241361 - RNA, 20 nt, Human
uaguuaacacuggagauuuu

SEQ ID NO: 1241362 - RNA, 18 nt, Human
uauccuaaggaugcaggg

SEQ ID NO: 1241363 - RNA, 21 nt, Human
ucaugaggacuuaggauacaa

SEQ ID NO: 1241364 - RNA, 22 nt, Human
uccagaagcccaggagagggcc

SEQ ID NO: 1241365 - RNA, 18 nt, Human
ucuaaagccccccacccc

SEQ ID NO: 1241366 - RNA, 18 nt, Human
ucuaacccugcuaacacc

SEQ ID NO: 1241367 - RNA, 19 nt, Human
ucugaaguccacugugccc

SEQ ID NO: 1241368 - RNA, 21 nt, Human
ugagaaaagccagaagugaga

SEQ ID NO: 1241369 - RNA, 22 nt, Human
ugagaggaugagauauucuaaa

SEQ ID NO: 1241370 - RNA, 18 nt, Human
ugcaaagauggaagacga

SEQ ID NO: 1241371 - RNA, 21 nt, Human
ugccacagacacuguguggga

SEQ ID NO: 1241372 - RNA, 18 nt, Human
uggacuuccagcccccag

SEQ ID NO: 1241373 - RNA, 21 nt, Human
uggagaaguaagaagggacaa

SEQ ID NO: 1241374 - RNA, 22 nt, Human
uguggacaccagaggaagaggc

SEQ ID NO: 1241375 - RNA, 19 nt, Human
uguucaggucaccuaguug

SEQ ID NO: 1241376 - RNA, 26 nt, Human
uguuuuauuuugcuauagcagcccua

SEQ ID NO: 1241377 - RNA, 25 nt, Human
uuaacacuggagauuuuuguuuagu

SEQ ID NO: 1241378 - RNA, 21 nt, Human
uuuuuuauuuauucauuuuug

SEQ ID NO: 1241379 - RNA, 24 nt, Human
aacgcccccgugaagacacagcca

SEQ ID NO: 1241380 - RNA, 18 nt, Human
aagcagguuugcaggggg

SEQ ID NO: 1241381 - RNA, 23 nt, Human
acccaugcuggacccuggucucc

SEQ ID NO: 1241382 - RNA, 23 nt, Human
acggugacuuccucugugccucu

SEQ ID NO: 1241383 - RNA, 18 nt, Human
acuccaggaacgcccccg

SEQ ID NO: 1241384 - RNA, 24 nt, Human
acuccaggaacgcccccgugaagg

SEQ ID NO: 1241385 - RNA, 23 nt, Human
caggauggcuccagggcugggga

SEQ ID NO: 1241386 - RNA, 25 nt, Human
caggauggcuccagggcuggggaca

SEQ ID NO: 1241387 - RNA, 24 nt, Human
cagggcuggggacaaagacagggu

SEQ ID NO: 1241388 - RNA, 28 nt, Human
cauggccucagggacggugacuuccucu

SEQ ID NO: 1241389 - RNA, 18 nt, Human
ccaggaacgcccccguga

SEQ ID NO: 1241390 - RNA, 19 nt, Human
cccgugaagacacagccau

SEQ ID NO: 1241391 - RNA, 23 nt, Human
ccugggccgcccccgccgucugc

SEQ ID NO: 1241392 - RNA, 18 nt, Human
cugugcugaaacccaugc

SEQ ID NO: 1241393 - RNA, 19 nt, Human
gaacgcccccgugaagaca

SEQ ID NO: 1241394 - RNA, 19 nt, Human
gcccccgccgucugcugug

SEQ ID NO: 1241395 - RNA, 18 nt, Human
ggacaaagacagggucag

SEQ ID NO: 1241396 - RNA, 21 nt, Human
gggccgcccccgccgucugcu

SEQ ID NO: 1241397 - RNA, 22 nt, Human
gucugcugugcugaaacccaug

SEQ ID NO: 1241398 - RNA, 26 nt, Human
gugaagacacagccauacauggccuc

SEQ ID NO: 1241399 - RNA, 25 nt, Human
uccaggaacgcccccgugaagacac

SEQ ID NO: 1241400 - RNA, 24 nt, Human
ucccagccgggacaggccgggguc

SEQ ID NO: 1241401 - RNA, 18 nt, Human
ucccgguucacccacucc

SEQ ID NO: 1241402 - RNA, 18 nt, Human
ugacuuccucugugccuc

SEQ ID NO: 1241403 - RNA, 23 nt, Human
uggacggccaagccugaggucag

SEQ ID NO: 1241404 - RNA, 22 nt, Human
uggucucccgaacuccgacgcu

SEQ ID NO: 1241405 - RNA, 18 nt, Human
uuccagaucccgggcgcc

SEQ ID NO: 1241406 - RNA, 19 nt, Human
aagcagaggugaccugucc

SEQ ID NO: 1241407 - RNA, 25 nt, Human
accuguccguaggaacucucagaac

SEQ ID NO: 1241408 - RNA, 21 nt, Human
agaaauguacacuuuaugccc

SEQ ID NO: 1241409 - RNA, 21 nt, Human
agaggugaccuguccguagga

SEQ ID NO: 1241410 - RNA, 18 nt, Human
aggaauucucagaacauc

SEQ ID NO: 1241411 - RNA, 19 nt, Human
cagcaggcgagccccucgg

SEQ ID NO: 1241412 - RNA, 19 nt, Human
caucauacuggcacacacc

SEQ ID NO: 1241413 - RNA, 21 nt, Human
caucccagggcccagugacag

SEQ ID NO: 1241414 - RNA, 18 nt, Human
cccaccucugcugcugug

SEQ ID NO: 1241415 - RNA, 21 nt, Human
ccccucgguggcaucacagcc

SEQ ID NO: 1241416 - RNA, 24 nt, Human
ccugccuguaggaauucucagaac

SEQ ID NO: 1241417 - RNA, 23 nt, Human
cugguaggggacucagugugugc

SEQ ID NO: 1241418 - RNA, 21 nt, Human
cugugauauguccccccaccu

SEQ ID NO: 1241419 - RNA, 24 nt, Human
gcccauaaagccugcauuucuacc

SEQ ID NO: 1241420 - RNA, 19 nt, Human
ggggacucagugugugcag

SEQ ID NO: 1241421 - RNA, 19 nt, Human
gguggcaucacagccgggg

SEQ ID NO: 1241422 - RNA, 23 nt, Human
ucuucuauggaaagcagagguug

SEQ ID NO: 1241423 - RNA, 20 nt, Human
ugaaaggggcugguagggga

SEQ ID NO: 1241424 - RNA, 20 nt, Human
uggaaagcagaggugaccug

SEQ ID NO: 1241425 - RNA, 24 nt, Human
uggaagggacgauugugaccaggu

SEQ ID NO: 1241426 - RNA, 21 nt, Human
uguggagucuugcgcauccca

SEQ ID NO: 1241427 - RNA, 18 nt, Human
uuuauuuagaaauguaca

SEQ ID NO: 1241428 - RNA, 19 nt, Human
ugacaaaggcccucgucaa

SEQ ID NO: 1241429 - RNA, 22 nt, Human
ugugcagcuuccgugaugcagu

SEQ ID NO: 1241430 - RNA, 22 nt, Human
aagaagaguaauaaucuacagg

SEQ ID NO: 1241431 - RNA, 20 nt, Human
aauugcuuccuuucuuaacc

SEQ ID NO: 1241432 - RNA, 21 nt, Human
caaaugguucaguguaauuaa

SEQ ID NO: 1241433 - RNA, 22 nt, Human
cagcgaacaacucccaaagcuu

SEQ ID NO: 1241434 - RNA, 19 nt, Human
ccaaaauuuucuccagaag

SEQ ID NO: 1241435 - RNA, 26 nt, Human
ccagccgccucccucuggcguucucu

SEQ ID NO: 1241436 - RNA, 22 nt, Human
ccgccgggccagccgccucccu

SEQ ID NO: 1241437 - RNA, 19 nt, Human
cugagagccugccgccggg

SEQ ID NO: 1241438 - RNA, 21 nt, Human
gaacaacucccaaagcuugca

SEQ ID NO: 1241439 - RNA, 26 nt, Human
gaagauccaaaauuuucuccagaaga

SEQ ID NO: 1241440 - RNA, 26 nt, Human
gaagauggugaaggguaagggugugg

SEQ ID NO: 1241441 - RNA, 19 nt, Human
gagcagggcagggacagcg

SEQ ID NO: 1241442 - RNA, 18 nt, Human
gcaucaugagacacuuuu

SEQ ID NO: 1241443 - RNA, 19 nt, Human
uagcagagcagggcaggga

SEQ ID NO: 1241444 - RNA, 19 nt, Human
uauucugccaaucccuuuc

SEQ ID NO: 1241445 - RNA, 18 nt, Human
ucaguguaauuaauugcu

SEQ ID NO: 1241446 - RNA, 24 nt, Human
ucccuagcagagcagggcagggac

SEQ ID NO: 1241447 - RNA, 19 nt, Human
ucccucuggcguucucucc

SEQ ID NO: 1241448 - RNA, 18 nt, Human
ugaccacuuugggauuuu

SEQ ID NO: 1241449 - RNA, 22 nt, Human
uuaauugcuuccuuucuuaacc

SEQ ID NO: 1241450 - RNA, 23 nt, Human
uuuugauggcaucaugagacacu

SEQ ID NO: 1241451 - RNA, 20 nt, Human
aaccucucccuccuuccacu

SEQ ID NO: 1241452 - RNA, 21 nt, Human
aaccucucccuccuuccacug

SEQ ID NO: 1241453 - RNA, 23 nt, Human
aacuuguuccucuuuuucacuuu

SEQ ID NO: 1241454 - RNA, 20 nt, Human
aagugagaauaugugguauu

SEQ ID NO: 1241455 - RNA, 19 nt, Human
acaacaccucaagauuggu

SEQ ID NO: 1241456 - RNA, 19 nt, Human
accacauuuucuuuaucca

SEQ ID NO: 1241457 - RNA, 21 nt, Human
agaggagagaguguauaaacu

SEQ ID NO: 1241458 - RNA, 21 nt, Human
aguguaauucuuuguagccua

SEQ ID NO: 1241459 - RNA, 19 nt, Human
aguuugauuccuugucuuu

SEQ ID NO: 1241460 - RNA, 20 nt, Human
aguuugauuccuugucuuug

SEQ ID NO: 1241461 - RNA, 22 nt, Human
cacuuccuuuuuugguuaaaug

SEQ ID NO: 1241462 - RNA, 23 nt, Human
cacuuccuuuuuugguuaaaugg

SEQ ID NO: 1241463 - RNA, 19 nt, Human
ccuuccacuguccucccuc

SEQ ID NO: 1241464 - RNA, 19 nt, Human
cucccuccuuccacugucc

SEQ ID NO: 1241465 - RNA, 21 nt, Human
cuggaagauggcucucuucgu

SEQ ID NO: 1241466 - RNA, 19 nt, Human
cuguucccauguuaguuuu

SEQ ID NO: 1241467 - RNA, 20 nt, Human
cuucgugugugaugcucuuc

SEQ ID NO: 1241468 - RNA, 21 nt, Human
gaacuuguuccucuuuuucac

SEQ ID NO: 1241469 - RNA, 22 nt, Human
gcucccacuuuuaagugagaau

SEQ ID NO: 1241470 - RNA, 18 nt, Human
gugagaauaugugguauu

SEQ ID NO: 1241471 - RNA, 19 nt, Human
guuauguuuuaaaccugca

SEQ ID NO: 1241472 - RNA, 19 nt, Human
uaagugagaauauguggua

SEQ ID NO: 1241473 - RNA, 23 nt, Human
uaagugagaauaugugguauuug

SEQ ID NO: 1241474 - RNA, 22 nt, Human
ucccagagaauggcacaacacc

SEQ ID NO: 1241475 - RNA, 22 nt, Human
ucccuccuuccacuguccuccc

SEQ ID NO: 1241476 - RNA, 23 nt, Human
ucccugaaccucucccuccuucc

SEQ ID NO: 1241477 - RNA, 23 nt, Human
ucuccauguguucuuauuauuua

SEQ ID NO: 1241478 - RNA, 19 nt, Human
ucuuuuguucuuuugguua

SEQ ID NO: 1241479 - RNA, 26 nt, Human
ucuuuuguucuuuugguuauguuuua

SEQ ID NO: 1241480 - RNA, 21 nt, Human
uggugggcaggguucaggucg

SEQ ID NO: 1241481 - RNA, 21 nt, Human
ugugaugcucuucacauuaca

SEQ ID NO: 1241482 - RNA, 21 nt, Human
uucagggguacauguucaggu

SEQ ID NO: 1241483 - RNA, 22 nt, Human
uuccacuguccucccucaagua

SEQ ID NO: 1241484 - RNA, 25 nt, Human
uucccagagaauggcacaacaccuc

SEQ ID NO: 1241485 - RNA, 21 nt, Human
uuccucuccuucucuccaugu

SEQ ID NO: 1241486 - RNA, 25 nt, Human
uuccuugucuuugcuguugaaaaau

SEQ ID NO: 1241487 - RNA, 18 nt, Human
uugaaaaauuacagugaa

SEQ ID NO: 1241488 - RNA, 21 nt, Human
uuggugugucaagcucucucu

SEQ ID NO: 1241489 - RNA, 24 nt, Human
uugguuaaauggugggcaggguuc

SEQ ID NO: 1241490 - RNA, 25 nt, Human
uuucuguucccauguuaguuuuguu

SEQ ID NO: 1241491 - RNA, 20 nt, Human
uuugguuaaauggugggcag

SEQ ID NO: 1241492 - RNA, 24 nt, Human
uuuuaagugagaauaugugguauu

SEQ ID NO: 1241493 - RNA, 20 nt, Human
uuuuacggcugcauaauauu

SEQ ID NO: 1241494 - RNA, 19 nt, Human
uuuuccuuuucagaucugg

SEQ ID NO: 1241495 - RNA, 19 nt, Human
uuuuuuuuuucccugaacc

SEQ ID NO: 1241496 - RNA, 24 nt, Human
aagcaaauaucauuuauugugauc

SEQ ID NO: 1241497 - RNA, 20 nt, Human
acucuacuuacuggagagaa

SEQ ID NO: 1241498 - RNA, 20 nt, Human
agacucaagaaucagaacag

SEQ ID NO: 1241499 - RNA, 18 nt, Human
aggauacaaugcuugaaa

SEQ ID NO: 1241500 - RNA, 18 nt, Human
aggguuucuuccaaccug

SEQ ID NO: 1241501 - RNA, 21 nt, Human
aggguuucuuccaaccugaaa

SEQ ID NO: 1241502 - RNA, 20 nt, Human
aguaguauccuuaugaguac

SEQ ID NO: 1241503 - RNA, 21 nt, Human
cagcaaguuuucuuaugauuc

SEQ ID NO: 1241504 - RNA, 21 nt, Human
caucucuacuuuguccugucu

SEQ ID NO: 1241505 - RNA, 23 nt, Human
ccugaaauucuuuaagcugugag

SEQ ID NO: 1241506 - RNA, 18 nt, Human
cugacccaaaaaaugccu

SEQ ID NO: 1241507 - RNA, 23 nt, Human
gacacaaaagaccugagagaacg

SEQ ID NO: 1241508 - RNA, 21 nt, Human
gagggaugguaacauuccuuu

SEQ ID NO: 1241509 - RNA, 18 nt, Human
gaugacacaaaagaccug

SEQ ID NO: 1241510 - RNA, 21 nt, Human
ggaccagaggugagcagagaa

SEQ ID NO: 1241511 - RNA, 18 nt, Human
ggagagaaagaaauggua

SEQ ID NO: 1241512 - RNA, 22 nt, Human
ggauuaggaggaggaagggcug

SEQ ID NO: 1241513 - RNA, 24 nt, Human
guagaggagacucaagaaucagaa

SEQ ID NO: 1241514 - RNA, 20 nt, Human
guuacugcagaaauguagaa

SEQ ID NO: 1241515 - RNA, 23 nt, Human
uaaaaaggacuucuaccaagaac

SEQ ID NO: 1241516 - RNA, 24 nt, Human
uaaaucacuuaauauuuucaguuc

SEQ ID NO: 1241517 - RNA, 21 nt, Human
uaccaagaacaugaaaguaac

SEQ ID NO: 1241518 - RNA, 25 nt, Human
uaugauaacuaccuuguuacugcag

SEQ ID NO: 1241519 - RNA, 24 nt, Human
uauuccaugugguugcugucaacu

SEQ ID NO: 1241520 - RNA, 18 nt, Human
uauucuucuuacagcuuu

SEQ ID NO: 1241521 - RNA, 18 nt, Human
ucauaaguaguauccuua

SEQ ID NO: 1241522 - RNA, 27 nt, Human
ucaucucuacuuuguccugucucccua

SEQ ID NO: 1241523 - RNA, 20 nt, Human
ucucuuauauacaaguguga

SEQ ID NO: 1241524 - RNA, 19 nt, Human
ucuguagcagcaaguuuuc

SEQ ID NO: 1241525 - RNA, 22 nt, Human
ugaaaaggaaccuuaaaagcau

SEQ ID NO: 1241526 - RNA, 22 nt, Human
ugaaauuaggacugacccaaaa

SEQ ID NO: 1241527 - RNA, 20 nt, Human
ugaaauucuuuaagcuguga

SEQ ID NO: 1241528 - RNA, 21 nt, Human
ugaauagugaagauaggguac

SEQ ID NO: 1241529 - RNA, 19 nt, Human
ugacacaaaagaccugaga

SEQ ID NO: 1241530 - RNA, 18 nt, Human
ugacuauaaauaaaaagg

SEQ ID NO: 1241531 - RNA, 24 nt, Human
ugagagaacguaggaauguauaga

SEQ ID NO: 1241532 - RNA, 23 nt, Human
ugagucauuauuccaugugguug

SEQ ID NO: 1241533 - RNA, 19 nt, Human
ugcuuagcuguggaccaga

SEQ ID NO: 1241534 - RNA, 21 nt, Human
uguccugucucccuacacccu

SEQ ID NO: 1241535 - RNA, 23 nt, Human
uguuucguuuucuuaugugcuua

SEQ ID NO: 1241536 - RNA, 20 nt, Human
uuaggaggaggaagggcuga

SEQ ID NO: 1241537 - RNA, 21 nt, Human
uuccugaacuaauauaggaac

SEQ ID NO: 1241538 - RNA, 18 nt, Human
uuuuguuuguuucguuuu

SEQ ID NO: 1241539 - RNA, 18 nt, Human
aaaaccaaugaaaauuug

SEQ ID NO: 1241540 - RNA, 22 nt, Human
aaaaccaaugaaaauuugccau

SEQ ID NO: 1241541 - RNA, 25 nt, Human
aaaaccaaugaaaauuugccauggc

SEQ ID NO: 1241542 - RNA, 18 nt, Human
aacaggauagcuugcuuu

SEQ ID NO: 1241543 - RNA, 23 nt, Human
accaaauauuaauauucacaugu

SEQ ID NO: 1241544 - RNA, 21 nt, Human
acuguuugacuucauauccca

SEQ ID NO: 1241545 - RNA, 22 nt, Human
auaaaaccaaugaaaauuugcc

SEQ ID NO: 1241546 - RNA, 20 nt, Human
caccaaauauuaauauucac

SEQ ID NO: 1241547 - RNA, 23 nt, Human
ccaaugaaaauuugccauggccu

SEQ ID NO: 1241548 - RNA, 21 nt, Human
ccaucacugcuucuuagcugu

SEQ ID NO: 1241549 - RNA, 23 nt, Human
ucauaucccaucacugcuucuua

SEQ ID NO: 1241550 - RNA, 25 nt, Human
ucuauaaucaugaauaagauaaaac

SEQ ID NO: 1241551 - RNA, 20 nt, Human
ucuguggugcuagcacuaca

SEQ ID NO: 1241552 - RNA, 19 nt, Human
aaggaaugaacagcagacc

SEQ ID NO: 1241553 - RNA, 18 nt, Human
acauuuuguggaaagcau

SEQ ID NO: 1241554 - RNA, 19 nt, Human
agcacaaccuuccuucacu

SEQ ID NO: 1241555 - RNA, 25 nt, Human
agcacaaccuuccuucacucugacc

SEQ ID NO: 1241556 - RNA, 22 nt, Human
caaccuuccuucacucugaccu

SEQ ID NO: 1241557 - RNA, 23 nt, Human
cacacacugcucuguaaagucaa

SEQ ID NO: 1241558 - RNA, 24 nt, Human
cacaugcugauugcuaugcaugca

SEQ ID NO: 1241559 - RNA, 19 nt, Human
cagcagacccccccaaaau

SEQ ID NO: 1241560 - RNA, 21 nt, Human
cagcagacccccccaaaauuc

SEQ ID NO: 1241561 - RNA, 25 nt, Human
cagcagacccccccaaaauucaaau

SEQ ID NO: 1241562 - RNA, 26 nt, Human
cauuucuacauuuaaaauuuuaggga

SEQ ID NO: 1241563 - RNA, 22 nt, Human
cauuuuucucuuucgguuccca

SEQ ID NO: 1241564 - RNA, 19 nt, Human
ccccccaaaauucaaaucg

SEQ ID NO: 1241565 - RNA, 21 nt, Human
ccccggugacuuugaguccac

SEQ ID NO: 1241566 - RNA, 23 nt, Human
ccuaaaggaaugaacagcagacc

SEQ ID NO: 1241567 - RNA, 22 nt, Human
cuaaaggaaugaacagcagacc

SEQ ID NO: 1241568 - RNA, 23 nt, Human
gaaauuucuaauauauagcacau

SEQ ID NO: 1241569 - RNA, 18 nt, Human
uaaaacagauggaagucc

SEQ ID NO: 1241570 - RNA, 20 nt, Human
uaaaacagauggaaguccau

SEQ ID NO: 1241571 - RNA, 21 nt, Human
uaggaaagaacucaaacuuag

SEQ ID NO: 1241572 - RNA, 21 nt, Human
uaggauucaucauccuuuagu

SEQ ID NO: 1241573 - RNA, 19 nt, Human
uagggaggagagacucaug

SEQ ID NO: 1241574 - RNA, 26 nt, Human
ucuacauuuaaaauuuuagggaggag

SEQ ID NO: 1241575 - RNA, 20 nt, Human
ugacuuugaguccacaucuc

SEQ ID NO: 1241576 - RNA, 21 nt, Human
ugaguccacaucucucuuugu

SEQ ID NO: 1241577 - RNA, 22 nt, Human
ugaguccacaucucucuuugug

SEQ ID NO: 1241578 - RNA, 18 nt, Human
uggcuuuauagacucuaa

SEQ ID NO: 1241579 - RNA, 21 nt, Human
uggcuuuauagacucuaacca

SEQ ID NO: 1241580 - RNA, 26 nt, Human
uuaaaauuuuagggaggagagacuca

SEQ ID NO: 1241581 - RNA, 21 nt, Human
aaauaaaaccacaaagcagcc

SEQ ID NO: 1241582 - RNA, 22 nt, Human
aacaaccagagcucucuaacaa

SEQ ID NO: 1241583 - RNA, 23 nt, Human
aacacagugauuuaagucaucuc

SEQ ID NO: 1241584 - RNA, 18 nt, Human
aacccggguuucuugagc

SEQ ID NO: 1241585 - RNA, 21 nt, Human
aagaaccaaaauaaaaccaca

SEQ ID NO: 1241586 - RNA, 24 nt, Human
aagagguagagaggggcagaaggg

SEQ ID NO: 1241587 - RNA, 21 nt, Human
aaugaauggcggagaauggaa

SEQ ID NO: 1241588 - RNA, 20 nt, Human
aauggcggagaauggaaaga

SEQ ID NO: 1241589 - RNA, 23 nt, Human
acaaagcagccaaucauggcccc

SEQ ID NO: 1241590 - RNA, 21 nt, Human
acaaccagagcucucuaacaa

SEQ ID NO: 1241591 - RNA, 19 nt, Human
acaggaacccggguuucuu

SEQ ID NO: 1241592 - RNA, 20 nt, Human
acauaagcagaaacagcgca

SEQ ID NO: 1241593 - RNA, 22 nt, Human
agaaccaaaauaaaaccacaaa

SEQ ID NO: 1241594 - RNA, 19 nt, Human
agacuggguuggcuccagc

SEQ ID NO: 1241595 - RNA, 22 nt, Human
agagcucucuaacaaccugcuc

SEQ ID NO: 1241596 - RNA, 22 nt, Human
agccaaugacaggcucccacag

SEQ ID NO: 1241597 - RNA, 26 nt, Human
agccucuggcccuguugcacuggccc

SEQ ID NO: 1241598 - RNA, 21 nt, Human
agcucagcugagaacuaacug

SEQ ID NO: 1241599 - RNA, 22 nt, Human
aggcaacauuagaauuacaacc

SEQ ID NO: 1241600 - RNA, 19 nt, Human
aggcagcguggacggaggc

SEQ ID NO: 1241601 - RNA, 19 nt, Human
auaaaaucuccucccaaac

SEQ ID NO: 1241602 - RNA, 21 nt, Human
auaaaaucuccucccaaacag

SEQ ID NO: 1241603 - RNA, 22 nt, Human
aucaaacuucuccacggaaaau

SEQ ID NO: 1241604 - RNA, 23 nt, Human
auggccccuuucccucacucccu

SEQ ID NO: 1241605 - RNA, 20 nt, Human
augggggcgggggggggggc

SEQ ID NO: 1241606 - RNA, 22 nt, Human
auugcacugggccacuccaggg

SEQ ID NO: 1241607 - RNA, 21 nt, Human
caaagcagccaaucauggccc

SEQ ID NO: 1241608 - RNA, 23 nt, Human
caaugcuaaagauuugguucaga

SEQ ID NO: 1241609 - RNA, 18 nt, Human
caauggccaccuucaccu

SEQ ID NO: 1241610 - RNA, 23 nt, Human
cacacacagguagcacccaccuc

SEQ ID NO: 1241611 - RNA, 18 nt, Human
caccucgaugagaccgcc

SEQ ID NO: 1241612 - RNA, 23 nt, Human
cacgaaacuuugcugaacuucca

SEQ ID NO: 1241613 - RNA, 21 nt, Human
cagaugaagaacugcucccca

SEQ ID NO: 1241614 - RNA, 21 nt, Human
cagauguccauccauucagau

SEQ ID NO: 1241615 - RNA, 18 nt, Human
cauaagcaguagaggggc

SEQ ID NO: 1241616 - RNA, 25 nt, Human
cauagccaaugacaggcucccacag

SEQ ID NO: 1241617 - RNA, 20 nt, Human
caucuacacacacacaggua

SEQ ID NO: 1241618 - RNA, 21 nt, Human
cauuuaaaaaaccuuaguaaa

SEQ ID NO: 1241619 - RNA, 25 nt, Human
ccaagaggaugacaguaucauuuaa

SEQ ID NO: 1241620 - RNA, 25 nt, Human
ccacaauaaccugauguuguccgga

SEQ ID NO: 1241621 - RNA, 18 nt, Human
ccaccucuggauugcacu

SEQ ID NO: 1241622 - RNA, 22 nt, Human
ccagugagcagacagugccgag

SEQ ID NO: 1241623 - RNA, 20 nt, Human
ccagugguuuucuaguuccc

SEQ ID NO: 1241624 - RNA, 19 nt, Human
cccacagcaacuaccaagc

SEQ ID NO: 1241625 - RNA, 23 nt, Human
ccccacuuuuaacaaagccucaa

SEQ ID NO: 1241626 - RNA, 18 nt, Human
cccuugaaggaagcccag

SEQ ID NO: 1241627 - RNA, 18 nt, Human
ccuaggaggcggcucugc

SEQ ID NO: 1241628 - RNA, 21 nt, Human
ccucaaacuuuucuacauaaa

SEQ ID NO: 1241629 - RNA, 18 nt, Human
ccucccaaacaggaaccc

SEQ ID NO: 1241630 - RNA, 18 nt, Human
ccuccccaccuucagcac

SEQ ID NO: 1241631 - RNA, 24 nt, Human
ccucuaaccuggcugauaaacccc

SEQ ID NO: 1241632 - RNA, 22 nt, Human
ccuuacaccugaagccccacaa

SEQ ID NO: 1241633 - RNA, 23 nt, Human
cggcaaaaaagcaaugauggacc

SEQ ID NO: 1241634 - RNA, 22 nt, Human
cuauuuucaucaaugcuaaaga

SEQ ID NO: 1241635 - RNA, 22 nt, Human
cuccccaccuucagcacacuca

SEQ ID NO: 1241636 - RNA, 22 nt, Human
cugaacuuccaggaccuuacac

SEQ ID NO: 1241637 - RNA, 23 nt, Human
cugcuccccaaaauggcucagga

SEQ ID NO: 1241638 - RNA, 22 nt, Human
gaaacuuugcugaacuuccagg

SEQ ID NO: 1241639 - RNA, 25 nt, Human
gaaguugaaaacauagaaccauuua

SEQ ID NO: 1241640 - RNA, 21 nt, Human
gacaagguggccccagcccug

SEQ ID NO: 1241641 - RNA, 21 nt, Human
gaggggcagaagggagcugag

SEQ ID NO: 1241642 - RNA, 23 nt, Human
gaggggcagaagggagcugagga

SEQ ID NO: 1241643 - RNA, 18 nt, Human
gaucuuccuucuccccac

SEQ ID NO: 1241644 - RNA, 18 nt, Human
gccccagcccugagaaac

SEQ ID NO: 1241645 - RNA, 23 nt, Human
gccuugcucuggccugccccaac

SEQ ID NO: 1241646 - RNA, 22 nt, Human
gcggcaaaaaagcaaugaugga

SEQ ID NO: 1241647 - RNA, 20 nt, Human
gcuguccucauuacucccua

SEQ ID NO: 1241648 - RNA, 19 nt, Human
ggaguccggcuccagugag

SEQ ID NO: 1241649 - RNA, 20 nt, Human
ggaucucuuccaccucugga

SEQ ID NO: 1241650 - RNA, 19 nt, Human
ggcgggggggggggcgcgg

SEQ ID NO: 1241651 - RNA, 20 nt, Human
ggcgggggggggggcgcggc

SEQ ID NO: 1241652 - RNA, 20 nt, Human
gggccacuccaggguugggu

SEQ ID NO: 1241653 - RNA, 23 nt, Human
gggcgggggggggggcgcggcaa

SEQ ID NO: 1241654 - RNA, 23 nt, Human
gguagagaggggcagaagggagc

SEQ ID NO: 1241655 - RNA, 21 nt, Human
guccauccauucagaugaaga

SEQ ID NO: 1241656 - RNA, 24 nt, Human
guguguguacaaaacaaugaucua

SEQ ID NO: 1241657 - RNA, 24 nt, Human
uaaaaucuccucccaaacaggaac

SEQ ID NO: 1241658 - RNA, 20 nt, Human
uaagcagaaacagcgcaugu

SEQ ID NO: 1241659 - RNA, 22 nt, Human
uagaauuacaaccugggagucc

SEQ ID NO: 1241660 - RNA, 18 nt, Human
uagcagccucuggcccug

SEQ ID NO: 1241661 - RNA, 24 nt, Human
uauucuuauuucaauuuacacuau

SEQ ID NO: 1241662 - RNA, 24 nt, Human
ucaauggcccuugaaggaagccca

SEQ ID NO: 1241663 - RNA, 19 nt, Human
ucagaagagggucaacaca

SEQ ID NO: 1241664 - RNA, 24 nt, Human
ucauggccccuuucccucacuccc

SEQ ID NO: 1241665 - RNA, 18 nt, Human
uccaugaguggaagaggu

SEQ ID NO: 1241666 - RNA, 19 nt, Human
ucccacagcaacuaccaag

SEQ ID NO: 1241667 - RNA, 19 nt, Human
uccccaaaauggcucagaa

SEQ ID NO: 1241668 - RNA, 21 nt, Human
uccccaaaauggcucagaagc

SEQ ID NO: 1241669 - RNA, 23 nt, Human
uccccaccuucagcacacucauc

SEQ ID NO: 1241670 - RNA, 22 nt, Human
uccccccgaacccuuucuuaac

SEQ ID NO: 1241671 - RNA, 28 nt, Human
uccucuaaccuggcugauaaaccccaag

SEQ ID NO: 1241672 - RNA, 22 nt, Human
ucuacacacacacagguagcac

SEQ ID NO: 1241673 - RNA, 25 nt, Human
ucuaguuuccagugguuuucuaguu

SEQ ID NO: 1241674 - RNA, 23 nt, Human
ucuggcccuguugcacuggcccu

SEQ ID NO: 1241675 - RNA, 18 nt, Human
ucuugagcugccaguccc

SEQ ID NO: 1241676 - RNA, 24 nt, Human
ugaaggaagcccagauguccaucc

SEQ ID NO: 1241677 - RNA, 27 nt, Human
ugacaguaucauuuaaaaaaccuuagu

SEQ ID NO: 1241678 - RNA, 19 nt, Human
ugaggaagacccaacaacc

SEQ ID NO: 1241679 - RNA, 22 nt, Human
ugaggauguuucuguaucaaug

SEQ ID NO: 1241680 - RNA, 23 nt, Human
ugaucuauucuuauuucaauuua

SEQ ID NO: 1241681 - RNA, 25 nt, Human
ugauuaccuaccaaagccuacuuua

SEQ ID NO: 1241682 - RNA, 21 nt, Human
ugcccugaccauagugugggg

SEQ ID NO: 1241683 - RNA, 23 nt, Human
ugcucaaaugagacucagcaaga

SEQ ID NO: 1241684 - RNA, 22 nt, Human
uggaaagaaccaaaauaaaacc

SEQ ID NO: 1241685 - RNA, 23 nt, Human
uggaaagaaccaaaauaaaacca

SEQ ID NO: 1241686 - RNA, 19 nt, Human
uggaagagguagagagggg

SEQ ID NO: 1241687 - RNA, 24 nt, Human
uggccccuuucccucacucccucc

SEQ ID NO: 1241688 - RNA, 22 nt, Human
uggcccuguugcacuggcccua

SEQ ID NO: 1241689 - RNA, 23 nt, Human
uggcggagaauggaaagaaccaa

SEQ ID NO: 1241690 - RNA, 19 nt, Human
uggcucagaagcuguuuuc

SEQ ID NO: 1241691 - RNA, 21 nt, Human
ugggaaagcagcucuagagaa

SEQ ID NO: 1241692 - RNA, 20 nt, Human
ugggaagggaucaacagggu

SEQ ID NO: 1241693 - RNA, 22 nt, Human
uggggacuccuaacacagggcu

SEQ ID NO: 1241694 - RNA, 22 nt, Human
uguuuucccaggcaggucugga

SEQ ID NO: 1241695 - RNA, 24 nt, Human
uuacaccugaagccccacaauaac

SEQ ID NO: 1241696 - RNA, 26 nt, Human
uucacugaggaucuuccuucucccca

SEQ ID NO: 1241697 - RNA, 21 nt, Human
uucuaguuuccagugguuuuc

SEQ ID NO: 1241698 - RNA, 18 nt, Human
uugcucuggccugcccca

SEQ ID NO: 1241699 - RNA, 21 nt, Human
uugcucuggccugccccaacc

SEQ ID NO: 1241700 - RNA, 19 nt, Human
uuggcuccagcaagauaag

SEQ ID NO: 1241701 - RNA, 27 nt, Human
uuguguguguguacaaaacaaugauua

SEQ ID NO: 1241702 - RNA, 26 nt, Human
uuucuacauaaaaucuccucccaaac

SEQ ID NO: 1241703 - RNA, 23 nt, Human
ugaguuuaggcaaaguaggacaa

SEQ ID NO: 1241704 - RNA, 18 nt, Human
uuuauagagacucucauc

SEQ ID NO: 1241705 - RNA, 24 nt, Human
aagagcuauagguuaaaaccaaca

SEQ ID NO: 1241706 - RNA, 18 nt, Human
acaguccugagccucacg

SEQ ID NO: 1241707 - RNA, 18 nt, Human
auagguuaaaaccaacau

SEQ ID NO: 1241708 - RNA, 18 nt, Human
auauauuugguggaugaa

SEQ ID NO: 1241709 - RNA, 21 nt, Human
auguacaguccugagccucac

SEQ ID NO: 1241710 - RNA, 23 nt, Human
ccagcuggcuuuuggcuuccucu

SEQ ID NO: 1241711 - RNA, 19 nt, Human
ccucacgccgccaacgccu

SEQ ID NO: 1241712 - RNA, 21 nt, Human
cuauagguuaaaaccaacauu

SEQ ID NO: 1241713 - RNA, 22 nt, Human
cugauccagaugauuucucccc

SEQ ID NO: 1241714 - RNA, 24 nt, Human
ugaagagcuauagguuaaaaccaa

SEQ ID NO: 1241715 - RNA, 20 nt, Human
ugauccagaugauuucuccc

SEQ ID NO: 1241716 - RNA, 22 nt, Human
ugaugaguaaguuuauugaaga

SEQ ID NO: 1241717 - RNA, 22 nt, Human
uggcuuccucugauguacaguc

SEQ ID NO: 1241718 - RNA, 26 nt, Human
uugcaaacaagauuaaaacuguauuc

SEQ ID NO: 1241719 - RNA, 22 nt, Human
aauuacaggcacaaguuaccau

SEQ ID NO: 1241720 - RNA, 19 nt, Human
acuuuuuuuuucuuuugcu

SEQ ID NO: 1241721 - RNA, 19 nt, Human
aucacagcucacugcagca

SEQ ID NO: 1241722 - RNA, 21 nt, Human
aucacagcucacugcagcauu

SEQ ID NO: 1241723 - RNA, 20 nt, Human
auuucuuuuucuuuuucuua

SEQ ID NO: 1241724 - RNA, 24 nt, Human
cagagcagcuggaauuacaggcac

SEQ ID NO: 1241725 - RNA, 23 nt, Human
ccacuuuuuuuuucuuuugcuua

SEQ ID NO: 1241726 - RNA, 21 nt, Human
cccgggcuuaagacaauccuc

SEQ ID NO: 1241727 - RNA, 21 nt, Human
cuuaagacaauccucccaccu

SEQ ID NO: 1241728 - RNA, 23 nt, Human
cuugaacuugaccuuaguuggau

SEQ ID NO: 1241729 - RNA, 27 nt, Human
gagcagcuggaauuacaggcacaaguu

SEQ ID NO: 1241730 - RNA, 18 nt, Human
gcuggcagugacagccug

SEQ ID NO: 1241731 - RNA, 21 nt, Human
gcugguuuuuaauauucagua

SEQ ID NO: 1241732 - RNA, 22 nt, Human
uacaggcacaaguuaccaugcc

SEQ ID NO: 1241733 - RNA, 24 nt, Human
ucaaaggaagcauuagucaggucc

SEQ ID NO: 1241734 - RNA, 24 nt, Human
ucacugcagcauugaagucccggg

SEQ ID NO: 1241735 - RNA, 18 nt, Human
uggaaugcaagggugaaa

SEQ ID NO: 1241736 - RNA, 20 nt, Human
uggaauuacaggcacaaguu

SEQ ID NO: 1241737 - RNA, 22 nt, Human
uggaauuacaggcacaaguuac

SEQ ID NO: 1241738 - RNA, 24 nt, Human
uggaauuacaggcacaaguuacca

SEQ ID NO: 1241739 - RNA, 25 nt, Human
uucaguaucugguccguauuuaaag

SEQ ID NO: 1241740 - RNA, 27 nt, Human
uucuaaauacuaucucauauuucccaa

SEQ ID NO: 1241741 - RNA, 24 nt, Human
uucuucuuuucagaaugugcuggu

SEQ ID NO: 1241742 - RNA, 20 nt, Human
uuucuuuuucuuagagaugg

SEQ ID NO: 1241743 - RNA, 19 nt, Human
agaagcuuucccacgcccc

SEQ ID NO: 1241744 - RNA, 25 nt, Human
agacaagaaagagggugcaggccgg

SEQ ID NO: 1241745 - RNA, 23 nt, Human
agagacaagaaagagggugcagg

SEQ ID NO: 1241746 - RNA, 18 nt, Human
aggaaagagaauauccau

SEQ ID NO: 1241747 - RNA, 24 nt, Human
aggccagaggagccaggggagccc

SEQ ID NO: 1241748 - RNA, 22 nt, Human
aggcugaacacaacaaagagga

SEQ ID NO: 1241749 - RNA, 25 nt, Human
aggcugaacacaacaaagaggacga

SEQ ID NO: 1241750 - RNA, 18 nt, Human
agguucuccaguucuuuc

SEQ ID NO: 1241751 - RNA, 19 nt, Human
caggcugaacacaacaaag

SEQ ID NO: 1241752 - RNA, 23 nt, Human
caggcugaacacaacaaagagga

SEQ ID NO: 1241753 - RNA, 24 nt, Human
ccccacagcugcagacccagugcu

SEQ ID NO: 1241754 - RNA, 21 nt, Human
cccccacguggccggugguuc

SEQ ID NO: 1241755 - RNA, 19 nt, Human
ccgcccagcucauggagcc

SEQ ID NO: 1241756 - RNA, 20 nt, Human
ccugagagacaagaaagagg

SEQ ID NO: 1241757 - RNA, 20 nt, Human
ccugggcggacuuggcgugg

SEQ ID NO: 1241758 - RNA, 20 nt, Human
ccuguccccacagcugcaga

SEQ ID NO: 1241759 - RNA, 24 nt, Human
ccugugugcuucucuuucacuggu

SEQ ID NO: 1241760 - RNA, 21 nt, Human
cgacaggaaaguguagaucuc

SEQ ID NO: 1241761 - RNA, 20 nt, Human
cgauccugagccauuccccc

SEQ ID NO: 1241762 - RNA, 21 nt, Human
cugcacugcuguccucaggca

SEQ ID NO: 1241763 - RNA, 21 nt, Human
cugguuuguacacuggcccug

SEQ ID NO: 1241764 - RNA, 22 nt, Human
cugguuuguacacuggcccugg

SEQ ID NO: 1241765 - RNA, 20 nt, Human
cuucuauucucgcuguccuc

SEQ ID NO: 1241766 - RNA, 20 nt, Human
cuuggcguggaaggugaugg

SEQ ID NO: 1241767 - RNA, 18 nt, Human
gaaauggaugaucugggg

SEQ ID NO: 1241768 - RNA, 22 nt, Human
gaagcuuucccacgccccccac

SEQ ID NO: 1241769 - RNA, 26 nt, Human
gaagcuuucccacgccccccacgugg

SEQ ID NO: 1241770 - RNA, 22 nt, Human
gaauggggcuggggcacagcuc

SEQ ID NO: 1241771 - RNA, 27 nt, Human
ggugaugggagcugcccucccuagaga

SEQ ID NO: 1241772 - RNA, 24 nt, Human
guaauaaccuuuuucugguuuccu

SEQ ID NO: 1241773 - RNA, 22 nt, Human
uaaucaggaucaccaggcugaa

SEQ ID NO: 1241774 - RNA, 19 nt, Human
uagagagcuucuucaggca

SEQ ID NO: 1241775 - RNA, 22 nt, Human
uccugagccauucccccacuuc

SEQ ID NO: 1241776 - RNA, 21 nt, Human
ucucagucuccuguccccaca

SEQ ID NO: 1241777 - RNA, 19 nt, Human
ucuguaaucuuucaaagug

SEQ ID NO: 1241778 - RNA, 26 nt, Human
ucuguaccaauaacacuguccagagg

SEQ ID NO: 1241779 - RNA, 20 nt, Human
ugagagacaagaaagagggu

SEQ ID NO: 1241780 - RNA, 18 nt, Human
ugaucuggggaauggggc

SEQ ID NO: 1241781 - RNA, 21 nt, Human
ugcguaauaaccuuuuucugg

SEQ ID NO: 1241782 - RNA, 18 nt, Human
uggaugaucuggggaaug

SEQ ID NO: 1241783 - RNA, 19 nt, Human
uggcccugggcggacuugg

SEQ ID NO: 1241784 - RNA, 18 nt, Human
uggggaauggggcugggg

SEQ ID NO: 1241785 - RNA, 19 nt, Human
uggggcuggggcacagcuc

SEQ ID NO: 1241786 - RNA, 19 nt, Human
ugugcuucucuuucacugg

SEQ ID NO: 1241787 - RNA, 25 nt, Human
uuuccgauccugagccauuccccca

SEQ ID NO: 1241788 - RNA, 19 nt, Human
caagagagaacugauugug

SEQ ID NO: 1241789 - RNA, 18 nt, Human
cacucugugccuaaagcu

SEQ ID NO: 1241790 - RNA, 22 nt, Human
ugcuggcagcuuguccuuccca

SEQ ID NO: 1241791 - RNA, 25 nt, Human
uguugagcugaggcucguagcagug

SEQ ID NO: 1241792 - RNA, 19 nt, Human
uuaaauugcuuagcgcuag

SEQ ID NO: 1241793 - RNA, 22 nt, Human
uugcuggcagcuuguccuuccc

SEQ ID NO: 1241794 - RNA, 22 nt, Human
uuuguuaaauugcuuagcgcua

SEQ ID NO: 1241795 - RNA, 24 nt, Human
aaacaaaaaagguauguuuucuag

SEQ ID NO: 1241796 - RNA, 19 nt, Human
aaacaaacaaaaaagguau

SEQ ID NO: 1241797 - RNA, 19 nt, Human
aaacaacuggcaagcaaac

SEQ ID NO: 1241798 - RNA, 21 nt, Human
aaaccucauugaaucaauaag

SEQ ID NO: 1241799 - RNA, 19 nt, Human
aaagaaaccaaugaucuca

SEQ ID NO: 1241800 - RNA, 21 nt, Human
aaagaaaccaaugaucucagg

SEQ ID NO: 1241801 - RNA, 19 nt, Human
aaccagcugcuuccucuuc

SEQ ID NO: 1241802 - RNA, 22 nt, Human
aacuuaucaaaagcauucaucu

SEQ ID NO: 1241803 - RNA, 23 nt, Human
aagaaacaaaaauaacuuuuccc

SEQ ID NO: 1241804 - RNA, 18 nt, Human
aagaaaccaaugaucuca

SEQ ID NO: 1241805 - RNA, 18 nt, Human
aagaaauccuguccaacg

SEQ ID NO: 1241806 - RNA, 26 nt, Human
aagccaggagccaaggcuguaaagga

SEQ ID NO: 1241807 - RNA, 22 nt, Human
aaggguguucuguuccaaaauc

SEQ ID NO: 1241808 - RNA, 21 nt, Human
aagguagaaguuggaaauuuu

SEQ ID NO: 1241809 - RNA, 18 nt, Human
acaacacaagcaacauaa

SEQ ID NO: 1241810 - RNA, 24 nt, Human
acaacacaagcaacauaaauacaa

SEQ ID NO: 1241811 - RNA, 22 nt, Human
acacaacacuaagaaacaaaaa

SEQ ID NO: 1241812 - RNA, 21 nt, Human
acacuaagaaacaaaaauaac

SEQ ID NO: 1241813 - RNA, 22 nt, Human
acugacuaaauaagaaggcaaa

SEQ ID NO: 1241814 - RNA, 22 nt, Human
agaagcacucccaauaagaacc

SEQ ID NO: 1241815 - RNA, 22 nt, Human
agacagaagauacuagacaacc

SEQ ID NO: 1241816 - RNA, 25 nt, Human
agauacuagacaaccacugguuaaa

SEQ ID NO: 1241817 - RNA, 22 nt, Human
agauaugugcacaaacaacaua

SEQ ID NO: 1241818 - RNA, 21 nt, Human
agccacucucuccucccuggu

SEQ ID NO: 1241819 - RNA, 18 nt, Human
aggcaccuccuccugccc

SEQ ID NO: 1241820 - RNA, 20 nt, Human
auaaaaggacccauaccacc

SEQ ID NO: 1241821 - RNA, 20 nt, Human
auccccacaacacaacacua

SEQ ID NO: 1241822 - RNA, 19 nt, Human
caaaugaucauccauagaa

SEQ ID NO: 1241823 - RNA, 20 nt, Human
caacacaacacuaagaaaca

SEQ ID NO: 1241824 - RNA, 25 nt, Human
cacaacacaacacuaagaaacaaaa

SEQ ID NO: 1241825 - RNA, 22 nt, Human
caccuucaguacaagucaaagg

SEQ ID NO: 1241826 - RNA, 21 nt, Human
cagaagauacuagacaaccac

SEQ ID NO: 1241827 - RNA, 19 nt, Human
cagcugcuuccucuucaga

SEQ ID NO: 1241828 - RNA, 18 nt, Human
cagggcccgagccucccu

SEQ ID NO: 1241829 - RNA, 21 nt, Human
cauaaucccgagguagccagg

SEQ ID NO: 1241830 - RNA, 21 nt, Human
cauccccacaacacaacacua

SEQ ID NO: 1241831 - RNA, 18 nt, Human
ccaaugaaagauguaaaa

SEQ ID NO: 1241832 - RNA, 21 nt, Human
ccacaucaaauagcaaacacu

SEQ ID NO: 1241833 - RNA, 24 nt, Human
ccaccauguagauaugugcacaaa

SEQ ID NO: 1241834 - RNA, 18 nt, Human
ccagcaguggagugcugu

SEQ ID NO: 1241835 - RNA, 20 nt, Human
ccaucaugccacaccuggau

SEQ ID NO: 1241836 - RNA, 20 nt, Human
ccauuauuuggaagaugaaa

SEQ ID NO: 1241837 - RNA, 28 nt, Human
cccagugacaagcucauauuuccaauaa

SEQ ID NO: 1241838 - RNA, 21 nt, Human
ccccuuuguaguauuguacaa

SEQ ID NO: 1241839 - RNA, 19 nt, Human
ccuccugccccaucaugcc

SEQ ID NO: 1241840 - RNA, 19 nt, Human
ccucuaggcaccuccuccu

SEQ ID NO: 1241841 - RNA, 19 nt, Human
ccuguuaaacaaagaacag

SEQ ID NO: 1241842 - RNA, 21 nt, Human
ccuuccauuccuacaauaguc

SEQ ID NO: 1241843 - RNA, 22 nt, Human
cuccucccugguaccccuuugu

SEQ ID NO: 1241844 - RNA, 22 nt, Human
cugcaagacucuggauuuuccu

SEQ ID NO: 1241845 - RNA, 22 nt, Human
cugcuguauagaauccaauccc

SEQ ID NO: 1241846 - RNA, 18 nt, Human
cuuaacugggaacucuga

SEQ ID NO: 1241847 - RNA, 18 nt, Human
cuucaagaaauccugucc

SEQ ID NO: 1241848 - RNA, 21 nt, Human
cuuguaaaaaccaauuguugg

SEQ ID NO: 1241849 - RNA, 21 nt, Human
gagaaaagguucuguauggug

SEQ ID NO: 1241850 - RNA, 20 nt, Human
gcuggcagugucagggcccg

SEQ ID NO: 1241851 - RNA, 22 nt, Human
gcuguaaaggagcugacaugga

SEQ ID NO: 1241852 - RNA, 21 nt, Human
ggccuuuggaguaaacaaaau

SEQ ID NO: 1241853 - RNA, 22 nt, Human
gggaaaagcauauugaauaaua

SEQ ID NO: 1241854 - RNA, 21 nt, Human
gggaacucugaccaugagccc

SEQ ID NO: 1241855 - RNA, 22 nt, Human
gguaaaagaauuuccaaaacua

SEQ ID NO: 1241856 - RNA, 24 nt, Human
gguggccaaugaaagauguaaaac

SEQ ID NO: 1241857 - RNA, 23 nt, Human
gucaucugcccaaggguagauuc

SEQ ID NO: 1241858 - RNA, 18 nt, Human
gugggagauaguaguagg

SEQ ID NO: 1241859 - RNA, 24 nt, Human
uaaaaaaaggcccuccaggugaug

SEQ ID NO: 1241860 - RNA, 18 nt, Human
uaaaacaacuggcaagca

SEQ ID NO: 1241861 - RNA, 20 nt, Human
uaaaggagcugacauggaaa

SEQ ID NO: 1241862 - RNA, 18 nt, Human
uaaaggguguucuguucc

SEQ ID NO: 1241863 - RNA, 22 nt, Human
uaaauaugaccaaacugacuaa

SEQ ID NO: 1241864 - RNA, 24 nt, Human
uaagaaaaaacauaaucuuuuaca

SEQ ID NO: 1241865 - RNA, 19 nt, Human
uaagaaccagaugaaagaa

SEQ ID NO: 1241866 - RNA, 21 nt, Human
uaagcagaagucuuuagagaa

SEQ ID NO: 1241867 - RNA, 22 nt, Human
uacaaagacaagaagcuuagau

SEQ ID NO: 1241868 - RNA, 19 nt, Human
uacaacacaagcaacauaa

SEQ ID NO: 1241869 - RNA, 21 nt, Human
uacaacacaagcaacauaaau

SEQ ID NO: 1241870 - RNA, 26 nt, Human
uacaacacaagcaacauaaauacaau

SEQ ID NO: 1241871 - RNA, 18 nt, Human
uaccacccacuggcuuua

SEQ ID NO: 1241872 - RNA, 21 nt, Human
uagaauuuucauuuccaccuc

SEQ ID NO: 1241873 - RNA, 18 nt, Human
uaguaguaggggaacugu

SEQ ID NO: 1241874 - RNA, 22 nt, Human
uauaaagaaaccaaugaucuca

SEQ ID NO: 1241875 - RNA, 19 nt, Human
uauaaggaauaaaaggacc

SEQ ID NO: 1241876 - RNA, 18 nt, Human
uauacauucauugucuuc

SEQ ID NO: 1241877 - RNA, 20 nt, Human
uaugugcacaaacaacauag

SEQ ID NO: 1241878 - RNA, 24 nt, Human
uauuuggaagaugaaauaaugaau

SEQ ID NO: 1241879 - RNA, 19 nt, Human
ucaaagcauaguucccaaa

SEQ ID NO: 1241880 - RNA, 19 nt, Human
ucaaagggucaacaugaua

SEQ ID NO: 1241881 - RNA, 18 nt, Human
ucccauccccacaacaca

SEQ ID NO: 1241882 - RNA, 19 nt, Human
uccccacaacacaacacua

SEQ ID NO: 1241883 - RNA, 25 nt, Human
ucccgagguagccagggaugcucuu

SEQ ID NO: 1241884 - RNA, 27 nt, Human
ucuacaacacaagcaacauaaauacaa

SEQ ID NO: 1241885 - RNA, 24 nt, Human
ucucaaagcauaguucccaaaaca

SEQ ID NO: 1241886 - RNA, 19 nt, Human
ucugaccaugagcccagca

SEQ ID NO: 1241887 - RNA, 21 nt, Human
ugaagugaaacccaacuuauc

SEQ ID NO: 1241888 - RNA, 24 nt, Human
ugaaugggguugcaaggaugaauu

SEQ ID NO: 1241889 - RNA, 25 nt, Human
ugacaagcucauauuuccaauaaaa

SEQ ID NO: 1241890 - RNA, 23 nt, Human
ugauuuacuuaacugggaacucu

SEQ ID NO: 1241891 - RNA, 21 nt, Human
ugcacaaacaacauauuuacu

SEQ ID NO: 1241892 - RNA, 24 nt, Human
uggaaaucuaaaggguguucuguu

SEQ ID NO: 1241893 - RNA, 20 nt, Human
uggcaagcaaacaacuauuc

SEQ ID NO: 1241894 - RNA, 24 nt, Human
uguaaaacaacuggcaagcaaaca

SEQ ID NO: 1241895 - RNA, 24 nt, Human
uguaaaggagcugacauggaaaca

SEQ ID NO: 1241896 - RNA, 20 nt, Human
uguacuaaaguuugagaacc

SEQ ID NO: 1241897 - RNA, 18 nt, Human
uguagauguuauggcaca

SEQ ID NO: 1241898 - RNA, 21 nt, Human
uguauagaauccaaucccaag

SEQ ID NO: 1241899 - RNA, 19 nt, Human
ugucagggcccgagccucc

SEQ ID NO: 1241900 - RNA, 19 nt, Human
uguucuaaagacagaagau

SEQ ID NO: 1241901 - RNA, 21 nt, Human
uguuuuggaaaucuaaagggu

SEQ ID NO: 1241902 - RNA, 21 nt, Human
uuaaaacgacauggauggaag

SEQ ID NO: 1241903 - RNA, 19 nt, Human
uuaaagguagaaguuggaa

SEQ ID NO: 1241904 - RNA, 18 nt, Human
uucaaggcagugguucuc

SEQ ID NO: 1241905 - RNA, 21 nt, Human
uucacuuuuauauuuuuccca

SEQ ID NO: 1241906 - RNA, 22 nt, Human
uucaucuuuguucagcuuugcc

SEQ ID NO: 1241907 - RNA, 20 nt, Human
uuccaauaaaaagugcucuu

SEQ ID NO: 1241908 - RNA, 19 nt, Human
uuccuuccauuccuacaau

SEQ ID NO: 1241909 - RNA, 21 nt, Human
uuguuggugguugaaaagggu

SEQ ID NO: 1241910 - RNA, 23 nt, Human
uuuagaauuuucauuuccaccuc

SEQ ID NO: 1241911 - RNA, 20 nt, Human
uuugcaaauuuccgugaagc

SEQ ID NO: 1241912 - RNA, 20 nt, Human
ucucucguggguaaagucac

SEQ ID NO: 1241913 - RNA, 22 nt, Human
uuuaaaaaucucucucgugggu

SEQ ID NO: 1241914 - RNA, 23 nt, Human
aaaacagcauaagagcuaugauc

SEQ ID NO: 1241915 - RNA, 20 nt, Human
acacgaccugcauguacaca

SEQ ID NO: 1241916 - RNA, 24 nt, Human
accagccacacgaccugcauguac

SEQ ID NO: 1241917 - RNA, 24 nt, Human
augcauuccaugucaauaccauca

SEQ ID NO: 1241918 - RNA, 22 nt, Human
caacccaucucuucgcuggccu

SEQ ID NO: 1241919 - RNA, 21 nt, Human
cauuccaugucaauaccauca

SEQ ID NO: 1241920 - RNA, 22 nt, Human
ccacaaguagaccagccacacg

SEQ ID NO: 1241921 - RNA, 22 nt, Human
ccacauccuuuugcucugacuc

SEQ ID NO: 1241922 - RNA, 22 nt, Human
ccugugccacagaugcauucca

SEQ ID NO: 1241923 - RNA, 22 nt, Human
cgcuggccugugccacagaugc

SEQ ID NO: 1241924 - RNA, 20 nt, Human
cuuuugcucugacucgaaga

SEQ ID NO: 1241925 - RNA, 20 nt, Human
gaagaggaagccaacccauc

SEQ ID NO: 1241926 - RNA, 18 nt, Human
ugagcaggaaaacagcau

SEQ ID NO: 1241927 - RNA, 23 nt, Human
uucugaggcugggaucgcccuuc

SEQ ID NO: 1241928 - RNA, 25 nt, Human
aggcacaggggguccccgggcgggg

SEQ ID NO: 1241929 - RNA, 25 nt, Human
aggggcucccccgcagcccgggagg

SEQ ID NO: 1241930 - RNA, 21 nt, Human
cacccggggccgaaggcagcu

SEQ ID NO: 1241931 - RNA, 22 nt, Human
cccgcagcccgggaggggaggc

SEQ ID NO: 1241932 - RNA, 24 nt, Human
cccgcagcccgggaggggaggcac

SEQ ID NO: 1241933 - RNA, 19 nt, Human
ccgggaggggaggcacagg

SEQ ID NO: 1241934 - RNA, 18 nt, Human
cgcagcccgggaggggag

SEQ ID NO: 1241935 - RNA, 20 nt, Human
gaaacggaggagugggagug

SEQ ID NO: 1241936 - RNA, 20 nt, Human
gaggcacaggggguccccgg

SEQ ID NO: 1241937 - RNA, 23 nt, Human
gcccgggaggggaggcacagggg

SEQ ID NO: 1241938 - RNA, 24 nt, Human
ggggaggcacaggggguccccggg

SEQ ID NO: 1241939 - RNA, 19 nt, Human
uccccgggcgggggagacc

SEQ ID NO: 1241940 - RNA, 24 nt, Human
aaaaacuaagaagaaaaugccacu

SEQ ID NO: 1241941 - RNA, 21 nt, Human
aaacagaaacgccaucuccaa

SEQ ID NO: 1241942 - RNA, 18 nt, Human
aaacgccaucuccaaaag

SEQ ID NO: 1241943 - RNA, 20 nt, Human
aacuugucucuuuaauacca

SEQ ID NO: 1241944 - RNA, 20 nt, Human
aagaaaugaaaaacuaagaa

SEQ ID NO: 1241945 - RNA, 23 nt, Human
accaggagauugaggcugcagug

SEQ ID NO: 1241946 - RNA, 18 nt, Human
acgcuacugcauuccagc

SEQ ID NO: 1241947 - RNA, 18 nt, Human
acugcauuccagccucaa

SEQ ID NO: 1241948 - RNA, 18 nt, Human
acugcauuccagccucaa

SEQ ID NO: 1241949 - RNA, 26 nt, Human
acugcauuccagccucaaaacagugg

SEQ ID NO: 1241950 - RNA, 20 nt, Human
acugcauuccagccucaaag

SEQ ID NO: 1241951 - RNA, 22 nt, Human
acugcauuccagccucaaagag

SEQ ID NO: 1241952 - RNA, 21 nt, Human
acugugauaaacuugucucuu

SEQ ID NO: 1241953 - RNA, 22 nt, Human
agaaaugaaaaacuaagaagaa

SEQ ID NO: 1241954 - RNA, 21 nt, Human
agaccaggagauugaggcugc

SEQ ID NO: 1241955 - RNA, 24 nt, Human
agagaucacgcuacugcauuccag

SEQ ID NO: 1241956 - RNA, 21 nt, Human
aggggaaaaaaaaauacugug

SEQ ID NO: 1241957 - RNA, 18 nt, Human
agguaaaccugaucagcu

SEQ ID NO: 1241958 - RNA, 23 nt, Human
aucacgcuacugcauuccagccu

SEQ ID NO: 1241959 - RNA, 18 nt, Human
caacaucguugguacagc

SEQ ID NO: 1241960 - RNA, 18 nt, Human
cacgccuguagucucagc

SEQ ID NO: 1241961 - RNA, 23 nt, Human
cacucuaacccaucagauagccc

SEQ ID NO: 1241962 - RNA, 21 nt, Human
cagcacuugcagccagggcgg

SEQ ID NO: 1241963 - RNA, 26 nt, Human
ccuggaggcuccuacaguggccuccg

SEQ ID NO: 1241964 - RNA, 20 nt, Human
ccuguagucucagcuaccug

SEQ ID NO: 1241965 - RNA, 22 nt, Human
cgccuguagucucagcuaccug

SEQ ID NO: 1241966 - RNA, 23 nt, Human
cgccuguagucucagcuaccuga

SEQ ID NO: 1241967 - RNA, 25 nt, Human
cuaacccaucagauagcccuucuca

SEQ ID NO: 1241968 - RNA, 18 nt, Human
cuacugcauuccagccuc

SEQ ID NO: 1241969 - RNA, 19 nt, Human
cucaaagagaacucccugg

SEQ ID NO: 1241970 - RNA, 22 nt, Human
gaaaaauuauuuauuucugcuc

SEQ ID NO: 1241971 - RNA, 20 nt, Human
gaccaggagauugaggcugc

SEQ ID NO: 1241972 - RNA, 18 nt, Human
gagcaaauccaguaucca

SEQ ID NO: 1241973 - RNA, 24 nt, Human
gauggugcacgccuguagucucag

SEQ ID NO: 1241974 - RNA, 22 nt, Human
gcugcucuucauucuuuuccac

SEQ ID NO: 1241975 - RNA, 18 nt, Human
gcuucaauacacuuccug

SEQ ID NO: 1241976 - RNA, 25 nt, Human
ggggguuguaaaaaauaaucacuuu

SEQ ID NO: 1241977 - RNA, 22 nt, Human
ggugugauggugcacgccugua

SEQ ID NO: 1241978 - RNA, 19 nt, Human
uaaaaaauaaucacuuuau

SEQ ID NO: 1241979 - RNA, 23 nt, Human
uaguccaagcuucaauacacuuc

SEQ ID NO: 1241980 - RNA, 22 nt, Human
uccagaguucucagcuuaugga

SEQ ID NO: 1241981 - RNA, 22 nt, Human
ucugaaauaaucuaccgucaca

SEQ ID NO: 1241982 - RNA, 24 nt, Human
ugauggugcacgccuguagucuca

SEQ ID NO: 1241983 - RNA, 23 nt, Human
uggacagccuuuaaacuucauug

SEQ ID NO: 1241984 - RNA, 22 nt, Human
ugggucagcaggggaaaaaaaa

SEQ ID NO: 1241985 - RNA, 18 nt, Human
uggugcacgccuguaguc

SEQ ID NO: 1241986 - RNA, 21 nt, Human
uggugcacgccuguagucuca

SEQ ID NO: 1241987 - RNA, 25 nt, Human
uguccagaguucucagcuuauggaa

SEQ ID NO: 1241988 - RNA, 18 nt, Human
uuaaaggcaaagcaccau

SEQ ID NO: 1241989 - RNA, 24 nt, Human
uuaauaccaagaaggaauucuagu

SEQ ID NO: 1241990 - RNA, 23 nt, Human
uuauuucugcuccuuucauacau

SEQ ID NO: 1241991 - RNA, 21 nt, Human
uucauauuagaggauuggaca

SEQ ID NO: 1241992 - RNA, 24 nt, Human
uuucugcuccuuucauacaucuua

SEQ ID NO: 1241993 - RNA, 23 nt, Human
uuucuuuuacugcugcucuucau

SEQ ID NO: 1241994 - RNA, 24 nt, Human
uuuuuuuuuuuuuuuuuuaauuag

SEQ ID NO: 1241995 - RNA, 23 nt, Human
aaaaaaaaaaaaagucucuaggg

SEQ ID NO: 1241996 - RNA, 19 nt, Human
aaacagacuguaaaccucu

SEQ ID NO: 1241997 - RNA, 18 nt, Human
aaagaacuugaucaaaau

SEQ ID NO: 1241998 - RNA, 22 nt, Human
aagaaaagcaaacaaaaaacaa

SEQ ID NO: 1241999 - RNA, 18 nt, Human
aagaagcauggcuaggag

SEQ ID NO: 1242000 - RNA, 23 nt, Human
aagaguucgagaccauccuggcc

SEQ ID NO: 1242001 - RNA, 22 nt, Human
aagcaaacaaaaaacaaacuca

SEQ ID NO: 1242002 - RNA, 21 nt, Human
aauaucucucagcacaauuuc

SEQ ID NO: 1242003 - RNA, 19 nt, Human
aaugauaaucuauuaugug

SEQ ID NO: 1242004 - RNA, 22 nt, Human
acaaccaucaccacaaucaauu

SEQ ID NO: 1242005 - RNA, 22 nt, Human
acaauuagaucaaacauacauu

SEQ ID NO: 1242006 - RNA, 24 nt, Human
acagagcaagaauccaucucaaaa

SEQ ID NO: 1242007 - RNA, 21 nt, Human
acagaguuuuaaaaugcaaac

SEQ ID NO: 1242008 - RNA, 18 nt, Human
acauggugaaaccccauc

SEQ ID NO: 1242009 - RNA, 19 nt, Human
acauggugaaaccccaucu

SEQ ID NO: 1242010 - RNA, 20 nt, Human
acauggugaaaccccaucuc

SEQ ID NO: 1242011 - RNA, 22 nt, Human
acauggugaaaccccaucucua

SEQ ID NO: 1242012 - RNA, 24 nt, Human
acccaggagguggagguuguagug

SEQ ID NO: 1242013 - RNA, 25 nt, Human
accccauaugccuguagaauuucau

SEQ ID NO: 1242014 - RNA, 24 nt, Human
accccaucucuacuaaaaauacaa

SEQ ID NO: 1242015 - RNA, 23 nt, Human
acugcacuccagccuggugacag

SEQ ID NO: 1242016 - RNA, 25 nt, Human
acugcacuccagccuggugacagag

SEQ ID NO: 1242017 - RNA, 24 nt, Human
acuggaaaccccaaauuacuguag

SEQ ID NO: 1242018 - RNA, 20 nt, Human
acuuuuauuccauucaucua

SEQ ID NO: 1242019 - RNA, 21 nt, Human
agaaaagcaaacaaaaaacaa

SEQ ID NO: 1242020 - RNA, 20 nt, Human
agaaggugaaggggaagcag

SEQ ID NO: 1242021 - RNA, 18 nt, Human
agacugggguuggggacc

SEQ ID NO: 1242022 - RNA, 21 nt, Human
agagacaggagccacaaggga

SEQ ID NO: 1242023 - RNA, 24 nt, Human
agagaugccuccacugcacuccag

SEQ ID NO: 1242024 - RNA, 18 nt, Human
agaggaggaagcugggga

SEQ ID NO: 1242025 - RNA, 18 nt, Human
agagggaggggaugaaca

SEQ ID NO: 1242026 - RNA, 18 nt, Human
agcauggccauucggcaa

SEQ ID NO: 1242027 - RNA, 24 nt, Human
agccuggugacagagcaagaaucc

SEQ ID NO: 1242028 - RNA, 18 nt, Human
agcuggagcccaggaccc

SEQ ID NO: 1242029 - RNA, 19 nt, Human
aggaagaggaggaagcugg

SEQ ID NO: 1242030 - RNA, 27 nt, Human
aggaagcuggggaucgaaaagagggag

SEQ ID NO: 1242031 - RNA, 20 nt, Human
aggcaggcggaucacaaggu

SEQ ID NO: 1242032 - RNA, 24 nt, Human
aggcaggcggaucacaaggucaag

SEQ ID NO: 1242033 - RNA, 25 nt, Human
aggcauuagauuaucauaaggagga

SEQ ID NO: 1242034 - RNA, 24 nt, Human
aggcggaucacaaggucaagaguu

SEQ ID NO: 1242035 - RNA, 18 nt, Human
aggcugggugugguggcu

SEQ ID NO: 1242036 - RNA, 23 nt, Human
aggucucuaggcuggguguggug

SEQ ID NO: 1242037 - RNA, 24 nt, Human
agguggagguuguagugggcagag

SEQ ID NO: 1242038 - RNA, 24 nt, Human
agucacuccccauugccucccaga

SEQ ID NO: 1242039 - RNA, 18 nt, Human
agugggcagagaugccuc

SEQ ID NO: 1242040 - RNA, 18 nt, Human
aucccaugccagacacuc

SEQ ID NO: 1242041 - RNA, 19 nt, Human
aucucaaaaaaaaaaaaag

SEQ ID NO: 1242042 - RNA, 24 nt, Human
augccuccacugcacuccagccug

SEQ ID NO: 1242043 - RNA, 19 nt, Human
auggaagacaauuuuucca

SEQ ID NO: 1242044 - RNA, 24 nt, Human
auuagagucuuugaucaauuuuaa

SEQ ID NO: 1242045 - RNA, 24 nt, Human
auucaagaaaagcaaacaaaaaac

SEQ ID NO: 1242046 - RNA, 24 nt, Human
auucacaguuauacaaccaucacc

SEQ ID NO: 1242047 - RNA, 21 nt, Human
auuuucuuucuuucuguuucu

SEQ ID NO: 1242048 - RNA, 24 nt, Human
caaaaaugugagcuaagauuuuga

SEQ ID NO: 1242049 - RNA, 24 nt, Human
caaaaguccacaguccaaagucuc

SEQ ID NO: 1242050 - RNA, 25 nt, Human
caacucuaguuagagaagcagagau

SEQ ID NO: 1242051 - RNA, 24 nt, Human
caagaaaagcaaacaaaaaacaaa

SEQ ID NO: 1242052 - RNA, 23 nt, Human
cacaaggcaacaggaaggagucu

SEQ ID NO: 1242053 - RNA, 22 nt, Human
cacaauauaugguuuuugugag

SEQ ID NO: 1242054 - RNA, 20 nt, Human
caccucagaucaucaggcau

SEQ ID NO: 1242055 - RNA, 20 nt, Human
caccucagaucaucaggcau

SEQ ID NO: 1242056 - RNA, 20 nt, Human
caccuccugcugugcggcug

SEQ ID NO: 1242057 - RNA, 20 nt, Human
caccuguaauccagcuacuu

SEQ ID NO: 1242058 - RNA, 22 nt, Human
caccuguaauccagcuacuugg

SEQ ID NO: 1242059 - RNA, 23 nt, Human
caccuguaauccagcuacuuggg

SEQ ID NO: 1242060 - RNA, 26 nt, Human
caccuguaauccagcuacuugggagg

SEQ ID NO: 1242061 - RNA, 22 nt, Human
cacuccagccuggugacagagc

SEQ ID NO: 1242062 - RNA, 22 nt, Human
cacuccccauugccucccagaa

SEQ ID NO: 1242063 - RNA, 18 nt, Human
cacugaaucuccuaggag

SEQ ID NO: 1242064 - RNA, 20 nt, Human
cacugauuuuuguauaucgu

SEQ ID NO: 1242065 - RNA, 18 nt, Human
cacugcacuccagccugg

SEQ ID NO: 1242066 - RNA, 18 nt, Human
cacugcacuccagccugg

SEQ ID NO: 1242067 - RNA, 22 nt, Human
cacugcacuccagccuggugac

SEQ ID NO: 1242068 - RNA, 23 nt, Human
cacugcacuccagccuggugaca

SEQ ID NO: 1242069 - RNA, 23 nt, Human
cacugcacuccagccuggugaca

SEQ ID NO: 1242070 - RNA, 19 nt, Human
cagaaauaauaagaggauc

SEQ ID NO: 1242071 - RNA, 27 nt, Human
cagaacaagguccagaacgaccuuguu

SEQ ID NO: 1242072 - RNA, 22 nt, Human
cagaaucuuccuggccaggccu

SEQ ID NO: 1242073 - RNA, 24 nt, Human
cagcacuuugggagaccgaggcag

SEQ ID NO: 1242074 - RNA, 25 nt, Human
cagcacuuugggagaccgaggcagg

SEQ ID NO: 1242075 - RNA, 19 nt, Human
cagcaggaggcgccccccu

SEQ ID NO: 1242076 - RNA, 20 nt, Human
cagcauuauaaaugagaaua

SEQ ID NO: 1242077 - RNA, 24 nt, Human
cagcuacuugggaggcugaggcag

SEQ ID NO: 1242078 - RNA, 21 nt, Human
cagcucaggacaguuccgcag

SEQ ID NO: 1242079 - RNA, 19 nt, Human
cagcuccugugcuccuacu

SEQ ID NO: 1242080 - RNA, 24 nt, Human
caggacaauuccucaaacccagga

SEQ ID NO: 1242081 - RNA, 21 nt, Human
caggacaguuccgcagaguga

SEQ ID NO: 1242082 - RNA, 29 nt, Human
caggagguggagguuguagugacaacggu

SEQ ID NO: 1242083 - RNA, 23 nt, Human
caguacuacauucauuuucagac

SEQ ID NO: 1242084 - RNA, 20 nt, Human
cagucucuuaguugugaaaa

SEQ ID NO: 1242085 - RNA, 25 nt, Human
cauucccaggaaaugaauuauuaaa

SEQ ID NO: 1242086 - RNA, 23 nt, Human
cauucggcaaauuucgacugcuc

SEQ ID NO: 1242087 - RNA, 21 nt, Human
cauuuuuguuccagaacaagg

SEQ ID NO: 1242088 - RNA, 27 nt, Human
cauuuuuuagaauaaaagaaucagaaa

SEQ ID NO: 1242089 - RNA, 19 nt, Human
ccacucaccuccugcugug

SEQ ID NO: 1242090 - RNA, 19 nt, Human
ccacugcacuccagccugg

SEQ ID NO: 1242091 - RNA, 19 nt, Human
ccacugcacuccagccugg

SEQ ID NO: 1242092 - RNA, 20 nt, Human
ccacugcacuccagccuggu

SEQ ID NO: 1242093 - RNA, 23 nt, Human
ccacugcacuccagccuggugac

SEQ ID NO: 1242094 - RNA, 24 nt, Human
ccauacaauuaaaccauuuaaagu

SEQ ID NO: 1242095 - RNA, 18 nt, Human
cccaggagguggagguug

SEQ ID NO: 1242096 - RNA, 22 nt, Human
ccccagaccuugccacugcagu

SEQ ID NO: 1242097 - RNA, 19 nt, Human
ccccccggcgaagagcugg

SEQ ID NO: 1242098 - RNA, 22 nt, Human
ccuaagaauaauaucucucagc

SEQ ID NO: 1242099 - RNA, 22 nt, Human
ccucccagaaucuuccuggcca

SEQ ID NO: 1242100 - RNA, 18 nt, Human
ccucccagcuucuguuaa

SEQ ID NO: 1242101 - RNA, 23 nt, Human
ccugaaccuuugcuccugcccaa

SEQ ID NO: 1242102 - RNA, 22 nt, Human
ccuggccuacauggugaaaccc

SEQ ID NO: 1242103 - RNA, 24 nt, Human
ccuggccuacauggugaaacccca

SEQ ID NO: 1242104 - RNA, 18 nt, Human
ccuguaaucccagcacuu

SEQ ID NO: 1242105 - RNA, 22 nt, Human
ccuguaaucccagcacuuuggg

SEQ ID NO: 1242106 - RNA, 24 nt, Human
cgagaccauccuggccuacauggu

SEQ ID NO: 1242107 - RNA, 21 nt, Human
cggcugggcuccuaauaggcc

SEQ ID NO: 1242108 - RNA, 21 nt, Human
cuaagaauaauaucucucagc

SEQ ID NO: 1242109 - RNA, 21 nt, Human
cuaaugccacugcugaucuca

SEQ ID NO: 1242110 - RNA, 19 nt, Human
cucaaaaaaaaaaaaaguc

SEQ ID NO: 1242111 - RNA, 21 nt, Human
cucaaaaguccacaguccaaa

SEQ ID NO: 1242112 - RNA, 25 nt, Human
cuccacugcacuccagccuggugac

SEQ ID NO: 1242113 - RNA, 24 nt, Human
cucuaggcugggugugguggcuua

SEQ ID NO: 1242114 - RNA, 24 nt, Human
cucuuugguucuuaguauauucac

SEQ ID NO: 1242115 - RNA, 18 nt, Human
cugaaccuuugcuccugc

SEQ ID NO: 1242116 - RNA, 22 nt, Human
cugccuucauggaagacaauuu

SEQ ID NO: 1242117 - RNA, 22 nt, Human
cugguuguaacuggaaacccca

SEQ ID NO: 1242118 - RNA, 21 nt, Human
cuguggcuaggaaucaaaggc

SEQ ID NO: 1242119 - RNA, 19 nt, Human
cuuccuggccaggccuggc

SEQ ID NO: 1242120 - RNA, 21 nt, Human
cuugaagcuucuuucaagccc

SEQ ID NO: 1242121 - RNA, 25 nt, Human
gaaaagcaaacaaaaaacaaacuca

SEQ ID NO: 1242122 - RNA, 21 nt, Human
gaauaucaauaaaacccuuaa

SEQ ID NO: 1242123 - RNA, 21 nt, Human
gaauauucuuccuccauuaaa

SEQ ID NO: 1242124 - RNA, 21 nt, Human
gagagacaggagccacaaggg

SEQ ID NO: 1242125 - RNA, 21 nt, Human
gagcuagaaguccaacuucau

SEQ ID NO: 1242126 - RNA, 23 nt, Human
gaggcaggcggaucacaagguca

SEQ ID NO: 1242127 - RNA, 18 nt, Human
gagguggagguuguagug

SEQ ID NO: 1242128 - RNA, 21 nt, Human
gagguggagguuguagugggc

SEQ ID NO: 1242129 - RNA, 24 nt, Human
gaucacaaggucaagaguucgaga

SEQ ID NO: 1242130 - RNA, 20 nt, Human
gauucuguugcugauuuucc

SEQ ID NO: 1242131 - RNA, 23 nt, Human
gcacuccagccuggugacagagc

SEQ ID NO: 1242132 - RNA, 24 nt, Human
gcaucauuuguugaaaagaauauu

SEQ ID NO: 1242133 - RNA, 19 nt, Human
gcccaacauauuauuucug

SEQ ID NO: 1242134 - RNA, 22 nt, Human
gccuaacaacaggucacaaaga

SEQ ID NO: 1242135 - RNA, 24 nt, Human
gccuacauggugaaaccccaucuc

SEQ ID NO: 1242136 - RNA, 18 nt, Human
gcuggagcccaggacccg

SEQ ID NO: 1242137 - RNA, 21 nt, Human
gcuggagcccaggacccgcgu

SEQ ID NO: 1242138 - RNA, 22 nt, Human
ggagagacaggagccacaaggg

SEQ ID NO: 1242139 - RNA, 23 nt, Human
ggagaucugagagauacgugcuu

SEQ ID NO: 1242140 - RNA, 22 nt, Human
ggagguuguagugggcagagau

SEQ ID NO: 1242141 - RNA, 23 nt, Human
ggagguuguagugggcagagaug

SEQ ID NO: 1242142 - RNA, 20 nt, Human
ggagguuguagugggcaggc

SEQ ID NO: 1242143 - RNA, 22 nt, Human
ggccucucaauccccagaccuu

SEQ ID NO: 1242144 - RNA, 21 nt, Human
ggcgaagagcuggagcccagg

SEQ ID NO: 1242145 - RNA, 22 nt, Human
gggcaguggucgaugaccuuuu

SEQ ID NO: 1242146 - RNA, 24 nt, Human
gggugucguggcaugcaccuguaa

SEQ ID NO: 1242147 - RNA, 19 nt, Human
gguccuggacgugcugggu

SEQ ID NO: 1242148 - RNA, 22 nt, Human
ggucucuaggcuggguguggug

SEQ ID NO: 1242149 - RNA, 24 nt, Human
gguggagguuguagugggcagaga

SEQ ID NO: 1242150 - RNA, 24 nt, Human
gguggcuuaucccuguaaucccag

SEQ ID NO: 1242151 - RNA, 19 nt, Human
guauuguccuuugaagcac

SEQ ID NO: 1242152 - RNA, 21 nt, Human
gugugguggcuuaucccugua

SEQ ID NO: 1242153 - RNA, 22 nt, Human
uaaagcaguaaugccaagggac

SEQ ID NO: 1242154 - RNA, 25 nt, Human
uaaaguacacaacucuuugguucuu

SEQ ID NO: 1242155 - RNA, 18 nt, Human
uaagaaaucauugccuaa

SEQ ID NO: 1242156 - RNA, 20 nt, Human
uaagaauaauaucucucagc

SEQ ID NO: 1242157 - RNA, 23 nt, Human
uaaucuuucaaauacuauacaga

SEQ ID NO: 1242158 - RNA, 22 nt, Human
uaaugccacugcugaucucaca

SEQ ID NO: 1242159 - RNA, 24 nt, Human
uacaacucuaguuagagaagcaga

SEQ ID NO: 1242160 - RNA, 19 nt, Human
uacaauuagaucaaacaua

SEQ ID NO: 1242161 - RNA, 20 nt, Human
uacaauuagaucaaacauac

SEQ ID NO: 1242162 - RNA, 21 nt, Human
uacauagcaaaggcuaacauu

SEQ ID NO: 1242163 - RNA, 23 nt, Human
uacauggugaaaccccaucucua

SEQ ID NO: 1242164 - RNA, 20 nt, Human
uagaaaauaauuaagaccau

SEQ ID NO: 1242165 - RNA, 23 nt, Human
uagaguugguucaucaauuucug

SEQ ID NO: 1242166 - RNA, 23 nt, Human
uagaucccucgcaugcauaguuc

SEQ ID NO: 1242167 - RNA, 21 nt, Human
uagcaaaggcuaacauugaua

SEQ ID NO: 1242168 - RNA, 20 nt, Human
uagcugggugucguggcaug

SEQ ID NO: 1242169 - RNA, 18 nt, Human
uaggccacagacuggggu

SEQ ID NO: 1242170 - RNA, 24 nt, Human
uaguaaacagacuguaaaccuccc

SEQ ID NO: 1242171 - RNA, 24 nt, Human
uauaugaauaucaauaaaacccuu

SEQ ID NO: 1242172 - RNA, 24 nt, Human
uaucccuguaaucccagcacuuug

SEQ ID NO: 1242173 - RNA, 21 nt, Human
ucaaaaugauaguacaauuag

SEQ ID NO: 1242174 - RNA, 20 nt, Human
ucacaaggcaacaggaagga

SEQ ID NO: 1242175 - RNA, 24 nt, Human
ucacaaggucaagaguucgagacc

SEQ ID NO: 1242176 - RNA, 19 nt, Human
ucagcggcgcccgucccuc

SEQ ID NO: 1242177 - RNA, 24 nt, Human
ucaggaaacuuacaaucgcgcaga

SEQ ID NO: 1242178 - RNA, 23 nt, Human
ucaguccaugaacgugauauauc

SEQ ID NO: 1242179 - RNA, 24 nt, Human
ucauaaucuuaaaacauaaccacc

SEQ ID NO: 1242180 - RNA, 18 nt, Human
ucaucaauuucugcaaaa

SEQ ID NO: 1242181 - RNA, 21 nt, Human
ucauuuucagacaauaauauu

SEQ ID NO: 1242182 - RNA, 21 nt, Human
uccacaguccaaagucucauc

SEQ ID NO: 1242183 - RNA, 27 nt, Human
uccacaguccaaagucucaucugagac

SEQ ID NO: 1242184 - RNA, 23 nt, Human
uccacugcacuccagccugguga

SEQ ID NO: 1242185 - RNA, 22 nt, Human
uccaucucaaaaaaaaaaaaag

SEQ ID NO: 1242186 - RNA, 20 nt, Human
ucccauacaaauuuuagagu

SEQ ID NO: 1242187 - RNA, 18 nt, Human
ucccucgcaugcauaguu

SEQ ID NO: 1242188 - RNA, 19 nt, Human
ucccuguaaucccagcacu

SEQ ID NO: 1242189 - RNA, 22 nt, Human
ucccuguaaucccagcacuuug

SEQ ID NO: 1242190 - RNA, 23 nt, Human
ucccuguaaucccagcacuuugg

SEQ ID NO: 1242191 - RNA, 25 nt, Human
uccgcaucuuugucugugaaacuca

SEQ ID NO: 1242192 - RNA, 21 nt, Human
uccuuuugaaauuuccugaac

SEQ ID NO: 1242193 - RNA, 20 nt, Human
ucgcaugcauaguucccaau

SEQ ID NO: 1242194 - RNA, 28 nt, Human
ucuaauggcuaucuuguuucucgacaga

SEQ ID NO: 1242195 - RNA, 21 nt, Human
ucuaguuuuagcugugacauu

SEQ ID NO: 1242196 - RNA, 21 nt, Human
ucucuacuaaaaauacaaaaa

SEQ ID NO: 1242197 - RNA, 18 nt, Human
ucuugaugauuguagcuu

SEQ ID NO: 1242198 - RNA, 23 nt, Human
ucuuucuguuucucuucacuuuc

SEQ ID NO: 1242199 - RNA, 20 nt, Human
ugaaaaagguaaaucuaaua

SEQ ID NO: 1242200 - RNA, 23 nt, Human
ugaaaaagguaaaucuaauauca

SEQ ID NO: 1242201 - RNA, 21 nt, Human
ugaaaagaauauucuuccucc

SEQ ID NO: 1242202 - RNA, 19 nt, Human
ugaaaccccaucucuacua

SEQ ID NO: 1242203 - RNA, 19 nt, Human
ugaaacuguuucaccucag

SEQ ID NO: 1242204 - RNA, 21 nt, Human
ugaaccuuugcuccugcccaa

SEQ ID NO: 1242205 - RNA, 20 nt, Human
ugaaucuguagaucaauuug

SEQ ID NO: 1242206 - RNA, 23 nt, Human
ugagaaaaacuggcaccaugaug

SEQ ID NO: 1242207 - RNA, 21 nt, Human
ugagcuaagauuuugauaggg

SEQ ID NO: 1242208 - RNA, 24 nt, Human
ugaggcaggacaauuccucaaacc

SEQ ID NO: 1242209 - RNA, 25 nt, Human
ugaggcaggacaauuccucaaaccc

SEQ ID NO: 1242210 - RNA, 21 nt, Human
ugaggcagugauuuggugaac

SEQ ID NO: 1242211 - RNA, 22 nt, Human
ugauaguacaauuagaucaaac

SEQ ID NO: 1242212 - RNA, 19 nt, Human
ugauuugcaaauauuuucu

SEQ ID NO: 1242213 - RNA, 22 nt, Human
ugccagacacucuauauuugcu

SEQ ID NO: 1242214 - RNA, 18 nt, Human
ugccucagagaacagcug

SEQ ID NO: 1242215 - RNA, 20 nt, Human
ugccuccacugcacuccagc

SEQ ID NO: 1242216 - RNA, 22 nt, Human
ugcucuagaggauuacuccagc

SEQ ID NO: 1242217 - RNA, 21 nt, Human
uggaaagaaucaccagggaag

SEQ ID NO: 1242218 - RNA, 21 nt, Human
uggacagggugguggguggaa

SEQ ID NO: 1242219 - RNA, 24 nt, Human
uggacagucucuuaguugugaaaa

SEQ ID NO: 1242220 - RNA, 23 nt, Human
uggagagacaggagccacaaggg

SEQ ID NO: 1242221 - RNA, 18 nt, Human
uggccaggccuggcuagg

SEQ ID NO: 1242222 - RNA, 21 nt, Human
uggcuuaucccuguaauccca

SEQ ID NO: 1242223 - RNA, 22 nt, Human
uggcuuaucccuguaaucccag

SEQ ID NO: 1242224 - RNA, 24 nt, Human
uggcuuaucccuguaaucccagca

SEQ ID NO: 1242225 - RNA, 24 nt, Human
ugggagaccgaggcaggcggauca

SEQ ID NO: 1242226 - RNA, 18 nt, Human
ugggaggcugaggcagga

SEQ ID NO: 1242227 - RNA, 18 nt, Human
ugggaggcugaggcaggc

SEQ ID NO: 1242228 - RNA, 23 nt, Human
ugggcagagaugccuccacugca

SEQ ID NO: 1242229 - RNA, 21 nt, Human
ugggguuggggaccccugcuc

SEQ ID NO: 1242230 - RNA, 22 nt, Human
ugguaucucaaugcaacaguuu

SEQ ID NO: 1242231 - RNA, 19 nt, Human
ugguauguccugcaauucc

SEQ ID NO: 1242232 - RNA, 23 nt, Human
uggugacagagcaagaauccauc

SEQ ID NO: 1242233 - RNA, 24 nt, Human
ugguggcuuaucccuguaauccca

SEQ ID NO: 1242234 - RNA, 26 nt, Human
ugguuucauuugcuaaguaaaauuug

SEQ ID NO: 1242235 - RNA, 18 nt, Human
uguaaaauuuauuccugu

SEQ ID NO: 1242236 - RNA, 18 nt, Human
uguaacuggaaaccccaa

SEQ ID NO: 1242237 - RNA, 18 nt, Human
uguaauccagcuacuugg

SEQ ID NO: 1242238 - RNA, 22 nt, Human
ugugaaacucaggaguuagauu

SEQ ID NO: 1242239 - RNA, 20 nt, Human
uguguguuuggugucauauc

SEQ ID NO: 1242240 - RNA, 21 nt, Human
uguuuuauuauuuuggaugcu

SEQ ID NO: 1242241 - RNA, 22 nt, Human
uguuuuauuauuuuggaugcua

SEQ ID NO: 1242242 - RNA, 24 nt, Human
uuaaaacauaaccaccuugaagcu

SEQ ID NO: 1242243 - RNA, 27 nt, Human
uuaaagcaguaaugccaagggacuuac

SEQ ID NO: 1242244 - RNA, 18 nt, Human
uuaaucuaaaaaaaguac

SEQ ID NO: 1242245 - RNA, 22 nt, Human
uuacauagcaaaggcuaacauu

SEQ ID NO: 1242246 - RNA, 19 nt, Human
uuacuccagcuccugugcu

SEQ ID NO: 1242247 - RNA, 19 nt, Human
uuagaauaaaagaaucaga

SEQ ID NO: 1242248 - RNA, 26 nt, Human
uuagcagucacuccccauugccuccc

SEQ ID NO: 1242249 - RNA, 22 nt, Human
uuagcugggugucguggcaugc

SEQ ID NO: 1242250 - RNA, 24 nt, Human
uuaggucuguuaacauuucuuucc

SEQ ID NO: 1242251 - RNA, 21 nt, Human
uuaguuggucuuacaacuacu

SEQ ID NO: 1242252 - RNA, 20 nt, Human
uucaagaaaagcaaacaaaa

SEQ ID NO: 1242253 - RNA, 24 nt, Human
uucaagacuguauuuccauaaacc

SEQ ID NO: 1242254 - RNA, 25 nt, Human
uucacugaaucuccuaggagcucca

SEQ ID NO: 1242255 - RNA, 19 nt, Human
uucauauauugucuucuuc

SEQ ID NO: 1242256 - RNA, 24 nt, Human
uuccucaaacccaggagguggagg

SEQ ID NO: 1242257 - RNA, 22 nt, Human
uucuucugcuagaauuuuuauu

SEQ ID NO: 1242258 - RNA, 20 nt, Human
uugcauggcuggcccuggag

SEQ ID NO: 1242259 - RNA, 24 nt, Human
uugccuaacaacaggucacaaaga

SEQ ID NO: 1242260 - RNA, 19 nt, Human
uugcuccugcccaacauau

SEQ ID NO: 1242261 - RNA, 20 nt, Human
uugucuuuuuacuguugagu

SEQ ID NO: 1242262 - RNA, 20 nt, Human
uuugaaauuuccugaaccuu

SEQ ID NO: 1242263 - RNA, 23 nt, Human
uuugcccaaguaguaaacagacu

SEQ ID NO: 1242264 - RNA, 28 nt, Human
uuuuaugccaguuucauaaugucuugau

SEQ ID NO: 1242265 - RNA, 23 nt, Human
uuuuuauucuuuguguaacccua

SEQ ID NO: 1242266 - RNA, 19 nt, Human
aacccagggaaaccggcag

SEQ ID NO: 1242267 - RNA, 23 nt, Human
agccuagggccccagggcuuggg

SEQ ID NO: 1242268 - RNA, 20 nt, Human
cagucccuccccucgccuca

SEQ ID NO: 1242269 - RNA, 20 nt, Human
ccacgcccuacggaugcccc

SEQ ID NO: 1242270 - RNA, 19 nt, Human
ccagggaaaccggcagugc

SEQ ID NO: 1242271 - RNA, 19 nt, Human
cccagucccuccccucgcc

SEQ ID NO: 1242272 - RNA, 20 nt, Human
ccccacuuucccccucuucu

SEQ ID NO: 1242273 - RNA, 26 nt, Human
ccccacuuucccccucuucuucccag

SEQ ID NO: 1242274 - RNA, 21 nt, Human
cccccucuucuucccaguccc

SEQ ID NO: 1242275 - RNA, 18 nt, Human
ccgcucuccuccacgccc

SEQ ID NO: 1242276 - RNA, 20 nt, Human
ccucgggugaugggaacgga

SEQ ID NO: 1242277 - RNA, 21 nt, Human
cgccucacucggauccccagc

SEQ ID NO: 1242278 - RNA, 23 nt, Human
cuacggaugccccacuuuccccc

SEQ ID NO: 1242279 - RNA, 20 nt, Human
cuucuucccagucccucccc

SEQ ID NO: 1242280 - RNA, 21 nt, Human
gccuagggccccagggcuugg

SEQ ID NO: 1242281 - RNA, 19 nt, Human
gcgggagggauuacagccc

SEQ ID NO: 1242282 - RNA, 18 nt, Human
ggaaaccggcagugcagg

SEQ ID NO: 1242283 - RNA, 29 nt, Human
ggagaagccuagggccccagggcuugggg

SEQ ID NO: 1242284 - RNA, 21 nt, Human
uccacgcccuacggaugcccc

SEQ ID NO: 1242285 - RNA, 22 nt, Human
ucccccucuucuucccaguccc

SEQ ID NO: 1242286 - RNA, 24 nt, Human
ugccccacuuucccccucuucuuc

SEQ ID NO: 1242287 - RNA, 18 nt, Human
uggaggcuggcaagguag

SEQ ID NO: 1242288 - RNA, 23 nt, Human
uggcaagguaggggugcguggcc

SEQ ID NO: 1242289 - RNA, 21 nt, Human
uucggagaagccuagggcccc

SEQ ID NO: 1242290 - RNA, 18 nt, Human
uuucggagaagccuaggg

SEQ ID NO: 1242291 - RNA, 19 nt, Human
agaggggcgcggugcggga

SEQ ID NO: 1242292 - RNA, 22 nt, Human
aggaggagccgggccauucgaa

SEQ ID NO: 1242293 - RNA, 19 nt, Human
agucccuuccacggugagu

SEQ ID NO: 1242294 - RNA, 25 nt, Human
cacggugagugaacaguuuugguca

SEQ ID NO: 1242295 - RNA, 21 nt, Human
cccacgcggagagggcagccg

SEQ ID NO: 1242296 - RNA, 18 nt, Human
gcggagagggcagccgga

SEQ ID NO: 1242297 - RNA, 21 nt, Human
ggcgcggugcgggaggcgggg

SEQ ID NO: 1242298 - RNA, 23 nt, Human
ggcgcggugcgggaggcgggggu

SEQ ID NO: 1242299 - RNA, 25 nt, Human
ggugacaggaggagccgggccauuc

SEQ ID NO: 1242300 - RNA, 21 nt, Human
gugcgggaggcggggguaggg

SEQ ID NO: 1242301 - RNA, 20 nt, Human
ucagcaccugcgcggccaaa

SEQ ID NO: 1242302 - RNA, 20 nt, Human
ugacaggaggagccgggcca

SEQ ID NO: 1242303 - RNA, 23 nt, Human
ugagugaacaguuuuggucagaa

SEQ ID NO: 1242304 - RNA, 20 nt, Human
uggcuacugaaugcugcccu

SEQ ID NO: 1242305 - RNA, 18 nt, Human
uggugacaggaggagccg

SEQ ID NO: 1242306 - RNA, 20 nt, Human
aaaaagaggcaaacugaaaa

SEQ ID NO: 1242307 - RNA, 18 nt, Human
acggacagcccccuuccu

SEQ ID NO: 1242308 - RNA, 19 nt, Human
aggcugggauccaguugcu

SEQ ID NO: 1242309 - RNA, 24 nt, Human
caguguugggggaggagaagaagg

SEQ ID NO: 1242310 - RNA, 23 nt, Human
cauucccccugcaguguuggggg

SEQ ID NO: 1242311 - RNA, 22 nt, Human
cccccuuccuccagccaguccc

SEQ ID NO: 1242312 - RNA, 19 nt, Human
ccccuccccuuccugguuc

SEQ ID NO: 1242313 - RNA, 20 nt, Human
ccccuuccuccagccagucc

SEQ ID NO: 1242314 - RNA, 22 nt, Human
cccuuccugguucagguccugc

SEQ ID NO: 1242315 - RNA, 22 nt, Human
cgccccuccccuuccugguuca

SEQ ID NO: 1242316 - RNA, 18 nt, Human
cuccugggacucagcgcu

SEQ ID NO: 1242317 - RNA, 21 nt, Human
gaggagaagaaggcagugggg

SEQ ID NO: 1242318 - RNA, 22 nt, Human
gaggagaagaaggcagugggga

SEQ ID NO: 1242319 - RNA, 20 nt, Human
gggacucagcgcugcgccuc

SEQ ID NO: 1242320 - RNA, 20 nt, Human
guguugggggaggagaagaa

SEQ ID NO: 1242321 - RNA, 21 nt, Human
guugcugugcccagcuccacu

SEQ ID NO: 1242322 - RNA, 21 nt, Human
uaaaaagaggcaaacugaaaa

SEQ ID NO: 1242323 - RNA, 18 nt, Human
uaggacgcaguuccguaa

SEQ ID NO: 1242324 - RNA, 22 nt, Human
ucagguccugcuccugggacuc

SEQ ID NO: 1242325 - RNA, 22 nt, Human
ucuagcccaagaacagcgggcu

SEQ ID NO: 1242326 - RNA, 22 nt, Human
uggggcucuagcccaagaacag

SEQ ID NO: 1242327 - RNA, 21 nt, Human
ugggggaggagaagaaggcag

SEQ ID NO: 1242328 - RNA, 21 nt, Human
ugggggucauucccccagcac

SEQ ID NO: 1242329 - RNA, 20 nt, Human
ugguccagcgaggcccgugu

SEQ ID NO: 1242330 - RNA, 24 nt, Human
ugugcggggaggaggaggcaggac

SEQ ID NO: 1242331 - RNA, 22 nt, Human
aaucugcaauuggcauuuccca

SEQ ID NO: 1242332 - RNA, 22 nt, Human
agaacaucugggccgugucccc

SEQ ID NO: 1242333 - RNA, 22 nt, Human
cacagucuugacggugccaucc

SEQ ID NO: 1242334 - RNA, 18 nt, Human
caucaggaaauaaggucu

SEQ ID NO: 1242335 - RNA, 27 nt, Human
caucuuugaucuuaacccucccggagg

SEQ ID NO: 1242336 - RNA, 19 nt, Human
cauuuccagcuucaucuuu

SEQ ID NO: 1242337 - RNA, 19 nt, Human
ccacagcuguccccaaguc

SEQ ID NO: 1242338 - RNA, 19 nt, Human
ccccacagcuguccccaag

SEQ ID NO: 1242339 - RNA, 21 nt, Human
ccgccagucacuucugcuggg

SEQ ID NO: 1242340 - RNA, 23 nt, Human
ccucccggaggcauacuugguuu

SEQ ID NO: 1242341 - RNA, 18 nt, Human
cguugcugagcacaaugg

SEQ ID NO: 1242342 - RNA, 24 nt, Human
cugggaccagaacaucugggccgu

SEQ ID NO: 1242343 - RNA, 21 nt, Human
gaaauaaggucucuuccuguc

SEQ ID NO: 1242344 - RNA, 18 nt, Human
gagaaugucuuuuccuuu

SEQ ID NO: 1242345 - RNA, 24 nt, Human
ggggagagaaugucuuuuccuuug

SEQ ID NO: 1242346 - RNA, 21 nt, Human
uccacccuuacgauuguccca

SEQ ID NO: 1242347 - RNA, 19 nt, Human
ucccaucaggaaauaaggu

SEQ ID NO: 1242348 - RNA, 18 nt, Human
uccccacagcugucccca

SEQ ID NO: 1242349 - RNA, 27 nt, Human
ucguccaggacgacauuuccuacggua

SEQ ID NO: 1242350 - RNA, 21 nt, Human
ucuagaugacuuggguagucc

SEQ ID NO: 1242351 - RNA, 22 nt, Human
ucugcaauuggcauuucccaug

SEQ ID NO: 1242352 - RNA, 19 nt, Human
ucugcugggaccagaacau

SEQ ID NO: 1242353 - RNA, 22 nt, Human
ucugcugggaccagaacaucug

SEQ ID NO: 1242354 - RNA, 19 nt, Human
ucuuugaucuuaacccucu

SEQ ID NO: 1242355 - RNA, 23 nt, Human
ucuuuuccuuugcaauuucuaga

SEQ ID NO: 1242356 - RNA, 19 nt, Human
uggguaguccuaaaguuuu

SEQ ID NO: 1242357 - RNA, 22 nt, Human
ugucuuuuccuuugcaauuucu

SEQ ID NO: 1242358 - RNA, 19 nt, Human
ugugcugcucuaaccaagu

SEQ ID NO: 1242359 - RNA, 25 nt, Human
uuuccugacagccgcugcaauacac

SEQ ID NO: 1242360 - RNA, 19 nt, Human
aaaaaaaagaaaaagaaaa

SEQ ID NO: 1242361 - RNA, 22 nt, Human
aaaagaaaaagaaaaaaaaaag

SEQ ID NO: 1242362 - RNA, 20 nt, Human
aaacaaaaaaaggacuauua

SEQ ID NO: 1242363 - RNA, 19 nt, Human
aaacaaacaaaaaaaggac

SEQ ID NO: 1242364 - RNA, 19 nt, Human
aaacaaccaagagaauauc

SEQ ID NO: 1242365 - RNA, 24 nt, Human
aacaaugaaaaacaaccaagagaa

SEQ ID NO: 1242366 - RNA, 21 nt, Human
acacacaacaaugaaaaacaa

SEQ ID NO: 1242367 - RNA, 19 nt, Human
acuggcccaugcacccagc

SEQ ID NO: 1242368 - RNA, 19 nt, Human
agaaaaagaaaaaaaaaag

SEQ ID NO: 1242369 - RNA, 23 nt, Human
agaauagaaacaaacaaacaaaa

SEQ ID NO: 1242370 - RNA, 20 nt, Human
agaauaucauccuacugaaa

SEQ ID NO: 1242371 - RNA, 23 nt, Human
caaacaaacaaaaaaaggacuau

SEQ ID NO: 1242372 - RNA, 21 nt, Human
caaacaucuuugucuaacuaa

SEQ ID NO: 1242373 - RNA, 28 nt, Human
caacaaugaaaaacaaccaagagaauau

SEQ ID NO: 1242374 - RNA, 25 nt, Human
caacccuaaacaaaguuucugcuag

SEQ ID NO: 1242375 - RNA, 23 nt, Human
caaugaaaaacaaccaagagaau

SEQ ID NO: 1242376 - RNA, 24 nt, Human
cacacaacaaugaaaaacaaccaa

SEQ ID NO: 1242377 - RNA, 25 nt, Human
cacacaacaaugaaaaacaaccaag

SEQ ID NO: 1242378 - RNA, 22 nt, Human
cagcaccugcgacucccgccgu

SEQ ID NO: 1242379 - RNA, 26 nt, Human
cauauuacagucuuuuagcaacccua

SEQ ID NO: 1242380 - RNA, 25 nt, Human
caugcacccagcaccugcgacuccc

SEQ ID NO: 1242381 - RNA, 20 nt, Human
ccccgcgcccacaccugccc

SEQ ID NO: 1242382 - RNA, 24 nt, Human
cccgcgcccacaccugcccguccc

SEQ ID NO: 1242383 - RNA, 18 nt, Human
cccgggcgaagcgcgagg

SEQ ID NO: 1242384 - RNA, 22 nt, Human
ccuagaauagaaacaaacaaac

SEQ ID NO: 1242385 - RNA, 19 nt, Human
ccuuaacuggagaggcggg

SEQ ID NO: 1242386 - RNA, 22 nt, Human
cgcaggcagggucuuggggcag

SEQ ID NO: 1242387 - RNA, 18 nt, Human
cuacauacauacaguagc

SEQ ID NO: 1242388 - RNA, 18 nt, Human
cucaaaaaaaaaaaaaag

SEQ ID NO: 1242389 - RNA, 25 nt, Human
cucaaaaaaaaaaaaaagaaaaaga

SEQ ID NO: 1242390 - RNA, 19 nt, Human
cucaaaaaaaaaaaaaagg

SEQ ID NO: 1242391 - RNA, 22 nt, Human
cugcccgucccuuccgucgucc

SEQ ID NO: 1242392 - RNA, 24 nt, Human
gaaaaacaaccaagagaauaucau

SEQ ID NO: 1242393 - RNA, 23 nt, Human
gcccaugcacccagcaccugcga

SEQ ID NO: 1242394 - RNA, 20 nt, Human
gcccgucccuuccgucgucc

SEQ ID NO: 1242395 - RNA, 19 nt, Human
ggaaauacuagaaauauau

SEQ ID NO: 1242396 - RNA, 21 nt, Human
ggcagcgccuggcucccgcgc

SEQ ID NO: 1242397 - RNA, 18 nt, Human
gggcagcgccuggcuccc

SEQ ID NO: 1242398 - RNA, 26 nt, Human
uaacaaauucaugcuuuuccucaaaa

SEQ ID NO: 1242399 - RNA, 19 nt, Human
uacagguuaaaacacugaa

SEQ ID NO: 1242400 - RNA, 20 nt, Human
uagaauagaaacaaacaaac

SEQ ID NO: 1242401 - RNA, 21 nt, Human
uagcuacauacauacaguagc

SEQ ID NO: 1242402 - RNA, 25 nt, Human
ucaaaaaaaaaaaaaagaaaaagaa

SEQ ID NO: 1242403 - RNA, 26 nt, Human
ucaaccccauuaaaacagcauuaaaa

SEQ ID NO: 1242404 - RNA, 27 nt, Human
ucaaccccauuaaaacagcauuaaaaa

SEQ ID NO: 1242405 - RNA, 21 nt, Human
ucaugagcaguuaucccuaga

SEQ ID NO: 1242406 - RNA, 25 nt, Human
uccccgggcgaagcgcgagguuccg

SEQ ID NO: 1242407 - RNA, 19 nt, Human
ucccuagaauagaaacaaa

SEQ ID NO: 1242408 - RNA, 18 nt, Human
uccgcgcggcgagggauc

SEQ ID NO: 1242409 - RNA, 19 nt, Human
uccucaaaaaaaaaaaaaa

SEQ ID NO: 1242410 - RNA, 20 nt, Human
uccucaaaaaaaaaaaaaag

SEQ ID NO: 1242411 - RNA, 22 nt, Human
uccucaaaaaaaaaaaaaagaa

SEQ ID NO: 1242412 - RNA, 21 nt, Human
ucuuggggcagcgccuggcuc

SEQ ID NO: 1242413 - RNA, 19 nt, Human
ugaaaaacaaccaagagaa

SEQ ID NO: 1242414 - RNA, 19 nt, Human
uggcucccgcgcugcuccu

SEQ ID NO: 1242415 - RNA, 18 nt, Human
uguggagaccacaggcua

SEQ ID NO: 1242416 - RNA, 28 nt, Human
uucaaccccauuaaaacagcauuaaaaa

SEQ ID NO: 1242417 - RNA, 24 nt, Human
uugaggugaggucacaggugggaa

SEQ ID NO: 1242418 - RNA, 21 nt, Human
aggaagugucucccugacaga

SEQ ID NO: 1242419 - RNA, 21 nt, Human
aggccugaggcugagaugcug

SEQ ID NO: 1242420 - RNA, 19 nt, Human
gagaugcugugcugcuacc

SEQ ID NO: 1242421 - RNA, 18 nt, Human
gcugugcugcuacccucg

SEQ ID NO: 1242422 - RNA, 25 nt, Human
uuuccucauccuggucggcuccugg

SEQ ID NO: 1242423 - RNA, 22 nt, Human
aaguaggagaugagaagcagag

SEQ ID NO: 1242424 - RNA, 18 nt, Human
aauccugggugaggauga

SEQ ID NO: 1242425 - RNA, 25 nt, Human
aaucuucagggaaacagaaaaaaga

SEQ ID NO: 1242426 - RNA, 21 nt, Human
acccagaaccaggaguccucc

SEQ ID NO: 1242427 - RNA, 21 nt, Human
agaaccaggaguccuccgccc

SEQ ID NO: 1242428 - RNA, 22 nt, Human
cagacgcccagcagcgccucuc

SEQ ID NO: 1242429 - RNA, 22 nt, Human
cagcacccagaaccaggagucc

SEQ ID NO: 1242430 - RNA, 22 nt, Human
ccagcacccagaaccaggaguc

SEQ ID NO: 1242431 - RNA, 22 nt, Human
cccagcagcgccucucagcaca

SEQ ID NO: 1242432 - RNA, 18 nt, Human
gaaucacuuuuaggaaca

SEQ ID NO: 1242433 - RNA, 22 nt, Human
ggaguccuccgcccagacgccc

SEQ ID NO: 1242434 - RNA, 21 nt, Human
gggaaacagaaaaaagagaga

SEQ ID NO: 1242435 - RNA, 21 nt, Human
ugagaagcagagugagaauca

SEQ ID NO: 1242436 - RNA, 25 nt, Human
ugggagcagguacaggagaauccug

SEQ ID NO: 1242437 - RNA, 24 nt, Human
uguaaguaggagaugagaagcaga

SEQ ID NO: 1242438 - RNA, 25 nt, Human
aggccagcagacccaaguucaggca

SEQ ID NO: 1242439 - RNA, 25 nt, Human
aggccagcagacccaaguucaggca

SEQ ID NO: 1242440 - RNA, 22 nt, Human
aggccugugaugaggcaaguaa

SEQ ID NO: 1242441 - RNA, 20 nt, Human
caagcugauuuauugucagu

SEQ ID NO: 1242442 - RNA, 26 nt, Human
ccagcagacccaaguucaggcaagcu

SEQ ID NO: 1242443 - RNA, 20 nt, Human
cugccgggcuaccuccugac

SEQ ID NO: 1242444 - RNA, 21 nt, Human
uggccuuaugggcugcuuugu

SEQ ID NO: 1242445 - RNA, 22 nt, Human
uggccuuaugggcugcuuuguu

SEQ ID NO: 1242446 - RNA, 20 nt, Human
aaaaauacuguaauuauaau

SEQ ID NO: 1242447 - RNA, 20 nt, Human
aaaagaauucagggccaccc

SEQ ID NO: 1242448 - RNA, 19 nt, Human
aaaguucagaagcuugaaa

SEQ ID NO: 1242449 - RNA, 21 nt, Human
aaccacacagccaucaucaac

SEQ ID NO: 1242450 - RNA, 22 nt, Human
aaccacacagccaucaucaaca

SEQ ID NO: 1242451 - RNA, 24 nt, Human
aagcagucaggacuuagguccuca

SEQ ID NO: 1242452 - RNA, 19 nt, Human
acccacagccuaguaacac

SEQ ID NO: 1242453 - RNA, 18 nt, Human
acuaugccuucuuugaaa

SEQ ID NO: 1242454 - RNA, 22 nt, Human
acucccuugccucuaguuuacu

SEQ ID NO: 1242455 - RNA, 18 nt, Human
acuccucuucccauuucc

SEQ ID NO: 1242456 - RNA, 19 nt, Human
agcauuuuagcaaagcuau

SEQ ID NO: 1242457 - RNA, 18 nt, Human
agcccuuagccaccaugc

SEQ ID NO: 1242458 - RNA, 20 nt, Human
auaagcaaaaguucagaagc

SEQ ID NO: 1242459 - RNA, 19 nt, Human
aucucaucaaccaagagaa

SEQ ID NO: 1242460 - RNA, 26 nt, Human
auuugggugaggaaacuaugacgcua

SEQ ID NO: 1242461 - RNA, 23 nt, Human
caagagucagccucuccauauuc

SEQ ID NO: 1242462 - RNA, 21 nt, Human
cacacagccaucaucaacagc

SEQ ID NO: 1242463 - RNA, 27 nt, Human
caccacaagcaagagucagccucucca

SEQ ID NO: 1242464 - RNA, 24 nt, Human
cacugcugagcccccaaaacccac

SEQ ID NO: 1242465 - RNA, 20 nt, Human
cagauuuauguuucuuguca

SEQ ID NO: 1242466 - RNA, 21 nt, Human
cagcaaaugcuuggacuccaa

SEQ ID NO: 1242467 - RNA, 21 nt, Human
cagcacccggaaccacacagc

SEQ ID NO: 1242468 - RNA, 23 nt, Human
cauaagcaaaaguucagaagcuu

SEQ ID NO: 1242469 - RNA, 21 nt, Human
caucuuugaucuaaguguggg

SEQ ID NO: 1242470 - RNA, 24 nt, Human
ccaaaacccacagccuaguaacac

SEQ ID NO: 1242471 - RNA, 19 nt, Human
ccacagccuaguaacacca

SEQ ID NO: 1242472 - RNA, 18 nt, Human
ccacagcuguauucuuca

SEQ ID NO: 1242473 - RNA, 18 nt, Human
ccaccccaccacaagcaa

SEQ ID NO: 1242474 - RNA, 25 nt, Human
ccauauuccuccuuuuagcucugug

SEQ ID NO: 1242475 - RNA, 21 nt, Human
cccccaaaacccacagccuag

SEQ ID NO: 1242476 - RNA, 20 nt, Human
cccuuacugcaucuuugauc

SEQ ID NO: 1242477 - RNA, 18 nt, Human
ccuacaacuuuguagggg

SEQ ID NO: 1242478 - RNA, 24 nt, Human
cgugaaaaguccaacugaucaaua

SEQ ID NO: 1242479 - RNA, 24 nt, Human
cuaaagcaaaacauccuguucacu

SEQ ID NO: 1242480 - RNA, 22 nt, Human
cucaaaagaauucagggccacc

SEQ ID NO: 1242481 - RNA, 19 nt, Human
cuccaagcugugccuugcc

SEQ ID NO: 1242482 - RNA, 22 nt, Human
cugagcccccaaaacccacagc

SEQ ID NO: 1242483 - RNA, 19 nt, Human
cugcugagcccccaaaacc

SEQ ID NO: 1242484 - RNA, 19 nt, Human
cugcugagcccccaaaacc

SEQ ID NO: 1242485 - RNA, 19 nt, Human
cuuccacagcaccagcacc

SEQ ID NO: 1242486 - RNA, 23 nt, Human
gaucucaucaaccaagagaaugu

SEQ ID NO: 1242487 - RNA, 27 nt, Human
gcacucuuguaaaaaaagccagaauuc

SEQ ID NO: 1242488 - RNA, 22 nt, Human
gcccccaaaacccacagccuag

SEQ ID NO: 1242489 - RNA, 19 nt, Human
gccucuaguuuacuccucu

SEQ ID NO: 1242490 - RNA, 24 nt, Human
gggaauaacgagcaacgcaucagc

SEQ ID NO: 1242491 - RNA, 19 nt, Human
uaaagcaaaacauccuguu

SEQ ID NO: 1242492 - RNA, 21 nt, Human
uaccacgggcucaccuuggga

SEQ ID NO: 1242493 - RNA, 23 nt, Human
uacugcaucuuugaucuaagugu

SEQ ID NO: 1242494 - RNA, 22 nt, Human
uaguaauuugggugaggaaacu

SEQ ID NO: 1242495 - RNA, 21 nt, Human
uauucuucaggaucacuuugc

SEQ ID NO: 1242496 - RNA, 21 nt, Human
ucaauaaugugauagaacgag

SEQ ID NO: 1242497 - RNA, 23 nt, Human
ucacugggugaaagaccugcuuu

SEQ ID NO: 1242498 - RNA, 20 nt, Human
ucagugcaauuuuuaaaaaa

SEQ ID NO: 1242499 - RNA, 23 nt, Human
uccacagcaccagcacccggaac

SEQ ID NO: 1242500 - RNA, 22 nt, Human
uccacagcuguauucuucagga

SEQ ID NO: 1242501 - RNA, 21 nt, Human
ucccuuacugcaucuuugauc

SEQ ID NO: 1242502 - RNA, 23 nt, Human
ucgcaugaucucaucaaccaaga

SEQ ID NO: 1242503 - RNA, 23 nt, Human
ucugcugcuaccacgggcucacc

SEQ ID NO: 1242504 - RNA, 23 nt, Human
ugaaagaccugcuuuaucugugu

SEQ ID NO: 1242505 - RNA, 23 nt, Human
ugaaagagcaucuaaggaaaagg

SEQ ID NO: 1242506 - RNA, 18 nt, Human
ugacgcuagaggcuuugg

SEQ ID NO: 1242507 - RNA, 23 nt, Human
ugagcccccaaaacccacagccu

SEQ ID NO: 1242508 - RNA, 23 nt, Human
ugaggaaacuaugacgcuagagg

SEQ ID NO: 1242509 - RNA, 20 nt, Human
ugccauugccacuuccacag

SEQ ID NO: 1242510 - RNA, 19 nt, Human
ugcugagcccccaaaaccc

SEQ ID NO: 1242511 - RNA, 21 nt, Human
ugcugagcccccaaaacccac

SEQ ID NO: 1242512 - RNA, 22 nt, Human
ugggaugaauauuuugcauaag

SEQ ID NO: 1242513 - RNA, 22 nt, Human
uguaaaaaaagccagaauucac

SEQ ID NO: 1242514 - RNA, 26 nt, Human
uguaaaaaaagccagaauucacuucu

SEQ ID NO: 1242515 - RNA, 24 nt, Human
uguuacacuucucaauaaagguga

SEQ ID NO: 1242516 - RNA, 28 nt, Human
uuccacagcuguauucuucaggaucacu

SEQ ID NO: 1242517 - RNA, 21 nt, Human
uugaaagagcaucuaaggaaa

SEQ ID NO: 1242518 - RNA, 19 nt, Human
uuuauguuucuugucaaug

SEQ ID NO: 1242519 - RNA, 20 nt, Human
aacugguuaaaggcuuggcc

SEQ ID NO: 1242520 - RNA, 21 nt, Human
acagcaauacccagggagacc

SEQ ID NO: 1242521 - RNA, 18 nt, Human
agacaggugaucaagucu

SEQ ID NO: 1242522 - RNA, 24 nt, Human
agucccauuucccggcuuccaggg

SEQ ID NO: 1242523 - RNA, 21 nt, Human
cagcaauacccagggagacca

SEQ ID NO: 1242524 - RNA, 22 nt, Human
cagcaauacccagggagaccaa

SEQ ID NO: 1242525 - RNA, 20 nt, Human
cauaaaucugcagauaccuu

SEQ ID NO: 1242526 - RNA, 22 nt, Human
ccgcugagcacaauccaggcau

SEQ ID NO: 1242527 - RNA, 19 nt, Human
guaacugggcguuuggcua

SEQ ID NO: 1242528 - RNA, 22 nt, Human
gucccauuucccggcuuccagg

SEQ ID NO: 1242529 - RNA, 21 nt, Human
gucucugaaugucaacagucc

SEQ ID NO: 1242530 - RNA, 23 nt, Human
uaaaggcuuuguuacauuuuuuu

SEQ ID NO: 1242531 - RNA, 19 nt, Human
uaaccucuuugggcaccuc

SEQ ID NO: 1242532 - RNA, 19 nt, Human
uaacugggcguuuggcuac

SEQ ID NO: 1242533 - RNA, 18 nt, Human
uacauuuguaguguuuuu

SEQ ID NO: 1242534 - RNA, 23 nt, Human
uacccagggagaccaaguuucug

SEQ ID NO: 1242535 - RNA, 18 nt, Human
uauuuugcuccagacagg

SEQ ID NO: 1242536 - RNA, 25 nt, Human
ucaacagucccauuucccggcuucc

SEQ ID NO: 1242537 - RNA, 18 nt, Human
ucacuauaaccucuuugg

SEQ ID NO: 1242538 - RNA, 18 nt, Human
uccauauguucuugguau

SEQ ID NO: 1242539 - RNA, 19 nt, Human
uccuccagagagaauucua

SEQ ID NO: 1242540 - RNA, 24 nt, Human
ucuauuggaauuugaaaauuuacc

SEQ ID NO: 1242541 - RNA, 24 nt, Human
ucucuuagguuuauuaagguuuga

SEQ ID NO: 1242542 - RNA, 24 nt, Human
ucugaaugucaacagucccauuuc

SEQ ID NO: 1242543 - RNA, 21 nt, Human
ucuuuuagccauaaaucugca

SEQ ID NO: 1242544 - RNA, 20 nt, Human
ugaaauauuuuguuuugggu

SEQ ID NO: 1242545 - RNA, 21 nt, Human
ugaaugucaacagucccauuu

SEQ ID NO: 1242546 - RNA, 23 nt, Human
ugggaaugcguaacugggcguuu

SEQ ID NO: 1242547 - RNA, 23 nt, Human
uguaggguuucucuccaguguga

SEQ ID NO: 1242548 - RNA, 19 nt, Human
uguccaauaugaauucucu

SEQ ID NO: 1242549 - RNA, 20 nt, Human
uguuucuuuccaguauaucu

SEQ ID NO: 1242550 - RNA, 26 nt, Human
uucuauagcuaugucucugaauguca

SEQ ID NO: 1242551 - RNA, 18 nt, Human
uuggcuaccaucucauuu

SEQ ID NO: 1242552 - RNA, 18 nt, Human
uugguauuacuuuuugga

SEQ ID NO: 1242553 - RNA, 19 nt, Human
uuuguaggguuucucucca

SEQ ID NO: 1242554 - RNA, 24 nt, Human
aaaugacaucagaggccugugcuc

SEQ ID NO: 1242555 - RNA, 22 nt, Human
acccgccccaccuccgccggcu

SEQ ID NO: 1242556 - RNA, 19 nt, Human
accucggcggcacccgccc

SEQ ID NO: 1242557 - RNA, 19 nt, Human
aggcggacucgggguggcc

SEQ ID NO: 1242558 - RNA, 20 nt, Human
agggggaggcaggucaggaa

SEQ ID NO: 1242559 - RNA, 22 nt, Human
aggucaggaaaugacaucagag

SEQ ID NO: 1242560 - RNA, 18 nt, Human
cacucagugugaacaaga

SEQ ID NO: 1242561 - RNA, 18 nt, Human
cccgugcacccuggagcc

SEQ ID NO: 1242562 - RNA, 23 nt, Human
cccgugcacccuggagcccagcu

SEQ ID NO: 1242563 - RNA, 19 nt, Human
ccggaggcgcacaggggcu

SEQ ID NO: 1242564 - RNA, 19 nt, Human
cggacucgggguggccggg

SEQ ID NO: 1242565 - RNA, 21 nt, Human
cgggguggccggguagcgggu

SEQ ID NO: 1242566 - RNA, 25 nt, Human
gauccugccuuuaccugggugugac

SEQ ID NO: 1242567 - RNA, 20 nt, Human
ggacucgggguggccgggua

SEQ ID NO: 1242568 - RNA, 23 nt, Human
ggccggaggcgcacaggggcugc

SEQ ID NO: 1242569 - RNA, 23 nt, Human
ggcggggagggggaggcagguca

SEQ ID NO: 1242570 - RNA, 22 nt, Human
gggcggggagggggaggcaggu

SEQ ID NO: 1242571 - RNA, 23 nt, Human
ggguagcgggugguggcaggagg

SEQ ID NO: 1242572 - RNA, 18 nt, Human
uaccugggugugacccgg

SEQ ID NO: 1242573 - RNA, 19 nt, Human
uaccugggugugacccggg

SEQ ID NO: 1242574 - RNA, 20 nt, Human
ucaggaaaugacaucagagg

SEQ ID NO: 1242575 - RNA, 22 nt, Human
uggccggguagcgggugguggc

SEQ ID NO: 1242576 - RNA, 18 nt, Human
ugugaacaagacgaaggc

SEQ ID NO: 1242577 - RNA, 23 nt, Human
uuggagggacuggacacucagug

SEQ ID NO: 1242578 - RNA, 18 nt, Human
cauggagagcuguccccc

SEQ ID NO: 1242579 - RNA, 23 nt, Human
ccagagccaccucuugcuggaga

SEQ ID NO: 1242580 - RNA, 21 nt, Human
gagagcugucccccauggaga

SEQ ID NO: 1242581 - RNA, 22 nt, Human
aaacauauaccagaauauauca

SEQ ID NO: 1242582 - RNA, 19 nt, Human
aaaggauaggauuacaggc

SEQ ID NO: 1242583 - RNA, 23 nt, Human
aaaggauaggauuacaggcguga

SEQ ID NO: 1242584 - RNA, 21 nt, Human
aaaugaaagacuaaaacaacc

SEQ ID NO: 1242585 - RNA, 20 nt, Human
aagagacaaaugaaagacua

SEQ ID NO: 1242586 - RNA, 26 nt, Human
aagagacaaaugaaagacuaaaacaa

SEQ ID NO: 1242587 - RNA, 24 nt, Human
aagcaauccuccugcucaaccucc

SEQ ID NO: 1242588 - RNA, 23 nt, Human
aaugauaaacauauaccagaaua

SEQ ID NO: 1242589 - RNA, 24 nt, Human
accgugucgcccaggcuggucucg

SEQ ID NO: 1242590 - RNA, 25 nt, Human
accgugucgcccaggcuggucucga

SEQ ID NO: 1242591 - RNA, 19 nt, Human
acggggccgggccuccccc

SEQ ID NO: 1242592 - RNA, 19 nt, Human
acgggguuucaccgugucg

SEQ ID NO: 1242593 - RNA, 24 nt, Human
acgggguuucaccgugucgcccag

SEQ ID NO: 1242594 - RNA, 19 nt, Human
acuacaggcgcgugccgcc

SEQ ID NO: 1242595 - RNA, 23 nt, Human
acuacaggugcccaccacaccag

SEQ ID NO: 1242596 - RNA, 26 nt, Human
agacagggucuggcuauaucguccag

SEQ ID NO: 1242597 - RNA, 22 nt, Human
agagacagagucucgcucuguc

SEQ ID NO: 1242598 - RNA, 22 nt, Human
aggcaauccgcccaccucggcc

SEQ ID NO: 1242599 - RNA, 24 nt, Human
aggcaauccgcccaccucggccuc

SEQ ID NO: 1242600 - RNA, 19 nt, Human
agggacgggguuucaccgu

SEQ ID NO: 1242601 - RNA, 19 nt, Human
aguagcugggacuacaggc

SEQ ID NO: 1242602 - RNA, 23 nt, Human
aguagcugggacuacaggcgcgu

SEQ ID NO: 1242603 - RNA, 20 nt, Human
aguagggacgggguuucacc

SEQ ID NO: 1242604 - RNA, 20 nt, Human
agugcagcggcgcgaucucg

SEQ ID NO: 1242605 - RNA, 24 nt, Human
agugcagcggcgcgaucucggcuc

SEQ ID NO: 1242606 - RNA, 22 nt, Human
aucccacuccgcccagggccaa

SEQ ID NO: 1242607 - RNA, 24 nt, Human
auggaugacaaauucuugguuuuu

SEQ ID NO: 1242608 - RNA, 24 nt, Human
auuuuaguagggacgggguuucac

SEQ ID NO: 1242609 - RNA, 24 nt, Human
auuuuuuguauuuuaguagggacg

SEQ ID NO: 1242610 - RNA, 25 nt, Human
caaacuccugggcucaagcaauccu

SEQ ID NO: 1242611 - RNA, 19 nt, Human
caaaugaaagacuaaaaca

SEQ ID NO: 1242612 - RNA, 22 nt, Human
caagccauucuccugccucagc

SEQ ID NO: 1242613 - RNA, 21 nt, Human
cacccaaucccacuccgcccg

SEQ ID NO: 1242614 - RNA, 21 nt, Human
caccgugucgcccaggcuggu

SEQ ID NO: 1242615 - RNA, 24 nt, Human
caccgugucgcccaggcuggucuc

SEQ ID NO: 1242616 - RNA, 27 nt, Human
caccgugucgcccaggcuggucucgaa

SEQ ID NO: 1242617 - RNA, 23 nt, Human
caccucggccuccuaaaggauag

SEQ ID NO: 1242618 - RNA, 21 nt, Human
cacggcauagccggguccagc

SEQ ID NO: 1242619 - RNA, 20 nt, Human
cacucgcggccacugcgaac

SEQ ID NO: 1242620 - RNA, 20 nt, Human
cagccuccugaguagcuggg

SEQ ID NO: 1242621 - RNA, 24 nt, Human
cagggucuggcuauaucguccagg

SEQ ID NO: 1242622 - RNA, 21 nt, Human
caugacauacauacaaaugua

SEQ ID NO: 1242623 - RNA, 23 nt, Human
ccagggaccaggccgguccggcc

SEQ ID NO: 1242624 - RNA, 22 nt, Human
ccagggccaagaagcccgagga

SEQ ID NO: 1242625 - RNA, 23 nt, Human
cccacauagccugaagguaaggu

SEQ ID NO: 1242626 - RNA, 23 nt, Human
cccacuccgcccagggccaagaa

SEQ ID NO: 1242627 - RNA, 19 nt, Human
ccccagcacguccccagcu

SEQ ID NO: 1242628 - RNA, 19 nt, Human
ccccaggacucgccgcgga

SEQ ID NO: 1242629 - RNA, 19 nt, Human
ccccccagcacguccccag

SEQ ID NO: 1242630 - RNA, 20 nt, Human
ccgccacgcccggcuaauuu

SEQ ID NO: 1242631 - RNA, 19 nt, Human
ccgcccagggccaagaagc

SEQ ID NO: 1242632 - RNA, 22 nt, Human
ccgcccagggccaagaagcccg

SEQ ID NO: 1242633 - RNA, 24 nt, Human
ccuaaaggauaggauuacaggcgu

SEQ ID NO: 1242634 - RNA, 22 nt, Human
ccuccugcucaaccucccgagu

SEQ ID NO: 1242635 - RNA, 23 nt, Human
ccugaguagcugggacuacaggc

SEQ ID NO: 1242636 - RNA, 23 nt, Human
ccugaguagcugggacuacaggc

SEQ ID NO: 1242637 - RNA, 23 nt, Human
ccugcucaaccucccgaguagcu

SEQ ID NO: 1242638 - RNA, 18 nt, Human
ccugggcucaagcaaucc

SEQ ID NO: 1242639 - RNA, 23 nt, Human
ccugggcucaagcaauccuccug

SEQ ID NO: 1242640 - RNA, 24 nt, Human
cgaauuuuagagcauuuuggauuu

SEQ ID NO: 1242641 - RNA, 19 nt, Human
cgaggaggccgcagaaccg

SEQ ID NO: 1242642 - RNA, 18 nt, Human
cgccagggaccaggccgg

SEQ ID NO: 1242643 - RNA, 24 nt, Human
cgcccaggcuggucucgaacuccu

SEQ ID NO: 1242644 - RNA, 24 nt, Human
cgcucugucgcccaggcuggagug

SEQ ID NO: 1242645 - RNA, 20 nt, Human
cggacccgacaggacgccag

SEQ ID NO: 1242646 - RNA, 21 nt, Human
cggccagagcggcucagguac

SEQ ID NO: 1242647 - RNA, 18 nt, Human
cgggacagcggggccucg

SEQ ID NO: 1242648 - RNA, 24 nt, Human
cgggguuucaccgugucgcccagg

SEQ ID NO: 1242649 - RNA, 23 nt, Human
cuaaaggauaggauuacaggcgu

SEQ ID NO: 1242650 - RNA, 23 nt, Human
cucaagcaauccuccugcucaac

SEQ ID NO: 1242651 - RNA, 24 nt, Human
cucagccuccugaguagcugggac

SEQ ID NO: 1242652 - RNA, 21 nt, Human
cucaggcaauccgcccaccuc

SEQ ID NO: 1242653 - RNA, 24 nt, Human
cuccugcccauacaaaaccacuca

SEQ ID NO: 1242654 - RNA, 23 nt, Human
cuccugggcucaagcaauccucc

SEQ ID NO: 1242655 - RNA, 25 nt, Human
cuccugggcucaagcaauccuccug

SEQ ID NO: 1242656 - RNA, 24 nt, Human
cucgcucugucgcccaggcuggag

SEQ ID NO: 1242657 - RNA, 23 nt, Human
cucugucgcccaggcuggagugc

SEQ ID NO: 1242658 - RNA, 23 nt, Human
cugccucagccuccugaguagcu

SEQ ID NO: 1242659 - RNA, 24 nt, Human
cuugcggagaccccaggacucgcc

SEQ ID NO: 1242660 - RNA, 24 nt, Human
gaacucaggcaauccgcccaccuc

SEQ ID NO: 1242661 - RNA, 23 nt, Human
gaacuccugaacucaggcaaucc

SEQ ID NO: 1242662 - RNA, 22 nt, Human
gacaaaugaaagacuaaaacaa

SEQ ID NO: 1242663 - RNA, 18 nt, Human
gacgggguuucaccgugu

SEQ ID NO: 1242664 - RNA, 22 nt, Human
gacgggguuucaccgugucgcc

SEQ ID NO: 1242665 - RNA, 26 nt, Human
gaguagcugggacuacaggcgcgugc

SEQ ID NO: 1242666 - RNA, 18 nt, Human
gauuacaggcgugagcca

SEQ ID NO: 1242667 - RNA, 22 nt, Human
gauuacaggcgugagccaccgc

SEQ ID NO: 1242668 - RNA, 22 nt, Human
gauuacaggcgugagccaccgc

SEQ ID NO: 1242669 - RNA, 19 nt, Human
gcaccgcgggcucugcugu

SEQ ID NO: 1242670 - RNA, 20 nt, Human
gcauagccggguccagcgcg

SEQ ID NO: 1242671 - RNA, 19 nt, Human
gcccaggcuggagugcagc

SEQ ID NO: 1242672 - RNA, 23 nt, Human
gcccggcuaauuuuuuguauuuu

SEQ ID NO: 1242673 - RNA, 20 nt, Human
gccucagccuccugaguagc

SEQ ID NO: 1242674 - RNA, 18 nt, Human
gccuugcucggccagagc

SEQ ID NO: 1242675 - RNA, 30 nt, Human
gcgcccggccccuucucuuuuuuaaaaccc

SEQ ID NO: 1242676 - RNA, 22 nt, Human
gcgccuugcucggccagagcgg

SEQ ID NO: 1242677 - RNA, 22 nt, Human
gcggggccucgggcagcgacgg

SEQ ID NO: 1242678 - RNA, 20 nt, Human
gcucauugcaaccuccccca

SEQ ID NO: 1242679 - RNA, 21 nt, Human
gcucauugcaaccucccccac

SEQ ID NO: 1242680 - RNA, 19 nt, Human
gcuggagugcagcggcgcg

SEQ ID NO: 1242681 - RNA, 22 nt, Human
ggauuacaggcgugagccaccg

SEQ ID NO: 1242682 - RNA, 26 nt, Human
ggccucgggcagcgacggggccgggc

SEQ ID NO: 1242683 - RNA, 19 nt, Human
gggcucaagcaauccuccu

SEQ ID NO: 1242684 - RNA, 19 nt, Human
guagaacaaaggccaacuu

SEQ ID NO: 1242685 - RNA, 24 nt, Human
gucucgcucugucgcccaggcugg

SEQ ID NO: 1242686 - RNA, 18 nt, Human
uaaaacaaccagaaaaca

SEQ ID NO: 1242687 - RNA, 23 nt, Human
uaaaacaaccagaaaacauugga

SEQ ID NO: 1242688 - RNA, 24 nt, Human
uaaaagguuuccugauuacaaagg

SEQ ID NO: 1242689 - RNA, 21 nt, Human
uaauuuuuuguauuuuaguag

SEQ ID NO: 1242690 - RNA, 24 nt, Human
uaauuuuuuguauuuuaguaggga

SEQ ID NO: 1242691 - RNA, 23 nt, Human
uacaggcgugagccaccgcgccc

SEQ ID NO: 1242692 - RNA, 23 nt, Human
uacaggugcccaccacaccaggc

SEQ ID NO: 1242693 - RNA, 18 nt, Human
uacuacuccagguccggc

SEQ ID NO: 1242694 - RNA, 23 nt, Human
uacuacuccagguccggccgcac

SEQ ID NO: 1242695 - RNA, 23 nt, Human
uagaacaaaggccaacuuaaagc

SEQ ID NO: 1242696 - RNA, 18 nt, Human
uaggauuacaggcgugag

SEQ ID NO: 1242697 - RNA, 19 nt, Human
uaggauuacaggcgugagc

SEQ ID NO: 1242698 - RNA, 21 nt, Human
uaggauuacaggcgugagcca

SEQ ID NO: 1242699 - RNA, 22 nt, Human
uaggauuacaggcgugagccac

SEQ ID NO: 1242700 - RNA, 23 nt, Human
uaggauuacaggcgugagccacc

SEQ ID NO: 1242701 - RNA, 24 nt, Human
uaggauuacaggcgugagccaccg

SEQ ID NO: 1242702 - RNA, 21 nt, Human
uaguagggacgggguuucacc

SEQ ID NO: 1242703 - RNA, 24 nt, Human
uaguagggacgggguuucaccgug

SEQ ID NO: 1242704 - RNA, 25 nt, Human
uaguagggacgggguuucaccgugu

SEQ ID NO: 1242705 - RNA, 18 nt, Human
uauaucguccaggcugga

SEQ ID NO: 1242706 - RNA, 21 nt, Human
uauaucguccaggcuggacuc

SEQ ID NO: 1242707 - RNA, 22 nt, Human
uauaucguccaggcuggacuca

SEQ ID NO: 1242708 - RNA, 18 nt, Human
uaucugaaaugcuuggga

SEQ ID NO: 1242709 - RNA, 25 nt, Human
ucaagccauucuccugccucagccu

SEQ ID NO: 1242710 - RNA, 19 nt, Human
ucacccagugucacaugag

SEQ ID NO: 1242711 - RNA, 23 nt, Human
ucagccuccugaguagcugggac

SEQ ID NO: 1242712 - RNA, 22 nt, Human
ucauugcaaccucccccacccg

SEQ ID NO: 1242713 - RNA, 24 nt, Human
ucauugcaaccucccccacccgag

SEQ ID NO: 1242714 - RNA, 21 nt, Human
uccaggcuggacucaaacucc

SEQ ID NO: 1242715 - RNA, 18 nt, Human
uccccccagcacgucccc

SEQ ID NO: 1242716 - RNA, 23 nt, Human
ucccgaguagcuggcacuacagg

SEQ ID NO: 1242717 - RNA, 24 nt, Human
ucccgaguagcuggcacuacaggu

SEQ ID NO: 1242718 - RNA, 23 nt, Human
uccuaaaggauaggauuacaggc

SEQ ID NO: 1242719 - RNA, 24 nt, Human
uccugaguagcugggacuacaggc

SEQ ID NO: 1242720 - RNA, 18 nt, Human
uccugggcucaagcaauc

SEQ ID NO: 1242721 - RNA, 24 nt, Human
uccugggcucaagcaauccuccug

SEQ ID NO: 1242722 - RNA, 18 nt, Human
ucgcccaggcuggagugc

SEQ ID NO: 1242723 - RNA, 24 nt, Human
ucgcucugucgcccaggcuggagu

SEQ ID NO: 1242724 - RNA, 23 nt, Human
ucguccaggcuggacucaaacuc

SEQ ID NO: 1242725 - RNA, 24 nt, Human
ucuccugccucagccuccugagua

SEQ ID NO: 1242726 - RNA, 23 nt, Human
ucucgaacuccugaacucaggca

SEQ ID NO: 1242727 - RNA, 19 nt, Human
ucucgcucugucgcccagg

SEQ ID NO: 1242728 - RNA, 23 nt, Human
ucucgcucugucgcccaggcugg

SEQ ID NO: 1242729 - RNA, 24 nt, Human
ucucgcucugucgcccaggcugga

SEQ ID NO: 1242730 - RNA, 26 nt, Human
ucucgcucugucgcccaggcuggagu

SEQ ID NO: 1242731 - RNA, 24 nt, Human
ucuggcuauaucguccaggcugga

SEQ ID NO: 1242732 - RNA, 24 nt, Human
ucugucgcccaggcuggagugcag

SEQ ID NO: 1242733 - RNA, 20 nt, Human
ugaaagacuaaaacaaccag

SEQ ID NO: 1242734 - RNA, 24 nt, Human
ugagcgcggggcuucccggggcug

SEQ ID NO: 1242735 - RNA, 21 nt, Human
ugaggccuugcggagacccca

SEQ ID NO: 1242736 - RNA, 22 nt, Human
ugaguguuuuuauuacagguug

SEQ ID NO: 1242737 - RNA, 18 nt, Human
ugcaaccucccccacccg

SEQ ID NO: 1242738 - RNA, 20 nt, Human
ugcccaccacaccaggcuuu

SEQ ID NO: 1242739 - RNA, 24 nt, Human
ugccucagccuccugaguagcugg

SEQ ID NO: 1242740 - RNA, 19 nt, Human
ugcgaacagccgggacacc

SEQ ID NO: 1242741 - RNA, 22 nt, Human
ugcguuguuuaccuccugccca

SEQ ID NO: 1242742 - RNA, 23 nt, Human
ugcucaaccucccgaguagcugg

SEQ ID NO: 1242743 - RNA, 22 nt, Human
uggaaugauaaaucauuaagua

SEQ ID NO: 1242744 - RNA, 23 nt, Human
uggagugcagcggcgcgaucucg

SEQ ID NO: 1242745 - RNA, 24 nt, Human
uggagugcagcggcgcgaucucgg

SEQ ID NO: 1242746 - RNA, 22 nt, Human
uggaucuaauguauuuauuaca

SEQ ID NO: 1242747 - RNA, 18 nt, Human
uggaugacaaauucuugg

SEQ ID NO: 1242748 - RNA, 21 nt, Human
uggcacuacaggugcccacca

SEQ ID NO: 1242749 - RNA, 20 nt, Human
ugggacuacaggcgcgugcc

SEQ ID NO: 1242750 - RNA, 21 nt, Human
ugggacuacaggcgcgugccg

SEQ ID NO: 1242751 - RNA, 22 nt, Human
ugggacuacaggcgcgugccgc

SEQ ID NO: 1242752 - RNA, 24 nt, Human
ugggacuacaggcgcgugccgcca

SEQ ID NO: 1242753 - RNA, 22 nt, Human
ugucgcccaggcuggucucgaa

SEQ ID NO: 1242754 - RNA, 20 nt, Human
ugucugggacucuccuccag

SEQ ID NO: 1242755 - RNA, 23 nt, Human
uguuuuguuuuuuuucagagaca

SEQ ID NO: 1242756 - RNA, 18 nt, Human
uuaguagggacgggguuu

SEQ ID NO: 1242757 - RNA, 22 nt, Human
uuaguagggacgggguuucacc

SEQ ID NO: 1242758 - RNA, 24 nt, Human
uuaguagggacgggguuucaccgu

SEQ ID NO: 1242759 - RNA, 21 nt, Human
uucaagccauucuccugccuc

SEQ ID NO: 1242760 - RNA, 21 nt, Human
uucagauauuuuugauuugga

SEQ ID NO: 1242761 - RNA, 23 nt, Human
uucccggggcuggagcuggguac

SEQ ID NO: 1242762 - RNA, 25 nt, Human
uuguuuuuuuacagacagggucugg

SEQ ID NO: 1242763 - RNA, 18 nt, Human
uuucacauacaccuuacc

SEQ ID NO: 1242764 - RNA, 20 nt, Human
uuuuuguauuuuaguaggga

SEQ ID NO: 1242765 - RNA, 23 nt, Human
uuuuuguuuuuuuacagacaggg

SEQ ID NO: 1242766 - RNA, 21 nt, Human
cacuacaaacagcaaaacaaa

SEQ ID NO: 1242767 - RNA, 19 nt, Human
cacucccaacucucgucac

SEQ ID NO: 1242768 - RNA, 21 nt, Human
cacugcuggagauccgcagcc

SEQ ID NO: 1242769 - RNA, 19 nt, Human
ccagccacacucccaacuc

SEQ ID NO: 1242770 - RNA, 21 nt, Human
cccacgcgaguccucuggcca

SEQ ID NO: 1242771 - RNA, 19 nt, Human
ccgcagccccagccacacu

SEQ ID NO: 1242772 - RNA, 24 nt, Human
ccgcagccccagccacacucccaa

SEQ ID NO: 1242773 - RNA, 20 nt, Human
ccgguauccagccgcuagaa

SEQ ID NO: 1242774 - RNA, 28 nt, Human
ccucuggccaggccagucgucgcuuccc

SEQ ID NO: 1242775 - RNA, 21 nt, Human
uacaaacagcaaaacaaauau

SEQ ID NO: 1242776 - RNA, 21 nt, Human
uccacuacaaacagcaaaaca

SEQ ID NO: 1242777 - RNA, 25 nt, Human
ucugaaauuuccacuacaaacagca

SEQ ID NO: 1242778 - RNA, 24 nt, Human
ugaaauuuccacuacaaacagcaa

SEQ ID NO: 1242779 - RNA, 24 nt, Human
uuuccacuacaaacagcaaaacaa

SEQ ID NO: 1242780 - RNA, 25 nt, Human
agaggaaaagcugaugacaaaggug

SEQ ID NO: 1242781 - RNA, 23 nt, Human
agaguuaagggaaagggaggggg

SEQ ID NO: 1242782 - RNA, 22 nt, Human
aggcuggucuccaaucugaagc

SEQ ID NO: 1242783 - RNA, 21 nt, Human
augaagauccaguggcaaaga

SEQ ID NO: 1242784 - RNA, 22 nt, Human
augaagauccaguggcaaagag

SEQ ID NO: 1242785 - RNA, 20 nt, Human
caugucuccaugaagaucca

SEQ ID NO: 1242786 - RNA, 25 nt, Human
cugaugacaaaggugguuuggggau

SEQ ID NO: 1242787 - RNA, 24 nt, Human
cuugcccaugucuccaugaagauc

SEQ ID NO: 1242788 - RNA, 19 nt, Human
gaagauccaguggcaaaga

SEQ ID NO: 1242789 - RNA, 20 nt, Human
gaagauccaguggcaaagag

SEQ ID NO: 1242790 - RNA, 19 nt, Human
uggcaaagaggaaaagcug

SEQ ID NO: 1242791 - RNA, 20 nt, Human
uggggauguaaaaguagagu

SEQ ID NO: 1242792 - RNA, 26 nt, Human
aaaaagaauugucucuuaaaaaugaa

SEQ ID NO: 1242793 - RNA, 19 nt, Human
aaacaaaccaauaaaaugc

SEQ ID NO: 1242794 - RNA, 24 nt, Human
aaacaagguaaaaaauuacaucug

SEQ ID NO: 1242795 - RNA, 21 nt, Human
aaacacacagcucauguccuc

SEQ ID NO: 1242796 - RNA, 23 nt, Human
aaaguaacauacaaacaugccaa

SEQ ID NO: 1242797 - RNA, 26 nt, Human
aaaguaacauacaaacaugccaaaac

SEQ ID NO: 1242798 - RNA, 21 nt, Human
aaccaugcucccuucagcagc

SEQ ID NO: 1242799 - RNA, 23 nt, Human
aaggaccccaccccccucccccu

SEQ ID NO: 1242800 - RNA, 19 nt, Human
acaggaacaaauuuaaaga

SEQ ID NO: 1242801 - RNA, 18 nt, Human
accccaccccccuccccc

SEQ ID NO: 1242802 - RNA, 27 nt, Human
accccaccccccucccccugcuccuag

SEQ ID NO: 1242803 - RNA, 24 nt, Human
aggaccccaccccccucccccugc

SEQ ID NO: 1242804 - RNA, 19 nt, Human
aggaugaaaagaauccucu

SEQ ID NO: 1242805 - RNA, 26 nt, Human
auaaaauagauaguauauauuagaca

SEQ ID NO: 1242806 - RNA, 18 nt, Human
auaacaacuauaacucuc

SEQ ID NO: 1242807 - RNA, 22 nt, Human
aucacacagcuuuauagaaaca

SEQ ID NO: 1242808 - RNA, 19 nt, Human
aucacuguauucagcucca

SEQ ID NO: 1242809 - RNA, 18 nt, Human
augaaaagaauccucucu

SEQ ID NO: 1242810 - RNA, 23 nt, Human
augcagagugugcaugaagcuau

SEQ ID NO: 1242811 - RNA, 19 nt, Human
augcucccuucagcagcau

SEQ ID NO: 1242812 - RNA, 23 nt, Human
augguccagguucuucuagauga

SEQ ID NO: 1242813 - RNA, 23 nt, Human
cacacagcgucuccacuacccag

SEQ ID NO: 1242814 - RNA, 19 nt, Human
cagcuccaucaagaauggu

SEQ ID NO: 1242815 - RNA, 21 nt, Human
caugcucccuucagcagcaug

SEQ ID NO: 1242816 - RNA, 23 nt, Human
ccaaaacaagguaaaaaauuaca

SEQ ID NO: 1242817 - RNA, 21 nt, Human
ccaccccccucccccugcucc

SEQ ID NO: 1242818 - RNA, 23 nt, Human
cccacacagcgucuccacuaccc

SEQ ID NO: 1242819 - RNA, 18 nt, Human
ccccaccccccucccccu

SEQ ID NO: 1242820 - RNA, 18 nt, Human
ccccccucccccugcucc

SEQ ID NO: 1242821 - RNA, 19 nt, Human
ccccuggguccgguguucu

SEQ ID NO: 1242822 - RNA, 23 nt, Human
cccuucagcagcauguguaauaa

SEQ ID NO: 1242823 - RNA, 20 nt, Human
ccgaugaccucaggccucca

SEQ ID NO: 1242824 - RNA, 19 nt, Human
ccucaggcucaggggcgag

SEQ ID NO: 1242825 - RNA, 22 nt, Human
ccuucagcagcauguguaauaa

SEQ ID NO: 1242826 - RNA, 18 nt, Human
cuccucaggcucaggggc

SEQ ID NO: 1242827 - RNA, 24 nt, Human
gaaaacacacagcucauguccucc

SEQ ID NO: 1242828 - RNA, 24 nt, Human
gacuccuagaaggaccccaccccc

SEQ ID NO: 1242829 - RNA, 21 nt, Human
gagugcucgcuucaggagcac

SEQ ID NO: 1242830 - RNA, 18 nt, Human
gcacacacauccucuuua

SEQ ID NO: 1242831 - RNA, 20 nt, Human
ggaaaggguggaacuggaaa

SEQ ID NO: 1242832 - RNA, 23 nt, Human
ggaaaggguggaacuggaaacac

SEQ ID NO: 1242833 - RNA, 20 nt, Human
ggaccuccagguuccgcccc

SEQ ID NO: 1242834 - RNA, 20 nt, Human
ggcaaccaaguccguaagaa

SEQ ID NO: 1242835 - RNA, 18 nt, Human
guaagaaauaggaccucc

SEQ ID NO: 1242836 - RNA, 23 nt, Human
uaacauacaaacaugccaaaaca

SEQ ID NO: 1242837 - RNA, 18 nt, Human
uaauacaggaacaaauuu

SEQ ID NO: 1242838 - RNA, 18 nt, Human
uacaucuguauucucaca

SEQ ID NO: 1242839 - RNA, 26 nt, Human
uaccaguauuuccaaaauauuuaaaa

SEQ ID NO: 1242840 - RNA, 23 nt, Human
uagauaaaaaccaugcucccuuc

SEQ ID NO: 1242841 - RNA, 22 nt, Human
uagaugaucugcacaaaugguu

SEQ ID NO: 1242842 - RNA, 24 nt, Human
uauaaaaagggugguggugccgca

SEQ ID NO: 1242843 - RNA, 22 nt, Human
uauauaacaacuauaacucuca

SEQ ID NO: 1242844 - RNA, 18 nt, Human
uauauguauguguauaua

SEQ ID NO: 1242845 - RNA, 19 nt, Human
uauauguauguguauauaa

SEQ ID NO: 1242846 - RNA, 22 nt, Human
ucaaagguacaacaauuuccaa

SEQ ID NO: 1242847 - RNA, 24 nt, Human
ucaggagcacauauaauaauacag

SEQ ID NO: 1242848 - RNA, 20 nt, Human
ucccccugcuccuagguagg

SEQ ID NO: 1242849 - RNA, 26 nt, Human
uccccuggguccgguguucuucucuc

SEQ ID NO: 1242850 - RNA, 20 nt, Human
uccuagaaggaccccacccc

SEQ ID NO: 1242851 - RNA, 18 nt, Human
uccuucuuccuggugucu

SEQ ID NO: 1242852 - RNA, 25 nt, Human
ucucaggccgaugaccucaggccuc

SEQ ID NO: 1242853 - RNA, 18 nt, Human
ugagccccugcauugugc

SEQ ID NO: 1242854 - RNA, 22 nt, Human
ugaucugcacaaaugguuccuc

SEQ ID NO: 1242855 - RNA, 18 nt, Human
ugccaaaacaagguaaaa

SEQ ID NO: 1242856 - RNA, 19 nt, Human
ugccaaucugagccccugc

SEQ ID NO: 1242857 - RNA, 23 nt, Human
uggaauaaaguuccugcugaaaa

SEQ ID NO: 1242858 - RNA, 21 nt, Human
uucacaaaagaauucugugcc

SEQ ID NO: 1242859 - RNA, 23 nt, Human
uucauuuuuauuauguuucccca

SEQ ID NO: 1242860 - RNA, 21 nt, Human
agggacugacggacaggcucu

SEQ ID NO: 1242861 - RNA, 26 nt, Human
guggcagugagggcccagccucucuu

SEQ ID NO: 1242862 - RNA, 22 nt, Human
ucaccuguauugcaauggaagc

SEQ ID NO: 1242863 - RNA, 18 nt, Human
ucagcuuuggccacagga

SEQ ID NO: 1242864 - RNA, 21 nt, Human
uccugagucagacucccuaag

SEQ ID NO: 1242865 - RNA, 18 nt, Human
ugaguggaaaaucaccug

SEQ ID NO: 1242866 - RNA, 19 nt, Human
ugaugagcacucucuaggu

SEQ ID NO: 1242867 - RNA, 24 nt, Human
uggaaaaucaccuguauugcaaug

SEQ ID NO: 1242868 - RNA, 21 nt, Human
uuuguggugguuccaaacuga

SEQ ID NO: 1242869 - RNA, 22 nt, Human
aaagaggggccaccgagcagug

SEQ ID NO: 1242870 - RNA, 21 nt, Human
aacuguuauuuccagaacuuc

SEQ ID NO: 1242871 - RNA, 20 nt, Human
accugcuccugucgucuccu

SEQ ID NO: 1242872 - RNA, 19 nt, Human
agaaaaugccugaggcaaa

SEQ ID NO: 1242873 - RNA, 20 nt, Human
agcagacaauggucagggaa

SEQ ID NO: 1242874 - RNA, 21 nt, Human
agcagugugauaggcagcccc

SEQ ID NO: 1242875 - RNA, 19 nt, Human
aggcaaagugggggugaaa

SEQ ID NO: 1242876 - RNA, 22 nt, Human
aggcaaagugggggugaaagag

SEQ ID NO: 1242877 - RNA, 18 nt, Human
caaaguucagacuucaga

SEQ ID NO: 1242878 - RNA, 20 nt, Human
caccauaaguaaggucacag

SEQ ID NO: 1242879 - RNA, 23 nt, Human
caccauaaguaaggucacagcug

SEQ ID NO: 1242880 - RNA, 25 nt, Human
caucucuauccagguccucugggga

SEQ ID NO: 1242881 - RNA, 19 nt, Human
ccagcucauuauccccacc

SEQ ID NO: 1242882 - RNA, 22 nt, Human
ccugaggcaaagugggggugaa

SEQ ID NO: 1242883 - RNA, 24 nt, Human
cgcuccugaccacuggauuggcau

SEQ ID NO: 1242884 - RNA, 21 nt, Human
cuagagucucaucaucgggag

SEQ ID NO: 1242885 - RNA, 22 nt, Human
gcacacagcagacaauggucag

SEQ ID NO: 1242886 - RNA, 24 nt, Human
gcagugugauaggcagccccuucc

SEQ ID NO: 1242887 - RNA, 19 nt, Human
gccccacaccagugcacaa

SEQ ID NO: 1242888 - RNA, 18 nt, Human
gggagcacacagcagaca

SEQ ID NO: 1242889 - RNA, 19 nt, Human
uaaguaaggucacagcuga

SEQ ID NO: 1242890 - RNA, 20 nt, Human
uacacguggaacuugggcuc

SEQ ID NO: 1242891 - RNA, 21 nt, Human
ucaaaguucagacuucagauu

SEQ ID NO: 1242892 - RNA, 19 nt, Human
uccagaacuucagcuauuu

SEQ ID NO: 1242893 - RNA, 24 nt, Human
uccgccagcucauuauccccaccu

SEQ ID NO: 1242894 - RNA, 23 nt, Human
uccgugguccucuccugggcccc

SEQ ID NO: 1242895 - RNA, 23 nt, Human
ugaaagaggggccaccgagcagu

SEQ ID NO: 1242896 - RNA, 18 nt, Human
ugcaagaagagauuucac

SEQ ID NO: 1242897 - RNA, 20 nt, Human
ugccugaggcaaaguggggg

SEQ ID NO: 1242898 - RNA, 21 nt, Human
uggaugcugucaaggagagcg

SEQ ID NO: 1242899 - RNA, 24 nt, Human
uuccgccagcucauuauccccacc

SEQ ID NO: 1242900 - RNA, 24 nt, Human
uuggcaaagguaauuaccuuuccu

SEQ ID NO: 1242901 - RNA, 19 nt, Human
uuuccuggaugcugucaag

SEQ ID NO: 1242902 - RNA, 19 nt, Human
uuuuuuuuuuuuuuuuuaa

SEQ ID NO: 1242903 - RNA, 22 nt, Human
aaaacaagaaaacacaaggaca

SEQ ID NO: 1242904 - RNA, 24 nt, Human
aaaacacaaggacaaacccuacug

SEQ ID NO: 1242905 - RNA, 21 nt, Human
aaacaaaacaagaaaacacaa

SEQ ID NO: 1242906 - RNA, 22 nt, Human
aaacauggaacaugggagaaaa

SEQ ID NO: 1242907 - RNA, 21 nt, Human
aaaccaguaagacugggaaau

SEQ ID NO: 1242908 - RNA, 20 nt, Human
aaagcauggggaguggcauc

SEQ ID NO: 1242909 - RNA, 24 nt, Human
aaagugcugggauuacaggcguga

SEQ ID NO: 1242910 - RNA, 24 nt, Human
aaagugcugggauuacagguguga

SEQ ID NO: 1242911 - RNA, 20 nt, Human
aagaaugggacuagcguccu

SEQ ID NO: 1242912 - RNA, 20 nt, Human
aagacggacaagugcuuuuc

SEQ ID NO: 1242913 - RNA, 18 nt, Human
aagagacagagaaggcca

SEQ ID NO: 1242914 - RNA, 19 nt, Human
aagcccacaagaaugggac

SEQ ID NO: 1242915 - RNA, 19 nt, Human
aaguagcugggacuacagg

SEQ ID NO: 1242916 - RNA, 20 nt, Human
aaguagcugggacuacaggc

SEQ ID NO: 1242917 - RNA, 25 nt, Human
aaguagcugggacuacaggcgcccg

SEQ ID NO: 1242918 - RNA, 18 nt, Human
aagugcugggauuacagg

SEQ ID NO: 1242919 - RNA, 19 nt, Human
aagugcugggauuacaggc

SEQ ID NO: 1242920 - RNA, 19 nt, Human
aagugcugggauuacaggc

SEQ ID NO: 1242921 - RNA, 26 nt, Human
aagugcugggauuacaggcgugagcc

SEQ ID NO: 1242922 - RNA, 19 nt, Human
aagugcugggauuacaggu

SEQ ID NO: 1242923 - RNA, 26 nt, Human
aagugcugggauuacaggugugagcc

SEQ ID NO: 1242924 - RNA, 22 nt, Human
aauuuuugacauaaggcaauuu

SEQ ID NO: 1242925 - RNA, 18 nt, Human
acaaaacaagaaaacaca

SEQ ID NO: 1242926 - RNA, 19 nt, Human
acaaaacaagaaaacacaa

SEQ ID NO: 1242927 - RNA, 19 nt, Human
acacagcgagaagccaucu

SEQ ID NO: 1242928 - RNA, 20 nt, Human
acagcgagaagccaucuucu

SEQ ID NO: 1242929 - RNA, 21 nt, Human
acagcgagaagccaucuucug

SEQ ID NO: 1242930 - RNA, 18 nt, Human
acaggguuucaccauguu

SEQ ID NO: 1242931 - RNA, 19 nt, Human
acaggguuucaccauguua

SEQ ID NO: 1242932 - RNA, 20 nt, Human
acaggguuucaccauguuag

SEQ ID NO: 1242933 - RNA, 24 nt, Human
acaggguuucaccauguuagccag

SEQ ID NO: 1242934 - RNA, 25 nt, Human
acccgccucagccucccaaagugcu

SEQ ID NO: 1242935 - RNA, 21 nt, Human
accugggcagcccaugggagc

SEQ ID NO: 1242936 - RNA, 18 nt, Human
acgggguuucaccauguu

SEQ ID NO: 1242937 - RNA, 19 nt, Human
acgggguuucaccauguua

SEQ ID NO: 1242938 - RNA, 20 nt, Human
acgggguuucaccauguuag

SEQ ID NO: 1242939 - RNA, 24 nt, Human
acgggguuucaccauguuagccag

SEQ ID NO: 1242940 - RNA, 20 nt, Human
acugcaagcuccgccucccg

SEQ ID NO: 1242941 - RNA, 20 nt, Human
acugcaagcucugccucccg

SEQ ID NO: 1242942 - RNA, 20 nt, Human
agaaacagugaaggugucag

SEQ ID NO: 1242943 - RNA, 21 nt, Human
agacagcaaaucaacuccaga

SEQ ID NO: 1242944 - RNA, 22 nt, Human
agacgagggaguuaacaaggga

SEQ ID NO: 1242945 - RNA, 24 nt, Human
agcacauuaggguguauucggggg

SEQ ID NO: 1242946 - RNA, 18 nt, Human
agccaccaugcccagcac

SEQ ID NO: 1242947 - RNA, 21 nt, Human
aggaagaaaagggccucccau

SEQ ID NO: 1242948 - RNA, 23 nt, Human
aggaagaaaagggccucccauaa

SEQ ID NO: 1242949 - RNA, 26 nt, Human
aggaggaggugaaggaagagggaccc

SEQ ID NO: 1242950 - RNA, 23 nt, Human
aggaggugaaggaagauacugga

SEQ ID NO: 1242951 - RNA, 22 nt, Human
aggagguggggacuuugggagu

SEQ ID NO: 1242952 - RNA, 20 nt, Human
aggcaggcagccacccaugu

SEQ ID NO: 1242953 - RNA, 19 nt, Human
aggcaggcaggcagccacc

SEQ ID NO: 1242954 - RNA, 18 nt, Human
aggcaggcaggcaggcag

SEQ ID NO: 1242955 - RNA, 19 nt, Human
aggggucagaggcaucagg

SEQ ID NO: 1242956 - RNA, 20 nt, Human
agguggggacuuugggagug

SEQ ID NO: 1242957 - RNA, 25 nt, Human
agguuggagugcaguggcgugaucu

SEQ ID NO: 1242958 - RNA, 21 nt, Human
aguacaguggugcgaucucag

SEQ ID NO: 1242959 - RNA, 24 nt, Human
aguacaguggugcgaucucagcuc

SEQ ID NO: 1242960 - RNA, 18 nt, Human
aguagcugggacuacagg

SEQ ID NO: 1242961 - RNA, 19 nt, Human
aguagcugggacuacaggc

SEQ ID NO: 1242962 - RNA, 23 nt, Human
aguagcugggacuacaggcgccc

SEQ ID NO: 1242963 - RNA, 19 nt, Human
agugcaguggcgugaucuc

SEQ ID NO: 1242964 - RNA, 21 nt, Human
agugcaguggcgugaucucag

SEQ ID NO: 1242965 - RNA, 23 nt, Human
agugcaguggcgugaucucagcu

SEQ ID NO: 1242966 - RNA, 24 nt, Human
agugcaguggcgugaucucagcuc

SEQ ID NO: 1242967 - RNA, 18 nt, Human
agugcugggauuacaggc

SEQ ID NO: 1242968 - RNA, 24 nt, Human
aguggcgugaucucagcucacugc

SEQ ID NO: 1242969 - RNA, 22 nt, Human
aguggucuguggacugcauggc

SEQ ID NO: 1242970 - RNA, 24 nt, Human
aguggugcgaucucagcucacugc

SEQ ID NO: 1242971 - RNA, 24 nt, Human
auaaagcccacaagaaugggacuu

SEQ ID NO: 1242972 - RNA, 24 nt, Human
augauccaccuaccucagccuccc

SEQ ID NO: 1242973 - RNA, 20 nt, Human
augguguggucggagcugcu

SEQ ID NO: 1242974 - RNA, 21 nt, Human
auucuccugccucagccuccc

SEQ ID NO: 1242975 - RNA, 27 nt, Human
caaaacaagaaaacacaaggacaaacc

SEQ ID NO: 1242976 - RNA, 22 nt, Human
caaagcaccaugcaguggucug

SEQ ID NO: 1242977 - RNA, 20 nt, Human
caaagcuuuuacaacaaauc

SEQ ID NO: 1242978 - RNA, 24 nt, Human
caaagugcugggauuacaggcgug

SEQ ID NO: 1242979 - RNA, 24 nt, Human
caaagugcugggauuacaggugug

SEQ ID NO: 1242980 - RNA, 20 nt, Human
cacacagugucaggggucag

SEQ ID NO: 1242981 - RNA, 18 nt, Human
caccaugcccagcacaaa

SEQ ID NO: 1242982 - RNA, 18 nt, Human
caccauguuagccaggau

SEQ ID NO: 1242983 - RNA, 18 nt, Human
caccauguuagccaggau

SEQ ID NO: 1242984 - RNA, 22 nt, Human
caccauguuagccaggaugguc

SEQ ID NO: 1242985 - RNA, 22 nt, Human
caccauguuagccaggaugguc

SEQ ID NO: 1242986 - RNA, 24 nt, Human
caccauguuagccaggauggucuc

SEQ ID NO: 1242987 - RNA, 24 nt, Human
caccauguuagccaggauggucuc

SEQ ID NO: 1242988 - RNA, 24 nt, Human
cacccagguuggagugcaguggcg

SEQ ID NO: 1242989 - RNA, 18 nt, Human
caccccuuccaccacaug

SEQ ID NO: 1242990 - RNA, 23 nt, Human
cacccgccucagccucccaaagu

SEQ ID NO: 1242991 - RNA, 23 nt, Human
caccuaccucagccucccaaagu

SEQ ID NO: 1242992 - RNA, 23 nt, Human
cacugcaagcucugccucccggg

SEQ ID NO: 1242993 - RNA, 18 nt, Human
cagcucacugcaagcucc

SEQ ID NO: 1242994 - RNA, 22 nt, Human
caggcagccacccauguuuccg

SEQ ID NO: 1242995 - RNA, 21 nt, Human
caggcgcccgccaccgcgccc

SEQ ID NO: 1242996 - RNA, 24 nt, Human
caggguuucaccauguuagccagg

SEQ ID NO: 1242997 - RNA, 18 nt, Human
caguuaacaugacaaaaa

SEQ ID NO: 1242998 - RNA, 24 nt, Human
caugauccaccuaccucagccucc

SEQ ID NO: 1242999 - RNA, 22 nt, Human
caugccauucuccugccucagc

SEQ ID NO: 1243000 - RNA, 22 nt, Human
caugccauucuccugccucagc

SEQ ID NO: 1243001 - RNA, 21 nt, Human
ccaaagugcugggauuacagg

SEQ ID NO: 1243002 - RNA, 21 nt, Human
ccaaagugcugggauuacagg

SEQ ID NO: 1243003 - RNA, 22 nt, Human
ccaaagugcugggauuacaggc

SEQ ID NO: 1243004 - RNA, 22 nt, Human
ccaaagugcugggauuacaggc

SEQ ID NO: 1243005 - RNA, 24 nt, Human
ccaaagugcugggauuacaggcgu

SEQ ID NO: 1243006 - RNA, 24 nt, Human
ccaaagugcugggauuacaggugu

SEQ ID NO: 1243007 - RNA, 26 nt, Human
ccacccgccucagccucccaaagugc

SEQ ID NO: 1243008 - RNA, 26 nt, Human
ccaccuaccucagccucccaaagugc

SEQ ID NO: 1243009 - RNA, 22 nt, Human
ccagaagucucuguucaucuga

SEQ ID NO: 1243010 - RNA, 18 nt, Human
ccagaaugcagaagacgg

SEQ ID NO: 1243011 - RNA, 23 nt, Human
cccaaguagcugggacuacaggc

SEQ ID NO: 1243012 - RNA, 24 nt, Human
cccaaguagcugggacuacaggcg

SEQ ID NO: 1243013 - RNA, 22 nt, Human
cccaccgugccggacucucaga

SEQ ID NO: 1243014 - RNA, 20 nt, Human
ccccaccgugccggacucuc

SEQ ID NO: 1243015 - RNA, 19 nt, Human
ccccucaccccuuccacca

SEQ ID NO: 1243016 - RNA, 20 nt, Human
ccccucaccccuuccaccaa

SEQ ID NO: 1243017 - RNA, 23 nt, Human
cccgaguagcugggacuacaggc

SEQ ID NO: 1243018 - RNA, 24 nt, Human
cccgaguagcugggacuacaggcg

SEQ ID NO: 1243019 - RNA, 26 nt, Human
cccucaccccuuccaccaaucgguug

SEQ ID NO: 1243020 - RNA, 24 nt, Human
ccgccucagccucccaaagugcug

SEQ ID NO: 1243021 - RNA, 24 nt, Human
ccggugaugacaaagcaccaugca

SEQ ID NO: 1243022 - RNA, 21 nt, Human
ccuacugugaagcaguggaga

SEQ ID NO: 1243023 - RNA, 23 nt, Human
ccucccauaaguaaggccagagu

SEQ ID NO: 1243024 - RNA, 22 nt, Human
ccugaccucaugauccaccuac

SEQ ID NO: 1243025 - RNA, 20 nt, Human
ccugaccucgugauccaccc

SEQ ID NO: 1243026 - RNA, 23 nt, Human
ccugccucagccucccgaguagc

SEQ ID NO: 1243027 - RNA, 24 nt, Human
cgagaacaagcagggagaacaaau

SEQ ID NO: 1243028 - RNA, 19 nt, Human
cgccucccggguucaugcc

SEQ ID NO: 1243029 - RNA, 22 nt, Human
cgcucugucacccaggcuggag

SEQ ID NO: 1243030 - RNA, 24 nt, Human
cgugauccacccgccucagccucc

SEQ ID NO: 1243031 - RNA, 24 nt, Human
cucacugcaagcucugccucccgg

SEQ ID NO: 1243032 - RNA, 24 nt, Human
cucagccucccaaguagcugggac

SEQ ID NO: 1243033 - RNA, 24 nt, Human
cucagccucccgaguagcugggac

SEQ ID NO: 1243034 - RNA, 21 nt, Human
cucccggguucaugccauucu

SEQ ID NO: 1243035 - RNA, 21 nt, Human
cucccggguucaugccauucu

SEQ ID NO: 1243036 - RNA, 21 nt, Human
cuccuaagaggaggaggugaa

SEQ ID NO: 1243037 - RNA, 18 nt, Human
cuccugaccucaugaucc

SEQ ID NO: 1243038 - RNA, 24 nt, Human
cuccugaccucgugauccacccgc

SEQ ID NO: 1243039 - RNA, 24 nt, Human
cucgcucugucacccaggcuggag

SEQ ID NO: 1243040 - RNA, 23 nt, Human
cucugucacccaggcuggaguac

SEQ ID NO: 1243041 - RNA, 20 nt, Human
cucugucacccagguuggag

SEQ ID NO: 1243042 - RNA, 23 nt, Human
cugccucagccucccaaguagcu

SEQ ID NO: 1243043 - RNA, 23 nt, Human
cugccucagccucccgaguagcu

SEQ ID NO: 1243044 - RNA, 18 nt, Human
cugucacccagguuggag

SEQ ID NO: 1243045 - RNA, 23 nt, Human
cuguggacugcauggcucugucc

SEQ ID NO: 1243046 - RNA, 21 nt, Human
cugugggucaggaagccgcau

SEQ ID NO: 1243047 - RNA, 22 nt, Human
cuuccaccacaugaggacacag

SEQ ID NO: 1243048 - RNA, 24 nt, Human
cuuucuuuuuuuguuugagacgga

SEQ ID NO: 1243049 - RNA, 21 nt, Human
gaaaggagaggagggagagga

SEQ ID NO: 1243050 - RNA, 20 nt, Human
gaacaugggagaaaacaagu

SEQ ID NO: 1243051 - RNA, 18 nt, Human
gaagaaaagggccuccca

SEQ ID NO: 1243052 - RNA, 20 nt, Human
gaagaagggacaaaccaccu

SEQ ID NO: 1243053 - RNA, 20 nt, Human
gacacagcgagaagccaucu

SEQ ID NO: 1243054 - RNA, 22 nt, Human
gaccucaugauccaccuaccuc

SEQ ID NO: 1243055 - RNA, 22 nt, Human
gaccucgugauccacccgccuc

SEQ ID NO: 1243056 - RNA, 24 nt, Human
gaccucgugauccacccgccucag

SEQ ID NO: 1243057 - RNA, 24 nt, Human
gacuacaggcgcccgccaccaugc

SEQ ID NO: 1243058 - RNA, 27 nt, Human
gagaacaagcagggagaaccgguaccc

SEQ ID NO: 1243059 - RNA, 24 nt, Human
gagacgggguuucaccauguuagc

SEQ ID NO: 1243060 - RNA, 18 nt, Human
gagcaggcggagaggggc

SEQ ID NO: 1243061 - RNA, 21 nt, Human
gaggaaaagaaagcaugggga

SEQ ID NO: 1243062 - RNA, 25 nt, Human
gaggcaggcaggcaggcaggcagcc

SEQ ID NO: 1243063 - RNA, 22 nt, Human
gagguggcagugugaggauggu

SEQ ID NO: 1243064 - RNA, 19 nt, Human
gagguggggacuuugggag

SEQ ID NO: 1243065 - RNA, 19 nt, Human
gagugauuagguggugaga

SEQ ID NO: 1243066 - RNA, 19 nt, Human
gauacuggaagaggaaagg

SEQ ID NO: 1243067 - RNA, 18 nt, Human
gauuacaggcgugagcca

SEQ ID NO: 1243068 - RNA, 21 nt, Human
gauuacaggcgugagccacca

SEQ ID NO: 1243069 - RNA, 22 nt, Human
gauuacaggcgugagccaccau

SEQ ID NO: 1243070 - RNA, 18 nt, Human
gauuacaggugugagcca

SEQ ID NO: 1243071 - RNA, 21 nt, Human
gauuacaggugugagccacug

SEQ ID NO: 1243072 - RNA, 24 nt, Human
gauuacaggugugagccacugugc

SEQ ID NO: 1243073 - RNA, 19 nt, Human
gcaaaucaacuccagaagu

SEQ ID NO: 1243074 - RNA, 20 nt, Human
gcagaagacggacaagugcu

SEQ ID NO: 1243075 - RNA, 24 nt, Human
gcccagcuaauuuuuuuguauuuu

SEQ ID NO: 1243076 - RNA, 23 nt, Human
gccucagccucccaaagugcugg

SEQ ID NO: 1243077 - RNA, 20 nt, Human
gccucagccucccaaguagc

SEQ ID NO: 1243078 - RNA, 25 nt, Human
gccucccggguucaugccauucucc

SEQ ID NO: 1243079 - RNA, 25 nt, Human
gccucccggguucaugccauucucc

SEQ ID NO: 1243080 - RNA, 19 nt, Human
gccugggcaccugggcagc

SEQ ID NO: 1243081 - RNA, 19 nt, Human
gcucugucacccagguugg

SEQ ID NO: 1243082 - RNA, 22 nt, Human
ggaaaggagaggagggagagga

SEQ ID NO: 1243083 - RNA, 21 nt, Human
ggaagaggaaaggagaggagg

SEQ ID NO: 1243084 - RNA, 18 nt, Human
ggagaggggaaaggagga

SEQ ID NO: 1243085 - RNA, 21 nt, Human
ggaggaaaagaaagcaugggg

SEQ ID NO: 1243086 - RNA, 24 nt, Human
ggagguggcagugugaggauggug

SEQ ID NO: 1243087 - RNA, 24 nt, Human
ggauggucucgaucuccugaccuc

SEQ ID NO: 1243088 - RNA, 24 nt, Human
ggauuacaggcgugagccaccaug

SEQ ID NO: 1243089 - RNA, 18 nt, Human
gggaagagacagagaagg

SEQ ID NO: 1243090 - RNA, 21 nt, Human
gggagugauuagguggugaga

SEQ ID NO: 1243091 - RNA, 23 nt, Human
ggggacuuugggagugauuaggu

SEQ ID NO: 1243092 - RNA, 23 nt, Human
gggguuucaccauguuagccagg

SEQ ID NO: 1243093 - RNA, 22 nt, Human
ggguuucaccauguuagccagg

SEQ ID NO: 1243094 - RNA, 20 nt, Human
ggucucgaucuccugaccuc

SEQ ID NO: 1243095 - RNA, 22 nt, Human
gguuggagugcaguggcgugau

SEQ ID NO: 1243096 - RNA, 24 nt, Human
gguuucaccauguuagccaggaug

SEQ ID NO: 1243097 - RNA, 24 nt, Human
gguuucaccauguuagccaggaug

SEQ ID NO: 1243098 - RNA, 23 nt, Human
guagagacgggguuucaccaugu

SEQ ID NO: 1243099 - RNA, 27 nt, Human
guauguggcaguguuuccucuuaguag

SEQ ID NO: 1243100 - RNA, 24 nt, Human
gugauccacccgccucagccuccc

SEQ ID NO: 1243101 - RNA, 24 nt, Human
guuucgcucugucacccagguugg

SEQ ID NO: 1243102 - RNA, 23 nt, Human
uaacaugacaaaaaaaauguuua

SEQ ID NO: 1243103 - RNA, 22 nt, Human
uaagaaccccacacaaauguca

SEQ ID NO: 1243104 - RNA, 24 nt, Human
uaauuuuuugcauuuuuaguagag

SEQ ID NO: 1243105 - RNA, 25 nt, Human
uaauuuuuugcauuuuuaguagaga

SEQ ID NO: 1243106 - RNA, 20 nt, Human
uacaacaaaucucuuuugca

SEQ ID NO: 1243107 - RNA, 21 nt, Human
uacaacaaaucucuuuugcau

SEQ ID NO: 1243108 - RNA, 24 nt, Human
uacaggcgugagccaccaugccca

SEQ ID NO: 1243109 - RNA, 23 nt, Human
uacaggugugagccacugugccc

SEQ ID NO: 1243110 - RNA, 24 nt, Human
uacaggugugagccacugugccca

SEQ ID NO: 1243111 - RNA, 24 nt, Human
uaccucagccucccaaagugcugg

SEQ ID NO: 1243112 - RNA, 22 nt, Human
uagagacaggguuucaccaugu

SEQ ID NO: 1243113 - RNA, 22 nt, Human
uagagacgggguuucaccaugu

SEQ ID NO: 1243114 - RNA, 18 nt, Human
uaggagguggggacuuug

SEQ ID NO: 1243115 - RNA, 24 nt, Human
uaguagagacaggguuucaccaug

SEQ ID NO: 1243116 - RNA, 26 nt, Human
uaguagagacaggguuucaccauguu

SEQ ID NO: 1243117 - RNA, 24 nt, Human
uaguagagacgggguuucaccaug

SEQ ID NO: 1243118 - RNA, 26 nt, Human
uaguagagacgggguuucaccauguu

SEQ ID NO: 1243119 - RNA, 19 nt, Human
uauuaguuaagaguccuca

SEQ ID NO: 1243120 - RNA, 24 nt, Human
ucaccauguuagccaggauggucu

SEQ ID NO: 1243121 - RNA, 24 nt, Human
ucaccauguuagccaggauggucu

SEQ ID NO: 1243122 - RNA, 22 nt, Human
ucacccagguuggagugcagug

SEQ ID NO: 1243123 - RNA, 25 nt, Human
ucaccccuuccaccacaugaggacc

SEQ ID NO: 1243124 - RNA, 18 nt, Human
ucacugcaagcuccgccu

SEQ ID NO: 1243125 - RNA, 19 nt, Human
ucacugcaagcuccgccuc

SEQ ID NO: 1243126 - RNA, 24 nt, Human
ucacugcaagcuccgccucccggg

SEQ ID NO: 1243127 - RNA, 18 nt, Human
ucacugcaagcucugccu

SEQ ID NO: 1243128 - RNA, 18 nt, Human
ucacugcaagcucugccu

SEQ ID NO: 1243129 - RNA, 24 nt, Human
ucacugcaagcucugccucccggg

SEQ ID NO: 1243130 - RNA, 18 nt, Human
ucagccucccaaagugcu

SEQ ID NO: 1243131 - RNA, 20 nt, Human
ucagccucccaaguagcugg

SEQ ID NO: 1243132 - RNA, 23 nt, Human
ucagccucccgaguagcugggac

SEQ ID NO: 1243133 - RNA, 18 nt, Human
ucagggcagauauccaaa

SEQ ID NO: 1243134 - RNA, 18 nt, Human
ucaugccauucuccugcc

SEQ ID NO: 1243135 - RNA, 21 nt, Human
uccacccgccucagccuccca

SEQ ID NO: 1243136 - RNA, 22 nt, Human
uccagaaaugaaacaagcacau

SEQ ID NO: 1243137 - RNA, 23 nt, Human
ucccaaagugcugggauuacagg

SEQ ID NO: 1243138 - RNA, 24 nt, Human
ucccaaagugcugggauuacaggc

SEQ ID NO: 1243139 - RNA, 24 nt, Human
ucccaaguagcugggacuacaggc

SEQ ID NO: 1243140 - RNA, 24 nt, Human
ucccgaguagcugggacuacaggc

SEQ ID NO: 1243141 - RNA, 21 nt, Human
ucccggguucaugccauucuc

SEQ ID NO: 1243142 - RNA, 21 nt, Human
ucccggguucaugccauucuc

SEQ ID NO: 1243143 - RNA, 24 nt, Human
ucccggguucaugccauucuccug

SEQ ID NO: 1243144 - RNA, 24 nt, Human
ucccggguucaugccauucuccug

SEQ ID NO: 1243145 - RNA, 24 nt, Human
ucgcucugucacccaggcuggagu

SEQ ID NO: 1243146 - RNA, 22 nt, Human
ucgcucugucacccagguugga

SEQ ID NO: 1243147 - RNA, 24 nt, Human
ucgcucugucacccagguuggagu

SEQ ID NO: 1243148 - RNA, 19 nt, Human
ucuaucagagaggaugagu

SEQ ID NO: 1243149 - RNA, 26 nt, Human
ucuccugccucagccucccaaguagc

SEQ ID NO: 1243150 - RNA, 24 nt, Human
ucuccugccucagccucccgagua

SEQ ID NO: 1243151 - RNA, 19 nt, Human
ucucgcucugucacccagg

SEQ ID NO: 1243152 - RNA, 23 nt, Human
ucucgcucugucacccaggcugg

SEQ ID NO: 1243153 - RNA, 24 nt, Human
ucucgcucugucacccaggcugga

SEQ ID NO: 1243154 - RNA, 25 nt, Human
ucucgcucugucacccaggcuggag

SEQ ID NO: 1243155 - RNA, 26 nt, Human
ucucgcucugucacccaggcuggagu

SEQ ID NO: 1243156 - RNA, 18 nt, Human
ucugucacccaggcugga

SEQ ID NO: 1243157 - RNA, 24 nt, Human
ucugucacccaggcuggaguacag

SEQ ID NO: 1243158 - RNA, 24 nt, Human
ucugucacccagguuggagugcag

SEQ ID NO: 1243159 - RNA, 18 nt, Human
ugaacuauggaaaaacau

SEQ ID NO: 1243160 - RNA, 20 nt, Human
ugacaguagcccuguggacu

SEQ ID NO: 1243161 - RNA, 23 nt, Human
ugaccucaugauccaccuaccuc

SEQ ID NO: 1243162 - RNA, 22 nt, Human
ugagacggagucucgcucuguc

SEQ ID NO: 1243163 - RNA, 24 nt, Human
ugauccaccuaccucagccuccca

SEQ ID NO: 1243164 - RNA, 22 nt, Human
ugcaguggcgugaucucagcuc

SEQ ID NO: 1243165 - RNA, 22 nt, Human
ugcauuauuuucccaaacaaaa

SEQ ID NO: 1243166 - RNA, 23 nt, Human
ugcauuauuuucccaaacaaaac

SEQ ID NO: 1243167 - RNA, 24 nt, Human
ugccucagccucccaaguagcugg

SEQ ID NO: 1243168 - RNA, 24 nt, Human
ugccucagccucccgaguagcugg

SEQ ID NO: 1243169 - RNA, 19 nt, Human
ugccucccggguucaugcc

SEQ ID NO: 1243170 - RNA, 24 nt, Human
ugcugggauuacaggcgugagcca

SEQ ID NO: 1243171 - RNA, 24 nt, Human
ugcugggauuacaggugugagcca

SEQ ID NO: 1243172 - RNA, 23 nt, Human
uggaagaggaaaggagaggaggg

SEQ ID NO: 1243173 - RNA, 19 nt, Human
uggaguacaguggugcgau

SEQ ID NO: 1243174 - RNA, 19 nt, Human
uggagugcaguggcgugau

SEQ ID NO: 1243175 - RNA, 24 nt, Human
uggagugcaguggcgugaucucag

SEQ ID NO: 1243176 - RNA, 24 nt, Human
uggcgugaucucagcucacugcaa

SEQ ID NO: 1243177 - RNA, 21 nt, Human
ugggacuacaggcgcccgcca

SEQ ID NO: 1243178 - RNA, 21 nt, Human
ugggacuacaggcgcccgcca

SEQ ID NO: 1243179 - RNA, 22 nt, Human
ugggacuacaggcgcccgccac

SEQ ID NO: 1243180 - RNA, 22 nt, Human
ugggacuacaggcgcccgccac

SEQ ID NO: 1243181 - RNA, 23 nt, Human
ugggacuacaggcgcccgccacc

SEQ ID NO: 1243182 - RNA, 24 nt, Human
ugggacuacaggcgcccgccacca

SEQ ID NO: 1243183 - RNA, 25 nt, Human
ugggacuacaggcgcccgccaccau

SEQ ID NO: 1243184 - RNA, 24 nt, Human
ugggacuacaggcgcccgccaccg

SEQ ID NO: 1243185 - RNA, 23 nt, Human
ugggagaaaacaaguauguggca

SEQ ID NO: 1243186 - RNA, 18 nt, Human
ugggauuacaggcgugag

SEQ ID NO: 1243187 - RNA, 22 nt, Human
ugggauuacaggcgugagccac

SEQ ID NO: 1243188 - RNA, 23 nt, Human
ugggauuacaggcgugagccacc

SEQ ID NO: 1243189 - RNA, 24 nt, Human
ugggauuacaggcgugagccacca

SEQ ID NO: 1243190 - RNA, 25 nt, Human
ugggauuacaggcgugagccaccau

SEQ ID NO: 1243191 - RNA, 18 nt, Human
ugggauuacaggugugag

SEQ ID NO: 1243192 - RNA, 21 nt, Human
ugggauuacaggugugagcca

SEQ ID NO: 1243193 - RNA, 22 nt, Human
ugggauuacaggugugagccac

SEQ ID NO: 1243194 - RNA, 22 nt, Human
ugggauuacaggugugagccac

SEQ ID NO: 1243195 - RNA, 22 nt, Human
ugggauuacaggugugagccac

SEQ ID NO: 1243196 - RNA, 24 nt, Human
ugggauuacaggugugagccacug

SEQ ID NO: 1243197 - RNA, 19 nt, Human
ugggcagcccaugggagca

SEQ ID NO: 1243198 - RNA, 24 nt, Human
uggugcgaucucagcucacugcaa

SEQ ID NO: 1243199 - RNA, 23 nt, Human
ugguguuaggagguggggacuuu

SEQ ID NO: 1243200 - RNA, 21 nt, Human
uguauuuuuaguagagacggg

SEQ ID NO: 1243201 - RNA, 23 nt, Human
uguggcaguguuucagagacagg

SEQ ID NO: 1243202 - RNA, 24 nt, Human
uuaacaagggaagagacagagaag

SEQ ID NO: 1243203 - RNA, 23 nt, Human
uuaagaguccucaaaaauucuuu

SEQ ID NO: 1243204 - RNA, 24 nt, Human
uuaguagagacaggguuucaccau

SEQ ID NO: 1243205 - RNA, 18 nt, Human
uuaguagagacgggguuu

SEQ ID NO: 1243206 - RNA, 22 nt, Human
uuaguagagacgggguuucacc

SEQ ID NO: 1243207 - RNA, 24 nt, Human
uuaguagagacgggguuucaccau

SEQ ID NO: 1243208 - RNA, 21 nt, Human
uucagagagaccccucacccc

SEQ ID NO: 1243209 - RNA, 19 nt, Human
uucaugccauucuccugcc

SEQ ID NO: 1243210 - RNA, 19 nt, Human
uucaugccauucuccugcc

SEQ ID NO: 1243211 - RNA, 21 nt, Human
uucccaaacaaaacaagaaaa

SEQ ID NO: 1243212 - RNA, 24 nt, Human
uuccuuuagaacucccugaucaua

SEQ ID NO: 1243213 - RNA, 24 nt, Human
uucucacauuuuuaagaaccccac

SEQ ID NO: 1243214 - RNA, 24 nt, Human
uuggagugcaguggcgugaucuca

SEQ ID NO: 1243215 - RNA, 23 nt, Human
uuguauuuuuaguagagacgggg

SEQ ID NO: 1243216 - RNA, 19 nt, Human
uuucaccauguuagccagg

SEQ ID NO: 1243217 - RNA, 19 nt, Human
uuucaccauguuagccagg

SEQ ID NO: 1243218 - RNA, 20 nt, Human
uuucaccauguuagccagga

SEQ ID NO: 1243219 - RNA, 20 nt, Human
uuucaccauguuagccagga

SEQ ID NO: 1243220 - RNA, 19 nt, Human
uuucgcucugucacccagg

SEQ ID NO: 1243221 - RNA, 23 nt, Human
uuucgcucugucacccagguugg

SEQ ID NO: 1243222 - RNA, 24 nt, Human
uuucgcucugucacccagguugga

SEQ ID NO: 1243223 - RNA, 21 nt, Human
uuuuguauuuuuaguagagac

SEQ ID NO: 1243224 - RNA, 24 nt, Human
uuuuuaguagagacaggguuucac

SEQ ID NO: 1243225 - RNA, 24 nt, Human
uuuuuaguagagacgggguuucac

SEQ ID NO: 1243226 - RNA, 21 nt, Human
uuuuugcauuuuuaguagaga

SEQ ID NO: 1243227 - RNA, 21 nt, Human
uuuuuguauuuuuaguagaga

SEQ ID NO: 1243228 - RNA, 24 nt, Human
uuuuuugcauuuuuaguagagaca

SEQ ID NO: 1243229 - RNA, 21 nt, Human
uuuuuuguauuuuuaguagag

SEQ ID NO: 1243230 - RNA, 19 nt, Human
aagauacucucuguuuucu

SEQ ID NO: 1243231 - RNA, 21 nt, Human
aauuuuuauacaaagaaaagg

SEQ ID NO: 1243232 - RNA, 18 nt, Human
accugggcuugcugcugc

SEQ ID NO: 1243233 - RNA, 21 nt, Human
agaaaagggagaggaagagaa

SEQ ID NO: 1243234 - RNA, 19 nt, Human
agagagcuuugccaccagu

SEQ ID NO: 1243235 - RNA, 18 nt, Human
augggcucaauauaucau

SEQ ID NO: 1243236 - RNA, 22 nt, Human
cagcaggaaggagcuaguuacc

SEQ ID NO: 1243237 - RNA, 20 nt, Human
cauguaaacaauugauauga

SEQ ID NO: 1243238 - RNA, 23 nt, Human
ccaagaacaugcacaucuucacc

SEQ ID NO: 1243239 - RNA, 20 nt, Human
cugggcuugcugcugcccca

SEQ ID NO: 1243240 - RNA, 19 nt, Human
cuuucccucucucucucca

SEQ ID NO: 1243241 - RNA, 19 nt, Human
ucuccaggugaaguuugug

SEQ ID NO: 1243242 - RNA, 21 nt, Human
ugauaugagaguuuuucuuga

SEQ ID NO: 1243243 - RNA, 23 nt, Human
ugauuacagcaggaaggagcuag

SEQ ID NO: 1243244 - RNA, 23 nt, Human
uguuauuaauacuuucuccaaga

SEQ ID NO: 1243245 - RNA, 20 nt, Human
uugcugcugccccacguagu

SEQ ID NO: 1243246 - RNA, 19 nt, Human
aacagagugaaaccucauc

SEQ ID NO: 1243247 - RNA, 20 nt, Human
aacagagugaaaccucaucu

SEQ ID NO: 1243248 - RNA, 21 nt, Human
aacagagugaaaccucaucuc

SEQ ID NO: 1243249 - RNA, 19 nt, Human
aagacacacacacacacac

SEQ ID NO: 1243250 - RNA, 24 nt, Human
aagcuuguuuuccugcaacuggau

SEQ ID NO: 1243251 - RNA, 24 nt, Human
aaucacuugaacccaggaggcaga

SEQ ID NO: 1243252 - RNA, 24 nt, Human
aauugcuugagccuggcaggugga

SEQ ID NO: 1243253 - RNA, 18 nt, Human
acagagugaaaccucauc

SEQ ID NO: 1243254 - RNA, 18 nt, Human
acagagugagacccuguc

SEQ ID NO: 1243255 - RNA, 20 nt, Human
acagagugagacccugucuc

SEQ ID NO: 1243256 - RNA, 24 nt, Human
acagagugagacccugucucaaga

SEQ ID NO: 1243257 - RNA, 18 nt, Human
acagggugagaccccauc

SEQ ID NO: 1243258 - RNA, 19 nt, Human
acagggugagaccccaucu

SEQ ID NO: 1243259 - RNA, 20 nt, Human
acagggugagaccccaucuc

SEQ ID NO: 1243260 - RNA, 25 nt, Human
accacaaauggaagaaaggccauga

SEQ ID NO: 1243261 - RNA, 19 nt, Human
accacuguacuccagccug

SEQ ID NO: 1243262 - RNA, 24 nt, Human
accacuguacuccagccuggguga

SEQ ID NO: 1243263 - RNA, 20 nt, Human
accaguccuagcuacucagg

SEQ ID NO: 1243264 - RNA, 22 nt, Human
acccugucucaagacacacaca

SEQ ID NO: 1243265 - RNA, 18 nt, Human
acuacacuccagccuugg

SEQ ID NO: 1243266 - RNA, 18 nt, Human
acuacacuccagccuugg

SEQ ID NO: 1243267 - RNA, 19 nt, Human
acuacacuccagccuugga

SEQ ID NO: 1243268 - RNA, 25 nt, Human
acuacacuccagccuuggacaacag

SEQ ID NO: 1243269 - RNA, 19 nt, Human
acuacacuccagccuuggg

SEQ ID NO: 1243270 - RNA, 24 nt, Human
acuacuguagucaagccuggguga

SEQ ID NO: 1243271 - RNA, 19 nt, Human
acuccagccugggugacag

SEQ ID NO: 1243272 - RNA, 24 nt, Human
acuccagccugggugacagaguga

SEQ ID NO: 1243273 - RNA, 21 nt, Human
acuggauugugagggccagag

SEQ ID NO: 1243274 - RNA, 24 nt, Human
acuguacuccagccugggugacag

SEQ ID NO: 1243275 - RNA, 26 nt, Human
acuguacuccagccugggugacagag

SEQ ID NO: 1243276 - RNA, 20 nt, Human
acuguacuccagccuguggg

SEQ ID NO: 1243277 - RNA, 22 nt, Human
acuguagucaagccugggugac

SEQ ID NO: 1243278 - RNA, 24 nt, Human
acuguagucaagccugggugacag

SEQ ID NO: 1243279 - RNA, 23 nt, Human
agaaguugggcaaaaggcugauu

SEQ ID NO: 1243280 - RNA, 25 nt, Human
agacagaaguugggcaaaagggacc

SEQ ID NO: 1243281 - RNA, 20 nt, Human
agacguugcagugagccaag

SEQ ID NO: 1243282 - RNA, 24 nt, Human
agcaccuguagucucagccacgug

SEQ ID NO: 1243283 - RNA, 23 nt, Human
agcagggcaugguggcaggcgcc

SEQ ID NO: 1243284 - RNA, 24 nt, Human
agccuggaugacagagcaagacuc

SEQ ID NO: 1243285 - RNA, 22 nt, Human
agccugggugacagagugagac

SEQ ID NO: 1243286 - RNA, 22 nt, Human
agccugggugacagggugagac

SEQ ID NO: 1243287 - RNA, 23 nt, Human
agccuguggucccagcuacuggg

SEQ ID NO: 1243288 - RNA, 24 nt, Human
agccuguggucccagcuacuggga

SEQ ID NO: 1243289 - RNA, 18 nt, Human
aggaggcucagguaggag

SEQ ID NO: 1243290 - RNA, 23 nt, Human
aggaguucaagaccagccugagc

SEQ ID NO: 1243291 - RNA, 19 nt, Human
aggcacuaggccuggaaau

SEQ ID NO: 1243292 - RNA, 24 nt, Human
aggcagacguugcagugagccaag

SEQ ID NO: 1243293 - RNA, 18 nt, Human
aggcaggagaaucacuug

SEQ ID NO: 1243294 - RNA, 23 nt, Human
aggcaggagaaucacuugaaccc

SEQ ID NO: 1243295 - RNA, 24 nt, Human
aggcaggagaaucacuugaaccca

SEQ ID NO: 1243296 - RNA, 22 nt, Human
aggcaggagaauugcuugagcc

SEQ ID NO: 1243297 - RNA, 24 nt, Human
aggcaggagaauugcuugagccug

SEQ ID NO: 1243298 - RNA, 25 nt, Human
aggcaggagcuucgacugaggaugc

SEQ ID NO: 1243299 - RNA, 19 nt, Human
aggcaggaggagcugggcc

SEQ ID NO: 1243300 - RNA, 21 nt, Human
aggcaggaggagcugggccug

SEQ ID NO: 1243301 - RNA, 19 nt, Human
aggcucagguaggaggauc

SEQ ID NO: 1243302 - RNA, 24 nt, Human
aggcugaggcaggagaaucacuug

SEQ ID NO: 1243303 - RNA, 21 nt, Human
aggcugaggcaggagaauugc

SEQ ID NO: 1243304 - RNA, 24 nt, Human
aggcugaggcaggagaauugcuug

SEQ ID NO: 1243305 - RNA, 19 nt, Human
agguggaggcugcagugag

SEQ ID NO: 1243306 - RNA, 20 nt, Human
agguggaggcugcagugagc

SEQ ID NO: 1243307 - RNA, 20 nt, Human
agguugagaugggaggaucg

SEQ ID NO: 1243308 - RNA, 19 nt, Human
aguaauuuugaggucacuu

SEQ ID NO: 1243309 - RNA, 20 nt, Human
auaauuggaccacugaacuc

SEQ ID NO: 1243310 - RNA, 21 nt, Human
auaccuauaaucccagcccac

SEQ ID NO: 1243311 - RNA, 22 nt, Human
aucaaguuguaaaucuucaccu

SEQ ID NO: 1243312 - RNA, 24 nt, Human
aucucaccacuguacuccagccug

SEQ ID NO: 1243313 - RNA, 22 nt, Human
aucucuacaaaaaauuagaaaa

SEQ ID NO: 1243314 - RNA, 19 nt, Human
aucugggucuggagggucc

SEQ ID NO: 1243315 - RNA, 19 nt, Human
augccacuguacuccagcc

SEQ ID NO: 1243316 - RNA, 18 nt, Human
caacuggauggucccacg

SEQ ID NO: 1243317 - RNA, 22 nt, Human
caagaccacgccacugccagcc

SEQ ID NO: 1243318 - RNA, 18 nt, Human
caagggaaucuucagcuc

SEQ ID NO: 1243319 - RNA, 21 nt, Human
caccccuaagcucgcaggaca

SEQ ID NO: 1243320 - RNA, 19 nt, Human
caccuguagucucagccac

SEQ ID NO: 1243321 - RNA, 24 nt, Human
caccuguagucucagccacguggg

SEQ ID NO: 1243322 - RNA, 21 nt, Human
cacuaggccuggaaauggccc

SEQ ID NO: 1243323 - RNA, 24 nt, Human
cacugccagccuggaugacagagc

SEQ ID NO: 1243324 - RNA, 19 nt, Human
cacuguacuccagccuggg

SEQ ID NO: 1243325 - RNA, 19 nt, Human
cacuguacuccagccuggg

SEQ ID NO: 1243326 - RNA, 19 nt, Human
cacuguacuccagccuggg

SEQ ID NO: 1243327 - RNA, 21 nt, Human
cacuguacuccagccugggug

SEQ ID NO: 1243328 - RNA, 22 nt, Human
cacuguacuccagccuggguga

SEQ ID NO: 1243329 - RNA, 24 nt, Human
cacuguacuccagccugggugaca

SEQ ID NO: 1243330 - RNA, 25 nt, Human
cacuguacuccagccugggugacag

SEQ ID NO: 1243331 - RNA, 20 nt, Human
cacuguacuccagccugugg

SEQ ID NO: 1243332 - RNA, 21 nt, Human
cacuguacuccagccuguggu

SEQ ID NO: 1243333 - RNA, 19 nt, Human
cagcccacugggagacuag

SEQ ID NO: 1243334 - RNA, 24 nt, Human
cagcuacucaggaggcugaggcag

SEQ ID NO: 1243335 - RNA, 24 nt, Human
cagcuacucgggaggcugaggcag

SEQ ID NO: 1243336 - RNA, 18 nt, Human
cagcugaguuucgucucc

SEQ ID NO: 1243337 - RNA, 24 nt, Human
caggaggcugaggcaggagaauca

SEQ ID NO: 1243338 - RNA, 20 nt, Human
cagggcaugguggcaggcgg

SEQ ID NO: 1243339 - RNA, 21 nt, Human
cagggugagaccccaucuccu

SEQ ID NO: 1243340 - RNA, 22 nt, Human
caugguggcaggcgccuguagu

SEQ ID NO: 1243341 - RNA, 20 nt, Human
ccaagaccacgccacugcca

SEQ ID NO: 1243342 - RNA, 19 nt, Human
ccacugaacuccauccuga

SEQ ID NO: 1243343 - RNA, 18 nt, Human
ccacuguacuccagccug

SEQ ID NO: 1243344 - RNA, 20 nt, Human
ccacuguacuccagccuggg

SEQ ID NO: 1243345 - RNA, 20 nt, Human
ccacuguacuccagccuggg

SEQ ID NO: 1243346 - RNA, 21 nt, Human
ccacuguacuccagccugggu

SEQ ID NO: 1243347 - RNA, 21 nt, Human
ccacuguacuccagccugggu

SEQ ID NO: 1243348 - RNA, 24 nt, Human
ccacuguacuccagccugggugac

SEQ ID NO: 1243349 - RNA, 19 nt, Human
ccacuguacuccagccugu

SEQ ID NO: 1243350 - RNA, 21 nt, Human
ccacuguacuccagccugugg

SEQ ID NO: 1243351 - RNA, 21 nt, Human
ccacuguacuccagccugugg

SEQ ID NO: 1243352 - RNA, 22 nt, Human
ccacuguacuccagccuguggu

SEQ ID NO: 1243353 - RNA, 18 nt, Human
ccacugugaggcagaggc

SEQ ID NO: 1243354 - RNA, 19 nt, Human
ccagcacugggaaacuagg

SEQ ID NO: 1243355 - RNA, 21 nt, Human
ccaguccuagcuacucaggag

SEQ ID NO: 1243356 - RNA, 25 nt, Human
cccgcagagccucggaagccacuga

SEQ ID NO: 1243357 - RNA, 24 nt, Human
ccgugaggccaggaguucaagacc

SEQ ID NO: 1243358 - RNA, 20 nt, Human
ccucauuuuccguuccccag

SEQ ID NO: 1243359 - RNA, 19 nt, Human
ccucggaagccacugaccc

SEQ ID NO: 1243360 - RNA, 22 nt, Human
ccuggaugacagagcaagacuc

SEQ ID NO: 1243361 - RNA, 24 nt, Human
ccuggcaugaggcgugcccagagg

SEQ ID NO: 1243362 - RNA, 20 nt, Human
ccugggugacagagugagac

SEQ ID NO: 1243363 - RNA, 20 nt, Human
ccugggugacagggugagac

SEQ ID NO: 1243364 - RNA, 19 nt, Human
ccuguagucccagcuacuc

SEQ ID NO: 1243365 - RNA, 21 nt, Human
ccuguagucccagcuacucag

SEQ ID NO: 1243366 - RNA, 22 nt, Human
ccuguagucccagcuacucagg

SEQ ID NO: 1243367 - RNA, 18 nt, Human
ccuguggucccagcuacu

SEQ ID NO: 1243368 - RNA, 24 nt, Human
ccuguggucccagcuacugggaag

SEQ ID NO: 1243369 - RNA, 18 nt, Human
cgaaaggauccaucccau

SEQ ID NO: 1243370 - RNA, 19 nt, Human
cgcaagaaccacaaaugga

SEQ ID NO: 1243371 - RNA, 24 nt, Human
cgccuguagucccagcuacucagg

SEQ ID NO: 1243372 - RNA, 22 nt, Human
cuacuacacuccagccuuggac

SEQ ID NO: 1243373 - RNA, 24 nt, Human
cuacuguagucaagccugggugac

SEQ ID NO: 1243374 - RNA, 21 nt, Human
cucccgcagagccucggaagc

SEQ ID NO: 1243375 - RNA, 18 nt, Human
cucguuggucuuugucuc

SEQ ID NO: 1243376 - RNA, 18 nt, Human
cugaguuucgucuccucc

SEQ ID NO: 1243377 - RNA, 24 nt, Human
cugcuugagccugggaguuugagg

SEQ ID NO: 1243378 - RNA, 23 nt, Human
cuggaagguugaggcugcaguca

SEQ ID NO: 1243379 - RNA, 18 nt, Human
cuggcagguggaggcugc

SEQ ID NO: 1243380 - RNA, 21 nt, Human
cuggcaugaggcgugcccaga

SEQ ID NO: 1243381 - RNA, 21 nt, Human
cuggccuucagaccugagccu

SEQ ID NO: 1243382 - RNA, 18 nt, Human
cuguaaucccagcuacuc

SEQ ID NO: 1243383 - RNA, 21 nt, Human
cuguaaucccagcuacucggg

SEQ ID NO: 1243384 - RNA, 19 nt, Human
gaaacggauucucccgcag

SEQ ID NO: 1243385 - RNA, 22 nt, Human
gaagcuucucucacucuccaga

SEQ ID NO: 1243386 - RNA, 19 nt, Human
gaauccacguauacgaaaa

SEQ ID NO: 1243387 - RNA, 18 nt, Human
gacagaagcaggaaacuc

SEQ ID NO: 1243388 - RNA, 24 nt, Human
gacagagugagacccugucucaag

SEQ ID NO: 1243389 - RNA, 18 nt, Human
gacccugucucaagacac

SEQ ID NO: 1243390 - RNA, 18 nt, Human
gacugcuugagccuggga

SEQ ID NO: 1243391 - RNA, 23 nt, Human
gagaaucacuugaacccaggagg

SEQ ID NO: 1243392 - RNA, 23 nt, Human
gaggaucacuugagcccaggaag

SEQ ID NO: 1243393 - RNA, 21 nt, Human
gaggcucagguaggaggaucc

SEQ ID NO: 1243394 - RNA, 21 nt, Human
gagugacagggcaagguccug

SEQ ID NO: 1243395 - RNA, 21 nt, Human
gaguuucgucuccuccacugg

SEQ ID NO: 1243396 - RNA, 24 nt, Human
gaucccgugaggccaggaguucaa

SEQ ID NO: 1243397 - RNA, 24 nt, Human
gauccuuagcccaggaguucaagg

SEQ ID NO: 1243398 - RNA, 23 nt, Human
gcagagccucggaagccacugac

SEQ ID NO: 1243399 - RNA, 22 nt, Human
gcaggagaaucacuugaaccca

SEQ ID NO: 1243400 - RNA, 23 nt, Human
gcagggcaugguggcaggcgccu

SEQ ID NO: 1243401 - RNA, 22 nt, Human
gccaagaccacgccacugccag

SEQ ID NO: 1243402 - RNA, 21 nt, Human
gccaccuccacggccaggaaa

SEQ ID NO: 1243403 - RNA, 22 nt, Human
gccacuguacuccagccugugg

SEQ ID NO: 1243404 - RNA, 24 nt, Human
gcccaggaguucaaggcugcagug

SEQ ID NO: 1243405 - RNA, 20 nt, Human
gcccugugguuggagaccgc

SEQ ID NO: 1243406 - RNA, 24 nt, Human
gccgaaaggcaggagcuucgacug

SEQ ID NO: 1243407 - RNA, 23 nt, Human
ggaggcaggaggagcugggcccc

SEQ ID NO: 1243408 - RNA, 22 nt, Human
ggaggcugaaauaggaggauca

SEQ ID NO: 1243409 - RNA, 20 nt, Human
ggaggcugcagugagcagag

SEQ ID NO: 1243410 - RNA, 24 nt, Human
ggaggcugcagugagcagagguua

SEQ ID NO: 1243411 - RNA, 23 nt, Human
ggagugcaggccaccuccacggc

SEQ ID NO: 1243412 - RNA, 23 nt, Human
ggaucccgugaggccaggaguuc

SEQ ID NO: 1243413 - RNA, 19 nt, Human
ggcagguggaggcugcagu

SEQ ID NO: 1243414 - RNA, 23 nt, Human
ggcgugcccagagggacagaggc

SEQ ID NO: 1243415 - RNA, 21 nt, Human
ggcucauaccuauaaucccag

SEQ ID NO: 1243416 - RNA, 25 nt, Human
gggcaaaaggcugauuugaggaagu

SEQ ID NO: 1243417 - RNA, 24 nt, Human
gggcauaguggcaagcaccuguag

SEQ ID NO: 1243418 - RNA, 24 nt, Human
gggcaugguggcaggcgccuguag

SEQ ID NO: 1243419 - RNA, 21 nt, Human
ggugauggagagggugggagg

SEQ ID NO: 1243420 - RNA, 24 nt, Human
gguggcucauaccuauaaucccag

SEQ ID NO: 1243421 - RNA, 24 nt, Human
guacuccagccugggugacagagu

SEQ ID NO: 1243422 - RNA, 23 nt, Human
guacuccagccuguggucccagc

SEQ ID NO: 1243423 - RNA, 24 nt, Human
guacuccagccuguggucccagcu

SEQ ID NO: 1243424 - RNA, 18 nt, Human
gugaggcagaggcuggcc

SEQ ID NO: 1243425 - RNA, 23 nt, Human
guggcaggcgccuguagucccag

SEQ ID NO: 1243426 - RNA, 24 nt, Human
guuaugccacuguacuccagccug

SEQ ID NO: 1243427 - RNA, 26 nt, Human
uaaggcaggaggaucccgugaggcca

SEQ ID NO: 1243428 - RNA, 26 nt, Human
uacaaaacagcagggcaugguggcag

SEQ ID NO: 1243429 - RNA, 22 nt, Human
uacaaugagccauaauuggacc

SEQ ID NO: 1243430 - RNA, 23 nt, Human
uaccuauaaucccagcccacugg

SEQ ID NO: 1243431 - RNA, 24 nt, Human
uaccuauaaucccagcccacuggg

SEQ ID NO: 1243432 - RNA, 25 nt, Human
uacuacacuccagccuuggacaaca

SEQ ID NO: 1243433 - RNA, 22 nt, Human
uacuccagccugggugacagag

SEQ ID NO: 1243434 - RNA, 24 nt, Human
uacuccagccugggugacagagug

SEQ ID NO: 1243435 - RNA, 22 nt, Human
uacuccagccuguggucccagc

SEQ ID NO: 1243436 - RNA, 19 nt, Human
uacucuggaggcugaaaua

SEQ ID NO: 1243437 - RNA, 19 nt, Human
uacuguaaucccagcuacu

SEQ ID NO: 1243438 - RNA, 23 nt, Human
uacuguaaucccagcuacucggg

SEQ ID NO: 1243439 - RNA, 18 nt, Human
uagaaaaugaacugggug

SEQ ID NO: 1243440 - RNA, 20 nt, Human
uagcacuacuacacuccagc

SEQ ID NO: 1243441 - RNA, 18 nt, Human
uaggguuuauccaucuug

SEQ ID NO: 1243442 - RNA, 23 nt, Human
uaguggcaagcaccuguagucuc

SEQ ID NO: 1243443 - RNA, 24 nt, Human
uaguggcaagcaccuguagucuca

SEQ ID NO: 1243444 - RNA, 20 nt, Human
uaguugggcauaguggcaag

SEQ ID NO: 1243445 - RNA, 21 nt, Human
ucaagccugggugacagggug

SEQ ID NO: 1243446 - RNA, 21 nt, Human
ucauuuuccguuccccagcau

SEQ ID NO: 1243447 - RNA, 27 nt, Human
uccacguauacgaaaauuccaaauauu

SEQ ID NO: 1243448 - RNA, 20 nt, Human
uccacugugaggcagaggcu

SEQ ID NO: 1243449 - RNA, 23 nt, Human
uccagccugggugacagagugag

SEQ ID NO: 1243450 - RNA, 24 nt, Human
uccagccugggugacagagugaga

SEQ ID NO: 1243451 - RNA, 19 nt, Human
ucccgugaggccaggaguu

SEQ ID NO: 1243452 - RNA, 21 nt, Human
uccuuagcccaggaguucaag

SEQ ID NO: 1243453 - RNA, 24 nt, Human
uccuuagcccaggaguucaaggcu

SEQ ID NO: 1243454 - RNA, 23 nt, Human
ucgggaggcugaggcaggagaau

SEQ ID NO: 1243455 - RNA, 20 nt, Human
ucuccagaagagcuucccau

SEQ ID NO: 1243456 - RNA, 21 nt, Human
ucuguggcccugugguuggag

SEQ ID NO: 1243457 - RNA, 21 nt, Human
ucuuagaagguggggaauaau

SEQ ID NO: 1243458 - RNA, 18 nt, Human
ugaaaccacaggacagua

SEQ ID NO: 1243459 - RNA, 23 nt, Human
ugaacucccucauuuuccguucc

SEQ ID NO: 1243460 - RNA, 24 nt, Human
ugaagacguaccucaugaagcuga

SEQ ID NO: 1243461 - RNA, 21 nt, Human
ugacagaagcaggaaacucca

SEQ ID NO: 1243462 - RNA, 22 nt, Human
ugacagagugagacccugucuc

SEQ ID NO: 1243463 - RNA, 21 nt, Human
ugacagggcaagguccuguuu

SEQ ID NO: 1243464 - RNA, 22 nt, Human
ugacagggugagaccccaucuc

SEQ ID NO: 1243465 - RNA, 24 nt, Human
ugacagggugagaccccaucuccu

SEQ ID NO: 1243466 - RNA, 18 nt, Human
ugacaugguaggacugcu

SEQ ID NO: 1243467 - RNA, 21 nt, Human
ugagaugggaggaucgcuuca

SEQ ID NO: 1243468 - RNA, 24 nt, Human
ugagccuggcagguggaggcugca

SEQ ID NO: 1243469 - RNA, 22 nt, Human
ugagccugggaguuugaggcua

SEQ ID NO: 1243470 - RNA, 25 nt, Human
ugaggaugccacagugagacaccau

SEQ ID NO: 1243471 - RNA, 20 nt, Human
ugaggcaggagaaucacuug

SEQ ID NO: 1243472 - RNA, 24 nt, Human
ugaggcaggagaaucacuugaacc

SEQ ID NO: 1243473 - RNA, 25 nt, Human
ugaggcaggagaaucacuugaaccc

SEQ ID NO: 1243474 - RNA, 24 nt, Human
ugaggcaggagaauugcuugagcc

SEQ ID NO: 1243475 - RNA, 25 nt, Human
ugaggcaggagaauugcuugagccu

SEQ ID NO: 1243476 - RNA, 21 nt, Human
ugagguccccaugccuggacu

SEQ ID NO: 1243477 - RNA, 18 nt, Human
ugaguugggccuaaaugg

SEQ ID NO: 1243478 - RNA, 18 nt, Human
ugauagcacuacuguagu

SEQ ID NO: 1243479 - RNA, 19 nt, Human
ugauggagagggugggagg

SEQ ID NO: 1243480 - RNA, 24 nt, Human
ugauggagagggugggagguguag

SEQ ID NO: 1243481 - RNA, 20 nt, Human
ugcccagagggacagaggca

SEQ ID NO: 1243482 - RNA, 24 nt, Human
ugcccagagggacagaggcagcug

SEQ ID NO: 1243483 - RNA, 23 nt, Human
uggaagaaaggccaugaaaccac

SEQ ID NO: 1243484 - RNA, 21 nt, Human
uggaagcuucucucacucucc

SEQ ID NO: 1243485 - RNA, 19 nt, Human
uggaagguugaggcugcag

SEQ ID NO: 1243486 - RNA, 22 nt, Human
uggaagguugaggcugcaguca

SEQ ID NO: 1243487 - RNA, 21 nt, Human
uggauggucccacguuucacu

SEQ ID NO: 1243488 - RNA, 22 nt, Human
uggcaagcaccuguagucucag

SEQ ID NO: 1243489 - RNA, 22 nt, Human
uggcagcuuucuccaacuuugg

SEQ ID NO: 1243490 - RNA, 24 nt, Human
uggcagguggaggcugcagugagc

SEQ ID NO: 1243491 - RNA, 20 nt, Human
ugggaggcaggaggagcugg

SEQ ID NO: 1243492 - RNA, 21 nt, Human
ugggaggcaggaggagcuggg

SEQ ID NO: 1243493 - RNA, 18 nt, Human
ugggagguugagauggga

SEQ ID NO: 1243494 - RNA, 23 nt, Human
ugggagguugagaugggaggauc

SEQ ID NO: 1243495 - RNA, 21 nt, Human
ugggcaaaaggcugauuugag

SEQ ID NO: 1243496 - RNA, 26 nt, Human
ugggcaaaaggcugauuugaggaagu

SEQ ID NO: 1243497 - RNA, 18 nt, Human
ugggccuggagaggcugc

SEQ ID NO: 1243498 - RNA, 21 nt, Human
ugggugacagagugagacccu

SEQ ID NO: 1243499 - RNA, 22 nt, Human
uggucuuugucucuuagaaggu

SEQ ID NO: 1243500 - RNA, 24 nt, Human
ugguggcaggcgccuguaguccca

SEQ ID NO: 1243501 - RNA, 22 nt, Human
uguauagucccagcuacucugg

SEQ ID NO: 1243502 - RNA, 21 nt, Human
uguugagguccccaugccugg

SEQ ID NO: 1243503 - RNA, 18 nt, Human
uuaguugggcauaguggc

SEQ ID NO: 1243504 - RNA, 23 nt, Human
uuaugccacuguacuccagccug

SEQ ID NO: 1243505 - RNA, 24 nt, Human
uuccccagcauuggcggguucugg

SEQ ID NO: 1243506 - RNA, 20 nt, Human
uugcagugagccaagaccac

SEQ ID NO: 1243507 - RNA, 24 nt, Human
uugcuugagccuggcagguggagg

SEQ ID NO: 1243508 - RNA, 19 nt, Human
uuucccagucagucucucu

SEQ ID NO: 1243509 - RNA, 24 nt, Human
uuuguauagucccagcuacucugg

SEQ ID NO: 1243510 - RNA, 21 nt, Human
uuuuccugcaacuggaugguc

SEQ ID NO: 1243511 - RNA, 20 nt, Human
accuggcccaguccagggag

SEQ ID NO: 1243512 - RNA, 19 nt, Human
agagcgauucccacagccc

SEQ ID NO: 1243513 - RNA, 18 nt, Human
agcgccccggcgccccuc

SEQ ID NO: 1243514 - RNA, 21 nt, Human
caaggccccgcagccacacuc

SEQ ID NO: 1243515 - RNA, 22 nt, Human
cacagccccacggugcuggcca

SEQ ID NO: 1243516 - RNA, 19 nt, Human
caccugggugccugccagg

SEQ ID NO: 1243517 - RNA, 21 nt, Human
caccuuuggcaggaguuggug

SEQ ID NO: 1243518 - RNA, 19 nt, Human
cacgugcccacgagggccg

SEQ ID NO: 1243519 - RNA, 22 nt, Human
cacucuccgccccacaguggcu

SEQ ID NO: 1243520 - RNA, 25 nt, Human
cagaggccugggcagccuggguccc

SEQ ID NO: 1243521 - RNA, 19 nt, Human
cagccugggucccuacagc

SEQ ID NO: 1243522 - RNA, 20 nt, Human
cagccuguguggaccccgcc

SEQ ID NO: 1243523 - RNA, 25 nt, Human
caggcacacgcuccccuggcugggc

SEQ ID NO: 1243524 - RNA, 25 nt, Human
caguggcuccuggggcugauggcug

SEQ ID NO: 1243525 - RNA, 19 nt, Human
cccacaguggcuccugggg

SEQ ID NO: 1243526 - RNA, 21 nt, Human
cccagcgccccggcgccccuc

SEQ ID NO: 1243527 - RNA, 23 nt, Human
ccccagaggccugggcagccugg

SEQ ID NO: 1243528 - RNA, 25 nt, Human
ccccaggcucuuccgauuggcucag

SEQ ID NO: 1243529 - RNA, 22 nt, Human
ccccgccggccugcggcgcccg

SEQ ID NO: 1243530 - RNA, 19 nt, Human
ccccuguggcuggcgugug

SEQ ID NO: 1243531 - RNA, 25 nt, Human
cccgcagccacacucacucuccgcc

SEQ ID NO: 1243532 - RNA, 22 nt, Human
cccgcugguucugugacccauc

SEQ ID NO: 1243533 - RNA, 19 nt, Human
cccggcgccccucccucca

SEQ ID NO: 1243534 - RNA, 19 nt, Human
cccugacccccuggcugga

SEQ ID NO: 1243535 - RNA, 21 nt, Human
ccucacaggugggcucucagg

SEQ ID NO: 1243536 - RNA, 21 nt, Human
ccugaaccagggagucugacc

SEQ ID NO: 1243537 - RNA, 22 nt, Human
ccugacccccuggcuggaggga

SEQ ID NO: 1243538 - RNA, 24 nt, Human
ccuggcccaguccagggaggccug

SEQ ID NO: 1243539 - RNA, 21 nt, Human
ccugggugccugccagggcca

SEQ ID NO: 1243540 - RNA, 20 nt, Human
ccuguggcuggcguguggag

SEQ ID NO: 1243541 - RNA, 20 nt, Human
cgagggccucacaggugggc

SEQ ID NO: 1243542 - RNA, 23 nt, Human
cgccccggcgccccucccuccag

SEQ ID NO: 1243543 - RNA, 24 nt, Human
cgccccggcgccccucccuccagc

SEQ ID NO: 1243544 - RNA, 21 nt, Human
cgccccucccuccagcugcca

SEQ ID NO: 1243545 - RNA, 22 nt, Human
cgccccucccuccagcugccca

SEQ ID NO: 1243546 - RNA, 24 nt, Human
cggcugcccagcgccccggcgccc

SEQ ID NO: 1243547 - RNA, 19 nt, Human
cucauggccacguggcccc

SEQ ID NO: 1243548 - RNA, 22 nt, Human
cucucaggagaggccccaccuu

SEQ ID NO: 1243549 - RNA, 19 nt, Human
cugaaccagggagucugac

SEQ ID NO: 1243550 - RNA, 24 nt, Human
cugccagggccaucaggugcccug

SEQ ID NO: 1243551 - RNA, 21 nt, Human
cuggcaggaagcaccuggccc

SEQ ID NO: 1243552 - RNA, 23 nt, Human
cuggccagggcuccccuguggcu

SEQ ID NO: 1243553 - RNA, 20 nt, Human
cuguggcuggcguguggaga

SEQ ID NO: 1243554 - RNA, 23 nt, Human
cuuugcuggcaggaagcaccugg

SEQ ID NO: 1243555 - RNA, 20 nt, Human
gaagccuagcuggucauucu

SEQ ID NO: 1243556 - RNA, 21 nt, Human
gacccuguucuuccccagagg

SEQ ID NO: 1243557 - RNA, 22 nt, Human
gaugggaagugggcuccgaggg

SEQ ID NO: 1243558 - RNA, 26 nt, Human
gccacguggccccaacuggaggcccc

SEQ ID NO: 1243559 - RNA, 18 nt, Human
gccccggcgccccucccu

SEQ ID NO: 1243560 - RNA, 18 nt, Human
gcccucuccugcgguggc

SEQ ID NO: 1243561 - RNA, 21 nt, Human
gcccugacccccuggcuggag

SEQ ID NO: 1243562 - RNA, 23 nt, Human
gcgauucccacagccccacggug

SEQ ID NO: 1243563 - RNA, 21 nt, Human
gcgcccggagcugcugacugu

SEQ ID NO: 1243564 - RNA, 24 nt, Human
ggcugauggcugggugaucccagg

SEQ ID NO: 1243565 - RNA, 21 nt, Human
ggcuggagggaggaugggaag

SEQ ID NO: 1243566 - RNA, 22 nt, Human
ggugccugccagggccaucagg

SEQ ID NO: 1243567 - RNA, 20 nt, Human
gguggguggggggacccugu

SEQ ID NO: 1243568 - RNA, 22 nt, Human
gugggcccuucuccacgugccc

SEQ ID NO: 1243569 - RNA, 21 nt, Human
uagcaggcuccaaggaggccc

SEQ ID NO: 1243570 - RNA, 22 nt, Human
ucagagcccggcugcccagcgc

SEQ ID NO: 1243571 - RNA, 22 nt, Human
uccagggaggccuggccuccag

SEQ ID NO: 1243572 - RNA, 21 nt, Human
uccccaggcucuuccgauugg

SEQ ID NO: 1243573 - RNA, 21 nt, Human
ucccuacagcacuggcagccc

SEQ ID NO: 1243574 - RNA, 23 nt, Human
ucccuccagcugcccagccuggg

SEQ ID NO: 1243575 - RNA, 28 nt, Human
uccgugcagccaaggccccgcagccaca

SEQ ID NO: 1243576 - RNA, 23 nt, Human
ugaaccagggagucugacccacu

SEQ ID NO: 1243577 - RNA, 21 nt, Human
ugcagccaaggccccgcagcc

SEQ ID NO: 1243578 - RNA, 21 nt, Human
ugcccugacccccuggcugga

SEQ ID NO: 1243579 - RNA, 20 nt, Human
uggcaggaguuggugggugg

SEQ ID NO: 1243580 - RNA, 21 nt, Human
uggcaggaguugguggguggg

SEQ ID NO: 1243581 - RNA, 21 nt, Human
uggccagccucacaggugccc

SEQ ID NO: 1243582 - RNA, 21 nt, Human
uggcuccuggggcugauggcu

SEQ ID NO: 1243583 - RNA, 21 nt, Human
ugggaagugggcuccgagggc

SEQ ID NO: 1243584 - RNA, 24 nt, Human
ugggcagccugggucccuacagca

SEQ ID NO: 1243585 - RNA, 23 nt, Human
uggggggacccuguucuucccca

SEQ ID NO: 1243586 - RNA, 20 nt, Human
ugggguccgugcagccaagg

SEQ ID NO: 1243587 - RNA, 25 nt, Human
ugggucccuacagcacuggcagccc

SEQ ID NO: 1243588 - RNA, 21 nt, Human
uguggaccccgccggccugcg

SEQ ID NO: 1243589 - RNA, 24 nt, Human
uugguggguggggggacccuguuc

SEQ ID NO: 1243590 - RNA, 24 nt, Human
aaaaaaaaaaacacaggaaaacaa

SEQ ID NO: 1243591 - RNA, 23 nt, Human
aaaaaaaaaacacaggaaaacaa

SEQ ID NO: 1243592 - RNA, 23 nt, Human
aaaaaaaaguaagccaaaaauac

SEQ ID NO: 1243593 - RNA, 25 nt, Human
aaaaaaauacugcagucuaagccac

SEQ ID NO: 1243594 - RNA, 18 nt, Human
aaaaaacacaggaaaaca

SEQ ID NO: 1243595 - RNA, 29 nt, Human
aaaaaagaaaugcaaacaaucaacaagaa

SEQ ID NO: 1243596 - RNA, 20 nt, Human
aaaaaagagacccaaauaaa

SEQ ID NO: 1243597 - RNA, 23 nt, Human
aaaaaggagacauuacaacuguu

SEQ ID NO: 1243598 - RNA, 24 nt, Human
aaaaaggagacauuacaacuguua

SEQ ID NO: 1243599 - RNA, 25 nt, Human
aaaaaggauuucccagauaagcaaa

SEQ ID NO: 1243600 - RNA, 24 nt, Human
aaaaauacaaaaauuagcugcaca

SEQ ID NO: 1243601 - RNA, 21 nt, Human
aaaagaaagagguuuaaugga

SEQ ID NO: 1243602 - RNA, 20 nt, Human
aaaagacaaagagaaaaugc

SEQ ID NO: 1243603 - RNA, 23 nt, Human
aaaaugacagguauaaguccuca

SEQ ID NO: 1243604 - RNA, 20 nt, Human
aaacaaacaccaauucuucu

SEQ ID NO: 1243605 - RNA, 21 nt, Human
aaacaaacaccaauucuucuc

SEQ ID NO: 1243606 - RNA, 21 nt, Human
aaacagaaaaccugaacugac

SEQ ID NO: 1243607 - RNA, 23 nt, Human
aaacagaaaaccugaacugaccc

SEQ ID NO: 1243608 - RNA, 21 nt, Human
aaacagaaaucaaaaauaauc

SEQ ID NO: 1243609 - RNA, 25 nt, Human
aaacagaaaucaaaaauaaucagga

SEQ ID NO: 1243610 - RNA, 23 nt, Human
aaacagcaagagaaaggcaucaa

SEQ ID NO: 1243611 - RNA, 24 nt, Human
aaagaaacucaggcagauacaaga

SEQ ID NO: 1243612 - RNA, 24 nt, Human
aaagaagccaccuggaggcccagg

SEQ ID NO: 1243613 - RNA, 21 nt, Human
aaagacauaccugacugagac

SEQ ID NO: 1243614 - RNA, 18 nt, Human
aacaaaaaaagagaccca

SEQ ID NO: 1243615 - RNA, 18 nt, Human
aacaaaaagucucccaaa

SEQ ID NO: 1243616 - RNA, 24 nt, Human
aacaaacaccaauucuucucaaac

SEQ ID NO: 1243617 - RNA, 19 nt, Human
aacaaguuaguuacuuccu

SEQ ID NO: 1243618 - RNA, 24 nt, Human
aacaaguuccucauuuccaucuga

SEQ ID NO: 1243619 - RNA, 24 nt, Human
aacauaaaacaaugaacaaaauga

SEQ ID NO: 1243620 - RNA, 21 nt, Human
aaccaaagaagccaccuggag

SEQ ID NO: 1243621 - RNA, 21 nt, Human
aaccaaaugcaacagagacaa

SEQ ID NO: 1243622 - RNA, 21 nt, Human
aaccauaugcuaacaaauugg

SEQ ID NO: 1243623 - RNA, 20 nt, Human
aaccuaaugaugcaccucaa

SEQ ID NO: 1243624 - RNA, 21 nt, Human
aaccucaauuuuugacuucug

SEQ ID NO: 1243625 - RNA, 18 nt, Human
aaccucugccuguuuccc

SEQ ID NO: 1243626 - RNA, 20 nt, Human
aacguggugaaacccugucu

SEQ ID NO: 1243627 - RNA, 21 nt, Human
aacguggugaaacccugucuc

SEQ ID NO: 1243628 - RNA, 26 nt, Human
aacuacuucccacugccucccuccca

SEQ ID NO: 1243629 - RNA, 19 nt, Human
aagaaagaaaaaagaauga

SEQ ID NO: 1243630 - RNA, 21 nt, Human
aagaaagaaaaaagaaugaag

SEQ ID NO: 1243631 - RNA, 18 nt, Human
aagaagaagaaauuugga

SEQ ID NO: 1243632 - RNA, 21 nt, Human
aagaagccaccuggaggccca

SEQ ID NO: 1243633 - RNA, 21 nt, Human
aagaggugggcucccauggcc

SEQ ID NO: 1243634 - RNA, 22 nt, Human
aagcaagaacaaaucaaacaca

SEQ ID NO: 1243635 - RNA, 22 nt, Human
aagcaagucaugucucacaugg

SEQ ID NO: 1243636 - RNA, 19 nt, Human
aaggagccuggcacagugg

SEQ ID NO: 1243637 - RNA, 24 nt, Human
aagugugguggcucacgccuguaa

SEQ ID NO: 1243638 - RNA, 23 nt, Human
aaucuaggcagcaguucccaaac

SEQ ID NO: 1243639 - RNA, 22 nt, Human
aaugcaacagagacaaaaaaga

SEQ ID NO: 1243640 - RNA, 18 nt, Human
aauugcuugaaccuggga

SEQ ID NO: 1243641 - RNA, 24 nt, Human
aauugcuugaaccugggaggcaga

SEQ ID NO: 1243642 - RNA, 22 nt, Human
acaaaaaagaaaugcaaacaau

SEQ ID NO: 1243643 - RNA, 22 nt, Human
acaaaguauaacaauuccaaau

SEQ ID NO: 1243644 - RNA, 22 nt, Human
acaacaacaaaaaaagagaccc

SEQ ID NO: 1243645 - RNA, 25 nt, Human
acaacaacaaaaaaagagacccaaa

SEQ ID NO: 1243646 - RNA, 25 nt, Human
acaauuccaaauaugcaugcaacca

SEQ ID NO: 1243647 - RNA, 18 nt, Human
acacacacuacccaggag

SEQ ID NO: 1243648 - RNA, 21 nt, Human
acacacacuacccaggagccc

SEQ ID NO: 1243649 - RNA, 19 nt, Human
acacacuacccaggagccc

SEQ ID NO: 1243650 - RNA, 21 nt, Human
acagaacaaggcugcacaaaa

SEQ ID NO: 1243651 - RNA, 25 nt, Human
acagagugagacuccauugcuaaaa

SEQ ID NO: 1243652 - RNA, 23 nt, Human
acaggacccaugcaagcccaaaa

SEQ ID NO: 1243653 - RNA, 18 nt, Human
accacagccuccaauaac

SEQ ID NO: 1243654 - RNA, 22 nt, Human
accauaucaaaaggauauacaa

SEQ ID NO: 1243655 - RNA, 19 nt, Human
accccacauuucccuucug

SEQ ID NO: 1243656 - RNA, 24 nt, Human
acccugucucuacuaaaaauacaa

SEQ ID NO: 1243657 - RNA, 25 nt, Human
acuacuucccacugccucccuccca

SEQ ID NO: 1243658 - RNA, 24 nt, Human
acuccagccugggugacagaguga

SEQ ID NO: 1243659 - RNA, 23 nt, Human
acugcacuccagccuggugacag

SEQ ID NO: 1243660 - RNA, 25 nt, Human
acugcacuccagccuggugacagag

SEQ ID NO: 1243661 - RNA, 24 nt, Human
acuguacuccagccugggugacag

SEQ ID NO: 1243662 - RNA, 26 nt, Human
acuguacuccagccugggugacagag

SEQ ID NO: 1243663 - RNA, 23 nt, Human
agaaaaccaucaaacugcaacca

SEQ ID NO: 1243664 - RNA, 20 nt, Human
agaaaaccugaacugaccca

SEQ ID NO: 1243665 - RNA, 20 nt, Human
agaaagauuucaaauaaaca

SEQ ID NO: 1243666 - RNA, 19 nt, Human
agaaccugcauacgucacc

SEQ ID NO: 1243667 - RNA, 23 nt, Human
agacaaaaaagaaaugcaaacaa

SEQ ID NO: 1243668 - RNA, 23 nt, Human
agacaaaaagaaagaaaagggac

SEQ ID NO: 1243669 - RNA, 19 nt, Human
agagguucuccaugagugc

SEQ ID NO: 1243670 - RNA, 22 nt, Human
agagguuguagugagcugagau

SEQ ID NO: 1243671 - RNA, 24 nt, Human
agagguuguagugagcugagauug

SEQ ID NO: 1243672 - RNA, 21 nt, Human
agauacaagagaacacagaua

SEQ ID NO: 1243673 - RNA, 27 nt, Human
agauagagacaggcuuaauggauaaaa

SEQ ID NO: 1243674 - RNA, 19 nt, Human
agcaagaacaaaucaaaca

SEQ ID NO: 1243675 - RNA, 24 nt, Human
agcacuuugagaggcugaggccgg

SEQ ID NO: 1243676 - RNA, 20 nt, Human
agcaguucccaaaccucaau

SEQ ID NO: 1243677 - RNA, 24 nt, Human
agcauaacaaagaacaaaacacaa

SEQ ID NO: 1243678 - RNA, 25 nt, Human
agccacugaaugacucacaggcacc

SEQ ID NO: 1243679 - RNA, 19 nt, Human
agccuaaaauauuaccauu

SEQ ID NO: 1243680 - RNA, 24 nt, Human
agccugggugacagagugagacuc

SEQ ID NO: 1243681 - RNA, 23 nt, Human
agcugcacaugguugcacaugcc

SEQ ID NO: 1243682 - RNA, 19 nt, Human
aggaagaaacagaaaaccu

SEQ ID NO: 1243683 - RNA, 21 nt, Human
aggacccaugcaagcccaaaa

SEQ ID NO: 1243684 - RNA, 19 nt, Human
aggcaaagagagagcuuga

SEQ ID NO: 1243685 - RNA, 23 nt, Human
aggcaccacucaugccaauuaca

SEQ ID NO: 1243686 - RNA, 24 nt, Human
aggcagagguuguagugagcugag

SEQ ID NO: 1243687 - RNA, 22 nt, Human
aggcaggagaauugcuugaacc

SEQ ID NO: 1243688 - RNA, 24 nt, Human
aggcaggagaauugcuugaaccug

SEQ ID NO: 1243689 - RNA, 18 nt, Human
aggcaggaggaccauuug

SEQ ID NO: 1243690 - RNA, 19 nt, Human
aggccacagcuccacuccu

SEQ ID NO: 1243691 - RNA, 24 nt, Human
aggccgguagaucacgaggucagg

SEQ ID NO: 1243692 - RNA, 21 nt, Human
aggcugaggcaggagaauugc

SEQ ID NO: 1243693 - RNA, 24 nt, Human
aggcugaggcaggagaauugcuug

SEQ ID NO: 1243694 - RNA, 24 nt, Human
aggcugaggcaggaggaccauuug

SEQ ID NO: 1243695 - RNA, 26 nt, Human
aguaacaaaaagucucccaaaagaga

SEQ ID NO: 1243696 - RNA, 18 nt, Human
aguaccccaaagucuuaa

SEQ ID NO: 1243697 - RNA, 24 nt, Human
aguggcucacaucugcaauuccag

SEQ ID NO: 1243698 - RNA, 18 nt, Human
auaaaagcaacaaagaaa

SEQ ID NO: 1243699 - RNA, 21 nt, Human
auaaauacaacucaaaaaggu

SEQ ID NO: 1243700 - RNA, 21 nt, Human
aucagauacccuaaaucucaa

SEQ ID NO: 1243701 - RNA, 24 nt, Human
aucaugccacuguacuccagccug

SEQ ID NO: 1243702 - RNA, 23 nt, Human
augagaucugaguggggacacag

SEQ ID NO: 1243703 - RNA, 22 nt, Human
augccacuguacuccagccugg

SEQ ID NO: 1243704 - RNA, 21 nt, Human
auucuggggucuggaggaugg

SEQ ID NO: 1243705 - RNA, 24 nt, Human
auugcaccacugcacuccagccug

SEQ ID NO: 1243706 - RNA, 18 nt, Human
caaaaaaagagacccaaa

SEQ ID NO: 1243707 - RNA, 22 nt, Human
caaaaaaagagacccaaauaaa

SEQ ID NO: 1243708 - RNA, 30 nt, Human
caaaaagcaagaacaaaucaaacacacaaa

SEQ ID NO: 1243709 - RNA, 18 nt, Human
caaaaagucucccaaaag

SEQ ID NO: 1243710 - RNA, 26 nt, Human
caaaaauacuauacccagcaaagcua

SEQ ID NO: 1243711 - RNA, 22 nt, Human
caaaaccaaucaugccuuccca

SEQ ID NO: 1243712 - RNA, 25 nt, Human
caaaaccuaugggauacagcaaaag

SEQ ID NO: 1243713 - RNA, 21 nt, Human
caaaacgaagaauuucugaac

SEQ ID NO: 1243714 - RNA, 22 nt, Human
caaaacgaagaauuucugaacc

SEQ ID NO: 1243715 - RNA, 20 nt, Human
caaaagaacaauaucuacca

SEQ ID NO: 1243716 - RNA, 21 nt, Human
caaaaugacagguauaagucc

SEQ ID NO: 1243717 - RNA, 24 nt, Human
caaacacacaauuaguggaaagaa

SEQ ID NO: 1243718 - RNA, 23 nt, Human
caaaccauaucauucugccccug

SEQ ID NO: 1243719 - RNA, 20 nt, Human
caaagaagccaccuggaggc

SEQ ID NO: 1243720 - RNA, 21 nt, Human
caaagagaaaaugcuaaaaac

SEQ ID NO: 1243721 - RNA, 22 nt, Human
caaaucacuuauaagagaaucu

SEQ ID NO: 1243722 - RNA, 19 nt, Human
caacaaaaaaagagacccc

SEQ ID NO: 1243723 - RNA, 27 nt, Human
caacaacgucuacaagaaacucacuuc

SEQ ID NO: 1243724 - RNA, 25 nt, Human
caacacaagugcauccagagacuua

SEQ ID NO: 1243725 - RNA, 23 nt, Human
caacagagguuaucuaggccaaa

SEQ ID NO: 1243726 - RNA, 23 nt, Human
caacaguaccccaaagucuuaac

SEQ ID NO: 1243727 - RNA, 21 nt, Human
caaccuaaugaugcaccucaa

SEQ ID NO: 1243728 - RNA, 24 nt, Human
caacguggugaaacccugucucua

SEQ ID NO: 1243729 - RNA, 22 nt, Human
cacaacacaugggaauucaaga

SEQ ID NO: 1243730 - RNA, 26 nt, Human
cacaacacaugggaauucaagaugag

SEQ ID NO: 1243731 - RNA, 19 nt, Human
cacaaugauaguugagaac

SEQ ID NO: 1243732 - RNA, 20 nt, Human
cacacacacuacccaggagc

SEQ ID NO: 1243733 - RNA, 31 nt, Human
cacaccaggucuaccaccacuaccacugauu

SEQ ID NO: 1243734 - RNA, 20 nt, Human
cacagcuccacuccuguggc

SEQ ID NO: 1243735 - RNA, 18 nt, Human
cacaugguugcacaugcc

SEQ ID NO: 1243736 - RNA, 23 nt, Human
caccaaaaaaguagaaagauuuc

SEQ ID NO: 1243737 - RNA, 31 nt, Human
caccaaaaaaguagaaagauuucaaauaaag

SEQ ID NO: 1243738 - RNA, 21 nt, Human
caccacagccuccaauaacaa

SEQ ID NO: 1243739 - RNA, 19 nt, Human
caccaccagaaccugcaua

SEQ ID NO: 1243740 - RNA, 25 nt, Human
caccacugcacuccagccuggugac

SEQ ID NO: 1243741 - RNA, 21 nt, Human
caccaggucuaccaccacuac

SEQ ID NO: 1243742 - RNA, 19 nt, Human
cacccagaaucaaagccaa

SEQ ID NO: 1243743 - RNA, 24 nt, Human
cacgccuguaaucccagcacuuug

SEQ ID NO: 1243744 - RNA, 22 nt, Human
cacuccagccuggugacagagc

SEQ ID NO: 1243745 - RNA, 18 nt, Human
cacugcacuccagccugg

SEQ ID NO: 1243746 - RNA, 20 nt, Human
cacugcacuccagccuggug

SEQ ID NO: 1243747 - RNA, 22 nt, Human
cacugcacuccagccuggugac

SEQ ID NO: 1243748 - RNA, 23 nt, Human
cacugcacuccagccuggugaca

SEQ ID NO: 1243749 - RNA, 23 nt, Human
cacugcacuccagccuggugaca

SEQ ID NO: 1243750 - RNA, 18 nt, Human
cacugccagcaaccaaag

SEQ ID NO: 1243751 - RNA, 24 nt, Human
cacugccucccucccacaacacau

SEQ ID NO: 1243752 - RNA, 19 nt, Human
cacuguacuccagccuggg

SEQ ID NO: 1243753 - RNA, 19 nt, Human
cacuguacuccagccuggg

SEQ ID NO: 1243754 - RNA, 21 nt, Human
cacuguacuccagccugggug

SEQ ID NO: 1243755 - RNA, 22 nt, Human
cacuguacuccagccuggguga

SEQ ID NO: 1243756 - RNA, 23 nt, Human
cacuguacuccagccugggugac

SEQ ID NO: 1243757 - RNA, 24 nt, Human
cacuguacuccagccugggugaca

SEQ ID NO: 1243758 - RNA, 24 nt, Human
cacuguacuccagccugggugaca

SEQ ID NO: 1243759 - RNA, 28 nt, Human
cagaaaauugcccaaacaaaggggcuac

SEQ ID NO: 1243760 - RNA, 24 nt, Human
cagaaggcugaggcaggaggacca

SEQ ID NO: 1243761 - RNA, 21 nt, Human
cagagcuagugcucacacuua

SEQ ID NO: 1243762 - RNA, 18 nt, Human
cagagguuguagugagcu

SEQ ID NO: 1243763 - RNA, 22 nt, Human
cagauaaaacagacuuuaaguc

SEQ ID NO: 1243764 - RNA, 25 nt, Human
cagcaaaagcaguacuaggaggaaa

SEQ ID NO: 1243765 - RNA, 22 nt, Human
cagcacuuugagaggcugaggc

SEQ ID NO: 1243766 - RNA, 25 nt, Human
cagcacuuugagaggcugaggccgg

SEQ ID NO: 1243767 - RNA, 25 nt, Human
cagcagcagaauauacagucaucuc

SEQ ID NO: 1243768 - RNA, 23 nt, Human
cagcagcagcagaauauacaguc

SEQ ID NO: 1243769 - RNA, 26 nt, Human
cagcaugggaaagaccugcccccaug

SEQ ID NO: 1243770 - RNA, 24 nt, Human
cagcuacucaggaggcugaggcag

SEQ ID NO: 1243771 - RNA, 21 nt, Human
caggacccaugcaagcccaaa

SEQ ID NO: 1243772 - RNA, 21 nt, Human
caggcagauacaagagaacac

SEQ ID NO: 1243773 - RNA, 21 nt, Human
caggggcaaaaagccaccagu

SEQ ID NO: 1243774 - RNA, 25 nt, Human
caggucccucccacaacauguggga

SEQ ID NO: 1243775 - RNA, 21 nt, Human
caguaacaaaaagucucccaa

SEQ ID NO: 1243776 - RNA, 22 nt, Human
caguaacaaaaagucucccaaa

SEQ ID NO: 1243777 - RNA, 20 nt, Human
cauaaaagcaacaaagaaac

SEQ ID NO: 1243778 - RNA, 21 nt, Human
cauaaaagcaacaaagaaaca

SEQ ID NO: 1243779 - RNA, 20 nt, Human
caucagugcccacaaacacu

SEQ ID NO: 1243780 - RNA, 22 nt, Human
caucaucacuaaagaaaaccau

SEQ ID NO: 1243781 - RNA, 21 nt, Human
caucugagacaaacucauccu

SEQ ID NO: 1243782 - RNA, 25 nt, Human
cauucugccccuggcccuucccaaa

SEQ ID NO: 1243783 - RNA, 18 nt, Human
cauuguggaagucaagga

SEQ ID NO: 1243784 - RNA, 21 nt, Human
cauuugaucccaggaguucaa

SEQ ID NO: 1243785 - RNA, 24 nt, Human
cauuuuagccuacccccccuuacc

SEQ ID NO: 1243786 - RNA, 21 nt, Human
ccaaaccauaucaaaaggaua

SEQ ID NO: 1243787 - RNA, 21 nt, Human
ccaaaccauaucauucugccc

SEQ ID NO: 1243788 - RNA, 22 nt, Human
ccaacacaagugcauccagaga

SEQ ID NO: 1243789 - RNA, 23 nt, Human
ccacaggcucaacccuaugugga

SEQ ID NO: 1243790 - RNA, 18 nt, Human
ccaccaccagaaccugca

SEQ ID NO: 1243791 - RNA, 21 nt, Human
ccaccagaaccugcauacguc

SEQ ID NO: 1243792 - RNA, 18 nt, Human
ccacccagaaucaaagcc

SEQ ID NO: 1243793 - RNA, 22 nt, Human
ccacugaaugacucacaggcac

SEQ ID NO: 1243794 - RNA, 19 nt, Human
ccacugcacuccagccugg

SEQ ID NO: 1243795 - RNA, 19 nt, Human
ccacugcacuccagccugg

SEQ ID NO: 1243796 - RNA, 20 nt, Human
ccacugcacuccagccuggu

SEQ ID NO: 1243797 - RNA, 23 nt, Human
ccacugcacuccagccuggugac

SEQ ID NO: 1243798 - RNA, 24 nt, Human
ccacugcacuccagccuggugaca

SEQ ID NO: 1243799 - RNA, 20 nt, Human
ccacuguacuccagccuggg

SEQ ID NO: 1243800 - RNA, 20 nt, Human
ccacuguacuccagccuggg

SEQ ID NO: 1243801 - RNA, 20 nt, Human
ccacuguacuccagccuggg

SEQ ID NO: 1243802 - RNA, 21 nt, Human
ccacuguacuccagccugggu

SEQ ID NO: 1243803 - RNA, 21 nt, Human
ccacuguacuccagccugggu

SEQ ID NO: 1243804 - RNA, 23 nt, Human
ccacuguacuccagccuggguga

SEQ ID NO: 1243805 - RNA, 24 nt, Human
ccacuguacuccagccugggugac

SEQ ID NO: 1243806 - RNA, 22 nt, Human
ccauaaauaaugagagaaaaaa

SEQ ID NO: 1243807 - RNA, 19 nt, Human
ccauaugcuaacaaauugg

SEQ ID NO: 1243808 - RNA, 19 nt, Human
ccaugcaagcccaaaaucc

SEQ ID NO: 1243809 - RNA, 18 nt, Human
cccaaaagagaaaagccc

SEQ ID NO: 1243810 - RNA, 20 nt, Human
cccaaaaugaauagcagguu

SEQ ID NO: 1243811 - RNA, 20 nt, Human
cccaccaccagaaccugcau

SEQ ID NO: 1243812 - RNA, 23 nt, Human
cccaccaccagaaccugcauacg

SEQ ID NO: 1243813 - RNA, 22 nt, Human
cccaugcaagcccaaaauccag

SEQ ID NO: 1243814 - RNA, 21 nt, Human
cccuucccaccaccagaaccu

SEQ ID NO: 1243815 - RNA, 22 nt, Human
ccuacauugggaagcaaaagaa

SEQ ID NO: 1243816 - RNA, 21 nt, Human
ccuaguagagguucuccauga

SEQ ID NO: 1243817 - RNA, 21 nt, Human
ccuauagucccagcuacucag

SEQ ID NO: 1243818 - RNA, 22 nt, Human
ccuauagucccagcuacucagg

SEQ ID NO: 1243819 - RNA, 21 nt, Human
ccuccuggcuccuuucacacg

SEQ ID NO: 1243820 - RNA, 23 nt, Human
ccuccuggcuccuuucacacguu

SEQ ID NO: 1243821 - RNA, 20 nt, Human
ccucuucucacagcuccacu

SEQ ID NO: 1243822 - RNA, 18 nt, Human
ccugaaaaaauuucagaa

SEQ ID NO: 1243823 - RNA, 22 nt, Human
ccuggaggcccagggauuggcc

SEQ ID NO: 1243824 - RNA, 22 nt, Human
ccuggccaacguggugaaaccc

SEQ ID NO: 1243825 - RNA, 22 nt, Human
ccuggccaacguggugaaaccc

SEQ ID NO: 1243826 - RNA, 24 nt, Human
ccuggccaacguggugaaacccug

SEQ ID NO: 1243827 - RNA, 21 nt, Human
ccugggaggcagagguuguag

SEQ ID NO: 1243828 - RNA, 22 nt, Human
ccugggugacagagugagacuc

SEQ ID NO: 1243829 - RNA, 18 nt, Human
ccuugggagaaaaaaggc

SEQ ID NO: 1243830 - RNA, 18 nt, Human
cgaccccacauuucccuu

SEQ ID NO: 1243831 - RNA, 24 nt, Human
cgagagcauccuggccaacguggu

SEQ ID NO: 1243832 - RNA, 18 nt, Human
cgccuguaaucccagcac

SEQ ID NO: 1243833 - RNA, 23 nt, Human
cgccuguaaucccagcacuuuga

SEQ ID NO: 1243834 - RNA, 27 nt, Human
cgguagaucacgaggucaggaguucga

SEQ ID NO: 1243835 - RNA, 21 nt, Human
cuagagaucagccugccacac

SEQ ID NO: 1243836 - RNA, 25 nt, Human
cuagagaucagccugccacacacac

SEQ ID NO: 1243837 - RNA, 18 nt, Human
cuaggaagaaacagaaaa

SEQ ID NO: 1243838 - RNA, 25 nt, Human
cuagugaggcuaacaacaacaaaaa

SEQ ID NO: 1243839 - RNA, 21 nt, Human
cucaaaaguccacaguccaaa

SEQ ID NO: 1243840 - RNA, 22 nt, Human
cucacgccuguaaucccagcac

SEQ ID NO: 1243841 - RNA, 24 nt, Human
cucacgccuguaaucccagcacuu

SEQ ID NO: 1243842 - RNA, 19 nt, Human
cuccaucaggcuaacaggg

SEQ ID NO: 1243843 - RNA, 20 nt, Human
cucccaaaagagaaaagccc

SEQ ID NO: 1243844 - RNA, 24 nt, Human
cugaagccacagcccacguuguac

SEQ ID NO: 1243845 - RNA, 24 nt, Human
cuggccaacguggugaaacccugu

SEQ ID NO: 1243846 - RNA, 23 nt, Human
cuggugccugaauguaccaucug

SEQ ID NO: 1243847 - RNA, 18 nt, Human
cuguuccaaccucugccu

SEQ ID NO: 1243848 - RNA, 23 nt, Human
cuucugagcccuccaaacuguuc

SEQ ID NO: 1243849 - RNA, 23 nt, Human
cuuuauuguccauauaaccauca

SEQ ID NO: 1243850 - RNA, 22 nt, Human
cuuuuaaaaccaucagaucuca

SEQ ID NO: 1243851 - RNA, 23 nt, Human
gaaaaaauauaaauaacauagca

SEQ ID NO: 1243852 - RNA, 23 nt, Human
gaaaaaggagacauuacaacugu

SEQ ID NO: 1243853 - RNA, 19 nt, Human
gaaaaccaucaaacugcaa

SEQ ID NO: 1243854 - RNA, 18 nt, Human
gaaagcaagaagaagcaa

SEQ ID NO: 1243855 - RNA, 18 nt, Human
gaaagggauaaauuccca

SEQ ID NO: 1243856 - RNA, 27 nt, Human
gaaaucucuuccaaauuuucccacauu

SEQ ID NO: 1243857 - RNA, 19 nt, Human
gaacaaccauaugcuaaca

SEQ ID NO: 1243858 - RNA, 21 nt, Human
gaacuaggaagaaacagaaaa

SEQ ID NO: 1243859 - RNA, 25 nt, Human
gacagagugagacuccauugcuaaa

SEQ ID NO: 1243860 - RNA, 19 nt, Human
gacagguauaaguccucac

SEQ ID NO: 1243861 - RNA, 18 nt, Human
gacuagugaggcuaacaa

SEQ ID NO: 1243862 - RNA, 18 nt, Human
gagaaaaaaggaacaaag

SEQ ID NO: 1243863 - RNA, 23 nt, Human
gagaauugcuugaaccugggagg

SEQ ID NO: 1243864 - RNA, 21 nt, Human
gagcagggaaacuccuccuuu

SEQ ID NO: 1243865 - RNA, 21 nt, Human
gagcauguaaaaucaaaaaca

SEQ ID NO: 1243866 - RNA, 18 nt, Human
gagcccuccaaacuguuc

SEQ ID NO: 1243867 - RNA, 22 nt, Human
gaucacgaggucaggaguucga

SEQ ID NO: 1243868 - RNA, 24 nt, Human
gaucacgaggucaggaguucgaga

SEQ ID NO: 1243869 - RNA, 20 nt, Human
gcaaagcuauccuucacaaa

SEQ ID NO: 1243870 - RNA, 21 nt, Human
gcaacagagacaaaaaagaaa

SEQ ID NO: 1243871 - RNA, 23 nt, Human
gcacuccagccuggugacagagc

SEQ ID NO: 1243872 - RNA, 21 nt, Human
gcagacuauaccacuguaccc

SEQ ID NO: 1243873 - RNA, 19 nt, Human
gcaggggcaaaaagccacc

SEQ ID NO: 1243874 - RNA, 24 nt, Human
gccaacguggugaaacccugucuc

SEQ ID NO: 1243875 - RNA, 25 nt, Human
gccacacacacuacccaggagccca

SEQ ID NO: 1243876 - RNA, 19 nt, Human
gccacuguacuccagccug

SEQ ID NO: 1243877 - RNA, 24 nt, Human
gccacuguacuccagccuggguga

SEQ ID NO: 1243878 - RNA, 23 nt, Human
gccucccuucccaccaccagaac

SEQ ID NO: 1243879 - RNA, 19 nt, Human
gccuggcacaguggcucac

SEQ ID NO: 1243880 - RNA, 19 nt, Human
ggaguucuggauggagaug

SEQ ID NO: 1243881 - RNA, 21 nt, Human
ggcucacgccuguaaucccag

SEQ ID NO: 1243882 - RNA, 23 nt, Human
gguagaucacgaggucaggaguu

SEQ ID NO: 1243883 - RNA, 24 nt, Human
gguggcucacgccuguaaucccag

SEQ ID NO: 1243884 - RNA, 24 nt, Human
gguugcacaugccuauagucccag

SEQ ID NO: 1243885 - RNA, 23 nt, Human
gguuuaaacccccuccuggcucc

SEQ ID NO: 1243886 - RNA, 19 nt, Human
gguuuaauggacuuacacc

SEQ ID NO: 1243887 - RNA, 23 nt, Human
guacuccagccugggugacagag

SEQ ID NO: 1243888 - RNA, 24 nt, Human
guacuccagccugggugacagagu

SEQ ID NO: 1243889 - RNA, 21 nt, Human
gugaaacccugucucuacuaa

SEQ ID NO: 1243890 - RNA, 18 nt, Human
gugaagggauggaaaaau

SEQ ID NO: 1243891 - RNA, 21 nt, Human
gugaggcuaacaacaacaaaa

SEQ ID NO: 1243892 - RNA, 23 nt, Human
guggcucacgccuguaaucccag

SEQ ID NO: 1243893 - RNA, 21 nt, Human
guuguagugagcugagauugc

SEQ ID NO: 1243894 - RNA, 19 nt, Human
uaaaaaaugacccaacaac

SEQ ID NO: 1243895 - RNA, 21 nt, Human
uaaaaaggacaaagaagguca

SEQ ID NO: 1243896 - RNA, 19 nt, Human
uaaaacauaacaggaguca

SEQ ID NO: 1243897 - RNA, 23 nt, Human
uaaaauauuaccauuugccucuu

SEQ ID NO: 1243898 - RNA, 25 nt, Human
uaaacagaaaauggaaacagggacc

SEQ ID NO: 1243899 - RNA, 21 nt, Human
uaaacauaaaacaaugaacaa

SEQ ID NO: 1243900 - RNA, 23 nt, Human
uaaauacaaucagaaaugaaaaa

SEQ ID NO: 1243901 - RNA, 24 nt, Human
uaaaucucucaaguucaaaauucc

SEQ ID NO: 1243902 - RNA, 25 nt, Human
uaacaaaaagucucccaaaagagaa

SEQ ID NO: 1243903 - RNA, 21 nt, Human
uaacaacaacaaaaaaagaga

SEQ ID NO: 1243904 - RNA, 23 nt, Human
uaaguucagcauuaacucaaaag

SEQ ID NO: 1243905 - RNA, 24 nt, Human
uaauaaagugaucaauucagcaac

SEQ ID NO: 1243906 - RNA, 24 nt, Human
uaauuuacuguauuaguccauuuu

SEQ ID NO: 1243907 - RNA, 22 nt, Human
uacaaaagaaagagguuuaaug

SEQ ID NO: 1243908 - RNA, 24 nt, Human
uacaggacccaugcaagcccaaag

SEQ ID NO: 1243909 - RNA, 19 nt, Human
uacaucagauaaaacagac

SEQ ID NO: 1243910 - RNA, 19 nt, Human
uacccacccagaaucaaag

SEQ ID NO: 1243911 - RNA, 25 nt, Human
uacccuaaaucucucaaguucaaaa

SEQ ID NO: 1243912 - RNA, 19 nt, Human
uacuacugagaggccugag

SEQ ID NO: 1243913 - RNA, 22 nt, Human
uacuccagccugggugacagag

SEQ ID NO: 1243914 - RNA, 24 nt, Human
uacuccagccugggugacagagug

SEQ ID NO: 1243915 - RNA, 22 nt, Human
uagaucacgaggucaggaguuc

SEQ ID NO: 1243916 - RNA, 19 nt, Human
uagcagaaccaaaugcaac

SEQ ID NO: 1243917 - RNA, 24 nt, Human
uagcagguuugaaucaguaacaaa

SEQ ID NO: 1243918 - RNA, 23 nt, Human
uagccaaugaacacuguagauac

SEQ ID NO: 1243919 - RNA, 21 nt, Human
uaggaagaaacagaaaaccug

SEQ ID NO: 1243920 - RNA, 28 nt, Human
uaguacaaguaaaaaaaaaaaaaaaaaa

SEQ ID NO: 1243921 - RNA, 22 nt, Human
uaguccauuuucacacagcuga

SEQ ID NO: 1243922 - RNA, 21 nt, Human
uauaaagaaaaacaaacacca

SEQ ID NO: 1243923 - RNA, 20 nt, Human
uauaaccaucagcauuuugg

SEQ ID NO: 1243924 - RNA, 21 nt, Human
uaucagauacccuaaaucucu

SEQ ID NO: 1243925 - RNA, 25 nt, Human
uaucagauacccuaaaucucucaag

SEQ ID NO: 1243926 - RNA, 22 nt, Human
uauccuucacaaaugaaggagc

SEQ ID NO: 1243927 - RNA, 20 nt, Human
ucaaacugcaaccauaaaua

SEQ ID NO: 1243928 - RNA, 19 nt, Human
ucaaagauagagcuucugc

SEQ ID NO: 1243929 - RNA, 20 nt, Human
ucaaagauagagcuucugca

SEQ ID NO: 1243930 - RNA, 21 nt, Human
ucaccuaucaauaauaacuuc

SEQ ID NO: 1243931 - RNA, 18 nt, Human
ucacgaggucaggaguuc

SEQ ID NO: 1243932 - RNA, 22 nt, Human
ucacgaggucaggaguucgaga

SEQ ID NO: 1243933 - RNA, 24 nt, Human
ucacgaggucaggaguucgagagc

SEQ ID NO: 1243934 - RNA, 18 nt, Human
ucagacaaaaagaaagaa

SEQ ID NO: 1243935 - RNA, 21 nt, Human
ucagacaaaaagaaagaaaaa

SEQ ID NO: 1243936 - RNA, 21 nt, Human
ucaggcagauacaagagaaca

SEQ ID NO: 1243937 - RNA, 23 nt, Human
ucaguaacaaaaagucucccaaa

SEQ ID NO: 1243938 - RNA, 19 nt, Human
ucagugcccacaaacacug

SEQ ID NO: 1243939 - RNA, 23 nt, Human
ucauauccucacauuucaaaacc

SEQ ID NO: 1243940 - RNA, 23 nt, Human
ucaugccacuguacuccagccug

SEQ ID NO: 1243941 - RNA, 18 nt, Human
uccacaguccaaagucuc

SEQ ID NO: 1243942 - RNA, 20 nt, Human
uccacauagcugaggaagcu

SEQ ID NO: 1243943 - RNA, 23 nt, Human
uccagccugggugacagagugag

SEQ ID NO: 1243944 - RNA, 24 nt, Human
uccagccugggugacagagugaga

SEQ ID NO: 1243945 - RNA, 26 nt, Human
uccauucugacuguucuacugaggga

SEQ ID NO: 1243946 - RNA, 22 nt, Human
ucccacauuuuccugucuccuu

SEQ ID NO: 1243947 - RNA, 18 nt, Human
ucccaccaggucccuccc

SEQ ID NO: 1243948 - RNA, 19 nt, Human
ucccagacauacacagccu

SEQ ID NO: 1243949 - RNA, 21 nt, Human
ucccagacauacacagccuac

SEQ ID NO: 1243950 - RNA, 18 nt, Human
ucccaggaguucaaggcu

SEQ ID NO: 1243951 - RNA, 18 nt, Human
ucccauauaaaagccaau

SEQ ID NO: 1243952 - RNA, 19 nt, Human
uccuguggcuuuguauggu

SEQ ID NO: 1243953 - RNA, 20 nt, Human
ucgagagcauccuggccaac

SEQ ID NO: 1243954 - RNA, 23 nt, Human
ucuaagccacugaaugacucaca

SEQ ID NO: 1243955 - RNA, 19 nt, Human
ucuaccaccacuaccacug

SEQ ID NO: 1243956 - RNA, 18 nt, Human
ucucaaacuauucccaaa

SEQ ID NO: 1243957 - RNA, 19 nt, Human
ucucaaguucaaauacccu

SEQ ID NO: 1243958 - RNA, 23 nt, Human
ucucauauccucacauuucaaaa

SEQ ID NO: 1243959 - RNA, 23 nt, Human
ucucuacuaaaaauacaaaaauu

SEQ ID NO: 1243960 - RNA, 24 nt, Human
ucugccccuggcccuucccaaauc

SEQ ID NO: 1243961 - RNA, 18 nt, Human
ucuggccaaguguggugg

SEQ ID NO: 1243962 - RNA, 24 nt, Human
ucuggccaagugugguggcucacg

SEQ ID NO: 1243963 - RNA, 21 nt, Human
ucugggaguucuggauggaga

SEQ ID NO: 1243964 - RNA, 21 nt, Human
ugaaaaaggagacauuacaac

SEQ ID NO: 1243965 - RNA, 23 nt, Human
ugaaaauaaaaucuaugaaaugc

SEQ ID NO: 1243966 - RNA, 22 nt, Human
ugaaccugggaggcagagguug

SEQ ID NO: 1243967 - RNA, 23 nt, Human
ugaauagcagguuugaaucagua

SEQ ID NO: 1243968 - RNA, 20 nt, Human
ugaccaaaaacugaaauucu

SEQ ID NO: 1243969 - RNA, 20 nt, Human
ugacccaaaaugaauagcag

SEQ ID NO: 1243970 - RNA, 18 nt, Human
ugacuccaugucucacau

SEQ ID NO: 1243971 - RNA, 23 nt, Human
ugacuccaugucucacaugcagg

SEQ ID NO: 1243972 - RNA, 19 nt, Human
ugacugcucuaaacagggu

SEQ ID NO: 1243973 - RNA, 24 nt, Human
ugagaggcugaggccgguagauca

SEQ ID NO: 1243974 - RNA, 24 nt, Human
ugagauugcaccacugcacuccag

SEQ ID NO: 1243975 - RNA, 22 nt, Human
ugagcugagauugcaccacugc

SEQ ID NO: 1243976 - RNA, 18 nt, Human
ugaggaaacgccucccuu

SEQ ID NO: 1243977 - RNA, 21 nt, Human
ugaggaagccuaagaaucacg

SEQ ID NO: 1243978 - RNA, 24 nt, Human
ugaggcaggagaauugcuugaacc

SEQ ID NO: 1243979 - RNA, 25 nt, Human
ugaggcaggagaauugcuugaaccu

SEQ ID NO: 1243980 - RNA, 20 nt, Human
ugaggcaggaggaccauuug

SEQ ID NO: 1243981 - RNA, 24 nt, Human
ugaggccgguagaucacgagguca

SEQ ID NO: 1243982 - RNA, 22 nt, Human
ugaggcuaacaacaacaaaaaa

SEQ ID NO: 1243983 - RNA, 20 nt, Human
ugaucaauucagcaacaaag

SEQ ID NO: 1243984 - RNA, 22 nt, Human
ugauuuauccauugucuacaua

SEQ ID NO: 1243985 - RNA, 19 nt, Human
ugcaaacaaucaacaagau

SEQ ID NO: 1243986 - RNA, 24 nt, Human
ugcaagaaauaugaaaaaggaaac

SEQ ID NO: 1243987 - RNA, 21 nt, Human
ugcaccacugcacuccagccu

SEQ ID NO: 1243988 - RNA, 19 nt, Human
ugcccugccccugcagcaa

SEQ ID NO: 1243989 - RNA, 18 nt, Human
ugccuauagucccagcua

SEQ ID NO: 1243990 - RNA, 24 nt, Human
ugccuauagucccagcuacucagg

SEQ ID NO: 1243991 - RNA, 24 nt, Human
ugcuaacaaguuccucauuuccau

SEQ ID NO: 1243992 - RNA, 22 nt, Human
uggaaaacuagagaucagccug

SEQ ID NO: 1243993 - RNA, 18 nt, Human
uggaaagcaagaagaagc

SEQ ID NO: 1243994 - RNA, 19 nt, Human
uggcagcaggcaaagagag

SEQ ID NO: 1243995 - RNA, 24 nt, Human
uggccaacguggugaaacccuguc

SEQ ID NO: 1243996 - RNA, 24 nt, Human
uggcucacgccuguaaucccagca

SEQ ID NO: 1243997 - RNA, 18 nt, Human
ugggaaagaccugccccc

SEQ ID NO: 1243998 - RNA, 24 nt, Human
ugggaggcagagguuguagugagc

SEQ ID NO: 1243999 - RNA, 23 nt, Human
ugggaguucuggauggagaugag

SEQ ID NO: 1244000 - RNA, 18 nt, Human
uggggacacaaccaaacc

SEQ ID NO: 1244001 - RNA, 18 nt, Human
uggggguauaggcacugg

SEQ ID NO: 1244002 - RNA, 24 nt, Human
ugguggcucacgccuguaauccca

SEQ ID NO: 1244003 - RNA, 24 nt, Human
ugguuuaaacccccuccuggcucc

SEQ ID NO: 1244004 - RNA, 24 nt, Human
ugucuccuucugagcccuccaaac

SEQ ID NO: 1244005 - RNA, 18 nt, Human
ugugcacccacaggcuca

SEQ ID NO: 1244006 - RNA, 23 nt, Human
uguuaccaaagaaauaaaaagga

SEQ ID NO: 1244007 - RNA, 21 nt, Human
uuaccaaagaaauaaaaagga

SEQ ID NO: 1244008 - RNA, 18 nt, Human
uuacuggaauaaaaccag

SEQ ID NO: 1244009 - RNA, 19 nt, Human
uuauagcaauaaaugccua

SEQ ID NO: 1244010 - RNA, 18 nt, Human
uucaaaaccaucagaccu

SEQ ID NO: 1244011 - RNA, 20 nt, Human
uucaacuacuucccacugcc

SEQ ID NO: 1244012 - RNA, 19 nt, Human
uucacaauuaaaagaauag

SEQ ID NO: 1244013 - RNA, 22 nt, Human
uuccaggcacacagugcaagcu

SEQ ID NO: 1244014 - RNA, 19 nt, Human
uucccagauaagcaaaaga

SEQ ID NO: 1244015 - RNA, 24 nt, Human
uucccauauaaaagccaauccaua

SEQ ID NO: 1244016 - RNA, 22 nt, Human
uuccucauuuccaucugagaca

SEQ ID NO: 1244017 - RNA, 24 nt, Human
uuccugaaugcuuccaaaugcagg

SEQ ID NO: 1244018 - RNA, 24 nt, Human
uucgagagcauccuggccaacgug

SEQ ID NO: 1244019 - RNA, 23 nt, Human
uucuccagcaacagauccaauga

SEQ ID NO: 1244020 - RNA, 22 nt, Human
uucuucucaaacuauucccaaa

SEQ ID NO: 1244021 - RNA, 24 nt, Human
uugaaccugggaggcagagguugu

SEQ ID NO: 1244022 - RNA, 25 nt, Human
uugagaggcugaggccgguagauca

SEQ ID NO: 1244023 - RNA, 20 nt, Human
uugauaaacgacuagugagg

SEQ ID NO: 1244024 - RNA, 23 nt, Human
uugcaccacugcacuccagccug

SEQ ID NO: 1244025 - RNA, 24 nt, Human
uugcuugaaccugggaggcagagg

SEQ ID NO: 1244026 - RNA, 19 nt, Human
uuguagugagcugagauug

SEQ ID NO: 1244027 - RNA, 22 nt, Human
uuuaugcugauuucuacccaau

SEQ ID NO: 1244028 - RNA, 21 nt, Human
uuucagaauauuucauccagc

SEQ ID NO: 1244029 - RNA, 20 nt, Human
uuuccugucuccuucugagc

SEQ ID NO: 1244030 - RNA, 20 nt, Human
uuuuuugaaaaguuaaacaa

SEQ ID NO: 1244031 - RNA, 21 nt, Human
aaagcucaagaagaccauggg

SEQ ID NO: 1244032 - RNA, 21 nt, Human
aacaugucucgccucccgcca

SEQ ID NO: 1244033 - RNA, 20 nt, Human
aagcaggagacaguggccuu

SEQ ID NO: 1244034 - RNA, 19 nt, Human
aagcuacaaaugaacaaca

SEQ ID NO: 1244035 - RNA, 23 nt, Human
aaggaaccaaagaggguggaagg

SEQ ID NO: 1244036 - RNA, 20 nt, Human
aaggaggucaacaaaaaaca

SEQ ID NO: 1244037 - RNA, 23 nt, Human
aaggcagcauuacugccaacaug

SEQ ID NO: 1244038 - RNA, 20 nt, Human
acaaaguauccguauccaga

SEQ ID NO: 1244039 - RNA, 21 nt, Human
acccaaacaucucagcggagu

SEQ ID NO: 1244040 - RNA, 21 nt, Human
acucagcacaccaaggaccug

SEQ ID NO: 1244041 - RNA, 21 nt, Human
agacaguggccuuccuccaug

SEQ ID NO: 1244042 - RNA, 18 nt, Human
agcaagaaaaccucagcc

SEQ ID NO: 1244043 - RNA, 18 nt, Human
agcaagaaaaccucagcc

SEQ ID NO: 1244044 - RNA, 21 nt, Human
agcccuagaucccuuaaaccu

SEQ ID NO: 1244045 - RNA, 19 nt, Human
agcgguguuggcuuucuuc

SEQ ID NO: 1244046 - RNA, 22 nt, Human
agcugaaaagggagccagguac

SEQ ID NO: 1244047 - RNA, 26 nt, Human
aggaggucaacaaaaaacaugugagc

SEQ ID NO: 1244048 - RNA, 23 nt, Human
aggcaguguaaaaugcagucuag

SEQ ID NO: 1244049 - RNA, 18 nt, Human
aucacuaaccuuuccuga

SEQ ID NO: 1244050 - RNA, 25 nt, Human
auccacaggagcaagaaaaccucag

SEQ ID NO: 1244051 - RNA, 21 nt, Human
auccaguucaccuguaguguu

SEQ ID NO: 1244052 - RNA, 25 nt, Human
auccaguucaccuguaguguuuuuu

SEQ ID NO: 1244053 - RNA, 22 nt, Human
augcugcccuugagccuuugug

SEQ ID NO: 1244054 - RNA, 21 nt, Human
auuucguugugacaaagacca

SEQ ID NO: 1244055 - RNA, 22 nt, Human
auuuuugguuggagaguuuugg

SEQ ID NO: 1244056 - RNA, 23 nt, Human
caaagcaauuguuuaaaguacag

SEQ ID NO: 1244057 - RNA, 19 nt, Human
caaggaccugcaccggccu

SEQ ID NO: 1244058 - RNA, 22 nt, Human
cagcacaccaaggaccugcacc

SEQ ID NO: 1244059 - RNA, 24 nt, Human
cagcacaccaaggaccugcaccgg

SEQ ID NO: 1244060 - RNA, 21 nt, Human
caggagcaagaaaaccucagc

SEQ ID NO: 1244061 - RNA, 28 nt, Human
cagucuagaaggcaaaauucccagccac

SEQ ID NO: 1244062 - RNA, 20 nt, Human
caguggccuuccuccauguc

SEQ ID NO: 1244063 - RNA, 19 nt, Human
caugucacaaaaguugagg

SEQ ID NO: 1244064 - RNA, 21 nt, Human
ccaaagcucaagaagaccaug

SEQ ID NO: 1244065 - RNA, 19 nt, Human
ccacaggagcaagaaaacc

SEQ ID NO: 1244066 - RNA, 22 nt, Human
ccagaggcaguguaaaaugcag

SEQ ID NO: 1244067 - RNA, 19 nt, Human
ccagaucaccuacaaagua

SEQ ID NO: 1244068 - RNA, 21 nt, Human
ccagggaauuagagccucaca

SEQ ID NO: 1244069 - RNA, 20 nt, Human
cccaaacaucucagcggagu

SEQ ID NO: 1244070 - RNA, 19 nt, Human
cccugcuuucaagggcaga

SEQ ID NO: 1244071 - RNA, 22 nt, Human
cccugcuuucaagggcagaggu

SEQ ID NO: 1244072 - RNA, 23 nt, Human
ccggaaagcucggaaaacggcca

SEQ ID NO: 1244073 - RNA, 22 nt, Human
ccugucucuucccguccaagga

SEQ ID NO: 1244074 - RNA, 20 nt, Human
cgccggagggccaacaagau

SEQ ID NO: 1244075 - RNA, 23 nt, Human
cggccacagggggucgucagcag

SEQ ID NO: 1244076 - RNA, 20 nt, Human
cggccucugaguucccucag

SEQ ID NO: 1244077 - RNA, 18 nt, Human
cggcuggggcaaaguggc

SEQ ID NO: 1244078 - RNA, 19 nt, Human
cuccugccugucucuuccc

SEQ ID NO: 1244079 - RNA, 20 nt, Human
cugauccuaagaguagcuga

SEQ ID NO: 1244080 - RNA, 18 nt, Human
cugcaagaggcuuuccuc

SEQ ID NO: 1244081 - RNA, 21 nt, Human
gaacaacaucucagcaaagca

SEQ ID NO: 1244082 - RNA, 19 nt, Human
gacacauucugcagaagga

SEQ ID NO: 1244083 - RNA, 22 nt, Human
gacccagggaauuagagccuca

SEQ ID NO: 1244084 - RNA, 20 nt, Human
gacucagaacuuaucuagag

SEQ ID NO: 1244085 - RNA, 19 nt, Human
gagcugaaaagggagccag

SEQ ID NO: 1244086 - RNA, 22 nt, Human
gagcugucccugccuuucugaa

SEQ ID NO: 1244087 - RNA, 19 nt, Human
gaggggaccgcagggcugg

SEQ ID NO: 1244088 - RNA, 20 nt, Human
gcacaccaaggaccugcacc

SEQ ID NO: 1244089 - RNA, 24 nt, Human
gcagaaggagcaggaccacaagga

SEQ ID NO: 1244090 - RNA, 22 nt, Human
gcaggaccacaaggaaccaaag

SEQ ID NO: 1244091 - RNA, 21 nt, Human
gcccuagaucccuuaaaccuu

SEQ ID NO: 1244092 - RNA, 19 nt, Human
ggaacaacaguggguccag

SEQ ID NO: 1244093 - RNA, 18 nt, Human
ggagcaggaccacaagga

SEQ ID NO: 1244094 - RNA, 18 nt, Human
ggcaaaguggcuggggca

SEQ ID NO: 1244095 - RNA, 20 nt, Human
gggcagaggucccugcggcu

SEQ ID NO: 1244096 - RNA, 24 nt, Human
gguguuggcuuucuucaucugugu

SEQ ID NO: 1244097 - RNA, 19 nt, Human
gguucaucauuccgacucc

SEQ ID NO: 1244098 - RNA, 22 nt, Human
guagaauucauguauuuauuuu

SEQ ID NO: 1244099 - RNA, 22 nt, Human
guggcuggggcaaagcuacaaa

SEQ ID NO: 1244100 - RNA, 22 nt, Human
guuccaaagcucaagaagacca

SEQ ID NO: 1244101 - RNA, 19 nt, Human
uaagaucaacucucugcuc

SEQ ID NO: 1244102 - RNA, 23 nt, Human
uacuaugccuggacgugcacgua

SEQ ID NO: 1244103 - RNA, 18 nt, Human
uagcucagaguugaacaa

SEQ ID NO: 1244104 - RNA, 18 nt, Human
uaggagagcagggugaua

SEQ ID NO: 1244105 - RNA, 23 nt, Human
uauacaacauagguuuuugugug

SEQ ID NO: 1244106 - RNA, 23 nt, Human
uauccagaaucaauaagaucaac

SEQ ID NO: 1244107 - RNA, 21 nt, Human
uauccagaucaccuacaaagu

SEQ ID NO: 1244108 - RNA, 24 nt, Human
uauucugaagauggagguugucca

SEQ ID NO: 1244109 - RNA, 27 nt, Human
ucaaaauagagucucuuaugucuuccc

SEQ ID NO: 1244110 - RNA, 23 nt, Human
ucacagagauuucugcugucaga

SEQ ID NO: 1244111 - RNA, 19 nt, Human
ucacaggccggccugggau

SEQ ID NO: 1244112 - RNA, 21 nt, Human
ucacaggccggccugggaugc

SEQ ID NO: 1244113 - RNA, 21 nt, Human
ucacaggccggccugggaugc

SEQ ID NO: 1244114 - RNA, 23 nt, Human
ucacuaaccuuuccugagccccc

SEQ ID NO: 1244115 - RNA, 20 nt, Human
ucaggucuuucucaucccac

SEQ ID NO: 1244116 - RNA, 24 nt, Human
ucaugaauaauuaaugaagcacaa

SEQ ID NO: 1244117 - RNA, 21 nt, Human
uccagaaucaauaagaucaac

SEQ ID NO: 1244118 - RNA, 22 nt, Human
uccugagcccccauggggacuc

SEQ ID NO: 1244119 - RNA, 23 nt, Human
uccugagcccccauggggacuca

SEQ ID NO: 1244120 - RNA, 24 nt, Human
ucgcauggggagaaacuuuggaca

SEQ ID NO: 1244121 - RNA, 18 nt, Human
ucggaacucagcgggauu

SEQ ID NO: 1244122 - RNA, 19 nt, Human
ucggaacucagcgggauuu

SEQ ID NO: 1244123 - RNA, 22 nt, Human
ucuccauucucugaccugggaa

SEQ ID NO: 1244124 - RNA, 21 nt, Human
ucucucuuucuuuucccuaca

SEQ ID NO: 1244125 - RNA, 23 nt, Human
ucucuuaugucuucccuuucgac

SEQ ID NO: 1244126 - RNA, 18 nt, Human
ucugaagauggagguugu

SEQ ID NO: 1244127 - RNA, 24 nt, Human
ucuuuccaggucaucacuaaccuu

SEQ ID NO: 1244128 - RNA, 22 nt, Human
ugaagauggagguuguccaaga

SEQ ID NO: 1244129 - RNA, 20 nt, Human
ugacagucugaucucucuuu

SEQ ID NO: 1244130 - RNA, 22 nt, Human
ugacugaggggaccgcagggcu

SEQ ID NO: 1244131 - RNA, 26 nt, Human
ugacuucgaaauaauuuuguugauuu

SEQ ID NO: 1244132 - RNA, 19 nt, Human
ugauccuaagaguagcuga

SEQ ID NO: 1244133 - RNA, 20 nt, Human
ugccuggacgugcacguagg

SEQ ID NO: 1244134 - RNA, 19 nt, Human
ugccuugguggcaucuugg

SEQ ID NO: 1244135 - RNA, 18 nt, Human
uggcaucuuggaacauug

SEQ ID NO: 1244136 - RNA, 19 nt, Human
uggcuggggcaaagcuaca

SEQ ID NO: 1244137 - RNA, 20 nt, Human
uggcuggggcaaagcuacaa

SEQ ID NO: 1244138 - RNA, 21 nt, Human
ugggauuauguggaaacucuu

SEQ ID NO: 1244139 - RNA, 25 nt, Human
uggggacucagaacuuaucuagagu

SEQ ID NO: 1244140 - RNA, 22 nt, Human
ugggucaaagcggcuggggcaa

SEQ ID NO: 1244141 - RNA, 21 nt, Human
uggguccaggggaccggcacu

SEQ ID NO: 1244142 - RNA, 21 nt, Human
ugguagcaagagugauuucug

SEQ ID NO: 1244143 - RNA, 26 nt, Human
ugucacaaaaguugagggacacggga

SEQ ID NO: 1244144 - RNA, 20 nt, Human
uguccagaggcaguguaaaa

SEQ ID NO: 1244145 - RNA, 24 nt, Human
ugugcugguucaucauuccgacuc

SEQ ID NO: 1244146 - RNA, 20 nt, Human
uuacugccaacaugucucgc

SEQ ID NO: 1244147 - RNA, 25 nt, Human
uucagcaaaaaggaauauacuagga

SEQ ID NO: 1244148 - RNA, 18 nt, Human
uucccuacauccaaggac

SEQ ID NO: 1244149 - RNA, 21 nt, Human
uucgugaaaaaugucagaguu

SEQ ID NO: 1244150 - RNA, 25 nt, Human
uucucaucccacgaggccauauuuc

SEQ ID NO: 1244151 - RNA, 19 nt, Human
uugagagacugggagucgg

SEQ ID NO: 1244152 - RNA, 24 nt, Human
uugagggacacgggaguuccacag

SEQ ID NO: 1244153 - RNA, 20 nt, Human
uugaugccagcgaagcauac

SEQ ID NO: 1244154 - RNA, 19 nt, Human
uugauuauccagaucaccu

SEQ ID NO: 1244155 - RNA, 20 nt, Human
uuggcuuucuucaucugugu

SEQ ID NO: 1244156 - RNA, 24 nt, Human
uuggcuuucuucaucuguguuucc

SEQ ID NO: 1244157 - RNA, 21 nt, Human
uugggauuauguggaaacucu

SEQ ID NO: 1244158 - RNA, 20 nt, Human
uugggucaaagcggcugggg

SEQ ID NO: 1244159 - RNA, 23 nt, Human
uuucucaucccacgaggccauau

SEQ ID NO: 1244160 - RNA, 22 nt, Human
uuucugcugucagaagccacag

SEQ ID NO: 1244161 - RNA, 24 nt, Human
uuucuuuucccuacauccaaggac

SEQ ID NO: 1244162 - RNA, 24 nt, Human
aaaguguugggauuacaggcauga

SEQ ID NO: 1244163 - RNA, 21 nt, Human
aaguguugggauuacaggcau

SEQ ID NO: 1244164 - RNA, 26 nt, Human
aaguguugggauuacaggcaugagcc

SEQ ID NO: 1244165 - RNA, 24 nt, Human
accauguuggccaggcuggucucg

SEQ ID NO: 1244166 - RNA, 22 nt, Human
acccgccucggccucucaaagu

SEQ ID NO: 1244167 - RNA, 18 nt, Human
acgggguuucaccauguu

SEQ ID NO: 1244168 - RNA, 23 nt, Human
acgggguuucaccauguuggcca

SEQ ID NO: 1244169 - RNA, 24 nt, Human
acgggguuucaccauguuggccag

SEQ ID NO: 1244170 - RNA, 21 nt, Human
agaggacagaaucaaaaucug

SEQ ID NO: 1244171 - RNA, 18 nt, Human
agcuugugggcgaugggc

SEQ ID NO: 1244172 - RNA, 18 nt, Human
aggugacccacccgccuc

SEQ ID NO: 1244173 - RNA, 23 nt, Human
caaaguguugggauuacaggcau

SEQ ID NO: 1244174 - RNA, 24 nt, Human
caaaguguugggauuacaggcaug

SEQ ID NO: 1244175 - RNA, 28 nt, Human
caagcgauucuccugccucaaccuccca

SEQ ID NO: 1244176 - RNA, 20 nt, Human
caauggugcaaucuuggcuc

SEQ ID NO: 1244177 - RNA, 21 nt, Human
caccauguuggccaggcuggu

SEQ ID NO: 1244178 - RNA, 24 nt, Human
caccauguuggccaggcuggucuc

SEQ ID NO: 1244179 - RNA, 27 nt, Human
caccauguuggccaggcuggucucgaa

SEQ ID NO: 1244180 - RNA, 23 nt, Human
cacccgccucggccucucaaagu

SEQ ID NO: 1244181 - RNA, 20 nt, Human
caccgggcacccaggcuggu

SEQ ID NO: 1244182 - RNA, 21 nt, Human
caccugcugggcuaaaaucau

SEQ ID NO: 1244183 - RNA, 21 nt, Human
cacugcaaccuucgccuccca

SEQ ID NO: 1244184 - RNA, 25 nt, Human
cagccucauugaugcccucagugau

SEQ ID NO: 1244185 - RNA, 23 nt, Human
caggaugcaccaccaugcacggc

SEQ ID NO: 1244186 - RNA, 23 nt, Human
caugaacacugaaagggugggca

SEQ ID NO: 1244187 - RNA, 24 nt, Human
cauguuggccaggcuggucucgaa

SEQ ID NO: 1244188 - RNA, 24 nt, Human
ccagaagucuuccuccaaggcugg

SEQ ID NO: 1244189 - RNA, 18 nt, Human
ccagaggacagaaucaaa

SEQ ID NO: 1244190 - RNA, 21 nt, Human
cccagaagucuuccuccaagg

SEQ ID NO: 1244191 - RNA, 20 nt, Human
cccagguucaagcgauucuc

SEQ ID NO: 1244192 - RNA, 23 nt, Human
cccagguucaagcgauucuccug

SEQ ID NO: 1244193 - RNA, 24 nt, Human
ccucccagguucaagcgauucucc

SEQ ID NO: 1244194 - RNA, 22 nt, Human
ccugaccucaggugacccaccc

SEQ ID NO: 1244195 - RNA, 23 nt, Human
ccugaccucaggugacccacccg

SEQ ID NO: 1244196 - RNA, 23 nt, Human
ccugccucaaccucccaaguagc

SEQ ID NO: 1244197 - RNA, 19 nt, Human
cucaaccucccaaguagcu

SEQ ID NO: 1244198 - RNA, 24 nt, Human
cucacugcaaccuucgccucccag

SEQ ID NO: 1244199 - RNA, 20 nt, Human
cucuuguugcccaggcugga

SEQ ID NO: 1244200 - RNA, 23 nt, Human
cugcaaccuucgccucccagguu

SEQ ID NO: 1244201 - RNA, 24 nt, Human
cugcaaccuucgccucccagguuc

SEQ ID NO: 1244202 - RNA, 22 nt, Human
cuggagccaagacuaugugucu

SEQ ID NO: 1244203 - RNA, 18 nt, Human
cuuuaacaagcugcccuc

SEQ ID NO: 1244204 - RNA, 24 nt, Human
gagacgggguuucaccauguuggc

SEQ ID NO: 1244205 - RNA, 20 nt, Human
gauuacaggaugcaccacca

SEQ ID NO: 1244206 - RNA, 23 nt, Human
gauuacaggaugcaccaccaugc

SEQ ID NO: 1244207 - RNA, 18 nt, Human
gauuacaggcaugagcca

SEQ ID NO: 1244208 - RNA, 22 nt, Human
gauuacaggcaugagccacugc

SEQ ID NO: 1244209 - RNA, 23 nt, Human
gauuacaggcaugagccacugca

SEQ ID NO: 1244210 - RNA, 23 nt, Human
gcaccgggcacccaggcugguuu

SEQ ID NO: 1244211 - RNA, 23 nt, Human
gccaagacuaugugucucugcuc

SEQ ID NO: 1244212 - RNA, 20 nt, Human
gcucuuguugcccaggcugg

SEQ ID NO: 1244213 - RNA, 21 nt, Human
gcucuuguugcccaggcugga

SEQ ID NO: 1244214 - RNA, 23 nt, Human
gcuggucucgaacuccugaccuc

SEQ ID NO: 1244215 - RNA, 22 nt, Human
ggauuacaggcaugagccacug

SEQ ID NO: 1244216 - RNA, 24 nt, Human
ggcuggucucgaacuccugaccuc

SEQ ID NO: 1244217 - RNA, 23 nt, Human
gggguuucaccauguuggccagg

SEQ ID NO: 1244218 - RNA, 22 nt, Human
ggguuucaccauguuggccagg

SEQ ID NO: 1244219 - RNA, 19 nt, Human
ggucucgaacuccugaccu

SEQ ID NO: 1244220 - RNA, 23 nt, Human
guagagacgggguuucaccaugu

SEQ ID NO: 1244221 - RNA, 23 nt, Human
gucuuuaacaagcugcccucuag

SEQ ID NO: 1244222 - RNA, 22 nt, Human
gugacccacccgccucggccuc

SEQ ID NO: 1244223 - RNA, 22 nt, Human
uacaggcaugagccacugcacc

SEQ ID NO: 1244224 - RNA, 22 nt, Human
uagagacgggguuucaccaugu

SEQ ID NO: 1244225 - RNA, 19 nt, Human
uaggucuuuaacaagcugc

SEQ ID NO: 1244226 - RNA, 24 nt, Human
uaguagagacgggguuucaccaug

SEQ ID NO: 1244227 - RNA, 26 nt, Human
uaguagagacgggguuucaccauguu

SEQ ID NO: 1244228 - RNA, 19 nt, Human
uauuuuauuuuuuaguaga

SEQ ID NO: 1244229 - RNA, 22 nt, Human
uauuuuauuuuuuaguagagac

SEQ ID NO: 1244230 - RNA, 23 nt, Human
ucaaaguguugggauuacaggca

SEQ ID NO: 1244231 - RNA, 24 nt, Human
ucaaaguguugggauuacaggcau

SEQ ID NO: 1244232 - RNA, 19 nt, Human
ucacugcaaccuucgccuc

SEQ ID NO: 1244233 - RNA, 24 nt, Human
ucacugcaaccuucgccucccagg

SEQ ID NO: 1244234 - RNA, 25 nt, Human
ucacugcaaccuucgccucccaggu

SEQ ID NO: 1244235 - RNA, 21 nt, Human
ucccagguucaagcgauucuc

SEQ ID NO: 1244236 - RNA, 24 nt, Human
ucccagguucaagcgauucuccug

SEQ ID NO: 1244237 - RNA, 24 nt, Human
ucucaaaguguugggauuacaggc

SEQ ID NO: 1244238 - RNA, 19 nt, Human
ucuccucuagcccaggcug

SEQ ID NO: 1244239 - RNA, 26 nt, Human
ucuccugccucaaccucccaaguagc

SEQ ID NO: 1244240 - RNA, 23 nt, Human
ucucgaacuccugaccucaggug

SEQ ID NO: 1244241 - RNA, 24 nt, Human
ugaccucaggugacccacccgccu

SEQ ID NO: 1244242 - RNA, 25 nt, Human
ugaccucaggugacccacccgccuc

SEQ ID NO: 1244243 - RNA, 23 nt, Human
ugcaaccuucgccucccagguuc

SEQ ID NO: 1244244 - RNA, 18 nt, Human
ugcccagaagucuuccuc

SEQ ID NO: 1244245 - RNA, 19 nt, Human
ugcccaggcuggaguucaa

SEQ ID NO: 1244246 - RNA, 21 nt, Human
ugcccaggcuggaguucaaug

SEQ ID NO: 1244247 - RNA, 24 nt, Human
ugcccaggcuggaguucaauggug

SEQ ID NO: 1244248 - RNA, 23 nt, Human
ugccucaaccucccaaguagcua

SEQ ID NO: 1244249 - RNA, 25 nt, Human
ugccucaaccucccaaguagcuaug

SEQ ID NO: 1244250 - RNA, 24 nt, Human
ugcucuuguugcccaggcuggagu

SEQ ID NO: 1244251 - RNA, 20 nt, Human
ugcugggcuaaaaucaugac

SEQ ID NO: 1244252 - RNA, 24 nt, Human
uggaguucaauggugcaaucuugg

SEQ ID NO: 1244253 - RNA, 21 nt, Human
uggcauugauacagcugaagu

SEQ ID NO: 1244254 - RNA, 24 nt, Human
uggccaggcuggucucgaacuccu

SEQ ID NO: 1244255 - RNA, 20 nt, Human
uggccaucucgaauucuccu

SEQ ID NO: 1244256 - RNA, 18 nt, Human
ugggauuacaggcaugag

SEQ ID NO: 1244257 - RNA, 19 nt, Human
ugggauuacaggcaugagc

SEQ ID NO: 1244258 - RNA, 21 nt, Human
ugggauuacaggcaugagcca

SEQ ID NO: 1244259 - RNA, 22 nt, Human
ugggauuacaggcaugagccac

SEQ ID NO: 1244260 - RNA, 22 nt, Human
ugggauuacaggcaugagccac

SEQ ID NO: 1244261 - RNA, 24 nt, Human
ugggauuacaggcaugagccacug

SEQ ID NO: 1244262 - RNA, 24 nt, Human
ugggauuacaggcaugagccacug

SEQ ID NO: 1244263 - RNA, 26 nt, Human
ugggauuacaggcaugagccacugca

SEQ ID NO: 1244264 - RNA, 27 nt, Human
ugggcauaacugaaacgaaacuggagc

SEQ ID NO: 1244265 - RNA, 18 nt, Human
uuaguagagacgggguuu

SEQ ID NO: 1244266 - RNA, 22 nt, Human
uuaguagagacgggguuucacc

SEQ ID NO: 1244267 - RNA, 24 nt, Human
uuaguagagacgggguuucaccau

SEQ ID NO: 1244268 - RNA, 21 nt, Human
uucaagcgauucuccugccuc

SEQ ID NO: 1244269 - RNA, 24 nt, Human
uucaagcgauucuccugccucaac

SEQ ID NO: 1244270 - RNA, 23 nt, Human
uugcucuuguugcccaggcugga

SEQ ID NO: 1244271 - RNA, 21 nt, Human
uuggggauauagaugugcuuc

SEQ ID NO: 1244272 - RNA, 24 nt, Human
uuucaccauguuggccaggcuggu

SEQ ID NO: 1244273 - RNA, 24 nt, Human
uuugcucuuguugcccaggcugga

SEQ ID NO: 1244274 - RNA, 23 nt, Human
uuuguaggucuuuaacaagcugc

SEQ ID NO: 1244275 - RNA, 24 nt, Human
uuuugcucuuguugcccaggcugg

SEQ ID NO: 1244276 - RNA, 24 nt, Human
uuuuuaguagagacgggguuucac

SEQ ID NO: 1244277 - RNA, 23 nt, Human
uuuuuuaguagagacgggguuuc

SEQ ID NO: 1244278 - RNA, 22 nt, Human
aagccaaccagcccagaaccag

SEQ ID NO: 1244279 - RNA, 26 nt, Human
agcaguagguguauucccucccgcag

SEQ ID NO: 1244280 - RNA, 23 nt, Human
cagagugggggcaguccucugcc

SEQ ID NO: 1244281 - RNA, 22 nt, Human
ccaaccggccucgauaagccaa

SEQ ID NO: 1244282 - RNA, 21 nt, Human
cgaguagaucccgcgcuccca

SEQ ID NO: 1244283 - RNA, 18 nt, Human
cgcgcucccaaauccggc

SEQ ID NO: 1244284 - RNA, 26 nt, Human
cgcugggcuggguguuccucggggac

SEQ ID NO: 1244285 - RNA, 21 nt, Human
gcaguauggugaaccccacac

SEQ ID NO: 1244286 - RNA, 18 nt, Human
ggacggcgcccacugccc

SEQ ID NO: 1244287 - RNA, 24 nt, Human
ggagugucccgagcugccucccau

SEQ ID NO: 1244288 - RNA, 18 nt, Human
gggcuggguguuccucgg

SEQ ID NO: 1244289 - RNA, 21 nt, Human
uaagccaaccagcccagaacc

SEQ ID NO: 1244290 - RNA, 22 nt, Human
uaagccaaccagcccagaacca

SEQ ID NO: 1244291 - RNA, 20 nt, Human
uagcucccucagcugcgugg

SEQ ID NO: 1244292 - RNA, 25 nt, Human
ucaaagcaguagguguauucccucc

SEQ ID NO: 1244293 - RNA, 20 nt, Human
ucccgcgcucccaaauccgg

SEQ ID NO: 1244294 - RNA, 22 nt, Human
ugcccgcuuggucccuggagug

SEQ ID NO: 1244295 - RNA, 20 nt, Human
ugcggacagagugggggcag

SEQ ID NO: 1244296 - RNA, 18 nt, Human
ugggggcaguccucugcc

SEQ ID NO: 1244297 - RNA, 18 nt, Human
uucaucuuuacacaaggu

SEQ ID NO: 1244298 - RNA, 20 nt, Human
uuugccaaacuuuguuuuua

SEQ ID NO: 1244299 - RNA, 23 nt, Human
aaugcccauuccuguccagcaac

SEQ ID NO: 1244300 - RNA, 23 nt, Human
acaagaacaaagccacacagcga

SEQ ID NO: 1244301 - RNA, 23 nt, Human
agcaacaauaaaaacauccugaa

SEQ ID NO: 1244302 - RNA, 20 nt, Human
agcaagaagggaggucuuuu

SEQ ID NO: 1244303 - RNA, 22 nt, Human
agccacacagcgaagacaagcc

SEQ ID NO: 1244304 - RNA, 22 nt, Human
caagaacaaagccacacagcga

SEQ ID NO: 1244305 - RNA, 24 nt, Human
cagcaacaauaaaaacauccugaa

SEQ ID NO: 1244306 - RNA, 19 nt, Human
cauuucaaauauauuucua

SEQ ID NO: 1244307 - RNA, 21 nt, Human
ccacauaauaucucuuuguuc

SEQ ID NO: 1244308 - RNA, 25 nt, Human
ccagcaacaauaaaaacauccugaa

SEQ ID NO: 1244309 - RNA, 25 nt, Human
uauccagagugucucuuaauucgau

SEQ ID NO: 1244310 - RNA, 20 nt, Human
ucccuacaagaacaaagcca

SEQ ID NO: 1244311 - RNA, 21 nt, Human
ucuuuguucuagcauaucugg

SEQ ID NO: 1244312 - RNA, 24 nt, Human
ucuuuguucuagcauaucuggguu

SEQ ID NO: 1244313 - RNA, 21 nt, Human
ugauuuguauaucaccaguga

SEQ ID NO: 1244314 - RNA, 21 nt, Human
ugcugucuuggucaaccacau

SEQ ID NO: 1244315 - RNA, 23 nt, Human
uguuuugcugucuuggucaacca

SEQ ID NO: 1244316 - RNA, 27 nt, Human
uucacuaggggagcuaacuguaaauuc

SEQ ID NO: 1244317 - RNA, 18 nt, Human
aaacaagaagacgcaccc

SEQ ID NO: 1244318 - RNA, 22 nt, Human
aagacgcacccuuugagggcac

SEQ ID NO: 1244319 - RNA, 20 nt, Human
acagaggccucacccuggcu

SEQ ID NO: 1244320 - RNA, 22 nt, Human
accaagcaccagacccuugcag

SEQ ID NO: 1244321 - RNA, 21 nt, Human
acccuugcagacauucccagg

SEQ ID NO: 1244322 - RNA, 23 nt, Human
acccuugcagacauucccaggau

SEQ ID NO: 1244323 - RNA, 22 nt, Human
acucuagaaccugcaccucguc

SEQ ID NO: 1244324 - RNA, 18 nt, Human
acuggucuguaccaagca

SEQ ID NO: 1244325 - RNA, 24 nt, Human
agcccauucuggggccuuuucugc

SEQ ID NO: 1244326 - RNA, 21 nt, Human
agcugugccagcccccgcccu

SEQ ID NO: 1244327 - RNA, 23 nt, Human
agcuugcagccccaucacucccu

SEQ ID NO: 1244328 - RNA, 19 nt, Human
aggcucaggaguggggccc

SEQ ID NO: 1244329 - RNA, 18 nt, Human
aggugcuucaggcuccag

SEQ ID NO: 1244330 - RNA, 19 nt, Human
aggugguagugguagcugg

SEQ ID NO: 1244331 - RNA, 21 nt, Human
aggugguagugguagcuggug

SEQ ID NO: 1244332 - RNA, 21 nt, Human
agucccagcaagucuucagaa

SEQ ID NO: 1244333 - RNA, 19 nt, Human
aucacucccugccucugcc

SEQ ID NO: 1244334 - RNA, 20 nt, Human
caaaacaagaagacgcaccc

SEQ ID NO: 1244335 - RNA, 19 nt, Human
caagcaccagacccuugca

SEQ ID NO: 1244336 - RNA, 21 nt, Human
caccauggcggcucaauuuca

SEQ ID NO: 1244337 - RNA, 18 nt, Human
cacccggcacagagcugg

SEQ ID NO: 1244338 - RNA, 23 nt, Human
caccuugcuggccugggcaggag

SEQ ID NO: 1244339 - RNA, 21 nt, Human
cagagcuccugccugccuucc

SEQ ID NO: 1244340 - RNA, 19 nt, Human
caucacucccugccucugc

SEQ ID NO: 1244341 - RNA, 23 nt, Human
ccagaaauccccacccucauuuc

SEQ ID NO: 1244342 - RNA, 21 nt, Human
ccaggcccacagccacugugc

SEQ ID NO: 1244343 - RNA, 23 nt, Human
ccaguccagagcugugccagccc

SEQ ID NO: 1244344 - RNA, 21 nt, Human
ccaguucaagccagcccauuc

SEQ ID NO: 1244345 - RNA, 22 nt, Human
cccacagggcacucuggggucc

SEQ ID NO: 1244346 - RNA, 21 nt, Human
ccccaugugggcaggacuggu

SEQ ID NO: 1244347 - RNA, 20 nt, Human
cccccacaggcugggcuccu

SEQ ID NO: 1244348 - RNA, 23 nt, Human
ccccgcccugagcuugcagcccc

SEQ ID NO: 1244349 - RNA, 21 nt, Human
cccugcccuccaggcccacag

SEQ ID NO: 1244350 - RNA, 22 nt, Human
ccucacccuggcugcagcccuu

SEQ ID NO: 1244351 - RNA, 19 nt, Human
cguaugugucccuuuuccu

SEQ ID NO: 1244352 - RNA, 21 nt, Human
cuccacucuagaaccugcacc

SEQ ID NO: 1244353 - RNA, 23 nt, Human
cuccugccugccuuccucuggcu

SEQ ID NO: 1244354 - RNA, 18 nt, Human
cucuagaaccugcaccuc

SEQ ID NO: 1244355 - RNA, 21 nt, Human
cugaaugucuucugugaacgg

SEQ ID NO: 1244356 - RNA, 21 nt, Human
cugcccaguccagagcugugc

SEQ ID NO: 1244357 - RNA, 20 nt, Human
cugcccaucaggcagcccug

SEQ ID NO: 1244358 - RNA, 22 nt, Human
cugggcaggaggugcuucaggc

SEQ ID NO: 1244359 - RNA, 20 nt, Human
cuucugucucuuggaacugu

SEQ ID NO: 1244360 - RNA, 27 nt, Human
cuugagaucccagaugugaacugcccc

SEQ ID NO: 1244361 - RNA, 23 nt, Human
cuugguggagaccccaauucccc

SEQ ID NO: 1244362 - RNA, 21 nt, Human
gagagugggccccaugugggc

SEQ ID NO: 1244363 - RNA, 20 nt, Human
gcaccuugcuggccugggca

SEQ ID NO: 1244364 - RNA, 18 nt, Human
gcccugagcuugcagccc

SEQ ID NO: 1244365 - RNA, 21 nt, Human
gccgggagacagagcuccugc

SEQ ID NO: 1244366 - RNA, 18 nt, Human
gcgaggauugcuugguug

SEQ ID NO: 1244367 - RNA, 24 nt, Human
ggcauccucucgaaggagggggug

SEQ ID NO: 1244368 - RNA, 20 nt, Human
gggcaggacuggucccacaa

SEQ ID NO: 1244369 - RNA, 21 nt, Human
gucucccagagcuggcccucc

SEQ ID NO: 1244370 - RNA, 21 nt, Human
gugcaguugaaauggugguug

SEQ ID NO: 1244371 - RNA, 20 nt, Human
uaacagcuuucuguggccag

SEQ ID NO: 1244372 - RNA, 31 nt, Human
uaccaagcaccagacccuugcagacauuccu

SEQ ID NO: 1244373 - RNA, 21 nt, Human
uagcaguaauagugcccacag

SEQ ID NO: 1244374 - RNA, 22 nt, Human
uagcucacagcagagaugacac

SEQ ID NO: 1244375 - RNA, 21 nt, Human
uccacagaggccucacccugg

SEQ ID NO: 1244376 - RNA, 25 nt, Human
ucccagagcuggcccucccccugcc

SEQ ID NO: 1244377 - RNA, 19 nt, Human
ucgaaggagggggugcagu

SEQ ID NO: 1244378 - RNA, 20 nt, Human
ucugcagaggucucuaggug

SEQ ID NO: 1244379 - RNA, 18 nt, Human
ucuguaccaagcaccaga

SEQ ID NO: 1244380 - RNA, 21 nt, Human
ucugucucuuggaacuguagg

SEQ ID NO: 1244381 - RNA, 18 nt, Human
ucuucugugaacgggggc

SEQ ID NO: 1244382 - RNA, 21 nt, Human
ugacacauuuggguugggcuu

SEQ ID NO: 1244383 - RNA, 21 nt, Human
ugcaccuugcuggccugggca

SEQ ID NO: 1244384 - RNA, 18 nt, Human
ugcagcaaacaugccaag

SEQ ID NO: 1244385 - RNA, 24 nt, Human
ugcagccccaucacucccugccuc

SEQ ID NO: 1244386 - RNA, 18 nt, Human
ugcaguugaaaugguggu

SEQ ID NO: 1244387 - RNA, 20 nt, Human
ugccaagugcacccacagau

SEQ ID NO: 1244388 - RNA, 21 nt, Human
ugccagcccccgcccugagcu

SEQ ID NO: 1244389 - RNA, 20 nt, Human
ugcccuccaggcccacagcc

SEQ ID NO: 1244390 - RNA, 18 nt, Human
ugccucugccgcaguccc

SEQ ID NO: 1244391 - RNA, 22 nt, Human
ugccugccuuccucuggcucag

SEQ ID NO: 1244392 - RNA, 19 nt, Human
uggcccucccccugcccag

SEQ ID NO: 1244393 - RNA, 23 nt, Human
ugggcaggaggugcuucaggcuc

SEQ ID NO: 1244394 - RNA, 25 nt, Human
ugggguguguggucaagucugcaga

SEQ ID NO: 1244395 - RNA, 24 nt, Human
uggugcgacugcccagaauggcac

SEQ ID NO: 1244396 - RNA, 20 nt, Human
uguccuuaugccccagaaau

SEQ ID NO: 1244397 - RNA, 20 nt, Human
ugugaacgggggcaggacug

SEQ ID NO: 1244398 - RNA, 20 nt, Human
uucccaggauggcugcccau

SEQ ID NO: 1244399 - RNA, 19 nt, Human
uugcagccccaucacuccc

SEQ ID NO: 1244400 - RNA, 21 nt, Human
aagggccccgccggcccuggg

SEQ ID NO: 1244401 - RNA, 21 nt, Human
aggugaaaagggccccgccgg

SEQ ID NO: 1244402 - RNA, 22 nt, Human
cagccccccagugcgagugccc

SEQ ID NO: 1244403 - RNA, 24 nt, Human
ccagcagcaccagcuccgcuuucc

SEQ ID NO: 1244404 - RNA, 25 nt, Human
ccagcagcaccagcuccgcuuuccc

SEQ ID NO: 1244405 - RNA, 19 nt, Human
ccaggauguggguccgagu

SEQ ID NO: 1244406 - RNA, 20 nt, Human
cccagugcgagugcccacgg

SEQ ID NO: 1244407 - RNA, 22 nt, Human
ccccgccaccuccgucagccca

SEQ ID NO: 1244408 - RNA, 20 nt, Human
cccgcaggaugauggcccgc

SEQ ID NO: 1244409 - RNA, 19 nt, Human
ccgccacagcuggcagagg

SEQ ID NO: 1244410 - RNA, 23 nt, Human
ccgccggcccugggcggcugcac

SEQ ID NO: 1244411 - RNA, 25 nt, Human
ccuggcccagcugcugguccccugg

SEQ ID NO: 1244412 - RNA, 21 nt, Human
cgcgguccuucuccuccagga

SEQ ID NO: 1244413 - RNA, 21 nt, Human
cuccaggaacugguagagccc

SEQ ID NO: 1244414 - RNA, 20 nt, Human
cugcgcgguccuucuccucc

SEQ ID NO: 1244415 - RNA, 25 nt, Human
cuggcccagcugcugucacagcccc

SEQ ID NO: 1244416 - RNA, 19 nt, Human
gagcccgugguccagcagc

SEQ ID NO: 1244417 - RNA, 18 nt, Human
gaggagaggcauugcagu

SEQ ID NO: 1244418 - RNA, 19 nt, Human
gcagagggcugcgcggucc

SEQ ID NO: 1244419 - RNA, 20 nt, Human
gcccaaggugaaaagggccc

SEQ ID NO: 1244420 - RNA, 20 nt, Human
gcccacggggcucggggugu

SEQ ID NO: 1244421 - RNA, 18 nt, Human
gcccugggcggcugcacc

SEQ ID NO: 1244422 - RNA, 19 nt, Human
gcuaucuggggagaggaga

SEQ ID NO: 1244423 - RNA, 19 nt, Human
gcugcgcgguccuucuccu

SEQ ID NO: 1244424 - RNA, 21 nt, Human
gucauuacacggccuccuggc

SEQ ID NO: 1244425 - RNA, 23 nt, Human
uacaccucuagccccgccaccuc

SEQ ID NO: 1244426 - RNA, 21 nt, Human
uaucuggggagaggagaggca

SEQ ID NO: 1244427 - RNA, 23 nt, Human
uccgcaccagaacguugccagga

SEQ ID NO: 1244428 - RNA, 18 nt, Human
ucuagccccgccaccucc

SEQ ID NO: 1244429 - RNA, 19 nt, Human
ucuggggagaggagaggca

SEQ ID NO: 1244430 - RNA, 21 nt, Human
uuucccguccgggccuuuccg

SEQ ID NO: 1244431 - RNA, 18 nt, Human
aaaaaacaagauagaggc

SEQ ID NO: 1244432 - RNA, 22 nt, Human
aaaaacaaaaaacaagauagag

SEQ ID NO: 1244433 - RNA, 20 nt, Human
aaacaagauagaggcagcaa

SEQ ID NO: 1244434 - RNA, 23 nt, Human
accccccccagaagaaaaaacaa

SEQ ID NO: 1244435 - RNA, 25 nt, Human
agaggcagcaaacacaaauucugag

SEQ ID NO: 1244436 - RNA, 23 nt, Human
aggcacuguucuagacccccccc

SEQ ID NO: 1244437 - RNA, 22 nt, Human
aggcagcaaacacaaauucuga

SEQ ID NO: 1244438 - RNA, 22 nt, Human
agggagaaaggagaggggaggg

SEQ ID NO: 1244439 - RNA, 23 nt, Human
augcgccccagaggcuggagcag

SEQ ID NO: 1244440 - RNA, 22 nt, Human
auucugagggagaggaaagggg

SEQ ID NO: 1244441 - RNA, 19 nt, Human
caaaaaacaagauagaggc

SEQ ID NO: 1244442 - RNA, 18 nt, Human
cagaagaaaaaacaaaaa

SEQ ID NO: 1244443 - RNA, 21 nt, Human
cagcgaggugcaaacgcgacg

SEQ ID NO: 1244444 - RNA, 23 nt, Human
ccagaggcuggagcagcgaggug

SEQ ID NO: 1244445 - RNA, 19 nt, Human
cccagaagaaaaaacaaaa

SEQ ID NO: 1244446 - RNA, 19 nt, Human
ccccagaggcuggagcagc

SEQ ID NO: 1244447 - RNA, 24 nt, Human
ccccagaggcuggagcagcgaggu

SEQ ID NO: 1244448 - RNA, 22 nt, Human
cccccagaagaaaaaacaaaaa

SEQ ID NO: 1244449 - RNA, 21 nt, Human
ccccccagaagaaaaaacaaa

SEQ ID NO: 1244450 - RNA, 20 nt, Human
ccggggcugggaggcgggag

SEQ ID NO: 1244451 - RNA, 21 nt, Human
cggggcugggaggcgggagaa

SEQ ID NO: 1244452 - RNA, 20 nt, Human
cuaugugccaggcacuguuc

SEQ ID NO: 1244453 - RNA, 22 nt, Human
gagaagccugaggugauggggg

SEQ ID NO: 1244454 - RNA, 23 nt, Human
gagaagccugaggugaugggggc

SEQ ID NO: 1244455 - RNA, 18 nt, Human
gagggcgcggagggaaag

SEQ ID NO: 1244456 - RNA, 21 nt, Human
gccccagaggcuggagcagcg

SEQ ID NO: 1244457 - RNA, 20 nt, Human
gcgccccagaggcuggagca

SEQ ID NO: 1244458 - RNA, 21 nt, Human
gcgccggggcugggaggcggg

SEQ ID NO: 1244459 - RNA, 19 nt, Human
ggagaaaggagaggggagg

SEQ ID NO: 1244460 - RNA, 23 nt, Human
ggagaggggagggcgcggaggga

SEQ ID NO: 1244461 - RNA, 22 nt, Human
ggcaggaagguucugagaggga

SEQ ID NO: 1244462 - RNA, 20 nt, Human
ggcaguugaguaagacggcu

SEQ ID NO: 1244463 - RNA, 21 nt, Human
uacuaugugccaggcacuguu

SEQ ID NO: 1244464 - RNA, 23 nt, Human
ucuagaccccccccagaagaaaa

SEQ ID NO: 1244465 - RNA, 20 nt, Human
ucugagggagaggaaagggg

SEQ ID NO: 1244466 - RNA, 19 nt, Human
ugagggagaggaaaggggc

SEQ ID NO: 1244467 - RNA, 19 nt, Human
uggaaugcgccccagaggc

SEQ ID NO: 1244468 - RNA, 27 nt, Human
ugggcggggcgcgcgugcgccggggcu

SEQ ID NO: 1244469 - RNA, 19 nt, Human
accccauggugaagcucga

SEQ ID NO: 1244470 - RNA, 19 nt, Human
acgcagauccaggccaguu

SEQ ID NO: 1244471 - RNA, 26 nt, Human
aggcaggagcgcggcaggggccagag

SEQ ID NO: 1244472 - RNA, 25 nt, Human
aggggccagagaggccauccgaacu

SEQ ID NO: 1244473 - RNA, 18 nt, Human
aguuuuuauuuuuucucc

SEQ ID NO: 1244474 - RNA, 21 nt, Human
caccacaccccauggugaagc

SEQ ID NO: 1244475 - RNA, 19 nt, Human
cagcccccauucuuccugc

SEQ ID NO: 1244476 - RNA, 21 nt, Human
ccaccggccagcccgggcacc

SEQ ID NO: 1244477 - RNA, 21 nt, Human
cccugccagcuggggccucuc

SEQ ID NO: 1244478 - RNA, 19 nt, Human
ccgcagcugcuccuugguu

SEQ ID NO: 1244479 - RNA, 21 nt, Human
ccuggugacagaugaccgucc

SEQ ID NO: 1244480 - RNA, 21 nt, Human
cgagguagaggucagccccca

SEQ ID NO: 1244481 - RNA, 23 nt, Human
cgagguagaggucagcccccauu

SEQ ID NO: 1244482 - RNA, 20 nt, Human
cggcgcgucgcagccgcccu

SEQ ID NO: 1244483 - RNA, 24 nt, Human
cgggcaccucggggaaccgcagcu

SEQ ID NO: 1244484 - RNA, 25 nt, Human
cguccuccucuuccagcccucccca

SEQ ID NO: 1244485 - RNA, 19 nt, Human
cuaaagcccaccacacccc

SEQ ID NO: 1244486 - RNA, 20 nt, Human
cuaaagcccaccacacccca

SEQ ID NO: 1244487 - RNA, 18 nt, Human
cucaagagaucaaaauuc

SEQ ID NO: 1244488 - RNA, 19 nt, Human
cucaagagaucaaaauucu

SEQ ID NO: 1244489 - RNA, 21 nt, Human
cugcagcagaaagcgguccag

SEQ ID NO: 1244490 - RNA, 19 nt, Human
cugggucccugccagcugg

SEQ ID NO: 1244491 - RNA, 19 nt, Human
gaaccgcagcugcuccuug

SEQ ID NO: 1244492 - RNA, 23 nt, Human
gaccguccuccucuuccagcccu

SEQ ID NO: 1244493 - RNA, 19 nt, Human
gagaagggccagggugaca

SEQ ID NO: 1244494 - RNA, 19 nt, Human
gaguuuuuauuuuuucucc

SEQ ID NO: 1244495 - RNA, 18 nt, Human
gcaggagcgcggcagggg

SEQ ID NO: 1244496 - RNA, 19 nt, Human
gccagcuacgucgggacgc

SEQ ID NO: 1244497 - RNA, 24 nt, Human
ggagaagcugcucaagagaucaaa

SEQ ID NO: 1244498 - RNA, 20 nt, Human
ggagaugggccgaggaccgu

SEQ ID NO: 1244499 - RNA, 24 nt, Human
ggcacauacaaaggcuggucaggc

SEQ ID NO: 1244500 - RNA, 22 nt, Human
ggccgaggaccgugguaccugc

SEQ ID NO: 1244501 - RNA, 20 nt, Human
ggcugaggagaggaagacac

SEQ ID NO: 1244502 - RNA, 18 nt, Human
ggggaaccgcagcugcuc

SEQ ID NO: 1244503 - RNA, 18 nt, Human
gggucuccagcaccaaca

SEQ ID NO: 1244504 - RNA, 18 nt, Human
guccaguuccuccuggau

SEQ ID NO: 1244505 - RNA, 21 nt, Human
guggugcggggcugcucuggc

SEQ ID NO: 1244506 - RNA, 24 nt, Human
uaaagcccaccacaccccauggug

SEQ ID NO: 1244507 - RNA, 20 nt, Human
ucuccagcaccaacaucucc

SEQ ID NO: 1244508 - RNA, 22 nt, Human
ucucggcgcgucgcagccgccc

SEQ ID NO: 1244509 - RNA, 18 nt, Human
ucucggcugaggagagga

SEQ ID NO: 1244510 - RNA, 24 nt, Human
ucucuugagcaccgagguagaggu

SEQ ID NO: 1244511 - RNA, 22 nt, Human
ucuuccugccugcgcagcaccc

SEQ ID NO: 1244512 - RNA, 18 nt, Human
ugacagcugcuucugcag

SEQ ID NO: 1244513 - RNA, 23 nt, Human
ugacagcugcuucugcagcagaa

SEQ ID NO: 1244514 - RNA, 18 nt, Human
ugaccguccuccucuucc

SEQ ID NO: 1244515 - RNA, 23 nt, Human
ugcggggcugcucuggcgucugu

SEQ ID NO: 1244516 - RNA, 21 nt, Human
ugcuggggcaggaggcaggag

SEQ ID NO: 1244517 - RNA, 23 nt, Human
uggugaagcucgaggguggugcg

SEQ ID NO: 1244518 - RNA, 25 nt, Human
gcccugggcugugcugugggcccca

SEQ ID NO: 1244519 - RNA, 18 nt, Human
ugaaagaauagccucuau

SEQ ID NO: 1244520 - RNA, 23 nt, Human
ugggcugugcugugggcccgggg

SEQ ID NO: 1244521 - RNA, 24 nt, Human
aaauggccccgguaaucucuaagc

SEQ ID NO: 1244522 - RNA, 21 nt, Human
agccucaguaauggagcagcc

SEQ ID NO: 1244523 - RNA, 24 nt, Human
aggugugguggaaguagucacaga

SEQ ID NO: 1244524 - RNA, 22 nt, Human
aguaauggagcagccuguaaaa

SEQ ID NO: 1244525 - RNA, 20 nt, Human
augaaggugugguggaaguu

SEQ ID NO: 1244526 - RNA, 25 nt, Human
ccgguaaucucuaagcuuguucccc

SEQ ID NO: 1244527 - RNA, 22 nt, Human
ccugcugguccuggcccaggac

SEQ ID NO: 1244528 - RNA, 20 nt, Human
cgggaggggaugggguggca

SEQ ID NO: 1244529 - RNA, 18 nt, Human
cucggccagcgggagggg

SEQ ID NO: 1244530 - RNA, 24 nt, Human
gcccucggccagcgggaggggaug

SEQ ID NO: 1244531 - RNA, 23 nt, Human
gggugguguugaaauggccccgg

SEQ ID NO: 1244532 - RNA, 22 nt, Human
ggugguguugaaauggccccgg

SEQ ID NO: 1244533 - RNA, 21 nt, Human
uaaacacucaauaaguaaugc

SEQ ID NO: 1244534 - RNA, 19 nt, Human
uaaguaaugccauugucac

SEQ ID NO: 1244535 - RNA, 22 nt, Human
uaaguaaugccauugucaccgu

SEQ ID NO: 1244536 - RNA, 24 nt, Human
uaaguaaugccauugucaccguca

SEQ ID NO: 1244537 - RNA, 22 nt, Human
uccacaagucccuguccaugcc

SEQ ID NO: 1244538 - RNA, 24 nt, Human
ucggccagcgggaggggauggggu

SEQ ID NO: 1244539 - RNA, 23 nt, Human
ucgucacagccucaguaauggag

SEQ ID NO: 1244540 - RNA, 18 nt, Human
ugaaauggccccgguaau

SEQ ID NO: 1244541 - RNA, 20 nt, Human
uggaaguagucacagagggc

SEQ ID NO: 1244542 - RNA, 18 nt, Human
uguaaaauagaggcaaua

SEQ ID NO: 1244543 - RNA, 20 nt, Human
uguaguggcggaugaaggug

SEQ ID NO: 1244544 - RNA, 19 nt, Human
ugugguggaaguagucaca

SEQ ID NO: 1244545 - RNA, 20 nt, Human
aaacgaugcccuagaacaga

SEQ ID NO: 1244546 - RNA, 23 nt, Human
aacauacuugcaacaccugcaga

SEQ ID NO: 1244547 - RNA, 21 nt, Human
aacuccuccuucuccacccua

SEQ ID NO: 1244548 - RNA, 18 nt, Human
aagacagaagcaccaaac

SEQ ID NO: 1244549 - RNA, 19 nt, Human
aaggcuucccaccaaaugg

SEQ ID NO: 1244550 - RNA, 19 nt, Human
aaugucuaccauucacagc

SEQ ID NO: 1244551 - RNA, 28 nt, Human
aauuuugacuuuuuauauauauguauau

SEQ ID NO: 1244552 - RNA, 25 nt, Human
acacacacaaacacacacauacuac

SEQ ID NO: 1244553 - RNA, 21 nt, Human
acacacacacauacacacaca

SEQ ID NO: 1244554 - RNA, 30 nt, Human
acacacacauacacacacaaacacacacaa

SEQ ID NO: 1244555 - RNA, 33 nt, Human
acacacacauacacacacaaacacacacauagu

SEQ ID NO: 1244556 - RNA, 21 nt, Human
acacacacauauauacgugug

SEQ ID NO: 1244557 - RNA, 19 nt, Human
acauacuacacacacaaaa

SEQ ID NO: 1244558 - RNA, 30 nt, Human
acgugugcuaugggcacacacacacauaca

SEQ ID NO: 1244559 - RNA, 19 nt, Human
acuccuccuucuccacccu

SEQ ID NO: 1244560 - RNA, 24 nt, Human
agaacagaaauauucuuuaaagga

SEQ ID NO: 1244561 - RNA, 23 nt, Human
agauaggaagaauaauugcuuug

SEQ ID NO: 1244562 - RNA, 23 nt, Human
agcccaguagaagcgucgcuggu

SEQ ID NO: 1244563 - RNA, 24 nt, Human
agccuucaaguagcuucuccagcc

SEQ ID NO: 1244564 - RNA, 19 nt, Human
auauguauauauauauaua

SEQ ID NO: 1244565 - RNA, 20 nt, Human
auauguauauauauauauau

SEQ ID NO: 1244566 - RNA, 19 nt, Human
aucuacacuugguguaagg

SEQ ID NO: 1244567 - RNA, 19 nt, Human
auguauauauauauauaua

SEQ ID NO: 1244568 - RNA, 20 nt, Human
auguauauauauauauauaa

SEQ ID NO: 1244569 - RNA, 19 nt, Human
caaaauuucccauucaacc

SEQ ID NO: 1244570 - RNA, 18 nt, Human
caaaguggggagaagguc

SEQ ID NO: 1244571 - RNA, 19 nt, Human
caaaugcuaaaauggcaca

SEQ ID NO: 1244572 - RNA, 19 nt, Human
caacaccugcagaaauuca

SEQ ID NO: 1244573 - RNA, 21 nt, Human
cacaauaucacaugugauaaa

SEQ ID NO: 1244574 - RNA, 22 nt, Human
cacacaaaauuucccauucaac

SEQ ID NO: 1244575 - RNA, 26 nt, Human
cacacaaacacacacauacuacacac

SEQ ID NO: 1244576 - RNA, 23 nt, Human
cacacacaaacacacacauacua

SEQ ID NO: 1244577 - RNA, 30 nt, Human
cacacacaaacacacacauacuacacacag

SEQ ID NO: 1244578 - RNA, 21 nt, Human
cacacacauacuacacacaca

SEQ ID NO: 1244579 - RNA, 25 nt, Human
cacacacauauauacgugugcuaug

SEQ ID NO: 1244580 - RNA, 21 nt, Human
cacacauacacacacaaacac

SEQ ID NO: 1244581 - RNA, 23 nt, Human
cacacauacuacacacacaaaau

SEQ ID NO: 1244582 - RNA, 19 nt, Human
cacagccuuaaaaugaugg

SEQ ID NO: 1244583 - RNA, 24 nt, Human
caccaaucccauaaaugaucuaca

SEQ ID NO: 1244584 - RNA, 23 nt, Human
cacccaaaccagggcucgugggc

SEQ ID NO: 1244585 - RNA, 23 nt, Human
cagccuucaaguagcuucuccag

SEQ ID NO: 1244586 - RNA, 19 nt, Human
caugagaaaacgugacagu

SEQ ID NO: 1244587 - RNA, 26 nt, Human
ccaaacuuaagguccccuucucaacu

SEQ ID NO: 1244588 - RNA, 24 nt, Human
ccaaccacaauggugaaagacaga

SEQ ID NO: 1244589 - RNA, 20 nt, Human
ccagagaguuuugcaugaga

SEQ ID NO: 1244590 - RNA, 21 nt, Human
ccagagcccccgcccccaugc

SEQ ID NO: 1244591 - RNA, 22 nt, Human
ccagagcccccgcccccaugcu

SEQ ID NO: 1244592 - RNA, 23 nt, Human
ccagaugcaccaggugagcugaa

SEQ ID NO: 1244593 - RNA, 24 nt, Human
cccaccaaauggaaacagaagagg

SEQ ID NO: 1244594 - RNA, 23 nt, Human
ccccaugcucugcugaaccaagc

SEQ ID NO: 1244595 - RNA, 20 nt, Human
ccgcuggcucugaaucccca

SEQ ID NO: 1244596 - RNA, 20 nt, Human
ccuagaacagaaauauucuu

SEQ ID NO: 1244597 - RNA, 22 nt, Human
ccucuaaggccugcaguccgcu

SEQ ID NO: 1244598 - RNA, 21 nt, Human
ccuugagcuccuagaaggcuc

SEQ ID NO: 1244599 - RNA, 22 nt, Human
cucacccaaauggcauggccuc

SEQ ID NO: 1244600 - RNA, 21 nt, Human
cugaguuuuauuauuacugac

SEQ ID NO: 1244601 - RNA, 25 nt, Human
gaaaauaaacaguggaaucaaaucc

SEQ ID NO: 1244602 - RNA, 22 nt, Human
gaagguuuuuuguuuguuugug

SEQ ID NO: 1244603 - RNA, 25 nt, Human
gcacacacacacauacacacacaaa

SEQ ID NO: 1244604 - RNA, 25 nt, Human
gcagcagggacacacacauauauac

SEQ ID NO: 1244605 - RNA, 22 nt, Human
gcagcaguacacaguguuugca

SEQ ID NO: 1244606 - RNA, 24 nt, Human
gccgcuggcucugaauccccaggu

SEQ ID NO: 1244607 - RNA, 19 nt, Human
gcgguggcuuuuuguuuug

SEQ ID NO: 1244608 - RNA, 21 nt, Human
ggagaaggucaggagaggagg

SEQ ID NO: 1244609 - RNA, 22 nt, Human
ggagaaggucaggagaggaggg

SEQ ID NO: 1244610 - RNA, 26 nt, Human
gguaaaaaacuuuuuuuuuuucuuuu

SEQ ID NO: 1244611 - RNA, 19 nt, Human
ggucaggagaggaggggga

SEQ ID NO: 1244612 - RNA, 18 nt, Human
gguggugguggcgguggu

SEQ ID NO: 1244613 - RNA, 18 nt, Human
gguuuaugcuuuugcuuu

SEQ ID NO: 1244614 - RNA, 22 nt, Human
guauauauauauauauauucua

SEQ ID NO: 1244615 - RNA, 21 nt, Human
guggugguguugguguggcgg

SEQ ID NO: 1244616 - RNA, 24 nt, Human
uaaaugucuaccauucacagccuu

SEQ ID NO: 1244617 - RNA, 22 nt, Human
uaagggcauaaggcaguugaag

SEQ ID NO: 1244618 - RNA, 21 nt, Human
uaagguccccuucucaacuug

SEQ ID NO: 1244619 - RNA, 23 nt, Human
uaagguccccuucucaacuuggu

SEQ ID NO: 1244620 - RNA, 21 nt, Human
uacaaugagaaaauaaacagu

SEQ ID NO: 1244621 - RNA, 22 nt, Human
uacacaauaucacaugugauaa

SEQ ID NO: 1244622 - RNA, 22 nt, Human
uacacacacaaacacacacaua

SEQ ID NO: 1244623 - RNA, 25 nt, Human
uacacacacaaacacacacauacua

SEQ ID NO: 1244624 - RNA, 25 nt, Human
uauauauauauauucuaguuuuccu

SEQ ID NO: 1244625 - RNA, 20 nt, Human
uauauauauguauauauaua

SEQ ID NO: 1244626 - RNA, 23 nt, Human
uauauauauguauauauauauau

SEQ ID NO: 1244627 - RNA, 18 nt, Human
uauauauguauauauaua

SEQ ID NO: 1244628 - RNA, 18 nt, Human
uauauguauauauauaua

SEQ ID NO: 1244629 - RNA, 26 nt, Human
uaugggcacacacacacauacacaca

SEQ ID NO: 1244630 - RNA, 18 nt, Human
uauguauauauauauaua

SEQ ID NO: 1244631 - RNA, 19 nt, Human
uauguauauauauauauau

SEQ ID NO: 1244632 - RNA, 25 nt, Human
uauguauauauauauauauauucua

SEQ ID NO: 1244633 - RNA, 22 nt, Human
uauuuguugguugguuuuuguu

SEQ ID NO: 1244634 - RNA, 19 nt, Human
ucacuuccccaccacucca

SEQ ID NO: 1244635 - RNA, 19 nt, Human
uccaggagaaggcaggaga

SEQ ID NO: 1244636 - RNA, 21 nt, Human
uccaggagaaggcaggagaaa

SEQ ID NO: 1244637 - RNA, 22 nt, Human
uccccaccacuccagagccccc

SEQ ID NO: 1244638 - RNA, 24 nt, Human
uccuagaaggcucugcaaaguggg

SEQ ID NO: 1244639 - RNA, 19 nt, Human
ucgcugguguuccuuccgc

SEQ ID NO: 1244640 - RNA, 23 nt, Human
ucuuuguauacauacagcgacug

SEQ ID NO: 1244641 - RNA, 22 nt, Human
ugaacauacuugcaacaccugc

SEQ ID NO: 1244642 - RNA, 22 nt, Human
ugacaguacuuaaugaaacuca

SEQ ID NO: 1244643 - RNA, 24 nt, Human
ugacaguacuuaaugaaacucagc

SEQ ID NO: 1244644 - RNA, 18 nt, Human
ugagaaaauaaacagugg

SEQ ID NO: 1244645 - RNA, 19 nt, Human
ugauggaacuaaucguugu

SEQ ID NO: 1244646 - RNA, 24 nt, Human
ugcagcagggacacacacauauau

SEQ ID NO: 1244647 - RNA, 27 nt, Human
ugcagcagggacacacacauauauacg

SEQ ID NO: 1244648 - RNA, 21 nt, Human
ugcuuuugcuuuugguaaauu

SEQ ID NO: 1244649 - RNA, 24 nt, Human
uggaaucaaauccucacccaaaug

SEQ ID NO: 1244650 - RNA, 22 nt, Human
uggccucuaaggccugcagucc

SEQ ID NO: 1244651 - RNA, 22 nt, Human
uggcuuuuuguuuuguucuggu

SEQ ID NO: 1244652 - RNA, 21 nt, Human
ugggcaggcagcaucacuucc

SEQ ID NO: 1244653 - RNA, 22 nt, Human
ugggcaggcagcaucacuuccc

SEQ ID NO: 1244654 - RNA, 24 nt, Human
ugggggaggcccgcgugcagcagu

SEQ ID NO: 1244655 - RNA, 19 nt, Human
ugguggugguggcgguggu

SEQ ID NO: 1244656 - RNA, 24 nt, Human
ugguggugguggcggugguucugu

SEQ ID NO: 1244657 - RNA, 25 nt, Human
ugguguggcgguguuggugguggug

SEQ ID NO: 1244658 - RNA, 23 nt, Human
ugguucuguguauugggggaagg

SEQ ID NO: 1244659 - RNA, 24 nt, Human
uguaaaaaacaaaagaaagguuuu

SEQ ID NO: 1244660 - RNA, 19 nt, Human
uguauacauacagcgacug

SEQ ID NO: 1244661 - RNA, 18 nt, Human
uguauauauauauauaua

SEQ ID NO: 1244662 - RNA, 18 nt, Human
ugucuaccauucacagcc

SEQ ID NO: 1244663 - RNA, 20 nt, Human
ugugagucuugccacccaaa

SEQ ID NO: 1244664 - RNA, 27 nt, Human
ugugauaaaugucuaccauucacagcc

SEQ ID NO: 1244665 - RNA, 30 nt, Human
ugugcuaugggcacacacacacauacacag

SEQ ID NO: 1244666 - RNA, 23 nt, Human
uguguuuguuuuguuuuguuuug

SEQ ID NO: 1244667 - RNA, 21 nt, Human
uguugccagucacugauuaag

SEQ ID NO: 1244668 - RNA, 20 nt, Human
uguugguggugguggcggug

SEQ ID NO: 1244669 - RNA, 19 nt, Human
uguuuuguuuuguucuuuc

SEQ ID NO: 1244670 - RNA, 19 nt, Human
uucaaguagcuucuccagc

SEQ ID NO: 1244671 - RNA, 18 nt, Human
uucaucuccaggagaagg

SEQ ID NO: 1244672 - RNA, 23 nt, Human
uuccagaucaauuuaaggcuucc

SEQ ID NO: 1244673 - RNA, 19 nt, Human
uuccuuuuuuuuugugccc

SEQ ID NO: 1244674 - RNA, 22 nt, Human
uucuuuuuuuuuuguaguggug

SEQ ID NO: 1244675 - RNA, 22 nt, Human
uugaagggguugugacuuauua

SEQ ID NO: 1244676 - RNA, 21 nt, Human
uugcgguggcuuuuuguuuug

SEQ ID NO: 1244677 - RNA, 26 nt, Human
uugcuaggcaaaugcuaaaauggcac

SEQ ID NO: 1244678 - RNA, 18 nt, Human
uuggaguggagauaacuc

SEQ ID NO: 1244679 - RNA, 18 nt, Human
uugguggugguggcggug

SEQ ID NO: 1244680 - RNA, 23 nt, Human
uuguguuuguuuuguuuuguuuu

SEQ ID NO: 1244681 - RNA, 18 nt, Human
uuguugccagucacugau

SEQ ID NO: 1244682 - RNA, 19 nt, Human
uuuguuuuguuuuguuuug

SEQ ID NO: 1244683 - RNA, 21 nt, Human
uuuuauauauauguauauauu

SEQ ID NO: 1244684 - RNA, 19 nt, Human
uuuugugcccaaguagaga

SEQ ID NO: 1244685 - RNA, 22 nt, Human
aaacagagauuggaaacacgca

SEQ ID NO: 1244686 - RNA, 19 nt, Human
aaaguguaagguuuucuuu

SEQ ID NO: 1244687 - RNA, 20 nt, Human
aacauaaaaucugaauaaaa

SEQ ID NO: 1244688 - RNA, 18 nt, Human
aagagacacauacugaaa

SEQ ID NO: 1244689 - RNA, 18 nt, Human
aagaucucaugccacuac

SEQ ID NO: 1244690 - RNA, 21 nt, Human
acagagucagaucaccggcca

SEQ ID NO: 1244691 - RNA, 19 nt, Human
accagucuaaugcauaaaa

SEQ ID NO: 1244692 - RNA, 19 nt, Human
acugcagccugcuagggug

SEQ ID NO: 1244693 - RNA, 23 nt, Human
acugcagccugcuagggugggcu

SEQ ID NO: 1244694 - RNA, 22 nt, Human
acuguauucaugccaucaucuc

SEQ ID NO: 1244695 - RNA, 22 nt, Human
agaacagagucagaucaccgga

SEQ ID NO: 1244696 - RNA, 20 nt, Human
agaacgcccacagcuccaga

SEQ ID NO: 1244697 - RNA, 20 nt, Human
agaguuugucugaaacuucc

SEQ ID NO: 1244698 - RNA, 25 nt, Human
aggaagcaagcaucaaacccugacu

SEQ ID NO: 1244699 - RNA, 21 nt, Human
agguggagaaucccagauccg

SEQ ID NO: 1244700 - RNA, 20 nt, Human
agucagaucaccggccaagg

SEQ ID NO: 1244701 - RNA, 21 nt, Human
auccaacagggacagaagacc

SEQ ID NO: 1244702 - RNA, 20 nt, Human
auguauuuagugcaccugaa

SEQ ID NO: 1244703 - RNA, 19 nt, Human
caacagggacagaagaccu

SEQ ID NO: 1244704 - RNA, 22 nt, Human
caacagggacagaagaccuuua

SEQ ID NO: 1244705 - RNA, 19 nt, Human
caacuuaugaaauaaaccc

SEQ ID NO: 1244706 - RNA, 20 nt, Human
caagagacacauacugaaac

SEQ ID NO: 1244707 - RNA, 30 nt, Human
cacagcuccagacccggcauggaccaucuu

SEQ ID NO: 1244708 - RNA, 30 nt, Human
cacauauccauucagaacauaccagaacag

SEQ ID NO: 1244709 - RNA, 19 nt, Human
cacucugaugaugcucuuc

SEQ ID NO: 1244710 - RNA, 21 nt, Human
cacuuccuucccugacagcac

SEQ ID NO: 1244711 - RNA, 25 nt, Human
cagauccgaaaacagagauuggaaa

SEQ ID NO: 1244712 - RNA, 21 nt, Human
ccacagaaaccacacgaauac

SEQ ID NO: 1244713 - RNA, 22 nt, Human
ccagggccagucccuacaccca

SEQ ID NO: 1244714 - RNA, 21 nt, Human
cccaagagacacauacugaaa

SEQ ID NO: 1244715 - RNA, 18 nt, Human
cccccaacccuaccacca

SEQ ID NO: 1244716 - RNA, 22 nt, Human
cgaaaacagagauuggaaacac

SEQ ID NO: 1244717 - RNA, 26 nt, Human
cgaaaacagagauuggaaacacgcaa

SEQ ID NO: 1244718 - RNA, 22 nt, Human
cucaaacucacuguuaggaaau

SEQ ID NO: 1244719 - RNA, 26 nt, Human
cucauaacgauguauucgucccuggg

SEQ ID NO: 1244720 - RNA, 23 nt, Human
cucugaugaugcucuuccaucuc

SEQ ID NO: 1244721 - RNA, 23 nt, Human
cuuagugccuuggacucuauuuc

SEQ ID NO: 1244722 - RNA, 23 nt, Human
cuucaagaucugaugcuccauuc

SEQ ID NO: 1244723 - RNA, 21 nt, Human
gaaaacagagauuggaaacac

SEQ ID NO: 1244724 - RNA, 22 nt, Human
gaagcucuugccauguggcucu

SEQ ID NO: 1244725 - RNA, 21 nt, Human
gaugcucuuccaucucuccac

SEQ ID NO: 1244726 - RNA, 20 nt, Human
gcucuuccaucucuccacuc

SEQ ID NO: 1244727 - RNA, 20 nt, Human
ggaaacacgcaaagggaccc

SEQ ID NO: 1244728 - RNA, 19 nt, Human
gggcuauccaacaucagaa

SEQ ID NO: 1244729 - RNA, 20 nt, Human
gucccuacacccacagaaac

SEQ ID NO: 1244730 - RNA, 21 nt, Human
uaaaaaacaggacauuaguac

SEQ ID NO: 1244731 - RNA, 18 nt, Human
uaaaagacagugguaucc

SEQ ID NO: 1244732 - RNA, 21 nt, Human
uaaacccacuaagccagcagg

SEQ ID NO: 1244733 - RNA, 20 nt, Human
uacacccacagaaaccacac

SEQ ID NO: 1244734 - RNA, 19 nt, Human
uacagucuucccaggaaaa

SEQ ID NO: 1244735 - RNA, 20 nt, Human
uacguaugucuguacagucu

SEQ ID NO: 1244736 - RNA, 26 nt, Human
uagcuaaguuaaucuuugagccacau

SEQ ID NO: 1244737 - RNA, 23 nt, Human
uaggaagcaagcaucaaacccug

SEQ ID NO: 1244738 - RNA, 19 nt, Human
uaugaaauaaacccacuaa

SEQ ID NO: 1244739 - RNA, 25 nt, Human
uccaaggcgacagagaaucaaccac

SEQ ID NO: 1244740 - RNA, 23 nt, Human
uccaucucuccacucggucccaa

SEQ ID NO: 1244741 - RNA, 26 nt, Human
ucccaggaaaaggauccauagauuuc

SEQ ID NO: 1244742 - RNA, 21 nt, Human
ucccgcaugugcggcggcacc

SEQ ID NO: 1244743 - RNA, 27 nt, Human
ucccuacacccacagaaaccacacgaa

SEQ ID NO: 1244744 - RNA, 21 nt, Human
ucccuaugucuagauguguuc

SEQ ID NO: 1244745 - RNA, 26 nt, Human
ucccuggguaaagagucagauuucug

SEQ ID NO: 1244746 - RNA, 18 nt, Human
ucugaaacuuccaaaaua

SEQ ID NO: 1244747 - RNA, 21 nt, Human
ucugaugaugcucuuccaucu

SEQ ID NO: 1244748 - RNA, 19 nt, Human
ucuuccaucucuccacucg

SEQ ID NO: 1244749 - RNA, 22 nt, Human
ugaccaagaaggugcagauucc

SEQ ID NO: 1244750 - RNA, 23 nt, Human
ugcaccugaacucauaacgaugu

SEQ ID NO: 1244751 - RNA, 20 nt, Human
ugcagugaccaagaaggugc

SEQ ID NO: 1244752 - RNA, 20 nt, Human
ugccgggcuaugaagugcag

SEQ ID NO: 1244753 - RNA, 23 nt, Human
ugcucagaguuuucagcaucuaa

SEQ ID NO: 1244754 - RNA, 25 nt, Human
ugcucuuccaucucuccacucgguc

SEQ ID NO: 1244755 - RNA, 22 nt, Human
uggaaaagcaaugagcgaccuu

SEQ ID NO: 1244756 - RNA, 19 nt, Human
uucccugacagcacuuuaa

SEQ ID NO: 1244757 - RNA, 25 nt, Human
uuccuucuugggucgcuuucauuug

SEQ ID NO: 1244758 - RNA, 20 nt, Human
aaccuccaccuccugggcuc

SEQ ID NO: 1244759 - RNA, 24 nt, Human
aaggugcugagaucacagguguga

SEQ ID NO: 1244760 - RNA, 21 nt, Human
acaggugcccaccaccacacc

SEQ ID NO: 1244761 - RNA, 22 nt, Human
accauagggagaugucuucuca

SEQ ID NO: 1244762 - RNA, 18 nt, Human
accauguuggccaggcug

SEQ ID NO: 1244763 - RNA, 23 nt, Human
accuaucagguacuggaggugaa

SEQ ID NO: 1244764 - RNA, 21 nt, Human
acucuguugcccaggcuggag

SEQ ID NO: 1244765 - RNA, 25 nt, Human
acucuguugcccaggcuggagugca

SEQ ID NO: 1244766 - RNA, 18 nt, Human
agaacucaagggacagga

SEQ ID NO: 1244767 - RNA, 19 nt, Human
agaucacaggugugagcca

SEQ ID NO: 1244768 - RNA, 20 nt, Human
agcuaugacagagaggggca

SEQ ID NO: 1244769 - RNA, 18 nt, Human
aggaaggagaugaguugg

SEQ ID NO: 1244770 - RNA, 21 nt, Human
aggaaggcagguuugggcugg

SEQ ID NO: 1244771 - RNA, 25 nt, Human
aggcuggagugcaguggcaugaucu

SEQ ID NO: 1244772 - RNA, 24 nt, Human
aggugauccaccugccucggccuc

SEQ ID NO: 1244773 - RNA, 26 nt, Human
aggugcugagaucacaggugugagcc

SEQ ID NO: 1244774 - RNA, 22 nt, Human
aguagagaugggguuucaccau

SEQ ID NO: 1244775 - RNA, 24 nt, Human
agugauucuccugccucagccucc

SEQ ID NO: 1244776 - RNA, 18 nt, Human
agugcaguggcaugaucu

SEQ ID NO: 1244777 - RNA, 19 nt, Human
agugcaguggcaugaucuc

SEQ ID NO: 1244778 - RNA, 21 nt, Human
agugcaguggcaugaucuccg

SEQ ID NO: 1244779 - RNA, 22 nt, Human
augacagagaggggcaggguac

SEQ ID NO: 1244780 - RNA, 18 nt, Human
augggguuucaccauguu

SEQ ID NO: 1244781 - RNA, 22 nt, Human
augggguuucaccauguuggcc

SEQ ID NO: 1244782 - RNA, 23 nt, Human
augggguuucaccauguuggcca

SEQ ID NO: 1244783 - RNA, 24 nt, Human
augggguuucaccauguuggccag

SEQ ID NO: 1244784 - RNA, 18 nt, Human
auucuccugccucagccu

SEQ ID NO: 1244785 - RNA, 24 nt, Human
auuuuuguauuuuuaguagagaug

SEQ ID NO: 1244786 - RNA, 26 nt, Human
caaacuccugaccuaaggugauccaa

SEQ ID NO: 1244787 - RNA, 20 nt, Human
caaccuccaccuccugggcu

SEQ ID NO: 1244788 - RNA, 23 nt, Human
caaccuccaccuccugggcucaa

SEQ ID NO: 1244789 - RNA, 24 nt, Human
caaccuccaccuccugggcucaag

SEQ ID NO: 1244790 - RNA, 22 nt, Human
caagauauucuccugccucagc

SEQ ID NO: 1244791 - RNA, 24 nt, Human
caaggugcugagaucacaggugug

SEQ ID NO: 1244792 - RNA, 20 nt, Human
caagugauucuccugccuca

SEQ ID NO: 1244793 - RNA, 22 nt, Human
caagugauucuccugccucagc

SEQ ID NO: 1244794 - RNA, 23 nt, Human
caaugugugccaggacagauagu

SEQ ID NO: 1244795 - RNA, 19 nt, Human
cacagaacucaagggacag

SEQ ID NO: 1244796 - RNA, 19 nt, Human
cacaggugugagccaccac

SEQ ID NO: 1244797 - RNA, 24 nt, Human
caccacaccuggcuaauuuuugua

SEQ ID NO: 1244798 - RNA, 21 nt, Human
caccauguuggccaggcuggu

SEQ ID NO: 1244799 - RNA, 24 nt, Human
caccauguuggccaggcuggucuc

SEQ ID NO: 1244800 - RNA, 27 nt, Human
caccauguuggccaggcuggucucaaa

SEQ ID NO: 1244801 - RNA, 21 nt, Human
cacugcaaccuccaccuccug

SEQ ID NO: 1244802 - RNA, 23 nt, Human
cacugcaaccuccaccuccuggg

SEQ ID NO: 1244803 - RNA, 20 nt, Human
cacuggacauuucgcacccu

SEQ ID NO: 1244804 - RNA, 24 nt, Human
caggugcccaccaccacaccuggc

SEQ ID NO: 1244805 - RNA, 24 nt, Human
cauguuggccaggcuggucucaaa

SEQ ID NO: 1244806 - RNA, 20 nt, Human
cauuguaacacagacaaagc

SEQ ID NO: 1244807 - RNA, 24 nt, Human
ccaccuccugggcucaagugauuc

SEQ ID NO: 1244808 - RNA, 19 nt, Human
cccaggcuggagugcagug

SEQ ID NO: 1244809 - RNA, 22 nt, Human
ccuccaccuccugggcucaagu

SEQ ID NO: 1244810 - RNA, 24 nt, Human
ccucccagguucaagauauucucc

SEQ ID NO: 1244811 - RNA, 24 nt, Human
ccuccugggcucaagugauucucc

SEQ ID NO: 1244812 - RNA, 21 nt, Human
ccugaccuaaggugauccacc

SEQ ID NO: 1244813 - RNA, 23 nt, Human
ccugaccuaaggugauccaccug

SEQ ID NO: 1244814 - RNA, 23 nt, Human
ccugggcucaagugauucuccuc

SEQ ID NO: 1244815 - RNA, 23 nt, Human
ccugggcucaagugauucuccug

SEQ ID NO: 1244816 - RNA, 23 nt, Human
cuaaggugauccaccugccucgg

SEQ ID NO: 1244817 - RNA, 23 nt, Human
cuaauuuuuguauuuuuaguaga

SEQ ID NO: 1244818 - RNA, 23 nt, Human
cucaagugauucuccugccucag

SEQ ID NO: 1244819 - RNA, 24 nt, Human
cucaagugauucuccugccucagc

SEQ ID NO: 1244820 - RNA, 24 nt, Human
cucacugcaaccuccaccuccugg

SEQ ID NO: 1244821 - RNA, 27 nt, Human
cucacugcaaccuccaccuccugggcu

SEQ ID NO: 1244822 - RNA, 20 nt, Human
cuccugggcucaagugauuc

SEQ ID NO: 1244823 - RNA, 21 nt, Human
cuccugggcucaagugauucu

SEQ ID NO: 1244824 - RNA, 21 nt, Human
cucgcaaggugcugagaucac

SEQ ID NO: 1244825 - RNA, 18 nt, Human
cugcaaccuccaccuccu

SEQ ID NO: 1244826 - RNA, 24 nt, Human
cugcaaccuccaccuccugggcuc

SEQ ID NO: 1244827 - RNA, 21 nt, Human
cugccucagccucccgaguaa

SEQ ID NO: 1244828 - RNA, 21 nt, Human
cuggaucuugauauguguuuc

SEQ ID NO: 1244829 - RNA, 24 nt, Human
cuggggagcccaccucccagguuc

SEQ ID NO: 1244830 - RNA, 19 nt, Human
cuuguggagugggggcugu

SEQ ID NO: 1244831 - RNA, 21 nt, Human
cuuguggagugggggcugugu

SEQ ID NO: 1244832 - RNA, 20 nt, Human
cuuuuguauuuuuaguagag

SEQ ID NO: 1244833 - RNA, 19 nt, Human
gacacagaacucaagggac

SEQ ID NO: 1244834 - RNA, 18 nt, Human
gacagauaguucuggggc

SEQ ID NO: 1244835 - RNA, 24 nt, Human
gaccuaaggugauccaccugccuc

SEQ ID NO: 1244836 - RNA, 25 nt, Human
gagaccugggcuugggaggcauccc

SEQ ID NO: 1244837 - RNA, 20 nt, Human
gagaugaguuggaggcuggg

SEQ ID NO: 1244838 - RNA, 18 nt, Human
gagaugggguuucaccau

SEQ ID NO: 1244839 - RNA, 24 nt, Human
gagaugggguuucaccauguuggc

SEQ ID NO: 1244840 - RNA, 20 nt, Human
gaggcugggacagggguccc

SEQ ID NO: 1244841 - RNA, 19 nt, Human
gaguuggaggcugggacag

SEQ ID NO: 1244842 - RNA, 18 nt, Human
gaucacaggugugagcca

SEQ ID NO: 1244843 - RNA, 24 nt, Human
gcaaggugcugagaucacaggugu

SEQ ID NO: 1244844 - RNA, 24 nt, Human
gcccaggcuggagugcaguggcau

SEQ ID NO: 1244845 - RNA, 21 nt, Human
gccugguuuggggaauguucg

SEQ ID NO: 1244846 - RNA, 25 nt, Human
gcuggagugcaguggcaugaucucc

SEQ ID NO: 1244847 - RNA, 22 nt, Human
gcuugggaggcaucccaggugg

SEQ ID NO: 1244848 - RNA, 22 nt, Human
ggacaggaaggagaugaguugg

SEQ ID NO: 1244849 - RNA, 25 nt, Human
ggacaggggucccugccagggaugc

SEQ ID NO: 1244850 - RNA, 20 nt, Human
ggagacagacaagauggggg

SEQ ID NO: 1244851 - RNA, 23 nt, Human
ggagucuuacucuguugcccagg

SEQ ID NO: 1244852 - RNA, 24 nt, Human
gggaggcaucccagguggacagug

SEQ ID NO: 1244853 - RNA, 19 nt, Human
gggcuaggaaggcagguuu

SEQ ID NO: 1244854 - RNA, 22 nt, Human
gggcucaagugauucuccugcc

SEQ ID NO: 1244855 - RNA, 22 nt, Human
gggguuucaccauguuggccag

SEQ ID NO: 1244856 - RNA, 20 nt, Human
gggguuuugcuuuaaagccu

SEQ ID NO: 1244857 - RNA, 22 nt, Human
ggguuucaccauguuggccagg

SEQ ID NO: 1244858 - RNA, 23 nt, Human
guagagaugggguuucaccaugu

SEQ ID NO: 1244859 - RNA, 19 nt, Human
gugauccaccugccucggc

SEQ ID NO: 1244860 - RNA, 22 nt, Human
gugauccaccugccucggccuc

SEQ ID NO: 1244861 - RNA, 24 nt, Human
gugauucuccugccucagccuccc

SEQ ID NO: 1244862 - RNA, 21 nt, Human
gugcugagaucacagguguga

SEQ ID NO: 1244863 - RNA, 21 nt, Human
gugugagccaccacgcugggc

SEQ ID NO: 1244864 - RNA, 22 nt, Human
uaacuuuuguauuuuuaguaga

SEQ ID NO: 1244865 - RNA, 24 nt, Human
uaauuuuuguauuuuuaguagaga

SEQ ID NO: 1244866 - RNA, 22 nt, Human
uacaggugcccaccaccacacc

SEQ ID NO: 1244867 - RNA, 22 nt, Human
uagagaugggguuucaccaugu

SEQ ID NO: 1244868 - RNA, 25 nt, Human
uaggaaggcagguuugggcuggaga

SEQ ID NO: 1244869 - RNA, 24 nt, Human
uaguagagaugggguuucaccaug

SEQ ID NO: 1244870 - RNA, 26 nt, Human
uaguagagaugggguuucaccauguu

SEQ ID NO: 1244871 - RNA, 19 nt, Human
uauguguuucucaguugga

SEQ ID NO: 1244872 - RNA, 19 nt, Human
uauucuccugccucagccu

SEQ ID NO: 1244873 - RNA, 23 nt, Human
ucacugcaaccuccaccuccugg

SEQ ID NO: 1244874 - RNA, 24 nt, Human
ucacugcaaccuccaccuccuggg

SEQ ID NO: 1244875 - RNA, 25 nt, Human
ucacugcaaccuccaccuccugggc

SEQ ID NO: 1244876 - RNA, 27 nt, Human
ucacugcaaccuccaccuccugggcuc

SEQ ID NO: 1244877 - RNA, 22 nt, Human
uccaaagaagcaagucuuacua

SEQ ID NO: 1244878 - RNA, 19 nt, Human
uccaaaggaccgacggacc

SEQ ID NO: 1244879 - RNA, 20 nt, Human
uccaaaggaccgacggaccu

SEQ ID NO: 1244880 - RNA, 24 nt, Human
ucccagguggacagugguugaggu

SEQ ID NO: 1244881 - RNA, 21 nt, Human
ucccagguucaagauauucuc

SEQ ID NO: 1244882 - RNA, 24 nt, Human
ucccagguucaagauauucuccug

SEQ ID NO: 1244883 - RNA, 23 nt, Human
ucccgaguaagugggauuacagg

SEQ ID NO: 1244884 - RNA, 24 nt, Human
ucccgaguaagugggauuacaggu

SEQ ID NO: 1244885 - RNA, 21 nt, Human
uccugggcucaagugauucuc

SEQ ID NO: 1244886 - RNA, 22 nt, Human
uccugggcucaagugauucucc

SEQ ID NO: 1244887 - RNA, 22 nt, Human
uccugggcucaagugauucucc

SEQ ID NO: 1244888 - RNA, 24 nt, Human
uccugggcucaagugauucuccug

SEQ ID NO: 1244889 - RNA, 24 nt, Human
ucgcaaggugcugagaucacaggu

SEQ ID NO: 1244890 - RNA, 22 nt, Human
ucuagacuccauccuccauucc

SEQ ID NO: 1244891 - RNA, 19 nt, Human
ucuccugccucagccuccc

SEQ ID NO: 1244892 - RNA, 25 nt, Human
ucuccugccucagccucccaaguaa

SEQ ID NO: 1244893 - RNA, 18 nt, Human
ucuguugcccaggcugga

SEQ ID NO: 1244894 - RNA, 24 nt, Human
ucuguugcccaggcuggagugcag

SEQ ID NO: 1244895 - RNA, 23 nt, Human
ucuuacucuguugcccaggcugg

SEQ ID NO: 1244896 - RNA, 24 nt, Human
ucuuacucuguugcccaggcugga

SEQ ID NO: 1244897 - RNA, 19 nt, Human
ugacacagaacucaaggga

SEQ ID NO: 1244898 - RNA, 18 nt, Human
ugacagagaggggcaggg

SEQ ID NO: 1244899 - RNA, 22 nt, Human
ugaccgugauugccugggauga

SEQ ID NO: 1244900 - RNA, 24 nt, Human
ugaccuaaggugauccaccugccu

SEQ ID NO: 1244901 - RNA, 22 nt, Human
ugagaucacaggugugagccac

SEQ ID NO: 1244902 - RNA, 24 nt, Human
ugagaucacaggugugagccacca

SEQ ID NO: 1244903 - RNA, 23 nt, Human
ugaucuccgcucacugcaaccuc

SEQ ID NO: 1244904 - RNA, 19 nt, Human
ugccaggacagauaguucu

SEQ ID NO: 1244905 - RNA, 21 nt, Human
ugccaggacagauaguucugg

SEQ ID NO: 1244906 - RNA, 18 nt, Human
ugcccaggcuggagugca

SEQ ID NO: 1244907 - RNA, 22 nt, Human
ugcccaggcuggagugcagugg

SEQ ID NO: 1244908 - RNA, 24 nt, Human
ugcccaggcuggagugcaguggca

SEQ ID NO: 1244909 - RNA, 21 nt, Human
ugcccugggcuuuaauuauuu

SEQ ID NO: 1244910 - RNA, 24 nt, Human
ugccucagccucccaaguaacugg

SEQ ID NO: 1244911 - RNA, 24 nt, Human
ugccucagccucccgaguaagugg

SEQ ID NO: 1244912 - RNA, 22 nt, Human
ugccugggaugagaguggagac

SEQ ID NO: 1244913 - RNA, 21 nt, Human
ugccugguuuggggaauguuc

SEQ ID NO: 1244914 - RNA, 24 nt, Human
ugcugagaucacaggugugagcca

SEQ ID NO: 1244915 - RNA, 22 nt, Human
uggaaaggacaggaaguugaug

SEQ ID NO: 1244916 - RNA, 24 nt, Human
uggagucuuacucuguugcccagg

SEQ ID NO: 1244917 - RNA, 19 nt, Human
uggagugcaguggcaugau

SEQ ID NO: 1244918 - RNA, 22 nt, Human
uggagugcaguggcaugaucuc

SEQ ID NO: 1244919 - RNA, 23 nt, Human
uggagugcaguggcaugaucucc

SEQ ID NO: 1244920 - RNA, 24 nt, Human
uggagugcaguggcaugaucuccg

SEQ ID NO: 1244921 - RNA, 24 nt, Human
uggccaggcuggucucaaacuccu

SEQ ID NO: 1244922 - RNA, 24 nt, Human
ugggaaugcaggugcgugccacca

SEQ ID NO: 1244923 - RNA, 20 nt, Human
ugggaugagaguggagacag

SEQ ID NO: 1244924 - RNA, 21 nt, Human
ugggauuacaggugcccacca

SEQ ID NO: 1244925 - RNA, 24 nt, Human
ugggauuacaggugcccaccacca

SEQ ID NO: 1244926 - RNA, 18 nt, Human
ugggcucaagugauucuc

SEQ ID NO: 1244927 - RNA, 24 nt, Human
ugggcucaagugauucuccugccu

SEQ ID NO: 1244928 - RNA, 20 nt, Human
ugggcuggagaccugggcuu

SEQ ID NO: 1244929 - RNA, 24 nt, Human
ugggguuucaccauguuggccagg

SEQ ID NO: 1244930 - RNA, 21 nt, Human
uguauuuuuaguagagauggg

SEQ ID NO: 1244931 - RNA, 18 nt, Human
ugucuggaaaggacagga

SEQ ID NO: 1244932 - RNA, 24 nt, Human
ugucuggaaaggacaggaaguuga

SEQ ID NO: 1244933 - RNA, 22 nt, Human
ugugacacagaacucaagggac

SEQ ID NO: 1244934 - RNA, 24 nt, Human
uuacucuguugcccaggcuggagu

SEQ ID NO: 1244935 - RNA, 18 nt, Human
uuaguagagaugggguuu

SEQ ID NO: 1244936 - RNA, 22 nt, Human
uuaguagagaugggguuucacc

SEQ ID NO: 1244937 - RNA, 24 nt, Human
uuaguagagaugggguuucaccau

SEQ ID NO: 1244938 - RNA, 21 nt, Human
uucaagauauucuccugccuc

SEQ ID NO: 1244939 - RNA, 19 nt, Human
uuccaaagaagcaagucuu

SEQ ID NO: 1244940 - RNA, 19 nt, Human
uugauauguguuucucagu

SEQ ID NO: 1244941 - RNA, 24 nt, Human
uugcccaggcuggagugcaguggc

SEQ ID NO: 1244942 - RNA, 20 nt, Human
uuggaggcugggacaggggu

SEQ ID NO: 1244943 - RNA, 21 nt, Human
uugggaggcaucccaggugga

SEQ ID NO: 1244944 - RNA, 22 nt, Human
uuuaaagauggagucuuacucu

SEQ ID NO: 1244945 - RNA, 24 nt, Human
uuuaaagccuggggagcccaccuc

SEQ ID NO: 1244946 - RNA, 24 nt, Human
uuucaccauguuggccaggcuggu

SEQ ID NO: 1244947 - RNA, 22 nt, Human
uuugcuuuaaagccuggggagc

SEQ ID NO: 1244948 - RNA, 24 nt, Human
uuuuuaguagagaugggguuucac

SEQ ID NO: 1244949 - RNA, 20 nt, Human
uuuuuguauuuuuaguagag

SEQ ID NO: 1244950 - RNA, 19 nt, Human
aaacaaagucuaacccaag

SEQ ID NO: 1244951 - RNA, 18 nt, Human
aaacagaaaaaaugguac

SEQ ID NO: 1244952 - RNA, 26 nt, Human
aaacagaaaaaaugguacacacuuua

SEQ ID NO: 1244953 - RNA, 26 nt, Human
aaacagguaaauuaacaggaaaacca

SEQ ID NO: 1244954 - RNA, 20 nt, Human
aacaaaaucuucaacuauga

SEQ ID NO: 1244955 - RNA, 21 nt, Human
aacuuacuuauaaaaacagaa

SEQ ID NO: 1244956 - RNA, 23 nt, Human
aagaacaaguaauauacauguac

SEQ ID NO: 1244957 - RNA, 19 nt, Human
aauagcuauacuacacuaa

SEQ ID NO: 1244958 - RNA, 21 nt, Human
acacauuauaaagucaaacag

SEQ ID NO: 1244959 - RNA, 19 nt, Human
acaguguaaaagaaaaaaa

SEQ ID NO: 1244960 - RNA, 22 nt, Human
acuaaaacacauuauaaaguca

SEQ ID NO: 1244961 - RNA, 21 nt, Human
acuacacuaagaugcuaaaca

SEQ ID NO: 1244962 - RNA, 18 nt, Human
agaaaaagucagcaaaua

SEQ ID NO: 1244963 - RNA, 23 nt, Human
agaaagaagaaauauugccaaga

SEQ ID NO: 1244964 - RNA, 19 nt, Human
aggaaaaccaaacugaucu

SEQ ID NO: 1244965 - RNA, 21 nt, Human
aggucuuucuacgggugccug

SEQ ID NO: 1244966 - RNA, 18 nt, Human
aguugguaccagugggcc

SEQ ID NO: 1244967 - RNA, 27 nt, Human
auaaagucuuguuuccaaaaaucuauu

SEQ ID NO: 1244968 - RNA, 19 nt, Human
auauuugguaaaccuaaaa

SEQ ID NO: 1244969 - RNA, 26 nt, Human
augcaauaagaaauuggaaaaaggga

SEQ ID NO: 1244970 - RNA, 25 nt, Human
auggaucacuuaaaagugagauuau

SEQ ID NO: 1244971 - RNA, 19 nt, Human
caaaaacaaagucuaaccc

SEQ ID NO: 1244972 - RNA, 19 nt, Human
caaaaacaaagucuaaccc

SEQ ID NO: 1244973 - RNA, 19 nt, Human
caaccgcacagaaucagaa

SEQ ID NO: 1244974 - RNA, 20 nt, Human
caacuaugaacugacaaaau

SEQ ID NO: 1244975 - RNA, 20 nt, Human
caaguaauauacauguacaa

SEQ ID NO: 1244976 - RNA, 25 nt, Human
cacuucaaccgcacagaaucagaag

SEQ ID NO: 1244977 - RNA, 24 nt, Human
cacuuuaacaaaagcaaaacuuaa

SEQ ID NO: 1244978 - RNA, 21 nt, Human
cauauuugguaaaccuaaaau

SEQ ID NO: 1244979 - RNA, 20 nt, Human
cauuuuagauaagcugguca

SEQ ID NO: 1244980 - RNA, 18 nt, Human
cccaaguugcuuuaaaaa

SEQ ID NO: 1244981 - RNA, 18 nt, Human
ccuacacuucaaccgcac

SEQ ID NO: 1244982 - RNA, 22 nt, Human
ccuuucuguugcuuacauugcc

SEQ ID NO: 1244983 - RNA, 22 nt, Human
cgaaucaaaaucuagucaugaa

SEQ ID NO: 1244984 - RNA, 19 nt, Human
cuccaaacagaaaaaaugg

SEQ ID NO: 1244985 - RNA, 24 nt, Human
cucccuacacuucaaccgcacaga

SEQ ID NO: 1244986 - RNA, 19 nt, Human
cuuaacacggacauuuaaa

SEQ ID NO: 1244987 - RNA, 23 nt, Human
uaaagcuaguuacaaaauccguu

SEQ ID NO: 1244988 - RNA, 18 nt, Human
uaacagagaguaacagaa

SEQ ID NO: 1244989 - RNA, 20 nt, Human
uaagaaagaagaaauauugc

SEQ ID NO: 1244990 - RNA, 18 nt, Human
uaagaaauuggaaaaagg

SEQ ID NO: 1244991 - RNA, 22 nt, Human
uacaugccaauauggaaaaaaa

SEQ ID NO: 1244992 - RNA, 19 nt, Human
uacauguacaagaaauuac

SEQ ID NO: 1244993 - RNA, 23 nt, Human
uacauguacaagaaauuacaaga

SEQ ID NO: 1244994 - RNA, 22 nt, Human
uaggucaaaaacaaagucuaac

SEQ ID NO: 1244995 - RNA, 23 nt, Human
uagugggaaguuuucaucuuugc

SEQ ID NO: 1244996 - RNA, 24 nt, Human
ucaaaaacaaagucuaacccaagu

SEQ ID NO: 1244997 - RNA, 24 nt, Human
uccaaacagaaaaaaugguacaca

SEQ ID NO: 1244998 - RNA, 21 nt, Human
uccacauggaaagaccacagc

SEQ ID NO: 1244999 - RNA, 21 nt, Human
ucccuacugaucugaaacuac

SEQ ID NO: 1245000 - RNA, 23 nt, Human
ucccuacugaucugaaacuacag

SEQ ID NO: 1245001 - RNA, 23 nt, Human
uccuuggucaguauagauuuccg

SEQ ID NO: 1245002 - RNA, 22 nt, Human
ucuccacauggaaagaccacag

SEQ ID NO: 1245003 - RNA, 23 nt, Human
ucuuucuucuuuucgucaagguc

SEQ ID NO: 1245004 - RNA, 20 nt, Human
ugcaaaacuaaaacacauua

SEQ ID NO: 1245005 - RNA, 19 nt, Human
ugccucagggcuguucugc

SEQ ID NO: 1245006 - RNA, 23 nt, Human
ugcgauguaauugcagguucuuu

SEQ ID NO: 1245007 - RNA, 25 nt, Human
uggaaaaagggagcaaaggagagug

SEQ ID NO: 1245008 - RNA, 23 nt, Human
ugucucauccuuucuguugcuua

SEQ ID NO: 1245009 - RNA, 19 nt, Human
uucaucuuugccuaugagg

SEQ ID NO: 1245010 - RNA, 20 nt, Human
uucaucuuugccuaugaggg

SEQ ID NO: 1245011 - RNA, 20 nt, Human
uuuaaaauggaucacuuaaa

SEQ ID NO: 1245012 - RNA, 24 nt, Human
uuuccaaaaaucuauuaagaacaa

SEQ ID NO: 1245013 - RNA, 19 nt, Human
uuugucucauccuuucugu

SEQ ID NO: 1245014 - RNA, 22 nt, Human
aaugcucucccucccucuaccc

SEQ ID NO: 1245015 - RNA, 21 nt, Human
accacauuugcuuuauccagu

SEQ ID NO: 1245016 - RNA, 18 nt, Human
acccacugccaggcccca

SEQ ID NO: 1245017 - RNA, 21 nt, Human
auacaaaccacgugauauaac

SEQ ID NO: 1245018 - RNA, 19 nt, Human
aucaacccaucaccugggu

SEQ ID NO: 1245019 - RNA, 21 nt, Human
auggcugcauaguauuccaug

SEQ ID NO: 1245020 - RNA, 21 nt, Human
caacccaucaccuggguguua

SEQ ID NO: 1245021 - RNA, 21 nt, Human
cagaggacuguugcuuuuuau

SEQ ID NO: 1245022 - RNA, 18 nt, Human
cauaugcaggaugugcag

SEQ ID NO: 1245023 - RNA, 21 nt, Human
cauuuggguugauaaccaucc

SEQ ID NO: 1245024 - RNA, 21 nt, Human
ccaguguguguuguuccccuc

SEQ ID NO: 1245025 - RNA, 19 nt, Human
ccaugucccugcagaggac

SEQ ID NO: 1245026 - RNA, 18 nt, Human
cccacuuauaagugagaa

SEQ ID NO: 1245027 - RNA, 18 nt, Human
cucuacccuacccacugc

SEQ ID NO: 1245028 - RNA, 18 nt, Human
cugaggauaaugguuucc

SEQ ID NO: 1245029 - RNA, 27 nt, Human
cugcaccuaucaaucaacccaucaccu

SEQ ID NO: 1245030 - RNA, 26 nt, Human
cuuuacucuggaccugcaaacccucc

SEQ ID NO: 1245031 - RNA, 18 nt, Human
gccaggccccagugugug

SEQ ID NO: 1245032 - RNA, 19 nt, Human
ggcugcauaguauuccaug

SEQ ID NO: 1245033 - RNA, 24 nt, Human
gguugauaaccauccauuuuucuu

SEQ ID NO: 1245034 - RNA, 19 nt, Human
guaaaugugugccaugaug

SEQ ID NO: 1245035 - RNA, 20 nt, Human
uaagaaaaagauccaaaaac

SEQ ID NO: 1245036 - RNA, 24 nt, Human
uaagcccagcaugcauuagcuauu

SEQ ID NO: 1245037 - RNA, 24 nt, Human
uaagugagaacaugcaguauuugg

SEQ ID NO: 1245038 - RNA, 20 nt, Human
uagcuauuuuugcuaaugcu

SEQ ID NO: 1245039 - RNA, 20 nt, Human
uagguaaaugugugccauga

SEQ ID NO: 1245040 - RNA, 24 nt, Human
uaguuugcugaggauaaugguuuc

SEQ ID NO: 1245041 - RNA, 21 nt, Human
uccaaaaacuucuugccaugu

SEQ ID NO: 1245042 - RNA, 19 nt, Human
ucccuauguucauguguuc

SEQ ID NO: 1245043 - RNA, 20 nt, Human
ucccucuacccuacccacug

SEQ ID NO: 1245044 - RNA, 22 nt, Human
ucccugcagaggacuguugcuu

SEQ ID NO: 1245045 - RNA, 18 nt, Human
uccugcguuaguuugcug

SEQ ID NO: 1245046 - RNA, 19 nt, Human
ucucccucccucuacccua

SEQ ID NO: 1245047 - RNA, 20 nt, Human
ugaggauaaugguuuccagc

SEQ ID NO: 1245048 - RNA, 21 nt, Human
ugaggauaaugguuuccagcu

SEQ ID NO: 1245049 - RNA, 24 nt, Human
ugaggauaaugguuuccagcucca

SEQ ID NO: 1245050 - RNA, 20 nt, Human
uguauauguaccacauuugc

SEQ ID NO: 1245051 - RNA, 24 nt, Human
ugucccugcagaggacuguugcuu

SEQ ID NO: 1245052 - RNA, 21 nt, Human
uuauaagugagaacaugcagu

SEQ ID NO: 1245053 - RNA, 24 nt, Human
uuauaagugagaacaugcaguauu

SEQ ID NO: 1245054 - RNA, 23 nt, Human
uucagugacuuuacucuggaccu

SEQ ID NO: 1245055 - RNA, 25 nt, Human
uuccaugguguauauguaccacauu

SEQ ID NO: 1245056 - RNA, 21 nt, Human
uuccuuccucgcuuccacucu

SEQ ID NO: 1245057 - RNA, 22 nt, Human
uuuccagcuccauccauguccc

SEQ ID NO: 1245058 - RNA, 20 nt, Human
uuuuauggcugcauaguauu

SEQ ID NO: 1245059 - RNA, 22 nt, Human
aaacaaaaagcaaacaaacgca

SEQ ID NO: 1245060 - RNA, 23 nt, Human
acuccagcaauacaacauacauc

SEQ ID NO: 1245061 - RNA, 19 nt, Human
augaagacagauauaggga

SEQ ID NO: 1245062 - RNA, 23 nt, Human
augaagacagauauagggauuac

SEQ ID NO: 1245063 - RNA, 26 nt, Human
caaaaagcaaacaaacgcauuuuuua

SEQ ID NO: 1245064 - RNA, 21 nt, Human
caaaguuaauugaauguggua

SEQ ID NO: 1245065 - RNA, 21 nt, Human
cagccuccaagacggucccaa

SEQ ID NO: 1245066 - RNA, 24 nt, Human
caucaaauaaggcagucagacuuc

SEQ ID NO: 1245067 - RNA, 24 nt, Human
uauaaacaaaaagcaaacaaacgc

SEQ ID NO: 1245068 - RNA, 25 nt, Human
uauaaacaaaaagcaaacaaacgca

SEQ ID NO: 1245069 - RNA, 19 nt, Human
uaugaagacagauauaggg

SEQ ID NO: 1245070 - RNA, 22 nt, Human
uauguuuacaugagaaaguauc

SEQ ID NO: 1245071 - RNA, 18 nt, Human
ucaaaagauacauuugag

SEQ ID NO: 1245072 - RNA, 21 nt, Human
ucaaaagauacauuugaguag

SEQ ID NO: 1245073 - RNA, 22 nt, Human
ucauauauaaauaaaagcuaua

SEQ ID NO: 1245074 - RNA, 23 nt, Human
ugaagacagauauagggauuaca

SEQ ID NO: 1245075 - RNA, 22 nt, Human
uggcauuaaaauguauuuugca

SEQ ID NO: 1245076 - RNA, 18 nt, Human
uuuacaugagaaaguauc

SEQ ID NO: 1245077 - RNA, 23 nt, Human
uuucauggcauuaaaauguauuu

SEQ ID NO: 1245078 - RNA, 19 nt, Human
acacagaaacauccuucuc

SEQ ID NO: 1245079 - RNA, 19 nt, Human
acagaaacauccuucucau

SEQ ID NO: 1245080 - RNA, 21 nt, Human
agaacaauauaaucaagaaca

SEQ ID NO: 1245081 - RNA, 21 nt, Human
cacugugucgguucacucuuc

SEQ ID NO: 1245082 - RNA, 19 nt, Human
uaagaaaacuguucauggc

SEQ ID NO: 1245083 - RNA, 25 nt, Human
uagaaagauaagauacauaaccaca

SEQ ID NO: 1245084 - RNA, 26 nt, Human
ucaagaacacagaaacauccuucuca

SEQ ID NO: 1245085 - RNA, 20 nt, Human
ucucuauaaccacacuccuu

SEQ ID NO: 1245086 - RNA, 19 nt, Human
ugguuuuuauacuuuuaaa

SEQ ID NO: 1245087 - RNA, 18 nt, Human
uucaucaucuucuagacc

SEQ ID NO: 1245088 - RNA, 18 nt, Human
aaacuaacacguccacug

SEQ ID NO: 1245089 - RNA, 20 nt, Human
aaaggaaaauaaagaacaau

SEQ ID NO: 1245090 - RNA, 24 nt, Human
aagaaaaugaggagaaccgguacc

SEQ ID NO: 1245091 - RNA, 19 nt, Human
aagaagccagagcaauuac

SEQ ID NO: 1245092 - RNA, 24 nt, Human
aagaagccagagcaauuacugaaa

SEQ ID NO: 1245093 - RNA, 23 nt, Human
cuuuuguguaugucagagagagg

SEQ ID NO: 1245094 - RNA, 24 nt, Human
gaaagaagaauuucaugaagaaaa

SEQ ID NO: 1245095 - RNA, 24 nt, Human
uaacuuaugaaaacuucuucgcuc

SEQ ID NO: 1245096 - RNA, 23 nt, Human
uacagcuuuuguguaugucagag

SEQ ID NO: 1245097 - RNA, 23 nt, Human
uaugaaaacuucuucgcucauuu

SEQ ID NO: 1245098 - RNA, 21 nt, Human
ucagagagaggaauccaugcu

SEQ ID NO: 1245099 - RNA, 19 nt, Human
ucuugauguuaacuugugg

SEQ ID NO: 1245100 - RNA, 25 nt, Human
ugaaagaagaauuucaugaagaaaa

SEQ ID NO: 1245101 - RNA, 21 nt, Human
ugagugccaucuagaaguuuu

SEQ ID NO: 1245102 - RNA, 22 nt, Human
ugaugagugccaucuagaaguu

SEQ ID NO: 1245103 - RNA, 19 nt, Human
uggcggacauuuuuuguua

SEQ ID NO: 1245104 - RNA, 19 nt, Human
uguagaaggaaagaagcca

SEQ ID NO: 1245105 - RNA, 23 nt, Human
uguaguuguagaaggaaagaagc

SEQ ID NO: 1245106 - RNA, 20 nt, Human
uuucuugauguuaacuugug

SEQ ID NO: 1245107 - RNA, 19 nt, Human
aaaaaaaucauccaaucca

SEQ ID NO: 1245108 - RNA, 20 nt, Human
aaaaacacaaaaaaauaucc

SEQ ID NO: 1245109 - RNA, 21 nt, Human
aaaaacacaaaaaaauaucca

SEQ ID NO: 1245110 - RNA, 20 nt, Human
aaaaauugagagaauucuga

SEQ ID NO: 1245111 - RNA, 19 nt, Human
aaaaccacaaccacaagcg

SEQ ID NO: 1245112 - RNA, 18 nt, Human
aaacacaaaaaaauaucc

SEQ ID NO: 1245113 - RNA, 22 nt, Human
aaacugaggaccaggcaaagaa

SEQ ID NO: 1245114 - RNA, 18 nt, Human
aaagcaaucaauccacaa

SEQ ID NO: 1245115 - RNA, 21 nt, Human
aaaggcuaggucuugggggcu

SEQ ID NO: 1245116 - RNA, 21 nt, Human
aaauaaguccucaagucaaac

SEQ ID NO: 1245117 - RNA, 20 nt, Human
aacaucagaacaagcagcag

SEQ ID NO: 1245118 - RNA, 19 nt, Human
aacauggcgaaaccccauc

SEQ ID NO: 1245119 - RNA, 20 nt, Human
aacauggcgaaaccccaucu

SEQ ID NO: 1245120 - RNA, 20 nt, Human
aacauggcgaaaccccaucu

SEQ ID NO: 1245121 - RNA, 21 nt, Human
aacauggcgaaaccccaucuc

SEQ ID NO: 1245122 - RNA, 21 nt, Human
aaccacaagcgugcaugccug

SEQ ID NO: 1245123 - RNA, 19 nt, Human
aacuggcauauacacagga

SEQ ID NO: 1245124 - RNA, 20 nt, Human
aacuuggaagcagcagauca

SEQ ID NO: 1245125 - RNA, 23 nt, Human
aagcagccuuuccaggggcuggu

SEQ ID NO: 1245126 - RNA, 26 nt, Human
aagccucugagcucuucaaagaauuc

SEQ ID NO: 1245127 - RNA, 19 nt, Human
aaggcaaugccacauagag

SEQ ID NO: 1245128 - RNA, 23 nt, Human
aaguggcagaucagguccagaac

SEQ ID NO: 1245129 - RNA, 23 nt, Human
aauccacaagauuuuuuuuuccu

SEQ ID NO: 1245130 - RNA, 24 nt, Human
acaggaucaaucuuucucaaauau

SEQ ID NO: 1245131 - RNA, 24 nt, Human
acauaccacugcuuuucacaaaau

SEQ ID NO: 1245132 - RNA, 23 nt, Human
acaucacaggccccuuuuggagu

SEQ ID NO: 1245133 - RNA, 24 nt, Human
accccaucucuacuaaaaacacaa

SEQ ID NO: 1245134 - RNA, 25 nt, Human
accccgaggagccgcccgccggagg

SEQ ID NO: 1245135 - RNA, 24 nt, Human
accugaggucaggaguucaagacc

SEQ ID NO: 1245136 - RNA, 18 nt, Human
acugcacuccagccuggg

SEQ ID NO: 1245137 - RNA, 24 nt, Human
acugcacuccagccugggugacag

SEQ ID NO: 1245138 - RNA, 23 nt, Human
agaaaaacuggcauauacacagg

SEQ ID NO: 1245139 - RNA, 18 nt, Human
agacaacacguacacaua

SEQ ID NO: 1245140 - RNA, 25 nt, Human
agaucacuuggaagccucugagcuc

SEQ ID NO: 1245141 - RNA, 18 nt, Human
agcagcagaucaggaaga

SEQ ID NO: 1245142 - RNA, 21 nt, Human
agcccgaggcggguggaucac

SEQ ID NO: 1245143 - RNA, 21 nt, Human
agccucugggcaccgcagccc

SEQ ID NO: 1245144 - RNA, 22 nt, Human
agccucugggcaccgcagcccc

SEQ ID NO: 1245145 - RNA, 24 nt, Human
agccugggugacagugcaagacuc

SEQ ID NO: 1245146 - RNA, 19 nt, Human
agcuagaaaaacuggcaua

SEQ ID NO: 1245147 - RNA, 24 nt, Human
agcuuggccaacauggcgaaaccc

SEQ ID NO: 1245148 - RNA, 25 nt, Human
aggaggcagagagcagcaggguugg

SEQ ID NO: 1245149 - RNA, 24 nt, Human
aggaguaguggugcacaccuguag

SEQ ID NO: 1245150 - RNA, 18 nt, Human
aggcaugagaaucacuug

SEQ ID NO: 1245151 - RNA, 22 nt, Human
aggcggguggaucaccugaggu

SEQ ID NO: 1245152 - RNA, 26 nt, Human
aggcggguggaucaccugaggucagg

SEQ ID NO: 1245153 - RNA, 24 nt, Human
aggcugaggcaugagaaucacuug

SEQ ID NO: 1245154 - RNA, 23 nt, Human
agguggcggggguugcagugagc

SEQ ID NO: 1245155 - RNA, 19 nt, Human
aguggcugaucacacuuca

SEQ ID NO: 1245156 - RNA, 24 nt, Human
aguggugcacaccuguagucccag

SEQ ID NO: 1245157 - RNA, 23 nt, Human
aucaccugaggucaggaguucaa

SEQ ID NO: 1245158 - RNA, 19 nt, Human
aucagguccagaacccagg

SEQ ID NO: 1245159 - RNA, 24 nt, Human
aucgcgccacugcacuccagccug

SEQ ID NO: 1245160 - RNA, 23 nt, Human
caaagaaagcaacuugccaaaaa

SEQ ID NO: 1245161 - RNA, 21 nt, Human
caaagcaaucaauccacaaga

SEQ ID NO: 1245162 - RNA, 21 nt, Human
caaagcagccuuuccaggggc

SEQ ID NO: 1245163 - RNA, 22 nt, Human
caacaccccaguggcugacauc

SEQ ID NO: 1245164 - RNA, 24 nt, Human
caagaucgcgccacugcacuccag

SEQ ID NO: 1245165 - RNA, 18 nt, Human
caagggcuaugagggggc

SEQ ID NO: 1245166 - RNA, 21 nt, Human
caauaccauaaaacaucagaa

SEQ ID NO: 1245167 - RNA, 22 nt, Human
cacaaaaaaauauccaggagua

SEQ ID NO: 1245168 - RNA, 22 nt, Human
cacacagaaagugaauggucag

SEQ ID NO: 1245169 - RNA, 24 nt, Human
cacaccuguagucccagcuacuug

SEQ ID NO: 1245170 - RNA, 18 nt, Human
cacauaccacugcuuuuc

SEQ ID NO: 1245171 - RNA, 25 nt, Human
cacauaccacugcuuuucacaaaau

SEQ ID NO: 1245172 - RNA, 21 nt, Human
caccccaguggcugacaucac

SEQ ID NO: 1245173 - RNA, 23 nt, Human
caccugaggucaggaguucaaga

SEQ ID NO: 1245174 - RNA, 22 nt, Human
caccuggggcuccccauuggcc

SEQ ID NO: 1245175 - RNA, 23 nt, Human
caccuguagucccagcuacuugg

SEQ ID NO: 1245176 - RNA, 24 nt, Human
caccuguagucccagcuacuuggg

SEQ ID NO: 1245177 - RNA, 24 nt, Human
cacgucuguaaucccagcacuuug

SEQ ID NO: 1245178 - RNA, 20 nt, Human
cacuccagccugggugacag

SEQ ID NO: 1245179 - RNA, 21 nt, Human
cacuccagccugggugacagu

SEQ ID NO: 1245180 - RNA, 22 nt, Human
cacuccagccugggugacagug

SEQ ID NO: 1245181 - RNA, 19 nt, Human
cacugcacuccagccuggg

SEQ ID NO: 1245182 - RNA, 19 nt, Human
cacugcacuccagccuggg

SEQ ID NO: 1245183 - RNA, 22 nt, Human
cacugcacuccagccuggguga

SEQ ID NO: 1245184 - RNA, 23 nt, Human
cacugcacuccagccugggugac

SEQ ID NO: 1245185 - RNA, 24 nt, Human
cacugcacuccagccugggugaca

SEQ ID NO: 1245186 - RNA, 24 nt, Human
cacugcacuccagccugggugaca

SEQ ID NO: 1245187 - RNA, 24 nt, Human
cagaacccagguccacagcaaugu

SEQ ID NO: 1245188 - RNA, 24 nt, Human
cagcacuuugggagcccgaggcgg

SEQ ID NO: 1245189 - RNA, 19 nt, Human
cagccucugggcaccgcag

SEQ ID NO: 1245190 - RNA, 24 nt, Human
cagcuuggccaacauggcgaaacc

SEQ ID NO: 1245191 - RNA, 26 nt, Human
cauauacacaggaaaacagaaucagu

SEQ ID NO: 1245192 - RNA, 23 nt, Human
caucaucugaggccaaguuuugg

SEQ ID NO: 1245193 - RNA, 21 nt, Human
cauuggccaucuugggcuccu

SEQ ID NO: 1245194 - RNA, 23 nt, Human
ccaaaaucgcagacaaaggcuag

SEQ ID NO: 1245195 - RNA, 20 nt, Human
ccacugcacuccagccuggg

SEQ ID NO: 1245196 - RNA, 20 nt, Human
ccacugcacuccagccuggg

SEQ ID NO: 1245197 - RNA, 20 nt, Human
ccacugcacuccagccuggg

SEQ ID NO: 1245198 - RNA, 21 nt, Human
ccacugcacuccagccugggu

SEQ ID NO: 1245199 - RNA, 21 nt, Human
ccacugcacuccagccugggu

SEQ ID NO: 1245200 - RNA, 23 nt, Human
ccacugcacuccagccuggguga

SEQ ID NO: 1245201 - RNA, 23 nt, Human
ccacugcacuccagccuggguga

SEQ ID NO: 1245202 - RNA, 24 nt, Human
ccacugcacuccagccugggugac

SEQ ID NO: 1245203 - RNA, 20 nt, Human
ccagaacccagguccacagc

SEQ ID NO: 1245204 - RNA, 23 nt, Human
ccagaugcuucucuccucaccug

SEQ ID NO: 1245205 - RNA, 20 nt, Human
cccagcacgccucccgcgcc

SEQ ID NO: 1245206 - RNA, 18 nt, Human
cccccagaugcuucucuc

SEQ ID NO: 1245207 - RNA, 21 nt, Human
cccccgcccggccggccccgc

SEQ ID NO: 1245208 - RNA, 21 nt, Human
ccccgcgcccagcacgccucc

SEQ ID NO: 1245209 - RNA, 25 nt, Human
ccccgcucggucgcccaaccccgag

SEQ ID NO: 1245210 - RNA, 21 nt, Human
ccccuaaugccgcagccucug

SEQ ID NO: 1245211 - RNA, 18 nt, Human
cccgcgccgccgccgccg

SEQ ID NO: 1245212 - RNA, 21 nt, Human
cccgcgccgccgccgccgccg

SEQ ID NO: 1245213 - RNA, 18 nt, Human
cccgcgccgcgcugcgcc

SEQ ID NO: 1245214 - RNA, 20 nt, Human
cccuaaugccgcagccucug

SEQ ID NO: 1245215 - RNA, 20 nt, Human
ccgcccgccggacucgcuuu

SEQ ID NO: 1245216 - RNA, 27 nt, Human
ccgcccgcgccgccgccgccgccgccg

SEQ ID NO: 1245217 - RNA, 20 nt, Human
ccgcccggccggccccgcuc

SEQ ID NO: 1245218 - RNA, 23 nt, Human
ccgccgccgccgccgccaccccg

SEQ ID NO: 1245219 - RNA, 24 nt, Human
ccgccgccgccgccgccaccccgg

SEQ ID NO: 1245220 - RNA, 18 nt, Human
ccgccgccgccgccgccg

SEQ ID NO: 1245221 - RNA, 18 nt, Human
ccgccgccgccgccgccg

SEQ ID NO: 1245222 - RNA, 23 nt, Human
ccgccuucacgggcccgcccccc

SEQ ID NO: 1245223 - RNA, 23 nt, Human
ccgcgcccagcacgccucccgcg

SEQ ID NO: 1245224 - RNA, 23 nt, Human
ccgcgccgcgcugcgccgccuuc

SEQ ID NO: 1245225 - RNA, 19 nt, Human
ccucugggcaccgcagccc

SEQ ID NO: 1245226 - RNA, 23 nt, Human
ccucugggcaccgcagccccgcg

SEQ ID NO: 1245227 - RNA, 20 nt, Human
ccugaagccuuccugacugc

SEQ ID NO: 1245228 - RNA, 22 nt, Human
ccugaagccuuccugacugcuc

SEQ ID NO: 1245229 - RNA, 22 nt, Human
ccugggugacagugcaagacuc

SEQ ID NO: 1245230 - RNA, 21 nt, Human
ccuguagucccagcuacuugg

SEQ ID NO: 1245231 - RNA, 28 nt, Human
ccuugaccaaagcagccuuuccaggggc

SEQ ID NO: 1245232 - RNA, 24 nt, Human
cgaggcggguggaucaccugaggu

SEQ ID NO: 1245233 - RNA, 26 nt, Human
cgaggcggguggaucaccugagguca

SEQ ID NO: 1245234 - RNA, 24 nt, Human
cgccgccgccgccgccgccgccgg

SEQ ID NO: 1245235 - RNA, 24 nt, Human
cggguggaucaccugaggucagga

SEQ ID NO: 1245236 - RNA, 23 nt, Human
cgucuguaaucccagcacuuugg

SEQ ID NO: 1245237 - RNA, 23 nt, Human
cucaaauauuccuaucaacaguu

SEQ ID NO: 1245238 - RNA, 27 nt, Human
cucaauuaaaaaaaaaaaaaucaucca

SEQ ID NO: 1245239 - RNA, 24 nt, Human
cucacgucuguaaucccagcacuu

SEQ ID NO: 1245240 - RNA, 21 nt, Human
cucagccuugaccaaagcagc

SEQ ID NO: 1245241 - RNA, 23 nt, Human
cugagccucaguuuccccaucug

SEQ ID NO: 1245242 - RNA, 18 nt, Human
cuggagcagccagcucag

SEQ ID NO: 1245243 - RNA, 24 nt, Human
cuggcauauacacaggaaaacaga

SEQ ID NO: 1245244 - RNA, 22 nt, Human
cugggcaccgcagccccgcgcc

SEQ ID NO: 1245245 - RNA, 25 nt, Human
cugguuguggugccucacgucugua

SEQ ID NO: 1245246 - RNA, 21 nt, Human
cuguaaucccagcacuuuggg

SEQ ID NO: 1245247 - RNA, 24 nt, Human
cuuggccaacauggcgaaacccca

SEQ ID NO: 1245248 - RNA, 18 nt, Human
gaaaccccaucucuacua

SEQ ID NO: 1245249 - RNA, 19 nt, Human
gaacccagguccacagcaa

SEQ ID NO: 1245250 - RNA, 27 nt, Human
gaagccaaaaucgcagacagugggcac

SEQ ID NO: 1245251 - RNA, 19 nt, Human
gaauaggaguccaacaaau

SEQ ID NO: 1245252 - RNA, 23 nt, Human
gagcagcaggguuggcugugugg

SEQ ID NO: 1245253 - RNA, 24 nt, Human
gagcagcaggguuggcuguguggg

SEQ ID NO: 1245254 - RNA, 18 nt, Human
gagccccuaaugccgcag

SEQ ID NO: 1245255 - RNA, 21 nt, Human
gagccccuaaugccgcagccu

SEQ ID NO: 1245256 - RNA, 19 nt, Human
gaggcggguggaucaccug

SEQ ID NO: 1245257 - RNA, 23 nt, Human
gaggcggguggaucaccugaggu

SEQ ID NO: 1245258 - RNA, 21 nt, Human
gaucaccugaggucaggaguu

SEQ ID NO: 1245259 - RNA, 23 nt, Human
gaucaccugaggucaggaguuca

SEQ ID NO: 1245260 - RNA, 24 nt, Human
gaucaccugaggucaggaguucaa

SEQ ID NO: 1245261 - RNA, 19 nt, Human
gaucacuuggaagccucug

SEQ ID NO: 1245262 - RNA, 21 nt, Human
gcaaagaaagcaacuugccaa

SEQ ID NO: 1245263 - RNA, 22 nt, Human
gcacuuugggagcccgaggcgg

SEQ ID NO: 1245264 - RNA, 21 nt, Human
gcagaucacuuggaagccuuu

SEQ ID NO: 1245265 - RNA, 24 nt, Human
gccaacauggcgaaaccccaucuc

SEQ ID NO: 1245266 - RNA, 20 nt, Human
gccaagaucgcgccacugca

SEQ ID NO: 1245267 - RNA, 19 nt, Human
gccacugcacuccagccug

SEQ ID NO: 1245268 - RNA, 24 nt, Human
gccacugcacuccagccuggguga

SEQ ID NO: 1245269 - RNA, 20 nt, Human
gccccccgcccggccggccc

SEQ ID NO: 1245270 - RNA, 22 nt, Human
gccgcccgcgccgccgccgccg

SEQ ID NO: 1245271 - RNA, 21 nt, Human
gccucacgucuguaaucccag

SEQ ID NO: 1245272 - RNA, 19 nt, Human
gcgccgcgcugcgccgccu

SEQ ID NO: 1245273 - RNA, 20 nt, Human
ggaucaccugaggucaggaa

SEQ ID NO: 1245274 - RNA, 26 nt, Human
ggcaaagaaagcaacuugccaaaaaa

SEQ ID NO: 1245275 - RNA, 23 nt, Human
ggcaaagcaaucaauccacaaga

SEQ ID NO: 1245276 - RNA, 24 nt, Human
ggcagaucagguccagaacccagg

SEQ ID NO: 1245277 - RNA, 23 nt, Human
ggcggggguugcagugagccaag

SEQ ID NO: 1245278 - RNA, 18 nt, Human
ggcuggggauccuuuaga

SEQ ID NO: 1245279 - RNA, 19 nt, Human
gggguugcagugagccaag

SEQ ID NO: 1245280 - RNA, 22 nt, Human
gggguugcagugagccaagauc

SEQ ID NO: 1245281 - RNA, 23 nt, Human
gggguugcagugagccaagaucg

SEQ ID NO: 1245282 - RNA, 24 nt, Human
ggugccucacgucuguaaucccag

SEQ ID NO: 1245283 - RNA, 21 nt, Human
gguggaucaccugaggucagg

SEQ ID NO: 1245284 - RNA, 21 nt, Human
gguugcagugagccaagaucg

SEQ ID NO: 1245285 - RNA, 23 nt, Human
guggaucaccugaggucaggagu

SEQ ID NO: 1245286 - RNA, 21 nt, Human
guguccacaguucuaagcagc

SEQ ID NO: 1245287 - RNA, 23 nt, Human
uaaaaccacaaccacaagcgugc

SEQ ID NO: 1245288 - RNA, 24 nt, Human
uaagugacuuagccaaggucacac

SEQ ID NO: 1245289 - RNA, 23 nt, Human
uacacauaccacugcuuuucaca

SEQ ID NO: 1245290 - RNA, 21 nt, Human
uaccauaaaacaucagaacaa

SEQ ID NO: 1245291 - RNA, 25 nt, Human
uaccauaaaacaucagaacaagcag

SEQ ID NO: 1245292 - RNA, 19 nt, Human
uaggucuugggggcugggg

SEQ ID NO: 1245293 - RNA, 24 nt, Human
uagguggcggggguugcagugagc

SEQ ID NO: 1245294 - RNA, 24 nt, Human
uaguggugcacaccuguaguccca

SEQ ID NO: 1245295 - RNA, 19 nt, Human
ucaccugaggucaggaguu

SEQ ID NO: 1245296 - RNA, 23 nt, Human
ucaccugaggucaggaguucaag

SEQ ID NO: 1245297 - RNA, 19 nt, Human
ucacuugaaccuagguggc

SEQ ID NO: 1245298 - RNA, 18 nt, Human
ucagaacaagcagcagcu

SEQ ID NO: 1245299 - RNA, 22 nt, Human
uccacagcaaugucaucauuca

SEQ ID NO: 1245300 - RNA, 20 nt, Human
uccagaacccagguccacag

SEQ ID NO: 1245301 - RNA, 24 nt, Human
uccagccugggugacagugcaaga

SEQ ID NO: 1245302 - RNA, 23 nt, Human
ucgcgccacugcacuccagccug

SEQ ID NO: 1245303 - RNA, 24 nt, Human
ucucagagcugugguucauucugg

SEQ ID NO: 1245304 - RNA, 23 nt, Human
ucucagccuugaccaaagcagcc

SEQ ID NO: 1245305 - RNA, 24 nt, Human
ucuguaauauaaaaccacaaccac

SEQ ID NO: 1245306 - RNA, 19 nt, Human
ucuugggcuccugaagccu

SEQ ID NO: 1245307 - RNA, 21 nt, Human
ucuugggggcuggggauccuu

SEQ ID NO: 1245308 - RNA, 23 nt, Human
ucuuucuucugucucugucuucu

SEQ ID NO: 1245309 - RNA, 23 nt, Human
ugaagccuuccugacugcucagu

SEQ ID NO: 1245310 - RNA, 19 nt, Human
ugaaguggcagaucagguc

SEQ ID NO: 1245311 - RNA, 19 nt, Human
ugaaguggcagaucagguc

SEQ ID NO: 1245312 - RNA, 22 nt, Human
ugagccaagaucgcgccacugc

SEQ ID NO: 1245313 - RNA, 20 nt, Human
ugaggcaugagaaucacuug

SEQ ID NO: 1245314 - RNA, 24 nt, Human
ugaggcaugagaaucacuugaacc

SEQ ID NO: 1245315 - RNA, 22 nt, Human
ugaguuuggaaagcaauuugca

SEQ ID NO: 1245316 - RNA, 20 nt, Human
ugaucucuuucuucugucuc

SEQ ID NO: 1245317 - RNA, 19 nt, Human
ugcaagacuccaucucaau

SEQ ID NO: 1245318 - RNA, 22 nt, Human
ugcccccagaugcuucucuccu

SEQ ID NO: 1245319 - RNA, 25 nt, Human
ugccgcagccucugggcaccgcagc

SEQ ID NO: 1245320 - RNA, 21 nt, Human
ugccucacgucuguaauccca

SEQ ID NO: 1245321 - RNA, 24 nt, Human
ugccucacgucuguaaucccagca

SEQ ID NO: 1245322 - RNA, 21 nt, Human
ugcuagguaggccagucuucu

SEQ ID NO: 1245323 - RNA, 20 nt, Human
ugcuucucuccucaccuggg

SEQ ID NO: 1245324 - RNA, 20 nt, Human
uggaaagcaauuugcaaaag

SEQ ID NO: 1245325 - RNA, 24 nt, Human
uggaucaccugaggucaggaguuc

SEQ ID NO: 1245326 - RNA, 26 nt, Human
uggaucaccugaggucaggaguucaa

SEQ ID NO: 1245327 - RNA, 22 nt, Human
uggccaacauggcgaaacccca

SEQ ID NO: 1245328 - RNA, 24 nt, Human
ugggaggcugaggcaugagaauca

SEQ ID NO: 1245329 - RNA, 21 nt, Human
ugggguugccagauguuucug

SEQ ID NO: 1245330 - RNA, 21 nt, Human
ugggucuaugaaacaauaggu

SEQ ID NO: 1245331 - RNA, 18 nt, Human
uggugcacaccuguaguc

SEQ ID NO: 1245332 - RNA, 22 nt, Human
uggugcacaccuguagucccag

SEQ ID NO: 1245333 - RNA, 24 nt, Human
uggugccucacgucuguaauccca

SEQ ID NO: 1245334 - RNA, 21 nt, Human
uguaaccaucagcuucugcaa

SEQ ID NO: 1245335 - RNA, 22 nt, Human
uguccaaggguguccuaggacc

SEQ ID NO: 1245336 - RNA, 22 nt, Human
uguccacaguucuaagcagcag

SEQ ID NO: 1245337 - RNA, 19 nt, Human
ugucucugucuucugcagc

SEQ ID NO: 1245338 - RNA, 18 nt, Human
ugugggguugccagaugu

SEQ ID NO: 1245339 - RNA, 25 nt, Human
uucacaaaauaugggggagaaaaac

SEQ ID NO: 1245340 - RNA, 18 nt, Human
uuccauacguguccacag

SEQ ID NO: 1245341 - RNA, 24 nt, Human
uugaaccuagguggcggggguugc

SEQ ID NO: 1245342 - RNA, 22 nt, Human
uugcagugagccaagaucgcgc

SEQ ID NO: 1245343 - RNA, 23 nt, Human
uuggccaacauggcgaaacccca

SEQ ID NO: 1245344 - RNA, 25 nt, Human
uugggaggcugaggcaugagaauca

SEQ ID NO: 1245345 - RNA, 19 nt, Human
uuguucaggagcagaucac

SEQ ID NO: 1245346 - RNA, 19 nt, Human
aaacaaugccuccacuccg

SEQ ID NO: 1245347 - RNA, 23 nt, Human
aaaugcauuuuauuuuuagacaa

SEQ ID NO: 1245348 - RNA, 18 nt, Human
acaugacauguuuuucuu

SEQ ID NO: 1245349 - RNA, 25 nt, Human
cacagcccguccacaaucucccaga

SEQ ID NO: 1245350 - RNA, 22 nt, Human
caccaccucccagcacagcccg

SEQ ID NO: 1245351 - RNA, 18 nt, Human
caccucccagcacagccc

SEQ ID NO: 1245352 - RNA, 19 nt, Human
cacuucagauguuggcacu

SEQ ID NO: 1245353 - RNA, 18 nt, Human
ccagcacagcccguccac

SEQ ID NO: 1245354 - RNA, 25 nt, Human
ccccaccaccucccagcacagcccg

SEQ ID NO: 1245355 - RNA, 19 nt, Human
cuaugaacauggucuuucc

SEQ ID NO: 1245356 - RNA, 25 nt, Human
cuugguaaucucuuccaguuaacua

SEQ ID NO: 1245357 - RNA, 26 nt, Human
cuuuuuauucucuugguaaucucuuc

SEQ ID NO: 1245358 - RNA, 18 nt, Human
gcuguagcuucuccagga

SEQ ID NO: 1245359 - RNA, 18 nt, Human
guaaagcuccacuucaga

SEQ ID NO: 1245360 - RNA, 20 nt, Human
guaaagcuccacuucagaug

SEQ ID NO: 1245361 - RNA, 24 nt, Human
gucccauuugucuuagguccuggu

SEQ ID NO: 1245362 - RNA, 21 nt, Human
uaaaaacaaugccuccacucc

SEQ ID NO: 1245363 - RNA, 22 nt, Human
uaaaaauaaaugaagagcucaa

SEQ ID NO: 1245364 - RNA, 20 nt, Human
uacaugacauguuuuucuua

SEQ ID NO: 1245365 - RNA, 23 nt, Human
uauucucuugguaaucucuucca

SEQ ID NO: 1245366 - RNA, 18 nt, Human
uccccaccaccucccagc

SEQ ID NO: 1245367 - RNA, 21 nt, Human
ucccuuuauugcaacacacaa

SEQ ID NO: 1245368 - RNA, 26 nt, Human
ucucccagaucuucuagaugucggag

SEQ ID NO: 1245369 - RNA, 22 nt, Human
ugacagguaauagauccaaacu

SEQ ID NO: 1245370 - RNA, 23 nt, Human
ugaccaggcuguagcuucuccag

SEQ ID NO: 1245371 - RNA, 21 nt, Human
ugcuaugaacauggucuuucc

SEQ ID NO: 1245372 - RNA, 19 nt, Human
uggaugacaauuagaagcg

SEQ ID NO: 1245373 - RNA, 18 nt, Human
uuccagcugaauucgucu

SEQ ID NO: 1245374 - RNA, 19 nt, Human
uuuagacaaccuacaugac

SEQ ID NO: 1245375 - RNA, 20 nt, Human
ccccgggcuucuccagcucc

SEQ ID NO: 1245376 - RNA, 23 nt, Human
ccccuuguggggccgaaggguug

SEQ ID NO: 1245377 - RNA, 25 nt, Human
ccuccaagaucuguuugcgaaugga

SEQ ID NO: 1245378 - RNA, 24 nt, Human
ggcacugccugggcccccuugugg

SEQ ID NO: 1245379 - RNA, 23 nt, Human
gggcccagcagcugccgggcggc

SEQ ID NO: 1245380 - RNA, 19 nt, Human
guggcuccucuucagcagg

SEQ ID NO: 1245381 - RNA, 19 nt, Human
uccuccaagaucuguuugc

SEQ ID NO: 1245382 - RNA, 22 nt, Human
uccuccaagaucuguuugcgaa

SEQ ID NO: 1245383 - RNA, 20 nt, Human
ucuccagcuccuccaagauc

SEQ ID NO: 1245384 - RNA, 23 nt, Human
ugccugggcccccuuguggggcc

SEQ ID NO: 1245385 - RNA, 18 nt, Human
agacaauuuuucuugacu

SEQ ID NO: 1245386 - RNA, 23 nt, Human
agaugcuccagaaacaggcugag

SEQ ID NO: 1245387 - RNA, 24 nt, Human
caccagcagugggcgaagaugcuc

SEQ ID NO: 1245388 - RNA, 22 nt, Human
cagacguccucauccucguccu

SEQ ID NO: 1245389 - RNA, 18 nt, Human
cagcggucccccaccucc

SEQ ID NO: 1245390 - RNA, 21 nt, Human
cagggccuucaccagcagugg

SEQ ID NO: 1245391 - RNA, 25 nt, Human
ccccaccuccuucacggggcuucca

SEQ ID NO: 1245392 - RNA, 19 nt, Human
ccucauccucguccucuuc

SEQ ID NO: 1245393 - RNA, 25 nt, Human
cugguguuagcagcuggaguucuuc

SEQ ID NO: 1245394 - RNA, 21 nt, Human
gaagaugcuccagaaacaggc

SEQ ID NO: 1245395 - RNA, 20 nt, Human
uccagcugcgguuuaucugc

SEQ ID NO: 1245396 - RNA, 24 nt, Human
uccagcugcgguuuaucugccguc

SEQ ID NO: 1245397 - RNA, 21 nt, Human
ugcagcggucccccaccuccu

SEQ ID NO: 1245398 - RNA, 22 nt, Human
ugcccuguaacuugacugagau

SEQ ID NO: 1245399 - RNA, 23 nt, Human
aaaggccuuccacauguuaacuc

SEQ ID NO: 1245400 - RNA, 20 nt, Human
acccagggagugggucagcu

SEQ ID NO: 1245401 - RNA, 23 nt, Human
acugcagucuccacacagaguga

SEQ ID NO: 1245402 - RNA, 21 nt, Human
agacccaguccccccacccag

SEQ ID NO: 1245403 - RNA, 23 nt, Human
agaggguggcguuguagggcucc

SEQ ID NO: 1245404 - RNA, 24 nt, Human
aggcaugaagaaaugcagccgggg

SEQ ID NO: 1245405 - RNA, 18 nt, Human
aggugggugugggcaguu

SEQ ID NO: 1245406 - RNA, 18 nt, Human
aggugguucaggucacca

SEQ ID NO: 1245407 - RNA, 23 nt, Human
aguaggauuagcccuuucaccuu

SEQ ID NO: 1245408 - RNA, 22 nt, Human
caaagccaggcaugaagaaaug

SEQ ID NO: 1245409 - RNA, 21 nt, Human
caaggcccgguacugcuggcu

SEQ ID NO: 1245410 - RNA, 22 nt, Human
caaggcccgguacugcuggcug

SEQ ID NO: 1245411 - RNA, 22 nt, Human
caccuuuccagaggacugcagu

SEQ ID NO: 1245412 - RNA, 24 nt, Human
cagaaaggcuucgggguaaauuag

SEQ ID NO: 1245413 - RNA, 18 nt, Human
cagacccaguccccccac

SEQ ID NO: 1245414 - RNA, 20 nt, Human
caguggggcaaagccaggca

SEQ ID NO: 1245415 - RNA, 24 nt, Human
caucucauccaugcccucgcccgu

SEQ ID NO: 1245416 - RNA, 22 nt, Human
cauuagcaaauauuugaaucuc

SEQ ID NO: 1245417 - RNA, 18 nt, Human
ccaggcaugaagaaaugc

SEQ ID NO: 1245418 - RNA, 25 nt, Human
ccaucccagacccaguccccccacc

SEQ ID NO: 1245419 - RNA, 23 nt, Human
ccucaugggcaugcgacccugga

SEQ ID NO: 1245420 - RNA, 23 nt, Human
cuccaccacggugucugacaccu

SEQ ID NO: 1245421 - RNA, 22 nt, Human
cuccuuggccguggcauccuga

SEQ ID NO: 1245422 - RNA, 24 nt, Human
cucucggccucggugaauuccauc

SEQ ID NO: 1245423 - RNA, 21 nt, Human
cugguaaacauuuuucagaug

SEQ ID NO: 1245424 - RNA, 19 nt, Human
gaacauaugucauauagcg

SEQ ID NO: 1245425 - RNA, 26 nt, Human
gaagcgcaggcacguggugaccccac

SEQ ID NO: 1245426 - RNA, 21 nt, Human
gcgacccuggaaaauggcagc

SEQ ID NO: 1245427 - RNA, 19 nt, Human
ggagaaggagaaaauugcu

SEQ ID NO: 1245428 - RNA, 23 nt, Human
ggggcaaagccaggcaugaagaa

SEQ ID NO: 1245429 - RNA, 20 nt, Human
gguucaggucaccauaggug

SEQ ID NO: 1245430 - RNA, 23 nt, Human
gucaguggggcaaagccaggcau

SEQ ID NO: 1245431 - RNA, 18 nt, Human
guucauccaccucccuca

SEQ ID NO: 1245432 - RNA, 23 nt, Human
uaaccaucccagacccagucccc

SEQ ID NO: 1245433 - RNA, 23 nt, Human
uaacuggagaaggagaaaauugc

SEQ ID NO: 1245434 - RNA, 18 nt, Human
uagcuggagucuucugua

SEQ ID NO: 1245435 - RNA, 20 nt, Human
uagggcuccaccacgguguc

SEQ ID NO: 1245436 - RNA, 19 nt, Human
ucagaugggguggggaaug

SEQ ID NO: 1245437 - RNA, 21 nt, Human
ucagcaaaguagcugcuguuc

SEQ ID NO: 1245438 - RNA, 21 nt, Human
ucauguugcucucggccucgg

SEQ ID NO: 1245439 - RNA, 18 nt, Human
uccacacagagugaaggu

SEQ ID NO: 1245440 - RNA, 22 nt, Human
ucccagacccaguccccccacc

SEQ ID NO: 1245441 - RNA, 23 nt, Human
ucccagacccaguccccccaccc

SEQ ID NO: 1245442 - RNA, 19 nt, Human
ucccucaugggcaugcgac

SEQ ID NO: 1245443 - RNA, 20 nt, Human
uccgcaggucagcauucagc

SEQ ID NO: 1245444 - RNA, 24 nt, Human
ucuccugcagaaaggcuucggggu

SEQ ID NO: 1245445 - RNA, 18 nt, Human
ucugagacacacgugaag

SEQ ID NO: 1245446 - RNA, 21 nt, Human
ucuguucauccaccucccuca

SEQ ID NO: 1245447 - RNA, 21 nt, Human
ucuucugguaaacauuuuuca

SEQ ID NO: 1245448 - RNA, 22 nt, Human
ugaacaucuguucauccaccuc

SEQ ID NO: 1245449 - RNA, 21 nt, Human
ugagcugguggacugagaggg

SEQ ID NO: 1245450 - RNA, 22 nt, Human
ugagcugguggacugagagggu

SEQ ID NO: 1245451 - RNA, 19 nt, Human
ugccccggcuggucagugg

SEQ ID NO: 1245452 - RNA, 22 nt, Human
ugcucucggccucggugaauuc

SEQ ID NO: 1245453 - RNA, 20 nt, Human
ugcugggugagcucagccac

SEQ ID NO: 1245454 - RNA, 22 nt, Human
ugcuguaaacugcucugagaca

SEQ ID NO: 1245455 - RNA, 18 nt, Human
uggccugggaagcgcagg

SEQ ID NO: 1245456 - RNA, 23 nt, Human
uggcguuguagggcuccaccacg

SEQ ID NO: 1245457 - RNA, 20 nt, Human
uggggcaaagccaggcauga

SEQ ID NO: 1245458 - RNA, 19 nt, Human
uguucauccaccucccuca

SEQ ID NO: 1245459 - RNA, 28 nt, Human
uguuggacagguuuaacuggagaaggag

SEQ ID NO: 1245460 - RNA, 23 nt, Human
uuaacuggagaaggagaaaauug

SEQ ID NO: 1245461 - RNA, 23 nt, Human
accccacuuccucccggccucca

SEQ ID NO: 1245462 - RNA, 24 nt, Human
accccacuuccucccggccuccaa

SEQ ID NO: 1245463 - RNA, 23 nt, Human
cacccucuccucggcggacacug

SEQ ID NO: 1245464 - RNA, 18 nt, Human
cagggcuccacacagggc

SEQ ID NO: 1245465 - RNA, 22 nt, Human
ccccacuuccucccggccucca

SEQ ID NO: 1245466 - RNA, 28 nt, Human
ccccgcuccuuucugaggccaggcugga

SEQ ID NO: 1245467 - RNA, 20 nt, Human
cccggccccaggcuuuggcc

SEQ ID NO: 1245468 - RNA, 24 nt, Human
cccuacguccauccucggagcugu

SEQ ID NO: 1245469 - RNA, 22 nt, Human
ccguccccagcagggugaggcc

SEQ ID NO: 1245470 - RNA, 23 nt, Human
ccucccggccuccaaggggguuc

SEQ ID NO: 1245471 - RNA, 27 nt, Human
cuccugggcaguccuccccgcugggcu

SEQ ID NO: 1245472 - RNA, 18 nt, Human
cugaggccaggcuggaga

SEQ ID NO: 1245473 - RNA, 23 nt, Human
cugcugcccggccccaggcuuug

SEQ ID NO: 1245474 - RNA, 21 nt, Human
cuggggcagcagcuggccccu

SEQ ID NO: 1245475 - RNA, 22 nt, Human
cuggggcagcagcuggccccua

SEQ ID NO: 1245476 - RNA, 18 nt, Human
gaccguccccagcagggu

SEQ ID NO: 1245477 - RNA, 22 nt, Human
gacucuggggcagcagcuggcc

SEQ ID NO: 1245478 - RNA, 19 nt, Human
gcaguccuccccgcugggc

SEQ ID NO: 1245479 - RNA, 18 nt, Human
gcccuggcgcuguggcug

SEQ ID NO: 1245480 - RNA, 18 nt, Human
gcugcccggccccaggcu

SEQ ID NO: 1245481 - RNA, 22 nt, Human
ggcaaguucaggccccucuggg

SEQ ID NO: 1245482 - RNA, 23 nt, Human
ggcccuggcgcuguggcuggacc

SEQ ID NO: 1245483 - RNA, 23 nt, Human
ggcugcagggggcaggacucugg

SEQ ID NO: 1245484 - RNA, 18 nt, Human
gggcagcagcuggccccu

SEQ ID NO: 1245485 - RNA, 22 nt, Human
uccccagcagggugaggcccac

SEQ ID NO: 1245486 - RNA, 24 nt, Human
ucuccgggacagggguccuggccc

SEQ ID NO: 1245487 - RNA, 24 nt, Human
ucuccucggcggacacugcugccc

SEQ ID NO: 1245488 - RNA, 23 nt, Human
ucuggggcagcagcuggccccua

SEQ ID NO: 1245489 - RNA, 18 nt, Human
ucugggggcccuggcgcu

SEQ ID NO: 1245490 - RNA, 23 nt, Human
ugaggccaggcuggagacagauc

SEQ ID NO: 1245491 - RNA, 23 nt, Human
uggcccagcguuugcaggguggg

SEQ ID NO: 1245492 - RNA, 19 nt, Human
uggccccuacguccauccu

SEQ ID NO: 1245493 - RNA, 20 nt, Human
uggcuggaccguccccagca

SEQ ID NO: 1245494 - RNA, 19 nt, Human
uggggcagcagcuggcccc

SEQ ID NO: 1245495 - RNA, 21 nt, Human
uggggcagcagcuggccccua

SEQ ID NO: 1245496 - RNA, 21 nt, Human
ugggggcccuggcgcuguggc

SEQ ID NO: 1245497 - RNA, 20 nt, Human
uucugagcuggcugcuucuc

SEQ ID NO: 1245498 - RNA, 22 nt, Human
uuuggccugcagggcucugggc

SEQ ID NO: 1245499 - RNA, 25 nt, Human
aaaaugagcaacugugauaacaaau

SEQ ID NO: 1245500 - RNA, 19 nt, Human
aaggagacagagcuaccag

SEQ ID NO: 1245501 - RNA, 23 nt, Human
aaguaugaaacaacuuugauaga

SEQ ID NO: 1245502 - RNA, 27 nt, Human
aauccacugccacuucugcugaaacaa

SEQ ID NO: 1245503 - RNA, 19 nt, Human
cucucucaauccuauuaaa

SEQ ID NO: 1245504 - RNA, 21 nt, Human
cugaaacaaaagucaacugau

SEQ ID NO: 1245505 - RNA, 19 nt, Human
cugccacuucugcugaaac

SEQ ID NO: 1245506 - RNA, 20 nt, Human
cuucugcugaaacaaaaguc

SEQ ID NO: 1245507 - RNA, 25 nt, Human
gauaacaaauaaaacuuggagagaa

SEQ ID NO: 1245508 - RNA, 18 nt, Human
gcuauuuccuuauucaag

SEQ ID NO: 1245509 - RNA, 24 nt, Human
uaagucugagggaaauuacccaaa

SEQ ID NO: 1245510 - RNA, 21 nt, Human
uagauagagacuaaaauggcu

SEQ ID NO: 1245511 - RNA, 20 nt, Human
ugagggaaauuacccaaaau

SEQ ID NO: 1245512 - RNA, 23 nt, Human
uggagagaaaaaaguuggcuauu

SEQ ID NO: 1245513 - RNA, 20 nt, Human
uucaaauagcucucucaauc

SEQ ID NO: 1245514 - RNA, 20 nt, Human
uucaaggagacagagcuacc

SEQ ID NO: 1245515 - RNA, 19 nt, Human
acccccuacaggggauagg

SEQ ID NO: 1245516 - RNA, 24 nt, Human
acuaggccuuugguaaccccccuc

SEQ ID NO: 1245517 - RNA, 19 nt, Human
ccaauuccccuucucuucu

SEQ ID NO: 1245518 - RNA, 25 nt, Human
ccaauuccccuucucuucuuccuca

SEQ ID NO: 1245519 - RNA, 22 nt, Human
cccaauuccccuucucuucuuc

SEQ ID NO: 1245520 - RNA, 18 nt, Human
ccgcugccagccagcagc

SEQ ID NO: 1245521 - RNA, 20 nt, Human
ccgcugccagccagcagcgu

SEQ ID NO: 1245522 - RNA, 20 nt, Human
ccucgccccucacccacccc

SEQ ID NO: 1245523 - RNA, 18 nt, Human
cuccccuccccucuuuuu

SEQ ID NO: 1245524 - RNA, 23 nt, Human
gccuuugguaaccccccucgcua

SEQ ID NO: 1245525 - RNA, 19 nt, Human
ggcugaggcaagggccuug

SEQ ID NO: 1245526 - RNA, 25 nt, Human
uccucagccucgccccucacccacc

SEQ ID NO: 1245527 - RNA, 27 nt, Human
uccucagccucgccccucacccacccc

SEQ ID NO: 1245528 - RNA, 22 nt, Human
ucuaaacguucgugcccaggag

SEQ ID NO: 1245529 - RNA, 19 nt, Human
ugcguagggcccagccccg

SEQ ID NO: 1245530 - RNA, 20 nt, Human
uggucacaauagaggaguug

SEQ ID NO: 1245531 - RNA, 22 nt, Human
uuauaauccccucaagcgcccc

SEQ ID NO: 1245532 - RNA, 27 nt, Human
uuguaaccauuggucauauguggcuga

SEQ ID NO: 1245533 - RNA, 25 nt, Human
aaaacuuuuagagcaacuacuacau

SEQ ID NO: 1245534 - RNA, 22 nt, Human
aaacccaggucuccccaacagc

SEQ ID NO: 1245535 - RNA, 24 nt, Human
aaagugcugggauuacaggcguga

SEQ ID NO: 1245536 - RNA, 24 nt, Human
aaguccagcccacgugcugaggaa

SEQ ID NO: 1245537 - RNA, 19 nt, Human
aagugcugggauuacaggc

SEQ ID NO: 1245538 - RNA, 19 nt, Human
aagugcugggauuacaggc

SEQ ID NO: 1245539 - RNA, 26 nt, Human
aagugcugggauuacaggcgugagcc

SEQ ID NO: 1245540 - RNA, 20 nt, Human
acccaguucggcaaguggag

SEQ ID NO: 1245541 - RNA, 18 nt, Human
accccagagcuugcuggc

SEQ ID NO: 1245542 - RNA, 31 nt, Human
accuuccccaggccaccccagagcuugcugg

SEQ ID NO: 1245543 - RNA, 18 nt, Human
acgggguuucaccguggu

SEQ ID NO: 1245544 - RNA, 20 nt, Human
acgggguuucaccguggucu

SEQ ID NO: 1245545 - RNA, 22 nt, Human
acgggguuucaccguggucucg

SEQ ID NO: 1245546 - RNA, 21 nt, Human
acugcaagcuccgccuuccgg

SEQ ID NO: 1245547 - RNA, 22 nt, Human
agcaaaacuuuuagagcaacua

SEQ ID NO: 1245548 - RNA, 22 nt, Human
agccaaccuuccccaggccacc

SEQ ID NO: 1245549 - RNA, 22 nt, Human
agcccgaugugcuccugaccuc

SEQ ID NO: 1245550 - RNA, 21 nt, Human
agccgggcccugugaaaaguc

SEQ ID NO: 1245551 - RNA, 18 nt, Human
aggaagucccaaagagag

SEQ ID NO: 1245552 - RNA, 19 nt, Human
aggaagucccaaagagagc

SEQ ID NO: 1245553 - RNA, 19 nt, Human
aggaagucccaaagagagc

SEQ ID NO: 1245554 - RNA, 20 nt, Human
aguagagacgggguuucacc

SEQ ID NO: 1245555 - RNA, 21 nt, Human
aguagagacgggguuucaccg

SEQ ID NO: 1245556 - RNA, 18 nt, Human
aguagcugggacuacagg

SEQ ID NO: 1245557 - RNA, 19 nt, Human
aguagcugggacuacaggc

SEQ ID NO: 1245558 - RNA, 18 nt, Human
agugcugggauuacaggc

SEQ ID NO: 1245559 - RNA, 24 nt, Human
caaagugcugggauuacaggcgug

SEQ ID NO: 1245560 - RNA, 18 nt, Human
caacuacuacaugucagg

SEQ ID NO: 1245561 - RNA, 25 nt, Human
caagacccccaucugaccucugacc

SEQ ID NO: 1245562 - RNA, 18 nt, Human
caagagguuggugcuguc

SEQ ID NO: 1245563 - RNA, 19 nt, Human
caccccagagcuugcuggc

SEQ ID NO: 1245564 - RNA, 22 nt, Human
cacgccauucuccugccucagc

SEQ ID NO: 1245565 - RNA, 21 nt, Human
cacgcuuguaaucccagcacu

SEQ ID NO: 1245566 - RNA, 22 nt, Human
cagacugagaaauguagaauga

SEQ ID NO: 1245567 - RNA, 21 nt, Human
cagccaaccuuccccaggcca

SEQ ID NO: 1245568 - RNA, 21 nt, Human
caggcgcccgccacugcgccc

SEQ ID NO: 1245569 - RNA, 22 nt, Human
ccaaagugcugggauuacaggc

SEQ ID NO: 1245570 - RNA, 22 nt, Human
ccaaagugcugggauuacaggc

SEQ ID NO: 1245571 - RNA, 24 nt, Human
ccaaagugcugggauuacaggcgu

SEQ ID NO: 1245572 - RNA, 19 nt, Human
cccaaagagagcaagauca

SEQ ID NO: 1245573 - RNA, 19 nt, Human
cccacacugaaaacagaau

SEQ ID NO: 1245574 - RNA, 22 nt, Human
cccacacugaaaacagaaucca

SEQ ID NO: 1245575 - RNA, 23 nt, Human
cccagcacugaugaaagaucccc

SEQ ID NO: 1245576 - RNA, 21 nt, Human
ccccacacugaaaacagaauc

SEQ ID NO: 1245577 - RNA, 23 nt, Human
ccccaggccaccccagagcuugc

SEQ ID NO: 1245578 - RNA, 23 nt, Human
cccgaguagcugggacuacaggc

SEQ ID NO: 1245579 - RNA, 24 nt, Human
cccgaguagcugggacuacaggcg

SEQ ID NO: 1245580 - RNA, 24 nt, Human
cccggccgggcgcgguggcucacg

SEQ ID NO: 1245581 - RNA, 22 nt, Human
ccggguucacgccauucuccug

SEQ ID NO: 1245582 - RNA, 19 nt, Human
ccucaaaaugacaccaaga

SEQ ID NO: 1245583 - RNA, 23 nt, Human
ccugccucagccucccgaguagc

SEQ ID NO: 1245584 - RNA, 18 nt, Human
ccuggcugucuacuacaa

SEQ ID NO: 1245585 - RNA, 22 nt, Human
ccuuggcagccaaccuucccca

SEQ ID NO: 1245586 - RNA, 19 nt, Human
cgccuuccggguucacgcc

SEQ ID NO: 1245587 - RNA, 21 nt, Human
cgcuuguaaucccagcacuga

SEQ ID NO: 1245588 - RNA, 18 nt, Human
cgucagaaguccagccca

SEQ ID NO: 1245589 - RNA, 19 nt, Human
cgugcugaggaagucccaa

SEQ ID NO: 1245590 - RNA, 22 nt, Human
cucacgcuuguaaucccagcac

SEQ ID NO: 1245591 - RNA, 23 nt, Human
cucacgcuuguaaucccagcacu

SEQ ID NO: 1245592 - RNA, 24 nt, Human
cucagccucccgaguagcugggac

SEQ ID NO: 1245593 - RNA, 21 nt, Human
cuccacgcugggcugcuccua

SEQ ID NO: 1245594 - RNA, 22 nt, Human
cuccuagcuaagaaaggcaccc

SEQ ID NO: 1245595 - RNA, 24 nt, Human
cuccugaccucgugauccgcccgc

SEQ ID NO: 1245596 - RNA, 22 nt, Human
cuccugccucagccucccgagu

SEQ ID NO: 1245597 - RNA, 23 nt, Human
cugccucagccucccgaguagcu

SEQ ID NO: 1245598 - RNA, 22 nt, Human
cuuccaagacccccaucugacc

SEQ ID NO: 1245599 - RNA, 22 nt, Human
gaccucgugauccgcccgccuc

SEQ ID NO: 1245600 - RNA, 22 nt, Human
gaccucgugauccgcccgccuc

SEQ ID NO: 1245601 - RNA, 24 nt, Human
gaccucgugauccgcccgccucgg

SEQ ID NO: 1245602 - RNA, 23 nt, Human
gaccucugacccuuggcagccaa

SEQ ID NO: 1245603 - RNA, 21 nt, Human
gacgggguuucaccguggucu

SEQ ID NO: 1245604 - RNA, 22 nt, Human
gacuacaggcgcccgccacugc

SEQ ID NO: 1245605 - RNA, 21 nt, Human
gagacggagucucguucuguc

SEQ ID NO: 1245606 - RNA, 20 nt, Human
gagacgggguuucaccgugg

SEQ ID NO: 1245607 - RNA, 21 nt, Human
gagacgggguuucaccguggu

SEQ ID NO: 1245608 - RNA, 21 nt, Human
gagagcaagaucacuucuguc

SEQ ID NO: 1245609 - RNA, 25 nt, Human
gaguagcugggacuacaggcgcccg

SEQ ID NO: 1245610 - RNA, 19 nt, Human
gaucacuucugucugggug

SEQ ID NO: 1245611 - RNA, 22 nt, Human
gaugaggaaacagacugagaaa

SEQ ID NO: 1245612 - RNA, 18 nt, Human
gauuacaggcgugagcca

SEQ ID NO: 1245613 - RNA, 22 nt, Human
gauuacaggcgugagccaccgc

SEQ ID NO: 1245614 - RNA, 22 nt, Human
gauuacaggcgugagccaccgc

SEQ ID NO: 1245615 - RNA, 23 nt, Human
gcccggcuaauuuuuuguauuuu

SEQ ID NO: 1245616 - RNA, 23 nt, Human
gccucggccucccaaagugcugg

SEQ ID NO: 1245617 - RNA, 25 nt, Human
gccuuccggguucacgccauucucc

SEQ ID NO: 1245618 - RNA, 19 nt, Human
gcucaacaaauccucaaaa

SEQ ID NO: 1245619 - RNA, 24 nt, Human
gcuugcuggcccuucccacuuaug

SEQ ID NO: 1245620 - RNA, 21 nt, Human
ggacaaacaugguggcaaugc

SEQ ID NO: 1245621 - RNA, 24 nt, Human
gggcgcgguggcucacgcuuguaa

SEQ ID NO: 1245622 - RNA, 23 nt, Human
gguggcucacgcuuguaauccca

SEQ ID NO: 1245623 - RNA, 24 nt, Human
gguggcucacgcuuguaaucccag

SEQ ID NO: 1245624 - RNA, 19 nt, Human
guagagacgggguuucacc

SEQ ID NO: 1245625 - RNA, 23 nt, Human
gucacagagcucauucagcagag

SEQ ID NO: 1245626 - RNA, 24 nt, Human
gugauccgcccgccucggccuccc

SEQ ID NO: 1245627 - RNA, 24 nt, Human
uaauuuuuuguauuuuuaguagag

SEQ ID NO: 1245628 - RNA, 23 nt, Human
uacagacacggucucuuguuuuc

SEQ ID NO: 1245629 - RNA, 22 nt, Human
uacaggcgugagccaccgcgcc

SEQ ID NO: 1245630 - RNA, 22 nt, Human
uacaggcgugagccaccgcgcc

SEQ ID NO: 1245631 - RNA, 23 nt, Human
uacaggcgugagccaccgcgccu

SEQ ID NO: 1245632 - RNA, 21 nt, Human
uaguagagacgggguuucacc

SEQ ID NO: 1245633 - RNA, 24 nt, Human
uaguagagacgggguuucaccgug

SEQ ID NO: 1245634 - RNA, 18 nt, Human
ucacugcaagcuccgccu

SEQ ID NO: 1245635 - RNA, 19 nt, Human
ucacugcaagcuccgccuu

SEQ ID NO: 1245636 - RNA, 24 nt, Human
ucacugcaagcuccgccuuccggg

SEQ ID NO: 1245637 - RNA, 18 nt, Human
ucagcagagccaagaggc

SEQ ID NO: 1245638 - RNA, 23 nt, Human
ucagccucccgaguagcugggac

SEQ ID NO: 1245639 - RNA, 21 nt, Human
uccaagacccccaucugaccu

SEQ ID NO: 1245640 - RNA, 25 nt, Human
uccaagacccccaucugaccucuga

SEQ ID NO: 1245641 - RNA, 24 nt, Human
ucccaaagugcugggauuacaggc

SEQ ID NO: 1245642 - RNA, 21 nt, Human
ucccacuuaugcacgccgccu

SEQ ID NO: 1245643 - RNA, 18 nt, Human
uccccaacagcagagccc

SEQ ID NO: 1245644 - RNA, 24 nt, Human
uccccaggccaccccagagcuugc

SEQ ID NO: 1245645 - RNA, 24 nt, Human
ucccccacacugaaaacagaaucc

SEQ ID NO: 1245646 - RNA, 24 nt, Human
ucccgaguagcugggacuacaggc

SEQ ID NO: 1245647 - RNA, 18 nt, Human
ucgcccaggcgggagugc

SEQ ID NO: 1245648 - RNA, 23 nt, Human
ucgcccaggcgggagugcugugg

SEQ ID NO: 1245649 - RNA, 18 nt, Human
ucggccucccaaagugcu

SEQ ID NO: 1245650 - RNA, 23 nt, Human
ucuacuacaagccgggcccugug

SEQ ID NO: 1245651 - RNA, 18 nt, Human
ucucguucugucgcccag

SEQ ID NO: 1245652 - RNA, 19 nt, Human
ucucguucugucgcccagg

SEQ ID NO: 1245653 - RNA, 22 nt, Human
ucucguucugucgcccaggcgg

SEQ ID NO: 1245654 - RNA, 24 nt, Human
ucucguucugucgcccaggcggga

SEQ ID NO: 1245655 - RNA, 23 nt, Human
ucuggcaaaagcaaagauguuga

SEQ ID NO: 1245656 - RNA, 19 nt, Human
ucugucgcccaggcgggag

SEQ ID NO: 1245657 - RNA, 19 nt, Human
ucugucgcccaggcgggag

SEQ ID NO: 1245658 - RNA, 24 nt, Human
ugaccuccacgcugggcugcuccu

SEQ ID NO: 1245659 - RNA, 22 nt, Human
ugaccucugacccuuggcagcc

SEQ ID NO: 1245660 - RNA, 21 nt, Human
ugaggaaacagacugagaaau

SEQ ID NO: 1245661 - RNA, 21 nt, Human
ugcacgccgccugggcaggag

SEQ ID NO: 1245662 - RNA, 24 nt, Human
ugccucagccucccgaguagcugg

SEQ ID NO: 1245663 - RNA, 24 nt, Human
ugcugggauuacaggcgugagcca

SEQ ID NO: 1245664 - RNA, 23 nt, Human
uggcaaaagcaaagauguugauc

SEQ ID NO: 1245665 - RNA, 24 nt, Human
uggcucacgcuuguaaucccagca

SEQ ID NO: 1245666 - RNA, 21 nt, Human
ugggacuacaggcgcccgcca

SEQ ID NO: 1245667 - RNA, 22 nt, Human
ugggacuacaggcgcccgccac

SEQ ID NO: 1245668 - RNA, 22 nt, Human
ugggacuacaggcgcccgccac

SEQ ID NO: 1245669 - RNA, 24 nt, Human
ugggacuacaggcgcccgccacug

SEQ ID NO: 1245670 - RNA, 18 nt, Human
ugggauuacaggcgugag

SEQ ID NO: 1245671 - RNA, 19 nt, Human
ugggauuacaggcgugagc

SEQ ID NO: 1245672 - RNA, 21 nt, Human
ugggauuacaggcgugagcca

SEQ ID NO: 1245673 - RNA, 22 nt, Human
ugggauuacaggcgugagccac

SEQ ID NO: 1245674 - RNA, 23 nt, Human
ugggauuacaggcgugagccacc

SEQ ID NO: 1245675 - RNA, 24 nt, Human
ugggauuacaggcgugagccaccg

SEQ ID NO: 1245676 - RNA, 20 nt, Human
ugugaaaaguccugugggga

SEQ ID NO: 1245677 - RNA, 18 nt, Human
uuaguagagacgggguuu

SEQ ID NO: 1245678 - RNA, 22 nt, Human
uuaguagagacgggguuucacc

SEQ ID NO: 1245679 - RNA, 24 nt, Human
uuaguagagacgggguuucaccgu

SEQ ID NO: 1245680 - RNA, 22 nt, Human
uuauaauccccucaagcgcccc

SEQ ID NO: 1245681 - RNA, 24 nt, Human
uuccggguucacgccauucuccug

SEQ ID NO: 1245682 - RNA, 23 nt, Human
uuguauuuuuaguagagacgggg

SEQ ID NO: 1245683 - RNA, 24 nt, Human
uuuuuaguagagacgggguuucac

SEQ ID NO: 1245684 - RNA, 21 nt, Human
uuuuuguauuuuuaguagaga

SEQ ID NO: 1245685 - RNA, 24 nt, Human
uuuuuuguauuuuuaguagagacg

SEQ ID NO: 1245686 - RNA, 22 nt, Human
aaaagucaaagcaagccggaaa

SEQ ID NO: 1245687 - RNA, 23 nt, Human
aaacaggagcagcaggaggccug

SEQ ID NO: 1245688 - RNA, 23 nt, Human
aaaggauaccaaguucugcacuu

SEQ ID NO: 1245689 - RNA, 19 nt, Human
aacccagaaggaacagaac

SEQ ID NO: 1245690 - RNA, 18 nt, Human
aaggaacagaacuccccc

SEQ ID NO: 1245691 - RNA, 20 nt, Human
acucugcaggacaggcaggc

SEQ ID NO: 1245692 - RNA, 19 nt, Human
agacggcagaacccagggg

SEQ ID NO: 1245693 - RNA, 20 nt, Human
agaggacugggacugcauuu

SEQ ID NO: 1245694 - RNA, 21 nt, Human
agaggucacacauguggccuu

SEQ ID NO: 1245695 - RNA, 22 nt, Human
agcccccaagcccaaacguccc

SEQ ID NO: 1245696 - RNA, 18 nt, Human
aggaagagaagucagaga

SEQ ID NO: 1245697 - RNA, 23 nt, Human
aggagcagcaggaggccugcagc

SEQ ID NO: 1245698 - RNA, 19 nt, Human
aggcaagacggcagaaccc

SEQ ID NO: 1245699 - RNA, 21 nt, Human
aggcaagacggcagaacccag

SEQ ID NO: 1245700 - RNA, 23 nt, Human
aggcaagacggcagaacccaggg

SEQ ID NO: 1245701 - RNA, 20 nt, Human
aggcaccucacagccuagca

SEQ ID NO: 1245702 - RNA, 19 nt, Human
aggcccugagcaagaagga

SEQ ID NO: 1245703 - RNA, 20 nt, Human
aggggaagcagagaaggggc

SEQ ID NO: 1245704 - RNA, 23 nt, Human
auaaccaacaaguuuucccacaa

SEQ ID NO: 1245705 - RNA, 21 nt, Human
aucucaucuauaaaaugcggu

SEQ ID NO: 1245706 - RNA, 23 nt, Human
augcugacugucgaugaauggcu

SEQ ID NO: 1245707 - RNA, 21 nt, Human
caauaaccaacaaguuuuccc

SEQ ID NO: 1245708 - RNA, 18 nt, Human
cacauguggccuuagaac

SEQ ID NO: 1245709 - RNA, 24 nt, Human
cacuggcaucuuccucauagaguu

SEQ ID NO: 1245710 - RNA, 24 nt, Human
cagaaggaacagaacucccccaaa

SEQ ID NO: 1245711 - RNA, 21 nt, Human
caggcucccccacuugguccc

SEQ ID NO: 1245712 - RNA, 24 nt, Human
cagguaucccucccuccuagcuuc

SEQ ID NO: 1245713 - RNA, 23 nt, Human
ccagcccuggggcuuuggggcug

SEQ ID NO: 1245714 - RNA, 20 nt, Human
cccaaacgucccaccuccuc

SEQ ID NO: 1245715 - RNA, 21 nt, Human
cccaaccugggccuccagggc

SEQ ID NO: 1245716 - RNA, 20 nt, Human
cccagaaggaacagaacucc

SEQ ID NO: 1245717 - RNA, 21 nt, Human
ccccaaaagucaaagcaagcc

SEQ ID NO: 1245718 - RNA, 22 nt, Human
ccccaagcccaaacgucccacc

SEQ ID NO: 1245719 - RNA, 21 nt, Human
cccccaagcccaaacguccca

SEQ ID NO: 1245720 - RNA, 22 nt, Human
cccccaagcccaaacgucccac

SEQ ID NO: 1245721 - RNA, 18 nt, Human
cccugagccccagggcug

SEQ ID NO: 1245722 - RNA, 22 nt, Human
ccugcgggaccuucacugagcc

SEQ ID NO: 1245723 - RNA, 18 nt, Human
ccuggggcuuuggggcug

SEQ ID NO: 1245724 - RNA, 19 nt, Human
ccugugcuggaggggaagc

SEQ ID NO: 1245725 - RNA, 26 nt, Human
cuaaaggccuucacaaauaucacugg

SEQ ID NO: 1245726 - RNA, 18 nt, Human
cuaacccagaaggaacag

SEQ ID NO: 1245727 - RNA, 20 nt, Human
cucauagaguuguucuggag

SEQ ID NO: 1245728 - RNA, 18 nt, Human
cucccaaccugggccucc

SEQ ID NO: 1245729 - RNA, 23 nt, Human
cucccccacuuggucccugugcu

SEQ ID NO: 1245730 - RNA, 19 nt, Human
cugacugucgaugaauggc

SEQ ID NO: 1245731 - RNA, 20 nt, Human
cugcaggcucccccacuugg

SEQ ID NO: 1245732 - RNA, 22 nt, Human
cugucccaaacgggccagcccu

SEQ ID NO: 1245733 - RNA, 23 nt, Human
cugugcuggaggggaagcagaga

SEQ ID NO: 1245734 - RNA, 20 nt, Human
cuugaggagccacugugccu

SEQ ID NO: 1245735 - RNA, 21 nt, Human
cuugccgagcccccaagccca

SEQ ID NO: 1245736 - RNA, 19 nt, Human
cuugcuuuggugccugcua

SEQ ID NO: 1245737 - RNA, 25 nt, Human
gaacagaacucccccaaaagucaaa

SEQ ID NO: 1245738 - RNA, 18 nt, Human
gagcaagaaggaggugac

SEQ ID NO: 1245739 - RNA, 19 nt, Human
gagcagcaggaggccugca

SEQ ID NO: 1245740 - RNA, 20 nt, Human
gaggaagagaagucagagag

SEQ ID NO: 1245741 - RNA, 21 nt, Human
gaggaagagaagucagagagg

SEQ ID NO: 1245742 - RNA, 19 nt, Human
gaggaccagcaucuuuuag

SEQ ID NO: 1245743 - RNA, 20 nt, Human
gagggaagagcucuggugug

SEQ ID NO: 1245744 - RNA, 22 nt, Human
gcccgggguggcugcccugagc

SEQ ID NO: 1245745 - RNA, 19 nt, Human
gcuggaggggaagcagaga

SEQ ID NO: 1245746 - RNA, 23 nt, Human
ggacaagagaacagggcacaaga

SEQ ID NO: 1245747 - RNA, 20 nt, Human
ggcucccccacuuggucccu

SEQ ID NO: 1245748 - RNA, 24 nt, Human
ggcuggcagccucaucccugcggg

SEQ ID NO: 1245749 - RNA, 19 nt, Human
gggaagcagagaaggggcu

SEQ ID NO: 1245750 - RNA, 21 nt, Human
gggcugguccuggggucuguc

SEQ ID NO: 1245751 - RNA, 19 nt, Human
gggguggcugcccugagcc

SEQ ID NO: 1245752 - RNA, 21 nt, Human
guggaggaagagaagucagag

SEQ ID NO: 1245753 - RNA, 22 nt, Human
guggaggaagagaagucagaga

SEQ ID NO: 1245754 - RNA, 21 nt, Human
gugugucuugcuugccuugcc

SEQ ID NO: 1245755 - RNA, 22 nt, Human
uaaaggccuucacaaauaucac

SEQ ID NO: 1245756 - RNA, 19 nt, Human
uaacccagaaggaacagaa

SEQ ID NO: 1245757 - RNA, 23 nt, Human
uacggcauuugggugucgugguu

SEQ ID NO: 1245758 - RNA, 24 nt, Human
uagaaccugcuaaguccaacguca

SEQ ID NO: 1245759 - RNA, 21 nt, Human
ucacacauguggccuuagaac

SEQ ID NO: 1245760 - RNA, 21 nt, Human
ucacugagccuucuuggucac

SEQ ID NO: 1245761 - RNA, 20 nt, Human
ucagguguaagcuccaugcc

SEQ ID NO: 1245762 - RNA, 22 nt, Human
ucagucggucagcggcccgggg

SEQ ID NO: 1245763 - RNA, 23 nt, Human
uccaugccauggggacucugcag

SEQ ID NO: 1245764 - RNA, 21 nt, Human
uccuggggucugucaguccuu

SEQ ID NO: 1245765 - RNA, 21 nt, Human
ucuccccuagccucagcuauc

SEQ ID NO: 1245766 - RNA, 21 nt, Human
ucugcaggcucccccacuugg

SEQ ID NO: 1245767 - RNA, 23 nt, Human
ucugucaguccuuccccaggcuu

SEQ ID NO: 1245768 - RNA, 21 nt, Human
ugaccggagucuuccagguau

SEQ ID NO: 1245769 - RNA, 20 nt, Human
ugacucccaaccugggccuc

SEQ ID NO: 1245770 - RNA, 18 nt, Human
ugagccccagggcugguc

SEQ ID NO: 1245771 - RNA, 27 nt, Human
ugagccccagggcugguccuggggucu

SEQ ID NO: 1245772 - RNA, 18 nt, Human
ugcccuaaggcaccucac

SEQ ID NO: 1245773 - RNA, 20 nt, Human
ugcccuaaggcaccucacag

SEQ ID NO: 1245774 - RNA, 24 nt, Human
ugcccugagccccagggcuggucc

SEQ ID NO: 1245775 - RNA, 18 nt, Human
ugccgagcccccaagccc

SEQ ID NO: 1245776 - RNA, 19 nt, Human
ugccgagcccccaagccca

SEQ ID NO: 1245777 - RNA, 20 nt, Human
ugccuggacagguucugcag

SEQ ID NO: 1245778 - RNA, 21 nt, Human
ugccuggacagguucugcagg

SEQ ID NO: 1245779 - RNA, 21 nt, Human
ugcuuuggugccugcuauagg

SEQ ID NO: 1245780 - RNA, 21 nt, Human
uggaagugggagucggggagg

SEQ ID NO: 1245781 - RNA, 24 nt, Human
uggcagccucaucccugcgggacc

SEQ ID NO: 1245782 - RNA, 26 nt, Human
uggcagggagucugagagugagguug

SEQ ID NO: 1245783 - RNA, 20 nt, Human
ugguggaggaagagaaguca

SEQ ID NO: 1245784 - RNA, 27 nt, Human
ugucuugcuugccuugccgagccccca

SEQ ID NO: 1245785 - RNA, 23 nt, Human
uucagcaucacauaggagaugaa

SEQ ID NO: 1245786 - RNA, 18 nt, Human
uuccagguccagaaggcu

SEQ ID NO: 1245787 - RNA, 22 nt, Human
uucccacaagaaaaaaauaucc

SEQ ID NO: 1245788 - RNA, 23 nt, Human
uucuggaagugggagucggggag

SEQ ID NO: 1245789 - RNA, 19 nt, Human
uugccgagcccccaagccc

SEQ ID NO: 1245790 - RNA, 22 nt, Human
uuggucuucagcaucacauagg

SEQ ID NO: 1245791 - RNA, 25 nt, Human
aaagaaccauuauacgaaggccuua

SEQ ID NO: 1245792 - RNA, 24 nt, Human
aaagacuguccaaagggauucucc

SEQ ID NO: 1245793 - RNA, 22 nt, Human
aagcagcgaucuaaguaagaca

SEQ ID NO: 1245794 - RNA, 21 nt, Human
aauaaagacuguccaaaggga

SEQ ID NO: 1245795 - RNA, 22 nt, Human
acacauuuccagaauaacucuc

SEQ ID NO: 1245796 - RNA, 25 nt, Human
agaaaaauaaagacuguccaaaggg

SEQ ID NO: 1245797 - RNA, 21 nt, Human
aggagaugcaucagcugguac

SEQ ID NO: 1245798 - RNA, 18 nt, Human
aggaggaagagaguuuuc

SEQ ID NO: 1245799 - RNA, 24 nt, Human
aggaggaagagaguuuucaccaaa

SEQ ID NO: 1245800 - RNA, 20 nt, Human
cacagaauggaaaauagaau

SEQ ID NO: 1245801 - RNA, 21 nt, Human
caccaaaaaaaaaaucauuua

SEQ ID NO: 1245802 - RNA, 24 nt, Human
cagaauggaaaauagaaucaaagg

SEQ ID NO: 1245803 - RNA, 18 nt, Human
cauuucguucccuuguca

SEQ ID NO: 1245804 - RNA, 26 nt, Human
cauuucguucccuugucagaguugua

SEQ ID NO: 1245805 - RNA, 19 nt, Human
ccggcgcaggccuggcugg

SEQ ID NO: 1245806 - RNA, 22 nt, Human
ccgguggaguuguuguucuucu

SEQ ID NO: 1245807 - RNA, 31 nt, Human
ccuguacacagcgaaaacagaacuuauguag

SEQ ID NO: 1245808 - RNA, 29 nt, Human
cuaacccuucaaacaguacuccacuaucc

SEQ ID NO: 1245809 - RNA, 22 nt, Human
cucacagaauggaaaauagaau

SEQ ID NO: 1245810 - RNA, 23 nt, Human
cugcaguagacgacauucuuccu

SEQ ID NO: 1245811 - RNA, 23 nt, Human
cugcuagcaguaucauuuucuuc

SEQ ID NO: 1245812 - RNA, 20 nt, Human
cuggcuggggcgcucgccgc

SEQ ID NO: 1245813 - RNA, 24 nt, Human
gaggaugccggcgcaggccuggcu

SEQ ID NO: 1245814 - RNA, 22 nt, Human
gcuuuaggugaaaaguugucca

SEQ ID NO: 1245815 - RNA, 21 nt, Human
guacuccacuauccgguggag

SEQ ID NO: 1245816 - RNA, 19 nt, Human
gugcauaucuuugagggug

SEQ ID NO: 1245817 - RNA, 19 nt, Human
uaaaaugccucaauuuaac

SEQ ID NO: 1245818 - RNA, 19 nt, Human
uaaacugugcagauuaaaa

SEQ ID NO: 1245819 - RNA, 25 nt, Human
uaaauuuuuauuuuggcagaagaua

SEQ ID NO: 1245820 - RNA, 21 nt, Human
uaagaagaaaaauaaagacug

SEQ ID NO: 1245821 - RNA, 21 nt, Human
uaggacacuuagaaucaggag

SEQ ID NO: 1245822 - RNA, 23 nt, Human
ucaaaaauacucauugacuaccu

SEQ ID NO: 1245823 - RNA, 22 nt, Human
ucaaagggcuguuuacauagug

SEQ ID NO: 1245824 - RNA, 19 nt, Human
ucaauaccguauggcuuua

SEQ ID NO: 1245825 - RNA, 24 nt, Human
uccagauaaacaaguauauaaagg

SEQ ID NO: 1245826 - RNA, 24 nt, Human
ucuccuagcuuauaacacauuucc

SEQ ID NO: 1245827 - RNA, 20 nt, Human
ugagggugggacauacauuu

SEQ ID NO: 1245828 - RNA, 18 nt, Human
ugccggcgcaggccuggc

SEQ ID NO: 1245829 - RNA, 18 nt, Human
uggcuuuaugaaauaacu

SEQ ID NO: 1245830 - RNA, 19 nt, Human
ugggacauacauuuugaac

SEQ ID NO: 1245831 - RNA, 19 nt, Human
uguacacagcgaaaacaga

SEQ ID NO: 1245832 - RNA, 20 nt, Human
uguacacagcgaaaacagaa

SEQ ID NO: 1245833 - RNA, 20 nt, Human
uucguucccuugucagaguu

SEQ ID NO: 1245834 - RNA, 24 nt, Human
uuuuacuggcaguccagauaaaca

SEQ ID NO: 1245835 - RNA, 24 nt, Human
ggcgggcgagcgggccaggggccg

SEQ ID NO: 1245836 - RNA, 20 nt, Human
aaccuauguccccauuccuc

SEQ ID NO: 1245837 - RNA, 19 nt, Human
aaggggguccagcugggcc

SEQ ID NO: 1245838 - RNA, 20 nt, Human
aaggggguccagcugggccc

SEQ ID NO: 1245839 - RNA, 26 nt, Human
aauucacagaaucauugcucuccucu

SEQ ID NO: 1245840 - RNA, 24 nt, Human
aggggguccagcugggccaucagg

SEQ ID NO: 1245841 - RNA, 20 nt, Human
auguuccaguuucagagacu

SEQ ID NO: 1245842 - RNA, 19 nt, Human
cacaaauuccccaaaaauu

SEQ ID NO: 1245843 - RNA, 23 nt, Human
cacaaauuccccaaaaauucaca

SEQ ID NO: 1245844 - RNA, 20 nt, Human
cacacugaagaaauguccac

SEQ ID NO: 1245845 - RNA, 24 nt, Human
cacagaaucauugcucuccucacc

SEQ ID NO: 1245846 - RNA, 20 nt, Human
cacagccuggcugcaccuuc

SEQ ID NO: 1245847 - RNA, 23 nt, Human
cagaaguccucaggaagaggucu

SEQ ID NO: 1245848 - RNA, 27 nt, Human
cagcagacucgccucccgagccuucac

SEQ ID NO: 1245849 - RNA, 21 nt, Human
ccacggguggagggaucgggc

SEQ ID NO: 1245850 - RNA, 20 nt, Human
cccauuccucccuccugcca

SEQ ID NO: 1245851 - RNA, 19 nt, Human
ccccgccccaccucccagg

SEQ ID NO: 1245852 - RNA, 21 nt, Human
ccccgccccaccucccaggaa

SEQ ID NO: 1245853 - RNA, 18 nt, Human
ccggcccacggguggagg

SEQ ID NO: 1245854 - RNA, 19 nt, Human
ccucaggaagaggucugcu

SEQ ID NO: 1245855 - RNA, 25 nt, Human
ccucaggaagaggucugcuggccuc

SEQ ID NO: 1245856 - RNA, 23 nt, Human
ccucccgagccuucaccugguuc

SEQ ID NO: 1245857 - RNA, 18 nt, Human
ccuccuuuaaacagaagu

SEQ ID NO: 1245858 - RNA, 21 nt, Human
ccuucaccugguucugaagcc

SEQ ID NO: 1245859 - RNA, 26 nt, Human
cgccccaccucccaggaaguagcuag

SEQ ID NO: 1245860 - RNA, 20 nt, Human
cgccucccgagccuucaccu

SEQ ID NO: 1245861 - RNA, 22 nt, Human
cgggcggugccgaagcgguccg

SEQ ID NO: 1245862 - RNA, 22 nt, Human
cguaguccccgccccaccuccc

SEQ ID NO: 1245863 - RNA, 22 nt, Human
cuagguuccaugucucugugcu

SEQ ID NO: 1245864 - RNA, 23 nt, Human
cucccaggccugacugucaccaa

SEQ ID NO: 1245865 - RNA, 23 nt, Human
cuccugcugggcuccagccagag

SEQ ID NO: 1245866 - RNA, 21 nt, Human
cucuccucaccgcucaaaaag

SEQ ID NO: 1245867 - RNA, 21 nt, Human
cugccacaaauuccccaaaaa

SEQ ID NO: 1245868 - RNA, 18 nt, Human
cugcuggccucugugugg

SEQ ID NO: 1245869 - RNA, 20 nt, Human
cugcugggcuccagccagag

SEQ ID NO: 1245870 - RNA, 21 nt, Human
cugcugggcuccagccagagu

SEQ ID NO: 1245871 - RNA, 24 nt, Human
cugggccagcuguugcucugggga

SEQ ID NO: 1245872 - RNA, 20 nt, Human
cugugcuccaguuugugggc

SEQ ID NO: 1245873 - RNA, 20 nt, Human
gaagaggucugcuggccucu

SEQ ID NO: 1245874 - RNA, 20 nt, Human
gcuguugcucuggggauaag

SEQ ID NO: 1245875 - RNA, 21 nt, Human
gguccagcugggccaucaggu

SEQ ID NO: 1245876 - RNA, 22 nt, Human
gugcugcucugucugggccagc

SEQ ID NO: 1245877 - RNA, 19 nt, Human
gugggcuccucccaggccu

SEQ ID NO: 1245878 - RNA, 24 nt, Human
ucaccaaucuccuccucguccucc

SEQ ID NO: 1245879 - RNA, 22 nt, Human
ucccaaccuauguccccauucc

SEQ ID NO: 1245880 - RNA, 19 nt, Human
uccccgccccaccucccag

SEQ ID NO: 1245881 - RNA, 18 nt, Human
uccggcauuggccggccg

SEQ ID NO: 1245882 - RNA, 24 nt, Human
uccguaguccccgccccaccuccc

SEQ ID NO: 1245883 - RNA, 21 nt, Human
uccuccucguccuccuuuaaa

SEQ ID NO: 1245884 - RNA, 23 nt, Human
uccugccacaaauuccccaaaaa

SEQ ID NO: 1245885 - RNA, 21 nt, Human
ugccacaaauuccccaaaaau

SEQ ID NO: 1245886 - RNA, 30 nt, Human
ugccacaaauuccccaaaaauucacagaag

SEQ ID NO: 1245887 - RNA, 19 nt, Human
ugcugggcuccagccagag

SEQ ID NO: 1245888 - RNA, 18 nt, Human
ugggcuccucccaggccu

SEQ ID NO: 1245889 - RNA, 19 nt, Human
uguucaggugcugcucugu

SEQ ID NO: 1245890 - RNA, 23 nt, Human
uucagagacuuugucuccaccuc

SEQ ID NO: 1245891 - RNA, 19 nt, Human
uuguucaggugcugcucug

SEQ ID NO: 1245892 - RNA, 22 nt, Human
uuuaaacagaaguccucaggaa

SEQ ID NO: 1245893 - RNA, 22 nt, Human
uuugccacagccuggcugcacc

SEQ ID NO: 1245894 - RNA, 19 nt, Human
cacuggguggcaggggcca

SEQ ID NO: 1245895 - RNA, 24 nt, Human
ccacuggguggcaggggccaguuu

SEQ ID NO: 1245896 - RNA, 19 nt, Human
ccgcacuccaguaugacca

SEQ ID NO: 1245897 - RNA, 21 nt, Human
ccgcacuccaguaugaccaag

SEQ ID NO: 1245898 - RNA, 23 nt, Human
ccgcacuccaguaugaccaagag

SEQ ID NO: 1245899 - RNA, 21 nt, Human
gcugcgugcccugccgcacuc

SEQ ID NO: 1245900 - RNA, 27 nt, Human
ugcccugccgcacuccaguaugaccaa

SEQ ID NO: 1245901 - RNA, 21 nt, Human
uggcaggggccaguuucagca

SEQ ID NO: 1245902 - RNA, 18 nt, Human
uggguggcaggggccagu

SEQ ID NO: 1245903 - RNA, 19 nt, Human
uggguggcaggggccaguu

SEQ ID NO: 1245904 - RNA, 19 nt, Human
cacuggguggcaggggcca

SEQ ID NO: 1245905 - RNA, 24 nt, Human
ccacuggguggcaggggccaguuu

SEQ ID NO: 1245906 - RNA, 19 nt, Human
ccgcacuccaguaugacca

SEQ ID NO: 1245907 - RNA, 21 nt, Human
ccgcacuccaguaugaccaag

SEQ ID NO: 1245908 - RNA, 23 nt, Human
ccgcacuccaguaugaccaagag

SEQ ID NO: 1245909 - RNA, 21 nt, Human
gcugcgugcccugccgcacuc

SEQ ID NO: 1245910 - RNA, 27 nt, Human
ugcccugccgcacuccaguaugaccaa

SEQ ID NO: 1245911 - RNA, 21 nt, Human
uggcaggggccaguuucagca

SEQ ID NO: 1245912 - RNA, 18 nt, Human
uggguggcaggggccagu

SEQ ID NO: 1245913 - RNA, 19 nt, Human
uggguggcaggggccaguu

SEQ ID NO: 1245914 - RNA, 22 nt, Human
agcagcgccgacgaggccgaca

SEQ ID NO: 1245915 - RNA, 24 nt, Human
aggugcccgcccagcaccgcgccc

SEQ ID NO: 1245916 - RNA, 25 nt, Human
aggugcccgcccagcaccgcgcccu

SEQ ID NO: 1245917 - RNA, 22 nt, Human
cccuccgccacugccugauacc

SEQ ID NO: 1245918 - RNA, 22 nt, Human
ccuccgccacugccugauaccu

SEQ ID NO: 1245919 - RNA, 24 nt, Human
cuagagcccuccgccacugccuga

SEQ ID NO: 1245920 - RNA, 21 nt, Human
gccacugccugauaccucagc

SEQ ID NO: 1245921 - RNA, 19 nt, Human
ugccugauaccucagcagc

SEQ ID NO: 1245922 - RNA, 21 nt, Human
ugccugauaccucagcagcgc

SEQ ID NO: 1245923 - RNA, 22 nt, Human
aaacaggaauccaucaucaggc

SEQ ID NO: 1245924 - RNA, 20 nt, Human
aacccgggggccgcgaggcu

SEQ ID NO: 1245925 - RNA, 19 nt, Human
aagagcccaguccagcuac

SEQ ID NO: 1245926 - RNA, 22 nt, Human
accaccaacccgggggccgcga

SEQ ID NO: 1245927 - RNA, 20 nt, Human
acuuccaggaaugcguggaa

SEQ ID NO: 1245928 - RNA, 23 nt, Human
agagcaaugagccgagacccagg

SEQ ID NO: 1245929 - RNA, 18 nt, Human
agagcccaguccagcuac

SEQ ID NO: 1245930 - RNA, 22 nt, Human
aggcugggaucaggcaccccgg

SEQ ID NO: 1245931 - RNA, 20 nt, Human
aguggcgcugagcgugccca

SEQ ID NO: 1245932 - RNA, 20 nt, Human
cagagagcaaugagccgaga

SEQ ID NO: 1245933 - RNA, 18 nt, Human
caggaaacaggaauccau

SEQ ID NO: 1245934 - RNA, 20 nt, Human
ccaguccagcuacgccugcc

SEQ ID NO: 1245935 - RNA, 20 nt, Human
cccaagagcccaguccagcu

SEQ ID NO: 1245936 - RNA, 21 nt, Human
cccagaaacuuccaggaaugc

SEQ ID NO: 1245937 - RNA, 21 nt, Human
cccccgaaagcgugaccaugu

SEQ ID NO: 1245938 - RNA, 18 nt, Human
ccucacuguggcaggagc

SEQ ID NO: 1245939 - RNA, 24 nt, Human
ccucuguaaaggugccuguugcuc

SEQ ID NO: 1245940 - RNA, 19 nt, Human
ccugcaacagagcucgagg

SEQ ID NO: 1245941 - RNA, 19 nt, Human
cgccuggcuggcccaagag

SEQ ID NO: 1245942 - RNA, 21 nt, Human
gcagggccgcccacgcgggaa

SEQ ID NO: 1245943 - RNA, 24 nt, Human
gccgcccacgcgggaaaaccaacg

SEQ ID NO: 1245944 - RNA, 19 nt, Human
ggagcaguggcgcugagcc

SEQ ID NO: 1245945 - RNA, 25 nt, Human
ggggcagggccgcccacgcgggaaa

SEQ ID NO: 1245946 - RNA, 23 nt, Human
gucggugcucuccuuuccaguuu

SEQ ID NO: 1245947 - RNA, 18 nt, Human
uagcgucauuccuuuguu

SEQ ID NO: 1245948 - RNA, 21 nt, Human
uccccacguugagcccugcaa

SEQ ID NO: 1245949 - RNA, 18 nt, Human
ucccuguccucuuggugc

SEQ ID NO: 1245950 - RNA, 20 nt, Human
ucuuugcccucuguaaaggu

SEQ ID NO: 1245951 - RNA, 23 nt, Human
ugacuguuucgcgagcucugugg

SEQ ID NO: 1245952 - RNA, 28 nt, Human
ugagccgagacccagguaguugucuguu

SEQ ID NO: 1245953 - RNA, 21 nt, Human
ugauucuggauuccacguuuc

SEQ ID NO: 1245954 - RNA, 19 nt, Human
uggcaggagcaguggcgcu

SEQ ID NO: 1245955 - RNA, 22 nt, Human
ugggaucaggcaccccggagcc

SEQ ID NO: 1245956 - RNA, 23 nt, Human
uggggccccagaaacuuccagga

SEQ ID NO: 1245957 - RNA, 19 nt, Human
ugggucucucucauuuucc

SEQ ID NO: 1245958 - RNA, 19 nt, Human
ugguauggccguggacaau

SEQ ID NO: 1245959 - RNA, 20 nt, Human
uguggcaggagcaguggcgc

SEQ ID NO: 1245960 - RNA, 20 nt, Human
uucacagaugacauaucccc

SEQ ID NO: 1245961 - RNA, 22 nt, Human
uucacagaugacauauccccac

SEQ ID NO: 1245962 - RNA, 24 nt, Human
uuccaggaaugcguggaagaccag

SEQ ID NO: 1245963 - RNA, 20 nt, Human
uuguuggcuccucccugucc

SEQ ID NO: 1245964 - RNA, 21 nt, Human
aaaaagaaauucaauagaaag

SEQ ID NO: 1245965 - RNA, 22 nt, Human
aaacaauacagaacagaccagg

SEQ ID NO: 1245966 - RNA, 22 nt, Human
aaacaggaagugagaaaauggg

SEQ ID NO: 1245967 - RNA, 18 nt, Human
aagaacuggcaaggacuc

SEQ ID NO: 1245968 - RNA, 19 nt, Human
aagaagauacuucaauacc

SEQ ID NO: 1245969 - RNA, 21 nt, Human
aagagcuccccauccccaaag

SEQ ID NO: 1245970 - RNA, 28 nt, Human
aagagcuccccauccccaaagaacuggg

SEQ ID NO: 1245971 - RNA, 19 nt, Human
aagaucaaugggacagaau

SEQ ID NO: 1245972 - RNA, 21 nt, Human
acaaacauggcucccugaagc

SEQ ID NO: 1245973 - RNA, 22 nt, Human
acacggcuuucaagugccagag

SEQ ID NO: 1245974 - RNA, 26 nt, Human
acagagcacuccaccagguauuaaag

SEQ ID NO: 1245975 - RNA, 19 nt, Human
acauauccaaugccugcug

SEQ ID NO: 1245976 - RNA, 19 nt, Human
accaccuagaaccauggag

SEQ ID NO: 1245977 - RNA, 20 nt, Human
accccagcccugaccccacc

SEQ ID NO: 1245978 - RNA, 21 nt, Human
acucgccugcccagggccccu

SEQ ID NO: 1245979 - RNA, 20 nt, Human
agagcuccccauccccaaag

SEQ ID NO: 1245980 - RNA, 21 nt, Human
agcccugaccccaccuccucc

SEQ ID NO: 1245981 - RNA, 23 nt, Human
aggaagcuuccucaagcccaacu

SEQ ID NO: 1245982 - RNA, 18 nt, Human
auccucuauucuuggaga

SEQ ID NO: 1245983 - RNA, 24 nt, Human
caagagcaacauggaggucugcac

SEQ ID NO: 1245984 - RNA, 21 nt, Human
cacacuccccagagacucgcc

SEQ ID NO: 1245985 - RNA, 21 nt, Human
caccacacuccccagagacuc

SEQ ID NO: 1245986 - RNA, 24 nt, Human
caccacacuccccagagacucgcc

SEQ ID NO: 1245987 - RNA, 25 nt, Human
caccaccuaucauauggaaaaagaa

SEQ ID NO: 1245988 - RNA, 22 nt, Human
caccuuccagucaccacuacac

SEQ ID NO: 1245989 - RNA, 19 nt, Human
cagagcccccaaucuaacc

SEQ ID NO: 1245990 - RNA, 21 nt, Human
cagagcccccaaucuaaccuc

SEQ ID NO: 1245991 - RNA, 21 nt, Human
cagcaucuuacacaaggauuc

SEQ ID NO: 1245992 - RNA, 24 nt, Human
caggucagaucgguugaaaaaaua

SEQ ID NO: 1245993 - RNA, 18 nt, Human
cauauggaaaaagaaauu

SEQ ID NO: 1245994 - RNA, 21 nt, Human
caucaugaacucagaagaccu

SEQ ID NO: 1245995 - RNA, 21 nt, Human
ccacaaugaggucaaagggcg

SEQ ID NO: 1245996 - RNA, 20 nt, Human
ccacauaugucuucuccagg

SEQ ID NO: 1245997 - RNA, 21 nt, Human
ccacauaugucuucuccaggc

SEQ ID NO: 1245998 - RNA, 22 nt, Human
ccacauaugucuucuccaggca

SEQ ID NO: 1245999 - RNA, 22 nt, Human
ccaccacgccacauaugucuuc

SEQ ID NO: 1246000 - RNA, 22 nt, Human
ccacggaccccagcccugaccc

SEQ ID NO: 1246001 - RNA, 20 nt, Human
ccauguaagugaguuucaga

SEQ ID NO: 1246002 - RNA, 23 nt, Human
cccaacccgucggcccacggacc

SEQ ID NO: 1246003 - RNA, 23 nt, Human
cccagcccugaccccaccuccuc

SEQ ID NO: 1246004 - RNA, 25 nt, Human
cccagcccugaccccaccuccuccc

SEQ ID NO: 1246005 - RNA, 23 nt, Human
ccccagagacucgccugcccagg

SEQ ID NO: 1246006 - RNA, 18 nt, Human
cccccaacccgucggccc

SEQ ID NO: 1246007 - RNA, 24 nt, Human
cccccaacccgucggcccacggac

SEQ ID NO: 1246008 - RNA, 21 nt, Human
ccuccauagcauguaaagcuc

SEQ ID NO: 1246009 - RNA, 23 nt, Human
cgcagaaauaaguaaacagagca

SEQ ID NO: 1246010 - RNA, 19 nt, Human
cgcccugugaugucagaac

SEQ ID NO: 1246011 - RNA, 23 nt, Human
cggcuaauguuugacuguagcac

SEQ ID NO: 1246012 - RNA, 24 nt, Human
cgguugggacaaguaccggggucc

SEQ ID NO: 1246013 - RNA, 27 nt, Human
cgucggcccacggaccccagcccugac

SEQ ID NO: 1246014 - RNA, 21 nt, Human
cuaaguaucuuaaccaagguc

SEQ ID NO: 1246015 - RNA, 18 nt, Human
cuagaaccauggagagca

SEQ ID NO: 1246016 - RNA, 25 nt, Human
gaagcuuccucaagcccaacuauac

SEQ ID NO: 1246017 - RNA, 23 nt, Human
gccagagccaggacucagaucua

SEQ ID NO: 1246018 - RNA, 22 nt, Human
gcccuuauuucuccauuuggca

SEQ ID NO: 1246019 - RNA, 23 nt, Human
gcccuucaguuaaagaccaccag

SEQ ID NO: 1246020 - RNA, 27 nt, Human
gccugcccagggccccucucuaacccc

SEQ ID NO: 1246021 - RNA, 25 nt, Human
gcuccagagcccccaaucuaaccuc

SEQ ID NO: 1246022 - RNA, 25 nt, Human
ggaagaacagagacggucauggaaa

SEQ ID NO: 1246023 - RNA, 19 nt, Human
ggaccccagcccugacccc

SEQ ID NO: 1246024 - RNA, 23 nt, Human
ggagcacacuuguaaguaaauau

SEQ ID NO: 1246025 - RNA, 19 nt, Human
gguugaaaaaauaaaacua

SEQ ID NO: 1246026 - RNA, 23 nt, Human
gugcagggcccugagaugggguc

SEQ ID NO: 1246027 - RNA, 21 nt, Human
uaaaacaauacagaacagacc

SEQ ID NO: 1246028 - RNA, 21 nt, Human
uaaaacuaacaaauuuuuaca

SEQ ID NO: 1246029 - RNA, 22 nt, Human
uaaagaccaccaggagcacacu

SEQ ID NO: 1246030 - RNA, 18 nt, Human
uaagagcuccccaucccc

SEQ ID NO: 1246031 - RNA, 21 nt, Human
uacaacccuguguuaauauua

SEQ ID NO: 1246032 - RNA, 18 nt, Human
uagaaaauccauaguaac

SEQ ID NO: 1246033 - RNA, 20 nt, Human
uagaaaauccauaguaacau

SEQ ID NO: 1246034 - RNA, 19 nt, Human
uagcacaugugagaggccc

SEQ ID NO: 1246035 - RNA, 19 nt, Human
uaggugcccuuauuucucc

SEQ ID NO: 1246036 - RNA, 23 nt, Human
ucaccagugacccagucagugcc

SEQ ID NO: 1246037 - RNA, 23 nt, Human
ucaccugccaccauaaugugaau

SEQ ID NO: 1246038 - RNA, 23 nt, Human
uccagagcccccaaucuaaccuc

SEQ ID NO: 1246039 - RNA, 19 nt, Human
uccagucaccacuacaccu

SEQ ID NO: 1246040 - RNA, 24 nt, Human
uccauuccaccacgccacauaugu

SEQ ID NO: 1246041 - RNA, 20 nt, Human
uccccagagacucgccugcc

SEQ ID NO: 1246042 - RNA, 19 nt, Human
ucccugaagccgcucaggc

SEQ ID NO: 1246043 - RNA, 21 nt, Human
ucccugaagccgcucaggcuc

SEQ ID NO: 1246044 - RNA, 21 nt, Human
ucccugacgcuggccaucccc

SEQ ID NO: 1246045 - RNA, 25 nt, Human
ucgcccgucaagacgggccagggcu

SEQ ID NO: 1246046 - RNA, 21 nt, Human
ucucaccacacuccccagaga

SEQ ID NO: 1246047 - RNA, 24 nt, Human
ucucaucacuuagaaacccuacag

SEQ ID NO: 1246048 - RNA, 20 nt, Human
ucuccauuuggcagagaggg

SEQ ID NO: 1246049 - RNA, 23 nt, Human
ucucuuuguauugucugucaccu

SEQ ID NO: 1246050 - RNA, 19 nt, Human
ucuuggagaucugaaugcc

SEQ ID NO: 1246051 - RNA, 20 nt, Human
ugaaguguauuaacuugugu

SEQ ID NO: 1246052 - RNA, 23 nt, Human
ugacacaaaucgauaauuaacug

SEQ ID NO: 1246053 - RNA, 22 nt, Human
ugaccccaccuccucccagcau

SEQ ID NO: 1246054 - RNA, 20 nt, Human
ugagaggcgaauaacauugc

SEQ ID NO: 1246055 - RNA, 19 nt, Human
ugagauggggucugacuca

SEQ ID NO: 1246056 - RNA, 20 nt, Human
ugaggaagcuuccucaagcc

SEQ ID NO: 1246057 - RNA, 22 nt, Human
ugaggacauaggugguggaguc

SEQ ID NO: 1246058 - RNA, 21 nt, Human
ugaggucaaagggcggucuca

SEQ ID NO: 1246059 - RNA, 23 nt, Human
ugaucccugacgcuggccauccc

SEQ ID NO: 1246060 - RNA, 24 nt, Human
ugccugcugcugaccacagggauu

SEQ ID NO: 1246061 - RNA, 19 nt, Human
ugcuaaacucaugaauacu

SEQ ID NO: 1246062 - RNA, 20 nt, Human
uggcuccuuuuagcacuccu

SEQ ID NO: 1246063 - RNA, 19 nt, Human
uguaaucacacaacuaccc

SEQ ID NO: 1246064 - RNA, 22 nt, Human
uguaauuaaaacaauacagaac

SEQ ID NO: 1246065 - RNA, 23 nt, Human
uguaauuaaaacaauacagaaca

SEQ ID NO: 1246066 - RNA, 22 nt, Human
uguagaaugaggaagcuuccuc

SEQ ID NO: 1246067 - RNA, 21 nt, Human
uguauugucugucaccugcca

SEQ ID NO: 1246068 - RNA, 22 nt, Human
ugucacagaucucaucacuuag

SEQ ID NO: 1246069 - RNA, 22 nt, Human
ugugcagggcccugagaugggg

SEQ ID NO: 1246070 - RNA, 22 nt, Human
uuccuccugggaagcucuuucu

SEQ ID NO: 1246071 - RNA, 26 nt, Human
uugacacacaaacaggaagugagaaa

SEQ ID NO: 1246072 - RNA, 19 nt, Human
uuucuccauuuggcagaga

SEQ ID NO: 1246073 - RNA, 18 nt, Human
uuugaaaauccaaggcua

SEQ ID NO: 1246074 - RNA, 24 nt, Human
aaaagaaccaacauggaugcaugg

SEQ ID NO: 1246075 - RNA, 21 nt, Human
aaaaugaaacaagcuuagccc

SEQ ID NO: 1246076 - RNA, 22 nt, Human
aaaaugaaacaagcuuagccca

SEQ ID NO: 1246077 - RNA, 21 nt, Human
aaacaggcacucacacuuuca

SEQ ID NO: 1246078 - RNA, 19 nt, Human
aaauacaaaaagcaagccc

SEQ ID NO: 1246079 - RNA, 18 nt, Human
aaaugaagcuaacaaaua

SEQ ID NO: 1246080 - RNA, 21 nt, Human
aaaugggaauaauaagaauau

SEQ ID NO: 1246081 - RNA, 19 nt, Human
aaccugcaaagguacccuc

SEQ ID NO: 1246082 - RNA, 20 nt, Human
aacugcccacauuuuugcca

SEQ ID NO: 1246083 - RNA, 18 nt, Human
aacuuccucuucuucucu

SEQ ID NO: 1246084 - RNA, 20 nt, Human
aagaacccuccuggggaaga

SEQ ID NO: 1246085 - RNA, 18 nt, Human
aagcacaggcuucucuug

SEQ ID NO: 1246086 - RNA, 20 nt, Human
aagccuuccuuacaaacacc

SEQ ID NO: 1246087 - RNA, 20 nt, Human
aaggccacaaaaaaucagaa

SEQ ID NO: 1246088 - RNA, 24 nt, Human
aaggccacaaaaaaucagaacgua

SEQ ID NO: 1246089 - RNA, 24 nt, Human
aagugaucuguccaccuuggccuc

SEQ ID NO: 1246090 - RNA, 24 nt, Human
aagugauucuccugccucacccuc

SEQ ID NO: 1246091 - RNA, 24 nt, Human
aauaauaaucauaaucaugaaaau

SEQ ID NO: 1246092 - RNA, 21 nt, Human
aauagaaggguucugccugga

SEQ ID NO: 1246093 - RNA, 19 nt, Human
aauaucuacuuaaucucaa

SEQ ID NO: 1246094 - RNA, 27 nt, Human
acaaaaagcaagcccauggaugucaac

SEQ ID NO: 1246095 - RNA, 21 nt, Human
acacuugcagguuaacagccu

SEQ ID NO: 1246096 - RNA, 18 nt, Human
acagccucaggggaagac

SEQ ID NO: 1246097 - RNA, 18 nt, Human
acagcucauugcagccuc

SEQ ID NO: 1246098 - RNA, 21 nt, Human
acaggguuucaccauguuggc

SEQ ID NO: 1246099 - RNA, 21 nt, Human
acaggguuucaccauguuggc

SEQ ID NO: 1246100 - RNA, 24 nt, Human
acaggguuucaccauguuggccag

SEQ ID NO: 1246101 - RNA, 18 nt, Human
accacuguccuggccugu

SEQ ID NO: 1246102 - RNA, 27 nt, Human
accacuguccuggccuguuuccugucg

SEQ ID NO: 1246103 - RNA, 23 nt, Human
accauguuggccagguuggucuc

SEQ ID NO: 1246104 - RNA, 22 nt, Human
acccacucuuuugcccuuccca

SEQ ID NO: 1246105 - RNA, 25 nt, Human
acccaggcuggaagugcaguggcau

SEQ ID NO: 1246106 - RNA, 18 nt, Human
acccuccagaguagcugg

SEQ ID NO: 1246107 - RNA, 24 nt, Human
accuggcuaauuuuuuuguauuuu

SEQ ID NO: 1246108 - RNA, 24 nt, Human
accuugguuucccauaaugcuggg

SEQ ID NO: 1246109 - RNA, 19 nt, Human
acgggguuuugauauguug

SEQ ID NO: 1246110 - RNA, 24 nt, Human
acgggguuuugauauguugcucag

SEQ ID NO: 1246111 - RNA, 28 nt, Human
acuaucuuauauucacacauguguuggu

SEQ ID NO: 1246112 - RNA, 25 nt, Human
acucuguugcccaggcuggaguuca

SEQ ID NO: 1246113 - RNA, 21 nt, Human
acugcaaccuuccucuccugg

SEQ ID NO: 1246114 - RNA, 22 nt, Human
acugcaaccuuccucuccuggg

SEQ ID NO: 1246115 - RNA, 26 nt, Human
acugugucacccaggcuggaagugca

SEQ ID NO: 1246116 - RNA, 20 nt, Human
agagaccuaccaccaggaua

SEQ ID NO: 1246117 - RNA, 23 nt, Human
agcacaaauacagcccagaaaca

SEQ ID NO: 1246118 - RNA, 23 nt, Human
agccccuucccaucuugucuuug

SEQ ID NO: 1246119 - RNA, 19 nt, Human
agcuggguaaugagagacc

SEQ ID NO: 1246120 - RNA, 19 nt, Human
aggaaugugguaguaaagg

SEQ ID NO: 1246121 - RNA, 20 nt, Human
aggauuuugccugagcacaa

SEQ ID NO: 1246122 - RNA, 20 nt, Human
aggcaaucugcccaccuugg

SEQ ID NO: 1246123 - RNA, 23 nt, Human
aggcaggaguaucacuucaaccc

SEQ ID NO: 1246124 - RNA, 18 nt, Human
aggcuaaacuuuuuucuu

SEQ ID NO: 1246125 - RNA, 22 nt, Human
aggcucaggugauccuccuacc

SEQ ID NO: 1246126 - RNA, 18 nt, Human
aggcugagauagcuccca

SEQ ID NO: 1246127 - RNA, 19 nt, Human
aggcugaggcaggaguauc

SEQ ID NO: 1246128 - RNA, 24 nt, Human
agggacuacaggcaugagccacca

SEQ ID NO: 1246129 - RNA, 19 nt, Human
aguaccuucuaacuacuga

SEQ ID NO: 1246130 - RNA, 23 nt, Human
aguagcuggaauuauagacgugu

SEQ ID NO: 1246131 - RNA, 18 nt, Human
aguagcugggauuacagg

SEQ ID NO: 1246132 - RNA, 22 nt, Human
aguaggcacaggguuucaccau

SEQ ID NO: 1246133 - RNA, 19 nt, Human
agucucagccaccgugaga

SEQ ID NO: 1246134 - RNA, 21 nt, Human
agugcaguggcaugaucacag

SEQ ID NO: 1246135 - RNA, 23 nt, Human
agugcaguggcaugaucacagcu

SEQ ID NO: 1246136 - RNA, 24 nt, Human
agugcaguggcaugaucacagcuc

SEQ ID NO: 1246137 - RNA, 24 nt, Human
aguggcaugaucucagcuuacugc

SEQ ID NO: 1246138 - RNA, 23 nt, Human
aucaaauaauuucucuacuuuac

SEQ ID NO: 1246139 - RNA, 23 nt, Human
aucauucaauaauaaucauaauc

SEQ ID NO: 1246140 - RNA, 22 nt, Human
aucccagccaaucugauugcaa

SEQ ID NO: 1246141 - RNA, 18 nt, Human
aucucacucuuuccuuag

SEQ ID NO: 1246142 - RNA, 22 nt, Human
aucuuccuauguuguccaggcu

SEQ ID NO: 1246143 - RNA, 23 nt, Human
aucuuccuauguuguccaggcug

SEQ ID NO: 1246144 - RNA, 19 nt, Human
augcaauacuuuuuuuugg

SEQ ID NO: 1246145 - RNA, 22 nt, Human
auguacccuacaaauauguaua

SEQ ID NO: 1246146 - RNA, 20 nt, Human
augucuccugccucauaagu

SEQ ID NO: 1246147 - RNA, 19 nt, Human
auguggggauaaaagaacc

SEQ ID NO: 1246148 - RNA, 20 nt, Human
auucagggcagggguccucu

SEQ ID NO: 1246149 - RNA, 20 nt, Human
auuuggagacagaaucucac

SEQ ID NO: 1246150 - RNA, 24 nt, Human
caaauugcugggaugacuggcaug

SEQ ID NO: 1246151 - RNA, 20 nt, Human
caaccuuccucuccuggguu

SEQ ID NO: 1246152 - RNA, 18 nt, Human
caacuccauagaaauuca

SEQ ID NO: 1246153 - RNA, 21 nt, Human
caacuccauagaaauucagcu

SEQ ID NO: 1246154 - RNA, 21 nt, Human
caagcauauaaagcccauuuc

SEQ ID NO: 1246155 - RNA, 22 nt, Human
caagggauccuccugccucagc

SEQ ID NO: 1246156 - RNA, 20 nt, Human
caagugauucuccugccuca

SEQ ID NO: 1246157 - RNA, 20 nt, Human
caauggcaguuaaugcuuau

SEQ ID NO: 1246158 - RNA, 23 nt, Human
cacaaagccauccaagcauauaa

SEQ ID NO: 1246159 - RNA, 19 nt, Human
cacacaaguguuccagaag

SEQ ID NO: 1246160 - RNA, 23 nt, Human
cacacaauacacccauguaauaa

SEQ ID NO: 1246161 - RNA, 20 nt, Human
cacaguuugcacuuugaaau

SEQ ID NO: 1246162 - RNA, 24 nt, Human
caccacaccuggcuaauuuuugua

SEQ ID NO: 1246163 - RNA, 21 nt, Human
caccauguuggccagguuggu

SEQ ID NO: 1246164 - RNA, 22 nt, Human
caccauguuggccagguugguc

SEQ ID NO: 1246165 - RNA, 24 nt, Human
caccauguuggccagguuggucuc

SEQ ID NO: 1246166 - RNA, 23 nt, Human
cacccacucuuuugcccuuccca

SEQ ID NO: 1246167 - RNA, 24 nt, Human
cacccuguaaaagccuuccuuaca

SEQ ID NO: 1246168 - RNA, 22 nt, Human
caccuucucaagugcaggauuc

SEQ ID NO: 1246169 - RNA, 19 nt, Human
cacuacacauuguaugcau

SEQ ID NO: 1246170 - RNA, 22 nt, Human
cacucuguugcccaggcuggag

SEQ ID NO: 1246171 - RNA, 21 nt, Human
cacuuaaaaaaugcacugaga

SEQ ID NO: 1246172 - RNA, 20 nt, Human
cacuuacccugauacagaaa

SEQ ID NO: 1246173 - RNA, 19 nt, Human
cacuuugaaauggacccag

SEQ ID NO: 1246174 - RNA, 22 nt, Human
cagaagauugccuacagaggca

SEQ ID NO: 1246175 - RNA, 21 nt, Human
cagaaguugguuaauggacac

SEQ ID NO: 1246176 - RNA, 24 nt, Human
cagaaucucacucuguugcccagg

SEQ ID NO: 1246177 - RNA, 19 nt, Human
cagcaucacacaauacacc

SEQ ID NO: 1246178 - RNA, 21 nt, Human
cagcaucacacaauacaccca

SEQ ID NO: 1246179 - RNA, 18 nt, Human
cagccaccacgcacagcc

SEQ ID NO: 1246180 - RNA, 19 nt, Human
cagccuccugaguagcugg

SEQ ID NO: 1246181 - RNA, 24 nt, Human
cagcuacucaggaggcugaggcag

SEQ ID NO: 1246182 - RNA, 23 nt, Human
cagcucauugcagccucuacauc

SEQ ID NO: 1246183 - RNA, 24 nt, Human
caggaggcugaggcaggaguauca

SEQ ID NO: 1246184 - RNA, 18 nt, Human
cagggccugguccaugga

SEQ ID NO: 1246185 - RNA, 24 nt, Human
cagggucucacugugucacccagg

SEQ ID NO: 1246186 - RNA, 24 nt, Human
caggguuucaccauguuggccagg

SEQ ID NO: 1246187 - RNA, 19 nt, Human
caguggcaugaucucagcu

SEQ ID NO: 1246188 - RNA, 21 nt, Human
cauaacaagcugcaaacaaga

SEQ ID NO: 1246189 - RNA, 22 nt, Human
cauaaugcugggauuacaggug

SEQ ID NO: 1246190 - RNA, 22 nt, Human
caugcaccacuguccuggccug

SEQ ID NO: 1246191 - RNA, 20 nt, Human
caugggcagggccuggucca

SEQ ID NO: 1246192 - RNA, 21 nt, Human
cauuuuaaacuaacacugagu

SEQ ID NO: 1246193 - RNA, 23 nt, Human
cauuuuagaccacugagcacuuu

SEQ ID NO: 1246194 - RNA, 23 nt, Human
ccaaauacaaaaagcaagcccau

SEQ ID NO: 1246195 - RNA, 18 nt, Human
ccacaaagccauccaagc

SEQ ID NO: 1246196 - RNA, 22 nt, Human
ccacaaggucaaaguugagugu

SEQ ID NO: 1246197 - RNA, 19 nt, Human
ccacuggacuaguucccuu

SEQ ID NO: 1246198 - RNA, 23 nt, Human
ccacuggacuaguucccuuuuau

SEQ ID NO: 1246199 - RNA, 19 nt, Human
ccagaguagcugggauuac

SEQ ID NO: 1246200 - RNA, 22 nt, Human
ccagaguagcugggauuacagg

SEQ ID NO: 1246201 - RNA, 24 nt, Human
ccagaguagcugggauuacaggug

SEQ ID NO: 1246202 - RNA, 23 nt, Human
ccagccaccacgcacagccacaa

SEQ ID NO: 1246203 - RNA, 20 nt, Human
ccaggguacagucaguggag

SEQ ID NO: 1246204 - RNA, 21 nt, Human
ccauaaugcugggauuacagg

SEQ ID NO: 1246205 - RNA, 24 nt, Human
cccaaguagcagggacuacaggca

SEQ ID NO: 1246206 - RNA, 19 nt, Human
cccacauuugcauuauguc

SEQ ID NO: 1246207 - RNA, 22 nt, Human
cccacauuugcauuaugucuaa

SEQ ID NO: 1246208 - RNA, 23 nt, Human
cccaggcuggaguucaguggcau

SEQ ID NO: 1246209 - RNA, 21 nt, Human
cccaucauuuguuugcuguug

SEQ ID NO: 1246210 - RNA, 18 nt, Human
cccaugcaagcugcaucc

SEQ ID NO: 1246211 - RNA, 19 nt, Human
cccaugcaagcugcaucca

SEQ ID NO: 1246212 - RNA, 20 nt, Human
cccaugcaagcugcauccac

SEQ ID NO: 1246213 - RNA, 21 nt, Human
cccaugguccaccuuuuuauu

SEQ ID NO: 1246214 - RNA, 19 nt, Human
ccccaugcaagcugcaucc

SEQ ID NO: 1246215 - RNA, 24 nt, Human
ccccccauucagccagcacugagc

SEQ ID NO: 1246216 - RNA, 23 nt, Human
cccugagugcccagcgugugccc

SEQ ID NO: 1246217 - RNA, 18 nt, Human
cccugauacagaaagaag

SEQ ID NO: 1246218 - RNA, 25 nt, Human
cccuucagaaagcagauccuugggc

SEQ ID NO: 1246219 - RNA, 20 nt, Human
cccuuuucauccacccacuc

SEQ ID NO: 1246220 - RNA, 23 nt, Human
ccuaccucagccucccaaguagc

SEQ ID NO: 1246221 - RNA, 26 nt, Human
ccuccaaauacaaaaagcaagcccau

SEQ ID NO: 1246222 - RNA, 22 nt, Human
ccuccgaaaucuaaaaugaaag

SEQ ID NO: 1246223 - RNA, 20 nt, Human
ccuccugcuuuuagucauuu

SEQ ID NO: 1246224 - RNA, 19 nt, Human
ccugaguagcuggaauuau

SEQ ID NO: 1246225 - RNA, 19 nt, Human
ccugauccaugaaucucug

SEQ ID NO: 1246226 - RNA, 24 nt, Human
ccugccucagccuccugaguagcu

SEQ ID NO: 1246227 - RNA, 23 nt, Human
ccuggguucaagugauucuccuc

SEQ ID NO: 1246228 - RNA, 23 nt, Human
ccuggguucaagugauucuccug

SEQ ID NO: 1246229 - RNA, 21 nt, Human
ccuggugcucuccugcccccc

SEQ ID NO: 1246230 - RNA, 18 nt, Human
ccuguaaaagccuuccuu

SEQ ID NO: 1246231 - RNA, 19 nt, Human
ccuguaaucccagcuacuc

SEQ ID NO: 1246232 - RNA, 21 nt, Human
ccuguaaucccagcuacucag

SEQ ID NO: 1246233 - RNA, 22 nt, Human
ccuguaaucccagcuacucagg

SEQ ID NO: 1246234 - RNA, 24 nt, Human
cgggguuuugauauguugcucagg

SEQ ID NO: 1246235 - RNA, 18 nt, Human
cucaagggauccuccugc

SEQ ID NO: 1246236 - RNA, 24 nt, Human
cucaagugaucuguccaccuuggc

SEQ ID NO: 1246237 - RNA, 24 nt, Human
cucacucuguugcccaggcuggag

SEQ ID NO: 1246238 - RNA, 24 nt, Human
cucaggugauccuccuaccucagc

SEQ ID NO: 1246239 - RNA, 23 nt, Human
cucccauggccaggguuccugca

SEQ ID NO: 1246240 - RNA, 20 nt, Human
cuccuggguucaagugauuc

SEQ ID NO: 1246241 - RNA, 21 nt, Human
cuccuggguucaagugauucu

SEQ ID NO: 1246242 - RNA, 20 nt, Human
cugcagucccuacucuaagc

SEQ ID NO: 1246243 - RNA, 19 nt, Human
cuggaagugcaguggcaug

SEQ ID NO: 1246244 - RNA, 24 nt, Human
cuggaguucaguggcaugaucuca

SEQ ID NO: 1246245 - RNA, 24 nt, Human
cuuacaaacaccuccaguagaucc

SEQ ID NO: 1246246 - RNA, 23 nt, Human
cuuagcucaaggccacaaaaaau

SEQ ID NO: 1246247 - RNA, 22 nt, Human
cuucccaaaagaaucagacacu

SEQ ID NO: 1246248 - RNA, 24 nt, Human
gaaaauauauguaaagaccuuuga

SEQ ID NO: 1246249 - RNA, 18 nt, Human
gaacguaaauuccagccc

SEQ ID NO: 1246250 - RNA, 22 nt, Human
gaagaggccaugcaggcucagg

SEQ ID NO: 1246251 - RNA, 23 nt, Human
gaagccccuucccaucuugucuu

SEQ ID NO: 1246252 - RNA, 18 nt, Human
gaaguagcaacuccauag

SEQ ID NO: 1246253 - RNA, 18 nt, Human
gaagugcaguggcaugau

SEQ ID NO: 1246254 - RNA, 23 nt, Human
gaaguggagaacaaagauaagug

SEQ ID NO: 1246255 - RNA, 24 nt, Human
gaccuaccaccaggauaguucaaa

SEQ ID NO: 1246256 - RNA, 19 nt, Human
gacgggguuuugauauguu

SEQ ID NO: 1246257 - RNA, 21 nt, Human
gacuacaggcaugagccacca

SEQ ID NO: 1246258 - RNA, 22 nt, Human
gacucaagugaucuguccaccu

SEQ ID NO: 1246259 - RNA, 19 nt, Human
gagagaccuaccaccagga

SEQ ID NO: 1246260 - RNA, 18 nt, Human
gagaggcaccuucucaag

SEQ ID NO: 1246261 - RNA, 22 nt, Human
gagagugaaaguuaccugaggu

SEQ ID NO: 1246262 - RNA, 19 nt, Human
gagauggugaagcucugag

SEQ ID NO: 1246263 - RNA, 24 nt, Human
gagcucaggcaaucugcccaccuu

SEQ ID NO: 1246264 - RNA, 26 nt, Human
gaguagcugggauuacaggugcacac

SEQ ID NO: 1246265 - RNA, 24 nt, Human
gagugugguggcacaugccuguaa

SEQ ID NO: 1246266 - RNA, 18 nt, Human
gauuacaggugccagcca

SEQ ID NO: 1246267 - RNA, 18 nt, Human
gcaagcugcauccacaau

SEQ ID NO: 1246268 - RNA, 23 nt, Human
gcagaugcuacugcaguuuguau

SEQ ID NO: 1246269 - RNA, 27 nt, Human
gcaggagaugggugcaagagggacccc

SEQ ID NO: 1246270 - RNA, 19 nt, Human
gcaggauucagggcagggg

SEQ ID NO: 1246271 - RNA, 20 nt, Human
gccucagccuccugaguagc

SEQ ID NO: 1246272 - RNA, 19 nt, Human
gcucuaauaaugcaguuga

SEQ ID NO: 1246273 - RNA, 20 nt, Human
ggacagguggacaaaugcuc

SEQ ID NO: 1246274 - RNA, 19 nt, Human
ggacuacaggcaugagcca

SEQ ID NO: 1246275 - RNA, 22 nt, Human
ggauccuccugccucagccucc

SEQ ID NO: 1246276 - RNA, 22 nt, Human
ggaucuuccuauguuguccagg

SEQ ID NO: 1246277 - RNA, 18 nt, Human
ggcagggguccucuugcc

SEQ ID NO: 1246278 - RNA, 21 nt, Human
ggcaugaucacagcucauugc

SEQ ID NO: 1246279 - RNA, 23 nt, Human
ggcucaggugauccuccuaccuc

SEQ ID NO: 1246280 - RNA, 20 nt, Human
ggcuggaagugcaguggcau

SEQ ID NO: 1246281 - RNA, 23 nt, Human
gggacuacaggcaugagccacca

SEQ ID NO: 1246282 - RNA, 24 nt, Human
gggauccuccugccucagccuccu

SEQ ID NO: 1246283 - RNA, 19 nt, Human
gggcagggccugguccaug

SEQ ID NO: 1246284 - RNA, 23 nt, Human
gggguuuugauauguugcucagg

SEQ ID NO: 1246285 - RNA, 22 nt, Human
ggguuucaccauguuggccagg

SEQ ID NO: 1246286 - RNA, 19 nt, Human
gguaagaacccuccugggg

SEQ ID NO: 1246287 - RNA, 24 nt, Human
gguggcacaugccuguaaucccag

SEQ ID NO: 1246288 - RNA, 24 nt, Human
gugauccuccuaccucagccuccc

SEQ ID NO: 1246289 - RNA, 19 nt, Human
gugauucuccugccucacc

SEQ ID NO: 1246290 - RNA, 22 nt, Human
gugccuccacacccagcuuaca

SEQ ID NO: 1246291 - RNA, 20 nt, Human
guggcaugaggagcuguggg

SEQ ID NO: 1246292 - RNA, 19 nt, Human
guguccuaauacauaugua

SEQ ID NO: 1246293 - RNA, 19 nt, Human
guuguuccuggugcucucc

SEQ ID NO: 1246294 - RNA, 22 nt, Human
uaaaagaaccaacauggaugca

SEQ ID NO: 1246295 - RNA, 26 nt, Human
uaaaagccuuccuuacaaacaccucc

SEQ ID NO: 1246296 - RNA, 18 nt, Human
uaaacaagguacagagaa

SEQ ID NO: 1246297 - RNA, 24 nt, Human
uaaaccugcaaagguacccuccga

SEQ ID NO: 1246298 - RNA, 25 nt, Human
uaaacuccugaacucaagggauccu

SEQ ID NO: 1246299 - RNA, 22 nt, Human
uaaaguagcuucaaaacccauu

SEQ ID NO: 1246300 - RNA, 23 nt, Human
uaaaguagcuucaaaacccauuu

SEQ ID NO: 1246301 - RNA, 25 nt, Human
uaaauacuuucacuuaaaaaaugca

SEQ ID NO: 1246302 - RNA, 22 nt, Human
uaacaauaacuuauauauuuca

SEQ ID NO: 1246303 - RNA, 22 nt, Human
uaacaguuagaaguggagaaaa

SEQ ID NO: 1246304 - RNA, 22 nt, Human
uaauuuuuguauuuuuuguaga

SEQ ID NO: 1246305 - RNA, 24 nt, Human
uaauuuuuguauuuuuuguagaga

SEQ ID NO: 1246306 - RNA, 21 nt, Human
uacaaaaagcaagcccaugga

SEQ ID NO: 1246307 - RNA, 22 nt, Human
uacaaacaccuccaguagaucc

SEQ ID NO: 1246308 - RNA, 24 nt, Human
uacagaaagaagguguaaaauuuc

SEQ ID NO: 1246309 - RNA, 23 nt, Human
uacagcccagaaacacuugcagg

SEQ ID NO: 1246310 - RNA, 22 nt, Human
uacaggcaugagccaccacacc

SEQ ID NO: 1246311 - RNA, 21 nt, Human
uaccccaaaucucagcaucac

SEQ ID NO: 1246312 - RNA, 23 nt, Human
uaccccaaaucucagcaucacac

SEQ ID NO: 1246313 - RNA, 23 nt, Human
uaccucagccucccaaguagcag

SEQ ID NO: 1246314 - RNA, 22 nt, Human
uaccuucuaacuacugaucuac

SEQ ID NO: 1246315 - RNA, 23 nt, Human
uacugcaaccuuccucuccuggg

SEQ ID NO: 1246316 - RNA, 24 nt, Human
uacuuuuuuuuggaaauaggguga

SEQ ID NO: 1246317 - RNA, 20 nt, Human
uagaauucucugauuucuug

SEQ ID NO: 1246318 - RNA, 24 nt, Human
uagacgugugccuccacacccagc

SEQ ID NO: 1246319 - RNA, 20 nt, Human
uagauccuccaaccacuuuc

SEQ ID NO: 1246320 - RNA, 22 nt, Human
uagauccuccaaccacuuucag

SEQ ID NO: 1246321 - RNA, 26 nt, Human
uagcucccauggccaggguuccuucc

SEQ ID NO: 1246322 - RNA, 22 nt, Human
uaggcacaggguuucaccaugu

SEQ ID NO: 1246323 - RNA, 24 nt, Human
uaguaggcacaggguuucaccaug

SEQ ID NO: 1246324 - RNA, 26 nt, Human
uauauaauauauaacuauauagugau

SEQ ID NO: 1246325 - RNA, 19 nt, Human
uaucaugucuccugccuca

SEQ ID NO: 1246326 - RNA, 24 nt, Human
uaucccucaucuacaaaaugggaa

SEQ ID NO: 1246327 - RNA, 24 nt, Human
uauguucccugcaccacuggugcc

SEQ ID NO: 1246328 - RNA, 24 nt, Human
uauguugcucaggcuugucucaaa

SEQ ID NO: 1246329 - RNA, 24 nt, Human
uauguuguccaggcuggucuuaaa

SEQ ID NO: 1246330 - RNA, 18 nt, Human
uauuaggaaugccuuguu

SEQ ID NO: 1246331 - RNA, 24 nt, Human
uauuuggagacagaaucucacucu

SEQ ID NO: 1246332 - RNA, 25 nt, Human
uauuuggagacagaaucucacucug

SEQ ID NO: 1246333 - RNA, 23 nt, Human
ucaaaauacauaugagcacaauc

SEQ ID NO: 1246334 - RNA, 22 nt, Human
ucaacccuccaccacuucaggu

SEQ ID NO: 1246335 - RNA, 19 nt, Human
ucaagugauucuccugccu

SEQ ID NO: 1246336 - RNA, 21 nt, Human
ucaccauguuggccagguugg

SEQ ID NO: 1246337 - RNA, 23 nt, Human
ucaccccuucagaaagcagaucc

SEQ ID NO: 1246338 - RNA, 24 nt, Human
ucacucuguugcccaggcuggagu

SEQ ID NO: 1246339 - RNA, 27 nt, Human
ucagaaagcagauccuugggcaccauu

SEQ ID NO: 1246340 - RNA, 22 nt, Human
ucagccuccugaguagcuggaa

SEQ ID NO: 1246341 - RNA, 23 nt, Human
ucagcucaccuuucauucagucu

SEQ ID NO: 1246342 - RNA, 19 nt, Human
ucauauccagcuucccaaa

SEQ ID NO: 1246343 - RNA, 19 nt, Human
uccacaaagccauccaagc

SEQ ID NO: 1246344 - RNA, 20 nt, Human
uccacaauucucaccccuuc

SEQ ID NO: 1246345 - RNA, 19 nt, Human
uccacuguacaaauaaaau

SEQ ID NO: 1246346 - RNA, 24 nt, Human
uccagaguagcugggauuacaggu

SEQ ID NO: 1246347 - RNA, 25 nt, Human
uccaguagauccuccaaccacuuuc

SEQ ID NO: 1246348 - RNA, 24 nt, Human
ucccaaauugcugggaugacuggc

SEQ ID NO: 1246349 - RNA, 24 nt, Human
ucccaaguagcagggacuacaggc

SEQ ID NO: 1246350 - RNA, 18 nt, Human
ucccagccaaucugauug

SEQ ID NO: 1246351 - RNA, 23 nt, Human
ucccauaaugcugggauuacagg

SEQ ID NO: 1246352 - RNA, 25 nt, Human
ucccugcaccacuggugccuaucuc

SEQ ID NO: 1246353 - RNA, 24 nt, Human
uccuauguuguccaggcuggucuu

SEQ ID NO: 1246354 - RNA, 27 nt, Human
uccuccuaccucagccucccaaguagc

SEQ ID NO: 1246355 - RNA, 26 nt, Human
uccuccugccucagccuccugaguag

SEQ ID NO: 1246356 - RNA, 19 nt, Human
uccuggguucaagugauuc

SEQ ID NO: 1246357 - RNA, 21 nt, Human
uccuggguucaagugauucuc

SEQ ID NO: 1246358 - RNA, 24 nt, Human
uccuggguucaagugauucuccug

SEQ ID NO: 1246359 - RNA, 19 nt, Human
uccuugaagaagcuucauu

SEQ ID NO: 1246360 - RNA, 23 nt, Human
ucucaaacuccugagcucaggca

SEQ ID NO: 1246361 - RNA, 24 nt, Human
ucucaccccuucagaaagcagauc

SEQ ID NO: 1246362 - RNA, 22 nt, Human
ucucacucuguugcccaggcug

SEQ ID NO: 1246363 - RNA, 23 nt, Human
ucucacucuguugcccaggcugg

SEQ ID NO: 1246364 - RNA, 24 nt, Human
ucucacucuguugcccaggcugga

SEQ ID NO: 1246365 - RNA, 26 nt, Human
ucucacucuguugcccaggcuggagu

SEQ ID NO: 1246366 - RNA, 27 nt, Human
ucucacucuguugcccaggcuggaguu

SEQ ID NO: 1246367 - RNA, 24 nt, Human
ucucacugugucacccaggcugga

SEQ ID NO: 1246368 - RNA, 22 nt, Human
ucuccaggcucaggugauccuc

SEQ ID NO: 1246369 - RNA, 25 nt, Human
ucuccaggcucaggugauccuccua

SEQ ID NO: 1246370 - RNA, 24 nt, Human
ucuccuggguucaagugauucucc

SEQ ID NO: 1246371 - RNA, 18 nt, Human
ucucugauuucuuggugc

SEQ ID NO: 1246372 - RNA, 19 nt, Human
ucucuugugcugccagcaa

SEQ ID NO: 1246373 - RNA, 19 nt, Human
ucugugaagaccuguaccc

SEQ ID NO: 1246374 - RNA, 19 nt, Human
ucuuccuauguuguccagg

SEQ ID NO: 1246375 - RNA, 23 nt, Human
ucuuccuauguuguccaggcugg

SEQ ID NO: 1246376 - RNA, 24 nt, Human
ucuuccuauguuguccaggcuggu

SEQ ID NO: 1246377 - RNA, 23 nt, Human
ucuucuucucugagauuucuaga

SEQ ID NO: 1246378 - RNA, 19 nt, Human
ugaaaagaaugacauugag

SEQ ID NO: 1246379 - RNA, 20 nt, Human
ugaaauggacccagggaaga

SEQ ID NO: 1246380 - RNA, 24 nt, Human
ugaacucaagggauccuccugccu

SEQ ID NO: 1246381 - RNA, 20 nt, Human
ugaagaccuguacccucagu

SEQ ID NO: 1246382 - RNA, 23 nt, Human
ugaagauuauagcaauauuuuug

SEQ ID NO: 1246383 - RNA, 19 nt, Human
ugacuucauauccagcuuc

SEQ ID NO: 1246384 - RNA, 22 nt, Human
ugagaagcuuugcauacccuug

SEQ ID NO: 1246385 - RNA, 23 nt, Human
ugagagugaaaguuaccugaggu

SEQ ID NO: 1246386 - RNA, 18 nt, Human
ugagauauccacagaacu

SEQ ID NO: 1246387 - RNA, 19 nt, Human
ugagaucaacccuccacca

SEQ ID NO: 1246388 - RNA, 22 nt, Human
ugagaucaacccuccaccacuu

SEQ ID NO: 1246389 - RNA, 24 nt, Human
ugagcacaaauacagcccagaaac

SEQ ID NO: 1246390 - RNA, 24 nt, Human
ugagccagcaggaaggaucucaca

SEQ ID NO: 1246391 - RNA, 19 nt, Human
ugaggcaggaguaucacuu

SEQ ID NO: 1246392 - RNA, 24 nt, Human
ugaggcaggaguaucacuucaacc

SEQ ID NO: 1246393 - RNA, 25 nt, Human
ugaggcaggaguaucacuucaaccc

SEQ ID NO: 1246394 - RNA, 24 nt, Human
ugaucuguccaccuuggccuccca

SEQ ID NO: 1246395 - RNA, 21 nt, Human
ugauuugaucacuacacauug

SEQ ID NO: 1246396 - RNA, 19 nt, Human
ugcaaaaagagauuggaaa

SEQ ID NO: 1246397 - RNA, 22 nt, Human
ugcaggagaugggugcaagaca

SEQ ID NO: 1246398 - RNA, 21 nt, Human
ugcauagacaaaaugaaacaa

SEQ ID NO: 1246399 - RNA, 18 nt, Human
ugcaugggcagggccugg

SEQ ID NO: 1246400 - RNA, 21 nt, Human
ugcauguaucaaaauauaaca

SEQ ID NO: 1246401 - RNA, 18 nt, Human
ugccagcaguucucuucc

SEQ ID NO: 1246402 - RNA, 19 nt, Human
ugccauucaauuucugcag

SEQ ID NO: 1246403 - RNA, 19 nt, Human
ugccauucaauuucugcag

SEQ ID NO: 1246404 - RNA, 21 nt, Human
ugcccaggcuggaguucagug

SEQ ID NO: 1246405 - RNA, 24 nt, Human
ugcccaggcuggaguucaguggca

SEQ ID NO: 1246406 - RNA, 24 nt, Human
ugccucagccuccugaguagcugg

SEQ ID NO: 1246407 - RNA, 19 nt, Human
ugccugagcacaaauacag

SEQ ID NO: 1246408 - RNA, 28 nt, Human
ugccugagcacaaauacagcccagaaac

SEQ ID NO: 1246409 - RNA, 20 nt, Human
ugccuggauuugcauguggg

SEQ ID NO: 1246410 - RNA, 24 nt, Human
ugccuguaaucccagcuacucagg

SEQ ID NO: 1246411 - RNA, 20 nt, Human
ugcugagggaaacagggugg

SEQ ID NO: 1246412 - RNA, 18 nt, Human
ugcugggaugacuggcau

SEQ ID NO: 1246413 - RNA, 18 nt, Human
ugcugggauuacaggugc

SEQ ID NO: 1246414 - RNA, 24 nt, Human
uggaauuauagacgugugccucca

SEQ ID NO: 1246415 - RNA, 24 nt, Human
uggacacaaaaauacaguuagaug

SEQ ID NO: 1246416 - RNA, 19 nt, Human
uggacucaagugaucuguc

SEQ ID NO: 1246417 - RNA, 22 nt, Human
uggacucaagugaucuguccac

SEQ ID NO: 1246418 - RNA, 22 nt, Human
uggagacagaaucucacucugu

SEQ ID NO: 1246419 - RNA, 19 nt, Human
uggaguucaguggcaugau

SEQ ID NO: 1246420 - RNA, 19 nt, Human
uggaguucaguggcaugau

SEQ ID NO: 1246421 - RNA, 21 nt, Human
uggcacaugccuguaauccca

SEQ ID NO: 1246422 - RNA, 22 nt, Human
uggcacaugccuguaaucccag

SEQ ID NO: 1246423 - RNA, 24 nt, Human
uggcaugaucucagcuuacugcaa

SEQ ID NO: 1246424 - RNA, 24 nt, Human
uggccagguuggucucaaacuccu

SEQ ID NO: 1246425 - RNA, 19 nt, Human
ugggacagggucucacugu

SEQ ID NO: 1246426 - RNA, 21 nt, Human
ugggagagcauuaggcugaga

SEQ ID NO: 1246427 - RNA, 18 nt, Human
ugggaucuuccuauguug

SEQ ID NO: 1246428 - RNA, 24 nt, Human
ugggaucuuccuauguuguccagg

SEQ ID NO: 1246429 - RNA, 21 nt, Human
ugggauuacaggugcacacca

SEQ ID NO: 1246430 - RNA, 19 nt, Human
ugggauuacaggugcacca

SEQ ID NO: 1246431 - RNA, 22 nt, Human
ugggauuacaggugccagccac

SEQ ID NO: 1246432 - RNA, 24 nt, Human
ugggauuacaggugccagccacca

SEQ ID NO: 1246433 - RNA, 21 nt, Human
uggggauaaaagaaccaacau

SEQ ID NO: 1246434 - RNA, 23 nt, Human
uggguucaagugauucuccugcc

SEQ ID NO: 1246435 - RNA, 24 nt, Human
uggguucaagugauucuccugccu

SEQ ID NO: 1246436 - RNA, 19 nt, Human
ugguaagaacccuccuggg

SEQ ID NO: 1246437 - RNA, 24 nt, Human
ugguggcacaugccuguaauccca

SEQ ID NO: 1246438 - RNA, 23 nt, Human
ugguguccuaauacauauguaug

SEQ ID NO: 1246439 - RNA, 25 nt, Human
uguaaaagccuuccuuacaaacacc

SEQ ID NO: 1246440 - RNA, 18 nt, Human
uguaauaaaccugcaaag

SEQ ID NO: 1246441 - RNA, 24 nt, Human
uguagagacgggguuuugauaugu

SEQ ID NO: 1246442 - RNA, 22 nt, Human
ugucacccaggcuggaagugca

SEQ ID NO: 1246443 - RNA, 24 nt, Human
uguccaggcuggucuuaaacuccu

SEQ ID NO: 1246444 - RNA, 23 nt, Human
ugucucaaacucuuggacucaac

SEQ ID NO: 1246445 - RNA, 24 nt, Human
uguguguuguuccuggugcucucc

SEQ ID NO: 1246446 - RNA, 24 nt, Human
uuacugcaaccuuccucuccuggg

SEQ ID NO: 1246447 - RNA, 18 nt, Human
uuagcccacccacaggug

SEQ ID NO: 1246448 - RNA, 22 nt, Human
uuaggcugagauagcucccaug

SEQ ID NO: 1246449 - RNA, 24 nt, Human
uuaguaggcacaggguuucaccau

SEQ ID NO: 1246450 - RNA, 22 nt, Human
uucaaaaugacuagaggaaaga

SEQ ID NO: 1246451 - RNA, 21 nt, Human
uucaagugauucuccugccuc

SEQ ID NO: 1246452 - RNA, 23 nt, Human
uucaagugauucuccugccucac

SEQ ID NO: 1246453 - RNA, 18 nt, Human
uucaaguuaguuuacccu

SEQ ID NO: 1246454 - RNA, 24 nt, Human
uucacccuguaaaagccuuccuua

SEQ ID NO: 1246455 - RNA, 27 nt, Human
uucauucauaccccaaaucucagcauc

SEQ ID NO: 1246456 - RNA, 24 nt, Human
uuccuugggucccuuuuccuuagc

SEQ ID NO: 1246457 - RNA, 23 nt, Human
uucgccaggucccugagugccca

SEQ ID NO: 1246458 - RNA, 19 nt, Human
uugcagccucuacaucucc

SEQ ID NO: 1246459 - RNA, 21 nt, Human
uugcugggaugacuggcaugc

SEQ ID NO: 1246460 - RNA, 22 nt, Human
uuguagagacgggguuuugaua

SEQ ID NO: 1246461 - RNA, 24 nt, Human
uuguagagacgggguuuugauaug

SEQ ID NO: 1246462 - RNA, 19 nt, Human
uuuaaaauuuuaauauguu

SEQ ID NO: 1246463 - RNA, 19 nt, Human
uuucaccauguuggccagg

SEQ ID NO: 1246464 - RNA, 20 nt, Human
uuucaccauguuggccaggu

SEQ ID NO: 1246465 - RNA, 20 nt, Human
uuuguagagacgggguuuug

SEQ ID NO: 1246466 - RNA, 24 nt, Human
uuuguagagacgggguuuugauau

SEQ ID NO: 1246467 - RNA, 18 nt, Human
uuuucacauugcuaaguu

SEQ ID NO: 1246468 - RNA, 19 nt, Human
uuuugauauguugcucagg

SEQ ID NO: 1246469 - RNA, 24 nt, Human
uuuuuaguaggcacaggguuucac

SEQ ID NO: 1246470 - RNA, 20 nt, Human
uuuuuguauuuuuuguagag

SEQ ID NO: 1246471 - RNA, 23 nt, Human
uuuuuguauuuuuuguagagacg

SEQ ID NO: 1246472 - RNA, 21 nt, Human
uuuuuuguagagacgggguuu

SEQ ID NO: 1246473 - RNA, 22 nt, Human
uuuuuuguauuuuuaguaggca

SEQ ID NO: 1246474 - RNA, 18 nt, Human
aaaaaaacaggaccacag

SEQ ID NO: 1246475 - RNA, 25 nt, Human
aaaaaaacaggaccacagcaaaaag

SEQ ID NO: 1246476 - RNA, 21 nt, Human
aaaaacacccaaccaucaggg

SEQ ID NO: 1246477 - RNA, 22 nt, Human
aaaaacacccaaccaucagggc

SEQ ID NO: 1246478 - RNA, 18 nt, Human
aaaaagaaaggaaaggca

SEQ ID NO: 1246479 - RNA, 18 nt, Human
aaaaagcaggcacaaaac

SEQ ID NO: 1246480 - RNA, 20 nt, Human
aaaaagcaggcacaaaaccu

SEQ ID NO: 1246481 - RNA, 23 nt, Human
aaaaagcaggcacaaaaccucaa

SEQ ID NO: 1246482 - RNA, 24 nt, Human
aaaaagcaggcacaaaaccucaaa

SEQ ID NO: 1246483 - RNA, 19 nt, Human
aaaaggcacaggcuugcaa

SEQ ID NO: 1246484 - RNA, 27 nt, Human
aaaauaaacaaucuccucacaaaacca

SEQ ID NO: 1246485 - RNA, 23 nt, Human
aaacaagcacccaacugaccccu

SEQ ID NO: 1246486 - RNA, 24 nt, Human
aaacaagcacccaacugaccccuc

SEQ ID NO: 1246487 - RNA, 18 nt, Human
aaacagaaaaacaggcac

SEQ ID NO: 1246488 - RNA, 21 nt, Human
aaacagaaaaacaggcaccca

SEQ ID NO: 1246489 - RNA, 20 nt, Human
aaacaggaccacagcaaaaa

SEQ ID NO: 1246490 - RNA, 23 nt, Human
aaacaggcacccaacugacccuu

SEQ ID NO: 1246491 - RNA, 24 nt, Human
aaacaggcacccaacugacccuuc

SEQ ID NO: 1246492 - RNA, 22 nt, Human
aaacauccccagaaagggugcc

SEQ ID NO: 1246493 - RNA, 19 nt, Human
aaaucagaaaaacaagcac

SEQ ID NO: 1246494 - RNA, 20 nt, Human
aacaucaggucucuuuacac

SEQ ID NO: 1246495 - RNA, 19 nt, Human
aaccccugaagccaucagu

SEQ ID NO: 1246496 - RNA, 20 nt, Human
aagaagaaacgugcucaaca

SEQ ID NO: 1246497 - RNA, 24 nt, Human
aagcaggcacaaaaccucaaagca

SEQ ID NO: 1246498 - RNA, 21 nt, Human
aagccaucaguaaauuaaaac

SEQ ID NO: 1246499 - RNA, 23 nt, Human
aaggaaaaacacccaaccaucag

SEQ ID NO: 1246500 - RNA, 24 nt, Human
aaggaccaaaaaucagaaaaacaa

SEQ ID NO: 1246501 - RNA, 25 nt, Human
aauucugugcagccuaccaucgacu

SEQ ID NO: 1246502 - RNA, 20 nt, Human
acaaaaccagcuggccucca

SEQ ID NO: 1246503 - RNA, 22 nt, Human
acaaaaccucaaagcacauaac

SEQ ID NO: 1246504 - RNA, 20 nt, Human
acagcaaaaagcaggcacaa

SEQ ID NO: 1246505 - RNA, 20 nt, Human
accagcuggccuccauguaa

SEQ ID NO: 1246506 - RNA, 18 nt, Human
acccgcuggaucagcuuc

SEQ ID NO: 1246507 - RNA, 19 nt, Human
acuccaucucucuccucug

SEQ ID NO: 1246508 - RNA, 20 nt, Human
acuuccugcagacccagcac

SEQ ID NO: 1246509 - RNA, 19 nt, Human
agaagaaagagagaugaga

SEQ ID NO: 1246510 - RNA, 18 nt, Human
agacagagcguacgagua

SEQ ID NO: 1246511 - RNA, 19 nt, Human
agagaugagagaugaaagg

SEQ ID NO: 1246512 - RNA, 22 nt, Human
agccaccugagcggcugcuacc

SEQ ID NO: 1246513 - RNA, 22 nt, Human
aggaaaggcauugucuggagcc

SEQ ID NO: 1246514 - RNA, 22 nt, Human
aggaccacagcaaaaagcaggc

SEQ ID NO: 1246515 - RNA, 18 nt, Human
aggacuaaaaacagaaaa

SEQ ID NO: 1246516 - RNA, 19 nt, Human
aggagaccaacuuguggcu

SEQ ID NO: 1246517 - RNA, 23 nt, Human
aggauggugcuucacagugccuc

SEQ ID NO: 1246518 - RNA, 21 nt, Human
aggcaaacaauucuaggccua

SEQ ID NO: 1246519 - RNA, 27 nt, Human
aggcaggcuggggacacgugugggaag

SEQ ID NO: 1246520 - RNA, 18 nt, Human
agggaaacugggacucaa

SEQ ID NO: 1246521 - RNA, 18 nt, Human
agggacagaugagagaug

SEQ ID NO: 1246522 - RNA, 23 nt, Human
agggucccgggcucuucccccgg

SEQ ID NO: 1246523 - RNA, 18 nt, Human
aucauuguucaaucaaac

SEQ ID NO: 1246524 - RNA, 21 nt, Human
augagagauggcaccucccaa

SEQ ID NO: 1246525 - RNA, 21 nt, Human
augccaggaaauccagugaca

SEQ ID NO: 1246526 - RNA, 18 nt, Human
auuacgugcugccuuugc

SEQ ID NO: 1246527 - RNA, 22 nt, Human
auucugugcagccuaccaucga

SEQ ID NO: 1246528 - RNA, 21 nt, Human
auuugugaaaaggugaccccc

SEQ ID NO: 1246529 - RNA, 18 nt, Human
caaacuuaccugagugga

SEQ ID NO: 1246530 - RNA, 23 nt, Human
caaagcacauaacgucaggggcc

SEQ ID NO: 1246531 - RNA, 22 nt, Human
caaagguaaagcugccagcaca

SEQ ID NO: 1246532 - RNA, 22 nt, Human
caaccagggaaccucaccccag

SEQ ID NO: 1246533 - RNA, 23 nt, Human
caacuuguggcucagcauggcuc

SEQ ID NO: 1246534 - RNA, 26 nt, Human
caaggacagcgacaggauuggagacc

SEQ ID NO: 1246535 - RNA, 20 nt, Human
cacaggcuugcaagcccacc

SEQ ID NO: 1246536 - RNA, 25 nt, Human
caccccacuuucacauacacacccu

SEQ ID NO: 1246537 - RNA, 22 nt, Human
caccucccaaggagaccaacuu

SEQ ID NO: 1246538 - RNA, 21 nt, Human
caccugagcggcugcuaccuc

SEQ ID NO: 1246539 - RNA, 18 nt, Human
cacgacacaccagcaaga

SEQ ID NO: 1246540 - RNA, 21 nt, Human
cacuccaucucucuccucuga

SEQ ID NO: 1246541 - RNA, 22 nt, Human
cagaagggagagaagaaagaga

SEQ ID NO: 1246542 - RNA, 23 nt, Human
cagcaaaaagcaggcacaaaacc

SEQ ID NO: 1246543 - RNA, 23 nt, Human
cagcagggacuuggacauccagc

SEQ ID NO: 1246544 - RNA, 25 nt, Human
cagcuuuauuagggaaaacaucagg

SEQ ID NO: 1246545 - RNA, 22 nt, Human
caggaccacagcaaaaagcagg

SEQ ID NO: 1246546 - RNA, 21 nt, Human
caggagcccuccguggccagc

SEQ ID NO: 1246547 - RNA, 20 nt, Human
cagggacuuggacauccagc

SEQ ID NO: 1246548 - RNA, 25 nt, Human
caggguggagccucagcucaaugcc

SEQ ID NO: 1246549 - RNA, 23 nt, Human
cauccaaacauccccagaaaggg

SEQ ID NO: 1246550 - RNA, 22 nt, Human
cauccagcacucacgacacacc

SEQ ID NO: 1246551 - RNA, 23 nt, Human
caucgacuggguacuuccugcag

SEQ ID NO: 1246552 - RNA, 23 nt, Human
caucugaacuuugaaccugaguc

SEQ ID NO: 1246553 - RNA, 21 nt, Human
caugcccccgcuggggugccc

SEQ ID NO: 1246554 - RNA, 18 nt, Human
ccaaaccuacucaaccag

SEQ ID NO: 1246555 - RNA, 18 nt, Human
ccaagcaagggaggugcu

SEQ ID NO: 1246556 - RNA, 22 nt, Human
ccacacaugcccccgcuggggu

SEQ ID NO: 1246557 - RNA, 23 nt, Human
ccagagucaggcacauuuggagg

SEQ ID NO: 1246558 - RNA, 25 nt, Human
ccagagucaggcacauuuggaggag

SEQ ID NO: 1246559 - RNA, 20 nt, Human
ccagccuccggccuggccca

SEQ ID NO: 1246560 - RNA, 22 nt, Human
ccagggaccucuugugaaccag

SEQ ID NO: 1246561 - RNA, 23 nt, Human
ccauguaauuuuguggcgcugaa

SEQ ID NO: 1246562 - RNA, 20 nt, Human
cccaggaagggucccgggcu

SEQ ID NO: 1246563 - RNA, 25 nt, Human
ccccagaaagggugccagggaccuc

SEQ ID NO: 1246564 - RNA, 23 nt, Human
cccccuguaaccaaaagggaaac

SEQ ID NO: 1246565 - RNA, 22 nt, Human
cccgaaugugcaagaugagguu

SEQ ID NO: 1246566 - RNA, 21 nt, Human
cccuccguggccagcagggac

SEQ ID NO: 1246567 - RNA, 18 nt, Human
cccuuuuucuuuucugcc

SEQ ID NO: 1246568 - RNA, 20 nt, Human
ccgaugccagcagagccacc

SEQ ID NO: 1246569 - RNA, 22 nt, Human
ccgcauccaaacauccccagaa

SEQ ID NO: 1246570 - RNA, 25 nt, Human
ccuacucaaccagggaaccucaccc

SEQ ID NO: 1246571 - RNA, 21 nt, Human
ccuacuguuaaccccugaagc

SEQ ID NO: 1246572 - RNA, 22 nt, Human
ccucaccccacuuucacauaca

SEQ ID NO: 1246573 - RNA, 22 nt, Human
ccuccguggccagcagggacuu

SEQ ID NO: 1246574 - RNA, 18 nt, Human
ccucuaagauacuguggg

SEQ ID NO: 1246575 - RNA, 26 nt, Human
ccuguaaccaaaagggaaacugggac

SEQ ID NO: 1246576 - RNA, 23 nt, Human
cgacaugauugucuccucuaaga

SEQ ID NO: 1246577 - RNA, 19 nt, Human
cgaugccagcagagccacc

SEQ ID NO: 1246578 - RNA, 23 nt, Human
cgauuaacuugcuaggaauggac

SEQ ID NO: 1246579 - RNA, 23 nt, Human
cgcagcacuaggucuauguccag

SEQ ID NO: 1246580 - RNA, 22 nt, Human
cuagaacuuacacauuacgugc

SEQ ID NO: 1246581 - RNA, 23 nt, Human
cuauaccaguauauuguuaugaa

SEQ ID NO: 1246582 - RNA, 25 nt, Human
cucaaagcacauaacgucaggggcc

SEQ ID NO: 1246583 - RNA, 19 nt, Human
cucaaccagggaaccucac

SEQ ID NO: 1246584 - RNA, 22 nt, Human
cucaccccacuuucacauacac

SEQ ID NO: 1246585 - RNA, 18 nt, Human
cugcuccuucugggcugu

SEQ ID NO: 1246586 - RNA, 21 nt, Human
cuggagccucugcuguccugu

SEQ ID NO: 1246587 - RNA, 24 nt, Human
cuggagccucugcuguccugucug

SEQ ID NO: 1246588 - RNA, 23 nt, Human
cuuucugucugccaugccaggaa

SEQ ID NO: 1246589 - RNA, 24 nt, Human
gaaaaaaacaggaccacagcaaaa

SEQ ID NO: 1246590 - RNA, 18 nt, Human
gaaaguuggcuucuguga

SEQ ID NO: 1246591 - RNA, 18 nt, Human
gaaugugcaagaugaggu

SEQ ID NO: 1246592 - RNA, 19 nt, Human
gacacugccugggugcugg

SEQ ID NO: 1246593 - RNA, 19 nt, Human
gacagccucugaaagccaa

SEQ ID NO: 1246594 - RNA, 20 nt, Human
gacuaaaaacagaaaaacag

SEQ ID NO: 1246595 - RNA, 21 nt, Human
gagcauacuuuugggaaaugc

SEQ ID NO: 1246596 - RNA, 24 nt, Human
gaggcauuuacuuggaaguacagg

SEQ ID NO: 1246597 - RNA, 18 nt, Human
gaucccugggggcuacua

SEQ ID NO: 1246598 - RNA, 19 nt, Human
gcagaauucucccaggaag

SEQ ID NO: 1246599 - RNA, 20 nt, Human
gccauugagcuucaucugaa

SEQ ID NO: 1246600 - RNA, 18 nt, Human
gcccuuuuucuuuucugc

SEQ ID NO: 1246601 - RNA, 18 nt, Human
gcgugcccaggcugagcc

SEQ ID NO: 1246602 - RNA, 19 nt, Human
gcucugaggcaagaauaaa

SEQ ID NO: 1246603 - RNA, 24 nt, Human
gcugccucucaaugucgggaccau

SEQ ID NO: 1246604 - RNA, 21 nt, Human
gcuucuuguggggggaacagc

SEQ ID NO: 1246605 - RNA, 20 nt, Human
ggaaaaacacccaaccauca

SEQ ID NO: 1246606 - RNA, 25 nt, Human
ggacagaugagagauggcaccuccc

SEQ ID NO: 1246607 - RNA, 19 nt, Human
ggacauccagcacucacga

SEQ ID NO: 1246608 - RNA, 18 nt, Human
ggaccaucuauuuacagg

SEQ ID NO: 1246609 - RNA, 19 nt, Human
ggacgaguucccugccccc

SEQ ID NO: 1246610 - RNA, 20 nt, Human
ggcaguuucuucuggccuca

SEQ ID NO: 1246611 - RNA, 23 nt, Human
ggcugcagaauucucccaggaag

SEQ ID NO: 1246612 - RNA, 18 nt, Human
gggaaacugggacucaaa

SEQ ID NO: 1246613 - RNA, 23 nt, Human
gggaaacugggacucaaagggaa

SEQ ID NO: 1246614 - RNA, 18 nt, Human
gggcagagaaguccuuuu

SEQ ID NO: 1246615 - RNA, 18 nt, Human
gggcuuucauggcugggg

SEQ ID NO: 1246616 - RNA, 25 nt, Human
ggguucccaggagcauacuuuuggg

SEQ ID NO: 1246617 - RNA, 18 nt, Human
gguccaucggccacuccu

SEQ ID NO: 1246618 - RNA, 21 nt, Human
ggugcagcuguguaucauugu

SEQ ID NO: 1246619 - RNA, 23 nt, Human
ggugcccuuucucuucccugccu

SEQ ID NO: 1246620 - RNA, 23 nt, Human
gucccgggcucuucaggaggcau

SEQ ID NO: 1246621 - RNA, 20 nt, Human
gucuggagccucugcugucc

SEQ ID NO: 1246622 - RNA, 27 nt, Human
gugaucaaggaccaaaaaucagaaaaa

SEQ ID NO: 1246623 - RNA, 18 nt, Human
gugcccuuucucuucccu

SEQ ID NO: 1246624 - RNA, 18 nt, Human
uaaaaacagaaaaacagg

SEQ ID NO: 1246625 - RNA, 23 nt, Human
uaaaaacagaaaaacaggcaccc

SEQ ID NO: 1246626 - RNA, 19 nt, Human
uaaaacaagaaucacaagu

SEQ ID NO: 1246627 - RNA, 19 nt, Human
uacacaaugccaccuccag

SEQ ID NO: 1246628 - RNA, 22 nt, Human
uaccagccgcauccaaacaucc

SEQ ID NO: 1246629 - RNA, 23 nt, Human
uaccagccgcauccaaacauccc

SEQ ID NO: 1246630 - RNA, 20 nt, Human
uacgugcugccuuugcacau

SEQ ID NO: 1246631 - RNA, 23 nt, Human
uacuguuaaccccugaagccauc

SEQ ID NO: 1246632 - RNA, 22 nt, Human
uaucaguaacagcuaaaugaaa

SEQ ID NO: 1246633 - RNA, 22 nt, Human
ucaagguagagaucagaauucu

SEQ ID NO: 1246634 - RNA, 24 nt, Human
ucaagguagagaucagaauucugu

SEQ ID NO: 1246635 - RNA, 20 nt, Human
ucacaaaaccagcuggccuc

SEQ ID NO: 1246636 - RNA, 26 nt, Human
ucaguaaauuaaaacaagaaucacaa

SEQ ID NO: 1246637 - RNA, 19 nt, Human
uccaggguggccaugagga

SEQ ID NO: 1246638 - RNA, 20 nt, Human
ucccuugagggcagagaagu

SEQ ID NO: 1246639 - RNA, 23 nt, Human
uccucacaaaaccagcuggccuc

SEQ ID NO: 1246640 - RNA, 24 nt, Human
ucucaccgacaugauugucuccuc

SEQ ID NO: 1246641 - RNA, 19 nt, Human
ucuccucuaagauacugug

SEQ ID NO: 1246642 - RNA, 19 nt, Human
ucuccuuaaaaaggcuggg

SEQ ID NO: 1246643 - RNA, 25 nt, Human
ucucucuccucuggggcgugcccag

SEQ ID NO: 1246644 - RNA, 24 nt, Human
ucucuuuacacguugaacaggaac

SEQ ID NO: 1246645 - RNA, 21 nt, Human
ucuggggcgugcccaggcuga

SEQ ID NO: 1246646 - RNA, 21 nt, Human
ucuucuggccucacccaccuu

SEQ ID NO: 1246647 - RNA, 20 nt, Human
ugaaaaaaacaggaccacag

SEQ ID NO: 1246648 - RNA, 27 nt, Human
ugaaaaaaacaggaccacagcaaaaag

SEQ ID NO: 1246649 - RNA, 18 nt, Human
ugaaaaagaaaggaaagg

SEQ ID NO: 1246650 - RNA, 18 nt, Human
ugaaccagcacacaaacu

SEQ ID NO: 1246651 - RNA, 19 nt, Human
ugaccccagaucugcuccu

SEQ ID NO: 1246652 - RNA, 26 nt, Human
ugagggcagagaaguccuccccgagg

SEQ ID NO: 1246653 - RNA, 22 nt, Human
ugagguuucccacaucugcacc

SEQ ID NO: 1246654 - RNA, 19 nt, Human
ugcccaggcugagccugag

SEQ ID NO: 1246655 - RNA, 20 nt, Human
ugcccaggcugagccugagc

SEQ ID NO: 1246656 - RNA, 24 nt, Human
ugccccagcuggaaugcccuuuuu

SEQ ID NO: 1246657 - RNA, 19 nt, Human
ugcccccgcuggggugccc

SEQ ID NO: 1246658 - RNA, 19 nt, Human
ugcccccgcuggggugccc

SEQ ID NO: 1246659 - RNA, 21 nt, Human
ugcccuuucucuucccugccu

SEQ ID NO: 1246660 - RNA, 23 nt, Human
ugcuaggaauggacaaggacagc

SEQ ID NO: 1246661 - RNA, 19 nt, Human
ugcuucccucuccuaagca

SEQ ID NO: 1246662 - RNA, 21 nt, Human
ugcuucuagcuccaggagucu

SEQ ID NO: 1246663 - RNA, 22 nt, Human
uggaggucuacauuugugaaaa

SEQ ID NO: 1246664 - RNA, 22 nt, Human
uggggcgugcccaggcugagcc

SEQ ID NO: 1246665 - RNA, 18 nt, Human
ugguucuaagcuccaacu

SEQ ID NO: 1246666 - RNA, 22 nt, Human
uguccugucugcaaaaugggaa

SEQ ID NO: 1246667 - RNA, 23 nt, Human
uguccugucugcaaaaugggaau

SEQ ID NO: 1246668 - RNA, 22 nt, Human
ugugaaaagggcuuucucacuu

SEQ ID NO: 1246669 - RNA, 22 nt, Human
ugugaaccagcacacaaacuuc

SEQ ID NO: 1246670 - RNA, 23 nt, Human
uuaaaaaggcugggacauuagua

SEQ ID NO: 1246671 - RNA, 18 nt, Human
uuaaccccugaagccauc

SEQ ID NO: 1246672 - RNA, 21 nt, Human
uucccacaucugcaccgcucc

SEQ ID NO: 1246673 - RNA, 23 nt, Human
uuccugcagacccagcacuuugg

SEQ ID NO: 1246674 - RNA, 22 nt, Human
uuuaaaaugggcaaccaucuuu

SEQ ID NO: 1246675 - RNA, 24 nt, Human
uuuaaaggacuaaaaacagaaaaa

SEQ ID NO: 1246676 - RNA, 22 nt, Human
uuucccacaucugcaccgcucc

SEQ ID NO: 1246677 - RNA, 20 nt, Human
uuuuuacccgcuggaucagc

SEQ ID NO: 1246678 - RNA, 24 nt, Human
aaagugcugggaucacaggcguga

SEQ ID NO: 1246679 - RNA, 21 nt, Human
aagcgaacacgggcuccucca

SEQ ID NO: 1246680 - RNA, 23 nt, Human
aaggacugggggaucccaacuca

SEQ ID NO: 1246681 - RNA, 19 nt, Human
aaguagcugggacuaaggc

SEQ ID NO: 1246682 - RNA, 25 nt, Human
aagugauuccccugccucagccucc

SEQ ID NO: 1246683 - RNA, 26 nt, Human
aagugcugggaucacaggcgugagcc

SEQ ID NO: 1246684 - RNA, 26 nt, Human
acagaacuccagcaaaaagggaacgc

SEQ ID NO: 1246685 - RNA, 18 nt, Human
acgggguuucaccacguu

SEQ ID NO: 1246686 - RNA, 20 nt, Human
acgggguuucaccacguugg

SEQ ID NO: 1246687 - RNA, 24 nt, Human
acgggguuucaccacguuggccag

SEQ ID NO: 1246688 - RNA, 20 nt, Human
acugcaagcuccgccucccg

SEQ ID NO: 1246689 - RNA, 23 nt, Human
acuugcucugucgccaggcugga

SEQ ID NO: 1246690 - RNA, 22 nt, Human
agccuucugucguccugagcaa

SEQ ID NO: 1246691 - RNA, 20 nt, Human
aggaaggaugaugggcauau

SEQ ID NO: 1246692 - RNA, 24 nt, Human
aggcuggagugcaguggcagaucu

SEQ ID NO: 1246693 - RNA, 24 nt, Human
agugauuccccugccucagccucc

SEQ ID NO: 1246694 - RNA, 22 nt, Human
agugcaguggcagaucucgguu

SEQ ID NO: 1246695 - RNA, 18 nt, Human
augaaguggaaaaaguga

SEQ ID NO: 1246696 - RNA, 24 nt, Human
auuuuaguagagacgggguuucac

SEQ ID NO: 1246697 - RNA, 24 nt, Human
auuuuuuguauuuuaguagagacg

SEQ ID NO: 1246698 - RNA, 23 nt, Human
caaaaguugauuugaauccugau

SEQ ID NO: 1246699 - RNA, 22 nt, Human
caaaguaucauuuaacaugcaa

SEQ ID NO: 1246700 - RNA, 24 nt, Human
caaagugcugggaucacaggcgug

SEQ ID NO: 1246701 - RNA, 19 nt, Human
caacaugaaaaucauuaac

SEQ ID NO: 1246702 - RNA, 22 nt, Human
caagugauuccccugccucagc

SEQ ID NO: 1246703 - RNA, 25 nt, Human
caauucagacuaaccauaaugccga

SEQ ID NO: 1246704 - RNA, 23 nt, Human
cacaggcgugagccaccgcgccc

SEQ ID NO: 1246705 - RNA, 18 nt, Human
caccacguuggccaggau

SEQ ID NO: 1246706 - RNA, 22 nt, Human
caccacguuggccaggaugguc

SEQ ID NO: 1246707 - RNA, 24 nt, Human
caccacguuggccaggauggucuc

SEQ ID NO: 1246708 - RNA, 22 nt, Human
caccauccaauuccuaaucaaa

SEQ ID NO: 1246709 - RNA, 19 nt, Human
cacgauguuuucugcgcug

SEQ ID NO: 1246710 - RNA, 22 nt, Human
ccaaagugcugggaucacaggc

SEQ ID NO: 1246711 - RNA, 24 nt, Human
ccaaagugcugggaucacaggcgu

SEQ ID NO: 1246712 - RNA, 24 nt, Human
ccaacucaccauccaauuccuaau

SEQ ID NO: 1246713 - RNA, 20 nt, Human
ccaccacgcccggcuaauuu

SEQ ID NO: 1246714 - RNA, 18 nt, Human
ccaccgcgcccggccugc

SEQ ID NO: 1246715 - RNA, 18 nt, Human
ccaccgcgcccggccugc

SEQ ID NO: 1246716 - RNA, 20 nt, Human
ccaccgcgcccggccugcuu

SEQ ID NO: 1246717 - RNA, 24 nt, Human
ccagcaaaaagcuaaggacugggg

SEQ ID NO: 1246718 - RNA, 19 nt, Human
cccaaguagcugggacuaa

SEQ ID NO: 1246719 - RNA, 21 nt, Human
cccggguucaagugauucccc

SEQ ID NO: 1246720 - RNA, 23 nt, Human
cccggguucaagugauuccccug

SEQ ID NO: 1246721 - RNA, 24 nt, Human
cccugccucagccucccaaguagc

SEQ ID NO: 1246722 - RNA, 24 nt, Human
ccgccucccggguucaagugauuc

SEQ ID NO: 1246723 - RNA, 19 nt, Human
ccgcgcccggccugcuuug

SEQ ID NO: 1246724 - RNA, 22 nt, Human
ccucccggguucaagugauucc

SEQ ID NO: 1246725 - RNA, 24 nt, Human
cgccucggccucccaaagugcugg

SEQ ID NO: 1246726 - RNA, 24 nt, Human
cucagccucccaaguagcugggac

SEQ ID NO: 1246727 - RNA, 22 nt, Human
cucagucugaaacugaaauaaa

SEQ ID NO: 1246728 - RNA, 20 nt, Human
cucccggguucaagugauuc

SEQ ID NO: 1246729 - RNA, 24 nt, Human
cuccugaccucgugaugcgcccgc

SEQ ID NO: 1246730 - RNA, 23 nt, Human
cugcaagccuucugucguccuga

SEQ ID NO: 1246731 - RNA, 23 nt, Human
cugccucagccucccaaguagcu

SEQ ID NO: 1246732 - RNA, 24 nt, Human
cuggagugcaguggcagaucucgg

SEQ ID NO: 1246733 - RNA, 20 nt, Human
cuugcucugucgccaggcug

SEQ ID NO: 1246734 - RNA, 22 nt, Human
cuugcucugucgccaggcugga

SEQ ID NO: 1246735 - RNA, 18 nt, Human
gaaaacauuuuuugagaa

SEQ ID NO: 1246736 - RNA, 19 nt, Human
gaauccugauagauuccac

SEQ ID NO: 1246737 - RNA, 24 nt, Human
gagacgggguuucaccacguuggc

SEQ ID NO: 1246738 - RNA, 24 nt, Human
gagugcaguggcagaucucgguuc

SEQ ID NO: 1246739 - RNA, 18 nt, Human
gaucacaggcgugagcca

SEQ ID NO: 1246740 - RNA, 21 nt, Human
gaucacaggcgugagccaccg

SEQ ID NO: 1246741 - RNA, 23 nt, Human
gcccggcuaauuuuuuguauuuu

SEQ ID NO: 1246742 - RNA, 24 nt, Human
gccugcuuugguauuuuuuaagag

SEQ ID NO: 1246743 - RNA, 19 nt, Human
gcucugucgccaggcugga

SEQ ID NO: 1246744 - RNA, 20 nt, Human
ggaugaauccauuauauuua

SEQ ID NO: 1246745 - RNA, 24 nt, Human
ggauggucucgaucuccugaccuc

SEQ ID NO: 1246746 - RNA, 22 nt, Human
ggcuccguccucgccugcuuca

SEQ ID NO: 1246747 - RNA, 24 nt, Human
gggcuucuuagcagaccucagucu

SEQ ID NO: 1246748 - RNA, 23 nt, Human
gggguuucaccacguuggccagg

SEQ ID NO: 1246749 - RNA, 22 nt, Human
ggguuucaccacguuggccagg

SEQ ID NO: 1246750 - RNA, 19 nt, Human
gguuguuuuuuuuuuuucu

SEQ ID NO: 1246751 - RNA, 24 nt, Human
gugaugcgcccgccucggccuccc

SEQ ID NO: 1246752 - RNA, 24 nt, Human
gugauuccccugccucagccuccc

SEQ ID NO: 1246753 - RNA, 23 nt, Human
gugcaguggcagaucucgguuca

SEQ ID NO: 1246754 - RNA, 26 nt, Human
uaaauaaaccaaaagaaauggccugu

SEQ ID NO: 1246755 - RNA, 22 nt, Human
uaaggcgugcgccaccacgccc

SEQ ID NO: 1246756 - RNA, 23 nt, Human
uaauuuuuuguauuuuaguagag

SEQ ID NO: 1246757 - RNA, 24 nt, Human
uaauuuuuuguauuuuaguagaga

SEQ ID NO: 1246758 - RNA, 20 nt, Human
uacagaacuccagcaaaagg

SEQ ID NO: 1246759 - RNA, 20 nt, Human
uacccugguccaaaggagcc

SEQ ID NO: 1246760 - RNA, 18 nt, Human
uagaaagagcuuggcucc

SEQ ID NO: 1246761 - RNA, 23 nt, Human
uagaaagagcuuggcuccuggug

SEQ ID NO: 1246762 - RNA, 22 nt, Human
uagagacgggguuucaccacgu

SEQ ID NO: 1246763 - RNA, 22 nt, Human
uagagcagcacgccggcaccuu

SEQ ID NO: 1246764 - RNA, 24 nt, Human
uaguagagacgggguuucaccacg

SEQ ID NO: 1246765 - RNA, 25 nt, Human
uaguagagacgggguuucaccacgu

SEQ ID NO: 1246766 - RNA, 24 nt, Human
ucaccacguuggccaggauggucu

SEQ ID NO: 1246767 - RNA, 18 nt, Human
ucacugcaagcuccgccu

SEQ ID NO: 1246768 - RNA, 19 nt, Human
ucacugcaagcuccgccuc

SEQ ID NO: 1246769 - RNA, 24 nt, Human
ucacugcaagcuccgccucccggg

SEQ ID NO: 1246770 - RNA, 18 nt, Human
ucagccucccaaguagcu

SEQ ID NO: 1246771 - RNA, 20 nt, Human
ucagccucccaaguagcugg

SEQ ID NO: 1246772 - RNA, 20 nt, Human
uccacuaacuuuuuugucuu

SEQ ID NO: 1246773 - RNA, 24 nt, Human
ucccaaagugcugggaucacaggc

SEQ ID NO: 1246774 - RNA, 23 nt, Human
ucccaaguagcugggacuaaggc

SEQ ID NO: 1246775 - RNA, 26 nt, Human
uccccugccucagccucccaaguagc

SEQ ID NO: 1246776 - RNA, 19 nt, Human
ucccggguucaagugauuc

SEQ ID NO: 1246777 - RNA, 24 nt, Human
ucccggguucaagugauuccccug

SEQ ID NO: 1246778 - RNA, 19 nt, Human
uccuuggaugaauccauua

SEQ ID NO: 1246779 - RNA, 18 nt, Human
ucggccucccaaagugcu

SEQ ID NO: 1246780 - RNA, 18 nt, Human
ucugucgccaggcuggag

SEQ ID NO: 1246781 - RNA, 21 nt, Human
ucugucgccaggcuggagugc

SEQ ID NO: 1246782 - RNA, 23 nt, Human
ucugucgccaggcuggagugcag

SEQ ID NO: 1246783 - RNA, 20 nt, Human
ugaaacugaaauaaaccugg

SEQ ID NO: 1246784 - RNA, 23 nt, Human
ugaaacugaaauaaaccuggacg

SEQ ID NO: 1246785 - RNA, 22 nt, Human
ugaagcgaacacgggcuccucc

SEQ ID NO: 1246786 - RNA, 21 nt, Human
ugacauuuugagauuuacaga

SEQ ID NO: 1246787 - RNA, 19 nt, Human
ugaugggcauauugcuugc

SEQ ID NO: 1246788 - RNA, 24 nt, Human
ugccucagccucccaaguagcugg

SEQ ID NO: 1246789 - RNA, 22 nt, Human
ugcgcugucuuuaaauuccagu

SEQ ID NO: 1246790 - RNA, 23 nt, Human
ugcucugucgccaggcuggagug

SEQ ID NO: 1246791 - RNA, 24 nt, Human
ugcugggaucacaggcgugagcca

SEQ ID NO: 1246792 - RNA, 21 nt, Human
uggagugcaguggcagaucuc

SEQ ID NO: 1246793 - RNA, 23 nt, Human
uggagugcaguggcagaucucgg

SEQ ID NO: 1246794 - RNA, 25 nt, Human
uggcaucgcuauuuuuauacccuuc

SEQ ID NO: 1246795 - RNA, 24 nt, Human
uggccaggauggucucgaucuccu

SEQ ID NO: 1246796 - RNA, 23 nt, Human
ugggacuaaggcgugcgccacca

SEQ ID NO: 1246797 - RNA, 19 nt, Human
ugggaucacaggcgugagc

SEQ ID NO: 1246798 - RNA, 21 nt, Human
ugggaucacaggcgugagcca

SEQ ID NO: 1246799 - RNA, 22 nt, Human
ugggaucacaggcgugagccac

SEQ ID NO: 1246800 - RNA, 23 nt, Human
ugggaucacaggcgugagccacc

SEQ ID NO: 1246801 - RNA, 24 nt, Human
ugggaucacaggcgugagccaccg

SEQ ID NO: 1246802 - RNA, 24 nt, Human
ugguaaauggaggcauuauaugga

SEQ ID NO: 1246803 - RNA, 22 nt, Human
ugguuguuuuuuuuuuuucuuu

SEQ ID NO: 1246804 - RNA, 18 nt, Human
uuaguagagacgggguuu

SEQ ID NO: 1246805 - RNA, 22 nt, Human
uuaguagagacgggguuucacc

SEQ ID NO: 1246806 - RNA, 24 nt, Human
uuaguagagacgggguuucaccac

SEQ ID NO: 1246807 - RNA, 25 nt, Human
uuaguagagacgggguuucaccacg

SEQ ID NO: 1246808 - RNA, 21 nt, Human
uucaagugauuccccugccuc

SEQ ID NO: 1246809 - RNA, 23 nt, Human
uucaagugauuccccugccucag

SEQ ID NO: 1246810 - RNA, 24 nt, Human
uucaagugauuccccugccucagc

SEQ ID NO: 1246811 - RNA, 19 nt, Human
uuccccugccucagccucc

SEQ ID NO: 1246812 - RNA, 22 nt, Human
uuccuuggaugaauccauuaua

SEQ ID NO: 1246813 - RNA, 24 nt, Human
uugucuuuuuuuuuggcugccuuc

SEQ ID NO: 1246814 - RNA, 19 nt, Human
uuucaccacguuggccagg

SEQ ID NO: 1246815 - RNA, 20 nt, Human
uuuuuguauuuuaguagaga

SEQ ID NO: 1246816 - RNA, 19 nt, Human
acugccagcaccaacugcc

SEQ ID NO: 1246817 - RNA, 22 nt, Human
aggaagcaucuccauaacacau

SEQ ID NO: 1246818 - RNA, 24 nt, Human
aggaagucugugcacaggcagauc

SEQ ID NO: 1246819 - RNA, 23 nt, Human
aggaggaaaccagcuuacugcca

SEQ ID NO: 1246820 - RNA, 22 nt, Human
agugaccauacccagccccaca

SEQ ID NO: 1246821 - RNA, 19 nt, Human
augaaacccuggaagcacu

SEQ ID NO: 1246822 - RNA, 22 nt, Human
caaaaggcucacugcccuaacg

SEQ ID NO: 1246823 - RNA, 19 nt, Human
caacugccucucacaggcu

SEQ ID NO: 1246824 - RNA, 21 nt, Human
caccaaacagucagcagugcu

SEQ ID NO: 1246825 - RNA, 18 nt, Human
caccaacugccucucaca

SEQ ID NO: 1246826 - RNA, 20 nt, Human
cagcagugcuucuggaugga

SEQ ID NO: 1246827 - RNA, 22 nt, Human
caggcccugcagaagcaucucc

SEQ ID NO: 1246828 - RNA, 20 nt, Human
caggguugacauucccucca

SEQ ID NO: 1246829 - RNA, 18 nt, Human
cauacccagccccacacc

SEQ ID NO: 1246830 - RNA, 23 nt, Human
ccaagaggagaaaccagcccaau

SEQ ID NO: 1246831 - RNA, 21 nt, Human
ccagcuggagaccuagguucc

SEQ ID NO: 1246832 - RNA, 18 nt, Human
cccacaccugaaauagga

SEQ ID NO: 1246833 - RNA, 24 nt, Human
cccuaacggcaaccaccaaccaug

SEQ ID NO: 1246834 - RNA, 29 nt, Human
ccucucacaggcuggggugaucaugggac

SEQ ID NO: 1246835 - RNA, 19 nt, Human
ccugcagucaggcuguugg

SEQ ID NO: 1246836 - RNA, 21 nt, Human
ccugcagucaggcuguugggc

SEQ ID NO: 1246837 - RNA, 20 nt, Human
cucacugcccuaacggcaac

SEQ ID NO: 1246838 - RNA, 21 nt, Human
cucagaauggacaaaaggcuc

SEQ ID NO: 1246839 - RNA, 19 nt, Human
cugguauuuuccuaggucc

SEQ ID NO: 1246840 - RNA, 19 nt, Human
gaucaugggacugggaagg

SEQ ID NO: 1246841 - RNA, 24 nt, Human
ggacugggaaggaggggucugggc

SEQ ID NO: 1246842 - RNA, 23 nt, Human
ggagaaaccagcccaaucucaga

SEQ ID NO: 1246843 - RNA, 18 nt, Human
ggcuggggugaucauggg

SEQ ID NO: 1246844 - RNA, 18 nt, Human
guccuugguuuucaccuu

SEQ ID NO: 1246845 - RNA, 28 nt, Human
uacccagccccacaccugaaauaggacu

SEQ ID NO: 1246846 - RNA, 20 nt, Human
uagcaucugugccuaggaug

SEQ ID NO: 1246847 - RNA, 21 nt, Human
ucauucugcagaaagcuccuu

SEQ ID NO: 1246848 - RNA, 28 nt, Human
uccagcaggagugaccauacccagcccu

SEQ ID NO: 1246849 - RNA, 21 nt, Human
ucccagccagaaacucaggac

SEQ ID NO: 1246850 - RNA, 23 nt, Human
ucuccauaacacauaugaaaccc

SEQ ID NO: 1246851 - RNA, 19 nt, Human
ucugcuggugcucuuacac

SEQ ID NO: 1246852 - RNA, 24 nt, Human
ugaccagggugugcaaaauggcuu

SEQ ID NO: 1246853 - RNA, 18 nt, Human
ugagggcacugagcucca

SEQ ID NO: 1246854 - RNA, 20 nt, Human
ugagguuggagagaggaagc

SEQ ID NO: 1246855 - RNA, 24 nt, Human
ugagguuggagagaggaagcaucu

SEQ ID NO: 1246856 - RNA, 23 nt, Human
ugccccaggucgcaggcccugca

SEQ ID NO: 1246857 - RNA, 20 nt, Human
uggaaaggcuguaucuggua

SEQ ID NO: 1246858 - RNA, 21 nt, Human
uuccugcagucaggcuguugg

SEQ ID NO: 1246859 - RNA, 23 nt, Human
uugcccgggagggugcgauaagg

SEQ ID NO: 1246860 - RNA, 22 nt, Human
uuggcuucuuucugaagccagg

SEQ ID NO: 1246861 - RNA, 24 nt, Human
uuguccugcucuggaugauggugg

SEQ ID NO: 1246862 - RNA, 22 nt, Human
uuuccuagguccuugguuuuca

SEQ ID NO: 1246863 - RNA, 24 nt, Human
uuuggcuucuuucugaagccaggg

SEQ ID NO: 1246864 - RNA, 22 nt, Human
aagcuucuggagaccuuggucu

SEQ ID NO: 1246865 - RNA, 18 nt, Human
aaucgcuugaaccuggga

SEQ ID NO: 1246866 - RNA, 24 nt, Human
aaucgcuugaaccugggaggcaga

SEQ ID NO: 1246867 - RNA, 19 nt, Human
accauugcacuccagccug

SEQ ID NO: 1246868 - RNA, 24 nt, Human
accauugcacuccagccuggguga

SEQ ID NO: 1246869 - RNA, 18 nt, Human
agagguugcagugagccg

SEQ ID NO: 1246870 - RNA, 23 nt, Human
agagguugcagugagccgagauc

SEQ ID NO: 1246871 - RNA, 24 nt, Human
agagguugcagugagccgagauca

SEQ ID NO: 1246872 - RNA, 19 nt, Human
agcuggaccuguaauccca

SEQ ID NO: 1246873 - RNA, 21 nt, Human
aggcagagguugcagugagcc

SEQ ID NO: 1246874 - RNA, 24 nt, Human
aggcagagguugcagugagccgag

SEQ ID NO: 1246875 - RNA, 22 nt, Human
aggcaggagaaucgcuugaacc

SEQ ID NO: 1246876 - RNA, 24 nt, Human
aggcaggagaaucgcuugaaccug

SEQ ID NO: 1246877 - RNA, 20 nt, Human
aggcugaggcaggagaaucg

SEQ ID NO: 1246878 - RNA, 24 nt, Human
aggcugaggcaggagaaucgcuug

SEQ ID NO: 1246879 - RNA, 23 nt, Human
aggucggggagcucccagcugga

SEQ ID NO: 1246880 - RNA, 24 nt, Human
aucauaccauugcacuccagccug

SEQ ID NO: 1246881 - RNA, 18 nt, Human
auugcacuccagccuggg

SEQ ID NO: 1246882 - RNA, 24 nt, Human
auugcacuccagccugggugacag

SEQ ID NO: 1246883 - RNA, 22 nt, Human
cacuccagccugggugacagag

SEQ ID NO: 1246884 - RNA, 23 nt, Human
cagcagucaguggaagcuucugg

SEQ ID NO: 1246885 - RNA, 24 nt, Human
cagcuacucgggaggcugaggcag

SEQ ID NO: 1246886 - RNA, 20 nt, Human
caguggaagcuucuggagac

SEQ ID NO: 1246887 - RNA, 19 nt, Human
cauugcacuccagccuggg

SEQ ID NO: 1246888 - RNA, 19 nt, Human
cauugcacuccagccuggg

SEQ ID NO: 1246889 - RNA, 21 nt, Human
cauugcacuccagccugggug

SEQ ID NO: 1246890 - RNA, 22 nt, Human
cauugcacuccagccuggguga

SEQ ID NO: 1246891 - RNA, 24 nt, Human
cauugcacuccagccugggugaca

SEQ ID NO: 1246892 - RNA, 25 nt, Human
cauugcacuccagccugggugacag

SEQ ID NO: 1246893 - RNA, 26 nt, Human
ccaacagcagucaguggaagcuucuu

SEQ ID NO: 1246894 - RNA, 20 nt, Human
ccagacccuguugccuggug

SEQ ID NO: 1246895 - RNA, 20 nt, Human
ccauugcacuccagccuggg

SEQ ID NO: 1246896 - RNA, 21 nt, Human
ccauugcacuccagccugggu

SEQ ID NO: 1246897 - RNA, 21 nt, Human
ccauugcacuccagccugggu

SEQ ID NO: 1246898 - RNA, 22 nt, Human
ccauugcacuccagccugggug

SEQ ID NO: 1246899 - RNA, 24 nt, Human
ccauugcacuccagccugggugac

SEQ ID NO: 1246900 - RNA, 22 nt, Human
cccacgauggugcaggucucug

SEQ ID NO: 1246901 - RNA, 25 nt, Human
ccugggaggcagagguugcagugag

SEQ ID NO: 1246902 - RNA, 20 nt, Human
ccuggugcagccaacagcag

SEQ ID NO: 1246903 - RNA, 21 nt, Human
ccuguaaucccagcuacucgg

SEQ ID NO: 1246904 - RNA, 24 nt, Human
cgagaucauaccauugcacuccag

SEQ ID NO: 1246905 - RNA, 26 nt, Human
cugaugaugaacuuggagucccucuu

SEQ ID NO: 1246906 - RNA, 21 nt, Human
cuguaaucccagcuacucggg

SEQ ID NO: 1246907 - RNA, 19 nt, Human
cuuggaagguggaugaggg

SEQ ID NO: 1246908 - RNA, 23 nt, Human
gaagguggaugagggcugcagca

SEQ ID NO: 1246909 - RNA, 23 nt, Human
gaccuguaaucccagcuacucgg

SEQ ID NO: 1246910 - RNA, 24 nt, Human
gaccuguaaucccagcuacucggg

SEQ ID NO: 1246911 - RNA, 23 nt, Human
gagaaucgcuugaaccugggagg

SEQ ID NO: 1246912 - RNA, 24 nt, Human
gcacuccagccugggugacagagc

SEQ ID NO: 1246913 - RNA, 23 nt, Human
ucauaccauugcacuccagccug

SEQ ID NO: 1246914 - RNA, 24 nt, Human
uccagccugggugacagagccaga

SEQ ID NO: 1246915 - RNA, 19 nt, Human
uccuggaggucggggagcu

SEQ ID NO: 1246916 - RNA, 18 nt, Human
ucgcuugaaccugggagg

SEQ ID NO: 1246917 - RNA, 24 nt, Human
ucgggaggcugaggcaggagaauc

SEQ ID NO: 1246918 - RNA, 21 nt, Human
ucugugguguugccguaccag

SEQ ID NO: 1246919 - RNA, 22 nt, Human
ucugugguguugccguaccagg

SEQ ID NO: 1246920 - RNA, 24 nt, Human
ugaaccugggaggcagagguugca

SEQ ID NO: 1246921 - RNA, 24 nt, Human
ugaggcaggagaaucgcuugaacc

SEQ ID NO: 1246922 - RNA, 24 nt, Human
ugaggcaggagaaucgcuugaacc

SEQ ID NO: 1246923 - RNA, 22 nt, Human
ugcacuccagccugggugacag

SEQ ID NO: 1246924 - RNA, 24 nt, Human
ugcacuccagccugggugacagag

SEQ ID NO: 1246925 - RNA, 19 nt, Human
ugccuggugcagccaacag

SEQ ID NO: 1246926 - RNA, 20 nt, Human
ugcuuggaagguggaugagg

SEQ ID NO: 1246927 - RNA, 19 nt, Human
uggaccuguaaucccagcu

SEQ ID NO: 1246928 - RNA, 21 nt, Human
uggaucuugcccuccuggagg

SEQ ID NO: 1246929 - RNA, 24 nt, Human
ugggaggcagagguugcagugagc

SEQ ID NO: 1246930 - RNA, 23 nt, Human
uggggcccacgauggugcagguc

SEQ ID NO: 1246931 - RNA, 26 nt, Human
ugguggggcccacgauggugcagguc

SEQ ID NO: 1246932 - RNA, 24 nt, Human
uugaaccugggaggcagagguugc

SEQ ID NO: 1246933 - RNA, 18 nt, Human
uugcagugagccgagauc

SEQ ID NO: 1246934 - RNA, 19 nt, Human
uugcagugagccgagauca

SEQ ID NO: 1246935 - RNA, 20 nt, Human
uugcagugagccgagaucau

SEQ ID NO: 1246936 - RNA, 24 nt, Human
aaaagaaccaacauggaugcaugg

SEQ ID NO: 1246937 - RNA, 21 nt, Human
aaaaugaaacaagcuuagccc

SEQ ID NO: 1246938 - RNA, 21 nt, Human
aaacaggcacucacacuuuca

SEQ ID NO: 1246939 - RNA, 23 nt, Human
aaaccugcaaagguacccuccga

SEQ ID NO: 1246940 - RNA, 19 nt, Human
aaauacaaaaagcaagccc

SEQ ID NO: 1246941 - RNA, 18 nt, Human
aaaugaagcuaacaaaua

SEQ ID NO: 1246942 - RNA, 21 nt, Human
aaaugggaauaauaagaauau

SEQ ID NO: 1246943 - RNA, 19 nt, Human
aaccugcaaagguacccuc

SEQ ID NO: 1246944 - RNA, 20 nt, Human
aacugcccacauuuuugcca

SEQ ID NO: 1246945 - RNA, 19 nt, Human
aacuuccucuucuucucug

SEQ ID NO: 1246946 - RNA, 20 nt, Human
aagaacccuccuggggaaga

SEQ ID NO: 1246947 - RNA, 20 nt, Human
aagccuuccuuacaaacacc

SEQ ID NO: 1246948 - RNA, 20 nt, Human
aaggccacaaaaaaucagaa

SEQ ID NO: 1246949 - RNA, 24 nt, Human
aaggccacaaaaaaucagaacgua

SEQ ID NO: 1246950 - RNA, 25 nt, Human
aaguaccuucuaacuacugaucuac

SEQ ID NO: 1246951 - RNA, 24 nt, Human
aagugaucugcccaccuuggccuc

SEQ ID NO: 1246952 - RNA, 24 nt, Human
aauaauaaucauaaucaugaaaau

SEQ ID NO: 1246953 - RNA, 21 nt, Human
aauagaaggguucugccugga

SEQ ID NO: 1246954 - RNA, 19 nt, Human
aauaucuacuuaaucucaa

SEQ ID NO: 1246955 - RNA, 19 nt, Human
aaugcugggauuacaggug

SEQ ID NO: 1246956 - RNA, 27 nt, Human
acaaaaagcaagcccauggaugucaac

SEQ ID NO: 1246957 - RNA, 21 nt, Human
acacuugcagguuaacagccu

SEQ ID NO: 1246958 - RNA, 18 nt, Human
acagccucaggggaagac

SEQ ID NO: 1246959 - RNA, 18 nt, Human
acagcucauugcagccuc

SEQ ID NO: 1246960 - RNA, 21 nt, Human
acaggguuucaccauguuggc

SEQ ID NO: 1246961 - RNA, 24 nt, Human
acaggguuucaccauguuggccag

SEQ ID NO: 1246962 - RNA, 25 nt, Human
acaggguuucaccauguuggccagg

SEQ ID NO: 1246963 - RNA, 18 nt, Human
accacuguccuggccugu

SEQ ID NO: 1246964 - RNA, 27 nt, Human
accacuguccuggccuguuuccugucg

SEQ ID NO: 1246965 - RNA, 23 nt, Human
accauguuggccagguuggucuc

SEQ ID NO: 1246966 - RNA, 22 nt, Human
acccacucuuuugcccuuccca

SEQ ID NO: 1246967 - RNA, 25 nt, Human
acccaggcuggaagugcaguggcau

SEQ ID NO: 1246968 - RNA, 18 nt, Human
acccuccagaguagcugg

SEQ ID NO: 1246969 - RNA, 24 nt, Human
accuggcuaauuuuuuuguauuuu

SEQ ID NO: 1246970 - RNA, 24 nt, Human
accuugguuucccauaaugcuggg

SEQ ID NO: 1246971 - RNA, 19 nt, Human
acgggguuuugauauguug

SEQ ID NO: 1246972 - RNA, 24 nt, Human
acgggguuuugauauguugcucag

SEQ ID NO: 1246973 - RNA, 28 nt, Human
acuaucuuauauucacacauguguuggu

SEQ ID NO: 1246974 - RNA, 25 nt, Human
acucuguugcccaggcuggaguuca

SEQ ID NO: 1246975 - RNA, 21 nt, Human
acugcaaccuuccucuccugg

SEQ ID NO: 1246976 - RNA, 22 nt, Human
acugcaaccuuccucuccuggg

SEQ ID NO: 1246977 - RNA, 26 nt, Human
acugugucacccaggcuggaagugca

SEQ ID NO: 1246978 - RNA, 20 nt, Human
agagaccuaccaccaggaua

SEQ ID NO: 1246979 - RNA, 20 nt, Human
agagauggugaagcucugag

SEQ ID NO: 1246980 - RNA, 23 nt, Human
agcacaaauacagcccagaaaca

SEQ ID NO: 1246981 - RNA, 23 nt, Human
agccccuucccaucuugucuuug

SEQ ID NO: 1246982 - RNA, 19 nt, Human
agcuggguaaugagagacc

SEQ ID NO: 1246983 - RNA, 19 nt, Human
aggaaugugguaguaaagg

SEQ ID NO: 1246984 - RNA, 23 nt, Human
aggaggcugaggcaggaguauca

SEQ ID NO: 1246985 - RNA, 20 nt, Human
aggauuuugccugagcacaa

SEQ ID NO: 1246986 - RNA, 20 nt, Human
aggcaaucugcccaccuugg

SEQ ID NO: 1246987 - RNA, 23 nt, Human
aggcaggaguaucacuucaaccc

SEQ ID NO: 1246988 - RNA, 18 nt, Human
aggcuaaacuuuuuucuu

SEQ ID NO: 1246989 - RNA, 22 nt, Human
aggcucaggugauccuccuacc

SEQ ID NO: 1246990 - RNA, 18 nt, Human
aggcugagauagcuccca

SEQ ID NO: 1246991 - RNA, 19 nt, Human
aggcugaggcaggaguauc

SEQ ID NO: 1246992 - RNA, 24 nt, Human
agggacuacaggcaugagccacca

SEQ ID NO: 1246993 - RNA, 19 nt, Human
aguaccuucuaacuacuga

SEQ ID NO: 1246994 - RNA, 23 nt, Human
aguagcuggaauuauagacgugu

SEQ ID NO: 1246995 - RNA, 18 nt, Human
aguagcugggauuacagg

SEQ ID NO: 1246996 - RNA, 19 nt, Human
agucucagccaccgugaga

SEQ ID NO: 1246997 - RNA, 21 nt, Human
agugcaguggcaugaucacag

SEQ ID NO: 1246998 - RNA, 23 nt, Human
agugcaguggcaugaucacagcu

SEQ ID NO: 1246999 - RNA, 24 nt, Human
agugcaguggcaugaucacagcuc

SEQ ID NO: 1247000 - RNA, 24 nt, Human
aguggcaugaucucagcuuacugc

SEQ ID NO: 1247001 - RNA, 23 nt, Human
aucauucaauaauaaucauaauc

SEQ ID NO: 1247002 - RNA, 22 nt, Human
aucccagccaaucugauugcaa

SEQ ID NO: 1247003 - RNA, 20 nt, Human
aucucacucuguugcccagg

SEQ ID NO: 1247004 - RNA, 22 nt, Human
aucuuccuauguuguccaggcu

SEQ ID NO: 1247005 - RNA, 23 nt, Human
aucuuccuauguuguccaggcug

SEQ ID NO: 1247006 - RNA, 19 nt, Human
augcaauacuuuuuuuugg

SEQ ID NO: 1247007 - RNA, 29 nt, Human
augcaggagaugggugcaagagggacccc

SEQ ID NO: 1247008 - RNA, 20 nt, Human
augucuccugccucauaagu

SEQ ID NO: 1247009 - RNA, 19 nt, Human
auguggggauaaaagaacc

SEQ ID NO: 1247010 - RNA, 19 nt, Human
caaaaagcaagcccaugga

SEQ ID NO: 1247011 - RNA, 24 nt, Human
caaauugcugggaugacuggcaug

SEQ ID NO: 1247012 - RNA, 18 nt, Human
caacuccauagaaauuca

SEQ ID NO: 1247013 - RNA, 21 nt, Human
caacuccauagaaauucagcu

SEQ ID NO: 1247014 - RNA, 21 nt, Human
caagcauauaaagcccauuuc

SEQ ID NO: 1247015 - RNA, 22 nt, Human
caagggauccuccugccucagc

SEQ ID NO: 1247016 - RNA, 20 nt, Human
caagugauucuccugccuca

SEQ ID NO: 1247017 - RNA, 26 nt, Human
caagugauucuccugccucacccucc

SEQ ID NO: 1247018 - RNA, 18 nt, Human
caaucugauugcaaaaug

SEQ ID NO: 1247019 - RNA, 20 nt, Human
caauggcaguuaaugcuuau

SEQ ID NO: 1247020 - RNA, 19 nt, Human
cacacaaguguuccagaag

SEQ ID NO: 1247021 - RNA, 24 nt, Human
cacacaauacacccauguaauaaa

SEQ ID NO: 1247022 - RNA, 20 nt, Human
cacaguuugcacuuugaaau

SEQ ID NO: 1247023 - RNA, 24 nt, Human
caccacaccuggcuaauuuuugua

SEQ ID NO: 1247024 - RNA, 21 nt, Human
caccauguuggccagguuggu

SEQ ID NO: 1247025 - RNA, 22 nt, Human
caccauguuggccagguugguc

SEQ ID NO: 1247026 - RNA, 24 nt, Human
caccauguuggccagguuggucuc

SEQ ID NO: 1247027 - RNA, 23 nt, Human
cacccacucuuuugcccuuccca

SEQ ID NO: 1247028 - RNA, 24 nt, Human
cacccuguaaaagccuuccuuaca

SEQ ID NO: 1247029 - RNA, 22 nt, Human
caccuucucaagugcaggauuc

SEQ ID NO: 1247030 - RNA, 19 nt, Human
cacuacacauuguaugcau

SEQ ID NO: 1247031 - RNA, 22 nt, Human
cacucuguugcccaggcuggag

SEQ ID NO: 1247032 - RNA, 21 nt, Human
cacuuaaaaaaugcacugaga

SEQ ID NO: 1247033 - RNA, 20 nt, Human
cacuuacccugauacagaaa

SEQ ID NO: 1247034 - RNA, 19 nt, Human
cacuuugaaauggacccag

SEQ ID NO: 1247035 - RNA, 23 nt, Human
cagaagauugccuacagaggcaa

SEQ ID NO: 1247036 - RNA, 21 nt, Human
cagaaguugguuaauggacac

SEQ ID NO: 1247037 - RNA, 24 nt, Human
cagaaucucacucuguugcccagg

SEQ ID NO: 1247038 - RNA, 21 nt, Human
cagcaucacacaauacaccca

SEQ ID NO: 1247039 - RNA, 18 nt, Human
cagccaccacgcacagcc

SEQ ID NO: 1247040 - RNA, 19 nt, Human
cagccuccugaguagcugg

SEQ ID NO: 1247041 - RNA, 24 nt, Human
cagcuacucaggaggcugaggcag

SEQ ID NO: 1247042 - RNA, 23 nt, Human
cagcucauugcagccucuacauc

SEQ ID NO: 1247043 - RNA, 18 nt, Human
cagggccugguccaugga

SEQ ID NO: 1247044 - RNA, 24 nt, Human
cagggucucacugugucacccagg

SEQ ID NO: 1247045 - RNA, 24 nt, Human
caggguuucaccauguuggccagg

SEQ ID NO: 1247046 - RNA, 19 nt, Human
caguggcaugaucucagcu

SEQ ID NO: 1247047 - RNA, 21 nt, Human
cauaacaagcugcaaacaaga

SEQ ID NO: 1247048 - RNA, 22 nt, Human
cauaaugcugggauuacaggug

SEQ ID NO: 1247049 - RNA, 22 nt, Human
caugcaccacuguccuggccug

SEQ ID NO: 1247050 - RNA, 20 nt, Human
caugggcagggccuggucca

SEQ ID NO: 1247051 - RNA, 23 nt, Human
cauguacccuacaaauauguaua

SEQ ID NO: 1247052 - RNA, 21 nt, Human
cauuuuaaacuaacacugagu

SEQ ID NO: 1247053 - RNA, 22 nt, Human
cauuuuagaccacugagcacuu

SEQ ID NO: 1247054 - RNA, 23 nt, Human
ccaaauacaaaaagcaagcccau

SEQ ID NO: 1247055 - RNA, 18 nt, Human
ccacaaagccauccaagc

SEQ ID NO: 1247056 - RNA, 22 nt, Human
ccacaaggucaaaguugagugu

SEQ ID NO: 1247057 - RNA, 21 nt, Human
ccagagaggcaccuucucaag

SEQ ID NO: 1247058 - RNA, 19 nt, Human
ccagaguagcugggauuac

SEQ ID NO: 1247059 - RNA, 22 nt, Human
ccagaguagcugggauuacagg

SEQ ID NO: 1247060 - RNA, 23 nt, Human
ccagaguagcugggauuacaggu

SEQ ID NO: 1247061 - RNA, 24 nt, Human
ccagaguagcugggauuacaggug

SEQ ID NO: 1247062 - RNA, 23 nt, Human
ccagccaccacgcacagccacaa

SEQ ID NO: 1247063 - RNA, 20 nt, Human
ccaggguacagucaguggag

SEQ ID NO: 1247064 - RNA, 21 nt, Human
ccauaaugcugggauuacagg

SEQ ID NO: 1247065 - RNA, 24 nt, Human
cccaaguagcagggacuacaggca

SEQ ID NO: 1247066 - RNA, 19 nt, Human
cccacauuugcauuauguc

SEQ ID NO: 1247067 - RNA, 22 nt, Human
cccacauuugcauuaugucuaa

SEQ ID NO: 1247068 - RNA, 21 nt, Human
cccaucauuuguuugcuguug

SEQ ID NO: 1247069 - RNA, 18 nt, Human
cccaugcaagcugcaucc

SEQ ID NO: 1247070 - RNA, 19 nt, Human
cccaugcaagcugcaucca

SEQ ID NO: 1247071 - RNA, 20 nt, Human
cccaugcaagcugcauccac

SEQ ID NO: 1247072 - RNA, 21 nt, Human
cccaugguccaccuuuuuauu

SEQ ID NO: 1247073 - RNA, 19 nt, Human
ccccaugcaagcugcaucc

SEQ ID NO: 1247074 - RNA, 24 nt, Human
ccccccauucagccagcacugagc

SEQ ID NO: 1247075 - RNA, 23 nt, Human
cccugagugcccagcgugugccc

SEQ ID NO: 1247076 - RNA, 18 nt, Human
cccugauacagaaagaag

SEQ ID NO: 1247077 - RNA, 23 nt, Human
ccuaccucagccucccaaguagc

SEQ ID NO: 1247078 - RNA, 26 nt, Human
ccuccaaauacaaaaagcaagcccau

SEQ ID NO: 1247079 - RNA, 22 nt, Human
ccuccgaaaucuaaaaugaaag

SEQ ID NO: 1247080 - RNA, 20 nt, Human
ccuccugcuuuuagucauuu

SEQ ID NO: 1247081 - RNA, 19 nt, Human
ccugaguagcuggaauuau

SEQ ID NO: 1247082 - RNA, 19 nt, Human
ccugauccaugaaucucug

SEQ ID NO: 1247083 - RNA, 23 nt, Human
ccugccucagccuccugaguagc

SEQ ID NO: 1247084 - RNA, 23 nt, Human
ccuggguucaagugauucuccuc

SEQ ID NO: 1247085 - RNA, 23 nt, Human
ccuggguucaagugauucuccug

SEQ ID NO: 1247086 - RNA, 21 nt, Human
ccuggugcucuccugcccccc

SEQ ID NO: 1247087 - RNA, 18 nt, Human
ccuguaaaagccuuccuu

SEQ ID NO: 1247088 - RNA, 21 nt, Human
ccuguaaucccagcuacucag

SEQ ID NO: 1247089 - RNA, 24 nt, Human
cgggguuuugauauguugcucagg

SEQ ID NO: 1247090 - RNA, 23 nt, Human
cuaacaguuagaaguggagaaaa

SEQ ID NO: 1247091 - RNA, 18 nt, Human
cucaagggauccuccugc

SEQ ID NO: 1247092 - RNA, 24 nt, Human
cucaagugaucugcccaccuuggc

SEQ ID NO: 1247093 - RNA, 24 nt, Human
cucacucuguugcccaggcuggag

SEQ ID NO: 1247094 - RNA, 21 nt, Human
cucagcaucacacaauacacc

SEQ ID NO: 1247095 - RNA, 21 nt, Human
cucaggugauccuccuaccuc

SEQ ID NO: 1247096 - RNA, 24 nt, Human
cucaggugauccuccuaccucagc

SEQ ID NO: 1247097 - RNA, 23 nt, Human
cucccauggccaggguuccugca

SEQ ID NO: 1247098 - RNA, 20 nt, Human
cuccuggguucaagugauuc

SEQ ID NO: 1247099 - RNA, 21 nt, Human
cuccuggguucaagugauucu

SEQ ID NO: 1247100 - RNA, 23 nt, Human
cugcaaccuuccucuccuggguu

SEQ ID NO: 1247101 - RNA, 23 nt, Human
cugccucagccuccugaguagcu

SEQ ID NO: 1247102 - RNA, 19 nt, Human
cuggaagugcaguggcaug

SEQ ID NO: 1247103 - RNA, 21 nt, Human
cuggacaaguucccuuuuaug

SEQ ID NO: 1247104 - RNA, 24 nt, Human
cuggaguucaguggcaugaucuca

SEQ ID NO: 1247105 - RNA, 24 nt, Human
cuuacaaacaccuccaguagaucc

SEQ ID NO: 1247106 - RNA, 23 nt, Human
cuuagcucaaggccacaaaaaau

SEQ ID NO: 1247107 - RNA, 21 nt, Human
cuucccaaaagaaucagacac

SEQ ID NO: 1247108 - RNA, 24 nt, Human
gaaaauauauguaaagaccuuuga

SEQ ID NO: 1247109 - RNA, 18 nt, Human
gaacguaaauuccagccc

SEQ ID NO: 1247110 - RNA, 22 nt, Human
gaagaggccaugcaggcucagg

SEQ ID NO: 1247111 - RNA, 23 nt, Human
gaagccccuucccaucuugucuu

SEQ ID NO: 1247112 - RNA, 18 nt, Human
gaaguagcaacuccauag

SEQ ID NO: 1247113 - RNA, 18 nt, Human
gaagugcaguggcaugau

SEQ ID NO: 1247114 - RNA, 23 nt, Human
gaaguggagaacaaagauaagug

SEQ ID NO: 1247115 - RNA, 24 nt, Human
gaccuaccaccaggauaguucaaa

SEQ ID NO: 1247116 - RNA, 19 nt, Human
gacgggguuuugauauguu

SEQ ID NO: 1247117 - RNA, 21 nt, Human
gacuacaggcaugagccacca

SEQ ID NO: 1247118 - RNA, 22 nt, Human
gacucaagugaucugcccaccu

SEQ ID NO: 1247119 - RNA, 19 nt, Human
gagagaccuaccaccagga

SEQ ID NO: 1247120 - RNA, 22 nt, Human
gagagugaaaguuaccugaggu

SEQ ID NO: 1247121 - RNA, 24 nt, Human
gagcucaggcaaucugcccaccuu

SEQ ID NO: 1247122 - RNA, 26 nt, Human
gaguagcugggauuacaggugcacac

SEQ ID NO: 1247123 - RNA, 24 nt, Human
gagugugguggcacaugccuguaa

SEQ ID NO: 1247124 - RNA, 18 nt, Human
gauuacaggugccagcca

SEQ ID NO: 1247125 - RNA, 18 nt, Human
gcaagcugcauccacaau

SEQ ID NO: 1247126 - RNA, 23 nt, Human
gcagaugcuacugcaguuuguau

SEQ ID NO: 1247127 - RNA, 19 nt, Human
gcaggauucagggcagggg

SEQ ID NO: 1247128 - RNA, 24 nt, Human
gcccaggcuggaguucaguggcau

SEQ ID NO: 1247129 - RNA, 19 nt, Human
gcucuaauaaugcaguuga

SEQ ID NO: 1247130 - RNA, 20 nt, Human
ggacagguggacaaaugcuc

SEQ ID NO: 1247131 - RNA, 19 nt, Human
ggacuacaggcaugagcca

SEQ ID NO: 1247132 - RNA, 22 nt, Human
ggauccuccugccucagccucc

SEQ ID NO: 1247133 - RNA, 22 nt, Human
ggaucuuccuauguuguccagg

SEQ ID NO: 1247134 - RNA, 18 nt, Human
ggcagggguccucuugcc

SEQ ID NO: 1247135 - RNA, 21 nt, Human
ggcaugaucacagcucauugc

SEQ ID NO: 1247136 - RNA, 20 nt, Human
ggcuggaagugcaguggcau

SEQ ID NO: 1247137 - RNA, 23 nt, Human
gggacuacaggcaugagccacca

SEQ ID NO: 1247138 - RNA, 24 nt, Human
gggauccuccugccucagccuccu

SEQ ID NO: 1247139 - RNA, 19 nt, Human
gggcagggccugguccaug

SEQ ID NO: 1247140 - RNA, 23 nt, Human
gggguuuugauauguugcucagg

SEQ ID NO: 1247141 - RNA, 22 nt, Human
ggguuucaccauguuggccagg

SEQ ID NO: 1247142 - RNA, 19 nt, Human
gguaagaacccuccugggg

SEQ ID NO: 1247143 - RNA, 24 nt, Human
gguggcacaugccuguaaucccag

SEQ ID NO: 1247144 - RNA, 24 nt, Human
gugauccuccuaccucagccuccc

SEQ ID NO: 1247145 - RNA, 19 nt, Human
gugauucuccugccucacc

SEQ ID NO: 1247146 - RNA, 22 nt, Human
gugccuccacacccagcuuaca

SEQ ID NO: 1247147 - RNA, 20 nt, Human
guggcaugaggagcuguggg

SEQ ID NO: 1247148 - RNA, 19 nt, Human
guguccuaauacauaugua

SEQ ID NO: 1247149 - RNA, 19 nt, Human
guuguuccuggugcucucc

SEQ ID NO: 1247150 - RNA, 22 nt, Human
uaaaagaaccaacauggaugca

SEQ ID NO: 1247151 - RNA, 26 nt, Human
uaaaagccuuccuuacaaacaccucc

SEQ ID NO: 1247152 - RNA, 18 nt, Human
uaaacaagguacagagaa

SEQ ID NO: 1247153 - RNA, 25 nt, Human
uaaacuccugaacucaagggauccu

SEQ ID NO: 1247154 - RNA, 19 nt, Human
uaaagggagagccgaucau

SEQ ID NO: 1247155 - RNA, 25 nt, Human
uaaauacuuucacuuaaaaaaugca

SEQ ID NO: 1247156 - RNA, 22 nt, Human
uaacaauaacuuauauauuuca

SEQ ID NO: 1247157 - RNA, 22 nt, Human
uaauuuuuguauuuuuuguaga

SEQ ID NO: 1247158 - RNA, 24 nt, Human
uaauuuuuguauuuuuuguagaga

SEQ ID NO: 1247159 - RNA, 22 nt, Human
uacaaacaccuccaguagaucc

SEQ ID NO: 1247160 - RNA, 24 nt, Human
uacagaaagaagguguaaaauuuc

SEQ ID NO: 1247161 - RNA, 23 nt, Human
uacagcccagaaacacuugcagg

SEQ ID NO: 1247162 - RNA, 22 nt, Human
uacaggcaugagccaccacacc

SEQ ID NO: 1247163 - RNA, 21 nt, Human
uaccccaaaucucagcaucac

SEQ ID NO: 1247164 - RNA, 23 nt, Human
uaccccaaaucucagcaucacac

SEQ ID NO: 1247165 - RNA, 23 nt, Human
uaccucagccucccaaguagcag

SEQ ID NO: 1247166 - RNA, 23 nt, Human
uacugcaaccuuccucuccuggg

SEQ ID NO: 1247167 - RNA, 24 nt, Human
uacuuuuuuuuggaaauaggguga

SEQ ID NO: 1247168 - RNA, 20 nt, Human
uagaauucucugauuucuug

SEQ ID NO: 1247169 - RNA, 24 nt, Human
uagacgugugccuccacacccagc

SEQ ID NO: 1247170 - RNA, 20 nt, Human
uagauccuccaaccacuuuc

SEQ ID NO: 1247171 - RNA, 22 nt, Human
uagauccuccaaccacuuucag

SEQ ID NO: 1247172 - RNA, 26 nt, Human
uagcucccauggccaggguuccuucc

SEQ ID NO: 1247173 - RNA, 18 nt, Human
uagcugcucucugccucc

SEQ ID NO: 1247174 - RNA, 22 nt, Human
uaggcacaggguuucaccaugu

SEQ ID NO: 1247175 - RNA, 24 nt, Human
uaguaggcacaggguuucaccaug

SEQ ID NO: 1247176 - RNA, 26 nt, Human
uauauaauauauaacuauauagugau

SEQ ID NO: 1247177 - RNA, 19 nt, Human
uaucaugucuccugccuca

SEQ ID NO: 1247178 - RNA, 24 nt, Human
uaucccucaucuacaaaaugggaa

SEQ ID NO: 1247179 - RNA, 24 nt, Human
uauguucccugcaccacuggugcc

SEQ ID NO: 1247180 - RNA, 24 nt, Human
uauguugcucaggcuugucucaaa

SEQ ID NO: 1247181 - RNA, 24 nt, Human
uauguuguccaggcuggucuuaaa

SEQ ID NO: 1247182 - RNA, 18 nt, Human
uauuaggaaugccuuguu

SEQ ID NO: 1247183 - RNA, 24 nt, Human
uauuuggagacagaaucucacucu

SEQ ID NO: 1247184 - RNA, 25 nt, Human
uauuuggagacagaaucucacucug

SEQ ID NO: 1247185 - RNA, 25 nt, Human
uauuuggagacagaaucucacucug

SEQ ID NO: 1247186 - RNA, 23 nt, Human
ucaaaauacauaugagcacaauc

SEQ ID NO: 1247187 - RNA, 22 nt, Human
ucaacccuccaccacuucaggu

SEQ ID NO: 1247188 - RNA, 19 nt, Human
ucaagugauucuccugccu

SEQ ID NO: 1247189 - RNA, 21 nt, Human
ucaccauguuggccagguugg

SEQ ID NO: 1247190 - RNA, 23 nt, Human
ucaccccuucagaaagcagauuc

SEQ ID NO: 1247191 - RNA, 24 nt, Human
ucacucuguugcccaggcuggagu

SEQ ID NO: 1247192 - RNA, 27 nt, Human
ucagaaagcagauucuugggcaccauu

SEQ ID NO: 1247193 - RNA, 22 nt, Human
ucagccuccugaguagcuggaa

SEQ ID NO: 1247194 - RNA, 23 nt, Human
ucagcucaccuuucauucagucu

SEQ ID NO: 1247195 - RNA, 19 nt, Human
ucauauccagcuucccaaa

SEQ ID NO: 1247196 - RNA, 19 nt, Human
uccacaaagccauccaagc

SEQ ID NO: 1247197 - RNA, 20 nt, Human
uccacaauucucaccccuuc

SEQ ID NO: 1247198 - RNA, 19 nt, Human
uccacuguacaaauaaaau

SEQ ID NO: 1247199 - RNA, 24 nt, Human
uccagaguagcugggauuacaggu

SEQ ID NO: 1247200 - RNA, 20 nt, Human
uccaggcucaggugauccuc

SEQ ID NO: 1247201 - RNA, 25 nt, Human
uccaguagauccuccaaccacuuuc

SEQ ID NO: 1247202 - RNA, 24 nt, Human
ucccaaauugcugggaugacuggc

SEQ ID NO: 1247203 - RNA, 24 nt, Human
ucccaaguagcagggacuacaggc

SEQ ID NO: 1247204 - RNA, 18 nt, Human
ucccagccaaucugauug

SEQ ID NO: 1247205 - RNA, 23 nt, Human
ucccauaaugcugggauuacagg

SEQ ID NO: 1247206 - RNA, 25 nt, Human
ucccugcaccacuggugccuaucuc

SEQ ID NO: 1247207 - RNA, 24 nt, Human
uccuauguuguccaggcuggucuu

SEQ ID NO: 1247208 - RNA, 27 nt, Human
uccuccuaccucagccucccaaguagc

SEQ ID NO: 1247209 - RNA, 26 nt, Human
uccuccugccucagccuccugaguag

SEQ ID NO: 1247210 - RNA, 19 nt, Human
uccuggguucaagugauuc

SEQ ID NO: 1247211 - RNA, 21 nt, Human
uccuggguucaagugauucuc

SEQ ID NO: 1247212 - RNA, 24 nt, Human
uccuggguucaagugauucuccug

SEQ ID NO: 1247213 - RNA, 23 nt, Human
ucucaaacuccugagcucaggca

SEQ ID NO: 1247214 - RNA, 23 nt, Human
ucucacucuguugcccaggcugg

SEQ ID NO: 1247215 - RNA, 24 nt, Human
ucucacucuguugcccaggcugga

SEQ ID NO: 1247216 - RNA, 26 nt, Human
ucucacucuguugcccaggcuggagu

SEQ ID NO: 1247217 - RNA, 27 nt, Human
ucucacucuguugcccaggcuggaguu

SEQ ID NO: 1247218 - RNA, 24 nt, Human
ucucacugugucacccaggcugga

SEQ ID NO: 1247219 - RNA, 22 nt, Human
ucuccaggcucaggugauccuc

SEQ ID NO: 1247220 - RNA, 25 nt, Human
ucuccaggcucaggugauccuccua

SEQ ID NO: 1247221 - RNA, 24 nt, Human
ucuccuggguucaagugauucucc

SEQ ID NO: 1247222 - RNA, 18 nt, Human
ucucugauuucuuggugc

SEQ ID NO: 1247223 - RNA, 19 nt, Human
ucucuugugcugccagcaa

SEQ ID NO: 1247224 - RNA, 21 nt, Human
ucugcagucccuacucuaagc

SEQ ID NO: 1247225 - RNA, 19 nt, Human
ucugugaagaccuguaccc

SEQ ID NO: 1247226 - RNA, 18 nt, Human
ucuguugcccaggcugga

SEQ ID NO: 1247227 - RNA, 19 nt, Human
ucuuccuauguuguccagg

SEQ ID NO: 1247228 - RNA, 23 nt, Human
ucuuccuauguuguccaggcugg

SEQ ID NO: 1247229 - RNA, 24 nt, Human
ucuuccuauguuguccaggcuggu

SEQ ID NO: 1247230 - RNA, 23 nt, Human
ucuucuucucugagauuucuaga

SEQ ID NO: 1247231 - RNA, 19 nt, Human
ugaaaagaaugacauugag

SEQ ID NO: 1247232 - RNA, 21 nt, Human
ugaaauggacccagggaagag

SEQ ID NO: 1247233 - RNA, 24 nt, Human
ugaacucaagggauccuccugccu

SEQ ID NO: 1247234 - RNA, 20 nt, Human
ugaagaccuguacccucagu

SEQ ID NO: 1247235 - RNA, 23 nt, Human
ugaagauuauagcaauauuuuug

SEQ ID NO: 1247236 - RNA, 21 nt, Human
ugacauugagauguauuuuca

SEQ ID NO: 1247237 - RNA, 19 nt, Human
ugacuucauauccagcuuc

SEQ ID NO: 1247238 - RNA, 22 nt, Human
ugagaagcuuugcauacccuug

SEQ ID NO: 1247239 - RNA, 18 nt, Human
ugagauauccacagaacu

SEQ ID NO: 1247240 - RNA, 19 nt, Human
ugagaucaacccuccacca

SEQ ID NO: 1247241 - RNA, 22 nt, Human
ugagaucaacccuccaccacuu

SEQ ID NO: 1247242 - RNA, 24 nt, Human
ugagcacaaauacagcccagaaac

SEQ ID NO: 1247243 - RNA, 24 nt, Human
ugagccagcaggaaggaucucaca

SEQ ID NO: 1247244 - RNA, 24 nt, Human
ugaggcaggaguaucacuucaacc

SEQ ID NO: 1247245 - RNA, 25 nt, Human
ugaggcaggaguaucacuucaaccc

SEQ ID NO: 1247246 - RNA, 24 nt, Human
ugaucugcccaccuuggccuccca

SEQ ID NO: 1247247 - RNA, 21 nt, Human
ugauuugaucacuacacauug

SEQ ID NO: 1247248 - RNA, 19 nt, Human
ugcaaaaagagauuggaaa

SEQ ID NO: 1247249 - RNA, 22 nt, Human
ugcaggagaugggugcaagaca

SEQ ID NO: 1247250 - RNA, 21 nt, Human
ugcauagacaaaaugaaacaa

SEQ ID NO: 1247251 - RNA, 18 nt, Human
ugcaugggcagggccugg

SEQ ID NO: 1247252 - RNA, 21 nt, Human
ugcauguaucaaaauauaaca

SEQ ID NO: 1247253 - RNA, 18 nt, Human
ugccagcaguucucuucc

SEQ ID NO: 1247254 - RNA, 19 nt, Human
ugccauucaauuucugcag

SEQ ID NO: 1247255 - RNA, 19 nt, Human
ugccauucaauuucugcag

SEQ ID NO: 1247256 - RNA, 21 nt, Human
ugcccaggcuggaguucagug

SEQ ID NO: 1247257 - RNA, 24 nt, Human
ugcccaggcuggaguucaguggca

SEQ ID NO: 1247258 - RNA, 24 nt, Human
ugccucagccuccugaguagcugg

SEQ ID NO: 1247259 - RNA, 24 nt, Human
ugccucauaaguaccacuggacaa

SEQ ID NO: 1247260 - RNA, 19 nt, Human
ugccugagcacaaauacag

SEQ ID NO: 1247261 - RNA, 28 nt, Human
ugccugagcacaaauacagcccagaaac

SEQ ID NO: 1247262 - RNA, 20 nt, Human
ugccuggauuugcauguggg

SEQ ID NO: 1247263 - RNA, 24 nt, Human
ugccuguaaucccagcuacucagg

SEQ ID NO: 1247264 - RNA, 20 nt, Human
ugcugagggaaacagggugg

SEQ ID NO: 1247265 - RNA, 18 nt, Human
ugcugggaugacuggcau

SEQ ID NO: 1247266 - RNA, 20 nt, Human
ugcugggauuacaggugcca

SEQ ID NO: 1247267 - RNA, 24 nt, Human
uggaauuauagacgugugccucca

SEQ ID NO: 1247268 - RNA, 24 nt, Human
uggacacaaaaauacaguuagaug

SEQ ID NO: 1247269 - RNA, 18 nt, Human
uggacucaagugaucugc

SEQ ID NO: 1247270 - RNA, 22 nt, Human
uggacucaagugaucugcccac

SEQ ID NO: 1247271 - RNA, 22 nt, Human
uggagacagaaucucacucugu

SEQ ID NO: 1247272 - RNA, 19 nt, Human
uggaguucaguggcaugau

SEQ ID NO: 1247273 - RNA, 19 nt, Human
uggaguucaguggcaugau

SEQ ID NO: 1247274 - RNA, 21 nt, Human
uggcacaugccuguaauccca

SEQ ID NO: 1247275 - RNA, 22 nt, Human
uggcacaugccuguaaucccag

SEQ ID NO: 1247276 - RNA, 24 nt, Human
uggcaugaucucagcuuacugcaa

SEQ ID NO: 1247277 - RNA, 24 nt, Human
uggccagguuggucucaaacuccu

SEQ ID NO: 1247278 - RNA, 19 nt, Human
ugggacagggucucacugu

SEQ ID NO: 1247279 - RNA, 21 nt, Human
ugggagagcauuaggcugaga

SEQ ID NO: 1247280 - RNA, 18 nt, Human
ugggaucuuccuauguug

SEQ ID NO: 1247281 - RNA, 24 nt, Human
ugggaucuuccuauguuguccagg

SEQ ID NO: 1247282 - RNA, 21 nt, Human
ugggauuacaggugcacacca

SEQ ID NO: 1247283 - RNA, 19 nt, Human
ugggauuacaggugcacca

SEQ ID NO: 1247284 - RNA, 22 nt, Human
ugggauuacaggugccagccac

SEQ ID NO: 1247285 - RNA, 24 nt, Human
ugggauuacaggugccagccacca

SEQ ID NO: 1247286 - RNA, 21 nt, Human
uggggauaaaagaaccaacau

SEQ ID NO: 1247287 - RNA, 23 nt, Human
uggguucaagugauucuccugcc

SEQ ID NO: 1247288 - RNA, 24 nt, Human
uggguucaagugauucuccugccu

SEQ ID NO: 1247289 - RNA, 19 nt, Human
ugguaagaacccuccuggg

SEQ ID NO: 1247290 - RNA, 24 nt, Human
ugguggcacaugccuguaauccca

SEQ ID NO: 1247291 - RNA, 23 nt, Human
ugguguccuaauacauauguaug

SEQ ID NO: 1247292 - RNA, 25 nt, Human
uguaaaagccuuccuuacaaacacc

SEQ ID NO: 1247293 - RNA, 18 nt, Human
uguaauaaaccugcaaag

SEQ ID NO: 1247294 - RNA, 24 nt, Human
uguagagacgggguuuugauaugu

SEQ ID NO: 1247295 - RNA, 22 nt, Human
ugucacccaggcuggaagugca

SEQ ID NO: 1247296 - RNA, 24 nt, Human
uguccaggcuggucuuaaacuccu

SEQ ID NO: 1247297 - RNA, 23 nt, Human
ugucucaaacucuuggacucaac

SEQ ID NO: 1247298 - RNA, 24 nt, Human
uguguguuguuccuggugcucucc

SEQ ID NO: 1247299 - RNA, 23 nt, Human
uuaaaguagcuucaaaacccauu

SEQ ID NO: 1247300 - RNA, 24 nt, Human
uuacugcaaccuuccucuccuggg

SEQ ID NO: 1247301 - RNA, 18 nt, Human
uuagcccacccacaggug

SEQ ID NO: 1247302 - RNA, 22 nt, Human
uuaggcugagauagcucccaug

SEQ ID NO: 1247303 - RNA, 24 nt, Human
uuaguaggcacaggguuucaccau

SEQ ID NO: 1247304 - RNA, 22 nt, Human
uucaaaaugacuagaggaaaga

SEQ ID NO: 1247305 - RNA, 21 nt, Human
uucaagugauucuccugccuc

SEQ ID NO: 1247306 - RNA, 23 nt, Human
uucaagugauucuccugccucac

SEQ ID NO: 1247307 - RNA, 18 nt, Human
uucaaguuaguuuacccu

SEQ ID NO: 1247308 - RNA, 24 nt, Human
uucacccuguaaaagccuuccuua

SEQ ID NO: 1247309 - RNA, 27 nt, Human
uucauucauaccccaaaucucagcauc

SEQ ID NO: 1247310 - RNA, 24 nt, Human
uuccuugggucccuuuuccuuagc

SEQ ID NO: 1247311 - RNA, 23 nt, Human
uucgccaggucccugagugccca

SEQ ID NO: 1247312 - RNA, 25 nt, Human
uugauauauauauuauacugacaua

SEQ ID NO: 1247313 - RNA, 19 nt, Human
uugcagccucuacaucucc

SEQ ID NO: 1247314 - RNA, 21 nt, Human
uugcugggaugacuggcaugc

SEQ ID NO: 1247315 - RNA, 22 nt, Human
uuguagagacgggguuuugaua

SEQ ID NO: 1247316 - RNA, 24 nt, Human
uuguagagacgggguuuugauaug

SEQ ID NO: 1247317 - RNA, 19 nt, Human
uuuaaaauuuuaauauguu

SEQ ID NO: 1247318 - RNA, 19 nt, Human
uuucaccauguuggccagg

SEQ ID NO: 1247319 - RNA, 20 nt, Human
uuucaccauguuggccaggu

SEQ ID NO: 1247320 - RNA, 20 nt, Human
uuuguagagacgggguuuug

SEQ ID NO: 1247321 - RNA, 24 nt, Human
uuuguagagacgggguuuugauau

SEQ ID NO: 1247322 - RNA, 18 nt, Human
uuuucacauugcuaaguu

SEQ ID NO: 1247323 - RNA, 19 nt, Human
uuuugauauguugcucagg

SEQ ID NO: 1247324 - RNA, 24 nt, Human
uuuuuaguaggcacaggguuucac

SEQ ID NO: 1247325 - RNA, 20 nt, Human
uuuuuguauuuuuuguagag

SEQ ID NO: 1247326 - RNA, 23 nt, Human
uuuuuguauuuuuuguagagacg

SEQ ID NO: 1247327 - RNA, 21 nt, Human
uuuuuuguagagacgggguuu

SEQ ID NO: 1247328 - RNA, 22 nt, Human
uuuuuuguauuuuuaguaggca

SEQ ID NO: 1247329 - RNA, 22 nt, Human
aaaaaaaguaaccccaaguaac

SEQ ID NO: 1247330 - RNA, 23 nt, Human
aagaacccuucauugcaagugua

SEQ ID NO: 1247331 - RNA, 20 nt, Human
aagacccagcaccauguugg

SEQ ID NO: 1247332 - RNA, 23 nt, Human
aaguaaccccaaguaacaaguuu

SEQ ID NO: 1247333 - RNA, 22 nt, Human
acaaaauaaaaaaaguaacccc

SEQ ID NO: 1247334 - RNA, 21 nt, Human
aguccaggccuuccgucaccc

SEQ ID NO: 1247335 - RNA, 21 nt, Human
auaaaaauguguaccaggaac

SEQ ID NO: 1247336 - RNA, 26 nt, Human
caaaauaaaaaaaguaaccccaagua

SEQ ID NO: 1247337 - RNA, 24 nt, Human
caaacccgacuccuggcucccuca

SEQ ID NO: 1247338 - RNA, 19 nt, Human
caacuuccauuggcaagac

SEQ ID NO: 1247339 - RNA, 18 nt, Human
cacacagucgggaguggc

SEQ ID NO: 1247340 - RNA, 19 nt, Human
cacacagucgggaguggcu

SEQ ID NO: 1247341 - RNA, 22 nt, Human
ccaaguaacaaguuuacuaaac

SEQ ID NO: 1247342 - RNA, 23 nt, Human
ccuuccgucaccccauuggccag

SEQ ID NO: 1247343 - RNA, 18 nt, Human
cuuucccaauagacagca

SEQ ID NO: 1247344 - RNA, 21 nt, Human
gaggguagagcagcaucuauu

SEQ ID NO: 1247345 - RNA, 18 nt, Human
uaacaaguuuacuaaaca

SEQ ID NO: 1247346 - RNA, 28 nt, Human
uaacaaguuuacuaaacaagacccagca

SEQ ID NO: 1247347 - RNA, 18 nt, Human
uaccaggaacuuucccaa

SEQ ID NO: 1247348 - RNA, 24 nt, Human
ucgggaguggcuccacuccaacuu

SEQ ID NO: 1247349 - RNA, 20 nt, Human
uggaaacauguaagaaagua

SEQ ID NO: 1247350 - RNA, 20 nt, Human
uggcuccacuccaacuucca

SEQ ID NO: 1247351 - RNA, 21 nt, Human
aaauguuaaaaguuauaaaau

SEQ ID NO: 1247352 - RNA, 19 nt, Human
aagcccccuuuaugcuucc

SEQ ID NO: 1247353 - RNA, 29 nt, Human
acaaaaauacaaauauauacauauaaaaa

SEQ ID NO: 1247354 - RNA, 20 nt, Human
acgcggggcggccgagggcc

SEQ ID NO: 1247355 - RNA, 21 nt, Human
aggcauugaaggucacauucc

SEQ ID NO: 1247356 - RNA, 20 nt, Human
caggcauugaaggucacauu

SEQ ID NO: 1247357 - RNA, 23 nt, Human
caguugaaagugacugagugcau

SEQ ID NO: 1247358 - RNA, 22 nt, Human
cgagggccuggguccgcucugu

SEQ ID NO: 1247359 - RNA, 22 nt, Human
cuuuaugcuucccuaacuccuc

SEQ ID NO: 1247360 - RNA, 19 nt, Human
gggcggccgagggccuggg

SEQ ID NO: 1247361 - RNA, 21 nt, Human
uauaaaaaugcaguuacauug

SEQ ID NO: 1247362 - RNA, 24 nt, Human
uauaauggucuuguguuguucucc

SEQ ID NO: 1247363 - RNA, 20 nt, Human
uauauugccaaaaaacucuu

SEQ ID NO: 1247364 - RNA, 24 nt, Human
ucacugaauauaauggucuugugu

SEQ ID NO: 1247365 - RNA, 18 nt, Human
ucuccuguccccuuauaa

SEQ ID NO: 1247366 - RNA, 23 nt, Human
ugaauauaauggucuuguguugu

SEQ ID NO: 1247367 - RNA, 20 nt, Human
ugggaagggacagcagguuc

SEQ ID NO: 1247368 - RNA, 28 nt, Human
uucaagcccccuuuaugcuucccuaacu

SEQ ID NO: 1247369 - RNA, 25 nt, Human
uuccugucuuuuuccaaagcauaca

SEQ ID NO: 1247370 - RNA, 24 nt, Human
uuuccugucuuuuuccaaagcaua

SEQ ID NO: 1247371 - RNA, 25 nt, Human
aggugcccgcccagcaccgcgcccu

SEQ ID NO: 1247372 - RNA, 22 nt, Human
cccucugccacugccugauacc

SEQ ID NO: 1247373 - RNA, 20 nt, Human
ccguuggcgcaguccuccuc

SEQ ID NO: 1247374 - RNA, 18 nt, Human
cguuggcgcaguccuccu

SEQ ID NO: 1247375 - RNA, 24 nt, Human
cuagagcccucugccacugccuga

SEQ ID NO: 1247376 - RNA, 21 nt, Human
cucugccacugccugauaccu

SEQ ID NO: 1247377 - RNA, 22 nt, Human
gugcccgcccagcaccgcgccc

SEQ ID NO: 1247378 - RNA, 22 nt, Human
ugccacugccugauaccucagc

SEQ ID NO: 1247379 - RNA, 25 nt, Human
aaaaaaaccaauguaauacccuaaa

SEQ ID NO: 1247380 - RNA, 26 nt, Human
aaaaaaccaauguaauacccuaaaua

SEQ ID NO: 1247381 - RNA, 18 nt, Human
aaacaaaugaggcuagcc

SEQ ID NO: 1247382 - RNA, 19 nt, Human
aaacaaaugaggcuagccc

SEQ ID NO: 1247383 - RNA, 20 nt, Human
aaagaaagagagaucagacc

SEQ ID NO: 1247384 - RNA, 23 nt, Human
aaagaaugcagauggaacucaga

SEQ ID NO: 1247385 - RNA, 19 nt, Human
aacauggugaaaccccauc

SEQ ID NO: 1247386 - RNA, 20 nt, Human
aacauggugaaaccccaucu

SEQ ID NO: 1247387 - RNA, 21 nt, Human
aacauggugaaaccccaucuc

SEQ ID NO: 1247388 - RNA, 21 nt, Human
aacauggugaaaccccaucuc

SEQ ID NO: 1247389 - RNA, 23 nt, Human
aacauggugaaaccccaucucua

SEQ ID NO: 1247390 - RNA, 22 nt, Human
aacuucuagcuuccaaaacucu

SEQ ID NO: 1247391 - RNA, 23 nt, Human
aacuuuccaggccacagcacagg

SEQ ID NO: 1247392 - RNA, 19 nt, Human
aagaagaaaauucagaucu

SEQ ID NO: 1247393 - RNA, 23 nt, Human
aagaagaaaauucagaucugccg

SEQ ID NO: 1247394 - RNA, 25 nt, Human
aagaagaauagagggaaccgguacc

SEQ ID NO: 1247395 - RNA, 18 nt, Human
aagccccuauucccccag

SEQ ID NO: 1247396 - RNA, 18 nt, Human
acagagcaagacucaguc

SEQ ID NO: 1247397 - RNA, 18 nt, Human
accaauguaauacccuaa

SEQ ID NO: 1247398 - RNA, 24 nt, Human
accccaucucuacuaaaaauacaa

SEQ ID NO: 1247399 - RNA, 18 nt, Human
acccccaucgcacugggg

SEQ ID NO: 1247400 - RNA, 24 nt, Human
agaaagcaggcucaauaaaggcuc

SEQ ID NO: 1247401 - RNA, 22 nt, Human
agaaagcaggucauuugcaauc

SEQ ID NO: 1247402 - RNA, 20 nt, Human
agaagaaaauucagaucugc

SEQ ID NO: 1247403 - RNA, 18 nt, Human
agacagaacugugagccu

SEQ ID NO: 1247404 - RNA, 19 nt, Human
agagccagccccucuuccc

SEQ ID NO: 1247405 - RNA, 21 nt, Human
agaggaggccaugugaugaug

SEQ ID NO: 1247406 - RNA, 21 nt, Human
agaggaggccaugugaugaug

SEQ ID NO: 1247407 - RNA, 24 nt, Human
agcacuuugggaggcugagguggg

SEQ ID NO: 1247408 - RNA, 24 nt, Human
agcaugggcaacagagcaagacuc

SEQ ID NO: 1247409 - RNA, 23 nt, Human
agcuggguguggugacacacgcc

SEQ ID NO: 1247410 - RNA, 21 nt, Human
aggaaaggaggcaccccccgc

SEQ ID NO: 1247411 - RNA, 26 nt, Human
aggaggccaugugaugaugggggcgg

SEQ ID NO: 1247412 - RNA, 22 nt, Human
aggcaggagaaucucuugaacc

SEQ ID NO: 1247413 - RNA, 24 nt, Human
aggcaggagaaucucuugaaccug

SEQ ID NO: 1247414 - RNA, 20 nt, Human
aggcagugguugcagucacc

SEQ ID NO: 1247415 - RNA, 23 nt, Human
aggcagugguugcagucacccga

SEQ ID NO: 1247416 - RNA, 24 nt, Human
aggcugaggcaggagaaucucuug

SEQ ID NO: 1247417 - RNA, 19 nt, Human
aggcugagguggguggauc

SEQ ID NO: 1247418 - RNA, 19 nt, Human
aggcuggacccgguggcuc

SEQ ID NO: 1247419 - RNA, 24 nt, Human
agguggguggaucacaagggcagg

SEQ ID NO: 1247420 - RNA, 19 nt, Human
auaaaggcugguagaauua

SEQ ID NO: 1247421 - RNA, 21 nt, Human
auagaguaacagagaccaaaa

SEQ ID NO: 1247422 - RNA, 24 nt, Human
caaagggcagugauccucaagaga

SEQ ID NO: 1247423 - RNA, 19 nt, Human
caagagaugagaaacaaau

SEQ ID NO: 1247424 - RNA, 22 nt, Human
caagauagaguaacagagacca

SEQ ID NO: 1247425 - RNA, 20 nt, Human
caauugaccucccuaacacc

SEQ ID NO: 1247426 - RNA, 23 nt, Human
caauugaccucccuaacaccuua

SEQ ID NO: 1247427 - RNA, 21 nt, Human
cacaauugaccucccuaacac

SEQ ID NO: 1247428 - RNA, 18 nt, Human
cacccccgcgaggcgggg

SEQ ID NO: 1247429 - RNA, 19 nt, Human
cacccgucuguauugggag

SEQ ID NO: 1247430 - RNA, 22 nt, Human
cacccucuuucacugucaaaga

SEQ ID NO: 1247431 - RNA, 19 nt, Human
caccugcaaucccagcacu

SEQ ID NO: 1247432 - RNA, 24 nt, Human
caccugcaaucccagcacuuuggg

SEQ ID NO: 1247433 - RNA, 21 nt, Human
caccuuagaaaacuuuccagg

SEQ ID NO: 1247434 - RNA, 21 nt, Human
cagagaggaggccaugugaug

SEQ ID NO: 1247435 - RNA, 24 nt, Human
cagcacuuugggaggcugaggugg

SEQ ID NO: 1247436 - RNA, 24 nt, Human
cagcuacucaggaggcugaggcag

SEQ ID NO: 1247437 - RNA, 21 nt, Human
ccaguggcucuuacgaccccc

SEQ ID NO: 1247438 - RNA, 22 nt, Human
ccaguggcucuuacgaccccca

SEQ ID NO: 1247439 - RNA, 24 nt, Human
ccauguauguagucauaucacccc

SEQ ID NO: 1247440 - RNA, 20 nt, Human
cccacaauugaccucccuaa

SEQ ID NO: 1247441 - RNA, 21 nt, Human
cccacgcugcaauuagaagga

SEQ ID NO: 1247442 - RNA, 23 nt, Human
ccccacuggcucuuaggaccccc

SEQ ID NO: 1247443 - RNA, 23 nt, Human
ccccuauucccccaguggcucuu

SEQ ID NO: 1247444 - RNA, 25 nt, Human
cccgagaucgagcaaagccgggguc

SEQ ID NO: 1247445 - RNA, 19 nt, Human
ccucgguguacagagggug

SEQ ID NO: 1247446 - RNA, 21 nt, Human
ccucuagucccagcuacucag

SEQ ID NO: 1247447 - RNA, 22 nt, Human
ccucuagucccagcuacucagg

SEQ ID NO: 1247448 - RNA, 21 nt, Human
ccugaguugagaagacagaac

SEQ ID NO: 1247449 - RNA, 22 nt, Human
ccuggcaaacauggugaaaccc

SEQ ID NO: 1247450 - RNA, 24 nt, Human
ccuggcaaacauggugaaacccca

SEQ ID NO: 1247451 - RNA, 20 nt, Human
cgaggcggggucucagagcc

SEQ ID NO: 1247452 - RNA, 24 nt, Human
cgcaccugcaaucccagcacuuug

SEQ ID NO: 1247453 - RNA, 24 nt, Human
cgccucuagucccagcuacucagg

SEQ ID NO: 1247454 - RNA, 24 nt, Human
cgcgugucauauccuccccuccca

SEQ ID NO: 1247455 - RNA, 24 nt, Human
cgcgugucauauccuccucuccca

SEQ ID NO: 1247456 - RNA, 20 nt, Human
cuaggagcugugggguuuug

SEQ ID NO: 1247457 - RNA, 27 nt, Human
cuaggagcugugggguuuuguagacug

SEQ ID NO: 1247458 - RNA, 24 nt, Human
cucgcaccugcaaucccagcacuu

SEQ ID NO: 1247459 - RNA, 19 nt, Human
gaaacaaaugaggcuagcc

SEQ ID NO: 1247460 - RNA, 19 nt, Human
gaaauaggguuguugcaga

SEQ ID NO: 1247461 - RNA, 23 nt, Human
gacccgguggcucgcaccugcaa

SEQ ID NO: 1247462 - RNA, 20 nt, Human
gagcaagccccuauuccccc

SEQ ID NO: 1247463 - RNA, 18 nt, Human
gaggccaugugaugaugg

SEQ ID NO: 1247464 - RNA, 24 nt, Human
gauaucgcgugucauauccucccc

SEQ ID NO: 1247465 - RNA, 27 nt, Human
gaugaugggggcggaaaagggagggcc

SEQ ID NO: 1247466 - RNA, 22 nt, Human
gaugaugggggcggaaacuggg

SEQ ID NO: 1247467 - RNA, 24 nt, Human
gcaaacauggugaaaccccaucuc

SEQ ID NO: 1247468 - RNA, 26 nt, Human
gcaucuacaagccaaggaaugucagg

SEQ ID NO: 1247469 - RNA, 18 nt, Human
ggauuuacuauucgacag

SEQ ID NO: 1247470 - RNA, 26 nt, Human
ggcaauagaaacugccaauaacagaa

SEQ ID NO: 1247471 - RNA, 20 nt, Human
ggcggggaggcaccccccgc

SEQ ID NO: 1247472 - RNA, 22 nt, Human
gggaaggccaauguggcuagaa

SEQ ID NO: 1247473 - RNA, 19 nt, Human
ggguggaucacaagggcag

SEQ ID NO: 1247474 - RNA, 22 nt, Human
gguauuagguguccaagaagaa

SEQ ID NO: 1247475 - RNA, 18 nt, Human
guauugggaguaauauca

SEQ ID NO: 1247476 - RNA, 19 nt, Human
gugaucagaguaugcaggu

SEQ ID NO: 1247477 - RNA, 19 nt, Human
guggguggaucacaagggc

SEQ ID NO: 1247478 - RNA, 22 nt, Human
gugucgguguccuuagaagaag

SEQ ID NO: 1247479 - RNA, 21 nt, Human
uaaaacaacaaaacuacugga

SEQ ID NO: 1247480 - RNA, 21 nt, Human
uaacaacacccucuuucacug

SEQ ID NO: 1247481 - RNA, 21 nt, Human
uagaaaggaaaggaggcaccc

SEQ ID NO: 1247482 - RNA, 24 nt, Human
uagaauacccuaugcacuaucuuu

SEQ ID NO: 1247483 - RNA, 26 nt, Human
uagaguaacagagaccaaaagggagc

SEQ ID NO: 1247484 - RNA, 22 nt, Human
uagcuggguguggugacacacg

SEQ ID NO: 1247485 - RNA, 20 nt, Human
uaucagugggggcgugucca

SEQ ID NO: 1247486 - RNA, 20 nt, Human
uauggcccucaagcaacaaa

SEQ ID NO: 1247487 - RNA, 22 nt, Human
ucaaucacuggaaucaagcauu

SEQ ID NO: 1247488 - RNA, 24 nt, Human
ucacaagggcaggagauaaagacc

SEQ ID NO: 1247489 - RNA, 23 nt, Human
ucacagggguguuucuacucccu

SEQ ID NO: 1247490 - RNA, 18 nt, Human
ucacccgagaucgagcaa

SEQ ID NO: 1247491 - RNA, 23 nt, Human
ucagagccagccccucuuccccc

SEQ ID NO: 1247492 - RNA, 22 nt, Human
ucagugggggcguguccacagg

SEQ ID NO: 1247493 - RNA, 20 nt, Human
uccaagaagaaaauucagau

SEQ ID NO: 1247494 - RNA, 22 nt, Human
uccacuuucugccauguaugua

SEQ ID NO: 1247495 - RNA, 20 nt, Human
uccaggccacagcacaggaa

SEQ ID NO: 1247496 - RNA, 26 nt, Human
uccaggccacagcacaggaagaaaaa

SEQ ID NO: 1247497 - RNA, 21 nt, Human
ucccccgcuggcucugaggau

SEQ ID NO: 1247498 - RNA, 21 nt, Human
ucccuccaggaucgugggaac

SEQ ID NO: 1247499 - RNA, 18 nt, Human
uccuaggagcuguggggu

SEQ ID NO: 1247500 - RNA, 22 nt, Human
uccucaagagaugagaaacaaa

SEQ ID NO: 1247501 - RNA, 18 nt, Human
ucgcagggggaggaggca

SEQ ID NO: 1247502 - RNA, 18 nt, Human
ucgcgugucauauccucc

SEQ ID NO: 1247503 - RNA, 19 nt, Human
ucgcgugucauauccuccu

SEQ ID NO: 1247504 - RNA, 26 nt, Human
ucuacaagccaaggaaugucagggcu

SEQ ID NO: 1247505 - RNA, 21 nt, Human
ucucuacuaaaaauacaaaaa

SEQ ID NO: 1247506 - RNA, 23 nt, Human
ucuggccaagauagaguaacaga

SEQ ID NO: 1247507 - RNA, 19 nt, Human
ugaaaccccaucucuacua

SEQ ID NO: 1247508 - RNA, 19 nt, Human
ugaaccugggaggcagugg

SEQ ID NO: 1247509 - RNA, 24 nt, Human
ugaaccugggaggcagugguugca

SEQ ID NO: 1247510 - RNA, 28 nt, Human
ugagaaacaaaugaggcuagccccacaa

SEQ ID NO: 1247511 - RNA, 19 nt, Human
ugagaagacagaacuguga

SEQ ID NO: 1247512 - RNA, 23 nt, Human
ugagagccagccccucuuccccc

SEQ ID NO: 1247513 - RNA, 20 nt, Human
ugagccugggaaggccaaug

SEQ ID NO: 1247514 - RNA, 20 nt, Human
ugaggcaggagaaucucuug

SEQ ID NO: 1247515 - RNA, 24 nt, Human
ugaggcaggagaaucucuugaacc

SEQ ID NO: 1247516 - RNA, 25 nt, Human
ugaggcaggagaaucucuugaaccu

SEQ ID NO: 1247517 - RNA, 18 nt, Human
ugagguggguggaucaca

SEQ ID NO: 1247518 - RNA, 19 nt, Human
ugagguggguggaucacaa

SEQ ID NO: 1247519 - RNA, 22 nt, Human
ugagguggguggaucacaaggg

SEQ ID NO: 1247520 - RNA, 23 nt, Human
ugagguggguggaucacaagggc

SEQ ID NO: 1247521 - RNA, 24 nt, Human
ugagguggguggaucacaagggca

SEQ ID NO: 1247522 - RNA, 19 nt, Human
ugaugggggcggaaacugg

SEQ ID NO: 1247523 - RNA, 21 nt, Human
ugcacuaucuuuaaaugggau

SEQ ID NO: 1247524 - RNA, 19 nt, Human
ugccaacaccucguuuuga

SEQ ID NO: 1247525 - RNA, 18 nt, Human
uggcaaacauggugaaac

SEQ ID NO: 1247526 - RNA, 26 nt, Human
uggccaagauagaguaacagagacca

SEQ ID NO: 1247527 - RNA, 22 nt, Human
uggcucgcaccugcaaucccag

SEQ ID NO: 1247528 - RNA, 24 nt, Human
uggcucgcaccugcaaucccagca

SEQ ID NO: 1247529 - RNA, 22 nt, Human
ugggaggcagugguugcaguca

SEQ ID NO: 1247530 - RNA, 20 nt, Human
ugggaggcugaggugggugg

SEQ ID NO: 1247531 - RNA, 23 nt, Human
ugggaggcugagguggguggauc

SEQ ID NO: 1247532 - RNA, 24 nt, Human
ugggaggcugagguggguggauca

SEQ ID NO: 1247533 - RNA, 21 nt, Human
ugggauuuacuauucgacagg

SEQ ID NO: 1247534 - RNA, 19 nt, Human
uguacagaggguguacacc

SEQ ID NO: 1247535 - RNA, 23 nt, Human
ugucacugugucuauguagaaag

SEQ ID NO: 1247536 - RNA, 27 nt, Human
uguccaagaagaaaauucagaucugcc

SEQ ID NO: 1247537 - RNA, 19 nt, Human
uguccaucuuucagaguuu

SEQ ID NO: 1247538 - RNA, 20 nt, Human
uguccgaaagcagcccggga

SEQ ID NO: 1247539 - RNA, 19 nt, Human
uuagcuggguguggugaca

SEQ ID NO: 1247540 - RNA, 24 nt, Human
uuagcuggguguggugacacacgc

SEQ ID NO: 1247541 - RNA, 21 nt, Human
uuccugggauaguccugguuu

SEQ ID NO: 1247542 - RNA, 24 nt, Human
uugaaccugggaggcagugguugc

SEQ ID NO: 1247543 - RNA, 25 nt, Human
uugggaggcugagguggguggauca

SEQ ID NO: 1247544 - RNA, 20 nt, Human
uuuugauguguaaaugcuua

SEQ ID NO: 1247545 - RNA, 25 nt, Human
aagacaccacacaaaaaggggcaaa

SEQ ID NO: 1247546 - RNA, 19 nt, Human
accccaaaaaaugaaggaa

SEQ ID NO: 1247547 - RNA, 22 nt, Human
accccaaaaaaugaaggaaaau

SEQ ID NO: 1247548 - RNA, 23 nt, Human
agggagaagaaauaaguguaaaa

SEQ ID NO: 1247549 - RNA, 22 nt, Human
caagaaaguuuaugaagacacc

SEQ ID NO: 1247550 - RNA, 22 nt, Human
caccacacaaaaaggggcaaaa

SEQ ID NO: 1247551 - RNA, 22 nt, Human
caccccaaaaaaugaaggaaaa

SEQ ID NO: 1247552 - RNA, 25 nt, Human
cagguauaaagaauagggagaagaa

SEQ ID NO: 1247553 - RNA, 18 nt, Human
cauguaucaaacaguaua

SEQ ID NO: 1247554 - RNA, 19 nt, Human
ccaccccaaaaaaugaagg

SEQ ID NO: 1247555 - RNA, 21 nt, Human
cccaaaaaaugaaggaaaaua

SEQ ID NO: 1247556 - RNA, 21 nt, Human
gguauaaagaauagggagaag

SEQ ID NO: 1247557 - RNA, 20 nt, Human
uacuguaacucaacaugaca

SEQ ID NO: 1247558 - RNA, 23 nt, Human
ucccaccccaaaaaaugaaggaa

SEQ ID NO: 1247559 - RNA, 22 nt, Human
ugaagacaccacacaaaaaggg

SEQ ID NO: 1247560 - RNA, 18 nt, Human
ugucacagguauaaagaa

SEQ ID NO: 1247561 - RNA, 23 nt, Human
uucaaaagcuaacaacuuauggg

SEQ ID NO: 1247562 - RNA, 24 nt, Human
uucaggcaagaaaguuuaugaaga

SEQ ID NO: 1247563 - RNA, 21 nt, Human
aaaaaaaaaaaaaaaauagag

SEQ ID NO: 1247564 - RNA, 21 nt, Human
aaaaaaaaaaaaaauagagau

SEQ ID NO: 1247565 - RNA, 24 nt, Human
aaagugcugggauuaaagguauga

SEQ ID NO: 1247566 - RNA, 24 nt, Human
aaagugcugggauuacaggcauga

SEQ ID NO: 1247567 - RNA, 23 nt, Human
aacaccaacagacacagaacaca

SEQ ID NO: 1247568 - RNA, 20 nt, Human
aacacggugaaaccccgucu

SEQ ID NO: 1247569 - RNA, 21 nt, Human
aacacggugaaaccccgucuc

SEQ ID NO: 1247570 - RNA, 21 nt, Human
aacacucucuacagcauagaa

SEQ ID NO: 1247571 - RNA, 24 nt, Human
aacagagugagacucugucucaaa

SEQ ID NO: 1247572 - RNA, 24 nt, Human
aagccaaaggcccugacccgugcu

SEQ ID NO: 1247573 - RNA, 20 nt, Human
aaggcagguggaucacaagg

SEQ ID NO: 1247574 - RNA, 25 nt, Human
aagugauccucccaccucagccucc

SEQ ID NO: 1247575 - RNA, 19 nt, Human
aagugcugggauuaaaggu

SEQ ID NO: 1247576 - RNA, 26 nt, Human
aagugcugggauuaaagguaugagcc

SEQ ID NO: 1247577 - RNA, 19 nt, Human
aagugcugggauuacaggc

SEQ ID NO: 1247578 - RNA, 21 nt, Human
aagugcugggauuacaggcau

SEQ ID NO: 1247579 - RNA, 26 nt, Human
aagugcugggauuacaggcaugaacc

SEQ ID NO: 1247580 - RNA, 24 nt, Human
aauugcuugaaccugggaggcgga

SEQ ID NO: 1247581 - RNA, 21 nt, Human
acagagugagacucugucuca

SEQ ID NO: 1247582 - RNA, 24 nt, Human
acagagugagacucugucucaaaa

SEQ ID NO: 1247583 - RNA, 18 nt, Human
acagcucacuguagccuc

SEQ ID NO: 1247584 - RNA, 21 nt, Human
acaggcaucaccacacccugc

SEQ ID NO: 1247585 - RNA, 24 nt, Human
acaguggcucaugccuggaauccc

SEQ ID NO: 1247586 - RNA, 22 nt, Human
accacccacugcugcugcaccc

SEQ ID NO: 1247587 - RNA, 22 nt, Human
accacugcacuccagccugggc

SEQ ID NO: 1247588 - RNA, 24 nt, Human
accccgucucuaauaaaaauacaa

SEQ ID NO: 1247589 - RNA, 24 nt, Human
acuaucuugcccaagcuggucuug

SEQ ID NO: 1247590 - RNA, 24 nt, Human
acuccagccugggcaacagaguga

SEQ ID NO: 1247591 - RNA, 25 nt, Human
acucugucauccaggcuggagugca

SEQ ID NO: 1247592 - RNA, 28 nt, Human
acucugucucaaaaaaaaaaaaaaaaaa

SEQ ID NO: 1247593 - RNA, 19 nt, Human
acugagucuaccauguccc

SEQ ID NO: 1247594 - RNA, 24 nt, Human
acugcacuccagccugggcaacag

SEQ ID NO: 1247595 - RNA, 24 nt, Human
acugcacuccagccugggcaacag

SEQ ID NO: 1247596 - RNA, 22 nt, Human
agacagaugagaccuucccaga

SEQ ID NO: 1247597 - RNA, 21 nt, Human
agacaggaaguaggagaccca

SEQ ID NO: 1247598 - RNA, 22 nt, Human
agacaggaaguaggagacccaa

SEQ ID NO: 1247599 - RNA, 24 nt, Human
agacaggaaguaggagacccaaga

SEQ ID NO: 1247600 - RNA, 23 nt, Human
agagaacagcccagagaacccaa

SEQ ID NO: 1247601 - RNA, 18 nt, Human
agcagccgcaucaccacc

SEQ ID NO: 1247602 - RNA, 23 nt, Human
agccucaaccucccagucucaag

SEQ ID NO: 1247603 - RNA, 24 nt, Human
agccuggccaacacggugaaaccc

SEQ ID NO: 1247604 - RNA, 24 nt, Human
agccugggcaacagagugagacuc

SEQ ID NO: 1247605 - RNA, 18 nt, Human
agcuggucuugaacuccu

SEQ ID NO: 1247606 - RNA, 24 nt, Human
agcuggucuugaacuccugggcuc

SEQ ID NO: 1247607 - RNA, 20 nt, Human
aggcaagaggcagaccuggg

SEQ ID NO: 1247608 - RNA, 21 nt, Human
aggcaagaggcagaccugggg

SEQ ID NO: 1247609 - RNA, 21 nt, Human
aggcagauaauugcuugaacc

SEQ ID NO: 1247610 - RNA, 23 nt, Human
aggcagauaauugcuugaaccug

SEQ ID NO: 1247611 - RNA, 18 nt, Human
aggcagguggaucacaag

SEQ ID NO: 1247612 - RNA, 24 nt, Human
aggcagguggaucacaaggucagg

SEQ ID NO: 1247613 - RNA, 22 nt, Human
aggcccagcaagggugugccug

SEQ ID NO: 1247614 - RNA, 22 nt, Human
aggccggguacaguggcucaug

SEQ ID NO: 1247615 - RNA, 24 nt, Human
aggcggagguugcagucaguugag

SEQ ID NO: 1247616 - RNA, 21 nt, Human
aggcguggcgggcgccuguaa

SEQ ID NO: 1247617 - RNA, 23 nt, Human
aggcugaggcagauaauugcuug

SEQ ID NO: 1247618 - RNA, 20 nt, Human
agguaugagccacugcaccc

SEQ ID NO: 1247619 - RNA, 23 nt, Human
agguggaucacaaggucaggagu

SEQ ID NO: 1247620 - RNA, 21 nt, Human
agugcaguagcgcgaucacag

SEQ ID NO: 1247621 - RNA, 23 nt, Human
agugcaguagcgcgaucacagcu

SEQ ID NO: 1247622 - RNA, 18 nt, Human
agugcugggauuacaggc

SEQ ID NO: 1247623 - RNA, 24 nt, Human
aguggcucaugccuggaaucccag

SEQ ID NO: 1247624 - RNA, 24 nt, Human
aucgcaccacugcacuccagccug

SEQ ID NO: 1247625 - RNA, 28 nt, Human
aucgcaccacugcacuccagccugggca

SEQ ID NO: 1247626 - RNA, 18 nt, Human
auguugccccaggcuggu

SEQ ID NO: 1247627 - RNA, 20 nt, Human
auguugccccaggcuggucu

SEQ ID NO: 1247628 - RNA, 24 nt, Human
auguugccccaggcuggucuugaa

SEQ ID NO: 1247629 - RNA, 23 nt, Human
auuauuuuaaguaagcaaacacu

SEQ ID NO: 1247630 - RNA, 24 nt, Human
auucaggaugacaaagccuucaac

SEQ ID NO: 1247631 - RNA, 24 nt, Human
caaagugcugggauuaaagguaug

SEQ ID NO: 1247632 - RNA, 24 nt, Human
caaagugcugggauuacaggcaug

SEQ ID NO: 1247633 - RNA, 27 nt, Human
caaaugauccuccuaccuuggcuuccc

SEQ ID NO: 1247634 - RNA, 28 nt, Human
caaaugauccuccuaccuuggcuuccca

SEQ ID NO: 1247635 - RNA, 22 nt, Human
caaauugaagcagcuacagcuu

SEQ ID NO: 1247636 - RNA, 23 nt, Human
caacaccaacagacacagaacac

SEQ ID NO: 1247637 - RNA, 24 nt, Human
caacacggugaaaccccgucucua

SEQ ID NO: 1247638 - RNA, 22 nt, Human
caacagacacagaacacaggaa

SEQ ID NO: 1247639 - RNA, 22 nt, Human
caacagacacagaacacaggaa

SEQ ID NO: 1247640 - RNA, 19 nt, Human
caagagcagccgcaucacc

SEQ ID NO: 1247641 - RNA, 19 nt, Human
caagaggcagaccuggggu

SEQ ID NO: 1247642 - RNA, 22 nt, Human
caaggcagguggaucacaaggu

SEQ ID NO: 1247643 - RNA, 26 nt, Human
caaggcagguggaucacaaggucagg

SEQ ID NO: 1247644 - RNA, 22 nt, Human
caaggucaggaguacaagacca

SEQ ID NO: 1247645 - RNA, 20 nt, Human
caagugauccucccaccuca

SEQ ID NO: 1247646 - RNA, 27 nt, Human
caagugauccucccaccucagccuccu

SEQ ID NO: 1247647 - RNA, 22 nt, Human
caagugaucuuccugccucggc

SEQ ID NO: 1247648 - RNA, 23 nt, Human
cacagccuguaagccaaaggccc

SEQ ID NO: 1247649 - RNA, 22 nt, Human
caccaacagacacagaacacag

SEQ ID NO: 1247650 - RNA, 25 nt, Human
caccacacccugcuacuucuguuaa

SEQ ID NO: 1247651 - RNA, 21 nt, Human
caccagcaggcaagaggcaga

SEQ ID NO: 1247652 - RNA, 18 nt, Human
caccaggccacucaagag

SEQ ID NO: 1247653 - RNA, 25 nt, Human
caccucagccuccugaguagcugca

SEQ ID NO: 1247654 - RNA, 23 nt, Human
cacggugaaaccccgucucuaau

SEQ ID NO: 1247655 - RNA, 22 nt, Human
cacuccagccugggcaacagag

SEQ ID NO: 1247656 - RNA, 24 nt, Human
cacuccagccugggcaacagagug

SEQ ID NO: 1247657 - RNA, 23 nt, Human
cacucugucauccaggcuggagu

SEQ ID NO: 1247658 - RNA, 24 nt, Human
cacucugucauccaggcuggagug

SEQ ID NO: 1247659 - RNA, 19 nt, Human
cacugcacuccagccuggg

SEQ ID NO: 1247660 - RNA, 21 nt, Human
cacugcacuccagccugggca

SEQ ID NO: 1247661 - RNA, 22 nt, Human
cacugcacuccagccugggcaa

SEQ ID NO: 1247662 - RNA, 23 nt, Human
cacugcacuccagccugggcaac

SEQ ID NO: 1247663 - RNA, 24 nt, Human
cacugcacuccagccugggcaaca

SEQ ID NO: 1247664 - RNA, 25 nt, Human
cacugcacuccagccugggcaacaa

SEQ ID NO: 1247665 - RNA, 20 nt, Human
cacugcugcugcaccccugc

SEQ ID NO: 1247666 - RNA, 22 nt, Human
cacuguagccucaaccucccag

SEQ ID NO: 1247667 - RNA, 21 nt, Human
cacuucccuugcugguccuug

SEQ ID NO: 1247668 - RNA, 21 nt, Human
cagagucucugagguagaaac

SEQ ID NO: 1247669 - RNA, 20 nt, Human
cagauaauugcuugaacccc

SEQ ID NO: 1247670 - RNA, 24 nt, Human
cagcaauuugggaggccaaggcag

SEQ ID NO: 1247671 - RNA, 24 nt, Human
cagcaauuugggaggccaaggcag

SEQ ID NO: 1247672 - RNA, 18 nt, Human
cagccuccugaguagcug

SEQ ID NO: 1247673 - RNA, 24 nt, Human
cagcuacucaggaggcugaggcag

SEQ ID NO: 1247674 - RNA, 20 nt, Human
cagguggaucacaaggucau

SEQ ID NO: 1247675 - RNA, 20 nt, Human
caguagcgcgaucacagcuc

SEQ ID NO: 1247676 - RNA, 23 nt, Human
cauaacaaccccacuuuacagau

SEQ ID NO: 1247677 - RNA, 25 nt, Human
cauagggcugcucagaaauaaacac

SEQ ID NO: 1247678 - RNA, 21 nt, Human
caucaccacacccugcuacuu

SEQ ID NO: 1247679 - RNA, 24 nt, Human
caugccuggaaucccagcaauuug

SEQ ID NO: 1247680 - RNA, 18 nt, Human
cauuuuccuagaaaaucc

SEQ ID NO: 1247681 - RNA, 21 nt, Human
ccaaagugcugggauuaaagg

SEQ ID NO: 1247682 - RNA, 21 nt, Human
ccaaagugcugggauuaaagg

SEQ ID NO: 1247683 - RNA, 24 nt, Human
ccaaagugcugggauuaaagguau

SEQ ID NO: 1247684 - RNA, 23 nt, Human
ccaaagugcugggauuacaggca

SEQ ID NO: 1247685 - RNA, 24 nt, Human
ccaaagugcugggauuacaggcau

SEQ ID NO: 1247686 - RNA, 18 nt, Human
ccaacagacacagaacac

SEQ ID NO: 1247687 - RNA, 24 nt, Human
ccaagcuggucuugaacuccuggg

SEQ ID NO: 1247688 - RNA, 28 nt, Human
ccaccaggccacucaagagcagccgcau

SEQ ID NO: 1247689 - RNA, 23 nt, Human
ccaccucagccuccugaguagcu

SEQ ID NO: 1247690 - RNA, 20 nt, Human
ccacugcacuccagccuggg

SEQ ID NO: 1247691 - RNA, 20 nt, Human
ccacugcacuccagccuggg

SEQ ID NO: 1247692 - RNA, 21 nt, Human
ccacugcacuccagccugggc

SEQ ID NO: 1247693 - RNA, 23 nt, Human
ccacugcacuccagccugggcaa

SEQ ID NO: 1247694 - RNA, 24 nt, Human
ccacugcacuccagccugggcaac

SEQ ID NO: 1247695 - RNA, 21 nt, Human
ccacugcugcugcaccccugc

SEQ ID NO: 1247696 - RNA, 23 nt, Human
cccaaagugcugggauuacaggc

SEQ ID NO: 1247697 - RNA, 24 nt, Human
cccaaagugcugggauuacaggca

SEQ ID NO: 1247698 - RNA, 23 nt, Human
cccaccucagccuccugaguagc

SEQ ID NO: 1247699 - RNA, 20 nt, Human
cccagagaacccaauuccuc

SEQ ID NO: 1247700 - RNA, 21 nt, Human
cccuccaccaugcacacacua

SEQ ID NO: 1247701 - RNA, 25 nt, Human
cccuccaccaugcacacacuauuuc

SEQ ID NO: 1247702 - RNA, 19 nt, Human
cccucccucucucucucuc

SEQ ID NO: 1247703 - RNA, 24 nt, Human
cccuggcugcaucucccaagccuc

SEQ ID NO: 1247704 - RNA, 19 nt, Human
cccuggggcaugggaggcc

SEQ ID NO: 1247705 - RNA, 21 nt, Human
ccucucucucucucugagaga

SEQ ID NO: 1247706 - RNA, 24 nt, Human
ccugaguagcugcaacuacaggca

SEQ ID NO: 1247707 - RNA, 23 nt, Human
ccuggccaacacggugaaacccc

SEQ ID NO: 1247708 - RNA, 24 nt, Human
ccuggccaacacggugaaaccccg

SEQ ID NO: 1247709 - RNA, 19 nt, Human
ccugggaggcggagguugc

SEQ ID NO: 1247710 - RNA, 22 nt, Human
ccugggcaacagagugagacuc

SEQ ID NO: 1247711 - RNA, 22 nt, Human
ccugggcucaaaugauccuccu

SEQ ID NO: 1247712 - RNA, 22 nt, Human
ccugggcucaagugaucuuccu

SEQ ID NO: 1247713 - RNA, 23 nt, Human
ccugggcucaagugaucuuccug

SEQ ID NO: 1247714 - RNA, 22 nt, Human
ccuggggcaugggaggcccagc

SEQ ID NO: 1247715 - RNA, 19 nt, Human
ccuguaaucccagcuacuc

SEQ ID NO: 1247716 - RNA, 21 nt, Human
ccuguaaucccagcuacucag

SEQ ID NO: 1247717 - RNA, 19 nt, Human
cgaggcagacagaugaagu

SEQ ID NO: 1247718 - RNA, 24 nt, Human
cgccuguaaucccagcuacucagg

SEQ ID NO: 1247719 - RNA, 25 nt, Human
cggguacaguggcucaugccuggaa

SEQ ID NO: 1247720 - RNA, 24 nt, Human
cgucgccauucaggaugacaaagc

SEQ ID NO: 1247721 - RNA, 24 nt, Human
cguggcgggcgccuguaaucccag

SEQ ID NO: 1247722 - RNA, 21 nt, Human
cuacaggcaucaccacacccu

SEQ ID NO: 1247723 - RNA, 24 nt, Human
cucaaaugauccuccuaccuuggc

SEQ ID NO: 1247724 - RNA, 22 nt, Human
cucaaauugaagcagcuacagc

SEQ ID NO: 1247725 - RNA, 21 nt, Human
cucaagagcagccgcaucacc

SEQ ID NO: 1247726 - RNA, 24 nt, Human
cucaagugauccucccaccucagc

SEQ ID NO: 1247727 - RNA, 25 nt, Human
cucaagugaucuuccugccucggcc

SEQ ID NO: 1247728 - RNA, 24 nt, Human
cucacucugucauccaggcuggag

SEQ ID NO: 1247729 - RNA, 20 nt, Human
cucacuucccauucgucgcc

SEQ ID NO: 1247730 - RNA, 25 nt, Human
cucaugccuggaaucccagcaauuu

SEQ ID NO: 1247731 - RNA, 20 nt, Human
cucccaagccuccagagaac

SEQ ID NO: 1247732 - RNA, 23 nt, Human
cuccugggcucaaaugauccucc

SEQ ID NO: 1247733 - RNA, 23 nt, Human
cuccugggcucaagugaucuucc

SEQ ID NO: 1247734 - RNA, 19 nt, Human
cucugucucaaaaaaaaaa

SEQ ID NO: 1247735 - RNA, 19 nt, Human
cugcacccgccaauuuuua

SEQ ID NO: 1247736 - RNA, 19 nt, Human
cugcuaagcacacucucca

SEQ ID NO: 1247737 - RNA, 21 nt, Human
cugcugcaccccugccgcaaa

SEQ ID NO: 1247738 - RNA, 18 nt, Human
cuggccaacacggugaaa

SEQ ID NO: 1247739 - RNA, 19 nt, Human
cuggucuugaacuccuggg

SEQ ID NO: 1247740 - RNA, 19 nt, Human
cuggucuugaacuccuggg

SEQ ID NO: 1247741 - RNA, 19 nt, Human
cuucaguagacagccucuc

SEQ ID NO: 1247742 - RNA, 20 nt, Human
gagacagggucucacucugu

SEQ ID NO: 1247743 - RNA, 23 nt, Human
gagaccuucccagagagccacaa

SEQ ID NO: 1247744 - RNA, 23 nt, Human
gagaucgcaccacugcacuccag

SEQ ID NO: 1247745 - RNA, 23 nt, Human
gagguugcagucaguugagaucg

SEQ ID NO: 1247746 - RNA, 24 nt, Human
gaucacaaggucaggaguacaaga

SEQ ID NO: 1247747 - RNA, 22 nt, Human
gauuaaagguaugagccacugc

SEQ ID NO: 1247748 - RNA, 23 nt, Human
gauuaaagguaugagccacugca

SEQ ID NO: 1247749 - RNA, 19 nt, Human
gcaaagccagcguaaugac

SEQ ID NO: 1247750 - RNA, 24 nt, Human
gcaacagagugagacucugucuca

SEQ ID NO: 1247751 - RNA, 20 nt, Human
gcaccacugcacuccagccu

SEQ ID NO: 1247752 - RNA, 24 nt, Human
gcacuccagccugggcaacagagu

SEQ ID NO: 1247753 - RNA, 19 nt, Human
gcaugggaggcccagcaag

SEQ ID NO: 1247754 - RNA, 24 nt, Human
gccaacacggugaaaccccgucuc

SEQ ID NO: 1247755 - RNA, 24 nt, Human
gccccaggcuggucuugaacuccu

SEQ ID NO: 1247756 - RNA, 30 nt, Human
gccuggaaucccagcaauuugggaggccaa

SEQ ID NO: 1247757 - RNA, 23 nt, Human
gccuguaaucccagcuacucagg

SEQ ID NO: 1247758 - RNA, 20 nt, Human
gcgggcgccuguaaucccag

SEQ ID NO: 1247759 - RNA, 24 nt, Human
gcuauguugccccaggcuggucuu

SEQ ID NO: 1247760 - RNA, 22 nt, Human
ggagguugcagucaguugagau

SEQ ID NO: 1247761 - RNA, 24 nt, Human
ggagguugcagucaguugagaucg

SEQ ID NO: 1247762 - RNA, 23 nt, Human
ggccggguacaguggcucaugcc

SEQ ID NO: 1247763 - RNA, 18 nt, Human
ggcuggucuugaacuccu

SEQ ID NO: 1247764 - RNA, 25 nt, Human
ggcuguuucauguguuuuauccugu

SEQ ID NO: 1247765 - RNA, 18 nt, Human
gggauccuguuuguggcu

SEQ ID NO: 1247766 - RNA, 28 nt, Human
gggcaugggaggcccagcaagggugugc

SEQ ID NO: 1247767 - RNA, 22 nt, Human
gggcucaaaugauccuccuacc

SEQ ID NO: 1247768 - RNA, 22 nt, Human
gggcucaagugaucuuccugcc

SEQ ID NO: 1247769 - RNA, 20 nt, Human
gguacaguggcucaugccug

SEQ ID NO: 1247770 - RNA, 22 nt, Human
guagagaacagcccagagaacc

SEQ ID NO: 1247771 - RNA, 20 nt, Human
gucaagguccuuccccucca

SEQ ID NO: 1247772 - RNA, 23 nt, Human
gucgccauucaggaugacaaagc

SEQ ID NO: 1247773 - RNA, 20 nt, Human
gucuugaacuccugggcuca

SEQ ID NO: 1247774 - RNA, 23 nt, Human
gugauccucccaccucagccucc

SEQ ID NO: 1247775 - RNA, 21 nt, Human
guuuguggcucccagagucuc

SEQ ID NO: 1247776 - RNA, 21 nt, Human
uaaaaauacaaaaauuagcca

SEQ ID NO: 1247777 - RNA, 25 nt, Human
uaacuuggcugagugcaccagcagg

SEQ ID NO: 1247778 - RNA, 19 nt, Human
uaaguaagcaaacacucuc

SEQ ID NO: 1247779 - RNA, 24 nt, Human
uaauucacggucccgacaucccuc

SEQ ID NO: 1247780 - RNA, 21 nt, Human
uacagcuuagcaaguacuagc

SEQ ID NO: 1247781 - RNA, 25 nt, Human
uacaguggcucaugccuggaauccc

SEQ ID NO: 1247782 - RNA, 18 nt, Human
uagcaaaaauauaaucac

SEQ ID NO: 1247783 - RNA, 21 nt, Human
uagccaggcguggcgggcgcc

SEQ ID NO: 1247784 - RNA, 19 nt, Human
uagccuauguucuucccca

SEQ ID NO: 1247785 - RNA, 24 nt, Human
uagcgcgaucacagcucacuguag

SEQ ID NO: 1247786 - RNA, 21 nt, Human
uagguuaaaagugguaaaaug

SEQ ID NO: 1247787 - RNA, 24 nt, Human
uaucuugcccaagcuggucuugaa

SEQ ID NO: 1247788 - RNA, 25 nt, Human
uauguugccccaggcuggucuugaa

SEQ ID NO: 1247789 - RNA, 21 nt, Human
ucaaaaaaaaaaaaaaaaaaa

SEQ ID NO: 1247790 - RNA, 22 nt, Human
ucaagguccuuccccuccacca

SEQ ID NO: 1247791 - RNA, 24 nt, Human
ucacaaggucaggaguacaagacc

SEQ ID NO: 1247792 - RNA, 24 nt, Human
ucacucugucauccaggcuggagu

SEQ ID NO: 1247793 - RNA, 19 nt, Human
ucacuguagccucaaccuc

SEQ ID NO: 1247794 - RNA, 23 nt, Human
ucacuguagccucaaccucccag

SEQ ID NO: 1247795 - RNA, 18 nt, Human
ucaggacuuucuuugggc

SEQ ID NO: 1247796 - RNA, 24 nt, Human
ucauccaggcuggagugcaguagc

SEQ ID NO: 1247797 - RNA, 23 nt, Human
uccagccugggcaacagagugag

SEQ ID NO: 1247798 - RNA, 24 nt, Human
uccagccugggcaacagagugaga

SEQ ID NO: 1247799 - RNA, 23 nt, Human
ucccaaagugcugggauuaaagg

SEQ ID NO: 1247800 - RNA, 19 nt, Human
ucccaagccuccagagaac

SEQ ID NO: 1247801 - RNA, 23 nt, Human
ucccaggccuagccuauguucuu

SEQ ID NO: 1247802 - RNA, 19 nt, Human
uccccuccaccaugcacac

SEQ ID NO: 1247803 - RNA, 26 nt, Human
uccucccaccucagccuccugaguag

SEQ ID NO: 1247804 - RNA, 24 nt, Human
uccugaguagcugcaacuacaggc

SEQ ID NO: 1247805 - RNA, 22 nt, Human
uccugggcucaaaugauccucc

SEQ ID NO: 1247806 - RNA, 20 nt, Human
uccugggcucaagugaucuu

SEQ ID NO: 1247807 - RNA, 21 nt, Human
uccugggcucaagugaucuuc

SEQ ID NO: 1247808 - RNA, 22 nt, Human
uccugggcucaagugaucuucc

SEQ ID NO: 1247809 - RNA, 24 nt, Human
uccugggcucaagugaucuuccug

SEQ ID NO: 1247810 - RNA, 23 nt, Human
ucgcaccacugcacuccagccug

SEQ ID NO: 1247811 - RNA, 20 nt, Human
ucgguuugagucccagcugg

SEQ ID NO: 1247812 - RNA, 22 nt, Human
ucucaagugauccucccaccuc

SEQ ID NO: 1247813 - RNA, 19 nt, Human
ucucacuaucuugcccaag

SEQ ID NO: 1247814 - RNA, 23 nt, Human
ucucacucugucauccaggcugg

SEQ ID NO: 1247815 - RNA, 24 nt, Human
ucucacucugucauccaggcugga

SEQ ID NO: 1247816 - RNA, 19 nt, Human
ucucccaagccuccagaga

SEQ ID NO: 1247817 - RNA, 20 nt, Human
ucucgcuauguugccccagg

SEQ ID NO: 1247818 - RNA, 24 nt, Human
ucucgcuauguugccccaggcugg

SEQ ID NO: 1247819 - RNA, 25 nt, Human
ucucgcuauguugccccaggcuggu

SEQ ID NO: 1247820 - RNA, 23 nt, Human
ucucuacagcauagaaauugcuu

SEQ ID NO: 1247821 - RNA, 18 nt, Human
ucucugagagaugggguc

SEQ ID NO: 1247822 - RNA, 21 nt, Human
ucugaguuaaggggucaggac

SEQ ID NO: 1247823 - RNA, 18 nt, Human
ucuguagguuaaaagugg

SEQ ID NO: 1247824 - RNA, 24 nt, Human
ucugucauccaggcuggagugcag

SEQ ID NO: 1247825 - RNA, 23 nt, Human
ucugucucaaaaaaaaaaaaaaa

SEQ ID NO: 1247826 - RNA, 22 nt, Human
ucuugaacuccugggcucaagu

SEQ ID NO: 1247827 - RNA, 23 nt, Human
ucuugaacuccugggcucaagug

SEQ ID NO: 1247828 - RNA, 19 nt, Human
ucuuugggcagcccaggcu

SEQ ID NO: 1247829 - RNA, 24 nt, Human
ugaaccugggaggcggagguugca

SEQ ID NO: 1247830 - RNA, 25 nt, Human
ugaacuccugggcucaaaugauccu

SEQ ID NO: 1247831 - RNA, 19 nt, Human
ugacuaccugggcagcuga

SEQ ID NO: 1247832 - RNA, 20 nt, Human
ugagacagggucucacucug

SEQ ID NO: 1247833 - RNA, 22 nt, Human
ugagacagggucucacucuguc

SEQ ID NO: 1247834 - RNA, 18 nt, Human
ugagaccuucccagagag

SEQ ID NO: 1247835 - RNA, 23 nt, Human
ugaggcagauaauugcuugaacc

SEQ ID NO: 1247836 - RNA, 23 nt, Human
ugaggcagauaauugcuugaacc

SEQ ID NO: 1247837 - RNA, 24 nt, Human
ugagugcaccagcaggcaagaggc

SEQ ID NO: 1247838 - RNA, 20 nt, Human
ugcaacuacaggcaucacca

SEQ ID NO: 1247839 - RNA, 24 nt, Human
ugcccaagcuggucuugaacuccu

SEQ ID NO: 1247840 - RNA, 24 nt, Human
ugccuggaaucccagcaauuuggg

SEQ ID NO: 1247841 - RNA, 20 nt, Human
ugcugggauuacaggcauga

SEQ ID NO: 1247842 - RNA, 21 nt, Human
ugcuugaaccugggaggcgga

SEQ ID NO: 1247843 - RNA, 23 nt, Human
uggagggguauaguccagccugg

SEQ ID NO: 1247844 - RNA, 19 nt, Human
uggagugcaguagcgcgau

SEQ ID NO: 1247845 - RNA, 19 nt, Human
uggaugccauucaccauga

SEQ ID NO: 1247846 - RNA, 21 nt, Human
uggcgggcgccuguaauccca

SEQ ID NO: 1247847 - RNA, 22 nt, Human
uggcucaugccuggaaucccag

SEQ ID NO: 1247848 - RNA, 24 nt, Human
uggcucaugccuggaaucccagca

SEQ ID NO: 1247849 - RNA, 20 nt, Human
uggcugagugcaccagcagg

SEQ ID NO: 1247850 - RNA, 21 nt, Human
uggcuguggcaggagguccac

SEQ ID NO: 1247851 - RNA, 22 nt, Human
uggcuguggcaggagguccaca

SEQ ID NO: 1247852 - RNA, 24 nt, Human
ugggaggccaaggcagguggauca

SEQ ID NO: 1247853 - RNA, 19 nt, Human
ugggaggcggagguugcag

SEQ ID NO: 1247854 - RNA, 20 nt, Human
ugggaggcggagguugcagu

SEQ ID NO: 1247855 - RNA, 22 nt, Human
ugggaggcggagguugcaguca

SEQ ID NO: 1247856 - RNA, 26 nt, Human
ugggaggcggagguugcagucaguug

SEQ ID NO: 1247857 - RNA, 22 nt, Human
ugggauuaaagguaugagccac

SEQ ID NO: 1247858 - RNA, 22 nt, Human
ugggauuaaagguaugagccac

SEQ ID NO: 1247859 - RNA, 24 nt, Human
ugggauuaaagguaugagccacug

SEQ ID NO: 1247860 - RNA, 19 nt, Human
ugggauuacaggcaugaac

SEQ ID NO: 1247861 - RNA, 19 nt, Human
ugggauuacaggcaugaac

SEQ ID NO: 1247862 - RNA, 20 nt, Human
ugggauuacaggcaugaacc

SEQ ID NO: 1247863 - RNA, 20 nt, Human
ugggauuacaggcaugaacc

SEQ ID NO: 1247864 - RNA, 20 nt, Human
ugggauuacaggcaugaacc

SEQ ID NO: 1247865 - RNA, 22 nt, Human
ugggauuacaggcaugaaccug

SEQ ID NO: 1247866 - RNA, 23 nt, Human
ugggauuacaggcaugaaccugg

SEQ ID NO: 1247867 - RNA, 21 nt, Human
ugggcaacagagugagacucu

SEQ ID NO: 1247868 - RNA, 24 nt, Human
ugggcucaagugaucuuccugccu

SEQ ID NO: 1247869 - RNA, 24 nt, Human
uggggucucacuaucuugcccaag

SEQ ID NO: 1247870 - RNA, 18 nt, Human
uguagccucaaccuccca

SEQ ID NO: 1247871 - RNA, 19 nt, Human
uguguguguguuugcuuuu

SEQ ID NO: 1247872 - RNA, 22 nt, Human
uguguuugcuuugagacagggu

SEQ ID NO: 1247873 - RNA, 22 nt, Human
uuagccaggcguggcgggcgcc

SEQ ID NO: 1247874 - RNA, 19 nt, Human
uucacggucccgacauccc

SEQ ID NO: 1247875 - RNA, 23 nt, Human
uucuugacuaccugggcagcuga

SEQ ID NO: 1247876 - RNA, 24 nt, Human
uugaaccugggaggcggagguugc

SEQ ID NO: 1247877 - RNA, 24 nt, Human
uugcuugaaccugggaggcggagg

SEQ ID NO: 1247878 - RNA, 19 nt, Human
uuucagagcucacuuccca

SEQ ID NO: 1247879 - RNA, 22 nt, Human
uuucaguuucagagcucacuuc

SEQ ID NO: 1247880 - RNA, 21 nt, Human
uuuguguguguguuugcuuug

SEQ ID NO: 1247881 - RNA, 24 nt, Human
aaacaaguaccaggaagaauuccu

SEQ ID NO: 1247882 - RNA, 22 nt, Human
aaauauacacacaccacaguac

SEQ ID NO: 1247883 - RNA, 21 nt, Human
aagcaccauccggucaaaacc

SEQ ID NO: 1247884 - RNA, 21 nt, Human
aagccucauugagaaaguaac

SEQ ID NO: 1247885 - RNA, 22 nt, Human
acacaccacaguacagguuagc

SEQ ID NO: 1247886 - RNA, 19 nt, Human
acuucaggagaaagagaaa

SEQ ID NO: 1247887 - RNA, 18 nt, Human
agacucccaaaauuagca

SEQ ID NO: 1247888 - RNA, 18 nt, Human
aggagaaagagaaagcua

SEQ ID NO: 1247889 - RNA, 22 nt, Human
aggcccaaaauccggcuugaaa

SEQ ID NO: 1247890 - RNA, 22 nt, Human
auucacuucaggagaaagagaa

SEQ ID NO: 1247891 - RNA, 24 nt, Human
caaaaaaacuaccacaggcuuacc

SEQ ID NO: 1247892 - RNA, 24 nt, Human
caaaaagggauaggcugagucuua

SEQ ID NO: 1247893 - RNA, 27 nt, Human
cacugucagcagaagucagagaaaacc

SEQ ID NO: 1247894 - RNA, 20 nt, Human
cagcagaagucagagaaaac

SEQ ID NO: 1247895 - RNA, 23 nt, Human
ccaggaagaauuccugagagaaa

SEQ ID NO: 1247896 - RNA, 26 nt, Human
cugaaggccuacccaacaguaaccgg

SEQ ID NO: 1247897 - RNA, 25 nt, Human
gaaaacuuaacacugcuuaggaacg

SEQ ID NO: 1247898 - RNA, 20 nt, Human
gaagcaccauccggucaaaa

SEQ ID NO: 1247899 - RNA, 23 nt, Human
gacaaaaguaugcugaaggccua

SEQ ID NO: 1247900 - RNA, 18 nt, Human
gcagaaaauuagaagcac

SEQ ID NO: 1247901 - RNA, 22 nt, Human
gcucugaaaagagccuuugggu

SEQ ID NO: 1247902 - RNA, 21 nt, Human
ggaacggggggcggggagaga

SEQ ID NO: 1247903 - RNA, 25 nt, Human
ggacaaaaguaugcugaaggccuac

SEQ ID NO: 1247904 - RNA, 19 nt, Human
uaagcaaagacucaaguau

SEQ ID NO: 1247905 - RNA, 24 nt, Human
uacaggcaaaacaaguaccaggaa

SEQ ID NO: 1247906 - RNA, 20 nt, Human
uaccaggaagaauuccugag

SEQ ID NO: 1247907 - RNA, 25 nt, Human
uagaagcaccauccggucaaaaccg

SEQ ID NO: 1247908 - RNA, 19 nt, Human
uagcagaaaauuagaagca

SEQ ID NO: 1247909 - RNA, 21 nt, Human
ucaaguauuuuauccugugcu

SEQ ID NO: 1247910 - RNA, 23 nt, Human
ucagagaaaacacuuucucuccc

SEQ ID NO: 1247911 - RNA, 20 nt, Human
ucagaguuuuagccacuguc

SEQ ID NO: 1247912 - RNA, 21 nt, Human
ucuacuacaggcaaaacaagu

SEQ ID NO: 1247913 - RNA, 24 nt, Human
ucucuggcgggcuuucuccagaag

SEQ ID NO: 1247914 - RNA, 19 nt, Human
ugaaaagagccuuugggua

SEQ ID NO: 1247915 - RNA, 22 nt, Human
ugaaaagagccuuuggguaugu

SEQ ID NO: 1247916 - RNA, 21 nt, Human
ugcuuaggaacggggggcggg

SEQ ID NO: 1247917 - RNA, 21 nt, Human
uggacaaaaguaugcugaagg

SEQ ID NO: 1247918 - RNA, 24 nt, Human
uggcgggcuuucuccagaagacuu

SEQ ID NO: 1247919 - RNA, 23 nt, Human
ugggagagcaauacacgaaggaa

SEQ ID NO: 1247920 - RNA, 21 nt, Human
uggguggcucugaaaagagcc

SEQ ID NO: 1247921 - RNA, 19 nt, Human
uguuaagacucccaaaauu

SEQ ID NO: 1247922 - RNA, 21 nt, Human
uucacuuuagccagcaugagc

SEQ ID NO: 1247923 - RNA, 18 nt, Human
uuggguauguaaucagug

SEQ ID NO: 1247924 - RNA, 21 nt, Human
gaaguggcucugaaaagagcc

SEQ ID NO: 1247925 - RNA, 22 nt, Human
ugaaguggcucugaaaagagcc

SEQ ID NO: 1247926 - RNA, 22 nt, Human
augucuacuuucuaucucaaaa

SEQ ID NO: 1247927 - RNA, 22 nt, Human
caaaaugacucgacuaucagau

SEQ ID NO: 1247928 - RNA, 23 nt, Human
cagauaaaacugaacacagcucu

SEQ ID NO: 1247929 - RNA, 18 nt, Human
caucuaccuuacuucugc

SEQ ID NO: 1247930 - RNA, 18 nt, Human
cccgcccaucuaccuuac

SEQ ID NO: 1247931 - RNA, 21 nt, Human
cguaaaaaauucaaucaguaa

SEQ ID NO: 1247932 - RNA, 21 nt, Human
cuaucagauaaaacugaacac

SEQ ID NO: 1247933 - RNA, 23 nt, Human
gaaaagaaccuuuuugguuugga

SEQ ID NO: 1247934 - RNA, 21 nt, Human
uauucugcccucuaacuuuca

SEQ ID NO: 1247935 - RNA, 24 nt, Human
ucaaaacaaugugguguaaaagcc

SEQ ID NO: 1247936 - RNA, 24 nt, Human
ucacccgcccaucuaccuuacuuc

SEQ ID NO: 1247937 - RNA, 23 nt, Human
ucacugcuuguuaucucgcuucu

SEQ ID NO: 1247938 - RNA, 26 nt, Human
ucagauaaaacugaacaacgggggcg

SEQ ID NO: 1247939 - RNA, 18 nt, Human
ucucuugccucacuuuuc

SEQ ID NO: 1247940 - RNA, 20 nt, Human
ucugaaaagaaccuuuuugg

SEQ ID NO: 1247941 - RNA, 18 nt, Human
ugcccucuaacuuucagc

SEQ ID NO: 1247942 - RNA, 18 nt, Human
uguuucagcuguauugca

SEQ ID NO: 1247943 - RNA, 24 nt, Human
uuauucugcccucuaacuuucagc

SEQ ID NO: 1247944 - RNA, 19 nt, Human
uucuuguucacccgcccau

SEQ ID NO: 1247945 - RNA, 23 nt, Human
aaaacaccaaggaguuuuccagg

SEQ ID NO: 1247946 - RNA, 18 nt, Human
aacacagugaaaccccau

SEQ ID NO: 1247947 - RNA, 19 nt, Human
aacacagugaaaccccauc

SEQ ID NO: 1247948 - RNA, 23 nt, Human
aacacagugaaaccccaucggua

SEQ ID NO: 1247949 - RNA, 18 nt, Human
aacccauuuuauguuagc

SEQ ID NO: 1247950 - RNA, 23 nt, Human
aaggcgggcggaucacgagguca

SEQ ID NO: 1247951 - RNA, 28 nt, Human
aauaaacaacagaaggauauaucauaac

SEQ ID NO: 1247952 - RNA, 28 nt, Human
aauaaacaacagaaggauauaucauaac

SEQ ID NO: 1247953 - RNA, 18 nt, Human
aauaagugaaugcccccc

SEQ ID NO: 1247954 - RNA, 24 nt, Human
aaugauagaaccaaacauuaaaaa

SEQ ID NO: 1247955 - RNA, 24 nt, Human
acgcggcaagacuccgucucgaaa

SEQ ID NO: 1247956 - RNA, 18 nt, Human
acuccagccugggagacg

SEQ ID NO: 1247957 - RNA, 18 nt, Human
acugcacuccagccuggg

SEQ ID NO: 1247958 - RNA, 18 nt, Human
acugcacuccagccuggg

SEQ ID NO: 1247959 - RNA, 18 nt, Human
agaacaggugacugucug

SEQ ID NO: 1247960 - RNA, 19 nt, Human
agaaccaaacauuaaaaag

SEQ ID NO: 1247961 - RNA, 20 nt, Human
agacaggaagggggauguag

SEQ ID NO: 1247962 - RNA, 19 nt, Human
agcuacucaggaggcuggg

SEQ ID NO: 1247963 - RNA, 19 nt, Human
aggaagacgguagcucugu

SEQ ID NO: 1247964 - RNA, 21 nt, Human
aggagaauggccuaaaccccg

SEQ ID NO: 1247965 - RNA, 21 nt, Human
aggccaaggcgggcggaucac

SEQ ID NO: 1247966 - RNA, 23 nt, Human
aggccaaggcgggcggaucacga

SEQ ID NO: 1247967 - RNA, 21 nt, Human
aggcggagcuugcagugagcc

SEQ ID NO: 1247968 - RNA, 24 nt, Human
aggcggagcuugcagugagccgag

SEQ ID NO: 1247969 - RNA, 18 nt, Human
aggcgggcggaucacgag

SEQ ID NO: 1247970 - RNA, 24 nt, Human
aggcgggcggaucacgaggucagg

SEQ ID NO: 1247971 - RNA, 19 nt, Human
aggcuggggcaggagaaug

SEQ ID NO: 1247972 - RNA, 20 nt, Human
aucacgaggucaggagaucc

SEQ ID NO: 1247973 - RNA, 24 nt, Human
aucgcgccacugcacuccagccug

SEQ ID NO: 1247974 - RNA, 22 nt, Human
augaaggagaaagauuucuuug

SEQ ID NO: 1247975 - RNA, 23 nt, Human
augaaugggcccuccaaagaaca

SEQ ID NO: 1247976 - RNA, 21 nt, Human
caaaacaaaguaaauggaucu

SEQ ID NO: 1247977 - RNA, 22 nt, Human
caaaacaaaguaaauggaucug

SEQ ID NO: 1247978 - RNA, 21 nt, Human
caacuuccagucuccucuccu

SEQ ID NO: 1247979 - RNA, 19 nt, Human
caaucccuagacaucaaca

SEQ ID NO: 1247980 - RNA, 26 nt, Human
caauccuagacaucaacagcaaaaca

SEQ ID NO: 1247981 - RNA, 20 nt, Human
cacaaaugaacauuacuagu

SEQ ID NO: 1247982 - RNA, 24 nt, Human
cacgccuguaaucccagcacuuug

SEQ ID NO: 1247983 - RNA, 18 nt, Human
cacugcacuccagccugg

SEQ ID NO: 1247984 - RNA, 19 nt, Human
cacugcacuccagccuggg

SEQ ID NO: 1247985 - RNA, 22 nt, Human
cacugcacuccagccugggaga

SEQ ID NO: 1247986 - RNA, 27 nt, Human
cacugcacuccagccugggagacgcgg

SEQ ID NO: 1247987 - RNA, 24 nt, Human
cagcacuuugggaggccaaggcgg

SEQ ID NO: 1247988 - RNA, 23 nt, Human
cagcaguucuugaaccuucuggu

SEQ ID NO: 1247989 - RNA, 24 nt, Human
cagcuacucaggaggcuggggcag

SEQ ID NO: 1247990 - RNA, 22 nt, Human
caugguggcgggcgccuguagu

SEQ ID NO: 1247991 - RNA, 19 nt, Human
ccacugcacuccagccugg

SEQ ID NO: 1247992 - RNA, 20 nt, Human
ccacugcacuccagccuggg

SEQ ID NO: 1247993 - RNA, 21 nt, Human
ccacugcacuccagccuggga

SEQ ID NO: 1247994 - RNA, 22 nt, Human
ccacugcacuccagccugggag

SEQ ID NO: 1247995 - RNA, 24 nt, Human
ccacugcacuccagccugggagac

SEQ ID NO: 1247996 - RNA, 21 nt, Human
ccagcaaugacagucauuaaa

SEQ ID NO: 1247997 - RNA, 24 nt, Human
ccuagcuaacacagugaaacccca

SEQ ID NO: 1247998 - RNA, 19 nt, Human
ccuguagucccagcuacuc

SEQ ID NO: 1247999 - RNA, 21 nt, Human
ccuguagucccagcuacucag

SEQ ID NO: 1248000 - RNA, 24 nt, Human
cgagaccauccuagcuaacacagu

SEQ ID NO: 1248001 - RNA, 23 nt, Human
cgccuguaaucccagcacuuugg

SEQ ID NO: 1248002 - RNA, 24 nt, Human
cgccuguaaucccagcacuuuggg

SEQ ID NO: 1248003 - RNA, 24 nt, Human
cgccuguagucccagcuacucagg

SEQ ID NO: 1248004 - RNA, 20 nt, Human
cgggcggaucacgaggucau

SEQ ID NO: 1248005 - RNA, 24 nt, Human
cgguagaaacaaauauuaaaaagu

SEQ ID NO: 1248006 - RNA, 23 nt, Human
cuagcuaacacagugaaacccca

SEQ ID NO: 1248007 - RNA, 22 nt, Human
cucacgccuguaaucccagcac

SEQ ID NO: 1248008 - RNA, 24 nt, Human
cucacgccuguaaucccagcacuu

SEQ ID NO: 1248009 - RNA, 25 nt, Human
cuccaaagaacaggugacugucugu

SEQ ID NO: 1248010 - RNA, 23 nt, Human
cugaaaacacaaaaaaauuagcc

SEQ ID NO: 1248011 - RNA, 21 nt, Human
cuucuggucucaugacccacu

SEQ ID NO: 1248012 - RNA, 19 nt, Human
cuugcagugagccgagauc

SEQ ID NO: 1248013 - RNA, 21 nt, Human
cuugcagugagccgagaucgc

SEQ ID NO: 1248014 - RNA, 23 nt, Human
gaaaaaaacaggaagacgguagc

SEQ ID NO: 1248015 - RNA, 21 nt, Human
gacagucauuaaaauaaaaua

SEQ ID NO: 1248016 - RNA, 21 nt, Human
gacgcggcaagacuccgucuc

SEQ ID NO: 1248017 - RNA, 23 nt, Human
gagaucgcgccacugcacuccag

SEQ ID NO: 1248018 - RNA, 23 nt, Human
gagcuugcagugagccgagaucg

SEQ ID NO: 1248019 - RNA, 18 nt, Human
gaggcuggggcaggagaa

SEQ ID NO: 1248020 - RNA, 21 nt, Human
gcagaugauaauuugaggaug

SEQ ID NO: 1248021 - RNA, 20 nt, Human
gccgagaucgcgccacugca

SEQ ID NO: 1248022 - RNA, 23 nt, Human
gccuguagucccagcuacucagg

SEQ ID NO: 1248023 - RNA, 20 nt, Human
ggaaaauuggaggaaaaaaa

SEQ ID NO: 1248024 - RNA, 24 nt, Human
ggagcuugcagugagccgagaucg

SEQ ID NO: 1248025 - RNA, 21 nt, Human
ggcggaucacgaggucaggag

SEQ ID NO: 1248026 - RNA, 23 nt, Human
ggcgugguggcucacgccuguaa

SEQ ID NO: 1248027 - RNA, 24 nt, Human
gggcaugguggcgggcgccuguag

SEQ ID NO: 1248028 - RNA, 24 nt, Human
gguggcgggcgccuguagucccag

SEQ ID NO: 1248029 - RNA, 24 nt, Human
gguggcucacgccuguaaucccag

SEQ ID NO: 1248030 - RNA, 21 nt, Human
guggccgggcgugguggcuca

SEQ ID NO: 1248031 - RNA, 20 nt, Human
uaaaaagagugacacuguuu

SEQ ID NO: 1248032 - RNA, 26 nt, Human
uaaaccccggaggcggagcuugcagg

SEQ ID NO: 1248033 - RNA, 22 nt, Human
uaacaguaauaaacccauuuua

SEQ ID NO: 1248034 - RNA, 20 nt, Human
uaagagaggcuauuaggaug

SEQ ID NO: 1248035 - RNA, 21 nt, Human
uaaggcagcaguucuugaacc

SEQ ID NO: 1248036 - RNA, 23 nt, Human
uaagugaaugccccccaagccca

SEQ ID NO: 1248037 - RNA, 22 nt, Human
uagcaugaaggagaaagauuuc

SEQ ID NO: 1248038 - RNA, 20 nt, Human
uaggggagaggaaauuauuu

SEQ ID NO: 1248039 - RNA, 18 nt, Human
ucacgaggucaggagauc

SEQ ID NO: 1248040 - RNA, 24 nt, Human
ucacgaggucaggagaucgagacc

SEQ ID NO: 1248041 - RNA, 23 nt, Human
ucgcgccacugcacuccagccug

SEQ ID NO: 1248042 - RNA, 25 nt, Human
ugaaaaauaagugaaugccccccaa

SEQ ID NO: 1248043 - RNA, 25 nt, Human
ugaaaaauagucauuugaacacaaa

SEQ ID NO: 1248044 - RNA, 19 nt, Human
ugaaaccccaucgguacug

SEQ ID NO: 1248045 - RNA, 22 nt, Human
ugagccgagaucgcgccacugc

SEQ ID NO: 1248046 - RNA, 22 nt, Human
ugcagaugauaauuugaggaug

SEQ ID NO: 1248047 - RNA, 22 nt, Human
uggcucacgccuguaaucccag

SEQ ID NO: 1248048 - RNA, 24 nt, Human
uggcucacgccuguaaucccagca

SEQ ID NO: 1248049 - RNA, 19 nt, Human
ugggaaagaugaaugggcc

SEQ ID NO: 1248050 - RNA, 24 nt, Human
ugggaggccaaggcgggcggauca

SEQ ID NO: 1248051 - RNA, 18 nt, Human
uggggcaggagaauggcc

SEQ ID NO: 1248052 - RNA, 24 nt, Human
uggggcaggagaauggccuaaacc

SEQ ID NO: 1248053 - RNA, 24 nt, Human
ugguggcgggcgccuguaguccca

SEQ ID NO: 1248054 - RNA, 24 nt, Human
ugguggcucacgccuguaauccca

SEQ ID NO: 1248055 - RNA, 20 nt, Human
uguagguuauaacuauugac

SEQ ID NO: 1248056 - RNA, 24 nt, Human
uguggccgggcgugguggcucacg

SEQ ID NO: 1248057 - RNA, 18 nt, Human
uuagccgggcaugguggc

SEQ ID NO: 1248058 - RNA, 18 nt, Human
uugcagugagccgagauc

SEQ ID NO: 1248059 - RNA, 22 nt, Human
uugcagugagccgagaucgcgc

SEQ ID NO: 1248060 - RNA, 21 nt, Human
uuugaaccuugaucuauagca

SEQ ID NO: 1248061 - RNA, 19 nt, Human
uuugugcauggagguauca

SEQ ID NO: 1248062 - RNA, 18 nt, Human
gcccugagaagggccuuu

SEQ ID NO: 1248063 - RNA, 18 nt, Human
ugagaagggccuuugagg

SEQ ID NO: 1248064 - RNA, 20 nt, Human
aaaagcaucuccauuuauac

SEQ ID NO: 1248065 - RNA, 30 nt, Human; identical to SEQ ID NO: 1146352

SEQ ID NO: 1248066 - RNA, 20 nt, Human
aaacaaaaaaggggugcacg

SEQ ID NO: 1248067 - RNA, 22 nt, Human
aaacaaaaaugaaaagcaucuc

SEQ ID NO: 1248068 - RNA, 21 nt, Human
aaacacacaaaaaagcaaacu

SEQ ID NO: 1248069 - RNA, 23 nt, Human
aacaaaaaugaaaagcaucucca

SEQ ID NO: 1248070 - RNA, 22 nt, Human
aacaagaaucacaggaacucac

SEQ ID NO: 1248071 - RNA, 24 nt, Human
aagcaaacuguaaugagcagugac

SEQ ID NO: 1248072 - RNA, 23 nt, Human
aagccaauauggaaauuaaaaua

SEQ ID NO: 1248073 - RNA, 19 nt, Human
aagcgaacaagaaucacag

SEQ ID NO: 1248074 - RNA, 21 nt, Human
aagcgaacaagaaucacagga

SEQ ID NO: 1248075 - RNA, 28 nt, Human
aauccucucccccaaaacaaaaagcaaa

SEQ ID NO: 1248076 - RNA, 21 nt, Human
acaaacccaguccaaacaaaa

SEQ ID NO: 1248077 - RNA, 23 nt, Human
acacaccuaccuacagacauaca

SEQ ID NO: 1248078 - RNA, 20 nt, Human
accccaaagaaaaacaaaaa

SEQ ID NO: 1248079 - RNA, 22 nt, Human
accccaaagaaaaacaaaaagg

SEQ ID NO: 1248080 - RNA, 19 nt, Human
acccuaagugcuaagaaag

SEQ ID NO: 1248081 - RNA, 22 nt, Human
acgaaacucccagcuuccuaaa

SEQ ID NO: 1248082 - RNA, 22 nt, Human
acuaugugccaagcacugugcu

SEQ ID NO: 1248083 - RNA, 19 nt, Human
acucacccucagcuucacg

SEQ ID NO: 1248084 - RNA, 24 nt, Human
agaauccugcauuacuuaaccccc

SEQ ID NO: 1248085 - RNA, 20 nt, Human
agcaaacacacaaaaaagca

SEQ ID NO: 1248086 - RNA, 23 nt, Human
aggaaacaaauaucacuaaagaa

SEQ ID NO: 1248087 - RNA, 22 nt, Human
agggagcgucugguguccagcu

SEQ ID NO: 1248088 - RNA, 22 nt, Human
agucccaagguagacccaaagg

SEQ ID NO: 1248089 - RNA, 21 nt, Human
auaaaacuuugaauccaucag

SEQ ID NO: 1248090 - RNA, 23 nt, Human
aucaagaauuuuuggccagaggu

SEQ ID NO: 1248091 - RNA, 21 nt, Human
auccucucccccaaaacaaaa

SEQ ID NO: 1248092 - RNA, 24 nt, Human
augaaaagcaucuccauuuauaca

SEQ ID NO: 1248093 - RNA, 21 nt, Human
augauucugccucagccacac

SEQ ID NO: 1248094 - RNA, 22 nt, Human
caaaaaccccaaagaaaaacaa

SEQ ID NO: 1248095 - RNA, 22 nt, Human
caaaaaggcacaucaaggaaac

SEQ ID NO: 1248096 - RNA, 20 nt, Human
caaacacacaaaaaagcaaa

SEQ ID NO: 1248097 - RNA, 18 nt, Human
caaacccaguccaaacaa

SEQ ID NO: 1248098 - RNA, 27 nt, Human
caaccagcagucccaagguagacccaa

SEQ ID NO: 1248099 - RNA, 21 nt, Human
caagacucuacagcuaauuug

SEQ ID NO: 1248100 - RNA, 23 nt, Human
caagcuagguaaaccaccuugga

SEQ ID NO: 1248101 - RNA, 21 nt, Human
caaggcuucacacccuccucu

SEQ ID NO: 1248102 - RNA, 23 nt, Human
caauauggaaauuaaaauacuuu

SEQ ID NO: 1248103 - RNA, 19 nt, Human
cacaaaaucugggcuacag

SEQ ID NO: 1248104 - RNA, 22 nt, Human
cacaaacccaguccaaacaaaa

SEQ ID NO: 1248105 - RNA, 18 nt, Human
cacacccuccucuguggg

SEQ ID NO: 1248106 - RNA, 21 nt, Human
cacagcaaacacacaaaaaag

SEQ ID NO: 1248107 - RNA, 23 nt, Human
cacagcaaacacacaaaaaagca

SEQ ID NO: 1248108 - RNA, 26 nt, Human
cacaugcauacacgcuauggccuggc

SEQ ID NO: 1248109 - RNA, 21 nt, Human
cacugaauccucacaaaaccc

SEQ ID NO: 1248110 - RNA, 19 nt, Human
cacugggcuccacucccaa

SEQ ID NO: 1248111 - RNA, 24 nt, Human
cagcagucccaagguagacccaaa

SEQ ID NO: 1248112 - RNA, 22 nt, Human
cagcauccggauuccaaaaacc

SEQ ID NO: 1248113 - RNA, 24 nt, Human
cagcauccggauuccaaaaacccc

SEQ ID NO: 1248114 - RNA, 18 nt, Human
cagccacaccucagcaag

SEQ ID NO: 1248115 - RNA, 21 nt, Human
cagccucuaggagcuguucug

SEQ ID NO: 1248116 - RNA, 21 nt, Human
cagcuggcagggugggguugg

SEQ ID NO: 1248117 - RNA, 22 nt, Human
cagcuucacgaaacucccagcu

SEQ ID NO: 1248118 - RNA, 19 nt, Human
cagggcaggagauaaggag

SEQ ID NO: 1248119 - RNA, 22 nt, Human
caguauguggcuagccaaaggu

SEQ ID NO: 1248120 - RNA, 24 nt, Human
ccaaaaaccccaaagaaaaacaaa

SEQ ID NO: 1248121 - RNA, 18 nt, Human
ccaaaacaaaaagcaaac

SEQ ID NO: 1248122 - RNA, 21 nt, Human
ccaaagaaaaacaaaaaggca

SEQ ID NO: 1248123 - RNA, 23 nt, Human
ccaaagaaaaacaaaaaggcaca

SEQ ID NO: 1248124 - RNA, 20 nt, Human
ccacaaaaucugggcuacag

SEQ ID NO: 1248125 - RNA, 25 nt, Human
ccacaccucagcaaguggugggaac

SEQ ID NO: 1248126 - RNA, 20 nt, Human
ccaccuuggagaaauggggu

SEQ ID NO: 1248127 - RNA, 21 nt, Human
ccagccguggggucagggugg

SEQ ID NO: 1248128 - RNA, 24 nt, Human
ccccaaagaaaaacaaaaaggcac

SEQ ID NO: 1248129 - RNA, 19 nt, Human
ccccauugcccccagcugg

SEQ ID NO: 1248130 - RNA, 21 nt, Human
ccccauugcccccagcuggca

SEQ ID NO: 1248131 - RNA, 20 nt, Human
cccccaaaacaaaaagcaaa

SEQ ID NO: 1248132 - RNA, 22 nt, Human
cccccaaaacaaaaagcaaacc

SEQ ID NO: 1248133 - RNA, 19 nt, Human
cccuaagugcuaagaaagc

SEQ ID NO: 1248134 - RNA, 24 nt, Human
cccuaagugcuaagaaagcuaggg

SEQ ID NO: 1248135 - RNA, 24 nt, Human
ccuacagacauacaguuucagucc

SEQ ID NO: 1248136 - RNA, 24 nt, Human
ccucacaaaacccuaagugcuaag

SEQ ID NO: 1248137 - RNA, 20 nt, Human
ccuuggagaaaugggguggc

SEQ ID NO: 1248138 - RNA, 23 nt, Human
ccuuguuuccuugggggcugaag

SEQ ID NO: 1248139 - RNA, 23 nt, Human
cggauuccaaaaaccccaaagaa

SEQ ID NO: 1248140 - RNA, 23 nt, Human
cggcgacaccuuguuugcagaau

SEQ ID NO: 1248141 - RNA, 19 nt, Human
cuaaaaggcacacaccuac

SEQ ID NO: 1248142 - RNA, 22 nt, Human
cuaaauccucucccccaaaaca

SEQ ID NO: 1248143 - RNA, 21 nt, Human
cuacaacaguggaaaacaaag

SEQ ID NO: 1248144 - RNA, 23 nt, Human
cuccagccguggggucagggugg

SEQ ID NO: 1248145 - RNA, 18 nt, Human
cugccagagaacccauuu

SEQ ID NO: 1248146 - RNA, 18 nt, Human
gagaggccaaaaucccug

SEQ ID NO: 1248147 - RNA, 25 nt, Human
gcacagcaaacacacaaaaaagcaa

SEQ ID NO: 1248148 - RNA, 23 nt, Human
gccacaccucagcaagugcgugg

SEQ ID NO: 1248149 - RNA, 23 nt, Human
gcccccagcuggcaggguggggu

SEQ ID NO: 1248150 - RNA, 24 nt, Human
gcggaacagaauccaaaggaauuu

SEQ ID NO: 1248151 - RNA, 21 nt, Human
gcugcacugggcuccacuccc

SEQ ID NO: 1248152 - RNA, 20 nt, Human
ggagcuguucugagaggcca

SEQ ID NO: 1248153 - RNA, 22 nt, Human
ggccgagaacugggcuacucua

SEQ ID NO: 1248154 - RNA, 20 nt, Human
ggcuaaauccucucccccaa

SEQ ID NO: 1248155 - RNA, 19 nt, Human
gggaauguguaaguucaau

SEQ ID NO: 1248156 - RNA, 23 nt, Human
ggguggcagggaacacaggcugg

SEQ ID NO: 1248157 - RNA, 21 nt, Human
gugccaagacagggcaggaga

SEQ ID NO: 1248158 - RNA, 23 nt, Human
uaaaaggcacacaccuaccuaca

SEQ ID NO: 1248159 - RNA, 18 nt, Human
uaaaguauuucuucucca

SEQ ID NO: 1248160 - RNA, 27 nt, Human
uaaauccucucccccaaaacaaaaagc

SEQ ID NO: 1248161 - RNA, 24 nt, Human
uaacccccgaagugaaucacacaa

SEQ ID NO: 1248162 - RNA, 18 nt, Human
uacagagaugcuuugcag

SEQ ID NO: 1248163 - RNA, 19 nt, Human
uacaguuucaguccaacac

SEQ ID NO: 1248164 - RNA, 19 nt, Human
uacauuuggacggcgacac

SEQ ID NO: 1248165 - RNA, 24 nt, Human
uacuaugugccaagcacugugcua

SEQ ID NO: 1248166 - RNA, 22 nt, Human
uagacccaaagguauggcagaa

SEQ ID NO: 1248167 - RNA, 22 nt, Human
uagguaaaccaccuuggagaaa

SEQ ID NO: 1248168 - RNA, 22 nt, Human
uauaaaaacuuggucucccacu

SEQ ID NO: 1248169 - RNA, 23 nt, Human
uauggaaauuaaaauacuuuuaa

SEQ ID NO: 1248170 - RNA, 19 nt, Human
uauugcccuucaacagcau

SEQ ID NO: 1248171 - RNA, 22 nt, Human
ucacaggaacucacccucagcu

SEQ ID NO: 1248172 - RNA, 23 nt, Human
ucacuaaagaaacugacuaauau

SEQ ID NO: 1248173 - RNA, 24 nt, Human
ucagcucuauuucucaaguuuuac

SEQ ID NO: 1248174 - RNA, 22 nt, Human
ucagggaaguaagaggcuaaau

SEQ ID NO: 1248175 - RNA, 22 nt, Human
ucauacugaugucaacccuguc

SEQ ID NO: 1248176 - RNA, 23 nt, Human
uccaaaaaccccaaagaaaaaca

SEQ ID NO: 1248177 - RNA, 25 nt, Human
uccaaaaaccccaaagaaaaacaaa

SEQ ID NO: 1248178 - RNA, 26 nt, Human
uccaaaaaccccaaagaaaaacaaaa

SEQ ID NO: 1248179 - RNA, 25 nt, Human
uccaaaggaauuugacgaagucacc

SEQ ID NO: 1248180 - RNA, 20 nt, Human
uccacaaaaucugggcuaca

SEQ ID NO: 1248181 - RNA, 24 nt, Human
uccacaaaaucugggcuacagaga

SEQ ID NO: 1248182 - RNA, 18 nt, Human
uccacaccugcaaucuau

SEQ ID NO: 1248183 - RNA, 19 nt, Human
uccacagggauggauggga

SEQ ID NO: 1248184 - RNA, 25 nt, Human
ucccccaaaacaaaaagcaaaccga

SEQ ID NO: 1248185 - RNA, 20 nt, Human
ucccugaggacaggaggggc

SEQ ID NO: 1248186 - RNA, 22 nt, Human
uccuuggaugcacccauucaca

SEQ ID NO: 1248187 - RNA, 23 nt, Human
ucucaaggcuucacacccuccuc

SEQ ID NO: 1248188 - RNA, 19 nt, Human
ucuccaaacgcacagcaaa

SEQ ID NO: 1248189 - RNA, 19 nt, Human
ucuccaagcagggcccuga

SEQ ID NO: 1248190 - RNA, 18 nt, Human
ucugaaagacgucagugg

SEQ ID NO: 1248191 - RNA, 22 nt, Human
ucugcuauugcccuucaacagc

SEQ ID NO: 1248192 - RNA, 25 nt, Human
ugaagcgaacaagaaucacaggaac

SEQ ID NO: 1248193 - RNA, 23 nt, Human
ugaaucacacaaaauggcuguaa

SEQ ID NO: 1248194 - RNA, 18 nt, Human
ugaauccucacaaaaccc

SEQ ID NO: 1248195 - RNA, 19 nt, Human
ugacacguuggcaaccagc

SEQ ID NO: 1248196 - RNA, 22 nt, Human
ugacuaauaucuccaaacgcac

SEQ ID NO: 1248197 - RNA, 19 nt, Human
ugaggacaggaggggccac

SEQ ID NO: 1248198 - RNA, 25 nt, Human
ugagggagugucuuaaggcuccaca

SEQ ID NO: 1248199 - RNA, 21 nt, Human
ugaugucaacccugucaguga

SEQ ID NO: 1248200 - RNA, 19 nt, Human
ugcacguucuuucccuuuc

SEQ ID NO: 1248201 - RNA, 20 nt, Human
ugcagccuuguuuccuuggg

SEQ ID NO: 1248202 - RNA, 19 nt, Human
ugcccccagcuggcagggu

SEQ ID NO: 1248203 - RNA, 19 nt, Human
ugccucagccacaccucag

SEQ ID NO: 1248204 - RNA, 21 nt, Human
ugcuaaaguauuucuucucca

SEQ ID NO: 1248205 - RNA, 20 nt, Human
ugcuauugcccuucaacagc

SEQ ID NO: 1248206 - RNA, 20 nt, Human
uggaaaacaaagcagugcuc

SEQ ID NO: 1248207 - RNA, 19 nt, Human
uggaaacaugcagaacuaa

SEQ ID NO: 1248208 - RNA, 27 nt, Human
uggcagggugggguugguuuucucccc

SEQ ID NO: 1248209 - RNA, 19 nt, Human
uggcauugagggagugucu

SEQ ID NO: 1248210 - RNA, 27 nt, Human
uggccagaggugaggguggucgacacg

SEQ ID NO: 1248211 - RNA, 24 nt, Human
ugggguaagguccaguauguggcu

SEQ ID NO: 1248212 - RNA, 24 nt, Human
ugggguugguuuucuccaggaggc

SEQ ID NO: 1248213 - RNA, 24 nt, Human
uguaaugagcagugacacaaaccc

SEQ ID NO: 1248214 - RNA, 22 nt, Human
uguccauccgucuacucacaug

SEQ ID NO: 1248215 - RNA, 23 nt, Human
uucaacagcauccggauuccaaa

SEQ ID NO: 1248216 - RNA, 20 nt, Human
uucacuuuuauuaaaucuug

SEQ ID NO: 1248217 - RNA, 23 nt, Human
uuccaaaaaccccaaagaaaaac

SEQ ID NO: 1248218 - RNA, 20 nt, Human
uuccuugaggaaaacccuug

SEQ ID NO: 1248219 - RNA, 22 nt, Human
uuccuugggggcugaagucugg

SEQ ID NO: 1248220 - RNA, 21 nt, Human
uuggagaaaugggguggccac

SEQ ID NO: 1248221 - RNA, 21 nt, Human
uuuggccagaggugagggugg

SEQ ID NO: 1248222 - RNA, 20 nt, Human
aaaaacaaaacaaaagccug

SEQ ID NO: 1248223 - RNA, 18 nt, Human
aaaaauagcagcaggaac

SEQ ID NO: 1248224 - RNA, 21 nt, Human
aaacaaaagccugaagcuagu

SEQ ID NO: 1248225 - RNA, 23 nt, Human
aaacaaaagccugaagcuagugc

SEQ ID NO: 1248226 - RNA, 26 nt, Human
aaacaugaaggagacacagucccugg

SEQ ID NO: 1248227 - RNA, 24 nt, Human
aaaccagaaauuggcaaaaaaaaa

SEQ ID NO: 1248228 - RNA, 22 nt, Human
aaaccugcuggcuggccuuuga

SEQ ID NO: 1248229 - RNA, 24 nt, Human
aaagugccgggauuacagguguga

SEQ ID NO: 1248230 - RNA, 18 nt, Human
aaagugugggauuacagg

SEQ ID NO: 1248231 - RNA, 18 nt, Human
aaaugcccaaauaggaug

SEQ ID NO: 1248232 - RNA, 22 nt, Human
aacaaaaagucuaauaaccaac

SEQ ID NO: 1248233 - RNA, 18 nt, Human
aacaaggcaggcaaaccc

SEQ ID NO: 1248234 - RNA, 19 nt, Human
aacagaagggccagucaga

SEQ ID NO: 1248235 - RNA, 19 nt, Human
aacagucugaagccuuagu

SEQ ID NO: 1248236 - RNA, 19 nt, Human
aacauggcgcuuugcagau

SEQ ID NO: 1248237 - RNA, 22 nt, Human
aacccacuguugcccuccacuc

SEQ ID NO: 1248238 - RNA, 19 nt, Human
aaccccucaccccacccac

SEQ ID NO: 1248239 - RNA, 22 nt, Human
aacuccuagccucaggggauuc

SEQ ID NO: 1248240 - RNA, 20 nt, Human
aacucuuucacagaguuacu

SEQ ID NO: 1248241 - RNA, 23 nt, Human
aacuggauaacuucugcagccuu

SEQ ID NO: 1248242 - RNA, 22 nt, Human
aagaacacagguucaaauauaa

SEQ ID NO: 1248243 - RNA, 18 nt, Human
aagaaggagcaaagcaaa

SEQ ID NO: 1248244 - RNA, 21 nt, Human
aagaaugaaagcacacaguga

SEQ ID NO: 1248245 - RNA, 19 nt, Human
aagacucuuuagaaacuug

SEQ ID NO: 1248246 - RNA, 18 nt, Human
aaggcaucacugaaaugg

SEQ ID NO: 1248247 - RNA, 21 nt, Human
aaggggccagagaaggggagg

SEQ ID NO: 1248248 - RNA, 24 nt, Human
aaguagaaaaggaaacuauucuaa

SEQ ID NO: 1248249 - RNA, 26 nt, Human
aagugccgggauuacaggugugagcc

SEQ ID NO: 1248250 - RNA, 21 nt, Human
aauccugcagcugaacacugg

SEQ ID NO: 1248251 - RNA, 19 nt, Human
aauguuccaagguugacca

SEQ ID NO: 1248252 - RNA, 24 nt, Human
aauugcuugaacccgggaggcaga

SEQ ID NO: 1248253 - RNA, 24 nt, Human
acaagccugcuuagaacacagaac

SEQ ID NO: 1248254 - RNA, 24 nt, Human
acacagccaacccugaagaagagg

SEQ ID NO: 1248255 - RNA, 24 nt, Human
acagagcgagacucugugucaaaa

SEQ ID NO: 1248256 - RNA, 18 nt, Human
acagguguaagccaccau

SEQ ID NO: 1248257 - RNA, 20 nt, Human
accccacccacugcagccaa

SEQ ID NO: 1248258 - RNA, 23 nt, Human
accucaaccucccaaagugccgg

SEQ ID NO: 1248259 - RNA, 18 nt, Human
acgagguuuugccauguu

SEQ ID NO: 1248260 - RNA, 20 nt, Human
acgagguuuugccauguugg

SEQ ID NO: 1248261 - RNA, 24 nt, Human
acgagguuuugccauguuggccag

SEQ ID NO: 1248262 - RNA, 24 nt, Human
acggagucucgcugugucacccag

SEQ ID NO: 1248263 - RNA, 18 nt, Human
acgggguuucgccauguu

SEQ ID NO: 1248264 - RNA, 20 nt, Human
acgggguuucgccauguuug

SEQ ID NO: 1248265 - RNA, 24 nt, Human
acgggguuucgccauguuugccag

SEQ ID NO: 1248266 - RNA, 18 nt, Human
acugagacccugagacag

SEQ ID NO: 1248267 - RNA, 18 nt, Human
acugcucuccagccuggg

SEQ ID NO: 1248268 - RNA, 24 nt, Human
acugcucuccagccugggcgacag

SEQ ID NO: 1248269 - RNA, 18 nt, Human
acuuggugcuagcuucuc

SEQ ID NO: 1248270 - RNA, 21 nt, Human
agaaaagcauaagggcucaga

SEQ ID NO: 1248271 - RNA, 19 nt, Human
agaaaccccucaccccacc

SEQ ID NO: 1248272 - RNA, 20 nt, Human
agaaaccccucaccccaccc

SEQ ID NO: 1248273 - RNA, 18 nt, Human
agacagaagacccucaaa

SEQ ID NO: 1248274 - RNA, 18 nt, Human
agacagcaugacuguaca

SEQ ID NO: 1248275 - RNA, 23 nt, Human
agacaggaagcugccgcaacagc

SEQ ID NO: 1248276 - RNA, 24 nt, Human
agacaggagaauugcuugaacccg

SEQ ID NO: 1248277 - RNA, 21 nt, Human
agacggaacaauguucuaaac

SEQ ID NO: 1248278 - RNA, 19 nt, Human
agacugccugguggacucu

SEQ ID NO: 1248279 - RNA, 19 nt, Human
agagcucagacugccuggu

SEQ ID NO: 1248280 - RNA, 23 nt, Human
agagggcuaaguggugugugaag

SEQ ID NO: 1248281 - RNA, 19 nt, Human
agcaaagcagcagcagaga

SEQ ID NO: 1248282 - RNA, 24 nt, Human
agcaggcgcuucuggguagcuugg

SEQ ID NO: 1248283 - RNA, 19 nt, Human
agccccugucauagcuucu

SEQ ID NO: 1248284 - RNA, 18 nt, Human
agccugcucaaccuguaa

SEQ ID NO: 1248285 - RNA, 18 nt, Human
agccugcuuagaacacag

SEQ ID NO: 1248286 - RNA, 24 nt, Human
agccugggcgacagagcgagacuc

SEQ ID NO: 1248287 - RNA, 21 nt, Human
agcugugggacuucauagaug

SEQ ID NO: 1248288 - RNA, 22 nt, Human
aggaaccacaaaucccugccuu

SEQ ID NO: 1248289 - RNA, 19 nt, Human
aggaagcagcacaaagguu

SEQ ID NO: 1248290 - RNA, 24 nt, Human
aggaagcagcacaaagguuaacac

SEQ ID NO: 1248291 - RNA, 21 nt, Human
aggagcaaagcaaaacccacc

SEQ ID NO: 1248292 - RNA, 24 nt, Human
aggagugcaguggcaugaucuugg

SEQ ID NO: 1248293 - RNA, 20 nt, Human
aggaguuugagaccagccug

SEQ ID NO: 1248294 - RNA, 24 nt, Human
aggcagaggaacaucuagaucaga

SEQ ID NO: 1248295 - RNA, 24 nt, Human
aggcagagguugccgugagccgag

SEQ ID NO: 1248296 - RNA, 25 nt, Human
aggcaggagugcaguggcaugaucu

SEQ ID NO: 1248297 - RNA, 21 nt, Human
aggcaggguggcucaugccug

SEQ ID NO: 1248298 - RNA, 24 nt, Human
aggcaggguggcucaugccuguaa

SEQ ID NO: 1248299 - RNA, 22 nt, Human
aggcaucacugaaaugguggca

SEQ ID NO: 1248300 - RNA, 24 nt, Human
aggcaugguggcgcgcgccuguaa

SEQ ID NO: 1248301 - RNA, 21 nt, Human
aggccaaggugguuggaucac

SEQ ID NO: 1248302 - RNA, 21 nt, Human
aggccugaagguggcaggaga

SEQ ID NO: 1248303 - RNA, 22 nt, Human
agguuuugccauguuggccagg

SEQ ID NO: 1248304 - RNA, 20 nt, Human
aguacaguggugcgaucucg

SEQ ID NO: 1248305 - RNA, 24 nt, Human
aguacaguggugcgaucucgguuc

SEQ ID NO: 1248306 - RNA, 21 nt, Human
agugagacuguuggcagagau

SEQ ID NO: 1248307 - RNA, 22 nt, Human
agugagacuguuggcagagaug

SEQ ID NO: 1248308 - RNA, 20 nt, Human
agugcaguggcaugaucuug

SEQ ID NO: 1248309 - RNA, 23 nt, Human
agugcaguggcaugaucuugguu

SEQ ID NO: 1248310 - RNA, 24 nt, Human
agugcaguggcaugaucuugguuc

SEQ ID NO: 1248311 - RNA, 24 nt, Human
aguggcaugaucuugguucacugc

SEQ ID NO: 1248312 - RNA, 24 nt, Human
agugggugaguggguaagcagagu

SEQ ID NO: 1248313 - RNA, 24 nt, Human
aucccaucucuacuaaaaauccaa

SEQ ID NO: 1248314 - RNA, 23 nt, Human
augaaggagacacagucccugga

SEQ ID NO: 1248315 - RNA, 18 nt, Human
augaucacacugaacaga

SEQ ID NO: 1248316 - RNA, 19 nt, Human
augccuguaaucccagcac

SEQ ID NO: 1248317 - RNA, 24 nt, Human
auggcgccacugcucuccagccug

SEQ ID NO: 1248318 - RNA, 24 nt, Human
auuuuuguauuuuuaguagagacg

SEQ ID NO: 1248319 - RNA, 19 nt, Human
caaaacaaaagccugaagc

SEQ ID NO: 1248320 - RNA, 19 nt, Human
caaaacccaccgaaggcuc

SEQ ID NO: 1248321 - RNA, 22 nt, Human
caaaagacaguaagaaggagca

SEQ ID NO: 1248322 - RNA, 20 nt, Human
caaagcagcagcagagagac

SEQ ID NO: 1248323 - RNA, 24 nt, Human
caaagugccgggauuacaggugug

SEQ ID NO: 1248324 - RNA, 23 nt, Human
caaagugugggauuacaggugua

SEQ ID NO: 1248325 - RNA, 22 nt, Human
caacuagacagaagacccucaa

SEQ ID NO: 1248326 - RNA, 21 nt, Human
caacucuuucacagaguuacu

SEQ ID NO: 1248327 - RNA, 20 nt, Human
caagauccaccuuuuggccc

SEQ ID NO: 1248328 - RNA, 21 nt, Human
cacacgcagcuaauuuuugua

SEQ ID NO: 1248329 - RNA, 23 nt, Human
caccaaaucaugugacugaacag

SEQ ID NO: 1248330 - RNA, 19 nt, Human
caccaugacgacaugcaau

SEQ ID NO: 1248331 - RNA, 22 nt, Human
caccaugacgacaugcaaucua

SEQ ID NO: 1248332 - RNA, 21 nt, Human
caccccacccacugcagccaa

SEQ ID NO: 1248333 - RNA, 22 nt, Human
cacgcaauucuccugccucagc

SEQ ID NO: 1248334 - RNA, 22 nt, Human
cacugcaaccucccucugccag

SEQ ID NO: 1248335 - RNA, 24 nt, Human
cacugcucuccagccugggcgaca

SEQ ID NO: 1248336 - RNA, 19 nt, Human
cacuuguucagagcaaagc

SEQ ID NO: 1248337 - RNA, 22 nt, Human
cagaagacccucaaaugacucc

SEQ ID NO: 1248338 - RNA, 25 nt, Human
cagacugcaggagcugcucaacuaa

SEQ ID NO: 1248339 - RNA, 22 nt, Human
cagcaaaaaugagauauaaaca

SEQ ID NO: 1248340 - RNA, 24 nt, Human
cagcacuuugggaggccaaggugg

SEQ ID NO: 1248341 - RNA, 18 nt, Human
cagcagccuccccucuca

SEQ ID NO: 1248342 - RNA, 19 nt, Human
cagcccugggcaccaccag

SEQ ID NO: 1248343 - RNA, 24 nt, Human
cagccuccccucucaagguccccc

SEQ ID NO: 1248344 - RNA, 23 nt, Human
caggaagaaugaaagcacacagu

SEQ ID NO: 1248345 - RNA, 25 nt, Human
caggacccauacagcccugggcacc

SEQ ID NO: 1248346 - RNA, 24 nt, Human
caggagugcaguggcaugaucuug

SEQ ID NO: 1248347 - RNA, 19 nt, Human
caggccccuguuaagccau

SEQ ID NO: 1248348 - RNA, 24 nt, Human
caguagcuggaacuacaggugugc

SEQ ID NO: 1248349 - RNA, 19 nt, Human
caguaugaaacaaaugccc

SEQ ID NO: 1248350 - RNA, 21 nt, Human
cagucuccugaguaccugggg

SEQ ID NO: 1248351 - RNA, 20 nt, Human
cauacagcccugggcaccac

SEQ ID NO: 1248352 - RNA, 21 nt, Human
cauacagcccugggcaccacc

SEQ ID NO: 1248353 - RNA, 23 nt, Human
cauccuucccuaacaauuauuuc

SEQ ID NO: 1248354 - RNA, 18 nt, Human
caucuagaucagaagauu

SEQ ID NO: 1248355 - RNA, 24 nt, Human
caucucuguucaacaaauccccau

SEQ ID NO: 1248356 - RNA, 20 nt, Human
caucuggguuuuguaggcug

SEQ ID NO: 1248357 - RNA, 20 nt, Human
caugccuguaaucccagcac

SEQ ID NO: 1248358 - RNA, 24 nt, Human
caugccuguaaucccagcacuuug

SEQ ID NO: 1248359 - RNA, 21 nt, Human
caugugauucuccugccucag

SEQ ID NO: 1248360 - RNA, 24 nt, Human
cauguuggccaggcuggucucgaa

SEQ ID NO: 1248361 - RNA, 21 nt, Human
ccaaagugccgggauuacagg

SEQ ID NO: 1248362 - RNA, 24 nt, Human
ccaaagugccgggauuacaggugu

SEQ ID NO: 1248363 - RNA, 19 nt, Human
ccaaagugugggauuacag

SEQ ID NO: 1248364 - RNA, 20 nt, Human
ccaaagugugggauuacagg

SEQ ID NO: 1248365 - RNA, 22 nt, Human
ccacacccagcuaauuuuugua

SEQ ID NO: 1248366 - RNA, 23 nt, Human
ccacauacaccaaaucaugugac

SEQ ID NO: 1248367 - RNA, 18 nt, Human
ccacugcucuccagccug

SEQ ID NO: 1248368 - RNA, 20 nt, Human
ccacugcucuccagccuggg

SEQ ID NO: 1248369 - RNA, 21 nt, Human
ccacugcucuccagccugggc

SEQ ID NO: 1248370 - RNA, 21 nt, Human
ccacugcucuccagccugggc

SEQ ID NO: 1248371 - RNA, 23 nt, Human
ccacugcucuccagccugggcga

SEQ ID NO: 1248372 - RNA, 24 nt, Human
ccacugcucuccagccugggcgac

SEQ ID NO: 1248373 - RNA, 23 nt, Human
ccagaaaccccucaccccaccca

SEQ ID NO: 1248374 - RNA, 25 nt, Human
ccaggaacccuuucuggugcucccc

SEQ ID NO: 1248375 - RNA, 18 nt, Human
ccaggcaggguggcucau

SEQ ID NO: 1248376 - RNA, 20 nt, Human
ccagggccuggcacaggaag

SEQ ID NO: 1248377 - RNA, 19 nt, Human
ccagguucaugugauucuc

SEQ ID NO: 1248378 - RNA, 19 nt, Human
ccauguuggccaggcuggu

SEQ ID NO: 1248379 - RNA, 22 nt, Human
ccauguuggccaggcuggucuc

SEQ ID NO: 1248380 - RNA, 23 nt, Human
ccauguuggccaggcuggucucg

SEQ ID NO: 1248381 - RNA, 22 nt, Human
ccauguuugccaggcugaccuc

SEQ ID NO: 1248382 - RNA, 24 nt, Human
cccaaagugugggauuacaggugu

SEQ ID NO: 1248383 - RNA, 23 nt, Human
cccaaaucucaacauaaaauuca

SEQ ID NO: 1248384 - RNA, 21 nt, Human
cccaucucuacuaaaaaucca

SEQ ID NO: 1248385 - RNA, 18 nt, Human
ccccacccacugcagcca

SEQ ID NO: 1248386 - RNA, 21 nt, Human
cccgaaugaguuuuggugguu

SEQ ID NO: 1248387 - RNA, 23 nt, Human
cccucaccccacccacugcagcc

SEQ ID NO: 1248388 - RNA, 21 nt, Human
cccugcuaccuccgccuccug

SEQ ID NO: 1248389 - RNA, 21 nt, Human
ccuacauccacaagauccacc

SEQ ID NO: 1248390 - RNA, 25 nt, Human
ccucaccccacccacugcagccaac

SEQ ID NO: 1248391 - RNA, 18 nt, Human
ccucccaaagugugggau

SEQ ID NO: 1248392 - RNA, 19 nt, Human
ccuccgccuccuggauuca

SEQ ID NO: 1248393 - RNA, 24 nt, Human
ccuccuggauucacgcaauucucc

SEQ ID NO: 1248394 - RNA, 24 nt, Human
ccucuugguuugcugggccaggga

SEQ ID NO: 1248395 - RNA, 24 nt, Human
ccugaccaaugugguaaaauccca

SEQ ID NO: 1248396 - RNA, 24 nt, Human
ccugaccucaggugaucugcccac

SEQ ID NO: 1248397 - RNA, 22 nt, Human
ccugcuaccuccgccuccugga

SEQ ID NO: 1248398 - RNA, 21 nt, Human
ccuggcacaggaaguguucca

SEQ ID NO: 1248399 - RNA, 22 nt, Human
ccuggcacaggaaguguuccau

SEQ ID NO: 1248400 - RNA, 22 nt, Human
ccugggcgacagagcgagacuc

SEQ ID NO: 1248401 - RNA, 22 nt, Human
ccuguaaucccagcacuuuggg

SEQ ID NO: 1248402 - RNA, 21 nt, Human
ccuguaaucccagcuacccag

SEQ ID NO: 1248403 - RNA, 24 nt, Human
ccuguaaucccagcuacccaggag

SEQ ID NO: 1248404 - RNA, 19 nt, Human
ccuuuuggcccagcugcuu

SEQ ID NO: 1248405 - RNA, 21 nt, Human
cgcagucuaguaagagaggcc

SEQ ID NO: 1248406 - RNA, 24 nt, Human
cgccuguaaucccagcuacccagg

SEQ ID NO: 1248407 - RNA, 21 nt, Human
cgggauuacaggugugagcca

SEQ ID NO: 1248408 - RNA, 22 nt, Human
cgggauuacaggugugagccac

SEQ ID NO: 1248409 - RNA, 24 nt, Human
cgggauuacaggugugagccaccg

SEQ ID NO: 1248410 - RNA, 23 nt, Human
cuaauuuuuguauuuuuaguaga

SEQ ID NO: 1248411 - RNA, 21 nt, Human
cuagaggaagaaaaaccagaa

SEQ ID NO: 1248412 - RNA, 23 nt, Human
cucaugccuguaaucccagcacu

SEQ ID NO: 1248413 - RNA, 24 nt, Human
cucaugccuguaaucccagcacuu

SEQ ID NO: 1248414 - RNA, 22 nt, Human
cuccagccugggcgacagagcg

SEQ ID NO: 1248415 - RNA, 21 nt, Human
cucccagcugugggacuucau

SEQ ID NO: 1248416 - RNA, 26 nt, Human
cuccuagccucaggggauucgcuugc

SEQ ID NO: 1248417 - RNA, 21 nt, Human
cuccuggauucacgcaauucu

SEQ ID NO: 1248418 - RNA, 23 nt, Human
cucuccagccugggcgacagagc

SEQ ID NO: 1248419 - RNA, 24 nt, Human
cucucccauaagugccagucccau

SEQ ID NO: 1248420 - RNA, 19 nt, Human
cucugugucaaaaaacaaa

SEQ ID NO: 1248421 - RNA, 21 nt, Human
cucuugcuuuuaccagcuaug

SEQ ID NO: 1248422 - RNA, 19 nt, Human
cugaaaugcuuaggaugag

SEQ ID NO: 1248423 - RNA, 24 nt, Human
cugaacacuggagcuccaggaacc

SEQ ID NO: 1248424 - RNA, 23 nt, Human
cugccucagcuuccucaguagcu

SEQ ID NO: 1248425 - RNA, 23 nt, Human
cugccucagucuccugaguaccu

SEQ ID NO: 1248426 - RNA, 25 nt, Human
cuggaacuacaggugugcaccccca

SEQ ID NO: 1248427 - RNA, 21 nt, Human
cuuggauuuggcuugacccag

SEQ ID NO: 1248428 - RNA, 21 nt, Human
cuuguucugucgcccaggcug

SEQ ID NO: 1248429 - RNA, 23 nt, Human
cuuugcagauagcuggugcuggg

SEQ ID NO: 1248430 - RNA, 26 nt, Human
gaaaagcgccugacacaaaaacacca

SEQ ID NO: 1248431 - RNA, 18 nt, Human
gaacaucuagaucagaag

SEQ ID NO: 1248432 - RNA, 23 nt, Human
gaagacccucaaaugacuccuua

SEQ ID NO: 1248433 - RNA, 18 nt, Human
gaagccccugucauagcu

SEQ ID NO: 1248434 - RNA, 21 nt, Human
gaaggagacacagucccugga

SEQ ID NO: 1248435 - RNA, 23 nt, Human
gaaggggaggagaaugcucccug

SEQ ID NO: 1248436 - RNA, 23 nt, Human
gaagguggcaggagaaagcugga

SEQ ID NO: 1248437 - RNA, 23 nt, Human
gaauguguuuugcaucuugaggc

SEQ ID NO: 1248438 - RNA, 24 nt, Human
gaccucaggugaucugcccaccuc

SEQ ID NO: 1248439 - RNA, 20 nt, Human
gacgggguuucgccauguuu

SEQ ID NO: 1248440 - RNA, 19 nt, Human
gacugagacccugagacag

SEQ ID NO: 1248441 - RNA, 23 nt, Human
gagaauugcuugaacccgggagg

SEQ ID NO: 1248442 - RNA, 21 nt, Human
gaggggauuugacuacuccag

SEQ ID NO: 1248443 - RNA, 23 nt, Human
gagguuuugccauguuggccagg

SEQ ID NO: 1248444 - RNA, 24 nt, Human
gaucaccugaguggaggaguuuga

SEQ ID NO: 1248445 - RNA, 18 nt, Human
gauuacagguguaagcca

SEQ ID NO: 1248446 - RNA, 21 nt, Human
gauuacagguguaagccacca

SEQ ID NO: 1248447 - RNA, 24 nt, Human
gauuacagguguaagccaccaugu

SEQ ID NO: 1248448 - RNA, 18 nt, Human
gauuacaggugugagcca

SEQ ID NO: 1248449 - RNA, 22 nt, Human
gauuacaggugugagccaccgc

SEQ ID NO: 1248450 - RNA, 22 nt, Human
gauuacaggugugagccaccgc

SEQ ID NO: 1248451 - RNA, 18 nt, Human
gcaaagcagcagcagaga

SEQ ID NO: 1248452 - RNA, 22 nt, Human
gcaaccucccucugccagguuc

SEQ ID NO: 1248453 - RNA, 20 nt, Human
gcacagugaucacugguggc

SEQ ID NO: 1248454 - RNA, 19 nt, Human
gcaguagucauaaaccaac

SEQ ID NO: 1248455 - RNA, 22 nt, Human
gccacugcucuccagccugggc

SEQ ID NO: 1248456 - RNA, 22 nt, Human
gccacugcucuccagccugggc

SEQ ID NO: 1248457 - RNA, 20 nt, Human
gccauguuggccaggcuggu

SEQ ID NO: 1248458 - RNA, 19 nt, Human
gcccaggcuggaguacagu

SEQ ID NO: 1248459 - RNA, 20 nt, Human
gcccaggcuggaguacagug

SEQ ID NO: 1248460 - RNA, 23 nt, Human
gccucagucuccugaguaccugg

SEQ ID NO: 1248461 - RNA, 22 nt, Human
gcuaggcaugguggcgcgcgcc

SEQ ID NO: 1248462 - RNA, 23 nt, Human
gcugaccucgaacuccuagccuc

SEQ ID NO: 1248463 - RNA, 18 nt, Human
gcugggccagggaaaggg

SEQ ID NO: 1248464 - RNA, 23 nt, Human
gcuggucucgaacuccugaccuc

SEQ ID NO: 1248465 - RNA, 18 nt, Human
ggaaccaagaacacaggu

SEQ ID NO: 1248466 - RNA, 23 nt, Human
ggagugcaguggcaugaucuugg

SEQ ID NO: 1248467 - RNA, 24 nt, Human
ggauuacagguguaagccaccaug

SEQ ID NO: 1248468 - RNA, 24 nt, Human
ggcaaacccacuguugcccuccac

SEQ ID NO: 1248469 - RNA, 26 nt, Human
ggcaggcaaacccacuguugcccucc

SEQ ID NO: 1248470 - RNA, 20 nt, Human
ggcccugagagcacauccug

SEQ ID NO: 1248471 - RNA, 21 nt, Human
ggcgcgcgccuguaaucccag

SEQ ID NO: 1248472 - RNA, 21 nt, Human
ggcucaugccuguaaucccag

SEQ ID NO: 1248473 - RNA, 24 nt, Human
ggcuggucucgaacuccugaccuc

SEQ ID NO: 1248474 - RNA, 23 nt, Human
ggcuuucauggcuggcaagaaaa

SEQ ID NO: 1248475 - RNA, 21 nt, Human
gggaagaacauucuaggcaga

SEQ ID NO: 1248476 - RNA, 20 nt, Human
gggaggccugaagguggcag

SEQ ID NO: 1248477 - RNA, 18 nt, Human
gggauuacaggugugagc

SEQ ID NO: 1248478 - RNA, 22 nt, Human
gggauuacaggugugagccacc

SEQ ID NO: 1248479 - RNA, 23 nt, Human
gggauuacaggugugagccaccg

SEQ ID NO: 1248480 - RNA, 20 nt, Human
gggcacaacugaaauggaag

SEQ ID NO: 1248481 - RNA, 24 nt, Human
ggggauucgcuugccucagccucc

SEQ ID NO: 1248482 - RNA, 23 nt, Human
gguaagcagagugccccaggacc

SEQ ID NO: 1248483 - RNA, 18 nt, Human
ggucaacagaaucaggaa

SEQ ID NO: 1248484 - RNA, 19 nt, Human
ggucucgaacuccugaccu

SEQ ID NO: 1248485 - RNA, 24 nt, Human
gguggcgcgcgccuguaaucccag

SEQ ID NO: 1248486 - RNA, 23 nt, Human
gguggcucaugccuguaauccca

SEQ ID NO: 1248487 - RNA, 24 nt, Human
gguuaggauucuggcucccagcug

SEQ ID NO: 1248488 - RNA, 23 nt, Human
guagagacgagguuuugccaugu

SEQ ID NO: 1248489 - RNA, 24 nt, Human
gugaucugcccaccucaaccuccc

SEQ ID NO: 1248490 - RNA, 23 nt, Human
guggcucaugccuguaaucccag

SEQ ID NO: 1248491 - RNA, 28 nt, Human
gugucaaaaaacaaaacaaaagccugaa

SEQ ID NO: 1248492 - RNA, 23 nt, Human
guuaggauucuggcucccagcug

SEQ ID NO: 1248493 - RNA, 19 nt, Human
guucacugcaaccucccuc

SEQ ID NO: 1248494 - RNA, 24 nt, Human
guuccaagguugaccauucuuugc

SEQ ID NO: 1248495 - RNA, 18 nt, Human
guuucagauuuuggagca

SEQ ID NO: 1248496 - RNA, 19 nt, Human
uaaaaauacagaaggggcc

SEQ ID NO: 1248497 - RNA, 24 nt, Human
uaaaauccacauacaccaaaucau

SEQ ID NO: 1248498 - RNA, 20 nt, Human
uaaaauucauuuauguuuca

SEQ ID NO: 1248499 - RNA, 19 nt, Human
uaaacaaaugaacacagcc

SEQ ID NO: 1248500 - RNA, 24 nt, Human
uaaaccaacaaaaagucuaauaac

SEQ ID NO: 1248501 - RNA, 21 nt, Human
uaaacuacagcagccuccccu

SEQ ID NO: 1248502 - RNA, 19 nt, Human
uaaagaagugagccaugca

SEQ ID NO: 1248503 - RNA, 22 nt, Human
uaaagacgggguuucgccaugu

SEQ ID NO: 1248504 - RNA, 18 nt, Human
uaaaucaaggauccugau

SEQ ID NO: 1248505 - RNA, 21 nt, Human
uaacucuagggaaggggaaag

SEQ ID NO: 1248506 - RNA, 23 nt, Human
uaagacaggagaauugcuugaac

SEQ ID NO: 1248507 - RNA, 24 nt, Human
uaagacaggagaauugcuugaacc

SEQ ID NO: 1248508 - RNA, 25 nt, Human
uaagacaggagaauugcuugaaccc

SEQ ID NO: 1248509 - RNA, 22 nt, Human
uaagagaggccgaugcuaaaaa

SEQ ID NO: 1248510 - RNA, 20 nt, Human
uaagcuggcuuugaagguuu

SEQ ID NO: 1248511 - RNA, 23 nt, Human
uaaggcagacagcaugacuguac

SEQ ID NO: 1248512 - RNA, 24 nt, Human
uaauuuuuguauuuuuaguaaaga

SEQ ID NO: 1248513 - RNA, 24 nt, Human
uaauuuuuguauuuuuaguagaga

SEQ ID NO: 1248514 - RNA, 22 nt, Human
uacaccaaaucaugugacugaa

SEQ ID NO: 1248515 - RNA, 19 nt, Human
uacagaaggggccagagaa

SEQ ID NO: 1248516 - RNA, 28 nt, Human
uacagcccugggcaccaccagagacaga

SEQ ID NO: 1248517 - RNA, 21 nt, Human
uacagcugagaaauccagggc

SEQ ID NO: 1248518 - RNA, 18 nt, Human
uacagguguaagccacca

SEQ ID NO: 1248519 - RNA, 23 nt, Human
uacaggugugagccaccgcgccc

SEQ ID NO: 1248520 - RNA, 24 nt, Human
uacaggugugcacccccacaccca

SEQ ID NO: 1248521 - RNA, 19 nt, Human
uaccuacugaguuugaaga

SEQ ID NO: 1248522 - RNA, 20 nt, Human
uacuaggcagaaaagcauaa

SEQ ID NO: 1248523 - RNA, 19 nt, Human
uagaacacagaacaucugc

SEQ ID NO: 1248524 - RNA, 22 nt, Human
uagagacgagguuuugccaugu

SEQ ID NO: 1248525 - RNA, 18 nt, Human
uagaugucucuucagcuc

SEQ ID NO: 1248526 - RNA, 21 nt, Human
uagcagaaguagaaaaggaaa

SEQ ID NO: 1248527 - RNA, 22 nt, Human
uagcagcaggaacuucucaaag

SEQ ID NO: 1248528 - RNA, 23 nt, Human
uagcagucagagaaggcuuccag

SEQ ID NO: 1248529 - RNA, 20 nt, Human
uaggaccaugaaaauggggu

SEQ ID NO: 1248530 - RNA, 24 nt, Human
uaguaaagacgggguuucgccaug

SEQ ID NO: 1248531 - RNA, 24 nt, Human
uaguagagacgagguuuugccaug

SEQ ID NO: 1248532 - RNA, 20 nt, Human
uagugucauguuggugcuca

SEQ ID NO: 1248533 - RNA, 21 nt, Human
uaguuuccucaucagaaaaag

SEQ ID NO: 1248534 - RNA, 19 nt, Human
ucaaagcuugcugccaccu

SEQ ID NO: 1248535 - RNA, 26 nt, Human
ucaaccuguaaaucuuuuuuuuuuuu

SEQ ID NO: 1248536 - RNA, 18 nt, Human
ucacugcaaccucccucu

SEQ ID NO: 1248537 - RNA, 19 nt, Human
ucacugcaaccucccucug

SEQ ID NO: 1248538 - RNA, 19 nt, Human
ucacugcaaccucccucug

SEQ ID NO: 1248539 - RNA, 24 nt, Human
ucacugcaaccucccucugccagg

SEQ ID NO: 1248540 - RNA, 18 nt, Human
ucagaagaagccaagugg

SEQ ID NO: 1248541 - RNA, 20 nt, Human
ucagacaggaagaaugaaag

SEQ ID NO: 1248542 - RNA, 19 nt, Human
ucagagaaggcugggaauc

SEQ ID NO: 1248543 - RNA, 19 nt, Human
ucagagcucagacugccug

SEQ ID NO: 1248544 - RNA, 23 nt, Human
uccaacaaggcaggcaaacccac

SEQ ID NO: 1248545 - RNA, 23 nt, Human
uccaaucugguuaacaagccugc

SEQ ID NO: 1248546 - RNA, 22 nt, Human
uccaccuuuuggcccagcugcu

SEQ ID NO: 1248547 - RNA, 19 nt, Human
uccagaaaccccucacccc

SEQ ID NO: 1248548 - RNA, 23 nt, Human
uccagccugggcgacagagcgag

SEQ ID NO: 1248549 - RNA, 24 nt, Human
uccagccugggcgacagagcgaga

SEQ ID NO: 1248550 - RNA, 23 nt, Human
ucccaaagugccgggauuacagg

SEQ ID NO: 1248551 - RNA, 22 nt, Human
ucccaaagugugggauuacagg

SEQ ID NO: 1248552 - RNA, 19 nt, Human
ucccaucucuacuaaaaau

SEQ ID NO: 1248553 - RNA, 21 nt, Human
ucccugccuucauagggcuug

SEQ ID NO: 1248554 - RNA, 24 nt, Human
ucccugcuaccuccgccuccugga

SEQ ID NO: 1248555 - RNA, 21 nt, Human
uccuggauucacgcaauucuc

SEQ ID NO: 1248556 - RNA, 24 nt, Human
uccuggauucacgcaauucuccug

SEQ ID NO: 1248557 - RNA, 24 nt, Human
ucgcccaggcuggaguacaguggu

SEQ ID NO: 1248558 - RNA, 23 nt, Human
ucuagaggaagaaaaaccagaaa

SEQ ID NO: 1248559 - RNA, 21 nt, Human
ucucacacauaaaaugaggau

SEQ ID NO: 1248560 - RNA, 18 nt, Human
ucuccugaguaccugggg

SEQ ID NO: 1248561 - RNA, 23 nt, Human
ucucgaacuccugaccucaggug

SEQ ID NO: 1248562 - RNA, 19 nt, Human
ucucgcugugucacccagg

SEQ ID NO: 1248563 - RNA, 24 nt, Human
ucucgcugugucacccaggcagga

SEQ ID NO: 1248564 - RNA, 21 nt, Human
ucucuacuaaaaauccaaaaa

SEQ ID NO: 1248565 - RNA, 22 nt, Human
ucucuacuaaaaauccaaaaaa

SEQ ID NO: 1248566 - RNA, 24 nt, Human
ucugccagguucaugugauucucc

SEQ ID NO: 1248567 - RNA, 21 nt, Human
ucugcccaccucaaccuccca

SEQ ID NO: 1248568 - RNA, 22 nt, Human
ucuuguucugucgcccaggcug

SEQ ID NO: 1248569 - RNA, 23 nt, Human
ucuuguucugucgcccaggcugg

SEQ ID NO: 1248570 - RNA, 24 nt, Human
ucuuguucugucgcccaggcugga

SEQ ID NO: 1248571 - RNA, 20 nt, Human
ugaaaaugaugcacaguggg

SEQ ID NO: 1248572 - RNA, 25 nt, Human
ugaaacaaaugcccaaauaggaugc

SEQ ID NO: 1248573 - RNA, 19 nt, Human
ugaaccagaggaaccacaa

SEQ ID NO: 1248574 - RNA, 24 nt, Human
ugaaggggguccagaaaccccuca

SEQ ID NO: 1248575 - RNA, 22 nt, Human
ugaagguggcaggagaaagcug

SEQ ID NO: 1248576 - RNA, 22 nt, Human
ugacacaaaaacaccaucugca

SEQ ID NO: 1248577 - RNA, 18 nt, Human
ugaccucaggugaucugc

SEQ ID NO: 1248578 - RNA, 20 nt, Human
ugaccucaggugaucugccc

SEQ ID NO: 1248579 - RNA, 21 nt, Human
ugaccucaggugaucugccca

SEQ ID NO: 1248580 - RNA, 24 nt, Human
ugaccucaggugaucugcccaccu

SEQ ID NO: 1248581 - RNA, 20 nt, Human
ugaccucgaacuccuagccu

SEQ ID NO: 1248582 - RNA, 23 nt, Human
ugagaaaggcaacuauagguuac

SEQ ID NO: 1248583 - RNA, 21 nt, Human
ugagaagaaaaugaggugacu

SEQ ID NO: 1248584 - RNA, 23 nt, Human
ugagaccagccugaccaaugugg

SEQ ID NO: 1248585 - RNA, 24 nt, Human
ugagaccagccugaccaauguggu

SEQ ID NO: 1248586 - RNA, 19 nt, Human
ugagacgaagucuuguucu

SEQ ID NO: 1248587 - RNA, 22 nt, Human
ugagacgaagucuuguucuguc

SEQ ID NO: 1248588 - RNA, 20 nt, Human
ugagacuguuggcagagaug

SEQ ID NO: 1248589 - RNA, 18 nt, Human
ugagaugagacccaaauc

SEQ ID NO: 1248590 - RNA, 18 nt, Human
ugagcauuacacaaaguu

SEQ ID NO: 1248591 - RNA, 22 nt, Human
ugagccgagauggcgccacugc

SEQ ID NO: 1248592 - RNA, 22 nt, Human
ugagggaaaggaugaugaacca

SEQ ID NO: 1248593 - RNA, 21 nt, Human
ugagggauauuaggaugcagc

SEQ ID NO: 1248594 - RNA, 21 nt, Human
ugaguaccugggguuacaggu

SEQ ID NO: 1248595 - RNA, 24 nt, Human
ugaucugcccaccucaaccuccca

SEQ ID NO: 1248596 - RNA, 20 nt, Human
ugaugggguucaggagggcc

SEQ ID NO: 1248597 - RNA, 20 nt, Human
ugauucuccugccucagucu

SEQ ID NO: 1248598 - RNA, 24 nt, Human
ugccagguucaugugauucuccug

SEQ ID NO: 1248599 - RNA, 24 nt, Human
ugccauguuggccaggcuggucuc

SEQ ID NO: 1248600 - RNA, 27 nt, Human
ugccauguuggccaggcuggucucgaa

SEQ ID NO: 1248601 - RNA, 21 nt, Human
ugcccaccucaaccucccaaa

SEQ ID NO: 1248602 - RNA, 20 nt, Human
ugccccaggacccauacagc

SEQ ID NO: 1248603 - RNA, 24 nt, Human
ugccgggauuacaggugugagcca

SEQ ID NO: 1248604 - RNA, 23 nt, Human
ugccucagccucccaaagugugg

SEQ ID NO: 1248605 - RNA, 21 nt, Human
ugccucagcuuccucaguagc

SEQ ID NO: 1248606 - RNA, 24 nt, Human
ugccucagcuuccucaguagcugg

SEQ ID NO: 1248607 - RNA, 24 nt, Human
ugccucagucuccugaguaccugg

SEQ ID NO: 1248608 - RNA, 21 nt, Human
ugccugguggacucuuaccuc

SEQ ID NO: 1248609 - RNA, 23 nt, Human
ugccuguaaucccagcacuuugg

SEQ ID NO: 1248610 - RNA, 23 nt, Human
ugccuguaaucccagcacuuugg

SEQ ID NO: 1248611 - RNA, 21 nt, Human
ugcuaaaaaauuaccgaacag

SEQ ID NO: 1248612 - RNA, 19 nt, Human
ugcugagaaaggcauugcc

SEQ ID NO: 1248613 - RNA, 24 nt, Human
uggaaauauaaacaugaaggagac

SEQ ID NO: 1248614 - RNA, 22 nt, Human
uggaacuacaggugugcacccc

SEQ ID NO: 1248615 - RNA, 24 nt, Human
uggaacuacaggugugcaccccca

SEQ ID NO: 1248616 - RNA, 18 nt, Human
uggaggaguuugagacca

SEQ ID NO: 1248617 - RNA, 24 nt, Human
uggaguacaguggugcgaucucgg

SEQ ID NO: 1248618 - RNA, 23 nt, Human
uggaucaccugaguggaggaguu

SEQ ID NO: 1248619 - RNA, 24 nt, Human
uggaucaccugaguggaggaguuu

SEQ ID NO: 1248620 - RNA, 20 nt, Human
uggauucacgcaauucuccu

SEQ ID NO: 1248621 - RNA, 19 nt, Human
uggcaaaaaaaaaaaaaaa

SEQ ID NO: 1248622 - RNA, 25 nt, Human
uggcacaggaaguguuccauaaaua

SEQ ID NO: 1248623 - RNA, 19 nt, Human
uggcaggagaaagcugggg

SEQ ID NO: 1248624 - RNA, 19 nt, Human
uggcaugaucuugguucac

SEQ ID NO: 1248625 - RNA, 21 nt, Human
uggcaugaucuugguucacug

SEQ ID NO: 1248626 - RNA, 24 nt, Human
uggccaggcuggucucgaacuccu

SEQ ID NO: 1248627 - RNA, 21 nt, Human
uggcccagcugcuuuuagggg

SEQ ID NO: 1248628 - RNA, 22 nt, Human
uggccuuugacacucugcccau

SEQ ID NO: 1248629 - RNA, 21 nt, Human
uggcgcgcgccuguaauccca

SEQ ID NO: 1248630 - RNA, 20 nt, Human
uggcuaaugcaagcaacuuu

SEQ ID NO: 1248631 - RNA, 22 nt, Human
uggcucaugccuguaaucccag

SEQ ID NO: 1248632 - RNA, 24 nt, Human
uggcucaugccuguaaucccagca

SEQ ID NO: 1248633 - RNA, 24 nt, Human
ugggaagaacauucuaggcagagg

SEQ ID NO: 1248634 - RNA, 19 nt, Human
ugggaggccaaggugguug

SEQ ID NO: 1248635 - RNA, 24 nt, Human
ugggaggccaaggugguuggauca

SEQ ID NO: 1248636 - RNA, 21 nt, Human
ugggagucagaucuuuggggu

SEQ ID NO: 1248637 - RNA, 18 nt, Human
ugggauuacagguguaag

SEQ ID NO: 1248638 - RNA, 22 nt, Human
ugggauuacagguguaagccac

SEQ ID NO: 1248639 - RNA, 24 nt, Human
ugggauuacagguguaagccacca

SEQ ID NO: 1248640 - RNA, 25 nt, Human
ugggauuacagguguaagccaccau

SEQ ID NO: 1248641 - RNA, 21 nt, Human
ugggguuacagguacaugcca

SEQ ID NO: 1248642 - RNA, 24 nt, Human
ugggguuacagguacaugccauca

SEQ ID NO: 1248643 - RNA, 23 nt, Human
ugguggacucuuaccuccuccgu

SEQ ID NO: 1248644 - RNA, 24 nt, Human
ugguggcgcgcgccuguaauccca

SEQ ID NO: 1248645 - RNA, 20 nt, Human
ugucaaaaaacaaaacaaaa

SEQ ID NO: 1248646 - RNA, 20 nt, Human
ugucaaaaaacaaaacaaaa

SEQ ID NO: 1248647 - RNA, 24 nt, Human
ugugauucuccugccucagucucc

SEQ ID NO: 1248648 - RNA, 24 nt, Human
ugugucacccaggcaggagugcag

SEQ ID NO: 1248649 - RNA, 21 nt, Human
uguuccaagguugaccauucu

SEQ ID NO: 1248650 - RNA, 23 nt, Human
uguuccaagguugaccauucuuu

SEQ ID NO: 1248651 - RNA, 22 nt, Human
uguucugucgcccaggcuggag

SEQ ID NO: 1248652 - RNA, 27 nt, Human
uuaccgaacaguaugaaacaaaugccc

SEQ ID NO: 1248653 - RNA, 21 nt, Human
uuaggugacaggaaaccugcu

SEQ ID NO: 1248654 - RNA, 24 nt, Human
uuaguaaagacgggguuucgccau

SEQ ID NO: 1248655 - RNA, 24 nt, Human
uuaguagagacgagguuuugccau

SEQ ID NO: 1248656 - RNA, 23 nt, Human
uucacugcaaccucccucugcca

SEQ ID NO: 1248657 - RNA, 19 nt, Human
uucagagaugaaaagaaac

SEQ ID NO: 1248658 - RNA, 19 nt, Human
uucauggcuggcaagaaaa

SEQ ID NO: 1248659 - RNA, 18 nt, Human
uucaugugauucuccugc

SEQ ID NO: 1248660 - RNA, 23 nt, Human
uucaugugauucuccugccucag

SEQ ID NO: 1248661 - RNA, 18 nt, Human
uucgcuugccucagccuc

SEQ ID NO: 1248662 - RNA, 24 nt, Human
uucuccugccucagcuuccucagu

SEQ ID NO: 1248663 - RNA, 24 nt, Human
uugccaggcugaccucgaacuccu

SEQ ID NO: 1248664 - RNA, 24 nt, Human
uugccauguuggccaggcuggucu

SEQ ID NO: 1248665 - RNA, 22 nt, Human
uugccgugagccgagauggcgc

SEQ ID NO: 1248666 - RNA, 18 nt, Human
uugcuugaacccgggagg

SEQ ID NO: 1248667 - RNA, 24 nt, Human
uugcuugaacccgggaggcagagg

SEQ ID NO: 1248668 - RNA, 19 nt, Human
uuggcaaaaaaaaaaaaaa

SEQ ID NO: 1248669 - RNA, 23 nt, Human
uuggcaaaaaaaaaaaaaaaguu

SEQ ID NO: 1248670 - RNA, 23 nt, Human
uuguauuuuuaguaaagacgggg

SEQ ID NO: 1248671 - RNA, 24 nt, Human
uuguucugucgcccaggcuggagu

SEQ ID NO: 1248672 - RNA, 20 nt, Human
uuuaaaauccacauacaccc

SEQ ID NO: 1248673 - RNA, 21 nt, Human
uuucgccauguuugccaggcu

SEQ ID NO: 1248674 - RNA, 18 nt, Human
uuugacaaggaggaagug

SEQ ID NO: 1248675 - RNA, 21 nt, Human
uuugagaugagacccaaaucu

SEQ ID NO: 1248676 - RNA, 19 nt, Human
uuugcaucuugaggcuuug

SEQ ID NO: 1248677 - RNA, 23 nt, Human
uuuugccauguuggccaggcugg

SEQ ID NO: 1248678 - RNA, 21 nt, Human
uuuuguauuuuuaguaaagac

SEQ ID NO: 1248679 - RNA, 22 nt, Human
uuuuuaguaaagacgggguuuc

SEQ ID NO: 1248680 - RNA, 23 nt, Human
uuuuuaguaaagacgggguuucg

SEQ ID NO: 1248681 - RNA, 24 nt, Human
uuuuuaguagagacgagguuuugc

SEQ ID NO: 1248682 - RNA, 20 nt, Human
uuuuuguauuuuuaguaaag

SEQ ID NO: 1248683 - RNA, 20 nt, Human
uuuuuguauuuuuaguagag

SEQ ID NO: 1248684 - RNA, 18 nt, Human
agcgaggcgcacacucaa

SEQ ID NO: 1248685 - RNA, 19 nt, Human
caaaggucccccucggccc

SEQ ID NO: 1248686 - RNA, 22 nt, Human
cccccaccgcgucuuccagaga

SEQ ID NO: 1248687 - RNA, 20 nt, Human
ccuucguccuggcccucccg

SEQ ID NO: 1248688 - RNA, 20 nt, Human
cgcacacucacgcgcacuca

SEQ ID NO: 1248689 - RNA, 23 nt, Human
cgcccccuccccuccccagcuug

SEQ ID NO: 1248690 - RNA, 24 nt, Human
cgcccggguuuccugugaccguuc

SEQ ID NO: 1248691 - RNA, 19 nt, Human
gcacucacuuucugggcuc

SEQ ID NO: 1248692 - RNA, 20 nt, Human
gccuacggacacgcgcgggg

SEQ ID NO: 1248693 - RNA, 19 nt, Human
gcgcgcacacucacgcgca

SEQ ID NO: 1248694 - RNA, 22 nt, Human
gcgcgcacacucacgcgcacuc

SEQ ID NO: 1248695 - RNA, 23 nt, Human
ggcacaguucgcugggagcgggc

SEQ ID NO: 1248696 - RNA, 21 nt, Human
gggccggagcgaggcgcacac

SEQ ID NO: 1248697 - RNA, 24 nt, Human
uccgugggggacaccuagccuuug

SEQ ID NO: 1248698 - RNA, 18 nt, Human
ucgccggggcaauuggug

SEQ ID NO: 1248699 - RNA, 23 nt, Human
ucuccgugggggacaccuagccu

SEQ ID NO: 1248700 - RNA, 23 nt, Human
ucugcgcccccuccccuccccag

SEQ ID NO: 1248701 - RNA, 22 nt, Human
ugcgcaccccccaccgcgucuu

SEQ ID NO: 1248702 - RNA, 20 nt, Human
ugggccgaguccagaccacu

SEQ ID NO: 1248703 - RNA, 22 nt, Human
uuccagagagcgcgccuacgga

SEQ ID NO: 1248704 - RNA, 23 nt, Human
uucugcgcccccuccccucccca

SEQ ID NO: 1248705 - RNA, 25 nt, Human
aaacucccuccaagccagaacacua

SEQ ID NO: 1248706 - RNA, 24 nt, Human
aagccagaacacggguccggggga

SEQ ID NO: 1248707 - RNA, 21 nt, Human
acggguccgggggacuccuca

SEQ ID NO: 1248708 - RNA, 20 nt, Human
cacggguccgggggacuccu

SEQ ID NO: 1248709 - RNA, 23 nt, Human
ccaaagucaaacucccuccaagc

SEQ ID NO: 1248710 - RNA, 18 nt, Human
ccacggcacaagcaccca

SEQ ID NO: 1248711 - RNA, 26 nt, Human
cccagguggugguucucgacgggcua

SEQ ID NO: 1248712 - RNA, 19 nt, Human
ccgugggccccgccugccc

SEQ ID NO: 1248713 - RNA, 25 nt, Human
ccucaccccuggcuguuccccccaa

SEQ ID NO: 1248714 - RNA, 21 nt, Human
ccugccccacggcacaagcac

SEQ ID NO: 1248715 - RNA, 24 nt, Human
cucccaagacugaauggggucuag

SEQ ID NO: 1248716 - RNA, 23 nt, Human
gaacacggguccgggggacuccc

SEQ ID NO: 1248717 - RNA, 24 nt, Human
gaacuggcucucucaccucccaag

SEQ ID NO: 1248718 - RNA, 21 nt, Human
uaccuuuggccaaagucaaac

SEQ ID NO: 1248719 - RNA, 24 nt, Human
ucaccccuggcuguuccccccaac

SEQ ID NO: 1248720 - RNA, 25 nt, Human
aaaccugcucacccuguccccuaaa

SEQ ID NO: 1248721 - RNA, 24 nt, Human
aacccacucuccuuguccccccaa

SEQ ID NO: 1248722 - RNA, 22 nt, Human
aaccugcucacccuguccccua

SEQ ID NO: 1248723 - RNA, 24 nt, Human
aacgugcugagauuacagguguga

SEQ ID NO: 1248724 - RNA, 18 nt, Human
accagggcugcaaugcuc

SEQ ID NO: 1248725 - RNA, 20 nt, Human
accaugaguugcugguccuu

SEQ ID NO: 1248726 - RNA, 20 nt, Human
acccacucuccuuguccccc

SEQ ID NO: 1248727 - RNA, 19 nt, Human
acccugcccgcugugcagc

SEQ ID NO: 1248728 - RNA, 20 nt, Human
acccuggacaccuucugcuu

SEQ ID NO: 1248729 - RNA, 20 nt, Human
acccuguccccuaaacccac

SEQ ID NO: 1248730 - RNA, 18 nt, Human
acgggauuucgccauguu

SEQ ID NO: 1248731 - RNA, 20 nt, Human
acgggauuucgccauguugg

SEQ ID NO: 1248732 - RNA, 24 nt, Human
acgggauuucgccauguuggccag

SEQ ID NO: 1248733 - RNA, 24 nt, Human
acucuccuuguccccccaaacccu

SEQ ID NO: 1248734 - RNA, 20 nt, Human
agacguucaggagguucugc

SEQ ID NO: 1248735 - RNA, 18 nt, Human
agagaguccuucaggagc

SEQ ID NO: 1248736 - RNA, 22 nt, Human
agauuacaggugugagucacug

SEQ ID NO: 1248737 - RNA, 22 nt, Human
agcacuccuuucgcugcuccuc

SEQ ID NO: 1248738 - RNA, 19 nt, Human
agcuugcugucgcgauagu

SEQ ID NO: 1248739 - RNA, 23 nt, Human
aggugugagucacugugcccagc

SEQ ID NO: 1248740 - RNA, 24 nt, Human
caacgugcugagauuacaggugug

SEQ ID NO: 1248741 - RNA, 19 nt, Human
cacaggauuuguggccuga

SEQ ID NO: 1248742 - RNA, 22 nt, Human
cacccuguccccuaaacccacu

SEQ ID NO: 1248743 - RNA, 25 nt, Human
cacccuguccccuaaacccacucuc

SEQ ID NO: 1248744 - RNA, 22 nt, Human
cacugugcccagccugaaaaac

SEQ ID NO: 1248745 - RNA, 24 nt, Human
cagccgcacccccaccgccuccgg

SEQ ID NO: 1248746 - RNA, 19 nt, Human
cagccugaaaaacccuaau

SEQ ID NO: 1248747 - RNA, 18 nt, Human
cagccuucucacccugcc

SEQ ID NO: 1248748 - RNA, 20 nt, Human
cagcugcuagcugcccgccg

SEQ ID NO: 1248749 - RNA, 18 nt, Human
caggagccgggugagcuu

SEQ ID NO: 1248750 - RNA, 21 nt, Human
caggagccgggugagcuugcu

SEQ ID NO: 1248751 - RNA, 20 nt, Human
caugccagccuucucacccu

SEQ ID NO: 1248752 - RNA, 24 nt, Human
cauguuggccaggcuggucucgaa

SEQ ID NO: 1248753 - RNA, 21 nt, Human
ccaacgugcugagauuacagg

SEQ ID NO: 1248754 - RNA, 21 nt, Human
ccaacgugcugagauuacagg

SEQ ID NO: 1248755 - RNA, 24 nt, Human
ccaacgugcugagauuacaggugu

SEQ ID NO: 1248756 - RNA, 20 nt, Human
ccaccgccuccgggucgcgu

SEQ ID NO: 1248757 - RNA, 24 nt, Human
ccaccgggcauggcucagccgcac

SEQ ID NO: 1248758 - RNA, 19 nt, Human
ccagggcugcaaugcucuc

SEQ ID NO: 1248759 - RNA, 19 nt, Human
ccauguuggccaggcuggu

SEQ ID NO: 1248760 - RNA, 22 nt, Human
ccauguuggccaggcuggucuc

SEQ ID NO: 1248761 - RNA, 23 nt, Human
ccauguuggccaggcuggucucg

SEQ ID NO: 1248762 - RNA, 23 nt, Human
cccacucuccuuguccccccaaa

SEQ ID NO: 1248763 - RNA, 25 nt, Human
ccccaccgccuccgggucgcguccg

SEQ ID NO: 1248764 - RNA, 27 nt, Human
cccccaccgccuccgggucgcguccgc

SEQ ID NO: 1248765 - RNA, 18 nt, Human
ccccgggccuggccccgc

SEQ ID NO: 1248766 - RNA, 20 nt, Human
cccgccgccucgcgcgcugc

SEQ ID NO: 1248767 - RNA, 21 nt, Human
cccuccgccuugccucucaaa

SEQ ID NO: 1248768 - RNA, 20 nt, Human
cccugccgcaccuccugcaa

SEQ ID NO: 1248769 - RNA, 19 nt, Human
ccgcacccccaccgccucc

SEQ ID NO: 1248770 - RNA, 21 nt, Human
ccgcacccccaccgccucccc

SEQ ID NO: 1248771 - RNA, 20 nt, Human
ccgccgccucgcgcgcugcc

SEQ ID NO: 1248772 - RNA, 23 nt, Human
ccgccgccucgcgcgcugccuga

SEQ ID NO: 1248773 - RNA, 23 nt, Human
ccggccccgggccuggccccgcc

SEQ ID NO: 1248774 - RNA, 19 nt, Human
ccucucaaaccugcucacc

SEQ ID NO: 1248775 - RNA, 19 nt, Human
ccugcccgcugugcagcug

SEQ ID NO: 1248776 - RNA, 23 nt, Human
ccuggccccuccgccuugccucu

SEQ ID NO: 1248777 - RNA, 18 nt, Human
ccuggccucaagugaucu

SEQ ID NO: 1248778 - RNA, 24 nt, Human
ccuggccucaagugaucugccuac

SEQ ID NO: 1248779 - RNA, 18 nt, Human
ccuuucgcugcuccuccc

SEQ ID NO: 1248780 - RNA, 21 nt, Human
ccuuucgcugcuccucccgcc

SEQ ID NO: 1248781 - RNA, 24 nt, Human
cgccauguuggccaggcuggucuc

SEQ ID NO: 1248782 - RNA, 27 nt, Human
cgccauguuggccaggcuggucucgaa

SEQ ID NO: 1248783 - RNA, 19 nt, Human
cgccgccucgcgcgcugcc

SEQ ID NO: 1248784 - RNA, 24 nt, Human
cgccuugccucucaaaccugcuca

SEQ ID NO: 1248785 - RNA, 19 nt, Human
cggccccgggccuggcccc

SEQ ID NO: 1248786 - RNA, 21 nt, Human
cggcuacccccacccuggccc

SEQ ID NO: 1248787 - RNA, 24 nt, Human
cgggauuucgccauguuggccagg

SEQ ID NO: 1248788 - RNA, 19 nt, Human
cgugcugagauuacaggug

SEQ ID NO: 1248789 - RNA, 24 nt, Human
cucaagugaucugccuaccucaac

SEQ ID NO: 1248790 - RNA, 18 nt, Human
cucccgggcugcggccac

SEQ ID NO: 1248791 - RNA, 23 nt, Human
cuccuggguccucugccgguucc

SEQ ID NO: 1248792 - RNA, 19 nt, Human
cucugccgguuccccuuca

SEQ ID NO: 1248793 - RNA, 20 nt, Human
cuggccccuccgccuugccu

SEQ ID NO: 1248794 - RNA, 21 nt, Human
cuggccccuccgccuugccuc

SEQ ID NO: 1248795 - RNA, 22 nt, Human
gaagcgccaccaugaguugcug

SEQ ID NO: 1248796 - RNA, 21 nt, Human
gaagcugucccaugccagccu

SEQ ID NO: 1248797 - RNA, 22 nt, Human
gagcaggugucgggagguguca

SEQ ID NO: 1248798 - RNA, 20 nt, Human
gaugcaguugcccagugcca

SEQ ID NO: 1248799 - RNA, 18 nt, Human
gauuacaggugugaguca

SEQ ID NO: 1248800 - RNA, 24 nt, Human
gauuacaggugugagucacugugc

SEQ ID NO: 1248801 - RNA, 24 nt, Human
gcccgccgccucgcgcgcugccug

SEQ ID NO: 1248802 - RNA, 21 nt, Human
gccggccccgggccuggcccc

SEQ ID NO: 1248803 - RNA, 20 nt, Human
gccugaaaaacccuaauuau

SEQ ID NO: 1248804 - RNA, 22 nt, Human
gccuugccucucaaaccugcuc

SEQ ID NO: 1248805 - RNA, 18 nt, Human
gcggccgugggcuccugg

SEQ ID NO: 1248806 - RNA, 22 nt, Human
gcucacccuguccccuaaaccc

SEQ ID NO: 1248807 - RNA, 19 nt, Human
gcucagggcguugaugcag

SEQ ID NO: 1248808 - RNA, 23 nt, Human
gcuggucucgaacuccuggccuc

SEQ ID NO: 1248809 - RNA, 20 nt, Human
ggagguucugcuucacccua

SEQ ID NO: 1248810 - RNA, 20 nt, Human
ggcccggccggcguagguca

SEQ ID NO: 1248811 - RNA, 24 nt, Human
ggccucaagugaucugccuaccuc

SEQ ID NO: 1248812 - RNA, 24 nt, Human
ggcuggucucgaacuccuggccuc

SEQ ID NO: 1248813 - RNA, 23 nt, Human
gggauuucgccauguuggccagg

SEQ ID NO: 1248814 - RNA, 22 nt, Human
gggccuggccccgcccagucug

SEQ ID NO: 1248815 - RNA, 23 nt, Human
gguggcuccaggaugucugguug

SEQ ID NO: 1248816 - RNA, 24 nt, Human
gugaucugccuaccucaacuuccc

SEQ ID NO: 1248817 - RNA, 21 nt, Human
gugcugagauuacagguguga

SEQ ID NO: 1248818 - RNA, 22 nt, Human
uaaagacgggauuucgccaugu

SEQ ID NO: 1248819 - RNA, 19 nt, Human
uaacauuaguuaccauuuu

SEQ ID NO: 1248820 - RNA, 25 nt, Human
uaauguucuuggcccggccggcgua

SEQ ID NO: 1248821 - RNA, 24 nt, Human
uaccucaacuucccaacgugcuga

SEQ ID NO: 1248822 - RNA, 20 nt, Human
uagcugcccgccgccucgcg

SEQ ID NO: 1248823 - RNA, 24 nt, Human
uaguaaagacgggauuucgccaug

SEQ ID NO: 1248824 - RNA, 23 nt, Human
ucacugugcccagccugaaaaac

SEQ ID NO: 1248825 - RNA, 19 nt, Human
ucacugugcggcuguuucc

SEQ ID NO: 1248826 - RNA, 23 nt, Human
ucccaacgugcugagauuacagg

SEQ ID NO: 1248827 - RNA, 21 nt, Human
ucccaagucucacggcuaccc

SEQ ID NO: 1248828 - RNA, 22 nt, Human
ucccagcaaccccaugagggcu

SEQ ID NO: 1248829 - RNA, 22 nt, Human
uccccccaaacccuggacaccu

SEQ ID NO: 1248830 - RNA, 19 nt, Human
uccgggacuccucgaaggc

SEQ ID NO: 1248831 - RNA, 20 nt, Human
uccuugguaugugccaggca

SEQ ID NO: 1248832 - RNA, 20 nt, Human
ucgcaggacugaugugagcg

SEQ ID NO: 1248833 - RNA, 22 nt, Human
ucgccauguuggccaggcuggu

SEQ ID NO: 1248834 - RNA, 24 nt, Human
ucgccauguuggccaggcuggucu

SEQ ID NO: 1248835 - RNA, 18 nt, Human
ucgcugcuccucccgcca

SEQ ID NO: 1248836 - RNA, 27 nt, Human
ucucacccugcccgcugugcagcugga

SEQ ID NO: 1248837 - RNA, 23 nt, Human
ucuccagcuccagcaggcgccuc

SEQ ID NO: 1248838 - RNA, 21 nt, Human
ucucgaacuccuggccucaag

SEQ ID NO: 1248839 - RNA, 18 nt, Human
ucugguuggcggccgugg

SEQ ID NO: 1248840 - RNA, 20 nt, Human
ugaacaggcggcccugccgc

SEQ ID NO: 1248841 - RNA, 21 nt, Human
ugagauuacaggugugaguca

SEQ ID NO: 1248842 - RNA, 22 nt, Human
ugagauuacaggugugagucac

SEQ ID NO: 1248843 - RNA, 22 nt, Human
ugagauuacaggugugagucac

SEQ ID NO: 1248844 - RNA, 22 nt, Human
ugagauuacaggugugagucac

SEQ ID NO: 1248845 - RNA, 24 nt, Human
ugagauuacaggugugagucacug

SEQ ID NO: 1248846 - RNA, 18 nt, Human
ugaguccuugguaugugc

SEQ ID NO: 1248847 - RNA, 19 nt, Human
ugaguugcugguccuugga

SEQ ID NO: 1248848 - RNA, 23 nt, Human
ugaucugccuaccucaacuuccc

SEQ ID NO: 1248849 - RNA, 23 nt, Human
ugccacgcugaugggccggaccc

SEQ ID NO: 1248850 - RNA, 24 nt, Human
ugccaggcauuuauguaaucuucc

SEQ ID NO: 1248851 - RNA, 19 nt, Human
ugcccgccgccucgcgcgc

SEQ ID NO: 1248852 - RNA, 24 nt, Human
ugcugagauuacaggugugaguca

SEQ ID NO: 1248853 - RNA, 24 nt, Human
uggccaggcuggucucgaacuccu

SEQ ID NO: 1248854 - RNA, 18 nt, Human
uggccucaagugaucugc

SEQ ID NO: 1248855 - RNA, 19 nt, Human
uggccucaagugaucugcc

SEQ ID NO: 1248856 - RNA, 20 nt, Human
uggccucaagugaucugccu

SEQ ID NO: 1248857 - RNA, 24 nt, Human
ugggcgaugaggguagcuccuucc

SEQ ID NO: 1248858 - RNA, 22 nt, Human
uguccccuaaacccacucuccu

SEQ ID NO: 1248859 - RNA, 19 nt, Human
ugugcagcuggaccucagc

SEQ ID NO: 1248860 - RNA, 18 nt, Human
uguuuccucccagagagu

SEQ ID NO: 1248861 - RNA, 22 nt, Human
uuacagguggggaaugugacgc

SEQ ID NO: 1248862 - RNA, 23 nt, Human
uuacagguggggaaugugacgca

SEQ ID NO: 1248863 - RNA, 24 nt, Human
uuaguaaagacgggauuucgccau

SEQ ID NO: 1248864 - RNA, 19 nt, Human
uuauaacauuaguuaccau

SEQ ID NO: 1248865 - RNA, 21 nt, Human
uucccaacgugcugagauuac

SEQ ID NO: 1248866 - RNA, 19 nt, Human
uuggcggccgugggcuccu

SEQ ID NO: 1248867 - RNA, 24 nt, Human
uuucgccauguuggccaggcuggu

SEQ ID NO: 1248868 - RNA, 21 nt, Human
aaaaaaacaccugugcaccau

SEQ ID NO: 1248869 - RNA, 22 nt, Human
aaaaaacugucaaaaauguaaa

SEQ ID NO: 1248870 - RNA, 22 nt, Human
aaaaaguuuuagugcuuacaga

SEQ ID NO: 1248871 - RNA, 27 nt, Human
aaacaccugugcaccauuaguauguga

SEQ ID NO: 1248872 - RNA, 20 nt, Human
aaagaagaaaacacguaaca

SEQ ID NO: 1248873 - RNA, 20 nt, Human
aaccaagcuaaagaagaaaa

SEQ ID NO: 1248874 - RNA, 22 nt, Human
aagaaacagcaagcucauauac

SEQ ID NO: 1248875 - RNA, 19 nt, Human
aagaagaaaacacguaaca

SEQ ID NO: 1248876 - RNA, 19 nt, Human
acaaagacccuccaaguua

SEQ ID NO: 1248877 - RNA, 18 nt, Human
acaagacaaaggacaaga

SEQ ID NO: 1248878 - RNA, 21 nt, Human
acaccuuauaaaagaugcaac

SEQ ID NO: 1248879 - RNA, 24 nt, Human
acacguaacauuuucuuucuuaca

SEQ ID NO: 1248880 - RNA, 18 nt, Human
acccuggaaggguuccaa

SEQ ID NO: 1248881 - RNA, 19 nt, Human
acugcauuuauuaaguacu

SEQ ID NO: 1248882 - RNA, 19 nt, Human
acugccucccucugcucac

SEQ ID NO: 1248883 - RNA, 19 nt, Human
acugcugaagauccucugg

SEQ ID NO: 1248884 - RNA, 23 nt, Human
agaagauuuauagaaaaaaacac

SEQ ID NO: 1248885 - RNA, 21 nt, Human
agagcacaaaauaauacacca

SEQ ID NO: 1248886 - RNA, 18 nt, Human
aggaacccaggagcuagg

SEQ ID NO: 1248887 - RNA, 19 nt, Human
aggaacccaggagcuaggc

SEQ ID NO: 1248888 - RNA, 24 nt, Human
aggcaaauuuguaauacaaucuaa

SEQ ID NO: 1248889 - RNA, 23 nt, Human
aggccccagauguccugagcagc

SEQ ID NO: 1248890 - RNA, 18 nt, Human
aguucaaccccaacugcc

SEQ ID NO: 1248891 - RNA, 24 nt, Human
auaaaguuuuacuguugaacaaag

SEQ ID NO: 1248892 - RNA, 20 nt, Human
augaugcuuuuguaagaagu

SEQ ID NO: 1248893 - RNA, 21 nt, Human
augcuuccugcagcucaccgu

SEQ ID NO: 1248894 - RNA, 24 nt, Human
caaacaagacaaaggacaagagau

SEQ ID NO: 1248895 - RNA, 23 nt, Human
caagagaaaauguuuacccugga

SEQ ID NO: 1248896 - RNA, 19 nt, Human
caagcuaaagaagaaaaca

SEQ ID NO: 1248897 - RNA, 20 nt, Human
caagcuaaagaagaaaacac

SEQ ID NO: 1248898 - RNA, 23 nt, Human
cacaaccaagcuaaagaagaaaa

SEQ ID NO: 1248899 - RNA, 18 nt, Human
cacaugcugcuggugugu

SEQ ID NO: 1248900 - RNA, 20 nt, Human
cagaaagaacacuuucuuca

SEQ ID NO: 1248901 - RNA, 21 nt, Human
cagacaaugaccuguaagagc

SEQ ID NO: 1248902 - RNA, 23 nt, Human
cagcagauucuucuauagaauuu

SEQ ID NO: 1248903 - RNA, 20 nt, Human
caggccaagacaauggucau

SEQ ID NO: 1248904 - RNA, 23 nt, Human
caucaaagaaacagcaagcucau

SEQ ID NO: 1248905 - RNA, 24 nt, Human
caucaaagaaacagcaagcucaua

SEQ ID NO: 1248906 - RNA, 20 nt, Human
cauggcauucuccaagcucu

SEQ ID NO: 1248907 - RNA, 24 nt, Human
ccaucaaagaaacagcaagcucau

SEQ ID NO: 1248908 - RNA, 19 nt, Human
cccacaaccaagcuaaaga

SEQ ID NO: 1248909 - RNA, 20 nt, Human
cccacaaccaagcuaaagaa

SEQ ID NO: 1248910 - RNA, 23 nt, Human
ccggcaauuacgauaccuucaag

SEQ ID NO: 1248911 - RNA, 23 nt, Human
ccucugcucacaugcugcuggug

SEQ ID NO: 1248912 - RNA, 20 nt, Human
cgcagaaagaacacuuucuu

SEQ ID NO: 1248913 - RNA, 18 nt, Human
cuaguuccgaaguucaac

SEQ ID NO: 1248914 - RNA, 19 nt, Human
cuccaagcucuacuacuug

SEQ ID NO: 1248915 - RNA, 19 nt, Human
cugaaaaagguaaccccau

SEQ ID NO: 1248916 - RNA, 19 nt, Human
cugaagauccucuggggug

SEQ ID NO: 1248917 - RNA, 25 nt, Human
cugaagauccucuggggugucuugu

SEQ ID NO: 1248918 - RNA, 27 nt, Human
cuuggagacaggaacccaggagcuagg

SEQ ID NO: 1248919 - RNA, 20 nt, Human
cuuguggggcaaaacauguc

SEQ ID NO: 1248920 - RNA, 18 nt, Human
gagacaggaacccaggag

SEQ ID NO: 1248921 - RNA, 19 nt, Human
gaucaaaauguuuaacagu

SEQ ID NO: 1248922 - RNA, 18 nt, Human
ggcaauuacgauaccuuc

SEQ ID NO: 1248923 - RNA, 23 nt, Human
gugacuugcacauauacaaccuu

SEQ ID NO: 1248924 - RNA, 23 nt, Human
uaaaaaaaacugucaaaaaugua

SEQ ID NO: 1248925 - RNA, 26 nt, Human
uaaaaaaaacugucaaaaauguaaac

SEQ ID NO: 1248926 - RNA, 21 nt, Human
uaaaaauagaacaaauacugu

SEQ ID NO: 1248927 - RNA, 22 nt, Human
uaaagaaguuggauagauggcu

SEQ ID NO: 1248928 - RNA, 22 nt, Human
uaaagugguucccaaauccuga

SEQ ID NO: 1248929 - RNA, 19 nt, Human
uaaauaccauaggacaaag

SEQ ID NO: 1248930 - RNA, 24 nt, Human
uaaugaugcuuuuguaagaaguuu

SEQ ID NO: 1248931 - RNA, 24 nt, Human
uaauuccacccaguucuguucucc

SEQ ID NO: 1248932 - RNA, 22 nt, Human
uacagagcaacucaauaaucug

SEQ ID NO: 1248933 - RNA, 19 nt, Human
uacuccuaggaccaauagc

SEQ ID NO: 1248934 - RNA, 25 nt, Human
uacuuuucaaacaagacaaaggaca

SEQ ID NO: 1248935 - RNA, 23 nt, Human
uagaaacaugcuuuuucuaaucc

SEQ ID NO: 1248936 - RNA, 18 nt, Human
uagaacagacaaugaccu

SEQ ID NO: 1248937 - RNA, 18 nt, Human
uaucauaggcccuacuuc

SEQ ID NO: 1248938 - RNA, 22 nt, Human
uauuucauggcauucuccaagc

SEQ ID NO: 1248939 - RNA, 19 nt, Human
ucaaaaauguaaacaaugc

SEQ ID NO: 1248940 - RNA, 21 nt, Human
ucacucuacagaaaccacagu

SEQ ID NO: 1248941 - RNA, 19 nt, Human
ucccaaaugauugucuacc

SEQ ID NO: 1248942 - RNA, 24 nt, Human
uccuugcuguagaagugcccacaa

SEQ ID NO: 1248943 - RNA, 26 nt, Human
ucuaauccauaaauaacacuaaucau

SEQ ID NO: 1248944 - RNA, 18 nt, Human
ucuacagaaaccacagug

SEQ ID NO: 1248945 - RNA, 20 nt, Human
ucugucaggagacccggccu

SEQ ID NO: 1248946 - RNA, 19 nt, Human
ucuugugaucugucaggag

SEQ ID NO: 1248947 - RNA, 19 nt, Human
ugacccaagucauuaauaa

SEQ ID NO: 1248948 - RNA, 19 nt, Human
ugacuugcacauauacaac

SEQ ID NO: 1248949 - RNA, 21 nt, Human
ugagagccacaauaucuauga

SEQ ID NO: 1248950 - RNA, 18 nt, Human
ugauaauaugccagggac

SEQ ID NO: 1248951 - RNA, 19 nt, Human
ugcaaagaugaauaugaua

SEQ ID NO: 1248952 - RNA, 22 nt, Human
uggaauaaaccaauaauucgua

SEQ ID NO: 1248953 - RNA, 24 nt, Human
uggcauucuccaagcucuacuacu

SEQ ID NO: 1248954 - RNA, 22 nt, Human
ugggaaguaggacugcugaaga

SEQ ID NO: 1248955 - RNA, 21 nt, Human
ugguucccaaauccugauccu

SEQ ID NO: 1248956 - RNA, 21 nt, Human
uguuagaacagacaaugaccu

SEQ ID NO: 1248957 - RNA, 25 nt, Human
uguuuuguucauuuauuugguauca

SEQ ID NO: 1248958 - RNA, 19 nt, Human
uuacaggacagucagaaga

SEQ ID NO: 1248959 - RNA, 21 nt, Human
uuccaagcuucaaagcucuau

SEQ ID NO: 1248960 - RNA, 23 nt, Human
uuccacccaguucuguucuccuu

SEQ ID NO: 1248961 - RNA, 25 nt, Human
uucuccaagcucuacuacuugaaca

SEQ ID NO: 1248962 - RNA, 23 nt, Human
cagugggccucuagccgccugga

SEQ ID NO: 1248963 - RNA, 18 nt, Human
ccugguguaacugggaag

SEQ ID NO: 1248964 - RNA, 22 nt, Human
cugguaguugggaagcaguggg

SEQ ID NO: 1248965 - RNA, 21 nt, Human
gccucuagccgccuggauuug

SEQ ID NO: 1248966 - RNA, 23 nt, Human
gggccucuagccgccuggauuug

SEQ ID NO: 1248967 - RNA, 22 nt, Human
aaaucacccuaaagaaaacugg

SEQ ID NO: 1248968 - RNA, 21 nt, Human
aaauggccaauagaccaaaac

SEQ ID NO: 1248969 - RNA, 24 nt, Human
aagcaaaaauugaauagcacaagg

SEQ ID NO: 1248970 - RNA, 18 nt, Human
aagcugaagggaauuauc

SEQ ID NO: 1248971 - RNA, 28 nt, Human
aaugcaaaagacaaaaagaguuuaggga

SEQ ID NO: 1248972 - RNA, 22 nt, Human
acagcaucaacauccagcgcug

SEQ ID NO: 1248973 - RNA, 23 nt, Human
accaaaacaauccucaauugcac

SEQ ID NO: 1248974 - RNA, 24 nt, Human
acccuaaagaaaacuggacaaagg

SEQ ID NO: 1248975 - RNA, 18 nt, Human
caaaacauaggaagcaaa

SEQ ID NO: 1248976 - RNA, 21 nt, Human
caaauggccaauagaccaaaa

SEQ ID NO: 1248977 - RNA, 23 nt, Human
caaauggccaauagaccaaaaca

SEQ ID NO: 1248978 - RNA, 24 nt, Human
caaggcaaaugggcuuagaaauca

SEQ ID NO: 1248979 - RNA, 22 nt, Human
cacaucacccccaguugacaag

SEQ ID NO: 1248980 - RNA, 24 nt, Human
cacccccaguugacaagcugaagg

SEQ ID NO: 1248981 - RNA, 20 nt, Human
cauaggaagcaaaaauugaa

SEQ ID NO: 1248982 - RNA, 21 nt, Human
caucaacauccagcgcuggag

SEQ ID NO: 1248983 - RNA, 22 nt, Human
ccacaucacccccaguugacaa

SEQ ID NO: 1248984 - RNA, 22 nt, Human
ccucguacuugagccuuaaggc

SEQ ID NO: 1248985 - RNA, 18 nt, Human
cucccugccacaucaccc

SEQ ID NO: 1248986 - RNA, 18 nt, Human
cuccucucucucuuucuc

SEQ ID NO: 1248987 - RNA, 19 nt, Human
cuccucucucucuuucucc

SEQ ID NO: 1248988 - RNA, 23 nt, Human
gacaaaaagaguuuagggaaaaa

SEQ ID NO: 1248989 - RNA, 18 nt, Human
gagaaaagccaaauggcc

SEQ ID NO: 1248990 - RNA, 19 nt, Human
gauuacugugcccagccca

SEQ ID NO: 1248991 - RNA, 24 nt, Human
gcaaaagacaaaaagaguuuaggg

SEQ ID NO: 1248992 - RNA, 23 nt, Human
gcuauuuuuuuuuuuauuuuuag

SEQ ID NO: 1248993 - RNA, 19 nt, Human
gucucucucucuccucucu

SEQ ID NO: 1248994 - RNA, 20 nt, Human
uaaaaggcccaacgcacaag

SEQ ID NO: 1248995 - RNA, 23 nt, Human
uaacugacagacuguuaauaucc

SEQ ID NO: 1248996 - RNA, 21 nt, Human
uagaccaaaacaauccucaau

SEQ ID NO: 1248997 - RNA, 19 nt, Human
uagcacaaggaaaaccugc

SEQ ID NO: 1248998 - RNA, 20 nt, Human
uagcacaaggaaaaccugcc

SEQ ID NO: 1248999 - RNA, 24 nt, Human
uaguagagaugggugcugggauua

SEQ ID NO: 1249000 - RNA, 28 nt, Human
uaguagagaugggugcugggauuacugu

SEQ ID NO: 1249001 - RNA, 23 nt, Human
uccucaauugcacaaaguaguca

SEQ ID NO: 1249002 - RNA, 24 nt, Human
uccucucucucuuucucccugcca

SEQ ID NO: 1249003 - RNA, 30 nt, Human
ucucucucucuccucucucucuuucucccc

SEQ ID NO: 1249004 - RNA, 19 nt, Human
ugagccuuaaggcaaguuu

SEQ ID NO: 1249005 - RNA, 22 nt, Human
ugcaaaagacaaaaagaguuua

SEQ ID NO: 1249006 - RNA, 27 nt, Human
ugcaaaagagaaaagccaaauggccaa

SEQ ID NO: 1249007 - RNA, 19 nt, Human
ugggggaaggaauuuggcu

SEQ ID NO: 1249008 - RNA, 18 nt, Human
uuaguagagaugggugcu

SEQ ID NO: 1249009 - RNA, 22 nt, Human
uuuuauuuuuaguagagauggg

SEQ ID NO: 1249010 - RNA, 20 nt, Human
uuuuuaguagagaugggugc

SEQ ID NO: 1249011 - RNA, 24 nt, Human
uuuuuuuuauuuuuaguagagaug

SEQ ID NO: 1249012 - RNA, 19 nt, Human
aaaauacuugcaacauacc

SEQ ID NO: 1249013 - RNA, 20 nt, Human
aaacaaaacaaaacaacaga

SEQ ID NO: 1249014 - RNA, 21 nt, Human
aaacacaagauuuuaagccug

SEQ ID NO: 1249015 - RNA, 22 nt, Human
aaccaucucauuucccagagca

SEQ ID NO: 1249016 - RNA, 24 nt, Human
aagcaggaggaugucuugagccca

SEQ ID NO: 1249017 - RNA, 19 nt, Human
aaguggaacaauccugaga

SEQ ID NO: 1249018 - RNA, 20 nt, Human
acagagcaagacccugucuc

SEQ ID NO: 1249019 - RNA, 25 nt, Human
acagagcaagacccugucucuaaaa

SEQ ID NO: 1249020 - RNA, 24 nt, Human
acccaguggcugaccucacaacgu

SEQ ID NO: 1249021 - RNA, 23 nt, Human
acccugucucuaaaaacaaaaca

SEQ ID NO: 1249022 - RNA, 22 nt, Human
acuccagucugggugacagagc

SEQ ID NO: 1249023 - RNA, 18 nt, Human
acuugcaacauaccgaaa

SEQ ID NO: 1249024 - RNA, 21 nt, Human
agauuugauuuuuagaaaguu

SEQ ID NO: 1249025 - RNA, 23 nt, Human
agccugggcaacauagcaagacc

SEQ ID NO: 1249026 - RNA, 24 nt, Human
agccugggcaacauagcaagaccu

SEQ ID NO: 1249027 - RNA, 18 nt, Human
agcuaggugugguggugu

SEQ ID NO: 1249028 - RNA, 23 nt, Human
agcuaggugugguggugugcacc

SEQ ID NO: 1249029 - RNA, 23 nt, Human
aggaguucaagaccagccugggc

SEQ ID NO: 1249030 - RNA, 23 nt, Human
aggcaggaggauugcaugagccc

SEQ ID NO: 1249031 - RNA, 24 nt, Human
aggcaggaggauugcaugagccca

SEQ ID NO: 1249032 - RNA, 24 nt, Human
aggcugaagcaggaggaugucuug

SEQ ID NO: 1249033 - RNA, 18 nt, Human
agggacgggaagccccgu

SEQ ID NO: 1249034 - RNA, 18 nt, Human
agggccuggaggguccgg

SEQ ID NO: 1249035 - RNA, 18 nt, Human
augcauagauaggugcua

SEQ ID NO: 1249036 - RNA, 21 nt, Human
augcauuuuuaaaugcauaga

SEQ ID NO: 1249037 - RNA, 23 nt, Human
caaggcccagccugcuagacauc

SEQ ID NO: 1249038 - RNA, 20 nt, Human
caccuauggucccaacucuc

SEQ ID NO: 1249039 - RNA, 26 nt, Human
caccucuaauccuagcgcuuugggag

SEQ ID NO: 1249040 - RNA, 24 nt, Human
cagagcaagacccugucucuaaaa

SEQ ID NO: 1249041 - RNA, 23 nt, Human
cauagcaagaccuccccaaaaaa

SEQ ID NO: 1249042 - RNA, 24 nt, Human
cauggccaaaccaucucauuuccc

SEQ ID NO: 1249043 - RNA, 19 nt, Human
cauuguacuccagucuggg

SEQ ID NO: 1249044 - RNA, 22 nt, Human
cauuguacuccagucuggguga

SEQ ID NO: 1249045 - RNA, 23 nt, Human
cauuguacuccagucugggugac

SEQ ID NO: 1249046 - RNA, 27 nt, Human
cccgacccgggcccggaagaccgcgug

SEQ ID NO: 1249047 - RNA, 18 nt, Human
cccuagccuggcccgagg

SEQ ID NO: 1249048 - RNA, 21 nt, Human
ccuauggucccaacucucugg

SEQ ID NO: 1249049 - RNA, 24 nt, Human
ccuggcccgaggcuggucgggggu

SEQ ID NO: 1249050 - RNA, 19 nt, Human
cggcucacaccucuaaucc

SEQ ID NO: 1249051 - RNA, 21 nt, Human
cuaaauguucagugcgccccc

SEQ ID NO: 1249052 - RNA, 19 nt, Human
cuagcgcuuugggaggcca

SEQ ID NO: 1249053 - RNA, 24 nt, Human
cucacaccucuaauccuagcgcuu

SEQ ID NO: 1249054 - RNA, 19 nt, Human
cugggugacagagcaagac

SEQ ID NO: 1249055 - RNA, 23 nt, Human
gaaucucuaaaguggaacaaucc

SEQ ID NO: 1249056 - RNA, 19 nt, Human
gacccugucucuaaaaaca

SEQ ID NO: 1249057 - RNA, 21 nt, Human
gacccugucucuaaaaacaaa

SEQ ID NO: 1249058 - RNA, 24 nt, Human
gagcaagacccugucucuaaaaac

SEQ ID NO: 1249059 - RNA, 18 nt, Human
gcaaguuaaaaaggcaga

SEQ ID NO: 1249060 - RNA, 19 nt, Human
gcaaguuaaaaaggcagag

SEQ ID NO: 1249061 - RNA, 19 nt, Human
gcagggugcagcggcucac

SEQ ID NO: 1249062 - RNA, 24 nt, Human
gcaugagcccaggaguucaagacc

SEQ ID NO: 1249063 - RNA, 23 nt, Human
gccacgggcggagguggcgggcc

SEQ ID NO: 1249064 - RNA, 22 nt, Human
gcccaggaguucaagaccagcc

SEQ ID NO: 1249065 - RNA, 20 nt, Human
gccugggaugcuucaaauuu

SEQ ID NO: 1249066 - RNA, 29 nt, Human
ggaaaaaauacuugcaacauaccgaaaag

SEQ ID NO: 1249067 - RNA, 23 nt, Human
ggaagccccgucuacggugaccc

SEQ ID NO: 1249068 - RNA, 24 nt, Human
ggccacgggcggagguggcgggcc

SEQ ID NO: 1249069 - RNA, 20 nt, Human
ggccccaggccccgcccggc

SEQ ID NO: 1249070 - RNA, 18 nt, Human
ggcccggaagaccgcgug

SEQ ID NO: 1249071 - RNA, 20 nt, Human
ggcucgggccuggggcucuc

SEQ ID NO: 1249072 - RNA, 19 nt, Human
gggccccaggccccgcccg

SEQ ID NO: 1249073 - RNA, 18 nt, Human
gggccuggaggguccggg

SEQ ID NO: 1249074 - RNA, 18 nt, Human
gggguggggcgcgagggc

SEQ ID NO: 1249075 - RNA, 18 nt, Human
ggguggggcgcgagggcc

SEQ ID NO: 1249076 - RNA, 20 nt, Human
gguccgggguccgaggccgc

SEQ ID NO: 1249077 - RNA, 20 nt, Human
ggugcagcggcucacaccuc

SEQ ID NO: 1249078 - RNA, 24 nt, Human
guacuccagucugggugacagagc

SEQ ID NO: 1249079 - RNA, 24 nt, Human
gucauuguacuccagucuggguga

SEQ ID NO: 1249080 - RNA, 18 nt, Human
guggcucgggccuggggc

SEQ ID NO: 1249081 - RNA, 24 nt, Human
uaaaaaggcagagaauuuaggcca

SEQ ID NO: 1249082 - RNA, 18 nt, Human
uaaaguggaacaauccug

SEQ ID NO: 1249083 - RNA, 20 nt, Human
uaccgaaaaucucucucuau

SEQ ID NO: 1249084 - RNA, 22 nt, Human
uacuccagucugggugacagag

SEQ ID NO: 1249085 - RNA, 22 nt, Human
uagcaguagcuucucaucccuc

SEQ ID NO: 1249086 - RNA, 24 nt, Human
uagcgcuuugggaggccaaggcag

SEQ ID NO: 1249087 - RNA, 25 nt, Human
uagcgcuuugggaggccaaggcagg

SEQ ID NO: 1249088 - RNA, 21 nt, Human
uagcuucucaucccuccucag

SEQ ID NO: 1249089 - RNA, 22 nt, Human
uauaaacugucuuucugaaaca

SEQ ID NO: 1249090 - RNA, 20 nt, Human
uaugaguguaugugugugua

SEQ ID NO: 1249091 - RNA, 26 nt, Human
uauguaugaguguauguguguguaua

SEQ ID NO: 1249092 - RNA, 23 nt, Human
uauuggaaagucucaggucaaac

SEQ ID NO: 1249093 - RNA, 19 nt, Human
ucagaguaggcuugcaaag

SEQ ID NO: 1249094 - RNA, 18 nt, Human
ucaugguauaaacugucu

SEQ ID NO: 1249095 - RNA, 24 nt, Human
ucauuguacuccagucugggugac

SEQ ID NO: 1249096 - RNA, 24 nt, Human
uccagucugggugacagagcaaga

SEQ ID NO: 1249097 - RNA, 19 nt, Human
ucccagagcagcagauagc

SEQ ID NO: 1249098 - RNA, 26 nt, Human
ucuaaaaacaaaacaaaacaacagau

SEQ ID NO: 1249099 - RNA, 21 nt, Human
ucuccggccacgggcggaggu

SEQ ID NO: 1249100 - RNA, 23 nt, Human
ucucuaaaaacaaaacaaaacaa

SEQ ID NO: 1249101 - RNA, 18 nt, Human
ucucuggaggcugaagcc

SEQ ID NO: 1249102 - RNA, 22 nt, Human
ugacagagcaagacccugucuc

SEQ ID NO: 1249103 - RNA, 22 nt, Human
ugacccaguggcugaccucaca

SEQ ID NO: 1249104 - RNA, 18 nt, Human
ugaccucacaacguggua

SEQ ID NO: 1249105 - RNA, 23 nt, Human
ugagcccaggaguucaagaccag

SEQ ID NO: 1249106 - RNA, 22 nt, Human
ugagcccaguaguuaaaggcug

SEQ ID NO: 1249107 - RNA, 22 nt, Human
ugcaaagcaaguuaaaaaggca

SEQ ID NO: 1249108 - RNA, 18 nt, Human
uggaaugccaucaugaua

SEQ ID NO: 1249109 - RNA, 19 nt, Human
uggccaaaccaucucauuu

SEQ ID NO: 1249110 - RNA, 26 nt, Human
uggcgggccccaggccccgcccggca

SEQ ID NO: 1249111 - RNA, 23 nt, Human
uggcugaccucacaacgugguau

SEQ ID NO: 1249112 - RNA, 21 nt, Human
uggggcgcgagggccuggagg

SEQ ID NO: 1249113 - RNA, 21 nt, Human
uguaugaguguaugugugugu

SEQ ID NO: 1249114 - RNA, 23 nt, Human
ugugcaagcuuugcauugacuac

SEQ ID NO: 1249115 - RNA, 20 nt, Human
uguguguguauaaauuaaca

SEQ ID NO: 1249116 - RNA, 23 nt, Human
uguguguguauaaauuaacaauu

SEQ ID NO: 1249117 - RNA, 24 nt, Human
uuaaugcauuuuuaaaugcauaga

SEQ ID NO: 1249118 - RNA, 19 nt, Human
uuagcuaggugugguggug

SEQ ID NO: 1249119 - RNA, 22 nt, Human
uuagcuaggugugguggugugc

SEQ ID NO: 1249120 - RNA, 23 nt, Human
uucaauuaccuguugcuuugaga

SEQ ID NO: 1249121 - RNA, 20 nt, Human
uucauuuagauucugauaag

SEQ ID NO: 1249122 - RNA, 26 nt, Human
aaaaagaaacauacagcuguauugga

SEQ ID NO: 1249123 - RNA, 20 nt, Human
aaaagaaaaagaaacauaca

SEQ ID NO: 1249124 - RNA, 23 nt, Human
aaagaaacauacagcuguauugg

SEQ ID NO: 1249125 - RNA, 23 nt, Human
aaccaaucagcaaaaauaugugc

SEQ ID NO: 1249126 - RNA, 24 nt, Human
aaggcggggguaguggggcggggu

SEQ ID NO: 1249127 - RNA, 19 nt, Human
agaaaaaaaccacccucau

SEQ ID NO: 1249128 - RNA, 22 nt, Human
agaaaaagaaacauacagcugu

SEQ ID NO: 1249129 - RNA, 23 nt, Human
agaaaagaaaaagaaacauacag

SEQ ID NO: 1249130 - RNA, 20 nt, Human
agaacggcuuggggacagga

SEQ ID NO: 1249131 - RNA, 23 nt, Human
caccaaauuagaaaagaaaaaga

SEQ ID NO: 1249132 - RNA, 21 nt, Human
cacuccguuacgcuccugacc

SEQ ID NO: 1249133 - RNA, 22 nt, Human
ccaaauuagaaaagaaaaagaa

SEQ ID NO: 1249134 - RNA, 21 nt, Human
cgcagccgcgcacggguuucc

SEQ ID NO: 1249135 - RNA, 24 nt, Human
cuuaaaacacuucuuuccaacaca

SEQ ID NO: 1249136 - RNA, 18 nt, Human
gcgcagccgcgcacgggu

SEQ ID NO: 1249137 - RNA, 20 nt, Human
ggagccguccguuugcccgc

SEQ ID NO: 1249138 - RNA, 18 nt, Human
gucuagaacggcuugggg

SEQ ID NO: 1249139 - RNA, 27 nt, Human
gugccaccaaauuagaaaagaaaaaga

SEQ ID NO: 1249140 - RNA, 18 nt, Human
uaaagaaaaaaaccaccc

SEQ ID NO: 1249141 - RNA, 18 nt, Human
uaaaggagccggcggcug

SEQ ID NO: 1249142 - RNA, 24 nt, Human
uagaaaagaaaaagaaacauacag

SEQ ID NO: 1249143 - RNA, 25 nt, Human
ugacaacacacguccuauacaaaga

SEQ ID NO: 1249144 - RNA, 22 nt, Human
ugugguuauaccagugccacca

SEQ ID NO: 1249145 - RNA, 23 nt, Human
aaaacaaagugaagacucagccc

SEQ ID NO: 1249146 - RNA, 24 nt, Human
aaaagucaggaccccagcacccac

SEQ ID NO: 1249147 - RNA, 20 nt, Human
aaaccgaaacagagaacaaa

SEQ ID NO: 1249148 - RNA, 18 nt, Human
aaagaacagcuuauucca

SEQ ID NO: 1249149 - RNA, 18 nt, Human
aaccccacucuaccccuc

SEQ ID NO: 1249150 - RNA, 18 nt, Human
aaucacugagaaagacaa

SEQ ID NO: 1249151 - RNA, 18 nt, Human
accccacucuaccccucg

SEQ ID NO: 1249152 - RNA, 20 nt, Human
accgaaacagagaacaauaa

SEQ ID NO: 1249153 - RNA, 26 nt, Human
acucagccccagccuucacugcuggc

SEQ ID NO: 1249154 - RNA, 19 nt, Human
agaaagacaaauagaacug

SEQ ID NO: 1249155 - RNA, 23 nt, Human
agcaaaucucuccugcuaaaacc

SEQ ID NO: 1249156 - RNA, 18 nt, Human
agccauggcucuagcccu

SEQ ID NO: 1249157 - RNA, 21 nt, Human
agguucucccuaaccccacuc

SEQ ID NO: 1249158 - RNA, 19 nt, Human
auaaaaugauauacucucc

SEQ ID NO: 1249159 - RNA, 23 nt, Human
augaaacagcaaaucucuccugc

SEQ ID NO: 1249160 - RNA, 21 nt, Human
caaccacacuggcacuguccc

SEQ ID NO: 1249161 - RNA, 21 nt, Human
caccagauacuccugcugcac

SEQ ID NO: 1249162 - RNA, 25 nt, Human
cacuagccugagauugcaaccacac

SEQ ID NO: 1249163 - RNA, 22 nt, Human
cacuggcacugucccagguacu

SEQ ID NO: 1249164 - RNA, 21 nt, Human
cacuuuggccacaaacuccgg

SEQ ID NO: 1249165 - RNA, 24 nt, Human
cagcaaaacaaagugaagacucag

SEQ ID NO: 1249166 - RNA, 28 nt, Human
cagcaaaucucuccugcuaaaaccgaaa

SEQ ID NO: 1249167 - RNA, 19 nt, Human
cagccccagccuucacugc

SEQ ID NO: 1249168 - RNA, 21 nt, Human
cagcugccaucucgggcacgg

SEQ ID NO: 1249169 - RNA, 25 nt, Human
ccccagcacccacugcuguggggcc

SEQ ID NO: 1249170 - RNA, 22 nt, Human
cccccacaagaauaccuagagc

SEQ ID NO: 1249171 - RNA, 18 nt, Human
cccugacacuagccugag

SEQ ID NO: 1249172 - RNA, 25 nt, Human
ccgaaacagagaacaauaaaacaac

SEQ ID NO: 1249173 - RNA, 24 nt, Human
cgaaacagagaacaauaaaacauu

SEQ ID NO: 1249174 - RNA, 19 nt, Human
cuccugcugcacacuagcu

SEQ ID NO: 1249175 - RNA, 21 nt, Human
cugacacuagccugagauugc

SEQ ID NO: 1249176 - RNA, 25 nt, Human
cuggcacuugcauuggugcugguga

SEQ ID NO: 1249177 - RNA, 21 nt, Human
cuuuugaucgccaccgucuuc

SEQ ID NO: 1249178 - RNA, 21 nt, Human
gaagacucagccccagccuuc

SEQ ID NO: 1249179 - RNA, 23 nt, Human
gagaaagacaaauagaacuggaa

SEQ ID NO: 1249180 - RNA, 26 nt, Human
gcaaaacaaagugaagacucagcccc

SEQ ID NO: 1249181 - RNA, 20 nt, Human
gccugagauugcaaccacac

SEQ ID NO: 1249182 - RNA, 18 nt, Human
gggggagggggggaauga

SEQ ID NO: 1249183 - RNA, 19 nt, Human
uaaaaccgaaacagagaac

SEQ ID NO: 1249184 - RNA, 19 nt, Human
uaaaaugauauacucuccc

SEQ ID NO: 1249185 - RNA, 21 nt, Human
uaaggcaaacaaaacuuugca

SEQ ID NO: 1249186 - RNA, 21 nt, Human
uaccuagagcgugggauugcu

SEQ ID NO: 1249187 - RNA, 23 nt, Human
uagaacuggaacacagauaccau

SEQ ID NO: 1249188 - RNA, 18 nt, Human
uagauguucaacuuaagu

SEQ ID NO: 1249189 - RNA, 23 nt, Human
uaggcaaauacaagcagagagcg

SEQ ID NO: 1249190 - RNA, 19 nt, Human
uauauuugggggagggggg

SEQ ID NO: 1249191 - RNA, 19 nt, Human
uauggaacaaaggauuuug

SEQ ID NO: 1249192 - RNA, 23 nt, Human
uccuuugagagcccccacaagaa

SEQ ID NO: 1249193 - RNA, 22 nt, Human
ucucccuaaccccacucuaccc

SEQ ID NO: 1249194 - RNA, 24 nt, Human
ugaaaaaaaugcuuagguauggcg

SEQ ID NO: 1249195 - RNA, 20 nt, Human
ugagaaagacaaauagaacu

SEQ ID NO: 1249196 - RNA, 24 nt, Human
ugagaaagacaaauagaacuggaa

SEQ ID NO: 1249197 - RNA, 22 nt, Human
ugcaaccacacuggcacugucc

SEQ ID NO: 1249198 - RNA, 26 nt, Human
ugcaccagauacuccugcugcacacu

SEQ ID NO: 1249199 - RNA, 19 nt, Human
uggcacugucccagguacu

SEQ ID NO: 1249200 - RNA, 22 nt, Human
ugggauugcugugggacaccua

SEQ ID NO: 1249201 - RNA, 21 nt, Human
ugggugucauucacuuuggcc

SEQ ID NO: 1249202 - RNA, 26 nt, Human
ugucuuguuuccuuugagagccccca

SEQ ID NO: 1249203 - RNA, 21 nt, Human
uucuggagaacuaggcaaaua

SEQ ID NO: 1249204 - RNA, 21 nt, Human
uuggugcuggugcugaugcuu

SEQ ID NO: 1249205 - RNA, 20 nt, Human
uuugggggagggggggaaug

SEQ ID NO: 1249206 - RNA, 19 nt, Human
caccaauggugguggaacc

SEQ ID NO: 1249207 - RNA, 19 nt, Human
auguacacacaaguuugua

SEQ ID NO: 1249208 - RNA, 21 nt, Human
gcugccuccgcuacgagccug

SEQ ID NO: 1249209 - RNA, 24 nt, Human
ggaggguaggauccguagaugagg

SEQ ID NO: 1249210 - RNA, 20 nt, Human
gggucagcaggcgaccggcc

SEQ ID NO: 1249211 - RNA, 18 nt, Human
uacauuuguuuccacaca

SEQ ID NO: 1249212 - RNA, 18 nt, Human
uccacacaugugccaaau

SEQ ID NO: 1249213 - RNA, 22 nt, Human
ugaaugcuugcaagagcgggga

SEQ ID NO: 1249214 - RNA, 24 nt, Human
ugcaagagcggggaggguaggauc

SEQ ID NO: 1249215 - RNA, 25 nt, Human
uuccacacaugugccaaauuuuacc

SEQ ID NO: 1249216 - RNA, 21 nt, Human
uuguauuuuuuagagcaaaac

SEQ ID NO: 1249217 - RNA, 23 nt, Human
uuuuuagagcaaaacaacaguua

SEQ ID NO: 1249218 - RNA, 20 nt, Human
caaaagacauuguacaccau

SEQ ID NO: 1249219 - RNA, 20 nt, Human
caaaguuugugcaaaagaca

SEQ ID NO: 1249220 - RNA, 23 nt, Human
uaaaaauaaaacugaauacucau

SEQ ID NO: 1249221 - RNA, 23 nt, Human
uaaaaucugaauacagauacugu

SEQ ID NO: 1249222 - RNA, 19 nt, Human
uaacagguuucuuuacucc

SEQ ID NO: 1249223 - RNA, 21 nt, Human
uacaugauguuuauaaugugg

SEQ ID NO: 1249224 - RNA, 21 nt, Human
ucaucaaaggacuuuggugcc

SEQ ID NO: 1249225 - RNA, 21 nt, Human
uuaaaacuauucugugcuaca

SEQ ID NO: 1249226 - RNA, 18 nt, Human
aggggcccggccaggagg

SEQ ID NO: 1249227 - RNA, 18 nt, Human
aucuccgucaaacgucuc

SEQ ID NO: 1249228 - RNA, 25 nt, Human
cuccagcgacgcgccgcgggguacc

SEQ ID NO: 1249229 - RNA, 21 nt, Human
ucugcacgaugaacuccggga

SEQ ID NO: 1249230 - RNA, 21 nt, Human
ugccaggcacacuuaagcccu

SEQ ID NO: 1249231 - RNA, 18 nt, Human
aaauacaccucucucaca

SEQ ID NO: 1249232 - RNA, 25 nt, Human
aagaagacgugacaacaccagaaac

SEQ ID NO: 1249233 - RNA, 20 nt, Human
aagacuggggaggggugugg

SEQ ID NO: 1249234 - RNA, 19 nt, Human
aagagguggggaggggagg

SEQ ID NO: 1249235 - RNA, 19 nt, Human
acaagaacaucucucuggc

SEQ ID NO: 1249236 - RNA, 24 nt, Human
accagaaacaagaacaucucucug

SEQ ID NO: 1249237 - RNA, 18 nt, Human
accagcaggcugacaggc

SEQ ID NO: 1249238 - RNA, 20 nt, Human
accagcaggcugacaggccc

SEQ ID NO: 1249239 - RNA, 19 nt, Human
accgccuacaaacgucaau

SEQ ID NO: 1249240 - RNA, 20 nt, Human
accgcggccagggccagggc

SEQ ID NO: 1249241 - RNA, 25 nt, Human
acgcaguuccuccucauccccggag

SEQ ID NO: 1249242 - RNA, 25 nt, Human
agaaaacaagaagacgugacaacac

SEQ ID NO: 1249243 - RNA, 20 nt, Human
agaccccaucacgcagcaag

SEQ ID NO: 1249244 - RNA, 21 nt, Human
agagaggccagcaaggucagg

SEQ ID NO: 1249245 - RNA, 18 nt, Human
agagguggggaggggagg

SEQ ID NO: 1249246 - RNA, 23 nt, Human
agauccccagauucccuacccuu

SEQ ID NO: 1249247 - RNA, 23 nt, Human
agcagaagccacggggggugggc

SEQ ID NO: 1249248 - RNA, 19 nt, Human
agcccugcuccuccccagu

SEQ ID NO: 1249249 - RNA, 22 nt, Human
agccugugcugaccaguacaca

SEQ ID NO: 1249250 - RNA, 22 nt, Human
aggaggguacgugguagguggg

SEQ ID NO: 1249251 - RNA, 21 nt, Human
aggcaggcggacagcuucauu

SEQ ID NO: 1249252 - RNA, 21 nt, Human
aggccagcaaggucagggguu

SEQ ID NO: 1249253 - RNA, 24 nt, Human
aggcccuucacgcugccucugccc

SEQ ID NO: 1249254 - RNA, 24 nt, Human
aggcugcccccagagaucuguugg

SEQ ID NO: 1249255 - RNA, 19 nt, Human
agggauccuggggcccauc

SEQ ID NO: 1249256 - RNA, 23 nt, Human
aggggagagaagagguggggagg

SEQ ID NO: 1249257 - RNA, 23 nt, Human
agguagagaagcagcaggcgggg

SEQ ID NO: 1249258 - RNA, 21 nt, Human
aguccgagcucagguaguuuc

SEQ ID NO: 1249259 - RNA, 20 nt, Human
auaaagugcauggagacccc

SEQ ID NO: 1249260 - RNA, 20 nt, Human
auccuggggcccaucucucc

SEQ ID NO: 1249261 - RNA, 18 nt, Human
caaagaacuuuccuccac

SEQ ID NO: 1249262 - RNA, 22 nt, Human
caaaucccccccuccccgaagc

SEQ ID NO: 1249263 - RNA, 21 nt, Human
caacaccagaaacaagaacau

SEQ ID NO: 1249264 - RNA, 20 nt, Human
caacaccagaaacaagaacc

SEQ ID NO: 1249265 - RNA, 25 nt, Human
caagaagacgugacaacaccagaaa

SEQ ID NO: 1249266 - RNA, 21 nt, Human
caccagaaacaagaacaucuc

SEQ ID NO: 1249267 - RNA, 18 nt, Human
caccccccacuguaucac

SEQ ID NO: 1249268 - RNA, 21 nt, Human
caccuccgccccccgccgcga

SEQ ID NO: 1249269 - RNA, 21 nt, Human
cacgaggcagccacuguccag

SEQ ID NO: 1249270 - RNA, 24 nt, Human
cacgaggcagccacuguccagccu

SEQ ID NO: 1249271 - RNA, 19 nt, Human
cacuccucuucuccuccag

SEQ ID NO: 1249272 - RNA, 19 nt, Human
cacucuugucccacagagg

SEQ ID NO: 1249273 - RNA, 22 nt, Human
cacugggcacccccaccccugu

SEQ ID NO: 1249274 - RNA, 22 nt, Human
cagagguggucaaggguggaca

SEQ ID NO: 1249275 - RNA, 18 nt, Human
cagcaaagaacuuuccuc

SEQ ID NO: 1249276 - RNA, 21 nt, Human
cagcaaagaacuuuccuccac

SEQ ID NO: 1249277 - RNA, 25 nt, Human
cagcagaauucccuccuucugguuu

SEQ ID NO: 1249278 - RNA, 19 nt, Human
cagcuccgacacacauuuc

SEQ ID NO: 1249279 - RNA, 24 nt, Human
cagggauccuggggcccaucucuc

SEQ ID NO: 1249280 - RNA, 24 nt, Human
cagggcugggccuucgugcccggg

SEQ ID NO: 1249281 - RNA, 19 nt, Human
cagggguucucaggagacu

SEQ ID NO: 1249282 - RNA, 21 nt, Human
cagugaaucacacacagaaac

SEQ ID NO: 1249283 - RNA, 21 nt, Human
ccaagccaggacucgaucacu

SEQ ID NO: 1249284 - RNA, 24 nt, Human
ccaccaaacugggagguuugugcc

SEQ ID NO: 1249285 - RNA, 19 nt, Human
ccagcaaggucagggguuc

SEQ ID NO: 1249286 - RNA, 21 nt, Human
cccaccaaacugggagguuug

SEQ ID NO: 1249287 - RNA, 18 nt, Human
ccccacuugcccaccaaa

SEQ ID NO: 1249288 - RNA, 18 nt, Human
ccccagagaucuguuggg

SEQ ID NO: 1249289 - RNA, 19 nt, Human
ccccagagaucuguugggg

SEQ ID NO: 1249290 - RNA, 26 nt, Human
ccccagagaucuguuggggggaccag

SEQ ID NO: 1249291 - RNA, 21 nt, Human
ccccagagguggucaaggggg

SEQ ID NO: 1249292 - RNA, 21 nt, Human
ccccaucacgcagcaagggcu

SEQ ID NO: 1249293 - RNA, 24 nt, Human
cccccagagguggucaagggugga

SEQ ID NO: 1249294 - RNA, 23 nt, Human
ccccccgccgcgauccagcuguc

SEQ ID NO: 1249295 - RNA, 19 nt, Human
cccgggccgccccaccucc

SEQ ID NO: 1249296 - RNA, 21 nt, Human
cccgggcugagaccgcggcca

SEQ ID NO: 1249297 - RNA, 25 nt, Human
cccgggcugagaccgcggccagggc

SEQ ID NO: 1249298 - RNA, 19 nt, Human
cccuacccuugggccccuc

SEQ ID NO: 1249299 - RNA, 21 nt, Human
cccucuucacuuuccccuccc

SEQ ID NO: 1249300 - RNA, 20 nt, Human
cccuugcauggggagggcuc

SEQ ID NO: 1249301 - RNA, 18 nt, Human
ccgcggccagggccaggg

SEQ ID NO: 1249302 - RNA, 19 nt, Human
ccgcggccagggccagggc

SEQ ID NO: 1249303 - RNA, 21 nt, Human
ccuagaaaacagacugcaaau

SEQ ID NO: 1249304 - RNA, 21 nt, Human
ccucacuccucuucuccucca

SEQ ID NO: 1249305 - RNA, 22 nt, Human
ccucacuccucuucuccuccag

SEQ ID NO: 1249306 - RNA, 23 nt, Human
ccuccacccuuccuggcuggccc

SEQ ID NO: 1249307 - RNA, 21 nt, Human
ccucuacuaggaaggcccuuc

SEQ ID NO: 1249308 - RNA, 21 nt, Human
ccugcagcuccgacacacauu

SEQ ID NO: 1249309 - RNA, 24 nt, Human
ccuugggccccucucccuuggugc

SEQ ID NO: 1249310 - RNA, 19 nt, Human
cgccccaccuccgcccccc

SEQ ID NO: 1249311 - RNA, 21 nt, Human
cgcggccagggccagggcugg

SEQ ID NO: 1249312 - RNA, 20 nt, Human
cggggucccgggcugagacc

SEQ ID NO: 1249313 - RNA, 18 nt, Human
cuagaagcuccaccgccu

SEQ ID NO: 1249314 - RNA, 22 nt, Human
cuaucugcaugucaagggcaaa

SEQ ID NO: 1249315 - RNA, 28 nt, Human
cucacagugcugcuagccgauuucaguu

SEQ ID NO: 1249316 - RNA, 19 nt, Human
cucagaccuucccucccaa

SEQ ID NO: 1249317 - RNA, 18 nt, Human
cuccagcucuguaucacu

SEQ ID NO: 1249318 - RNA, 24 nt, Human
cuccugucugccaucucagcuguc

SEQ ID NO: 1249319 - RNA, 19 nt, Human
cucuaggccaauauagcca

SEQ ID NO: 1249320 - RNA, 21 nt, Human
cugagaccgcggccagggcca

SEQ ID NO: 1249321 - RNA, 19 nt, Human
cugcaaauaaauaaagugc

SEQ ID NO: 1249322 - RNA, 22 nt, Human
cugcugcaguuuucaaucccag

SEQ ID NO: 1249323 - RNA, 24 nt, Human
cuggcuggcccaggaagaggcugg

SEQ ID NO: 1249324 - RNA, 20 nt, Human
cuguaucacucuugucccac

SEQ ID NO: 1249325 - RNA, 19 nt, Human
cugucccuggagcuggcca

SEQ ID NO: 1249326 - RNA, 22 nt, Human
cugugaucuucuguacugcucc

SEQ ID NO: 1249327 - RNA, 18 nt, Human
gacuugggacaaggaggc

SEQ ID NO: 1249328 - RNA, 21 nt, Human
gagaaaacaagaagacgugac

SEQ ID NO: 1249329 - RNA, 18 nt, Human
gagaagacuggggagggg

SEQ ID NO: 1249330 - RNA, 22 nt, Human
gagaagagguggggaggggagg

SEQ ID NO: 1249331 - RNA, 23 nt, Human
gagagaagagguggggaggggag

SEQ ID NO: 1249332 - RNA, 19 nt, Human
gagguuugugccacuucac

SEQ ID NO: 1249333 - RNA, 25 nt, Human
gcaaaucccccccuccccgaagccu

SEQ ID NO: 1249334 - RNA, 21 nt, Human
gcaggcggacagcuucauuca

SEQ ID NO: 1249335 - RNA, 24 nt, Human
gccagccugugcugaccaguacac

SEQ ID NO: 1249336 - RNA, 20 nt, Human
gccccacuugcccaccaaac

SEQ ID NO: 1249337 - RNA, 18 nt, Human
gcccccagagaucuguug

SEQ ID NO: 1249338 - RNA, 24 nt, Human
gcccuaggagcccuaugcuucccu

SEQ ID NO: 1249339 - RNA, 21 nt, Human
gcuccaccgccuagaaaacag

SEQ ID NO: 1249340 - RNA, 20 nt, Human
ggacauggacauccgugacc

SEQ ID NO: 1249341 - RNA, 21 nt, Human
ggaccagcaggcugacaggcc

SEQ ID NO: 1249342 - RNA, 20 nt, Human
ggagcuggccagacugcugc

SEQ ID NO: 1249343 - RNA, 22 nt, Human
gggcacccccaccccugugagg

SEQ ID NO: 1249344 - RNA, 20 nt, Human
ggggaaagcuuggcucccca

SEQ ID NO: 1249345 - RNA, 18 nt, Human
gggguggguucccugcag

SEQ ID NO: 1249346 - RNA, 20 nt, Human
ggugggguggggaggcuagg

SEQ ID NO: 1249347 - RNA, 19 nt, Human
guccagggucagaggugcc

SEQ ID NO: 1249348 - RNA, 21 nt, Human
gucuuggagaagacuggggag

SEQ ID NO: 1249349 - RNA, 22 nt, Human
gugaggcaacagguaguccgag

SEQ ID NO: 1249350 - RNA, 24 nt, Human
uacacagugaaucacacacagaaa

SEQ ID NO: 1249351 - RNA, 20 nt, Human
ucacugggcacccccacccc

SEQ ID NO: 1249352 - RNA, 22 nt, Human
uccagagucccaggaugagccc

SEQ ID NO: 1249353 - RNA, 21 nt, Human
ucccacagaggcugcccccag

SEQ ID NO: 1249354 - RNA, 24 nt, Human
ucccaggaugagccccuugcaugg

SEQ ID NO: 1249355 - RNA, 20 nt, Human
ucccagggaacucagaccuu

SEQ ID NO: 1249356 - RNA, 21 nt, Human
ucccagggaacucagaccuuc

SEQ ID NO: 1249357 - RNA, 19 nt, Human
ucccaucaugccaggucuu

SEQ ID NO: 1249358 - RNA, 26 nt, Human
ucccgggcugagaccgcggccagggc

SEQ ID NO: 1249359 - RNA, 23 nt, Human
ucccuacccuugggccccucucc

SEQ ID NO: 1249360 - RNA, 22 nt, Human
ucccugcagucgggggucucug

SEQ ID NO: 1249361 - RNA, 18 nt, Human
ucccuggagcuggccaga

SEQ ID NO: 1249362 - RNA, 22 nt, Human
ucccuggagcuggccagacugc

SEQ ID NO: 1249363 - RNA, 23 nt, Human
ucccuggagcuggccagacugcu

SEQ ID NO: 1249364 - RNA, 19 nt, Human
uccuggggcccaucucucc

SEQ ID NO: 1249365 - RNA, 22 nt, Human
uccugugaucuucuguacugcu

SEQ ID NO: 1249366 - RNA, 23 nt, Human
ucucacagugcugcuagccgauu

SEQ ID NO: 1249367 - RNA, 21 nt, Human
ucucucacagugcugcuagcc

SEQ ID NO: 1249368 - RNA, 19 nt, Human
ucuuggagaagacugggga

SEQ ID NO: 1249369 - RNA, 24 nt, Human
ucuuggagaagacuggggaggggg

SEQ ID NO: 1249370 - RNA, 22 nt, Human
ugaaaaggcagggacaggagca

SEQ ID NO: 1249371 - RNA, 25 nt, Human
ugaaaaggcagggacaggagcaaau

SEQ ID NO: 1249372 - RNA, 20 nt, Human
ugacaacaccagaaacaaga

SEQ ID NO: 1249373 - RNA, 21 nt, Human
ugagagaggccagcaagguca

SEQ ID NO: 1249374 - RNA, 21 nt, Human
ugagccuuuguccaugcugug

SEQ ID NO: 1249375 - RNA, 19 nt, Human
ugaggaggguacgugguag

SEQ ID NO: 1249376 - RNA, 22 nt, Human
ugcccgcgacccggccgggggc

SEQ ID NO: 1249377 - RNA, 19 nt, Human
ugcccuaggagcccuaugc

SEQ ID NO: 1249378 - RNA, 21 nt, Human
ugcuccaaagaaagcgagauc

SEQ ID NO: 1249379 - RNA, 27 nt, Human
ugcugaccaguacacagugaaucacac

SEQ ID NO: 1249380 - RNA, 21 nt, Human
uggcaaggccagagaaggggc

SEQ ID NO: 1249381 - RNA, 19 nt, Human
uggcccaggaagaggcugg

SEQ ID NO: 1249382 - RNA, 24 nt, Human
ugggagccugcaggcccaggggca

SEQ ID NO: 1249383 - RNA, 26 nt, Human
ugggcacccccaccccugugagccuu

SEQ ID NO: 1249384 - RNA, 23 nt, Human
ugggcggacauggacauccguga

SEQ ID NO: 1249385 - RNA, 22 nt, Human
uggggaggggagguagagaagc

SEQ ID NO: 1249386 - RNA, 21 nt, Human
uggggaggggugugggagccu

SEQ ID NO: 1249387 - RNA, 19 nt, Human
ugggguggggaggcuaggc

SEQ ID NO: 1249388 - RNA, 24 nt, Human
uggugaagcuccaggugggguggg

SEQ ID NO: 1249389 - RNA, 25 nt, Human
uggugaagcuccagguggggugggg

SEQ ID NO: 1249390 - RNA, 21 nt, Human
ugugcaucagacacaaggagg

SEQ ID NO: 1249391 - RNA, 23 nt, Human
ugugggagccugcaggcccaggg

SEQ ID NO: 1249392 - RNA, 20 nt, Human
uguuggggggaccagcaggc

SEQ ID NO: 1249393 - RNA, 23 nt, Human
uucacuuuccccucccuccuccc

SEQ ID NO: 1249394 - RNA, 25 nt, Human
uuggagaagacuggggaggggugug

SEQ ID NO: 1249395 - RNA, 21 nt, Human
uuggcuccccagggauccugg

SEQ ID NO: 1249396 - RNA, 18 nt, Human
uugucccacagaggcugc

SEQ ID NO: 1249397 - RNA, 26 nt, Human
uuucccccucuuuugccaaugugagg

SEQ ID NO: 1249398 - RNA, 20 nt, Human
ggcgcagcugguuacugagc

SEQ ID NO: 1249399 - RNA, 22 nt, Human
uagaaggugggaguaugcagca

SEQ ID NO: 1249400 - RNA, 20 nt, Human
aaacaaaacaaaacaauuca

SEQ ID NO: 1249401 - RNA, 19 nt, Human
aaagcccagcuuucacugc

SEQ ID NO: 1249402 - RNA, 26 nt, Human
acuuuaaaaaauuauuaaggcaaaag

SEQ ID NO: 1249403 - RNA, 23 nt, Human
agauaaucauaaaauucaaaagc

SEQ ID NO: 1249404 - RNA, 21 nt, Human
cagauaaucauaaaauucaaa

SEQ ID NO: 1249405 - RNA, 20 nt, Human
cagcacagaaaacuugucag

SEQ ID NO: 1249406 - RNA, 24 nt, Human
cuccucauggccaucgugaaugau

SEQ ID NO: 1249407 - RNA, 24 nt, Human
cuugacucaaacauuccaggaggc

SEQ ID NO: 1249408 - RNA, 22 nt, Human
gaaaacaaaacaaaacaauuca

SEQ ID NO: 1249409 - RNA, 27 nt, Human
uaaggcaaaagcccagcuuucacugcc

SEQ ID NO: 1249410 - RNA, 23 nt, Human
uggaaagcaauucccuugacuca

SEQ ID NO: 1249411 - RNA, 27 nt, Human
uggaaagcaauucccuugacucaaaca

SEQ ID NO: 1249412 - RNA, 18 nt, Human
uggguuuuaugagguuug

SEQ ID NO: 1249413 - RNA, 24 nt, Human
uuaaggcaaaagcccagcuuucac

SEQ ID NO: 1249414 - RNA, 24 nt, Human
uucaaaagccccacugcugcuucu

SEQ ID NO: 1249415 - RNA, 21 nt, Human
uucccuugacucaaacauucc

SEQ ID NO: 1249416 - RNA, 24 nt, Human
aaacaaaaccaaggagacagagaa

SEQ ID NO: 1249417 - RNA, 20 nt, Human
aaacaaucaggauuucaaca

SEQ ID NO: 1249418 - RNA, 26 nt, Human
aagauaaaaaaaccauuacauacaga

SEQ ID NO: 1249419 - RNA, 21 nt, Human
aagcaaagacuacacugcuua

SEQ ID NO: 1249420 - RNA, 18 nt, Human
aagcacauauauguacaa

SEQ ID NO: 1249421 - RNA, 21 nt, Human
aauuauuagugagauauuuca

SEQ ID NO: 1249422 - RNA, 22 nt, Human
acccaaguacccuagggagaca

SEQ ID NO: 1249423 - RNA, 18 nt, Human
agaaggggaauugagucu

SEQ ID NO: 1249424 - RNA, 26 nt, Human
aguaaaaagaaccugucaagaacccu

SEQ ID NO: 1249425 - RNA, 21 nt, Human
aguucuucuccuuccucuuuu

SEQ ID NO: 1249426 - RNA, 19 nt, Human
auacagaguauacagauaa

SEQ ID NO: 1249427 - RNA, 23 nt, Human
aucuuauauaguaaacaaaacca

SEQ ID NO: 1249428 - RNA, 24 nt, Human
caaaaccaaggagacagagaaagg

SEQ ID NO: 1249429 - RNA, 22 nt, Human
caaccaccaacccaaguacccu

SEQ ID NO: 1249430 - RNA, 21 nt, Human
caccuacagcgccucagcgcc

SEQ ID NO: 1249431 - RNA, 21 nt, Human
cacugucaguucuucuccuuc

SEQ ID NO: 1249432 - RNA, 19 nt, Human
cagagaaaggaagggcaac

SEQ ID NO: 1249433 - RNA, 18 nt, Human
cagagaacccccauagac

SEQ ID NO: 1249434 - RNA, 20 nt, Human
cagagaacccccauagacaa

SEQ ID NO: 1249435 - RNA, 21 nt, Human
cagcagaucucaauuuguauu

SEQ ID NO: 1249436 - RNA, 21 nt, Human
cagcuccugcagagaaccccc

SEQ ID NO: 1249437 - RNA, 18 nt, Human
caucuggaagcuccugcu

SEQ ID NO: 1249438 - RNA, 20 nt, Human
cccaaagauacugcccucuc

SEQ ID NO: 1249439 - RNA, 23 nt, Human
cccauucacaaugauucuaagca

SEQ ID NO: 1249440 - RNA, 22 nt, Human
cccccauagacaagacuggagu

SEQ ID NO: 1249441 - RNA, 19 nt, Human
ccucuuuuuuucaaugacc

SEQ ID NO: 1249442 - RNA, 23 nt, Human
ccugcagagaacccccauagacc

SEQ ID NO: 1249443 - RNA, 19 nt, Human
cgcccccuuccagcaguuu

SEQ ID NO: 1249444 - RNA, 22 nt, Human
cucagcgcccacgguucuccca

SEQ ID NO: 1249445 - RNA, 20 nt, Human
cucccaagcucaccggcaac

SEQ ID NO: 1249446 - RNA, 19 nt, Human
cucucugaaaucguugggg

SEQ ID NO: 1249447 - RNA, 23 nt, Human
cucucugaaaucguugggguggg

SEQ ID NO: 1249448 - RNA, 21 nt, Human
cugaaaucguuggggugggag

SEQ ID NO: 1249449 - RNA, 22 nt, Human
cugcagagaacccccauagaca

SEQ ID NO: 1249450 - RNA, 23 nt, Human
cuucaggccauggagcaauuuac

SEQ ID NO: 1249451 - RNA, 21 nt, Human
ggaagggcaaccaccaaccca

SEQ ID NO: 1249452 - RNA, 18 nt, Human
ggagcccugaagcuaaca

SEQ ID NO: 1249453 - RNA, 18 nt, Human
gggagggagccaccuaca

SEQ ID NO: 1249454 - RNA, 19 nt, Human
gucccuaccaaguguggaa

SEQ ID NO: 1249455 - RNA, 19 nt, Human
gugaaaagcaaagacuaca

SEQ ID NO: 1249456 - RNA, 23 nt, Human
gugcauaguaaaguggacauuau

SEQ ID NO: 1249457 - RNA, 25 nt, Human
uaaaaagaaccugucaagaacccca

SEQ ID NO: 1249458 - RNA, 26 nt, Human
uaaacaaaaccaaggagacagagaaa

SEQ ID NO: 1249459 - RNA, 19 nt, Human
uacacagucauucugaaug

SEQ ID NO: 1249460 - RNA, 23 nt, Human
uagaccacaugaagauaaaaucu

SEQ ID NO: 1249461 - RNA, 23 nt, Human
uagaugcaaacaucugacaacuu

SEQ ID NO: 1249462 - RNA, 21 nt, Human
uaguacuugagcuuuaucagu

SEQ ID NO: 1249463 - RNA, 21 nt, Human
ucaccuacuuuuuucauacca

SEQ ID NO: 1249464 - RNA, 30 nt, Human
ucacugucaguucuucuccuuccucuuuuu

SEQ ID NO: 1249465 - RNA, 19 nt, Human
ucagaagacuccuguucag

SEQ ID NO: 1249466 - RNA, 23 nt, Human
ucagcgcccacgguucucccaag

SEQ ID NO: 1249467 - RNA, 23 nt, Human
ucaguucuucuccuuccucuuuu

SEQ ID NO: 1249468 - RNA, 20 nt, Human
ucucucagucacggcacuuc

SEQ ID NO: 1249469 - RNA, 18 nt, Human
ucugaaaucguuggggug

SEQ ID NO: 1249470 - RNA, 22 nt, Human
ucugaaaucguuggggugggag

SEQ ID NO: 1249471 - RNA, 22 nt, Human
ucuucuccuuccucuuuuuuuc

SEQ ID NO: 1249472 - RNA, 18 nt, Human
ugaaaagaggcuuuacac

SEQ ID NO: 1249473 - RNA, 19 nt, Human
ugaauuucuggcuguccca

SEQ ID NO: 1249474 - RNA, 24 nt, Human
ugagucugauagaguuaaaagcac

SEQ ID NO: 1249475 - RNA, 21 nt, Human
uggaaaaucacaugacgagga

SEQ ID NO: 1249476 - RNA, 24 nt, Human
uggaacauaauuuacaaugcagaa

SEQ ID NO: 1249477 - RNA, 20 nt, Human
uggaguaucccugaugccca

SEQ ID NO: 1249478 - RNA, 22 nt, Human
ugggagggagccaccuacagcg

SEQ ID NO: 1249479 - RNA, 19 nt, Human
uggguugauguaugugggu

SEQ ID NO: 1249480 - RNA, 18 nt, Human
ugucuagaccacaugaag

SEQ ID NO: 1249481 - RNA, 19 nt, Human
ugugaaaagcaaagacuac

SEQ ID NO: 1249482 - RNA, 21 nt, Human
ugugaguaaaaagaaccuguc

SEQ ID NO: 1249483 - RNA, 19 nt, Human
uguggguagauuauguugu

SEQ ID NO: 1249484 - RNA, 22 nt, Human
uguuuuguuuugcauaguuuca

SEQ ID NO: 1249485 - RNA, 18 nt, Human
uuucagcacaaaugaaau

SEQ ID NO: 1249486 - RNA, 18 nt, Human
aagggugggggguggggg

SEQ ID NO: 1249487 - RNA, 24 nt, Human
aaggguggggggugggggggaaga

SEQ ID NO: 1249488 - RNA, 20 nt, Human
caccucggccccggaggccc

SEQ ID NO: 1249489 - RNA, 23 nt, Human
cggaggccccggcgcaaccccgc

SEQ ID NO: 1249490 - RNA, 23 nt, Human
cggcgcaaccccgcuuugggcgg

SEQ ID NO: 1249491 - RNA, 21 nt, Human
cucggccccggaggccccggc

SEQ ID NO: 1249492 - RNA, 18 nt, Human
gagcaggcccaccucggc

SEQ ID NO: 1249493 - RNA, 21 nt, Human
gcccaccucggccccggaggc

SEQ ID NO: 1249494 - RNA, 25 nt, Human
gccccggaggccccggcgcaacccc

SEQ ID NO: 1249495 - RNA, 20 nt, Human
ggccccggcgcaaccccgcu

SEQ ID NO: 1249496 - RNA, 25 nt, Human
gggggugggggggaagauuuaagug

SEQ ID NO: 1249497 - RNA, 18 nt, Human
gggugggggggaagauuu

SEQ ID NO: 1249498 - RNA, 19 nt, Human
gggugggggguggggggga

SEQ ID NO: 1249499 - RNA, 20 nt, Human
ucagcaaaaggguggggggu

SEQ ID NO: 1249500 - RNA, 20 nt, Human
uggggcaucuaccaaugauu

SEQ ID NO: 1249501 - RNA, 20 nt, Human
ugggggggaagauuuaagug

SEQ ID NO: 1249502 - RNA, 19 nt, Human
aaacuauaccaauaugccc

SEQ ID NO: 1249503 - RNA, 18 nt, Human
aaaguauaaaccaaggaa

SEQ ID NO: 1249504 - RNA, 25 nt, Human
aagaauaaaaggaaaucuccacaac

SEQ ID NO: 1249505 - RNA, 24 nt, Human
aaugcaauguuggugccuuaggaa

SEQ ID NO: 1249506 - RNA, 25 nt, Human
acagaagaaaacacacuuuagguca

SEQ ID NO: 1249507 - RNA, 18 nt, Human
acauuugagacccgcaac

SEQ ID NO: 1249508 - RNA, 23 nt, Human
accaagauauucuaccucccuac

SEQ ID NO: 1249509 - RNA, 20 nt, Human
accacuccugaaaaaaaccu

SEQ ID NO: 1249510 - RNA, 21 nt, Human
accuucuacaagaauugaaaa

SEQ ID NO: 1249511 - RNA, 22 nt, Human
acgcagggucuagcugccuaac

SEQ ID NO: 1249512 - RNA, 21 nt, Human
agaaaaaguauaaaccaagga

SEQ ID NO: 1249513 - RNA, 19 nt, Human
agaagcaaaaagcuaguag

SEQ ID NO: 1249514 - RNA, 20 nt, Human
agacaucaccacuccugaaa

SEQ ID NO: 1249515 - RNA, 18 nt, Human
agacuuccuacccugaug

SEQ ID NO: 1249516 - RNA, 19 nt, Human
agaguaucaaagacuaaaa

SEQ ID NO: 1249517 - RNA, 21 nt, Human
agccaaaccaacauugcaagc

SEQ ID NO: 1249518 - RNA, 19 nt, Human
agugaggcagcucauguac

SEQ ID NO: 1249519 - RNA, 23 nt, Human
auaggaaauauggacuaucuuca

SEQ ID NO: 1249520 - RNA, 20 nt, Human
auauucuucaucucccagaa

SEQ ID NO: 1249521 - RNA, 20 nt, Human
aucccaaacuccacagcuga

SEQ ID NO: 1249522 - RNA, 23 nt, Human
auccccuccccaccaagauauuc

SEQ ID NO: 1249523 - RNA, 19 nt, Human
caaaccaacauugcaagca

SEQ ID NO: 1249524 - RNA, 21 nt, Human
caaagacuaaaaauacuacaa

SEQ ID NO: 1249525 - RNA, 19 nt, Human
cacauuugagacccgcaac

SEQ ID NO: 1249526 - RNA, 21 nt, Human
caccaagauauucuaccuccc

SEQ ID NO: 1249527 - RNA, 21 nt, Human
cacccuccuguuguugacuuc

SEQ ID NO: 1249528 - RNA, 24 nt, Human
cagaguaucaaagacuaaaaauac

SEQ ID NO: 1249529 - RNA, 21 nt, Human
caucccaagauuucccccaga

SEQ ID NO: 1249530 - RNA, 18 nt, Human
cauuugagacccgcaacu

SEQ ID NO: 1249531 - RNA, 21 nt, Human
ccagaagcugauaacaucccc

SEQ ID NO: 1249532 - RNA, 25 nt, Human
ccccaccaagauauucuaccucccu

SEQ ID NO: 1249533 - RNA, 18 nt, Human
ccuaggaaaaagcauccc

SEQ ID NO: 1249534 - RNA, 22 nt, Human
ccucaguggacuccccagccaa

SEQ ID NO: 1249535 - RNA, 21 nt, Human
ccucccuacugcucaccgcuu

SEQ ID NO: 1249536 - RNA, 19 nt, Human
ccuccuguuguugacuucu

SEQ ID NO: 1249537 - RNA, 21 nt, Human
ccuccuguuguugacuucugg

SEQ ID NO: 1249538 - RNA, 21 nt, Human
ccuuaggaacuagcacuuaca

SEQ ID NO: 1249539 - RNA, 22 nt, Human
cuccaagcucagaucccaaacu

SEQ ID NO: 1249540 - RNA, 19 nt, Human
cuccugaaaaaaaccuucu

SEQ ID NO: 1249541 - RNA, 23 nt, Human
cucuccccacaaguauuucuaaa

SEQ ID NO: 1249542 - RNA, 24 nt, Human
cucuccccacaaguauuucuaaaa

SEQ ID NO: 1249543 - RNA, 22 nt, Human
cugaaaggaugaucaaacccug

SEQ ID NO: 1249544 - RNA, 21 nt, Human
cugaagaucucacaacagaga

SEQ ID NO: 1249545 - RNA, 20 nt, Human
cugauaacauccccucccca

SEQ ID NO: 1249546 - RNA, 19 nt, Human
cuuugugccaucaacaugg

SEQ ID NO: 1249547 - RNA, 23 nt, Human
gagcaucagacaucaccacuccu

SEQ ID NO: 1249548 - RNA, 19 nt, Human
gccaaaacauaucacaacc

SEQ ID NO: 1249549 - RNA, 26 nt, Human
ggagcccuuucaagugcuuuccacuu

SEQ ID NO: 1249550 - RNA, 21 nt, Human
ggugugugugugugugugugu

SEQ ID NO: 1249551 - RNA, 20 nt, Human
gugugugugugugugugugu

SEQ ID NO: 1249552 - RNA, 22 nt, Human
uaaaagagaagcaaaaagcuag

SEQ ID NO: 1249553 - RNA, 20 nt, Human
uacuuuacacagaagaaaac

SEQ ID NO: 1249554 - RNA, 24 nt, Human
uauauacauuccagacuguacaug

SEQ ID NO: 1249555 - RNA, 21 nt, Human
uaucucaaagcugaaaggaug

SEQ ID NO: 1249556 - RNA, 25 nt, Human
uauuucugucuccuaugcgccaaaa

SEQ ID NO: 1249557 - RNA, 21 nt, Human
ucaaguggaaaauaugagcgg

SEQ ID NO: 1249558 - RNA, 21 nt, Human
ucacuauuucugucuccuaug

SEQ ID NO: 1249559 - RNA, 21 nt, Human
ucccaagauuucccccagaug

SEQ ID NO: 1249560 - RNA, 25 nt, Human
ucccccagaugguuuuaacaucagu

SEQ ID NO: 1249561 - RNA, 19 nt, Human
ucuaccucccuacugcuca

SEQ ID NO: 1249562 - RNA, 21 nt, Human
ugaaaggaugaucaaacccug

SEQ ID NO: 1249563 - RNA, 20 nt, Human
ugaaauaggaaauauggacu

SEQ ID NO: 1249564 - RNA, 24 nt, Human
ugauaacauccccuccccaccaag

SEQ ID NO: 1249565 - RNA, 21 nt, Human
ugccagaaacaaaugggcucc

SEQ ID NO: 1249566 - RNA, 24 nt, Human
ugcccaaaccauccuuuuuucucu

SEQ ID NO: 1249567 - RNA, 25 nt, Human
ugcccaaaccauccuuuuuucucuc

SEQ ID NO: 1249568 - RNA, 23 nt, Human
uggaaccucaacaauauucuuca

SEQ ID NO: 1249569 - RNA, 19 nt, Human
ugucaagaauaaaaggaaa

SEQ ID NO: 1249570 - RNA, 23 nt, Human
ugucaagaauaaaaggaaaucuc

SEQ ID NO: 1249571 - RNA, 18 nt, Human
ugugugugugugugugug

SEQ ID NO: 1249572 - RNA, 18 nt, Human
ugugugugugugugugug

SEQ ID NO: 1249573 - RNA, 21 nt, Human
ugugugugugugugugugugu

SEQ ID NO: 1249574 - RNA, 24 nt, Human
uguguguguguguguguguguaau

SEQ ID NO: 1249575 - RNA, 22 nt, Human
uuaaaaauaguuuaugacaguu

SEQ ID NO: 1249576 - RNA, 24 nt, Human
uuagcacagguccagcaucuuugg

SEQ ID NO: 1249577 - RNA, 21 nt, Human
uuaguuuacucaaacuauacc

SEQ ID NO: 1249578 - RNA, 28 nt, Human
uucaaccuucucucuuugaagaccccaa

SEQ ID NO: 1249579 - RNA, 21 nt, Human
uucgcaauaaugaaugcucaa

SEQ ID NO: 1249580 - RNA, 20 nt, Human
uucuuggaugccuaaggauu

SEQ ID NO: 1249581 - RNA, 19 nt, Human
uuggugccuuaggaacuag

SEQ ID NO: 1249582 - RNA, 20 nt, Human
uuuaagacuuccuacccuga

SEQ ID NO: 1249583 - RNA, 31 nt, Human
uuuaaguaggugugugugugugugugugugg

SEQ ID NO: 1249584 - RNA, 19 nt, Human
cgcgccgggcgcucgguuc

SEQ ID NO: 1249585 - RNA, 19 nt, Human
cuccgcucccgcgcucucc

SEQ ID NO: 1249586 - RNA, 25 nt, Human
cucggcccgcggccccggaucgggc

SEQ ID NO: 1249587 - RNA, 21 nt, Human
gccccggaucgggcuacugcu

SEQ ID NO: 1249588 - RNA, 22 nt, Human
gcuccgcucccgcgcucuccgc

SEQ ID NO: 1249589 - RNA, 20 nt, Human
ucccgcgcucuccgcgccgg

SEQ ID NO: 1249590 - RNA, 23 nt, Human
ucuccgcgccgggcgcucgguuc

SEQ ID NO: 1249591 - RNA, 22 nt, Human
aaagcacaaagcuggccugcaa

SEQ ID NO: 1249592 - RNA, 18 nt, Human
aaagcuggccugcaaggg

SEQ ID NO: 1249593 - RNA, 23 nt, Human
aaagcuggccugcaaggggacuu

SEQ ID NO: 1249594 - RNA, 27 nt, Human
aaaucagauucauacaguuaaaacuga

SEQ ID NO: 1249595 - RNA, 20 nt, Human
aagcaaccguaagucagaau

SEQ ID NO: 1249596 - RNA, 18 nt, Human
aauuccuuccagaguauu

SEQ ID NO: 1249597 - RNA, 22 nt, Human
acugacuuuaacauguucuuuc

SEQ ID NO: 1249598 - RNA, 22 nt, Human
agacugacuuuaacauguucuu

SEQ ID NO: 1249599 - RNA, 21 nt, Human
aguaaaacucaaaagcaaccg

SEQ ID NO: 1249600 - RNA, 21 nt, Human
aguguccacaauuuaagcaac

SEQ ID NO: 1249601 - RNA, 18 nt, Human
auaaaauuccuuccagag

SEQ ID NO: 1249602 - RNA, 21 nt, Human
auguugaaugaggaagcaaag

SEQ ID NO: 1249603 - RNA, 24 nt, Human
auuagaaagaucaaaauuuacaua

SEQ ID NO: 1249604 - RNA, 24 nt, Human
caaggaccugguauuuucaugcua

SEQ ID NO: 1249605 - RNA, 18 nt, Human
caugcuaaagaaagcauu

SEQ ID NO: 1249606 - RNA, 21 nt, Human
cauuaaaaaguuggucugcaa

SEQ ID NO: 1249607 - RNA, 20 nt, Human
cauuccagcguaaaguggag

SEQ ID NO: 1249608 - RNA, 19 nt, Human
gauuguuuccacuccuaac

SEQ ID NO: 1249609 - RNA, 21 nt, Human
gcaaagcacaaagcuggccug

SEQ ID NO: 1249610 - RNA, 23 nt, Human
gugugcaucuuaauauauccaaa

SEQ ID NO: 1249611 - RNA, 21 nt, Human
uaaauggagcuuccucgaacc

SEQ ID NO: 1249612 - RNA, 19 nt, Human
uaacauaugcaaaaaugaa

SEQ ID NO: 1249613 - RNA, 23 nt, Human
uaacauaugcaaaaaugaacaua

SEQ ID NO: 1249614 - RNA, 22 nt, Human
uaagcaacuuuccauaggaaau

SEQ ID NO: 1249615 - RNA, 19 nt, Human
uaccugaauggauguaauu

SEQ ID NO: 1249616 - RNA, 20 nt, Human
uacucaaacgugacuccuua

SEQ ID NO: 1249617 - RNA, 24 nt, Human
uccacuccuaacauaugcaaaaau

SEQ ID NO: 1249618 - RNA, 18 nt, Human
uccagcguaaaguggagu

SEQ ID NO: 1249619 - RNA, 21 nt, Human
uccaucagauaugcccaagga

SEQ ID NO: 1249620 - RNA, 21 nt, Human
ucugcaaagcacaaagcuggc

SEQ ID NO: 1249621 - RNA, 18 nt, Human
ucuuugcuuugcucuuua

SEQ ID NO: 1249622 - RNA, 21 nt, Human
ugaagccuagcuucaauguug

SEQ ID NO: 1249623 - RNA, 23 nt, Human
ugaagccuagcuucaauguuggu

SEQ ID NO: 1249624 - RNA, 21 nt, Human
ugaggaagcaaaguaucucau

SEQ ID NO: 1249625 - RNA, 22 nt, Human
ugaguaaaacucaaaagcaacc

SEQ ID NO: 1249626 - RNA, 21 nt, Human
ugaguagugagaucuuugcuu

SEQ ID NO: 1249627 - RNA, 20 nt, Human
ugcaaaaaugaacauauuua

SEQ ID NO: 1249628 - RNA, 22 nt, Human
ugcaaagcacaaagcuggccug

SEQ ID NO: 1249629 - RNA, 18 nt, Human
ugcuaaagaaagcauucc

SEQ ID NO: 1249630 - RNA, 23 nt, Human
ugcuuugcucuuuagauccuuca

SEQ ID NO: 1249631 - RNA, 23 nt, Human
uuguuuccacuccuaacauaugc

SEQ ID NO: 1249632 - RNA, 21 nt, Human
uuucaugcuaaagaaagcauu

SEQ ID NO: 1249633 - RNA, 20 nt, Human
uuugaguagugagaucuuug

SEQ ID NO: 1249634 - RNA, 19 nt, Human
cccagcccggccgcggccg

SEQ ID NO: 1249635 - RNA, 25 nt, Human
cccucugcugccucccgcugaagcc

SEQ ID NO: 1249636 - RNA, 18 nt, Human
cucccgcugaagccccag

SEQ ID NO: 1249637 - RNA, 24 nt, Human
cucugcugccucccgcugaagccc

SEQ ID NO: 1249638 - RNA, 22 nt, Human
uccccucugcugccucccgcug

SEQ ID NO: 1249639 - RNA, 24 nt, Human
uccccucugcugccucccgcugaa

SEQ ID NO: 1249640 - RNA, 22 nt, Human
ugccucccgcugaagccccagc

SEQ ID NO: 1249641 - RNA, 23 nt, Human
caggggccuccaagccuugcugu

SEQ ID NO: 1249642 - RNA, 23 nt, Human
uagggucccauuccgcagcugcu

SEQ ID NO: 1249643 - RNA, 26 nt, Human
ucccaaccacaaccacuauguagauu

SEQ ID NO: 1249644 - RNA, 22 nt, Human
ugcuuggaaccacgcacagaac

SEQ ID NO: 1249645 - RNA, 23 nt, Human
caccuuggaaaaaaaaaagcaga

SEQ ID NO: 1249646 - RNA, 21 nt, Human
cagcaacaaaaaggcugccau

SEQ ID NO: 1249647 - RNA, 21 nt, Human
cagguugacucuagucccacc

SEQ ID NO: 1249648 - RNA, 24 nt, Human
ccaaccaauccagaguccuuucac

SEQ ID NO: 1249649 - RNA, 24 nt, Human
ccaauccagaguccuuucaccagc

SEQ ID NO: 1249650 - RNA, 22 nt, Human
ccuuggaaaaaaaaaagcagac

SEQ ID NO: 1249651 - RNA, 21 nt, Human
ucccaccuccuuuccugaacu

SEQ ID NO: 1249652 - RNA, 18 nt, Human
ucccagcaacaaaaaggc

SEQ ID NO: 1249653 - RNA, 23 nt, Human
uuccagguugacucuagucccac

SEQ ID NO: 1249654 - RNA, 18 nt, Human
gauggcggaaagaaugaa

SEQ ID NO: 1249655 - RNA, 19 nt, Human
ucagucuucauuugucuug

SEQ ID NO: 1249656 - RNA, 21 nt, Human
ugagaaagaaucaagauggcg

SEQ ID NO: 1249657 - RNA, 22 nt, Human
ugagucuuggucagugagaaag

SEQ ID NO: 1249658 - RNA, 21 nt, Human
uucuugguuucagucuucauu

SEQ ID NO: 1249659 - RNA, 24 nt, Human
acccucacagccugugguggaggc

SEQ ID NO: 1249660 - RNA, 21 nt, Human
accuggagcccccgcagucuc

SEQ ID NO: 1249661 - RNA, 24 nt, Human
acgcugccaccuccguuuccuggg

SEQ ID NO: 1249662 - RNA, 20 nt, Human
acugaggacaccuuggggac

SEQ ID NO: 1249663 - RNA, 21 nt, Human
caccuggagcccccgcagucu

SEQ ID NO: 1249664 - RNA, 21 nt, Human
ccugugacccucacagccugu

SEQ ID NO: 1249665 - RNA, 23 nt, Human
cgcugccaccuccguuuccuggg

SEQ ID NO: 1249666 - RNA, 24 nt, Human
cgucuacccaccaccuggagcccc

SEQ ID NO: 1249667 - RNA, 21 nt, Human
cugaggacaccuuggggacag

SEQ ID NO: 1249668 - RNA, 20 nt, Human
cugccaccuccguuuccugg

SEQ ID NO: 1249669 - RNA, 21 nt, Human
cugccaccuccguuuccuggg

SEQ ID NO: 1249670 - RNA, 23 nt, Human
cuggagcccccgcagucucuccu

SEQ ID NO: 1249671 - RNA, 21 nt, Human
gacaccuuggggacagcagca

SEQ ID NO: 1249672 - RNA, 21 nt, Human
gacggcugccgguggaugaac

SEQ ID NO: 1249673 - RNA, 27 nt, Human
gcucucgggguggucccggcuuggccc

SEQ ID NO: 1249674 - RNA, 22 nt, Human
ggacagcagcauucccccggga

SEQ ID NO: 1249675 - RNA, 19 nt, Human
guggucccggcuuggcccu

SEQ ID NO: 1249676 - RNA, 23 nt, Human
ucccauggucaccaccugugacc

SEQ ID NO: 1249677 - RNA, 25 nt, Human
ucucgggguggucccggcuuggccc

SEQ ID NO: 1249678 - RNA, 22 nt, Human
uggucccggcuuggcccugccc

SEQ ID NO: 1249679 - RNA, 19 nt, Human
ugugguggaggcuccuguc

SEQ ID NO: 1249680 - RNA, 22 nt, Human
ugugguggaggcuccuguccag

SEQ ID NO: 1249681 - RNA, 19 nt, Human
uucccauggucaccaccug

SEQ ID NO: 1249682 - RNA, 18 nt, Human
agcauccucaccaugacc

SEQ ID NO: 1249683 - RNA, 21 nt, Human
cacaaacaccuucucaagcac

SEQ ID NO: 1249684 - RNA, 22 nt, Human
cauccuguuaccuggagacccu

SEQ ID NO: 1249685 - RNA, 20 nt, Human
cccccgaguccugggcucug

SEQ ID NO: 1249686 - RNA, 22 nt, Human
cccccgaguccugggcucugag

SEQ ID NO: 1249687 - RNA, 24 nt, Human
ccgcccacaaacaccuucucaagc

SEQ ID NO: 1249688 - RNA, 20 nt, Human
cgcaaacauguauuccagca

SEQ ID NO: 1249689 - RNA, 18 nt, Human
cugccgcccacaaacacc

SEQ ID NO: 1249690 - RNA, 22 nt, Human
cugccgcccacaaacaccuucu

SEQ ID NO: 1249691 - RNA, 25 nt, Human
gaagggcagccgucugccgcccaca

SEQ ID NO: 1249692 - RNA, 24 nt, Human
gacagauggaacuggaagggcagg

SEQ ID NO: 1249693 - RNA, 24 nt, Human
gcaaacauguauuccagcauccuc

SEQ ID NO: 1249694 - RNA, 22 nt, Human
gccgcccacaaacaccuucuca

SEQ ID NO: 1249695 - RNA, 18 nt, Human
gggcagccgucugccgcc

SEQ ID NO: 1249696 - RNA, 23 nt, Human
ugcuuugcaacguggugaccgug

SEQ ID NO: 1249697 - RNA, 21 nt, Human
uggccccccgaguccugggcu

SEQ ID NO: 1249698 - RNA, 18 nt, Human
uuacgcaaacauguauuc

SEQ ID NO: 1249699 - RNA, 23 nt, Human
aaaggaaaagaaaaucaagcgau

SEQ ID NO: 1249700 - RNA, 20 nt, Human
acacuucuuucugccuccag

SEQ ID NO: 1249701 - RNA, 24 nt, Human
acauagacacuucuuucugccucc

SEQ ID NO: 1249702 - RNA, 19 nt, Human
accuuuguuucaguugcgu

SEQ ID NO: 1249703 - RNA, 18 nt, Human
aguagccucaggugagag

SEQ ID NO: 1249704 - RNA, 21 nt, Human
augugguguaacaaguuuuac

SEQ ID NO: 1249705 - RNA, 24 nt, Human
caaaaugauuccauaauucacuaa

SEQ ID NO: 1249706 - RNA, 19 nt, Human
cagcucuucaccagguucu

SEQ ID NO: 1249707 - RNA, 21 nt, Human
ccagaauuuuaacuuauuaac

SEQ ID NO: 1249708 - RNA, 21 nt, Human
ccagcucuucaccagguucug

SEQ ID NO: 1249709 - RNA, 20 nt, Human
ccucuccacacuuacugccu

SEQ ID NO: 1249710 - RNA, 20 nt, Human
cuagaacauacacuaaagua

SEQ ID NO: 1249711 - RNA, 23 nt, Human
cuggauauuuccaccaaaaugau

SEQ ID NO: 1249712 - RNA, 22 nt, Human
cuggugggacagcuugggcuuu

SEQ ID NO: 1249713 - RNA, 21 nt, Human
cuuacugccuggugggacagc

SEQ ID NO: 1249714 - RNA, 23 nt, Human
gguaagaacuagacauuuauaaa

SEQ ID NO: 1249715 - RNA, 20 nt, Human
uaaaguuuucuuuuguuaac

SEQ ID NO: 1249716 - RNA, 18 nt, Human
uauaaaggaaaagaaaau

SEQ ID NO: 1249717 - RNA, 19 nt, Human
uauaaaggaaaagaaaauc

SEQ ID NO: 1249718 - RNA, 22 nt, Human
ucaguagccucaggugagagua

SEQ ID NO: 1249719 - RNA, 21 nt, Human
uccacacauuagaaccuggau

SEQ ID NO: 1249720 - RNA, 22 nt, Human
ucuccacacuuacugccuggug

SEQ ID NO: 1249721 - RNA, 31 nt, Human; identical to SEQ ID NO: 102689

SEQ ID NO: 1249722 - RNA, 22 nt, Human
uggaacaguugcugugccaccu

SEQ ID NO: 1249723 - RNA, 20 nt, Human
uuacugccuggugggacagc

SEQ ID NO: 1249724 - RNA, 19 nt, Human
uuggaacaguugcugugcc

SEQ ID NO: 1249725 - RNA, 27 nt, Human
aaagaagcaacgcccugagagcucaga

SEQ ID NO: 1249726 - RNA, 23 nt, Human
aacagccaccucugccguccccc

SEQ ID NO: 1249727 - RNA, 19 nt, Human
aacucggccggaugagugg

SEQ ID NO: 1249728 - RNA, 21 nt, Human
aagcaacgcccugagagcuca

SEQ ID NO: 1249729 - RNA, 22 nt, Human
aagcaucggggaguccugaggc

SEQ ID NO: 1249730 - RNA, 19 nt, Human
aaggggccccgaggaccug

SEQ ID NO: 1249731 - RNA, 22 nt, Human
acccagcacaggcuggcggccu

SEQ ID NO: 1249732 - RNA, 21 nt, Human
accgcacggugacccagcaca

SEQ ID NO: 1249733 - RNA, 19 nt, Human
accgguuuggaagcacccc

SEQ ID NO: 1249734 - RNA, 20 nt, Human
agaggaacgaggaggacucc

SEQ ID NO: 1249735 - RNA, 21 nt, Human
aggcaagaggccaggcggugg

SEQ ID NO: 1249736 - RNA, 23 nt, Human
aggcagccgugguuccugggaag

SEQ ID NO: 1249737 - RNA, 23 nt, Human
aggcgguggggagaggaacgagg

SEQ ID NO: 1249738 - RNA, 21 nt, Human
aucugaaaccaucuugugggg

SEQ ID NO: 1249739 - RNA, 23 nt, Human
auuaucccauuuccaacacagaa

SEQ ID NO: 1249740 - RNA, 24 nt, Human
caacacagaaaucaauuuccaaua

SEQ ID NO: 1249741 - RNA, 24 nt, Human
cacacacucgugccugcccgugug

SEQ ID NO: 1249742 - RNA, 19 nt, Human
cacccagagaccgaggcgg

SEQ ID NO: 1249743 - RNA, 19 nt, Human
cacccccccccggugaggc

SEQ ID NO: 1249744 - RNA, 23 nt, Human
cacccccggcucccccacagcuc

SEQ ID NO: 1249745 - RNA, 20 nt, Human
cacccuccagccauacacac

SEQ ID NO: 1249746 - RNA, 19 nt, Human
caccgcacggugacccagc

SEQ ID NO: 1249747 - RNA, 21 nt, Human
caccgguuuggaagcacccca

SEQ ID NO: 1249748 - RNA, 21 nt, Human
caccguccagcccagccgccu

SEQ ID NO: 1249749 - RNA, 21 nt, Human
caccguccagcccagccgccu

SEQ ID NO: 1249750 - RNA, 21 nt, Human
caccguccagcccagccgccu

SEQ ID NO: 1249751 - RNA, 21 nt, Human
caccguccagcccagccgccu

SEQ ID NO: 1249752 - RNA, 24 nt, Human
caccucguccagccucggcccacc

SEQ ID NO: 1249753 - RNA, 23 nt, Human
cacuuccaggguugacaggugug

SEQ ID NO: 1249754 - RNA, 22 nt, Human
cagagggcaccuucacuggcac

SEQ ID NO: 1249755 - RNA, 21 nt, Human
cagcccagccgccucggccca

SEQ ID NO: 1249756 - RNA, 21 nt, Human
cagcccagccgccucggccca

SEQ ID NO: 1249757 - RNA, 21 nt, Human
cagcccagccgccucggccca

SEQ ID NO: 1249758 - RNA, 21 nt, Human
cagcccagccgccucggccca

SEQ ID NO: 1249759 - RNA, 20 nt, Human
cagccgccucggcccaccuc

SEQ ID NO: 1249760 - RNA, 21 nt, Human
caggguggggcucagacaguc

SEQ ID NO: 1249761 - RNA, 23 nt, Human
caguagcagugacaugcggugaa

SEQ ID NO: 1249762 - RNA, 22 nt, Human
ccacagcuccugggcagagggc

SEQ ID NO: 1249763 - RNA, 19 nt, Human
ccacuggaacucacccaag

SEQ ID NO: 1249764 - RNA, 18 nt, Human
ccacugggcacccagugc

SEQ ID NO: 1249765 - RNA, 21 nt, Human
ccagagaccgaggcggcauca

SEQ ID NO: 1249766 - RNA, 22 nt, Human
ccagccucacccggcuguccuc

SEQ ID NO: 1249767 - RNA, 23 nt, Human
cccaaaagucagaggccauuccc

SEQ ID NO: 1249768 - RNA, 23 nt, Human
ccccaaaagucagaggccauucc

SEQ ID NO: 1249769 - RNA, 21 nt, Human
ccccacccccccccggugagg

SEQ ID NO: 1249770 - RNA, 20 nt, Human
ccccaggacaagugucccgu

SEQ ID NO: 1249771 - RNA, 19 nt, Human
ccccaggcugcuauggucc

SEQ ID NO: 1249772 - RNA, 20 nt, Human
ccccaggcugcuaugguccc

SEQ ID NO: 1249773 - RNA, 20 nt, Human
ccccaugcaggggaugcccc

SEQ ID NO: 1249774 - RNA, 19 nt, Human
cccccgaauucgaggcgga

SEQ ID NO: 1249775 - RNA, 21 nt, Human
ccccucuuucgggucuuccca

SEQ ID NO: 1249776 - RNA, 24 nt, Human
cccguaagaaaaaaaggcagccuu

SEQ ID NO: 1249777 - RNA, 26 nt, Human
cccuccagccauacacacgggcugcc

SEQ ID NO: 1249778 - RNA, 18 nt, Human
cccugcccugggcucccc

SEQ ID NO: 1249779 - RNA, 19 nt, Human
ccggcucccccacagcucc

SEQ ID NO: 1249780 - RNA, 22 nt, Human
ccggggccucugugaagaccug

SEQ ID NO: 1249781 - RNA, 24 nt, Human
ccggggccucugugaagaccugac

SEQ ID NO: 1249782 - RNA, 21 nt, Human
ccgugugcccccccacccccc

SEQ ID NO: 1249783 - RNA, 22 nt, Human
ccgugugcccccccaccccccc

SEQ ID NO: 1249784 - RNA, 18 nt, Human
ccuccccucuuucggguc

SEQ ID NO: 1249785 - RNA, 24 nt, Human
ccuccgggucacaccguccagccc

SEQ ID NO: 1249786 - RNA, 21 nt, Human
ccuggguguagcggcucccac

SEQ ID NO: 1249787 - RNA, 19 nt, Human
cgaggcggacggcgcaguc

SEQ ID NO: 1249788 - RNA, 18 nt, Human
cgccucggcccaccucag

SEQ ID NO: 1249789 - RNA, 18 nt, Human
cgccucggcccaccucag

SEQ ID NO: 1249790 - RNA, 19 nt, Human
cggcacccagagaccgagg

SEQ ID NO: 1249791 - RNA, 18 nt, Human
cggccuccgaucacaccu

SEQ ID NO: 1249792 - RNA, 21 nt, Human
cggcugcguuccccaaaaguc

SEQ ID NO: 1249793 - RNA, 21 nt, Human
cggggaguccugaggcaccgg

SEQ ID NO: 1249794 - RNA, 25 nt, Human
cuccgcacacgcuccagcgccuccc

SEQ ID NO: 1249795 - RNA, 25 nt, Human
cucgcaggguggggcucagacaguc

SEQ ID NO: 1249796 - RNA, 22 nt, Human
cucggcccaccguuuuagcagg

SEQ ID NO: 1249797 - RNA, 24 nt, Human
cucuggagacgaggcccucccgag

SEQ ID NO: 1249798 - RNA, 19 nt, Human
cugaaaccaucuugugggg

SEQ ID NO: 1249799 - RNA, 22 nt, Human
cugcccgugugcccccccaccc

SEQ ID NO: 1249800 - RNA, 23 nt, Human
cugcccgugugcccccccacccc

SEQ ID NO: 1249801 - RNA, 18 nt, Human
cugcccugggcuccccaa

SEQ ID NO: 1249802 - RNA, 24 nt, Human
cugcucuugucugagcucuguccg

SEQ ID NO: 1249803 - RNA, 21 nt, Human
cuggggggggggucaaagggc

SEQ ID NO: 1249804 - RNA, 19 nt, Human
gaccuggacgggaaggggc

SEQ ID NO: 1249805 - RNA, 21 nt, Human
gagcucagagcacccucgcag

SEQ ID NO: 1249806 - RNA, 21 nt, Human
gaggcaccgguuuggaagcac

SEQ ID NO: 1249807 - RNA, 25 nt, Human
gaggcccucccgagccuggacacua

SEQ ID NO: 1249808 - RNA, 22 nt, Human
gaggguggggccugggccugcu

SEQ ID NO: 1249809 - RNA, 21 nt, Human
gagugggggcugggggggggg

SEQ ID NO: 1249810 - RNA, 22 nt, Human
gcaaagaagcaacgcccugaga

SEQ ID NO: 1249811 - RNA, 19 nt, Human
gcaggggaugccccaggac

SEQ ID NO: 1249812 - RNA, 18 nt, Human
gcccccccaccccccccc

SEQ ID NO: 1249813 - RNA, 20 nt, Human
gcccugagagcucagagcac

SEQ ID NO: 1249814 - RNA, 18 nt, Human
gcccugggcuccccaacc

SEQ ID NO: 1249815 - RNA, 18 nt, Human
gcccugggguggacuucu

SEQ ID NO: 1249816 - RNA, 20 nt, Human
gcgcaguccugcgggaaugc

SEQ ID NO: 1249817 - RNA, 23 nt, Human
gcucuggagacgaggcccucccg

SEQ ID NO: 1249818 - RNA, 19 nt, Human
gcugccagccucacccggc

SEQ ID NO: 1249819 - RNA, 21 nt, Human
ggaacucacccaagacccggg

SEQ ID NO: 1249820 - RNA, 22 nt, Human
ggagccgucccacgcucggcuu

SEQ ID NO: 1249821 - RNA, 22 nt, Human
ggaggaccauggggccugcaga

SEQ ID NO: 1249822 - RNA, 23 nt, Human
ggcaaagaagcaacgcccugaga

SEQ ID NO: 1249823 - RNA, 19 nt, Human
ggcaguagcagugacaugc

SEQ ID NO: 1249824 - RNA, 18 nt, Human
ggccugggccugcugccc

SEQ ID NO: 1249825 - RNA, 24 nt, Human
ggcgguggggagaggaacgaggag

SEQ ID NO: 1249826 - RNA, 19 nt, Human
ggcucuggagacgaggccc

SEQ ID NO: 1249827 - RNA, 22 nt, Human
ggcuggcggccuccgaucacac

SEQ ID NO: 1249828 - RNA, 23 nt, Human
ggcuggggggggggucaaagggc

SEQ ID NO: 1249829 - RNA, 19 nt, Human
gggauaaaugggcaaagaa

SEQ ID NO: 1249830 - RNA, 22 nt, Human
gggucuucccagcgacccacac

SEQ ID NO: 1249831 - RNA, 22 nt, Human
gugguuccugggaagggcaagu

SEQ ID NO: 1249832 - RNA, 22 nt, Human
uaaaugggcaaagaagcaacgc

SEQ ID NO: 1249833 - RNA, 18 nt, Human
uaagaaaaaaaggcagcc

SEQ ID NO: 1249834 - RNA, 24 nt, Human
ucaaagggcguauugguccauggg

SEQ ID NO: 1249835 - RNA, 22 nt, Human
ucacccguaagaaaaaaaggca

SEQ ID NO: 1249836 - RNA, 19 nt, Human
ucaucugaaaccaucuugu

SEQ ID NO: 1249837 - RNA, 21 nt, Human
uccaaggcagaguccuugaga

SEQ ID NO: 1249838 - RNA, 23 nt, Human
uccagcccagccgccucggccca

SEQ ID NO: 1249839 - RNA, 23 nt, Human
uccagcccagccgccucggccca

SEQ ID NO: 1249840 - RNA, 23 nt, Human
uccagcccagccgccucggccca

SEQ ID NO: 1249841 - RNA, 23 nt, Human
uccagcccagccgccucggccca

SEQ ID NO: 1249842 - RNA, 20 nt, Human
uccaggguugacaggugugg

SEQ ID NO: 1249843 - RNA, 24 nt, Human
ucccagagucguguuucccccucc

SEQ ID NO: 1249844 - RNA, 19 nt, Human
ucccauaaucacuuccagg

SEQ ID NO: 1249845 - RNA, 19 nt, Human
ucccugcuggcgcugcugc

SEQ ID NO: 1249846 - RNA, 22 nt, Human
ucccugcuggcgcugcugcgag

SEQ ID NO: 1249847 - RNA, 25 nt, Human
uccgccacuggaacucacccaagac

SEQ ID NO: 1249848 - RNA, 21 nt, Human
ucuguccugcucaucgaggaa

SEQ ID NO: 1249849 - RNA, 21 nt, Human
ugacccagcacaggcuggcgg

SEQ ID NO: 1249850 - RNA, 18 nt, Human
ugaccuccgcacacgcuc

SEQ ID NO: 1249851 - RNA, 20 nt, Human
ugacuggcagcuuccucccc

SEQ ID NO: 1249852 - RNA, 18 nt, Human
ugagagcaggucugcaug

SEQ ID NO: 1249853 - RNA, 24 nt, Human
ugaggcccugggguggacuucugc

SEQ ID NO: 1249854 - RNA, 22 nt, Human
ugaugacaaugaugaagaugga

SEQ ID NO: 1249855 - RNA, 19 nt, Human
ugccagccucacccggcug

SEQ ID NO: 1249856 - RNA, 22 nt, Human
ugcccccccacccccccccggu

SEQ ID NO: 1249857 - RNA, 19 nt, Human
ugccccggcacccagagac

SEQ ID NO: 1249858 - RNA, 19 nt, Human
ugccgggagaaacagccac

SEQ ID NO: 1249859 - RNA, 22 nt, Human
ugcgggaaugcugaccguggca

SEQ ID NO: 1249860 - RNA, 24 nt, Human
ugcugccgggagaaacagccaccu

SEQ ID NO: 1249861 - RNA, 21 nt, Human
uggagccgucccacgcucggc

SEQ ID NO: 1249862 - RNA, 22 nt, Human
uggagcgagagcccagagaacc

SEQ ID NO: 1249863 - RNA, 19 nt, Human
uggcaccgcacggugaccc

SEQ ID NO: 1249864 - RNA, 21 nt, Human
uggcaguagcagugacaugcg

SEQ ID NO: 1249865 - RNA, 18 nt, Human
ugggaagggcaaguggag

SEQ ID NO: 1249866 - RNA, 20 nt, Human
ugggcuccccaaccagagag

SEQ ID NO: 1249867 - RNA, 21 nt, Human
uggggagaggaacgaggagga

SEQ ID NO: 1249868 - RNA, 22 nt, Human
ugggggcaggggucccagaguc

SEQ ID NO: 1249869 - RNA, 18 nt, Human
uggggggggggucaaagg

SEQ ID NO: 1249870 - RNA, 24 nt, Human
uguccugcucaucgaggaauucca

SEQ ID NO: 1249871 - RNA, 20 nt, Human
uguggaggcguccaucacug

SEQ ID NO: 1249872 - RNA, 18 nt, Human
aggaagcacggcgggugg

SEQ ID NO: 1249873 - RNA, 19 nt, Human
agggggaugggcccgggug

SEQ ID NO: 1249874 - RNA, 22 nt, Human
aggguguggaggggcaggaagc

SEQ ID NO: 1249875 - RNA, 24 nt, Human
gggggucgcgggggaccgcgggga

SEQ ID NO: 1249876 - RNA, 21 nt, Human
ggggucgcgggggaccgcggg

SEQ ID NO: 1249877 - RNA, 23 nt, Human
uguggaggggcaggaagcacggc

SEQ ID NO: 1249878 - RNA, 24 nt, Human
uguggaggggcaggaagcacggcg

SEQ ID NO: 1249879 - RNA, 19 nt, Human
aaaccaccucgaguccugc

SEQ ID NO: 1249880 - RNA, 22 nt, Human
aaacgacagccagagaaauccc

SEQ ID NO: 1249881 - RNA, 24 nt, Human
acccacgcagcacagcgcagcccc

SEQ ID NO: 1249882 - RNA, 23 nt, Human
acgacccgcacccacgcagcaca

SEQ ID NO: 1249883 - RNA, 21 nt, Human
acuccacggcccccccaggcu

SEQ ID NO: 1249884 - RNA, 27 nt, Human
aggugcugaggcugccuccccugagcc

SEQ ID NO: 1249885 - RNA, 25 nt, Human
aggugggggcugccaggcacugcca

SEQ ID NO: 1249886 - RNA, 19 nt, Human
augcagcgcaaacgacagc

SEQ ID NO: 1249887 - RNA, 18 nt, Human
caccgggggacgcaggag

SEQ ID NO: 1249888 - RNA, 19 nt, Human
cacgacccgcacccacgca

SEQ ID NO: 1249889 - RNA, 24 nt, Human
cacgcugaccacgacccgcaccca

SEQ ID NO: 1249890 - RNA, 21 nt, Human
cagcuccggcuccccaccuug

SEQ ID NO: 1249891 - RNA, 21 nt, Human
caggugcugaggcugccuccc

SEQ ID NO: 1249892 - RNA, 18 nt, Human
ccaucgaaucucucuugc

SEQ ID NO: 1249893 - RNA, 22 nt, Human
ccccaccuugccuucuuacccu

SEQ ID NO: 1249894 - RNA, 20 nt, Human
ccccaggcuucaggugcuga

SEQ ID NO: 1249895 - RNA, 21 nt, Human
ccccccgcugcugccccaauc

SEQ ID NO: 1249896 - RNA, 18 nt, Human
cccugguggcugcgcugc

SEQ ID NO: 1249897 - RNA, 21 nt, Human
ccuccccuuuucuucccaaac

SEQ ID NO: 1249898 - RNA, 19 nt, Human
ccucgcgguguugagccgc

SEQ ID NO: 1249899 - RNA, 28 nt, Human
ccuuccagagccgccaucgaaucucucu

SEQ ID NO: 1249900 - RNA, 23 nt, Human
cgcaaacgacagccagagaaauc

SEQ ID NO: 1249901 - RNA, 23 nt, Human
cgggaagggcggagagcccagcg

SEQ ID NO: 1249902 - RNA, 18 nt, Human
cguggccgggaagggcgg

SEQ ID NO: 1249903 - RNA, 19 nt, Human
cuccccuuuucuucccaaa

SEQ ID NO: 1249904 - RNA, 21 nt, Human
cucggaguggaguuuugagaa

SEQ ID NO: 1249905 - RNA, 23 nt, Human
cugagcgccuccccuuuucuucc

SEQ ID NO: 1249906 - RNA, 27 nt, Human
cuuccagagccgccaucgaaucucucu

SEQ ID NO: 1249907 - RNA, 22 nt, Human
cuuccagcuccggcuccccacc

SEQ ID NO: 1249908 - RNA, 23 nt, Human
cuuccccccgcugcugccccaau

SEQ ID NO: 1249909 - RNA, 20 nt, Human
cuugcagcgcucuggggguu

SEQ ID NO: 1249910 - RNA, 21 nt, Human
gaacgcacgcugaccacgacc

SEQ ID NO: 1249911 - RNA, 25 nt, Human
gaggaaauuagagcgggcgggcggg

SEQ ID NO: 1249912 - RNA, 23 nt, Human
gcagaggugggggcugccaggca

SEQ ID NO: 1249913 - RNA, 19 nt, Human
gcguugggccgaggugucg

SEQ ID NO: 1249914 - RNA, 19 nt, Human
ggccgggaagggcggagag

SEQ ID NO: 1249915 - RNA, 20 nt, Human
uaauaagcugagcgccuccc

SEQ ID NO: 1249916 - RNA, 18 nt, Human
uacacgcgagccgggagc

SEQ ID NO: 1249917 - RNA, 19 nt, Human
ucagucaacacagucuggg

SEQ ID NO: 1249918 - RNA, 18 nt, Human
uccacggcccccccaggc

SEQ ID NO: 1249919 - RNA, 23 nt, Human
uccccaccuugccuucuuacccu

SEQ ID NO: 1249920 - RNA, 21 nt, Human
uccccgggcgucacguggccg

SEQ ID NO: 1249921 - RNA, 19 nt, Human
uccgaagcacuggcagagg

SEQ ID NO: 1249922 - RNA, 19 nt, Human
ucgaaucucucuugcuaac

SEQ ID NO: 1249923 - RNA, 25 nt, Human
ucgcgguguugagccgccgccgcug

SEQ ID NO: 1249924 - RNA, 22 nt, Human
ucggaguggaguuuugagaaaa

SEQ ID NO: 1249925 - RNA, 23 nt, Human
ucggaguggaguuuugagaaaag

SEQ ID NO: 1249926 - RNA, 24 nt, Human
ucuuccagcuccggcuccccaccu

SEQ ID NO: 1249927 - RNA, 19 nt, Human
ugagaaaagcgaacgcacg

SEQ ID NO: 1249928 - RNA, 24 nt, Human
ugcgacugcccaucuagcuucugg

SEQ ID NO: 1249929 - RNA, 22 nt, Human
uggggaauuugcuuucauuuuu

SEQ ID NO: 1249930 - RNA, 21 nt, Human
uucaccgcgggcgaaccuggc

SEQ ID NO: 1249931 - RNA, 23 nt, Human
uuccagcuccggcuccccaccuu

SEQ ID NO: 1249932 - RNA, 19 nt, Human
uucuuccagcuccggcucc

SEQ ID NO: 1249933 - RNA, 19 nt, Human
uucuucccaaacaacccga

SEQ ID NO: 1249934 - RNA, 23 nt, Human
agaaccugcucacuacgcuccac

SEQ ID NO: 1249935 - RNA, 22 nt, Human
agacccggcgcugccgccagaa

SEQ ID NO: 1249936 - RNA, 18 nt, Human
agcugccgggcugagggc

SEQ ID NO: 1249937 - RNA, 21 nt, Human
agguagagggagacgacuucu

SEQ ID NO: 1249938 - RNA, 19 nt, Human
cagcagacccggcgcugcc

SEQ ID NO: 1249939 - RNA, 27 nt, Human
cagcucgucagggcccaaggccaaugg

SEQ ID NO: 1249940 - RNA, 22 nt, Human
cagggcaaaccccacaacugcc

SEQ ID NO: 1249941 - RNA, 19 nt, Human
ccccacaacugccugcgga

SEQ ID NO: 1249942 - RNA, 24 nt, Human
ccugugcccagggcaaaccggggc

SEQ ID NO: 1249943 - RNA, 18 nt, Human
cgcggccuggcgcugggu

SEQ ID NO: 1249944 - RNA, 21 nt, Human
cucacuacgcuccacacagcu

SEQ ID NO: 1249945 - RNA, 18 nt, Human
gaagaugggggcugccca

SEQ ID NO: 1249946 - RNA, 19 nt, Human
gaagaugggggcugcccag

SEQ ID NO: 1249947 - RNA, 18 nt, Human
gagugugagcccugugau

SEQ ID NO: 1249948 - RNA, 23 nt, Human
gcaugaguccgcgucgagcuggg

SEQ ID NO: 1249949 - RNA, 18 nt, Human
gcccagggcaaaccccac

SEQ ID NO: 1249950 - RNA, 25 nt, Human
ucagggcccaaccugagcacuccgc

SEQ ID NO: 1249951 - RNA, 20 nt, Human
uccacacagcucgucagggc

SEQ ID NO: 1249952 - RNA, 18 nt, Human
uccgagagcugccgggcu

SEQ ID NO: 1249953 - RNA, 20 nt, Human
uccugaagaugggggcugcc

SEQ ID NO: 1249954 - RNA, 18 nt, Human
ugccugcggaauguccuc

SEQ ID NO: 1249955 - RNA, 23 nt, Human
uuccagacaaaucuccacuccac

SEQ ID NO: 1249956 - RNA, 21 nt, Human
cauccuagcucucccaguaca

SEQ ID NO: 1249957 - RNA, 20 nt, Human
uguuuuccauccuagcucuc

SEQ ID NO: 1249958 - RNA, 20 nt, Human
uuuccauccuagcucuccca

SEQ ID NO: 1249959 - RNA, 21 nt, Human
ucaagagcugcuuucuccagu

SEQ ID NO: 1249960 - RNA, 21 nt, Human
ucuccaguucauuuuuggcua

SEQ ID NO: 1249961 - RNA, 18 nt, Human
accgcaggggaaggugcu

SEQ ID NO: 1249962 - RNA, 21 nt, Human
acugcagccaaacagugcgcu

SEQ ID NO: 1249963 - RNA, 21 nt, Human
agacaagaugaugugagcccg

SEQ ID NO: 1249964 - RNA, 22 nt, Human
agccaaacagugcgcugcagcc

SEQ ID NO: 1249965 - RNA, 21 nt, Human
agccagcgcugggggugcaca

SEQ ID NO: 1249966 - RNA, 23 nt, Human
agccaggggugggagugaguggg

SEQ ID NO: 1249967 - RNA, 19 nt, Human
agcgcugggggugcacaug

SEQ ID NO: 1249968 - RNA, 22 nt, Human
agcuggcuccaaggucagccuc

SEQ ID NO: 1249969 - RNA, 22 nt, Human
aggggugggagugagugggagc

SEQ ID NO: 1249970 - RNA, 22 nt, Human
caaaauuagugccaguugccug

SEQ ID NO: 1249971 - RNA, 18 nt, Human
caccggagacagcucuga

SEQ ID NO: 1249972 - RNA, 21 nt, Human
cagcugguucuauuggcuucc

SEQ ID NO: 1249973 - RNA, 19 nt, Human
caggccagagccagcgcug

SEQ ID NO: 1249974 - RNA, 22 nt, Human
cagucuucuccuuucuuuccca

SEQ ID NO: 1249975 - RNA, 21 nt, Human
caguugccugccgugcugagg

SEQ ID NO: 1249976 - RNA, 19 nt, Human
cauccucagcugcuguggg

SEQ ID NO: 1249977 - RNA, 20 nt, Human
ccaaggucagccuccccaag

SEQ ID NO: 1249978 - RNA, 18 nt, Human
ccccggcuggcagccagg

SEQ ID NO: 1249979 - RNA, 22 nt, Human
cccgggcucucaacugcagcca

SEQ ID NO: 1249980 - RNA, 22 nt, Human
cccuccagcacgcugggccugc

SEQ ID NO: 1249981 - RNA, 27 nt, Human
ccucccggcagacaagaugaugugagc

SEQ ID NO: 1249982 - RNA, 21 nt, Human
ccuccgaauguggggcuucug

SEQ ID NO: 1249983 - RNA, 18 nt, Human
cgcugggccugcccuggg

SEQ ID NO: 1249984 - RNA, 21 nt, Human
cgugcugaggccacuggccug

SEQ ID NO: 1249985 - RNA, 18 nt, Human
cuaccgccacuaccauca

SEQ ID NO: 1249986 - RNA, 19 nt, Human
cucauaaccgcuggggccu

SEQ ID NO: 1249987 - RNA, 19 nt, Human
cugauucccuccagcacgc

SEQ ID NO: 1249988 - RNA, 23 nt, Human
cugggccugcccuggggaucuac

SEQ ID NO: 1249989 - RNA, 18 nt, Human
cugugggauggaggggcu

SEQ ID NO: 1249990 - RNA, 21 nt, Human
gacaccggagacagcucugaa

SEQ ID NO: 1249991 - RNA, 19 nt, Human
gaggugccugcugaagggg

SEQ ID NO: 1249992 - RNA, 18 nt, Human
gcacuaaauccucccggc

SEQ ID NO: 1249993 - RNA, 21 nt, Human
gcagcuggcucagcggggucc

SEQ ID NO: 1249994 - RNA, 19 nt, Human
gccaaacagugcgcugcag

SEQ ID NO: 1249995 - RNA, 23 nt, Human
gccaaacagugcgcugcagccuc

SEQ ID NO: 1249996 - RNA, 24 nt, Human
gcuccaaggucagccuccccaagc

SEQ ID NO: 1249997 - RNA, 18 nt, Human
gcugcagccuccgaaugu

SEQ ID NO: 1249998 - RNA, 22 nt, Human
ggggaucuacagggggcagcug

SEQ ID NO: 1249999 - RNA, 21 nt, Human
gggggcagcuggcucagcggg

SEQ ID NO: 1250000 - RNA, 22 nt, Human
ggugggagugagugggagcugu

SEQ ID NO: 1250001 - RNA, 19 nt, Human
uacaggggugaugccggcc

SEQ ID NO: 1250002 - RNA, 19 nt, Human
uaccgccacuaccauccag

SEQ ID NO: 1250003 - RNA, 23 nt, Human
ucagccgaagagcuauugaccgc

SEQ ID NO: 1250004 - RNA, 19 nt, Human
uccaaggucagccucccca

SEQ ID NO: 1250005 - RNA, 20 nt, Human
uccccaagcggucuuggucu

SEQ ID NO: 1250006 - RNA, 23 nt, Human
uccccaagcggucuuggucuccg

SEQ ID NO: 1250007 - RNA, 24 nt, Human
ugacaccggagacagcucugaacc

SEQ ID NO: 1250008 - RNA, 21 nt, Human
ugacucccgcacagacauccu

SEQ ID NO: 1250009 - RNA, 18 nt, Human
ugaggccacuggccuggc

SEQ ID NO: 1250010 - RNA, 21 nt, Human
ugcugugggauggaggggcug

SEQ ID NO: 1250011 - RNA, 23 nt, Human
uggcagccaggggugggagugag

SEQ ID NO: 1250012 - RNA, 21 nt, Human
uggcccagguacggcaggugc

SEQ ID NO: 1250013 - RNA, 23 nt, Human
uggcucagcgggguccucagcag

SEQ ID NO: 1250014 - RNA, 24 nt, Human
uggcuuccuguccugcaggaccug

SEQ ID NO: 1250015 - RNA, 19 nt, Human
ugggagcuguggcugggcc

SEQ ID NO: 1250016 - RNA, 21 nt, Human
ugggauggaggggcugguucu

SEQ ID NO: 1250017 - RNA, 21 nt, Human
uggggggacuugggggucggg

SEQ ID NO: 1250018 - RNA, 18 nt, Human
ugguucugcacccaaccc

SEQ ID NO: 1250019 - RNA, 20 nt, Human
uuccuguccugcaggaccug

SEQ ID NO: 1250020 - RNA, 18 nt, Human
cccucuugcugguuggag

SEQ ID NO: 1250021 - RNA, 18 nt, Human
ccucuugcugguuggagg

SEQ ID NO: 1250022 - RNA, 19 nt, Human
ugguuggagguggcucuga

SEQ ID NO: 1250023 - RNA, 21 nt, Human
ccugcagcagggcggaagagc

SEQ ID NO: 1250024 - RNA, 24 nt, Human
cugcagcagggcggaagagccacu

SEQ ID NO: 1250025 - RNA, 22 nt, Human
gcugaaaaccuccaggucaucc

SEQ ID NO: 1250026 - RNA, 21 nt, Human
uccucguccagagccagcacc

SEQ ID NO: 1250027 - RNA, 19 nt, Human
ugaggcauaguugcugaaa

SEQ ID NO: 1250028 - RNA, 20 nt, Human
cccgguagaaaccaagggca

SEQ ID NO: 1250029 - RNA, 21 nt, Human
cggcccgguagaaaccaaggg

SEQ ID NO: 1250030 - RNA, 22 nt, Human
cugcuguuguguaauuuuuuuc

SEQ ID NO: 1250031 - RNA, 22 nt, Human
gaagucgccuggauuucccagg

SEQ ID NO: 1250032 - RNA, 19 nt, Human
gggcagggggagacgucug

SEQ ID NO: 1250033 - RNA, 22 nt, Human
uaaagaguugacggagacacag

SEQ ID NO: 1250034 - RNA, 22 nt, Human
ugccaaaguccagcaccaacgc

SEQ ID NO: 1250035 - RNA, 25 nt, Human
aaguguccccaaguuuccuuccaga

SEQ ID NO: 1250036 - RNA, 21 nt, Human
aaguuuccuuccaggaagaug

SEQ ID NO: 1250037 - RNA, 22 nt, Human
cagcaaguccggaagaaggucc

SEQ ID NO: 1250038 - RNA, 20 nt, Human
cagccgcggcugagcccggg

SEQ ID NO: 1250039 - RNA, 21 nt, Human
ccacuccggggucacgaagga

SEQ ID NO: 1250040 - RNA, 19 nt, Human
cccaaguuuccuuccagga

SEQ ID NO: 1250041 - RNA, 22 nt, Human
cggaagaagguccgggggcugg

SEQ ID NO: 1250042 - RNA, 18 nt, Human
cugggaaggggcggggcc

SEQ ID NO: 1250043 - RNA, 22 nt, Human
gagcccggggcguugaaugcgg

SEQ ID NO: 1250044 - RNA, 20 nt, Human
gcgcagccgcggcugagccc

SEQ ID NO: 1250045 - RNA, 22 nt, Human
gcuggaguccugggaccuagcu

SEQ ID NO: 1250046 - RNA, 23 nt, Human
ggaguccugggaccuagcucggg

SEQ ID NO: 1250047 - RNA, 18 nt, Human
uccgggcgcagccgcggc

SEQ ID NO: 1250048 - RNA, 19 nt, Human
uccgggcgcagccgcggcu

SEQ ID NO: 1250049 - RNA, 20 nt, Human
uccgggcgcagccgcggcug

SEQ ID NO: 1250050 - RNA, 19 nt, Human
uccgggggcuggaguccug

SEQ ID NO: 1250051 - RNA, 19 nt, Human
ugggaaggggcggggccuu

SEQ ID NO: 1250052 - RNA, 24 nt, Human
uuccagucugggaagggaggaaac

SEQ ID NO: 1250053 - RNA, 22 nt, Human
aaguuucucuuuaagucaugac

SEQ ID NO: 1250054 - RNA, 24 nt, Human
aggcagaguucacaaagaaagaaa

SEQ ID NO: 1250055 - RNA, 24 nt, Human
augacaacaauggcaugaccugcc

SEQ ID NO: 1250056 - RNA, 22 nt, Human
augcuguagaugccaucacuuu

SEQ ID NO: 1250057 - RNA, 19 nt, Human
cagaagcuucucccagguc

SEQ ID NO: 1250058 - RNA, 24 nt, Human
cauucagugguugcuccuacccau

SEQ ID NO: 1250059 - RNA, 24 nt, Human
ccagcagaagcuucucccaggucc

SEQ ID NO: 1250060 - RNA, 18 nt, Human
cccacagaagcuugcagg

SEQ ID NO: 1250061 - RNA, 22 nt, Human
cucgaugugcccacuggugcua

SEQ ID NO: 1250062 - RNA, 21 nt, Human
cugccagcagaagcuucuccc

SEQ ID NO: 1250063 - RNA, 23 nt, Human
cuucccgaauucucuaaauggga

SEQ ID NO: 1250064 - RNA, 18 nt, Human
cuugcagggaaccuuccc

SEQ ID NO: 1250065 - RNA, 23 nt, Human
cuuuccuuuuauagauguacugu

SEQ ID NO: 1250066 - RNA, 24 nt, Human
cuuugcaucacagaauuuuauuuu

SEQ ID NO: 1250067 - RNA, 21 nt, Human
gaagucaauuuggugccaccu

SEQ ID NO: 1250068 - RNA, 22 nt, Human
gagcuuaaggacauccuccucc

SEQ ID NO: 1250069 - RNA, 21 nt, Human
gccaccuaauuggauucccac

SEQ ID NO: 1250070 - RNA, 22 nt, Human
gcuuaaggacauccuccuccuu

SEQ ID NO: 1250071 - RNA, 24 nt, Human
gcuuaaggacauccuccuccuuca

SEQ ID NO: 1250072 - RNA, 24 nt, Human
ggaaccuucccgaauucucuaaau

SEQ ID NO: 1250073 - RNA, 19 nt, Human
guagaugccaucacuuucc

SEQ ID NO: 1250074 - RNA, 20 nt, Human
uaaggacauccuccuccuuc

SEQ ID NO: 1250075 - RNA, 21 nt, Human
uaaggcagaguucacaaagaa

SEQ ID NO: 1250076 - RNA, 19 nt, Human
ucacagaauuuuauuuuuu

SEQ ID NO: 1250077 - RNA, 18 nt, Human
ucccacagaagcuugcag

SEQ ID NO: 1250078 - RNA, 23 nt, Human
ucuccgauguguuugcucucgau

SEQ ID NO: 1250079 - RNA, 23 nt, Human
ucucuuuaagucaugacaggaau

SEQ ID NO: 1250080 - RNA, 31 nt, Human
ugacaacaauggcaugaccugccagcagaag

SEQ ID NO: 1250081 - RNA, 23 nt, Human
ugacaggaaucuuugaguuaagg

SEQ ID NO: 1250082 - RNA, 24 nt, Human
uguuugcucucgaugugcccacug

SEQ ID NO: 1250083 - RNA, 18 nt, Human
uucuggccaguauuccug

SEQ ID NO: 1250084 - RNA, 21 nt, Human
uugaguuaaggcagaguucac

SEQ ID NO: 1250085 - RNA, 23 nt, Human
uuuauuuucugucaaccuuauuu

SEQ ID NO: 1250086 - RNA, 18 nt, Human
aacuccaagccguuacug

SEQ ID NO: 1250087 - RNA, 21 nt, Human
aaacaucccauagacagagcg

SEQ ID NO: 1250088 - RNA, 21 nt, Human
aaacuuucccuccagagaaac

SEQ ID NO: 1250089 - RNA, 23 nt, Human
aacagugggugaaagcccgaagc

SEQ ID NO: 1250090 - RNA, 20 nt, Human
aacuguuuaaggagaauguu

SEQ ID NO: 1250091 - RNA, 20 nt, Human
aaggagaaauggagaaagca

SEQ ID NO: 1250092 - RNA, 19 nt, Human
aagugcagaaacucaucgc

SEQ ID NO: 1250093 - RNA, 22 nt, Human
acaagaaaggagauacaaugua

SEQ ID NO: 1250094 - RNA, 22 nt, Human
acacagauaccugcacugcccc

SEQ ID NO: 1250095 - RNA, 18 nt, Human
acaucacuguacccaggg

SEQ ID NO: 1250096 - RNA, 21 nt, Human
accagguaguuuggaaguucu

SEQ ID NO: 1250097 - RNA, 22 nt, Human
acccuauuuccaggaaacccac

SEQ ID NO: 1250098 - RNA, 20 nt, Human
acucuuaucuucccacugaa

SEQ ID NO: 1250099 - RNA, 18 nt, Human
acugcaaucuacuggcuu

SEQ ID NO: 1250100 - RNA, 19 nt, Human
acuugauagggguagugac

SEQ ID NO: 1250101 - RNA, 21 nt, Human
acuugucauucacuggaacga

SEQ ID NO: 1250102 - RNA, 21 nt, Human
agaaaggagauacaauguaag

SEQ ID NO: 1250103 - RNA, 22 nt, Human
agaaaggagauacaauguaagu

SEQ ID NO: 1250104 - RNA, 20 nt, Human
agagaaggaggcuuucaguc

SEQ ID NO: 1250105 - RNA, 21 nt, Human
agagccaggucucugggaagu

SEQ ID NO: 1250106 - RNA, 20 nt, Human
agaguaaaaggagaaaugga

SEQ ID NO: 1250107 - RNA, 18 nt, Human
agcacagagacaacugga

SEQ ID NO: 1250108 - RNA, 23 nt, Human
agcaggaggugguacaagaaagg

SEQ ID NO: 1250109 - RNA, 25 nt, Human
agcaggaggugguacaagagggacc

SEQ ID NO: 1250110 - RNA, 22 nt, Human
agccacuggggagcugguuucc

SEQ ID NO: 1250111 - RNA, 19 nt, Human
agcuacaacaccuccacug

SEQ ID NO: 1250112 - RNA, 23 nt, Human
aggaaacagaucccagagccagg

SEQ ID NO: 1250113 - RNA, 21 nt, Human
aggaagcugcggguugugcug

SEQ ID NO: 1250114 - RNA, 20 nt, Human
agggagaaaauguaagccaa

SEQ ID NO: 1250115 - RNA, 21 nt, Human
agggagcuaggccauuguuau

SEQ ID NO: 1250116 - RNA, 18 nt, Human
agguuccugcauuuguca

SEQ ID NO: 1250117 - RNA, 22 nt, Human
aguaaaaggagaaauggagaaa

SEQ ID NO: 1250118 - RNA, 18 nt, Human
agugaccauaccagaaug

SEQ ID NO: 1250119 - RNA, 24 nt, Human
aguuaguccaacagugggugaaag

SEQ ID NO: 1250120 - RNA, 24 nt, Human
aucuacauccuuucccaucuccag

SEQ ID NO: 1250121 - RNA, 20 nt, Human
augaagaugaauuucugagc

SEQ ID NO: 1250122 - RNA, 18 nt, Human
augacucaaaagccucug

SEQ ID NO: 1250123 - RNA, 18 nt, Human
augcauaugcugugaguu

SEQ ID NO: 1250124 - RNA, 23 nt, Human
auggccccuaacucuuaucuucc

SEQ ID NO: 1250125 - RNA, 21 nt, Human
caaacaaaccuucugaacgga

SEQ ID NO: 1250126 - RNA, 20 nt, Human
caacuucugggucuuguccu

SEQ ID NO: 1250127 - RNA, 22 nt, Human
caagguaaagggagcuaggcca

SEQ ID NO: 1250128 - RNA, 21 nt, Human
cacacugaaaguaccaaaggu

SEQ ID NO: 1250129 - RNA, 19 nt, Human
cacguuggcauagcagcca

SEQ ID NO: 1250130 - RNA, 19 nt, Human
cagaaacucaucgccuucc

SEQ ID NO: 1250131 - RNA, 19 nt, Human
cagaaacucaucgccuucc

SEQ ID NO: 1250132 - RNA, 21 nt, Human
cagggccuguguguagagguu

SEQ ID NO: 1250133 - RNA, 20 nt, Human
caggugcugagaaacauccu

SEQ ID NO: 1250134 - RNA, 20 nt, Human
caguccuuucuucuuagagu

SEQ ID NO: 1250135 - RNA, 21 nt, Human
caucucgcuccccaaaggcaa

SEQ ID NO: 1250136 - RNA, 21 nt, Human
cauggccccuaacucuuaucu

SEQ ID NO: 1250137 - RNA, 21 nt, Human
cauuuccccagccagggagaa

SEQ ID NO: 1250138 - RNA, 20 nt, Human
ccaacucccgacacccggau

SEQ ID NO: 1250139 - RNA, 22 nt, Human
ccacuggggagcugguuuccug

SEQ ID NO: 1250140 - RNA, 24 nt, Human
ccagccagggagaaaauguaagcc

SEQ ID NO: 1250141 - RNA, 23 nt, Human
ccauguguuuccauuuccaucuc

SEQ ID NO: 1250142 - RNA, 25 nt, Human
ccauuuccaucucgcuccccaaagg

SEQ ID NO: 1250143 - RNA, 21 nt, Human
ccccauaugcauuguguugcu

SEQ ID NO: 1250144 - RNA, 23 nt, Human
cccccauaugcauuguguugcuu

SEQ ID NO: 1250145 - RNA, 21 nt, Human
cccggagcgcacacagggauc

SEQ ID NO: 1250146 - RNA, 18 nt, Human
cccuccaucaccaaacuu

SEQ ID NO: 1250147 - RNA, 19 nt, Human
ccgacacccggauuguggc

SEQ ID NO: 1250148 - RNA, 19 nt, Human
ccgcccggagcgcacacag

SEQ ID NO: 1250149 - RNA, 22 nt, Human
ccuccagagaaacgucuguccc

SEQ ID NO: 1250150 - RNA, 22 nt, Human
ccuccagauaauggaacgcugg

SEQ ID NO: 1250151 - RNA, 23 nt, Human
ccucuggaugaccaccgccaccc

SEQ ID NO: 1250152 - RNA, 18 nt, Human
ccugccauccacuugaga

SEQ ID NO: 1250153 - RNA, 24 nt, Human
ccuggggcuggccacauuccgacg

SEQ ID NO: 1250154 - RNA, 23 nt, Human
ccuguugcuauuuggauccuguc

SEQ ID NO: 1250155 - RNA, 20 nt, Human
ccuugcucagguaccacuuc

SEQ ID NO: 1250156 - RNA, 18 nt, Human
cgaaaggauuccccacgg

SEQ ID NO: 1250157 - RNA, 19 nt, Human
cgcccggagcgcacacagg

SEQ ID NO: 1250158 - RNA, 20 nt, Human
cgcuccccaaaggcacugua

SEQ ID NO: 1250159 - RNA, 22 nt, Human
cgggucgauguaauaauccacc

SEQ ID NO: 1250160 - RNA, 22 nt, Human
cuaguggccuucgcuaucuccu

SEQ ID NO: 1250161 - RNA, 23 nt, Human
cucaaaagccucuggaugaccac

SEQ ID NO: 1250162 - RNA, 20 nt, Human
cucagguccaaacaaaccuu

SEQ ID NO: 1250163 - RNA, 20 nt, Human
cugcaguuggaggucuggcc

SEQ ID NO: 1250164 - RNA, 22 nt, Human
cugccacaguguaggugcccag

SEQ ID NO: 1250165 - RNA, 21 nt, Human
cugcccguuugcuucccacuc

SEQ ID NO: 1250166 - RNA, 22 nt, Human
cuggacacugaucauacucagc

SEQ ID NO: 1250167 - RNA, 22 nt, Human
cuuccaccuuaaacuucggcag

SEQ ID NO: 1250168 - RNA, 21 nt, Human
cuuccuccacaacaguagcca

SEQ ID NO: 1250169 - RNA, 24 nt, Human
cuuccuccacaacaguagccacaa

SEQ ID NO: 1250170 - RNA, 18 nt, Human
gaaaagguccgugccuuc

SEQ ID NO: 1250171 - RNA, 23 nt, Human
gaaggaggcuuucaguccuuucu

SEQ ID NO: 1250172 - RNA, 24 nt, Human
gaauucuugagacaccguagaccc

SEQ ID NO: 1250173 - RNA, 19 nt, Human
gacagagcgguugcucagc

SEQ ID NO: 1250174 - RNA, 18 nt, Human
gagaaaauguaagccaac

SEQ ID NO: 1250175 - RNA, 21 nt, Human
gcagcugcagcuccacuucug

SEQ ID NO: 1250176 - RNA, 22 nt, Human
gcauuuugguaguaacguggca

SEQ ID NO: 1250177 - RNA, 19 nt, Human
gcccggagcgcacacaggg

SEQ ID NO: 1250178 - RNA, 20 nt, Human
gcugguuuccugccauccac

SEQ ID NO: 1250179 - RNA, 20 nt, Human
gcugugugaaggagauuucc

SEQ ID NO: 1250180 - RNA, 20 nt, Human
ggaaaaagcugaaaaggucc

SEQ ID NO: 1250181 - RNA, 21 nt, Human
ggaagcuguucccguuccacc

SEQ ID NO: 1250182 - RNA, 19 nt, Human
ggaagugcagaaacucauc

SEQ ID NO: 1250183 - RNA, 20 nt, Human
ggaagugcagaaacucaucg

SEQ ID NO: 1250184 - RNA, 18 nt, Human
ggacaggucuacaaugcc

SEQ ID NO: 1250185 - RNA, 19 nt, Human
ggacaggucuacaaugccu

SEQ ID NO: 1250186 - RNA, 24 nt, Human
ggagaauguuucugauguccauuu

SEQ ID NO: 1250187 - RNA, 24 nt, Human
ggcauugggucaaugaggggcuga

SEQ ID NO: 1250188 - RNA, 21 nt, Human
ggcugaggaaagucccauggg

SEQ ID NO: 1250189 - RNA, 20 nt, Human
gggcauugggucaaugaggg

SEQ ID NO: 1250190 - RNA, 25 nt, Human
gggcauugggucaaugaggggcuga

SEQ ID NO: 1250191 - RNA, 20 nt, Human
ggguuccaccacuuccaccu

SEQ ID NO: 1250192 - RNA, 28 nt, Human
ggugauagggccaacauuccuagaagga

SEQ ID NO: 1250193 - RNA, 21 nt, Human
gguggaugccaaggaagcugc

SEQ ID NO: 1250194 - RNA, 24 nt, Human
gugcagaaacucaucgccuuccac

SEQ ID NO: 1250195 - RNA, 24 nt, Human
uaacuccuuggguuccaccacuuc

SEQ ID NO: 1250196 - RNA, 19 nt, Human
uacaagaaaggagauacaa

SEQ ID NO: 1250197 - RNA, 21 nt, Human
uacaagaaaggagauacaaug

SEQ ID NO: 1250198 - RNA, 20 nt, Human
uaccaauaggaaacagaucc

SEQ ID NO: 1250199 - RNA, 25 nt, Human
uaccaauaggaaacagaucccagag

SEQ ID NO: 1250200 - RNA, 19 nt, Human
uaccagaauggaaacaucc

SEQ ID NO: 1250201 - RNA, 21 nt, Human
uagacccugacucaccauugg

SEQ ID NO: 1250202 - RNA, 19 nt, Human
uaggaaacagaucccagag

SEQ ID NO: 1250203 - RNA, 19 nt, Human
uaggagaagcugaucucuu

SEQ ID NO: 1250204 - RNA, 20 nt, Human
uaggagaagcugaucucuug

SEQ ID NO: 1250205 - RNA, 23 nt, Human
uaggugcccagcauugccucugg

SEQ ID NO: 1250206 - RNA, 18 nt, Human
uauggcaagggcuauuac

SEQ ID NO: 1250207 - RNA, 24 nt, Human
ucaacaaagaacggcuugaaagca

SEQ ID NO: 1250208 - RNA, 24 nt, Human
ucagguguuucugccccuccauca

SEQ ID NO: 1250209 - RNA, 22 nt, Human
uccacaccugucccuuccucca

SEQ ID NO: 1250210 - RNA, 22 nt, Human
uccacacugaaaguaccaaagg

SEQ ID NO: 1250211 - RNA, 23 nt, Human
uccacacugaaaguaccaaaggu

SEQ ID NO: 1250212 - RNA, 20 nt, Human
uccaccagcacuuccugggg

SEQ ID NO: 1250213 - RNA, 21 nt, Human
uccacuagcuugacaaaugca

SEQ ID NO: 1250214 - RNA, 22 nt, Human
uccauuuccaucucgcucccca

SEQ ID NO: 1250215 - RNA, 18 nt, Human
ucccaugggccagacacu

SEQ ID NO: 1250216 - RNA, 21 nt, Human
uccuuggucuccagaguaacc

SEQ ID NO: 1250217 - RNA, 21 nt, Human
ucuacagccgcaggcucagac

SEQ ID NO: 1250218 - RNA, 18 nt, Human
ucucauccaccgcccgga

SEQ ID NO: 1250219 - RNA, 21 nt, Human
ucuccuuuugagucaggcugg

SEQ ID NO: 1250220 - RNA, 21 nt, Human
ucuccuuuugagucaggcugg

SEQ ID NO: 1250221 - RNA, 21 nt, Human
ucugaacggaggggaaauuua

SEQ ID NO: 1250222 - RNA, 21 nt, Human
ucuugagacaccguagacccu

SEQ ID NO: 1250223 - RNA, 23 nt, Human
ugaaagcccgaagccucuugacu

SEQ ID NO: 1250224 - RNA, 24 nt, Human
ugaaagcccgaagccucuugacug

SEQ ID NO: 1250225 - RNA, 21 nt, Human
ugaauuagaaccuuuuucuuc

SEQ ID NO: 1250226 - RNA, 22 nt, Human
ugacaaaugcaggaugcugcca

SEQ ID NO: 1250227 - RNA, 19 nt, Human
ugacacacagauaccugca

SEQ ID NO: 1250228 - RNA, 18 nt, Human
ugacugcaaucuacuggc

SEQ ID NO: 1250229 - RNA, 24 nt, Human
ugagacaccguagacccugacuca

SEQ ID NO: 1250230 - RNA, 24 nt, Human
ugagcuuggccaaagcauuuugug

SEQ ID NO: 1250231 - RNA, 20 nt, Human
ugaggaaggagucaucaugg

SEQ ID NO: 1250232 - RNA, 18 nt, Human
ugccaaggaagcugcggg

SEQ ID NO: 1250233 - RNA, 21 nt, Human
ugccauaaaucaccagaaaca

SEQ ID NO: 1250234 - RNA, 22 nt, Human
ugcccagcauugccucuggugc

SEQ ID NO: 1250235 - RNA, 22 nt, Human
ugcccgagaccugaucuccucc

SEQ ID NO: 1250236 - RNA, 20 nt, Human
ugcccugggguguagagagg

SEQ ID NO: 1250237 - RNA, 21 nt, Human
ugcccugggguguagagaggu

SEQ ID NO: 1250238 - RNA, 21 nt, Human
ugcccuuggggcauuggguca

SEQ ID NO: 1250239 - RNA, 24 nt, Human
ugccugcccguuugcuucccacuc

SEQ ID NO: 1250240 - RNA, 23 nt, Human
ugcugagaaacauccuguuuugu

SEQ ID NO: 1250241 - RNA, 19 nt, Human
uggaugaccaccgccaccc

SEQ ID NO: 1250242 - RNA, 22 nt, Human
uggaugguaaaaauugcuggaa

SEQ ID NO: 1250243 - RNA, 18 nt, Human
uggcauagaucaccaggg

SEQ ID NO: 1250244 - RNA, 22 nt, Human
uggccaaagcauuuugugacaa

SEQ ID NO: 1250245 - RNA, 23 nt, Human
uggccccuaacucuuaucuuccc

SEQ ID NO: 1250246 - RNA, 22 nt, Human
ugguaagcugggccaacaaugc

SEQ ID NO: 1250247 - RNA, 22 nt, Human
uucugaacggaggggaaauuua

SEQ ID NO: 1250248 - RNA, 19 nt, Human
uucuggcuccaguaaaugg

SEQ ID NO: 1250249 - RNA, 24 nt, Human
uugauggcuguacgcauauccaau

SEQ ID NO: 1250250 - RNA, 21 nt, Human
uugcuauuuggauccugucca

SEQ ID NO: 1250251 - RNA, 25 nt, Human
uugcucagcucucugucuuccucgg

SEQ ID NO: 1250252 - RNA, 18 nt, Human
uuggucguggagguggcc

SEQ ID NO: 1250253 - RNA, 22 nt, Human
uuggucguggagguggccgaau

SEQ ID NO: 1250254 - RNA, 23 nt, Human
uuuaaggagaauguuucugaugu

SEQ ID NO: 1250255 - RNA, 20 nt, Human
uuugaaacuuucccuccaga

SEQ ID NO: 1250256 - RNA, 22 nt, Human
uuaagauggcagggauuccuuu

SEQ ID NO: 1250257 - RNA, 25 nt, Human
cagaaccagaaaaacccagggaguu

SEQ ID NO: 1250258 - RNA, 23 nt, Human
gaauauacccaggguugugccac

SEQ ID NO: 1250259 - RNA, 23 nt, Human
uagaaagagaagggaauauaccc

SEQ ID NO: 1250260 - RNA, 23 nt, Human
uggcagugaauugcacugggccc

SEQ ID NO: 1250261 - RNA, 23 nt, Human
uguccuuugaguugaaaugauuu

SEQ ID NO: 1250262 - RNA, 19 nt, Human
uguucugaguuguggcagu

SEQ ID NO: 1250263 - RNA, 24 nt, Human
gccacuucccuugccaucucuggu

SEQ ID NO: 1250264 - RNA, 22 nt, Human
aacucacagagcagccacagcc

SEQ ID NO: 1250265 - RNA, 21 nt, Human
aagcucgcaggacagcagccc

SEQ ID NO: 1250266 - RNA, 23 nt, Human
accaggucacccacuacuggguc

SEQ ID NO: 1250267 - RNA, 19 nt, Human
agagcagccacagccugag

SEQ ID NO: 1250268 - RNA, 20 nt, Human
agagccccaggaaggcccag

SEQ ID NO: 1250269 - RNA, 23 nt, Human
agagccccaggaaggcccagagg

SEQ ID NO: 1250270 - RNA, 20 nt, Human
agcccccagggaccacccag

SEQ ID NO: 1250271 - RNA, 19 nt, Human
aggaaggcccagaggaggc

SEQ ID NO: 1250272 - RNA, 23 nt, Human
aggaaggcccagaggaggcagug

SEQ ID NO: 1250273 - RNA, 18 nt, Human
aggccacuggcugcccag

SEQ ID NO: 1250274 - RNA, 20 nt, Human
auggaggaggggcccagcag

SEQ ID NO: 1250275 - RNA, 22 nt, Human
caaggucagggcccuucccauc

SEQ ID NO: 1250276 - RNA, 19 nt, Human
cacagccugagcucccucu

SEQ ID NO: 1250277 - RNA, 27 nt, Human
cagagcagccacagccugaccccuugg

SEQ ID NO: 1250278 - RNA, 23 nt, Human
cagcagaggggccaagcucgcag

SEQ ID NO: 1250279 - RNA, 19 nt, Human
cagcagcccaaggucaggg

SEQ ID NO: 1250280 - RNA, 21 nt, Human
cagcccccagggaccacccag

SEQ ID NO: 1250281 - RNA, 23 nt, Human
cagccccucccucagagcagccc

SEQ ID NO: 1250282 - RNA, 19 nt, Human
cagggcccuucccaucagc

SEQ ID NO: 1250283 - RNA, 19 nt, Human
caggucagcuuccucagcc

SEQ ID NO: 1250284 - RNA, 18 nt, Human
cagguccuccgaaucccc

SEQ ID NO: 1250285 - RNA, 21 nt, Human
cagugggugguuugcaccagg

SEQ ID NO: 1250286 - RNA, 24 nt, Human
ccacggcgaugggccagguccucc

SEQ ID NO: 1250287 - RNA, 23 nt, Human
ccccaaggccuccagggcuacgg

SEQ ID NO: 1250288 - RNA, 20 nt, Human
ccccaggaaggcccagagga

SEQ ID NO: 1250289 - RNA, 18 nt, Human
ccccagggaccacccagc

SEQ ID NO: 1250290 - RNA, 20 nt, Human
ccccagggaccacccagccc

SEQ ID NO: 1250291 - RNA, 21 nt, Human
cccccagggaccacccagccc

SEQ ID NO: 1250292 - RNA, 24 nt, Human
ccccgugcucaccagaacaagaac

SEQ ID NO: 1250293 - RNA, 24 nt, Human
cccuccagggucacucugagaacc

SEQ ID NO: 1250294 - RNA, 18 nt, Human
cccuccucuccugagagc

SEQ ID NO: 1250295 - RNA, 23 nt, Human
ccuccagggcuacgggcaccguc

SEQ ID NO: 1250296 - RNA, 23 nt, Human
ccuccgaauccccaaggccucca

SEQ ID NO: 1250297 - RNA, 19 nt, Human
ccucuccugagagccgaag

SEQ ID NO: 1250298 - RNA, 22 nt, Human
ccugcugccccuuggccccagc

SEQ ID NO: 1250299 - RNA, 18 nt, Human
cgcaggacagcagcccaa

SEQ ID NO: 1250300 - RNA, 23 nt, Human
cggcgaugggccagguccuccuc

SEQ ID NO: 1250301 - RNA, 23 nt, Human
cguccugcugccccuuggcccca

SEQ ID NO: 1250302 - RNA, 21 nt, Human
cuccugagagccgaagagccc

SEQ ID NO: 1250303 - RNA, 23 nt, Human
cucgcuguggauccacauccugg

SEQ ID NO: 1250304 - RNA, 20 nt, Human
cugcugccccuuggccccag

SEQ ID NO: 1250305 - RNA, 21 nt, Human
cugcugccccuuggccccagc

SEQ ID NO: 1250306 - RNA, 28 nt, Human
cuuggccccagcucgagugcugcccagc

SEQ ID NO: 1250307 - RNA, 23 nt, Human
gaagagccccaggaaggcccaga

SEQ ID NO: 1250308 - RNA, 22 nt, Human
gaucacacuggcccuggaggac

SEQ ID NO: 1250309 - RNA, 22 nt, Human
gcacagcccccagggaccaccc

SEQ ID NO: 1250310 - RNA, 24 nt, Human
gcacagcccccagggaccacccag

SEQ ID NO: 1250311 - RNA, 23 nt, Human
gccgaagagccccaggaaggccc

SEQ ID NO: 1250312 - RNA, 19 nt, Human
gcugccccuuggccccagc

SEQ ID NO: 1250313 - RNA, 19 nt, Human
gcuuggugccguuccccgu

SEQ ID NO: 1250314 - RNA, 21 nt, Human
gucagcuuccucagccccucc

SEQ ID NO: 1250315 - RNA, 19 nt, Human
guuugcaccaggucaccca

SEQ ID NO: 1250316 - RNA, 23 nt, Human
uacuggguccccuuucucugucc

SEQ ID NO: 1250317 - RNA, 21 nt, Human
ucagcuuccucagccccuccc

SEQ ID NO: 1250318 - RNA, 24 nt, Human
ucagggcccuucccaucagcauug

SEQ ID NO: 1250319 - RNA, 18 nt, Human
ucccaaggcucgcccggg

SEQ ID NO: 1250320 - RNA, 22 nt, Human
uccccaaggccuccagggcuac

SEQ ID NO: 1250321 - RNA, 23 nt, Human
uccuccgaauccccaaggccucc

SEQ ID NO: 1250322 - RNA, 19 nt, Human
ucgcaggacagcagcccaa

SEQ ID NO: 1250323 - RNA, 22 nt, Human
ugagaagagggaugugcaucug

SEQ ID NO: 1250324 - RNA, 21 nt, Human
uguccugaugcagauguggga

SEQ ID NO: 1250325 - RNA, 27 nt, Human
uuccccgugcucaccagaacaagaaca

SEQ ID NO: 1250326 - RNA, 21 nt, Human
uuggugccguuccccgugcuc

SEQ ID NO: 1250327 - RNA, 21 nt, Human
aaaaccccuccacgauucccu

SEQ ID NO: 1250328 - RNA, 23 nt, Human
agaagacaccugagcucaaaacc

SEQ ID NO: 1250329 - RNA, 22 nt, Human
agaccuuuccagaggugagcug

SEQ ID NO: 1250330 - RNA, 18 nt, Human
agccucauccucgcccca

SEQ ID NO: 1250331 - RNA, 25 nt, Human
caaaaccccuccacgauuccccaga

SEQ ID NO: 1250332 - RNA, 23 nt, Human
cacagcuuggagaccuuuccaga

SEQ ID NO: 1250333 - RNA, 24 nt, Human
caccugagcucaaaaccccuccac

SEQ ID NO: 1250334 - RNA, 19 nt, Human
ccccagcaggccagggucu

SEQ ID NO: 1250335 - RNA, 21 nt, Human
ccccuggagacuuugggcgaa

SEQ ID NO: 1250336 - RNA, 24 nt, Human
ccucauccucgccccagcaggcca

SEQ ID NO: 1250337 - RNA, 22 nt, Human
ccugagcucaaaaccccuccac

SEQ ID NO: 1250338 - RNA, 21 nt, Human
cucaaaaccccuccacgauuc

SEQ ID NO: 1250339 - RNA, 24 nt, Human
cucaaaaccccuccacgauucccu

SEQ ID NO: 1250340 - RNA, 22 nt, Human
cugggccugaaccagggagggg

SEQ ID NO: 1250341 - RNA, 20 nt, Human
gagccucauccucgccccag

SEQ ID NO: 1250342 - RNA, 22 nt, Human
ggagaccuuuccagaggugagc

SEQ ID NO: 1250343 - RNA, 20 nt, Human
ggcugggccugaaccaggga

SEQ ID NO: 1250344 - RNA, 21 nt, Human
ggcugggccugaaccagggag

SEQ ID NO: 1250345 - RNA, 21 nt, Human
gggcugggccugaaccaggga

SEQ ID NO: 1250346 - RNA, 24 nt, Human
gggcugggccugaaccagggaggg

SEQ ID NO: 1250347 - RNA, 19 nt, Human
ggggcugggccugaaccag

SEQ ID NO: 1250348 - RNA, 23 nt, Human
uaggcgcggacaccccuggagac

SEQ ID NO: 1250349 - RNA, 19 nt, Human
uccccagaucacacagcuu

SEQ ID NO: 1250350 - RNA, 20 nt, Human
uggcagaagacaccugagcu

SEQ ID NO: 1250351 - RNA, 21 nt, Human
uuuccagaggugagcugagcu

SEQ ID NO: 1250352 - RNA, 19 nt, Human
aggguggcccuuguggggc

SEQ ID NO: 1250353 - RNA, 22 nt, Human
ccugcaggcagcugccugcugg

SEQ ID NO: 1250354 - RNA, 23 nt, Human
ccugcaggcagcugccugcugga

SEQ ID NO: 1250355 - RNA, 19 nt, Human
gaaggcugcugacucagca

SEQ ID NO: 1250356 - RNA, 21 nt, Human
gcagcugccugcuggaucuuc

SEQ ID NO: 1250357 - RNA, 24 nt, Human
gggcagguccugcaggcagcugcc

SEQ ID NO: 1250358 - RNA, 18 nt, Human
gguccugcaggcagcugc

SEQ ID NO: 1250359 - RNA, 23 nt, Human
gguggcccuuguggggcaggaug

SEQ ID NO: 1250360 - RNA, 24 nt, Human
gugggccucaggguggcccuugug

SEQ ID NO: 1250361 - RNA, 22 nt, Human
uagcccuggugcuucccgcagg

SEQ ID NO: 1250362 - RNA, 23 nt, Human
ugaauggagccggggaaggcugc

SEQ ID NO: 1250363 - RNA, 23 nt, Human
ugcuggaucuuccugugggccuc

SEQ ID NO: 1250364 - RNA, 21 nt, Human
aggcccggaaaccccuggcgg

SEQ ID NO: 1250365 - RNA, 20 nt, Human
caaacuccuccagagaccug

SEQ ID NO: 1250366 - RNA, 18 nt, Human
caccugaacgggcuguaa

SEQ ID NO: 1250367 - RNA, 20 nt, Human
caccugaacgggcuguaagg

SEQ ID NO: 1250368 - RNA, 19 nt, Human
cagcucugggcaaacuccu

SEQ ID NO: 1250369 - RNA, 22 nt, Human
caggagcacccauccuuccuca

SEQ ID NO: 1250370 - RNA, 18 nt, Human
cccaccgcccagcggggc

SEQ ID NO: 1250371 - RNA, 18 nt, Human
ccccuggcgccgccccgg

SEQ ID NO: 1250372 - RNA, 19 nt, Human
cccucugggugaaggugga

SEQ ID NO: 1250373 - RNA, 27 nt, Human
cgcccggcuccucugacccaccgccca

SEQ ID NO: 1250374 - RNA, 18 nt, Human
cggggccccuggcgccgc

SEQ ID NO: 1250375 - RNA, 19 nt, Human
cuccucugacccaccgccc

SEQ ID NO: 1250376 - RNA, 21 nt, Human
gcccggaaaccccuggcggcg

SEQ ID NO: 1250377 - RNA, 19 nt, Human
ggcccggaaaccccuggcg

SEQ ID NO: 1250378 - RNA, 20 nt, Human
gggccagauggcgggggcug

SEQ ID NO: 1250379 - RNA, 22 nt, Human
gggcgcccgccacggaggaggg

SEQ ID NO: 1250380 - RNA, 20 nt, Human
ggggcugguguuuauuuagu

SEQ ID NO: 1250381 - RNA, 19 nt, Human
guccuccuuccguuagggc

SEQ ID NO: 1250382 - RNA, 18 nt, Human
ugacccaccgcccagcgg

SEQ ID NO: 1250383 - RNA, 25 nt, Human
uguuuauuuaguaggggcccccaug

SEQ ID NO: 1250384 - RNA, 19 nt, Human
aaaaaaccaagcaaagagu

SEQ ID NO: 1250385 - RNA, 19 nt, Human
aaaaaccaagcaaagagug

SEQ ID NO: 1250386 - RNA, 26 nt, Human
aaaaacuaaacagguauuuuggacaa

SEQ ID NO: 1250387 - RNA, 28 nt, Human
aaacagguauuuuggacaacacauucuu

SEQ ID NO: 1250388 - RNA, 21 nt, Human
aauguccaauucauccuuugc

SEQ ID NO: 1250389 - RNA, 18 nt, Human
acuuugggaaaagaaaga

SEQ ID NO: 1250390 - RNA, 26 nt, Human
agaaagaccuuuuucuacauuugcuu

SEQ ID NO: 1250391 - RNA, 22 nt, Human
agauaguucuggggccucaggg

SEQ ID NO: 1250392 - RNA, 21 nt, Human
agccuccugguaaauccuccg

SEQ ID NO: 1250393 - RNA, 22 nt, Human
auacauacuuaaaaaaccaagc

SEQ ID NO: 1250394 - RNA, 24 nt, Human
auaguucuggggccucagggggcu

SEQ ID NO: 1250395 - RNA, 19 nt, Human
ccaauucauccuuugcacc

SEQ ID NO: 1250396 - RNA, 23 nt, Human
cccgccccuaaacugacuguucu

SEQ ID NO: 1250397 - RNA, 19 nt, Human
cgguagggaaaguucucac

SEQ ID NO: 1250398 - RNA, 27 nt, Human
cucacucugcauuauaaaaaggacaac

SEQ ID NO: 1250399 - RNA, 18 nt, Human
cucuucgacaauguccaa

SEQ ID NO: 1250400 - RNA, 23 nt, Human
cugcauuauaaaaaggacagcca

SEQ ID NO: 1250401 - RNA, 18 nt, Human
cuuaaagagacuuccucc

SEQ ID NO: 1250402 - RNA, 18 nt, Human
gaagaacuuggcuuccac

SEQ ID NO: 1250403 - RNA, 18 nt, Human
gagacuuccuccacugcc

SEQ ID NO: 1250404 - RNA, 21 nt, Human
ggggccucagggggcucaugu

SEQ ID NO: 1250405 - RNA, 19 nt, Human
uagccuccugguaaauccu

SEQ ID NO: 1250406 - RNA, 19 nt, Human
uaggaguuuuuuccuguuu

SEQ ID NO: 1250407 - RNA, 21 nt, Human
uagggaaaguucucacucugc

SEQ ID NO: 1250408 - RNA, 22 nt, Human
uccauacauacuuaaaaaacca

SEQ ID NO: 1250409 - RNA, 18 nt, Human
ucuugguguuaaugaugg

SEQ ID NO: 1250410 - RNA, 25 nt, Human
ugaauagccuccugguaaauccucc

SEQ ID NO: 1250411 - RNA, 23 nt, Human
uggaaccuagacaacauuuauca

SEQ ID NO: 1250412 - RNA, 24 nt, Human
uggaaccuagacaacauuuaucaa

SEQ ID NO: 1250413 - RNA, 24 nt, Human
uuccacuuugggaaaagaaagacc

SEQ ID NO: 1250414 - RNA, 20 nt, Human
uuccuccacugccagagauc

SEQ ID NO: 1250415 - RNA, 20 nt, Human
uucuuggcaauggaaccuag

SEQ ID NO: 1250416 - RNA, 20 nt, Human
uucuugguguuaaugauggu

SEQ ID NO: 1250417 - RNA, 21 nt, Human
uucuugguguuaaugaugguu

SEQ ID NO: 1250418 - RNA, 25 nt, Human
uugguguuaaugaugguuuugucuu

SEQ ID NO: 1250419 - RNA, 21 nt, Human
uuuuguucuugguguuaauga

SEQ ID NO: 1250420 - RNA, 25 nt, Human
aaauaaccaucucaagaauaugaaa

SEQ ID NO: 1250421 - RNA, 20 nt, Human
aaaugucuuucuggccagac

SEQ ID NO: 1250422 - RNA, 18 nt, Human
aacacugccauccccacu

SEQ ID NO: 1250423 - RNA, 20 nt, Human
aacuugcucuccagauccca

SEQ ID NO: 1250424 - RNA, 22 nt, Human
aagaagcguggacucuuguccu

SEQ ID NO: 1250425 - RNA, 21 nt, Human
aagcacuggcaagacucgugc

SEQ ID NO: 1250426 - RNA, 19 nt, Human
accauccuguguuucuggc

SEQ ID NO: 1250427 - RNA, 18 nt, Human
acccuugcaagcuggaag

SEQ ID NO: 1250428 - RNA, 21 nt, Human
accugcagguacuggucagcg

SEQ ID NO: 1250429 - RNA, 22 nt, Human
agagauuucccaaauacagcac

SEQ ID NO: 1250430 - RNA, 22 nt, Human
agauaaaugcucccagccagug

SEQ ID NO: 1250431 - RNA, 23 nt, Human
agauggccaaugacggucugacc

SEQ ID NO: 1250432 - RNA, 22 nt, Human
agccagugagagaagcaccagg

SEQ ID NO: 1250433 - RNA, 19 nt, Human
agccgguagccagcucucc

SEQ ID NO: 1250434 - RNA, 21 nt, Human
agcgcagcgugguccuggggu

SEQ ID NO: 1250435 - RNA, 21 nt, Human
agcuguggggagggaggcugg

SEQ ID NO: 1250436 - RNA, 19 nt, Human
aggaggucagggaccaucc

SEQ ID NO: 1250437 - RNA, 20 nt, Human
aggaggucagggaccauccu

SEQ ID NO: 1250438 - RNA, 21 nt, Human
aggcagauggucacugccagg

SEQ ID NO: 1250439 - RNA, 21 nt, Human
aggccugugguccacggugag

SEQ ID NO: 1250440 - RNA, 19 nt, Human
aguugcugagcagcagaga

SEQ ID NO: 1250441 - RNA, 18 nt, Human
aucuccuucgagcugccg

SEQ ID NO: 1250442 - RNA, 21 nt, Human
aucuccuucgagcugccguug

SEQ ID NO: 1250443 - RNA, 23 nt, Human
augaagcuguaagcaaacacugc

SEQ ID NO: 1250444 - RNA, 21 nt, Human
augacaauaaaagcaccuguc

SEQ ID NO: 1250445 - RNA, 21 nt, Human
auggucuucaagaccagaaag

SEQ ID NO: 1250446 - RNA, 22 nt, Human
auggugcuaucauggugacgag

SEQ ID NO: 1250447 - RNA, 20 nt, Human
caaauuuccgccagagcucu

SEQ ID NO: 1250448 - RNA, 19 nt, Human
caagaauaugaaauaggag

SEQ ID NO: 1250449 - RNA, 18 nt, Human
caagaccagaaagaaaag

SEQ ID NO: 1250450 - RNA, 24 nt, Human
caagaccagaaagaaaaguuaugc

SEQ ID NO: 1250451 - RNA, 25 nt, Human
cacaauucuguaggaggucagggac

SEQ ID NO: 1250452 - RNA, 18 nt, Human
cacagaccgugcagauac

SEQ ID NO: 1250453 - RNA, 25 nt, Human
caccgaggcuuucagccucgggaac

SEQ ID NO: 1250454 - RNA, 18 nt, Human
cacucagcuguggggagg

SEQ ID NO: 1250455 - RNA, 18 nt, Human
cacugcuaacaaucagaa

SEQ ID NO: 1250456 - RNA, 28 nt, Human
cagaccgugcagauaccugguuaaagag

SEQ ID NO: 1250457 - RNA, 19 nt, Human
cagacgaaaccugcuccuu

SEQ ID NO: 1250458 - RNA, 27 nt, Human
cagcaaagucgaggccugugguccacg

SEQ ID NO: 1250459 - RNA, 21 nt, Human
cagcaucuccucaaugcucau

SEQ ID NO: 1250460 - RNA, 19 nt, Human
cagccucuggguuuccaau

SEQ ID NO: 1250461 - RNA, 19 nt, Human
cagcuucugggaccggucc

SEQ ID NO: 1250462 - RNA, 20 nt, Human
cagggaaugaagaugaccac

SEQ ID NO: 1250463 - RNA, 22 nt, Human
cauauugucgcacguuccuggg

SEQ ID NO: 1250464 - RNA, 18 nt, Human
ccaaauaaccaucucaag

SEQ ID NO: 1250465 - RNA, 22 nt, Human
ccacagcagacuucuacgccac

SEQ ID NO: 1250466 - RNA, 19 nt, Human
ccagaaagaaaaguuaugc

SEQ ID NO: 1250467 - RNA, 19 nt, Human
ccagagcucugcaccugcu

SEQ ID NO: 1250468 - RNA, 28 nt, Human
cccacugcuaacaaucagaagguuuucc

SEQ ID NO: 1250469 - RNA, 24 nt, Human
ccccacuaggaaauacgccaaggg

SEQ ID NO: 1250470 - RNA, 22 nt, Human
ccccagagaccagacggugucc

SEQ ID NO: 1250471 - RNA, 18 nt, Human
cccucagcuucuguccca

SEQ ID NO: 1250472 - RNA, 18 nt, Human
cccucugggcuucagagg

SEQ ID NO: 1250473 - RNA, 26 nt, Human
ccggguaagguccagccguauccgcc

SEQ ID NO: 1250474 - RNA, 22 nt, Human
ccucgggaaccugcccuggcuu

SEQ ID NO: 1250475 - RNA, 22 nt, Human
ccucuauagcgcugggaugccu

SEQ ID NO: 1250476 - RNA, 23 nt, Human
ccugagaaacagauccaucuccu

SEQ ID NO: 1250477 - RNA, 22 nt, Human
ccugggacccugugccagcaaa

SEQ ID NO: 1250478 - RNA, 20 nt, Human
ccugggcuucccucugggcu

SEQ ID NO: 1250479 - RNA, 26 nt, Human
ccuguccccuggccucgggcucuggg

SEQ ID NO: 1250480 - RNA, 22 nt, Human
ccuguguuucuggcagagcuga

SEQ ID NO: 1250481 - RNA, 19 nt, Human
ccuucaggccacagcagac

SEQ ID NO: 1250482 - RNA, 21 nt, Human
cgagugcgcugaggacagcug

SEQ ID NO: 1250483 - RNA, 21 nt, Human
cgccaagggcagccgguagcc

SEQ ID NO: 1250484 - RNA, 22 nt, Human
cggaccucuccccaauauaaaa

SEQ ID NO: 1250485 - RNA, 27 nt, Human
cuccagaucccaacaccaguagucacu

SEQ ID NO: 1250486 - RNA, 18 nt, Human
cucgggcucuggggcaug

SEQ ID NO: 1250487 - RNA, 24 nt, Human
cugcagccucuggguuuccaauga

SEQ ID NO: 1250488 - RNA, 19 nt, Human
cugggcacauaggcuggcc

SEQ ID NO: 1250489 - RNA, 20 nt, Human
cuuccaaagggcuggccugc

SEQ ID NO: 1250490 - RNA, 19 nt, Human
cuucugggaccgguccacc

SEQ ID NO: 1250491 - RNA, 19 nt, Human
cuuuauccucauuucccag

SEQ ID NO: 1250492 - RNA, 23 nt, Human
cuuucuggaacuguauauucugg

SEQ ID NO: 1250493 - RNA, 19 nt, Human
gaaccugggcuucccucug

SEQ ID NO: 1250494 - RNA, 19 nt, Human
gacccugugccagcaaagu

SEQ ID NO: 1250495 - RNA, 21 nt, Human
gacuuguagugcacccucccc

SEQ ID NO: 1250496 - RNA, 18 nt, Human
gaucuuccucucccugcc

SEQ ID NO: 1250497 - RNA, 21 nt, Human
gcaaacacugccauccccacu

SEQ ID NO: 1250498 - RNA, 18 nt, Human
gcagguacuggucagcgc

SEQ ID NO: 1250499 - RNA, 18 nt, Human
gccagcaaagucgaggcc

SEQ ID NO: 1250500 - RNA, 23 nt, Human
gccagcucucccgaucuuccucu

SEQ ID NO: 1250501 - RNA, 19 nt, Human
gccggguaagguccagccg

SEQ ID NO: 1250502 - RNA, 20 nt, Human
gccucccuucaaacuucagc

SEQ ID NO: 1250503 - RNA, 19 nt, Human
gccucggguccuggucagc

SEQ ID NO: 1250504 - RNA, 21 nt, Human
gccugugguccacggugagga

SEQ ID NO: 1250505 - RNA, 19 nt, Human
gcgcagcgugguccugggg

SEQ ID NO: 1250506 - RNA, 20 nt, Human
gcgcugaggacagcuggcug

SEQ ID NO: 1250507 - RNA, 18 nt, Human
gcuggcgggggacccggg

SEQ ID NO: 1250508 - RNA, 20 nt, Human
ggagcccuguccccuggccu

SEQ ID NO: 1250509 - RNA, 18 nt, Human
ggccucgggcucuggggc

SEQ ID NO: 1250510 - RNA, 19 nt, Human
ggcucuggggcauggacug

SEQ ID NO: 1250511 - RNA, 18 nt, Human
gggagggaggcuggcggg

SEQ ID NO: 1250512 - RNA, 22 nt, Human
gggaguucuuagccaucuuuuu

SEQ ID NO: 1250513 - RNA, 21 nt, Human
gggaugcauauugucgcacgu

SEQ ID NO: 1250514 - RNA, 21 nt, Human
gggcuucagagggggcugugg

SEQ ID NO: 1250515 - RNA, 18 nt, Human
ggggagggaggcuggcgg

SEQ ID NO: 1250516 - RNA, 20 nt, Human
ggggagggaggcuggcgggg

SEQ ID NO: 1250517 - RNA, 18 nt, Human
ggugaccugcagguacug

SEQ ID NO: 1250518 - RNA, 24 nt, Human
guaagcaaacacugccauccccac

SEQ ID NO: 1250519 - RNA, 19 nt, Human
gucaccugaagcaucuauc

SEQ ID NO: 1250520 - RNA, 21 nt, Human
gucguuuggaagcuucuuggu

SEQ ID NO: 1250521 - RNA, 18 nt, Human
guuccugggguacagcuc

SEQ ID NO: 1250522 - RNA, 20 nt, Human
guugauuugcugaaagucuu

SEQ ID NO: 1250523 - RNA, 20 nt, Human
uaacccacugcuaacaauca

SEQ ID NO: 1250524 - RNA, 22 nt, Human
uaacuuuguccaggagagcaau

SEQ ID NO: 1250525 - RNA, 22 nt, Human
uaagcaaacacugccaucccca

SEQ ID NO: 1250526 - RNA, 21 nt, Human
uaaguaccgcacgaaaagucc

SEQ ID NO: 1250527 - RNA, 20 nt, Human
uacagcuccacaaugucacc

SEQ ID NO: 1250528 - RNA, 21 nt, Human
uacuggucagcgcugcuguuc

SEQ ID NO: 1250529 - RNA, 18 nt, Human
ucaaaggcugauggugcu

SEQ ID NO: 1250530 - RNA, 22 nt, Human
ucaccugaagcaucuaucuuga

SEQ ID NO: 1250531 - RNA, 23 nt, Human
ucacuauggcagcuguuuugcuc

SEQ ID NO: 1250532 - RNA, 24 nt, Human
ucagcaucuccucaaugcucaugc

SEQ ID NO: 1250533 - RNA, 19 nt, Human
ucagcuccuucuucgacug

SEQ ID NO: 1250534 - RNA, 19 nt, Human
uccaauauagcuucccuga

SEQ ID NO: 1250535 - RNA, 19 nt, Human
uccacaaugucaccugaag

SEQ ID NO: 1250536 - RNA, 23 nt, Human
uccagaucccaacaccaguaguc

SEQ ID NO: 1250537 - RNA, 21 nt, Human
ucccaaagugucagcuccuuc

SEQ ID NO: 1250538 - RNA, 23 nt, Human
ucccaaauacagcacaaggaccc

SEQ ID NO: 1250539 - RNA, 21 nt, Human
ucccaacaccaguagucacuu

SEQ ID NO: 1250540 - RNA, 19 nt, Human
uccccuggccucgggcucu

SEQ ID NO: 1250541 - RNA, 21 nt, Human
uccccuggccucgggcucugg

SEQ ID NO: 1250542 - RNA, 24 nt, Human
ucccgggucugacuuucggaccuc

SEQ ID NO: 1250543 - RNA, 20 nt, Human
ucccugagucaaaaugggcc

SEQ ID NO: 1250544 - RNA, 18 nt, Human
uccgccuccuucaugucc

SEQ ID NO: 1250545 - RNA, 24 nt, Human
ucgaaccugggcuucccucugggc

SEQ ID NO: 1250546 - RNA, 22 nt, Human
ucgugcgggaguucuuagccau

SEQ ID NO: 1250547 - RNA, 20 nt, Human
ucuccuccucuucuucacuc

SEQ ID NO: 1250548 - RNA, 22 nt, Human
ucuggaaugacaauaaaagcac

SEQ ID NO: 1250549 - RNA, 21 nt, Human
ucuuccuggcugugcuuccaa

SEQ ID NO: 1250550 - RNA, 19 nt, Human
ugaagcaucuaucuugaaa

SEQ ID NO: 1250551 - RNA, 18 nt, Human
ugacaauaaaagcaccug

SEQ ID NO: 1250552 - RNA, 19 nt, Human
ugaccacaaaguuacaggc

SEQ ID NO: 1250553 - RNA, 23 nt, Human
ugacgagggagaccaccacacug

SEQ ID NO: 1250554 - RNA, 19 nt, Human
ugacuuucggaccucuccc

SEQ ID NO: 1250555 - RNA, 20 nt, Human
ugacuuucggaccucucccc

SEQ ID NO: 1250556 - RNA, 19 nt, Human
ugagagaagcaccaggaug

SEQ ID NO: 1250557 - RNA, 22 nt, Human
ugagauaaaugcucccagccag

SEQ ID NO: 1250558 - RNA, 20 nt, Human
ugaggucaaaggcugauggu

SEQ ID NO: 1250559 - RNA, 22 nt, Human
ugauggagagcuucagcaucuc

SEQ ID NO: 1250560 - RNA, 19 nt, Human
ugcagcgaauguuugccau

SEQ ID NO: 1250561 - RNA, 21 nt, Human
ugccaugagaucuuucuggaa

SEQ ID NO: 1250562 - RNA, 19 nt, Human
ugcccgagugcgcugagga

SEQ ID NO: 1250563 - RNA, 26 nt, Human
ugcccucagcuucugucccauagucc

SEQ ID NO: 1250564 - RNA, 18 nt, Human
ugcuguuaacuuugucca

SEQ ID NO: 1250565 - RNA, 21 nt, Human
ugcuugcacacagaccgugca

SEQ ID NO: 1250566 - RNA, 24 nt, Human
ugcuuggcgucuccuccucuucuu

SEQ ID NO: 1250567 - RNA, 21 nt, Human
ugcuuucuuccugggucugga

SEQ ID NO: 1250568 - RNA, 19 nt, Human
uggcagcuguuuugcucuc

SEQ ID NO: 1250569 - RNA, 20 nt, Human
uggccucucaaggugacccu

SEQ ID NO: 1250570 - RNA, 19 nt, Human
ugggaggggcucuggagcg

SEQ ID NO: 1250571 - RNA, 21 nt, Human
ugggaggggcucuggagcgcc

SEQ ID NO: 1250572 - RNA, 18 nt, Human
uggggaccccagggagag

SEQ ID NO: 1250573 - RNA, 21 nt, Human
uggggaccccagggagaggug

SEQ ID NO: 1250574 - RNA, 22 nt, Human
uggggaccccagggagagguga

SEQ ID NO: 1250575 - RNA, 21 nt, Human
uggggagggaggcuggcggga

SEQ ID NO: 1250576 - RNA, 26 nt, Human
uggggagggaggcuggcgggggaccc

SEQ ID NO: 1250577 - RNA, 19 nt, Human
uggggauggucuuccuggc

SEQ ID NO: 1250578 - RNA, 20 nt, Human
uggggccugggacccugugc

SEQ ID NO: 1250579 - RNA, 22 nt, Human
ugguagagguagcacuggcugg

SEQ ID NO: 1250580 - RNA, 18 nt, Human
ugguccacggugaggagg

SEQ ID NO: 1250581 - RNA, 18 nt, Human
uguaaaugucauaggugu

SEQ ID NO: 1250582 - RNA, 24 nt, Human
ugucauaggugugcgcgaucuguu

SEQ ID NO: 1250583 - RNA, 22 nt, Human
ugucguuuggaagcuucuuggu

SEQ ID NO: 1250584 - RNA, 19 nt, Human
ugucucuauccugccacuc

SEQ ID NO: 1250585 - RNA, 21 nt, Human
uguucugcuggucacugcugg

SEQ ID NO: 1250586 - RNA, 19 nt, Human
uucagagggggcugugggu

SEQ ID NO: 1250587 - RNA, 22 nt, Human
uucagcaucuccucaaugcuca

SEQ ID NO: 1250588 - RNA, 19 nt, Human
uucagccucgggaaccugc

SEQ ID NO: 1250589 - RNA, 20 nt, Human
uucauuggaagcacuggcaa

SEQ ID NO: 1250590 - RNA, 25 nt, Human
uuccugugaaggucacuggugcuug

SEQ ID NO: 1250591 - RNA, 20 nt, Human
uucuucccuucaggccacag

SEQ ID NO: 1250592 - RNA, 25 nt, Human
uugcacacagaccgugcagauaccu

SEQ ID NO: 1250593 - RNA, 19 nt, Human
uuuggaagcuucuuggugc

SEQ ID NO: 1250594 - RNA, 21 nt, Human
aaaaaagaaaaaugcuaaagg

SEQ ID NO: 1250595 - RNA, 22 nt, Human
aaaaaagaaaaaugcuaaagga

SEQ ID NO: 1250596 - RNA, 18 nt, Human
aaaaagcucccccaaaag

SEQ ID NO: 1250597 - RNA, 19 nt, Human
aaauaaacuuaaacuauaa

SEQ ID NO: 1250598 - RNA, 21 nt, Human
aacauuaaaaaagcauggcag

SEQ ID NO: 1250599 - RNA, 22 nt, Human
aacucgauaugcacgcuaauga

SEQ ID NO: 1250600 - RNA, 23 nt, Human
aauucuuggccuuuaaacaacuc

SEQ ID NO: 1250601 - RNA, 21 nt, Human
acaaaguaauaaacagugcac

SEQ ID NO: 1250602 - RNA, 27 nt, Human
acacagaaaauggaggaaaggggaccc

SEQ ID NO: 1250603 - RNA, 21 nt, Human
acuuuccucuucugugagauu

SEQ ID NO: 1250604 - RNA, 24 nt, Human
aggcuguuuccaauucuuggccuu

SEQ ID NO: 1250605 - RNA, 23 nt, Human
agucuaacauucaaaggaaguaa

SEQ ID NO: 1250606 - RNA, 23 nt, Human
augccagagugaacaucagugag

SEQ ID NO: 1250607 - RNA, 19 nt, Human
cagccuauuccaaaccaaa

SEQ ID NO: 1250608 - RNA, 19 nt, Human
cagccuauuccaaaccaaa

SEQ ID NO: 1250609 - RNA, 25 nt, Human
cagugcacacuugggggcaaacuac

SEQ ID NO: 1250610 - RNA, 18 nt, Human
ccaaaccaaagagaacag

SEQ ID NO: 1250611 - RNA, 19 nt, Human
ccagaggaggccacuuucc

SEQ ID NO: 1250612 - RNA, 21 nt, Human
cucccaucaccaauacacaga

SEQ ID NO: 1250613 - RNA, 22 nt, Human
cuuaaacuauaaauuagaaaca

SEQ ID NO: 1250614 - RNA, 20 nt, Human
gaagagcucacugugauuaa

SEQ ID NO: 1250615 - RNA, 21 nt, Human
gaggaggccacuuuccucuuc

SEQ ID NO: 1250616 - RNA, 23 nt, Human
gauaugcacgcuaaugaccuaca

SEQ ID NO: 1250617 - RNA, 22 nt, Human
uaaauuagaaacacaaauaauc

SEQ ID NO: 1250618 - RNA, 19 nt, Human
uacaaaguaauaaacagug

SEQ ID NO: 1250619 - RNA, 21 nt, Human
uagaaacacaaauaaucauga

SEQ ID NO: 1250620 - RNA, 20 nt, Human
ucugaaugcuguagugaaua

SEQ ID NO: 1250621 - RNA, 23 nt, Human
ucuugagcagcuguuugaugaug

SEQ ID NO: 1250622 - RNA, 22 nt, Human
ugaaauuaaaaaagaaaaaugc

SEQ ID NO: 1250623 - RNA, 28 nt, Human
ugaacucccaccacguaagggcaaacuc

SEQ ID NO: 1250624 - RNA, 24 nt, Human
ugaauauacaugcugcaauaacau

SEQ ID NO: 1250625 - RNA, 20 nt, Human
uggcagccuauuccaaacca

SEQ ID NO: 1250626 - RNA, 18 nt, Human
ugggcaaagagugggucu

SEQ ID NO: 1250627 - RNA, 21 nt, Human
uugagcuaaggaagagcucac

SEQ ID NO: 1250628 - RNA, 22 nt, Human
uuggccuuuaaacaacucuaaa

SEQ ID NO: 1250629 - RNA, 20 nt, Human
uuuaaaaauuucuugagcag

SEQ ID NO: 1250630 - RNA, 19 nt, Human
gaacccaggacgaagccgg

SEQ ID NO: 1250631 - RNA, 20 nt, Human
uccagaacccaggacgaagc

SEQ ID NO: 1250632 - RNA, 18 nt, Human
cagagacaugaacagcac

SEQ ID NO: 1250633 - RNA, 22 nt, Human
caugaacagcaccaaagaccca

SEQ ID NO: 1250634 - RNA, 19 nt, Human
ccuuauggggagcugggaa

SEQ ID NO: 1250635 - RNA, 18 nt, Human
gaacagcaccaaagaccc

SEQ ID NO: 1250636 - RNA, 21 nt, Human
uauggggagcugggaagaagg

SEQ ID NO: 1250637 - RNA, 21 nt, Human
uuacuacugugcgcuuaaguu

SEQ ID NO: 1250638 - RNA, 23 nt, Human
ugagucccuuauaucaaagcccu

SEQ ID NO: 1250639 - RNA, 23 nt, Human
uggucugcauucagcuggugagu

SEQ ID NO: 1250640 - RNA, 25 nt, Human
uggugagucccuuauaucaaagccc

SEQ ID NO: 1250641 - RNA, 28 nt, Human
ccacauucugagcucuccauuccaauuu

SEQ ID NO: 1250642 - RNA, 21 nt, Human
ggguccccuuucccucugccc

SEQ ID NO: 1250643 - RNA, 21 nt, Human
ugagcucuccauuccaauuuu

SEQ ID NO: 1250644 - RNA, 21 nt, Human
uucucuggggccacauucuga

SEQ ID NO: 1250645 - RNA, 19 nt, Human
cagccggggcggugggcgg

SEQ ID NO: 1250646 - RNA, 21 nt, Human
cccgugcuaaccccccagagc

SEQ ID NO: 1250647 - RNA, 21 nt, Human
ccgacagccggggcggugggc

SEQ ID NO: 1250648 - RNA, 18 nt, Human
ccgccgccgccgcguucg

SEQ ID NO: 1250649 - RNA, 18 nt, Human
ccgccgccgccgcguucg

SEQ ID NO: 1250650 - RNA, 20 nt, Human
cgacccccgugcuaaccccc

SEQ ID NO: 1250651 - RNA, 19 nt, Human
cugggcggaaggagagggg

SEQ ID NO: 1250652 - RNA, 21 nt, Human
cugggcggaaggagagggggc

SEQ ID NO: 1250653 - RNA, 20 nt, Human
cuucuggccgccgccgccgc

SEQ ID NO: 1250654 - RNA, 18 nt, Human
gcggaaggagagggggcg

SEQ ID NO: 1250655 - RNA, 18 nt, Human
gcggugggcgggcagggg

SEQ ID NO: 1250656 - RNA, 24 nt, Human
ggagagggggcgcaggccucuggc

SEQ ID NO: 1250657 - RNA, 19 nt, Human
ggcauggaggugcugggcg

SEQ ID NO: 1250658 - RNA, 19 nt, Human
ggccgccgccgccgcguuc

SEQ ID NO: 1250659 - RNA, 19 nt, Human
ggcggugggcgggcagggg

SEQ ID NO: 1250660 - RNA, 20 nt, Human
ucgugcaccgagggcaugga

SEQ ID NO: 1250661 - RNA, 18 nt, Human
ugcaccgagggcauggag

SEQ ID NO: 1250662 - RNA, 22 nt, Human
agaggaagggaggccauguagc

SEQ ID NO: 1250663 - RNA, 20 nt, Human
cauagccgggucgccuccgc

SEQ ID NO: 1250664 - RNA, 18 nt, Human
ccuggcggagaggaaggg

SEQ ID NO: 1250665 - RNA, 23 nt, Human
cuccgcgcuaaccccguugaacc

SEQ ID NO: 1250666 - RNA, 21 nt, Human
gaagggaggccauguagcugc

SEQ ID NO: 1250667 - RNA, 20 nt, Human
uuccuggcggagaggaaggg

SEQ ID NO: 1250668 - RNA, 19 nt, Human
augugcaugcauguacgug

SEQ ID NO: 1250669 - RNA, 18 nt, Human
auugugggcucacgugaa

SEQ ID NO: 1250670 - RNA, 27 nt, Human
caccuggcauugauuuagcacacuugu

SEQ ID NO: 1250671 - RNA, 20 nt, Human
gagaggaagauaacguccuc

SEQ ID NO: 1250672 - RNA, 20 nt, Human
gcuacagcccaccuggcauu

SEQ ID NO: 1250673 - RNA, 21 nt, Human
gggcuauugugggcucacgug

SEQ ID NO: 1250674 - RNA, 25 nt, Human
uucguuuuccagucguaucucugag

SEQ ID NO: 1250675 - RNA, 20 nt, Human
uuguggauuuucuggcuggg

SEQ ID NO: 1250676 - RNA, 25 nt, Human
uuugcuacaacugcuacagcccacc

SEQ ID NO: 1250677 - RNA, 23 nt, Human
aggggcgggcgggggucuggggg

SEQ ID NO: 1250678 - RNA, 21 nt, Human
ggcgggcgggggucugggggg

SEQ ID NO: 1250679 - RNA, 20 nt, Human
gggcgggggucugggggggu

SEQ ID NO: 1250680 - RNA, 21 nt, Human
cuggucuguucaccuucucag

SEQ ID NO: 1250681 - RNA, 21 nt, Human
uaaauugcacagcacgccggc

SEQ ID NO: 1250682 - RNA, 18 nt, Human
ucuguucaccuucucagg

SEQ ID NO: 1250683 - RNA, 27 nt, Human
uggucuguucaccuucucaggacucca

SEQ ID NO: 1250684 - RNA, 18 nt, Human
agguguggcgucuugucc

SEQ ID NO: 1250685 - RNA, 23 nt, Human
caccguccagguccacguuaccu

SEQ ID NO: 1250686 - RNA, 22 nt, Human
cgucuugucccccagcaucacu

SEQ ID NO: 1250687 - RNA, 24 nt, Human
cgucuugucccccagcaucacuca

SEQ ID NO: 1250688 - RNA, 22 nt, Human
aaggcagcuuccauacuucagu

SEQ ID NO: 1250689 - RNA, 23 nt, Human
caucuggaaaccaugacaaccgu

SEQ ID NO: 1250690 - RNA, 21 nt, Human
cccuuuguuguaacuguugau

SEQ ID NO: 1250691 - RNA, 18 nt, Human
gggggcugaucugggauc

SEQ ID NO: 1250692 - RNA, 20 nt, Human
guggcccuuuguuguaacug

SEQ ID NO: 1250693 - RNA, 19 nt, Human
ugcuuuuaguucagcuugg

SEQ ID NO: 1250694 - RNA, 22 nt, Human
ugggcacuguuucuaugaaggg

SEQ ID NO: 1250695 - RNA, 24 nt, Human
ugggggcugaucugggaucaagag

SEQ ID NO: 1250696 - RNA, 21 nt, Human
uuuucccaacacaucauagcu

SEQ ID NO: 1250697 - RNA, 24 nt, Human
uaugcaaacacagugugauuccua

SEQ ID NO: 1250698 - RNA, 22 nt, Human
aaaaaaauuaaccgggcagcug

SEQ ID NO: 1250699 - RNA, 24 nt, Human
aaacaaaacaaggacccagccuag

SEQ ID NO: 1250700 - RNA, 24 nt, Human
aaacacccugucuccaaaaaaaaa

SEQ ID NO: 1250701 - RNA, 19 nt, Human
aaagcuccuccccauucuc

SEQ ID NO: 1250702 - RNA, 19 nt, Human
aacaaggugaaaccucauc

SEQ ID NO: 1250703 - RNA, 20 nt, Human
aacaaggugaaaccucaucu

SEQ ID NO: 1250704 - RNA, 21 nt, Human
aacaaggugaaaccucaucuc

SEQ ID NO: 1250705 - RNA, 18 nt, Human
aacauagugagaccuucu

SEQ ID NO: 1250706 - RNA, 18 nt, Human
aaccaggcggcaggguca

SEQ ID NO: 1250707 - RNA, 18 nt, Human
aaccagggccaagcuugg

SEQ ID NO: 1250708 - RNA, 25 nt, Human
aagaaagcaaaaccuaucccacgac

SEQ ID NO: 1250709 - RNA, 23 nt, Human
aagagacacaggagacagaguca

SEQ ID NO: 1250710 - RNA, 22 nt, Human
aagagacugcuaaccccagucc

SEQ ID NO: 1250711 - RNA, 22 nt, Human
aagcagaaaccaaacucagaaa

SEQ ID NO: 1250712 - RNA, 20 nt, Human
aagccugggcaacauaguga

SEQ ID NO: 1250713 - RNA, 21 nt, Human
aaucaggcugagagggcgggg

SEQ ID NO: 1250714 - RNA, 24 nt, Human
aaucgcuugaacucgggaggugga

SEQ ID NO: 1250715 - RNA, 18 nt, Human
acaaaacaaggacccagc

SEQ ID NO: 1250716 - RNA, 19 nt, Human
acaagcuccccaccauaag

SEQ ID NO: 1250717 - RNA, 19 nt, Human
acacagugagacccugucu

SEQ ID NO: 1250718 - RNA, 20 nt, Human
acacagugagacccugucuc

SEQ ID NO: 1250719 - RNA, 21 nt, Human
acacggaaccagggccaagcu

SEQ ID NO: 1250720 - RNA, 20 nt, Human
accaaacucagaaaggcaga

SEQ ID NO: 1250721 - RNA, 19 nt, Human
accaagaugggagcggggg

SEQ ID NO: 1250722 - RNA, 20 nt, Human
accagccuggccaacaaggu

SEQ ID NO: 1250723 - RNA, 23 nt, Human
acccugucucuaaaaacaaaaca

SEQ ID NO: 1250724 - RNA, 20 nt, Human
accgggcagcuggacguggu

SEQ ID NO: 1250725 - RNA, 24 nt, Human
accucaucucuacuaaaaauauaa

SEQ ID NO: 1250726 - RNA, 18 nt, Human
acgccacuguacuccagc

SEQ ID NO: 1250727 - RNA, 24 nt, Human
acggaaccagggccaagcuugggc

SEQ ID NO: 1250728 - RNA, 24 nt, Human
acuccagccugggagacacaguga

SEQ ID NO: 1250729 - RNA, 23 nt, Human
acucuugaaggcugagcugggag

SEQ ID NO: 1250730 - RNA, 18 nt, Human
acugcacucuagccuggg

SEQ ID NO: 1250731 - RNA, 24 nt, Human
acugcacucuagccugggugacag

SEQ ID NO: 1250732 - RNA, 18 nt, Human
acuguacuccagccuggg

SEQ ID NO: 1250733 - RNA, 20 nt, Human
acuguacuccagccugggag

SEQ ID NO: 1250734 - RNA, 18 nt, Human
agaaggaaggaaaccaug

SEQ ID NO: 1250735 - RNA, 22 nt, Human
agaaucgcuugaacucgggagg

SEQ ID NO: 1250736 - RNA, 24 nt, Human
agacacagugagacccugucucua

SEQ ID NO: 1250737 - RNA, 19 nt, Human
agaccagccuggccaacaa

SEQ ID NO: 1250738 - RNA, 21 nt, Human
agacugcuaaccccagucccu

SEQ ID NO: 1250739 - RNA, 23 nt, Human
agaugggagcggggguggggggu

SEQ ID NO: 1250740 - RNA, 24 nt, Human
agaugggagcggggguggggggug

SEQ ID NO: 1250741 - RNA, 24 nt, Human
agcacuuugggacgccacaguggg

SEQ ID NO: 1250742 - RNA, 18 nt, Human
agccaagucagaaaucca

SEQ ID NO: 1250743 - RNA, 23 nt, Human
agccaggcgugguggugcaugcc

SEQ ID NO: 1250744 - RNA, 23 nt, Human
agccuggccaacaaggugaaacc

SEQ ID NO: 1250745 - RNA, 23 nt, Human
agccugggcaacauagugagacc

SEQ ID NO: 1250746 - RNA, 24 nt, Human
agccugggcaacauagugagaccu

SEQ ID NO: 1250747 - RNA, 25 nt, Human
agccugggcaacauagugagaccuu

SEQ ID NO: 1250748 - RNA, 23 nt, Human
agcgagcaucaucuuggccugga

SEQ ID NO: 1250749 - RNA, 21 nt, Human
agcuggacgugguggugcagg

SEQ ID NO: 1250750 - RNA, 23 nt, Human
agcuggacgugguggugcagguc

SEQ ID NO: 1250751 - RNA, 18 nt, Human
agcugggaggaucacuug

SEQ ID NO: 1250752 - RNA, 23 nt, Human
agcugggaggaucacuugagccc

SEQ ID NO: 1250753 - RNA, 20 nt, Human
aggacugggcugaauugggc

SEQ ID NO: 1250754 - RNA, 22 nt, Human
aggauggagacaguaaaagaaa

SEQ ID NO: 1250755 - RNA, 24 nt, Human
aggcaggagaaucgcuugaacucg

SEQ ID NO: 1250756 - RNA, 27 nt, Human
aggcaggaggcagaugggagaacaaaa

SEQ ID NO: 1250757 - RNA, 24 nt, Human
aggcgcaguggcccacgccuguaa

SEQ ID NO: 1250758 - RNA, 21 nt, Human
aggcggguggaucaccugagg

SEQ ID NO: 1250759 - RNA, 26 nt, Human
aggcggguggaucaccugaggccagg

SEQ ID NO: 1250760 - RNA, 24 nt, Human
aggcgugguggugcaugccuguaa

SEQ ID NO: 1250761 - RNA, 22 nt, Human
aggcucagaaccaggcggcagg

SEQ ID NO: 1250762 - RNA, 21 nt, Human
aggcugagcugggaggaucac

SEQ ID NO: 1250763 - RNA, 24 nt, Human
aggcugagcugggaggaucacuug

SEQ ID NO: 1250764 - RNA, 20 nt, Human
aggcugaggcaggagaaucg

SEQ ID NO: 1250765 - RNA, 24 nt, Human
aggcugaggcaggagaaucgcuug

SEQ ID NO: 1250766 - RNA, 22 nt, Human
aggcuggagccaagccccaggg

SEQ ID NO: 1250767 - RNA, 24 nt, Human
aggcuggagccaagccccagggga

SEQ ID NO: 1250768 - RNA, 22 nt, Human
aggggaccggauuagcccccau

SEQ ID NO: 1250769 - RNA, 22 nt, Human
aggucgagguugcagugagcag

SEQ ID NO: 1250770 - RNA, 19 nt, Human
aggugaggcggguggauca

SEQ ID NO: 1250771 - RNA, 24 nt, Human
agguggagguggcagugagccgag

SEQ ID NO: 1250772 - RNA, 19 nt, Human
aguaaaagaaagcaaaacc

SEQ ID NO: 1250773 - RNA, 24 nt, Human
aguccgccauaaaaagcuccuccc

SEQ ID NO: 1250774 - RNA, 24 nt, Human
aguggcccacgccuguaaucccag

SEQ ID NO: 1250775 - RNA, 18 nt, Human
auaaagcauuauccaagg

SEQ ID NO: 1250776 - RNA, 24 nt, Human
aucacgccacuguacuccagccug

SEQ ID NO: 1250777 - RNA, 24 nt, Human
aucccgccacugcacucuagccug

SEQ ID NO: 1250778 - RNA, 21 nt, Human
augggagcggggguggggggu

SEQ ID NO: 1250779 - RNA, 24 nt, Human
cacaccuguaaccccagcacuuug

SEQ ID NO: 1250780 - RNA, 24 nt, Human
cacagugagacccugucucuaaaa

SEQ ID NO: 1250781 - RNA, 18 nt, Human
caccauaagcagaaacca

SEQ ID NO: 1250782 - RNA, 18 nt, Human
caccauaagcagaaacca

SEQ ID NO: 1250783 - RNA, 21 nt, Human
caccauaagcagaaaccaaac

SEQ ID NO: 1250784 - RNA, 23 nt, Human
caccuguaaccccagcacuuugg

SEQ ID NO: 1250785 - RNA, 24 nt, Human
caccuguaaccccagcacuuuggg

SEQ ID NO: 1250786 - RNA, 24 nt, Human
caccuuggccuacagaguugagag

SEQ ID NO: 1250787 - RNA, 24 nt, Human
caccuugguccagggaguugggag

SEQ ID NO: 1250788 - RNA, 23 nt, Human
cacgccuguaaucccagcauuuu

SEQ ID NO: 1250789 - RNA, 18 nt, Human
cacucuagccugggugac

SEQ ID NO: 1250790 - RNA, 20 nt, Human
cacucuagccugggugacag

SEQ ID NO: 1250791 - RNA, 19 nt, Human
cacugcacucuagccuggg

SEQ ID NO: 1250792 - RNA, 21 nt, Human
cacugcacucuagccugggug

SEQ ID NO: 1250793 - RNA, 22 nt, Human
cacugcacucuagccuggguga

SEQ ID NO: 1250794 - RNA, 23 nt, Human
cacugcacucuagccugggugac

SEQ ID NO: 1250795 - RNA, 24 nt, Human
cacugcacucuagccugggugaca

SEQ ID NO: 1250796 - RNA, 24 nt, Human
cacugcacucuagccugggugaca

SEQ ID NO: 1250797 - RNA, 18 nt, Human
cacuguacuccagccugg

SEQ ID NO: 1250798 - RNA, 19 nt, Human
cacuguacuccagccuggg

SEQ ID NO: 1250799 - RNA, 22 nt, Human
cacuguacuccagccugggaga

SEQ ID NO: 1250800 - RNA, 24 nt, Human
cacuguacuccagccugggagaca

SEQ ID NO: 1250801 - RNA, 20 nt, Human
cagaacaaggacccagcugg

SEQ ID NO: 1250802 - RNA, 25 nt, Human
cagaaggaaggaaaccauggggagu

SEQ ID NO: 1250803 - RNA, 18 nt, Human
cagcaaggccuaccccca

SEQ ID NO: 1250804 - RNA, 21 nt, Human
cagcacuuugggacgccacag

SEQ ID NO: 1250805 - RNA, 24 nt, Human
cagcacuuugggacgccacagugg

SEQ ID NO: 1250806 - RNA, 23 nt, Human
cagcauuuuaggaggugaggcgg

SEQ ID NO: 1250807 - RNA, 18 nt, Human
cagcuggacgugguggug

SEQ ID NO: 1250808 - RNA, 25 nt, Human
caggaaaugccaccuugguccaggg

SEQ ID NO: 1250809 - RNA, 21 nt, Human
caggagacagagucagguccc

SEQ ID NO: 1250810 - RNA, 25 nt, Human
caggaucagggagguguaaguagga

SEQ ID NO: 1250811 - RNA, 21 nt, Human
caggucccagaggcagcaagg

SEQ ID NO: 1250812 - RNA, 21 nt, Human
ccaaaaaaaaaaaaaaaaaaa

SEQ ID NO: 1250813 - RNA, 22 nt, Human
ccaaaaaaaaaaaaaaaaaaaa

SEQ ID NO: 1250814 - RNA, 23 nt, Human
ccaaaaaaaaaaaaaaaaaaaaa

SEQ ID NO: 1250815 - RNA, 24 nt, Human
ccaccauaagcagaaaccaaacuc

SEQ ID NO: 1250816 - RNA, 19 nt, Human
ccacgccuguaaucccagc

SEQ ID NO: 1250817 - RNA, 20 nt, Human
ccacugcacucuagccuggg

SEQ ID NO: 1250818 - RNA, 20 nt, Human
ccacugcacucuagccuggg

SEQ ID NO: 1250819 - RNA, 21 nt, Human
ccacugcacucuagccugggu

SEQ ID NO: 1250820 - RNA, 21 nt, Human
ccacugcacucuagccugggu

SEQ ID NO: 1250821 - RNA, 24 nt, Human
ccacugcacucuagccugggugac

SEQ ID NO: 1250822 - RNA, 19 nt, Human
ccacuguacuccagccugg

SEQ ID NO: 1250823 - RNA, 20 nt, Human
ccacuguacuccagccuggg

SEQ ID NO: 1250824 - RNA, 22 nt, Human
ccacuguacuccagccugggag

SEQ ID NO: 1250825 - RNA, 24 nt, Human
ccacuguacuccagccugggagac

SEQ ID NO: 1250826 - RNA, 22 nt, Human
ccaggaggucgagguugcagug

SEQ ID NO: 1250827 - RNA, 20 nt, Human
ccaggaguucgagaccagcc

SEQ ID NO: 1250828 - RNA, 19 nt, Human
ccauaaaaagcuccucccc

SEQ ID NO: 1250829 - RNA, 21 nt, Human
cccacgccuguaaucccagca

SEQ ID NO: 1250830 - RNA, 21 nt, Human
cccacgccuguaaucccagca

SEQ ID NO: 1250831 - RNA, 21 nt, Human
cccagugugugguggcucaca

SEQ ID NO: 1250832 - RNA, 23 nt, Human
ccccaccauaagcagaaaccaaa

SEQ ID NO: 1250833 - RNA, 19 nt, Human
ccccagaccccaggaucag

SEQ ID NO: 1250834 - RNA, 20 nt, Human
ccccagcacuuugggacgcc

SEQ ID NO: 1250835 - RNA, 19 nt, Human
ccccagucccugagccaag

SEQ ID NO: 1250836 - RNA, 23 nt, Human
ccccauucuccaucuugggggcu

SEQ ID NO: 1250837 - RNA, 19 nt, Human
ccuacccccaaauugcagu

SEQ ID NO: 1250838 - RNA, 24 nt, Human
ccuccccauucuccaucuuggggg

SEQ ID NO: 1250839 - RNA, 22 nt, Human
ccugaggccaggaguucgagac

SEQ ID NO: 1250840 - RNA, 24 nt, Human
ccuggccaacaaggugaaaccuca

SEQ ID NO: 1250841 - RNA, 19 nt, Human
ccuguaauccuagcuacuc

SEQ ID NO: 1250842 - RNA, 18 nt, Human
cgacagaaaaaaauuaac

SEQ ID NO: 1250843 - RNA, 24 nt, Human
cgagaccagccuggccaacaaggu

SEQ ID NO: 1250844 - RNA, 24 nt, Human
cgagaucacgccacuguacuccag

SEQ ID NO: 1250845 - RNA, 21 nt, Human
cgccacagugggaggauugcu

SEQ ID NO: 1250846 - RNA, 24 nt, Human
cgggagguggagguggcagugagc

SEQ ID NO: 1250847 - RNA, 19 nt, Human
cgggcagcuggacguggug

SEQ ID NO: 1250848 - RNA, 24 nt, Human
cggguggaucaccugaggccagga

SEQ ID NO: 1250849 - RNA, 21 nt, Human
cuaggcgcaguggcccacgcc

SEQ ID NO: 1250850 - RNA, 24 nt, Human
cucacaccuguaaccccagcacuu

SEQ ID NO: 1250851 - RNA, 27 nt, Human
cucacaccuguaaccccagcacuuugg

SEQ ID NO: 1250852 - RNA, 23 nt, Human
cuggccaacaaggugaaaccuca

SEQ ID NO: 1250853 - RNA, 23 nt, Human
cuggcuaggcgcaguggcccacg

SEQ ID NO: 1250854 - RNA, 18 nt, Human
cuucaaaccgacagaaaa

SEQ ID NO: 1250855 - RNA, 24 nt, Human
cuucggguugagaugagggacagg

SEQ ID NO: 1250856 - RNA, 21 nt, Human
gaaccggcagcugacgcucgg

SEQ ID NO: 1250857 - RNA, 22 nt, Human
gaacucgggagguggagguggc

SEQ ID NO: 1250858 - RNA, 22 nt, Human
gaaggcugagcugggaggauca

SEQ ID NO: 1250859 - RNA, 21 nt, Human
gacacagugagacccugucuc

SEQ ID NO: 1250860 - RNA, 19 nt, Human
gacccugucucuaaaaaca

SEQ ID NO: 1250861 - RNA, 23 nt, Human
gacuugggaaacagaaaucaggc

SEQ ID NO: 1250862 - RNA, 19 nt, Human
gagaccuucuccccucuuc

SEQ ID NO: 1250863 - RNA, 20 nt, Human
gaggcaggaggcagauggga

SEQ ID NO: 1250864 - RNA, 21 nt, Human
gaggucgagguugcagugagc

SEQ ID NO: 1250865 - RNA, 22 nt, Human
gagguggcagugagccgagauc

SEQ ID NO: 1250866 - RNA, 18 nt, Human
gaucaccugaggccagga

SEQ ID NO: 1250867 - RNA, 24 nt, Human
gaucaccugaggccaggaguucga

SEQ ID NO: 1250868 - RNA, 24 nt, Human
gaucacuugagcccaggaggucga

SEQ ID NO: 1250869 - RNA, 22 nt, Human
gauuagcccccaugggugacac

SEQ ID NO: 1250870 - RNA, 18 nt, Human
gauugcuugagcccggga

SEQ ID NO: 1250871 - RNA, 22 nt, Human
gauugcuugagcccgggaguuu

SEQ ID NO: 1250872 - RNA, 24 nt, Human
gauugcuugagcccgggaguuuga

SEQ ID NO: 1250873 - RNA, 18 nt, Human
gcagaaaccaaacucaga

SEQ ID NO: 1250874 - RNA, 25 nt, Human
gcaggaggcagaugggaggucgacc

SEQ ID NO: 1250875 - RNA, 21 nt, Human
gccaccuuggccuacagaguu

SEQ ID NO: 1250876 - RNA, 21 nt, Human
gccaccuugguccagggaguu

SEQ ID NO: 1250877 - RNA, 24 nt, Human
gccacugcacucuagccuggguga

SEQ ID NO: 1250878 - RNA, 22 nt, Human
gccacuguacuccagccuggga

SEQ ID NO: 1250879 - RNA, 20 nt, Human
gcgcaguggcccacgccugu

SEQ ID NO: 1250880 - RNA, 22 nt, Human
gcucaaaggggaggaggcagga

SEQ ID NO: 1250881 - RNA, 24 nt, Human
ggaagaaaacacaggugaaaagga

SEQ ID NO: 1250882 - RNA, 18 nt, Human
ggaagcugugccacaucc

SEQ ID NO: 1250883 - RNA, 23 nt, Human
ggaccagagcugggaucggaaga

SEQ ID NO: 1250884 - RNA, 27 nt, Human
ggagacaguaaaagaaagccgguaccc

SEQ ID NO: 1250885 - RNA, 18 nt, Human
ggagagucaagaggagac

SEQ ID NO: 1250886 - RNA, 18 nt, Human
ggagguggcagugagccg

SEQ ID NO: 1250887 - RNA, 24 nt, Human
ggagguggcagugagccgagauca

SEQ ID NO: 1250888 - RNA, 20 nt, Human
ggcucagaaccaggcggcag

SEQ ID NO: 1250889 - RNA, 19 nt, Human
gggaccggauuagccccca

SEQ ID NO: 1250890 - RNA, 20 nt, Human
ggggguggggggugauaaga

SEQ ID NO: 1250891 - RNA, 24 nt, Human
gguggcucacaccuguaaccccag

SEQ ID NO: 1250892 - RNA, 18 nt, Human
gguggugcaggucugcag

SEQ ID NO: 1250893 - RNA, 20 nt, Human
gguugagaugagggacaggg

SEQ ID NO: 1250894 - RNA, 23 nt, Human
guaaucccgccacugcacucuag

SEQ ID NO: 1250895 - RNA, 21 nt, Human
gucccagaggcagcaaggccu

SEQ ID NO: 1250896 - RNA, 27 nt, Human
gugaggcggguggaucaccugaggcca

SEQ ID NO: 1250897 - RNA, 22 nt, Human
guggaucaccugaggccaggag

SEQ ID NO: 1250898 - RNA, 21 nt, Human
gugggaggauugcuugagccc

SEQ ID NO: 1250899 - RNA, 18 nt, Human
guggugcaggucugcagu

SEQ ID NO: 1250900 - RNA, 20 nt, Human
guggugcaugccuguaaucc

SEQ ID NO: 1250901 - RNA, 18 nt, Human
gugugguggcucacaccu

SEQ ID NO: 1250902 - RNA, 24 nt, Human
gugugugguggcucacaccuguaa

SEQ ID NO: 1250903 - RNA, 23 nt, Human
uaaaagaaagcaaaaccuauccc

SEQ ID NO: 1250904 - RNA, 23 nt, Human
uaaacacccugucuccaaaaaaa

SEQ ID NO: 1250905 - RNA, 18 nt, Human
uaagaguuuuaaucaguc

SEQ ID NO: 1250906 - RNA, 28 nt, Human
uaagcagaaaccaaacucaaccccgggg

SEQ ID NO: 1250907 - RNA, 22 nt, Human
uacuccagccugggagacacag

SEQ ID NO: 1250908 - RNA, 24 nt, Human
uacuccagccugggagacacagug

SEQ ID NO: 1250909 - RNA, 23 nt, Human
uagccaggcgugguggugcaugc

SEQ ID NO: 1250910 - RNA, 24 nt, Human
uagcuacucgggaggcugaggcag

SEQ ID NO: 1250911 - RNA, 19 nt, Human
uaggucuggagagucaaga

SEQ ID NO: 1250912 - RNA, 19 nt, Human
ucaccugaggccaggaguu

SEQ ID NO: 1250913 - RNA, 23 nt, Human
ucacgccacuguacuccagccug

SEQ ID NO: 1250914 - RNA, 25 nt, Human
ucauaucguucuuaucugcaaagug

SEQ ID NO: 1250915 - RNA, 19 nt, Human
uccagggaguugggaggaa

SEQ ID NO: 1250916 - RNA, 19 nt, Human
ucccagaggcagcaaggcc

SEQ ID NO: 1250917 - RNA, 23 nt, Human
uccccaccauaagcagaaaccaa

SEQ ID NO: 1250918 - RNA, 24 nt, Human
ucgcuugaacucgggagguggagg

SEQ ID NO: 1250919 - RNA, 24 nt, Human
ucgggaggcugaggcaggagaauc

SEQ ID NO: 1250920 - RNA, 18 nt, Human
ucuagccugggugacaga

SEQ ID NO: 1250921 - RNA, 20 nt, Human
ucuccaaaaaaaaaaaaaaa

SEQ ID NO: 1250922 - RNA, 18 nt, Human
ucucuaaaaacaaaacaa

SEQ ID NO: 1250923 - RNA, 21 nt, Human
ucucuacuaaaaauauaaaaa

SEQ ID NO: 1250924 - RNA, 22 nt, Human
ucugcagucccagcuacucuug

SEQ ID NO: 1250925 - RNA, 18 nt, Human
ucuugggggcucagaucu

SEQ ID NO: 1250926 - RNA, 19 nt, Human
ugaaaccucaucucuacua

SEQ ID NO: 1250927 - RNA, 19 nt, Human
ugaaagcaccaggacuggg

SEQ ID NO: 1250928 - RNA, 22 nt, Human
ugaaagcaccaggacugggcug

SEQ ID NO: 1250929 - RNA, 23 nt, Human
ugaaagcaccaggacugggcuga

SEQ ID NO: 1250930 - RNA, 20 nt, Human
ugaaggcaguucuggaagug

SEQ ID NO: 1250931 - RNA, 20 nt, Human
ugaagggugucacuuuaggu

SEQ ID NO: 1250932 - RNA, 23 nt, Human
ugacagauaaacacccugucucc

SEQ ID NO: 1250933 - RNA, 18 nt, Human
ugagccaagucagaaauc

SEQ ID NO: 1250934 - RNA, 22 nt, Human
ugagccgagaucacgccacugu

SEQ ID NO: 1250935 - RNA, 24 nt, Human
ugagcugggaggaucacuugagcc

SEQ ID NO: 1250936 - RNA, 20 nt, Human
ugaggcaggagaaucgcuug

SEQ ID NO: 1250937 - RNA, 23 nt, Human
ugaggcaggagaaucgcuugaac

SEQ ID NO: 1250938 - RNA, 24 nt, Human
ugaggcaggagaaucgcuugaacu

SEQ ID NO: 1250939 - RNA, 25 nt, Human
ugaggcaggagaaucgcuugaacuc

SEQ ID NO: 1250940 - RNA, 19 nt, Human
ugaggcggguggaucaccu

SEQ ID NO: 1250941 - RNA, 20 nt, Human
ugaggcggguggaucaccug

SEQ ID NO: 1250942 - RNA, 22 nt, Human
ugaggcggguggaucaccugag

SEQ ID NO: 1250943 - RNA, 23 nt, Human
ugaggcggguggaucaccugagg

SEQ ID NO: 1250944 - RNA, 22 nt, Human
ugcaggaaaugccaccuugguc

SEQ ID NO: 1250945 - RNA, 18 nt, Human
ugcagugagcaguaaucc

SEQ ID NO: 1250946 - RNA, 24 nt, Human
ugccuguaauccuagcuacucggg

SEQ ID NO: 1250947 - RNA, 24 nt, Human
uggaucaccugaggccaggaguuc

SEQ ID NO: 1250948 - RNA, 27 nt, Human
uggaucaccugaggccaggaguucgag

SEQ ID NO: 1250949 - RNA, 18 nt, Human
uggcagugagccgagauc

SEQ ID NO: 1250950 - RNA, 20 nt, Human
uggcagugagccgagaucac

SEQ ID NO: 1250951 - RNA, 21 nt, Human
uggcccacgccuguaauccca

SEQ ID NO: 1250952 - RNA, 24 nt, Human
uggcccacgccuguaaucccagca

SEQ ID NO: 1250953 - RNA, 23 nt, Human
uggcuaggcgcaguggcccacgg

SEQ ID NO: 1250954 - RNA, 21 nt, Human
uggcucacaccuguaacccca

SEQ ID NO: 1250955 - RNA, 23 nt, Human
uggcucacaccuguaaccccagc

SEQ ID NO: 1250956 - RNA, 24 nt, Human
uggcucacaccuguaaccccagca

SEQ ID NO: 1250957 - RNA, 23 nt, Human
ugggagaacaaaaaguagaacca

SEQ ID NO: 1250958 - RNA, 20 nt, Human
ugggagcgggggugggggga

SEQ ID NO: 1250959 - RNA, 24 nt, Human
ugggaggaagauccccugccuugg

SEQ ID NO: 1250960 - RNA, 18 nt, Human
ugggcagcagaacaagga

SEQ ID NO: 1250961 - RNA, 19 nt, Human
uggugcaugccuguaaucc

SEQ ID NO: 1250962 - RNA, 21 nt, Human
uggugcaugccuguaauccua

SEQ ID NO: 1250963 - RNA, 22 nt, Human
ugguggugcaugccuguaaucc

SEQ ID NO: 1250964 - RNA, 25 nt, Human
uugaaggcugagcugggaggaucac

SEQ ID NO: 1250965 - RNA, 21 nt, Human
uugcuugagcccgggaguuug

SEQ ID NO: 1250966 - RNA, 21 nt, Human
uugggggcucagaucuuggcu

SEQ ID NO: 1250967 - RNA, 20 nt, Human
aaaguuacccuuucuccaga

SEQ ID NO: 1250968 - RNA, 20 nt, Human
aaccaaaguuacccuuucuc

SEQ ID NO: 1250969 - RNA, 24 nt, Human
acacacaaaugcagucaccagcca

SEQ ID NO: 1250970 - RNA, 20 nt, Human
acaggccuuuccccccguuc

SEQ ID NO: 1250971 - RNA, 24 nt, Human
acaggcuccaagacacgucaaaac

SEQ ID NO: 1250972 - RNA, 19 nt, Human
acauggagcgucucaguuu

SEQ ID NO: 1250973 - RNA, 21 nt, Human
accaaaguuacccuuucucca

SEQ ID NO: 1250974 - RNA, 22 nt, Human
agaugcugaagacuccucggcu

SEQ ID NO: 1250975 - RNA, 21 nt, Human
agccaugcacggaaacucaca

SEQ ID NO: 1250976 - RNA, 19 nt, Human
aggcaggcugggucugggg

SEQ ID NO: 1250977 - RNA, 21 nt, Human
aggcaggcugggucugggguc

SEQ ID NO: 1250978 - RNA, 28 nt, Human
aggcaggcugggucuggggucggacccc

SEQ ID NO: 1250979 - RNA, 21 nt, Human
caaacgugcaaaccaaaguua

SEQ ID NO: 1250980 - RNA, 22 nt, Human
caaccucacaaacgugcaaacc

SEQ ID NO: 1250981 - RNA, 23 nt, Human
caaccucacaaacgugcaaacca

SEQ ID NO: 1250982 - RNA, 21 nt, Human
cacauucccaggcucguugaa

SEQ ID NO: 1250983 - RNA, 19 nt, Human
cacggaaacucacauugac

SEQ ID NO: 1250984 - RNA, 22 nt, Human
cagagccccagagcaggcccgu

SEQ ID NO: 1250985 - RNA, 18 nt, Human
cagcuccuggaucugcuc

SEQ ID NO: 1250986 - RNA, 22 nt, Human
caggcuccaagacacgucaaaa

SEQ ID NO: 1250987 - RNA, 18 nt, Human
caggguucugggcagccc

SEQ ID NO: 1250988 - RNA, 22 nt, Human
caggguucugggcagccccgcc

SEQ ID NO: 1250989 - RNA, 18 nt, Human
caguuuuucccugugagg

SEQ ID NO: 1250990 - RNA, 22 nt, Human
caugcacagacacacaaaugca

SEQ ID NO: 1250991 - RNA, 19 nt, Human
cauggguucacgggacccu

SEQ ID NO: 1250992 - RNA, 24 nt, Human
cccacagcuguuggacgggcaguu

SEQ ID NO: 1250993 - RNA, 28 nt, Human
cccacaggcuccaagacacgucaaaacc

SEQ ID NO: 1250994 - RNA, 18 nt, Human
cccagagcaggcccguca

SEQ ID NO: 1250995 - RNA, 22 nt, Human
ccccagguccugggguccugcc

SEQ ID NO: 1250996 - RNA, 20 nt, Human
ccccuuuaggcaggcugggu

SEQ ID NO: 1250997 - RNA, 18 nt, Human
cccuucuccuuccucucu

SEQ ID NO: 1250998 - RNA, 19 nt, Human
cccuucuccuuccucucuu

SEQ ID NO: 1250999 - RNA, 20 nt, Human
ccgccuucccuugcuccugc

SEQ ID NO: 1251000 - RNA, 31 nt, Human
ccggcgcuggcagcuggccuggcuucucucu

SEQ ID NO: 1251001 - RNA, 23 nt, Human
ccggucacaagggugcucuuucc

SEQ ID NO: 1251002 - RNA, 21 nt, Human
ccucacaaacgugcaaaccaa

SEQ ID NO: 1251003 - RNA, 22 nt, Human
ccuggcuucucucggcuggaga

SEQ ID NO: 1251004 - RNA, 24 nt, Human
cgagagacacggauguacccaggc

SEQ ID NO: 1251005 - RNA, 23 nt, Human
cggaaacucacauugacagacgc

SEQ ID NO: 1251006 - RNA, 18 nt, Human
cggauccgagaacgcaug

SEQ ID NO: 1251007 - RNA, 23 nt, Human
cggcgggcuccccccacaggcuc

SEQ ID NO: 1251008 - RNA, 23 nt, Human
cgggccccaccucacugaugucg

SEQ ID NO: 1251009 - RNA, 23 nt, Human
cucacaaacgugcaaaccaaagu

SEQ ID NO: 1251010 - RNA, 24 nt, Human
cuccagaccucacauucccaggcu

SEQ ID NO: 1251011 - RNA, 19 nt, Human
gaacucgccuuucuugcuc

SEQ ID NO: 1251012 - RNA, 21 nt, Human
gacacacaaaugcagucacca

SEQ ID NO: 1251013 - RNA, 20 nt, Human
gcccauguggcccuuuccug

SEQ ID NO: 1251014 - RNA, 19 nt, Human
gccccuuuaggcaggcugg

SEQ ID NO: 1251015 - RNA, 23 nt, Human
gcccggugcugcuggccacgugu

SEQ ID NO: 1251016 - RNA, 22 nt, Human
gcccucgucuuugacucuccau

SEQ ID NO: 1251017 - RNA, 24 nt, Human
gcgggccccaccucacugaugucg

SEQ ID NO: 1251018 - RNA, 22 nt, Human
ggagcgggcaccguggggcugc

SEQ ID NO: 1251019 - RNA, 24 nt, Human
ggauguacccaggcccaugcacag

SEQ ID NO: 1251020 - RNA, 19 nt, Human
ggccugcgggccccaccuc

SEQ ID NO: 1251021 - RNA, 20 nt, Human
ggcugcgcgcugcggcgggc

SEQ ID NO: 1251022 - RNA, 22 nt, Human
gggcagggaggccuugagccug

SEQ ID NO: 1251023 - RNA, 21 nt, Human
gggcugcgcgcugcggcgggc

SEQ ID NO: 1251024 - RNA, 25 nt, Human
ggggagcgggcaccguggggcugcg

SEQ ID NO: 1251025 - RNA, 18 nt, Human
gguggagaggaaaagggc

SEQ ID NO: 1251026 - RNA, 20 nt, Human
gucucagaugccuggugcug

SEQ ID NO: 1251027 - RNA, 20 nt, Human
guuucaccaucucccuuccg

SEQ ID NO: 1251028 - RNA, 19 nt, Human
ucaguuuuucccugugagg

SEQ ID NO: 1251029 - RNA, 19 nt, Human
uccaugauacagcuccugg

SEQ ID NO: 1251030 - RNA, 18 nt, Human
uccccagguccugggguc

SEQ ID NO: 1251031 - RNA, 21 nt, Human
ucccuuccggucacaaggguu

SEQ ID NO: 1251032 - RNA, 19 nt, Human
uccgcggcgaggcgagaga

SEQ ID NO: 1251033 - RNA, 22 nt, Human
uccucggcuggucgcccgaggc

SEQ ID NO: 1251034 - RNA, 18 nt, Human
uccugggguccugccugg

SEQ ID NO: 1251035 - RNA, 21 nt, Human
uccugggguccugccuggugg

SEQ ID NO: 1251036 - RNA, 22 nt, Human
ucguuccaugauacagcuccug

SEQ ID NO: 1251037 - RNA, 19 nt, Human
ucuucgggcuccccugugu

SEQ ID NO: 1251038 - RNA, 24 nt, Human
ucuuuccggcuccaggcucugcaa

SEQ ID NO: 1251039 - RNA, 26 nt, Human
ugaacucgccuuucuugcuccccagg

SEQ ID NO: 1251040 - RNA, 24 nt, Human
ugaagggagcagggugcuucaggc

SEQ ID NO: 1251041 - RNA, 20 nt, Human
ugacagacgcucaaccucac

SEQ ID NO: 1251042 - RNA, 21 nt, Human
ugacagacgcucaaccucaca

SEQ ID NO: 1251043 - RNA, 21 nt, Human
ugagguggagaggaaaagggc

SEQ ID NO: 1251044 - RNA, 21 nt, Human
ugagguggagaggaaaagggc

SEQ ID NO: 1251045 - RNA, 19 nt, Human
ugcccacagcuguuggacg

SEQ ID NO: 1251046 - RNA, 23 nt, Human
ugcccggugcugcuggccacgug

SEQ ID NO: 1251047 - RNA, 23 nt, Human
ugccuugguuggcaggguucugg

SEQ ID NO: 1251048 - RNA, 23 nt, Human
ugcuggccacgugugcccccgug

SEQ ID NO: 1251049 - RNA, 18 nt, Human
uggagaugcugaagacuc

SEQ ID NO: 1251050 - RNA, 23 nt, Human
uggcccgccuucccuugcuccug

SEQ ID NO: 1251051 - RNA, 23 nt, Human
uggccuaggguggccugcgggcc

SEQ ID NO: 1251052 - RNA, 22 nt, Human
uggccugcgggccccaccucac

SEQ ID NO: 1251053 - RNA, 19 nt, Human
uggcucugaaggcagcccc

SEQ ID NO: 1251054 - RNA, 22 nt, Human
ugggaaaggcgcgggcggccac

SEQ ID NO: 1251055 - RNA, 20 nt, Human
uggggcugcgcgcugcggcg

SEQ ID NO: 1251056 - RNA, 22 nt, Human
aagaccacagccacauccuuga

SEQ ID NO: 1251057 - RNA, 25 nt, Human
aaguguugacgacuacugggaagcc

SEQ ID NO: 1251058 - RNA, 19 nt, Human
accacagccacauccuuga

SEQ ID NO: 1251059 - RNA, 19 nt, Human
acugugcucacugcucuuc

SEQ ID NO: 1251060 - RNA, 19 nt, Human
agcagccccagcuccuccu

SEQ ID NO: 1251061 - RNA, 23 nt, Human
auucugaagcucuuuccacauuc

SEQ ID NO: 1251062 - RNA, 21 nt, Human
caacugccggagcuaaaccga

SEQ ID NO: 1251063 - RNA, 23 nt, Human
cacugcucuucccacaauccuca

SEQ ID NO: 1251064 - RNA, 19 nt, Human
cagugugaauucugaagcu

SEQ ID NO: 1251065 - RNA, 22 nt, Human
ccacugagcgucuggacuacac

SEQ ID NO: 1251066 - RNA, 19 nt, Human
ccacugauagcagguuucu

SEQ ID NO: 1251067 - RNA, 21 nt, Human
cccacugauagcagguuucug

SEQ ID NO: 1251068 - RNA, 18 nt, Human
ccccacugauagcagguu

SEQ ID NO: 1251069 - RNA, 22 nt, Human
cccugagagucguccuucccuc

SEQ ID NO: 1251070 - RNA, 18 nt, Human
cccugggacccaacugcc

SEQ ID NO: 1251071 - RNA, 20 nt, Human
cccugggacccaacugccgg

SEQ ID NO: 1251072 - RNA, 19 nt, Human
ccugggacccaacugccgg

SEQ ID NO: 1251073 - RNA, 21 nt, Human
ccuuacaauuauaaggucucu

SEQ ID NO: 1251074 - RNA, 21 nt, Human
ccuugaaggucacugccuccu

SEQ ID NO: 1251075 - RNA, 25 nt, Human
cggggaacgaaucucguacccccga

SEQ ID NO: 1251076 - RNA, 20 nt, Human
cguccuucccucucccuggg

SEQ ID NO: 1251077 - RNA, 19 nt, Human
cucccguguggacccucug

SEQ ID NO: 1251078 - RNA, 22 nt, Human
cuccucggugaagaccacagcc

SEQ ID NO: 1251079 - RNA, 19 nt, Human
cucucucccguguggaccc

SEQ ID NO: 1251080 - RNA, 21 nt, Human
cugaaucccuuuccacacucc

SEQ ID NO: 1251081 - RNA, 24 nt, Human
cugagagucguccuucccucuccc

SEQ ID NO: 1251082 - RNA, 24 nt, Human
cugugcucacugcucuucccacaa

SEQ ID NO: 1251083 - RNA, 27 nt, Human
cuguggucgcuuuguuggucuugaagg

SEQ ID NO: 1251084 - RNA, 22 nt, Human
cuuacuaauguagcccuuccca

SEQ ID NO: 1251085 - RNA, 24 nt, Human
cuucccacaauccucacauuggaa

SEQ ID NO: 1251086 - RNA, 21 nt, Human
cuucugacauuuauacaguuc

SEQ ID NO: 1251087 - RNA, 23 nt, Human
cuugccuccugaauucccuucuc

SEQ ID NO: 1251088 - RNA, 18 nt, Human
gaaacguccagcagcccc

SEQ ID NO: 1251089 - RNA, 20 nt, Human
gaagcucuuuccacauuccu

SEQ ID NO: 1251090 - RNA, 19 nt, Human
gacccaacugccggagcua

SEQ ID NO: 1251091 - RNA, 18 nt, Human
gaugugaauggcccugug

SEQ ID NO: 1251092 - RNA, 23 nt, Human
gggaagcccuugaccacucuucc

SEQ ID NO: 1251093 - RNA, 21 nt, Human
gucucucucccguguggaccc

SEQ ID NO: 1251094 - RNA, 21 nt, Human
uacacuucccagaauucccug

SEQ ID NO: 1251095 - RNA, 19 nt, Human
uacuccugcagcauuacac

SEQ ID NO: 1251096 - RNA, 21 nt, Human
ucaguuuggaucuugccuccu

SEQ ID NO: 1251097 - RNA, 20 nt, Human
uccaaaacuuuucuucucuu

SEQ ID NO: 1251098 - RNA, 20 nt, Human
uccagugugaauucugaagc

SEQ ID NO: 1251099 - RNA, 20 nt, Human
ucccagaauucccugggacc

SEQ ID NO: 1251100 - RNA, 21 nt, Human
ucccuuuccacacuccucaca

SEQ ID NO: 1251101 - RNA, 18 nt, Human
uccucugggaaacgucca

SEQ ID NO: 1251102 - RNA, 24 nt, Human
uccugcgucaaccugggaggggac

SEQ ID NO: 1251103 - RNA, 20 nt, Human
ucugacauuuauacaguucu

SEQ ID NO: 1251104 - RNA, 20 nt, Human
ugcagcauuacacucaaagg

SEQ ID NO: 1251105 - RNA, 22 nt, Human
uggaacagacuccaacucaguu

SEQ ID NO: 1251106 - RNA, 24 nt, Human
uggguuagaugaguugaggcccau

SEQ ID NO: 1251107 - RNA, 23 nt, Human
uucaugugguccuguuucuggaa

SEQ ID NO: 1251108 - RNA, 20 nt, Human
uucuccacuguggucgcuuu

SEQ ID NO: 1251109 - RNA, 18 nt, Human
uucucugcuguggagucu

SEQ ID NO: 1251110 - RNA, 23 nt, Human
uucucugcuguggagucuuugau

SEQ ID NO: 1251111 - RNA, 20 nt, Human
uuggguugcugucuccauga

SEQ ID NO: 1251112 - RNA, 24 nt, Human
uuggucuugaaggcaugaacugug

SEQ ID NO: 1251113 - RNA, 21 nt, Human
uuucuccagugugaauucuga

SEQ ID NO: 1251114 - RNA, 19 nt, Human
agagaauucuauggccaca

SEQ ID NO: 1251115 - RNA, 20 nt, Human
agcaggcagcccugcgcccu

SEQ ID NO: 1251116 - RNA, 21 nt, Human
agggggcagcaggcagcccug

SEQ ID NO: 1251117 - RNA, 20 nt, Human
agggugcuuuccgcacccug

SEQ ID NO: 1251118 - RNA, 18 nt, Human
agucccagggugcuuucc

SEQ ID NO: 1251119 - RNA, 21 nt, Human
aucccuaaaugucaacagucc

SEQ ID NO: 1251120 - RNA, 22 nt, Human
caacagucccagggugcuuucc

SEQ ID NO: 1251121 - RNA, 22 nt, Human
cagcaggcagcccugcgcccuu

SEQ ID NO: 1251122 - RNA, 23 nt, Human
cccugcgcccuuacccuuuccug

SEQ ID NO: 1251123 - RNA, 20 nt, Human
cugcucugccgauuugaccu

SEQ ID NO: 1251124 - RNA, 19 nt, Human
cugggcagaggacacuggc

SEQ ID NO: 1251125 - RNA, 20 nt, Human
gaauucuauggccacauccc

SEQ ID NO: 1251126 - RNA, 22 nt, Human
gggcagcaggcagcccugcgcc

SEQ ID NO: 1251127 - RNA, 23 nt, Human
ucaacagucccagggugcuuucc

SEQ ID NO: 1251128 - RNA, 19 nt, Human
uccuccagagagaauucua

SEQ ID NO: 1251129 - RNA, 21 nt, Human
ugagggggcagcaggcagccc

SEQ ID NO: 1251130 - RNA, 23 nt, Human
uuuccuggcuggcaguuguggug

SEQ ID NO: 1251131 - RNA, 21 nt, Human
augguggcaguuuuucuuuuc

SEQ ID NO: 1251132 - RNA, 23 nt, Human
auuuccaguggaauuugagaguu

SEQ ID NO: 1251133 - RNA, 23 nt, Human
gaauuuccaguggaauuugagag

SEQ ID NO: 1251134 - RNA, 24 nt, Human
uuaaagaugguggcaguuuuucuu

SEQ ID NO: 1251135 - RNA, 22 nt, Human
uuugaaauauuaaugccucuga

SEQ ID NO: 1251136 - RNA, 22 nt, Human
aguggcccuggcugucuguagg

SEQ ID NO: 1251137 - RNA, 21 nt, Human
caacacggagggacugguaca

SEQ ID NO: 1251138 - RNA, 21 nt, Human
cacuuggagacacagaucugu

SEQ ID NO: 1251139 - RNA, 22 nt, Human
cagguuaaaguaaaacaaaaug

SEQ ID NO: 1251140 - RNA, 19 nt, Human
cggagggacugguacagcg

SEQ ID NO: 1251141 - RNA, 22 nt, Human
ggauaggcugcucuucuggggu

SEQ ID NO: 1251142 - RNA, 18 nt, Human
ucucauugggagugcccu

SEQ ID NO: 1251143 - RNA, 21 nt, Human
ucuggccacaaaaguggcccu

SEQ ID NO: 1251144 - RNA, 20 nt, Human
ucugggguccccauguaccc

SEQ ID NO: 1251145 - RNA, 23 nt, Human
ucugugugguagggcacuguagg

SEQ ID NO: 1251146 - RNA, 19 nt, Human
ugguacagcguaacagguu

SEQ ID NO: 1251147 - RNA, 22 nt, Human
accuuuuuuuuuuuucaggggc

SEQ ID NO: 1251148 - RNA, 19 nt, Human
agcuccuggccacaagcuc

SEQ ID NO: 1251149 - RNA, 20 nt, Human
caccuuuuuuuuuuuucagg

SEQ ID NO: 1251150 - RNA, 22 nt, Human
caccuuuuuuuuuuuucagggg

SEQ ID NO: 1251151 - RNA, 20 nt, Human
cagcacaccgauccuccuag

SEQ ID NO: 1251152 - RNA, 19 nt, Human
ccaccuuuuuuuuuuuuca

SEQ ID NO: 1251153 - RNA, 25 nt, Human
ccccagagcgccgccgacacucgcc

SEQ ID NO: 1251154 - RNA, 21 nt, Human
ccccucagaccgcaguugcga

SEQ ID NO: 1251155 - RNA, 20 nt, Human
ccuucccagccucuccuccc

SEQ ID NO: 1251156 - RNA, 22 nt, Human
cuccgggccguccucugccucc

SEQ ID NO: 1251157 - RNA, 19 nt, Human
cuccuggccacaagcucag

SEQ ID NO: 1251158 - RNA, 20 nt, Human
cucgcagccccuucccagcc

SEQ ID NO: 1251159 - RNA, 25 nt, Human
cucgcagccccuucccagccucucc

SEQ ID NO: 1251160 - RNA, 21 nt, Human
cuucccagccucuccucccca

SEQ ID NO: 1251161 - RNA, 23 nt, Human
cuucccagccucuccuccccaga

SEQ ID NO: 1251162 - RNA, 19 nt, Human
gagacuccgggccguccuc

SEQ ID NO: 1251163 - RNA, 24 nt, Human
gagacuccgggccguccucugccu

SEQ ID NO: 1251164 - RNA, 19 nt, Human
gcgaaaguggcucggggag

SEQ ID NO: 1251165 - RNA, 19 nt, Human
ucgcagccccuucccagcc

SEQ ID NO: 1251166 - RNA, 24 nt, Human
ucgcagccccuucccagccucucc

SEQ ID NO: 1251167 - RNA, 23 nt, Human
ucucgcagccccuucccagccuc

SEQ ID NO: 1251168 - RNA, 19 nt, Human
ugggaccagggcggugcgc

SEQ ID NO: 1251169 - RNA, 21 nt, Human
ugggaccagggcggugcgcua

SEQ ID NO: 1251170 - RNA, 21 nt, Human
uuuuuuuuuuuucaggggcuc

SEQ ID NO: 1251171 - RNA, 23 nt, Human
aaacauugcaguguggguccagc

SEQ ID NO: 1251172 - RNA, 21 nt, Human
aagcacagacuggccaagccc

SEQ ID NO: 1251173 - RNA, 21 nt, Human
aagccugcugguuccagcccu

SEQ ID NO: 1251174 - RNA, 22 nt, Human
acagaugagaacacacaccacg

SEQ ID NO: 1251175 - RNA, 18 nt, Human
acaggcaucucccacccu

SEQ ID NO: 1251176 - RNA, 24 nt, Human
acccugcuguugcucuccaggccu

SEQ ID NO: 1251177 - RNA, 22 nt, Human
accucuggccugcgucgcccag

SEQ ID NO: 1251178 - RNA, 25 nt, Human
accucuggccugcgucgcccaguuc

SEQ ID NO: 1251179 - RNA, 20 nt, Human
accuguagcgugaagacccu

SEQ ID NO: 1251180 - RNA, 21 nt, Human
agcagccgucacagcuccaug

SEQ ID NO: 1251181 - RNA, 21 nt, Human
agccacugaaaacgagagcag

SEQ ID NO: 1251182 - RNA, 18 nt, Human
agccccggccaggcagca

SEQ ID NO: 1251183 - RNA, 22 nt, Human
agccugcagcugcagcagcccc

SEQ ID NO: 1251184 - RNA, 21 nt, Human
agcgggauucgaaccaagggc

SEQ ID NO: 1251185 - RNA, 25 nt, Human
agcguggccuccagggcugcgaggg

SEQ ID NO: 1251186 - RNA, 24 nt, Human
aggaaagagcuuccccuugggggg

SEQ ID NO: 1251187 - RNA, 21 nt, Human
aggcagcagggucggccugcg

SEQ ID NO: 1251188 - RNA, 22 nt, Human
aggcaggggcuccugcaaccuu

SEQ ID NO: 1251189 - RNA, 18 nt, Human
agugaucccaggagagcu

SEQ ID NO: 1251190 - RNA, 26 nt, Human
caauacagaugagaacacacaccacg

SEQ ID NO: 1251191 - RNA, 19 nt, Human
cacacccgagguucccagu

SEQ ID NO: 1251192 - RNA, 22 nt, Human
cacggcaggaguguccgaugcc

SEQ ID NO: 1251193 - RNA, 20 nt, Human
cagaaaggccuggcugggug

SEQ ID NO: 1251194 - RNA, 21 nt, Human
cagcagaucccagggcagcgc

SEQ ID NO: 1251195 - RNA, 18 nt, Human
cagcuccagcucccagcg

SEQ ID NO: 1251196 - RNA, 23 nt, Human
caggauggcagggagcccacggc

SEQ ID NO: 1251197 - RNA, 23 nt, Human
caguguggguccagcccaggagg

SEQ ID NO: 1251198 - RNA, 18 nt, Human
ccacaaacacagaagcgu

SEQ ID NO: 1251199 - RNA, 19 nt, Human
ccacaccucuggccugcgu

SEQ ID NO: 1251200 - RNA, 19 nt, Human
ccacacgcgugcccaggag

SEQ ID NO: 1251201 - RNA, 18 nt, Human
ccacgaccgcggcccagg

SEQ ID NO: 1251202 - RNA, 19 nt, Human
ccacgaccgcggcccaggc

SEQ ID NO: 1251203 - RNA, 18 nt, Human
ccagcccgugagcgacgg

SEQ ID NO: 1251204 - RNA, 20 nt, Human
ccagcccgugagcgacggcc

SEQ ID NO: 1251205 - RNA, 24 nt, Human
ccagcccugcuccaccugggugcc

SEQ ID NO: 1251206 - RNA, 19 nt, Human
cccagccccggccaggcag

SEQ ID NO: 1251207 - RNA, 22 nt, Human
ccccaggaugccagcccaguuc

SEQ ID NO: 1251208 - RNA, 18 nt, Human
cccccagcuccagcuccc

SEQ ID NO: 1251209 - RNA, 21 nt, Human
cccccagcuccagcucccagc

SEQ ID NO: 1251210 - RNA, 21 nt, Human
cccccagcugagggugggagc

SEQ ID NO: 1251211 - RNA, 23 nt, Human
ccccggagccauuguccacaaac

SEQ ID NO: 1251212 - RNA, 24 nt, Human
ccccucgcgggaggacgcgcuggc

SEQ ID NO: 1251213 - RNA, 19 nt, Human
cccgcagccgggccuugcc

SEQ ID NO: 1251214 - RNA, 18 nt, Human
cccgugagcgacggcccc

SEQ ID NO: 1251215 - RNA, 23 nt, Human
cccgugagcgacggccccaggac

SEQ ID NO: 1251216 - RNA, 18 nt, Human
cccugccccggggacccc

SEQ ID NO: 1251217 - RNA, 18 nt, Human
ccgcggcccaggcccagc

SEQ ID NO: 1251218 - RNA, 25 nt, Human
ccucccgccgggccccgacgccccc

SEQ ID NO: 1251219 - RNA, 24 nt, Human
ccucuggccugcgucgcccaguuc

SEQ ID NO: 1251220 - RNA, 19 nt, Human
ccucugugccucccgccgg

SEQ ID NO: 1251221 - RNA, 24 nt, Human
ccugaggccugggauggcuugggg

SEQ ID NO: 1251222 - RNA, 23 nt, Human
ccugcagcugcagcagccccugc

SEQ ID NO: 1251223 - RNA, 21 nt, Human
ccugcuccaccugggugcccc

SEQ ID NO: 1251224 - RNA, 19 nt, Human
cgagagcaggcgaggagaa

SEQ ID NO: 1251225 - RNA, 18 nt, Human
cgccgggccccgacgccc

SEQ ID NO: 1251226 - RNA, 22 nt, Human
cgcggcgccgagcucugccccc

SEQ ID NO: 1251227 - RNA, 18 nt, Human
cggcacggucugggcgca

SEQ ID NO: 1251228 - RNA, 21 nt, Human
cugcagcugcagcagccccug

SEQ ID NO: 1251229 - RNA, 24 nt, Human
cuggcgguggcguuggggggaucu

SEQ ID NO: 1251230 - RNA, 22 nt, Human
cuuucagcuccacacgcgugcc

SEQ ID NO: 1251231 - RNA, 21 nt, Human
gaaaacgagagcaggcgagga

SEQ ID NO: 1251232 - RNA, 20 nt, Human
gaacugggaguccaagcaca

SEQ ID NO: 1251233 - RNA, 20 nt, Human
gacaguggaugagugauccc

SEQ ID NO: 1251234 - RNA, 23 nt, Human
gagcacagcagaucccagggcag

SEQ ID NO: 1251235 - RNA, 19 nt, Human
gagcagcccggagaagcug

SEQ ID NO: 1251236 - RNA, 18 nt, Human
gagcucugcccccagcuc

SEQ ID NO: 1251237 - RNA, 22 nt, Human
gaggaccacgaccgcggcccag

SEQ ID NO: 1251238 - RNA, 21 nt, Human
gaggagaagccugcugguucc

SEQ ID NO: 1251239 - RNA, 22 nt, Human
gcagccccaggaugccagccca

SEQ ID NO: 1251240 - RNA, 22 nt, Human
gcagcugcagcagccccugcac

SEQ ID NO: 1251241 - RNA, 24 nt, Human
gccagagucaggagcguggccucc

SEQ ID NO: 1251242 - RNA, 24 nt, Human
gcccaggaggugaggcuccgggac

SEQ ID NO: 1251243 - RNA, 22 nt, Human
gccccgucccuggaccccuuca

SEQ ID NO: 1251244 - RNA, 21 nt, Human
gccucccgccgggccccgacg

SEQ ID NO: 1251245 - RNA, 24 nt, Human
gcguggccuccagggcugcgaggg

SEQ ID NO: 1251246 - RNA, 20 nt, Human
gcugucccgggcauggcccc

SEQ ID NO: 1251247 - RNA, 30 nt, Human
ggaccccuucacgcaguucagggagccccc

SEQ ID NO: 1251248 - RNA, 26 nt, Human
ggagaacucagguccugaggccuggg

SEQ ID NO: 1251249 - RNA, 22 nt, Human
ggccaggcagcagggucggccu

SEQ ID NO: 1251250 - RNA, 19 nt, Human
ggcccgaggaggaccacga

SEQ ID NO: 1251251 - RNA, 20 nt, Human
ggccugagacggccuccagg

SEQ ID NO: 1251252 - RNA, 26 nt, Human
ggcgaggagaagccugcugguuccag

SEQ ID NO: 1251253 - RNA, 20 nt, Human
gggaggagccacugaaaacg

SEQ ID NO: 1251254 - RNA, 24 nt, Human
ggggggaucugcgcgcuggccagg

SEQ ID NO: 1251255 - RNA, 20 nt, Human
gggugccuuucagcuccaca

SEQ ID NO: 1251256 - RNA, 21 nt, Human
gggugcugccugauccugggu

SEQ ID NO: 1251257 - RNA, 22 nt, Human
gguagggugggggacuggcugc

SEQ ID NO: 1251258 - RNA, 21 nt, Human
ggucggccugcgguucuggga

SEQ ID NO: 1251259 - RNA, 20 nt, Human
ggugagugacaggcaucucc

SEQ ID NO: 1251260 - RNA, 23 nt, Human
ggugcagacgcaggcaggggcuc

SEQ ID NO: 1251261 - RNA, 22 nt, Human
guacuguccagccugcagcugc

SEQ ID NO: 1251262 - RNA, 24 nt, Human
ucaggagcguggccuccagggccg

SEQ ID NO: 1251263 - RNA, 21 nt, Human
uccacaaacacagaagcguac

SEQ ID NO: 1251264 - RNA, 22 nt, Human
uccacaaacacagaagcguacu

SEQ ID NO: 1251265 - RNA, 18 nt, Human
uccacacgcgugcccagg

SEQ ID NO: 1251266 - RNA, 18 nt, Human
uccacacgcgugcccagg

SEQ ID NO: 1251267 - RNA, 21 nt, Human
uccacacgcgugcccaggagc

SEQ ID NO: 1251268 - RNA, 20 nt, Human
ucccaggauggcagggagcc

SEQ ID NO: 1251269 - RNA, 23 nt, Human
ucccaggauggcagggagcccac

SEQ ID NO: 1251270 - RNA, 23 nt, Human
ucccgggcccgcagccgggccuu

SEQ ID NO: 1251271 - RNA, 19 nt, Human
ucccuggaccccuucacgc

SEQ ID NO: 1251272 - RNA, 21 nt, Human
ucccugugcccggcgcucuuc

SEQ ID NO: 1251273 - RNA, 21 nt, Human
uccgaugcccccagccccggc

SEQ ID NO: 1251274 - RNA, 18 nt, Human
ucugcaggcaggaaagag

SEQ ID NO: 1251275 - RNA, 20 nt, Human
ugagaacacacaccacgucc

SEQ ID NO: 1251276 - RNA, 18 nt, Human
ugagaaccccauggacag

SEQ ID NO: 1251277 - RNA, 21 nt, Human
ugagcgacggccccaggacgc

SEQ ID NO: 1251278 - RNA, 22 nt, Human
ugagugaucccaggagagcugg

SEQ ID NO: 1251279 - RNA, 18 nt, Human
ugauccugggugccugcc

SEQ ID NO: 1251280 - RNA, 21 nt, Human
ugauccugggugccugccccc

SEQ ID NO: 1251281 - RNA, 20 nt, Human
ugcaccuguagcgugaagac

SEQ ID NO: 1251282 - RNA, 21 nt, Human
ugccagcccaguucccugugc

SEQ ID NO: 1251283 - RNA, 18 nt, Human
ugcccaggagcagcccgg

SEQ ID NO: 1251284 - RNA, 24 nt, Human
ugcccccagccccggccaggcagc

SEQ ID NO: 1251285 - RNA, 22 nt, Human
ugcucuccaggccugagacggc

SEQ ID NO: 1251286 - RNA, 25 nt, Human
ugcugaagaaccuagagggccccca

SEQ ID NO: 1251287 - RNA, 26 nt, Human
ugcugaagaaccuagagggccccccc

SEQ ID NO: 1251288 - RNA, 21 nt, Human
ugcuuggagaggccagagggc

SEQ ID NO: 1251289 - RNA, 28 nt, Human
uggagcccgccuggauggucgguagacc

SEQ ID NO: 1251290 - RNA, 24 nt, Human
uggcaucacagacgcccagcacug

SEQ ID NO: 1251291 - RNA, 18 nt, Human
uggcgguggcguuggggg

SEQ ID NO: 1251292 - RNA, 20 nt, Human
uggcugcagccaaggggcug

SEQ ID NO: 1251293 - RNA, 19 nt, Human
ugggauggcuugggggccu

SEQ ID NO: 1251294 - RNA, 22 nt, Human
uggggggaucugcgcgcuggcc

SEQ ID NO: 1251295 - RNA, 23 nt, Human
uguggcucugaagaauuggccgc

SEQ ID NO: 1251296 - RNA, 19 nt, Human
uucccggauggugaggccc

SEQ ID NO: 1251297 - RNA, 20 nt, Human
uugcucuccaggccugagac

SEQ ID NO: 1251298 - RNA, 19 nt, Human
uuggccgccagagucagga

SEQ ID NO: 1251299 - RNA, 23 nt, Human
agcgguguaguaggagcaggggg

SEQ ID NO: 1251300 - RNA, 20 nt, Human
ccgcggcggguggguggaga

SEQ ID NO: 1251301 - RNA, 20 nt, Human
cgugggugugccuguaggug

SEQ ID NO: 1251302 - RNA, 21 nt, Human
gagcggugguccguaggcagg

SEQ ID NO: 1251303 - RNA, 22 nt, Human
gagugugggugguaagugcgcu

SEQ ID NO: 1251304 - RNA, 24 nt, Human
gcggcggguggguggagagggugc

SEQ ID NO: 1251305 - RNA, 23 nt, Human
gggccgugggcagggggccgggg

SEQ ID NO: 1251306 - RNA, 24 nt, Human
gggggccgggguggcgcguggaug

SEQ ID NO: 1251307 - RNA, 19 nt, Human
gggggggccguggggggag

SEQ ID NO: 1251308 - RNA, 19 nt, Human
gggggucgcagggagggua

SEQ ID NO: 1251309 - RNA, 19 nt, Human
guccguccgugguguggag

SEQ ID NO: 1251310 - RNA, 19 nt, Human
guggaggcccccggauacc

SEQ ID NO: 1251311 - RNA, 24 nt, Human
gugggagcgggagugaccgccugg

SEQ ID NO: 1251312 - RNA, 24 nt, Human
ugcgcugggggucgcagggagggu

SEQ ID NO: 1251313 - RNA, 20 nt, Human
ugcugguggagugugggugg

SEQ ID NO: 1251314 - RNA, 20 nt, Human
uggaggcccccggauaccag

SEQ ID NO: 1251315 - RNA, 20 nt, Human
uggcgugggugugccuguag

SEQ ID NO: 1251316 - RNA, 18 nt, Human
uggggggaggguagggug

SEQ ID NO: 1251317 - RNA, 19 nt, Human
uggggggaggguagggugc

SEQ ID NO: 1251318 - RNA, 21 nt, Human
ugggggucgcagggaggguag

SEQ ID NO: 1251319 - RNA, 25 nt, Human
uggguagggccgugggcagggggcc

SEQ ID NO: 1251320 - RNA, 22 nt, Human
uggugcugguggagugugggug

SEQ ID NO: 1251321 - RNA, 23 nt, Human
uggugugcgacaguaggcagcgg

SEQ ID NO: 1251322 - RNA, 22 nt, Human
ugguguggagcggugcccagug

SEQ ID NO: 1251323 - RNA, 20 nt, Human
acucuuguuuuccucgcggc

SEQ ID NO: 1251324 - RNA, 21 nt, Human
agaguucuuuggaagaggaga

SEQ ID NO: 1251325 - RNA, 21 nt, Human
agauagaguaacuucuggguu

SEQ ID NO: 1251326 - RNA, 24 nt, Human
aggcagccaggaugucuugaugga

SEQ ID NO: 1251327 - RNA, 27 nt, Human
cagccggaucuccucccuuaggccauc

SEQ ID NO: 1251328 - RNA, 20 nt, Human
cccgccgcgccggggcuccg

SEQ ID NO: 1251329 - RNA, 23 nt, Human
ccucccuuaggccaucucucucc

SEQ ID NO: 1251330 - RNA, 21 nt, Human
ccugcagggcugguucccgga

SEQ ID NO: 1251331 - RNA, 20 nt, Human
gcgccggggcuccgggcugg

SEQ ID NO: 1251332 - RNA, 24 nt, Human
ggaaacgccccucuagcaauucca

SEQ ID NO: 1251333 - RNA, 24 nt, Human
ggcggcgccguccccgccgcgccg

SEQ ID NO: 1251334 - RNA, 18 nt, Human
ggguucaaggcuucugcc

SEQ ID NO: 1251335 - RNA, 20 nt, Human
ucccuuaggccaucucucuc

SEQ ID NO: 1251336 - RNA, 24 nt, Human
ucuccucuuccagcugggccacag

SEQ ID NO: 1251337 - RNA, 18 nt, Human
uucuuuggaagaggagaa

SEQ ID NO: 1251338 - RNA, 21 nt, Human
ugcccugggcuuucuggaagc

SEQ ID NO: 1251339 - RNA, 23 nt, Human
uuuucucugcccugggcuuucug

SEQ ID NO: 1251340 - RNA, 21 nt, Human
ugcugaggccguggggaaugu

SEQ ID NO: 1251341 - RNA, 19 nt, Human
uuaagguggaggcaagggc

SEQ ID NO: 1251342 - RNA, 18 nt, Human
uuuaagguggaggcaagg

SEQ ID NO: 1251343 - RNA, 23 nt, Human
agagugggcgcggagcuggggcc

SEQ ID NO: 1251344 - RNA, 18 nt, Human
agugggcgcggagcuggg

SEQ ID NO: 1251345 - RNA, 18 nt, Human
cacgcauccuuuacgcca

SEQ ID NO: 1251346 - RNA, 18 nt, Human
ccagugcugugcgccccg

SEQ ID NO: 1251347 - RNA, 22 nt, Human
ccucgaaccuugccaaucacca

SEQ ID NO: 1251348 - RNA, 21 nt, Human
ccucucugggcacgcauccuu

SEQ ID NO: 1251349 - RNA, 23 nt, Human
cucagagagcucaccgcagccag

SEQ ID NO: 1251350 - RNA, 20 nt, Human
cuucagcagccgccuccucu

SEQ ID NO: 1251351 - RNA, 23 nt, Human
gcaggagagagugggcgcggagc

SEQ ID NO: 1251352 - RNA, 18 nt, Human
gccacgggcuuucagggg

SEQ ID NO: 1251353 - RNA, 19 nt, Human
gccgccuccucugcggacu

SEQ ID NO: 1251354 - RNA, 24 nt, Human
ucucagagagcucaccgcagccag

SEQ ID NO: 1251355 - RNA, 18 nt, Human
ugcugugcgccccgcuug

SEQ ID NO: 1251356 - RNA, 18 nt, Human
ugcuguuucuucagcagc

SEQ ID NO: 1251357 - RNA, 22 nt, Human
uggggccagcgcagggccgugg

SEQ ID NO: 1251358 - RNA, 25 nt, Human
ugucaaaacagauugcuguuucuuc

SEQ ID NO: 1251359 - RNA, 22 nt, Human
aaacagggcuggugaugaccuu

SEQ ID NO: 1251360 - RNA, 20 nt, Human
acaaggcugcucugcagcag

SEQ ID NO: 1251361 - RNA, 24 nt, Human
acagugacuggugggggugggcac

SEQ ID NO: 1251362 - RNA, 22 nt, Human
accuuggcccugugcggugggg

SEQ ID NO: 1251363 - RNA, 19 nt, Human
agagccccuuccucuugcu

SEQ ID NO: 1251364 - RNA, 23 nt, Human
agcagaagccacugguggcgugu

SEQ ID NO: 1251365 - RNA, 23 nt, Human
aggcauucccagugaucaggagc

SEQ ID NO: 1251366 - RNA, 19 nt, Human
agguggaggccugguugag

SEQ ID NO: 1251367 - RNA, 19 nt, Human
aggugggugccuugggggu

SEQ ID NO: 1251368 - RNA, 19 nt, Human
auccagcugccuccacagu

SEQ ID NO: 1251369 - RNA, 23 nt, Human
aucuggacccccucucagaccug

SEQ ID NO: 1251370 - RNA, 23 nt, Human
augcacccacacacucgcacaca

SEQ ID NO: 1251371 - RNA, 25 nt, Human
cacccacacacucgcacacaugccc

SEQ ID NO: 1251372 - RNA, 19 nt, Human
cacccauccguggggguug

SEQ ID NO: 1251373 - RNA, 23 nt, Human
cagaccaguugaccaggaagccc

SEQ ID NO: 1251374 - RNA, 21 nt, Human
cagcagaagccacugguggcg

SEQ ID NO: 1251375 - RNA, 19 nt, Human
cagcagcagcagaagccac

SEQ ID NO: 1251376 - RNA, 22 nt, Human
cagcagcagcagaagccacugg

SEQ ID NO: 1251377 - RNA, 21 nt, Human
cauccagaugcacccacacac

SEQ ID NO: 1251378 - RNA, 22 nt, Human
caucuguugcccccuccccacu

SEQ ID NO: 1251379 - RNA, 20 nt, Human
ccauccguggggguugucug

SEQ ID NO: 1251380 - RNA, 24 nt, Human
cccacccccagugagauaagaggg

SEQ ID NO: 1251381 - RNA, 23 nt, Human
cccccuggugaccauacagaguu

SEQ ID NO: 1251382 - RNA, 21 nt, Human
ccccgccgccccaucuguugc

SEQ ID NO: 1251383 - RNA, 19 nt, Human
cccugagcugcacuggccc

SEQ ID NO: 1251384 - RNA, 18 nt, Human
ccgcacccggggcucggu

SEQ ID NO: 1251385 - RNA, 24 nt, Human
ccgugcucggugggagcagccgcg

SEQ ID NO: 1251386 - RNA, 23 nt, Human
ccuccacagugacuggugggggu

SEQ ID NO: 1251387 - RNA, 22 nt, Human
ccucccagcuguggcccugagc

SEQ ID NO: 1251388 - RNA, 26 nt, Human
ccucuugcucuuucucuucgggccgc

SEQ ID NO: 1251389 - RNA, 24 nt, Human
cgcacacaugccucuacguguacg

SEQ ID NO: 1251390 - RNA, 21 nt, Human
cuccauggcagguggaggccu

SEQ ID NO: 1251391 - RNA, 20 nt, Human
cucugcgcuccccgccgccc

SEQ ID NO: 1251392 - RNA, 22 nt, Human
cugagagccccuuccucuugcu

SEQ ID NO: 1251393 - RNA, 20 nt, Human
cuggacccccucucagaccu

SEQ ID NO: 1251394 - RNA, 18 nt, Human
cugggugggguuggggag

SEQ ID NO: 1251395 - RNA, 18 nt, Human
cuuggcccugugcggugg

SEQ ID NO: 1251396 - RNA, 20 nt, Human
gagagccccuuccucuugcu

SEQ ID NO: 1251397 - RNA, 21 nt, Human
gagcaagcggggccacaaggc

SEQ ID NO: 1251398 - RNA, 22 nt, Human
gagcagccgcguugcugcccca

SEQ ID NO: 1251399 - RNA, 22 nt, Human
gcagcagcagcagaagccacug

SEQ ID NO: 1251400 - RNA, 19 nt, Human
gccccaucuguugcccccu

SEQ ID NO: 1251401 - RNA, 24 nt, Human
gccccaucuguugcccccucccca

SEQ ID NO: 1251402 - RNA, 21 nt, Human
gcccugagcugcacuggcccc

SEQ ID NO: 1251403 - RNA, 24 nt, Human
gcgguggaaccccgugggcccccu

SEQ ID NO: 1251404 - RNA, 21 nt, Human
ggacugggacggggugcacug

SEQ ID NO: 1251405 - RNA, 18 nt, Human
ggagcaaagggcaggcau

SEQ ID NO: 1251406 - RNA, 22 nt, Human
ggagcagccgcguugcugccug

SEQ ID NO: 1251407 - RNA, 25 nt, Human
ggaggugggugccuugggggggauc

SEQ ID NO: 1251408 - RNA, 23 nt, Human
ggcuggugaugaccuuggcccug

SEQ ID NO: 1251409 - RNA, 22 nt, Human
gggcacgggugaguggcgaacc

SEQ ID NO: 1251410 - RNA, 21 nt, Human
gggguugucugugacaguauc

SEQ ID NO: 1251411 - RNA, 18 nt, Human
ggugggagggugaguagc

SEQ ID NO: 1251412 - RNA, 25 nt, Human
guacauccagaugcacccacacaac

SEQ ID NO: 1251413 - RNA, 18 nt, Human
gugaucaggagcuggggc

SEQ ID NO: 1251414 - RNA, 22 nt, Human
gugggcccccucguugcguggc

SEQ ID NO: 1251415 - RNA, 18 nt, Human
uaacccccuggugaccau

SEQ ID NO: 1251416 - RNA, 18 nt, Human
uaaggcggggaccccacc

SEQ ID NO: 1251417 - RNA, 26 nt, Human
uacguguacgcccaugggcacgugug

SEQ ID NO: 1251418 - RNA, 18 nt, Human
uacucuaaggcggggacc

SEQ ID NO: 1251419 - RNA, 21 nt, Human
ucccagcuguggcccugagcu

SEQ ID NO: 1251420 - RNA, 24 nt, Human
uccccgccgccccaucuguugccc

SEQ ID NO: 1251421 - RNA, 19 nt, Human
uccugggcugugaggggcu

SEQ ID NO: 1251422 - RNA, 18 nt, Human
ucgcacacaugccucuac

SEQ ID NO: 1251423 - RNA, 22 nt, Human
ucgcccgaaggccaaggacugc

SEQ ID NO: 1251424 - RNA, 19 nt, Human
ucuccauggcagguggagg

SEQ ID NO: 1251425 - RNA, 19 nt, Human
ucuccauggcagguggagg

SEQ ID NO: 1251426 - RNA, 22 nt, Human
ucuccauggcagguggaggccu

SEQ ID NO: 1251427 - RNA, 18 nt, Human
ugacuggugggggugggc

SEQ ID NO: 1251428 - RNA, 24 nt, Human
ugcacccacacacucgcacacaug

SEQ ID NO: 1251429 - RNA, 18 nt, Human
ugcagagcucaucaaugg

SEQ ID NO: 1251430 - RNA, 24 nt, Human
ugcagcagcagcagaagccacugg

SEQ ID NO: 1251431 - RNA, 19 nt, Human
ugccccagucuggccguca

SEQ ID NO: 1251432 - RNA, 19 nt, Human
ugccuugggggugguccca

SEQ ID NO: 1251433 - RNA, 22 nt, Human
ugcucuuucucuuccaacaggg

SEQ ID NO: 1251434 - RNA, 23 nt, Human
ugggacaggucugacuguggcuc

SEQ ID NO: 1251435 - RNA, 18 nt, Human
ugggacggggugcacugg

SEQ ID NO: 1251436 - RNA, 21 nt, Human
ugggagcagccgcguugcugc

SEQ ID NO: 1251437 - RNA, 21 nt, Human
ugggcaggaaccucucaccug

SEQ ID NO: 1251438 - RNA, 21 nt, Human
ugggcugugaggggcuucugg

SEQ ID NO: 1251439 - RNA, 18 nt, Human
uggggaugcaaacagggc

SEQ ID NO: 1251440 - RNA, 18 nt, Human
uggggccugcacucaacu

SEQ ID NO: 1251441 - RNA, 21 nt, Human
ugggugggguuggggagccug

SEQ ID NO: 1251442 - RNA, 23 nt, Human
ugggugggguuggggagccuggg

SEQ ID NO: 1251443 - RNA, 21 nt, Human
uggugaggggggcccgggagg

SEQ ID NO: 1251444 - RNA, 19 nt, Human
uuaacccccuggugaccau

SEQ ID NO: 1251445 - RNA, 23 nt, Human
uucuccuacacagggggcuccau

SEQ ID NO: 1251446 - RNA, 21 nt, Human
uugaguggagcaaagggcagg

SEQ ID NO: 1251447 - RNA, 22 nt, Human
uugcccccuccccacugagagc

SEQ ID NO: 1251448 - RNA, 19 nt, Human
uuggggguggucccaacug

SEQ ID NO: 1251449 - RNA, 25 nt, Human
uuuccacgcgacgauggcugccgug

SEQ ID NO: 1251450 - RNA, 23 nt, Human
accaggggagggcucaugggcug

SEQ ID NO: 1251451 - RNA, 22 nt, Human
agcucacacaggacacaaccuc

SEQ ID NO: 1251452 - RNA, 20 nt, Human
aucaucccugccugccucag

SEQ ID NO: 1251453 - RNA, 24 nt, Human
cacaaccucacuguaaaaacucca

SEQ ID NO: 1251454 - RNA, 20 nt, Human
cagggugaguugucugaaga

SEQ ID NO: 1251455 - RNA, 24 nt, Human
caucccugccugccucagccuucc

SEQ ID NO: 1251456 - RNA, 21 nt, Human
ccagggcccuuugugcucccu

SEQ ID NO: 1251457 - RNA, 21 nt, Human
ccccuggagcucuccagccgc

SEQ ID NO: 1251458 - RNA, 20 nt, Human
ccggcagagguccugccagg

SEQ ID NO: 1251459 - RNA, 19 nt, Human
ccucccaccuccucuccgc

SEQ ID NO: 1251460 - RNA, 20 nt, Human
ccugcuugggauucuccucu

SEQ ID NO: 1251461 - RNA, 19 nt, Human
cgagggcagcuccggcaga

SEQ ID NO: 1251462 - RNA, 21 nt, Human
cgagggcagcuccggcagagg

SEQ ID NO: 1251463 - RNA, 22 nt, Human
cuccagccgcagccgcggggcc

SEQ ID NO: 1251464 - RNA, 20 nt, Human
cuccgccccuggagcucucc

SEQ ID NO: 1251465 - RNA, 23 nt, Human
cuccucuccgccccuggagcucu

SEQ ID NO: 1251466 - RNA, 19 nt, Human
cuguggggugcgcagggag

SEQ ID NO: 1251467 - RNA, 23 nt, Human
cuugggauucuccucuccuaagg

SEQ ID NO: 1251468 - RNA, 24 nt, Human
gcagccgcggggccugcuugggau

SEQ ID NO: 1251469 - RNA, 22 nt, Human
ggagggcucaugggcuguggag

SEQ ID NO: 1251470 - RNA, 23 nt, Human
ggcaucaucccugccugccucag

SEQ ID NO: 1251471 - RNA, 23 nt, Human
ggccugcuugggauucuccucug

SEQ ID NO: 1251472 - RNA, 20 nt, Human
ggcuguggaggaaugggcug

SEQ ID NO: 1251473 - RNA, 23 nt, Human
uagcucacacaggacacaaccuc

SEQ ID NO: 1251474 - RNA, 19 nt, Human
ucccaccuccucuccgccc

SEQ ID NO: 1251475 - RNA, 24 nt, Human
ucccaggcccaauccugcccgauc

SEQ ID NO: 1251476 - RNA, 27 nt, Human
ucccugccugccucagccuucccaggc

SEQ ID NO: 1251477 - RNA, 23 nt, Human
uccucugcuggcaucaucccugc

SEQ ID NO: 1251478 - RNA, 24 nt, Human
ugccagggcccuuugugcucccuu

SEQ ID NO: 1251479 - RNA, 21 nt, Human
ugccucagccuucccaggccc

SEQ ID NO: 1251480 - RNA, 22 nt, Human
ugccucagccuucccaggccca

SEQ ID NO: 1251481 - RNA, 21 nt, Human
uggagcucuccagccgcagcc

SEQ ID NO: 1251482 - RNA, 23 nt, Human
ugggcuguggggugcgcagggag

SEQ ID NO: 1251483 - RNA, 25 nt, Human
uguggaggaaugggcuguggggaaa

SEQ ID NO: 1251484 - RNA, 18 nt, Human
uucccaggcccaauccug

SEQ ID NO: 1251485 - RNA, 23 nt, Human
uugcagggaccaggggagggcuc

SEQ ID NO: 1251486 - RNA, 23 nt, Human
cauuguacggccuuugucagagc

SEQ ID NO: 1251487 - RNA, 19 nt, Human
cuuugucagagcuguccuc

SEQ ID NO: 1251488 - RNA, 24 nt, Human
caaagugcccagauuaaugucugu

SEQ ID NO: 1251489 - RNA, 18 nt, Human
caccaggaaagacacaug

SEQ ID NO: 1251490 - RNA, 24 nt, Human
caccaggaaagacacauggauccc

SEQ ID NO: 1251491 - RNA, 19 nt, Human
cauggaucccgguccuccu

SEQ ID NO: 1251492 - RNA, 18 nt, Human
cuguaucgucccuccagc

SEQ ID NO: 1251493 - RNA, 24 nt, Human
cuguaucgucccuccagcggagau

SEQ ID NO: 1251494 - RNA, 21 nt, Human
ugccuuauuuccccuauucaa

SEQ ID NO: 1251495 - RNA, 21 nt, Human
uucaacagcagcucagugaac

SEQ ID NO: 1251496 - RNA, 22 nt, Human
cuucuucuuguuguuguaagau

SEQ ID NO: 1251497 - RNA, 19 nt, Human
uaagauaaaucuguaguua

SEQ ID NO: 1251498 - RNA, 20 nt, Human
ggagugggaguccaguguga

SEQ ID NO: 1251499 - RNA, 21 nt, Human
ugacagcuaaauaagcaacca

SEQ ID NO: 1251500 - RNA, 18 nt, Human
aaaccagguucccugaaa

SEQ ID NO: 1251501 - RNA, 23 nt, Human
aaggcuuugcggagcaaggggug

SEQ ID NO: 1251502 - RNA, 21 nt, Human
acaggcaggcagaugggggca

SEQ ID NO: 1251503 - RNA, 21 nt, Human
aggcaacuccagggaggcagg

SEQ ID NO: 1251504 - RNA, 23 nt, Human
aggcaggcagaugggggcaccuu

SEQ ID NO: 1251505 - RNA, 21 nt, Human
agugcagguagccggccgccu

SEQ ID NO: 1251506 - RNA, 19 nt, Human
caccccucuuuccaaccag

SEQ ID NO: 1251507 - RNA, 21 nt, Human
caccuugccaggcccccugca

SEQ ID NO: 1251508 - RNA, 24 nt, Human
caccuugccaggcccccugcagcc

SEQ ID NO: 1251509 - RNA, 23 nt, Human
cacgacaggcaacuccagggagg

SEQ ID NO: 1251510 - RNA, 21 nt, Human
cagggagcgccgggaucaggg

SEQ ID NO: 1251511 - RNA, 20 nt, Human
cagguagccggccgccuggc

SEQ ID NO: 1251512 - RNA, 23 nt, Human
ccagacugcagccaugauuggua

SEQ ID NO: 1251513 - RNA, 19 nt, Human
ccaggcccccugcagccag

SEQ ID NO: 1251514 - RNA, 23 nt, Human
ccccugcagccagacugcagcca

SEQ ID NO: 1251515 - RNA, 25 nt, Human
ccccugcagccagacugcagccaug

SEQ ID NO: 1251516 - RNA, 26 nt, Human
ccgccaggcgaugggggcagcugugu

SEQ ID NO: 1251517 - RNA, 22 nt, Human
ccugcccugguccgccaacucc

SEQ ID NO: 1251518 - RNA, 21 nt, Human
ccuucagaaaggcuuugcgga

SEQ ID NO: 1251519 - RNA, 22 nt, Human
cucaccccucuuuccaaccagg

SEQ ID NO: 1251520 - RNA, 20 nt, Human
cugcaucccugauggagcag

SEQ ID NO: 1251521 - RNA, 22 nt, Human
cuugccaggcccccugcagcca

SEQ ID NO: 1251522 - RNA, 20 nt, Human
gaacccggcaagugcaggua

SEQ ID NO: 1251523 - RNA, 22 nt, Human
gcucagggcaccuugccaggcc

SEQ ID NO: 1251524 - RNA, 18 nt, Human
ggagggaccuggaaggaa

SEQ ID NO: 1251525 - RNA, 20 nt, Human
gggcaggggggcgcacgggc

SEQ ID NO: 1251526 - RNA, 18 nt, Human
gggccccgaaggcuccag

SEQ ID NO: 1251527 - RNA, 22 nt, Human
ggggcagcuguguggccagccu

SEQ ID NO: 1251528 - RNA, 21 nt, Human
gugcugcccaggggagcucag

SEQ ID NO: 1251529 - RNA, 19 nt, Human
uaucaaucacggcgcgggg

SEQ ID NO: 1251530 - RNA, 21 nt, Human
ucaccccucuuuccaaccagg

SEQ ID NO: 1251531 - RNA, 19 nt, Human
ucuuggcagcagggaccug

SEQ ID NO: 1251532 - RNA, 26 nt, Human
ugcccugccugcccugguccgccaac

SEQ ID NO: 1251533 - RNA, 24 nt, Human
uggagcaggcccgagggagguucc

SEQ ID NO: 1251534 - RNA, 19 nt, Human
uggcagcagggaccugaac

SEQ ID NO: 1251535 - RNA, 19 nt, Human
uggcagggagcgccgggau

SEQ ID NO: 1251536 - RNA, 18 nt, Human
uucaggaagggugcugcc

SEQ ID NO: 1251537 - RNA, 19 nt, Human
aaaaccaaucaacuggcca

SEQ ID NO: 1251538 - RNA, 21 nt, Human
cuccgggccuccggagacggg

SEQ ID NO: 1251539 - RNA, 21 nt, Human
uagaaaaccaaucaacuggcc

SEQ ID NO: 1251540 - RNA, 23 nt, Human
uagaaaaccaaucaacuggccau

SEQ ID NO: 1251541 - RNA, 18 nt, Human
aacaagcaacacuccagg

SEQ ID NO: 1251542 - RNA, 20 nt, Human
aacacuccaggaagagccgg

SEQ ID NO: 1251543 - RNA, 18 nt, Human
aacauggugaaacccugu

SEQ ID NO: 1251544 - RNA, 19 nt, Human
aacauggugaaacccuguc

SEQ ID NO: 1251545 - RNA, 20 nt, Human
aacauggugaaacccugucc

SEQ ID NO: 1251546 - RNA, 20 nt, Human
aagaagucauuucuuuccgg

SEQ ID NO: 1251547 - RNA, 23 nt, Human
acagcucaugccuguaaucccag

SEQ ID NO: 1251548 - RNA, 23 nt, Human
accuucagguccuuucuccuccc

SEQ ID NO: 1251549 - RNA, 24 nt, Human
acugguuaacauggugaaacccug

SEQ ID NO: 1251550 - RNA, 19 nt, Human
acuguaagcucuucaccgc

SEQ ID NO: 1251551 - RNA, 23 nt, Human
acugugugccagauguuccaugc

SEQ ID NO: 1251552 - RNA, 21 nt, Human
agaccagacugguuaacaugg

SEQ ID NO: 1251553 - RNA, 24 nt, Human
agacugguuaacauggugaaaccc

SEQ ID NO: 1251554 - RNA, 19 nt, Human
agcacagucucucucagca

SEQ ID NO: 1251555 - RNA, 20 nt, Human
aggaagagccggccauggca

SEQ ID NO: 1251556 - RNA, 23 nt, Human
aggaauucaagaccagacugguu

SEQ ID NO: 1251557 - RNA, 24 nt, Human
aggaccaccauccuccaggaacuu

SEQ ID NO: 1251558 - RNA, 26 nt, Human
agguaggcagaucacuugaggucagg

SEQ ID NO: 1251559 - RNA, 18 nt, Human
agguggccaugaggggga

SEQ ID NO: 1251560 - RNA, 19 nt, Human
augccuguaaucccagcac

SEQ ID NO: 1251561 - RNA, 25 nt, Human
auucucuuccucugagcagucucaa

SEQ ID NO: 1251562 - RNA, 24 nt, Human
caagaccagacugguuaacauggu

SEQ ID NO: 1251563 - RNA, 24 nt, Human
caagguaggcagaucacuugaggu

SEQ ID NO: 1251564 - RNA, 26 nt, Human
caagguaggcagaucacuugagguca

SEQ ID NO: 1251565 - RNA, 25 nt, Human
caccagguccuuugucucccauucu

SEQ ID NO: 1251566 - RNA, 24 nt, Human
cacccgagacacaagcagacagcc

SEQ ID NO: 1251567 - RNA, 27 nt, Human
cagaucacuugaggucaggaauucaag

SEQ ID NO: 1251568 - RNA, 24 nt, Human
cagcacuuugggaggccaagguag

SEQ ID NO: 1251569 - RNA, 25 nt, Human
cagcacuuugggaggccaagguagg

SEQ ID NO: 1251570 - RNA, 24 nt, Human
cagcucaugccuguaaucccagca

SEQ ID NO: 1251571 - RNA, 18 nt, Human
caggaagagccggccaug

SEQ ID NO: 1251572 - RNA, 24 nt, Human
caugccuguaaucccagcacuuug

SEQ ID NO: 1251573 - RNA, 21 nt, Human
ccacauguuuagcuauccaga

SEQ ID NO: 1251574 - RNA, 19 nt, Human
ccacccgagacacaagcag

SEQ ID NO: 1251575 - RNA, 21 nt, Human
ccauggcaggcggggacugug

SEQ ID NO: 1251576 - RNA, 22 nt, Human
cccuggaagcacucuacugcuu

SEQ ID NO: 1251577 - RNA, 26 nt, Human
ccucugagcagucucauaauuaauuc

SEQ ID NO: 1251578 - RNA, 19 nt, Human
cgagacacaagcagacagc

SEQ ID NO: 1251579 - RNA, 24 nt, Human
cucaugccuguaaucccagcacuu

SEQ ID NO: 1251580 - RNA, 18 nt, Human
cucgcugggccuguucca

SEQ ID NO: 1251581 - RNA, 18 nt, Human
cucucgcugggccuguuc

SEQ ID NO: 1251582 - RNA, 21 nt, Human
cugguuaacauggugaaaccc

SEQ ID NO: 1251583 - RNA, 24 nt, Human
cugguuaacauggugaaacccugu

SEQ ID NO: 1251584 - RNA, 18 nt, Human
cuguauuuucucucagca

SEQ ID NO: 1251585 - RNA, 21 nt, Human
cuugcucacccgacuguaagc

SEQ ID NO: 1251586 - RNA, 21 nt, Human
cuuuaaauuuucugguaaccc

SEQ ID NO: 1251587 - RNA, 26 nt, Human
cuuuugguuuuuacggaagcuucauu

SEQ ID NO: 1251588 - RNA, 23 nt, Human
gacagcucaugccuguaauccca

SEQ ID NO: 1251589 - RNA, 24 nt, Human
gacagcucaugccuguaaucccag

SEQ ID NO: 1251590 - RNA, 18 nt, Human
gaccaccauccuccagga

SEQ ID NO: 1251591 - RNA, 18 nt, Human
gagccggccauggcaggc

SEQ ID NO: 1251592 - RNA, 18 nt, Human
gaucacuugaggucagga

SEQ ID NO: 1251593 - RNA, 24 nt, Human
gaucacuugaggucaggaauucaa

SEQ ID NO: 1251594 - RNA, 19 nt, Human
gcaggcggggacugugugg

SEQ ID NO: 1251595 - RNA, 20 nt, Human
gcgacagcucaugccuguaa

SEQ ID NO: 1251596 - RNA, 22 nt, Human
ggccuguuccacccgagacaca

SEQ ID NO: 1251597 - RNA, 21 nt, Human
gggggacagaauggggcggaa

SEQ ID NO: 1251598 - RNA, 21 nt, Human
guccaccacauucucuucuca

SEQ ID NO: 1251599 - RNA, 18 nt, Human
uaacauggugaaacccug

SEQ ID NO: 1251600 - RNA, 20 nt, Human
uaacauggugaaacccuguc

SEQ ID NO: 1251601 - RNA, 25 nt, Human
uaggaccaccauccuccaggaacuu

SEQ ID NO: 1251602 - RNA, 18 nt, Human
uaggcagaucacuugagg

SEQ ID NO: 1251603 - RNA, 24 nt, Human
uaggcagaucacuugaggucagga

SEQ ID NO: 1251604 - RNA, 21 nt, Human
uauccagaagcucaaucaaac

SEQ ID NO: 1251605 - RNA, 21 nt, Human
uaucuugcucacccgacugua

SEQ ID NO: 1251606 - RNA, 20 nt, Human
ucagguccuuucuccucccu

SEQ ID NO: 1251607 - RNA, 25 nt, Human
ucaucuaugauucacugauuauucc

SEQ ID NO: 1251608 - RNA, 22 nt, Human
ucaugccuguaaucccagcacu

SEQ ID NO: 1251609 - RNA, 24 nt, Human
uccagggcagggauuuuugucucc

SEQ ID NO: 1251610 - RNA, 24 nt, Human
uccaugcugagccaguaucaagga

SEQ ID NO: 1251611 - RNA, 25 nt, Human
ucccaagugccuagaacaagggcuc

SEQ ID NO: 1251612 - RNA, 23 nt, Human
ucccauucucuuccucugagcag

SEQ ID NO: 1251613 - RNA, 23 nt, Human
ucccuggaagcacucuacugcuu

SEQ ID NO: 1251614 - RNA, 18 nt, Human
uccucagugcauacugug

SEQ ID NO: 1251615 - RNA, 22 nt, Human
ucgcugggccuguuccacccga

SEQ ID NO: 1251616 - RNA, 23 nt, Human
ucucucagcaauagaaugggagu

SEQ ID NO: 1251617 - RNA, 18 nt, Human
ucucuguaaagcacaguc

SEQ ID NO: 1251618 - RNA, 27 nt, Human
ucugggcgccggcggaccggggcuccg

SEQ ID NO: 1251619 - RNA, 23 nt, Human
ugccuguaaucccagcacuuugg

SEQ ID NO: 1251620 - RNA, 23 nt, Human
ugccuguaaucccagcacuuugg

SEQ ID NO: 1251621 - RNA, 24 nt, Human
ugccuguaaucccagcacuuuggg

SEQ ID NO: 1251622 - RNA, 21 nt, Human
uggcaagccugguucugggcg

SEQ ID NO: 1251623 - RNA, 24 nt, Human
uggcugagugcgacagcucaugcc

SEQ ID NO: 1251624 - RNA, 24 nt, Human
ugggaggccaagguaggcagauca

SEQ ID NO: 1251625 - RNA, 20 nt, Human
ugggagugacuggcguaacu

SEQ ID NO: 1251626 - RNA, 19 nt, Human
ugggcuguuuacugccugu

SEQ ID NO: 1251627 - RNA, 18 nt, Human
uguggcaagccugguucu

SEQ ID NO: 1251628 - RNA, 22 nt, Human
uuccacccgagacacaagcaga

SEQ ID NO: 1251629 - RNA, 24 nt, Human
uuccucugagcagucucauaauua

SEQ ID NO: 1251630 - RNA, 23 nt, Human
uuggcugagugcgacagcucaug

SEQ ID NO: 1251631 - RNA, 24 nt, Human
agggcaggggugugaugaagugga

SEQ ID NO: 1251632 - RNA, 22 nt, Human
aguggacaccaagugcucugag

SEQ ID NO: 1251633 - RNA, 21 nt, Human
caagugcucugaggagcagug

SEQ ID NO: 1251634 - RNA, 20 nt, Human
caccaagugcucugaggagc

SEQ ID NO: 1251635 - RNA, 28 nt, Human
cccauagaaccugccuguagcccccgga

SEQ ID NO: 1251636 - RNA, 23 nt, Human
cccauagaaccugccuguagccu

SEQ ID NO: 1251637 - RNA, 19 nt, Human
cccccggauccugccggcc

SEQ ID NO: 1251638 - RNA, 22 nt, Human
cccccggauccugccggcccag

SEQ ID NO: 1251639 - RNA, 19 nt, Human
ccccggauccugccggccc

SEQ ID NO: 1251640 - RNA, 22 nt, Human
ccugccggcccagggcaggggu

SEQ ID NO: 1251641 - RNA, 22 nt, Human
cucugaggagcagugugaggga

SEQ ID NO: 1251642 - RNA, 21 nt, Human
uagaaccugccuguagccccc

SEQ ID NO: 1251643 - RNA, 18 nt, Human
uagcccccggauccugcc

SEQ ID NO: 1251644 - RNA, 23 nt, Human
uagcccccggauccugccggccc

SEQ ID NO: 1251645 - RNA, 20 nt, Human
ugccuguagcccccggaucc

SEQ ID NO: 1251646 - RNA, 24 nt, Human
ugcucugaggagcagugugaggga

SEQ ID NO: 1251647 - RNA, 22 nt, Human
aaaacaucuuugcccuccccuu

SEQ ID NO: 1251648 - RNA, 23 nt, Human
aaaacaucuuugcccuccccuug

SEQ ID NO: 1251649 - RNA, 19 nt, Human
aaaauaaucccguccuuca

SEQ ID NO: 1251650 - RNA, 20 nt, Human
agagguuuucuagcuggugc

SEQ ID NO: 1251651 - RNA, 21 nt, Human
agcugcggagcucugccuccu

SEQ ID NO: 1251652 - RNA, 21 nt, Human
agcuggugccaguucuacacg

SEQ ID NO: 1251653 - RNA, 22 nt, Human
aggggcccuuguugaacgcgug

SEQ ID NO: 1251654 - RNA, 21 nt, Human
caagagccuguaggaggggcc

SEQ ID NO: 1251655 - RNA, 24 nt, Human
caccgggcuguggcggaagggauc

SEQ ID NO: 1251656 - RNA, 22 nt, Human
cagcugcggagcucugccuccu

SEQ ID NO: 1251657 - RNA, 27 nt, Human
caggacuaguaaaacaucuuugcccuc

SEQ ID NO: 1251658 - RNA, 19 nt, Human
ccuugaggauguuggagag

SEQ ID NO: 1251659 - RNA, 20 nt, Human
cggaagggaucaaggccgua

SEQ ID NO: 1251660 - RNA, 23 nt, Human
cggagcucugccuccuucuggga

SEQ ID NO: 1251661 - RNA, 20 nt, Human
cggauggagaggccagugaa

SEQ ID NO: 1251662 - RNA, 19 nt, Human
cggggcggauggagaggcc

SEQ ID NO: 1251663 - RNA, 20 nt, Human
cucaggacugagccaccggg

SEQ ID NO: 1251664 - RNA, 18 nt, Human
cuuggggacugagcccgg

SEQ ID NO: 1251665 - RNA, 20 nt, Human
gagcuuacggcgagagccaa

SEQ ID NO: 1251666 - RNA, 21 nt, Human
gcggauggagaggccagugaa

SEQ ID NO: 1251667 - RNA, 20 nt, Human
gcuggcauguccaggcugug

SEQ ID NO: 1251668 - RNA, 20 nt, Human
gggcggauggagaggccagu

SEQ ID NO: 1251669 - RNA, 23 nt, Human
guaaaacaucuuugcccuccccu

SEQ ID NO: 1251670 - RNA, 18 nt, Human
uaaaacaucuuugcccuc

SEQ ID NO: 1251671 - RNA, 23 nt, Human
uaaaauaaucccguccuucaggc

SEQ ID NO: 1251672 - RNA, 19 nt, Human
uauccugaugcguguaggg

SEQ ID NO: 1251673 - RNA, 24 nt, Human
ugaacagaagccuguucuggacgu

SEQ ID NO: 1251674 - RNA, 23 nt, Human
ugagacaccaacaggacuaguaa

SEQ ID NO: 1251675 - RNA, 19 nt, Human
ugagccaccgggcuguggc

SEQ ID NO: 1251676 - RNA, 22 nt, Human
ugaggauguuggagagguuuuc

SEQ ID NO: 1251677 - RNA, 20 nt, Human
uggcggaagggaucaaggcc

SEQ ID NO: 1251678 - RNA, 18 nt, Human
gcggugcugcuucucugg

SEQ ID NO: 1251679 - RNA, 18 nt, Human
aacgcucacaaugagggc

SEQ ID NO: 1251680 - RNA, 22 nt, Human
acagaaaacauaucuggagcag

SEQ ID NO: 1251681 - RNA, 21 nt, Human
agccccuagcaggaacaacuu

SEQ ID NO: 1251682 - RNA, 20 nt, Human
cacacuaaaacguuuacucc

SEQ ID NO: 1251683 - RNA, 25 nt, Human
caccaggaaauaaauacugaaccac

SEQ ID NO: 1251684 - RNA, 20 nt, Human
cacucugccaguccauucuu

SEQ ID NO: 1251685 - RNA, 20 nt, Human
cacucugccaguccauucuu

SEQ ID NO: 1251686 - RNA, 19 nt, Human
cagggacugcuuguaagca

SEQ ID NO: 1251687 - RNA, 19 nt, Human
ccagccccuagcaggaaca

SEQ ID NO: 1251688 - RNA, 22 nt, Human
ccagccuccaacaacgcucaca

SEQ ID NO: 1251689 - RNA, 23 nt, Human
ccagccuccaacaacgcucacaa

SEQ ID NO: 1251690 - RNA, 21 nt, Human
ccaguccauucuuuccagccc

SEQ ID NO: 1251691 - RNA, 21 nt, Human
ccauucuuuccagccccuagc

SEQ ID NO: 1251692 - RNA, 21 nt, Human
cccaggccugugugccccgac

SEQ ID NO: 1251693 - RNA, 23 nt, Human
ccccgacaggcuaaaccuccgcc

SEQ ID NO: 1251694 - RNA, 27 nt, Human
ccgcccaggggcuucccgaugucggcu

SEQ ID NO: 1251695 - RNA, 18 nt, Human
gcaauuccuuugagaagc

SEQ ID NO: 1251696 - RNA, 20 nt, Human
gcacagaaaacauaucugga

SEQ ID NO: 1251697 - RNA, 20 nt, Human
ggaaaggccucucccaggga

SEQ ID NO: 1251698 - RNA, 20 nt, Human
ggccugcgcuccagucuuac

SEQ ID NO: 1251699 - RNA, 18 nt, Human
ggcucagcuggaaggccc

SEQ ID NO: 1251700 - RNA, 21 nt, Human
ggggacgcagccagaaaugga

SEQ ID NO: 1251701 - RNA, 18 nt, Human
uaucuggagcagucucca

SEQ ID NO: 1251702 - RNA, 21 nt, Human
uaucuggagcagucuccagga

SEQ ID NO: 1251703 - RNA, 19 nt, Human
uccacuuugggcagaagga

SEQ ID NO: 1251704 - RNA, 19 nt, Human
ugacagagccacuggacac

SEQ ID NO: 1251705 - RNA, 21 nt, Human
ugagaagccuggaggaagggc

SEQ ID NO: 1251706 - RNA, 22 nt, Human
ugagaagccuggaggaagggcu

SEQ ID NO: 1251707 - RNA, 23 nt, Human
ugccccgacaggcuaaaccuccg

SEQ ID NO: 1251708 - RNA, 23 nt, Human
uggguuuucggccugcagagcuc

SEQ ID NO: 1251709 - RNA, 21 nt, Human
uguaagcacagaaaacauauc

SEQ ID NO: 1251710 - RNA, 20 nt, Human
uucaagaccccugugacccu

SEQ ID NO: 1251711 - RNA, 19 nt, Human
uuccugcugauuuacaacu

SEQ ID NO: 1251712 - RNA, 19 nt, Human
uucggccugcagagcucgc

SEQ ID NO: 1251713 - RNA, 24 nt, Human
uugcccacucuuuuuaucaccaug

SEQ ID NO: 1251714 - RNA, 26 nt, Human
aaaaaaaaaaaaaaagccauuuagag

SEQ ID NO: 1251715 - RNA, 22 nt, Human
aaaaaaaaaaagccauuuagag

SEQ ID NO: 1251716 - RNA, 21 nt, Human
aaaaaagccauccaaucauag

SEQ ID NO: 1251717 - RNA, 23 nt, Human
aaaaacacaaaaggcagggugca

SEQ ID NO: 1251718 - RNA, 22 nt, Human
aaaaagccauccaaucauagug

SEQ ID NO: 1251719 - RNA, 18 nt, Human
aaaacagcaucguaccuu

SEQ ID NO: 1251720 - RNA, 21 nt, Human
aaacaaauagaaaaaaagcca

SEQ ID NO: 1251721 - RNA, 19 nt, Human
aaacaaauguggacaaagg

SEQ ID NO: 1251722 - RNA, 24 nt, Human
aaacacaauuauggugaaccacac

SEQ ID NO: 1251723 - RNA, 26 nt, Human
aaaccccagaaugucuuacccaaaau

SEQ ID NO: 1251724 - RNA, 22 nt, Human
aaacgggcagaaggaaacuuca

SEQ ID NO: 1251725 - RNA, 18 nt, Human
aaacuuucccuuguaacu

SEQ ID NO: 1251726 - RNA, 22 nt, Human
aagagaaaugaaaauauuucca

SEQ ID NO: 1251727 - RNA, 25 nt, Human
aagcaauccuccugccuuagccucc

SEQ ID NO: 1251728 - RNA, 22 nt, Human
aagucccacuauguugcccagg

SEQ ID NO: 1251729 - RNA, 18 nt, Human
aauuuuguuuuguuuugu

SEQ ID NO: 1251730 - RNA, 19 nt, Human
acuauguugcccagguugg

SEQ ID NO: 1251731 - RNA, 24 nt, Human
acuuacucuuaauacccauucaac

SEQ ID NO: 1251732 - RNA, 21 nt, Human
agaaaaucaguuauuuccaac

SEQ ID NO: 1251733 - RNA, 23 nt, Human
agaauccuuucucaugaaucucu

SEQ ID NO: 1251734 - RNA, 18 nt, Human
agagaugcuguucugcag

SEQ ID NO: 1251735 - RNA, 20 nt, Human
agccaaggauuauuaaacaa

SEQ ID NO: 1251736 - RNA, 21 nt, Human
agccuccugaguagcuggaac

SEQ ID NO: 1251737 - RNA, 19 nt, Human
aggcacgugccaccacacc

SEQ ID NO: 1251738 - RNA, 21 nt, Human
aggcugauuuauuuccuugau

SEQ ID NO: 1251739 - RNA, 21 nt, Human
agguggaggguggcggagggg

SEQ ID NO: 1251740 - RNA, 22 nt, Human
aguguuaaaacaccaaaaagaa

SEQ ID NO: 1251741 - RNA, 21 nt, Human
auguugcccagguuggagugc

SEQ ID NO: 1251742 - RNA, 23 nt, Human
caaaaacacaaaaggcagggugc

SEQ ID NO: 1251743 - RNA, 20 nt, Human
caaaacugacaaugcagcua

SEQ ID NO: 1251744 - RNA, 19 nt, Human
caaacacaauuauggugaa

SEQ ID NO: 1251745 - RNA, 27 nt, Human
caaacacaauuauggugaaccacacag

SEQ ID NO: 1251746 - RNA, 19 nt, Human
caaaggcacaauccaaaag

SEQ ID NO: 1251747 - RNA, 24 nt, Human
caaauuaauaacugcucacauuca

SEQ ID NO: 1251748 - RNA, 19 nt, Human
caacauaauacuacuuugu

SEQ ID NO: 1251749 - RNA, 25 nt, Human
caagaaaccccagaaugucuuaccc

SEQ ID NO: 1251750 - RNA, 22 nt, Human
caagcaauccuccugccuuagc

SEQ ID NO: 1251751 - RNA, 27 nt, Human
caagcaauccuccugccuuagccuccu

SEQ ID NO: 1251752 - RNA, 23 nt, Human
caccuggcuauguuuuuaaaaac

SEQ ID NO: 1251753 - RNA, 24 nt, Human
cagccugggcucaagcaauccucc

SEQ ID NO: 1251754 - RNA, 18 nt, Human
cagugucuuuuuuuuuuu

SEQ ID NO: 1251755 - RNA, 19 nt, Human
cauccaaucauagugcuua

SEQ ID NO: 1251756 - RNA, 21 nt, Human
ccaauuacaaugucaauguug

SEQ ID NO: 1251757 - RNA, 22 nt, Human
ccacuauguugcccagguugga

SEQ ID NO: 1251758 - RNA, 21 nt, Human
ccccauaccccaaaacugaca

SEQ ID NO: 1251759 - RNA, 21 nt, Human
ccccccauaccccaaaacuga

SEQ ID NO: 1251760 - RNA, 24 nt, Human
ccccccauaccccaaaacugacaa

SEQ ID NO: 1251761 - RNA, 23 nt, Human
ccugccuuagccuccugaguagc

SEQ ID NO: 1251762 - RNA, 20 nt, Human
ccugggcucaagcaauccuc

SEQ ID NO: 1251763 - RNA, 22 nt, Human
cgagagcgguucggagguggag

SEQ ID NO: 1251764 - RNA, 18 nt, Human
cggcccggccgggagccg

SEQ ID NO: 1251765 - RNA, 24 nt, Human
cucaagcaauccuccugccuuagc

SEQ ID NO: 1251766 - RNA, 23 nt, Human
cugccuuagccuccugaguagcu

SEQ ID NO: 1251767 - RNA, 25 nt, Human
cuuuaaaaaaaaaaaaaaagccauu

SEQ ID NO: 1251768 - RNA, 21 nt, Human
cuuucauuuuaagggucuuau

SEQ ID NO: 1251769 - RNA, 20 nt, Human
cuuuucucaacucaugacaa

SEQ ID NO: 1251770 - RNA, 24 nt, Human
gacaagauucaagaaaccccagaa

SEQ ID NO: 1251771 - RNA, 22 nt, Human
gaucuauggaaucuguuuccuu

SEQ ID NO: 1251772 - RNA, 19 nt, Human
gcagaaggaaacuucaccc

SEQ ID NO: 1251773 - RNA, 21 nt, Human
gcagaaggaaacuucacccaa

SEQ ID NO: 1251774 - RNA, 18 nt, Human
gccgcggcccggccggga

SEQ ID NO: 1251775 - RNA, 18 nt, Human
ggagaaacauugacuuag

SEQ ID NO: 1251776 - RNA, 22 nt, Human
gggcucaagcaauccuccugcc

SEQ ID NO: 1251777 - RNA, 21 nt, Human
ggucggcggccgcggcccggc

SEQ ID NO: 1251778 - RNA, 19 nt, Human
gguugacauuuauuagauc

SEQ ID NO: 1251779 - RNA, 20 nt, Human
uaaaaaaaaaaaaaaagcca

SEQ ID NO: 1251780 - RNA, 22 nt, Human
uaaaauauaauucugggaagaa

SEQ ID NO: 1251781 - RNA, 23 nt, Human
uaaaaugucaccaaauuaguuua

SEQ ID NO: 1251782 - RNA, 21 nt, Human
uaacucaauccaaauuaauaa

SEQ ID NO: 1251783 - RNA, 24 nt, Human
uaacugcucacauucacaagcaaa

SEQ ID NO: 1251784 - RNA, 23 nt, Human
uaaguuuuaaacaaauguggaca

SEQ ID NO: 1251785 - RNA, 18 nt, Human
uaauaaacaacaaacugc

SEQ ID NO: 1251786 - RNA, 19 nt, Human
uacaaugucaauguugguu

SEQ ID NO: 1251787 - RNA, 21 nt, Human
uagaaaaaaagccauccaauc

SEQ ID NO: 1251788 - RNA, 24 nt, Human
uagcaauguaauuuugcauuuugg

SEQ ID NO: 1251789 - RNA, 22 nt, Human
uagccaaggauuauuaaacaaa

SEQ ID NO: 1251790 - RNA, 19 nt, Human
uagccuccugaguagcugg

SEQ ID NO: 1251791 - RNA, 23 nt, Human
uagugcuuaaguguaauuuuguu

SEQ ID NO: 1251792 - RNA, 19 nt, Human
uaguuuaaaacauuacuca

SEQ ID NO: 1251793 - RNA, 21 nt, Human
uauaauuaagcauucacauac

SEQ ID NO: 1251794 - RNA, 18 nt, Human
uauguugcccagguugga

SEQ ID NO: 1251795 - RNA, 24 nt, Human
uauguugcccagguuggagugcag

SEQ ID NO: 1251796 - RNA, 23 nt, Human
uauuaaacaaauagaaaaaaagc

SEQ ID NO: 1251797 - RNA, 19 nt, Human
ucaacucaugacaaaggca

SEQ ID NO: 1251798 - RNA, 30 nt, Human
ucaagaaaccccagaaugucuuacccaaaa

SEQ ID NO: 1251799 - RNA, 21 nt, Human
ucaaggaguuuacaaaaacac

SEQ ID NO: 1251800 - RNA, 19 nt, Human
ucaugugaaaauaaaugcu

SEQ ID NO: 1251801 - RNA, 24 nt, Human
ucauuaagguauuaagcuucagug

SEQ ID NO: 1251802 - RNA, 19 nt, Human
ucccacuauguugcccagg

SEQ ID NO: 1251803 - RNA, 24 nt, Human
ucccacuauguugcccagguugga

SEQ ID NO: 1251804 - RNA, 26 nt, Human
ucccacuauguugcccagguuggagu

SEQ ID NO: 1251805 - RNA, 26 nt, Human
uccuccugccuuagccuccugaguag

SEQ ID NO: 1251806 - RNA, 20 nt, Human
uccuuucucaugaaucucug

SEQ ID NO: 1251807 - RNA, 18 nt, Human
ucuggagaaacauugacu

SEQ ID NO: 1251808 - RNA, 20 nt, Human
ucuggagaaacauugacuua

SEQ ID NO: 1251809 - RNA, 20 nt, Human
ucuuuaaaaaaaaaaaaaaa

SEQ ID NO: 1251810 - RNA, 26 nt, Human
ucuuuuggcagacaaaaucaugcuuc

SEQ ID NO: 1251811 - RNA, 23 nt, Human
ugaaaauaaaugcuuuuucuucc

SEQ ID NO: 1251812 - RNA, 19 nt, Human
ugcacauuacacucacauu

SEQ ID NO: 1251813 - RNA, 18 nt, Human
ugcccagguuggagugca

SEQ ID NO: 1251814 - RNA, 19 nt, Human
ugcccagguuggagugcag

SEQ ID NO: 1251815 - RNA, 24 nt, Human
ugccuuagccuccugaguagcugg

SEQ ID NO: 1251816 - RNA, 24 nt, Human
uggaacuaaaggcacgugccacca

SEQ ID NO: 1251817 - RNA, 23 nt, Human
uggacaagauucaagaaacccca

SEQ ID NO: 1251818 - RNA, 24 nt, Human
uggagugcaguagcuagucacaaa

SEQ ID NO: 1251819 - RNA, 19 nt, Human
ugggaagaaaccaagaaau

SEQ ID NO: 1251820 - RNA, 21 nt, Human
ugggaagaaaccaagaaauua

SEQ ID NO: 1251821 - RNA, 24 nt, Human
ugggcucaagcaauccuccugccu

SEQ ID NO: 1251822 - RNA, 22 nt, Human
uguaacuuuucuuauagcaaug

SEQ ID NO: 1251823 - RNA, 19 nt, Human
uguaguacauuuuuaucca

SEQ ID NO: 1251824 - RNA, 23 nt, Human
uguuuuguuuuguuuuagagaug

SEQ ID NO: 1251825 - RNA, 23 nt, Human
uuaaacaaauguggacaaaggac

SEQ ID NO: 1251826 - RNA, 22 nt, Human
uuaaaucauuugugucuucaaa

SEQ ID NO: 1251827 - RNA, 23 nt, Human
uuaacauuacaauaaguuuuaaa

SEQ ID NO: 1251828 - RNA, 19 nt, Human
uuacuuuuccauuucaguu

SEQ ID NO: 1251829 - RNA, 22 nt, Human
uuaguccuaaagcagcauguua

SEQ ID NO: 1251830 - RNA, 24 nt, Human
uuauuagaucuggauuucucaaag

SEQ ID NO: 1251831 - RNA, 23 nt, Human
uucaaaaagacugauauaaugaa

SEQ ID NO: 1251832 - RNA, 19 nt, Human
uucaacacugucucauuuu

SEQ ID NO: 1251833 - RNA, 20 nt, Human
uucacaagcaaaaaauacua

SEQ ID NO: 1251834 - RNA, 21 nt, Human
uuccuugaugggaauuuuugg

SEQ ID NO: 1251835 - RNA, 24 nt, Human
uugaauauauuuucauuccagaaa

SEQ ID NO: 1251836 - RNA, 24 nt, Human
uugcccagguuggagugcaguagc

SEQ ID NO: 1251837 - RNA, 23 nt, Human
uuguaacuuuucuuauagcaaug

SEQ ID NO: 1251838 - RNA, 23 nt, Human
uuuaaaaaaaaaaaaaaagccau

SEQ ID NO: 1251839 - RNA, 19 nt, Human
aagaauugccucacuggug

SEQ ID NO: 1251840 - RNA, 21 nt, Human
cggcagagcugagaggagagg

SEQ ID NO: 1251841 - RNA, 22 nt, Human
cugguggugauuauggccuugc

SEQ ID NO: 1251842 - RNA, 18 nt, Human
gaaggacggcagagcuga

SEQ ID NO: 1251843 - RNA, 20 nt, Human
ggccaggaauucuuagguac

SEQ ID NO: 1251844 - RNA, 22 nt, Human
ugagaggagaggaaagaaaggc

SEQ ID NO: 1251845 - RNA, 23 nt, Human
ugauugcucuagggguucugaaa

SEQ ID NO: 1251846 - RNA, 21 nt, Human
ugcggaaggacggcagagcug

SEQ ID NO: 1251847 - RNA, 18 nt, Human
uugccucacuggugguga

SEQ ID NO: 1251848 - RNA, 21 nt, Human
aacaggucggccaaggccagg

SEQ ID NO: 1251849 - RNA, 20 nt, Human
aggcagccaagaugggcaau

SEQ ID NO: 1251850 - RNA, 18 nt, Human
caggucggccaaggccag

SEQ ID NO: 1251851 - RNA, 20 nt, Human
ucggugacaguggcugacuc

SEQ ID NO: 1251852 - RNA, 19 nt, Human
aguucucaaguucuugcuc

SEQ ID NO: 1251853 - RNA, 19 nt, Human
auagagcagaaccaaaccc

SEQ ID NO: 1251854 - RNA, 20 nt, Human
uagagcagaaccaaacccug

SEQ ID NO: 1251855 - RNA, 22 nt, Human
uagagcagaaccaaacccuggc

SEQ ID NO: 1251856 - RNA, 20 nt, Human
uccacagugcccugcugccu

SEQ ID NO: 1251857 - RNA, 24 nt, Human
uggaagagauagagcagaaccaaa

SEQ ID NO: 1251858 - RNA, 20 nt, Human
uuuccacagugcccugcugc

SEQ ID NO: 1251859 - RNA, 21 nt, Human
ggggcugugggugucgggagc

SEQ ID NO: 1251860 - RNA, 20 nt, Human
ugaaggggcugcuccgaaug

SEQ ID NO: 1251861 - RNA, 24 nt, Human
uuaggagaaaguaggggcuguggg

SEQ ID NO: 1251862 - RNA, 25 nt, Human
cagcaacauccacaucagcagcaac

SEQ ID NO: 1251863 - RNA, 20 nt, Human
ccugcuccuucucccccucc

SEQ ID NO: 1251864 - RNA, 19 nt, Human
ccuggguuacaucagcaac

SEQ ID NO: 1251865 - RNA, 20 nt, Human
ccuucucccccuccucauua

SEQ ID NO: 1251866 - RNA, 20 nt, Human
gcagcaacauacugucccug

SEQ ID NO: 1251867 - RNA, 25 nt, Human
uacaucagcaacauccacaucagca

SEQ ID NO: 1251868 - RNA, 19 nt, Human
ucugaaggaccuggccagc

SEQ ID NO: 1251869 - RNA, 25 nt, Human
ugcuccuucucccccuccucauuaa

SEQ ID NO: 1251870 - RNA, 19 nt, Human
cccgcagacacagcagagc

SEQ ID NO: 1251871 - RNA, 19 nt, Human
cccgcagacacagcagagc

SEQ ID NO: 1251872 - RNA, 19 nt, Human
cgcagacacagcagagcca

SEQ ID NO: 1251873 - RNA, 23 nt, Human
ggcuuugagugugcuccaagcac

SEQ ID NO: 1251874 - RNA, 24 nt, Human
aacagcugccaggcacccucuacg

SEQ ID NO: 1251875 - RNA, 26 nt, Human
aagaacccacaggguaggccuuggcc

SEQ ID NO: 1251876 - RNA, 21 nt, Human
aaucaccaauggcaaaaugac

SEQ ID NO: 1251877 - RNA, 22 nt, Human
acagccagcagcggccccgggc

SEQ ID NO: 1251878 - RNA, 22 nt, Human
acagccagcagcggccccgggc

SEQ ID NO: 1251879 - RNA, 22 nt, Human
accccgcaaaccuguggcugcc

SEQ ID NO: 1251880 - RNA, 22 nt, Human
acccugcaaaccuguggcugcc

SEQ ID NO: 1251881 - RNA, 22 nt, Human
acgccgucaccuuggccagccc

SEQ ID NO: 1251882 - RNA, 28 nt, Human
agaccagggccauggcuagacuagaaga

SEQ ID NO: 1251883 - RNA, 19 nt, Human
agacggccaagggccuccu

SEQ ID NO: 1251884 - RNA, 19 nt, Human
agagcucagcuggaacugc

SEQ ID NO: 1251885 - RNA, 21 nt, Human
agcagacuucacuggggccug

SEQ ID NO: 1251886 - RNA, 20 nt, Human
agcagguacugcgcuugggg

SEQ ID NO: 1251887 - RNA, 18 nt, Human
aggagggcaaggacccug

SEQ ID NO: 1251888 - RNA, 21 nt, Human
aggcagccaugccagcguuuc

SEQ ID NO: 1251889 - RNA, 20 nt, Human
aggcagcucccagccagagg

SEQ ID NO: 1251890 - RNA, 20 nt, Human
agggccauggcuagacuaga

SEQ ID NO: 1251891 - RNA, 18 nt, Human
aggggugggauggaggca

SEQ ID NO: 1251892 - RNA, 21 nt, Human
aggguucuccacgcucuccac

SEQ ID NO: 1251893 - RNA, 23 nt, Human
aggucccccagccgggucagcuc

SEQ ID NO: 1251894 - RNA, 21 nt, Human
agucucuggagauggcagccc

SEQ ID NO: 1251895 - RNA, 18 nt, Human
aucucaaucacuacagca

SEQ ID NO: 1251896 - RNA, 20 nt, Human
aucuggacagcugaucuggg

SEQ ID NO: 1251897 - RNA, 20 nt, Human
caacagugcccccguguggc

SEQ ID NO: 1251898 - RNA, 22 nt, Human
cacacccucgucaaagccaucu

SEQ ID NO: 1251899 - RNA, 19 nt, Human
caccccaaggcagcagagu

SEQ ID NO: 1251900 - RNA, 25 nt, Human
caccccgcaaaccuguggcugccca

SEQ ID NO: 1251901 - RNA, 19 nt, Human
cacccucuacgaucccacu

SEQ ID NO: 1251902 - RNA, 20 nt, Human
cacccuugcccugggaaccu

SEQ ID NO: 1251903 - RNA, 23 nt, Human
cacccuugcccugggaaccugca

SEQ ID NO: 1251904 - RNA, 18 nt, Human
caccugagcauccacagc

SEQ ID NO: 1251905 - RNA, 22 nt, Human
caccuuggccagcaccgggccc

SEQ ID NO: 1251906 - RNA, 23 nt, Human
cacgccgucaccuuggccagccc

SEQ ID NO: 1251907 - RNA, 21 nt, Human
cagacaggcucggacacagcg

SEQ ID NO: 1251908 - RNA, 18 nt, Human
cagauccacgcugugcuc

SEQ ID NO: 1251909 - RNA, 23 nt, Human
cagccccgggcccaggacugucc

SEQ ID NO: 1251910 - RNA, 18 nt, Human
cagggccauggcuagacu

SEQ ID NO: 1251911 - RNA, 26 nt, Human
cagguacugcgcuuggggcucugccc

SEQ ID NO: 1251912 - RNA, 19 nt, Human
caguggcugucggcuccug

SEQ ID NO: 1251913 - RNA, 23 nt, Human
cauccauuguccuggccugcauu

SEQ ID NO: 1251914 - RNA, 22 nt, Human
caugccccccaaggccucacug

SEQ ID NO: 1251915 - RNA, 24 nt, Human
cauuauggggcucccagaccaggg

SEQ ID NO: 1251916 - RNA, 25 nt, Human
cauuccacucccucuggggcuccuc

SEQ ID NO: 1251917 - RNA, 21 nt, Human
ccacaccaucaccuuggggug

SEQ ID NO: 1251918 - RNA, 21 nt, Human
ccacacggcaccugcuggcca

SEQ ID NO: 1251919 - RNA, 22 nt, Human
ccacagccagcagcggccccgg

SEQ ID NO: 1251920 - RNA, 22 nt, Human
ccacagccagcagcggccccgg

SEQ ID NO: 1251921 - RNA, 24 nt, Human
ccagcaccgggcccaggacugucc

SEQ ID NO: 1251922 - RNA, 23 nt, Human
ccagccacccuguccgaagggga

SEQ ID NO: 1251923 - RNA, 24 nt, Human
ccagccgcgagcccaggacugucc

SEQ ID NO: 1251924 - RNA, 21 nt, Human
cccacgcacggucagcgcccg

SEQ ID NO: 1251925 - RNA, 23 nt, Human
cccagccgggucagcuccuccug

SEQ ID NO: 1251926 - RNA, 25 nt, Human
ccccaacagcugccaggcacccucu

SEQ ID NO: 1251927 - RNA, 23 nt, Human
ccccaggggcugccaggggcugu

SEQ ID NO: 1251928 - RNA, 25 nt, Human
ccccaggggcugccaggggcugucu

SEQ ID NO: 1251929 - RNA, 18 nt, Human
ccccauuccacucccucu

SEQ ID NO: 1251930 - RNA, 19 nt, Human
cccccaacagcugccaggc

SEQ ID NO: 1251931 - RNA, 22 nt, Human
cccccaggccggcugucccuac

SEQ ID NO: 1251932 - RNA, 20 nt, Human
cccccggggaacgccugucc

SEQ ID NO: 1251933 - RNA, 21 nt, Human
ccccgggcccaggacuguccc

SEQ ID NO: 1251934 - RNA, 24 nt, Human
ccccgugcaugccccccaaggccu

SEQ ID NO: 1251935 - RNA, 21 nt, Human
ccccguguggccgcgaggagc

SEQ ID NO: 1251936 - RNA, 21 nt, Human
cccgggcccaggacugucccc

SEQ ID NO: 1251937 - RNA, 21 nt, Human
cccugagcuccaacagugccc

SEQ ID NO: 1251938 - RNA, 22 nt, Human
cccugagcuccaacagugcccc

SEQ ID NO: 1251939 - RNA, 23 nt, Human
cccugcaaaccuguggcugccag

SEQ ID NO: 1251940 - RNA, 19 nt, Human
cccuggucagcaugcgugg

SEQ ID NO: 1251941 - RNA, 21 nt, Human
ccgcgaggagcgcugcagggg

SEQ ID NO: 1251942 - RNA, 23 nt, Human
ccggucuucccugcuggcugugg

SEQ ID NO: 1251943 - RNA, 19 nt, Human
ccucagaugaagucaggug

SEQ ID NO: 1251944 - RNA, 21 nt, Human
ccuccagacggccaagggccu

SEQ ID NO: 1251945 - RNA, 20 nt, Human
ccuccgcagacaggcucgga

SEQ ID NO: 1251946 - RNA, 22 nt, Human
ccugcaggagcucguucuccuc

SEQ ID NO: 1251947 - RNA, 24 nt, Human
cgccgucaccuuggccagccccgg

SEQ ID NO: 1251948 - RNA, 19 nt, Human
cggaaaggaccaccagcca

SEQ ID NO: 1251949 - RNA, 24 nt, Human
cggaaaggaccaccagccacccug

SEQ ID NO: 1251950 - RNA, 25 nt, Human
cggagucugggccuccuggggccuc

SEQ ID NO: 1251951 - RNA, 21 nt, Human
cgggcagagcagacuucacug

SEQ ID NO: 1251952 - RNA, 23 nt, Human
cucgcucggcgcuggccugggcc

SEQ ID NO: 1251953 - RNA, 22 nt, Human
cucgggccacaguggcugucgg

SEQ ID NO: 1251954 - RNA, 22 nt, Human
cugagcuccaacagugcccccg

SEQ ID NO: 1251955 - RNA, 21 nt, Human
cugcaggagcucguucuccuc

SEQ ID NO: 1251956 - RNA, 22 nt, Human
cugcaggagcucguucuccucu

SEQ ID NO: 1251957 - RNA, 20 nt, Human
cugcucccugcucacucugg

SEQ ID NO: 1251958 - RNA, 20 nt, Human
cugcugcccaucuggacagc

SEQ ID NO: 1251959 - RNA, 19 nt, Human
cuggcacccgccugcuccc

SEQ ID NO: 1251960 - RNA, 18 nt, Human
cuggcccagccccgugca

SEQ ID NO: 1251961 - RNA, 21 nt, Human
cuggcccagccccgugcaugc

SEQ ID NO: 1251962 - RNA, 23 nt, Human
cugucuuuccuguuuaucccugu

SEQ ID NO: 1251963 - RNA, 21 nt, Human
cuuuccagggcgcgagggcug

SEQ ID NO: 1251964 - RNA, 21 nt, Human
gagccucgguggucuccagcc

SEQ ID NO: 1251965 - RNA, 22 nt, Human
gagcucguucuccucuugcacc

SEQ ID NO: 1251966 - RNA, 21 nt, Human
gaggagcgcugcagggggcug

SEQ ID NO: 1251967 - RNA, 23 nt, Human
gaggagcgcugcagggggcugcc

SEQ ID NO: 1251968 - RNA, 19 nt, Human
gagggcuggcccagccccg

SEQ ID NO: 1251969 - RNA, 22 nt, Human
gaguccccccaggaugccuuuc

SEQ ID NO: 1251970 - RNA, 21 nt, Human
gaguuuccugaacguccacag

SEQ ID NO: 1251971 - RNA, 18 nt, Human
gcaaugggagggaagcag

SEQ ID NO: 1251972 - RNA, 26 nt, Human
gcacgggggugggcgaggccugccgg

SEQ ID NO: 1251973 - RNA, 19 nt, Human
gcagcggccccgggcucuc

SEQ ID NO: 1251974 - RNA, 19 nt, Human
gcagcggccccgggcucuc

SEQ ID NO: 1251975 - RNA, 18 nt, Human
gcaggguucuccacgcuc

SEQ ID NO: 1251976 - RNA, 22 nt, Human
gccagccgcgagcccaggacug

SEQ ID NO: 1251977 - RNA, 19 nt, Human
gcccggucuucccugcugg

SEQ ID NO: 1251978 - RNA, 19 nt, Human
gccuuuccagggcgcgagg

SEQ ID NO: 1251979 - RNA, 22 nt, Human
gcgcuuggggcucugcccuguc

SEQ ID NO: 1251980 - RNA, 23 nt, Human
gcucagcuggaacugccucaggu

SEQ ID NO: 1251981 - RNA, 19 nt, Human
gcucggagucugggccucc

SEQ ID NO: 1251982 - RNA, 23 nt, Human
gcucggagucugggccuccuggg

SEQ ID NO: 1251983 - RNA, 24 nt, Human
gcucggagucugggccuccugggg

SEQ ID NO: 1251984 - RNA, 20 nt, Human
gcuggcaggagucccugccu

SEQ ID NO: 1251985 - RNA, 21 nt, Human
gcuucgguucugcugcccauc

SEQ ID NO: 1251986 - RNA, 21 nt, Human
ggaagcagggccaugccugcc

SEQ ID NO: 1251987 - RNA, 18 nt, Human
ggaccuggagcccaggcg

SEQ ID NO: 1251988 - RNA, 24 nt, Human
ggagcgcugcagggggcugccagg

SEQ ID NO: 1251989 - RNA, 23 nt, Human
ggaggcagcucccagccagaggg

SEQ ID NO: 1251990 - RNA, 21 nt, Human
ggcagccuccagacggccaac

SEQ ID NO: 1251991 - RNA, 23 nt, Human
ggccggagccuggcugggccccc

SEQ ID NO: 1251992 - RNA, 20 nt, Human
ggcgucuggcacccgccugc

SEQ ID NO: 1251993 - RNA, 18 nt, Human
ggcucugcccugucuugg

SEQ ID NO: 1251994 - RNA, 21 nt, Human
ggcugucggcuccuguacccc

SEQ ID NO: 1251995 - RNA, 21 nt, Human
gggccaugccugccaccccca

SEQ ID NO: 1251996 - RNA, 22 nt, Human
ggguucuccacgcucuccacuu

SEQ ID NO: 1251997 - RNA, 18 nt, Human
gguggcuccucacucagg

SEQ ID NO: 1251998 - RNA, 19 nt, Human
uagaagaacccacagggua

SEQ ID NO: 1251999 - RNA, 19 nt, Human
uagacuagaagaacccaca

SEQ ID NO: 1252000 - RNA, 22 nt, Human
ucacuacagcaaaaauaacagg

SEQ ID NO: 1252001 - RNA, 21 nt, Human
ucacuggggccugcguagccu

SEQ ID NO: 1252002 - RNA, 19 nt, Human
ucagaagacugagagcuca

SEQ ID NO: 1252003 - RNA, 20 nt, Human
ucagaagacuuggagggaaa

SEQ ID NO: 1252004 - RNA, 21 nt, Human
ucagcgcccggucuucccugc

SEQ ID NO: 1252005 - RNA, 21 nt, Human
ucaguggaaaaugaaagaugu

SEQ ID NO: 1252006 - RNA, 24 nt, Human
uccacccuugcccugggaaccugc

SEQ ID NO: 1252007 - RNA, 21 nt, Human
ucccccagccgggucagcucc

SEQ ID NO: 1252008 - RNA, 25 nt, Human
ucccccagccgggucagcuccuccu

SEQ ID NO: 1252009 - RNA, 18 nt, Human
ucccugagcuccaacagu

SEQ ID NO: 1252010 - RNA, 19 nt, Human
ucccugcucacucuggggu

SEQ ID NO: 1252011 - RNA, 19 nt, Human
ucccuucccugagcuccaa

SEQ ID NO: 1252012 - RNA, 21 nt, Human
ucccuucccugagcuccaaca

SEQ ID NO: 1252013 - RNA, 20 nt, Human
uccugagugaggggugggau

SEQ ID NO: 1252014 - RNA, 25 nt, Human
uccuggggccucagaugaagucagg

SEQ ID NO: 1252015 - RNA, 26 nt, Human
uccuggggccucagaugaagucaggu

SEQ ID NO: 1252016 - RNA, 21 nt, Human
ucgggccacaguggcugucgg

SEQ ID NO: 1252017 - RNA, 18 nt, Human
ucgguggucuccagccgg

SEQ ID NO: 1252018 - RNA, 25 nt, Human
ucuccaccccgcaaaccuguggcug

SEQ ID NO: 1252019 - RNA, 27 nt, Human
ucuccaccccgcaaaccuguggcugcc

SEQ ID NO: 1252020 - RNA, 25 nt, Human
ucuccacccugcaaaccuguggcug

SEQ ID NO: 1252021 - RNA, 18 nt, Human
ucucuggagauggcagcc

SEQ ID NO: 1252022 - RNA, 23 nt, Human
ugaaagauguguguccacgagag

SEQ ID NO: 1252023 - RNA, 18 nt, Human
ugaccacacggcaccugc

SEQ ID NO: 1252024 - RNA, 20 nt, Human
ugaccuccgcagcugagccu

SEQ ID NO: 1252025 - RNA, 21 nt, Human
ugacucagaacaaggaacucg

SEQ ID NO: 1252026 - RNA, 20 nt, Human
ugagccucgguggucuccag

SEQ ID NO: 1252027 - RNA, 21 nt, Human
ugagcugggaccuccuugagc

SEQ ID NO: 1252028 - RNA, 21 nt, Human
ugaggggugggauggaggcag

SEQ ID NO: 1252029 - RNA, 23 nt, Human
ugccaggcacccucuacgauccc

SEQ ID NO: 1252030 - RNA, 22 nt, Human
ugccagggcagggcagcuuccc

SEQ ID NO: 1252031 - RNA, 19 nt, Human
ugccccagccgaggucagc

SEQ ID NO: 1252032 - RNA, 25 nt, Human
ugccccagccgaggucagcaggagc

SEQ ID NO: 1252033 - RNA, 20 nt, Human
ugcuccagcucugaccuccg

SEQ ID NO: 1252034 - RNA, 19 nt, Human
ugcucuuguagaacggagg

SEQ ID NO: 1252035 - RNA, 21 nt, Human
uggaaucggaaaggaccacca

SEQ ID NO: 1252036 - RNA, 21 nt, Human
uggaugccagggcagggcagc

SEQ ID NO: 1252037 - RNA, 22 nt, Human
uggcagcccccaacagcugcca

SEQ ID NO: 1252038 - RNA, 22 nt, Human
uggccugcauuggaggcuucug

SEQ ID NO: 1252039 - RNA, 24 nt, Human
ugggaccuccuugagcugaugcug

SEQ ID NO: 1252040 - RNA, 18 nt, Human
ugggagggaagcagggcc

SEQ ID NO: 1252041 - RNA, 18 nt, Human
ugggauggaggcagcucc

SEQ ID NO: 1252042 - RNA, 18 nt, Human
ugggcgucuggcacccgc

SEQ ID NO: 1252043 - RNA, 21 nt, Human
ugucuggaugccagggcaggg

SEQ ID NO: 1252044 - RNA, 25 nt, Human
uucacuggggccugcguagccucca

SEQ ID NO: 1252045 - RNA, 19 nt, Human
uuccagggcgcgagggcug

SEQ ID NO: 1252046 - RNA, 18 nt, Human
uuccccacgcacggucag

SEQ ID NO: 1252047 - RNA, 21 nt, Human
uucuccucuugcacucgggcc

SEQ ID NO: 1252048 - RNA, 18 nt, Human
cacuuggcaaaugcacag

SEQ ID NO: 1252049 - RNA, 18 nt, Human
cagcaggagaugcacaua

SEQ ID NO: 1252050 - RNA, 24 nt, Human
caggagaugcacauaacucccaau

SEQ ID NO: 1252051 - RNA, 26 nt, Human
cccaccuguuuuuaucugcuucugau

SEQ ID NO: 1252052 - RNA, 23 nt, Human
cugcccacuuuccacccugaaau

SEQ ID NO: 1252053 - RNA, 18 nt, Human
ugcacagauauuccgugu

SEQ ID NO: 1252054 - RNA, 21 nt, Human
uggcaaaugcacagauauucc

SEQ ID NO: 1252055 - RNA, 23 nt, Human
uugggcucuccuuaagggcucac

SEQ ID NO: 1252056 - RNA, 21 nt, Human
aaguggagcugcugugguggg

SEQ ID NO: 1252057 - RNA, 18 nt, Human
acuugcuccuggcagggu

SEQ ID NO: 1252058 - RNA, 19 nt, Human
agagggauuucgagggcuu

SEQ ID NO: 1252059 - RNA, 23 nt, Human
agcugcugugguggggucauuga

SEQ ID NO: 1252060 - RNA, 18 nt, Human
gagcugcugugguggggu

SEQ ID NO: 1252061 - RNA, 19 nt, Human
gcuccuggcaggguagcuu

SEQ ID NO: 1252062 - RNA, 21 nt, Human
gcuuaccgaggagcccugcag

SEQ ID NO: 1252063 - RNA, 21 nt, Human
ggcccuggugauugucagaca

SEQ ID NO: 1252064 - RNA, 19 nt, Human
gggccucugacuugcuccu

SEQ ID NO: 1252065 - RNA, 20 nt, Human
gguagcuuggaaaccagcag

SEQ ID NO: 1252066 - RNA, 23 nt, Human
guggagcugcuguggugggguca

SEQ ID NO: 1252067 - RNA, 25 nt, Human
uaugggcccuggugauugucagaca

SEQ ID NO: 1252068 - RNA, 21 nt, Human
ugagcucuaugggcccuggug

SEQ ID NO: 1252069 - RNA, 24 nt, Human
uucuugaagcuguggugcaggaau

SEQ ID NO: 1252070 - RNA, 18 nt, Human
cagcaacugccacacgcc

SEQ ID NO: 1252071 - RNA, 19 nt, Human
cccugcugguagagguagg

SEQ ID NO: 1252072 - RNA, 23 nt, Human
ccucugagcugcuggggagcggg

SEQ ID NO: 1252073 - RNA, 26 nt, Human
cuuccugauaacaaggaauccucuga

SEQ ID NO: 1252074 - RNA, 21 nt, Human
gcgggcacuaaugaggcccca

SEQ ID NO: 1252075 - RNA, 19 nt, Human
uaacaaggaauccucugag

SEQ ID NO: 1252076 - RNA, 19 nt, Human
ugauaacaaggaauccucu

SEQ ID NO: 1252077 - RNA, 21 nt, Human
ccuuauguuucguuccaauga

SEQ ID NO: 1252078 - RNA, 20 nt, Human
ucccuuauguuucguuccaa

SEQ ID NO: 1252079 - RNA, 22 nt, Human
acucucugaccagcuggaauuu

SEQ ID NO: 1252080 - RNA, 22 nt, Human
ggcagagccacagcacugacuc

SEQ ID NO: 1252081 - RNA, 21 nt, Human
accacagauuuucgaaacaac

SEQ ID NO: 1252082 - RNA, 20 nt, Human
ugauaagagcuucaccuccu

SEQ ID NO: 1252083 - RNA, 22 nt, Human
uuagugauaagagcuucaccuc

SEQ ID NO: 1252084 - RNA, 26 nt, Human
gggcugcggcuuuccuuaacaagugg

SEQ ID NO: 1252085 - RNA, 25 nt, Human
ugcggcuuuccuuaacaagugggcc

SEQ ID NO: 1252086 - RNA, 20 nt, Human
uggcaggaaugggcugcggc

SEQ ID NO: 1252087 - RNA, 24 nt, Human
uggcaggaaugggcugcggcuuuc

SEQ ID NO: 1252088 - RNA, 21 nt, Human
uggcaggaaugggcugcggga

SEQ ID NO: 1252089 - RNA, 21 nt, Human
aagagcucugcaugccaccac

SEQ ID NO: 1252090 - RNA, 22 nt, Human
cacuauguggccuuugaugggc

SEQ ID NO: 1252091 - RNA, 20 nt, Human
ccaaagagcuggcuguagug

SEQ ID NO: 1252092 - RNA, 18 nt, Human
ccccaggaauggcuucuc

SEQ ID NO: 1252093 - RNA, 20 nt, Human
cuucucauagugccagggcc

SEQ ID NO: 1252094 - RNA, 19 nt, Human
uaguggaucucaaaguagg

SEQ ID NO: 1252095 - RNA, 19 nt, Human
ucccaaagagcuggcugua

SEQ ID NO: 1252096 - RNA, 22 nt, Human
ugcaugccaccacucuuugccc

SEQ ID NO: 1252097 - RNA, 21 nt, Human
ugcccaguguauucacuaugu

SEQ ID NO: 1252098 - RNA, 24 nt, Human
uggaucucaaaguaggccaggccc

SEQ ID NO: 1252099 - RNA, 22 nt, Human
cuucuuuauugcucuuucugau

SEQ ID NO: 1252100 - RNA, 18 nt, Human
uacaugaacuucuauagg

SEQ ID NO: 1252101 - RNA, 20 nt, Human
uacaugaacuucuauaggug

SEQ ID NO: 1252102 - RNA, 18 nt, Human
uaugucuaccacggucug

SEQ ID NO: 1252103 - RNA, 20 nt, Human
uauugcucuuucugauucca

SEQ ID NO: 1252104 - RNA, 24 nt, Human
uauugcucuuucugauuccacugu

SEQ ID NO: 1252105 - RNA, 23 nt, Human
uccuagccuuacaugaacuucua

SEQ ID NO: 1252106 - RNA, 22 nt, Human
uguguaaacuuccuagccuuac

SEQ ID NO: 1252107 - RNA, 28 nt, Human
ugguaguucugguagaguggcggaggcg

SEQ ID NO: 1252108 - RNA, 24 nt, Human
uguaaauaucuucaucaggaaguu

SEQ ID NO: 1252109 - RNA, 24 nt, Human
accacugcauaaagacacucuaua

SEQ ID NO: 1252110 - RNA, 20 nt, Human
acuuggcacucacuggagcu

SEQ ID NO: 1252111 - RNA, 21 nt, Human
cacucuauagcgcucaaaagc

SEQ ID NO: 1252112 - RNA, 24 nt, Human
cacuggagcugcccucugaagcuc

SEQ ID NO: 1252113 - RNA, 22 nt, Human
cauccaacaauccaccaggcac

SEQ ID NO: 1252114 - RNA, 21 nt, Human
ccaccaggcacugagaacagg

SEQ ID NO: 1252115 - RNA, 20 nt, Human
cucacuggagcugcccucug

SEQ ID NO: 1252116 - RNA, 20 nt, Human
cucuauagcgcucaaaagcc

SEQ ID NO: 1252117 - RNA, 23 nt, Human
ucaggaugaugguuguuuuuccu

SEQ ID NO: 1252118 - RNA, 25 nt, Human
uccaacaauccaccaggcacugaga

SEQ ID NO: 1252119 - RNA, 19 nt, Human
ugagaacagguggugucug

SEQ ID NO: 1252120 - RNA, 19 nt, Human
uuggcagaggaaugcgagc

SEQ ID NO: 1252121 - RNA, 24 nt, Human
aagggccuacuucaucaggugcca

SEQ ID NO: 1252122 - RNA, 19 nt, Human
augaagccagguaauauug

SEQ ID NO: 1252123 - RNA, 23 nt, Human
auugcaaagggucuguggaaacg

SEQ ID NO: 1252124 - RNA, 18 nt, Human
caggcuccccgaguccuc

SEQ ID NO: 1252125 - RNA, 21 nt, Human
caggcucgcggagggguccaa

SEQ ID NO: 1252126 - RNA, 20 nt, Human
ccccgaguccucgccugccc

SEQ ID NO: 1252127 - RNA, 21 nt, Human
ccgugcuuggggccggggcag

SEQ ID NO: 1252128 - RNA, 26 nt, Human
ccucccugccucaaaggccccagaag

SEQ ID NO: 1252129 - RNA, 21 nt, Human
ccugccucaaaggccccagaa

SEQ ID NO: 1252130 - RNA, 18 nt, Human
cggacccucaacaggcuc

SEQ ID NO: 1252131 - RNA, 23 nt, Human
cgggagcugggcccgcggacagc

SEQ ID NO: 1252132 - RNA, 19 nt, Human
gaguccucgccugcccucc

SEQ ID NO: 1252133 - RNA, 21 nt, Human
gggccggggcaggcucgcgga

SEQ ID NO: 1252134 - RNA, 21 nt, Human
uccucgccugcccucccugcc

SEQ ID NO: 1252135 - RNA, 21 nt, Human
ucgccugcccucccugccuca

SEQ ID NO: 1252136 - RNA, 19 nt, Human
uggcuacugacagcggcgg

SEQ ID NO: 1252137 - RNA, 26 nt, Human
auuggcuucucucccucucuuuuugg

SEQ ID NO: 1252138 - RNA, 20 nt, Human
cucccucucuuuuugugguc

SEQ ID NO: 1252139 - RNA, 22 nt, Human
cucucccucucuuuuugugguc

SEQ ID NO: 1252140 - RNA, 19 nt, Human
gaggauagugcugugcccc

SEQ ID NO: 1252141 - RNA, 22 nt, Human
gaggauagugcugugccccagg

SEQ ID NO: 1252142 - RNA, 19 nt, Human
gcuucucucccucucuuuu

SEQ ID NO: 1252143 - RNA, 22 nt, Human
ucagaagcucccugugacuugg

SEQ ID NO: 1252144 - RNA, 20 nt, Human
uggcuucucucccucucuuu

SEQ ID NO: 1252145 - RNA, 23 nt, Human
uuggcuucucucccucucuuuuu

SEQ ID NO: 1252146 - RNA, 27 nt, Human
aggcgagggaaacggggagcuccaggg

SEQ ID NO: 1252147 - RNA, 24 nt, Human
aggggggccgggggagguggggcc

SEQ ID NO: 1252148 - RNA, 22 nt, Human
ccccgcaggggacaggggcggg

SEQ ID NO: 1252149 - RNA, 19 nt, Human
ccccgggacugaacuugcc

SEQ ID NO: 1252150 - RNA, 24 nt, Human
ccccgggacugaacuugccccucc

SEQ ID NO: 1252151 - RNA, 24 nt, Human
cccgccaaccgccagccccgggac

SEQ ID NO: 1252152 - RNA, 19 nt, Human
cgagggaaacggggagcuc

SEQ ID NO: 1252153 - RNA, 24 nt, Human
cggccgcccgcuccccgcagggga

SEQ ID NO: 1252154 - RNA, 23 nt, Human
cuaaagccggucccgccaaccgc

SEQ ID NO: 1252155 - RNA, 19 nt, Human
gagguggggccgccgggga

SEQ ID NO: 1252156 - RNA, 20 nt, Human
gggacaggggcggggaggga

SEQ ID NO: 1252157 - RNA, 20 nt, Human
gggagguggggccgccgggg

SEQ ID NO: 1252158 - RNA, 18 nt, Human
gggcggggagggagagau

SEQ ID NO: 1252159 - RNA, 22 nt, Human
ggggaggaggcgagggaaacgg

SEQ ID NO: 1252160 - RNA, 20 nt, Human
uaaagccggucccgccaacc

SEQ ID NO: 1252161 - RNA, 21 nt, Human
uccagaggggggccgggggag

SEQ ID NO: 1252162 - RNA, 20 nt, Human
uccccgcaggggacaggggc

SEQ ID NO: 1252163 - RNA, 22 nt, Human
uggggccgccggggaggaggcg

SEQ ID NO: 1252164 - RNA, 18 nt, Human
accuccgucuuggaugau

SEQ ID NO: 1252165 - RNA, 18 nt, Human
agagaaaacaguggcuag

SEQ ID NO: 1252166 - RNA, 20 nt, Human
agagaaaacaguggcuagca

SEQ ID NO: 1252167 - RNA, 26 nt, Human
aguggaccagggaccuccgucuugga

SEQ ID NO: 1252168 - RNA, 22 nt, Human
caaagcgccaaaccaggaguuc

SEQ ID NO: 1252169 - RNA, 21 nt, Human
cacugcucuuacagagaaaac

SEQ ID NO: 1252170 - RNA, 22 nt, Human
ccagugauguuaaugugcuccc

SEQ ID NO: 1252171 - RNA, 18 nt, Human
ccauuuaugcauuucccc

SEQ ID NO: 1252172 - RNA, 25 nt, Human
cguacucauggaacccauuuaugca

SEQ ID NO: 1252173 - RNA, 24 nt, Human
cucuuacagagaaaacaguggcua

SEQ ID NO: 1252174 - RNA, 19 nt, Human
cuucacaaagcgccaaacc

SEQ ID NO: 1252175 - RNA, 18 nt, Human
guagaagaugcuguggcc

SEQ ID NO: 1252176 - RNA, 23 nt, Human
uagaagaugcuguggccucguac

SEQ ID NO: 1252177 - RNA, 20 nt, Human
ucuuggaugauauccccagu

SEQ ID NO: 1252178 - RNA, 22 nt, Human
ugaaaacugugaguccuuugua

SEQ ID NO: 1252179 - RNA, 22 nt, Human
ugcaggugucgccagcuggaag

SEQ ID NO: 1252180 - RNA, 20 nt, Human
uggaagaagaccuaguggca

SEQ ID NO: 1252181 - RNA, 19 nt, Human
uggaugauauccccaguga

SEQ ID NO: 1252182 - RNA, 19 nt, Human
ugggaaucauuguugcuuc

SEQ ID NO: 1252183 - RNA, 18 nt, Human
ggcuggugaauggguugg

SEQ ID NO: 1252184 - RNA, 19 nt, Human
cucuguccucuuccuucug

SEQ ID NO: 1252185 - RNA, 20 nt, Human
cuuugcucuguccucuuccu

SEQ ID NO: 1252186 - RNA, 24 nt, Human
cuuugcucuguccucuuccuucug

SEQ ID NO: 1252187 - RNA, 26 nt, Human
ugcucuguccucuuccuucugguuca

SEQ ID NO: 1252188 - RNA, 21 nt, Human
ugguucaguccuuguguaguc

SEQ ID NO: 1252189 - RNA, 21 nt, Human
uguccucuuccuucugguuca

SEQ ID NO: 1252190 - RNA, 19 nt, Human
cagaaagagcaggcaccau

SEQ ID NO: 1252191 - RNA, 21 nt, Human
ccagaaagagcaggcaccauu

SEQ ID NO: 1252192 - RNA, 23 nt, Human
ucagaaaaugccacuucucuuuc

SEQ ID NO: 1252193 - RNA, 19 nt, Human
uccagaaagagcaggcacc

SEQ ID NO: 1252194 - RNA, 22 nt, Human
auuaggugugguaauuggggca

SEQ ID NO: 1252195 - RNA, 25 nt, Human
caggagcugaaguugguuguuuagu

SEQ ID NO: 1252196 - RNA, 26 nt, Human
gagcugaggcggaugaugggucuagg

SEQ ID NO: 1252197 - RNA, 24 nt, Human
ggagguguggguggggcagcuggu

SEQ ID NO: 1252198 - RNA, 20 nt, Human
gggaagaauuagguguggua

SEQ ID NO: 1252199 - RNA, 22 nt, Human
gggugggacagcuguggucucu

SEQ ID NO: 1252200 - RNA, 22 nt, Human
ggguggggcagcuguggucucu

SEQ ID NO: 1252201 - RNA, 22 nt, Human
ggguggggcagcuguggucucu

SEQ ID NO: 1252202 - RNA, 24 nt, Human
ggugcaagaguaguuggggaagaa

SEQ ID NO: 1252203 - RNA, 18 nt, Human
guaguaguaguuugagua

SEQ ID NO: 1252204 - RNA, 24 nt, Human
guggagcugaggaagauaguggag

SEQ ID NO: 1252205 - RNA, 22 nt, Human
guggguggggcagcuguggucu

SEQ ID NO: 1252206 - RNA, 22 nt, Human
guggguggggcagcuguggucu

SEQ ID NO: 1252207 - RNA, 22 nt, Human
guggguggggcagcuguggucu

SEQ ID NO: 1252208 - RNA, 22 nt, Human
guggguggggcagcuguggucu

SEQ ID NO: 1252209 - RNA, 19 nt, Human
ucagaagugucaggugcaa

SEQ ID NO: 1252210 - RNA, 20 nt, Human
ucuggugugugggugcagcc

SEQ ID NO: 1252211 - RNA, 18 nt, Human
ugaccgaaguaguagucu

SEQ ID NO: 1252212 - RNA, 21 nt, Human
ugaggaagauaguggagcugg

SEQ ID NO: 1252213 - RNA, 21 nt, Human
ugaggaagaugguggagcugg

SEQ ID NO: 1252214 - RNA, 21 nt, Human
uggggaagacgguggagcugg

SEQ ID NO: 1252215 - RNA, 21 nt, Human
uggguggggcagcuguggucu

SEQ ID NO: 1252216 - RNA, 21 nt, Human
uggguggggcagcuguggucu

SEQ ID NO: 1252217 - RNA, 21 nt, Human
uggguggggcagcuguggucu

SEQ ID NO: 1252218 - RNA, 21 nt, Human
uggguggggcagcuguggucu

SEQ ID NO: 1252219 - RNA, 23 nt, Human
uggguggggcagcuguggucucu

SEQ ID NO: 1252220 - RNA, 22 nt, Human
uggugugugggugcagcugaag

SEQ ID NO: 1252221 - RNA, 24 nt, Human
uggugugugggugcagcugaaguu

SEQ ID NO: 1252222 - RNA, 26 nt, Human
uggugugugggugcagcugaaguuuc

SEQ ID NO: 1252223 - RNA, 21 nt, Human
uguggagcuggggaagacggu

SEQ ID NO: 1252224 - RNA, 20 nt, Human
uguggguggggcagcugugg

SEQ ID NO: 1252225 - RNA, 20 nt, Human
uguggguggggcagcugugg

SEQ ID NO: 1252226 - RNA, 20 nt, Human
uguggguggggcagcugugg

SEQ ID NO: 1252227 - RNA, 20 nt, Human
uguggguggggcagcugugg

SEQ ID NO: 1252228 - RNA, 19 nt, Human
uuucagaagugucaggugc

SEQ ID NO: 1252229 - RNA, 21 nt, Human
cccccacuccucgagcuucug

SEQ ID NO: 1252230 - RNA, 23 nt, Human
cugcagcucccuguccuucuucu

SEQ ID NO: 1252231 - RNA, 23 nt, Human
cuucugcagcucccuguccuucu

SEQ ID NO: 1252232 - RNA, 21 nt, Human
ucacacugcaccuucuggcug

SEQ ID NO: 1252233 - RNA, 20 nt, Human
ucugcagcucccuguccuuc

SEQ ID NO: 1252234 - RNA, 22 nt, Human
ugcagcucccuguccuucuucu

SEQ ID NO: 1252235 - RNA, 18 nt, Human
ccucucucuguggggucc

SEQ ID NO: 1252236 - RNA, 25 nt, Human
cugcuuuggccucucucuguggggu

SEQ ID NO: 1252237 - RNA, 19 nt, Human
gccaaaugccaugcacaau

SEQ ID NO: 1252238 - RNA, 22 nt, Human
ggccucucucugugggguccug

SEQ ID NO: 1252239 - RNA, 19 nt, Human
ucugggaacaaugcccugg

SEQ ID NO: 1252240 - RNA, 24 nt, Human
ugccaaaugccaugcacaauuucu

SEQ ID NO: 1252241 - RNA, 20 nt, Human
ugggaacaaugcccuggagc

SEQ ID NO: 1252242 - RNA, 23 nt, Human
ugggguccugggaaccagccacu

SEQ ID NO: 1252243 - RNA, 21 nt, Human
uuuuucuucugcuuuggccuc

SEQ ID NO: 1252244 - RNA, 24 nt, Human
uccuucagaaggcgaauuuguuga

SEQ ID NO: 1252245 - RNA, 18 nt, Human
acacgauaucuccuugga

SEQ ID NO: 1252246 - RNA, 23 nt, Human
agggauucugccucuucuacauu

SEQ ID NO: 1252247 - RNA, 18 nt, Human
ccacuuucuuuuuugccc

SEQ ID NO: 1252248 - RNA, 20 nt, Human
ccucauagcugauauggucc

SEQ ID NO: 1252249 - RNA, 24 nt, Human
ucugccucuucuacauuuucuccc

SEQ ID NO: 1252250 - RNA, 20 nt, Human
aagcaagauaaauuaaagau

SEQ ID NO: 1252251 - RNA, 18 nt, Human
ugagugacaggguagaua

SEQ ID NO: 1252252 - RNA, 19 nt, Human
uggaaagcaagauaaauua

SEQ ID NO: 1252253 - RNA, 19 nt, Human
ccagcaccgggucgcuggu

SEQ ID NO: 1252254 - RNA, 18 nt, Human
gaggaagcugccuuaucu

SEQ ID NO: 1252255 - RNA, 22 nt, Human
ucgcuggucaaccucugaaugc

SEQ ID NO: 1252256 - RNA, 19 nt, Human
ugaaugcaggagccuugag

SEQ ID NO: 1252257 - RNA, 20 nt, Human
ugagucaggugcccaacagu

SEQ ID NO: 1252258 - RNA, 19 nt, Human
ugccuuaucuccagcaccg

SEQ ID NO: 1252259 - RNA, 22 nt, Human
aacuugccaucuccagcaccuu

SEQ ID NO: 1252260 - RNA, 25 nt, Human
accuucagcuuucugugccuggucu

SEQ ID NO: 1252261 - RNA, 18 nt, Human
accuucucucccuucuuu

SEQ ID NO: 1252262 - RNA, 22 nt, Human
acuuggaucuuaaguguuuuuc

SEQ ID NO: 1252263 - RNA, 23 nt, Human
caggggccuucucugugccaucc

SEQ ID NO: 1252264 - RNA, 21 nt, Human
cauccuuuagacagccggaca

SEQ ID NO: 1252265 - RNA, 21 nt, Human
cccuuuuucccuuuggguacc

SEQ ID NO: 1252266 - RNA, 25 nt, Human
ccuugccagcaucggcuuuucccuu

SEQ ID NO: 1252267 - RNA, 26 nt, Human
cuccagcaccuucagcuuucugugcc

SEQ ID NO: 1252268 - RNA, 20 nt, Human
cucccuucuuugcaggggcc

SEQ ID NO: 1252269 - RNA, 24 nt, Human
cucucccuucuuugcaggggccuu

SEQ ID NO: 1252270 - RNA, 24 nt, Human
cuugccaucuccagcaccuucagc

SEQ ID NO: 1252271 - RNA, 18 nt, Human
guacauauccauaaugcc

SEQ ID NO: 1252272 - RNA, 23 nt, Human
guaccuucucucccuucuuugca

SEQ ID NO: 1252273 - RNA, 19 nt, Human
ucccuucuuugcaggggcc

SEQ ID NO: 1252274 - RNA, 24 nt, Human
ucuccagcaccuucagcuuucugu

SEQ ID NO: 1252275 - RNA, 20 nt, Human
ucucucccuucuuugcaggg

SEQ ID NO: 1252276 - RNA, 19 nt, Human
ucugugccuggucuguuuu

SEQ ID NO: 1252277 - RNA, 23 nt, Human
ucuuaaguguuuuuccugacuuc

SEQ ID NO: 1252278 - RNA, 23 nt, Human
ugcauacacucaacuugccaucu

SEQ ID NO: 1252279 - RNA, 21 nt, Human
uucccagucucaucacucaca

SEQ ID NO: 1252280 - RNA, 26 nt, Human
uucccagucucaucacucacauccuc

SEQ ID NO: 1252281 - RNA, 21 nt, Human
uugccagcaucggcuuuuccc

SEQ ID NO: 1252282 - RNA, 21 nt, Human
uuucccuuuggguaccuucuc

SEQ ID NO: 1252283 - RNA, 25 nt, Human
uuucccuuuuucccuuuggguaccu

SEQ ID NO: 1252284 - RNA, 18 nt, Human
aggcagagucccuuccuu

SEQ ID NO: 1252285 - RNA, 19 nt, Human
cuagaggcagagucccuuc

SEQ ID NO: 1252286 - RNA, 20 nt, Human
ucugcaaggcucuggucugc

SEQ ID NO: 1252287 - RNA, 21 nt, Human
ugcuggccugaaugaucacac

SEQ ID NO: 1252288 - RNA, 23 nt, Human
aaggcaaugccauaacauaaaac

SEQ ID NO: 1252289 - RNA, 25 nt, Human
aaggcagucuucaaggcccaaccag

SEQ ID NO: 1252290 - RNA, 18 nt, Human
auuucauuuucuggauga

SEQ ID NO: 1252291 - RNA, 19 nt, Human
auuucauuuucuggaugaa

SEQ ID NO: 1252292 - RNA, 21 nt, Human
ccaaccaacacgcaguuacaa

SEQ ID NO: 1252293 - RNA, 20 nt, Human
cccacucuuuaucacuuccc

SEQ ID NO: 1252294 - RNA, 21 nt, Human
cccacucuuuaucacuuccca

SEQ ID NO: 1252295 - RNA, 21 nt, Human
cuuuaucacuucccaaggcaa

SEQ ID NO: 1252296 - RNA, 19 nt, Human
ugccauaacauaaaaccac

SEQ ID NO: 1252297 - RNA, 19 nt, Human
ugccauaacauaaaaccac

SEQ ID NO: 1252298 - RNA, 23 nt, Human
ugucccacucuuuaucacuuccc

SEQ ID NO: 1252299 - RNA, 21 nt, Human
uuucuggaugauccacccauu

SEQ ID NO: 1252300 - RNA, 22 nt, Human
aaccaguuguuguagccauagg

SEQ ID NO: 1252301 - RNA, 19 nt, Human
caggagccggccaccugag

SEQ ID NO: 1252302 - RNA, 19 nt, Human
ccccaggagccggccaccu

SEQ ID NO: 1252303 - RNA, 22 nt, Human
cccuggauugccuggggguaag

SEQ ID NO: 1252304 - RNA, 21 nt, Human
cugggggcuccaauccaaccg

SEQ ID NO: 1252305 - RNA, 19 nt, Human
ucccuggauugccuggggg

SEQ ID NO: 1252306 - RNA, 20 nt, Human
ucccuggauugccugggggu

SEQ ID NO: 1252307 - RNA, 18 nt, Human
uccugggugugugagugc

SEQ ID NO: 1252308 - RNA, 24 nt, Human
uggggguaagggaaggucagcuuc

SEQ ID NO: 1252309 - RNA, 22 nt, Human
ugugugagugcugccugggggc

SEQ ID NO: 1252310 - RNA, 24 nt, Human
aaaaacagugguaaaauggaccgg

SEQ ID NO: 1252311 - RNA, 26 nt, Human
aaccaagaggugaaaagaagggaccc

SEQ ID NO: 1252312 - RNA, 24 nt, Human
aagcaaggggaggaagaagucaga

SEQ ID NO: 1252313 - RNA, 28 nt, Human
aagcagggaagaaauaaggggcaagguc

SEQ ID NO: 1252314 - RNA, 28 nt, Human
aagccaaaagugagaacagaagggaccc

SEQ ID NO: 1252315 - RNA, 21 nt, Human
aaggggaggaagaagucagaa

SEQ ID NO: 1252316 - RNA, 20 nt, Human
aagugagaacagaacauuuu

SEQ ID NO: 1252317 - RNA, 21 nt, Human
acagaacauuuucauauccuc

SEQ ID NO: 1252318 - RNA, 22 nt, Human
acagaacauuuucauauccucc

SEQ ID NO: 1252319 - RNA, 25 nt, Human
acagaacauuuucauauccucccca

SEQ ID NO: 1252320 - RNA, 21 nt, Human
agcaaggggaggaagaaguca

SEQ ID NO: 1252321 - RNA, 18 nt, Human
aggaagucagaggcaauc

SEQ ID NO: 1252322 - RNA, 22 nt, Human
agggaagaaauaaggggcaagg

SEQ ID NO: 1252323 - RNA, 19 nt, Human
aggggcaaggggggcuagg

SEQ ID NO: 1252324 - RNA, 22 nt, Human
agugguaaaauggacauaaagc

SEQ ID NO: 1252325 - RNA, 23 nt, Human
cacacuugaaaacauacuuccca

SEQ ID NO: 1252326 - RNA, 18 nt, Human
cacuccuuuucccuccag

SEQ ID NO: 1252327 - RNA, 18 nt, Human
cacugccaauaauguccc

SEQ ID NO: 1252328 - RNA, 18 nt, Human
cagcaaaagcccuggggu

SEQ ID NO: 1252329 - RNA, 19 nt, Human
caguccuugucuacccguu

SEQ ID NO: 1252330 - RNA, 19 nt, Human
cauauccuccccacacuug

SEQ ID NO: 1252331 - RNA, 21 nt, Human
ccaauaaugucccagauagcu

SEQ ID NO: 1252332 - RNA, 24 nt, Human
ccagagccccuuccaaaucucucu

SEQ ID NO: 1252333 - RNA, 18 nt, Human
ccauugucaggccuuggg

SEQ ID NO: 1252334 - RNA, 21 nt, Human
cccaaccaagaggugaaaaga

SEQ ID NO: 1252335 - RNA, 18 nt, Human
ccccacacuugaaaacau

SEQ ID NO: 1252336 - RNA, 21 nt, Human
cccccaggacucuaggagcca

SEQ ID NO: 1252337 - RNA, 23 nt, Human
cccccaggacucuaggagccacu

SEQ ID NO: 1252338 - RNA, 22 nt, Human
ccccgcaccuccgccgcccgcc

SEQ ID NO: 1252339 - RNA, 25 nt, Human
ccgccgcccgccgcccgcggccgcc

SEQ ID NO: 1252340 - RNA, 24 nt, Human
ccuugucuacccguucaucccuca

SEQ ID NO: 1252341 - RNA, 18 nt, Human
cuccuuuucccuccagcc

SEQ ID NO: 1252342 - RNA, 26 nt, Human
cucuaggagccacuccuuuucccucc

SEQ ID NO: 1252343 - RNA, 24 nt, Human
cucucucucuucaucuucccugga

SEQ ID NO: 1252344 - RNA, 21 nt, Human
gaaaagcagguagaugguucg

SEQ ID NO: 1252345 - RNA, 23 nt, Human
gaacagaacauuuucauauccuc

SEQ ID NO: 1252346 - RNA, 21 nt, Human
gaagcaaggggaggaagaagu

SEQ ID NO: 1252347 - RNA, 19 nt, Human
gagcaggccccgcaccucc

SEQ ID NO: 1252348 - RNA, 23 nt, Human
gcaaaagcccuggggugaccccc

SEQ ID NO: 1252349 - RNA, 18 nt, Human
gccgcccgccgcccgcgg

SEQ ID NO: 1252350 - RNA, 23 nt, Human
ggaggaagaagucagaacccagg

SEQ ID NO: 1252351 - RNA, 20 nt, Human
gggaagaaauaaggggcaag

SEQ ID NO: 1252352 - RNA, 24 nt, Human
gggaagcagggaagaaauaagggg

SEQ ID NO: 1252353 - RNA, 19 nt, Human
guaaaauggacauaaagcc

SEQ ID NO: 1252354 - RNA, 23 nt, Human
uaaaauggacauaaagccaaaag

SEQ ID NO: 1252355 - RNA, 20 nt, Human
uaaggggcaaggggggcuag

SEQ ID NO: 1252356 - RNA, 22 nt, Human
uaccauugucaggccuugggag

SEQ ID NO: 1252357 - RNA, 18 nt, Human
uccagcccaaccaagagg

SEQ ID NO: 1252358 - RNA, 21 nt, Human
ucccagagucagcaaaagccc

SEQ ID NO: 1252359 - RNA, 18 nt, Human
uccuugggacacagcauc

SEQ ID NO: 1252360 - RNA, 19 nt, Human
ucucucucuucaucuuccc

SEQ ID NO: 1252361 - RNA, 20 nt, Human
ucuucaucuucccuggaagc

SEQ ID NO: 1252362 - RNA, 19 nt, Human
ugaaaacauacuucccauc

SEQ ID NO: 1252363 - RNA, 19 nt, Human
ugaaaagaaauuccuuggg

SEQ ID NO: 1252364 - RNA, 29 nt, Human
ugagaacagaacauuuucauauccucccc

SEQ ID NO: 1252365 - RNA, 21 nt, Human
uggccuccagggcccacugcc

SEQ ID NO: 1252366 - RNA, 23 nt, Human
uuccaaaucucucucucuucauc

SEQ ID NO: 1252367 - RNA, 18 nt, Human
uucgagggaagcagggaa

SEQ ID NO: 1252368 - RNA, 24 nt, Human
uaaauugaaagcuaauuuccgaua

SEQ ID NO: 1252369 - RNA, 18 nt, Human
aggagcgggagaggggcu

SEQ ID NO: 1252370 - RNA, 23 nt, Human
aggggcuggugggggccccaggg

SEQ ID NO: 1252371 - RNA, 19 nt, Human
cggcgggcgccccgaaguc

SEQ ID NO: 1252372 - RNA, 21 nt, Human
gagcgggagaggggcuggugg

SEQ ID NO: 1252373 - RNA, 20 nt, Human
gccacggcuccagcuccgcc

SEQ ID NO: 1252374 - RNA, 18 nt, Human
gccgcaguuucuccuccu

SEQ ID NO: 1252375 - RNA, 18 nt, Human
ggagaggagcgggagagg

SEQ ID NO: 1252376 - RNA, 19 nt, Human
ggcugaggccguggcucug

SEQ ID NO: 1252377 - RNA, 20 nt, Human
ggcuggugggggccccaggg

SEQ ID NO: 1252378 - RNA, 21 nt, Human
gggcuggugggggccccaggg

SEQ ID NO: 1252379 - RNA, 25 nt, Human
uccagcuccgccggcuccggccgga

SEQ ID NO: 1252380 - RNA, 22 nt, Human
uccucccggcgccuucucucca

SEQ ID NO: 1252381 - RNA, 24 nt, Human
ucuccuccucccggcgccuucucu

SEQ ID NO: 1252382 - RNA, 18 nt, Human
ucuguaccgccaauaggg

SEQ ID NO: 1252383 - RNA, 18 nt, Human
ugacuucucccuguuccc

SEQ ID NO: 1252384 - RNA, 19 nt, Human
aaaaaaaacaaaacgaggc

SEQ ID NO: 1252385 - RNA, 22 nt, Human
aaaaaaacaaaacgaggcguga

SEQ ID NO: 1252386 - RNA, 23 nt, Human
aaaaaagaacauggcagcaaaga

SEQ ID NO: 1252387 - RNA, 24 nt, Human
aaaaagaacauggcagcaaagaca

SEQ ID NO: 1252388 - RNA, 22 nt, Human
aaacacccuuaucccccaaaaa

SEQ ID NO: 1252389 - RNA, 19 nt, Human
aaacagacagagguguccc

SEQ ID NO: 1252390 - RNA, 23 nt, Human
aaacagacagagguguccccucu

SEQ ID NO: 1252391 - RNA, 21 nt, Human
aaacgaggcgugaaaaguccc

SEQ ID NO: 1252392 - RNA, 24 nt, Human
aaacugccaaguccaguaaucuca

SEQ ID NO: 1252393 - RNA, 22 nt, Human
aaagaugggaagagcaaaaaaa

SEQ ID NO: 1252394 - RNA, 26 nt, Human
aacaauaugccugagauaccaggccc

SEQ ID NO: 1252395 - RNA, 18 nt, Human
aacacccuuaucccccaa

SEQ ID NO: 1252396 - RNA, 22 nt, Human
aacaguaauaaucauuauagcc

SEQ ID NO: 1252397 - RNA, 20 nt, Human
aacgcccgucucgcacgccc

SEQ ID NO: 1252398 - RNA, 21 nt, Human
aagaaaaaaaacaaaacgagg

SEQ ID NO: 1252399 - RNA, 20 nt, Human
aagaaaauucaacauugcug

SEQ ID NO: 1252400 - RNA, 19 nt, Human
aagaauccacugucucccc

SEQ ID NO: 1252401 - RNA, 18 nt, Human
aagcagaaucuuguucca

SEQ ID NO: 1252402 - RNA, 21 nt, Human
aauguaagaaauaguauuuug

SEQ ID NO: 1252403 - RNA, 23 nt, Human
acaaaaaaaaauuauuucucucu

SEQ ID NO: 1252404 - RNA, 28 nt, Human
acagagaagaauaggaggcucuucuuca

SEQ ID NO: 1252405 - RNA, 21 nt, Human
acaguggaaggaucagaugga

SEQ ID NO: 1252406 - RNA, 18 nt, Human
acaucugaagaaaaaaaa

SEQ ID NO: 1252407 - RNA, 23 nt, Human
acauggcaucgucagcugccucc

SEQ ID NO: 1252408 - RNA, 22 nt, Human
acccugcgucaggaaaaagcca

SEQ ID NO: 1252409 - RNA, 24 nt, Human
acucuguacauucaaguuuuucca

SEQ ID NO: 1252410 - RNA, 23 nt, Human
acuucuggauuuuugaucugaaa

SEQ ID NO: 1252411 - RNA, 22 nt, Human
agaaaaaaaacaaaacgaggcg

SEQ ID NO: 1252412 - RNA, 23 nt, Human
agaaaaaaaacaaaacgaggcgu

SEQ ID NO: 1252413 - RNA, 29 nt, Human
agaaaaaaaacaaaacgaggcgugaaaag

SEQ ID NO: 1252414 - RNA, 19 nt, Human
agacacauggcaucgucag

SEQ ID NO: 1252415 - RNA, 24 nt, Human
agagcaaaaaaaucuccuuuggag

SEQ ID NO: 1252416 - RNA, 18 nt, Human
agcagaaucuuguuccag

SEQ ID NO: 1252417 - RNA, 18 nt, Human
aggaaaaaaaaaaaaaca

SEQ ID NO: 1252418 - RNA, 25 nt, Human
aggaaaaagccacaucugaagaaaa

SEQ ID NO: 1252419 - RNA, 24 nt, Human
aggacagagaagaauaggaggcuc

SEQ ID NO: 1252420 - RNA, 21 nt, Human
aggcagccagaaacuggcugg

SEQ ID NO: 1252421 - RNA, 23 nt, Human
aggcagggugggauagagaaggg

SEQ ID NO: 1252422 - RNA, 19 nt, Human
aggggaugcuguggagagg

SEQ ID NO: 1252423 - RNA, 19 nt, Human
agggugggauagagaaggg

SEQ ID NO: 1252424 - RNA, 24 nt, Human
aguaaauuaugaaaaaaauagcaa

SEQ ID NO: 1252425 - RNA, 23 nt, Human
augaaagaacucauauaaaaaca

SEQ ID NO: 1252426 - RNA, 25 nt, Human
auggagugguccucaacuguccaag

SEQ ID NO: 1252427 - RNA, 18 nt, Human
auuggcagauaaguuaug

SEQ ID NO: 1252428 - RNA, 23 nt, Human
caaaacgaggcgugaaaaguccc

SEQ ID NO: 1252429 - RNA, 21 nt, Human
caaagacaggcagccagaaac

SEQ ID NO: 1252430 - RNA, 20 nt, Human
caccacaaacaggagaacac

SEQ ID NO: 1252431 - RNA, 19 nt, Human
caccuuagcaccacaaaca

SEQ ID NO: 1252432 - RNA, 23 nt, Human
cagagagaaagaacuaagguggg

SEQ ID NO: 1252433 - RNA, 23 nt, Human
cagauggaaaaccacaacucuug

SEQ ID NO: 1252434 - RNA, 18 nt, Human
cagccgccuggcugucuu

SEQ ID NO: 1252435 - RNA, 21 nt, Human
caggaaaaagccacaucugaa

SEQ ID NO: 1252436 - RNA, 19 nt, Human
caggagaacacuguuggaa

SEQ ID NO: 1252437 - RNA, 18 nt, Human
cagggugggauagagaag

SEQ ID NO: 1252438 - RNA, 18 nt, Human
caucucgucaacacuucu

SEQ ID NO: 1252439 - RNA, 19 nt, Human
ccaaggcacuaaugcccau

SEQ ID NO: 1252440 - RNA, 21 nt, Human
cccacggccuguuuaccgccc

SEQ ID NO: 1252441 - RNA, 21 nt, Human
cccaggaagggcuaugaucuc

SEQ ID NO: 1252442 - RNA, 18 nt, Human
cccccauuuccaacuucu

SEQ ID NO: 1252443 - RNA, 20 nt, Human
ccccuucccggcagccgccu

SEQ ID NO: 1252444 - RNA, 18 nt, Human
cccgccgccucuggggcc

SEQ ID NO: 1252445 - RNA, 19 nt, Human
ccgcuuuccucagaggaga

SEQ ID NO: 1252446 - RNA, 22 nt, Human
ccuaagacccagcccucccuca

SEQ ID NO: 1252447 - RNA, 22 nt, Human
ccugagauaccaggcccccuuc

SEQ ID NO: 1252448 - RNA, 19 nt, Human
cgcaccauucgccuggcau

SEQ ID NO: 1252449 - RNA, 21 nt, Human
cgcacgcccuccacaaguuca

SEQ ID NO: 1252450 - RNA, 18 nt, Human
cgccuggcugucuuucca

SEQ ID NO: 1252451 - RNA, 18 nt, Human
cucaaauauucucuccca

SEQ ID NO: 1252452 - RNA, 20 nt, Human
cucaaauauucucucccacc

SEQ ID NO: 1252453 - RNA, 18 nt, Human
cucacagauacggacugc

SEQ ID NO: 1252454 - RNA, 20 nt, Human
cucccaacccauggcugccu

SEQ ID NO: 1252455 - RNA, 21 nt, Human
cucccaccccuuacagaacuc

SEQ ID NO: 1252456 - RNA, 24 nt, Human
cucucuccauuccuucagccuuaa

SEQ ID NO: 1252457 - RNA, 18 nt, Human
cugaagaaaaaaaacaaa

SEQ ID NO: 1252458 - RNA, 23 nt, Human
cugaagaaaaaaaacaaaacgag

SEQ ID NO: 1252459 - RNA, 19 nt, Human
cugccucccuuccuugacu

SEQ ID NO: 1252460 - RNA, 25 nt, Human
cugcuggaccagcucaaggccgcac

SEQ ID NO: 1252461 - RNA, 22 nt, Human
cuuagcaccacaaacaggagaa

SEQ ID NO: 1252462 - RNA, 19 nt, Human
cuucccggcagccgccugg

SEQ ID NO: 1252463 - RNA, 21 nt, Human
gaaaaaaaaaaaaacaaaguu

SEQ ID NO: 1252464 - RNA, 19 nt, Human
gaaaaaaauucaguugugg

SEQ ID NO: 1252465 - RNA, 23 nt, Human
gaaaaaaauucaguuguggaaac

SEQ ID NO: 1252466 - RNA, 19 nt, Human
gaaaaagccacaucugaag

SEQ ID NO: 1252467 - RNA, 23 nt, Human
gaaaauucaacauugcuggggca

SEQ ID NO: 1252468 - RNA, 26 nt, Human
gaacauggcagcaaagacaggcagcc

SEQ ID NO: 1252469 - RNA, 24 nt, Human
gaacucauauaaaaacauugaaaa

SEQ ID NO: 1252470 - RNA, 22 nt, Human
gaauaggaggcucuucuucagg

SEQ ID NO: 1252471 - RNA, 19 nt, Human
gaaugggggucugaaaaaa

SEQ ID NO: 1252472 - RNA, 22 nt, Human
gacaucuugggaucacagagaa

SEQ ID NO: 1252473 - RNA, 21 nt, Human
gagaagaauaggaggcucuuc

SEQ ID NO: 1252474 - RNA, 22 nt, Human
gagaagcagaaucuuguuccag

SEQ ID NO: 1252475 - RNA, 19 nt, Human
gagacuuuccgcuuucaca

SEQ ID NO: 1252476 - RNA, 21 nt, Human
gaugcuguggagaggauggag

SEQ ID NO: 1252477 - RNA, 20 nt, Human
gcagccagaaacuggcuggg

SEQ ID NO: 1252478 - RNA, 22 nt, Human
gcaugaagaaugggggucugaa

SEQ ID NO: 1252479 - RNA, 20 nt, Human
gccgccucucuguccucccu

SEQ ID NO: 1252480 - RNA, 22 nt, Human
gccucccucagaccugucaucg

SEQ ID NO: 1252481 - RNA, 19 nt, Human
gcgcuuuuuccuuuuuucc

SEQ ID NO: 1252482 - RNA, 21 nt, Human
ggugaaagaugaggggaaaga

SEQ ID NO: 1252483 - RNA, 21 nt, Human
guagcccccauuuccaacuuc

SEQ ID NO: 1252484 - RNA, 23 nt, Human
gucccacucucuccauuccuuca

SEQ ID NO: 1252485 - RNA, 19 nt, Human
guccugaggaaaugaagag

SEQ ID NO: 1252486 - RNA, 19 nt, Human
uaaauuacaaacuaagagc

SEQ ID NO: 1252487 - RNA, 25 nt, Human
uaaccuacugucaaggcaggguggg

SEQ ID NO: 1252488 - RNA, 18 nt, Human
uaaguuauggaaagacac

SEQ ID NO: 1252489 - RNA, 23 nt, Human
uaccaggcccccuucuucuccug

SEQ ID NO: 1252490 - RNA, 26 nt, Human
uaccaggcccccuucuucuccugaca

SEQ ID NO: 1252491 - RNA, 22 nt, Human
uaccgcccaacccagccgcuuc

SEQ ID NO: 1252492 - RNA, 21 nt, Human
uagaagcaaauagagacacuu

SEQ ID NO: 1252493 - RNA, 21 nt, Human
uagcaaugaccucaccgaggc

SEQ ID NO: 1252494 - RNA, 22 nt, Human
uagcaccacaaacaggagaaca

SEQ ID NO: 1252495 - RNA, 23 nt, Human
uagcaccacaaacaggagaacac

SEQ ID NO: 1252496 - RNA, 19 nt, Human
uauggaaagacacaaugua

SEQ ID NO: 1252497 - RNA, 20 nt, Human
ucacaaaaaaaaauuauuuc

SEQ ID NO: 1252498 - RNA, 20 nt, Human
ucaggaaaaaaaaaaaaaca

SEQ ID NO: 1252499 - RNA, 21 nt, Human
ucaggaagaagauggagagug

SEQ ID NO: 1252500 - RNA, 18 nt, Human
uccaaggcacuaaugccc

SEQ ID NO: 1252501 - RNA, 23 nt, Human
ucccuaagacccagcccucccuc

SEQ ID NO: 1252502 - RNA, 21 nt, Human
ucccucagaccugucaucgag

SEQ ID NO: 1252503 - RNA, 19 nt, Human
uccgccucuuccuguucuc

SEQ ID NO: 1252504 - RNA, 26 nt, Human
ucuggaguggaggggaugcuguggag

SEQ ID NO: 1252505 - RNA, 21 nt, Human
ucuucuucaggaagaagaugg

SEQ ID NO: 1252506 - RNA, 24 nt, Human
ucuuuucuuuuucuaaauaacuga

SEQ ID NO: 1252507 - RNA, 23 nt, Human
ugaaaauccgugccacccaacuc

SEQ ID NO: 1252508 - RNA, 21 nt, Human
ugaaagaacucauauaaaaac

SEQ ID NO: 1252509 - RNA, 23 nt, Human
ugaaagaacucauauaaaaacau

SEQ ID NO: 1252510 - RNA, 21 nt, Human
ugacaacaguggaaggaucag

SEQ ID NO: 1252511 - RNA, 24 nt, Human
uggaaagacacaauguaagaaaua

SEQ ID NO: 1252512 - RNA, 20 nt, Human
uggagagugcaccucgcuuc

SEQ ID NO: 1252513 - RNA, 20 nt, Human
uggaguggaggggaugcugu

SEQ ID NO: 1252514 - RNA, 21 nt, Human
uggcagcccccuucccggcag

SEQ ID NO: 1252515 - RNA, 21 nt, Human
ugggaagagcaaaaaaaucuc

SEQ ID NO: 1252516 - RNA, 20 nt, Human
ugggaggugguuaaacaccc

SEQ ID NO: 1252517 - RNA, 21 nt, Human
ugggggugucuaauauagaaa

SEQ ID NO: 1252518 - RNA, 18 nt, Human
uuaccgcccaacccagcc

SEQ ID NO: 1252519 - RNA, 23 nt, Human
uuaccgcccaacccagccgcuuc

SEQ ID NO: 1252520 - RNA, 18 nt, Human
uucaggaagaagauggag

SEQ ID NO: 1252521 - RNA, 18 nt, Human
uuccaggucuucugaggc

SEQ ID NO: 1252522 - RNA, 21 nt, Human
uuccaggucuucugaggcuuu

SEQ ID NO: 1252523 - RNA, 24 nt, Human
uugcuuucugcuuuaagaugcuuu

SEQ ID NO: 1252524 - RNA, 23 nt, Human
uuggcagcccccuucccggcagc

SEQ ID NO: 1252525 - RNA, 23 nt, Human
uuguggaaaccaagguuagccag

SEQ ID NO: 1252526 - RNA, 22 nt, Human
uuuaagaaaauauuugcuggcc

SEQ ID NO: 1252527 - RNA, 24 nt, Human
uuuacaggauaaccucaacuuuuu

SEQ ID NO: 1252528 - RNA, 22 nt, Human
uuuauuggcagauaaguuaugg

SEQ ID NO: 1252529 - RNA, 21 nt, Human
uuugguaagucuucauauuua

SEQ ID NO: 1252530 - RNA, 22 nt, Human
aagcacgaccacgucaacaggc

SEQ ID NO: 1252531 - RNA, 20 nt, Human
accacgucaacaggcccugg

SEQ ID NO: 1252532 - RNA, 21 nt, Human
agcaaaggcagcccucuaaga

SEQ ID NO: 1252533 - RNA, 24 nt, Human
agccugucugaucuggugcuuguu

SEQ ID NO: 1252534 - RNA, 24 nt, Human
aggaagcaaaucugggucccugca

SEQ ID NO: 1252535 - RNA, 19 nt, Human
aguaggaagcaaaucuggg

SEQ ID NO: 1252536 - RNA, 18 nt, Human
cacgucaacaggcccuga

SEQ ID NO: 1252537 - RNA, 21 nt, Human
gccgcugcuggcagguuccug

SEQ ID NO: 1252538 - RNA, 18 nt, Human
gucacaggugggcagcag

SEQ ID NO: 1252539 - RNA, 21 nt, Human
gugccgcugcuggcagguucc

SEQ ID NO: 1252540 - RNA, 21 nt, Human
ucacaggugggcagcaggucu

SEQ ID NO: 1252541 - RNA, 18 nt, Human
uccauuuuucagugggua

SEQ ID NO: 1252542 - RNA, 23 nt, Human
ucucuggcaaaaggagcaaaggc

SEQ ID NO: 1252543 - RNA, 18 nt, Human
ugaguaggaagcaaaucu

SEQ ID NO: 1252544 - RNA, 24 nt, Human
ugucauagagcuucuucacagccu

SEQ ID NO: 1252545 - RNA, 21 nt, Human
uugguucucuggcaaaaggag

SEQ ID NO: 1252546 - RNA, 18 nt, Human
agaaguuggggggagggg

SEQ ID NO: 1252547 - RNA, 19 nt, Human
guccccgagaaguuggggg

SEQ ID NO: 1252548 - RNA, 20 nt, Human
uccccgagaaguugggggga

SEQ ID NO: 1252549 - RNA, 20 nt, Human
uuggggggaggggucggcaa

SEQ ID NO: 1252550 - RNA, 24 nt, Human
accccugugguccgagagggccgg

SEQ ID NO: 1252551 - RNA, 20 nt, Human
acccugaagcccccaccggc

SEQ ID NO: 1252552 - RNA, 21 nt, Human
acccugaagcccccaccggcu

SEQ ID NO: 1252553 - RNA, 21 nt, Human
acguggggugaauggggaggu

SEQ ID NO: 1252554 - RNA, 18 nt, Human
agagagaggccaugggga

SEQ ID NO: 1252555 - RNA, 18 nt, Human
agagaggccauggggagc

SEQ ID NO: 1252556 - RNA, 21 nt, Human
agggccggucacuccagcgug

SEQ ID NO: 1252557 - RNA, 24 nt, Human
caaacccugaagcccccaccggcu

SEQ ID NO: 1252558 - RNA, 27 nt, Human
caccggcugcugcugacccggccacac

SEQ ID NO: 1252559 - RNA, 20 nt, Human
cagcagccgggacugagggc

SEQ ID NO: 1252560 - RNA, 19 nt, Human
cagccgggacugagggcag

SEQ ID NO: 1252561 - RNA, 22 nt, Human
ccaacugaggcugccacagcca

SEQ ID NO: 1252562 - RNA, 21 nt, Human
ccacucguggggucagugcug

SEQ ID NO: 1252563 - RNA, 23 nt, Human
ccagcguggcuucugcucucucc

SEQ ID NO: 1252564 - RNA, 18 nt, Human
ccggcugcugcugacccg

SEQ ID NO: 1252565 - RNA, 21 nt, Human
cgagagggccggucacuccag

SEQ ID NO: 1252566 - RNA, 23 nt, Human
cgagugccgccagcagcagccgg

SEQ ID NO: 1252567 - RNA, 25 nt, Human
cgcuucgcuuccucggaggagccca

SEQ ID NO: 1252568 - RNA, 22 nt, Human
cggcccgagugccgccagcagc

SEQ ID NO: 1252569 - RNA, 24 nt, Human
cggcccgagugccgccagcagcag

SEQ ID NO: 1252570 - RNA, 22 nt, Human
cgguggggaggggcuucuguac

SEQ ID NO: 1252571 - RNA, 19 nt, Human
cucgcagggacccucccca

SEQ ID NO: 1252572 - RNA, 20 nt, Human
cugaagcccccaccggcugc

SEQ ID NO: 1252573 - RNA, 24 nt, Human
cugagggcagcgcuucgcuuccuc

SEQ ID NO: 1252574 - RNA, 18 nt, Human
cugcucucuccagagugg

SEQ ID NO: 1252575 - RNA, 19 nt, Human
gagagggccggucacucca

SEQ ID NO: 1252576 - RNA, 20 nt, Human
gagggccggucacuccagcg

SEQ ID NO: 1252577 - RNA, 23 nt, Human
gagggccggucacuccagcgugg

SEQ ID NO: 1252578 - RNA, 19 nt, Human
ggagcacguggggugaaug

SEQ ID NO: 1252579 - RNA, 27 nt, Human
gggacccuccccacucguggggcacuc

SEQ ID NO: 1252580 - RNA, 21 nt, Human
gggagcacguggggugaaugg

SEQ ID NO: 1252581 - RNA, 21 nt, Human
gggcagcgcuucgcuuccucg

SEQ ID NO: 1252582 - RNA, 23 nt, Human
ucaacaaacccugaagcccccac

SEQ ID NO: 1252583 - RNA, 28 nt, Human
ucaacaaacccugaagcccccaccggcu

SEQ ID NO: 1252584 - RNA, 24 nt, Human
ugccacagccaccgcuauguccac

SEQ ID NO: 1252585 - RNA, 20 nt, Human
ugccagagagaggccauggg

SEQ ID NO: 1252586 - RNA, 22 nt, Human
ugccaucaacaaacccugaagc

SEQ ID NO: 1252587 - RNA, 24 nt, Human
gugcucucgggcugccauaugugu

SEQ ID NO: 1252588 - RNA, 22 nt, Human
gacugagaagccccuguccccu

SEQ ID NO: 1252589 - RNA, 22 nt, Human
ggagagcacuguggcaagacug

SEQ ID NO: 1252590 - RNA, 18 nt, Human
uguggcaagacugagaag

SEQ ID NO: 1252591 - RNA, 19 nt, Human
agaauucuucugcuccaua

SEQ ID NO: 1252592 - RNA, 19 nt, Human
ccaggcaacuaaacugcac

SEQ ID NO: 1252593 - RNA, 18 nt, Human
ccuggaggaaguuccagg

SEQ ID NO: 1252594 - RNA, 23 nt, Human
ugagagcagaauucuucugcucc

SEQ ID NO: 1252595 - RNA, 19 nt, Human
cagcccaguguugccucca

SEQ ID NO: 1252596 - RNA, 22 nt, Human
cccaaauaugguccuccgcgcu

SEQ ID NO: 1252597 - RNA, 20 nt, Human
cuccauggccagaguaaggc

SEQ ID NO: 1252598 - RNA, 24 nt, Human
cuccauggccagaguaaggcccua

SEQ ID NO: 1252599 - RNA, 23 nt, Human
gagcuuugcuccagcccaguguu

SEQ ID NO: 1252600 - RNA, 20 nt, Human
gguuguagacagggauguug

SEQ ID NO: 1252601 - RNA, 21 nt, Human
uccaaggagcugacagccuaa

SEQ ID NO: 1252602 - RNA, 18 nt, Human
uccauggccagaguaagg

SEQ ID NO: 1252603 - RNA, 20 nt, Human
ucggugguugcaccuccaug

SEQ ID NO: 1252604 - RNA, 20 nt, Human
ucggugguugcaccuccaug

SEQ ID NO: 1252605 - RNA, 23 nt, Human
uucggugguugcaccuccauggc

SEQ ID NO: 1252606 - RNA, 22 nt, Human
uugagcuuugcuccagcccagu

SEQ ID NO: 1252607 - RNA, 18 nt, Human
aggguuucuguccagugu

SEQ ID NO: 1252608 - RNA, 24 nt, Human
agagaugucuggggacaccugugc

SEQ ID NO: 1252609 - RNA, 19 nt, Human
cagcagcccucccaggguu

SEQ ID NO: 1252610 - RNA, 19 nt, Human
cagccgcgccgccaccccc

SEQ ID NO: 1252611 - RNA, 23 nt, Human
ccgccuggguucccgggucuccg

SEQ ID NO: 1252612 - RNA, 22 nt, Human
ccggcagccgcgccgccacccc

SEQ ID NO: 1252613 - RNA, 21 nt, Human
ccugugcuggguuggcaggag

SEQ ID NO: 1252614 - RNA, 18 nt, Human
cgcccggccagcgcggga

SEQ ID NO: 1252615 - RNA, 21 nt, Human
cgcuggccucggucuccgcgc

SEQ ID NO: 1252616 - RNA, 24 nt, Human
cucccaggcgcugccuggcugcgg

SEQ ID NO: 1252617 - RNA, 21 nt, Human
cuccgccuggguucccggguc

SEQ ID NO: 1252618 - RNA, 24 nt, Human
cugccuggcugcggaggggagcgg

SEQ ID NO: 1252619 - RNA, 20 nt, Human
cugcgccguccuuuuccgcg

SEQ ID NO: 1252620 - RNA, 19 nt, Human
gaaugggacggagcagccc

SEQ ID NO: 1252621 - RNA, 23 nt, Human
gcagcagcccucccaggguuccu

SEQ ID NO: 1252622 - RNA, 19 nt, Human
ggcagccgcgccgccaccc

SEQ ID NO: 1252623 - RNA, 23 nt, Human
ucccggcagccgcgccgccaccc

SEQ ID NO: 1252624 - RNA, 19 nt, Human
ugcggaggggagcgggcag

SEQ ID NO: 1252625 - RNA, 22 nt, Human
ugcuuggggcacagguguggga

SEQ ID NO: 1252626 - RNA, 24 nt, Human
uggggacaccugugcuggguuggc

SEQ ID NO: 1252627 - RNA, 26 nt, Human
uuggcaggagcagcagcagcccuccc

SEQ ID NO: 1252628 - RNA, 20 nt, Human
ccgugggcuccucuuccccu

SEQ ID NO: 1252629 - RNA, 24 nt, Human
ccuugucaauucucucuuccaccu

SEQ ID NO: 1252630 - RNA, 22 nt, Human
ucccgugggcuccucuuccccu

SEQ ID NO: 1252631 - RNA, 22 nt, Human
ugccuugucaauucucucuucc

SEQ ID NO: 1252632 - RNA, 23 nt, Human
ugccuugucaauucucucuucca

SEQ ID NO: 1252633 - RNA, 23 nt, Human
uugccuugucaauucucucuucc

SEQ ID NO: 1252634 - RNA, 23 nt, Human
aagcguuggccugagaacuggaa

SEQ ID NO: 1252635 - RNA, 18 nt, Human
caagaagccacuuccagc

SEQ ID NO: 1252636 - RNA, 27 nt, Human
ccuccagcgccaacacugacugguccc

SEQ ID NO: 1252637 - RNA, 21 nt, Human
cgccaacacugacuggucccc

SEQ ID NO: 1252638 - RNA, 18 nt, Human
uccagacaguguuccaag

SEQ ID NO: 1252639 - RNA, 21 nt, Human
ucgugggccgccggcagccuc

SEQ ID NO: 1252640 - RNA, 22 nt, Human
aacacagaaccugauuggacaa

SEQ ID NO: 1252641 - RNA, 21 nt, Human
cacagaaccugauuggacaag

SEQ ID NO: 1252642 - RNA, 20 nt, Human
cacgcucugugaacacagaa

SEQ ID NO: 1252643 - RNA, 22 nt, Human
ccucuggacgaagagcugggga

SEQ ID NO: 1252644 - RNA, 21 nt, Human
ggaauguccgggaacucggug

SEQ ID NO: 1252645 - RNA, 24 nt, Human
ggcugggcuuccuacuucccucug

SEQ ID NO: 1252646 - RNA, 18 nt, Human
ucccucuggacgaagagc

SEQ ID NO: 1252647 - RNA, 20 nt, Human
ugaucugcagcacgcucugu

SEQ ID NO: 1252648 - RNA, 19 nt, Human
uggacgaagagcuggggau

SEQ ID NO: 1252649 - RNA, 19 nt, Human
accccgaggacaccgcggg

SEQ ID NO: 1252650 - RNA, 21 nt, Human
auagaaaacaggccacgucca

SEQ ID NO: 1252651 - RNA, 24 nt, Human
cacuaauacaaugcaugcauguag

SEQ ID NO: 1252652 - RNA, 21 nt, Human
cagcucgcaccccgaggacac

SEQ ID NO: 1252653 - RNA, 22 nt, Human
cagggccaaaaccuccuucugg

SEQ ID NO: 1252654 - RNA, 21 nt, Human
ccacguccagagaggcccagg

SEQ ID NO: 1252655 - RNA, 23 nt, Human
ccccgccccgccgccaucuugga

SEQ ID NO: 1252656 - RNA, 25 nt, Human
ccccgccccgccgccaucuuggaag

SEQ ID NO: 1252657 - RNA, 19 nt, Human
cccggccccgccccgccgc

SEQ ID NO: 1252658 - RNA, 19 nt, Human
ccgccaucuuggaaguggg

SEQ ID NO: 1252659 - RNA, 21 nt, Human
ccugccccggccccgccccgc

SEQ ID NO: 1252660 - RNA, 19 nt, Human
cgccccgccgccaucuugg

SEQ ID NO: 1252661 - RNA, 19 nt, Human
cggcuccguccgcccugcc

SEQ ID NO: 1252662 - RNA, 20 nt, Human
cuucuggaaggccgaagucc

SEQ ID NO: 1252663 - RNA, 18 nt, Human
gccaaaaccuccuucugg

SEQ ID NO: 1252664 - RNA, 18 nt, Human
gccccgccgccaucuugg

SEQ ID NO: 1252665 - RNA, 21 nt, Human
ggcggccugagggggcccugc

SEQ ID NO: 1252666 - RNA, 19 nt, Human
guccacgugcagcucgcac

SEQ ID NO: 1252667 - RNA, 18 nt, Human
guucuugggcuuccgucu

SEQ ID NO: 1252668 - RNA, 20 nt, Human
uauugauagaaaacaggcca

SEQ ID NO: 1252669 - RNA, 18 nt, Human
uccuucuggaaggccgaa

SEQ ID NO: 1252670 - RNA, 19 nt, Human
ucgcaccccgaggacaccg

SEQ ID NO: 1252671 - RNA, 19 nt, Human
uggaaggccgaagucccac

SEQ ID NO: 1252672 - RNA, 22 nt, Human
acucccguucugcccucgcugg

SEQ ID NO: 1252673 - RNA, 22 nt, Human
cagaucuccaugcggcuucugg

SEQ ID NO: 1252674 - RNA, 18 nt, Human
cccccgugccagaucucc

SEQ ID NO: 1252675 - RNA, 23 nt, Human
cuggcccccgugccagaucucca

SEQ ID NO: 1252676 - RNA, 19 nt, Human
gaucuccaugcggcuucug

SEQ ID NO: 1252677 - RNA, 25 nt, Human
ucccguucugcccucgcuggccccc

SEQ ID NO: 1252678 - RNA, 23 nt, Human
ucgcuggcccccgugccagaucu

SEQ ID NO: 1252679 - RNA, 25 nt, Human
ucgcuggcccccgugccagaucucc

SEQ ID NO: 1252680 - RNA, 19 nt, Human
ugacucccguucugcccuc

SEQ ID NO: 1252681 - RNA, 23 nt, Human
ugccagaucuccaugcggcuucu

SEQ ID NO: 1252682 - RNA, 19 nt, Human
ugcccguucugauguggga

SEQ ID NO: 1252683 - RNA, 22 nt, Human
uguucccauugcccguucugau

SEQ ID NO: 1252684 - RNA, 22 nt, Human
acccuuuugcugauacuccggg

SEQ ID NO: 1252685 - RNA, 19 nt, Human
acuccgggagcgcccaggg

SEQ ID NO: 1252686 - RNA, 21 nt, Human
agcgcccaggggcggagcuga

SEQ ID NO: 1252687 - RNA, 20 nt, Human
agcugggcacugagagcggg

SEQ ID NO: 1252688 - RNA, 22 nt, Human
aggcacaggaguggggacggca

SEQ ID NO: 1252689 - RNA, 22 nt, Human
cacuguaccauaaucucagagc

SEQ ID NO: 1252690 - RNA, 18 nt, Human
cccccggggagcccgggg

SEQ ID NO: 1252691 - RNA, 23 nt, Human
cccccggggagcccgggggcgga

SEQ ID NO: 1252692 - RNA, 24 nt, Human
ccgggggcggagccgauccuucuu

SEQ ID NO: 1252693 - RNA, 20 nt, Human
ccugggucguaggcacagga

SEQ ID NO: 1252694 - RNA, 19 nt, Human
cgcccaggggcggagcuga

SEQ ID NO: 1252695 - RNA, 22 nt, Human
cggcaaagggugggaaggaccc

SEQ ID NO: 1252696 - RNA, 23 nt, Human
cggggggagccgggcacuguggg

SEQ ID NO: 1252697 - RNA, 23 nt, Human
cgucgaggucugcgcagccucca

SEQ ID NO: 1252698 - RNA, 23 nt, Human
cugugggcggggcgaacccuuuu

SEQ ID NO: 1252699 - RNA, 19 nt, Human
cuuggggauccgacugcuc

SEQ ID NO: 1252700 - RNA, 22 nt, Human
gagcccagcuuugccggaaacg

SEQ ID NO: 1252701 - RNA, 21 nt, Human
gcgcugaaaccccggaggcca

SEQ ID NO: 1252702 - RNA, 23 nt, Human
gcugauacccggggggagcuggg

SEQ ID NO: 1252703 - RNA, 19 nt, Human
ggaaacguguuuuccguga

SEQ ID NO: 1252704 - RNA, 24 nt, Human
ggagccgggcacugugggcggggc

SEQ ID NO: 1252705 - RNA, 22 nt, Human
ggagcugauguuucagcugaua

SEQ ID NO: 1252706 - RNA, 20 nt, Human
gggaaggacccuucuaucaa

SEQ ID NO: 1252707 - RNA, 24 nt, Human
gucagcacuguaccauaaucucag

SEQ ID NO: 1252708 - RNA, 20 nt, Human
uaccauaaucucagagccca

SEQ ID NO: 1252709 - RNA, 22 nt, Human
uacccggggggagccgggcacu

SEQ ID NO: 1252710 - RNA, 22 nt, Human
uacccggggggagcugggcacu

SEQ ID NO: 1252711 - RNA, 18 nt, Human
uacuccgggagcgcccag

SEQ ID NO: 1252712 - RNA, 19 nt, Human
ucagagcccagcuuugccg

SEQ ID NO: 1252713 - RNA, 22 nt, Human
ucagcugauacccggggggagc

SEQ ID NO: 1252714 - RNA, 23 nt, Human
ugagagaacuucaauuucauguu

SEQ ID NO: 1252715 - RNA, 19 nt, Human
ugauacccggggggagccg

SEQ ID NO: 1252716 - RNA, 19 nt, Human
ugauacccggggggagcug

SEQ ID NO: 1252717 - RNA, 19 nt, Human
uggggacggcaaagggugg

SEQ ID NO: 1252718 - RNA, 24 nt, Human
uguaagcgcugaaaccccggaggc

SEQ ID NO: 1252719 - RNA, 25 nt, Human
ugucagcacuguaccauaaucucag

SEQ ID NO: 1252720 - RNA, 18 nt, Human
uuagugagagaacuucaa

SEQ ID NO: 1252721 - RNA, 19 nt, Human
cuuggcccgggccgccggc

SEQ ID NO: 1252722 - RNA, 22 nt, Human
ggcccgggccgccggcaccugg

SEQ ID NO: 1252723 - RNA, 21 nt, Human
uggcuuggcccgggccgccgg

SEQ ID NO: 1252724 - RNA, 23 nt, Human
ugggggugcuucccccagagugu

SEQ ID NO: 1252725 - RNA, 22 nt, Human
ccuucacuccuuuagcagucaa

SEQ ID NO: 1252726 - RNA, 24 nt, Human
ccuucccugaugcauuccuuuuuc

SEQ ID NO: 1252727 - RNA, 25 nt, Human
cuuucaguuuuaucaaaaccauuuc

SEQ ID NO: 1252728 - RNA, 21 nt, Human
gugaagacagucaacucuggu

SEQ ID NO: 1252729 - RNA, 18 nt, Human
uaaaaagagaaccuucac

SEQ ID NO: 1252730 - RNA, 21 nt, Human
uaaaaagagaaccuucacucc

SEQ ID NO: 1252731 - RNA, 20 nt, Human
uccaaacuccagcuuagcuu

SEQ ID NO: 1252732 - RNA, 21 nt, Human
uccaaagagaugguguagagu

SEQ ID NO: 1252733 - RNA, 22 nt, Human
ugaccccuucccugaugcauuc

SEQ ID NO: 1252734 - RNA, 23 nt, Human
ugcuugcuugcuuuuguucuguu

SEQ ID NO: 1252735 - RNA, 18 nt, Human
ugcuuuuguucuguuuga

SEQ ID NO: 1252736 - RNA, 23 nt, Human
ugugaagacagucaacucuggug

SEQ ID NO: 1252737 - RNA, 28 nt, Human
uuagcagucaagugaguuaauuuccuuu

SEQ ID NO: 1252738 - RNA, 20 nt, Human
uuccaaagagaugguguaga

SEQ ID NO: 1252739 - RNA, 21 nt, Human
uugauucuuuguccugcuugc

SEQ ID NO: 1252740 - RNA, 24 nt, Human
uuuguucuguuugaccccuucccu

SEQ ID NO: 1252741 - RNA, 18 nt, Human
aagaaguccccagccccu

SEQ ID NO: 1252742 - RNA, 22 nt, Human
aagccgggggcacccagaagga

SEQ ID NO: 1252743 - RNA, 23 nt, Human
aaggacccgucggacucugccuu

SEQ ID NO: 1252744 - RNA, 21 nt, Human
aaguccccagccccuugccgg

SEQ ID NO: 1252745 - RNA, 23 nt, Human
aggcgcacgugggcaagaagucc

SEQ ID NO: 1252746 - RNA, 21 nt, Human
agggagccugggcucggggcc

SEQ ID NO: 1252747 - RNA, 21 nt, Human
agggggcccggggccuuccca

SEQ ID NO: 1252748 - RNA, 21 nt, Human
ccacacugcacgccugcggug

SEQ ID NO: 1252749 - RNA, 20 nt, Human
ccccuugccggugcugccac

SEQ ID NO: 1252750 - RNA, 23 nt, Human
cccggggccuucccaggccugcu

SEQ ID NO: 1252751 - RNA, 23 nt, Human
ccguggccauuggcgccggugcc

SEQ ID NO: 1252752 - RNA, 24 nt, Human
cgccgcugcuggccggcgccgggg

SEQ ID NO: 1252753 - RNA, 25 nt, Human
cgggaccagcggaggccuccgccag

SEQ ID NO: 1252754 - RNA, 19 nt, Human
cucccgccgccucucagcc

SEQ ID NO: 1252755 - RNA, 19 nt, Human
cucccgccgccucucagcc

SEQ ID NO: 1252756 - RNA, 19 nt, Human
cucucagccuaucugcacc

SEQ ID NO: 1252757 - RNA, 19 nt, Human
cucucagccuaucugcacc

SEQ ID NO: 1252758 - RNA, 20 nt, Human
cugggcgggaccagcggagg

SEQ ID NO: 1252759 - RNA, 23 nt, Human
cugguggcggccaugaucugggc

SEQ ID NO: 1252760 - RNA, 18 nt, Human
cuucccaggccugcugga

SEQ ID NO: 1252761 - RNA, 22 nt, Human
cuucccaggccugcuggagucc

SEQ ID NO: 1252762 - RNA, 21 nt, Human
gagaaauggagacucucuggg

SEQ ID NO: 1252763 - RNA, 23 nt, Human
gagcggucccgugggggcggugu

SEQ ID NO: 1252764 - RNA, 21 nt, Human
gcaucggcuaagggggcccgg

SEQ ID NO: 1252765 - RNA, 23 nt, Human
ggaguccgggaagccgggggcac

SEQ ID NO: 1252766 - RNA, 20 nt, Human
ggccuucccaggccugcugg

SEQ ID NO: 1252767 - RNA, 22 nt, Human
ggcggccaugaucugggcggga

SEQ ID NO: 1252768 - RNA, 19 nt, Human
ggcgggaccagcggaggcc

SEQ ID NO: 1252769 - RNA, 19 nt, Human
ggcucggggccuugggcag

SEQ ID NO: 1252770 - RNA, 19 nt, Human
gggaagccgggggcaccca

SEQ ID NO: 1252771 - RNA, 22 nt, Human
gggagccugggcucggggccuu

SEQ ID NO: 1252772 - RNA, 18 nt, Human
gggcaagaaguccccagc

SEQ ID NO: 1252773 - RNA, 18 nt, Human
gucccgcuauuacggaau

SEQ ID NO: 1252774 - RNA, 19 nt, Human
gugcugccacgugagaagg

SEQ ID NO: 1252775 - RNA, 19 nt, Human
uccccagccccuugccggu

SEQ ID NO: 1252776 - RNA, 21 nt, Human
uccccagccccuugccggugc

SEQ ID NO: 1252777 - RNA, 22 nt, Human
ugaggagggccgacugccagug

SEQ ID NO: 1252778 - RNA, 19 nt, Human
ugaucugggcgggaccagc

SEQ ID NO: 1252779 - RNA, 27 nt, Human
ugccuuggcuugggggaccucgagagc

SEQ ID NO: 1252780 - RNA, 19 nt, Human
ugcggugugaggagggccg

SEQ ID NO: 1252781 - RNA, 18 nt, Human
ugcuggccggcgccgggg

SEQ ID NO: 1252782 - RNA, 22 nt, Human
uggagacucucugggcaucggc

SEQ ID NO: 1252783 - RNA, 25 nt, Human
uggcuugggggaccucgagagcggu

SEQ ID NO: 1252784 - RNA, 22 nt, Human
ugggcaucucucccgccgccuc

SEQ ID NO: 1252785 - RNA, 20 nt, Human
ugggcgggaccagcggaggc

SEQ ID NO: 1252786 - RNA, 21 nt, Human
agaagguagaugauggcaaag

SEQ ID NO: 1252787 - RNA, 21 nt, Human
agaagguagaugauggcaaag

SEQ ID NO: 1252788 - RNA, 23 nt, Human
agaagguagaugauggcaaaggg

SEQ ID NO: 1252789 - RNA, 20 nt, Human
ccucagaacgcaagagugag

SEQ ID NO: 1252790 - RNA, 19 nt, Human
ccucugggcuggggacagg

SEQ ID NO: 1252791 - RNA, 19 nt, Human
gcaucaucugguaucacac

SEQ ID NO: 1252792 - RNA, 19 nt, Human
ggaagagacucagggggcc

SEQ ID NO: 1252793 - RNA, 25 nt, Human
uccucagaacgcaagagugagccaa

SEQ ID NO: 1252794 - RNA, 18 nt, Human
ugggcuggggacaggcuu

SEQ ID NO: 1252795 - RNA, 25 nt, Human
aaaacuuacuuuagugguuuccagg

SEQ ID NO: 1252796 - RNA, 22 nt, Human
aaaagaaaaaagugcuugaaaa

SEQ ID NO: 1252797 - RNA, 22 nt, Human
aaaguuguauuccuuggcaugg

SEQ ID NO: 1252798 - RNA, 23 nt, Human
aagcaaaaggaagaaaaacuuaa

SEQ ID NO: 1252799 - RNA, 24 nt, Human
acaaagaccuccucgguccacgcu

SEQ ID NO: 1252800 - RNA, 25 nt, Human
acaacgcaauucaacccaccacaac

SEQ ID NO: 1252801 - RNA, 20 nt, Human
acuuagguuuggcuaaguuc

SEQ ID NO: 1252802 - RNA, 25 nt, Human
acuuuagugguuuccagggaaaagu

SEQ ID NO: 1252803 - RNA, 19 nt, Human
agaccuccucgguccacgc

SEQ ID NO: 1252804 - RNA, 22 nt, Human
agaggaaagaagggaaggaagg

SEQ ID NO: 1252805 - RNA, 21 nt, Human
agcgcaaccauggaucacgaa

SEQ ID NO: 1252806 - RNA, 19 nt, Human
aggaagaaaaacuuaaagg

SEQ ID NO: 1252807 - RNA, 28 nt, Human
aggaagaaaaacuuaaagguaaaaaaga

SEQ ID NO: 1252808 - RNA, 27 nt, Human
aggaaggaaacgugucuuggaagagga

SEQ ID NO: 1252809 - RNA, 18 nt, Human
aggccucuagacacuggc

SEQ ID NO: 1252810 - RNA, 19 nt, Human
aggccucuagacacuggcu

SEQ ID NO: 1252811 - RNA, 20 nt, Human
cacaaagaccuccucggucc

SEQ ID NO: 1252812 - RNA, 21 nt, Human
cacaaagaccuccucggucca

SEQ ID NO: 1252813 - RNA, 19 nt, Human
cagggcgggggacgggugg

SEQ ID NO: 1252814 - RNA, 18 nt, Human
caugacucuuacuuaggu

SEQ ID NO: 1252815 - RNA, 20 nt, Human
cauggaucacgaaaugccuc

SEQ ID NO: 1252816 - RNA, 23 nt, Human
cauggaucacgaaaugccucuaa

SEQ ID NO: 1252817 - RNA, 22 nt, Human
cccauccaccuuggccuggaag

SEQ ID NO: 1252818 - RNA, 24 nt, Human
cccugcaucuucaugccuuuccca

SEQ ID NO: 1252819 - RNA, 19 nt, Human
ccgcgcucgccgccgccgc

SEQ ID NO: 1252820 - RNA, 22 nt, Human
ccucucuccuagacucccugca

SEQ ID NO: 1252821 - RNA, 20 nt, Human
cgcucgccgccgccgcuucg

SEQ ID NO: 1252822 - RNA, 21 nt, Human
cuaaaucaaccugagccgcgc

SEQ ID NO: 1252823 - RNA, 18 nt, Human
cuugagaggagaaacccc

SEQ ID NO: 1252824 - RNA, 23 nt, Human
cuuucccaagcccuucaugucug

SEQ ID NO: 1252825 - RNA, 22 nt, Human
gagcgcaaccauggaucacgaa

SEQ ID NO: 1252826 - RNA, 22 nt, Human
gaggagaaacccccguguagca

SEQ ID NO: 1252827 - RNA, 22 nt, Human
gcaggaagcaugucugccuaca

SEQ ID NO: 1252828 - RNA, 24 nt, Human
ggcauggggcccauccaccuuggc

SEQ ID NO: 1252829 - RNA, 22 nt, Human
ggcccauccaccuuggccugga

SEQ ID NO: 1252830 - RNA, 18 nt, Human
gguguuauccggucccug

SEQ ID NO: 1252831 - RNA, 18 nt, Human
uaaaagacuuucuuuagg

SEQ ID NO: 1252832 - RNA, 27 nt, Human
uaggaaaagcaaaacuuacuuuagugg

SEQ ID NO: 1252833 - RNA, 22 nt, Human
ucagcgguuccuucaggccucu

SEQ ID NO: 1252834 - RNA, 23 nt, Human
ucaguauauuaaagcaaaaggaa

SEQ ID NO: 1252835 - RNA, 23 nt, Human
ucccucuuucugguguuauccgg

SEQ ID NO: 1252836 - RNA, 24 nt, Human
uccuucaggccucuagacacuggc

SEQ ID NO: 1252837 - RNA, 24 nt, Human
uccuuggcauggggcccauccacc

SEQ ID NO: 1252838 - RNA, 19 nt, Human
uggaagaggagaucuccuc

SEQ ID NO: 1252839 - RNA, 20 nt, Human
uggaagaggagaucuccucu

SEQ ID NO: 1252840 - RNA, 23 nt, Human
uggaagaggagaucuccucuggu

SEQ ID NO: 1252841 - RNA, 20 nt, Human
uggcauggggcccauccacc

SEQ ID NO: 1252842 - RNA, 25 nt, Human
uggcauggggcccauccaccuuggc

SEQ ID NO: 1252843 - RNA, 18 nt, Human
uguccagagcugagcaca

SEQ ID NO: 1252844 - RNA, 23 nt, Human
uuaaagcaaaaggaagaaaaacu

SEQ ID NO: 1252845 - RNA, 27 nt, Human
uucuaaaucaaccugagccgcgcucgc

SEQ ID NO: 1252846 - RNA, 25 nt, Human
uugaaaauaauucucagggacuuau

SEQ ID NO: 1252847 - RNA, 18 nt, Human
aaaaauagcaaaacacac

SEQ ID NO: 1252848 - RNA, 22 nt, Human
aaaagagaagauacauaagaaa

SEQ ID NO: 1252849 - RNA, 19 nt, Human
aaaaggaaacaaucauaaa

SEQ ID NO: 1252850 - RNA, 24 nt, Human
aaacauugaauuccuaauauaaaa

SEQ ID NO: 1252851 - RNA, 24 nt, Human
aaagacuuuaauauaccuuuuuca

SEQ ID NO: 1252852 - RNA, 23 nt, Human
aaagauauucaacagaaauaaag

SEQ ID NO: 1252853 - RNA, 22 nt, Human
aaaguuacuuugaaaagacuga

SEQ ID NO: 1252854 - RNA, 26 nt, Human
aaaugcaguguauagauaacuuugaa

SEQ ID NO: 1252855 - RNA, 22 nt, Human
aagaaaaaauauaaugugaaga

SEQ ID NO: 1252856 - RNA, 20 nt, Human
aagcugcaaaucuauagcaa

SEQ ID NO: 1252857 - RNA, 19 nt, Human
aaguagcuaggcucuuuug

SEQ ID NO: 1252858 - RNA, 21 nt, Human
aaugaaaucagcaaaagccaa

SEQ ID NO: 1252859 - RNA, 24 nt, Human
aauuccagcaacagccccucgcug

SEQ ID NO: 1252860 - RNA, 25 nt, Human
acagugacccuaacaucuacuuccu

SEQ ID NO: 1252861 - RNA, 25 nt, Human
acugagagaaauuaaagauauucaa

SEQ ID NO: 1252862 - RNA, 24 nt, Human
acugcugcacuccagccuggguga

SEQ ID NO: 1252863 - RNA, 21 nt, Human
agaaaaggaaacaaucauaaa

SEQ ID NO: 1252864 - RNA, 22 nt, Human
agaauagagagcucguaaagag

SEQ ID NO: 1252865 - RNA, 24 nt, Human
agaauagagagcucguaaagagaa

SEQ ID NO: 1252866 - RNA, 18 nt, Human
agacucaaaaaguaacga

SEQ ID NO: 1252867 - RNA, 21 nt, Human
agcaaaguggaccugcucucc

SEQ ID NO: 1252868 - RNA, 18 nt, Human
agcauaauuugucugcau

SEQ ID NO: 1252869 - RNA, 18 nt, Human
agcucguaaagagaacca

SEQ ID NO: 1252870 - RNA, 21 nt, Human
aggaacacuugagcccgagaa

SEQ ID NO: 1252871 - RNA, 19 nt, Human
aggcaaauuccagcaacag

SEQ ID NO: 1252872 - RNA, 20 nt, Human
aggcccaaaacaagaaucaa

SEQ ID NO: 1252873 - RNA, 21 nt, Human
aggcgggguccuggccugcuc

SEQ ID NO: 1252874 - RNA, 24 nt, Human
agguacaguggcucacgccauuaa

SEQ ID NO: 1252875 - RNA, 23 nt, Human
aguccuagcuacuccuaaguagc

SEQ ID NO: 1252876 - RNA, 20 nt, Human
agugagcucugagcaacugc

SEQ ID NO: 1252877 - RNA, 24 nt, Human
aguggcucacgccauuaaucccag

SEQ ID NO: 1252878 - RNA, 18 nt, Human
aguuuuuauaaauguaua

SEQ ID NO: 1252879 - RNA, 19 nt, Human
augaaacagaauagagagc

SEQ ID NO: 1252880 - RNA, 24 nt, Human
augaauauuaacauccaaccucac

SEQ ID NO: 1252881 - RNA, 19 nt, Human
caaaaauagcaaaacacac

SEQ ID NO: 1252882 - RNA, 18 nt, Human
caaccaugccaccacccc

SEQ ID NO: 1252883 - RNA, 19 nt, Human
caacugaaaaacugacuau

SEQ ID NO: 1252884 - RNA, 24 nt, Human
caacugcugcacuccagccugggu

SEQ ID NO: 1252885 - RNA, 19 nt, Human
caagaagccucuguauggc

SEQ ID NO: 1252886 - RNA, 24 nt, Human
caagcaacagaaugggaaaugaaa

SEQ ID NO: 1252887 - RNA, 24 nt, Human
caccaacagugacccuaacaucua

SEQ ID NO: 1252888 - RNA, 23 nt, Human
cacccaaaaauagcaaaacacac

SEQ ID NO: 1252889 - RNA, 24 nt, Human
cacgccauuaaucccagcacuuug

SEQ ID NO: 1252890 - RNA, 22 nt, Human
cacuccagccugggugacagag

SEQ ID NO: 1252891 - RNA, 22 nt, Human
cacuccagccugggugacagag

SEQ ID NO: 1252892 - RNA, 22 nt, Human
cagcaauggccagccagacucc

SEQ ID NO: 1252893 - RNA, 23 nt, Human
cagccaccaacagugacccuaac

SEQ ID NO: 1252894 - RNA, 22 nt, Human
cagccgacccccaccaccccgg

SEQ ID NO: 1252895 - RNA, 24 nt, Human
cagcgucuuuacugcccuccagga

SEQ ID NO: 1252896 - RNA, 18 nt, Human
caggagcucgggcucugu

SEQ ID NO: 1252897 - RNA, 21 nt, Human
caguguauagauaacuuugaa

SEQ ID NO: 1252898 - RNA, 23 nt, Human
cauaaaauaaaugaaaucagcaa

SEQ ID NO: 1252899 - RNA, 22 nt, Human
caugguggccguggccuguagu

SEQ ID NO: 1252900 - RNA, 18 nt, Human
ccaaaaauagcaaaacac

SEQ ID NO: 1252901 - RNA, 22 nt, Human
ccaaaaauagcaaaacacacaa

SEQ ID NO: 1252902 - RNA, 23 nt, Human
ccaaaacaagaaucaauaaauac

SEQ ID NO: 1252903 - RNA, 23 nt, Human
ccagagccugucaggcggggucc

SEQ ID NO: 1252904 - RNA, 23 nt, Human
cccaaaaauagcaaaacacacaa

SEQ ID NO: 1252905 - RNA, 26 nt, Human
ccccaccaccccguagcagcucacgg

SEQ ID NO: 1252906 - RNA, 23 nt, Human
cccccaccaccccguagcagcuc

SEQ ID NO: 1252907 - RNA, 18 nt, Human
cccgaggcugcagugccu

SEQ ID NO: 1252908 - RNA, 23 nt, Human
cccgcaaccaugccaccaccccu

SEQ ID NO: 1252909 - RNA, 26 nt, Human
cccgcaaccaugccaccaccccuuac

SEQ ID NO: 1252910 - RNA, 19 nt, Human
cccguagcagcucacgggc

SEQ ID NO: 1252911 - RNA, 22 nt, Human
ccgcaaccaugccaccaccccu

SEQ ID NO: 1252912 - RNA, 23 nt, Human
ccgcuggugcagcucuuccccaa

SEQ ID NO: 1252913 - RNA, 23 nt, Human
ccucugccucuacaaaaaauuua

SEQ ID NO: 1252914 - RNA, 18 nt, Human
ccugcagcuuugaggcca

SEQ ID NO: 1252915 - RNA, 20 nt, Human
ccuguaguccuagcuacucc

SEQ ID NO: 1252916 - RNA, 18 nt, Human
cguaaagagaaccacaca

SEQ ID NO: 1252917 - RNA, 22 nt, Human
cucacgccauuaaucccagcac

SEQ ID NO: 1252918 - RNA, 24 nt, Human
cucacgccauuaaucccagcacuu

SEQ ID NO: 1252919 - RNA, 20 nt, Human
cucgggcucuguguggccag

SEQ ID NO: 1252920 - RNA, 18 nt, Human
cugaaaaacugacuauaa

SEQ ID NO: 1252921 - RNA, 19 nt, Human
cugauaaaaauauaccaug

SEQ ID NO: 1252922 - RNA, 18 nt, Human
cugcacuccagccugggu

SEQ ID NO: 1252923 - RNA, 20 nt, Human
cugcacuccagccuggguga

SEQ ID NO: 1252924 - RNA, 21 nt, Human
cugcacuccagccugggugac

SEQ ID NO: 1252925 - RNA, 22 nt, Human
cugcacuccagccugggugaca

SEQ ID NO: 1252926 - RNA, 22 nt, Human
cugcacuccagccugggugaca

SEQ ID NO: 1252927 - RNA, 23 nt, Human
cugcacuccagccugggugacag

SEQ ID NO: 1252928 - RNA, 25 nt, Human
cugcacuccagccugggugacagag

SEQ ID NO: 1252929 - RNA, 21 nt, Human
cugcugcacuccagccugggu

SEQ ID NO: 1252930 - RNA, 24 nt, Human
cugcugcacuccagccugggugac

SEQ ID NO: 1252931 - RNA, 20 nt, Human
cuugaaaauuaauaaucuaa

SEQ ID NO: 1252932 - RNA, 24 nt, Human
gacuguggcagcacuggggcagcc

SEQ ID NO: 1252933 - RNA, 20 nt, Human
gagagaaauuaaagauauuc

SEQ ID NO: 1252934 - RNA, 24 nt, Human
gagcaacugcugcacuccagccug

SEQ ID NO: 1252935 - RNA, 19 nt, Human
gaggaaaagauucauuuuc

SEQ ID NO: 1252936 - RNA, 23 nt, Human
gagucagaaccaucuccaaaaaa

SEQ ID NO: 1252937 - RNA, 22 nt, Human
gagugaaaaggcaagcaacaga

SEQ ID NO: 1252938 - RNA, 24 nt, Human
gcacuccagccugggugacagagu

SEQ ID NO: 1252939 - RNA, 19 nt, Human
gcagcacuggggcagccac

SEQ ID NO: 1252940 - RNA, 21 nt, Human
gcaggagcucgggcucugugu

SEQ ID NO: 1252941 - RNA, 19 nt, Human
gcaucucccacaaggucau

SEQ ID NO: 1252942 - RNA, 21 nt, Human
gcucaacacccucacguccaa

SEQ ID NO: 1252943 - RNA, 24 nt, Human
gcugcacuccagccugggugacag

SEQ ID NO: 1252944 - RNA, 23 nt, Human
ggaaaagauucauuuucaauaaa

SEQ ID NO: 1252945 - RNA, 21 nt, Human
ggccagguacaguggcucacg

SEQ ID NO: 1252946 - RNA, 19 nt, Human
ggccuguaguccuagcuac

SEQ ID NO: 1252947 - RNA, 22 nt, Human
guagcagcucacgggcauggaa

SEQ ID NO: 1252948 - RNA, 24 nt, Human
gucagaaccaucuccaaaaaaaau

SEQ ID NO: 1252949 - RNA, 24 nt, Human
gucugggaggucaaggaugcagug

SEQ ID NO: 1252950 - RNA, 24 nt, Human
guggaccugcucucccugaaggug

SEQ ID NO: 1252951 - RNA, 27 nt, Human
uaaaauaaaugaaaucagcaaaagcca

SEQ ID NO: 1252952 - RNA, 22 nt, Human
uaaaauaacucacugagaguga

SEQ ID NO: 1252953 - RNA, 24 nt, Human
uaacugauagcaaaaaggauacaa

SEQ ID NO: 1252954 - RNA, 19 nt, Human
uaacuuuaagucaaaaauu

SEQ ID NO: 1252955 - RNA, 26 nt, Human
uacacaaaaauuauuucauauagaag

SEQ ID NO: 1252956 - RNA, 23 nt, Human
uacagugaauauuaaaauauauu

SEQ ID NO: 1252957 - RNA, 25 nt, Human
uacagugaauauuaaaauauauuuu

SEQ ID NO: 1252958 - RNA, 21 nt, Human
uacugcccuccaggacucagc

SEQ ID NO: 1252959 - RNA, 21 nt, Human
uacugcuuguuaaaagauggg

SEQ ID NO: 1252960 - RNA, 21 nt, Human
uacuuugaaaagacugauaaa

SEQ ID NO: 1252961 - RNA, 21 nt, Human
uagaaaaauuuaaagcaguag

SEQ ID NO: 1252962 - RNA, 22 nt, Human
uagauagauagauagauagaua

SEQ ID NO: 1252963 - RNA, 22 nt, Human
uagauagauagauagauagaua

SEQ ID NO: 1252964 - RNA, 22 nt, Human
uagauagauagauagauagaua

SEQ ID NO: 1252965 - RNA, 22 nt, Human
uagauagauagauagauagaua

SEQ ID NO: 1252966 - RNA, 22 nt, Human
uagauagauagauagauagaua

SEQ ID NO: 1252967 - RNA, 22 nt, Human
uagauagauagauagauagaua

SEQ ID NO: 1252968 - RNA, 22 nt, Human
uagauagauagauagauagaua

SEQ ID NO: 1252969 - RNA, 24 nt, Human
uagauagauagauagauagguuag

SEQ ID NO: 1252970 - RNA, 20 nt, Human
uagcaggcauguggaacccg

SEQ ID NO: 1252971 - RNA, 21 nt, Human
uauaaaauguaacauaucaua

SEQ ID NO: 1252972 - RNA, 19 nt, Human
uauagaagccaauguguac

SEQ ID NO: 1252973 - RNA, 22 nt, Human
uauggcaucucccacaagguca

SEQ ID NO: 1252974 - RNA, 21 nt, Human
ucaaaaaguaacgauugaagg

SEQ ID NO: 1252975 - RNA, 22 nt, Human
ucaggcgggguccuggccugcu

SEQ ID NO: 1252976 - RNA, 19 nt, Human
ucauggagaagaagaaccc

SEQ ID NO: 1252977 - RNA, 18 nt, Human
uccaaaaaaaauugaugu

SEQ ID NO: 1252978 - RNA, 18 nt, Human
uccaaagaauuagaaaag

SEQ ID NO: 1252979 - RNA, 24 nt, Human
uccagccugggugacagagucaga

SEQ ID NO: 1252980 - RNA, 18 nt, Human
ucccgaggcugcagugcc

SEQ ID NO: 1252981 - RNA, 21 nt, Human
uccuagcaggcauguggaacc

SEQ ID NO: 1252982 - RNA, 21 nt, Human
ucuccaaaaaaaauugaugua

SEQ ID NO: 1252983 - RNA, 21 nt, Human
ugaaaaaaaaaauauggccag

SEQ ID NO: 1252984 - RNA, 23 nt, Human
ugaaaaaaaaaauauggccaggu

SEQ ID NO: 1252985 - RNA, 27 nt, Human
ugaaauagauacauuucuagaaaauca

SEQ ID NO: 1252986 - RNA, 19 nt, Human
ugacagagucagaaccauc

SEQ ID NO: 1252987 - RNA, 24 nt, Human
ugagaaaaggaaacaaucauaaaa

SEQ ID NO: 1252988 - RNA, 21 nt, Human
ugagcaacugcugcacuccag

SEQ ID NO: 1252989 - RNA, 27 nt, Human
ugagguuaggcccaaaacaagaaucuu

SEQ ID NO: 1252990 - RNA, 18 nt, Human
ugauagcaaaaaggauac

SEQ ID NO: 1252991 - RNA, 22 nt, Human
uggaaaaggugcaaguauagau

SEQ ID NO: 1252992 - RNA, 18 nt, Human
uggaacccgagaacagcu

SEQ ID NO: 1252993 - RNA, 20 nt, Human
uggaacccgagaacagcucg

SEQ ID NO: 1252994 - RNA, 24 nt, Human
uggagacagaggccaaagaugcug

SEQ ID NO: 1252995 - RNA, 22 nt, Human
uggcucacgccauuaaucccag

SEQ ID NO: 1252996 - RNA, 24 nt, Human
uggcucacgccauuaaucccagca

SEQ ID NO: 1252997 - RNA, 22 nt, Human
ugguggccguggccuguagucc

SEQ ID NO: 1252998 - RNA, 21 nt, Human
ugugcugucuuucauacaucg

SEQ ID NO: 1252999 - RNA, 19 nt, Human
uguguggccaggcaaggag

SEQ ID NO: 1253000 - RNA, 24 nt, Human
uguuuagaaauuaagcaucacauu

SEQ ID NO: 1253001 - RNA, 18 nt, Human
uuaaagcuugaaaauuaa

SEQ ID NO: 1253002 - RNA, 26 nt, Human
uuaaauacuuugauauaaaaacugca

SEQ ID NO: 1253003 - RNA, 19 nt, Human
uuagccaggcaugguggcc

SEQ ID NO: 1253004 - RNA, 22 nt, Human
uuaggcaaaccucagcuuggag

SEQ ID NO: 1253005 - RNA, 24 nt, Human
uuccaggaagaaacauugaauucc

SEQ ID NO: 1253006 - RNA, 19 nt, Human
uucuaagaagugagagugg

SEQ ID NO: 1253007 - RNA, 24 nt, Human
uugaauuccuaauauaaaauguaa

SEQ ID NO: 1253008 - RNA, 23 nt, Human
uuuguaaucauaaaauaacucac

SEQ ID NO: 1253009 - RNA, 24 nt, Human
uuuguaaucauaaaauaacucacu

SEQ ID NO: 1253010 - RNA, 23 nt, Human
aagcaggagcuggacccgcagag

SEQ ID NO: 1253011 - RNA, 19 nt, Human
aaguagcuaggcucuuuug

SEQ ID NO: 1253012 - RNA, 24 nt, Human
aauuccagcaacagccccucgcug

SEQ ID NO: 1253013 - RNA, 25 nt, Human
acagugacccuaacaucuacuuccu

SEQ ID NO: 1253014 - RNA, 23 nt, Human
acccucccucgggggaccugcua

SEQ ID NO: 1253015 - RNA, 19 nt, Human
agacagaggccaaagaugc

SEQ ID NO: 1253016 - RNA, 21 nt, Human
aggaacacuugagcccgagaa

SEQ ID NO: 1253017 - RNA, 19 nt, Human
aggcaaauuccagcaacag

SEQ ID NO: 1253018 - RNA, 20 nt, Human
aggcgggguccuggccugcu

SEQ ID NO: 1253019 - RNA, 21 nt, Human
aggcgggguccuggccugcuc

SEQ ID NO: 1253020 - RNA, 20 nt, Human
aggcugagguuagggauuug

SEQ ID NO: 1253021 - RNA, 24 nt, Human
agguacaguggcucacgccauuaa

SEQ ID NO: 1253022 - RNA, 23 nt, Human
aguccuagcuacuccuaaguagc

SEQ ID NO: 1253023 - RNA, 20 nt, Human
agugagcucugagcaacugc

SEQ ID NO: 1253024 - RNA, 24 nt, Human
aguggcucacgccauuaaucccag

SEQ ID NO: 1253025 - RNA, 18 nt, Human
caaccaugccaccacccc

SEQ ID NO: 1253026 - RNA, 24 nt, Human
caacugcugcacuccagccugggu

SEQ ID NO: 1253027 - RNA, 20 nt, Human
caacuucacggaggucuacu

SEQ ID NO: 1253028 - RNA, 19 nt, Human
caagaagccucuguauggc

SEQ ID NO: 1253029 - RNA, 24 nt, Human
caagcaacagaaugggaaaugaaa

SEQ ID NO: 1253030 - RNA, 24 nt, Human
caccaacagugacccuaacaucua

SEQ ID NO: 1253031 - RNA, 24 nt, Human
cacgccauuaaucccagcacuuug

SEQ ID NO: 1253032 - RNA, 22 nt, Human
cacuccagccugggugacagag

SEQ ID NO: 1253033 - RNA, 22 nt, Human
cagcaaaguggaccugcucucc

SEQ ID NO: 1253034 - RNA, 22 nt, Human
cagcaauggccagccagacucc

SEQ ID NO: 1253035 - RNA, 23 nt, Human
cagccaccaacagugacccuaac

SEQ ID NO: 1253036 - RNA, 21 nt, Human
cagccgacccccaccaccccg

SEQ ID NO: 1253037 - RNA, 24 nt, Human
cagcgucuuuacugcccuccagga

SEQ ID NO: 1253038 - RNA, 18 nt, Human
caggagcucgggcucugu

SEQ ID NO: 1253039 - RNA, 20 nt, Human
caggagcuggacccgcagag

SEQ ID NO: 1253040 - RNA, 22 nt, Human
caugguggccguggccuguagu

SEQ ID NO: 1253041 - RNA, 23 nt, Human
ccagagccugucaggcggggucc

SEQ ID NO: 1253042 - RNA, 22 nt, Human
cccacaugcaggaggaggaggc

SEQ ID NO: 1253043 - RNA, 26 nt, Human
ccccaccaccccguagcagcucacgg

SEQ ID NO: 1253044 - RNA, 23 nt, Human
cccccaccaccccguagcagcuc

SEQ ID NO: 1253045 - RNA, 22 nt, Human
ccccgcaaccaugccaccaccc

SEQ ID NO: 1253046 - RNA, 23 nt, Human
cccgcaaccaugccaccaccccu

SEQ ID NO: 1253047 - RNA, 26 nt, Human
cccgcaaccaugccaccaccccuuac

SEQ ID NO: 1253048 - RNA, 22 nt, Human
cccgcagaggcugcagaucauc

SEQ ID NO: 1253049 - RNA, 19 nt, Human
cccguagcagcucacgggc

SEQ ID NO: 1253050 - RNA, 22 nt, Human
ccgcaaccaugccaccaccccu

SEQ ID NO: 1253051 - RNA, 23 nt, Human
ccgcuggugcagcucuuccccaa

SEQ ID NO: 1253052 - RNA, 23 nt, Human
ccucugccucuacaaaaaauuua

SEQ ID NO: 1253053 - RNA, 18 nt, Human
ccugcagcuuugaggcca

SEQ ID NO: 1253054 - RNA, 20 nt, Human
ccuguaguccuagcuacucc

SEQ ID NO: 1253055 - RNA, 23 nt, Human
cguccaacaggucccagcuacac

SEQ ID NO: 1253056 - RNA, 22 nt, Human
cuaccgcaagcugggcgagcag

SEQ ID NO: 1253057 - RNA, 22 nt, Human
cucacgccauuaaucccagcac

SEQ ID NO: 1253058 - RNA, 24 nt, Human
cucacgccauuaaucccagcacuu

SEQ ID NO: 1253059 - RNA, 20 nt, Human
cuccaaaaaaaauugaugua

SEQ ID NO: 1253060 - RNA, 20 nt, Human
cucccgaggcugcagugccu

SEQ ID NO: 1253061 - RNA, 20 nt, Human
cucgggcucuguguggccag

SEQ ID NO: 1253062 - RNA, 18 nt, Human
cugcacuccagccugggu

SEQ ID NO: 1253063 - RNA, 20 nt, Human
cugcacuccagccuggguga

SEQ ID NO: 1253064 - RNA, 21 nt, Human
cugcacuccagccugggugac

SEQ ID NO: 1253065 - RNA, 23 nt, Human
cugcacuccagccugggugacag

SEQ ID NO: 1253066 - RNA, 25 nt, Human
cugcacuccagccugggugacagag

SEQ ID NO: 1253067 - RNA, 20 nt, Human
cugcugcacuccagccuggg

SEQ ID NO: 1253068 - RNA, 21 nt, Human
cugcugcacuccagccugggu

SEQ ID NO: 1253069 - RNA, 24 nt, Human
cugcugcacuccagccugggugac

SEQ ID NO: 1253070 - RNA, 18 nt, Human
cuguauggcaucucccac

SEQ ID NO: 1253071 - RNA, 21 nt, Human
cuucccccacaugcaggagga

SEQ ID NO: 1253072 - RNA, 25 nt, Human
gacccccaccaccccguagcagcuc

SEQ ID NO: 1253073 - RNA, 18 nt, Human
gacggcggcaagcaggag

SEQ ID NO: 1253074 - RNA, 24 nt, Human
gacuguggcagcacuggggcagcc

SEQ ID NO: 1253075 - RNA, 24 nt, Human
gagcaacugcugcacuccagccug

SEQ ID NO: 1253076 - RNA, 19 nt, Human
gaggaggaggccuggcggc

SEQ ID NO: 1253077 - RNA, 20 nt, Human
gaggaggaggccuggcggca

SEQ ID NO: 1253078 - RNA, 23 nt, Human
gagucagaaccaucuccaaaaaa

SEQ ID NO: 1253079 - RNA, 22 nt, Human
gagugaaaaggcaagcaacaga

SEQ ID NO: 1253080 - RNA, 20 nt, Human
gcaacuucacggaggucuac

SEQ ID NO: 1253081 - RNA, 23 nt, Human
gcacuccagccugggugacagag

SEQ ID NO: 1253082 - RNA, 24 nt, Human
gcacuccagccugggugacagagu

SEQ ID NO: 1253083 - RNA, 19 nt, Human
gcagcacuggggcagccac

SEQ ID NO: 1253084 - RNA, 21 nt, Human
gcaggagcucgggcucugugu

SEQ ID NO: 1253085 - RNA, 19 nt, Human
gcaucucccacaaggucau

SEQ ID NO: 1253086 - RNA, 21 nt, Human
gccaccaacagugacccuaac

SEQ ID NO: 1253087 - RNA, 18 nt, Human
gccuguaguccuagcuac

SEQ ID NO: 1253088 - RNA, 21 nt, Human
gcucaacacccucacguccaa

SEQ ID NO: 1253089 - RNA, 24 nt, Human
gcugcacuccagccugggugacag

SEQ ID NO: 1253090 - RNA, 19 nt, Human
ggaggucaaggaugcagug

SEQ ID NO: 1253091 - RNA, 19 nt, Human
ggcaucucccacaagguca

SEQ ID NO: 1253092 - RNA, 21 nt, Human
ggccagguacaguggcucacg

SEQ ID NO: 1253093 - RNA, 21 nt, Human
guagcagcucacgggcaugga

SEQ ID NO: 1253094 - RNA, 24 nt, Human
gucagaaccaucuccaaaaaaaau

SEQ ID NO: 1253095 - RNA, 24 nt, Human
guggaccugcucucccugaaggug

SEQ ID NO: 1253096 - RNA, 22 nt, Human
uaaaauaacucacugagaguga

SEQ ID NO: 1253097 - RNA, 22 nt, Human
uacaagaagccucuguauggca

SEQ ID NO: 1253098 - RNA, 21 nt, Human
uacugcccuccaggacucagc

SEQ ID NO: 1253099 - RNA, 22 nt, Human
uagauagauagauagauagaua

SEQ ID NO: 1253100 - RNA, 22 nt, Human
uagauagauagauagauagaua

SEQ ID NO: 1253101 - RNA, 22 nt, Human
uagauagauagauagauagaua

SEQ ID NO: 1253102 - RNA, 22 nt, Human
uagauagauagauagauagaua

SEQ ID NO: 1253103 - RNA, 22 nt, Human
uagauagauagauagauagaua

SEQ ID NO: 1253104 - RNA, 22 nt, Human
uagauagauagauagauagaua

SEQ ID NO: 1253105 - RNA, 22 nt, Human
uagauagauagauagauagaua

SEQ ID NO: 1253106 - RNA, 24 nt, Human
uagauagauagauagauagguuag

SEQ ID NO: 1253107 - RNA, 20 nt, Human
uagcaggcauguggaacccg

SEQ ID NO: 1253108 - RNA, 24 nt, Human
ucacuuaguuccugcaugaagccu

SEQ ID NO: 1253109 - RNA, 19 nt, Human
ucauggagaagaagaaccc

SEQ ID NO: 1253110 - RNA, 18 nt, Human
uccaaaaaaaauugaugu

SEQ ID NO: 1253111 - RNA, 18 nt, Human
uccacuggcucuucccug

SEQ ID NO: 1253112 - RNA, 24 nt, Human
uccagccugggugacagagucaga

SEQ ID NO: 1253113 - RNA, 25 nt, Human
ucccccacaugcaggaggaggaggc

SEQ ID NO: 1253114 - RNA, 18 nt, Human
ucccgaggcugcagugcc

SEQ ID NO: 1253115 - RNA, 22 nt, Human
uccgugaauuccaggacuucug

SEQ ID NO: 1253116 - RNA, 21 nt, Human
uccuagcaggcauguggaacc

SEQ ID NO: 1253117 - RNA, 21 nt, Human
ugaaaaaaaaaauauggccag

SEQ ID NO: 1253118 - RNA, 23 nt, Human
ugaaaaaaaaaauauggccaggu

SEQ ID NO: 1253119 - RNA, 19 nt, Human
ugacagagucagaaccauc

SEQ ID NO: 1253120 - RNA, 21 nt, Human
ugagcaacugcugcacuccag

SEQ ID NO: 1253121 - RNA, 21 nt, Human
ugccugcagcuuugaggccaa

SEQ ID NO: 1253122 - RNA, 23 nt, Human
ugcugcacuccagccugggugac

SEQ ID NO: 1253123 - RNA, 24 nt, Human
ugcugcacuccagccugggugaca

SEQ ID NO: 1253124 - RNA, 25 nt, Human
ugcugcacuccagccugggugacag

SEQ ID NO: 1253125 - RNA, 20 nt, Human
uggaacccgagaacagcucg

SEQ ID NO: 1253126 - RNA, 22 nt, Human
uggcucacgccauuaaucccag

SEQ ID NO: 1253127 - RNA, 24 nt, Human
uggcucacgccauuaaucccagca

SEQ ID NO: 1253128 - RNA, 22 nt, Human
ugguggccguggccuguagucc

SEQ ID NO: 1253129 - RNA, 19 nt, Human
uguguggccaggcaaggag

SEQ ID NO: 1253130 - RNA, 22 nt, Human
uucacggaggucuacuuccccc

SEQ ID NO: 1253131 - RNA, 25 nt, Human
uucccugagcucuuccacuaccgca

SEQ ID NO: 1253132 - RNA, 19 nt, Human
uucuaagaagugagagugg

SEQ ID NO: 1253133 - RNA, 23 nt, Human
uuuguaaucauaaaauaacucac

SEQ ID NO: 1253134 - RNA, 24 nt, Human
uuuguaaucauaaaauaacucacu

SEQ ID NO: 1253135 - RNA, 19 nt, Human
agagccccauccuugggga

SEQ ID NO: 1253136 - RNA, 21 nt, Human
agcaauucuuccaggaauugg

SEQ ID NO: 1253137 - RNA, 24 nt, Human
ccccagagagccugcucagaagcc

SEQ ID NO: 1253138 - RNA, 23 nt, Human
cucuucccguuguuucucgggcu

SEQ ID NO: 1253139 - RNA, 22 nt, Human
cugggggcguccaguccucuuc

SEQ ID NO: 1253140 - RNA, 26 nt, Human
cugggggcguccaguccucuuccugu

SEQ ID NO: 1253141 - RNA, 24 nt, Human
gaugccagagccccauccuugggg

SEQ ID NO: 1253142 - RNA, 19 nt, Human
uccaggaauuggggaugaa

SEQ ID NO: 1253143 - RNA, 26 nt, Human
uccuuggggauuggccccagagagcc

SEQ ID NO: 1253144 - RNA, 20 nt, Human
ucggaugccagagccccauc

SEQ ID NO: 1253145 - RNA, 22 nt, Human
ucugggaacacagcuugucaau

SEQ ID NO: 1253146 - RNA, 30 nt, Human; identical to SEQ ID NO: 1033520

SEQ ID NO: 1253147 - RNA, 22 nt, Human
uugcccucuucccguuguuucu

SEQ ID NO: 1253148 - RNA, 19 nt, Human
uuggugacgaagucuuucu

SEQ ID NO: 1253149 - RNA, 18 nt, Human
aagcaggagguuguucag

SEQ ID NO: 1253150 - RNA, 23 nt, Human
accacaaacuccauccucuauga

SEQ ID NO: 1253151 - RNA, 18 nt, Human
aggaaggcagaccuguug

SEQ ID NO: 1253152 - RNA, 18 nt, Human
auggcaaagcagauccaa

SEQ ID NO: 1253153 - RNA, 22 nt, Human
augugcaauucugagacagagc

SEQ ID NO: 1253154 - RNA, 22 nt, Human
caauccccagaagacuuccagu

SEQ ID NO: 1253155 - RNA, 21 nt, Human
caccauggcaaagcagaucca

SEQ ID NO: 1253156 - RNA, 18 nt, Human
cacccaccauggcaaagc

SEQ ID NO: 1253157 - RNA, 20 nt, Human
cagauccaagccccacgcaa

SEQ ID NO: 1253158 - RNA, 23 nt, Human
caugugcaauucugagacagagc

SEQ ID NO: 1253159 - RNA, 23 nt, Human
cuacccacccaccauggcaaagc

SEQ ID NO: 1253160 - RNA, 21 nt, Human
cucuaugauccuguaugcucu

SEQ ID NO: 1253161 - RNA, 26 nt, Human
cuucccaaauuucaccccuuguucuc

SEQ ID NO: 1253162 - RNA, 19 nt, Human
gcaaagcagauccaagccc

SEQ ID NO: 1253163 - RNA, 18 nt, Human
gccacaugugcaauucug

SEQ ID NO: 1253164 - RNA, 22 nt, Human
uacccacccaccauggcaaagc

SEQ ID NO: 1253165 - RNA, 24 nt, Human
ucccaaauuucaccccuuguucuc

SEQ ID NO: 1253166 - RNA, 20 nt, Human
uccccagaagacuuccaguu

SEQ ID NO: 1253167 - RNA, 22 nt, Human
uccccagaagacuuccaguugu

SEQ ID NO: 1253168 - RNA, 24 nt, Human
uccuaggccaccuaugguuuuugc

SEQ ID NO: 1253169 - RNA, 18 nt, Human
ugaaagggcaccaagccc

SEQ ID NO: 1253170 - RNA, 22 nt, Human
ugccaaggugggcuguccagag

SEQ ID NO: 1253171 - RNA, 19 nt, Human
uggaacacagagacacugg

SEQ ID NO: 1253172 - RNA, 22 nt, Human
uggcuucccaaauuucaccccu

SEQ ID NO: 1253173 - RNA, 19 nt, Human
uguucaguguuuccagaag

SEQ ID NO: 1253174 - RNA, 22 nt, Human
uguucaguguuuccagaagacc

SEQ ID NO: 1253175 - RNA, 18 nt, Human
uugcuacccacccaccau

SEQ ID NO: 1253176 - RNA, 26 nt, Human
uuugcaguagcaacugggucuccucc

SEQ ID NO: 1253177 - RNA, 18 nt, Human
aacaaaagauuuauuuga

SEQ ID NO: 1253178 - RNA, 22 nt, Human
cagcaggugugggggugagggg

SEQ ID NO: 1253179 - RNA, 22 nt, Human
acacuguaauuucccaaggcug

SEQ ID NO: 1253180 - RNA, 22 nt, Human
uaaaacacuguaauuucccaag

SEQ ID NO: 1253181 - RNA, 26 nt, Human
uaaaacacuguaauuucccaaggcug

SEQ ID NO: 1253182 - RNA, 23 nt, Human
aaaaaaacugcaaucguuuacau

SEQ ID NO: 1253183 - RNA, 19 nt, Human
aaaaagaaacuugucaaaa

SEQ ID NO: 1253184 - RNA, 23 nt, Human
aaaaggacaaauauuuagccaga

SEQ ID NO: 1253185 - RNA, 20 nt, Human
aaacaaacacaacauaguau

SEQ ID NO: 1253186 - RNA, 22 nt, Human
aaagaaaaaacccuauacugau

SEQ ID NO: 1253187 - RNA, 19 nt, Human
aaagaaaguaucaagagua

SEQ ID NO: 1253188 - RNA, 24 nt, Human
aaaugacuucaucuaucuuucuua

SEQ ID NO: 1253189 - RNA, 26 nt, Human
aaauucaccuuaaaaauagaaacaaa

SEQ ID NO: 1253190 - RNA, 18 nt, Human
aaccaccgagcccgcugg

SEQ ID NO: 1253191 - RNA, 18 nt, Human
aagaaaugaggcagaaag

SEQ ID NO: 1253192 - RNA, 22 nt, Human
aagaaaugaggcagaaaguguc

SEQ ID NO: 1253193 - RNA, 21 nt, Human
aagaagaaaaaguaaauguaa

SEQ ID NO: 1253194 - RNA, 18 nt, Human
aagagccaggacaugagc

SEQ ID NO: 1253195 - RNA, 19 nt, Human
aagcaaaacaucuuugucu

SEQ ID NO: 1253196 - RNA, 25 nt, Human
aagcaaaacaucuuugucuucccga

SEQ ID NO: 1253197 - RNA, 19 nt, Human
aagccacuuuugaccaauu

SEQ ID NO: 1253198 - RNA, 22 nt, Human
aauaacugauuuagaaaccaua

SEQ ID NO: 1253199 - RNA, 20 nt, Human
aaucccuccccugacaaauc

SEQ ID NO: 1253200 - RNA, 21 nt, Human
acaaaaagccacuuuugacca

SEQ ID NO: 1253201 - RNA, 18 nt, Human
acaaaacaccucuagcca

SEQ ID NO: 1253202 - RNA, 22 nt, Human
acaaaacaccucuagccagggu

SEQ ID NO: 1253203 - RNA, 22 nt, Human
acagacagcaugauaccugagc

SEQ ID NO: 1253204 - RNA, 19 nt, Human
accaauugcucccuacaua

SEQ ID NO: 1253205 - RNA, 20 nt, Human
accaggcaaauuuaugcagu

SEQ ID NO: 1253206 - RNA, 21 nt, Human
acugaugcauggaaaaacguc

SEQ ID NO: 1253207 - RNA, 28 nt, Human
acugcaguuuuucucaagguaucuuaau

SEQ ID NO: 1253208 - RNA, 18 nt, Human
agaaacaaacaaaaggac

SEQ ID NO: 1253209 - RNA, 22 nt, Human
agacagaagccaugugacuuaa

SEQ ID NO: 1253210 - RNA, 21 nt, Human
agacagcaugauaccugagca

SEQ ID NO: 1253211 - RNA, 21 nt, Human
agcaaaaggacuuuagaaaau

SEQ ID NO: 1253212 - RNA, 18 nt, Human
agcaaauaaaucaacuac

SEQ ID NO: 1253213 - RNA, 18 nt, Human
aggagcugguaucucuga

SEQ ID NO: 1253214 - RNA, 24 nt, Human
aggccugauugcuauuauucugaa

SEQ ID NO: 1253215 - RNA, 19 nt, Human
agggagacugaagcacaga

SEQ ID NO: 1253216 - RNA, 18 nt, Human
auaagcuucuucagagaa

SEQ ID NO: 1253217 - RNA, 23 nt, Human
auacaacauuucccucuuucccu

SEQ ID NO: 1253218 - RNA, 18 nt, Human
auaccaccacugcaccag

SEQ ID NO: 1253219 - RNA, 19 nt, Human
auagugccuucuucaagaa

SEQ ID NO: 1253220 - RNA, 31 nt, Human
aucaucuccuuaucaauacggcacagauucc

SEQ ID NO: 1253221 - RNA, 21 nt, Human
augagcgcuuuagccucccag

SEQ ID NO: 1253222 - RNA, 18 nt, Human
auuuuauguuacauauau

SEQ ID NO: 1253223 - RNA, 22 nt, Human
caaaaauguaaaaacaaacaca

SEQ ID NO: 1253224 - RNA, 20 nt, Human
caaaaggacuuuagaaaaug

SEQ ID NO: 1253225 - RNA, 22 nt, Human
caacuaccaugaucggaagggc

SEQ ID NO: 1253226 - RNA, 26 nt, Human
caacuuaaacugacauuaacuaauaa

SEQ ID NO: 1253227 - RNA, 20 nt, Human
caagacagaagccaugugac

SEQ ID NO: 1253228 - RNA, 20 nt, Human
caagacagggagacugaagc

SEQ ID NO: 1253229 - RNA, 22 nt, Human
cacaacaacccugugagguagg

SEQ ID NO: 1253230 - RNA, 19 nt, Human
cacagcuucacuuuccucu

SEQ ID NO: 1253231 - RNA, 21 nt, Human
cacccccaaggaauucaaagc

SEQ ID NO: 1253232 - RNA, 19 nt, Human
caccuuaaaaauagaaaca

SEQ ID NO: 1253233 - RNA, 21 nt, Human
cacuuacaacuuacaccagcc

SEQ ID NO: 1253234 - RNA, 20 nt, Human
cagcccgcgggcggaccccg

SEQ ID NO: 1253235 - RNA, 18 nt, Human
cagcggcggcggcgggcg

SEQ ID NO: 1253236 - RNA, 18 nt, Human
cagucuuuccccuugggg

SEQ ID NO: 1253237 - RNA, 18 nt, Human
cauacuaugaaguacggu

SEQ ID NO: 1253238 - RNA, 24 nt, Human
caucaaggaaagaaaaaacccuau

SEQ ID NO: 1253239 - RNA, 25 nt, Human
caucaaggaaagaaaaaacccuaua

SEQ ID NO: 1253240 - RNA, 18 nt, Human
caugauagaaucuuuaau

SEQ ID NO: 1253241 - RNA, 26 nt, Human
caugaucucaacuugaaacauuagaa

SEQ ID NO: 1253242 - RNA, 22 nt, Human
cauguugguagaucaggcuggc

SEQ ID NO: 1253243 - RNA, 19 nt, Human
ccaacccugacccuauacg

SEQ ID NO: 1253244 - RNA, 21 nt, Human
ccacaaucccuccccugacaa

SEQ ID NO: 1253245 - RNA, 20 nt, Human
ccacccaaucacagcggcgg

SEQ ID NO: 1253246 - RNA, 21 nt, Human
ccacuuccacugcccugacuu

SEQ ID NO: 1253247 - RNA, 24 nt, Human
cccaagcaugaucucaacuugaaa

SEQ ID NO: 1253248 - RNA, 26 nt, Human
cccaaggucacacaguuaaauucacu

SEQ ID NO: 1253249 - RNA, 24 nt, Human
cccagaacaucuguuuaagcagcc

SEQ ID NO: 1253250 - RNA, 18 nt, Human
ccccagcccccgccugcc

SEQ ID NO: 1253251 - RNA, 20 nt, Human
ccccgagccgccgcggaccc

SEQ ID NO: 1253252 - RNA, 23 nt, Human
ccccugagcuuccugcauuucuc

SEQ ID NO: 1253253 - RNA, 23 nt, Human
cccgcccccggcuccgccccggc

SEQ ID NO: 1253254 - RNA, 24 nt, Human
cccgcccccggcuccgccccggcg

SEQ ID NO: 1253255 - RNA, 20 nt, Human
cccgccugccggccgccggc

SEQ ID NO: 1253256 - RNA, 18 nt, Human
cccgcucgcaccgcagcc

SEQ ID NO: 1253257 - RNA, 22 nt, Human
cccgcucgcaccgcagcccgcg

SEQ ID NO: 1253258 - RNA, 19 nt, Human
cccggccucgggccccagc

SEQ ID NO: 1253259 - RNA, 25 nt, Human
cccggccucgggccccagcccccgc

SEQ ID NO: 1253260 - RNA, 20 nt, Human
cccggcgcagggcgcagccg

SEQ ID NO: 1253261 - RNA, 19 nt, Human
cccucuuucccuguuccca

SEQ ID NO: 1253262 - RNA, 24 nt, Human
ccgccgcugccgucgucgccgccg

SEQ ID NO: 1253263 - RNA, 21 nt, Human
ccgcugccgucgucgccgccg

SEQ ID NO: 1253264 - RNA, 22 nt, Human
ccgcugggccgccgcugccguc

SEQ ID NO: 1253265 - RNA, 27 nt, Human
ccggccgccggcccgcccccggcuccg

SEQ ID NO: 1253266 - RNA, 25 nt, Human
ccucgggccccagcccccgccugcc

SEQ ID NO: 1253267 - RNA, 18 nt, Human
ccucuagccaggguaagg

SEQ ID NO: 1253268 - RNA, 24 nt, Human
ccugagcaaauaaaucaacuacca

SEQ ID NO: 1253269 - RNA, 18 nt, Human
ccuuuuuguuguuuucca

SEQ ID NO: 1253270 - RNA, 21 nt, Human
cgcagcccgcgggcggacccc

SEQ ID NO: 1253271 - RNA, 21 nt, Human
cgccgcggacccaaccaccga

SEQ ID NO: 1253272 - RNA, 21 nt, Human
cggccucgggccccagccccc

SEQ ID NO: 1253273 - RNA, 23 nt, Human
cggcgcagggcgcagccgcugcc

SEQ ID NO: 1253274 - RNA, 22 nt, Human
cggcggcgggcgggggaggagg

SEQ ID NO: 1253275 - RNA, 23 nt, Human
cggcggcgggcgggggaggaggg

SEQ ID NO: 1253276 - RNA, 23 nt, Human
cgggccccagcccccgccugccg

SEQ ID NO: 1253277 - RNA, 25 nt, Human
cucccagcucccagccaaauaccuc

SEQ ID NO: 1253278 - RNA, 27 nt, Human
cucgggccccagcccccgccugccggc

SEQ ID NO: 1253279 - RNA, 22 nt, Human
cuuuuguauucccggucuacuu

SEQ ID NO: 1253280 - RNA, 20 nt, Human
gaaaagaguuuaauaaagaa

SEQ ID NO: 1253281 - RNA, 21 nt, Human
gaaaauaacugauuuagaaac

SEQ ID NO: 1253282 - RNA, 23 nt, Human
gaagaaaugaggcagaaaguguc

SEQ ID NO: 1253283 - RNA, 22 nt, Human
gacagaagccaugugacuuaag

SEQ ID NO: 1253284 - RNA, 24 nt, Human
gacaugagcgcuuuagccucccag

SEQ ID NO: 1253285 - RNA, 27 nt, Human
gacccacauaauacaacauuucccucu

SEQ ID NO: 1253286 - RNA, 19 nt, Human
gaggccccaagacccacau

SEQ ID NO: 1253287 - RNA, 20 nt, Human
gauucuuucuacugcacccc

SEQ ID NO: 1253288 - RNA, 20 nt, Human
gcaaagugugcuacugcccc

SEQ ID NO: 1253289 - RNA, 24 nt, Human
gcaccagaauuuuuaauuauucca

SEQ ID NO: 1253290 - RNA, 18 nt, Human
gcauggaaaaacguccaa

SEQ ID NO: 1253291 - RNA, 24 nt, Human
gccaaauaccucaugauagaaucu

SEQ ID NO: 1253292 - RNA, 25 nt, Human
gccccaagacccacauaauacaaca

SEQ ID NO: 1253293 - RNA, 21 nt, Human
gccccagcccccgccugccgg

SEQ ID NO: 1253294 - RNA, 22 nt, Human
gccggcccgcccccggcuccgc

SEQ ID NO: 1253295 - RNA, 19 nt, Human
gcggcggcgggcgggggag

SEQ ID NO: 1253296 - RNA, 21 nt, Human
gcggcgggcgggggaggaggg

SEQ ID NO: 1253297 - RNA, 21 nt, Human
ggaaaaaauuauaauuacaaa

SEQ ID NO: 1253298 - RNA, 18 nt, Human
ggaagggaaggaaggacu

SEQ ID NO: 1253299 - RNA, 22 nt, Human
ggacaugagcgcuuuagccucc

SEQ ID NO: 1253300 - RNA, 18 nt, Human
ggccccagcccccgccug

SEQ ID NO: 1253301 - RNA, 24 nt, Human
ggcgggggaggaggggagccgggc

SEQ ID NO: 1253302 - RNA, 25 nt, Human
gggcgggggaggaggggagccgggc

SEQ ID NO: 1253303 - RNA, 22 nt, Human
gggggaggaggggagccgggcc

SEQ ID NO: 1253304 - RNA, 25 nt, Human
gguauaccaccacugcaccagaauu

SEQ ID NO: 1253305 - RNA, 23 nt, Human
guauaccaccacugcaccagaau

SEQ ID NO: 1253306 - RNA, 20 nt, Human
uaaaacccccaacagaauga

SEQ ID NO: 1253307 - RNA, 24 nt, Human
uaaaauuuccaagacagaagccau

SEQ ID NO: 1253308 - RNA, 18 nt, Human
uaaagaacauccaaggcc

SEQ ID NO: 1253309 - RNA, 20 nt, Human
uaagugacuugcccaagguc

SEQ ID NO: 1253310 - RNA, 24 nt, Human
uaagugacuugcccaaggucacac

SEQ ID NO: 1253311 - RNA, 18 nt, Human
uaauaauagcagcagacu

SEQ ID NO: 1253312 - RNA, 24 nt, Human
uaauacaacauuucccucuuuccc

SEQ ID NO: 1253313 - RNA, 19 nt, Human
uaauccccacaacaacccu

SEQ ID NO: 1253314 - RNA, 19 nt, Human
uaauguuaaaacugacaca

SEQ ID NO: 1253315 - RNA, 19 nt, Human
uacaacuuacaccagcccc

SEQ ID NO: 1253316 - RNA, 24 nt, Human
uacaagacagggagacugaagcac

SEQ ID NO: 1253317 - RNA, 21 nt, Human
uagaaacaaacaaaaggacaa

SEQ ID NO: 1253318 - RNA, 20 nt, Human
uagccucccagcucccagcc

SEQ ID NO: 1253319 - RNA, 21 nt, Human
uauuacuucuuaaaaccccca

SEQ ID NO: 1253320 - RNA, 18 nt, Human
uauuccaacaacuacagg

SEQ ID NO: 1253321 - RNA, 23 nt, Human
uauuuuguauuuauauagugccu

SEQ ID NO: 1253322 - RNA, 24 nt, Human
ucacugcaguuuuucucaagguau

SEQ ID NO: 1253323 - RNA, 24 nt, Human
ucccaagccuccugguuccugucu

SEQ ID NO: 1253324 - RNA, 21 nt, Human
ucgcaccgcagcccgcgggcg

SEQ ID NO: 1253325 - RNA, 24 nt, Human
ucgggccccagcccccgccugccg

SEQ ID NO: 1253326 - RNA, 20 nt, Human
ucgucgccgccggcgcucag

SEQ ID NO: 1253327 - RNA, 23 nt, Human
ucuaucuuucuuaaacauguuga

SEQ ID NO: 1253328 - RNA, 22 nt, Human
ucuguaccgaaagcugcagaaa

SEQ ID NO: 1253329 - RNA, 20 nt, Human
ucuucagagaagcaaaacau

SEQ ID NO: 1253330 - RNA, 23 nt, Human
ugaaaagaguuuaauaaagaaca

SEQ ID NO: 1253331 - RNA, 21 nt, Human
ugaaaauaacauaaaugcuau

SEQ ID NO: 1253332 - RNA, 21 nt, Human
ugagccaaaagauacagauaa

SEQ ID NO: 1253333 - RNA, 24 nt, Human
ugagcuuccugcauuucucuuuuc

SEQ ID NO: 1253334 - RNA, 19 nt, Human
ugaggucuuucuacugcca

SEQ ID NO: 1253335 - RNA, 20 nt, Human
ugcaaaaauguaaaaacaaa

SEQ ID NO: 1253336 - RNA, 22 nt, Human
ugcaaagugugcuacugccccc

SEQ ID NO: 1253337 - RNA, 24 nt, Human
uggaaaaacguccaaaaaaacugc

SEQ ID NO: 1253338 - RNA, 25 nt, Human
uggaaggcuguuuuaaaagaggagc

SEQ ID NO: 1253339 - RNA, 25 nt, Human
ugguauaccaccacugcaccagaau

SEQ ID NO: 1253340 - RNA, 18 nt, Human
uguaccgaaagcugcaga

SEQ ID NO: 1253341 - RNA, 19 nt, Human
uguuuuccauagucaacag

SEQ ID NO: 1253342 - RNA, 18 nt, Human
uuaaaugcuuuacagaca

SEQ ID NO: 1253343 - RNA, 23 nt, Human
uuacugaugcauggaaaaacguc

SEQ ID NO: 1253344 - RNA, 19 nt, Human
uuacuuagauccagcugca

SEQ ID NO: 1253345 - RNA, 20 nt, Human
uucaaagcauuauuggugca

SEQ ID NO: 1253346 - RNA, 20 nt, Human
uucaccuccuuguuguaugg

SEQ ID NO: 1253347 - RNA, 23 nt, Human
uuccauagucaacaguuuuagca

SEQ ID NO: 1253348 - RNA, 18 nt, Human
uucccccaacccugaccc

SEQ ID NO: 1253349 - RNA, 19 nt, Human
uucccucuuucccuguucc

SEQ ID NO: 1253350 - RNA, 23 nt, Human
uuccugcauuucucuuuucuuga

SEQ ID NO: 1253351 - RNA, 21 nt, Human
uuuacuuuuaguuacaauaau

SEQ ID NO: 1253352 - RNA, 22 nt, Human
uuuaguuacaauaauuuauaga

SEQ ID NO: 1253353 - RNA, 24 nt, Human
uuuccaggguaaaaaauggcaucu

SEQ ID NO: 1253354 - RNA, 23 nt, Human
uuucuugaaaaaucagugcuuga

SEQ ID NO: 1253355 - RNA, 23 nt, Human
uuuuaaagaaaguaucaagagua

SEQ ID NO: 1253356 - RNA, 27 nt, Human
aguggcuauuuaccaauaacaaguaac

SEQ ID NO: 1253357 - RNA, 23 nt, Human
aagagaccagcagcucacagagc

SEQ ID NO: 1253358 - RNA, 21 nt, Human
aagcacaaucccgacucccgc

SEQ ID NO: 1253359 - RNA, 21 nt, Human
acagagccuuccugaguucag

SEQ ID NO: 1253360 - RNA, 19 nt, Human
acucuagcuccaccuucuc

SEQ ID NO: 1253361 - RNA, 19 nt, Human
acucuagcuccaccuucuc

SEQ ID NO: 1253362 - RNA, 25 nt, Human
acucuguugcccaggcuggagugca

SEQ ID NO: 1253363 - RNA, 20 nt, Human
acugcaagcucugccucccg

SEQ ID NO: 1253364 - RNA, 20 nt, Human
agacagggacugugcagagc

SEQ ID NO: 1253365 - RNA, 21 nt, Human
agacuguccagccaguuuuuc

SEQ ID NO: 1253366 - RNA, 24 nt, Human
agagacuguccagccaguuuuucc

SEQ ID NO: 1253367 - RNA, 22 nt, Human
agagccuuccugaguucagcau

SEQ ID NO: 1253368 - RNA, 20 nt, Human
agaguuccaagugacuuuuc

SEQ ID NO: 1253369 - RNA, 22 nt, Human
agauucuugccucauucagcuu

SEQ ID NO: 1253370 - RNA, 23 nt, Human
agcaguaaacacuugcagacuuc

SEQ ID NO: 1253371 - RNA, 23 nt, Human
agccgcuggagcgcuacggucug

SEQ ID NO: 1253372 - RNA, 22 nt, Human
aggacacugcugcccuaccaga

SEQ ID NO: 1253373 - RNA, 21 nt, Human
aggaggagacaaugucugaga

SEQ ID NO: 1253374 - RNA, 19 nt, Human
aggccgcgggccgggggaa

SEQ ID NO: 1253375 - RNA, 25 nt, Human
aggcuggagugcaguggcgcaaucu

SEQ ID NO: 1253376 - RNA, 21 nt, Human
agugcaguggcgcaaucucag

SEQ ID NO: 1253377 - RNA, 27 nt, Human
aguuuuguucuccauacucuagcucca

SEQ ID NO: 1253378 - RNA, 22 nt, Human
caaccaugcugcugggacugaa

SEQ ID NO: 1253379 - RNA, 21 nt, Human
caacugcugucauuugggggu

SEQ ID NO: 1253380 - RNA, 21 nt, Human
caagcacaaucccgacucccg

SEQ ID NO: 1253381 - RNA, 21 nt, Human
cacaaucccgacucccgcgcg

SEQ ID NO: 1253382 - RNA, 24 nt, Human
cacucuguugcccaggcuggagug

SEQ ID NO: 1253383 - RNA, 23 nt, Human
cacugcaagcucugccucccggg

SEQ ID NO: 1253384 - RNA, 19 nt, Human
cagagccuuccugaguuca

SEQ ID NO: 1253385 - RNA, 22 nt, Human
caggccauucuccugccucagc

SEQ ID NO: 1253386 - RNA, 20 nt, Human
caggugcccgccgccacggc

SEQ ID NO: 1253387 - RNA, 24 nt, Human
cagugcccuccugggcuacucuuc

SEQ ID NO: 1253388 - RNA, 18 nt, Human
cauccaagagcugcugga

SEQ ID NO: 1253389 - RNA, 22 nt, Human
ccacaacugagagcacagggac

SEQ ID NO: 1253390 - RNA, 21 nt, Human
ccacccaccucagccucccac

SEQ ID NO: 1253391 - RNA, 23 nt, Human
ccagccaguuuuucccugguugu

SEQ ID NO: 1253392 - RNA, 21 nt, Human
ccauacucuagcuccaccuuc

SEQ ID NO: 1253393 - RNA, 20 nt, Human
cccaagaggcguuuguggag

SEQ ID NO: 1253394 - RNA, 21 nt, Human
cccaggaccugggcucacagg

SEQ ID NO: 1253395 - RNA, 23 nt, Human
cccggguucaggccauucuccug

SEQ ID NO: 1253396 - RNA, 18 nt, Human
cccuaaauccugugacuc

SEQ ID NO: 1253397 - RNA, 22 nt, Human
cccuccugggcuacucuucuug

SEQ ID NO: 1253398 - RNA, 23 nt, Human
ccgcgggccgggggaagucgugc

SEQ ID NO: 1253399 - RNA, 24 nt, Human
ccucccggguucaggccauucucc

SEQ ID NO: 1253400 - RNA, 20 nt, Human
ccucuuccccaucuucuugu

SEQ ID NO: 1253401 - RNA, 22 nt, Human
ccugaccuggugauccacccac

SEQ ID NO: 1253402 - RNA, 19 nt, Human
cucacagagccuuccugag

SEQ ID NO: 1253403 - RNA, 24 nt, Human
cucacucuguugcccaggcuggag

SEQ ID NO: 1253404 - RNA, 24 nt, Human
cucacugcaagcucugccucccgg

SEQ ID NO: 1253405 - RNA, 21 nt, Human
cuccaaaucacagcuuaguuu

SEQ ID NO: 1253406 - RNA, 18 nt, Human
cuccugaccuggugaucc

SEQ ID NO: 1253407 - RNA, 18 nt, Human
cuccugccucagccuccc

SEQ ID NO: 1253408 - RNA, 18 nt, Human
cuccugggcuacucuucu

SEQ ID NO: 1253409 - RNA, 19 nt, Human
cucuucuugucucuggcug

SEQ ID NO: 1253410 - RNA, 18 nt, Human
cucuuggcuucguccauc

SEQ ID NO: 1253411 - RNA, 21 nt, Human
cugccagugcccuccugggcu

SEQ ID NO: 1253412 - RNA, 21 nt, Human
cugccucagccucccaaauag

SEQ ID NO: 1253413 - RNA, 22 nt, Human
cuggauuugggaacuggguugc

SEQ ID NO: 1253414 - RNA, 23 nt, Human
cuggcugcucuccaggcccuggg

SEQ ID NO: 1253415 - RNA, 18 nt, Human
cuugcagacuucucaucc

SEQ ID NO: 1253416 - RNA, 23 nt, Human
cuuuaugugcaagcucugcagag

SEQ ID NO: 1253417 - RNA, 22 nt, Human
gaccuggugauccacccaccuc

SEQ ID NO: 1253418 - RNA, 24 nt, Human
gaccuggugauccacccaccucag

SEQ ID NO: 1253419 - RNA, 24 nt, Human
gacuuuucagcgaggcagucuguu

SEQ ID NO: 1253420 - RNA, 19 nt, Human
gcccaggcuggagugcagu

SEQ ID NO: 1253421 - RNA, 23 nt, Human
gcucgguucaccccaggaccugg

SEQ ID NO: 1253422 - RNA, 19 nt, Human
gcuggagugcaguggcgca

SEQ ID NO: 1253423 - RNA, 18 nt, Human
gcuucguccaucugcuuc

SEQ ID NO: 1253424 - RNA, 19 nt, Human
ggacugaagggaaagugcc

SEQ ID NO: 1253425 - RNA, 23 nt, Human
ggagucucacucuguugcccagg

SEQ ID NO: 1253426 - RNA, 23 nt, Human
gggaagucgugcaagcacaaucc

SEQ ID NO: 1253427 - RNA, 24 nt, Human
gugauccacccaccucagccuccc

SEQ ID NO: 1253428 - RNA, 21 nt, Human
uaaacacuugcagacuucuca

SEQ ID NO: 1253429 - RNA, 30 nt, Human
uaauuuuuuuuuguauuuuuuaguagagaa

SEQ ID NO: 1253430 - RNA, 21 nt, Human
uacucucggcccucuuggcuu

SEQ ID NO: 1253431 - RNA, 24 nt, Human
uagaacuuccuggguacaagaagu

SEQ ID NO: 1253432 - RNA, 26 nt, Human
uaguagagacaguguuucaccgucuc

SEQ ID NO: 1253433 - RNA, 22 nt, Human
uaucuucuaaggaggagacaau

SEQ ID NO: 1253434 - RNA, 24 nt, Human
ucacucuguugcccaggcuggagu

SEQ ID NO: 1253435 - RNA, 18 nt, Human
ucacugcaagcucugccu

SEQ ID NO: 1253436 - RNA, 18 nt, Human
ucacugcaagcucugccu

SEQ ID NO: 1253437 - RNA, 24 nt, Human
ucacugcaagcucugccucccggg

SEQ ID NO: 1253438 - RNA, 18 nt, Human
ucagaugccacagaagag

SEQ ID NO: 1253439 - RNA, 25 nt, Human
ucaggccauucuccugccucagccu

SEQ ID NO: 1253440 - RNA, 20 nt, Human
ucauccaagagcugcuggau

SEQ ID NO: 1253441 - RNA, 20 nt, Human
ucauuuggggguugccuugc

SEQ ID NO: 1253442 - RNA, 21 nt, Human
ucauuuggggguugccuugcu

SEQ ID NO: 1253443 - RNA, 18 nt, Human
uccaagagcugcuggauu

SEQ ID NO: 1253444 - RNA, 21 nt, Human
uccacccaccucagccuccca

SEQ ID NO: 1253445 - RNA, 20 nt, Human
uccaccuucucaggacacug

SEQ ID NO: 1253446 - RNA, 19 nt, Human
uccauacucuagcuccacc

SEQ ID NO: 1253447 - RNA, 20 nt, Human
uccccugugucuccacggaa

SEQ ID NO: 1253448 - RNA, 24 nt, Human
ucccggguucaggccauucuccug

SEQ ID NO: 1253449 - RNA, 19 nt, Human
ucccuaaauccugugacuc

SEQ ID NO: 1253450 - RNA, 23 nt, Human
ucgguucaccccaggaccugggc

SEQ ID NO: 1253451 - RNA, 18 nt, Human
ucuaagugguggucuggc

SEQ ID NO: 1253452 - RNA, 23 nt, Human
ucucacucuguugcccaggcugg

SEQ ID NO: 1253453 - RNA, 24 nt, Human
ucucacucuguugcccaggcugga

SEQ ID NO: 1253454 - RNA, 26 nt, Human
ucucacucuguugcccaggcuggagu

SEQ ID NO: 1253455 - RNA, 27 nt, Human
ucucacucuguugcccaggcuggagug

SEQ ID NO: 1253456 - RNA, 23 nt, Human
ucuccaggcccugggauggaggc

SEQ ID NO: 1253457 - RNA, 18 nt, Human
ucucuaagugguggucug

SEQ ID NO: 1253458 - RNA, 22 nt, Human
ucucuaagugguggucuggcuu

SEQ ID NO: 1253459 - RNA, 23 nt, Human
ucucuggcugcucuccaggcccu

SEQ ID NO: 1253460 - RNA, 21 nt, Human
ucugaagccuagcaccauuuc

SEQ ID NO: 1253461 - RNA, 21 nt, Human
ucugugucucucucuaagugg

SEQ ID NO: 1253462 - RNA, 18 nt, Human
ucuguugcccaggcugga

SEQ ID NO: 1253463 - RNA, 24 nt, Human
ucuguugcccaggcuggagugcag

SEQ ID NO: 1253464 - RNA, 24 nt, Human
ugaagccuagcaccauuuccuaga

SEQ ID NO: 1253465 - RNA, 25 nt, Human
ugacugguuaaugggagauccagug

SEQ ID NO: 1253466 - RNA, 22 nt, Human
ugacuuuucagcgaggcagucu

SEQ ID NO: 1253467 - RNA, 18 nt, Human
ugagacuacaggugcccg

SEQ ID NO: 1253468 - RNA, 24 nt, Human
ugagacuacaggugcccgccgcca

SEQ ID NO: 1253469 - RNA, 24 nt, Human
ugagagcacagggacucuccauua

SEQ ID NO: 1253470 - RNA, 24 nt, Human
ugauccacccaccucagccuccca

SEQ ID NO: 1253471 - RNA, 22 nt, Human
ugcaguggcgcaaucucagcuc

SEQ ID NO: 1253472 - RNA, 23 nt, Human
ugcaguggcgcaaucucagcuca

SEQ ID NO: 1253473 - RNA, 24 nt, Human
ugccacagaagaguuccaagugac

SEQ ID NO: 1253474 - RNA, 18 nt, Human
ugcccaggcuggagugca

SEQ ID NO: 1253475 - RNA, 21 nt, Human
ugcccaggcuggagugcagug

SEQ ID NO: 1253476 - RNA, 22 nt, Human
ugcccaggcuggagugcagugg

SEQ ID NO: 1253477 - RNA, 24 nt, Human
ugcccaggcuggagugcaguggcg

SEQ ID NO: 1253478 - RNA, 24 nt, Human
ugccucagccucccaaauaguuga

SEQ ID NO: 1253479 - RNA, 19 nt, Human
ugccucccggguucaggcc

SEQ ID NO: 1253480 - RNA, 21 nt, Human
ugcucuccaggcccugggaug

SEQ ID NO: 1253481 - RNA, 19 nt, Human
ugcuucagaugccacagaa

SEQ ID NO: 1253482 - RNA, 18 nt, Human
ugcuugcugccuuggugc

SEQ ID NO: 1253483 - RNA, 24 nt, Human
uggagucucacucuguugcccagg

SEQ ID NO: 1253484 - RNA, 18 nt, Human
uggagugcaguggcgcaa

SEQ ID NO: 1253485 - RNA, 23 nt, Human
uggagugcaguggcgcaaucuca

SEQ ID NO: 1253486 - RNA, 24 nt, Human
uggagugcaguggcgcaaucucag

SEQ ID NO: 1253487 - RNA, 22 nt, Human
uggauuuggcaacugcugucau

SEQ ID NO: 1253488 - RNA, 24 nt, Human
uggcgcaaucucagcucacugcaa

SEQ ID NO: 1253489 - RNA, 21 nt, Human
uggcucugagacugacaggcc

SEQ ID NO: 1253490 - RNA, 18 nt, Human
ugggagauuccaccuggu

SEQ ID NO: 1253491 - RNA, 18 nt, Human
ugggcuacucuucuuguc

SEQ ID NO: 1253492 - RNA, 20 nt, Human
uggugcuuguuaguuuuguu

SEQ ID NO: 1253493 - RNA, 18 nt, Human
ugguugugggaugaccug

SEQ ID NO: 1253494 - RNA, 22 nt, Human
uguagcacugacugccagugcc

SEQ ID NO: 1253495 - RNA, 24 nt, Human
uguggaugaugcucucugaagccu

SEQ ID NO: 1253496 - RNA, 22 nt, Human
uuaguagagacaguguuucacc

SEQ ID NO: 1253497 - RNA, 24 nt, Human
uuaguagagacaguguuucaccgu

SEQ ID NO: 1253498 - RNA, 21 nt, Human
uucaggccauucuccugccuc

SEQ ID NO: 1253499 - RNA, 22 nt, Human
uuccaccugguuuuccuggauu

SEQ ID NO: 1253500 - RNA, 25 nt, Human
uuccucuuccccaucuucuuguucu

SEQ ID NO: 1253501 - RNA, 19 nt, Human
uuccugaguucagcaucuu

SEQ ID NO: 1253502 - RNA, 22 nt, Human
uucuaaggaggagacaaugucu

SEQ ID NO: 1253503 - RNA, 21 nt, Human
uucuuguaaauggguggccuu

SEQ ID NO: 1253504 - RNA, 24 nt, Human
uugcccaggcuggagugcaguggc

SEQ ID NO: 1253505 - RNA, 20 nt, Human
uuuacacuuccucuucccca

SEQ ID NO: 1253506 - RNA, 23 nt, Human
uuuacacuuccucuuccccaucu

SEQ ID NO: 1253507 - RNA, 23 nt, Human
uuuuguauuuuuuaguagagaca

SEQ ID NO: 1253508 - RNA, 24 nt, Human
uuuuuaguagagacaguguuucac

SEQ ID NO: 1253509 - RNA, 23 nt, Human
uuuuuguauuuuuuaguagagaa

SEQ ID NO: 1253510 - RNA, 22 nt, Human
uuuuuuguauuuuuuaguagag

SEQ ID NO: 1253511 - RNA, 18 nt, Human
aggaaggaagucgagagg

SEQ ID NO: 1253512 - RNA, 20 nt, Human
aggaaggaagucgagaggac

SEQ ID NO: 1253513 - RNA, 23 nt, Human
caacaaaccacuuuaauggacac

SEQ ID NO: 1253514 - RNA, 25 nt, Human
caacaacaaaccacuuuaauggaca

SEQ ID NO: 1253515 - RNA, 26 nt, Human
caacaacaaaccacuuuaauggacac

SEQ ID NO: 1253516 - RNA, 26 nt, Human
caccuccaacugcugggcuccagcuc

SEQ ID NO: 1253517 - RNA, 22 nt, Human
cacucaaagggcccccaucugu

SEQ ID NO: 1253518 - RNA, 19 nt, Human
cagacacagaggagaccag

SEQ ID NO: 1253519 - RNA, 24 nt, Human
cagcagacacagaggagaccagaa

SEQ ID NO: 1253520 - RNA, 19 nt, Human
ccacauuuugagaagcaag

SEQ ID NO: 1253521 - RNA, 24 nt, Human
ccccuugcuuuucaccuauggcca

SEQ ID NO: 1253522 - RNA, 21 nt, Human
ccuauaaaugacaggaguggg

SEQ ID NO: 1253523 - RNA, 20 nt, Human
ccuccaggcauggaagugga

SEQ ID NO: 1253524 - RNA, 21 nt, Human
ccugagacccugauccccuug

SEQ ID NO: 1253525 - RNA, 19 nt, Human
cugagccuggaggggguug

SEQ ID NO: 1253526 - RNA, 22 nt, Human
cugcugggcuccagcuccaggg

SEQ ID NO: 1253527 - RNA, 21 nt, Human
gacagggcugguucugugggc

SEQ ID NO: 1253528 - RNA, 24 nt, Human
gacccugauccccuugcuuuucac

SEQ ID NO: 1253529 - RNA, 27 nt, Human
gagaccagaauagcuuuuagugggcac

SEQ ID NO: 1253530 - RNA, 19 nt, Human
gagacccugauccccuugc

SEQ ID NO: 1253531 - RNA, 20 nt, Human
gagcgcagcgccgcgucugc

SEQ ID NO: 1253532 - RNA, 18 nt, Human
gaggacagggcugguucu

SEQ ID NO: 1253533 - RNA, 22 nt, Human
gcaggcuuccuccaggcaugga

SEQ ID NO: 1253534 - RNA, 23 nt, Human
gcaggcuuccuccaggcauggaa

SEQ ID NO: 1253535 - RNA, 23 nt, Human
ggaggcuguaguuaaacggguua

SEQ ID NO: 1253536 - RNA, 22 nt, Human
gggcgcugccuggcaggugcac

SEQ ID NO: 1253537 - RNA, 19 nt, Human
guggagugagaggaggcug

SEQ ID NO: 1253538 - RNA, 27 nt, Human
uaaaaucccugggggucucccccgagg

SEQ ID NO: 1253539 - RNA, 24 nt, Human
uauggccacauuuugagaagcaag

SEQ ID NO: 1253540 - RNA, 20 nt, Human
uccaggcauggaaguggagu

SEQ ID NO: 1253541 - RNA, 19 nt, Human
ucccugggggucucauugc

SEQ ID NO: 1253542 - RNA, 24 nt, Human
ugacaggaguggggguguccccag

SEQ ID NO: 1253543 - RNA, 25 nt, Human
ugacaggaguggggguguccccagg

SEQ ID NO: 1253544 - RNA, 19 nt, Human
ugagccuggaggggguugc

SEQ ID NO: 1253545 - RNA, 18 nt, Human
ugcaccaccuccaacugc

SEQ ID NO: 1253546 - RNA, 28 nt, Human
ugccccuauaaaugacaggagugggggu

SEQ ID NO: 1253547 - RNA, 20 nt, Human
uggaaguggagugagaggag

SEQ ID NO: 1253548 - RNA, 23 nt, Human
uggaggggguugcaggcuuccuc

SEQ ID NO: 1253549 - RNA, 22 nt, Human
uggauuaaacagucuggguggg

SEQ ID NO: 1253550 - RNA, 18 nt, Human
uggcaggugcaccaccuc

SEQ ID NO: 1253551 - RNA, 23 nt, Human
uggggguguccccaggucugagc

SEQ ID NO: 1253552 - RNA, 19 nt, Human
uguccccaggucugagccu

SEQ ID NO: 1253553 - RNA, 26 nt, Human
uucaccuauggccacauuuugagaag

SEQ ID NO: 1253554 - RNA, 20 nt, Human
caccguaggucugguucaau

SEQ ID NO: 1253555 - RNA, 20 nt, Human
cuuaguacuaaacuuucuuc

SEQ ID NO: 1253556 - RNA, 21 nt, Human
ugcaacagccacuuggaaaca

SEQ ID NO: 1253557 - RNA, 24 nt, Human
uggaaacaccguaggucugguuca

SEQ ID NO: 1253558 - RNA, 24 nt, Human
aaacuguaggacaacuuuaaauau

SEQ ID NO: 1253559 - RNA, 19 nt, Human
aaagugcuggaauuacagg

SEQ ID NO: 1253560 - RNA, 19 nt, Human
aaagugcuggaauuacagg

SEQ ID NO: 1253561 - RNA, 22 nt, Human
aaauaacuuuuuauaaagcuua

SEQ ID NO: 1253562 - RNA, 20 nt, Human
aaauacacaugaaguuauac

SEQ ID NO: 1253563 - RNA, 19 nt, Human
aacucauaaaaaauacagc

SEQ ID NO: 1253564 - RNA, 19 nt, Human
aagcucaggucucuggagu

SEQ ID NO: 1253565 - RNA, 26 nt, Human
aagugcuggaauuacaggggugagcc

SEQ ID NO: 1253566 - RNA, 18 nt, Human
aauuacaggggugagcca

SEQ ID NO: 1253567 - RNA, 21 nt, Human
acaaccuccaccuccuggguu

SEQ ID NO: 1253568 - RNA, 18 nt, Human
acaggguuucaccauguu

SEQ ID NO: 1253569 - RNA, 21 nt, Human
acaggguuucaccauguuggc

SEQ ID NO: 1253570 - RNA, 24 nt, Human
acaggguuucaccauguuggccag

SEQ ID NO: 1253571 - RNA, 22 nt, Human
accauguuggccaggcuggucu

SEQ ID NO: 1253572 - RNA, 23 nt, Human
acuuggaaauuaagauuugaagu

SEQ ID NO: 1253573 - RNA, 24 nt, Human
agagauuaucacuuaaaauguguc

SEQ ID NO: 1253574 - RNA, 21 nt, Human
agauuugaaguucagaaaaga

SEQ ID NO: 1253575 - RNA, 20 nt, Human
agcacagaauuaaagauaaa

SEQ ID NO: 1253576 - RNA, 21 nt, Human
aggcgcccgccaccacaccca

SEQ ID NO: 1253577 - RNA, 24 nt, Human
aggugauccgccugccccagccuc

SEQ ID NO: 1253578 - RNA, 23 nt, Human
auaucucugaacuuauuuagaau

SEQ ID NO: 1253579 - RNA, 24 nt, Human
aucaaguuggcucuucaucuauau

SEQ ID NO: 1253580 - RNA, 20 nt, Human
augugucuauguaugugugu

SEQ ID NO: 1253581 - RNA, 21 nt, Human
caaaaaagaaaaaacaaaacc

SEQ ID NO: 1253582 - RNA, 24 nt, Human
caaagugcuggaauuacaggggug

SEQ ID NO: 1253583 - RNA, 24 nt, Human
caaccuccaccuccuggguuuaag

SEQ ID NO: 1253584 - RNA, 19 nt, Human
cacagcagcccggcccagc

SEQ ID NO: 1253585 - RNA, 24 nt, Human
caccacacccagcuaauuuuugua

SEQ ID NO: 1253586 - RNA, 21 nt, Human
caccauguuggccaggcuggu

SEQ ID NO: 1253587 - RNA, 23 nt, Human
caccauguuggccaggcuggucu

SEQ ID NO: 1253588 - RNA, 24 nt, Human
caccauguuggccaggcuggucuu

SEQ ID NO: 1253589 - RNA, 27 nt, Human
caccauguuggccaggcuggucuugaa

SEQ ID NO: 1253590 - RNA, 23 nt, Human
cacccgcgccccaaaagcucagg

SEQ ID NO: 1253591 - RNA, 21 nt, Human
caccuccguuuucccucgcug

SEQ ID NO: 1253592 - RNA, 21 nt, Human
cacuacaaccuccaccuccug

SEQ ID NO: 1253593 - RNA, 25 nt, Human
cagaaugaagcaaauagaggaaaua

SEQ ID NO: 1253594 - RNA, 18 nt, Human
cagagagugaaugcccuu

SEQ ID NO: 1253595 - RNA, 24 nt, Human
cagcaaaaaagaaaaaacaaaacc

SEQ ID NO: 1253596 - RNA, 27 nt, Human
cagcaaaaaagaaaaaacaaaaccaaa

SEQ ID NO: 1253597 - RNA, 19 nt, Human
cagcagcccggcccagcuu

SEQ ID NO: 1253598 - RNA, 24 nt, Human
caggguuucaccauguuggccagg

SEQ ID NO: 1253599 - RNA, 20 nt, Human
caggucucuggagucggaga

SEQ ID NO: 1253600 - RNA, 20 nt, Human
caggugauccgccugccccc

SEQ ID NO: 1253601 - RNA, 24 nt, Human
cauguuggccaggcuggucuugaa

SEQ ID NO: 1253602 - RNA, 22 nt, Human
cauuccuccuucccuccuccca

SEQ ID NO: 1253603 - RNA, 19 nt, Human
ccaaagugcuggaauuaca

SEQ ID NO: 1253604 - RNA, 24 nt, Human
ccaaagugcuggaauuacaggggu

SEQ ID NO: 1253605 - RNA, 24 nt, Human
ccaccuccuggguuuaagcgaucu

SEQ ID NO: 1253606 - RNA, 18 nt, Human
cccaaaagcucaggucuc

SEQ ID NO: 1253607 - RNA, 20 nt, Human
cccaccuuggccucccuagu

SEQ ID NO: 1253608 - RNA, 19 nt, Human
ccccaaaagcucaggucuc

SEQ ID NO: 1253609 - RNA, 20 nt, Human
ccccaaaagcucaggucucu

SEQ ID NO: 1253610 - RNA, 21 nt, Human
ccccaaaagcucaggucucug

SEQ ID NO: 1253611 - RNA, 19 nt, Human
cccccgcgcucccacccgc

SEQ ID NO: 1253612 - RNA, 22 nt, Human
cccccgcgcucccacccgcgcc

SEQ ID NO: 1253613 - RNA, 21 nt, Human
cccgccaccacacccagcuaa

SEQ ID NO: 1253614 - RNA, 19 nt, Human
cccguacgggcugccgcga

SEQ ID NO: 1253615 - RNA, 26 nt, Human
ccgccugccccagccucccaaagugc

SEQ ID NO: 1253616 - RNA, 20 nt, Human
ccgcgccccaaaagcucagg

SEQ ID NO: 1253617 - RNA, 19 nt, Human
ccuccucccaggcacagca

SEQ ID NO: 1253618 - RNA, 21 nt, Human
ccuccuucccuccucccaggc

SEQ ID NO: 1253619 - RNA, 20 nt, Human
ccuggguuuaagcgaucucc

SEQ ID NO: 1253620 - RNA, 18 nt, Human
cgcccgccaccacaccca

SEQ ID NO: 1253621 - RNA, 20 nt, Human
cgcuggagucgaacuugcuc

SEQ ID NO: 1253622 - RNA, 18 nt, Human
cuacaaccuccaccuccu

SEQ ID NO: 1253623 - RNA, 23 nt, Human
cuacaaccuccaccuccuggguu

SEQ ID NO: 1253624 - RNA, 21 nt, Human
cucaacuuuaauaaucgaaau

SEQ ID NO: 1253625 - RNA, 24 nt, Human
cucacuacaaccuccaccuccugg

SEQ ID NO: 1253626 - RNA, 24 nt, Human
cucccuaguagcuaggauuauagg

SEQ ID NO: 1253627 - RNA, 20 nt, Human
cugacuucaggugauccgcc

SEQ ID NO: 1253628 - RNA, 24 nt, Human
cugccccagccucccaaagugcug

SEQ ID NO: 1253629 - RNA, 20 nt, Human
cuugaguaacaguuacuucu

SEQ ID NO: 1253630 - RNA, 24 nt, Human
gaaauacacaugaaguuauaccaa

SEQ ID NO: 1253631 - RNA, 24 nt, Human
gaacuugcuccuccuguuucccgg

SEQ ID NO: 1253632 - RNA, 20 nt, Human
gacaccgagaggucccaccc

SEQ ID NO: 1253633 - RNA, 22 nt, Human
gacuucaggugauccgccugcc

SEQ ID NO: 1253634 - RNA, 23 nt, Human
gcuggaauuacaggggugagcca

SEQ ID NO: 1253635 - RNA, 21 nt, Human
ggaaggacagaaugaagcaaa

SEQ ID NO: 1253636 - RNA, 19 nt, Human
ggacauuagaaugaaggga

SEQ ID NO: 1253637 - RNA, 22 nt, Human
ggguuucaccauguuggccagg

SEQ ID NO: 1253638 - RNA, 23 nt, Human
ggugggacagucaccuggcgagg

SEQ ID NO: 1253639 - RNA, 20 nt, Human
gguucccccgcgcucccacc

SEQ ID NO: 1253640 - RNA, 21 nt, Human
guagagacaggguuucaccau

SEQ ID NO: 1253641 - RNA, 22 nt, Human
guagagacaggguuucaccaug

SEQ ID NO: 1253642 - RNA, 24 nt, Human
gugauccgccugccccagccuccc

SEQ ID NO: 1253643 - RNA, 20 nt, Human
uaaauucuguuuccagcuau

SEQ ID NO: 1253644 - RNA, 26 nt, Human
uaagcgaucucccaccuuggccuccc

SEQ ID NO: 1253645 - RNA, 23 nt, Human
uaauuuuuguauuuuuguagaga

SEQ ID NO: 1253646 - RNA, 18 nt, Human
uacaggggugagccacca

SEQ ID NO: 1253647 - RNA, 21 nt, Human
uacaggggugagccaccaugc

SEQ ID NO: 1253648 - RNA, 22 nt, Human
uacaggggugagccaccaugcu

SEQ ID NO: 1253649 - RNA, 21 nt, Human
uagaaugggucucugaaaucu

SEQ ID NO: 1253650 - RNA, 19 nt, Human
uagacugcagaaaacuguu

SEQ ID NO: 1253651 - RNA, 21 nt, Human
uagagacaggguuucaccaug

SEQ ID NO: 1253652 - RNA, 22 nt, Human
uagagacaggguuucaccaugu

SEQ ID NO: 1253653 - RNA, 19 nt, Human
uagaggaaauaaauucugu

SEQ ID NO: 1253654 - RNA, 21 nt, Human
uaggauuauaggcgcccgcca

SEQ ID NO: 1253655 - RNA, 22 nt, Human
uaggauuauaggcgcccgccac

SEQ ID NO: 1253656 - RNA, 24 nt, Human
uaggauuauaggcgcccgccacca

SEQ ID NO: 1253657 - RNA, 24 nt, Human
uaguagcuaggauuauaggcgccc

SEQ ID NO: 1253658 - RNA, 23 nt, Human
uauacagacuaucaaucuauaac

SEQ ID NO: 1253659 - RNA, 23 nt, Human
uauauuacacaccaaacauaagu

SEQ ID NO: 1253660 - RNA, 22 nt, Human
uauguaugugugugcuugugug

SEQ ID NO: 1253661 - RNA, 21 nt, Human
ucaaaaguaccuagcacagaa

SEQ ID NO: 1253662 - RNA, 24 nt, Human
ucacuacaaccuccaccuccuggg

SEQ ID NO: 1253663 - RNA, 25 nt, Human
ucacuacaaccuccaccuccugggu

SEQ ID NO: 1253664 - RNA, 20 nt, Human
ucauguagaaucaaaaguac

SEQ ID NO: 1253665 - RNA, 23 nt, Human
ucccaaagugcuggaauuacagg

SEQ ID NO: 1253666 - RNA, 21 nt, Human
ucccaccuuggccucccuagu

SEQ ID NO: 1253667 - RNA, 23 nt, Human
ucccaggcacagcagcccggccc

SEQ ID NO: 1253668 - RNA, 27 nt, Human
ucccccgcgcucccacccgcgccccaa

SEQ ID NO: 1253669 - RNA, 24 nt, Human
ucccucgcuggagucgaacuugcu

SEQ ID NO: 1253670 - RNA, 20 nt, Human
uccuggguuuaagcgaucuc

SEQ ID NO: 1253671 - RNA, 22 nt, Human
uccuggguuuaagcgaucuccc

SEQ ID NO: 1253672 - RNA, 19 nt, Human
uccuguggcagaaaaaccc

SEQ ID NO: 1253673 - RNA, 21 nt, Human
ucgcuggagucgaacuugccg

SEQ ID NO: 1253674 - RNA, 18 nt, Human
ucggagacccuccugccc

SEQ ID NO: 1253675 - RNA, 20 nt, Human
ucucaaaaauuagaauagcu

SEQ ID NO: 1253676 - RNA, 20 nt, Human
ucucccaccuccguuuuccc

SEQ ID NO: 1253677 - RNA, 19 nt, Human
ucuugcugugucacccagg

SEQ ID NO: 1253678 - RNA, 21 nt, Human
ugaagggaacugaaaagggua

SEQ ID NO: 1253679 - RNA, 21 nt, Human
ugaauagcacauucaucaagu

SEQ ID NO: 1253680 - RNA, 24 nt, Human
ugaaugcccuuguuuagaaugggu

SEQ ID NO: 1253681 - RNA, 18 nt, Human
ugacuucaggugauccgc

SEQ ID NO: 1253682 - RNA, 18 nt, Human
ugaggacauuagaaugaa

SEQ ID NO: 1253683 - RNA, 20 nt, Human
ugcagaaaacuguuuuaaau

SEQ ID NO: 1253684 - RNA, 24 nt, Human
ugccccagccucccaaagugcugg

SEQ ID NO: 1253685 - RNA, 18 nt, Human
ugccguggugcaaucuug

SEQ ID NO: 1253686 - RNA, 22 nt, Human
ugccguggugcaaucuuggcuc

SEQ ID NO: 1253687 - RNA, 19 nt, Human
ugcuggggcaacuagaugu

SEQ ID NO: 1253688 - RNA, 22 nt, Human
uggaauuacaggggugagccac

SEQ ID NO: 1253689 - RNA, 24 nt, Human
uggaauuacaggggugagccacca

SEQ ID NO: 1253690 - RNA, 24 nt, Human
uggagucuugcugugucacccagg

SEQ ID NO: 1253691 - RNA, 22 nt, Human
uggccaggcuggucuugaacuc

SEQ ID NO: 1253692 - RNA, 21 nt, Human
uggcgagggggggcagggacc

SEQ ID NO: 1253693 - RNA, 19 nt, Human
uggggcaacuagaugugga

SEQ ID NO: 1253694 - RNA, 20 nt, Human
uggggcaacuagauguggag

SEQ ID NO: 1253695 - RNA, 24 nt, Human
uggugcaaucuuggcucacuacaa

SEQ ID NO: 1253696 - RNA, 22 nt, Human
uguacaauguaauaguauacau

SEQ ID NO: 1253697 - RNA, 24 nt, Human
uguagagacaggguuucaccaugu

SEQ ID NO: 1253698 - RNA, 25 nt, Human
ugucuauguaugugugugcuugugu

SEQ ID NO: 1253699 - RNA, 26 nt, Human
ugugucacccaggcuagcgugccgug

SEQ ID NO: 1253700 - RNA, 19 nt, Human
ugugucuauguaugugugu

SEQ ID NO: 1253701 - RNA, 21 nt, Human
uuaccauuuaccaaaaauaac

SEQ ID NO: 1253702 - RNA, 18 nt, Human
uuaguuuggaaaaacugu

SEQ ID NO: 1253703 - RNA, 21 nt, Human
uucaaaucauguugacguuca

SEQ ID NO: 1253704 - RNA, 19 nt, Human
uuccagagagugaaugccc

SEQ ID NO: 1253705 - RNA, 21 nt, Human
uucccccgcgcucccacccgc

SEQ ID NO: 1253706 - RNA, 24 nt, Human
uuguagagacaggguuucaccaug

SEQ ID NO: 1253707 - RNA, 24 nt, Human
uuucaccauguuggccaggcuggu

SEQ ID NO: 1253708 - RNA, 28 nt, Human
uuucuagcuuaugaauagcacauucauc

SEQ ID NO: 1253709 - RNA, 23 nt, Human
uuugaaauacacaugaaguuaua

SEQ ID NO: 1253710 - RNA, 18 nt, Human
uuuguagagacaggguuu

SEQ ID NO: 1253711 - RNA, 24 nt, Human
uuuguagagacaggguuucaccau

SEQ ID NO: 1253712 - RNA, 18 nt, Human
uuuuaauaaggccuacau

SEQ ID NO: 1253713 - RNA, 23 nt, Human
uuuuuguagagacaggguuucac

SEQ ID NO: 1253714 - RNA, 24 nt, Human
uuuuuuuuuuuugagauggagucu

SEQ ID NO: 1253715 - RNA, 22 nt, Human
uuuuuuuuuuuuuugagaugga

SEQ ID NO: 1253716 - RNA, 18 nt, Human
cagcaguuagugauaacu

SEQ ID NO: 1253717 - RNA, 18 nt, Human
uaaagcuguuauuuuguc

SEQ ID NO: 1253718 - RNA, 19 nt, Human
ugaucucuuaaagcagcag

SEQ ID NO: 1253719 - RNA, 22 nt, Human
acucugaggagugcguucaaag

SEQ ID NO: 1253720 - RNA, 19 nt, Human
agagucggacucugaggag

SEQ ID NO: 1253721 - RNA, 22 nt, Human
aggugggagagucggacucuga

SEQ ID NO: 1253722 - RNA, 19 nt, Human
gaagcgcagcaggagcgcc

SEQ ID NO: 1253723 - RNA, 22 nt, Human
ggaaggagauauggaucccagg

SEQ ID NO: 1253724 - RNA, 18 nt, Human
ggagugcguucaaagucu

SEQ ID NO: 1253725 - RNA, 24 nt, Human
gggagagucggacucugaggagug

SEQ ID NO: 1253726 - RNA, 19 nt, Human
guucaaagucuucacuugg

SEQ ID NO: 1253727 - RNA, 24 nt, Human
uggaaggagauauggaucccaggg

SEQ ID NO: 1253728 - RNA, 18 nt, Human
agguagcagguacaaagc

SEQ ID NO: 1253729 - RNA, 25 nt, Human
caaagcacaaacugcaaagcuuuag

SEQ ID NO: 1253730 - RNA, 20 nt, Human
gaaggaaauagagaaacaaa

SEQ ID NO: 1253731 - RNA, 22 nt, Human
uacaaagcacaaacugcaaagc

SEQ ID NO: 1253732 - RNA, 20 nt, Human
uagagaaacaaaugcucucc

SEQ ID NO: 1253733 - RNA, 21 nt, Human
uagagaaacaaaugcucucca

SEQ ID NO: 1253734 - RNA, 24 nt, Human
uagagaaacaaaugcucuccaagu

SEQ ID NO: 1253735 - RNA, 25 nt, Human
uagcagguacaaagcacaaacugca

SEQ ID NO: 1253736 - RNA, 18 nt, Human
uaggguuucugcugcuag

SEQ ID NO: 1253737 - RNA, 23 nt, Human
uggaaggaaauagagaaacaaau

SEQ ID NO: 1253738 - RNA, 20 nt, Human
aaaagcacgauggggucacg

SEQ ID NO: 1253739 - RNA, 21 nt, Human
aacacaaagauucagagggca

SEQ ID NO: 1253740 - RNA, 27 nt, Human
aacauucuuucacguguccaucugcuu

SEQ ID NO: 1253741 - RNA, 21 nt, Human
acaggcaccaucuccucaaac

SEQ ID NO: 1253742 - RNA, 24 nt, Human
agggauggcagcauucagcucagg

SEQ ID NO: 1253743 - RNA, 22 nt, Human
caaucacagaucuugauuuagu

SEQ ID NO: 1253744 - RNA, 20 nt, Human
cacaggcagccaaagacugc

SEQ ID NO: 1253745 - RNA, 20 nt, Human
cagcauucagcucaggcucu

SEQ ID NO: 1253746 - RNA, 22 nt, Human
cagccaaacacaaagauucaga

SEQ ID NO: 1253747 - RNA, 19 nt, Human
cagcucaggcucuggcuua

SEQ ID NO: 1253748 - RNA, 21 nt, Human
ccagacacaucuucaauugcu

SEQ ID NO: 1253749 - RNA, 18 nt, Human
ccagcguuccuuaaauuu

SEQ ID NO: 1253750 - RNA, 20 nt, Human
cugaagcugguucccucugc

SEQ ID NO: 1253751 - RNA, 20 nt, Human
cugaagcugguucccucugc

SEQ ID NO: 1253752 - RNA, 20 nt, Human
cuggaagauuaagggaagcu

SEQ ID NO: 1253753 - RNA, 22 nt, Human
gacugagguacagugucuccag

SEQ ID NO: 1253754 - RNA, 19 nt, Human
uacaguucauuggaugaug

SEQ ID NO: 1253755 - RNA, 21 nt, Human
ucaacagucuggaugccuccc

SEQ ID NO: 1253756 - RNA, 21 nt, Human
ucaauauagacugagguacag

SEQ ID NO: 1253757 - RNA, 25 nt, Human
ucauccaaaaaccuuaaugacucau

SEQ ID NO: 1253758 - RNA, 23 nt, Human
ucuccagacacaucuucaauugc

SEQ ID NO: 1253759 - RNA, 21 nt, Human
ucuccagcuuccucccagguc

SEQ ID NO: 1253760 - RNA, 22 nt, Human
ucuucaauugcugcuggaagau

SEQ ID NO: 1253761 - RNA, 21 nt, Human
ugaagcugguucccucugcuu

SEQ ID NO: 1253762 - RNA, 20 nt, Human
ugacacaggcaccaucuccu

SEQ ID NO: 1253763 - RNA, 28 nt, Human
ugaucuguuaacaaaucggcuuuccucu

SEQ ID NO: 1253764 - RNA, 24 nt, Human
ugccucccuguucaaucacagauc

SEQ ID NO: 1253765 - RNA, 25 nt, Human
ugcuugcacagcuuuaucugggccc

SEQ ID NO: 1253766 - RNA, 22 nt, Human
ugguggcuucucucaucugagc

SEQ ID NO: 1253767 - RNA, 24 nt, Human
uucuucuucauccaaaaaccuuaa

SEQ ID NO: 1253768 - RNA, 24 nt, Human
uuugccaaagugguggcuucucuc

SEQ ID NO: 1253769 - RNA, 18 nt, Human
aagcgauucaucaaauga

SEQ ID NO: 1253770 - RNA, 22 nt, Human
aaguaucuccgcggaucuaccc

SEQ ID NO: 1253771 - RNA, 21 nt, Human
aaugggcccguugucuacaac

SEQ ID NO: 1253772 - RNA, 20 nt, Human
acaaaauagacaagaaacag

SEQ ID NO: 1253773 - RNA, 18 nt, Human
agagcagauagagcucag

SEQ ID NO: 1253774 - RNA, 20 nt, Human
agagguggcgcgcggugagg

SEQ ID NO: 1253775 - RNA, 24 nt, Human
agcccagagccuccccgcgcuccc

SEQ ID NO: 1253776 - RNA, 22 nt, Human
auagagcucaggcagcgccgac

SEQ ID NO: 1253777 - RNA, 21 nt, Human
caaaugaucaugccaugugaa

SEQ ID NO: 1253778 - RNA, 21 nt, Human
caagcucauuaccccaacuuu

SEQ ID NO: 1253779 - RNA, 24 nt, Human
cacccaccccccacccccaacacu

SEQ ID NO: 1253780 - RNA, 26 nt, Human
caccccccacccccaacacuucuacc

SEQ ID NO: 1253781 - RNA, 20 nt, Human
cagagccuccccgcgcuccc

SEQ ID NO: 1253782 - RNA, 18 nt, Human
caguuccugggcgugauc

SEQ ID NO: 1253783 - RNA, 23 nt, Human
ccacccaccccccacccccaaca

SEQ ID NO: 1253784 - RNA, 21 nt, Human
ccaccccccacccccaacacu

SEQ ID NO: 1253785 - RNA, 18 nt, Human
ccagucgcguccacuccc

SEQ ID NO: 1253786 - RNA, 21 nt, Human
cccacccaccccccaccccca

SEQ ID NO: 1253787 - RNA, 22 nt, Human
cccacccaccccccacccccaa

SEQ ID NO: 1253788 - RNA, 22 nt, Human
ccccccacccccaacacuucua

SEQ ID NO: 1253789 - RNA, 19 nt, Human
ccccugcggccggcgcgga

SEQ ID NO: 1253790 - RNA, 19 nt, Human
cccgcugcucucgcccaag

SEQ ID NO: 1253791 - RNA, 21 nt, Human
cccgcugcucucgcccaagac

SEQ ID NO: 1253792 - RNA, 20 nt, Human
ccgccgcccgucgccccgga

SEQ ID NO: 1253793 - RNA, 18 nt, Human
ccgccgccgcccgucgcc

SEQ ID NO: 1253794 - RNA, 20 nt, Human
ccgccgccgcccgucgcccc

SEQ ID NO: 1253795 - RNA, 22 nt, Human
ccgccgccgcccgucgccccgg

SEQ ID NO: 1253796 - RNA, 22 nt, Human
ccgccgcggggcccgggcuccu

SEQ ID NO: 1253797 - RNA, 18 nt, Human
ccgcggccuccugccggg

SEQ ID NO: 1253798 - RNA, 19 nt, Human
ccuggagcacuggccuucg

SEQ ID NO: 1253799 - RNA, 23 nt, Human
ccugguauuacugaguaaagcag

SEQ ID NO: 1253800 - RNA, 23 nt, Human
ccuuauaccugaagacgccaagc

SEQ ID NO: 1253801 - RNA, 19 nt, Human
cgcccugagauuccgggca

SEQ ID NO: 1253802 - RNA, 18 nt, Human
cgccgaagccacucggug

SEQ ID NO: 1253803 - RNA, 20 nt, Human
cgccgcggccuccugccggg

SEQ ID NO: 1253804 - RNA, 19 nt, Human
cuacggcgcggaggugcgg

SEQ ID NO: 1253805 - RNA, 24 nt, Human
cucgcccaagacggccggucucgg

SEQ ID NO: 1253806 - RNA, 21 nt, Human
cugcugccgguccuugcuggg

SEQ ID NO: 1253807 - RNA, 24 nt, Human
cugggucugcgccgcugcccggga

SEQ ID NO: 1253808 - RNA, 23 nt, Human
cuuuuaguuuauucccacccacc

SEQ ID NO: 1253809 - RNA, 23 nt, Human
gacccgccccuuccccugcggcc

SEQ ID NO: 1253810 - RNA, 19 nt, Human
gcccugagauuccgggcac

SEQ ID NO: 1253811 - RNA, 20 nt, Human
gcgccucuccgccgccgccc

SEQ ID NO: 1253812 - RNA, 21 nt, Human
gcgcgcaacuacggcgcggag

SEQ ID NO: 1253813 - RNA, 19 nt, Human
gcugccgguccuugcuggg

SEQ ID NO: 1253814 - RNA, 23 nt, Human
ggaagcccggggagcgccucucc

SEQ ID NO: 1253815 - RNA, 19 nt, Human
gggcaggcgaggucccggc

SEQ ID NO: 1253816 - RNA, 18 nt, Human
ggugaagaaggccuggag

SEQ ID NO: 1253817 - RNA, 18 nt, Human
guaaagcagggugcuccu

SEQ ID NO: 1253818 - RNA, 21 nt, Human
gucgcguccacucccggccgc

SEQ ID NO: 1253819 - RNA, 21 nt, Human
guuuauucccacccacccccc

SEQ ID NO: 1253820 - RNA, 22 nt, Human
uagagcagauagagcucaggca

SEQ ID NO: 1253821 - RNA, 20 nt, Human
uauuucucauuucuacagaa

SEQ ID NO: 1253822 - RNA, 19 nt, Human
ucauuaccccaacuuuuag

SEQ ID NO: 1253823 - RNA, 22 nt, Human
uccaaggccacucggagcgcag

SEQ ID NO: 1253824 - RNA, 22 nt, Human
ucccacccaccccccaccccca

SEQ ID NO: 1253825 - RNA, 24 nt, Human
ucccacccaccccccacccccaac

SEQ ID NO: 1253826 - RNA, 18 nt, Human
ucccagcgggcgcccggg

SEQ ID NO: 1253827 - RNA, 20 nt, Human
ucccugagcccagagccucc

SEQ ID NO: 1253828 - RNA, 21 nt, Human
ucuauagucagacaaaauaga

SEQ ID NO: 1253829 - RNA, 22 nt, Human
ucuccgccgccgcccgucgccc

SEQ ID NO: 1253830 - RNA, 19 nt, Human
ugagggcaggcgagguccc

SEQ ID NO: 1253831 - RNA, 24 nt, Human
ugaguaaagcagggugcuccuuuu

SEQ ID NO: 1253832 - RNA, 21 nt, Human
ugaucaugccaugugaagcug

SEQ ID NO: 1253833 - RNA, 24 nt, Human
ugccgguccuugcugggucugcgc

SEQ ID NO: 1253834 - RNA, 21 nt, Human
ugguggcaccaggcccaaggg

SEQ ID NO: 1253835 - RNA, 20 nt, Human
ugucccgcugcucucgccca

SEQ ID NO: 1253836 - RNA, 18 nt, Human
ugucuagauuugagucuu

SEQ ID NO: 1253837 - RNA, 19 nt, Human
aaacagagccugcauuaua

SEQ ID NO: 1253838 - RNA, 24 nt, Human
aaagccuucccacacugauuguau

SEQ ID NO: 1253839 - RNA, 24 nt, Human
aaagcuuucccacacucaagguau

SEQ ID NO: 1253840 - RNA, 19 nt, Human
aacaaagguuuuuccacau

SEQ ID NO: 1253841 - RNA, 20 nt, Human
aacucguagugauuuucccu

SEQ ID NO: 1253842 - RNA, 19 nt, Human
aaguaagaaaagguuucug

SEQ ID NO: 1253843 - RNA, 19 nt, Human
aagugccccaggauaaaac

SEQ ID NO: 1253844 - RNA, 21 nt, Human
aauucauggugacucuuccuu

SEQ ID NO: 1253845 - RNA, 21 nt, Human
acagaccuccucccacagcaa

SEQ ID NO: 1253846 - RNA, 24 nt, Human
acagcaauuaaacucguagugauu

SEQ ID NO: 1253847 - RNA, 25 nt, Human
acauucauuacauucauaggguuuu

SEQ ID NO: 1253848 - RNA, 20 nt, Human
acugauuguauucaaaacac

SEQ ID NO: 1253849 - RNA, 27 nt, Human
agaaagacuucccacauuuuguaccuc

SEQ ID NO: 1253850 - RNA, 21 nt, Human
agaauucaaaguggcuuuggc

SEQ ID NO: 1253851 - RNA, 18 nt, Human
agagcuuucccacacuca

SEQ ID NO: 1253852 - RNA, 24 nt, Human
agagcuuucccacacucauuacau

SEQ ID NO: 1253853 - RNA, 22 nt, Human
agcacacucucuuauggguacu

SEQ ID NO: 1253854 - RNA, 19 nt, Human
agguggcucugacuugggg

SEQ ID NO: 1253855 - RNA, 22 nt, Human
agguuuuuccacauucuuuacc

SEQ ID NO: 1253856 - RNA, 23 nt, Human
aguaagaaaagguuucuggacuu

SEQ ID NO: 1253857 - RNA, 22 nt, Human
auaucccacugagaggaggagg

SEQ ID NO: 1253858 - RNA, 23 nt, Human
augccacgggcaucccacccugc

SEQ ID NO: 1253859 - RNA, 23 nt, Human
auguugacaaggguuuccucuau

SEQ ID NO: 1253860 - RNA, 21 nt, Human
auucacagggccuuucuccag

SEQ ID NO: 1253861 - RNA, 18 nt, Human
auuucuccccugugugag

SEQ ID NO: 1253862 - RNA, 24 nt, Human
caaaaacccaaccaagacgacuga

SEQ ID NO: 1253863 - RNA, 19 nt, Human
caacagaccuccucccaca

SEQ ID NO: 1253864 - RNA, 24 nt, Human
caacuuucugcaaaugcuggucuu

SEQ ID NO: 1253865 - RNA, 21 nt, Human
caagagaaaauguuuuuccua

SEQ ID NO: 1253866 - RNA, 19 nt, Human
cacauucacuacaugcaua

SEQ ID NO: 1253867 - RNA, 21 nt, Human
cacccugcuaccagcugcccu

SEQ ID NO: 1253868 - RNA, 23 nt, Human
caccuguccaugcuccaacuugc

SEQ ID NO: 1253869 - RNA, 20 nt, Human
cagaagaugcuaacagggac

SEQ ID NO: 1253870 - RNA, 18 nt, Human
cagcaccuguccaugcuc

SEQ ID NO: 1253871 - RNA, 24 nt, Human
cagccacaucaaucagggccccaa

SEQ ID NO: 1253872 - RNA, 23 nt, Human
cagggccccaagucuuguaacuc

SEQ ID NO: 1253873 - RNA, 21 nt, Human
caggguccucucaauagggcc

SEQ ID NO: 1253874 - RNA, 18 nt, Human
cagugucaauaaagagug

SEQ ID NO: 1253875 - RNA, 24 nt, Human
cauaguauuucaucuccauaaccc

SEQ ID NO: 1253876 - RNA, 24 nt, Human
caugaaaagccuucccacacugau

SEQ ID NO: 1253877 - RNA, 20 nt, Human
cauggaaacugccgcagcgc

SEQ ID NO: 1253878 - RNA, 22 nt, Human
cauuacauucaaagcuuguuuu

SEQ ID NO: 1253879 - RNA, 23 nt, Human
cauucauuacauucauaggguug

SEQ ID NO: 1253880 - RNA, 20 nt, Human
cauucauuacauuuguaggg

SEQ ID NO: 1253881 - RNA, 23 nt, Human
cauucauuacauuuguaggguug

SEQ ID NO: 1253882 - RNA, 22 nt, Human
ccaacagaccuccucccacagc

SEQ ID NO: 1253883 - RNA, 19 nt, Human
ccacguauuuuucuugaua

SEQ ID NO: 1253884 - RNA, 18 nt, Human
ccagccuucuucaggaag

SEQ ID NO: 1253885 - RNA, 26 nt, Human
cccacagccacaucaaucagggcccc

SEQ ID NO: 1253886 - RNA, 20 nt, Human
cccugcuaccagcugcccuc

SEQ ID NO: 1253887 - RNA, 22 nt, Human
cccugcuaccagcugcccucuu

SEQ ID NO: 1253888 - RNA, 23 nt, Human
cccugcuaccagcugcccucuug

SEQ ID NO: 1253889 - RNA, 19 nt, Human
cccugugccccagaaucuc

SEQ ID NO: 1253890 - RNA, 18 nt, Human
ccgcagcgcucccugggc

SEQ ID NO: 1253891 - RNA, 19 nt, Human
ccuaauacaccauuucugu

SEQ ID NO: 1253892 - RNA, 18 nt, Human
ccuaugccacgggcaucc

SEQ ID NO: 1253893 - RNA, 22 nt, Human
ccucaaaugcuggucuugguuu

SEQ ID NO: 1253894 - RNA, 19 nt, Human
ccucucaccagaccuccuc

SEQ ID NO: 1253895 - RNA, 20 nt, Human
cgcugggaccgcggcugggc

SEQ ID NO: 1253896 - RNA, 21 nt, Human
cucaccagaccuccucucaca

SEQ ID NO: 1253897 - RNA, 22 nt, Human
cucccgcgugccuagcgggggc

SEQ ID NO: 1253898 - RNA, 20 nt, Human
cucucaccagaccuccucuc

SEQ ID NO: 1253899 - RNA, 23 nt, Human
cugagcagaguccagaugcugcc

SEQ ID NO: 1253900 - RNA, 20 nt, Human
cugagccuucaggauguuga

SEQ ID NO: 1253901 - RNA, 18 nt, Human
cugcaacuugaagaccac

SEQ ID NO: 1253902 - RNA, 20 nt, Human
cugcucccgcgugccuagcg

SEQ ID NO: 1253903 - RNA, 20 nt, Human
cuuguccgcuggccggacuu

SEQ ID NO: 1253904 - RNA, 22 nt, Human
cuuucagugucaauaaagagug

SEQ ID NO: 1253905 - RNA, 20 nt, Human
gagacggcuuucccauuucc

SEQ ID NO: 1253906 - RNA, 24 nt, Human
gcugccacuccuccugggugaagc

SEQ ID NO: 1253907 - RNA, 20 nt, Human
gcugggcguccgggggcggg

SEQ ID NO: 1253908 - RNA, 18 nt, Human
ggaagacacggcgcaguc

SEQ ID NO: 1253909 - RNA, 18 nt, Human
gggcggggccgccgaggg

SEQ ID NO: 1253910 - RNA, 19 nt, Human
gguacugaaggcugccucc

SEQ ID NO: 1253911 - RNA, 21 nt, Human
guucucugaugcacaauaagu

SEQ ID NO: 1253912 - RNA, 23 nt, Human
uaaagagugacuuuugccaaaau

SEQ ID NO: 1253913 - RNA, 19 nt, Human
uacauucaaagcuuguuuu

SEQ ID NO: 1253914 - RNA, 18 nt, Human
uaguaagugcugauuucu

SEQ ID NO: 1253915 - RNA, 21 nt, Human
uaguaagugcugauuucuggu

SEQ ID NO: 1253916 - RNA, 18 nt, Human
uauuuuguuguugacaaa

SEQ ID NO: 1253917 - RNA, 18 nt, Human
ucaacuuuccagaauuca

SEQ ID NO: 1253918 - RNA, 22 nt, Human
ucaauagggcccagaugcccaa

SEQ ID NO: 1253919 - RNA, 22 nt, Human
ucacagaauuuuuucccacauu

SEQ ID NO: 1253920 - RNA, 20 nt, Human
ucacaggauuucugccuucu

SEQ ID NO: 1253921 - RNA, 18 nt, Human
ucacagggccuuucucca

SEQ ID NO: 1253922 - RNA, 20 nt, Human
ucaccaacagaccuccuccc

SEQ ID NO: 1253923 - RNA, 21 nt, Human
ucaguacuguaaccaugcaac

SEQ ID NO: 1253924 - RNA, 19 nt, Human
ucaguguuuuauuguugac

SEQ ID NO: 1253925 - RNA, 19 nt, Human
uccaagaaggugaagguuu

SEQ ID NO: 1253926 - RNA, 21 nt, Human
ucccacguacauuacacucag

SEQ ID NO: 1253927 - RNA, 19 nt, Human
ucccagaagcacacucucu

SEQ ID NO: 1253928 - RNA, 18 nt, Human
uccccacgaaagcgaagg

SEQ ID NO: 1253929 - RNA, 24 nt, Human
ucccugggcggggccgccgagggg

SEQ ID NO: 1253930 - RNA, 18 nt, Human
uccucaugaaaagcuuuc

SEQ ID NO: 1253931 - RNA, 22 nt, Human
uccucucacauucauugaauuc

SEQ ID NO: 1253932 - RNA, 21 nt, Human
ucuccauaacccugugguguu

SEQ ID NO: 1253933 - RNA, 21 nt, Human
ucuguacgggguccucugagg

SEQ ID NO: 1253934 - RNA, 23 nt, Human
ucuuauggguacugcaggcugcc

SEQ ID NO: 1253935 - RNA, 27 nt, Human
ugacuacaagugccccaggauaaaaca

SEQ ID NO: 1253936 - RNA, 20 nt, Human
ugacuuggggacucuuccuc

SEQ ID NO: 1253937 - RNA, 22 nt, Human
ugagaaagacuucccacauucc

SEQ ID NO: 1253938 - RNA, 24 nt, Human
ugauguaacucauaggguuucucg

SEQ ID NO: 1253939 - RNA, 22 nt, Human
ugcaauaccccacugagaugag

SEQ ID NO: 1253940 - RNA, 26 nt, Human
ugccccaggauaaaacagagccugca

SEQ ID NO: 1253941 - RNA, 20 nt, Human
ugcuccaacuugcaaaccac

SEQ ID NO: 1253942 - RNA, 20 nt, Human
uggaacgaguccaagaaggu

SEQ ID NO: 1253943 - RNA, 22 nt, Human
uggccggacucuuaccccagcc

SEQ ID NO: 1253944 - RNA, 20 nt, Human
uggcugagagcuuucccaca

SEQ ID NO: 1253945 - RNA, 21 nt, Human
ugggcggggccgccgaggggc

SEQ ID NO: 1253946 - RNA, 21 nt, Human
ugggcguccgggggcggggcc

SEQ ID NO: 1253947 - RNA, 19 nt, Human
uggucuugauuuuccuguc

SEQ ID NO: 1253948 - RNA, 18 nt, Human
ugguuaaauguuuuguuc

SEQ ID NO: 1253949 - RNA, 24 nt, Human
uguaggguuucucuccuguguggg

SEQ ID NO: 1253950 - RNA, 23 nt, Human
ugucagaaaaggcucuuaguugu

SEQ ID NO: 1253951 - RNA, 21 nt, Human
ugugaguucuucucuuauggg

SEQ ID NO: 1253952 - RNA, 20 nt, Human
uguguguucucugauguguu

SEQ ID NO: 1253953 - RNA, 19 nt, Human
uuagagauuucucaccaac

SEQ ID NO: 1253954 - RNA, 21 nt, Human
uuagugaaguugggauucugg

SEQ ID NO: 1253955 - RNA, 22 nt, Human
uuaguuguucauuauauucaca

SEQ ID NO: 1253956 - RNA, 25 nt, Human
uuauggguacugcaggcugccucuu

SEQ ID NO: 1253957 - RNA, 24 nt, Human
uucaaagcuuguuuuuccuuuuug

SEQ ID NO: 1253958 - RNA, 18 nt, Human
uuccaaaugucuacuaca

SEQ ID NO: 1253959 - RNA, 23 nt, Human
uuccaaaugucuacuacagucaa

SEQ ID NO: 1253960 - RNA, 19 nt, Human
uuccagaauucaaaguggc

SEQ ID NO: 1253961 - RNA, 25 nt, Human
uucccacacucauuacauucauaga

SEQ ID NO: 1253962 - RNA, 19 nt, Human
uucuccagcaucaugucuc

SEQ ID NO: 1253963 - RNA, 19 nt, Human
uugaguucuuucaguguca

SEQ ID NO: 1253964 - RNA, 19 nt, Human
uugcuucauuacauucaaa

SEQ ID NO: 1253965 - RNA, 21 nt, Human
uuguuuuuccuuuuugaguuc

SEQ ID NO: 1253966 - RNA, 21 nt, Human
uuuccugguucuucuccauca

SEQ ID NO: 1253967 - RNA, 19 nt, Human
uuuccugucucuucuccau

SEQ ID NO: 1253968 - RNA, 18 nt, Human
uuuccugucucuucuccu

SEQ ID NO: 1253969 - RNA, 23 nt, Human
uuucucagauuagugaauucuga

SEQ ID NO: 1253970 - RNA, 21 nt, Human
uuuugaguucuuucaguguca

SEQ ID NO: 1253971 - RNA, 19 nt, Human
caguugaugaggagaagcu

SEQ ID NO: 1253972 - RNA, 18 nt, Human
gaucugcggcgagucccc

SEQ ID NO: 1253973 - RNA, 18 nt, Human
uccccaguugaugaggag

SEQ ID NO: 1253974 - RNA, 21 nt, Human
uguagagaagaaugacagcug

SEQ ID NO: 1253975 - RNA, 24 nt, Human
aaaaacaacaaaggacccgguacc

SEQ ID NO: 1253976 - RNA, 21 nt, Human
aagaaggaauacagguuugaa

SEQ ID NO: 1253977 - RNA, 22 nt, Human
aagaaggaauacagguuugaaa

SEQ ID NO: 1253978 - RNA, 18 nt, Human
aagcaggaagcaaggacc

SEQ ID NO: 1253979 - RNA, 20 nt, Human
aaggaauacagguuugaaag

SEQ ID NO: 1253980 - RNA, 18 nt, Human
aaucuucaucuucuuccu

SEQ ID NO: 1253981 - RNA, 23 nt, Human
aaugaagauuucuggaacaacua

SEQ ID NO: 1253982 - RNA, 21 nt, Human
agaaggaauacagguuugaaa

SEQ ID NO: 1253983 - RNA, 19 nt, Human
agacagaaucuucaucuuc

SEQ ID NO: 1253984 - RNA, 19 nt, Human
agaccuuggagggcuacag

SEQ ID NO: 1253985 - RNA, 22 nt, Human
agaccuuggagggcuacagcuu

SEQ ID NO: 1253986 - RNA, 22 nt, Human
aggacagccaggcauaugcuca

SEQ ID NO: 1253987 - RNA, 20 nt, Human
agguauugaaaaccaauacu

SEQ ID NO: 1253988 - RNA, 19 nt, Human
agguggugcuggcggaucg

SEQ ID NO: 1253989 - RNA, 19 nt, Human
aucuagcacugaaacaacu

SEQ ID NO: 1253990 - RNA, 23 nt, Human
caaacaagauaaacaacaauaug

SEQ ID NO: 1253991 - RNA, 23 nt, Human
cacaccgcaccccgaaggagcac

SEQ ID NO: 1253992 - RNA, 19 nt, Human
caccgcaccccgaaggagc

SEQ ID NO: 1253993 - RNA, 24 nt, Human
cacuuguuuccucaagaguugcua

SEQ ID NO: 1253994 - RNA, 21 nt, Human
cagccucuuuaaaaacaacaa

SEQ ID NO: 1253995 - RNA, 21 nt, Human
caggaagcaaggaccgaccga

SEQ ID NO: 1253996 - RNA, 19 nt, Human
cagggcccagccgcggggc

SEQ ID NO: 1253997 - RNA, 23 nt, Human
cccauagcgcgaggcgcggaggc

SEQ ID NO: 1253998 - RNA, 23 nt, Human
cccgcagggcuggcuggcccugg

SEQ ID NO: 1253999 - RNA, 18 nt, Human
ccgcaccccgaaggagcc

SEQ ID NO: 1254000 - RNA, 18 nt, Human
cggcagggcccagccgcg

SEQ ID NO: 1254001 - RNA, 19 nt, Human
cugccaggaaguagggagc

SEQ ID NO: 1254002 - RNA, 23 nt, Human
cuugccaagacauccuccuuugc

SEQ ID NO: 1254003 - RNA, 22 nt, Human
cuuugcacuuguuuccucaaga

SEQ ID NO: 1254004 - RNA, 21 nt, Human
cuuuggaaaacuggggagggg

SEQ ID NO: 1254005 - RNA, 23 nt, Human
gaaccaguuuuaacaaucucuga

SEQ ID NO: 1254006 - RNA, 19 nt, Human
gaacuggggaggagggugc

SEQ ID NO: 1254007 - RNA, 20 nt, Human
gaaggagcacggaggcccgc

SEQ ID NO: 1254008 - RNA, 20 nt, Human
gaccaaaaaauuggaaccag

SEQ ID NO: 1254009 - RNA, 22 nt, Human
gacggaaggagggaggaggagc

SEQ ID NO: 1254010 - RNA, 24 nt, Human
gagccgcagcggcgcggcagggcc

SEQ ID NO: 1254011 - RNA, 26 nt, Human
gaggacagccaggcauaugcucagac

SEQ ID NO: 1254012 - RNA, 22 nt, Human
gaggaggagccgcagcggcgcg

SEQ ID NO: 1254013 - RNA, 23 nt, Human
gaggagggugcuuggugacauuu

SEQ ID NO: 1254014 - RNA, 23 nt, Human
gcagggcccagccgcggggcggg

SEQ ID NO: 1254015 - RNA, 18 nt, Human
gccaagacauccuccuuu

SEQ ID NO: 1254016 - RNA, 22 nt, Human
gcugagggcgugacacagcagc

SEQ ID NO: 1254017 - RNA, 22 nt, Human
ggaaaaaaggcauuguaaacac

SEQ ID NO: 1254018 - RNA, 25 nt, Human
ggaucuggggugggagaaggggugg

SEQ ID NO: 1254019 - RNA, 23 nt, Human
ggcgcggaggacggaaggaggga

SEQ ID NO: 1254020 - RNA, 20 nt, Human
ggcgugacacagcagcucgg

SEQ ID NO: 1254021 - RNA, 21 nt, Human
ggcuacagcuuuucauaaaua

SEQ ID NO: 1254022 - RNA, 20 nt, Human
gggcccagccgcggggcggg

SEQ ID NO: 1254023 - RNA, 21 nt, Human
gggcgugacacagcagcucgg

SEQ ID NO: 1254024 - RNA, 21 nt, Human
ggggcaugaggcuccaccccc

SEQ ID NO: 1254025 - RNA, 20 nt, Human
uaaacacuucuauuuaaaau

SEQ ID NO: 1254026 - RNA, 21 nt, Human
uaaccucugguaacugaagug

SEQ ID NO: 1254027 - RNA, 19 nt, Human
uaauacccccaaaaaguaa

SEQ ID NO: 1254028 - RNA, 20 nt, Human
uacacugcagaaguagcuua

SEQ ID NO: 1254029 - RNA, 22 nt, Human
uagcacugaaacaacucuuaau

SEQ ID NO: 1254030 - RNA, 26 nt, Human
uaucuaauaaaugaguuugagaaugc

SEQ ID NO: 1254031 - RNA, 20 nt, Human
ucaaagucacucucaggugu

SEQ ID NO: 1254032 - RNA, 21 nt, Human
ucacuggacugaugauuucua

SEQ ID NO: 1254033 - RNA, 23 nt, Human
uccgcacaccgcaccccgaagga

SEQ ID NO: 1254034 - RNA, 22 nt, Human
ucuuccuuuugugaacugggga

SEQ ID NO: 1254035 - RNA, 24 nt, Human
ugacacagcagcucgguggcggag

SEQ ID NO: 1254036 - RNA, 20 nt, Human
ugcacaggaaacaacaaaac

SEQ ID NO: 1254037 - RNA, 20 nt, Human
uggccagcagccucuuuaaa

SEQ ID NO: 1254038 - RNA, 19 nt, Human
ugggaucuggggugggaga

SEQ ID NO: 1254039 - RNA, 22 nt, Human
uggggaggagggugcuugguga

SEQ ID NO: 1254040 - RNA, 20 nt, Human
uggggagggggaacagggag

SEQ ID NO: 1254041 - RNA, 19 nt, Human
uggggugggagaaggggug

SEQ ID NO: 1254042 - RNA, 21 nt, Human
ugguuacaaagucacaggaug

SEQ ID NO: 1254043 - RNA, 22 nt, Human
uguuugcccugccagcucaggc

SEQ ID NO: 1254044 - RNA, 20 nt, Human
uucuccgcacaccgcacccc

SEQ ID NO: 1254045 - RNA, 19 nt, Human
uugccaagacauccuccuu

SEQ ID NO: 1254046 - RNA, 21 nt, Human
uuggauguauuuccuucuagc

SEQ ID NO: 1254047 - RNA, 23 nt, Human
uuugcccugccagcucaggccuu

SEQ ID NO: 1254048 - RNA, 21 nt, Human
uuuggaaaacuggggaggggg

SEQ ID NO: 1254049 - RNA, 24 nt, Human
uuuuucugagaaaugaccaaaaaa

SEQ ID NO: 1254050 - RNA, 19 nt, Human
aauuacuagaaaauggcgg

SEQ ID NO: 1254051 - RNA, 22 nt, Human
caccuaugaugccauguauuca

SEQ ID NO: 1254052 - RNA, 23 nt, Human
caggugccuuucucuuuggcuuc

SEQ ID NO: 1254053 - RNA, 22 nt, Human
ccagcagcucaggcugcuuccc

SEQ ID NO: 1254054 - RNA, 23 nt, Human
gcugcuucccauugguucucaca

SEQ ID NO: 1254055 - RNA, 19 nt, Human
gggaauagguuccagcagc

SEQ ID NO: 1254056 - RNA, 18 nt, Human
guagagcaggcuggggcu

SEQ ID NO: 1254057 - RNA, 20 nt, Human
ucucuggguagagcaggcug

SEQ ID NO: 1254058 - RNA, 23 nt, Human
uuccagcagcucaggcugcuucc

SEQ ID NO: 1254059 - RNA, 23 nt, Human
uucucuggguagagcaggcuggg

SEQ ID NO: 1254060 - RNA, 20 nt, Human
uuggcuucuuucuuuuucug

SEQ ID NO: 1254061 - RNA, 23 nt, Human
aaagugcugggauuacaggcgug

SEQ ID NO: 1254062 - RNA, 24 nt, Human
aaagugcugggauuacaggcgugg

SEQ ID NO: 1254063 - RNA, 25 nt, Human
aaagugcugggauuacaggcguggg

SEQ ID NO: 1254064 - RNA, 19 nt, Human
aagugcugggauuacaggc

SEQ ID NO: 1254065 - RNA, 19 nt, Human
aagugcugggauuacaggc

SEQ ID NO: 1254066 - RNA, 24 nt, Human
agcgauucuccugccucagccucc

SEQ ID NO: 1254067 - RNA, 23 nt, Human
agcugaaucauucaccgcccagc

SEQ ID NO: 1254068 - RNA, 18 nt, Human
aguagcugggauugcagg

SEQ ID NO: 1254069 - RNA, 22 nt, Human
auuuuuguauuuuuaguagaga

SEQ ID NO: 1254070 - RNA, 24 nt, Human
caaagugcugggauuacaggcgug

SEQ ID NO: 1254071 - RNA, 20 nt, Human
caagcgauucuccugccuca

SEQ ID NO: 1254072 - RNA, 22 nt, Human
caagcgauucuccugccucagc

SEQ ID NO: 1254073 - RNA, 24 nt, Human
cacguugcccaggcugguuucgaa

SEQ ID NO: 1254074 - RNA, 19 nt, Human
cacugcacccagccuugca

SEQ ID NO: 1254075 - RNA, 20 nt, Human
cagccuccugaguagcuggg

SEQ ID NO: 1254076 - RNA, 22 nt, Human
ccaaagugcugggauuacaggc

SEQ ID NO: 1254077 - RNA, 22 nt, Human
ccaaagugcugggauuacaggc

SEQ ID NO: 1254078 - RNA, 22 nt, Human
ccaaagugcugggauuacaggc

SEQ ID NO: 1254079 - RNA, 24 nt, Human
ccaaagugcugggauuacaggcgu

SEQ ID NO: 1254080 - RNA, 23 nt, Human
ccacguugcccaggcugguuucg

SEQ ID NO: 1254081 - RNA, 19 nt, Human
ccacugcacccagccuugc

SEQ ID NO: 1254082 - RNA, 20 nt, Human
ccgcccagcuagcaaugugg

SEQ ID NO: 1254083 - RNA, 22 nt, Human
ccugaguagcugggauugcagg

SEQ ID NO: 1254084 - RNA, 22 nt, Human
ccugaguagcugggauugcagg

SEQ ID NO: 1254085 - RNA, 23 nt, Human
ccugaguagcugggauugcaggu

SEQ ID NO: 1254086 - RNA, 23 nt, Human
ccugccucagccuccugaguagc

SEQ ID NO: 1254087 - RNA, 24 nt, Human
ccugccucagccuccugaguagcu

SEQ ID NO: 1254088 - RNA, 24 nt, Human
cgccacguugcccaggcugguuuc

SEQ ID NO: 1254089 - RNA, 31 nt, Human
cgccacguugcccaggcugguuucgaacucc

SEQ ID NO: 1254090 - RNA, 24 nt, Human
cucagccuccugaguagcugggau

SEQ ID NO: 1254091 - RNA, 23 nt, Human
cugaguagcugggauugcaggug

SEQ ID NO: 1254092 - RNA, 24 nt, Human
cugaguagcugggauugcaggugu

SEQ ID NO: 1254093 - RNA, 24 nt, Human
gaagaugccauucagaugccccuc

SEQ ID NO: 1254094 - RNA, 24 nt, Human
gaggguuucgccacguugcccagg

SEQ ID NO: 1254095 - RNA, 19 nt, Human
gaguagcugggauugcagg

SEQ ID NO: 1254096 - RNA, 18 nt, Human
gauuacaggcgugggcca

SEQ ID NO: 1254097 - RNA, 22 nt, Human
gauuacaggcgugggccacugc

SEQ ID NO: 1254098 - RNA, 23 nt, Human
gauuacaggcgugggccacugca

SEQ ID NO: 1254099 - RNA, 24 nt, Human
gcgauucuccugccucagccuccu

SEQ ID NO: 1254100 - RNA, 18 nt, Human
ggagaguggacuucugga

SEQ ID NO: 1254101 - RNA, 18 nt, Human
gguucaagcgauucuccu

SEQ ID NO: 1254102 - RNA, 24 nt, Human
gugaucugcccgccucggccugcc

SEQ ID NO: 1254103 - RNA, 18 nt, Human
guggacaccuugcacaga

SEQ ID NO: 1254104 - RNA, 24 nt, Human
guuucgccacguugcccaggcugg

SEQ ID NO: 1254105 - RNA, 19 nt, Human
uacaggcgugggccacugc

SEQ ID NO: 1254106 - RNA, 24 nt, Human
uaguagagagaggguuucgccacg

SEQ ID NO: 1254107 - RNA, 20 nt, Human
ucagccuccugaguagcugg

SEQ ID NO: 1254108 - RNA, 23 nt, Human
uccugagcuccggugaucugccc

SEQ ID NO: 1254109 - RNA, 24 nt, Human
uccugaguagcugggauugcaggu

SEQ ID NO: 1254110 - RNA, 24 nt, Human
ucuccugccucagccuccugagua

SEQ ID NO: 1254111 - RNA, 24 nt, Human
ucugucagguggugccccacuuug

SEQ ID NO: 1254112 - RNA, 24 nt, Human
ugcccaggcugguuucgaacuccu

SEQ ID NO: 1254113 - RNA, 28 nt, Human
ugcccaggcugguuucgaacuccugagc

SEQ ID NO: 1254114 - RNA, 24 nt, Human
ugccucagccuccugaguagcugg

SEQ ID NO: 1254115 - RNA, 24 nt, Human
ugcugggauuacaggcgugggcca

SEQ ID NO: 1254116 - RNA, 22 nt, Human
uggaaagagcaggcaaucaaau

SEQ ID NO: 1254117 - RNA, 19 nt, Human
uggaaagggaugcacugca

SEQ ID NO: 1254118 - RNA, 18 nt, Human
ugggauuacaggcguggg

SEQ ID NO: 1254119 - RNA, 19 nt, Human
ugggauuacaggcgugggc

SEQ ID NO: 1254120 - RNA, 21 nt, Human
ugggauuacaggcgugggcca

SEQ ID NO: 1254121 - RNA, 22 nt, Human
ugggauuacaggcgugggccac

SEQ ID NO: 1254122 - RNA, 22 nt, Human
ugggauuacaggcgugggccac

SEQ ID NO: 1254123 - RNA, 24 nt, Human
ugggauuacaggcgugggccacug

SEQ ID NO: 1254124 - RNA, 18 nt, Human
ugggauugcaggugugcg

SEQ ID NO: 1254125 - RNA, 21 nt, Human
ugggauugcaggugugcgcca

SEQ ID NO: 1254126 - RNA, 22 nt, Human
ugggcugaccagcugcagggag

SEQ ID NO: 1254127 - RNA, 18 nt, Human
ugugcgccaacaugugca

SEQ ID NO: 1254128 - RNA, 21 nt, Human
uucaagcgauucuccugccuc

SEQ ID NO: 1254129 - RNA, 23 nt, Human
uucaagcgauucuccugccucag

SEQ ID NO: 1254130 - RNA, 24 nt, Human
uucaagcgauucuccugccucagc

SEQ ID NO: 1254131 - RNA, 20 nt, Human
uugagaauucugucaggugg

SEQ ID NO: 1254132 - RNA, 23 nt, Human
uuucgccacguugcccaggcugg

SEQ ID NO: 1254133 - RNA, 22 nt, Human
uuuuuaguagagagaggguuuc

SEQ ID NO: 1254134 - RNA, 20 nt, Human
uuuuuguauuuuuaguagag

SEQ ID NO: 1254135 - RNA, 18 nt, Human
aacuugcucuucgcucca

SEQ ID NO: 1254136 - RNA, 19 nt, Human
cauauguuggauuccugcu

SEQ ID NO: 1254137 - RNA, 19 nt, Human
uauguuggauuccugcuuu

SEQ ID NO: 1254138 - RNA, 18 nt, Human
ugaacgcauucagcaaca

SEQ ID NO: 1254139 - RNA, 18 nt, Human
ugaauugauuaucaguga

SEQ ID NO: 1254140 - RNA, 19 nt, Human
uuccugcuuugcugcggca

SEQ ID NO: 1254141 - RNA, 22 nt, Human
uugcugcggcacgcaggaagcc

SEQ ID NO: 1254142 - RNA, 21 nt, Human
aaacacaaaaugaagucagga

SEQ ID NO: 1254143 - RNA, 18 nt, Human
aaaggcauaacaaagaag

SEQ ID NO: 1254144 - RNA, 20 nt, Human
aacaaagcgagacuccaucu

SEQ ID NO: 1254145 - RNA, 27 nt, Human
aacaacuuugaacaaaacaguggugac

SEQ ID NO: 1254146 - RNA, 18 nt, Human
aacacggugaaaccccgu

SEQ ID NO: 1254147 - RNA, 19 nt, Human
aacacggugaaaccccguc

SEQ ID NO: 1254148 - RNA, 20 nt, Human
aacacggugaaaccccgucc

SEQ ID NO: 1254149 - RNA, 24 nt, Human
aaccccgucccuacuguaauccca

SEQ ID NO: 1254150 - RNA, 22 nt, Human
aagcaacaaaaauaaugugacc

SEQ ID NO: 1254151 - RNA, 24 nt, Human
aauuguuugaaccagggaggcgga

SEQ ID NO: 1254152 - RNA, 23 nt, Human
acaaagcgagacuccaucuggaa

SEQ ID NO: 1254153 - RNA, 18 nt, Human
acaccgucucuacuaaaa

SEQ ID NO: 1254154 - RNA, 22 nt, Human
acagggcacuuugaaugucccu

SEQ ID NO: 1254155 - RNA, 24 nt, Human
accagggaggcggaggcugcagug

SEQ ID NO: 1254156 - RNA, 24 nt, Human
agcacuuugagaggcugaggcagg

SEQ ID NO: 1254157 - RNA, 24 nt, Human
agccuauagucccagcuacucagg

SEQ ID NO: 1254158 - RNA, 19 nt, Human
agccuggccaauaugguga

SEQ ID NO: 1254159 - RNA, 24 nt, Human
agccugggcaacaaagcgagacuc

SEQ ID NO: 1254160 - RNA, 21 nt, Human
aggaggaauucugagacagcu

SEQ ID NO: 1254161 - RNA, 25 nt, Human
aggaggccaccuagguagagaggau

SEQ ID NO: 1254162 - RNA, 19 nt, Human
aggcagaucacaaggucaa

SEQ ID NO: 1254163 - RNA, 24 nt, Human
aggcaggaauuguuugaaccaggg

SEQ ID NO: 1254164 - RNA, 24 nt, Human
aggcaggcagaucacaaggucaag

SEQ ID NO: 1254165 - RNA, 24 nt, Human
aggcaggcagaucacaaggucaag

SEQ ID NO: 1254166 - RNA, 21 nt, Human
aggccgagguggcuggaucac

SEQ ID NO: 1254167 - RNA, 21 nt, Human
aggcggaggcugcagugagcc

SEQ ID NO: 1254168 - RNA, 24 nt, Human
aggcggaggcugcagugagccgag

SEQ ID NO: 1254169 - RNA, 22 nt, Human
aggcugaggcaggaauuguuug

SEQ ID NO: 1254170 - RNA, 20 nt, Human
agguagagaggauucagucg

SEQ ID NO: 1254171 - RNA, 18 nt, Human
agucccaggaggaggaau

SEQ ID NO: 1254172 - RNA, 20 nt, Human
agugguguuggaggaccuac

SEQ ID NO: 1254173 - RNA, 23 nt, Human
agugguguuggaggaccuacugu

SEQ ID NO: 1254174 - RNA, 24 nt, Human
aucgcgccaaggcacuccagccug

SEQ ID NO: 1254175 - RNA, 20 nt, Human
auggugaaacaccgucucua

SEQ ID NO: 1254176 - RNA, 22 nt, Human
caaacaacugccaggcgagagc

SEQ ID NO: 1254177 - RNA, 24 nt, Human
caaggcacuccagccugggcaaca

SEQ ID NO: 1254178 - RNA, 22 nt, Human
caaggguccgagaccagccugg

SEQ ID NO: 1254179 - RNA, 22 nt, Human
cacaagaaaaaggauggaacag

SEQ ID NO: 1254180 - RNA, 24 nt, Human
cagcacuuugagaggcugaggcag

SEQ ID NO: 1254181 - RNA, 24 nt, Human
cagcacuuugagaggcugaggcag

SEQ ID NO: 1254182 - RNA, 25 nt, Human
cagcaugggggugaccaccacagcg

SEQ ID NO: 1254183 - RNA, 19 nt, Human
cagcguacauuacugacgc

SEQ ID NO: 1254184 - RNA, 24 nt, Human
cagcuacucaggaggcugaggcag

SEQ ID NO: 1254185 - RNA, 23 nt, Human
caggcaaacacaaaaugaaguca

SEQ ID NO: 1254186 - RNA, 21 nt, Human
ccaucuggaaaauugggucac

SEQ ID NO: 1254187 - RNA, 22 nt, Human
cccuacuguaaucccagcacuu

SEQ ID NO: 1254188 - RNA, 22 nt, Human
ccggcacgguggcgggagccuu

SEQ ID NO: 1254189 - RNA, 21 nt, Human
ccuauagucccagcuacucag

SEQ ID NO: 1254190 - RNA, 22 nt, Human
ccucugagagucccaggaggag

SEQ ID NO: 1254191 - RNA, 23 nt, Human
ccuggccaauauggugaaacacc

SEQ ID NO: 1254192 - RNA, 24 nt, Human
ccuggccaauauggugaaacaccg

SEQ ID NO: 1254193 - RNA, 23 nt, Human
ccuggcuaacacggugaaacccc

SEQ ID NO: 1254194 - RNA, 24 nt, Human
ccuggcuaacacggugaaaccccg

SEQ ID NO: 1254195 - RNA, 24 nt, Human
cgagaccagccuggccaauauggu

SEQ ID NO: 1254196 - RNA, 24 nt, Human
cgagaccauccuggcuaacacggu

SEQ ID NO: 1254197 - RNA, 24 nt, Human
cgagaucgcgccaaggcacuccag

SEQ ID NO: 1254198 - RNA, 18 nt, Human
cgaggguccuacgcccac

SEQ ID NO: 1254199 - RNA, 22 nt, Human
cgagguggcuggaucacgacgu

SEQ ID NO: 1254200 - RNA, 24 nt, Human
cgagguggcuggaucacgacguca

SEQ ID NO: 1254201 - RNA, 24 nt, Human
cgccaaggcacuccagccugggca

SEQ ID NO: 1254202 - RNA, 26 nt, Human
cgccaaggcacuccagccugggcaac

SEQ ID NO: 1254203 - RNA, 19 nt, Human
cgcuaaacaaaggauccca

SEQ ID NO: 1254204 - RNA, 18 nt, Human
cggugaaaccccgucccu

SEQ ID NO: 1254205 - RNA, 21 nt, Human
cuaacgcacacaagaaaaagg

SEQ ID NO: 1254206 - RNA, 18 nt, Human
cuacgcccacggagucuc

SEQ ID NO: 1254207 - RNA, 19 nt, Human
cuacuaaaaaauacaaaaa

SEQ ID NO: 1254208 - RNA, 19 nt, Human
cucccacacgaauacugcg

SEQ ID NO: 1254209 - RNA, 21 nt, Human
cucuacuaaaaaauacaaaaa

SEQ ID NO: 1254210 - RNA, 20 nt, Human
cugcagugagccgagaucgc

SEQ ID NO: 1254211 - RNA, 22 nt, Human
cugcagugagccgagaucgcgc

SEQ ID NO: 1254212 - RNA, 18 nt, Human
cuggcuaacacggugaaa

SEQ ID NO: 1254213 - RNA, 19 nt, Human
cuguaaucccagcacuuug

SEQ ID NO: 1254214 - RNA, 24 nt, Human
gaacaaaacagugguguuggagga

SEQ ID NO: 1254215 - RNA, 20 nt, Human
gaauuguuugaaccagggag

SEQ ID NO: 1254216 - RNA, 25 nt, Human
gcaacaaagcgagacuccaucugga

SEQ ID NO: 1254217 - RNA, 24 nt, Human
gcacacaagaaaaaggauggaaca

SEQ ID NO: 1254218 - RNA, 22 nt, Human
gccaaggcacuccagccugggc

SEQ ID NO: 1254219 - RNA, 24 nt, Human
gccaauauggugaaacaccgucuc

SEQ ID NO: 1254220 - RNA, 18 nt, Human
gccaccacaucauuccug

SEQ ID NO: 1254221 - RNA, 18 nt, Human
gcccuuucuaacgcacac

SEQ ID NO: 1254222 - RNA, 22 nt, Human
gcuaacacggugaaaccccguc

SEQ ID NO: 1254223 - RNA, 25 nt, Human
ggaauuguuugaaccagggaggcgg

SEQ ID NO: 1254224 - RNA, 24 nt, Human
ggaggcugcagugagccgagaucg

SEQ ID NO: 1254225 - RNA, 24 nt, Human
ggcucuuuugggaggccgaggugg

SEQ ID NO: 1254226 - RNA, 23 nt, Human
gugauguuuacgcuaaacaaagg

SEQ ID NO: 1254227 - RNA, 22 nt, Human
uaaaagccaucaagcaacaaaa

SEQ ID NO: 1254228 - RNA, 22 nt, Human
uaaaauaagcaaacaacugcca

SEQ ID NO: 1254229 - RNA, 26 nt, Human
uaaaauaagcaaacaacugccaggcg

SEQ ID NO: 1254230 - RNA, 23 nt, Human
uaaaauaagcaaacaacugcccc

SEQ ID NO: 1254231 - RNA, 20 nt, Human
uaaaggaggccaccuaggua

SEQ ID NO: 1254232 - RNA, 19 nt, Human
uaaaggcauaacaaagaag

SEQ ID NO: 1254233 - RNA, 20 nt, Human
uaacacggugaaaccccguc

SEQ ID NO: 1254234 - RNA, 24 nt, Human
uaacacggugaaaccccgucccua

SEQ ID NO: 1254235 - RNA, 21 nt, Human
uaacgcacacaagaaaaagga

SEQ ID NO: 1254236 - RNA, 18 nt, Human
uacuguaaucccagcacu

SEQ ID NO: 1254237 - RNA, 21 nt, Human
uauugcucagaaacuaaagga

SEQ ID NO: 1254238 - RNA, 24 nt, Human
ucacaaggucaaggguccgagacc

SEQ ID NO: 1254239 - RNA, 24 nt, Human
ucacgacgucaggagaucgagacc

SEQ ID NO: 1254240 - RNA, 24 nt, Human
uccagccugggcaacaaagcgaga

SEQ ID NO: 1254241 - RNA, 21 nt, Human
ucccacacgaauacugcgcuu

SEQ ID NO: 1254242 - RNA, 22 nt, Human
ucucuacuaaaaaauacaaaaa

SEQ ID NO: 1254243 - RNA, 18 nt, Human
ucugcugugcagccucca

SEQ ID NO: 1254244 - RNA, 22 nt, Human
ucuuuugggaggccgagguggc

SEQ ID NO: 1254245 - RNA, 22 nt, Human
ugaaaaacggcgcaccacgaga

SEQ ID NO: 1254246 - RNA, 20 nt, Human
ugaagggguucagcaugggg

SEQ ID NO: 1254247 - RNA, 20 nt, Human
ugagaggcugaggcaggcag

SEQ ID NO: 1254248 - RNA, 24 nt, Human
ugagaggcugaggcaggcagauca

SEQ ID NO: 1254249 - RNA, 22 nt, Human
ugagccgagaucgcgccaaggc

SEQ ID NO: 1254250 - RNA, 22 nt, Human
ugaggcaggaauuguuugaacc

SEQ ID NO: 1254251 - RNA, 24 nt, Human
ugaggcaggcagaucacaagguca

SEQ ID NO: 1254252 - RNA, 18 nt, Human
uggccaauauggugaaac

SEQ ID NO: 1254253 - RNA, 19 nt, Human
ugggaggccgagguggcug

SEQ ID NO: 1254254 - RNA, 24 nt, Human
ugggaggccgagguggcuggauca

SEQ ID NO: 1254255 - RNA, 20 nt, Human
ugggggaugaugacacagcg

SEQ ID NO: 1254256 - RNA, 21 nt, Human
ugugcagccuccacagggcac

SEQ ID NO: 1254257 - RNA, 21 nt, Human
uguggaaaggaauaaaagcca

SEQ ID NO: 1254258 - RNA, 18 nt, Human
uuacgcuaaacaaaggau

SEQ ID NO: 1254259 - RNA, 21 nt, Human
uugaaaaacggcgcaccacga

SEQ ID NO: 1254260 - RNA, 25 nt, Human
uugagaggcugaggcaggcagauca

SEQ ID NO: 1254261 - RNA, 25 nt, Human
uugggaggccgagguggcuggauca

SEQ ID NO: 1254262 - RNA, 24 nt, Human
uuguuugaaccagggaggcggagg

SEQ ID NO: 1254263 - RNA, 24 nt, Human
uuucucaggcugcagaugaagggg

SEQ ID NO: 1254264 - RNA, 19 nt, Human
aaaaucauugcaacuuucc

SEQ ID NO: 1254265 - RNA, 18 nt, Human
aacacaccacagcuguau

SEQ ID NO: 1254266 - RNA, 19 nt, Human
aagagccaaagaggacagu

SEQ ID NO: 1254267 - RNA, 22 nt, Human
aagccaaauggcugaaaccagg

SEQ ID NO: 1254268 - RNA, 20 nt, Human
aagccaaauggcugaaaccg

SEQ ID NO: 1254269 - RNA, 21 nt, Human
aggacaguguugggacuaaac

SEQ ID NO: 1254270 - RNA, 21 nt, Human
agguaagaggugaacuuaagg

SEQ ID NO: 1254271 - RNA, 21 nt, Human
auugcaacuuuccagccaagg

SEQ ID NO: 1254272 - RNA, 19 nt, Human
caagcuccucauucccauc

SEQ ID NO: 1254273 - RNA, 22 nt, Human
cacaucuucuaagagccaaaga

SEQ ID NO: 1254274 - RNA, 25 nt, Human
ccaagguaagaggugaacuuaagga

SEQ ID NO: 1254275 - RNA, 22 nt, Human
ccacaucuucuaagagccaaag

SEQ ID NO: 1254276 - RNA, 21 nt, Human
ccugaccucuaucccuuggcc

SEQ ID NO: 1254277 - RNA, 19 nt, Human
cuggucccacaauuccugg

SEQ ID NO: 1254278 - RNA, 22 nt, Human
gaggacaguguugggacuaaac

SEQ ID NO: 1254279 - RNA, 19 nt, Human
gcccagaagggauaugggg

SEQ ID NO: 1254280 - RNA, 24 nt, Human
gcgauagacuauuugguuucuucu

SEQ ID NO: 1254281 - RNA, 25 nt, Human
gcuauugggugaauagaaauuuagg

SEQ ID NO: 1254282 - RNA, 18 nt, Human
gcugacaaaaacugaaca

SEQ ID NO: 1254283 - RNA, 26 nt, Human
ggaaaaaauucacuuauuagcgauaa

SEQ ID NO: 1254284 - RNA, 18 nt, Human
ggcacuguggggccaagg

SEQ ID NO: 1254285 - RNA, 23 nt, Human
uaaaaaacacuaugauaugaggg

SEQ ID NO: 1254286 - RNA, 19 nt, Human
uaagagccaaagaggacag

SEQ ID NO: 1254287 - RNA, 21 nt, Human
uaauuuguauuugauuuccuc

SEQ ID NO: 1254288 - RNA, 24 nt, Human
uagaaaacacuacaugugucgaca

SEQ ID NO: 1254289 - RNA, 19 nt, Human
uauccaagccaucauagcu

SEQ ID NO: 1254290 - RNA, 22 nt, Human
ucccacaauuccuggauuucug

SEQ ID NO: 1254291 - RNA, 27 nt, Human
ucccuuggcaagguaucguauccuggg

SEQ ID NO: 1254292 - RNA, 21 nt, Human
ucuaagagccaaagaggacag

SEQ ID NO: 1254293 - RNA, 25 nt, Human
ucuagguuagagcaugaccgggguc

SEQ ID NO: 1254294 - RNA, 22 nt, Human
ucucucuaauagaaauaaaaau

SEQ ID NO: 1254295 - RNA, 23 nt, Human
ucuuaugagacgcugacaaaaac

SEQ ID NO: 1254296 - RNA, 19 nt, Human
ugaaaccagguaacugcca

SEQ ID NO: 1254297 - RNA, 21 nt, Human
ugacaaaaacugaacacagua

SEQ ID NO: 1254298 - RNA, 26 nt, Human
ugacaaaaacugaacacaguaagccc

SEQ ID NO: 1254299 - RNA, 18 nt, Human
ugaccucuaucccuuggc

SEQ ID NO: 1254300 - RNA, 19 nt, Human
ugagacacuggcacugugg

SEQ ID NO: 1254301 - RNA, 21 nt, Human
ugagacgcugacaaaaacuga

SEQ ID NO: 1254302 - RNA, 19 nt, Human
ugagcaaagcauagaaugc

SEQ ID NO: 1254303 - RNA, 24 nt, Human
uuaaugguaagcuuuaucccuccu

SEQ ID NO: 1254304 - RNA, 22 nt, Human
uuuuuaaaccacuggaugaaua

SEQ ID NO: 1254305 - RNA, 18 nt, Human
agugacaguccucagacu

SEQ ID NO: 1254306 - RNA, 22 nt, Human
cccugcuaccaaaguuuuuuuu

SEQ ID NO: 1254307 - RNA, 24 nt, Human
cuggcccugcuaccaaaguuuuuu

SEQ ID NO: 1254308 - RNA, 20 nt, Human
ugcagugacaguccucagac

SEQ ID NO: 1254309 - RNA, 27 nt, Human
uggcuggcccugcuaccaaaguuuuuu

SEQ ID NO: 1254310 - RNA, 22 nt, Human
aaacagaaagaaaagucucugg

SEQ ID NO: 1254311 - RNA, 21 nt, Human
aaacuguuccagucucuuccg

SEQ ID NO: 1254312 - RNA, 23 nt, Human
accauggaaacuguuccagucuc

SEQ ID NO: 1254313 - RNA, 20 nt, Human
accgugguggcggcagcggc

SEQ ID NO: 1254314 - RNA, 19 nt, Human
acgagcuccucgcacgcgc

SEQ ID NO: 1254315 - RNA, 20 nt, Human
agaaaagccccguagccccc

SEQ ID NO: 1254316 - RNA, 20 nt, Human
agcaggcuguucuccuggag

SEQ ID NO: 1254317 - RNA, 23 nt, Human
aggcagcagaggccucucgcucu

SEQ ID NO: 1254318 - RNA, 23 nt, Human
aggccuuuucugcccucucccgu

SEQ ID NO: 1254319 - RNA, 21 nt, Human
aggcggcugaggccgcggaag

SEQ ID NO: 1254320 - RNA, 27 nt, Human
aggcugcagggcgguugacccaggucu

SEQ ID NO: 1254321 - RNA, 18 nt, Human
aggcugccuuuguacggg

SEQ ID NO: 1254322 - RNA, 22 nt, Human
agggccuggaggcggcggcggg

SEQ ID NO: 1254323 - RNA, 20 nt, Human
agggguuagcguugagccgg

SEQ ID NO: 1254324 - RNA, 18 nt, Human
agguacugcaggcugacc

SEQ ID NO: 1254325 - RNA, 18 nt, Human
cacaagaugcggagacag

SEQ ID NO: 1254326 - RNA, 20 nt, Human
caccccacgacagaucccug

SEQ ID NO: 1254327 - RNA, 21 nt, Human
cacgcccugcagccgguuccc

SEQ ID NO: 1254328 - RNA, 21 nt, Human
cagcaccccacgacagauccc

SEQ ID NO: 1254329 - RNA, 22 nt, Human
cagccgcccagcgcccgcgccc

SEQ ID NO: 1254330 - RNA, 23 nt, Human
cagccuccacuuccccauccucc

SEQ ID NO: 1254331 - RNA, 19 nt, Human
caguaggcuugccgggguc

SEQ ID NO: 1254332 - RNA, 20 nt, Human
ccaaaauaagcagccaccgu

SEQ ID NO: 1254333 - RNA, 22 nt, Human
ccacacccaacgggcugcuuca

SEQ ID NO: 1254334 - RNA, 19 nt, Human
ccagaauguaacaccccaa

SEQ ID NO: 1254335 - RNA, 21 nt, Human
ccaggcccagagcggccgcgc

SEQ ID NO: 1254336 - RNA, 24 nt, Human
ccaggcugccuuuguacgggcuug

SEQ ID NO: 1254337 - RNA, 21 nt, Human
ccaguagucguccucaguagg

SEQ ID NO: 1254338 - RNA, 22 nt, Human
cccagcuccucucugugccccu

SEQ ID NO: 1254339 - RNA, 23 nt, Human
ccccaaaauaagcagccaccgug

SEQ ID NO: 1254340 - RNA, 20 nt, Human
ccccagcaguuuccugcucu

SEQ ID NO: 1254341 - RNA, 20 nt, Human
ccccagcuccucucugugcc

SEQ ID NO: 1254342 - RNA, 20 nt, Human
cccccagcuccucucugugc

SEQ ID NO: 1254343 - RNA, 20 nt, Human
ccccgacuagggccugcgcc

SEQ ID NO: 1254344 - RNA, 20 nt, Human
ccccgcccuggcgcccccgc

SEQ ID NO: 1254345 - RNA, 22 nt, Human
ccccgcccuggcgcccccgcga

SEQ ID NO: 1254346 - RNA, 20 nt, Human
ccccugggcugccgcucccg

SEQ ID NO: 1254347 - RNA, 18 nt, Human
cccuggcgcuccgggggg

SEQ ID NO: 1254348 - RNA, 24 nt, Human
cccuuugccuuuuuccacaacaaa

SEQ ID NO: 1254349 - RNA, 19 nt, Human
ccgcccagcgcccgcgccc

SEQ ID NO: 1254350 - RNA, 18 nt, Human
ccgcgccccgcuagcugc

SEQ ID NO: 1254351 - RNA, 21 nt, Human
ccggagcgcaguggggcuggc

SEQ ID NO: 1254352 - RNA, 25 nt, Human
ccggggucucugcacucuguguccg

SEQ ID NO: 1254353 - RNA, 20 nt, Human
ccggguccaccugcccccug

SEQ ID NO: 1254354 - RNA, 23 nt, Human
ccggguccaccugcccccugcgu

SEQ ID NO: 1254355 - RNA, 21 nt, Human
ccuccacuuccccauccucca

SEQ ID NO: 1254356 - RNA, 19 nt, Human
ccugcgccuggggggaggg

SEQ ID NO: 1254357 - RNA, 18 nt, Human
ccuggcgcuccggggggg

SEQ ID NO: 1254358 - RNA, 24 nt, Human
ccuguagguggagcaggccggggc

SEQ ID NO: 1254359 - RNA, 18 nt, Human
ccuuuucugcccucuccc

SEQ ID NO: 1254360 - RNA, 19 nt, Human
cgaagcaauagccagagac

SEQ ID NO: 1254361 - RNA, 21 nt, Human
cgagcuccucgcacgcgcccg

SEQ ID NO: 1254362 - RNA, 19 nt, Human
cgcccuggcgcccccgcga

SEQ ID NO: 1254363 - RNA, 19 nt, Human
cgcgcgcgcgcuggaacca

SEQ ID NO: 1254364 - RNA, 18 nt, Human
cgcucgagaguccgucag

SEQ ID NO: 1254365 - RNA, 23 nt, Human
cggcggcggggagggaguguugg

SEQ ID NO: 1254366 - RNA, 26 nt, Human
cggcggcggggagggaguguuggggg

SEQ ID NO: 1254367 - RNA, 18 nt, Human
cgggcagcgaggccaggc

SEQ ID NO: 1254368 - RNA, 21 nt, Human
cggggcugcugagcccccugg

SEQ ID NO: 1254369 - RNA, 23 nt, Human
cggggcugcugagcccccugggc

SEQ ID NO: 1254370 - RNA, 20 nt, Human
cgggguuggggcugcuggag

SEQ ID NO: 1254371 - RNA, 19 nt, Human
cgggugagccgcugaaagu

SEQ ID NO: 1254372 - RNA, 23 nt, Human
cuccacacccaacgggcugcuuc

SEQ ID NO: 1254373 - RNA, 21 nt, Human
cuccccuuccugcugaugcuc

SEQ ID NO: 1254374 - RNA, 20 nt, Human
cucccuggaaaggcagcaga

SEQ ID NO: 1254375 - RNA, 19 nt, Human
cuccggggggguggcgcag

SEQ ID NO: 1254376 - RNA, 19 nt, Human
cucggccccccagcuccuc

SEQ ID NO: 1254377 - RNA, 22 nt, Human
cucggcccuggcgcuccggggg

SEQ ID NO: 1254378 - RNA, 21 nt, Human
cucuggaaggaggggcacagg

SEQ ID NO: 1254379 - RNA, 21 nt, Human
cucuguguccgggauccuccu

SEQ ID NO: 1254380 - RNA, 19 nt, Human
cugcccucucccgugcagc

SEQ ID NO: 1254381 - RNA, 20 nt, Human
cugcugagcccccugggcug

SEQ ID NO: 1254382 - RNA, 19 nt, Human
cuggaaggaggggcacagg

SEQ ID NO: 1254383 - RNA, 21 nt, Human
cuuaaugucagccuccacuuc

SEQ ID NO: 1254384 - RNA, 21 nt, Human
cuugacucggcccggcgcguc

SEQ ID NO: 1254385 - RNA, 18 nt, Human
cuugccggggucucugca

SEQ ID NO: 1254386 - RNA, 20 nt, Human
cuuggggaagcggggggggg

SEQ ID NO: 1254387 - RNA, 21 nt, Human
gaaggaggggcacaggguccc

SEQ ID NO: 1254388 - RNA, 20 nt, Human
gagcugccuccggagcgcag

SEQ ID NO: 1254389 - RNA, 18 nt, Human
gccccagcaguuuccugc

SEQ ID NO: 1254390 - RNA, 23 nt, Human
gccccgcugcccgcgccgcggcu

SEQ ID NO: 1254391 - RNA, 23 nt, Human
gccccguagcccccccaguaguc

SEQ ID NO: 1254392 - RNA, 19 nt, Human
gcccgcgccgcggcuccuc

SEQ ID NO: 1254393 - RNA, 21 nt, Human
gcccuggaaggugucgggcuc

SEQ ID NO: 1254394 - RNA, 21 nt, Human
gccgggcagcgaggccaggcu

SEQ ID NO: 1254395 - RNA, 20 nt, Human
gccugcgccuggggggaggg

SEQ ID NO: 1254396 - RNA, 18 nt, Human
gcgccgcggcuccuccuu

SEQ ID NO: 1254397 - RNA, 21 nt, Human
gcgcggcagucgcacgcccag

SEQ ID NO: 1254398 - RNA, 18 nt, Human
gcggcggcggggagggag

SEQ ID NO: 1254399 - RNA, 20 nt, Human
gcgugcaugucugagcuggu

SEQ ID NO: 1254400 - RNA, 22 nt, Human
gcucccagccaagugcccuccu

SEQ ID NO: 1254401 - RNA, 23 nt, Human
gcugcugagcccccugggcugcc

SEQ ID NO: 1254402 - RNA, 20 nt, Human
gcuguucuccuggagguaga

SEQ ID NO: 1254403 - RNA, 23 nt, Human
gcuucagggaagggcuggggccu

SEQ ID NO: 1254404 - RNA, 25 nt, Human
ggaaggaggggcacagggucccaga

SEQ ID NO: 1254405 - RNA, 20 nt, Human
ggaaggugucgggcuccagc

SEQ ID NO: 1254406 - RNA, 22 nt, Human
ggaggcuucgaagcaauagcca

SEQ ID NO: 1254407 - RNA, 24 nt, Human
ggagggccuggaggcggcggcggg

SEQ ID NO: 1254408 - RNA, 18 nt, Human
ggcacagggucccagacg

SEQ ID NO: 1254409 - RNA, 21 nt, Human
ggccaggcagcgcuggcgggg

SEQ ID NO: 1254410 - RNA, 26 nt, Human
ggccgcgcggugcacgcccugcagcc

SEQ ID NO: 1254411 - RNA, 19 nt, Human
gggaagcgggggggggggc

SEQ ID NO: 1254412 - RNA, 18 nt, Human
gggaguguuggggguagc

SEQ ID NO: 1254413 - RNA, 19 nt, Human
gggcaggcugcugagcugg

SEQ ID NO: 1254414 - RNA, 18 nt, Human
gggcuggcucccggggag

SEQ ID NO: 1254415 - RNA, 19 nt, Human
ggggaagcggggggggggg

SEQ ID NO: 1254416 - RNA, 20 nt, Human
gggggagggccuggaggcgg

SEQ ID NO: 1254417 - RNA, 18 nt, Human
ggggguggcgcaggucac

SEQ ID NO: 1254418 - RNA, 19 nt, Human
gggguuggggcugcuggag

SEQ ID NO: 1254419 - RNA, 19 nt, Human
gggguuggggcugcuggag

SEQ ID NO: 1254420 - RNA, 18 nt, Human
ggguagcagggugggguu

SEQ ID NO: 1254421 - RNA, 23 nt, Human
gguggcgcaggucacgucggagc

SEQ ID NO: 1254422 - RNA, 18 nt, Human
gguggcggcagcggcuga

SEQ ID NO: 1254423 - RNA, 22 nt, Human
gugcaaagcagccacagggcag

SEQ ID NO: 1254424 - RNA, 21 nt, Human
gugcagaguggucccaggaaa

SEQ ID NO: 1254425 - RNA, 18 nt, Human
gugcggcggugccggggc

SEQ ID NO: 1254426 - RNA, 19 nt, Human
guggagcaggcuguucucc

SEQ ID NO: 1254427 - RNA, 19 nt, Human
guggagcaggcuguucucc

SEQ ID NO: 1254428 - RNA, 19 nt, Human
gugguggcggcagcggcug

SEQ ID NO: 1254429 - RNA, 23 nt, Human
uaacaccccaaaauaagcagcca

SEQ ID NO: 1254430 - RNA, 19 nt, Human
uagcugcgcuguccgcucg

SEQ ID NO: 1254431 - RNA, 22 nt, Human
uaggaagaagcucuguuugaug

SEQ ID NO: 1254432 - RNA, 23 nt, Human
uaggccuuuucugcccucucccg

SEQ ID NO: 1254433 - RNA, 20 nt, Human
ucagggaagggcuggggccu

SEQ ID NO: 1254434 - RNA, 20 nt, Human
ucagguagaaacagaaagaa

SEQ ID NO: 1254435 - RNA, 19 nt, Human
uccacaacaaaaguccagu

SEQ ID NO: 1254436 - RNA, 19 nt, Human
ucccagccaagugcccucc

SEQ ID NO: 1254437 - RNA, 21 nt, Human
ucccucucuuacaacaccgcc

SEQ ID NO: 1254438 - RNA, 20 nt, Human
ucccuuugccuuuuuccaca

SEQ ID NO: 1254439 - RNA, 20 nt, Human
uccugcugaugcucugcugu

SEQ ID NO: 1254440 - RNA, 18 nt, Human
ucgaagcaauagccagag

SEQ ID NO: 1254441 - RNA, 22 nt, Human
ucggaccuucucggccccccag

SEQ ID NO: 1254442 - RNA, 20 nt, Human
ucucguuuucggaucaggua

SEQ ID NO: 1254443 - RNA, 20 nt, Human
ucugcugucccucucccaug

SEQ ID NO: 1254444 - RNA, 24 nt, Human
ucugugagcagccgcaggcgguuc

SEQ ID NO: 1254445 - RNA, 22 nt, Human
ugagcccccugggcugccgcuc

SEQ ID NO: 1254446 - RNA, 22 nt, Human
ugcagcagcagccgguccaggc

SEQ ID NO: 1254447 - RNA, 22 nt, Human
ugcagccgguucccgugcagca

SEQ ID NO: 1254448 - RNA, 19 nt, Human
ugccacugccgugcaaagc

SEQ ID NO: 1254449 - RNA, 18 nt, Human
ugcgugugggugggugug

SEQ ID NO: 1254450 - RNA, 20 nt, Human
ugcucugcugucccucuccc

SEQ ID NO: 1254451 - RNA, 21 nt, Human
ugcugguuccauuuucggacc

SEQ ID NO: 1254452 - RNA, 19 nt, Human
uggaaaggcagcagaggcc

SEQ ID NO: 1254453 - RNA, 19 nt, Human
uggaaggaggggcacaggg

SEQ ID NO: 1254454 - RNA, 19 nt, Human
uggaggaagagguggcuca

SEQ ID NO: 1254455 - RNA, 20 nt, Human
uggggcugcuggagccucag

SEQ ID NO: 1254456 - RNA, 21 nt, Human
uggggcuggcucccggggagc

SEQ ID NO: 1254457 - RNA, 18 nt, Human
uggggguagcaggguggg

SEQ ID NO: 1254458 - RNA, 18 nt, Human
ugucuguggucuugggga

SEQ ID NO: 1254459 - RNA, 18 nt, Human
uguugggcaaagcucuca

SEQ ID NO: 1254460 - RNA, 22 nt, Human
uuccucggcucucgggugcccc

SEQ ID NO: 1254461 - RNA, 21 nt, Human
uugacccaggucuugacucgg

SEQ ID NO: 1254462 - RNA, 19 nt, Human
uugagccgcaggaacucga

SEQ ID NO: 1254463 - RNA, 23 nt, Human
uugccgagcugccuccggagcgc

SEQ ID NO: 1254464 - RNA, 20 nt, Human
uugccggggucucugcacuc

SEQ ID NO: 1254465 - RNA, 21 nt, Human
uuggggaagcggggggggggg

SEQ ID NO: 1254466 - RNA, 25 nt, Human
uuggggguagcagggugggguuugg

SEQ ID NO: 1254467 - RNA, 20 nt, Human
uuucaugaucaugcgugugg

SEQ ID NO: 1254468 - RNA, 22 nt, Human
uuucaugaucaugcgugugggu

SEQ ID NO: 1254469 - RNA, 22 nt, Human
uuuucugaaagucccucucuua

SEQ ID NO: 1254470 - RNA, 22 nt, Human
uuuuuccacaacaaaaguccag

SEQ ID NO: 1254471 - RNA, 18 nt, Human
acuuuuucuuguuuuuga

SEQ ID NO: 1254472 - RNA, 21 nt, Human
cacuuuuucuuguuuuugaga

SEQ ID NO: 1254473 - RNA, 19 nt, Human
cauagaaaauggugacugc

SEQ ID NO: 1254474 - RNA, 20 nt, Human
ccccuggauaauggaguggg

SEQ ID NO: 1254475 - RNA, 23 nt, Human
uaagagagaaccccauagaaaau

SEQ ID NO: 1254476 - RNA, 21 nt, Human
aaaaaugcagauucccugagc

SEQ ID NO: 1254477 - RNA, 24 nt, Human
aaacugucucaccccuaucucccu

SEQ ID NO: 1254478 - RNA, 19 nt, Human
aaaguaccagaaaacacag

SEQ ID NO: 1254479 - RNA, 22 nt, Human
aaauaaaccucuaacaugacug

SEQ ID NO: 1254480 - RNA, 19 nt, Human
aacugcuuccucuacccua

SEQ ID NO: 1254481 - RNA, 20 nt, Human
aaguaccagaaaacacagau

SEQ ID NO: 1254482 - RNA, 18 nt, Human
aagucaagcugggaacug

SEQ ID NO: 1254483 - RNA, 19 nt, Human
aauagcuacaaagauaaaa

SEQ ID NO: 1254484 - RNA, 18 nt, Human
acugcacuccaggcuggg

SEQ ID NO: 1254485 - RNA, 25 nt, Human
acuuuuuuccuuuaaauauuaaagu

SEQ ID NO: 1254486 - RNA, 21 nt, Human
agaaagaauucagcuguaguc

SEQ ID NO: 1254487 - RNA, 22 nt, Human
agagaacaacccccuuugacug

SEQ ID NO: 1254488 - RNA, 21 nt, Human
agagaucuccuuuuguaaaaa

SEQ ID NO: 1254489 - RNA, 20 nt, Human
agcaaagacugagcagacuc

SEQ ID NO: 1254490 - RNA, 18 nt, Human
aggagugugauauccuug

SEQ ID NO: 1254491 - RNA, 24 nt, Human
aggaucaccugggcucaggaguuu

SEQ ID NO: 1254492 - RNA, 21 nt, Human
aggcaaaaugggaagaccuga

SEQ ID NO: 1254493 - RNA, 18 nt, Human
aggcaggaggaucaccug

SEQ ID NO: 1254494 - RNA, 18 nt, Human
aggcaggaggaucaccug

SEQ ID NO: 1254495 - RNA, 21 nt, Human
aggcaggaggaucaccugggc

SEQ ID NO: 1254496 - RNA, 24 nt, Human
aggcugaggcaggaggaucaccug

SEQ ID NO: 1254497 - RNA, 24 nt, Human
aguuugaggcugcagugagcugag

SEQ ID NO: 1254498 - RNA, 21 nt, Human
auacccacuuuuuuccuuuaa

SEQ ID NO: 1254499 - RNA, 22 nt, Human
auagcuacaaagauaaaaaagc

SEQ ID NO: 1254500 - RNA, 24 nt, Human
aucacaccacugcacuccaggcug

SEQ ID NO: 1254501 - RNA, 23 nt, Human
augauucucagaagcuccccauu

SEQ ID NO: 1254502 - RNA, 23 nt, Human
caaaaugggaagaccugagauca

SEQ ID NO: 1254503 - RNA, 22 nt, Human
caacuaaaucacuagagacuuu

SEQ ID NO: 1254504 - RNA, 20 nt, Human
caccucagacacagaagcac

SEQ ID NO: 1254505 - RNA, 19 nt, Human
cacugcacuccaggcuggg

SEQ ID NO: 1254506 - RNA, 22 nt, Human
cacugcacuccaggcuggguaa

SEQ ID NO: 1254507 - RNA, 23 nt, Human
cacugcacuccaggcuggguaac

SEQ ID NO: 1254508 - RNA, 24 nt, Human
cacugcacuccaggcuggguaaca

SEQ ID NO: 1254509 - RNA, 20 nt, Human
cacuggaggugaggcaaaau

SEQ ID NO: 1254510 - RNA, 21 nt, Human
cagacacagaagcaccucuga

SEQ ID NO: 1254511 - RNA, 19 nt, Human
cagauucccuaagccaaag

SEQ ID NO: 1254512 - RNA, 19 nt, Human
cagcaaagacugagcagac

SEQ ID NO: 1254513 - RNA, 24 nt, Human
cagcuacuugggaggcugaggcag

SEQ ID NO: 1254514 - RNA, 23 nt, Human
cagcuguagucccagcuacuugg

SEQ ID NO: 1254515 - RNA, 24 nt, Human
cagcuguagucccagcuacuuggg

SEQ ID NO: 1254516 - RNA, 21 nt, Human
caggaagagaagaccaacuaa

SEQ ID NO: 1254517 - RNA, 21 nt, Human
cauaucuaacugcuuccucua

SEQ ID NO: 1254518 - RNA, 20 nt, Human
ccacugcacuccaggcuggg

SEQ ID NO: 1254519 - RNA, 20 nt, Human
ccacugcacuccaggcuggg

SEQ ID NO: 1254520 - RNA, 21 nt, Human
ccacugcacuccaggcugggu

SEQ ID NO: 1254521 - RNA, 24 nt, Human
ccacugcacuccaggcuggguaac

SEQ ID NO: 1254522 - RNA, 24 nt, Human
ccaguggagaauucaaaugggauc

SEQ ID NO: 1254523 - RNA, 20 nt, Human
ccauuggagcaccuugugac

SEQ ID NO: 1254524 - RNA, 21 nt, Human
cccaagaucuuuccccuaaaa

SEQ ID NO: 1254525 - RNA, 18 nt, Human
cccacuuuguaccaggaa

SEQ ID NO: 1254526 - RNA, 22 nt, Human
cccauuggagcaccuugugacc

SEQ ID NO: 1254527 - RNA, 20 nt, Human
ccccgccccuggcugccaga

SEQ ID NO: 1254528 - RNA, 22 nt, Human
ccccuaaaauuguucuguuaaa

SEQ ID NO: 1254529 - RNA, 18 nt, Human
ccccuggcugccagagaa

SEQ ID NO: 1254530 - RNA, 20 nt, Human
cccucuuucccuuaauaccc

SEQ ID NO: 1254531 - RNA, 24 nt, Human
ccugugcucauccuuaaccuuggc

SEQ ID NO: 1254532 - RNA, 24 nt, Human
ccuuaaccuuggcaaauaaaccuc

SEQ ID NO: 1254533 - RNA, 21 nt, Human
ccuuuuuuuucccucuuuccc

SEQ ID NO: 1254534 - RNA, 26 nt, Human
cgccccuggcugccagagaacaaccc

SEQ ID NO: 1254535 - RNA, 21 nt, Human
cuaacugcuuccucuacccua

SEQ ID NO: 1254536 - RNA, 23 nt, Human
cuaagucauuccuccacucaccu

SEQ ID NO: 1254537 - RNA, 25 nt, Human
cucauccuuaaccuuggcaaauaaa

SEQ ID NO: 1254538 - RNA, 19 nt, Human
cugcagugagcugagauca

SEQ ID NO: 1254539 - RNA, 20 nt, Human
cugcagugagcugagaucac

SEQ ID NO: 1254540 - RNA, 23 nt, Human
cuggaggugaggcaaaaugggaa

SEQ ID NO: 1254541 - RNA, 21 nt, Human
cuuguaggcccccaagaucuu

SEQ ID NO: 1254542 - RNA, 23 nt, Human
gaaaguuuauccauuuauaagaa

SEQ ID NO: 1254543 - RNA, 21 nt, Human
gaccuuauccuuguuuuacag

SEQ ID NO: 1254544 - RNA, 18 nt, Human
gaggcugcagugagcuga

SEQ ID NO: 1254545 - RNA, 23 nt, Human
gaggcugcagugagcugagauca

SEQ ID NO: 1254546 - RNA, 24 nt, Human
gaucaccugggcucaggaguuuga

SEQ ID NO: 1254547 - RNA, 19 nt, Human
gaugggguucagaaaaugu

SEQ ID NO: 1254548 - RNA, 22 nt, Human
gauugaacagucugcaaaugaa

SEQ ID NO: 1254549 - RNA, 23 nt, Human
gcaaagacugagcagacucaaag

SEQ ID NO: 1254550 - RNA, 24 nt, Human
gcucaggaguuugaggcugcagug

SEQ ID NO: 1254551 - RNA, 20 nt, Human
gcugagaucacaccacugca

SEQ ID NO: 1254552 - RNA, 21 nt, Human
gcuguagucccagcuacuugg

SEQ ID NO: 1254553 - RNA, 23 nt, Human
ggagcaccuugugacccccgccc

SEQ ID NO: 1254554 - RNA, 22 nt, Human
ggaggaucaccugggcucagga

SEQ ID NO: 1254555 - RNA, 22 nt, Human
ggaucaccugggcucaggaguu

SEQ ID NO: 1254556 - RNA, 18 nt, Human
gggaagguauucuguucu

SEQ ID NO: 1254557 - RNA, 23 nt, Human
ggggcagaggacagaacuaaguc

SEQ ID NO: 1254558 - RNA, 19 nt, Human
guaccaggaagagaagacc

SEQ ID NO: 1254559 - RNA, 23 nt, Human
guauaugcacccccaauucaccu

SEQ ID NO: 1254560 - RNA, 22 nt, Human
uaagaaaaauuuacaucuauaa

SEQ ID NO: 1254561 - RNA, 19 nt, Human
uaagagagcacuggaggug

SEQ ID NO: 1254562 - RNA, 19 nt, Human
uacaagggucauaaggaca

SEQ ID NO: 1254563 - RNA, 19 nt, Human
uaccccagauucccuaagc

SEQ ID NO: 1254564 - RNA, 21 nt, Human
uaccccagauucccuaagcca

SEQ ID NO: 1254565 - RNA, 19 nt, Human
uauuccucuacucucuuuc

SEQ ID NO: 1254566 - RNA, 23 nt, Human
ucacaccacugcacuccaggcug

SEQ ID NO: 1254567 - RNA, 23 nt, Human
ucaccugggcucaggaguuugag

SEQ ID NO: 1254568 - RNA, 21 nt, Human
ucagaagcuccccauuggagc

SEQ ID NO: 1254569 - RNA, 25 nt, Human
ucagcaaagacugagcagacucaaa

SEQ ID NO: 1254570 - RNA, 19 nt, Human
ucaggaguuugaggcugca

SEQ ID NO: 1254571 - RNA, 19 nt, Human
ucauuccaucaaccuuugu

SEQ ID NO: 1254572 - RNA, 20 nt, Human
uccacauaugacuguaagag

SEQ ID NO: 1254573 - RNA, 21 nt, Human
uccuccacucaccugagacaa

SEQ ID NO: 1254574 - RNA, 18 nt, Human
uccuuuuuuuucccucuu

SEQ ID NO: 1254575 - RNA, 22 nt, Human
ucuccuggacaaugauucucag

SEQ ID NO: 1254576 - RNA, 18 nt, Human
ucugacaauguaaauuga

SEQ ID NO: 1254577 - RNA, 22 nt, Human
ucugcauaacagaccuuauccu

SEQ ID NO: 1254578 - RNA, 23 nt, Human
ucuucuguugcaggaguccugau

SEQ ID NO: 1254579 - RNA, 21 nt, Human
ugaauagucacuuuacaaggg

SEQ ID NO: 1254580 - RNA, 19 nt, Human
ugacugagacucgcugcag

SEQ ID NO: 1254581 - RNA, 18 nt, Human
ugagaucacaccacugca

SEQ ID NO: 1254582 - RNA, 24 nt, Human
ugagaucacaccacugcacuccag

SEQ ID NO: 1254583 - RNA, 20 nt, Human
ugaggcaggaggaucaccug

SEQ ID NO: 1254584 - RNA, 23 nt, Human
ugaggcaggaggaucaccugggc

SEQ ID NO: 1254585 - RNA, 25 nt, Human
ugaggcaggaggaucaccugggcuc

SEQ ID NO: 1254586 - RNA, 27 nt, Human
ugaggcaggaggaucaccugggcucca

SEQ ID NO: 1254587 - RNA, 20 nt, Human
uggaagaaagaauucagcug

SEQ ID NO: 1254588 - RNA, 22 nt, Human
uggagcaccuugugacccccgc

SEQ ID NO: 1254589 - RNA, 20 nt, Human
ugggaggcugaggcaggagg

SEQ ID NO: 1254590 - RNA, 24 nt, Human
ugggaggcugaggcaggaggauca

SEQ ID NO: 1254591 - RNA, 19 nt, Human
ugggagggggaaaacaaug

SEQ ID NO: 1254592 - RNA, 29 nt, Human
ugggagggggaaaacaaugauugaacagu

SEQ ID NO: 1254593 - RNA, 24 nt, Human
ugggauccuugguccuugauucuu

SEQ ID NO: 1254594 - RNA, 22 nt, Human
ugugaaaggaaaauaaaucuca

SEQ ID NO: 1254595 - RNA, 23 nt, Human
ugugauauccuugcugggaaggu

SEQ ID NO: 1254596 - RNA, 21 nt, Human
uguggauucagcaaagacuga

SEQ ID NO: 1254597 - RNA, 24 nt, Human
uucaccucuauggcaccucagaca

SEQ ID NO: 1254598 - RNA, 26 nt, Human
uucagcaaagacugagcagacucaaa

SEQ ID NO: 1254599 - RNA, 21 nt, Human
uucagcuguagucccagcuac

SEQ ID NO: 1254600 - RNA, 25 nt, Human
uucugaauagucacuuuacaagggu

SEQ ID NO: 1254601 - RNA, 25 nt, Human
uugggaggcugaggcaggaggauca

SEQ ID NO: 1254602 - RNA, 22 nt, Human
uugguccuugauucuucuugga

SEQ ID NO: 1254603 - RNA, 23 nt, Human
uuuaaauauuaaaguaccagaaa

SEQ ID NO: 1254604 - RNA, 23 nt, Human
uuucccucuuucccuuaauaccc

SEQ ID NO: 1254605 - RNA, 21 nt, Human
uuugguggucuuuucacgugg

SEQ ID NO: 1254606 - RNA, 18 nt, Human
uuuuuuuucccucuuucc

SEQ ID NO: 1254607 - RNA, 21 nt, Human
uuagaacugcaaucuccucuc

SEQ ID NO: 1254608 - RNA, 24 nt, Human
accaacgccacacacccuugccua

SEQ ID NO: 1254609 - RNA, 26 nt, Human
acccugcccaucucugcccacagagc

SEQ ID NO: 1254610 - RNA, 23 nt, Human
acgccacacacccuugccuaagc

SEQ ID NO: 1254611 - RNA, 22 nt, Human
agccccuggcucuggugccucc

SEQ ID NO: 1254612 - RNA, 22 nt, Human
cacacacccuugccuaagcccc

SEQ ID NO: 1254613 - RNA, 21 nt, Human
ccaacgccacacacccuugcc

SEQ ID NO: 1254614 - RNA, 18 nt, Human
cccacagagccagucacc

SEQ ID NO: 1254615 - RNA, 22 nt, Human
cccugcccaucucugcccacag

SEQ ID NO: 1254616 - RNA, 19 nt, Human
ccggcugccuuaguguugc

SEQ ID NO: 1254617 - RNA, 25 nt, Human
ccgggccguggcugcugagcugggc

SEQ ID NO: 1254618 - RNA, 18 nt, Human
ccuaagccccuggcucug

SEQ ID NO: 1254619 - RNA, 21 nt, Human
ccuugccuaagccccuggcuc

SEQ ID NO: 1254620 - RNA, 18 nt, Human
cuaagccccuggcucugg

SEQ ID NO: 1254621 - RNA, 24 nt, Human
cugggcacccugcccaucucugcc

SEQ ID NO: 1254622 - RNA, 20 nt, Human
gccguggcugcugagcuggg

SEQ ID NO: 1254623 - RNA, 21 nt, Human
uaaaaccaacgccacacaccc

SEQ ID NO: 1254624 - RNA, 20 nt, Human
uaagccccuggcucuggugc

SEQ ID NO: 1254625 - RNA, 25 nt, Human
uaagccccuggcucuggugccucca

SEQ ID NO: 1254626 - RNA, 21 nt, Human
ucuugacaccaccaauggcug

SEQ ID NO: 1254627 - RNA, 25 nt, Human
ugcaguuaaaaccaacgccacacac

SEQ ID NO: 1254628 - RNA, 18 nt, Human
ugccuaagccccuggcuc

SEQ ID NO: 1254629 - RNA, 22 nt, Human
uggcugcugagcugggcacccu

SEQ ID NO: 1254630 - RNA, 20 nt, Human
aaaaaggaauacagagaaaa

SEQ ID NO: 1254631 - RNA, 18 nt, Human
aaaagaacagaagagcaa

SEQ ID NO: 1254632 - RNA, 19 nt, Human
aaaaugcugggauuauagg

SEQ ID NO: 1254633 - RNA, 23 nt, Human
aaaaugcugggauuauaggugua

SEQ ID NO: 1254634 - RNA, 21 nt, Human
aaagaaaagacacauugaaaa

SEQ ID NO: 1254635 - RNA, 24 nt, Human
aaagaaaagacacauugaaaauga

SEQ ID NO: 1254636 - RNA, 24 nt, Human
aaagaucaugaagaagaaaaauaa

SEQ ID NO: 1254637 - RNA, 21 nt, Human
aaauaaagauggaauuuuuug

SEQ ID NO: 1254638 - RNA, 26 nt, Human
aaaugcugggauuauagguguaaacc

SEQ ID NO: 1254639 - RNA, 24 nt, Human
aacaacuugaaaucuacaauuuga

SEQ ID NO: 1254640 - RNA, 22 nt, Human
aaccaggagccagggaugaccc

SEQ ID NO: 1254641 - RNA, 23 nt, Human
aaccaggagccagggaugaccca

SEQ ID NO: 1254642 - RNA, 18 nt, Human
aagaaaagacacauugaa

SEQ ID NO: 1254643 - RNA, 20 nt, Human
aagaaaagacacauugaaaa

SEQ ID NO: 1254644 - RNA, 18 nt, Human
aagaaaggcagacuucaa

SEQ ID NO: 1254645 - RNA, 23 nt, Human
aagagaaaagaucaugaagaaga

SEQ ID NO: 1254646 - RNA, 22 nt, Human
aagcaagaggaaguggcuauga

SEQ ID NO: 1254647 - RNA, 19 nt, Human
aaggacaaaaaggaauaca

SEQ ID NO: 1254648 - RNA, 24 nt, Human
aaguagcugggauuacaggugugu

SEQ ID NO: 1254649 - RNA, 25 nt, Human
aaguagcugggauuacaggugugua

SEQ ID NO: 1254650 - RNA, 23 nt, Human
aauaacaauagagaauaaaagga

SEQ ID NO: 1254651 - RNA, 21 nt, Human
aauagcuaaaauugaagaagu

SEQ ID NO: 1254652 - RNA, 22 nt, Human
aaugcuccucucugggccaguu

SEQ ID NO: 1254653 - RNA, 21 nt, Human
aauucucgugccucagccucc

SEQ ID NO: 1254654 - RNA, 21 nt, Human
acacugcaccaagacgagaca

SEQ ID NO: 1254655 - RNA, 23 nt, Human
acaggauagagaaggucaaccac

SEQ ID NO: 1254656 - RNA, 20 nt, Human
acaucguuguuuaccagccc

SEQ ID NO: 1254657 - RNA, 21 nt, Human
acccuccuuaauguaagaaac

SEQ ID NO: 1254658 - RNA, 25 nt, Human
accuaccacaccauaaacuauaaac

SEQ ID NO: 1254659 - RNA, 23 nt, Human
accucagcuucccaaaaugcugg

SEQ ID NO: 1254660 - RNA, 24 nt, Human
acugaaggaccuaccacaccauaa

SEQ ID NO: 1254661 - RNA, 24 nt, Human
acugcaccaagacgagacaaagua

SEQ ID NO: 1254662 - RNA, 22 nt, Human
acuuuuuguauuuuuaguagag

SEQ ID NO: 1254663 - RNA, 20 nt, Human
agaaaagaucaugaagaaga

SEQ ID NO: 1254664 - RNA, 20 nt, Human
agaacagaagagcaaggaug

SEQ ID NO: 1254665 - RNA, 21 nt, Human
agaagaaaaauaaaacucaaa

SEQ ID NO: 1254666 - RNA, 20 nt, Human
agaagauuuucccaugaagg

SEQ ID NO: 1254667 - RNA, 18 nt, Human
agagaacaccauggagac

SEQ ID NO: 1254668 - RNA, 21 nt, Human
agaggaacaaagaaguucugg

SEQ ID NO: 1254669 - RNA, 21 nt, Human
agaggggcagagaggaacaaa

SEQ ID NO: 1254670 - RNA, 18 nt, Human
agauauacaguccagugu

SEQ ID NO: 1254671 - RNA, 19 nt, Human
agcaaaagaaccaggaagg

SEQ ID NO: 1254672 - RNA, 24 nt, Human
agccucaagugauucgcccaccuc

SEQ ID NO: 1254673 - RNA, 23 nt, Human
agccugcauguggagcuucuguu

SEQ ID NO: 1254674 - RNA, 24 nt, Human
agcuggucucaaacuccuagccuc

SEQ ID NO: 1254675 - RNA, 19 nt, Human
aggaacaaagaaguucugg

SEQ ID NO: 1254676 - RNA, 22 nt, Human
aggcaauagagccaccuaagca

SEQ ID NO: 1254677 - RNA, 21 nt, Human
agguguaaaccaccaugccca

SEQ ID NO: 1254678 - RNA, 19 nt, Human
aguauaaaauccuauaacc

SEQ ID NO: 1254679 - RNA, 19 nt, Human
agucaacaugaacuaaacu

SEQ ID NO: 1254680 - RNA, 24 nt, Human
agugauucgcccaccucagcuucc

SEQ ID NO: 1254681 - RNA, 18 nt, Human
agugcaguggugugaucc

SEQ ID NO: 1254682 - RNA, 20 nt, Human
agugcaguggugugaucccg

SEQ ID NO: 1254683 - RNA, 23 nt, Human
agugcaguggugugaucccggcu

SEQ ID NO: 1254684 - RNA, 24 nt, Human
agugcaguggugugaucccggcuc

SEQ ID NO: 1254685 - RNA, 24 nt, Human
auaagacaaagaaaggcagacuuc

SEQ ID NO: 1254686 - RNA, 22 nt, Human
augaagaagaaaaauaaaacuc

SEQ ID NO: 1254687 - RNA, 18 nt, Human
augggguuucgccauguu

SEQ ID NO: 1254688 - RNA, 25 nt, Human
augggguuucgccauguuggccaag

SEQ ID NO: 1254689 - RNA, 23 nt, Human
auuacaaaccucugaaaauucag

SEQ ID NO: 1254690 - RNA, 21 nt, Human
auuacagguguguaccaccau

SEQ ID NO: 1254691 - RNA, 19 nt, Human
auuugggagauguaauaug

SEQ ID NO: 1254692 - RNA, 24 nt, Human
caaaaugcugggauuauaggugua

SEQ ID NO: 1254693 - RNA, 22 nt, Human
caaagaaaggcagacuucaaac

SEQ ID NO: 1254694 - RNA, 20 nt, Human
caacagaggccaauggggga

SEQ ID NO: 1254695 - RNA, 23 nt, Human
caaccuccaccucccagguucaa

SEQ ID NO: 1254696 - RNA, 27 nt, Human
caagcaauucucgugccucagccuccc

SEQ ID NO: 1254697 - RNA, 22 nt, Human
cacaccauaaacuauaaacaga

SEQ ID NO: 1254698 - RNA, 24 nt, Human
cacaccauaaacuauaaacagaag

SEQ ID NO: 1254699 - RNA, 21 nt, Human
cacaucguuguuuaccagccc

SEQ ID NO: 1254700 - RNA, 25 nt, Human
caccauggagaccaagggaaacccu

SEQ ID NO: 1254701 - RNA, 22 nt, Human
cacugcaccaagacgagacaaa

SEQ ID NO: 1254702 - RNA, 24 nt, Human
cacugcaccaagacgagacaaagu

SEQ ID NO: 1254703 - RNA, 19 nt, Human
caggaagaagaggcauuuc

SEQ ID NO: 1254704 - RNA, 19 nt, Human
caucuuuaacauuuuuaag

SEQ ID NO: 1254705 - RNA, 23 nt, Human
caugaagaagaaaaauaaaacuc

SEQ ID NO: 1254706 - RNA, 24 nt, Human
cauguuggccaagcuggucucaaa

SEQ ID NO: 1254707 - RNA, 21 nt, Human
cauugcaaccuccaccuccca

SEQ ID NO: 1254708 - RNA, 20 nt, Human
ccaaaaugcugggauuauag

SEQ ID NO: 1254709 - RNA, 21 nt, Human
ccaaaaugcugggauuauagg

SEQ ID NO: 1254710 - RNA, 24 nt, Human
ccaaaaugcugggauuauaggugu

SEQ ID NO: 1254711 - RNA, 24 nt, Human
ccaaagggagcaaaaaacaugaca

SEQ ID NO: 1254712 - RNA, 21 nt, Human
ccaaguagcugggauuacagg

SEQ ID NO: 1254713 - RNA, 24 nt, Human
ccaaguagcugggauuacaggugu

SEQ ID NO: 1254714 - RNA, 26 nt, Human
ccaccucccagguucaagcaauucuu

SEQ ID NO: 1254715 - RNA, 22 nt, Human
ccauaaacuauaaacagaagau

SEQ ID NO: 1254716 - RNA, 22 nt, Human
ccauguuggccaagcuggucuc

SEQ ID NO: 1254717 - RNA, 23 nt, Human
cccaaguagcugggauuacaggu

SEQ ID NO: 1254718 - RNA, 24 nt, Human
cccaaguagcugggauuacaggug

SEQ ID NO: 1254719 - RNA, 23 nt, Human
cccaauuacuuuuuguauuuuua

SEQ ID NO: 1254720 - RNA, 19 nt, Human
cccaggcuggagugcagug

SEQ ID NO: 1254721 - RNA, 20 nt, Human
cccagguucaagcaauucuc

SEQ ID NO: 1254722 - RNA, 19 nt, Human
ccccacuuaaacaugaacc

SEQ ID NO: 1254723 - RNA, 22 nt, Human
ccccuuucuagauauacagucc

SEQ ID NO: 1254724 - RNA, 24 nt, Human
ccuagccucaagugauucgcccac

SEQ ID NO: 1254725 - RNA, 22 nt, Human
ccucccagguucaagcaauucu

SEQ ID NO: 1254726 - RNA, 19 nt, Human
ccuggacccucauaugaag

SEQ ID NO: 1254727 - RNA, 24 nt, Human
cgccauguuggccaagcuggucuc

SEQ ID NO: 1254728 - RNA, 27 nt, Human
cgccauguuggccaagcuggucucaaa

SEQ ID NO: 1254729 - RNA, 24 nt, Human
cgcucugucgcccaggcuggagug

SEQ ID NO: 1254730 - RNA, 22 nt, Human
cuaaauaacaauagagaauaaa

SEQ ID NO: 1254731 - RNA, 24 nt, Human
cuaagcaacacuuacaccuccacu

SEQ ID NO: 1254732 - RNA, 26 nt, Human
cuaccacaccauaaacuauaaacaga

SEQ ID NO: 1254733 - RNA, 23 nt, Human
cucaagugauucgcccaccucag

SEQ ID NO: 1254734 - RNA, 24 nt, Human
cucaagugauucgcccaccucagc

SEQ ID NO: 1254735 - RNA, 24 nt, Human
cucagccucccaaguagcugggau

SEQ ID NO: 1254736 - RNA, 19 nt, Human
cucauugcaaccuccaccu

SEQ ID NO: 1254737 - RNA, 24 nt, Human
cucauugcaaccuccaccucccag

SEQ ID NO: 1254738 - RNA, 19 nt, Human
cuccuagccucaagugauu

SEQ ID NO: 1254739 - RNA, 25 nt, Human
cuccucuaucucaucuuuuucacac

SEQ ID NO: 1254740 - RNA, 20 nt, Human
cuccucucuucuaaaggagc

SEQ ID NO: 1254741 - RNA, 19 nt, Human
cuccuuaauguaagaaacg

SEQ ID NO: 1254742 - RNA, 24 nt, Human
cuccuuaauguaagaaacgaaagc

SEQ ID NO: 1254743 - RNA, 24 nt, Human
cucgcucugucgcccaggcuggag

SEQ ID NO: 1254744 - RNA, 25 nt, Human
cucgugccucagccucccaaguagc

SEQ ID NO: 1254745 - RNA, 23 nt, Human
cucugucgcccaggcuggagugc

SEQ ID NO: 1254746 - RNA, 23 nt, Human
cugaaguccuauucuggauagca

SEQ ID NO: 1254747 - RNA, 18 nt, Human
cuggcuccaaggccucgg

SEQ ID NO: 1254748 - RNA, 21 nt, Human
cugggauuauagguguaaacc

SEQ ID NO: 1254749 - RNA, 21 nt, Human
cuuaaacaugaaccuggaccc

SEQ ID NO: 1254750 - RNA, 24 nt, Human
cuuuuuguauuuuuaguagagaug

SEQ ID NO: 1254751 - RNA, 20 nt, Human
gaaauaccgaauuugaacaa

SEQ ID NO: 1254752 - RNA, 21 nt, Human
gaaccaugcugcuacauuaga

SEQ ID NO: 1254753 - RNA, 18 nt, Human
gagaagaauuaaaauaga

SEQ ID NO: 1254754 - RNA, 18 nt, Human
gagaauaaaaggacagcc

SEQ ID NO: 1254755 - RNA, 20 nt, Human
gagaugggguuucgccaugu

SEQ ID NO: 1254756 - RNA, 24 nt, Human
gagaugggguuucgccauguuggc

SEQ ID NO: 1254757 - RNA, 20 nt, Human
gauggucuuuucccaaguga

SEQ ID NO: 1254758 - RNA, 22 nt, Human
gauuacagguguguaccaccau

SEQ ID NO: 1254759 - RNA, 24 nt, Human
gauuauagguguaaaccaccaugc

SEQ ID NO: 1254760 - RNA, 21 nt, Human
gcaaaaaacaugacaaggcca

SEQ ID NO: 1254761 - RNA, 24 nt, Human
gcaaauaaaaaggaaguaucuaaa

SEQ ID NO: 1254762 - RNA, 20 nt, Human
gcaacagaggccaauggggg

SEQ ID NO: 1254763 - RNA, 24 nt, Human
gcaugccaagaacagaggggcaga

SEQ ID NO: 1254764 - RNA, 24 nt, Human
gcauuucagggggcaacagaggcc

SEQ ID NO: 1254765 - RNA, 20 nt, Human
gcccaggcuggagugcagug

SEQ ID NO: 1254766 - RNA, 23 nt, Human
gcccaggcuggagugcaguggug

SEQ ID NO: 1254767 - RNA, 24 nt, Human
gcccaggcuggagugcaguggugu

SEQ ID NO: 1254768 - RNA, 19 nt, Human
gcuccaaggccucggccca

SEQ ID NO: 1254769 - RNA, 25 nt, Human
gcuggagugcaguggugugaucccg

SEQ ID NO: 1254770 - RNA, 23 nt, Human
ggaaggacaaaaaggaauacaga

SEQ ID NO: 1254771 - RNA, 19 nt, Human
ggaauuuuuugaagcaaga

SEQ ID NO: 1254772 - RNA, 21 nt, Human
ggagaccaagggaaacccucc

SEQ ID NO: 1254773 - RNA, 22 nt, Human
ggagagacagcaaggcacacug

SEQ ID NO: 1254774 - RNA, 23 nt, Human
ggagagguuacauaugcuggauu

SEQ ID NO: 1254775 - RNA, 24 nt, Human
ggauuacagguguguaccaccaug

SEQ ID NO: 1254776 - RNA, 24 nt, Human
ggauuauagguguaaaccaccaug

SEQ ID NO: 1254777 - RNA, 22 nt, Human
ggcaacagaggccaauggggga

SEQ ID NO: 1254778 - RNA, 22 nt, Human
ggcuggagugcaguggugugau

SEQ ID NO: 1254779 - RNA, 18 nt, Human
gggguuucgccauguugg

SEQ ID NO: 1254780 - RNA, 22 nt, Human
gggguuucgccauguuggccaa

SEQ ID NO: 1254781 - RNA, 18 nt, Human
ggguuucgccauguuggc

SEQ ID NO: 1254782 - RNA, 22 nt, Human
ggguuucgccauguuggccaag

SEQ ID NO: 1254783 - RNA, 23 nt, Human
guagagaugggguuucgccaugu

SEQ ID NO: 1254784 - RNA, 18 nt, Human
guagcugggauuacaggu

SEQ ID NO: 1254785 - RNA, 19 nt, Human
guagggcaaaagaacagaa

SEQ ID NO: 1254786 - RNA, 22 nt, Human
guagggcaaaagaacagaagag

SEQ ID NO: 1254787 - RNA, 18 nt, Human
gucuuuucccaagugagu

SEQ ID NO: 1254788 - RNA, 21 nt, Human
gugaguagggcaaaagaacag

SEQ ID NO: 1254789 - RNA, 23 nt, Human
gugaguagggcaaaagaacagaa

SEQ ID NO: 1254790 - RNA, 24 nt, Human
gugauucgcccaccucagcuuccc

SEQ ID NO: 1254791 - RNA, 22 nt, Human
gugccucagccucccaaguagc

SEQ ID NO: 1254792 - RNA, 23 nt, Human
gugccucagccucccaaguagcu

SEQ ID NO: 1254793 - RNA, 22 nt, Human
uaaaauccuauaaccauucccc

SEQ ID NO: 1254794 - RNA, 20 nt, Human
uaaauaagacaaagaaaggc

SEQ ID NO: 1254795 - RNA, 21 nt, Human
uaaauaagacaaagaaaggcu

SEQ ID NO: 1254796 - RNA, 21 nt, Human
uaagcaacacuuacaccucca

SEQ ID NO: 1254797 - RNA, 23 nt, Human
uaaguacacuugcauuuguuuaa

SEQ ID NO: 1254798 - RNA, 24 nt, Human
uaaguacacuugcauuuguuuaag

SEQ ID NO: 1254799 - RNA, 18 nt, Human
uacacacugaugugguca

SEQ ID NO: 1254800 - RNA, 23 nt, Human
uaccacaccauaaacuauaaaca

SEQ ID NO: 1254801 - RNA, 25 nt, Human
uaccacaccauaaacuauaaacaga

SEQ ID NO: 1254802 - RNA, 24 nt, Human
uacuuuuuguauuuuuaguagaga

SEQ ID NO: 1254803 - RNA, 18 nt, Human
uagaagccuacaacuccc

SEQ ID NO: 1254804 - RNA, 25 nt, Human
uagaagccuacaacucccaugaaag

SEQ ID NO: 1254805 - RNA, 22 nt, Human
uagagaugggguuucgccaugu

SEQ ID NO: 1254806 - RNA, 19 nt, Human
uagcaauaaaguuucuuua

SEQ ID NO: 1254807 - RNA, 20 nt, Human
uagguguaaaccaccaugcc

SEQ ID NO: 1254808 - RNA, 24 nt, Human
uaguagagaugggguuucgccaug

SEQ ID NO: 1254809 - RNA, 22 nt, Human
uauaaccauuccccuuucuaga

SEQ ID NO: 1254810 - RNA, 25 nt, Human
uauagagccaaagggagcaaaaaac

SEQ ID NO: 1254811 - RNA, 22 nt, Human
uaucucaucuuuuucacacaaa

SEQ ID NO: 1254812 - RNA, 23 nt, Human
uaucucaucuuuuucacacaaag

SEQ ID NO: 1254813 - RNA, 26 nt, Human
uaugaagcagcagaggaaaagaauua

SEQ ID NO: 1254814 - RNA, 23 nt, Human
uaugcuggauucuggcaccaggg

SEQ ID NO: 1254815 - RNA, 20 nt, Human
ucaagaggcaggaaaauuca

SEQ ID NO: 1254816 - RNA, 26 nt, Human
ucagaaaaaauauuugacuuuuauca

SEQ ID NO: 1254817 - RNA, 22 nt, Human
ucagcaauagcuaaaauugaag

SEQ ID NO: 1254818 - RNA, 24 nt, Human
ucagcaucucuaaaaaaaauuguc

SEQ ID NO: 1254819 - RNA, 18 nt, Human
ucagccucccaaguagcu

SEQ ID NO: 1254820 - RNA, 20 nt, Human
ucagccucccaaguagcugg

SEQ ID NO: 1254821 - RNA, 20 nt, Human
ucagugucuaaaccugcaug

SEQ ID NO: 1254822 - RNA, 24 nt, Human
ucauugcaaccuccaccucccagg

SEQ ID NO: 1254823 - RNA, 25 nt, Human
ucauugcaaccuccaccucccaggu

SEQ ID NO: 1254824 - RNA, 23 nt, Human
ucccaaaaugcugggauuauagg

SEQ ID NO: 1254825 - RNA, 23 nt, Human
ucccaaguagcugggauuacagg

SEQ ID NO: 1254826 - RNA, 24 nt, Human
ucccaaguagcugggauuacaggu

SEQ ID NO: 1254827 - RNA, 21 nt, Human
ucccagguucaagcaauucuc

SEQ ID NO: 1254828 - RNA, 21 nt, Human
ucccagguucaagcaauucuc

SEQ ID NO: 1254829 - RNA, 20 nt, Human
uccuacccaucuccaggacc

SEQ ID NO: 1254830 - RNA, 23 nt, Human
uccuagaaaauaaauuuaaguac

SEQ ID NO: 1254831 - RNA, 21 nt, Human
uccuuacuuuaugaauuucua

SEQ ID NO: 1254832 - RNA, 22 nt, Human
ucgccauguuggccaagcuggu

SEQ ID NO: 1254833 - RNA, 24 nt, Human
ucgccauguuggccaagcuggucu

SEQ ID NO: 1254834 - RNA, 24 nt, Human
ucgcccaggcuggagugcaguggu

SEQ ID NO: 1254835 - RNA, 24 nt, Human
ucgcucugucgcccaggcuggagu

SEQ ID NO: 1254836 - RNA, 18 nt, Human
ucuaaaggagcagucaac

SEQ ID NO: 1254837 - RNA, 19 nt, Human
ucuacacuuaacacaaaau

SEQ ID NO: 1254838 - RNA, 19 nt, Human
ucucgcucugucgcccagg

SEQ ID NO: 1254839 - RNA, 22 nt, Human
ucucgcucugucgcccaggcug

SEQ ID NO: 1254840 - RNA, 23 nt, Human
ucucgcucugucgcccaggcugg

SEQ ID NO: 1254841 - RNA, 24 nt, Human
ucucgcucugucgcccaggcugga

SEQ ID NO: 1254842 - RNA, 26 nt, Human
ucucgcucugucgcccaggcuggagu

SEQ ID NO: 1254843 - RNA, 27 nt, Human
ucucgcucugucgcccaggcuggagug

SEQ ID NO: 1254844 - RNA, 24 nt, Human
ucugucgcccaggcuggagugcag

SEQ ID NO: 1254845 - RNA, 22 nt, Human
ucugugaguagggcaaaagaac

SEQ ID NO: 1254846 - RNA, 20 nt, Human
ucuuccuuguucacaccuga

SEQ ID NO: 1254847 - RNA, 22 nt, Human
ugaacagguuaaugcuccucuc

SEQ ID NO: 1254848 - RNA, 23 nt, Human
ugaagaagaaaaauaaaacucaa

SEQ ID NO: 1254849 - RNA, 18 nt, Human
ugacucaauccagagaac

SEQ ID NO: 1254850 - RNA, 21 nt, Human
ugacucaauccagagaacacc

SEQ ID NO: 1254851 - RNA, 20 nt, Human
ugagaagaauuaaaauagau

SEQ ID NO: 1254852 - RNA, 18 nt, Human
ugauguggucaauguaug

SEQ ID NO: 1254853 - RNA, 23 nt, Human
ugauucgcccaccucagcuuccc

SEQ ID NO: 1254854 - RNA, 24 nt, Human
ugccucagccucccaaguagcugg

SEQ ID NO: 1254855 - RNA, 23 nt, Human
ugcuccucucuucuaaaggagca

SEQ ID NO: 1254856 - RNA, 21 nt, Human
uggaauuuuuugaagcaagag

SEQ ID NO: 1254857 - RNA, 19 nt, Human
uggagaccaagggaaaccc

SEQ ID NO: 1254858 - RNA, 19 nt, Human
uggagugcaguggugugau

SEQ ID NO: 1254859 - RNA, 23 nt, Human
uggagugcaguggugugaucccg

SEQ ID NO: 1254860 - RNA, 24 nt, Human
uggagugcaguggugugaucccgg

SEQ ID NO: 1254861 - RNA, 19 nt, Human
uggauucuggcaccagggc

SEQ ID NO: 1254862 - RNA, 24 nt, Human
uggccaagcuggucucaaacuccu

SEQ ID NO: 1254863 - RNA, 19 nt, Human
uggcuaaagaaaagacaca

SEQ ID NO: 1254864 - RNA, 21 nt, Human
ugggauuacagguguguacca

SEQ ID NO: 1254865 - RNA, 22 nt, Human
ugggauuacagguguguaccac

SEQ ID NO: 1254866 - RNA, 24 nt, Human
ugggauuacagguguguaccacca

SEQ ID NO: 1254867 - RNA, 25 nt, Human
ugggauuacagguguguaccaccau

SEQ ID NO: 1254868 - RNA, 25 nt, Human
ugggauuacagguguguaccaccau

SEQ ID NO: 1254869 - RNA, 22 nt, Human
ugggauuauagguguaaaccac

SEQ ID NO: 1254870 - RNA, 24 nt, Human
ugggauuauagguguaaaccacca

SEQ ID NO: 1254871 - RNA, 25 nt, Human
ugggauuauagguguaaaccaccau

SEQ ID NO: 1254872 - RNA, 24 nt, Human
ugggguuucgccauguuggccaag

SEQ ID NO: 1254873 - RNA, 20 nt, Human
uggguuaacuuacugaguug

SEQ ID NO: 1254874 - RNA, 20 nt, Human
uggucaauguaugugggguu

SEQ ID NO: 1254875 - RNA, 21 nt, Human
uguuuugucuccuagaaaaua

SEQ ID NO: 1254876 - RNA, 20 nt, Human
uuaacuuacugaguugucuu

SEQ ID NO: 1254877 - RNA, 18 nt, Human
uuaguagagaugggguuu

SEQ ID NO: 1254878 - RNA, 22 nt, Human
uuaguagagaugggguuucgcc

SEQ ID NO: 1254879 - RNA, 24 nt, Human
uuaguagagaugggguuucgccau

SEQ ID NO: 1254880 - RNA, 20 nt, Human
uucccaaaccuagaagccua

SEQ ID NO: 1254881 - RNA, 21 nt, Human
uucgcccaccucagcuuccca

SEQ ID NO: 1254882 - RNA, 24 nt, Human
uucgcccaccucagcuucccaaaa

SEQ ID NO: 1254883 - RNA, 23 nt, Human
uucuggcuccaaggccucggccc

SEQ ID NO: 1254884 - RNA, 24 nt, Human
uucuggcuccaaggccucggccca

SEQ ID NO: 1254885 - RNA, 23 nt, Human
uugcaaccuccaccucccagguu

SEQ ID NO: 1254886 - RNA, 24 nt, Human
uugcaaccuccaccucccagguuc

SEQ ID NO: 1254887 - RNA, 23 nt, Human
uuguauuuuuaguagagaugggg

SEQ ID NO: 1254888 - RNA, 22 nt, Human
uuuccuacccaucuccaggacc

SEQ ID NO: 1254889 - RNA, 21 nt, Human
uuucgccauguuggccaagcu

SEQ ID NO: 1254890 - RNA, 22 nt, Human
uuuuuaguagagaugggguuuc

SEQ ID NO: 1254891 - RNA, 23 nt, Human
uuuuuaguagagaugggguuucg

SEQ ID NO: 1254892 - RNA, 21 nt, Human
uuuuuguauuuuuaguagaga

SEQ ID NO: 1254893 - RNA, 23 nt, Human
aacaggagcuggccucugucccc

SEQ ID NO: 1254894 - RNA, 19 nt, Human
acaaaagagagagaagaaa

SEQ ID NO: 1254895 - RNA, 25 nt, Human
acagaacaaguccuaaaucagacaa

SEQ ID NO: 1254896 - RNA, 18 nt, Human
acccccccgcccuuucuc

SEQ ID NO: 1254897 - RNA, 23 nt, Human
aggaaaagccauccuggcaaaga

SEQ ID NO: 1254898 - RNA, 24 nt, Human
aggaaaagccauccuggcaaagag

SEQ ID NO: 1254899 - RNA, 24 nt, Human
cagaacaaguccuaaaucagacaa

SEQ ID NO: 1254900 - RNA, 19 nt, Human
cagcugcaggaugcuccca

SEQ ID NO: 1254901 - RNA, 20 nt, Human
caggaaaagccauccuggca

SEQ ID NO: 1254902 - RNA, 21 nt, Human
caggaaaagccauccuggcaa

SEQ ID NO: 1254903 - RNA, 18 nt, Human
cccucucucuccuaauuu

SEQ ID NO: 1254904 - RNA, 20 nt, Human
cugucccagcugcaggaugc

SEQ ID NO: 1254905 - RNA, 22 nt, Human
gaacaaguccuaaaucagacaa

SEQ ID NO: 1254906 - RNA, 18 nt, Human
gagcuggccucuguccca

SEQ ID NO: 1254907 - RNA, 19 nt, Human
gcagcuuuuaucagcaggu

SEQ ID NO: 1254908 - RNA, 20 nt, Human
gcaggaugcucccaaggcag

SEQ ID NO: 1254909 - RNA, 20 nt, Human
gccucaggcaccgccuaccu

SEQ ID NO: 1254910 - RNA, 20 nt, Human
ggaagagauguccaugagaa

SEQ ID NO: 1254911 - RNA, 19 nt, Human
uccaugagaaaaccaacug

SEQ ID NO: 1254912 - RNA, 19 nt, Human
ucccucucucuccuaauuu

SEQ ID NO: 1254913 - RNA, 19 nt, Human
ucuccuaauuuacuuaguc

SEQ ID NO: 1254914 - RNA, 19 nt, Human
ugccucaggcaccgccuac

SEQ ID NO: 1254915 - RNA, 18 nt, Human
uggaaggcagcuuuuauc

SEQ ID NO: 1254916 - RNA, 20 nt, Human
ugggaugagccuacaaaagc

SEQ ID NO: 1254917 - RNA, 23 nt, Human
uuaaagaaaacacagaacaaguc

SEQ ID NO: 1254918 - RNA, 21 nt, Human
uuuaaagaaaacacagaacaa

SEQ ID NO: 1254919 - RNA, 24 nt, Human
uuuuuuaaagaaaacacagaacaa

SEQ ID NO: 1254920 - RNA, 19 nt, Human
uuuuuuuuuuuuaaagaaa

SEQ ID NO: 1254921 - RNA, 18 nt, Human
augcugccaggguaccuc

SEQ ID NO: 1254922 - RNA, 19 nt, Human
cucgaggcccuacuugucc

SEQ ID NO: 1254923 - RNA, 20 nt, Human
cuucugucacgcaccugucc

SEQ ID NO: 1254924 - RNA, 21 nt, Human
uaugcugccaggguaccucuu

SEQ ID NO: 1254925 - RNA, 22 nt, Human
uuaucauaauauuuaugcugcc

SEQ ID NO: 1254926 - RNA, 22 nt, Human
uuuaaguagcacaaacuccuua

SEQ ID NO: 1254927 - RNA, 21 nt, Human
aagagaccagaauauuuaaug

SEQ ID NO: 1254928 - RNA, 21 nt, Human
accccacaggacgcaucaugg

SEQ ID NO: 1254929 - RNA, 24 nt, Human
agccaccaaucuuuguucucugcc

SEQ ID NO: 1254930 - RNA, 18 nt, Human
aucauggaauauguagag

SEQ ID NO: 1254931 - RNA, 20 nt, Human
caccaaucuuuguucucugc

SEQ ID NO: 1254932 - RNA, 22 nt, Human
ccaccaaucuuuguucucugcc

SEQ ID NO: 1254933 - RNA, 25 nt, Human
ucaacagcuuuccucuggguuuucu

SEQ ID NO: 1254934 - RNA, 24 nt, Human
uuaaugagauauuacuguuugcau

SEQ ID NO: 1254935 - RNA, 25 nt, Human
uuccucuggguuuucuuguuugugg

SEQ ID NO: 1254936 - RNA, 27 nt, Human
uugcauaaccccacaggacgcaucaug

SEQ ID NO: 1254937 - RNA, 23 nt, Human
uuuccucuggguuuucuuguuug

SEQ ID NO: 1254938 - RNA, 22 nt, Human
aauuauccagccaugagcccug

SEQ ID NO: 1254939 - RNA, 22 nt, Human
acagagcugcucacagauacca

SEQ ID NO: 1254940 - RNA, 25 nt, Human
accaacuacccgcgaccucuaccac

SEQ ID NO: 1254941 - RNA, 21 nt, Human
agagcugcucacagauaccac

SEQ ID NO: 1254942 - RNA, 19 nt, Human
agcuucgaaaaggcuuagg

SEQ ID NO: 1254943 - RNA, 18 nt, Human
aggccccuuguccucugg

SEQ ID NO: 1254944 - RNA, 23 nt, Human
aggggcugggcaugguuggcuuu

SEQ ID NO: 1254945 - RNA, 22 nt, Human
cacccacuugcucuuucggcug

SEQ ID NO: 1254946 - RNA, 19 nt, Human
cccaccaacuacccgcgac

SEQ ID NO: 1254947 - RNA, 22 nt, Human
ccccuuguccucuggcagccca

SEQ ID NO: 1254948 - RNA, 21 nt, Human
ccuuuucguauuucauaauga

SEQ ID NO: 1254949 - RNA, 21 nt, Human
cgucagaauucagaacgaugg

SEQ ID NO: 1254950 - RNA, 18 nt, Human
cucacuuguacaaucccc

SEQ ID NO: 1254951 - RNA, 22 nt, Human
cuccgucucacuuguacaaucc

SEQ ID NO: 1254952 - RNA, 18 nt, Human
cucucagggagaaaaccu

SEQ ID NO: 1254953 - RNA, 22 nt, Human
gaaaaccuuugaguccacagag

SEQ ID NO: 1254954 - RNA, 24 nt, Human
gagcugcucacagauaccacugcc

SEQ ID NO: 1254955 - RNA, 20 nt, Human
ggagaaaaccuuugagucca

SEQ ID NO: 1254956 - RNA, 24 nt, Human
ggagaaaaccuuugaguccacaga

SEQ ID NO: 1254957 - RNA, 22 nt, Human
ggcugggggugcugggaggggc

SEQ ID NO: 1254958 - RNA, 19 nt, Human
ggggcugggggugcuggga

SEQ ID NO: 1254959 - RNA, 26 nt, Human
ggggugcugggaggggcugggcaugg

SEQ ID NO: 1254960 - RNA, 18 nt, Human
gugcugggaggggcuggg

SEQ ID NO: 1254961 - RNA, 22 nt, Human
gugcugggaggggcugggcaug

SEQ ID NO: 1254962 - RNA, 19 nt, Human
uaaaacgaggacgcgaagc

SEQ ID NO: 1254963 - RNA, 28 nt, Human
uaggccccuuguccucuggcagcccagg

SEQ ID NO: 1254964 - RNA, 24 nt, Human
uauccagccaugagcccuggccca

SEQ ID NO: 1254965 - RNA, 20 nt, Human
ucacagauaccacugccugu

SEQ ID NO: 1254966 - RNA, 18 nt, Human
ucgaaaaggcuuaggccc

SEQ ID NO: 1254967 - RNA, 23 nt, Human
ucucucgagcugcacucuuucuu

SEQ ID NO: 1254968 - RNA, 26 nt, Human
ugaaucagcuggccugggucggaucc

SEQ ID NO: 1254969 - RNA, 21 nt, Human
ugcuucgccucccgcgcaguc

SEQ ID NO: 1254970 - RNA, 23 nt, Human
uggcuuugugaucuggggucugg

SEQ ID NO: 1254971 - RNA, 18 nt, Human
ugggaggggcugggcaug

SEQ ID NO: 1254972 - RNA, 18 nt, Human
ugggaggggcugggcaug

SEQ ID NO: 1254973 - RNA, 20 nt, Human
ugggaggggcugggcauggu

SEQ ID NO: 1254974 - RNA, 18 nt, Human
uggggcugggggugcugg

SEQ ID NO: 1254975 - RNA, 18 nt, Human
uggggcugggggugcugg

SEQ ID NO: 1254976 - RNA, 22 nt, Human
ugggggugcugggaggggcugg

SEQ ID NO: 1254977 - RNA, 20 nt, Human
uugugcccaccaacuacccg

SEQ ID NO: 1254978 - RNA, 19 nt, Human
agaggaaacugggagaggc

SEQ ID NO: 1254979 - RNA, 18 nt, Human
gggagucuuagccuccaa

SEQ ID NO: 1254980 - RNA, 21 nt, Human
uagccuccaaggacguuccgg

SEQ ID NO: 1254981 - RNA, 19 nt, Human
uccggaacccugcggacgc

SEQ ID NO: 1254982 - RNA, 21 nt, Human
ugggagaggccggagugcgac

SEQ ID NO: 1254983 - RNA, 23 nt, Human
uuccggaacccugcggacgcggg

SEQ ID NO: 1254984 - RNA, 18 nt, Human
cacauucagauugcugcc

SEQ ID NO: 1254985 - RNA, 20 nt, Human
ccagaaacacauucagauug

SEQ ID NO: 1254986 - RNA, 21 nt, Human
ccuugcuggaguugcuuuucu

SEQ ID NO: 1254987 - RNA, 23 nt, Human
cgagcaaauucccguugcuuuaa

SEQ ID NO: 1254988 - RNA, 19 nt, Human
ucuuguuuuuucucaucuu

SEQ ID NO: 1254989 - RNA, 23 nt, Human
ugcugguccauuuccagaaacac

SEQ ID NO: 1254990 - RNA, 22 nt, Human
uuucgagcaaauucccguugcu

SEQ ID NO: 1254991 - RNA, 19 nt, Human
agaaauccugcaucucagu

SEQ ID NO: 1254992 - RNA, 24 nt, Human
agacacauucaggugccuuugcag

SEQ ID NO: 1254993 - RNA, 21 nt, Human
agggugggcugucucuccacc

SEQ ID NO: 1254994 - RNA, 19 nt, Human
caagacagcugucucaggc

SEQ ID NO: 1254995 - RNA, 18 nt, Human
caggggucacaguggaca

SEQ ID NO: 1254996 - RNA, 20 nt, Human
cauucaggugccuuugcaga

SEQ ID NO: 1254997 - RNA, 23 nt, Human
cucacauuaugcuaacagggacg

SEQ ID NO: 1254998 - RNA, 18 nt, Human
cuggaagguucucagguc

SEQ ID NO: 1254999 - RNA, 22 nt, Human
gaacaagaaagaugacugggga

SEQ ID NO: 1255000 - RNA, 18 nt, Human
gaacaggggucacagugg

SEQ ID NO: 1255001 - RNA, 19 nt, Human
gcagaaagagaugccagag

SEQ ID NO: 1255002 - RNA, 20 nt, Human
gucacaguggacacaagggu

SEQ ID NO: 1255003 - RNA, 23 nt, Human
uaugcuaacagggacgcagacac

SEQ ID NO: 1255004 - RNA, 21 nt, Human
uauuugcucucucaaauucca

SEQ ID NO: 1255005 - RNA, 22 nt, Human
ucuggaacaagaaagaugacug

SEQ ID NO: 1255006 - RNA, 22 nt, Human
ucuuuauuugcucucucaaauu

SEQ ID NO: 1255007 - RNA, 18 nt, Human
ugaagucacaaaggggag

SEQ ID NO: 1255008 - RNA, 22 nt, Human
uggggaggaaacacaggucagc

SEQ ID NO: 1255009 - RNA, 22 nt, Human
aaaaaagaaggaaaacccaaaa

SEQ ID NO: 1255010 - RNA, 21 nt, Human
aaaagaaaacaaguccucaaa

SEQ ID NO: 1255011 - RNA, 25 nt, Human
aaaugcaaugaagggagcccugcua

SEQ ID NO: 1255012 - RNA, 23 nt, Human
acaaaaaagaaggaaaacccaaa

SEQ ID NO: 1255013 - RNA, 19 nt, Human
agacauccuaguuaacucc

SEQ ID NO: 1255014 - RNA, 22 nt, Human
agagcaaaaaaaaaaaaaagaa

SEQ ID NO: 1255015 - RNA, 19 nt, Human
aggaaaacccaaaaugcca

SEQ ID NO: 1255016 - RNA, 18 nt, Human
aggcugacgagagcuggg

SEQ ID NO: 1255017 - RNA, 25 nt, Human
caaaaaaccacaaacuggguaguaa

SEQ ID NO: 1255018 - RNA, 18 nt, Human
caacucaugaauaaagau

SEQ ID NO: 1255019 - RNA, 22 nt, Human
cacugcuuuugucuacuguuug

SEQ ID NO: 1255020 - RNA, 21 nt, Human
cuuucuggguuuuaccacaua

SEQ ID NO: 1255021 - RNA, 19 nt, Human
gagcaaaaaaaaaaaaaag

SEQ ID NO: 1255022 - RNA, 24 nt, Human
gagcugggaggcaucagcggagga

SEQ ID NO: 1255023 - RNA, 18 nt, Human
ggagauggccagcaggag

SEQ ID NO: 1255024 - RNA, 20 nt, Human
ggaggcugacgagagcuggg

SEQ ID NO: 1255025 - RNA, 19 nt, Human
uaaacagagcagugcaacu

SEQ ID NO: 1255026 - RNA, 22 nt, Human
uaaccgagucucuaggcaauau

SEQ ID NO: 1255027 - RNA, 19 nt, Human
uaggcaauauauuuaaaac

SEQ ID NO: 1255028 - RNA, 19 nt, Human
ucagagcaaaaaaaaaaaa

SEQ ID NO: 1255029 - RNA, 21 nt, Human
ucagagcaaaaaaaaaaaaaa

SEQ ID NO: 1255030 - RNA, 24 nt, Human
ucauacuagaagaaacucagccau

SEQ ID NO: 1255031 - RNA, 23 nt, Human
ucuccacaugggaacaaugauua

SEQ ID NO: 1255032 - RNA, 20 nt, Human
ucucccaaaaaaccacaaac

SEQ ID NO: 1255033 - RNA, 23 nt, Human
ugaaaguaucuugcauucaugau

SEQ ID NO: 1255034 - RNA, 23 nt, Human
ugacugcaggaggcuggaagaca

SEQ ID NO: 1255035 - RNA, 19 nt, Human
ugauggaugcuuucugggu

SEQ ID NO: 1255036 - RNA, 22 nt, Human
ugggaacaaugauuauaaaaac

SEQ ID NO: 1255037 - RNA, 18 nt, Human
uuaaaaggucacuaaagu

SEQ ID NO: 1255038 - RNA, 22 nt, Human
uucagagcaaaaaaaaaaaaaa

SEQ ID NO: 1255039 - RNA, 24 nt, Human
uucagagcaaaaaaaaaaaaaaga

SEQ ID NO: 1255040 - RNA, 25 nt, Human
uucagagcaaaaaaaaaaaaaagaa

SEQ ID NO: 1255041 - RNA, 25 nt, Human
uucagagcaaaaaaaaaaaaaagaa

SEQ ID NO: 1255042 - RNA, 26 nt, Human
uucagagcaaaaaaaaaaaaaagaaa

SEQ ID NO: 1255043 - RNA, 18 nt, Human
uuuacaaaaaagaaggaa

SEQ ID NO: 1255044 - RNA, 25 nt, Human
uuuuccaguuuccaacucaugaaua

SEQ ID NO: 1255045 - RNA, 24 nt, Human
uuuugcaaguuguuuuauuuacaa

SEQ ID NO: 1255046 - RNA, 22 nt, Human
gaaugcuguugugugcguugag

SEQ ID NO: 1255047 - RNA, 21 nt, Human
gcuugucgugcuggcagguga

SEQ ID NO: 1255048 - RNA, 24 nt, Human
ugguacugccagggaaugcuguug

SEQ ID NO: 1255049 - RNA, 22 nt, Human
aaaauggaugaaguuauuauca

SEQ ID NO: 1255050 - RNA, 21 nt, Human
aaagaaaauccggagacagaa

SEQ ID NO: 1255051 - RNA, 20 nt, Human
aacaagauuagaaauaacaa

SEQ ID NO: 1255052 - RNA, 28 nt, Human
acacugaaacguuuaaauaagaaaacca

SEQ ID NO: 1255053 - RNA, 26 nt, Human
accaaaugauuucaguaaaaaaaaaa

SEQ ID NO: 1255054 - RNA, 19 nt, Human
agaaucuuuucaugcuccu

SEQ ID NO: 1255055 - RNA, 18 nt, Human
agacagaaucuuuucaug

SEQ ID NO: 1255056 - RNA, 23 nt, Human
agacagaaucuuuucaugcuccu

SEQ ID NO: 1255057 - RNA, 21 nt, Human
aguacagaauaaauuaaagug

SEQ ID NO: 1255058 - RNA, 26 nt, Human
caaaugauuucaguaaaaaaaaaaaa

SEQ ID NO: 1255059 - RNA, 24 nt, Human
cuccuggaauucagugucucucuc

SEQ ID NO: 1255060 - RNA, 19 nt, Human
gcgugguucccgccggggu

SEQ ID NO: 1255061 - RNA, 22 nt, Human
ggagaguaacaagauuagaaau

SEQ ID NO: 1255062 - RNA, 21 nt, Human
ggcugguuuuguuuguuucug

SEQ ID NO: 1255063 - RNA, 21 nt, Human
uaaaaaaaaaaaaaaccucau

SEQ ID NO: 1255064 - RNA, 22 nt, Human
uaacaagauuagaaauaacaaa

SEQ ID NO: 1255065 - RNA, 22 nt, Human
ucaaaggacuaucauaaaagua

SEQ ID NO: 1255066 - RNA, 19 nt, Human
ucaguaaaaaaaaaaaaaa

SEQ ID NO: 1255067 - RNA, 23 nt, Human
ucaguaaaaaaaaaaaaaaccuc

SEQ ID NO: 1255068 - RNA, 24 nt, Human
ucaucuuucuuuauuucugguuau

SEQ ID NO: 1255069 - RNA, 21 nt, Human
uccgauucgggcgugguuccc

SEQ ID NO: 1255070 - RNA, 18 nt, Human
ugaaagaaaauccggaga

SEQ ID NO: 1255071 - RNA, 19 nt, Human
uguuaugggaugggagaua

SEQ ID NO: 1255072 - RNA, 22 nt, Human
uuagcaucacucuccuuguacc

SEQ ID NO: 1255073 - RNA, 28 nt, Human
uucacaguguuccaguaacguggcaguc

SEQ ID NO: 1255074 - RNA, 24 nt, Human
uuuaauaaccauuuauacauugcu

SEQ ID NO: 1255075 - RNA, 23 nt, Human
uuucaguaaaaaaaaaaaaaacc

SEQ ID NO: 1255076 - RNA, 20 nt, Human
augagaucaucagcucuacu

SEQ ID NO: 1255077 - RNA, 24 nt, Human
caaaaacuuuggccgucucaauga

SEQ ID NO: 1255078 - RNA, 23 nt, Human
gucccaauguccaaacuuucuca

SEQ ID NO: 1255079 - RNA, 19 nt, Human
uccaaacuuucucacauac

SEQ ID NO: 1255080 - RNA, 22 nt, Human
ugugauguuccuucagccugga

SEQ ID NO: 1255081 - RNA, 21 nt, Human
uuuggccgucucaaugagauc

SEQ ID NO: 1255082 - RNA, 24 nt, Human
aaaaauuuccaaaacaaaacacau

SEQ ID NO: 1255083 - RNA, 22 nt, Human
aaaacaaaacacaugcuuccac

SEQ ID NO: 1255084 - RNA, 19 nt, Human
aaagaguuaagauuucuuc

SEQ ID NO: 1255085 - RNA, 24 nt, Human
aaagugcugggauuacaggcguga

SEQ ID NO: 1255086 - RNA, 24 nt, Human
aaccucaggugaucugcccaccuc

SEQ ID NO: 1255087 - RNA, 23 nt, Human
aagcaggacuccuuccuccaugg

SEQ ID NO: 1255088 - RNA, 20 nt, Human
aagccaguuucagguuacga

SEQ ID NO: 1255089 - RNA, 20 nt, Human
aaggccccaggacucuccag

SEQ ID NO: 1255090 - RNA, 19 nt, Human
aagugcugggauuacaggc

SEQ ID NO: 1255091 - RNA, 19 nt, Human
aagugcugggauuacaggc

SEQ ID NO: 1255092 - RNA, 26 nt, Human
aagugcugggauuacaggcgugagcc

SEQ ID NO: 1255093 - RNA, 21 nt, Human
aaguguugggauuacaggcau

SEQ ID NO: 1255094 - RNA, 23 nt, Human
aaguguugggauuacaggcauga

SEQ ID NO: 1255095 - RNA, 26 nt, Human
aaguguugggauuacaggcaugagcc

SEQ ID NO: 1255096 - RNA, 18 nt, Human
aauacaguuuuuaguuac

SEQ ID NO: 1255097 - RNA, 21 nt, Human
acaggcaugagccaccacgac

SEQ ID NO: 1255098 - RNA, 18 nt, Human
acaggguuucaccauguu

SEQ ID NO: 1255099 - RNA, 21 nt, Human
acaggguuucaccauguuggc

SEQ ID NO: 1255100 - RNA, 24 nt, Human
acaggguuucaccauguuggccag

SEQ ID NO: 1255101 - RNA, 18 nt, Human
acaugaacauaugcuacu

SEQ ID NO: 1255102 - RNA, 23 nt, Human
accagccuccucuauuccuccca

SEQ ID NO: 1255103 - RNA, 21 nt, Human
acgcuggaggaccagucagcg

SEQ ID NO: 1255104 - RNA, 22 nt, Human
acugucuuuucuuuuuuuuuga

SEQ ID NO: 1255105 - RNA, 23 nt, Human
agcaauaguuuuuuuuuuuuuuu

SEQ ID NO: 1255106 - RNA, 21 nt, Human
agccucucgaguagcugggac

SEQ ID NO: 1255107 - RNA, 24 nt, Human
agcgauucuccugccucagccucc

SEQ ID NO: 1255108 - RNA, 20 nt, Human
aggcaugagccaccacgacc

SEQ ID NO: 1255109 - RNA, 20 nt, Human
aggcuaugcauagccccaug

SEQ ID NO: 1255110 - RNA, 24 nt, Human
aggugaucugcccaccucagccuc

SEQ ID NO: 1255111 - RNA, 18 nt, Human
aguagcugggacuacagg

SEQ ID NO: 1255112 - RNA, 19 nt, Human
aguagcugggacuacaggc

SEQ ID NO: 1255113 - RNA, 20 nt, Human
aguagcugggacuacaggca

SEQ ID NO: 1255114 - RNA, 23 nt, Human
aguagcugggauuacaggcacgu

SEQ ID NO: 1255115 - RNA, 21 nt, Human
agugcaauggcgugaucucag

SEQ ID NO: 1255116 - RNA, 24 nt, Human
agugcaauggcgugaucucagcuc

SEQ ID NO: 1255117 - RNA, 23 nt, Human
agugcacuggugcaaucuuggcu

SEQ ID NO: 1255118 - RNA, 24 nt, Human
agugcacuggugcaaucuuggcuc

SEQ ID NO: 1255119 - RNA, 23 nt, Human
augcacagguaucugagaagggu

SEQ ID NO: 1255120 - RNA, 22 nt, Human
auuuuuguauuuuuaguagaga

SEQ ID NO: 1255121 - RNA, 24 nt, Human
auuuuuguauuuuuaguagagaug

SEQ ID NO: 1255122 - RNA, 23 nt, Human
caaaaagaacuuguaaaguggca

SEQ ID NO: 1255123 - RNA, 19 nt, Human
caaaacaaggccccaggac

SEQ ID NO: 1255124 - RNA, 23 nt, Human
caaaacacaugcuuccacuucac

SEQ ID NO: 1255125 - RNA, 24 nt, Human
caaaauagaugauucacaucuuca

SEQ ID NO: 1255126 - RNA, 24 nt, Human
caaagugcugggauuacaggcgug

SEQ ID NO: 1255127 - RNA, 27 nt, Human
caacaaagcaggacuccuuccuccaug

SEQ ID NO: 1255128 - RNA, 27 nt, Human
caacagcaauaaaaaguaauuucaaag

SEQ ID NO: 1255129 - RNA, 23 nt, Human
caacuuccaccucccagguucaa

SEQ ID NO: 1255130 - RNA, 20 nt, Human
caagcgauucuccugccuca

SEQ ID NO: 1255131 - RNA, 22 nt, Human
caagcgauucuccugccucagc

SEQ ID NO: 1255132 - RNA, 22 nt, Human
caagcgauuuuccugccuuagc

SEQ ID NO: 1255133 - RNA, 24 nt, Human
caccaugcccggcuaauuuuugua

SEQ ID NO: 1255134 - RNA, 18 nt, Human
caccauguuggccaggau

SEQ ID NO: 1255135 - RNA, 22 nt, Human
caccauguuggccaggaugguc

SEQ ID NO: 1255136 - RNA, 24 nt, Human
caccauguuggccaggauggucuc

SEQ ID NO: 1255137 - RNA, 24 nt, Human
caccucagccucccuaaguguugg

SEQ ID NO: 1255138 - RNA, 20 nt, Human
cacugcaacuuccaccuccc

SEQ ID NO: 1255139 - RNA, 23 nt, Human
cacugcaaucucugccuccuggg

SEQ ID NO: 1255140 - RNA, 21 nt, Human
cacuggaauuuuuccuuggaa

SEQ ID NO: 1255141 - RNA, 23 nt, Human
cagaguuucgcuuguugcccagg

SEQ ID NO: 1255142 - RNA, 19 nt, Human
cagcccuuuucuuguaagu

SEQ ID NO: 1255143 - RNA, 20 nt, Human
cagccuccugaguagcuggg

SEQ ID NO: 1255144 - RNA, 24 nt, Human
caggguuucaccauguuggccagg

SEQ ID NO: 1255145 - RNA, 22 nt, Human
caucacugaaaaguuggaacac

SEQ ID NO: 1255146 - RNA, 21 nt, Human
cauggucugcccgccuuggcc

SEQ ID NO: 1255147 - RNA, 22 nt, Human
ccaaagugcugggauuacaggc

SEQ ID NO: 1255148 - RNA, 22 nt, Human
ccaaagugcugggauuacaggc

SEQ ID NO: 1255149 - RNA, 24 nt, Human
ccaaagugcugggauuacaggcgu

SEQ ID NO: 1255150 - RNA, 24 nt, Human
ccaccucccagguucaagcgauuc

SEQ ID NO: 1255151 - RNA, 19 nt, Human
ccauguuggucaggcuggu

SEQ ID NO: 1255152 - RNA, 22 nt, Human
ccauguuggucaggcuggucuc

SEQ ID NO: 1255153 - RNA, 23 nt, Human
ccauguuggucaggcuggucucg

SEQ ID NO: 1255154 - RNA, 24 nt, Human
cccaaccucaggugaucugcccac

SEQ ID NO: 1255155 - RNA, 23 nt, Human
cccaaugcagaaaacacuggaau

SEQ ID NO: 1255156 - RNA, 22 nt, Human
cccaggcuggagugcaauggcg

SEQ ID NO: 1255157 - RNA, 20 nt, Human
cccagguucaagcgauucuc

SEQ ID NO: 1255158 - RNA, 23 nt, Human
cccagguucaagcgauucuccug

SEQ ID NO: 1255159 - RNA, 22 nt, Human
cccgccuuggccucccaaagug

SEQ ID NO: 1255160 - RNA, 18 nt, Human
cccggccagcaauacagu

SEQ ID NO: 1255161 - RNA, 24 nt, Human
cccuaaguguugggauuacaggca

SEQ ID NO: 1255162 - RNA, 21 nt, Human
cccuugaggucccgcuaaccc

SEQ ID NO: 1255163 - RNA, 19 nt, Human
cccuuuccaguuucugaag

SEQ ID NO: 1255164 - RNA, 21 nt, Human
ccgcgcccggccagcaauaca

SEQ ID NO: 1255165 - RNA, 20 nt, Human
ccgcgcccggccagcaauag

SEQ ID NO: 1255166 - RNA, 19 nt, Human
ccuaaguguugggauuaca

SEQ ID NO: 1255167 - RNA, 22 nt, Human
ccuaaguguugggauuacaggc

SEQ ID NO: 1255168 - RNA, 24 nt, Human
ccuaaguguugggauuacaggcau

SEQ ID NO: 1255169 - RNA, 23 nt, Human
ccuaaucaggcauucacugaucc

SEQ ID NO: 1255170 - RNA, 18 nt, Human
ccucauggucugcccgcc

SEQ ID NO: 1255171 - RNA, 24 nt, Human
ccucccagguucaagcgauucucc

SEQ ID NO: 1255172 - RNA, 23 nt, Human
ccugaguagcugggauuacaggc

SEQ ID NO: 1255173 - RNA, 24 nt, Human
ccugaguagcugggauuacaggca

SEQ ID NO: 1255174 - RNA, 23 nt, Human
ccugccucagccuccugaguagc

SEQ ID NO: 1255175 - RNA, 23 nt, Human
ccugccuuagccucucgaguagc

SEQ ID NO: 1255176 - RNA, 23 nt, Human
ccuggguucaagcgauuuuccug

SEQ ID NO: 1255177 - RNA, 23 nt, Human
cgcucugucgcccagcuggagug

SEQ ID NO: 1255178 - RNA, 21 nt, Human
cgcuuguugcccaggcuggag

SEQ ID NO: 1255179 - RNA, 19 nt, Human
cuaagaguaugacaacagc

SEQ ID NO: 1255180 - RNA, 22 nt, Human
cuaaguguugggauuacaggca

SEQ ID NO: 1255181 - RNA, 21 nt, Human
cuaugcauagccccauguccu

SEQ ID NO: 1255182 - RNA, 24 nt, Human
cucacugcaacuuccaccucccag

SEQ ID NO: 1255183 - RNA, 18 nt, Human
cucacugcaaucucugcc

SEQ ID NO: 1255184 - RNA, 24 nt, Human
cucacugcaaucucugccuccugg

SEQ ID NO: 1255185 - RNA, 24 nt, Human
cucagccuccugaguagcugggau

SEQ ID NO: 1255186 - RNA, 24 nt, Human
cuccauguuggucaggcuggucuc

SEQ ID NO: 1255187 - RNA, 24 nt, Human
cuccugaccucauggucugcccgc

SEQ ID NO: 1255188 - RNA, 23 nt, Human
cucgaguagcugggacuacaggc

SEQ ID NO: 1255189 - RNA, 23 nt, Human
cucgcucugucgcccagcuggag

SEQ ID NO: 1255190 - RNA, 23 nt, Human
cugaguagcugggauuacaggca

SEQ ID NO: 1255191 - RNA, 23 nt, Human
cugcaacuuccaccucccagguu

SEQ ID NO: 1255192 - RNA, 24 nt, Human
cugcaacuuccaccucccagguuc

SEQ ID NO: 1255193 - RNA, 24 nt, Human
cugcaaucucugccuccuggguuc

SEQ ID NO: 1255194 - RNA, 20 nt, Human
cugcccgccuuggccuccca

SEQ ID NO: 1255195 - RNA, 23 nt, Human
cugccucagccuccugaguagcu

SEQ ID NO: 1255196 - RNA, 23 nt, Human
cugccuuagccucucgaguagcu

SEQ ID NO: 1255197 - RNA, 24 nt, Human
cuggagugcaauggcgugaucuca

SEQ ID NO: 1255198 - RNA, 23 nt, Human
cugucuuuucuuugacccuuucc

SEQ ID NO: 1255199 - RNA, 24 nt, Human
cuuagccucucgaguagcugggac

SEQ ID NO: 1255200 - RNA, 24 nt, Human
cuuguugcccaggcuggagugcaa

SEQ ID NO: 1255201 - RNA, 19 nt, Human
cuuuuuuuuugagacagag

SEQ ID NO: 1255202 - RNA, 21 nt, Human
gagauggagucucgcucuguc

SEQ ID NO: 1255203 - RNA, 21 nt, Human
gagauggcauuucuccauguu

SEQ ID NO: 1255204 - RNA, 24 nt, Human
gaguagcugggacuacaggcacgc

SEQ ID NO: 1255205 - RNA, 25 nt, Human
gaguagcugggauuacaggcacgug

SEQ ID NO: 1255206 - RNA, 20 nt, Human
gauacaaaagccaccagaua

SEQ ID NO: 1255207 - RNA, 18 nt, Human
gauuacaggcacgugcca

SEQ ID NO: 1255208 - RNA, 18 nt, Human
gauuacaggcaugagcca

SEQ ID NO: 1255209 - RNA, 21 nt, Human
gauuacaggcaugagccacca

SEQ ID NO: 1255210 - RNA, 22 nt, Human
gauuacaggcaugagccaccac

SEQ ID NO: 1255211 - RNA, 18 nt, Human
gauuacaggcgugagcca

SEQ ID NO: 1255212 - RNA, 22 nt, Human
gauuacaggcgugagccaccgc

SEQ ID NO: 1255213 - RNA, 22 nt, Human
gauuacaggcgugagccaccgc

SEQ ID NO: 1255214 - RNA, 22 nt, Human
gcaacuuccaccucccagguuc

SEQ ID NO: 1255215 - RNA, 22 nt, Human
gcaggucuccaucuauuuguac

SEQ ID NO: 1255216 - RNA, 24 nt, Human
gcccaggcuggagugcaauggcgu

SEQ ID NO: 1255217 - RNA, 22 nt, Human
gcccggcuaauuuuuguauuuu

SEQ ID NO: 1255218 - RNA, 24 nt, Human
gccuccucuauuccucccaaucuc

SEQ ID NO: 1255219 - RNA, 22 nt, Human
gccuuggccucccaaagugcug

SEQ ID NO: 1255220 - RNA, 23 nt, Human
gcgauucuccugccucagccucc

SEQ ID NO: 1255221 - RNA, 21 nt, Human
gcucacugcaaucucugccuc

SEQ ID NO: 1255222 - RNA, 19 nt, Human
gcuggagugcaauggcgug

SEQ ID NO: 1255223 - RNA, 23 nt, Human
gcuggucucgaacucccaaccuc

SEQ ID NO: 1255224 - RNA, 19 nt, Human
ggauuacaggcaugagcca

SEQ ID NO: 1255225 - RNA, 22 nt, Human
ggcuggagugcaauggcgugau

SEQ ID NO: 1255226 - RNA, 21 nt, Human
gggcaguuuucagcccugccu

SEQ ID NO: 1255227 - RNA, 22 nt, Human
ggguuucaccauguuggccagg

SEQ ID NO: 1255228 - RNA, 20 nt, Human
ggucucaaucuccugaccuc

SEQ ID NO: 1255229 - RNA, 20 nt, Human
ggucugcccgccuuggccuc

SEQ ID NO: 1255230 - RNA, 19 nt, Human
gguuacgauacaaaagcca

SEQ ID NO: 1255231 - RNA, 24 nt, Human
gguuucaccauguuggccaggaug

SEQ ID NO: 1255232 - RNA, 24 nt, Human
gugaucugcccaccucagccuccc

SEQ ID NO: 1255233 - RNA, 24 nt, Human
guuucgcuuguugcccaggcugga

SEQ ID NO: 1255234 - RNA, 21 nt, Human
uaaucaggcauucacugaucc

SEQ ID NO: 1255235 - RNA, 24 nt, Human
uaauuuuuguauuuuuaguagaga

SEQ ID NO: 1255236 - RNA, 21 nt, Human
uacaaaagccaccagauacac

SEQ ID NO: 1255237 - RNA, 24 nt, Human
uacaggcacgcgccaccacaccca

SEQ ID NO: 1255238 - RNA, 23 nt, Human
uacaggcacgugccaccaugccc

SEQ ID NO: 1255239 - RNA, 23 nt, Human
uacaggcaugagccaccacgacc

SEQ ID NO: 1255240 - RNA, 23 nt, Human
uacaggcgugagccaccgcgccc

SEQ ID NO: 1255241 - RNA, 21 nt, Human
uacuaguaaaugcaaaaagaa

SEQ ID NO: 1255242 - RNA, 22 nt, Human
uagagacaggguuucaccaugu

SEQ ID NO: 1255243 - RNA, 21 nt, Human
uaggaaaaaguacuaagccag

SEQ ID NO: 1255244 - RNA, 24 nt, Human
uaguagagacaggguuucaccaug

SEQ ID NO: 1255245 - RNA, 26 nt, Human
uaguagagacaggguuucaccauguu

SEQ ID NO: 1255246 - RNA, 24 nt, Human
uaguagagauggcauuucuccaug

SEQ ID NO: 1255247 - RNA, 22 nt, Human
uaucugagaagggucuaaacac

SEQ ID NO: 1255248 - RNA, 22 nt, Human
uaugcuacugucuuuucuuuuu

SEQ ID NO: 1255249 - RNA, 21 nt, Human
ucaaaacaaggccccaggacu

SEQ ID NO: 1255250 - RNA, 19 nt, Human
ucaagcgauuuuccugccu

SEQ ID NO: 1255251 - RNA, 24 nt, Human
ucaccauguuggccaggauggucu

SEQ ID NO: 1255252 - RNA, 23 nt, Human
ucacugaucccagcaggucucca

SEQ ID NO: 1255253 - RNA, 23 nt, Human
ucacugcaacuuccaccucccag

SEQ ID NO: 1255254 - RNA, 24 nt, Human
ucacugcaacuuccaccucccagg

SEQ ID NO: 1255255 - RNA, 24 nt, Human
ucacugcaaucucugccuccuggg

SEQ ID NO: 1255256 - RNA, 25 nt, Human
ucacugcaaucucugccuccugggu

SEQ ID NO: 1255257 - RNA, 20 nt, Human
ucagccuccugaguagcugg

SEQ ID NO: 1255258 - RNA, 26 nt, Human
ucagcucacugcaacuuccaccuccc

SEQ ID NO: 1255259 - RNA, 18 nt, Human
ucaggcauucacugaucc

SEQ ID NO: 1255260 - RNA, 25 nt, Human
uccaaaacaaaacacaugcuuccac

SEQ ID NO: 1255261 - RNA, 21 nt, Human
uccauggaaugugccgauuuc

SEQ ID NO: 1255262 - RNA, 24 nt, Human
ucccaaagugcugggauuacaggc

SEQ ID NO: 1255263 - RNA, 21 nt, Human
ucccagguucaagcgauucuc

SEQ ID NO: 1255264 - RNA, 24 nt, Human
ucccagguucaagcgauucuccug

SEQ ID NO: 1255265 - RNA, 24 nt, Human
ucccuaaguguugggauuacaggc

SEQ ID NO: 1255266 - RNA, 24 nt, Human
uccugaguagcugggauuacaggc

SEQ ID NO: 1255267 - RNA, 21 nt, Human
uccuggguucaagcgauuuuc

SEQ ID NO: 1255268 - RNA, 24 nt, Human
uccuggguucaagcgauuuuccug

SEQ ID NO: 1255269 - RNA, 20 nt, Human
ucgcuuguugcccaggcugg

SEQ ID NO: 1255270 - RNA, 21 nt, Human
ucgcuuguugcccaggcugga

SEQ ID NO: 1255271 - RNA, 18 nt, Human
ucucaaagccaucacuga

SEQ ID NO: 1255272 - RNA, 24 nt, Human
ucuccugccucagccuccugagua

SEQ ID NO: 1255273 - RNA, 24 nt, Human
ucucgaguagcugggacuacaggc

SEQ ID NO: 1255274 - RNA, 23 nt, Human
ucucgcucugucgcccagcugga

SEQ ID NO: 1255275 - RNA, 18 nt, Human
ucucugaagauacuugau

SEQ ID NO: 1255276 - RNA, 21 nt, Human
ucuuaggcuaugcauagcccc

SEQ ID NO: 1255277 - RNA, 20 nt, Human
ucuuuuuuuuugagacagag

SEQ ID NO: 1255278 - RNA, 22 nt, Human
ugacaacagcaauaaaaaguaa

SEQ ID NO: 1255279 - RNA, 19 nt, Human
ugaccauagagacgucugu

SEQ ID NO: 1255280 - RNA, 22 nt, Human
ugaccucauggucugcccgccu

SEQ ID NO: 1255281 - RNA, 22 nt, Human
ugagaagggucuaaacacccua

SEQ ID NO: 1255282 - RNA, 19 nt, Human
ugagaauucucaaagccag

SEQ ID NO: 1255283 - RNA, 21 nt, Human
ugagacagaguuucgcuuguu

SEQ ID NO: 1255284 - RNA, 19 nt, Human
ugagaggugcuugacauga

SEQ ID NO: 1255285 - RNA, 21 nt, Human
ugauaaaaauuuccaaaacaa

SEQ ID NO: 1255286 - RNA, 28 nt, Human
ugcagcaauaguuuuuuuuuuuuuuuuu

SEQ ID NO: 1255287 - RNA, 18 nt, Human
ugcccaggcuggagugca

SEQ ID NO: 1255288 - RNA, 21 nt, Human
ugcccaggcuggagugcaaug

SEQ ID NO: 1255289 - RNA, 21 nt, Human
ugcccaggcuggagugcaaug

SEQ ID NO: 1255290 - RNA, 24 nt, Human
ugcccggcuaauuuuuguauuuuu

SEQ ID NO: 1255291 - RNA, 24 nt, Human
ugccucagccuccugaguagcugg

SEQ ID NO: 1255292 - RNA, 24 nt, Human
ugcugggauuacaggcgugagcca

SEQ ID NO: 1255293 - RNA, 18 nt, Human
uggaauuuuuccuuggaa

SEQ ID NO: 1255294 - RNA, 19 nt, Human
uggagugcaauggcgugau

SEQ ID NO: 1255295 - RNA, 24 nt, Human
uggagugcaauggcgugaucucag

SEQ ID NO: 1255296 - RNA, 24 nt, Human
uggagugcacuggugcaaucuugg

SEQ ID NO: 1255297 - RNA, 24 nt, Human
uggcauuucuccauguuggucagg

SEQ ID NO: 1255298 - RNA, 24 nt, Human
uggccaggauggucucaaucuccu

SEQ ID NO: 1255299 - RNA, 24 nt, Human
uggcgugaucucagcucacugcaa

SEQ ID NO: 1255300 - RNA, 21 nt, Human
uggcucacugcaaucucugcc

SEQ ID NO: 1255301 - RNA, 21 nt, Human
ugggacuacaggcacgcgcca

SEQ ID NO: 1255302 - RNA, 22 nt, Human
ugggacuacaggcacgcgccac

SEQ ID NO: 1255303 - RNA, 24 nt, Human
ugggacuacaggcacgcgccacca

SEQ ID NO: 1255304 - RNA, 18 nt, Human
ugggauuacaggcacgug

SEQ ID NO: 1255305 - RNA, 21 nt, Human
ugggauuacaggcacgugcca

SEQ ID NO: 1255306 - RNA, 22 nt, Human
ugggauuacaggcacgugccac

SEQ ID NO: 1255307 - RNA, 24 nt, Human
ugggauuacaggcacgugccacca

SEQ ID NO: 1255308 - RNA, 18 nt, Human
ugggauuacaggcaugag

SEQ ID NO: 1255309 - RNA, 19 nt, Human
ugggauuacaggcaugagc

SEQ ID NO: 1255310 - RNA, 22 nt, Human
ugggauuacaggcaugagccac

SEQ ID NO: 1255311 - RNA, 23 nt, Human
ugggauuacaggcaugagccacc

SEQ ID NO: 1255312 - RNA, 24 nt, Human
ugggauuacaggcaugagccacca

SEQ ID NO: 1255313 - RNA, 24 nt, Human
ugggauuacaggcaugagccacca

SEQ ID NO: 1255314 - RNA, 18 nt, Human
ugggauuacaggcgugag

SEQ ID NO: 1255315 - RNA, 19 nt, Human
ugggauuacaggcgugagc

SEQ ID NO: 1255316 - RNA, 21 nt, Human
ugggauuacaggcgugagcca

SEQ ID NO: 1255317 - RNA, 22 nt, Human
ugggauuacaggcgugagccac

SEQ ID NO: 1255318 - RNA, 23 nt, Human
ugggauuacaggcgugagccacc

SEQ ID NO: 1255319 - RNA, 24 nt, Human
ugggauuacaggcgugagccaccg

SEQ ID NO: 1255320 - RNA, 19 nt, Human
ugggcuuggucgacugcug

SEQ ID NO: 1255321 - RNA, 23 nt, Human
uggguucaagcgauuuuccugcc

SEQ ID NO: 1255322 - RNA, 24 nt, Human
uggguucaagcgauuuuccugccu

SEQ ID NO: 1255323 - RNA, 23 nt, Human
uggucaggcuggucucgaacucc

SEQ ID NO: 1255324 - RNA, 22 nt, Human
ugugaugagaggugcuugacau

SEQ ID NO: 1255325 - RNA, 20 nt, Human
uguugcccaggcuggagugc

SEQ ID NO: 1255326 - RNA, 24 nt, Human
uuaguagagacaggguuucaccau

SEQ ID NO: 1255327 - RNA, 18 nt, Human
uuaguagagauggcauuu

SEQ ID NO: 1255328 - RNA, 24 nt, Human
uuaguagagauggcauuucuccau

SEQ ID NO: 1255329 - RNA, 20 nt, Human
uucaaaacccagcccuuuuc

SEQ ID NO: 1255330 - RNA, 21 nt, Human
uucaagcgauucuccugccuc

SEQ ID NO: 1255331 - RNA, 23 nt, Human
uucaagcgauucuccugccucag

SEQ ID NO: 1255332 - RNA, 24 nt, Human
uucaagcgauucuccugccucagc

SEQ ID NO: 1255333 - RNA, 20 nt, Human
uucaagcgauuuuccugccu

SEQ ID NO: 1255334 - RNA, 24 nt, Human
uucaagcgauuuuccugccuuagc

SEQ ID NO: 1255335 - RNA, 21 nt, Human
uucacugauaaaaaauuuacc

SEQ ID NO: 1255336 - RNA, 24 nt, Human
uucgcuuguugcccaggcuggagu

SEQ ID NO: 1255337 - RNA, 18 nt, Human
uuggccucccaaagugcu

SEQ ID NO: 1255338 - RNA, 19 nt, Human
uuggucgacugcugcagga

SEQ ID NO: 1255339 - RNA, 19 nt, Human
uuucaccauguuggccagg

SEQ ID NO: 1255340 - RNA, 20 nt, Human
uuucaccauguuggccagga

SEQ ID NO: 1255341 - RNA, 21 nt, Human
uuucgcuuguugcccaggcug

SEQ ID NO: 1255342 - RNA, 23 nt, Human
uuucgcuuguugcccaggcugga

SEQ ID NO: 1255343 - RNA, 21 nt, Human
uuucuccauguuggucaggcu

SEQ ID NO: 1255344 - RNA, 19 nt, Human
uuuucagcccugccucacc

SEQ ID NO: 1255345 - RNA, 22 nt, Human
uuuuguauuuuuaguagagaca

SEQ ID NO: 1255346 - RNA, 24 nt, Human
uuuuuaguagagacaggguuucac

SEQ ID NO: 1255347 - RNA, 19 nt, Human
uuuuuaguagagauggcau

SEQ ID NO: 1255348 - RNA, 20 nt, Human
uuuuuguauuuuuaguagag

SEQ ID NO: 1255349 - RNA, 20 nt, Human
uuuuuguauuuuuaguagag

SEQ ID NO: 1255350 - RNA, 18 nt, Human
uuuuuuuuuuuuuuuccg

SEQ ID NO: 1255351 - RNA, 20 nt, Human
uuuuuuuuuuuuuuuuccga

SEQ ID NO: 1255352 - RNA, 22 nt, Human
aaaauggaacgggaaaucagga

SEQ ID NO: 1255353 - RNA, 19 nt, Human
aaagugcugggauuacaga

SEQ ID NO: 1255354 - RNA, 24 nt, Human
aaagugcugggauuacagacguga

SEQ ID NO: 1255355 - RNA, 23 nt, Human
aacucccugccccucugggccuc

SEQ ID NO: 1255356 - RNA, 21 nt, Human
aagaaugagcaggagaggccg

SEQ ID NO: 1255357 - RNA, 18 nt, Human
aagacucuuccaucccua

SEQ ID NO: 1255358 - RNA, 23 nt, Human
aagacucuuccaucccuacauug

SEQ ID NO: 1255359 - RNA, 25 nt, Human
aagcaauucuccugccccagccucc

SEQ ID NO: 1255360 - RNA, 30 nt, Human
aagcaggacgagggggagacucaguuggaa

SEQ ID NO: 1255361 - RNA, 21 nt, Human
aagcucacgguggggcuucga

SEQ ID NO: 1255362 - RNA, 20 nt, Human
aaggugcugggauuauaggc

SEQ ID NO: 1255363 - RNA, 24 nt, Human
aaggugcugggauuauaggcauga

SEQ ID NO: 1255364 - RNA, 19 nt, Human
aagugcugggauuacagac

SEQ ID NO: 1255365 - RNA, 19 nt, Human
aagugcugggauuacagac

SEQ ID NO: 1255366 - RNA, 20 nt, Human
aauaagaaggcagauuggga

SEQ ID NO: 1255367 - RNA, 21 nt, Human
acaggcgcccgccaccacacc

SEQ ID NO: 1255368 - RNA, 21 nt, Human
acaguuaagagcaugcagagc

SEQ ID NO: 1255369 - RNA, 22 nt, Human
accacacacacacacacacaca

SEQ ID NO: 1255370 - RNA, 24 nt, Human
accacacacacacacacacacaca

SEQ ID NO: 1255371 - RNA, 26 nt, Human
accacaggcauacaugcacacauaca

SEQ ID NO: 1255372 - RNA, 18 nt, Human
accauguuggccaggcug

SEQ ID NO: 1255373 - RNA, 21 nt, Human
acccagagaggagccccaguu

SEQ ID NO: 1255374 - RNA, 25 nt, Human
acccgccucagccucccaaagugcu

SEQ ID NO: 1255375 - RNA, 25 nt, Human
acccgcuucggccucccaaggugcu

SEQ ID NO: 1255376 - RNA, 22 nt, Human
accgcaccuggccagcagagcu

SEQ ID NO: 1255377 - RNA, 27 nt, Human
accgcaccuggccagcaggacaucggg

SEQ ID NO: 1255378 - RNA, 24 nt, Human
accuugugauccacccgccucagc

SEQ ID NO: 1255379 - RNA, 24 nt, Human
acgacaaugaggguaucuuguacc

SEQ ID NO: 1255380 - RNA, 25 nt, Human
acucugucgcccaggcuggagugca

SEQ ID NO: 1255381 - RNA, 27 nt, Human
acugaagcauauggcccuaggaagcca

SEQ ID NO: 1255382 - RNA, 18 nt, Human
acugcaagcuccaccgcc

SEQ ID NO: 1255383 - RNA, 19 nt, Human
agaaagagcagggacccag

SEQ ID NO: 1255384 - RNA, 21 nt, Human
agagaggagccccaguuggca

SEQ ID NO: 1255385 - RNA, 23 nt, Human
agcaauucuccugccccagccuc

SEQ ID NO: 1255386 - RNA, 18 nt, Human
agccuccagaguagcugg

SEQ ID NO: 1255387 - RNA, 20 nt, Human
agcuagcgcuggcagccacg

SEQ ID NO: 1255388 - RNA, 24 nt, Human
agcucuuguugccuaggcuggagu

SEQ ID NO: 1255389 - RNA, 23 nt, Human
agcugggauuacaggugugugcc

SEQ ID NO: 1255390 - RNA, 21 nt, Human
aggaaaggcuuagccugccag

SEQ ID NO: 1255391 - RNA, 22 nt, Human
aggaagagcuggagcuugggug

SEQ ID NO: 1255392 - RNA, 25 nt, Human
aggaagccaugagugucaggcugcu

SEQ ID NO: 1255393 - RNA, 22 nt, Human
aggaaggcccagcugggcaugg

SEQ ID NO: 1255394 - RNA, 20 nt, Human
aggaggagagugagggaggg

SEQ ID NO: 1255395 - RNA, 19 nt, Human
aggcaugagccaccgcacc

SEQ ID NO: 1255396 - RNA, 19 nt, Human
aggccagggcagagcagua

SEQ ID NO: 1255397 - RNA, 25 nt, Human
aggcuggagugcagugacacgaucu

SEQ ID NO: 1255398 - RNA, 23 nt, Human
agggagcugaggcugaggaaggu

SEQ ID NO: 1255399 - RNA, 26 nt, Human
agggagcugaggcugaggauaccgug

SEQ ID NO: 1255400 - RNA, 18 nt, Human
agguauacgugcacaacc

SEQ ID NO: 1255401 - RNA, 24 nt, Human
aggugauccacccgcuucggccuc

SEQ ID NO: 1255402 - RNA, 18 nt, Human
aguagcugggacuacagg

SEQ ID NO: 1255403 - RNA, 19 nt, Human
aguagcugggacuacaggc

SEQ ID NO: 1255404 - RNA, 23 nt, Human
aguagcugggauuacaggugugu

SEQ ID NO: 1255405 - RNA, 24 nt, Human
agucagcacugaggccagagucca

SEQ ID NO: 1255406 - RNA, 24 nt, Human
agugcaauggcaugaucucggcuc

SEQ ID NO: 1255407 - RNA, 24 nt, Human
agugcagugacacgaucucggcuc

SEQ ID NO: 1255408 - RNA, 24 nt, Human
agugcugggauuacagacgugagu

SEQ ID NO: 1255409 - RNA, 20 nt, Human
auaagaaggcagauugggaa

SEQ ID NO: 1255410 - RNA, 30 nt, Human
auacgugcacaaccacacacacacacacag

SEQ ID NO: 1255411 - RNA, 18 nt, Human
augggguuucaccauguu

SEQ ID NO: 1255412 - RNA, 22 nt, Human
augggguuucaccauguuggcc

SEQ ID NO: 1255413 - RNA, 23 nt, Human
augggguuucaccauguuggcca

SEQ ID NO: 1255414 - RNA, 24 nt, Human
augggguuucaccauguuggccag

SEQ ID NO: 1255415 - RNA, 19 nt, Human
auuacaggugugugccacc

SEQ ID NO: 1255416 - RNA, 24 nt, Human
auuuuuaguagagacagguuucac

SEQ ID NO: 1255417 - RNA, 24 nt, Human
caaagugcugggauuacagacgug

SEQ ID NO: 1255418 - RNA, 19 nt, Human
caagggauggugaguagcc

SEQ ID NO: 1255419 - RNA, 24 nt, Human
caaggugcugggauuauaggcaug

SEQ ID NO: 1255420 - RNA, 19 nt, Human
cacaaaaugcuuugugacc

SEQ ID NO: 1255421 - RNA, 21 nt, Human
cacaaaaugcuuugugaccaa

SEQ ID NO: 1255422 - RNA, 20 nt, Human
cacacacacacacacacaca

SEQ ID NO: 1255423 - RNA, 22 nt, Human
cacaccauucuccugccucagc

SEQ ID NO: 1255424 - RNA, 22 nt, Human
caccaccgcacccacagcagac

SEQ ID NO: 1255425 - RNA, 23 nt, Human
caccaccgcacccacagcagaca

SEQ ID NO: 1255426 - RNA, 18 nt, Human
caccauguuggccaggcu

SEQ ID NO: 1255427 - RNA, 21 nt, Human
caccauguuggccaggcuggu

SEQ ID NO: 1255428 - RNA, 24 nt, Human
caccauguuggccaggcugguauc

SEQ ID NO: 1255429 - RNA, 31 nt, Human
caccauguuggccaggcugguaucaaacucc

SEQ ID NO: 1255430 - RNA, 19 nt, Human
cacccacagcagacaucac

SEQ ID NO: 1255431 - RNA, 23 nt, Human
cacccgccucagccucccaaagu

SEQ ID NO: 1255432 - RNA, 20 nt, Human
caccgcacccacagcagaca

SEQ ID NO: 1255433 - RNA, 22 nt, Human
caccgcaccuggccagcagagc

SEQ ID NO: 1255434 - RNA, 18 nt, Human
caccguguuagccaggau

SEQ ID NO: 1255435 - RNA, 24 nt, Human
caccguguuagccaggaugguuuc

SEQ ID NO: 1255436 - RNA, 20 nt, Human
cacuccucaccaccgcaccc

SEQ ID NO: 1255437 - RNA, 24 nt, Human
cacucugucgcccaggcuggagug

SEQ ID NO: 1255438 - RNA, 21 nt, Human
cacugcaaccuccgccuccug

SEQ ID NO: 1255439 - RNA, 23 nt, Human
cacugcaaccuccgccuccuggg

SEQ ID NO: 1255440 - RNA, 23 nt, Human
cagaaagagcagggacccagaga

SEQ ID NO: 1255441 - RNA, 24 nt, Human
cagaguagcugggauuacaggugu

SEQ ID NO: 1255442 - RNA, 20 nt, Human
cagccacguuugccagaccc

SEQ ID NO: 1255443 - RNA, 21 nt, Human
caggccccugaacuaugcuug

SEQ ID NO: 1255444 - RNA, 19 nt, Human
cagguaacucccugccccu

SEQ ID NO: 1255445 - RNA, 23 nt, Human
cagguuucaccguguuagccagg

SEQ ID NO: 1255446 - RNA, 21 nt, Human
cagugggcagggugugccgau

SEQ ID NO: 1255447 - RNA, 28 nt, Human
caugcacacauacagagacucagguaua

SEQ ID NO: 1255448 - RNA, 23 nt, Human
cauguuggccaggcugguaucaa

SEQ ID NO: 1255449 - RNA, 22 nt, Human
ccaaagugcugggauuacagac

SEQ ID NO: 1255450 - RNA, 24 nt, Human
ccaaagugcugggauuacagacgu

SEQ ID NO: 1255451 - RNA, 24 nt, Human
ccaaggugcugggauuauaggcau

SEQ ID NO: 1255452 - RNA, 19 nt, Human
ccacacacacacacacaca

SEQ ID NO: 1255453 - RNA, 21 nt, Human
ccacacacacacacacacaca

SEQ ID NO: 1255454 - RNA, 26 nt, Human
ccacccgccucagccucccaaagugc

SEQ ID NO: 1255455 - RNA, 19 nt, Human
ccacuccucaccaccgcac

SEQ ID NO: 1255456 - RNA, 21 nt, Human
ccacuccucaccaccgcaccc

SEQ ID NO: 1255457 - RNA, 19 nt, Human
ccagaguagcugggauuac

SEQ ID NO: 1255458 - RNA, 22 nt, Human
ccagaguagcugggauuacagg

SEQ ID NO: 1255459 - RNA, 22 nt, Human
ccagaguagcugggauuacagg

SEQ ID NO: 1255460 - RNA, 24 nt, Human
ccagaguagcugggauuacaggug

SEQ ID NO: 1255461 - RNA, 25 nt, Human
ccagaguagcugggauuacaggugu

SEQ ID NO: 1255462 - RNA, 21 nt, Human
cccacacauaccacaggcaua

SEQ ID NO: 1255463 - RNA, 27 nt, Human
cccacacauaccacaggcauacaugca

SEQ ID NO: 1255464 - RNA, 19 nt, Human
cccaggagcuuguuggaag

SEQ ID NO: 1255465 - RNA, 20 nt, Human
cccaggcagccacguccagu

SEQ ID NO: 1255466 - RNA, 19 nt, Human
ccccucugggccucaguuu

SEQ ID NO: 1255467 - RNA, 23 nt, Human
cccgaguagcugggacuacaggc

SEQ ID NO: 1255468 - RNA, 24 nt, Human
cccgaguagcugggacuacaggcg

SEQ ID NO: 1255469 - RNA, 23 nt, Human
cccggguucacaccauucuccug

SEQ ID NO: 1255470 - RNA, 19 nt, Human
cccuucucccuucccucuc

SEQ ID NO: 1255471 - RNA, 23 nt, Human
ccgcccggguucacaccauucuc

SEQ ID NO: 1255472 - RNA, 24 nt, Human
ccgcccggguucacaccauucucc

SEQ ID NO: 1255473 - RNA, 24 nt, Human
ccgccucagccucccaaagugcug

SEQ ID NO: 1255474 - RNA, 27 nt, Human
ccgccuccuggguucaagcaauucuuu

SEQ ID NO: 1255475 - RNA, 21 nt, Human
ccggcccgauguucuuauguu

SEQ ID NO: 1255476 - RNA, 19 nt, Human
ccuaggcuggagugcaaug

SEQ ID NO: 1255477 - RNA, 19 nt, Human
ccucaccaccgcacccaca

SEQ ID NO: 1255478 - RNA, 24 nt, Human
ccucagguaacucccugccccucu

SEQ ID NO: 1255479 - RNA, 19 nt, Human
ccuccaagcucacgguggg

SEQ ID NO: 1255480 - RNA, 19 nt, Human
ccuccgccuccuggguuca

SEQ ID NO: 1255481 - RNA, 24 nt, Human
ccuccuggguucaagcaauucucc

SEQ ID NO: 1255482 - RNA, 22 nt, Human
ccugaccucaggugauccaccc

SEQ ID NO: 1255483 - RNA, 23 nt, Human
ccugaccucaggugauccacccg

SEQ ID NO: 1255484 - RNA, 20 nt, Human
ccugaccuugugauccaccc

SEQ ID NO: 1255485 - RNA, 18 nt, Human
ccugcacggagcccagga

SEQ ID NO: 1255486 - RNA, 23 nt, Human
ccugccucagccucccgaguagc

SEQ ID NO: 1255487 - RNA, 23 nt, Human
ccuggguucaagcaauucuccug

SEQ ID NO: 1255488 - RNA, 19 nt, Human
cgcccggguucacaccauu

SEQ ID NO: 1255489 - RNA, 31 nt, Human
cgugcacaaccacacacacacacacacacag

SEQ ID NO: 1255490 - RNA, 22 nt, Human
cuagcucuuguugccuaggcug

SEQ ID NO: 1255491 - RNA, 24 nt, Human
cuagcucuuguugccuaggcugga

SEQ ID NO: 1255492 - RNA, 18 nt, Human
cuaguagagaugggguuu

SEQ ID NO: 1255493 - RNA, 22 nt, Human
cuaguagagaugggguuucacc

SEQ ID NO: 1255494 - RNA, 24 nt, Human
cuaguagagaugggguuucaccau

SEQ ID NO: 1255495 - RNA, 24 nt, Human
cucaccaccgcacccacagcagac

SEQ ID NO: 1255496 - RNA, 24 nt, Human
cucacucugucgcccaggcuggag

SEQ ID NO: 1255497 - RNA, 24 nt, Human
cucacugcaaccuccgccuccugg

SEQ ID NO: 1255498 - RNA, 24 nt, Human
cucagccucccgaguagcugggac

SEQ ID NO: 1255499 - RNA, 24 nt, Human
cuccugaccuugugauccacccgc

SEQ ID NO: 1255500 - RNA, 21 nt, Human
cuccuggguucaagcaauucu

SEQ ID NO: 1255501 - RNA, 19 nt, Human
cugaacuaugcuuguuaca

SEQ ID NO: 1255502 - RNA, 23 nt, Human
cugcaaccuccgccuccuggguu

SEQ ID NO: 1255503 - RNA, 24 nt, Human
cugcaaccuccgccuccuggguuc

SEQ ID NO: 1255504 - RNA, 23 nt, Human
cugccaggacccuucccuggcca

SEQ ID NO: 1255505 - RNA, 23 nt, Human
cugccucagccucccgaguagcu

SEQ ID NO: 1255506 - RNA, 24 nt, Human
cuggagugcaauggcaugaucucg

SEQ ID NO: 1255507 - RNA, 23 nt, Human
cuguccacaaagcauccacaagg

SEQ ID NO: 1255508 - RNA, 19 nt, Human
cuugcaugaacgacaauga

SEQ ID NO: 1255509 - RNA, 22 nt, Human
cuuguugccuaggcuggagugc

SEQ ID NO: 1255510 - RNA, 24 nt, Human
cuuguugccuaggcuggagugcaa

SEQ ID NO: 1255511 - RNA, 19 nt, Human
gaaugagcaggagaggccg

SEQ ID NO: 1255512 - RNA, 19 nt, Human
gaccucaggugauccaccc

SEQ ID NO: 1255513 - RNA, 22 nt, Human
gaccuugugauccacccgccuc

SEQ ID NO: 1255514 - RNA, 24 nt, Human
gaccuugugauccacccgccucag

SEQ ID NO: 1255515 - RNA, 26 nt, Human
gagaggccagggcagagcagugggca

SEQ ID NO: 1255516 - RNA, 18 nt, Human
gagaugggguuucaccau

SEQ ID NO: 1255517 - RNA, 24 nt, Human
gagaugggguuucaccauguuggc

SEQ ID NO: 1255518 - RNA, 23 nt, Human
gagcugaggcugaggaaggucac

SEQ ID NO: 1255519 - RNA, 20 nt, Human
gagggaggagacccaggcag

SEQ ID NO: 1255520 - RNA, 20 nt, Human
gaggggagagcacaggagag

SEQ ID NO: 1255521 - RNA, 25 nt, Human
gaguagcugggacuacaggcgcccg

SEQ ID NO: 1255522 - RNA, 26 nt, Human
gaguagcugggauuacaggugugugc

SEQ ID NO: 1255523 - RNA, 18 nt, Human
gauuacagacgugaguca

SEQ ID NO: 1255524 - RNA, 19 nt, Human
gauuacagacgugagucac

SEQ ID NO: 1255525 - RNA, 21 nt, Human
gauuacagacgugagucaccg

SEQ ID NO: 1255526 - RNA, 18 nt, Human
gauuacaggugugugcca

SEQ ID NO: 1255527 - RNA, 22 nt, Human
gauuauaggcaugagccaccgc

SEQ ID NO: 1255528 - RNA, 23 nt, Human
gauuauaggcaugagccaccgca

SEQ ID NO: 1255529 - RNA, 20 nt, Human
gcaccuaaaagccccuggca

SEQ ID NO: 1255530 - RNA, 19 nt, Human
gcagccacguuugccagac

SEQ ID NO: 1255531 - RNA, 18 nt, Human
gcagggcaggggugggag

SEQ ID NO: 1255532 - RNA, 24 nt, Human
gcauacaugcacacauacagagac

SEQ ID NO: 1255533 - RNA, 22 nt, Human
gccacuccucaccaccgcaccc

SEQ ID NO: 1255534 - RNA, 21 nt, Human
gccauugccacuccucaccac

SEQ ID NO: 1255535 - RNA, 19 nt, Human
gcccaggcuggagugcagu

SEQ ID NO: 1255536 - RNA, 23 nt, Human
gcccaggcuggagugcagugaca

SEQ ID NO: 1255537 - RNA, 24 nt, Human
gccuaggcuggagugcaauggcau

SEQ ID NO: 1255538 - RNA, 23 nt, Human
gccucagccucccaaagugcugg

SEQ ID NO: 1255539 - RNA, 21 nt, Human
gcucuuguugccuaggcugga

SEQ ID NO: 1255540 - RNA, 20 nt, Human
gcuggagcuugggugaaaau

SEQ ID NO: 1255541 - RNA, 19 nt, Human
gcuggagugcaauggcaug

SEQ ID NO: 1255542 - RNA, 23 nt, Human
gcugguaucaaacuccugaccuc

SEQ ID NO: 1255543 - RNA, 25 nt, Human
gcuugugugugugugugugugugug

SEQ ID NO: 1255544 - RNA, 21 nt, Human
ggacccagagaggagccccag

SEQ ID NO: 1255545 - RNA, 23 nt, Human
ggagagugggcauggcuccugca

SEQ ID NO: 1255546 - RNA, 24 nt, Human
ggcugguaucaaacuccugaccuc

SEQ ID NO: 1255547 - RNA, 22 nt, Human
gggguuucaccauguuggccag

SEQ ID NO: 1255548 - RNA, 23 nt, Human
gggguuucaccauguuggccagg

SEQ ID NO: 1255549 - RNA, 22 nt, Human
ggguuucaccauguuggccagg

SEQ ID NO: 1255550 - RNA, 19 nt, Human
gguuucgaucuccugaccu

SEQ ID NO: 1255551 - RNA, 20 nt, Human
gguuucgaucuccugaccuu

SEQ ID NO: 1255552 - RNA, 23 nt, Human
guagagaugggguuucaccaugu

SEQ ID NO: 1255553 - RNA, 18 nt, Human
guagcugggauuacaggu

SEQ ID NO: 1255554 - RNA, 21 nt, Human
guauacgugcacaaccacaca

SEQ ID NO: 1255555 - RNA, 18 nt, Human
guccaguauagcagugcu

SEQ ID NO: 1255556 - RNA, 24 nt, Human
gugauccacccgccucagccuccc

SEQ ID NO: 1255557 - RNA, 24 nt, Human
gugauccacccgcuucggccuccc

SEQ ID NO: 1255558 - RNA, 21 nt, Human
gugcugggauuauaggcauga

SEQ ID NO: 1255559 - RNA, 21 nt, Human
gugugugugugugugugugug

SEQ ID NO: 1255560 - RNA, 21 nt, Human
gugugugugugugugugugug

SEQ ID NO: 1255561 - RNA, 18 nt, Human
uaagaaggcagauuggga

SEQ ID NO: 1255562 - RNA, 22 nt, Human
uacagcaccuaaaagccccugg

SEQ ID NO: 1255563 - RNA, 22 nt, Human
uacaggcgcccgccaccacacc

SEQ ID NO: 1255564 - RNA, 24 nt, Human
uacaggugugugccaccacaccca

SEQ ID NO: 1255565 - RNA, 19 nt, Human
uacauugccuguugagaag

SEQ ID NO: 1255566 - RNA, 21 nt, Human
uacauuuauagaacccgcaac

SEQ ID NO: 1255567 - RNA, 30 nt, Human
uacgugcacaaccacacacacacacacaca

SEQ ID NO: 1255568 - RNA, 21 nt, Human
uagagacagguuucaccgugu

SEQ ID NO: 1255569 - RNA, 22 nt, Human
uagagaugggguuucaccaugu

SEQ ID NO: 1255570 - RNA, 21 nt, Human
uagccugcacacugcacaugc

SEQ ID NO: 1255571 - RNA, 20 nt, Human
uaguagagacagguuucacc

SEQ ID NO: 1255572 - RNA, 24 nt, Human
uaguagagacagguuucaccgugu

SEQ ID NO: 1255573 - RNA, 24 nt, Human
uaguagagaugggguuucaccaug

SEQ ID NO: 1255574 - RNA, 25 nt, Human
uaguagagaugggguuucaccaugu

SEQ ID NO: 1255575 - RNA, 19 nt, Human
uaucuuguaccucaccaag

SEQ ID NO: 1255576 - RNA, 21 nt, Human
ucacaccauucuccugccuca

SEQ ID NO: 1255577 - RNA, 18 nt, Human
ucaccgagcccggcccga

SEQ ID NO: 1255578 - RNA, 24 nt, Human
ucaccguguuagccaggaugguuu

SEQ ID NO: 1255579 - RNA, 22 nt, Human
ucacuaacugaucccagccguu

SEQ ID NO: 1255580 - RNA, 24 nt, Human
ucacucugucgcccaggcuggagu

SEQ ID NO: 1255581 - RNA, 23 nt, Human
ucacugcaaccuccgccuccugg

SEQ ID NO: 1255582 - RNA, 24 nt, Human
ucacugcaaccuccgccuccuggg

SEQ ID NO: 1255583 - RNA, 25 nt, Human
ucacugcaaccuccgccuccugggu

SEQ ID NO: 1255584 - RNA, 26 nt, Human
ucacugcaaccuccgccuccuggguu

SEQ ID NO: 1255585 - RNA, 18 nt, Human
ucacugcaagcuccaccg

SEQ ID NO: 1255586 - RNA, 21 nt, Human
ucacugcaagcuccaccgccc

SEQ ID NO: 1255587 - RNA, 24 nt, Human
ucacugcaagcuccaccgcccggg

SEQ ID NO: 1255588 - RNA, 23 nt, Human
ucagccucccgaguagcugggac

SEQ ID NO: 1255589 - RNA, 21 nt, Human
uccacccgccucagccuccca

SEQ ID NO: 1255590 - RNA, 22 nt, Human
uccaccgcccggguucacacca

SEQ ID NO: 1255591 - RNA, 24 nt, Human
uccagaguagcugggauuacaggu

SEQ ID NO: 1255592 - RNA, 18 nt, Human
ucccaaagugcugggauu

SEQ ID NO: 1255593 - RNA, 24 nt, Human
ucccaaagugcugggauuacagac

SEQ ID NO: 1255594 - RNA, 24 nt, Human
ucccaaggugcugggauuauaggc

SEQ ID NO: 1255595 - RNA, 24 nt, Human
ucccgaguagcugggacuacaggc

SEQ ID NO: 1255596 - RNA, 23 nt, Human
ucccucucguaauguaaccucag

SEQ ID NO: 1255597 - RNA, 24 nt, Human
uccgccuccuggguucaagcaauu

SEQ ID NO: 1255598 - RNA, 21 nt, Human
uccuggguucaagcaauucuc

SEQ ID NO: 1255599 - RNA, 24 nt, Human
uccuggguucaagcaauucuccug

SEQ ID NO: 1255600 - RNA, 24 nt, Human
ucgcccaggcuggagugcagugac

SEQ ID NO: 1255601 - RNA, 24 nt, Human
ucuagcucuuguugccuaggcugg

SEQ ID NO: 1255602 - RNA, 23 nt, Human
ucucacucugucgcccaggcugg

SEQ ID NO: 1255603 - RNA, 24 nt, Human
ucucacucugucgcccaggcugga

SEQ ID NO: 1255604 - RNA, 26 nt, Human
ucucacucugucgcccaggcuggagu

SEQ ID NO: 1255605 - RNA, 27 nt, Human
ucucacucugucgcccaggcuggagug

SEQ ID NO: 1255606 - RNA, 24 nt, Human
ucuccugccccagccuccagagua

SEQ ID NO: 1255607 - RNA, 24 nt, Human
ucuccugccucagccucccgagua

SEQ ID NO: 1255608 - RNA, 21 nt, Human
ucucugacugaagcauauggc

SEQ ID NO: 1255609 - RNA, 24 nt, Human
ucugucgcccaggcuggagugcag

SEQ ID NO: 1255610 - RNA, 19 nt, Human
ucuuguugccuaggcugga

SEQ ID NO: 1255611 - RNA, 22 nt, Human
ugacaggugcucccugcaaggg

SEQ ID NO: 1255612 - RNA, 21 nt, Human
ugaccaaagcacaaagggugg

SEQ ID NO: 1255613 - RNA, 20 nt, Human
ugaccucaggugauccaccc

SEQ ID NO: 1255614 - RNA, 22 nt, Human
ugaccucaggugauccacccgc

SEQ ID NO: 1255615 - RNA, 23 nt, Human
ugaccucaggugauccacccgcu

SEQ ID NO: 1255616 - RNA, 24 nt, Human
ugaccucaggugauccacccgcuu

SEQ ID NO: 1255617 - RNA, 23 nt, Human
ugaccuugugauccacccgccuc

SEQ ID NO: 1255618 - RNA, 23 nt, Human
ugagacagagucuagcucuuguu

SEQ ID NO: 1255619 - RNA, 21 nt, Human
ugaguuuggaauccugggaga

SEQ ID NO: 1255620 - RNA, 20 nt, Human
ugcacaaagguucugcgggg

SEQ ID NO: 1255621 - RNA, 21 nt, Human
ugcacaaagguucugcggggu

SEQ ID NO: 1255622 - RNA, 31 nt, Human
ugcacaaccacacacacacacacacacacag

SEQ ID NO: 1255623 - RNA, 22 nt, Human
ugcagugacacgaucucggcuc

SEQ ID NO: 1255624 - RNA, 23 nt, Human
ugcccaucucugacugaagcaua

SEQ ID NO: 1255625 - RNA, 24 nt, Human
ugccccagccuccagaguagcugg

SEQ ID NO: 1255626 - RNA, 20 nt, Human
ugccuaggcuggagugcaau

SEQ ID NO: 1255627 - RNA, 21 nt, Human
ugccuaggcuggagugcaaug

SEQ ID NO: 1255628 - RNA, 24 nt, Human
ugccuaggcuggagugcaauggca

SEQ ID NO: 1255629 - RNA, 24 nt, Human
ugccucagccucccgaguagcugg

SEQ ID NO: 1255630 - RNA, 25 nt, Human
ugccuccaagcucacgguggggcuu

SEQ ID NO: 1255631 - RNA, 18 nt, Human
ugccuggaugacaggugc

SEQ ID NO: 1255632 - RNA, 18 nt, Human
ugcggaggugaggaaggc

SEQ ID NO: 1255633 - RNA, 24 nt, Human
ugcugggauuacagacgugaguca

SEQ ID NO: 1255634 - RNA, 24 nt, Human
ugcuugugugugugugugugugug

SEQ ID NO: 1255635 - RNA, 24 nt, Human
uggaagauguggcacaaaaugcuu

SEQ ID NO: 1255636 - RNA, 22 nt, Human
uggaggggagagcacaggagag

SEQ ID NO: 1255637 - RNA, 23 nt, Human
uggaggguaucuuuuuuuguggu

SEQ ID NO: 1255638 - RNA, 24 nt, Human
uggagucucacucugucgcccagg

SEQ ID NO: 1255639 - RNA, 19 nt, Human
uggagugcaauggcaugau

SEQ ID NO: 1255640 - RNA, 24 nt, Human
uggagugcaauggcaugaucucgg

SEQ ID NO: 1255641 - RNA, 23 nt, Human
uggagugcagugacacgaucucg

SEQ ID NO: 1255642 - RNA, 24 nt, Human
uggagugcagugacacgaucucgg

SEQ ID NO: 1255643 - RNA, 19 nt, Human
uggccagcagagcuugugu

SEQ ID NO: 1255644 - RNA, 24 nt, Human
uggccaggcugguaucaaacuccu

SEQ ID NO: 1255645 - RNA, 21 nt, Human
ugggacuacaggcgcccgcca

SEQ ID NO: 1255646 - RNA, 22 nt, Human
ugggacuacaggcgcccgccac

SEQ ID NO: 1255647 - RNA, 24 nt, Human
ugggacuacaggcgcccgccacca

SEQ ID NO: 1255648 - RNA, 21 nt, Human
ugggagagagggcagggcagg

SEQ ID NO: 1255649 - RNA, 21 nt, Human
ugggaguccccuucucccuuc

SEQ ID NO: 1255650 - RNA, 18 nt, Human
ugggauuacagacgugag

SEQ ID NO: 1255651 - RNA, 18 nt, Human
ugggauuacagacgugag

SEQ ID NO: 1255652 - RNA, 21 nt, Human
ugggauuacagacgugaguca

SEQ ID NO: 1255653 - RNA, 22 nt, Human
ugggauuacagacgugagucac

SEQ ID NO: 1255654 - RNA, 23 nt, Human
ugggauuacagacgugagucacc

SEQ ID NO: 1255655 - RNA, 24 nt, Human
ugggauuacagacgugagucaccg

SEQ ID NO: 1255656 - RNA, 18 nt, Human
ugggauuacaggugugug

SEQ ID NO: 1255657 - RNA, 19 nt, Human
ugggauuacaggugugugc

SEQ ID NO: 1255658 - RNA, 21 nt, Human
ugggauuacaggugugugcca

SEQ ID NO: 1255659 - RNA, 22 nt, Human
ugggauuacaggugugugccac

SEQ ID NO: 1255660 - RNA, 24 nt, Human
ugggauuacaggugugugccacca

SEQ ID NO: 1255661 - RNA, 18 nt, Human
ugggauuauaggcaugag

SEQ ID NO: 1255662 - RNA, 19 nt, Human
ugggauuauaggcaugagc

SEQ ID NO: 1255663 - RNA, 21 nt, Human
ugggauuauaggcaugagcca

SEQ ID NO: 1255664 - RNA, 22 nt, Human
ugggauuauaggcaugagccac

SEQ ID NO: 1255665 - RNA, 23 nt, Human
ugggauuauaggcaugagccacc

SEQ ID NO: 1255666 - RNA, 24 nt, Human
ugggauuauaggcaugagccaccg

SEQ ID NO: 1255667 - RNA, 24 nt, Human
ugggccucaguuugcccaucucug

SEQ ID NO: 1255668 - RNA, 24 nt, Human
ugggguuucaccauguuggccagg

SEQ ID NO: 1255669 - RNA, 21 nt, Human
uggguucaagcaauucuccug

SEQ ID NO: 1255670 - RNA, 23 nt, Human
uggguucaagcaauucuccugcc

SEQ ID NO: 1255671 - RNA, 23 nt, Human
ugguggacgugggaagcaggacg

SEQ ID NO: 1255672 - RNA, 21 nt, Human
ugguuguucugucaagaagaa

SEQ ID NO: 1255673 - RNA, 18 nt, Human
ugugaauaagaaggcaga

SEQ ID NO: 1255674 - RNA, 24 nt, Human
ugugauccacccgccucagccucc

SEQ ID NO: 1255675 - RNA, 20 nt, Human
ugugugccaccacacccagc

SEQ ID NO: 1255676 - RNA, 18 nt, Human
ugugugugugugugugug

SEQ ID NO: 1255677 - RNA, 18 nt, Human
ugugugugugugugugug

SEQ ID NO: 1255678 - RNA, 18 nt, Human
ugugugugugugugugug

SEQ ID NO: 1255679 - RNA, 18 nt, Human
ugugugugugugugugug

SEQ ID NO: 1255680 - RNA, 18 nt, Human
ugugugugugugugugug

SEQ ID NO: 1255681 - RNA, 18 nt, Human
ugugugugugugugugug

SEQ ID NO: 1255682 - RNA, 18 nt, Human
ugugugugugugugugug

SEQ ID NO: 1255683 - RNA, 21 nt, Human
ugugugugugugugugugugu

SEQ ID NO: 1255684 - RNA, 21 nt, Human
ugugugugugugugugugugu

SEQ ID NO: 1255685 - RNA, 21 nt, Human
ugugugugugugugugugugu

SEQ ID NO: 1255686 - RNA, 21 nt, Human
ugugugugugugugugugugu

SEQ ID NO: 1255687 - RNA, 21 nt, Human
ugugugugugugugugugugu

SEQ ID NO: 1255688 - RNA, 21 nt, Human
ugugugugugugugugugugu

SEQ ID NO: 1255689 - RNA, 21 nt, Human
ugugugugugugugugugugu

SEQ ID NO: 1255690 - RNA, 21 nt, Human
ugugugugugugugugugugu

SEQ ID NO: 1255691 - RNA, 21 nt, Human
ugugugugugugugugugugu

SEQ ID NO: 1255692 - RNA, 21 nt, Human
ugugugugugugugugugugu

SEQ ID NO: 1255693 - RNA, 22 nt, Human
ugugugugugugugugugugug

SEQ ID NO: 1255694 - RNA, 22 nt, Human
ugugugugugugugugugugug

SEQ ID NO: 1255695 - RNA, 24 nt, Human
uguuuuguauuucuaguagagaug

SEQ ID NO: 1255696 - RNA, 21 nt, Human
uuaguagagacagguuucacc

SEQ ID NO: 1255697 - RNA, 23 nt, Human
uuaguagagacagguuucaccgu

SEQ ID NO: 1255698 - RNA, 24 nt, Human
uuaguagagacagguuucaccgug

SEQ ID NO: 1255699 - RNA, 24 nt, Human
uucaagcaauucuccugccccagc

SEQ ID NO: 1255700 - RNA, 23 nt, Human
uuccacacugccccaggcagcca

SEQ ID NO: 1255701 - RNA, 19 nt, Human
uucggccucccaaggugcu

SEQ ID NO: 1255702 - RNA, 23 nt, Human
uugggaagagcugccuggaugac

SEQ ID NO: 1255703 - RNA, 18 nt, Human
uugguauuuuuaguagag

SEQ ID NO: 1255704 - RNA, 25 nt, Human
uuuaagaugaagacucuuccauccu

SEQ ID NO: 1255705 - RNA, 20 nt, Human
uuuaguacgaaguggaccau

SEQ ID NO: 1255706 - RNA, 24 nt, Human
uuuaguagagacagguuucaccgu

SEQ ID NO: 1255707 - RNA, 24 nt, Human
uuucaccauguuggccaggcuggu

SEQ ID NO: 1255708 - RNA, 19 nt, Human
uuucaccguguuagccagg

SEQ ID NO: 1255709 - RNA, 24 nt, Human
uuucuaguagagaugggguuucac

SEQ ID NO: 1255710 - RNA, 19 nt, Human
uuuugugguggggcugaag

SEQ ID NO: 1255711 - RNA, 24 nt, Human
uuuuugguauuuuuaguagagaca

SEQ ID NO: 1255712 - RNA, 19 nt, Human
aaaaaaaccaucauccgag

SEQ ID NO: 1255713 - RNA, 22 nt, Human
aaaaacuuuucuuuccugcuaa

SEQ ID NO: 1255714 - RNA, 19 nt, Human
aaacagcagaaccaggucu

SEQ ID NO: 1255715 - RNA, 25 nt, Human
aaacagcagaaccaggucucaaacc

SEQ ID NO: 1255716 - RNA, 21 nt, Human
aaaggagcccccugugccccu

SEQ ID NO: 1255717 - RNA, 19 nt, Human
aaaggccuagaaacugcau

SEQ ID NO: 1255718 - RNA, 25 nt, Human
aacaagacaacuucucccgggacag

SEQ ID NO: 1255719 - RNA, 21 nt, Human
aacagaugcacccccagcaca

SEQ ID NO: 1255720 - RNA, 24 nt, Human
aagcacuucacggacaccuccuca

SEQ ID NO: 1255721 - RNA, 22 nt, Human
aagcagcccuaggaggcagggu

SEQ ID NO: 1255722 - RNA, 21 nt, Human
aagccauggcaaggggaagga

SEQ ID NO: 1255723 - RNA, 21 nt, Human
aaggagaaaaaaaaaccauca

SEQ ID NO: 1255724 - RNA, 18 nt, Human
acacacccuccaggaagc

SEQ ID NO: 1255725 - RNA, 19 nt, Human
acaggaucaggccgcauag

SEQ ID NO: 1255726 - RNA, 21 nt, Human
accacaggagguauagaagac

SEQ ID NO: 1255727 - RNA, 22 nt, Human
accaggucucaaacccaggagc

SEQ ID NO: 1255728 - RNA, 21 nt, Human
acccagugcuguagcugggua

SEQ ID NO: 1255729 - RNA, 25 nt, Human
acccuccaggaagccugccuucucu

SEQ ID NO: 1255730 - RNA, 18 nt, Human
acugcucugagagugggc

SEQ ID NO: 1255731 - RNA, 19 nt, Human
agaaaaaaaaaccaucauc

SEQ ID NO: 1255732 - RNA, 23 nt, Human
agaaaaaaaaaccaucauccgag

SEQ ID NO: 1255733 - RNA, 20 nt, Human
agaaaucacccaccccucgc

SEQ ID NO: 1255734 - RNA, 18 nt, Human
agacaggaucaggccgca

SEQ ID NO: 1255735 - RNA, 22 nt, Human
agagaagaggagagagcaccac

SEQ ID NO: 1255736 - RNA, 22 nt, Human
agauaaugcuuugggccccuuc

SEQ ID NO: 1255737 - RNA, 22 nt, Human
agcagcacucuaugaaaaggau

SEQ ID NO: 1255738 - RNA, 20 nt, Human
agcauggcacaggugcaggu

SEQ ID NO: 1255739 - RNA, 21 nt, Human
agccacucugacauucuggcc

SEQ ID NO: 1255740 - RNA, 26 nt, Human
agcccagggccaagcacuucacggaa

SEQ ID NO: 1255741 - RNA, 25 nt, Human
agcccagggccaagcacuucacggg

SEQ ID NO: 1255742 - RNA, 25 nt, Human
aggagaaaaaaaaaccaucauccga

SEQ ID NO: 1255743 - RNA, 18 nt, Human
aggagaaaacugcucuga

SEQ ID NO: 1255744 - RNA, 20 nt, Human
aggcaagagccauaagcaug

SEQ ID NO: 1255745 - RNA, 19 nt, Human
aggcaggcagagagcuggg

SEQ ID NO: 1255746 - RNA, 22 nt, Human
aggcucccccaaacucaggacc

SEQ ID NO: 1255747 - RNA, 23 nt, Human
aggcugugaccacccagugcugu

SEQ ID NO: 1255748 - RNA, 18 nt, Human
aggugaaggccacagagc

SEQ ID NO: 1255749 - RNA, 20 nt, Human
aggugaguggccucgggggg

SEQ ID NO: 1255750 - RNA, 21 nt, Human
auccuaagguggauacugagg

SEQ ID NO: 1255751 - RNA, 26 nt, Human
augcacccccagcacagccaguggga

SEQ ID NO: 1255752 - RNA, 18 nt, Human
augguggcugcucugggu

SEQ ID NO: 1255753 - RNA, 23 nt, Human
caaacucaggacccaggagccaa

SEQ ID NO: 1255754 - RNA, 23 nt, Human
caacgggauggggcccgccucuc

SEQ ID NO: 1255755 - RNA, 19 nt, Human
caagagcuaagaaacacgc

SEQ ID NO: 1255756 - RNA, 23 nt, Human
caagagucacuacaguaagagga

SEQ ID NO: 1255757 - RNA, 23 nt, Human
cacccaguuaguggcugagccaa

SEQ ID NO: 1255758 - RNA, 20 nt, Human
cacccuccagccaccuuccc

SEQ ID NO: 1255759 - RNA, 21 nt, Human
cacguuguugcaacauggugg

SEQ ID NO: 1255760 - RNA, 21 nt, Human
cacuucacggacaccuccuca

SEQ ID NO: 1255761 - RNA, 19 nt, Human
cagaaccaggucucaaacc

SEQ ID NO: 1255762 - RNA, 23 nt, Human
cagcugccggccuuccagucacu

SEQ ID NO: 1255763 - RNA, 21 nt, Human
caggacccaggagccaauggu

SEQ ID NO: 1255764 - RNA, 21 nt, Human
cagggacacuuucagagccuc

SEQ ID NO: 1255765 - RNA, 25 nt, Human
cagggccaagcacuucacggacacc

SEQ ID NO: 1255766 - RNA, 18 nt, Human
caggucucaaacccagga

SEQ ID NO: 1255767 - RNA, 23 nt, Human
caggugcaggugcaggggugaca

SEQ ID NO: 1255768 - RNA, 22 nt, Human
ccaaaucuuccccaacaccuug

SEQ ID NO: 1255769 - RNA, 26 nt, Human
ccaaugaccaggaauucugcugaagc

SEQ ID NO: 1255770 - RNA, 24 nt, Human
ccaaugguccuucucuggccccuc

SEQ ID NO: 1255771 - RNA, 21 nt, Human
ccacccuccagccaccuuccc

SEQ ID NO: 1255772 - RNA, 21 nt, Human
ccaccuucccugucuggaaaa

SEQ ID NO: 1255773 - RNA, 18 nt, Human
ccagcaucauuuucugag

SEQ ID NO: 1255774 - RNA, 23 nt, Human
cccaacaggucaauccuuacaga

SEQ ID NO: 1255775 - RNA, 20 nt, Human
cccaaccccuguccuaaggc

SEQ ID NO: 1255776 - RNA, 23 nt, Human
cccacaaaaccagauaaugcuuu

SEQ ID NO: 1255777 - RNA, 20 nt, Human
cccagcacagccagugggac

SEQ ID NO: 1255778 - RNA, 20 nt, Human
ccccaucugagugucucucu

SEQ ID NO: 1255779 - RNA, 22 nt, Human
cccccaaacucaggacccagga

SEQ ID NO: 1255780 - RNA, 23 nt, Human
cccccaaacucaggacccaggag

SEQ ID NO: 1255781 - RNA, 21 nt, Human
cccccccucucucuccccucc

SEQ ID NO: 1255782 - RNA, 24 nt, Human
cccccucucucuccccuccugaac

SEQ ID NO: 1255783 - RNA, 20 nt, Human
ccccgcccauccuaaggugg

SEQ ID NO: 1255784 - RNA, 26 nt, Human
ccccugaccccccccccucucucucc

SEQ ID NO: 1255785 - RNA, 21 nt, Human
cccuccagccaccuucccugu

SEQ ID NO: 1255786 - RNA, 22 nt, Human
cccugcucaaaaaggggcuugg

SEQ ID NO: 1255787 - RNA, 18 nt, Human
ccgaacuucgcccugaac

SEQ ID NO: 1255788 - RNA, 24 nt, Human
ccgagauugccuccuuuggcgugg

SEQ ID NO: 1255789 - RNA, 19 nt, Human
ccuccucaagucccucaag

SEQ ID NO: 1255790 - RNA, 24 nt, Human
ccugaccccccccccucucucucc

SEQ ID NO: 1255791 - RNA, 19 nt, Human
ccugcuaaaaccucacuuc

SEQ ID NO: 1255792 - RNA, 21 nt, Human
ccugcuaaaaccucacuuccc

SEQ ID NO: 1255793 - RNA, 22 nt, Human
ccugcuaaaaccucacuuccca

SEQ ID NO: 1255794 - RNA, 20 nt, Human
ccuuaccuggguacccagau

SEQ ID NO: 1255795 - RNA, 23 nt, Human
ccuuauagacuggaaacagcugc

SEQ ID NO: 1255796 - RNA, 20 nt, Human
ccuuggggcaaacacacgca

SEQ ID NO: 1255797 - RNA, 22 nt, Human
cguucaauguugccaacgucac

SEQ ID NO: 1255798 - RNA, 19 nt, Human
cuaaagccgcugugaaccc

SEQ ID NO: 1255799 - RNA, 20 nt, Human
cuacaguaagaggaacugcu

SEQ ID NO: 1255800 - RNA, 19 nt, Human
cucacggccacaugacauc

SEQ ID NO: 1255801 - RNA, 19 nt, Human
cucacggccacaugacauc

SEQ ID NO: 1255802 - RNA, 22 nt, Human
cuccucaagucccucaagcagc

SEQ ID NO: 1255803 - RNA, 22 nt, Human
cucguccugacauccaggggca

SEQ ID NO: 1255804 - RNA, 18 nt, Human
cucugagagugggcaugc

SEQ ID NO: 1255805 - RNA, 21 nt, Human
cucuugcccagagguccuguu

SEQ ID NO: 1255806 - RNA, 22 nt, Human
cugaacucagaauaccuccacu

SEQ ID NO: 1255807 - RNA, 19 nt, Human
cugagaggagcuaggagga

SEQ ID NO: 1255808 - RNA, 23 nt, Human
cugcauuccaaggcugaacuugg

SEQ ID NO: 1255809 - RNA, 18 nt, Human
cuggagcacaugugcccc

SEQ ID NO: 1255810 - RNA, 23 nt, Human
cugguuuccauaguugggcugug

SEQ ID NO: 1255811 - RNA, 25 nt, Human
cuguggugggagagaaaggagaggg

SEQ ID NO: 1255812 - RNA, 25 nt, Human
cuuccccaaaucuuccccaacaccu

SEQ ID NO: 1255813 - RNA, 21 nt, Human
cuuggcugagcuggcugugca

SEQ ID NO: 1255814 - RNA, 20 nt, Human
gaacacagucaacaggaugc

SEQ ID NO: 1255815 - RNA, 18 nt, Human
gagaaaaaaaaaccauca

SEQ ID NO: 1255816 - RNA, 23 nt, Human
gagagcaccacccuccagccacc

SEQ ID NO: 1255817 - RNA, 25 nt, Human
gagcaaccagggcuucacgaggggc

SEQ ID NO: 1255818 - RNA, 18 nt, Human
gagcaccacccuccagcc

SEQ ID NO: 1255819 - RNA, 20 nt, Human
gaggagaaaacugcucugag

SEQ ID NO: 1255820 - RNA, 21 nt, Human
gaucauaggccaccuccccuu

SEQ ID NO: 1255821 - RNA, 19 nt, Human
gccaccgaacuucgcccug

SEQ ID NO: 1255822 - RNA, 20 nt, Human
gccaccgaacuucgcccuga

SEQ ID NO: 1255823 - RNA, 25 nt, Human
gccaccuucccugucuggaaaauca

SEQ ID NO: 1255824 - RNA, 19 nt, Human
gccuaccugcccaccaagc

SEQ ID NO: 1255825 - RNA, 22 nt, Human
gccuggcuggguggggaacugg

SEQ ID NO: 1255826 - RNA, 26 nt, Human
gcuguggugggagagaaaggagaggg

SEQ ID NO: 1255827 - RNA, 20 nt, Human
gcuguuucccacccacaaaa

SEQ ID NO: 1255828 - RNA, 19 nt, Human
ggaaacagcugccggccuu

SEQ ID NO: 1255829 - RNA, 20 nt, Human
ggagaaaaaaaaaccaucau

SEQ ID NO: 1255830 - RNA, 18 nt, Human
ggagggaggcaggcagag

SEQ ID NO: 1255831 - RNA, 18 nt, Human
ggcaugcaagcugggagg

SEQ ID NO: 1255832 - RNA, 25 nt, Human
ggccaagcacuucacggacaccucc

SEQ ID NO: 1255833 - RNA, 24 nt, Human
ggccucgggggguugggggcuggg

SEQ ID NO: 1255834 - RNA, 18 nt, Human
ggcugcucugggugacag

SEQ ID NO: 1255835 - RNA, 18 nt, Human
gggaagcucucauguggg

SEQ ID NO: 1255836 - RNA, 22 nt, Human
gggacagacaauuuagagaaga

SEQ ID NO: 1255837 - RNA, 19 nt, Human
gggcacacccugcucaaaa

SEQ ID NO: 1255838 - RNA, 19 nt, Human
gggcaggagguguggguuu

SEQ ID NO: 1255839 - RNA, 19 nt, Human
ggugacuggcucgaggucu

SEQ ID NO: 1255840 - RNA, 19 nt, Human
gguggcugugccccagugc

SEQ ID NO: 1255841 - RNA, 21 nt, Human
ggugggagagaaaggagaggg

SEQ ID NO: 1255842 - RNA, 19 nt, Human
gguugggggcuggguacug

SEQ ID NO: 1255843 - RNA, 19 nt, Human
guggaagaaucuacaacuc

SEQ ID NO: 1255844 - RNA, 18 nt, Human
gugggugguggcgaggcu

SEQ ID NO: 1255845 - RNA, 21 nt, Human
uaaaaacuuuucuuuccugcu

SEQ ID NO: 1255846 - RNA, 23 nt, Human
uaaacuaaauccuuaccugggua

SEQ ID NO: 1255847 - RNA, 21 nt, Human
uacagugaccaaguguggaug

SEQ ID NO: 1255848 - RNA, 24 nt, Human
uacagugaccaaguguggauggaa

SEQ ID NO: 1255849 - RNA, 18 nt, Human
uaccccaaugugacagag

SEQ ID NO: 1255850 - RNA, 25 nt, Human
uagccaggucaccugaacaacggga

SEQ ID NO: 1255851 - RNA, 24 nt, Human
uaggagggaaggggccccgugggu

SEQ ID NO: 1255852 - RNA, 18 nt, Human
uaggcugugaccacccag

SEQ ID NO: 1255853 - RNA, 19 nt, Human
ucaagcagcccuaggaggc

SEQ ID NO: 1255854 - RNA, 18 nt, Human
ucaaggaacuuaaggucu

SEQ ID NO: 1255855 - RNA, 18 nt, Human
ucacauagccaggucacc

SEQ ID NO: 1255856 - RNA, 18 nt, Human
uccauaguugggcugugg

SEQ ID NO: 1255857 - RNA, 22 nt, Human
ucccccaaacucaggacccagg

SEQ ID NO: 1255858 - RNA, 24 nt, Human
uccuggugccuggguuagggcugu

SEQ ID NO: 1255859 - RNA, 19 nt, Human
uccuguugguggcugugcc

SEQ ID NO: 1255860 - RNA, 20 nt, Human
uccuuacagacuggaaacac

SEQ ID NO: 1255861 - RNA, 22 nt, Human
ucguacuccccucagagcagaa

SEQ ID NO: 1255862 - RNA, 19 nt, Human
ucucaaacccaggagcacc

SEQ ID NO: 1255863 - RNA, 22 nt, Human
ugacaccaaugaccaggaauuc

SEQ ID NO: 1255864 - RNA, 19 nt, Human
ugacagaggaacacaguca

SEQ ID NO: 1255865 - RNA, 23 nt, Human
ugaccaaguguggauggaaacaa

SEQ ID NO: 1255866 - RNA, 21 nt, Human
ugacccaaccccuguccuaag

SEQ ID NO: 1255867 - RNA, 27 nt, Human
ugaccccccccccucucucuccccucc

SEQ ID NO: 1255868 - RNA, 18 nt, Human
ugacucauauugaguucu

SEQ ID NO: 1255869 - RNA, 23 nt, Human
ugagagugggcaugcaagcuggg

SEQ ID NO: 1255870 - RNA, 23 nt, Human
ugccaagccuccccgcccauccu

SEQ ID NO: 1255871 - RNA, 25 nt, Human
ugccaggagaggugccaauagcuug

SEQ ID NO: 1255872 - RNA, 24 nt, Human
ugcccaccaagcuagagaagagag

SEQ ID NO: 1255873 - RNA, 22 nt, Human
ugccccugaacuccagggacac

SEQ ID NO: 1255874 - RNA, 20 nt, Human
ugccuaccugcccaccaagc

SEQ ID NO: 1255875 - RNA, 19 nt, Human
ugccuccuuuggcgugggc

SEQ ID NO: 1255876 - RNA, 18 nt, Human
ugcuguagcuggguagca

SEQ ID NO: 1255877 - RNA, 18 nt, Human
ugcuuugggccccuucuc

SEQ ID NO: 1255878 - RNA, 20 nt, Human
ugcuuugggccccuucucgu

SEQ ID NO: 1255879 - RNA, 23 nt, Human
uggaaacaagagcuaagaaacac

SEQ ID NO: 1255880 - RNA, 20 nt, Human
uggauggaaacaagagcuaa

SEQ ID NO: 1255881 - RNA, 19 nt, Human
uggcaaggggaaggaaggc

SEQ ID NO: 1255882 - RNA, 21 nt, Human
uggccuggcuggguggggaac

SEQ ID NO: 1255883 - RNA, 23 nt, Human
uggccuggcuggguggggaacuu

SEQ ID NO: 1255884 - RNA, 23 nt, Human
uggcugagaaaaggccuagaaac

SEQ ID NO: 1255885 - RNA, 21 nt, Human
uggcugcucugggugacagug

SEQ ID NO: 1255886 - RNA, 19 nt, Human
uggcuggguggggaacugg

SEQ ID NO: 1255887 - RNA, 21 nt, Human
ugggaccagaugacccaaccc

SEQ ID NO: 1255888 - RNA, 22 nt, Human
ugggaccagaugacccaacccc

SEQ ID NO: 1255889 - RNA, 19 nt, Human
ugggcaggaggaacuaaac

SEQ ID NO: 1255890 - RNA, 25 nt, Human
uggggccugagugccaggagaggug

SEQ ID NO: 1255891 - RNA, 18 nt, Human
uggguacuggccuggcug

SEQ ID NO: 1255892 - RNA, 21 nt, Human
ugguccuucucuggccccucc

SEQ ID NO: 1255893 - RNA, 24 nt, Human
uggugaaggaacaagacaacuucu

SEQ ID NO: 1255894 - RNA, 23 nt, Human
uguccuggguaguugggggaggu

SEQ ID NO: 1255895 - RNA, 24 nt, Human
uguccuggguaguugggggaggug

SEQ ID NO: 1255896 - RNA, 21 nt, Human
ugugacagaggaacacaguca

SEQ ID NO: 1255897 - RNA, 23 nt, Human
ugugcuccccaauguguacccca

SEQ ID NO: 1255898 - RNA, 18 nt, Human
uguggugggagagaaagg

SEQ ID NO: 1255899 - RNA, 19 nt, Human
ugugucucuccuggugccu

SEQ ID NO: 1255900 - RNA, 23 nt, Human
uguugccaagccuccccgcccau

SEQ ID NO: 1255901 - RNA, 19 nt, Human
uucucuggccccucccuga

SEQ ID NO: 1255902 - RNA, 22 nt, Human
uucugggccaucgacaaccugc

SEQ ID NO: 1255903 - RNA, 21 nt, Human
uuucccacccacaaaaccaga

SEQ ID NO: 1255904 - RNA, 23 nt, Human
aaaaacccaauaacgggaaacag

SEQ ID NO: 1255905 - RNA, 21 nt, Human
aaaacaaacaaaaaccaacca

SEQ ID NO: 1255906 - RNA, 28 nt, Human
aaaacaaacaaaaaccaaccaaaaaccc

SEQ ID NO: 1255907 - RNA, 22 nt, Human
aaaaugccucucuuuuuguuug

SEQ ID NO: 1255908 - RNA, 22 nt, Human
aaacaaaaaccaaccaaaaacc

SEQ ID NO: 1255909 - RNA, 24 nt, Human
aaacccaauaacgggaaacagaaa

SEQ ID NO: 1255910 - RNA, 21 nt, Human
aaacuccccaaauaaagcucc

SEQ ID NO: 1255911 - RNA, 19 nt, Human
aaagcauaguaaaaaacaa

SEQ ID NO: 1255912 - RNA, 18 nt, Human
aaagcgggaaccccagcc

SEQ ID NO: 1255913 - RNA, 20 nt, Human
aaauacaggacaagaacaua

SEQ ID NO: 1255914 - RNA, 26 nt, Human
aacaaacaaaaaccaaccaaaaaccc

SEQ ID NO: 1255915 - RNA, 23 nt, Human
aaccagaagguuggcaaaauacu

SEQ ID NO: 1255916 - RNA, 23 nt, Human
aacccaauaacgggaaacagaaa

SEQ ID NO: 1255917 - RNA, 21 nt, Human
aaccccagcucaccucaacac

SEQ ID NO: 1255918 - RNA, 18 nt, Human
aagaagaagaaggugcaa

SEQ ID NO: 1255919 - RNA, 21 nt, Human
aagaagaagaaggugcaagag

SEQ ID NO: 1255920 - RNA, 22 nt, Human
aagaagaagaaggugcaagaga

SEQ ID NO: 1255921 - RNA, 21 nt, Human
aagcagggcuggggcugcagg

SEQ ID NO: 1255922 - RNA, 23 nt, Human
aagcccgcugccacagcccccag

SEQ ID NO: 1255923 - RNA, 18 nt, Human
aagguucugggugggggc

SEQ ID NO: 1255924 - RNA, 18 nt, Human
aauggcaccuggccugca

SEQ ID NO: 1255925 - RNA, 23 nt, Human
acacugggcccagcuaucuugau

SEQ ID NO: 1255926 - RNA, 22 nt, Human
acacuguuugucaacacacaca

SEQ ID NO: 1255927 - RNA, 26 nt, Human
acagaccaaagcauaguaaaaaacaa

SEQ ID NO: 1255928 - RNA, 24 nt, Human
acaggacaagaacauauuaauaag

SEQ ID NO: 1255929 - RNA, 21 nt, Human
accccagcucaccucaacacc

SEQ ID NO: 1255930 - RNA, 19 nt, Human
accccaugcacagggcgac

SEQ ID NO: 1255931 - RNA, 21 nt, Human
acgccgcccaccacugcgaac

SEQ ID NO: 1255932 - RNA, 23 nt, Human
acgcugggcuuccacacugggcc

SEQ ID NO: 1255933 - RNA, 24 nt, Human
acggcaagguuggcaacagagaag

SEQ ID NO: 1255934 - RNA, 19 nt, Human
agaacaacagagcugaagg

SEQ ID NO: 1255935 - RNA, 19 nt, Human
agacaauauuuccuucuga

SEQ ID NO: 1255936 - RNA, 20 nt, Human
agacaauauuuccuucugaa

SEQ ID NO: 1255937 - RNA, 20 nt, Human
agaggcuauauuucuauagg

SEQ ID NO: 1255938 - RNA, 19 nt, Human
agaggggaaggaaagggag

SEQ ID NO: 1255939 - RNA, 19 nt, Human
agagugggugggaggcaga

SEQ ID NO: 1255940 - RNA, 24 nt, Human
agauucuccaggaauaaggcacac

SEQ ID NO: 1255941 - RNA, 20 nt, Human
agccaggacagugggcuccc

SEQ ID NO: 1255942 - RNA, 19 nt, Human
agcuggcaggccccaggca

SEQ ID NO: 1255943 - RNA, 23 nt, Human
agcuggcaggccccaggcauccu

SEQ ID NO: 1255944 - RNA, 24 nt, Human
aggcccgccugcaaaaagccccag

SEQ ID NO: 1255945 - RNA, 19 nt, Human
agggcuggggcugcagggg

SEQ ID NO: 1255946 - RNA, 23 nt, Human
aggucccccauggccgggucccu

SEQ ID NO: 1255947 - RNA, 23 nt, Human
aguaaaaaacaaacaaaaaccaa

SEQ ID NO: 1255948 - RNA, 21 nt, Human
aguggcuaccugcugaacagc

SEQ ID NO: 1255949 - RNA, 24 nt, Human
aguggcuuuccauacagggcaaac

SEQ ID NO: 1255950 - RNA, 23 nt, Human
auaagaagaagaaggugcaagag

SEQ ID NO: 1255951 - RNA, 22 nt, Human
caaaaaccaaccaaaaacccaa

SEQ ID NO: 1255952 - RNA, 23 nt, Human
caaaaaccaaccaaaaacccaau

SEQ ID NO: 1255953 - RNA, 18 nt, Human
caaaauacuuccagaaau

SEQ ID NO: 1255954 - RNA, 19 nt, Human
caaacaaaaaccaaccaaa

SEQ ID NO: 1255955 - RNA, 21 nt, Human
caaacaaaaaccaaccaaaaa

SEQ ID NO: 1255956 - RNA, 25 nt, Human
caaacaaaaaccaaccaaaaaccca

SEQ ID NO: 1255957 - RNA, 20 nt, Human
caaagcauaguaaaaaacaa

SEQ ID NO: 1255958 - RNA, 19 nt, Human
caaccaaaaacccaauaac

SEQ ID NO: 1255959 - RNA, 18 nt, Human
caaccccagcucaccuca

SEQ ID NO: 1255960 - RNA, 24 nt, Human
caacuagaucgcuagaucuaccaa

SEQ ID NO: 1255961 - RNA, 22 nt, Human
caacugcaagcgauugucccuu

SEQ ID NO: 1255962 - RNA, 21 nt, Human
caagacaaggacgcuaagagc

SEQ ID NO: 1255963 - RNA, 23 nt, Human
caagagaguuccccaguucagcc

SEQ ID NO: 1255964 - RNA, 25 nt, Human
cacacacaagacaaggacgcuaaga

SEQ ID NO: 1255965 - RNA, 21 nt, Human
caccaggacgcaucucuccag

SEQ ID NO: 1255966 - RNA, 18 nt, Human
caccucaacaccuuggag

SEQ ID NO: 1255967 - RNA, 25 nt, Human
caccucaacaccuuggagaagacgg

SEQ ID NO: 1255968 - RNA, 23 nt, Human
cacgaugcgggguaccuggcacc

SEQ ID NO: 1255969 - RNA, 24 nt, Human
cacuggcaaggucacuuuggggug

SEQ ID NO: 1255970 - RNA, 18 nt, Human
cacugggcccagcuaucu

SEQ ID NO: 1255971 - RNA, 24 nt, Human
cagaaaaacaacaauauggcuuaa

SEQ ID NO: 1255972 - RNA, 20 nt, Human
cagaagccugggccggggcc

SEQ ID NO: 1255973 - RNA, 26 nt, Human
cagaagccugggccggggccaacccc

SEQ ID NO: 1255974 - RNA, 21 nt, Human
cagccaggacagugggcuccc

SEQ ID NO: 1255975 - RNA, 21 nt, Human
cagcccccaggggaccgcuug

SEQ ID NO: 1255976 - RNA, 21 nt, Human
cagcggaggggcgggcaccgg

SEQ ID NO: 1255977 - RNA, 21 nt, Human
cagcuggcaggccccaggcau

SEQ ID NO: 1255978 - RNA, 24 nt, Human
caggacaagaacauauuaauaagu

SEQ ID NO: 1255979 - RNA, 26 nt, Human
caggggcuuugcugaccacaagagag

SEQ ID NO: 1255980 - RNA, 23 nt, Human
cagugaugucagagggggucugg

SEQ ID NO: 1255981 - RNA, 22 nt, Human
cauccccugggcuccuggcccu

SEQ ID NO: 1255982 - RNA, 23 nt, Human
cauucugggugaaacuccccaaa

SEQ ID NO: 1255983 - RNA, 21 nt, Human
cauuucaggguuagucguugg

SEQ ID NO: 1255984 - RNA, 22 nt, Human
cauuucuuggucugauuuuuuu

SEQ ID NO: 1255985 - RNA, 23 nt, Human
ccaaccccagcucaccucaacac

SEQ ID NO: 1255986 - RNA, 21 nt, Human
ccacugcccgccucccgagcc

SEQ ID NO: 1255987 - RNA, 20 nt, Human
cccaagguggcuggcucugc

SEQ ID NO: 1255988 - RNA, 23 nt, Human
ccccagcccccaagguggcuggc

SEQ ID NO: 1255989 - RNA, 26 nt, Human
ccccaggcccgccugcaaaaagcccc

SEQ ID NO: 1255990 - RNA, 19 nt, Human
ccccaugccuaaccccucc

SEQ ID NO: 1255991 - RNA, 22 nt, Human
cccccagagugggugggaggca

SEQ ID NO: 1255992 - RNA, 21 nt, Human
cccccaggggaccgcuuggcc

SEQ ID NO: 1255993 - RNA, 22 nt, Human
ccccgcaggccugcgagggcac

SEQ ID NO: 1255994 - RNA, 18 nt, Human
ccccgcgcgcugcccgca

SEQ ID NO: 1255995 - RNA, 22 nt, Human
ccccgcgcgcugcccgcagccg

SEQ ID NO: 1255996 - RNA, 19 nt, Human
cccgccucccgagccccga

SEQ ID NO: 1255997 - RNA, 21 nt, Human
cccgccucccgagccccgacg

SEQ ID NO: 1255998 - RNA, 23 nt, Human
cccgcugccacagcccccagggg

SEQ ID NO: 1255999 - RNA, 23 nt, Human
cccgcugccacagcccccagggg

SEQ ID NO: 1256000 - RNA, 21 nt, Human
cccucaaauccacccugcagc

SEQ ID NO: 1256001 - RNA, 19 nt, Human
cccuccccggccgcccgcu

SEQ ID NO: 1256002 - RNA, 22 nt, Human
cccugcagcucccuggcugcaa

SEQ ID NO: 1256003 - RNA, 22 nt, Human
cccugcgccccgcgcgcugccc

SEQ ID NO: 1256004 - RNA, 18 nt, Human
cccuggccacggacgugc

SEQ ID NO: 1256005 - RNA, 22 nt, Human
ccgccagccaggacagugggcu

SEQ ID NO: 1256006 - RNA, 18 nt, Human
ccgcucgcggccccccuc

SEQ ID NO: 1256007 - RNA, 22 nt, Human
ccgcucgcggccccccuccgca

SEQ ID NO: 1256008 - RNA, 18 nt, Human
ccgcugccgcugccgccg

SEQ ID NO: 1256009 - RNA, 18 nt, Human
ccggccagccugaauccc

SEQ ID NO: 1256010 - RNA, 23 nt, Human
ccucaaagcgggaaccccagccc

SEQ ID NO: 1256011 - RNA, 18 nt, Human
ccucccccaugccuaacc

SEQ ID NO: 1256012 - RNA, 21 nt, Human
ccuccgcagcggaggggcggg

SEQ ID NO: 1256013 - RNA, 18 nt, Human
ccugaaucccagaacaac

SEQ ID NO: 1256014 - RNA, 21 nt, Human
ccugcgccccgcgcgcugccc

SEQ ID NO: 1256015 - RNA, 19 nt, Human
ccugcuuucccuggccugu

SEQ ID NO: 1256016 - RNA, 26 nt, Human
ccuggcaccugggagguuucucccac

SEQ ID NO: 1256017 - RNA, 18 nt, Human
ccuggccuguggggggca

SEQ ID NO: 1256018 - RNA, 20 nt, Human
ccuguggccaauacaaggcc

SEQ ID NO: 1256019 - RNA, 22 nt, Human
ccuguggggacacccagggcuc

SEQ ID NO: 1256020 - RNA, 27 nt, Human
ccuugcccacucccugucccucuacaa

SEQ ID NO: 1256021 - RNA, 18 nt, Human
cgccucccgagccccgac

SEQ ID NO: 1256022 - RNA, 22 nt, Human
cgcggccccccuccgcagcgga

SEQ ID NO: 1256023 - RNA, 19 nt, Human
cgcugccgccgccuccccc

SEQ ID NO: 1256024 - RNA, 23 nt, Human
cggcagcagggcaaagacuugag

SEQ ID NO: 1256025 - RNA, 21 nt, Human
cggccccccuccgcagcggag

SEQ ID NO: 1256026 - RNA, 21 nt, Human
cggccccccuccgcagcggag

SEQ ID NO: 1256027 - RNA, 24 nt, Human
cgggagaaaggaagggucaagacc

SEQ ID NO: 1256028 - RNA, 20 nt, Human
cgguugacauuuccaaguuc

SEQ ID NO: 1256029 - RNA, 21 nt, Human
cgucggcagcagggcaaagga

SEQ ID NO: 1256030 - RNA, 24 nt, Human
cgugcagggaagcccuggccucca

SEQ ID NO: 1256031 - RNA, 23 nt, Human
cuacaaaauuaauaaaaccguaa

SEQ ID NO: 1256032 - RNA, 19 nt, Human
cucccccaugccuaacccc

SEQ ID NO: 1256033 - RNA, 23 nt, Human
cugagaccccaggcccgccugca

SEQ ID NO: 1256034 - RNA, 22 nt, Human
cugcaaaaagccccagacuccc

SEQ ID NO: 1256035 - RNA, 20 nt, Human
cuggacaccagaugggcauc

SEQ ID NO: 1256036 - RNA, 19 nt, Human
cuggcaccugggagguuuc

SEQ ID NO: 1256037 - RNA, 21 nt, Human
cuggccugcauggcaggggcu

SEQ ID NO: 1256038 - RNA, 23 nt, Human
cugggcccacggguucuguuuug

SEQ ID NO: 1256039 - RNA, 18 nt, Human
cuguggcuugucucaggg

SEQ ID NO: 1256040 - RNA, 21 nt, Human
cuugcccuccugaaaguucug

SEQ ID NO: 1256041 - RNA, 19 nt, Human
gaacacauguccccuugcc

SEQ ID NO: 1256042 - RNA, 23 nt, Human
gaacagacacgcugggcuuccac

SEQ ID NO: 1256043 - RNA, 19 nt, Human
gaaggaaagggaguggggc

SEQ ID NO: 1256044 - RNA, 21 nt, Human
gacaugggcuuuugcuugccu

SEQ ID NO: 1256045 - RNA, 25 nt, Human
gaccaaagcauaguaaaaaacaaac

SEQ ID NO: 1256046 - RNA, 27 nt, Human
gaccaaagcauaguaaaaaacaaacaa

SEQ ID NO: 1256047 - RNA, 21 nt, Human
gagaaggagggggcuccucca

SEQ ID NO: 1256048 - RNA, 22 nt, Human
gagagcccucccaccaagccaa

SEQ ID NO: 1256049 - RNA, 22 nt, Human
gaggugagaaggagggggcucc

SEQ ID NO: 1256050 - RNA, 24 nt, Human
gagucaaggggaguauggaaggug

SEQ ID NO: 1256051 - RNA, 21 nt, Human
gaguggggcugacaaaaccua

SEQ ID NO: 1256052 - RNA, 21 nt, Human
gcacgaucccgccgccagcca

SEQ ID NO: 1256053 - RNA, 21 nt, Human
gcccaccacugcgaacauucu

SEQ ID NO: 1256054 - RNA, 21 nt, Human
gcccacucccugucccucuac

SEQ ID NO: 1256055 - RNA, 21 nt, Human
gccgccagccaggacaguggg

SEQ ID NO: 1256056 - RNA, 19 nt, Human
gccgcugccgcugccgccg

SEQ ID NO: 1256057 - RNA, 21 nt, Human
gccgcugccgcugccgccgcc

SEQ ID NO: 1256058 - RNA, 22 nt, Human
gccgcugccgcugccgccgccu

SEQ ID NO: 1256059 - RNA, 20 nt, Human
gccugcauggcaggggcuuu

SEQ ID NO: 1256060 - RNA, 18 nt, Human
gcugcaggggccagcagg

SEQ ID NO: 1256061 - RNA, 20 nt, Human
gcuugccuuuguccccucca

SEQ ID NO: 1256062 - RNA, 20 nt, Human
ggaagcccuggccuccagug

SEQ ID NO: 1256063 - RNA, 19 nt, Human
ggacacagcaccggccagc

SEQ ID NO: 1256064 - RNA, 18 nt, Human
ggaggggcugccccacgu

SEQ ID NO: 1256065 - RNA, 20 nt, Human
ggccccccuccgcagcggag

SEQ ID NO: 1256066 - RNA, 21 nt, Human
ggccuggaggaggcguggcuc

SEQ ID NO: 1256067 - RNA, 22 nt, Human
ggcgggggguggcucugggugc

SEQ ID NO: 1256068 - RNA, 18 nt, Human
ggcuuugccccacuucuu

SEQ ID NO: 1256069 - RNA, 18 nt, Human
gggcaagggacagagagg

SEQ ID NO: 1256070 - RNA, 24 nt, Human
gggcucccuggccacggacgugcc

SEQ ID NO: 1256071 - RNA, 18 nt, Human
ggguucuguggcuugucu

SEQ ID NO: 1256072 - RNA, 19 nt, Human
gguggcuggcucugcacag

SEQ ID NO: 1256073 - RNA, 18 nt, Human
guggccaauacaaggcug

SEQ ID NO: 1256074 - RNA, 21 nt, Human
uaaaaaacaaacaaaaaccaa

SEQ ID NO: 1256075 - RNA, 22 nt, Human
uaaaaaacaaacaaaaaccaac

SEQ ID NO: 1256076 - RNA, 24 nt, Human
uaaaaaacaaacaaaaaccaacca

SEQ ID NO: 1256077 - RNA, 27 nt, Human
uaaaaaacaaacaaaaaccaaccaaaa

SEQ ID NO: 1256078 - RNA, 23 nt, Human
uaaaaaaggcaauacuuuccaaa

SEQ ID NO: 1256079 - RNA, 21 nt, Human
uaaaaaaggcaauacuuuccc

SEQ ID NO: 1256080 - RNA, 19 nt, Human
uaacaagauaagaagaaga

SEQ ID NO: 1256081 - RNA, 23 nt, Human
uaacgggaaacagaaaaguucuc

SEQ ID NO: 1256082 - RNA, 23 nt, Human
uaagcccgcugccacagccccca

SEQ ID NO: 1256083 - RNA, 18 nt, Human
uaauguaggggcaaaauc

SEQ ID NO: 1256084 - RNA, 24 nt, Human
uacaaaauuaauaaaaccguaaua

SEQ ID NO: 1256085 - RNA, 23 nt, Human
uagaucgcuagaucuaccaacug

SEQ ID NO: 1256086 - RNA, 24 nt, Human
uagcacagggaagcagcgucuccu

SEQ ID NO: 1256087 - RNA, 24 nt, Human
uauaaauacaggacaagaacauau

SEQ ID NO: 1256088 - RNA, 19 nt, Human
ucaaggggaguauggaagg

SEQ ID NO: 1256089 - RNA, 20 nt, Human
ucagcaucccucagcuugac

SEQ ID NO: 1256090 - RNA, 23 nt, Human
ucaguggcagcuucuccuuggga

SEQ ID NO: 1256091 - RNA, 21 nt, Human
uccacacugggcccagcuauc

SEQ ID NO: 1256092 - RNA, 20 nt, Human
uccacccugcagcucccugg

SEQ ID NO: 1256093 - RNA, 20 nt, Human
uccacugagaccccaggccc

SEQ ID NO: 1256094 - RNA, 22 nt, Human
uccccagugguggcaagggugu

SEQ ID NO: 1256095 - RNA, 25 nt, Human
ucccgagccccgacggugaucgccc

SEQ ID NO: 1256096 - RNA, 22 nt, Human
ucccuggaaggguuggcacagg

SEQ ID NO: 1256097 - RNA, 22 nt, Human
uccucgggcuggcggggggugg

SEQ ID NO: 1256098 - RNA, 21 nt, Human
uccuugggccaagguccccca

SEQ ID NO: 1256099 - RNA, 21 nt, Human
ucucagaggcgagccuguggg

SEQ ID NO: 1256100 - RNA, 20 nt, Human
ucuggugggggucgugggag

SEQ ID NO: 1256101 - RNA, 23 nt, Human
ucuuuuuagcuggacucacacgu

SEQ ID NO: 1256102 - RNA, 20 nt, Human
ugaacguacuaaaaccacag

SEQ ID NO: 1256103 - RNA, 20 nt, Human
ugaugucagagggggucugg

SEQ ID NO: 1256104 - RNA, 20 nt, Human
ugcaaaaagccccagacucc

SEQ ID NO: 1256105 - RNA, 21 nt, Human
ugcuguuuguuauccucagug

SEQ ID NO: 1256106 - RNA, 22 nt, Human
uggaagaggcacaaagggguca

SEQ ID NO: 1256107 - RNA, 20 nt, Human
uggacagacacagacacgga

SEQ ID NO: 1256108 - RNA, 20 nt, Human
uggacaugggcuuuugcuug

SEQ ID NO: 1256109 - RNA, 25 nt, Human
uggcaaagcucccgagcggcgaggc

SEQ ID NO: 1256110 - RNA, 22 nt, Human
uggcaggccccaggcauccuug

SEQ ID NO: 1256111 - RNA, 20 nt, Human
uggccccucaaauccacccu

SEQ ID NO: 1256112 - RNA, 22 nt, Human
uggccugcauggcaggggcuuu

SEQ ID NO: 1256113 - RNA, 19 nt, Human
uggcuggucuggggagguu

SEQ ID NO: 1256114 - RNA, 18 nt, Human
ugggaggcagaggggaag

SEQ ID NO: 1256115 - RNA, 20 nt, Human
ugggccccccaccuuugcag

SEQ ID NO: 1256116 - RNA, 24 nt, Human
ugggccggggccaaccccagcuca

SEQ ID NO: 1256117 - RNA, 22 nt, Human
ugggggcaggcggccuggcugg

SEQ ID NO: 1256118 - RNA, 22 nt, Human
ugggggcggaggaggucggacg

SEQ ID NO: 1256119 - RNA, 21 nt, Human
ugggguaaacaccauuaucuc

SEQ ID NO: 1256120 - RNA, 18 nt, Human
uggguccauagcgugggg

SEQ ID NO: 1256121 - RNA, 24 nt, Human
uguagacaauauuuccuucugaau

SEQ ID NO: 1256122 - RNA, 19 nt, Human
uuauugucuccauuuuaga

SEQ ID NO: 1256123 - RNA, 22 nt, Human
uucaccaggacgcaucucucca

SEQ ID NO: 1256124 - RNA, 21 nt, Human
uuccaaguucaaggagcaugg

SEQ ID NO: 1256125 - RNA, 18 nt, Human
uuccacacugggcccagc

SEQ ID NO: 1256126 - RNA, 21 nt, Human
uucccauccccugggcuccug

SEQ ID NO: 1256127 - RNA, 22 nt, Human
uucccauccccugggcuccugg

SEQ ID NO: 1256128 - RNA, 28 nt, Human
uucccuggccuguggggggggagagauc

SEQ ID NO: 1256129 - RNA, 28 nt, Human
uugaauacuucauaugggguaaacaccc

SEQ ID NO: 1256130 - RNA, 21 nt, Human
uugagccaugguaaacacuga

SEQ ID NO: 1256131 - RNA, 24 nt, Human
uugcaaagauuuuuuuuccucauc

SEQ ID NO: 1256132 - RNA, 19 nt, Human
uugcagcacagcuggcagg

SEQ ID NO: 1256133 - RNA, 27 nt, Human
uuuguggcggcggugccggccccuccc

SEQ ID NO: 1256134 - RNA, 18 nt, Human
uuuuuuuuuuucccacag

SEQ ID NO: 1256135 - RNA, 21 nt, Human
aaaaauaaaaugucaaugcug

SEQ ID NO: 1256136 - RNA, 26 nt, Human
aagugauccucucaccucagcuucca

SEQ ID NO: 1256137 - RNA, 22 nt, Human
aauaaucaaguacuaaaauacc

SEQ ID NO: 1256138 - RNA, 23 nt, Human
acaaaaauaaaaugucaaugcug

SEQ ID NO: 1256139 - RNA, 21 nt, Human
acagaacaccggacgggacca

SEQ ID NO: 1256140 - RNA, 21 nt, Human
accagggucgcgucaggagcc

SEQ ID NO: 1256141 - RNA, 19 nt, Human
agggcucaagugauccucu

SEQ ID NO: 1256142 - RNA, 20 nt, Human
caccucagcuuccagaguag

SEQ ID NO: 1256143 - RNA, 24 nt, Human
caccucagcuuccagaguagcugg

SEQ ID NO: 1256144 - RNA, 21 nt, Human
cauucauuuauuaaguggggu

SEQ ID NO: 1256145 - RNA, 20 nt, Human
ccagggcucaagugauccuc

SEQ ID NO: 1256146 - RNA, 20 nt, Human
ccagggucgcgucaggagcc

SEQ ID NO: 1256147 - RNA, 23 nt, Human
ccauagccggaacaggcggugac

SEQ ID NO: 1256148 - RNA, 26 nt, Human
ccauucaaguaauguuccccccacaa

SEQ ID NO: 1256149 - RNA, 24 nt, Human
cucaagugauccucucaccucagc

SEQ ID NO: 1256150 - RNA, 24 nt, Human
cucagcuuccagaguagcugggac

SEQ ID NO: 1256151 - RNA, 20 nt, Human
gaguagcugggaccacaugc

SEQ ID NO: 1256152 - RNA, 19 nt, Human
gauaacaaaaauaaaaugu

SEQ ID NO: 1256153 - RNA, 18 nt, Human
gcucaagugauccucuca

SEQ ID NO: 1256154 - RNA, 20 nt, Human
ggaacaggcggugacaggag

SEQ ID NO: 1256155 - RNA, 19 nt, Human
gggguuucaugauguugca

SEQ ID NO: 1256156 - RNA, 21 nt, Human
gugggguuucaugauguugca

SEQ ID NO: 1256157 - RNA, 24 nt, Human
gugggguuucaugauguugcauag

SEQ ID NO: 1256158 - RNA, 18 nt, Human
uaaaaaaugaaggaaaga

SEQ ID NO: 1256159 - RNA, 23 nt, Human
uaaaauaccaguggcucuuguga

SEQ ID NO: 1256160 - RNA, 24 nt, Human
uaaacacugucagucuuuuaaaaa

SEQ ID NO: 1256161 - RNA, 20 nt, Human
uaagaaaaaccaaccauaau

SEQ ID NO: 1256162 - RNA, 22 nt, Human
uaauaauaauaaacacugucaa

SEQ ID NO: 1256163 - RNA, 22 nt, Human
uaccaguggcucuugugacagg

SEQ ID NO: 1256164 - RNA, 19 nt, Human
uacuaaaauaccaguggcu

SEQ ID NO: 1256165 - RNA, 21 nt, Human
uauugcaauauaaccaacccu

SEQ ID NO: 1256166 - RNA, 18 nt, Human
uccaguggagcauaauug

SEQ ID NO: 1256167 - RNA, 21 nt, Human
ucugauuugugacuaaagaaa

SEQ ID NO: 1256168 - RNA, 21 nt, Human
ugaacagcaugacaaagcuaa

SEQ ID NO: 1256169 - RNA, 26 nt, Human
ugacuaaagaaaaaauaaucaaguac

SEQ ID NO: 1256170 - RNA, 22 nt, Human
ugagaagagagauaacaaaaau

SEQ ID NO: 1256171 - RNA, 19 nt, Human
uggagcauaauugugagaa

SEQ ID NO: 1256172 - RNA, 24 nt, Human
ugggaccacaugcccaucccacca

SEQ ID NO: 1256173 - RNA, 24 nt, Human
ugggguuucaugauguugcauagg

SEQ ID NO: 1256174 - RNA, 24 nt, Human
uuauuuaaaaaaugaaggaaagaa

SEQ ID NO: 1256175 - RNA, 21 nt, Human
uucaaguaauguuccccccac

SEQ ID NO: 1256176 - RNA, 23 nt, Human
uucaaguaauguuccccccacaa

SEQ ID NO: 1256177 - RNA, 24 nt, Human
uuccagaguagcugggaccacaug

SEQ ID NO: 1256178 - RNA, 25 nt, Human
uuccagggcucaagugauccucuca

SEQ ID NO: 1256179 - RNA, 23 nt, Human
uugugacuaaagaaaaaauaauc

SEQ ID NO: 1256180 - RNA, 22 nt, Human
uuuaaaaaaugaaggaaagaag

SEQ ID NO: 1256181 - RNA, 21 nt, Human
uuuaaagcgguuuagccagca

SEQ ID NO: 1256182 - RNA, 23 nt, Human
uuugaacagcaugacaaagcuaa

SEQ ID NO: 1256183 - RNA, 24 nt, Human
aaagugcugggauuacaggcauga

SEQ ID NO: 1256184 - RNA, 22 nt, Human
aaauaccgcaugguguagaaug

SEQ ID NO: 1256185 - RNA, 24 nt, Human
aacgauucuucugccucagccucc

SEQ ID NO: 1256186 - RNA, 21 nt, Human
aacuggccucuggggaaagac

SEQ ID NO: 1256187 - RNA, 22 nt, Human
aacuuuuaaagaaauucaguca

SEQ ID NO: 1256188 - RNA, 22 nt, Human
aagagacaggaucucccugugu

SEQ ID NO: 1256189 - RNA, 24 nt, Human
aaguaccaugaaaucacagaugcu

SEQ ID NO: 1256190 - RNA, 19 nt, Human
aaguagcugggauuacagg

SEQ ID NO: 1256191 - RNA, 19 nt, Human
aagugcugggauuacaggc

SEQ ID NO: 1256192 - RNA, 21 nt, Human
aagugcugggauuacaggcau

SEQ ID NO: 1256193 - RNA, 26 nt, Human
aagugcugggauuacaggcaugagcc

SEQ ID NO: 1256194 - RNA, 26 nt, Human
aaucccauacucucucucuagcccac

SEQ ID NO: 1256195 - RNA, 22 nt, Human
acaacauccuccuaugcucucu

SEQ ID NO: 1256196 - RNA, 18 nt, Human
acacaggccacaagcaga

SEQ ID NO: 1256197 - RNA, 20 nt, Human
accaaucuaaaccugaacac

SEQ ID NO: 1256198 - RNA, 20 nt, Human
accacaccaccacacccggc

SEQ ID NO: 1256199 - RNA, 20 nt, Human
accaccauuaggucccaaca

SEQ ID NO: 1256200 - RNA, 26 nt, Human
acucaugaucaugcucucacaccacu

SEQ ID NO: 1256201 - RNA, 24 nt, Human
acucuuguugcccaggcuggagug

SEQ ID NO: 1256202 - RNA, 21 nt, Human
agaagacuuugggucuaaucc

SEQ ID NO: 1256203 - RNA, 27 nt, Human
agacaguguacagagaacaacauccuc

SEQ ID NO: 1256204 - RNA, 19 nt, Human
agaccaccaacugggaagg

SEQ ID NO: 1256205 - RNA, 25 nt, Human
agccaaaaagcaccauuuuuagaga

SEQ ID NO: 1256206 - RNA, 18 nt, Human
aggcaggucucgaacucc

SEQ ID NO: 1256207 - RNA, 19 nt, Human
aggcuaccuguauacagaa

SEQ ID NO: 1256208 - RNA, 20 nt, Human
agggagggugaacuaguggg

SEQ ID NO: 1256209 - RNA, 19 nt, Human
aggggaaaugcaaucugac

SEQ ID NO: 1256210 - RNA, 22 nt, Human
aggugcucaauaaagagagggc

SEQ ID NO: 1256211 - RNA, 19 nt, Human
aggugugaacuaccaugcc

SEQ ID NO: 1256212 - RNA, 18 nt, Human
agugcugggauuacaggc

SEQ ID NO: 1256213 - RNA, 19 nt, Human
auaggacuuuaauguuggc

SEQ ID NO: 1256214 - RNA, 19 nt, Human
auauaccagcaucagcaga

SEQ ID NO: 1256215 - RNA, 21 nt, Human
augcucucucuggcugcagcc

SEQ ID NO: 1256216 - RNA, 24 nt, Human
augggguuucuccaugaucaucag

SEQ ID NO: 1256217 - RNA, 23 nt, Human
auuuuuuugcuuguuuguuuuuu

SEQ ID NO: 1256218 - RNA, 23 nt, Human
caaaaagcaccauuuuuagagac

SEQ ID NO: 1256219 - RNA, 22 nt, Human
caaacgauucuucugccucagc

SEQ ID NO: 1256220 - RNA, 27 nt, Human
caaacgauucuucugccucagccuccc

SEQ ID NO: 1256221 - RNA, 24 nt, Human
caaagugcugggauuacaggcaug

SEQ ID NO: 1256222 - RNA, 19 nt, Human
caacaggcguaaacucuca

SEQ ID NO: 1256223 - RNA, 25 nt, Human
caauuuccaaacaguuccgagaaca

SEQ ID NO: 1256224 - RNA, 19 nt, Human
cacaccaccacacccggcu

SEQ ID NO: 1256225 - RNA, 18 nt, Human
cacaggccacaagcagaa

SEQ ID NO: 1256226 - RNA, 21 nt, Human
cacaggccacaagcagaaccg

SEQ ID NO: 1256227 - RNA, 18 nt, Human
caccacaccaccacaccc

SEQ ID NO: 1256228 - RNA, 18 nt, Human
caccacaccaccacaccc

SEQ ID NO: 1256229 - RNA, 21 nt, Human
caccugcuuuggagccaagaa

SEQ ID NO: 1256230 - RNA, 23 nt, Human
cacucaaucagccuccaucacaa

SEQ ID NO: 1256231 - RNA, 24 nt, Human
cacucuuguugcccaggcuggagu

SEQ ID NO: 1256232 - RNA, 21 nt, Human
cacugcaaccucugccucccg

SEQ ID NO: 1256233 - RNA, 23 nt, Human
cacugcaaccucugccucccggg

SEQ ID NO: 1256234 - RNA, 21 nt, Human
cacugugagacuuugggccca

SEQ ID NO: 1256235 - RNA, 19 nt, Human
cagcaaugccgcaacuuuu

SEQ ID NO: 1256236 - RNA, 22 nt, Human
cagccaacuggcaaccagacug

SEQ ID NO: 1256237 - RNA, 25 nt, Human
caggugcccaccacaccaccacacc

SEQ ID NO: 1256238 - RNA, 25 nt, Human
cagucaccugagggccacugaauuu

SEQ ID NO: 1256239 - RNA, 22 nt, Human
caucaggcaggucucgaacucc

SEQ ID NO: 1256240 - RNA, 25 nt, Human
caugaaaucacagaugcuuaaaaca

SEQ ID NO: 1256241 - RNA, 18 nt, Human
caugccuucuguuuucuc

SEQ ID NO: 1256242 - RNA, 22 nt, Human
cauuauccauguaaauugaggg

SEQ ID NO: 1256243 - RNA, 23 nt, Human
cauucuuguuucucaucccagag

SEQ ID NO: 1256244 - RNA, 24 nt, Human
cauucuuguuucucaucccagaga

SEQ ID NO: 1256245 - RNA, 20 nt, Human
ccaaaaaagggguaguaaua

SEQ ID NO: 1256246 - RNA, 25 nt, Human
ccaaaaagcaccauuuuuagagaca

SEQ ID NO: 1256247 - RNA, 22 nt, Human
ccaaagugcugggauuacaggc

SEQ ID NO: 1256248 - RNA, 24 nt, Human
ccaaagugcugggauuacaggcau

SEQ ID NO: 1256249 - RNA, 27 nt, Human
ccaacaucugaauuuuggcagccaacu

SEQ ID NO: 1256250 - RNA, 21 nt, Human
ccaaguagcugggauuacagg

SEQ ID NO: 1256251 - RNA, 19 nt, Human
ccacaagcagaaccaccau

SEQ ID NO: 1256252 - RNA, 23 nt, Human
ccacugaauuuccugggccucca

SEQ ID NO: 1256253 - RNA, 19 nt, Human
ccagccaaaaagcaccauu

SEQ ID NO: 1256254 - RNA, 25 nt, Human
cccaacaucagcacugcauggugau

SEQ ID NO: 1256255 - RNA, 22 nt, Human
cccaaguagcugggauuacagg

SEQ ID NO: 1256256 - RNA, 23 nt, Human
cccaaguagcugggauuacaggu

SEQ ID NO: 1256257 - RNA, 24 nt, Human
cccaaguagcugggauuacaggug

SEQ ID NO: 1256258 - RNA, 21 nt, Human
cccaccacaccaccacacccg

SEQ ID NO: 1256259 - RNA, 20 nt, Human
cccacugugagacuuugggc

SEQ ID NO: 1256260 - RNA, 18 nt, Human
cccaggcuggagugcaau

SEQ ID NO: 1256261 - RNA, 22 nt, Human
cccauacucucucucuagccca

SEQ ID NO: 1256262 - RNA, 23 nt, Human
cccggguucaaacgauucuucug

SEQ ID NO: 1256263 - RNA, 24 nt, Human
ccgccgcagccuuccaaagugcug

SEQ ID NO: 1256264 - RNA, 23 nt, Human
ccuccauggacaggugcugaagu

SEQ ID NO: 1256265 - RNA, 24 nt, Human
ccucccgccucagccucaugagua

SEQ ID NO: 1256266 - RNA, 24 nt, Human
ccucccggguucaaacgauucuuc

SEQ ID NO: 1256267 - RNA, 23 nt, Human
ccuccuaugcucucucuggcugc

SEQ ID NO: 1256268 - RNA, 22 nt, Human
ccugaccgcaagugaucugccc

SEQ ID NO: 1256269 - RNA, 20 nt, Human
ccuggacucaagcaauccuc

SEQ ID NO: 1256270 - RNA, 23 nt, Human
ccuguguuacccaggcuggucuc

SEQ ID NO: 1256271 - RNA, 24 nt, Human
ccuguguuacccaggcuggucucg

SEQ ID NO: 1256272 - RNA, 25 nt, Human
cgaacuccuggacucaagcaauccu

SEQ ID NO: 1256273 - RNA, 24 nt, Human
cgccucagccucaugaguaacugg

SEQ ID NO: 1256274 - RNA, 20 nt, Human
cgucaguaucaguucaaaga

SEQ ID NO: 1256275 - RNA, 24 nt, Human
cucaagcaauccucccgccucagc

SEQ ID NO: 1256276 - RNA, 23 nt, Human
cucagccucccaaguagcuggga

SEQ ID NO: 1256277 - RNA, 25 nt, Human
cucaugaucaugcucucacaccacu

SEQ ID NO: 1256278 - RNA, 26 nt, Human
cuccugaccgcaagugaucugcccgc

SEQ ID NO: 1256279 - RNA, 18 nt, Human
cucuuguugcccaggcug

SEQ ID NO: 1256280 - RNA, 24 nt, Human
cugaaguguccacauauaccagca

SEQ ID NO: 1256281 - RNA, 19 nt, Human
cugcaaccucugccucccg

SEQ ID NO: 1256282 - RNA, 23 nt, Human
cugcaaccucugccucccggguu

SEQ ID NO: 1256283 - RNA, 24 nt, Human
cugcaaccucugccucccggguuc

SEQ ID NO: 1256284 - RNA, 20 nt, Human
cugccugcaagacaaaggag

SEQ ID NO: 1256285 - RNA, 22 nt, Human
cuuaguaaugauaauuuuccuu

SEQ ID NO: 1256286 - RNA, 20 nt, Human
gaaaucacagaugcuuaaaa

SEQ ID NO: 1256287 - RNA, 23 nt, Human
gaacacguaccagccauugcuaa

SEQ ID NO: 1256288 - RNA, 23 nt, Human
gaacuccuggacucaagcaaucc

SEQ ID NO: 1256289 - RNA, 28 nt, Human
gaccgcaagugaucugcccgccgcagcc

SEQ ID NO: 1256290 - RNA, 22 nt, Human
gacuacaggugugaacuaccau

SEQ ID NO: 1256291 - RNA, 18 nt, Human
gagaugggguuucuccau

SEQ ID NO: 1256292 - RNA, 25 nt, Human
gaguaacugggacuacaggugugaa

SEQ ID NO: 1256293 - RNA, 19 nt, Human
gagucccuggagcaggaca

SEQ ID NO: 1256294 - RNA, 18 nt, Human
gauuacaggcaugagcca

SEQ ID NO: 1256295 - RNA, 21 nt, Human
gauuacaggcaugagccaccg

SEQ ID NO: 1256296 - RNA, 24 nt, Human
gauuacaggcaugagccaccgugc

SEQ ID NO: 1256297 - RNA, 22 nt, Human
gcaaccucugccucccggguuc

SEQ ID NO: 1256298 - RNA, 19 nt, Human
gcuggagugcaauggcacg

SEQ ID NO: 1256299 - RNA, 24 nt, Human
ggacuacaggugugaacuaccaug

SEQ ID NO: 1256300 - RNA, 20 nt, Human
ggagguaggcuaccuguaua

SEQ ID NO: 1256301 - RNA, 24 nt, Human
ggauuacaggcaugagccaccgug

SEQ ID NO: 1256302 - RNA, 22 nt, Human
ggcaccaaucuaaaccugaaca

SEQ ID NO: 1256303 - RNA, 20 nt, Human
gggaaagacugccuggguuc

SEQ ID NO: 1256304 - RNA, 25 nt, Human
gggaacucaacacguggugauuugg

SEQ ID NO: 1256305 - RNA, 20 nt, Human
gucccaacaucagcacugca

SEQ ID NO: 1256306 - RNA, 23 nt, Human
uaaaacauuucaacacaggccac

SEQ ID NO: 1256307 - RNA, 18 nt, Human
uaaaccugaacacguacc

SEQ ID NO: 1256308 - RNA, 23 nt, Human
uaaugauggggaauccacuuucc

SEQ ID NO: 1256309 - RNA, 25 nt, Human
uaauuuugaauuuuuaguagagaug

SEQ ID NO: 1256310 - RNA, 24 nt, Human
uacaggcaugagccaccgugccca

SEQ ID NO: 1256311 - RNA, 23 nt, Human
uacaggugcccaccacaccacca

SEQ ID NO: 1256312 - RNA, 21 nt, Human
uaccaaguaccaugaaaucac

SEQ ID NO: 1256313 - RNA, 22 nt, Human
uaccaugaaaucacagaugcuu

SEQ ID NO: 1256314 - RNA, 24 nt, Human
uaccaugcccagcaaugccgcaac

SEQ ID NO: 1256315 - RNA, 24 nt, Human
uacccaggcuggucucgaacuccu

SEQ ID NO: 1256316 - RNA, 19 nt, Human
uagguuggucauggagacu

SEQ ID NO: 1256317 - RNA, 20 nt, Human
uaguaaugauaauuuuccuu

SEQ ID NO: 1256318 - RNA, 24 nt, Human
uaguagagaugggguuucuccaug

SEQ ID NO: 1256319 - RNA, 22 nt, Human
uauccaaaaaagggguaguaau

SEQ ID NO: 1256320 - RNA, 21 nt, Human
uauccccaaaguuccacugaa

SEQ ID NO: 1256321 - RNA, 20 nt, Human
ucaacacaggccacaagcag

SEQ ID NO: 1256322 - RNA, 22 nt, Human
ucaacacguggugauuuggcua

SEQ ID NO: 1256323 - RNA, 19 nt, Human
ucaaugguuuccuguuuuc

SEQ ID NO: 1256324 - RNA, 22 nt, Human
ucaaugguuuccuguuuuccgg

SEQ ID NO: 1256325 - RNA, 21 nt, Human
ucacucuuguugcccaggcug

SEQ ID NO: 1256326 - RNA, 23 nt, Human
ucacucuuguugcccaggcugga

SEQ ID NO: 1256327 - RNA, 23 nt, Human
ucacugcaaccucugccucccgg

SEQ ID NO: 1256328 - RNA, 24 nt, Human
ucacugcaaccucugccucccggg

SEQ ID NO: 1256329 - RNA, 25 nt, Human
ucacugcaaccucugccucccgggu

SEQ ID NO: 1256330 - RNA, 18 nt, Human
ucagccucccaaguagcu

SEQ ID NO: 1256331 - RNA, 20 nt, Human
ucagccucccaaguagcugg

SEQ ID NO: 1256332 - RNA, 24 nt, Human
ucaugaguaacugggacuacaggu

SEQ ID NO: 1256333 - RNA, 21 nt, Human
ucaugggggugaugaugucuu

SEQ ID NO: 1256334 - RNA, 23 nt, Human
uccaaagugcugggauuacaggc

SEQ ID NO: 1256335 - RNA, 24 nt, Human
uccaaagugcugggauuacaggca

SEQ ID NO: 1256336 - RNA, 20 nt, Human
uccaggcgcugggcaaucug

SEQ ID NO: 1256337 - RNA, 23 nt, Human
ucccaaguagcugggauuacagg

SEQ ID NO: 1256338 - RNA, 24 nt, Human
ucccaaguagcugggauuacaggu

SEQ ID NO: 1256339 - RNA, 20 nt, Human
ucccauacucucucucuagc

SEQ ID NO: 1256340 - RNA, 20 nt, Human
ucccggguucaaacgauucu

SEQ ID NO: 1256341 - RNA, 24 nt, Human
ucccggguucaaacgauucuucug

SEQ ID NO: 1256342 - RNA, 20 nt, Human
ucccuguguuacccaggcug

SEQ ID NO: 1256343 - RNA, 21 nt, Human
ucuagcccacugugagacuuu

SEQ ID NO: 1256344 - RNA, 24 nt, Human
ucucccuguguuacccaggcuggu

SEQ ID NO: 1256345 - RNA, 21 nt, Human
ucucgaacuccugaccgcaag

SEQ ID NO: 1256346 - RNA, 23 nt, Human
ucucgaacuccuggacucaagca

SEQ ID NO: 1256347 - RNA, 24 nt, Human
ucugccucagccucccaaguagcu

SEQ ID NO: 1256348 - RNA, 18 nt, Human
ucuggaugaguccagggc

SEQ ID NO: 1256349 - RNA, 22 nt, Human
ucuucauuuccuuaccucuaau

SEQ ID NO: 1256350 - RNA, 24 nt, Human
ucuucauuuccuuaccucuaauga

SEQ ID NO: 1256351 - RNA, 22 nt, Human
ucuuguugcccaggcuggagug

SEQ ID NO: 1256352 - RNA, 18 nt, Human
ugaccgcaagugaucugc

SEQ ID NO: 1256353 - RNA, 20 nt, Human
ugagggccacugaauuuccu

SEQ ID NO: 1256354 - RNA, 18 nt, Human
ugcccaggcuggagugca

SEQ ID NO: 1256355 - RNA, 21 nt, Human
ugcccaggcuggagugcaaug

SEQ ID NO: 1256356 - RNA, 24 nt, Human
ugcccaggcuggagugcaauggca

SEQ ID NO: 1256357 - RNA, 24 nt, Human
ugccucagccucccaaguagcugg

SEQ ID NO: 1256358 - RNA, 24 nt, Human
uggacucaagcaauccucccgccu

SEQ ID NO: 1256359 - RNA, 23 nt, Human
uggagugcaauggcacgaucuca

SEQ ID NO: 1256360 - RNA, 24 nt, Human
uggagugcaauggcacgaucucag

SEQ ID NO: 1256361 - RNA, 24 nt, Human
uggcaaccagacugccugcaagac

SEQ ID NO: 1256362 - RNA, 21 nt, Human
uggcaaugauaaugauucugg

SEQ ID NO: 1256363 - RNA, 22 nt, Human
ugggacuacaggugugaacuac

SEQ ID NO: 1256364 - RNA, 24 nt, Human
ugggacuacaggugugaacuacca

SEQ ID NO: 1256365 - RNA, 25 nt, Human
ugggacuacaggugugaacuaccau

SEQ ID NO: 1256366 - RNA, 19 nt, Human
ugggagggaaccacauaga

SEQ ID NO: 1256367 - RNA, 18 nt, Human
ugggauuacaggcaugag

SEQ ID NO: 1256368 - RNA, 21 nt, Human
ugggauuacaggcaugagcca

SEQ ID NO: 1256369 - RNA, 22 nt, Human
ugggauuacaggcaugagccac

SEQ ID NO: 1256370 - RNA, 23 nt, Human
ugggauuacaggcaugagccacc

SEQ ID NO: 1256371 - RNA, 23 nt, Human
ugggauuacaggcaugagccacc

SEQ ID NO: 1256372 - RNA, 24 nt, Human
ugggauuacaggcaugagccaccg

SEQ ID NO: 1256373 - RNA, 26 nt, Human
ugggauuacaggcaugagccaccgug

SEQ ID NO: 1256374 - RNA, 21 nt, Human
ugggauuacaggugcccacca

SEQ ID NO: 1256375 - RNA, 21 nt, Human
uggggaauccacuuuccuugg

SEQ ID NO: 1256376 - RNA, 21 nt, Human
ugggguuucuccaugaucauc

SEQ ID NO: 1256377 - RNA, 19 nt, Human
ugguauuaaaagccaguca

SEQ ID NO: 1256378 - RNA, 23 nt, Human
uguccacauauaccagcaucagc

SEQ ID NO: 1256379 - RNA, 24 nt, Human
uguguuacccaggcuggucucgaa

SEQ ID NO: 1256380 - RNA, 19 nt, Human
uguuacccaggcuggucuc

SEQ ID NO: 1256381 - RNA, 22 nt, Human
uguuacccaggcuggucucgaa

SEQ ID NO: 1256382 - RNA, 20 nt, Human
uguugcccaggcuggagugc

SEQ ID NO: 1256383 - RNA, 22 nt, Human
uguugcccaggcuggagugcaa

SEQ ID NO: 1256384 - RNA, 21 nt, Human
uguuuuuuuugagauggaguu

SEQ ID NO: 1256385 - RNA, 18 nt, Human
uuaguagagaugggguuu

SEQ ID NO: 1256386 - RNA, 24 nt, Human
uuaguagagaugggguuucuccau

SEQ ID NO: 1256387 - RNA, 18 nt, Human
uuaguagaugugugucca

SEQ ID NO: 1256388 - RNA, 24 nt, Human
uucaaacgauucuucugccucagc

SEQ ID NO: 1256389 - RNA, 24 nt, Human
uucacucuuguugcccaggcugga

SEQ ID NO: 1256390 - RNA, 23 nt, Human
uuccuuugcaggugaaacagcuc

SEQ ID NO: 1256391 - RNA, 18 nt, Human
uugcccaggcuggagugc

SEQ ID NO: 1256392 - RNA, 20 nt, Human
uuuacacaguaggugcucaa

SEQ ID NO: 1256393 - RNA, 24 nt, Human
uuucacucuuguugcccaggcugg

SEQ ID NO: 1256394 - RNA, 21 nt, Human
uuuccugggccuccauggaca

SEQ ID NO: 1256395 - RNA, 20 nt, Human
uuucuaacagcagcuccauc

SEQ ID NO: 1256396 - RNA, 19 nt, Human
uuuugaauuuuuaguagag

SEQ ID NO: 1256397 - RNA, 20 nt, Human
uuuugaauuuuuaguagaga

SEQ ID NO: 1256398 - RNA, 22 nt, Human
uuuuuaguagagaugggguuuc

SEQ ID NO: 1256399 - RNA, 22 nt, Human
aaaaaaaaaaaaaaaagccaag

SEQ ID NO: 1256400 - RNA, 21 nt, Human
aaaaaaagccaaguaugcugg

SEQ ID NO: 1256401 - RNA, 22 nt, Human
aaaaacaacaacaaaauuaccu

SEQ ID NO: 1256402 - RNA, 25 nt, Human
aaaaacaacaacaaaauuaccuggc

SEQ ID NO: 1256403 - RNA, 19 nt, Human
aaaaagacaauuuugaggc

SEQ ID NO: 1256404 - RNA, 21 nt, Human
aaaaagccaaguaugcuggca

SEQ ID NO: 1256405 - RNA, 23 nt, Human
aaaacaacaacaaaauuaccugg

SEQ ID NO: 1256406 - RNA, 25 nt, Human
aaaagaaagcaauacuugacgguga

SEQ ID NO: 1256407 - RNA, 20 nt, Human
aaaaugccuguuuacaagag

SEQ ID NO: 1256408 - RNA, 24 nt, Human
aaacaaaguugagagucagagcuc

SEQ ID NO: 1256409 - RNA, 24 nt, Human
aaagugcugggauuacaggcguga

SEQ ID NO: 1256410 - RNA, 19 nt, Human
aaauacaaaaauuagcugg

SEQ ID NO: 1256411 - RNA, 20 nt, Human
aacauagugagacccugucu

SEQ ID NO: 1256412 - RNA, 18 nt, Human
aacauggugaaaccccuu

SEQ ID NO: 1256413 - RNA, 19 nt, Human
aacauggugaaaccccuuu

SEQ ID NO: 1256414 - RNA, 24 nt, Human
aagcugaggcgggaggaucacuug

SEQ ID NO: 1256415 - RNA, 25 nt, Human
aagcugcuucuacccuguucaacug

SEQ ID NO: 1256416 - RNA, 20 nt, Human
aagcugguuguguggaauuu

SEQ ID NO: 1256417 - RNA, 19 nt, Human
aagugcugggauuacaggc

SEQ ID NO: 1256418 - RNA, 19 nt, Human
aagugcugggauuacaggc

SEQ ID NO: 1256419 - RNA, 26 nt, Human
aagugcugggauuacaggcgugagcc

SEQ ID NO: 1256420 - RNA, 23 nt, Human
aauccuugaaccugggaggcaga

SEQ ID NO: 1256421 - RNA, 23 nt, Human
aauuaccuggcuguggugguaug

SEQ ID NO: 1256422 - RNA, 20 nt, Human
acaaaaauuagcuggaccua

SEQ ID NO: 1256423 - RNA, 20 nt, Human
acaaaguugagagucagagc

SEQ ID NO: 1256424 - RNA, 22 nt, Human
acagaaugagaucaucucuuaa

SEQ ID NO: 1256425 - RNA, 18 nt, Human
acauagcccacuaacagc

SEQ ID NO: 1256426 - RNA, 25 nt, Human
accuuuugucuagacuugacagaau

SEQ ID NO: 1256427 - RNA, 18 nt, Human
acugcacuccagacuggg

SEQ ID NO: 1256428 - RNA, 19 nt, Human
acugcacuccagacugggu

SEQ ID NO: 1256429 - RNA, 21 nt, Human
acugcacuccagacugggugg

SEQ ID NO: 1256430 - RNA, 26 nt, Human
acugcacuccagacugggugguagag

SEQ ID NO: 1256431 - RNA, 24 nt, Human
acugcaguccagccagggcaacag

SEQ ID NO: 1256432 - RNA, 18 nt, Human
acugcccuccagccuggg

SEQ ID NO: 1256433 - RNA, 24 nt, Human
acugcccuccagccugggcaacag

SEQ ID NO: 1256434 - RNA, 22 nt, Human
acuuggugcuggccagaugugg

SEQ ID NO: 1256435 - RNA, 24 nt, Human
acuuggugcuggccagaugugguu

SEQ ID NO: 1256436 - RNA, 18 nt, Human
agacaggaggauugcuug

SEQ ID NO: 1256437 - RNA, 21 nt, Human
agacauauuuaaaaagacaau

SEQ ID NO: 1256438 - RNA, 24 nt, Human
agacugggugguagagcaagacuc

SEQ ID NO: 1256439 - RNA, 18 nt, Human
agagcaagacucugucuc

SEQ ID NO: 1256440 - RNA, 22 nt, Human
agaggcuacagugagccgagau

SEQ ID NO: 1256441 - RNA, 24 nt, Human
agaggcuacagugagccgagauug

SEQ ID NO: 1256442 - RNA, 18 nt, Human
agaugcgaugagcuauga

SEQ ID NO: 1256443 - RNA, 20 nt, Human
agcacucugggaggcugagg

SEQ ID NO: 1256444 - RNA, 19 nt, Human
agcacuuugggaggcugag

SEQ ID NO: 1256445 - RNA, 22 nt, Human
agccuaggcaacauagugagac

SEQ ID NO: 1256446 - RNA, 22 nt, Human
agccuggccaacauggugaaac

SEQ ID NO: 1256447 - RNA, 24 nt, Human
agccuggccaacauggugaaaccc

SEQ ID NO: 1256448 - RNA, 22 nt, Human
agcucgagacgauccugggcaa

SEQ ID NO: 1256449 - RNA, 21 nt, Human
aggaaagauuauuuaaaucaa

SEQ ID NO: 1256450 - RNA, 24 nt, Human
aggaucacuugagcccaggaguuc

SEQ ID NO: 1256451 - RNA, 21 nt, Human
aggcagaggcuacagugagcc

SEQ ID NO: 1256452 - RNA, 24 nt, Human
aggcagaggcuacagugagccgag

SEQ ID NO: 1256453 - RNA, 21 nt, Human
aggcaggagaauccuugaacc

SEQ ID NO: 1256454 - RNA, 23 nt, Human
aggcaggagaauccuugaaccug

SEQ ID NO: 1256455 - RNA, 26 nt, Human
aggcagguggauuacuugaggucagg

SEQ ID NO: 1256456 - RNA, 24 nt, Human
aggcaugguggcucaugccuguaa

SEQ ID NO: 1256457 - RNA, 18 nt, Human
aggcgggaggaucacuug

SEQ ID NO: 1256458 - RNA, 23 nt, Human
aggcgggaggaucacuugagccc

SEQ ID NO: 1256459 - RNA, 20 nt, Human
aggcuaaggugggaggauug

SEQ ID NO: 1256460 - RNA, 24 nt, Human
aggcugagacaggaggauugcuug

SEQ ID NO: 1256461 - RNA, 23 nt, Human
aggcugaggcaggagaauccuug

SEQ ID NO: 1256462 - RNA, 21 nt, Human
aggcugaggcagguggauuac

SEQ ID NO: 1256463 - RNA, 24 nt, Human
aggcugaggcagguggauuacuug

SEQ ID NO: 1256464 - RNA, 22 nt, Human
agguggauuacuugaggucagg

SEQ ID NO: 1256465 - RNA, 22 nt, Human
agguguuugcagggggcucugg

SEQ ID NO: 1256466 - RNA, 24 nt, Human
agucagaaggaucaauugagucca

SEQ ID NO: 1256467 - RNA, 18 nt, Human
agugcugggauuacaggc

SEQ ID NO: 1256468 - RNA, 19 nt, Human
agugcuuugggaggcugag

SEQ ID NO: 1256469 - RNA, 24 nt, Human
aguggugggcgucuguaaucucag

SEQ ID NO: 1256470 - RNA, 19 nt, Human
auauaccuguaacuucagu

SEQ ID NO: 1256471 - RNA, 21 nt, Human
aucacuugagcccaggaguuc

SEQ ID NO: 1256472 - RNA, 24 nt, Human
auccugggcaacuuugugagaccu

SEQ ID NO: 1256473 - RNA, 19 nt, Human
augccaugcuagcucaaaa

SEQ ID NO: 1256474 - RNA, 19 nt, Human
augccuguaauccuagcac

SEQ ID NO: 1256475 - RNA, 24 nt, Human
auugagccacugcccuccagccug

SEQ ID NO: 1256476 - RNA, 24 nt, Human
auugcaccacugcacuccagacug

SEQ ID NO: 1256477 - RNA, 18 nt, Human
auuuagacaucauaccuu

SEQ ID NO: 1256478 - RNA, 18 nt, Human
auuuccagcaagcucuuu

SEQ ID NO: 1256479 - RNA, 22 nt, Human
auuuugaggccaggcauggugg

SEQ ID NO: 1256480 - RNA, 23 nt, Human
caaaaacaacaacaaaauuaccu

SEQ ID NO: 1256481 - RNA, 24 nt, Human
caaaacacaaaguaugugagucag

SEQ ID NO: 1256482 - RNA, 24 nt, Human
caaagugcugggauuacaggcgug

SEQ ID NO: 1256483 - RNA, 23 nt, Human
caacaaaauuaccuggcuguggu

SEQ ID NO: 1256484 - RNA, 21 nt, Human
caacauagugagacccugucu

SEQ ID NO: 1256485 - RNA, 21 nt, Human
caacauagugagacccugucu

SEQ ID NO: 1256486 - RNA, 24 nt, Human
caacauagugagacccugucuuua

SEQ ID NO: 1256487 - RNA, 24 nt, Human
caacauggugaaaccccuuuucua

SEQ ID NO: 1256488 - RNA, 23 nt, Human
cacuacuccagaggcuaaggugg

SEQ ID NO: 1256489 - RNA, 23 nt, Human
cacuccagacugggugguagagc

SEQ ID NO: 1256490 - RNA, 19 nt, Human
cacugcacuccagacuggg

SEQ ID NO: 1256491 - RNA, 19 nt, Human
cacugcacuccagacuggg

SEQ ID NO: 1256492 - RNA, 23 nt, Human
cacugcacuccagacuggguggu

SEQ ID NO: 1256493 - RNA, 24 nt, Human
cacugcacuccagacuggguggua

SEQ ID NO: 1256494 - RNA, 25 nt, Human
cacugcacuccagacugggugguag

SEQ ID NO: 1256495 - RNA, 21 nt, Human
cacugcaguccagccagggca

SEQ ID NO: 1256496 - RNA, 24 nt, Human
cacugcaguccagccagggcaaca

SEQ ID NO: 1256497 - RNA, 24 nt, Human
cacugcccuccagccugggcaaca

SEQ ID NO: 1256498 - RNA, 18 nt, Human
cagaaugagaucaucucu

SEQ ID NO: 1256499 - RNA, 27 nt, Human
cagcaagcucuuugucccucaaagccc

SEQ ID NO: 1256500 - RNA, 24 nt, Human
cagcacucugggaggcugaggcag

SEQ ID NO: 1256501 - RNA, 26 nt, Human
cagcacucugggaggcugaggcaggu

SEQ ID NO: 1256502 - RNA, 20 nt, Human
cagccagggcaacagagcaa

SEQ ID NO: 1256503 - RNA, 25 nt, Human
cagcccguggaagacgagccacugg

SEQ ID NO: 1256504 - RNA, 24 nt, Human
cagcuacuugggaggcugaggcag

SEQ ID NO: 1256505 - RNA, 23 nt, Human
caggaggauugcuugcggccagg

SEQ ID NO: 1256506 - RNA, 23 nt, Human
caggugucucccuuugcaauuuc

SEQ ID NO: 1256507 - RNA, 24 nt, Human
cagugcuuugggaggcugagacag

SEQ ID NO: 1256508 - RNA, 20 nt, Human
caugccuguaauccuagcac

SEQ ID NO: 1256509 - RNA, 24 nt, Human
caugccuguaauccuagcacuuug

SEQ ID NO: 1256510 - RNA, 22 nt, Human
ccaaagugcugggauuacaggc

SEQ ID NO: 1256511 - RNA, 22 nt, Human
ccaaagugcugggauuacaggc

SEQ ID NO: 1256512 - RNA, 24 nt, Human
ccaaagugcugggauuacaggcgu

SEQ ID NO: 1256513 - RNA, 21 nt, Human
ccacuaacagcuucauuuaga

SEQ ID NO: 1256514 - RNA, 20 nt, Human
ccacugcacuccagacuggg

SEQ ID NO: 1256515 - RNA, 20 nt, Human
ccacugcacuccagacuggg

SEQ ID NO: 1256516 - RNA, 21 nt, Human
ccacugcacuccagacugggu

SEQ ID NO: 1256517 - RNA, 22 nt, Human
ccacugcacuccagacugggug

SEQ ID NO: 1256518 - RNA, 23 nt, Human
ccacugcacuccagacugggugg

SEQ ID NO: 1256519 - RNA, 24 nt, Human
ccacugcacuccagacuggguggu

SEQ ID NO: 1256520 - RNA, 21 nt, Human
ccacugcccuccagccugggc

SEQ ID NO: 1256521 - RNA, 22 nt, Human
ccacugcccuccagccugggca

SEQ ID NO: 1256522 - RNA, 23 nt, Human
ccacugcccuccagccugggcaa

SEQ ID NO: 1256523 - RNA, 24 nt, Human
ccacugcccuccagccugggcaac

SEQ ID NO: 1256524 - RNA, 23 nt, Human
ccaugcuagcucaaaaaacaaag

SEQ ID NO: 1256525 - RNA, 22 nt, Human
cccacagcugccuguugaccug

SEQ ID NO: 1256526 - RNA, 19 nt, Human
ccgcgcccggccggcuuac

SEQ ID NO: 1256527 - RNA, 18 nt, Human
ccuggccaacauggugaa

SEQ ID NO: 1256528 - RNA, 23 nt, Human
ccuggccaacauggugaaacccc

SEQ ID NO: 1256529 - RNA, 23 nt, Human
cgucuguaaucucagcuacuugg

SEQ ID NO: 1256530 - RNA, 24 nt, Human
cgucuguaaucucagcuacuuggg

SEQ ID NO: 1256531 - RNA, 24 nt, Human
cucaugccuguaauccuagcacuu

SEQ ID NO: 1256532 - RNA, 24 nt, Human
cuccugaccucgugauccgcccgc

SEQ ID NO: 1256533 - RNA, 21 nt, Human
cugggccucccaaagugcugg

SEQ ID NO: 1256534 - RNA, 21 nt, Human
cugggugguagagcaagacuc

SEQ ID NO: 1256535 - RNA, 20 nt, Human
cuuaaaaaaaaaaggagaaa

SEQ ID NO: 1256536 - RNA, 22 nt, Human
cuugagcccaggaguucgaggc

SEQ ID NO: 1256537 - RNA, 23 nt, Human
cuugugguccccacuacuccaga

SEQ ID NO: 1256538 - RNA, 20 nt, Human
gaccucgugauccgcccgcc

SEQ ID NO: 1256539 - RNA, 21 nt, Human
gaccucgugauccgcccgccu

SEQ ID NO: 1256540 - RNA, 23 nt, Human
gaccucgugauccgcccgccugg

SEQ ID NO: 1256541 - RNA, 22 nt, Human
gagaauccuugaaccugggagg

SEQ ID NO: 1256542 - RNA, 22 nt, Human
gagagacaccaugaaaaacaaa

SEQ ID NO: 1256543 - RNA, 23 nt, Human
gagauugcaccacugcacuccag

SEQ ID NO: 1256544 - RNA, 21 nt, Human
gagcccacagcugccuguuga

SEQ ID NO: 1256545 - RNA, 18 nt, Human
gagcccaggaguucgagg

SEQ ID NO: 1256546 - RNA, 24 nt, Human
gaggcaggagaauccuugaaccug

SEQ ID NO: 1256547 - RNA, 23 nt, Human
gaggcagguggauuacuugaggu

SEQ ID NO: 1256548 - RNA, 22 nt, Human
gaggcugagacaggaggauugc

SEQ ID NO: 1256549 - RNA, 24 nt, Human
gaucacuugagcccaggaguucga

SEQ ID NO: 1256550 - RNA, 18 nt, Human
gauuacaggcgugagcca

SEQ ID NO: 1256551 - RNA, 22 nt, Human
gauuacaggcgugagccaccgc

SEQ ID NO: 1256552 - RNA, 22 nt, Human
gauuacaggcgugagccaccgc

SEQ ID NO: 1256553 - RNA, 24 nt, Human
gauuacuugaggucaggcguuuga

SEQ ID NO: 1256554 - RNA, 18 nt, Human
gcacaagugcucaaaaga

SEQ ID NO: 1256555 - RNA, 24 nt, Human
gcacuccagacugggugguagagc

SEQ ID NO: 1256556 - RNA, 19 nt, Human
gccaacauggugaaacccc

SEQ ID NO: 1256557 - RNA, 22 nt, Human
gccacugcccuccagccugggc

SEQ ID NO: 1256558 - RNA, 22 nt, Human
gccaggcaugguggcucaugcc

SEQ ID NO: 1256559 - RNA, 24 nt, Human
gcccaggaguucgaggcugcagug

SEQ ID NO: 1256560 - RNA, 18 nt, Human
ggaaaggugacauaauaa

SEQ ID NO: 1256561 - RNA, 19 nt, Human
ggagaauccuugaaccugg

SEQ ID NO: 1256562 - RNA, 20 nt, Human
ggaggcagaggcuacaguga

SEQ ID NO: 1256563 - RNA, 21 nt, Human
ggaggcagaggcuacagugag

SEQ ID NO: 1256564 - RNA, 19 nt, Human
ggagugcaaaaccagccua

SEQ ID NO: 1256565 - RNA, 21 nt, Human
ggagugcaaaaccagccuagg

SEQ ID NO: 1256566 - RNA, 23 nt, Human
ggaucacuugagcccaggaguuc

SEQ ID NO: 1256567 - RNA, 24 nt, Human
ggauggucucgaucuccugaccuc

SEQ ID NO: 1256568 - RNA, 24 nt, Human
ggcgucuguaaucucagcuacuug

SEQ ID NO: 1256569 - RNA, 21 nt, Human
gggaggcagaggcuacaguga

SEQ ID NO: 1256570 - RNA, 22 nt, Human
gggcuuuccuuaugcuuguuuu

SEQ ID NO: 1256571 - RNA, 24 nt, Human
gguagagcaagacucugucucaga

SEQ ID NO: 1256572 - RNA, 21 nt, Human
ggucugccuuugugucuguuu

SEQ ID NO: 1256573 - RNA, 24 nt, Human
gguggcucaugccuguaauccuag

SEQ ID NO: 1256574 - RNA, 23 nt, Human
guagagcaagacucugucucaga

SEQ ID NO: 1256575 - RNA, 19 nt, Human
gucuuuacaaaaacaacaa

SEQ ID NO: 1256576 - RNA, 22 nt, Human
uaagcugguuguguggaauuug

SEQ ID NO: 1256577 - RNA, 23 nt, Human
uaaggugggaggauugcuuaagc

SEQ ID NO: 1256578 - RNA, 24 nt, Human
uacaaaaaaaaaaaaaaaaaaaaa

SEQ ID NO: 1256579 - RNA, 20 nt, Human
uacaaaaacaacaacaaaau

SEQ ID NO: 1256580 - RNA, 27 nt, Human
uacagcacucugggaggcugaggcagg

SEQ ID NO: 1256581 - RNA, 23 nt, Human
uacaggcgugagccaccgcgccc

SEQ ID NO: 1256582 - RNA, 25 nt, Human
uacccuguucaacugugaugagauu

SEQ ID NO: 1256583 - RNA, 24 nt, Human
uaccuguaacuucagugcuuuggg

SEQ ID NO: 1256584 - RNA, 21 nt, Human
uacucaaguaggaaaggggag

SEQ ID NO: 1256585 - RNA, 19 nt, Human
uacuccagaggcuaaggug

SEQ ID NO: 1256586 - RNA, 24 nt, Human
uacuuggugcuggccagauguggu

SEQ ID NO: 1256587 - RNA, 18 nt, Human
uagcacuuugggaggcug

SEQ ID NO: 1256588 - RNA, 24 nt, Human
uagcacuuugggaggcugagucag

SEQ ID NO: 1256589 - RNA, 27 nt, Human
uagcccacuaacagcuucauuuagaca

SEQ ID NO: 1256590 - RNA, 18 nt, Human
uagcuggaccuaguggug

SEQ ID NO: 1256591 - RNA, 21 nt, Human
uaggccaggugugguggcuca

SEQ ID NO: 1256592 - RNA, 24 nt, Human
uauaccuguaacuucagugcuuug

SEQ ID NO: 1256593 - RNA, 21 nt, Human
uauaguaguuacacuaugaaa

SEQ ID NO: 1256594 - RNA, 19 nt, Human
uauguuagaaaaacuagag

SEQ ID NO: 1256595 - RNA, 20 nt, Human
ucaaaagagcucaggugucu

SEQ ID NO: 1256596 - RNA, 18 nt, Human
ucacugcaguccagccag

SEQ ID NO: 1256597 - RNA, 21 nt, Human
ucacugcaguccagccagggc

SEQ ID NO: 1256598 - RNA, 20 nt, Human
ucacuugagcccaggaguuc

SEQ ID NO: 1256599 - RNA, 25 nt, Human
ucaucucuacaaaaaaaaaaaaaaa

SEQ ID NO: 1256600 - RNA, 29 nt, Human
ucaucucuacaaaaaaaaaaaaaaaaaaa

SEQ ID NO: 1256601 - RNA, 24 nt, Human
ucccaaagugcugggauuacaggc

SEQ ID NO: 1256602 - RNA, 22 nt, Human
uccucaaugucacagguacuuc

SEQ ID NO: 1256603 - RNA, 24 nt, Human
uccuggagaucugucucuuguagg

SEQ ID NO: 1256604 - RNA, 24 nt, Human
uccugggcaacuuugugagaccuc

SEQ ID NO: 1256605 - RNA, 23 nt, Human
ucucuuguaggaaauggaggggc

SEQ ID NO: 1256606 - RNA, 21 nt, Human
ucuguaaucucagcuacuugg

SEQ ID NO: 1256607 - RNA, 20 nt, Human
ucuguuugugagcgugucua

SEQ ID NO: 1256608 - RNA, 21 nt, Human
ugaaaaacaaaacacaaagua

SEQ ID NO: 1256609 - RNA, 23 nt, Human
ugagaccagccuggccaacaugg

SEQ ID NO: 1256610 - RNA, 24 nt, Human
ugagaccagccuggccaacauggu

SEQ ID NO: 1256611 - RNA, 18 nt, Human
ugagcccaggaguucgag

SEQ ID NO: 1256612 - RNA, 22 nt, Human
ugagccgagauugcaccacugc

SEQ ID NO: 1256613 - RNA, 21 nt, Human
ugaggaaaggugacauaauaa

SEQ ID NO: 1256614 - RNA, 19 nt, Human
ugaggcaggagaauccuug

SEQ ID NO: 1256615 - RNA, 23 nt, Human
ugaggcaggagaauccuugaacc

SEQ ID NO: 1256616 - RNA, 23 nt, Human
ugaggcaggagaauccuugaacc

SEQ ID NO: 1256617 - RNA, 20 nt, Human
ugaggcagguggauuacuuc

SEQ ID NO: 1256618 - RNA, 24 nt, Human
ugaggcagguggauuacuugaggu

SEQ ID NO: 1256619 - RNA, 26 nt, Human
ugaggcagguggauuacuugagguca

SEQ ID NO: 1256620 - RNA, 24 nt, Human
ugaggccaggcaugguggcucaug

SEQ ID NO: 1256621 - RNA, 19 nt, Human
ugaggcgggaggaucacuu

SEQ ID NO: 1256622 - RNA, 21 nt, Human
ugaggcgggaggaucacuuga

SEQ ID NO: 1256623 - RNA, 24 nt, Human
ugaggcgggaggaucacuugagcc

SEQ ID NO: 1256624 - RNA, 18 nt, Human
ugaggucaggcguuugag

SEQ ID NO: 1256625 - RNA, 19 nt, Human
ugcaaaaccagccuaggca

SEQ ID NO: 1256626 - RNA, 19 nt, Human
ugccauuauacauaugucc

SEQ ID NO: 1256627 - RNA, 23 nt, Human
ugccuguaauccuagcacuuugg

SEQ ID NO: 1256628 - RNA, 24 nt, Human
ugccuguaauccuagcacuuuggg

SEQ ID NO: 1256629 - RNA, 24 nt, Human
ugcugggauuacaggcgugagcca

SEQ ID NO: 1256630 - RNA, 22 nt, Human
uggaagggggaggacaaaaugc

SEQ ID NO: 1256631 - RNA, 23 nt, Human
uggauuacuugaggucaggcguu

SEQ ID NO: 1256632 - RNA, 24 nt, Human
uggauuacuugaggucaggcguuu

SEQ ID NO: 1256633 - RNA, 22 nt, Human
uggcacaucccagcuccuuggg

SEQ ID NO: 1256634 - RNA, 23 nt, Human
uggccaacauggugaaaccccuu

SEQ ID NO: 1256635 - RNA, 19 nt, Human
uggcucaugccuguaaucc

SEQ ID NO: 1256636 - RNA, 24 nt, Human
uggcucaugccuguaauccuagca

SEQ ID NO: 1256637 - RNA, 24 nt, Human
ugggaagcugaggcgggaggauca

SEQ ID NO: 1256638 - RNA, 22 nt, Human
ugggaggauugcuuaagcccug

SEQ ID NO: 1256639 - RNA, 22 nt, Human
ugggaggcugagacaggaggau

SEQ ID NO: 1256640 - RNA, 18 nt, Human
ugggaggcugaggcagga

SEQ ID NO: 1256641 - RNA, 19 nt, Human
ugggaggcugaggcaggag

SEQ ID NO: 1256642 - RNA, 22 nt, Human
ugggaggcugaggcagguggau

SEQ ID NO: 1256643 - RNA, 19 nt, Human
ugggaggcugagucagaag

SEQ ID NO: 1256644 - RNA, 24 nt, Human
ugggaggcugagucagaaggauca

SEQ ID NO: 1256645 - RNA, 18 nt, Human
ugggauuacaggcgugag

SEQ ID NO: 1256646 - RNA, 19 nt, Human
ugggauuacaggcgugagc

SEQ ID NO: 1256647 - RNA, 21 nt, Human
ugggauuacaggcgugagcca

SEQ ID NO: 1256648 - RNA, 22 nt, Human
ugggauuacaggcgugagccac

SEQ ID NO: 1256649 - RNA, 23 nt, Human
ugggauuacaggcgugagccacc

SEQ ID NO: 1256650 - RNA, 24 nt, Human
ugggauuacaggcgugagccaccg

SEQ ID NO: 1256651 - RNA, 19 nt, Human
ugguaugugcuuguggucc

SEQ ID NO: 1256652 - RNA, 18 nt, Human
ugguggcucaugacucua

SEQ ID NO: 1256653 - RNA, 22 nt, Human
ugguggcucaugccuguaaucc

SEQ ID NO: 1256654 - RNA, 21 nt, Human
uggugggcgucuguaaucuca

SEQ ID NO: 1256655 - RNA, 23 nt, Human
uggugguaugugcuugugguccc

SEQ ID NO: 1256656 - RNA, 19 nt, Human
uguaggaaauggaggggcu

SEQ ID NO: 1256657 - RNA, 22 nt, Human
ugucuaaaaaagaaagcaauac

SEQ ID NO: 1256658 - RNA, 21 nt, Human
uguggaauuuggccccuaccu

SEQ ID NO: 1256659 - RNA, 23 nt, Human
uuaaaaaaaaaaggagaaagaua

SEQ ID NO: 1256660 - RNA, 19 nt, Human
uuaauaccucuuugccauu

SEQ ID NO: 1256661 - RNA, 18 nt, Human
uuacuuggaauuacccua

SEQ ID NO: 1256662 - RNA, 21 nt, Human
uuacuuggaauuacccuaaua

SEQ ID NO: 1256663 - RNA, 24 nt, Human
uuagcuggaccuaguggugggcgu

SEQ ID NO: 1256664 - RNA, 24 nt, Human
uuaggccaggugugguggcucaug

SEQ ID NO: 1256665 - RNA, 18 nt, Human
uucacaguauuggaaggg

SEQ ID NO: 1256666 - RNA, 21 nt, Human
uuccccauggcuuaaaauuca

SEQ ID NO: 1256667 - RNA, 23 nt, Human
uugcaccacugcacuccagacug

SEQ ID NO: 1256668 - RNA, 20 nt, Human
uuggccccuaccuuccacau

SEQ ID NO: 1256669 - RNA, 21 nt, Human
uuggccccuaccuuccacauu

SEQ ID NO: 1256670 - RNA, 25 nt, Human
uugggaagcugaggcgggaggauca

SEQ ID NO: 1256671 - RNA, 20 nt, Human
uugggaggcugagacaggag

SEQ ID NO: 1256672 - RNA, 25 nt, Human
uugggaggcugagucagaaggauca

SEQ ID NO: 1256673 - RNA, 20 nt, Human
uuucuacaaaaauacaaaaa

SEQ ID NO: 1256674 - RNA, 18 nt, Human
uuugaaggaugaggaagg

SEQ ID NO: 1256675 - RNA, 18 nt, Human
accucuuccuccucuuuc

SEQ ID NO: 1256676 - RNA, 19 nt, Human
cacuuuuuccucuucuuuu

SEQ ID NO: 1256677 - RNA, 23 nt, Human
cagugaauuucuuguuugagccu

SEQ ID NO: 1256678 - RNA, 19 nt, Human
ucacuuuuuccucuucuuu

SEQ ID NO: 1256679 - RNA, 29 nt, Human
ucacuuuuuccucuucuuuuuuuccuuug

SEQ ID NO: 1256680 - RNA, 21 nt, Human
ucuuccuccucuuucacuuuu

SEQ ID NO: 1256681 - RNA, 25 nt, Human
ucuuccuccucuuucacuuuuuccu

SEQ ID NO: 1256682 - RNA, 24 nt, Human
uuuuuccucuucuuuuuuuccuuu

SEQ ID NO: 1256683 - RNA, 22 nt, Human
aucuuaauaagaugguccaauc

SEQ ID NO: 1256684 - RNA, 21 nt, Human
aaaagaaagcaaauuggacga

SEQ ID NO: 1256685 - RNA, 21 nt, Human
aaacagcguaauaacaagaac

SEQ ID NO: 1256686 - RNA, 19 nt, Human
aaacaggaaucaaaauggc

SEQ ID NO: 1256687 - RNA, 19 nt, Human
aaacaggaaucaaaauggc

SEQ ID NO: 1256688 - RNA, 21 nt, Human
aaagcaaaaaauaaacugaaa

SEQ ID NO: 1256689 - RNA, 22 nt, Human
aaagcagaaguaacagcaauau

SEQ ID NO: 1256690 - RNA, 21 nt, Human
aaccagcgcggccccgagcag

SEQ ID NO: 1256691 - RNA, 20 nt, Human
aagcaagacaaagcaauaga

SEQ ID NO: 1256692 - RNA, 18 nt, Human
acaaaacagcguaauaac

SEQ ID NO: 1256693 - RNA, 21 nt, Human
agaaaaugaaugcgagccaag

SEQ ID NO: 1256694 - RNA, 21 nt, Human
agacauagcagagaaggcaua

SEQ ID NO: 1256695 - RNA, 22 nt, Human
agcguaauaacaagaacgauca

SEQ ID NO: 1256696 - RNA, 23 nt, Human
auaaaaagcacuuguuuucuaca

SEQ ID NO: 1256697 - RNA, 24 nt, Human
auaacaacaaucuuucuuuucaau

SEQ ID NO: 1256698 - RNA, 19 nt, Human
aucauuuaaacaagucagu

SEQ ID NO: 1256699 - RNA, 20 nt, Human
auugugcuucuuuugcagaa

SEQ ID NO: 1256700 - RNA, 23 nt, Human
caaaacagcguaauaacaagaac

SEQ ID NO: 1256701 - RNA, 19 nt, Human
caaauaacugaugggugau

SEQ ID NO: 1256702 - RNA, 18 nt, Human
caacacuuacaaugggac

SEQ ID NO: 1256703 - RNA, 18 nt, Human
cacccucacaaauaacug

SEQ ID NO: 1256704 - RNA, 23 nt, Human
cacuuacaaugggacuguacaaa

SEQ ID NO: 1256705 - RNA, 26 nt, Human
caugaaacaauauucauauagaauaa

SEQ ID NO: 1256706 - RNA, 24 nt, Human
cccacauccccauugucucgcccc

SEQ ID NO: 1256707 - RNA, 18 nt, Human
ccccgaucucugccucuc

SEQ ID NO: 1256708 - RNA, 18 nt, Human
cccgagcagccgcggccg

SEQ ID NO: 1256709 - RNA, 20 nt, Human
ccgccgccgccuccucccgc

SEQ ID NO: 1256710 - RNA, 20 nt, Human
ccgccgccgccuccucccgc

SEQ ID NO: 1256711 - RNA, 22 nt, Human
ccgccgccgccuccucccgcuc

SEQ ID NO: 1256712 - RNA, 24 nt, Human
ccgccucgaccuccaacgccuccu

SEQ ID NO: 1256713 - RNA, 19 nt, Human
ccggcgccucggccuccuc

SEQ ID NO: 1256714 - RNA, 19 nt, Human
ccggcgccucggccuccuc

SEQ ID NO: 1256715 - RNA, 22 nt, Human
ccucccgcuccgcacucggggg

SEQ ID NO: 1256716 - RNA, 20 nt, Human
ccuccggccggccuccuccu

SEQ ID NO: 1256717 - RNA, 20 nt, Human
ccuccucggccgccgccgcc

SEQ ID NO: 1256718 - RNA, 22 nt, Human
ccucucauacuacgauuauuuc

SEQ ID NO: 1256719 - RNA, 25 nt, Human
ccuguagaagcucauaauaaauagc

SEQ ID NO: 1256720 - RNA, 22 nt, Human
cggaaaagacaaugaaaguuaa

SEQ ID NO: 1256721 - RNA, 19 nt, Human
cggccccgagcagccgcgg

SEQ ID NO: 1256722 - RNA, 21 nt, Human
cggccgccgccgccuccuccc

SEQ ID NO: 1256723 - RNA, 20 nt, Human
cucccgcgcccacaucccca

SEQ ID NO: 1256724 - RNA, 19 nt, Human
cuccgccucgaccuccaac

SEQ ID NO: 1256725 - RNA, 20 nt, Human
cuccgccucgaccuccaacc

SEQ ID NO: 1256726 - RNA, 23 nt, Human
cuccucggccgccgccgccuccu

SEQ ID NO: 1256727 - RNA, 22 nt, Human
cugcagaguacuuccaaaucca

SEQ ID NO: 1256728 - RNA, 23 nt, Human
cuuccaaauccaaacaaugguua

SEQ ID NO: 1256729 - RNA, 23 nt, Human
cuuuaaaguaaacauguauuacu

SEQ ID NO: 1256730 - RNA, 20 nt, Human
gacaaugaaaguuaaaaguc

SEQ ID NO: 1256731 - RNA, 21 nt, Human
gacaaugaaauguuuagcuac

SEQ ID NO: 1256732 - RNA, 21 nt, Human
gaccuccaacgccuccuccuc

SEQ ID NO: 1256733 - RNA, 22 nt, Human
gcagaguacuuccaaauccaaa

SEQ ID NO: 1256734 - RNA, 19 nt, Human
gccgccgccgccuccuccc

SEQ ID NO: 1256735 - RNA, 20 nt, Human
gcgaucgguuuuauucugcg

SEQ ID NO: 1256736 - RNA, 24 nt, Human
ggcgaucgaagcgggcggaaaaga

SEQ ID NO: 1256737 - RNA, 25 nt, Human
ggggagggcgcgcgcggagggggcg

SEQ ID NO: 1256738 - RNA, 19 nt, Human
guacaacaagcauaaugcc

SEQ ID NO: 1256739 - RNA, 19 nt, Human
guacuuccaaauccaaaca

SEQ ID NO: 1256740 - RNA, 19 nt, Human
uaaaauaaacgguaguacc

SEQ ID NO: 1256741 - RNA, 21 nt, Human
uaaagguuuuucuucacugca

SEQ ID NO: 1256742 - RNA, 19 nt, Human
uaacacagagaaaaagucu

SEQ ID NO: 1256743 - RNA, 25 nt, Human
uacaaaagaaagcaaauuggacgau

SEQ ID NO: 1256744 - RNA, 20 nt, Human
uagaagcucauaauaaauag

SEQ ID NO: 1256745 - RNA, 22 nt, Human
uagcaacagagaaguauaaauc

SEQ ID NO: 1256746 - RNA, 21 nt, Human
uauggcccaaugcuuaugucc

SEQ ID NO: 1256747 - RNA, 24 nt, Human
ucagggguuuaaaauuuuuuuccu

SEQ ID NO: 1256748 - RNA, 20 nt, Human
uccauuguuaacuguaaaag

SEQ ID NO: 1256749 - RNA, 22 nt, Human
uccuccuccggggccuccuccu

SEQ ID NO: 1256750 - RNA, 18 nt, Human
ucuauaauuagaaacaac

SEQ ID NO: 1256751 - RNA, 19 nt, Human
ucuuuuagcaaccugcugg

SEQ ID NO: 1256752 - RNA, 27 nt, Human
ugaaacaauauucauauagaauaaaca

SEQ ID NO: 1256753 - RNA, 22 nt, Human
ugacuucauaaaacauccuuua

SEQ ID NO: 1256754 - RNA, 19 nt, Human
ugagauuaacaaacuaugg

SEQ ID NO: 1256755 - RNA, 18 nt, Human
ugauaaaaaaucccggaa

SEQ ID NO: 1256756 - RNA, 21 nt, Human
ugggaggugcugcuaagccgg

SEQ ID NO: 1256757 - RNA, 26 nt, Human
ugugccaauugcuucuaauggaacag

SEQ ID NO: 1256758 - RNA, 23 nt, Human
uguugggugggguuauucauauu

SEQ ID NO: 1256759 - RNA, 19 nt, Human
uuaaagaaagcagaaguaa

SEQ ID NO: 1256760 - RNA, 20 nt, Human
uuaaugucacuacaaaagaa

SEQ ID NO: 1256761 - RNA, 22 nt, Human
uucgaccaaagcaaaaaauaaa

SEQ ID NO: 1256762 - RNA, 20 nt, Human
uuuuaaagaaagcagaagua

SEQ ID NO: 1256763 - RNA, 25 nt, Human
uuuuauagccaaauuuaaugucacu

SEQ ID NO: 1256764 - RNA, 30 nt, Human
aaaaaaacgaaaacaacaacaacaaaaaag

SEQ ID NO: 1256765 - RNA, 27 nt, Human
aaaaacgaaaacaacaacaacaaaaaa

SEQ ID NO: 1256766 - RNA, 22 nt, Human
aaacaacaacaacaaaaaagca

SEQ ID NO: 1256767 - RNA, 23 nt, Human
aaacaacaacaacaaaaaagcaa

SEQ ID NO: 1256768 - RNA, 19 nt, Human
aaacacccggcagccgccg

SEQ ID NO: 1256769 - RNA, 18 nt, Human
aaacuaugaaacugcccc

SEQ ID NO: 1256770 - RNA, 21 nt, Human
aaacuaugaaacugccccgcu

SEQ ID NO: 1256771 - RNA, 21 nt, Human
aacaaaaaagcaagaaucaag

SEQ ID NO: 1256772 - RNA, 18 nt, Human
aacgaaaacaacaacaac

SEQ ID NO: 1256773 - RNA, 21 nt, Human
aaucugcagagcugggccccc

SEQ ID NO: 1256774 - RNA, 23 nt, Human
acaacaaaaaagcaagaaucaag

SEQ ID NO: 1256775 - RNA, 21 nt, Human
acaacaacaacaaaaaagcaa

SEQ ID NO: 1256776 - RNA, 19 nt, Human
accaccaccaccaccacca

SEQ ID NO: 1256777 - RNA, 21 nt, Human
accaccaccaccaccaccauc

SEQ ID NO: 1256778 - RNA, 24 nt, Human
accaccaccaccaccaccaucacc

SEQ ID NO: 1256779 - RNA, 24 nt, Human
accaccaccaccaccaucaccacc

SEQ ID NO: 1256780 - RNA, 22 nt, Human
accaccaccaccaucaccacca

SEQ ID NO: 1256781 - RNA, 24 nt, Human
accaccaucaccaccaccaccacc

SEQ ID NO: 1256782 - RNA, 22 nt, Human
accaucaccaccaccaccacca

SEQ ID NO: 1256783 - RNA, 21 nt, Human
acgaaaacaacaacaacaaaa

SEQ ID NO: 1256784 - RNA, 19 nt, Human
acgcggccaacgacucgga

SEQ ID NO: 1256785 - RNA, 25 nt, Human
agaccaacacacuggcagaucagaa

SEQ ID NO: 1256786 - RNA, 18 nt, Human
agaggaggaggagggaga

SEQ ID NO: 1256787 - RNA, 20 nt, Human
agaggaggaggagggagagg

SEQ ID NO: 1256788 - RNA, 19 nt, Human
agaggaggaggaggggggc

SEQ ID NO: 1256789 - RNA, 18 nt, Human
aggaagaggaggaggagg

SEQ ID NO: 1256790 - RNA, 18 nt, Human
aggaagaggaggaggagg

SEQ ID NO: 1256791 - RNA, 18 nt, Human
aggaagaggaggaggagg

SEQ ID NO: 1256792 - RNA, 18 nt, Human
aggaagaggaggaggagg

SEQ ID NO: 1256793 - RNA, 19 nt, Human
aggaagaggaggaggaggg

SEQ ID NO: 1256794 - RNA, 20 nt, Human
aggaagaggaggaggagggg

SEQ ID NO: 1256795 - RNA, 23 nt, Human
aggaagaggaggaggaggggggc

SEQ ID NO: 1256796 - RNA, 21 nt, Human
aggaaggaauagaggggccca

SEQ ID NO: 1256797 - RNA, 18 nt, Human
aggaggaagaggaggagg

SEQ ID NO: 1256798 - RNA, 28 nt, Human
aggaggaggaagaggaggaggagggggg

SEQ ID NO: 1256799 - RNA, 19 nt, Human
aggaggaggaggaagagga

SEQ ID NO: 1256800 - RNA, 22 nt, Human
aggaggaggaggaggaagagga

SEQ ID NO: 1256801 - RNA, 21 nt, Human
aggaggaggagggagaggagg

SEQ ID NO: 1256802 - RNA, 21 nt, Human
aggaggaggagggagaggagg

SEQ ID NO: 1256803 - RNA, 26 nt, Human
aggaggaggaggggggcagcggggcc

SEQ ID NO: 1256804 - RNA, 22 nt, Human
aggaggaggggggcagcggggc

SEQ ID NO: 1256805 - RNA, 18 nt, Human
agggagaggaggaggagg

SEQ ID NO: 1256806 - RNA, 22 nt, Human
aggggcccagguacugaucugc

SEQ ID NO: 1256807 - RNA, 26 nt, Human
auuucaugggguuuccccccccccaa

SEQ ID NO: 1256808 - RNA, 20 nt, Human
auuuuuagcaaauaccccgg

SEQ ID NO: 1256809 - RNA, 20 nt, Human
caaacccccucuaaacuaug

SEQ ID NO: 1256810 - RNA, 19 nt, Human
caaauaccccggcucgcaa

SEQ ID NO: 1256811 - RNA, 20 nt, Human
caacaaaaaagcaagaauca

SEQ ID NO: 1256812 - RNA, 22 nt, Human
caacaacaacaaaaaagcaaga

SEQ ID NO: 1256813 - RNA, 25 nt, Human
caccaccaccaccaccaccgggccc

SEQ ID NO: 1256814 - RNA, 23 nt, Human
caccaccaccaccaccaucacca

SEQ ID NO: 1256815 - RNA, 22 nt, Human
caccaccaccaccaccgggccc

SEQ ID NO: 1256816 - RNA, 26 nt, Human
caccaccaccaccgggcccagccgcc

SEQ ID NO: 1256817 - RNA, 19 nt, Human
caccaccaccaucaccacc

SEQ ID NO: 1256818 - RNA, 19 nt, Human
caccaccaccgggcccagc

SEQ ID NO: 1256819 - RNA, 19 nt, Human
caccaucaccaccaccacc

SEQ ID NO: 1256820 - RNA, 19 nt, Human
caccccccucaccaccacc

SEQ ID NO: 1256821 - RNA, 23 nt, Human
caccccccucaccaccaccggcc

SEQ ID NO: 1256822 - RNA, 19 nt, Human
cagagucaccaccccccuc

SEQ ID NO: 1256823 - RNA, 22 nt, Human
cagcagagucaccaccccccuc

SEQ ID NO: 1256824 - RNA, 20 nt, Human
cagccccaucugggcagcuu

SEQ ID NO: 1256825 - RNA, 24 nt, Human
caucugggcagcuuucccgagagc

SEQ ID NO: 1256826 - RNA, 21 nt, Human
ccaccaccaccaccaccacca

SEQ ID NO: 1256827 - RNA, 26 nt, Human
ccaccaccaccaccaccaucaccacc

SEQ ID NO: 1256828 - RNA, 22 nt, Human
ccaccaccaccaccaccgggcc

SEQ ID NO: 1256829 - RNA, 21 nt, Human
ccaccaccaccaccaucacca

SEQ ID NO: 1256830 - RNA, 23 nt, Human
ccaccaccaccaucaccaccacc

SEQ ID NO: 1256831 - RNA, 20 nt, Human
ccaccaucaccaccaccacc

SEQ ID NO: 1256832 - RNA, 26 nt, Human
ccaccgagucggacuccagcuccggc

SEQ ID NO: 1256833 - RNA, 21 nt, Human
ccaccgggcccagccgccgca

SEQ ID NO: 1256834 - RNA, 27 nt, Human
cccccucaccaccaccggccgcagccc

SEQ ID NO: 1256835 - RNA, 23 nt, Human
ccgaccucaagaguagugucaaa

SEQ ID NO: 1256836 - RNA, 19 nt, Human
ccgcaccaccaccaccacc

SEQ ID NO: 1256837 - RNA, 22 nt, Human
ccgccgccgcgggggccacuug

SEQ ID NO: 1256838 - RNA, 24 nt, Human
ccgcugcaaccaaacccgcugcuu

SEQ ID NO: 1256839 - RNA, 20 nt, Human
ccucuaaacuaugaaacugc

SEQ ID NO: 1256840 - RNA, 20 nt, Human
cgacuccgaguccagcuccu

SEQ ID NO: 1256841 - RNA, 18 nt, Human
cgcaccaccaccaccacc

SEQ ID NO: 1256842 - RNA, 23 nt, Human
cgcaccaccaccaccaccaccac

SEQ ID NO: 1256843 - RNA, 22 nt, Human
cgccgugcaaacccccucuaaa

SEQ ID NO: 1256844 - RNA, 18 nt, Human
cucagaccaacacacugg

SEQ ID NO: 1256845 - RNA, 22 nt, Human
cugcagcagcgacuccgagucc

SEQ ID NO: 1256846 - RNA, 24 nt, Human
cugcauuucuuuucucuuucuccc

SEQ ID NO: 1256847 - RNA, 18 nt, Human
cugcccggccagccuggg

SEQ ID NO: 1256848 - RNA, 19 nt, Human
cuuucccgagagcugcagc

SEQ ID NO: 1256849 - RNA, 23 nt, Human
gaaaacaacaacaacaaaaaagc

SEQ ID NO: 1256850 - RNA, 24 nt, Human
gaccacgcggccaacgacucggau

SEQ ID NO: 1256851 - RNA, 24 nt, Human
gaggaggaggggggcagcggggcc

SEQ ID NO: 1256852 - RNA, 22 nt, Human
gcaaacccccucuaaacuauga

SEQ ID NO: 1256853 - RNA, 21 nt, Human
gcaccaccaccaccaccacca

SEQ ID NO: 1256854 - RNA, 26 nt, Human
gcagagcauccgauucaggcgcacca

SEQ ID NO: 1256855 - RNA, 24 nt, Human
gcccgccuccgcaccaccaccacc

SEQ ID NO: 1256856 - RNA, 21 nt, Human
gccgcgggggccacuugccug

SEQ ID NO: 1256857 - RNA, 20 nt, Human
gcucgcacuacccggagauc

SEQ ID NO: 1256858 - RNA, 24 nt, Human
gcugcaaccaaacccgcugcuuua

SEQ ID NO: 1256859 - RNA, 18 nt, Human
ggaggaggaggaagagga

SEQ ID NO: 1256860 - RNA, 29 nt, Human
ggaggaggaggaagaggaggaggaggggg

SEQ ID NO: 1256861 - RNA, 20 nt, Human
ggaggaggaggggggcagcg

SEQ ID NO: 1256862 - RNA, 22 nt, Human
ggaggaggaggggggcagcggg

SEQ ID NO: 1256863 - RNA, 18 nt, Human
ggcagcuuucccgagagc

SEQ ID NO: 1256864 - RNA, 22 nt, Human
uaacauacauacauguguaugu

SEQ ID NO: 1256865 - RNA, 22 nt, Human
uacauguguauguaugcgucac

SEQ ID NO: 1256866 - RNA, 23 nt, Human
uagcaaauaccccggcucgcacu

SEQ ID NO: 1256867 - RNA, 22 nt, Human
ucaacggcuucugcccgccucc

SEQ ID NO: 1256868 - RNA, 25 nt, Human
ucaccaccaccaccaccaccaccgg

SEQ ID NO: 1256869 - RNA, 27 nt, Human
ucaccaccaccggccgcagccccaucu

SEQ ID NO: 1256870 - RNA, 19 nt, Human
uccaccgagucggacucca

SEQ ID NO: 1256871 - RNA, 21 nt, Human
uccgcaccaccaccaccacca

SEQ ID NO: 1256872 - RNA, 21 nt, Human
ucgcacuacccggagaucgug

SEQ ID NO: 1256873 - RNA, 19 nt, Human
ucggagccugcugugcagc

SEQ ID NO: 1256874 - RNA, 27 nt, Human
ucgugcgcucgccgugcaaaccccucc

SEQ ID NO: 1256875 - RNA, 21 nt, Human
ucugcaagccucccagcgugc

SEQ ID NO: 1256876 - RNA, 18 nt, Human
ucugcccgccuccgcacc

SEQ ID NO: 1256877 - RNA, 22 nt, Human
ugaaacugccccgcuccaggga

SEQ ID NO: 1256878 - RNA, 19 nt, Human
ugagacacacgcagcaucu

SEQ ID NO: 1256879 - RNA, 28 nt, Human
ugaggauuaacauacauacauguguaug

SEQ ID NO: 1256880 - RNA, 25 nt, Human
ugcacaggaugguuuguacaagucc

SEQ ID NO: 1256881 - RNA, 21 nt, Human
ugcagcaaacacccggcagcc

SEQ ID NO: 1256882 - RNA, 21 nt, Human
uguauguaugcgucacguaua

SEQ ID NO: 1256883 - RNA, 23 nt, Human
uguauguaugcgucacguauaua

SEQ ID NO: 1256884 - RNA, 18 nt, Human
uguguauguaugcgucac

SEQ ID NO: 1256885 - RNA, 25 nt, Human
uguguauguaugcgucacguauaua

SEQ ID NO: 1256886 - RNA, 18 nt, Human
uuccagugaagucagcuc

SEQ ID NO: 1256887 - RNA, 24 nt, Human
uucuuuucucuuucucccuucaca

SEQ ID NO: 1256888 - RNA, 24 nt, Human
aaacauggccacagcagaugccgc

SEQ ID NO: 1256889 - RNA, 21 nt, Human
aacauggccacagcagaugcc

SEQ ID NO: 1256890 - RNA, 19 nt, Human
aauccuuaacccaggaccc

SEQ ID NO: 1256891 - RNA, 19 nt, Human
acacgguggcuggcgugca

SEQ ID NO: 1256892 - RNA, 21 nt, Human
acccagagaaccucaacccaa

SEQ ID NO: 1256893 - RNA, 18 nt, Human
acugagcgaugacuuucu

SEQ ID NO: 1256894 - RNA, 24 nt, Human
agaauaaggaguuuggaacuugaa

SEQ ID NO: 1256895 - RNA, 22 nt, Human
aggacaggcugagccucacugu

SEQ ID NO: 1256896 - RNA, 21 nt, Human
aggacccagagaaccucaacc

SEQ ID NO: 1256897 - RNA, 23 nt, Human
aggagagcuugaaggcaagaggc

SEQ ID NO: 1256898 - RNA, 20 nt, Human
aggaugcuuccagccugaaa

SEQ ID NO: 1256899 - RNA, 19 nt, Human
aggcacaggcacugggguc

SEQ ID NO: 1256900 - RNA, 18 nt, Human
aggcgccugauaaaaucc

SEQ ID NO: 1256901 - RNA, 20 nt, Human
aguccucguggcagcagccc

SEQ ID NO: 1256902 - RNA, 18 nt, Human
auccaguguguucugagc

SEQ ID NO: 1256903 - RNA, 19 nt, Human
auccgaaacaguuuugagg

SEQ ID NO: 1256904 - RNA, 24 nt, Human
augaaacaggacaggcugagccuc

SEQ ID NO: 1256905 - RNA, 20 nt, Human
caaaacauggccacagcaga

SEQ ID NO: 1256906 - RNA, 23 nt, Human
caccugccuccugagcugccggg

SEQ ID NO: 1256907 - RNA, 23 nt, Human
cagaauccuuaacccaggaccca

SEQ ID NO: 1256908 - RNA, 19 nt, Human
cagcagaugccgcuuuggc

SEQ ID NO: 1256909 - RNA, 18 nt, Human
cagcccugugccaccccc

SEQ ID NO: 1256910 - RNA, 23 nt, Human
cagccugaaaugauucauccccu

SEQ ID NO: 1256911 - RNA, 18 nt, Human
caggagagcuugaaggca

SEQ ID NO: 1256912 - RNA, 19 nt, Human
cauuacacccauuuucagc

SEQ ID NO: 1256913 - RNA, 21 nt, Human
ccaacccccucagucccugcc

SEQ ID NO: 1256914 - RNA, 20 nt, Human
ccagccccgugcugguccca

SEQ ID NO: 1256915 - RNA, 21 nt, Human
ccagugccuuccccuccuucc

SEQ ID NO: 1256916 - RNA, 22 nt, Human
cccagcccugugccacccccuc

SEQ ID NO: 1256917 - RNA, 19 nt, Human
cccccgcaaaacauggcca

SEQ ID NO: 1256918 - RNA, 20 nt, Human
ccccgugcuggucccagccc

SEQ ID NO: 1256919 - RNA, 22 nt, Human
cccgcaaaacauggccacagca

SEQ ID NO: 1256920 - RNA, 21 nt, Human
cccgugcuggucccagcccug

SEQ ID NO: 1256921 - RNA, 19 nt, Human
cccugagcccucaauuccc

SEQ ID NO: 1256922 - RNA, 20 nt, Human
ccucugcaggcuccacuccc

SEQ ID NO: 1256923 - RNA, 23 nt, Human
ccugcaaugcugcugcccagaaa

SEQ ID NO: 1256924 - RNA, 19 nt, Human
ccuucaucuuccugccucc

SEQ ID NO: 1256925 - RNA, 23 nt, Human
cgaugacuuucucucccccgcaa

SEQ ID NO: 1256926 - RNA, 25 nt, Human
cugugccacccccucugcaggcucc

SEQ ID NO: 1256927 - RNA, 23 nt, Human
cuuccagccugaaaugauucauc

SEQ ID NO: 1256928 - RNA, 19 nt, Human
cuuccugccacgccauuuc

SEQ ID NO: 1256929 - RNA, 22 nt, Human
gaacuugaacgacggcaaagug

SEQ ID NO: 1256930 - RNA, 22 nt, Human
gaaguucccggcauugcucaca

SEQ ID NO: 1256931 - RNA, 21 nt, Human
gagaggaaagagcagacauuu

SEQ ID NO: 1256932 - RNA, 22 nt, Human
gaggugggauguucaaagauuc

SEQ ID NO: 1256933 - RNA, 23 nt, Human
gaucauuacacccauuuucagca

SEQ ID NO: 1256934 - RNA, 26 nt, Human
gcagaauccuuaacccaggacccaga

SEQ ID NO: 1256935 - RNA, 20 nt, Human
gcccaacccccucagucccu

SEQ ID NO: 1256936 - RNA, 23 nt, Human
gcccaugcguggaagugagggag

SEQ ID NO: 1256937 - RNA, 22 nt, Human
gcccucaauuccccccaguccu

SEQ ID NO: 1256938 - RNA, 18 nt, Human
gccggaaaacguaaaacc

SEQ ID NO: 1256939 - RNA, 23 nt, Human
gcgccugauaaaaucccagggac

SEQ ID NO: 1256940 - RNA, 22 nt, Human
ggacccagagaaccucaaccca

SEQ ID NO: 1256941 - RNA, 23 nt, Human
ggccuggguggcagggcuggacc

SEQ ID NO: 1256942 - RNA, 27 nt, Human
gggccucgcuggucuuggguuggccuu

SEQ ID NO: 1256943 - RNA, 21 nt, Human
gggcucagaggcacaggcacu

SEQ ID NO: 1256944 - RNA, 22 nt, Human
ggugcaggagagcuugaaggca

SEQ ID NO: 1256945 - RNA, 22 nt, Human
uaaaaucccagggacugaccga

SEQ ID NO: 1256946 - RNA, 21 nt, Human
uaacuccucggcccagugccu

SEQ ID NO: 1256947 - RNA, 23 nt, Human
uagaacucagccccguugggacc

SEQ ID NO: 1256948 - RNA, 20 nt, Human
uauagcugagaggaaagagc

SEQ ID NO: 1256949 - RNA, 19 nt, Human
ucaaguggugaaaaggaaa

SEQ ID NO: 1256950 - RNA, 20 nt, Human
ucagaggcacaggcacuggg

SEQ ID NO: 1256951 - RNA, 20 nt, Human
ucagaggcacaggcacuggg

SEQ ID NO: 1256952 - RNA, 18 nt, Human
ucaggcuccguuuccuag

SEQ ID NO: 1256953 - RNA, 22 nt, Human
ucaucaaaagcuuuauugugga

SEQ ID NO: 1256954 - RNA, 23 nt, Human
ucccagcccugugccacccccuc

SEQ ID NO: 1256955 - RNA, 20 nt, Human
ucccagggacugaccgaguu

SEQ ID NO: 1256956 - RNA, 23 nt, Human
ucccccgcaaaacauggccacag

SEQ ID NO: 1256957 - RNA, 19 nt, Human
uccuuccacaucagcuucc

SEQ ID NO: 1256958 - RNA, 21 nt, Human
ucguggcagcagcccaacccc

SEQ ID NO: 1256959 - RNA, 24 nt, Human
ucuuggguuggccuuugcuauuug

SEQ ID NO: 1256960 - RNA, 24 nt, Human
ugaaacaggacaggcugagccuca

SEQ ID NO: 1256961 - RNA, 22 nt, Human
ugagaggaaagagcagacauuu

SEQ ID NO: 1256962 - RNA, 23 nt, Human
ugagccccaauuucuuccuuaau

SEQ ID NO: 1256963 - RNA, 24 nt, Human
ugaggugggauguucaaagauucc

SEQ ID NO: 1256964 - RNA, 24 nt, Human
ugcagaauccuuaacccaggaccc

SEQ ID NO: 1256965 - RNA, 19 nt, Human
ugcccugcucugucacagg

SEQ ID NO: 1256966 - RNA, 19 nt, Human
ugccgggccucgcuggucu

SEQ ID NO: 1256967 - RNA, 22 nt, Human
ugccgggccucgcuggucuugg

SEQ ID NO: 1256968 - RNA, 27 nt, Human
ugcugcccagaaaugggcaccucagag

SEQ ID NO: 1256969 - RNA, 21 nt, Human
ugcuuccagccugaaaugauu

SEQ ID NO: 1256970 - RNA, 22 nt, Human
ugcuuccagccugaaaugauuc

SEQ ID NO: 1256971 - RNA, 21 nt, Human
uggaacuucuaagccauggau

SEQ ID NO: 1256972 - RNA, 19 nt, Human
uggaagugagggagcuggg

SEQ ID NO: 1256973 - RNA, 19 nt, Human
uggauccaguguguucuga

SEQ ID NO: 1256974 - RNA, 26 nt, Human
uggauuucuagcauccgaaacaguuu

SEQ ID NO: 1256975 - RNA, 24 nt, Human
uggcagcagcccaacccccucagu

SEQ ID NO: 1256976 - RNA, 24 nt, Human
uggcuuaauaaccggugcaggaga

SEQ ID NO: 1256977 - RNA, 20 nt, Human
ugggguccagugcauuggcu

SEQ ID NO: 1256978 - RNA, 19 nt, Human
uggguuggccuuugcuauu

SEQ ID NO: 1256979 - RNA, 22 nt, Human
uggugcccugcucugucacagg

SEQ ID NO: 1256980 - RNA, 20 nt, Human
ugucagauaggaaagcucuc

SEQ ID NO: 1256981 - RNA, 21 nt, Human
ugucagauaggaaagcucucu

SEQ ID NO: 1256982 - RNA, 25 nt, Human
ugugccacccccucugcaggcucca

SEQ ID NO: 1256983 - RNA, 28 nt, Human
uuaacaguccuucaucuuccugccuccc

SEQ ID NO: 1256984 - RNA, 19 nt, Human
uuccugccuccccugagcc

SEQ ID NO: 1256985 - RNA, 20 nt, Human
uuuccuagccaugaucucag

SEQ ID NO: 1256986 - RNA, 20 nt, Human
aaaauaccguaauuagaaua

SEQ ID NO: 1256987 - RNA, 22 nt, Human
aauacaaggagagaacacuuug

SEQ ID NO: 1256988 - RNA, 20 nt, Human
gagaacacuuugcggaaggc

SEQ ID NO: 1256989 - RNA, 18 nt, Human
ggaaggccuaggguaagg

SEQ ID NO: 1256990 - RNA, 20 nt, Human
uguggggcuggauucuaccc

SEQ ID NO: 1256991 - RNA, 25 nt, Human
uuaaaaauaccguaauuagaauaau

SEQ ID NO: 1256992 - RNA, 20 nt, Human
uuuuaaggaaauuaaaaaua

SEQ ID NO: 1256993 - RNA, 24 nt, Human
acguaggugcccagcugguccagc

SEQ ID NO: 1256994 - RNA, 18 nt, Human
agacccggaggcuguacu

SEQ ID NO: 1256995 - RNA, 19 nt, Human
aggugcccagcugguccag

SEQ ID NO: 1256996 - RNA, 21 nt, Human
cagagggcgggggcgaagacg

SEQ ID NO: 1256997 - RNA, 20 nt, Human
cagcaggaugugacaggccc

SEQ ID NO: 1256998 - RNA, 21 nt, Human
ccagcaggaugugacaggccc

SEQ ID NO: 1256999 - RNA, 22 nt, Human
ccagcuggagccgcuugacugc

SEQ ID NO: 1257000 - RNA, 22 nt, Human
cggaggcuguacuccagggagg

SEQ ID NO: 1257001 - RNA, 21 nt, Human
cuccagcaccuccuucagugc

SEQ ID NO: 1257002 - RNA, 22 nt, Human
cuccagggaggugcagagggcg

SEQ ID NO: 1257003 - RNA, 22 nt, Human
cuccucauccagggucaccacc

SEQ ID NO: 1257004 - RNA, 23 nt, Human
cuggcaguagcaggguguguucu

SEQ ID NO: 1257005 - RNA, 18 nt, Human
gcaccuccuucagugcua

SEQ ID NO: 1257006 - RNA, 18 nt, Human
gcaggaugugacaggccc

SEQ ID NO: 1257007 - RNA, 21 nt, Human
ggaggugcagagggcgggggc

SEQ ID NO: 1257008 - RNA, 22 nt, Human
gggaggugcagagggcgggggc

SEQ ID NO: 1257009 - RNA, 23 nt, Human
gguccagcaggaugugacaggcc

SEQ ID NO: 1257010 - RNA, 23 nt, Human
uccgcuccagcuccagcaccucc

SEQ ID NO: 1257011 - RNA, 19 nt, Human
uccuucagugcuacaggcg

SEQ ID NO: 1257012 - RNA, 19 nt, Human
aaaggacacugaagcccag

SEQ ID NO: 1257013 - RNA, 23 nt, Human
aaaggccaggaugugcugagacg

SEQ ID NO: 1257014 - RNA, 21 nt, Human
aacccaaagagccucagaccg

SEQ ID NO: 1257015 - RNA, 23 nt, Human
aacccuagacguccaaaccuggg

SEQ ID NO: 1257016 - RNA, 23 nt, Human
aacccuggcaacccugcccacug

SEQ ID NO: 1257017 - RNA, 24 nt, Human
aagaacagggaggaggggcacggc

SEQ ID NO: 1257018 - RNA, 22 nt, Human
aagaagccccacgagcuacuga

SEQ ID NO: 1257019 - RNA, 19 nt, Human
aagagcucccugcaccaaa

SEQ ID NO: 1257020 - RNA, 22 nt, Human
aagcagcuucugaggguggggu

SEQ ID NO: 1257021 - RNA, 20 nt, Human
aagggacccggcucagcugc

SEQ ID NO: 1257022 - RNA, 21 nt, Human
acagccaggccacccgccucc

SEQ ID NO: 1257023 - RNA, 18 nt, Human
acagugaaaacccugucu

SEQ ID NO: 1257024 - RNA, 23 nt, Human
acccucaggagaaccccuacccc

SEQ ID NO: 1257025 - RNA, 22 nt, Human
acccuggcaacccugcccacug

SEQ ID NO: 1257026 - RNA, 18 nt, Human
acccugugggcucaggga

SEQ ID NO: 1257027 - RNA, 19 nt, Human
acuccuuggcuuuauggau

SEQ ID NO: 1257028 - RNA, 22 nt, Human
acugugagagaaggcagaggga

SEQ ID NO: 1257029 - RNA, 18 nt, Human
acuucugggccacauccc

SEQ ID NO: 1257030 - RNA, 19 nt, Human
agaaccccuaccccugagc

SEQ ID NO: 1257031 - RNA, 24 nt, Human
agagaaggcagugauaugccugaa

SEQ ID NO: 1257032 - RNA, 18 nt, Human
agagcucccugcaccaaa

SEQ ID NO: 1257033 - RNA, 18 nt, Human
agaggagcacacacacac

SEQ ID NO: 1257034 - RNA, 19 nt, Human
agagugcccuggagggucc

SEQ ID NO: 1257035 - RNA, 19 nt, Human
agauucuggauuccuggcc

SEQ ID NO: 1257036 - RNA, 22 nt, Human
agcacuccuuggcuuuauggau

SEQ ID NO: 1257037 - RNA, 19 nt, Human
agcagcuucugaggguggg

SEQ ID NO: 1257038 - RNA, 18 nt, Human
agccaggcuggggacgcu

SEQ ID NO: 1257039 - RNA, 19 nt, Human
agccuccuucuccacuccu

SEQ ID NO: 1257040 - RNA, 25 nt, Human
aggaaugcuaaagguuauuuauagg

SEQ ID NO: 1257041 - RNA, 20 nt, Human
aggcagagggagaggcacgu

SEQ ID NO: 1257042 - RNA, 21 nt, Human
aggcagagggagaggcacgua

SEQ ID NO: 1257043 - RNA, 19 nt, Human
aggcagcugcacagggcag

SEQ ID NO: 1257044 - RNA, 24 nt, Human
aggccuggccccucagcagcccug

SEQ ID NO: 1257045 - RNA, 18 nt, Human
aggcuggggacgcuggcu

SEQ ID NO: 1257046 - RNA, 19 nt, Human
agggaagccaggcugggga

SEQ ID NO: 1257047 - RNA, 26 nt, Human
agggcccacccacuccagcccucagc

SEQ ID NO: 1257048 - RNA, 21 nt, Human
aguugauucuuggucuuugga

SEQ ID NO: 1257049 - RNA, 21 nt, Human
aucccaacuuucuuaauccag

SEQ ID NO: 1257050 - RNA, 21 nt, Human
aucccuggggcccugcacccc

SEQ ID NO: 1257051 - RNA, 21 nt, Human
aucccuuucuaggagccacca

SEQ ID NO: 1257052 - RNA, 20 nt, Human
augcccguggaggacucccc

SEQ ID NO: 1257053 - RNA, 21 nt, Human
caaagcuccuggucaccuccc

SEQ ID NO: 1257054 - RNA, 21 nt, Human
caagcuccuguccugggggca

SEQ ID NO: 1257055 - RNA, 19 nt, Human
cacagccaggccacccgcc

SEQ ID NO: 1257056 - RNA, 22 nt, Human
cacagccaggccacccgccucc

SEQ ID NO: 1257057 - RNA, 23 nt, Human
caccaaacccuagacguccaaac

SEQ ID NO: 1257058 - RNA, 25 nt, Human
caccagaccaaaaccagacuggaac

SEQ ID NO: 1257059 - RNA, 18 nt, Human
cacccacuccagcccuca

SEQ ID NO: 1257060 - RNA, 19 nt, Human
caccccccucucccgggca

SEQ ID NO: 1257061 - RNA, 26 nt, Human
cacgcugcucuagaggcugcugggcu

SEQ ID NO: 1257062 - RNA, 22 nt, Human
cacggcagaucacaaggucccc

SEQ ID NO: 1257063 - RNA, 23 nt, Human
cagaagacaggcacaccaaaccc

SEQ ID NO: 1257064 - RNA, 21 nt, Human
cagaccaaaaccagacuggaa

SEQ ID NO: 1257065 - RNA, 19 nt, Human
cagacugcccucaaagcca

SEQ ID NO: 1257066 - RNA, 18 nt, Human
cagccuccgggcccagcc

SEQ ID NO: 1257067 - RNA, 21 nt, Human
cagcuagagaggacuucucag

SEQ ID NO: 1257068 - RNA, 21 nt, Human
caggcacaccaaacccuagac

SEQ ID NO: 1257069 - RNA, 22 nt, Human
caguggcugcucggagaccugc

SEQ ID NO: 1257070 - RNA, 20 nt, Human
cauaugaagcacagccaggc

SEQ ID NO: 1257071 - RNA, 19 nt, Human
cauggaggcaccagggucg

SEQ ID NO: 1257072 - RNA, 21 nt, Human
ccacgcugcucuagaggcugc

SEQ ID NO: 1257073 - RNA, 19 nt, Human
ccagaccaaaaccagacug

SEQ ID NO: 1257074 - RNA, 23 nt, Human
ccaggaguccagauguaucuccc

SEQ ID NO: 1257075 - RNA, 19 nt, Human
cccacacguguucaugggc

SEQ ID NO: 1257076 - RNA, 19 nt, Human
cccacagccaggccgcacc

SEQ ID NO: 1257077 - RNA, 20 nt, Human
cccacccacuccagcccuca

SEQ ID NO: 1257078 - RNA, 20 nt, Human
ccccacgagcuacugagucc

SEQ ID NO: 1257079 - RNA, 21 nt, Human
ccccagcggggcuggugggug

SEQ ID NO: 1257080 - RNA, 20 nt, Human
ccccuacagaagccuagaac

SEQ ID NO: 1257081 - RNA, 25 nt, Human
ccccucgaacagguugggugggggu

SEQ ID NO: 1257082 - RNA, 18 nt, Human
ccccugagcucuggagcc

SEQ ID NO: 1257083 - RNA, 21 nt, Human
ccccugagcucuggagccggg

SEQ ID NO: 1257084 - RNA, 23 nt, Human
ccccugagcucuggagccggggg

SEQ ID NO: 1257085 - RNA, 21 nt, Human
ccccugaugcaggccuggccc

SEQ ID NO: 1257086 - RNA, 22 nt, Human
cccgugccaugcagggccccuc

SEQ ID NO: 1257087 - RNA, 24 nt, Human
cccugcaccccccucucccgggca

SEQ ID NO: 1257088 - RNA, 21 nt, Human
ccguggaggacuccccucccc

SEQ ID NO: 1257089 - RNA, 24 nt, Human
ccuaaaaccugcccuccucucagg

SEQ ID NO: 1257090 - RNA, 18 nt, Human
ccucaaagccacgugacc

SEQ ID NO: 1257091 - RNA, 21 nt, Human
ccuccgggcccagccagagcc

SEQ ID NO: 1257092 - RNA, 24 nt, Human
ccuccgggcccagccagagccuag

SEQ ID NO: 1257093 - RNA, 21 nt, Human
ccuccuucuccacuccugggc

SEQ ID NO: 1257094 - RNA, 24 nt, Human
ccugcaccaaagcuccuggucacc

SEQ ID NO: 1257095 - RNA, 21 nt, Human
ccugcacccucaggagaaccc

SEQ ID NO: 1257096 - RNA, 21 nt, Human
ccuggccccucagcagcccug

SEQ ID NO: 1257097 - RNA, 21 nt, Human
cggcagaucacaagguccccu

SEQ ID NO: 1257098 - RNA, 22 nt, Human
cgggggcacugugagagaaggc

SEQ ID NO: 1257099 - RNA, 21 nt, Human
cggggugggugagaggagggu

SEQ ID NO: 1257100 - RNA, 23 nt, Human
cuaaccagcuaaaucuagacagu

SEQ ID NO: 1257101 - RNA, 21 nt, Human
cucaacccuggcaacccugcc

SEQ ID NO: 1257102 - RNA, 22 nt, Human
cucacaacuggccugagcaguc

SEQ ID NO: 1257103 - RNA, 26 nt, Human
cuccaggcaaguccuccuuugcccac

SEQ ID NO: 1257104 - RNA, 24 nt, Human
cuccccuacuucaucucucuguuu

SEQ ID NO: 1257105 - RNA, 21 nt, Human
cucccgggcauauaaccaugu

SEQ ID NO: 1257106 - RNA, 23 nt, Human
cugaagcccagagaaggcaguga

SEQ ID NO: 1257107 - RNA, 18 nt, Human
cugacugacaccgggaag

SEQ ID NO: 1257108 - RNA, 19 nt, Human
cugcaccccccucucccgg

SEQ ID NO: 1257109 - RNA, 24 nt, Human
cugcaccccccucucccgggcaua

SEQ ID NO: 1257110 - RNA, 24 nt, Human
cugcggcccuaaaaccugcccucc

SEQ ID NO: 1257111 - RNA, 19 nt, Human
cuggccaucaagagagcac

SEQ ID NO: 1257112 - RNA, 20 nt, Human
cuggccaucaagagagcacc

SEQ ID NO: 1257113 - RNA, 21 nt, Human
cuggcucacaacuggccugag

SEQ ID NO: 1257114 - RNA, 25 nt, Human
cuuagucucagccuccgggcccagc

SEQ ID NO: 1257115 - RNA, 22 nt, Human
gaaaaggacacugaagcccaga

SEQ ID NO: 1257116 - RNA, 23 nt, Human
gaacagguuggguggggguggua

SEQ ID NO: 1257117 - RNA, 21 nt, Human
gagccaccagaccaaaaccag

SEQ ID NO: 1257118 - RNA, 21 nt, Human
gagcucccugcaccaaagcuc

SEQ ID NO: 1257119 - RNA, 21 nt, Human
gagcucuggagccgggggcac

SEQ ID NO: 1257120 - RNA, 18 nt, Human
gaggcaccagggucgaaa

SEQ ID NO: 1257121 - RNA, 18 nt, Human
gagggcccacccacucca

SEQ ID NO: 1257122 - RNA, 24 nt, Human
gaggggaauggcacccccugucac

SEQ ID NO: 1257123 - RNA, 21 nt, Human
gaggguccaggagaugagaag

SEQ ID NO: 1257124 - RNA, 22 nt, Human
gagggugggguggggaggacag

SEQ ID NO: 1257125 - RNA, 20 nt, Human
gccaccagaccaaaaccaga

SEQ ID NO: 1257126 - RNA, 24 nt, Human
gcccacccacuccagcccucagca

SEQ ID NO: 1257127 - RNA, 19 nt, Human
gcccuaaaaccugcccucc

SEQ ID NO: 1257128 - RNA, 22 nt, Human
gcccuggaggguccaggagaug

SEQ ID NO: 1257129 - RNA, 22 nt, Human
ggaaaccagcuucucagccucc

SEQ ID NO: 1257130 - RNA, 21 nt, Human
ggagaaaccaagguuggggaa

SEQ ID NO: 1257131 - RNA, 21 nt, Human
ggaugagggugucagggcugg

SEQ ID NO: 1257132 - RNA, 19 nt, Human
ggcagggguccagcccuuu

SEQ ID NO: 1257133 - RNA, 20 nt, Human
ggcugaggaggggaugaggg

SEQ ID NO: 1257134 - RNA, 18 nt, Human
gggcucagggagggcaga

SEQ ID NO: 1257135 - RNA, 22 nt, Human
gggcugaggaggggaugagggu

SEQ ID NO: 1257136 - RNA, 20 nt, Human
gggugggggugguaugugcu

SEQ ID NO: 1257137 - RNA, 18 nt, Human
ggugggguggggaggaca

SEQ ID NO: 1257138 - RNA, 18 nt, Human
ggugggugagaggagggu

SEQ ID NO: 1257139 - RNA, 21 nt, Human
gucaccuccccuaagggaccc

SEQ ID NO: 1257140 - RNA, 21 nt, Human
gugguaugugcuguccccuca

SEQ ID NO: 1257141 - RNA, 18 nt, Human
uacaauaggaaugcuaaa

SEQ ID NO: 1257142 - RNA, 20 nt, Human
uaccccugagcucuggagcc

SEQ ID NO: 1257143 - RNA, 19 nt, Human
uagaacagugugucugaac

SEQ ID NO: 1257144 - RNA, 19 nt, Human
uagccccugaugcaggccu

SEQ ID NO: 1257145 - RNA, 22 nt, Human
uagcggggugggugagaggagg

SEQ ID NO: 1257146 - RNA, 19 nt, Human
uauaggaggugccugugga

SEQ ID NO: 1257147 - RNA, 21 nt, Human
uaugugcuguccccucaaccc

SEQ ID NO: 1257148 - RNA, 20 nt, Human
ucacugccuuugucugaggc

SEQ ID NO: 1257149 - RNA, 20 nt, Human
ucagccuccuucuccacucc

SEQ ID NO: 1257150 - RNA, 21 nt, Human
uccacauggaggcaccagggu

SEQ ID NO: 1257151 - RNA, 20 nt, Human
uccagauguaucucccuggg

SEQ ID NO: 1257152 - RNA, 22 nt, Human
uccauggcagggaagccaggcu

SEQ ID NO: 1257153 - RNA, 19 nt, Human
uccccuacagaagccuaga

SEQ ID NO: 1257154 - RNA, 22 nt, Human
uccccucaacccuggcaacccu

SEQ ID NO: 1257155 - RNA, 27 nt, Human
uccccugcacccucaggagaaccccua

SEQ ID NO: 1257156 - RNA, 20 nt, Human
ucccugcaccaaagcuccug

SEQ ID NO: 1257157 - RNA, 21 nt, Human
uccuucuccacuccugggcau

SEQ ID NO: 1257158 - RNA, 18 nt, Human
ucuagacagugaaaaccc

SEQ ID NO: 1257159 - RNA, 23 nt, Human
ucucccuggggcugugggaggga

SEQ ID NO: 1257160 - RNA, 19 nt, Human
ucuggagccgggggcacug

SEQ ID NO: 1257161 - RNA, 21 nt, Human
ucuuggucuuuggacugccag

SEQ ID NO: 1257162 - RNA, 18 nt, Human
ucuuuggacugccaggcu

SEQ ID NO: 1257163 - RNA, 21 nt, Human
ugaaaaggacacugaagccca

SEQ ID NO: 1257164 - RNA, 25 nt, Human
ugaaaaggacacugaagcccagaga

SEQ ID NO: 1257165 - RNA, 20 nt, Human
ugaagcacagccaggccacc

SEQ ID NO: 1257166 - RNA, 19 nt, Human
ugaccgaggcccacacgug

SEQ ID NO: 1257167 - RNA, 20 nt, Human
ugaccgaggcccacacgugu

SEQ ID NO: 1257168 - RNA, 23 nt, Human
ugagacgggucccaguggcugcu

SEQ ID NO: 1257169 - RNA, 19 nt, Human
ugagggugggguggggagg

SEQ ID NO: 1257170 - RNA, 23 nt, Human
ugagggugggguggggaggacag

SEQ ID NO: 1257171 - RNA, 21 nt, Human
ugcaccaaagcuccuggucac

SEQ ID NO: 1257172 - RNA, 23 nt, Human
ugccaggcagcugcacagggcag

SEQ ID NO: 1257173 - RNA, 21 nt, Human
ugcccguggaggacuccccuc

SEQ ID NO: 1257174 - RNA, 18 nt, Human
ugcccuagggucacugcc

SEQ ID NO: 1257175 - RNA, 18 nt, Human
ugccuggagguguugggg

SEQ ID NO: 1257176 - RNA, 21 nt, Human
ugccuggagguguuggggaag

SEQ ID NO: 1257177 - RNA, 22 nt, Human
ugcucuagaggcugcugggcug

SEQ ID NO: 1257178 - RNA, 21 nt, Human
uggcaacccugcccacuggga

SEQ ID NO: 1257179 - RNA, 21 nt, Human
uggcagggaagccaggcuggg

SEQ ID NO: 1257180 - RNA, 20 nt, Human
uggccugagcaguccuccuc

SEQ ID NO: 1257181 - RNA, 25 nt, Human
uggccugagcaguccuccucuuuca

SEQ ID NO: 1257182 - RNA, 21 nt, Human
uggcugcucggagaccugcug

SEQ ID NO: 1257183 - RNA, 22 nt, Human
ugggcugaggaggggaugaggg

SEQ ID NO: 1257184 - RNA, 22 nt, Human
ugggguggggaggacagaaaag

SEQ ID NO: 1257185 - RNA, 18 nt, Human
ugggugggggugguaugu

SEQ ID NO: 1257186 - RNA, 21 nt, Human
uggucagacugcccucaaagc

SEQ ID NO: 1257187 - RNA, 19 nt, Human
uguggagaucagagcuggg

SEQ ID NO: 1257188 - RNA, 21 nt, Human
uguuggggaagcgggcaccug

SEQ ID NO: 1257189 - RNA, 23 nt, Human
uuaauggcagauuugcaaguuga

SEQ ID NO: 1257190 - RNA, 18 nt, Human
uucaucucucuguuugag

SEQ ID NO: 1257191 - RNA, 18 nt, Human
uucaucucucuguuugag

SEQ ID NO: 1257192 - RNA, 21 nt, Human
uucaugggcuaacagugacca

SEQ ID NO: 1257193 - RNA, 23 nt, Human
uucucagccuccuucuccacucc

SEQ ID NO: 1257194 - RNA, 19 nt, Human
uugcaaguugauucuuggu

SEQ ID NO: 1257195 - RNA, 19 nt, Human
aagagcucccugcaccaaa

SEQ ID NO: 1257196 - RNA, 18 nt, Human
agagcucccugcaccaaa

SEQ ID NO: 1257197 - RNA, 25 nt, Human
aggaaugcuaaagguuauuuauagg

SEQ ID NO: 1257198 - RNA, 21 nt, Human
aucccuggggcccugcacccc

SEQ ID NO: 1257199 - RNA, 21 nt, Human
caaagcuccuggucaccuccc

SEQ ID NO: 1257200 - RNA, 24 nt, Human
caagagcucccugcaccaaagcuc

SEQ ID NO: 1257201 - RNA, 21 nt, Human
caagcuccuguccugggggca

SEQ ID NO: 1257202 - RNA, 20 nt, Human
caccccccucucccgggcaa

SEQ ID NO: 1257203 - RNA, 24 nt, Human
cccugcaccccccucucccgggca

SEQ ID NO: 1257204 - RNA, 21 nt, Human
cucccgggcauauaaccaugu

SEQ ID NO: 1257205 - RNA, 23 nt, Human
cugcaccaaagcuccuggucacc

SEQ ID NO: 1257206 - RNA, 19 nt, Human
cugcaccccccucucccgg

SEQ ID NO: 1257207 - RNA, 24 nt, Human
cugcaccccccucucccgggcaua

SEQ ID NO: 1257208 - RNA, 20 nt, Human
gcuccuguccugggggcaga

SEQ ID NO: 1257209 - RNA, 20 nt, Human
ucccugcaccaaagcuccug

SEQ ID NO: 1257210 - RNA, 21 nt, Human
ugcaccaaagcuccuggucac

SEQ ID NO: 1257211 - RNA, 20 nt, Human
uggcagggguccagcccuuu

SEQ ID NO: 1257212 - RNA, 19 nt, Human
uuacaauaggaaugcuaaa

SEQ ID NO: 1257213 - RNA, 24 nt, Human
aaagauccgccuaccucggccucc

SEQ ID NO: 1257214 - RNA, 24 nt, Human
aaagugcugggauuacagguguga

SEQ ID NO: 1257215 - RNA, 19 nt, Human
aagacuuuuccugccacaa

SEQ ID NO: 1257216 - RNA, 20 nt, Human
aagauccgccuaccucggcc

SEQ ID NO: 1257217 - RNA, 20 nt, Human
aagcaugguuauaucaacua

SEQ ID NO: 1257218 - RNA, 18 nt, Human
aagugcugggauuacagg

SEQ ID NO: 1257219 - RNA, 19 nt, Human
aagugcugggauuacaggu

SEQ ID NO: 1257220 - RNA, 26 nt, Human
aagugcugggauuacaggugugagcc

SEQ ID NO: 1257221 - RNA, 24 nt, Human
acagaguuucaccauguuggucag

SEQ ID NO: 1257222 - RNA, 23 nt, Human
accacagugcuggaauaaaagca

SEQ ID NO: 1257223 - RNA, 24 nt, Human
accauguuggucaggcuagucuug

SEQ ID NO: 1257224 - RNA, 18 nt, Human
acccugacgaaccucagg

SEQ ID NO: 1257225 - RNA, 26 nt, Human
acccugacgaaccucagucuucacua

SEQ ID NO: 1257226 - RNA, 23 nt, Human
accgugcccagccuggauccaag

SEQ ID NO: 1257227 - RNA, 23 nt, Human
acgcuaggcuaauuuuuuuguau

SEQ ID NO: 1257228 - RNA, 25 nt, Human
acucuguuguccaggcugaagugca

SEQ ID NO: 1257229 - RNA, 19 nt, Human
acugcagcuucaaacuccu

SEQ ID NO: 1257230 - RNA, 25 nt, Human
agacuaggcuucgcuguggcgccgc

SEQ ID NO: 1257231 - RNA, 20 nt, Human
agacuuuuuuauuuuucucu

SEQ ID NO: 1257232 - RNA, 23 nt, Human
agaguuucaccauguuggucagg

SEQ ID NO: 1257233 - RNA, 19 nt, Human
agccuccugaguagcuaag

SEQ ID NO: 1257234 - RNA, 23 nt, Human
agggcagagcagcagcuuuccaa

SEQ ID NO: 1257235 - RNA, 20 nt, Human
agguagaacacgagaggaug

SEQ ID NO: 1257236 - RNA, 19 nt, Human
agguucaagugauucuucu

SEQ ID NO: 1257237 - RNA, 21 nt, Human
agguucaagugauucuucugc

SEQ ID NO: 1257238 - RNA, 19 nt, Human
aguagcugggacuuacagg

SEQ ID NO: 1257239 - RNA, 19 nt, Human
agucuucacuaugcccagu

SEQ ID NO: 1257240 - RNA, 25 nt, Human
agucuuguucuguugcccaggcugg

SEQ ID NO: 1257241 - RNA, 26 nt, Human
agucuuguucuguugcccaggcuggu

SEQ ID NO: 1257242 - RNA, 24 nt, Human
agugauucuucugcuucagccucc

SEQ ID NO: 1257243 - RNA, 19 nt, Human
agugcaguggcgcgauguc

SEQ ID NO: 1257244 - RNA, 18 nt, Human
auacauacauaccuugug

SEQ ID NO: 1257245 - RNA, 18 nt, Human
auagcucacugcagcuuc

SEQ ID NO: 1257246 - RNA, 23 nt, Human
auugcaguggugugaucauagcu

SEQ ID NO: 1257247 - RNA, 25 nt, Human
caaaccucugagccaccaugcccag

SEQ ID NO: 1257248 - RNA, 24 nt, Human
caaagugcugggauuacaggugug

SEQ ID NO: 1257249 - RNA, 20 nt, Human
caaccucugccucccagguu

SEQ ID NO: 1257250 - RNA, 22 nt, Human
caagugauucuucugcuucagc

SEQ ID NO: 1257251 - RNA, 24 nt, Human
caauguuguaacgguucacaccua

SEQ ID NO: 1257252 - RNA, 19 nt, Human
cacacaagguggcagugac

SEQ ID NO: 1257253 - RNA, 21 nt, Human
cacaccuaccccaugcuuucu

SEQ ID NO: 1257254 - RNA, 23 nt, Human
cacagugcuggaauaaaagcaug

SEQ ID NO: 1257255 - RNA, 18 nt, Human
caccauauauagaaacua

SEQ ID NO: 1257256 - RNA, 24 nt, Human
caccauguuggucaggcuagucuu

SEQ ID NO: 1257257 - RNA, 24 nt, Human
cacucuguuguccaggcugaagug

SEQ ID NO: 1257258 - RNA, 18 nt, Human
cacugcaaccucugccuc

SEQ ID NO: 1257259 - RNA, 21 nt, Human
cacugcaaccucugccuccca

SEQ ID NO: 1257260 - RNA, 20 nt, Human
cacuguuaacagaaagcuca

SEQ ID NO: 1257261 - RNA, 24 nt, Human
cagaguuucaccauguuggucagg

SEQ ID NO: 1257262 - RNA, 23 nt, Human
cagauuccucaugugaagugcca

SEQ ID NO: 1257263 - RNA, 20 nt, Human
cagccuccugaguagcuaag

SEQ ID NO: 1257264 - RNA, 24 nt, Human
cagcuucaaacuccugggcucaag

SEQ ID NO: 1257265 - RNA, 18 nt, Human
caggcuagucuugaacuc

SEQ ID NO: 1257266 - RNA, 20 nt, Human
cagucuucacuaugcccagu

SEQ ID NO: 1257267 - RNA, 21 nt, Human
ccaaagugcugggauuacagg

SEQ ID NO: 1257268 - RNA, 21 nt, Human
ccaaagugcugggauuacagg

SEQ ID NO: 1257269 - RNA, 24 nt, Human
ccaaagugcugggauuacaggugu

SEQ ID NO: 1257270 - RNA, 23 nt, Human
ccacagugcuggaauaaaagcau

SEQ ID NO: 1257271 - RNA, 26 nt, Human
cccaaaccucugagccaccaugccca

SEQ ID NO: 1257272 - RNA, 22 nt, Human
cccagguucaagugauucuucu

SEQ ID NO: 1257273 - RNA, 23 nt, Human
cccagguucaagugauucuucug

SEQ ID NO: 1257274 - RNA, 22 nt, Human
cccaugcuuucucauccagaag

SEQ ID NO: 1257275 - RNA, 24 nt, Human
ccucacugcaaccucugccuccca

SEQ ID NO: 1257276 - RNA, 21 nt, Human
ccuccaaaugagggcagagca

SEQ ID NO: 1257277 - RNA, 24 nt, Human
ccucccagguucaagugauucuuc

SEQ ID NO: 1257278 - RNA, 25 nt, Human
ccucugagccaccaugcccagccau

SEQ ID NO: 1257279 - RNA, 20 nt, Human
ccugaguagcugggacuuac

SEQ ID NO: 1257280 - RNA, 19 nt, Human
ccugggccucccaaaccuc

SEQ ID NO: 1257281 - RNA, 18 nt, Human
ccugggcucaaguguucc

SEQ ID NO: 1257282 - RNA, 23 nt, Human
ccugggcucaaguguucguccug

SEQ ID NO: 1257283 - RNA, 19 nt, Human
cgaugucaccucacugcaa

SEQ ID NO: 1257284 - RNA, 23 nt, Human
cguccugccugggccucccaaac

SEQ ID NO: 1257285 - RNA, 24 nt, Human
cuaagccuccugaguagcugggac

SEQ ID NO: 1257286 - RNA, 24 nt, Human
cucaagcuauucuccuaccuaagc

SEQ ID NO: 1257287 - RNA, 24 nt, Human
cucacugcaaccucugccucccag

SEQ ID NO: 1257288 - RNA, 24 nt, Human
cucacugcaaccucugccucccag

SEQ ID NO: 1257289 - RNA, 21 nt, Human
cucacugcagcuucaaacucc

SEQ ID NO: 1257290 - RNA, 24 nt, Human
cucacugcagcuucaaacuccugg

SEQ ID NO: 1257291 - RNA, 20 nt, Human
cucccaaaccucugagccac

SEQ ID NO: 1257292 - RNA, 18 nt, Human
cucccagguucaagugau

SEQ ID NO: 1257293 - RNA, 23 nt, Human
cuccuaccuaagccuccugagua

SEQ ID NO: 1257294 - RNA, 25 nt, Human
cuccugggcucaagcuauucuccua

SEQ ID NO: 1257295 - RNA, 24 nt, Human
cugcaaccucugccucccagguuc

SEQ ID NO: 1257296 - RNA, 23 nt, Human
cugcuucagccuccugaguagcu

SEQ ID NO: 1257297 - RNA, 20 nt, Human
cuguugcccaggcuggucuu

SEQ ID NO: 1257298 - RNA, 21 nt, Human
gaaaaggaaaacgauaauuca

SEQ ID NO: 1257299 - RNA, 19 nt, Human
gaaugcugucuucaagugg

SEQ ID NO: 1257300 - RNA, 21 nt, Human
gagaagcacaaguugcuucaa

SEQ ID NO: 1257301 - RNA, 23 nt, Human
gagagguagaacacgagaggaug

SEQ ID NO: 1257302 - RNA, 22 nt, Human
gaguagcuaagacuacagcuac

SEQ ID NO: 1257303 - RNA, 18 nt, Human
gauuacaggugugagcca

SEQ ID NO: 1257304 - RNA, 21 nt, Human
gauuacaggugugagccaccg

SEQ ID NO: 1257305 - RNA, 24 nt, Human
gauuacaggugugagccaccgugc

SEQ ID NO: 1257306 - RNA, 22 nt, Human
gcaaccucugccucccagguuc

SEQ ID NO: 1257307 - RNA, 21 nt, Human
gccacaaggguggguugcaau

SEQ ID NO: 1257308 - RNA, 27 nt, Human
gcuccaggucacccugacgaaccucag

SEQ ID NO: 1257309 - RNA, 23 nt, Human
gcucuggagaaucccaaguuggg

SEQ ID NO: 1257310 - RNA, 19 nt, Human
gcugaagugcaguggcgcg

SEQ ID NO: 1257311 - RNA, 24 nt, Human
ggcuagucuugaacuccugaucuc

SEQ ID NO: 1257312 - RNA, 22 nt, Human
ggcuggauugcaguggugugau

SEQ ID NO: 1257313 - RNA, 22 nt, Human
gggcagagcagcagcuuuccaa

SEQ ID NO: 1257314 - RNA, 22 nt, Human
gggcucaagcuauucuccuacc

SEQ ID NO: 1257315 - RNA, 18 nt, Human
ggucuugaacgccugggc

SEQ ID NO: 1257316 - RNA, 21 nt, Human
guccugccugggccucccaaa

SEQ ID NO: 1257317 - RNA, 24 nt, Human
gugauucuucugcuucagccuccu

SEQ ID NO: 1257318 - RNA, 18 nt, Human
guuccaguguccccaggg

SEQ ID NO: 1257319 - RNA, 24 nt, Human
guucuguugcccaggcuggucuug

SEQ ID NO: 1257320 - RNA, 19 nt, Human
uaagacuacagcuaccacc

SEQ ID NO: 1257321 - RNA, 24 nt, Human
uacaggugugagccaccgugccca

SEQ ID NO: 1257322 - RNA, 22 nt, Human
uaccuaagccuccugaguagcu

SEQ ID NO: 1257323 - RNA, 24 nt, Human
uaccuaagccuccugaguagcugg

SEQ ID NO: 1257324 - RNA, 24 nt, Human
uaccucggccucccaaagugcugg

SEQ ID NO: 1257325 - RNA, 20 nt, Human
uagaacagaguuucaccaug

SEQ ID NO: 1257326 - RNA, 19 nt, Human
uagcaggaacccugaaagc

SEQ ID NO: 1257327 - RNA, 22 nt, Human
uauaauguuucuacaggauggg

SEQ ID NO: 1257328 - RNA, 25 nt, Human
uauaauguuucuacaggauggguac

SEQ ID NO: 1257329 - RNA, 21 nt, Human
ucaaugccuccaccuuuguuc

SEQ ID NO: 1257330 - RNA, 19 nt, Human
ucacugcaaccucugccuc

SEQ ID NO: 1257331 - RNA, 24 nt, Human
ucacugcaaccucugccucccagg

SEQ ID NO: 1257332 - RNA, 25 nt, Human
ucacugcaaccucugccucccaggu

SEQ ID NO: 1257333 - RNA, 24 nt, Human
ucacugcagcuucaaacuccuggg

SEQ ID NO: 1257334 - RNA, 19 nt, Human
ucagaggcccucugucaca

SEQ ID NO: 1257335 - RNA, 23 nt, Human
ucaguucaauuccugaagaagaa

SEQ ID NO: 1257336 - RNA, 24 nt, Human
uccaacucagaggcccucugucac

SEQ ID NO: 1257337 - RNA, 22 nt, Human
ucccaaaccucugagccaccau

SEQ ID NO: 1257338 - RNA, 23 nt, Human
ucccaaagugcugggauuacagg

SEQ ID NO: 1257339 - RNA, 20 nt, Human
ucccagguucaagugauucu

SEQ ID NO: 1257340 - RNA, 24 nt, Human
ucccagguucaagugauucuucug

SEQ ID NO: 1257341 - RNA, 25 nt, Human
uccugaguagcugggacuuacaggu

SEQ ID NO: 1257342 - RNA, 21 nt, Human
uccugggcucaagcuauucuc

SEQ ID NO: 1257343 - RNA, 22 nt, Human
uccugggcucaagcuauucucc

SEQ ID NO: 1257344 - RNA, 18 nt, Human
ucggccucccaaagugcu

SEQ ID NO: 1257345 - RNA, 24 nt, Human
ucuacaggauggguacuggaccaa

SEQ ID NO: 1257346 - RNA, 24 nt, Human
ucuagagaugagucuuguucuguu

SEQ ID NO: 1257347 - RNA, 19 nt, Human
ucucaaaagauccgccuac

SEQ ID NO: 1257348 - RNA, 19 nt, Human
ucucacucuguuguccagg

SEQ ID NO: 1257349 - RNA, 21 nt, Human
ucucacucuguuguccaggcu

SEQ ID NO: 1257350 - RNA, 22 nt, Human
ucucacucuguuguccaggcug

SEQ ID NO: 1257351 - RNA, 23 nt, Human
ucucacucuguuguccaggcuga

SEQ ID NO: 1257352 - RNA, 24 nt, Human
ucucacucuguuguccaggcugaa

SEQ ID NO: 1257353 - RNA, 19 nt, Human
ucuguagcaggaacccuga

SEQ ID NO: 1257354 - RNA, 21 nt, Human
ucuguagcaggaacccugaaa

SEQ ID NO: 1257355 - RNA, 24 nt, Human
ucuguugcccaggcuggucuugaa

SEQ ID NO: 1257356 - RNA, 24 nt, Human
ucuguuguccaggcugaagugcag

SEQ ID NO: 1257357 - RNA, 23 nt, Human
ucuugaacuccugaucucaaaag

SEQ ID NO: 1257358 - RNA, 23 nt, Human
ucuuguucuguugcccaggcugg

SEQ ID NO: 1257359 - RNA, 24 nt, Human
ucuuguucuguugcccaggcuggu

SEQ ID NO: 1257360 - RNA, 24 nt, Human
ucuuuuucuuuuuuuuuagagacu

SEQ ID NO: 1257361 - RNA, 18 nt, Human
ugaacgccugggcucaag

SEQ ID NO: 1257362 - RNA, 19 nt, Human
ugaagugcaguggcgcgau

SEQ ID NO: 1257363 - RNA, 20 nt, Human
ugaagugcaguggcgcgaug

SEQ ID NO: 1257364 - RNA, 25 nt, Human
ugaagugccacaaaaggcaucaaaa

SEQ ID NO: 1257365 - RNA, 22 nt, Human
ugagauggagucucacucuguu

SEQ ID NO: 1257366 - RNA, 20 nt, Human
ugagcggaugccuguugagu

SEQ ID NO: 1257367 - RNA, 20 nt, Human
ugaugcaaaucuuuuuucag

SEQ ID NO: 1257368 - RNA, 21 nt, Human
ugcagcuucaaacuccugggc

SEQ ID NO: 1257369 - RNA, 22 nt, Human
ugcaguggugugaucauagcuc

SEQ ID NO: 1257370 - RNA, 25 nt, Human
ugccacaaaaggcaucaaaauggau

SEQ ID NO: 1257371 - RNA, 24 nt, Human
ugcccaggcuggucuugaacgccu

SEQ ID NO: 1257372 - RNA, 20 nt, Human
ugcccagugaagcaugguua

SEQ ID NO: 1257373 - RNA, 24 nt, Human
ugcugggauuacaggugugagcca

SEQ ID NO: 1257374 - RNA, 22 nt, Human
ugcuggguaaauacuuguggaa

SEQ ID NO: 1257375 - RNA, 19 nt, Human
ugcuucaaugccuccaccu

SEQ ID NO: 1257376 - RNA, 23 nt, Human
ugcuucagccuccugaguagcua

SEQ ID NO: 1257377 - RNA, 24 nt, Human
ugcuucagccuccugaguagcuaa

SEQ ID NO: 1257378 - RNA, 22 nt, Human
uggagaguuugaaagucuguag

SEQ ID NO: 1257379 - RNA, 19 nt, Human
uggauugcaguggugugau

SEQ ID NO: 1257380 - RNA, 19 nt, Human
uggauugcaguggugugau

SEQ ID NO: 1257381 - RNA, 28 nt, Human
uggauugcaguggugugauggcucuagc

SEQ ID NO: 1257382 - RNA, 18 nt, Human
ugggauuacaggugugag

SEQ ID NO: 1257383 - RNA, 21 nt, Human
ugggauuacaggugugagcca

SEQ ID NO: 1257384 - RNA, 22 nt, Human
ugggauuacaggugugagccac

SEQ ID NO: 1257385 - RNA, 23 nt, Human
ugggauuacaggugugagccacc

SEQ ID NO: 1257386 - RNA, 23 nt, Human
ugggauuacaggugugagccacc

SEQ ID NO: 1257387 - RNA, 24 nt, Human
ugggauuacaggugugagccaccg

SEQ ID NO: 1257388 - RNA, 24 nt, Human
uggucaggcuagucuugaacuccu

SEQ ID NO: 1257389 - RNA, 18 nt, Human
uggugugaucauagcuca

SEQ ID NO: 1257390 - RNA, 24 nt, Human
uggugugaucauagcucacugcag

SEQ ID NO: 1257391 - RNA, 24 nt, Human
uguccaggcugaagugcaguggcg

SEQ ID NO: 1257392 - RNA, 20 nt, Human
uguggaagaugaucagucug

SEQ ID NO: 1257393 - RNA, 24 nt, Human
uguguuaccgaggcuggauugcag

SEQ ID NO: 1257394 - RNA, 24 nt, Human
uguucuguugcccaggcuggucuu

SEQ ID NO: 1257395 - RNA, 21 nt, Human
uguugaguuccagugucccca

SEQ ID NO: 1257396 - RNA, 18 nt, Human
uguugcccaggcuggucu

SEQ ID NO: 1257397 - RNA, 22 nt, Human
uguugcccaggcuggucuugaa

SEQ ID NO: 1257398 - RNA, 23 nt, Human
uuaguagaacagaguuucaccau

SEQ ID NO: 1257399 - RNA, 23 nt, Human
uucaagugauucuucugcuucag

SEQ ID NO: 1257400 - RNA, 24 nt, Human
uucaagugauucuucugcuucagc

SEQ ID NO: 1257401 - RNA, 19 nt, Human
uucuuuguuuucuuuuucu

SEQ ID NO: 1257402 - RNA, 24 nt, Human
uugauacugaaaaaauguuuuagc

SEQ ID NO: 1257403 - RNA, 24 nt, Human
uuguccaggcugaagugcaguggc

SEQ ID NO: 1257404 - RNA, 24 nt, Human
uuucaccauguuggucaggcuagu

SEQ ID NO: 1257405 - RNA, 22 nt, Human
uuugccuaggauggcagcacau

SEQ ID NO: 1257406 - RNA, 24 nt, Human
uuuuauuuuucucugagauggagu

SEQ ID NO: 1257407 - RNA, 28 nt, Human
uuuuuuauuuuucucugagauggagucu

SEQ ID NO: 1257408 - RNA, 18 nt, Human
uuuuuuguauuuuuagua

SEQ ID NO: 1257409 - RNA, 20 nt, Human
auaagcccacugaccucaca

SEQ ID NO: 1257410 - RNA, 20 nt, Human
cacacuccuuggccucaccc

SEQ ID NO: 1257411 - RNA, 18 nt, Human
cagagaaccuguugcucg

SEQ ID NO: 1257412 - RNA, 21 nt, Human
caggaggccagagaaccuguu

SEQ ID NO: 1257413 - RNA, 18 nt, Human
cuccuuggccucacccgg

SEQ ID NO: 1257414 - RNA, 23 nt, Human
gaccucacacuccuuggccucac

SEQ ID NO: 1257415 - RNA, 18 nt, Human
uuggccucacccggaagc

SEQ ID NO: 1257416 - RNA, 20 nt, Human
aagaagauuuucugugugga

SEQ ID NO: 1257417 - RNA, 18 nt, Human
aagcagccugucaccugu

SEQ ID NO: 1257418 - RNA, 22 nt, Human
aagcagccugucaccuguugaa

SEQ ID NO: 1257419 - RNA, 24 nt, Human
aagcagccugucaccuguugaagc

SEQ ID NO: 1257420 - RNA, 22 nt, Human
agaggggaaggugggcuccugg

SEQ ID NO: 1257421 - RNA, 24 nt, Human
caaggagcaccccaaaugccaggc

SEQ ID NO: 1257422 - RNA, 18 nt, Human
caccauagcuggcccgcu

SEQ ID NO: 1257423 - RNA, 18 nt, Human
caccuguugaagcugaga

SEQ ID NO: 1257424 - RNA, 32 nt, Human
cacucuccauuuuguccuuuccccaugaaaag

SEQ ID NO: 1257425 - RNA, 24 nt, Human
caggaucgcgcugccuggccggcc

SEQ ID NO: 1257426 - RNA, 23 nt, Human
ccaaaugcuaugacaccaauauc

SEQ ID NO: 1257427 - RNA, 21 nt, Human
ccauuuuguccuuuccccaug

SEQ ID NO: 1257428 - RNA, 18 nt, Human
ccuccauggguugccacc

SEQ ID NO: 1257429 - RNA, 20 nt, Human
cgccgcaggaucgcgcugcc

SEQ ID NO: 1257430 - RNA, 20 nt, Human
cgcgcugccuggccggccgc

SEQ ID NO: 1257431 - RNA, 20 nt, Human
cgcugcaggguucaccagcc

SEQ ID NO: 1257432 - RNA, 21 nt, Human
cucugcuuaggacguuucaga

SEQ ID NO: 1257433 - RNA, 21 nt, Human
cuguguggagaauaucucgug

SEQ ID NO: 1257434 - RNA, 18 nt, Human
cuuuugcuaugucggggg

SEQ ID NO: 1257435 - RNA, 22 nt, Human
gaaauuguggcuuuuaauguag

SEQ ID NO: 1257436 - RNA, 23 nt, Human
gacguuucagauaagggucaggc

SEQ ID NO: 1257437 - RNA, 19 nt, Human
gagaggcagugguggcugg

SEQ ID NO: 1257438 - RNA, 22 nt, Human
gagcagccaggauuaacucugc

SEQ ID NO: 1257439 - RNA, 18 nt, Human
gccaccuuuugcuauguc

SEQ ID NO: 1257440 - RNA, 18 nt, Human
gccaggcuucccaccaua

SEQ ID NO: 1257441 - RNA, 22 nt, Human
gcgcugcccgugggccucacuc

SEQ ID NO: 1257442 - RNA, 24 nt, Human
gggccgggacggaacucgacggaa

SEQ ID NO: 1257443 - RNA, 22 nt, Human
uaagucucuauagaaucaagaa

SEQ ID NO: 1257444 - RNA, 21 nt, Human
uaggccaaaugcuaugacacc

SEQ ID NO: 1257445 - RNA, 26 nt, Human
ucacucuccauuuuguccuuucccca

SEQ ID NO: 1257446 - RNA, 21 nt, Human
ucccaccauagcuggcccgcu

SEQ ID NO: 1257447 - RNA, 19 nt, Human
uccugagcagccaggauua

SEQ ID NO: 1257448 - RNA, 24 nt, Human
uccugggcgcugcccgugggccuc

SEQ ID NO: 1257449 - RNA, 23 nt, Human
ucguggagauuugaaaugugucg

SEQ ID NO: 1257450 - RNA, 19 nt, Human
ucucuauagaaucaagaag

SEQ ID NO: 1257451 - RNA, 18 nt, Human
ugagaggcagugguggcu

SEQ ID NO: 1257452 - RNA, 20 nt, Human
ugagaggcagugguggcugg

SEQ ID NO: 1257453 - RNA, 18 nt, Human
ugcaaggagcaccccaaa

SEQ ID NO: 1257454 - RNA, 20 nt, Human
ugggcuccugggcgcugccc

SEQ ID NO: 1257455 - RNA, 20 nt, Human
uucccaccauagcuggcccg

SEQ ID NO: 1257456 - RNA, 25 nt, Human
uucccaccauagcuggcccgcugca

SEQ ID NO: 1257457 - RNA, 21 nt, Human
uugcaaggagcaccccaaaug

SEQ ID NO: 1257458 - RNA, 25 nt, Human
uuugaaaugugucgccucuccugag

SEQ ID NO: 1257459 - RNA, 21 nt, Human
aaaaagcucaacaucauuagu

SEQ ID NO: 1257460 - RNA, 21 nt, Human
aaacucugucucuacaaaaaa

SEQ ID NO: 1257461 - RNA, 24 nt, Human
aaauguguuucuuuuuaaaucugu

SEQ ID NO: 1257462 - RNA, 20 nt, Human
aacauagcaagacucuaucu

SEQ ID NO: 1257463 - RNA, 21 nt, Human
aacaugacgaaacucugucuc

SEQ ID NO: 1257464 - RNA, 18 nt, Human
aagcaggaggccaccaga

SEQ ID NO: 1257465 - RNA, 23 nt, Human
aagcaggaggccaccagagcagc

SEQ ID NO: 1257466 - RNA, 24 nt, Human
aagccuguagucccagcuacccag

SEQ ID NO: 1257467 - RNA, 23 nt, Human
aaguagccaggguugggggggca

SEQ ID NO: 1257468 - RNA, 23 nt, Human
acagagugagaccuuauuucaaa

SEQ ID NO: 1257469 - RNA, 19 nt, Human
acaugacgaaacucugucu

SEQ ID NO: 1257470 - RNA, 23 nt, Human
acauguaucccaaagcucaugug

SEQ ID NO: 1257471 - RNA, 24 nt, Human
acuccagccuggaugacagaguga

SEQ ID NO: 1257472 - RNA, 24 nt, Human
acugcacuccagccuggaugacag

SEQ ID NO: 1257473 - RNA, 26 nt, Human
acugcacuccagccuggaugacagag

SEQ ID NO: 1257474 - RNA, 23 nt, Human
agaaaagccaggaagagccugag

SEQ ID NO: 1257475 - RNA, 23 nt, Human
agaaauguguuucuuuuuaaauc

SEQ ID NO: 1257476 - RNA, 18 nt, Human
agaaggcaaggaggacag

SEQ ID NO: 1257477 - RNA, 25 nt, Human
agacacugaaggcagcccaggagcc

SEQ ID NO: 1257478 - RNA, 24 nt, Human
agacaugguggcucacuccuguaa

SEQ ID NO: 1257479 - RNA, 19 nt, Human
agagcagcugccgcacgcg

SEQ ID NO: 1257480 - RNA, 24 nt, Human
agaguucagugucagccuggacaa

SEQ ID NO: 1257481 - RNA, 24 nt, Human
agcacuuuggaaggcugagacggg

SEQ ID NO: 1257482 - RNA, 18 nt, Human
agcccuuucaggggaaug

SEQ ID NO: 1257483 - RNA, 22 nt, Human
agccuggacaacauagcaagac

SEQ ID NO: 1257484 - RNA, 24 nt, Human
agccuggacaacauagcaagacuc

SEQ ID NO: 1257485 - RNA, 24 nt, Human
agccuggaugacagagugagaccu

SEQ ID NO: 1257486 - RNA, 22 nt, Human
agccugggcaacaugacgaaac

SEQ ID NO: 1257487 - RNA, 24 nt, Human
agccugggcaacaugacgaaacuc

SEQ ID NO: 1257488 - RNA, 18 nt, Human
agccuguagucccagcua

SEQ ID NO: 1257489 - RNA, 24 nt, Human
agccuguagucccagcuacccagg

SEQ ID NO: 1257490 - RNA, 24 nt, Human
agcuacccaggaggcugagguggg

SEQ ID NO: 1257491 - RNA, 18 nt, Human
agcugggugugguagugc

SEQ ID NO: 1257492 - RNA, 23 nt, Human
agcugggugugguagugcaagcc

SEQ ID NO: 1257493 - RNA, 18 nt, Human
aggaagagccugagugug

SEQ ID NO: 1257494 - RNA, 22 nt, Human
aggaagagccugagugugaaag

SEQ ID NO: 1257495 - RNA, 19 nt, Human
aggaggccaccagagcagc

SEQ ID NO: 1257496 - RNA, 20 nt, Human
aggcaaggaggacagcaggu

SEQ ID NO: 1257497 - RNA, 24 nt, Human
aggcagagccgaaaggcccaagca

SEQ ID NO: 1257498 - RNA, 20 nt, Human
aggcagcccaggagcccagc

SEQ ID NO: 1257499 - RNA, 18 nt, Human
aggcaggcggaucacuug

SEQ ID NO: 1257500 - RNA, 26 nt, Human
aggcaggcggaucacuugagcucagg

SEQ ID NO: 1257501 - RNA, 23 nt, Human
aggccggggcaggaggaucguug

SEQ ID NO: 1257502 - RNA, 22 nt, Human
aggcggaucacuugagcucagg

SEQ ID NO: 1257503 - RNA, 24 nt, Human
aggcugagacgggaggaccgcuug

SEQ ID NO: 1257504 - RNA, 24 nt, Human
aggcugaggugggaggacugcuug

SEQ ID NO: 1257505 - RNA, 21 nt, Human
agggagcugccuuucucuccu

SEQ ID NO: 1257506 - RNA, 20 nt, Human
aguuuaugguggcugaggca

SEQ ID NO: 1257507 - RNA, 19 nt, Human
auccggcagaaguguagag

SEQ ID NO: 1257508 - RNA, 21 nt, Human
augcauuuacuuucacguggg

SEQ ID NO: 1257509 - RNA, 23 nt, Human
auggagaaacccugaugccuaca

SEQ ID NO: 1257510 - RNA, 24 nt, Human
auuuugccacugcacuccagccug

SEQ ID NO: 1257511 - RNA, 18 nt, Human
caaaaccagcccuuucag

SEQ ID NO: 1257512 - RNA, 21 nt, Human
caaaauggagaaacccugaug

SEQ ID NO: 1257513 - RNA, 22 nt, Human
caacaugacgaaacucugucuc

SEQ ID NO: 1257514 - RNA, 24 nt, Human
caacaugacgaaacucugucucua

SEQ ID NO: 1257515 - RNA, 22 nt, Human
caacccaccagcucuccuagga

SEQ ID NO: 1257516 - RNA, 21 nt, Human
caaggaggacagcagguggcg

SEQ ID NO: 1257517 - RNA, 23 nt, Human
caaggaggacagcagguggcggc

SEQ ID NO: 1257518 - RNA, 23 nt, Human
cacaacccaccagcucuccuagg

SEQ ID NO: 1257519 - RNA, 24 nt, Human
cacaccugucaucccagcacuuug

SEQ ID NO: 1257520 - RNA, 19 nt, Human
caccgggccccgccugccu

SEQ ID NO: 1257521 - RNA, 23 nt, Human
caccugucaucccagcacuuugg

SEQ ID NO: 1257522 - RNA, 24 nt, Human
caccugucaucccagcacuuugga

SEQ ID NO: 1257523 - RNA, 22 nt, Human
cacuccagccuggaugacagag

SEQ ID NO: 1257524 - RNA, 24 nt, Human
cacuccagccuggaugacagagug

SEQ ID NO: 1257525 - RNA, 22 nt, Human
cacuccuguaaucccagcacug

SEQ ID NO: 1257526 - RNA, 18 nt, Human
cacugaaggcagcccagg

SEQ ID NO: 1257527 - RNA, 18 nt, Human
cacugcacuccagccugg

SEQ ID NO: 1257528 - RNA, 19 nt, Human
cacugcacuccagccugga

SEQ ID NO: 1257529 - RNA, 21 nt, Human
cacugcacuccagccuggaug

SEQ ID NO: 1257530 - RNA, 22 nt, Human
cacugcacuccagccuggauga

SEQ ID NO: 1257531 - RNA, 24 nt, Human
cacugcacuccagccuggaugaca

SEQ ID NO: 1257532 - RNA, 18 nt, Human
cacuuuggaaggcugagg

SEQ ID NO: 1257533 - RNA, 20 nt, Human
cagcaccggcgaaguuggug

SEQ ID NO: 1257534 - RNA, 24 nt, Human
cagcacugugggaggccaaggcag

SEQ ID NO: 1257535 - RNA, 24 nt, Human
cagcacugugggaggccaaggcag

SEQ ID NO: 1257536 - RNA, 18 nt, Human
cagcacuuuggaaggcug

SEQ ID NO: 1257537 - RNA, 20 nt, Human
cagcacuuuggaaggcugag

SEQ ID NO: 1257538 - RNA, 18 nt, Human
cagcccaggagcccagcc

SEQ ID NO: 1257539 - RNA, 24 nt, Human
cagcuacccaggaggcugaggugg

SEQ ID NO: 1257540 - RNA, 24 nt, Human
cagguacucaggaggccggggcag

SEQ ID NO: 1257541 - RNA, 20 nt, Human
cagugucagccuggacaaca

SEQ ID NO: 1257542 - RNA, 26 nt, Human
cauagcaagacucuaucucuguuuaa

SEQ ID NO: 1257543 - RNA, 22 nt, Human
cauggccauguugaggggcagg

SEQ ID NO: 1257544 - RNA, 19 nt, Human
ccacugcacuccagccugg

SEQ ID NO: 1257545 - RNA, 20 nt, Human
ccacugcacuccagccugga

SEQ ID NO: 1257546 - RNA, 21 nt, Human
ccacugcacuccagccuggau

SEQ ID NO: 1257547 - RNA, 24 nt, Human
ccacugcacuccagccuggaugac

SEQ ID NO: 1257548 - RNA, 18 nt, Human
ccaggguugggggggcag

SEQ ID NO: 1257549 - RNA, 30 nt, Human
ccagucuggccaaaauggagaaacccugaa

SEQ ID NO: 1257550 - RNA, 23 nt, Human
ccauagagucuucaguuucggag

SEQ ID NO: 1257551 - RNA, 18 nt, Human
cccaggaggcugaggugg

SEQ ID NO: 1257552 - RNA, 23 nt, Human
cccagguacucaggaggccgggg

SEQ ID NO: 1257553 - RNA, 23 nt, Human
ccugccuccuccuuguuucuccu

SEQ ID NO: 1257554 - RNA, 20 nt, Human
ccuggacaacauagcaagac

SEQ ID NO: 1257555 - RNA, 20 nt, Human
ccugggcaacaugacgaaac

SEQ ID NO: 1257556 - RNA, 21 nt, Human
ccuguaaucccagcacugugg

SEQ ID NO: 1257557 - RNA, 22 nt, Human
ccuguaaucccagcacuguggg

SEQ ID NO: 1257558 - RNA, 21 nt, Human
ccuguagucccagcuacccag

SEQ ID NO: 1257559 - RNA, 24 nt, Human
ccuguagucccagcuacccaggag

SEQ ID NO: 1257560 - RNA, 26 nt, Human
cggaucacuugagcucaggagugacu

SEQ ID NO: 1257561 - RNA, 21 nt, Human
cggcugggcauggugacuugu

SEQ ID NO: 1257562 - RNA, 18 nt, Human
cgggcaggggaggcagag

SEQ ID NO: 1257563 - RNA, 21 nt, Human
cggugccgaggugggugcgcc

SEQ ID NO: 1257564 - RNA, 24 nt, Human
cucacaccugucaucccagcacuu

SEQ ID NO: 1257565 - RNA, 23 nt, Human
cucacuccuguaaucccagcacu

SEQ ID NO: 1257566 - RNA, 24 nt, Human
cuccacaacccaccagcucuccua

SEQ ID NO: 1257567 - RNA, 24 nt, Human
cuccugagaccagccugggcaaca

SEQ ID NO: 1257568 - RNA, 21 nt, Human
cuccuggcuccacaacccacc

SEQ ID NO: 1257569 - RNA, 21 nt, Human
cugcaccugcagggcgcagcu

SEQ ID NO: 1257570 - RNA, 21 nt, Human
cuggccaaaauggagaaaccc

SEQ ID NO: 1257571 - RNA, 18 nt, Human
cugguuuccuagccuugc

SEQ ID NO: 1257572 - RNA, 27 nt, Human
cuguaguuggaacauguaucccaaagc

SEQ ID NO: 1257573 - RNA, 19 nt, Human
cuucagauuauuccggcug

SEQ ID NO: 1257574 - RNA, 23 nt, Human
cuuccucauaguuuuaaccuggg

SEQ ID NO: 1257575 - RNA, 18 nt, Human
cuucugguuuccuagccu

SEQ ID NO: 1257576 - RNA, 20 nt, Human
cuuuggucuucuagaaggcu

SEQ ID NO: 1257577 - RNA, 21 nt, Human
gaaaaaaaagcucaacaucau

SEQ ID NO: 1257578 - RNA, 22 nt, Human
gaaagagcuuggaagugcagaa

SEQ ID NO: 1257579 - RNA, 21 nt, Human
gacacugaaggcagcccagga

SEQ ID NO: 1257580 - RNA, 21 nt, Human
gaccuuauuucaaaaaaaagu

SEQ ID NO: 1257581 - RNA, 23 nt, Human
gagcagcugccgcacgcggugcu

SEQ ID NO: 1257582 - RNA, 20 nt, Human
gaucacuugagcucaggagu

SEQ ID NO: 1257583 - RNA, 22 nt, Human
gaucacuugagcucaggaguga

SEQ ID NO: 1257584 - RNA, 24 nt, Human
gaugauggcgggaugggaaaagga

SEQ ID NO: 1257585 - RNA, 21 nt, Human
gaugggaaaaggagggcuuug

SEQ ID NO: 1257586 - RNA, 24 nt, Human
gcacuccagccuggaugacagagu

SEQ ID NO: 1257587 - RNA, 18 nt, Human
gcagaagaagauaccaca

SEQ ID NO: 1257588 - RNA, 21 nt, Human
gcagaaguguagagaagaggg

SEQ ID NO: 1257589 - RNA, 25 nt, Human
gcagcccaggagcccagccgucauc

SEQ ID NO: 1257590 - RNA, 22 nt, Human
gcaggggaggcagagccgaaag

SEQ ID NO: 1257591 - RNA, 23 nt, Human
gccggggcaggaggaucguugga

SEQ ID NO: 1257592 - RNA, 23 nt, Human
gcgucuuugugccucaguuucgu

SEQ ID NO: 1257593 - RNA, 18 nt, Human
gcugcaagccccuguguc

SEQ ID NO: 1257594 - RNA, 22 nt, Human
gcugggcauggugacuugugcc

SEQ ID NO: 1257595 - RNA, 21 nt, Human
ggaacauguaucccaaagcuc

SEQ ID NO: 1257596 - RNA, 24 nt, Human
ggaauguacagggaaggugaaggg

SEQ ID NO: 1257597 - RNA, 22 nt, Human
ggagacggucauuccugugugg

SEQ ID NO: 1257598 - RNA, 21 nt, Human
ggaggacagcagguggcggcu

SEQ ID NO: 1257599 - RNA, 21 nt, Human
ggcaaaaccagcccuuucagg

SEQ ID NO: 1257600 - RNA, 20 nt, Human
ggcaccgggccccgccugcc

SEQ ID NO: 1257601 - RNA, 22 nt, Human
ggcaggaggaucguuggagccc

SEQ ID NO: 1257602 - RNA, 19 nt, Human
ggcagggacgggaagaggu

SEQ ID NO: 1257603 - RNA, 23 nt, Human
ggcauggugacuugugccuauaa

SEQ ID NO: 1257604 - RNA, 18 nt, Human
ggccgguggcucacaggc

SEQ ID NO: 1257605 - RNA, 24 nt, Human
ggcgaaguuggugucagguccagg

SEQ ID NO: 1257606 - RNA, 22 nt, Human
ggcuuccauagagucuucaguu

SEQ ID NO: 1257607 - RNA, 23 nt, Human
gggcaggaggaucguuggagccc

SEQ ID NO: 1257608 - RNA, 19 nt, Human
ggguugggggggcagucag

SEQ ID NO: 1257609 - RNA, 24 nt, Human
ggugacuugugccuauaaucccag

SEQ ID NO: 1257610 - RNA, 24 nt, Human
gguggcucacuccuguaaucccag

SEQ ID NO: 1257611 - RNA, 18 nt, Human
guagugcaagccuguagu

SEQ ID NO: 1257612 - RNA, 18 nt, Human
gucuuugugccucaguuu

SEQ ID NO: 1257613 - RNA, 23 nt, Human
gugauuuugccacugcacuccag

SEQ ID NO: 1257614 - RNA, 20 nt, Human
gugcagaagaagauaccaca

SEQ ID NO: 1257615 - RNA, 24 nt, Human
uaaagacacugaaggcagcccagu

SEQ ID NO: 1257616 - RNA, 25 nt, Human
uaacagagcuggagaagcaaccaca

SEQ ID NO: 1257617 - RNA, 20 nt, Human
uaagcugggugugguagugc

SEQ ID NO: 1257618 - RNA, 20 nt, Human
uaagguguuucagaggaagu

SEQ ID NO: 1257619 - RNA, 25 nt, Human
uauggagaaaaaaaagcucaacauc

SEQ ID NO: 1257620 - RNA, 20 nt, Human
uauucugucauauuuccagc

SEQ ID NO: 1257621 - RNA, 19 nt, Human
ucacgugggccgguggcuc

SEQ ID NO: 1257622 - RNA, 23 nt, Human
uccacaaauggucauguuuccau

SEQ ID NO: 1257623 - RNA, 18 nt, Human
uccacccggcacggcaga

SEQ ID NO: 1257624 - RNA, 23 nt, Human
uccagccuggaugacagagugag

SEQ ID NO: 1257625 - RNA, 24 nt, Human
uccagccuggaugacagagugaga

SEQ ID NO: 1257626 - RNA, 21 nt, Human
ucccaaagcucauguguugga

SEQ ID NO: 1257627 - RNA, 23 nt, Human
uccgugcuaacgguaaaguggag

SEQ ID NO: 1257628 - RNA, 24 nt, Human
uccugcuaaaagggucagaggacc

SEQ ID NO: 1257629 - RNA, 19 nt, Human
uccuggaaguaaagauggc

SEQ ID NO: 1257630 - RNA, 23 nt, Human
uccuguauuauggagaaaaaaaa

SEQ ID NO: 1257631 - RNA, 21 nt, Human
uccuuguuucuccucugcagu

SEQ ID NO: 1257632 - RNA, 20 nt, Human
ucugcagucccaggucucgg

SEQ ID NO: 1257633 - RNA, 24 nt, Human
ucuggccaaaauggagaaacccug

SEQ ID NO: 1257634 - RNA, 23 nt, Human
ucuuccagggccugcaccugcag

SEQ ID NO: 1257635 - RNA, 18 nt, Human
ugacagguuccccuaaag

SEQ ID NO: 1257636 - RNA, 19 nt, Human
ugacuccugagaccagccu

SEQ ID NO: 1257637 - RNA, 22 nt, Human
ugacuugugccuauaaucccag

SEQ ID NO: 1257638 - RNA, 19 nt, Human
ugaggcagaaaagccagga

SEQ ID NO: 1257639 - RNA, 23 nt, Human
ugaggggcagggacgggaagagg

SEQ ID NO: 1257640 - RNA, 23 nt, Human
ugaggugggaggacugcuugagc

SEQ ID NO: 1257641 - RNA, 24 nt, Human
ugaggugggaggacugcuugagcc

SEQ ID NO: 1257642 - RNA, 19 nt, Human
uggaugacagagugagacc

SEQ ID NO: 1257643 - RNA, 25 nt, Human
uggcaaaaccagcccuuucagggga

SEQ ID NO: 1257644 - RNA, 21 nt, Human
uggcaacuuuauguauaugca

SEQ ID NO: 1257645 - RNA, 21 nt, Human
uggcgggaugggaaaaggagg

SEQ ID NO: 1257646 - RNA, 21 nt, Human
uggcucacuccuguaauccca

SEQ ID NO: 1257647 - RNA, 24 nt, Human
uggcucacuccuguaaucccagca

SEQ ID NO: 1257648 - RNA, 24 nt, Human
ugggaggccaaggcaggcggauca

SEQ ID NO: 1257649 - RNA, 24 nt, Human
ugggcaacaugacgaaacucuguc

SEQ ID NO: 1257650 - RNA, 21 nt, Human
ugggggggcagucagaggacu

SEQ ID NO: 1257651 - RNA, 26 nt, Human
uggguuaaaauugacugcuuuuggga

SEQ ID NO: 1257652 - RNA, 24 nt, Human
uggguuugggucucuuuccuguau

SEQ ID NO: 1257653 - RNA, 19 nt, Human
ugguaacaauuaagugaug

SEQ ID NO: 1257654 - RNA, 24 nt, Human
ugguagugcaagccuguaguccca

SEQ ID NO: 1257655 - RNA, 24 nt, Human
uggugacuugugccuauaauccca

SEQ ID NO: 1257656 - RNA, 24 nt, Human
ugguggcucacuccuguaauccca

SEQ ID NO: 1257657 - RNA, 21 nt, Human
uguacacauugcaauagcaug

SEQ ID NO: 1257658 - RNA, 24 nt, Human
uguagagaagagggagaaggcaag

SEQ ID NO: 1257659 - RNA, 19 nt, Human
uguaugaaauuaaggggcu

SEQ ID NO: 1257660 - RNA, 22 nt, Human
uguauuauggagaaaaaaaagc

SEQ ID NO: 1257661 - RNA, 22 nt, Human
ugucauauuuccagcagcaaag

SEQ ID NO: 1257662 - RNA, 27 nt, Human
ugucuugucccuucugcugcguccugg

SEQ ID NO: 1257663 - RNA, 22 nt, Human
ugugguagugcaagccuguagu

SEQ ID NO: 1257664 - RNA, 21 nt, Human
uguugaggggcagggacggga

SEQ ID NO: 1257665 - RNA, 23 nt, Human
uuagcucuugucaccuccccuca

SEQ ID NO: 1257666 - RNA, 18 nt, Human
uuccagaccagucuggcc

SEQ ID NO: 1257667 - RNA, 22 nt, Human
uuccccuaaagguguucaaugc

SEQ ID NO: 1257668 - RNA, 20 nt, Human
uuccucauaguuuuaaccug

SEQ ID NO: 1257669 - RNA, 20 nt, Human
uugggggggcagucagaggg

SEQ ID NO: 1257670 - RNA, 21 nt, Human
uuucacgugggccgguggcuc

SEQ ID NO: 1257671 - RNA, 19 nt, Human
uuuggaaggcugagacggg

SEQ ID NO: 1257672 - RNA, 21 nt, Human
aaaaaaaaauucacuacagga

SEQ ID NO: 1257673 - RNA, 26 nt, Human
aaaaaaagccaguaauuagaacaaaa

SEQ ID NO: 1257674 - RNA, 21 nt, Human
aaaaagccaguaauuagaaca

SEQ ID NO: 1257675 - RNA, 18 nt, Human
aaaaagccuuaagacacc

SEQ ID NO: 1257676 - RNA, 26 nt, Human
aaagaacuucacccaaagguacgaac

SEQ ID NO: 1257677 - RNA, 19 nt, Human
aaagaaggccugaaaugua

SEQ ID NO: 1257678 - RNA, 20 nt, Human
aacacggugaaaccccgucu

SEQ ID NO: 1257679 - RNA, 21 nt, Human
aacacggugaaaccccgucuc

SEQ ID NO: 1257680 - RNA, 20 nt, Human
aacagagcaagacuccaucu

SEQ ID NO: 1257681 - RNA, 20 nt, Human
aagaggaaaaaaagccagua

SEQ ID NO: 1257682 - RNA, 24 nt, Human
acagagcaagacuccaucucaaag

SEQ ID NO: 1257683 - RNA, 22 nt, Human
acagcaaagaacuucacccaaa

SEQ ID NO: 1257684 - RNA, 20 nt, Human
accaaaagaggaaaaaaagc

SEQ ID NO: 1257685 - RNA, 24 nt, Human
accccgucucuacuaaaaauacaa

SEQ ID NO: 1257686 - RNA, 21 nt, Human
acugcacuccagccugggcaa

SEQ ID NO: 1257687 - RNA, 22 nt, Human
acugcacuccagccugggcaac

SEQ ID NO: 1257688 - RNA, 23 nt, Human
acugcacuccagccugggcaaca

SEQ ID NO: 1257689 - RNA, 24 nt, Human
acugcacuccagccugggcaacag

SEQ ID NO: 1257690 - RNA, 24 nt, Human
acugcacuccagccugggcaacag

SEQ ID NO: 1257691 - RNA, 22 nt, Human
agaaaaaaguagguuuccaaaa

SEQ ID NO: 1257692 - RNA, 22 nt, Human
agagguugcagugagccgagau

SEQ ID NO: 1257693 - RNA, 24 nt, Human
agagguugcagugagccgagauug

SEQ ID NO: 1257694 - RNA, 22 nt, Human
agcacagcaaagaacuucaccc

SEQ ID NO: 1257695 - RNA, 24 nt, Human
agccugggcaacagagcaagacuc

SEQ ID NO: 1257696 - RNA, 19 nt, Human
agcuggucaaagagaagcc

SEQ ID NO: 1257697 - RNA, 21 nt, Human
agcuggucaaagagaagcccc

SEQ ID NO: 1257698 - RNA, 21 nt, Human
aggcagagguugcagugagcc

SEQ ID NO: 1257699 - RNA, 24 nt, Human
aggcagagguugcagugagccgag

SEQ ID NO: 1257700 - RNA, 21 nt, Human
aggccgaggcggguggaucac

SEQ ID NO: 1257701 - RNA, 24 nt, Human
aggcggguggaucacgaggucagg

SEQ ID NO: 1257702 - RNA, 23 nt, Human
agggaggaaccagaggaacagua

SEQ ID NO: 1257703 - RNA, 24 nt, Human
aggugcgguggcucaugccuguaa

SEQ ID NO: 1257704 - RNA, 19 nt, Human
augccuguaaucccaacac

SEQ ID NO: 1257705 - RNA, 24 nt, Human
auugugcgacugcacuccagccug

SEQ ID NO: 1257706 - RNA, 21 nt, Human
caaagaacuucacccaaaggu

SEQ ID NO: 1257707 - RNA, 24 nt, Human
caacacuuugggaggccgaggcgg

SEQ ID NO: 1257708 - RNA, 22 nt, Human
caagacuccaucucaaagaagg

SEQ ID NO: 1257709 - RNA, 25 nt, Human
caagcuggucaaagagaagccccug

SEQ ID NO: 1257710 - RNA, 24 nt, Human
cacagcaaagaacuucacccaaag

SEQ ID NO: 1257711 - RNA, 21 nt, Human
cacaguaaaauaagcuucaaa

SEQ ID NO: 1257712 - RNA, 22 nt, Human
caccaaaagaggaaaaaaagcc

SEQ ID NO: 1257713 - RNA, 24 nt, Human
caccaaaagaggaaaaaaagccag

SEQ ID NO: 1257714 - RNA, 23 nt, Human
cacuccagccugggcaacagagc

SEQ ID NO: 1257715 - RNA, 18 nt, Human
cagcaaagaacuucaccc

SEQ ID NO: 1257716 - RNA, 21 nt, Human
cagcaaagaacuucacccaaa

SEQ ID NO: 1257717 - RNA, 20 nt, Human
caugccuguaaucccaacac

SEQ ID NO: 1257718 - RNA, 24 nt, Human
caugccuguaaucccaacacuuug

SEQ ID NO: 1257719 - RNA, 21 nt, Human
ccaaaagaggaaaaaaagcca

SEQ ID NO: 1257720 - RNA, 23 nt, Human
ccuggcuaacacggugaaacccc

SEQ ID NO: 1257721 - RNA, 24 nt, Human
ccuggcuaacacggugaaaccccg

SEQ ID NO: 1257722 - RNA, 25 nt, Human
ccugggaggcagagguugcagugag

SEQ ID NO: 1257723 - RNA, 22 nt, Human
ccugggcaacagagcaagacuc

SEQ ID NO: 1257724 - RNA, 22 nt, Human
ccuguaaucccaacacuuuggg

SEQ ID NO: 1257725 - RNA, 21 nt, Human
ccuguaaucccagcuacucgg

SEQ ID NO: 1257726 - RNA, 21 nt, Human
cgacugcacuccagccugggc

SEQ ID NO: 1257727 - RNA, 24 nt, Human
cgacugcacuccagccugggcaac

SEQ ID NO: 1257728 - RNA, 24 nt, Human
cgagaucauccuggcuaacacggu

SEQ ID NO: 1257729 - RNA, 24 nt, Human
cgaggcggguggaucacgagguca

SEQ ID NO: 1257730 - RNA, 23 nt, Human
cgccuguaaucccagcuacucgg

SEQ ID NO: 1257731 - RNA, 24 nt, Human
cgccuguaaucccagcuacucggg

SEQ ID NO: 1257732 - RNA, 24 nt, Human
cucaugccuguaaucccaacacuu

SEQ ID NO: 1257733 - RNA, 18 nt, Human
cuggcuaacacggugaaa

SEQ ID NO: 1257734 - RNA, 23 nt, Human
cuggggcaggagaauggcaugaa

SEQ ID NO: 1257735 - RNA, 24 nt, Human
cugggucaggugcgguggcucaug

SEQ ID NO: 1257736 - RNA, 25 nt, Human
gacaccaaaagaggaaaaaaagcca

SEQ ID NO: 1257737 - RNA, 23 nt, Human
gagauugugcgacugcacuccag

SEQ ID NO: 1257738 - RNA, 19 nt, Human
gcaaagaacuucacccaaa

SEQ ID NO: 1257739 - RNA, 24 nt, Human
gcacuccagccugggcaacagagc

SEQ ID NO: 1257740 - RNA, 19 nt, Human
gcagcagacacuguuuucu

SEQ ID NO: 1257741 - RNA, 18 nt, Human
gccagaugccucuugcca

SEQ ID NO: 1257742 - RNA, 21 nt, Human
gccaguaauuagaacaaaaug

SEQ ID NO: 1257743 - RNA, 22 nt, Human
gccgggugugguggcaggcgcc

SEQ ID NO: 1257744 - RNA, 22 nt, Human
gcgacugcacuccagccugggc

SEQ ID NO: 1257745 - RNA, 24 nt, Human
gcuaacacggugaaaccccgucuc

SEQ ID NO: 1257746 - RNA, 20 nt, Human
ggcaggagaauggcaugaac

SEQ ID NO: 1257747 - RNA, 21 nt, Human
ggcaggagaauggcaugaacc

SEQ ID NO: 1257748 - RNA, 23 nt, Human
ggcaggagaauggcaugaaccug

SEQ ID NO: 1257749 - RNA, 18 nt, Human
ggucaggugcgguggcuc

SEQ ID NO: 1257750 - RNA, 21 nt, Human
gguggaucacgaggucaggag

SEQ ID NO: 1257751 - RNA, 24 nt, Human
gguggcaggcgccuguaaucccag

SEQ ID NO: 1257752 - RNA, 23 nt, Human
gguggcucaugccuguaauccca

SEQ ID NO: 1257753 - RNA, 23 nt, Human
ggugugguggcaggcgccuguaa

SEQ ID NO: 1257754 - RNA, 19 nt, Human
guugcagugagccgagauu

SEQ ID NO: 1257755 - RNA, 22 nt, Human
uaacacggugaaaccccgucuc

SEQ ID NO: 1257756 - RNA, 24 nt, Human
uaacacggugaaaccccgucucua

SEQ ID NO: 1257757 - RNA, 24 nt, Human
uaagacaccaaaagaggaaaaaaa

SEQ ID NO: 1257758 - RNA, 19 nt, Human
ucaaaaagccuuaagacac

SEQ ID NO: 1257759 - RNA, 24 nt, Human
ucaaaaagccuuaagacaccaaaa

SEQ ID NO: 1257760 - RNA, 18 nt, Human
ucacgaggucaggagauc

SEQ ID NO: 1257761 - RNA, 24 nt, Human
ucacgaggucaggagaucgagauc

SEQ ID NO: 1257762 - RNA, 24 nt, Human
ucagucacauugggaaccauuugu

SEQ ID NO: 1257763 - RNA, 22 nt, Human
ucccaauaaacucacaguaaaa

SEQ ID NO: 1257764 - RNA, 24 nt, Human
ucucuacuaaaaauacaaaaaauu

SEQ ID NO: 1257765 - RNA, 19 nt, Human
ucuugcaacagacacugcu

SEQ ID NO: 1257766 - RNA, 19 nt, Human
ugaaaucuggugagaucca

SEQ ID NO: 1257767 - RNA, 21 nt, Human
ugaaauguagggaggaaccag

SEQ ID NO: 1257768 - RNA, 24 nt, Human
ugaaccugggaggcagagguugca

SEQ ID NO: 1257769 - RNA, 22 nt, Human
ugagccgagauugugcgacugc

SEQ ID NO: 1257770 - RNA, 19 nt, Human
ugagugguugacugcucuu

SEQ ID NO: 1257771 - RNA, 19 nt, Human
ugagugguugacugcucuu

SEQ ID NO: 1257772 - RNA, 23 nt, Human
ugcaacagacacugcuucaacac

SEQ ID NO: 1257773 - RNA, 18 nt, Human
ugccacaggaauuuucga

SEQ ID NO: 1257774 - RNA, 23 nt, Human
ugccuguaaucccaacacuuugg

SEQ ID NO: 1257775 - RNA, 24 nt, Human
ugcgacugcacuccagccugggca

SEQ ID NO: 1257776 - RNA, 18 nt, Human
ugcuucaacacacacugu

SEQ ID NO: 1257777 - RNA, 22 nt, Human
uggcaggcgccuguaaucccag

SEQ ID NO: 1257778 - RNA, 20 nt, Human
uggcaugaaccugggaggca

SEQ ID NO: 1257779 - RNA, 21 nt, Human
uggcucaugccuguaauccca

SEQ ID NO: 1257780 - RNA, 24 nt, Human
uggcucaugccuguaaucccaaca

SEQ ID NO: 1257781 - RNA, 24 nt, Human
ugggaggcagagguugcagugagc

SEQ ID NO: 1257782 - RNA, 23 nt, Human
ugggaggccgaggcggguggauc

SEQ ID NO: 1257783 - RNA, 24 nt, Human
ugggaggccgaggcggguggauca

SEQ ID NO: 1257784 - RNA, 24 nt, Human
uggggcaggagaauggcaugaacc

SEQ ID NO: 1257785 - RNA, 24 nt, Human
ugguggcaggcgccuguaauccca

SEQ ID NO: 1257786 - RNA, 19 nt, Human
ugugguggcaggcgccugu

SEQ ID NO: 1257787 - RNA, 18 nt, Human
uugcagugagccgagauu

SEQ ID NO: 1257788 - RNA, 22 nt, Human
uugcagugagccgagauugugc

SEQ ID NO: 1257789 - RNA, 19 nt, Human
uugccgggugugguggcag

SEQ ID NO: 1257790 - RNA, 25 nt, Human
uugggaggccgaggcggguggauca

SEQ ID NO: 1257791 - RNA, 19 nt, Human
aacauggcaaaaccccauc

SEQ ID NO: 1257792 - RNA, 21 nt, Human
aacauggcaaaaccccaucuc

SEQ ID NO: 1257793 - RNA, 21 nt, Human
aacauggcaaaaccccaucuc

SEQ ID NO: 1257794 - RNA, 22 nt, Human
agaaaaaaguagguuuccaaaa

SEQ ID NO: 1257795 - RNA, 22 nt, Human
agcauauggcucuuuggcuuua

SEQ ID NO: 1257796 - RNA, 24 nt, Human
caacauggcaaaaccccaucuccu

SEQ ID NO: 1257797 - RNA, 24 nt, Human
cccaucuccuuuuuauaaagaaaa

SEQ ID NO: 1257798 - RNA, 20 nt, Human
cgcaacauggcaaaacccca

SEQ ID NO: 1257799 - RNA, 21 nt, Human
gaccuaggcuuuuggaaaggc

SEQ ID NO: 1257800 - RNA, 24 nt, Human
ucuuuggcuuuaccaucaaagauu

SEQ ID NO: 1257801 - RNA, 23 nt, Human
uggcaaaauuagauggacuucau

SEQ ID NO: 1257802 - RNA, 21 nt, Human
aaacaaaaacagugcuaaaaa

SEQ ID NO: 1257803 - RNA, 22 nt, Human
aaaguagccaauaaaaauauac

SEQ ID NO: 1257804 - RNA, 26 nt, Human
aaggcaccaccagauccccuccaaaa

SEQ ID NO: 1257805 - RNA, 24 nt, Human
aagucccucucaacaaacccaccc

SEQ ID NO: 1257806 - RNA, 18 nt, Human
acaccaaggcccagcaag

SEQ ID NO: 1257807 - RNA, 19 nt, Human
acagugcuaaaaaagucug

SEQ ID NO: 1257808 - RNA, 20 nt, Human
accuaaaaguaucucgggaa

SEQ ID NO: 1257809 - RNA, 25 nt, Human
agauccccuccaaauaugccugcuc

SEQ ID NO: 1257810 - RNA, 22 nt, Human
agcaagucccucucaacaaacc

SEQ ID NO: 1257811 - RNA, 21 nt, Human
auguucacagaggugacccac

SEQ ID NO: 1257812 - RNA, 22 nt, Human
caaggcaccaccagauccccuc

SEQ ID NO: 1257813 - RNA, 22 nt, Human
cacuaccacuuguccuaaacaa

SEQ ID NO: 1257814 - RNA, 21 nt, Human
cacuuuggaaaugcuggacua

SEQ ID NO: 1257815 - RNA, 23 nt, Human
cagcaagucccucucaacaaacc

SEQ ID NO: 1257816 - RNA, 24 nt, Human
caucggaacauguuggcauccagc

SEQ ID NO: 1257817 - RNA, 23 nt, Human
ccaccuaaaaguaucucgggaac

SEQ ID NO: 1257818 - RNA, 20 nt, Human
cccaccccuaucagcccuca

SEQ ID NO: 1257819 - RNA, 21 nt, Human
cccuaagcccaaguccugcuc

SEQ ID NO: 1257820 - RNA, 21 nt, Human
cccucucaacaaacccacccc

SEQ ID NO: 1257821 - RNA, 23 nt, Human
ccuccaaauaugccugcucucac

SEQ ID NO: 1257822 - RNA, 20 nt, Human
cggcaugucuuccacaggca

SEQ ID NO: 1257823 - RNA, 18 nt, Human
cucacaccaaggcccagc

SEQ ID NO: 1257824 - RNA, 23 nt, Human
cucccaggcgcugugggucccug

SEQ ID NO: 1257825 - RNA, 21 nt, Human
cucccggcggcuccaggcggu

SEQ ID NO: 1257826 - RNA, 22 nt, Human
cuccgggccucggcggcgucca

SEQ ID NO: 1257827 - RNA, 18 nt, Human
cucucacaccaaggccca

SEQ ID NO: 1257828 - RNA, 26 nt, Human
cuucaaggcaccaccagauccccucc

SEQ ID NO: 1257829 - RNA, 20 nt, Human
gccacuaccacuuguccuaa

SEQ ID NO: 1257830 - RNA, 24 nt, Human
gccacuaccacuuguccuaaacaa

SEQ ID NO: 1257831 - RNA, 24 nt, Human
ggaaacacacaccugugguccccu

SEQ ID NO: 1257832 - RNA, 20 nt, Human
guccacucccggcggcucca

SEQ ID NO: 1257833 - RNA, 26 nt, Human
gugacccacgcugaguagaugcugug

SEQ ID NO: 1257834 - RNA, 23 nt, Human
uaaaacaaaaacagugcuaaaaa

SEQ ID NO: 1257835 - RNA, 18 nt, Human
uaacacaaaggggaaaca

SEQ ID NO: 1257836 - RNA, 20 nt, Human
uaugccugcucucacaccaa

SEQ ID NO: 1257837 - RNA, 25 nt, Human
ucaacaaacccaccccuaucagccc

SEQ ID NO: 1257838 - RNA, 18 nt, Human
ucacaccaaggcccagca

SEQ ID NO: 1257839 - RNA, 18 nt, Human
ucccucucaacaaaccca

SEQ ID NO: 1257840 - RNA, 18 nt, Human
ucucaacaaacccacccc

SEQ ID NO: 1257841 - RNA, 21 nt, Human
ugaugggcugcaccagaaauu

SEQ ID NO: 1257842 - RNA, 23 nt, Human
ugauguucacagaggugacccac

SEQ ID NO: 1257843 - RNA, 19 nt, Human
ugccacuuaaugcaggccc

SEQ ID NO: 1257844 - RNA, 20 nt, Human
ugggucccugaugggcugca

SEQ ID NO: 1257845 - RNA, 18 nt, Human
uuuuuuuuuuuuuuacuu

SEQ ID NO: 1257846 - RNA, 26 nt, Human
aaaacugacaagaacaaaaggaaaca

SEQ ID NO: 1257847 - RNA, 21 nt, Human
aaaaggaaacaaauaucccaa

SEQ ID NO: 1257848 - RNA, 20 nt, Human
aacagacuuaccacauagga

SEQ ID NO: 1257849 - RNA, 24 nt, Human
caaaaggaaacaaauaucccaaua

SEQ ID NO: 1257850 - RNA, 20 nt, Human
cucaaacuuaacacaucuac

SEQ ID NO: 1257851 - RNA, 22 nt, Human
uaaacagacuuaccacauagga

SEQ ID NO: 1257852 - RNA, 20 nt, Human
uacacgugaaucugaaauuc

SEQ ID NO: 1257853 - RNA, 20 nt, Human
ucuacacgugaaucugaaau

SEQ ID NO: 1257854 - RNA, 18 nt, Human
ugacaagaacaaaaggaa

SEQ ID NO: 1257855 - RNA, 22 nt, Human
ugacaagaacaaaaggaaacaa

SEQ ID NO: 1257856 - RNA, 24 nt, Human
ugacaagaacaaaaggaaacaaaa

SEQ ID NO: 1257857 - RNA, 23 nt, Human
uggcaacaucgcucaaacuuaac

SEQ ID NO: 1257858 - RNA, 23 nt, Human
aagaaagcaccccaaaacgggcu

SEQ ID NO: 1257859 - RNA, 24 nt, Human
aagcaccccaaaacgggcugccag

SEQ ID NO: 1257860 - RNA, 20 nt, Human
aaggauccauggggcugaag

SEQ ID NO: 1257861 - RNA, 19 nt, Human
acccaggcugugggcugga

SEQ ID NO: 1257862 - RNA, 19 nt, Human
acucugacugagaggcaga

SEQ ID NO: 1257863 - RNA, 20 nt, Human
agacaggagccaaggcccca

SEQ ID NO: 1257864 - RNA, 18 nt, Human
agagaacugggggcucaa

SEQ ID NO: 1257865 - RNA, 24 nt, Human
agcuagcgagcgaggaccccuacc

SEQ ID NO: 1257866 - RNA, 20 nt, Human
aggaaaaacaauacagcuga

SEQ ID NO: 1257867 - RNA, 21 nt, Human
aggaaaaacaauacagcugaa

SEQ ID NO: 1257868 - RNA, 25 nt, Human
aggaaaaacaauacagcugagucua

SEQ ID NO: 1257869 - RNA, 28 nt, Human
aggcacuccuguuucugucccguccccg

SEQ ID NO: 1257870 - RNA, 21 nt, Human
aggcagccugggccccugcag

SEQ ID NO: 1257871 - RNA, 19 nt, Human
aggggacagagaacugggg

SEQ ID NO: 1257872 - RNA, 19 nt, Human
caagaaagcaccccaaaac

SEQ ID NO: 1257873 - RNA, 19 nt, Human
caagaucccugagacccag

SEQ ID NO: 1257874 - RNA, 23 nt, Human
caauagaucauguuuauucccaa

SEQ ID NO: 1257875 - RNA, 22 nt, Human
caccccaaaacgggcugccagg

SEQ ID NO: 1257876 - RNA, 19 nt, Human
cagagcccaaagcccaguc

SEQ ID NO: 1257877 - RNA, 20 nt, Human
cagcaggaggcacuccuguu

SEQ ID NO: 1257878 - RNA, 24 nt, Human
caggagccaaggccccauugaagc

SEQ ID NO: 1257879 - RNA, 19 nt, Human
caggaggcacuccuguuuc

SEQ ID NO: 1257880 - RNA, 22 nt, Human
cauguuuauucccaagccccaa

SEQ ID NO: 1257881 - RNA, 18 nt, Human
ccaggcugugggcuggaa

SEQ ID NO: 1257882 - RNA, 20 nt, Human
cccaaagcccagucugcagu

SEQ ID NO: 1257883 - RNA, 26 nt, Human
ccccaaccagacauguucuaccccuc

SEQ ID NO: 1257884 - RNA, 23 nt, Human
ccccagagcccaaagcccagucu

SEQ ID NO: 1257885 - RNA, 21 nt, Human
cccucaagaucccugagaccc

SEQ ID NO: 1257886 - RNA, 23 nt, Human
cccucaagaucccugagacccag

SEQ ID NO: 1257887 - RNA, 22 nt, Human
cccugacucugacugagaggca

SEQ ID NO: 1257888 - RNA, 22 nt, Human
ccgagaaacagcaagcuagcga

SEQ ID NO: 1257889 - RNA, 22 nt, Human
ccucaagaucccugagacccag

SEQ ID NO: 1257890 - RNA, 19 nt, Human
ccugagacccaggcugugg

SEQ ID NO: 1257891 - RNA, 22 nt, Human
ccugagacccaggcugugggcu

SEQ ID NO: 1257892 - RNA, 20 nt, Human
ccugggccccugcaggggcu

SEQ ID NO: 1257893 - RNA, 22 nt, Human
cucaagaucccugagacccagg

SEQ ID NO: 1257894 - RNA, 20 nt, Human
cucaagaucccugagacccu

SEQ ID NO: 1257895 - RNA, 19 nt, Human
cugacugagaggcagacag

SEQ ID NO: 1257896 - RNA, 21 nt, Human
gaaagcaccccaaaacggggg

SEQ ID NO: 1257897 - RNA, 22 nt, Human
gaacagacgcaaaaccaggcac

SEQ ID NO: 1257898 - RNA, 24 nt, Human
gagaaguuugccccagagcccaaa

SEQ ID NO: 1257899 - RNA, 21 nt, Human
gccugggccccugcaggggcu

SEQ ID NO: 1257900 - RNA, 25 nt, Human
ggcccagaacuucugugcaguugga

SEQ ID NO: 1257901 - RNA, 18 nt, Human
ggccccugcaggggcugg

SEQ ID NO: 1257902 - RNA, 22 nt, Human
ggcugccagguuaaggauccau

SEQ ID NO: 1257903 - RNA, 18 nt, Human
gggacagagaacuggggg

SEQ ID NO: 1257904 - RNA, 26 nt, Human
gggcugggcccugaauccugaggccg

SEQ ID NO: 1257905 - RNA, 22 nt, Human
ggggaacagacgcaaaaccagg

SEQ ID NO: 1257906 - RNA, 19 nt, Human
ucaagagcgccccuguugg

SEQ ID NO: 1257907 - RNA, 19 nt, Human
ucagggaucugccugcacu

SEQ ID NO: 1257908 - RNA, 18 nt, Human
uccaggaugacgauggcc

SEQ ID NO: 1257909 - RNA, 18 nt, Human
ucccugagacccaggcug

SEQ ID NO: 1257910 - RNA, 18 nt, Human
ugaccuucagggaucugc

SEQ ID NO: 1257911 - RNA, 20 nt, Human
ugagaggcagacaggagcca

SEQ ID NO: 1257912 - RNA, 19 nt, Human
ugaguccuuugucagcccu

SEQ ID NO: 1257913 - RNA, 18 nt, Human
ugccccagagcccaaagc

SEQ ID NO: 1257914 - RNA, 19 nt, Human
uggguggagaugagaggca

SEQ ID NO: 1257915 - RNA, 22 nt, Human
ugucaggcccagaacuucugug

SEQ ID NO: 1257916 - RNA, 18 nt, Human
ugugcaguuggagugggc

SEQ ID NO: 1257917 - RNA, 25 nt, Human
ugugggcuggaaaaugaaggcacag

SEQ ID NO: 1257918 - RNA, 21 nt, Human
uguuucugucccuucugucuc

SEQ ID NO: 1257919 - RNA, 23 nt, Human
uucagagcaagguuucugcugag

SEQ ID NO: 1257920 - RNA, 22 nt, Human
agacauaccauacuuucuuuca

SEQ ID NO: 1257921 - RNA, 21 nt, Human
agacugcccagcuccagguac

SEQ ID NO: 1257922 - RNA, 18 nt, Human
caacauaaacacugugcu

SEQ ID NO: 1257923 - RNA, 22 nt, Human
cagagaugggguugcgccaugg

SEQ ID NO: 1257924 - RNA, 22 nt, Human
cagagaugggguugcgccaugu

SEQ ID NO: 1257925 - RNA, 22 nt, Human
ccacgccagacauaguuuucua

SEQ ID NO: 1257926 - RNA, 19 nt, Human
ccauguugcuaggcugcuc

SEQ ID NO: 1257927 - RNA, 25 nt, Human
cccccaugaugaacaguaacuccau

SEQ ID NO: 1257928 - RNA, 24 nt, Human
ccucccgccucggccacgccagac

SEQ ID NO: 1257929 - RNA, 24 nt, Human
ccuuuggguucaaguagcuggggg

SEQ ID NO: 1257930 - RNA, 26 nt, Human
ccuuuggguucaaguagcuggggguc

SEQ ID NO: 1257931 - RNA, 24 nt, Human
cuacagagaugggguugcgccaug

SEQ ID NO: 1257932 - RNA, 20 nt, Human
ggcaacacacaggaccuggc

SEQ ID NO: 1257933 - RNA, 21 nt, Human
gggguugcgccauguugcuag

SEQ ID NO: 1257934 - RNA, 21 nt, Human
gggucugagguaggacuacag

SEQ ID NO: 1257935 - RNA, 21 nt, Human
ggguugcgccauguugcuagg

SEQ ID NO: 1257936 - RNA, 21 nt, Human
uaagauuacaggacuuuucca

SEQ ID NO: 1257937 - RNA, 24 nt, Human
ucacuggagccuugaaccuuuggg

SEQ ID NO: 1257938 - RNA, 25 nt, Human
ucacuggagccuugaaccuuugggu

SEQ ID NO: 1257939 - RNA, 24 nt, Human
ugaacaguaacuccauuguguaaa

SEQ ID NO: 1257940 - RNA, 22 nt, Human
ugaugagaagacugcccagcuc

SEQ ID NO: 1257941 - RNA, 24 nt, Human
ugcuaggcugcucuuggccugaag

SEQ ID NO: 1257942 - RNA, 23 nt, Human
uggccugaaggguccucccgccu

SEQ ID NO: 1257943 - RNA, 21 nt, Human
ugggguugcgccauguugcua

SEQ ID NO: 1257944 - RNA, 23 nt, Human
ugggguugcgccauguugcuagg

SEQ ID NO: 1257945 - RNA, 18 nt, Human
ugugcugggucugaauuu

SEQ ID NO: 1257946 - RNA, 25 nt, Human
uucaaguagcugggggucugaggua

SEQ ID NO: 1257947 - RNA, 18 nt, Human
uugaccaacauaaacacu

SEQ ID NO: 1257948 - RNA, 19 nt, Human
uugcuaggcugcucuuggc

SEQ ID NO: 1257949 - RNA, 19 nt, Human
augggggcugcugcccaca

SEQ ID NO: 1257950 - RNA, 24 nt, Human
cuagcaacaauuaggcaagcucuc

SEQ ID NO: 1257951 - RNA, 23 nt, Human
cugcccacauugaccucaggggc

SEQ ID NO: 1257952 - RNA, 19 nt, Human
cugguacuguugcagugag

SEQ ID NO: 1257953 - RNA, 24 nt, Human
gcugauggggggaagcaggaagga

SEQ ID NO: 1257954 - RNA, 18 nt, Human
ggcaagcucucaucagga

SEQ ID NO: 1257955 - RNA, 25 nt, Human
ggggcugcugcccacauugaccuca

SEQ ID NO: 1257956 - RNA, 21 nt, Human
uugaccucaggggcugauggg

SEQ ID NO: 1257957 - RNA, 19 nt, Human
aaaacaaacaauagcaaaa

SEQ ID NO: 1257958 - RNA, 21 nt, Human
aaaagagcagggacaauaaaa

SEQ ID NO: 1257959 - RNA, 22 nt, Human
aaacagcccugagaucacccau

SEQ ID NO: 1257960 - RNA, 21 nt, Human
aaacauaaaaugaauccaaag

SEQ ID NO: 1257961 - RNA, 21 nt, Human
aagaaaaagaacaccccaaaa

SEQ ID NO: 1257962 - RNA, 26 nt, Human
aagaaaaagaacaccccaaaauuuca

SEQ ID NO: 1257963 - RNA, 22 nt, Human
aagcacauuuuucaacauguag

SEQ ID NO: 1257964 - RNA, 25 nt, Human
aagugcaccauaagaaaaagaacac

SEQ ID NO: 1257965 - RNA, 19 nt, Human
acaauaaaaacagcccuga

SEQ ID NO: 1257966 - RNA, 24 nt, Human
agaaaaaccagagauucauaaaua

SEQ ID NO: 1257967 - RNA, 19 nt, Human
agagaaaaaccagagauuc

SEQ ID NO: 1257968 - RNA, 18 nt, Human
agggcaggaaaaacuaug

SEQ ID NO: 1257969 - RNA, 24 nt, Human
auaagaaaaagaacaccccaaaau

SEQ ID NO: 1257970 - RNA, 18 nt, Human
auagcuuuguuaauaacu

SEQ ID NO: 1257971 - RNA, 20 nt, Human
aucaucauaacaaaaagcac

SEQ ID NO: 1257972 - RNA, 21 nt, Human
caaaaugaugugaagaaaagg

SEQ ID NO: 1257973 - RNA, 21 nt, Human
caaaauuucaaagugcucuuc

SEQ ID NO: 1257974 - RNA, 27 nt, Human
caaagaaccaauaauaagaacuuucuu

SEQ ID NO: 1257975 - RNA, 21 nt, Human
caauagcaaaaugaugugaag

SEQ ID NO: 1257976 - RNA, 24 nt, Human
caccauaagaaaaagaacacccca

SEQ ID NO: 1257977 - RNA, 22 nt, Human
cauuuuuauuucacaucagaaa

SEQ ID NO: 1257978 - RNA, 20 nt, Human
cccaaggaguuccuucuugu

SEQ ID NO: 1257979 - RNA, 18 nt, Human
ccuuugaaggagggcagg

SEQ ID NO: 1257980 - RNA, 21 nt, Human
cgccacuccuucaaagggaag

SEQ ID NO: 1257981 - RNA, 18 nt, Human
cuaauaguaauuacaaga

SEQ ID NO: 1257982 - RNA, 20 nt, Human
cuacaugagauaaaaauccu

SEQ ID NO: 1257983 - RNA, 18 nt, Human
cuccaacgcgaacugucc

SEQ ID NO: 1257984 - RNA, 20 nt, Human
cuuguaaauaaaguugcuau

SEQ ID NO: 1257985 - RNA, 22 nt, Human
gacaauaaaaacagcccugaga

SEQ ID NO: 1257986 - RNA, 19 nt, Human
gaccacaauaaaaugagcc

SEQ ID NO: 1257987 - RNA, 21 nt, Human
gagaaaaaccagagauucaua

SEQ ID NO: 1257988 - RNA, 19 nt, Human
gagggcaggaaaaacuaug

SEQ ID NO: 1257989 - RNA, 24 nt, Human
gcacauggauuuuuauauuaauag

SEQ ID NO: 1257990 - RNA, 18 nt, Human
ggacaauaaaaacagccc

SEQ ID NO: 1257991 - RNA, 22 nt, Human
ggcagaaaaaaaaguucacuag

SEQ ID NO: 1257992 - RNA, 21 nt, Human
gucaaauauuuacugcuaaua

SEQ ID NO: 1257993 - RNA, 20 nt, Human
uaaaaugaauccaaagaacc

SEQ ID NO: 1257994 - RNA, 21 nt, Human
uaaaaugaauccaaagaacca

SEQ ID NO: 1257995 - RNA, 22 nt, Human
uaacucagaacaaugcauuuua

SEQ ID NO: 1257996 - RNA, 21 nt, Human
uaagaaaaagaacaccccaaa

SEQ ID NO: 1257997 - RNA, 19 nt, Human
uaagucaaauauuuacugc

SEQ ID NO: 1257998 - RNA, 22 nt, Human
uacaauuuaaaauauuuacaga

SEQ ID NO: 1257999 - RNA, 22 nt, Human
uaguauuucugcaaccaaauau

SEQ ID NO: 1258000 - RNA, 24 nt, Human
ucagauaaccaagaaaaaaguaau

SEQ ID NO: 1258001 - RNA, 24 nt, Human
uccaugaucaaaacaaacaauagc

SEQ ID NO: 1258002 - RNA, 25 nt, Human
ucuuccuauauagcauguacuucag

SEQ ID NO: 1258003 - RNA, 22 nt, Human
ucuuccucaguaacuucuauug

SEQ ID NO: 1258004 - RNA, 18 nt, Human
ugaaguacaugaaagaag

SEQ ID NO: 1258005 - RNA, 21 nt, Human
ugauaauggaaauaaauguau

SEQ ID NO: 1258006 - RNA, 22 nt, Human
ugaucaaaacaaacaauagcaa

SEQ ID NO: 1258007 - RNA, 21 nt, Human
ugaugugaagaaaagggccca

SEQ ID NO: 1258008 - RNA, 26 nt, Human
ugcaaccaaauauccuacaugagaua

SEQ ID NO: 1258009 - RNA, 19 nt, Human
uggaaaaaaaagucugauu

SEQ ID NO: 1258010 - RNA, 20 nt, Human
uggauccuaaauaaauuccu

SEQ ID NO: 1258011 - RNA, 20 nt, Human
uguaaauaaaguugcuauac

SEQ ID NO: 1258012 - RNA, 19 nt, Human
ugugaagaaaagggcccau

SEQ ID NO: 1258013 - RNA, 20 nt, Human
uuaaaaacaaucaucauaac

SEQ ID NO: 1258014 - RNA, 21 nt, Human
uucaaagggaagauuugaaaa

SEQ ID NO: 1258015 - RNA, 21 nt, Human
uucacuagcaauaguugauaa

SEQ ID NO: 1258016 - RNA, 19 nt, Human
uucuauuguucuuucccug

SEQ ID NO: 1258017 - RNA, 20 nt, Human
uuuacagaauucucaaaaaa

SEQ ID NO: 1258018 - RNA, 21 nt, Human
uuugaaguacaugaaagaagu

SEQ ID NO: 1258019 - RNA, 25 nt, Human
uuuuuauauuaauaguuaguagcua

SEQ ID NO: 1258020 - RNA, 18 nt, Human
aagaggacaaaucgaggg

SEQ ID NO: 1258021 - RNA, 20 nt, Human
acccuuggggcugcucuuga

SEQ ID NO: 1258022 - RNA, 19 nt, Human
acgacacagacaggcuucc

SEQ ID NO: 1258023 - RNA, 25 nt, Human
acucucacgaacuggugguggaagu

SEQ ID NO: 1258024 - RNA, 21 nt, Human
agaacaggaacucucacgaac

SEQ ID NO: 1258025 - RNA, 22 nt, Human
agaagaaggaguggugacugag

SEQ ID NO: 1258026 - RNA, 22 nt, Human
agaagaaggaguggugacugag

SEQ ID NO: 1258027 - RNA, 21 nt, Human
aggaacucucacgaacuggug

SEQ ID NO: 1258028 - RNA, 19 nt, Human
aggaacucucacuuaauac

SEQ ID NO: 1258029 - RNA, 23 nt, Human
aggcaaguuugcugaucuuuucu

SEQ ID NO: 1258030 - RNA, 24 nt, Human
agggaaucagguacugcugugaag

SEQ ID NO: 1258031 - RNA, 19 nt, Human
aggggaaggcuguggguuc

SEQ ID NO: 1258032 - RNA, 19 nt, Human
cagccggaaaagacaguug

SEQ ID NO: 1258033 - RNA, 23 nt, Human
caggaaggagcaagaggacaaau

SEQ ID NO: 1258034 - RNA, 23 nt, Human
cagguacugcugugaagguggug

SEQ ID NO: 1258035 - RNA, 19 nt, Human
cccaaauccuccugccaag

SEQ ID NO: 1258036 - RNA, 19 nt, Human
ccccaaauccuccugccaa

SEQ ID NO: 1258037 - RNA, 23 nt, Human
ccccugaacccuuggggcugcuc

SEQ ID NO: 1258038 - RNA, 21 nt, Human
cccuuggggcugcucuugagc

SEQ ID NO: 1258039 - RNA, 19 nt, Human
ccgcucgaaauccacaauc

SEQ ID NO: 1258040 - RNA, 24 nt, Human
ccggaaaagacaguugacucaggc

SEQ ID NO: 1258041 - RNA, 24 nt, Human
ccugcuguccuagcaggaaggagc

SEQ ID NO: 1258042 - RNA, 24 nt, Human
cggaaaagacaguugacucaggca

SEQ ID NO: 1258043 - RNA, 20 nt, Human
cuccuuggcuugcgcccuga

SEQ ID NO: 1258044 - RNA, 18 nt, Human
cuuggcuugcgcccugac

SEQ ID NO: 1258045 - RNA, 22 nt, Human
gagacagaaacaccccugaacc

SEQ ID NO: 1258046 - RNA, 20 nt, Human
gaggggaaggcuguggguuc

SEQ ID NO: 1258047 - RNA, 20 nt, Human
gcuacagcauguguacgaga

SEQ ID NO: 1258048 - RNA, 18 nt, Human
ggaaaagacaguugacuc

SEQ ID NO: 1258049 - RNA, 21 nt, Human
ggaaaagacaguugacucagg

SEQ ID NO: 1258050 - RNA, 19 nt, Human
ggcuuugggguccucaaug

SEQ ID NO: 1258051 - RNA, 19 nt, Human
gggaaucagguacugcugu

SEQ ID NO: 1258052 - RNA, 25 nt, Human
gggagaagaaggaguggugacugag

SEQ ID NO: 1258053 - RNA, 18 nt, Human
gggcuccuuggcuugcgc

SEQ ID NO: 1258054 - RNA, 19 nt, Human
ggggaaggcuguggguucu

SEQ ID NO: 1258055 - RNA, 18 nt, Human
guacugcugugaaggugg

SEQ ID NO: 1258056 - RNA, 24 nt, Human
gugccagggguuuggggcuuuggg

SEQ ID NO: 1258057 - RNA, 19 nt, Human
uacugcugugaagguggug

SEQ ID NO: 1258058 - RNA, 18 nt, Human
uagcaggaaggagcaaga

SEQ ID NO: 1258059 - RNA, 22 nt, Human
uagggaaucagguacugcugug

SEQ ID NO: 1258060 - RNA, 19 nt, Human
ucccggugagcuuggaugu

SEQ ID NO: 1258061 - RNA, 27 nt, Human
ucccugacgacacagacaggcuucccg

SEQ ID NO: 1258062 - RNA, 19 nt, Human
ucccuggggcuccuuggcu

SEQ ID NO: 1258063 - RNA, 20 nt, Human
ucccuggggcuccuuggcuu

SEQ ID NO: 1258064 - RNA, 23 nt, Human
uccucaaugcccggcggauccgc

SEQ ID NO: 1258065 - RNA, 23 nt, Human
ucuguagccauuguaugcuuuuu

SEQ ID NO: 1258066 - RNA, 24 nt, Human
ucuguggcccacugucccuggggc

SEQ ID NO: 1258067 - RNA, 24 nt, Human
ugcagaacaggaacucucacuuaa

SEQ ID NO: 1258068 - RNA, 22 nt, Human
ugccagggguuuggggcuuugg

SEQ ID NO: 1258069 - RNA, 25 nt, Human
ugcgcccugacuucuucuccaguuu

SEQ ID NO: 1258070 - RNA, 18 nt, Human
ugcugggggugugggugg

SEQ ID NO: 1258071 - RNA, 18 nt, Human
ugcugggggugugggugg

SEQ ID NO: 1258072 - RNA, 25 nt, Human
uggaagccccaaauccuccugccaa

SEQ ID NO: 1258073 - RNA, 18 nt, Human
uggauaaucagccaauug

SEQ ID NO: 1258074 - RNA, 22 nt, Human
uggggcuuugggguccucaaug

SEQ ID NO: 1258075 - RNA, 21 nt, Human
ugggucacgugcugggggugu

SEQ ID NO: 1258076 - RNA, 23 nt, Human
uggugccgggagaagaaggagug

SEQ ID NO: 1258077 - RNA, 21 nt, Human
uucagcucagccuuuggacuc

SEQ ID NO: 1258078 - RNA, 21 nt, Human
uuucuguggcccacugucccu

SEQ ID NO: 1258079 - RNA, 19 nt, Human
uuugggguccucaaugccc

SEQ ID NO: 1258080 - RNA, 18 nt, Human
cccagccuugccuuucuu

SEQ ID NO: 1258081 - RNA, 24 nt, Human
cccagccuugccuuucuugauggc

SEQ ID NO: 1258082 - RNA, 20 nt, Human
ccccuaggcaucgcccuccg

SEQ ID NO: 1258083 - RNA, 19 nt, Human
cggcguccccagccuugcc

SEQ ID NO: 1258084 - RNA, 21 nt, Human
cuaggcaucgcccuccgcacc

SEQ ID NO: 1258085 - RNA, 22 nt, Human
guccccagccuugccuuucuug

SEQ ID NO: 1258086 - RNA, 19 nt, Human
ugauggcuaaagcaacagc

SEQ ID NO: 1258087 - RNA, 21 nt, Human
aaacaauggaguaggagucau

SEQ ID NO: 1258088 - RNA, 22 nt, Human
aagaagcccaaugcaacgcugc

SEQ ID NO: 1258089 - RNA, 25 nt, Human
aagaagcccaaugcaacgcugcagc

SEQ ID NO: 1258090 - RNA, 22 nt, Human
aagcuacaggacaagucuuaac

SEQ ID NO: 1258091 - RNA, 21 nt, Human
accacacuaauuauuagcaaa

SEQ ID NO: 1258092 - RNA, 21 nt, Human
acggggagugggguuggaagg

SEQ ID NO: 1258093 - RNA, 21 nt, Human
acuacacugaagacagguugc

SEQ ID NO: 1258094 - RNA, 18 nt, Human
acugaagacagguugcuc

SEQ ID NO: 1258095 - RNA, 22 nt, Human
acugagucuguaggcagaguga

SEQ ID NO: 1258096 - RNA, 22 nt, Human
acuucuggauucugggaguggg

SEQ ID NO: 1258097 - RNA, 19 nt, Human
agaguugggaggccaagaa

SEQ ID NO: 1258098 - RNA, 19 nt, Human
agcccaaugcaacgcugca

SEQ ID NO: 1258099 - RNA, 22 nt, Human
agcuuacuucuggauucuggga

SEQ ID NO: 1258100 - RNA, 23 nt, Human
agcuuacuucuggauucugggag

SEQ ID NO: 1258101 - RNA, 18 nt, Human
agggcuuguggggaaagc

SEQ ID NO: 1258102 - RNA, 21 nt, Human
agugaugaggaaaagccagga

SEQ ID NO: 1258103 - RNA, 19 nt, Human
cagguccuggggaccugca

SEQ ID NO: 1258104 - RNA, 21 nt, Human
cauucuugauacaggaagaag

SEQ ID NO: 1258105 - RNA, 20 nt, Human
ccaagaagcccaaugcaacg

SEQ ID NO: 1258106 - RNA, 19 nt, Human
ccauuggucaaagcuguaa

SEQ ID NO: 1258107 - RNA, 24 nt, Human
cucacucugccuuuguacuacacu

SEQ ID NO: 1258108 - RNA, 19 nt, Human
cugagggaagcaaggacuc

SEQ ID NO: 1258109 - RNA, 19 nt, Human
cuggaagagucucuuaacc

SEQ ID NO: 1258110 - RNA, 26 nt, Human
cuggggaccugcaggcuguguauccu

SEQ ID NO: 1258111 - RNA, 25 nt, Human
gacaagucuuaacaagagguuugug

SEQ ID NO: 1258112 - RNA, 22 nt, Human
gacugcuuaggaggugaaggau

SEQ ID NO: 1258113 - RNA, 23 nt, Human
gaggaaaagccaggacugcuuag

SEQ ID NO: 1258114 - RNA, 23 nt, Human
gaggugccauucaagaccuggcg

SEQ ID NO: 1258115 - RNA, 19 nt, Human
gauucugggagugggaaga

SEQ ID NO: 1258116 - RNA, 23 nt, Human
gcugcagcugagcuacuuuuauu

SEQ ID NO: 1258117 - RNA, 22 nt, Human
ggaaaagccaggacugcuuagg

SEQ ID NO: 1258118 - RNA, 21 nt, Human
ggagugaugaggaaaagccag

SEQ ID NO: 1258119 - RNA, 20 nt, Human
ggagugggguuggaaggagc

SEQ ID NO: 1258120 - RNA, 24 nt, Human
gggaagaguugggaggccaagaag

SEQ ID NO: 1258121 - RNA, 21 nt, Human
gggagugggguuggaaggagc

SEQ ID NO: 1258122 - RNA, 19 nt, Human
gugaaggaugggaggggag

SEQ ID NO: 1258123 - RNA, 21 nt, Human
uaaugcagcugggacucauua

SEQ ID NO: 1258124 - RNA, 19 nt, Human
uacauccuucugacaauug

SEQ ID NO: 1258125 - RNA, 20 nt, Human
uagaauuagcagcaauuaac

SEQ ID NO: 1258126 - RNA, 22 nt, Human
uaggaggugaaggaugggaggg

SEQ ID NO: 1258127 - RNA, 19 nt, Human
uauccuagggagaggugcc

SEQ ID NO: 1258128 - RNA, 22 nt, Human
ucuaaagcacauucuugauaca

SEQ ID NO: 1258129 - RNA, 18 nt, Human
ugaacggggagugggguu

SEQ ID NO: 1258130 - RNA, 23 nt, Human
ugaggaaaagccaggacugcuua

SEQ ID NO: 1258131 - RNA, 19 nt, Human
ugaguaggaagggggaggg

SEQ ID NO: 1258132 - RNA, 22 nt, Human
ugccacagugaggcggguguca

SEQ ID NO: 1258133 - RNA, 19 nt, Human
ugggaggccaagaagccca

SEQ ID NO: 1258134 - RNA, 19 nt, Human
ugggaggggagggggucau

SEQ ID NO: 1258135 - RNA, 19 nt, Human
ugggcagacagccuucacc

SEQ ID NO: 1258136 - RNA, 22 nt, Human
ugggcagugauuguaacaugau

SEQ ID NO: 1258137 - RNA, 22 nt, Human
uggggaccugcaggcuguguau

SEQ ID NO: 1258138 - RNA, 20 nt, Human
uguaacaaaucacuccagcc

SEQ ID NO: 1258139 - RNA, 20 nt, Human
uuaggaggugaaggauggga

SEQ ID NO: 1258140 - RNA, 18 nt, Human
uuucugagggaagcaagg

SEQ ID NO: 1258141 - RNA, 24 nt, Human
aaucaccaaagcccgguugccuga

SEQ ID NO: 1258142 - RNA, 24 nt, Human
accaaagcccgguugccugagggc

SEQ ID NO: 1258143 - RNA, 21 nt, Human
caaagcccgguugccugaggg

SEQ ID NO: 1258144 - RNA, 18 nt, Human
cacugcagcuucaacugu

SEQ ID NO: 1258145 - RNA, 18 nt, Human
ccugagggcuccucaucu

SEQ ID NO: 1258146 - RNA, 19 nt, Human
cuccucaucugaacucugg

SEQ ID NO: 1258147 - RNA, 18 nt, Human
aaaucuucaaaaccacag

SEQ ID NO: 1258148 - RNA, 20 nt, Human
aacaaaagcuacuucuccca

SEQ ID NO: 1258149 - RNA, 21 nt, Human
aacugcccugcuugcugcugg

SEQ ID NO: 1258150 - RNA, 23 nt, Human
aagggccaagguaucuggagaua

SEQ ID NO: 1258151 - RNA, 22 nt, Human
acaacaaaagcuacuucuccca

SEQ ID NO: 1258152 - RNA, 23 nt, Human
acaggaacgcaagcuugaaucug

SEQ ID NO: 1258153 - RNA, 19 nt, Human
accccucuuucuccucccc

SEQ ID NO: 1258154 - RNA, 19 nt, Human
accccucuuucuccucccc

SEQ ID NO: 1258155 - RNA, 21 nt, Human
accccucuuucuccuccccca

SEQ ID NO: 1258156 - RNA, 23 nt, Human
accccucuuucuccucccccauc

SEQ ID NO: 1258157 - RNA, 20 nt, Human
acuucucccacccucuuccc

SEQ ID NO: 1258158 - RNA, 19 nt, Human
agagccccccauuccaccu

SEQ ID NO: 1258159 - RNA, 23 nt, Human
agagucuucacuagguccuucag

SEQ ID NO: 1258160 - RNA, 18 nt, Human
agcacagagacaccagga

SEQ ID NO: 1258161 - RNA, 21 nt, Human
agccagguucccgcauuacca

SEQ ID NO: 1258162 - RNA, 18 nt, Human
agcgcaggagcacagaga

SEQ ID NO: 1258163 - RNA, 22 nt, Human
aggcagaaaagggcaguccuga

SEQ ID NO: 1258164 - RNA, 21 nt, Human
aggcugaucacauuacccagc

SEQ ID NO: 1258165 - RNA, 26 nt, Human
caaggucagaugcugggagcaaugcc

SEQ ID NO: 1258166 - RNA, 20 nt, Human
cacauuacccagcugagguc

SEQ ID NO: 1258167 - RNA, 18 nt, Human
caccaccuccucaucaag

SEQ ID NO: 1258168 - RNA, 19 nt, Human
caccuccucuuccuucuuc

SEQ ID NO: 1258169 - RNA, 25 nt, Human
caccuccucuuccuucuucucuucc

SEQ ID NO: 1258170 - RNA, 23 nt, Human
cagagucccugcugcacagggcu

SEQ ID NO: 1258171 - RNA, 23 nt, Human
caguccugaaggaccccacacug

SEQ ID NO: 1258172 - RNA, 20 nt, Human
caucaagccuccaccuccuc

SEQ ID NO: 1258173 - RNA, 23 nt, Human
caucuuaccaccccacuuccugu

SEQ ID NO: 1258174 - RNA, 18 nt, Human
cauuccagagcuuggcca

SEQ ID NO: 1258175 - RNA, 21 nt, Human
ccaaaucacccugugcuguuc

SEQ ID NO: 1258176 - RNA, 19 nt, Human
ccaccuccucuuccuucuu

SEQ ID NO: 1258177 - RNA, 20 nt, Human
ccaggaggagaggaagcgca

SEQ ID NO: 1258178 - RNA, 19 nt, Human
cccaaaucagggcucagaa

SEQ ID NO: 1258179 - RNA, 21 nt, Human
ccccagcugcauuccugggcu

SEQ ID NO: 1258180 - RNA, 22 nt, Human
ccccccauuccaccuuguuggc

SEQ ID NO: 1258181 - RNA, 19 nt, Human
cccgcuggacauucucccc

SEQ ID NO: 1258182 - RNA, 20 nt, Human
cccugcugcacagggcuccu

SEQ ID NO: 1258183 - RNA, 22 nt, Human
ccuaaaacuccaagaacaaggg

SEQ ID NO: 1258184 - RNA, 18 nt, Human
ccuccaccuccucuuccu

SEQ ID NO: 1258185 - RNA, 24 nt, Human
ccucccccaucucaccaagccaga

SEQ ID NO: 1258186 - RNA, 19 nt, Human
ccuccucuuccuucuucuc

SEQ ID NO: 1258187 - RNA, 19 nt, Human
ccuggcccuuacuucuccc

SEQ ID NO: 1258188 - RNA, 19 nt, Human
cuagaggaggcagaggggc

SEQ ID NO: 1258189 - RNA, 21 nt, Human
cucccccaucucaccaagcca

SEQ ID NO: 1258190 - RNA, 21 nt, Human
cucccgcuggacauucucccc

SEQ ID NO: 1258191 - RNA, 19 nt, Human
cucuuuguucuucccaaau

SEQ ID NO: 1258192 - RNA, 21 nt, Human
cuugcugcuggaccucucaga

SEQ ID NO: 1258193 - RNA, 18 nt, Human
cuuggcucugccaccucc

SEQ ID NO: 1258194 - RNA, 24 nt, Human
gacaggaacgcaagcuugaaucug

SEQ ID NO: 1258195 - RNA, 22 nt, Human
gagcuuggccaauuucaggccc

SEQ ID NO: 1258196 - RNA, 21 nt, Human
gaggaagcgcaggagcacaga

SEQ ID NO: 1258197 - RNA, 20 nt, Human
gaggcagaggggccuggccu

SEQ ID NO: 1258198 - RNA, 22 nt, Human
gaggcagaggggccuggccucu

SEQ ID NO: 1258199 - RNA, 21 nt, Human
gcagaaaagggcaguccugaa

SEQ ID NO: 1258200 - RNA, 20 nt, Human
gcaggagcacagagacacca

SEQ ID NO: 1258201 - RNA, 22 nt, Human
gcaguccugaaggaccccacac

SEQ ID NO: 1258202 - RNA, 23 nt, Human
ggaggcagaggggccuggccucu

SEQ ID NO: 1258203 - RNA, 18 nt, Human
ggcagaggggccuggccu

SEQ ID NO: 1258204 - RNA, 21 nt, Human
ggcuagaggaggcagaggggc

SEQ ID NO: 1258205 - RNA, 18 nt, Human
ggcucagaaccaugacag

SEQ ID NO: 1258206 - RNA, 25 nt, Human
gugcuggguccuucauaacaggccg

SEQ ID NO: 1258207 - RNA, 18 nt, Human
guucuucccaaaucaggg

SEQ ID NO: 1258208 - RNA, 24 nt, Human
uaaaacuccaagaacaagggccaa

SEQ ID NO: 1258209 - RNA, 18 nt, Human
uaccauagauaggaugcu

SEQ ID NO: 1258210 - RNA, 23 nt, Human
uagcagcuuuggaaugcagaaag

SEQ ID NO: 1258211 - RNA, 18 nt, Human
uaggaugcuuuucugacc

SEQ ID NO: 1258212 - RNA, 22 nt, Human
uaucagaacaaagccagguucc

SEQ ID NO: 1258213 - RNA, 24 nt, Human
ucaaaaccacagcucugcuucugc

SEQ ID NO: 1258214 - RNA, 27 nt, Human
ucacaggccaccaccuccucaucaagc

SEQ ID NO: 1258215 - RNA, 18 nt, Human
ucccacccucuucccuuc

SEQ ID NO: 1258216 - RNA, 21 nt, Human
ucccgcuggacauucucccca

SEQ ID NO: 1258217 - RNA, 24 nt, Human
uccucaucaagccuccaccuccuc

SEQ ID NO: 1258218 - RNA, 22 nt, Human
ucucaccaagccagagcccccc

SEQ ID NO: 1258219 - RNA, 22 nt, Human
ucuccucccccaucucaccaag

SEQ ID NO: 1258220 - RNA, 22 nt, Human
ucuuccugcaugcaaugaggau

SEQ ID NO: 1258221 - RNA, 19 nt, Human
ugaaaugaguggccucaac

SEQ ID NO: 1258222 - RNA, 19 nt, Human
ugaaucggccagugggaaa

SEQ ID NO: 1258223 - RNA, 19 nt, Human
ugacaucuuaccaccccac

SEQ ID NO: 1258224 - RNA, 19 nt, Human
ugaccccucuuucuccucc

SEQ ID NO: 1258225 - RNA, 22 nt, Human
ugaccugagcccccauuuaaac

SEQ ID NO: 1258226 - RNA, 20 nt, Human
ugagaaggcagaaaagggca

SEQ ID NO: 1258227 - RNA, 24 nt, Human
ugccaccuccuugcugugugaccu

SEQ ID NO: 1258228 - RNA, 24 nt, Human
ugcccagacccucauuccagagcu

SEQ ID NO: 1258229 - RNA, 21 nt, Human
ugcuggaccucucagaaccca

SEQ ID NO: 1258230 - RNA, 20 nt, Human
ugcuugcugcuggaccucuc

SEQ ID NO: 1258231 - RNA, 20 nt, Human
uggcccccagcugcauuccu

SEQ ID NO: 1258232 - RNA, 20 nt, Human
uggccucaaggagagucuuc

SEQ ID NO: 1258233 - RNA, 18 nt, Human
ugggcccaacugcccugc

SEQ ID NO: 1258234 - RNA, 24 nt, Human
uggggugggcccaacugcccugcu

SEQ ID NO: 1258235 - RNA, 20 nt, Human
uggguacacaacaaaagcua

SEQ ID NO: 1258236 - RNA, 22 nt, Human
ugugcuguucugaagaguuuua

SEQ ID NO: 1258237 - RNA, 25 nt, Human
uuccuucuucucuuccugcaugcaa

SEQ ID NO: 1258238 - RNA, 23 nt, Human
uucuccccaucucacucuugcca

SEQ ID NO: 1258239 - RNA, 19 nt, Human
uucuuggcucugccaccuc

SEQ ID NO: 1258240 - RNA, 19 nt, Human
aaacaucaucaucaacuuc

SEQ ID NO: 1258241 - RNA, 19 nt, Human
aaaguaugacacugcucuu

SEQ ID NO: 1258242 - RNA, 22 nt, Human
agagaacagcauauuccuuuca

SEQ ID NO: 1258243 - RNA, 18 nt, Human
agaggcugauagagaaca

SEQ ID NO: 1258244 - RNA, 20 nt, Human
auagaggcugauagagaaca

SEQ ID NO: 1258245 - RNA, 20 nt, Human
auuucuuuggggucuucuuu

SEQ ID NO: 1258246 - RNA, 21 nt, Human
caacauucuuagaaacaguua

SEQ ID NO: 1258247 - RNA, 23 nt, Human
cacauuguucuucuguggguuca

SEQ ID NO: 1258248 - RNA, 21 nt, Human
ccaguaaaguaugacacugcu

SEQ ID NO: 1258249 - RNA, 18 nt, Human
cucaaaucgcuuaucaaa

SEQ ID NO: 1258250 - RNA, 23 nt, Human
cuccaguaaaguaugacacugcu

SEQ ID NO: 1258251 - RNA, 20 nt, Human
gcucuugggauuauacgcuc

SEQ ID NO: 1258252 - RNA, 20 nt, Human
guaaacauuaccucauccgc

SEQ ID NO: 1258253 - RNA, 20 nt, Human
guuaccauucacauuguucu

SEQ ID NO: 1258254 - RNA, 26 nt, Human
ucacauuguucuucuguggguucaua

SEQ ID NO: 1258255 - RNA, 20 nt, Human
uccucugaaaucucaucuuc

SEQ ID NO: 1258256 - RNA, 20 nt, Human
uuucucaucuucgaucuugg

SEQ ID NO: 1258257 - RNA, 28 nt, Human
acugcauauuaaaaaaaaaaaaaaaaaa

SEQ ID NO: 1258258 - RNA, 20 nt, Human
aucagagcuggacgugacau

SEQ ID NO: 1258259 - RNA, 25 nt, Human
auuaaaaaaaaaaaaaaaaaaaaau

SEQ ID NO: 1258260 - RNA, 20 nt, Human
ccagacaauucugaugccau

SEQ ID NO: 1258261 - RNA, 18 nt, Human
ccccccuuuaauugacca

SEQ ID NO: 1258262 - RNA, 18 nt, Human
ccuaaaugugaugugcuc

SEQ ID NO: 1258263 - RNA, 19 nt, Human
cugaugccauccaguuuug

SEQ ID NO: 1258264 - RNA, 22 nt, Human
cugcccaagacaaaacuuccag

SEQ ID NO: 1258265 - RNA, 18 nt, Human
gauccgcggggcucccuc

SEQ ID NO: 1258266 - RNA, 24 nt, Human
uccgcggggcucccucagccaucc

SEQ ID NO: 1258267 - RNA, 23 nt, Human
ugcccaagacaaaacuuccagac

SEQ ID NO: 1258268 - RNA, 23 nt, Human
ugcccaagacaaaacuuccagac

SEQ ID NO: 1258269 - RNA, 20 nt, Human
uuaaaaaaaaaaaaaaaaaa

SEQ ID NO: 1258270 - RNA, 22 nt, Human
uuccccccuuuaauugaccaaa

SEQ ID NO: 1258271 - RNA, 24 nt, Human
aaaggcauuaguaagaaaccaaag

SEQ ID NO: 1258272 - RNA, 27 nt, Human
aaauacacuggacugguauagagacac

SEQ ID NO: 1258273 - RNA, 25 nt, Human
aagaaaccaaagcacuuucccagcg

SEQ ID NO: 1258274 - RNA, 23 nt, Human
aagagagugagaagcaggacaca

SEQ ID NO: 1258275 - RNA, 23 nt, Human
aagagagugagaagcaggacaca

SEQ ID NO: 1258276 - RNA, 20 nt, Human
aagcaggacacagggguaga

SEQ ID NO: 1258277 - RNA, 19 nt, Human
aagccccagccugcuucuc

SEQ ID NO: 1258278 - RNA, 24 nt, Human
aaguagcucugcuaugggaggggg

SEQ ID NO: 1258279 - RNA, 23 nt, Human
aauggaagagagugagaagcagg

SEQ ID NO: 1258280 - RNA, 20 nt, Human
acagaaacccuaacgaccau

SEQ ID NO: 1258281 - RNA, 18 nt, Human
acagggguagagaaaaga

SEQ ID NO: 1258282 - RNA, 26 nt, Human
acagggguagagaaaagagaaaggga

SEQ ID NO: 1258283 - RNA, 22 nt, Human
acucugucacccaccagcuccu

SEQ ID NO: 1258284 - RNA, 24 nt, Human
agaaaauccucuucaugcuauuca

SEQ ID NO: 1258285 - RNA, 18 nt, Human
agaaguggaaauacacug

SEQ ID NO: 1258286 - RNA, 19 nt, Human
agacagaaacccuaacgac

SEQ ID NO: 1258287 - RNA, 23 nt, Human
agacaggcauagaaugggucccc

SEQ ID NO: 1258288 - RNA, 20 nt, Human
agagaaagggagaaagagag

SEQ ID NO: 1258289 - RNA, 21 nt, Human
agagaggcccccucuguccuc

SEQ ID NO: 1258290 - RNA, 21 nt, Human
agagcaaaccucaggcucaga

SEQ ID NO: 1258291 - RNA, 19 nt, Human
agaggagaggcagaagugg

SEQ ID NO: 1258292 - RNA, 24 nt, Human
agcaaaccucaggcucagacagaa

SEQ ID NO: 1258293 - RNA, 18 nt, Human
agcugcugggcugugggc

SEQ ID NO: 1258294 - RNA, 22 nt, Human
aggaaaaaauaaaacgacucug

SEQ ID NO: 1258295 - RNA, 22 nt, Human
aggcagaaguggaaauacacug

SEQ ID NO: 1258296 - RNA, 21 nt, Human
agggagaaagagagaaacuag

SEQ ID NO: 1258297 - RNA, 20 nt, Human
agggcuugggcggggugcag

SEQ ID NO: 1258298 - RNA, 25 nt, Human
auagcagagcaccuacucugucacc

SEQ ID NO: 1258299 - RNA, 21 nt, Human
aucccugcaccugccuaugcc

SEQ ID NO: 1258300 - RNA, 21 nt, Human
augcaugagggcuugggcggg

SEQ ID NO: 1258301 - RNA, 21 nt, Human
augccaaccagcuccugcaug

SEQ ID NO: 1258302 - RNA, 24 nt, Human
auuggugugugucaggaaauguug

SEQ ID NO: 1258303 - RNA, 24 nt, Human
caaaaugccaaccagcuccugcau

SEQ ID NO: 1258304 - RNA, 24 nt, Human
caagccccagccugcuucucccau

SEQ ID NO: 1258305 - RNA, 22 nt, Human
cacacuucauugagcacguagc

SEQ ID NO: 1258306 - RNA, 19 nt, Human
cacuggacugguauagaga

SEQ ID NO: 1258307 - RNA, 26 nt, Human
cauagcagagcaccuacucugucacc

SEQ ID NO: 1258308 - RNA, 23 nt, Human
caugcuauucaaguagcucugcu

SEQ ID NO: 1258309 - RNA, 19 nt, Human
cauuggucuccugaaguag

SEQ ID NO: 1258310 - RNA, 18 nt, Human
ccaccagcuccugacuug

SEQ ID NO: 1258311 - RNA, 20 nt, Human
ccagcuccugacuugaccau

SEQ ID NO: 1258312 - RNA, 25 nt, Human
ccagcuccugacuugaccaucugca

SEQ ID NO: 1258313 - RNA, 20 nt, Human
cccacaaacuuagggucaca

SEQ ID NO: 1258314 - RNA, 18 nt, Human
ccccagccugcuucuccc

SEQ ID NO: 1258315 - RNA, 19 nt, Human
ccccagccugcuucuccca

SEQ ID NO: 1258316 - RNA, 19 nt, Human
ccccucuguccucaaaucc

SEQ ID NO: 1258317 - RNA, 20 nt, Human
ccucaaaucccaagaggugc

SEQ ID NO: 1258318 - RNA, 20 nt, Human
ccugaaguagagacgaaagg

SEQ ID NO: 1258319 - RNA, 28 nt, Human
ccugaucugugcagcugaucgggcggcc

SEQ ID NO: 1258320 - RNA, 23 nt, Human
ccugccuaugccuuucuccucca

SEQ ID NO: 1258321 - RNA, 23 nt, Human
cgggcuccuccauaacuugcuuc

SEQ ID NO: 1258322 - RNA, 25 nt, Human
cucaggcucagacagaaacccuaac

SEQ ID NO: 1258323 - RNA, 20 nt, Human
cuccugaaguagagacgaaa

SEQ ID NO: 1258324 - RNA, 21 nt, Human
cucuuugaagcaggaugaaua

SEQ ID NO: 1258325 - RNA, 19 nt, Human
cugaaguagagacgaaagg

SEQ ID NO: 1258326 - RNA, 22 nt, Human
cugaugaagggaagagagcaaa

SEQ ID NO: 1258327 - RNA, 19 nt, Human
cuggccuuuggagucaagg

SEQ ID NO: 1258328 - RNA, 18 nt, Human
cuuagccuugacugcuga

SEQ ID NO: 1258329 - RNA, 22 nt, Human
cuucauugagcacguagcauau

SEQ ID NO: 1258330 - RNA, 18 nt, Human
cuuggcuucccuucccug

SEQ ID NO: 1258331 - RNA, 19 nt, Human
cuuuccuuucuugcuugga

SEQ ID NO: 1258332 - RNA, 18 nt, Human
gaagaaagacaaagggaa

SEQ ID NO: 1258333 - RNA, 26 nt, Human
gaagaaaggcauuaguaagaaaccaa

SEQ ID NO: 1258334 - RNA, 20 nt, Human
gaggcugggaauggaagaga

SEQ ID NO: 1258335 - RNA, 23 nt, Human
gcaaaccucaggcucagacagaa

SEQ ID NO: 1258336 - RNA, 20 nt, Human
gcagagcugcugggcugugg

SEQ ID NO: 1258337 - RNA, 18 nt, Human
ggaaauaaauaaucaggc

SEQ ID NO: 1258338 - RNA, 19 nt, Human
ggaagaaagacaaagggaa

SEQ ID NO: 1258339 - RNA, 20 nt, Human
ggaagaaagacaaagggaag

SEQ ID NO: 1258340 - RNA, 21 nt, Human
ggauuugaacucaaggcacaa

SEQ ID NO: 1258341 - RNA, 21 nt, Human
gggcuccuccauaacuugcuu

SEQ ID NO: 1258342 - RNA, 20 nt, Human
gucaaggagagaggcccccu

SEQ ID NO: 1258343 - RNA, 25 nt, Human
uaauauuaguauucccauuuuuuaa

SEQ ID NO: 1258344 - RNA, 20 nt, Human
uagaaagcaacucaugaagg

SEQ ID NO: 1258345 - RNA, 23 nt, Human
uagaaagcaacucaugaaggaga

SEQ ID NO: 1258346 - RNA, 18 nt, Human
uagaauggguccccaggc

SEQ ID NO: 1258347 - RNA, 20 nt, Human
uagaauggguccccaggcaa

SEQ ID NO: 1258348 - RNA, 18 nt, Human
uagaugugcaugugucuc

SEQ ID NO: 1258349 - RNA, 20 nt, Human
uaguaagaaaccaaagcacu

SEQ ID NO: 1258350 - RNA, 24 nt, Human
uaguaagaaaccaaagcacuuucc

SEQ ID NO: 1258351 - RNA, 23 nt, Human
uauagagacaccgggcuccucca

SEQ ID NO: 1258352 - RNA, 19 nt, Human
uaucaaaaugccaaccagc

SEQ ID NO: 1258353 - RNA, 20 nt, Human
ucauuuuccuguucucuggg

SEQ ID NO: 1258354 - RNA, 25 nt, Human
ucggugaugacagcugauauccaaa

SEQ ID NO: 1258355 - RNA, 21 nt, Human
ucuguccucaaaucccaagag

SEQ ID NO: 1258356 - RNA, 22 nt, Human
ucuguccucaaaucccaagagg

SEQ ID NO: 1258357 - RNA, 21 nt, Human
ucuuugguucugugauucauu

SEQ ID NO: 1258358 - RNA, 18 nt, Human
ugaauaugcaugagggcu

SEQ ID NO: 1258359 - RNA, 20 nt, Human
ugacagcugauauccaaacc

SEQ ID NO: 1258360 - RNA, 22 nt, Human
ugacuugaccaucugcauuucg

SEQ ID NO: 1258361 - RNA, 22 nt, Human
ugagaagcaggacacaggggua

SEQ ID NO: 1258362 - RNA, 18 nt, Human
ugagagacaggcauagaa

SEQ ID NO: 1258363 - RNA, 22 nt, Human
ugaucugugcagcugauuccuu

SEQ ID NO: 1258364 - RNA, 21 nt, Human
ugcagauguguuuuggaaauu

SEQ ID NO: 1258365 - RNA, 21 nt, Human
ugcauuucggggagaaggagc

SEQ ID NO: 1258366 - RNA, 22 nt, Human
ugcugagaguaagggcaaaaca

SEQ ID NO: 1258367 - RNA, 20 nt, Human
uggaagaaagacaaagggaa

SEQ ID NO: 1258368 - RNA, 19 nt, Human
ugggaggcugggaauggaa

SEQ ID NO: 1258369 - RNA, 20 nt, Human
ugggauaaaggagggggcag

SEQ ID NO: 1258370 - RNA, 18 nt, Human
ugggcuucaagccccagc

SEQ ID NO: 1258371 - RNA, 23 nt, Human
uggguuuucuuucugaaguaucc

SEQ ID NO: 1258372 - RNA, 20 nt, Human
ugucaggaaauguugagucc

SEQ ID NO: 1258373 - RNA, 22 nt, Human
ugucccacaaacuuagggucac

SEQ ID NO: 1258374 - RNA, 19 nt, Human
uuagggucacaaaaugcuc

SEQ ID NO: 1258375 - RNA, 22 nt, Human
uuagggucacaaaaugcucccu

SEQ ID NO: 1258376 - RNA, 19 nt, Human
uucauuuuccuguucucug

SEQ ID NO: 1258377 - RNA, 21 nt, Human
uucccagcgagcaaaguggcc

SEQ ID NO: 1258378 - RNA, 18 nt, Human
uugaaggaggagagagga

SEQ ID NO: 1258379 - RNA, 25 nt, Human
uuuaacuuuaaaaauccaauuuguc

SEQ ID NO: 1258380 - RNA, 23 nt, Human
uuuuaggagauaagcugccuccc

SEQ ID NO: 1258381 - RNA, 25 nt, Human
uuuucaaaguuuacuaggaaaaaau

SEQ ID NO: 1258382 - RNA, 25 nt, Human
aacaaggcucugaauagugccuucu

SEQ ID NO: 1258383 - RNA, 23 nt, Human
acaaugaaggagagaacagguuu

SEQ ID NO: 1258384 - RNA, 21 nt, Human
agaaguugaagcucucagguu

SEQ ID NO: 1258385 - RNA, 23 nt, Human
auuuggcaauccuguuucuggaa

SEQ ID NO: 1258386 - RNA, 20 nt, Human
caguccuggauccacucucc

SEQ ID NO: 1258387 - RNA, 18 nt, Human
ccaaagcagaaguugaag

SEQ ID NO: 1258388 - RNA, 22 nt, Human
ccaaagcagaaguugaagcucu

SEQ ID NO: 1258389 - RNA, 20 nt, Human
ccagggccaaagcagaaguu

SEQ ID NO: 1258390 - RNA, 22 nt, Human
ccccaggcucuacucacaccuc

SEQ ID NO: 1258391 - RNA, 23 nt, Human
cccccaggcucuacucacaccuc

SEQ ID NO: 1258392 - RNA, 18 nt, Human
gaagccaggacuccagag

SEQ ID NO: 1258393 - RNA, 21 nt, Human
ucaaugucaucacaaugaagg

SEQ ID NO: 1258394 - RNA, 26 nt, Human
uccagggccaaagcagaaguugaagc

SEQ ID NO: 1258395 - RNA, 22 nt, Human
ucccccaggcucuacucacacc

SEQ ID NO: 1258396 - RNA, 24 nt, Human
uuagugauggacagauacuccucu

SEQ ID NO: 1258397 - RNA, 20 nt, Human
uucaagaggaugaaaacucc

SEQ ID NO: 1258398 - RNA, 18 nt, Human
acagcagugaugggcggg

SEQ ID NO: 1258399 - RNA, 19 nt, Human
accacagcgcuccugugcu

SEQ ID NO: 1258400 - RNA, 18 nt, Human
acugaggacauuaugggg

SEQ ID NO: 1258401 - RNA, 21 nt, Human
agagggacaaagagaggcugg

SEQ ID NO: 1258402 - RNA, 19 nt, Human
aggcagauuacagagguuu

SEQ ID NO: 1258403 - RNA, 19 nt, Human
aggcagcccuggggucugg

SEQ ID NO: 1258404 - RNA, 21 nt, Human
aggcagcccuggggucugggc

SEQ ID NO: 1258405 - RNA, 18 nt, Human
aggcugagucgacggagg

SEQ ID NO: 1258406 - RNA, 18 nt, Human
caaacccgccagucgucc

SEQ ID NO: 1258407 - RNA, 24 nt, Human
cacaacucagcccuagucccaucc

SEQ ID NO: 1258408 - RNA, 25 nt, Human
cacaacucagcccuagucccauccc

SEQ ID NO: 1258409 - RNA, 22 nt, Human
cagagcucaggccccugaaucu

SEQ ID NO: 1258410 - RNA, 23 nt, Human
cagcugccugaaugaaccauuca

SEQ ID NO: 1258411 - RNA, 23 nt, Human
cagcuuccagagcucaggccccu

SEQ ID NO: 1258412 - RNA, 21 nt, Human
caggcagauuacagagguuaa

SEQ ID NO: 1258413 - RNA, 24 nt, Human
cagugggcaacuuuaggcucagau

SEQ ID NO: 1258414 - RNA, 25 nt, Human
ccaaccccucuuucuacucucccca

SEQ ID NO: 1258415 - RNA, 20 nt, Human
cccacagcaccggcccccau

SEQ ID NO: 1258416 - RNA, 20 nt, Human
ccccgccggccggcccgccc

SEQ ID NO: 1258417 - RNA, 22 nt, Human
ccccucuuucuacucuccccac

SEQ ID NO: 1258418 - RNA, 20 nt, Human
cccucuuucuacucucccca

SEQ ID NO: 1258419 - RNA, 23 nt, Human
cccucuuucuacucuccccacag

SEQ ID NO: 1258420 - RNA, 20 nt, Human
cccuggggucugggcugggc

SEQ ID NO: 1258421 - RNA, 19 nt, Human
cccuucaaauuauguaccg

SEQ ID NO: 1258422 - RNA, 18 nt, Human
ccgcccccuugcgcccgc

SEQ ID NO: 1258423 - RNA, 18 nt, Human
ccuagcccggccgcuggc

SEQ ID NO: 1258424 - RNA, 21 nt, Human
ccuagcccggccgcuggcacc

SEQ ID NO: 1258425 - RNA, 18 nt, Human
ccuauagauacaggcaga

SEQ ID NO: 1258426 - RNA, 23 nt, Human
ccucaugcuuggcaguccccuuc

SEQ ID NO: 1258427 - RNA, 18 nt, Human
ccuggccccgcggccuga

SEQ ID NO: 1258428 - RNA, 20 nt, Human
ccuugugaagccuucugucu

SEQ ID NO: 1258429 - RNA, 18 nt, Human
cgagugcuggcccuggag

SEQ ID NO: 1258430 - RNA, 21 nt, Human
cgcaaacccgccagucguccc

SEQ ID NO: 1258431 - RNA, 27 nt, Human
cggggucggguccagcgcaaacccgcc

SEQ ID NO: 1258432 - RNA, 20 nt, Human
cguaaguccuucuugugucc

SEQ ID NO: 1258433 - RNA, 20 nt, Human
cuucuuguguccacugucua

SEQ ID NO: 1258434 - RNA, 18 nt, Human
gaacagcagugaugggcg

SEQ ID NO: 1258435 - RNA, 23 nt, Human
gacauagaaaaguggaaaaggga

SEQ ID NO: 1258436 - RNA, 19 nt, Human
gacuugggguggaaggagg

SEQ ID NO: 1258437 - RNA, 19 nt, Human
gagcagcagauggcaccag

SEQ ID NO: 1258438 - RNA, 18 nt, Human
gaggcugggcuccuuugg

SEQ ID NO: 1258439 - RNA, 19 nt, Human
gcagcccuggggucugggc

SEQ ID NO: 1258440 - RNA, 23 nt, Human
gcccuagucccaucccuuuugcu

SEQ ID NO: 1258441 - RNA, 18 nt, Human
gccuucccugcuugugga

SEQ ID NO: 1258442 - RNA, 19 nt, Human
ggagcagcagauggcacca

SEQ ID NO: 1258443 - RNA, 25 nt, Human
ggccuugugaagccuucugucuugg

SEQ ID NO: 1258444 - RNA, 19 nt, Human
gggaaggagagaugcccau

SEQ ID NO: 1258445 - RNA, 27 nt, Human
gggccaggaucagagugaggcaaggga

SEQ ID NO: 1258446 - RNA, 20 nt, Human
ggugaccacaucugcagcag

SEQ ID NO: 1258447 - RNA, 20 nt, Human
uacggcagcgcccgcccccu

SEQ ID NO: 1258448 - RNA, 19 nt, Human
uaguaggcacuccuuggca

SEQ ID NO: 1258449 - RNA, 19 nt, Human
uaucaaaauggagacacaa

SEQ ID NO: 1258450 - RNA, 20 nt, Human
uauggggccaggaucagagu

SEQ ID NO: 1258451 - RNA, 20 nt, Human
ucaaaauggagacacaacuc

SEQ ID NO: 1258452 - RNA, 24 nt, Human
ucagggcguaaguccuucuugugu

SEQ ID NO: 1258453 - RNA, 21 nt, Human
uccccacagcaccggccccca

SEQ ID NO: 1258454 - RNA, 27 nt, Human
uccccacagcaccggcccccaucaccu

SEQ ID NO: 1258455 - RNA, 18 nt, Human
uccccugccucgcccgag

SEQ ID NO: 1258456 - RNA, 18 nt, Human
ucccgggcuggacuggcu

SEQ ID NO: 1258457 - RNA, 22 nt, Human
ucccugcuuguggaaguuucca

SEQ ID NO: 1258458 - RNA, 20 nt, Human
uccuuaggcagcccuggggg

SEQ ID NO: 1258459 - RNA, 22 nt, Human
uccuuaggcagcccuggggucu

SEQ ID NO: 1258460 - RNA, 20 nt, Human
ucugggcugggcuggcuaau

SEQ ID NO: 1258461 - RNA, 24 nt, Human
ugaacaagcaagagucugagcauu

SEQ ID NO: 1258462 - RNA, 18 nt, Human
ugaaccauucaugcccuc

SEQ ID NO: 1258463 - RNA, 18 nt, Human
ugagaugcccaccuauag

SEQ ID NO: 1258464 - RNA, 19 nt, Human
ugcagcuuccagagcucaa

SEQ ID NO: 1258465 - RNA, 20 nt, Human
uggaggaacagcagugaugg

SEQ ID NO: 1258466 - RNA, 23 nt, Human
uggaggaacagcagugaugggcg

SEQ ID NO: 1258467 - RNA, 26 nt, Human
uggauagagggacaaagagaggcugg

SEQ ID NO: 1258468 - RNA, 18 nt, Human
ugggguggaaggaggaca

SEQ ID NO: 1258469 - RNA, 22 nt, Human
uggugccagugggcaacuuuag

SEQ ID NO: 1258470 - RNA, 21 nt, Human
uuuccaggcguuggccuugug

SEQ ID NO: 1258471 - RNA, 19 nt, Human
agguguaagaaacaagaac

SEQ ID NO: 1258472 - RNA, 19 nt, Human
cacacuggaaaacuccugg

SEQ ID NO: 1258473 - RNA, 21 nt, Human
cagaaagaguagcugucuuac

SEQ ID NO: 1258474 - RNA, 22 nt, Human
cagcaacacacuggaaaacucc

SEQ ID NO: 1258475 - RNA, 23 nt, Human
cagcagcagcggcaagcccacag

SEQ ID NO: 1258476 - RNA, 22 nt, Human
cccacggcugcaaggugggagc

SEQ ID NO: 1258477 - RNA, 22 nt, Human
cugaaggcuuuggaucuccccu

SEQ ID NO: 1258478 - RNA, 18 nt, Human
cugcaaggugggagcugc

SEQ ID NO: 1258479 - RNA, 18 nt, Human
cugcaggugcugaaggcu

SEQ ID NO: 1258480 - RNA, 18 nt, Human
gcagcagcggcaagcccc

SEQ ID NO: 1258481 - RNA, 20 nt, Human
gugggagcugcaggugcuga

SEQ ID NO: 1258482 - RNA, 19 nt, Human
uaagcucgugacuaugaug

SEQ ID NO: 1258483 - RNA, 22 nt, Human
uaguggcagcaacacacuggaa

SEQ ID NO: 1258484 - RNA, 24 nt, Human
ucagcagcagcggcaagcccacag

SEQ ID NO: 1258485 - RNA, 19 nt, Human
ugagaggaauaagguagug

SEQ ID NO: 1258486 - RNA, 24 nt, Human
ugggagcugcaggugcugaaggcu

SEQ ID NO: 1258487 - RNA, 27 nt, Human
uguaccaacagaaagaguagcugucuu

SEQ ID NO: 1258488 - RNA, 24 nt, Human
uuggaucuccccucuguggugcug

SEQ ID NO: 1258489 - RNA, 22 nt, Human
cgcguuguacauuuucaugagu

SEQ ID NO: 1258490 - RNA, 21 nt, Human
ucuccuguccuugcuugcucg

SEQ ID NO: 1258491 - RNA, 21 nt, Human
uuucaugagugagaugucgcu

SEQ ID NO: 1258492 - RNA, 25 nt, Human
aaaagaccagaauuugagacgggug

SEQ ID NO: 1258493 - RNA, 27 nt, Human
aaaggucuucucgaaccauauccaccc

SEQ ID NO: 1258494 - RNA, 25 nt, Human
aaauaauagaaauuuauuuucuuac

SEQ ID NO: 1258495 - RNA, 18 nt, Human
aacaagaggagaacacca

SEQ ID NO: 1258496 - RNA, 20 nt, Human
aacaccacaaauacggcaaa

SEQ ID NO: 1258497 - RNA, 19 nt, Human
aacacggugaaaccccauc

SEQ ID NO: 1258498 - RNA, 20 nt, Human
aacacggugaaaccccaucu

SEQ ID NO: 1258499 - RNA, 21 nt, Human
aacacggugaaaccccaucuc

SEQ ID NO: 1258500 - RNA, 21 nt, Human
aacacggugaaaccccaucuc

SEQ ID NO: 1258501 - RNA, 20 nt, Human
aacagagcaagacuccaucu

SEQ ID NO: 1258502 - RNA, 23 nt, Human
aagaucacgccacugcacuccag

SEQ ID NO: 1258503 - RNA, 19 nt, Human
aaggaaauucacucaguac

SEQ ID NO: 1258504 - RNA, 25 nt, Human
aaggccccaccucuacauacuaucu

SEQ ID NO: 1258505 - RNA, 27 nt, Human
aaucacuuccucaaggccccaccucua

SEQ ID NO: 1258506 - RNA, 28 nt, Human
aaucacuuccucaaggccccaccucuac

SEQ ID NO: 1258507 - RNA, 24 nt, Human
aauggcgugaacccgggaggugga

SEQ ID NO: 1258508 - RNA, 20 nt, Human
acaccacaaauacggcaaac

SEQ ID NO: 1258509 - RNA, 24 nt, Human
acagagcaagacuccaucucaaaa

SEQ ID NO: 1258510 - RNA, 24 nt, Human
acauaacgcugcuuuaaaagacca

SEQ ID NO: 1258511 - RNA, 20 nt, Human
accaagaucacgccacugca

SEQ ID NO: 1258512 - RNA, 22 nt, Human
accacaaaaguagaaaacguaa

SEQ ID NO: 1258513 - RNA, 18 nt, Human
accccaucucuacuaaaa

SEQ ID NO: 1258514 - RNA, 23 nt, Human
acgccacugcacuccagccuggg

SEQ ID NO: 1258515 - RNA, 25 nt, Human
acgccacugcacuccagccuggggc

SEQ ID NO: 1258516 - RNA, 28 nt, Human
acuccaucucaaaaaaaaaaaaaaaaaa

SEQ ID NO: 1258517 - RNA, 18 nt, Human
acugcacuccagccuggg

SEQ ID NO: 1258518 - RNA, 18 nt, Human
acugcacuccagccuggg

SEQ ID NO: 1258519 - RNA, 25 nt, Human
acugcacuccagccuggggcaacag

SEQ ID NO: 1258520 - RNA, 18 nt, Human
agaacaccacaaauacgg

SEQ ID NO: 1258521 - RNA, 18 nt, Human
agagacagcauggaagac

SEQ ID NO: 1258522 - RNA, 18 nt, Human
agagagaaauaaaccugg

SEQ ID NO: 1258523 - RNA, 24 nt, Human
agcacuuugggaggccgaggcagg

SEQ ID NO: 1258524 - RNA, 22 nt, Human
agccgggcguggugguggcggg

SEQ ID NO: 1258525 - RNA, 25 nt, Human
agccuggggcaacagagcaagacuc

SEQ ID NO: 1258526 - RNA, 19 nt, Human
aggaagcuuuaaacauuca

SEQ ID NO: 1258527 - RNA, 21 nt, Human
aggaaucuggcaucucaaaua

SEQ ID NO: 1258528 - RNA, 24 nt, Human
aggcagaucaugaggucaggagau

SEQ ID NO: 1258529 - RNA, 21 nt, Human
aggcaggagaauggcgugaac

SEQ ID NO: 1258530 - RNA, 24 nt, Human
aggcaggagaauggcgugaacccg

SEQ ID NO: 1258531 - RNA, 24 nt, Human
aggcaggcagaucaugaggucagg

SEQ ID NO: 1258532 - RNA, 21 nt, Human
aggccgaggcaggcagaucau

SEQ ID NO: 1258533 - RNA, 23 nt, Human
aggccgaggcaggcagaucauga

SEQ ID NO: 1258534 - RNA, 19 nt, Human
aggcugaggcaggagaaug

SEQ ID NO: 1258535 - RNA, 26 nt, Human
agggacagaaggggcugggcauggug

SEQ ID NO: 1258536 - RNA, 19 nt, Human
agguggagcuugcagugaa

SEQ ID NO: 1258537 - RNA, 24 nt, Human
agguggagcuugcagugaaccaag

SEQ ID NO: 1258538 - RNA, 20 nt, Human
agucacgguuaagcaccagu

SEQ ID NO: 1258539 - RNA, 20 nt, Human
agugggauuggugaaaagca

SEQ ID NO: 1258540 - RNA, 23 nt, Human
aucaacaagaggagaacaccaca

SEQ ID NO: 1258541 - RNA, 24 nt, Human
aucacgccacugcacuccagccug

SEQ ID NO: 1258542 - RNA, 19 nt, Human
auguaucaaaaaacugaac

SEQ ID NO: 1258543 - RNA, 24 nt, Human
caaaaaaaaaaaaaaaaaaaggga

SEQ ID NO: 1258544 - RNA, 20 nt, Human
caaaguaucuucaacugggu

SEQ ID NO: 1258545 - RNA, 23 nt, Human
caacaagaggagaacaccacaaa

SEQ ID NO: 1258546 - RNA, 23 nt, Human
caacaucaacaagaggagaacac

SEQ ID NO: 1258547 - RNA, 24 nt, Human
caagaccauccuggcuaacacggu

SEQ ID NO: 1258548 - RNA, 21 nt, Human
caagacuccaucucaaaaaaa

SEQ ID NO: 1258549 - RNA, 24 nt, Human
cacaccuauaaucccagcacuuug

SEQ ID NO: 1258550 - RNA, 19 nt, Human
caccaguugguuugguguc

SEQ ID NO: 1258551 - RNA, 19 nt, Human
caccuauaaucccagcacu

SEQ ID NO: 1258552 - RNA, 24 nt, Human
caccuauaaucccagcacuuuggg

SEQ ID NO: 1258553 - RNA, 23 nt, Human
caccuguagucccagcuacucgg

SEQ ID NO: 1258554 - RNA, 24 nt, Human
caccuguagucccagcuacucggg

SEQ ID NO: 1258555 - RNA, 21 nt, Human
cacucaguacugcagagacag

SEQ ID NO: 1258556 - RNA, 24 nt, Human
cacuccagccuggggcaacagagc

SEQ ID NO: 1258557 - RNA, 19 nt, Human
cacugcacuccagccuggg

SEQ ID NO: 1258558 - RNA, 19 nt, Human
cacugcacuccagccuggg

SEQ ID NO: 1258559 - RNA, 23 nt, Human
cacugcacuccagccuggggcaa

SEQ ID NO: 1258560 - RNA, 24 nt, Human
cacugcacuccagccuggggcaac

SEQ ID NO: 1258561 - RNA, 25 nt, Human
cacugcacuccagccuggggcaaca

SEQ ID NO: 1258562 - RNA, 24 nt, Human
cagcacuuugggaggccgaggcag

SEQ ID NO: 1258563 - RNA, 25 nt, Human
cagcacuuugggaggccgaggcagg

SEQ ID NO: 1258564 - RNA, 24 nt, Human
cagcuacucgggaggcugaggcag

SEQ ID NO: 1258565 - RNA, 22 nt, Human
caggcagaucaugaggucagga

SEQ ID NO: 1258566 - RNA, 21 nt, Human
caucuaugaggaagccucugu

SEQ ID NO: 1258567 - RNA, 19 nt, Human
cauggaagacaaagacuca

SEQ ID NO: 1258568 - RNA, 28 nt, Human
cauucauauuggaguuaagaauuaaaga

SEQ ID NO: 1258569 - RNA, 23 nt, Human
cauuuuauuaauaaauucaacaa

SEQ ID NO: 1258570 - RNA, 20 nt, Human
ccacugcacuccagccuggg

SEQ ID NO: 1258571 - RNA, 20 nt, Human
ccacugcacuccagccuggg

SEQ ID NO: 1258572 - RNA, 21 nt, Human
ccacugcacuccagccugggg

SEQ ID NO: 1258573 - RNA, 22 nt, Human
ccacugcacuccagccuggggc

SEQ ID NO: 1258574 - RNA, 25 nt, Human
ccacugcacuccagccuggggcaac

SEQ ID NO: 1258575 - RNA, 20 nt, Human
ccgggggugagugggauugg

SEQ ID NO: 1258576 - RNA, 19 nt, Human
ccucaaggccccaccucua

SEQ ID NO: 1258577 - RNA, 22 nt, Human
ccugcaugcacuguaaaaucca

SEQ ID NO: 1258578 - RNA, 24 nt, Human
ccuggcuaacacggugaaacccca

SEQ ID NO: 1258579 - RNA, 23 nt, Human
ccuggggcaacagagcaagacuc

SEQ ID NO: 1258580 - RNA, 21 nt, Human
ccuguaacuauaaaagucauc

SEQ ID NO: 1258581 - RNA, 21 nt, Human
ccuguagucccagcuacucgg

SEQ ID NO: 1258582 - RNA, 24 nt, Human
cgaggcaggcagaucaugagguca

SEQ ID NO: 1258583 - RNA, 25 nt, Human
cgccacugcacuccagccuggggca

SEQ ID NO: 1258584 - RNA, 29 nt, Human
cgggagguggagcuugcagugacaacggu

SEQ ID NO: 1258585 - RNA, 21 nt, Human
cgggcaccuguagucccagcu

SEQ ID NO: 1258586 - RNA, 18 nt, Human
cucaaaaaaaaaaaaaaa

SEQ ID NO: 1258587 - RNA, 22 nt, Human
cucacaccuauaaucccagcac

SEQ ID NO: 1258588 - RNA, 24 nt, Human
cucacaccuauaaucccagcacuu

SEQ ID NO: 1258589 - RNA, 25 nt, Human
cucagucucuguguuucugaaaggu

SEQ ID NO: 1258590 - RNA, 19 nt, Human
cuccaucucaaaaaaaaaa

SEQ ID NO: 1258591 - RNA, 20 nt, Human
cugaaaggucuucucgaacc

SEQ ID NO: 1258592 - RNA, 19 nt, Human
cugcugaguccccaguugc

SEQ ID NO: 1258593 - RNA, 19 nt, Human
cugcuuucaagaugguacc

SEQ ID NO: 1258594 - RNA, 21 nt, Human
cuggaggcugggaagucacgg

SEQ ID NO: 1258595 - RNA, 23 nt, Human
cuggcuaacacggugaaacccca

SEQ ID NO: 1258596 - RNA, 23 nt, Human
cuucuccuuaauuucuuuuucuu

SEQ ID NO: 1258597 - RNA, 24 nt, Human
gaaggggcugggcaugguggcuca

SEQ ID NO: 1258598 - RNA, 18 nt, Human
gagcuugcagugaaccaa

SEQ ID NO: 1258599 - RNA, 19 nt, Human
gaggaagccucugucuucc

SEQ ID NO: 1258600 - RNA, 23 nt, Human
gaggcaggcagaucaugagguca

SEQ ID NO: 1258601 - RNA, 20 nt, Human
gaguuaagaauuaaagacac

SEQ ID NO: 1258602 - RNA, 18 nt, Human
gaucaggaaugcaaauuu

SEQ ID NO: 1258603 - RNA, 25 nt, Human
gcacuccagccuggggcaacagagc

SEQ ID NO: 1258604 - RNA, 20 nt, Human
gcaugguggcucacaccuau

SEQ ID NO: 1258605 - RNA, 24 nt, Human
gcuaacacggugaaaccccaucuc

SEQ ID NO: 1258606 - RNA, 22 nt, Human
gcugaggcaggagaauggcgug

SEQ ID NO: 1258607 - RNA, 19 nt, Human
gcugggcaugguggcucac

SEQ ID NO: 1258608 - RNA, 20 nt, Human
ggaauaagaaucuagaggaa

SEQ ID NO: 1258609 - RNA, 20 nt, Human
ggagacagaagggcugaaca

SEQ ID NO: 1258610 - RNA, 24 nt, Human
ggagcuugcagugaaccaagauca

SEQ ID NO: 1258611 - RNA, 19 nt, Human
ggcaccuguagucccagcu

SEQ ID NO: 1258612 - RNA, 23 nt, Human
ggcaggcagaucaugaggucagg

SEQ ID NO: 1258613 - RNA, 23 nt, Human
ggcaggggcaaguuuggggaggc

SEQ ID NO: 1258614 - RNA, 23 nt, Human
ggcaugguggcucacaccuauaa

SEQ ID NO: 1258615 - RNA, 21 nt, Human
ggcgggcaccuguagucccag

SEQ ID NO: 1258616 - RNA, 18 nt, Human
ggucucuacuuccaagga

SEQ ID NO: 1258617 - RNA, 21 nt, Human
ggugagugggauuggugaaaa

SEQ ID NO: 1258618 - RNA, 24 nt, Human
gguggcucacaccuauaaucccag

SEQ ID NO: 1258619 - RNA, 18 nt, Human
guugcugcuuucaagaug

SEQ ID NO: 1258620 - RNA, 22 nt, Human
uaacacggugaaaccccaucuc

SEQ ID NO: 1258621 - RNA, 24 nt, Human
uaacacggugaaaccccaucucua

SEQ ID NO: 1258622 - RNA, 24 nt, Human
uaagacacacauaaaaguaauagg

SEQ ID NO: 1258623 - RNA, 20 nt, Human
uacauaaauaaccugcaugc

SEQ ID NO: 1258624 - RNA, 21 nt, Human
uacauaaauaaccugcaugca

SEQ ID NO: 1258625 - RNA, 24 nt, Human
uaccacaaaaguagaaaacguaac

SEQ ID NO: 1258626 - RNA, 20 nt, Human
uacugcagagacagcaugga

SEQ ID NO: 1258627 - RNA, 22 nt, Human
uagcaguaagugcugaaauaag

SEQ ID NO: 1258628 - RNA, 21 nt, Human
uaguguguggauaaccugaaa

SEQ ID NO: 1258629 - RNA, 18 nt, Human
uauauaggaauaagaauc

SEQ ID NO: 1258630 - RNA, 21 nt, Human
ucaaaaaaaaaaaaaaaaaaa

SEQ ID NO: 1258631 - RNA, 23 nt, Human
ucaaaaaacugaacuuguguaau

SEQ ID NO: 1258632 - RNA, 23 nt, Human
ucacgccacugcacuccagccug

SEQ ID NO: 1258633 - RNA, 18 nt, Human
ucaugaggucaggagauc

SEQ ID NO: 1258634 - RNA, 24 nt, Human
ucaugaggucaggagaucaagacc

SEQ ID NO: 1258635 - RNA, 23 nt, Human
uccaucucaaaaaaaaaaaaaaa

SEQ ID NO: 1258636 - RNA, 20 nt, Human
uccauguaucaaaaaacuga

SEQ ID NO: 1258637 - RNA, 20 nt, Human
ucccagagcccucaugacuu

SEQ ID NO: 1258638 - RNA, 22 nt, Human
uccucacuuccauaaauauucu

SEQ ID NO: 1258639 - RNA, 22 nt, Human
ucucuacuaaaaauauaaaaaa

SEQ ID NO: 1258640 - RNA, 22 nt, Human
ucuuacagcucuggaggcuggg

SEQ ID NO: 1258641 - RNA, 19 nt, Human
ucuuuguucucagucaucu

SEQ ID NO: 1258642 - RNA, 19 nt, Human
ucuuuuuucaugcugugac

SEQ ID NO: 1258643 - RNA, 19 nt, Human
ugaaaccccaucucuacua

SEQ ID NO: 1258644 - RNA, 20 nt, Human
ugaagaaguugggaagauca

SEQ ID NO: 1258645 - RNA, 23 nt, Human
ugaagaaguugggaagaucagga

SEQ ID NO: 1258646 - RNA, 19 nt, Human
ugaauuugaagaaguuggg

SEQ ID NO: 1258647 - RNA, 18 nt, Human
ugacauugugacaauaac

SEQ ID NO: 1258648 - RNA, 20 nt, Human
ugacuuaaucacuuccucaa

SEQ ID NO: 1258649 - RNA, 24 nt, Human
ugaggcaggagaauggcgugaacc

SEQ ID NO: 1258650 - RNA, 25 nt, Human
ugaggcaggagaauggcgugaaccc

SEQ ID NO: 1258651 - RNA, 26 nt, Human
ugauagcaguaagugcugaaauaaga

SEQ ID NO: 1258652 - RNA, 22 nt, Human
ugcaaauuucuucccccuuguc

SEQ ID NO: 1258653 - RNA, 24 nt, Human
ugcaugcacuguaaaauccaugua

SEQ ID NO: 1258654 - RNA, 23 nt, Human
uggaagacaaagacucagucucu

SEQ ID NO: 1258655 - RNA, 22 nt, Human
uggcgggcaccuguagucccag

SEQ ID NO: 1258656 - RNA, 22 nt, Human
uggcucacaccuauaaucccag

SEQ ID NO: 1258657 - RNA, 24 nt, Human
uggcucacaccuauaaucccagca

SEQ ID NO: 1258658 - RNA, 22 nt, Human
uggcucauucaccauuucaaca

SEQ ID NO: 1258659 - RNA, 20 nt, Human
ugggaggccgaggcaggcag

SEQ ID NO: 1258660 - RNA, 24 nt, Human
ugggaggccgaggcaggcagauca

SEQ ID NO: 1258661 - RNA, 18 nt, Human
ugggauuggugaaaagca

SEQ ID NO: 1258662 - RNA, 19 nt, Human
uggguccuagucucugggc

SEQ ID NO: 1258663 - RNA, 23 nt, Human
uggugaaaagcacuaaaugacau

SEQ ID NO: 1258664 - RNA, 24 nt, Human
ugguggcgggcaccuguaguccca

SEQ ID NO: 1258665 - RNA, 23 nt, Human
uggugucugcugaguccccaguu

SEQ ID NO: 1258666 - RNA, 26 nt, Human
uguauauuacaauguuaggacuacuu

SEQ ID NO: 1258667 - RNA, 22 nt, Human
ugucugcugaguccccaguugc

SEQ ID NO: 1258668 - RNA, 19 nt, Human
uguggauaaccugaaauac

SEQ ID NO: 1258669 - RNA, 20 nt, Human
uguggcaguacuguauauua

SEQ ID NO: 1258670 - RNA, 21 nt, Human
uguguggauaaccugaaauac

SEQ ID NO: 1258671 - RNA, 18 nt, Human
uuagccgggcgugguggu

SEQ ID NO: 1258672 - RNA, 27 nt, Human
uuagccgggcguggugguggcgggcac

SEQ ID NO: 1258673 - RNA, 21 nt, Human
uucaacaucaacaagaggaga

SEQ ID NO: 1258674 - RNA, 19 nt, Human
uuccucaaggccccaccuc

SEQ ID NO: 1258675 - RNA, 23 nt, Human
uucuuuggguccuagucucuggg

SEQ ID NO: 1258676 - RNA, 20 nt, Human
uugaagaaguugggaagauc

SEQ ID NO: 1258677 - RNA, 25 nt, Human
uugggaggccgaggcaggcagauca

SEQ ID NO: 1258678 - RNA, 20 nt, Human
uuucucccagaccuccucuc

SEQ ID NO: 1258679 - RNA, 23 nt, Human
acucaucugcacucaugcauaca

SEQ ID NO: 1258680 - RNA, 19 nt, Human
agcagcaucuuuucucagc

SEQ ID NO: 1258681 - RNA, 21 nt, Human
auaaagucucccuuugauuaa

SEQ ID NO: 1258682 - RNA, 18 nt, Human
caagagcaagggcuucca

SEQ ID NO: 1258683 - RNA, 20 nt, Human
caauuuuauuucaaaagcag

SEQ ID NO: 1258684 - RNA, 21 nt, Human
cacagcaccaauuuuauuuca

SEQ ID NO: 1258685 - RNA, 24 nt, Human
cauaagcucuucccccacaucccc

SEQ ID NO: 1258686 - RNA, 24 nt, Human
caucugcacucaugcauacauaca

SEQ ID NO: 1258687 - RNA, 25 nt, Human
cccccacaucccccaacuucauucc

SEQ ID NO: 1258688 - RNA, 22 nt, Human
cuacaguuucaaucuucaugac

SEQ ID NO: 1258689 - RNA, 23 nt, Human
cuugucuauacccagccuggauc

SEQ ID NO: 1258690 - RNA, 19 nt, Human
gugggaaagucauaagcuc

SEQ ID NO: 1258691 - RNA, 20 nt, Human
uaacuucuguucuguaacuc

SEQ ID NO: 1258692 - RNA, 21 nt, Human
uaagcucuucccccacauccc

SEQ ID NO: 1258693 - RNA, 21 nt, Human
uacaagugucuacacagcacc

SEQ ID NO: 1258694 - RNA, 18 nt, Human
uacccagccuggaucucc

SEQ ID NO: 1258695 - RNA, 23 nt, Human
ucauaagcucuucccccacaucc

SEQ ID NO: 1258696 - RNA, 22 nt, Human
ucuugucuauacccagccugga

SEQ ID NO: 1258697 - RNA, 21 nt, Human
ugaaagauaaagucucccuuu

SEQ ID NO: 1258698 - RNA, 19 nt, Human
ugacaaaagcaaagggcuc

SEQ ID NO: 1258699 - RNA, 19 nt, Human
ugacacaggugggaaaguc

SEQ ID NO: 1258700 - RNA, 26 nt, Human
ugcacucaugcauacauacacaaagc

SEQ ID NO: 1258701 - RNA, 25 nt, Human
ugcauacauacacaaagcaccuaca

SEQ ID NO: 1258702 - RNA, 25 nt, Human
uuccaauggaugacacaggguaccc

SEQ ID NO: 1258703 - RNA, 18 nt, Human
uuucauuaacuucuguuc

SEQ ID NO: 1258704 - RNA, 20 nt, Human
uuuuuccuacuuccaaaaau

SEQ ID NO: 1258705 - RNA, 25 nt, Human
aaaaaaaaauggaacugaaccaaaa

SEQ ID NO: 1258706 - RNA, 24 nt, Human
aaaaaaaauggaacugaaccaaaa

SEQ ID NO: 1258707 - RNA, 22 nt, Human
aaaaagccaaggagggagggua

SEQ ID NO: 1258708 - RNA, 20 nt, Human
aaaacacccaaaaauggccc

SEQ ID NO: 1258709 - RNA, 22 nt, Human
aaaauccuucccaaaccuaaac

SEQ ID NO: 1258710 - RNA, 25 nt, Human
aaaaugaaaaaaaaauggaacugaa

SEQ ID NO: 1258711 - RNA, 21 nt, Human
aaacagaacaaaacaaaacaa

SEQ ID NO: 1258712 - RNA, 22 nt, Human
aaacagaacaaaacaaaacaaa

SEQ ID NO: 1258713 - RNA, 27 nt, Human
aaacagaacaaaacaaaacaaaaacaa

SEQ ID NO: 1258714 - RNA, 19 nt, Human
aaaugcccugcaacaaguc

SEQ ID NO: 1258715 - RNA, 24 nt, Human
aacaaaacaaaaacaaccucuccc

SEQ ID NO: 1258716 - RNA, 21 nt, Human
aaccaaaaaacuaagcaacag

SEQ ID NO: 1258717 - RNA, 25 nt, Human
aaccaaaaaacuaagcaacaguacu

SEQ ID NO: 1258718 - RNA, 23 nt, Human
aacuauuagguaaaccacccauc

SEQ ID NO: 1258719 - RNA, 18 nt, Human
aagaagucggugauuucu

SEQ ID NO: 1258720 - RNA, 19 nt, Human
aagauucuuuuucuugaau

SEQ ID NO: 1258721 - RNA, 22 nt, Human
aagcaaaaauaaaagaacucug

SEQ ID NO: 1258722 - RNA, 23 nt, Human
aagcaaaaauaaaagaacucugg

SEQ ID NO: 1258723 - RNA, 24 nt, Human
aagcaaaaauaaaagaacucugga

SEQ ID NO: 1258724 - RNA, 30 nt, Human
aagcaaaaauaaaagaacucuggaaucugg

SEQ ID NO: 1258725 - RNA, 19 nt, Human
acaaaaacaaccucucccu

SEQ ID NO: 1258726 - RNA, 20 nt, Human
acaaaacaaaacaaaaacaa

SEQ ID NO: 1258727 - RNA, 24 nt, Human
acaaaacaaaacaaaaacaaccuc

SEQ ID NO: 1258728 - RNA, 25 nt, Human
acaaaauccuucccaaaccuaaaca

SEQ ID NO: 1258729 - RNA, 25 nt, Human
acaaaauccuucccaaaccuaaaca

SEQ ID NO: 1258730 - RNA, 18 nt, Human
acaaagucccagggaaac

SEQ ID NO: 1258731 - RNA, 23 nt, Human
acacaguaagaagucggugauuu

SEQ ID NO: 1258732 - RNA, 24 nt, Human
accuagucccccacucuggccgcc

SEQ ID NO: 1258733 - RNA, 23 nt, Human
acugaaccaaaaaacuaagcaac

SEQ ID NO: 1258734 - RNA, 20 nt, Human
acugcucuggggucuuaggu

SEQ ID NO: 1258735 - RNA, 23 nt, Human
agaaauaagaauuaugaacagaa

SEQ ID NO: 1258736 - RNA, 21 nt, Human
agaacaaaacaaaacaaaaac

SEQ ID NO: 1258737 - RNA, 19 nt, Human
agagagaaguucuggcccu

SEQ ID NO: 1258738 - RNA, 23 nt, Human
agagagggcacauacacuggaaa

SEQ ID NO: 1258739 - RNA, 21 nt, Human
agcggaaggaagaacugggag

SEQ ID NO: 1258740 - RNA, 18 nt, Human
aguaaugauaaccaagug

SEQ ID NO: 1258741 - RNA, 24 nt, Human
auaucacaaagucccagggaaaac

SEQ ID NO: 1258742 - RNA, 23 nt, Human
aucuccaucccuaaugccaaagg

SEQ ID NO: 1258743 - RNA, 22 nt, Human
augacacaggugggaaagucau

SEQ ID NO: 1258744 - RNA, 18 nt, Human
auucuacaucuacucuuc

SEQ ID NO: 1258745 - RNA, 23 nt, Human
caaaaaaaucacccagguugaga

SEQ ID NO: 1258746 - RNA, 24 nt, Human
caaaaaagccaaggagggagggua

SEQ ID NO: 1258747 - RNA, 25 nt, Human
caaaacaaaaacaaccucucccucc

SEQ ID NO: 1258748 - RNA, 27 nt, Human
caaaacaaaaacaaccucucccucccu

SEQ ID NO: 1258749 - RNA, 23 nt, Human
caaaacaaaacaaaaacaaccuc

SEQ ID NO: 1258750 - RNA, 21 nt, Human
caaaagggagaaaugagaaca

SEQ ID NO: 1258751 - RNA, 24 nt, Human
caaaauaguagagaagcauguugc

SEQ ID NO: 1258752 - RNA, 23 nt, Human
caaaauccuucccaaaccuaaac

SEQ ID NO: 1258753 - RNA, 23 nt, Human
caaaccuaaacagaacaaaacaa

SEQ ID NO: 1258754 - RNA, 21 nt, Human
caaaguaacugaaccaaaaaa

SEQ ID NO: 1258755 - RNA, 22 nt, Human
caaaugcccugcaacaaguccu

SEQ ID NO: 1258756 - RNA, 23 nt, Human
caacuaaauugaaauguaaaaca

SEQ ID NO: 1258757 - RNA, 18 nt, Human
caagagcaagggcuucca

SEQ ID NO: 1258758 - RNA, 24 nt, Human
cacacacaccacagauaguuuaug

SEQ ID NO: 1258759 - RNA, 24 nt, Human
cacacaccacagauaguuuaugag

SEQ ID NO: 1258760 - RNA, 24 nt, Human
cacccaaaaauggccccuacucac

SEQ ID NO: 1258761 - RNA, 21 nt, Human
cagccucgggccuggucccgg

SEQ ID NO: 1258762 - RNA, 23 nt, Human
cagguuaaaaaugcuuaaaacac

SEQ ID NO: 1258763 - RNA, 24 nt, Human
cagguugagaaauaagaauuauga

SEQ ID NO: 1258764 - RNA, 26 nt, Human
cauaguaacgaauaaaaaaucucuca

SEQ ID NO: 1258765 - RNA, 22 nt, Human
cauggucaaaauaguagagaag

SEQ ID NO: 1258766 - RNA, 21 nt, Human
ccaacaguaaugauaaccaag

SEQ ID NO: 1258767 - RNA, 22 nt, Human
ccacaugucaaaaugaaaaaaa

SEQ ID NO: 1258768 - RNA, 19 nt, Human
ccaccgcugucgccgccgc

SEQ ID NO: 1258769 - RNA, 19 nt, Human
ccaccgcugucgccgccgc

SEQ ID NO: 1258770 - RNA, 20 nt, Human
ccaccgcugucgccgccgcu

SEQ ID NO: 1258771 - RNA, 22 nt, Human
cccaaaccuaaacagaacaaaa

SEQ ID NO: 1258772 - RNA, 25 nt, Human
cccaaaccuaaacagaacaaaacaa

SEQ ID NO: 1258773 - RNA, 18 nt, Human
ccccacucuggccgccgg

SEQ ID NO: 1258774 - RNA, 25 nt, Human
cccccacaucccccaacuucauucc

SEQ ID NO: 1258775 - RNA, 22 nt, Human
cccugcaacaaguccuuaugug

SEQ ID NO: 1258776 - RNA, 19 nt, Human
ccgcugucgccgccgcuca

SEQ ID NO: 1258777 - RNA, 22 nt, Human
ccgcugucgccgccgcucagcc

SEQ ID NO: 1258778 - RNA, 18 nt, Human
ccucuccuccccccuccc

SEQ ID NO: 1258779 - RNA, 19 nt, Human
cgccucuccuccccccucc

SEQ ID NO: 1258780 - RNA, 20 nt, Human
cuagaguuuuuaacuguuuc

SEQ ID NO: 1258781 - RNA, 24 nt, Human
cucagccucgggccuggucccggc

SEQ ID NO: 1258782 - RNA, 20 nt, Human
cucguucaccaucaguaaca

SEQ ID NO: 1258783 - RNA, 23 nt, Human
cuucccaggacugcaaacucugg

SEQ ID NO: 1258784 - RNA, 19 nt, Human
gaacaaaacaaaacaaaaa

SEQ ID NO: 1258785 - RNA, 21 nt, Human
gagaucagacuguucugccgg

SEQ ID NO: 1258786 - RNA, 22 nt, Human
gaucguuaaaguggacuucuac

SEQ ID NO: 1258787 - RNA, 23 nt, Human
gccagccccggcccggcgccgcu

SEQ ID NO: 1258788 - RNA, 21 nt, Human
gcuuaaaacacuuucaauuau

SEQ ID NO: 1258789 - RNA, 19 nt, Human
gggcacauacacuggaaau

SEQ ID NO: 1258790 - RNA, 22 nt, Human
guaaaacaaaagaacuguucaa

SEQ ID NO: 1258791 - RNA, 18 nt, Human
guaaaccacaugucaaaa

SEQ ID NO: 1258792 - RNA, 20 nt, Human
gucgccgccgcucagccucg

SEQ ID NO: 1258793 - RNA, 19 nt, Human
gugggaaagucauaagcuc

SEQ ID NO: 1258794 - RNA, 21 nt, Human
uaaaacaaaagaacuguucaa

SEQ ID NO: 1258795 - RNA, 21 nt, Human
uaaaaucucccuuugauuaau

SEQ ID NO: 1258796 - RNA, 22 nt, Human
uaacauacaaagagaucagacu

SEQ ID NO: 1258797 - RNA, 27 nt, Human
uaaccacaucaaaguaacugaaccaaa

SEQ ID NO: 1258798 - RNA, 21 nt, Human
uaagcucuucccccacauccc

SEQ ID NO: 1258799 - RNA, 18 nt, Human
uacaaagagaucagacug

SEQ ID NO: 1258800 - RNA, 24 nt, Human
uagaaaacacccaaaaauggcccc

SEQ ID NO: 1258801 - RNA, 24 nt, Human
uaguaacgaauaaaaaaucucuca

SEQ ID NO: 1258802 - RNA, 21 nt, Human
uaucuucacagguucacccaa

SEQ ID NO: 1258803 - RNA, 21 nt, Human
ucaaaguaacugaaccaaaaa

SEQ ID NO: 1258804 - RNA, 25 nt, Human
ucauaagcucuucccccacaucccc

SEQ ID NO: 1258805 - RNA, 21 nt, Human
ucaucuuuccuuagagagggc

SEQ ID NO: 1258806 - RNA, 22 nt, Human
uccauccuuccaaaaagcaaga

SEQ ID NO: 1258807 - RNA, 19 nt, Human
ucccaaaccuaaacagaac

SEQ ID NO: 1258808 - RNA, 21 nt, Human
ucccaaaccuaaacagaacaa

SEQ ID NO: 1258809 - RNA, 18 nt, Human
uccccacacacaccacag

SEQ ID NO: 1258810 - RNA, 24 nt, Human
ucccggccaccgcugucgccgccg

SEQ ID NO: 1258811 - RNA, 21 nt, Human
ucccggccagccccggcccgg

SEQ ID NO: 1258812 - RNA, 22 nt, Human
ucccuaaugccaaaggaaugca

SEQ ID NO: 1258813 - RNA, 19 nt, Human
uccugugaagauuccuugu

SEQ ID NO: 1258814 - RNA, 19 nt, Human
ucuggcugcgccucuccuc

SEQ ID NO: 1258815 - RNA, 24 nt, Human
ucugugguagaaaacacccaaaaa

SEQ ID NO: 1258816 - RNA, 20 nt, Human
ucuuuaguucugccacuguu

SEQ ID NO: 1258817 - RNA, 24 nt, Human
ucuuucuucauuuccauagccucu

SEQ ID NO: 1258818 - RNA, 19 nt, Human
ugaaaaaaaaauggaacug

SEQ ID NO: 1258819 - RNA, 19 nt, Human
ugaaaguaauggcugacau

SEQ ID NO: 1258820 - RNA, 24 nt, Human
ugaaccaaaaaagccaaggaggga

SEQ ID NO: 1258821 - RNA, 19 nt, Human
ugacacaggugggaaaguc

SEQ ID NO: 1258822 - RNA, 19 nt, Human
ugagaacaaaaaaaucacc

SEQ ID NO: 1258823 - RNA, 23 nt, Human
ugagaacaaaaaaaucacccagg

SEQ ID NO: 1258824 - RNA, 22 nt, Human
ugaguuaguaacauacaaagag

SEQ ID NO: 1258825 - RNA, 23 nt, Human
ugcaacaaguccuuauguguaug

SEQ ID NO: 1258826 - RNA, 24 nt, Human
ugcagaagaggaauuccuaacaau

SEQ ID NO: 1258827 - RNA, 23 nt, Human
ugcggcggcuccucuggcugcgc

SEQ ID NO: 1258828 - RNA, 20 nt, Human
ugcucauuucuuccaccuga

SEQ ID NO: 1258829 - RNA, 21 nt, Human
uggaaacugauggcaaucugg

SEQ ID NO: 1258830 - RNA, 19 nt, Human
uggaaauguggccaauucc

SEQ ID NO: 1258831 - RNA, 20 nt, Human
uggaacauccacauaguaac

SEQ ID NO: 1258832 - RNA, 24 nt, Human
uggaaucugacauauuucauguua

SEQ ID NO: 1258833 - RNA, 20 nt, Human
ugggaauaaaaucucccuuu

SEQ ID NO: 1258834 - RNA, 22 nt, Human
ugggaauaaaaucucccuuuga

SEQ ID NO: 1258835 - RNA, 19 nt, Human
ugggagagagaaguucugg

SEQ ID NO: 1258836 - RNA, 25 nt, Human
ugguauauggcugcagaagaggaau

SEQ ID NO: 1258837 - RNA, 23 nt, Human
uguauguuuuucacaaggcuggu

SEQ ID NO: 1258838 - RNA, 18 nt, Human
uguuucuuuaguucugcc

SEQ ID NO: 1258839 - RNA, 25 nt, Human
uguuugguccagacgaaugcucauu

SEQ ID NO: 1258840 - RNA, 24 nt, Human
uuaaaguggacuucuacuuuugca

SEQ ID NO: 1258841 - RNA, 21 nt, Human
uuaguuuaucaaugucuuccc

SEQ ID NO: 1258842 - RNA, 19 nt, Human
uuauguguauguuuuucac

SEQ ID NO: 1258843 - RNA, 22 nt, Human
uucauucuacaucuacucuucg

SEQ ID NO: 1258844 - RNA, 25 nt, Human
uuccaauggaugacacaggguaccc

SEQ ID NO: 1258845 - RNA, 23 nt, Human
uuccaguuugggaaaugaauuua

SEQ ID NO: 1258846 - RNA, 22 nt, Human
uucccaaaccuaaacagaacaa

SEQ ID NO: 1258847 - RNA, 20 nt, Human
uucuacuuuugcacugcucu

SEQ ID NO: 1258848 - RNA, 21 nt, Human
uuuccgcccucagcccgggag

SEQ ID NO: 1258849 - RNA, 18 nt, Human
uuucuuugucaucuuucc

SEQ ID NO: 1258850 - RNA, 22 nt, Human
aucuuauuuuccuuaucuacac

SEQ ID NO: 1258851 - RNA, 22 nt, Human
cauauuuccaaccugguuccca

SEQ ID NO: 1258852 - RNA, 23 nt, Human
cccucuagcgaugacugaccugg

SEQ ID NO: 1258853 - RNA, 21 nt, Human
ccucagagauaacauguuagc

SEQ ID NO: 1258854 - RNA, 26 nt, Human
cggccaagaaucuucuauuuaaguau

SEQ ID NO: 1258855 - RNA, 25 nt, Human
cucauuucuauuauagaauaguuca

SEQ ID NO: 1258856 - RNA, 22 nt, Human
cugacaucacauuuuaugauga

SEQ ID NO: 1258857 - RNA, 18 nt, Human
cuggaaaccaggaacugc

SEQ ID NO: 1258858 - RNA, 23 nt, Human
gaacugcacuccgagcugguagg

SEQ ID NO: 1258859 - RNA, 19 nt, Human
uaaacuggaaaccaggaac

SEQ ID NO: 1258860 - RNA, 19 nt, Human
ucagagauaacauguuagc

SEQ ID NO: 1258861 - RNA, 27 nt, Human
uccauaaucuggagcaagccggggucc

SEQ ID NO: 1258862 - RNA, 22 nt, Human
uuguguauauauccucauuucu

SEQ ID NO: 1258863 - RNA, 22 nt, Human
aagcuucuaaagcuugcaaggg

SEQ ID NO: 1258864 - RNA, 21 nt, Human
agaagcaagugcgucagaggg

SEQ ID NO: 1258865 - RNA, 24 nt, Human
agaaggaagacacagcucgugcag

SEQ ID NO: 1258866 - RNA, 22 nt, Human
agcgggcucccucgaugcgcuu

SEQ ID NO: 1258867 - RNA, 19 nt, Human
agggaugaggcaggggcug

SEQ ID NO: 1258868 - RNA, 28 nt, Human
auguccccucuggguccgccccauagug

SEQ ID NO: 1258869 - RNA, 18 nt, Human
cacagcucgugcagcgcu

SEQ ID NO: 1258870 - RNA, 18 nt, Human
cacaucucaccaccaccu

SEQ ID NO: 1258871 - RNA, 21 nt, Human
cacaucucaccaccaccuggu

SEQ ID NO: 1258872 - RNA, 24 nt, Human
cagccagucacaucucaccaccac

SEQ ID NO: 1258873 - RNA, 18 nt, Human
cagcgccccggcugcgcc

SEQ ID NO: 1258874 - RNA, 20 nt, Human
ccgcccagcgccccggcugc

SEQ ID NO: 1258875 - RNA, 24 nt, Human
cgcccagcgccccggcugcgcccc

SEQ ID NO: 1258876 - RNA, 20 nt, Human
cgcccccucggcgcccucuu

SEQ ID NO: 1258877 - RNA, 21 nt, Human
cggagacuccccgcuccccgg

SEQ ID NO: 1258878 - RNA, 22 nt, Human
cggcugcgcccccucggcgccc

SEQ ID NO: 1258879 - RNA, 23 nt, Human
gaaauaguaaugcccaccgcaga

SEQ ID NO: 1258880 - RNA, 24 nt, Human
gcccccucggcgcccucuuugccg

SEQ ID NO: 1258881 - RNA, 27 nt, Human
gcgcccucuuugccgggucuuuugcuc

SEQ ID NO: 1258882 - RNA, 22 nt, Human
gcggcggagagaaggaagacac

SEQ ID NO: 1258883 - RNA, 20 nt, Human
gcguuccucuccaugucccc

SEQ ID NO: 1258884 - RNA, 20 nt, Human
gcugcgcccccucggcgccc

SEQ ID NO: 1258885 - RNA, 21 nt, Human
gcugcgcccccucggcgcccu

SEQ ID NO: 1258886 - RNA, 23 nt, Human
ggacuggggcggggaggucaggc

SEQ ID NO: 1258887 - RNA, 18 nt, Human
ggaugaggcaggggcugg

SEQ ID NO: 1258888 - RNA, 23 nt, Human
guuccucuccauguccccucugg

SEQ ID NO: 1258889 - RNA, 19 nt, Human
guugcugaguuguggaaaa

SEQ ID NO: 1258890 - RNA, 18 nt, Human
ucacaucucaccaccacc

SEQ ID NO: 1258891 - RNA, 23 nt, Human
uccgcccagcgccccggcugcgc

SEQ ID NO: 1258892 - RNA, 20 nt, Human
ugaggcaggggcuggcagcc

SEQ ID NO: 1258893 - RNA, 19 nt, Human
ugggcccuggggaacugug

SEQ ID NO: 1258894 - RNA, 23 nt, Human
ugugugaagcuguagcggcacac

SEQ ID NO: 1258895 - RNA, 19 nt, Human
aaacugcagaccuucgcgg

SEQ ID NO: 1258896 - RNA, 20 nt, Human
aaagucccuucauggucgcc

SEQ ID NO: 1258897 - RNA, 19 nt, Human
aagcugcagaccuuugcgg

SEQ ID NO: 1258898 - RNA, 18 nt, Human
acagagcugaagggcucc

SEQ ID NO: 1258899 - RNA, 21 nt, Human
acagaguguugacacaaaggu

SEQ ID NO: 1258900 - RNA, 18 nt, Human
acccaaagagugaacagu

SEQ ID NO: 1258901 - RNA, 19 nt, Human
agaccaggguucugugaaa

SEQ ID NO: 1258902 - RNA, 20 nt, Human
agcaagauuuauugcaaaga

SEQ ID NO: 1258903 - RNA, 22 nt, Human
agggcugugaggacugccagca

SEQ ID NO: 1258904 - RNA, 23 nt, Human
auaaagguucuccaaggacccau

SEQ ID NO: 1258905 - RNA, 21 nt, Human
auacagaguguugacacaaag

SEQ ID NO: 1258906 - RNA, 19 nt, Human
auuuggccgaugacugcuc

SEQ ID NO: 1258907 - RNA, 18 nt, Human
caagaaugaagccaugga

SEQ ID NO: 1258908 - RNA, 25 nt, Human
caccagaguagcuagauacagagug

SEQ ID NO: 1258909 - RNA, 18 nt, Human
cacugcucagcgauuguc

SEQ ID NO: 1258910 - RNA, 21 nt, Human
ccaggcagaggaggugccgag

SEQ ID NO: 1258911 - RNA, 21 nt, Human
ccaggggcucgggcuccccuc

SEQ ID NO: 1258912 - RNA, 23 nt, Human
cccaggcagaggaggugccgaga

SEQ ID NO: 1258913 - RNA, 21 nt, Human
cccggccagucuaaccuagaa

SEQ ID NO: 1258914 - RNA, 18 nt, Human
cccugagcuagacacagg

SEQ ID NO: 1258915 - RNA, 24 nt, Human
ccucaaucaacaggacaccccaac

SEQ ID NO: 1258916 - RNA, 21 nt, Human
cuaggccaggggaagugccag

SEQ ID NO: 1258917 - RNA, 23 nt, Human
cuccaaggccccaccagaguagc

SEQ ID NO: 1258918 - RNA, 19 nt, Human
cuuggucucucacugacuu

SEQ ID NO: 1258919 - RNA, 22 nt, Human
cuuugcgcugugcuggccuccu

SEQ ID NO: 1258920 - RNA, 18 nt, Human
gaaugaagccguggaccc

SEQ ID NO: 1258921 - RNA, 18 nt, Human
gacccaaagagugaacag

SEQ ID NO: 1258922 - RNA, 21 nt, Human
gaggaggugccgagagugagc

SEQ ID NO: 1258923 - RNA, 20 nt, Human
gaguuguucguuccucccag

SEQ ID NO: 1258924 - RNA, 23 nt, Human
gaguuguucguuccucccagugg

SEQ ID NO: 1258925 - RNA, 22 nt, Human
gcgccuggaguuguucauugcg

SEQ ID NO: 1258926 - RNA, 19 nt, Human
gcuagauacagagugucca

SEQ ID NO: 1258927 - RNA, 21 nt, Human
gcucgggcuccccucuugcug

SEQ ID NO: 1258928 - RNA, 22 nt, Human
gcugcagaccuuugcggugagu

SEQ ID NO: 1258929 - RNA, 19 nt, Human
ggagcccaggcagaggagg

SEQ ID NO: 1258930 - RNA, 27 nt, Human
ggaguuguucguuccucccagugggac

SEQ ID NO: 1258931 - RNA, 21 nt, Human
ggcucgggcuccccucuugcu

SEQ ID NO: 1258932 - RNA, 24 nt, Human
gggcagcagcauccaucaacagaa

SEQ ID NO: 1258933 - RNA, 19 nt, Human
ggggaagugccagcugguc

SEQ ID NO: 1258934 - RNA, 20 nt, Human
ggggaagugccagcugguca

SEQ ID NO: 1258935 - RNA, 20 nt, Human
gugaaagagcugagggagcg

SEQ ID NO: 1258936 - RNA, 21 nt, Human
guuuggaguuucuuccuucug

SEQ ID NO: 1258937 - RNA, 21 nt, Human
guuuggaguuucuuccuucug

SEQ ID NO: 1258938 - RNA, 21 nt, Human
uagcaagauuuauugcaaaga

SEQ ID NO: 1258939 - RNA, 24 nt, Human
uaggccaggggaagugccagcugg

SEQ ID NO: 1258940 - RNA, 25 nt, Human
ucuggaguuuguuucuucugauguu

SEQ ID NO: 1258941 - RNA, 18 nt, Human
ucuguagugcagagcgug

SEQ ID NO: 1258942 - RNA, 21 nt, Human
ugaaagaacaaagcuuccaca

SEQ ID NO: 1258943 - RNA, 20 nt, Human
ugacacaaagguucuccaag

SEQ ID NO: 1258944 - RNA, 22 nt, Human
ugaggagagggcagcagcaucc

SEQ ID NO: 1258945 - RNA, 20 nt, Human
ugcagaccuuugcggugagu

SEQ ID NO: 1258946 - RNA, 20 nt, Human
uggugcgucuggaguuuguu

SEQ ID NO: 1258947 - RNA, 21 nt, Human
ugucacauggccgguugugug

SEQ ID NO: 1258948 - RNA, 18 nt, Human
uguccggaauuggugggu

SEQ ID NO: 1258949 - RNA, 18 nt, Human
uguccggaauuggugggu

SEQ ID NO: 1258950 - RNA, 24 nt, Human
uguggucucgcuggcuucaggagu

SEQ ID NO: 1258951 - RNA, 21 nt, Human
uguuacagcucuuaagguggu

SEQ ID NO: 1258952 - RNA, 27 nt, Human
uucccggccagucuaaccuagaauugc

SEQ ID NO: 1258953 - RNA, 25 nt, Human
uucugugaaagagcugagggagcgg

SEQ ID NO: 1258954 - RNA, 18 nt, Human
uuugcaguuguagugucc

SEQ ID NO: 1258955 - RNA, 21 nt, Human
uuugcaguuguaguguccuuc

SEQ ID NO: 1258956 - RNA, 27 nt, Human
aaaaagcaccugcugcacuguaagccc

SEQ ID NO: 1258957 - RNA, 24 nt, Human
aaaguuuuauccgcuuucccauau

SEQ ID NO: 1258958 - RNA, 24 nt, Human
aagggagcacccacaugcuuagau

SEQ ID NO: 1258959 - RNA, 19 nt, Human
acacuuccuaucuucuucu

SEQ ID NO: 1258960 - RNA, 22 nt, Human
agcacccacaugcuuagauagc

SEQ ID NO: 1258961 - RNA, 21 nt, Human
cagcgccucccaguggccaga

SEQ ID NO: 1258962 - RNA, 22 nt, Human
caguggccagaaggugaaauga

SEQ ID NO: 1258963 - RNA, 21 nt, Human
ccagagauuucaugucugauu

SEQ ID NO: 1258964 - RNA, 18 nt, Human
ccauauaaaaacucuucc

SEQ ID NO: 1258965 - RNA, 22 nt, Human
ccucauccugcguuugcucucc

SEQ ID NO: 1258966 - RNA, 21 nt, Human
ccuucccgcagcuucuucucg

SEQ ID NO: 1258967 - RNA, 22 nt, Human
ccuuucgagcagcgccucccag

SEQ ID NO: 1258968 - RNA, 21 nt, Human
cgagcagcgccucccaguggc

SEQ ID NO: 1258969 - RNA, 19 nt, Human
cuguucugcgacuuccgug

SEQ ID NO: 1258970 - RNA, 18 nt, Human
cuuggcucugauuucuuu

SEQ ID NO: 1258971 - RNA, 21 nt, Human
gagcagcgccucccaguggcc

SEQ ID NO: 1258972 - RNA, 22 nt, Human
gaguguguccacauugggggaa

SEQ ID NO: 1258973 - RNA, 20 nt, Human
gcagaaagggagcacccaca

SEQ ID NO: 1258974 - RNA, 18 nt, Human
gcagcugcagcgggcuug

SEQ ID NO: 1258975 - RNA, 23 nt, Human
ggcaguuugugguuccugauuug

SEQ ID NO: 1258976 - RNA, 20 nt, Human
gugaccucugcaguacuccu

SEQ ID NO: 1258977 - RNA, 20 nt, Human
ucuccaggugucaucuuucc

SEQ ID NO: 1258978 - RNA, 21 nt, Human
ucuucuguucuucacgcccca

SEQ ID NO: 1258979 - RNA, 22 nt, Human
ucuucuucuguucuucacgccc

SEQ ID NO: 1258980 - RNA, 22 nt, Human
ugcugcacuguaagcccaggga

SEQ ID NO: 1258981 - RNA, 22 nt, Human
uggagccagagauuucaugucu

SEQ ID NO: 1258982 - RNA, 24 nt, Human
uguggcagcugcagcgggcuuggc

SEQ ID NO: 1258983 - RNA, 23 nt, Human
uuccaguccaaugaaaguuuuau

SEQ ID NO: 1258984 - RNA, 23 nt, Human
uucccauauaaaaacucuuccca

SEQ ID NO: 1258985 - RNA, 24 nt, Human
uucccauauaaaaacucuucccac

SEQ ID NO: 1258986 - RNA, 20 nt, Human
uucuucuguucuucacgccc

SEQ ID NO: 1258987 - RNA, 24 nt, Human
uuggcucugauuucuuuucuggag

SEQ ID NO: 1258988 - RNA, 18 nt, Human
uugguucugugacccggg

SEQ ID NO: 1258989 - RNA, 23 nt, Human
uuuauccgcuuucccauauaaaa

SEQ ID NO: 1258990 - RNA, 23 nt, Human
uuucuggaggcucggaaacacuu

SEQ ID NO: 1258991 - RNA, 21 nt, Human
uuuguggggaaccgagugugu

SEQ ID NO: 1258992 - RNA, 19 nt, Human
aaaaagaaauuccuagccc

SEQ ID NO: 1258993 - RNA, 23 nt, Human
aaacugggaaggacaacaggaga

SEQ ID NO: 1258994 - RNA, 19 nt, Human
aaagaaauuccuagcccuu

SEQ ID NO: 1258995 - RNA, 21 nt, Human
aaagucuuucccuucucuagc

SEQ ID NO: 1258996 - RNA, 20 nt, Human
aaccuagcagcucacccauu

SEQ ID NO: 1258997 - RNA, 19 nt, Human
aagguuugaaauacugguu

SEQ ID NO: 1258998 - RNA, 19 nt, Human
acaaacaucagcuaacaga

SEQ ID NO: 1258999 - RNA, 23 nt, Human
acuaugccuuucuuuucucggga

SEQ ID NO: 1259000 - RNA, 24 nt, Human
acucuaaagggucuacgugaaaaa

SEQ ID NO: 1259001 - RNA, 18 nt, Human
acuuguggaccuccccuc

SEQ ID NO: 1259002 - RNA, 26 nt, Human
agaaggaagagguuuuuuuauucagc

SEQ ID NO: 1259003 - RNA, 22 nt, Human
agccaggagcguuggcagacug

SEQ ID NO: 1259004 - RNA, 25 nt, Human
agccaggagcguuggcagacuggug

SEQ ID NO: 1259005 - RNA, 19 nt, Human
aggcguagacagagaaacc

SEQ ID NO: 1259006 - RNA, 22 nt, Human
agggaaaaggggagguugggga

SEQ ID NO: 1259007 - RNA, 20 nt, Human
aguccaaaauuuaagaaaaa

SEQ ID NO: 1259008 - RNA, 24 nt, Human
aguggcauuauacaaacaaguuuc

SEQ ID NO: 1259009 - RNA, 18 nt, Human
aguugcuagcuucggccu

SEQ ID NO: 1259010 - RNA, 19 nt, Human
auugucuuuguugugcugu

SEQ ID NO: 1259011 - RNA, 21 nt, Human
cacucgaucaucucuacacuu

SEQ ID NO: 1259012 - RNA, 18 nt, Human
cagcacaggagggguugg

SEQ ID NO: 1259013 - RNA, 22 nt, Human
caggagcuggaucaguaggcac

SEQ ID NO: 1259014 - RNA, 22 nt, Human
cauaauagaucaaguaagccug

SEQ ID NO: 1259015 - RNA, 28 nt, Human
ccaccuggagaucuucaaagggggcugc

SEQ ID NO: 1259016 - RNA, 18 nt, Human
cccuguccuauugauccc

SEQ ID NO: 1259017 - RNA, 19 nt, Human
cgagcucccggaaaaagaa

SEQ ID NO: 1259018 - RNA, 18 nt, Human
cggggccaggugguggcg

SEQ ID NO: 1259019 - RNA, 19 nt, Human
cggggccaggugguggcgc

SEQ ID NO: 1259020 - RNA, 21 nt, Human
cucaugacaaacauuuauuuc

SEQ ID NO: 1259021 - RNA, 26 nt, Human
cucaugacaaacauuuauuucuacuc

SEQ ID NO: 1259022 - RNA, 23 nt, Human
cuccauaagcuuguaugccgggu

SEQ ID NO: 1259023 - RNA, 20 nt, Human
cucugugccuacauaucuaa

SEQ ID NO: 1259024 - RNA, 18 nt, Human
cugugccuacauaucuag

SEQ ID NO: 1259025 - RNA, 22 nt, Human
gaaguugcuagcuucggccuuc

SEQ ID NO: 1259026 - RNA, 20 nt, Human
gagauucuggaugagccuaa

SEQ ID NO: 1259027 - RNA, 21 nt, Human
gagccgagcucccggaaaaag

SEQ ID NO: 1259028 - RNA, 19 nt, Human
gaucaucucuacacuuuga

SEQ ID NO: 1259029 - RNA, 18 nt, Human
gcguacauaacaagaagu

SEQ ID NO: 1259030 - RNA, 21 nt, Human
gggaaaaggggagguugggga

SEQ ID NO: 1259031 - RNA, 18 nt, Human
gggagguuggggagaaac

SEQ ID NO: 1259032 - RNA, 21 nt, Human
gggagguuggggagaaacugg

SEQ ID NO: 1259033 - RNA, 20 nt, Human
ggguuaucugggcuuggucu

SEQ ID NO: 1259034 - RNA, 19 nt, Human
gucggucauuucucgggcu

SEQ ID NO: 1259035 - RNA, 19 nt, Human
guuggcuucccccuucugg

SEQ ID NO: 1259036 - RNA, 18 nt, Human
uaagaaaaaugaaucuca

SEQ ID NO: 1259037 - RNA, 19 nt, Human
uaagaaaaaugaaucucau

SEQ ID NO: 1259038 - RNA, 24 nt, Human
uaagccugaggaacgugacugggg

SEQ ID NO: 1259039 - RNA, 23 nt, Human
uaauugucuuuguugugcuguua

SEQ ID NO: 1259040 - RNA, 27 nt, Human
uacacguucucccuuuuuccaaugggg

SEQ ID NO: 1259041 - RNA, 20 nt, Human
uaccuuguacugaguggcau

SEQ ID NO: 1259042 - RNA, 22 nt, Human
uacuucuguuuuuuccaacuuu

SEQ ID NO: 1259043 - RNA, 25 nt, Human
uauuuccccccuuugagcauuuuca

SEQ ID NO: 1259044 - RNA, 21 nt, Human
uauuucuagcuuuuuacuauu

SEQ ID NO: 1259045 - RNA, 21 nt, Human
ucaaguaagccugaggaacgu

SEQ ID NO: 1259046 - RNA, 22 nt, Human
ucagcuuccgggugacuggagc

SEQ ID NO: 1259047 - RNA, 23 nt, Human
ucucauaccauauuuccccccuu

SEQ ID NO: 1259048 - RNA, 23 nt, Human
ucuggugcuggcagauucagcuc

SEQ ID NO: 1259049 - RNA, 26 nt, Human
ucuuuagcuccuuucucaggggccgc

SEQ ID NO: 1259050 - RNA, 20 nt, Human
ucuuuuucagaaguucuggu

SEQ ID NO: 1259051 - RNA, 21 nt, Human
ugaguggcauuauacaaacaa

SEQ ID NO: 1259052 - RNA, 25 nt, Human
uggacacaaacaggcaacuuuccag

SEQ ID NO: 1259053 - RNA, 21 nt, Human
uggcugcacaagcaucaaauc

SEQ ID NO: 1259054 - RNA, 21 nt, Human
uggugcagggggcucagaugg

SEQ ID NO: 1259055 - RNA, 23 nt, Human
uggugcagggggcucagaugggu

SEQ ID NO: 1259056 - RNA, 18 nt, Human
uguggaccuccccucuaa

SEQ ID NO: 1259057 - RNA, 19 nt, Human
uguuauacaacuucugucc

SEQ ID NO: 1259058 - RNA, 20 nt, Human
uguuggauccaggcugggau

SEQ ID NO: 1259059 - RNA, 19 nt, Human
uguuuuaauuugcuguccu

SEQ ID NO: 1259060 - RNA, 25 nt, Human
uuacuaaauggauucuuuucagugu

SEQ ID NO: 1259061 - RNA, 23 nt, Human
uuacuucuguuuuuuccaacuuu

SEQ ID NO: 1259062 - RNA, 21 nt, Human
uuccucaggcuucggccgugc

SEQ ID NO: 1259063 - RNA, 20 nt, Human
uugcuuucucccuuuuuugc

SEQ ID NO: 1259064 - RNA, 20 nt, Human
uuuaaaguagccuaaauaac

SEQ ID NO: 1259065 - RNA, 22 nt, Human
uuuacaaaccccugacucauga

SEQ ID NO: 1259066 - RNA, 23 nt, Human
uuuccaccguggacacaaacagg

SEQ ID NO: 1259067 - RNA, 23 nt, Human
uuucuuuuucuucuguucuaguu

SEQ ID NO: 1259068 - RNA, 21 nt, Human
uuuucagaaguucuggugcug

SEQ ID NO: 1259069 - RNA, 20 nt, Human
aaccuccaccuccugggcuc

SEQ ID NO: 1259070 - RNA, 19 nt, Human
aaguagcugggaaugcagg

SEQ ID NO: 1259071 - RNA, 24 nt, Human
aaugugcugagaucacagguguga

SEQ ID NO: 1259072 - RNA, 21 nt, Human
acaggugcccaccaccacacc

SEQ ID NO: 1259073 - RNA, 22 nt, Human
accauagggaaaugucuucuca

SEQ ID NO: 1259074 - RNA, 23 nt, Human
accuaucagguacuggaggugaa

SEQ ID NO: 1259075 - RNA, 25 nt, Human
acucuguugcccaggcuggagugca

SEQ ID NO: 1259076 - RNA, 18 nt, Human
agaacucaagggacagga

SEQ ID NO: 1259077 - RNA, 25 nt, Human
agacaagauggggguuuugcucuaa

SEQ ID NO: 1259078 - RNA, 19 nt, Human
agaucacaggugugagcca

SEQ ID NO: 1259079 - RNA, 20 nt, Human
agcuaugacagagaggggca

SEQ ID NO: 1259080 - RNA, 18 nt, Human
aggaaggagaugaguugg

SEQ ID NO: 1259081 - RNA, 21 nt, Human
aggaaggcagguuugggcugg

SEQ ID NO: 1259082 - RNA, 25 nt, Human
aggcuggagugcaguggcaugaucu

SEQ ID NO: 1259083 - RNA, 24 nt, Human
agggauucuccugccucagccucc

SEQ ID NO: 1259084 - RNA, 24 nt, Human
aggugauccgccugccucggccuc

SEQ ID NO: 1259085 - RNA, 18 nt, Human
aguaggugggauuacagg

SEQ ID NO: 1259086 - RNA, 24 nt, Human
agugauucuccugccucagccucc

SEQ ID NO: 1259087 - RNA, 18 nt, Human
agugcaguggcaugaucu

SEQ ID NO: 1259088 - RNA, 19 nt, Human
agugcaguggcaugaucuc

SEQ ID NO: 1259089 - RNA, 21 nt, Human
agugcaguggcaugaucucug

SEQ ID NO: 1259090 - RNA, 22 nt, Human
augacagagaggggcaagguac

SEQ ID NO: 1259091 - RNA, 20 nt, Human
augggguuucaccacauugg

SEQ ID NO: 1259092 - RNA, 24 nt, Human
augggguuucaccacauuggccag

SEQ ID NO: 1259093 - RNA, 22 nt, Human
auugugcugggaguacuugugg

SEQ ID NO: 1259094 - RNA, 24 nt, Human
auuuuuguauuuuuaguagagaug

SEQ ID NO: 1259095 - RNA, 23 nt, Human
caaccuccaccuccugggcucaa

SEQ ID NO: 1259096 - RNA, 24 nt, Human
caaccuccaccuccugggcucaag

SEQ ID NO: 1259097 - RNA, 24 nt, Human
caagauggggguuuugcucuaagc

SEQ ID NO: 1259098 - RNA, 22 nt, Human
caagccccugcagagaagcaag

SEQ ID NO: 1259099 - RNA, 22 nt, Human
caagggauucuccugccucagc

SEQ ID NO: 1259100 - RNA, 20 nt, Human
caagugauucuccugccuca

SEQ ID NO: 1259101 - RNA, 22 nt, Human
caagugauucuccugccucagc

SEQ ID NO: 1259102 - RNA, 24 nt, Human
caaugugcugagaucacaggugug

SEQ ID NO: 1259103 - RNA, 23 nt, Human
caaugugugccaggacugauggg

SEQ ID NO: 1259104 - RNA, 24 nt, Human
cacacuggacauuucaagccccug

SEQ ID NO: 1259105 - RNA, 19 nt, Human
cacagaacucaagggacag

SEQ ID NO: 1259106 - RNA, 19 nt, Human
cacaggugugagccaccac

SEQ ID NO: 1259107 - RNA, 24 nt, Human
cacauuggccaggcuggucucaaa

SEQ ID NO: 1259108 - RNA, 24 nt, Human
caccacaccuggcuaauuuuugua

SEQ ID NO: 1259109 - RNA, 21 nt, Human
caccacauuggccaggcuggu

SEQ ID NO: 1259110 - RNA, 24 nt, Human
caccacauuggccaggcuggucuc

SEQ ID NO: 1259111 - RNA, 27 nt, Human
caccacauuggccaggcuggucucaaa

SEQ ID NO: 1259112 - RNA, 21 nt, Human
cacccugggcuuuaauuauuu

SEQ ID NO: 1259113 - RNA, 21 nt, Human
cacugcaaccuccaccuccug

SEQ ID NO: 1259114 - RNA, 23 nt, Human
cacugcaaccuccaccuccuggg

SEQ ID NO: 1259115 - RNA, 20 nt, Human
cacuggacauuucaagcccc

SEQ ID NO: 1259116 - RNA, 24 nt, Human
cagagucuuacucuguugcccagg

SEQ ID NO: 1259117 - RNA, 20 nt, Human
cagguacaugccaccauacc

SEQ ID NO: 1259118 - RNA, 24 nt, Human
caggugcccaccaccacaccuggc

SEQ ID NO: 1259119 - RNA, 19 nt, Human
cagguucaagggauucucc

SEQ ID NO: 1259120 - RNA, 23 nt, Human
ccaaagcacugauggaccuauca

SEQ ID NO: 1259121 - RNA, 24 nt, Human
ccaaugugcugagaucacaggugu

SEQ ID NO: 1259122 - RNA, 24 nt, Human
ccaccuccugggcucaagugauuc

SEQ ID NO: 1259123 - RNA, 23 nt, Human
cccaaguagcugggaaugcaggu

SEQ ID NO: 1259124 - RNA, 23 nt, Human
cccaggcuggagugcaguggcau

SEQ ID NO: 1259125 - RNA, 23 nt, Human
cccgaguaggugggauuacaggu

SEQ ID NO: 1259126 - RNA, 22 nt, Human
ccuccaccuccugggcucaagu

SEQ ID NO: 1259127 - RNA, 24 nt, Human
ccucccagguucaagggauucucc

SEQ ID NO: 1259128 - RNA, 24 nt, Human
ccuccugggcucaagugauucucc

SEQ ID NO: 1259129 - RNA, 21 nt, Human
ccugaccuaaggugauccgcc

SEQ ID NO: 1259130 - RNA, 23 nt, Human
ccugaccuaaggugauccgccug

SEQ ID NO: 1259131 - RNA, 24 nt, Human
ccugccucagccucccaaguagcu

SEQ ID NO: 1259132 - RNA, 21 nt, Human
ccugccucggccucccaaugu

SEQ ID NO: 1259133 - RNA, 23 nt, Human
ccugggcucaagugauucuccuc

SEQ ID NO: 1259134 - RNA, 23 nt, Human
ccugggcucaagugauucuccug

SEQ ID NO: 1259135 - RNA, 23 nt, Human
cuaaggugauccgccugccucgg

SEQ ID NO: 1259136 - RNA, 23 nt, Human
cuaauuuuuguauuuuuaguaga

SEQ ID NO: 1259137 - RNA, 23 nt, Human
cucaagugauucuccugccucag

SEQ ID NO: 1259138 - RNA, 24 nt, Human
cucaagugauucuccugccucagc

SEQ ID NO: 1259139 - RNA, 24 nt, Human
cucacugcaaccuccaccuccugg

SEQ ID NO: 1259140 - RNA, 26 nt, Human
cucacugcaaccuccaccuccugggc

SEQ ID NO: 1259141 - RNA, 26 nt, Human
cuccugaccuaaggugauccgccugc

SEQ ID NO: 1259142 - RNA, 20 nt, Human
cuccugggcucaagugauuc

SEQ ID NO: 1259143 - RNA, 21 nt, Human
cuccugggcucaagugauucu

SEQ ID NO: 1259144 - RNA, 23 nt, Human
cugcaaccuccaccuccugggcu

SEQ ID NO: 1259145 - RNA, 24 nt, Human
cugcaaccuccaccuccugggcuc

SEQ ID NO: 1259146 - RNA, 21 nt, Human
cugccucagccucccgaguag

SEQ ID NO: 1259147 - RNA, 23 nt, Human
cugccucggccucccaaugugcu

SEQ ID NO: 1259148 - RNA, 21 nt, Human
cuggaucuugauauguguuuc

SEQ ID NO: 1259149 - RNA, 24 nt, Human
cuggggaacccaccucccagguuc

SEQ ID NO: 1259150 - RNA, 19 nt, Human
cuuguggagugggggcugu

SEQ ID NO: 1259151 - RNA, 21 nt, Human
cuuguggagugggggcugugu

SEQ ID NO: 1259152 - RNA, 22 nt, Human
gaaggcagguuugggcuggaga

SEQ ID NO: 1259153 - RNA, 24 nt, Human
gaaugcagguacaugccaccauac

SEQ ID NO: 1259154 - RNA, 19 nt, Human
gacacagaacucaagggac

SEQ ID NO: 1259155 - RNA, 21 nt, Human
gacaggaaggagaugaguugg

SEQ ID NO: 1259156 - RNA, 24 nt, Human
gaccuaaggugauccgccugccuc

SEQ ID NO: 1259157 - RNA, 20 nt, Human
gagaugaguuggaggcuggg

SEQ ID NO: 1259158 - RNA, 20 nt, Human
gagaugggguuucaccacau

SEQ ID NO: 1259159 - RNA, 24 nt, Human
gagaugggguuucaccacauuggc

SEQ ID NO: 1259160 - RNA, 20 nt, Human
gaggcugggacagggguccc

SEQ ID NO: 1259161 - RNA, 19 nt, Human
gaguuggaggcugggacag

SEQ ID NO: 1259162 - RNA, 18 nt, Human
gaucacaggugugagcca

SEQ ID NO: 1259163 - RNA, 22 nt, Human
gauucuccugccucagccuccc

SEQ ID NO: 1259164 - RNA, 21 nt, Human
gcagguacaugccaccauacc

SEQ ID NO: 1259165 - RNA, 20 nt, Human
gccucagccucccaaguagc

SEQ ID NO: 1259166 - RNA, 20 nt, Human
gccugguuuggggaauguuu

SEQ ID NO: 1259167 - RNA, 25 nt, Human
gcuggagugcaguggcaugaucucu

SEQ ID NO: 1259168 - RNA, 25 nt, Human
ggacaggggucccugccagggaugc

SEQ ID NO: 1259169 - RNA, 20 nt, Human
ggagacagacaagauggggg

SEQ ID NO: 1259170 - RNA, 26 nt, Human
gggcaaugugugccaggacugauggg

SEQ ID NO: 1259171 - RNA, 19 nt, Human
gggcuaggaaggcagguuu

SEQ ID NO: 1259172 - RNA, 22 nt, Human
gggcucaagugauucuccugcc

SEQ ID NO: 1259173 - RNA, 22 nt, Human
gggguuucaccacauuggccag

SEQ ID NO: 1259174 - RNA, 19 nt, Human
gugauccgccugccucggc

SEQ ID NO: 1259175 - RNA, 24 nt, Human
gugauucuccugccucagccuccc

SEQ ID NO: 1259176 - RNA, 21 nt, Human
gugcugagaucacagguguga

SEQ ID NO: 1259177 - RNA, 21 nt, Human
gugugagccaccacgcugggc

SEQ ID NO: 1259178 - RNA, 18 nt, Human
uaagacagagucuuacuc

SEQ ID NO: 1259179 - RNA, 22 nt, Human
uaagacagagucuuacucuguu

SEQ ID NO: 1259180 - RNA, 22 nt, Human
uaauuuuuguacuuuuaguaga

SEQ ID NO: 1259181 - RNA, 24 nt, Human
uaauuuuuguauuuuuaguagaga

SEQ ID NO: 1259182 - RNA, 22 nt, Human
uacaggugcccaccaccacacc

SEQ ID NO: 1259183 - RNA, 24 nt, Human
uacucuguugcccaggcuggagug

SEQ ID NO: 1259184 - RNA, 18 nt, Human
uagcugggaaugcaggua

SEQ ID NO: 1259185 - RNA, 19 nt, Human
uaguagagaugggguuuca

SEQ ID NO: 1259186 - RNA, 23 nt, Human
uaguagagaugggguuucaccac

SEQ ID NO: 1259187 - RNA, 26 nt, Human
uaguagagaugggguuucaccacauu

SEQ ID NO: 1259188 - RNA, 19 nt, Human
uauguguuucucaguugga

SEQ ID NO: 1259189 - RNA, 25 nt, Human
uauugugcugggaguacuuguggag

SEQ ID NO: 1259190 - RNA, 24 nt, Human
uauugugcugggaguacuuguggg

SEQ ID NO: 1259191 - RNA, 23 nt, Human
ucacugcaaccuccaccuccugg

SEQ ID NO: 1259192 - RNA, 24 nt, Human
ucacugcaaccuccaccuccuggg

SEQ ID NO: 1259193 - RNA, 25 nt, Human
ucacugcaaccuccaccuccugggc

SEQ ID NO: 1259194 - RNA, 27 nt, Human
ucacugcaaccuccaccuccugggcuc

SEQ ID NO: 1259195 - RNA, 20 nt, Human
ucagccucccaaguagcugg

SEQ ID NO: 1259196 - RNA, 23 nt, Human
ucccaaguagcugggaaugcagg

SEQ ID NO: 1259197 - RNA, 23 nt, Human
ucccaaugugcugagaucacagg

SEQ ID NO: 1259198 - RNA, 24 nt, Human
ucccagguagacagugguugaggc

SEQ ID NO: 1259199 - RNA, 21 nt, Human
ucccagguucaagggauucuc

SEQ ID NO: 1259200 - RNA, 24 nt, Human
ucccagguucaagggauucuccug

SEQ ID NO: 1259201 - RNA, 23 nt, Human
ucccgaguaggugggauuacagg

SEQ ID NO: 1259202 - RNA, 24 nt, Human
ucccgaguaggugggauuacaggu

SEQ ID NO: 1259203 - RNA, 21 nt, Human
uccugggcucaagugauucuc

SEQ ID NO: 1259204 - RNA, 22 nt, Human
uccugggcucaagugauucucc

SEQ ID NO: 1259205 - RNA, 24 nt, Human
uccugggcucaagugauucuccug

SEQ ID NO: 1259206 - RNA, 22 nt, Human
ucuagacuccauccuccauccc

SEQ ID NO: 1259207 - RNA, 19 nt, Human
ucuccugccucagccuccc

SEQ ID NO: 1259208 - RNA, 26 nt, Human
ucuccugccucagccucccaaguagc

SEQ ID NO: 1259209 - RNA, 24 nt, Human
ucuguugcccaggcuggagugcag

SEQ ID NO: 1259210 - RNA, 23 nt, Human
ucuuacucuguugcccaggcugg

SEQ ID NO: 1259211 - RNA, 24 nt, Human
ucuuacucuguugcccaggcugga

SEQ ID NO: 1259212 - RNA, 19 nt, Human
ugacacagaacucaaggga

SEQ ID NO: 1259213 - RNA, 18 nt, Human
ugacagagaggggcaagg

SEQ ID NO: 1259214 - RNA, 18 nt, Human
ugaccuaaggugauccgc

SEQ ID NO: 1259215 - RNA, 24 nt, Human
ugaccuaaggugauccgccugccu

SEQ ID NO: 1259216 - RNA, 18 nt, Human
ugacguuggacucacugg

SEQ ID NO: 1259217 - RNA, 22 nt, Human
ugagaucacaggugugagccac

SEQ ID NO: 1259218 - RNA, 24 nt, Human
ugagaucacaggugugagccacca

SEQ ID NO: 1259219 - RNA, 23 nt, Human
ugaucucugcucacugcaaccuc

SEQ ID NO: 1259220 - RNA, 20 nt, Human
ugauucuccugccucagccu

SEQ ID NO: 1259221 - RNA, 18 nt, Human
ugcccaggcuggagugca

SEQ ID NO: 1259222 - RNA, 21 nt, Human
ugcccaggcuggagugcagug

SEQ ID NO: 1259223 - RNA, 22 nt, Human
ugcccaggcuggagugcagugg

SEQ ID NO: 1259224 - RNA, 24 nt, Human
ugcccaggcuggagugcaguggca

SEQ ID NO: 1259225 - RNA, 24 nt, Human
ugccucagccucccaaguagcugg

SEQ ID NO: 1259226 - RNA, 24 nt, Human
ugccucagccucccgaguaggugg

SEQ ID NO: 1259227 - RNA, 21 nt, Human
ugccucggccucccaaugugc

SEQ ID NO: 1259228 - RNA, 24 nt, Human
ugccucggccucccaaugugcuga

SEQ ID NO: 1259229 - RNA, 22 nt, Human
ugccugggaugagaguggagac

SEQ ID NO: 1259230 - RNA, 24 nt, Human
ugcugagaucacaggugugagcca

SEQ ID NO: 1259231 - RNA, 19 nt, Human
uggagugcaguggcaugau

SEQ ID NO: 1259232 - RNA, 22 nt, Human
uggagugcaguggcaugaucuc

SEQ ID NO: 1259233 - RNA, 23 nt, Human
uggagugcaguggcaugaucucu

SEQ ID NO: 1259234 - RNA, 24 nt, Human
uggagugcaguggcaugaucucug

SEQ ID NO: 1259235 - RNA, 20 nt, Human
uggcagugucaggcaaggac

SEQ ID NO: 1259236 - RNA, 24 nt, Human
uggccaggcuggucucaaacuccu

SEQ ID NO: 1259237 - RNA, 22 nt, Human
ugggaaugcagguacaugccac

SEQ ID NO: 1259238 - RNA, 24 nt, Human
ugggaaugcagguacaugccacca

SEQ ID NO: 1259239 - RNA, 20 nt, Human
ugggaugagaguggagacag

SEQ ID NO: 1259240 - RNA, 21 nt, Human
ugggauuacaggugcccacca

SEQ ID NO: 1259241 - RNA, 24 nt, Human
ugggauuacaggugcccaccacca

SEQ ID NO: 1259242 - RNA, 18 nt, Human
ugggcucaagugauucuc

SEQ ID NO: 1259243 - RNA, 24 nt, Human
ugggcucaagugauucuccugccu

SEQ ID NO: 1259244 - RNA, 20 nt, Human
ugggcuggagacucaggcuu

SEQ ID NO: 1259245 - RNA, 22 nt, Human
ugggggcugugucacccugggc

SEQ ID NO: 1259246 - RNA, 24 nt, Human
ugggguuucaccacauuggccagg

SEQ ID NO: 1259247 - RNA, 25 nt, Human
uggucaagucugaucucagggcugg

SEQ ID NO: 1259248 - RNA, 21 nt, Human
uguauuuuuaguagagauggg

SEQ ID NO: 1259249 - RNA, 22 nt, Human
ugugacacagaacucaagggac

SEQ ID NO: 1259250 - RNA, 24 nt, Human
uuacucuguugcccaggcuggagu

SEQ ID NO: 1259251 - RNA, 18 nt, Human
uuaguagagaugggguuu

SEQ ID NO: 1259252 - RNA, 22 nt, Human
uuaguagagaugggguuucacc

SEQ ID NO: 1259253 - RNA, 25 nt, Human
uuaguagagaugggguuucaccaca

SEQ ID NO: 1259254 - RNA, 23 nt, Human
uucaagggauucuccugccucag

SEQ ID NO: 1259255 - RNA, 18 nt, Human
uucuucuuguggccucug

SEQ ID NO: 1259256 - RNA, 19 nt, Human
uugauauguguuucucagu

SEQ ID NO: 1259257 - RNA, 24 nt, Human
uugcccaggcuggagugcaguggc

SEQ ID NO: 1259258 - RNA, 19 nt, Human
uugcuugggacccaggggg

SEQ ID NO: 1259259 - RNA, 20 nt, Human
uuggaggcugggacaggggu

SEQ ID NO: 1259260 - RNA, 21 nt, Human
uugggaggcaucccagguaga

SEQ ID NO: 1259261 - RNA, 23 nt, Human
uuguauuuuuaguagagaugggg

SEQ ID NO: 1259262 - RNA, 24 nt, Human
uuuuuaguagagaugggguuucac

SEQ ID NO: 1259263 - RNA, 21 nt, Human
uuuuucuucuuguggccucug

SEQ ID NO: 1259264 - RNA, 20 nt, Human
uuuuuguacuuuuaguagag

SEQ ID NO: 1259265 - RNA, 20 nt, Human
uuuuuguauuuuuaguagag

SEQ ID NO: 1259266 - RNA, 20 nt, Human
uuuuuuuuaagacagagucu

SEQ ID NO: 1259267 - RNA, 21 nt, Human
aaaaagacauucuuggccuuu

SEQ ID NO: 1259268 - RNA, 19 nt, Human
aaaagacaaaaugacaaca

SEQ ID NO: 1259269 - RNA, 22 nt, Human
aaaggcagcaguagcccagaac

SEQ ID NO: 1259270 - RNA, 19 nt, Human
aacauuccacauaauauua

SEQ ID NO: 1259271 - RNA, 20 nt, Human
aaccuggucccucccucugg

SEQ ID NO: 1259272 - RNA, 26 nt, Human
aacgcuggggagcagagucaaggggc

SEQ ID NO: 1259273 - RNA, 22 nt, Human
aacucagaacgcuggggagcag

SEQ ID NO: 1259274 - RNA, 22 nt, Human
aacucccccccaccccagaagc

SEQ ID NO: 1259275 - RNA, 23 nt, Human
aacuccgccccaccccucccccg

SEQ ID NO: 1259276 - RNA, 24 nt, Human
aagaggcagagcccggagacaggc

SEQ ID NO: 1259277 - RNA, 22 nt, Human
aagcaaccugcccaaggucucc

SEQ ID NO: 1259278 - RNA, 25 nt, Human
aagcugcaggucugggccaaaugca

SEQ ID NO: 1259279 - RNA, 22 nt, Human
aaggacccaggagagugcggag

SEQ ID NO: 1259280 - RNA, 23 nt, Human
aaggccccuucaggccccugccc

SEQ ID NO: 1259281 - RNA, 22 nt, Human
aagggugagagaggcacaggcg

SEQ ID NO: 1259282 - RNA, 23 nt, Human
acaaccaguaagaggcagagccc

SEQ ID NO: 1259283 - RNA, 19 nt, Human
acaaguaguuuaggucagg

SEQ ID NO: 1259284 - RNA, 22 nt, Human
acaccgggauucccagggccca

SEQ ID NO: 1259285 - RNA, 23 nt, Human
acaccgggauucccagggcccac

SEQ ID NO: 1259286 - RNA, 21 nt, Human
accaggugccauuagcauccc

SEQ ID NO: 1259287 - RNA, 18 nt, Human
accaguaagaggcagagc

SEQ ID NO: 1259288 - RNA, 21 nt, Human
acccacagcgagcacccagga

SEQ ID NO: 1259289 - RNA, 18 nt, Human
accccccuguccccaccc

SEQ ID NO: 1259290 - RNA, 19 nt, Human
accgaugcugggcccuggg

SEQ ID NO: 1259291 - RNA, 19 nt, Human
accuccccucaccggucac

SEQ ID NO: 1259292 - RNA, 21 nt, Human
acuccgccccaccccuccccc

SEQ ID NO: 1259293 - RNA, 18 nt, Human
acuccuuacaaccucaca

SEQ ID NO: 1259294 - RNA, 20 nt, Human
agaaggaagagguuuauuca

SEQ ID NO: 1259295 - RNA, 22 nt, Human
agaaggaagagguuuauucagc

SEQ ID NO: 1259296 - RNA, 22 nt, Human
agacaggccugaugguggcucg

SEQ ID NO: 1259297 - RNA, 18 nt, Human
agagggaaggaggaaagg

SEQ ID NO: 1259298 - RNA, 18 nt, Human
agcaagagaccuccccuc

SEQ ID NO: 1259299 - RNA, 21 nt, Human
agcaauagugaggagggaggc

SEQ ID NO: 1259300 - RNA, 18 nt, Human
agccuccagcccgcccag

SEQ ID NO: 1259301 - RNA, 23 nt, Human
agccuucugcucuucuggauuug

SEQ ID NO: 1259302 - RNA, 18 nt, Human
agcuacacugcaggagau

SEQ ID NO: 1259303 - RNA, 21 nt, Human
aggaaaccgaggcagagaagg

SEQ ID NO: 1259304 - RNA, 21 nt, Human
aggaagaaugagagaacgggc

SEQ ID NO: 1259305 - RNA, 19 nt, Human
aggaagaugguggguucag

SEQ ID NO: 1259306 - RNA, 21 nt, Human
aggacccaggagagugcggag

SEQ ID NO: 1259307 - RNA, 24 nt, Human
aggagcucaguucaaaaucacagc

SEQ ID NO: 1259308 - RNA, 22 nt, Human
aggaggaaacagaaaaauagga

SEQ ID NO: 1259309 - RNA, 25 nt, Human
aggaggaagggcagcuuggcagagc

SEQ ID NO: 1259310 - RNA, 23 nt, Human
aggaguucccuauucuguguguc

SEQ ID NO: 1259311 - RNA, 19 nt, Human
aggcaaggugguaggagga

SEQ ID NO: 1259312 - RNA, 24 nt, Human
aggcaaggugguaggaggagggca

SEQ ID NO: 1259313 - RNA, 19 nt, Human
aggcagaaaggaggaaaca

SEQ ID NO: 1259314 - RNA, 29 nt, Human
aggcagaaaggaggaaacagaagggaccc

SEQ ID NO: 1259315 - RNA, 18 nt, Human
aggcagcaguagcccaga

SEQ ID NO: 1259316 - RNA, 19 nt, Human
aggcagcaguagcccagaa

SEQ ID NO: 1259317 - RNA, 18 nt, Human
aggcaguggcagagcagg

SEQ ID NO: 1259318 - RNA, 19 nt, Human
agggaggugggagcugagg

SEQ ID NO: 1259319 - RNA, 21 nt, Human
aggggaggcauugagggaagg

SEQ ID NO: 1259320 - RNA, 23 nt, Human
aggggguucauaaggcagaaagg

SEQ ID NO: 1259321 - RNA, 20 nt, Human
agguggguagaguguaacca

SEQ ID NO: 1259322 - RNA, 21 nt, Human
auaacauuccacauaauauua

SEQ ID NO: 1259323 - RNA, 25 nt, Human
auaaggcagaaaggaggaaacagaa

SEQ ID NO: 1259324 - RNA, 18 nt, Human
aucagccccuggaccuca

SEQ ID NO: 1259325 - RNA, 19 nt, Human
auguguccuguggcccugg

SEQ ID NO: 1259326 - RNA, 18 nt, Human
caaaacacccagagcuga

SEQ ID NO: 1259327 - RNA, 20 nt, Human
caaaacacccagagcugacc

SEQ ID NO: 1259328 - RNA, 24 nt, Human
caaccugcccaaggucuccccacu

SEQ ID NO: 1259329 - RNA, 23 nt, Human
caacucccccccaccccagaagc

SEQ ID NO: 1259330 - RNA, 18 nt, Human
caagagaccuccccucac

SEQ ID NO: 1259331 - RNA, 21 nt, Human
caagcaaccugcccaaggucu

SEQ ID NO: 1259332 - RNA, 19 nt, Human
caaugccagggcugguugc

SEQ ID NO: 1259333 - RNA, 22 nt, Human
cacaaccaguaagaggcagagc

SEQ ID NO: 1259334 - RNA, 18 nt, Human
cacaccgggauucccagg

SEQ ID NO: 1259335 - RNA, 20 nt, Human
cacacugguccagcagggcc

SEQ ID NO: 1259336 - RNA, 24 nt, Human
cacagaugaggaaaccgaggcaga

SEQ ID NO: 1259337 - RNA, 19 nt, Human
caccaaugaggggauacgc

SEQ ID NO: 1259338 - RNA, 21 nt, Human
caccacggguccuuggcaccg

SEQ ID NO: 1259339 - RNA, 19 nt, Human
caccaggcaguggcagagc

SEQ ID NO: 1259340 - RNA, 21 nt, Human
caccaggcaguggcagagcag

SEQ ID NO: 1259341 - RNA, 21 nt, Human
caccccacaccgggauuccca

SEQ ID NO: 1259342 - RNA, 22 nt, Human
caccccucccacagcuggccua

SEQ ID NO: 1259343 - RNA, 22 nt, Human
cacucuguucccggagccugug

SEQ ID NO: 1259344 - RNA, 25 nt, Human
cacugcaggagaucagaaucggaga

SEQ ID NO: 1259345 - RNA, 23 nt, Human
cagaacauucaaccuggucccuc

SEQ ID NO: 1259346 - RNA, 20 nt, Human
cagaacuccaucccccacag

SEQ ID NO: 1259347 - RNA, 23 nt, Human
cagcaagagaccuccccucaccg

SEQ ID NO: 1259348 - RNA, 23 nt, Human
cagcaguagcccagaacauucaa

SEQ ID NO: 1259349 - RNA, 24 nt, Human
cagcaguagcccagaacauucaac

SEQ ID NO: 1259350 - RNA, 27 nt, Human
cagccaggaggaagggcagcuuggcag

SEQ ID NO: 1259351 - RNA, 18 nt, Human
cagcccgcccagagccag

SEQ ID NO: 1259352 - RNA, 23 nt, Human
cagccuugggucugccguccagg

SEQ ID NO: 1259353 - RNA, 18 nt, Human
cagggccaccaggcagag

SEQ ID NO: 1259354 - RNA, 19 nt, Human
cagggccaggugguggcgc

SEQ ID NO: 1259355 - RNA, 22 nt, Human
caggggucuccucccugagccc

SEQ ID NO: 1259356 - RNA, 22 nt, Human
cagggugauguccuugucuccc

SEQ ID NO: 1259357 - RNA, 24 nt, Human
cauaaggcagaaaggaggaaacag

SEQ ID NO: 1259358 - RNA, 23 nt, Human
cauccccauuucacagaugagga

SEQ ID NO: 1259359 - RNA, 20 nt, Human
caucccuguccucaguuggg

SEQ ID NO: 1259360 - RNA, 23 nt, Human
caugaaaauccagcuuaaggcca

SEQ ID NO: 1259361 - RNA, 21 nt, Human
ccacaaccaguaagaggcaga

SEQ ID NO: 1259362 - RNA, 21 nt, Human
ccacaguccaccauucacguu

SEQ ID NO: 1259363 - RNA, 19 nt, Human
ccaccccucccccggggac

SEQ ID NO: 1259364 - RNA, 22 nt, Human
ccagggcccacugccccacucc

SEQ ID NO: 1259365 - RNA, 26 nt, Human
ccaggggucuccucccugagcccucc

SEQ ID NO: 1259366 - RNA, 22 nt, Human
cccaccccacaccgggauuccc

SEQ ID NO: 1259367 - RNA, 23 nt, Human
cccaggauccccccaaucucagg

SEQ ID NO: 1259368 - RNA, 20 nt, Human
cccagugucccuucccccaa

SEQ ID NO: 1259369 - RNA, 21 nt, Human
ccccaaggacuuggcugccca

SEQ ID NO: 1259370 - RNA, 18 nt, Human
ccccacucuguucccgga

SEQ ID NO: 1259371 - RNA, 20 nt, Human
ccccagagacccuugggccc

SEQ ID NO: 1259372 - RNA, 22 nt, Human
ccccagagacccuugggcccau

SEQ ID NO: 1259373 - RNA, 22 nt, Human
ccccagcccagugucccuuccc

SEQ ID NO: 1259374 - RNA, 19 nt, Human
ccccaggggucuccucccu

SEQ ID NO: 1259375 - RNA, 23 nt, Human
cccccaaggacuuggcugcccau

SEQ ID NO: 1259376 - RNA, 18 nt, Human
cccccaggcccucuaccc

SEQ ID NO: 1259377 - RNA, 18 nt, Human
cccccccaccccagaagc

SEQ ID NO: 1259378 - RNA, 18 nt, Human
cccccuguccccacccuc

SEQ ID NO: 1259379 - RNA, 25 nt, Human
cccccuguccccacccucagcaggc

SEQ ID NO: 1259380 - RNA, 20 nt, Human
ccccucaccggucaccccuc

SEQ ID NO: 1259381 - RNA, 23 nt, Human
ccccucagcucggagcucagccc

SEQ ID NO: 1259382 - RNA, 20 nt, Human
cccucagugggcggccgugg

SEQ ID NO: 1259383 - RNA, 23 nt, Human
cccucuacccaccauguucaguc

SEQ ID NO: 1259384 - RNA, 23 nt, Human
cccucugucaccacaucccuguc

SEQ ID NO: 1259385 - RNA, 21 nt, Human
cccugccccaggggucuccuc

SEQ ID NO: 1259386 - RNA, 22 nt, Human
cccugccugccagcucuggcug

SEQ ID NO: 1259387 - RNA, 19 nt, Human
cccuggaccucaguggcuc

SEQ ID NO: 1259388 - RNA, 24 nt, Human
cccugggcacucccugggggccuc

SEQ ID NO: 1259389 - RNA, 19 nt, Human
cccuugggcccaucagccc

SEQ ID NO: 1259390 - RNA, 22 nt, Human
cccuugggcccaucagccccug

SEQ ID NO: 1259391 - RNA, 21 nt, Human
ccgcuugccaggguccugccc

SEQ ID NO: 1259392 - RNA, 19 nt, Human
ccggagccugugggcaccc

SEQ ID NO: 1259393 - RNA, 21 nt, Human
ccgggggcugcaugcgucagc

SEQ ID NO: 1259394 - RNA, 22 nt, Human
ccuaccggaguccacccagccu

SEQ ID NO: 1259395 - RNA, 20 nt, Human
ccucaggcugccccucagcu

SEQ ID NO: 1259396 - RNA, 24 nt, Human
ccuccuccucaggcugccccucag

SEQ ID NO: 1259397 - RNA, 18 nt, Human
ccuccuccucaggcuggc

SEQ ID NO: 1259398 - RNA, 20 nt, Human
ccuccuccucaggcuggccc

SEQ ID NO: 1259399 - RNA, 26 nt, Human
ccuccugccuucccaucccagcugca

SEQ ID NO: 1259400 - RNA, 22 nt, Human
ccuccugucuuguaaaccaggc

SEQ ID NO: 1259401 - RNA, 20 nt, Human
ccugcagaacuccauccccc

SEQ ID NO: 1259402 - RNA, 21 nt, Human
ccugcagaccggagcaggucc

SEQ ID NO: 1259403 - RNA, 19 nt, Human
ccugccagcucuggcuggc

SEQ ID NO: 1259404 - RNA, 22 nt, Human
ccugcccugggcacucccuggg

SEQ ID NO: 1259405 - RNA, 21 nt, Human
ccuggcccccaggccagagga

SEQ ID NO: 1259406 - RNA, 21 nt, Human
ccuggcuccccaagggagggg

SEQ ID NO: 1259407 - RNA, 18 nt, Human
ccugugggcacccacagc

SEQ ID NO: 1259408 - RNA, 21 nt, Human
ccuuaggggaggcauugaggg

SEQ ID NO: 1259409 - RNA, 25 nt, Human
ccuucaggccccugccccagggguc

SEQ ID NO: 1259410 - RNA, 21 nt, Human
ccuucccaucccagcugcagg

SEQ ID NO: 1259411 - RNA, 22 nt, Human
ccuucggcucugauuccaccuu

SEQ ID NO: 1259412 - RNA, 18 nt, Human
ccuucucucuuuccuccu

SEQ ID NO: 1259413 - RNA, 24 nt, Human
ccuugggucugccguccaggcccc

SEQ ID NO: 1259414 - RNA, 21 nt, Human
ccuugucuccccaacacccac

SEQ ID NO: 1259415 - RNA, 24 nt, Human
cgccccaccccucccccggggacu

SEQ ID NO: 1259416 - RNA, 26 nt, Human
cgcccucucccuucggcucugauucc

SEQ ID NO: 1259417 - RNA, 22 nt, Human
cggggucccagugcuugaauuc

SEQ ID NO: 1259418 - RNA, 24 nt, Human
cguccaggccccagcccagugucc

SEQ ID NO: 1259419 - RNA, 26 nt, Human
cuaggccccuacccugccugccagcu

SEQ ID NO: 1259420 - RNA, 23 nt, Human
cucaccggucaccccucccacag

SEQ ID NO: 1259421 - RNA, 25 nt, Human
cucagccuccaucuccuucaguggg

SEQ ID NO: 1259422 - RNA, 20 nt, Human
cucccacagcuggccuaccg

SEQ ID NO: 1259423 - RNA, 19 nt, Human
cucccugagcccuccucug

SEQ ID NO: 1259424 - RNA, 18 nt, Human
cuccugccuucccauccc

SEQ ID NO: 1259425 - RNA, 18 nt, Human
cuccugggucucaguccu

SEQ ID NO: 1259426 - RNA, 19 nt, Human
cuccuucaguggggugaau

SEQ ID NO: 1259427 - RNA, 19 nt, Human
cucuccuccuccuccucag

SEQ ID NO: 1259428 - RNA, 23 nt, Human
cucugagccucagccuccaucuc

SEQ ID NO: 1259429 - RNA, 21 nt, Human
cugaccaggcucucaguagca

SEQ ID NO: 1259430 - RNA, 19 nt, Human
cugauuccaccuccugccu

SEQ ID NO: 1259431 - RNA, 18 nt, Human
cugcacagccucuccucc

SEQ ID NO: 1259432 - RNA, 21 nt, Human
cugcugcacagccucuccucc

SEQ ID NO: 1259433 - RNA, 21 nt, Human
cuggaaucuccugcuucccgg

SEQ ID NO: 1259434 - RNA, 21 nt, Human
cuggcccucagcucagugcuc

SEQ ID NO: 1259435 - RNA, 23 nt, Human
cuggggagcagagucaaggggcc

SEQ ID NO: 1259436 - RNA, 19 nt, Human
cuugcagccuccagcccgc

SEQ ID NO: 1259437 - RNA, 23 nt, Human
gaaauaagggagauguggacagg

SEQ ID NO: 1259438 - RNA, 19 nt, Human
gaagaugguggguucagcc

SEQ ID NO: 1259439 - RNA, 22 nt, Human
gaaggcugggaguggggggucg

SEQ ID NO: 1259440 - RNA, 22 nt, Human
gacauuucuuaacagcagggcc

SEQ ID NO: 1259441 - RNA, 19 nt, Human
gaccauggugccuguccug

SEQ ID NO: 1259442 - RNA, 19 nt, Human
gacccaggagagugcggag

SEQ ID NO: 1259443 - RNA, 18 nt, Human
gaccuggucaccccccug

SEQ ID NO: 1259444 - RNA, 20 nt, Human
gagcaggaagaugguggguu

SEQ ID NO: 1259445 - RNA, 19 nt, Human
gagccagagucaggcacga

SEQ ID NO: 1259446 - RNA, 23 nt, Human
gagcgggacagccaggaggaagg

SEQ ID NO: 1259447 - RNA, 20 nt, Human
gagcucccggcccacagucc

SEQ ID NO: 1259448 - RNA, 21 nt, Human
gaggaaagggacucggagagg

SEQ ID NO: 1259449 - RNA, 22 nt, Human
gaggcagucucagaccccacaa

SEQ ID NO: 1259450 - RNA, 18 nt, Human
gaggcuggggcuguagug

SEQ ID NO: 1259451 - RNA, 19 nt, Human
gagggggaaauaagggaga

SEQ ID NO: 1259452 - RNA, 20 nt, Human
gagucaggcacgaggcuagg

SEQ ID NO: 1259453 - RNA, 25 nt, Human
gaugaggaaacugaggcaggaagaa

SEQ ID NO: 1259454 - RNA, 24 nt, Human
gcagagcgggacagccaggaggaa

SEQ ID NO: 1259455 - RNA, 19 nt, Human
gcagcaauagugaggaggg

SEQ ID NO: 1259456 - RNA, 18 nt, Human
gcaguggcagagcagggg

SEQ ID NO: 1259457 - RNA, 18 nt, Human
gcauuuggcaugagugcc

SEQ ID NO: 1259458 - RNA, 19 nt, Human
gccaaaugcaccucaaccu

SEQ ID NO: 1259459 - RNA, 19 nt, Human
gcccaaggucccacaacca

SEQ ID NO: 1259460 - RNA, 20 nt, Human
gcccagggacggucccugcu

SEQ ID NO: 1259461 - RNA, 21 nt, Human
gccccagagacccuugggccc

SEQ ID NO: 1259462 - RNA, 19 nt, Human
gccccaggggucuccuccc

SEQ ID NO: 1259463 - RNA, 31 nt, Human
gccccugccccaggggucuccucccugagcc

SEQ ID NO: 1259464 - RNA, 19 nt, Human
gcccugggcacucccuggg

SEQ ID NO: 1259465 - RNA, 21 nt, Human
gcccugggcacucccuggggg

SEQ ID NO: 1259466 - RNA, 21 nt, Human
gccgcgggggugggcuugggg

SEQ ID NO: 1259467 - RNA, 20 nt, Human
gccuggccccacaaucacuc

SEQ ID NO: 1259468 - RNA, 23 nt, Human
gcggacugcuuuuuucuaagggg

SEQ ID NO: 1259469 - RNA, 24 nt, Human
gcgugguuugccuuugaccacugg

SEQ ID NO: 1259470 - RNA, 19 nt, Human
gcuauucugggccauaaca

SEQ ID NO: 1259471 - RNA, 19 nt, Human
gcugagcuuugggaggccu

SEQ ID NO: 1259472 - RNA, 21 nt, Human
gcugcccagcacccucgggag

SEQ ID NO: 1259473 - RNA, 21 nt, Human
gcugcugagcuuugggaggcc

SEQ ID NO: 1259474 - RNA, 20 nt, Human
gcugguccugcccuggcccc

SEQ ID NO: 1259475 - RNA, 23 nt, Human
ggaagaaugagagaacgggcaga

SEQ ID NO: 1259476 - RNA, 20 nt, Human
ggaauccaaacagcaagaga

SEQ ID NO: 1259477 - RNA, 20 nt, Human
ggaggcauugagggaaggcu

SEQ ID NO: 1259478 - RNA, 22 nt, Human
ggaggccgaggaaauggaaucc

SEQ ID NO: 1259479 - RNA, 24 nt, Human
ggaggcuggggcuguagugggccg

SEQ ID NO: 1259480 - RNA, 23 nt, Human
ggaggggcugcugagcuuuggga

SEQ ID NO: 1259481 - RNA, 20 nt, Human
ggaggugggagcugaggugg

SEQ ID NO: 1259482 - RNA, 23 nt, Human
ggauacgcuggucccuggcuccc

SEQ ID NO: 1259483 - RNA, 22 nt, Human
ggcaacuccgccccaccccucc

SEQ ID NO: 1259484 - RNA, 19 nt, Human
ggcaguggcagagcagggg

SEQ ID NO: 1259485 - RNA, 22 nt, Human
ggcccaggauccccccaaucuc

SEQ ID NO: 1259486 - RNA, 18 nt, Human
ggcuccugaccaggcucu

SEQ ID NO: 1259487 - RNA, 21 nt, Human
gggacggucccugcugugagg

SEQ ID NO: 1259488 - RNA, 20 nt, Human
gggcacaacagcaaauguuu

SEQ ID NO: 1259489 - RNA, 20 nt, Human
gggcccacugccccacuccu

SEQ ID NO: 1259490 - RNA, 19 nt, Human
gggcuggguuggcccgagc

SEQ ID NO: 1259491 - RNA, 22 nt, Human
gggucccccaggcccucuaccc

SEQ ID NO: 1259492 - RNA, 18 nt, Human
ggguccuuggcaccaggc

SEQ ID NO: 1259493 - RNA, 20 nt, Human
ggucccccaggcccucuacc

SEQ ID NO: 1259494 - RNA, 27 nt, Human
guagaguaucccggggaggcuggggcu

SEQ ID NO: 1259495 - RNA, 22 nt, Human
guggcagcaauagugaggaggg

SEQ ID NO: 1259496 - RNA, 18 nt, Human
guggcucuagccuggcgc

SEQ ID NO: 1259497 - RNA, 19 nt, Human
gugggcugccuggaggaag

SEQ ID NO: 1259498 - RNA, 22 nt, Human
guggguucagccuggccccaca

SEQ ID NO: 1259499 - RNA, 22 nt, Human
gugguggugaaaugagcgaggg

SEQ ID NO: 1259500 - RNA, 19 nt, Human
guuccuccccacucuguuc

SEQ ID NO: 1259501 - RNA, 18 nt, Human
uaaacccaggucauuggg

SEQ ID NO: 1259502 - RNA, 21 nt, Human
uaacacaaguaguuuagguca

SEQ ID NO: 1259503 - RNA, 24 nt, Human
uaacagcagggccaccaggcagag

SEQ ID NO: 1259504 - RNA, 21 nt, Human
uaacaugagaggcuucaagca

SEQ ID NO: 1259505 - RNA, 24 nt, Human
uaagcaguguggggaguggcagca

SEQ ID NO: 1259506 - RNA, 21 nt, Human
uaaguaggcacagaggggccu

SEQ ID NO: 1259507 - RNA, 22 nt, Human
uaaguaggcacagaggggccug

SEQ ID NO: 1259508 - RNA, 23 nt, Human
uaaguaggcacagaggggccugc

SEQ ID NO: 1259509 - RNA, 23 nt, Human
uacaauaauaguuccccacccca

SEQ ID NO: 1259510 - RNA, 19 nt, Human
uacauccguccuccaugga

SEQ ID NO: 1259511 - RNA, 18 nt, Human
uagcaaaacacccagagc

SEQ ID NO: 1259512 - RNA, 23 nt, Human
uagcaaaacacccagagcugacc

SEQ ID NO: 1259513 - RNA, 24 nt, Human
uagccuucugcucuucuggauuug

SEQ ID NO: 1259514 - RNA, 19 nt, Human
uaggaaacaccaaaccgcc

SEQ ID NO: 1259515 - RNA, 24 nt, Human
uaggcacagaggggccugccuccc

SEQ ID NO: 1259516 - RNA, 23 nt, Human
uaggccccuacccugccugccag

SEQ ID NO: 1259517 - RNA, 23 nt, Human
uagugauccccgccuucuggcug

SEQ ID NO: 1259518 - RNA, 23 nt, Human
uaucaggcaagcucuggcccucu

SEQ ID NO: 1259519 - RNA, 23 nt, Human
ucaccacggguccuuggcaccag

SEQ ID NO: 1259520 - RNA, 18 nt, Human
ucacuccagcugagggcu

SEQ ID NO: 1259521 - RNA, 19 nt, Human
ucagccaagcugagaucug

SEQ ID NO: 1259522 - RNA, 20 nt, Human
ucagccccguuccuccccac

SEQ ID NO: 1259523 - RNA, 18 nt, Human
ucaggccccugccccagg

SEQ ID NO: 1259524 - RNA, 22 nt, Human
ucagggagccgaggcuguucag

SEQ ID NO: 1259525 - RNA, 19 nt, Human
ucagugcucagcccugcug

SEQ ID NO: 1259526 - RNA, 18 nt, Human
uccaaugugaggagcugg

SEQ ID NO: 1259527 - RNA, 23 nt, Human
uccacauaauauuauaauagaau

SEQ ID NO: 1259528 - RNA, 23 nt, Human
uccagagugagugacccguaggg

SEQ ID NO: 1259529 - RNA, 21 nt, Human
ucccacagcuggccuaccgga

SEQ ID NO: 1259530 - RNA, 30 nt, Human
uccccaacacccaccuuggaucaaggcccc

SEQ ID NO: 1259531 - RNA, 24 nt, Human
ucccccccaccccagaagcugcag

SEQ ID NO: 1259532 - RNA, 22 nt, Human
ucccggagaaacuggucugugg

SEQ ID NO: 1259533 - RNA, 27 nt, Human
ucccggagccugugggcaacucagaga

SEQ ID NO: 1259534 - RNA, 20 nt, Human
ucccggggaggcuggggcug

SEQ ID NO: 1259535 - RNA, 21 nt, Human
ucccuauucuguguguccaca

SEQ ID NO: 1259536 - RNA, 19 nt, Human
ucccucagugggcggccgu

SEQ ID NO: 1259537 - RNA, 22 nt, Human
ucccucuggaccuggucacccc

SEQ ID NO: 1259538 - RNA, 25 nt, Human
ucccugaaaaagacauucuuggccu

SEQ ID NO: 1259539 - RNA, 18 nt, Human
ucccugggggccucaguc

SEQ ID NO: 1259540 - RNA, 19 nt, Human
ucccugggggccucagucc

SEQ ID NO: 1259541 - RNA, 21 nt, Human
ucccuguccucaguugggucu

SEQ ID NO: 1259542 - RNA, 21 nt, Human
ucccugugauaugucagcccc

SEQ ID NO: 1259543 - RNA, 24 nt, Human
uccugcccuggcccccaggccaga

SEQ ID NO: 1259544 - RNA, 21 nt, Human
uccugggucucaguccugcuc

SEQ ID NO: 1259545 - RNA, 23 nt, Human
uccuugucuccccaacacccacc

SEQ ID NO: 1259546 - RNA, 21 nt, Human
ucgaggcccccgagggaggcg

SEQ ID NO: 1259547 - RNA, 22 nt, Human
ucucagggugauguccuugucu

SEQ ID NO: 1259548 - RNA, 18 nt, Human
ucuccccaacacccaccu

SEQ ID NO: 1259549 - RNA, 19 nt, Human
ucuccccacucacacaugu

SEQ ID NO: 1259550 - RNA, 20 nt, Human
ucucugagccucagccucca

SEQ ID NO: 1259551 - RNA, 22 nt, Human
ucugccguccaggccccagccc

SEQ ID NO: 1259552 - RNA, 22 nt, Human
ucugggaggagaugucgaggcc

SEQ ID NO: 1259553 - RNA, 25 nt, Human
ucuucuggauuuggguuuuccaaaa

SEQ ID NO: 1259554 - RNA, 25 nt, Human
ugaaaaagacauucuuggccuuuuu

SEQ ID NO: 1259555 - RNA, 23 nt, Human
ugaaaucuuggcuugcagccucc

SEQ ID NO: 1259556 - RNA, 18 nt, Human
ugagaggaaguggcuggu

SEQ ID NO: 1259557 - RNA, 20 nt, Human
ugagaguagaauggagaagg

SEQ ID NO: 1259558 - RNA, 21 nt, Human
ugagaguagaauggagaagga

SEQ ID NO: 1259559 - RNA, 20 nt, Human
ugagcgagggcaggcauggg

SEQ ID NO: 1259560 - RNA, 19 nt, Human
ugaggaaaccgaggcagag

SEQ ID NO: 1259561 - RNA, 21 nt, Human
ugaggaaacugaggcaggaag

SEQ ID NO: 1259562 - RNA, 20 nt, Human
ugagggaggugggagcugag

SEQ ID NO: 1259563 - RNA, 21 nt, Human
ugagggaggugggagcugagg

SEQ ID NO: 1259564 - RNA, 18 nt, Human
ugagggcuggccuggggc

SEQ ID NO: 1259565 - RNA, 23 nt, Human
ugagugacccguaggggcaaugc

SEQ ID NO: 1259566 - RNA, 21 nt, Human
ugagugccuccauuuugguuu

SEQ ID NO: 1259567 - RNA, 18 nt, Human
ugauguggcaacuccccc

SEQ ID NO: 1259568 - RNA, 19 nt, Human
ugcacagccucuccuccuc

SEQ ID NO: 1259569 - RNA, 18 nt, Human
ugcagagauucuuacaaa

SEQ ID NO: 1259570 - RNA, 21 nt, Human
ugccaggguccugcccugggc

SEQ ID NO: 1259571 - RNA, 20 nt, Human
ugcccaaggucuccccacuc

SEQ ID NO: 1259572 - RNA, 19 nt, Human
ugccccacuccuccuccuc

SEQ ID NO: 1259573 - RNA, 23 nt, Human
ugcccugggcacucccugggggc

SEQ ID NO: 1259574 - RNA, 20 nt, Human
ugcccugugggagagaugug

SEQ ID NO: 1259575 - RNA, 21 nt, Human
ugccgcgggggugggcuuggg

SEQ ID NO: 1259576 - RNA, 20 nt, Human
ugccggcucagguggacugg

SEQ ID NO: 1259577 - RNA, 25 nt, Human
ugccuuugaccacuggcagaagucu

SEQ ID NO: 1259578 - RNA, 18 nt, Human
ugcgggccacugcccagc

SEQ ID NO: 1259579 - RNA, 18 nt, Human
ugcgucagcuaacagaac

SEQ ID NO: 1259580 - RNA, 21 nt, Human
ugcuauucugggccauaacau

SEQ ID NO: 1259581 - RNA, 20 nt, Human
ugcugugagguugggggcag

SEQ ID NO: 1259582 - RNA, 19 nt, Human
ugcuguguggcucuagccu

SEQ ID NO: 1259583 - RNA, 25 nt, Human
uggaauccaaacagcaagagaccuc

SEQ ID NO: 1259584 - RNA, 18 nt, Human
uggaccucaguggcucag

SEQ ID NO: 1259585 - RNA, 19 nt, Human
uggaugagggcauaaucug

SEQ ID NO: 1259586 - RNA, 19 nt, Human
uggcacaacucagaacgcu

SEQ ID NO: 1259587 - RNA, 19 nt, Human
uggcagagcaggggguuca

SEQ ID NO: 1259588 - RNA, 23 nt, Human
uggcagcaauagugaggagggag

SEQ ID NO: 1259589 - RNA, 18 nt, Human
uggcaggugccaucauua

SEQ ID NO: 1259590 - RNA, 18 nt, Human
uggccuggggcuccugac

SEQ ID NO: 1259591 - RNA, 24 nt, Human
uggcuccugggucucaguccugcu

SEQ ID NO: 1259592 - RNA, 19 nt, Human
uggcugcccagcacccucg

SEQ ID NO: 1259593 - RNA, 24 nt, Human
uggggcuccugaccaggcucucag

SEQ ID NO: 1259594 - RNA, 20 nt, Human
ugguaggaggagggcagcag

SEQ ID NO: 1259595 - RNA, 19 nt, Human
ugguuuugggcucugucug

SEQ ID NO: 1259596 - RNA, 23 nt, Human
ugucagccccguuccuccccacu

SEQ ID NO: 1259597 - RNA, 21 nt, Human
ugucuaggccccuacccugcc

SEQ ID NO: 1259598 - RNA, 25 nt, Human
ugugacaguggaugagggcauaauc

SEQ ID NO: 1259599 - RNA, 19 nt, Human
ugugaggagcuggguggua

SEQ ID NO: 1259600 - RNA, 19 nt, Human
uguggacaggguugggagg

SEQ ID NO: 1259601 - RNA, 24 nt, Human
uucaagcacuaggucucaaauaag

SEQ ID NO: 1259602 - RNA, 23 nt, Human
uucacagaugaggaaaccgaggc

SEQ ID NO: 1259603 - RNA, 19 nt, Human
uucccuggaauccaaccca

SEQ ID NO: 1259604 - RNA, 20 nt, Human
uucuuggccuuuuuaaaggc

SEQ ID NO: 1259605 - RNA, 22 nt, Human
uugccaggguccugcccugggc

SEQ ID NO: 1259606 - RNA, 19 nt, Human
uuuaauccucacaaugaca

SEQ ID NO: 1259607 - RNA, 24 nt, Human
uuugugguuucugcagagauucuu

SEQ ID NO: 1259608 - RNA, 21 nt, Human
agacaaagcccagcacuucac

SEQ ID NO: 1259609 - RNA, 21 nt, Human
caagauccuuucuggccuaau

SEQ ID NO: 1259610 - RNA, 26 nt, Human
cauguccagcccuggagccccagaca

SEQ ID NO: 1259611 - RNA, 19 nt, Human
ccagcccuggagccccaga

SEQ ID NO: 1259612 - RNA, 20 nt, Human
ccggaggacagucugcgggg

SEQ ID NO: 1259613 - RNA, 19 nt, Human
cugucugcauguccagccc

SEQ ID NO: 1259614 - RNA, 20 nt, Human
uaacucgguaaucacaacaa

SEQ ID NO: 1259615 - RNA, 22 nt, Human
uccagcccuggagccccagaca

SEQ ID NO: 1259616 - RNA, 21 nt, Human
ugauucuuggccaugauucug

SEQ ID NO: 1259617 - RNA, 24 nt, Human
ugcggggucgugacgauucuuuuc

SEQ ID NO: 1259618 - RNA, 22 nt, Human
uggagccccagacaaagcccag

SEQ ID NO: 1259619 - RNA, 20 nt, Human
uucuuggccaugauucuguc

SEQ ID NO: 1259620 - RNA, 22 nt, Human
uuggccaugauucugucuuuuc

SEQ ID NO: 1259621 - RNA, 21 nt, Human
uuucuggccuaauugcacugu

SEQ ID NO: 1259622 - RNA, 19 nt, Human
acagcacaucucuuuauuc

SEQ ID NO: 1259623 - RNA, 20 nt, Human
agaacuccuaugggacagga

SEQ ID NO: 1259624 - RNA, 24 nt, Human
agcaagaagacuccagugcugaca

SEQ ID NO: 1259625 - RNA, 25 nt, Human
cagcaagaagacuccagugcugaca

SEQ ID NO: 1259626 - RNA, 22 nt, Human
ccugcuggagucuuucugccca

SEQ ID NO: 1259627 - RNA, 25 nt, Human
cuggagucuuucugcccaggucugg

SEQ ID NO: 1259628 - RNA, 22 nt, Human
cuucuuggcucccuccuuccau

SEQ ID NO: 1259629 - RNA, 18 nt, Human
ggaaggucauugaaggga

SEQ ID NO: 1259630 - RNA, 18 nt, Human
gucuggcccuucuucagg

SEQ ID NO: 1259631 - RNA, 22 nt, Human
uaccaggcccccuucuuggcuc

SEQ ID NO: 1259632 - RNA, 23 nt, Human
uaccaggcccccuucuuggcucc

SEQ ID NO: 1259633 - RNA, 21 nt, Human
uccuaugggacaggaagguca

SEQ ID NO: 1259634 - RNA, 28 nt, Human
uggcucccuccuuccauugaagcugccu

SEQ ID NO: 1259635 - RNA, 20 nt, Human
aaaaaguaagccucuaguug

SEQ ID NO: 1259636 - RNA, 19 nt, Human
aacacugaagaccaagggg

SEQ ID NO: 1259637 - RNA, 21 nt, Human
aacauucaagaaauggaaacg

SEQ ID NO: 1259638 - RNA, 23 nt, Human
aaccuuaccucaucuugcugagc

SEQ ID NO: 1259639 - RNA, 24 nt, Human
aagcccuaggacaugcccgaggug

SEQ ID NO: 1259640 - RNA, 18 nt, Human
acccaccccaaaccccua

SEQ ID NO: 1259641 - RNA, 25 nt, Human
accuuugcuccaagugccuuaaggg

SEQ ID NO: 1259642 - RNA, 18 nt, Human
agaaagaaagaguucgaa

SEQ ID NO: 1259643 - RNA, 25 nt, Human
agaaagaagacaaaauacagcaaga

SEQ ID NO: 1259644 - RNA, 18 nt, Human
agaaagagagagagaggg

SEQ ID NO: 1259645 - RNA, 18 nt, Human
agacaaaauacagcaaga

SEQ ID NO: 1259646 - RNA, 21 nt, Human
agcucaucuaaaacuugcccc

SEQ ID NO: 1259647 - RNA, 20 nt, Human
aggaaggagauucagcccaa

SEQ ID NO: 1259648 - RNA, 23 nt, Human
aggaaggagauucagcccaacug

SEQ ID NO: 1259649 - RNA, 25 nt, Human
aggaaggagauucagcccaacuggc

SEQ ID NO: 1259650 - RNA, 18 nt, Human
aggagucacugacaugaa

SEQ ID NO: 1259651 - RNA, 24 nt, Human
aggcaacccccuguggacaggaag

SEQ ID NO: 1259652 - RNA, 20 nt, Human
caaaauacagcaagauauca

SEQ ID NO: 1259653 - RNA, 25 nt, Human
caaaccccuagggaaaaaucagaaa

SEQ ID NO: 1259654 - RNA, 22 nt, Human
caaagaaaguggaagaaagaaa

SEQ ID NO: 1259655 - RNA, 18 nt, Human
caagcgguucccaggccu

SEQ ID NO: 1259656 - RNA, 23 nt, Human
caagcgguucccaggccuccucc

SEQ ID NO: 1259657 - RNA, 18 nt, Human
cacacugccugcucaccc

SEQ ID NO: 1259658 - RNA, 19 nt, Human
cacacuguacaauuucaag

SEQ ID NO: 1259659 - RNA, 23 nt, Human
cacccacacugccugcucacccc

SEQ ID NO: 1259660 - RNA, 24 nt, Human
cacccacacugccugcucaccccc

SEQ ID NO: 1259661 - RNA, 25 nt, Human
cacccacacugccugcucaccccca

SEQ ID NO: 1259662 - RNA, 18 nt, Human
cacccucuguguguccuc

SEQ ID NO: 1259663 - RNA, 20 nt, Human
caccucagucuaaaguucca

SEQ ID NO: 1259664 - RNA, 24 nt, Human
cacuguacaauuucaagguagggg

SEQ ID NO: 1259665 - RNA, 22 nt, Human
cagaaaggucacagguaggcac

SEQ ID NO: 1259666 - RNA, 21 nt, Human
cagcaagauaucaggagccag

SEQ ID NO: 1259667 - RNA, 20 nt, Human
cagcaccaugaagcacccua

SEQ ID NO: 1259668 - RNA, 22 nt, Human
cagcaccaugaagcacccuagc

SEQ ID NO: 1259669 - RNA, 18 nt, Human
cagguaggcacuaacauc

SEQ ID NO: 1259670 - RNA, 18 nt, Human
caguggcucucccagacc

SEQ ID NO: 1259671 - RNA, 21 nt, Human
cauacauacauacagaaaaga

SEQ ID NO: 1259672 - RNA, 23 nt, Human
caucccaucaaguaccuuccucc

SEQ ID NO: 1259673 - RNA, 23 nt, Human
caucuucccuuucccuccccaaa

SEQ ID NO: 1259674 - RNA, 23 nt, Human
cauggaucgggggucgcccccaa

SEQ ID NO: 1259675 - RNA, 19 nt, Human
ccaacaauuccccuuucua

SEQ ID NO: 1259676 - RNA, 19 nt, Human
ccaaccuuaccucaucuug

SEQ ID NO: 1259677 - RNA, 18 nt, Human
ccacaagcgguucccagg

SEQ ID NO: 1259678 - RNA, 23 nt, Human
ccacacuguacaauuucaaggua

SEQ ID NO: 1259679 - RNA, 23 nt, Human
ccacccacacugccugcucaccc

SEQ ID NO: 1259680 - RNA, 22 nt, Human
ccaggugaaauggaggaaagaa

SEQ ID NO: 1259681 - RNA, 25 nt, Human
cccaaaccccuagggaaaaaucaga

SEQ ID NO: 1259682 - RNA, 23 nt, Human
cccacacugccugcucaccccca

SEQ ID NO: 1259683 - RNA, 21 nt, Human
cccacccacacugccugcuca

SEQ ID NO: 1259684 - RNA, 23 nt, Human
cccacccacacugccugcucacc

SEQ ID NO: 1259685 - RNA, 21 nt, Human
cccaccccaaaccccuaggga

SEQ ID NO: 1259686 - RNA, 23 nt, Human
cccauaccauaaagucagcugcc

SEQ ID NO: 1259687 - RNA, 18 nt, Human
ccccaaaaugaagagucc

SEQ ID NO: 1259688 - RNA, 21 nt, Human
ccccagccccacaccuggcag

SEQ ID NO: 1259689 - RNA, 22 nt, Human
ccccaucuucccuuucccuccc

SEQ ID NO: 1259690 - RNA, 24 nt, Human
cccccaaagaaaguggaagaaaga

SEQ ID NO: 1259691 - RNA, 23 nt, Human
cccccuguggacaggaagugugu

SEQ ID NO: 1259692 - RNA, 22 nt, Human
ccccuaagucacccaccccaaa

SEQ ID NO: 1259693 - RNA, 21 nt, Human
ccccuccccacccacacugcc

SEQ ID NO: 1259694 - RNA, 21 nt, Human
ccccuuucuaacaccucaguc

SEQ ID NO: 1259695 - RNA, 24 nt, Human
cccuaagucacccaccccaaaccc

SEQ ID NO: 1259696 - RNA, 25 nt, Human
cccuaagucacccaccccaaacccc

SEQ ID NO: 1259697 - RNA, 19 nt, Human
ccgccccuaagucacccac

SEQ ID NO: 1259698 - RNA, 22 nt, Human
ccgccccuaagucacccacccc

SEQ ID NO: 1259699 - RNA, 20 nt, Human
ccuaagucacccaccccaaa

SEQ ID NO: 1259700 - RNA, 21 nt, Human
ccuaagucacccaccccaaac

SEQ ID NO: 1259701 - RNA, 18 nt, Human
ccucuucccccaccuccu

SEQ ID NO: 1259702 - RNA, 23 nt, Human
ccuggcauggaucgggggucgcc

SEQ ID NO: 1259703 - RNA, 21 nt, Human
ccuggggaagagaaaaacacu

SEQ ID NO: 1259704 - RNA, 20 nt, Human
ccuguuggaggcugaggaau

SEQ ID NO: 1259705 - RNA, 23 nt, Human
ccuuccucccagucccuggacuc

SEQ ID NO: 1259706 - RNA, 21 nt, Human
cgggauguggucccuucacgu

SEQ ID NO: 1259707 - RNA, 22 nt, Human
cuaaaguuccagaaucaagacc

SEQ ID NO: 1259708 - RNA, 18 nt, Human
cuccaaugccacaggcaa

SEQ ID NO: 1259709 - RNA, 21 nt, Human
cuccccuagccaacaauuccc

SEQ ID NO: 1259710 - RNA, 23 nt, Human
cuccccuagccaacaauucccuc

SEQ ID NO: 1259711 - RNA, 22 nt, Human
cucugagacuccacccuccaau

SEQ ID NO: 1259712 - RNA, 25 nt, Human
cugacacugauacagacgacuuagc

SEQ ID NO: 1259713 - RNA, 24 nt, Human
cuggagguccccucugacacccaa

SEQ ID NO: 1259714 - RNA, 19 nt, Human
cuguguguccucagaccac

SEQ ID NO: 1259715 - RNA, 21 nt, Human
cuugggcuggcccugguggga

SEQ ID NO: 1259716 - RNA, 23 nt, Human
gaaaugagagcaagaaaucucau

SEQ ID NO: 1259717 - RNA, 23 nt, Human
gagagguacagaguuuguaaggg

SEQ ID NO: 1259718 - RNA, 24 nt, Human
gauaucaggagccagugggaggaa

SEQ ID NO: 1259719 - RNA, 18 nt, Human
ggccaguggcucucccag

SEQ ID NO: 1259720 - RNA, 18 nt, Human
ggcuggcucuucagagaa

SEQ ID NO: 1259721 - RNA, 25 nt, Human
gggaaaaaucagaaagaagacaaaa

SEQ ID NO: 1259722 - RNA, 21 nt, Human
gggcuggcucuucagagaagc

SEQ ID NO: 1259723 - RNA, 18 nt, Human
gggucugggggagguagc

SEQ ID NO: 1259724 - RNA, 20 nt, Human
ggucugggggagguagcccc

SEQ ID NO: 1259725 - RNA, 20 nt, Human
gugaaauggaggaaagaagc

SEQ ID NO: 1259726 - RNA, 23 nt, Human
gugccuuaagggcuggcucuuca

SEQ ID NO: 1259727 - RNA, 26 nt, Human
gugggccaguggcucucccagaccuu

SEQ ID NO: 1259728 - RNA, 19 nt, Human
guggucccuucacgucagu

SEQ ID NO: 1259729 - RNA, 19 nt, Human
uaaagucagcugcccaaac

SEQ ID NO: 1259730 - RNA, 21 nt, Human
uaaagucagcugcccaaacuc

SEQ ID NO: 1259731 - RNA, 23 nt, Human
uaaaguuccagaaucaagaccau

SEQ ID NO: 1259732 - RNA, 21 nt, Human
uaauguugaacaaaagucagc

SEQ ID NO: 1259733 - RNA, 22 nt, Human
uacaauuucaagguaggggcua

SEQ ID NO: 1259734 - RNA, 19 nt, Human
uacaauuuguugguuuguc

SEQ ID NO: 1259735 - RNA, 24 nt, Human
uacagaguuuguaaggggucuggg

SEQ ID NO: 1259736 - RNA, 18 nt, Human
uagaauggugacaugugg

SEQ ID NO: 1259737 - RNA, 22 nt, Human
uagccccuccccacccacacug

SEQ ID NO: 1259738 - RNA, 25 nt, Human
uagccccuccccacccacacugccc

SEQ ID NO: 1259739 - RNA, 25 nt, Human
uaggcacuaacauccccuccacacu

SEQ ID NO: 1259740 - RNA, 21 nt, Human
uauccagaaaagaagaacuac

SEQ ID NO: 1259741 - RNA, 20 nt, Human
ucaagaaauggaaacgaggu

SEQ ID NO: 1259742 - RNA, 18 nt, Human
ucaagaccuucugacacu

SEQ ID NO: 1259743 - RNA, 23 nt, Human
ucaagguaggggcuauggcccca

SEQ ID NO: 1259744 - RNA, 20 nt, Human
ucaaguucacacucaaaggu

SEQ ID NO: 1259745 - RNA, 20 nt, Human
ucacugacaugaagcgggau

SEQ ID NO: 1259746 - RNA, 24 nt, Human
ucagaaagaagacaaaauacagca

SEQ ID NO: 1259747 - RNA, 25 nt, Human
ucagccaacccauaccauaaaguca

SEQ ID NO: 1259748 - RNA, 19 nt, Human
ucaggcuccuggcaguggc

SEQ ID NO: 1259749 - RNA, 24 nt, Human
uccaaugccacaggcaacccccug

SEQ ID NO: 1259750 - RNA, 18 nt, Human
ucccagucccuggacucu

SEQ ID NO: 1259751 - RNA, 18 nt, Human
ucccaucaaguaccuucc

SEQ ID NO: 1259752 - RNA, 27 nt, Human
uccccacccacacugccugcucacccc

SEQ ID NO: 1259753 - RNA, 20 nt, Human
ucccccaccuccuacuuuca

SEQ ID NO: 1259754 - RNA, 23 nt, Human
ucccuggacucugagacuccacc

SEQ ID NO: 1259755 - RNA, 23 nt, Human
ucugggcccucuauccccagccc

SEQ ID NO: 1259756 - RNA, 19 nt, Human
ucuucccuuucccucccca

SEQ ID NO: 1259757 - RNA, 18 nt, Human
ugaaauggaggaaagaag

SEQ ID NO: 1259758 - RNA, 23 nt, Human
ugaaauggaggaaagaagcucau

SEQ ID NO: 1259759 - RNA, 22 nt, Human
ugaguuacauaccugaaguuca

SEQ ID NO: 1259760 - RNA, 21 nt, Human
ugcuccaagugccuuaagggc

SEQ ID NO: 1259761 - RNA, 19 nt, Human
ugcucuucuccccuagcca

SEQ ID NO: 1259762 - RNA, 18 nt, Human
uggaaacgagguuggaac

SEQ ID NO: 1259763 - RNA, 19 nt, Human
ugggcuggcccugguggga

SEQ ID NO: 1259764 - RNA, 24 nt, Human
uggggaagagaaaaacacugaaga

SEQ ID NO: 1259765 - RNA, 22 nt, Human
ugggggagguagccccucccca

SEQ ID NO: 1259766 - RNA, 21 nt, Human
uguaaggggucugggggaggu

SEQ ID NO: 1259767 - RNA, 25 nt, Human
ugugugcagcuguacaauuuguugg

SEQ ID NO: 1259768 - RNA, 19 nt, Human
uguugaacaaaagucagcc

SEQ ID NO: 1259769 - RNA, 22 nt, Human
uucaagaaauggaaacgagguu

SEQ ID NO: 1259770 - RNA, 19 nt, Human
uuggaacggucuucacagg

SEQ ID NO: 1259771 - RNA, 20 nt, Human
aaaaugcaccuaugcugugg

SEQ ID NO: 1259772 - RNA, 23 nt, Human
aaauaccauccuguugaagguca

SEQ ID NO: 1259773 - RNA, 22 nt, Human
aacaccucuccacucccguuuc

SEQ ID NO: 1259774 - RNA, 23 nt, Human
aaccaugaaguucucacgcgaga

SEQ ID NO: 1259775 - RNA, 24 nt, Human
aacccaauggcaaaaaaauaggcc

SEQ ID NO: 1259776 - RNA, 28 nt, Human
aacuccauaaccucuuuucuuccuacua

SEQ ID NO: 1259777 - RNA, 19 nt, Human
aagccagggcaggcucaga

SEQ ID NO: 1259778 - RNA, 24 nt, Human
aagcggggacggaggggagaaagg

SEQ ID NO: 1259779 - RNA, 18 nt, Human
aagggaggagggaagaag

SEQ ID NO: 1259780 - RNA, 19 nt, Human
aaggugcuaaucccaucca

SEQ ID NO: 1259781 - RNA, 18 nt, Human
aagugcucgaaugccuga

SEQ ID NO: 1259782 - RNA, 22 nt, Human
aaucaccucccaaaggucccac

SEQ ID NO: 1259783 - RNA, 19 nt, Human
acacuuccuaugacccccc

SEQ ID NO: 1259784 - RNA, 19 nt, Human
acagagcaaccaccaugcc

SEQ ID NO: 1259785 - RNA, 21 nt, Human
acagagcaggaagaagaggaa

SEQ ID NO: 1259786 - RNA, 20 nt, Human
acuaaaguuuauugaacauu

SEQ ID NO: 1259787 - RNA, 20 nt, Human
acuacaucacaccagggccu

SEQ ID NO: 1259788 - RNA, 21 nt, Human
acuacaucacaccagggccua

SEQ ID NO: 1259789 - RNA, 18 nt, Human
agauguuggagucagacu

SEQ ID NO: 1259790 - RNA, 19 nt, Human
agcaaggaaggaaggaaag

SEQ ID NO: 1259791 - RNA, 23 nt, Human
agcagcgccggcccucacucucc

SEQ ID NO: 1259792 - RNA, 23 nt, Human
agcgcaaugcucgcuggcugccu

SEQ ID NO: 1259793 - RNA, 19 nt, Human
aggaagaagaggaaggcug

SEQ ID NO: 1259794 - RNA, 19 nt, Human
aggagggaagaagggagga

SEQ ID NO: 1259795 - RNA, 22 nt, Human
aggaggucggggcugcgggcgu

SEQ ID NO: 1259796 - RNA, 19 nt, Human
aggcccgcagccgcuccca

SEQ ID NO: 1259797 - RNA, 22 nt, Human
aggcuccgcuucugggagcaac

SEQ ID NO: 1259798 - RNA, 19 nt, Human
agggaggagggaagaaggg

SEQ ID NO: 1259799 - RNA, 24 nt, Human
agguaggaugcuuucaauaaaggc

SEQ ID NO: 1259800 - RNA, 20 nt, Human
agugguuuucucauuauuau

SEQ ID NO: 1259801 - RNA, 19 nt, Human
auaaaggcugauagaaaug

SEQ ID NO: 1259802 - RNA, 21 nt, Human
auaauuagaaguuagcagagc

SEQ ID NO: 1259803 - RNA, 22 nt, Human
aucccauccaugagagccccac

SEQ ID NO: 1259804 - RNA, 25 nt, Human
auggcugagagaaaaaccggggucc

SEQ ID NO: 1259805 - RNA, 18 nt, Human
auuucucacaauucugga

SEQ ID NO: 1259806 - RNA, 19 nt, Human
caaaugguucuccgcagca

SEQ ID NO: 1259807 - RNA, 23 nt, Human
cacagguaggaugcuuucaauaa

SEQ ID NO: 1259808 - RNA, 21 nt, Human
caccccacguuuucucuuccu

SEQ ID NO: 1259809 - RNA, 21 nt, Human
caccgccauuucccgccccca

SEQ ID NO: 1259810 - RNA, 21 nt, Human
cacugugccaggcacccccuc

SEQ ID NO: 1259811 - RNA, 25 nt, Human
cagacgagcccucuggggugaaguc

SEQ ID NO: 1259812 - RNA, 22 nt, Human
cagcccaacgucggggucacug

SEQ ID NO: 1259813 - RNA, 24 nt, Human
cauccaugagagccccacugucau

SEQ ID NO: 1259814 - RNA, 19 nt, Human
ccaagaucaaggcacuggc

SEQ ID NO: 1259815 - RNA, 20 nt, Human
ccaccuccaaauaccauccu

SEQ ID NO: 1259816 - RNA, 23 nt, Human
ccacgccgcgccccgcucacccc

SEQ ID NO: 1259817 - RNA, 24 nt, Human
ccacugucaugaucuaaucaccuc

SEQ ID NO: 1259818 - RNA, 20 nt, Human
ccaggcaccgugcuaggaac

SEQ ID NO: 1259819 - RNA, 18 nt, Human
ccauuccuucaccugcaa

SEQ ID NO: 1259820 - RNA, 20 nt, Human
cccaaaggucccaccuccaa

SEQ ID NO: 1259821 - RNA, 18 nt, Human
cccaccuccaaauaccau

SEQ ID NO: 1259822 - RNA, 23 nt, Human
cccacggccacguggggaauauu

SEQ ID NO: 1259823 - RNA, 27 nt, Human
cccacguuuucucuuccuuucauuuua

SEQ ID NO: 1259824 - RNA, 23 nt, Human
cccauaagcgccuagagagccac

SEQ ID NO: 1259825 - RNA, 22 nt, Human
ccccauaagcgccuagagagcc

SEQ ID NO: 1259826 - RNA, 27 nt, Human
ccccccgcuuguuguaaaggccggggc

SEQ ID NO: 1259827 - RNA, 20 nt, Human
ccccugcaggcccgcagccg

SEQ ID NO: 1259828 - RNA, 25 nt, Human
cccgcuuguuguaaaggccggggcc

SEQ ID NO: 1259829 - RNA, 18 nt, Human
cccugagcucagcuucua

SEQ ID NO: 1259830 - RNA, 21 nt, Human
cccuggagcugcacccugagc

SEQ ID NO: 1259831 - RNA, 18 nt, Human
ccgcagccgcucccaagg

SEQ ID NO: 1259832 - RNA, 22 nt, Human
ccgccgcgcaucagugcacccg

SEQ ID NO: 1259833 - RNA, 20 nt, Human
ccucuggacugaagccaggg

SEQ ID NO: 1259834 - RNA, 18 nt, Human
ccucuuuucuuccuacua

SEQ ID NO: 1259835 - RNA, 18 nt, Human
ccugcagcuaucccgggg

SEQ ID NO: 1259836 - RNA, 22 nt, Human
ccugugcuggacugagcaggga

SEQ ID NO: 1259837 - RNA, 19 nt, Human
cgcuucgugcucugguugg

SEQ ID NO: 1259838 - RNA, 26 nt, Human
cggcugcggggcugcccacggccuug

SEQ ID NO: 1259839 - RNA, 25 nt, Human
cggggcugcgggcguugacgagacc

SEQ ID NO: 1259840 - RNA, 20 nt, Human
cuacaucacaccagggccuu

SEQ ID NO: 1259841 - RNA, 22 nt, Human
cuagagagccacgccgcgcccc

SEQ ID NO: 1259842 - RNA, 18 nt, Human
cuauggccaacuccauaa

SEQ ID NO: 1259843 - RNA, 21 nt, Human
cucccaggcaugcggucucau

SEQ ID NO: 1259844 - RNA, 22 nt, Human
cuccggggcaccgccauuuccc

SEQ ID NO: 1259845 - RNA, 22 nt, Human
cugccccaaacaauggcuccuc

SEQ ID NO: 1259846 - RNA, 24 nt, Human
cugccccaaacaauggcuccucuu

SEQ ID NO: 1259847 - RNA, 24 nt, Human
cuuuguucaugcugucugccucca

SEQ ID NO: 1259848 - RNA, 22 nt, Human
gaccuuccccacggccacgugg

SEQ ID NO: 1259849 - RNA, 23 nt, Human
gagggaagaagggggagacgggc

SEQ ID NO: 1259850 - RNA, 19 nt, Human
gaguccuggcaguccuacc

SEQ ID NO: 1259851 - RNA, 21 nt, Human
gcaaaggcacgcggcaccugc

SEQ ID NO: 1259852 - RNA, 18 nt, Human
gcaaugcucgcuggcugc

SEQ ID NO: 1259853 - RNA, 18 nt, Human
gcaccugcagcuauuccg

SEQ ID NO: 1259854 - RNA, 20 nt, Human
gcagcgcagaggcuucuaga

SEQ ID NO: 1259855 - RNA, 25 nt, Human
gccggcccucacucuccagggacgc

SEQ ID NO: 1259856 - RNA, 20 nt, Human
gcgccccgcucaccccugca

SEQ ID NO: 1259857 - RNA, 22 nt, Human
gcuguggcgaagggcaaauggu

SEQ ID NO: 1259858 - RNA, 18 nt, Human
ggagaaaggggaggaggg

SEQ ID NO: 1259859 - RNA, 20 nt, Human
ggaggggagaaaggggagga

SEQ ID NO: 1259860 - RNA, 24 nt, Human
ggauggggcaccugcugccccaaa

SEQ ID NO: 1259861 - RNA, 19 nt, Human
gggaaggaggucggggcug

SEQ ID NO: 1259862 - RNA, 20 nt, Human
ggggaggagggaagaaggga

SEQ ID NO: 1259863 - RNA, 19 nt, Human
ggggccagcccaacgucgg

SEQ ID NO: 1259864 - RNA, 19 nt, Human
guccuggcaguccuacccg

SEQ ID NO: 1259865 - RNA, 21 nt, Human
gugguuuucucauuauuaucc

SEQ ID NO: 1259866 - RNA, 24 nt, Human
uaaacaccucuccacucccguuuc

SEQ ID NO: 1259867 - RNA, 21 nt, Human
uaagaauucuaauuaucccua

SEQ ID NO: 1259868 - RNA, 19 nt, Human
uacuacaucacaccagggc

SEQ ID NO: 1259869 - RNA, 24 nt, Human
uacuccggggcaccugcagcuauu

SEQ ID NO: 1259870 - RNA, 24 nt, Human
uacuccggggcaccugcagcuauu

SEQ ID NO: 1259871 - RNA, 18 nt, Human
uagaagguggugugacuu

SEQ ID NO: 1259872 - RNA, 19 nt, Human
uauaaggugcuaaucccau

SEQ ID NO: 1259873 - RNA, 24 nt, Human
ucaggaaacugaauauccaggaag

SEQ ID NO: 1259874 - RNA, 20 nt, Human
uccaagaucaaggcacuggc

SEQ ID NO: 1259875 - RNA, 22 nt, Human
uccacuuacaacccaauggcaa

SEQ ID NO: 1259876 - RNA, 22 nt, Human
ucccacuagaaacagagaaaug

SEQ ID NO: 1259877 - RNA, 22 nt, Human
uccccagccccaagggacacuu

SEQ ID NO: 1259878 - RNA, 21 nt, Human
uccgaggagcuggcaaaggca

SEQ ID NO: 1259879 - RNA, 22 nt, Human
uccgaggagcuggcaaaggcac

SEQ ID NO: 1259880 - RNA, 20 nt, Human
uccgugagaucucccaggca

SEQ ID NO: 1259881 - RNA, 20 nt, Human
uccuugggauggggcaccug

SEQ ID NO: 1259882 - RNA, 20 nt, Human
ucuuccuacuacaucacacc

SEQ ID NO: 1259883 - RNA, 18 nt, Human
ugaaggaaggaagcgggg

SEQ ID NO: 1259884 - RNA, 21 nt, Human
ugacccgacaaaccuuugcag

SEQ ID NO: 1259885 - RNA, 24 nt, Human
ugagagaaaaaccaucuuucucac

SEQ ID NO: 1259886 - RNA, 19 nt, Human
ugaucuaaucaccucccaa

SEQ ID NO: 1259887 - RNA, 18 nt, Human
ugcagcgcagaggcuucu

SEQ ID NO: 1259888 - RNA, 24 nt, Human
ugccaggcacccccuccagguccu

SEQ ID NO: 1259889 - RNA, 19 nt, Human
ugcccuggguccccagccc

SEQ ID NO: 1259890 - RNA, 20 nt, Human
ugccugaguccuggcagucc

SEQ ID NO: 1259891 - RNA, 21 nt, Human
ugccugagugacgguuauuca

SEQ ID NO: 1259892 - RNA, 18 nt, Human
uggaaaauacacagguag

SEQ ID NO: 1259893 - RNA, 18 nt, Human
uggaaguggaggccacag

SEQ ID NO: 1259894 - RNA, 19 nt, Human
uggaggccacaguagucac

SEQ ID NO: 1259895 - RNA, 26 nt, Human
uggcagauguggugucugacgaagga

SEQ ID NO: 1259896 - RNA, 18 nt, Human
uggccaacuccauaaccu

SEQ ID NO: 1259897 - RNA, 21 nt, Human
ugggagcacaggauuuugaca

SEQ ID NO: 1259898 - RNA, 19 nt, Human
ugggaggaagagcaagcgg

SEQ ID NO: 1259899 - RNA, 20 nt, Human
uggggccagcccaacgucgg

SEQ ID NO: 1259900 - RNA, 21 nt, Human
ugugccaggcacccccuccag

SEQ ID NO: 1259901 - RNA, 21 nt, Human
uugccgaagugaguucugcac

SEQ ID NO: 1259902 - RNA, 19 nt, Human
uuggaaccaugaaguucuc

SEQ ID NO: 1259903 - RNA, 21 nt, Human
uuggaaguggaggccacagua

SEQ ID NO: 1259904 - RNA, 22 nt, Human
uuggaaguggaggccacaguag

SEQ ID NO: 1259905 - RNA, 23 nt, Human
uuggagucagacuugcccggguu

SEQ ID NO: 1259906 - RNA, 21 nt, Human
uuucucacaauucuggaggcu

SEQ ID NO: 1259907 - RNA, 18 nt, Human
aaauuggaaacaacugca

SEQ ID NO: 1259908 - RNA, 23 nt, Human
aacuguucccucuccccaauccc

SEQ ID NO: 1259909 - RNA, 18 nt, Human
aagauggagaaaacagaa

SEQ ID NO: 1259910 - RNA, 23 nt, Human
acagcggccagcaagcuuugggc

SEQ ID NO: 1259911 - RNA, 21 nt, Human
accacacuggagaugagagaa

SEQ ID NO: 1259912 - RNA, 26 nt, Human
accacacuggagaugagagaaaccag

SEQ ID NO: 1259913 - RNA, 26 nt, Human
agacagccccagccacucaccagccc

SEQ ID NO: 1259914 - RNA, 18 nt, Human
agauguuugaggucaccc

SEQ ID NO: 1259915 - RNA, 22 nt, Human
aggcagaaacucuuagagcuca

SEQ ID NO: 1259916 - RNA, 23 nt, Human
aggcagaaacucuuagagcucac

SEQ ID NO: 1259917 - RNA, 25 nt, Human
agucccaacuguucccucuccccaa

SEQ ID NO: 1259918 - RNA, 19 nt, Human
agucugucaacauagagcc

SEQ ID NO: 1259919 - RNA, 23 nt, Human
caaaugcauucaggugaagacag

SEQ ID NO: 1259920 - RNA, 20 nt, Human
caaauguucacauugucccu

SEQ ID NO: 1259921 - RNA, 24 nt, Human
caaauuggaaacaacugcaaacuu

SEQ ID NO: 1259922 - RNA, 23 nt, Human
cacacuggagaugagagaaacca

SEQ ID NO: 1259923 - RNA, 18 nt, Human
cacauugucccuccgcua

SEQ ID NO: 1259924 - RNA, 24 nt, Human
cacauugucccuccgcuauuuuua

SEQ ID NO: 1259925 - RNA, 23 nt, Human
cagaguaaauucauagcuuccaa

SEQ ID NO: 1259926 - RNA, 23 nt, Human
cagccacucaccagcccuacaca

SEQ ID NO: 1259927 - RNA, 18 nt, Human
cagcuggaaaaaguggaa

SEQ ID NO: 1259928 - RNA, 19 nt, Human
caggaaagguaaugaccau

SEQ ID NO: 1259929 - RNA, 19 nt, Human
caguaugaauuuccuggcc

SEQ ID NO: 1259930 - RNA, 19 nt, Human
cauugggaaaggacaucug

SEQ ID NO: 1259931 - RNA, 24 nt, Human
ccagcccuacacagcggccagcaa

SEQ ID NO: 1259932 - RNA, 21 nt, Human
cccaacuguucccucucccca

SEQ ID NO: 1259933 - RNA, 24 nt, Human
cccaaucccaaccuuauccaugua

SEQ ID NO: 1259934 - RNA, 25 nt, Human
cccaaucccaaccuuauccauguaa

SEQ ID NO: 1259935 - RNA, 22 nt, Human
ccuacacagcggccagcaagcu

SEQ ID NO: 1259936 - RNA, 19 nt, Human
ccuuccuuaauaacuuaaa

SEQ ID NO: 1259937 - RNA, 18 nt, Human
cucaaaguuaaaaagcag

SEQ ID NO: 1259938 - RNA, 23 nt, Human
cuuucuuuucagauguuugaggu

SEQ ID NO: 1259939 - RNA, 22 nt, Human
cuuuucagggcucuuccaggcu

SEQ ID NO: 1259940 - RNA, 18 nt, Human
gaaacaacugcaaacuuc

SEQ ID NO: 1259941 - RNA, 21 nt, Human
gaguguucaucaaggggcagc

SEQ ID NO: 1259942 - RNA, 26 nt, Human
gcaccagaaucuuuuccaaccggagg

SEQ ID NO: 1259943 - RNA, 19 nt, Human
ggaagaugaagggguagua

SEQ ID NO: 1259944 - RNA, 19 nt, Human
ggcccagagaccuaaacaa

SEQ ID NO: 1259945 - RNA, 18 nt, Human
gugugugugugugugugu

SEQ ID NO: 1259946 - RNA, 20 nt, Human
uagagcucacaaauuggaaa

SEQ ID NO: 1259947 - RNA, 18 nt, Human
uauaacaggaggacagga

SEQ ID NO: 1259948 - RNA, 23 nt, Human
ucaaaguuaaaaagcaguagcca

SEQ ID NO: 1259949 - RNA, 19 nt, Human
ucacauugucccuccgcua

SEQ ID NO: 1259950 - RNA, 22 nt, Human
ucagacagccccagccacucac

SEQ ID NO: 1259951 - RNA, 27 nt, Human
ucagcaaugaccacacuggagaugaga

SEQ ID NO: 1259952 - RNA, 23 nt, Human
uccccaaucccaaccuuauccau

SEQ ID NO: 1259953 - RNA, 18 nt, Human
ucccucuccccaauccca

SEQ ID NO: 1259954 - RNA, 19 nt, Human
ugaugacaccagucagaag

SEQ ID NO: 1259955 - RNA, 20 nt, Human
ugcuuaggaaaacagagugg

SEQ ID NO: 1259956 - RNA, 20 nt, Human
uggaaaaaguggaauuggca

SEQ ID NO: 1259957 - RNA, 19 nt, Human
ugguugcacuugccauuuc

SEQ ID NO: 1259958 - RNA, 20 nt, Human
uguguguguguguguucaua

SEQ ID NO: 1259959 - RNA, 20 nt, Human
uguucccucuccccaauccc

SEQ ID NO: 1259960 - RNA, 23 nt, Human
uuccuauuuuagucccagaauca

SEQ ID NO: 1259961 - RNA, 26 nt, Human
uucuuacaggcagaaacucuuagagc

SEQ ID NO: 1259962 - RNA, 22 nt, Human
uuuccaguuuuuacccaucuuu

SEQ ID NO: 1259963 - RNA, 26 nt, Human
uuuccaguuuuuacccaucuuucauu

SEQ ID NO: 1259964 - RNA, 18 nt, Human
uuuccuggcccagagacc

SEQ ID NO: 1259965 - RNA, 21 nt, Human
uuuugcuucuagucccaacug

SEQ ID NO: 1259966 - RNA, 24 nt, Human
aaaaaagauaaagcacaguaagga

SEQ ID NO: 1259967 - RNA, 20 nt, Human
aaaagcaaagcaggccaaaa

SEQ ID NO: 1259968 - RNA, 23 nt, Human
aaaaggcuggugauacucacuga

SEQ ID NO: 1259969 - RNA, 21 nt, Human
aaacaaguagaacccaccaaa

SEQ ID NO: 1259970 - RNA, 23 nt, Human
aaagaaaccagcagaaguaucac

SEQ ID NO: 1259971 - RNA, 21 nt, Human
aaaggcauguaguggaaaugg

SEQ ID NO: 1259972 - RNA, 23 nt, Human
aacagcagaaagaucacgaaggc

SEQ ID NO: 1259973 - RNA, 22 nt, Human
aaccugucccucccacccccca

SEQ ID NO: 1259974 - RNA, 20 nt, Human
aagaaaaaggacuucucagc

SEQ ID NO: 1259975 - RNA, 24 nt, Human
aagaacagcagaaagaucacgaag

SEQ ID NO: 1259976 - RNA, 24 nt, Human
aagaacagcagaaagaucacgaag

SEQ ID NO: 1259977 - RNA, 20 nt, Human
aagaagaaaaaggacuucuc

SEQ ID NO: 1259978 - RNA, 24 nt, Human
aagaagcugugcucucuggagggg

SEQ ID NO: 1259979 - RNA, 18 nt, Human
aagauagaacagaaacag

SEQ ID NO: 1259980 - RNA, 24 nt, Human
aagcaggccaaacuuagcuuccau

SEQ ID NO: 1259981 - RNA, 21 nt, Human
aagcaucugcccaacucgccc

SEQ ID NO: 1259982 - RNA, 19 nt, Human
aauaaucaaguauucacuu

SEQ ID NO: 1259983 - RNA, 22 nt, Human
aaucaccaucuuacugagccuu

SEQ ID NO: 1259984 - RNA, 23 nt, Human
aaugcaaaacagaacugaguaaa

SEQ ID NO: 1259985 - RNA, 21 nt, Human
acaaauccagggacccgugca

SEQ ID NO: 1259986 - RNA, 24 nt, Human
acacugcagagcugguuuggagac

SEQ ID NO: 1259987 - RNA, 21 nt, Human
acagcagaaagaucacgaagg

SEQ ID NO: 1259988 - RNA, 24 nt, Human
acaggacagcugguuuuaacagag

SEQ ID NO: 1259989 - RNA, 23 nt, Human
acccaauccuuuucccgcugcaa

SEQ ID NO: 1259990 - RNA, 19 nt, Human
acccgugcaaacuggcugg

SEQ ID NO: 1259991 - RNA, 18 nt, Human
acccuguaguuguagcag

SEQ ID NO: 1259992 - RNA, 20 nt, Human
accugucccucccacccccc

SEQ ID NO: 1259993 - RNA, 23 nt, Human
acuaccaacaaauccagggaccc

SEQ ID NO: 1259994 - RNA, 19 nt, Human
acucgcccuuguagcaacu

SEQ ID NO: 1259995 - RNA, 23 nt, Human
agaaacagauuaaaauacaucag

SEQ ID NO: 1259996 - RNA, 20 nt, Human
agaacagaaacagauuaaaa

SEQ ID NO: 1259997 - RNA, 24 nt, Human
agaacagcagaaagaucacgaagg

SEQ ID NO: 1259998 - RNA, 23 nt, Human
agaaggaagcauggcuuacugaa

SEQ ID NO: 1259999 - RNA, 21 nt, Human
agacauccucucaccauaggg

SEQ ID NO: 1260000 - RNA, 18 nt, Human
agagaaggagagagaagg

SEQ ID NO: 1260001 - RNA, 21 nt, Human
agagacaaccccuguaaacag

SEQ ID NO: 1260002 - RNA, 18 nt, Human
agauggagaacaggacag

SEQ ID NO: 1260003 - RNA, 24 nt, Human
agcagcugacaguuucuccaguuu

SEQ ID NO: 1260004 - RNA, 20 nt, Human
agcaggaaaaagacauaacc

SEQ ID NO: 1260005 - RNA, 18 nt, Human
agccaaaaggagguacag

SEQ ID NO: 1260006 - RNA, 20 nt, Human
agcugguuuggagacauccu

SEQ ID NO: 1260007 - RNA, 21 nt, Human
aggaaaaagacauaaccaugu

SEQ ID NO: 1260008 - RNA, 21 nt, Human
aggaggaaaagggugacccag

SEQ ID NO: 1260009 - RNA, 18 nt, Human
agggaagaguucgggaca

SEQ ID NO: 1260010 - RNA, 18 nt, Human
aggguuuuucuccucuug

SEQ ID NO: 1260011 - RNA, 22 nt, Human
auaccauaaccugucccuccca

SEQ ID NO: 1260012 - RNA, 24 nt, Human
aucaaggaguaagcuguagguuuu

SEQ ID NO: 1260013 - RNA, 21 nt, Human
auggcagcagugcagguggca

SEQ ID NO: 1260014 - RNA, 22 nt, Human
caaaaagccacacugccaaagc

SEQ ID NO: 1260015 - RNA, 23 nt, Human
caaacccaggccccuggcugccu

SEQ ID NO: 1260016 - RNA, 20 nt, Human
cacagaagguaaagaaacca

SEQ ID NO: 1260017 - RNA, 30 nt, Human
cacauaaauacauguauggggugugugugg

SEQ ID NO: 1260018 - RNA, 20 nt, Human
cacccaacaaguccauuuca

SEQ ID NO: 1260019 - RNA, 22 nt, Human
caccuuguauuucuucagcagc

SEQ ID NO: 1260020 - RNA, 24 nt, Human
cacuaaagaaggcacggaagccug

SEQ ID NO: 1260021 - RNA, 25 nt, Human
cagccuagaccugggcauaagccaa

SEQ ID NO: 1260022 - RNA, 25 nt, Human
cagcugguuuguguuuagaagaggu

SEQ ID NO: 1260023 - RNA, 20 nt, Human
caggaaaaagacauaaccau

SEQ ID NO: 1260024 - RNA, 20 nt, Human
caggaggacugccaaugaua

SEQ ID NO: 1260025 - RNA, 18 nt, Human
caggagggugcugcugug

SEQ ID NO: 1260026 - RNA, 20 nt, Human
caggcuacuagugaggauca

SEQ ID NO: 1260027 - RNA, 18 nt, Human
caggcuguagcugugcuc

SEQ ID NO: 1260028 - RNA, 19 nt, Human
cagggcaagugugcaaaaa

SEQ ID NO: 1260029 - RNA, 18 nt, Human
cauaguccuccacaucaa

SEQ ID NO: 1260030 - RNA, 24 nt, Human
caucaaggaguaagcuguagguuu

SEQ ID NO: 1260031 - RNA, 25 nt, Human
cauguauggggugugugugugugua

SEQ ID NO: 1260032 - RNA, 25 nt, Human
ccaauccaaacaaaaaagauaaagc

SEQ ID NO: 1260033 - RNA, 20 nt, Human
ccauuucaucucucucucca

SEQ ID NO: 1260034 - RNA, 25 nt, Human
cccaccccccaacuacauucgaaaa

SEQ ID NO: 1260035 - RNA, 24 nt, Human
cccaugguguggagacuaaaaagc

SEQ ID NO: 1260036 - RNA, 19 nt, Human
ccucagaacuucagaucca

SEQ ID NO: 1260037 - RNA, 20 nt, Human
ccuccaagaagcugugcucu

SEQ ID NO: 1260038 - RNA, 21 nt, Human
ccugagcaagcagugguccuc

SEQ ID NO: 1260039 - RNA, 20 nt, Human
ccugcaauuauucaaaccca

SEQ ID NO: 1260040 - RNA, 25 nt, Human
ccuguaguuguagcaggaaaaagac

SEQ ID NO: 1260041 - RNA, 18 nt, Human
cggaagccuggugcuggg

SEQ ID NO: 1260042 - RNA, 23 nt, Human
cguucagaaaggucccgaucauc

SEQ ID NO: 1260043 - RNA, 22 nt, Human
cucagaacuucagauccauccc

SEQ ID NO: 1260044 - RNA, 25 nt, Human
cucauggucacccaacaaguccauu

SEQ ID NO: 1260045 - RNA, 21 nt, Human
cuccaagaagcugugcucucu

SEQ ID NO: 1260046 - RNA, 18 nt, Human
cugaagaccacauaaaua

SEQ ID NO: 1260047 - RNA, 22 nt, Human
cugccugggaacgggacuuggg

SEQ ID NO: 1260048 - RNA, 24 nt, Human
cuggugauacucacugauggaaga

SEQ ID NO: 1260049 - RNA, 23 nt, Human
cuguaaacaggaaucgaucccac

SEQ ID NO: 1260050 - RNA, 20 nt, Human
cuuacugagccuuucugcca

SEQ ID NO: 1260051 - RNA, 20 nt, Human
cuuucugccagauucuccuc

SEQ ID NO: 1260052 - RNA, 21 nt, Human
cuuuggcaggcuacaaucuac

SEQ ID NO: 1260053 - RNA, 19 nt, Human
gaacaggaggaacacuagg

SEQ ID NO: 1260054 - RNA, 21 nt, Human
gaaucuguugggugaagcugg

SEQ ID NO: 1260055 - RNA, 21 nt, Human
gagaugucacaacagcaucaa

SEQ ID NO: 1260056 - RNA, 23 nt, Human
gauaagcuuggugcgcuccuucu

SEQ ID NO: 1260057 - RNA, 26 nt, Human
gaugauagagaaggagagagaaggga

SEQ ID NO: 1260058 - RNA, 24 nt, Human
gcaaguggacuaccaacaaaucca

SEQ ID NO: 1260059 - RNA, 19 nt, Human
gcaaugaaaaaacaacuuc

SEQ ID NO: 1260060 - RNA, 19 nt, Human
gcaggaaaaagacauaacc

SEQ ID NO: 1260061 - RNA, 19 nt, Human
gcaggugggguccugggcc

SEQ ID NO: 1260062 - RNA, 21 nt, Human
gcugaaugggagaggaguaag

SEQ ID NO: 1260063 - RNA, 19 nt, Human
gcuuauaggcgugcuccag

SEQ ID NO: 1260064 - RNA, 24 nt, Human
ggaaaaagcuaccuuccuucccuc

SEQ ID NO: 1260065 - RNA, 19 nt, Human
ggaaauaaaggugggaaga

SEQ ID NO: 1260066 - RNA, 22 nt, Human
ggaacagcugguggagccuggg

SEQ ID NO: 1260067 - RNA, 19 nt, Human
ggacucaguaagcauggca

SEQ ID NO: 1260068 - RNA, 21 nt, Human
ggagaugaucuugaugacugc

SEQ ID NO: 1260069 - RNA, 21 nt, Human
ggaguaguggagggauaaagg

SEQ ID NO: 1260070 - RNA, 23 nt, Human
gggaacagcugguggagccuggg

SEQ ID NO: 1260071 - RNA, 19 nt, Human
gggaagaaauggagaugga

SEQ ID NO: 1260072 - RNA, 18 nt, Human
gggaucagugcuuugcag

SEQ ID NO: 1260073 - RNA, 20 nt, Human
gggcaaagaaaaugcaaaac

SEQ ID NO: 1260074 - RNA, 19 nt, Human
gggguccugggccaggagg

SEQ ID NO: 1260075 - RNA, 18 nt, Human
gguaaugagacaacuaaa

SEQ ID NO: 1260076 - RNA, 20 nt, Human
ggugcugcuguggagguggu

SEQ ID NO: 1260077 - RNA, 21 nt, Human
ggugcuguggauggaggugag

SEQ ID NO: 1260078 - RNA, 21 nt, Human
guagagggaagcuagguaaca

SEQ ID NO: 1260079 - RNA, 21 nt, Human
guauggggugugugugugugu

SEQ ID NO: 1260080 - RNA, 19 nt, Human
guccaggcuguagcugugc

SEQ ID NO: 1260081 - RNA, 19 nt, Human
gugcucucuggagggggcu

SEQ ID NO: 1260082 - RNA, 22 nt, Human
guggagcacuaaagaaggcacg

SEQ ID NO: 1260083 - RNA, 26 nt, Human
guggauggaggugaguuguguccggu

SEQ ID NO: 1260084 - RNA, 18 nt, Human
guggcauugggggccgaa

SEQ ID NO: 1260085 - RNA, 22 nt, Human
guguggagacuaaaaagcaaag

SEQ ID NO: 1260086 - RNA, 23 nt, Human
guuucgauuaagguggacagaaa

SEQ ID NO: 1260087 - RNA, 25 nt, Human
uaaaaagcaaagcaggccaaacuua

SEQ ID NO: 1260088 - RNA, 20 nt, Human
uaaaacaaguagaacccacc

SEQ ID NO: 1260089 - RNA, 22 nt, Human
uaaaacaaguagaacccaccaa

SEQ ID NO: 1260090 - RNA, 21 nt, Human
uaaacaggaaucgaucccaca

SEQ ID NO: 1260091 - RNA, 23 nt, Human
uaaagaaaccagcagaaguauca

SEQ ID NO: 1260092 - RNA, 19 nt, Human
uaaccugucccucccaccc

SEQ ID NO: 1260093 - RNA, 20 nt, Human
uaagaacagcagaaagauca

SEQ ID NO: 1260094 - RNA, 23 nt, Human
uaauacagacacuguaggcauuu

SEQ ID NO: 1260095 - RNA, 21 nt, Human
uacaagauagaacagaaacag

SEQ ID NO: 1260096 - RNA, 21 nt, Human
uacaaucuacucugaggugga

SEQ ID NO: 1260097 - RNA, 20 nt, Human
uacagacacuguaggcauuu

SEQ ID NO: 1260098 - RNA, 22 nt, Human
uacauguauggggugugugugu

SEQ ID NO: 1260099 - RNA, 19 nt, Human
uaccaacaaauccagggac

SEQ ID NO: 1260100 - RNA, 19 nt, Human
uacccuauaaaaauguaaa

SEQ ID NO: 1260101 - RNA, 19 nt, Human
uagaaccaauccaaacaaa

SEQ ID NO: 1260102 - RNA, 19 nt, Human
uagaagagguaaugagaca

SEQ ID NO: 1260103 - RNA, 21 nt, Human
uagcaggaaaaagacauaacc

SEQ ID NO: 1260104 - RNA, 19 nt, Human
uagcugugcuccuccaaga

SEQ ID NO: 1260105 - RNA, 26 nt, Human
uaguaaagacagcaguucugcccaug

SEQ ID NO: 1260106 - RNA, 22 nt, Human
uaucuauguguguguguauaaa

SEQ ID NO: 1260107 - RNA, 19 nt, Human
ucaccauagggagcaggau

SEQ ID NO: 1260108 - RNA, 18 nt, Human
ucacuaggccucucuugu

SEQ ID NO: 1260109 - RNA, 23 nt, Human
ucauauuaauauggggcaaugaa

SEQ ID NO: 1260110 - RNA, 22 nt, Human
ucccacaagacuuugcuuuggg

SEQ ID NO: 1260111 - RNA, 18 nt, Human
ucgggacacugcagagcu

SEQ ID NO: 1260112 - RNA, 23 nt, Human
ucguucagaaaggucccgaucau

SEQ ID NO: 1260113 - RNA, 22 nt, Human
ucucaccauagggagcaggaua

SEQ ID NO: 1260114 - RNA, 24 nt, Human
ucucaggaagacagggcaagugug

SEQ ID NO: 1260115 - RNA, 21 nt, Human
ucucuuguccaggcaauuucc

SEQ ID NO: 1260116 - RNA, 23 nt, Human
ucugaagaccacauaaauacaug

SEQ ID NO: 1260117 - RNA, 19 nt, Human
ucugagguggaguagugga

SEQ ID NO: 1260118 - RNA, 18 nt, Human
ucugcccaugguguggag

SEQ ID NO: 1260119 - RNA, 19 nt, Human
ucuggacccugggggggcc

SEQ ID NO: 1260120 - RNA, 23 nt, Human
ucuucuaguucauuuucaaucac

SEQ ID NO: 1260121 - RNA, 21 nt, Human
ucuuuugucucaucauccuca

SEQ ID NO: 1260122 - RNA, 23 nt, Human
ucuuuugucucaucauccucacu

SEQ ID NO: 1260123 - RNA, 22 nt, Human
ugaaaaaacaacuucaauagga

SEQ ID NO: 1260124 - RNA, 23 nt, Human
ugaagggaagguaggaaaggcau

SEQ ID NO: 1260125 - RNA, 21 nt, Human
ugagggaaggaauccuuuggc

SEQ ID NO: 1260126 - RNA, 20 nt, Human
ugauaggugaaguugaccgc

SEQ ID NO: 1260127 - RNA, 22 nt, Human
uggaagaugauagagaaggaga

SEQ ID NO: 1260128 - RNA, 18 nt, Human
uggacagaaacuaaggaa

SEQ ID NO: 1260129 - RNA, 25 nt, Human
uggccaccugaggggugauaagcuu

SEQ ID NO: 1260130 - RNA, 19 nt, Human
uggcuuauaggcgugcucc

SEQ ID NO: 1260131 - RNA, 22 nt, Human
uggcuuauaggcgugcuccagu

SEQ ID NO: 1260132 - RNA, 22 nt, Human
uggcuuauaggcgugcuccagu

SEQ ID NO: 1260133 - RNA, 18 nt, Human
ugggaagaaauggagaug

SEQ ID NO: 1260134 - RNA, 29 nt, Human
ugggguguguguguguguaucuaugugug

SEQ ID NO: 1260135 - RNA, 19 nt, Human
ugggugacuucgaaugcac

SEQ ID NO: 1260136 - RNA, 20 nt, Human
uggugcugggggaagcaucu

SEQ ID NO: 1260137 - RNA, 20 nt, Human
uguagcggaggguggagcac

SEQ ID NO: 1260138 - RNA, 20 nt, Human
ugucucgaacuuguuuuucu

SEQ ID NO: 1260139 - RNA, 24 nt, Human
ugugcaaaaagccacacugccaaa

SEQ ID NO: 1260140 - RNA, 19 nt, Human
uguguaucuaugugugugu

SEQ ID NO: 1260141 - RNA, 25 nt, Human
uguguaucuauguguguguguauaa

SEQ ID NO: 1260142 - RNA, 22 nt, Human
ugugucucuagggcaaagaaaa

SEQ ID NO: 1260143 - RNA, 21 nt, Human
uguguguguaucuaugugugu

SEQ ID NO: 1260144 - RNA, 23 nt, Human
uguguguguaucuaugugugugu

SEQ ID NO: 1260145 - RNA, 19 nt, Human
uguguguguguaucuaugu

SEQ ID NO: 1260146 - RNA, 22 nt, Human
uguguguguguaucuaugugug

SEQ ID NO: 1260147 - RNA, 23 nt, Human
uguguguguguaucuaugugugu

SEQ ID NO: 1260148 - RNA, 29 nt, Human
uguguguguguaucuauguguguguguaa

SEQ ID NO: 1260149 - RNA, 27 nt, Human
uguguguguguguaucuaugugugugu

SEQ ID NO: 1260150 - RNA, 28 nt, Human
uguguguguguguaucuaugugugugug

SEQ ID NO: 1260151 - RNA, 19 nt, Human
uuaaaacaaguagaaccca

SEQ ID NO: 1260152 - RNA, 22 nt, Human
uuacugagccuuucugccagau

SEQ ID NO: 1260153 - RNA, 24 nt, Human
uuagggccaucaccuuguauuucu

SEQ ID NO: 1260154 - RNA, 18 nt, Human
uuccaugguuacauuugg

SEQ ID NO: 1260155 - RNA, 20 nt, Human
uuccugguugggguuguaaa

SEQ ID NO: 1260156 - RNA, 24 nt, Human
uuccugguugggguuguaaaacug

SEQ ID NO: 1260157 - RNA, 19 nt, Human
uucggauacacaugaucug

SEQ ID NO: 1260158 - RNA, 24 nt, Human
uuggugauggcagcagugcaggug

SEQ ID NO: 1260159 - RNA, 19 nt, Human
uuucggagaugaucuugau

SEQ ID NO: 1260160 - RNA, 19 nt, Human
agaaauacacauucacuaa

SEQ ID NO: 1260161 - RNA, 23 nt, Human
agaccuccagcacaggacaacuc

SEQ ID NO: 1260162 - RNA, 23 nt, Human
aguggcgacugguuuaagugauu

SEQ ID NO: 1260163 - RNA, 24 nt, Human
cagaaagaacuuaaauguauaaua

SEQ ID NO: 1260164 - RNA, 25 nt, Human
cagccauaccccuacugaauacaaa

SEQ ID NO: 1260165 - RNA, 21 nt, Human
cauaacaccagcuucaaguuu

SEQ ID NO: 1260166 - RNA, 22 nt, Human
ccauaccccuacugaauacaaa

SEQ ID NO: 1260167 - RNA, 22 nt, Human
ccugcaaaauacauaacaccag

SEQ ID NO: 1260168 - RNA, 22 nt, Human
gcacaggacaacucaggaaaca

SEQ ID NO: 1260169 - RNA, 25 nt, Human
uaagugauuuuuauauggcauccca

SEQ ID NO: 1260170 - RNA, 19 nt, Human
uacacagaacagaaagaac

SEQ ID NO: 1260171 - RNA, 21 nt, Human
ucguuuuccuccuuauuuggg

SEQ ID NO: 1260172 - RNA, 21 nt, Human
ucuauucuuuauucuuccuga

SEQ ID NO: 1260173 - RNA, 22 nt, Human
ugagcagaccuccagcacagga

SEQ ID NO: 1260174 - RNA, 21 nt, Human
uuaaucagccauaccccuacu

SEQ ID NO: 1260175 - RNA, 20 nt, Human
uucgucugagcagaccucca

SEQ ID NO: 1260176 - RNA, 19 nt, Human
uuggagguucuuaucaauu

SEQ ID NO: 1260177 - RNA, 23 nt, Human
agaaaaaagagcaauggaaagga

SEQ ID NO: 1260178 - RNA, 19 nt, Human
agcaauggaaaggauuuca

SEQ ID NO: 1260179 - RNA, 19 nt, Human
aggaugaauggaaucuauc

SEQ ID NO: 1260180 - RNA, 22 nt, Human
caaauuaugaagaaauagaagu

SEQ ID NO: 1260181 - RNA, 23 nt, Human
caaggauuccgacagugagauuu

SEQ ID NO: 1260182 - RNA, 20 nt, Human
cauuagaaugcguuuuccau

SEQ ID NO: 1260183 - RNA, 20 nt, Human
ccaacagagugugaucuggc

SEQ ID NO: 1260184 - RNA, 18 nt, Human
ccccgggagcccgguggg

SEQ ID NO: 1260185 - RNA, 19 nt, Human
ccgacagugagauuuccga

SEQ ID NO: 1260186 - RNA, 25 nt, Human
ccucgguggcgccccucacccugcc

SEQ ID NO: 1260187 - RNA, 21 nt, Human
gcguggugugauuuccaagga

SEQ ID NO: 1260188 - RNA, 21 nt, Human
ggcgcuuccucgguggcgccc

SEQ ID NO: 1260189 - RNA, 22 nt, Human
gguggcgccccucacccugccu

SEQ ID NO: 1260190 - RNA, 20 nt, Human
uagaaaggaugaauggaauc

SEQ ID NO: 1260191 - RNA, 26 nt, Human
ucacaauuaaucuuuuguucuugacu

SEQ ID NO: 1260192 - RNA, 22 nt, Human
ugaauggaaucuaucugcgugg

SEQ ID NO: 1260193 - RNA, 21 nt, Human
ugaguugaugaacugagcucc

SEQ ID NO: 1260194 - RNA, 19 nt, Human
uggaaucuaucugcguggg

SEQ ID NO: 1260195 - RNA, 18 nt, Human
uggcagccccgggagccc

SEQ ID NO: 1260196 - RNA, 21 nt, Human
uggcgccccucacccugccuc

SEQ ID NO: 1260197 - RNA, 25 nt, Human
uuaaugcaaaaguugcaaucuccau

SEQ ID NO: 1260198 - RNA, 21 nt, Human
aaaauugaugaguuuuccucc

SEQ ID NO: 1260199 - RNA, 22 nt, Human
cacaucugcuacucagacgacu

SEQ ID NO: 1260200 - RNA, 28 nt, Human
cacgcugccaaagccgggauuccccgaa

SEQ ID NO: 1260201 - RNA, 23 nt, Human
caucugcuacucagacgacuccu

SEQ ID NO: 1260202 - RNA, 23 nt, Human
cugggcccagagggaaaaggcug

SEQ ID NO: 1260203 - RNA, 19 nt, Human
gggcccagagggaaaaggc

SEQ ID NO: 1260204 - RNA, 25 nt, Human
uaugccacauugucauaggcagggg

SEQ ID NO: 1260205 - RNA, 23 nt, Human
uccuccuucaagcguaacuucaa

SEQ ID NO: 1260206 - RNA, 19 nt, Human
ugaugaguuuuccuccuuc

SEQ ID NO: 1260207 - RNA, 23 nt, Human
ugggcccagagggaaaaggcugg

SEQ ID NO: 1260208 - RNA, 23 nt, Human
aagcaggaagcagggagagugga

SEQ ID NO: 1260209 - RNA, 19 nt, Human
acccaaaaggccuccccag

SEQ ID NO: 1260210 - RNA, 18 nt, Human
agcugcccuuguccacug

SEQ ID NO: 1260211 - RNA, 19 nt, Human
aggaagcagggagagugga

SEQ ID NO: 1260212 - RNA, 23 nt, Human
agggaagcaggaagcagggagag

SEQ ID NO: 1260213 - RNA, 24 nt, Human
agggagcuggccucagccccuggg

SEQ ID NO: 1260214 - RNA, 26 nt, Human
agggagcuggccucagccccuggggg

SEQ ID NO: 1260215 - RNA, 27 nt, Human
caccuggaugagcacuagcccagggac

SEQ ID NO: 1260216 - RNA, 25 nt, Human
cagaguggacagcaccaguuugccc

SEQ ID NO: 1260217 - RNA, 19 nt, Human
cagccccugggggccuccu

SEQ ID NO: 1260218 - RNA, 19 nt, Human
cagccccugggggccuccu

SEQ ID NO: 1260219 - RNA, 23 nt, Human
ccacagaggcugaagagguggcc

SEQ ID NO: 1260220 - RNA, 23 nt, Human
ccuccugcugugcugcccuacca

SEQ ID NO: 1260221 - RNA, 24 nt, Human
cuagcccagggacugggagggccu

SEQ ID NO: 1260222 - RNA, 22 nt, Human
cugugcugcccuaccauccagg

SEQ ID NO: 1260223 - RNA, 24 nt, Human
gaagcuucuuccacccagacacag

SEQ ID NO: 1260224 - RNA, 21 nt, Human
gagguggccggagggaagcag

SEQ ID NO: 1260225 - RNA, 22 nt, Human
gcuggccucagccccugggggc

SEQ ID NO: 1260226 - RNA, 19 nt, Human
ggaagcagggagaguggag

SEQ ID NO: 1260227 - RNA, 22 nt, Human
ggacugggagggccuagaagcu

SEQ ID NO: 1260228 - RNA, 22 nt, Human
gggagcuggccucagccccugg

SEQ ID NO: 1260229 - RNA, 23 nt, Human
gggggccuccugcugugcugccc

SEQ ID NO: 1260230 - RNA, 22 nt, Human
uccuguuauuuauacccaaaag

SEQ ID NO: 1260231 - RNA, 22 nt, Human
ugagcacuagcccagggacugg

SEQ ID NO: 1260232 - RNA, 18 nt, Human
uucugcuucagcuagugg

SEQ ID NO: 1260233 - RNA, 20 nt, Human
agaacagucaggagaauuag

SEQ ID NO: 1260234 - RNA, 19 nt, Human
aucuaaagugggcacagga

SEQ ID NO: 1260235 - RNA, 24 nt, Human
caagaccuccacacuccccuggga

SEQ ID NO: 1260236 - RNA, 18 nt, Human
caccagacccagcagcag

SEQ ID NO: 1260237 - RNA, 23 nt, Human
cagcagcagcagccacuucaugg

SEQ ID NO: 1260238 - RNA, 19 nt, Human
ccagacccagcagcagcag

SEQ ID NO: 1260239 - RNA, 33 nt, Human
ccagcagcagcagccacuucaugguucuucuuu

SEQ ID NO: 1260240 - RNA, 22 nt, Human
cgccaccagacccagcagcagc

SEQ ID NO: 1260241 - RNA, 21 nt, Human
cuggcuggguugagguugugc

SEQ ID NO: 1260242 - RNA, 19 nt, Human
cuucaugguucuucccggg

SEQ ID NO: 1260243 - RNA, 22 nt, Human
cuucaugguucuucccgggucc

SEQ ID NO: 1260244 - RNA, 20 nt, Human
gauacaucuaaagugggcac

SEQ ID NO: 1260245 - RNA, 30 nt, Human
gcagcagcagccacuucaugguucuucccu

SEQ ID NO: 1260246 - RNA, 25 nt, Human
ggacagaggccagaucuuccuggga

SEQ ID NO: 1260247 - RNA, 18 nt, Human
ggacagggaacagggcca

SEQ ID NO: 1260248 - RNA, 18 nt, Human
ggcacaggacagaggccg

SEQ ID NO: 1260249 - RNA, 25 nt, Human
uaaagugggcacaggacagaggcca

SEQ ID NO: 1260250 - RNA, 24 nt, Human
uacaugaugcacucagagagcgcc

SEQ ID NO: 1260251 - RNA, 20 nt, Human
uaccagggugggagccuccc

SEQ ID NO: 1260252 - RNA, 23 nt, Human
uccacaaaaccuguuucaguggg

SEQ ID NO: 1260253 - RNA, 22 nt, Human
ucuucccgggucccaacucgag

SEQ ID NO: 1260254 - RNA, 19 nt, Human
ugggaagaacagucaggag

SEQ ID NO: 1260255 - RNA, 27 nt, Human
aacccagagaggcagacgugggggccc

SEQ ID NO: 1260256 - RNA, 20 nt, Human
acacucgcacacaaacccac

SEQ ID NO: 1260257 - RNA, 22 nt, Human
acaguggaaacgacuuccucca

SEQ ID NO: 1260258 - RNA, 18 nt, Human
agcagccacucccaaacc

SEQ ID NO: 1260259 - RNA, 18 nt, Human
agccacucccaaacccag

SEQ ID NO: 1260260 - RNA, 23 nt, Human
agccgaaggagcagaggggcagg

SEQ ID NO: 1260261 - RNA, 23 nt, Human
agcugcccugcacacacccuggg

SEQ ID NO: 1260262 - RNA, 21 nt, Human
auggugacagacucgccucuc

SEQ ID NO: 1260263 - RNA, 22 nt, Human
caacucuuccuccaggagaacu

SEQ ID NO: 1260264 - RNA, 22 nt, Human
cacacacccugggccaccccug

SEQ ID NO: 1260265 - RNA, 22 nt, Human
cacacaguggcccucgcaggag

SEQ ID NO: 1260266 - RNA, 22 nt, Human
cacucgcacacaaacccaccuu

SEQ ID NO: 1260267 - RNA, 23 nt, Human
cagagguccucucuccagagucu

SEQ ID NO: 1260268 - RNA, 22 nt, Human
cagaugccacucccacagccga

SEQ ID NO: 1260269 - RNA, 18 nt, Human
cagcagccacucccaaac

SEQ ID NO: 1260270 - RNA, 23 nt, Human
cagcagccacucccaaacccaga

SEQ ID NO: 1260271 - RNA, 18 nt, Human
cagcugcaugcccggccc

SEQ ID NO: 1260272 - RNA, 21 nt, Human
cagucccagugaguggaaucc

SEQ ID NO: 1260273 - RNA, 21 nt, Human
ccacacucgcacacaaaccca

SEQ ID NO: 1260274 - RNA, 23 nt, Human
ccaccuccugacagccuccaugg

SEQ ID NO: 1260275 - RNA, 21 nt, Human
ccacuggcagagguccucucu

SEQ ID NO: 1260276 - RNA, 18 nt, Human
ccagggaggaugcugaca

SEQ ID NO: 1260277 - RNA, 22 nt, Human
cccacagccgaaggagcagagg

SEQ ID NO: 1260278 - RNA, 25 nt, Human
cccacagccgaaggagcagaggggc

SEQ ID NO: 1260279 - RNA, 24 nt, Human
cccacaugaccggcggcggcgggu

SEQ ID NO: 1260280 - RNA, 23 nt, Human
cccacaugguccauggguuucug

SEQ ID NO: 1260281 - RNA, 22 nt, Human
cccaccacccauagagggcgcc

SEQ ID NO: 1260282 - RNA, 24 nt, Human
cccccgggcugggcucggcuccug

SEQ ID NO: 1260283 - RNA, 21 nt, Human
cccgguguagccucgggcugg

SEQ ID NO: 1260284 - RNA, 18 nt, Human
ccucaccagggccccugc

SEQ ID NO: 1260285 - RNA, 20 nt, Human
ccugcacacacccugggcca

SEQ ID NO: 1260286 - RNA, 21 nt, Human
ccugcacacacccugggccac

SEQ ID NO: 1260287 - RNA, 21 nt, Human
cggcccgaaggagcaguccgg

SEQ ID NO: 1260288 - RNA, 19 nt, Human
cggccgcgaagugcccggg

SEQ ID NO: 1260289 - RNA, 20 nt, Human
cuccugacagccuccauggu

SEQ ID NO: 1260290 - RNA, 18 nt, Human
cucggccgcgaagugccc

SEQ ID NO: 1260291 - RNA, 24 nt, Human
cugacaguggaaacgacuuccucc

SEQ ID NO: 1260292 - RNA, 21 nt, Human
cuugcucuccauccuggcagg

SEQ ID NO: 1260293 - RNA, 21 nt, Human
gaaggagcagaggggcagggu

SEQ ID NO: 1260294 - RNA, 22 nt, Human
gacucgccucuccaauggccuc

SEQ ID NO: 1260295 - RNA, 24 nt, Human
gacucgccucuccaauggccuccg

SEQ ID NO: 1260296 - RNA, 24 nt, Human
gagcugcccugcacacacccuggg

SEQ ID NO: 1260297 - RNA, 21 nt, Human
gcagcaggagcgcgacacagg

SEQ ID NO: 1260298 - RNA, 21 nt, Human
gccaacagcugucuccgucau

SEQ ID NO: 1260299 - RNA, 18 nt, Human
gcccgaaggagcaguccg

SEQ ID NO: 1260300 - RNA, 26 nt, Human
gcggcccgaaggagcaguccggccca

SEQ ID NO: 1260301 - RNA, 23 nt, Human
gcggucagcucggagccugaagc

SEQ ID NO: 1260302 - RNA, 22 nt, Human
gcuuccucccgguguagccucg

SEQ ID NO: 1260303 - RNA, 22 nt, Human
ggagggagcccaggcaucccca

SEQ ID NO: 1260304 - RNA, 20 nt, Human
gggcgcccagccagggcagc

SEQ ID NO: 1260305 - RNA, 21 nt, Human
gguuacauccagccuuggggg

SEQ ID NO: 1260306 - RNA, 23 nt, Human
gucagcucggagccugaagccag

SEQ ID NO: 1260307 - RNA, 21 nt, Human
guggccccuugcucuccaucc

SEQ ID NO: 1260308 - RNA, 21 nt, Human
uacauccagccuugggggucu

SEQ ID NO: 1260309 - RNA, 21 nt, Human
uagccucgggcuggugccccc

SEQ ID NO: 1260310 - RNA, 22 nt, Human
ucagcucggagccugaagccag

SEQ ID NO: 1260311 - RNA, 18 nt, Human
ucauccuuggagcugccc

SEQ ID NO: 1260312 - RNA, 22 nt, Human
uccauggguuucugggcaggug

SEQ ID NO: 1260313 - RNA, 24 nt, Human
ucccccgggcugggcucggcuccc

SEQ ID NO: 1260314 - RNA, 19 nt, Human
ucgcacacaaacccaccuu

SEQ ID NO: 1260315 - RNA, 20 nt, Human
ucgcacacaaacccaccuuc

SEQ ID NO: 1260316 - RNA, 22 nt, Human
ugcaugcccggcccacacucgc

SEQ ID NO: 1260317 - RNA, 22 nt, Human
uggcagauggggccagcacggc

SEQ ID NO: 1260318 - RNA, 19 nt, Human
uggcaggaauggugacaga

SEQ ID NO: 1260319 - RNA, 18 nt, Human
uggccuccgacacucguu

SEQ ID NO: 1260320 - RNA, 20 nt, Human
ugggaacaagguuacaucca

SEQ ID NO: 1260321 - RNA, 18 nt, Human
ugggagcgaugcagaugc

SEQ ID NO: 1260322 - RNA, 21 nt, Human
uggggccagcacggcuuucgg

SEQ ID NO: 1260323 - RNA, 18 nt, Human
ugggggucuuccauccuc

SEQ ID NO: 1260324 - RNA, 24 nt, Human
uugggggucuuccauccucaccag

SEQ ID NO: 1260325 - RNA, 18 nt, Human
aaaaaagccacagcagca

SEQ ID NO: 1260326 - RNA, 20 nt, Human
aaaaagccacagcagcaaca

SEQ ID NO: 1260327 - RNA, 21 nt, Human
aagaagagcaacagcucaagc

SEQ ID NO: 1260328 - RNA, 23 nt, Human
aagacccuucccgcucuccaccc

SEQ ID NO: 1260329 - RNA, 24 nt, Human
aagcacagcagucugaagcuuggg

SEQ ID NO: 1260330 - RNA, 19 nt, Human
aagucacaaaucuccacug

SEQ ID NO: 1260331 - RNA, 20 nt, Human
acccuauuuccuccccugaa

SEQ ID NO: 1260332 - RNA, 18 nt, Human
acugggacaucuggggac

SEQ ID NO: 1260333 - RNA, 19 nt, Human
agaaggcaaaaaagccaca

SEQ ID NO: 1260334 - RNA, 18 nt, Human
agacccuucccgcucucc

SEQ ID NO: 1260335 - RNA, 23 nt, Human
agcaacacuuaggagcaagaccc

SEQ ID NO: 1260336 - RNA, 20 nt, Human
agcagccaugguggggccag

SEQ ID NO: 1260337 - RNA, 23 nt, Human
aggacaucccaguggcuuugaag

SEQ ID NO: 1260338 - RNA, 26 nt, Human
aggcaagcagccaugguggggccagg

SEQ ID NO: 1260339 - RNA, 22 nt, Human
aggcaggaaggcccugauccag

SEQ ID NO: 1260340 - RNA, 24 nt, Human
aggugggcuccaaaccccaggcuu

SEQ ID NO: 1260341 - RNA, 23 nt, Human
auggagauggggagcuggucaug

SEQ ID NO: 1260342 - RNA, 19 nt, Human
auuuuuguuauagcagccu

SEQ ID NO: 1260343 - RNA, 23 nt, Human
caaaaaagccacagcagcaacac

SEQ ID NO: 1260344 - RNA, 19 nt, Human
caagcagccaugguggggc

SEQ ID NO: 1260345 - RNA, 20 nt, Human
cacccuauuuccuccccuga

SEQ ID NO: 1260346 - RNA, 21 nt, Human
cagccugaacaaagacagcuu

SEQ ID NO: 1260347 - RNA, 20 nt, Human
cagcucaagcucuagcaugg

SEQ ID NO: 1260348 - RNA, 21 nt, Human
caggaaggcccugauccagca

SEQ ID NO: 1260349 - RNA, 18 nt, Human
caguggcucccagggcug

SEQ ID NO: 1260350 - RNA, 22 nt, Human
caucuggggacaggcucuguuc

SEQ ID NO: 1260351 - RNA, 22 nt, Human
caugggacccaggugccuggag

SEQ ID NO: 1260352 - RNA, 22 nt, Human
ccagccagucaagacggucaau

SEQ ID NO: 1260353 - RNA, 24 nt, Human
ccaggugccuggaggacaucccag

SEQ ID NO: 1260354 - RNA, 23 nt, Human
cccaggugccuggaggacauccc

SEQ ID NO: 1260355 - RNA, 28 nt, Human
ccgcucuccacccuauuuccuccccuga

SEQ ID NO: 1260356 - RNA, 19 nt, Human
ccugaagaagagcaacagc

SEQ ID NO: 1260357 - RNA, 21 nt, Human
cucccagggcugcugcacacu

SEQ ID NO: 1260358 - RNA, 24 nt, Human
cugcugcacacuggacaccacaac

SEQ ID NO: 1260359 - RNA, 22 nt, Human
gaaacucgagcuucauaaacca

SEQ ID NO: 1260360 - RNA, 18 nt, Human
gaggggcuggggcccugc

SEQ ID NO: 1260361 - RNA, 19 nt, Human
gcaaggagaaguagaggaa

SEQ ID NO: 1260362 - RNA, 23 nt, Human
gccacagcagcaacacuuaggag

SEQ ID NO: 1260363 - RNA, 19 nt, Human
ggaaggcccugauccagca

SEQ ID NO: 1260364 - RNA, 23 nt, Human
ggcagugcgucuuuggagaaggc

SEQ ID NO: 1260365 - RNA, 19 nt, Human
gggagcuggucaugggacc

SEQ ID NO: 1260366 - RNA, 24 nt, Human
ggggagcuggucaugggacccagg

SEQ ID NO: 1260367 - RNA, 22 nt, Human
guccacagccaccucuguuacu

SEQ ID NO: 1260368 - RNA, 23 nt, Human
uaaaccagugaaaugccuacccc

SEQ ID NO: 1260369 - RNA, 18 nt, Human
uaccccuauggagauggg

SEQ ID NO: 1260370 - RNA, 23 nt, Human
uagaagaaggagaagucacaaau

SEQ ID NO: 1260371 - RNA, 21 nt, Human
uagaggaaguccacagccacc

SEQ ID NO: 1260372 - RNA, 19 nt, Human
uagcauggcacagaacgcu

SEQ ID NO: 1260373 - RNA, 23 nt, Human
uagcauggcacagaacgcuaggu

SEQ ID NO: 1260374 - RNA, 21 nt, Human
uauagcagccugaacaaagac

SEQ ID NO: 1260375 - RNA, 23 nt, Human
ucaauauuagcccuucugccaac

SEQ ID NO: 1260376 - RNA, 19 nt, Human
uccagcaaggagaaguaga

SEQ ID NO: 1260377 - RNA, 20 nt, Human
ugaaaugccuaccccuaugg

SEQ ID NO: 1260378 - RNA, 22 nt, Human
ugcauggugagcugcagagugg

SEQ ID NO: 1260379 - RNA, 23 nt, Human
ugcugcacacuggacaccacaac

SEQ ID NO: 1260380 - RNA, 22 nt, Human
uggagaaggcaaaaaagccaca

SEQ ID NO: 1260381 - RNA, 20 nt, Human
uggccugauguugccaggag

SEQ ID NO: 1260382 - RNA, 18 nt, Human
ugggacaucuggggacag

SEQ ID NO: 1260383 - RNA, 24 nt, Human
uggucaugggacccaggugccugg

SEQ ID NO: 1260384 - RNA, 18 nt, Human
uggugagcugcagagugg

SEQ ID NO: 1260385 - RNA, 21 nt, Human
ugugaggcugggguggacguu

SEQ ID NO: 1260386 - RNA, 23 nt, Human
ugugaggcugggguggacguugg

SEQ ID NO: 1260387 - RNA, 22 nt, Human
uguuauagcagccugaacaaag

SEQ ID NO: 1260388 - RNA, 21 nt, Human
uuacucaucgcuacugggaca

SEQ ID NO: 1260389 - RNA, 22 nt, Human
aaacggggcccaguugaguccu

SEQ ID NO: 1260390 - RNA, 23 nt, Human
aaaugccucccagagccccuucc

SEQ ID NO: 1260391 - RNA, 21 nt, Human
aagcaggaaaaugccucccag

SEQ ID NO: 1260392 - RNA, 23 nt, Human
aagcaggaaaaugccucccagag

SEQ ID NO: 1260393 - RNA, 22 nt, Human
agaaacggggcccaguugaguc

SEQ ID NO: 1260394 - RNA, 20 nt, Human
aggaagaaaaggggcaaagc

SEQ ID NO: 1260395 - RNA, 22 nt, Human
aggaagaaaaggggcaaagcag

SEQ ID NO: 1260396 - RNA, 22 nt, Human
aggccgcagaggacgacaguga

SEQ ID NO: 1260397 - RNA, 21 nt, Human
caaagcaggaaaaugccuccc

SEQ ID NO: 1260398 - RNA, 22 nt, Human
caaagcaggaaaaugccuccca

SEQ ID NO: 1260399 - RNA, 25 nt, Human
caccugaaacugcccuggggauggg

SEQ ID NO: 1260400 - RNA, 18 nt, Human
cacugcgcccacgcccug

SEQ ID NO: 1260401 - RNA, 26 nt, Human
cacugcgcccacgcccugagucuggc

SEQ ID NO: 1260402 - RNA, 20 nt, Human
cagccuccccuccccggguc

SEQ ID NO: 1260403 - RNA, 21 nt, Human
cagccuccccuccccgggucc

SEQ ID NO: 1260404 - RNA, 21 nt, Human
ccacagcuccaggacccagga

SEQ ID NO: 1260405 - RNA, 24 nt, Human
ccaccuggcgggccucuggagggg

SEQ ID NO: 1260406 - RNA, 20 nt, Human
ccagagccccuuccccggag

SEQ ID NO: 1260407 - RNA, 21 nt, Human
ccagccggcaccugaaacugc

SEQ ID NO: 1260408 - RNA, 20 nt, Human
ccccggagcuggacuguggg

SEQ ID NO: 1260409 - RNA, 21 nt, Human
ccccggagcuggacugugggg

SEQ ID NO: 1260410 - RNA, 19 nt, Human
ccccugggccucccuuggc

SEQ ID NO: 1260411 - RNA, 21 nt, Human
cccucggcccccugggccucc

SEQ ID NO: 1260412 - RNA, 25 nt, Human
cccuggcugagcccucaggguccuc

SEQ ID NO: 1260413 - RNA, 20 nt, Human
cccugggccucccuuggccc

SEQ ID NO: 1260414 - RNA, 21 nt, Human
cccugggccucccuuggcccc

SEQ ID NO: 1260415 - RNA, 22 nt, Human
cccuggggaugggccucuccug

SEQ ID NO: 1260416 - RNA, 18 nt, Human
ccucccagagccccuucc

SEQ ID NO: 1260417 - RNA, 19 nt, Human
ccuccugcaggcaacuuga

SEQ ID NO: 1260418 - RNA, 27 nt, Human
ccugaaacugcccuggggaugggccuc

SEQ ID NO: 1260419 - RNA, 23 nt, Human
cuggagagggaguggccucucuc

SEQ ID NO: 1260420 - RNA, 21 nt, Human
cuggccuggcacgggggcugu

SEQ ID NO: 1260421 - RNA, 19 nt, Human
cugugggggauggggcugg

SEQ ID NO: 1260422 - RNA, 18 nt, Human
gcccucaggguccucccc

SEQ ID NO: 1260423 - RNA, 21 nt, Human
gccucagccuccccuccccgg

SEQ ID NO: 1260424 - RNA, 21 nt, Human
gcuccaggacccaggagcggg

SEQ ID NO: 1260425 - RNA, 19 nt, Human
gcugacaccaguggcagag

SEQ ID NO: 1260426 - RNA, 21 nt, Human
ggcaacuugauagccuucuuc

SEQ ID NO: 1260427 - RNA, 22 nt, Human
gggaccugggcccucggccccc

SEQ ID NO: 1260428 - RNA, 21 nt, Human
ggugucuggccuggcacgggg

SEQ ID NO: 1260429 - RNA, 21 nt, Human
gugucuggccuggcacggggg

SEQ ID NO: 1260430 - RNA, 22 nt, Human
uagcguuugcccaguuugcgcu

SEQ ID NO: 1260431 - RNA, 18 nt, Human
ucaggguccuccccuccc

SEQ ID NO: 1260432 - RNA, 21 nt, Human
uccaaggaauucuuguagcgu

SEQ ID NO: 1260433 - RNA, 19 nt, Human
ucccuauggcagggggcuc

SEQ ID NO: 1260434 - RNA, 19 nt, Human
uccugggaccccucccugg

SEQ ID NO: 1260435 - RNA, 22 nt, Human
uccugggaccccucccuggcug

SEQ ID NO: 1260436 - RNA, 23 nt, Human
ucgagcucccccaacuucuuuag

SEQ ID NO: 1260437 - RNA, 19 nt, Human
ucggcccccugggccuccc

SEQ ID NO: 1260438 - RNA, 18 nt, Human
ucuggccuggcacggggg

SEQ ID NO: 1260439 - RNA, 18 nt, Human
ugagggcaugauggggac

SEQ ID NO: 1260440 - RNA, 18 nt, Human
ugccuuaaagaaaauggg

SEQ ID NO: 1260441 - RNA, 19 nt, Human
uggcagagaccagcaggac

SEQ ID NO: 1260442 - RNA, 18 nt, Human
uggccuggcacgggggcu

SEQ ID NO: 1260443 - RNA, 21 nt, Human
uggggaugggccucuccuggc

SEQ ID NO: 1260444 - RNA, 25 nt, Human
ugggggauggggcugguacuuccua

SEQ ID NO: 1260445 - RNA, 20 nt, Human
uggggugucuggccuggcac

SEQ ID NO: 1260446 - RNA, 18 nt, Human
uggugagggcaugauggg

SEQ ID NO: 1260447 - RNA, 18 nt, Human
ugugggggauggggcugg

SEQ ID NO: 1260448 - RNA, 20 nt, Human
uucucacugcgcccacgccc

SEQ ID NO: 1260449 - RNA, 19 nt, Human
aacacagccuuccucggcu

SEQ ID NO: 1260450 - RNA, 24 nt, Human
aaccauccaaagcgcaaucccuga

SEQ ID NO: 1260451 - RNA, 22 nt, Human
aaucccugaccucaggcagcuc

SEQ ID NO: 1260452 - RNA, 21 nt, Human
acgacucccccgacucccccg

SEQ ID NO: 1260453 - RNA, 21 nt, Human
aggaccaagcccagagcgcca

SEQ ID NO: 1260454 - RNA, 19 nt, Human
aggcagcucacaguccagu

SEQ ID NO: 1260455 - RNA, 23 nt, Human
caggaccaagcccagagcgccag

SEQ ID NO: 1260456 - RNA, 23 nt, Human
ccagagcgccaggccuggcuguu

SEQ ID NO: 1260457 - RNA, 21 nt, Human
gcuuccuccuucccaggggaa

SEQ ID NO: 1260458 - RNA, 23 nt, Human
uccaaagcgcaaucccugaccuc

SEQ ID NO: 1260459 - RNA, 19 nt, Human
ucccccgugugagucagaa

SEQ ID NO: 1260460 - RNA, 27 nt, Human
uggcuguucucuucaggguuguuuacg

SEQ ID NO: 1260461 - RNA, 21 nt, Human
ugucaaacgggugucccagga

SEQ ID NO: 1260462 - RNA, 23 nt, Human
uuacagugucaaacggguguccc

SEQ ID NO: 1260463 - RNA, 19 nt, Human
aaagauaugcucugucccu

SEQ ID NO: 1260464 - RNA, 18 nt, Human
aacaccagcuaaugcgua

SEQ ID NO: 1260465 - RNA, 22 nt, Human
aacccuccucaggagcuucagc

SEQ ID NO: 1260466 - RNA, 24 nt, Human
aagacccccucccucccucccucu

SEQ ID NO: 1260467 - RNA, 21 nt, Human
aaggaacuugcccaaagucac

SEQ ID NO: 1260468 - RNA, 19 nt, Human
acaaggaagggacauaagg

SEQ ID NO: 1260469 - RNA, 19 nt, Human
acacugccugccccaggag

SEQ ID NO: 1260470 - RNA, 22 nt, Human
acccccucccucccucccucug

SEQ ID NO: 1260471 - RNA, 27 nt, Human
agacucuccucuccccgcccccugccc

SEQ ID NO: 1260472 - RNA, 20 nt, Human
agagaccagucagcagcucu

SEQ ID NO: 1260473 - RNA, 19 nt, Human
agcaagcucuaggaggggc

SEQ ID NO: 1260474 - RNA, 24 nt, Human
agcaggaggauacuaguggccucg

SEQ ID NO: 1260475 - RNA, 19 nt, Human
agccugcccagcaagcucu

SEQ ID NO: 1260476 - RNA, 21 nt, Human
agcuauuggaggucaucaacu

SEQ ID NO: 1260477 - RNA, 19 nt, Human
aggggcuggaugccugggg

SEQ ID NO: 1260478 - RNA, 26 nt, Human
agguacugcaagcccuaucauaagcc

SEQ ID NO: 1260479 - RNA, 19 nt, Human
auaggacccccuuugacug

SEQ ID NO: 1260480 - RNA, 19 nt, Human
aucaacccaacaccagcua

SEQ ID NO: 1260481 - RNA, 21 nt, Human
aucaaucccuucccagucuug

SEQ ID NO: 1260482 - RNA, 22 nt, Human
caacuaggcccucaagacugga

SEQ ID NO: 1260483 - RNA, 24 nt, Human
caacucaccaagaaaagaaggggc

SEQ ID NO: 1260484 - RNA, 19 nt, Human
caagcucuaggaggggcug

SEQ ID NO: 1260485 - RNA, 18 nt, Human
cacacugccugccccagg

SEQ ID NO: 1260486 - RNA, 22 nt, Human
cacagccugacaucaaucccuu

SEQ ID NO: 1260487 - RNA, 22 nt, Human
caccaagaaaagaaggggcuua

SEQ ID NO: 1260488 - RNA, 24 nt, Human
cagcaaagauaugcucugucccuc

SEQ ID NO: 1260489 - RNA, 18 nt, Human
caggagcuucagcucacu

SEQ ID NO: 1260490 - RNA, 21 nt, Human
caguggaugcugccaccuucu

SEQ ID NO: 1260491 - RNA, 24 nt, Human
cauaagccccucagccaagccuca

SEQ ID NO: 1260492 - RNA, 21 nt, Human
ccaccuucugagauaggaccc

SEQ ID NO: 1260493 - RNA, 23 nt, Human
cccaacaccagcuaaugcguacu

SEQ ID NO: 1260494 - RNA, 22 nt, Human
cccaccagaccaggagcucuaa

SEQ ID NO: 1260495 - RNA, 22 nt, Human
ccccaggaacugccccaggucu

SEQ ID NO: 1260496 - RNA, 20 nt, Human
ccccaggucucaaucaaccc

SEQ ID NO: 1260497 - RNA, 22 nt, Human
ccccaggucucaaucaacccaa

SEQ ID NO: 1260498 - RNA, 18 nt, Human
cccccagcugacuugguu

SEQ ID NO: 1260499 - RNA, 20 nt, Human
cccccaucucugagcgcccc

SEQ ID NO: 1260500 - RNA, 21 nt, Human
cccccgcuggacacccauccu

SEQ ID NO: 1260501 - RNA, 22 nt, Human
cccccgcuggacacccauccuc

SEQ ID NO: 1260502 - RNA, 18 nt, Human
cccccugcccccaucucu

SEQ ID NO: 1260503 - RNA, 22 nt, Human
cccccugcccccaucucugagc

SEQ ID NO: 1260504 - RNA, 23 nt, Human
cccccugcccccaucucugagcc

SEQ ID NO: 1260505 - RNA, 25 nt, Human
cccccugcccccaucucugagcgcc

SEQ ID NO: 1260506 - RNA, 23 nt, Human
ccccucagccaagccucagcaaa

SEQ ID NO: 1260507 - RNA, 18 nt, Human
ccccucccucccucccuc

SEQ ID NO: 1260508 - RNA, 18 nt, Human
cccucaagacuggacagg

SEQ ID NO: 1260509 - RNA, 20 nt, Human
ccuauggccacagccugaca

SEQ ID NO: 1260510 - RNA, 23 nt, Human
ccuccuucccuucgggugaggau

SEQ ID NO: 1260511 - RNA, 22 nt, Human
ccugcaacuaggcccucaagac

SEQ ID NO: 1260512 - RNA, 20 nt, Human
ccugcaugaccaugugaagu

SEQ ID NO: 1260513 - RNA, 19 nt, Human
ccugccaccucugaggucc

SEQ ID NO: 1260514 - RNA, 22 nt, Human
ccugcccagcaagcucuaggag

SEQ ID NO: 1260515 - RNA, 21 nt, Human
cuccauagggcccugccaccu

SEQ ID NO: 1260516 - RNA, 19 nt, Human
cucuccccgcccccugccc

SEQ ID NO: 1260517 - RNA, 21 nt, Human
cuggcuucuugccccaggaac

SEQ ID NO: 1260518 - RNA, 19 nt, Human
cuggucuggggaggggucc

SEQ ID NO: 1260519 - RNA, 20 nt, Human
cuugcugaagacccccuccc

SEQ ID NO: 1260520 - RNA, 21 nt, Human
cuugcugaagacccccucccu

SEQ ID NO: 1260521 - RNA, 27 nt, Human
gagaauggcagggggaagccgguaccc

SEQ ID NO: 1260522 - RNA, 20 nt, Human
gagagcccuuguccugcuaa

SEQ ID NO: 1260523 - RNA, 22 nt, Human
gccaccuucugagauaggaccc

SEQ ID NO: 1260524 - RNA, 20 nt, Human
gcgccccccuucgggaaccc

SEQ ID NO: 1260525 - RNA, 19 nt, Human
gcucuggcucuacccaccu

SEQ ID NO: 1260526 - RNA, 18 nt, Human
gcuggugcuugcugaaga

SEQ ID NO: 1260527 - RNA, 22 nt, Human
ggaagggagcagaaacugagga

SEQ ID NO: 1260528 - RNA, 22 nt, Human
ggaccugcaacuaggcccucaa

SEQ ID NO: 1260529 - RNA, 21 nt, Human
ggagagagauggaagggagca

SEQ ID NO: 1260530 - RNA, 23 nt, Human
ggauacuaguggccucggccccc

SEQ ID NO: 1260531 - RNA, 19 nt, Human
ggcaugguggccucaggca

SEQ ID NO: 1260532 - RNA, 25 nt, Human
ggcccagaguggggaaggaacuugc

SEQ ID NO: 1260533 - RNA, 28 nt, Human
ggcccagaguggggaaggaacuugccgu

SEQ ID NO: 1260534 - RNA, 21 nt, Human
gggaggggucccuuggguuga

SEQ ID NO: 1260535 - RNA, 22 nt, Human
gggaggggucccuuggguugag

SEQ ID NO: 1260536 - RNA, 22 nt, Human
ggggaggggucccuuggguuga

SEQ ID NO: 1260537 - RNA, 24 nt, Human
ggggaggggucccuuggguugagu

SEQ ID NO: 1260538 - RNA, 20 nt, Human
ggggcuggaugccuggggga

SEQ ID NO: 1260539 - RNA, 19 nt, Human
ggggcuggugcuugcugaa

SEQ ID NO: 1260540 - RNA, 18 nt, Human
ggucaucaacucaccaag

SEQ ID NO: 1260541 - RNA, 24 nt, Human
ggucuggggaggggucccuugggu

SEQ ID NO: 1260542 - RNA, 22 nt, Human
guccagcccuggagaauggcag

SEQ ID NO: 1260543 - RNA, 19 nt, Human
gugagaaacugaggcccag

SEQ ID NO: 1260544 - RNA, 22 nt, Human
uaagccccucagccaagacccu

SEQ ID NO: 1260545 - RNA, 23 nt, Human
uaagccccucagccaagccucag

SEQ ID NO: 1260546 - RNA, 25 nt, Human
uacccaccagaccaggagcucuaau

SEQ ID NO: 1260547 - RNA, 19 nt, Human
uacgacagcccccagcuga

SEQ ID NO: 1260548 - RNA, 20 nt, Human
uaggaggggcuggaugccug

SEQ ID NO: 1260549 - RNA, 20 nt, Human
uagggucaguccagcccugg

SEQ ID NO: 1260550 - RNA, 21 nt, Human
uaguggccucggcccccgcug

SEQ ID NO: 1260551 - RNA, 21 nt, Human
ucacacugccugccccaggag

SEQ ID NO: 1260552 - RNA, 19 nt, Human
ucauaagccccucagccaa

SEQ ID NO: 1260553 - RNA, 21 nt, Human
ucaugcuaccuauggccacag

SEQ ID NO: 1260554 - RNA, 19 nt, Human
uccaauaaauccccucugg

SEQ ID NO: 1260555 - RNA, 21 nt, Human
uccagcccuggagaauggcag

SEQ ID NO: 1260556 - RNA, 21 nt, Human
ucucaguggaugcugccaccu

SEQ ID NO: 1260557 - RNA, 19 nt, Human
ucucugagcgccccccuuc

SEQ ID NO: 1260558 - RNA, 18 nt, Human
ucuggcucuacccaccag

SEQ ID NO: 1260559 - RNA, 19 nt, Human
ugacaucaaucccuuccca

SEQ ID NO: 1260560 - RNA, 26 nt, Human
ugacuugguucuggucuggggagggg

SEQ ID NO: 1260561 - RNA, 19 nt, Human
ugagaaacugaggcccaga

SEQ ID NO: 1260562 - RNA, 20 nt, Human
ugagaaacugaggcccagag

SEQ ID NO: 1260563 - RNA, 22 nt, Human
ugagaaacugaggcccagagug

SEQ ID NO: 1260564 - RNA, 25 nt, Human
ugagggcaguuggugcuccauaggg

SEQ ID NO: 1260565 - RNA, 20 nt, Human
ugcccacagggggcugugag

SEQ ID NO: 1260566 - RNA, 18 nt, Human
ugcccagaugaggugcag

SEQ ID NO: 1260567 - RNA, 26 nt, Human
ugcucugucccuccuugggcaacuca

SEQ ID NO: 1260568 - RNA, 21 nt, Human
uggaagggagcagaaacugag

SEQ ID NO: 1260569 - RNA, 24 nt, Human
uggagaauggcagggggaagcagg

SEQ ID NO: 1260570 - RNA, 21 nt, Human
uggaggucaucaacucaccaa

SEQ ID NO: 1260571 - RNA, 20 nt, Human
uggcagggggaagcaggagg

SEQ ID NO: 1260572 - RNA, 18 nt, Human
ugggagagagauggaagg

SEQ ID NO: 1260573 - RNA, 23 nt, Human
ugggggaccugcaacuaggcccu

SEQ ID NO: 1260574 - RNA, 19 nt, Human
ugggguugagggcaguugg

SEQ ID NO: 1260575 - RNA, 20 nt, Human
ugucugugcccacagggggc

SEQ ID NO: 1260576 - RNA, 18 nt, Human
uucuggucuggggagggg

SEQ ID NO: 1260577 - RNA, 23 nt, Human
aaaaaccaccagaggccaacccc

SEQ ID NO: 1260578 - RNA, 23 nt, Human
aaaacuuuuuucaaccugcccac

SEQ ID NO: 1260579 - RNA, 25 nt, Human
aaaacuuuuuucaaccugcccacaa

SEQ ID NO: 1260580 - RNA, 22 nt, Human
aaaccaccagaggccaaccccg

SEQ ID NO: 1260581 - RNA, 23 nt, Human
aaacugauguaaaugacccgcgc

SEQ ID NO: 1260582 - RNA, 21 nt, Human
aaagacagguccacagggaca

SEQ ID NO: 1260583 - RNA, 20 nt, Human
aaagagccaaucugagcaga

SEQ ID NO: 1260584 - RNA, 19 nt, Human
aacaaguucaccagaaggg

SEQ ID NO: 1260585 - RNA, 19 nt, Human
aacagaaggacauccugga

SEQ ID NO: 1260586 - RNA, 21 nt, Human
aaccaugggggcccugagaga

SEQ ID NO: 1260587 - RNA, 27 nt, Human
aagacaccuccauucccuccaaccucc

SEQ ID NO: 1260588 - RNA, 20 nt, Human
aagaggcccaccucauacuu

SEQ ID NO: 1260589 - RNA, 21 nt, Human
aaucaugaaguuucuaauuua

SEQ ID NO: 1260590 - RNA, 24 nt, Human
aaucaugaaguuucuaauuuacug

SEQ ID NO: 1260591 - RNA, 25 nt, Human
acacacagagacauccaaaaagaca

SEQ ID NO: 1260592 - RNA, 23 nt, Human
acaccuccauucccuccaaccuc

SEQ ID NO: 1260593 - RNA, 20 nt, Human
acagcgggaaagacuuaggc

SEQ ID NO: 1260594 - RNA, 20 nt, Human
acauggagccauacaaagac

SEQ ID NO: 1260595 - RNA, 23 nt, Human
accaccagaggccaaccccgccc

SEQ ID NO: 1260596 - RNA, 20 nt, Human
accagaagggaacacacagc

SEQ ID NO: 1260597 - RNA, 18 nt, Human
accccgcccagcccugag

SEQ ID NO: 1260598 - RNA, 25 nt, Human
accccgcccagcccugagcuucaac

SEQ ID NO: 1260599 - RNA, 22 nt, Human
acccuccccaucucccuuuucu

SEQ ID NO: 1260600 - RNA, 24 nt, Human
accuccauucccuccaaccuccag

SEQ ID NO: 1260601 - RNA, 18 nt, Human
accucucccuacaccccc

SEQ ID NO: 1260602 - RNA, 18 nt, Human
acucgggccauggccucg

SEQ ID NO: 1260603 - RNA, 20 nt, Human
agagcacccuaaccugacug

SEQ ID NO: 1260604 - RNA, 21 nt, Human
agcacugaagaugcaaaaacc

SEQ ID NO: 1260605 - RNA, 23 nt, Human
agcuaguggagcuucugccuccu

SEQ ID NO: 1260606 - RNA, 18 nt, Human
aggaagcucauacccaca

SEQ ID NO: 1260607 - RNA, 22 nt, Human
aggcuuggcuccauggagcagg

SEQ ID NO: 1260608 - RNA, 19 nt, Human
aggggugcugggagaggag

SEQ ID NO: 1260609 - RNA, 23 nt, Human
aucaugaaguuucuaauuuacug

SEQ ID NO: 1260610 - RNA, 26 nt, Human
auccuccccacaccccaggguggcug

SEQ ID NO: 1260611 - RNA, 23 nt, Human
aucuccuuccucucaucccccaa

SEQ ID NO: 1260612 - RNA, 20 nt, Human
augaagacuggcagagguca

SEQ ID NO: 1260613 - RNA, 23 nt, Human
auggagcaggguugaacaaguuc

SEQ ID NO: 1260614 - RNA, 22 nt, Human
caaacagcucuguagucaccac

SEQ ID NO: 1260615 - RNA, 18 nt, Human
caaccacccaucucuggc

SEQ ID NO: 1260616 - RNA, 18 nt, Human
caaccccgcccagcccug

SEQ ID NO: 1260617 - RNA, 24 nt, Human
caagacucaaguauccugcaaccc

SEQ ID NO: 1260618 - RNA, 21 nt, Human
caagggcuauacccuggcucg

SEQ ID NO: 1260619 - RNA, 22 nt, Human
caauacccaaaugggaaaugcu

SEQ ID NO: 1260620 - RNA, 23 nt, Human
cacaaacauccuggaaacaggga

SEQ ID NO: 1260621 - RNA, 21 nt, Human
caccacucaaacuccuccugu

SEQ ID NO: 1260622 - RNA, 25 nt, Human
cacccccaaguccaguaucucccca

SEQ ID NO: 1260623 - RNA, 24 nt, Human
cacccuccccuaccaaagagccaa

SEQ ID NO: 1260624 - RNA, 20 nt, Human
caccucaccagccccuucgc

SEQ ID NO: 1260625 - RNA, 21 nt, Human
caccucaccagccccuucgcu

SEQ ID NO: 1260626 - RNA, 22 nt, Human
caccuccauucccuccaaccuc

SEQ ID NO: 1260627 - RNA, 25 nt, Human
caccuggacaucccacaggaagcuc

SEQ ID NO: 1260628 - RNA, 21 nt, Human
cacgcuaguguccaacugcau

SEQ ID NO: 1260629 - RNA, 21 nt, Human
cacugaagaugcaaaaaccac

SEQ ID NO: 1260630 - RNA, 19 nt, Human
cagacagggcugggggcag

SEQ ID NO: 1260631 - RNA, 18 nt, Human
cagaugauccaaggggga

SEQ ID NO: 1260632 - RNA, 21 nt, Human
cagcccugagcuucaacuccu

SEQ ID NO: 1260633 - RNA, 22 nt, Human
cagucauuuccuucccuccuca

SEQ ID NO: 1260634 - RNA, 22 nt, Human
caucccacaggaagcucauacc

SEQ ID NO: 1260635 - RNA, 20 nt, Human
cauuuccuucccuccucacc

SEQ ID NO: 1260636 - RNA, 18 nt, Human
ccacccuccccuaccaaa

SEQ ID NO: 1260637 - RNA, 19 nt, Human
ccaccugaacagucuggcc

SEQ ID NO: 1260638 - RNA, 21 nt, Human
ccaccuggagcuaagucccug

SEQ ID NO: 1260639 - RNA, 19 nt, Human
ccagcccugagcuucaacu

SEQ ID NO: 1260640 - RNA, 22 nt, Human
cccacaggaagcucauacccac

SEQ ID NO: 1260641 - RNA, 22 nt, Human
cccaccucaccagccccuucgc

SEQ ID NO: 1260642 - RNA, 26 nt, Human
cccagcccugagcuucaacuccugac

SEQ ID NO: 1260643 - RNA, 20 nt, Human
cccaucucuggcuggaccaa

SEQ ID NO: 1260644 - RNA, 22 nt, Human
ccccaaacagcucuguagucac

SEQ ID NO: 1260645 - RNA, 24 nt, Human
ccccaaacagcucuguagucacca

SEQ ID NO: 1260646 - RNA, 25 nt, Human
ccccaaacagcucuguagucaccac

SEQ ID NO: 1260647 - RNA, 19 nt, Human
ccccacaccccaggguggc

SEQ ID NO: 1260648 - RNA, 23 nt, Human
ccccacgguuucaaccacccauc

SEQ ID NO: 1260649 - RNA, 23 nt, Human
ccccaggggcaagggcuauaccc

SEQ ID NO: 1260650 - RNA, 27 nt, Human
ccccgcccagcccugagcuucaacucc

SEQ ID NO: 1260651 - RNA, 19 nt, Human
cccgcgccaaacaccuggg

SEQ ID NO: 1260652 - RNA, 25 nt, Human
cccuccccaucucccuuuucuucaa

SEQ ID NO: 1260653 - RNA, 19 nt, Human
cccugagcuucaacuccug

SEQ ID NO: 1260654 - RNA, 24 nt, Human
cccuguacagccauccauucagca

SEQ ID NO: 1260655 - RNA, 21 nt, Human
ccgcgccaaacaccugggugu

SEQ ID NO: 1260656 - RNA, 24 nt, Human
ccuccugggauccuccccacaccc

SEQ ID NO: 1260657 - RNA, 18 nt, Human
ccucucauauugcugccu

SEQ ID NO: 1260658 - RNA, 20 nt, Human
ccugaccucucccuacaccc

SEQ ID NO: 1260659 - RNA, 20 nt, Human
ccugagcuucaacuccugac

SEQ ID NO: 1260660 - RNA, 19 nt, Human
ccuguaauugagagcuggg

SEQ ID NO: 1260661 - RNA, 18 nt, Human
ccuuccuaggccuuucuu

SEQ ID NO: 1260662 - RNA, 22 nt, Human
ccuuccucucaucccccaaaca

SEQ ID NO: 1260663 - RNA, 18 nt, Human
ccuuuggcugggccaggg

SEQ ID NO: 1260664 - RNA, 18 nt, Human
cgcucagagucaccugcu

SEQ ID NO: 1260665 - RNA, 18 nt, Human
cguccugaccuuccuagg

SEQ ID NO: 1260666 - RNA, 24 nt, Human
cuaguggagcuucugccuccuggg

SEQ ID NO: 1260667 - RNA, 18 nt, Human
cucaaguauccugcaacc

SEQ ID NO: 1260668 - RNA, 20 nt, Human
cuccagggacucccuucucc

SEQ ID NO: 1260669 - RNA, 22 nt, Human
cuccuccagaccccucugccaa

SEQ ID NO: 1260670 - RNA, 20 nt, Human
cuccuuccucucauccccca

SEQ ID NO: 1260671 - RNA, 20 nt, Human
cucggccccuccucgcacuu

SEQ ID NO: 1260672 - RNA, 19 nt, Human
cucugguuggcucagaccc

SEQ ID NO: 1260673 - RNA, 22 nt, Human
cugaaggcugccugcccagcac

SEQ ID NO: 1260674 - RNA, 23 nt, Human
cugagagagccuaagaggcccac

SEQ ID NO: 1260675 - RNA, 20 nt, Human
cugaucugacccuggguccc

SEQ ID NO: 1260676 - RNA, 22 nt, Human
cuggaagaggagggaaagcaag

SEQ ID NO: 1260677 - RNA, 24 nt, Human
cuggaccaaguucaagacucaagu

SEQ ID NO: 1260678 - RNA, 20 nt, Human
cuggcucuggaagguagggg

SEQ ID NO: 1260679 - RNA, 21 nt, Human
cugggggcagaggaggaggcc

SEQ ID NO: 1260680 - RNA, 21 nt, Human
cuuggcuccauggagcagggu

SEQ ID NO: 1260681 - RNA, 19 nt, Human
cuuuggcugggccagggcu

SEQ ID NO: 1260682 - RNA, 21 nt, Human
cuuuggcugggccagggcucc

SEQ ID NO: 1260683 - RNA, 21 nt, Human
gaacacacagagacauccaaa

SEQ ID NO: 1260684 - RNA, 19 nt, Human
gacucgggccauggccucg

SEQ ID NO: 1260685 - RNA, 21 nt, Human
gagagggugagagagcaggag

SEQ ID NO: 1260686 - RNA, 24 nt, Human
gagaugggguuggguguggccucu

SEQ ID NO: 1260687 - RNA, 20 nt, Human
gaggaggccaccggcccugc

SEQ ID NO: 1260688 - RNA, 24 nt, Human
gaucagaguggggaggggugcugg

SEQ ID NO: 1260689 - RNA, 21 nt, Human
gcacugaagaugcaaaaacca

SEQ ID NO: 1260690 - RNA, 21 nt, Human
gcaugccuucaccuguuuucu

SEQ ID NO: 1260691 - RNA, 23 nt, Human
gcaugccuucaccuguuuucuug

SEQ ID NO: 1260692 - RNA, 24 nt, Human
gccaaacaccugggugugagcccc

SEQ ID NO: 1260693 - RNA, 20 nt, Human
gcgcaagcauacaggcuccc

SEQ ID NO: 1260694 - RNA, 19 nt, Human
gcucggggcuccagagcag

SEQ ID NO: 1260695 - RNA, 25 nt, Human
gcucuguucucuaucuccuuccucu

SEQ ID NO: 1260696 - RNA, 23 nt, Human
gcuucaacuccugaccugaaccu

SEQ ID NO: 1260697 - RNA, 19 nt, Human
ggaaugcaaggagacuuca

SEQ ID NO: 1260698 - RNA, 25 nt, Human
ggaggggugcugggagaggagaggg

SEQ ID NO: 1260699 - RNA, 21 nt, Human
gggcaagggcuauacccuggc

SEQ ID NO: 1260700 - RNA, 23 nt, Human
gggcagaggaggaggccaccggc

SEQ ID NO: 1260701 - RNA, 23 nt, Human
gggcaugccuucaccuguuuucu

SEQ ID NO: 1260702 - RNA, 20 nt, Human
gggccagggcuccaggcugg

SEQ ID NO: 1260703 - RNA, 22 nt, Human
gggguuggguguggccucuuug

SEQ ID NO: 1260704 - RNA, 22 nt, Human
gggguuggguguggccucuuug

SEQ ID NO: 1260705 - RNA, 18 nt, Human
gggucugaucugacccug

SEQ ID NO: 1260706 - RNA, 23 nt, Human
ggugcugggagaggagaggguga

SEQ ID NO: 1260707 - RNA, 20 nt, Human
guccccaacaccgaggccaa

SEQ ID NO: 1260708 - RNA, 18 nt, Human
gugagagagcaggagccg

SEQ ID NO: 1260709 - RNA, 21 nt, Human
guggccaaaugggaacuccuc

SEQ ID NO: 1260710 - RNA, 19 nt, Human
uaaaaauacugaccgccac

SEQ ID NO: 1260711 - RNA, 19 nt, Human
uaaguacaaacccuacacg

SEQ ID NO: 1260712 - RNA, 22 nt, Human
uaagucuucaaauuccucuggu

SEQ ID NO: 1260713 - RNA, 25 nt, Human
uacacccccaaguccaguaucuccc

SEQ ID NO: 1260714 - RNA, 21 nt, Human
uacauggagccauacaaagac

SEQ ID NO: 1260715 - RNA, 23 nt, Human
uaccaaagagccaaucugagcag

SEQ ID NO: 1260716 - RNA, 20 nt, Human
uacccugcagauaugaagac

SEQ ID NO: 1260717 - RNA, 18 nt, Human
uaucacauucaaaacuga

SEQ ID NO: 1260718 - RNA, 23 nt, Human
uaugaagacuggcagaggucagg

SEQ ID NO: 1260719 - RNA, 22 nt, Human
ucaccagaagggaacacacagc

SEQ ID NO: 1260720 - RNA, 25 nt, Human
ucaccagccccuucgcuggauccuc

SEQ ID NO: 1260721 - RNA, 18 nt, Human
ucagagcacccuaaccug

SEQ ID NO: 1260722 - RNA, 20 nt, Human
ucagggagacguggcaacag

SEQ ID NO: 1260723 - RNA, 19 nt, Human
ucauacccacaguggccaa

SEQ ID NO: 1260724 - RNA, 24 nt, Human
uccagcucaacacuuuugcaaagu

SEQ ID NO: 1260725 - RNA, 22 nt, Human
uccccacaccccaggguggcug

SEQ ID NO: 1260726 - RNA, 22 nt, Human
ucccucagaccacaggccccca

SEQ ID NO: 1260727 - RNA, 18 nt, Human
ucccugacucuccagcag

SEQ ID NO: 1260728 - RNA, 25 nt, Human
ucccugacucuccagcaggccuggg

SEQ ID NO: 1260729 - RNA, 20 nt, Human
ucccugacucuccagcaggg

SEQ ID NO: 1260730 - RNA, 22 nt, Human
ucccugcuccagggacucccuu

SEQ ID NO: 1260731 - RNA, 21 nt, Human
uccuccagaccccucugccaa

SEQ ID NO: 1260732 - RNA, 19 nt, Human
uccugaccugaaccugguu

SEQ ID NO: 1260733 - RNA, 21 nt, Human
ucucccuuuucuucaaacccg

SEQ ID NO: 1260734 - RNA, 21 nt, Human
ucugacccuggguccccaacc

SEQ ID NO: 1260735 - RNA, 19 nt, Human
ucugcugccaccaaguuca

SEQ ID NO: 1260736 - RNA, 19 nt, Human
ucuguagucaccacucaaa

SEQ ID NO: 1260737 - RNA, 24 nt, Human
ucuguagucaccacucaaacuccu

SEQ ID NO: 1260738 - RNA, 22 nt, Human
ugaaaacaaguuguaaaaauac

SEQ ID NO: 1260739 - RNA, 21 nt, Human
ugacccuggguccccaacacc

SEQ ID NO: 1260740 - RNA, 20 nt, Human
ugaccucucccuacaccccc

SEQ ID NO: 1260741 - RNA, 20 nt, Human
ugagagcugggcccagagau

SEQ ID NO: 1260742 - RNA, 19 nt, Human
ugagcagagaacaaucaug

SEQ ID NO: 1260743 - RNA, 21 nt, Human
ugagcagagaacaaucaugaa

SEQ ID NO: 1260744 - RNA, 19 nt, Human
ugccuccugggauccuccc

SEQ ID NO: 1260745 - RNA, 28 nt, Human
ugccuccugggauccuccccacaccccc

SEQ ID NO: 1260746 - RNA, 22 nt, Human
ugccugagaaacagaaggacau

SEQ ID NO: 1260747 - RNA, 18 nt, Human
ugccugggcuggcucugg

SEQ ID NO: 1260748 - RNA, 19 nt, Human
uggaagaggagggaaagca

SEQ ID NO: 1260749 - RNA, 22 nt, Human
uggaagaugagaaucacccucc

SEQ ID NO: 1260750 - RNA, 18 nt, Human
uggaagguaggggcaggg

SEQ ID NO: 1260751 - RNA, 23 nt, Human
uggaagguaggggcagggucuga

SEQ ID NO: 1260752 - RNA, 19 nt, Human
uggcaacagccaccugaac

SEQ ID NO: 1260753 - RNA, 22 nt, Human
uggcucagacccuguuuugguc

SEQ ID NO: 1260754 - RNA, 21 nt, Human
uggcuggaccaaguucaagac

SEQ ID NO: 1260755 - RNA, 21 nt, Human
uggcugggccagggcuccagg

SEQ ID NO: 1260756 - RNA, 20 nt, Human
ugggagaggagagggugaga

SEQ ID NO: 1260757 - RNA, 19 nt, Human
ugggcuggcucuggaaggu

SEQ ID NO: 1260758 - RNA, 23 nt, Human
ugggcuggcucuggaagguagaa

SEQ ID NO: 1260759 - RNA, 19 nt, Human
uggggaggggugcugggag

SEQ ID NO: 1260760 - RNA, 28 nt, Human
uggggaggggugcugggagaggagaggg

SEQ ID NO: 1260761 - RNA, 18 nt, Human
ugggggcagaggaggagg

SEQ ID NO: 1260762 - RNA, 20 nt, Human
ugggggcagaggaggaggcc

SEQ ID NO: 1260763 - RNA, 23 nt, Human
ugggggcagaggaggaggccacc

SEQ ID NO: 1260764 - RNA, 19 nt, Human
ugggggcccugagagagcc

SEQ ID NO: 1260765 - RNA, 19 nt, Human
uggugaacuccuauagauc

SEQ ID NO: 1260766 - RNA, 24 nt, Human
ugugcaaacacaugcgaacacaca

SEQ ID NO: 1260767 - RNA, 23 nt, Human
ugugcagaugauccaagggggau

SEQ ID NO: 1260768 - RNA, 23 nt, Human
uucaaaacugauguaaaugaccc

SEQ ID NO: 1260769 - RNA, 21 nt, Human
uucagagcacccuaaccugac

SEQ ID NO: 1260770 - RNA, 22 nt, Human
uuccuucccuccucaccucagg

SEQ ID NO: 1260771 - RNA, 22 nt, Human
uucgcuggauccucucugccca

SEQ ID NO: 1260772 - RNA, 21 nt, Human
uucuuggcaguaucauccacc

SEQ ID NO: 1260773 - RNA, 24 nt, Human
uugcaaaguuaauuucuucugugu

SEQ ID NO: 1260774 - RNA, 19 nt, Human
uuucuggccccaccucacc

SEQ ID NO: 1260775 - RNA, 19 nt, Human
uuugcagugucuacgaaac

SEQ ID NO: 1260776 - RNA, 19 nt, Human
aaacucagaggugagacaa

SEQ ID NO: 1260777 - RNA, 18 nt, Human
aacuccaagugcugguca

SEQ ID NO: 1260778 - RNA, 19 nt, Human
aauggaggaaggugaagug

SEQ ID NO: 1260779 - RNA, 19 nt, Human
acagaaagucuggagaagc

SEQ ID NO: 1260780 - RNA, 20 nt, Human
acagcaacaccuccuccccu

SEQ ID NO: 1260781 - RNA, 21 nt, Human
accccugucaaccagaggcac

SEQ ID NO: 1260782 - RNA, 22 nt, Human
accuggacagcaacaccuccuc

SEQ ID NO: 1260783 - RNA, 19 nt, Human
acuagaggcaggggcauug

SEQ ID NO: 1260784 - RNA, 20 nt, Human
acuguccuagccccagcuga

SEQ ID NO: 1260785 - RNA, 18 nt, Human
agagaggcccagccccuc

SEQ ID NO: 1260786 - RNA, 22 nt, Human
agcacggaguaagggaggaaga

SEQ ID NO: 1260787 - RNA, 24 nt, Human
agcagcccucacuguccuagcccc

SEQ ID NO: 1260788 - RNA, 18 nt, Human
aggauggacaggcugggc

SEQ ID NO: 1260789 - RNA, 18 nt, Human
aggcauagaggugugcag

SEQ ID NO: 1260790 - RNA, 21 nt, Human
aggcauagaggugugcagugg

SEQ ID NO: 1260791 - RNA, 21 nt, Human
agggggagauaauggggagga

SEQ ID NO: 1260792 - RNA, 30 nt, Human
agugaugggagcacggaguaagggaggaaa

SEQ ID NO: 1260793 - RNA, 23 nt, Human
auccacucugccugucuuugcca

SEQ ID NO: 1260794 - RNA, 18 nt, Human
auucauccuuccaggccu

SEQ ID NO: 1260795 - RNA, 26 nt, Human
caaacaccuccaggaagucuucucag

SEQ ID NO: 1260796 - RNA, 21 nt, Human
cacaggcccuccuucccucca

SEQ ID NO: 1260797 - RNA, 18 nt, Human
caccagaccuguucgugc

SEQ ID NO: 1260798 - RNA, 21 nt, Human
cagaaugcaguagaagagaug

SEQ ID NO: 1260799 - RNA, 19 nt, Human
cagcaacaccuccucccca

SEQ ID NO: 1260800 - RNA, 25 nt, Human
cagcaacaccuccuccccagggugc

SEQ ID NO: 1260801 - RNA, 19 nt, Human
caugccuggacugcagcca

SEQ ID NO: 1260802 - RNA, 21 nt, Human
cauucauccuuccaggccuca

SEQ ID NO: 1260803 - RNA, 26 nt, Human
ccacaggcccuccuucccuccagcuu

SEQ ID NO: 1260804 - RNA, 21 nt, Human
ccaggccucaggguggaaaca

SEQ ID NO: 1260805 - RNA, 19 nt, Human
cccacugcaaggcauagag

SEQ ID NO: 1260806 - RNA, 21 nt, Human
cccacugcaaggcauagaggu

SEQ ID NO: 1260807 - RNA, 18 nt, Human
ccccacacaugagucuuc

SEQ ID NO: 1260808 - RNA, 21 nt, Human
ccccagggugcuaagggcugu

SEQ ID NO: 1260809 - RNA, 20 nt, Human
cccucuagcagcccucacug

SEQ ID NO: 1260810 - RNA, 23 nt, Human
cccuuggucuggucuccucuucu

SEQ ID NO: 1260811 - RNA, 18 nt, Human
ccuagccccagcugaccc

SEQ ID NO: 1260812 - RNA, 21 nt, Human
ccucacuguccuagccccagc

SEQ ID NO: 1260813 - RNA, 20 nt, Human
ccugucuuugccauucuccc

SEQ ID NO: 1260814 - RNA, 18 nt, Human
cggaguaagggaggaaga

SEQ ID NO: 1260815 - RNA, 20 nt, Human
cuagcagcccucacuguccu

SEQ ID NO: 1260816 - RNA, 24 nt, Human
cucaaauuauccucugguuccugc

SEQ ID NO: 1260817 - RNA, 21 nt, Human
cuccauuccuuccaacccuaa

SEQ ID NO: 1260818 - RNA, 23 nt, Human
cuccuugaaucugcuggguugug

SEQ ID NO: 1260819 - RNA, 23 nt, Human
cucggugcaggugcccaccccca

SEQ ID NO: 1260820 - RNA, 18 nt, Human
cuggagaagccagaggaa

SEQ ID NO: 1260821 - RNA, 31 nt, Human
cuggagaguggcaaacggcaggcugagaagg

SEQ ID NO: 1260822 - RNA, 19 nt, Human
cuuccguugaccccuccag

SEQ ID NO: 1260823 - RNA, 18 nt, Human
cuucucagcacagcaccu

SEQ ID NO: 1260824 - RNA, 18 nt, Human
cuugcuccuggcuccucc

SEQ ID NO: 1260825 - RNA, 23 nt, Human
gaagagagaugaggauggacagg

SEQ ID NO: 1260826 - RNA, 19 nt, Human
gacaauauagcugagacaa

SEQ ID NO: 1260827 - RNA, 18 nt, Human
gacaggcugggccagaug

SEQ ID NO: 1260828 - RNA, 26 nt, Human
gagaggcccagccccucuagcagccc

SEQ ID NO: 1260829 - RNA, 22 nt, Human
gagauaauggggaggauauggc

SEQ ID NO: 1260830 - RNA, 26 nt, Human
gaggaagagagaugaggauggacagg

SEQ ID NO: 1260831 - RNA, 18 nt, Human
gaggauggacaggcuggg

SEQ ID NO: 1260832 - RNA, 24 nt, Human
gaggugugcagccuaggacucgag

SEQ ID NO: 1260833 - RNA, 18 nt, Human
gaguaagggaggaagaga

SEQ ID NO: 1260834 - RNA, 24 nt, Human
gauaaaaucaguauuguaggauga

SEQ ID NO: 1260835 - RNA, 21 nt, Human
gauccugauccucuggauuca

SEQ ID NO: 1260836 - RNA, 21 nt, Human
gcaaaaacucagaggugagac

SEQ ID NO: 1260837 - RNA, 20 nt, Human
gcaggagucugggaaggcuc

SEQ ID NO: 1260838 - RNA, 21 nt, Human
gccuaggguaggcaagggacc

SEQ ID NO: 1260839 - RNA, 24 nt, Human
gccuggacugcagccacaggcccu

SEQ ID NO: 1260840 - RNA, 19 nt, Human
gcucgggccuggaagugga

SEQ ID NO: 1260841 - RNA, 20 nt, Human
ggagggagugcacuagaggc

SEQ ID NO: 1260842 - RNA, 21 nt, Human
ggagucugggaaggcucugca

SEQ ID NO: 1260843 - RNA, 24 nt, Human
ggcucccuaauguuggcccugccc

SEQ ID NO: 1260844 - RNA, 24 nt, Human
gggagauaauggggaggauauggc

SEQ ID NO: 1260845 - RNA, 21 nt, Human
gugagacaggaugcagguccu

SEQ ID NO: 1260846 - RNA, 23 nt, Human
guggaggaacagaaagucuggag

SEQ ID NO: 1260847 - RNA, 20 nt, Human
gugugcagccuaggacucga

SEQ ID NO: 1260848 - RNA, 21 nt, Human
gugugcaguggccuaggguag

SEQ ID NO: 1260849 - RNA, 19 nt, Human
uagagaggggcccaguguc

SEQ ID NO: 1260850 - RNA, 22 nt, Human
ucaccagaccuguucgugcccc

SEQ ID NO: 1260851 - RNA, 18 nt, Human
ucaugggcaaaaacucag

SEQ ID NO: 1260852 - RNA, 22 nt, Human
ucaugggcaaaaacucagaggu

SEQ ID NO: 1260853 - RNA, 21 nt, Human
uccccagggugcuaagggcug

SEQ ID NO: 1260854 - RNA, 19 nt, Human
uccuagccccagcugaccc

SEQ ID NO: 1260855 - RNA, 18 nt, Human
ucgugccccuugaccagc

SEQ ID NO: 1260856 - RNA, 22 nt, Human
ucugguuccugcuggauccuga

SEQ ID NO: 1260857 - RNA, 23 nt, Human
ucuucugcauugccugcucugac

SEQ ID NO: 1260858 - RNA, 21 nt, Human
ugaagugggaaugcuugcucc

SEQ ID NO: 1260859 - RNA, 22 nt, Human
ugaccccuuggucuggucuccu

SEQ ID NO: 1260860 - RNA, 23 nt, Human
ugagacaggaugcagguccuguu

SEQ ID NO: 1260861 - RNA, 20 nt, Human
ugauccucuggauucagacu

SEQ ID NO: 1260862 - RNA, 24 nt, Human
ugcaaagagaggcccagccccucu

SEQ ID NO: 1260863 - RNA, 18 nt, Human
ugcacuagaggcaggggc

SEQ ID NO: 1260864 - RNA, 20 nt, Human
ugcagcugguucaccuccuc

SEQ ID NO: 1260865 - RNA, 23 nt, Human
ugccccuugaccagcaauggccc

SEQ ID NO: 1260866 - RNA, 22 nt, Human
ugccuggacugcagccacaggc

SEQ ID NO: 1260867 - RNA, 18 nt, Human
ugcuugugaggugugcag

SEQ ID NO: 1260868 - RNA, 19 nt, Human
uggacagcaacaccuccuc

SEQ ID NO: 1260869 - RNA, 20 nt, Human
uggagaguggcaaacggcag

SEQ ID NO: 1260870 - RNA, 18 nt, Human
uggaggaacagaaagucu

SEQ ID NO: 1260871 - RNA, 23 nt, Human
uggaggaacagaaagucuggaga

SEQ ID NO: 1260872 - RNA, 19 nt, Human
ugggaaggcucugcagaua

SEQ ID NO: 1260873 - RNA, 22 nt, Human
ugggcaaaaacucagaggugag

SEQ ID NO: 1260874 - RNA, 19 nt, Human
uggucuggucuccucuucu

SEQ ID NO: 1260875 - RNA, 24 nt, Human
uggucuggucuccucuucugcauu

SEQ ID NO: 1260876 - RNA, 22 nt, Human
ugugaggugugcagccuaggac

SEQ ID NO: 1260877 - RNA, 26 nt, Human
uguuccgucuuccguugaccccucca

SEQ ID NO: 1260878 - RNA, 21 nt, Human
uuacuccauuccuuccaaccc

SEQ ID NO: 1260879 - RNA, 24 nt, Human
uuauuugugagacaggaugcaggu

SEQ ID NO: 1260880 - RNA, 19 nt, Human
uucaggaacugcugcuucc

SEQ ID NO: 1260881 - RNA, 24 nt, Human
uuccauucauccuuccaggccuca

SEQ ID NO: 1260882 - RNA, 19 nt, Human
uugcagggucaccagaccu

SEQ ID NO: 1260883 - RNA, 21 nt, Human
uugcagggucaccagaccugu

SEQ ID NO: 1260884 - RNA, 22 nt, Human
uugcagggucaccagaccuguu

SEQ ID NO: 1260885 - RNA, 20 nt, Human
uuugccauucucccuuuccc

SEQ ID NO: 1260886 - RNA, 21 nt, Human
uuuggaaucagccaccaauga

SEQ ID NO: 1260887 - RNA, 18 nt, Human
cagcucccguggccugug

SEQ ID NO: 1260888 - RNA, 21 nt, Human
cagcucccguggccugugcuc

SEQ ID NO: 1260889 - RNA, 21 nt, Human
cucucugcugcgcucagcucc

SEQ ID NO: 1260890 - RNA, 20 nt, Human
cugcucucugcugcgcucag

SEQ ID NO: 1260891 - RNA, 20 nt, Human
ucagcucccguggccugugc

SEQ ID NO: 1260892 - RNA, 23 nt, Human
ucccguggccugugcucgccgcu

SEQ ID NO: 1260893 - RNA, 24 nt, Human
ucccguggccugugcucgccgcuc

SEQ ID NO: 1260894 - RNA, 20 nt, Human
ucugcugcgcucagcucccg

SEQ ID NO: 1260895 - RNA, 22 nt, Human
ucugcugcgcucagcucccgug

SEQ ID NO: 1260896 - RNA, 21 nt, Human
ugcgcucagcucccguggccu

SEQ ID NO: 1260897 - RNA, 19 nt, Human
ccucuugccuugguugaug

SEQ ID NO: 1260898 - RNA, 20 nt, Human
ucagcaacacugguccucuu

SEQ ID NO: 1260899 - RNA, 22 nt, Human
aaacacagaaggcuaugucaga

SEQ ID NO: 1260900 - RNA, 24 nt, Human
aaccacuccccaccaucaccaccc

SEQ ID NO: 1260901 - RNA, 23 nt, Human
acacagcaguuuuccccuugccu

SEQ ID NO: 1260902 - RNA, 18 nt, Human
acccuuaggcagagagag

SEQ ID NO: 1260903 - RNA, 18 nt, Human
agaggaagaagcagggga

SEQ ID NO: 1260904 - RNA, 23 nt, Human
agcgagagcacaaugguuccccu

SEQ ID NO: 1260905 - RNA, 22 nt, Human
agguguuaggaugagauaaacc

SEQ ID NO: 1260906 - RNA, 18 nt, Human
caaccacuccccaccauc

SEQ ID NO: 1260907 - RNA, 21 nt, Human
caaugguuccccugagagccu

SEQ ID NO: 1260908 - RNA, 18 nt, Human
cacaaugguuccccugag

SEQ ID NO: 1260909 - RNA, 23 nt, Human
caccacccuuaggcagagagagg

SEQ ID NO: 1260910 - RNA, 18 nt, Human
cacgcugggagcugcaga

SEQ ID NO: 1260911 - RNA, 21 nt, Human
cacuccccaccaucaccaccc

SEQ ID NO: 1260912 - RNA, 19 nt, Human
cauggggaucucuuagagg

SEQ ID NO: 1260913 - RNA, 23 nt, Human
ccaccaucaccacccuuaggcag

SEQ ID NO: 1260914 - RNA, 22 nt, Human
ccacuccccaccaucaccaccc

SEQ ID NO: 1260915 - RNA, 18 nt, Human
ccccugagagccuccgug

SEQ ID NO: 1260916 - RNA, 22 nt, Human
ccccugagagccuccguggccc

SEQ ID NO: 1260917 - RNA, 19 nt, Human
cguggcccuucugugugcc

SEQ ID NO: 1260918 - RNA, 21 nt, Human
cuuuaucaaccacuccccacc

SEQ ID NO: 1260919 - RNA, 20 nt, Human
gcagagagaggaagaagcag

SEQ ID NO: 1260920 - RNA, 19 nt, Human
ggcagagagaggaagaagc

SEQ ID NO: 1260921 - RNA, 23 nt, Human
ggcagagagaggaagaagcaggg

SEQ ID NO: 1260922 - RNA, 24 nt, Human
ggcagagagaggaagaagcagggg

SEQ ID NO: 1260923 - RNA, 20 nt, Human
uaggaugagauaaaccugac

SEQ ID NO: 1260924 - RNA, 21 nt, Human
uaggcagagagaggaagaagc

SEQ ID NO: 1260925 - RNA, 24 nt, Human
uaggcagagagaggaagaagcagg

SEQ ID NO: 1260926 - RNA, 21 nt, Human
ucaguuggaaaugcagaaauc

SEQ ID NO: 1260927 - RNA, 20 nt, Human
ucuaucuaucuaucuaucuu

SEQ ID NO: 1260928 - RNA, 22 nt, Human
uguuaggaugagauaaaccuga

SEQ ID NO: 1260929 - RNA, 19 nt, Human
uuauaugcacagucacucc

SEQ ID NO: 1260930 - RNA, 28 nt, Human
uugauagcgagagcacaaugguuccccu

SEQ ID NO: 1260931 - RNA, 22 nt, Human
aaaacaaacuaaauagaaaccc

SEQ ID NO: 1260932 - RNA, 22 nt, Human
aaacaauccaaaccaauccuca

SEQ ID NO: 1260933 - RNA, 21 nt, Human
aaauuccaaagucacuuaacu

SEQ ID NO: 1260934 - RNA, 20 nt, Human
aacccucuaacccugccccc

SEQ ID NO: 1260935 - RNA, 25 nt, Human
aacccucuaacccugccccccacua

SEQ ID NO: 1260936 - RNA, 22 nt, Human
aacuauuagaaauguuaaacag

SEQ ID NO: 1260937 - RNA, 18 nt, Human
aacuuagaagggccuaua

SEQ ID NO: 1260938 - RNA, 23 nt, Human
aagaacaaauugaggcuaucaag

SEQ ID NO: 1260939 - RNA, 24 nt, Human
aagaagcacuuccacguguauacu

SEQ ID NO: 1260940 - RNA, 19 nt, Human
aagauuaaugucucugucc

SEQ ID NO: 1260941 - RNA, 26 nt, Human
aagcauagccgaguagcacugauacu

SEQ ID NO: 1260942 - RNA, 23 nt, Human
aaggacacagaaaaaaaaucuug

SEQ ID NO: 1260943 - RNA, 24 nt, Human
aagugauccucccaccucagcuuc

SEQ ID NO: 1260944 - RNA, 22 nt, Human
acaaaaaucauaaaaggugacc

SEQ ID NO: 1260945 - RNA, 18 nt, Human
acaguucauugcagccuc

SEQ ID NO: 1260946 - RNA, 24 nt, Human
accucaaaauaaauauuuugguau

SEQ ID NO: 1260947 - RNA, 27 nt, Human
acuccaucgcccaggcuggaaugcugu

SEQ ID NO: 1260948 - RNA, 18 nt, Human
agaaucugguccccugcc

SEQ ID NO: 1260949 - RNA, 19 nt, Human
agacaaaaggcgagaguug

SEQ ID NO: 1260950 - RNA, 26 nt, Human
agcagcucauuuuuuccuggugcuuu

SEQ ID NO: 1260951 - RNA, 28 nt, Human
agcauccuaagugaaaagccugcucugu

SEQ ID NO: 1260952 - RNA, 20 nt, Human
agcugaaauccugacaggug

SEQ ID NO: 1260953 - RNA, 19 nt, Human
auaaagggcuacuuugauc

SEQ ID NO: 1260954 - RNA, 19 nt, Human
auucgguucuccuuugaca

SEQ ID NO: 1260955 - RNA, 21 nt, Human
caaaaagcauagccgaguagc

SEQ ID NO: 1260956 - RNA, 21 nt, Human
caacucuauugggaauauaau

SEQ ID NO: 1260957 - RNA, 20 nt, Human
caagugauccucccaccuca

SEQ ID NO: 1260958 - RNA, 25 nt, Human
cacacaauguuuauuuagugaauag

SEQ ID NO: 1260959 - RNA, 22 nt, Human
cagaaaaauguccaaauuccuu

SEQ ID NO: 1260960 - RNA, 18 nt, Human
caggugauauggcucaag

SEQ ID NO: 1260961 - RNA, 21 nt, Human
caguucauugcagccuccacc

SEQ ID NO: 1260962 - RNA, 22 nt, Human
cauggccaaauucuucaaugac

SEQ ID NO: 1260963 - RNA, 20 nt, Human
cauuuugccauuucugucuu

SEQ ID NO: 1260964 - RNA, 18 nt, Human
ccaaaaagcauagccgag

SEQ ID NO: 1260965 - RNA, 18 nt, Human
ccaaaccaauccucaacu

SEQ ID NO: 1260966 - RNA, 23 nt, Human
ccuacagaaaaauguccaaauuc

SEQ ID NO: 1260967 - RNA, 23 nt, Human
ccucccauuuugcaaauagggaa

SEQ ID NO: 1260968 - RNA, 20 nt, Human
ccugcucuguugccuacaga

SEQ ID NO: 1260969 - RNA, 20 nt, Human
ccuggggcucaagugauccc

SEQ ID NO: 1260970 - RNA, 22 nt, Human
cgaggauacaguauguucccaa

SEQ ID NO: 1260971 - RNA, 23 nt, Human
cucaaaauaaauauuuugguauc

SEQ ID NO: 1260972 - RNA, 24 nt, Human
cucaagugauccucccaccucagc

SEQ ID NO: 1260973 - RNA, 21 nt, Human
cucacaacccucuaacccugc

SEQ ID NO: 1260974 - RNA, 23 nt, Human
cucacaacccucuaacccugccc

SEQ ID NO: 1260975 - RNA, 18 nt, Human
cucacuccaucgcccagg

SEQ ID NO: 1260976 - RNA, 18 nt, Human
cucuauacuacuguggcu

SEQ ID NO: 1260977 - RNA, 20 nt, Human
cuuccacguguauacuuuaa

SEQ ID NO: 1260978 - RNA, 23 nt, Human
gaagcacuuccacguguauacuu

SEQ ID NO: 1260979 - RNA, 22 nt, Human
gcaaaaucuaugaagccuaaag

SEQ ID NO: 1260980 - RNA, 20 nt, Human
gcagccuccaccccuggggc

SEQ ID NO: 1260981 - RNA, 20 nt, Human
gcccaggcuggaaugcugug

SEQ ID NO: 1260982 - RNA, 21 nt, Human
gggcucaagugauccucccac

SEQ ID NO: 1260983 - RNA, 19 nt, Human
gucuuccucuauagagcuc

SEQ ID NO: 1260984 - RNA, 21 nt, Human
uacagaaaaauguccaaauuc

SEQ ID NO: 1260985 - RNA, 23 nt, Human
uagagcucuuccccucacaaccc

SEQ ID NO: 1260986 - RNA, 22 nt, Human
uaggacaguauucacacaaugu

SEQ ID NO: 1260987 - RNA, 18 nt, Human
uauuagaaauguuaaaca

SEQ ID NO: 1260988 - RNA, 19 nt, Human
ucacacaauguuuauuuag

SEQ ID NO: 1260989 - RNA, 21 nt, Human
ucagaaacgugcacaucacca

SEQ ID NO: 1260990 - RNA, 22 nt, Human
ucauugcagccuccaccccugg

SEQ ID NO: 1260991 - RNA, 23 nt, Human
ucauugcagccuccaccccuggg

SEQ ID NO: 1260992 - RNA, 21 nt, Human
uccaaaccaauccucaacugc

SEQ ID NO: 1260993 - RNA, 19 nt, Human
uccaacagccuucuaccuc

SEQ ID NO: 1260994 - RNA, 19 nt, Human
uccaacagccuucuaccuc

SEQ ID NO: 1260995 - RNA, 21 nt, Human
uccccucacaacccucuaacc

SEQ ID NO: 1260996 - RNA, 18 nt, Human
ucccugaaggacacagaa

SEQ ID NO: 1260997 - RNA, 18 nt, Human
ucgcccaggcuggaaugc

SEQ ID NO: 1260998 - RNA, 22 nt, Human
ucuauagagcucuuccccucac

SEQ ID NO: 1260999 - RNA, 24 nt, Human
ucuaugaagccuaaagagaccccc

SEQ ID NO: 1261000 - RNA, 23 nt, Human
ucucacuccaucgcccaggcugg

SEQ ID NO: 1261001 - RNA, 24 nt, Human
ucucacuccaucgcccaggcugga

SEQ ID NO: 1261002 - RNA, 18 nt, Human
ugaagccuaaagagaccc

SEQ ID NO: 1261003 - RNA, 19 nt, Human
ugaaggacacagaaaaaaa

SEQ ID NO: 1261004 - RNA, 20 nt, Human
ugaaggacacagaaaaaaaa

SEQ ID NO: 1261005 - RNA, 23 nt, Human
ugacagcauccuaagugaaaagc

SEQ ID NO: 1261006 - RNA, 24 nt, Human
ugaggucucacuccaucgcccagg

SEQ ID NO: 1261007 - RNA, 23 nt, Human
ugcaaaaucuaugaagccuaaag

SEQ ID NO: 1261008 - RNA, 19 nt, Human
ugcagccuccaccccuggg

SEQ ID NO: 1261009 - RNA, 19 nt, Human
ugccuacagaaaaaugucc

SEQ ID NO: 1261010 - RNA, 21 nt, Human
ugcuacacaguacaaaaagca

SEQ ID NO: 1261011 - RNA, 23 nt, Human
ugcucuguugccuacagaaaaau

SEQ ID NO: 1261012 - RNA, 24 nt, Human
uggggcucaagugauccucccacc

SEQ ID NO: 1261013 - RNA, 22 nt, Human
uuaaauauguuugaucugugcu

SEQ ID NO: 1261014 - RNA, 23 nt, Human
uucaaugacagcauccuaaguga

SEQ ID NO: 1261015 - RNA, 23 nt, Human
uucauugcagccuccaccccugg

SEQ ID NO: 1261016 - RNA, 24 nt, Human
uucauugcagccuccaccccuggg

SEQ ID NO: 1261017 - RNA, 23 nt, Human
uuccuggugcuuuguuuuuaagu

SEQ ID NO: 1261018 - RNA, 19 nt, Human
uugaaacuagcaguuucga

SEQ ID NO: 1261019 - RNA, 20 nt, Human
uugcagccuccaccccuggg

SEQ ID NO: 1261020 - RNA, 22 nt, Human
uuuaagauuaaugucucugucc

SEQ ID NO: 1261021 - RNA, 19 nt, Human
uuuuuccuggugcuuuguu

SEQ ID NO: 1261022 - RNA, 22 nt, Human
aaaaagcaccauaaguucucac

SEQ ID NO: 1261023 - RNA, 20 nt, Human
aaaaucagaguggacaccgg

SEQ ID NO: 1261024 - RNA, 20 nt, Human
aaagagccccaaagagggug

SEQ ID NO: 1261025 - RNA, 24 nt, Human
aaagcacaaagcaguuaguugcaa

SEQ ID NO: 1261026 - RNA, 22 nt, Human
aagcuuggagacaccaggaacc

SEQ ID NO: 1261027 - RNA, 19 nt, Human
aaggggaacacaguggcac

SEQ ID NO: 1261028 - RNA, 23 nt, Human
acaccgggaacagggagaggcca

SEQ ID NO: 1261029 - RNA, 24 nt, Human
acacuacuggccucgaucucacac

SEQ ID NO: 1261030 - RNA, 22 nt, Human
accaggaaccaaagagccccaa

SEQ ID NO: 1261031 - RNA, 21 nt, Human
acuuggccuggcaggcugcgc

SEQ ID NO: 1261032 - RNA, 23 nt, Human
agcgcgcagccccagcugugccu

SEQ ID NO: 1261033 - RNA, 19 nt, Human
agcugggucgcgacagugc

SEQ ID NO: 1261034 - RNA, 18 nt, Human
aggagccugucugcuucc

SEQ ID NO: 1261035 - RNA, 22 nt, Human
aggcccccaccccuccaacucu

SEQ ID NO: 1261036 - RNA, 19 nt, Human
agggagaggccagacagug

SEQ ID NO: 1261037 - RNA, 21 nt, Human
aggggaacacaguggcacugg

SEQ ID NO: 1261038 - RNA, 22 nt, Human
aggggaacacaguggcacuggg

SEQ ID NO: 1261039 - RNA, 18 nt, Human
augaaggggaagcaaaua

SEQ ID NO: 1261040 - RNA, 19 nt, Human
caaaguccagagggggggc

SEQ ID NO: 1261041 - RNA, 23 nt, Human
caaauguaccacacauggcuuca

SEQ ID NO: 1261042 - RNA, 22 nt, Human
caacuuugcucuaaaaucagag

SEQ ID NO: 1261043 - RNA, 24 nt, Human
cacauggcuucagcuauaggcacc

SEQ ID NO: 1261044 - RNA, 19 nt, Human
caccagcacaagugccagc

SEQ ID NO: 1261045 - RNA, 21 nt, Human
caccaggaaccaaagagcccc

SEQ ID NO: 1261046 - RNA, 23 nt, Human
caccaggaaccaaagagccccaa

SEQ ID NO: 1261047 - RNA, 21 nt, Human
cacugcuggguggcugcacag

SEQ ID NO: 1261048 - RNA, 23 nt, Human
cagagggcuggccugucagcccu

SEQ ID NO: 1261049 - RNA, 18 nt, Human
cagccagaaaccucugug

SEQ ID NO: 1261050 - RNA, 22 nt, Human
cagccucaacuuugcucuaaaa

SEQ ID NO: 1261051 - RNA, 19 nt, Human
cagccuggcccccaugcuu

SEQ ID NO: 1261052 - RNA, 26 nt, Human
cagcgccuucugccugagucguaguc

SEQ ID NO: 1261053 - RNA, 21 nt, Human
caucagaaagaauuuggcaau

SEQ ID NO: 1261054 - RNA, 22 nt, Human
caucagaaagaauuuggcaaua

SEQ ID NO: 1261055 - RNA, 20 nt, Human
ccacacaggcugcagcugcc

SEQ ID NO: 1261056 - RNA, 21 nt, Human
ccaggagccugucugcuuccu

SEQ ID NO: 1261057 - RNA, 21 nt, Human
ccaggcaccagcacaagugcc

SEQ ID NO: 1261058 - RNA, 30 nt, Human
cccacaucgagcugccucagugcccccucu

SEQ ID NO: 1261059 - RNA, 22 nt, Human
cccaccccuccaacucugaaaa

SEQ ID NO: 1261060 - RNA, 18 nt, Human
ccccaccccuccaacucu

SEQ ID NO: 1261061 - RNA, 21 nt, Human
ccccaccccuccaacucugaa

SEQ ID NO: 1261062 - RNA, 21 nt, Human
ccccuaggucugggaucccug

SEQ ID NO: 1261063 - RNA, 27 nt, Human
ccccuccaacucugaaaagggcugggc

SEQ ID NO: 1261064 - RNA, 23 nt, Human
cccucccaugcucacgggcaccc

SEQ ID NO: 1261065 - RNA, 20 nt, Human
cccugaaagcacagggaaau

SEQ ID NO: 1261066 - RNA, 20 nt, Human
cccugaagggcugcagcucu

SEQ ID NO: 1261067 - RNA, 21 nt, Human
ccuaccccuuucugcccagga

SEQ ID NO: 1261068 - RNA, 22 nt, Human
ccuaccccuuucugcccaggag

SEQ ID NO: 1261069 - RNA, 23 nt, Human
ccuaggcucagccucaacuuugc

SEQ ID NO: 1261070 - RNA, 20 nt, Human
ccuccaacucugaaaagggc

SEQ ID NO: 1261071 - RNA, 24 nt, Human
ccucccaugcucacgggcacccaa

SEQ ID NO: 1261072 - RNA, 21 nt, Human
ccucuguggcaggcagcgccu

SEQ ID NO: 1261073 - RNA, 21 nt, Human
ccugcaggcccacaucgagcu

SEQ ID NO: 1261074 - RNA, 24 nt, Human
ccugccguaagugcaugcagcugg

SEQ ID NO: 1261075 - RNA, 22 nt, Human
ccuggcuccaacuggcucugug

SEQ ID NO: 1261076 - RNA, 24 nt, Human
ccugugggggccagggcuggagag

SEQ ID NO: 1261077 - RNA, 20 nt, Human
cgauuuuuuuuguuucccuu

SEQ ID NO: 1261078 - RNA, 18 nt, Human
cgcagccccagcugugcc

SEQ ID NO: 1261079 - RNA, 20 nt, Human
cgcuuggcucacacuacugg

SEQ ID NO: 1261080 - RNA, 23 nt, Human
cuccacacaggcugcagcugccc

SEQ ID NO: 1261081 - RNA, 21 nt, Human
cucuauccagaagcaggggcu

SEQ ID NO: 1261082 - RNA, 23 nt, Human
cucuguggcaggcagcgccuucu

SEQ ID NO: 1261083 - RNA, 20 nt, Human
cugcagcugcccucauaaug

SEQ ID NO: 1261084 - RNA, 25 nt, Human
cugcuggguggcugcacaguugcac

SEQ ID NO: 1261085 - RNA, 23 nt, Human
cuguaagccacggacucuaugca

SEQ ID NO: 1261086 - RNA, 23 nt, Human
cuguggcaggcagcgccuucugc

SEQ ID NO: 1261087 - RNA, 21 nt, Human
gaaauaaacauuuacuaggca

SEQ ID NO: 1261088 - RNA, 22 nt, Human
gagccccuaggucugggauccc

SEQ ID NO: 1261089 - RNA, 19 nt, Human
gagggggguguuucagccc

SEQ ID NO: 1261090 - RNA, 21 nt, Human
gcccacaucgagcugccucag

SEQ ID NO: 1261091 - RNA, 22 nt, Human
gcuauaggcaccugcaucugga

SEQ ID NO: 1261092 - RNA, 22 nt, Human
gcugcacaguugcacccaggag

SEQ ID NO: 1261093 - RNA, 19 nt, Human
gcugcagcucuucucuccu

SEQ ID NO: 1261094 - RNA, 21 nt, Human
gggaacagggagaggccagac

SEQ ID NO: 1261095 - RNA, 19 nt, Human
gggccagggcuggagaggg

SEQ ID NO: 1261096 - RNA, 21 nt, Human
gggcuccugccuguuccuggc

SEQ ID NO: 1261097 - RNA, 20 nt, Human
gggcuggagagggacacuuc

SEQ ID NO: 1261098 - RNA, 22 nt, Human
gggcuggccugucagcccugcc

SEQ ID NO: 1261099 - RNA, 21 nt, Human
ggggcugagggggcagagggc

SEQ ID NO: 1261100 - RNA, 18 nt, Human
gugccuaccccgcugcag

SEQ ID NO: 1261101 - RNA, 20 nt, Human
gugggggccagggcuggaga

SEQ ID NO: 1261102 - RNA, 20 nt, Human
uacacauacaucagaaagaa

SEQ ID NO: 1261103 - RNA, 19 nt, Human
uaccacacauggcuucagc

SEQ ID NO: 1261104 - RNA, 22 nt, Human
uacucuauccagaagcaggggc

SEQ ID NO: 1261105 - RNA, 19 nt, Human
uacuggccucgaucucaca

SEQ ID NO: 1261106 - RNA, 23 nt, Human
uaggucgggaaaaagcaccauaa

SEQ ID NO: 1261107 - RNA, 21 nt, Human
ucacgggacccuugggauguc

SEQ ID NO: 1261108 - RNA, 25 nt, Human
ucagcccuguuuguguugcagcucu

SEQ ID NO: 1261109 - RNA, 21 nt, Human
ucagugcccccucagccuccc

SEQ ID NO: 1261110 - RNA, 20 nt, Human
ucaguggccgcuccacacag

SEQ ID NO: 1261111 - RNA, 23 nt, Human
uccacagagccugcaggcccaca

SEQ ID NO: 1261112 - RNA, 22 nt, Human
uccagagggggggcugaggggg

SEQ ID NO: 1261113 - RNA, 21 nt, Human
ucuguggcaggcagcgccuuc

SEQ ID NO: 1261114 - RNA, 18 nt, Human
ucuucucuccuucucauc

SEQ ID NO: 1261115 - RNA, 24 nt, Human
ucuuggcuugaaggugaggcuuca

SEQ ID NO: 1261116 - RNA, 18 nt, Human
ucuuuacucuauccagaa

SEQ ID NO: 1261117 - RNA, 25 nt, Human
ugaaagcacaaagcaguuaguugcc

SEQ ID NO: 1261118 - RNA, 22 nt, Human
ugagcaugggguccagccacug

SEQ ID NO: 1261119 - RNA, 19 nt, Human
ugagcgaaugagcaugggg

SEQ ID NO: 1261120 - RNA, 22 nt, Human
ugaggcuucaccgggaaccuac

SEQ ID NO: 1261121 - RNA, 19 nt, Human
ugagggggcagagggcugg

SEQ ID NO: 1261122 - RNA, 21 nt, Human
ugcccccucagccucccuccc

SEQ ID NO: 1261123 - RNA, 21 nt, Human
ugccuaggcucagccucaacu

SEQ ID NO: 1261124 - RNA, 21 nt, Human
ugccucagugcccccucagcc

SEQ ID NO: 1261125 - RNA, 22 nt, Human
ugccugaguauugcucgcgccc

SEQ ID NO: 1261126 - RNA, 27 nt, Human
ugcuaaaagcuuucaaaauucuugggg

SEQ ID NO: 1261127 - RNA, 20 nt, Human
uggacaccgggaacagggag

SEQ ID NO: 1261128 - RNA, 21 nt, Human
uggaccaaauguaccacacau

SEQ ID NO: 1261129 - RNA, 20 nt, Human
uggauaaggggaacacagug

SEQ ID NO: 1261130 - RNA, 18 nt, Human
uggcaggcugcgcuuggg

SEQ ID NO: 1261131 - RNA, 20 nt, Human
uggcccccaugcuucaggcc

SEQ ID NO: 1261132 - RNA, 21 nt, Human
uggcuuggggagccccuaggu

SEQ ID NO: 1261133 - RNA, 20 nt, Human
ugggcuccugccuguuccug

SEQ ID NO: 1261134 - RNA, 22 nt, Human
ugggggccagggcuggagaggg

SEQ ID NO: 1261135 - RNA, 22 nt, Human
ugggucgcgacagugccuaggc

SEQ ID NO: 1261136 - RNA, 26 nt, Human
ugucacagcccuggcuuggggagccc

SEQ ID NO: 1261137 - RNA, 18 nt, Human
ugugcacagccacgcaug

SEQ ID NO: 1261138 - RNA, 20 nt, Human
ugugggggccagggcuggag

SEQ ID NO: 1261139 - RNA, 19 nt, Human
ugugggggccagggcuggc

SEQ ID NO: 1261140 - RNA, 21 nt, Human
uguuucagcccuguuuguguu

SEQ ID NO: 1261141 - RNA, 23 nt, Human
uuggccuggcaggcugcgcuugg

SEQ ID NO: 1261142 - RNA, 22 nt, Human
uugggguggggaugguauauga

SEQ ID NO: 1261143 - RNA, 18 nt, Human
aaaaggaaccucagagac

SEQ ID NO: 1261144 - RNA, 23 nt, Human
aagcgugcuuccguuuuggucac

SEQ ID NO: 1261145 - RNA, 21 nt, Human
cagcaugagaacagacuaaua

SEQ ID NO: 1261146 - RNA, 20 nt, Human
cccacugucaugcuucugaa

SEQ ID NO: 1261147 - RNA, 24 nt, Human
ccucagagacuaccuugaacccac

SEQ ID NO: 1261148 - RNA, 18 nt, Human
uaaauguaaauaugaccu

SEQ ID NO: 1261149 - RNA, 22 nt, Human
uaccuugaacccacugucaugc

SEQ ID NO: 1261150 - RNA, 22 nt, Human
uagcagcaugagaacagacuaa

SEQ ID NO: 1261151 - RNA, 23 nt, Human
uaugcaaacuucuaaguuuuucu

SEQ ID NO: 1261152 - RNA, 22 nt, Human
ucagagacuaccuugaacccac

SEQ ID NO: 1261153 - RNA, 23 nt, Human
uguaaguaaaaugggcaacggau

SEQ ID NO: 1261154 - RNA, 21 nt, Human
uucauacuggaaucacagauu

SEQ ID NO: 1261155 - RNA, 18 nt, Human
uuggucacucauaccaug

SEQ ID NO: 1261156 - RNA, 19 nt, Human
uuuuggucacucauaccau

SEQ ID NO: 1261157 - RNA, 21 nt, Human
aaaaagaaagaaaauaaaagg

SEQ ID NO: 1261158 - RNA, 18 nt, Human
aaacucacuuuugaauug

SEQ ID NO: 1261159 - RNA, 25 nt, Human
aagaaagaaaauaaaaggaaaaaga

SEQ ID NO: 1261160 - RNA, 23 nt, Human
aagauacucggccagaugagaua

SEQ ID NO: 1261161 - RNA, 19 nt, Human
aauuugaaucauuucccuc

SEQ ID NO: 1261162 - RNA, 18 nt, Human
acacuauaauaagaaaac

SEQ ID NO: 1261163 - RNA, 24 nt, Human
agaaaauucucuaucagagcauca

SEQ ID NO: 1261164 - RNA, 24 nt, Human
agaaagaaaauaaaaggaaaaaga

SEQ ID NO: 1261165 - RNA, 21 nt, Human
aggaaaaagauacucggccag

SEQ ID NO: 1261166 - RNA, 19 nt, Human
agggcaucggagaccaacc

SEQ ID NO: 1261167 - RNA, 22 nt, Human
agugucacucuggucaggugac

SEQ ID NO: 1261168 - RNA, 19 nt, Human
auguuccacaaaauuuugg

SEQ ID NO: 1261169 - RNA, 19 nt, Human
cacaaaauuuuggauauuc

SEQ ID NO: 1261170 - RNA, 21 nt, Human
cacuuguccgaaggguagcaa

SEQ ID NO: 1261171 - RNA, 20 nt, Human
cagugucacucuggucaggu

SEQ ID NO: 1261172 - RNA, 19 nt, Human
ccagaucaguccauucuua

SEQ ID NO: 1261173 - RNA, 20 nt, Human
ccagaucaguccauucuuac

SEQ ID NO: 1261174 - RNA, 22 nt, Human
ccaguugaccaaaaagaaagaa

SEQ ID NO: 1261175 - RNA, 18 nt, Human
ccccuaaacagaacgcca

SEQ ID NO: 1261176 - RNA, 22 nt, Human
ccgaaggguagcaacacagcca

SEQ ID NO: 1261177 - RNA, 19 nt, Human
ccuggcuccgccgccgccg

SEQ ID NO: 1261178 - RNA, 24 nt, Human
ccuuucaaauauacuuuugauggu

SEQ ID NO: 1261179 - RNA, 22 nt, Human
cgagagaacaacagucccagau

SEQ ID NO: 1261180 - RNA, 22 nt, Human
cugcauaauacuuuaucuuugg

SEQ ID NO: 1261181 - RNA, 22 nt, Human
gaaaauucucuaucagagcauc

SEQ ID NO: 1261182 - RNA, 21 nt, Human
gcaguucucgguugcucuguu

SEQ ID NO: 1261183 - RNA, 22 nt, Human
ggcgucagggaaccgggagaga

SEQ ID NO: 1261184 - RNA, 20 nt, Human
gggccgggggccggcgaaga

SEQ ID NO: 1261185 - RNA, 23 nt, Human
ggguguucguaacagcuccugcc

SEQ ID NO: 1261186 - RNA, 19 nt, Human
guggcuugggguucgcuca

SEQ ID NO: 1261187 - RNA, 18 nt, Human
gugggggguggcuugggg

SEQ ID NO: 1261188 - RNA, 19 nt, Human
guucucgguugcucuguuc

SEQ ID NO: 1261189 - RNA, 23 nt, Human
uagaccauuucauuucaaacuua

SEQ ID NO: 1261190 - RNA, 20 nt, Human
uauaauaagaaaacucacuu

SEQ ID NO: 1261191 - RNA, 20 nt, Human
uaucuuugguucuguuccac

SEQ ID NO: 1261192 - RNA, 19 nt, Human
uauggccgccugcucccca

SEQ ID NO: 1261193 - RNA, 21 nt, Human
ucaaugaguuucuucaguucu

SEQ ID NO: 1261194 - RNA, 24 nt, Human
ucaguucuuccuccaguaaagcag

SEQ ID NO: 1261195 - RNA, 26 nt, Human
ucaguucuuccuccaguaaagcagug

SEQ ID NO: 1261196 - RNA, 19 nt, Human
uccauucuuacuaggcuga

SEQ ID NO: 1261197 - RNA, 24 nt, Human
uccauucuuacuaggcugaagaaa

SEQ ID NO: 1261198 - RNA, 26 nt, Human
uccccagcggaccagguccgggucuc

SEQ ID NO: 1261199 - RNA, 19 nt, Human
ucuuugguucuguuccacu

SEQ ID NO: 1261200 - RNA, 18 nt, Human
ugaccaaaaagaaagaaa

SEQ ID NO: 1261201 - RNA, 23 nt, Human
ugacgcacacaucucugcauagu

SEQ ID NO: 1261202 - RNA, 18 nt, Human
uggcuugggguucgcuca

SEQ ID NO: 1261203 - RNA, 19 nt, Human
ugguucuguuccacuuguc

SEQ ID NO: 1261204 - RNA, 21 nt, Human
ugugauguuucuguuaacgga

SEQ ID NO: 1261205 - RNA, 22 nt, Human
uguucguaacagcuccugccgc

SEQ ID NO: 1261206 - RNA, 21 nt, Human
uugaccaaaaagaaagaaaau

SEQ ID NO: 1261207 - RNA, 24 nt, Human
uugaccaaaaagaaagaaaauaaa

SEQ ID NO: 1261208 - RNA, 20 nt, Human
uuuauggccgccugcucccc

SEQ ID NO: 1261209 - RNA, 20 nt, Human
aaaaacaaagcgagccaccg

SEQ ID NO: 1261210 - RNA, 22 nt, Human
aaaagaaaaaacaaaacaaaaa

SEQ ID NO: 1261211 - RNA, 24 nt, Human
aaacaaagcgagccaccguggaga

SEQ ID NO: 1261212 - RNA, 23 nt, Human
aaagcgagccaccguggagaucc

SEQ ID NO: 1261213 - RNA, 19 nt, Human
aacaaggcaaaaccccauc

SEQ ID NO: 1261214 - RNA, 20 nt, Human
aacaaggcaaaaccccaucu

SEQ ID NO: 1261215 - RNA, 21 nt, Human
aacaaggcaaaaccccaucuc

SEQ ID NO: 1261216 - RNA, 19 nt, Human
aagcaggccgggaguggug

SEQ ID NO: 1261217 - RNA, 22 nt, Human
aagcggcggcgcggggcaggcc

SEQ ID NO: 1261218 - RNA, 24 nt, Human
aaucacuugaauucaggaggcgga

SEQ ID NO: 1261219 - RNA, 18 nt, Human
acaaaacaaaaacaaagc

SEQ ID NO: 1261220 - RNA, 20 nt, Human
acaaaacaaaaacaaagcga

SEQ ID NO: 1261221 - RNA, 24 nt, Human
acaaaacaaaaacaaagcgagcca

SEQ ID NO: 1261222 - RNA, 23 nt, Human
acaaagcgagccaccguggagau

SEQ ID NO: 1261223 - RNA, 18 nt, Human
acaaugaggagaugccag

SEQ ID NO: 1261224 - RNA, 21 nt, Human
acaaugaggagaugccagcac

SEQ ID NO: 1261225 - RNA, 19 nt, Human
acagagugagacuccgucu

SEQ ID NO: 1261226 - RNA, 24 nt, Human
acagagugagacuccgucuuaaaa

SEQ ID NO: 1261227 - RNA, 20 nt, Human
accagccuggccaacaaggc

SEQ ID NO: 1261228 - RNA, 24 nt, Human
accccaucucuacuaaaaauacaa

SEQ ID NO: 1261229 - RNA, 22 nt, Human
acgcuacaaacgagcggugcac

SEQ ID NO: 1261230 - RNA, 22 nt, Human
acuugggcgugguggggggcgc

SEQ ID NO: 1261231 - RNA, 24 nt, Human
agaaaaaacaaaacaaaaacaaag

SEQ ID NO: 1261232 - RNA, 22 nt, Human
agaaucacuugaauucaggagg

SEQ ID NO: 1261233 - RNA, 20 nt, Human
agacccggcagcuucaggca

SEQ ID NO: 1261234 - RNA, 20 nt, Human
agacgagacccacuuccgga

SEQ ID NO: 1261235 - RNA, 20 nt, Human
agaguucgggaggaggagac

SEQ ID NO: 1261236 - RNA, 24 nt, Human
agcacuuugguagguggacguggg

SEQ ID NO: 1261237 - RNA, 21 nt, Human
agccggcagcuuaggcagcac

SEQ ID NO: 1261238 - RNA, 23 nt, Human
aggcacaaugaggagaugccagc

SEQ ID NO: 1261239 - RNA, 18 nt, Human
aggcagcacaacacaauc

SEQ ID NO: 1261240 - RNA, 19 nt, Human
aggcagcacaacacaaucc

SEQ ID NO: 1261241 - RNA, 18 nt, Human
aggcaggagaaucacuug

SEQ ID NO: 1261242 - RNA, 20 nt, Human
aggcaggagaaucacuugaa

SEQ ID NO: 1261243 - RNA, 21 nt, Human
aggcggagguuacagugagcc

SEQ ID NO: 1261244 - RNA, 24 nt, Human
aggcggagguuacagugagccgag

SEQ ID NO: 1261245 - RNA, 24 nt, Human
aggcugaggcaggagaaucacuug

SEQ ID NO: 1261246 - RNA, 20 nt, Human
agggguguggagagccagcg

SEQ ID NO: 1261247 - RNA, 23 nt, Human
aucauuucaggcugggaguucaa

SEQ ID NO: 1261248 - RNA, 19 nt, Human
caacaaggcaaaaccccau

SEQ ID NO: 1261249 - RNA, 25 nt, Human
caacaaggcaaaaccccaucucuac

SEQ ID NO: 1261250 - RNA, 18 nt, Human
caacacaauccacuagga

SEQ ID NO: 1261251 - RNA, 22 nt, Human
caacacaauccacuaggacauu

SEQ ID NO: 1261252 - RNA, 21 nt, Human
caagaccagccuggccaacaa

SEQ ID NO: 1261253 - RNA, 24 nt, Human
caauacacuccaaacucggcgaca

SEQ ID NO: 1261254 - RNA, 19 nt, Human
caccugccgcugcucccgc

SEQ ID NO: 1261255 - RNA, 19 nt, Human
cagcguguggggacuucgg

SEQ ID NO: 1261256 - RNA, 23 nt, Human
caggccgggagugguggcucaug

SEQ ID NO: 1261257 - RNA, 24 nt, Human
caugccugcaauuccagcacuuug

SEQ ID NO: 1261258 - RNA, 23 nt, Human
ccaauacacuccaaacucggcga

SEQ ID NO: 1261259 - RNA, 21 nt, Human
ccacacacgcagguuuagagu

SEQ ID NO: 1261260 - RNA, 21 nt, Human
cccuuggcccccggguuucug

SEQ ID NO: 1261261 - RNA, 22 nt, Human
ccuauaaucccagcuacuaggg

SEQ ID NO: 1261262 - RNA, 21 nt, Human
ccugcagccggcagcuuaggc

SEQ ID NO: 1261263 - RNA, 24 nt, Human
ccuggccaacaaggcaaaacccca

SEQ ID NO: 1261264 - RNA, 20 nt, Human
cgaccccuuaauaaucuccu

SEQ ID NO: 1261265 - RNA, 27 nt, Human
cgcgccaauacacuccaaacucggcga

SEQ ID NO: 1261266 - RNA, 21 nt, Human
cggaagcggcggcgcggggca

SEQ ID NO: 1261267 - RNA, 18 nt, Human
cggcgcggggcaggccgg

SEQ ID NO: 1261268 - RNA, 19 nt, Human
cggugcacagccacacacg

SEQ ID NO: 1261269 - RNA, 21 nt, Human
cggugcacagccacacacgca

SEQ ID NO: 1261270 - RNA, 19 nt, Human
cguggagauccaccugccg

SEQ ID NO: 1261271 - RNA, 24 nt, Human
cguggguggaucauuucaggcugg

SEQ ID NO: 1261272 - RNA, 23 nt, Human
cguucggucucuguucauccauc

SEQ ID NO: 1261273 - RNA, 24 nt, Human
cucaugccugcaauuccagcacuu

SEQ ID NO: 1261274 - RNA, 19 nt, Human
cugccgcugcucccgcggg

SEQ ID NO: 1261275 - RNA, 23 nt, Human
cuggaacaggagggguguggaga

SEQ ID NO: 1261276 - RNA, 23 nt, Human
cuggccaacaaggcaaaacccca

SEQ ID NO: 1261277 - RNA, 20 nt, Human
cuucucuggcuccugcagcc

SEQ ID NO: 1261278 - RNA, 20 nt, Human
cuuucggacaugcuuucugg

SEQ ID NO: 1261279 - RNA, 24 nt, Human
gacagagugagacuccgucuuaaa

SEQ ID NO: 1261280 - RNA, 20 nt, Human
gacccggcagcuucaggcac

SEQ ID NO: 1261281 - RNA, 23 nt, Human
gagggguguggagagccagcgug

SEQ ID NO: 1261282 - RNA, 21 nt, Human
gauccaccugccgcugcuccc

SEQ ID NO: 1261283 - RNA, 18 nt, Human
gauucauggcgaccccuu

SEQ ID NO: 1261284 - RNA, 21 nt, Human
gcaggagaaucacuugaauuc

SEQ ID NO: 1261285 - RNA, 21 nt, Human
ggagagccagcguguggggac

SEQ ID NO: 1261286 - RNA, 21 nt, Human
ggaggcggagguuacagugag

SEQ ID NO: 1261287 - RNA, 23 nt, Human
ggagguuacagugagccgagauc

SEQ ID NO: 1261288 - RNA, 24 nt, Human
ggagguuacagugagccgagaucg

SEQ ID NO: 1261289 - RNA, 20 nt, Human
ggagugguggcucaugccug

SEQ ID NO: 1261290 - RNA, 22 nt, Human
ggcacgcgggagggcccaaagc

SEQ ID NO: 1261291 - RNA, 21 nt, Human
ggcucaugccugcaauuccag

SEQ ID NO: 1261292 - RNA, 23 nt, Human
gggaggaggagaccuaaguccug

SEQ ID NO: 1261293 - RNA, 23 nt, Human
gggaggcugaggcaggagaauca

SEQ ID NO: 1261294 - RNA, 24 nt, Human
gguggcucaugccugcaauuccag

SEQ ID NO: 1261295 - RNA, 24 nt, Human
gguggggggcgccuauaaucccag

SEQ ID NO: 1261296 - RNA, 23 nt, Human
gucuuaaaagaaaaaacaaaaca

SEQ ID NO: 1261297 - RNA, 18 nt, Human
guggagagccagcgugug

SEQ ID NO: 1261298 - RNA, 23 nt, Human
guggaucauuucaggcugggagu

SEQ ID NO: 1261299 - RNA, 21 nt, Human
uaaaagaaaaaacaaaacaaa

SEQ ID NO: 1261300 - RNA, 18 nt, Human
uacuagggaggcugaggc

SEQ ID NO: 1261301 - RNA, 19 nt, Human
uacuagggaggcugaggca

SEQ ID NO: 1261302 - RNA, 20 nt, Human
ucaggaggcggagguuacag

SEQ ID NO: 1261303 - RNA, 22 nt, Human
ucaugccugcaauuccagcacu

SEQ ID NO: 1261304 - RNA, 23 nt, Human
ucauuucaggcugggaguucaag

SEQ ID NO: 1261305 - RNA, 24 nt, Human
uccaaacucggcgacagagugaga

SEQ ID NO: 1261306 - RNA, 24 nt, Human
uccagcacuuugguagguggacgu

SEQ ID NO: 1261307 - RNA, 20 nt, Human
ucucuacuaaaaauacaaaa

SEQ ID NO: 1261308 - RNA, 18 nt, Human
ugagccgagaucgcgcca

SEQ ID NO: 1261309 - RNA, 20 nt, Human
ugaggcaggagaaucacuug

SEQ ID NO: 1261310 - RNA, 24 nt, Human
ugaggcaggagaaucacuugaauu

SEQ ID NO: 1261311 - RNA, 25 nt, Human
ugaggcaggagaaucacuugaauuc

SEQ ID NO: 1261312 - RNA, 23 nt, Human
ugccugcaauuccagcacuuugg

SEQ ID NO: 1261313 - RNA, 24 nt, Human
uggagauccaccugccgcugcucc

SEQ ID NO: 1261314 - RNA, 24 nt, Human
uggcccccggguuucugcagcccc

SEQ ID NO: 1261315 - RNA, 22 nt, Human
uggcucaugccugcaauuccag

SEQ ID NO: 1261316 - RNA, 24 nt, Human
uggcucaugccugcaauuccagca

SEQ ID NO: 1261317 - RNA, 18 nt, Human
ugguagguggacgugggu

SEQ ID NO: 1261318 - RNA, 20 nt, Human
ugguagguggacgugggugg

SEQ ID NO: 1261319 - RNA, 21 nt, Human
ugguagguggacgugggugga

SEQ ID NO: 1261320 - RNA, 24 nt, Human
ugguggcucaugccugcaauucca

SEQ ID NO: 1261321 - RNA, 22 nt, Human
uuacagugagccgagaucgcgc

SEQ ID NO: 1261322 - RNA, 22 nt, Human
uuacuugggcguggugggggga

SEQ ID NO: 1261323 - RNA, 21 nt, Human
uucaaaaacaaaaagcaggcc

SEQ ID NO: 1261324 - RNA, 23 nt, Human
uuucaggcugggaguucaagacc

SEQ ID NO: 1261325 - RNA, 24 nt, Human
aacuuguggccucaagggauccuc

SEQ ID NO: 1261326 - RNA, 25 nt, Human
aagacacucucacuccguuuuccag

SEQ ID NO: 1261327 - RNA, 19 nt, Human
aaguagcugggacuacagg

SEQ ID NO: 1261328 - RNA, 20 nt, Human
aaguagcugggacuacaggu

SEQ ID NO: 1261329 - RNA, 24 nt, Human
aaguagcugggacuacaggugugc

SEQ ID NO: 1261330 - RNA, 19 nt, Human
aaucauggcucacugcagc

SEQ ID NO: 1261331 - RNA, 22 nt, Human
acaagaauagaggccuuccccc

SEQ ID NO: 1261332 - RNA, 20 nt, Human
acaccaccauauccaggucc

SEQ ID NO: 1261333 - RNA, 23 nt, Human
accucagccucccaaguagcugg

SEQ ID NO: 1261334 - RNA, 19 nt, Human
acugcagccucaaacuccu

SEQ ID NO: 1261335 - RNA, 21 nt, Human
acuugcuuaccucccaaagac

SEQ ID NO: 1261336 - RNA, 18 nt, Human
aggacaggggaggccaug

SEQ ID NO: 1261337 - RNA, 24 nt, Human
agggauccucccaccucagccucc

SEQ ID NO: 1261338 - RNA, 20 nt, Human
agugcaguggugcaaucaug

SEQ ID NO: 1261339 - RNA, 23 nt, Human
agugcaguggugcaaucauggcu

SEQ ID NO: 1261340 - RNA, 19 nt, Human
aucagcuccaguuuacuag

SEQ ID NO: 1261341 - RNA, 22 nt, Human
auccucccaccucagccuccca

SEQ ID NO: 1261342 - RNA, 24 nt, Human
auggggucuugccauguugcccag

SEQ ID NO: 1261343 - RNA, 25 nt, Human
caaagcacugggauugcagguucac

SEQ ID NO: 1261344 - RNA, 23 nt, Human
caagaauagaggccuucccccaa

SEQ ID NO: 1261345 - RNA, 25 nt, Human
caagaauagaggccuucccccaaua

SEQ ID NO: 1261346 - RNA, 21 nt, Human
cacaccaccauauccaggucc

SEQ ID NO: 1261347 - RNA, 24 nt, Human
caccauaccuggcuaauuuuugua

SEQ ID NO: 1261348 - RNA, 24 nt, Human
caccucagccucccaaagcacugg

SEQ ID NO: 1261349 - RNA, 19 nt, Human
caccucauaaaaccaucac

SEQ ID NO: 1261350 - RNA, 19 nt, Human
cacggcaacagaagcuggu

SEQ ID NO: 1261351 - RNA, 24 nt, Human
cacuccguuuuccaggcuggagug

SEQ ID NO: 1261352 - RNA, 24 nt, Human
cagccucaaacuccugggcucaag

SEQ ID NO: 1261353 - RNA, 21 nt, Human
caguggugcaaucauggcuca

SEQ ID NO: 1261354 - RNA, 23 nt, Human
cauguugcccaggcuggucucaa

SEQ ID NO: 1261355 - RNA, 24 nt, Human
cauguugcccaggcuggucucaaa

SEQ ID NO: 1261356 - RNA, 20 nt, Human
cauuugcuuuucucuccuuu

SEQ ID NO: 1261357 - RNA, 18 nt, Human
ccaggcuggagugcagug

SEQ ID NO: 1261358 - RNA, 21 nt, Human
ccaggcuggagugcaguggug

SEQ ID NO: 1261359 - RNA, 19 nt, Human
ccauguugcccaggcuggu

SEQ ID NO: 1261360 - RNA, 22 nt, Human
ccauguugcccaggcuggucuc

SEQ ID NO: 1261361 - RNA, 24 nt, Human
cccaaagcacugggauugcagguu

SEQ ID NO: 1261362 - RNA, 22 nt, Human
cccaaguagcugggacuacagg

SEQ ID NO: 1261363 - RNA, 23 nt, Human
cccaaguagcugggacuacaggu

SEQ ID NO: 1261364 - RNA, 20 nt, Human
cccaccucagccucccaagu

SEQ ID NO: 1261365 - RNA, 23 nt, Human
cccaccucagccucccaaguagc

SEQ ID NO: 1261366 - RNA, 18 nt, Human
ccccuuuuucuuuaagac

SEQ ID NO: 1261367 - RNA, 18 nt, Human
ccguuuuccaggcuggag

SEQ ID NO: 1261368 - RNA, 19 nt, Human
ccucccaaagaccccaccu

SEQ ID NO: 1261369 - RNA, 20 nt, Human
ccucccaaagcacugggauu

SEQ ID NO: 1261370 - RNA, 20 nt, Human
ccucucuccccuuugccucc

SEQ ID NO: 1261371 - RNA, 22 nt, Human
ccucucugacagugggggaccu

SEQ ID NO: 1261372 - RNA, 20 nt, Human
ccugggcucaagccauccuc

SEQ ID NO: 1261373 - RNA, 22 nt, Human
ccuuuuucccuucucacuaccc

SEQ ID NO: 1261374 - RNA, 21 nt, Human
cguuuuccaggcuggagugca

SEQ ID NO: 1261375 - RNA, 23 nt, Human
cuacccaccuccaauuucaaaau

SEQ ID NO: 1261376 - RNA, 24 nt, Human
cucaagccauccucccaccucagc

SEQ ID NO: 1261377 - RNA, 19 nt, Human
cucaagggauccucccacc

SEQ ID NO: 1261378 - RNA, 24 nt, Human
cucaagggauccucccaccucagc

SEQ ID NO: 1261379 - RNA, 18 nt, Human
cucacuacccaccuccaa

SEQ ID NO: 1261380 - RNA, 21 nt, Human
cucacuacccaccuccaauuu

SEQ ID NO: 1261381 - RNA, 21 nt, Human
cucacugcagccucaaacucc

SEQ ID NO: 1261382 - RNA, 24 nt, Human
cucacugcagccucaaacuccugg

SEQ ID NO: 1261383 - RNA, 24 nt, Human
cucagccucccaaguagcugggac

SEQ ID NO: 1261384 - RNA, 23 nt, Human
cuccugggcucaagccauccucc

SEQ ID NO: 1261385 - RNA, 25 nt, Human
cuccugggcucaagccauccuccca

SEQ ID NO: 1261386 - RNA, 22 nt, Human
cucuagacuguguccugcugcc

SEQ ID NO: 1261387 - RNA, 23 nt, Human
cucucugacagugggggaccugg

SEQ ID NO: 1261388 - RNA, 22 nt, Human
cugacagugggggaccugggcu

SEQ ID NO: 1261389 - RNA, 23 nt, Human
cugcagccucaaacuccugggcu

SEQ ID NO: 1261390 - RNA, 21 nt, Human
cuuagaucagcuccaguuuac

SEQ ID NO: 1261391 - RNA, 24 nt, Human
cuuaugacuugcuuaccucccaaa

SEQ ID NO: 1261392 - RNA, 24 nt, Human
cuugugcagggcacuucucaucuu

SEQ ID NO: 1261393 - RNA, 23 nt, Human
cuugugcuugcaaggugcccagg

SEQ ID NO: 1261394 - RNA, 23 nt, Human
cuuguggccucaagggauccucc

SEQ ID NO: 1261395 - RNA, 18 nt, Human
cuuuccuuuuucccuucu

SEQ ID NO: 1261396 - RNA, 21 nt, Human
gaagccucucuccccuuugcc

SEQ ID NO: 1261397 - RNA, 25 nt, Human
gaauuugggggguuggcacaaacgu

SEQ ID NO: 1261398 - RNA, 24 nt, Human
gacuacaggugugcaccaccauac

SEQ ID NO: 1261399 - RNA, 25 nt, Human
gacuugcuuaccucccaaagacccc

SEQ ID NO: 1261400 - RNA, 21 nt, Human
gagccaguuuuuguuugcugg

SEQ ID NO: 1261401 - RNA, 24 nt, Human
gauugcagguucacaccaccauau

SEQ ID NO: 1261402 - RNA, 22 nt, Human
gcuuaccucccaaagaccccac

SEQ ID NO: 1261403 - RNA, 23 nt, Human
ggcaguugugccaucagcucagg

SEQ ID NO: 1261404 - RNA, 18 nt, Human
gggaggccauggagccag

SEQ ID NO: 1261405 - RNA, 19 nt, Human
gggaggccauggagccagu

SEQ ID NO: 1261406 - RNA, 19 nt, Human
ggggaggccauggagccag

SEQ ID NO: 1261407 - RNA, 22 nt, Human
ggggucuugccauguugcccag

SEQ ID NO: 1261408 - RNA, 22 nt, Human
gggucuugccauguugcccagg

SEQ ID NO: 1261409 - RNA, 23 nt, Human
ggugaccagagcucaaggaagaa

SEQ ID NO: 1261410 - RNA, 20 nt, Human
gugcagggcacuucucaucu

SEQ ID NO: 1261411 - RNA, 24 nt, Human
uaauuuuuguauuuucuguauaga

SEQ ID NO: 1261412 - RNA, 22 nt, Human
uacccaccuccaauuucaaaau

SEQ ID NO: 1261413 - RNA, 22 nt, Human
uauagauggggucuugccaugu

SEQ ID NO: 1261414 - RNA, 20 nt, Human
uaucaaaaacugggugguuu

SEQ ID NO: 1261415 - RNA, 21 nt, Human
ucaacauaugaauuugggggg

SEQ ID NO: 1261416 - RNA, 25 nt, Human
ucaagccauccucccaccucagccu

SEQ ID NO: 1261417 - RNA, 24 nt, Human
ucacugcagccucaaacuccuggg

SEQ ID NO: 1261418 - RNA, 20 nt, Human
ucagccucccaaguagcugg

SEQ ID NO: 1261419 - RNA, 19 nt, Human
ucagcucagguucuggugc

SEQ ID NO: 1261420 - RNA, 23 nt, Human
ucccaaagcacugggauugcagg

SEQ ID NO: 1261421 - RNA, 19 nt, Human
ucccaaaggauccaaaacc

SEQ ID NO: 1261422 - RNA, 23 nt, Human
ucccaaguagcugggacuacagg

SEQ ID NO: 1261423 - RNA, 21 nt, Human
uccuauuuaugaagguucuac

SEQ ID NO: 1261424 - RNA, 25 nt, Human
uccucccaccucagccucccaaagc

SEQ ID NO: 1261425 - RNA, 27 nt, Human
uccucccaccucagccucccaaguagc

SEQ ID NO: 1261426 - RNA, 18 nt, Human
uccugggcucaagccauc

SEQ ID NO: 1261427 - RNA, 23 nt, Human
uccuuuuucccuucucacuaccc

SEQ ID NO: 1261428 - RNA, 19 nt, Human
ucucacuacccaccuccaa

SEQ ID NO: 1261429 - RNA, 22 nt, Human
ucucacuccguuuuccaggcug

SEQ ID NO: 1261430 - RNA, 24 nt, Human
ucucacuccguuuuccaggcugga

SEQ ID NO: 1261431 - RNA, 19 nt, Human
ucucucaccguuguggggg

SEQ ID NO: 1261432 - RNA, 22 nt, Human
ucugacagugggggaccugggc

SEQ ID NO: 1261433 - RNA, 23 nt, Human
ucuugccauguugcccaggcugg

SEQ ID NO: 1261434 - RNA, 24 nt, Human
ucuugccauguugcccaggcuggu

SEQ ID NO: 1261435 - RNA, 18 nt, Human
ucuuuccuuuuucccuuc

SEQ ID NO: 1261436 - RNA, 19 nt, Human
ugacuugcuuaccucccaa

SEQ ID NO: 1261437 - RNA, 27 nt, Human
ugacuugcuuaccucccaaagacccca

SEQ ID NO: 1261438 - RNA, 22 nt, Human
ugcaguggugcaaucauggcuc

SEQ ID NO: 1261439 - RNA, 24 nt, Human
ugccauguugcccaggcuggucuc

SEQ ID NO: 1261440 - RNA, 22 nt, Human
ugcccaggcuggucucaaacuu

SEQ ID NO: 1261441 - RNA, 18 nt, Human
ugcuugcaaggugcccag

SEQ ID NO: 1261442 - RNA, 21 nt, Human
uggagugcaguggugcaauca

SEQ ID NO: 1261443 - RNA, 24 nt, Human
uggagugcaguggugcaaucaugg

SEQ ID NO: 1261444 - RNA, 26 nt, Human
uggauacucucaucucccucaauuuu

SEQ ID NO: 1261445 - RNA, 26 nt, Human
uggcacaaacguuugguucauuacaa

SEQ ID NO: 1261446 - RNA, 24 nt, Human
uggcucacugcagccucaaacucc

SEQ ID NO: 1261447 - RNA, 21 nt, Human
ugggacuacaggugugcacca

SEQ ID NO: 1261448 - RNA, 24 nt, Human
ugggacuacaggugugcaccacca

SEQ ID NO: 1261449 - RNA, 25 nt, Human
ugggacuacaggugugcaccaccau

SEQ ID NO: 1261450 - RNA, 21 nt, Human
ugggauugcagguucacacca

SEQ ID NO: 1261451 - RNA, 24 nt, Human
uggggucuugccauguugcccagg

SEQ ID NO: 1261452 - RNA, 24 nt, Human
uggugcaaucauggcucacugcag

SEQ ID NO: 1261453 - RNA, 24 nt, Human
uguauagauggggucuugccaugu

SEQ ID NO: 1261454 - RNA, 23 nt, Human
uguccugcugcccaguugacuac

SEQ ID NO: 1261455 - RNA, 23 nt, Human
ugugcaaauagcagagcauccca

SEQ ID NO: 1261456 - RNA, 18 nt, Human
ugugcuugcaaggugccc

SEQ ID NO: 1261457 - RNA, 24 nt, Human
uguggccucaagggauccucccac

SEQ ID NO: 1261458 - RNA, 22 nt, Human
ugugugggcaccccgaacugga

SEQ ID NO: 1261459 - RNA, 19 nt, Human
uucauuacaagaauagagg

SEQ ID NO: 1261460 - RNA, 22 nt, Human
uuccaggcuggagugcaguggu

SEQ ID NO: 1261461 - RNA, 23 nt, Human
uugcuggggcugccauaagaaag

SEQ ID NO: 1261462 - RNA, 20 nt, Human
uuuaagacacucucacuccg

SEQ ID NO: 1261463 - RNA, 19 nt, Human
uuucuuuccuuuuucccuu

SEQ ID NO: 1261464 - RNA, 21 nt, Human
uuugcuggggcugccauaaga

SEQ ID NO: 1261465 - RNA, 24 nt, Human
uuuuccaggcuggagugcaguggu

SEQ ID NO: 1261466 - RNA, 24 nt, Human
uuuuuuuuuuuucguaaaaaauac

SEQ ID NO: 1261467 - RNA, 18 nt, Human
uuuuuuuuuuuuuuuucg

SEQ ID NO: 1261468 - RNA, 20 nt, Human
uuuuuuuuuuuuuuuuucgu

SEQ ID NO: 1261469 - RNA, 23 nt, Human
aaacugggaaggacaacaggaga

SEQ ID NO: 1261470 - RNA, 18 nt, Human
aaagaaauuccuagcucu

SEQ ID NO: 1261471 - RNA, 21 nt, Human
aaagucuuucccuucucuagc

SEQ ID NO: 1261472 - RNA, 19 nt, Human
aagguuugaaauacugguu

SEQ ID NO: 1261473 - RNA, 19 nt, Human
aaguagccgaaauaacaca

SEQ ID NO: 1261474 - RNA, 18 nt, Human
aaguuucuuuuauuguuu

SEQ ID NO: 1261475 - RNA, 19 nt, Human
aauugggguuuuuaggacc

SEQ ID NO: 1261476 - RNA, 19 nt, Human
acaaacaucagcuaacaga

SEQ ID NO: 1261477 - RNA, 23 nt, Human
acuaugccuuucuuuucucggga

SEQ ID NO: 1261478 - RNA, 24 nt, Human
acucuaaggggucuacgugaaaaa

SEQ ID NO: 1261479 - RNA, 18 nt, Human
acuuguggaccuccccuc

SEQ ID NO: 1261480 - RNA, 26 nt, Human
agaaggaagagguuuuuuuauucagc

SEQ ID NO: 1261481 - RNA, 19 nt, Human
aggcguagacagggaaacc

SEQ ID NO: 1261482 - RNA, 22 nt, Human
agggaaaaggggagguugggga

SEQ ID NO: 1261483 - RNA, 20 nt, Human
aguccaaaauuuaagaaaaa

SEQ ID NO: 1261484 - RNA, 24 nt, Human
aguggcauuauacaaacaaguuuc

SEQ ID NO: 1261485 - RNA, 19 nt, Human
auugucuuuguugugcugu

SEQ ID NO: 1261486 - RNA, 21 nt, Human
cacguacauaacaagaaguag

SEQ ID NO: 1261487 - RNA, 21 nt, Human
cacucgaucaccucuacacuu

SEQ ID NO: 1261488 - RNA, 18 nt, Human
cagcacaggagggguugg

SEQ ID NO: 1261489 - RNA, 22 nt, Human
caggagcuggaucaguaggcac

SEQ ID NO: 1261490 - RNA, 19 nt, Human
cagggccaggugguggcgc

SEQ ID NO: 1261491 - RNA, 28 nt, Human
ccaccuggagaucuucaaagggggcugc

SEQ ID NO: 1261492 - RNA, 18 nt, Human
cccuguccuauugauccc

SEQ ID NO: 1261493 - RNA, 20 nt, Human
cgagcucccugaaaaagaaa

SEQ ID NO: 1261494 - RNA, 25 nt, Human
cgucuugugcccauguggcaggccc

SEQ ID NO: 1261495 - RNA, 20 nt, Human
cucugugccuacauaucuaa

SEQ ID NO: 1261496 - RNA, 18 nt, Human
cugugccuacauaucuag

SEQ ID NO: 1261497 - RNA, 19 nt, Human
cuuaagagccgagcucccu

SEQ ID NO: 1261498 - RNA, 24 nt, Human
gaaauaacacauggccaauaggca

SEQ ID NO: 1261499 - RNA, 20 nt, Human
gagauucuggaugagccuaa

SEQ ID NO: 1261500 - RNA, 22 nt, Human
gagccgagcucccugaaaaaga

SEQ ID NO: 1261501 - RNA, 23 nt, Human
gccacucauuaucuuuccaguuu

SEQ ID NO: 1261502 - RNA, 20 nt, Human
gcugugguggauccaggcug

SEQ ID NO: 1261503 - RNA, 21 nt, Human
gggaaaaggggagguugggga

SEQ ID NO: 1261504 - RNA, 18 nt, Human
gggagguuggggagaaac

SEQ ID NO: 1261505 - RNA, 21 nt, Human
gggagguuggggagaaacugg

SEQ ID NO: 1261506 - RNA, 20 nt, Human
ggguugucugggcuuggucu

SEQ ID NO: 1261507 - RNA, 19 nt, Human
guuggcuucccccuucugg

SEQ ID NO: 1261508 - RNA, 18 nt, Human
uaagaaaaaugaaucuca

SEQ ID NO: 1261509 - RNA, 19 nt, Human
uaagaaaaaugaaucucau

SEQ ID NO: 1261510 - RNA, 23 nt, Human
uaauugucuuuguugugcuguua

SEQ ID NO: 1261511 - RNA, 20 nt, Human
uaccuuguacugaguggcau

SEQ ID NO: 1261512 - RNA, 22 nt, Human
uacuucuguuuuuuccaacuuu

SEQ ID NO: 1261513 - RNA, 25 nt, Human
uauuuccccccuuugagcauuuuca

SEQ ID NO: 1261514 - RNA, 21 nt, Human
uauuucuagcuuuuuacuauu

SEQ ID NO: 1261515 - RNA, 23 nt, Human
ucaggucggucauuucucgggcu

SEQ ID NO: 1261516 - RNA, 19 nt, Human
uccacaguggacacaaaga

SEQ ID NO: 1261517 - RNA, 21 nt, Human
uccacaguggacacaaagagg

SEQ ID NO: 1261518 - RNA, 21 nt, Human
ucccugaaaaagaaauuccua

SEQ ID NO: 1261519 - RNA, 24 nt, Human
ucuaauaauugggguuuuuaggac

SEQ ID NO: 1261520 - RNA, 23 nt, Human
ucucauaccauauuuccccccuu

SEQ ID NO: 1261521 - RNA, 26 nt, Human
ucuuuagcuccuuucucaggggccgc

SEQ ID NO: 1261522 - RNA, 23 nt, Human
ugaaugauccuuucagggggcca

SEQ ID NO: 1261523 - RNA, 21 nt, Human
ugaguggcauuauacaaacaa

SEQ ID NO: 1261524 - RNA, 20 nt, Human
uggacacaaagaggcuacgu

SEQ ID NO: 1261525 - RNA, 21 nt, Human
uggcugcacaagcaucaaauc

SEQ ID NO: 1261526 - RNA, 21 nt, Human
uggugcagggggcucagaugg

SEQ ID NO: 1261527 - RNA, 23 nt, Human
uggugcagggggcucagaugggu

SEQ ID NO: 1261528 - RNA, 18 nt, Human
uguggaccuccccucuaa

SEQ ID NO: 1261529 - RNA, 23 nt, Human
ugugguggauccaggcugggauu

SEQ ID NO: 1261530 - RNA, 23 nt, Human
uuacuucuguuuuuuccaacuuu

SEQ ID NO: 1261531 - RNA, 23 nt, Human
uucagggucacucugcagggguu

SEQ ID NO: 1261532 - RNA, 24 nt, Human
uuccuccacguacauaacaagaag

SEQ ID NO: 1261533 - RNA, 21 nt, Human
uugcuagcuucggccuucuga

SEQ ID NO: 1261534 - RNA, 20 nt, Human
uugcuuucucccuuuuuugc

SEQ ID NO: 1261535 - RNA, 22 nt, Human
uuuacaaaccccugacucauga

SEQ ID NO: 1261536 - RNA, 23 nt, Human
uuucuuuuucuucuguucuaguu

SEQ ID NO: 1261537 - RNA, 18 nt, Human
uuuuaagggcugacaacu

SEQ ID NO: 1261538 - RNA, 23 nt, Human
cucucugucuuccucuggauuuc

SEQ ID NO: 1261539 - RNA, 18 nt, Human
ucaggaacucaguuucuc

SEQ ID NO: 1261540 - RNA, 19 nt, Human
uccucuggauuuccacuug

SEQ ID NO: 1261541 - RNA, 20 nt, Human
ugcugcaggacacucagcag

SEQ ID NO: 1261542 - RNA, 18 nt, Human
aagaacacccacaccccc

SEQ ID NO: 1261543 - RNA, 22 nt, Human
aagggaacuucugggaccagcc

SEQ ID NO: 1261544 - RNA, 21 nt, Human
aaggugcuccagcgcaccaag

SEQ ID NO: 1261545 - RNA, 20 nt, Human
acaaacacaggcugugggcu

SEQ ID NO: 1261546 - RNA, 21 nt, Human
acacaaccccaccugcccucu

SEQ ID NO: 1261547 - RNA, 19 nt, Human
acacaggcugugggcugga

SEQ ID NO: 1261548 - RNA, 24 nt, Human
accugggaugggguggggacaggc

SEQ ID NO: 1261549 - RNA, 22 nt, Human
agcaaggcugaaaagaacaccc

SEQ ID NO: 1261550 - RNA, 21 nt, Human
aucuuuuaugugcugaaccag

SEQ ID NO: 1261551 - RNA, 19 nt, Human
caguaaagguccaggucag

SEQ ID NO: 1261552 - RNA, 23 nt, Human
cauggaauuaagaaaaacaugca

SEQ ID NO: 1261553 - RNA, 21 nt, Human
ccaagugagggaguuagggac

SEQ ID NO: 1261554 - RNA, 18 nt, Human
ccauggaauuaagaaaaa

SEQ ID NO: 1261555 - RNA, 21 nt, Human
cccacacccccuuguuaccca

SEQ ID NO: 1261556 - RNA, 21 nt, Human
cccacacccccuuguuacccu

SEQ ID NO: 1261557 - RNA, 25 nt, Human
cccugcauuuggucuccagguguca

SEQ ID NO: 1261558 - RNA, 23 nt, Human
ccucuggauuuauggagcugaca

SEQ ID NO: 1261559 - RNA, 24 nt, Human
ccugcugcauaguguguccaggga

SEQ ID NO: 1261560 - RNA, 25 nt, Human
cuggagccgggugggccaggcugca

SEQ ID NO: 1261561 - RNA, 20 nt, Human
cugggaugggguggggacag

SEQ ID NO: 1261562 - RNA, 18 nt, Human
cuggguugugaagggucu

SEQ ID NO: 1261563 - RNA, 22 nt, Human
cuuggcuuugugaggaaacgag

SEQ ID NO: 1261564 - RNA, 22 nt, Human
cuuggcuuugugaggaaacgag

SEQ ID NO: 1261565 - RNA, 18 nt, Human
gaagggucucaaguccaa

SEQ ID NO: 1261566 - RNA, 24 nt, Human
gagcagaagucacagaggcuggcc

SEQ ID NO: 1261567 - RNA, 19 nt, Human
gagcugacacuccacaaau

SEQ ID NO: 1261568 - RNA, 24 nt, Human
gagcugacacuccacaaaugaugc

SEQ ID NO: 1261569 - RNA, 20 nt, Human
gagggagcagaagucacaga

SEQ ID NO: 1261570 - RNA, 21 nt, Human
gauccuugauucagacaguuu

SEQ ID NO: 1261571 - RNA, 24 nt, Human
gaugggugggacuguguuggccag

SEQ ID NO: 1261572 - RNA, 25 nt, Human
gcaaggcugaaaagaacacccacac

SEQ ID NO: 1261573 - RNA, 18 nt, Human
gcagcugcagcgggcuug

SEQ ID NO: 1261574 - RNA, 18 nt, Human
gcagcugcagcgggcuug

SEQ ID NO: 1261575 - RNA, 18 nt, Human
gcagcugcagcgggcuug

SEQ ID NO: 1261576 - RNA, 23 nt, Human
ggaccuggguucagccagguggu

SEQ ID NO: 1261577 - RNA, 24 nt, Human
ggaccuggguucagccagguggug

SEQ ID NO: 1261578 - RNA, 21 nt, Human
ggaguuagggacuugggaggg

SEQ ID NO: 1261579 - RNA, 19 nt, Human
gggaugggguggggacagg

SEQ ID NO: 1261580 - RNA, 20 nt, Human
gggaugggguggggacaggc

SEQ ID NO: 1261581 - RNA, 21 nt, Human
gggugggacuguguuggccag

SEQ ID NO: 1261582 - RNA, 20 nt, Human
ggucucaaguccaagugagg

SEQ ID NO: 1261583 - RNA, 19 nt, Human
ggugcgugggcaaagggaa

SEQ ID NO: 1261584 - RNA, 18 nt, Human
gucaccuuucugccaugu

SEQ ID NO: 1261585 - RNA, 20 nt, Human
gugaccucugcaguacuccu

SEQ ID NO: 1261586 - RNA, 23 nt, Human
gugagggagcagaagucacagag

SEQ ID NO: 1261587 - RNA, 21 nt, Human
guggugugagaguagccacag

SEQ ID NO: 1261588 - RNA, 22 nt, Human
guucugugacuucccugugacc

SEQ ID NO: 1261589 - RNA, 23 nt, Human
uaagaaaaacaugcaaaaauaau

SEQ ID NO: 1261590 - RNA, 18 nt, Human
uacaguaggcucgggaaa

SEQ ID NO: 1261591 - RNA, 24 nt, Human
uaguauuuugcagaugcuuuucuc

SEQ ID NO: 1261592 - RNA, 19 nt, Human
uccaagugagggaguuagg

SEQ ID NO: 1261593 - RNA, 23 nt, Human
ucucaaguccaagugagggaguu

SEQ ID NO: 1261594 - RNA, 18 nt, Human
ucuccaggugucaccuuu

SEQ ID NO: 1261595 - RNA, 18 nt, Human
ucugcaguacuccuuacc

SEQ ID NO: 1261596 - RNA, 18 nt, Human
ucuguuguggugugagag

SEQ ID NO: 1261597 - RNA, 19 nt, Human
ucuucuguucuucacgccc

SEQ ID NO: 1261598 - RNA, 25 nt, Human
ugaaaaaagcaccugcugcauagug

SEQ ID NO: 1261599 - RNA, 25 nt, Human
ugaaaagaacacccacacccccuug

SEQ ID NO: 1261600 - RNA, 22 nt, Human
ugaagggucucaaguccaagug

SEQ ID NO: 1261601 - RNA, 18 nt, Human
ugacuucccugugaccuc

SEQ ID NO: 1261602 - RNA, 18 nt, Human
ugagggaguuagggacuu

SEQ ID NO: 1261603 - RNA, 20 nt, Human
ugaugcuggagccggguggg

SEQ ID NO: 1261604 - RNA, 20 nt, Human
ugaugugcacccccaggccu

SEQ ID NO: 1261605 - RNA, 19 nt, Human
ugcagaugcuuuucuccug

SEQ ID NO: 1261606 - RNA, 20 nt, Human
ugcauuuggucuccaggugu

SEQ ID NO: 1261607 - RNA, 26 nt, Human
ugcgugggcaaagggaacuucuggga

SEQ ID NO: 1261608 - RNA, 20 nt, Human
uggaauuaagaaaaacaugc

SEQ ID NO: 1261609 - RNA, 22 nt, Human
uggcagaaagggggaacccaca

SEQ ID NO: 1261610 - RNA, 19 nt, Human
uggccagaggcugagagga

SEQ ID NO: 1261611 - RNA, 22 nt, Human
uggccagaggcugagaggaggg

SEQ ID NO: 1261612 - RNA, 23 nt, Human
ugggaccagccuugaaagauggg

SEQ ID NO: 1261613 - RNA, 18 nt, Human
ugggaugggguggggaca

SEQ ID NO: 1261614 - RNA, 19 nt, Human
ugggguggggacaggcaau

SEQ ID NO: 1261615 - RNA, 19 nt, Human
uggucuccaggugucaccu

SEQ ID NO: 1261616 - RNA, 23 nt, Human
uggugaccugggauggggugggg

SEQ ID NO: 1261617 - RNA, 21 nt, Human
ugucuucuguucuucacgccc

SEQ ID NO: 1261618 - RNA, 19 nt, Human
ugugaagggucucaagucc

SEQ ID NO: 1261619 - RNA, 24 nt, Human
uguggcagcugcagcgggcuuggc

SEQ ID NO: 1261620 - RNA, 24 nt, Human
uguggcagcugcagcgggcuuggc

SEQ ID NO: 1261621 - RNA, 24 nt, Human
uguggcagcugcagcgggcuuggc

SEQ ID NO: 1261622 - RNA, 23 nt, Human
uguuguggugugagaguagccac

SEQ ID NO: 1261623 - RNA, 19 nt, Human
uuacaaacacaggcugugg

SEQ ID NO: 1261624 - RNA, 19 nt, Human
uucuguucuucacgcccca

SEQ ID NO: 1261625 - RNA, 22 nt, Human
uugugaagggucucaaguccaa

SEQ ID NO: 1261626 - RNA, 24 nt, Human
aaaaaaaaaaauuagcuggaugug

SEQ ID NO: 1261627 - RNA, 21 nt, Human
aaaaaaaaaagaaaagaaaag

SEQ ID NO: 1261628 - RNA, 20 nt, Human
aaaaaaggcugggcguggug

SEQ ID NO: 1261629 - RNA, 25 nt, Human
aaaaauacaaaaaaaggcugggcgu

SEQ ID NO: 1261630 - RNA, 19 nt, Human
aaaacaacaacaacaacaa

SEQ ID NO: 1261631 - RNA, 22 nt, Human
aaaacaacaacaacaacaaaac

SEQ ID NO: 1261632 - RNA, 22 nt, Human
aaaagaaaagaaaaggcuagag

SEQ ID NO: 1261633 - RNA, 23 nt, Human
aaaaggcugggcgugguggcuca

SEQ ID NO: 1261634 - RNA, 27 nt, Human
aaacagaauggaauuacuuugaucuga

SEQ ID NO: 1261635 - RNA, 23 nt, Human
aaagcagacggaucaccugaggu

SEQ ID NO: 1261636 - RNA, 28 nt, Human
aaagcagacggaucaccugaggucagga

SEQ ID NO: 1261637 - RNA, 22 nt, Human
aacaacaaaauuagccagucau

SEQ ID NO: 1261638 - RNA, 20 nt, Human
aacaacaacaacaacaaaau

SEQ ID NO: 1261639 - RNA, 19 nt, Human
aacauggcgaaaccccauc

SEQ ID NO: 1261640 - RNA, 20 nt, Human
aacauggcgaaaccccaucu

SEQ ID NO: 1261641 - RNA, 21 nt, Human
aacauggcgaaaccccaucuc

SEQ ID NO: 1261642 - RNA, 21 nt, Human
aacauggcgaaaccccaucuc

SEQ ID NO: 1261643 - RNA, 20 nt, Human
aacauggcgaaaccuugucu

SEQ ID NO: 1261644 - RNA, 21 nt, Human
aacauggcgaaaccuugucuc

SEQ ID NO: 1261645 - RNA, 19 nt, Human
aacauggugaaaccccguc

SEQ ID NO: 1261646 - RNA, 20 nt, Human
aacauggugaaaccccgucu

SEQ ID NO: 1261647 - RNA, 21 nt, Human
aacauggugaaaccccgucuc

SEQ ID NO: 1261648 - RNA, 26 nt, Human
aaccgucucaaaacaacaacaacaac

SEQ ID NO: 1261649 - RNA, 23 nt, Human
aagaucgugccacugcacuccag

SEQ ID NO: 1261650 - RNA, 20 nt, Human
aagcagaaucccagcauaua

SEQ ID NO: 1261651 - RNA, 26 nt, Human
aagcagacggaucaccugaggucagg

SEQ ID NO: 1261652 - RNA, 21 nt, Human
aagccgagguggguggaucac

SEQ ID NO: 1261653 - RNA, 18 nt, Human
aauuagccagucauggug

SEQ ID NO: 1261654 - RNA, 21 nt, Human
acaacaacaacaacaaaauua

SEQ ID NO: 1261655 - RNA, 19 nt, Human
acaacaacaacaacaacaa

SEQ ID NO: 1261656 - RNA, 21 nt, Human
acaacaacaacaacaacaaaa

SEQ ID NO: 1261657 - RNA, 20 nt, Human
acagagcgagacuccgucuc

SEQ ID NO: 1261658 - RNA, 23 nt, Human
acagagcgagacuccgucucaaa

SEQ ID NO: 1261659 - RNA, 24 nt, Human
acagagcgagacuccgucucaaaa

SEQ ID NO: 1261660 - RNA, 20 nt, Human
acagagugagacuccgucuc

SEQ ID NO: 1261661 - RNA, 24 nt, Human
acagagugagacuccgucucaaaa

SEQ ID NO: 1261662 - RNA, 21 nt, Human
acccacgucuccaguguccca

SEQ ID NO: 1261663 - RNA, 24 nt, Human
accccaucucuacuaaaaauacaa

SEQ ID NO: 1261664 - RNA, 24 nt, Human
accccgucucuacuaaaaauacaa

SEQ ID NO: 1261665 - RNA, 24 nt, Human
accugaggucaggaguucaagacc

SEQ ID NO: 1261666 - RNA, 24 nt, Human
accugaggucaggaguuugagacc

SEQ ID NO: 1261667 - RNA, 23 nt, Human
accuugucucuacuaaaauauaa

SEQ ID NO: 1261668 - RNA, 21 nt, Human
acgagugaaaccgucucaaaa

SEQ ID NO: 1261669 - RNA, 24 nt, Human
acuccagccugugugacagaguga

SEQ ID NO: 1261670 - RNA, 24 nt, Human
acugcacuccagccugggugacag

SEQ ID NO: 1261671 - RNA, 26 nt, Human
acugcacuccagccugggugacagag

SEQ ID NO: 1261672 - RNA, 24 nt, Human
acugcacuccagccugugugacag

SEQ ID NO: 1261673 - RNA, 26 nt, Human
acugcacuccagccugugugacagag

SEQ ID NO: 1261674 - RNA, 24 nt, Human
acuuugggaggcugaggugggcag

SEQ ID NO: 1261675 - RNA, 26 nt, Human
agacggaucaccugaggucaggaguu

SEQ ID NO: 1261676 - RNA, 22 nt, Human
agaucaccugaggucaggaguu

SEQ ID NO: 1261677 - RNA, 24 nt, Human
agcacuuugggaggcugagguggg

SEQ ID NO: 1261678 - RNA, 23 nt, Human
agccaggcgugguaguaggugcc

SEQ ID NO: 1261679 - RNA, 23 nt, Human
agccagucaugguggcaggcgcc

SEQ ID NO: 1261680 - RNA, 23 nt, Human
agccuggccaacauggcgaaacc

SEQ ID NO: 1261681 - RNA, 24 nt, Human
agccuggccaacauggcgaaaccc

SEQ ID NO: 1261682 - RNA, 24 nt, Human
agccugggugacagagcgagacuc

SEQ ID NO: 1261683 - RNA, 24 nt, Human
agccugugugacagagugagacuc

SEQ ID NO: 1261684 - RNA, 23 nt, Human
agcuggaugugguagcaggcgcc

SEQ ID NO: 1261685 - RNA, 20 nt, Human
aggaguuugagaccagccug

SEQ ID NO: 1261686 - RNA, 23 nt, Human
aggcaggagaaucgcuugaaccc

SEQ ID NO: 1261687 - RNA, 24 nt, Human
aggcaggagaaucgcuugaaccca

SEQ ID NO: 1261688 - RNA, 22 nt, Human
aggcaggagaaucucuugaacc

SEQ ID NO: 1261689 - RNA, 24 nt, Human
aggcaggagaaucucuugaaccug

SEQ ID NO: 1261690 - RNA, 21 nt, Human
aggcaggagaauggcgugaac

SEQ ID NO: 1261691 - RNA, 22 nt, Human
aggcaggagaauggcgugaacc

SEQ ID NO: 1261692 - RNA, 24 nt, Human
aggcaggagaauggcgugaaccug

SEQ ID NO: 1261693 - RNA, 19 nt, Human
aggcggagguugcagugag

SEQ ID NO: 1261694 - RNA, 20 nt, Human
aggcggagguugcagugagc

SEQ ID NO: 1261695 - RNA, 24 nt, Human
aggcggagguugcagugagcugag

SEQ ID NO: 1261696 - RNA, 24 nt, Human
aggcggaguuugcagugagccgag

SEQ ID NO: 1261697 - RNA, 20 nt, Human
aggcugaggcaggagaaucg

SEQ ID NO: 1261698 - RNA, 24 nt, Human
aggcugaggcaggagaaucgcuug

SEQ ID NO: 1261699 - RNA, 24 nt, Human
aggcugaggcaggagaaucucuug

SEQ ID NO: 1261700 - RNA, 19 nt, Human
aggcugaggcaggagaaug

SEQ ID NO: 1261701 - RNA, 21 nt, Human
aggcugaggugggcagaucac

SEQ ID NO: 1261702 - RNA, 24 nt, Human
aggcugagguugcagugagccaag

SEQ ID NO: 1261703 - RNA, 23 nt, Human
aggugcaguggcuuauccuguaa

SEQ ID NO: 1261704 - RNA, 22 nt, Human
aggugggcagaucaccugaggu

SEQ ID NO: 1261705 - RNA, 26 nt, Human
aggugggcagaucaccugaggucagg

SEQ ID NO: 1261706 - RNA, 24 nt, Human
agguggguggaucacaaggucagg

SEQ ID NO: 1261707 - RNA, 23 nt, Human
aguggcuuauccuguaauccuag

SEQ ID NO: 1261708 - RNA, 24 nt, Human
aucaccugaggucaggaguucaag

SEQ ID NO: 1261709 - RNA, 24 nt, Human
aucaccugaggucaggaguuugag

SEQ ID NO: 1261710 - RNA, 23 nt, Human
aucgcaccacugcacuccagcug

SEQ ID NO: 1261711 - RNA, 24 nt, Human
aucgugccacugcacuccagccug

SEQ ID NO: 1261712 - RNA, 24 nt, Human
aucgugccacugcacuccagccug

SEQ ID NO: 1261713 - RNA, 25 nt, Human
caaaacaacaacaacaacaacaaaa

SEQ ID NO: 1261714 - RNA, 20 nt, Human
caaaauaagacuagagcugg

SEQ ID NO: 1261715 - RNA, 18 nt, Human
caacaacaaaauuagcca

SEQ ID NO: 1261716 - RNA, 23 nt, Human
caacaacaacaaaauuagccagu

SEQ ID NO: 1261717 - RNA, 25 nt, Human
caacaacaacaacaaaauuagccag

SEQ ID NO: 1261718 - RNA, 24 nt, Human
caacauggcgaaaccuugucucua

SEQ ID NO: 1261719 - RNA, 23 nt, Human
caccugaggucaggaguucaaga

SEQ ID NO: 1261720 - RNA, 23 nt, Human
caccugaggucaggaguuugaga

SEQ ID NO: 1261721 - RNA, 24 nt, Human
cacgcuucuaaucccagcacuuug

SEQ ID NO: 1261722 - RNA, 22 nt, Human
cacuccagccugggugacagag

SEQ ID NO: 1261723 - RNA, 23 nt, Human
cacuccagccugggugacagagc

SEQ ID NO: 1261724 - RNA, 24 nt, Human
cacuccagccugggugacagagcg

SEQ ID NO: 1261725 - RNA, 22 nt, Human
cacuccagccugugugacagag

SEQ ID NO: 1261726 - RNA, 22 nt, Human
cacuccagccugugugacagag

SEQ ID NO: 1261727 - RNA, 24 nt, Human
cacuccagccugugugacagagug

SEQ ID NO: 1261728 - RNA, 19 nt, Human
cacugcacuccagccuggg

SEQ ID NO: 1261729 - RNA, 19 nt, Human
cacugcacuccagccuggg

SEQ ID NO: 1261730 - RNA, 22 nt, Human
cacugcacuccagccuggguga

SEQ ID NO: 1261731 - RNA, 23 nt, Human
cacugcacuccagccugggugac

SEQ ID NO: 1261732 - RNA, 24 nt, Human
cacugcacuccagccugggugaca

SEQ ID NO: 1261733 - RNA, 25 nt, Human
cacugcacuccagccugggugacag

SEQ ID NO: 1261734 - RNA, 19 nt, Human
cacugcacuccagccugug

SEQ ID NO: 1261735 - RNA, 22 nt, Human
cacugcacuccagccuguguga

SEQ ID NO: 1261736 - RNA, 24 nt, Human
cacugcacuccagccugugugaca

SEQ ID NO: 1261737 - RNA, 25 nt, Human
cacugcacuccagccugugugacag

SEQ ID NO: 1261738 - RNA, 18 nt, Human
cacugcacuccagcuggg

SEQ ID NO: 1261739 - RNA, 18 nt, Human
cacugcacuccagcuggg

SEQ ID NO: 1261740 - RNA, 18 nt, Human
cacugcacuccagcuggg

SEQ ID NO: 1261741 - RNA, 18 nt, Human
cacugcacuccagcuggg

SEQ ID NO: 1261742 - RNA, 22 nt, Human
cacugcacuccagcugggguga

SEQ ID NO: 1261743 - RNA, 22 nt, Human
cacugcacuccagcugggguga

SEQ ID NO: 1261744 - RNA, 23 nt, Human
cacugcacuccagcuggggugac

SEQ ID NO: 1261745 - RNA, 24 nt, Human
cagaucaccugaggucaggaguuu

SEQ ID NO: 1261746 - RNA, 27 nt, Human
cagaucaccugaggucaggaguuugag

SEQ ID NO: 1261747 - RNA, 23 nt, Human
cagcaaaauaagacuagagcugg

SEQ ID NO: 1261748 - RNA, 21 nt, Human
cagcacuuugggaggccaaag

SEQ ID NO: 1261749 - RNA, 24 nt, Human
cagcacuuugggaggccaaagcag

SEQ ID NO: 1261750 - RNA, 18 nt, Human
cagcaggcggagguugca

SEQ ID NO: 1261751 - RNA, 24 nt, Human
cagcuacucaggaggcugaggcag

SEQ ID NO: 1261752 - RNA, 24 nt, Human
cagcuacuugggaggcugaggcag

SEQ ID NO: 1261753 - RNA, 23 nt, Human
cagcucaaauuauuuauugucaa

SEQ ID NO: 1261754 - RNA, 22 nt, Human
caggugcccugggagucugggu

SEQ ID NO: 1261755 - RNA, 21 nt, Human
cauaggccaucuucuuggccu

SEQ ID NO: 1261756 - RNA, 27 nt, Human
ccaaagcagacggaucaccugagguca

SEQ ID NO: 1261757 - RNA, 18 nt, Human
ccacugcacuccagccug

SEQ ID NO: 1261758 - RNA, 18 nt, Human
ccacugcacuccagccug

SEQ ID NO: 1261759 - RNA, 20 nt, Human
ccacugcacuccagccuggg

SEQ ID NO: 1261760 - RNA, 20 nt, Human
ccacugcacuccagccuggg

SEQ ID NO: 1261761 - RNA, 21 nt, Human
ccacugcacuccagccugggu

SEQ ID NO: 1261762 - RNA, 21 nt, Human
ccacugcacuccagccugggu

SEQ ID NO: 1261763 - RNA, 23 nt, Human
ccacugcacuccagccuggguga

SEQ ID NO: 1261764 - RNA, 24 nt, Human
ccacugcacuccagccugggugac

SEQ ID NO: 1261765 - RNA, 21 nt, Human
ccacugcacuccagccugugu

SEQ ID NO: 1261766 - RNA, 24 nt, Human
ccacugcacuccagccugugugac

SEQ ID NO: 1261767 - RNA, 19 nt, Human
ccacugcacuccagcuggg

SEQ ID NO: 1261768 - RNA, 19 nt, Human
ccacugcacuccagcuggg

SEQ ID NO: 1261769 - RNA, 20 nt, Human
ccacugcacuccagcugggg

SEQ ID NO: 1261770 - RNA, 21 nt, Human
ccacugcacuccagcuggggu

SEQ ID NO: 1261771 - RNA, 23 nt, Human
ccacugcacuccagcugggguga

SEQ ID NO: 1261772 - RNA, 24 nt, Human
ccacugcacuccagcuggggugac

SEQ ID NO: 1261773 - RNA, 26 nt, Human
cccagcauauaaaacagaauggaauu

SEQ ID NO: 1261774 - RNA, 20 nt, Human
ccgcagucgcuuccucucca

SEQ ID NO: 1261775 - RNA, 18 nt, Human
ccgucucaaaacaacaac

SEQ ID NO: 1261776 - RNA, 18 nt, Human
ccuauagucccagcuacu

SEQ ID NO: 1261777 - RNA, 21 nt, Human
ccuauagucccagcuacuugg

SEQ ID NO: 1261778 - RNA, 22 nt, Human
ccugaggucaggaguuugagac

SEQ ID NO: 1261779 - RNA, 21 nt, Human
ccuggccaacauggcgaaacc

SEQ ID NO: 1261780 - RNA, 24 nt, Human
ccuggccaacauggcgaaacccca

SEQ ID NO: 1261781 - RNA, 24 nt, Human
ccuggccaacauggcgaaaccuug

SEQ ID NO: 1261782 - RNA, 22 nt, Human
ccuggcuaacauggugaaaccc

SEQ ID NO: 1261783 - RNA, 23 nt, Human
ccuggcuaacauggugaaacccc

SEQ ID NO: 1261784 - RNA, 24 nt, Human
ccuggcuaacauggugaaaccccg

SEQ ID NO: 1261785 - RNA, 22 nt, Human
ccugggugacagagcgagacuc

SEQ ID NO: 1261786 - RNA, 19 nt, Human
ccuguaaucccagcuacuc

SEQ ID NO: 1261787 - RNA, 21 nt, Human
ccuguaaucccagcuacucag

SEQ ID NO: 1261788 - RNA, 18 nt, Human
ccuguaauccuagcacuu

SEQ ID NO: 1261789 - RNA, 20 nt, Human
ccuguaauccuagcacuuug

SEQ ID NO: 1261790 - RNA, 22 nt, Human
ccuguaauccuagcacuuuggg

SEQ ID NO: 1261791 - RNA, 22 nt, Human
ccugugugacagagugagacuc

SEQ ID NO: 1261792 - RNA, 24 nt, Human
cgagaucgugccacugcacuccag

SEQ ID NO: 1261793 - RNA, 26 nt, Human
cgagguggguggaucacaaggucagg

SEQ ID NO: 1261794 - RNA, 24 nt, Human
cgccuguaaucccagcuacucagg

SEQ ID NO: 1261795 - RNA, 24 nt, Human
cggaucaccugaggucaggaguuc

SEQ ID NO: 1261796 - RNA, 27 nt, Human
cggaucaccugaggucaggaguucaag

SEQ ID NO: 1261797 - RNA, 22 nt, Human
cgucucaaaacaacaacaacaa

SEQ ID NO: 1261798 - RNA, 18 nt, Human
cucaaaaaaaaaaaaaag

SEQ ID NO: 1261799 - RNA, 25 nt, Human
cucaaaaaaaaaaaaaagaaaagaa

SEQ ID NO: 1261800 - RNA, 22 nt, Human
cucacgcuucuaaucccagcac

SEQ ID NO: 1261801 - RNA, 24 nt, Human
cucacgcuucuaaucccagcacuu

SEQ ID NO: 1261802 - RNA, 19 nt, Human
cuccgucucaaaaaaaaaa

SEQ ID NO: 1261803 - RNA, 25 nt, Human
cuccgucucaaaaaaaaaaauuagc

SEQ ID NO: 1261804 - RNA, 24 nt, Human
cucuacuaaaaauacaaaaaaagg

SEQ ID NO: 1261805 - RNA, 23 nt, Human
cuggccaacauggcgaaacccca

SEQ ID NO: 1261806 - RNA, 22 nt, Human
cuucuaaucccagcacuuuggg

SEQ ID NO: 1261807 - RNA, 23 nt, Human
cuugaaccugggaggcugagguu

SEQ ID NO: 1261808 - RNA, 18 nt, Human
gaaaccccaucucuacua

SEQ ID NO: 1261809 - RNA, 19 nt, Human
gaaaccuugucucuacuaa

SEQ ID NO: 1261810 - RNA, 24 nt, Human
gacagagugagacuccgucucaaa

SEQ ID NO: 1261811 - RNA, 23 nt, Human
gagaucgcaccacugcacuccag

SEQ ID NO: 1261812 - RNA, 22 nt, Human
gagguggguggaucacaagguc

SEQ ID NO: 1261813 - RNA, 18 nt, Human
gagguugcagugagccaa

SEQ ID NO: 1261814 - RNA, 23 nt, Human
gagguugcagugagccaagaucg

SEQ ID NO: 1261815 - RNA, 23 nt, Human
gagguugcagugagcugagaucg

SEQ ID NO: 1261816 - RNA, 23 nt, Human
gaguuugcagugagccgagaucg

SEQ ID NO: 1261817 - RNA, 23 nt, Human
gaucaccugaggucaggaguuca

SEQ ID NO: 1261818 - RNA, 24 nt, Human
gaucaccugaggucaggaguucaa

SEQ ID NO: 1261819 - RNA, 24 nt, Human
gaucaccugaggucaggaguuuga

SEQ ID NO: 1261820 - RNA, 18 nt, Human
gauugaagugggggcugg

SEQ ID NO: 1261821 - RNA, 24 nt, Human
gcacuccagccugggugacagagc

SEQ ID NO: 1261822 - RNA, 24 nt, Human
gcacuccagccugugugacagagu

SEQ ID NO: 1261823 - RNA, 22 nt, Human
gcaggagaaucgcuugaaccca

SEQ ID NO: 1261824 - RNA, 24 nt, Human
gccaacauggcgaaaccccaucuc

SEQ ID NO: 1261825 - RNA, 24 nt, Human
gccaacauggcgaaaccuugucuc

SEQ ID NO: 1261826 - RNA, 20 nt, Human
gccaagaucgugccacugca

SEQ ID NO: 1261827 - RNA, 19 nt, Human
gccacugcacuccagccug

SEQ ID NO: 1261828 - RNA, 24 nt, Human
gccacugcacuccagccuggguga

SEQ ID NO: 1261829 - RNA, 20 nt, Human
gccgagaucgugccacugca

SEQ ID NO: 1261830 - RNA, 24 nt, Human
gcuaacauggugaaaccccgucuc

SEQ ID NO: 1261831 - RNA, 20 nt, Human
gcugagaucgcaccacugca

SEQ ID NO: 1261832 - RNA, 22 nt, Human
gcugaggcaggagaauggcgug

SEQ ID NO: 1261833 - RNA, 19 nt, Human
gcugggcgugguggcucac

SEQ ID NO: 1261834 - RNA, 24 nt, Human
ggagaccauccuggcuaacauggu

SEQ ID NO: 1261835 - RNA, 22 nt, Human
ggagguugcagugagcugagau

SEQ ID NO: 1261836 - RNA, 23 nt, Human
ggagguugcagugagcugagauc

SEQ ID NO: 1261837 - RNA, 24 nt, Human
ggagguugcagugagcugagaucg

SEQ ID NO: 1261838 - RNA, 24 nt, Human
ggaguuugcagugagccgagaucg

SEQ ID NO: 1261839 - RNA, 23 nt, Human
ggaucaccugaggucaggaguuc

SEQ ID NO: 1261840 - RNA, 25 nt, Human
ggcagaucaccugaggucaggaguu

SEQ ID NO: 1261841 - RNA, 21 nt, Human
ggcucacgcuucuaaucccag

SEQ ID NO: 1261842 - RNA, 20 nt, Human
gggaagccgaggugggugga

SEQ ID NO: 1261843 - RNA, 23 nt, Human
gggaagccgagguggguggauca

SEQ ID NO: 1261844 - RNA, 24 nt, Human
gggcgugguggcucacgcuucuaa

SEQ ID NO: 1261845 - RNA, 24 nt, Human
ggguggaucacaaggucaggagau

SEQ ID NO: 1261846 - RNA, 19 nt, Human
ggguucagggauuguuucc

SEQ ID NO: 1261847 - RNA, 24 nt, Human
gguagcaggcgccuguaaucccag

SEQ ID NO: 1261848 - RNA, 24 nt, Human
gguaguaggugccuauagucccag

SEQ ID NO: 1261849 - RNA, 19 nt, Human
ggucaggaguuugagacca

SEQ ID NO: 1261850 - RNA, 24 nt, Human
gguggcucacgcuucuaaucccag

SEQ ID NO: 1261851 - RNA, 18 nt, Human
gucauggaggccugugag

SEQ ID NO: 1261852 - RNA, 20 nt, Human
gucucaaaaaaaaaaaaaag

SEQ ID NO: 1261853 - RNA, 24 nt, Human
gugcaagcaggugcccugggaguc

SEQ ID NO: 1261854 - RNA, 19 nt, Human
guugcagugagcugagauc

SEQ ID NO: 1261855 - RNA, 21 nt, Human
guugcagugagcugagaucgc

SEQ ID NO: 1261856 - RNA, 21 nt, Human
uaaaaauacaaaaaaaggcug

SEQ ID NO: 1261857 - RNA, 26 nt, Human
uaaacccacgucuccagugucccagg

SEQ ID NO: 1261858 - RNA, 22 nt, Human
uaacauggugaaaccccgucuc

SEQ ID NO: 1261859 - RNA, 24 nt, Human
uaacauggugaaaccccgucucua

SEQ ID NO: 1261860 - RNA, 25 nt, Human
uaagacuagagcuggccaggugcag

SEQ ID NO: 1261861 - RNA, 23 nt, Human
uaagcagaaucccagcauauaaa

SEQ ID NO: 1261862 - RNA, 19 nt, Human
uaagugacuucucaucugc

SEQ ID NO: 1261863 - RNA, 25 nt, Human
uaagugacuucucaucugcucaaca

SEQ ID NO: 1261864 - RNA, 24 nt, Human
uagcacuuugggaggcugaggugg

SEQ ID NO: 1261865 - RNA, 22 nt, Human
uagcaggcgccuguaaucccag

SEQ ID NO: 1261866 - RNA, 19 nt, Human
uagcuggaugugguagcag

SEQ ID NO: 1261867 - RNA, 19 nt, Human
uaggcauucauuccugugg

SEQ ID NO: 1261868 - RNA, 25 nt, Human
uaggccaucuucuuggccugucaug

SEQ ID NO: 1261869 - RNA, 24 nt, Human
ucacaaggucaggagauggagacc

SEQ ID NO: 1261870 - RNA, 20 nt, Human
ucacagcuacuggggaggcu

SEQ ID NO: 1261871 - RNA, 21 nt, Human
ucagcaaaauaagacuagagc

SEQ ID NO: 1261872 - RNA, 22 nt, Human
ucaucugcucaacagcucaaaa

SEQ ID NO: 1261873 - RNA, 22 nt, Human
ucauucaaaggugcaagcaggu

SEQ ID NO: 1261874 - RNA, 22 nt, Human
uccaccauuaggcauucauucc

SEQ ID NO: 1261875 - RNA, 23 nt, Human
uccagccugggugacagagcgag

SEQ ID NO: 1261876 - RNA, 24 nt, Human
uccagccugggugacagagcgaga

SEQ ID NO: 1261877 - RNA, 23 nt, Human
uccagccugugugacagagugag

SEQ ID NO: 1261878 - RNA, 24 nt, Human
uccagccugugugacagagugaga

SEQ ID NO: 1261879 - RNA, 21 nt, Human
uccagcuggggugacgaguga

SEQ ID NO: 1261880 - RNA, 19 nt, Human
uccagugucccaggccagc

SEQ ID NO: 1261881 - RNA, 22 nt, Human
uccgucucaaaaaaaaaaaaaa

SEQ ID NO: 1261882 - RNA, 23 nt, Human
uccgucucaaaaaaaaaaaaaag

SEQ ID NO: 1261883 - RNA, 25 nt, Human
uccgucucaaaaaaaaaaaaaagaa

SEQ ID NO: 1261884 - RNA, 21 nt, Human
uccuguaauccuagcacuuug

SEQ ID NO: 1261885 - RNA, 22 nt, Human
ucgcaccacugcacuccagcug

SEQ ID NO: 1261886 - RNA, 24 nt, Human
ucgcuugaacccagcaggcggagg

SEQ ID NO: 1261887 - RNA, 23 nt, Human
ucgugccacugcacuccagccug

SEQ ID NO: 1261888 - RNA, 22 nt, Human
ucucuacuaaaaauacaaaaaa

SEQ ID NO: 1261889 - RNA, 22 nt, Human
ucucuacuaaaaauacaaaaaa

SEQ ID NO: 1261890 - RNA, 21 nt, Human
ucucuacuaaaauauaaaaaa

SEQ ID NO: 1261891 - RNA, 18 nt, Human
ugaaccugggaggcugag

SEQ ID NO: 1261892 - RNA, 24 nt, Human
ugaaccugggaggcugagguugca

SEQ ID NO: 1261893 - RNA, 21 nt, Human
ugagaccagccuggccaacau

SEQ ID NO: 1261894 - RNA, 23 nt, Human
ugagaccagccuggccaacaugg

SEQ ID NO: 1261895 - RNA, 22 nt, Human
ugagccaagaucgugccacugc

SEQ ID NO: 1261896 - RNA, 22 nt, Human
ugagccgagaucgugccacugc

SEQ ID NO: 1261897 - RNA, 22 nt, Human
ugagcugagaucgcaccacugc

SEQ ID NO: 1261898 - RNA, 20 nt, Human
ugaggcaggagaaucgcuug

SEQ ID NO: 1261899 - RNA, 24 nt, Human
ugaggcaggagaaucgcuugaacc

SEQ ID NO: 1261900 - RNA, 25 nt, Human
ugaggcaggagaaucgcuugaaccc

SEQ ID NO: 1261901 - RNA, 24 nt, Human
ugaggcaggagaaucucuugaacc

SEQ ID NO: 1261902 - RNA, 25 nt, Human
ugaggcaggagaaucucuugaaccu

SEQ ID NO: 1261903 - RNA, 24 nt, Human
ugaggcaggagaauggcgugaacc

SEQ ID NO: 1261904 - RNA, 25 nt, Human
ugaggcaggagaauggcgugaaccu

SEQ ID NO: 1261905 - RNA, 19 nt, Human
ugaggcaucucuacagacc

SEQ ID NO: 1261906 - RNA, 21 nt, Human
ugaggcaucucuacagacccu

SEQ ID NO: 1261907 - RNA, 18 nt, Human
ugaggucaggaguuugag

SEQ ID NO: 1261908 - RNA, 20 nt, Human
ugaggugggcagaucaccug

SEQ ID NO: 1261909 - RNA, 24 nt, Human
ugaggugggcagaucaccugaggu

SEQ ID NO: 1261910 - RNA, 26 nt, Human
ugaggugggcagaucaccugagguca

SEQ ID NO: 1261911 - RNA, 24 nt, Human
ugagguugcagugagccaagaucg

SEQ ID NO: 1261912 - RNA, 24 nt, Human
ugccuauagucccagcuacuuggg

SEQ ID NO: 1261913 - RNA, 29 nt, Human
uggaaggcggaguuugcagugacaacggu

SEQ ID NO: 1261914 - RNA, 24 nt, Human
uggccaacauggcgaaaccuuguc

SEQ ID NO: 1261915 - RNA, 21 nt, Human
uggcucacgcuucuaauccca

SEQ ID NO: 1261916 - RNA, 22 nt, Human
uggcucacgcuucuaaucccag

SEQ ID NO: 1261917 - RNA, 24 nt, Human
uggcucacgcuucuaaucccagca

SEQ ID NO: 1261918 - RNA, 18 nt, Human
uggcuuauccuguaaucc

SEQ ID NO: 1261919 - RNA, 18 nt, Human
uggcuuauccuguaaucc

SEQ ID NO: 1261920 - RNA, 23 nt, Human
uggcuuauccuguaauccuagca

SEQ ID NO: 1261921 - RNA, 18 nt, Human
ugggaggccaaagcagac

SEQ ID NO: 1261922 - RNA, 24 nt, Human
ugggaggccaaagcagacggauca

SEQ ID NO: 1261923 - RNA, 18 nt, Human
ugggaggcugaggcagga

SEQ ID NO: 1261924 - RNA, 24 nt, Human
ugggaggcugaggcaggagaaugg

SEQ ID NO: 1261925 - RNA, 20 nt, Human
ugggaggcugaggugggcag

SEQ ID NO: 1261926 - RNA, 24 nt, Human
ugggaggcugaggugggcagauca

SEQ ID NO: 1261927 - RNA, 24 nt, Human
ugggaggcugagguugcagugagc

SEQ ID NO: 1261928 - RNA, 20 nt, Human
ugggagucuggguucagccu

SEQ ID NO: 1261929 - RNA, 24 nt, Human
ugggcagaucaccugaggucagga

SEQ ID NO: 1261930 - RNA, 19 nt, Human
ugggggaagccgagguggg

SEQ ID NO: 1261931 - RNA, 19 nt, Human
ugggggaagccgagguggg

SEQ ID NO: 1261932 - RNA, 24 nt, Human
ugguagcaggcgccuguaauccca

SEQ ID NO: 1261933 - RNA, 24 nt, Human
ugguggcucacgcuucuaauccca

SEQ ID NO: 1261934 - RNA, 19 nt, Human
ugucauggaggccugugag

SEQ ID NO: 1261935 - RNA, 24 nt, Human
uuagcuggaugugguagcaggcgc

SEQ ID NO: 1261936 - RNA, 20 nt, Human
uuccuguggguucagggauu

SEQ ID NO: 1261937 - RNA, 24 nt, Human
uugaacccagcaggcggagguugc

SEQ ID NO: 1261938 - RNA, 24 nt, Human
uugaaccugggaggcugagguugc

SEQ ID NO: 1261939 - RNA, 22 nt, Human
uugcagugagccaagaucgugc

SEQ ID NO: 1261940 - RNA, 21 nt, Human
uugcagugagccgagaucgug

SEQ ID NO: 1261941 - RNA, 22 nt, Human
uugcagugagccgagaucgugc

SEQ ID NO: 1261942 - RNA, 18 nt, Human
uugcagugagcugagauc

SEQ ID NO: 1261943 - RNA, 19 nt, Human
uugcagugagcugagaucg

SEQ ID NO: 1261944 - RNA, 22 nt, Human
uugcagugagcugagaucgcac

SEQ ID NO: 1261945 - RNA, 25 nt, Human
uugggaggcugaggugggcagauca

SEQ ID NO: 1261946 - RNA, 24 nt, Human
uuugcagugagccgagaucgugcc

SEQ ID NO: 1261947 - RNA, 24 nt, Human
uuuuuuaagcagaagauucuuuuu

SEQ ID NO: 1261948 - RNA, 21 nt, Human
uuuuuuuuuuaagcagaagau

SEQ ID NO: 1261949 - RNA, 20 nt, Human
uuuuuuuuuuuuaagcagaa

SEQ ID NO: 1261950 - RNA, 18 nt, Human
aacaauaacagccaagcc

SEQ ID NO: 1261951 - RNA, 24 nt, Human
acgacaggucccaaauuacaaacc

SEQ ID NO: 1261952 - RNA, 22 nt, Human
agcucccaaggucuccaacuuc

SEQ ID NO: 1261953 - RNA, 21 nt, Human
aggcauuugguggaugccaga

SEQ ID NO: 1261954 - RNA, 23 nt, Human
aggucuuuggguuuuuuuucccu

SEQ ID NO: 1261955 - RNA, 19 nt, Human
caacaauaacagccaagcc

SEQ ID NO: 1261956 - RNA, 24 nt, Human
caacgucacuuuauuaucaauguc

SEQ ID NO: 1261957 - RNA, 18 nt, Human
caauaacagccaagccag

SEQ ID NO: 1261958 - RNA, 22 nt, Human
caggucccaaauuacaaaccaa

SEQ ID NO: 1261959 - RNA, 26 nt, Human
caggucccaaauuacaaaccaacucu

SEQ ID NO: 1261960 - RNA, 26 nt, Human
cccaaauuacaaaccaacucucauaa

SEQ ID NO: 1261961 - RNA, 23 nt, Human
ccgcgcgugcauccaccgcgauc

SEQ ID NO: 1261962 - RNA, 22 nt, Human
cucccaaggucuccaacuuccu

SEQ ID NO: 1261963 - RNA, 19 nt, Human
gcauccaccgcgaucucag

SEQ ID NO: 1261964 - RNA, 21 nt, Human
ucccaaggucuccaacuuccu

SEQ ID NO: 1261965 - RNA, 22 nt, Human
ucccaaggucuccaacuuccua

SEQ ID NO: 1261966 - RNA, 20 nt, Human
ucccuggagcucccaagguc

SEQ ID NO: 1261967 - RNA, 24 nt, Human
ucccuggagcucccaaggucucca

SEQ ID NO: 1261968 - RNA, 22 nt, Human
uccuaaggcauuugguggaugc

SEQ ID NO: 1261969 - RNA, 22 nt, Human
ucugcagcagccaacgucacuu

SEQ ID NO: 1261970 - RNA, 20 nt, Human
ugcauccaccgcgaucucag

SEQ ID NO: 1261971 - RNA, 19 nt, Human
uucccuggagcucccaagg

SEQ ID NO: 1261972 - RNA, 19 nt, Human
aaggcgaggacgacaaagg

SEQ ID NO: 1261973 - RNA, 21 nt, Human
agccuccucacaccuuuauua

SEQ ID NO: 1261974 - RNA, 20 nt, Human
gcaggggauucucuuuugcc

SEQ ID NO: 1261975 - RNA, 24 nt, Human
gccuccucacaccuuuauuaaaac

SEQ ID NO: 1261976 - RNA, 19 nt, Human
ggcuggggaaggcgaggac

SEQ ID NO: 1261977 - RNA, 21 nt, Human
gggaaggcgaggacgacaaag

SEQ ID NO: 1261978 - RNA, 18 nt, Human
gggauucucuuuugccca

SEQ ID NO: 1261979 - RNA, 21 nt, Human
gucccggugcaaggccgaggc

SEQ ID NO: 1261980 - RNA, 19 nt, Human
gugucccaaacucggcguc

SEQ ID NO: 1261981 - RNA, 22 nt, Human
ucaacuggccccagccuccuca

SEQ ID NO: 1261982 - RNA, 19 nt, Human
ucccggugcaaggccgagg

SEQ ID NO: 1261983 - RNA, 23 nt, Human
uucggugucccaaacucggcguc

SEQ ID NO: 1261984 - RNA, 22 nt, Human
caucugcuucuucaccuucuuc

SEQ ID NO: 1261985 - RNA, 18 nt, Human
ggucauagucuggaucau

SEQ ID NO: 1261986 - RNA, 18 nt, Human
ucuccuuccucaucugcu

SEQ ID NO: 1261987 - RNA, 19 nt, Human
aagcagaagacaggauggc

SEQ ID NO: 1261988 - RNA, 20 nt, Human
acagaauaaaccaguucccc

SEQ ID NO: 1261989 - RNA, 22 nt, Human
aggaaggaaccaguuguucuua

SEQ ID NO: 1261990 - RNA, 21 nt, Human
aggauggcuccucagcguuac

SEQ ID NO: 1261991 - RNA, 24 nt, Human
auaguagguuuuucucaaauauuu

SEQ ID NO: 1261992 - RNA, 23 nt, Human
cagaauccccagagugaagacac

SEQ ID NO: 1261993 - RNA, 19 nt, Human
cagccugccagaaucccca

SEQ ID NO: 1261994 - RNA, 22 nt, Human
ccaggaaaccagccugccagaa

SEQ ID NO: 1261995 - RNA, 27 nt, Human
cccaccaggcuggaagcuaugggaaga

SEQ ID NO: 1261996 - RNA, 19 nt, Human
ccuuuauuccccaccaggc

SEQ ID NO: 1261997 - RNA, 24 nt, Human
cucaagcagaagacaggauggcuc

SEQ ID NO: 1261998 - RNA, 20 nt, Human
cuccucagcguuacucuggc

SEQ ID NO: 1261999 - RNA, 18 nt, Human
gaagacacucaagcagaa

SEQ ID NO: 1262000 - RNA, 19 nt, Human
gaagacaggauggcuccuc

SEQ ID NO: 1262001 - RNA, 18 nt, Human
gaaggaaggaaccaguug

SEQ ID NO: 1262002 - RNA, 21 nt, Human
ggagaagagagccgugggacc

SEQ ID NO: 1262003 - RNA, 22 nt, Human
guggaagaugaaggaagagcaa

SEQ ID NO: 1262004 - RNA, 24 nt, Human
uagaaaagugcuuggcauauagua

SEQ ID NO: 1262005 - RNA, 23 nt, Human
uagaaggagugaauacauggaua

SEQ ID NO: 1262006 - RNA, 19 nt, Human
uccaagaggauguaauauc

SEQ ID NO: 1262007 - RNA, 23 nt, Human
ucuucugaaggaaggaaccaguu

SEQ ID NO: 1262008 - RNA, 23 nt, Human
ugaagacacucaagcagaagaca

SEQ ID NO: 1262009 - RNA, 26 nt, Human
ugccagaauccccagagugaagacac

SEQ ID NO: 1262010 - RNA, 19 nt, Human
uggaauccaggcgcucacc

SEQ ID NO: 1262011 - RNA, 20 nt, Human
ugggaagaaagggcuauugc

SEQ ID NO: 1262012 - RNA, 23 nt, Human
uuggcauauaguagguuuuucuc

SEQ ID NO: 1262013 - RNA, 18 nt, Human
uuuggaauccaggcgcuc

SEQ ID NO: 1262014 - RNA, 25 nt, Human
aacucggcgccccccucagcgccuc

SEQ ID NO: 1262015 - RNA, 20 nt, Human
aaucaaaucagcuucacaaa

SEQ ID NO: 1262016 - RNA, 20 nt, Human
agcaacucggcgccccccuc

SEQ ID NO: 1262017 - RNA, 21 nt, Human
aucaagucuuuccccuuugga

SEQ ID NO: 1262018 - RNA, 23 nt, Human
ccacauuaaacccuuuagaccua

SEQ ID NO: 1262019 - RNA, 18 nt, Human
ccccgcuccucgcgcccg

SEQ ID NO: 1262020 - RNA, 20 nt, Human
cccgcgccgcgguccgccga

SEQ ID NO: 1262021 - RNA, 27 nt, Human
cccuuuagaccuacauuaauaugaaua

SEQ ID NO: 1262022 - RNA, 20 nt, Human
ccgccccgcuccucgcgccc

SEQ ID NO: 1262023 - RNA, 19 nt, Human
ccucgcacuaccuccuccu

SEQ ID NO: 1262024 - RNA, 21 nt, Human
ccucgcgcccgggccccggcc

SEQ ID NO: 1262025 - RNA, 22 nt, Human
cgacuccugguccccacgcccc

SEQ ID NO: 1262026 - RNA, 19 nt, Human
cgccccgcuccucgcgccc

SEQ ID NO: 1262027 - RNA, 27 nt, Human
cguaccaucaagucuuuccccuuugga

SEQ ID NO: 1262028 - RNA, 18 nt, Human
cucgcgcccgggccccgg

SEQ ID NO: 1262029 - RNA, 23 nt, Human
cucggcgccccccucagcgccuc

SEQ ID NO: 1262030 - RNA, 21 nt, Human
gacuccugguccccacgcccc

SEQ ID NO: 1262031 - RNA, 20 nt, Human
gcccccgccccgcuccucgc

SEQ ID NO: 1262032 - RNA, 21 nt, Human
gcccgggccccggccgggccc

SEQ ID NO: 1262033 - RNA, 19 nt, Human
uaacagugcuggcuguggu

SEQ ID NO: 1262034 - RNA, 24 nt, Human
uaaccacauuaaacccuuuagacc

SEQ ID NO: 1262035 - RNA, 21 nt, Human
uaucugguucucuuaacagug

SEQ ID NO: 1262036 - RNA, 19 nt, Human
uccccacgcccccgccccg

SEQ ID NO: 1262037 - RNA, 25 nt, Human
uccccacgcccccgccccgcuccuc

SEQ ID NO: 1262038 - RNA, 19 nt, Human
ucccgaaggcuacagaugc

SEQ ID NO: 1262039 - RNA, 21 nt, Human
ucccgaaggcuacagaugcca

SEQ ID NO: 1262040 - RNA, 22 nt, Human
ucgcgcccgggccccggccggg

SEQ ID NO: 1262041 - RNA, 19 nt, Human
ucucuuaacagugcuggcu

SEQ ID NO: 1262042 - RNA, 20 nt, Human
uuaaaaauaugaacuacugc

SEQ ID NO: 1262043 - RNA, 18 nt, Human
aacacguguagaaacuua

SEQ ID NO: 1262044 - RNA, 19 nt, Human
accccgaggagacugcgga

SEQ ID NO: 1262045 - RNA, 18 nt, Human
agcgcgguggggcuaggc

SEQ ID NO: 1262046 - RNA, 24 nt, Human
agcgcgguggggcuaggcgugggg

SEQ ID NO: 1262047 - RNA, 18 nt, Human
caauucgaugcagaaguc

SEQ ID NO: 1262048 - RNA, 19 nt, Human
cccacggcugggcgugggg

SEQ ID NO: 1262049 - RNA, 21 nt, Human
ccccaacacguguagaaacuu

SEQ ID NO: 1262050 - RNA, 18 nt, Human
cccgcggcuccuucgccc

SEQ ID NO: 1262051 - RNA, 23 nt, Human
ccucugaggcuggggcgggguac

SEQ ID NO: 1262052 - RNA, 22 nt, Human
ccuguaccgcagcgucgugugg

SEQ ID NO: 1262053 - RNA, 18 nt, Human
ccuucgcccucucgcugg

SEQ ID NO: 1262054 - RNA, 20 nt, Human
cgcugggccgacuaagcgug

SEQ ID NO: 1262055 - RNA, 21 nt, Human
cgggaccagggcggaggccgc

SEQ ID NO: 1262056 - RNA, 24 nt, Human
cggggccccgggcugucacguggc

SEQ ID NO: 1262057 - RNA, 18 nt, Human
gagcgcgguggggcuagg

SEQ ID NO: 1262058 - RNA, 19 nt, Human
gaggugcguugcagggcca

SEQ ID NO: 1262059 - RNA, 21 nt, Human
gaugcagaagucuuuuaaaua

SEQ ID NO: 1262060 - RNA, 24 nt, Human
gccccgggcugucacguggcccca

SEQ ID NO: 1262061 - RNA, 20 nt, Human
gcggggcgcggggccccggg

SEQ ID NO: 1262062 - RNA, 20 nt, Human
ggaggugcguugcagggcca

SEQ ID NO: 1262063 - RNA, 20 nt, Human
ggccgguccgcccucacucc

SEQ ID NO: 1262064 - RNA, 20 nt, Human
ggcgcggcggggcgcggggc

SEQ ID NO: 1262065 - RNA, 22 nt, Human
ggcggcgcggcggggcgcgggg

SEQ ID NO: 1262066 - RNA, 19 nt, Human
gggaccagggcggaggccg

SEQ ID NO: 1262067 - RNA, 21 nt, Human
gggcgagcaggguuggcgggg

SEQ ID NO: 1262068 - RNA, 19 nt, Human
uacaccaaguaaggcggcg

SEQ ID NO: 1262069 - RNA, 19 nt, Human
uccgcccucacuccacccu

SEQ ID NO: 1262070 - RNA, 22 nt, Human
ucgcugggccgacuaagcgugu

SEQ ID NO: 1262071 - RNA, 21 nt, Human
ucgugugguucgccaaggggc

SEQ ID NO: 1262072 - RNA, 18 nt, Human
ucuaggaggugcguugca

SEQ ID NO: 1262073 - RNA, 27 nt, Human
ucucuaaacggcgcugaugcccgauuu

SEQ ID NO: 1262074 - RNA, 20 nt, Human
uucgcccucucgcugggccg

SEQ ID NO: 1262075 - RNA, 20 nt, Human
uugcagggccaucuucgcau

SEQ ID NO: 1262076 - RNA, 23 nt, Human
aaaccgcuuccccggcgacccua

SEQ ID NO: 1262077 - RNA, 20 nt, Human
aaacucacgauacuaaucaa

SEQ ID NO: 1262078 - RNA, 24 nt, Human
aaagagucacauaauaauaaacac

SEQ ID NO: 1262079 - RNA, 26 nt, Human
auaaacacauaucauaaugugaauaa

SEQ ID NO: 1262080 - RNA, 22 nt, Human
caaguagguaguggcacgcuag

SEQ ID NO: 1262081 - RNA, 18 nt, Human
cagcgugacucaggaaca

SEQ ID NO: 1262082 - RNA, 19 nt, Human
cagcgugacucaggaacau

SEQ ID NO: 1262083 - RNA, 21 nt, Human
caucucagcaugaacuccuga

SEQ ID NO: 1262084 - RNA, 20 nt, Human
caugaacucaugaucaucuc

SEQ ID NO: 1262085 - RNA, 23 nt, Human
cauuccacuauaccuucucccuu

SEQ ID NO: 1262086 - RNA, 23 nt, Human
cauuucuguucuaugggacugca

SEQ ID NO: 1262087 - RNA, 23 nt, Human
ccaugggcucucccaaaccgcuu

SEQ ID NO: 1262088 - RNA, 24 nt, Human
cccaaaccgcuuccccggcgaccc

SEQ ID NO: 1262089 - RNA, 27 nt, Human
ccgaugcucacacucauuccacuauac

SEQ ID NO: 1262090 - RNA, 18 nt, Human
cuaguccacuccuuggcc

SEQ ID NO: 1262091 - RNA, 24 nt, Human
cucacgcagucaccaugggcucuc

SEQ ID NO: 1262092 - RNA, 18 nt, Human
cuguggucagcaucccuc

SEQ ID NO: 1262093 - RNA, 21 nt, Human
cuuuaggaaauguaaaaagag

SEQ ID NO: 1262094 - RNA, 24 nt, Human
ggaguucuagacuuuucaaacuca

SEQ ID NO: 1262095 - RNA, 19 nt, Human
uaauuucccacaaucacac

SEQ ID NO: 1262096 - RNA, 21 nt, Human
uaauuucccacaaucacacaa

SEQ ID NO: 1262097 - RNA, 23 nt, Human
uaggcauuauuaucuucauuuua

SEQ ID NO: 1262098 - RNA, 23 nt, Human
uaucuucauuuuaugguugagga

SEQ ID NO: 1262099 - RNA, 21 nt, Human
uaugguugaggaaauuggggc

SEQ ID NO: 1262100 - RNA, 21 nt, Human
ucagcaucccucugagguagg

SEQ ID NO: 1262101 - RNA, 18 nt, Human
ucuguucuaugggacugc

SEQ ID NO: 1262102 - RNA, 23 nt, Human
ugaacucaugaucaucucagcau

SEQ ID NO: 1262103 - RNA, 20 nt, Human
uuuuaugguugaggaaauug

SEQ ID NO: 1262104 - RNA, 18 nt, Human
aaacgacauagcgacaau

SEQ ID NO: 1262105 - RNA, 20 nt, Human
aaauguaaacgacaucaacc

SEQ ID NO: 1262106 - RNA, 27 nt, Human
aagaaacuuaacgucaaaaaaaaugua

SEQ ID NO: 1262107 - RNA, 18 nt, Human
aagucguagaagucgaaa

SEQ ID NO: 1262108 - RNA, 22 nt, Human
aaguugucuuuuuagaugagcc

SEQ ID NO: 1262109 - RNA, 23 nt, Human
acaaauacucgaagaagaacauc

SEQ ID NO: 1262110 - RNA, 21 nt, Human
acaguaacagcaguaucuaaa

SEQ ID NO: 1262111 - RNA, 18 nt, Human
acgacaucaaccagcaga

SEQ ID NO: 1262112 - RNA, 27 nt, Human
agaaaaaauaaagcaauagcuagagaa

SEQ ID NO: 1262113 - RNA, 18 nt, Human
agaaagacuggccucccg

SEQ ID NO: 1262114 - RNA, 23 nt, Human
agaagaacauccaugagaaaaaa

SEQ ID NO: 1262115 - RNA, 25 nt, Human
aggaaaacuccaaauauuccaacug

SEQ ID NO: 1262116 - RNA, 24 nt, Human
agugguuuggauguuucuuugucu

SEQ ID NO: 1262117 - RNA, 21 nt, Human
caaaggaugacacaauugaau

SEQ ID NO: 1262118 - RNA, 23 nt, Human
caacaagaucaggaaaacuccaa

SEQ ID NO: 1262119 - RNA, 18 nt, Human
caacugcaaaggaugaca

SEQ ID NO: 1262120 - RNA, 21 nt, Human
cacaauugaaugaacaauuuu

SEQ ID NO: 1262121 - RNA, 20 nt, Human
cagcaaagaucagagccaca

SEQ ID NO: 1262122 - RNA, 21 nt, Human
cagcaguaucuaaaauguuaa

SEQ ID NO: 1262123 - RNA, 21 nt, Human
caucaaccagcagaauaauca

SEQ ID NO: 1262124 - RNA, 27 nt, Human
ccaaauauuccaacugcaaaggaugac

SEQ ID NO: 1262125 - RNA, 24 nt, Human
ccaucugggaauauccuuaagaaa

SEQ ID NO: 1262126 - RNA, 19 nt, Human
cguaucaccuuuuguuucc

SEQ ID NO: 1262127 - RNA, 19 nt, Human
cuggccucccgaagaugga

SEQ ID NO: 1262128 - RNA, 22 nt, Human
gaagaagaacauccaugagaaa

SEQ ID NO: 1262129 - RNA, 21 nt, Human
gugaaaauuaggucagcaaag

SEQ ID NO: 1262130 - RNA, 26 nt, Human
uaagugaggucuaggucaaauccauc

SEQ ID NO: 1262131 - RNA, 19 nt, Human
uagaaugauacuccaaagg

SEQ ID NO: 1262132 - RNA, 25 nt, Human
uagagaaauagaaugauacuccaaa

SEQ ID NO: 1262133 - RNA, 21 nt, Human
ucagcaaagaucagagccaca

SEQ ID NO: 1262134 - RNA, 19 nt, Human
ucgaagaagaacauccaug

SEQ ID NO: 1262135 - RNA, 18 nt, Human
ugagaaaaaauaaagcaa

SEQ ID NO: 1262136 - RNA, 18 nt, Human
ugggaauauccuuaagaa

SEQ ID NO: 1262137 - RNA, 21 nt, Human
accaagauggcggcgcccgug

SEQ ID NO: 1262138 - RNA, 20 nt, Human
acgcaguaggugcagccaug

SEQ ID NO: 1262139 - RNA, 18 nt, Human
caagcagccgccguacgg

SEQ ID NO: 1262140 - RNA, 20 nt, Human
caagcagccgccguacggac

SEQ ID NO: 1262141 - RNA, 22 nt, Human
ccaagaugacggcaucuaugag

SEQ ID NO: 1262142 - RNA, 24 nt, Human
ccuguacgucgaggccguacaagc

SEQ ID NO: 1262143 - RNA, 22 nt, Human
gacaaacgggcaauguacggaa

SEQ ID NO: 1262144 - RNA, 18 nt, Human
ggagacacaggcaggagg

SEQ ID NO: 1262145 - RNA, 22 nt, Human
ggcaggagggaccccaugggga

SEQ ID NO: 1262146 - RNA, 22 nt, Human
uacaagcagccgccguacggac

SEQ ID NO: 1262147 - RNA, 26 nt, Human
uacgucgaggccguacaagcagccgc

SEQ ID NO: 1262148 - RNA, 25 nt, Human
uccaagaugacggcaucuaugagga

SEQ ID NO: 1262149 - RNA, 21 nt, Human
ugccugacaaacgggcaaugu

SEQ ID NO: 1262150 - RNA, 18 nt, Human
uguggagacacaggcagg

SEQ ID NO: 1262151 - RNA, 18 nt, Human
aaaugaaaacuuuacaca

SEQ ID NO: 1262152 - RNA, 21 nt, Human
aaaugcacgcaggaaaagcac

SEQ ID NO: 1262153 - RNA, 23 nt, Human
aacaaauaugacgugacuccaau

SEQ ID NO: 1262154 - RNA, 20 nt, Human
aaccugguccagcccuccuc

SEQ ID NO: 1262155 - RNA, 26 nt, Human
aagaggccucgcuaugggauaggaug

SEQ ID NO: 1262156 - RNA, 19 nt, Human
acagcugugaugaccaaau

SEQ ID NO: 1262157 - RNA, 19 nt, Human
accaacgauucacguagcu

SEQ ID NO: 1262158 - RNA, 19 nt, Human
accaacuucaagcagaggc

SEQ ID NO: 1262159 - RNA, 20 nt, Human
agaggcugguggaggccuuu

SEQ ID NO: 1262160 - RNA, 21 nt, Human
aggaaaagcacagaggaaacc

SEQ ID NO: 1262161 - RNA, 23 nt, Human
auccccacuauguaaaucagacc

SEQ ID NO: 1262162 - RNA, 23 nt, Human
auguggcguguguuccaggcgug

SEQ ID NO: 1262163 - RNA, 19 nt, Human
caagcagaggccugagcau

SEQ ID NO: 1262164 - RNA, 24 nt, Human
caauaggcuagcaggaauaagcac

SEQ ID NO: 1262165 - RNA, 22 nt, Human
cacccucccgcguccucaaaga

SEQ ID NO: 1262166 - RNA, 22 nt, Human
cacuucacagcugugaugacca

SEQ ID NO: 1262167 - RNA, 21 nt, Human
cagcagggguaccugggacaa

SEQ ID NO: 1262168 - RNA, 22 nt, Human
cagcggcucaaauuggaacugg

SEQ ID NO: 1262169 - RNA, 21 nt, Human
cagcugccugcacucuuuaag

SEQ ID NO: 1262170 - RNA, 22 nt, Human
caucucgggagggguccaccuc

SEQ ID NO: 1262171 - RNA, 22 nt, Human
cauuccaccuguggguuccuau

SEQ ID NO: 1262172 - RNA, 23 nt, Human
ccaaauguucccucucuuacguu

SEQ ID NO: 1262173 - RNA, 20 nt, Human
ccacaaggaagaggccucgc

SEQ ID NO: 1262174 - RNA, 20 nt, Human
ccaccuggccuuccacagca

SEQ ID NO: 1262175 - RNA, 18 nt, Human
ccagacccgugcugaugc

SEQ ID NO: 1262176 - RNA, 19 nt, Human
cccaaauguucccucucuu

SEQ ID NO: 1262177 - RNA, 21 nt, Human
cccaacacacgaaauaagaac

SEQ ID NO: 1262178 - RNA, 18 nt, Human
cccacaaccugguccagc

SEQ ID NO: 1262179 - RNA, 19 nt, Human
ccccaaauguucccucucu

SEQ ID NO: 1262180 - RNA, 20 nt, Human
ccucuccuuucuccuugccc

SEQ ID NO: 1262181 - RNA, 20 nt, Human
ccuguggguuccuaucaccu

SEQ ID NO: 1262182 - RNA, 21 nt, Human
cguccaucucccacccacggc

SEQ ID NO: 1262183 - RNA, 20 nt, Human
cucacugaacccaaaauuuc

SEQ ID NO: 1262184 - RNA, 19 nt, Human
cuucacagcugugaugacc

SEQ ID NO: 1262185 - RNA, 21 nt, Human
cuuccacagcacugugacacc

SEQ ID NO: 1262186 - RNA, 21 nt, Human
cuuccacagcacugugacacc

SEQ ID NO: 1262187 - RNA, 21 nt, Human
gacccgugcugaugcugcccc

SEQ ID NO: 1262188 - RNA, 21 nt, Human
gagggguccaccuggccuucc

SEQ ID NO: 1262189 - RNA, 23 nt, Human
gccccugaaaaugaaaacuuuac

SEQ ID NO: 1262190 - RNA, 19 nt, Human
ggaaacauucccaccccac

SEQ ID NO: 1262191 - RNA, 20 nt, Human
ggcaggaaguggugccagga

SEQ ID NO: 1262192 - RNA, 21 nt, Human
gggcaggaaguggugccagga

SEQ ID NO: 1262193 - RNA, 21 nt, Human
gggggcaggaaguggugccag

SEQ ID NO: 1262194 - RNA, 23 nt, Human
ggggguguguuccccaacacacg

SEQ ID NO: 1262195 - RNA, 21 nt, Human
gguccagcccuccucagucca

SEQ ID NO: 1262196 - RNA, 22 nt, Human
ggugagaggcugguggaggccu

SEQ ID NO: 1262197 - RNA, 23 nt, Human
guaaagaacuguaaacccaauaa

SEQ ID NO: 1262198 - RNA, 21 nt, Human
guuccaggcgugcccacaacc

SEQ ID NO: 1262199 - RNA, 21 nt, Human
uaaaaacaucagcagucaccu

SEQ ID NO: 1262200 - RNA, 20 nt, Human
uaaaaggccccugaaaauga

SEQ ID NO: 1262201 - RNA, 21 nt, Human
uaacugccaggcagccuggug

SEQ ID NO: 1262202 - RNA, 23 nt, Human
uaaggccagggacagccagaccc

SEQ ID NO: 1262203 - RNA, 21 nt, Human
uacacaguuccauaaagccac

SEQ ID NO: 1262204 - RNA, 21 nt, Human
uacgccuaauucauauccuuc

SEQ ID NO: 1262205 - RNA, 19 nt, Human
uagugacuggccagccuaa

SEQ ID NO: 1262206 - RNA, 19 nt, Human
uauggccagcugccugcac

SEQ ID NO: 1262207 - RNA, 22 nt, Human
ucagcagucaccucuccuuucu

SEQ ID NO: 1262208 - RNA, 23 nt, Human
ucaguccagaggccacacggcca

SEQ ID NO: 1262209 - RNA, 23 nt, Human
uccccaacacacgaaauaagaac

SEQ ID NO: 1262210 - RNA, 18 nt, Human
ucucuaaauuaggucagu

SEQ ID NO: 1262211 - RNA, 24 nt, Human
ucucuggaaacauuucacccuccc

SEQ ID NO: 1262212 - RNA, 20 nt, Human
ugaaaggaacuuuugagaug

SEQ ID NO: 1262213 - RNA, 22 nt, Human
ugaagcacaacucagcgugcga

SEQ ID NO: 1262214 - RNA, 20 nt, Human
ugccaacccaagagcuacgc

SEQ ID NO: 1262215 - RNA, 24 nt, Human
ugccaggaagugagcaccaacuuc

SEQ ID NO: 1262216 - RNA, 20 nt, Human
ugccaggcagccugguggca

SEQ ID NO: 1262217 - RNA, 24 nt, Human
ugccaggcagccugguggcauucu

SEQ ID NO: 1262218 - RNA, 24 nt, Human
ugccccacugcuucaguagauuua

SEQ ID NO: 1262219 - RNA, 22 nt, Human
ugcccugggcucugccagaagc

SEQ ID NO: 1262220 - RNA, 20 nt, Human
ugcgcaaaacuugugugaag

SEQ ID NO: 1262221 - RNA, 19 nt, Human
uggaacuggccuuccacag

SEQ ID NO: 1262222 - RNA, 24 nt, Human
ugggcucugccagaagcacuggug

SEQ ID NO: 1262223 - RNA, 31 nt, Human
ugggcucugccagaagcacuggugggggcaa

SEQ ID NO: 1262224 - RNA, 23 nt, Human
ugggggcagcagggguaccuggg

SEQ ID NO: 1262225 - RNA, 19 nt, Human
ugggggcaggaaguggugc

SEQ ID NO: 1262226 - RNA, 22 nt, Human
ugggggcaggaaguggugccag

SEQ ID NO: 1262227 - RNA, 26 nt, Human
uggguuccuaucaccuuacacaguuc

SEQ ID NO: 1262228 - RNA, 18 nt, Human
uggguugaugccccuugg

SEQ ID NO: 1262229 - RNA, 23 nt, Human
ugguggcauucuucaccuucagc

SEQ ID NO: 1262230 - RNA, 18 nt, Human
ugugaagcacaacucagc

SEQ ID NO: 1262231 - RNA, 20 nt, Human
uguggugggugccuucucuu

SEQ ID NO: 1262232 - RNA, 18 nt, Human
uguguuccccaacacacg

SEQ ID NO: 1262233 - RNA, 22 nt, Human
uuacacaugcaagcagagagga

SEQ ID NO: 1262234 - RNA, 25 nt, Human
uucacagcugugaugaccaaaugca

SEQ ID NO: 1262235 - RNA, 25 nt, Human
uuccaaccccaaauguucccucucu

SEQ ID NO: 1262236 - RNA, 19 nt, Human
uucuggugagaggcuggug

SEQ ID NO: 1262237 - RNA, 21 nt, Human
uucuggugagaggcuggugga

SEQ ID NO: 1262238 - RNA, 18 nt, Human
uuuaucugacagguaaau

SEQ ID NO: 1262239 - RNA, 21 nt, Human
uuuaugcugccaacccaagag

SEQ ID NO: 1262240 - RNA, 25 nt, Human
uuucauguauuuuucacgugucacu

SEQ ID NO: 1262241 - RNA, 20 nt, Human
agguucgcugcgugguggua

SEQ ID NO: 1262242 - RNA, 23 nt, Human
ugaagaauaacuggauaaacagg

SEQ ID NO: 1262243 - RNA, 21 nt, Human
uggaaacaugaagaauaacug

SEQ ID NO: 1262244 - RNA, 19 nt, Human
uguuugugacagcaacugg

SEQ ID NO: 1262245 - RNA, 20 nt, Human
aaggacagacccugugcuca

SEQ ID NO: 1262246 - RNA, 23 nt, Human
aaggacagacccugugcucagau

SEQ ID NO: 1262247 - RNA, 23 nt, Human
acacacacacacgcacacacaca

SEQ ID NO: 1262248 - RNA, 23 nt, Human
acacacacgcacacacacacacg

SEQ ID NO: 1262249 - RNA, 23 nt, Human
acacgcacacacacacacgagua

SEQ ID NO: 1262250 - RNA, 25 nt, Human
acccugugcucagaugggcggacug

SEQ ID NO: 1262251 - RNA, 21 nt, Human
aggaagcagaacuccaguuuu

SEQ ID NO: 1262252 - RNA, 19 nt, Human
aggugcccaucacccaggc

SEQ ID NO: 1262253 - RNA, 26 nt, Human
cacacacacacacacacgcacacaca

SEQ ID NO: 1262254 - RNA, 26 nt, Human
cacacacacacacacgcacacacaca

SEQ ID NO: 1262255 - RNA, 24 nt, Human
cacacacacacacgcacacacaca

SEQ ID NO: 1262256 - RNA, 19 nt, Human
cagaggguaaugaccccac

SEQ ID NO: 1262257 - RNA, 23 nt, Human
cauagauucccccaaagaaauuc

SEQ ID NO: 1262258 - RNA, 21 nt, Human
ccacugaaucaaggaagcaga

SEQ ID NO: 1262259 - RNA, 21 nt, Human
cccaucacccaggcauacccc

SEQ ID NO: 1262260 - RNA, 24 nt, Human
ccccaaagaaauucaauaaauaaa

SEQ ID NO: 1262261 - RNA, 19 nt, Human
ccccacagacggguccagg

SEQ ID NO: 1262262 - RNA, 24 nt, Human
ccgcaugcuucuuugucucucggg

SEQ ID NO: 1262263 - RNA, 20 nt, Human
ccucagcacauguuugauau

SEQ ID NO: 1262264 - RNA, 22 nt, Human
ccuccagcucugacucacaggc

SEQ ID NO: 1262265 - RNA, 21 nt, Human
ccugucagaacuuuaaaagcc

SEQ ID NO: 1262266 - RNA, 20 nt, Human
cuaaggacagacccugugcu

SEQ ID NO: 1262267 - RNA, 23 nt, Human
cuugcaccacuccucggccucca

SEQ ID NO: 1262268 - RNA, 20 nt, Human
gaggcagaggguaaugaccc

SEQ ID NO: 1262269 - RNA, 25 nt, Human
gcacacacacacacgaguagagcua

SEQ ID NO: 1262270 - RNA, 23 nt, Human
gcaccacuccucggccuccagcu

SEQ ID NO: 1262271 - RNA, 19 nt, Human
guaaaacauagauuccccc

SEQ ID NO: 1262272 - RNA, 24 nt, Human
uaaaacauagauucccccaaagaa

SEQ ID NO: 1262273 - RNA, 25 nt, Human
uacacacacacacacacacgcacac

SEQ ID NO: 1262274 - RNA, 21 nt, Human
uacgaugucauuugcagagcu

SEQ ID NO: 1262275 - RNA, 21 nt, Human
uaguguguucugaauuucaug

SEQ ID NO: 1262276 - RNA, 21 nt, Human
uauccugucacccucagcaca

SEQ ID NO: 1262277 - RNA, 25 nt, Human
ucaaggaagcagaacuccaguuuuu

SEQ ID NO: 1262278 - RNA, 21 nt, Human
ucagaacuuuaaaagccacag

SEQ ID NO: 1262279 - RNA, 23 nt, Human
ucgauguuucaucgugaaagaug

SEQ ID NO: 1262280 - RNA, 20 nt, Human
ucuacacacacacacacaca

SEQ ID NO: 1262281 - RNA, 23 nt, Human
ucuguuacugucagacccaaaga

SEQ ID NO: 1262282 - RNA, 20 nt, Human
ugaaagaugauugccaccgc

SEQ ID NO: 1262283 - RNA, 22 nt, Human
ugcccaucacccaggcauaccc

SEQ ID NO: 1262284 - RNA, 18 nt, Human
ugucagaacuuuaaaagc

SEQ ID NO: 1262285 - RNA, 26 nt, Human
ugucuacacacacacacacacacgca

SEQ ID NO: 1262286 - RNA, 26 nt, Human
ugucuacacacacacacacacacgca

SEQ ID NO: 1262287 - RNA, 25 nt, Human
ugucuacacacacacacacacacgg

SEQ ID NO: 1262288 - RNA, 22 nt, Human
ugucuacacacacacacacagu

SEQ ID NO: 1262289 - RNA, 21 nt, Human
uguuugauauauacuuguuau

SEQ ID NO: 1262290 - RNA, 18 nt, Human
uuuaaccuuccaauggga

SEQ ID NO: 1262291 - RNA, 27 nt, Human
uuuguacugcaauuggucuuccaggag

SEQ ID NO: 1262292 - RNA, 21 nt, Human
aaaagcaagggaaggauggga

SEQ ID NO: 1262293 - RNA, 18 nt, Human
aacuacgcugacuuuucc

SEQ ID NO: 1262294 - RNA, 23 nt, Human
agcaagggaaggaugggaaggga

SEQ ID NO: 1262295 - RNA, 24 nt, Human
aggccuucaacaucauaggagauu

SEQ ID NO: 1262296 - RNA, 19 nt, Human
agggaaggaugggaaggga

SEQ ID NO: 1262297 - RNA, 20 nt, Human
auccacauuccaggccuuca

SEQ ID NO: 1262298 - RNA, 21 nt, Human
caagccacagagcaaaagcaa

SEQ ID NO: 1262299 - RNA, 20 nt, Human
cagagcaaaagcaagggaag

SEQ ID NO: 1262300 - RNA, 23 nt, Human
ccaagccacagagcaaaagcaag

SEQ ID NO: 1262301 - RNA, 23 nt, Human
cccaagccacagagcaaaagcaa

SEQ ID NO: 1262302 - RNA, 20 nt, Human
cucuccacacacuucaacua

SEQ ID NO: 1262303 - RNA, 23 nt, Human
cugauggaucugaagcuucuucu

SEQ ID NO: 1262304 - RNA, 19 nt, Human
gccaaauucccugaguucu

SEQ ID NO: 1262305 - RNA, 23 nt, Human
gccacagagcaaaagcaagggaa

SEQ ID NO: 1262306 - RNA, 19 nt, Human
ucccugaguucuugcugcu

SEQ ID NO: 1262307 - RNA, 23 nt, Human
ucugaagcuucuucuugggguuu

SEQ ID NO: 1262308 - RNA, 24 nt, Human
ucugaccccaagccacagagcaaa

SEQ ID NO: 1262309 - RNA, 23 nt, Human
ucuugcugcuuucaauucugauu

SEQ ID NO: 1262310 - RNA, 24 nt, Human
ugaucaaugccccuguggcccaug

SEQ ID NO: 1262311 - RNA, 19 nt, Human
ugccaaauucccugaguuc

SEQ ID NO: 1262312 - RNA, 23 nt, Human
uucugaucaaugccccuguggcc

SEQ ID NO: 1262313 - RNA, 20 nt, Human
uuugaaguauccacauucca

SEQ ID NO: 1262314 - RNA, 20 nt, Human
agcaggacauaaagcuggaa

SEQ ID NO: 1262315 - RNA, 19 nt, Human
aggagguaaguuagucugc

SEQ ID NO: 1262316 - RNA, 19 nt, Human
ccucccgaccaagggcgag

SEQ ID NO: 1262317 - RNA, 18 nt, Human
uaaguuagucugcagcag

SEQ ID NO: 1262318 - RNA, 23 nt, Human
uccucccgaccaagggcgagagu

SEQ ID NO: 1262319 - RNA, 26 nt, Human
ucugcagcaggacauaaagcuggaac

SEQ ID NO: 1262320 - RNA, 23 nt, Human
ugaaaucacaaauuaguugguaa

SEQ ID NO: 1262321 - RNA, 25 nt, Human
ugaaaucacaaauuaguugguaauc

SEQ ID NO: 1262322 - RNA, 23 nt, Human
ugauuguuuugaaaucacaaauu

SEQ ID NO: 1262323 - RNA, 20 nt, Human
cccgaaaaucugggcaccug

SEQ ID NO: 1262324 - RNA, 21 nt, Human
gaaauaucagcagucccgaaa

SEQ ID NO: 1262325 - RNA, 24 nt, Human
guaaauggaugguggaaauaucag

SEQ ID NO: 1262326 - RNA, 22 nt, Human
ucugggcaccugugcugauggc

SEQ ID NO: 1262327 - RNA, 21 nt, Human
uggcagaggauguaguuuuga

SEQ ID NO: 1262328 - RNA, 18 nt, Human
ugggcaccugugcugaug

SEQ ID NO: 1262329 - RNA, 21 nt, Human
ugguggaaauaucagcagucc

SEQ ID NO: 1262330 - RNA, 26 nt, Human
uuccagacuuccuuguauuuggaucu

SEQ ID NO: 1262331 - RNA, 24 nt, Human
cagaggacuucccuuccacuacuu

SEQ ID NO: 1262332 - RNA, 26 nt, Human
ccuuucagggcuauuucucggaaauc

SEQ ID NO: 1262333 - RNA, 19 nt, Human
ugcuccacuuaucucugcu

SEQ ID NO: 1262334 - RNA, 24 nt, Human
uguucucagaggacuucccuucca

SEQ ID NO: 1262335 - RNA, 20 nt, Human
accucuggccaggcugccuc

SEQ ID NO: 1262336 - RNA, 19 nt, Human
caagcucuuggccugcccu

SEQ ID NO: 1262337 - RNA, 19 nt, Human
caaguccagugcccaagcu

SEQ ID NO: 1262338 - RNA, 21 nt, Human
cccaccucuggccaggcugcc

SEQ ID NO: 1262339 - RNA, 18 nt, Human
cucuggccaggcugccuc

SEQ ID NO: 1262340 - RNA, 21 nt, Human
cucuggccaggcugccucuuc

SEQ ID NO: 1262341 - RNA, 18 nt, Human
guccagugcccaagcucu

SEQ ID NO: 1262342 - RNA, 18 nt, Human
aaaauccuccuauggccu

SEQ ID NO: 1262343 - RNA, 19 nt, Human
aaacaaugacaaaagucag

SEQ ID NO: 1262344 - RNA, 24 nt, Human
aaacaaugacaaaagucagguaac

SEQ ID NO: 1262345 - RNA, 24 nt, Human
aaagguauauggagccacagaugg

SEQ ID NO: 1262346 - RNA, 20 nt, Human
aaauagcugggguuauaggc

SEQ ID NO: 1262347 - RNA, 24 nt, Human
aaauggucgaaagguauauggagc

SEQ ID NO: 1262348 - RNA, 24 nt, Human
aagauuucuuccucaaauuguuuu

SEQ ID NO: 1262349 - RNA, 24 nt, Human
aagccccuuucugggcccaccucc

SEQ ID NO: 1262350 - RNA, 18 nt, Human
aagcugcuuggauuaggg

SEQ ID NO: 1262351 - RNA, 22 nt, Human
aagcugcuuggauuagggagcc

SEQ ID NO: 1262352 - RNA, 22 nt, Human
aaggugggugaaguggggguca

SEQ ID NO: 1262353 - RNA, 20 nt, Human
aaguaguccuccugcccucg

SEQ ID NO: 1262354 - RNA, 22 nt, Human
accauguuggccaggcuggucu

SEQ ID NO: 1262355 - RNA, 19 nt, Human
acccccaagaggggacacu

SEQ ID NO: 1262356 - RNA, 20 nt, Human
acccugccacaccucaucuc

SEQ ID NO: 1262357 - RNA, 19 nt, Human
accucaucucugaccccca

SEQ ID NO: 1262358 - RNA, 24 nt, Human
acgacguuucaccauguuggccag

SEQ ID NO: 1262359 - RNA, 22 nt, Human
acucucagcucacugcaaccuc

SEQ ID NO: 1262360 - RNA, 24 nt, Human
acugccucagccucccaaauagcu

SEQ ID NO: 1262361 - RNA, 21 nt, Human
acuggcuacagauacuugcac

SEQ ID NO: 1262362 - RNA, 20 nt, Human
agacuccugggucccaccgu

SEQ ID NO: 1262363 - RNA, 21 nt, Human
agagauggagcccaggagaaa

SEQ ID NO: 1262364 - RNA, 27 nt, Human
agagauggagcccaggagaaaacugcu

SEQ ID NO: 1262365 - RNA, 24 nt, Human
agaguguugggauuacaggcauga

SEQ ID NO: 1262366 - RNA, 23 nt, Human
agauagcagacccuuucuaaagc

SEQ ID NO: 1262367 - RNA, 26 nt, Human
agccccuuucugggcccaccucccau

SEQ ID NO: 1262368 - RNA, 25 nt, Human
aggaaucccuugauucagcccuauc

SEQ ID NO: 1262369 - RNA, 23 nt, Human
aggcaugagccacugugccuggc

SEQ ID NO: 1262370 - RNA, 21 nt, Human
aggcgccugucaccacaccca

SEQ ID NO: 1262371 - RNA, 22 nt, Human
agggaugaaucaugacgugcag

SEQ ID NO: 1262372 - RNA, 20 nt, Human
agguggcucagugaggugag

SEQ ID NO: 1262373 - RNA, 20 nt, Human
aguguugggauuacaggcau

SEQ ID NO: 1262374 - RNA, 22 nt, Human
aguguugggauuacaggcauga

SEQ ID NO: 1262375 - RNA, 18 nt, Human
aucccauccucuccacca

SEQ ID NO: 1262376 - RNA, 25 nt, Human
auuacacuggcuacagauacuugca

SEQ ID NO: 1262377 - RNA, 21 nt, Human
caaaagucagguaacaggcug

SEQ ID NO: 1262378 - RNA, 27 nt, Human
caagugaucuucccgccucggccuccc

SEQ ID NO: 1262379 - RNA, 19 nt, Human
cacagcuucugcuacuugg

SEQ ID NO: 1262380 - RNA, 22 nt, Human
cacaggacugcaggggaaggcc

SEQ ID NO: 1262381 - RNA, 24 nt, Human
caccacacccagcuaauuuuugua

SEQ ID NO: 1262382 - RNA, 19 nt, Human
caccagggccuucuuacag

SEQ ID NO: 1262383 - RNA, 21 nt, Human
caccauguuggccaggcuggu

SEQ ID NO: 1262384 - RNA, 23 nt, Human
caccauguuggccaggcuggucu

SEQ ID NO: 1262385 - RNA, 24 nt, Human
caccauguuggccaggcuggucuu

SEQ ID NO: 1262386 - RNA, 27 nt, Human
caccauguuggccaggcuggucuugaa

SEQ ID NO: 1262387 - RNA, 23 nt, Human
cacugcaaccucugcuaucuggg

SEQ ID NO: 1262388 - RNA, 20 nt, Human
cagaugaagaaauggaggug

SEQ ID NO: 1262389 - RNA, 19 nt, Human
cagccaaacauggucaccc

SEQ ID NO: 1262390 - RNA, 24 nt, Human
cauguuggccaggcuggucuugaa

SEQ ID NO: 1262391 - RNA, 20 nt, Human
ccacagcuucugcuacuugg

SEQ ID NO: 1262392 - RNA, 24 nt, Human
ccacagcuucugcuacuuggucua

SEQ ID NO: 1262393 - RNA, 21 nt, Human
ccaccagggccuucuuacaga

SEQ ID NO: 1262394 - RNA, 23 nt, Human
ccagaguguugggauuacaggca

SEQ ID NO: 1262395 - RNA, 24 nt, Human
ccagaguguugggauuacaggcau

SEQ ID NO: 1262396 - RNA, 23 nt, Human
ccaggcuuccuuggcuuugagga

SEQ ID NO: 1262397 - RNA, 20 nt, Human
ccagugggggaggacccugg

SEQ ID NO: 1262398 - RNA, 18 nt, Human
cccaaauagcugggguua

SEQ ID NO: 1262399 - RNA, 24 nt, Human
cccaaauagcugggguuauaggcg

SEQ ID NO: 1262400 - RNA, 24 nt, Human
cccagaguguugggauuacaggca

SEQ ID NO: 1262401 - RNA, 24 nt, Human
ccccuuucugggcccaccucccau

SEQ ID NO: 1262402 - RNA, 20 nt, Human
ccgugaaucuuccucuucca

SEQ ID NO: 1262403 - RNA, 25 nt, Human
ccucaggggccgugaaucuuccucu

SEQ ID NO: 1262404 - RNA, 24 nt, Human
ccuccaagaccuggcugacaugag

SEQ ID NO: 1262405 - RNA, 20 nt, Human
ccucgcucugcagccucucc

SEQ ID NO: 1262406 - RNA, 23 nt, Human
ccucgcucugcagccucucccuc

SEQ ID NO: 1262407 - RNA, 20 nt, Human
ccucuagacccugccacacc

SEQ ID NO: 1262408 - RNA, 21 nt, Human
ccucucccuccgcgagcggcc

SEQ ID NO: 1262409 - RNA, 21 nt, Human
ccugagggcagggucuuaggg

SEQ ID NO: 1262410 - RNA, 20 nt, Human
ccugugucaccaggcuuccu

SEQ ID NO: 1262411 - RNA, 21 nt, Human
ccuugcugcacagcacccuug

SEQ ID NO: 1262412 - RNA, 24 nt, Human
cgacguuucaccauguuggccagg

SEQ ID NO: 1262413 - RNA, 18 nt, Human
cgccugucaccacaccca

SEQ ID NO: 1262414 - RNA, 23 nt, Human
cuaauuuuuguauuuuuagcaga

SEQ ID NO: 1262415 - RNA, 24 nt, Human
cucaagugaucuucccgccucggc

SEQ ID NO: 1262416 - RNA, 24 nt, Human
cucccaaauagcugggguuauagg

SEQ ID NO: 1262417 - RNA, 21 nt, Human
cuccugcccucgcucugcagc

SEQ ID NO: 1262418 - RNA, 23 nt, Human
cucgcucugcagccucucccucc

SEQ ID NO: 1262419 - RNA, 24 nt, Human
cugcaaccucugcuaucuggguuc

SEQ ID NO: 1262420 - RNA, 22 nt, Human
cugcagcucaaaauggcaagaa

SEQ ID NO: 1262421 - RNA, 22 nt, Human
cuucccgccucggccucccaga

SEQ ID NO: 1262422 - RNA, 28 nt, Human
cuuggagaccgucucuuuccucuggaac

SEQ ID NO: 1262423 - RNA, 21 nt, Human
cuuucuaaagccaggaauccc

SEQ ID NO: 1262424 - RNA, 18 nt, Human
gaaaaaugucuggucucu

SEQ ID NO: 1262425 - RNA, 25 nt, Human
gaaauggagguggcucagugaggug

SEQ ID NO: 1262426 - RNA, 23 nt, Human
gaagccccuuucugggcccaccu

SEQ ID NO: 1262427 - RNA, 21 nt, Human
gaccacagcuucugcuacuug

SEQ ID NO: 1262428 - RNA, 24 nt, Human
gaccucaagugaucuucccgccuc

SEQ ID NO: 1262429 - RNA, 23 nt, Human
gacguuucaccauguuggccagg

SEQ ID NO: 1262430 - RNA, 21 nt, Human
gaggacccuggggacucucaa

SEQ ID NO: 1262431 - RNA, 18 nt, Human
gauuacaggcaugagcca

SEQ ID NO: 1262432 - RNA, 21 nt, Human
gauuacaggcaugagccacug

SEQ ID NO: 1262433 - RNA, 24 nt, Human
gauuacaggcaugagccacugugc

SEQ ID NO: 1262434 - RNA, 21 nt, Human
gauucuacugccucagccucc

SEQ ID NO: 1262435 - RNA, 24 nt, Human
gcagacccuuucuaaagccaggaa

SEQ ID NO: 1262436 - RNA, 19 nt, Human
gccuuuacugcucaaggga

SEQ ID NO: 1262437 - RNA, 24 nt, Human
gcgauucuacugccucagccuccc

SEQ ID NO: 1262438 - RNA, 20 nt, Human
gcucuuuuguccuggcugga

SEQ ID NO: 1262439 - RNA, 23 nt, Human
gcuggucuugaacuccugaccuc

SEQ ID NO: 1262440 - RNA, 19 nt, Human
ggagaaaacugcugcucuu

SEQ ID NO: 1262441 - RNA, 20 nt, Human
ggagccacagauggugggga

SEQ ID NO: 1262442 - RNA, 18 nt, Human
ggaggacccuggggacuc

SEQ ID NO: 1262443 - RNA, 24 nt, Human
ggauuacaggcaugagccacugug

SEQ ID NO: 1262444 - RNA, 24 nt, Human
ggcuggucuugaacuccugaccuc

SEQ ID NO: 1262445 - RNA, 26 nt, Human
ggcuuugaggaccccugccccagagg

SEQ ID NO: 1262446 - RNA, 22 nt, Human
gggaaggugggugaaguggggg

SEQ ID NO: 1262447 - RNA, 21 nt, Human
ggggaaggugggugaaguggg

SEQ ID NO: 1262448 - RNA, 21 nt, Human
gggggaggacccuggggacuc

SEQ ID NO: 1262449 - RNA, 22 nt, Human
gggugggacacaggacugcagg

SEQ ID NO: 1262450 - RNA, 20 nt, Human
ggguucaagcgauucuacug

SEQ ID NO: 1262451 - RNA, 19 nt, Human
ggucuugaacuccugaccu

SEQ ID NO: 1262452 - RNA, 19 nt, Human
gguucaagcgauucuacug

SEQ ID NO: 1262453 - RNA, 24 nt, Human
gugaucuucccgccucggccuccc

SEQ ID NO: 1262454 - RNA, 22 nt, Human
guucucaucccauccucuccac

SEQ ID NO: 1262455 - RNA, 24 nt, Human
uaauuuuuguauuuuuagcagaga

SEQ ID NO: 1262456 - RNA, 22 nt, Human
uacaggcaugagccacugugcc

SEQ ID NO: 1262457 - RNA, 20 nt, Human
uagaaaagagcuaacuuuga

SEQ ID NO: 1262458 - RNA, 25 nt, Human
uagcagacccuuucuaaagccagga

SEQ ID NO: 1262459 - RNA, 24 nt, Human
uagcagagacgacguuucaccaug

SEQ ID NO: 1262460 - RNA, 23 nt, Human
uaguggcuucacugcuucugcaa

SEQ ID NO: 1262461 - RNA, 22 nt, Human
uauauggagccacagauggugg

SEQ ID NO: 1262462 - RNA, 21 nt, Human
uauuucacagaugaagaaaug

SEQ ID NO: 1262463 - RNA, 22 nt, Human
ucaaggccaaacucacuuuagg

SEQ ID NO: 1262464 - RNA, 18 nt, Human
ucaccaggcuuccuuggc

SEQ ID NO: 1262465 - RNA, 24 nt, Human
ucacugcaaccucugcuaucuggg

SEQ ID NO: 1262466 - RNA, 19 nt, Human
ucacuugucauaauaaacc

SEQ ID NO: 1262467 - RNA, 24 nt, Human
ucagaaaaaugucuggucucucaa

SEQ ID NO: 1262468 - RNA, 20 nt, Human
ucagccucccaaauagcugg

SEQ ID NO: 1262469 - RNA, 20 nt, Human
ucagccucccaaauagcugg

SEQ ID NO: 1262470 - RNA, 18 nt, Human
ucagugaggugagugacu

SEQ ID NO: 1262471 - RNA, 22 nt, Human
ucagugaggugagugacuugca

SEQ ID NO: 1262472 - RNA, 20 nt, Human
ucauuccucuagacccugcc

SEQ ID NO: 1262473 - RNA, 24 nt, Human
ucccaaauagcugggguuauaggc

SEQ ID NO: 1262474 - RNA, 24 nt, Human
ucccaaguacccuuggccugggac

SEQ ID NO: 1262475 - RNA, 24 nt, Human
ucccagaguguugggauuacaggc

SEQ ID NO: 1262476 - RNA, 23 nt, Human
uccgcgagcggccagcgcagcuu

SEQ ID NO: 1262477 - RNA, 18 nt, Human
uccugcccucgcucugca

SEQ ID NO: 1262478 - RNA, 19 nt, Human
uccuuggcuuugaggaccc

SEQ ID NO: 1262479 - RNA, 18 nt, Human
ucucaucccauccucucc

SEQ ID NO: 1262480 - RNA, 21 nt, Human
ucucaucccauccucuccacc

SEQ ID NO: 1262481 - RNA, 21 nt, Human
ucuccaguguuguuggggucc

SEQ ID NO: 1262482 - RNA, 18 nt, Human
ucucugacccccaagagg

SEQ ID NO: 1262483 - RNA, 21 nt, Human
ucuugaacuccugaccucaag

SEQ ID NO: 1262484 - RNA, 21 nt, Human
ugaagaaauggagguggcuca

SEQ ID NO: 1262485 - RNA, 18 nt, Human
ugaccucaagugaucuuc

SEQ ID NO: 1262486 - RNA, 20 nt, Human
ugaccucaagugaucuuccc

SEQ ID NO: 1262487 - RNA, 21 nt, Human
ugaccucaagugaucuucccg

SEQ ID NO: 1262488 - RNA, 24 nt, Human
ugaccucaagugaucuucccgccu

SEQ ID NO: 1262489 - RNA, 23 nt, Human
ugacuuacaggggauagaaaaga

SEQ ID NO: 1262490 - RNA, 26 nt, Human
ugaggugagugacuugcauaaaguca

SEQ ID NO: 1262491 - RNA, 24 nt, Human
ugagugacuugcauaaagucacac

SEQ ID NO: 1262492 - RNA, 22 nt, Human
ugauuuguaagauuucuuccuc

SEQ ID NO: 1262493 - RNA, 18 nt, Human
ugcaaagauagcagaccc

SEQ ID NO: 1262494 - RNA, 20 nt, Human
ugcaacuucucuaaagucaa

SEQ ID NO: 1262495 - RNA, 21 nt, Human
ugcacagcauuccaagccagc

SEQ ID NO: 1262496 - RNA, 19 nt, Human
ugcccucgcucugcagccu

SEQ ID NO: 1262497 - RNA, 21 nt, Human
ugccucagccucccaaauagc

SEQ ID NO: 1262498 - RNA, 27 nt, Human
ugccucagccucccaaauagcuggggu

SEQ ID NO: 1262499 - RNA, 20 nt, Human
ugcuggaaguaguccuccug

SEQ ID NO: 1262500 - RNA, 24 nt, Human
uggaagugauuucauuacacuggc

SEQ ID NO: 1262501 - RNA, 18 nt, Human
uggagguggcucagugag

SEQ ID NO: 1262502 - RNA, 22 nt, Human
uggaugcacccuggggagggag

SEQ ID NO: 1262503 - RNA, 18 nt, Human
uggauuuggaagugauuu

SEQ ID NO: 1262504 - RNA, 24 nt, Human
uggcacacucucagcucacugcaa

SEQ ID NO: 1262505 - RNA, 24 nt, Human
uggccaggcuggucuugaacuccu

SEQ ID NO: 1262506 - RNA, 21 nt, Human
uggcuggaaaauccuccuaug

SEQ ID NO: 1262507 - RNA, 18 nt, Human
ugggauuacaggcaugag

SEQ ID NO: 1262508 - RNA, 21 nt, Human
ugggauuacaggcaugagcca

SEQ ID NO: 1262509 - RNA, 22 nt, Human
ugggauuacaggcaugagccac

SEQ ID NO: 1262510 - RNA, 22 nt, Human
ugggauuacaggcaugagccac

SEQ ID NO: 1262511 - RNA, 22 nt, Human
ugggauuacaggcaugagccac

SEQ ID NO: 1262512 - RNA, 23 nt, Human
ugggauuacaggcaugagccacu

SEQ ID NO: 1262513 - RNA, 24 nt, Human
ugggauuacaggcaugagccacug

SEQ ID NO: 1262514 - RNA, 18 nt, Human
uggggagggaggagcagg

SEQ ID NO: 1262515 - RNA, 22 nt, Human
ugggggaggacccuggggacuc

SEQ ID NO: 1262516 - RNA, 18 nt, Human
ugggugccugugucacca

SEQ ID NO: 1262517 - RNA, 22 nt, Human
ugggugccugugucaccaggcu

SEQ ID NO: 1262518 - RNA, 19 nt, Human
uggguucaagcgauucuac

SEQ ID NO: 1262519 - RNA, 19 nt, Human
ugucagagagacuccuggg

SEQ ID NO: 1262520 - RNA, 23 nt, Human
ugucagagagacuccuggguccc

SEQ ID NO: 1262521 - RNA, 22 nt, Human
uguuaguggcuucacugcuucu

SEQ ID NO: 1262522 - RNA, 24 nt, Human
uuagcagagacgacguuucaccau

SEQ ID NO: 1262523 - RNA, 20 nt, Human
uuaugaccacagcuucugcu

SEQ ID NO: 1262524 - RNA, 23 nt, Human
uucaagcgauucuacugccucag

SEQ ID NO: 1262525 - RNA, 19 nt, Human
uucacagaugaagaaaugg

SEQ ID NO: 1262526 - RNA, 25 nt, Human
uuccaagccagccaaacauggucac

SEQ ID NO: 1262527 - RNA, 25 nt, Human
uuccugagggcagggucuuaggggc

SEQ ID NO: 1262528 - RNA, 21 nt, Human
uuccugggacuccccaucucc

SEQ ID NO: 1262529 - RNA, 24 nt, Human
uuucaccauguuggccaggcuggu

SEQ ID NO: 1262530 - RNA, 24 nt, Human
uuuuuagcagagacgacguuucac

SEQ ID NO: 1262531 - RNA, 20 nt, Human
uuuuuguauuuuuagcagag

SEQ ID NO: 1262532 - RNA, 23 nt, Human
uuuuuguauuuuuagcagagacg

SEQ ID NO: 1262533 - RNA, 19 nt, Human
aagcaguuggcaaagucaa

SEQ ID NO: 1262534 - RNA, 20 nt, Human
cuccaggaccgccacucccc

SEQ ID NO: 1262535 - RNA, 19 nt, Human
cugagaggcacaaugugga

SEQ ID NO: 1262536 - RNA, 20 nt, Human
cugcucguccacucucuggc

SEQ ID NO: 1262537 - RNA, 19 nt, Human
cugcugggcagcugggcaa

SEQ ID NO: 1262538 - RNA, 23 nt, Human
gaaggaaauccuggauggguccu

SEQ ID NO: 1262539 - RNA, 20 nt, Human
gaaguuuccugugcagcuag

SEQ ID NO: 1262540 - RNA, 20 nt, Human
gaugguaccccuggaguucu

SEQ ID NO: 1262541 - RNA, 21 nt, Human
ucgucagugugccucagcugc

SEQ ID NO: 1262542 - RNA, 19 nt, Human
ucucugcugggcagcuggg

SEQ ID NO: 1262543 - RNA, 26 nt, Human
ucugcaaggaagcugcccugcugaag

SEQ ID NO: 1262544 - RNA, 20 nt, Human
ugcaagcugcagccuggauu

SEQ ID NO: 1262545 - RNA, 18 nt, Human
uggguccugcaagggagu

SEQ ID NO: 1262546 - RNA, 19 nt, Human
ugugauggacauauucuga

SEQ ID NO: 1262547 - RNA, 19 nt, Human
uguggaugguaccccugga

SEQ ID NO: 1262548 - RNA, 22 nt, Human
uguggaugguaccccuggaguu

SEQ ID NO: 1262549 - RNA, 20 nt, Human
ccuugcuucaucuuucuuuu

SEQ ID NO: 1262550 - RNA, 22 nt, Human
ccuugcuucaucuuucuuuuuu

SEQ ID NO: 1262551 - RNA, 18 nt, Human
cuuggaaacucuugccau

SEQ ID NO: 1262552 - RNA, 19 nt, Human
ggagaugaaguagggaaaa

SEQ ID NO: 1262553 - RNA, 18 nt, Human
uccaggguucuauccuug

SEQ ID NO: 1262554 - RNA, 18 nt, Human
ucuuucuuuuuuaaaaau

SEQ ID NO: 1262555 - RNA, 19 nt, Human
uggcugaaguauccguauu

SEQ ID NO: 1262556 - RNA, 23 nt, Human
uguuccaucucuccuugucuuca

SEQ ID NO: 1262557 - RNA, 21 nt, Human
uuggaaacucuugccauuugg

SEQ ID NO: 1262558 - RNA, 24 nt, Human
uuuuaaaaauucccucucaggaau

SEQ ID NO: 1262559 - RNA, 18 nt, Human
aaguggucucugaagagg

SEQ ID NO: 1262560 - RNA, 19 nt, Human
agaaguggucucugaagag

SEQ ID NO: 1262561 - RNA, 21 nt, Human
agacaaggaugucucccaggg

SEQ ID NO: 1262562 - RNA, 21 nt, Human
cacacuggaagugucccccau

SEQ ID NO: 1262563 - RNA, 26 nt, Human
ccagugauagagggucugcucucccc

SEQ ID NO: 1262564 - RNA, 22 nt, Human
cccacaaaccaacacacaagcu

SEQ ID NO: 1262565 - RNA, 24 nt, Human
ccccacucuggcaugcacacugga

SEQ ID NO: 1262566 - RNA, 23 nt, Human
cccccaucuuuccuuuuccccac

SEQ ID NO: 1262567 - RNA, 24 nt, Human
cccccaucuuuccuuuuccccaca

SEQ ID NO: 1262568 - RNA, 24 nt, Human
uaaacuggggucccuuccuccauc

SEQ ID NO: 1262569 - RNA, 20 nt, Human
uccccacaaaccaacacaca

SEQ ID NO: 1262570 - RNA, 26 nt, Human
ucugaagaggugaauaaacugggguc

SEQ ID NO: 1262571 - RNA, 23 nt, Human
ugagaaguggucucugaagaggu

SEQ ID NO: 1262572 - RNA, 19 nt, Human
ugcacacuggaaguguccc

SEQ ID NO: 1262573 - RNA, 21 nt, Human
uugcaaagacaaggaugucuc

SEQ ID NO: 1262574 - RNA, 18 nt, Human
uuguaauguccuccuaca

SEQ ID NO: 1262575 - RNA, 23 nt, Human
uuuccccacaaaccaacacacaa

SEQ ID NO: 1262576 - RNA, 21 nt, Human
cucaccaguuuucuugauuuu

SEQ ID NO: 1262577 - RNA, 19 nt, Human
guugagcugaggugaaggg

SEQ ID NO: 1262578 - RNA, 18 nt, Human
uaccccaagguaucucac

SEQ ID NO: 1262579 - RNA, 22 nt, Human
ucaccaguuuucuugauuuuag

SEQ ID NO: 1262580 - RNA, 18 nt, Human
ugaggugaagggugaaca

SEQ ID NO: 1262581 - RNA, 23 nt, Human
uuauaugcagguuucucuacccc

SEQ ID NO: 1262582 - RNA, 19 nt, Human
uucuugauuuuagaaguug

SEQ ID NO: 1262583 - RNA, 24 nt, Human
acuaacacauccaccuuggcaaaa

SEQ ID NO: 1262584 - RNA, 21 nt, Human
agcaggcuguacagcagcagc

SEQ ID NO: 1262585 - RNA, 20 nt, Human
agguaugcucaaagaucuau

SEQ ID NO: 1262586 - RNA, 22 nt, Human
aguugcuucuucuuauuucuac

SEQ ID NO: 1262587 - RNA, 26 nt, Human
caccaaggagacugcagucaaauaaa

SEQ ID NO: 1262588 - RNA, 18 nt, Human
caccaccugugccucugc

SEQ ID NO: 1262589 - RNA, 18 nt, Human
caccaccugugccucugc

SEQ ID NO: 1262590 - RNA, 18 nt, Human
cacgacaggucaguaugu

SEQ ID NO: 1262591 - RNA, 18 nt, Human
ccccugcugcugggucaa

SEQ ID NO: 1262592 - RNA, 18 nt, Human
ccucuacugccugccacc

SEQ ID NO: 1262593 - RNA, 22 nt, Human
cgaaaaguacugaaaaugcuau

SEQ ID NO: 1262594 - RNA, 26 nt, Human
cgccucuacugccugccaccaccugu

SEQ ID NO: 1262595 - RNA, 21 nt, Human
cuacugccugccaccaccugu

SEQ ID NO: 1262596 - RNA, 24 nt, Human
cuagcugaauuugugauuuccuuu

SEQ ID NO: 1262597 - RNA, 24 nt, Human
cucacagcuuuggccacgcacucc

SEQ ID NO: 1262598 - RNA, 22 nt, Human
cuccugccauccuguccucagc

SEQ ID NO: 1262599 - RNA, 20 nt, Human
gacuugggcaauguggccag

SEQ ID NO: 1262600 - RNA, 21 nt, Human
gggcaauguggccaggagggc

SEQ ID NO: 1262601 - RNA, 20 nt, Human
ggucagaaaaaucaacauuu

SEQ ID NO: 1262602 - RNA, 22 nt, Human
gugcacacgacaggucaguaug

SEQ ID NO: 1262603 - RNA, 27 nt, Human
uaaauacauaauacagaagccugugug

SEQ ID NO: 1262604 - RNA, 19 nt, Human
uaugucuuauggucagaaa

SEQ ID NO: 1262605 - RNA, 19 nt, Human
uauuuuucccauuuuguuu

SEQ ID NO: 1262606 - RNA, 20 nt, Human
ucccggucacgaaccuggug

SEQ ID NO: 1262607 - RNA, 18 nt, Human
uccuaggccgaggcuaug

SEQ ID NO: 1262608 - RNA, 21 nt, Human
uccucagcuccugccuuccuc

SEQ ID NO: 1262609 - RNA, 21 nt, Human
ugaaaaugcuauuacuagcug

SEQ ID NO: 1262610 - RNA, 22 nt, Human
ugaguuauccuuauuuuuccca

SEQ ID NO: 1262611 - RNA, 24 nt, Human
ugaguuauccuuauuuuucccauu

SEQ ID NO: 1262612 - RNA, 19 nt, Human
ugccaccaccugugccucu

SEQ ID NO: 1262613 - RNA, 21 nt, Human
ugccugccaccaccugugccu

SEQ ID NO: 1262614 - RNA, 21 nt, Human
ugggucaaacucgaggcugac

SEQ ID NO: 1262615 - RNA, 18 nt, Human
uguccuaggccgaggcua

SEQ ID NO: 1262616 - RNA, 23 nt, Human
ugugauaugaugagguaucucca

SEQ ID NO: 1262617 - RNA, 24 nt, Human
uuauggucagaaaaaucaacauuu

SEQ ID NO: 1262618 - RNA, 21 nt, Human
uuccucuggaauauugugcuu

SEQ ID NO: 1262619 - RNA, 22 nt, Human
uuggcagaaggguuaaacucca

SEQ ID NO: 1262620 - RNA, 21 nt, Human
aaaaugccccccccccgagac

SEQ ID NO: 1262621 - RNA, 18 nt, Human
aaagcuaaaauaaucaca

SEQ ID NO: 1262622 - RNA, 20 nt, Human
aacauccucacugcacagaa

SEQ ID NO: 1262623 - RNA, 18 nt, Human
aagaacauuuugacacag

SEQ ID NO: 1262624 - RNA, 23 nt, Human
aagguaaacagauguauuagcca

SEQ ID NO: 1262625 - RNA, 19 nt, Human
acucugccaccacuuuucc

SEQ ID NO: 1262626 - RNA, 22 nt, Human
acugcagcugccuagggcuggc

SEQ ID NO: 1262627 - RNA, 25 nt, Human
acugcuuuuugaagaugauguggaa

SEQ ID NO: 1262628 - RNA, 19 nt, Human
agccgguuuuuuuuuuuuu

SEQ ID NO: 1262629 - RNA, 21 nt, Human
aggagaaugagucacucugcc

SEQ ID NO: 1262630 - RNA, 24 nt, Human
agucaccacuuuggcugaucuaaa

SEQ ID NO: 1262631 - RNA, 24 nt, Human
auuggguuuaauauucauaacaau

SEQ ID NO: 1262632 - RNA, 21 nt, Human
caaaagcaacagacugugaua

SEQ ID NO: 1262633 - RNA, 19 nt, Human
caacugcuacacauucaaa

SEQ ID NO: 1262634 - RNA, 21 nt, Human
caccuugugcccuuucugcug

SEQ ID NO: 1262635 - RNA, 26 nt, Human
cacgcugugaaauguaaccuccugug

SEQ ID NO: 1262636 - RNA, 19 nt, Human
cacucugccaccacuuuuc

SEQ ID NO: 1262637 - RNA, 20 nt, Human
cacucugccaccacuuuucc

SEQ ID NO: 1262638 - RNA, 21 nt, Human
cacucugccaccacuuuuccu

SEQ ID NO: 1262639 - RNA, 24 nt, Human
cauuacuguuccaaaaaguaaagg

SEQ ID NO: 1262640 - RNA, 22 nt, Human
cauucaaagaacaggcauucac

SEQ ID NO: 1262641 - RNA, 26 nt, Human
cauugggugggagguccucugcugga

SEQ ID NO: 1262642 - RNA, 23 nt, Human
ccaggcucuuuuuagcaccgugg

SEQ ID NO: 1262643 - RNA, 22 nt, Human
cccacauguguaagcuggaaaa

SEQ ID NO: 1262644 - RNA, 18 nt, Human
cccccgagacucgucagg

SEQ ID NO: 1262645 - RNA, 22 nt, Human
ccugcuuauaggccaugaaaau

SEQ ID NO: 1262646 - RNA, 22 nt, Human
cucugccaccacuuuuccugcc

SEQ ID NO: 1262647 - RNA, 18 nt, Human
cucugggcuacuuugugu

SEQ ID NO: 1262648 - RNA, 28 nt, Human
cugcagcccuggagaagguugggcuuug

SEQ ID NO: 1262649 - RNA, 22 nt, Human
cugcugcccuggcgccaccuug

SEQ ID NO: 1262650 - RNA, 23 nt, Human
cugcugcugggggucucauuggc

SEQ ID NO: 1262651 - RNA, 22 nt, Human
cuggacuuaggcuggugggguu

SEQ ID NO: 1262652 - RNA, 19 nt, Human
cuggcccugcugcccuggc

SEQ ID NO: 1262653 - RNA, 18 nt, Human
cuggcuuugugugggcag

SEQ ID NO: 1262654 - RNA, 22 nt, Human
cugggugauagggaaagguaaa

SEQ ID NO: 1262655 - RNA, 20 nt, Human
cuucguuucccucgguugcu

SEQ ID NO: 1262656 - RNA, 27 nt, Human
cuucuggaaacauccucacugcacaga

SEQ ID NO: 1262657 - RNA, 22 nt, Human
cuucuggccaucauuauccauu

SEQ ID NO: 1262658 - RNA, 21 nt, Human
gagaaucauggggaacagaga

SEQ ID NO: 1262659 - RNA, 18 nt, Human
gaggaugcucagcccugc

SEQ ID NO: 1262660 - RNA, 20 nt, Human
gccugugguuugaccuggga

SEQ ID NO: 1262661 - RNA, 21 nt, Human
gcugcugggggucucauuggc

SEQ ID NO: 1262662 - RNA, 18 nt, Human
gcuggacuuaggcuggug

SEQ ID NO: 1262663 - RNA, 22 nt, Human
gcugggggucucauuggcucag

SEQ ID NO: 1262664 - RNA, 20 nt, Human
ggcaggaggaugcucagccc

SEQ ID NO: 1262665 - RNA, 22 nt, Human
ggcaggaggaugcucagcccug

SEQ ID NO: 1262666 - RNA, 20 nt, Human
gggcaucccuugggugggcc

SEQ ID NO: 1262667 - RNA, 20 nt, Human
guaauggcuguacuagaagc

SEQ ID NO: 1262668 - RNA, 23 nt, Human
gugggguugcucugggcugcagc

SEQ ID NO: 1262669 - RNA, 19 nt, Human
guguaagcuggaaaaaucc

SEQ ID NO: 1262670 - RNA, 18 nt, Human
uaaaaaugcccccccccc

SEQ ID NO: 1262671 - RNA, 19 nt, Human
uaaaaaugccccccccccg

SEQ ID NO: 1262672 - RNA, 19 nt, Human
uaagcuggaaaaauccacg

SEQ ID NO: 1262673 - RNA, 24 nt, Human
uacaaaaggaaagaaaauggcaca

SEQ ID NO: 1262674 - RNA, 22 nt, Human
uaccuuauaggagaaucauggg

SEQ ID NO: 1262675 - RNA, 26 nt, Human
uagaaaaagguaugugaaaaaauuag

SEQ ID NO: 1262676 - RNA, 18 nt, Human
uagcaaaccaaagcauga

SEQ ID NO: 1262677 - RNA, 20 nt, Human
uagccaaguuuuaaagaguu

SEQ ID NO: 1262678 - RNA, 19 nt, Human
uagcuucuggaaacauccu

SEQ ID NO: 1262679 - RNA, 21 nt, Human
ucagagugcuuaguaaacauc

SEQ ID NO: 1262680 - RNA, 22 nt, Human
uccuacaguuuaauuugcugcu

SEQ ID NO: 1262681 - RNA, 21 nt, Human
uccugccuuggauuuguagag

SEQ ID NO: 1262682 - RNA, 21 nt, Human
ucuuagagugucauuuguuuu

SEQ ID NO: 1262683 - RNA, 18 nt, Human
ugaccugggaaaggggcu

SEQ ID NO: 1262684 - RNA, 19 nt, Human
ugcccuggcgccaccuugu

SEQ ID NO: 1262685 - RNA, 21 nt, Human
ugcccuuucugcugcuggggg

SEQ ID NO: 1262686 - RNA, 18 nt, Human
ugccuggaacccaugaag

SEQ ID NO: 1262687 - RNA, 18 nt, Human
ugcuggacuuaggcuggu

SEQ ID NO: 1262688 - RNA, 20 nt, Human
ugcuuaguaaacaucagugg

SEQ ID NO: 1262689 - RNA, 24 nt, Human
uggagaagguugggcuuugggcau

SEQ ID NO: 1262690 - RNA, 26 nt, Human
ugggaaaggggcuugugucuggguga

SEQ ID NO: 1262691 - RNA, 19 nt, Human
ugggagggacaggagaaug

SEQ ID NO: 1262692 - RNA, 18 nt, Human
uguaauggcuguacuaga

SEQ ID NO: 1262693 - RNA, 21 nt, Human
uguaauggcuguacuagaagc

SEQ ID NO: 1262694 - RNA, 18 nt, Human
uguacaaaagcaacagac

SEQ ID NO: 1262695 - RNA, 21 nt, Human
uguaggaagaaaaguagccuc

SEQ ID NO: 1262696 - RNA, 21 nt, Human
uguagggauagccacacacug

SEQ ID NO: 1262697 - RNA, 18 nt, Human
uguauuagccacuggcuu

SEQ ID NO: 1262698 - RNA, 24 nt, Human
ugucaggaaaacaaacuuaaaaaa

SEQ ID NO: 1262699 - RNA, 28 nt, Human
ugucaggaaaacaaacuuaaaaaauuuc

SEQ ID NO: 1262700 - RNA, 19 nt, Human
ugugcccuuucugcugcug

SEQ ID NO: 1262701 - RNA, 19 nt, Human
uguguaagcuggaaaaauc

SEQ ID NO: 1262702 - RNA, 25 nt, Human
uucucauaugaaacuguaauggcug

SEQ ID NO: 1262703 - RNA, 19 nt, Human
uucuuuggaggauuuaaaa

SEQ ID NO: 1262704 - RNA, 23 nt, Human
uugcugcuuuugugguuucugug

SEQ ID NO: 1262705 - RNA, 22 nt, Human
uuguuuuuccuauaucugcccu

SEQ ID NO: 1262706 - RNA, 19 nt, Human
uuuaccugucgaaccccaa

SEQ ID NO: 1262707 - RNA, 24 nt, Human
uuuauacaauuuauuggguuuaau

SEQ ID NO: 1262708 - RNA, 28 nt, Human
uuugacacaguuuuagccgguuuuuuuu

SEQ ID NO: 1262709 - RNA, 18 nt, Human
uuugaccugggaaagggg

SEQ ID NO: 1262710 - RNA, 19 nt, Human
uuugaggaugcauugaugu

SEQ ID NO: 1262711 - RNA, 20 nt, Human
uuugugugggcagcuguguu

SEQ ID NO: 1262712 - RNA, 21 nt, Human
uuuuuuguaaagcuaaaauaa

SEQ ID NO: 1262713 - RNA, 19 nt, Human
uuuuuuuuuuuuuugagga

SEQ ID NO: 1262714 - RNA, 18 nt, Human
uuuuuuuuuuuuuuuuug

SEQ ID NO: 1262715 - RNA, 21 nt, Human
uuuuuuuuuuuuuuuuugagg

SEQ ID NO: 1262716 - RNA, 21 nt, Human
aaacacaauaacaaauggaca

SEQ ID NO: 1262717 - RNA, 22 nt, Human
aaacugacaagguauggaaaac

SEQ ID NO: 1262718 - RNA, 20 nt, Human
aaauggacaucugauuggga

SEQ ID NO: 1262719 - RNA, 21 nt, Human
aacacaauaacaaauggacau

SEQ ID NO: 1262720 - RNA, 25 nt, Human
aacccuauucuuucaauagcaaauc

SEQ ID NO: 1262721 - RNA, 22 nt, Human
aaccuuucagucauagcaauuc

SEQ ID NO: 1262722 - RNA, 21 nt, Human
aagaaacaaaauggcuggaua

SEQ ID NO: 1262723 - RNA, 19 nt, Human
aaugucauuauuuaugacc

SEQ ID NO: 1262724 - RNA, 22 nt, Human
acauguaggacaauuucuacug

SEQ ID NO: 1262725 - RNA, 23 nt, Human
agcauugaaaguuuacugcaacu

SEQ ID NO: 1262726 - RNA, 19 nt, Human
agcuuuuaugaaagacaag

SEQ ID NO: 1262727 - RNA, 22 nt, Human
agugcaaaagcccauuauaaug

SEQ ID NO: 1262728 - RNA, 19 nt, Human
auaaaguuuuaauuaggac

SEQ ID NO: 1262729 - RNA, 19 nt, Human
auggcaaacauguucaaga

SEQ ID NO: 1262730 - RNA, 20 nt, Human
augguaacugaaauaaagua

SEQ ID NO: 1262731 - RNA, 23 nt, Human
caacacugcacauuuaaaaaaaa

SEQ ID NO: 1262732 - RNA, 26 nt, Human
cauaaaauguaagcaaggcuucucaa

SEQ ID NO: 1262733 - RNA, 23 nt, Human
cauuuaaaaaaaaaaaaaaaaaa

SEQ ID NO: 1262734 - RNA, 24 nt, Human
gauuuucauuuuagguaacaauuu

SEQ ID NO: 1262735 - RNA, 23 nt, Human
gcaaacauguucaagaggagcua

SEQ ID NO: 1262736 - RNA, 21 nt, Human
gcacauuuaaaaaaaaaaaaa

SEQ ID NO: 1262737 - RNA, 18 nt, Human
gcugcugcacauccaaaa

SEQ ID NO: 1262738 - RNA, 19 nt, Human
ggcauaucaaauauaugau

SEQ ID NO: 1262739 - RNA, 19 nt, Human
guaagcaaggcuucucaaa

SEQ ID NO: 1262740 - RNA, 25 nt, Human
guaagcugcugcacauccaaaaagu

SEQ ID NO: 1262741 - RNA, 21 nt, Human
guauaauauauauuuauauau

SEQ ID NO: 1262742 - RNA, 21 nt, Human
gucuaagaaaauauuccagaa

SEQ ID NO: 1262743 - RNA, 22 nt, Human
guuagaauaguugucucuaacu

SEQ ID NO: 1262744 - RNA, 24 nt, Human
uaaaauguaagcaaggcuucucaa

SEQ ID NO: 1262745 - RNA, 21 nt, Human
uaaaggguuguuaacaaacac

SEQ ID NO: 1262746 - RNA, 20 nt, Human
uaaaguuuuaauuaggacuc

SEQ ID NO: 1262747 - RNA, 24 nt, Human
uaaauccuaagagcuuuguuaaaa

SEQ ID NO: 1262748 - RNA, 24 nt, Human
uaacacaaauguccuuuuuaauau

SEQ ID NO: 1262749 - RNA, 23 nt, Human
uaagaagugaaauugaagcccua

SEQ ID NO: 1262750 - RNA, 21 nt, Human
uaaguuuauaaccugugccac

SEQ ID NO: 1262751 - RNA, 22 nt, Human
uaaguuuauaaccugugccaca

SEQ ID NO: 1262752 - RNA, 21 nt, Human
uacaaaggacuugggauggua

SEQ ID NO: 1262753 - RNA, 23 nt, Human
uaggacaauuucuacugaaaaau

SEQ ID NO: 1262754 - RNA, 22 nt, Human
uauaaugucauuauuuaugacc

SEQ ID NO: 1262755 - RNA, 21 nt, Human
uauaccauuaagaaacaaaau

SEQ ID NO: 1262756 - RNA, 18 nt, Human
uauccuguacacaucaua

SEQ ID NO: 1262757 - RNA, 24 nt, Human
ucaaaacaugaaguugauuuucau

SEQ ID NO: 1262758 - RNA, 26 nt, Human
ucaaaaucaaaacccucauucagacc

SEQ ID NO: 1262759 - RNA, 20 nt, Human
uccagaaacucagagauuac

SEQ ID NO: 1262760 - RNA, 24 nt, Human
ucuaagaaaauauuccagaaacuc

SEQ ID NO: 1262761 - RNA, 25 nt, Human
ugaaacauucaaaaucaaaacccuc

SEQ ID NO: 1262762 - RNA, 22 nt, Human
ugaaagacaagguggcauauaa

SEQ ID NO: 1262763 - RNA, 23 nt, Human
ugaaaguuuacugcaacucuaau

SEQ ID NO: 1262764 - RNA, 19 nt, Human
ugugccacagcaaagaaug

SEQ ID NO: 1262765 - RNA, 20 nt, Human
uuaaaaaaaaaaaaaaaaaa

SEQ ID NO: 1262766 - RNA, 20 nt, Human
uuaaguuuauaaccugugcc

SEQ ID NO: 1262767 - RNA, 21 nt, Human
uuauaccauuaagaaacaaaa

SEQ ID NO: 1262768 - RNA, 22 nt, Human
uuccaaaggaaaaauaauaaca

SEQ ID NO: 1262769 - RNA, 28 nt, Human
uuccaaugacuacaccauaagguacccc

SEQ ID NO: 1262770 - RNA, 20 nt, Human
uugaaaguuuacugcaacuc

SEQ ID NO: 1262771 - RNA, 21 nt, Human
uuuacugcaacucuaauuucc

SEQ ID NO: 1262772 - RNA, 23 nt, Human
uuuauaccauuaagaaacaaaau

SEQ ID NO: 1262773 - RNA, 25 nt, Human
uuuuauuuuuuaaagcugaaacauu

SEQ ID NO: 1262774 - RNA, 23 nt, Human
aaaaaagagaauauacuguaugc

SEQ ID NO: 1262775 - RNA, 21 nt, Human
aaugguucccacaacgauuuu

SEQ ID NO: 1262776 - RNA, 22 nt, Human
agaacccaauugugggggcugc

SEQ ID NO: 1262777 - RNA, 20 nt, Human
aguuagauaaagaggaagaa

SEQ ID NO: 1262778 - RNA, 24 nt, Human
aguucaccucaaggucagaagcuc

SEQ ID NO: 1262779 - RNA, 21 nt, Human
caaaagaucccgacugucuuc

SEQ ID NO: 1262780 - RNA, 21 nt, Human
caguccaccaggaaaagaaau

SEQ ID NO: 1262781 - RNA, 19 nt, Human
caguucuaagugcaguccu

SEQ ID NO: 1262782 - RNA, 19 nt, Human
cauucagacaugucuguca

SEQ ID NO: 1262783 - RNA, 22 nt, Human
ccaccaggaaaagaaauccccc

SEQ ID NO: 1262784 - RNA, 20 nt, Human
ccuggaguucuuuuaauggu

SEQ ID NO: 1262785 - RNA, 18 nt, Human
cuucauucagacaugucu

SEQ ID NO: 1262786 - RNA, 25 nt, Human
gaaaagaaaucccccgcuggcugga

SEQ ID NO: 1262787 - RNA, 18 nt, Human
gccaaaaugcaguucuaa

SEQ ID NO: 1262788 - RNA, 21 nt, Human
uaaaauagagccuauuugucc

SEQ ID NO: 1262789 - RNA, 26 nt, Human
uaacauuagaaggcaauucaagacau

SEQ ID NO: 1262790 - RNA, 18 nt, Human
uacaguccaccaggaaaa

SEQ ID NO: 1262791 - RNA, 24 nt, Human
uacguauacuuuuagcguuuucag

SEQ ID NO: 1262792 - RNA, 21 nt, Human
uaguuagauaaagaggaagaa

SEQ ID NO: 1262793 - RNA, 21 nt, Human
ucagaggucgccaaaaugcag

SEQ ID NO: 1262794 - RNA, 26 nt, Human
uccaaaaauaauuuuguuaaguucac

SEQ ID NO: 1262795 - RNA, 22 nt, Human
uccaaguuuuuugcaugaagca

SEQ ID NO: 1262796 - RNA, 19 nt, Human
uccaccaggaaaagaaauc

SEQ ID NO: 1262797 - RNA, 21 nt, Human
ucuccuucagagaaaacugag

SEQ ID NO: 1262798 - RNA, 24 nt, Human
ucucuuccguguccuuuuauaaga

SEQ ID NO: 1262799 - RNA, 22 nt, Human
ugacagucauaaauaaagaaaa

SEQ ID NO: 1262800 - RNA, 19 nt, Human
ugcuuaagcaaaugugaga

SEQ ID NO: 1262801 - RNA, 22 nt, Human
ugguuuaaagucaauagggggc

SEQ ID NO: 1262802 - RNA, 23 nt, Human
uguaauauaguuagauaaagagg

SEQ ID NO: 1262803 - RNA, 19 nt, Human
aaagugcugggauuauagg

SEQ ID NO: 1262804 - RNA, 24 nt, Human
aaagugcugggauuauagguguga

SEQ ID NO: 1262805 - RNA, 18 nt, Human
aagugcugggauuauagg

SEQ ID NO: 1262806 - RNA, 26 nt, Human
aagugcugggauuauaggugugagcc

SEQ ID NO: 1262807 - RNA, 19 nt, Human
agaaggcuguuucagaagg

SEQ ID NO: 1262808 - RNA, 22 nt, Human
aggcaauccgccugccucggcc

SEQ ID NO: 1262809 - RNA, 24 nt, Human
aggcaauccgccugccucggccuc

SEQ ID NO: 1262810 - RNA, 18 nt, Human
agggagcagaguauucag

SEQ ID NO: 1262811 - RNA, 18 nt, Human
agggauucagcagugagg

SEQ ID NO: 1262812 - RNA, 18 nt, Human
aguagcugggacuacagg

SEQ ID NO: 1262813 - RNA, 19 nt, Human
aguagcugggacuacaggc

SEQ ID NO: 1262814 - RNA, 19 nt, Human
augggguuucaucguguug

SEQ ID NO: 1262815 - RNA, 24 nt, Human
augggguuucaucguguugcccag

SEQ ID NO: 1262816 - RNA, 24 nt, Human
auuuuuuguauuuuaguagagaug

SEQ ID NO: 1262817 - RNA, 22 nt, Human
caagcaauucuccugccucagc

SEQ ID NO: 1262818 - RNA, 21 nt, Human
cacugcaaccuccgccucccg

SEQ ID NO: 1262819 - RNA, 23 nt, Human
cacugcaaccuccgccucccggg

SEQ ID NO: 1262820 - RNA, 20 nt, Human
cagccuccugaguagcuggg

SEQ ID NO: 1262821 - RNA, 24 nt, Human
caucguguugcccagacugaucuu

SEQ ID NO: 1262822 - RNA, 27 nt, Human
caucguguugcccagacugaucuugaa

SEQ ID NO: 1262823 - RNA, 23 nt, Human
cccaggcuggagugauguggcau

SEQ ID NO: 1262824 - RNA, 23 nt, Human
cccggguucaagcaauucuccug

SEQ ID NO: 1262825 - RNA, 26 nt, Human
ccgccucccggguucaagcaauucuu

SEQ ID NO: 1262826 - RNA, 22 nt, Human
ccuaaagugcugggauuauagg

SEQ ID NO: 1262827 - RNA, 24 nt, Human
ccucccggguucaagcaauucucc

SEQ ID NO: 1262828 - RNA, 23 nt, Human
ccugaguagcugggacuacaggc

SEQ ID NO: 1262829 - RNA, 24 nt, Human
ccugaguagcugggacuacaggca

SEQ ID NO: 1262830 - RNA, 23 nt, Human
ccugccucagccuccugaguagc

SEQ ID NO: 1262831 - RNA, 21 nt, Human
ccugugauaucuguucuucuu

SEQ ID NO: 1262832 - RNA, 24 nt, Human
cguguugcccagacugaucuugaa

SEQ ID NO: 1262833 - RNA, 23 nt, Human
cuaaagugcugggauuauaggug

SEQ ID NO: 1262834 - RNA, 24 nt, Human
cuaaagugcugggauuauaggugu

SEQ ID NO: 1262835 - RNA, 24 nt, Human
cucacugcaaccuccgccucccgg

SEQ ID NO: 1262836 - RNA, 24 nt, Human
cucagccuccugaguagcugggac

SEQ ID NO: 1262837 - RNA, 21 nt, Human
cucaggcaauccgccugccuc

SEQ ID NO: 1262838 - RNA, 18 nt, Human
cuccucguauucagaagg

SEQ ID NO: 1262839 - RNA, 23 nt, Human
cugcaaccuccgccucccggguu

SEQ ID NO: 1262840 - RNA, 23 nt, Human
cugccucagccuccugaguagcu

SEQ ID NO: 1262841 - RNA, 24 nt, Human
cuggagugauguggcaugaucuug

SEQ ID NO: 1262842 - RNA, 21 nt, Human
cugggauuauaggugugagcc

SEQ ID NO: 1262843 - RNA, 19 nt, Human
cuguugcccaggcuggagu

SEQ ID NO: 1262844 - RNA, 18 nt, Human
cuguuggcaggcuucucc

SEQ ID NO: 1262845 - RNA, 20 nt, Human
cuugaacuccugagcucagg

SEQ ID NO: 1262846 - RNA, 18 nt, Human
cuuguucuguugcccagg

SEQ ID NO: 1262847 - RNA, 24 nt, Human
gacuacaggcacacgccaucaugc

SEQ ID NO: 1262848 - RNA, 22 nt, Human
gagaugggguuucaucguguug

SEQ ID NO: 1262849 - RNA, 24 nt, Human
gagcucaggcaauccgccugccuc

SEQ ID NO: 1262850 - RNA, 24 nt, Human
gaguagcugggacuacaggcacac

SEQ ID NO: 1262851 - RNA, 22 nt, Human
gaugggguuucaucguguugcc

SEQ ID NO: 1262852 - RNA, 18 nt, Human
gauuauaggugugagcca

SEQ ID NO: 1262853 - RNA, 22 nt, Human
gcaaccuccgccucccggguuc

SEQ ID NO: 1262854 - RNA, 23 nt, Human
gcccagcuaauuuuuuguauuuu

SEQ ID NO: 1262855 - RNA, 24 nt, Human
ggacuacaggcacacgccaucaug

SEQ ID NO: 1262856 - RNA, 22 nt, Human
gguucuuguucuguugcccagg

SEQ ID NO: 1262857 - RNA, 20 nt, Human
gugagccauagugcccagcc

SEQ ID NO: 1262858 - RNA, 18 nt, Human
guggcaugaucuuggcuc

SEQ ID NO: 1262859 - RNA, 20 nt, Human
uaaaaaguugagaagaugga

SEQ ID NO: 1262860 - RNA, 24 nt, Human
uaaagugcugggauuauaggugug

SEQ ID NO: 1262861 - RNA, 23 nt, Human
uaauuuuuuguauuuuaguagag

SEQ ID NO: 1262862 - RNA, 24 nt, Human
uacaggcacacgccaucaugccca

SEQ ID NO: 1262863 - RNA, 19 nt, Human
uaguagagaugggguuuca

SEQ ID NO: 1262864 - RNA, 24 nt, Human
uaguagagaugggguuucaucgug

SEQ ID NO: 1262865 - RNA, 18 nt, Human
ucaaagcccaggccauca

SEQ ID NO: 1262866 - RNA, 23 nt, Human
ucacugcaaccuccgccucccgg

SEQ ID NO: 1262867 - RNA, 24 nt, Human
ucacugcaaccuccgccucccggg

SEQ ID NO: 1262868 - RNA, 25 nt, Human
ucacugcaaccuccgccucccgggu

SEQ ID NO: 1262869 - RNA, 27 nt, Human
ucacugcaaccuccgccucccggguuc

SEQ ID NO: 1262870 - RNA, 23 nt, Human
ucagccuccugaguagcugggac

SEQ ID NO: 1262871 - RNA, 21 nt, Human
ucccggguucaagcaauucuc

SEQ ID NO: 1262872 - RNA, 24 nt, Human
ucccggguucaagcaauucuccug

SEQ ID NO: 1262873 - RNA, 24 nt, Human
uccgccucccggguucaagcaauu

SEQ ID NO: 1262874 - RNA, 24 nt, Human
uccuaaagugcugggauuauaggu

SEQ ID NO: 1262875 - RNA, 24 nt, Human
uccugaguagcugggacuacaggc

SEQ ID NO: 1262876 - RNA, 18 nt, Human
ucggccuccuaaagugcu

SEQ ID NO: 1262877 - RNA, 24 nt, Human
ucuccugccucagccuccugagua

SEQ ID NO: 1262878 - RNA, 25 nt, Human
ucuggaggggagagaaugagaugga

SEQ ID NO: 1262879 - RNA, 18 nt, Human
ucuguugcccaggcugga

SEQ ID NO: 1262880 - RNA, 22 nt, Human
ucuguugcccaggcuggaguga

SEQ ID NO: 1262881 - RNA, 23 nt, Human
ucuugaacuccugagcucaggca

SEQ ID NO: 1262882 - RNA, 22 nt, Human
ucuuguucuguugcccaggcug

SEQ ID NO: 1262883 - RNA, 23 nt, Human
ucuuguucuguugcccaggcugg

SEQ ID NO: 1262884 - RNA, 24 nt, Human
ucuuguucuguugcccaggcugga

SEQ ID NO: 1262885 - RNA, 24 nt, Human
ugaacuccugagcucaggcaaucc

SEQ ID NO: 1262886 - RNA, 21 nt, Human
ugagauggaguucaccagcag

SEQ ID NO: 1262887 - RNA, 22 nt, Human
ugagauggguucuuguucuguu

SEQ ID NO: 1262888 - RNA, 23 nt, Human
ugagauggguucuuguucuguug

SEQ ID NO: 1262889 - RNA, 24 nt, Human
ugaucuugaacuccugagcucagg

SEQ ID NO: 1262890 - RNA, 24 nt, Human
ugcccagacugaucuugaacuccu

SEQ ID NO: 1262891 - RNA, 21 nt, Human
ugcccaggcuggagugaugug

SEQ ID NO: 1262892 - RNA, 24 nt, Human
ugcccaggcuggagugauguggca

SEQ ID NO: 1262893 - RNA, 24 nt, Human
ugccucagccuccugaguagcugg

SEQ ID NO: 1262894 - RNA, 24 nt, Human
ugccucggccuccuaaagugcugg

SEQ ID NO: 1262895 - RNA, 18 nt, Human
uggaaacugaauccuccu

SEQ ID NO: 1262896 - RNA, 24 nt, Human
uggaggggagagaaugagauggag

SEQ ID NO: 1262897 - RNA, 24 nt, Human
uggagugauguggcaugaucuugg

SEQ ID NO: 1262898 - RNA, 19 nt, Human
uggcaugaucuuggcucac

SEQ ID NO: 1262899 - RNA, 21 nt, Human
uggcaugaucuuggcucacug

SEQ ID NO: 1262900 - RNA, 21 nt, Human
ugggacuacaggcacacgcca

SEQ ID NO: 1262901 - RNA, 22 nt, Human
ugggacuacaggcacacgccau

SEQ ID NO: 1262902 - RNA, 24 nt, Human
ugggacuacaggcacacgccauca

SEQ ID NO: 1262903 - RNA, 26 nt, Human
ugggacuacaggcacacgccaucaug

SEQ ID NO: 1262904 - RNA, 18 nt, Human
ugggauuauaggugugag

SEQ ID NO: 1262905 - RNA, 19 nt, Human
ugggauuauaggugugagc

SEQ ID NO: 1262906 - RNA, 21 nt, Human
ugggauuauaggugugagcca

SEQ ID NO: 1262907 - RNA, 21 nt, Human
ugggauuauaggugugagcca

SEQ ID NO: 1262908 - RNA, 21 nt, Human
ugggauuauaggugugagcca

SEQ ID NO: 1262909 - RNA, 22 nt, Human
ugggauuauaggugugagccau

SEQ ID NO: 1262910 - RNA, 24 nt, Human
uggguucuuguucuguugcccagg

SEQ ID NO: 1262911 - RNA, 24 nt, Human
uguucuguugcccaggcuggagug

SEQ ID NO: 1262912 - RNA, 18 nt, Human
uguugcccagacugaucu

SEQ ID NO: 1262913 - RNA, 22 nt, Human
uguugcccagacugaucuugaa

SEQ ID NO: 1262914 - RNA, 23 nt, Human
uguuucagaaggucacuguuggc

SEQ ID NO: 1262915 - RNA, 21 nt, Human
uuaaaaaguugagaagaugga

SEQ ID NO: 1262916 - RNA, 18 nt, Human
uuaguagagaugggguuu

SEQ ID NO: 1262917 - RNA, 20 nt, Human
uuaguagagaugggguuuca

SEQ ID NO: 1262918 - RNA, 24 nt, Human
uuaguagagaugggguuucaucgu

SEQ ID NO: 1262919 - RNA, 21 nt, Human
uucaagcaauucuccugccuc

SEQ ID NO: 1262920 - RNA, 24 nt, Human
uucaagcaauucuccugccucagc

SEQ ID NO: 1262921 - RNA, 24 nt, Human
uucuuguucuguugcccaggcugg

SEQ ID NO: 1262922 - RNA, 21 nt, Human
uugagauggguucuuguucug

SEQ ID NO: 1262923 - RNA, 19 nt, Human
uugcccaggcuggagugau

SEQ ID NO: 1262924 - RNA, 20 nt, Human
uuucuguguuaaaaaguuga

SEQ ID NO: 1262925 - RNA, 25 nt, Human
uuucuguguuaaaaaguugagaagg

SEQ ID NO: 1262926 - RNA, 22 nt, Human
uuuuaguagagaugggguuuca

SEQ ID NO: 1262927 - RNA, 20 nt, Human
uuuuuguauuuuaguagaga

SEQ ID NO: 1262928 - RNA, 26 nt, Human
aaaaauuaacugaaaaucuaaacuua

SEQ ID NO: 1262929 - RNA, 18 nt, Human
aagaaaggagggaaaaag

SEQ ID NO: 1262930 - RNA, 20 nt, Human
agaaauagacucuaaaauca

SEQ ID NO: 1262931 - RNA, 20 nt, Human
agccuguauccaagaauacu

SEQ ID NO: 1262932 - RNA, 20 nt, Human
auaacugaaguaccuaaagc

SEQ ID NO: 1262933 - RNA, 21 nt, Human
aucccaaucucuccccaugaa

SEQ ID NO: 1262934 - RNA, 27 nt, Human
auuacuagaagaaaggagggaaaaaga

SEQ ID NO: 1262935 - RNA, 22 nt, Human
caaucucuccccaugaaaagcc

SEQ ID NO: 1262936 - RNA, 19 nt, Human
cauaaacgacuacuucucg

SEQ ID NO: 1262937 - RNA, 24 nt, Human
caugaaaagccuacuucauaacug

SEQ ID NO: 1262938 - RNA, 22 nt, Human
ccaauacagggaaaucacuaga

SEQ ID NO: 1262939 - RNA, 19 nt, Human
ccaugaaaagccuacuuca

SEQ ID NO: 1262940 - RNA, 19 nt, Human
cuagaagaaaggagggaaa

SEQ ID NO: 1262941 - RNA, 18 nt, Human
uaaaaaaggugaagugga

SEQ ID NO: 1262942 - RNA, 25 nt, Human
uaaagcccaugaacugcauuacuag

SEQ ID NO: 1262943 - RNA, 23 nt, Human
uauggauacuucuuuguucuugg

SEQ ID NO: 1262944 - RNA, 19 nt, Human
uccccaugaaaagccuacu

SEQ ID NO: 1262945 - RNA, 21 nt, Human
ucuaaacuuaauauggauacu

SEQ ID NO: 1262946 - RNA, 18 nt, Human
ucucauagaaauagacuc

SEQ ID NO: 1262947 - RNA, 23 nt, Human
ugaaaagccuacuucauaacuga

SEQ ID NO: 1262948 - RNA, 23 nt, Human
ugaaguggacaaucaguauuuca

SEQ ID NO: 1262949 - RNA, 28 nt, Human
ugaaguggacaaucaguauuucaaaccc

SEQ ID NO: 1262950 - RNA, 21 nt, Human
uggagcauaaacgacuacuuc

SEQ ID NO: 1262951 - RNA, 18 nt, Human
uggauacuucuuuguucu

SEQ ID NO: 1262952 - RNA, 22 nt, Human
uucaaacccaauacagggaaau

SEQ ID NO: 1262953 - RNA, 31 nt, Human
aaacacagguucccccacguuccccccaccc

SEQ ID NO: 1262954 - RNA, 24 nt, Human
aaaggaacuguuaaacugaaaaag

SEQ ID NO: 1262955 - RNA, 23 nt, Human
aacggagugaaugcauagcuggu

SEQ ID NO: 1262956 - RNA, 27 nt, Human
aagcaagaauagagugaaaagggaccc

SEQ ID NO: 1262957 - RNA, 23 nt, Human
aagcaguuuacaaacgaaacuca

SEQ ID NO: 1262958 - RNA, 19 nt, Human
aaggaacuguuaaacugaa

SEQ ID NO: 1262959 - RNA, 21 nt, Human
acagaugcauuugcuugaaaa

SEQ ID NO: 1262960 - RNA, 22 nt, Human
acagccuuuaaauuaaaaaccu

SEQ ID NO: 1262961 - RNA, 20 nt, Human
acguuccccccacccccgcc

SEQ ID NO: 1262962 - RNA, 21 nt, Human
acguuccccccacccccgccg

SEQ ID NO: 1262963 - RNA, 20 nt, Human
acuacugcaaagacgcgggc

SEQ ID NO: 1262964 - RNA, 27 nt, Human
agacacagacacagguccacuuuccaa

SEQ ID NO: 1262965 - RNA, 24 nt, Human
agacacagguccacuuuccaagca

SEQ ID NO: 1262966 - RNA, 22 nt, Human
agacaucugcucacuggaaacg

SEQ ID NO: 1262967 - RNA, 23 nt, Human
agaggccccaggcccacugagcc

SEQ ID NO: 1262968 - RNA, 18 nt, Human
agaugcauuugcuugaaa

SEQ ID NO: 1262969 - RNA, 20 nt, Human
agcaccugcucccgggcgac

SEQ ID NO: 1262970 - RNA, 21 nt, Human
aggagacccagccggccagcc

SEQ ID NO: 1262971 - RNA, 25 nt, Human
agguucccccacguuccccccaccc

SEQ ID NO: 1262972 - RNA, 19 nt, Human
augacagucuaaucuaaag

SEQ ID NO: 1262973 - RNA, 25 nt, Human
caaaaugggauguaagcuuguucau

SEQ ID NO: 1262974 - RNA, 23 nt, Human
caaagagcauucccaauagaaac

SEQ ID NO: 1262975 - RNA, 24 nt, Human
cacaaagagcauucccaauagaaa

SEQ ID NO: 1262976 - RNA, 24 nt, Human
cacagacuucaagcaguuuacaaa

SEQ ID NO: 1262977 - RNA, 24 nt, Human
cacggcauggcugaguaacagggu

SEQ ID NO: 1262978 - RNA, 20 nt, Human
cagaugugugccugaaugcc

SEQ ID NO: 1262979 - RNA, 19 nt, Human
caucaugcuccugccccuc

SEQ ID NO: 1262980 - RNA, 25 nt, Human
cauccccagccuugaagcucagcuc

SEQ ID NO: 1262981 - RNA, 21 nt, Human
ccaagcaagacaucugcucac

SEQ ID NO: 1262982 - RNA, 19 nt, Human
ccacugagcccgggaggag

SEQ ID NO: 1262983 - RNA, 25 nt, Human
cccaccauugacucggaagguuuuc

SEQ ID NO: 1262984 - RNA, 22 nt, Human
cccacguuccccccacccccgc

SEQ ID NO: 1262985 - RNA, 23 nt, Human
cccaggcccacugagcccgggag

SEQ ID NO: 1262986 - RNA, 18 nt, Human
cccccacccccgccggcc

SEQ ID NO: 1262987 - RNA, 21 nt, Human
cccccacguuccccccacccc

SEQ ID NO: 1262988 - RNA, 20 nt, Human
ccccccacccccgccggccc

SEQ ID NO: 1262989 - RNA, 23 nt, Human
ccccgccggcccgcguggccccc

SEQ ID NO: 1262990 - RNA, 23 nt, Human
cccggacucgcacuuccgucccc

SEQ ID NO: 1262991 - RNA, 22 nt, Human
ccgaccauaacccggucccacc

SEQ ID NO: 1262992 - RNA, 18 nt, Human
ccggcccgcguggccccc

SEQ ID NO: 1262993 - RNA, 23 nt, Human
ccggcccgcguggcccccgcgua

SEQ ID NO: 1262994 - RNA, 21 nt, Human
ccuacacacggcauggcugag

SEQ ID NO: 1262995 - RNA, 25 nt, Human
ccuugcaccagcccugcucauccuc

SEQ ID NO: 1262996 - RNA, 21 nt, Human
cgacuccgggcagcccgagac

SEQ ID NO: 1262997 - RNA, 22 nt, Human
cggguaagacccagcuucuguu

SEQ ID NO: 1262998 - RNA, 20 nt, Human
cucaaaaucuucacucaaaa

SEQ ID NO: 1262999 - RNA, 18 nt, Human
cucauagucauacagggc

SEQ ID NO: 1263000 - RNA, 25 nt, Human
cucauccccagccuugaagcucagc

SEQ ID NO: 1263001 - RNA, 19 nt, Human
cugaaaucugcaacuacug

SEQ ID NO: 1263002 - RNA, 20 nt, Human
cugcagcaccugcucccggg

SEQ ID NO: 1263003 - RNA, 22 nt, Human
cuugaagcucagcucaucaugc

SEQ ID NO: 1263004 - RNA, 23 nt, Human
cuugcccguuguccaagcguccc

SEQ ID NO: 1263005 - RNA, 18 nt, Human
cuuuagauucucugaaua

SEQ ID NO: 1263006 - RNA, 20 nt, Human
gacaaaggccggucagaagc

SEQ ID NO: 1263007 - RNA, 25 nt, Human
gagaggccccaggcccacugagccc

SEQ ID NO: 1263008 - RNA, 19 nt, Human
gagccaggacaaaggccgg

SEQ ID NO: 1263009 - RNA, 21 nt, Human
gaguucuaccuaagguucuau

SEQ ID NO: 1263010 - RNA, 20 nt, Human
gccccaggcccacugagccc

SEQ ID NO: 1263011 - RNA, 23 nt, Human
gcccugcucauccucguccucca

SEQ ID NO: 1263012 - RNA, 23 nt, Human
gccggcccgcguggcccccgcgu

SEQ ID NO: 1263013 - RNA, 18 nt, Human
gcugcagcaccugcuccc

SEQ ID NO: 1263014 - RNA, 23 nt, Human
ggacaaaggccggucagaagccg

SEQ ID NO: 1263015 - RNA, 20 nt, Human
ggaccagcagucagcuggug

SEQ ID NO: 1263016 - RNA, 21 nt, Human
ggagacccagccggccagcca

SEQ ID NO: 1263017 - RNA, 21 nt, Human
ggagaucguuuccucaagacu

SEQ ID NO: 1263018 - RNA, 19 nt, Human
ggccccaggcccacugagc

SEQ ID NO: 1263019 - RNA, 27 nt, Human
guaaagcuuccauucagaugcccaaaa

SEQ ID NO: 1263020 - RNA, 21 nt, Human
uaaacugaaaaagacuugaca

SEQ ID NO: 1263021 - RNA, 23 nt, Human
uaacacgacgacugaaaucugca

SEQ ID NO: 1263022 - RNA, 18 nt, Human
uaacccaccauugacucg

SEQ ID NO: 1263023 - RNA, 20 nt, Human
ucaaauaauauauacagaua

SEQ ID NO: 1263024 - RNA, 19 nt, Human
uccauucagaugcccaaaa

SEQ ID NO: 1263025 - RNA, 23 nt, Human
uccccagccuugaagcucagcuc

SEQ ID NO: 1263026 - RNA, 26 nt, Human
uccccagccuugaagcucagcucauc

SEQ ID NO: 1263027 - RNA, 22 nt, Human
uccguagcacagaaaugaggau

SEQ ID NO: 1263028 - RNA, 24 nt, Human
ucgugcugcggguaagacccagcu

SEQ ID NO: 1263029 - RNA, 23 nt, Human
ucuaaagcaucuuuacagaugca

SEQ ID NO: 1263030 - RNA, 21 nt, Human
ugacucggaaaggagagacaa

SEQ ID NO: 1263031 - RNA, 18 nt, Human
ugagucacgugaaacaca

SEQ ID NO: 1263032 - RNA, 24 nt, Human
ugcaacuacugcaaagacgcgggc

SEQ ID NO: 1263033 - RNA, 19 nt, Human
ugccacagacuucaagcag

SEQ ID NO: 1263034 - RNA, 21 nt, Human
ugcuacggagccaggacaaag

SEQ ID NO: 1263035 - RNA, 19 nt, Human
ugcucacuggaaacggagu

SEQ ID NO: 1263036 - RNA, 19 nt, Human
ugcuccugccccucauagu

SEQ ID NO: 1263037 - RNA, 23 nt, Human
uggcugcagcaccugcucccggg

SEQ ID NO: 1263038 - RNA, 21 nt, Human
uggugacggcggcgggcacug

SEQ ID NO: 1263039 - RNA, 21 nt, Human
uuaaaagcuguuaaaucucau

SEQ ID NO: 1263040 - RNA, 22 nt, Human
uuccccccacccccgccggccc

SEQ ID NO: 1263041 - RNA, 18 nt, Human
uuuuccucaaauacuaca

SEQ ID NO: 1263042 - RNA, 23 nt, Human
aaacgaaaaccuuacaguagucc

SEQ ID NO: 1263043 - RNA, 24 nt, Human
aacuccacaaccaaccucuaguau

SEQ ID NO: 1263044 - RNA, 23 nt, Human
aauaaauucaaacaagcuuaggc

SEQ ID NO: 1263045 - RNA, 22 nt, Human
acaaaacagcaagaaauacaaa

SEQ ID NO: 1263046 - RNA, 21 nt, Human
acacuauuuccaacuccacaa

SEQ ID NO: 1263047 - RNA, 29 nt, Human
acacuauuuccaacuccacaaccaaccuu

SEQ ID NO: 1263048 - RNA, 22 nt, Human
acagcuccagaagcaaaaucac

SEQ ID NO: 1263049 - RNA, 18 nt, Human
agcacaguccucuggcuu

SEQ ID NO: 1263050 - RNA, 21 nt, Human
aggcauaucaaguuuucaaag

SEQ ID NO: 1263051 - RNA, 21 nt, Human
aguccuugaauagcacagucc

SEQ ID NO: 1263052 - RNA, 22 nt, Human
caaaacacugggcugcucugua

SEQ ID NO: 1263053 - RNA, 21 nt, Human
caaagcgcagaaaaaggcaua

SEQ ID NO: 1263054 - RNA, 23 nt, Human
caacuccacaaccaaccucuagu

SEQ ID NO: 1263055 - RNA, 21 nt, Human
cacaaccaaccucuaguaucc

SEQ ID NO: 1263056 - RNA, 22 nt, Human
cacaaccaaccucuaguauccu

SEQ ID NO: 1263057 - RNA, 18 nt, Human
cacugcuaccaggaaaca

SEQ ID NO: 1263058 - RNA, 23 nt, Human
cagcaagaaauacaaauucucuu

SEQ ID NO: 1263059 - RNA, 24 nt, Human
cgaaguguucaaaauuggaaacac

SEQ ID NO: 1263060 - RNA, 22 nt, Human
cuuaaaaugcacaaaggagcuc

SEQ ID NO: 1263061 - RNA, 22 nt, Human
gcuccacagcuccagaagcaaa

SEQ ID NO: 1263062 - RNA, 24 nt, Human
uaguauccugaaaguggcacugcu

SEQ ID NO: 1263063 - RNA, 24 nt, Human
uccacagcuccagaagcaaaauca

SEQ ID NO: 1263064 - RNA, 20 nt, Human
ugacaaaacagcaagaaaua

SEQ ID NO: 1263065 - RNA, 21 nt, Human
ugacaaaacagcaagaaauac

SEQ ID NO: 1263066 - RNA, 20 nt, Human
ugcuaccaggaaacaaucgg

SEQ ID NO: 1263067 - RNA, 18 nt, Human
uggaaagcucugcgaagu

SEQ ID NO: 1263068 - RNA, 19 nt, Human
uggaaagcucugcgaagug

SEQ ID NO: 1263069 - RNA, 22 nt, Human
uguagaacgagugugacuuuac

SEQ ID NO: 1263070 - RNA, 21 nt, Human
uguucaaaauuggaaacacac

SEQ ID NO: 1263071 - RNA, 19 nt, Human
uucaaagcgcagaaaaagg

SEQ ID NO: 1263072 - RNA, 20 nt, Human
uucaaagcgcagaaaaaggc

SEQ ID NO: 1263073 - RNA, 26 nt, Human
uucuuuuuuucucauugucuuuugag

SEQ ID NO: 1263074 - RNA, 19 nt, Human
aaacuugggguccccaagc

SEQ ID NO: 1263075 - RNA, 18 nt, Human
aacuugggguccccaagc

SEQ ID NO: 1263076 - RNA, 19 nt, Human
acacagcacugccguccuc

SEQ ID NO: 1263077 - RNA, 18 nt, Human
acagaaucuucuucagag

SEQ ID NO: 1263078 - RNA, 20 nt, Human
acgggcccgcugagccgcgc

SEQ ID NO: 1263079 - RNA, 21 nt, Human
agacaggugagcagugccccc

SEQ ID NO: 1263080 - RNA, 18 nt, Human
agagguugauggugcugg

SEQ ID NO: 1263081 - RNA, 20 nt, Human
agagguugauggugcugguu

SEQ ID NO: 1263082 - RNA, 24 nt, Human
aggaggauuugguggaaacagcug

SEQ ID NO: 1263083 - RNA, 18 nt, Human
aggcagcugcccagccac

SEQ ID NO: 1263084 - RNA, 18 nt, Human
aguaucuugucccuggau

SEQ ID NO: 1263085 - RNA, 20 nt, Human
aucccacugaccggggagca

SEQ ID NO: 1263086 - RNA, 22 nt, Human
augaaauuggcaggugaggggg

SEQ ID NO: 1263087 - RNA, 19 nt, Human
cacagcacugccguccucu

SEQ ID NO: 1263088 - RNA, 25 nt, Human
cacagcgaugaagguggacgcgauc

SEQ ID NO: 1263089 - RNA, 20 nt, Human
cacauggacaagagcggcug

SEQ ID NO: 1263090 - RNA, 18 nt, Human
caccucagucacauccac

SEQ ID NO: 1263091 - RNA, 19 nt, Human
cacugaccggggagcagac

SEQ ID NO: 1263092 - RNA, 19 nt, Human
cagcagguuccccgccuuu

SEQ ID NO: 1263093 - RNA, 19 nt, Human
cagccggggcuccuccacg

SEQ ID NO: 1263094 - RNA, 20 nt, Human
cagcgaagaacucagagguc

SEQ ID NO: 1263095 - RNA, 22 nt, Human
caggggaagcccgucccccaau

SEQ ID NO: 1263096 - RNA, 21 nt, Human
caguagccagcagguuccccg

SEQ ID NO: 1263097 - RNA, 19 nt, Human
cagugcagugucuguggug

SEQ ID NO: 1263098 - RNA, 21 nt, Human
cagugucuguggugaucugac

SEQ ID NO: 1263099 - RNA, 22 nt, Human
cauccggaccuggccguccugg

SEQ ID NO: 1263100 - RNA, 25 nt, Human
ccaccauccggaccuggccguccug

SEQ ID NO: 1263101 - RNA, 19 nt, Human
ccacugaccggggagcaga

SEQ ID NO: 1263102 - RNA, 24 nt, Human
ccagcagcagacgggggccccaag

SEQ ID NO: 1263103 - RNA, 24 nt, Human
ccagugcagugucuguggugaucu

SEQ ID NO: 1263104 - RNA, 22 nt, Human
cccaaaguccucuuccucaucc

SEQ ID NO: 1263105 - RNA, 22 nt, Human
cccacugaccggggagcagacc

SEQ ID NO: 1263106 - RNA, 23 nt, Human
cccacugaccggggagcagaccu

SEQ ID NO: 1263107 - RNA, 21 nt, Human
cccagcagcucccaccaccau

SEQ ID NO: 1263108 - RNA, 22 nt, Human
ccccaaaguccucuuccucauc

SEQ ID NO: 1263109 - RNA, 20 nt, Human
ccccagcagcucccaccacc

SEQ ID NO: 1263110 - RNA, 18 nt, Human
ccugaaggucaagggagg

SEQ ID NO: 1263111 - RNA, 23 nt, Human
ccuuugaggauguugaggaugag

SEQ ID NO: 1263112 - RNA, 21 nt, Human
cgggugagugguguggucaga

SEQ ID NO: 1263113 - RNA, 19 nt, Human
cucacacucugcugaagcc

SEQ ID NO: 1263114 - RNA, 21 nt, Human
cugcccagccaccagccgugc

SEQ ID NO: 1263115 - RNA, 22 nt, Human
cuggagcacucaguagccagca

SEQ ID NO: 1263116 - RNA, 22 nt, Human
cuucucguucuccugaagguca

SEQ ID NO: 1263117 - RNA, 19 nt, Human
gaaagacaggaggauuugg

SEQ ID NO: 1263118 - RNA, 18 nt, Human
gaccuggccguccuggcc

SEQ ID NO: 1263119 - RNA, 18 nt, Human
gaggggggugccccaaac

SEQ ID NO: 1263120 - RNA, 19 nt, Human
gaguaucuugucccuggau

SEQ ID NO: 1263121 - RNA, 24 nt, Human
gcacaguaguuguucagguccuca

SEQ ID NO: 1263122 - RNA, 21 nt, Human
gccucuagcugguuucucugu

SEQ ID NO: 1263123 - RNA, 18 nt, Human
gcugguuucucugucucc

SEQ ID NO: 1263124 - RNA, 19 nt, Human
gcuugcaccacagcgauga

SEQ ID NO: 1263125 - RNA, 22 nt, Human
ggcagaagcuuguugugcagcc

SEQ ID NO: 1263126 - RNA, 25 nt, Human
gggaccggagcugggcagcgaagaa

SEQ ID NO: 1263127 - RNA, 19 nt, Human
gucucccucacacucugcu

SEQ ID NO: 1263128 - RNA, 18 nt, Human
gugacguugggcagaagc

SEQ ID NO: 1263129 - RNA, 19 nt, Human
gugccgggucuccagggcu

SEQ ID NO: 1263130 - RNA, 19 nt, Human
guggugaucugcgugcccc

SEQ ID NO: 1263131 - RNA, 24 nt, Human
uaaccggggucucccucacacucu

SEQ ID NO: 1263132 - RNA, 19 nt, Human
uagagguugauggugcugg

SEQ ID NO: 1263133 - RNA, 23 nt, Human
uagccacagaaucuucuucagag

SEQ ID NO: 1263134 - RNA, 19 nt, Human
uagcugguuucucugucuu

SEQ ID NO: 1263135 - RNA, 21 nt, Human
ucagccuugucugccuggagc

SEQ ID NO: 1263136 - RNA, 25 nt, Human
uccacaaacuugggguccccaagca

SEQ ID NO: 1263137 - RNA, 19 nt, Human
uccagccuggaugacggca

SEQ ID NO: 1263138 - RNA, 23 nt, Human
uccauucauuauugaacaggauc

SEQ ID NO: 1263139 - RNA, 20 nt, Human
uccccaagcaggguccucuu

SEQ ID NO: 1263140 - RNA, 19 nt, Human
ucccccaaaguccucuucc

SEQ ID NO: 1263141 - RNA, 20 nt, Human
ucccucugccucuagcuggu

SEQ ID NO: 1263142 - RNA, 22 nt, Human
ucuccacugucgugacguuggg

SEQ ID NO: 1263143 - RNA, 24 nt, Human
ucuccagggcugcagucacugccu

SEQ ID NO: 1263144 - RNA, 22 nt, Human
ucuccaguugaacucugcugug

SEQ ID NO: 1263145 - RNA, 23 nt, Human
ucucccgggagaaguuguacccu

SEQ ID NO: 1263146 - RNA, 18 nt, Human
ucugggaccggagcuggg

SEQ ID NO: 1263147 - RNA, 22 nt, Human
ugaggaaauaaccggggucucc

SEQ ID NO: 1263148 - RNA, 18 nt, Human
ugauggccagugcagugu

SEQ ID NO: 1263149 - RNA, 22 nt, Human
ugauggugcugguggcggacac

SEQ ID NO: 1263150 - RNA, 18 nt, Human
ugcagccggggcuccucc

SEQ ID NO: 1263151 - RNA, 19 nt, Human
ugcccccagcagcucccac

SEQ ID NO: 1263152 - RNA, 20 nt, Human
ugccuggagcacucaguagc

SEQ ID NO: 1263153 - RNA, 19 nt, Human
ugccugggguguuggccac

SEQ ID NO: 1263154 - RNA, 21 nt, Human
uggagcacucaguagccagca

SEQ ID NO: 1263155 - RNA, 21 nt, Human
uggaguccgaggcagcugccc

SEQ ID NO: 1263156 - RNA, 22 nt, Human
uggauugcuugucagccuuguc

SEQ ID NO: 1263157 - RNA, 22 nt, Human
uggcuggaugaaauuggcaggu

SEQ ID NO: 1263158 - RNA, 18 nt, Human
ugggugugauggugccgg

SEQ ID NO: 1263159 - RNA, 24 nt, Human
uggucagagaucugggaccggagc

SEQ ID NO: 1263160 - RNA, 19 nt, Human
uggugcugguggcggacac

SEQ ID NO: 1263161 - RNA, 21 nt, Human
ugguguggucagagaucuggg

SEQ ID NO: 1263162 - RNA, 25 nt, Human
uguagaacucgggcuuguaguagga

SEQ ID NO: 1263163 - RNA, 24 nt, Human
uguaguaggagaucgggugagugg

SEQ ID NO: 1263164 - RNA, 20 nt, Human
uguggucagagaucugggac

SEQ ID NO: 1263165 - RNA, 21 nt, Human
uguggucagagaucugggacc

SEQ ID NO: 1263166 - RNA, 20 nt, Human
uguugugcagccggggcucc

SEQ ID NO: 1263167 - RNA, 19 nt, Human
uucugcucgggggucuccc

SEQ ID NO: 1263168 - RNA, 19 nt, Human
uugaacaggaucccacuga

SEQ ID NO: 1263169 - RNA, 22 nt, Human
uugcggaccaccucagucacau

SEQ ID NO: 1263170 - RNA, 18 nt, Human
uuggugaugcugggagag

SEQ ID NO: 1263171 - RNA, 23 nt, Human
aagaacaucagggaaagaccaac

SEQ ID NO: 1263172 - RNA, 20 nt, Human
aagaauggcacgcaggguuu

SEQ ID NO: 1263173 - RNA, 24 nt, Human
aaugcuaaaggaugccagaaagaa

SEQ ID NO: 1263174 - RNA, 23 nt, Human
acaaaguaauaaacagugcgcac

SEQ ID NO: 1263175 - RNA, 22 nt, Human
acacaccugccagagcaggccc

SEQ ID NO: 1263176 - RNA, 21 nt, Human
acacacuguauccugcacaca

SEQ ID NO: 1263177 - RNA, 19 nt, Human
acucaugugauuaaaacag

SEQ ID NO: 1263178 - RNA, 21 nt, Human
acuuuccucuucugugagauu

SEQ ID NO: 1263179 - RNA, 21 nt, Human
aguaaaaaauaaaaaugcuaa

SEQ ID NO: 1263180 - RNA, 23 nt, Human
aguucucggccuuuaaacaacuc

SEQ ID NO: 1263181 - RNA, 22 nt, Human
auaagcccagagcacacacaaa

SEQ ID NO: 1263182 - RNA, 20 nt, Human
augaaacacacuguauccug

SEQ ID NO: 1263183 - RNA, 19 nt, Human
caacugcugcagcucauga

SEQ ID NO: 1263184 - RNA, 22 nt, Human
caccagaacaaaugaaacacac

SEQ ID NO: 1263185 - RNA, 19 nt, Human
caggagacagcugcacgau

SEQ ID NO: 1263186 - RNA, 23 nt, Human
caggcuccacauuguuguccagg

SEQ ID NO: 1263187 - RNA, 18 nt, Human
caucagggaaagaccaac

SEQ ID NO: 1263188 - RNA, 19 nt, Human
caucgagaaaggguacaac

SEQ ID NO: 1263189 - RNA, 21 nt, Human
caucgagaaaggguacaacug

SEQ ID NO: 1263190 - RNA, 21 nt, Human
ccagaaagaacaucagggaaa

SEQ ID NO: 1263191 - RNA, 19 nt, Human
ccagaacaaaugaaacaca

SEQ ID NO: 1263192 - RNA, 20 nt, Human
ccagaacaaaugaaacacac

SEQ ID NO: 1263193 - RNA, 19 nt, Human
ccugcacacaccugccaga

SEQ ID NO: 1263194 - RNA, 21 nt, Human
cgcuagaaaagguuuuccaca

SEQ ID NO: 1263195 - RNA, 18 nt, Human
cggccuuuaaacaacucu

SEQ ID NO: 1263196 - RNA, 18 nt, Human
cucccuggccgcuccugg

SEQ ID NO: 1263197 - RNA, 18 nt, Human
cucccuguucucggcugc

SEQ ID NO: 1263198 - RNA, 18 nt, Human
cugcacacaccugccaga

SEQ ID NO: 1263199 - RNA, 21 nt, Human
cugugcagugggguugucaug

SEQ ID NO: 1263200 - RNA, 23 nt, Human
guaaaaaauaaaaaugcuaaagg

SEQ ID NO: 1263201 - RNA, 19 nt, Human
uaaaaagcauggcagccug

SEQ ID NO: 1263202 - RNA, 24 nt, Human
uaaaaagcuccccaaaauguuaug

SEQ ID NO: 1263203 - RNA, 22 nt, Human
uaaauuagaaacacaaauaaau

SEQ ID NO: 1263204 - RNA, 19 nt, Human
uaagcccagagcacacaca

SEQ ID NO: 1263205 - RNA, 19 nt, Human
uacaaaguaauaaacagug

SEQ ID NO: 1263206 - RNA, 27 nt, Human
uacgcuagaaaagguuuuccacaucca

SEQ ID NO: 1263207 - RNA, 19 nt, Human
uaggauucaaucaaacgua

SEQ ID NO: 1263208 - RNA, 21 nt, Human
uaguuuugugcaaauaguggg

SEQ ID NO: 1263209 - RNA, 22 nt, Human
ucggccuuuaaacaacucuaaa

SEQ ID NO: 1263210 - RNA, 21 nt, Human
ugaagagcucacugugguuag

SEQ ID NO: 1263211 - RNA, 24 nt, Human
ugaauauaugugcugcaauaacau

SEQ ID NO: 1263212 - RNA, 26 nt, Human
ugaauauaugugcugcaauaacauuu

SEQ ID NO: 1263213 - RNA, 18 nt, Human
uggcaccagaacaaauga

SEQ ID NO: 1263214 - RNA, 21 nt, Human
uggcaccagaacaaaugaaac

SEQ ID NO: 1263215 - RNA, 19 nt, Human
ugggagccuuucauuccuc

SEQ ID NO: 1263216 - RNA, 23 nt, Human
ugggugcuccuagguguccugca

SEQ ID NO: 1263217 - RNA, 23 nt, Human
uguuaugacucccauccccaaua

SEQ ID NO: 1263218 - RNA, 18 nt, Human
uuuccaguucucggccuu

SEQ ID NO: 1263219 - RNA, 18 nt, Human
aacuccuagcccaguccc

SEQ ID NO: 1263220 - RNA, 19 nt, Human
aagcaagagguggcccugg

SEQ ID NO: 1263221 - RNA, 24 nt, Human
aaguccccucccagaucugugacc

SEQ ID NO: 1263222 - RNA, 21 nt, Human
acacguugcauuucucuuccu

SEQ ID NO: 1263223 - RNA, 22 nt, Human
acagcuucaccauuuugguuca

SEQ ID NO: 1263224 - RNA, 20 nt, Human
acagucccagaagggcccag

SEQ ID NO: 1263225 - RNA, 22 nt, Human
acccucccuguccucuccuggu

SEQ ID NO: 1263226 - RNA, 19 nt, Human
acccugauguccccacuuc

SEQ ID NO: 1263227 - RNA, 21 nt, Human
accuaugcaaccugcagcccc

SEQ ID NO: 1263228 - RNA, 22 nt, Human
acugaguccuggagguggucgu

SEQ ID NO: 1263229 - RNA, 20 nt, Human
acuuccaaguccugacuccu

SEQ ID NO: 1263230 - RNA, 18 nt, Human
acuugcaugacacuuccc

SEQ ID NO: 1263231 - RNA, 20 nt, Human
acuugcaugacacuucccuc

SEQ ID NO: 1263232 - RNA, 19 nt, Human
agaaagacaauaggcugcc

SEQ ID NO: 1263233 - RNA, 20 nt, Human
agaacccucccuguccucuc

SEQ ID NO: 1263234 - RNA, 22 nt, Human
agaacccucccuguccucuccu

SEQ ID NO: 1263235 - RNA, 21 nt, Human
agaggccaguguguguggggu

SEQ ID NO: 1263236 - RNA, 20 nt, Human
agagggaagccgggggaguu

SEQ ID NO: 1263237 - RNA, 27 nt, Human
agagggagggggggugggaaucugagc

SEQ ID NO: 1263238 - RNA, 20 nt, Human
agcaggcucacggaccuugg

SEQ ID NO: 1263239 - RNA, 22 nt, Human
agccuccccugcuccugccugc

SEQ ID NO: 1263240 - RNA, 19 nt, Human
aggagcagaggcgagucug

SEQ ID NO: 1263241 - RNA, 21 nt, Human
aggcagccagggcuggcagag

SEQ ID NO: 1263242 - RNA, 22 nt, Human
aggcagccagggcuggcagagc

SEQ ID NO: 1263243 - RNA, 19 nt, Human
agggcuggcagagccugcc

SEQ ID NO: 1263244 - RNA, 24 nt, Human
aucuuccuccccuuucccuuccaa

SEQ ID NO: 1263245 - RNA, 25 nt, Human
caaggacacacagcccccuucccuc

SEQ ID NO: 1263246 - RNA, 21 nt, Human
caccccgccugagggcucuac

SEQ ID NO: 1263247 - RNA, 20 nt, Human
cacugaguccuggagguggu

SEQ ID NO: 1263248 - RNA, 20 nt, Human
cagauguccuccuccaucuc

SEQ ID NO: 1263249 - RNA, 22 nt, Human
cagcacacccaagcuccugggc

SEQ ID NO: 1263250 - RNA, 22 nt, Human
cagcagcggcugcggcuaaagc

SEQ ID NO: 1263251 - RNA, 19 nt, Human
cagcccccaggcacuaccu

SEQ ID NO: 1263252 - RNA, 19 nt, Human
cagcccccuucccucccuc

SEQ ID NO: 1263253 - RNA, 20 nt, Human
cagguaccaucacagcugcu

SEQ ID NO: 1263254 - RNA, 23 nt, Human
cauccuccauuccguccaacucc

SEQ ID NO: 1263255 - RNA, 21 nt, Human
caugcaaggacacacagcccc

SEQ ID NO: 1263256 - RNA, 19 nt, Human
ccaaaaagaauggcaugca

SEQ ID NO: 1263257 - RNA, 19 nt, Human
ccacuuccaaguccugacu

SEQ ID NO: 1263258 - RNA, 24 nt, Human
ccagcaggcucacggaccuuggcc

SEQ ID NO: 1263259 - RNA, 23 nt, Human
ccagccccucuuuuccaggaacc

SEQ ID NO: 1263260 - RNA, 20 nt, Human
ccagcucccagccugggagu

SEQ ID NO: 1263261 - RNA, 21 nt, Human
ccaggaaccuugccacgccca

SEQ ID NO: 1263262 - RNA, 23 nt, Human
ccagggucccuucaguggacccu

SEQ ID NO: 1263263 - RNA, 18 nt, Human
ccaguguguguggggugg

SEQ ID NO: 1263264 - RNA, 23 nt, Human
ccaucuuccuccccuuucccuuc

SEQ ID NO: 1263265 - RNA, 18 nt, Human
cccaagcaagagguggcc

SEQ ID NO: 1263266 - RNA, 20 nt, Human
ccccagggaucacugagucc

SEQ ID NO: 1263267 - RNA, 20 nt, Human
ccccuuucccuuccagcccc

SEQ ID NO: 1263268 - RNA, 23 nt, Human
cccgccugagggcucuacucacc

SEQ ID NO: 1263269 - RNA, 19 nt, Human
cccggggcucccccgcggg

SEQ ID NO: 1263270 - RNA, 24 nt, Human
cccuccaucuuccuccccuuuccc

SEQ ID NO: 1263271 - RNA, 21 nt, Human
cccucuuuuccaggaaccuug

SEQ ID NO: 1263272 - RNA, 21 nt, Human
cccugccuuccccaggguccc

SEQ ID NO: 1263273 - RNA, 21 nt, Human
cccugcuccugccugcccacc

SEQ ID NO: 1263274 - RNA, 18 nt, Human
cccugggccaguggguug

SEQ ID NO: 1263275 - RNA, 22 nt, Human
cccuuccagccccucuuuucca

SEQ ID NO: 1263276 - RNA, 22 nt, Human
ccuccccuuucccuuccagccc

SEQ ID NO: 1263277 - RNA, 24 nt, Human
ccucccugccuuccccaggguccc

SEQ ID NO: 1263278 - RNA, 19 nt, Human
ccucccuguccucuccugg

SEQ ID NO: 1263279 - RNA, 22 nt, Human
ccugcccucccugccuucccca

SEQ ID NO: 1263280 - RNA, 19 nt, Human
ccugccugcccaccccgcc

SEQ ID NO: 1263281 - RNA, 23 nt, Human
ccugcucacuguccagauguccu

SEQ ID NO: 1263282 - RNA, 18 nt, Human
ccugcuccugccugccca

SEQ ID NO: 1263283 - RNA, 22 nt, Human
cgcggagaaagacaauaggcug

SEQ ID NO: 1263284 - RNA, 20 nt, Human
cggccacuggaccacaggag

SEQ ID NO: 1263285 - RNA, 19 nt, Human
cggcucccggggcuccccc

SEQ ID NO: 1263286 - RNA, 22 nt, Human
cggucaucccacaacacacuuc

SEQ ID NO: 1263287 - RNA, 23 nt, Human
cuacugaagcacuacugccagcc

SEQ ID NO: 1263288 - RNA, 27 nt, Human
cucacuguccagauguccuccuccauc

SEQ ID NO: 1263289 - RNA, 21 nt, Human
cuccagccagccaucccuuac

SEQ ID NO: 1263290 - RNA, 19 nt, Human
cucccuccaucuuccuccc

SEQ ID NO: 1263291 - RNA, 21 nt, Human
cucccucuucugcuuuuccca

SEQ ID NO: 1263292 - RNA, 22 nt, Human
cuccuagcccagucccgggggc

SEQ ID NO: 1263293 - RNA, 20 nt, Human
cuccuccaucuccgugcggc

SEQ ID NO: 1263294 - RNA, 23 nt, Human
cuccugggcuauuggggcuccua

SEQ ID NO: 1263295 - RNA, 19 nt, Human
cugccgccuucuguccagc

SEQ ID NO: 1263296 - RNA, 22 nt, Human
cugccgcggagucucccucuuc

SEQ ID NO: 1263297 - RNA, 23 nt, Human
cuggaccucgguguccccaucug

SEQ ID NO: 1263298 - RNA, 24 nt, Human
cuggaucugcugugcagugggguu

SEQ ID NO: 1263299 - RNA, 19 nt, Human
cuggcagagccugcccccc

SEQ ID NO: 1263300 - RNA, 21 nt, Human
cuuaaguccccucccagaucu

SEQ ID NO: 1263301 - RNA, 21 nt, Human
cuuccuuucuucucgcugucc

SEQ ID NO: 1263302 - RNA, 23 nt, Human
cuuucccuuccagccccucuuuu

SEQ ID NO: 1263303 - RNA, 18 nt, Human
gaagagggaagccggggg

SEQ ID NO: 1263304 - RNA, 21 nt, Human
gacaauaggcugccucucccc

SEQ ID NO: 1263305 - RNA, 21 nt, Human
gaucuucagagagagggaggg

SEQ ID NO: 1263306 - RNA, 24 nt, Human
gcaaggcagccagggcuggcagag

SEQ ID NO: 1263307 - RNA, 25 nt, Human
gcccacacguugcauuucucuuccu

SEQ ID NO: 1263308 - RNA, 20 nt, Human
gcccccuucccucccuccca

SEQ ID NO: 1263309 - RNA, 20 nt, Human
gccugggugcuccuggggag

SEQ ID NO: 1263310 - RNA, 19 nt, Human
gcggcagcagcggcugcgg

SEQ ID NO: 1263311 - RNA, 22 nt, Human
gcggcucccggggcucccccgc

SEQ ID NO: 1263312 - RNA, 21 nt, Human
ggaaccuugccacgcccacac

SEQ ID NO: 1263313 - RNA, 22 nt, Human
ggaagauggggugaccacagaa

SEQ ID NO: 1263314 - RNA, 21 nt, Human
ggcagccagggcuggcagagc

SEQ ID NO: 1263315 - RNA, 18 nt, Human
ggcggcggcagcagcggc

SEQ ID NO: 1263316 - RNA, 22 nt, Human
ggcugggucccuggccagcacu

SEQ ID NO: 1263317 - RNA, 21 nt, Human
gggaagccgggggaguugagc

SEQ ID NO: 1263318 - RNA, 18 nt, Human
gggaaucugagcacagug

SEQ ID NO: 1263319 - RNA, 19 nt, Human
gggcucgucccaccugccg

SEQ ID NO: 1263320 - RNA, 22 nt, Human
ggggagguggaucuuccagucg

SEQ ID NO: 1263321 - RNA, 21 nt, Human
ggggcuccuagagugggcuca

SEQ ID NO: 1263322 - RNA, 20 nt, Human
gggucccuggccagcacuac

SEQ ID NO: 1263323 - RNA, 23 nt, Human
ggguggggaggaccgccacagcc

SEQ ID NO: 1263324 - RNA, 23 nt, Human
ggucugaacuguggguggacugc

SEQ ID NO: 1263325 - RNA, 18 nt, Human
gguggggaggaccgccac

SEQ ID NO: 1263326 - RNA, 22 nt, Human
gguggggaggaccgccacagcc

SEQ ID NO: 1263327 - RNA, 23 nt, Human
gucuuuuccucuggaccucggug

SEQ ID NO: 1263328 - RNA, 19 nt, Human
guucaagcaguguuccuuc

SEQ ID NO: 1263329 - RNA, 24 nt, Human
guuuaucucccuguucuugggagc

SEQ ID NO: 1263330 - RNA, 19 nt, Human
uacaggaagcagcugcugg

SEQ ID NO: 1263331 - RNA, 24 nt, Human
uagcuucucccuccaucuuccucc

SEQ ID NO: 1263332 - RNA, 20 nt, Human
uaggauaaaagccugagagu

SEQ ID NO: 1263333 - RNA, 25 nt, Human
uaggcugccucucccccggcggcgg

SEQ ID NO: 1263334 - RNA, 22 nt, Human
ucagcaggguucugggcaaugg

SEQ ID NO: 1263335 - RNA, 21 nt, Human
ucaguggacccugggcuuucu

SEQ ID NO: 1263336 - RNA, 19 nt, Human
uccacgcuaucagugaggc

SEQ ID NO: 1263337 - RNA, 27 nt, Human
uccagcgcacagucccagaagggcccc

SEQ ID NO: 1263338 - RNA, 23 nt, Human
ucccccgcgggccgagccgagac

SEQ ID NO: 1263339 - RNA, 22 nt, Human
ucccugccuuccccaggguccc

SEQ ID NO: 1263340 - RNA, 19 nt, Human
uccggccacuggaccacag

SEQ ID NO: 1263341 - RNA, 21 nt, Human
uccggccacuggaccacagga

SEQ ID NO: 1263342 - RNA, 19 nt, Human
uccgugcggcucccggggc

SEQ ID NO: 1263343 - RNA, 22 nt, Human
uccuagagugggcucaucagca

SEQ ID NO: 1263344 - RNA, 22 nt, Human
uccuuucuucucgcuguccucc

SEQ ID NO: 1263345 - RNA, 18 nt, Human
ucuacucaccacccugcu

SEQ ID NO: 1263346 - RNA, 26 nt, Human
ucuagcuucucccuccaucuuccucc

SEQ ID NO: 1263347 - RNA, 21 nt, Human
ucucccucuucugcuuuuccc

SEQ ID NO: 1263348 - RNA, 22 nt, Human
ucugcuuuucccagcaggaagg

SEQ ID NO: 1263349 - RNA, 20 nt, Human
ucugucaggcuugguggcug

SEQ ID NO: 1263350 - RNA, 21 nt, Human
ucugucaggcuugguggcugu

SEQ ID NO: 1263351 - RNA, 22 nt, Human
ugaccacagaagagggaagccg

SEQ ID NO: 1263352 - RNA, 20 nt, Human
ugacuccuuugagccauccc

SEQ ID NO: 1263353 - RNA, 20 nt, Human
ugagaaaaggcaguggggag

SEQ ID NO: 1263354 - RNA, 21 nt, Human
ugagaaaaggcaguggggagg

SEQ ID NO: 1263355 - RNA, 23 nt, Human
ugagaaaaggcaguggggaggug

SEQ ID NO: 1263356 - RNA, 22 nt, Human
ugccagggcagguauccagcuc

SEQ ID NO: 1263357 - RNA, 20 nt, Human
ugcccagagaggggccucug

SEQ ID NO: 1263358 - RNA, 23 nt, Human
ugccugggugcuccuggggaguc

SEQ ID NO: 1263359 - RNA, 20 nt, Human
ugcuccugccugcccacccc

SEQ ID NO: 1263360 - RNA, 26 nt, Human
uggauuuccuucagcuacccugaugu

SEQ ID NO: 1263361 - RNA, 20 nt, Human
ugggcuuucugacugcccag

SEQ ID NO: 1263362 - RNA, 19 nt, Human
uggggagaacccucccugu

SEQ ID NO: 1263363 - RNA, 21 nt, Human
ugugagccuccccugcuccug

SEQ ID NO: 1263364 - RNA, 18 nt, Human
ugugcuauucagccaagg

SEQ ID NO: 1263365 - RNA, 24 nt, Human
uuacagcuucaccauuuugguuca

SEQ ID NO: 1263366 - RNA, 20 nt, Human
uucagagagagggagggggg

SEQ ID NO: 1263367 - RNA, 23 nt, Human
uucaguggacccugggcuuucug

SEQ ID NO: 1263368 - RNA, 20 nt, Human
uuccguccaacuccuagccc

SEQ ID NO: 1263369 - RNA, 24 nt, Human
uuccuccccuuucccuuccagccc

SEQ ID NO: 1263370 - RNA, 19 nt, Human
uugaggagggggcuguggg

SEQ ID NO: 1263371 - RNA, 18 nt, Human
uugguggcuguugggugg

SEQ ID NO: 1263372 - RNA, 18 nt, Human
uugguucaagcaguguuc

SEQ ID NO: 1263373 - RNA, 19 nt, Human
uuuugaggagggggcugug

SEQ ID NO: 1263374 - RNA, 21 nt, Human
aacauuaaaaaagcauggcag

SEQ ID NO: 1263375 - RNA, 23 nt, Human
aagaacaucagggaaagaccaac

SEQ ID NO: 1263376 - RNA, 20 nt, Human
aagaauggcacgcaggguuu

SEQ ID NO: 1263377 - RNA, 24 nt, Human
aaugcuaaaggaugccagaaagaa

SEQ ID NO: 1263378 - RNA, 21 nt, Human
acaaaguaauaaacagugcuc

SEQ ID NO: 1263379 - RNA, 22 nt, Human
acacaccugccagagcaggccc

SEQ ID NO: 1263380 - RNA, 24 nt, Human
acauccugcucaccggcagcccca

SEQ ID NO: 1263381 - RNA, 19 nt, Human
acucaugugauuaaaacag

SEQ ID NO: 1263382 - RNA, 20 nt, Human
acucccauccccaauacaca

SEQ ID NO: 1263383 - RNA, 23 nt, Human
acugcccccuggcuuucauauac

SEQ ID NO: 1263384 - RNA, 18 nt, Human
acuucauaacauccugcu

SEQ ID NO: 1263385 - RNA, 21 nt, Human
acuuuccucuucugugagauu

SEQ ID NO: 1263386 - RNA, 18 nt, Human
agagcucacugugguuag

SEQ ID NO: 1263387 - RNA, 22 nt, Human
agcuagaaaagguuuuccacag

SEQ ID NO: 1263388 - RNA, 24 nt, Human
aggcuguuuccaguucuuggccuu

SEQ ID NO: 1263389 - RNA, 23 nt, Human
aguucuuggccuuuaaacaacuc

SEQ ID NO: 1263390 - RNA, 22 nt, Human
auccugcucaccggcagcccca

SEQ ID NO: 1263391 - RNA, 22 nt, Human
augagcccagagcacauacaaa

SEQ ID NO: 1263392 - RNA, 27 nt, Human
caacaccaacucuugcagcuccagcag

SEQ ID NO: 1263393 - RNA, 26 nt, Human
caacucuugcagcuccagcagcuuca

SEQ ID NO: 1263394 - RNA, 19 nt, Human
caacugcugcagcucauga

SEQ ID NO: 1263395 - RNA, 22 nt, Human
caccagaacaaaugaaacacac

SEQ ID NO: 1263396 - RNA, 20 nt, Human
caccggcagccccaaguucc

SEQ ID NO: 1263397 - RNA, 19 nt, Human
caggagacagcugcacgau

SEQ ID NO: 1263398 - RNA, 23 nt, Human
caggcuccacguuguuguccagg

SEQ ID NO: 1263399 - RNA, 19 nt, Human
caucaagaaaggguacaac

SEQ ID NO: 1263400 - RNA, 21 nt, Human
caucaagaaaggguacaacug

SEQ ID NO: 1263401 - RNA, 18 nt, Human
caucagggaaagaccaac

SEQ ID NO: 1263402 - RNA, 19 nt, Human
caucuccuccuccuucugg

SEQ ID NO: 1263403 - RNA, 19 nt, Human
cauuuuaucugaauucugg

SEQ ID NO: 1263404 - RNA, 21 nt, Human
ccagaaagaacaucagggaaa

SEQ ID NO: 1263405 - RNA, 19 nt, Human
ccagaacaaaugaaacaca

SEQ ID NO: 1263406 - RNA, 20 nt, Human
ccagaacaaaugaaacacac

SEQ ID NO: 1263407 - RNA, 18 nt, Human
ccagagcacauacaaauc

SEQ ID NO: 1263408 - RNA, 19 nt, Human
ccugcacacaccugccaga

SEQ ID NO: 1263409 - RNA, 18 nt, Human
ccuggggggcuggggccc

SEQ ID NO: 1263410 - RNA, 24 nt, Human
cgauaugcauacuaaugaccuaca

SEQ ID NO: 1263411 - RNA, 18 nt, Human
cuccagcagcuucaccuu

SEQ ID NO: 1263412 - RNA, 18 nt, Human
cucccuggccgcuccugg

SEQ ID NO: 1263413 - RNA, 18 nt, Human
cucccuguucucggcugc

SEQ ID NO: 1263414 - RNA, 18 nt, Human
cugaugacauccuccauc

SEQ ID NO: 1263415 - RNA, 18 nt, Human
cugcacacaccugccaga

SEQ ID NO: 1263416 - RNA, 22 nt, Human
cugcucaccggcagccccaagu

SEQ ID NO: 1263417 - RNA, 21 nt, Human
cuguacagugggguugucaug

SEQ ID NO: 1263418 - RNA, 19 nt, Human
cuucauaacauccugcucc

SEQ ID NO: 1263419 - RNA, 19 nt, Human
gagcacauacaaauccuaa

SEQ ID NO: 1263420 - RNA, 19 nt, Human
gagcccagagcacauacaa

SEQ ID NO: 1263421 - RNA, 22 nt, Human
gcacugcccccuggcuuucaua

SEQ ID NO: 1263422 - RNA, 20 nt, Human
gcucacuucauaacauccug

SEQ ID NO: 1263423 - RNA, 24 nt, Human
gcuggggccccuggagugggcuca

SEQ ID NO: 1263424 - RNA, 18 nt, Human
ggacucucucaugccguc

SEQ ID NO: 1263425 - RNA, 19 nt, Human
ggggcuggggccccuggag

SEQ ID NO: 1263426 - RNA, 22 nt, Human
uaaauuagaaacacaaauaaau

SEQ ID NO: 1263427 - RNA, 27 nt, Human
uaagcuagaaaagguuuuccacaucca

SEQ ID NO: 1263428 - RNA, 19 nt, Human
uacaaaguaauaaacagug

SEQ ID NO: 1263429 - RNA, 19 nt, Human
uagaagaauggcacgcagg

SEQ ID NO: 1263430 - RNA, 26 nt, Human
ucauaacauccugcucaccggcagcc

SEQ ID NO: 1263431 - RNA, 18 nt, Human
ucauagcagaacauaagc

SEQ ID NO: 1263432 - RNA, 18 nt, Human
ucaugguugcccacaagg

SEQ ID NO: 1263433 - RNA, 20 nt, Human
ucugaauucuggaaugaaua

SEQ ID NO: 1263434 - RNA, 24 nt, Human
ugaauauacaugcugcaauaacau

SEQ ID NO: 1263435 - RNA, 22 nt, Human
ugcaugacaggagacagcugca

SEQ ID NO: 1263436 - RNA, 21 nt, Human
ugccgcguguuuggcacugcc

SEQ ID NO: 1263437 - RNA, 20 nt, Human
ugccugguagaagaauggca

SEQ ID NO: 1263438 - RNA, 22 nt, Human
uggaaugaauauacaugcugca

SEQ ID NO: 1263439 - RNA, 18 nt, Human
uggcaccagaacaaauga

SEQ ID NO: 1263440 - RNA, 21 nt, Human
uggcaccagaacaaaugaaac

SEQ ID NO: 1263441 - RNA, 18 nt, Human
uggccuuuaaacaacucu

SEQ ID NO: 1263442 - RNA, 19 nt, Human
ugggagccuuucauuccuc

SEQ ID NO: 1263443 - RNA, 19 nt, Human
uggggccccuggagugggc

SEQ ID NO: 1263444 - RNA, 19 nt, Human
uggggccccuggagugggc

SEQ ID NO: 1263445 - RNA, 23 nt, Human
ugggugcuccuagguguccugca

SEQ ID NO: 1263446 - RNA, 22 nt, Human
uuaaaaauaaaaaugcuaaagg

SEQ ID NO: 1263447 - RNA, 23 nt, Human
uuccuggggggcuggggccccug

SEQ ID NO: 1263448 - RNA, 24 nt, Human
uuccuggggggcuggggccccugg

SEQ ID NO: 1263449 - RNA, 21 nt, Human
uugccaugccccucaugguug

SEQ ID NO: 1263450 - RNA, 21 nt, Human
uuggcacugcccccuggcuuu

SEQ ID NO: 1263451 - RNA, 22 nt, Human
uuggccuuuaaacaacucuaaa

SEQ ID NO: 1263452 - RNA, 18 nt, Human
aaaacaaagguguagaac

SEQ ID NO: 1263453 - RNA, 21 nt, Human
aaacaggccauagccaacucg

SEQ ID NO: 1263454 - RNA, 20 nt, Human
acaagaccacuguuaaaagc

SEQ ID NO: 1263455 - RNA, 19 nt, Human
accacuguuaaaagcccgg

SEQ ID NO: 1263456 - RNA, 18 nt, Human
accagccccagcuucccu

SEQ ID NO: 1263457 - RNA, 19 nt, Human
accaugguaggcauuaccg

SEQ ID NO: 1263458 - RNA, 18 nt, Human
acccagcacaucaccugg

SEQ ID NO: 1263459 - RNA, 19 nt, Human
acccaggcuggagugcagu

SEQ ID NO: 1263460 - RNA, 23 nt, Human
acccaggcuggagugcaguggug

SEQ ID NO: 1263461 - RNA, 20 nt, Human
accgcgccgcucccgccucc

SEQ ID NO: 1263462 - RNA, 18 nt, Human
acugcagccucaaccucc

SEQ ID NO: 1263463 - RNA, 18 nt, Human
agaaaaccccagccaugu

SEQ ID NO: 1263464 - RNA, 22 nt, Human
agaaaaccccagccaugucacc

SEQ ID NO: 1263465 - RNA, 19 nt, Human
agacccggggcucccggcg

SEQ ID NO: 1263466 - RNA, 20 nt, Human
agacccggggcucccggcgg

SEQ ID NO: 1263467 - RNA, 18 nt, Human
agcagcgcguucauccac

SEQ ID NO: 1263468 - RNA, 24 nt, Human
agcaguggcgagaggaagucaugg

SEQ ID NO: 1263469 - RNA, 21 nt, Human
aggccuaggcccuccaccccc

SEQ ID NO: 1263470 - RNA, 19 nt, Human
aggcggguuagcaguggcc

SEQ ID NO: 1263471 - RNA, 18 nt, Human
aggguuugggacccagca

SEQ ID NO: 1263472 - RNA, 20 nt, Human
aguagcugggacaaccaugc

SEQ ID NO: 1263473 - RNA, 20 nt, Human
agugcaguggugcgaucaug

SEQ ID NO: 1263474 - RNA, 23 nt, Human
agugcaguggugcgaucauggcu

SEQ ID NO: 1263475 - RNA, 24 nt, Human
agugcaguggugcgaucauggcuc

SEQ ID NO: 1263476 - RNA, 25 nt, Human
auucugucacccaggcuggagugca

SEQ ID NO: 1263477 - RNA, 22 nt, Human
caaaagcugcuugugucuaaaa

SEQ ID NO: 1263478 - RNA, 24 nt, Human
caacggcaccaacuauucgcggag

SEQ ID NO: 1263479 - RNA, 20 nt, Human
caacuauucgcggagcugga

SEQ ID NO: 1263480 - RNA, 19 nt, Human
caacucgccccucacccag

SEQ ID NO: 1263481 - RNA, 24 nt, Human
cacaagagguguggggagcggcag

SEQ ID NO: 1263482 - RNA, 21 nt, Human
caccaacggcaccaacuauuc

SEQ ID NO: 1263483 - RNA, 19 nt, Human
caccaacggcacugggacc

SEQ ID NO: 1263484 - RNA, 24 nt, Human
cacccaggcuggagugcaguggug

SEQ ID NO: 1263485 - RNA, 18 nt, Human
caccgcgccgcucccgcc

SEQ ID NO: 1263486 - RNA, 19 nt, Human
cacugcagccucaaccucc

SEQ ID NO: 1263487 - RNA, 26 nt, Human
cacugugcuugacuuugucgggcccg

SEQ ID NO: 1263488 - RNA, 23 nt, Human
cacuucugaaaguugcaccagcc

SEQ ID NO: 1263489 - RNA, 23 nt, Human
cagccucaaccuccugggcgcaa

SEQ ID NO: 1263490 - RNA, 21 nt, Human
caguggugcgaucauggcuca

SEQ ID NO: 1263491 - RNA, 19 nt, Human
cauagccaacucgccccuc

SEQ ID NO: 1263492 - RNA, 23 nt, Human
cauagccaacucgccccucaccc

SEQ ID NO: 1263493 - RNA, 24 nt, Human
cauucugucacccaggcuggagug

SEQ ID NO: 1263494 - RNA, 23 nt, Human
ccaaaaaugccucugcgaauccc

SEQ ID NO: 1263495 - RNA, 23 nt, Human
ccacuucugaaaguugcaccagc

SEQ ID NO: 1263496 - RNA, 21 nt, Human
ccagugguacuccuaaugacu

SEQ ID NO: 1263497 - RNA, 19 nt, Human
cccagcacaucaccuggca

SEQ ID NO: 1263498 - RNA, 21 nt, Human
cccagcacaucaccuggcaca

SEQ ID NO: 1263499 - RNA, 18 nt, Human
cccccgcccgccgccgcc

SEQ ID NO: 1263500 - RNA, 23 nt, Human
cccccgggagccgggcgcagcuu

SEQ ID NO: 1263501 - RNA, 21 nt, Human
ccccgccccgaccucccgggc

SEQ ID NO: 1263502 - RNA, 22 nt, Human
ccccgccccgaccucccgggcu

SEQ ID NO: 1263503 - RNA, 22 nt, Human
ccccgcccgccgccgccuccuc

SEQ ID NO: 1263504 - RNA, 21 nt, Human
ccccggcugggggaggaaggc

SEQ ID NO: 1263505 - RNA, 22 nt, Human
ccccggggucucggcugagcgg

SEQ ID NO: 1263506 - RNA, 19 nt, Human
cccgccgccgccuccuccu

SEQ ID NO: 1263507 - RNA, 27 nt, Human
cccggggcugaagccgagacccggggc

SEQ ID NO: 1263508 - RNA, 25 nt, Human
ccgaugaccuuuucccggacuuccu

SEQ ID NO: 1263509 - RNA, 24 nt, Human
ccgcagagccccggggucucggcu

SEQ ID NO: 1263510 - RNA, 18 nt, Human
ccgcccgccgccgccucc

SEQ ID NO: 1263511 - RNA, 20 nt, Human
ccgccugcuccucgucgucc

SEQ ID NO: 1263512 - RNA, 20 nt, Human
ccgccugcuccucgucgucc

SEQ ID NO: 1263513 - RNA, 18 nt, Human
ccggcccgggaccccgcc

SEQ ID NO: 1263514 - RNA, 21 nt, Human
ccuaggcccuccacccccggg

SEQ ID NO: 1263515 - RNA, 20 nt, Human
ccuccuccuucuccuccuuc

SEQ ID NO: 1263516 - RNA, 18 nt, Human
ccuccuucuccuccuucu

SEQ ID NO: 1263517 - RNA, 19 nt, Human
ccuccuucuccuccuucuc

SEQ ID NO: 1263518 - RNA, 20 nt, Human
ccuccuucuccuccuucucc

SEQ ID NO: 1263519 - RNA, 24 nt, Human
ccuccuucucggcuuccuccucag

SEQ ID NO: 1263520 - RNA, 22 nt, Human
ccucgggcgggccgaggccuag

SEQ ID NO: 1263521 - RNA, 21 nt, Human
ccucgucguccucguccuccg

SEQ ID NO: 1263522 - RNA, 18 nt, Human
ccucuccccucccugcuu

SEQ ID NO: 1263523 - RNA, 22 nt, Human
ccugugcugcgggcucaggcgg

SEQ ID NO: 1263524 - RNA, 23 nt, Human
ccuguggcuuugcaggagcuccg

SEQ ID NO: 1263525 - RNA, 19 nt, Human
cgagaggaagucaugggug

SEQ ID NO: 1263526 - RNA, 19 nt, Human
cggcggcaccaacggcacc

SEQ ID NO: 1263527 - RNA, 21 nt, Human
cggcggcgcggccagcggagc

SEQ ID NO: 1263528 - RNA, 18 nt, Human
cggcuuccuccucagccc

SEQ ID NO: 1263529 - RNA, 21 nt, Human
cucacugcagccucaaccucc

SEQ ID NO: 1263530 - RNA, 24 nt, Human
cucacugcagccucaaccuccugg

SEQ ID NO: 1263531 - RNA, 24 nt, Human
cucauucugucacccaggcuggag

SEQ ID NO: 1263532 - RNA, 18 nt, Human
cuccccuucauccaccuc

SEQ ID NO: 1263533 - RNA, 21 nt, Human
cuccuccgccccggcuggggg

SEQ ID NO: 1263534 - RNA, 22 nt, Human
cuccuccuucuccuccuucucc

SEQ ID NO: 1263535 - RNA, 21 nt, Human
cucguccuccgcggccccggc

SEQ ID NO: 1263536 - RNA, 22 nt, Human
cucuccccucccugcuuguuca

SEQ ID NO: 1263537 - RNA, 18 nt, Human
cucugccuccugaguagc

SEQ ID NO: 1263538 - RNA, 21 nt, Human
cucuugccaaaaagcuuccaa

SEQ ID NO: 1263539 - RNA, 23 nt, Human
cugcaaaccuucuuucagguuuc

SEQ ID NO: 1263540 - RNA, 18 nt, Human
cugcacugagucuccucc

SEQ ID NO: 1263541 - RNA, 22 nt, Human
cugcagccucaaccuccugggc

SEQ ID NO: 1263542 - RNA, 21 nt, Human
cugccgccaccgccugcuccu

SEQ ID NO: 1263543 - RNA, 22 nt, Human
cugccgccaccgccugcuccuc

SEQ ID NO: 1263544 - RNA, 19 nt, Human
cuucauccaccucucucuc

SEQ ID NO: 1263545 - RNA, 19 nt, Human
cuucccccgcccgccgccg

SEQ ID NO: 1263546 - RNA, 18 nt, Human
gaacacagcuuggcaggc

SEQ ID NO: 1263547 - RNA, 23 nt, Human
gacccagcacaucaccuggcaca

SEQ ID NO: 1263548 - RNA, 19 nt, Human
gaccucccgggcuccgccu

SEQ ID NO: 1263549 - RNA, 23 nt, Human
gacgucgccuccccuucauccac

SEQ ID NO: 1263550 - RNA, 24 nt, Human
gagccgcagagccccggggucucg

SEQ ID NO: 1263551 - RNA, 22 nt, Human
gagcgggguguuggcggcggcc

SEQ ID NO: 1263552 - RNA, 23 nt, Human
gaggaagcguaagugauguccac

SEQ ID NO: 1263553 - RNA, 21 nt, Human
gaggaaggccgcggggaggcg

SEQ ID NO: 1263554 - RNA, 21 nt, Human
gagguguggggagcggcagca

SEQ ID NO: 1263555 - RNA, 19 nt, Human
gaucauggcucacugcagc

SEQ ID NO: 1263556 - RNA, 18 nt, Human
gcaccaacggcaccaacu

SEQ ID NO: 1263557 - RNA, 25 nt, Human
gcacugagucuccuccaaccggagg

SEQ ID NO: 1263558 - RNA, 18 nt, Human
gcagaaugccuuuguucc

SEQ ID NO: 1263559 - RNA, 19 nt, Human
gccauagccaacucgcccc

SEQ ID NO: 1263560 - RNA, 21 nt, Human
gccccgaccucccgggcuccg

SEQ ID NO: 1263561 - RNA, 21 nt, Human
gccgcagagccccggggucuc

SEQ ID NO: 1263562 - RNA, 19 nt, Human
gccucaaccuccugggcgc

SEQ ID NO: 1263563 - RNA, 21 nt, Human
gccugcuccucgucguccucg

SEQ ID NO: 1263564 - RNA, 21 nt, Human
gccuuuguucccgaauccugg

SEQ ID NO: 1263565 - RNA, 18 nt, Human
gcggcgcggccagcggag

SEQ ID NO: 1263566 - RNA, 24 nt, Human
gcggcggcggcggcaccaacggca

SEQ ID NO: 1263567 - RNA, 21 nt, Human
gcucacugcagccucaaccuc

SEQ ID NO: 1263568 - RNA, 22 nt, Human
gcuggaaugacuggcaacccag

SEQ ID NO: 1263569 - RNA, 19 nt, Human
ggaggcgaggccuaagugc

SEQ ID NO: 1263570 - RNA, 20 nt, Human
ggaucaaaggggacgaaggu

SEQ ID NO: 1263571 - RNA, 19 nt, Human
ggccggagcgggguguugg

SEQ ID NO: 1263572 - RNA, 26 nt, Human
ggccuaggcccuccacccccgggagc

SEQ ID NO: 1263573 - RNA, 21 nt, Human
ggcugagcggcggcggcggca

SEQ ID NO: 1263574 - RNA, 22 nt, Human
ggcugggggaggaaggccgcgg

SEQ ID NO: 1263575 - RNA, 21 nt, Human
gguguggggagcggcagcagc

SEQ ID NO: 1263576 - RNA, 21 nt, Human
guacggagcagaaauguguug

SEQ ID NO: 1263577 - RNA, 22 nt, Human
gucaggcaaccaccaacggcac

SEQ ID NO: 1263578 - RNA, 22 nt, Human
uaaaaugguccauggagagcaa

SEQ ID NO: 1263579 - RNA, 23 nt, Human
uaaauuuagcucuugccaaaaag

SEQ ID NO: 1263580 - RNA, 20 nt, Human
uaaccaaaagaucuaggcau

SEQ ID NO: 1263581 - RNA, 20 nt, Human
uaagugccucuccccucccu

SEQ ID NO: 1263582 - RNA, 24 nt, Human
ucacccaggcuggagugcaguggu

SEQ ID NO: 1263583 - RNA, 19 nt, Human
ucaccuggcacagucagug

SEQ ID NO: 1263584 - RNA, 23 nt, Human
ucacugcagccucaaccuccugg

SEQ ID NO: 1263585 - RNA, 24 nt, Human
ucacugcagccucaaccuccuggg

SEQ ID NO: 1263586 - RNA, 24 nt, Human
ucagcacacagggaucaaagggga

SEQ ID NO: 1263587 - RNA, 22 nt, Human
ucauucugucacccaggcugga

SEQ ID NO: 1263588 - RNA, 24 nt, Human
ucauucugucacccaggcuggagu

SEQ ID NO: 1263589 - RNA, 18 nt, Human
uccaguggguuugugcag

SEQ ID NO: 1263590 - RNA, 19 nt, Human
ucccgggcuccgccucggg

SEQ ID NO: 1263591 - RNA, 18 nt, Human
ucccugaggacaaggcug

SEQ ID NO: 1263592 - RNA, 21 nt, Human
ucccugcuuguucagcccggg

SEQ ID NO: 1263593 - RNA, 20 nt, Human
uccugaguagcugggacaac

SEQ ID NO: 1263594 - RNA, 21 nt, Human
uccugcaauuuuuuccaaaga

SEQ ID NO: 1263595 - RNA, 19 nt, Human
uccugggucuccuccgccc

SEQ ID NO: 1263596 - RNA, 23 nt, Human
ucucauucugucacccaggcugg

SEQ ID NO: 1263597 - RNA, 24 nt, Human
ucucauucugucacccaggcugga

SEQ ID NO: 1263598 - RNA, 20 nt, Human
ucuccuccuucucggcuucc

SEQ ID NO: 1263599 - RNA, 21 nt, Human
ucugcacugagucuccuccag

SEQ ID NO: 1263600 - RNA, 24 nt, Human
ucugucacccaggcuggagugcag

SEQ ID NO: 1263601 - RNA, 25 nt, Human
ugaagauacugcaaaccuucuuuca

SEQ ID NO: 1263602 - RNA, 20 nt, Human
ugagagaaaaccccagccau

SEQ ID NO: 1263603 - RNA, 18 nt, Human
ugaggacaaggcugaguc

SEQ ID NO: 1263604 - RNA, 19 nt, Human
ugaggacaaggcugaguca

SEQ ID NO: 1263605 - RNA, 23 nt, Human
ugaggacaaggcugagucacgaa

SEQ ID NO: 1263606 - RNA, 22 nt, Human
ugagugccagggcugggucugg

SEQ ID NO: 1263607 - RNA, 23 nt, Human
ugauggcaggauuacuuggaucc

SEQ ID NO: 1263608 - RNA, 22 nt, Human
ugcaguggugcgaucauggcuc

SEQ ID NO: 1263609 - RNA, 22 nt, Human
ugccaaaaagcuuccaauauaa

SEQ ID NO: 1263610 - RNA, 20 nt, Human
ugccgccaccgccugcuccc

SEQ ID NO: 1263611 - RNA, 18 nt, Human
ugcuugugucuaaaaaca

SEQ ID NO: 1263612 - RNA, 23 nt, Human
uggaaugacuggcaacccaggug

SEQ ID NO: 1263613 - RNA, 19 nt, Human
uggacgaggcugagcugca

SEQ ID NO: 1263614 - RNA, 21 nt, Human
uggagugcaguggugcgauca

SEQ ID NO: 1263615 - RNA, 24 nt, Human
uggagugcaguggugcgaucaugg

SEQ ID NO: 1263616 - RNA, 20 nt, Human
uggcagcaucuggcgauugu

SEQ ID NO: 1263617 - RNA, 19 nt, Human
uggcgagaggaagucaugg

SEQ ID NO: 1263618 - RNA, 24 nt, Human
uggcucacugcagccucaaccucc

SEQ ID NO: 1263619 - RNA, 22 nt, Human
ugggacaaccaugcccggcuaa

SEQ ID NO: 1263620 - RNA, 21 nt, Human
ugggguugcuggcugguccug

SEQ ID NO: 1263621 - RNA, 23 nt, Human
ugggguugcuggcugguccuggu

SEQ ID NO: 1263622 - RNA, 19 nt, Human
ugguccugagcucaucacc

SEQ ID NO: 1263623 - RNA, 24 nt, Human
uggugcgaucauggcucacugcag

SEQ ID NO: 1263624 - RNA, 21 nt, Human
ugucacccaggcuggagugca

SEQ ID NO: 1263625 - RNA, 23 nt, Human
ugucuaaaaacaaagguguagaa

SEQ ID NO: 1263626 - RNA, 19 nt, Human
uuccaaaaaugccucugcg

SEQ ID NO: 1263627 - RNA, 19 nt, Human
uuccuagcuggaucuccgu

SEQ ID NO: 1263628 - RNA, 20 nt, Human
uuccugggucuccuccgccc

SEQ ID NO: 1263629 - RNA, 26 nt, Human
uugcugagagaaaaccccagccaugu

SEQ ID NO: 1263630 - RNA, 25 nt, Human
uuggccaugucgugucggggaaggu

SEQ ID NO: 1263631 - RNA, 22 nt, Human
uuuccaaagauguuccaaaaau

SEQ ID NO: 1263632 - RNA, 20 nt, Human
uuugcugagagaaaacccca

SEQ ID NO: 1263633 - RNA, 21 nt, Human
uuugcugagagaaaaccccag

SEQ ID NO: 1263634 - RNA, 23 nt, Human
cauguccauuucgagaccagaag

SEQ ID NO: 1263635 - RNA, 20 nt, Human
gagaccagaagauagucuuc

SEQ ID NO: 1263636 - RNA, 23 nt, Human
guuuuuugauuuuuuucuuuuuu

SEQ ID NO: 1263637 - RNA, 25 nt, Human
uguuuuguuuuuugauuuuuuucuu

SEQ ID NO: 1263638 - RNA, 22 nt, Human
uuuuugauuuuuuucuuuuuuu

SEQ ID NO: 1263639 - RNA, 18 nt, Human
aaacggaaaaaaaagcau

SEQ ID NO: 1263640 - RNA, 21 nt, Human
aacaguaaaaaccaggaaaaa

SEQ ID NO: 1263641 - RNA, 25 nt, Human
aaccaggaaaaaaauauaaaccuag

SEQ ID NO: 1263642 - RNA, 20 nt, Human
aagaggcggcggccgcggug

SEQ ID NO: 1263643 - RNA, 23 nt, Human
aaggacuuugguggcgagaacuu

SEQ ID NO: 1263644 - RNA, 20 nt, Human
aaggugccuggggagccugg

SEQ ID NO: 1263645 - RNA, 23 nt, Human
aaugaacaaaaacggaaaaaaaa

SEQ ID NO: 1263646 - RNA, 20 nt, Human
accaggaaaaaaauauaaac

SEQ ID NO: 1263647 - RNA, 19 nt, Human
acuuuauugcuuggauguu

SEQ ID NO: 1263648 - RNA, 20 nt, Human
aggaaaaaaauauaaaccua

SEQ ID NO: 1263649 - RNA, 21 nt, Human
aggcggcggcggcagaggugg

SEQ ID NO: 1263650 - RNA, 22 nt, Human
aggcggcggcggcagagguggg

SEQ ID NO: 1263651 - RNA, 21 nt, Human
caccccggccagucacacugg

SEQ ID NO: 1263652 - RNA, 18 nt, Human
cacuggcugcuucugcac

SEQ ID NO: 1263653 - RNA, 21 nt, Human
cacuggcugcuucugcacccu

SEQ ID NO: 1263654 - RNA, 22 nt, Human
cagcauccaaaaugaacaaaaa

SEQ ID NO: 1263655 - RNA, 20 nt, Human
cagcggaggcagcucgagcu

SEQ ID NO: 1263656 - RNA, 22 nt, Human
caggaauucccagguucucagu

SEQ ID NO: 1263657 - RNA, 24 nt, Human
cauuuucuuuuuguaguuguuucu

SEQ ID NO: 1263658 - RNA, 25 nt, Human
ccaaaaugaacaaaaacggaaaaaa

SEQ ID NO: 1263659 - RNA, 24 nt, Human
ccacaggaacuccaccccggccag

SEQ ID NO: 1263660 - RNA, 24 nt, Human
ccgauggugaaggugccuggggag

SEQ ID NO: 1263661 - RNA, 21 nt, Human
ccggggcugaucucgcggcgc

SEQ ID NO: 1263662 - RNA, 21 nt, Human
ccucgcucaugccuccuccuc

SEQ ID NO: 1263663 - RNA, 22 nt, Human
ccucgcucaugccuccuccucc

SEQ ID NO: 1263664 - RNA, 22 nt, Human
cgacugcccuccacaggaacuc

SEQ ID NO: 1263665 - RNA, 25 nt, Human
cgcagauauuucuguggguuauucu

SEQ ID NO: 1263666 - RNA, 21 nt, Human
cucgcggcgcaggcggcggcg

SEQ ID NO: 1263667 - RNA, 22 nt, Human
cuuuaggucacccugccgaugg

SEQ ID NO: 1263668 - RNA, 24 nt, Human
gacugcccuccacaggaacuccac

SEQ ID NO: 1263669 - RNA, 26 nt, Human
gcccuccacaggaacuccaccccggc

SEQ ID NO: 1263670 - RNA, 24 nt, Human
gccucgcucaugccuccuccuccu

SEQ ID NO: 1263671 - RNA, 21 nt, Human
gcggcgcaggcggcggcggca

SEQ ID NO: 1263672 - RNA, 18 nt, Human
gcggcggcagaggugggg

SEQ ID NO: 1263673 - RNA, 18 nt, Human
gcggcgguggcuaaagag

SEQ ID NO: 1263674 - RNA, 20 nt, Human
gcugguggucgccgcggccg

SEQ ID NO: 1263675 - RNA, 19 nt, Human
ggccggggcucgcucucgg

SEQ ID NO: 1263676 - RNA, 19 nt, Human
gguaaggcuguggccugcu

SEQ ID NO: 1263677 - RNA, 30 nt, Human
gucggcggcgguggcuaaagaggcggcgac

SEQ ID NO: 1263678 - RNA, 25 nt, Human
uaaaccuagcgcuugcugaaacugg

SEQ ID NO: 1263679 - RNA, 20 nt, Human
uaaagaauaacagcaaacau

SEQ ID NO: 1263680 - RNA, 21 nt, Human
uauccauuucugacguugaac

SEQ ID NO: 1263681 - RNA, 21 nt, Human
uauuucagauuucuuugguug

SEQ ID NO: 1263682 - RNA, 23 nt, Human
ucagcgcguaacgacugcccucc

SEQ ID NO: 1263683 - RNA, 21 nt, Human
ucaugccuccuccuccucucc

SEQ ID NO: 1263684 - RNA, 24 nt, Human
uccaaaaugaacaaaaacggaaaa

SEQ ID NO: 1263685 - RNA, 25 nt, Human
uccaaaaugaacaaaaacggaaaaa

SEQ ID NO: 1263686 - RNA, 21 nt, Human
ucgcugucggcggcgguggcu

SEQ ID NO: 1263687 - RNA, 19 nt, Human
ucgguggcgguuggucggc

SEQ ID NO: 1263688 - RNA, 22 nt, Human
ucuuugguguugguaaggcugu

SEQ ID NO: 1263689 - RNA, 22 nt, Human
ucuuugguugggguucucccca

SEQ ID NO: 1263690 - RNA, 21 nt, Human
ugaacaaaaacggaaaaaaaa

SEQ ID NO: 1263691 - RNA, 25 nt, Human
ugaacaaaaacggaaaaaaaagcau

SEQ ID NO: 1263692 - RNA, 22 nt, Human
ugacagugccaaggacuuuggu

SEQ ID NO: 1263693 - RNA, 20 nt, Human
uggccugcuuuuugcuuugu

SEQ ID NO: 1263694 - RNA, 21 nt, Human
uggcuaaagaggcggcggccc

SEQ ID NO: 1263695 - RNA, 23 nt, Human
uggggucgcgcagcggaggcagc

SEQ ID NO: 1263696 - RNA, 20 nt, Human
ugguggcgagaacuuuuuuc

SEQ ID NO: 1263697 - RNA, 24 nt, Human
uuaaagaauaacagcaaacauucc

SEQ ID NO: 1263698 - RNA, 24 nt, Human
uucuguggguuauucuucuugaug

SEQ ID NO: 1263699 - RNA, 18 nt, Human
uugacauuuucuuuuugu

SEQ ID NO: 1263700 - RNA, 24 nt, Human
uugcuuggauguuucuuugguguu

SEQ ID NO: 1263701 - RNA, 22 nt, Human
uuugguguugguaaggcugugg

SEQ ID NO: 1263702 - RNA, 25 nt, Human
aaaaguucuagucacuugggaggug

SEQ ID NO: 1263703 - RNA, 22 nt, Human
aaacagcuacuuccaaagccca

SEQ ID NO: 1263704 - RNA, 21 nt, Human
aaagcccaagucauuaacagu

SEQ ID NO: 1263705 - RNA, 24 nt, Human
aacauccugaucaggguuuaaugu

SEQ ID NO: 1263706 - RNA, 24 nt, Human
aacauggcaaacaucaacacaucu

SEQ ID NO: 1263707 - RNA, 19 nt, Human
aacccucagcucuugcccc

SEQ ID NO: 1263708 - RNA, 24 nt, Human
aagaacaagucuaaguugguuguu

SEQ ID NO: 1263709 - RNA, 23 nt, Human
aagaucuucucagccucauagcu

SEQ ID NO: 1263710 - RNA, 22 nt, Human
aagcaaacgagcaauacagcua

SEQ ID NO: 1263711 - RNA, 19 nt, Human
aaggaggaggaggaggagg

SEQ ID NO: 1263712 - RNA, 28 nt, Human
acacauuugcaaagcaauucccguaccg

SEQ ID NO: 1263713 - RNA, 22 nt, Human
acaccccgcuccggcccggggc

SEQ ID NO: 1263714 - RNA, 21 nt, Human
acagaacuucuuaacaaugga

SEQ ID NO: 1263715 - RNA, 18 nt, Human
acagaugaaaaggcuuuc

SEQ ID NO: 1263716 - RNA, 19 nt, Human
acagcaauucccuguauag

SEQ ID NO: 1263717 - RNA, 20 nt, Human
acauagugcuucuaccacca

SEQ ID NO: 1263718 - RNA, 19 nt, Human
accccgcuccggcccgggg

SEQ ID NO: 1263719 - RNA, 18 nt, Human
acgccggggccccggagg

SEQ ID NO: 1263720 - RNA, 19 nt, Human
acuaauaacaucagagaaa

SEQ ID NO: 1263721 - RNA, 20 nt, Human
acugacuaacauccugauca

SEQ ID NO: 1263722 - RNA, 20 nt, Human
acugcugcaugccugcagac

SEQ ID NO: 1263723 - RNA, 19 nt, Human
acuucucuuccagggccau

SEQ ID NO: 1263724 - RNA, 21 nt, Human
agaacuggcaaagacugugaa

SEQ ID NO: 1263725 - RNA, 20 nt, Human
agaagaagaacaagucuaaa

SEQ ID NO: 1263726 - RNA, 19 nt, Human
agaaggaggaggaggagga

SEQ ID NO: 1263727 - RNA, 22 nt, Human
agacagaauaaaggugcauaug

SEQ ID NO: 1263728 - RNA, 21 nt, Human
agacagcaauucccuguauag

SEQ ID NO: 1263729 - RNA, 27 nt, Human
agacggaagacagaauaaaggggaccc

SEQ ID NO: 1263730 - RNA, 21 nt, Human
agagaaggaggaggaggagga

SEQ ID NO: 1263731 - RNA, 22 nt, Human
agaggacagagcagguagacug

SEQ ID NO: 1263732 - RNA, 19 nt, Human
agauauuccagauacugca

SEQ ID NO: 1263733 - RNA, 18 nt, Human
agccaccaaaagaaugca

SEQ ID NO: 1263734 - RNA, 23 nt, Human
agcuccgcgaauaguuggugccg

SEQ ID NO: 1263735 - RNA, 18 nt, Human
agcuuagaaagaacagug

SEQ ID NO: 1263736 - RNA, 21 nt, Human
agcuuuggugaugacacugau

SEQ ID NO: 1263737 - RNA, 19 nt, Human
aggaagagaaggaggagga

SEQ ID NO: 1263738 - RNA, 24 nt, Human
aggacgacgaggagcaggcggugg

SEQ ID NO: 1263739 - RNA, 22 nt, Human
aggaggaagagaaggaggagga

SEQ ID NO: 1263740 - RNA, 18 nt, Human
aggaggaggaggaggagg

SEQ ID NO: 1263741 - RNA, 18 nt, Human
aggaggaggaggaggagg

SEQ ID NO: 1263742 - RNA, 18 nt, Human
aggaggaggaggaggagg

SEQ ID NO: 1263743 - RNA, 18 nt, Human
aggaggaggaggaggagg

SEQ ID NO: 1263744 - RNA, 19 nt, Human
aggaggaggaggaggagga

SEQ ID NO: 1263745 - RNA, 19 nt, Human
aggaggaggaggaggagga

SEQ ID NO: 1263746 - RNA, 19 nt, Human
aggaggaggaggaggagga

SEQ ID NO: 1263747 - RNA, 21 nt, Human
aggcggcggcggagggcgggg

SEQ ID NO: 1263748 - RNA, 18 nt, Human
auagugcuucuaccacca

SEQ ID NO: 1263749 - RNA, 23 nt, Human
auggauuucugagguucccuugg

SEQ ID NO: 1263750 - RNA, 19 nt, Human
auggccaagcgccgccgcc

SEQ ID NO: 1263751 - RNA, 23 nt, Human
caaaauggcuccaaacucugcaa

SEQ ID NO: 1263752 - RNA, 20 nt, Human
caaacucugcaaccacccag

SEQ ID NO: 1263753 - RNA, 26 nt, Human
caacuccugaagcaauuugcuacuuu

SEQ ID NO: 1263754 - RNA, 20 nt, Human
cacauuguuaacccucagcu

SEQ ID NO: 1263755 - RNA, 22 nt, Human
caccucuaucucuggaugaaga

SEQ ID NO: 1263756 - RNA, 21 nt, Human
cacugauggaggagggacguc

SEQ ID NO: 1263757 - RNA, 23 nt, Human
cacugcaggcuggccugccaaca

SEQ ID NO: 1263758 - RNA, 18 nt, Human
cagaugaaaaggcuuucu

SEQ ID NO: 1263759 - RNA, 23 nt, Human
cagcaauucccuguauagcuuca

SEQ ID NO: 1263760 - RNA, 20 nt, Human
cagccuguugagccacugag

SEQ ID NO: 1263761 - RNA, 22 nt, Human
cagggccaugcgcggcccacga

SEQ ID NO: 1263762 - RNA, 21 nt, Human
cauggccaagcgccgccgccc

SEQ ID NO: 1263763 - RNA, 23 nt, Human
ccaaacaaacagaacuucuuaac

SEQ ID NO: 1263764 - RNA, 21 nt, Human
ccaaagcccaagucauuaaca

SEQ ID NO: 1263765 - RNA, 26 nt, Human
ccaauuguuuaacuaguaccagcuua

SEQ ID NO: 1263766 - RNA, 22 nt, Human
ccaccaucauaaugguuacuuc

SEQ ID NO: 1263767 - RNA, 19 nt, Human
ccacugacuaacauccuga

SEQ ID NO: 1263768 - RNA, 24 nt, Human
ccacugaguuaauccacagaagau

SEQ ID NO: 1263769 - RNA, 23 nt, Human
cccaagucauuaacaguuuccuc

SEQ ID NO: 1263770 - RNA, 21 nt, Human
cccagcauuggcuaaggugag

SEQ ID NO: 1263771 - RNA, 19 nt, Human
ccccagaggccacauggcu

SEQ ID NO: 1263772 - RNA, 19 nt, Human
cccgcaacgcagaaugagg

SEQ ID NO: 1263773 - RNA, 21 nt, Human
ccgcugccgacaccccgcucc

SEQ ID NO: 1263774 - RNA, 28 nt, Human
ccuacagucucuagugcuuuguaggugg

SEQ ID NO: 1263775 - RNA, 20 nt, Human
ccucaguaauuggaggaccc

SEQ ID NO: 1263776 - RNA, 23 nt, Human
ccuccugucucaacuccugaagc

SEQ ID NO: 1263777 - RNA, 19 nt, Human
ccugcugcgugagcgaagg

SEQ ID NO: 1263778 - RNA, 22 nt, Human
cgaaccggccgcugccgacacc

SEQ ID NO: 1263779 - RNA, 20 nt, Human
cgaaugauaccuucaauugu

SEQ ID NO: 1263780 - RNA, 24 nt, Human
cgacgaggagcaggcgguggcggc

SEQ ID NO: 1263781 - RNA, 18 nt, Human
cggggcucugcggcucau

SEQ ID NO: 1263782 - RNA, 26 nt, Human
cuacuuccaaagcccaagucauuaac

SEQ ID NO: 1263783 - RNA, 20 nt, Human
cucaaagcugcuuaaugauu

SEQ ID NO: 1263784 - RNA, 21 nt, Human
cucaucacaauaagacaucga

SEQ ID NO: 1263785 - RNA, 21 nt, Human
cuccacagaggccuuuucaaa

SEQ ID NO: 1263786 - RNA, 25 nt, Human
cucuaugccauccaacuaauauauc

SEQ ID NO: 1263787 - RNA, 23 nt, Human
cugccgacaccccgcuccggccc

SEQ ID NO: 1263788 - RNA, 20 nt, Human
cugcggcucauuaccuuccc

SEQ ID NO: 1263789 - RNA, 23 nt, Human
cuguauagcuucaggacaaugaa

SEQ ID NO: 1263790 - RNA, 21 nt, Human
cuuaacacauuugcaaagcaa

SEQ ID NO: 1263791 - RNA, 19 nt, Human
cuucaacuguuggcuaaaa

SEQ ID NO: 1263792 - RNA, 19 nt, Human
cuucaacuguuggcuaaaa

SEQ ID NO: 1263793 - RNA, 22 nt, Human
cuuccaaagcccaagucauuaa

SEQ ID NO: 1263794 - RNA, 25 nt, Human
cuucuuaacaauggaacuucaaugg

SEQ ID NO: 1263795 - RNA, 24 nt, Human
cuuucaacugcuuuacagugacca

SEQ ID NO: 1263796 - RNA, 18 nt, Human
gaaagacggaagacagaa

SEQ ID NO: 1263797 - RNA, 22 nt, Human
gaagaggacagagcagguagac

SEQ ID NO: 1263798 - RNA, 21 nt, Human
gaagguugcaguccguaagag

SEQ ID NO: 1263799 - RNA, 22 nt, Human
gaauugggcugaagcguucccc

SEQ ID NO: 1263800 - RNA, 21 nt, Human
gagaccccggggcucugcggc

SEQ ID NO: 1263801 - RNA, 18 nt, Human
gaggaggaggaggcggcg

SEQ ID NO: 1263802 - RNA, 20 nt, Human
gaggcggcggcggagggcgg

SEQ ID NO: 1263803 - RNA, 19 nt, Human
gagggcgggguaagaggac

SEQ ID NO: 1263804 - RNA, 18 nt, Human
gcaaccacccagauaccc

SEQ ID NO: 1263805 - RNA, 18 nt, Human
gcaagaucagcuacccaa

SEQ ID NO: 1263806 - RNA, 21 nt, Human
gcacaaagaaggccaagacag

SEQ ID NO: 1263807 - RNA, 24 nt, Human
gcacuaguugaacauggcaaacau

SEQ ID NO: 1263808 - RNA, 22 nt, Human
gcaguccguaagaggaagaacc

SEQ ID NO: 1263809 - RNA, 22 nt, Human
gccccggaggacgaggacgacg

SEQ ID NO: 1263810 - RNA, 20 nt, Human
gccgacaccccgcuccggcc

SEQ ID NO: 1263811 - RNA, 18 nt, Human
gccugccaacaauccuac

SEQ ID NO: 1263812 - RNA, 18 nt, Human
gcggcggcggagggcggg

SEQ ID NO: 1263813 - RNA, 19 nt, Human
gcugcauuacagaugaaaa

SEQ ID NO: 1263814 - RNA, 21 nt, Human
ggaggaggaggaggaggagga

SEQ ID NO: 1263815 - RNA, 21 nt, Human
ggaggaggaggaggaggagga

SEQ ID NO: 1263816 - RNA, 21 nt, Human
ggaggaggaggaggaggagga

SEQ ID NO: 1263817 - RNA, 19 nt, Human
ggguugccagucauuccag

SEQ ID NO: 1263818 - RNA, 18 nt, Human
gguuguuuucaucucugu

SEQ ID NO: 1263819 - RNA, 22 nt, Human
gucagcguggacucugguauca

SEQ ID NO: 1263820 - RNA, 18 nt, Human
gugaacucagggcugguc

SEQ ID NO: 1263821 - RNA, 18 nt, Human
gugaacucagggcugguc

SEQ ID NO: 1263822 - RNA, 23 nt, Human
guucacauagugcuucuaccacc

SEQ ID NO: 1263823 - RNA, 21 nt, Human
uaaaacagcuacuuccaaagc

SEQ ID NO: 1263824 - RNA, 22 nt, Human
uaaaacuaauaacaucagagaa

SEQ ID NO: 1263825 - RNA, 21 nt, Human
uaaaagaucaucuggcaagga

SEQ ID NO: 1263826 - RNA, 21 nt, Human
uaaaaggccuuugcaaaauuu

SEQ ID NO: 1263827 - RNA, 24 nt, Human
uaaaguagaaagucucagaggucc

SEQ ID NO: 1263828 - RNA, 18 nt, Human
uaaauucuuucaacugcu

SEQ ID NO: 1263829 - RNA, 23 nt, Human
uaaauucuuucaacugcuuuaca

SEQ ID NO: 1263830 - RNA, 19 nt, Human
uaacccucagcucuugccc

SEQ ID NO: 1263831 - RNA, 28 nt, Human
uaacccucagcucuugccccaacgacuu

SEQ ID NO: 1263832 - RNA, 18 nt, Human
uaagacaucgaucucucc

SEQ ID NO: 1263833 - RNA, 20 nt, Human
uacccaaaauggcuccaaac

SEQ ID NO: 1263834 - RNA, 19 nt, Human
uacugguacucuuuuucaa

SEQ ID NO: 1263835 - RNA, 23 nt, Human
uacuuccaaagcccaagucauua

SEQ ID NO: 1263836 - RNA, 20 nt, Human
uagaacagucuuuccaacca

SEQ ID NO: 1263837 - RNA, 20 nt, Human
uagaacuggcaaagacugug

SEQ ID NO: 1263838 - RNA, 18 nt, Human
uagcucagagaagcacaa

SEQ ID NO: 1263839 - RNA, 19 nt, Human
uagugcuuuguagguggca

SEQ ID NO: 1263840 - RNA, 18 nt, Human
uauagacugccacuucug

SEQ ID NO: 1263841 - RNA, 19 nt, Human
uaucauggcacacaggugu

SEQ ID NO: 1263842 - RNA, 20 nt, Human
uaugucagcguggacucugg

SEQ ID NO: 1263843 - RNA, 18 nt, Human
ucacauagugcuucuacc

SEQ ID NO: 1263844 - RNA, 19 nt, Human
ucacauagugcuucuacca

SEQ ID NO: 1263845 - RNA, 19 nt, Human
ucacugcaggcuggccugc

SEQ ID NO: 1263846 - RNA, 19 nt, Human
ucagagaaaucuugggggu

SEQ ID NO: 1263847 - RNA, 19 nt, Human
ucagccucauagcucagag

SEQ ID NO: 1263848 - RNA, 20 nt, Human
ucagccuguugagccacuga

SEQ ID NO: 1263849 - RNA, 20 nt, Human
ucaggacaaugaaguucaca

SEQ ID NO: 1263850 - RNA, 19 nt, Human
ucaugcuuauccagucucu

SEQ ID NO: 1263851 - RNA, 23 nt, Human
uccaacaauagaugaugaccaga

SEQ ID NO: 1263852 - RNA, 19 nt, Human
uccacugacuaacauccug

SEQ ID NO: 1263853 - RNA, 20 nt, Human
uccacugacuaacauccuga

SEQ ID NO: 1263854 - RNA, 21 nt, Human
ucccauacggcccacugccaa

SEQ ID NO: 1263855 - RNA, 20 nt, Human
uccccgacacgacauggcca

SEQ ID NO: 1263856 - RNA, 22 nt, Human
ucccuaaaauuagcgcugaaaa

SEQ ID NO: 1263857 - RNA, 25 nt, Human
ucucacugucacugcaggcuggccu

SEQ ID NO: 1263858 - RNA, 20 nt, Human
ucuccugguaacaauucuaa

SEQ ID NO: 1263859 - RNA, 21 nt, Human
ucuggcaaggaagaggacaga

SEQ ID NO: 1263860 - RNA, 19 nt, Human
ucugugugauuguuauugc

SEQ ID NO: 1263861 - RNA, 21 nt, Human
ucugugugauuguuauugcuu

SEQ ID NO: 1263862 - RNA, 24 nt, Human
ucuucagucucugucgucuucccg

SEQ ID NO: 1263863 - RNA, 23 nt, Human
ugaaacuguuaaaguagaaaguc

SEQ ID NO: 1263864 - RNA, 18 nt, Human
ugaccagacagcaauucc

SEQ ID NO: 1263865 - RNA, 26 nt, Human
ugaccagacagcaauucccuguauag

SEQ ID NO: 1263866 - RNA, 21 nt, Human
ugacuggucaugcuuauccag

SEQ ID NO: 1263867 - RNA, 22 nt, Human
ugagagagaggcggaugaaggg

SEQ ID NO: 1263868 - RNA, 21 nt, Human
ugagcgaagguuucugaguau

SEQ ID NO: 1263869 - RNA, 19 nt, Human
ugagcucugcccagugggg

SEQ ID NO: 1263870 - RNA, 19 nt, Human
ugaggaggaagccgaggag

SEQ ID NO: 1263871 - RNA, 21 nt, Human
ugaggaggaagccgaggagga

SEQ ID NO: 1263872 - RNA, 20 nt, Human
ugcuuuacagugaccaaucu

SEQ ID NO: 1263873 - RNA, 22 nt, Human
uggaauaagacaguccucuguu

SEQ ID NO: 1263874 - RNA, 19 nt, Human
ugguauagaaaaaaguucu

SEQ ID NO: 1263875 - RNA, 20 nt, Human
uggugaugacacugauggag

SEQ ID NO: 1263876 - RNA, 18 nt, Human
ugucuuugguggcuaaag

SEQ ID NO: 1263877 - RNA, 22 nt, Human
ugugacuucuuaaugcuaaaga

SEQ ID NO: 1263878 - RNA, 23 nt, Human
uuaauccacagaagauuuuuucc

SEQ ID NO: 1263879 - RNA, 20 nt, Human
uucacauagugcuucuacca

SEQ ID NO: 1263880 - RNA, 24 nt, Human
uuccccugagauaggcugguuguu

SEQ ID NO: 1263881 - RNA, 21 nt, Human
uucccuguauagcuucaggac

SEQ ID NO: 1263882 - RNA, 21 nt, Human
uucuccaacaacugauucugg

SEQ ID NO: 1263883 - RNA, 20 nt, Human
uugauuucaacaguuuucca

SEQ ID NO: 1263884 - RNA, 25 nt, Human
uugcugaauaaauucuuucaacugc

SEQ ID NO: 1263885 - RNA, 24 nt, Human
uuggugaugacacugauggaggag

SEQ ID NO: 1263886 - RNA, 20 nt, Human
uuucaugucuauuuuuucuu

SEQ ID NO: 1263887 - RNA, 24 nt, Human
uuugcuaaaaauccacuugaagau

SEQ ID NO: 1263888 - RNA, 21 nt, Human
uuuggcgauugguauagaaaa

SEQ ID NO: 1263889 - RNA, 22 nt, Human
uuuucuccaacaacugauucug

SEQ ID NO: 1263890 - RNA, 25 nt, Human
aagcgauccucccaccuuggccucc

SEQ ID NO: 1263891 - RNA, 20 nt, Human
acccugagagguggucucag

SEQ ID NO: 1263892 - RNA, 25 nt, Human
acccugagagguggucucagugggg

SEQ ID NO: 1263893 - RNA, 25 nt, Human
agggagcagggcucaguggcauugg

SEQ ID NO: 1263894 - RNA, 24 nt, Human
aucuugcuaugcugcccaggcugg

SEQ ID NO: 1263895 - RNA, 21 nt, Human
augcugcccaggcuggucucg

SEQ ID NO: 1263896 - RNA, 27 nt, Human
caagcgauccucccaccuuggccuccc

SEQ ID NO: 1263897 - RNA, 27 nt, Human
caagcgauccucccaccuuggccuccc

SEQ ID NO: 1263898 - RNA, 19 nt, Human
cagcugacucaggcugggg

SEQ ID NO: 1263899 - RNA, 18 nt, Human
caggcuggggaggaacca

SEQ ID NO: 1263900 - RNA, 19 nt, Human
ccacaguggcagagggagc

SEQ ID NO: 1263901 - RNA, 21 nt, Human
cccaccuuggccucccaaagc

SEQ ID NO: 1263902 - RNA, 21 nt, Human
cccccgugcccagccuccuug

SEQ ID NO: 1263903 - RNA, 24 nt, Human
ccucccaccuuggccucccaaagc

SEQ ID NO: 1263904 - RNA, 18 nt, Human
ccuggucucaagcgaucc

SEQ ID NO: 1263905 - RNA, 24 nt, Human
cucaagcgauccucccaccuuggc

SEQ ID NO: 1263906 - RNA, 27 nt, Human
cuccuggucucaagcgauccucccacc

SEQ ID NO: 1263907 - RNA, 23 nt, Human
gaaccagggcaggcacccugaga

SEQ ID NO: 1263908 - RNA, 19 nt, Human
gcagagggagcagggcuca

SEQ ID NO: 1263909 - RNA, 22 nt, Human
gcuggucucgaacuccuggucu

SEQ ID NO: 1263910 - RNA, 22 nt, Human
ggaucuugcuaugcugcccagg

SEQ ID NO: 1263911 - RNA, 24 nt, Human
ggcuggucucgaacuccuggucuc

SEQ ID NO: 1263912 - RNA, 24 nt, Human
ggggaucuugcuaugcugcccagg

SEQ ID NO: 1263913 - RNA, 22 nt, Human
ggguacgugguccaccagccug

SEQ ID NO: 1263914 - RNA, 20 nt, Human
guggagaggauguguccaca

SEQ ID NO: 1263915 - RNA, 19 nt, Human
guggcagagggagcagggc

SEQ ID NO: 1263916 - RNA, 19 nt, Human
uacaucaagacacugaggc

SEQ ID NO: 1263917 - RNA, 21 nt, Human
uacaucaagacacugaggccc

SEQ ID NO: 1263918 - RNA, 21 nt, Human
uaugcugcccaggcuggucuc

SEQ ID NO: 1263919 - RNA, 23 nt, Human
uaugcugcccaggcuggucucga

SEQ ID NO: 1263920 - RNA, 24 nt, Human
uaugcugcccaggcuggucucgaa

SEQ ID NO: 1263921 - RNA, 25 nt, Human
ucaagcgauccucccaccuuggccu

SEQ ID NO: 1263922 - RNA, 19 nt, Human
ucaguggcauuggagcaag

SEQ ID NO: 1263923 - RNA, 21 nt, Human
ucucgaacuccuggucucaag

SEQ ID NO: 1263924 - RNA, 19 nt, Human
ucuggcacccacucagggc

SEQ ID NO: 1263925 - RNA, 22 nt, Human
ucugguuuugccugcuccauga

SEQ ID NO: 1263926 - RNA, 23 nt, Human
ucuugcuaugcugcccaggcugg

SEQ ID NO: 1263927 - RNA, 24 nt, Human
ucuugcuaugcugcccaggcuggu

SEQ ID NO: 1263928 - RNA, 18 nt, Human
ugagcccccgugcccagc

SEQ ID NO: 1263929 - RNA, 22 nt, Human
ugagcccccgugcccagccucc

SEQ ID NO: 1263930 - RNA, 23 nt, Human
ugcccagccuccuugcaguccag

SEQ ID NO: 1263931 - RNA, 24 nt, Human
ugcccaggcuggucucgaacuccu

SEQ ID NO: 1263932 - RNA, 24 nt, Human
ugcuaugcugcccaggcuggucuc

SEQ ID NO: 1263933 - RNA, 27 nt, Human
ugcuaugcugcccaggcuggucucgaa

SEQ ID NO: 1263934 - RNA, 21 nt, Human
uggccucccaaagcucugggg

SEQ ID NO: 1263935 - RNA, 21 nt, Human
uggggaggaaccagggcaggc

SEQ ID NO: 1263936 - RNA, 24 nt, Human
uggggugacaggcgugagcccccg

SEQ ID NO: 1263937 - RNA, 25 nt, Human
uggggugacaggcgugagcccccgu

SEQ ID NO: 1263938 - RNA, 18 nt, Human
ugguccaccagccugugu

SEQ ID NO: 1263939 - RNA, 21 nt, Human
uuauuuuguuuuuaaaagaug

SEQ ID NO: 1263940 - RNA, 22 nt, Human
uucacggucuucccagacgucu

SEQ ID NO: 1263941 - RNA, 24 nt, Human
uuggccucccaaagcucuggggug

SEQ ID NO: 1263942 - RNA, 18 nt, Human
uuuuguuuuuaaaagaug

SEQ ID NO: 1263943 - RNA, 23 nt, Human
aaaaaagcacucaggucaaaacu

SEQ ID NO: 1263944 - RNA, 22 nt, Human
aaaaaaugaaguaaacaaagaa

SEQ ID NO: 1263945 - RNA, 21 nt, Human
aaaaagcaagaaagacaaaga

SEQ ID NO: 1263946 - RNA, 24 nt, Human
aaacaaaaagcaagaaagacaaag

SEQ ID NO: 1263947 - RNA, 21 nt, Human
aaacaaagcaaaacuaaaguu

SEQ ID NO: 1263948 - RNA, 19 nt, Human
aaacacaaaggcaaaaaca

SEQ ID NO: 1263949 - RNA, 19 nt, Human
aaacauaaacacaaaggca

SEQ ID NO: 1263950 - RNA, 25 nt, Human
aaagaaacauaacuuucaaugacua

SEQ ID NO: 1263951 - RNA, 19 nt, Human
aaagcaagaaagacaaaga

SEQ ID NO: 1263952 - RNA, 19 nt, Human
aaauauuggcaacugcucc

SEQ ID NO: 1263953 - RNA, 18 nt, Human
aagaaagacaaagaaagg

SEQ ID NO: 1263954 - RNA, 22 nt, Human
aagccuccagagauccagcuuc

SEQ ID NO: 1263955 - RNA, 22 nt, Human
aaggcaaaaacaaaaagcaaga

SEQ ID NO: 1263956 - RNA, 30 nt, Human
aaggcaaaaacaaaaagcaagaaagacaaa

SEQ ID NO: 1263957 - RNA, 26 nt, Human
aaguaaacaaagaaacauaacuuuca

SEQ ID NO: 1263958 - RNA, 22 nt, Human
acaaaaagcaagaaagacaaag

SEQ ID NO: 1263959 - RNA, 26 nt, Human
acaaagaccaaaaauaaggugaaaca

SEQ ID NO: 1263960 - RNA, 18 nt, Human
acaaccaguauaacaaac

SEQ ID NO: 1263961 - RNA, 19 nt, Human
acaaggagucaucucccuc

SEQ ID NO: 1263962 - RNA, 19 nt, Human
acaaggagucaucucccuc

SEQ ID NO: 1263963 - RNA, 22 nt, Human
acacaaaggcaaaaacaaaaag

SEQ ID NO: 1263964 - RNA, 26 nt, Human
acacaaaggcaaaaacaaaaagcaag

SEQ ID NO: 1263965 - RNA, 24 nt, Human
acaugcaaacaaagcaaaacuaaa

SEQ ID NO: 1263966 - RNA, 19 nt, Human
acugaccacucuaugcccc

SEQ ID NO: 1263967 - RNA, 20 nt, Human
acuggccucagauaucagaa

SEQ ID NO: 1263968 - RNA, 20 nt, Human
agacaaagaaaggguaugga

SEQ ID NO: 1263969 - RNA, 21 nt, Human
aggcaaaaacaaaaagcaaga

SEQ ID NO: 1263970 - RNA, 25 nt, Human
aggcaaaaacaaaaagcaagaaaga

SEQ ID NO: 1263971 - RNA, 18 nt, Human
auagcccuuagagccauc

SEQ ID NO: 1263972 - RNA, 23 nt, Human
auaucaugucaucccuagacaac

SEQ ID NO: 1263973 - RNA, 18 nt, Human
aucaggaaggguggaagc

SEQ ID NO: 1263974 - RNA, 25 nt, Human
aucuuccccuagcucuuccucaccg

SEQ ID NO: 1263975 - RNA, 23 nt, Human
caaaaaagcacucaggucaaaac

SEQ ID NO: 1263976 - RNA, 29 nt, Human
caaaaacaaaaagcaagaaagacaagacg

SEQ ID NO: 1263977 - RNA, 20 nt, Human
caaaaagcaagaaagacaaa

SEQ ID NO: 1263978 - RNA, 19 nt, Human
caaacacagaucaaacaac

SEQ ID NO: 1263979 - RNA, 24 nt, Human
caaagaccaaaaauaaggugaaac

SEQ ID NO: 1263980 - RNA, 22 nt, Human
caaaggcaaaaacaaaaagcaa

SEQ ID NO: 1263981 - RNA, 21 nt, Human
caacauuaguagauugugcua

SEQ ID NO: 1263982 - RNA, 20 nt, Human
cacauccacuuucuucaccu

SEQ ID NO: 1263983 - RNA, 19 nt, Human
cacggagacagcuguccag

SEQ ID NO: 1263984 - RNA, 24 nt, Human
cagaauccugggcuuggagagcuc

SEQ ID NO: 1263985 - RNA, 20 nt, Human
cagaauggaauaaaacuuca

SEQ ID NO: 1263986 - RNA, 22 nt, Human
cagcuacaaggagucaucuccc

SEQ ID NO: 1263987 - RNA, 23 nt, Human
cauaaacacaaaggcaaaaacaa

SEQ ID NO: 1263988 - RNA, 20 nt, Human
caucuuccccuagcucuucc

SEQ ID NO: 1263989 - RNA, 20 nt, Human
cauuaguagauugugcuacc

SEQ ID NO: 1263990 - RNA, 23 nt, Human
ccacaguauuuaauuuguuugga

SEQ ID NO: 1263991 - RNA, 25 nt, Human
ccacugaucauuuacaaacugaaau

SEQ ID NO: 1263992 - RNA, 25 nt, Human
ccgacucugcuccacacucucaugc

SEQ ID NO: 1263993 - RNA, 18 nt, Human
ccuccagagauccagcuu

SEQ ID NO: 1263994 - RNA, 22 nt, Human
cuaaagucagugcauugucaac

SEQ ID NO: 1263995 - RNA, 22 nt, Human
cuaaaugaauaaacaaagacca

SEQ ID NO: 1263996 - RNA, 24 nt, Human
cucaaacauaaacacaaaggcaaa

SEQ ID NO: 1263997 - RNA, 23 nt, Human
cucuuguugcaacaugugcaugu

SEQ ID NO: 1263998 - RNA, 19 nt, Human
cuggccucagauaucagaa

SEQ ID NO: 1263999 - RNA, 18 nt, Human
gacaacuugcaugagacu

SEQ ID NO: 1264000 - RNA, 20 nt, Human
gcaagaaagacaaagaaagg

SEQ ID NO: 1264001 - RNA, 23 nt, Human
gcaagaaagacaaagaaagggua

SEQ ID NO: 1264002 - RNA, 22 nt, Human
ggaaaaacaguacauagaggca

SEQ ID NO: 1264003 - RNA, 26 nt, Human
ggaaaagaacaaccacuaauugugaa

SEQ ID NO: 1264004 - RNA, 22 nt, Human
ggacaagcacaauugaauucuu

SEQ ID NO: 1264005 - RNA, 20 nt, Human
ggaucugccugaaaguucuc

SEQ ID NO: 1264006 - RNA, 23 nt, Human
ggcuggugccaaaccuuuuguuu

SEQ ID NO: 1264007 - RNA, 22 nt, Human
guaguacaucucaucuuccccu

SEQ ID NO: 1264008 - RNA, 21 nt, Human
gugccaaaccuuuuguuuaca

SEQ ID NO: 1264009 - RNA, 23 nt, Human
uaaaaaaauuaguggacaugcaa

SEQ ID NO: 1264010 - RNA, 25 nt, Human
uaaaaaacuacacgaaaaaaauucu

SEQ ID NO: 1264011 - RNA, 23 nt, Human
uaaacacaaaggcaaaaacaaaa

SEQ ID NO: 1264012 - RNA, 24 nt, Human
uaaaugaauaaacaaagaccaaaa

SEQ ID NO: 1264013 - RNA, 18 nt, Human
uaaugagaaucaacuugc

SEQ ID NO: 1264014 - RNA, 19 nt, Human
uacaaccaguauaacaaac

SEQ ID NO: 1264015 - RNA, 21 nt, Human
uacaaccaguauaacaaacac

SEQ ID NO: 1264016 - RNA, 26 nt, Human
uacacacaagcaaguucauuugcaug

SEQ ID NO: 1264017 - RNA, 20 nt, Human
uacaggcuaauggugggauc

SEQ ID NO: 1264018 - RNA, 23 nt, Human
uacaguucauauuucaguacauc

SEQ ID NO: 1264019 - RNA, 25 nt, Human
uaccaaaaaagcacucaggucaaaa

SEQ ID NO: 1264020 - RNA, 22 nt, Human
uauaacaaacacagaucaaaca

SEQ ID NO: 1264021 - RNA, 19 nt, Human
uaucuggacaagcacaauu

SEQ ID NO: 1264022 - RNA, 21 nt, Human
ucaaacauaaacacaaaggca

SEQ ID NO: 1264023 - RNA, 22 nt, Human
ucaaauacacacaagcaaguuc

SEQ ID NO: 1264024 - RNA, 23 nt, Human
ucaaauacacacaagcaaguuca

SEQ ID NO: 1264025 - RNA, 18 nt, Human
ucagaacacaaaugcuua

SEQ ID NO: 1264026 - RNA, 23 nt, Human
ucagauaucagaacacaaaugcu

SEQ ID NO: 1264027 - RNA, 24 nt, Human
uccccuagcucuuccucaccggug

SEQ ID NO: 1264028 - RNA, 22 nt, Human
ucccuagacaacauuauaauuu

SEQ ID NO: 1264029 - RNA, 19 nt, Human
uccugggcuuggagagcuc

SEQ ID NO: 1264030 - RNA, 19 nt, Human
ucucuugccagaauccugg

SEQ ID NO: 1264031 - RNA, 23 nt, Human
ucuuaagagagccucccuuucag

SEQ ID NO: 1264032 - RNA, 24 nt, Human
ugacuccaaggaaaucuuuaauau

SEQ ID NO: 1264033 - RNA, 24 nt, Human
ugacuuccuaaaaccaccaauuuc

SEQ ID NO: 1264034 - RNA, 26 nt, Human
ugacuuccuaaaaccaccaauuucau

SEQ ID NO: 1264035 - RNA, 18 nt, Human
ugagaaucaacuugcagg

SEQ ID NO: 1264036 - RNA, 23 nt, Human
ugaggaaaaacaguacauagagg

SEQ ID NO: 1264037 - RNA, 21 nt, Human
ugcacauccacuuucuucacc

SEQ ID NO: 1264038 - RNA, 23 nt, Human
ugcgcucgccgacucugcuccac

SEQ ID NO: 1264039 - RNA, 18 nt, Human
ugcuuucuccaucuuguc

SEQ ID NO: 1264040 - RNA, 25 nt, Human
uggacaugcaaacaaagcaaaacua

SEQ ID NO: 1264041 - RNA, 23 nt, Human
ugguaccaaaaaagcacucaggu

SEQ ID NO: 1264042 - RNA, 21 nt, Human
uguaaagaaauuauuuaaaau

SEQ ID NO: 1264043 - RNA, 18 nt, Human
uguaguggaaucugacaa

SEQ ID NO: 1264044 - RNA, 18 nt, Human
uuaaaaucucccacuuuu

SEQ ID NO: 1264045 - RNA, 19 nt, Human
uuaaagugcaaaauaaaca

SEQ ID NO: 1264046 - RNA, 22 nt, Human
uuaguuacacugguaauuacua

SEQ ID NO: 1264047 - RNA, 27 nt, Human
uuggaacaguaguacaucucaucuucc

SEQ ID NO: 1264048 - RNA, 23 nt, Human
uuuacaaacugaaaucacuuaag

SEQ ID NO: 1264049 - RNA, 18 nt, Human
uuugcacaccuucaugau

SEQ ID NO: 1264050 - RNA, 20 nt, Human
aaauagagacagggucucug

SEQ ID NO: 1264051 - RNA, 21 nt, Human
aaaugucggaggucgaauucu

SEQ ID NO: 1264052 - RNA, 23 nt, Human
aacaauacaggcauaaugcaaca

SEQ ID NO: 1264053 - RNA, 25 nt, Human
aagcaauccucccaccucagccucc

SEQ ID NO: 1264054 - RNA, 18 nt, Human
aagugggaggaucgcuug

SEQ ID NO: 1264055 - RNA, 19 nt, Human
aauaggggagugagcaccu

SEQ ID NO: 1264056 - RNA, 18 nt, Human
acagcucacugcagccuc

SEQ ID NO: 1264057 - RNA, 24 nt, Human
accauguugcccaggcuggucuug

SEQ ID NO: 1264058 - RNA, 25 nt, Human
accauguugcccaggcuggucuuga

SEQ ID NO: 1264059 - RNA, 23 nt, Human
acccaggccuauaagaaccuagu

SEQ ID NO: 1264060 - RNA, 18 nt, Human
accucauuucuacuaaaa

SEQ ID NO: 1264061 - RNA, 19 nt, Human
acucuaguguguucugggc

SEQ ID NO: 1264062 - RNA, 18 nt, Human
acugcacuccggccuggg

SEQ ID NO: 1264063 - RNA, 24 nt, Human
acugcacuccggccugggugacag

SEQ ID NO: 1264064 - RNA, 21 nt, Human
acuggggcacaccagaaugug

SEQ ID NO: 1264065 - RNA, 21 nt, Human
agaaaaaaaaaaaaucagcug

SEQ ID NO: 1264066 - RNA, 18 nt, Human
agacagggucucuguugc

SEQ ID NO: 1264067 - RNA, 20 nt, Human
agagaagccagaaacccaga

SEQ ID NO: 1264068 - RNA, 20 nt, Human
agagagcaacaaaaagaggc

SEQ ID NO: 1264069 - RNA, 18 nt, Human
agagaggucuucggccuc

SEQ ID NO: 1264070 - RNA, 19 nt, Human
aggcacaaacccaggccua

SEQ ID NO: 1264071 - RNA, 24 nt, Human
aggcugaagugggaggaucgcuug

SEQ ID NO: 1264072 - RNA, 24 nt, Human
agggucaagcaauccucccaccuc

SEQ ID NO: 1264073 - RNA, 24 nt, Human
agggucucuguugcccaggccgga

SEQ ID NO: 1264074 - RNA, 21 nt, Human
agguaaucacagcucacugca

SEQ ID NO: 1264075 - RNA, 19 nt, Human
aggucuucggccucccagc

SEQ ID NO: 1264076 - RNA, 19 nt, Human
agguugagguugcagugag

SEQ ID NO: 1264077 - RNA, 24 nt, Human
agguugagguugcagugagccuug

SEQ ID NO: 1264078 - RNA, 21 nt, Human
aguauugaaaucacaaaguca

SEQ ID NO: 1264079 - RNA, 24 nt, Human
agucugagcaauauggcgagaccu

SEQ ID NO: 1264080 - RNA, 20 nt, Human
aguucccaaccuggcaauuc

SEQ ID NO: 1264081 - RNA, 24 nt, Human
aucagcugggugugguggcccaug

SEQ ID NO: 1264082 - RNA, 18 nt, Human
augggguuucaccauguu

SEQ ID NO: 1264083 - RNA, 19 nt, Human
augggguuucaccauguug

SEQ ID NO: 1264084 - RNA, 23 nt, Human
caagagaguagauaagugugcaa

SEQ ID NO: 1264085 - RNA, 27 nt, Human
caagcaauccucccaccucagccuccc

SEQ ID NO: 1264086 - RNA, 19 nt, Human
caaguucauuaucaggagg

SEQ ID NO: 1264087 - RNA, 21 nt, Human
cacacucagcuaauuuuugua

SEQ ID NO: 1264088 - RNA, 23 nt, Human
caccauguugcccaggcuggucu

SEQ ID NO: 1264089 - RNA, 24 nt, Human
caccauguugcccaggcuggucuu

SEQ ID NO: 1264090 - RNA, 27 nt, Human
caccauguugcccaggcuggucuugaa

SEQ ID NO: 1264091 - RNA, 24 nt, Human
caccucagccuccccaguagcugg

SEQ ID NO: 1264092 - RNA, 23 nt, Human
caccucagcuucccaaagugcag

SEQ ID NO: 1264093 - RNA, 22 nt, Human
cacuccggccugggugacagug

SEQ ID NO: 1264094 - RNA, 19 nt, Human
cacugcacuccggccuggg

SEQ ID NO: 1264095 - RNA, 19 nt, Human
cacugcacuccggccuggg

SEQ ID NO: 1264096 - RNA, 22 nt, Human
cacugcacuccggccuggguga

SEQ ID NO: 1264097 - RNA, 23 nt, Human
cacugcacuccggccugggugac

SEQ ID NO: 1264098 - RNA, 24 nt, Human
cacugcacuccggccugggugaca

SEQ ID NO: 1264099 - RNA, 24 nt, Human
cacugcacuccggccugggugaca

SEQ ID NO: 1264100 - RNA, 22 nt, Human
cacugcagccucgaccucccag

SEQ ID NO: 1264101 - RNA, 19 nt, Human
cagcaguucccaaccuggc

SEQ ID NO: 1264102 - RNA, 24 nt, Human
cagccucgaccucccagggucaag

SEQ ID NO: 1264103 - RNA, 19 nt, Human
cagggucucuguugcccag

SEQ ID NO: 1264104 - RNA, 24 nt, Human
caguagcugggaccacagaugugc

SEQ ID NO: 1264105 - RNA, 20 nt, Human
cagugggaagcaagagagua

SEQ ID NO: 1264106 - RNA, 28 nt, Human
caucuaaagucuccaugugacuguugcc

SEQ ID NO: 1264107 - RNA, 23 nt, Human
cauguugcccaggcuggucuuga

SEQ ID NO: 1264108 - RNA, 24 nt, Human
cauguugcccaggcuggucuugaa

SEQ ID NO: 1264109 - RNA, 22 nt, Human
ccaccucagccuccccaguagc

SEQ ID NO: 1264110 - RNA, 20 nt, Human
ccacugcacuccggccuggg

SEQ ID NO: 1264111 - RNA, 20 nt, Human
ccacugcacuccggccuggg

SEQ ID NO: 1264112 - RNA, 20 nt, Human
ccacugcacuccggccuggg

SEQ ID NO: 1264113 - RNA, 21 nt, Human
ccacugcacuccggccugggu

SEQ ID NO: 1264114 - RNA, 21 nt, Human
ccacugcacuccggccugggu

SEQ ID NO: 1264115 - RNA, 23 nt, Human
ccacugcacuccggccuggguga

SEQ ID NO: 1264116 - RNA, 24 nt, Human
ccacugcacuccggccugggugac

SEQ ID NO: 1264117 - RNA, 22 nt, Human
ccagaagguugagguugcagug

SEQ ID NO: 1264118 - RNA, 23 nt, Human
ccagagucccgcccauauuacac

SEQ ID NO: 1264119 - RNA, 28 nt, Human
ccaggccggaaugcagugagguaaucac

SEQ ID NO: 1264120 - RNA, 26 nt, Human
ccauuguucaccaaaccuuuuuuuuu

SEQ ID NO: 1264121 - RNA, 25 nt, Human
ccuaaggaaacaauacaggcauaau

SEQ ID NO: 1264122 - RNA, 25 nt, Human
ccucccaccucagccuccccaguag

SEQ ID NO: 1264123 - RNA, 19 nt, Human
ccugggugacagugagacu

SEQ ID NO: 1264124 - RNA, 21 nt, Human
cguacagagcucucugcuagg

SEQ ID NO: 1264125 - RNA, 24 nt, Human
cucagccuccccaguagcugggac

SEQ ID NO: 1264126 - RNA, 21 nt, Human
cucccaccucagccuccccag

SEQ ID NO: 1264127 - RNA, 19 nt, Human
cucuguugcccaggccgga

SEQ ID NO: 1264128 - RNA, 20 nt, Human
gaagagaagccagaaaccca

SEQ ID NO: 1264129 - RNA, 23 nt, Human
gaccucccagggucaagcaaucc

SEQ ID NO: 1264130 - RNA, 21 nt, Human
gagaauggggagcgaugggga

SEQ ID NO: 1264131 - RNA, 27 nt, Human
gagagcaacaaaaagaggccgguaccc

SEQ ID NO: 1264132 - RNA, 20 nt, Human
gagaugggguuucaccaugu

SEQ ID NO: 1264133 - RNA, 23 nt, Human
gagaugggguuucaccauguugc

SEQ ID NO: 1264134 - RNA, 25 nt, Human
gagcugccauggcuggccaaggcug

SEQ ID NO: 1264135 - RNA, 21 nt, Human
gagguugcagugagccuugau

SEQ ID NO: 1264136 - RNA, 23 nt, Human
gagguugcagugagccuugauug

SEQ ID NO: 1264137 - RNA, 22 nt, Human
gaugggguuucaccauguugcc

SEQ ID NO: 1264138 - RNA, 19 nt, Human
gauugugccacugcacucc

SEQ ID NO: 1264139 - RNA, 24 nt, Human
gcaccuaccacguacagagcucuc

SEQ ID NO: 1264140 - RNA, 18 nt, Human
gcauggagucucuccacc

SEQ ID NO: 1264141 - RNA, 23 nt, Human
gccaaggcugucuuuuaaaaagc

SEQ ID NO: 1264142 - RNA, 19 nt, Human
gccacugcacuccggccug

SEQ ID NO: 1264143 - RNA, 19 nt, Human
gccacugcacuccggccug

SEQ ID NO: 1264144 - RNA, 24 nt, Human
gccacugcacuccggccuggguga

SEQ ID NO: 1264145 - RNA, 20 nt, Human
gcccaaagaagguaucugca

SEQ ID NO: 1264146 - RNA, 22 nt, Human
gccccauuguucaccaaaccuu

SEQ ID NO: 1264147 - RNA, 19 nt, Human
gccugggugacagugagac

SEQ ID NO: 1264148 - RNA, 20 nt, Human
gccugggugacagugagacu

SEQ ID NO: 1264149 - RNA, 19 nt, Human
ggaggcugaauauagaauu

SEQ ID NO: 1264150 - RNA, 23 nt, Human
ggcucaagcuaucugcccaccuc

SEQ ID NO: 1264151 - RNA, 18 nt, Human
ggcuggucuugaacuccu

SEQ ID NO: 1264152 - RNA, 24 nt, Human
gggcacgugcccaucuaaagucuc

SEQ ID NO: 1264153 - RNA, 22 nt, Human
gggguuucaccauguugcccag

SEQ ID NO: 1264154 - RNA, 23 nt, Human
gggguuucaccauguugcccagg

SEQ ID NO: 1264155 - RNA, 22 nt, Human
ggguuucaccauguugcccagg

SEQ ID NO: 1264156 - RNA, 27 nt, Human
gguggcccaugccuguagucaucccag

SEQ ID NO: 1264157 - RNA, 22 nt, Human
ggugugguggcccaugccugua

SEQ ID NO: 1264158 - RNA, 19 nt, Human
guagagaugggguuucacc

SEQ ID NO: 1264159 - RNA, 21 nt, Human
guagagaugggguuucaccau

SEQ ID NO: 1264160 - RNA, 22 nt, Human
guagagaugggguuucaccaug

SEQ ID NO: 1264161 - RNA, 19 nt, Human
guauuuuuuguagagaugg

SEQ ID NO: 1264162 - RNA, 24 nt, Human
gucaagcaauccucccaccucagc

SEQ ID NO: 1264163 - RNA, 24 nt, Human
gugacagugagacuuugucucaaa

SEQ ID NO: 1264164 - RNA, 22 nt, Human
uaaguaggcacagagcuugcca

SEQ ID NO: 1264165 - RNA, 27 nt, Human
uaaguaggcacagagcuugccaccuau

SEQ ID NO: 1264166 - RNA, 23 nt, Human
uaagugugcaacaggcacaaacc

SEQ ID NO: 1264167 - RNA, 22 nt, Human
uaauuuuuguauuuuuuguaga

SEQ ID NO: 1264168 - RNA, 24 nt, Human
uaauuuuuguauuuuuuguagaga

SEQ ID NO: 1264169 - RNA, 22 nt, Human
uagagaugggguuucaccaugu

SEQ ID NO: 1264170 - RNA, 23 nt, Human
uagggagaugagcaagcauuuug

SEQ ID NO: 1264171 - RNA, 24 nt, Human
uagguucucugggggcagcaguuc

SEQ ID NO: 1264172 - RNA, 21 nt, Human
uaguauugaaaucacaaaguc

SEQ ID NO: 1264173 - RNA, 24 nt, Human
uaguauugaaaucacaaagucaga

SEQ ID NO: 1264174 - RNA, 21 nt, Human
ucaccauguugcccaggcugg

SEQ ID NO: 1264175 - RNA, 19 nt, Human
ucacugcagccucgaccuc

SEQ ID NO: 1264176 - RNA, 23 nt, Human
ucacugcagccucgaccucccag

SEQ ID NO: 1264177 - RNA, 24 nt, Human
ucacugcagccucgaccucccagg

SEQ ID NO: 1264178 - RNA, 18 nt, Human
ucagccuccccaguagcu

SEQ ID NO: 1264179 - RNA, 20 nt, Human
ucagccuccccaguagcugg

SEQ ID NO: 1264180 - RNA, 18 nt, Human
ucagcugggugugguggc

SEQ ID NO: 1264181 - RNA, 24 nt, Human
ucagcugggugugguggcccaugc

SEQ ID NO: 1264182 - RNA, 28 nt, Human
ucauuucuacuaaaaagaaaaaaaaaaa

SEQ ID NO: 1264183 - RNA, 21 nt, Human
ucccaccucagccuccccagu

SEQ ID NO: 1264184 - RNA, 18 nt, Human
ucccagggucaagcaauc

SEQ ID NO: 1264185 - RNA, 18 nt, Human
ucccaugaagagaagcca

SEQ ID NO: 1264186 - RNA, 22 nt, Human
uccccaguagcugggaccacag

SEQ ID NO: 1264187 - RNA, 22 nt, Human
ucuacuaaaaagaaaaaaaaaa

SEQ ID NO: 1264188 - RNA, 18 nt, Human
ucuccaugugacuguugc

SEQ ID NO: 1264189 - RNA, 19 nt, Human
ucuccaugugacuguugcc

SEQ ID NO: 1264190 - RNA, 18 nt, Human
ucucuggcugaagguggc

SEQ ID NO: 1264191 - RNA, 19 nt, Human
ucucuggcugaagguggcg

SEQ ID NO: 1264192 - RNA, 18 nt, Human
ucucugggggcagcaguu

SEQ ID NO: 1264193 - RNA, 18 nt, Human
ucucuguugcccaggccg

SEQ ID NO: 1264194 - RNA, 25 nt, Human
ucucuguugcccaggccggaaugca

SEQ ID NO: 1264195 - RNA, 18 nt, Human
ucugcaagccagguacaa

SEQ ID NO: 1264196 - RNA, 25 nt, Human
ucugcaagccagguacaaaccagca

SEQ ID NO: 1264197 - RNA, 19 nt, Human
ucugcauggagucucucca

SEQ ID NO: 1264198 - RNA, 19 nt, Human
ucugcccaccucagcuucc

SEQ ID NO: 1264199 - RNA, 21 nt, Human
ucugcccaccucagcuuccca

SEQ ID NO: 1264200 - RNA, 19 nt, Human
ucugcuagguucucugggg

SEQ ID NO: 1264201 - RNA, 18 nt, Human
ucuguugcccaggccgga

SEQ ID NO: 1264202 - RNA, 24 nt, Human
ucuucggccucccagccucucugg

SEQ ID NO: 1264203 - RNA, 23 nt, Human
ucuugaacuccucggcucaagcu

SEQ ID NO: 1264204 - RNA, 19 nt, Human
ugaacauugugcugcccaa

SEQ ID NO: 1264205 - RNA, 20 nt, Human
ugaacauugugcugcccaaa

SEQ ID NO: 1264206 - RNA, 24 nt, Human
ugacagugagacuuugucucaaaa

SEQ ID NO: 1264207 - RNA, 18 nt, Human
ugacuguugcccugcagg

SEQ ID NO: 1264208 - RNA, 22 nt, Human
ugacuucuuacuucuaaacacu

SEQ ID NO: 1264209 - RNA, 26 nt, Human
ugagcaccuaccacguacagagcucu

SEQ ID NO: 1264210 - RNA, 24 nt, Human
ugagguugcagugagccuugauug

SEQ ID NO: 1264211 - RNA, 23 nt, Human
ugcaacaggcacaaacccaggcc

SEQ ID NO: 1264212 - RNA, 22 nt, Human
ugcccaaagaagguaucugcaa

SEQ ID NO: 1264213 - RNA, 20 nt, Human
ugcccaggccggaaugcagu

SEQ ID NO: 1264214 - RNA, 24 nt, Human
ugcccaggcuggucuugaacuccu

SEQ ID NO: 1264215 - RNA, 20 nt, Human
uggcgagaccucauuucuac

SEQ ID NO: 1264216 - RNA, 20 nt, Human
uggcuggccaaggcugucuu

SEQ ID NO: 1264217 - RNA, 21 nt, Human
ugggaccacagaugugcacca

SEQ ID NO: 1264218 - RNA, 22 nt, Human
ugggcacgugcccaucuaaagu

SEQ ID NO: 1264219 - RNA, 24 nt, Human
ugggguuucaccauguugcccagg

SEQ ID NO: 1264220 - RNA, 21 nt, Human
ugguggcccaugccuguaguc

SEQ ID NO: 1264221 - RNA, 24 nt, Human
uguagagaugggguuucaccaugu

SEQ ID NO: 1264222 - RNA, 26 nt, Human
ugucggaggucgaauucuaguucugc

SEQ ID NO: 1264223 - RNA, 28 nt, Human
ugucucaaaaagccucggaaggaguggc

SEQ ID NO: 1264224 - RNA, 22 nt, Human
uguguugguucaagaccagucu

SEQ ID NO: 1264225 - RNA, 20 nt, Human
uguugguucaagaccagucu

SEQ ID NO: 1264226 - RNA, 26 nt, Human
uucuacuaaaaagaaaaaaaaaaaau

SEQ ID NO: 1264227 - RNA, 19 nt, Human
uucucugggggcagcaguu

SEQ ID NO: 1264228 - RNA, 21 nt, Human
uugaaaucacaaagucagaaa

SEQ ID NO: 1264229 - RNA, 20 nt, Human
uugauacaaaguauccaguu

SEQ ID NO: 1264230 - RNA, 22 nt, Human
uugcagugagccuugauugugc

SEQ ID NO: 1264231 - RNA, 23 nt, Human
uugcagugagccuugauugugcc

SEQ ID NO: 1264232 - RNA, 21 nt, Human
uugccaccuauuagguacuca

SEQ ID NO: 1264233 - RNA, 24 nt, Human
uuggaggcugaauauagaauuuua

SEQ ID NO: 1264234 - RNA, 24 nt, Human
uuguagagaugggguuucaccaug

SEQ ID NO: 1264235 - RNA, 23 nt, Human
uugugccacugcacuccggccug

SEQ ID NO: 1264236 - RNA, 22 nt, Human
uuucaccauguugcccaggcug

SEQ ID NO: 1264237 - RNA, 24 nt, Human
uuucaccauguugcccaggcuggu

SEQ ID NO: 1264238 - RNA, 24 nt, Human
uuuguagagaugggguuucaccau

SEQ ID NO: 1264239 - RNA, 20 nt, Human
uuuuguauuuuuuguagaga

SEQ ID NO: 1264240 - RNA, 20 nt, Human
uuuuuguauuuuuuguagag

SEQ ID NO: 1264241 - RNA, 22 nt, Human
uuuuuuguagagaugggguuuc

SEQ ID NO: 1264242 - RNA, 24 nt, Human
uuuuuuguagagaugggguuucac

SEQ ID NO: 1264243 - RNA, 24 nt, Human
accccaagaaggcuggauucagga

SEQ ID NO: 1264244 - RNA, 18 nt, Human
accccgccaaggccuggg

SEQ ID NO: 1264245 - RNA, 19 nt, Human
agagcgcucagccccacca

SEQ ID NO: 1264246 - RNA, 21 nt, Human
agcgcucagccccaccagagc

SEQ ID NO: 1264247 - RNA, 23 nt, Human
caccaacucccccaaagucgccc

SEQ ID NO: 1264248 - RNA, 21 nt, Human
caccagagcccuuccaggggc

SEQ ID NO: 1264249 - RNA, 20 nt, Human
cccaaagucgcccacccccc

SEQ ID NO: 1264250 - RNA, 22 nt, Human
cccaaagucgcccaccccccgg

SEQ ID NO: 1264251 - RNA, 24 nt, Human
cccccagcgcccacgcggaccugc

SEQ ID NO: 1264252 - RNA, 23 nt, Human
ccccccgggguggcugccuuggc

SEQ ID NO: 1264253 - RNA, 18 nt, Human
cccccgcggcagagcgcu

SEQ ID NO: 1264254 - RNA, 24 nt, Human
cccccgcggcagagcgcucagccc

SEQ ID NO: 1264255 - RNA, 21 nt, Human
ccccgggguggcugccuuggc

SEQ ID NO: 1264256 - RNA, 18 nt, Human
ccgcgcccccgcggcaga

SEQ ID NO: 1264257 - RNA, 19 nt, Human
ccgguagcugaugccccca

SEQ ID NO: 1264258 - RNA, 21 nt, Human
gcagagcgcucagccccacca

SEQ ID NO: 1264259 - RNA, 23 nt, Human
gcggcagagcgcucagccccacc

SEQ ID NO: 1264260 - RNA, 21 nt, Human
gcucagccccaccagagcccu

SEQ ID NO: 1264261 - RNA, 19 nt, Human
ggcugccuuggcugccugg

SEQ ID NO: 1264262 - RNA, 21 nt, Human
gggagagcaccccaagaaggc

SEQ ID NO: 1264263 - RNA, 23 nt, Human
ucccccaaagucgcccacccccc

SEQ ID NO: 1264264 - RNA, 20 nt, Human
ugcugugcccgcgcccccgc

SEQ ID NO: 1264265 - RNA, 20 nt, Human
ugcugugcccgcgcccccgc

SEQ ID NO: 1264266 - RNA, 20 nt, Human
ugggagagcaccccaagaag

SEQ ID NO: 1264267 - RNA, 22 nt, Human
aaacucuauuuuaacccccaaa

SEQ ID NO: 1264268 - RNA, 22 nt, Human
aaauguaagaaacucuauuuua

SEQ ID NO: 1264269 - RNA, 19 nt, Human
agggaagggggaggaacca

SEQ ID NO: 1264270 - RNA, 26 nt, Human
agggggaggaaccaggcacugcucca

SEQ ID NO: 1264271 - RNA, 21 nt, Human
cacacaccaggagcgcccggc

SEQ ID NO: 1264272 - RNA, 18 nt, Human
caggagcgcccggcccag

SEQ ID NO: 1264273 - RNA, 22 nt, Human
cccccaaaaaggcuuauaaaaa

SEQ ID NO: 1264274 - RNA, 18 nt, Human
ccccugagggaaggggga

SEQ ID NO: 1264275 - RNA, 19 nt, Human
cccuugucuaccccugagg

SEQ ID NO: 1264276 - RNA, 21 nt, Human
ccggcccagccuggccccaca

SEQ ID NO: 1264277 - RNA, 21 nt, Human
cuccuguauggcagcagcugg

SEQ ID NO: 1264278 - RNA, 25 nt, Human
cucuauuuuaacccccaaaaaggcu

SEQ ID NO: 1264279 - RNA, 22 nt, Human
gaaaugccuauuaaaaaagucc

SEQ ID NO: 1264280 - RNA, 23 nt, Human
gcccggcccagccuggccccaca

SEQ ID NO: 1264281 - RNA, 20 nt, Human
ggcacuguaagagcaagcac

SEQ ID NO: 1264282 - RNA, 18 nt, Human
uauaaaaaaacaaagcua

SEQ ID NO: 1264283 - RNA, 25 nt, Human
ucaaaggucccuugucuaccccuga

SEQ ID NO: 1264284 - RNA, 20 nt, Human
ucuauuuuaacccccaaaaa

SEQ ID NO: 1264285 - RNA, 23 nt, Human
ugagagucacaguggccacaauc

SEQ ID NO: 1264286 - RNA, 20 nt, Human
ugagggaagggggaggaacc

SEQ ID NO: 1264287 - RNA, 26 nt, Human
uguaagaaacucuauuuuaaccccca

SEQ ID NO: 1264288 - RNA, 21 nt, Human
aacucgcccuccucagcaucc

SEQ ID NO: 1264289 - RNA, 23 nt, Human
aacucgcccuccucagcaucccg

SEQ ID NO: 1264290 - RNA, 18 nt, Human
aagauggcagacuuguag

SEQ ID NO: 1264291 - RNA, 23 nt, Human
aagcacucuucagggguugcucc

SEQ ID NO: 1264292 - RNA, 21 nt, Human
agaaagcgggcaaagcccaga

SEQ ID NO: 1264293 - RNA, 19 nt, Human
agagggguggggggagggc

SEQ ID NO: 1264294 - RNA, 24 nt, Human
agcagcuaucagaguuuaggcugc

SEQ ID NO: 1264295 - RNA, 22 nt, Human
agcaucuggugguggccacgcc

SEQ ID NO: 1264296 - RNA, 23 nt, Human
agcguccacucauuuaagauggc

SEQ ID NO: 1264297 - RNA, 19 nt, Human
agcugugacacggugagua

SEQ ID NO: 1264298 - RNA, 23 nt, Human
aggcgccgggacgcuggugagcc

SEQ ID NO: 1264299 - RNA, 19 nt, Human
aggcugagggaggaggcag

SEQ ID NO: 1264300 - RNA, 21 nt, Human
auccugggcugauaggaaacc

SEQ ID NO: 1264301 - RNA, 28 nt, Human
caaggacaugaggcccugcaggaagcua

SEQ ID NO: 1264302 - RNA, 20 nt, Human
cacccccggccuucagaguu

SEQ ID NO: 1264303 - RNA, 22 nt, Human
cagaaagcgggcaaagcccaga

SEQ ID NO: 1264304 - RNA, 24 nt, Human
cagagauuccuuccgcuguaguuc

SEQ ID NO: 1264305 - RNA, 19 nt, Human
cagcagcagcuucagguag

SEQ ID NO: 1264306 - RNA, 27 nt, Human
cagcagcuucagguagcacuccaucag

SEQ ID NO: 1264307 - RNA, 19 nt, Human
cagcucagaaagcgggcaa

SEQ ID NO: 1264308 - RNA, 27 nt, Human
cagcucagaaagcgggcaaagcccaga

SEQ ID NO: 1264309 - RNA, 23 nt, Human
cagcugggauggcugagccacag

SEQ ID NO: 1264310 - RNA, 22 nt, Human
caggucugagucauaggacaug

SEQ ID NO: 1264311 - RNA, 21 nt, Human
caucauggggacuuccugggc

SEQ ID NO: 1264312 - RNA, 20 nt, Human
ccaccuggaaacucuuaugc

SEQ ID NO: 1264313 - RNA, 23 nt, Human
ccaccuggaaacucuuaugcccc

SEQ ID NO: 1264314 - RNA, 19 nt, Human
ccacgccuccugcagcaga

SEQ ID NO: 1264315 - RNA, 23 nt, Human
ccagcccuaacggaggcgccggg

SEQ ID NO: 1264316 - RNA, 22 nt, Human
ccaugcccggcagcggcccaca

SEQ ID NO: 1264317 - RNA, 23 nt, Human
cccccuguaagaagcuauugggu

SEQ ID NO: 1264318 - RNA, 19 nt, Human
ccuccugcagcagaggggu

SEQ ID NO: 1264319 - RNA, 18 nt, Human
ccugcagcagaggggugg

SEQ ID NO: 1264320 - RNA, 22 nt, Human
ccugcagcagaggggugggggg

SEQ ID NO: 1264321 - RNA, 18 nt, Human
cgcaagcgggccugcucc

SEQ ID NO: 1264322 - RNA, 20 nt, Human
cuaacgcccccagggagcag

SEQ ID NO: 1264323 - RNA, 19 nt, Human
cucgcaauggucuggacuc

SEQ ID NO: 1264324 - RNA, 19 nt, Human
cucgcaauggucuggacuu

SEQ ID NO: 1264325 - RNA, 19 nt, Human
cugagccacacucaccccc

SEQ ID NO: 1264326 - RNA, 19 nt, Human
cugcagcagaggggugggg

SEQ ID NO: 1264327 - RNA, 21 nt, Human
cuggugguggccacgccuccu

SEQ ID NO: 1264328 - RNA, 21 nt, Human
gaaaauguuccccaagucccc

SEQ ID NO: 1264329 - RNA, 20 nt, Human
gacaucauggggacuuccug

SEQ ID NO: 1264330 - RNA, 20 nt, Human
gagcaguuuuuucuugguuc

SEQ ID NO: 1264331 - RNA, 18 nt, Human
gaggaggcagucggcuuc

SEQ ID NO: 1264332 - RNA, 23 nt, Human
gcagcagcagcuucagguagcac

SEQ ID NO: 1264333 - RNA, 18 nt, Human
gccuugacucuggagucc

SEQ ID NO: 1264334 - RNA, 23 nt, Human
ggacagcugggaugaacuggccg

SEQ ID NO: 1264335 - RNA, 22 nt, Human
ggacaugggcuccucgcaaugg

SEQ ID NO: 1264336 - RNA, 21 nt, Human
ggagcaguuuuuucuugguuc

SEQ ID NO: 1264337 - RNA, 23 nt, Human
ggagcaguuuuuucuugguucuu

SEQ ID NO: 1264338 - RNA, 21 nt, Human
ggauggggcugccugggcuug

SEQ ID NO: 1264339 - RNA, 21 nt, Human
ggcggugggcugguaguacuc

SEQ ID NO: 1264340 - RNA, 24 nt, Human
gggaucagcagaggggcaucaggc

SEQ ID NO: 1264341 - RNA, 19 nt, Human
gggauggggcugccugggc

SEQ ID NO: 1264342 - RNA, 25 nt, Human
gggccugcuccugcagcagcagcuu

SEQ ID NO: 1264343 - RNA, 21 nt, Human
ggguccagcucagaaagcggg

SEQ ID NO: 1264344 - RNA, 19 nt, Human
gguagagagaggguccagc

SEQ ID NO: 1264345 - RNA, 22 nt, Human
guugcucccgggaaggccggua

SEQ ID NO: 1264346 - RNA, 19 nt, Human
uaaacggcccugccugccc

SEQ ID NO: 1264347 - RNA, 22 nt, Human
uagaagucauccucugagaucc

SEQ ID NO: 1264348 - RNA, 23 nt, Human
uaggaggccagugcucuggucac

SEQ ID NO: 1264349 - RNA, 19 nt, Human
ucagggguugcucccggga

SEQ ID NO: 1264350 - RNA, 19 nt, Human
uccaggcugagggaggagg

SEQ ID NO: 1264351 - RNA, 18 nt, Human
uccccaaguccccuuucc

SEQ ID NO: 1264352 - RNA, 19 nt, Human
ugacaaggggacacagcug

SEQ ID NO: 1264353 - RNA, 18 nt, Human
ugacucuggagucccccu

SEQ ID NO: 1264354 - RNA, 19 nt, Human
ugagcguccacucauuuaa

SEQ ID NO: 1264355 - RNA, 21 nt, Human
ugagggaggaggcagucggcu

SEQ ID NO: 1264356 - RNA, 24 nt, Human
ugagggaggaggcagucggcuucu

SEQ ID NO: 1264357 - RNA, 23 nt, Human
ugaguccucagcauuugcugugc

SEQ ID NO: 1264358 - RNA, 20 nt, Human
ugcagcagaggggugggggg

SEQ ID NO: 1264359 - RNA, 20 nt, Human
ugccugggcuugccuucuuc

SEQ ID NO: 1264360 - RNA, 18 nt, Human
ugccuguggagaccaggc

SEQ ID NO: 1264361 - RNA, 22 nt, Human
ugcuccugcagcagcagcuuca

SEQ ID NO: 1264362 - RNA, 19 nt, Human
uggccagcccuaacggagg

SEQ ID NO: 1264363 - RNA, 21 nt, Human
ugggauggcugagccacacuc

SEQ ID NO: 1264364 - RNA, 18 nt, Human
ugggauggggcugccugg

SEQ ID NO: 1264365 - RNA, 19 nt, Human
ugggauggggcugccuggg

SEQ ID NO: 1264366 - RNA, 18 nt, Human
uggggggagggccagggg

SEQ ID NO: 1264367 - RNA, 23 nt, Human
ugguggccacgccuccugcagca

SEQ ID NO: 1264368 - RNA, 19 nt, Human
uguaagaagcuauugggug

SEQ ID NO: 1264369 - RNA, 22 nt, Human
uguccaggcugagggaggaggc

SEQ ID NO: 1264370 - RNA, 22 nt, Human
uguuuggccagcccuaacggag

SEQ ID NO: 1264371 - RNA, 23 nt, Human
uucuugagaaaaaugccugugga

SEQ ID NO: 1264372 - RNA, 21 nt, Human
aaccauuuuuccaugcugcuu

SEQ ID NO: 1264373 - RNA, 23 nt, Human
ucccuuuaaguuacgacgggaau

SEQ ID NO: 1264374 - RNA, 18 nt, Human
ucugcagguagcauggaa

SEQ ID NO: 1264375 - RNA, 20 nt, Human
uuccaugcugcuuaagagcc

SEQ ID NO: 1264376 - RNA, 22 nt, Human
acaguuuucuucuuggaacugu

SEQ ID NO: 1264377 - RNA, 18 nt, Human
accaaugucugcuacauu

SEQ ID NO: 1264378 - RNA, 23 nt, Human
aggucaaagccagcaacuaagga

SEQ ID NO: 1264379 - RNA, 18 nt, Human
auaagucuuggguggguu

SEQ ID NO: 1264380 - RNA, 19 nt, Human
auguuacaaucaaaaccaa

SEQ ID NO: 1264381 - RNA, 23 nt, Human
caacauaaaaggucaaagccagc

SEQ ID NO: 1264382 - RNA, 20 nt, Human
cacaccauccuggguauaag

SEQ ID NO: 1264383 - RNA, 18 nt, Human
caccccaggcaauacaac

SEQ ID NO: 1264384 - RNA, 18 nt, Human
cacuuuucagcuuugacc

SEQ ID NO: 1264385 - RNA, 18 nt, Human
caggaagcugccuggguu

SEQ ID NO: 1264386 - RNA, 18 nt, Human
cauaaaaggucaaagcca

SEQ ID NO: 1264387 - RNA, 21 nt, Human
cauccaucuaucacauugucu

SEQ ID NO: 1264388 - RNA, 22 nt, Human
cauggcccacuuugaugcucca

SEQ ID NO: 1264389 - RNA, 18 nt, Human
ccacgcuauucugauuua

SEQ ID NO: 1264390 - RNA, 19 nt, Human
ccacuuuucagcuuugacc

SEQ ID NO: 1264391 - RNA, 22 nt, Human
ccauccuggguauaagucuugg

SEQ ID NO: 1264392 - RNA, 21 nt, Human
cccauggcccacuuugaugcu

SEQ ID NO: 1264393 - RNA, 25 nt, Human
ccugccucggccaccucgccccgac

SEQ ID NO: 1264394 - RNA, 20 nt, Human
cugcaccucgaggucuccgc

SEQ ID NO: 1264395 - RNA, 20 nt, Human
gccucggccaccucgccccg

SEQ ID NO: 1264396 - RNA, 27 nt, Human
uaaaaggucaaagccagcaacuaagga

SEQ ID NO: 1264397 - RNA, 19 nt, Human
uagacgcaggcauauaggg

SEQ ID NO: 1264398 - RNA, 23 nt, Human
uauggcaguugagaaaauagaug

SEQ ID NO: 1264399 - RNA, 19 nt, Human
ucaaagccagcaacuaagg

SEQ ID NO: 1264400 - RNA, 22 nt, Human
ucugcaguagacaccccaggca

SEQ ID NO: 1264401 - RNA, 23 nt, Human
ugaaauaucugcaguagacaccc

SEQ ID NO: 1264402 - RNA, 20 nt, Human
ugcagaauaagaucuucuuc

SEQ ID NO: 1264403 - RNA, 18 nt, Human
ugccaggaagcugccugg

SEQ ID NO: 1264404 - RNA, 20 nt, Human
ugccaggaagcugccugggu

SEQ ID NO: 1264405 - RNA, 21 nt, Human
ugcuacauuuuccacuucuuc

SEQ ID NO: 1264406 - RNA, 24 nt, Human
uggcacugccaggaagcugccugg

SEQ ID NO: 1264407 - RNA, 23 nt, Human
uggcccacuuugaugcuccaaau

SEQ ID NO: 1264408 - RNA, 21 nt, Human
uuaaaaauuucccgaccuccu

SEQ ID NO: 1264409 - RNA, 23 nt, Human
uuaaaaauuucccgaccuccuga

SEQ ID NO: 1264410 - RNA, 20 nt, Human
uuauaaucuucaauuucagu

SEQ ID NO: 1264411 - RNA, 23 nt, Human
uuauggguacuccaagccuccua

SEQ ID NO: 1264412 - RNA, 19 nt, Human
uucauugcagaauaagauc

SEQ ID NO: 1264413 - RNA, 26 nt, Human
uucuucaucauccuuauuugaugaaa

SEQ ID NO: 1264414 - RNA, 19 nt, Human
uucuuggaacuguaacugu

SEQ ID NO: 1264415 - RNA, 19 nt, Human
uugugcuacaagugaagau

SEQ ID NO: 1264416 - RNA, 22 nt, Human
uuuaaaaauuucccgaccuccu

SEQ ID NO: 1264417 - RNA, 22 nt, Human
uuugguuuugacaguuuucuuc

SEQ ID NO: 1264418 - RNA, 20 nt, Human
aauugucaagagcaguuggu

SEQ ID NO: 1264419 - RNA, 21 nt, Human
acacugaagacacaaagaaug

SEQ ID NO: 1264420 - RNA, 18 nt, Human
acccagagauacgugguu

SEQ ID NO: 1264421 - RNA, 20 nt, Human
accuugagcagguauagaag

SEQ ID NO: 1264422 - RNA, 19 nt, Human
acuguaguuucauucaaau

SEQ ID NO: 1264423 - RNA, 19 nt, Human
agaguccugggugacaugc

SEQ ID NO: 1264424 - RNA, 23 nt, Human
agcaguuggugguucugaaauac

SEQ ID NO: 1264425 - RNA, 19 nt, Human
agccaacacugaagacaca

SEQ ID NO: 1264426 - RNA, 18 nt, Human
agguugccacuggcaugg

SEQ ID NO: 1264427 - RNA, 21 nt, Human
auagaagcucaaagacaugcc

SEQ ID NO: 1264428 - RNA, 23 nt, Human
auagagccaugcccacugaccca

SEQ ID NO: 1264429 - RNA, 20 nt, Human
augugcugcacaguuacgug

SEQ ID NO: 1264430 - RNA, 18 nt, Human
caaagaugacaaugaccu

SEQ ID NO: 1264431 - RNA, 26 nt, Human
caagccaacacugaagacacaaagaa

SEQ ID NO: 1264432 - RNA, 21 nt, Human
cacaguuacgugaacauguca

SEQ ID NO: 1264433 - RNA, 21 nt, Human
caucggcagaguccuggguga

SEQ ID NO: 1264434 - RNA, 26 nt, Human
ccagcggcuccugacuccuguucucu

SEQ ID NO: 1264435 - RNA, 22 nt, Human
cccaaaauaucucuucuccuuu

SEQ ID NO: 1264436 - RNA, 21 nt, Human
cuaagcguuuucugcaagaac

SEQ ID NO: 1264437 - RNA, 24 nt, Human
cuauagguccugccugcaggaaug

SEQ ID NO: 1264438 - RNA, 20 nt, Human
cuguggucuuccuaaguacu

SEQ ID NO: 1264439 - RNA, 18 nt, Human
gauuaccuccuaugaaac

SEQ ID NO: 1264440 - RNA, 19 nt, Human
gcagguauagaagcucaaa

SEQ ID NO: 1264441 - RNA, 25 nt, Human
ggauggaauugagaggagcagggcu

SEQ ID NO: 1264442 - RNA, 26 nt, Human
ggcuaaggccucccaaugcuguuugu

SEQ ID NO: 1264443 - RNA, 23 nt, Human
ggugauaaggacuaugugaagga

SEQ ID NO: 1264444 - RNA, 23 nt, Human
gucuccugccagcggcuccugac

SEQ ID NO: 1264445 - RNA, 25 nt, Human
gugguucugaaauacaauccucagc

SEQ ID NO: 1264446 - RNA, 22 nt, Human
uaaaacaagccaacacugaaga

SEQ ID NO: 1264447 - RNA, 24 nt, Human
uacagauggaucagcuaaaacaag

SEQ ID NO: 1264448 - RNA, 22 nt, Human
uagagccaugcccacugacccc

SEQ ID NO: 1264449 - RNA, 22 nt, Human
uagcuguggucuuccuaaguac

SEQ ID NO: 1264450 - RNA, 24 nt, Human
uaggaauagagccaugcccacuga

SEQ ID NO: 1264451 - RNA, 24 nt, Human
uagguucauugaaaccaggguaac

SEQ ID NO: 1264452 - RNA, 18 nt, Human
uauagaagcucaaagaca

SEQ ID NO: 1264453 - RNA, 18 nt, Human
ucauucaaaucuucacgu

SEQ ID NO: 1264454 - RNA, 21 nt, Human
ucauugaaaccaggguaacac

SEQ ID NO: 1264455 - RNA, 18 nt, Human
ucccggcaugugcugcac

SEQ ID NO: 1264456 - RNA, 19 nt, Human
ucucucggcuuaguaaggg

SEQ ID NO: 1264457 - RNA, 22 nt, Human
ucugaaauacaauccucagcca

SEQ ID NO: 1264458 - RNA, 21 nt, Human
ugaaaccaggguaacaccuuu

SEQ ID NO: 1264459 - RNA, 20 nt, Human
ugaaauacaauccucagcca

SEQ ID NO: 1264460 - RNA, 18 nt, Human
ugacaugcugucuccugc

SEQ ID NO: 1264461 - RNA, 24 nt, Human
ugacaugcugucuccugccagcgg

SEQ ID NO: 1264462 - RNA, 19 nt, Human
ugagaggagcagggcuaag

SEQ ID NO: 1264463 - RNA, 22 nt, Human
ugaggaauuuuguagcuaccca

SEQ ID NO: 1264464 - RNA, 21 nt, Human
ugcugcacaguuacgugaaca

SEQ ID NO: 1264465 - RNA, 21 nt, Human
ugucaagagcaguuggugguu

SEQ ID NO: 1264466 - RNA, 22 nt, Human
aaaaaaaaacacacacacaaaa

SEQ ID NO: 1264467 - RNA, 24 nt, Human
aaaaaaaaacacacacacaaaacu

SEQ ID NO: 1264468 - RNA, 21 nt, Human
aaaaaaacacacacacaaaac

SEQ ID NO: 1264469 - RNA, 22 nt, Human
aaaaaaacacacacacaaaacu

SEQ ID NO: 1264470 - RNA, 21 nt, Human
aaaaaagaacaagucagcuug

SEQ ID NO: 1264471 - RNA, 24 nt, Human
aaaccaagguggggggauugcuug

SEQ ID NO: 1264472 - RNA, 22 nt, Human
aaacuaccaccaccuaccccaa

SEQ ID NO: 1264473 - RNA, 24 nt, Human
aaagugcugggauuacaggcguga

SEQ ID NO: 1264474 - RNA, 24 nt, Human
aaagugcugggauuacagguguga

SEQ ID NO: 1264475 - RNA, 21 nt, Human
aacacacacacaaaacuacca

SEQ ID NO: 1264476 - RNA, 24 nt, Human
aacacuuugggaaaccaagguggg

SEQ ID NO: 1264477 - RNA, 20 nt, Human
aacauggcaaaacccggucu

SEQ ID NO: 1264478 - RNA, 20 nt, Human
aaguagcugggauuacaggc

SEQ ID NO: 1264479 - RNA, 23 nt, Human
aaguagcugggauuacaggcgug

SEQ ID NO: 1264480 - RNA, 24 nt, Human
aaguagcugggauuacaggcgugg

SEQ ID NO: 1264481 - RNA, 27 nt, Human
aaguagcugggauuacaggcgugggcc

SEQ ID NO: 1264482 - RNA, 22 nt, Human
aagucagcuuggaaaaaacuga

SEQ ID NO: 1264483 - RNA, 18 nt, Human
aagugcugggauuacagg

SEQ ID NO: 1264484 - RNA, 19 nt, Human
aagugcugggauuacaggc

SEQ ID NO: 1264485 - RNA, 19 nt, Human
aagugcugggauuacaggc

SEQ ID NO: 1264486 - RNA, 26 nt, Human
aagugcugggauuacaggcgugagcc

SEQ ID NO: 1264487 - RNA, 19 nt, Human
aagugcugggauuacaggu

SEQ ID NO: 1264488 - RNA, 26 nt, Human
aagugcugggauuacaggugugagcc

SEQ ID NO: 1264489 - RNA, 24 nt, Human
aaguggagguugcagugaacugag

SEQ ID NO: 1264490 - RNA, 21 nt, Human
aaguucuauucuuuuuuuuuu

SEQ ID NO: 1264491 - RNA, 24 nt, Human
aauugcuugaaccuaggaagugga

SEQ ID NO: 1264492 - RNA, 19 nt, Human
acacaaaacuaccaccacc

SEQ ID NO: 1264493 - RNA, 24 nt, Human
accacguuggccaggcuggucucg

SEQ ID NO: 1264494 - RNA, 21 nt, Human
accgcacuccagccugggcaa

SEQ ID NO: 1264495 - RNA, 24 nt, Human
accgcacuccagccugggcaacgg

SEQ ID NO: 1264496 - RNA, 18 nt, Human
accucacuccagccuggg

SEQ ID NO: 1264497 - RNA, 25 nt, Human
acggaguuucgcucguguugcccag

SEQ ID NO: 1264498 - RNA, 22 nt, Human
acuaccuauugguaaaggagau

SEQ ID NO: 1264499 - RNA, 24 nt, Human
acuccagccugggccuccuaggcu

SEQ ID NO: 1264500 - RNA, 23 nt, Human
acugcccugcccucccaaagugc

SEQ ID NO: 1264501 - RNA, 21 nt, Human
agacaacuuugaaaagaguuu

SEQ ID NO: 1264502 - RNA, 20 nt, Human
agauuugcucaaaaaagaac

SEQ ID NO: 1264503 - RNA, 30 nt, Human
agcaguuccaaguauuuuuuuuuuuuuuuu

SEQ ID NO: 1264504 - RNA, 23 nt, Human
agccgggugugguagugugggcc

SEQ ID NO: 1264505 - RNA, 18 nt, Human
agccuggccaacauggca

SEQ ID NO: 1264506 - RNA, 24 nt, Human
agccuggccaacauggcaaaaccc

SEQ ID NO: 1264507 - RNA, 24 nt, Human
agcgauucuccugccucagccuuc

SEQ ID NO: 1264508 - RNA, 23 nt, Human
agcugaggcaggagaauugcuug

SEQ ID NO: 1264509 - RNA, 23 nt, Human
agcugggaugacaggugugugcc

SEQ ID NO: 1264510 - RNA, 19 nt, Human
agcuuggaaaaaacugaug

SEQ ID NO: 1264511 - RNA, 23 nt, Human
aggaauucuccugccucagccuc

SEQ ID NO: 1264512 - RNA, 18 nt, Human
aggaguucaagaccggcc

SEQ ID NO: 1264513 - RNA, 22 nt, Human
aggcaggagaauugcuugaacc

SEQ ID NO: 1264514 - RNA, 23 nt, Human
aggcaggagaauugcuugaaccu

SEQ ID NO: 1264515 - RNA, 24 nt, Human
aggcaggagaauugcuugaaccua

SEQ ID NO: 1264516 - RNA, 18 nt, Human
aggcuagucuugaacucc

SEQ ID NO: 1264517 - RNA, 20 nt, Human
aggggguuucaccacguugg

SEQ ID NO: 1264518 - RNA, 24 nt, Human
aggggguuucaccacguuggccag

SEQ ID NO: 1264519 - RNA, 19 nt, Human
agguggagguugcagugaa

SEQ ID NO: 1264520 - RNA, 24 nt, Human
agguggagguugcagugaaccaag

SEQ ID NO: 1264521 - RNA, 24 nt, Human
aggugugugccaccacucccagcu

SEQ ID NO: 1264522 - RNA, 18 nt, Human
aguagcucaugccuguaa

SEQ ID NO: 1264523 - RNA, 23 nt, Human
aguagcucaugccuguaauccca

SEQ ID NO: 1264524 - RNA, 23 nt, Human
aguagcugggaugacaggugugu

SEQ ID NO: 1264525 - RNA, 27 nt, Human
aguccaggaguucaagaccggccuggg

SEQ ID NO: 1264526 - RNA, 24 nt, Human
aucaugccaccgcacuccagccug

SEQ ID NO: 1264527 - RNA, 22 nt, Human
aucccaacacuuugggaaacca

SEQ ID NO: 1264528 - RNA, 24 nt, Human
aucgugccaccucacuccagccug

SEQ ID NO: 1264529 - RNA, 24 nt, Human
augccaccgcacuccagccugggc

SEQ ID NO: 1264530 - RNA, 19 nt, Human
augccuguaaucccaacac

SEQ ID NO: 1264531 - RNA, 20 nt, Human
auggaguuucaccaugucag

SEQ ID NO: 1264532 - RNA, 24 nt, Human
auggaguuucaccaugucagccag

SEQ ID NO: 1264533 - RNA, 24 nt, Human
auugcuugaguccaggaguucaag

SEQ ID NO: 1264534 - RNA, 22 nt, Human
auuuuuguauuuuuaguagaga

SEQ ID NO: 1264535 - RNA, 24 nt, Human
caaagugcugggauuacaggcgug

SEQ ID NO: 1264536 - RNA, 24 nt, Human
caaagugcugggauuacaggugug

SEQ ID NO: 1264537 - RNA, 24 nt, Human
caacacuuugggaaaccaaggugg

SEQ ID NO: 1264538 - RNA, 23 nt, Human
caacauggcaaaacccggucucu

SEQ ID NO: 1264539 - RNA, 20 nt, Human
caaccuccaccucccagguu

SEQ ID NO: 1264540 - RNA, 23 nt, Human
caaccuccaccucccagguucaa

SEQ ID NO: 1264541 - RNA, 20 nt, Human
caagcgauucuccugccuca

SEQ ID NO: 1264542 - RNA, 22 nt, Human
caagcgauucuccugccucagc

SEQ ID NO: 1264543 - RNA, 19 nt, Human
caagcugaacuagcugcuu

SEQ ID NO: 1264544 - RNA, 22 nt, Human
caaggaauucuccugccucagc

SEQ ID NO: 1264545 - RNA, 20 nt, Human
caagugauuguugugccuca

SEQ ID NO: 1264546 - RNA, 21 nt, Human
cacaaaacuaccaccaccuac

SEQ ID NO: 1264547 - RNA, 23 nt, Human
cacacacacaaaacuaccaccac

SEQ ID NO: 1264548 - RNA, 21 nt, Human
caccacguuggccaggcuggu

SEQ ID NO: 1264549 - RNA, 24 nt, Human
caccacguuggccaggcuggucuc

SEQ ID NO: 1264550 - RNA, 27 nt, Human
caccacguuggccaggcuggucucgaa

SEQ ID NO: 1264551 - RNA, 21 nt, Human
caccaugucagccaggcuagu

SEQ ID NO: 1264552 - RNA, 27 nt, Human
caccaugucagccaggcuagucuugaa

SEQ ID NO: 1264553 - RNA, 26 nt, Human
caccgcacuccagccugggcaacggc

SEQ ID NO: 1264554 - RNA, 23 nt, Human
caccuagccucccaaagugcugg

SEQ ID NO: 1264555 - RNA, 25 nt, Human
caccucacuccagccugggccuccu

SEQ ID NO: 1264556 - RNA, 24 nt, Human
cacguuggccaggcuggucucgaa

SEQ ID NO: 1264557 - RNA, 21 nt, Human
cacuccagccugggcaacggc

SEQ ID NO: 1264558 - RNA, 22 nt, Human
cacuccagccugggcaacggcg

SEQ ID NO: 1264559 - RNA, 21 nt, Human
cacugcaaccuccaccuccca

SEQ ID NO: 1264560 - RNA, 18 nt, Human
cacugcaaccucugccuc

SEQ ID NO: 1264561 - RNA, 21 nt, Human
cacugcaaccucugccuccca

SEQ ID NO: 1264562 - RNA, 18 nt, Human
cagccugggcaacggcga

SEQ ID NO: 1264563 - RNA, 23 nt, Human
cagccugggcaacggcgagacuu

SEQ ID NO: 1264564 - RNA, 18 nt, Human
caggcuagucuugaacuc

SEQ ID NO: 1264565 - RNA, 24 nt, Human
caugccuguaaucccaacacuuug

SEQ ID NO: 1264566 - RNA, 23 nt, Human
caugucagccaggcuagucuuga

SEQ ID NO: 1264567 - RNA, 24 nt, Human
caugucagccaggcuagucuugaa

SEQ ID NO: 1264568 - RNA, 21 nt, Human
ccaaagugcugggauuacagg

SEQ ID NO: 1264569 - RNA, 21 nt, Human
ccaaagugcugggauuacagg

SEQ ID NO: 1264570 - RNA, 22 nt, Human
ccaaagugcugggauuacaggc

SEQ ID NO: 1264571 - RNA, 22 nt, Human
ccaaagugcugggauuacaggc

SEQ ID NO: 1264572 - RNA, 24 nt, Human
ccaaagugcugggauuacaggcgu

SEQ ID NO: 1264573 - RNA, 24 nt, Human
ccaaagugcugggauuacaggugu

SEQ ID NO: 1264574 - RNA, 21 nt, Human
ccaacugcccugcccucccaa

SEQ ID NO: 1264575 - RNA, 22 nt, Human
ccaaguagcugggauuacaggc

SEQ ID NO: 1264576 - RNA, 24 nt, Human
ccaaguagcugggauuacaggcgu

SEQ ID NO: 1264577 - RNA, 20 nt, Human
ccaccgcacuccagccuggg

SEQ ID NO: 1264578 - RNA, 20 nt, Human
ccaccgcacuccagccuggg

SEQ ID NO: 1264579 - RNA, 21 nt, Human
ccaccgcacuccagccugggc

SEQ ID NO: 1264580 - RNA, 22 nt, Human
ccaccgcacuccagccugggca

SEQ ID NO: 1264581 - RNA, 24 nt, Human
ccaccgcacuccagccugggcaac

SEQ ID NO: 1264582 - RNA, 24 nt, Human
ccaccucccagguucaagcgauuc

SEQ ID NO: 1264583 - RNA, 18 nt, Human
ccacugcauccagccaag

SEQ ID NO: 1264584 - RNA, 19 nt, Human
ccacugcauccagccaagu

SEQ ID NO: 1264585 - RNA, 20 nt, Human
cccaccuagccucccaaagu

SEQ ID NO: 1264586 - RNA, 20 nt, Human
cccagguucaagcgauucuc

SEQ ID NO: 1264587 - RNA, 23 nt, Human
cccagguucaagcgauucuccug

SEQ ID NO: 1264588 - RNA, 21 nt, Human
cccuggagguggagguugcag

SEQ ID NO: 1264589 - RNA, 24 nt, Human
ccucccagguucaagcgauucucc

SEQ ID NO: 1264590 - RNA, 24 nt, Human
ccucccagguucaaggaauucucc

SEQ ID NO: 1264591 - RNA, 23 nt, Human
ccugccucagccuuccaaguagc

SEQ ID NO: 1264592 - RNA, 24 nt, Human
ccugccucagccuuccaaguagcu

SEQ ID NO: 1264593 - RNA, 18 nt, Human
ccuggccucaagugaucc

SEQ ID NO: 1264594 - RNA, 19 nt, Human
ccuggccucaagugaucca

SEQ ID NO: 1264595 - RNA, 19 nt, Human
ccuggccucaagugaucca

SEQ ID NO: 1264596 - RNA, 23 nt, Human
ccuggccucaagugauccaacug

SEQ ID NO: 1264597 - RNA, 22 nt, Human
ccugggcaacauagugagaccc

SEQ ID NO: 1264598 - RNA, 19 nt, Human
ccugggcaacggcgagacu

SEQ ID NO: 1264599 - RNA, 21 nt, Human
ccuguagucccagcuacucug

SEQ ID NO: 1264600 - RNA, 23 nt, Human
ccuguagucccagcuacucugaa

SEQ ID NO: 1264601 - RNA, 21 nt, Human
cgagaccagccuggccaacau

SEQ ID NO: 1264602 - RNA, 23 nt, Human
cgugggccaccaugccuggcuau

SEQ ID NO: 1264603 - RNA, 19 nt, Human
cucaaaaaagaacaaguca

SEQ ID NO: 1264604 - RNA, 23 nt, Human
cucaagugauccaacugcccugc

SEQ ID NO: 1264605 - RNA, 24 nt, Human
cucacugcaaccuccaccucccag

SEQ ID NO: 1264606 - RNA, 24 nt, Human
cucagccuuccaaguagcugggau

SEQ ID NO: 1264607 - RNA, 24 nt, Human
cucaugccuguaaucccaacacuu

SEQ ID NO: 1264608 - RNA, 22 nt, Human
cuccugaccucgugaucugccc

SEQ ID NO: 1264609 - RNA, 22 nt, Human
cuccugccucagccucuugagu

SEQ ID NO: 1264610 - RNA, 24 nt, Human
cugaacccuggagguggagguugc

SEQ ID NO: 1264611 - RNA, 24 nt, Human
cugcaaccuccaccucccagguuc

SEQ ID NO: 1264612 - RNA, 23 nt, Human
cugcaaccucugccucccagguu

SEQ ID NO: 1264613 - RNA, 24 nt, Human
cugcaaccucugccucccagguuc

SEQ ID NO: 1264614 - RNA, 24 nt, Human
cugcccugcccucccaaagugcug

SEQ ID NO: 1264615 - RNA, 23 nt, Human
cugccucagccucuugaguagcu

SEQ ID NO: 1264616 - RNA, 23 nt, Human
cuguauuuuuaguagagauggag

SEQ ID NO: 1264617 - RNA, 19 nt, Human
cuucgagaccagccuggcc

SEQ ID NO: 1264618 - RNA, 18 nt, Human
gaaguggagguugcagug

SEQ ID NO: 1264619 - RNA, 21 nt, Human
gaccucgugaucugcccaccu

SEQ ID NO: 1264620 - RNA, 23 nt, Human
gaccucgugaucugcccaccuag

SEQ ID NO: 1264621 - RNA, 23 nt, Human
gagaauugcuugaaccuaggaag

SEQ ID NO: 1264622 - RNA, 23 nt, Human
gagaucaugccaccgcacuccag

SEQ ID NO: 1264623 - RNA, 23 nt, Human
gagguugcagugaaccaagaucg

SEQ ID NO: 1264624 - RNA, 18 nt, Human
gauuacaggcgugagcca

SEQ ID NO: 1264625 - RNA, 22 nt, Human
gauuacaggcgugagccaccgc

SEQ ID NO: 1264626 - RNA, 23 nt, Human
gauuacaggcgugagccaccgca

SEQ ID NO: 1264627 - RNA, 18 nt, Human
gauuacaggcgugggcca

SEQ ID NO: 1264628 - RNA, 21 nt, Human
gauuacaggcgugggccacca

SEQ ID NO: 1264629 - RNA, 24 nt, Human
gauuacaggcgugggccaccaugc

SEQ ID NO: 1264630 - RNA, 18 nt, Human
gauuacaggugugagcca

SEQ ID NO: 1264631 - RNA, 22 nt, Human
gauuacaggugugagccacugc

SEQ ID NO: 1264632 - RNA, 23 nt, Human
gauuacaggugugagccacugca

SEQ ID NO: 1264633 - RNA, 24 nt, Human
gauugcuugaguccaggaguucaa

SEQ ID NO: 1264634 - RNA, 22 nt, Human
gcaaccuccaccucccagguuc

SEQ ID NO: 1264635 - RNA, 22 nt, Human
gccaccgcacuccagccugggc

SEQ ID NO: 1264636 - RNA, 22 nt, Human
gccaccucacuccagccugggc

SEQ ID NO: 1264637 - RNA, 21 nt, Human
gccugggcaacauagugagac

SEQ ID NO: 1264638 - RNA, 23 nt, Human
gccugggcaacauagugagaccc

SEQ ID NO: 1264639 - RNA, 23 nt, Human
gccugggcaacauagugagaccc

SEQ ID NO: 1264640 - RNA, 19 nt, Human
gccugggccuccuaggcuc

SEQ ID NO: 1264641 - RNA, 18 nt, Human
gccuguagucccagcuac

SEQ ID NO: 1264642 - RNA, 24 nt, Human
gcgauucuccugccucagccuucc

SEQ ID NO: 1264643 - RNA, 19 nt, Human
gcuagucuugaacuccugg

SEQ ID NO: 1264644 - RNA, 23 nt, Human
gcuagucuugaacuccuggccuc

SEQ ID NO: 1264645 - RNA, 21 nt, Human
gcucguguugcccaggcugga

SEQ ID NO: 1264646 - RNA, 23 nt, Human
gcuggucucgaacuccugaccuc

SEQ ID NO: 1264647 - RNA, 19 nt, Human
ggaaaucuuuuagaaaucc

SEQ ID NO: 1264648 - RNA, 23 nt, Human
ggagguugcagugaaccaagauc

SEQ ID NO: 1264649 - RNA, 24 nt, Human
ggagguugcagugaaccaagaucg

SEQ ID NO: 1264650 - RNA, 20 nt, Human
ggagguugcagugaacugag

SEQ ID NO: 1264651 - RNA, 22 nt, Human
ggagguugcagugaacugagau

SEQ ID NO: 1264652 - RNA, 24 nt, Human
ggagguugcagugaacugagauca

SEQ ID NO: 1264653 - RNA, 20 nt, Human
ggagguugcagugaacuggc

SEQ ID NO: 1264654 - RNA, 22 nt, Human
ggaguuucaccaugucagccag

SEQ ID NO: 1264655 - RNA, 24 nt, Human
ggauuacaggcgugggccaccaug

SEQ ID NO: 1264656 - RNA, 23 nt, Human
ggauugcuugaguccaggaguuc

SEQ ID NO: 1264657 - RNA, 24 nt, Human
ggccuguagucccagcuacucuga

SEQ ID NO: 1264658 - RNA, 24 nt, Human
ggcuagucuugaacuccuggccuc

SEQ ID NO: 1264659 - RNA, 24 nt, Human
ggcuggucucgaacuccugaccuc

SEQ ID NO: 1264660 - RNA, 19 nt, Human
ggcuugacuacacugugug

SEQ ID NO: 1264661 - RNA, 24 nt, Human
gggauugcuugaguccaggaguuc

SEQ ID NO: 1264662 - RNA, 21 nt, Human
gggggauugcuugaguccagg

SEQ ID NO: 1264663 - RNA, 22 nt, Human
gggguuucaccacguuggccag

SEQ ID NO: 1264664 - RNA, 23 nt, Human
gggguuucaccacguuggccagg

SEQ ID NO: 1264665 - RNA, 22 nt, Human
ggguuucaccacguuggccagg

SEQ ID NO: 1264666 - RNA, 19 nt, Human
ggucucgaacuccugaccu

SEQ ID NO: 1264667 - RNA, 24 nt, Human
guagcugggaugacaggugugugc

SEQ ID NO: 1264668 - RNA, 24 nt, Human
guagcugggauuacaggcgugggc

SEQ ID NO: 1264669 - RNA, 18 nt, Human
guagugugggccuguagu

SEQ ID NO: 1264670 - RNA, 24 nt, Human
gugauccaacugcccugcccuccc

SEQ ID NO: 1264671 - RNA, 23 nt, Human
gugaucugcccaccuagccuccc

SEQ ID NO: 1264672 - RNA, 31 nt, Human
uaauuuuuuuuucuguauuuuuaguagagaa

SEQ ID NO: 1264673 - RNA, 24 nt, Human
uacaggcgugagccaccgcaucca

SEQ ID NO: 1264674 - RNA, 21 nt, Human
uacaggugugagccacugcau

SEQ ID NO: 1264675 - RNA, 24 nt, Human
uacaggugugagccacugcaucca

SEQ ID NO: 1264676 - RNA, 19 nt, Human
uaccugaguagcugggaug

SEQ ID NO: 1264677 - RNA, 24 nt, Human
uacuaccuauugguaaaggagauu

SEQ ID NO: 1264678 - RNA, 20 nt, Human
uacucugaacccuggaggug

SEQ ID NO: 1264679 - RNA, 22 nt, Human
uagagauggaguuucaccaugu

SEQ ID NO: 1264680 - RNA, 21 nt, Human
uagcucaugccuguaauccca

SEQ ID NO: 1264681 - RNA, 24 nt, Human
uagcucaugccuguaaucccaaca

SEQ ID NO: 1264682 - RNA, 23 nt, Human
uagcugggaugacaggugugugc

SEQ ID NO: 1264683 - RNA, 29 nt, Human
uaggaaguggagguugcagugacaacggu

SEQ ID NO: 1264684 - RNA, 24 nt, Human
uaguagagaggggguuucaccacg

SEQ ID NO: 1264685 - RNA, 24 nt, Human
uaguagagauggaguuucaccaug

SEQ ID NO: 1264686 - RNA, 26 nt, Human
uaguagagauggaguuucaccauguc

SEQ ID NO: 1264687 - RNA, 24 nt, Human
uaguagcucaugccuguaauccca

SEQ ID NO: 1264688 - RNA, 24 nt, Human
uagugugggccuguagucccagcu

SEQ ID NO: 1264689 - RNA, 21 nt, Human
uaguuugaaaaaaccugacaa

SEQ ID NO: 1264690 - RNA, 24 nt, Human
ucacugcaaccuccaccucccagg

SEQ ID NO: 1264691 - RNA, 25 nt, Human
ucacugcaaccuccaccucccaggu

SEQ ID NO: 1264692 - RNA, 27 nt, Human
ucacugcaaccuccaccucccagguuc

SEQ ID NO: 1264693 - RNA, 19 nt, Human
ucacugcaaccucugccuc

SEQ ID NO: 1264694 - RNA, 23 nt, Human
ucacugcaaccucugccucccag

SEQ ID NO: 1264695 - RNA, 23 nt, Human
ucacugcaaccucugccucccag

SEQ ID NO: 1264696 - RNA, 24 nt, Human
ucacugcaaccucugccucccagg

SEQ ID NO: 1264697 - RNA, 23 nt, Human
ucagccucuugaguagcugaggc

SEQ ID NO: 1264698 - RNA, 27 nt, Human
ucaguucacugcaaccucugccuccca

SEQ ID NO: 1264699 - RNA, 23 nt, Human
uccaaguagcugggauuacaggc

SEQ ID NO: 1264700 - RNA, 23 nt, Human
uccaaguagcugggauuacaggc

SEQ ID NO: 1264701 - RNA, 24 nt, Human
uccaaguagcugggauuacaggcg

SEQ ID NO: 1264702 - RNA, 22 nt, Human
uccagccugggcaacggcgaga

SEQ ID NO: 1264703 - RNA, 19 nt, Human
uccauggaugacuugcuug

SEQ ID NO: 1264704 - RNA, 23 nt, Human
ucccaaagugcugggauuacagg

SEQ ID NO: 1264705 - RNA, 24 nt, Human
ucccaaagugcugggauuacaggc

SEQ ID NO: 1264706 - RNA, 19 nt, Human
ucccagcuacucugaaccc

SEQ ID NO: 1264707 - RNA, 21 nt, Human
ucccagguucaagcgauucuc

SEQ ID NO: 1264708 - RNA, 24 nt, Human
ucccagguucaagcgauucuccug

SEQ ID NO: 1264709 - RNA, 21 nt, Human
ucccagguucaaggaauucuc

SEQ ID NO: 1264710 - RNA, 24 nt, Human
ucccagguucaaggaauucuccug

SEQ ID NO: 1264711 - RNA, 18 nt, Human
uccuaggcucaagugauu

SEQ ID NO: 1264712 - RNA, 19 nt, Human
uccuaggcucaagugauug

SEQ ID NO: 1264713 - RNA, 23 nt, Human
ucgcucguguugcccaggcugga

SEQ ID NO: 1264714 - RNA, 19 nt, Human
ucucaaaaaaaaacacaca

SEQ ID NO: 1264715 - RNA, 26 nt, Human
ucucaaaaaaaaacacacacacaaaa

SEQ ID NO: 1264716 - RNA, 26 nt, Human
ucuccugccucagccuuccaaguagc

SEQ ID NO: 1264717 - RNA, 18 nt, Human
ucucgaacuccugaccuc

SEQ ID NO: 1264718 - RNA, 18 nt, Human
ucucucugagaaagaaaa

SEQ ID NO: 1264719 - RNA, 22 nt, Human
ucuuaaacugaaacaguaguug

SEQ ID NO: 1264720 - RNA, 21 nt, Human
ucuugaacuccuggccucaag

SEQ ID NO: 1264721 - RNA, 18 nt, Human
ucuuuuuuuuuuuuuuuu

SEQ ID NO: 1264722 - RNA, 23 nt, Human
ugaaugaaacugcaaauguagua

SEQ ID NO: 1264723 - RNA, 23 nt, Human
ugacaagcauauuaaaagauuuc

SEQ ID NO: 1264724 - RNA, 26 nt, Human
ugacuugcuuggguaaggacaugaaa

SEQ ID NO: 1264725 - RNA, 24 nt, Human
ugaggcaggagaauugcuugaacc

SEQ ID NO: 1264726 - RNA, 25 nt, Human
ugaggcaggagaauugcuugaaccu

SEQ ID NO: 1264727 - RNA, 23 nt, Human
ugaucugcccaccuagccuccca

SEQ ID NO: 1264728 - RNA, 18 nt, Human
ugcccagaauggagugca

SEQ ID NO: 1264729 - RNA, 19 nt, Human
ugcccaggcuggaauguag

SEQ ID NO: 1264730 - RNA, 21 nt, Human
ugccucaacuaccugaguagc

SEQ ID NO: 1264731 - RNA, 22 nt, Human
ugccucaacuaccugaguagcu

SEQ ID NO: 1264732 - RNA, 24 nt, Human
ugccucaacuaccugaguagcugg

SEQ ID NO: 1264733 - RNA, 24 nt, Human
ugccucagccucuugaguagcuga

SEQ ID NO: 1264734 - RNA, 24 nt, Human
ugccucagccuuccaaguagcugg

SEQ ID NO: 1264735 - RNA, 23 nt, Human
ugccuguaaucccaacacuuugg

SEQ ID NO: 1264736 - RNA, 23 nt, Human
ugccuguaaucccaacacuuugg

SEQ ID NO: 1264737 - RNA, 24 nt, Human
ugccuguaaucccaacacuuuggg

SEQ ID NO: 1264738 - RNA, 24 nt, Human
ugcugggauuacaggcgugagcca

SEQ ID NO: 1264739 - RNA, 24 nt, Human
ugcugggauuacaggugugagcca

SEQ ID NO: 1264740 - RNA, 21 nt, Human
uggaaaaaugaaugaaacugc

SEQ ID NO: 1264741 - RNA, 24 nt, Human
uggaauguagcggcgcaaucuugg

SEQ ID NO: 1264742 - RNA, 19 nt, Human
uggagguggagguugcagu

SEQ ID NO: 1264743 - RNA, 24 nt, Human
uggaguuucaccaugucagccagg

SEQ ID NO: 1264744 - RNA, 24 nt, Human
uggccaggcuggucucgaacuccu

SEQ ID NO: 1264745 - RNA, 20 nt, Human
uggccucaagugauccaacu

SEQ ID NO: 1264746 - RNA, 22 nt, Human
ugggaugacaggugugugccac

SEQ ID NO: 1264747 - RNA, 24 nt, Human
ugggaugacaggugugugccacca

SEQ ID NO: 1264748 - RNA, 18 nt, Human
ugggauuacaggcgugag

SEQ ID NO: 1264749 - RNA, 19 nt, Human
ugggauuacaggcgugagc

SEQ ID NO: 1264750 - RNA, 21 nt, Human
ugggauuacaggcgugagcca

SEQ ID NO: 1264751 - RNA, 22 nt, Human
ugggauuacaggcgugagccac

SEQ ID NO: 1264752 - RNA, 23 nt, Human
ugggauuacaggcgugagccacc

SEQ ID NO: 1264753 - RNA, 24 nt, Human
ugggauuacaggcgugagccaccg

SEQ ID NO: 1264754 - RNA, 18 nt, Human
ugggauuacaggcguggg

SEQ ID NO: 1264755 - RNA, 21 nt, Human
ugggauuacaggcgugggcca

SEQ ID NO: 1264756 - RNA, 22 nt, Human
ugggauuacaggcgugggccac

SEQ ID NO: 1264757 - RNA, 23 nt, Human
ugggauuacaggcgugggccacc

SEQ ID NO: 1264758 - RNA, 24 nt, Human
ugggauuacaggcgugggccacca

SEQ ID NO: 1264759 - RNA, 25 nt, Human
ugggauuacaggcgugggccaccau

SEQ ID NO: 1264760 - RNA, 18 nt, Human
ugggauuacaggugugag

SEQ ID NO: 1264761 - RNA, 19 nt, Human
ugggauuacaggugugagc

SEQ ID NO: 1264762 - RNA, 21 nt, Human
ugggauuacaggugugagcca

SEQ ID NO: 1264763 - RNA, 22 nt, Human
ugggauuacaggugugagccac

SEQ ID NO: 1264764 - RNA, 22 nt, Human
ugggauuacaggugugagccac

SEQ ID NO: 1264765 - RNA, 24 nt, Human
ugggauuacaggugugagccacug

SEQ ID NO: 1264766 - RNA, 24 nt, Human
ugguagugugggccuguaguccca

SEQ ID NO: 1264767 - RNA, 22 nt, Human
uguagcggcgcaaucuuggcuc

SEQ ID NO: 1264768 - RNA, 23 nt, Human
uguagcggcgcaaucuuggcuca

SEQ ID NO: 1264769 - RNA, 23 nt, Human
uguggagcaaguuuuaaagaagc

SEQ ID NO: 1264770 - RNA, 22 nt, Human
ugugguagugugggccuguagu

SEQ ID NO: 1264771 - RNA, 20 nt, Human
ugugugccaccacucccagc

SEQ ID NO: 1264772 - RNA, 19 nt, Human
uguugcccaggcuggaaug

SEQ ID NO: 1264773 - RNA, 21 nt, Human
uguuuuguucuuacuuccccc

SEQ ID NO: 1264774 - RNA, 19 nt, Human
uuagccgggugugguagug

SEQ ID NO: 1264775 - RNA, 20 nt, Human
uuagccgggugugguagugu

SEQ ID NO: 1264776 - RNA, 18 nt, Human
uuaguagagaggggguuu

SEQ ID NO: 1264777 - RNA, 24 nt, Human
uuaguagagaggggguuucaccac

SEQ ID NO: 1264778 - RNA, 25 nt, Human
uuaguagagaggggguuucaccacg

SEQ ID NO: 1264779 - RNA, 18 nt, Human
uuaguagagauggaguuu

SEQ ID NO: 1264780 - RNA, 24 nt, Human
uuaguagagauggaguuucaccau

SEQ ID NO: 1264781 - RNA, 21 nt, Human
uucaagcgauucuccugccuc

SEQ ID NO: 1264782 - RNA, 23 nt, Human
uucaagcgauucuccugccucag

SEQ ID NO: 1264783 - RNA, 24 nt, Human
uucaagcgauucuccugccucagc

SEQ ID NO: 1264784 - RNA, 24 nt, Human
uucaguuguauguaguagcucaug

SEQ ID NO: 1264785 - RNA, 24 nt, Human
uucgcucguguugcccaggcugga

SEQ ID NO: 1264786 - RNA, 23 nt, Human
uucuuuuuuuuuuuuuuuuuggg

SEQ ID NO: 1264787 - RNA, 22 nt, Human
uugaguccaggaguucaagacc

SEQ ID NO: 1264788 - RNA, 22 nt, Human
uugcagugaaccaagaucgugc

SEQ ID NO: 1264789 - RNA, 20 nt, Human
uugcagugaacugagaucau

SEQ ID NO: 1264790 - RNA, 21 nt, Human
uugcagugaacugagaucaug

SEQ ID NO: 1264791 - RNA, 24 nt, Human
uugcuugaaccuaggaaguggagg

SEQ ID NO: 1264792 - RNA, 24 nt, Human
uuguucuuacuucccccacaagaa

SEQ ID NO: 1264793 - RNA, 21 nt, Human
uuucaccacguuggccaggcu

SEQ ID NO: 1264794 - RNA, 23 nt, Human
uuucgcucguguugcccaggcug

SEQ ID NO: 1264795 - RNA, 24 nt, Human
uuucgcucguguugcccaggcugg

SEQ ID NO: 1264796 - RNA, 22 nt, Human
uuucuguauuuuuaguagagaa

SEQ ID NO: 1264797 - RNA, 24 nt, Human
uuuucuguauuuuuaguagagaug

SEQ ID NO: 1264798 - RNA, 22 nt, Human
uuuucuguauuuuuaguagagg

SEQ ID NO: 1264799 - RNA, 24 nt, Human
uuuuuaguagagaggggguuucac

SEQ ID NO: 1264800 - RNA, 24 nt, Human
uuuuuaguagagauggaguuucac

SEQ ID NO: 1264801 - RNA, 20 nt, Human
uuuuuguauuuuuaguagag

SEQ ID NO: 1264802 - RNA, 25 nt, Human
uuuuuuuuuuuugagacggaguuuc

SEQ ID NO: 1264803 - RNA, 22 nt, Human
uuuuuuuuuuuuuugagacgga

SEQ ID NO: 1264804 - RNA, 21 nt, Human
auguucccucuccucaugaga

SEQ ID NO: 1264805 - RNA, 19 nt, Human
cagcauguucccucuccuc

SEQ ID NO: 1264806 - RNA, 27 nt, Human
cucagcauguucccucuccucaugaga

SEQ ID NO: 1264807 - RNA, 21 nt, Human
cuuggugaccagggaagucac

SEQ ID NO: 1264808 - RNA, 24 nt, Human
ucagcauguucccucuccucauga

SEQ ID NO: 1264809 - RNA, 21 nt, Human
aaccauuuuuccaugcugcuu

SEQ ID NO: 1264810 - RNA, 23 nt, Human
ucccuuuaaguuacgacgggaau

SEQ ID NO: 1264811 - RNA, 20 nt, Human
uuccaugcugcuuaagagcc

SEQ ID NO: 1264812 - RNA, 20 nt, Human
aaaaucuucccauacaucau

SEQ ID NO: 1264813 - RNA, 19 nt, Human
aagggccucuucaggaaca

SEQ ID NO: 1264814 - RNA, 18 nt, Human
aauuucaagcugagauaa

SEQ ID NO: 1264815 - RNA, 19 nt, Human
agcugccaucagucuuugc

SEQ ID NO: 1264816 - RNA, 24 nt, Human
aggaacagaaaaguggccgguacc

SEQ ID NO: 1264817 - RNA, 20 nt, Human
auccaagaaaaagugguuuc

SEQ ID NO: 1264818 - RNA, 23 nt, Human
caaaauucuaguaaauacuccuc

SEQ ID NO: 1264819 - RNA, 19 nt, Human
caggaacagaaaaguggca

SEQ ID NO: 1264820 - RNA, 19 nt, Human
cagguaaguacagaaaccc

SEQ ID NO: 1264821 - RNA, 21 nt, Human
caucaaaaacgaugacgcgau

SEQ ID NO: 1264822 - RNA, 22 nt, Human
ccauacaucaugaaaacuugga

SEQ ID NO: 1264823 - RNA, 21 nt, Human
cucagaauccaaacaugcaga

SEQ ID NO: 1264824 - RNA, 20 nt, Human
cuucccauacaucaugaaaa

SEQ ID NO: 1264825 - RNA, 22 nt, Human
uauuaugcacaaaagggccucu

SEQ ID NO: 1264826 - RNA, 21 nt, Human
uccuuaauugaauuaaguuug

SEQ ID NO: 1264827 - RNA, 18 nt, Human
ucuuugcucagaauccaa

SEQ ID NO: 1264828 - RNA, 19 nt, Human
ugaaaugucuucauuuuag

SEQ ID NO: 1264829 - RNA, 22 nt, Human
ugacacaaaauucuaguaaaaa

SEQ ID NO: 1264830 - RNA, 25 nt, Human
ugacacaaaauucuaguaaauacuc

SEQ ID NO: 1264831 - RNA, 20 nt, Human
ugacgcgauccgcuagauag

SEQ ID NO: 1264832 - RNA, 22 nt, Human
ugcccaaacaaagggcuaaagc

SEQ ID NO: 1264833 - RNA, 18 nt, Human
ugcucagaauccaaacau

SEQ ID NO: 1264834 - RNA, 19 nt, Human
uggcaaaccagguaaguac

SEQ ID NO: 1264835 - RNA, 22 nt, Human
uggggcauaaaauccugauuca

SEQ ID NO: 1264836 - RNA, 24 nt, Human
uguuuauuuaucaaaugucaauca

SEQ ID NO: 1264837 - RNA, 24 nt, Human
uucaagcugagauaaaaauuuauu

SEQ ID NO: 1264838 - RNA, 20 nt, Human
uucaggaacagaaaaguggc

SEQ ID NO: 1264839 - RNA, 22 nt, Human
uuucaacuacaauuuagaaccc

SEQ ID NO: 1264840 - RNA, 23 nt, Human
aaacagguagggaauauguccag

SEQ ID NO: 1264841 - RNA, 21 nt, Human
acagcagagugccaagggccc

SEQ ID NO: 1264842 - RNA, 24 nt, Human
agcagcagccagcggggcgggggg

SEQ ID NO: 1264843 - RNA, 19 nt, Human
agcgccgcucacagccgcc

SEQ ID NO: 1264844 - RNA, 21 nt, Human
auggggcagaggcccucgaag

SEQ ID NO: 1264845 - RNA, 19 nt, Human
caccaugugagcagcagcc

SEQ ID NO: 1264846 - RNA, 21 nt, Human
caccaugugagcagcagccag

SEQ ID NO: 1264847 - RNA, 23 nt, Human
cacggcguuacuaagccugcgcc

SEQ ID NO: 1264848 - RNA, 25 nt, Human
cacggcguuacuaagccugcgccac

SEQ ID NO: 1264849 - RNA, 21 nt, Human
cacugcauguggcggcagggc

SEQ ID NO: 1264850 - RNA, 18 nt, Human
cagaggcccucgaagguc

SEQ ID NO: 1264851 - RNA, 26 nt, Human
cauccacugauugucgcugcagucca

SEQ ID NO: 1264852 - RNA, 23 nt, Human
ccagcccggcucggcuccccgcc

SEQ ID NO: 1264853 - RNA, 24 nt, Human
ccccaggaggcgcuaccaggcucu

SEQ ID NO: 1264854 - RNA, 20 nt, Human
ccccguccgccugccgccag

SEQ ID NO: 1264855 - RNA, 21 nt, Human
cccgagcgccgcucacagccg

SEQ ID NO: 1264856 - RNA, 22 nt, Human
cccgcaugaacuacagcagagu

SEQ ID NO: 1264857 - RNA, 24 nt, Human
cccggcucgcgccgcacgcgcccg

SEQ ID NO: 1264858 - RNA, 23 nt, Human
cccggcucggcuccccgccuagc

SEQ ID NO: 1264859 - RNA, 21 nt, Human
ccgcacgcgcccgccccgucc

SEQ ID NO: 1264860 - RNA, 19 nt, Human
ccgccugccgccagcccgg

SEQ ID NO: 1264861 - RNA, 23 nt, Human
ccggccggccggcccuaccagcg

SEQ ID NO: 1264862 - RNA, 20 nt, Human
ccggcucgcgccgcacgcgc

SEQ ID NO: 1264863 - RNA, 23 nt, Human
cgcucacagccgcccgcccagcg

SEQ ID NO: 1264864 - RNA, 18 nt, Human
cggcccuaccagcggccc

SEQ ID NO: 1264865 - RNA, 18 nt, Human
cggcggcgcuccgcccgc

SEQ ID NO: 1264866 - RNA, 21 nt, Human
cucgaagguccccuccucagu

SEQ ID NO: 1264867 - RNA, 20 nt, Human
cugcgccacccacgugcugc

SEQ ID NO: 1264868 - RNA, 20 nt, Human
cuuguccucagcgcccggcc

SEQ ID NO: 1264869 - RNA, 21 nt, Human
gagcagcagccagcggggcgg

SEQ ID NO: 1264870 - RNA, 22 nt, Human
gagcagcagccagcggggcggg

SEQ ID NO: 1264871 - RNA, 23 nt, Human
gaggcgcuaccaggcucuucggg

SEQ ID NO: 1264872 - RNA, 23 nt, Human
gcagcagccagcggggcgggggg

SEQ ID NO: 1264873 - RNA, 23 nt, Human
gcccagacaccaugugagcagca

SEQ ID NO: 1264874 - RNA, 21 nt, Human
gccccgagcgccgcucacagc

SEQ ID NO: 1264875 - RNA, 22 nt, Human
gccccguccgccugccgccagc

SEQ ID NO: 1264876 - RNA, 18 nt, Human
gcgccacccacgugcugc

SEQ ID NO: 1264877 - RNA, 18 nt, Human
ggcuccaugauugugggg

SEQ ID NO: 1264878 - RNA, 23 nt, Human
gggcagcuucaagggcacauggg

SEQ ID NO: 1264879 - RNA, 20 nt, Human
uacagcagagugccaagggc

SEQ ID NO: 1264880 - RNA, 21 nt, Human
ucagcgcccggcucgcgccgc

SEQ ID NO: 1264881 - RNA, 20 nt, Human
uccacggcguuacuaagccu

SEQ ID NO: 1264882 - RNA, 23 nt, Human
uccacggcguuacuaagccugcg

SEQ ID NO: 1264883 - RNA, 22 nt, Human
uccugagcgcguggccuuccug

SEQ ID NO: 1264884 - RNA, 18 nt, Human
ucgaagguccccuccuca

SEQ ID NO: 1264885 - RNA, 19 nt, Human
ucgcugcaguccacggcgu

SEQ ID NO: 1264886 - RNA, 18 nt, Human
ucuucgggccacaggccu

SEQ ID NO: 1264887 - RNA, 22 nt, Human
ucuuuuuuuauacacaauacuu

SEQ ID NO: 1264888 - RNA, 21 nt, Human
ugaaauaaaacagguagggaa

SEQ ID NO: 1264889 - RNA, 21 nt, Human
uggcggcagggcggguagguc

SEQ ID NO: 1264890 - RNA, 21 nt, Human
uggcggcagggcggguagguc

SEQ ID NO: 1264891 - RNA, 21 nt, Human
uguccagugcaaacagaggac

SEQ ID NO: 1264892 - RNA, 23 nt, Human
uguggcggcagggcggguagguc

SEQ ID NO: 1264893 - RNA, 25 nt, Human
aaaaaucagugcaagauuccaauaa

SEQ ID NO: 1264894 - RNA, 23 nt, Human
aaaaauuucucaacaauuuauaa

SEQ ID NO: 1264895 - RNA, 21 nt, Human
aaaauaaucauuacacuuccu

SEQ ID NO: 1264896 - RNA, 18 nt, Human
aaacacugaaagcaccac

SEQ ID NO: 1264897 - RNA, 19 nt, Human
aaacacugaaagcaccacu

SEQ ID NO: 1264898 - RNA, 25 nt, Human
aagcgauucuccagccucagccucc

SEQ ID NO: 1264899 - RNA, 24 nt, Human
aagcuguuuacacacaggaaaggg

SEQ ID NO: 1264900 - RNA, 23 nt, Human
aaucaccgucaucuauaaucuuu

SEQ ID NO: 1264901 - RNA, 24 nt, Human
accaaagugcaaagucaguucccc

SEQ ID NO: 1264902 - RNA, 21 nt, Human
acuuccucucauugcagaaac

SEQ ID NO: 1264903 - RNA, 24 nt, Human
agacaccaugaaaucaccucaacu

SEQ ID NO: 1264904 - RNA, 22 nt, Human
agagacaaggucucgcucuguu

SEQ ID NO: 1264905 - RNA, 18 nt, Human
agagccuggaaagacacc

SEQ ID NO: 1264906 - RNA, 23 nt, Human
agaguacaaaccgcaucccacca

SEQ ID NO: 1264907 - RNA, 27 nt, Human
agaugcugaagacuaccauuaugugcu

SEQ ID NO: 1264908 - RNA, 22 nt, Human
aggaacugugaagauguagccg

SEQ ID NO: 1264909 - RNA, 25 nt, Human
aggugucaaaggcaaguaacacuuc

SEQ ID NO: 1264910 - RNA, 21 nt, Human
agugcagugguacaaucacag

SEQ ID NO: 1264911 - RNA, 24 nt, Human
aucuauaaucuuuauuagguaguc

SEQ ID NO: 1264912 - RNA, 21 nt, Human
augcaaacacauauacacacu

SEQ ID NO: 1264913 - RNA, 18 nt, Human
augcacaggugucaaagg

SEQ ID NO: 1264914 - RNA, 21 nt, Human
caaaaacacugaaagcaccac

SEQ ID NO: 1264915 - RNA, 21 nt, Human
caaaaacacugaaagcaccac

SEQ ID NO: 1264916 - RNA, 23 nt, Human
caaacucaacauaucagcagcaa

SEQ ID NO: 1264917 - RNA, 23 nt, Human
caaccuaucgaaguccaaaccaa

SEQ ID NO: 1264918 - RNA, 25 nt, Human
caaugaauuccacuguaagccaagc

SEQ ID NO: 1264919 - RNA, 25 nt, Human
cacacaggaaagggcaggcauaacg

SEQ ID NO: 1264920 - RNA, 25 nt, Human
cacaccuggccuugaaacauuauuu

SEQ ID NO: 1264921 - RNA, 18 nt, Human
cacuuuuaccaacaaagc

SEQ ID NO: 1264922 - RNA, 20 nt, Human
cagcaugcaugggagaucac

SEQ ID NO: 1264923 - RNA, 22 nt, Human
cagccucagccucccaaaguag

SEQ ID NO: 1264924 - RNA, 21 nt, Human
cauaaaaagaauuaagaccgc

SEQ ID NO: 1264925 - RNA, 23 nt, Human
ccaaaaacacugaaagcaccagu

SEQ ID NO: 1264926 - RNA, 19 nt, Human
ccaagccaaguaagaugcu

SEQ ID NO: 1264927 - RNA, 19 nt, Human
cccaauguacaagcagagc

SEQ ID NO: 1264928 - RNA, 19 nt, Human
cccgagcuggagugcagug

SEQ ID NO: 1264929 - RNA, 21 nt, Human
ccuauguauucuaguugacca

SEQ ID NO: 1264930 - RNA, 19 nt, Human
ccugagguuccagagaagu

SEQ ID NO: 1264931 - RNA, 23 nt, Human
cuccagccucagccucccaaagu

SEQ ID NO: 1264932 - RNA, 25 nt, Human
cuucauagccccuuaacaugucacu

SEQ ID NO: 1264933 - RNA, 18 nt, Human
gaaagaaaauuaagagua

SEQ ID NO: 1264934 - RNA, 21 nt, Human
gaacacuaucugccaaaaaca

SEQ ID NO: 1264935 - RNA, 20 nt, Human
gaaucagaguacaaaccgca

SEQ ID NO: 1264936 - RNA, 24 nt, Human
gagugcagugguacaaucacagcu

SEQ ID NO: 1264937 - RNA, 21 nt, Human
gcaucauuuucaaugucuucu

SEQ ID NO: 1264938 - RNA, 20 nt, Human
gcauuuguuucaagccuuga

SEQ ID NO: 1264939 - RNA, 23 nt, Human
gccucaagcgauucuccagccuc

SEQ ID NO: 1264940 - RNA, 24 nt, Human
gcgauucuccagccucagccuccc

SEQ ID NO: 1264941 - RNA, 21 nt, Human
ggaaagacgagauauaugaga

SEQ ID NO: 1264942 - RNA, 22 nt, Human
ggaacacuaucugccaaaaaca

SEQ ID NO: 1264943 - RNA, 21 nt, Human
ggagaggauucucaaaacaga

SEQ ID NO: 1264944 - RNA, 21 nt, Human
ggaucuagucauuaaaacaua

SEQ ID NO: 1264945 - RNA, 20 nt, Human
gggaaaauggagaggauucu

SEQ ID NO: 1264946 - RNA, 22 nt, Human
ggucuuugucagauaauuucug

SEQ ID NO: 1264947 - RNA, 20 nt, Human
guuuauuucaugcugaacua

SEQ ID NO: 1264948 - RNA, 22 nt, Human
uaaaacauaugcacagguguca

SEQ ID NO: 1264949 - RNA, 25 nt, Human
uaaacuguauuuuaacuuagcacaa

SEQ ID NO: 1264950 - RNA, 25 nt, Human
uaaugaacacuucucccuauguauu

SEQ ID NO: 1264951 - RNA, 24 nt, Human
uacucauagucaguguuacacuag

SEQ ID NO: 1264952 - RNA, 21 nt, Human
uacugccgagaaaugggcggg

SEQ ID NO: 1264953 - RNA, 24 nt, Human
uagaaguauuccuuccaucaaccu

SEQ ID NO: 1264954 - RNA, 22 nt, Human
uagagacaaggucucgcucugu

SEQ ID NO: 1264955 - RNA, 21 nt, Human
uauagauucaaaagcagucac

SEQ ID NO: 1264956 - RNA, 25 nt, Human
uauguaaaugcaaacacauauacac

SEQ ID NO: 1264957 - RNA, 23 nt, Human
uauuagguagucccuggucuuug

SEQ ID NO: 1264958 - RNA, 22 nt, Human
uauuucaugcugaacuagaagu

SEQ ID NO: 1264959 - RNA, 19 nt, Human
ucaagagccuggaaagaca

SEQ ID NO: 1264960 - RNA, 21 nt, Human
ucaaugucuucugccuuccug

SEQ ID NO: 1264961 - RNA, 23 nt, Human
ucaaugucuucugccuuccugug

SEQ ID NO: 1264962 - RNA, 18 nt, Human
ucagugcaagauuccaau

SEQ ID NO: 1264963 - RNA, 22 nt, Human
ucauggggcaaacgauggaaaa

SEQ ID NO: 1264964 - RNA, 18 nt, Human
ucaugucggcucugaaau

SEQ ID NO: 1264965 - RNA, 22 nt, Human
uccaaggagaaauacuucaaga

SEQ ID NO: 1264966 - RNA, 22 nt, Human
ucccuauguauucuaguugacc

SEQ ID NO: 1264967 - RNA, 25 nt, Human
ucggaggaacugugaagauguagca

SEQ ID NO: 1264968 - RNA, 24 nt, Human
ucucgcucuguuccccgagcugga

SEQ ID NO: 1264969 - RNA, 19 nt, Human
ucuguaaaucugaccuugc

SEQ ID NO: 1264970 - RNA, 20 nt, Human
ucuguguaaccaaagugcaa

SEQ ID NO: 1264971 - RNA, 22 nt, Human
ugaaaucaccucaacucaagug

SEQ ID NO: 1264972 - RNA, 18 nt, Human
ugaaggccauguuuuucc

SEQ ID NO: 1264973 - RNA, 23 nt, Human
ugaaugucuacacuaugaaaaug

SEQ ID NO: 1264974 - RNA, 20 nt, Human
ugagaauuacauuucuccuu

SEQ ID NO: 1264975 - RNA, 21 nt, Human
ugagugauauagucacuguug

SEQ ID NO: 1264976 - RNA, 20 nt, Human
ugauaggagcuauggugagg

SEQ ID NO: 1264977 - RNA, 19 nt, Human
uggaaaagcuguuuuagcc

SEQ ID NO: 1264978 - RNA, 23 nt, Human
uggaacacuaucugccaaaaaca

SEQ ID NO: 1264979 - RNA, 24 nt, Human
uggaacacuaucugccaaaaacac

SEQ ID NO: 1264980 - RNA, 18 nt, Human
uggagugcagugguacaa

SEQ ID NO: 1264981 - RNA, 19 nt, Human
uggagugcagugguacaau

SEQ ID NO: 1264982 - RNA, 21 nt, Human
uggagugcagugguacaauca

SEQ ID NO: 1264983 - RNA, 23 nt, Human
uggcagcaugcaugggagaucac

SEQ ID NO: 1264984 - RNA, 24 nt, Human
ugggauuucaggcaugaaucacca

SEQ ID NO: 1264985 - RNA, 20 nt, Human
ugggcggguccugagguucc

SEQ ID NO: 1264986 - RNA, 23 nt, Human
uggggcaaacgauggaaaagcug

SEQ ID NO: 1264987 - RNA, 22 nt, Human
ugguacaaucacagcucacuag

SEQ ID NO: 1264988 - RNA, 24 nt, Human
ugguauauacuacuccaaggagaa

SEQ ID NO: 1264989 - RNA, 22 nt, Human
uguaaccaaagugcaaagucag

SEQ ID NO: 1264990 - RNA, 18 nt, Human
uguacaagcagagcaggu

SEQ ID NO: 1264991 - RNA, 23 nt, Human
ugucaaaggcaaguaacacuacc

SEQ ID NO: 1264992 - RNA, 21 nt, Human
ugugaaucagaguacaaaccg

SEQ ID NO: 1264993 - RNA, 21 nt, Human
uguuaugacauucguaagugg

SEQ ID NO: 1264994 - RNA, 24 nt, Human
uuacugcauccaauauagcaaaag

SEQ ID NO: 1264995 - RNA, 20 nt, Human
uuagauccaaugcugaguga

SEQ ID NO: 1264996 - RNA, 18 nt, Human
uuccaauaagaaacaagg

SEQ ID NO: 1264997 - RNA, 23 nt, Human
uuccacuguaagccaagccaagu

SEQ ID NO: 1264998 - RNA, 24 nt, Human
uucgcuaguuaggucuguucuucu

SEQ ID NO: 1264999 - RNA, 22 nt, Human
uucggauuccagguaaagcagg

SEQ ID NO: 1265000 - RNA, 22 nt, Human
uuggaucuagucauuaaaacau

SEQ ID NO: 1265001 - RNA, 18 nt, Human
uuuaaagaacaaacucaa

SEQ ID NO: 1265002 - RNA, 21 nt, Human
uuucaugcugaacuagaaguc

SEQ ID NO: 1265003 - RNA, 19 nt, Human
aagaagcauuaagccaugg

SEQ ID NO: 1265004 - RNA, 22 nt, Human
aagagggagccagcccagcauc

SEQ ID NO: 1265005 - RNA, 25 nt, Human
aagugaacuccuauccucaaacccg

SEQ ID NO: 1265006 - RNA, 21 nt, Human
acucugugaagugcccugggg

SEQ ID NO: 1265007 - RNA, 20 nt, Human
agcaucaccccaugaaagac

SEQ ID NO: 1265008 - RNA, 23 nt, Human
aggagccggaagcgguggcaugg

SEQ ID NO: 1265009 - RNA, 18 nt, Human
agggaaagcacaggagcc

SEQ ID NO: 1265010 - RNA, 21 nt, Human
agugaacuccuauccucaaac

SEQ ID NO: 1265011 - RNA, 26 nt, Human
caaacagaaaaugaaagaagggaccc

SEQ ID NO: 1265012 - RNA, 19 nt, Human
caaagcaacuugcaaagau

SEQ ID NO: 1265013 - RNA, 24 nt, Human
caacuaagacauuuguauaaaaca

SEQ ID NO: 1265014 - RNA, 21 nt, Human
cacaggagccggaagcggugg

SEQ ID NO: 1265015 - RNA, 19 nt, Human
cagcucagggaaagcacag

SEQ ID NO: 1265016 - RNA, 24 nt, Human
cagggaaagcacaggagccggaag

SEQ ID NO: 1265017 - RNA, 19 nt, Human
ccagcacacucugugaagu

SEQ ID NO: 1265018 - RNA, 23 nt, Human
cccaggacccaauguuacugccc

SEQ ID NO: 1265019 - RNA, 21 nt, Human
cccaugaaagacccaggaccc

SEQ ID NO: 1265020 - RNA, 20 nt, Human
cccaugcacgucacacacag

SEQ ID NO: 1265021 - RNA, 21 nt, Human
cccaugcacgucacacacaga

SEQ ID NO: 1265022 - RNA, 22 nt, Human
cccaugcacgucacacacagaa

SEQ ID NO: 1265023 - RNA, 19 nt, Human
ccccucucagcaagccuca

SEQ ID NO: 1265024 - RNA, 18 nt, Human
cccgaugacccacaaaca

SEQ ID NO: 1265025 - RNA, 18 nt, Human
cccgcaaguucccggccc

SEQ ID NO: 1265026 - RNA, 21 nt, Human
cccgggacaccuggccccggg

SEQ ID NO: 1265027 - RNA, 21 nt, Human
ccuccagcacacucugugaag

SEQ ID NO: 1265028 - RNA, 18 nt, Human
cuaaacggccaccacuaa

SEQ ID NO: 1265029 - RNA, 19 nt, Human
cuaaacggccaccacuaaa

SEQ ID NO: 1265030 - RNA, 24 nt, Human
cuccagcacacucugugaagugcc

SEQ ID NO: 1265031 - RNA, 23 nt, Human
cugcccuaccagggcaaagcaac

SEQ ID NO: 1265032 - RNA, 21 nt, Human
gacagccccucucagcaagcc

SEQ ID NO: 1265033 - RNA, 25 nt, Human
gcccgggacaccuggccccgggggc

SEQ ID NO: 1265034 - RNA, 22 nt, Human
ggacaccuggccccgggggcuc

SEQ ID NO: 1265035 - RNA, 22 nt, Human
ggacagccccucucagcaagcc

SEQ ID NO: 1265036 - RNA, 19 nt, Human
ggccuugcagcagugaaaa

SEQ ID NO: 1265037 - RNA, 18 nt, Human
gggaagaccaagagggag

SEQ ID NO: 1265038 - RNA, 23 nt, Human
uaaaacaaacagaaaaugaaaga

SEQ ID NO: 1265039 - RNA, 18 nt, Human
uagcaggacaccaaaacc

SEQ ID NO: 1265040 - RNA, 21 nt, Human
ucccggccccaaaggaagccc

SEQ ID NO: 1265041 - RNA, 22 nt, Human
ucccuucucucauuuuuccaca

SEQ ID NO: 1265042 - RNA, 22 nt, Human
uccucaaacccgcaaguucccg

SEQ ID NO: 1265043 - RNA, 26 nt, Human
ugaaagaagcauuaagccaugggaga

SEQ ID NO: 1265044 - RNA, 24 nt, Human
ugaagugcccugggggcaaugaaa

SEQ ID NO: 1265045 - RNA, 23 nt, Human
ugcaaagaugguggcuaaacggc

SEQ ID NO: 1265046 - RNA, 20 nt, Human
uggcaugggcagcauuucuu

SEQ ID NO: 1265047 - RNA, 20 nt, Human
uggccccgggggcucggcgg

SEQ ID NO: 1265048 - RNA, 22 nt, Human
uggcuaaacggccaccacuaaa

SEQ ID NO: 1265049 - RNA, 21 nt, Human
ugggacuuuauuuguacaacu

SEQ ID NO: 1265050 - RNA, 20 nt, Human
ugucccuucucucauuuuuc

SEQ ID NO: 1265051 - RNA, 19 nt, Human
uuaagaguagaaauuggag

SEQ ID NO: 1265052 - RNA, 18 nt, Human
uucccgaugacccacaaa

SEQ ID NO: 1265053 - RNA, 24 nt, Human
uucccgaugacccacaaacaaguu

SEQ ID NO: 1265054 - RNA, 22 nt, Human
uucccggccccaaaggaagccc

SEQ ID NO: 1265055 - RNA, 24 nt, Human
uucccggccccaaaggaagcccuc

SEQ ID NO: 1265056 - RNA, 22 nt, Human
uugaaugugucccuucucucau

SEQ ID NO: 1265057 - RNA, 19 nt, Human
uuuguacaacuaagacauu

SEQ ID NO: 1265058 - RNA, 24 nt, Human
uuuguacaacuaagacauuuguau

SEQ ID NO: 1265059 - RNA, 24 nt, Human
aacaucauuuuuacaaagcaauuc

SEQ ID NO: 1265060 - RNA, 21 nt, Human
agacccagaaaucugugagcu

SEQ ID NO: 1265061 - RNA, 19 nt, Human
auaauacagcuuugcaaaa

SEQ ID NO: 1265062 - RNA, 23 nt, Human
auucugcaaucuucaacacaaga

SEQ ID NO: 1265063 - RNA, 20 nt, Human
auuuuuacaaagcaauucug

SEQ ID NO: 1265064 - RNA, 22 nt, Human
cgccuguaacauucaacggcuu

SEQ ID NO: 1265065 - RNA, 19 nt, Human
gcaaaauagaauccucuca

SEQ ID NO: 1265066 - RNA, 25 nt, Human
uaaagaagacccagaaaucugugag

SEQ ID NO: 1265067 - RNA, 23 nt, Human
uauuccauccaucuucaccuuca

SEQ ID NO: 1265068 - RNA, 26 nt, Human
uauuuugcucuuccaucaguaacauc

SEQ ID NO: 1265069 - RNA, 24 nt, Human
ucaacggcuuucucuguguuuucu

SEQ ID NO: 1265070 - RNA, 21 nt, Human
ucgcugcccuuucaacccagu

SEQ ID NO: 1265071 - RNA, 23 nt, Human
ucuuccaucaguaacaucauuuu

SEQ ID NO: 1265072 - RNA, 18 nt, Human
ugacugaauccagucaaa

SEQ ID NO: 1265073 - RNA, 23 nt, Human
ugacugaauccagucaaaaaguu

SEQ ID NO: 1265074 - RNA, 19 nt, Human
ugggaaaaguuucgcugcc

SEQ ID NO: 1265075 - RNA, 24 nt, Human
uucauaauacagcuuugcaaaaua

SEQ ID NO: 1265076 - RNA, 23 nt, Human
cuaaguugguugcuuuuugguga

SEQ ID NO: 1265077 - RNA, 21 nt, Human
uaaguugguugcuuuuuggug

SEQ ID NO: 1265078 - RNA, 26 nt, Human
aagacaguuaugacauugacacaugc

SEQ ID NO: 1265079 - RNA, 21 nt, Human
auucgugacagauucuucccc

SEQ ID NO: 1265080 - RNA, 22 nt, Human
caaagggcuucuucuguugccc

SEQ ID NO: 1265081 - RNA, 21 nt, Human
caauguacuccuucuucccca

SEQ ID NO: 1265082 - RNA, 22 nt, Human
cacaugcaugagcuauuauaca

SEQ ID NO: 1265083 - RNA, 20 nt, Human
cagcaaaucucaauuuguca

SEQ ID NO: 1265084 - RNA, 19 nt, Human
caguaggagugaauggcug

SEQ ID NO: 1265085 - RNA, 22 nt, Human
cagucagccucguucaaaguuu

SEQ ID NO: 1265086 - RNA, 22 nt, Human
caucuugucucaucaguaggag

SEQ ID NO: 1265087 - RNA, 24 nt, Human
ccagagugcagaagcguauaaaga

SEQ ID NO: 1265088 - RNA, 22 nt, Human
cccacacggaacacggcagcau

SEQ ID NO: 1265089 - RNA, 25 nt, Human
cccccuucaauguacuccuucuucc

SEQ ID NO: 1265090 - RNA, 25 nt, Human
ccggcgugcgcgccccgugacuccu

SEQ ID NO: 1265091 - RNA, 23 nt, Human
cgccucugcuccauugacggucu

SEQ ID NO: 1265092 - RNA, 20 nt, Human
cuccagggucuccaccaggu

SEQ ID NO: 1265093 - RNA, 21 nt, Human
gacagggugugcuuccuccag

SEQ ID NO: 1265094 - RNA, 18 nt, Human
gccccuggaugggcuugg

SEQ ID NO: 1265095 - RNA, 19 nt, Human
gcuggggggacaguggcac

SEQ ID NO: 1265096 - RNA, 19 nt, Human
gcuugcugauuuucccaca

SEQ ID NO: 1265097 - RNA, 22 nt, Human
gcuugcugauuuucccacaacc

SEQ ID NO: 1265098 - RNA, 22 nt, Human
ggacagggugugcuuccuccag

SEQ ID NO: 1265099 - RNA, 23 nt, Human
uaugacauugacacaugcauggu

SEQ ID NO: 1265100 - RNA, 21 nt, Human
ucagguucugcagcuccaggg

SEQ ID NO: 1265101 - RNA, 23 nt, Human
ucccacacggaacacggcagcau

SEQ ID NO: 1265102 - RNA, 20 nt, Human
ucuucagaugcuucaggucu

SEQ ID NO: 1265103 - RNA, 19 nt, Human
ucuucuguugccccuggau

SEQ ID NO: 1265104 - RNA, 25 nt, Human
ugacacaugcaugagcuauuauaca

SEQ ID NO: 1265105 - RNA, 20 nt, Human
ugacuccuuccccgccucug

SEQ ID NO: 1265106 - RNA, 24 nt, Human
ugauucugucaucaccacaucuug

SEQ ID NO: 1265107 - RNA, 20 nt, Human
ugcuuccuccagugcaccuc

SEQ ID NO: 1265108 - RNA, 21 nt, Human
uuccagaccauuccccgguca

SEQ ID NO: 1265109 - RNA, 19 nt, Human
uuccuccagugcaccucaa

SEQ ID NO: 1265110 - RNA, 22 nt, Human
aaaaauccaggagaaaagggga

SEQ ID NO: 1265111 - RNA, 23 nt, Human
aaaccccaaagugccacugaaaa

SEQ ID NO: 1265112 - RNA, 19 nt, Human
aaacucagagguccugaua

SEQ ID NO: 1265113 - RNA, 23 nt, Human
aaagugccacugaaaagcaauug

SEQ ID NO: 1265114 - RNA, 20 nt, Human
aagaacccagggcacuggaa

SEQ ID NO: 1265115 - RNA, 22 nt, Human
aagagccaggggagggcauggg

SEQ ID NO: 1265116 - RNA, 22 nt, Human
aaucagacaggaaaccccaaag

SEQ ID NO: 1265117 - RNA, 24 nt, Human
acaaagcagacaaaaauccaggag

SEQ ID NO: 1265118 - RNA, 25 nt, Human
acacacuuccccgucuucucuccca

SEQ ID NO: 1265119 - RNA, 20 nt, Human
acagccccaccugugaggcc

SEQ ID NO: 1265120 - RNA, 18 nt, Human
accagcaucaagcccugc

SEQ ID NO: 1265121 - RNA, 22 nt, Human
accccaaagugccacugaaaag

SEQ ID NO: 1265122 - RNA, 23 nt, Human
accccaaagugccacugaaaagc

SEQ ID NO: 1265123 - RNA, 22 nt, Human
accggcggguucaggccagucu

SEQ ID NO: 1265124 - RNA, 21 nt, Human
agaaagguugugaggcuggag

SEQ ID NO: 1265125 - RNA, 21 nt, Human
agagggcagggaggcaugggg

SEQ ID NO: 1265126 - RNA, 24 nt, Human
agaggugcuccagggacagggugc

SEQ ID NO: 1265127 - RNA, 23 nt, Human
agcagacaaaaauccaggagaaa

SEQ ID NO: 1265128 - RNA, 21 nt, Human
agccagcgucgcacuggcccc

SEQ ID NO: 1265129 - RNA, 21 nt, Human
agccaggggagggcauggggc

SEQ ID NO: 1265130 - RNA, 19 nt, Human
agccccucagcuccuggca

SEQ ID NO: 1265131 - RNA, 21 nt, Human
agccccugcaaccccagguac

SEQ ID NO: 1265132 - RNA, 24 nt, Human
agcccuggcucuuuugucacugug

SEQ ID NO: 1265133 - RNA, 18 nt, Human
agcuccacucucaccccu

SEQ ID NO: 1265134 - RNA, 23 nt, Human
aggaaacaagccggcuuuguuuu

SEQ ID NO: 1265135 - RNA, 23 nt, Human
aggaaaccccaaagugccacuga

SEQ ID NO: 1265136 - RNA, 26 nt, Human
aggaaacccuguccaggccccaaccc

SEQ ID NO: 1265137 - RNA, 18 nt, Human
aggaaccccuccagcucc

SEQ ID NO: 1265138 - RNA, 23 nt, Human
aggaauguguacacucuggcucu

SEQ ID NO: 1265139 - RNA, 21 nt, Human
aggagaagcccagaggacagc

SEQ ID NO: 1265140 - RNA, 21 nt, Human
aggaugcagagcuccagagcu

SEQ ID NO: 1265141 - RNA, 19 nt, Human
aggcagaagaguuguuucu

SEQ ID NO: 1265142 - RNA, 27 nt, Human
aggcaggaagcagguuccccgccugga

SEQ ID NO: 1265143 - RNA, 23 nt, Human
aggcagugagccagaccccaggg

SEQ ID NO: 1265144 - RNA, 19 nt, Human
agggagaugucugugagug

SEQ ID NO: 1265145 - RNA, 23 nt, Human
aggggcucugcaaggacaggcuu

SEQ ID NO: 1265146 - RNA, 24 nt, Human
agggggcugcgaggcagagcuggg

SEQ ID NO: 1265147 - RNA, 22 nt, Human
agggguaggggaaccucgacca

SEQ ID NO: 1265148 - RNA, 18 nt, Human
aggguauccugcuucccc

SEQ ID NO: 1265149 - RNA, 22 nt, Human
aucucauucccccaccugccag

SEQ ID NO: 1265150 - RNA, 20 nt, Human
auguccacuuucucaucuca

SEQ ID NO: 1265151 - RNA, 20 nt, Human
caaaacacugggcccugagc

SEQ ID NO: 1265152 - RNA, 23 nt, Human
cacagaaagucagaaaacucaga

SEQ ID NO: 1265153 - RNA, 22 nt, Human
caccaccagcaucaagcccugc

SEQ ID NO: 1265154 - RNA, 23 nt, Human
caccaccagcaucaagcccugcu

SEQ ID NO: 1265155 - RNA, 20 nt, Human
caccuguucccacucuuugg

SEQ ID NO: 1265156 - RNA, 24 nt, Human
cacuggccccaccgaggccucagc

SEQ ID NO: 1265157 - RNA, 20 nt, Human
cagaaagucagaaaacucag

SEQ ID NO: 1265158 - RNA, 21 nt, Human
cagacaaaaauccaggagaaa

SEQ ID NO: 1265159 - RNA, 22 nt, Human
cagagcccagaccccacucagc

SEQ ID NO: 1265160 - RNA, 19 nt, Human
cagcagacaguccccaccu

SEQ ID NO: 1265161 - RNA, 20 nt, Human
cagcuccuggcagccuuccu

SEQ ID NO: 1265162 - RNA, 21 nt, Human
caggaugcagagcuccagagc

SEQ ID NO: 1265163 - RNA, 23 nt, Human
caggcuggggagagcaaggaggu

SEQ ID NO: 1265164 - RNA, 21 nt, Human
caggucuugagucccuggaca

SEQ ID NO: 1265165 - RNA, 23 nt, Human
caggugcuagccccucagcuccu

SEQ ID NO: 1265166 - RNA, 22 nt, Human
cagguggagcgguggagcugug

SEQ ID NO: 1265167 - RNA, 21 nt, Human
ccaaagugccacugaaaagca

SEQ ID NO: 1265168 - RNA, 20 nt, Human
ccacagguaaagcaaaccca

SEQ ID NO: 1265169 - RNA, 21 nt, Human
ccacagguaaagcaaacccau

SEQ ID NO: 1265170 - RNA, 23 nt, Human
ccaccucccucugcuuccccccg

SEQ ID NO: 1265171 - RNA, 22 nt, Human
ccagaccccacucagcuccacu

SEQ ID NO: 1265172 - RNA, 20 nt, Human
ccagcccuagcccuggcucu

SEQ ID NO: 1265173 - RNA, 18 nt, Human
ccaggccccaacccugcc

SEQ ID NO: 1265174 - RNA, 23 nt, Human
ccaggcccugcagggguccgagg

SEQ ID NO: 1265175 - RNA, 18 nt, Human
ccagguggagcgguggag

SEQ ID NO: 1265176 - RNA, 22 nt, Human
ccagucugccggcccggccccu

SEQ ID NO: 1265177 - RNA, 21 nt, Human
ccaugccuggccugccccugg

SEQ ID NO: 1265178 - RNA, 22 nt, Human
cccacaucccccuaccccacuu

SEQ ID NO: 1265179 - RNA, 24 nt, Human
cccaggugagccugccuuuccagg

SEQ ID NO: 1265180 - RNA, 24 nt, Human
ccccaaaaacagaggggcucugca

SEQ ID NO: 1265181 - RNA, 28 nt, Human
ccccaccgaggccucagcccaccucccu

SEQ ID NO: 1265182 - RNA, 21 nt, Human
ccccagaaacuucagccccag

SEQ ID NO: 1265183 - RNA, 20 nt, Human
ccccagagcccgggcugccg

SEQ ID NO: 1265184 - RNA, 22 nt, Human
ccccagagcccgggcugccggg

SEQ ID NO: 1265185 - RNA, 24 nt, Human
ccccaggaugaccgggaagaaccc

SEQ ID NO: 1265186 - RNA, 23 nt, Human
ccccagugccacugugaggaccc

SEQ ID NO: 1265187 - RNA, 18 nt, Human
cccccaaaaacagagggg

SEQ ID NO: 1265188 - RNA, 24 nt, Human
ccccccaaucugaugcacccagac

SEQ ID NO: 1265189 - RNA, 20 nt, Human
ccccccgccaccuccaccaa

SEQ ID NO: 1265190 - RNA, 20 nt, Human
cccccuaccccacuuuugcc

SEQ ID NO: 1265191 - RNA, 18 nt, Human
ccccuccagcccuagccc

SEQ ID NO: 1265192 - RNA, 22 nt, Human
ccccugaccccaccuguuccca

SEQ ID NO: 1265193 - RNA, 24 nt, Human
ccccugcaaccccagguacagguc

SEQ ID NO: 1265194 - RNA, 22 nt, Human
ccccugcacucuggccccugac

SEQ ID NO: 1265195 - RNA, 21 nt, Human
ccccugggagcuagaccacaa

SEQ ID NO: 1265196 - RNA, 21 nt, Human
cccgccaggguauccugcuuc

SEQ ID NO: 1265197 - RNA, 19 nt, Human
cccucucaucccugagccu

SEQ ID NO: 1265198 - RNA, 20 nt, Human
cccugcacucuggccccuga

SEQ ID NO: 1265199 - RNA, 21 nt, Human
cccugcacucuggccccugac

SEQ ID NO: 1265200 - RNA, 20 nt, Human
cccuggagcugcgcucaggc

SEQ ID NO: 1265201 - RNA, 20 nt, Human
cccuguccaggccccaaccc

SEQ ID NO: 1265202 - RNA, 19 nt, Human
ccuccagcccuagcccugg

SEQ ID NO: 1265203 - RNA, 22 nt, Human
ccuccagcccuagcccuggcuc

SEQ ID NO: 1265204 - RNA, 21 nt, Human
ccucccucccucccuaagccc

SEQ ID NO: 1265205 - RNA, 18 nt, Human
ccucccugcccaaaagga

SEQ ID NO: 1265206 - RNA, 20 nt, Human
ccucgccucuggcgcccccc

SEQ ID NO: 1265207 - RNA, 19 nt, Human
ccucuggcgccccccaauc

SEQ ID NO: 1265208 - RNA, 21 nt, Human
ccugcagaaccaggcucagcc

SEQ ID NO: 1265209 - RNA, 20 nt, Human
ccugcucuugcccuauggcc

SEQ ID NO: 1265210 - RNA, 19 nt, Human
ccuggaaggggcuggggcu

SEQ ID NO: 1265211 - RNA, 25 nt, Human
ccuggccccuccagcccuagcccug

SEQ ID NO: 1265212 - RNA, 27 nt, Human
ccuggccccuccagcccuagcccuggc

SEQ ID NO: 1265213 - RNA, 24 nt, Human
ccuguggacaaagcagaccggggc

SEQ ID NO: 1265214 - RNA, 23 nt, Human
ccuguucccccaaaaacagaggg

SEQ ID NO: 1265215 - RNA, 22 nt, Human
ccuuccgccccagagcccgggc

SEQ ID NO: 1265216 - RNA, 21 nt, Human
ccuuggugcccagcucagggu

SEQ ID NO: 1265217 - RNA, 19 nt, Human
ccuuuguucccaagacccu

SEQ ID NO: 1265218 - RNA, 23 nt, Human
cgaggccucagcccaccucccuc

SEQ ID NO: 1265219 - RNA, 23 nt, Human
cgcagcccugcucguggguccaa

SEQ ID NO: 1265220 - RNA, 23 nt, Human
cgccuggaaggggcuggggcuuc

SEQ ID NO: 1265221 - RNA, 22 nt, Human
cggcacauccagucccagcggg

SEQ ID NO: 1265222 - RNA, 23 nt, Human
cggguucaggccagucuuggaau

SEQ ID NO: 1265223 - RNA, 23 nt, Human
cggucagagccagcaggcauggg

SEQ ID NO: 1265224 - RNA, 21 nt, Human
cgugaccccaugcugugcuga

SEQ ID NO: 1265225 - RNA, 19 nt, Human
cucaccccugccacaagca

SEQ ID NO: 1265226 - RNA, 24 nt, Human
cucagcuccuggcagccuuccucc

SEQ ID NO: 1265227 - RNA, 20 nt, Human
cuccccugcacucuggcccc

SEQ ID NO: 1265228 - RNA, 20 nt, Human
cuccuacuguggcccacacc

SEQ ID NO: 1265229 - RNA, 19 nt, Human
cucuccuuuuuugucuggg

SEQ ID NO: 1265230 - RNA, 21 nt, Human
cucugugcagagccccaggau

SEQ ID NO: 1265231 - RNA, 18 nt, Human
cugacugaagcccuguuc

SEQ ID NO: 1265232 - RNA, 18 nt, Human
cugagccaugccuggccu

SEQ ID NO: 1265233 - RNA, 22 nt, Human
cugcaaaggcagaccccgugga

SEQ ID NO: 1265234 - RNA, 18 nt, Human
cugcgaggcagagcuggg

SEQ ID NO: 1265235 - RNA, 21 nt, Human
cuggagugaagccagguggag

SEQ ID NO: 1265236 - RNA, 18 nt, Human
cuggccccugaccccacc

SEQ ID NO: 1265237 - RNA, 24 nt, Human
cuggcgccccccaaucugaugcac

SEQ ID NO: 1265238 - RNA, 25 nt, Human
cugggcccugagccagcagacaguc

SEQ ID NO: 1265239 - RNA, 21 nt, Human
cuguggacaaagcagacaaaa

SEQ ID NO: 1265240 - RNA, 22 nt, Human
cuucagccccagcagaaagguu

SEQ ID NO: 1265241 - RNA, 18 nt, Human
cuuccccccgccaccucc

SEQ ID NO: 1265242 - RNA, 18 nt, Human
cuugcgcugacugaagcc

SEQ ID NO: 1265243 - RNA, 21 nt, Human
gaaagugcuuagugcagaggg

SEQ ID NO: 1265244 - RNA, 20 nt, Human
gaaaguuugaacuccacucc

SEQ ID NO: 1265245 - RNA, 19 nt, Human
gaagaugguggagggccag

SEQ ID NO: 1265246 - RNA, 18 nt, Human
gaaugcucccuguucccc

SEQ ID NO: 1265247 - RNA, 19 nt, Human
gaccaugugaccccagaaa

SEQ ID NO: 1265248 - RNA, 18 nt, Human
gaccgggaagaacccagg

SEQ ID NO: 1265249 - RNA, 23 nt, Human
gacugcuggccccuccuacugug

SEQ ID NO: 1265250 - RNA, 19 nt, Human
gagcagucugcaaaggcag

SEQ ID NO: 1265251 - RNA, 23 nt, Human
gagccaugccuggccugccccug

SEQ ID NO: 1265252 - RNA, 21 nt, Human
gagcuuagccugccaagggga

SEQ ID NO: 1265253 - RNA, 18 nt, Human
gauacagcagggcaggag

SEQ ID NO: 1265254 - RNA, 23 nt, Human
gcagaggaaacccuguccaggcc

SEQ ID NO: 1265255 - RNA, 18 nt, Human
gcagaggagaagcccaga

SEQ ID NO: 1265256 - RNA, 22 nt, Human
gccccaccugugaggccccagc

SEQ ID NO: 1265257 - RNA, 19 nt, Human
gccccuccuacuguggcca

SEQ ID NO: 1265258 - RNA, 20 nt, Human
gcccuagcccuggcucuuuu

SEQ ID NO: 1265259 - RNA, 20 nt, Human
gcccucucaucccugagccu

SEQ ID NO: 1265260 - RNA, 21 nt, Human
gcccuggcucuuuugucacug

SEQ ID NO: 1265261 - RNA, 24 nt, Human
gccuccaucccgcagccaggccac

SEQ ID NO: 1265262 - RNA, 21 nt, Human
gcgguggagcuguggagccuu

SEQ ID NO: 1265263 - RNA, 20 nt, Human
gcuagccccucagcuccugg

SEQ ID NO: 1265264 - RNA, 23 nt, Human
gcuccacucucaccccugccaca

SEQ ID NO: 1265265 - RNA, 21 nt, Human
gcucccuguucccccaaaaac

SEQ ID NO: 1265266 - RNA, 18 nt, Human
gcuggaggaggccccaac

SEQ ID NO: 1265267 - RNA, 21 nt, Human
gcuuccccccgccaccuccac

SEQ ID NO: 1265268 - RNA, 20 nt, Human
gcuugugggguaaggcuggg

SEQ ID NO: 1265269 - RNA, 19 nt, Human
ggaaggcccuguccauguc

SEQ ID NO: 1265270 - RNA, 22 nt, Human
ggacagaggugcuccagggaca

SEQ ID NO: 1265271 - RNA, 19 nt, Human
ggagcccaggcacugcagu

SEQ ID NO: 1265272 - RNA, 20 nt, Human
ggagcgguggagcuguggag

SEQ ID NO: 1265273 - RNA, 18 nt, Human
gggcccaggccugccaca

SEQ ID NO: 1265274 - RNA, 21 nt, Human
gggccucuccuuuuuugucug

SEQ ID NO: 1265275 - RNA, 23 nt, Human
ggggaaggaacguugagucccag

SEQ ID NO: 1265276 - RNA, 18 nt, Human
ggggcacccaugcugagg

SEQ ID NO: 1265277 - RNA, 24 nt, Human
ggguccaagagcugcuuacuucug

SEQ ID NO: 1265278 - RNA, 19 nt, Human
gguaaggcugggugccuug

SEQ ID NO: 1265279 - RNA, 22 nt, Human
ggugcuggagugaagccaggug

SEQ ID NO: 1265280 - RNA, 23 nt, Human
guaaugcaccuguggacaaagca

SEQ ID NO: 1265281 - RNA, 20 nt, Human
gugaccccagaaacuucagc

SEQ ID NO: 1265282 - RNA, 25 nt, Human
gugcuggagugaagccagguggagc

SEQ ID NO: 1265283 - RNA, 20 nt, Human
guggcucacaguccaaggug

SEQ ID NO: 1265284 - RNA, 19 nt, Human
uaaggcagugagccagacc

SEQ ID NO: 1265285 - RNA, 20 nt, Human
uacacagaaagucagaaaac

SEQ ID NO: 1265286 - RNA, 19 nt, Human
uaccucugagccacaugcc

SEQ ID NO: 1265287 - RNA, 20 nt, Human
uaccucugagccacaugccc

SEQ ID NO: 1265288 - RNA, 21 nt, Human
ucaagcccugcuugucucagu

SEQ ID NO: 1265289 - RNA, 24 nt, Human
ucagcccaccucccucugcuuccc

SEQ ID NO: 1265290 - RNA, 21 nt, Human
ucaucucauucccccaccugc

SEQ ID NO: 1265291 - RNA, 23 nt, Human
uccacagguagccucccugccca

SEQ ID NO: 1265292 - RNA, 25 nt, Human
uccacuuucucaucucauuccccca

SEQ ID NO: 1265293 - RNA, 20 nt, Human
uccagagcuucacccggcug

SEQ ID NO: 1265294 - RNA, 20 nt, Human
uccaggccccaacccugccu

SEQ ID NO: 1265295 - RNA, 18 nt, Human
uccagggguaggggaacc

SEQ ID NO: 1265296 - RNA, 20 nt, Human
ucccacaucccccuacccca

SEQ ID NO: 1265297 - RNA, 22 nt, Human
ucccagcccaguuuuaagggcc

SEQ ID NO: 1265298 - RNA, 18 nt, Human
ucccccuaccccacuuuu

SEQ ID NO: 1265299 - RNA, 21 nt, Human
uccccuuccucaaggagagcc

SEQ ID NO: 1265300 - RNA, 19 nt, Human
ucccgcagccaggccacag

SEQ ID NO: 1265301 - RNA, 20 nt, Human
ucccuggaaagcagcaaccu

SEQ ID NO: 1265302 - RNA, 27 nt, Human
ucccuggagcugcgcucaggggucccc

SEQ ID NO: 1265303 - RNA, 21 nt, Human
ucccugugaaggagccagggu

SEQ ID NO: 1265304 - RNA, 19 nt, Human
uccuacuguggcccacacc

SEQ ID NO: 1265305 - RNA, 19 nt, Human
ucucaccccugccacaagc

SEQ ID NO: 1265306 - RNA, 22 nt, Human
ucucaccccugccacaagcaaa

SEQ ID NO: 1265307 - RNA, 19 nt, Human
ucucagucucagcagagga

SEQ ID NO: 1265308 - RNA, 21 nt, Human
ucugagccacaugcccagagg

SEQ ID NO: 1265309 - RNA, 20 nt, Human
ucugggagacucgauuccau

SEQ ID NO: 1265310 - RNA, 24 nt, Human
ucugggguggagggacggggggca

SEQ ID NO: 1265311 - RNA, 18 nt, Human
ugaaaagcaauugagagc

SEQ ID NO: 1265312 - RNA, 22 nt, Human
ugaagccagguggagcggugga

SEQ ID NO: 1265313 - RNA, 23 nt, Human
ugaagccagguggagcgguggag

SEQ ID NO: 1265314 - RNA, 23 nt, Human
ugaaugagcagucugcaaaggca

SEQ ID NO: 1265315 - RNA, 26 nt, Human
ugacaaaugaacccaucaccggucag

SEQ ID NO: 1265316 - RNA, 19 nt, Human
ugaccccagaaacuucagc

SEQ ID NO: 1265317 - RNA, 19 nt, Human
ugacugaagcccuguucac

SEQ ID NO: 1265318 - RNA, 21 nt, Human
ugacugaagcccuguucaccc

SEQ ID NO: 1265319 - RNA, 18 nt, Human
ugagagggggugggaacg

SEQ ID NO: 1265320 - RNA, 22 nt, Human
ugagccaugccuggccugcccc

SEQ ID NO: 1265321 - RNA, 18 nt, Human
ugaggucagggcuucugg

SEQ ID NO: 1265322 - RNA, 21 nt, Human
ugaggucagggcuucuggggu

SEQ ID NO: 1265323 - RNA, 21 nt, Human
ugauaaggcagugagccagac

SEQ ID NO: 1265324 - RNA, 19 nt, Human
ugauaccucugagccacau

SEQ ID NO: 1265325 - RNA, 21 nt, Human
ugcacugagccaugccuggcc

SEQ ID NO: 1265326 - RNA, 27 nt, Human
ugcagugaaagaccagcucagccccuu

SEQ ID NO: 1265327 - RNA, 19 nt, Human
ugccaggcacugucugccc

SEQ ID NO: 1265328 - RNA, 21 nt, Human
ugcccaaaaggaagccuggca

SEQ ID NO: 1265329 - RNA, 22 nt, Human
ugcccaaaaggaagccuggcag

SEQ ID NO: 1265330 - RNA, 23 nt, Human
ugcccuauggccaggccugccug

SEQ ID NO: 1265331 - RNA, 21 nt, Human
ugccucuugggucaccguggc

SEQ ID NO: 1265332 - RNA, 22 nt, Human
ugccuggccugccccugggagc

SEQ ID NO: 1265333 - RNA, 21 nt, Human
ugcgaggcagagcugggcuga

SEQ ID NO: 1265334 - RNA, 24 nt, Human
ugcucccuguucccccaaaaacag

SEQ ID NO: 1265335 - RNA, 19 nt, Human
ugcuggaggaggccccaac

SEQ ID NO: 1265336 - RNA, 21 nt, Human
ugcuugugggguaaggcuggg

SEQ ID NO: 1265337 - RNA, 22 nt, Human
uggaaguggcucacaguccaag

SEQ ID NO: 1265338 - RNA, 23 nt, Human
uggaaguggcucacaguccaagg

SEQ ID NO: 1265339 - RNA, 20 nt, Human
uggagggacggggggcacag

SEQ ID NO: 1265340 - RNA, 21 nt, Human
uggagggcugggcuuggcagg

SEQ ID NO: 1265341 - RNA, 20 nt, Human
uggagugagggugcuccugc

SEQ ID NO: 1265342 - RNA, 21 nt, Human
uggcaugaaaaauuaccaaau

SEQ ID NO: 1265343 - RNA, 18 nt, Human
uggcaugaauaaaagggc

SEQ ID NO: 1265344 - RNA, 21 nt, Human
uggcaugaauaaaagggcagg

SEQ ID NO: 1265345 - RNA, 24 nt, Human
uggccccugaccccaccuguuccc

SEQ ID NO: 1265346 - RNA, 27 nt, Human
uggcggcgggggaaggaacguugaguc

SEQ ID NO: 1265347 - RNA, 23 nt, Human
uggcucuggagggcugggcuugg

SEQ ID NO: 1265348 - RNA, 23 nt, Human
ugggagcuagaccacaaaccgac

SEQ ID NO: 1265349 - RNA, 18 nt, Human
uggggcagggagaccagg

SEQ ID NO: 1265350 - RNA, 19 nt, Human
uggggcagggagaccaggu

SEQ ID NO: 1265351 - RNA, 20 nt, Human
uggggcagggagaccagguu

SEQ ID NO: 1265352 - RNA, 22 nt, Human
uggggcagggagaccagguugg

SEQ ID NO: 1265353 - RNA, 23 nt, Human
uggggcagggagaccagguuggc

SEQ ID NO: 1265354 - RNA, 19 nt, Human
ugggguggagggacggggg

SEQ ID NO: 1265355 - RNA, 21 nt, Human
ugggguggagggacggggggc

SEQ ID NO: 1265356 - RNA, 22 nt, Human
ugguaaguaugcuuggguggcu

SEQ ID NO: 1265357 - RNA, 21 nt, Human
ugguggagggccagcugcugg

SEQ ID NO: 1265358 - RNA, 23 nt, Human
ugucacugugauaccucugagcc

SEQ ID NO: 1265359 - RNA, 23 nt, Human
uguccuggggccuuguaaugcac

SEQ ID NO: 1265360 - RNA, 18 nt, Human
uguuucuucugaaaguuu

SEQ ID NO: 1265361 - RNA, 27 nt, Human
uuagugcagagggcagggaggcauggg

SEQ ID NO: 1265362 - RNA, 25 nt, Human
uucaccccaaguccaggcccugcag

SEQ ID NO: 1265363 - RNA, 23 nt, Human
uucaggucaagauagaaagggac

SEQ ID NO: 1265364 - RNA, 24 nt, Human
uucccaagacccugugaaugcucc

SEQ ID NO: 1265365 - RNA, 21 nt, Human
uuccgccccagagcccgggcu

SEQ ID NO: 1265366 - RNA, 21 nt, Human
uucgcagagagcaaguccccc

SEQ ID NO: 1265367 - RNA, 25 nt, Human
uuggagugagggugcuccugccugg

SEQ ID NO: 1265368 - RNA, 20 nt, Human
uuguuuugucucacacacuu

SEQ ID NO: 1265369 - RNA, 18 nt, Human
uuugucucacacacuucc

SEQ ID NO: 1265370 - RNA, 21 nt, Human
uuuguuuugucucacacacuu

SEQ ID NO: 1265371 - RNA, 25 nt, Human
aaaagagaaaaaaaccccugcaaaa

SEQ ID NO: 1265372 - RNA, 22 nt, Human
aaagcaaaagagaaaaaaaccc

SEQ ID NO: 1265373 - RNA, 24 nt, Human
aagcaaaagagaaaaaaaccccug

SEQ ID NO: 1265374 - RNA, 23 nt, Human
aagcaaaagagaaaaaaagggac

SEQ ID NO: 1265375 - RNA, 25 nt, Human
acaaguuuggcucucuggguuuguu

SEQ ID NO: 1265376 - RNA, 23 nt, Human
acccuggaggcccuucucucccu

SEQ ID NO: 1265377 - RNA, 18 nt, Human
accgucaggaaaucucug

SEQ ID NO: 1265378 - RNA, 23 nt, Human
accuugaaggauuuucucuuggg

SEQ ID NO: 1265379 - RNA, 20 nt, Human
accuugaggauguugcugga

SEQ ID NO: 1265380 - RNA, 25 nt, Human
acucaccauucccugcaccuaccuc

SEQ ID NO: 1265381 - RNA, 19 nt, Human
agaaggaaagggggagggc

SEQ ID NO: 1265382 - RNA, 21 nt, Human
aggaagaccuugaggauguug

SEQ ID NO: 1265383 - RNA, 19 nt, Human
agggcugcccccugcuuuc

SEQ ID NO: 1265384 - RNA, 18 nt, Human
aggggacccuggaggccc

SEQ ID NO: 1265385 - RNA, 18 nt, Human
agggggagggcugccccc

SEQ ID NO: 1265386 - RNA, 21 nt, Human
aggugccucugccuuuagacu

SEQ ID NO: 1265387 - RNA, 24 nt, Human
caaacagggaucucaauuccuagc

SEQ ID NO: 1265388 - RNA, 23 nt, Human
caagaaaauccauuccuggcuca

SEQ ID NO: 1265389 - RNA, 23 nt, Human
caccaaggaucuuguucaaauac

SEQ ID NO: 1265390 - RNA, 21 nt, Human
cacccagcucacggagccacc

SEQ ID NO: 1265391 - RNA, 19 nt, Human
caccgcauggguccaggaa

SEQ ID NO: 1265392 - RNA, 24 nt, Human
cagugucucccacuucuucaucuu

SEQ ID NO: 1265393 - RNA, 19 nt, Human
cccugagccucaguuaccu

SEQ ID NO: 1265394 - RNA, 21 nt, Human
cccuggaggcccuucucuccc

SEQ ID NO: 1265395 - RNA, 20 nt, Human
ccucuaaaaaaagcaaagau

SEQ ID NO: 1265396 - RNA, 20 nt, Human
ccucuuucacaaacagggau

SEQ ID NO: 1265397 - RNA, 23 nt, Human
cgugcagggcuggggugugcagg

SEQ ID NO: 1265398 - RNA, 24 nt, Human
cucaccauucccugcaccuaccuc

SEQ ID NO: 1265399 - RNA, 22 nt, Human
cuggacugcccaccucuacaag

SEQ ID NO: 1265400 - RNA, 24 nt, Human
cuggagucacccagcucacggagc

SEQ ID NO: 1265401 - RNA, 22 nt, Human
gaaggaaagggggagggcugcc

SEQ ID NO: 1265402 - RNA, 19 nt, Human
gaauuuaaaauauugauau

SEQ ID NO: 1265403 - RNA, 18 nt, Human
gagaaggaaagggggagg

SEQ ID NO: 1265404 - RNA, 23 nt, Human
gagagaaggaaagggggagggcu

SEQ ID NO: 1265405 - RNA, 21 nt, Human
ggagagaaggaaagggggagg

SEQ ID NO: 1265406 - RNA, 22 nt, Human
ggcuugugucugaaucuugggu

SEQ ID NO: 1265407 - RNA, 21 nt, Human
ggggagcaguuaggugccucu

SEQ ID NO: 1265408 - RNA, 20 nt, Human
ggguggggugggcugcgggg

SEQ ID NO: 1265409 - RNA, 25 nt, Human
ggugaggcuggagucacccagcuca

SEQ ID NO: 1265410 - RNA, 18 nt, Human
gguugucaggaagaccuu

SEQ ID NO: 1265411 - RNA, 25 nt, Human
uaaaaaaagcaaagaugaauuuaaa

SEQ ID NO: 1265412 - RNA, 23 nt, Human
uaaaaagcaaaagagaaaaaaac

SEQ ID NO: 1265413 - RNA, 19 nt, Human
uacaaauguuccuccucag

SEQ ID NO: 1265414 - RNA, 20 nt, Human
uaccucggagaaccugcagc

SEQ ID NO: 1265415 - RNA, 22 nt, Human
uagagcuguuucaagaaaaucc

SEQ ID NO: 1265416 - RNA, 21 nt, Human
ucagaaaagucucuuguuggu

SEQ ID NO: 1265417 - RNA, 24 nt, Human
ucccugaacauggaggggagccgg

SEQ ID NO: 1265418 - RNA, 21 nt, Human
uccuccucagaaaagucucuu

SEQ ID NO: 1265419 - RNA, 24 nt, Human
uccucuaaaaaaagcaaagaugaa

SEQ ID NO: 1265420 - RNA, 20 nt, Human
ucuaaaaagcaaaagagaaa

SEQ ID NO: 1265421 - RNA, 19 nt, Human
ucucaacgcagugucuccc

SEQ ID NO: 1265422 - RNA, 21 nt, Human
ucucccacuucuucaucuuaa

SEQ ID NO: 1265423 - RNA, 20 nt, Human
ucugaggaucagggagagaa

SEQ ID NO: 1265424 - RNA, 21 nt, Human
ucugaggaucagggagagaag

SEQ ID NO: 1265425 - RNA, 23 nt, Human
ucugcaccucaguucccucuuuc

SEQ ID NO: 1265426 - RNA, 18 nt, Human
ucuugugguuuuguacuu

SEQ ID NO: 1265427 - RNA, 21 nt, Human
ugaggaucagggagagaagga

SEQ ID NO: 1265428 - RNA, 22 nt, Human
ugcagggcuggggugugcaggu

SEQ ID NO: 1265429 - RNA, 18 nt, Human
ugccucugccuuuagacu

SEQ ID NO: 1265430 - RNA, 21 nt, Human
ugcugggaggaaggagggccc

SEQ ID NO: 1265431 - RNA, 20 nt, Human
uggaaggaggcaagacccac

SEQ ID NO: 1265432 - RNA, 19 nt, Human
uggguggggugggcugcgg

SEQ ID NO: 1265433 - RNA, 20 nt, Human
ugguuuuguacuucgauuuu

SEQ ID NO: 1265434 - RNA, 21 nt, Human
ugucaggaagaccuugaggau

SEQ ID NO: 1265435 - RNA, 20 nt, Human
ugucugaaucuugggugggg

SEQ ID NO: 1265436 - RNA, 19 nt, Human
uuacaacaagggcguuggg

SEQ ID NO: 1265437 - RNA, 25 nt, Human
uuagacacucaccauucccugcacc

SEQ ID NO: 1265438 - RNA, 26 nt, Human
uuccuccucagaaaagucucuuguug

SEQ ID NO: 1265439 - RNA, 20 nt, Human
uugguugucaggaagaccuu

SEQ ID NO: 1265440 - RNA, 22 nt, Human
uuuauacacaaaagcuuguaua

SEQ ID NO: 1265441 - RNA, 19 nt, Human
uuucacaaacagggaucuc

SEQ ID NO: 1265442 - RNA, 20 nt, Human
aaaaaaaaccucacacagaa

SEQ ID NO: 1265443 - RNA, 18 nt, Human
aaaaaaccucacacagaa

SEQ ID NO: 1265444 - RNA, 26 nt, Human
aaugucuauuaagucuccuggauagc

SEQ ID NO: 1265445 - RNA, 18 nt, Human
acaaaaaauuuccuccuc

SEQ ID NO: 1265446 - RNA, 23 nt, Human
acccacauaaccucuugcacccc

SEQ ID NO: 1265447 - RNA, 19 nt, Human
accccgcggcccaggagca

SEQ ID NO: 1265448 - RNA, 19 nt, Human
accguccccugccccggcc

SEQ ID NO: 1265449 - RNA, 18 nt, Human
aggccggucccaguggga

SEQ ID NO: 1265450 - RNA, 21 nt, Human
agugggcucaaccaugagggu

SEQ ID NO: 1265451 - RNA, 24 nt, Human
aucaauccgggcaaucacuggcca

SEQ ID NO: 1265452 - RNA, 18 nt, Human
aucaaugcucgccagccc

SEQ ID NO: 1265453 - RNA, 22 nt, Human
aucuucagcggauugacccugg

SEQ ID NO: 1265454 - RNA, 25 nt, Human
augcaaaacacaaaauggcucccaa

SEQ ID NO: 1265455 - RNA, 22 nt, Human
caaaauggcucccaauccaggc

SEQ ID NO: 1265456 - RNA, 26 nt, Human
caaaauggcucccaauccaggcaaag

SEQ ID NO: 1265457 - RNA, 19 nt, Human
cacaggacaggcauccuca

SEQ ID NO: 1265458 - RNA, 22 nt, Human
cacugagcaguuacaauagccc

SEQ ID NO: 1265459 - RNA, 19 nt, Human
cagacccaaagucuccagg

SEQ ID NO: 1265460 - RNA, 23 nt, Human
cagacccaaagucuccagggcga

SEQ ID NO: 1265461 - RNA, 25 nt, Human
cagcaacuuccugccgaaugcugau

SEQ ID NO: 1265462 - RNA, 20 nt, Human
cagccccgaucccccagcca

SEQ ID NO: 1265463 - RNA, 24 nt, Human
caggacaggcauccucauuccgcu

SEQ ID NO: 1265464 - RNA, 21 nt, Human
caggcauccucauuccgcuuu

SEQ ID NO: 1265465 - RNA, 25 nt, Human
cagggucuuccauuuucaagggucu

SEQ ID NO: 1265466 - RNA, 25 nt, Human
cauccugaguucuccaguaaguucc

SEQ ID NO: 1265467 - RNA, 18 nt, Human
caugacccacauaaccuc

SEQ ID NO: 1265468 - RNA, 20 nt, Human
cauggccuugaggugaacug

SEQ ID NO: 1265469 - RNA, 19 nt, Human
ccaaccaucagcuucgacu

SEQ ID NO: 1265470 - RNA, 21 nt, Human
ccacaggcugaaucuucaugc

SEQ ID NO: 1265471 - RNA, 19 nt, Human
ccaccguccccugccccgg

SEQ ID NO: 1265472 - RNA, 21 nt, Human
ccagccuggagccccuuucgc

SEQ ID NO: 1265473 - RNA, 20 nt, Human
ccagcucugccuuguccucc

SEQ ID NO: 1265474 - RNA, 24 nt, Human
ccaguccagcauauucucccuggg

SEQ ID NO: 1265475 - RNA, 21 nt, Human
cccacagauggcacaguccac

SEQ ID NO: 1265476 - RNA, 23 nt, Human
cccacaggacaggcauccucauu

SEQ ID NO: 1265477 - RNA, 20 nt, Human
cccacauaaccucuugcacc

SEQ ID NO: 1265478 - RNA, 23 nt, Human
cccacauuuauccaccuccacaa

SEQ ID NO: 1265479 - RNA, 21 nt, Human
cccacggcgcccagcacagcc

SEQ ID NO: 1265480 - RNA, 23 nt, Human
ccccaacgcccuggcacaggacu

SEQ ID NO: 1265481 - RNA, 24 nt, Human
ccccaagaucugcagcaucucucu

SEQ ID NO: 1265482 - RNA, 23 nt, Human
ccccaugccaggaccaccuccuc

SEQ ID NO: 1265483 - RNA, 18 nt, Human
ccccugagacaccucagg

SEQ ID NO: 1265484 - RNA, 19 nt, Human
ccccugagacaccucaggc

SEQ ID NO: 1265485 - RNA, 20 nt, Human
cccgaccccgcggcccagga

SEQ ID NO: 1265486 - RNA, 21 nt, Human
cccgaccccgcggcccaggag

SEQ ID NO: 1265487 - RNA, 19 nt, Human
cccgcggcccaggagcagc

SEQ ID NO: 1265488 - RNA, 23 nt, Human
cccggccccacggcgcccagccg

SEQ ID NO: 1265489 - RNA, 19 nt, Human
cccuggggucgaugcggcc

SEQ ID NO: 1265490 - RNA, 23 nt, Human
ccgcgcucucggccccucuccug

SEQ ID NO: 1265491 - RNA, 19 nt, Human
ccugagacaccucaggcug

SEQ ID NO: 1265492 - RNA, 19 nt, Human
ccuggagccccuuucgcug

SEQ ID NO: 1265493 - RNA, 24 nt, Human
ccuggccucggucccccggguggc

SEQ ID NO: 1265494 - RNA, 24 nt, Human
ccuggggucgaugcggcccuccuc

SEQ ID NO: 1265495 - RNA, 20 nt, Human
cgaaugcugaucauggcauc

SEQ ID NO: 1265496 - RNA, 19 nt, Human
cgacagagauuacagagau

SEQ ID NO: 1265497 - RNA, 23 nt, Human
cgagacaucagacccaaagucuc

SEQ ID NO: 1265498 - RNA, 24 nt, Human
cgagacaucagacccaaagucucc

SEQ ID NO: 1265499 - RNA, 19 nt, Human
cgaugcggcccuccucaau

SEQ ID NO: 1265500 - RNA, 21 nt, Human
cgccaaugggccccaugccag

SEQ ID NO: 1265501 - RNA, 24 nt, Human
cgcucucggccccucuccuggccu

SEQ ID NO: 1265502 - RNA, 21 nt, Human
cgcuguccccgccggcacugc

SEQ ID NO: 1265503 - RNA, 21 nt, Human
cggcccaggagcagccccaac

SEQ ID NO: 1265504 - RNA, 25 nt, Human
cggccccacggcgcccagcacagcc

SEQ ID NO: 1265505 - RNA, 22 nt, Human
cgucuagguagaccuauccucc

SEQ ID NO: 1265506 - RNA, 18 nt, Human
cuccaguauauuuggcuc

SEQ ID NO: 1265507 - RNA, 21 nt, Human
cuccuggccucggucccccgg

SEQ ID NO: 1265508 - RNA, 19 nt, Human
cucgagucuggacaacagc

SEQ ID NO: 1265509 - RNA, 20 nt, Human
cugcagcaucucucucuggu

SEQ ID NO: 1265510 - RNA, 21 nt, Human
cugcugcugucccggccccac

SEQ ID NO: 1265511 - RNA, 22 nt, Human
cuggagccccauggggccgcac

SEQ ID NO: 1265512 - RNA, 23 nt, Human
gacccaaagucuccagggcgaca

SEQ ID NO: 1265513 - RNA, 24 nt, Human
gacccacauaaccucuugcacccc

SEQ ID NO: 1265514 - RNA, 21 nt, Human
gagcaguuacaauagcccaug

SEQ ID NO: 1265515 - RNA, 20 nt, Human
gaguaaacucuccagccucc

SEQ ID NO: 1265516 - RNA, 19 nt, Human
gaguucuccaguaaguucc

SEQ ID NO: 1265517 - RNA, 27 nt, Human
gcaaaacacaaaauggcucccaaucca

SEQ ID NO: 1265518 - RNA, 19 nt, Human
gcaaaccguucugugcccc

SEQ ID NO: 1265519 - RNA, 19 nt, Human
gccgcgcucucggccccuc

SEQ ID NO: 1265520 - RNA, 20 nt, Human
gcgagacaucagacccaaag

SEQ ID NO: 1265521 - RNA, 22 nt, Human
gcgcccagcacagccccgaucc

SEQ ID NO: 1265522 - RNA, 23 nt, Human
gcgcuguccccgccggcacugcu

SEQ ID NO: 1265523 - RNA, 21 nt, Human
gcggcggccgcccccgacccc

SEQ ID NO: 1265524 - RNA, 22 nt, Human
ggcaaugggggucaacaaaaaa

SEQ ID NO: 1265525 - RNA, 23 nt, Human
ggccaccguccccugccccggcc

SEQ ID NO: 1265526 - RNA, 19 nt, Human
gggcagaaggcgcuccagg

SEQ ID NO: 1265527 - RNA, 23 nt, Human
ggucuugugaagauuuaggugcg

SEQ ID NO: 1265528 - RNA, 22 nt, Human
gucuugugaagauuuaggugcg

SEQ ID NO: 1265529 - RNA, 18 nt, Human
gugccccucuccuuucug

SEQ ID NO: 1265530 - RNA, 20 nt, Human
uaggugcgagacaucagacc

SEQ ID NO: 1265531 - RNA, 21 nt, Human
uauguaaucaugauggcugcu

SEQ ID NO: 1265532 - RNA, 18 nt, Human
ucaaacaccccauuggug

SEQ ID NO: 1265533 - RNA, 25 nt, Human
ucacacagaaaaagaggaaaacacu

SEQ ID NO: 1265534 - RNA, 19 nt, Human
ucagaaaauggcaacucau

SEQ ID NO: 1265535 - RNA, 25 nt, Human
ucagcaacuuccugccgaaugcuga

SEQ ID NO: 1265536 - RNA, 19 nt, Human
ucauccagcagggaugcac

SEQ ID NO: 1265537 - RNA, 24 nt, Human
ucaugccugccaugugggcacuug

SEQ ID NO: 1265538 - RNA, 21 nt, Human
uccaaaauaaauucaugaccc

SEQ ID NO: 1265539 - RNA, 23 nt, Human
uccaggcaacuggcacacaugua

SEQ ID NO: 1265540 - RNA, 18 nt, Human
ucccggccccacggcgcc

SEQ ID NO: 1265541 - RNA, 27 nt, Human
ucccugccacaggccagggcaugauag

SEQ ID NO: 1265542 - RNA, 24 nt, Human
uccuaaaacuuucuaugcaaaaca

SEQ ID NO: 1265543 - RNA, 20 nt, Human
uccuggagucucuuggccac

SEQ ID NO: 1265544 - RNA, 22 nt, Human
ucucuuggccacauccacugcc

SEQ ID NO: 1265545 - RNA, 23 nt, Human
ucucuuggccacauccacugccu

SEQ ID NO: 1265546 - RNA, 19 nt, Human
ucugcagccgcagucccuc

SEQ ID NO: 1265547 - RNA, 18 nt, Human
ucuuacgccaaugggccc

SEQ ID NO: 1265548 - RNA, 20 nt, Human
ucuuggccacauccacugcc

SEQ ID NO: 1265549 - RNA, 19 nt, Human
ugaaaugaugggaugauug

SEQ ID NO: 1265550 - RNA, 19 nt, Human
ugagcaguuacaauagccc

SEQ ID NO: 1265551 - RNA, 24 nt, Human
ugcaaaacacaaaauggcucccaa

SEQ ID NO: 1265552 - RNA, 21 nt, Human
ugccacauuaaaaguuaaagu

SEQ ID NO: 1265553 - RNA, 21 nt, Human
ugccaugugggcacuuguugg

SEQ ID NO: 1265554 - RNA, 18 nt, Human
ugccuuguccuccgacuc

SEQ ID NO: 1265555 - RNA, 21 nt, Human
ugcuagguucuccuugugcuu

SEQ ID NO: 1265556 - RNA, 19 nt, Human
ugcuuauccaccauggccu

SEQ ID NO: 1265557 - RNA, 19 nt, Human
uggcagggaccgucuucuc

SEQ ID NO: 1265558 - RNA, 23 nt, Human
uggcggcugcguccagccuggag

SEQ ID NO: 1265559 - RNA, 21 nt, Human
uggcucgagucuggacaacag

SEQ ID NO: 1265560 - RNA, 22 nt, Human
uggcucgagucuggacaacagc

SEQ ID NO: 1265561 - RNA, 19 nt, Human
ugggaugauugggcaaaaa

SEQ ID NO: 1265562 - RNA, 19 nt, Human
ugggcagaaggcgcuccag

SEQ ID NO: 1265563 - RNA, 19 nt, Human
uggguuggucccauguguu

SEQ ID NO: 1265564 - RNA, 19 nt, Human
ugguauggaguauacuggg

SEQ ID NO: 1265565 - RNA, 21 nt, Human
uguaaacauuuguccugggau

SEQ ID NO: 1265566 - RNA, 26 nt, Human
uguaaacauuuguccugggauuuccc

SEQ ID NO: 1265567 - RNA, 26 nt, Human
uguccaaaauaaauucaugacccaca

SEQ ID NO: 1265568 - RNA, 20 nt, Human
uguuggguuggucccaugug

SEQ ID NO: 1265569 - RNA, 23 nt, Human
uuagggagagaggacuaagaaga

SEQ ID NO: 1265570 - RNA, 20 nt, Human
uucagaaaauggcaacucau

SEQ ID NO: 1265571 - RNA, 21 nt, Human
uucagaaaauggcaacucaua

SEQ ID NO: 1265572 - RNA, 20 nt, Human
uucauuuucacaaacagggu

SEQ ID NO: 1265573 - RNA, 21 nt, Human
uucccacaggacaggcauccu

SEQ ID NO: 1265574 - RNA, 22 nt, Human
uucccacauuuauccaccucca

SEQ ID NO: 1265575 - RNA, 26 nt, Human
aaaaaaacacuagacaccagcagcca

SEQ ID NO: 1265576 - RNA, 18 nt, Human
aaaaaagccaacaccaaa

SEQ ID NO: 1265577 - RNA, 20 nt, Human
aaaaaagccaacaccaaacu

SEQ ID NO: 1265578 - RNA, 18 nt, Human
aaaagucuccaccuccuc

SEQ ID NO: 1265579 - RNA, 21 nt, Human
aaaaugccucauagaauuucu

SEQ ID NO: 1265580 - RNA, 24 nt, Human
aaccacaccauggauaaaauugag

SEQ ID NO: 1265581 - RNA, 18 nt, Human
aagcauacuguucaucau

SEQ ID NO: 1265582 - RNA, 18 nt, Human
aagcauuagagaucaacu

SEQ ID NO: 1265583 - RNA, 18 nt, Human
aagcauuagagaucaacu

SEQ ID NO: 1265584 - RNA, 22 nt, Human
aagccaacaccaaacugcccaa

SEQ ID NO: 1265585 - RNA, 18 nt, Human
acaaggacaggagaggga

SEQ ID NO: 1265586 - RNA, 19 nt, Human
acagugaaggaaccuccag

SEQ ID NO: 1265587 - RNA, 22 nt, Human
acccgccucucuucuaaguacu

SEQ ID NO: 1265588 - RNA, 18 nt, Human
agaagguauugaugauga

SEQ ID NO: 1265589 - RNA, 18 nt, Human
agaauucuccauacuccu

SEQ ID NO: 1265590 - RNA, 19 nt, Human
agaguagagagggaauggg

SEQ ID NO: 1265591 - RNA, 20 nt, Human
agcagccaggugggacaggg

SEQ ID NO: 1265592 - RNA, 21 nt, Human
aggacaggagagggaaaaaaa

SEQ ID NO: 1265593 - RNA, 24 nt, Human
aggacaggagagggaaaaaaacac

SEQ ID NO: 1265594 - RNA, 22 nt, Human
aggagagggaaaaaaacacuag

SEQ ID NO: 1265595 - RNA, 23 nt, Human
aggcagaaaaaagccaacaccaa

SEQ ID NO: 1265596 - RNA, 20 nt, Human
agguaggcagaaaaaagcca

SEQ ID NO: 1265597 - RNA, 18 nt, Human
aguagagagggaaugggg

SEQ ID NO: 1265598 - RNA, 22 nt, Human
aucacaaccaguuucucugcca

SEQ ID NO: 1265599 - RNA, 26 nt, Human
aucacagcuguccaugaugaacacac

SEQ ID NO: 1265600 - RNA, 19 nt, Human
caaaagucuccaccuccuc

SEQ ID NO: 1265601 - RNA, 20 nt, Human
caaaagucuccaccuccucc

SEQ ID NO: 1265602 - RNA, 23 nt, Human
caacuccugaaggaaaaucuccu

SEQ ID NO: 1265603 - RNA, 23 nt, Human
caagggcacaaguuuuccaacua

SEQ ID NO: 1265604 - RNA, 22 nt, Human
caauacacaacauccaauccug

SEQ ID NO: 1265605 - RNA, 19 nt, Human
caaugggcucaccaugauc

SEQ ID NO: 1265606 - RNA, 22 nt, Human
cacagcuguccaugaugaacac

SEQ ID NO: 1265607 - RNA, 21 nt, Human
cacaucuuugaucuugggcuu

SEQ ID NO: 1265608 - RNA, 21 nt, Human
caccagguaggcagaaaaaag

SEQ ID NO: 1265609 - RNA, 23 nt, Human
cagaaaaaagccaacaccaaacu

SEQ ID NO: 1265610 - RNA, 21 nt, Human
cagauccucagagucaaccac

SEQ ID NO: 1265611 - RNA, 21 nt, Human
cagcagaagacucccaagcau

SEQ ID NO: 1265612 - RNA, 24 nt, Human
cagcgcagcagcucagacaggcgg

SEQ ID NO: 1265613 - RNA, 20 nt, Human
cagcucagagaagagcucaa

SEQ ID NO: 1265614 - RNA, 20 nt, Human
cagcucuuuaccacugucca

SEQ ID NO: 1265615 - RNA, 21 nt, Human
cagugaaggaaccuccagcag

SEQ ID NO: 1265616 - RNA, 18 nt, Human
caguuucucugccaccag

SEQ ID NO: 1265617 - RNA, 22 nt, Human
caucucaucuccagacugggag

SEQ ID NO: 1265618 - RNA, 24 nt, Human
ccaacaccaaacugcccaaucaug

SEQ ID NO: 1265619 - RNA, 21 nt, Human
ccaaugccugugucuaccaaa

SEQ ID NO: 1265620 - RNA, 22 nt, Human
ccaaugggcucaccaugaucag

SEQ ID NO: 1265621 - RNA, 20 nt, Human
ccagcagaagacucccaagc

SEQ ID NO: 1265622 - RNA, 24 nt, Human
ccaggguacguuccugaggguugg

SEQ ID NO: 1265623 - RNA, 19 nt, Human
ccuccucaucugaacccac

SEQ ID NO: 1265624 - RNA, 23 nt, Human
cucaucacagcuguccaugauga

SEQ ID NO: 1265625 - RNA, 19 nt, Human
cuuccucuucuuucucacc

SEQ ID NO: 1265626 - RNA, 20 nt, Human
cuucuuucucaccuuucucu

SEQ ID NO: 1265627 - RNA, 25 nt, Human
gacccgccucucuucuaaguacucu

SEQ ID NO: 1265628 - RNA, 22 nt, Human
gcagaaaaaagccaacaccaaa

SEQ ID NO: 1265629 - RNA, 21 nt, Human
ggacaggagagggaaaaaaac

SEQ ID NO: 1265630 - RNA, 18 nt, Human
ggagccauggggacacua

SEQ ID NO: 1265631 - RNA, 21 nt, Human
ggcaaaagucuccaccuccuc

SEQ ID NO: 1265632 - RNA, 20 nt, Human
ggcaucagaagcauuagaga

SEQ ID NO: 1265633 - RNA, 23 nt, Human
gggcucaccaugaucagcaugca

SEQ ID NO: 1265634 - RNA, 20 nt, Human
ggggcuugacacccuugguu

SEQ ID NO: 1265635 - RNA, 23 nt, Human
gucaauuuucagcucuuuaccac

SEQ ID NO: 1265636 - RNA, 22 nt, Human
gucuccaccuccuccucuccau

SEQ ID NO: 1265637 - RNA, 21 nt, Human
gugagcuugcuuucugauacc

SEQ ID NO: 1265638 - RNA, 22 nt, Human
guuugauguuguucuuuuucuu

SEQ ID NO: 1265639 - RNA, 26 nt, Human
uacacaacauccaauccugcugucaa

SEQ ID NO: 1265640 - RNA, 20 nt, Human
uacccaggcagcaccaacgc

SEQ ID NO: 1265641 - RNA, 21 nt, Human
uagcaaugcccugaauuccaa

SEQ ID NO: 1265642 - RNA, 22 nt, Human
uaggcagaaaaaagccaacacc

SEQ ID NO: 1265643 - RNA, 21 nt, Human
uauacaagggcacaaguuuuc

SEQ ID NO: 1265644 - RNA, 18 nt, Human
ucaccuuucucuucuucu

SEQ ID NO: 1265645 - RNA, 21 nt, Human
uccaugcaugcuuuaguacca

SEQ ID NO: 1265646 - RNA, 22 nt, Human
uccugaggguuggggaugaugu

SEQ ID NO: 1265647 - RNA, 20 nt, Human
ucuccaccuccuccucucca

SEQ ID NO: 1265648 - RNA, 22 nt, Human
ucuccaccuccuccucuccaug

SEQ ID NO: 1265649 - RNA, 24 nt, Human
ucuccauacuccucuugggugaug

SEQ ID NO: 1265650 - RNA, 22 nt, Human
ucuccuugucuucugccagcuc

SEQ ID NO: 1265651 - RNA, 21 nt, Human
ucugccugaaaggcaaaaguu

SEQ ID NO: 1265652 - RNA, 21 nt, Human
ucuucuuucucaccuuucucu

SEQ ID NO: 1265653 - RNA, 19 nt, Human
ugaagaaaauaaaauaaaa

SEQ ID NO: 1265654 - RNA, 24 nt, Human
ugacugccaaguggucuucccagu

SEQ ID NO: 1265655 - RNA, 20 nt, Human
ugagaaugcuucuucacuac

SEQ ID NO: 1265656 - RNA, 20 nt, Human
ugaggguuggggaugauguc

SEQ ID NO: 1265657 - RNA, 20 nt, Human
ugaugagggauaugaguugg

SEQ ID NO: 1265658 - RNA, 24 nt, Human
ugccaccagguaggcagaaaaaag

SEQ ID NO: 1265659 - RNA, 21 nt, Human
ugccucaucaucacuaauuuc

SEQ ID NO: 1265660 - RNA, 23 nt, Human
ugccucaucaucacuaauuuccu

SEQ ID NO: 1265661 - RNA, 19 nt, Human
uggaauagaagguauugau

SEQ ID NO: 1265662 - RNA, 18 nt, Human
ugggagccauggggacac

SEQ ID NO: 1265663 - RNA, 24 nt, Human
ugggauagccuaugaacugagaau

SEQ ID NO: 1265664 - RNA, 24 nt, Human
ugguaucaacucaucacagcuguc

SEQ ID NO: 1265665 - RNA, 27 nt, Human
uuagaaaaugccucauagaauuucuua

SEQ ID NO: 1265666 - RNA, 19 nt, Human
uucagaacaaaaugaagaa

SEQ ID NO: 1265667 - RNA, 23 nt, Human
uugucuuguuccuucuccaaaua

SEQ ID NO: 1265668 - RNA, 18 nt, Human
uuuuccaacuaugaacuc

SEQ ID NO: 1265669 - RNA, 25 nt, Human
aaaaaagaaaaaagaucuaugaagg

SEQ ID NO: 1265670 - RNA, 25 nt, Human
aaagagaaaaaacaaguuuaaagaa

SEQ ID NO: 1265671 - RNA, 19 nt, Human
aacccagcguuugcuucca

SEQ ID NO: 1265672 - RNA, 19 nt, Human
aaccuaaaaugagagacca

SEQ ID NO: 1265673 - RNA, 21 nt, Human
aacuagcccacugugaaaccc

SEQ ID NO: 1265674 - RNA, 19 nt, Human
aacuugguaacacaggacc

SEQ ID NO: 1265675 - RNA, 21 nt, Human
aagaaaaaagaucuaugaagg

SEQ ID NO: 1265676 - RNA, 19 nt, Human
aagaagacacggauuccaa

SEQ ID NO: 1265677 - RNA, 26 nt, Human
aagagaaaaaacaaguuuaaagaaga

SEQ ID NO: 1265678 - RNA, 24 nt, Human
aaguacuucuucauuugcagcugc

SEQ ID NO: 1265679 - RNA, 21 nt, Human
acaaaaggcgacacugccaca

SEQ ID NO: 1265680 - RNA, 20 nt, Human
accuucccugggguacuguc

SEQ ID NO: 1265681 - RNA, 24 nt, Human
agaaaaaacaaguuuaaagaagaa

SEQ ID NO: 1265682 - RNA, 25 nt, Human
agaaaaaacaaguuuaaagaagaaa

SEQ ID NO: 1265683 - RNA, 20 nt, Human
agaagcaaauagaaugguuu

SEQ ID NO: 1265684 - RNA, 25 nt, Human
agagaaaaaacaaguuuaaagaaga

SEQ ID NO: 1265685 - RNA, 18 nt, Human
agagggagcaaugcugau

SEQ ID NO: 1265686 - RNA, 22 nt, Human
agcauuugaggaggguuguuuu

SEQ ID NO: 1265687 - RNA, 19 nt, Human
agggagcagcuuggcacag

SEQ ID NO: 1265688 - RNA, 24 nt, Human
aguucugugucuuguuuuucuccu

SEQ ID NO: 1265689 - RNA, 23 nt, Human
auaaaaccacaaaaggcgacacu

SEQ ID NO: 1265690 - RNA, 18 nt, Human
aucauccccucaccauga

SEQ ID NO: 1265691 - RNA, 24 nt, Human
auccuuuucagaaguagcagaagu

SEQ ID NO: 1265692 - RNA, 19 nt, Human
augaagcaugcccugcacc

SEQ ID NO: 1265693 - RNA, 21 nt, Human
augcuuuuagaauccucuucu

SEQ ID NO: 1265694 - RNA, 19 nt, Human
augguaaaugaagcaugcc

SEQ ID NO: 1265695 - RNA, 19 nt, Human
auguggaacaccaugcccc

SEQ ID NO: 1265696 - RNA, 21 nt, Human
auguuaaugcuaaagaagaag

SEQ ID NO: 1265697 - RNA, 20 nt, Human
auuuuguccaacuuuuucuu

SEQ ID NO: 1265698 - RNA, 19 nt, Human
caaaaauaaauaaggagga

SEQ ID NO: 1265699 - RNA, 20 nt, Human
caaagacucacuucuuucuc

SEQ ID NO: 1265700 - RNA, 22 nt, Human
caaggaaguugcagagccagua

SEQ ID NO: 1265701 - RNA, 20 nt, Human
caaguccccuaaugaagaaa

SEQ ID NO: 1265702 - RNA, 20 nt, Human
caccucaucauccccucacc

SEQ ID NO: 1265703 - RNA, 20 nt, Human
cacuaugcugcuuccaauau

SEQ ID NO: 1265704 - RNA, 21 nt, Human
cacuuuauuuaaaaauggagu

SEQ ID NO: 1265705 - RNA, 20 nt, Human
cagaugaagaaguccauuuc

SEQ ID NO: 1265706 - RNA, 22 nt, Human
caggauuauuguggaaauauua

SEQ ID NO: 1265707 - RNA, 19 nt, Human
cauaaaaccacaaaaggcg

SEQ ID NO: 1265708 - RNA, 27 nt, Human
cauaaaaccacaaaaggcgacacugcc

SEQ ID NO: 1265709 - RNA, 27 nt, Human
caugcuuaagagcuucuucagggaaaa

SEQ ID NO: 1265710 - RNA, 22 nt, Human
cauuugcagcugcagauuguuc

SEQ ID NO: 1265711 - RNA, 22 nt, Human
ccaaaucuuauuuccauuaaaa

SEQ ID NO: 1265712 - RNA, 18 nt, Human
ccaagacucccugaaccu

SEQ ID NO: 1265713 - RNA, 19 nt, Human
cccaagacucccugaaccu

SEQ ID NO: 1265714 - RNA, 24 nt, Human
cccagcaaaucuuagugcaaacau

SEQ ID NO: 1265715 - RNA, 25 nt, Human
ccugugagccccagcauucucugaa

SEQ ID NO: 1265716 - RNA, 20 nt, Human
ccuuaauuuuuuucuggagg

SEQ ID NO: 1265717 - RNA, 23 nt, Human
ccuucucucucccuggcuagcca

SEQ ID NO: 1265718 - RNA, 23 nt, Human
ccuucuugucuccucccuuugga

SEQ ID NO: 1265719 - RNA, 22 nt, Human
cgacacugccacaaucugcuuu

SEQ ID NO: 1265720 - RNA, 22 nt, Human
cuauggguauguuugggcuggg

SEQ ID NO: 1265721 - RNA, 23 nt, Human
cucacugucaugccagacucacu

SEQ ID NO: 1265722 - RNA, 21 nt, Human
cucacuuugugccacucuguc

SEQ ID NO: 1265723 - RNA, 26 nt, Human
cuccaaacaccuugugaaucauuuuu

SEQ ID NO: 1265724 - RNA, 23 nt, Human
cugccacaaucugcuuuuuccua

SEQ ID NO: 1265725 - RNA, 23 nt, Human
cugcuuccaauauuccuagucau

SEQ ID NO: 1265726 - RNA, 20 nt, Human
cugugucuuguuuuucuccu

SEQ ID NO: 1265727 - RNA, 19 nt, Human
cuuaaaaaaaagaaaaaag

SEQ ID NO: 1265728 - RNA, 22 nt, Human
cuucagggacccucauuucucc

SEQ ID NO: 1265729 - RNA, 19 nt, Human
cuugcagauguuaaugcua

SEQ ID NO: 1265730 - RNA, 18 nt, Human
cuuuucuucucuugcucu

SEQ ID NO: 1265731 - RNA, 20 nt, Human
gaaaguggaguaaaacacug

SEQ ID NO: 1265732 - RNA, 22 nt, Human
gacugauggggucaagggggaa

SEQ ID NO: 1265733 - RNA, 27 nt, Human
gagaaaaaacaaguuuaaagaagaaau

SEQ ID NO: 1265734 - RNA, 18 nt, Human
gagcagcuuggcacagga

SEQ ID NO: 1265735 - RNA, 20 nt, Human
gagcagcuuggcacaggaga

SEQ ID NO: 1265736 - RNA, 18 nt, Human
gcagcugcagauuguucc

SEQ ID NO: 1265737 - RNA, 21 nt, Human
gcuaaagaagaaggaguagag

SEQ ID NO: 1265738 - RNA, 21 nt, Human
gcuaaagaagaaggaguagag

SEQ ID NO: 1265739 - RNA, 18 nt, Human
ggagcagcuuggcacagg

SEQ ID NO: 1265740 - RNA, 24 nt, Human
guguuacaaccuuugcucuguggc

SEQ ID NO: 1265741 - RNA, 22 nt, Human
guuccagcuucaugauuuuuuu

SEQ ID NO: 1265742 - RNA, 21 nt, Human
guuuugagagucucuccauuu

SEQ ID NO: 1265743 - RNA, 23 nt, Human
uaaaaccacaaaaggcgacacug

SEQ ID NO: 1265744 - RNA, 19 nt, Human
uaaauccuauuauuaagaa

SEQ ID NO: 1265745 - RNA, 22 nt, Human
uaacugaauuaagauacacccc

SEQ ID NO: 1265746 - RNA, 24 nt, Human
uaagaagcaaauagaaugguuuaa

SEQ ID NO: 1265747 - RNA, 21 nt, Human
uaaguacccuugucacuuugg

SEQ ID NO: 1265748 - RNA, 18 nt, Human
uacugcccuguucauuuu

SEQ ID NO: 1265749 - RNA, 20 nt, Human
uagcacaggacaaaggccuu

SEQ ID NO: 1265750 - RNA, 20 nt, Human
uagcagaaguugcuugauuu

SEQ ID NO: 1265751 - RNA, 26 nt, Human
uaggucacagcauggcuuaaaaaaaa

SEQ ID NO: 1265752 - RNA, 25 nt, Human
uagugcaaacauaauaguuaauuuc

SEQ ID NO: 1265753 - RNA, 20 nt, Human
uaguuaucauuuaaccuaaa

SEQ ID NO: 1265754 - RNA, 19 nt, Human
uauaauggaguaccacggg

SEQ ID NO: 1265755 - RNA, 20 nt, Human
uauaauugaaccaaacugug

SEQ ID NO: 1265756 - RNA, 20 nt, Human
uauuuuguccaacuuuuucu

SEQ ID NO: 1265757 - RNA, 23 nt, Human
uauuuuguccaacuuuuucuuca

SEQ ID NO: 1265758 - RNA, 19 nt, Human
ucaacuaaucuuaugacua

SEQ ID NO: 1265759 - RNA, 19 nt, Human
ucaacugucacauauaaac

SEQ ID NO: 1265760 - RNA, 27 nt, Human
ucacauggucucuaauaguuaccuucc

SEQ ID NO: 1265761 - RNA, 24 nt, Human
ucacugaucucugucucauucucu

SEQ ID NO: 1265762 - RNA, 20 nt, Human
ucagaaauguuggcuauuua

SEQ ID NO: 1265763 - RNA, 21 nt, Human
uccaccucaucauccccucac

SEQ ID NO: 1265764 - RNA, 19 nt, Human
uccacugagccuccucccu

SEQ ID NO: 1265765 - RNA, 18 nt, Human
uccaggagcagagcugcc

SEQ ID NO: 1265766 - RNA, 19 nt, Human
uccauggcuuuuuccucgg

SEQ ID NO: 1265767 - RNA, 23 nt, Human
uccauuaaaaaaaaugaaaaaaa

SEQ ID NO: 1265768 - RNA, 21 nt, Human
ucccauguggaacaccaugcc

SEQ ID NO: 1265769 - RNA, 21 nt, Human
uccguaaaccccaagacaauu

SEQ ID NO: 1265770 - RNA, 21 nt, Human
uccuuacaucauucacaaaag

SEQ ID NO: 1265771 - RNA, 23 nt, Human
ucuaaaggaagaggugcagaaaa

SEQ ID NO: 1265772 - RNA, 24 nt, Human
ucuauagugaagcucccuugucgc

SEQ ID NO: 1265773 - RNA, 23 nt, Human
ucugauucugaagauuuuuggga

SEQ ID NO: 1265774 - RNA, 18 nt, Human
ucuguacagaugaagaag

SEQ ID NO: 1265775 - RNA, 22 nt, Human
ucugugcccaagacucccugaa

SEQ ID NO: 1265776 - RNA, 22 nt, Human
ucuguuuuaacaguuucccaug

SEQ ID NO: 1265777 - RNA, 22 nt, Human
ucuugcaggguccuuauaaaug

SEQ ID NO: 1265778 - RNA, 20 nt, Human
ucuuuuccauagcauuugag

SEQ ID NO: 1265779 - RNA, 24 nt, Human
ugaaacccagcguuugcuuccaga

SEQ ID NO: 1265780 - RNA, 20 nt, Human
ugaaccucuuaauaaugcag

SEQ ID NO: 1265781 - RNA, 21 nt, Human
ugaagaaaauuuuaaccucau

SEQ ID NO: 1265782 - RNA, 23 nt, Human
ugaagaaguccauuucagggagc

SEQ ID NO: 1265783 - RNA, 19 nt, Human
ugacauacuacauuauacg

SEQ ID NO: 1265784 - RNA, 20 nt, Human
ugaccucuguguuacaaccu

SEQ ID NO: 1265785 - RNA, 18 nt, Human
ugagccccagcauucucu

SEQ ID NO: 1265786 - RNA, 22 nt, Human
ugaggaggguuguuuugugcua

SEQ ID NO: 1265787 - RNA, 19 nt, Human
ugaucucugucucauucuc

SEQ ID NO: 1265788 - RNA, 21 nt, Human
ugcacagagcuaguaacagcu

SEQ ID NO: 1265789 - RNA, 19 nt, Human
ugcccuguucauuuuacuc

SEQ ID NO: 1265790 - RNA, 20 nt, Human
ugcuggaauucuuuuguagg

SEQ ID NO: 1265791 - RNA, 19 nt, Human
uggaagcuggggaagaguu

SEQ ID NO: 1265792 - RNA, 24 nt, Human
uggggucaagggggaaaauccagg

SEQ ID NO: 1265793 - RNA, 18 nt, Human
uguacaaaaaagacgguu

SEQ ID NO: 1265794 - RNA, 23 nt, Human
uguacaaaaaagacgguuagucc

SEQ ID NO: 1265795 - RNA, 19 nt, Human
uguccaccuaccacuccca

SEQ ID NO: 1265796 - RNA, 20 nt, Human
ugugaaaggucugcuuuacu

SEQ ID NO: 1265797 - RNA, 20 nt, Human
ugugccacucugucuccuuu

SEQ ID NO: 1265798 - RNA, 20 nt, Human
uguggaaauauuaaagacca

SEQ ID NO: 1265799 - RNA, 20 nt, Human
uguuacaaccuuugcucugg

SEQ ID NO: 1265800 - RNA, 18 nt, Human
uguuucguuuauuccuuc

SEQ ID NO: 1265801 - RNA, 24 nt, Human
uuaaaaccuuuuuucagucuuccu

SEQ ID NO: 1265802 - RNA, 21 nt, Human
uuaacauuuuauccaucuccu

SEQ ID NO: 1265803 - RNA, 18 nt, Human
uuaggugcuucuuucucc

SEQ ID NO: 1265804 - RNA, 19 nt, Human
uuccucagcuuuucuucuc

SEQ ID NO: 1265805 - RNA, 21 nt, Human
uucugauucugaagauuuuug

SEQ ID NO: 1265806 - RNA, 19 nt, Human
uucuucuugaucaugccuu

SEQ ID NO: 1265807 - RNA, 23 nt, Human
uuguaggaaggguauugacaccg

SEQ ID NO: 1265808 - RNA, 20 nt, Human
uuuagaauccucuucuguuc

SEQ ID NO: 1265809 - RNA, 25 nt, Human
uuucauccaccucaucauccccuca

SEQ ID NO: 1265810 - RNA, 23 nt, Human
uuucuuagaacaaauauagcaca

SEQ ID NO: 1265811 - RNA, 20 nt, Human
uuucuucuugaucaugccuu

SEQ ID NO: 1265812 - RNA, 21 nt, Human
uuugcagcugcagauuguucc

SEQ ID NO: 1265813 - RNA, 24 nt, Human
uuugcagcugcagauuguuccucc

SEQ ID NO: 1265814 - RNA, 19 nt, Human
uuugcucuguggcucucaa

SEQ ID NO: 1265815 - RNA, 22 nt, Human
uuuuucaacaaucaagagaaag

SEQ ID NO: 1265816 - RNA, 22 nt, Human
uuuuucuugcuuccacuuccuc

SEQ ID NO: 1265817 - RNA, 19 nt, Human
uuuuugggacaacugaagc

SEQ ID NO: 1265818 - RNA, 19 nt, Human
aaaaaccaccaccggaaug

SEQ ID NO: 1265819 - RNA, 21 nt, Human
aaaagaaaaaaacauuacaaa

SEQ ID NO: 1265820 - RNA, 23 nt, Human
aaacagauuuggcagugcgugaa

SEQ ID NO: 1265821 - RNA, 21 nt, Human
aaaccaccaccggaaugccaa

SEQ ID NO: 1265822 - RNA, 21 nt, Human
aaagcucuuccagccagggau

SEQ ID NO: 1265823 - RNA, 24 nt, Human
aaaggaaacaaaaaccaccaccgg

SEQ ID NO: 1265824 - RNA, 18 nt, Human
aacaacaaaaccaaacaa

SEQ ID NO: 1265825 - RNA, 23 nt, Human
aacaacaaaaccaaacaaaccca

SEQ ID NO: 1265826 - RNA, 25 nt, Human
aacaacaacaaaaccaaacaaaccc

SEQ ID NO: 1265827 - RNA, 27 nt, Human
aacaacaacaacaaaaccaaacaaacc

SEQ ID NO: 1265828 - RNA, 24 nt, Human
aaccaaacaaacccaaacucgaga

SEQ ID NO: 1265829 - RNA, 20 nt, Human
aagcaggggugaggggaaga

SEQ ID NO: 1265830 - RNA, 20 nt, Human
aagcuccccaaagcaggaaa

SEQ ID NO: 1265831 - RNA, 30 nt, Human
acaacaacaacaaaaccaaacaaacccaaa

SEQ ID NO: 1265832 - RNA, 20 nt, Human
acaugggcacacacuggggu

SEQ ID NO: 1265833 - RNA, 20 nt, Human
accccagagucugucugccu

SEQ ID NO: 1265834 - RNA, 20 nt, Human
accggagccugcagcagcaa

SEQ ID NO: 1265835 - RNA, 25 nt, Human
accuucucccucugaaccuuaauuu

SEQ ID NO: 1265836 - RNA, 20 nt, Human
acguggguaaagccagcaag

SEQ ID NO: 1265837 - RNA, 19 nt, Human
acucaggaaaacugccaug

SEQ ID NO: 1265838 - RNA, 22 nt, Human
agaacaacaacaacaaaaccaa

SEQ ID NO: 1265839 - RNA, 23 nt, Human
agagaaaagucauggacacgagg

SEQ ID NO: 1265840 - RNA, 21 nt, Human
agagccaugacuccaggggag

SEQ ID NO: 1265841 - RNA, 22 nt, Human
agauagaaggugggaggcaggg

SEQ ID NO: 1265842 - RNA, 20 nt, Human
aggaaacaaaaaccaccacc

SEQ ID NO: 1265843 - RNA, 23 nt, Human
aggaagcagcucugccuggcccu

SEQ ID NO: 1265844 - RNA, 26 nt, Human
aggcaagaagucacaguaccccagag

SEQ ID NO: 1265845 - RNA, 21 nt, Human
aggcacuggucaccagcccgg

SEQ ID NO: 1265846 - RNA, 22 nt, Human
aggcuuuggggaaggggacacu

SEQ ID NO: 1265847 - RNA, 19 nt, Human
aggguggggaggggcgggg

SEQ ID NO: 1265848 - RNA, 19 nt, Human
aggguggggaggggcgggg

SEQ ID NO: 1265849 - RNA, 23 nt, Human
agguggugggcagugcccacugu

SEQ ID NO: 1265850 - RNA, 18 nt, Human
aguccagggcagccuuug

SEQ ID NO: 1265851 - RNA, 24 nt, Human
auccgccucacaggcuugccguaa

SEQ ID NO: 1265852 - RNA, 18 nt, Human
aucucuggggcagggcag

SEQ ID NO: 1265853 - RNA, 20 nt, Human
auguucccccaucuuccacc

SEQ ID NO: 1265854 - RNA, 18 nt, Human
caacaaaaccaaacaaac

SEQ ID NO: 1265855 - RNA, 23 nt, Human
caacaacaaaaccaaacaaaccc

SEQ ID NO: 1265856 - RNA, 26 nt, Human
caacaacaacaaaaccaaacaaaccc

SEQ ID NO: 1265857 - RNA, 19 nt, Human
caaccaccaggacccuggc

SEQ ID NO: 1265858 - RNA, 24 nt, Human
caauuuaggaggagugaauaaagc

SEQ ID NO: 1265859 - RNA, 23 nt, Human
caccagaaaccagaugccacccc

SEQ ID NO: 1265860 - RNA, 22 nt, Human
caccccacggagcugggcaguc

SEQ ID NO: 1265861 - RNA, 21 nt, Human
caccccccucacaaugaagcc

SEQ ID NO: 1265862 - RNA, 19 nt, Human
caccccuccccucacaucc

SEQ ID NO: 1265863 - RNA, 18 nt, Human
caccucgaccuucaggcc

SEQ ID NO: 1265864 - RNA, 18 nt, Human
cacgagggaaagaacaac

SEQ ID NO: 1265865 - RNA, 18 nt, Human
cagaaaccagaugccacc

SEQ ID NO: 1265866 - RNA, 23 nt, Human
cagagcccuccaggcuggcccuc

SEQ ID NO: 1265867 - RNA, 19 nt, Human
cagagggagggucacuuga

SEQ ID NO: 1265868 - RNA, 19 nt, Human
cagccuaagguccuucuca

SEQ ID NO: 1265869 - RNA, 27 nt, Human
cagcugggacgacauacacccaccaac

SEQ ID NO: 1265870 - RNA, 21 nt, Human
cagcuuagaagagggaacagg

SEQ ID NO: 1265871 - RNA, 25 nt, Human
caggaaauguggguuguaaucaagg

SEQ ID NO: 1265872 - RNA, 22 nt, Human
caggcccacuccugggggagcc

SEQ ID NO: 1265873 - RNA, 22 nt, Human
caggggccgggaggggcccgug

SEQ ID NO: 1265874 - RNA, 19 nt, Human
caggggcgcccgagguguc

SEQ ID NO: 1265875 - RNA, 20 nt, Human
cagugaugcugugauaggag

SEQ ID NO: 1265876 - RNA, 22 nt, Human
cagugcccacuguuccuggagg

SEQ ID NO: 1265877 - RNA, 22 nt, Human
caguuugacagaugaccacauc

SEQ ID NO: 1265878 - RNA, 22 nt, Human
caucccagucuacucagcaccu

SEQ ID NO: 1265879 - RNA, 20 nt, Human
caugccucuccagaccucag

SEQ ID NO: 1265880 - RNA, 21 nt, Human
cauggcucaggcuguuaggug

SEQ ID NO: 1265881 - RNA, 22 nt, Human
ccaaacaaacccaaacucgaga

SEQ ID NO: 1265882 - RNA, 24 nt, Human
ccacaucugcccuggguuucuuca

SEQ ID NO: 1265883 - RNA, 19 nt, Human
ccacccugacccacccacu

SEQ ID NO: 1265884 - RNA, 23 nt, Human
ccacccuuccuuaucuucaaucu

SEQ ID NO: 1265885 - RNA, 20 nt, Human
ccacgggccugaggcuuugg

SEQ ID NO: 1265886 - RNA, 23 nt, Human
ccacuuggccaccacuuagccag

SEQ ID NO: 1265887 - RNA, 21 nt, Human
ccagcaaggaccagcgggccc

SEQ ID NO: 1265888 - RNA, 20 nt, Human
ccagcgcugcugcuuccccc

SEQ ID NO: 1265889 - RNA, 22 nt, Human
cccacccuuccuuaucuucaau

SEQ ID NO: 1265890 - RNA, 21 nt, Human
cccaccucccuucuuccccug

SEQ ID NO: 1265891 - RNA, 19 nt, Human
ccgaaacucacucuccacc

SEQ ID NO: 1265892 - RNA, 21 nt, Human
ccguaaggauuaaaggagcgu

SEQ ID NO: 1265893 - RNA, 21 nt, Human
ccucacaggcuugccguaagg

SEQ ID NO: 1265894 - RNA, 26 nt, Human
ccucggucggguagaaugggaagggg

SEQ ID NO: 1265895 - RNA, 18 nt, Human
ccucuucccucuuccucc

SEQ ID NO: 1265896 - RNA, 20 nt, Human
ccugacccacccacugccug

SEQ ID NO: 1265897 - RNA, 19 nt, Human
ccugcagcagcaaagcgca

SEQ ID NO: 1265898 - RNA, 21 nt, Human
ccuggagggagguaagaaaug

SEQ ID NO: 1265899 - RNA, 19 nt, Human
cgaaggcacuaaagaugcu

SEQ ID NO: 1265900 - RNA, 22 nt, Human
cgauaacuuggcagaauagcac

SEQ ID NO: 1265901 - RNA, 19 nt, Human
cgcugcccguguuguucuc

SEQ ID NO: 1265902 - RNA, 22 nt, Human
cgggcacaaaggcauacauggg

SEQ ID NO: 1265903 - RNA, 20 nt, Human
cgguuccagcucugcagcuc

SEQ ID NO: 1265904 - RNA, 23 nt, Human
cguguuguucuccagcgcugcug

SEQ ID NO: 1265905 - RNA, 20 nt, Human
cuaaagaugcuacaggugau

SEQ ID NO: 1265906 - RNA, 22 nt, Human
cuacacaacagcccugcagaac

SEQ ID NO: 1265907 - RNA, 21 nt, Human
cuauuccccagggggcaacag

SEQ ID NO: 1265908 - RNA, 19 nt, Human
cucacagaauagcgaccac

SEQ ID NO: 1265909 - RNA, 24 nt, Human
cucaccccccucacaaugaagcca

SEQ ID NO: 1265910 - RNA, 19 nt, Human
cucaggguuuuccaaauuu

SEQ ID NO: 1265911 - RNA, 18 nt, Human
cucccuucuuccccuggc

SEQ ID NO: 1265912 - RNA, 24 nt, Human
cucugcucucuuacucugggcugg

SEQ ID NO: 1265913 - RNA, 18 nt, Human
cucuuccagccagggaug

SEQ ID NO: 1265914 - RNA, 20 nt, Human
cugcucucuuacucugggcu

SEQ ID NO: 1265915 - RNA, 22 nt, Human
cugcucucuuacucugggcugg

SEQ ID NO: 1265916 - RNA, 18 nt, Human
cugcucugcucucuuacu

SEQ ID NO: 1265917 - RNA, 19 nt, Human
cuggagcucagcucucccg

SEQ ID NO: 1265918 - RNA, 22 nt, Human
cuggccacccugacccacccac

SEQ ID NO: 1265919 - RNA, 25 nt, Human
cugggagcuagaaaugcuggguccu

SEQ ID NO: 1265920 - RNA, 22 nt, Human
cuggguccugauuuugcuucug

SEQ ID NO: 1265921 - RNA, 21 nt, Human
cuggugggggcaccuucuuuu

SEQ ID NO: 1265922 - RNA, 18 nt, Human
cugucauggagaugcagc

SEQ ID NO: 1265923 - RNA, 22 nt, Human
cuguccacuccucagccuaagg

SEQ ID NO: 1265924 - RNA, 19 nt, Human
cuucccugccugguuuguc

SEQ ID NO: 1265925 - RNA, 21 nt, Human
cuucuuuuucccacucugugc

SEQ ID NO: 1265926 - RNA, 18 nt, Human
cuugcuggaguuucucca

SEQ ID NO: 1265927 - RNA, 21 nt, Human
gaaacaaaaaccaccaccgga

SEQ ID NO: 1265928 - RNA, 22 nt, Human
gaacaacaacaacaaaaccaaa

SEQ ID NO: 1265929 - RNA, 19 nt, Human
gaaugcauuucuucaggau

SEQ ID NO: 1265930 - RNA, 19 nt, Human
gaauggcagauucuuucau

SEQ ID NO: 1265931 - RNA, 20 nt, Human
gaauuuccucaucuauaaag

SEQ ID NO: 1265932 - RNA, 20 nt, Human
gacuguggcuucaguacccg

SEQ ID NO: 1265933 - RNA, 20 nt, Human
gagaaaagucauggacacga

SEQ ID NO: 1265934 - RNA, 18 nt, Human
gagagugacuggccaccc

SEQ ID NO: 1265935 - RNA, 22 nt, Human
gaggggcccguggcuucgcugc

SEQ ID NO: 1265936 - RNA, 23 nt, Human
gagguggugggcagugcccacug

SEQ ID NO: 1265937 - RNA, 19 nt, Human
gaugcugacauggacagaa

SEQ ID NO: 1265938 - RNA, 18 nt, Human
gcagaagcagccagcacc

SEQ ID NO: 1265939 - RNA, 24 nt, Human
gcagagaaaagucauggacacgag

SEQ ID NO: 1265940 - RNA, 21 nt, Human
gcagccuuugguauaggcugc

SEQ ID NO: 1265941 - RNA, 18 nt, Human
gcagggcaggguggggag

SEQ ID NO: 1265942 - RNA, 18 nt, Human
gcagguagacacugagca

SEQ ID NO: 1265943 - RNA, 18 nt, Human
gcccccucaccccccuca

SEQ ID NO: 1265944 - RNA, 19 nt, Human
gcccccucaccccccucac

SEQ ID NO: 1265945 - RNA, 19 nt, Human
gcccucuaggcagaaaggg

SEQ ID NO: 1265946 - RNA, 18 nt, Human
gcccuuccccaccucccu

SEQ ID NO: 1265947 - RNA, 19 nt, Human
gccugaggcuuuggggaag

SEQ ID NO: 1265948 - RNA, 18 nt, Human
gccuggaagcugaugccg

SEQ ID NO: 1265949 - RNA, 19 nt, Human
gcgaugguguaauacucuu

SEQ ID NO: 1265950 - RNA, 23 nt, Human
gcucagagcccuccaggcuggcc

SEQ ID NO: 1265951 - RNA, 20 nt, Human
gcucugccugggacccucgu

SEQ ID NO: 1265952 - RNA, 22 nt, Human
ggagggaucaggcccaggggcg

SEQ ID NO: 1265953 - RNA, 20 nt, Human
ggcaagugggcccugcccaa

SEQ ID NO: 1265954 - RNA, 23 nt, Human
ggcacccacgaggcacucagcaa

SEQ ID NO: 1265955 - RNA, 23 nt, Human
ggcaggagcaguuucuucuuuuu

SEQ ID NO: 1265956 - RNA, 18 nt, Human
ggcagggcugccucgguc

SEQ ID NO: 1265957 - RNA, 18 nt, Human
ggcggcugagcggaucuc

SEQ ID NO: 1265958 - RNA, 21 nt, Human
gggaagaaaaaaaaaucucug

SEQ ID NO: 1265959 - RNA, 19 nt, Human
gggcagggcagggcagggc

SEQ ID NO: 1265960 - RNA, 19 nt, Human
gggcagggcagggugggga

SEQ ID NO: 1265961 - RNA, 23 nt, Human
gggcggggcagggcagggcaggg

SEQ ID NO: 1265962 - RNA, 19 nt, Human
gggcuggagggaugguggg

SEQ ID NO: 1265963 - RNA, 18 nt, Human
gguccugauuuugcuucu

SEQ ID NO: 1265964 - RNA, 19 nt, Human
ggugaucagaggaagcucc

SEQ ID NO: 1265965 - RNA, 21 nt, Human
gguuccagcucugcagcucug

SEQ ID NO: 1265966 - RNA, 25 nt, Human
guaccccagagucugucugccuugg

SEQ ID NO: 1265967 - RNA, 23 nt, Human
gucuacacaacagcccugcagaa

SEQ ID NO: 1265968 - RNA, 19 nt, Human
gucuuuuacagaggggagg

SEQ ID NO: 1265969 - RNA, 22 nt, Human
gugaauuuccucaucuauaaag

SEQ ID NO: 1265970 - RNA, 21 nt, Human
gugugagcaaggggcgggggg

SEQ ID NO: 1265971 - RNA, 22 nt, Human
guucuccagcgcugcugcuucc

SEQ ID NO: 1265972 - RNA, 18 nt, Human
guugaaacaugaggagga

SEQ ID NO: 1265973 - RNA, 20 nt, Human
guuucuucuuuuucccacuc

SEQ ID NO: 1265974 - RNA, 21 nt, Human
uaaaaugacuaccguaaccug

SEQ ID NO: 1265975 - RNA, 18 nt, Human
uaacguggcauauguucc

SEQ ID NO: 1265976 - RNA, 21 nt, Human
uaacguggcauauguuccccc

SEQ ID NO: 1265977 - RNA, 20 nt, Human
uaccaccagccacucaaguu

SEQ ID NO: 1265978 - RNA, 21 nt, Human
uacguggguaaagccagcaag

SEQ ID NO: 1265979 - RNA, 24 nt, Human
uacucagcaccuagcacagaguag

SEQ ID NO: 1265980 - RNA, 24 nt, Human
uagaaacgggaagauggaauguug

SEQ ID NO: 1265981 - RNA, 23 nt, Human
uagaguaaguguggggaucucca

SEQ ID NO: 1265982 - RNA, 21 nt, Human
uaggagagugacuggccaccc

SEQ ID NO: 1265983 - RNA, 22 nt, Human
uauaggcugcugugggcuggag

SEQ ID NO: 1265984 - RNA, 24 nt, Human
ucaaagcucuuccagccagggaug

SEQ ID NO: 1265985 - RNA, 27 nt, Human
ucaaagcucuuccagccagggauggag

SEQ ID NO: 1265986 - RNA, 23 nt, Human
ucaaccaccaggacccuggcauu

SEQ ID NO: 1265987 - RNA, 19 nt, Human
ucagcucucccgcagucuc

SEQ ID NO: 1265988 - RNA, 18 nt, Human
ucaggaaaacugccaugg

SEQ ID NO: 1265989 - RNA, 19 nt, Human
ucaggccugccuggaagcu

SEQ ID NO: 1265990 - RNA, 25 nt, Human
uccaaagagaaagguacggccucca

SEQ ID NO: 1265991 - RNA, 19 nt, Human
uccaaguuggggugggaac

SEQ ID NO: 1265992 - RNA, 18 nt, Human
uccaggcuggcccucgag

SEQ ID NO: 1265993 - RNA, 18 nt, Human
uccaguggaaccucagag

SEQ ID NO: 1265994 - RNA, 19 nt, Human
uccccaccucccuucuucc

SEQ ID NO: 1265995 - RNA, 18 nt, Human
ucccucuuccuccuggcu

SEQ ID NO: 1265996 - RNA, 25 nt, Human
ucggcgaugguguaauacucuuccu

SEQ ID NO: 1265997 - RNA, 24 nt, Human
ucugcucucuuacucugggcuggg

SEQ ID NO: 1265998 - RNA, 25 nt, Human
ucugcucugcucucuuacucugggg

SEQ ID NO: 1265999 - RNA, 21 nt, Human
ucuguagaaaggugcucugaa

SEQ ID NO: 1266000 - RNA, 21 nt, Human
ucuuagacucaggguuuucca

SEQ ID NO: 1266001 - RNA, 22 nt, Human
ucuuguacuugucaaugaaggu

SEQ ID NO: 1266002 - RNA, 25 nt, Human
ugaaaaaagaaaaaaacauuacaaa

SEQ ID NO: 1266003 - RNA, 21 nt, Human
ugaaaggcaaagagcaaauca

SEQ ID NO: 1266004 - RNA, 22 nt, Human
ugaauaggacaucuaaaaguga

SEQ ID NO: 1266005 - RNA, 19 nt, Human
ugacucaaggagagaacag

SEQ ID NO: 1266006 - RNA, 25 nt, Human
ugagauucuugcuuuagggggucuc

SEQ ID NO: 1266007 - RNA, 18 nt, Human
ugagcagacacgaggugg

SEQ ID NO: 1266008 - RNA, 19 nt, Human
ugauaggggguggagcugg

SEQ ID NO: 1266009 - RNA, 22 nt, Human
ugauuuagucaugccucuccag

SEQ ID NO: 1266010 - RNA, 21 nt, Human
ugccuggcccuugguuaccuu

SEQ ID NO: 1266011 - RNA, 21 nt, Human
ugcuccuacccagcugacccc

SEQ ID NO: 1266012 - RNA, 24 nt, Human
ugcuggaguuucuccaggcaaugg

SEQ ID NO: 1266013 - RNA, 19 nt, Human
uggaaccucagaggcccac

SEQ ID NO: 1266014 - RNA, 19 nt, Human
uggaacugguaauggaaug

SEQ ID NO: 1266015 - RNA, 23 nt, Human
uggaaggcaggagcaguuucuuc

SEQ ID NO: 1266016 - RNA, 21 nt, Human
uggagcucagcucucccgcag

SEQ ID NO: 1266017 - RNA, 20 nt, Human
uggaggucuuggagagucuu

SEQ ID NO: 1266018 - RNA, 19 nt, Human
uggcaagugggcccugccc

SEQ ID NO: 1266019 - RNA, 19 nt, Human
uggcagagaaaagucaugg

SEQ ID NO: 1266020 - RNA, 19 nt, Human
uggcagugcgugaaaaaag

SEQ ID NO: 1266021 - RNA, 22 nt, Human
uggcggcccuuccccaccuccc

SEQ ID NO: 1266022 - RNA, 19 nt, Human
uggcugguguguccuuggg

SEQ ID NO: 1266023 - RNA, 23 nt, Human
ugggagaggcgaaauaaauacca

SEQ ID NO: 1266024 - RNA, 20 nt, Human
ugggagcuagaaaugcuggg

SEQ ID NO: 1266025 - RNA, 26 nt, Human
ugggcccugcccaagccucucuggga

SEQ ID NO: 1266026 - RNA, 20 nt, Human
ugggcuccagcgauccccca

SEQ ID NO: 1266027 - RNA, 19 nt, Human
uggggaggggcggggcagg

SEQ ID NO: 1266028 - RNA, 21 nt, Human
ugucauggagaugcagcuguu

SEQ ID NO: 1266029 - RNA, 18 nt, Human
ugugagcaaaggccucuu

SEQ ID NO: 1266030 - RNA, 20 nt, Human
ugugggcuggagggauggug

SEQ ID NO: 1266031 - RNA, 19 nt, Human
uguuaauaagcagggguga

SEQ ID NO: 1266032 - RNA, 20 nt, Human
uguucuccagcgcugcugcu

SEQ ID NO: 1266033 - RNA, 25 nt, Human
uuaaaccaaaguggaucaagaacuc

SEQ ID NO: 1266034 - RNA, 20 nt, Human
uuaagccaacauguaagacu

SEQ ID NO: 1266035 - RNA, 24 nt, Human
uuacugugccauguccaagccaug

SEQ ID NO: 1266036 - RNA, 19 nt, Human
uuagguguccacugucaca

SEQ ID NO: 1266037 - RNA, 20 nt, Human
uucagggcugaccacggucc

SEQ ID NO: 1266038 - RNA, 22 nt, Human
uucuccagcgcugcugcuuccc

SEQ ID NO: 1266039 - RNA, 18 nt, Human
uugaaaccagucaagcac

SEQ ID NO: 1266040 - RNA, 18 nt, Human
uugaguccagggcagccu

SEQ ID NO: 1266041 - RNA, 26 nt, Human
uuuaaaaaaaaaaaaaggaaagaagu

SEQ ID NO: 1266042 - RNA, 19 nt, Human
aaaaaaggaaacauauaau

SEQ ID NO: 1266043 - RNA, 22 nt, Human
aaaaaggaaacauauaauaaga

SEQ ID NO: 1266044 - RNA, 22 nt, Human
aacaguucuucagaccuggcuc

SEQ ID NO: 1266045 - RNA, 18 nt, Human
aagagauuugaaaagucu

SEQ ID NO: 1266046 - RNA, 19 nt, Human
aagagauuugaaaagucug

SEQ ID NO: 1266047 - RNA, 23 nt, Human
acaacauugguggaugaagaaug

SEQ ID NO: 1266048 - RNA, 20 nt, Human
agauauuaaaggcaacgucu

SEQ ID NO: 1266049 - RNA, 20 nt, Human
agauuugaaaagucuggaca

SEQ ID NO: 1266050 - RNA, 22 nt, Human
agcgucgccccgcgcuccccgc

SEQ ID NO: 1266051 - RNA, 19 nt, Human
aggagcucuuuggacuuuc

SEQ ID NO: 1266052 - RNA, 23 nt, Human
aggagcucuuuggacuuucuuuu

SEQ ID NO: 1266053 - RNA, 19 nt, Human
aggguaccaccacaggaaa

SEQ ID NO: 1266054 - RNA, 22 nt, Human
cacacgacuauaaacauuguuc

SEQ ID NO: 1266055 - RNA, 19 nt, Human
cccccacuguacacacgac

SEQ ID NO: 1266056 - RNA, 28 nt, Human
cuaaaauaguggugcuuuuaggauuuac

SEQ ID NO: 1266057 - RNA, 24 nt, Human
cuaguacucugcgaaccucucacg

SEQ ID NO: 1266058 - RNA, 21 nt, Human
cuccaauacaaaguauggggc

SEQ ID NO: 1266059 - RNA, 21 nt, Human
cugccgcugccgcgccgcucc

SEQ ID NO: 1266060 - RNA, 20 nt, Human
gacuauaaacauuguucccu

SEQ ID NO: 1266061 - RNA, 23 nt, Human
gucgcuacucuaggcgccacggc

SEQ ID NO: 1266062 - RNA, 24 nt, Human
uaaaguauacaguacaccauuuuc

SEQ ID NO: 1266063 - RNA, 21 nt, Human
uacaaguaucaaagaagcgaa

SEQ ID NO: 1266064 - RNA, 21 nt, Human
uacaguacaccauuuucauac

SEQ ID NO: 1266065 - RNA, 24 nt, Human
uacauuauuguacucuccaauaca

SEQ ID NO: 1266066 - RNA, 22 nt, Human
uagaaugugcaaacugauauag

SEQ ID NO: 1266067 - RNA, 20 nt, Human
uaguacucugcgaaccucuc

SEQ ID NO: 1266068 - RNA, 23 nt, Human
uaucuggaguagucuauauagga

SEQ ID NO: 1266069 - RNA, 19 nt, Human
uauguaaacaaaaaaagga

SEQ ID NO: 1266070 - RNA, 19 nt, Human
uccaauacaaaguaugggg

SEQ ID NO: 1266071 - RNA, 18 nt, Human
uccccgcgggucgcuacu

SEQ ID NO: 1266072 - RNA, 19 nt, Human
uccccgcgggucgcuacuc

SEQ ID NO: 1266073 - RNA, 23 nt, Human
ucccuauguaaacaaaaaaagga

SEQ ID NO: 1266074 - RNA, 26 nt, Human
ucccuauguaaacaaaaaaaggaaac

SEQ ID NO: 1266075 - RNA, 27 nt, Human
ucccuauguaaacaaaaaaaggaaacu

SEQ ID NO: 1266076 - RNA, 23 nt, Human
uccugccgcugccgcgccgcucc

SEQ ID NO: 1266077 - RNA, 22 nt, Human
ucuccaauacaaaguauggggc

SEQ ID NO: 1266078 - RNA, 21 nt, Human
ucucugcagccagcgucgccc

SEQ ID NO: 1266079 - RNA, 20 nt, Human
ucucuuagcaguaauacugg

SEQ ID NO: 1266080 - RNA, 20 nt, Human
ucucuugugauacuggaaag

SEQ ID NO: 1266081 - RNA, 21 nt, Human
uggacauuuccuucccaacag

SEQ ID NO: 1266082 - RNA, 21 nt, Human
uguaaacaaaaaaaggaaaca

SEQ ID NO: 1266083 - RNA, 20 nt, Human
uguacacacgacuauaaaca

SEQ ID NO: 1266084 - RNA, 20 nt, Human
uuaaaguauacaguacacca

SEQ ID NO: 1266085 - RNA, 20 nt, Human
uucccuauguaaacaaaaaa

SEQ ID NO: 1266086 - RNA, 23 nt, Human
uuuaacaaaguuggaaugcuggc

SEQ ID NO: 1266087 - RNA, 21 nt, Human
aaaaauaaucaugguagacac

SEQ ID NO: 1266088 - RNA, 23 nt, Human
agaaaaauaaucaugguagacac

SEQ ID NO: 1266089 - RNA, 22 nt, Human
acugggaggagagcuaaggacu

SEQ ID NO: 1266090 - RNA, 21 nt, Human
agcucagcgggcggugugagc

SEQ ID NO: 1266091 - RNA, 27 nt, Human
aggauccacucauccuccacggucagc

SEQ ID NO: 1266092 - RNA, 24 nt, Human
aggggguguacugggaggagagcu

SEQ ID NO: 1266093 - RNA, 20 nt, Human
augggagaaggagaggaggg

SEQ ID NO: 1266094 - RNA, 24 nt, Human
augggagaaggagaggagggacuc

SEQ ID NO: 1266095 - RNA, 24 nt, Human
ccuacagacugaccaaguaggggg

SEQ ID NO: 1266096 - RNA, 21 nt, Human
ccuacgauggaguguagaggc

SEQ ID NO: 1266097 - RNA, 21 nt, Human
cuaugugcuuauuucuuuucc

SEQ ID NO: 1266098 - RNA, 21 nt, Human
cucauccuccacggucagcca

SEQ ID NO: 1266099 - RNA, 23 nt, Human
cucauccuccacggucagccauc

SEQ ID NO: 1266100 - RNA, 25 nt, Human
cuuauagaagccacucagauuugcc

SEQ ID NO: 1266101 - RNA, 19 nt, Human
gacuauugucucuucugcc

SEQ ID NO: 1266102 - RNA, 18 nt, Human
gcggugugagcacccuuu

SEQ ID NO: 1266103 - RNA, 18 nt, Human
ggaagagggcgcgccgug

SEQ ID NO: 1266104 - RNA, 21 nt, Human
ggaaggcaugggagaaggaga

SEQ ID NO: 1266105 - RNA, 27 nt, Human
ggaaggcaugggagaaggagaggaggg

SEQ ID NO: 1266106 - RNA, 21 nt, Human
gggcggugugagcacccuuuc

SEQ ID NO: 1266107 - RNA, 18 nt, Human
ggugccacauuaauuugu

SEQ ID NO: 1266108 - RNA, 21 nt, Human
ucaguuccuuuccaugcagca

SEQ ID NO: 1266109 - RNA, 18 nt, Human
ucugccaccaucaagcuc

SEQ ID NO: 1266110 - RNA, 23 nt, Human
ucuucugccaccaucaagcucau

SEQ ID NO: 1266111 - RNA, 21 nt, Human
uggaaaaaaccaggaacaaug

SEQ ID NO: 1266112 - RNA, 18 nt, Human
ugggaggagagcuaagga

SEQ ID NO: 1266113 - RNA, 24 nt, Human
uuccuuuccaugcagcacacaaua

SEQ ID NO: 1266114 - RNA, 18 nt, Human
aagcaucucccaagccag

SEQ ID NO: 1266115 - RNA, 19 nt, Human
uggggguagagaugaugac

SEQ ID NO: 1266116 - RNA, 19 nt, Human
aagcuguugaauacuaaac

SEQ ID NO: 1266117 - RNA, 22 nt, Human
aaguauugaggccucauaagcu

SEQ ID NO: 1266118 - RNA, 18 nt, Human
agaaaacagcacaaagaa

SEQ ID NO: 1266119 - RNA, 20 nt, Human
agaaaacagcacaaagaaaa

SEQ ID NO: 1266120 - RNA, 24 nt, Human
agaaaacagcacaaagaaaacuug

SEQ ID NO: 1266121 - RNA, 25 nt, Human
agaaaacagcacaaagaaaacuuga

SEQ ID NO: 1266122 - RNA, 20 nt, Human
aggaagcuguugaauacuaa

SEQ ID NO: 1266123 - RNA, 21 nt, Human
aggccucauaagcugaaccug

SEQ ID NO: 1266124 - RNA, 22 nt, Human
aggcuucugcugcccucucugc

SEQ ID NO: 1266125 - RNA, 21 nt, Human
aggguggaagggccggacagg

SEQ ID NO: 1266126 - RNA, 22 nt, Human
auacuaaacuaacucaaaucau

SEQ ID NO: 1266127 - RNA, 25 nt, Human
cacaaagaaaacuugauacuuaaac

SEQ ID NO: 1266128 - RNA, 21 nt, Human
cacagccauuaaauacagaga

SEQ ID NO: 1266129 - RNA, 18 nt, Human
cagaccccggguguggag

SEQ ID NO: 1266130 - RNA, 19 nt, Human
cagacgcagaucuggcagc

SEQ ID NO: 1266131 - RNA, 19 nt, Human
ccacaaaaagcggagggca

SEQ ID NO: 1266132 - RNA, 19 nt, Human
ccacuacuacuugcucagg

SEQ ID NO: 1266133 - RNA, 21 nt, Human
ccagcagaccccgggugugga

SEQ ID NO: 1266134 - RNA, 21 nt, Human
ccaucuaaagaauuugggaau

SEQ ID NO: 1266135 - RNA, 19 nt, Human
cccauuuugucuauuucca

SEQ ID NO: 1266136 - RNA, 21 nt, Human
cccucucugcuacugacgguc

SEQ ID NO: 1266137 - RNA, 21 nt, Human
ccgcggagaccagcagacccc

SEQ ID NO: 1266138 - RNA, 21 nt, Human
cucagugacggaaccggacac

SEQ ID NO: 1266139 - RNA, 23 nt, Human
cuugcucaggucacucuccuuca

SEQ ID NO: 1266140 - RNA, 28 nt, Human
gaaaacagcacaaagaaaaccgguaccc

SEQ ID NO: 1266141 - RNA, 19 nt, Human
gaagugcacacugaauuaa

SEQ ID NO: 1266142 - RNA, 26 nt, Human
gagccugugacauccgcggagaccag

SEQ ID NO: 1266143 - RNA, 26 nt, Human
uaagcugaaccugacacaauaaauuu

SEQ ID NO: 1266144 - RNA, 21 nt, Human
uacuuaaacuuaguuggaaac

SEQ ID NO: 1266145 - RNA, 23 nt, Human
ucaaggccuccucauuguauucu

SEQ ID NO: 1266146 - RNA, 22 nt, Human
ucacccgagcggaccucggcuc

SEQ ID NO: 1266147 - RNA, 22 nt, Human
ucagaaaaccaucuaaagaauu

SEQ ID NO: 1266148 - RNA, 21 nt, Human
uccucagacccauccacuucc

SEQ ID NO: 1266149 - RNA, 25 nt, Human
uccuucauugucgguguuuguucaa

SEQ ID NO: 1266150 - RNA, 20 nt, Human
ucucugcuacugacggucaa

SEQ ID NO: 1266151 - RNA, 18 nt, Human
ugccacagccauuaaaua

SEQ ID NO: 1266152 - RNA, 19 nt, Human
ugccgagccugugacaucc

SEQ ID NO: 1266153 - RNA, 20 nt, Human
ugcguggcuggguuuggcca

SEQ ID NO: 1266154 - RNA, 18 nt, Human
uuggaaacuuuaugccca

SEQ ID NO: 1266155 - RNA, 23 nt, Human
aaaaagucuacuuccuguaaaaa

SEQ ID NO: 1266156 - RNA, 18 nt, Human
aaggggaguugagggcag

SEQ ID NO: 1266157 - RNA, 19 nt, Human
aagugcugaagacuacaca

SEQ ID NO: 1266158 - RNA, 21 nt, Human
aagugcugaagacuacacacu

SEQ ID NO: 1266159 - RNA, 21 nt, Human
acucagcccacugugcuuucu

SEQ ID NO: 1266160 - RNA, 21 nt, Human
acuggagugcacgggugcugg

SEQ ID NO: 1266161 - RNA, 19 nt, Human
agaaauuuuccagaacuga

SEQ ID NO: 1266162 - RNA, 22 nt, Human
cacucugcuucaaauacgaagg

SEQ ID NO: 1266163 - RNA, 19 nt, Human
cagauuccuagggggcaca

SEQ ID NO: 1266164 - RNA, 21 nt, Human
cagcagcugguggaaugguuu

SEQ ID NO: 1266165 - RNA, 25 nt, Human
cagcuccugggcucccugagggucc

SEQ ID NO: 1266166 - RNA, 21 nt, Human
caggguggggaaaagagaaga

SEQ ID NO: 1266167 - RNA, 21 nt, Human
caugcaaaugcauuauacugg

SEQ ID NO: 1266168 - RNA, 25 nt, Human
cauggcacuggugguagagucuuuu

SEQ ID NO: 1266169 - RNA, 23 nt, Human
ccucugaaaaaagucuacuuccu

SEQ ID NO: 1266170 - RNA, 20 nt, Human
ccucugauggugaauuccag

SEQ ID NO: 1266171 - RNA, 21 nt, Human
cucagccuuaucucacccagc

SEQ ID NO: 1266172 - RNA, 22 nt, Human
cuccugggcucccugagggucc

SEQ ID NO: 1266173 - RNA, 21 nt, Human
cucugcugcaggagcugcugc

SEQ ID NO: 1266174 - RNA, 23 nt, Human
cugagccugggguuucugagauu

SEQ ID NO: 1266175 - RNA, 29 nt, Human
cugcaggagcugcugcgaaggauccucuu

SEQ ID NO: 1266176 - RNA, 19 nt, Human
cuggguccuuuuguggcuc

SEQ ID NO: 1266177 - RNA, 21 nt, Human
cugguggaaugguuuucuugg

SEQ ID NO: 1266178 - RNA, 18 nt, Human
gagaaguucuggguccuu

SEQ ID NO: 1266179 - RNA, 18 nt, Human
gagauugcagcacugugc

SEQ ID NO: 1266180 - RNA, 22 nt, Human
gcuucuccucucucugcuggcu

SEQ ID NO: 1266181 - RNA, 21 nt, Human
ggugggaacuggagugcacgg

SEQ ID NO: 1266182 - RNA, 19 nt, Human
gugauccaggcuguaugua

SEQ ID NO: 1266183 - RNA, 19 nt, Human
gugcacgggugcuggcagg

SEQ ID NO: 1266184 - RNA, 21 nt, Human
guuaaugguucauguguccuc

SEQ ID NO: 1266185 - RNA, 21 nt, Human
uaaacagcuccugaaugcuaa

SEQ ID NO: 1266186 - RNA, 18 nt, Human
uaaggggaguugagggca

SEQ ID NO: 1266187 - RNA, 23 nt, Human
uaaggggaguugagggcagggug

SEQ ID NO: 1266188 - RNA, 27 nt, Human
uacacacuccuucaaggcucugcugca

SEQ ID NO: 1266189 - RNA, 19 nt, Human
uauuuaaaccacauccugu

SEQ ID NO: 1266190 - RNA, 21 nt, Human
ucaaggcucugcugcaggagc

SEQ ID NO: 1266191 - RNA, 19 nt, Human
uccagcugcuucuccucuc

SEQ ID NO: 1266192 - RNA, 21 nt, Human
uccccauuuuagaggcuacag

SEQ ID NO: 1266193 - RNA, 19 nt, Human
uccugcaaggccucugaug

SEQ ID NO: 1266194 - RNA, 20 nt, Human
ucucucugcuggcugagccu

SEQ ID NO: 1266195 - RNA, 25 nt, Human
ucucucugcuggcugagccuggggu

SEQ ID NO: 1266196 - RNA, 23 nt, Human
ucugauggugaauuccagcagcu

SEQ ID NO: 1266197 - RNA, 22 nt, Human
ugagggcaggguggggaaaaga

SEQ ID NO: 1266198 - RNA, 24 nt, Human
ugagggcaggguggggaaaagaga

SEQ ID NO: 1266199 - RNA, 20 nt, Human
ugccauggcaucuguaagcu

SEQ ID NO: 1266200 - RNA, 18 nt, Human
uggagaaguucugggucc

SEQ ID NO: 1266201 - RNA, 21 nt, Human
uggagugcacgggugcuggca

SEQ ID NO: 1266202 - RNA, 23 nt, Human
uggcacuggugguagagucuuuu

SEQ ID NO: 1266203 - RNA, 18 nt, Human
uggcaggggcaaacucca

SEQ ID NO: 1266204 - RNA, 19 nt, Human
ugggaauaaacagcuccug

SEQ ID NO: 1266205 - RNA, 23 nt, Human
ugggaauaaacagcuccugaaug

SEQ ID NO: 1266206 - RNA, 19 nt, Human
uggggaaaagagaagagau

SEQ ID NO: 1266207 - RNA, 21 nt, Human
ugggucuugugauccaggcug

SEQ ID NO: 1266208 - RNA, 21 nt, Human
uuaaugguucauguguccucu

SEQ ID NO: 1266209 - RNA, 22 nt, Human
uuaguguagugugaaaauggga

SEQ ID NO: 1266210 - RNA, 18 nt, Human
uuccagaacugaggguuc

SEQ ID NO: 1266211 - RNA, 21 nt, Human
uuccagcagcuccugggcucc

SEQ ID NO: 1266212 - RNA, 22 nt, Human
uuccuagggggcacauccaggu

SEQ ID NO: 1266213 - RNA, 19 nt, Human
uugagguaugaugcuggga

SEQ ID NO: 1266214 - RNA, 18 nt, Human
uugguggguucuggcugg

SEQ ID NO: 1266215 - RNA, 24 nt, Human
uuuuagggugcucuaagguagcca

SEQ ID NO: 1266216 - RNA, 22 nt, Human
agccucgguccacuccaagcaa

SEQ ID NO: 1266217 - RNA, 18 nt, Human
auagaacacguauauaca

SEQ ID NO: 1266218 - RNA, 24 nt, Human
ccccaugacuggguggccuccagu

SEQ ID NO: 1266219 - RNA, 23 nt, Human
cccccaugacuggguggccucca

SEQ ID NO: 1266220 - RNA, 20 nt, Human
cccggcccucccugcauucc

SEQ ID NO: 1266221 - RNA, 18 nt, Human
cgcuagcuggggacugcg

SEQ ID NO: 1266222 - RNA, 20 nt, Human
cgggagccgcgcuggacagg

SEQ ID NO: 1266223 - RNA, 24 nt, Human
cuggggcggagcccggcccucccu

SEQ ID NO: 1266224 - RNA, 18 nt, Human
ggcgaugugacggaugaa

SEQ ID NO: 1266225 - RNA, 21 nt, Human
ggcgggagccgcgcuggacag

SEQ ID NO: 1266226 - RNA, 21 nt, Human
uccaagcaacauuuauugagg

SEQ ID NO: 1266227 - RNA, 23 nt, Human
ucccugcauuccugcagagccuc

SEQ ID NO: 1266228 - RNA, 23 nt, Human
ucgguccacuccaagcaacauuu

SEQ ID NO: 1266229 - RNA, 27 nt, Human
ugcccucggcguccagacgccaggcuc

SEQ ID NO: 1266230 - RNA, 21 nt, Human
aacccuuuguuggaaugcuuu

SEQ ID NO: 1266231 - RNA, 22 nt, Human
aacccuuuguuggaaugcuuuc

SEQ ID NO: 1266232 - RNA, 20 nt, Human
accaagguuuccgaagacaa

SEQ ID NO: 1266233 - RNA, 23 nt, Human
auagaaccuggcaucacccugaa

SEQ ID NO: 1266234 - RNA, 18 nt, Human
auugcauaggauguacca

SEQ ID NO: 1266235 - RNA, 26 nt, Human
auuuugcuuggauaaucccuuuuaau

SEQ ID NO: 1266236 - RNA, 18 nt, Human
caacagcaugggugcaaa

SEQ ID NO: 1266237 - RNA, 23 nt, Human
caacuacaccaagguuuccgaag

SEQ ID NO: 1266238 - RNA, 28 nt, Human
caacuacaccaagguuuccgaagacaau

SEQ ID NO: 1266239 - RNA, 21 nt, Human
caauggcuucuucacccaagc

SEQ ID NO: 1266240 - RNA, 20 nt, Human
cagcacauuaaaaaaaaaga

SEQ ID NO: 1266241 - RNA, 18 nt, Human
cugcugagcuuuguuucc

SEQ ID NO: 1266242 - RNA, 21 nt, Human
cuuuccacagaacagaaacua

SEQ ID NO: 1266243 - RNA, 24 nt, Human
gcuucauucccaucuauaauuuua

SEQ ID NO: 1266244 - RNA, 24 nt, Human
guuuuuugcccauacacaugaguc

SEQ ID NO: 1266245 - RNA, 26 nt, Human
uaaaaaaaaagacauuuauucagugu

SEQ ID NO: 1266246 - RNA, 21 nt, Human
uacaccaagguuuccgaagac

SEQ ID NO: 1266247 - RNA, 20 nt, Human
ucucuggcucuccucuccug

SEQ ID NO: 1266248 - RNA, 19 nt, Human
uguuguaaccuguagcuuc

SEQ ID NO: 1266249 - RNA, 20 nt, Human
uucagaguagacuaacuuua

SEQ ID NO: 1266250 - RNA, 23 nt, Human
aaacaucagaauauauuuaugac

SEQ ID NO: 1266251 - RNA, 19 nt, Human
aaagaaaacaaacggaggg

SEQ ID NO: 1266252 - RNA, 18 nt, Human
aagaaaacaaacggaggg

SEQ ID NO: 1266253 - RNA, 24 nt, Human
aagaguuucaggaaggguggggga

SEQ ID NO: 1266254 - RNA, 21 nt, Human
acacacacacacacacacaca

SEQ ID NO: 1266255 - RNA, 25 nt, Human
acacacacacacacacacacacggu

SEQ ID NO: 1266256 - RNA, 23 nt, Human
acacacacacacacacacgcaca

SEQ ID NO: 1266257 - RNA, 23 nt, Human
acacacacacacacacacgcaca

SEQ ID NO: 1266258 - RNA, 27 nt, Human
acacacacacacacacgcacacacaca

SEQ ID NO: 1266259 - RNA, 23 nt, Human
acacacacgcacacacacacaca

SEQ ID NO: 1266260 - RNA, 23 nt, Human
acacgcacacacacacacacaca

SEQ ID NO: 1266261 - RNA, 18 nt, Human
acagagccuggagaacac

SEQ ID NO: 1266262 - RNA, 19 nt, Human
accccaacucccucggugc

SEQ ID NO: 1266263 - RNA, 23 nt, Human
acccuggagcucccaaaacccuu

SEQ ID NO: 1266264 - RNA, 23 nt, Human
acccuggcgaaguccuucugaca

SEQ ID NO: 1266265 - RNA, 21 nt, Human
acgcacacacacacacacaca

SEQ ID NO: 1266266 - RNA, 24 nt, Human
agaaaagagugaggauuaggccua

SEQ ID NO: 1266267 - RNA, 18 nt, Human
agagcgcucagcuccccc

SEQ ID NO: 1266268 - RNA, 23 nt, Human
agagcgcucagcuccccccaccc

SEQ ID NO: 1266269 - RNA, 18 nt, Human
agcaagauaucaaaggcu

SEQ ID NO: 1266270 - RNA, 21 nt, Human
agcagagcgcucagcuccccc

SEQ ID NO: 1266271 - RNA, 19 nt, Human
agcgcucagcuccccccac

SEQ ID NO: 1266272 - RNA, 22 nt, Human
agcuccccccaccccaacuccc

SEQ ID NO: 1266273 - RNA, 20 nt, Human
aggaagaaaagagugaggau

SEQ ID NO: 1266274 - RNA, 18 nt, Human
agggaaagggggccgagg

SEQ ID NO: 1266275 - RNA, 22 nt, Human
aguaauaagggaaccagagaua

SEQ ID NO: 1266276 - RNA, 18 nt, Human
augaacccuggagcuccc

SEQ ID NO: 1266277 - RNA, 21 nt, Human
auggaaccaggggagcucucu

SEQ ID NO: 1266278 - RNA, 19 nt, Human
caaagccagccugcugcuc

SEQ ID NO: 1266279 - RNA, 23 nt, Human
caagaggauggugaaaacccacu

SEQ ID NO: 1266280 - RNA, 19 nt, Human
caagccgggugaugggugc

SEQ ID NO: 1266281 - RNA, 20 nt, Human
cacacacacacacacacaca

SEQ ID NO: 1266282 - RNA, 27 nt, Human
cacacacacacacacaccauguaaggc

SEQ ID NO: 1266283 - RNA, 26 nt, Human
cacacacacacacacacgcacacaca

SEQ ID NO: 1266284 - RNA, 26 nt, Human
cacacacacacacacgcacacacaca

SEQ ID NO: 1266285 - RNA, 22 nt, Human
cacacacacacgcacacacaca

SEQ ID NO: 1266286 - RNA, 18 nt, Human
cacagagccuggagaaca

SEQ ID NO: 1266287 - RNA, 21 nt, Human
caccuggacacuaccacugag

SEQ ID NO: 1266288 - RNA, 19 nt, Human
caccuggcucaggggaggg

SEQ ID NO: 1266289 - RNA, 20 nt, Human
caccuggcucaggggagggg

SEQ ID NO: 1266290 - RNA, 23 nt, Human
cacuaaggucucaucaggguuug

SEQ ID NO: 1266291 - RNA, 21 nt, Human
cagagccuggagaacacuaag

SEQ ID NO: 1266292 - RNA, 22 nt, Human
cagcagagcgcucagcuccccc

SEQ ID NO: 1266293 - RNA, 22 nt, Human
cagcccaucccccugugggccc

SEQ ID NO: 1266294 - RNA, 21 nt, Human
cagucgucagguucuggaggg

SEQ ID NO: 1266295 - RNA, 23 nt, Human
caguuuuacuuuaagaggauaau

SEQ ID NO: 1266296 - RNA, 18 nt, Human
ccaacccaagcaaugcuu

SEQ ID NO: 1266297 - RNA, 27 nt, Human
ccacagagccuggagaacagcggaccg

SEQ ID NO: 1266298 - RNA, 23 nt, Human
ccacagccagcccaucccccugu

SEQ ID NO: 1266299 - RNA, 19 nt, Human
ccacugagggaggagugaa

SEQ ID NO: 1266300 - RNA, 18 nt, Human
ccagagauaaaaccccaa

SEQ ID NO: 1266301 - RNA, 24 nt, Human
ccagcagagcgcucagcucccccc

SEQ ID NO: 1266302 - RNA, 21 nt, Human
ccagcgcagaguagaagggaa

SEQ ID NO: 1266303 - RNA, 19 nt, Human
cccaaaacccuggcgaagu

SEQ ID NO: 1266304 - RNA, 20 nt, Human
cccaagcaaugcuuugugcc

SEQ ID NO: 1266305 - RNA, 22 nt, Human
cccaccccaacucccucggugc

SEQ ID NO: 1266306 - RNA, 19 nt, Human
ccccaacucccucggugcc

SEQ ID NO: 1266307 - RNA, 22 nt, Human
ccccagccugggccaucuucuc

SEQ ID NO: 1266308 - RNA, 24 nt, Human
ccccccaccccaacucccucggug

SEQ ID NO: 1266309 - RNA, 25 nt, Human
cccccugcccuaaaccugccacagc

SEQ ID NO: 1266310 - RNA, 23 nt, Human
ccccugcccuaaaccugccacag

SEQ ID NO: 1266311 - RNA, 18 nt, Human
cccgggucgcgcgugggg

SEQ ID NO: 1266312 - RNA, 20 nt, Human
cccuaaaccugccacagcca

SEQ ID NO: 1266313 - RNA, 19 nt, Human
cccucggugccaccgcucu

SEQ ID NO: 1266314 - RNA, 23 nt, Human
cccugcccuaaaccugccacagc

SEQ ID NO: 1266315 - RNA, 23 nt, Human
cccuggagcucccaaaacccugg

SEQ ID NO: 1266316 - RNA, 19 nt, Human
ccugcccuaaaccugccac

SEQ ID NO: 1266317 - RNA, 18 nt, Human
ccuggcucaggggagggg

SEQ ID NO: 1266318 - RNA, 22 nt, Human
ccugugccuccagacacacaca

SEQ ID NO: 1266319 - RNA, 21 nt, Human
ccuugggucacauggcccagu

SEQ ID NO: 1266320 - RNA, 20 nt, Human
cgcacacacacacacacaca

SEQ ID NO: 1266321 - RNA, 24 nt, Human
cgcacacacacacacacacaccau

SEQ ID NO: 1266322 - RNA, 19 nt, Human
cuaaaccugccacagccag

SEQ ID NO: 1266323 - RNA, 19 nt, Human
cuaaaccugccacagccag

SEQ ID NO: 1266324 - RNA, 21 nt, Human
cucagacagagagcaagagga

SEQ ID NO: 1266325 - RNA, 23 nt, Human
cucagcuccccccaccccaacuc

SEQ ID NO: 1266326 - RNA, 22 nt, Human
cuccccccaccccaacucccuc

SEQ ID NO: 1266327 - RNA, 18 nt, Human
cugcucucagccugggcc

SEQ ID NO: 1266328 - RNA, 19 nt, Human
cugcugcucucagccuggu

SEQ ID NO: 1266329 - RNA, 23 nt, Human
cugugggcccucuguccaagucc

SEQ ID NO: 1266330 - RNA, 24 nt, Human
cuuaugaacccuggagcucccaaa

SEQ ID NO: 1266331 - RNA, 18 nt, Human
gaaagaaggaaggagggg

SEQ ID NO: 1266332 - RNA, 27 nt, Human
gcacacacacacacacacaccauguag

SEQ ID NO: 1266333 - RNA, 22 nt, Human
gccagcccaucccccugugggc

SEQ ID NO: 1266334 - RNA, 20 nt, Human
gcuaaagugagagaggccag

SEQ ID NO: 1266335 - RNA, 20 nt, Human
gcucagcuccccccacccca

SEQ ID NO: 1266336 - RNA, 25 nt, Human
gcucccaaaacccuggcgaaguccu

SEQ ID NO: 1266337 - RNA, 18 nt, Human
ggacaaaugcccccugcc

SEQ ID NO: 1266338 - RNA, 24 nt, Human
ggagggaaagggggccgaggauga

SEQ ID NO: 1266339 - RNA, 20 nt, Human
ggugagugggaagguagagg

SEQ ID NO: 1266340 - RNA, 19 nt, Human
gugccugugccuccagaca

SEQ ID NO: 1266341 - RNA, 18 nt, Human
guggcagaaggaauggaa

SEQ ID NO: 1266342 - RNA, 20 nt, Human
uaaggcaccacuggauuaua

SEQ ID NO: 1266343 - RNA, 22 nt, Human
ucagcuccccccaccccaacuc

SEQ ID NO: 1266344 - RNA, 23 nt, Human
ucagcuccccccaccccaacucc

SEQ ID NO: 1266345 - RNA, 19 nt, Human
uccaaguccuguggggagc

SEQ ID NO: 1266346 - RNA, 20 nt, Human
uccagacacacacacacaca

SEQ ID NO: 1266347 - RNA, 33 nt, Human; identical to SEQ ID NO: 51641

SEQ ID NO: 1266348 - RNA, 18 nt, Human
uccauggcuaaagugaga

SEQ ID NO: 1266349 - RNA, 23 nt, Human
uccauggcuaaagugagagaggc

SEQ ID NO: 1266350 - RNA, 18 nt, Human
ucccaaaacccuggcgaa

SEQ ID NO: 1266351 - RNA, 18 nt, Human
uccccccaccccaacucc

SEQ ID NO: 1266352 - RNA, 23 nt, Human
ucccccugugggcccucugucca

SEQ ID NO: 1266353 - RNA, 20 nt, Human
ucccucggugccaccgcucu

SEQ ID NO: 1266354 - RNA, 24 nt, Human
ucccucggugccaccgcucuuggg

SEQ ID NO: 1266355 - RNA, 18 nt, Human
uccuucugacacugcugu

SEQ ID NO: 1266356 - RNA, 21 nt, Human
ugaaaagaaaacaaacggagg

SEQ ID NO: 1266357 - RNA, 18 nt, Human
ugcaaaaggaaaagaagg

SEQ ID NO: 1266358 - RNA, 18 nt, Human
ugcaaaaggaaaagaagg

SEQ ID NO: 1266359 - RNA, 20 nt, Human
ugcccuaaaccugccacagc

SEQ ID NO: 1266360 - RNA, 20 nt, Human
uggaaccaggggagcucucu

SEQ ID NO: 1266361 - RNA, 22 nt, Human
uggaggggacaaaugcccccug

SEQ ID NO: 1266362 - RNA, 18 nt, Human
uggcagaaggaauggaac

SEQ ID NO: 1266363 - RNA, 28 nt, Human
uggggcgguagggaaagaaggaaggagg

SEQ ID NO: 1266364 - RNA, 19 nt, Human
ugguaaggaucccuccuug

SEQ ID NO: 1266365 - RNA, 24 nt, Human
ugguucaccuucuuaugaacccug

SEQ ID NO: 1266366 - RNA, 20 nt, Human
uucaaggcugggguuuagaa

SEQ ID NO: 1266367 - RNA, 19 nt, Human
uuccauggcuaaagugaga

SEQ ID NO: 1266368 - RNA, 26 nt, Human
aggagaccauuuuggagccacgggug

SEQ ID NO: 1266369 - RNA, 18 nt, Human
cacggaccaggagaccau

SEQ ID NO: 1266370 - RNA, 26 nt, Human
cacggaccaggagaccauuuuggagc

SEQ ID NO: 1266371 - RNA, 21 nt, Human
ccuguguccccaguccagagc

SEQ ID NO: 1266372 - RNA, 21 nt, Human
cucagccucugccuugggggc

SEQ ID NO: 1266373 - RNA, 22 nt, Human
cucgcaucauauuuccuggauc

SEQ ID NO: 1266374 - RNA, 22 nt, Human
cugucucuggcucagcuuccac

SEQ ID NO: 1266375 - RNA, 22 nt, Human
cuuccacccccagcuggggcuc

SEQ ID NO: 1266376 - RNA, 25 nt, Human
cuucugauucucagccucugccuug

SEQ ID NO: 1266377 - RNA, 18 nt, Human
ggcucagcuuccaccccc

SEQ ID NO: 1266378 - RNA, 19 nt, Human
ucaucuuccucgcaucaua

SEQ ID NO: 1266379 - RNA, 18 nt, Human
uccucucaucuuccucgc

SEQ ID NO: 1266380 - RNA, 19 nt, Human
uggcucagcuuccaccccc

SEQ ID NO: 1266381 - RNA, 25 nt, Human
uggcucagcuuccacccccagcugg

SEQ ID NO: 1266382 - RNA, 19 nt, Human
ugugcccagaugcuugaac

SEQ ID NO: 1266383 - RNA, 22 nt, Human
uguuccucugugacugucucug

SEQ ID NO: 1266384 - RNA, 22 nt, Human
uguuuuguccuucagauuugua

SEQ ID NO: 1266385 - RNA, 18 nt, Human
caacacgccguaccgcag

SEQ ID NO: 1266386 - RNA, 20 nt, Human
caauccuuuugauaagaaau

SEQ ID NO: 1266387 - RNA, 23 nt, Human
ccgcugggaccaacacgccguac

SEQ ID NO: 1266388 - RNA, 19 nt, Human
ccuacagcacgucccuacc

SEQ ID NO: 1266389 - RNA, 21 nt, Human
ccucagcugaaccgcugggac

SEQ ID NO: 1266390 - RNA, 19 nt, Human
cugggaccaacacgccgua

SEQ ID NO: 1266391 - RNA, 18 nt, Human
cuguaaaacaaauaccau

SEQ ID NO: 1266392 - RNA, 22 nt, Human
gaaguucuaagaaaaaaugaca

SEQ ID NO: 1266393 - RNA, 21 nt, Human
gcugaaccgcugggaccaaca

SEQ ID NO: 1266394 - RNA, 20 nt, Human
uaaaaaaaaggauauuauau

SEQ ID NO: 1266395 - RNA, 25 nt, Human
uaaacuccaaagccaauuucaaaag

SEQ ID NO: 1266396 - RNA, 23 nt, Human
uaaauaaaugcuugaaauauacc

SEQ ID NO: 1266397 - RNA, 21 nt, Human
uauccaauccuuuugauaaga

SEQ ID NO: 1266398 - RNA, 23 nt, Human
ugaaauauacccaguagaaacuu

SEQ ID NO: 1266399 - RNA, 18 nt, Human
uuucaugucauaaaaugg

SEQ ID NO: 1266400 - RNA, 19 nt, Human
aaagcaagauggaacccaa

SEQ ID NO: 1266401 - RNA, 19 nt, Human
aagcagcugggauccaugg

SEQ ID NO: 1266402 - RNA, 18 nt, Human
aagggcccuugggagggg

SEQ ID NO: 1266403 - RNA, 18 nt, Human
acaagagaaaggcacaaa

SEQ ID NO: 1266404 - RNA, 24 nt, Human
acacaaagaucggagccaggacag

SEQ ID NO: 1266405 - RNA, 26 nt, Human
acaccaaaaauagaagaccagagaau

SEQ ID NO: 1266406 - RNA, 21 nt, Human
acacugcccacugcccacagg

SEQ ID NO: 1266407 - RNA, 19 nt, Human
accacauguggggaagggu

SEQ ID NO: 1266408 - RNA, 21 nt, Human
accucacugaggccgaaacaa

SEQ ID NO: 1266409 - RNA, 19 nt, Human
acugcugggguucgcuggc

SEQ ID NO: 1266410 - RNA, 21 nt, Human
agaagagcacauucuaccaca

SEQ ID NO: 1266411 - RNA, 21 nt, Human
agaagcaaaccuuggcagggg

SEQ ID NO: 1266412 - RNA, 19 nt, Human
agaaggauggugacaaauc

SEQ ID NO: 1266413 - RNA, 21 nt, Human
agagaagcaaaccuuggcagg

SEQ ID NO: 1266414 - RNA, 19 nt, Human
agagagaaauuagagggaa

SEQ ID NO: 1266415 - RNA, 18 nt, Human
agcccaauacagaucaaa

SEQ ID NO: 1266416 - RNA, 22 nt, Human
aggaaagaaauuuaaagcaaga

SEQ ID NO: 1266417 - RNA, 18 nt, Human
agguuccccuguguuccc

SEQ ID NO: 1266418 - RNA, 21 nt, Human
aguagauacagaagagcacau

SEQ ID NO: 1266419 - RNA, 21 nt, Human
agugggaguaaagagagaaug

SEQ ID NO: 1266420 - RNA, 24 nt, Human
aguguacagagaugacaagagaaa

SEQ ID NO: 1266421 - RNA, 22 nt, Human
aucccuaagguacggauuccua

SEQ ID NO: 1266422 - RNA, 23 nt, Human
auggaaaagcagaagcacuuuaa

SEQ ID NO: 1266423 - RNA, 24 nt, Human
caaaucccaaaaaggaaauggagg

SEQ ID NO: 1266424 - RNA, 24 nt, Human
caacaccaaaaauagaagaccaga

SEQ ID NO: 1266425 - RNA, 18 nt, Human
caacagaaaugaccgaca

SEQ ID NO: 1266426 - RNA, 19 nt, Human
caaccucacugaggccgaa

SEQ ID NO: 1266427 - RNA, 18 nt, Human
caagacacugcccacugc

SEQ ID NO: 1266428 - RNA, 18 nt, Human
caagagaaaggcacaaau

SEQ ID NO: 1266429 - RNA, 24 nt, Human
caagagcaacagaaaugaccgaca

SEQ ID NO: 1266430 - RNA, 19 nt, Human
cacacaaucacaagugcca

SEQ ID NO: 1266431 - RNA, 19 nt, Human
caccaaaaauagaagacca

SEQ ID NO: 1266432 - RNA, 22 nt, Human
caccucuucccugccccuccaa

SEQ ID NO: 1266433 - RNA, 23 nt, Human
caccugaagggcuugcagagugc

SEQ ID NO: 1266434 - RNA, 18 nt, Human
cacugaggccgaaacaac

SEQ ID NO: 1266435 - RNA, 23 nt, Human
cagaacuccuugggucagugcug

SEQ ID NO: 1266436 - RNA, 22 nt, Human
cagaucccuaagguacggauuc

SEQ ID NO: 1266437 - RNA, 22 nt, Human
caggcaaccucacugaggccga

SEQ ID NO: 1266438 - RNA, 24 nt, Human
cagugcugagagaccugcacucaa

SEQ ID NO: 1266439 - RNA, 21 nt, Human
cauguuggaggagaccaaguu

SEQ ID NO: 1266440 - RNA, 24 nt, Human
ccaaagugaauggacccccugcca

SEQ ID NO: 1266441 - RNA, 25 nt, Human
ccaagacacugcccacugcccacua

SEQ ID NO: 1266442 - RNA, 18 nt, Human
ccaagucuuacucgcuug

SEQ ID NO: 1266443 - RNA, 23 nt, Human
ccacaggugaacucaaaucaaac

SEQ ID NO: 1266444 - RNA, 22 nt, Human
ccaggacaguccugagggggau

SEQ ID NO: 1266445 - RNA, 24 nt, Human
ccugagggggauggccuucccaaa

SEQ ID NO: 1266446 - RNA, 20 nt, Human
ccugccccuccauagaacac

SEQ ID NO: 1266447 - RNA, 18 nt, Human
ccugucucuuuaaaacua

SEQ ID NO: 1266448 - RNA, 20 nt, Human
cggaaaagauccaagucuua

SEQ ID NO: 1266449 - RNA, 20 nt, Human
cggaaaagauccaagucuua

SEQ ID NO: 1266450 - RNA, 24 nt, Human
cuacucaucaaucagguccugucu

SEQ ID NO: 1266451 - RNA, 21 nt, Human
cuacugcugggguucgcuggc

SEQ ID NO: 1266452 - RNA, 19 nt, Human
cucgcuugucaaguuuucu

SEQ ID NO: 1266453 - RNA, 21 nt, Human
cucuccaucucauucagauca

SEQ ID NO: 1266454 - RNA, 19 nt, Human
cucuucauucuucucucca

SEQ ID NO: 1266455 - RNA, 20 nt, Human
cucuucggaaaagauccaag

SEQ ID NO: 1266456 - RNA, 25 nt, Human
cuucucuccaucucauucagaucaa

SEQ ID NO: 1266457 - RNA, 23 nt, Human
gaaccaccaccucuucauucuuc

SEQ ID NO: 1266458 - RNA, 20 nt, Human
gaagucacuuucagucauuu

SEQ ID NO: 1266459 - RNA, 28 nt, Human
gagaauagaaggauggugaccgguaccc

SEQ ID NO: 1266460 - RNA, 22 nt, Human
gaggacaugaggagagaaccag

SEQ ID NO: 1266461 - RNA, 24 nt, Human
gaucccuaagguacggauuccuac

SEQ ID NO: 1266462 - RNA, 20 nt, Human
gcaacagaaaugaccgacag

SEQ ID NO: 1266463 - RNA, 21 nt, Human
gcaacagaaaugaccgacaga

SEQ ID NO: 1266464 - RNA, 20 nt, Human
gcaagcacuaguaccacgcu

SEQ ID NO: 1266465 - RNA, 21 nt, Human
gcagagaacaugcuuuauuga

SEQ ID NO: 1266466 - RNA, 21 nt, Human
gcagagugcugacaaugucca

SEQ ID NO: 1266467 - RNA, 19 nt, Human
gccaaucacaagagcaacg

SEQ ID NO: 1266468 - RNA, 22 nt, Human
gccaccucuucccugccccucc

SEQ ID NO: 1266469 - RNA, 21 nt, Human
gccuugcagccuuaacuucuc

SEQ ID NO: 1266470 - RNA, 26 nt, Human
ggggauggccuucccaaaggauacug

SEQ ID NO: 1266471 - RNA, 27 nt, Human
ggggauggccuucccaaaggauacugu

SEQ ID NO: 1266472 - RNA, 18 nt, Human
ggguucgcuggcucggaa

SEQ ID NO: 1266473 - RNA, 25 nt, Human
gguccuggugguggcagccauauuu

SEQ ID NO: 1266474 - RNA, 21 nt, Human
ggugacaaaucccaaaaagga

SEQ ID NO: 1266475 - RNA, 22 nt, Human
ggugagaggacaugaggagaga

SEQ ID NO: 1266476 - RNA, 23 nt, Human
gucacuuucagucauuuucaacu

SEQ ID NO: 1266477 - RNA, 26 nt, Human
gugaccagguggcaagcacuaguacc

SEQ ID NO: 1266478 - RNA, 21 nt, Human
uaaaauuagcucccucaaccc

SEQ ID NO: 1266479 - RNA, 21 nt, Human
uaaagcaagauggaacccaaa

SEQ ID NO: 1266480 - RNA, 19 nt, Human
uacaaccucauggggugag

SEQ ID NO: 1266481 - RNA, 22 nt, Human
uacggaagucacuuucagucau

SEQ ID NO: 1266482 - RNA, 20 nt, Human
uagaagacacaauacaaccu

SEQ ID NO: 1266483 - RNA, 22 nt, Human
uagaagacacaauacaaccuca

SEQ ID NO: 1266484 - RNA, 21 nt, Human
uagcccaauacagaucaaaaa

SEQ ID NO: 1266485 - RNA, 21 nt, Human
ucaaaucaaacccagaaccac

SEQ ID NO: 1266486 - RNA, 23 nt, Human
ucagucauuuucaacuucuccca

SEQ ID NO: 1266487 - RNA, 18 nt, Human
uccauagaacacacauau

SEQ ID NO: 1266488 - RNA, 26 nt, Human
ucccaaaaaggaaauggaggaggagu

SEQ ID NO: 1266489 - RNA, 23 nt, Human
ucccaaaggauacuguacuugcc

SEQ ID NO: 1266490 - RNA, 19 nt, Human
ucccucugugauuuggccu

SEQ ID NO: 1266491 - RNA, 21 nt, Human
ucuguaaaaggccuuuacccc

SEQ ID NO: 1266492 - RNA, 19 nt, Human
ucuuuggcuaucuacucau

SEQ ID NO: 1266493 - RNA, 20 nt, Human
ugaaaaguuuucugcaguau

SEQ ID NO: 1266494 - RNA, 21 nt, Human
ugaaggaaagaaauuuaaagc

SEQ ID NO: 1266495 - RNA, 18 nt, Human
ugaauggacccccugcca

SEQ ID NO: 1266496 - RNA, 21 nt, Human
ugacaaaucccaaaaaggaaa

SEQ ID NO: 1266497 - RNA, 20 nt, Human
ugacaauguccacaggauuc

SEQ ID NO: 1266498 - RNA, 21 nt, Human
ugaggcaaaaaguaguauccc

SEQ ID NO: 1266499 - RNA, 23 nt, Human
ugcccacugcccacaggugaacu

SEQ ID NO: 1266500 - RNA, 24 nt, Human
ugcccacugcccacaggugaacuc

SEQ ID NO: 1266501 - RNA, 19 nt, Human
uggaaaagcagaagcacuu

SEQ ID NO: 1266502 - RNA, 24 nt, Human
uggaacccaaagugaauggacccc

SEQ ID NO: 1266503 - RNA, 20 nt, Human
uggcaucugcaaacguaaaa

SEQ ID NO: 1266504 - RNA, 24 nt, Human
ugggaaacucuucaaaaguauuug

SEQ ID NO: 1266505 - RNA, 22 nt, Human
ugggagggguccauuuuaagca

SEQ ID NO: 1266506 - RNA, 24 nt, Human
ugggcuagagagaaauuagaggga

SEQ ID NO: 1266507 - RNA, 24 nt, Human
ugucgaaaagagaagcaaaccuug

SEQ ID NO: 1266508 - RNA, 22 nt, Human
uguuggaggagaccaaguuggg

SEQ ID NO: 1266509 - RNA, 19 nt, Human
uuaaagcaagauggaaccc

SEQ ID NO: 1266510 - RNA, 20 nt, Human
uucuaccacauguggggaag

SEQ ID NO: 1266511 - RNA, 22 nt, Human
uucuccaaauccucugaagccc

SEQ ID NO: 1266512 - RNA, 22 nt, Human
uugcccgaagauagcagguuau

SEQ ID NO: 1266513 - RNA, 22 nt, Human
uugggagggguccauuuuaagc

SEQ ID NO: 1266514 - RNA, 24 nt, Human
uuuaagcagcugggauccaugguu

SEQ ID NO: 1266515 - RNA, 24 nt, Human
uuuucaacuucucccagggcauuc

SEQ ID NO: 1266516 - RNA, 21 nt, Human
aaccauuuuuccaugcugcuu

SEQ ID NO: 1266517 - RNA, 21 nt, Human
cuauggaccccucuguaggua

SEQ ID NO: 1266518 - RNA, 23 nt, Human
ucccuuuaaguuacgacgggaau

SEQ ID NO: 1266519 - RNA, 20 nt, Human
uuccaugcugcuuaagagcc

SEQ ID NO: 1266520 - RNA, 24 nt, Human
accccacagccuuccaaagauccc

SEQ ID NO: 1266521 - RNA, 23 nt, Human
agauccccuaugguccgaagucc

SEQ ID NO: 1266522 - RNA, 18 nt, Human
agggacaaggugagagga

SEQ ID NO: 1266523 - RNA, 19 nt, Human
agggagugcuaaggcagag

SEQ ID NO: 1266524 - RNA, 23 nt, Human
auccugcucuucucucuaguccc

SEQ ID NO: 1266525 - RNA, 22 nt, Human
caagaccccacagccuuccaaa

SEQ ID NO: 1266526 - RNA, 30 nt, Human; identical to SEQ ID NO: 252583

SEQ ID NO: 1266527 - RNA, 22 nt, Human
cagcggguucugcccugggcag

SEQ ID NO: 1266528 - RNA, 25 nt, Human
cagcugcuuuguuuucuguugggag

SEQ ID NO: 1266529 - RNA, 22 nt, Human
cauuccucauuccagcugagga

SEQ ID NO: 1266530 - RNA, 24 nt, Human
ccagcggguucugcccugggcagc

SEQ ID NO: 1266531 - RNA, 21 nt, Human
cugggcagcuccccaccuucu

SEQ ID NO: 1266532 - RNA, 21 nt, Human
cugugucucagcuccagcagu

SEQ ID NO: 1266533 - RNA, 24 nt, Human
cugugucucagcuccagcagucuc

SEQ ID NO: 1266534 - RNA, 18 nt, Human
gaaguccuuugaccaccu

SEQ ID NO: 1266535 - RNA, 23 nt, Human
gacaaggugagaggagccagggg

SEQ ID NO: 1266536 - RNA, 24 nt, Human
gagcaagaccccacagccuuccaa

SEQ ID NO: 1266537 - RNA, 23 nt, Human
gaggagccagggguagucaucaa

SEQ ID NO: 1266538 - RNA, 23 nt, Human
gcagagcaagaccccacagccuu

SEQ ID NO: 1266539 - RNA, 21 nt, Human
gcagucucaacugggaagacc

SEQ ID NO: 1266540 - RNA, 24 nt, Human
ggacaaggugagaggagccagggg

SEQ ID NO: 1266541 - RNA, 19 nt, Human
ucccggucccggguuucuc

SEQ ID NO: 1266542 - RNA, 20 nt, Human
ucccuggaagacaaggucca

SEQ ID NO: 1266543 - RNA, 18 nt, Human
ugagaggagccaggggua

SEQ ID NO: 1266544 - RNA, 20 nt, Human
ugcuaaggcagagcaagacc

SEQ ID NO: 1266545 - RNA, 21 nt, Human
ugggaagacccagggauccug

SEQ ID NO: 1266546 - RNA, 22 nt, Human
ugguccgaaguccuuugaccac

SEQ ID NO: 1266547 - RNA, 23 nt, Human
cacauuuacccccucuuccugaa

SEQ ID NO: 1266548 - RNA, 23 nt, Human
cauuccauacaauccacauuuac

SEQ ID NO: 1266549 - RNA, 23 nt, Human
uccauacaauccacauuuacccc

SEQ ID NO: 1266550 - RNA, 25 nt, Human
uccauacaauccacauuuacccccu

SEQ ID NO: 1266551 - RNA, 25 nt, Human
ucucuuuuuccuuuaguuccugugc

SEQ ID NO: 1266552 - RNA, 21 nt, Human
ugacucgaucucuuuuuccuu

SEQ ID NO: 1266553 - RNA, 24 nt, Human
ugcugaguacugcuguccugcaac

SEQ ID NO: 1266554 - RNA, 22 nt, Human
aaaaauucccaaaacaacaaaa

SEQ ID NO: 1266555 - RNA, 27 nt, Human
aaaaauucccaaaacaacaaaacacau

SEQ ID NO: 1266556 - RNA, 19 nt, Human
aaagaguuaagauuucuuc

SEQ ID NO: 1266557 - RNA, 24 nt, Human
aaaguguugggauuacaggcauga

SEQ ID NO: 1266558 - RNA, 24 nt, Human
aaccucaggugaucugcccaccuc

SEQ ID NO: 1266559 - RNA, 19 nt, Human
aagaguaugacaacagcaa

SEQ ID NO: 1266560 - RNA, 19 nt, Human
aagucugugcuucuucagg

SEQ ID NO: 1266561 - RNA, 21 nt, Human
aaguguugggauuacaggcau

SEQ ID NO: 1266562 - RNA, 26 nt, Human
aaguguugggauuacaggcaugagcc

SEQ ID NO: 1266563 - RNA, 19 nt, Human
acccagcucacuuuugcau

SEQ ID NO: 1266564 - RNA, 24 nt, Human
agaguugaugaaaagucuuuguuu

SEQ ID NO: 1266565 - RNA, 23 nt, Human
agcagcugggaucacaggcacgc

SEQ ID NO: 1266566 - RNA, 21 nt, Human
agccucucgaguagcugggac

SEQ ID NO: 1266567 - RNA, 24 nt, Human
agcgauucuccugccucagccucc

SEQ ID NO: 1266568 - RNA, 20 nt, Human
aggcacgcaccaccacgccc

SEQ ID NO: 1266569 - RNA, 20 nt, Human
aggcaugagccaccaugacc

SEQ ID NO: 1266570 - RNA, 24 nt, Human
aggugaucugcccaccucagccuc

SEQ ID NO: 1266571 - RNA, 21 nt, Human
agugcaauggcgugaucucag

SEQ ID NO: 1266572 - RNA, 24 nt, Human
agugcaauggcgugaucucagcuc

SEQ ID NO: 1266573 - RNA, 20 nt, Human
agugcacuggcgcaaucccg

SEQ ID NO: 1266574 - RNA, 20 nt, Human
aguuuuuuuuuuuuuuuuuu

SEQ ID NO: 1266575 - RNA, 23 nt, Human
caaaacacaugcuuccacuucac

SEQ ID NO: 1266576 - RNA, 24 nt, Human
caaaauagaugauucacaucuuca

SEQ ID NO: 1266577 - RNA, 24 nt, Human
caaaguguugggauuacaggcaug

SEQ ID NO: 1266578 - RNA, 24 nt, Human
caaccuccaccucccagguccaag

SEQ ID NO: 1266579 - RNA, 22 nt, Human
caagcgauucuccugccucagc

SEQ ID NO: 1266580 - RNA, 22 nt, Human
caagcgauuuuccugccuuagc

SEQ ID NO: 1266581 - RNA, 24 nt, Human
cacaggcacgugccaccacaccca

SEQ ID NO: 1266582 - RNA, 20 nt, Human
caccacacccagcucacuuu

SEQ ID NO: 1266583 - RNA, 23 nt, Human
cacccagcucacuuuugcauucc

SEQ ID NO: 1266584 - RNA, 21 nt, Human
caccgcaaccuccaccuccca

SEQ ID NO: 1266585 - RNA, 21 nt, Human
caccgcaaccuccaccuccca

SEQ ID NO: 1266586 - RNA, 18 nt, Human
caccgcaaucucugccuc

SEQ ID NO: 1266587 - RNA, 23 nt, Human
caccgcaaucucugccuccuggg

SEQ ID NO: 1266588 - RNA, 24 nt, Human
caccucagccucccaaaguguugg

SEQ ID NO: 1266589 - RNA, 21 nt, Human
cacgcaccaccacgcccggcc

SEQ ID NO: 1266590 - RNA, 20 nt, Human
cacuuuugcauuccggugug

SEQ ID NO: 1266591 - RNA, 23 nt, Human
cagaguuucgcuuguugcccagg

SEQ ID NO: 1266592 - RNA, 23 nt, Human
cagccuccugagcagcugggauc

SEQ ID NO: 1266593 - RNA, 21 nt, Human
caggcacgcaccaccacgccc

SEQ ID NO: 1266594 - RNA, 25 nt, Human
ccaaaacaacaaaacacaugcuucc

SEQ ID NO: 1266595 - RNA, 23 nt, Human
ccaaaguguugggauuacaggca

SEQ ID NO: 1266596 - RNA, 24 nt, Human
ccaaaguguugggauuacaggcau

SEQ ID NO: 1266597 - RNA, 27 nt, Human
ccaccucccagguccaagcgauucuuu

SEQ ID NO: 1266598 - RNA, 24 nt, Human
cccaaaguguugggauuacaggca

SEQ ID NO: 1266599 - RNA, 24 nt, Human
cccaaccucaggugaucugcccac

SEQ ID NO: 1266600 - RNA, 23 nt, Human
ccgcaaccuccaccucccagguc

SEQ ID NO: 1266601 - RNA, 24 nt, Human
ccucccagguccaagcgauucucc

SEQ ID NO: 1266602 - RNA, 23 nt, Human
ccugccuuagccucucgaguagc

SEQ ID NO: 1266603 - RNA, 23 nt, Human
ccuggguucaagcgauuuuccug

SEQ ID NO: 1266604 - RNA, 21 nt, Human
ccuugcaucuuuaguagagau

SEQ ID NO: 1266605 - RNA, 24 nt, Human
cgcaccaccacgcccggccaaucc

SEQ ID NO: 1266606 - RNA, 23 nt, Human
cgcucugucgcccagcuggagug

SEQ ID NO: 1266607 - RNA, 21 nt, Human
cgcuuguugcccaggcuggag

SEQ ID NO: 1266608 - RNA, 19 nt, Human
cuaagaguaugacaacagc

SEQ ID NO: 1266609 - RNA, 24 nt, Human
cucaccgcaaccuccaccucccag

SEQ ID NO: 1266610 - RNA, 24 nt, Human
cucaccgcaaucucugccuccugg

SEQ ID NO: 1266611 - RNA, 23 nt, Human
cucgcucugucgcccagcuggag

SEQ ID NO: 1266612 - RNA, 24 nt, Human
cucucgaguagcugggaccacagg

SEQ ID NO: 1266613 - RNA, 23 nt, Human
cugccucagccuccugagcagcu

SEQ ID NO: 1266614 - RNA, 23 nt, Human
cugccuuagccucucgaguagcu

SEQ ID NO: 1266615 - RNA, 24 nt, Human
cuggagugcaauggcgugaucuca

SEQ ID NO: 1266616 - RNA, 23 nt, Human
cugucuuuucuuugacccuuccu

SEQ ID NO: 1266617 - RNA, 24 nt, Human
cuuagccucucgaguagcugggac

SEQ ID NO: 1266618 - RNA, 24 nt, Human
cuuguugcccaggcuggagugcaa

SEQ ID NO: 1266619 - RNA, 20 nt, Human
gagacagaguuucgcuuguu

SEQ ID NO: 1266620 - RNA, 21 nt, Human
gagauggaaucucgcucuguc

SEQ ID NO: 1266621 - RNA, 25 nt, Human
gaguagcugggaccacaggcacgug

SEQ ID NO: 1266622 - RNA, 19 nt, Human
gaguuuacccuauuuaggg

SEQ ID NO: 1266623 - RNA, 18 nt, Human
gauuacaggcaugagcca

SEQ ID NO: 1266624 - RNA, 21 nt, Human
gauuacaggcaugagccacca

SEQ ID NO: 1266625 - RNA, 22 nt, Human
gauuacaggcaugagccaccau

SEQ ID NO: 1266626 - RNA, 22 nt, Human
gcaauaguuuuuuuuuuuuuuu

SEQ ID NO: 1266627 - RNA, 20 nt, Human
gcaccaccacgcccggccaa

SEQ ID NO: 1266628 - RNA, 23 nt, Human
gcaccaccacgcccggccaaucc

SEQ ID NO: 1266629 - RNA, 24 nt, Human
gcccaggcuggagugcaauggcgu

SEQ ID NO: 1266630 - RNA, 23 nt, Human
gcgauucuccugccucagccucc

SEQ ID NO: 1266631 - RNA, 19 nt, Human
gcuggagugcaauggcgug

SEQ ID NO: 1266632 - RNA, 23 nt, Human
gcuggccucgaacucccaaccuc

SEQ ID NO: 1266633 - RNA, 24 nt, Human
ggauuacaggcaugagccaccaug

SEQ ID NO: 1266634 - RNA, 22 nt, Human
ggcuggagugcaauggcgugau

SEQ ID NO: 1266635 - RNA, 25 nt, Human
gggguaguuucuauuaauuucuuuu

SEQ ID NO: 1266636 - RNA, 23 nt, Human
guacuuguuaugguuaccacugu

SEQ ID NO: 1266637 - RNA, 24 nt, Human
gugaucugcccaccucagccuccc

SEQ ID NO: 1266638 - RNA, 24 nt, Human
guuucgcuuguugcccaggcugga

SEQ ID NO: 1266639 - RNA, 23 nt, Human
uacaggcaugagccaccaugacc

SEQ ID NO: 1266640 - RNA, 18 nt, Human
uaggguucuuugagccuc

SEQ ID NO: 1266641 - RNA, 24 nt, Human
uaguagagauggcauuucuccacg

SEQ ID NO: 1266642 - RNA, 19 nt, Human
ucaagcgauuuuccugccu

SEQ ID NO: 1266643 - RNA, 24 nt, Human
ucaccgcaaccuccaccucccagg

SEQ ID NO: 1266644 - RNA, 27 nt, Human
ucaccgcaaccuccaccucccaggucc

SEQ ID NO: 1266645 - RNA, 24 nt, Human
ucaccgcaaucucugccuccuggg

SEQ ID NO: 1266646 - RNA, 25 nt, Human
ucaccgcaaucucugccuccugggu

SEQ ID NO: 1266647 - RNA, 21 nt, Human
ucagauucuccucccucccca

SEQ ID NO: 1266648 - RNA, 26 nt, Human
ucagcucaccgcaaccuccaccuccc

SEQ ID NO: 1266649 - RNA, 24 nt, Human
uccaagcgauucuccugccucagc

SEQ ID NO: 1266650 - RNA, 21 nt, Human
ucccaaaacaacaaaacacau

SEQ ID NO: 1266651 - RNA, 18 nt, Human
ucccaaaacaacaaaacc

SEQ ID NO: 1266652 - RNA, 24 nt, Human
ucccaaaguguugggauuacaggc

SEQ ID NO: 1266653 - RNA, 21 nt, Human
ucccagguccaagcgauucuc

SEQ ID NO: 1266654 - RNA, 24 nt, Human
ucccagguccaagcgauucuccug

SEQ ID NO: 1266655 - RNA, 21 nt, Human
uccuggguucaagcgauuuuc

SEQ ID NO: 1266656 - RNA, 24 nt, Human
uccuggguucaagcgauuuuccug

SEQ ID NO: 1266657 - RNA, 20 nt, Human
ucgcuuguugcccaggcugg

SEQ ID NO: 1266658 - RNA, 21 nt, Human
ucgcuuguugcccaggcugga

SEQ ID NO: 1266659 - RNA, 24 nt, Human
ucucgaguagcugggaccacaggc

SEQ ID NO: 1266660 - RNA, 23 nt, Human
ucucgcucugucgcccagcugga

SEQ ID NO: 1266661 - RNA, 18 nt, Human
ucucugaagauacuugau

SEQ ID NO: 1266662 - RNA, 21 nt, Human
ucugcccaccucagccuccca

SEQ ID NO: 1266663 - RNA, 19 nt, Human
ucuuuaguagagauggcau

SEQ ID NO: 1266664 - RNA, 19 nt, Human
ugacaacagcaacaaaaag

SEQ ID NO: 1266665 - RNA, 21 nt, Human
ugacaacagcaacaaaaagua

SEQ ID NO: 1266666 - RNA, 27 nt, Human
ugacaacagcaacaaaaaguaauuuca

SEQ ID NO: 1266667 - RNA, 21 nt, Human
ugauaaaaauucccaaaacaa

SEQ ID NO: 1266668 - RNA, 24 nt, Human
ugaucugcccaccucagccuccca

SEQ ID NO: 1266669 - RNA, 30 nt, Human
ugcagcaauaguuuuuuuuuuuuuuuuuuu

SEQ ID NO: 1266670 - RNA, 22 nt, Human
ugccaccacacccagcucacuu

SEQ ID NO: 1266671 - RNA, 18 nt, Human
ugcccaggcuggagugca

SEQ ID NO: 1266672 - RNA, 21 nt, Human
ugcccaggcuggagugcaaug

SEQ ID NO: 1266673 - RNA, 21 nt, Human
ugcccaggcuggagugcaaug

SEQ ID NO: 1266674 - RNA, 24 nt, Human
ugcccaggcuggagugcaauggcg

SEQ ID NO: 1266675 - RNA, 24 nt, Human
ugccucagccuccugagcagcugg

SEQ ID NO: 1266676 - RNA, 19 nt, Human
ugccuuagccucucgagua

SEQ ID NO: 1266677 - RNA, 19 nt, Human
uggagugcaauggcgugau

SEQ ID NO: 1266678 - RNA, 24 nt, Human
uggagugcaauggcgugaucucag

SEQ ID NO: 1266679 - RNA, 24 nt, Human
uggagugcacuggcgcaaucccgg

SEQ ID NO: 1266680 - RNA, 20 nt, Human
uggccucgaacucccaaccu

SEQ ID NO: 1266681 - RNA, 21 nt, Human
uggccucgaacucccaaccuc

SEQ ID NO: 1266682 - RNA, 24 nt, Human
uggcgugaucucagcucaccgcaa

SEQ ID NO: 1266683 - RNA, 21 nt, Human
ugggaccacaggcacgugcca

SEQ ID NO: 1266684 - RNA, 24 nt, Human
ugggaccacaggcacgugccacca

SEQ ID NO: 1266685 - RNA, 21 nt, Human
ugggaucacaggcacgcacca

SEQ ID NO: 1266686 - RNA, 24 nt, Human
ugggaucacaggcacgcaccacca

SEQ ID NO: 1266687 - RNA, 18 nt, Human
ugggauuacaggcaugag

SEQ ID NO: 1266688 - RNA, 22 nt, Human
ugggauuacaggcaugagccac

SEQ ID NO: 1266689 - RNA, 23 nt, Human
ugggauuacaggcaugagccacc

SEQ ID NO: 1266690 - RNA, 24 nt, Human
ugggauuacaggcaugagccacca

SEQ ID NO: 1266691 - RNA, 25 nt, Human
ugggauuacaggcaugagccaccau

SEQ ID NO: 1266692 - RNA, 23 nt, Human
uggguucaagcgauuuuccugcc

SEQ ID NO: 1266693 - RNA, 24 nt, Human
uggguucaagcgauuuuccugccu

SEQ ID NO: 1266694 - RNA, 21 nt, Human
uggucaggcuggccucgaacu

SEQ ID NO: 1266695 - RNA, 20 nt, Human
uguugcccaggcuggagugc

SEQ ID NO: 1266696 - RNA, 23 nt, Human
uguuuuguacauccgaagucugu

SEQ ID NO: 1266697 - RNA, 18 nt, Human
uuaguagagauggcauuu

SEQ ID NO: 1266698 - RNA, 20 nt, Human
uucaagcgauuuuccugccu

SEQ ID NO: 1266699 - RNA, 24 nt, Human
uucaagcgauuuuccugccuuagc

SEQ ID NO: 1266700 - RNA, 21 nt, Human
uucacugauaaaaaauuuacc

SEQ ID NO: 1266701 - RNA, 23 nt, Human
uucauguauuucaucaaagcugg

SEQ ID NO: 1266702 - RNA, 22 nt, Human
uucgcuuguugcccaggcugga

SEQ ID NO: 1266703 - RNA, 24 nt, Human
uucgcuuguugcccaggcuggagu

SEQ ID NO: 1266704 - RNA, 20 nt, Human
uucuuugagccucuugaaua

SEQ ID NO: 1266705 - RNA, 23 nt, Human
uugcaucuuuaguagagauggca

SEQ ID NO: 1266706 - RNA, 21 nt, Human
uuucgcuuguugcccaggcug

SEQ ID NO: 1266707 - RNA, 22 nt, Human
uuucgcuuguugcccaggcugg

SEQ ID NO: 1266708 - RNA, 23 nt, Human
uuucgcuuguugcccaggcugga

SEQ ID NO: 1266709 - RNA, 20 nt, Human
uuuuccuugucauguaaucu

SEQ ID NO: 1266710 - RNA, 22 nt, Human
uuuugcauuccggugugggucu

SEQ ID NO: 1266711 - RNA, 25 nt, Human
uuuuuuuuuuucgagauggaaucuc

SEQ ID NO: 1266712 - RNA, 18 nt, Human
uuuuuuuuuuuuuuuucg

SEQ ID NO: 1266713 - RNA, 19 nt, Human
uuuuuuuuuuuuuuuuucg

SEQ ID NO: 1266714 - RNA, 20 nt, Human
aaacggaaaugcaaguggcc

SEQ ID NO: 1266715 - RNA, 21 nt, Human
aagagaaaaagacagaucuag

SEQ ID NO: 1266716 - RNA, 24 nt, Human
agaaaaagacagaucuagaagaua

SEQ ID NO: 1266717 - RNA, 19 nt, Human
aggccaaagccaugcagcu

SEQ ID NO: 1266718 - RNA, 21 nt, Human
augcagcugcuguacugccug

SEQ ID NO: 1266719 - RNA, 21 nt, Human
caccggccaagggggagcaac

SEQ ID NO: 1266720 - RNA, 22 nt, Human
caggccaaagccaugcagcugc

SEQ ID NO: 1266721 - RNA, 20 nt, Human
ccaugcagcugcuguacugc

SEQ ID NO: 1266722 - RNA, 21 nt, Human
gagaaaaagacagaucuagaa

SEQ ID NO: 1266723 - RNA, 18 nt, Human
gcagcugcuguacugccu

SEQ ID NO: 1266724 - RNA, 18 nt, Human
ucagaagagaaaaagaca

SEQ ID NO: 1266725 - RNA, 18 nt, Human
ucuuucaccggccaaggg

SEQ ID NO: 1266726 - RNA, 23 nt, Human
ucuuuuauucuuucaccggccaa

SEQ ID NO: 1266727 - RNA, 19 nt, Human
ugaaacggaaaugcaagug

SEQ ID NO: 1266728 - RNA, 21 nt, Human
ugcaggccaaagccaugcagc

SEQ ID NO: 1266729 - RNA, 22 nt, Human
aaaagaggcaggccuggaugug

SEQ ID NO: 1266730 - RNA, 21 nt, Human
aagaggcaggccuggauguga

SEQ ID NO: 1266731 - RNA, 18 nt, Human
aagcccccagcaucgugc

SEQ ID NO: 1266732 - RNA, 20 nt, Human
cagaacaagucucaggaaac

SEQ ID NO: 1266733 - RNA, 18 nt, Human
ccuguuccucaucugaga

SEQ ID NO: 1266734 - RNA, 19 nt, Human
gcuccacucccugcuagcu

SEQ ID NO: 1266735 - RNA, 19 nt, Human
uugaaaagaggcaggccug

SEQ ID NO: 1266736 - RNA, 18 nt, Human
uuggguuugaaaagaggc

SEQ ID NO: 1266737 - RNA, 19 nt, Human
aaaaggcacuuucacaggc

SEQ ID NO: 1266738 - RNA, 21 nt, Human
aagcaccaccauaaagcacga

SEQ ID NO: 1266739 - RNA, 19 nt, Human
aggcacuuucacaggcacu

SEQ ID NO: 1266740 - RNA, 24 nt, Human
aggguccccagcuuuuggucucug

SEQ ID NO: 1266741 - RNA, 24 nt, Human
auuuuuauaguuuuccuacagcgu

SEQ ID NO: 1266742 - RNA, 19 nt, Human
caccaccauaaagcacgaa

SEQ ID NO: 1266743 - RNA, 21 nt, Human
cacuuucacaggcacucugcu

SEQ ID NO: 1266744 - RNA, 19 nt, Human
cagcagucggggaggucaa

SEQ ID NO: 1266745 - RNA, 19 nt, Human
cccugaaaugccaaaauuu

SEQ ID NO: 1266746 - RNA, 19 nt, Human
ccuuaaccccaggcugccu

SEQ ID NO: 1266747 - RNA, 19 nt, Human
ccuuagguccugaucagag

SEQ ID NO: 1266748 - RNA, 24 nt, Human
cuuaaccccaggcugccuuggggu

SEQ ID NO: 1266749 - RNA, 22 nt, Human
cuucuaacuuuaacacuucagu

SEQ ID NO: 1266750 - RNA, 21 nt, Human
cuugccaccuugguggcugca

SEQ ID NO: 1266751 - RNA, 23 nt, Human
cuuuuggucucugaauucuuggg

SEQ ID NO: 1266752 - RNA, 20 nt, Human
guggaggguaucuuaucaca

SEQ ID NO: 1266753 - RNA, 19 nt, Human
guggcggcagagcucucuc

SEQ ID NO: 1266754 - RNA, 18 nt, Human
guggcugcauuaaagccu

SEQ ID NO: 1266755 - RNA, 26 nt, Human
ucaggguccccagcuuuuggucucug

SEQ ID NO: 1266756 - RNA, 24 nt, Human
uccagaagggauguuugauucacc

SEQ ID NO: 1266757 - RNA, 21 nt, Human
uccuuaaccccaggcugccuu

SEQ ID NO: 1266758 - RNA, 20 nt, Human
ucuuccuuuucucuuugcug

SEQ ID NO: 1266759 - RNA, 24 nt, Human
ucuuccuuuucucuuugcugcucc

SEQ ID NO: 1266760 - RNA, 20 nt, Human
ugacauggcagcauucugga

SEQ ID NO: 1266761 - RNA, 20 nt, Human
uggugguacugauacagaau

SEQ ID NO: 1266762 - RNA, 21 nt, Human
uggugguacugauacagaauu

SEQ ID NO: 1266763 - RNA, 21 nt, Human
uuauucugcaaaccuuuccua

SEQ ID NO: 1266764 - RNA, 19 nt, Human
uuucaggguccccagcuuu

SEQ ID NO: 1266765 - RNA, 21 nt, Human
uuucaggguccccagcuuuug

SEQ ID NO: 1266766 - RNA, 20 nt, Human
aaccuaauaaaaaaauccug

SEQ ID NO: 1266767 - RNA, 24 nt, Human
aagcaaggacaccguguugacaua

SEQ ID NO: 1266768 - RNA, 24 nt, Human
aagcaggaaggaaaccuaaaucua

SEQ ID NO: 1266769 - RNA, 25 nt, Human
aagcaggaaggaaaccuaaaucuaa

SEQ ID NO: 1266770 - RNA, 19 nt, Human
acagcaggugagggccggg

SEQ ID NO: 1266771 - RNA, 21 nt, Human
accuaauaaaaaaauccugcc

SEQ ID NO: 1266772 - RNA, 22 nt, Human
acuaaaaucaagagcaauuuua

SEQ ID NO: 1266773 - RNA, 19 nt, Human
agaaagagaacaugagaaa

SEQ ID NO: 1266774 - RNA, 19 nt, Human
agaaagagaacaugagaaa

SEQ ID NO: 1266775 - RNA, 23 nt, Human
agaaagagaacaugagaaaaugc

SEQ ID NO: 1266776 - RNA, 23 nt, Human
agaaaucccaaaacuuguaccaa

SEQ ID NO: 1266777 - RNA, 24 nt, Human
agaguucauuguuuagggaaaaug

SEQ ID NO: 1266778 - RNA, 24 nt, Human
agcuggaaaguuuuuuuuuccuuu

SEQ ID NO: 1266779 - RNA, 22 nt, Human
aggccagaaagagaacaugaga

SEQ ID NO: 1266780 - RNA, 21 nt, Human
agggcggggagcgcggaccgg

SEQ ID NO: 1266781 - RNA, 18 nt, Human
agguguugaggacauaga

SEQ ID NO: 1266782 - RNA, 26 nt, Human
agguucagagaucacaucugucagcc

SEQ ID NO: 1266783 - RNA, 18 nt, Human
aguccagguaucaauauu

SEQ ID NO: 1266784 - RNA, 18 nt, Human
augaggugaggaugaaca

SEQ ID NO: 1266785 - RNA, 21 nt, Human
caaacuaacuaaaccagaaac

SEQ ID NO: 1266786 - RNA, 24 nt, Human
caagcggaacuucuagccucucuu

SEQ ID NO: 1266787 - RNA, 18 nt, Human
caaggacaccguguugac

SEQ ID NO: 1266788 - RNA, 24 nt, Human
cacaguuuggcccaaacuaacuaa

SEQ ID NO: 1266789 - RNA, 22 nt, Human
caccguguugacauacacaagu

SEQ ID NO: 1266790 - RNA, 18 nt, Human
cacuuaaccaagcaaagc

SEQ ID NO: 1266791 - RNA, 22 nt, Human
cagaaaaggucaacaauauuaa

SEQ ID NO: 1266792 - RNA, 21 nt, Human
caguaauuuauucugagauuu

SEQ ID NO: 1266793 - RNA, 19 nt, Human
caucccgguucgcuugggg

SEQ ID NO: 1266794 - RNA, 22 nt, Human
cccaaaccugcccuuccccuca

SEQ ID NO: 1266795 - RNA, 23 nt, Human
ccccaaaccugcccuuccccuca

SEQ ID NO: 1266796 - RNA, 18 nt, Human
ccgcucuacuaaggaggc

SEQ ID NO: 1266797 - RNA, 19 nt, Human
ccuaaaucuaaauucuacu

SEQ ID NO: 1266798 - RNA, 20 nt, Human
ccucgccguccccaaaccug

SEQ ID NO: 1266799 - RNA, 19 nt, Human
ccuguggauaccuuagcuc

SEQ ID NO: 1266800 - RNA, 18 nt, Human
cgacugaaaaacauugua

SEQ ID NO: 1266801 - RNA, 24 nt, Human
cuaaauucuacuuaauacugaaga

SEQ ID NO: 1266802 - RNA, 22 nt, Human
cucacacuuaaccaagcaaagc

SEQ ID NO: 1266803 - RNA, 22 nt, Human
cucuaugaggugaggaugaaca

SEQ ID NO: 1266804 - RNA, 22 nt, Human
cucucuaugaggugaggaugaa

SEQ ID NO: 1266805 - RNA, 21 nt, Human
gaaaucaggguagcuguaaaa

SEQ ID NO: 1266806 - RNA, 20 nt, Human
gaagcaggaaggaaaccuaa

SEQ ID NO: 1266807 - RNA, 25 nt, Human
gagaacaugagaaaaugccgguacc

SEQ ID NO: 1266808 - RNA, 19 nt, Human
gcgcggaccggguguggga

SEQ ID NO: 1266809 - RNA, 20 nt, Human
gcuuauuuauuccauaaagu

SEQ ID NO: 1266810 - RNA, 21 nt, Human
ggaagugagacaagcaccgug

SEQ ID NO: 1266811 - RNA, 24 nt, Human
ggcugcgcgggucagguagccucu

SEQ ID NO: 1266812 - RNA, 22 nt, Human
gggccgggugcggauggggaag

SEQ ID NO: 1266813 - RNA, 21 nt, Human
ggucagaaaucaggguagcug

SEQ ID NO: 1266814 - RNA, 19 nt, Human
uaaaguuggucccaaagac

SEQ ID NO: 1266815 - RNA, 23 nt, Human
uaaauuuauugagcaccuacuau

SEQ ID NO: 1266816 - RNA, 24 nt, Human
uaagaaaaaaaaguuaccugaaaa

SEQ ID NO: 1266817 - RNA, 23 nt, Human
uaagauaaaaucagcaaucuauc

SEQ ID NO: 1266818 - RNA, 20 nt, Human
uacuuguccacaguuuggcc

SEQ ID NO: 1266819 - RNA, 21 nt, Human
uagcucugaguccugccaccu

SEQ ID NO: 1266820 - RNA, 25 nt, Human
uauaacuauauuacuugaaauacag

SEQ ID NO: 1266821 - RNA, 24 nt, Human
uaugaggugaggaugaacacugaa

SEQ ID NO: 1266822 - RNA, 19 nt, Human
uauguaccuuacugucaag

SEQ ID NO: 1266823 - RNA, 22 nt, Human
uauguaccuuacugucaagaac

SEQ ID NO: 1266824 - RNA, 19 nt, Human
uauguuagaagauuugggg

SEQ ID NO: 1266825 - RNA, 20 nt, Human
ucacuucccaucccgguucg

SEQ ID NO: 1266826 - RNA, 25 nt, Human
ucagaaaucccaaaacuuguaccaa

SEQ ID NO: 1266827 - RNA, 21 nt, Human
ucaggguagcuguaaaaaugu

SEQ ID NO: 1266828 - RNA, 18 nt, Human
ucccgguucgcuuggggg

SEQ ID NO: 1266829 - RNA, 18 nt, Human
uccuuggccccggggugc

SEQ ID NO: 1266830 - RNA, 19 nt, Human
ucucucuaugaggugagga

SEQ ID NO: 1266831 - RNA, 20 nt, Human
ugaaaagguacuuguccaca

SEQ ID NO: 1266832 - RNA, 21 nt, Human
ugaacagaguucauuguuuag

SEQ ID NO: 1266833 - RNA, 20 nt, Human
ugaccugauucgguaggcga

SEQ ID NO: 1266834 - RNA, 22 nt, Human
ugagaaaaugcuauuuguaaua

SEQ ID NO: 1266835 - RNA, 18 nt, Human
ugcuaggugauguacuac

SEQ ID NO: 1266836 - RNA, 19 nt, Human
uggaaaguuuuuuuuuccu

SEQ ID NO: 1266837 - RNA, 22 nt, Human
uggaaaguuuuuuuuuccuuuc

SEQ ID NO: 1266838 - RNA, 24 nt, Human
uggcccaaacuaacuaaaccagaa

SEQ ID NO: 1266839 - RNA, 25 nt, Human
uggccuguggauaccuuagcucuga

SEQ ID NO: 1266840 - RNA, 21 nt, Human
ugggaagcaggaaggaaaccu

SEQ ID NO: 1266841 - RNA, 22 nt, Human
ugggaggccgaggugacagcag

SEQ ID NO: 1266842 - RNA, 19 nt, Human
ugucucuucacuucaucuc

SEQ ID NO: 1266843 - RNA, 19 nt, Human
ugucucuucacuucaucuc

SEQ ID NO: 1266844 - RNA, 24 nt, Human
uguugaggacauagaaauaagaaa

SEQ ID NO: 1266845 - RNA, 30 nt, Human
uuaaagcaguaauuuauucugagauuuacu

SEQ ID NO: 1266846 - RNA, 24 nt, Human
uuaaccuaauaaaaaaauccugcc

SEQ ID NO: 1266847 - RNA, 21 nt, Human
uugaaauacagcucagcuuau

SEQ ID NO: 1266848 - RNA, 22 nt, Human
uuggcuacguacuccacuaggu

SEQ ID NO: 1266849 - RNA, 20 nt, Human
uuucagaaaucccaaaacuu

SEQ ID NO: 1266850 - RNA, 22 nt, Human
uuugucucuucacuucaucucu

SEQ ID NO: 1266851 - RNA, 21 nt, Human
uuuuaaaaaaaaaggugaaca

SEQ ID NO: 1266852 - RNA, 20 nt, Human
accaccagcucauaaaagca

SEQ ID NO: 1266853 - RNA, 24 nt, Human
agccggcgacuggugcuucccacg

SEQ ID NO: 1266854 - RNA, 21 nt, Human
agccgggaucucagguccucg

SEQ ID NO: 1266855 - RNA, 20 nt, Human
cagcgcccgcggcgaggacc

SEQ ID NO: 1266856 - RNA, 19 nt, Human
cauaaaagcauacuugaac

SEQ ID NO: 1266857 - RNA, 21 nt, Human
ccccugagggggguccccgcg

SEQ ID NO: 1266858 - RNA, 22 nt, Human
cccgcggcgaggaccccggggc

SEQ ID NO: 1266859 - RNA, 18 nt, Human
cggcgacuggugcuuccc

SEQ ID NO: 1266860 - RNA, 19 nt, Human
cggggcuggggcggacggc

SEQ ID NO: 1266861 - RNA, 20 nt, Human
cuggugcuucccacgugcgc

SEQ ID NO: 1266862 - RNA, 18 nt, Human
gaccccggggcuggggcg

SEQ ID NO: 1266863 - RNA, 22 nt, Human
gaggccgagccgggaucucagg

SEQ ID NO: 1266864 - RNA, 23 nt, Human
gcaacaccguuauugaacgaccc

SEQ ID NO: 1266865 - RNA, 20 nt, Human
gccccugagggggguccccg

SEQ ID NO: 1266866 - RNA, 18 nt, Human
gccgggagaagcauggga

SEQ ID NO: 1266867 - RNA, 22 nt, Human
ggcggcggccacgccaaggacg

SEQ ID NO: 1266868 - RNA, 20 nt, Human
ggggguccccgcgggagcgc

SEQ ID NO: 1266869 - RNA, 22 nt, Human
ucaggcaacaccguuauugaac

SEQ ID NO: 1266870 - RNA, 18 nt, Human
uccccgcgggagcgcgga

SEQ ID NO: 1266871 - RNA, 19 nt, Human
ugagggggguccccgcggg

SEQ ID NO: 1266872 - RNA, 20 nt, Human
ugagggggguccccgcggga

SEQ ID NO: 1266873 - RNA, 19 nt, Human
uggcaccaccagcucauaa

SEQ ID NO: 1266874 - RNA, 22 nt, Human
uguagcuuuucgauacagggaa

SEQ ID NO: 1266875 - RNA, 18 nt, Human
aaacagaagggaaacuga

SEQ ID NO: 1266876 - RNA, 21 nt, Human
agaauuuucacccaaacagaa

SEQ ID NO: 1266877 - RNA, 18 nt, Human
agauuggaaacucaucuu

SEQ ID NO: 1266878 - RNA, 20 nt, Human
aguucagauuggaaacucau

SEQ ID NO: 1266879 - RNA, 19 nt, Human
aucuuaaauucuuugguua

SEQ ID NO: 1266880 - RNA, 21 nt, Human
auggcucucuuaaauuuaggg

SEQ ID NO: 1266881 - RNA, 22 nt, Human
auggugggcuauaguuuuucuu

SEQ ID NO: 1266882 - RNA, 18 nt, Human
cauggauaaucaaaacua

SEQ ID NO: 1266883 - RNA, 21 nt, Human
cauuacagucaccaaagagcc

SEQ ID NO: 1266884 - RNA, 18 nt, Human
cauucagugaccguaacc

SEQ ID NO: 1266885 - RNA, 21 nt, Human
cccaaacagaagggaaacuga

SEQ ID NO: 1266886 - RNA, 22 nt, Human
cuucacagcuucaugugcuacc

SEQ ID NO: 1266887 - RNA, 25 nt, Human
gacgcccaaauguccaaaauuuuug

SEQ ID NO: 1266888 - RNA, 22 nt, Human
gauauuugucucagacgcccaa

SEQ ID NO: 1266889 - RNA, 22 nt, Human
gcaauuagaauuuucacccaaa

SEQ ID NO: 1266890 - RNA, 23 nt, Human
uaaaagauggugggcuauaguuu

SEQ ID NO: 1266891 - RNA, 20 nt, Human
uaccuagaacugaugaugcc

SEQ ID NO: 1266892 - RNA, 26 nt, Human
ucaccaaagagccauucagugaccgu

SEQ ID NO: 1266893 - RNA, 20 nt, Human
uccaaaauuuuugaguccau

SEQ ID NO: 1266894 - RNA, 22 nt, Human
ugucucagacgcccaaaugucc

SEQ ID NO: 1266895 - RNA, 24 nt, Human
uugaguccauuuuuaaggguucau

SEQ ID NO: 1266896 - RNA, 25 nt, Human
uuuaaggaaauggcucucuuaaauu

SEQ ID NO: 1266897 - RNA, 20 nt, Human
uuuuaaggguucauggauaa

SEQ ID NO: 1266898 - RNA, 21 nt, Human
aaaccuaguucuuaacauacc

SEQ ID NO: 1266899 - RNA, 20 nt, Human
aacauaccaccuucacaaga

SEQ ID NO: 1266900 - RNA, 22 nt, Human
aacauaccaccuucacaagaca

SEQ ID NO: 1266901 - RNA, 23 nt, Human
aacugagugcuguaaacaaccuc

SEQ ID NO: 1266902 - RNA, 25 nt, Human
aagaaaagcagaauaaaugcuugaa

SEQ ID NO: 1266903 - RNA, 24 nt, Human
aagaagacauuucccuuaucagcu

SEQ ID NO: 1266904 - RNA, 21 nt, Human
acaagacauucuuggaucccc

SEQ ID NO: 1266905 - RNA, 22 nt, Human
agaaaaacaauaagaaagagaa

SEQ ID NO: 1266906 - RNA, 24 nt, Human
agaaaaacaauaagaaagagaaca

SEQ ID NO: 1266907 - RNA, 21 nt, Human
agggcaucuauuuaucugaaa

SEQ ID NO: 1266908 - RNA, 20 nt, Human
auacccucaaccccccagaa

SEQ ID NO: 1266909 - RNA, 25 nt, Human
aucacaauacccucaaccccccaga

SEQ ID NO: 1266910 - RNA, 22 nt, Human
augacaauggaagaaccaggcc

SEQ ID NO: 1266911 - RNA, 22 nt, Human
cacaauacccucaaccccccag

SEQ ID NO: 1266912 - RNA, 24 nt, Human
cacugcuucccugucuaucccuac

SEQ ID NO: 1266913 - RNA, 25 nt, Human
cagcaaaagaaaaauaaaaaaccag

SEQ ID NO: 1266914 - RNA, 18 nt, Human
caucacagcugcaaaguc

SEQ ID NO: 1266915 - RNA, 23 nt, Human
cauccaaccaccugccugccugc

SEQ ID NO: 1266916 - RNA, 24 nt, Human
ccccugccucugacauuagucauc

SEQ ID NO: 1266917 - RNA, 21 nt, Human
ccuaccuguccuccccugccu

SEQ ID NO: 1266918 - RNA, 21 nt, Human
ccuccucccuccucccauucc

SEQ ID NO: 1266919 - RNA, 22 nt, Human
ccuucuauuuaccaguuuucag

SEQ ID NO: 1266920 - RNA, 24 nt, Human
cuaacauugauucucuaguuaugc

SEQ ID NO: 1266921 - RNA, 19 nt, Human
cuccccugcaccaggcucc

SEQ ID NO: 1266922 - RNA, 24 nt, Human
cucccuccucccauuccuugguua

SEQ ID NO: 1266923 - RNA, 22 nt, Human
cugcagcauuuuagcaucuucc

SEQ ID NO: 1266924 - RNA, 25 nt, Human
cugcagcauuuuagcaucuuccccu

SEQ ID NO: 1266925 - RNA, 24 nt, Human
cuugccacaggaucuuugcacaug

SEQ ID NO: 1266926 - RNA, 25 nt, Human
gaaaaacaauaagaaagagaacaac

SEQ ID NO: 1266927 - RNA, 24 nt, Human
gacaauggaagaaccaggccauga

SEQ ID NO: 1266928 - RNA, 22 nt, Human
gauggauggauggaaauguaua

SEQ ID NO: 1266929 - RNA, 21 nt, Human
gauggauggauggauggaugg

SEQ ID NO: 1266930 - RNA, 21 nt, Human
gauggauggauggauggaugg

SEQ ID NO: 1266931 - RNA, 21 nt, Human
gauggauggauggauggaugg

SEQ ID NO: 1266932 - RNA, 21 nt, Human
gauggauggauggauggaugg

SEQ ID NO: 1266933 - RNA, 21 nt, Human
gauggauggauggauggaugg

SEQ ID NO: 1266934 - RNA, 21 nt, Human
gauggauggauggauggaugg

SEQ ID NO: 1266935 - RNA, 21 nt, Human
gauggauggauggauggaugg

SEQ ID NO: 1266936 - RNA, 18 nt, Human
gccuccccauccaaccac

SEQ ID NO: 1266937 - RNA, 18 nt, Human
gccugacacauaguugga

SEQ ID NO: 1266938 - RNA, 18 nt, Human
ggauggauggauggaugg

SEQ ID NO: 1266939 - RNA, 18 nt, Human
ggauggauggauggaugg

SEQ ID NO: 1266940 - RNA, 19 nt, Human
ggauggauggauggauggg

SEQ ID NO: 1266941 - RNA, 21 nt, Human
ggccaguagaagccugggccc

SEQ ID NO: 1266942 - RNA, 23 nt, Human
gggcaucuauuuaucugaaaaua

SEQ ID NO: 1266943 - RNA, 20 nt, Human
gucuccuccucccuccuccc

SEQ ID NO: 1266944 - RNA, 19 nt, Human
gugaacugcuuuuauuuca

SEQ ID NO: 1266945 - RNA, 18 nt, Human
uaaaaaaccagacccuca

SEQ ID NO: 1266946 - RNA, 18 nt, Human
uaaacacuauaaaggcag

SEQ ID NO: 1266947 - RNA, 20 nt, Human
uaagaaagagaacaacccau

SEQ ID NO: 1266948 - RNA, 24 nt, Human
uacccucaaccccccagaagugcc

SEQ ID NO: 1266949 - RNA, 20 nt, Human
uagaaaaacaauaagaaaga

SEQ ID NO: 1266950 - RNA, 22 nt, Human
uagaaaaacaauaagaaagaga

SEQ ID NO: 1266951 - RNA, 22 nt, Human
uagaagccugggcccuuuugcc

SEQ ID NO: 1266952 - RNA, 21 nt, Human
uagaaucaaaacuccagaagg

SEQ ID NO: 1266953 - RNA, 24 nt, Human
uaucugacacaucugaaauuaguu

SEQ ID NO: 1266954 - RNA, 19 nt, Human
ucacagcugcaaagucacu

SEQ ID NO: 1266955 - RNA, 20 nt, Human
uccaaagguaacaaaugagu

SEQ ID NO: 1266956 - RNA, 28 nt, Human
ucccauauuguacuagagccauauccau

SEQ ID NO: 1266957 - RNA, 24 nt, Human
uccuugccuccccauccaaccacc

SEQ ID NO: 1266958 - RNA, 20 nt, Human
ucggaagauuuguuuuuuau

SEQ ID NO: 1266959 - RNA, 21 nt, Human
ucuaagaugaauauuuuucuc

SEQ ID NO: 1266960 - RNA, 22 nt, Human
ucucugagcaaaagccuaaucc

SEQ ID NO: 1266961 - RNA, 19 nt, Human
ucucugcacuccagccagc

SEQ ID NO: 1266962 - RNA, 23 nt, Human
ucugucuccuccucccuccuccc

SEQ ID NO: 1266963 - RNA, 19 nt, Human
ugaaaauauucauuauccc

SEQ ID NO: 1266964 - RNA, 23 nt, Human
ugacagacuccuccaaagguaac

SEQ ID NO: 1266965 - RNA, 19 nt, Human
ugagugcuguaaacaaccu

SEQ ID NO: 1266966 - RNA, 23 nt, Human
ugcaggcuggucagcuuccucgg

SEQ ID NO: 1266967 - RNA, 19 nt, Human
ugccacaggaucuuugcac

SEQ ID NO: 1266968 - RNA, 24 nt, Human
ugccacaggaucuuugcacaugcu

SEQ ID NO: 1266969 - RNA, 25 nt, Human
ugccacaggaucuuugcacaugcuc

SEQ ID NO: 1266970 - RNA, 20 nt, Human
ugccugucucccucucuggu

SEQ ID NO: 1266971 - RNA, 18 nt, Human
uggaaagccuucucuguc

SEQ ID NO: 1266972 - RNA, 21 nt, Human
uggaaagccuucucugucucc

SEQ ID NO: 1266973 - RNA, 18 nt, Human
uggaagaaccaggccaug

SEQ ID NO: 1266974 - RNA, 19 nt, Human
ugucucccucucugcacuc

SEQ ID NO: 1266975 - RNA, 21 nt, Human
ugugcuagaaucaaaacucca

SEQ ID NO: 1266976 - RNA, 26 nt, Human
uuagcaucuucccagcacugcuuccc

SEQ ID NO: 1266977 - RNA, 22 nt, Human
uuaucacuauguucccagcacu

SEQ ID NO: 1266978 - RNA, 26 nt, Human
uucucugucuccuccucccuccuccc

SEQ ID NO: 1266979 - RNA, 22 nt, Human
uugacauuuuauuuuugcucug

SEQ ID NO: 1266980 - RNA, 19 nt, Human
uugcaugucucuucguucc

SEQ ID NO: 1266981 - RNA, 25 nt, Human
uuuuuuguuaucacuauguucccag

SEQ ID NO: 1266982 - RNA, 19 nt, Human
aaagacaagcacagcugcc

SEQ ID NO: 1266983 - RNA, 19 nt, Human
aaagcuuuccuucuuaaag

SEQ ID NO: 1266984 - RNA, 18 nt, Human
aacgccaagcugcagcag

SEQ ID NO: 1266985 - RNA, 18 nt, Human
aagacaagcacagcugcc

SEQ ID NO: 1266986 - RNA, 22 nt, Human
aagcaccgaaagccuaggacag

SEQ ID NO: 1266987 - RNA, 22 nt, Human
aaggaaaaauggaagaaagcag

SEQ ID NO: 1266988 - RNA, 21 nt, Human
aauagagcaagagaaagaggc

SEQ ID NO: 1266989 - RNA, 21 nt, Human
aauggaagaaagcagacuaga

SEQ ID NO: 1266990 - RNA, 23 nt, Human
acaaagacaagcacagcugccca

SEQ ID NO: 1266991 - RNA, 19 nt, Human
acaaaugauaggagacuca

SEQ ID NO: 1266992 - RNA, 21 nt, Human
acuggagacaagguggcuggc

SEQ ID NO: 1266993 - RNA, 23 nt, Human
agauggacagagcuauccacaaa

SEQ ID NO: 1266994 - RNA, 27 nt, Human
aggaaaaauggaagaaagccgguaccc

SEQ ID NO: 1266995 - RNA, 19 nt, Human
agguaucuggcaaaggccu

SEQ ID NO: 1266996 - RNA, 19 nt, Human
aggugagaggguggccagg

SEQ ID NO: 1266997 - RNA, 20 nt, Human
aguguaagcagaugaaaagc

SEQ ID NO: 1266998 - RNA, 23 nt, Human
aguucuuugcacacaaagacaag

SEQ ID NO: 1266999 - RNA, 23 nt, Human
augacaccaugaaagcaaaacug

SEQ ID NO: 1267000 - RNA, 23 nt, Human
caaaauuccaaauaacagcacac

SEQ ID NO: 1267001 - RNA, 22 nt, Human
caaagacccuaaaauauaucag

SEQ ID NO: 1267002 - RNA, 22 nt, Human
cagcacacaaacaaucccaggc

SEQ ID NO: 1267003 - RNA, 23 nt, Human
cucuccugggcuccaggccucca

SEQ ID NO: 1267004 - RNA, 22 nt, Human
cugucugaaggugggugaaauu

SEQ ID NO: 1267005 - RNA, 23 nt, Human
cuguguggaaucuuccuuccuuc

SEQ ID NO: 1267006 - RNA, 21 nt, Human
gaaaagcuuuccuucuuaaag

SEQ ID NO: 1267007 - RNA, 23 nt, Human
gaagacaaguaguuaucagaagu

SEQ ID NO: 1267008 - RNA, 21 nt, Human
gaagacauuaaucaagggcac

SEQ ID NO: 1267009 - RNA, 22 nt, Human
gaagcauuuacaugcauaaaua

SEQ ID NO: 1267010 - RNA, 21 nt, Human
gagggacagaaugccauucug

SEQ ID NO: 1267011 - RNA, 20 nt, Human
gccaacaauaguguagacug

SEQ ID NO: 1267012 - RNA, 25 nt, Human
gcucuuaugacuuugggacagaaau

SEQ ID NO: 1267013 - RNA, 28 nt, Human
ggacagaaauaugacaccaugaaagcaa

SEQ ID NO: 1267014 - RNA, 23 nt, Human
ggacuggagacaagguggcuggc

SEQ ID NO: 1267015 - RNA, 22 nt, Human
uaaagaacagcucccaguggug

SEQ ID NO: 1267016 - RNA, 22 nt, Human
uaacaagaagcuguucaaagga

SEQ ID NO: 1267017 - RNA, 19 nt, Human
ucaguaaccaggacuggag

SEQ ID NO: 1267018 - RNA, 21 nt, Human
uccucuaaguuugcccugucu

SEQ ID NO: 1267019 - RNA, 18 nt, Human
uccugggcuccaggccuc

SEQ ID NO: 1267020 - RNA, 22 nt, Human
ucuccugggcuccaggccucca

SEQ ID NO: 1267021 - RNA, 18 nt, Human
ugaaacgccaagcugcag

SEQ ID NO: 1267022 - RNA, 24 nt, Human
ugagaggaaccaacaaagacccua

SEQ ID NO: 1267023 - RNA, 19 nt, Human
ugagaggguggccagggga

SEQ ID NO: 1267024 - RNA, 19 nt, Human
ugauuaggugagagggugg

SEQ ID NO: 1267025 - RNA, 22 nt, Human
ugcccugucuuucaaaauucca

SEQ ID NO: 1267026 - RNA, 21 nt, Human
uggaugaaacgccaagcugca

SEQ ID NO: 1267027 - RNA, 18 nt, Human
uggcuggcuaggaugcug

SEQ ID NO: 1267028 - RNA, 21 nt, Human
uggcuggcuaggaugcugcug

SEQ ID NO: 1267029 - RNA, 22 nt, Human
uggcuggcuaggaugcugcugu

SEQ ID NO: 1267030 - RNA, 21 nt, Human
ugggcuccaggccuccaguuc

SEQ ID NO: 1267031 - RNA, 23 nt, Human
uuaaagaacagcucccaguggug

SEQ ID NO: 1267032 - RNA, 21 nt, Human
uugcugccaauuuccucuaag

SEQ ID NO: 1267033 - RNA, 25 nt, Human
uuuagcacuccuuuugcccugugug

SEQ ID NO: 1267034 - RNA, 24 nt, Human
aaacagguaaaauuagcacuuccc

SEQ ID NO: 1267035 - RNA, 25 nt, Human
aaauaccuuaggaacugaaacaguu

SEQ ID NO: 1267036 - RNA, 20 nt, Human
aaccaugaagaaagucuaca

SEQ ID NO: 1267037 - RNA, 19 nt, Human
aagaagcaaaagugagcaa

SEQ ID NO: 1267038 - RNA, 23 nt, Human
aagaagcaaaagugagcaguggg

SEQ ID NO: 1267039 - RNA, 19 nt, Human
aagaugccuuuggacaauu

SEQ ID NO: 1267040 - RNA, 21 nt, Human
aagcaaauggauguuucccau

SEQ ID NO: 1267041 - RNA, 20 nt, Human
aaggguauuaauuucuuauu

SEQ ID NO: 1267042 - RNA, 18 nt, Human
aaguauaaaauaaucaua

SEQ ID NO: 1267043 - RNA, 23 nt, Human
acacacacacacacacacacaca

SEQ ID NO: 1267044 - RNA, 20 nt, Human
accaaaguuuaaaacccauu

SEQ ID NO: 1267045 - RNA, 19 nt, Human
agcaaaacagaauaguccc

SEQ ID NO: 1267046 - RNA, 19 nt, Human
agcaaauaccuuaggaacu

SEQ ID NO: 1267047 - RNA, 28 nt, Human
agcaugcauagcacacacacacacacac

SEQ ID NO: 1267048 - RNA, 21 nt, Human
aguggguaccaaacaacaugc

SEQ ID NO: 1267049 - RNA, 23 nt, Human
auagcacacacacacacacacac

SEQ ID NO: 1267050 - RNA, 29 nt, Human
augcauagcacacacacacacacacacac

SEQ ID NO: 1267051 - RNA, 24 nt, Human
caaaaauagugucuuccaauauuc

SEQ ID NO: 1267052 - RNA, 20 nt, Human
cacacacacacacacacaca

SEQ ID NO: 1267053 - RNA, 20 nt, Human
cacacacacacacacacaca

SEQ ID NO: 1267054 - RNA, 20 nt, Human
cacacacacacacacacaca

SEQ ID NO: 1267055 - RNA, 28 nt, Human
cacacacacacacacacacacacacuca

SEQ ID NO: 1267056 - RNA, 26 nt, Human
cacacacacacacacacacacacuca

SEQ ID NO: 1267057 - RNA, 29 nt, Human
cacuacauaaaaaauaggauauauaaaaa

SEQ ID NO: 1267058 - RNA, 22 nt, Human
cacugcaauucuuaaggcuguu

SEQ ID NO: 1267059 - RNA, 19 nt, Human
cacuuuaauuuccuggcug

SEQ ID NO: 1267060 - RNA, 19 nt, Human
cagccuacaccagcagaau

SEQ ID NO: 1267061 - RNA, 20 nt, Human
ccaaggacauuuuucuuaag

SEQ ID NO: 1267062 - RNA, 19 nt, Human
cuaaccuugacagggacua

SEQ ID NO: 1267063 - RNA, 23 nt, Human
cuagcaagucaaacauagagaag

SEQ ID NO: 1267064 - RNA, 23 nt, Human
cugaacauaacuggcaaaaagga

SEQ ID NO: 1267065 - RNA, 21 nt, Human
cuuuacacagagaaagccuuc

SEQ ID NO: 1267066 - RNA, 21 nt, Human
gaacacuuggcuauugguuua

SEQ ID NO: 1267067 - RNA, 19 nt, Human
gaagucuucuguuuacuag

SEQ ID NO: 1267068 - RNA, 20 nt, Human
gacuaaagaaugagguacag

SEQ ID NO: 1267069 - RNA, 27 nt, Human
gaguucacccacaucucagcaaauacc

SEQ ID NO: 1267070 - RNA, 21 nt, Human
gcaaaacagaauagucccauu

SEQ ID NO: 1267071 - RNA, 30 nt, Human
gcauagcacacacacacacacacacacaca

SEQ ID NO: 1267072 - RNA, 26 nt, Human
gcaugcauagcacacacacacacaca

SEQ ID NO: 1267073 - RNA, 19 nt, Human
gucugagugugguguagaa

SEQ ID NO: 1267074 - RNA, 22 nt, Human
guggauuaaauggagucggcag

SEQ ID NO: 1267075 - RNA, 20 nt, Human
guuugggcaacagccuacac

SEQ ID NO: 1267076 - RNA, 22 nt, Human
uaaaaaaugaccaauuugcucc

SEQ ID NO: 1267077 - RNA, 19 nt, Human
uaaaauagcaaaaauaggg

SEQ ID NO: 1267078 - RNA, 27 nt, Human
uaauccacuugaagucagccaguaucc

SEQ ID NO: 1267079 - RNA, 20 nt, Human
uaaugaaaacuggugacugu

SEQ ID NO: 1267080 - RNA, 21 nt, Human
uaccuuaggaacugaaacagu

SEQ ID NO: 1267081 - RNA, 23 nt, Human
uaccuuaggaacugaaacaguug

SEQ ID NO: 1267082 - RNA, 23 nt, Human
uagaaaauuugcuugagaaucug

SEQ ID NO: 1267083 - RNA, 18 nt, Human
uagacaacagauaacgcc

SEQ ID NO: 1267084 - RNA, 23 nt, Human
uagcaaaaauagugucuuccaau

SEQ ID NO: 1267085 - RNA, 22 nt, Human
uaggaacugaaacaguugcuca

SEQ ID NO: 1267086 - RNA, 18 nt, Human
uagggaauucugaugcau

SEQ ID NO: 1267087 - RNA, 19 nt, Human
uaguagcaaauaaaugcuu

SEQ ID NO: 1267088 - RNA, 22 nt, Human
uauugcccuuuuccauucccau

SEQ ID NO: 1267089 - RNA, 23 nt, Human
uauugcccuuuuccauucccaua

SEQ ID NO: 1267090 - RNA, 22 nt, Human
ucaaagucaaacuuuuucaggu

SEQ ID NO: 1267091 - RNA, 22 nt, Human
ucaaccaugaagaaagucuaca

SEQ ID NO: 1267092 - RNA, 23 nt, Human
ucagcaaauaccuuaggaacuga

SEQ ID NO: 1267093 - RNA, 19 nt, Human
ucagugagguaaauagaau

SEQ ID NO: 1267094 - RNA, 19 nt, Human
ucccaugcagacuuagagc

SEQ ID NO: 1267095 - RNA, 24 nt, Human
ucccauugaugguguggggaggag

SEQ ID NO: 1267096 - RNA, 19 nt, Human
uccccugaccucuuggguu

SEQ ID NO: 1267097 - RNA, 21 nt, Human
ugaagucagccaguaucccua

SEQ ID NO: 1267098 - RNA, 23 nt, Human
ugauuuuggcacaaugggaaggg

SEQ ID NO: 1267099 - RNA, 25 nt, Human
ugcagcccauccccacugugcccaa

SEQ ID NO: 1267100 - RNA, 22 nt, Human
ugccuccuauuuaaagaacacu

SEQ ID NO: 1267101 - RNA, 24 nt, Human
uggaaacagguaaaauuagcacuu

SEQ ID NO: 1267102 - RNA, 23 nt, Human
uggcacaaugggaagggugccuc

SEQ ID NO: 1267103 - RNA, 25 nt, Human
uggccaagaagcaaaagugagcaag

SEQ ID NO: 1267104 - RNA, 22 nt, Human
uuaucaugaugcuugcaucacu

SEQ ID NO: 1267105 - RNA, 20 nt, Human
uuccagaagucugagugugg

SEQ ID NO: 1267106 - RNA, 23 nt, Human
uuccugaacauaacuggcaaaaa

SEQ ID NO: 1267107 - RNA, 23 nt, Human
uuuuuaugucacuuauuuuauuu

SEQ ID NO: 1267108 - RNA, 20 nt, Human
aaaaacagcuaauacuacca

SEQ ID NO: 1267109 - RNA, 18 nt, Human
aacuugcuauuccuucuu

SEQ ID NO: 1267110 - RNA, 20 nt, Human
aagcgaauuucuuuuccucc

SEQ ID NO: 1267111 - RNA, 20 nt, Human
acaaagauaauaauucacaa

SEQ ID NO: 1267112 - RNA, 25 nt, Human
acacugaauuuuuucccaauuauau

SEQ ID NO: 1267113 - RNA, 21 nt, Human
acagcuaauacuaccacuaaa

SEQ ID NO: 1267114 - RNA, 20 nt, Human
agacuuaaaggacaagguag

SEQ ID NO: 1267115 - RNA, 20 nt, Human
agagccuagcagacuuaaag

SEQ ID NO: 1267116 - RNA, 22 nt, Human
caagguaguaaauguuuuauca

SEQ ID NO: 1267117 - RNA, 20 nt, Human
cagcuaauacuaccacuaaa

SEQ ID NO: 1267118 - RNA, 19 nt, Human
cugcuuggcauggaggaca

SEQ ID NO: 1267119 - RNA, 18 nt, Human
cuuagcaaggauggcaga

SEQ ID NO: 1267120 - RNA, 21 nt, Human
gaacuuugguaaccagaaaug

SEQ ID NO: 1267121 - RNA, 21 nt, Human
gagagccuagcagacuuaaag

SEQ ID NO: 1267122 - RNA, 19 nt, Human
uaaaggacaagguaguaaa

SEQ ID NO: 1267123 - RNA, 22 nt, Human
uaaccagaaauguaaaauuuca

SEQ ID NO: 1267124 - RNA, 19 nt, Human
uauauggcuaccuguugua

SEQ ID NO: 1267125 - RNA, 20 nt, Human
uccgggcucgcccggcacgc

SEQ ID NO: 1267126 - RNA, 18 nt, Human
ugcuuggcauggaggaca

SEQ ID NO: 1267127 - RNA, 19 nt, Human
ugugucaaaacuacuuagc

SEQ ID NO: 1267128 - RNA, 25 nt, Human
uuaggguacugagagccucccaaag

SEQ ID NO: 1267129 - RNA, 24 nt, Human
aaacagguaugagugacgagaaac

SEQ ID NO: 1267130 - RNA, 18 nt, Human
aaacugcccacccauuca

SEQ ID NO: 1267131 - RNA, 24 nt, Human
aaaggcagaggcugaaacaggaac

SEQ ID NO: 1267132 - RNA, 21 nt, Human
aaaugcaaaggaaacugaacu

SEQ ID NO: 1267133 - RNA, 22 nt, Human
aacacaugaccucagaagccuc

SEQ ID NO: 1267134 - RNA, 20 nt, Human
aagaagaaagagucugagga

SEQ ID NO: 1267135 - RNA, 24 nt, Human
aagaggccccaagcagaggacucc

SEQ ID NO: 1267136 - RNA, 22 nt, Human
aaugacaccacuuuccuccugu

SEQ ID NO: 1267137 - RNA, 18 nt, Human
acaaaaagggcaugacag

SEQ ID NO: 1267138 - RNA, 24 nt, Human
acaggaacaugcagcugcuagagg

SEQ ID NO: 1267139 - RNA, 21 nt, Human
acaggcacucucucugaagcc

SEQ ID NO: 1267140 - RNA, 22 nt, Human
acaguccucugggagguuuccu

SEQ ID NO: 1267141 - RNA, 21 nt, Human
acaucacagugccucagugau

SEQ ID NO: 1267142 - RNA, 22 nt, Human
accaucagccuggaugcagagg

SEQ ID NO: 1267143 - RNA, 20 nt, Human
accuucuacugcuguugcuu

SEQ ID NO: 1267144 - RNA, 21 nt, Human
acgaugaugaagacagaugcc

SEQ ID NO: 1267145 - RNA, 23 nt, Human
acucagaaaguuguuucucaguu

SEQ ID NO: 1267146 - RNA, 19 nt, Human
acugugacuuggggagcau

SEQ ID NO: 1267147 - RNA, 25 nt, Human
acuugcuucucaaugaacuagucau

SEQ ID NO: 1267148 - RNA, 20 nt, Human
agaaaaaaaagaauacuaag

SEQ ID NO: 1267149 - RNA, 22 nt, Human
agacaccaaggagaauaagaug

SEQ ID NO: 1267150 - RNA, 18 nt, Human
agacagaugccaggcucu

SEQ ID NO: 1267151 - RNA, 22 nt, Human
agagaacagcauguagaagcau

SEQ ID NO: 1267152 - RNA, 24 nt, Human
agccaauucacaauagacaucaga

SEQ ID NO: 1267153 - RNA, 25 nt, Human
agcugggcucagguggguggcagag

SEQ ID NO: 1267154 - RNA, 19 nt, Human
aggaagaagaaagagucug

SEQ ID NO: 1267155 - RNA, 20 nt, Human
aggaaggacacaugaaaaga

SEQ ID NO: 1267156 - RNA, 20 nt, Human
aggaaucuuggaggagcugu

SEQ ID NO: 1267157 - RNA, 22 nt, Human
aggagcuguggaaaggcagagg

SEQ ID NO: 1267158 - RNA, 18 nt, Human
aggcaaaagacaaacagg

SEQ ID NO: 1267159 - RNA, 19 nt, Human
agguggaguccuggagaaa

SEQ ID NO: 1267160 - RNA, 19 nt, Human
agguggguggcagagaaca

SEQ ID NO: 1267161 - RNA, 22 nt, Human
agugacaagaaaggcauccaga

SEQ ID NO: 1267162 - RNA, 22 nt, Human
auagccaagauaucaugaaaau

SEQ ID NO: 1267163 - RNA, 23 nt, Human
augaaaagaggauauguggccuu

SEQ ID NO: 1267164 - RNA, 23 nt, Human
auggaaggagaaugaaaagagga

SEQ ID NO: 1267165 - RNA, 21 nt, Human
caaaagacaaacagguaugaa

SEQ ID NO: 1267166 - RNA, 23 nt, Human
cacagguaggguggcuggcaugg

SEQ ID NO: 1267167 - RNA, 20 nt, Human
cacagugccucagugauggu

SEQ ID NO: 1267168 - RNA, 21 nt, Human
caccacauacagggucaggau

SEQ ID NO: 1267169 - RNA, 19 nt, Human
caccugcucagauguaaga

SEQ ID NO: 1267170 - RNA, 18 nt, Human
cacguggcugagguggcu

SEQ ID NO: 1267171 - RNA, 22 nt, Human
cacuaaaacuucuuuucuucag

SEQ ID NO: 1267172 - RNA, 21 nt, Human
cacucucucugaagccagagg

SEQ ID NO: 1267173 - RNA, 19 nt, Human
cagacagaggccagggcag

SEQ ID NO: 1267174 - RNA, 19 nt, Human
cagaggccagggcaggggc

SEQ ID NO: 1267175 - RNA, 23 nt, Human
cagcaaacugcccacccauucac

SEQ ID NO: 1267176 - RNA, 24 nt, Human
cagcaggucucucucugggcagcg

SEQ ID NO: 1267177 - RNA, 20 nt, Human
cagggcaggggcagggggcc

SEQ ID NO: 1267178 - RNA, 22 nt, Human
cauuugaaaguuuccagcagau

SEQ ID NO: 1267179 - RNA, 24 nt, Human
ccacacucugacaguuccuaaccc

SEQ ID NO: 1267180 - RNA, 24 nt, Human
ccacccauucacauaugaaauggc

SEQ ID NO: 1267181 - RNA, 18 nt, Human
ccacugacucuagcuggg

SEQ ID NO: 1267182 - RNA, 21 nt, Human
ccagaaugagaaaaaaaagaa

SEQ ID NO: 1267183 - RNA, 24 nt, Human
ccagccaauucacaauagacauca

SEQ ID NO: 1267184 - RNA, 21 nt, Human
cccacaggcacucucucugaa

SEQ ID NO: 1267185 - RNA, 18 nt, Human
cccaccucuacucagaaa

SEQ ID NO: 1267186 - RNA, 19 nt, Human
ccccacaggcacucucucu

SEQ ID NO: 1267187 - RNA, 18 nt, Human
ccucagugauggugaaca

SEQ ID NO: 1267188 - RNA, 21 nt, Human
ccuccuguggagaggcaggau

SEQ ID NO: 1267189 - RNA, 19 nt, Human
cggagagaccggggcggca

SEQ ID NO: 1267190 - RNA, 19 nt, Human
cuagcugggcucagguggg

SEQ ID NO: 1267191 - RNA, 19 nt, Human
cuauuucuuuugcuguuuc

SEQ ID NO: 1267192 - RNA, 21 nt, Human
cucacaguccucugggagguu

SEQ ID NO: 1267193 - RNA, 22 nt, Human
cucauagucauccacaaggguu

SEQ ID NO: 1267194 - RNA, 19 nt, Human
cuccaggaagaagaaagag

SEQ ID NO: 1267195 - RNA, 19 nt, Human
cuccauucagcugcugacc

SEQ ID NO: 1267196 - RNA, 23 nt, Human
cugaagccagaggguucagaccc

SEQ ID NO: 1267197 - RNA, 24 nt, Human
cugaagccagaggguucagacccc

SEQ ID NO: 1267198 - RNA, 23 nt, Human
cugaagccuugaaucucucauag

SEQ ID NO: 1267199 - RNA, 21 nt, Human
cugcagcucucucuaaggccg

SEQ ID NO: 1267200 - RNA, 20 nt, Human
cugccugcucuugcucuuuc

SEQ ID NO: 1267201 - RNA, 24 nt, Human
cuggaguaaucucugagcugcagu

SEQ ID NO: 1267202 - RNA, 20 nt, Human
cuguggauuuucucugcuuu

SEQ ID NO: 1267203 - RNA, 21 nt, Human
cuuaucaucagaacaaugagu

SEQ ID NO: 1267204 - RNA, 22 nt, Human
cuuccagucuaugucacaucug

SEQ ID NO: 1267205 - RNA, 20 nt, Human
gagcggggcggacggggcgg

SEQ ID NO: 1267206 - RNA, 21 nt, Human
gauaaaguaccagaaugagaa

SEQ ID NO: 1267207 - RNA, 19 nt, Human
gaugaguaucuucaacagc

SEQ ID NO: 1267208 - RNA, 24 nt, Human
gaugguggccaggcaaaagacaaa

SEQ ID NO: 1267209 - RNA, 18 nt, Human
gcaauagaggaaucuugg

SEQ ID NO: 1267210 - RNA, 24 nt, Human
gcagcaguucacuucagcgguaga

SEQ ID NO: 1267211 - RNA, 18 nt, Human
gcagggggccugggaaaa

SEQ ID NO: 1267212 - RNA, 24 nt, Human
gcauggcucacguggcugaggugg

SEQ ID NO: 1267213 - RNA, 18 nt, Human
gccccaagcagaggacuc

SEQ ID NO: 1267214 - RNA, 22 nt, Human
gcccuccugccugcucuugcuc

SEQ ID NO: 1267215 - RNA, 19 nt, Human
gccuccugguucuuaacuc

SEQ ID NO: 1267216 - RNA, 20 nt, Human
gcggagugaggggcgugcuc

SEQ ID NO: 1267217 - RNA, 20 nt, Human
gcuccaggaagaagaaagag

SEQ ID NO: 1267218 - RNA, 22 nt, Human
gcuccauucagcugcugaccug

SEQ ID NO: 1267219 - RNA, 20 nt, Human
gcucuugcucuuucuuucuc

SEQ ID NO: 1267220 - RNA, 23 nt, Human
gcuguggaaaggcagaggcugaa

SEQ ID NO: 1267221 - RNA, 21 nt, Human
ggaaggagaaugaaaagagga

SEQ ID NO: 1267222 - RNA, 21 nt, Human
ggaaggagaaugaaaagagga

SEQ ID NO: 1267223 - RNA, 20 nt, Human
ggaggcagacugugacuugg

SEQ ID NO: 1267224 - RNA, 27 nt, Human
ggcaacagcgaagaaaugccgguaccc

SEQ ID NO: 1267225 - RNA, 21 nt, Human
ggccugggcccacugcugggc

SEQ ID NO: 1267226 - RNA, 20 nt, Human
gggcaugacagcaaacugcc

SEQ ID NO: 1267227 - RNA, 24 nt, Human
gggcucagguggguggcagagaac

SEQ ID NO: 1267228 - RNA, 19 nt, Human
ggggcagggggccugggaa

SEQ ID NO: 1267229 - RNA, 20 nt, Human
gggucacagguaggguggcu

SEQ ID NO: 1267230 - RNA, 24 nt, Human
guaccagaaugagaaaaaaaagaa

SEQ ID NO: 1267231 - RNA, 22 nt, Human
gugauggugaacacaugaccuc

SEQ ID NO: 1267232 - RNA, 23 nt, Human
gugguaggucugcuguggauuuu

SEQ ID NO: 1267233 - RNA, 19 nt, Human
guucccagagcggggcgga

SEQ ID NO: 1267234 - RNA, 18 nt, Human
uaagaagcaacuccucau

SEQ ID NO: 1267235 - RNA, 24 nt, Human
uaagcuuuuuaccuagccaauucu

SEQ ID NO: 1267236 - RNA, 18 nt, Human
uaagugacaagaaaggca

SEQ ID NO: 1267237 - RNA, 23 nt, Human
uaccagaaugagaaaaaaaagaa

SEQ ID NO: 1267238 - RNA, 19 nt, Human
uaccuagccaauucuaggu

SEQ ID NO: 1267239 - RNA, 24 nt, Human
uaccuggugccccacaggcacucu

SEQ ID NO: 1267240 - RNA, 24 nt, Human
uaucaugaaaauucccauguggag

SEQ ID NO: 1267241 - RNA, 18 nt, Human
uaucuguaggugcauucu

SEQ ID NO: 1267242 - RNA, 20 nt, Human
uaugaaauggcagccacaaa

SEQ ID NO: 1267243 - RNA, 18 nt, Human
uauguugauauuuugauu

SEQ ID NO: 1267244 - RNA, 20 nt, Human
ucacaucugcuggagcggcg

SEQ ID NO: 1267245 - RNA, 21 nt, Human
ucacuuccagucuaugucaca

SEQ ID NO: 1267246 - RNA, 23 nt, Human
ucagaacaaugagugagugacca

SEQ ID NO: 1267247 - RNA, 20 nt, Human
uccacacagaaggcugaggu

SEQ ID NO: 1267248 - RNA, 23 nt, Human
uccaugauaacuggggccggggc

SEQ ID NO: 1267249 - RNA, 21 nt, Human
ucccacacaggcaguggcuuc

SEQ ID NO: 1267250 - RNA, 22 nt, Human
uccucaucuguucaaguuuuau

SEQ ID NO: 1267251 - RNA, 18 nt, Human
uccuccacuuccccacug

SEQ ID NO: 1267252 - RNA, 18 nt, Human
uccuggagaaagucuugg

SEQ ID NO: 1267253 - RNA, 19 nt, Human
ucugaggaugccacgauga

SEQ ID NO: 1267254 - RNA, 20 nt, Human
ucugcagcagcaggucucuc

SEQ ID NO: 1267255 - RNA, 20 nt, Human
ucuggccugggcccacugcu

SEQ ID NO: 1267256 - RNA, 20 nt, Human
ucuucaggcuccacuucuga

SEQ ID NO: 1267257 - RNA, 20 nt, Human
ucuuucuuucucuacucccc

SEQ ID NO: 1267258 - RNA, 24 nt, Human
ugaaaagaggauauguggccuuuc

SEQ ID NO: 1267259 - RNA, 18 nt, Human
ugaaaauucccaugugga

SEQ ID NO: 1267260 - RNA, 19 nt, Human
ugaaauggcagccacaaau

SEQ ID NO: 1267261 - RNA, 20 nt, Human
ugaaauggcagccacaaaug

SEQ ID NO: 1267262 - RNA, 20 nt, Human
ugagaagucccauuuccugc

SEQ ID NO: 1267263 - RNA, 23 nt, Human
ugauauccagacuccagaggggc

SEQ ID NO: 1267264 - RNA, 22 nt, Human
ugcaauagaggaaucuuggagg

SEQ ID NO: 1267265 - RNA, 19 nt, Human
ugcacaaaaagggcaugac

SEQ ID NO: 1267266 - RNA, 21 nt, Human
ugcagacagaggccagggcag

SEQ ID NO: 1267267 - RNA, 21 nt, Human
ugcucuggaacuucaagccac

SEQ ID NO: 1267268 - RNA, 18 nt, Human
ugcugaccugugguucca

SEQ ID NO: 1267269 - RNA, 23 nt, Human
uggaaaggcagaggcugaaacag

SEQ ID NO: 1267270 - RNA, 23 nt, Human
uggaaggagaaugaaaagaggau

SEQ ID NO: 1267271 - RNA, 19 nt, Human
uggaaugccaccuucuacu

SEQ ID NO: 1267272 - RNA, 21 nt, Human
uggaaugccaccuucuacugc

SEQ ID NO: 1267273 - RNA, 18 nt, Human
uggcaacagcgaagaaag

SEQ ID NO: 1267274 - RNA, 22 nt, Human
uggcaggcaccaucagccugga

SEQ ID NO: 1267275 - RNA, 19 nt, Human
uggcugcagauuguggaga

SEQ ID NO: 1267276 - RNA, 22 nt, Human
uggcugcagauuguggagaggg

SEQ ID NO: 1267277 - RNA, 24 nt, Human
ugguaggucugcuguggauuuucu

SEQ ID NO: 1267278 - RNA, 24 nt, Human
ugguucugauuguugucugggucc

SEQ ID NO: 1267279 - RNA, 21 nt, Human
uguaagaagcaacuccucauc

SEQ ID NO: 1267280 - RNA, 22 nt, Human
uguaagaagcaacuccucaucu

SEQ ID NO: 1267281 - RNA, 19 nt, Human
uguggaaaggcagaggcug

SEQ ID NO: 1267282 - RNA, 24 nt, Human
uguuucucaguugagccacacucu

SEQ ID NO: 1267283 - RNA, 20 nt, Human
uuaccuagccaauucuaggu

SEQ ID NO: 1267284 - RNA, 21 nt, Human
uuagcccaucuuuccccaccu

SEQ ID NO: 1267285 - RNA, 19 nt, Human
uucacauaugaaauggcag

SEQ ID NO: 1267286 - RNA, 22 nt, Human
uucaugguccucacaguccucu

SEQ ID NO: 1267287 - RNA, 23 nt, Human
uucuaggucugaucacaauccac

SEQ ID NO: 1267288 - RNA, 21 nt, Human
uugguucugauuguugucugg

SEQ ID NO: 1267289 - RNA, 22 nt, Human
uuuaugcauacuuauuuugugu

SEQ ID NO: 1267290 - RNA, 20 nt, Human
aaaaaaaagguacccacuaa

SEQ ID NO: 1267291 - RNA, 22 nt, Human
aaaaagacaaagcuacaacaga

SEQ ID NO: 1267292 - RNA, 23 nt, Human
aaaagaaaaagaaaaagacaaag

SEQ ID NO: 1267293 - RNA, 23 nt, Human
aaacaaauugguaacaacaugau

SEQ ID NO: 1267294 - RNA, 22 nt, Human
aacauucuuuacacccaaaacc

SEQ ID NO: 1267295 - RNA, 21 nt, Human
aaccaaauagaaauuuugaga

SEQ ID NO: 1267296 - RNA, 23 nt, Human
aagaaaaaaaagguacccacuaa

SEQ ID NO: 1267297 - RNA, 23 nt, Human
aaggaaacaccuucgaaacugca

SEQ ID NO: 1267298 - RNA, 24 nt, Human
aauaguaauuaacaaugaucuucu

SEQ ID NO: 1267299 - RNA, 25 nt, Human
aauauacacaagaaauaacagugug

SEQ ID NO: 1267300 - RNA, 19 nt, Human
acaaacaggaaagcaugcc

SEQ ID NO: 1267301 - RNA, 20 nt, Human
acaaggaaacaccuucgaaa

SEQ ID NO: 1267302 - RNA, 18 nt, Human
acuaccacaauuuacagg

SEQ ID NO: 1267303 - RNA, 20 nt, Human
agaaaaagacaaagcuacaa

SEQ ID NO: 1267304 - RNA, 22 nt, Human
auagauuccccuuaaacugcaa

SEQ ID NO: 1267305 - RNA, 21 nt, Human
augaaaagaaaaagaaaaaga

SEQ ID NO: 1267306 - RNA, 22 nt, Human
augauuuuuauucucuugcucu

SEQ ID NO: 1267307 - RNA, 22 nt, Human
caaacaaauugguaacaacaug

SEQ ID NO: 1267308 - RNA, 23 nt, Human
caaauugguaacaacaugauuua

SEQ ID NO: 1267309 - RNA, 22 nt, Human
cacccaaaaccuauggcagcag

SEQ ID NO: 1267310 - RNA, 22 nt, Human
cagcagguguuucuuuacaguu

SEQ ID NO: 1267311 - RNA, 18 nt, Human
caugccagccaguuaggg

SEQ ID NO: 1267312 - RNA, 19 nt, Human
cauugcaaacacacaaauu

SEQ ID NO: 1267313 - RNA, 19 nt, Human
ccaaaaccuauggcagcag

SEQ ID NO: 1267314 - RNA, 18 nt, Human
cccaaaaccuauggcagc

SEQ ID NO: 1267315 - RNA, 23 nt, Human
ccggacucgccucuuccaacucg

SEQ ID NO: 1267316 - RNA, 24 nt, Human
cuaaaacacacauugcaaacacac

SEQ ID NO: 1267317 - RNA, 20 nt, Human
cugaacuauccuugguuuca

SEQ ID NO: 1267318 - RNA, 24 nt, Human
cugauguaaugaaaagaaaaagaa

SEQ ID NO: 1267319 - RNA, 25 nt, Human
cuuaaacugcaagucagcagguguu

SEQ ID NO: 1267320 - RNA, 20 nt, Human
cuuuccugacaacuccucgc

SEQ ID NO: 1267321 - RNA, 19 nt, Human
gaaaagaaaaagaaaaaga

SEQ ID NO: 1267322 - RNA, 25 nt, Human
gcaguaaacauucuuuacacccaaa

SEQ ID NO: 1267323 - RNA, 18 nt, Human
gcuaugacaguccugaac

SEQ ID NO: 1267324 - RNA, 26 nt, Human
gcugcaguuagguuauuuuggacaau

SEQ ID NO: 1267325 - RNA, 21 nt, Human
ggagggcaguaaacauucuuu

SEQ ID NO: 1267326 - RNA, 23 nt, Human
uaaaagaaaaugcacaaaaacca

SEQ ID NO: 1267327 - RNA, 26 nt, Human
uaaauaagaaaaaaaagguacccacu

SEQ ID NO: 1267328 - RNA, 20 nt, Human
uaacucacaaggaaacaccu

SEQ ID NO: 1267329 - RNA, 22 nt, Human
uaagcugcaguaacuuuucuga

SEQ ID NO: 1267330 - RNA, 20 nt, Human
uagaauacaaacaggaaaga

SEQ ID NO: 1267331 - RNA, 23 nt, Human
uaugacaguccugaacaagaagg

SEQ ID NO: 1267332 - RNA, 23 nt, Human
uauuaauauauguauauaugacc

SEQ ID NO: 1267333 - RNA, 21 nt, Human
ucagcagguguuucuuuacag

SEQ ID NO: 1267334 - RNA, 22 nt, Human
ucuaaaacacacauugcaaaca

SEQ ID NO: 1267335 - RNA, 21 nt, Human
ucuaaacacagcuaggacuca

SEQ ID NO: 1267336 - RNA, 26 nt, Human
ucuaaacacagcuaggacucagcaag

SEQ ID NO: 1267337 - RNA, 20 nt, Human
ucuaacguaggagagggaaa

SEQ ID NO: 1267338 - RNA, 20 nt, Human
ucuuugggaauuuaagaacu

SEQ ID NO: 1267339 - RNA, 19 nt, Human
ugaaaagaaaaagaaaaag

SEQ ID NO: 1267340 - RNA, 24 nt, Human
ugcaagucagcagguguuucuuua

SEQ ID NO: 1267341 - RNA, 21 nt, Human
uggcuaugacaguccugaaca

SEQ ID NO: 1267342 - RNA, 21 nt, Human
ugguuuggaaauggggagaau

SEQ ID NO: 1267343 - RNA, 20 nt, Human
uguagaaaaacugaacuaca

SEQ ID NO: 1267344 - RNA, 21 nt, Human
ugucucaaaguaaccugcagc

SEQ ID NO: 1267345 - RNA, 22 nt, Human
ugugcuuuaaauaagaaaaaaa

SEQ ID NO: 1267346 - RNA, 22 nt, Human
uuaucuauucucuccacauguc

SEQ ID NO: 1267347 - RNA, 18 nt, Human
uugcaaacuguggcuaug

SEQ ID NO: 1267348 - RNA, 20 nt, Human
uuuucagaauuuaaauggaa

SEQ ID NO: 1267349 - RNA, 23 nt, Human
aaacuccugggcuuaagcaaucc

SEQ ID NO: 1267350 - RNA, 20 nt, Human
aaccaccagccaggggcugg

SEQ ID NO: 1267351 - RNA, 21 nt, Human
aaccgagccggcagggcugcg

SEQ ID NO: 1267352 - RNA, 24 nt, Human
aagcaauccugucucagccuccca

SEQ ID NO: 1267353 - RNA, 22 nt, Human
aaggccacagccacauccccaa

SEQ ID NO: 1267354 - RNA, 18 nt, Human
acuguucucccaggcaag

SEQ ID NO: 1267355 - RNA, 25 nt, Human
agaaggaauaaacuacucugcacaa

SEQ ID NO: 1267356 - RNA, 22 nt, Human
agagagucagcgaccacaccac

SEQ ID NO: 1267357 - RNA, 21 nt, Human
agccggcagggcugcggagcu

SEQ ID NO: 1267358 - RNA, 18 nt, Human
aggcuggagugcaguggc

SEQ ID NO: 1267359 - RNA, 23 nt, Human
aguaacugggacuacaggcauau

SEQ ID NO: 1267360 - RNA, 22 nt, Human
augcacaaucauagugcauuac

SEQ ID NO: 1267361 - RNA, 21 nt, Human
auguugcccaggcuggagugc

SEQ ID NO: 1267362 - RNA, 24 nt, Human
auucuuuucaauuagcacacagua

SEQ ID NO: 1267363 - RNA, 20 nt, Human
caccacgccguucggacagu

SEQ ID NO: 1267364 - RNA, 22 nt, Human
caccaugccuggcuuuguacag

SEQ ID NO: 1267365 - RNA, 18 nt, Human
cagcauccaggugucucc

SEQ ID NO: 1267366 - RNA, 23 nt, Human
cagccucccaaguaacugggacu

SEQ ID NO: 1267367 - RNA, 19 nt, Human
cagcgaccacaccacgccg

SEQ ID NO: 1267368 - RNA, 22 nt, Human
cauaauuuauuuaaugucuccu

SEQ ID NO: 1267369 - RNA, 21 nt, Human
ccacagccacauccccaaaug

SEQ ID NO: 1267370 - RNA, 19 nt, Human
ccagagagucagcgaccac

SEQ ID NO: 1267371 - RNA, 24 nt, Human
cccaaguaacugggacuacaggca

SEQ ID NO: 1267372 - RNA, 23 nt, Human
cccggccgcucacgaaccgaacc

SEQ ID NO: 1267373 - RNA, 22 nt, Human
cccuguacagggcccgcugagc

SEQ ID NO: 1267374 - RNA, 20 nt, Human
cuauguugcccaggcuggag

SEQ ID NO: 1267375 - RNA, 20 nt, Human
cugaacuguucucccaggca

SEQ ID NO: 1267376 - RNA, 22 nt, Human
cugggcuuaagcaauccugucu

SEQ ID NO: 1267377 - RNA, 24 nt, Human
gacuacaggcauaugccaccaugc

SEQ ID NO: 1267378 - RNA, 24 nt, Human
gcugcggagcugcacgcccagaga

SEQ ID NO: 1267379 - RNA, 22 nt, Human
gcuggagugcaguggcuauuca

SEQ ID NO: 1267380 - RNA, 24 nt, Human
ggacuacaggcauaugccaccaug

SEQ ID NO: 1267381 - RNA, 23 nt, Human
ggagucuugcuauguugcccagg

SEQ ID NO: 1267382 - RNA, 22 nt, Human
ggcccgcugagcagcauccagg

SEQ ID NO: 1267383 - RNA, 22 nt, Human
gucccuggaucugggcucuugg

SEQ ID NO: 1267384 - RNA, 21 nt, Human
uacagcuccaccucauucuuu

SEQ ID NO: 1267385 - RNA, 22 nt, Human
uacaggcauaugccaccaugcc

SEQ ID NO: 1267386 - RNA, 24 nt, Human
uagaaccucacaaugaauauccuc

SEQ ID NO: 1267387 - RNA, 22 nt, Human
uagagauggagucuugcuaugu

SEQ ID NO: 1267388 - RNA, 23 nt, Human
uauguugcccaggcuggagugca

SEQ ID NO: 1267389 - RNA, 25 nt, Human
uauucacaugcacaaucauagugca

SEQ ID NO: 1267390 - RNA, 18 nt, Human
uauuuuuuuacuuagaga

SEQ ID NO: 1267391 - RNA, 22 nt, Human
uccauacugacauacauuuagu

SEQ ID NO: 1267392 - RNA, 24 nt, Human
ucccaaguaacugggacuacaggc

SEQ ID NO: 1267393 - RNA, 19 nt, Human
ucccaggcaagggcugaga

SEQ ID NO: 1267394 - RNA, 19 nt, Human
uccccaaaugucagcgguc

SEQ ID NO: 1267395 - RNA, 18 nt, Human
uccugggcuuaagcaauc

SEQ ID NO: 1267396 - RNA, 20 nt, Human
uccugggcuuaagcaauccu

SEQ ID NO: 1267397 - RNA, 21 nt, Human
uccugggcuuaagcaauccug

SEQ ID NO: 1267398 - RNA, 23 nt, Human
ucuugcuauguugcccaggcugg

SEQ ID NO: 1267399 - RNA, 24 nt, Human
ucuugcuauguugcccaggcugga

SEQ ID NO: 1267400 - RNA, 18 nt, Human
ugcccaggcuggagugca

SEQ ID NO: 1267401 - RNA, 21 nt, Human
ugcccaggcuggagugcagug

SEQ ID NO: 1267402 - RNA, 22 nt, Human
ugcccaggcuggagugcagugg

SEQ ID NO: 1267403 - RNA, 25 nt, Human
ugcuauguugcccaggcuggagugc

SEQ ID NO: 1267404 - RNA, 24 nt, Human
uggagucuugcuauguugcccagg

SEQ ID NO: 1267405 - RNA, 21 nt, Human
ugggacuacaggcauaugcca

SEQ ID NO: 1267406 - RNA, 22 nt, Human
ugggacuacaggcauaugccac

SEQ ID NO: 1267407 - RNA, 24 nt, Human
ugggacuacaggcauaugccacca

SEQ ID NO: 1267408 - RNA, 24 nt, Human
ugucucagccucccaaguaacugg

SEQ ID NO: 1267409 - RNA, 21 nt, Human
ugucuccugaacuguucuccc

SEQ ID NO: 1267410 - RNA, 24 nt, Human
uucacuaguagaaccucacaauga

SEQ ID NO: 1267411 - RNA, 24 nt, Human
uugcccaggcuggagugcaguggc

SEQ ID NO: 1267412 - RNA, 24 nt, Human
uugcuauguugcccaggcuggagu

SEQ ID NO: 1267413 - RNA, 22 nt, Human
aaaacaaaacgagccauauuca

SEQ ID NO: 1267414 - RNA, 23 nt, Human
cccccggcugggcuccccggccu

SEQ ID NO: 1267415 - RNA, 21 nt, Human
ugaccagucgcucugcaagga

SEQ ID NO: 1267416 - RNA, 23 nt, Human
ugccagggacgucagucagccug

SEQ ID NO: 1267417 - RNA, 24 nt, Human
ugccagggacgucagucagccugg

SEQ ID NO: 1267418 - RNA, 19 nt, Human
uauaugguaugguauaaga

SEQ ID NO: 1267419 - RNA, 20 nt, Human
uaugguauaagacagugucc

SEQ ID NO: 1267420 - RNA, 23 nt, Human
aaaauaugcugccaggugccccc

SEQ ID NO: 1267421 - RNA, 20 nt, Human
aacccacaucagucaaaauu

SEQ ID NO: 1267422 - RNA, 19 nt, Human
aagagggcuguuggcugcc

SEQ ID NO: 1267423 - RNA, 18 nt, Human
aagcagggcccugcccug

SEQ ID NO: 1267424 - RNA, 23 nt, Human
aaggcucacuuccagaagugugc

SEQ ID NO: 1267425 - RNA, 23 nt, Human
acaccacgaagucagacauggga

SEQ ID NO: 1267426 - RNA, 22 nt, Human
acagcuucauacucagaguuca

SEQ ID NO: 1267427 - RNA, 18 nt, Human
accacagagcaggaagac

SEQ ID NO: 1267428 - RNA, 21 nt, Human
accccacaaaucccugaaagg

SEQ ID NO: 1267429 - RNA, 25 nt, Human
accggccccgccuccacgcuccccc

SEQ ID NO: 1267430 - RNA, 21 nt, Human
accucagaaagugcaaacaca

SEQ ID NO: 1267431 - RNA, 24 nt, Human
accucagaaagugcaaacacacug

SEQ ID NO: 1267432 - RNA, 23 nt, Human
acgaagucagacaugggaaaaug

SEQ ID NO: 1267433 - RNA, 22 nt, Human
agaaaacugacaacuccaugcu

SEQ ID NO: 1267434 - RNA, 22 nt, Human
agaggcaugggcagcaggccca

SEQ ID NO: 1267435 - RNA, 18 nt, Human
agcaggcagggcucacgu

SEQ ID NO: 1267436 - RNA, 18 nt, Human
aggaccagaggcaugggc

SEQ ID NO: 1267437 - RNA, 22 nt, Human
aggcagggcucacguugguuuu

SEQ ID NO: 1267438 - RNA, 26 nt, Human
aggcagggcucacguugguuuuggcu

SEQ ID NO: 1267439 - RNA, 20 nt, Human
agguacuagaacugaucacc

SEQ ID NO: 1267440 - RNA, 18 nt, Human
aguuuuaagccuuucuca

SEQ ID NO: 1267441 - RNA, 20 nt, Human
aucaauauacaaucuguacu

SEQ ID NO: 1267442 - RNA, 22 nt, Human
auccucacccaggcuuccccau

SEQ ID NO: 1267443 - RNA, 27 nt, Human
caaaaaaaacuuuguaagugccaaagg

SEQ ID NO: 1267444 - RNA, 22 nt, Human
caaaauggaccccaaccaguga

SEQ ID NO: 1267445 - RNA, 24 nt, Human
caaaccacagagcaggaagaccag

SEQ ID NO: 1267446 - RNA, 22 nt, Human
caaagcagggcccugcccuguu

SEQ ID NO: 1267447 - RNA, 20 nt, Human
cacagaaaauaugcugccag

SEQ ID NO: 1267448 - RNA, 22 nt, Human
cacagaaaauaugcugccaggu

SEQ ID NO: 1267449 - RNA, 18 nt, Human
caccacgaagucagacau

SEQ ID NO: 1267450 - RNA, 23 nt, Human
cagaagugugcggacgcgaccuc

SEQ ID NO: 1267451 - RNA, 20 nt, Human
cagcccaaaccacagagcag

SEQ ID NO: 1267452 - RNA, 19 nt, Human
cagcccagaaaacugacaa

SEQ ID NO: 1267453 - RNA, 26 nt, Human
cagccuuucccaaugucuucaggcuc

SEQ ID NO: 1267454 - RNA, 19 nt, Human
caggcucuuccaggagcuu

SEQ ID NO: 1267455 - RNA, 18 nt, Human
caggugcccccugccccu

SEQ ID NO: 1267456 - RNA, 19 nt, Human
caggugcccccugccccuc

SEQ ID NO: 1267457 - RNA, 18 nt, Human
caucagucaaaauuuaaa

SEQ ID NO: 1267458 - RNA, 18 nt, Human
ccaaaacugacguccugc

SEQ ID NO: 1267459 - RNA, 25 nt, Human
ccacagagcaggaagaccagacccc

SEQ ID NO: 1267460 - RNA, 20 nt, Human
ccaccagcccuccuauggag

SEQ ID NO: 1267461 - RNA, 22 nt, Human
ccaggaccagaggcaugggcag

SEQ ID NO: 1267462 - RNA, 23 nt, Human
ccauggucaguagggcccagggc

SEQ ID NO: 1267463 - RNA, 19 nt, Human
cccaaaccacagagcagga

SEQ ID NO: 1267464 - RNA, 23 nt, Human
cccagggcugccuccuccccagg

SEQ ID NO: 1267465 - RNA, 18 nt, Human
cccagguggagugggacu

SEQ ID NO: 1267466 - RNA, 21 nt, Human
ccccaugccaggcugcaccug

SEQ ID NO: 1267467 - RNA, 22 nt, Human
ccccaugccaggcugcaccugu

SEQ ID NO: 1267468 - RNA, 27 nt, Human
cccccugccccucccugaccccacaaa

SEQ ID NO: 1267469 - RNA, 19 nt, Human
ccccgccuccacgcucccc

SEQ ID NO: 1267470 - RNA, 22 nt, Human
ccccggagccgccaccggcccc

SEQ ID NO: 1267471 - RNA, 21 nt, Human
ccccugccccucccugacccc

SEQ ID NO: 1267472 - RNA, 21 nt, Human
cccggagccgccaccggcccc

SEQ ID NO: 1267473 - RNA, 19 nt, Human
cccucccuuaccuuauuuu

SEQ ID NO: 1267474 - RNA, 21 nt, Human
cccuccuauggagccucgcag

SEQ ID NO: 1267475 - RNA, 20 nt, Human
cccucuaaggcacuaacccc

SEQ ID NO: 1267476 - RNA, 20 nt, Human
ccuauggagccucgcagccc

SEQ ID NO: 1267477 - RNA, 22 nt, Human
ccucccagccaccagcccuccu

SEQ ID NO: 1267478 - RNA, 22 nt, Human
ccugagggcaggcgcccaggug

SEQ ID NO: 1267479 - RNA, 24 nt, Human
ccuggcccauccucacccaggcuu

SEQ ID NO: 1267480 - RNA, 23 nt, Human
ccuguccgcuacagcugggccca

SEQ ID NO: 1267481 - RNA, 22 nt, Human
cgaccucccagccaccagcccu

SEQ ID NO: 1267482 - RNA, 24 nt, Human
cgaccucccagccaccagcccucc

SEQ ID NO: 1267483 - RNA, 24 nt, Human
cgcgaccucccagccaccagcccu

SEQ ID NO: 1267484 - RNA, 20 nt, Human
cuaaccccgacgucagagac

SEQ ID NO: 1267485 - RNA, 18 nt, Human
cuccccucccccucccca

SEQ ID NO: 1267486 - RNA, 26 nt, Human
cuccugagggcaggcgcccaggugga

SEQ ID NO: 1267487 - RNA, 21 nt, Human
cucuaaaugucaccacccugg

SEQ ID NO: 1267488 - RNA, 20 nt, Human
cucuaaggcacuaaccccga

SEQ ID NO: 1267489 - RNA, 22 nt, Human
cucuccccucccccuccccaaa

SEQ ID NO: 1267490 - RNA, 21 nt, Human
cugcauuaugguacagcuuca

SEQ ID NO: 1267491 - RNA, 20 nt, Human
cugccaggugcccccugccc

SEQ ID NO: 1267492 - RNA, 18 nt, Human
cugggcccaaggaugcug

SEQ ID NO: 1267493 - RNA, 23 nt, Human
cuucauacucagaguucaucuca

SEQ ID NO: 1267494 - RNA, 20 nt, Human
gaagagggcuguuggcugcc

SEQ ID NO: 1267495 - RNA, 25 nt, Human
gauacucuccccucccccuccccaa

SEQ ID NO: 1267496 - RNA, 21 nt, Human
gcagcaggcccagggcugccu

SEQ ID NO: 1267497 - RNA, 20 nt, Human
gcccagggcugccuccuccc

SEQ ID NO: 1267498 - RNA, 23 nt, Human
gccuccagggacccagagaugag

SEQ ID NO: 1267499 - RNA, 21 nt, Human
gccuggcgaauuuucuguuuc

SEQ ID NO: 1267500 - RNA, 21 nt, Human
ggcucacaccacgaagucaga

SEQ ID NO: 1267501 - RNA, 21 nt, Human
ggcuggaaaggcguccgagca

SEQ ID NO: 1267502 - RNA, 25 nt, Human
gggaaugcagagagggaccgguacc

SEQ ID NO: 1267503 - RNA, 19 nt, Human
gugugucuuucagucacag

SEQ ID NO: 1267504 - RNA, 20 nt, Human
guuauuuaaaauaaacaaaa

SEQ ID NO: 1267505 - RNA, 22 nt, Human
uacaaucuguacuagcuagaac

SEQ ID NO: 1267506 - RNA, 22 nt, Human
uacagaaaccguucuaaggcug

SEQ ID NO: 1267507 - RNA, 19 nt, Human
uacucuccccucccccucc

SEQ ID NO: 1267508 - RNA, 26 nt, Human
uagaaccucagaaagugcaaacacac

SEQ ID NO: 1267509 - RNA, 27 nt, Human
uauuccugcuccacccaggaccagagg

SEQ ID NO: 1267510 - RNA, 22 nt, Human
ucaaauaccaaaacaucaaauc

SEQ ID NO: 1267511 - RNA, 21 nt, Human
ucaccgcagcccaaaccacag

SEQ ID NO: 1267512 - RNA, 22 nt, Human
ucaucucaaauaccaaaacauc

SEQ ID NO: 1267513 - RNA, 28 nt, Human
ucccagccaccagcccuccuauggagcc

SEQ ID NO: 1267514 - RNA, 25 nt, Human
ucccaugauacucuccccucccccu

SEQ ID NO: 1267515 - RNA, 18 nt, Human
uccccaaagcagggcccu

SEQ ID NO: 1267516 - RNA, 19 nt, Human
uccccaggcccagccuuuc

SEQ ID NO: 1267517 - RNA, 22 nt, Human
uccccaggcccagccuuuccca

SEQ ID NO: 1267518 - RNA, 19 nt, Human
uccccggagccgccaccgg

SEQ ID NO: 1267519 - RNA, 21 nt, Human
ucccugaaaggaaaaugaaaa

SEQ ID NO: 1267520 - RNA, 22 nt, Human
ucccugaccccacaaaucccug

SEQ ID NO: 1267521 - RNA, 22 nt, Human
uccugcuccacccaggaccaga

SEQ ID NO: 1267522 - RNA, 22 nt, Human
ucgcagcccaggcuccugaggg

SEQ ID NO: 1267523 - RNA, 20 nt, Human
ucuccccucccccuccccaa

SEQ ID NO: 1267524 - RNA, 21 nt, Human
ugagggcaggcgcccaggugg

SEQ ID NO: 1267525 - RNA, 24 nt, Human
ugcuccucuagcuggguguagaaa

SEQ ID NO: 1267526 - RNA, 21 nt, Human
ugcugccaggugcccccugcc

SEQ ID NO: 1267527 - RNA, 26 nt, Human
uggagaagacaacggacggcgucgac

SEQ ID NO: 1267528 - RNA, 19 nt, Human
uggauaccaucucccauga

SEQ ID NO: 1267529 - RNA, 18 nt, Human
uggauguguacagaaacc

SEQ ID NO: 1267530 - RNA, 19 nt, Human
uggccuggcgaauuuucug

SEQ ID NO: 1267531 - RNA, 18 nt, Human
ugggaaugcagagaggga

SEQ ID NO: 1267532 - RNA, 21 nt, Human
ugggacucaccgcagcccaaa

SEQ ID NO: 1267533 - RNA, 18 nt, Human
uguagaaaacaccucuca

SEQ ID NO: 1267534 - RNA, 21 nt, Human
ugucaccacccuggagucggc

SEQ ID NO: 1267535 - RNA, 21 nt, Human
uucauacucagaguucaucuc

SEQ ID NO: 1267536 - RNA, 23 nt, Human
uugaagcaaguauguccaguccu

SEQ ID NO: 1267537 - RNA, 22 nt, Human
uugucacagaaaauaugcugcc

SEQ ID NO: 1267538 - RNA, 18 nt, Human
uuuccuccuuucuaaaau

SEQ ID NO: 1267539 - RNA, 24 nt, Human
uuucuaaaauguaguugaagaaug

SEQ ID NO: 1267540 - RNA, 21 nt, Human
acaggagagacagcaccuaaa

SEQ ID NO: 1267541 - RNA, 21 nt, Human
gagacagcaccuaaaacaaaa

SEQ ID NO: 1267542 - RNA, 24 nt, Human
acauucuaucucgucacagacuga

SEQ ID NO: 1267543 - RNA, 30 nt, Human
augcuucuugaguucggagauuuguucucc

SEQ ID NO: 1267544 - RNA, 23 nt, Human
caaugaauuuuuuccugaagagu

SEQ ID NO: 1267545 - RNA, 23 nt, Human
cugaauggcuuucaguuuccuuc

SEQ ID NO: 1267546 - RNA, 26 nt, Human
uaagagcaagcagacgcucucaguca

SEQ ID NO: 1267547 - RNA, 19 nt, Human
uaaggcuaaaauaagagca

SEQ ID NO: 1267548 - RNA, 21 nt, Human
ucauucucuaaggccuucuua

SEQ ID NO: 1267549 - RNA, 19 nt, Human
ucggagauuuguucuccuu

SEQ ID NO: 1267550 - RNA, 19 nt, Human
ucugcuuuaucagcuccug

SEQ ID NO: 1267551 - RNA, 22 nt, Human
ucuucagcuuguguucucucca

SEQ ID NO: 1267552 - RNA, 24 nt, Human
ugacuaaacacucuaguucacauu

SEQ ID NO: 1267553 - RNA, 20 nt, Human
ugaugugcuagauuucucuc

SEQ ID NO: 1267554 - RNA, 25 nt, Human
uguuucauucucuaaggccuucuua

SEQ ID NO: 1267555 - RNA, 21 nt, Human
uuguuucauucucuaaggccu

SEQ ID NO: 1267556 - RNA, 20 nt, Human
uuuaucagcuccugaugugc

SEQ ID NO: 1267557 - RNA, 21 nt, Human
uuucuugacuaaacacucuag

SEQ ID NO: 1267558 - RNA, 24 nt, Human
uuuucugcuuuaucagcuccugau

SEQ ID NO: 1267559 - RNA, 24 nt, Human
uuuuuucugcuuuaucagcuccug

SEQ ID NO: 1267560 - RNA, 21 nt, Human
aaagcaucccccucagcauca

SEQ ID NO: 1267561 - RNA, 21 nt, Human
aaauguugacaauggugaacu

SEQ ID NO: 1267562 - RNA, 19 nt, Human
aaggcaacauccucucucc

SEQ ID NO: 1267563 - RNA, 25 nt, Human
acgcaacuaaaaugagguugggggc

SEQ ID NO: 1267564 - RNA, 23 nt, Human
agcuggaagcguggggagcaccg

SEQ ID NO: 1267565 - RNA, 22 nt, Human
aggcugacuucagugcugaugu

SEQ ID NO: 1267566 - RNA, 19 nt, Human
agguggccaguaaggcuga

SEQ ID NO: 1267567 - RNA, 18 nt, Human
cacaguacacaggaggca

SEQ ID NO: 1267568 - RNA, 19 nt, Human
cacuucacugcgggagacg

SEQ ID NO: 1267569 - RNA, 23 nt, Human
caucauacugagcaggugucuuc

SEQ ID NO: 1267570 - RNA, 22 nt, Human
cauguccacuucacugcgggag

SEQ ID NO: 1267571 - RNA, 22 nt, Human
ccacuucacugcgggagacgau

SEQ ID NO: 1267572 - RNA, 19 nt, Human
cccuccaagcugagcuugc

SEQ ID NO: 1267573 - RNA, 19 nt, Human
cuaaaaugagguugggggc

SEQ ID NO: 1267574 - RNA, 23 nt, Human
cucugcuaggcaaaggcaacauc

SEQ ID NO: 1267575 - RNA, 19 nt, Human
cugaaugcacuggaccagg

SEQ ID NO: 1267576 - RNA, 27 nt, Human
cugaugguccuuucaauguucaaagca

SEQ ID NO: 1267577 - RNA, 23 nt, Human
cuuugugguccuucucugcuagg

SEQ ID NO: 1267578 - RNA, 26 nt, Human
gaagcuuuuagcucagaagcaucaua

SEQ ID NO: 1267579 - RNA, 23 nt, Human
gcaaaauacaggggcuuguucug

SEQ ID NO: 1267580 - RNA, 22 nt, Human
gcuuguucugaaugcacuggac

SEQ ID NO: 1267581 - RNA, 20 nt, Human
gggacuguuagccacaagcu

SEQ ID NO: 1267582 - RNA, 24 nt, Human
gggcuuguucugaaugcacuggac

SEQ ID NO: 1267583 - RNA, 24 nt, Human
ggguagucguucuuagugucuugc

SEQ ID NO: 1267584 - RNA, 18 nt, Human
ggguguagagugaugacc

SEQ ID NO: 1267585 - RNA, 18 nt, Human
guaaauaguauacauuuu

SEQ ID NO: 1267586 - RNA, 19 nt, Human
uagagugaugacccuccaa

SEQ ID NO: 1267587 - RNA, 26 nt, Human
ucaaagcaucccccucagcaucaaag

SEQ ID NO: 1267588 - RNA, 18 nt, Human
ucagaagcaucauacuga

SEQ ID NO: 1267589 - RNA, 18 nt, Human
ucagcaaaauacaggggc

SEQ ID NO: 1267590 - RNA, 23 nt, Human
ucagugcugauguaaguuccuuu

SEQ ID NO: 1267591 - RNA, 25 nt, Human
ucuccagguggccaguaaggcugac

SEQ ID NO: 1267592 - RNA, 18 nt, Human
ucucugcuaggcaaaggc

SEQ ID NO: 1267593 - RNA, 23 nt, Human
ucucuugaauucagaccuaauuu

SEQ ID NO: 1267594 - RNA, 23 nt, Human
ucuggaagcucaagcuauguugg

SEQ ID NO: 1267595 - RNA, 22 nt, Human
ugcuggauguaauaguacgggg

SEQ ID NO: 1267596 - RNA, 21 nt, Human
ugcuuuuuggguagucguucu

SEQ ID NO: 1267597 - RNA, 25 nt, Human
uggaagcucaagcuauguugggcuu

SEQ ID NO: 1267598 - RNA, 23 nt, Human
uggccaguaaggcugacuucagu

SEQ ID NO: 1267599 - RNA, 19 nt, Human
uguaaguuccuuugugguc

SEQ ID NO: 1267600 - RNA, 18 nt, Human
uuagcuggaagcgugggg

SEQ ID NO: 1267601 - RNA, 21 nt, Human
uucaaagcaucccccucagca

SEQ ID NO: 1267602 - RNA, 18 nt, Human
uucuagaccuguuagcug

SEQ ID NO: 1267603 - RNA, 18 nt, Human
uuggaauguacauuucuu

SEQ ID NO: 1267604 - RNA, 22 nt, Human
uuucuugaugcucucucuugau

SEQ ID NO: 1267605 - RNA, 30 nt, Human
aaaaaggcuccuuucaaguauacuguggaa

SEQ ID NO: 1267606 - RNA, 21 nt, Human
aacacaguacaucacaaaggc

SEQ ID NO: 1267607 - RNA, 24 nt, Human
aacccacaggaaaagagaggaaag

SEQ ID NO: 1267608 - RNA, 23 nt, Human
aaguuugggaggccgaggcagga

SEQ ID NO: 1267609 - RNA, 24 nt, Human
aaucgcucgaacccgggaggcaga

SEQ ID NO: 1267610 - RNA, 20 nt, Human
acacaaaaggagguaaacac

SEQ ID NO: 1267611 - RNA, 20 nt, Human
acagagcaagacuccgucuc

SEQ ID NO: 1267612 - RNA, 24 nt, Human
acagagcaagacuccgucucaaaa

SEQ ID NO: 1267613 - RNA, 20 nt, Human
acagaguaauaaauaauuuc

SEQ ID NO: 1267614 - RNA, 28 nt, Human
acuccgucucaaaaaaaaaaaaaaaaaa

SEQ ID NO: 1267615 - RNA, 23 nt, Human
acugcacuccagccuggugacag

SEQ ID NO: 1267616 - RNA, 25 nt, Human
acugcacuccagccuggugacagag

SEQ ID NO: 1267617 - RNA, 24 nt, Human
agacaaggacaguguaacaguuau

SEQ ID NO: 1267618 - RNA, 23 nt, Human
agacaauguaugcauuauaccaa

SEQ ID NO: 1267619 - RNA, 23 nt, Human
agagguuguagugagccgagauc

SEQ ID NO: 1267620 - RNA, 24 nt, Human
agagguuguagugagccgagaucg

SEQ ID NO: 1267621 - RNA, 20 nt, Human
agcagcacaugucaaugcca

SEQ ID NO: 1267622 - RNA, 21 nt, Human
agccuggugacagagcaagac

SEQ ID NO: 1267623 - RNA, 23 nt, Human
agccuggugacagagcaagacuc

SEQ ID NO: 1267624 - RNA, 20 nt, Human
agccuuaagaauucaauaac

SEQ ID NO: 1267625 - RNA, 21 nt, Human
aggcagagguuguagugagcc

SEQ ID NO: 1267626 - RNA, 24 nt, Human
aggcagagguuguagugagccgag

SEQ ID NO: 1267627 - RNA, 18 nt, Human
aggcaggagaaucgcucg

SEQ ID NO: 1267628 - RNA, 24 nt, Human
aggcaggagaaucgcucgaacccg

SEQ ID NO: 1267629 - RNA, 20 nt, Human
aggccgaggcaggagaaucg

SEQ ID NO: 1267630 - RNA, 20 nt, Human
aucacuaaaaccaccaaaaa

SEQ ID NO: 1267631 - RNA, 24 nt, Human
aucgcgccacugcacuccagccug

SEQ ID NO: 1267632 - RNA, 23 nt, Human
augaaacccacaggaaaagagau

SEQ ID NO: 1267633 - RNA, 20 nt, Human
augaagaaugugaaauaauc

SEQ ID NO: 1267634 - RNA, 22 nt, Human
augucagaauacggcaaaaaca

SEQ ID NO: 1267635 - RNA, 21 nt, Human
caagacuccgucucaaaaaaa

SEQ ID NO: 1267636 - RNA, 20 nt, Human
caaguaaauuaccugaacaa

SEQ ID NO: 1267637 - RNA, 25 nt, Human
caauaaagauagcaucaguaaaaca

SEQ ID NO: 1267638 - RNA, 24 nt, Human
cacgccuguaaucccagaaguuug

SEQ ID NO: 1267639 - RNA, 22 nt, Human
cacuccagccuggugacagagc

SEQ ID NO: 1267640 - RNA, 18 nt, Human
cacugcacuccagccugg

SEQ ID NO: 1267641 - RNA, 20 nt, Human
cacugcacuccagccuggug

SEQ ID NO: 1267642 - RNA, 22 nt, Human
cacugcacuccagccuggugac

SEQ ID NO: 1267643 - RNA, 23 nt, Human
cacugcacuccagccuggugaca

SEQ ID NO: 1267644 - RNA, 24 nt, Human
cacugcacuccagccuggugacag

SEQ ID NO: 1267645 - RNA, 20 nt, Human
cacugcugaaucugaggccu

SEQ ID NO: 1267646 - RNA, 24 nt, Human
cagaaguuugggaggccgaggcag

SEQ ID NO: 1267647 - RNA, 21 nt, Human
cagaauacggcaaaaacaaua

SEQ ID NO: 1267648 - RNA, 24 nt, Human
cagauacaacacaaaaggagguaa

SEQ ID NO: 1267649 - RNA, 20 nt, Human
cagaucaaagaccucucgaa

SEQ ID NO: 1267650 - RNA, 18 nt, Human
ccacugcacuccagccug

SEQ ID NO: 1267651 - RNA, 19 nt, Human
ccacugcacuccagccugg

SEQ ID NO: 1267652 - RNA, 19 nt, Human
ccacugcacuccagccugg

SEQ ID NO: 1267653 - RNA, 23 nt, Human
ccacugcacuccagccuggugac

SEQ ID NO: 1267654 - RNA, 21 nt, Human
ccagauacaacacaaaaggag

SEQ ID NO: 1267655 - RNA, 21 nt, Human
ccuggugacagagcaagacuc

SEQ ID NO: 1267656 - RNA, 22 nt, Human
ccuguaaucccagaaguuuggg

SEQ ID NO: 1267657 - RNA, 24 nt, Human
cgagaucgcgccacugcacuccag

SEQ ID NO: 1267658 - RNA, 24 nt, Human
cgaggcaggagaaucgcucgaacc

SEQ ID NO: 1267659 - RNA, 25 nt, Human
cgccacugcacuccagccuggugac

SEQ ID NO: 1267660 - RNA, 24 nt, Human
cgggaggcagagguuguagugagc

SEQ ID NO: 1267661 - RNA, 24 nt, Human
cguccggggcgggugggcgcaggg

SEQ ID NO: 1267662 - RNA, 20 nt, Human
cuagucaggaauaaaagugc

SEQ ID NO: 1267663 - RNA, 19 nt, Human
cucacgccuguaaucccag

SEQ ID NO: 1267664 - RNA, 19 nt, Human
cucacgccuguaaucccag

SEQ ID NO: 1267665 - RNA, 19 nt, Human
cuccgucucaaaaaaaaaa

SEQ ID NO: 1267666 - RNA, 25 nt, Human
cugaucacuaaaaccaccaaaaaua

SEQ ID NO: 1267667 - RNA, 18 nt, Human
cuuaagaauucaauaacu

SEQ ID NO: 1267668 - RNA, 19 nt, Human
cuuugauaaagaauuuuga

SEQ ID NO: 1267669 - RNA, 23 nt, Human
gacaaacaaauagaacagucaag

SEQ ID NO: 1267670 - RNA, 24 nt, Human
gacagagcaagacuccgucucaaa

SEQ ID NO: 1267671 - RNA, 23 nt, Human
gcacuccagccuggugacagagc

SEQ ID NO: 1267672 - RNA, 20 nt, Human
gccgagaucgcgccacugca

SEQ ID NO: 1267673 - RNA, 23 nt, Human
ggaaagacaaggacaguguaagg

SEQ ID NO: 1267674 - RNA, 27 nt, Human
ggccgaggcaggagaaucgcucgaacc

SEQ ID NO: 1267675 - RNA, 21 nt, Human
ggcucacgccuguaaucccag

SEQ ID NO: 1267676 - RNA, 20 nt, Human
ggcugagaaaaauuauauga

SEQ ID NO: 1267677 - RNA, 21 nt, Human
ggcugggugcgguggcucacg

SEQ ID NO: 1267678 - RNA, 21 nt, Human
gggcuugggccccacguccgg

SEQ ID NO: 1267679 - RNA, 24 nt, Human
gggugcgguggcucacgccuguaa

SEQ ID NO: 1267680 - RNA, 23 nt, Human
gguggcucacgccuguaauccca

SEQ ID NO: 1267681 - RNA, 24 nt, Human
gguggcucacgccuguaaucccag

SEQ ID NO: 1267682 - RNA, 22 nt, Human
gguggcugggugcgguggcuca

SEQ ID NO: 1267683 - RNA, 20 nt, Human
gucacugcugaaucugaggc

SEQ ID NO: 1267684 - RNA, 21 nt, Human
guggcugggugcgguggcuca

SEQ ID NO: 1267685 - RNA, 20 nt, Human
guucuuggccaauacucuga

SEQ ID NO: 1267686 - RNA, 19 nt, Human
guuguagugagccgagauc

SEQ ID NO: 1267687 - RNA, 21 nt, Human
guuguagugagccgagaucgc

SEQ ID NO: 1267688 - RNA, 22 nt, Human
uaaaauggugcaaaucagcucc

SEQ ID NO: 1267689 - RNA, 18 nt, Human
uaaaccccaucacugcca

SEQ ID NO: 1267690 - RNA, 24 nt, Human
uaaaccccaucacugccacaauuu

SEQ ID NO: 1267691 - RNA, 22 nt, Human
uaaugcauaguuaucaguucaa

SEQ ID NO: 1267692 - RNA, 19 nt, Human
uaauuaccagauacaacac

SEQ ID NO: 1267693 - RNA, 21 nt, Human
uacaacacaaaaggagguaaa

SEQ ID NO: 1267694 - RNA, 19 nt, Human
uaccucuuugagacuaucu

SEQ ID NO: 1267695 - RNA, 28 nt, Human
uagaacagucaaguaaauuaccugaaca

SEQ ID NO: 1267696 - RNA, 19 nt, Human
uagcaucaguaaaacaguu

SEQ ID NO: 1267697 - RNA, 18 nt, Human
uaggcaacuucagaugau

SEQ ID NO: 1267698 - RNA, 18 nt, Human
uauaugaagaaugugaaa

SEQ ID NO: 1267699 - RNA, 22 nt, Human
ucaaaaaaaaaaaaaaaaaaaa

SEQ ID NO: 1267700 - RNA, 19 nt, Human
ucagaauacggcaaaaaca

SEQ ID NO: 1267701 - RNA, 25 nt, Human
ucccagaaguuugggaggccgaggc

SEQ ID NO: 1267702 - RNA, 23 nt, Human
uccgucucaaaaaaaaaaaaaaa

SEQ ID NO: 1267703 - RNA, 21 nt, Human
uccugaaccguaaaaaggcuc

SEQ ID NO: 1267704 - RNA, 24 nt, Human
uccugaaccguaaaaaggcuccuu

SEQ ID NO: 1267705 - RNA, 20 nt, Human
uccuuucaaguauacugugg

SEQ ID NO: 1267706 - RNA, 22 nt, Human
ucuauuucacaaaagcuaccau

SEQ ID NO: 1267707 - RNA, 23 nt, Human
ucucgaaucucucucaucauuuu

SEQ ID NO: 1267708 - RNA, 19 nt, Human
ucucucucaucauuuuauc

SEQ ID NO: 1267709 - RNA, 20 nt, Human
ucugucuugggauauuugac

SEQ ID NO: 1267710 - RNA, 20 nt, Human
ucuuugagacuaucuuugau

SEQ ID NO: 1267711 - RNA, 22 nt, Human
ugagccgagaucgcgccacugc

SEQ ID NO: 1267712 - RNA, 20 nt, Human
ugagucuagaaguacagagu

SEQ ID NO: 1267713 - RNA, 26 nt, Human
ugaguuagaagggaucuaagugcuaa

SEQ ID NO: 1267714 - RNA, 19 nt, Human
ugauaaagaauuuugaguc

SEQ ID NO: 1267715 - RNA, 27 nt, Human
uggacaaacaaauagaacagucaagua

SEQ ID NO: 1267716 - RNA, 21 nt, Human
uggcucacgccuguaauccca

SEQ ID NO: 1267717 - RNA, 22 nt, Human
uggcucacgccuguaaucccag

SEQ ID NO: 1267718 - RNA, 23 nt, Human
uggcugggugcgguggcucacgc

SEQ ID NO: 1267719 - RNA, 19 nt, Human
ugggaggccgaggcaggag

SEQ ID NO: 1267720 - RNA, 20 nt, Human
ugggaggccgaggcaggaga

SEQ ID NO: 1267721 - RNA, 22 nt, Human
uguugaugaauuugaaaacgga

SEQ ID NO: 1267722 - RNA, 22 nt, Human
uuaacaaaugaaacccacagga

SEQ ID NO: 1267723 - RNA, 18 nt, Human
uuaccagcuggcuucauu

SEQ ID NO: 1267724 - RNA, 21 nt, Human
uuagaauucauagaaauuugg

SEQ ID NO: 1267725 - RNA, 19 nt, Human
uuaggguaaaguagauaga

SEQ ID NO: 1267726 - RNA, 22 nt, Human
uuauguccuuguuaugucacug

SEQ ID NO: 1267727 - RNA, 24 nt, Human
uugggaggccgaggcaggagaauc

SEQ ID NO: 1267728 - RNA, 18 nt, Human
uuguagugagccgagauc

SEQ ID NO: 1267729 - RNA, 19 nt, Human
uuguagugagccgagaucg

SEQ ID NO: 1267730 - RNA, 22 nt, Human
uuguagugagccgagaucgcgc

SEQ ID NO: 1267731 - RNA, 23 nt, Human
uuucaaaaacuuucagcugaugg

SEQ ID NO: 1267732 - RNA, 21 nt, Human
uuucaucuuauaucucaggca

SEQ ID NO: 1267733 - RNA, 29 nt, Human
uacuaugaaauuuuacauacaugauggaa

SEQ ID NO: 1267734 - RNA, 19 nt, Human
aaccuaaaaauaucaaacu

SEQ ID NO: 1267735 - RNA, 22 nt, Human
aagguuaaguaaucccaguuca

SEQ ID NO: 1267736 - RNA, 18 nt, Human
agcugcugccgcugcaag

SEQ ID NO: 1267737 - RNA, 18 nt, Human
aggacuccuacaaucauu

SEQ ID NO: 1267738 - RNA, 18 nt, Human
augaagcuuaaagucagu

SEQ ID NO: 1267739 - RNA, 20 nt, Human
augaagucagaguuugagga

SEQ ID NO: 1267740 - RNA, 19 nt, Human
caaaacagcuauauagugc

SEQ ID NO: 1267741 - RNA, 18 nt, Human
caacaaccuaaaaauauc

SEQ ID NO: 1267742 - RNA, 22 nt, Human
caacaauauagcauagaauuuu

SEQ ID NO: 1267743 - RNA, 22 nt, Human
cacuuuaacaaaagcaagccaa

SEQ ID NO: 1267744 - RNA, 22 nt, Human
cauauacacuauaauacaaaac

SEQ ID NO: 1267745 - RNA, 18 nt, Human
ccaaaaauaaauacauca

SEQ ID NO: 1267746 - RNA, 25 nt, Human
ccuacaaucauuucugaagguuguu

SEQ ID NO: 1267747 - RNA, 23 nt, Human
cuugccuacuaaaccuucacuuu

SEQ ID NO: 1267748 - RNA, 19 nt, Human
uaaguaaucccaguucaac

SEQ ID NO: 1267749 - RNA, 20 nt, Human
uacaaaacagcuauauagug

SEQ ID NO: 1267750 - RNA, 22 nt, Human
uacaccuuuugaaaauguuuaa

SEQ ID NO: 1267751 - RNA, 20 nt, Human
uauauauguauauauuuaca

SEQ ID NO: 1267752 - RNA, 19 nt, Human
uaucaccguaaauauuuga

SEQ ID NO: 1267753 - RNA, 22 nt, Human
uaucuugccuacuaaaccuuca

SEQ ID NO: 1267754 - RNA, 21 nt, Human
ucaaagguggaggcuuugaaa

SEQ ID NO: 1267755 - RNA, 24 nt, Human
ucagaguuugaggauuagcugcug

SEQ ID NO: 1267756 - RNA, 19 nt, Human
ugaagcuuaaagucagugu

SEQ ID NO: 1267757 - RNA, 21 nt, Human
ugacauaugcuauacugcugu

SEQ ID NO: 1267758 - RNA, 22 nt, Human
ugaccacacuauuagacaaugu

SEQ ID NO: 1267759 - RNA, 20 nt, Human
ugagaugcaaucugaugugg

SEQ ID NO: 1267760 - RNA, 21 nt, Human
ugcuauacugcugugguguca

SEQ ID NO: 1267761 - RNA, 20 nt, Human
uggaggcuuugaaagagaug

SEQ ID NO: 1267762 - RNA, 25 nt, Human
uggaggcuuugaaagagauguuaua

SEQ ID NO: 1267763 - RNA, 20 nt, Human
uguauauauguauauauuua

SEQ ID NO: 1267764 - RNA, 27 nt, Human
uguccuauucucacaguaacugucuca

SEQ ID NO: 1267765 - RNA, 21 nt, Human
uucaacuuuaauguacaaagc

SEQ ID NO: 1267766 - RNA, 24 nt, Human
uucauugaccacacuauuagacaa

SEQ ID NO: 1267767 - RNA, 23 nt, Human
uucccagaugcaggcaauagcug

SEQ ID NO: 1267768 - RNA, 23 nt, Human
uuggauggguaugaucuuggugg

SEQ ID NO: 1267769 - RNA, 23 nt, Human
uuuacacuugaucaacaauauag

SEQ ID NO: 1267770 - RNA, 20 nt, Human
uuucugauuaugacaugacu

SEQ ID NO: 1267771 - RNA, 24 nt, Human
uuuucugauuaugacaugacugcu

SEQ ID NO: 1267772 - RNA, 20 nt, Human
aaagcacaagagcgccucuc

SEQ ID NO: 1267773 - RNA, 19 nt, Human
aaagcgcugggauuacagg

SEQ ID NO: 1267774 - RNA, 24 nt, Human
aaagcgcugggauuacaggcguga

SEQ ID NO: 1267775 - RNA, 18 nt, Human
aacacagcaaaccccguc

SEQ ID NO: 1267776 - RNA, 19 nt, Human
aacacagcaaaccccgucu

SEQ ID NO: 1267777 - RNA, 20 nt, Human
aacacagcaaaccccgucuc

SEQ ID NO: 1267778 - RNA, 19 nt, Human
aaccaacaggacuucccau

SEQ ID NO: 1267779 - RNA, 22 nt, Human
aaccccgucucuccucaagggc

SEQ ID NO: 1267780 - RNA, 20 nt, Human
aagaaaacaaaucauaccaa

SEQ ID NO: 1267781 - RNA, 20 nt, Human
aagcaaccgccuaguucucc

SEQ ID NO: 1267782 - RNA, 21 nt, Human
aagcauggccaagaacugacc

SEQ ID NO: 1267783 - RNA, 23 nt, Human
aagcgcagugcaaagacaaccuc

SEQ ID NO: 1267784 - RNA, 19 nt, Human
aagcgcugggauuacaggc

SEQ ID NO: 1267785 - RNA, 26 nt, Human
aagcgcugggauuacaggcgugagcc

SEQ ID NO: 1267786 - RNA, 19 nt, Human
aagcugcuggccuguuggu

SEQ ID NO: 1267787 - RNA, 24 nt, Human
aaggaaaaggcaaaguucgcagag

SEQ ID NO: 1267788 - RNA, 21 nt, Human
aagggcuuugguggucauuga

SEQ ID NO: 1267789 - RNA, 23 nt, Human
aagugaggaaaagagaauccacu

SEQ ID NO: 1267790 - RNA, 20 nt, Human
aaugaauagaaacuccuccu

SEQ ID NO: 1267791 - RNA, 22 nt, Human
acaaagaugacucaaccaacag

SEQ ID NO: 1267792 - RNA, 18 nt, Human
acaggguuucaccauguu

SEQ ID NO: 1267793 - RNA, 21 nt, Human
acaggguuucaccauguuggc

SEQ ID NO: 1267794 - RNA, 24 nt, Human
acaggguuucaccauguuggccag

SEQ ID NO: 1267795 - RNA, 24 nt, Human
acaguguuuggucuggaauguguu

SEQ ID NO: 1267796 - RNA, 18 nt, Human
accauguuggccagaaug

SEQ ID NO: 1267797 - RNA, 24 nt, Human
accauguuggccagaauggucuug

SEQ ID NO: 1267798 - RNA, 19 nt, Human
acccaggcuggagugcagu

SEQ ID NO: 1267799 - RNA, 18 nt, Human
accugcaccacggcucac

SEQ ID NO: 1267800 - RNA, 24 nt, Human
accugccgggacacccccgugggc

SEQ ID NO: 1267801 - RNA, 23 nt, Human
accuugugaucugcccgccucgc

SEQ ID NO: 1267802 - RNA, 23 nt, Human
acuccaggccacuacuucaacau

SEQ ID NO: 1267803 - RNA, 24 nt, Human
acuuccaccuucagcccuagagca

SEQ ID NO: 1267804 - RNA, 19 nt, Human
agaaacuccuccuauugcc

SEQ ID NO: 1267805 - RNA, 21 nt, Human
agacagcugcccagacucccu

SEQ ID NO: 1267806 - RNA, 19 nt, Human
agagcucucucaaaagcac

SEQ ID NO: 1267807 - RNA, 19 nt, Human
agaggcagacagcugccca

SEQ ID NO: 1267808 - RNA, 21 nt, Human
agaggcagacagcugcccaga

SEQ ID NO: 1267809 - RNA, 18 nt, Human
agaugcuagaagugaccu

SEQ ID NO: 1267810 - RNA, 24 nt, Human
agcgauucuccugccucagccucc

SEQ ID NO: 1267811 - RNA, 18 nt, Human
agcgcugggauuacaggc

SEQ ID NO: 1267812 - RNA, 21 nt, Human
aggaaaagagaauccacuugc

SEQ ID NO: 1267813 - RNA, 18 nt, Human
aggaaaaggcaaaguucg

SEQ ID NO: 1267814 - RNA, 18 nt, Human
aggaacuggugaaaauca

SEQ ID NO: 1267815 - RNA, 25 nt, Human
aggaccuucaauuaauuugccagaa

SEQ ID NO: 1267816 - RNA, 21 nt, Human
aggcaaaguucgcagagugug

SEQ ID NO: 1267817 - RNA, 20 nt, Human
aggcacgcaccaccaugccc

SEQ ID NO: 1267818 - RNA, 21 nt, Human
aggcagggguaggaggaacug

SEQ ID NO: 1267819 - RNA, 23 nt, Human
aggcagggguaggaggaacuggu

SEQ ID NO: 1267820 - RNA, 26 nt, Human
aggcauuggaugggccugagagcuga

SEQ ID NO: 1267821 - RNA, 20 nt, Human
aggccaagcauggccaagaa

SEQ ID NO: 1267822 - RNA, 25 nt, Human
aggcuggagugcaguggcacgaucu

SEQ ID NO: 1267823 - RNA, 27 nt, Human
agggagaggugaggggccacgaugcuu

SEQ ID NO: 1267824 - RNA, 21 nt, Human
agguguagaagugacaaagaa

SEQ ID NO: 1267825 - RNA, 18 nt, Human
aguagcugggauuacagg

SEQ ID NO: 1267826 - RNA, 20 nt, Human
agugcaguggcacgaucucg

SEQ ID NO: 1267827 - RNA, 23 nt, Human
agugcaguggcacgaucucggcu

SEQ ID NO: 1267828 - RNA, 24 nt, Human
agugcaguggcacgaucucggcuc

SEQ ID NO: 1267829 - RNA, 18 nt, Human
augaaacgcagcuuuccc

SEQ ID NO: 1267830 - RNA, 24 nt, Human
caaagcgcugggauuacaggcgug

SEQ ID NO: 1267831 - RNA, 18 nt, Human
caacaggacuucccauga

SEQ ID NO: 1267832 - RNA, 20 nt, Human
caacauugaauacuccaagu

SEQ ID NO: 1267833 - RNA, 19 nt, Human
caagcauggccaagaacug

SEQ ID NO: 1267834 - RNA, 20 nt, Human
caagcgauucuccugccuca

SEQ ID NO: 1267835 - RNA, 22 nt, Human
caagcgauucuccugccucagc

SEQ ID NO: 1267836 - RNA, 23 nt, Human
caagcugcuggccuguuggugcc

SEQ ID NO: 1267837 - RNA, 22 nt, Human
cacacagcacaaagggcuauuc

SEQ ID NO: 1267838 - RNA, 23 nt, Human
cacagcaaaccccgucucuccuc

SEQ ID NO: 1267839 - RNA, 22 nt, Human
caccaccaugcccagcuaauuu

SEQ ID NO: 1267840 - RNA, 24 nt, Human
caccaugcccagcuaauuuuugua

SEQ ID NO: 1267841 - RNA, 22 nt, Human
caccauguuggccagaaugguc

SEQ ID NO: 1267842 - RNA, 23 nt, Human
caccauguuggccagaauggucu

SEQ ID NO: 1267843 - RNA, 24 nt, Human
caccauguuggccagaauggucuu

SEQ ID NO: 1267844 - RNA, 23 nt, Human
cacgcaccaccaugcccagcuaa

SEQ ID NO: 1267845 - RNA, 21 nt, Human
cacugcaaccucugccucccg

SEQ ID NO: 1267846 - RNA, 23 nt, Human
cacugcaaccucugccucccggg

SEQ ID NO: 1267847 - RNA, 19 nt, Human
cacugugcacugccagagc

SEQ ID NO: 1267848 - RNA, 19 nt, Human
cagaggcagggguaggagg

SEQ ID NO: 1267849 - RNA, 18 nt, Human
cagccuucuauuacuuug

SEQ ID NO: 1267850 - RNA, 23 nt, Human
cagcguuacugggucgugaugac

SEQ ID NO: 1267851 - RNA, 24 nt, Human
caggaauggcacuugaagccaccu

SEQ ID NO: 1267852 - RNA, 22 nt, Human
caggggagaggaucaauccacu

SEQ ID NO: 1267853 - RNA, 23 nt, Human
caggguuucaccauguuggccag

SEQ ID NO: 1267854 - RNA, 22 nt, Human
caguguuuggucuggaaugugu

SEQ ID NO: 1267855 - RNA, 22 nt, Human
cauauaacaugcaccacaugua

SEQ ID NO: 1267856 - RNA, 21 nt, Human
caugcaccacauguaucugcu

SEQ ID NO: 1267857 - RNA, 26 nt, Human
cauucuagguucucuuccuguuuuau

SEQ ID NO: 1267858 - RNA, 22 nt, Human
ccaaagcgcugggauuacaggc

SEQ ID NO: 1267859 - RNA, 23 nt, Human
ccaaagcgcugggauuacaggcg

SEQ ID NO: 1267860 - RNA, 24 nt, Human
ccaaagcgcugggauuacaggcgu

SEQ ID NO: 1267861 - RNA, 23 nt, Human
ccaagacacuucuuaguaagcaa

SEQ ID NO: 1267862 - RNA, 22 nt, Human
ccacucuuccuuuuuuuaacuu

SEQ ID NO: 1267863 - RNA, 19 nt, Human
ccagagccgugcauggucc

SEQ ID NO: 1267864 - RNA, 24 nt, Human
ccaugaaacgcagcuuucccuggg

SEQ ID NO: 1267865 - RNA, 21 nt, Human
ccauggucaagaacgcaaagc

SEQ ID NO: 1267866 - RNA, 18 nt, Human
cccagacaggcagcugag

SEQ ID NO: 1267867 - RNA, 19 nt, Human
cccccauuccccccacccc

SEQ ID NO: 1267868 - RNA, 19 nt, Human
ccccccaccccgugugccu

SEQ ID NO: 1267869 - RNA, 20 nt, Human
ccccccauuccccccacccc

SEQ ID NO: 1267870 - RNA, 23 nt, Human
cccgaguagcugggauuacaggc

SEQ ID NO: 1267871 - RNA, 24 nt, Human
cccgaguagcugggauuacaggca

SEQ ID NO: 1267872 - RNA, 19 nt, Human
cccgcacuugccuuccuuu

SEQ ID NO: 1267873 - RNA, 20 nt, Human
cccggguucaagcgauucuc

SEQ ID NO: 1267874 - RNA, 23 nt, Human
cccggguucaagcgauucuccug

SEQ ID NO: 1267875 - RNA, 23 nt, Human
ccgaguagcugggauuacaggca

SEQ ID NO: 1267876 - RNA, 25 nt, Human
ccgcugggaagcagagccguagaga

SEQ ID NO: 1267877 - RNA, 18 nt, Human
ccuacgauucauccaggg

SEQ ID NO: 1267878 - RNA, 23 nt, Human
ccucagcccagcacccugggugc

SEQ ID NO: 1267879 - RNA, 18 nt, Human
ccuccaugaaacgcagcu

SEQ ID NO: 1267880 - RNA, 23 nt, Human
ccucccaccuacgauucauccag

SEQ ID NO: 1267881 - RNA, 24 nt, Human
ccucccggguucaagcgauucucc

SEQ ID NO: 1267882 - RNA, 27 nt, Human
ccugcaccacggcucaccuuucagagg

SEQ ID NO: 1267883 - RNA, 18 nt, Human
ccugccgggacacccccg

SEQ ID NO: 1267884 - RNA, 18 nt, Human
ccugggaaagaggacauc

SEQ ID NO: 1267885 - RNA, 23 nt, Human
cgaacagcgaggggggcaccugc

SEQ ID NO: 1267886 - RNA, 24 nt, Human
cgcugggauuacaggcgugagcca

SEQ ID NO: 1267887 - RNA, 23 nt, Human
cggcucaccuuucagagguucug

SEQ ID NO: 1267888 - RNA, 24 nt, Human
cgugugcccgcugggaagcagagc

SEQ ID NO: 1267889 - RNA, 25 nt, Human
cucaaaagcacaagagcgccucucu

SEQ ID NO: 1267890 - RNA, 18 nt, Human
cucaaugaauagaaacuc

SEQ ID NO: 1267891 - RNA, 19 nt, Human
cucaaugaauagaaacucc

SEQ ID NO: 1267892 - RNA, 24 nt, Human
cucacugcaaccucugccucccgg

SEQ ID NO: 1267893 - RNA, 24 nt, Human
cucagccucccgaguagcugggau

SEQ ID NO: 1267894 - RNA, 25 nt, Human
cucauaaaauagcaagccccagugg

SEQ ID NO: 1267895 - RNA, 20 nt, Human
cuccccccauuccccccacc

SEQ ID NO: 1267896 - RNA, 18 nt, Human
cuccucaagggcuuuggu

SEQ ID NO: 1267897 - RNA, 22 nt, Human
cuccuggaagccuccaugaaac

SEQ ID NO: 1267898 - RNA, 20 nt, Human
cucucccaaagcgcugggau

SEQ ID NO: 1267899 - RNA, 20 nt, Human
cucugucacccaggcuggag

SEQ ID NO: 1267900 - RNA, 23 nt, Human
cucugucacccaggcuggagugc

SEQ ID NO: 1267901 - RNA, 22 nt, Human
cugaaaccagucacugucuccu

SEQ ID NO: 1267902 - RNA, 23 nt, Human
cugaagcaauaggaaauuaaccc

SEQ ID NO: 1267903 - RNA, 23 nt, Human
cugaagcugcggcaguggcccua

SEQ ID NO: 1267904 - RNA, 23 nt, Human
cugcaaccucugccucccggguu

SEQ ID NO: 1267905 - RNA, 24 nt, Human
cugcaaccucugccucccggguuc

SEQ ID NO: 1267906 - RNA, 23 nt, Human
cugccucagccucccgaguagcu

SEQ ID NO: 1267907 - RNA, 21 nt, Human
cugcuuucugaaugcaaaugg

SEQ ID NO: 1267908 - RNA, 21 nt, Human
cuggaagccuccaugaaacgc

SEQ ID NO: 1267909 - RNA, 23 nt, Human
cuggccagccagaggaagagggc

SEQ ID NO: 1267910 - RNA, 21 nt, Human
cugggggagagggagagguga

SEQ ID NO: 1267911 - RNA, 18 nt, Human
cugucacccaggcuggag

SEQ ID NO: 1267912 - RNA, 23 nt, Human
cuguuuaugaaaaacgggaggag

SEQ ID NO: 1267913 - RNA, 19 nt, Human
cuuagccucagcccagcac

SEQ ID NO: 1267914 - RNA, 19 nt, Human
cuuccaccuucagcccuag

SEQ ID NO: 1267915 - RNA, 20 nt, Human
gaacuggugaaaaucagcca

SEQ ID NO: 1267916 - RNA, 18 nt, Human
gaagcagagccguagaga

SEQ ID NO: 1267917 - RNA, 19 nt, Human
gaagcugcggcaguggccc

SEQ ID NO: 1267918 - RNA, 19 nt, Human
gaaucccagucgugugcuu

SEQ ID NO: 1267919 - RNA, 21 nt, Human
gaauggcacuugaagccaccu

SEQ ID NO: 1267920 - RNA, 21 nt, Human
gacccgaacagcgaggggggc

SEQ ID NO: 1267921 - RNA, 22 nt, Human
gaccuugugaucugcccgccuc

SEQ ID NO: 1267922 - RNA, 23 nt, Human
gaccuugugaucugcccgccucg

SEQ ID NO: 1267923 - RNA, 22 nt, Human
gagguucugcacuuuuugggug

SEQ ID NO: 1267924 - RNA, 24 nt, Human
gaguagcugggauuacaggcacgc

SEQ ID NO: 1267925 - RNA, 24 nt, Human
gauuacaggcacgcaccaccaugc

SEQ ID NO: 1267926 - RNA, 18 nt, Human
gauuacaggcgugagcca

SEQ ID NO: 1267927 - RNA, 22 nt, Human
gauuacaggcgugagccacugc

SEQ ID NO: 1267928 - RNA, 22 nt, Human
gauuacaggcgugagccacugc

SEQ ID NO: 1267929 - RNA, 18 nt, Human
gcaaagccacucuuccuu

SEQ ID NO: 1267930 - RNA, 22 nt, Human
gcaaccucugccucccggguuc

SEQ ID NO: 1267931 - RNA, 19 nt, Human
gcacgcaccaccaugccca

SEQ ID NO: 1267932 - RNA, 24 nt, Human
gcagugcaaagacaaccucuuuuu

SEQ ID NO: 1267933 - RNA, 22 nt, Human
gcaucacucaacauucagccug

SEQ ID NO: 1267934 - RNA, 22 nt, Human
gcccagcuaauuuuuguauuuu

SEQ ID NO: 1267935 - RNA, 21 nt, Human
gccguagagaggcagacagcu

SEQ ID NO: 1267936 - RNA, 20 nt, Human
gccucagccucccgaguagc

SEQ ID NO: 1267937 - RNA, 24 nt, Human
gcgauucuccugccucagccuccc

SEQ ID NO: 1267938 - RNA, 19 nt, Human
gcuccccccauucccccca

SEQ ID NO: 1267939 - RNA, 19 nt, Human
gcuggagugcaguggcacg

SEQ ID NO: 1267940 - RNA, 19 nt, Human
ggauaucaucuuuccuuuc

SEQ ID NO: 1267941 - RNA, 25 nt, Human
ggcacuugcaggaauggcacuugaa

SEQ ID NO: 1267942 - RNA, 19 nt, Human
ggcucagagacucuacacc

SEQ ID NO: 1267943 - RNA, 21 nt, Human
gggaagcagagccguagagag

SEQ ID NO: 1267944 - RNA, 21 nt, Human
gggaagccagggaggcccaga

SEQ ID NO: 1267945 - RNA, 22 nt, Human
gggcagccuccuggaagccucc

SEQ ID NO: 1267946 - RNA, 23 nt, Human
gggcuccccccauuccccccacc

SEQ ID NO: 1267947 - RNA, 24 nt, Human
gggcuccccccauuccccccaccc

SEQ ID NO: 1267948 - RNA, 20 nt, Human
ggggagagggagaggugagg

SEQ ID NO: 1267949 - RNA, 22 nt, Human
gggguugccauuucucuaacac

SEQ ID NO: 1267950 - RNA, 22 nt, Human
ggguagacagaauagggaagaa

SEQ ID NO: 1267951 - RNA, 21 nt, Human
gguaggaggaacuggugaaaa

SEQ ID NO: 1267952 - RNA, 23 nt, Human
ggugggaucaggacaguacaggc

SEQ ID NO: 1267953 - RNA, 24 nt, Human
gguuucaccauguuggccagaaug

SEQ ID NO: 1267954 - RNA, 18 nt, Human
guagcugggauuacaggc

SEQ ID NO: 1267955 - RNA, 24 nt, Human
gugaucugcccgccucgcucuccc

SEQ ID NO: 1267956 - RNA, 23 nt, Human
gugugcccgcugggaagcagagc

SEQ ID NO: 1267957 - RNA, 21 nt, Human
gugugugugugugugugugug

SEQ ID NO: 1267958 - RNA, 21 nt, Human
gugugugugugugugugugug

SEQ ID NO: 1267959 - RNA, 25 nt, Human
guucugggggagagggagaggugag

SEQ ID NO: 1267960 - RNA, 22 nt, Human
uaaaagaagaccugaaggggua

SEQ ID NO: 1267961 - RNA, 23 nt, Human
uaacacagcaaaccccgucucuc

SEQ ID NO: 1267962 - RNA, 21 nt, Human
uaagaaaacaaaucauaccaa

SEQ ID NO: 1267963 - RNA, 21 nt, Human
uaagcaaccgccuaguucucc

SEQ ID NO: 1267964 - RNA, 20 nt, Human
uaagcugucauuccacaggg

SEQ ID NO: 1267965 - RNA, 22 nt, Human
uaauuuuuguauuuuuaguaga

SEQ ID NO: 1267966 - RNA, 23 nt, Human
uacaggcgugagccacugcgccc

SEQ ID NO: 1267967 - RNA, 24 nt, Human
uacaggcgugagccacugcgcccu

SEQ ID NO: 1267968 - RNA, 18 nt, Human
uacaguuucagaagaaca

SEQ ID NO: 1267969 - RNA, 22 nt, Human
uagaaacaggguuucaccaugu

SEQ ID NO: 1267970 - RNA, 24 nt, Human
uaguagaaacaggguuucaccaug

SEQ ID NO: 1267971 - RNA, 26 nt, Human
uaguagaaacaggguuucaccauguu

SEQ ID NO: 1267972 - RNA, 24 nt, Human
ucacccaggcuggagugcaguggc

SEQ ID NO: 1267973 - RNA, 24 nt, Human
ucacugcaaccucugccucccggg

SEQ ID NO: 1267974 - RNA, 25 nt, Human
ucacugcaaccucugccucccgggu

SEQ ID NO: 1267975 - RNA, 22 nt, Human
ucagaugcuagaagugaccaga

SEQ ID NO: 1267976 - RNA, 20 nt, Human
ucagccucccgaguagcugg

SEQ ID NO: 1267977 - RNA, 18 nt, Human
uccacuguccaucuucuu

SEQ ID NO: 1267978 - RNA, 21 nt, Human
uccaucuucuuuugcucgcuc

SEQ ID NO: 1267979 - RNA, 24 nt, Human
ucccaaagcgcugggauuacaggc

SEQ ID NO: 1267980 - RNA, 21 nt, Human
ucccaugacuggccagccaga

SEQ ID NO: 1267981 - RNA, 18 nt, Human
uccccaacgcgaagacuc

SEQ ID NO: 1267982 - RNA, 23 nt, Human
uccccaacgcgaagacucaauuc

SEQ ID NO: 1267983 - RNA, 24 nt, Human
ucccgaguagcugggauuacaggc

SEQ ID NO: 1267984 - RNA, 21 nt, Human
ucccggguucaagcgauucuc

SEQ ID NO: 1267985 - RNA, 24 nt, Human
ucccggguucaagcgauucuccug

SEQ ID NO: 1267986 - RNA, 21 nt, Human
ucccugggccacacacugccu

SEQ ID NO: 1267987 - RNA, 27 nt, Human
uccuagguaccagauucgggugcauuu

SEQ ID NO: 1267988 - RNA, 18 nt, Human
ucuaacacagcaaacccc

SEQ ID NO: 1267989 - RNA, 24 nt, Human
ucuccugccucagccucccgagua

SEQ ID NO: 1267990 - RNA, 18 nt, Human
ucugagaccccauuuguc

SEQ ID NO: 1267991 - RNA, 19 nt, Human
ucugggggagagggagagg

SEQ ID NO: 1267992 - RNA, 24 nt, Human
ucugucacccaggcuggagugcag

SEQ ID NO: 1267993 - RNA, 22 nt, Human
ucuugcucugucacccaggcug

SEQ ID NO: 1267994 - RNA, 23 nt, Human
ucuugcucugucacccaggcugg

SEQ ID NO: 1267995 - RNA, 24 nt, Human
ucuugcucugucacccaggcugga

SEQ ID NO: 1267996 - RNA, 22 nt, Human
ugaacaguguuuggucuggaau

SEQ ID NO: 1267997 - RNA, 21 nt, Human
ugacaaagaugacucaaccaa

SEQ ID NO: 1267998 - RNA, 22 nt, Human
ugacaaagaugacucaaccaac

SEQ ID NO: 1267999 - RNA, 22 nt, Human
ugacgcagaccugccgggacac

SEQ ID NO: 1268000 - RNA, 19 nt, Human
ugacugccggggcccugga

SEQ ID NO: 1268001 - RNA, 22 nt, Human
ugagacggagucuugcucuguc

SEQ ID NO: 1268002 - RNA, 19 nt, Human
ugagagcugaagcaggggc

SEQ ID NO: 1268003 - RNA, 25 nt, Human
ugagggaaaggccacuccaggccac

SEQ ID NO: 1268004 - RNA, 23 nt, Human
ugcaaagacaaccucuuuuuaac

SEQ ID NO: 1268005 - RNA, 22 nt, Human
ugcaguggcacgaucucggcuc

SEQ ID NO: 1268006 - RNA, 19 nt, Human
ugccgggacacccccgugg

SEQ ID NO: 1268007 - RNA, 24 nt, Human
ugccucagccucccgaguagcugg

SEQ ID NO: 1268008 - RNA, 23 nt, Human
uggagugcaguggcacgaucucg

SEQ ID NO: 1268009 - RNA, 24 nt, Human
uggagugcaguggcacgaucucgg

SEQ ID NO: 1268010 - RNA, 23 nt, Human
uggcacgcuuugccauagcucuu

SEQ ID NO: 1268011 - RNA, 19 nt, Human
ugggauaucaucuuuccuu

SEQ ID NO: 1268012 - RNA, 21 nt, Human
ugggaucaggacaguacaggc

SEQ ID NO: 1268013 - RNA, 23 nt, Human
ugggaucaggacaguacaggcug

SEQ ID NO: 1268014 - RNA, 21 nt, Human
ugggauuacaggcacgcacca

SEQ ID NO: 1268015 - RNA, 24 nt, Human
ugggauuacaggcacgcaccacca

SEQ ID NO: 1268016 - RNA, 19 nt, Human
ugggauuacaggcgugagc

SEQ ID NO: 1268017 - RNA, 21 nt, Human
ugggauuacaggcgugagcca

SEQ ID NO: 1268018 - RNA, 22 nt, Human
ugggauuacaggcgugagccac

SEQ ID NO: 1268019 - RNA, 22 nt, Human
ugggauuacaggcgugagccac

SEQ ID NO: 1268020 - RNA, 24 nt, Human
ugggauuacaggcgugagccacug

SEQ ID NO: 1268021 - RNA, 24 nt, Human
ugggauuacaggcgugagccacug

SEQ ID NO: 1268022 - RNA, 19 nt, Human
ugggggacuugggcucagg

SEQ ID NO: 1268023 - RNA, 20 nt, Human
ugggggacuugggcucagga

SEQ ID NO: 1268024 - RNA, 20 nt, Human
ugguguucucggcuucuguc

SEQ ID NO: 1268025 - RNA, 21 nt, Human
ugucagaccuucacgaaaggc

SEQ ID NO: 1268026 - RNA, 21 nt, Human
uguccacuguccaucuucuuu

SEQ ID NO: 1268027 - RNA, 19 nt, Human
ugugaaaagggccaagcug

SEQ ID NO: 1268028 - RNA, 18 nt, Human
ugugugugugugugugug

SEQ ID NO: 1268029 - RNA, 18 nt, Human
ugugugugugugugugug

SEQ ID NO: 1268030 - RNA, 18 nt, Human
ugugugugugugugugug

SEQ ID NO: 1268031 - RNA, 18 nt, Human
ugugugugugugugugug

SEQ ID NO: 1268032 - RNA, 18 nt, Human
ugugugugugugugugug

SEQ ID NO: 1268033 - RNA, 18 nt, Human
ugugugugugugugugug

SEQ ID NO: 1268034 - RNA, 18 nt, Human
ugugugugugugugugug

SEQ ID NO: 1268035 - RNA, 18 nt, Human
ugugugugugugugugug

SEQ ID NO: 1268036 - RNA, 18 nt, Human
ugugugugugugugugug

SEQ ID NO: 1268037 - RNA, 18 nt, Human
ugugugugugugugugug

SEQ ID NO: 1268038 - RNA, 18 nt, Human
ugugugugugugugugug

SEQ ID NO: 1268039 - RNA, 21 nt, Human
ugugugugugugugugugugu

SEQ ID NO: 1268040 - RNA, 21 nt, Human
ugugugugugugugugugugu

SEQ ID NO: 1268041 - RNA, 21 nt, Human
ugugugugugugugugugugu

SEQ ID NO: 1268042 - RNA, 21 nt, Human
ugugugugugugugugugugu

SEQ ID NO: 1268043 - RNA, 21 nt, Human
ugugugugugugugugugugu

SEQ ID NO: 1268044 - RNA, 21 nt, Human
ugugugugugugugugugugu

SEQ ID NO: 1268045 - RNA, 21 nt, Human
ugugugugugugugugugugu

SEQ ID NO: 1268046 - RNA, 21 nt, Human
ugugugugugugugugugugu

SEQ ID NO: 1268047 - RNA, 21 nt, Human
ugugugugugugugugugugu

SEQ ID NO: 1268048 - RNA, 21 nt, Human
ugugugugugugugugugugu

SEQ ID NO: 1268049 - RNA, 21 nt, Human
ugugugugugugugugugugu

SEQ ID NO: 1268050 - RNA, 21 nt, Human
ugugugugugugugugugugu

SEQ ID NO: 1268051 - RNA, 21 nt, Human
ugugugugugugugugugugu

SEQ ID NO: 1268052 - RNA, 21 nt, Human
ugugugugugugugugugugu

SEQ ID NO: 1268053 - RNA, 21 nt, Human
ugugugugugugugugugugu

SEQ ID NO: 1268054 - RNA, 21 nt, Human
ugugugugugugugugugugu

SEQ ID NO: 1268055 - RNA, 21 nt, Human
ugugugugugugugugugugu

SEQ ID NO: 1268056 - RNA, 21 nt, Human
ugugugugugugugugugugu

SEQ ID NO: 1268057 - RNA, 22 nt, Human
ugugugugugugugugugugug

SEQ ID NO: 1268058 - RNA, 22 nt, Human
ugugugugugugugugugugug

SEQ ID NO: 1268059 - RNA, 22 nt, Human
ugugugugugugugugugugug

SEQ ID NO: 1268060 - RNA, 22 nt, Human
ugugugugugugugugugugug

SEQ ID NO: 1268061 - RNA, 22 nt, Human
ugugugugugugugugugugug

SEQ ID NO: 1268062 - RNA, 22 nt, Human
ugugugugugugugugugugug

SEQ ID NO: 1268063 - RNA, 22 nt, Human
ugugugugugugugugugugug

SEQ ID NO: 1268064 - RNA, 19 nt, Human
uguugagacccggcgugug

SEQ ID NO: 1268065 - RNA, 20 nt, Human
uguuguugagacccggcgug

SEQ ID NO: 1268066 - RNA, 24 nt, Human
uuaguagaaacaggguuucaccau

SEQ ID NO: 1268067 - RNA, 21 nt, Human
uucaagcgauucuccugccuc

SEQ ID NO: 1268068 - RNA, 23 nt, Human
uucaagcgauucuccugccucag

SEQ ID NO: 1268069 - RNA, 24 nt, Human
uucaagcgauucuccugccucagc

SEQ ID NO: 1268070 - RNA, 19 nt, Human
uuccuguuuuauaagaaaa

SEQ ID NO: 1268071 - RNA, 19 nt, Human
uucuagucuccgacagagg

SEQ ID NO: 1268072 - RNA, 19 nt, Human
uugaagccaccugccuggc

SEQ ID NO: 1268073 - RNA, 24 nt, Human
uugcucugucacccaggcuggagu

SEQ ID NO: 1268074 - RNA, 19 nt, Human
uuucaccauguuggccaga

SEQ ID NO: 1268075 - RNA, 21 nt, Human
uuucaccauguuggccagaau

SEQ ID NO: 1268076 - RNA, 23 nt, Human
uuucagagguucugcacuuuuug

SEQ ID NO: 1268077 - RNA, 24 nt, Human
uuuuuaguagaaacaggguuucac

SEQ ID NO: 1268078 - RNA, 18 nt, Human
uuuuuguauuuuuaguag

SEQ ID NO: 1268079 - RNA, 22 nt, Human
aagcaaacaugugauucuugac

SEQ ID NO: 1268080 - RNA, 24 nt, Human
acaggagcaccacggcggagaagc

SEQ ID NO: 1268081 - RNA, 19 nt, Human
accaggcguccugcacccu

SEQ ID NO: 1268082 - RNA, 19 nt, Human
acucgccucuucucccgcc

SEQ ID NO: 1268083 - RNA, 24 nt, Human
agacaggagcaccacggcggagaa

SEQ ID NO: 1268084 - RNA, 18 nt, Human
aucuucuguuuugcaucu

SEQ ID NO: 1268085 - RNA, 20 nt, Human
auggugcccacagauacacu

SEQ ID NO: 1268086 - RNA, 18 nt, Human
cacucgccucuucucccg

SEQ ID NO: 1268087 - RNA, 22 nt, Human
cagagguaggggcuccguccag

SEQ ID NO: 1268088 - RNA, 23 nt, Human
cagcaggacggccugucuccaag

SEQ ID NO: 1268089 - RNA, 22 nt, Human
cagcauagacaggagcaccacg

SEQ ID NO: 1268090 - RNA, 18 nt, Human
ccacaaggcagaccaggc

SEQ ID NO: 1268091 - RNA, 28 nt, Human
ccaggcguccugcacccuuugggucccc

SEQ ID NO: 1268092 - RNA, 19 nt, Human
cccacaaggcagaccaggc

SEQ ID NO: 1268093 - RNA, 22 nt, Human
cccgccaucugcauggugccca

SEQ ID NO: 1268094 - RNA, 23 nt, Human
ccucucucagcauagacaggagc

SEQ ID NO: 1268095 - RNA, 20 nt, Human
gaacgaagccaggggaagcc

SEQ ID NO: 1268096 - RNA, 22 nt, Human
gcauagacaggagcaccacggc

SEQ ID NO: 1268097 - RNA, 22 nt, Human
gcaugaaaaucuucuguuuugc

SEQ ID NO: 1268098 - RNA, 18 nt, Human
gguacuaggaggcccugc

SEQ ID NO: 1268099 - RNA, 22 nt, Human
ucaucuuugcagagguaggggc

SEQ ID NO: 1268100 - RNA, 23 nt, Human
ugugauucuugacugauucuuuu

SEQ ID NO: 1268101 - RNA, 20 nt, Human
uugcaucuucacucgccucu

SEQ ID NO: 1268102 - RNA, 19 nt, Human
uuuuuugguucagcguuuu

SEQ ID NO: 1268103 - RNA, 19 nt, Human
aacauggugaaacaccguc

SEQ ID NO: 1268104 - RNA, 20 nt, Human
aacauggugaaacaccgucu

SEQ ID NO: 1268105 - RNA, 19 nt, Human
aaugcaagcugcuugcagu

SEQ ID NO: 1268106 - RNA, 24 nt, Human
accugaggucaggaguucgagacc

SEQ ID NO: 1268107 - RNA, 22 nt, Human
acuaacauggugaaacaccguc

SEQ ID NO: 1268108 - RNA, 24 nt, Human
agcacuuuggaaggccgagguggg

SEQ ID NO: 1268109 - RNA, 25 nt, Human
agccugggcaacaagggcaaaacuc

SEQ ID NO: 1268110 - RNA, 18 nt, Human
aggcaggagaaucaccug

SEQ ID NO: 1268111 - RNA, 22 nt, Human
aggcaggagaaucaccugaacc

SEQ ID NO: 1268112 - RNA, 24 nt, Human
aggcaggagaaucaccugaaccug

SEQ ID NO: 1268113 - RNA, 21 nt, Human
aggccgaggugggcggaucac

SEQ ID NO: 1268114 - RNA, 24 nt, Human
aggcugaggcaggagaaucaccug

SEQ ID NO: 1268115 - RNA, 22 nt, Human
aggugggcggaucaccugaggu

SEQ ID NO: 1268116 - RNA, 23 nt, Human
aguagcucaugccuguaauccca

SEQ ID NO: 1268117 - RNA, 24 nt, Human
aguagcucaugccuguaaucccag

SEQ ID NO: 1268118 - RNA, 19 nt, Human
aucacgucauagaggaggu

SEQ ID NO: 1268119 - RNA, 19 nt, Human
augccuguaaucccagcac

SEQ ID NO: 1268120 - RNA, 24 nt, Human
auugcacuccagccugggcaacaa

SEQ ID NO: 1268121 - RNA, 22 nt, Human
cacaaacucacugucaucucuu

SEQ ID NO: 1268122 - RNA, 23 nt, Human
caccugaggucaggaguucgaga

SEQ ID NO: 1268123 - RNA, 23 nt, Human
cacuccagccugggcaacaaggg

SEQ ID NO: 1268124 - RNA, 24 nt, Human
cagcacuuuggaaggccgaggugg

SEQ ID NO: 1268125 - RNA, 24 nt, Human
caugccuguaaucccagcacuuug

SEQ ID NO: 1268126 - RNA, 18 nt, Human
cauugcacuccagccugg

SEQ ID NO: 1268127 - RNA, 19 nt, Human
cauugcacuccagccuggg

SEQ ID NO: 1268128 - RNA, 21 nt, Human
cauugcacuccagccugggca

SEQ ID NO: 1268129 - RNA, 23 nt, Human
cauugcacuccagccugggcaac

SEQ ID NO: 1268130 - RNA, 24 nt, Human
cauugcacuccagccugggcaaca

SEQ ID NO: 1268131 - RNA, 20 nt, Human
ccauugcacuccagccuggg

SEQ ID NO: 1268132 - RNA, 21 nt, Human
ccauugcacuccagccugggc

SEQ ID NO: 1268133 - RNA, 23 nt, Human
ccauugcacuccagccugggcaa

SEQ ID NO: 1268134 - RNA, 24 nt, Human
ccauugcacuccagccugggcaac

SEQ ID NO: 1268135 - RNA, 19 nt, Human
ccccuguagcggggguggg

SEQ ID NO: 1268136 - RNA, 21 nt, Human
cccgugccuguaaccccagcc

SEQ ID NO: 1268137 - RNA, 24 nt, Human
ccggaggcugaggcaggagaauca

SEQ ID NO: 1268138 - RNA, 18 nt, Human
ccgugccuguaaccccag

SEQ ID NO: 1268139 - RNA, 23 nt, Human
ccugacuaacauggugaaacacc

SEQ ID NO: 1268140 - RNA, 24 nt, Human
ccugacuaacauggugaaacaccg

SEQ ID NO: 1268141 - RNA, 22 nt, Human
ccugaggucaggaguucgagac

SEQ ID NO: 1268142 - RNA, 23 nt, Human
ccuguaaccccagcuacuccgga

SEQ ID NO: 1268143 - RNA, 18 nt, Human
ccuguagcgggggugggg

SEQ ID NO: 1268144 - RNA, 24 nt, Human
cgagaccagccugacuaacauggu

SEQ ID NO: 1268145 - RNA, 24 nt, Human
cgaggugggcggaucaccugaggu

SEQ ID NO: 1268146 - RNA, 26 nt, Human
cgaggugggcggaucaccugagguca

SEQ ID NO: 1268147 - RNA, 24 nt, Human
cgccauugcacuccagccugggca

SEQ ID NO: 1268148 - RNA, 24 nt, Human
cggaucaccugaggucaggaguuc

SEQ ID NO: 1268149 - RNA, 23 nt, Human
cucaugccuguaaucccagcacu

SEQ ID NO: 1268150 - RNA, 24 nt, Human
cucaugccuguaaucccagcacuu

SEQ ID NO: 1268151 - RNA, 18 nt, Human
cuuagggggacaaaaacg

SEQ ID NO: 1268152 - RNA, 22 nt, Human
gaacaugucuucuaauccgcac

SEQ ID NO: 1268153 - RNA, 20 nt, Human
gacgcugugggccgcuuucc

SEQ ID NO: 1268154 - RNA, 20 nt, Human
gagaaaauguaagccgagau

SEQ ID NO: 1268155 - RNA, 24 nt, Human
gaucaccugaggucaggaguucga

SEQ ID NO: 1268156 - RNA, 23 nt, Human
gcaggagaaucaccugaaccugu

SEQ ID NO: 1268157 - RNA, 18 nt, Human
gcaguucaucauagcuaa

SEQ ID NO: 1268158 - RNA, 22 nt, Human
gccauugcacuccagccugggc

SEQ ID NO: 1268159 - RNA, 24 nt, Human
gccauugcacuccagccugggcaa

SEQ ID NO: 1268160 - RNA, 19 nt, Human
gcugggcacaguagcucau

SEQ ID NO: 1268161 - RNA, 23 nt, Human
ggacaggggcugggguugugcgu

SEQ ID NO: 1268162 - RNA, 22 nt, Human
ggaucaccugaggucaggaguu

SEQ ID NO: 1268163 - RNA, 23 nt, Human
ggaucaccugaggucaggaguuc

SEQ ID NO: 1268164 - RNA, 25 nt, Human
ggaucaccugaggucaggaguucga

SEQ ID NO: 1268165 - RNA, 23 nt, Human
ggcacaguagcucaugccuguaa

SEQ ID NO: 1268166 - RNA, 22 nt, Human
ggcugguggcccgugccuguaa

SEQ ID NO: 1268167 - RNA, 18 nt, Human
gggcacaguagcucaugc

SEQ ID NO: 1268168 - RNA, 24 nt, Human
gguggcccgugccuguaaccccag

SEQ ID NO: 1268169 - RNA, 22 nt, Human
gguucgcgccauugcacuccag

SEQ ID NO: 1268170 - RNA, 24 nt, Human
uaacacaggauaacgaaaccugca

SEQ ID NO: 1268171 - RNA, 20 nt, Human
uaacauggugaaacaccguc

SEQ ID NO: 1268172 - RNA, 21 nt, Human
uaacauggugaaacaccgucu

SEQ ID NO: 1268173 - RNA, 22 nt, Human
uaacauggugaaacaccgucug

SEQ ID NO: 1268174 - RNA, 19 nt, Human
uaacgaaaccugcacugcu

SEQ ID NO: 1268175 - RNA, 27 nt, Human
uaagccgagaugaugcucaaacuauaa

SEQ ID NO: 1268176 - RNA, 23 nt, Human
uacauagguacuuaaacaugaaa

SEQ ID NO: 1268177 - RNA, 19 nt, Human
uacuccggaggcugaggca

SEQ ID NO: 1268178 - RNA, 22 nt, Human
uagcucaugccuguaaucccag

SEQ ID NO: 1268179 - RNA, 24 nt, Human
uagcucaugccuguaaucccagca

SEQ ID NO: 1268180 - RNA, 20 nt, Human
ucaauuuaucaagcacuuaa

SEQ ID NO: 1268181 - RNA, 20 nt, Human
ucaccugaggucaggaguuc

SEQ ID NO: 1268182 - RNA, 21 nt, Human
uccacagagaaaauguaagcc

SEQ ID NO: 1268183 - RNA, 20 nt, Human
uccugugucucuauuugucu

SEQ ID NO: 1268184 - RNA, 23 nt, Human
ucgcgccauugcacuccagccug

SEQ ID NO: 1268185 - RNA, 24 nt, Human
ugaaaucauagaggcugggcacag

SEQ ID NO: 1268186 - RNA, 18 nt, Human
ugacuaacauggugaaac

SEQ ID NO: 1268187 - RNA, 20 nt, Human
ugaggcaggagaaucaccug

SEQ ID NO: 1268188 - RNA, 24 nt, Human
ugaggcaggagaaucaccugaacc

SEQ ID NO: 1268189 - RNA, 24 nt, Human
ugaggcaggagaaucaccugaacc

SEQ ID NO: 1268190 - RNA, 19 nt, Human
ugcacuccagccugggcaa

SEQ ID NO: 1268191 - RNA, 22 nt, Human
ugcacuccagccugggcaacaa

SEQ ID NO: 1268192 - RNA, 24 nt, Human
ugccuguaaccccagcuacuccgg

SEQ ID NO: 1268193 - RNA, 19 nt, Human
uggaaggccgaggugggcg

SEQ ID NO: 1268194 - RNA, 24 nt, Human
uggaaggccgaggugggcggauca

SEQ ID NO: 1268195 - RNA, 21 nt, Human
uggcccgugccuguaacccca

SEQ ID NO: 1268196 - RNA, 23 nt, Human
uggcccgugccuguaaccccagc

SEQ ID NO: 1268197 - RNA, 24 nt, Human
ugggcggaucaccugaggucagga

SEQ ID NO: 1268198 - RNA, 24 nt, Human
ugguggcccgugccuguaacccca

SEQ ID NO: 1268199 - RNA, 21 nt, Human
ugucuuuggaaaugcaagcug

SEQ ID NO: 1268200 - RNA, 23 nt, Human
uuagcugggcugguggcccgugc

SEQ ID NO: 1268201 - RNA, 19 nt, Human
uuggaaggccgaggugggc

SEQ ID NO: 1268202 - RNA, 25 nt, Human
uuggaaggccgaggugggcggauca

SEQ ID NO: 1268203 - RNA, 22 nt, Human
uuuauuaacuuaguuuugccac

SEQ ID NO: 1268204 - RNA, 19 nt, Human
aaaaaaaggcaaaccccaa

SEQ ID NO: 1268205 - RNA, 22 nt, Human
aaaaaaccauaauggugccaca

SEQ ID NO: 1268206 - RNA, 23 nt, Human
aaaaaaggcaaaccccaaaacgc

SEQ ID NO: 1268207 - RNA, 23 nt, Human
aaaaggcuuggauguuaagagag

SEQ ID NO: 1268208 - RNA, 24 nt, Human
aaacagaacccacguuacacaugg

SEQ ID NO: 1268209 - RNA, 18 nt, Human
aaacagccaaaaaaccau

SEQ ID NO: 1268210 - RNA, 18 nt, Human
aaacagccaaaaaaccau

SEQ ID NO: 1268211 - RNA, 21 nt, Human
aaagggguuaagaaaaccaac

SEQ ID NO: 1268212 - RNA, 21 nt, Human
aacaaaaaaaggcaaacccca

SEQ ID NO: 1268213 - RNA, 24 nt, Human
aacaaaaaaaggcaaaccccaaaa

SEQ ID NO: 1268214 - RNA, 18 nt, Human
aacaacaaaaagcgaggg

SEQ ID NO: 1268215 - RNA, 23 nt, Human
aaccaacaacaacaaaaagcgag

SEQ ID NO: 1268216 - RNA, 20 nt, Human
aagaaaaccaacaacaacaa

SEQ ID NO: 1268217 - RNA, 18 nt, Human
aagcaaaaucagacaacg

SEQ ID NO: 1268218 - RNA, 24 nt, Human
aagcaaaaucuaagcaaaaucaga

SEQ ID NO: 1268219 - RNA, 25 nt, Human
aagcgacaacaaaaaaaggcaaacc

SEQ ID NO: 1268220 - RNA, 21 nt, Human
aagggguuaagaaaaccaaca

SEQ ID NO: 1268221 - RNA, 22 nt, Human
acaaaaaaaggcaaaccccaaa

SEQ ID NO: 1268222 - RNA, 26 nt, Human
accccaaaacgcaaccuaaccaaagc

SEQ ID NO: 1268223 - RNA, 22 nt, Human
agcaaaagagacauccuuuaau

SEQ ID NO: 1268224 - RNA, 21 nt, Human
agggacugucuguugucacug

SEQ ID NO: 1268225 - RNA, 24 nt, Human
caaaacgcaaccuaaccaaagcaa

SEQ ID NO: 1268226 - RNA, 23 nt, Human
caaagcaaaaucuaagcaaaauc

SEQ ID NO: 1268227 - RNA, 18 nt, Human
caacaaaaaaaggcaaac

SEQ ID NO: 1268228 - RNA, 26 nt, Human
caacaaaaaaaggcaaaccccaaaac

SEQ ID NO: 1268229 - RNA, 30 nt, Human
caacaaaaaaaggcaaaccccaaaacgcaa

SEQ ID NO: 1268230 - RNA, 19 nt, Human
caacaacaacaaaaagcga

SEQ ID NO: 1268231 - RNA, 24 nt, Human
cacaguaggauuauugugauaaaa

SEQ ID NO: 1268232 - RNA, 22 nt, Human
caccacuuucagccaccuccuu

SEQ ID NO: 1268233 - RNA, 20 nt, Human
cacuguguugaaacgaggau

SEQ ID NO: 1268234 - RNA, 19 nt, Human
cagccaaaaaaccauaaug

SEQ ID NO: 1268235 - RNA, 22 nt, Human
cagcucuuuaagaagaaugcac

SEQ ID NO: 1268236 - RNA, 24 nt, Human
caucuggacaccacuuucagccac

SEQ ID NO: 1268237 - RNA, 25 nt, Human
cauuuacacggcaaacaggaaugca

SEQ ID NO: 1268238 - RNA, 23 nt, Human
ccagacucccacauugggugagc

SEQ ID NO: 1268239 - RNA, 26 nt, Human
cccaaaacgcaaccuaaccaaagcaa

SEQ ID NO: 1268240 - RNA, 18 nt, Human
cccauaggauuccagagu

SEQ ID NO: 1268241 - RNA, 26 nt, Human
cgaagcagcgaugcauagcuuuccuu

SEQ ID NO: 1268242 - RNA, 18 nt, Human
cgcaaccuaaccaaagca

SEQ ID NO: 1268243 - RNA, 18 nt, Human
cguccacguccgucccac

SEQ ID NO: 1268244 - RNA, 25 nt, Human
cuaacauuuacacggcaaacaggaa

SEQ ID NO: 1268245 - RNA, 25 nt, Human
cuuucuaacauuuacacggcaaaca

SEQ ID NO: 1268246 - RNA, 21 nt, Human
gagcauagcgacaucacgugc

SEQ ID NO: 1268247 - RNA, 19 nt, Human
gaggacucuuagcugauac

SEQ ID NO: 1268248 - RNA, 21 nt, Human
gauggagcagggaagggcauc

SEQ ID NO: 1268249 - RNA, 18 nt, Human
gcaaaaaguuucaucugu

SEQ ID NO: 1268250 - RNA, 19 nt, Human
gcaaaccccaaaacgcaac

SEQ ID NO: 1268251 - RNA, 27 nt, Human
gcuaaacagaacccacguuacaccgug

SEQ ID NO: 1268252 - RNA, 21 nt, Human
gcucgcuugcucaaaccagac

SEQ ID NO: 1268253 - RNA, 18 nt, Human
ggacaucuggacaccacu

SEQ ID NO: 1268254 - RNA, 18 nt, Human
ggaggacucuuagcugau

SEQ ID NO: 1268255 - RNA, 24 nt, Human
ggcaaaccccaaaacgcaaccuaa

SEQ ID NO: 1268256 - RNA, 22 nt, Human
gucccugguggcggauacgccg

SEQ ID NO: 1268257 - RNA, 24 nt, Human
uaaacagaacccacguuacacaug

SEQ ID NO: 1268258 - RNA, 22 nt, Human
uaaagcaaaagagacauccuuu

SEQ ID NO: 1268259 - RNA, 22 nt, Human
uaaccguauauacaaacagcca

SEQ ID NO: 1268260 - RNA, 26 nt, Human
uaagaaaaccaacaacaacaaaaagc

SEQ ID NO: 1268261 - RNA, 25 nt, Human
uaagauuuucuuuuuuuuuuuuaaa

SEQ ID NO: 1268262 - RNA, 19 nt, Human
uaaguucucaacgacagcu

SEQ ID NO: 1268263 - RNA, 23 nt, Human
uaauaacuguauaaaauccaggc

SEQ ID NO: 1268264 - RNA, 24 nt, Human
uacacaugauaacuagagagcaca

SEQ ID NO: 1268265 - RNA, 22 nt, Human
uagcgacaucacgugcgguuuc

SEQ ID NO: 1268266 - RNA, 23 nt, Human
uaucuucgcuaaacagaacccac

SEQ ID NO: 1268267 - RNA, 24 nt, Human
ucacgugcgguuucuuaauguccc

SEQ ID NO: 1268268 - RNA, 24 nt, Human
ucggaaggacaucuggacaccacu

SEQ ID NO: 1268269 - RNA, 24 nt, Human
ugcaguuuaaagcaaaagagacau

SEQ ID NO: 1268270 - RNA, 25 nt, Human
uggcagcaugcaguuuaaagcaaaa

SEQ ID NO: 1268271 - RNA, 25 nt, Human
uuaagaaaaccaacaacaacaaaaa

SEQ ID NO: 1268272 - RNA, 25 nt, Human
uuaagcgacaacaaaaaaaggcaaa

SEQ ID NO: 1268273 - RNA, 18 nt, Human
uucucaacgacagcuuca

SEQ ID NO: 1268274 - RNA, 21 nt, Human
uugcucaaaccagacucccac

SEQ ID NO: 1268275 - RNA, 20 nt, Human
uuggauaguacauaagauuu

SEQ ID NO: 1268276 - RNA, 22 nt, Human
uuggcaauuuuauauuccacag

SEQ ID NO: 1268277 - RNA, 24 nt, Human
uuggcaauuuuauauuccacaguc

SEQ ID NO: 1268278 - RNA, 26 nt, Human
uuuaagcgacaacaaaaaaaggcaaa

SEQ ID NO: 1268279 - RNA, 24 nt, Human
uuucuuuuuuuuuuuuaaauuuuu

SEQ ID NO: 1268280 - RNA, 21 nt, Human
aaaaaaauucaggcagaggca

SEQ ID NO: 1268281 - RNA, 24 nt, Human
aaaguguuaggauuacaggcauga

SEQ ID NO: 1268282 - RNA, 22 nt, Human
aagaaggaaagcugccuaucac

SEQ ID NO: 1268283 - RNA, 26 nt, Human
aaguguuaggauuacaggcaugagcc

SEQ ID NO: 1268284 - RNA, 21 nt, Human
aauuccuaaacauugcaguuu

SEQ ID NO: 1268285 - RNA, 19 nt, Human
accguaauucauugaaccc

SEQ ID NO: 1268286 - RNA, 25 nt, Human
accguguugcccaggcuggucucaa

SEQ ID NO: 1268287 - RNA, 18 nt, Human
acgggguuucaccguguu

SEQ ID NO: 1268288 - RNA, 19 nt, Human
acgggguuucaccguguug

SEQ ID NO: 1268289 - RNA, 24 nt, Human
acgggguuucaccguguugcccag

SEQ ID NO: 1268290 - RNA, 19 nt, Human
acuacaggcgcaugcugcg

SEQ ID NO: 1268291 - RNA, 19 nt, Human
acuuccuuggcaucgaagu

SEQ ID NO: 1268292 - RNA, 21 nt, Human
agaaaaaaaaaacuugacaaa

SEQ ID NO: 1268293 - RNA, 23 nt, Human
agcaaaggccuuguucucccucg

SEQ ID NO: 1268294 - RNA, 21 nt, Human
agcacaaaaccucagcuugca

SEQ ID NO: 1268295 - RNA, 24 nt, Human
aggcaaucuucccaccuuggccuc

SEQ ID NO: 1268296 - RNA, 25 nt, Human
aggcaaucuucccaccuuggccucc

SEQ ID NO: 1268297 - RNA, 23 nt, Human
aggcaugagccacugugccuggc

SEQ ID NO: 1268298 - RNA, 20 nt, Human
aguagagacgggguuucacc

SEQ ID NO: 1268299 - RNA, 21 nt, Human
aguagagacgggguuucaccg

SEQ ID NO: 1268300 - RNA, 21 nt, Human
agugcgguggcuuaaucucag

SEQ ID NO: 1268301 - RNA, 24 nt, Human
auaaaagccucaugcagacacacc

SEQ ID NO: 1268302 - RNA, 22 nt, Human
auccuuuggcagaaucuccuag

SEQ ID NO: 1268303 - RNA, 24 nt, Human
auuuuuuguauuuuaguagagacg

SEQ ID NO: 1268304 - RNA, 24 nt, Human
caaaguguuaggauuacaggcaug

SEQ ID NO: 1268305 - RNA, 22 nt, Human
caaucaauucuccugccucagc

SEQ ID NO: 1268306 - RNA, 24 nt, Human
cacaaucuuaagguuuugccaccu

SEQ ID NO: 1268307 - RNA, 23 nt, Human
cacacguauuacaaacaagcuuc

SEQ ID NO: 1268308 - RNA, 21 nt, Human
caccguguugcccaggcuggu

SEQ ID NO: 1268309 - RNA, 24 nt, Human
caccguguugcccaggcuggucuc

SEQ ID NO: 1268310 - RNA, 27 nt, Human
caccguguugcccaggcuggucucaaa

SEQ ID NO: 1268311 - RNA, 19 nt, Human
cacguauuacaaacaagcu

SEQ ID NO: 1268312 - RNA, 23 nt, Human
cagcaaaggccuuguucucccuc

SEQ ID NO: 1268313 - RNA, 22 nt, Human
cagccccuggcagaaaucacca

SEQ ID NO: 1268314 - RNA, 23 nt, Human
cagccuccugagcagcugggacu

SEQ ID NO: 1268315 - RNA, 22 nt, Human
caggauacauuccuagaaauaa

SEQ ID NO: 1268316 - RNA, 21 nt, Human
caggcagaggcauacauggca

SEQ ID NO: 1268317 - RNA, 18 nt, Human
caugcugcgacgcccggc

SEQ ID NO: 1268318 - RNA, 19 nt, Human
cauguauaaccaauaaaau

SEQ ID NO: 1268319 - RNA, 22 nt, Human
cauuucuucggcgaaggaaugc

SEQ ID NO: 1268320 - RNA, 19 nt, Human
ccaaaguguuaggauuaca

SEQ ID NO: 1268321 - RNA, 24 nt, Human
ccaaaguguuaggauuacaggcau

SEQ ID NO: 1268322 - RNA, 23 nt, Human
cccggguucaaucaauucuccug

SEQ ID NO: 1268323 - RNA, 24 nt, Human
ccucccggguucaaucaauucucc

SEQ ID NO: 1268324 - RNA, 23 nt, Human
ccugagcagcugggacuacaggc

SEQ ID NO: 1268325 - RNA, 24 nt, Human
cggaaucuugcucugucgcccagg

SEQ ID NO: 1268326 - RNA, 24 nt, Human
cgggguuucaccguguugcccagg

SEQ ID NO: 1268327 - RNA, 23 nt, Human
cguguugcccaggcuggucucaa

SEQ ID NO: 1268328 - RNA, 24 nt, Human
cguguugcccaggcuggucucaaa

SEQ ID NO: 1268329 - RNA, 23 nt, Human
cuagaaauaaaaauucugggccc

SEQ ID NO: 1268330 - RNA, 24 nt, Human
cucaggcaaucuucccaccuuggc

SEQ ID NO: 1268331 - RNA, 24 nt, Human
cucagugcaaccucugccucccgg

SEQ ID NO: 1268332 - RNA, 23 nt, Human
cucugucgcccaggcuggagugc

SEQ ID NO: 1268333 - RNA, 23 nt, Human
cugccucagccuccugagcagcu

SEQ ID NO: 1268334 - RNA, 20 nt, Human
cuuauauaguuaguuuuaaa

SEQ ID NO: 1268335 - RNA, 18 nt, Human
gaaaauguguuauacccc

SEQ ID NO: 1268336 - RNA, 21 nt, Human
gaaaauguguuauaccccaag

SEQ ID NO: 1268337 - RNA, 20 nt, Human
gaaauuuauauucccaguag

SEQ ID NO: 1268338 - RNA, 22 nt, Human
gacgggguuucaccguguugcc

SEQ ID NO: 1268339 - RNA, 19 nt, Human
gacuacaggcgcaugcugc

SEQ ID NO: 1268340 - RNA, 23 nt, Human
gagacgggguuucaccguguugc

SEQ ID NO: 1268341 - RNA, 24 nt, Human
gagcacaaaaccucagcuugcauu

SEQ ID NO: 1268342 - RNA, 20 nt, Human
gagcagcugggacuacaggc

SEQ ID NO: 1268343 - RNA, 26 nt, Human
gagcagcugggacuacaggcgcaugc

SEQ ID NO: 1268344 - RNA, 21 nt, Human
gagucuucgaugauugcuuca

SEQ ID NO: 1268345 - RNA, 18 nt, Human
gauuacaggcaugagcca

SEQ ID NO: 1268346 - RNA, 21 nt, Human
gauuacaggcaugagccacug

SEQ ID NO: 1268347 - RNA, 24 nt, Human
gauuacaggcaugagccacugugc

SEQ ID NO: 1268348 - RNA, 19 nt, Human
gcacacguauuacaaacaa

SEQ ID NO: 1268349 - RNA, 19 nt, Human
gcccaggcuggagugcggu

SEQ ID NO: 1268350 - RNA, 24 nt, Human
gccccuggcagaaaucaccauuuc

SEQ ID NO: 1268351 - RNA, 23 nt, Human
gcccggcuaauuuuuuguauuuu

SEQ ID NO: 1268352 - RNA, 22 nt, Human
gccucaugcagacacaccguaa

SEQ ID NO: 1268353 - RNA, 22 nt, Human
gccuucugggguugacagcccu

SEQ ID NO: 1268354 - RNA, 18 nt, Human
ggaucaggcuuuucucuc

SEQ ID NO: 1268355 - RNA, 22 nt, Human
ggauuacaggcaugagccacug

SEQ ID NO: 1268356 - RNA, 24 nt, Human
ggauuacaggcaugagccacugug

SEQ ID NO: 1268357 - RNA, 27 nt, Human
ggccuuguucucccucgugcaaucuca

SEQ ID NO: 1268358 - RNA, 18 nt, Human
ggcuggagugcgguggcu

SEQ ID NO: 1268359 - RNA, 22 nt, Human
gggaacggaaucuugcucuguc

SEQ ID NO: 1268360 - RNA, 23 nt, Human
gggguuucaccguguugcccagg

SEQ ID NO: 1268361 - RNA, 22 nt, Human
ggguuucaccguguugcccagg

SEQ ID NO: 1268362 - RNA, 23 nt, Human
guagagacgggguuucaccgugu

SEQ ID NO: 1268363 - RNA, 24 nt, Human
gugcaaccucugccucccggguuc

SEQ ID NO: 1268364 - RNA, 21 nt, Human
guuuuuucucucucucuuuca

SEQ ID NO: 1268365 - RNA, 20 nt, Human
uaaaaaaauucaggcagagg

SEQ ID NO: 1268366 - RNA, 25 nt, Human
uaaguaaaauucuagaaagucuuag

SEQ ID NO: 1268367 - RNA, 23 nt, Human
uaauuuuuuguauuuuaguagag

SEQ ID NO: 1268368 - RNA, 24 nt, Human
uacacaaucuuaagguuuugccac

SEQ ID NO: 1268369 - RNA, 22 nt, Human
uacaggcaugagccacugugcc

SEQ ID NO: 1268370 - RNA, 21 nt, Human
uaggauuacaggcaugagcca

SEQ ID NO: 1268371 - RNA, 22 nt, Human
uaggauuacaggcaugagccac

SEQ ID NO: 1268372 - RNA, 22 nt, Human
uaggauuacaggcaugagccac

SEQ ID NO: 1268373 - RNA, 23 nt, Human
uaggauuacaggcaugagccacu

SEQ ID NO: 1268374 - RNA, 24 nt, Human
uaggauuacaggcaugagccacug

SEQ ID NO: 1268375 - RNA, 21 nt, Human
uaguagagacgggguuucacc

SEQ ID NO: 1268376 - RNA, 24 nt, Human
uaguagagacgggguuucaccgug

SEQ ID NO: 1268377 - RNA, 26 nt, Human
uaguagagacgggguuucaccguguu

SEQ ID NO: 1268378 - RNA, 23 nt, Human
ucaaagaaaaaaaaaacuugaca

SEQ ID NO: 1268379 - RNA, 26 nt, Human
ucaaagaaaaaaaaaacuugacaaau

SEQ ID NO: 1268380 - RNA, 25 nt, Human
ucaaucaauucuccugccucagccu

SEQ ID NO: 1268381 - RNA, 21 nt, Human
ucaccguguugcccaggcugg

SEQ ID NO: 1268382 - RNA, 24 nt, Human
ucagugcaaccucugccucccggg

SEQ ID NO: 1268383 - RNA, 25 nt, Human
ucauguuacuccucuugcacuuaau

SEQ ID NO: 1268384 - RNA, 24 nt, Human
ucccaaaguguuaggauuacaggc

SEQ ID NO: 1268385 - RNA, 21 nt, Human
ucccggguucaaucaauucuc

SEQ ID NO: 1268386 - RNA, 24 nt, Human
ucccggguucaaucaauucuccug

SEQ ID NO: 1268387 - RNA, 22 nt, Human
ucccucgugcaaucucaaaagc

SEQ ID NO: 1268388 - RNA, 24 nt, Human
uccugagcagcugggacuacaggc

SEQ ID NO: 1268389 - RNA, 22 nt, Human
ucgcccaggcuggagugcggug

SEQ ID NO: 1268390 - RNA, 25 nt, Human
ucuaccagccccuggcagaaaucac

SEQ ID NO: 1268391 - RNA, 23 nt, Human
ucucaaacuccugagcucaggca

SEQ ID NO: 1268392 - RNA, 19 nt, Human
ucucccuuugcccuuauug

SEQ ID NO: 1268393 - RNA, 20 nt, Human
ucucuguuuuucuuguguau

SEQ ID NO: 1268394 - RNA, 24 nt, Human
ucugucgcccaggcuggagugcgg

SEQ ID NO: 1268395 - RNA, 23 nt, Human
ucuugcucugucgcccaggcugg

SEQ ID NO: 1268396 - RNA, 24 nt, Human
ucuugcucugucgcccaggcugga

SEQ ID NO: 1268397 - RNA, 18 nt, Human
ugagaagaaacgaacugu

SEQ ID NO: 1268398 - RNA, 19 nt, Human
ugagaagaaacgaacugug

SEQ ID NO: 1268399 - RNA, 20 nt, Human
ugcaaccucugccucccggg

SEQ ID NO: 1268400 - RNA, 23 nt, Human
ugcaaccucugccucccggguuc

SEQ ID NO: 1268401 - RNA, 24 nt, Human
ugcccaggcuggucucaaacuccu

SEQ ID NO: 1268402 - RNA, 28 nt, Human
ugcccaggcuggucucaaacuccugagc

SEQ ID NO: 1268403 - RNA, 24 nt, Human
ugccucagccuccugagcagcugg

SEQ ID NO: 1268404 - RNA, 19 nt, Human
ugccuuaaaaaauauuugc

SEQ ID NO: 1268405 - RNA, 22 nt, Human
ugcgguggcuuaaucucagcuc

SEQ ID NO: 1268406 - RNA, 23 nt, Human
ugcgguggcuuaaucucagcuca

SEQ ID NO: 1268407 - RNA, 24 nt, Human
ugcucugucgcccaggcuggagug

SEQ ID NO: 1268408 - RNA, 20 nt, Human
uggcaccuauaaaaaugaua

SEQ ID NO: 1268409 - RNA, 24 nt, Human
uggcuuaaucucagcucagugcaa

SEQ ID NO: 1268410 - RNA, 21 nt, Human
ugggacuacaggcgcaugcug

SEQ ID NO: 1268411 - RNA, 22 nt, Human
ugggacuacaggcgcaugcugc

SEQ ID NO: 1268412 - RNA, 24 nt, Human
uguauaaccaauaaaauuggauaa

SEQ ID NO: 1268413 - RNA, 20 nt, Human
ugugucggccuucugggguu

SEQ ID NO: 1268414 - RNA, 22 nt, Human
uguugcccaggcuggucucaaa

SEQ ID NO: 1268415 - RNA, 18 nt, Human
uuaguagagacgggguuu

SEQ ID NO: 1268416 - RNA, 22 nt, Human
uuaguagagacgggguuucacc

SEQ ID NO: 1268417 - RNA, 24 nt, Human
uuaguagagacgggguuucaccgu

SEQ ID NO: 1268418 - RNA, 24 nt, Human
uuauauaguuaguuuuaaaaaucu

SEQ ID NO: 1268419 - RNA, 25 nt, Human
uucaaagaaaaaaaaaacuugacaa

SEQ ID NO: 1268420 - RNA, 22 nt, Human
uuccuaauuuagaaagucuuca

SEQ ID NO: 1268421 - RNA, 22 nt, Human
uuccuagaaauaaaaauucugg

SEQ ID NO: 1268422 - RNA, 20 nt, Human
uuccucaggauacauuccua

SEQ ID NO: 1268423 - RNA, 20 nt, Human
uuccuuggcaucgaagucgc

SEQ ID NO: 1268424 - RNA, 23 nt, Human
uuccuuggcaucgaagucgcuua

SEQ ID NO: 1268425 - RNA, 24 nt, Human
uugcucugucgcccaggcuggagu

SEQ ID NO: 1268426 - RNA, 20 nt, Human
uuggccucccaaaguguuag

SEQ ID NO: 1268427 - RNA, 22 nt, Human
uuucaccguguugcccaggcug

SEQ ID NO: 1268428 - RNA, 23 nt, Human
uuuuaguagagacgggguuucac

SEQ ID NO: 1268429 - RNA, 22 nt, Human
uuuugcauuucuuucaugaaaa

SEQ ID NO: 1268430 - RNA, 20 nt, Human
uuuuuguauuuuaguagaga

SEQ ID NO: 1268431 - RNA, 22 nt, Human
aagacaaaauuucaauuaagga

SEQ ID NO: 1268432 - RNA, 18 nt, Human
agaaagauaaacgauucu

SEQ ID NO: 1268433 - RNA, 22 nt, Human
agcaagagcuucaucauggugu

SEQ ID NO: 1268434 - RNA, 25 nt, Human
caacaggcaucuguccacuuuaaau

SEQ ID NO: 1268435 - RNA, 19 nt, Human
caccuugagucugucuugg

SEQ ID NO: 1268436 - RNA, 25 nt, Human
caggcaucuguccacuuuaaauucu

SEQ ID NO: 1268437 - RNA, 20 nt, Human
caucaaaaaguugcaguugg

SEQ ID NO: 1268438 - RNA, 26 nt, Human
ccaaagacaaaauuucaauuaaggac

SEQ ID NO: 1268439 - RNA, 20 nt, Human
ccguuuaugggguaaacuug

SEQ ID NO: 1268440 - RNA, 24 nt, Human
cuaacuacuuuuuaaaaagcaaga

SEQ ID NO: 1268441 - RNA, 21 nt, Human
cuccaacaggcaucuguccac

SEQ ID NO: 1268442 - RNA, 23 nt, Human
gcaaugaaagaaacaaaguaaga

SEQ ID NO: 1268443 - RNA, 22 nt, Human
gggaaaaaaauuaacaucaaaa

SEQ ID NO: 1268444 - RNA, 23 nt, Human
uaaggacagucugauauuuauau

SEQ ID NO: 1268445 - RNA, 18 nt, Human
uacuaaaauucaugcaga

SEQ ID NO: 1268446 - RNA, 22 nt, Human
uacuuuuuaaaaagcaagagcu

SEQ ID NO: 1268447 - RNA, 20 nt, Human
uccacgcuuccuccaccuug

SEQ ID NO: 1268448 - RNA, 20 nt, Human
ucuggagcuccacagccuuu

SEQ ID NO: 1268449 - RNA, 18 nt, Human
ucugucuuggauggaggu

SEQ ID NO: 1268450 - RNA, 19 nt, Human
ugaaagauguugaagaucc

SEQ ID NO: 1268451 - RNA, 24 nt, Human
ugcacagggaaaaaaauuaacauc

SEQ ID NO: 1268452 - RNA, 18 nt, Human
ugggguaaacuuguaacc

SEQ ID NO: 1268453 - RNA, 19 nt, Human
uuccaaaaauaaaacugca

SEQ ID NO: 1268454 - RNA, 24 nt, Human
uucuuugacugugcacugggagcu

SEQ ID NO: 1268455 - RNA, 23 nt, Human
uuuuuaaaguuuacuaaaauuca

SEQ ID NO: 1268456 - RNA, 18 nt, Human
aaaaaaaaaaaaaccaca

SEQ ID NO: 1268457 - RNA, 21 nt, Human
aaaaaaaaaaccacagacagc

SEQ ID NO: 1268458 - RNA, 24 nt, Human
aaaaaaaaaucuuuuaaaaacaga

SEQ ID NO: 1268459 - RNA, 22 nt, Human
aaaaaaagaaaaaaaugcuuag

SEQ ID NO: 1268460 - RNA, 22 nt, Human
aaggggcugccgggcuuccacc

SEQ ID NO: 1268461 - RNA, 23 nt, Human
aauccacagccgcaaguuucccc

SEQ ID NO: 1268462 - RNA, 19 nt, Human
acagaaaauauaaucucau

SEQ ID NO: 1268463 - RNA, 19 nt, Human
acagccgcaaguuucccca

SEQ ID NO: 1268464 - RNA, 25 nt, Human
accaagagaaaugcuggaaaacggu

SEQ ID NO: 1268465 - RNA, 24 nt, Human
accccucccuuuccggucccccaa

SEQ ID NO: 1268466 - RNA, 21 nt, Human
agccaggcugacagcagcucg

SEQ ID NO: 1268467 - RNA, 26 nt, Human
aggcaauguuuucugguagagaugcu

SEQ ID NO: 1268468 - RNA, 21 nt, Human
aucccugguaaaacagcuggc

SEQ ID NO: 1268469 - RNA, 24 nt, Human
caaaugaaaauaugcuccagacau

SEQ ID NO: 1268470 - RNA, 25 nt, Human
cacccccuacuuccucuaugucucu

SEQ ID NO: 1268471 - RNA, 24 nt, Human
caccccucccuuuccgguccccca

SEQ ID NO: 1268472 - RNA, 24 nt, Human
cacugcguuacgcuacgccacgcc

SEQ ID NO: 1268473 - RNA, 23 nt, Human
cagcuggcagccuuuucuguuuc

SEQ ID NO: 1268474 - RNA, 23 nt, Human
caguuggccugacaacacuuugg

SEQ ID NO: 1268475 - RNA, 21 nt, Human
caucugcuuuucuuuauacuc

SEQ ID NO: 1268476 - RNA, 18 nt, Human
ccacaccucaucgaggca

SEQ ID NO: 1268477 - RNA, 25 nt, Human
ccccaacacugcguuacgcuacgcc

SEQ ID NO: 1268478 - RNA, 20 nt, Human
cccccggagguuccuaaccc

SEQ ID NO: 1268479 - RNA, 24 nt, Human
cccccuauuucucggcggaaaguc

SEQ ID NO: 1268480 - RNA, 19 nt, Human
ccugcggcccaccccuccc

SEQ ID NO: 1268481 - RNA, 19 nt, Human
cgccugcggcccaccccuc

SEQ ID NO: 1268482 - RNA, 20 nt, Human
cggcccaccccucccuuucc

SEQ ID NO: 1268483 - RNA, 21 nt, Human
cggcgccugcggcccaccccu

SEQ ID NO: 1268484 - RNA, 21 nt, Human
cggcggaaagucgcuuccggc

SEQ ID NO: 1268485 - RNA, 24 nt, Human
cguugcaaagaaccaaaaaaagaa

SEQ ID NO: 1268486 - RNA, 20 nt, Human
gaaccaaaaaaagaaaaaaa

SEQ ID NO: 1268487 - RNA, 22 nt, Human
gcccccggagguuccuaacccu

SEQ ID NO: 1268488 - RNA, 19 nt, Human
ggucccccaauccacagcc

SEQ ID NO: 1268489 - RNA, 24 nt, Human
gguguuuuguuuuuuuuuuucuuu

SEQ ID NO: 1268490 - RNA, 19 nt, Human
guaaaacagcuggcagccu

SEQ ID NO: 1268491 - RNA, 23 nt, Human
uaagccaggcugacagcagcucg

SEQ ID NO: 1268492 - RNA, 23 nt, Human
uacaaauuaaaacauuagaucac

SEQ ID NO: 1268493 - RNA, 18 nt, Human
uagaaggggcugccgggc

SEQ ID NO: 1268494 - RNA, 24 nt, Human
ucacugagccaaugccacucacgu

SEQ ID NO: 1268495 - RNA, 25 nt, Human
uccacagccgcaaguuuccccaaca

SEQ ID NO: 1268496 - RNA, 18 nt, Human
ucugagcauccaucccuc

SEQ ID NO: 1268497 - RNA, 28 nt, Human
ugacaacacuuugguuaaaaaaaaaaaa

SEQ ID NO: 1268498 - RNA, 19 nt, Human
ugcaaagaaccaaaaaaag

SEQ ID NO: 1268499 - RNA, 20 nt, Human
ugguaaaacagcuggcagcc

SEQ ID NO: 1268500 - RNA, 23 nt, Human
uguuuggaauuuucauuucugag

SEQ ID NO: 1268501 - RNA, 21 nt, Human
uguuuuuuuuuuucuuuccga

SEQ ID NO: 1268502 - RNA, 24 nt, Human
uuaaaaaaaaaaaaaccacagacu

SEQ ID NO: 1268503 - RNA, 23 nt, Human
uucaguuggccugacaacacuuu

SEQ ID NO: 1268504 - RNA, 19 nt, Human
uucugagcauccaucccuc

SEQ ID NO: 1268505 - RNA, 24 nt, Human
uugcaaagaaccaaaaaaagaaaa

SEQ ID NO: 1268506 - RNA, 19 nt, Human
uugguuaaaaaaaaaaaaa

SEQ ID NO: 1268507 - RNA, 18 nt, Human
uuucucaagccuagccga

SEQ ID NO: 1268508 - RNA, 19 nt, Human
uuuucugguagagaugcuc

SEQ ID NO: 1268509 - RNA, 23 nt, Human
uuuuuuuuuuucuuuccgaauua

SEQ ID NO: 1268510 - RNA, 23 nt, Human
cacaccacccaaggcugauguuu

SEQ ID NO: 1268511 - RNA, 22 nt, Human
cugaggcagucgguguguuucc

SEQ ID NO: 1268512 - RNA, 25 nt, Human
uaccuaucuguauaguuccaggagc

SEQ ID NO: 1268513 - RNA, 25 nt, Human
uaggaacacaccacccaaccuucag

SEQ ID NO: 1268514 - RNA, 23 nt, Human
uaggaacacaccacccaaggcug

SEQ ID NO: 1268515 - RNA, 18 nt, Human
uauauguacacacauaca

SEQ ID NO: 1268516 - RNA, 24 nt, Human
uauguacacacauacaaaggccug

SEQ ID NO: 1268517 - RNA, 22 nt, Human
uccaggagccuacaggcggucg

SEQ ID NO: 1268518 - RNA, 24 nt, Human
ucccuuuggaguuuauauaggaac

SEQ ID NO: 1268519 - RNA, 23 nt, Human
ucugggacaucaauguccacuuu

SEQ ID NO: 1268520 - RNA, 30 nt, Human
ugauguuuuguuauauauauauauauguaa

SEQ ID NO: 1268521 - RNA, 18 nt, Human
ugcugaggcagucggugu

SEQ ID NO: 1268522 - RNA, 22 nt, Human
uguacacacauacaaaggccug

SEQ ID NO: 1268523 - RNA, 25 nt, Human
uguuuuguuauauauauauauaugu

SEQ ID NO: 1268524 - RNA, 20 nt, Human
agcuucgaguggccagcacc

SEQ ID NO: 1268525 - RNA, 20 nt, Human
aguggccagcaccuuggagc

SEQ ID NO: 1268526 - RNA, 19 nt, Human
auggagaucuugggggccu

SEQ ID NO: 1268527 - RNA, 18 nt, Human
caccuuggagcucugguc

SEQ ID NO: 1268528 - RNA, 21 nt, Human
cagccguggcuugaucuucgu

SEQ ID NO: 1268529 - RNA, 18 nt, Human
ccccgagcccgagggcag

SEQ ID NO: 1268530 - RNA, 19 nt, Human
ccccgaggucuccuuccac

SEQ ID NO: 1268531 - RNA, 24 nt, Human
cggcucugggucuccccgaggucu

SEQ ID NO: 1268532 - RNA, 22 nt, Human
cuccuuccacuccaucuuccga

SEQ ID NO: 1268533 - RNA, 20 nt, Human
cugaagcagaaauggccccu

SEQ ID NO: 1268534 - RNA, 24 nt, Human
cuuucaacuuugcaucaggacacu

SEQ ID NO: 1268535 - RNA, 21 nt, Human
gaucacggucuucccagacug

SEQ ID NO: 1268536 - RNA, 19 nt, Human
ggagcuucgaguggccagc

SEQ ID NO: 1268537 - RNA, 19 nt, Human
ggauauccacagcagagcc

SEQ ID NO: 1268538 - RNA, 23 nt, Human
gguacuccucaucauccccgcuc

SEQ ID NO: 1268539 - RNA, 19 nt, Human
guccacaucaggcauggag

SEQ ID NO: 1268540 - RNA, 25 nt, Human
uccacagcagagccugucggagagg

SEQ ID NO: 1268541 - RNA, 21 nt, Human
ugcccccgagcccgagggcag

SEQ ID NO: 1268542 - RNA, 22 nt, Human
uggagcucugguccugaagcag

SEQ ID NO: 1268543 - RNA, 19 nt, Human
uucaacuuugcaucaggac

SEQ ID NO: 1268544 - RNA, 21 nt, Human
uucccggccagucacauccac

SEQ ID NO: 1268545 - RNA, 19 nt, Human
uucuggucacugugauggu

SEQ ID NO: 1268546 - RNA, 19 nt, Human
uugggggccuugaagugca

SEQ ID NO: 1268547 - RNA, 18 nt, Human
acccuccccccccaccac

SEQ ID NO: 1268548 - RNA, 18 nt, Human
caccccuccccggcagcu

SEQ ID NO: 1268549 - RNA, 20 nt, Human
caccccuccccggcagcuca

SEQ ID NO: 1268550 - RNA, 18 nt, Human
cacccuccccccccacca

SEQ ID NO: 1268551 - RNA, 21 nt, Human
cacccuccccccccaccaccc

SEQ ID NO: 1268552 - RNA, 25 nt, Human
cacccuccccccccaccaccccucc

SEQ ID NO: 1268553 - RNA, 19 nt, Human
caccuccccccucccccac

SEQ ID NO: 1268554 - RNA, 22 nt, Human
caccuccccccucccccacccc

SEQ ID NO: 1268555 - RNA, 21 nt, Human
cacuauccuggucaucucccu

SEQ ID NO: 1268556 - RNA, 18 nt, Human
cagcucagccccaccccg

SEQ ID NO: 1268557 - RNA, 23 nt, Human
cagcuucauggcugacaggugac

SEQ ID NO: 1268558 - RNA, 26 nt, Human
caucugagccugcugguuuugacuuu

SEQ ID NO: 1268559 - RNA, 24 nt, Human
caucuuuugccucuucuucaggag

SEQ ID NO: 1268560 - RNA, 22 nt, Human
cauguucauccuucucaucccg

SEQ ID NO: 1268561 - RNA, 23 nt, Human
ccaccaccccuccccggcagcuc

SEQ ID NO: 1268562 - RNA, 18 nt, Human
ccaccuccccccuccccc

SEQ ID NO: 1268563 - RNA, 21 nt, Human
cccaccaccccuccccggcag

SEQ ID NO: 1268564 - RNA, 18 nt, Human
ccccagaccaaagggugg

SEQ ID NO: 1268565 - RNA, 19 nt, Human
ccccagaccaaaggguggg

SEQ ID NO: 1268566 - RNA, 18 nt, Human
cccccaccaccccucccc

SEQ ID NO: 1268567 - RNA, 21 nt, Human
ccccccaccaccccuccccgg

SEQ ID NO: 1268568 - RNA, 25 nt, Human
ccccccgccgcucaccaucugagcc

SEQ ID NO: 1268569 - RNA, 20 nt, Human
ccccccucccccaccccugc

SEQ ID NO: 1268570 - RNA, 24 nt, Human
ccccuccccggcagcucagccccc

SEQ ID NO: 1268571 - RNA, 19 nt, Human
ccccuguuuuccuugguug

SEQ ID NO: 1268572 - RNA, 23 nt, Human
ccccuguuuuccuugguuguguu

SEQ ID NO: 1268573 - RNA, 23 nt, Human
cccugcuugagcacccucccccc

SEQ ID NO: 1268574 - RNA, 21 nt, Human
ccuccauagcggucuuugcuc

SEQ ID NO: 1268575 - RNA, 19 nt, Human
ccuccccggcagcucagcc

SEQ ID NO: 1268576 - RNA, 19 nt, Human
ccucggaucccggcgucuc

SEQ ID NO: 1268577 - RNA, 19 nt, Human
ccucggcggccuugucacc

SEQ ID NO: 1268578 - RNA, 25 nt, Human
ccugcuugagcacccucccccccca

SEQ ID NO: 1268579 - RNA, 22 nt, Human
cuccccccucccccaccccugc

SEQ ID NO: 1268580 - RNA, 23 nt, Human
cugagccugcugguuuugacuuu

SEQ ID NO: 1268581 - RNA, 22 nt, Human
cugcugguuuugacuuuucacu

SEQ ID NO: 1268582 - RNA, 21 nt, Human
cuucauggcugacaggugacc

SEQ ID NO: 1268583 - RNA, 23 nt, Human
cuucucaucccgcugucucuuua

SEQ ID NO: 1268584 - RNA, 22 nt, Human
gagaaaaguggcugcccuccau

SEQ ID NO: 1268585 - RNA, 21 nt, Human
guaagccuccucucggaauuc

SEQ ID NO: 1268586 - RNA, 24 nt, Human
guuuccaccuccccccucccccac

SEQ ID NO: 1268587 - RNA, 23 nt, Human
uaccuuugccucaaagcagacuu

SEQ ID NO: 1268588 - RNA, 23 nt, Human
uaguaagcucggccauguucauc

SEQ ID NO: 1268589 - RNA, 18 nt, Human
uauccuggucaucucccu

SEQ ID NO: 1268590 - RNA, 18 nt, Human
uccccccucccccacccc

SEQ ID NO: 1268591 - RNA, 18 nt, Human
uccccggcagcucagccc

SEQ ID NO: 1268592 - RNA, 19 nt, Human
ucccgcugucucuuuaccc

SEQ ID NO: 1268593 - RNA, 24 nt, Human
uccguaaguacuccuugccccaga

SEQ ID NO: 1268594 - RNA, 20 nt, Human
uccuugccccagaccaaagg

SEQ ID NO: 1268595 - RNA, 21 nt, Human
ucggccauguucauccuucuc

SEQ ID NO: 1268596 - RNA, 21 nt, Human
ucucuuuaccccccgccgcuc

SEQ ID NO: 1268597 - RNA, 23 nt, Human
ucugagccugcugguuuugacuu

SEQ ID NO: 1268598 - RNA, 19 nt, Human
ugagaaaaguggcugcccu

SEQ ID NO: 1268599 - RNA, 25 nt, Human
ugccccagaccaaaggguggggaac

SEQ ID NO: 1268600 - RNA, 24 nt, Human
ugcuugagcacccuccccccccaa

SEQ ID NO: 1268601 - RNA, 23 nt, Human
uggcugcccuccauagcggucuu

SEQ ID NO: 1268602 - RNA, 19 nt, Human
ugucucuuuaccccccgcc

SEQ ID NO: 1268603 - RNA, 24 nt, Human
ugucucuuuaccccccgccgcuca

SEQ ID NO: 1268604 - RNA, 20 nt, Human
uguuuguuuccaccuccccc

SEQ ID NO: 1268605 - RNA, 26 nt, Human
uguuuguuuccaccuccccccucccc

SEQ ID NO: 1268606 - RNA, 24 nt, Human
uuaccccccgccgcucaccaucug

SEQ ID NO: 1268607 - RNA, 21 nt, Human
uucaggaggcaguggagacuu

SEQ ID NO: 1268608 - RNA, 24 nt, Human
uuccuugguuguguuuugcggggg

SEQ ID NO: 1268609 - RNA, 19 nt, Human
uuuguuguuuguuuccacc

SEQ ID NO: 1268610 - RNA, 18 nt, Human
aucaccucugcgugaauc

SEQ ID NO: 1268611 - RNA, 22 nt, Human
cccggagccugggccuucggcc

SEQ ID NO: 1268612 - RNA, 20 nt, Human
uaaccugugagcaucaccuc

SEQ ID NO: 1268613 - RNA, 21 nt, Human
ugaaucccggagccugggccu

SEQ ID NO: 1268614 - RNA, 19 nt, Human
ugagcaucaccucugcgug

SEQ ID NO: 1268615 - RNA, 18 nt, Human
ugugagcaucaccucugc

SEQ ID NO: 1268616 - RNA, 18 nt, Human
ugugagcaucaccucugc

SEQ ID NO: 1268617 - RNA, 20 nt, Human
agagggaaagggauggcugc

SEQ ID NO: 1268618 - RNA, 19 nt, Human
agcuuguuuaacuggugau

SEQ ID NO: 1268619 - RNA, 21 nt, Human
agggaaagggauggcugcugg

SEQ ID NO: 1268620 - RNA, 19 nt, Human
agggauuggcuguucugcu

SEQ ID NO: 1268621 - RNA, 20 nt, Human
aucccacccccauuccugaa

SEQ ID NO: 1268622 - RNA, 19 nt, Human
cagcucccaucccaccccc

SEQ ID NO: 1268623 - RNA, 19 nt, Human
caugcacaggcguggugua

SEQ ID NO: 1268624 - RNA, 23 nt, Human
ccaucccacccccauuccugaac

SEQ ID NO: 1268625 - RNA, 20 nt, Human
ccuguacacaggccugucgu

SEQ ID NO: 1268626 - RNA, 23 nt, Human
cucacguguccacacgguggcca

SEQ ID NO: 1268627 - RNA, 24 nt, Human
cuggugaugggcggcagccaagac

SEQ ID NO: 1268628 - RNA, 23 nt, Human
cuguucugcugugggcuugguca

SEQ ID NO: 1268629 - RNA, 20 nt, Human
gauggcugcugguggaggga

SEQ ID NO: 1268630 - RNA, 22 nt, Human
gcggcagccaagacagagggaa

SEQ ID NO: 1268631 - RNA, 24 nt, Human
ggaaugggcagagaccccagaggg

SEQ ID NO: 1268632 - RNA, 21 nt, Human
ggugaugggcggcagccaaga

SEQ ID NO: 1268633 - RNA, 30 nt, Human
ggugaugggcggcagccaagacagagggaa

SEQ ID NO: 1268634 - RNA, 19 nt, Human
guguagacacacacaugua

SEQ ID NO: 1268635 - RNA, 25 nt, Human
guguagacacacacauguauuuuca

SEQ ID NO: 1268636 - RNA, 24 nt, Human
ucauaugcaugcugggacguguag

SEQ ID NO: 1268637 - RNA, 20 nt, Human
ucccaucccacccccauucc

SEQ ID NO: 1268638 - RNA, 21 nt, Human
ucccaucccacccccauuccu

SEQ ID NO: 1268639 - RNA, 18 nt, Human
ugcaugcucacgugucca

SEQ ID NO: 1268640 - RNA, 19 nt, Human
ugggagaagccuaagcuug

SEQ ID NO: 1268641 - RNA, 23 nt, Human
uguacacaggccugucguacaug

SEQ ID NO: 1268642 - RNA, 27 nt, Human
ugugcaugcucacgugucccggagccc

SEQ ID NO: 1268643 - RNA, 21 nt, Human
uguguugauuuuuguuaaguu

SEQ ID NO: 1268644 - RNA, 22 nt, Human
uucaugcacaggcgugguguac

SEQ ID NO: 1268645 - RNA, 22 nt, Human
uucaugcacaggcgugguguac

SEQ ID NO: 1268646 - RNA, 19 nt, Human
aagcaucuggcuuagucga

SEQ ID NO: 1268647 - RNA, 19 nt, Human
aagccuuuuugggggaugg

SEQ ID NO: 1268648 - RNA, 22 nt, Human
acacccaggguugccaaaacca

SEQ ID NO: 1268649 - RNA, 22 nt, Human
aggaacaugagaagcaucuggc

SEQ ID NO: 1268650 - RNA, 22 nt, Human
aggcaaaggcacugacuacaug

SEQ ID NO: 1268651 - RNA, 19 nt, Human
aggcagguugccaguagga

SEQ ID NO: 1268652 - RNA, 19 nt, Human
agguccauuuugagaauga

SEQ ID NO: 1268653 - RNA, 23 nt, Human
auuacauuugauuguuuuuuaac

SEQ ID NO: 1268654 - RNA, 24 nt, Human
cacacccaggguugccaaaaccac

SEQ ID NO: 1268655 - RNA, 23 nt, Human
ccacacccaggguugccaaaacc

SEQ ID NO: 1268656 - RNA, 23 nt, Human
cccacacccaggguugccaaaac

SEQ ID NO: 1268657 - RNA, 23 nt, Human
cuaaaugguguuuugcuuuccuc

SEQ ID NO: 1268658 - RNA, 23 nt, Human
cuuuuugggggaugguagcccua

SEQ ID NO: 1268659 - RNA, 28 nt, Human
gaagcagcucccacacccaggguugcca

SEQ ID NO: 1268660 - RNA, 23 nt, Human
gcucaggggauguaugaggucac

SEQ ID NO: 1268661 - RNA, 25 nt, Human
ggugcaacacaauuggccaggaggg

SEQ ID NO: 1268662 - RNA, 18 nt, Human
gucuuggauuuuuuuccc

SEQ ID NO: 1268663 - RNA, 26 nt, Human
uaacaucaaccuuucaggugguucag

SEQ ID NO: 1268664 - RNA, 26 nt, Human
ucagaagguacaugggauacugcauu

SEQ ID NO: 1268665 - RNA, 22 nt, Human
ucagugcccaaggugcaacaca

SEQ ID NO: 1268666 - RNA, 20 nt, Human
ucauuuacaaaaugcuauuu

SEQ ID NO: 1268667 - RNA, 20 nt, Human
ucccacacccaggguugcca

SEQ ID NO: 1268668 - RNA, 19 nt, Human
ugccaagagaagcagcucc

SEQ ID NO: 1268669 - RNA, 22 nt, Human
ugcugugauuauggaugagcac

SEQ ID NO: 1268670 - RNA, 23 nt, Human
uggacaggcugggcagagauggu

SEQ ID NO: 1268671 - RNA, 23 nt, Human
uggaugagcacuuaaacacaugg

SEQ ID NO: 1268672 - RNA, 18 nt, Human
uguaccugauuauggaag

SEQ ID NO: 1268673 - RNA, 20 nt, Human
ugugauuuaucauuuugcug

SEQ ID NO: 1268674 - RNA, 20 nt, Human
uuaaaagacuuaaugcagcg

SEQ ID NO: 1268675 - RNA, 19 nt, Human
uugaggcacaaauaugaug

SEQ ID NO: 1268676 - RNA, 19 nt, Human
uugccaaaaccacacgcag

SEQ ID NO: 1268677 - RNA, 22 nt, Human
gcuucuuaaaauuuggucacuu

SEQ ID NO: 1268678 - RNA, 24 nt, Human
agauccaggagguggaggaggagg

SEQ ID NO: 1268679 - RNA, 18 nt, Human
aggaggagaaggccaaga

SEQ ID NO: 1268680 - RNA, 23 nt, Human
aggaggagaaggccaagaagucg

SEQ ID NO: 1268681 - RNA, 24 nt, Human
aggagggggugucccccauggagg

SEQ ID NO: 1268682 - RNA, 21 nt, Human
caggagguggaggaggagggg

SEQ ID NO: 1268683 - RNA, 21 nt, Human
cagucucgcuucaagacgcag

SEQ ID NO: 1268684 - RNA, 20 nt, Human
cauggaggaggagaaggcca

SEQ ID NO: 1268685 - RNA, 19 nt, Human
ccaacacucucgcugaaca

SEQ ID NO: 1268686 - RNA, 19 nt, Human
ccgcagcacgcagagccug

SEQ ID NO: 1268687 - RNA, 21 nt, Human
ccugcgccgcagcacgcagag

SEQ ID NO: 1268688 - RNA, 22 nt, Human
cgccaacacucucgcugaacac

SEQ ID NO: 1268689 - RNA, 19 nt, Human
gccgcagcacgcagagccu

SEQ ID NO: 1268690 - RNA, 20 nt, Human
gcgccgcagcacgcagagcc

SEQ ID NO: 1268691 - RNA, 20 nt, Human
uccaggagguggaggaggag

SEQ ID NO: 1268692 - RNA, 22 nt, Human
ugcagagccuggagugccugcg

SEQ ID NO: 1268693 - RNA, 19 nt, Human
aaagcucaguuuccagcuc

SEQ ID NO: 1268694 - RNA, 24 nt, Human
aaucacuugaaccugggaggcgga

SEQ ID NO: 1268695 - RNA, 18 nt, Human
aauugcacuccagcagca

SEQ ID NO: 1268696 - RNA, 28 nt, Human
aauugcacuccagcagcagaacaguggu

SEQ ID NO: 1268697 - RNA, 26 nt, Human
aauugcacuccagcagcaggggugac

SEQ ID NO: 1268698 - RNA, 22 nt, Human
aggcaggagaaucacuugaacc

SEQ ID NO: 1268699 - RNA, 24 nt, Human
aggcaggagaaucacuugaaccug

SEQ ID NO: 1268700 - RNA, 21 nt, Human
aggcccuggcccagcagccaa

SEQ ID NO: 1268701 - RNA, 21 nt, Human
aggcggagcuugcaaugagcc

SEQ ID NO: 1268702 - RNA, 24 nt, Human
aggcggagcuugcaaugagccgag

SEQ ID NO: 1268703 - RNA, 24 nt, Human
aggcugaggcaggagaaucacuug

SEQ ID NO: 1268704 - RNA, 24 nt, Human
agggaggcugaggcaggagaauca

SEQ ID NO: 1268705 - RNA, 18 nt, Human
auugcacuccagcagcag

SEQ ID NO: 1268706 - RNA, 20 nt, Human
auugcacuccagcagcaggg

SEQ ID NO: 1268707 - RNA, 20 nt, Human
caccaugcuggccucaggag

SEQ ID NO: 1268708 - RNA, 21 nt, Human
cacuugaaccugggaggcgga

SEQ ID NO: 1268709 - RNA, 18 nt, Human
ccagcagccaagagggcc

SEQ ID NO: 1268710 - RNA, 24 nt, Human
ccaggcccuggcccagcagccaag

SEQ ID NO: 1268711 - RNA, 24 nt, Human
cgagauugugcaauugcacuccag

SEQ ID NO: 1268712 - RNA, 23 nt, Human
cugugaucaucacagucccuucu

SEQ ID NO: 1268713 - RNA, 20 nt, Human
cuuugggcugaacccuuuuc

SEQ ID NO: 1268714 - RNA, 23 nt, Human
gagaaucacuugaaccugggagg

SEQ ID NO: 1268715 - RNA, 23 nt, Human
gagcuugcaaugagccgagauug

SEQ ID NO: 1268716 - RNA, 23 nt, Human
gcaggagaaucacuugaaccugg

SEQ ID NO: 1268717 - RNA, 24 nt, Human
ggagcuugcaaugagccgagauug

SEQ ID NO: 1268718 - RNA, 23 nt, Human
gggaggcugaggcaggagaauca

SEQ ID NO: 1268719 - RNA, 19 nt, Human
ucacuugaaccugggaggc

SEQ ID NO: 1268720 - RNA, 21 nt, Human
ucagcugcugucucuggcugc

SEQ ID NO: 1268721 - RNA, 18 nt, Human
ucucuggcugcuaccacc

SEQ ID NO: 1268722 - RNA, 22 nt, Human
ugaaaaaccaggcccuggccca

SEQ ID NO: 1268723 - RNA, 24 nt, Human
ugaggcaggagaaucacuugaacc

SEQ ID NO: 1268724 - RNA, 25 nt, Human
ugaggcaggagaaucacuugaaccu

SEQ ID NO: 1268725 - RNA, 23 nt, Human
ugcacuccagcagcaggggugac

SEQ ID NO: 1268726 - RNA, 22 nt, Human
ugcccugugaaaaaccaggccc

SEQ ID NO: 1268727 - RNA, 26 nt, Human
uggcccagcagccaagagggccggga

SEQ ID NO: 1268728 - RNA, 29 nt, Human
ugggaggcggagcuugcaaugacaacggu

SEQ ID NO: 1268729 - RNA, 21 nt, Human
uggugcccugugaaaaaccag

SEQ ID NO: 1268730 - RNA, 19 nt, Human
uuaaagcucaguuuccagc

SEQ ID NO: 1268731 - RNA, 21 nt, Human
uuaaagcucaguuuccagcuc

SEQ ID NO: 1268732 - RNA, 20 nt, Human
uugaaccugggaggcggagc

SEQ ID NO: 1268733 - RNA, 22 nt, Human
uugcaaugagccgagauugugc

SEQ ID NO: 1268734 - RNA, 25 nt, Human
uuuccagcucccagagauccccuuu

SEQ ID NO: 1268735 - RNA, 23 nt, Human
cccacacauguguccugaggagu

SEQ ID NO: 1268736 - RNA, 22 nt, Human
cgcucucuacuuggcccacaca

SEQ ID NO: 1268737 - RNA, 18 nt, Human
gcccugggggugcagggg

SEQ ID NO: 1268738 - RNA, 18 nt, Human
ggccaugguccuugaggg

SEQ ID NO: 1268739 - RNA, 23 nt, Human
ggggaaguucacagagccauuua

SEQ ID NO: 1268740 - RNA, 22 nt, Human
ucuuggccucugcaccucuccu

SEQ ID NO: 1268741 - RNA, 24 nt, Human
ucuugggcaaaacggucuuggccu

SEQ ID NO: 1268742 - RNA, 20 nt, Human
ugagccccacaaccgaccag

SEQ ID NO: 1268743 - RNA, 20 nt, Human
uggcccacacauguguccug

SEQ ID NO: 1268744 - RNA, 19 nt, Human
uggccucugcaccucuccu

SEQ ID NO: 1268745 - RNA, 18 nt, Human
ugggcaaaacggucuugg

SEQ ID NO: 1268746 - RNA, 19 nt, Human
aaauagcccaguaauaaag

SEQ ID NO: 1268747 - RNA, 23 nt, Human
cccaguaauaaaguuuuauaauc

SEQ ID NO: 1268748 - RNA, 18 nt, Human
uccacaucuuuaagugug

SEQ ID NO: 1268749 - RNA, 25 nt, Human
uggagaauuuacauuccacaucuuu

SEQ ID NO: 1268750 - RNA, 23 nt, Human
uguguaaauagcccaguaauaaa

SEQ ID NO: 1268751 - RNA, 23 nt, Human
uaaggcaccuccagaggaaccgg

SEQ ID NO: 1268752 - RNA, 23 nt, Human
aaaaaaccagaaggaaaugugag

SEQ ID NO: 1268753 - RNA, 19 nt, Human
aaaccagaaggaaauguga

SEQ ID NO: 1268754 - RNA, 18 nt, Human
aacacauccuucccuacc

SEQ ID NO: 1268755 - RNA, 22 nt, Human
acacccacagacucaaaaacac

SEQ ID NO: 1268756 - RNA, 20 nt, Human
agacucaaaaacacccauau

SEQ ID NO: 1268757 - RNA, 28 nt, Human
agaggcaggccgcgaguuccccaagggg

SEQ ID NO: 1268758 - RNA, 25 nt, Human
aggaaaugugagcagugggagaaug

SEQ ID NO: 1268759 - RNA, 19 nt, Human
auagaaacacauccuuccc

SEQ ID NO: 1268760 - RNA, 21 nt, Human
auccauaaaauagaaacacau

SEQ ID NO: 1268761 - RNA, 19 nt, Human
cagaaucuaacagcagccc

SEQ ID NO: 1268762 - RNA, 21 nt, Human
cagccuuuucuuucggggucc

SEQ ID NO: 1268763 - RNA, 22 nt, Human
caggcagcucccgaucuccucu

SEQ ID NO: 1268764 - RNA, 19 nt, Human
caucguugcugggggaaau

SEQ ID NO: 1268765 - RNA, 21 nt, Human
ccacaugcaugcccuccggcu

SEQ ID NO: 1268766 - RNA, 19 nt, Human
ccugcgcaguagggcuguc

SEQ ID NO: 1268767 - RNA, 23 nt, Human
ccuucccuaccucaaaggagaac

SEQ ID NO: 1268768 - RNA, 19 nt, Human
cgcaaaaaaaccagaagga

SEQ ID NO: 1268769 - RNA, 23 nt, Human
cuacggcucugaggcugagcaca

SEQ ID NO: 1268770 - RNA, 21 nt, Human
cuccagcacucugccucaguu

SEQ ID NO: 1268771 - RNA, 22 nt, Human
cuccggcugguuuaugcucuuc

SEQ ID NO: 1268772 - RNA, 21 nt, Human
cuggucucuuggcagaggcag

SEQ ID NO: 1268773 - RNA, 23 nt, Human
gaaaucacuccagcacucugccu

SEQ ID NO: 1268774 - RNA, 23 nt, Human
gacacccacagacucaaaaacac

SEQ ID NO: 1268775 - RNA, 21 nt, Human
gagcagugggagaauggguaa

SEQ ID NO: 1268776 - RNA, 23 nt, Human
gaucuccucucugugacacccac

SEQ ID NO: 1268777 - RNA, 20 nt, Human
gcccauggcccugauaggcc

SEQ ID NO: 1268778 - RNA, 18 nt, Human
gccgagaugcuggucucu

SEQ ID NO: 1268779 - RNA, 19 nt, Human
ggagagaaagcccaugaua

SEQ ID NO: 1268780 - RNA, 19 nt, Human
ggcgaugggaggcugggag

SEQ ID NO: 1268781 - RNA, 19 nt, Human
uaacagcagcccacaugca

SEQ ID NO: 1268782 - RNA, 21 nt, Human
uaugcacacgcaaaaaaacca

SEQ ID NO: 1268783 - RNA, 21 nt, Human
ucaaaaacacccauaugcuca

SEQ ID NO: 1268784 - RNA, 23 nt, Human
ucaugcccauggcccugauaggc

SEQ ID NO: 1268785 - RNA, 23 nt, Human
ucauuguucccuuuccauuucug

SEQ ID NO: 1268786 - RNA, 23 nt, Human
ucccaaagugccugugagcaggc

SEQ ID NO: 1268787 - RNA, 22 nt, Human
ucuccucucugugacacccaca

SEQ ID NO: 1268788 - RNA, 23 nt, Human
ucugugacacccacagacucaaa

SEQ ID NO: 1268789 - RNA, 24 nt, Human
ugacacccacagacucaaaaacac

SEQ ID NO: 1268790 - RNA, 21 nt, Human
ugcacacgcaaaaaaaccaga

SEQ ID NO: 1268791 - RNA, 22 nt, Human
ugcccauggcccugauaggccc

SEQ ID NO: 1268792 - RNA, 23 nt, Human
ugcucauccauaaaauagaaaca

SEQ ID NO: 1268793 - RNA, 19 nt, Human
uucuguggagagaaagccc

SEQ ID NO: 1268794 - RNA, 23 nt, Human
uuggcagaggcaggccgcgaguu

SEQ ID NO: 1268795 - RNA, 19 nt, Human
aaacaauaaugaagaucgc

SEQ ID NO: 1268796 - RNA, 18 nt, Human
aaacauccagugugugac

SEQ ID NO: 1268797 - RNA, 20 nt, Human
aacccuacagcugcgcccga

SEQ ID NO: 1268798 - RNA, 21 nt, Human
acaauaaugaagaucgcacac

SEQ ID NO: 1268799 - RNA, 18 nt, Human
acccacucuuccuuccac

SEQ ID NO: 1268800 - RNA, 25 nt, Human
agcugguacacucuggccugggucu

SEQ ID NO: 1268801 - RNA, 23 nt, Human
aggcggcucgcaugccccagggc

SEQ ID NO: 1268802 - RNA, 18 nt, Human
agguggugagauaagaag

SEQ ID NO: 1268803 - RNA, 25 nt, Human
auaaacaucguuuuuuacuucuucu

SEQ ID NO: 1268804 - RNA, 20 nt, Human
auaagaaguggaacgugaca

SEQ ID NO: 1268805 - RNA, 19 nt, Human
caaaaagaggaaugugaca

SEQ ID NO: 1268806 - RNA, 18 nt, Human
cagaaagaccgacuggca

SEQ ID NO: 1268807 - RNA, 20 nt, Human
cagccuuggucugauccaga

SEQ ID NO: 1268808 - RNA, 21 nt, Human
caguccaaaacgccucggcgg

SEQ ID NO: 1268809 - RNA, 22 nt, Human
cagugugugaccucugcggagc

SEQ ID NO: 1268810 - RNA, 22 nt, Human
caucuuugccaguugucagaag

SEQ ID NO: 1268811 - RNA, 19 nt, Human
ccacuagaaacauccagug

SEQ ID NO: 1268812 - RNA, 19 nt, Human
ccaggccagggacagcucc

SEQ ID NO: 1268813 - RNA, 25 nt, Human
ccagggacagcuccaguuugggggg

SEQ ID NO: 1268814 - RNA, 24 nt, Human
cccaaauuucagcuaccacagaaa

SEQ ID NO: 1268815 - RNA, 24 nt, Human
cccgaggcagaggccaagguccug

SEQ ID NO: 1268816 - RNA, 23 nt, Human
ccuaaggaaacaauaaugaagau

SEQ ID NO: 1268817 - RNA, 27 nt, Human
ccuacagcugcgcccgaacccgccacu

SEQ ID NO: 1268818 - RNA, 21 nt, Human
ccucuggcccgaggcagaggc

SEQ ID NO: 1268819 - RNA, 20 nt, Human
ccuuccuguguuaugucacc

SEQ ID NO: 1268820 - RNA, 24 nt, Human
cgaggcagaggccaagguccuguc

SEQ ID NO: 1268821 - RNA, 20 nt, Human
cuacuacgaaaauacaaaaa

SEQ ID NO: 1268822 - RNA, 19 nt, Human
cucaucugacccacucuuc

SEQ ID NO: 1268823 - RNA, 22 nt, Human
cucgcaugccccagggccagcu

SEQ ID NO: 1268824 - RNA, 24 nt, Human
cugaaggucuucacgggccuccag

SEQ ID NO: 1268825 - RNA, 22 nt, Human
cuugaucuuuucuuuagauuga

SEQ ID NO: 1268826 - RNA, 23 nt, Human
cuuuuaaaucuacuacgaaaaua

SEQ ID NO: 1268827 - RNA, 20 nt, Human
gacacgucucaucugaccca

SEQ ID NO: 1268828 - RNA, 20 nt, Human
gagcucuagggacgcccucc

SEQ ID NO: 1268829 - RNA, 20 nt, Human
gcccucccuaaggaaacaau

SEQ ID NO: 1268830 - RNA, 20 nt, Human
gcugaaggauacacuggcug

SEQ ID NO: 1268831 - RNA, 22 nt, Human
ggcccgaggcagaggccaaggu

SEQ ID NO: 1268832 - RNA, 23 nt, Human
uaaagcauaauuggaauccuugg

SEQ ID NO: 1268833 - RNA, 18 nt, Human
uaccacagaaagaccgac

SEQ ID NO: 1268834 - RNA, 24 nt, Human
uaccacagaaagaccgacuggcag

SEQ ID NO: 1268835 - RNA, 22 nt, Human
uacuacgaaaauacaaaaagag

SEQ ID NO: 1268836 - RNA, 18 nt, Human
ucacgggccuccaggugg

SEQ ID NO: 1268837 - RNA, 24 nt, Human
ucagagacuuucagcucccacuag

SEQ ID NO: 1268838 - RNA, 19 nt, Human
ucaggagcccuugggcaag

SEQ ID NO: 1268839 - RNA, 20 nt, Human
ucaggcugaauaugaggaca

SEQ ID NO: 1268840 - RNA, 23 nt, Human
uccaaaacgccucggcggcgcgc

SEQ ID NO: 1268841 - RNA, 18 nt, Human
ugacacccccaagaccag

SEQ ID NO: 1268842 - RNA, 21 nt, Human
ugaggacaaagugggccacgu

SEQ ID NO: 1268843 - RNA, 23 nt, Human
ugaggacaaagugggccacguuc

SEQ ID NO: 1268844 - RNA, 18 nt, Human
uggcccgaggcagaggcc

SEQ ID NO: 1268845 - RNA, 24 nt, Human
uggcuguguguauuuaucucaauu

SEQ ID NO: 1268846 - RNA, 18 nt, Human
ugggucucugaauucagc

SEQ ID NO: 1268847 - RNA, 24 nt, Human
uguaaaaguuaguaguucuuuuuu

SEQ ID NO: 1268848 - RNA, 20 nt, Human
ugucagaagaauccaagcag

SEQ ID NO: 1268849 - RNA, 21 nt, Human
uuaaaagaggcuugcugaagg

SEQ ID NO: 1268850 - RNA, 22 nt, Human
uucacucccaaauuucagcuac

SEQ ID NO: 1268851 - RNA, 23 nt, Human
uuccuuccuguguuaugucaccg

SEQ ID NO: 1268852 - RNA, 24 nt, Human
uucugauuguugagacauccucug

SEQ ID NO: 1268853 - RNA, 22 nt, Human
uugcugaaggauacacuggcug

SEQ ID NO: 1268854 - RNA, 19 nt, Human
uuucuuaacauauaaacau

SEQ ID NO: 1268855 - RNA, 23 nt, Human
uuuugaaagccacuggggccaau

SEQ ID NO: 1268856 - RNA, 26 nt, Human
aaaucacaaauuuugacauuuggaac

SEQ ID NO: 1268857 - RNA, 21 nt, Human
acaugcuuauuucacacagaa

SEQ ID NO: 1268858 - RNA, 18 nt, Human
agaaagcaaguacaagac

SEQ ID NO: 1268859 - RNA, 25 nt, Human
agaaagcaaguacaagacaugcuua

SEQ ID NO: 1268860 - RNA, 21 nt, Human
agaauaucaaugaagacuuaa

SEQ ID NO: 1268861 - RNA, 19 nt, Human
agccuauuaggaacaugaa

SEQ ID NO: 1268862 - RNA, 20 nt, Human
augaaucagaaagcaaguac

SEQ ID NO: 1268863 - RNA, 27 nt, Human
augucuggaauugaugcuggccuuggg

SEQ ID NO: 1268864 - RNA, 19 nt, Human
cgccuaccgcuugggaacu

SEQ ID NO: 1268865 - RNA, 19 nt, Human
cuggaauugaugcuggccu

SEQ ID NO: 1268866 - RNA, 20 nt, Human
uaaguuuuuaacuucauuua

SEQ ID NO: 1268867 - RNA, 24 nt, Human
uaaguuuuuaacuucauuuagccu

SEQ ID NO: 1268868 - RNA, 24 nt, Human
uccagauagaacauugaaguuuac

SEQ ID NO: 1268869 - RNA, 24 nt, Human
ucccauauguauuuguuuuauccu

SEQ ID NO: 1268870 - RNA, 21 nt, Human
ucucccggcgccgccgccuac

SEQ ID NO: 1268871 - RNA, 26 nt, Human
ucucccggcgccgccgccuaccgcuu

SEQ ID NO: 1268872 - RNA, 23 nt, Human
ugacauuuggaacaauauaauug

SEQ ID NO: 1268873 - RNA, 23 nt, Human
ugcggaagcgcagcuaggcggcg

SEQ ID NO: 1268874 - RNA, 18 nt, Human
ugucuggaauugaugcug

SEQ ID NO: 1268875 - RNA, 27 nt, Human
uguuuuauccuuccagaaagcauauca

SEQ ID NO: 1268876 - RNA, 22 nt, Human
uucccauauguauuuguuuuau

SEQ ID NO: 1268877 - RNA, 18 nt, Human
aggcaggagaaucacuug

SEQ ID NO: 1268878 - RNA, 21 nt, Human
aggcaggagaaucacuugaac

SEQ ID NO: 1268879 - RNA, 24 nt, Human
aggcugaggcaggagaaucacuug

SEQ ID NO: 1268880 - RNA, 24 nt, Human
agguggaggucgcagugagcugag

SEQ ID NO: 1268881 - RNA, 23 nt, Human
auggugccauugcacuccagcuu

SEQ ID NO: 1268882 - RNA, 24 nt, Human
caaagugucauuuuuauauugaaa

SEQ ID NO: 1268883 - RNA, 24 nt, Human
caguuacuugggaggcugaggcag

SEQ ID NO: 1268884 - RNA, 24 nt, Human
caugccuguaaucccaguuacuug

SEQ ID NO: 1268885 - RNA, 21 nt, Human
cauugcacuccagcuuuuuca

SEQ ID NO: 1268886 - RNA, 23 nt, Human
ccauugcacuccagcuuuuucag

SEQ ID NO: 1268887 - RNA, 24 nt, Human
ccauugcacuccagcuuuuucagc

SEQ ID NO: 1268888 - RNA, 18 nt, Human
ccuguaaucccaguuacu

SEQ ID NO: 1268889 - RNA, 21 nt, Human
ccuguaaucccaguuacuugg

SEQ ID NO: 1268890 - RNA, 22 nt, Human
ccuguaaucccaguuacuuggg

SEQ ID NO: 1268891 - RNA, 23 nt, Human
gagaaucacuugaacaugggagg

SEQ ID NO: 1268892 - RNA, 23 nt, Human
gagauggugccauugcacuccag

SEQ ID NO: 1268893 - RNA, 19 nt, Human
gcaggagaaucacuugaac

SEQ ID NO: 1268894 - RNA, 20 nt, Human
gccuguaaucccaguuacuu

SEQ ID NO: 1268895 - RNA, 18 nt, Human
ggaggucgcagugagcug

SEQ ID NO: 1268896 - RNA, 24 nt, Human
ggaggucgcagugagcugagaugg

SEQ ID NO: 1268897 - RNA, 20 nt, Human
ggaggucgcagugagcuggc

SEQ ID NO: 1268898 - RNA, 24 nt, Human
gggcaugguggcgcaugccuguaa

SEQ ID NO: 1268899 - RNA, 19 nt, Human
gguggaggucgcagugagc

SEQ ID NO: 1268900 - RNA, 24 nt, Human
gguggcgcaugccuguaaucccag

SEQ ID NO: 1268901 - RNA, 22 nt, Human
ucgcagugagcugagauggugc

SEQ ID NO: 1268902 - RNA, 20 nt, Human
ugaggcaggagaaucacuug

SEQ ID NO: 1268903 - RNA, 23 nt, Human
ugaggcaggagaaucacuugaac

SEQ ID NO: 1268904 - RNA, 24 nt, Human
ugccuguaaucccaguuacuuggg

SEQ ID NO: 1268905 - RNA, 18 nt, Human
uggaggucgcagugagcu

SEQ ID NO: 1268906 - RNA, 21 nt, Human
uggcgcaugccuguaauccca

SEQ ID NO: 1268907 - RNA, 22 nt, Human
uggcgcaugccuguaaucccag

SEQ ID NO: 1268908 - RNA, 19 nt, Human
ugggaggcugaggcaggag

SEQ ID NO: 1268909 - RNA, 24 nt, Human
ugggaggcugaggcaggagaauca

SEQ ID NO: 1268910 - RNA, 29 nt, Human
ugggagguggaggucgcagugacaacggu

SEQ ID NO: 1268911 - RNA, 24 nt, Human
ugggagguggaggucgcagugagc

SEQ ID NO: 1268912 - RNA, 24 nt, Human
ugguggcgcaugccuguaauccca

SEQ ID NO: 1268913 - RNA, 18 nt, Human
uuaguggggcaugguggc

SEQ ID NO: 1268914 - RNA, 20 nt, Human
uuaguggggcaugguggcgc

SEQ ID NO: 1268915 - RNA, 25 nt, Human
uugggaggcugaggcaggagaauca

SEQ ID NO: 1268916 - RNA, 20 nt, Human
aaaaaaaaaaacugcaggga

SEQ ID NO: 1268917 - RNA, 23 nt, Human
aaaaaaaacugcagggauagcau

SEQ ID NO: 1268918 - RNA, 23 nt, Human
aaaaggagaugauuaucugcagg

SEQ ID NO: 1268919 - RNA, 24 nt, Human
aaaagguugcuuuugacccaaggc

SEQ ID NO: 1268920 - RNA, 19 nt, Human
aaacaacucuagcagagac

SEQ ID NO: 1268921 - RNA, 22 nt, Human
aaacauacacacacacaccccc

SEQ ID NO: 1268922 - RNA, 24 nt, Human
aaacaugggccuguuagaaaaaaa

SEQ ID NO: 1268923 - RNA, 18 nt, Human
aaagauucuccuaccuca

SEQ ID NO: 1268924 - RNA, 22 nt, Human
aaagauucuccuaccucagccu

SEQ ID NO: 1268925 - RNA, 20 nt, Human
aaagccagugugcagcagga

SEQ ID NO: 1268926 - RNA, 19 nt, Human
aaagccuuuugaaauccac

SEQ ID NO: 1268927 - RNA, 23 nt, Human
aaaggcagcugggucuccaaaga

SEQ ID NO: 1268928 - RNA, 24 nt, Human
aaagugcugggauuacaggcauga

SEQ ID NO: 1268929 - RNA, 21 nt, Human
aacacgugacucaaaucagga

SEQ ID NO: 1268930 - RNA, 20 nt, Human
aacauagacaaagaaaagga

SEQ ID NO: 1268931 - RNA, 22 nt, Human
aaccugacuuaacaaaaacaca

SEQ ID NO: 1268932 - RNA, 23 nt, Human
aagaaugacucuuaaacugaauc

SEQ ID NO: 1268933 - RNA, 19 nt, Human
aagacugcuaucucuaagc

SEQ ID NO: 1268934 - RNA, 18 nt, Human
aagcaguggauucuugag

SEQ ID NO: 1268935 - RNA, 20 nt, Human
aagcaguggauucuugagga

SEQ ID NO: 1268936 - RNA, 24 nt, Human
aaggaguaucagcaauuuggcuug

SEQ ID NO: 1268937 - RNA, 19 nt, Human
aagugcugggauuacaggc

SEQ ID NO: 1268938 - RNA, 21 nt, Human
aagugcugggauuacaggcau

SEQ ID NO: 1268939 - RNA, 18 nt, Human
aaguuagggcucagcugg

SEQ ID NO: 1268940 - RNA, 18 nt, Human
acacacccccacacaugc

SEQ ID NO: 1268941 - RNA, 24 nt, Human
acaccugcagacugaagaauacac

SEQ ID NO: 1268942 - RNA, 18 nt, Human
acuuggguccuccauuuc

SEQ ID NO: 1268943 - RNA, 18 nt, Human
agaaaaaaaaaaacugca

SEQ ID NO: 1268944 - RNA, 21 nt, Human
agaaaucuacugcuccaggau

SEQ ID NO: 1268945 - RNA, 18 nt, Human
agaagccugaugacaugc

SEQ ID NO: 1268946 - RNA, 21 nt, Human
agacugaaggugauuccaaga

SEQ ID NO: 1268947 - RNA, 19 nt, Human
agagaaaggcauagaggcg

SEQ ID NO: 1268948 - RNA, 20 nt, Human
agagagcaagauucccaaug

SEQ ID NO: 1268949 - RNA, 21 nt, Human
agcacacaagaaacaaagaca

SEQ ID NO: 1268950 - RNA, 22 nt, Human
agcaguuucuuagguuacagca

SEQ ID NO: 1268951 - RNA, 19 nt, Human
agccuuccauucuugaaga

SEQ ID NO: 1268952 - RNA, 22 nt, Human
agcuccauggaagcacagccuc

SEQ ID NO: 1268953 - RNA, 23 nt, Human
aggaaggaaguuuggcaaaugga

SEQ ID NO: 1268954 - RNA, 20 nt, Human
aggaaguccguggagguagg

SEQ ID NO: 1268955 - RNA, 24 nt, Human
aggcagcuucugauuuccaagaag

SEQ ID NO: 1268956 - RNA, 25 nt, Human
aggcuggagugcaguggugcgaucu

SEQ ID NO: 1268957 - RNA, 19 nt, Human
agguaggugggagccggaa

SEQ ID NO: 1268958 - RNA, 24 nt, Human
aggugauccaccugccuuggccuc

SEQ ID NO: 1268959 - RNA, 22 nt, Human
aggugauuccaagaccuucucu

SEQ ID NO: 1268960 - RNA, 22 nt, Human
aguagagacugggcuuugccau

SEQ ID NO: 1268961 - RNA, 21 nt, Human
aguagcugggauuacaggcau

SEQ ID NO: 1268962 - RNA, 21 nt, Human
agugcaguggugcgaucucag

SEQ ID NO: 1268963 - RNA, 23 nt, Human
agugcaguggugcgaucucagcu

SEQ ID NO: 1268964 - RNA, 24 nt, Human
agugcaguggugcgaucucagcuc

SEQ ID NO: 1268965 - RNA, 21 nt, Human
agugcugccuguaagcaugug

SEQ ID NO: 1268966 - RNA, 24 nt, Human
aguggugcgaucucagcucacugc

SEQ ID NO: 1268967 - RNA, 22 nt, Human
augucaucuuuucuuuucuugg

SEQ ID NO: 1268968 - RNA, 22 nt, Human
caaaauugcuguacauacaaac

SEQ ID NO: 1268969 - RNA, 24 nt, Human
caaagugcugggauuacaggcaug

SEQ ID NO: 1268970 - RNA, 21 nt, Human
caagauucccaaugaaauuca

SEQ ID NO: 1268971 - RNA, 25 nt, Human
cacacacacacccccacacaugccc

SEQ ID NO: 1268972 - RNA, 22 nt, Human
cacacacccccacacaugccac

SEQ ID NO: 1268973 - RNA, 25 nt, Human
cacaccugcagacugaagaauacac

SEQ ID NO: 1268974 - RNA, 19 nt, Human
cacacggucuuccuucugg

SEQ ID NO: 1268975 - RNA, 24 nt, Human
caccaugcccagcuaauuuuugua

SEQ ID NO: 1268976 - RNA, 23 nt, Human
caccugccuuggccucccaaagu

SEQ ID NO: 1268977 - RNA, 24 nt, Human
caccugccuuggccucccaaagug

SEQ ID NO: 1268978 - RNA, 22 nt, Human
cacucuauaaaacugacagggg

SEQ ID NO: 1268979 - RNA, 19 nt, Human
cagcauacuacugcugccc

SEQ ID NO: 1268980 - RNA, 20 nt, Human
cagcguguccaacacguccc

SEQ ID NO: 1268981 - RNA, 20 nt, Human
caggauucugcaaacauuca

SEQ ID NO: 1268982 - RNA, 22 nt, Human
caggcggucacagaauguucca

SEQ ID NO: 1268983 - RNA, 27 nt, Human
caguagcugggauuacaggcaugcgcc

SEQ ID NO: 1268984 - RNA, 22 nt, Human
caucuccucuuggggguucucu

SEQ ID NO: 1268985 - RNA, 20 nt, Human
caucuuuucuuuucuuggcc

SEQ ID NO: 1268986 - RNA, 19 nt, Human
cauugugucaaccccgucu

SEQ ID NO: 1268987 - RNA, 23 nt, Human
ccaaagugcugggauuacaggca

SEQ ID NO: 1268988 - RNA, 24 nt, Human
ccaaagugcugggauuacaggcau

SEQ ID NO: 1268989 - RNA, 23 nt, Human
ccaagguggcucagaauggacau

SEQ ID NO: 1268990 - RNA, 25 nt, Human
ccacagaagcaacucgggcugucag

SEQ ID NO: 1268991 - RNA, 22 nt, Human
ccagccuugcauagcaguuucu

SEQ ID NO: 1268992 - RNA, 23 nt, Human
ccaguagcugggauuacaggcau

SEQ ID NO: 1268993 - RNA, 24 nt, Human
ccauucuugaagaacucaggcaug

SEQ ID NO: 1268994 - RNA, 24 nt, Human
cccaaagugcugggauuacaggca

SEQ ID NO: 1268995 - RNA, 19 nt, Human
cccaggcuggagugcagug

SEQ ID NO: 1268996 - RNA, 22 nt, Human
cccaggcuggagugcaguggug

SEQ ID NO: 1268997 - RNA, 24 nt, Human
cccaguagcugggauuacaggcau

SEQ ID NO: 1268998 - RNA, 21 nt, Human
ccccacacaugccacaggacc

SEQ ID NO: 1268999 - RNA, 22 nt, Human
ccccacacaugccacaggaccu

SEQ ID NO: 1269000 - RNA, 22 nt, Human
cccuacaguuauugcuaaggug

SEQ ID NO: 1269001 - RNA, 24 nt, Human
ccguagucagagaauggccgaggc

SEQ ID NO: 1269002 - RNA, 19 nt, Human
ccuacaguuauugcuaagg

SEQ ID NO: 1269003 - RNA, 23 nt, Human
ccuaccucagccuucccaguagc

SEQ ID NO: 1269004 - RNA, 21 nt, Human
ccugaccucaggugauccacc

SEQ ID NO: 1269005 - RNA, 23 nt, Human
ccugaccucaggugauccaccug

SEQ ID NO: 1269006 - RNA, 23 nt, Human
ccugaccucaggugauccaccug

SEQ ID NO: 1269007 - RNA, 19 nt, Human
ccugcagcaacuucugucu

SEQ ID NO: 1269008 - RNA, 24 nt, Human
ccuggauugaagcacacaagaaac

SEQ ID NO: 1269009 - RNA, 22 nt, Human
cuaccucagccuucccaguagc

SEQ ID NO: 1269010 - RNA, 18 nt, Human
cuaguccgcaggccaaag

SEQ ID NO: 1269011 - RNA, 24 nt, Human
cucacugcaaccuccgcuucccag

SEQ ID NO: 1269012 - RNA, 24 nt, Human
cucagccuucccaguagcugggau

SEQ ID NO: 1269013 - RNA, 24 nt, Human
cucaggugauccaccugccuuggc

SEQ ID NO: 1269014 - RNA, 23 nt, Human
cuccuaccucagccuucccagua

SEQ ID NO: 1269015 - RNA, 23 nt, Human
cugcaaccuccgcuucccagauu

SEQ ID NO: 1269016 - RNA, 24 nt, Human
cugcaaccuccgcuucccagauuc

SEQ ID NO: 1269017 - RNA, 19 nt, Human
cugcagcaaccgagucuuc

SEQ ID NO: 1269018 - RNA, 21 nt, Human
cugcagcaaccgagucuuccc

SEQ ID NO: 1269019 - RNA, 23 nt, Human
cugccuuggccucccaaagugcu

SEQ ID NO: 1269020 - RNA, 22 nt, Human
cuggauguggggggcugcaggg

SEQ ID NO: 1269021 - RNA, 20 nt, Human
cugggucuccaaagacugaa

SEQ ID NO: 1269022 - RNA, 20 nt, Human
cuguaucucccaggcuggag

SEQ ID NO: 1269023 - RNA, 19 nt, Human
cuguccagggcacugagcg

SEQ ID NO: 1269024 - RNA, 24 nt, Human
cuucccagauucaaaagauucucc

SEQ ID NO: 1269025 - RNA, 19 nt, Human
cuugaagaacucaggcaug

SEQ ID NO: 1269026 - RNA, 20 nt, Human
cuugcucaucaucagcaggg

SEQ ID NO: 1269027 - RNA, 22 nt, Human
cuuuucuuuucuuggcccaucu

SEQ ID NO: 1269028 - RNA, 26 nt, Human
cuuuuuauauugcaaacaguuguuug

SEQ ID NO: 1269029 - RNA, 23 nt, Human
gaaaauguaacacaagcaaauga

SEQ ID NO: 1269030 - RNA, 24 nt, Human
gaaccuugcaggaugacauuugca

SEQ ID NO: 1269031 - RNA, 23 nt, Human
gaagcuccuuccugcagcaacuu

SEQ ID NO: 1269032 - RNA, 23 nt, Human
gaccucaggugauccaccugccu

SEQ ID NO: 1269033 - RNA, 18 nt, Human
gaggaggcucucuguucc

SEQ ID NO: 1269034 - RNA, 23 nt, Human
gauagcauacaaaaaugagcuuc

SEQ ID NO: 1269035 - RNA, 18 nt, Human
gauuacaggcaugagcca

SEQ ID NO: 1269036 - RNA, 23 nt, Human
gauuacaggcaugagccacagca

SEQ ID NO: 1269037 - RNA, 18 nt, Human
gauuacaggcaugcgcca

SEQ ID NO: 1269038 - RNA, 24 nt, Human
gauuacaggcaugcgccaccaugc

SEQ ID NO: 1269039 - RNA, 22 nt, Human
gcaaccuccgcuucccagauuc

SEQ ID NO: 1269040 - RNA, 25 nt, Human
gccccacggcagcuguagguccccc

SEQ ID NO: 1269041 - RNA, 22 nt, Human
gccuuggccucccaaagugcug

SEQ ID NO: 1269042 - RNA, 20 nt, Human
gcuccagcauacuacugcug

SEQ ID NO: 1269043 - RNA, 24 nt, Human
ggaaacauacacacacacaccccc

SEQ ID NO: 1269044 - RNA, 20 nt, Human
ggaacggcucuggauguggg

SEQ ID NO: 1269045 - RNA, 19 nt, Human
ggauguggggggcugcagg

SEQ ID NO: 1269046 - RNA, 22 nt, Human
ggauuacaggcaugagccacag

SEQ ID NO: 1269047 - RNA, 24 nt, Human
ggauuacaggcaugcgccaccaug

SEQ ID NO: 1269048 - RNA, 20 nt, Human
ggcaggguuuuuauauguuu

SEQ ID NO: 1269049 - RNA, 23 nt, Human
ggggcugcaggggagaagggagg

SEQ ID NO: 1269050 - RNA, 27 nt, Human
gggggucugcagcaaccgagucuucag

SEQ ID NO: 1269051 - RNA, 18 nt, Human
guagcugggauuacaggc

SEQ ID NO: 1269052 - RNA, 21 nt, Human
gucacggguguuucuguguag

SEQ ID NO: 1269053 - RNA, 22 nt, Human
gucagccccacggcagcuguag

SEQ ID NO: 1269054 - RNA, 19 nt, Human
gucaucuuuucuuuucuug

SEQ ID NO: 1269055 - RNA, 24 nt, Human
gugauccaccugccuuggccuccc

SEQ ID NO: 1269056 - RNA, 18 nt, Human
gugcaggcaggagggaau

SEQ ID NO: 1269057 - RNA, 20 nt, Human
guggccuuuguuaauaaaga

SEQ ID NO: 1269058 - RNA, 22 nt, Human
gugggagccggaaguuagggcu

SEQ ID NO: 1269059 - RNA, 21 nt, Human
gugucaaccccgucuugacgg

SEQ ID NO: 1269060 - RNA, 21 nt, Human
guugcucugcacugaggaccc

SEQ ID NO: 1269061 - RNA, 25 nt, Human
uaaaaaggcacaauauucagaaaua

SEQ ID NO: 1269062 - RNA, 22 nt, Human
uaaaacaauuuguucaaaauug

SEQ ID NO: 1269063 - RNA, 21 nt, Human
uaaaacccaagccagacaugc

SEQ ID NO: 1269064 - RNA, 19 nt, Human
uaaaggcagcuucugauuu

SEQ ID NO: 1269065 - RNA, 23 nt, Human
uaacaaagucgaccaauucugaa

SEQ ID NO: 1269066 - RNA, 23 nt, Human
uaacacaagcaaaugauucucuu

SEQ ID NO: 1269067 - RNA, 20 nt, Human
uaacacagcaucuccugucc

SEQ ID NO: 1269068 - RNA, 23 nt, Human
uaagugugaccagacacgugcag

SEQ ID NO: 1269069 - RNA, 23 nt, Human
uaauggagugacccucacacucu

SEQ ID NO: 1269070 - RNA, 24 nt, Human
uaauuuuuguauuauuaguagaga

SEQ ID NO: 1269071 - RNA, 24 nt, Human
uacaggcaugagccacagcaccca

SEQ ID NO: 1269072 - RNA, 24 nt, Human
uacaggcaugcgccaccaugccca

SEQ ID NO: 1269073 - RNA, 24 nt, Human
uaccucagccuucccaguagcugg

SEQ ID NO: 1269074 - RNA, 21 nt, Human
uagugcagaaauacucccccu

SEQ ID NO: 1269075 - RNA, 18 nt, Human
uauuaugggaaagcuggg

SEQ ID NO: 1269076 - RNA, 18 nt, Human
ucacugcaaccuccgcuu

SEQ ID NO: 1269077 - RNA, 19 nt, Human
ucacugcaaccuccgcuuc

SEQ ID NO: 1269078 - RNA, 23 nt, Human
ucacugcaaccuccgcuucccag

SEQ ID NO: 1269079 - RNA, 24 nt, Human
ucacugcaaccuccgcuucccaga

SEQ ID NO: 1269080 - RNA, 28 nt, Human
ucacugcaaccuccgcuucggguccucc

SEQ ID NO: 1269081 - RNA, 22 nt, Human
ucagagccaccuccggugccgg

SEQ ID NO: 1269082 - RNA, 19 nt, Human
ucagccuagguggccuuug

SEQ ID NO: 1269083 - RNA, 20 nt, Human
ucagccuagguggccuuugu

SEQ ID NO: 1269084 - RNA, 25 nt, Human
ucaggaacggcucuggauguggggg

SEQ ID NO: 1269085 - RNA, 21 nt, Human
ucaggugauccaccugccuug

SEQ ID NO: 1269086 - RNA, 22 nt, Human
uccaacacgucccugcccucag

SEQ ID NO: 1269087 - RNA, 20 nt, Human
uccacaaaggcagcuggguc

SEQ ID NO: 1269088 - RNA, 19 nt, Human
uccagaagcuccuuccugc

SEQ ID NO: 1269089 - RNA, 24 nt, Human
ucccaaagugcugggauuacaggc

SEQ ID NO: 1269090 - RNA, 21 nt, Human
ucccagauucaaaagauucuc

SEQ ID NO: 1269091 - RNA, 22 nt, Human
ucccaggcuggagugcaguggu

SEQ ID NO: 1269092 - RNA, 23 nt, Human
ucccaguagcugggauuacaggc

SEQ ID NO: 1269093 - RNA, 24 nt, Human
ucccaguagcugggauuacaggca

SEQ ID NO: 1269094 - RNA, 19 nt, Human
uccgcaggccaaagacaaa

SEQ ID NO: 1269095 - RNA, 24 nt, Human
ucucaaacaugggccuguuagaaa

SEQ ID NO: 1269096 - RNA, 24 nt, Human
ucucccagagccccaucuccucuu

SEQ ID NO: 1269097 - RNA, 24 nt, Human
ucucccaggcuggagugcaguggu

SEQ ID NO: 1269098 - RNA, 18 nt, Human
ucuccucccuuccacaaa

SEQ ID NO: 1269099 - RNA, 23 nt, Human
ucucgaacuccugaccucaggug

SEQ ID NO: 1269100 - RNA, 23 nt, Human
ucucgcuguaucucccaggcugg

SEQ ID NO: 1269101 - RNA, 24 nt, Human
ucucgcuguaucucccaggcugga

SEQ ID NO: 1269102 - RNA, 19 nt, Human
ucuguccuuuccucauccu

SEQ ID NO: 1269103 - RNA, 20 nt, Human
ucuugaagaacucaggcaug

SEQ ID NO: 1269104 - RNA, 21 nt, Human
ucuuuaauggagugacccuca

SEQ ID NO: 1269105 - RNA, 18 nt, Human
ucuuucucuccacuuugc

SEQ ID NO: 1269106 - RNA, 21 nt, Human
ugaacccuuagcagugcugcc

SEQ ID NO: 1269107 - RNA, 19 nt, Human
ugaagcacacaagaaacaa

SEQ ID NO: 1269108 - RNA, 22 nt, Human
ugaagcacacaagaaacaaaga

SEQ ID NO: 1269109 - RNA, 23 nt, Human
ugaagcacacaagaaacaaagac

SEQ ID NO: 1269110 - RNA, 19 nt, Human
ugaaggugauuccaagacc

SEQ ID NO: 1269111 - RNA, 22 nt, Human
ugacacuccuuugagggacaau

SEQ ID NO: 1269112 - RNA, 25 nt, Human
ugacaugcucacgugacaugguuaa

SEQ ID NO: 1269113 - RNA, 21 nt, Human
ugacaugguuaugcccuguuu

SEQ ID NO: 1269114 - RNA, 19 nt, Human
ugacccaaggcuacuucaa

SEQ ID NO: 1269115 - RNA, 24 nt, Human
ugaccucaggugauccaccugccu

SEQ ID NO: 1269116 - RNA, 23 nt, Human
ugacuuggguccuccauuucugg

SEQ ID NO: 1269117 - RNA, 24 nt, Human
ugacuuggguccuccauuucuggc

SEQ ID NO: 1269118 - RNA, 22 nt, Human
ugaugguggugaaauguuuuca

SEQ ID NO: 1269119 - RNA, 22 nt, Human
ugcaguggugcgaucucagcuc

SEQ ID NO: 1269120 - RNA, 25 nt, Human
ugccacaggaccucuccagaagcuc

SEQ ID NO: 1269121 - RNA, 24 nt, Human
ugccauauuggccacgcuugucuc

SEQ ID NO: 1269122 - RNA, 24 nt, Human
ugcccucagagccaccuccggugc

SEQ ID NO: 1269123 - RNA, 18 nt, Human
ugccucuguccuuuccuc

SEQ ID NO: 1269124 - RNA, 24 nt, Human
ugccugaaaagcaguggauucuug

SEQ ID NO: 1269125 - RNA, 18 nt, Human
ugcggcuggccagcuggc

SEQ ID NO: 1269126 - RNA, 21 nt, Human
ugcugcccucuuucuaguccg

SEQ ID NO: 1269127 - RNA, 18 nt, Human
uggaauaggugaaauuca

SEQ ID NO: 1269128 - RNA, 19 nt, Human
uggaccugcagcaggcacu

SEQ ID NO: 1269129 - RNA, 20 nt, Human
uggagguaggugggagccgg

SEQ ID NO: 1269130 - RNA, 23 nt, Human
uggagugcaguggugcgaucuca

SEQ ID NO: 1269131 - RNA, 24 nt, Human
uggagugcaguggugcgaucucag

SEQ ID NO: 1269132 - RNA, 23 nt, Human
uggaugcuguguuuggaccugca

SEQ ID NO: 1269133 - RNA, 21 nt, Human
uggcaucgguuuucaucuagg

SEQ ID NO: 1269134 - RNA, 24 nt, Human
uggccacgcuugucucgaacuccu

SEQ ID NO: 1269135 - RNA, 20 nt, Human
uggcucagaauggacaucag

SEQ ID NO: 1269136 - RNA, 23 nt, Human
uggcuugcagagauuucucgucg

SEQ ID NO: 1269137 - RNA, 19 nt, Human
ugggagccggaaguuaggg

SEQ ID NO: 1269138 - RNA, 18 nt, Human
ugggauuacaggcaugag

SEQ ID NO: 1269139 - RNA, 19 nt, Human
ugggauuacaggcaugagc

SEQ ID NO: 1269140 - RNA, 21 nt, Human
ugggauuacaggcaugagcca

SEQ ID NO: 1269141 - RNA, 22 nt, Human
ugggauuacaggcaugagccac

SEQ ID NO: 1269142 - RNA, 22 nt, Human
ugggauuacaggcaugagccac

SEQ ID NO: 1269143 - RNA, 23 nt, Human
ugggauuacaggcaugagccaca

SEQ ID NO: 1269144 - RNA, 24 nt, Human
ugggauuacaggcaugagccacag

SEQ ID NO: 1269145 - RNA, 26 nt, Human
ugggauuacaggcaugagccacagca

SEQ ID NO: 1269146 - RNA, 27 nt, Human
ugggauuacaggcaugagccacagcac

SEQ ID NO: 1269147 - RNA, 18 nt, Human
ugggauuacaggcaugcg

SEQ ID NO: 1269148 - RNA, 21 nt, Human
ugggauuacaggcaugcgcca

SEQ ID NO: 1269149 - RNA, 22 nt, Human
ugggauuacaggcaugcgccac

SEQ ID NO: 1269150 - RNA, 24 nt, Human
ugggauuacaggcaugcgccacca

SEQ ID NO: 1269151 - RNA, 23 nt, Human
ugggccuguuagaaaaaaaaaaa

SEQ ID NO: 1269152 - RNA, 20 nt, Human
ugggcuuugccauauuggcc

SEQ ID NO: 1269153 - RNA, 24 nt, Human
uggugcgaucucagcucacugcaa

SEQ ID NO: 1269154 - RNA, 20 nt, Human
uguaagcaugugugccaagg

SEQ ID NO: 1269155 - RNA, 24 nt, Human
uguaucucccaggcuggagugcag

SEQ ID NO: 1269156 - RNA, 19 nt, Human
ugugaaggucuuuuuuuau

SEQ ID NO: 1269157 - RNA, 20 nt, Human
ugugaccagacacgugcagc

SEQ ID NO: 1269158 - RNA, 18 nt, Human
ugugugccaagguggcuc

SEQ ID NO: 1269159 - RNA, 23 nt, Human
uuaaaaauguuagcaguuuucaa

SEQ ID NO: 1269160 - RNA, 18 nt, Human
uuaguagagacugggcuu

SEQ ID NO: 1269161 - RNA, 20 nt, Human
uuaguagagacugggcuuug

SEQ ID NO: 1269162 - RNA, 21 nt, Human
uuaguagagacugggcuuugc

SEQ ID NO: 1269163 - RNA, 24 nt, Human
uuaguagagacugggcuuugccau

SEQ ID NO: 1269164 - RNA, 28 nt, Human
uuauucucaaacaugggccuguuagaaa

SEQ ID NO: 1269165 - RNA, 24 nt, Human
uucaaaagauucuccuaccucagc

SEQ ID NO: 1269166 - RNA, 18 nt, Human
uucaaaaucaccugaaca

SEQ ID NO: 1269167 - RNA, 24 nt, Human
uucauacuucuugacacuccuuug

SEQ ID NO: 1269168 - RNA, 24 nt, Human
uucccaguagcugggauuacaggc

SEQ ID NO: 1269169 - RNA, 20 nt, Human
uucuaaguuucuucucuccc

SEQ ID NO: 1269170 - RNA, 19 nt, Human
uucugaccagugcauuuuc

SEQ ID NO: 1269171 - RNA, 21 nt, Human
uugaauguuuuuuguuuuugu

SEQ ID NO: 1269172 - RNA, 21 nt, Human
uuggaaugucuguucaagaag

SEQ ID NO: 1269173 - RNA, 24 nt, Human
uuggaaugucuguucaagaaggaa

SEQ ID NO: 1269174 - RNA, 18 nt, Human
uuggccucccaaagugcu

SEQ ID NO: 1269175 - RNA, 20 nt, Human
uuguuugaauguuuuuuguu

SEQ ID NO: 1269176 - RNA, 24 nt, Human
uuguuuuuguuuuuggagacaguc

SEQ ID NO: 1269177 - RNA, 26 nt, Human
uuugugaaggucuuuuuuucuuugag

SEQ ID NO: 1269178 - RNA, 20 nt, Human
uuuuuguauuauuaguagag

SEQ ID NO: 1269179 - RNA, 23 nt, Human
aagcaaaaggcaucaaaggggac

SEQ ID NO: 1269180 - RNA, 18 nt, Human
aagggccuccgaggagag

SEQ ID NO: 1269181 - RNA, 19 nt, Human
agcagauggaaaaguugaa

SEQ ID NO: 1269182 - RNA, 23 nt, Human
aggcaucaaaggugaucaaggcu

SEQ ID NO: 1269183 - RNA, 19 nt, Human
agggcccaugggagagaag

SEQ ID NO: 1269184 - RNA, 22 nt, Human
aggggcuugcagggcccauggg

SEQ ID NO: 1269185 - RNA, 22 nt, Human
auccccaggaaaacauggcccc

SEQ ID NO: 1269186 - RNA, 20 nt, Human
cacuguuuucuccagaaaug

SEQ ID NO: 1269187 - RNA, 23 nt, Human
cauggccccaaggggcuugcagg

SEQ ID NO: 1269188 - RNA, 23 nt, Human
cccaggaaaacauggccccaagg

SEQ ID NO: 1269189 - RNA, 22 nt, Human
cucaagaggauccccaggaaaa

SEQ ID NO: 1269190 - RNA, 21 nt, Human
gaaaacauggccccaaggggc

SEQ ID NO: 1269191 - RNA, 18 nt, Human
guaaaaauacugcacacc

SEQ ID NO: 1269192 - RNA, 25 nt, Human
ucaaaaauggaguaaaaauacugca

SEQ ID NO: 1269193 - RNA, 19 nt, Human
ucuccagaaauguucaggu

SEQ ID NO: 1269194 - RNA, 21 nt, Human
ucuccagaaauguucaggugu

SEQ ID NO: 1269195 - RNA, 22 nt, Human
ucuccagaaauguucagguguc

SEQ ID NO: 1269196 - RNA, 18 nt, Human
ugaggaccaggccucugg

SEQ ID NO: 1269197 - RNA, 23 nt, Human
ugcacaccaaagaugcuuacaug

SEQ ID NO: 1269198 - RNA, 22 nt, Human
ugucuuuggucaaaaauggagu

SEQ ID NO: 1269199 - RNA, 26 nt, Human
acgcuccccgauuccgcgcuccuugc

SEQ ID NO: 1269200 - RNA, 18 nt, Human
cuacauagaagcaugcaa

SEQ ID NO: 1269201 - RNA, 23 nt, Human
cucccugcccccggggcugggcg

SEQ ID NO: 1269202 - RNA, 20 nt, Human
gcuccccgauuccgcgcucc

SEQ ID NO: 1269203 - RNA, 27 nt, Human
ucauuuuauuauugcuuguuaguugau

SEQ ID NO: 1269204 - RNA, 26 nt, Human
ucuacauagaagcaugcaaaaaguuu

SEQ ID NO: 1269205 - RNA, 20 nt, Human
ugauuaaaguaauucuucuu

SEQ ID NO: 1269206 - RNA, 24 nt, Human
uugcucgcgguacuuccguaaucu

SEQ ID NO: 1269207 - RNA, 22 nt, Human
aaaaaggggaucgguaaaaaaa

SEQ ID NO: 1269208 - RNA, 20 nt, Human
aaaguacauucaauacuuaa

SEQ ID NO: 1269209 - RNA, 18 nt, Human
aagcaucaacaguugacu

SEQ ID NO: 1269210 - RNA, 25 nt, Human
aauuuuauucucaauaacaauucca

SEQ ID NO: 1269211 - RNA, 25 nt, Human
acucacugacagcuccaccuugcac

SEQ ID NO: 1269212 - RNA, 23 nt, Human
agaggaagccaguuuggccugga

SEQ ID NO: 1269213 - RNA, 25 nt, Human
agcccagcugggcuggaggaaguug

SEQ ID NO: 1269214 - RNA, 19 nt, Human
agcuccaccuugcacacgc

SEQ ID NO: 1269215 - RNA, 22 nt, Human
aggaagcccagcugggcuggag

SEQ ID NO: 1269216 - RNA, 21 nt, Human
aggggaucgguaaaaaaaggc

SEQ ID NO: 1269217 - RNA, 20 nt, Human
agguccgguuguaaaaaaua

SEQ ID NO: 1269218 - RNA, 21 nt, Human
aguugacuccaacaaaggaag

SEQ ID NO: 1269219 - RNA, 20 nt, Human
cacccacaaggaagcagagu

SEQ ID NO: 1269220 - RNA, 22 nt, Human
caccgcacggcugccgcugccc

SEQ ID NO: 1269221 - RNA, 18 nt, Human
caggcucagggcgcugcc

SEQ ID NO: 1269222 - RNA, 19 nt, Human
caucugccauuguucucuc

SEQ ID NO: 1269223 - RNA, 23 nt, Human
ccagccgcucgggguccgguccc

SEQ ID NO: 1269224 - RNA, 21 nt, Human
ccccgcugcuggggcaccccc

SEQ ID NO: 1269225 - RNA, 25 nt, Human
ccccgggagcugcuccugcucggcc

SEQ ID NO: 1269226 - RNA, 18 nt, Human
cccgcgggcgccaccgcc

SEQ ID NO: 1269227 - RNA, 25 nt, Human
cccgcgggcgccaccgcccucaccg

SEQ ID NO: 1269228 - RNA, 27 nt, Human
cccgcgggcgccaccgcccucaccgca

SEQ ID NO: 1269229 - RNA, 22 nt, Human
ccgagccgcccgggcauccccg

SEQ ID NO: 1269230 - RNA, 21 nt, Human
ccgcacggcugccgcugcccg

SEQ ID NO: 1269231 - RNA, 22 nt, Human
ccgcccgggcauccccgggagc

SEQ ID NO: 1269232 - RNA, 18 nt, Human
ccuggaagcaucaacagu

SEQ ID NO: 1269233 - RNA, 22 nt, Human
cgcuccgagccgcccgggcauc

SEQ ID NO: 1269234 - RNA, 22 nt, Human
cgcugcccgcgcuccgagccgc

SEQ ID NO: 1269235 - RNA, 20 nt, Human
cggccgggcccgcgggcgcg

SEQ ID NO: 1269236 - RNA, 19 nt, Human
cggcugccgcugcccgcgc

SEQ ID NO: 1269237 - RNA, 19 nt, Human
cugcccccgcugcuggggc

SEQ ID NO: 1269238 - RNA, 22 nt, Human
cugcccgcgcuccgagccgccc

SEQ ID NO: 1269239 - RNA, 20 nt, Human
gcccgcgcuccgagccgccc

SEQ ID NO: 1269240 - RNA, 20 nt, Human
gcgcuccgagccgcccgggc

SEQ ID NO: 1269241 - RNA, 21 nt, Human
ggaaguuggggguggaggucc

SEQ ID NO: 1269242 - RNA, 22 nt, Human
ggagaggaggagaggaagccag

SEQ ID NO: 1269243 - RNA, 21 nt, Human
ggccgggcccgcgggcgcggg

SEQ ID NO: 1269244 - RNA, 21 nt, Human
gggagcugcuccugcucggcc

SEQ ID NO: 1269245 - RNA, 19 nt, Human
ggggagaggaggagaggaa

SEQ ID NO: 1269246 - RNA, 20 nt, Human
ggggagaggaggagaggaag

SEQ ID NO: 1269247 - RNA, 21 nt, Human
gguaugugggccaugggagcc

SEQ ID NO: 1269248 - RNA, 24 nt, Human
gguggggagaggaggagaggaagc

SEQ ID NO: 1269249 - RNA, 20 nt, Human
uaaaaaaaggccacccacaa

SEQ ID NO: 1269250 - RNA, 23 nt, Human
ucaccgcacggcugccgcugccc

SEQ ID NO: 1269251 - RNA, 18 nt, Human
uccccgggagcugcuccu

SEQ ID NO: 1269252 - RNA, 20 nt, Human
uccugggggagggcaggagg

SEQ ID NO: 1269253 - RNA, 18 nt, Human
ucgggguccgguccuccu

SEQ ID NO: 1269254 - RNA, 20 nt, Human
ugacuccaacaaaggaagcc

SEQ ID NO: 1269255 - RNA, 21 nt, Human
ugcugcugcugggcacuggag

SEQ ID NO: 1269256 - RNA, 19 nt, Human
uggaggaaguugggggugg

SEQ ID NO: 1269257 - RNA, 22 nt, Human
uggaggaaguuggggguggagg

SEQ ID NO: 1269258 - RNA, 19 nt, Human
uggagguccgguuguaaaa

SEQ ID NO: 1269259 - RNA, 22 nt, Human
uggcaaagguggggagaggagg

SEQ ID NO: 1269260 - RNA, 22 nt, Human
ugggcuggaggaaguugggggu

SEQ ID NO: 1269261 - RNA, 19 nt, Human
uggguaugugggccauggg

SEQ ID NO: 1269262 - RNA, 23 nt, Human
uguccuggucaaagagcgcgaac

SEQ ID NO: 1269263 - RNA, 20 nt, Human
cugugcagcugcaggccucg

SEQ ID NO: 1269264 - RNA, 19 nt, Human
cccugugcagagucuccuc

SEQ ID NO: 1269265 - RNA, 20 nt, Human
cuccuccaagaacuggcucc

SEQ ID NO: 1269266 - RNA, 27 nt, Human
cucucuuauuucuugagcaggaauugg

SEQ ID NO: 1269267 - RNA, 18 nt, Human
cugugcagagucuccucc

SEQ ID NO: 1269268 - RNA, 19 nt, Human
gcagagucuccuccaagaa

SEQ ID NO: 1269269 - RNA, 19 nt, Human
aaguccucugucuggccag

SEQ ID NO: 1269270 - RNA, 21 nt, Human
agccugggagucagccuccuu

SEQ ID NO: 1269271 - RNA, 18 nt, Human
aguuaggcugaacuccug

SEQ ID NO: 1269272 - RNA, 19 nt, Human
ccugggagucagccuccuu

SEQ ID NO: 1269273 - RNA, 20 nt, Human
cggcagccugggagucagcc

SEQ ID NO: 1269274 - RNA, 18 nt, Human
ugacugcucaaugggcag

SEQ ID NO: 1269275 - RNA, 19 nt, Human
uggcaccguccggcagccu

SEQ ID NO: 1269276 - RNA, 27 nt, Human
aacuaucaaaaacagacaucaaaacag

SEQ ID NO: 1269277 - RNA, 19 nt, Human
aagccccugagcaccccag

SEQ ID NO: 1269278 - RNA, 19 nt, Human
acugugguuugugagaugg

SEQ ID NO: 1269279 - RNA, 18 nt, Human
agagaagagagggcagcu

SEQ ID NO: 1269280 - RNA, 21 nt, Human
agagaguugggucucugaaaa

SEQ ID NO: 1269281 - RNA, 23 nt, Human
agagaguugggucucugaaaagg

SEQ ID NO: 1269282 - RNA, 22 nt, Human
agauggccagagaagagagggc

SEQ ID NO: 1269283 - RNA, 18 nt, Human
agccagcccaguguaugc

SEQ ID NO: 1269284 - RNA, 23 nt, Human
caagccccugagcaccccagaga

SEQ ID NO: 1269285 - RNA, 23 nt, Human
caccccagagaguugggucucug

SEQ ID NO: 1269286 - RNA, 19 nt, Human
cacuuguuagccagcauuu

SEQ ID NO: 1269287 - RNA, 19 nt, Human
cagcauggugaaugccugg

SEQ ID NO: 1269288 - RNA, 22 nt, Human
cagcauucucaguuuacucuuc

SEQ ID NO: 1269289 - RNA, 18 nt, Human
cagcccaagccccugagc

SEQ ID NO: 1269290 - RNA, 18 nt, Human
caugacacuggaugccuc

SEQ ID NO: 1269291 - RNA, 19 nt, Human
ccagagaagagagggcagc

SEQ ID NO: 1269292 - RNA, 23 nt, Human
cccaagccccugagcaccccaga

SEQ ID NO: 1269293 - RNA, 25 nt, Human
ccccugagcaccccagagaguuggg

SEQ ID NO: 1269294 - RNA, 24 nt, Human
ccuggcacucagcauucucaguuu

SEQ ID NO: 1269295 - RNA, 18 nt, Human
ggaccaguuggcccgcac

SEQ ID NO: 1269296 - RNA, 18 nt, Human
gguuugugagauggccag

SEQ ID NO: 1269297 - RNA, 20 nt, Human
uaucaaaaacagacaucaaa

SEQ ID NO: 1269298 - RNA, 23 nt, Human
uaucaaaaacagacaucaaaaca

SEQ ID NO: 1269299 - RNA, 23 nt, Human
uaucaaaaacagacaucaaaacu

SEQ ID NO: 1269300 - RNA, 21 nt, Human
ucucaauccagcccaagcccc

SEQ ID NO: 1269301 - RNA, 23 nt, Human
ugacacaguagaguucaacagaa

SEQ ID NO: 1269302 - RNA, 21 nt, Human
ugacucguggaauucaacccu

SEQ ID NO: 1269303 - RNA, 20 nt, Human
ugagcaccccagagaguugg

SEQ ID NO: 1269304 - RNA, 23 nt, Human
ugccaugggcuuauccguggcag

SEQ ID NO: 1269305 - RNA, 19 nt, Human
ugccuggcacucagcauuc

SEQ ID NO: 1269306 - RNA, 19 nt, Human
uggaugccucuuguccuca

SEQ ID NO: 1269307 - RNA, 20 nt, Human
ugugguaaagaggcaggacc

SEQ ID NO: 1269308 - RNA, 19 nt, Human
uguuccacucaugacacug

SEQ ID NO: 1269309 - RNA, 22 nt, Human
aaggacacaagggcuuaggagg

SEQ ID NO: 1269310 - RNA, 18 nt, Human
aagggucauugaaggaga

SEQ ID NO: 1269311 - RNA, 19 nt, Human
agaagacgcacaggguccu

SEQ ID NO: 1269312 - RNA, 27 nt, Human
agccucccagccucccacuuggccuuc

SEQ ID NO: 1269313 - RNA, 24 nt, Human
aggaggaagagagacuugguagag

SEQ ID NO: 1269314 - RNA, 19 nt, Human
agggucauugaaggagaag

SEQ ID NO: 1269315 - RNA, 22 nt, Human
caaagugagagcuccugguccc

SEQ ID NO: 1269316 - RNA, 21 nt, Human
caaggugcccugccaucuccc

SEQ ID NO: 1269317 - RNA, 18 nt, Human
caccccagcucugcgugc

SEQ ID NO: 1269318 - RNA, 18 nt, Human
cacggcccaggcagugac

SEQ ID NO: 1269319 - RNA, 18 nt, Human
cagccggagcccccgggc

SEQ ID NO: 1269320 - RNA, 19 nt, Human
cagccggagcccccgggcc

SEQ ID NO: 1269321 - RNA, 24 nt, Human
cagccucccacuuggccuucccca

SEQ ID NO: 1269322 - RNA, 24 nt, Human
caggcagugacugcgcgcccuuuc

SEQ ID NO: 1269323 - RNA, 22 nt, Human
ccacuuggccuuccccaaggug

SEQ ID NO: 1269324 - RNA, 23 nt, Human
ccagcuguggccacuaccuccuc

SEQ ID NO: 1269325 - RNA, 23 nt, Human
ccccaaggugcccugccaucucc

SEQ ID NO: 1269326 - RNA, 22 nt, Human
ccgucagccuguccccagcugu

SEQ ID NO: 1269327 - RNA, 21 nt, Human
ccucccacuuggccuucccca

SEQ ID NO: 1269328 - RNA, 18 nt, Human
ccucccagccucccacuu

SEQ ID NO: 1269329 - RNA, 23 nt, Human
ccucccagccucccacuuggccu

SEQ ID NO: 1269330 - RNA, 20 nt, Human
ccucuuccuccaggucuucc

SEQ ID NO: 1269331 - RNA, 22 nt, Human
ccuuccccaaggugcccugcca

SEQ ID NO: 1269332 - RNA, 22 nt, Human
cuccaggucuuccaggucacuc

SEQ ID NO: 1269333 - RNA, 21 nt, Human
cucccacuuggccuuccccaa

SEQ ID NO: 1269334 - RNA, 20 nt, Human
cuccuccuccuccuccucuu

SEQ ID NO: 1269335 - RNA, 19 nt, Human
cuccuccuccuccucuucc

SEQ ID NO: 1269336 - RNA, 19 nt, Human
cuggcuagcaguaacuucu

SEQ ID NO: 1269337 - RNA, 20 nt, Human
cuucuuaaccuggagaugaa

SEQ ID NO: 1269338 - RNA, 19 nt, Human
gagcugcagcgcacggccc

SEQ ID NO: 1269339 - RNA, 22 nt, Human
gagggggagaagacgcacaggg

SEQ ID NO: 1269340 - RNA, 23 nt, Human
gccuccuggcuagcaguaacuuc

SEQ ID NO: 1269341 - RNA, 20 nt, Human
ggagaagcggggcgcagcca

SEQ ID NO: 1269342 - RNA, 20 nt, Human
ggcccaggcagugacugcgc

SEQ ID NO: 1269343 - RNA, 20 nt, Human
gggccuccuggcuagcagua

SEQ ID NO: 1269344 - RNA, 20 nt, Human
ggggugagcaggagaggaag

SEQ ID NO: 1269345 - RNA, 19 nt, Human
ggguggggcagccucccag

SEQ ID NO: 1269346 - RNA, 20 nt, Human
gguagagucggugggugggg

SEQ ID NO: 1269347 - RNA, 19 nt, Human
gguggaggugagagacagg

SEQ ID NO: 1269348 - RNA, 18 nt, Human
gucccuggcaaggucugg

SEQ ID NO: 1269349 - RNA, 24 nt, Human
gugagcaggagaggaagccuugcu

SEQ ID NO: 1269350 - RNA, 24 nt, Human
guggguggggcagccucccagccu

SEQ ID NO: 1269351 - RNA, 23 nt, Human
ucccacuuggccuuccccaaggu

SEQ ID NO: 1269352 - RNA, 21 nt, Human
ucuuaggcaaagugagagcuc

SEQ ID NO: 1269353 - RNA, 20 nt, Human
ucuuccaggucacucagccg

SEQ ID NO: 1269354 - RNA, 21 nt, Human
ugagcaggagaggaagccuug

SEQ ID NO: 1269355 - RNA, 20 nt, Human
ugagugggguugguggaggu

SEQ ID NO: 1269356 - RNA, 20 nt, Human
uggcaaggucuggcagcuuc

SEQ ID NO: 1269357 - RNA, 20 nt, Human
ugguggaggugagagacagg

SEQ ID NO: 1269358 - RNA, 20 nt, Human
ugguggaggugagagacagg

SEQ ID NO: 1269359 - RNA, 20 nt, Human
uuccuccuccuccuccuccu

SEQ ID NO: 1269360 - RNA, 21 nt, Human
acggggcagcaggaacagcag

SEQ ID NO: 1269361 - RNA, 23 nt, Human
cacacuuggcacagcccacgggg

SEQ ID NO: 1269362 - RNA, 23 nt, Human
cagcaggaacagcagccugggga

SEQ ID NO: 1269363 - RNA, 24 nt, Human
caggaacagcagccuggggaagaa

SEQ ID NO: 1269364 - RNA, 23 nt, Human
cccugggcacacuuggcacagcc

SEQ ID NO: 1269365 - RNA, 21 nt, Human
cgagcaaaggggaugcuggag

SEQ ID NO: 1269366 - RNA, 19 nt, Human
cggggcagcaggaacagcg

SEQ ID NO: 1269367 - RNA, 19 nt, Human
cugcacuucuccgaugccc

SEQ ID NO: 1269368 - RNA, 20 nt, Human
cugcacuucuccgaugcccc

SEQ ID NO: 1269369 - RNA, 22 nt, Human
cuggagcucacaccagugagac

SEQ ID NO: 1269370 - RNA, 22 nt, Human
cuugaccgggcaccucccugcc

SEQ ID NO: 1269371 - RNA, 30 nt, Human
ggcagcaggaacagcagccuggggaagaaa

SEQ ID NO: 1269372 - RNA, 26 nt, Human
gggcacacuuggcacagcccacgggg

SEQ ID NO: 1269373 - RNA, 21 nt, Human
gggcagcaggaacagcagccu

SEQ ID NO: 1269374 - RNA, 20 nt, Human
ucaggcacagcagcugcacu

SEQ ID NO: 1269375 - RNA, 21 nt, Human
uggcacagcccacggggcagc

SEQ ID NO: 1269376 - RNA, 23 nt, Human
uggcacagcccacggggcagcag

SEQ ID NO: 1269377 - RNA, 22 nt, Human
uggcucaguguuguauuuuuaa

SEQ ID NO: 1269378 - RNA, 21 nt, Human
ugggagaagagcuguucccac

SEQ ID NO: 1269379 - RNA, 19 nt, Human
uggggaagaaggggagagu

SEQ ID NO: 1269380 - RNA, 24 nt, Human
uucccacaucaggcacagcagcug

SEQ ID NO: 1269381 - RNA, 21 nt, Human
auccaugacggugagccccag

SEQ ID NO: 1269382 - RNA, 20 nt, Human
gacggugagccccaguucuc

SEQ ID NO: 1269383 - RNA, 21 nt, Human
gagcauccaugacggugagcc

SEQ ID NO: 1269384 - RNA, 25 nt, Human
uagcuuuuucaaaagguuuaaugca

SEQ ID NO: 1269385 - RNA, 19 nt, Human
uccgcgcagcugcccagga

SEQ ID NO: 1269386 - RNA, 22 nt, Human
ugacggugagccccaguucucc

SEQ ID NO: 1269387 - RNA, 18 nt, Human
aacucacaagaaagggac

SEQ ID NO: 1269388 - RNA, 20 nt, Human
aagaaaauccaaagucccug

SEQ ID NO: 1269389 - RNA, 19 nt, Human
acaagaaagggaccuugac

SEQ ID NO: 1269390 - RNA, 18 nt, Human
acucugugagucacuggc

SEQ ID NO: 1269391 - RNA, 19 nt, Human
agaaaauccaaagucccug

SEQ ID NO: 1269392 - RNA, 18 nt, Human
agaaagaaaagaugaaaa

SEQ ID NO: 1269393 - RNA, 21 nt, Human
aggaaagggguguggaaauca

SEQ ID NO: 1269394 - RNA, 20 nt, Human
auccaaagucccugccguuu

SEQ ID NO: 1269395 - RNA, 21 nt, Human
cacaagaaagggaccuugaca

SEQ ID NO: 1269396 - RNA, 24 nt, Human
cacucugugagucacuggccaauc

SEQ ID NO: 1269397 - RNA, 20 nt, Human
ccuaacuugucaucuucucu

SEQ ID NO: 1269398 - RNA, 18 nt, Human
cugccguuuauccaaagg

SEQ ID NO: 1269399 - RNA, 27 nt, Human
cuugucaucuucucuguuguccuucga

SEQ ID NO: 1269400 - RNA, 22 nt, Human
gucacuggccaaucugagaagu

SEQ ID NO: 1269401 - RNA, 20 nt, Human
gugccacucugugagucacu

SEQ ID NO: 1269402 - RNA, 19 nt, Human
uaaauuggagacaaguuca

SEQ ID NO: 1269403 - RNA, 21 nt, Human
uaacucacaagaaagggaccu

SEQ ID NO: 1269404 - RNA, 24 nt, Human
uaggagaauacuaaaacugcaaca

SEQ ID NO: 1269405 - RNA, 21 nt, Human
uaucaaagaagacaaauaaau

SEQ ID NO: 1269406 - RNA, 22 nt, Human
uaucaaagaagacaaauaaaug

SEQ ID NO: 1269407 - RNA, 26 nt, Human
uauucaaaaagaaaauccaaaguccc

SEQ ID NO: 1269408 - RNA, 20 nt, Human
ucacaguaugaccucugauc

SEQ ID NO: 1269409 - RNA, 18 nt, Human
ucagugguccuggaaucu

SEQ ID NO: 1269410 - RNA, 19 nt, Human
ucccuaacuugucaucuuc

SEQ ID NO: 1269411 - RNA, 19 nt, Human
ucuguguuggaugcaaggc

SEQ ID NO: 1269412 - RNA, 18 nt, Human
ugaccucugaucucuccc

SEQ ID NO: 1269413 - RNA, 19 nt, Human
ugaccucugaucucucccu

SEQ ID NO: 1269414 - RNA, 18 nt, Human
uggaaccagauaauuucc

SEQ ID NO: 1269415 - RNA, 22 nt, Human
uggccaaucugagaaguagcac

SEQ ID NO: 1269416 - RNA, 23 nt, Human
ugugccacucugugagucacugg

SEQ ID NO: 1269417 - RNA, 26 nt, Human
uuaugcuuauauucaaaaagaaaauc

SEQ ID NO: 1269418 - RNA, 25 nt, Human
uucaaagaaacagaaaacgucaucc

SEQ ID NO: 1269419 - RNA, 21 nt, Human
uucagaaagaaaagaugaaaa

SEQ ID NO: 1269420 - RNA, 22 nt, Human
uucagaaagaaaagaugaaaaa

SEQ ID NO: 1269421 - RNA, 20 nt, Human
uuucaaagaaacagaaaacg

SEQ ID NO: 1269422 - RNA, 25 nt, Human
uuuucaaagaaacagaaaacgucau

SEQ ID NO: 1269423 - RNA, 20 nt, Human
aaauaguagaaacacaaacu

SEQ ID NO: 1269424 - RNA, 24 nt, Human
accgagccgcgagggggagggcag

SEQ ID NO: 1269425 - RNA, 19 nt, Human
agaaccaaguuugcaagga

SEQ ID NO: 1269426 - RNA, 21 nt, Human
aggaagaucaaaugaaaagac

SEQ ID NO: 1269427 - RNA, 23 nt, Human
ccgcgagggggagggcaggcgcc

SEQ ID NO: 1269428 - RNA, 20 nt, Human
cgagccgcgagggggagggc

SEQ ID NO: 1269429 - RNA, 18 nt, Human
cgguggagguggugcuga

SEQ ID NO: 1269430 - RNA, 22 nt, Human
cgguggagguggugcugauggu

SEQ ID NO: 1269431 - RNA, 24 nt, Human
cucauuuccaaaguauuuuauguu

SEQ ID NO: 1269432 - RNA, 20 nt, Human
cugaugguggcgaggcuggc

SEQ ID NO: 1269433 - RNA, 28 nt, Human
gagggcaggcgccgagaagcggggucuc

SEQ ID NO: 1269434 - RNA, 23 nt, Human
gcggcggcggcggcgguggaggu

SEQ ID NO: 1269435 - RNA, 18 nt, Human
gcggcggcggcgguggag

SEQ ID NO: 1269436 - RNA, 19 nt, Human
gcggcggcggcgguggagg

SEQ ID NO: 1269437 - RNA, 22 nt, Human
gcggcggcgguggagguggugc

SEQ ID NO: 1269438 - RNA, 20 nt, Human
gcgguggugguggcggcggc

SEQ ID NO: 1269439 - RNA, 19 nt, Human
ggagguagcggugcuggcg

SEQ ID NO: 1269440 - RNA, 20 nt, Human
ggcgguggugguggcggcgg

SEQ ID NO: 1269441 - RNA, 23 nt, Human
ggcgguggugguggcggcggcgg

SEQ ID NO: 1269442 - RNA, 24 nt, Human
gggccggaccgagccgcgaggggg

SEQ ID NO: 1269443 - RNA, 23 nt, Human
gguggcggcggcggcggcggugg

SEQ ID NO: 1269444 - RNA, 23 nt, Human
ggugguggcggcggcggcggcgg

SEQ ID NO: 1269445 - RNA, 23 nt, Human
gguggugguggcggcggcggcgg

SEQ ID NO: 1269446 - RNA, 24 nt, Human
guggagguggugcugaugguggcg

SEQ ID NO: 1269447 - RNA, 19 nt, Human
guggcggcggcggcggcgg

SEQ ID NO: 1269448 - RNA, 20 nt, Human
guggcggcggcggcggcggu

SEQ ID NO: 1269449 - RNA, 22 nt, Human
guggcggcggcggcggcggugg

SEQ ID NO: 1269450 - RNA, 20 nt, Human
gugguggcggcggcggcggc

SEQ ID NO: 1269451 - RNA, 20 nt, Human
guggugguggcggcggcggc

SEQ ID NO: 1269452 - RNA, 20 nt, Human
guggugguggcggcggcggc

SEQ ID NO: 1269453 - RNA, 18 nt, Human
guuucuguggagaugaaa

SEQ ID NO: 1269454 - RNA, 22 nt, Human
uagaaacacaaacucauuucca

SEQ ID NO: 1269455 - RNA, 23 nt, Human
uaguagaaacacaaacucauuuc

SEQ ID NO: 1269456 - RNA, 25 nt, Human
uaguagaaacacaaacucauuucca

SEQ ID NO: 1269457 - RNA, 22 nt, Human
uaugaaaauaguagaaacacaa

SEQ ID NO: 1269458 - RNA, 24 nt, Human
ucagaaccaaguuugcaaggaaga

SEQ ID NO: 1269459 - RNA, 20 nt, Human
ucagaagcaugucaggauua

SEQ ID NO: 1269460 - RNA, 20 nt, Human
uccaaaguauuuuauguucu

SEQ ID NO: 1269461 - RNA, 18 nt, Human
ucuuguggaucaacauuc

SEQ ID NO: 1269462 - RNA, 19 nt, Human
ucuuguggaucaacauucu

SEQ ID NO: 1269463 - RNA, 24 nt, Human
ugaaaagacuaaaaaucaauacag

SEQ ID NO: 1269464 - RNA, 22 nt, Human
uggcgaggcuggcggagguagc

SEQ ID NO: 1269465 - RNA, 20 nt, Human
uggcggcggcggcggcggug

SEQ ID NO: 1269466 - RNA, 21 nt, Human
uggcggcggcggcggcggugg

SEQ ID NO: 1269467 - RNA, 23 nt, Human
uggcggcggcggcggcgguggag

SEQ ID NO: 1269468 - RNA, 18 nt, Human
ugguggcggcggcggcgg

SEQ ID NO: 1269469 - RNA, 18 nt, Human
uggugguggcggcggcgg

SEQ ID NO: 1269470 - RNA, 18 nt, Human
uggugguggcggcggcgg

SEQ ID NO: 1269471 - RNA, 20 nt, Human
uuugugucugguuucugugg

SEQ ID NO: 1269472 - RNA, 18 nt, Human
auagccgaugcuguucac

SEQ ID NO: 1269473 - RNA, 19 nt, Human
cauagccgaugcuguucac

SEQ ID NO: 1269474 - RNA, 19 nt, Human
caugcaaaccgaguauugc

SEQ ID NO: 1269475 - RNA, 18 nt, Human
cccugagcagguuguuua

SEQ ID NO: 1269476 - RNA, 18 nt, Human
ccucccuuccucuuucuc

SEQ ID NO: 1269477 - RNA, 19 nt, Human
ccucccuuccucuuucucc

SEQ ID NO: 1269478 - RNA, 24 nt, Human
ccucccuuccucuuucuccuggac

SEQ ID NO: 1269479 - RNA, 23 nt, Human
ccucuuucuccuggacuuucuca

SEQ ID NO: 1269480 - RNA, 25 nt, Human
cucacaggcagaagaggugcuacag

SEQ ID NO: 1269481 - RNA, 20 nt, Human
cuccagcagcccugcgcucc

SEQ ID NO: 1269482 - RNA, 21 nt, Human
cuccuggacuuucucagaggc

SEQ ID NO: 1269483 - RNA, 20 nt, Human
gaagaggucaucgcacagga

SEQ ID NO: 1269484 - RNA, 20 nt, Human
gaagggcugguggcugaaga

SEQ ID NO: 1269485 - RNA, 18 nt, Human
ggcugguggcugaagagg

SEQ ID NO: 1269486 - RNA, 24 nt, Human
uagucuccagcagcccugcgcucc

SEQ ID NO: 1269487 - RNA, 24 nt, Human
uccucccuuccucuuucuccugga

SEQ ID NO: 1269488 - RNA, 21 nt, Human
ucgcucacaggcagaagaggu

SEQ ID NO: 1269489 - RNA, 23 nt, Human
ugagcagguuguuuaccaggucg

SEQ ID NO: 1269490 - RNA, 26 nt, Human
ugauuccauccucccuuccucuuucu

SEQ ID NO: 1269491 - RNA, 23 nt, Human
uucaccacaggcaggcuccgcag

SEQ ID NO: 1269492 - RNA, 19 nt, Human
uuccucuuucuccuggacu

SEQ ID NO: 1269493 - RNA, 23 nt, Human
aagacuuuuccauccgcugacag

SEQ ID NO: 1269494 - RNA, 21 nt, Human
aaguguuagaaaaaaggaccc

SEQ ID NO: 1269495 - RNA, 23 nt, Human
agaaaaaaggacccauagcacgc

SEQ ID NO: 1269496 - RNA, 25 nt, Human
cccaauggcaaccaucuuugcaguc

SEQ ID NO: 1269497 - RNA, 25 nt, Human
cugaccugugaacccaauggcaacc

SEQ ID NO: 1269498 - RNA, 23 nt, Human
cuucugcaaguguuagaaaaaag

SEQ ID NO: 1269499 - RNA, 23 nt, Human
cuuuuccauccgcugacagcaaa

SEQ ID NO: 1269500 - RNA, 21 nt, Human
gggugagaguaggaggaucug

SEQ ID NO: 1269501 - RNA, 19 nt, Human
uagaaaaaaggacccauag

SEQ ID NO: 1269502 - RNA, 19 nt, Human
uaggaggaucugaccugug

SEQ ID NO: 1269503 - RNA, 23 nt, Human
ugcaaguguuagaaaaaaggacc

SEQ ID NO: 1269504 - RNA, 21 nt, Human
cauuuggagucauuuuuauuc

SEQ ID NO: 1269505 - RNA, 22 nt, Human
aaaugggcccacgagguguggg

SEQ ID NO: 1269506 - RNA, 20 nt, Human
augaaaccugggaauauucu

SEQ ID NO: 1269507 - RNA, 25 nt, Human
auucuuccucugugauuucuuuugu

SEQ ID NO: 1269508 - RNA, 23 nt, Human
cagauugcgaagagcgccgcuga

SEQ ID NO: 1269509 - RNA, 18 nt, Human
caggugaagguggugggg

SEQ ID NO: 1269510 - RNA, 19 nt, Human
cugcagaaaugggcccacg

SEQ ID NO: 1269511 - RNA, 20 nt, Human
ucagcugccccaacuuucag

SEQ ID NO: 1269512 - RNA, 18 nt, Human
ugggaauauucuuccucu

SEQ ID NO: 1269513 - RNA, 24 nt, Human
uuucagauugcgaagagcgccgcu

SEQ ID NO: 1269514 - RNA, 18 nt, Human
aaaaaauauauucuucag

SEQ ID NO: 1269515 - RNA, 21 nt, Human
aaaaauuuuuuagagacagag

SEQ ID NO: 1269516 - RNA, 21 nt, Human
aaaacagauucuccuauauga

SEQ ID NO: 1269517 - RNA, 19 nt, Human
aaaauaccucuccauuucu

SEQ ID NO: 1269518 - RNA, 19 nt, Human
aaaauaccucuccauuucu

SEQ ID NO: 1269519 - RNA, 24 nt, Human
aaacuauucuccucaacuuuccug

SEQ ID NO: 1269520 - RNA, 19 nt, Human
aaagugcugggauuacagg

SEQ ID NO: 1269521 - RNA, 24 nt, Human
aaagugcugggauuacagguguga

SEQ ID NO: 1269522 - RNA, 18 nt, Human
aacacuuugggaggcuga

SEQ ID NO: 1269523 - RNA, 24 nt, Human
aacacuuugggaggcugagguggg

SEQ ID NO: 1269524 - RNA, 18 nt, Human
aacaugaugaaacccccu

SEQ ID NO: 1269525 - RNA, 19 nt, Human
aacaugaugaaacccccuc

SEQ ID NO: 1269526 - RNA, 20 nt, Human
aacaugaugaaacccccucu

SEQ ID NO: 1269527 - RNA, 22 nt, Human
aacucacccacuguccaacaaa

SEQ ID NO: 1269528 - RNA, 22 nt, Human
aagaaucgcuugaaccagggag

SEQ ID NO: 1269529 - RNA, 22 nt, Human
aagaccccaucuacagcccuac

SEQ ID NO: 1269530 - RNA, 19 nt, Human
aagagcacuggccccgacc

SEQ ID NO: 1269531 - RNA, 19 nt, Human
aagcagaaguaauuuccaa

SEQ ID NO: 1269532 - RNA, 21 nt, Human
aaggaucaccugcaccaauuc

SEQ ID NO: 1269533 - RNA, 24 nt, Human
aaggaucaccugcaccaauucugc

SEQ ID NO: 1269534 - RNA, 19 nt, Human
aaguagcugggacuacagg

SEQ ID NO: 1269535 - RNA, 20 nt, Human
aaguagcugggacuacaggu

SEQ ID NO: 1269536 - RNA, 18 nt, Human
aagugcugggauuacagg

SEQ ID NO: 1269537 - RNA, 19 nt, Human
aagugcugggauuacaggc

SEQ ID NO: 1269538 - RNA, 19 nt, Human
aagugcugggauuacaggc

SEQ ID NO: 1269539 - RNA, 19 nt, Human
aagugcugggauuacaggu

SEQ ID NO: 1269540 - RNA, 24 nt, Human
aaucgcuugaaccagggaggcaga

SEQ ID NO: 1269541 - RNA, 20 nt, Human
acaaacuuuaaaacuuacag

SEQ ID NO: 1269542 - RNA, 18 nt, Human
acaggguuucacuguguu

SEQ ID NO: 1269543 - RNA, 19 nt, Human
acaggguuucacuguguua

SEQ ID NO: 1269544 - RNA, 20 nt, Human
acaggguuucacuguguuag

SEQ ID NO: 1269545 - RNA, 24 nt, Human
acaggguuucacuguguuagccag

SEQ ID NO: 1269546 - RNA, 19 nt, Human
acaggugccugccaccacg

SEQ ID NO: 1269547 - RNA, 23 nt, Human
accaccaccaccuccggcuccgg

SEQ ID NO: 1269548 - RNA, 19 nt, Human
acccaggcuggagugcagu

SEQ ID NO: 1269549 - RNA, 24 nt, Human
acccccucucuacuaaaaacacaa

SEQ ID NO: 1269550 - RNA, 25 nt, Human
accucccggguucacgccauucucc

SEQ ID NO: 1269551 - RNA, 24 nt, Human
accuugugauccgcccaccucggc

SEQ ID NO: 1269552 - RNA, 28 nt, Human
acuacaggcacccgccaccacgcccgcc

SEQ ID NO: 1269553 - RNA, 19 nt, Human
acuacaggugccugccacc

SEQ ID NO: 1269554 - RNA, 18 nt, Human
acuacuaaucuaauaaca

SEQ ID NO: 1269555 - RNA, 25 nt, Human
acuauauugcccaggcuggucucaa

SEQ ID NO: 1269556 - RNA, 24 nt, Human
acuccagccugagugacagaguga

SEQ ID NO: 1269557 - RNA, 18 nt, Human
acugcaagcuccgccucc

SEQ ID NO: 1269558 - RNA, 24 nt, Human
acuuggguauauugguuacuuagg

SEQ ID NO: 1269559 - RNA, 24 nt, Human
acuuugggaggcugaggugggcag

SEQ ID NO: 1269560 - RNA, 18 nt, Human
agacaggguuucacugug

SEQ ID NO: 1269561 - RNA, 19 nt, Human
agagacaggguuucacugu

SEQ ID NO: 1269562 - RNA, 19 nt, Human
agagaugggguuucaccgu

SEQ ID NO: 1269563 - RNA, 18 nt, Human
agagguugcagugagcug

SEQ ID NO: 1269564 - RNA, 22 nt, Human
agagguugcagugagcugagau

SEQ ID NO: 1269565 - RNA, 23 nt, Human
agagguugcagugagcugagauc

SEQ ID NO: 1269566 - RNA, 24 nt, Human
agagguugcagugagcugagauca

SEQ ID NO: 1269567 - RNA, 20 nt, Human
agagguugcagugagcuggc

SEQ ID NO: 1269568 - RNA, 20 nt, Human
agccaccgcacccggccuca

SEQ ID NO: 1269569 - RNA, 18 nt, Human
agcuccgccuccuggguu

SEQ ID NO: 1269570 - RNA, 20 nt, Human
agcugccaaguaacugcuac

SEQ ID NO: 1269571 - RNA, 23 nt, Human
agcugggcaugguggcgcaugcc

SEQ ID NO: 1269572 - RNA, 22 nt, Human
aggcagaagaaucgcuugaacc

SEQ ID NO: 1269573 - RNA, 24 nt, Human
aggcagaagaaucgcuugaaccag

SEQ ID NO: 1269574 - RNA, 20 nt, Human
aggcagagguugcagugagc

SEQ ID NO: 1269575 - RNA, 24 nt, Human
aggcagagguugcagugagcugag

SEQ ID NO: 1269576 - RNA, 27 nt, Human
aggcaguaagugaagcagaagggaccc

SEQ ID NO: 1269577 - RNA, 24 nt, Human
aggccgaggcagaagaaucgcuug

SEQ ID NO: 1269578 - RNA, 21 nt, Human
aggcugaggugggcagaucac

SEQ ID NO: 1269579 - RNA, 24 nt, Human
aggcugaggugggcagaucacuug

SEQ ID NO: 1269580 - RNA, 25 nt, Human
aggcuggagugcaguggcaccaucu

SEQ ID NO: 1269581 - RNA, 24 nt, Human
agggaggcagagguugcagugagc

SEQ ID NO: 1269582 - RNA, 22 nt, Human
aggugggcagaucacuugagau

SEQ ID NO: 1269583 - RNA, 26 nt, Human
aggugggcagaucacuugagaucagg

SEQ ID NO: 1269584 - RNA, 19 nt, Human
aguagagacaggguuucac

SEQ ID NO: 1269585 - RNA, 20 nt, Human
aguagagaugggguuucacc

SEQ ID NO: 1269586 - RNA, 18 nt, Human
aguagcugggacuacagg

SEQ ID NO: 1269587 - RNA, 19 nt, Human
aguagcugggacuacaggc

SEQ ID NO: 1269588 - RNA, 18 nt, Human
aguagcugggauuacagg

SEQ ID NO: 1269589 - RNA, 24 nt, Human
agugcaguggcaccaucucggcuc

SEQ ID NO: 1269590 - RNA, 23 nt, Human
aguggcucaugccuguaaucuca

SEQ ID NO: 1269591 - RNA, 20 nt, Human
aguguaguggcgccaucuug

SEQ ID NO: 1269592 - RNA, 24 nt, Human
aucacgucauugcacuccagccug

SEQ ID NO: 1269593 - RNA, 20 nt, Human
aucacuugagaucaggaguu

SEQ ID NO: 1269594 - RNA, 19 nt, Human
augccuguaaucucaacac

SEQ ID NO: 1269595 - RNA, 19 nt, Human
augggguuucaccguguua

SEQ ID NO: 1269596 - RNA, 22 nt, Human
auuacaugaaccaagacugugg

SEQ ID NO: 1269597 - RNA, 20 nt, Human
auuagcugggcaugguggcc

SEQ ID NO: 1269598 - RNA, 20 nt, Human
auuauuuuauauauacauau

SEQ ID NO: 1269599 - RNA, 21 nt, Human
auucuccugccucagccuccc

SEQ ID NO: 1269600 - RNA, 21 nt, Human
auugcacuccagccugaguga

SEQ ID NO: 1269601 - RNA, 24 nt, Human
auugcacuccagccugagugacag

SEQ ID NO: 1269602 - RNA, 24 nt, Human
caaaacaauggcaaauuuauagaa

SEQ ID NO: 1269603 - RNA, 19 nt, Human
caaaggaccucgaaagacc

SEQ ID NO: 1269604 - RNA, 21 nt, Human
caacacuuugggaggcugagg

SEQ ID NO: 1269605 - RNA, 24 nt, Human
caacacuuugggaggcugaggugg

SEQ ID NO: 1269606 - RNA, 19 nt, Human
caacugcauuucaguaggu

SEQ ID NO: 1269607 - RNA, 20 nt, Human
caagguggugaaccaccgca

SEQ ID NO: 1269608 - RNA, 24 nt, Human
caccccagcuuccugaguagcugg

SEQ ID NO: 1269609 - RNA, 19 nt, Human
caccgcacccggccucaac

SEQ ID NO: 1269610 - RNA, 23 nt, Human
caccguguuagccaggauggucu

SEQ ID NO: 1269611 - RNA, 24 nt, Human
caccguguuagccaggauggucuu

SEQ ID NO: 1269612 - RNA, 19 nt, Human
caccucccggguucacgcc

SEQ ID NO: 1269613 - RNA, 24 nt, Human
caccucggccucccaaagugcugg

SEQ ID NO: 1269614 - RNA, 26 nt, Human
caccucuaacuccagcucggcggcuc

SEQ ID NO: 1269615 - RNA, 22 nt, Human
cacgccauucuccugccucagc

SEQ ID NO: 1269616 - RNA, 22 nt, Human
cacgccauucuccugccucagc

SEQ ID NO: 1269617 - RNA, 19 nt, Human
cacguaccucagucuacau

SEQ ID NO: 1269618 - RNA, 24 nt, Human
cacuauauugcccaggcuggucuc

SEQ ID NO: 1269619 - RNA, 27 nt, Human
cacuauauugcccaggcuggucucaaa

SEQ ID NO: 1269620 - RNA, 22 nt, Human
cacuccagccugagugacagag

SEQ ID NO: 1269621 - RNA, 22 nt, Human
cacuccagccugagugacagag

SEQ ID NO: 1269622 - RNA, 24 nt, Human
cacuccagccugagugacagagug

SEQ ID NO: 1269623 - RNA, 21 nt, Human
cacuggccccgaccccaggcc

SEQ ID NO: 1269624 - RNA, 19 nt, Human
cacuguguuagccaggaug

SEQ ID NO: 1269625 - RNA, 24 nt, Human
cacuguguuagccaggauggucuc

SEQ ID NO: 1269626 - RNA, 23 nt, Human
cacuucucauuugaaaugaagaa

SEQ ID NO: 1269627 - RNA, 19 nt, Human
cagaccuggugaagagcua

SEQ ID NO: 1269628 - RNA, 21 nt, Human
cagagugagacaccauccccc

SEQ ID NO: 1269629 - RNA, 27 nt, Human
cagaucacuugagaucaggaguuugag

SEQ ID NO: 1269630 - RNA, 21 nt, Human
cagcaauagaacacuugggua

SEQ ID NO: 1269631 - RNA, 23 nt, Human
cagccgggggcccggccccacgg

SEQ ID NO: 1269632 - RNA, 24 nt, Human
cagcuacucaggaggccgaggcag

SEQ ID NO: 1269633 - RNA, 20 nt, Human
cagcuuccugaguagcuggg

SEQ ID NO: 1269634 - RNA, 27 nt, Human
caggaggccgaggcagaagaaucgcuu

SEQ ID NO: 1269635 - RNA, 21 nt, Human
caggauaaaugcuaauucuua

SEQ ID NO: 1269636 - RNA, 25 nt, Human
caggcacccgccaccacgcccgccc

SEQ ID NO: 1269637 - RNA, 24 nt, Human
caggguuucacuguguuagccagg

SEQ ID NO: 1269638 - RNA, 18 nt, Human
cagguacccgaguguggc

SEQ ID NO: 1269639 - RNA, 19 nt, Human
caggugccugccaccacgc

SEQ ID NO: 1269640 - RNA, 23 nt, Human
caggugccugccaccacgccugg

SEQ ID NO: 1269641 - RNA, 19 nt, Human
cauugcacuccagccugag

SEQ ID NO: 1269642 - RNA, 19 nt, Human
cauugcacuccagccugag

SEQ ID NO: 1269643 - RNA, 19 nt, Human
cauugcacuccagccugag

SEQ ID NO: 1269644 - RNA, 20 nt, Human
cauugcacuccagccugagu

SEQ ID NO: 1269645 - RNA, 21 nt, Human
cauugcacuccagccugagug

SEQ ID NO: 1269646 - RNA, 23 nt, Human
cauugcacuccagccugagugac

SEQ ID NO: 1269647 - RNA, 24 nt, Human
cauugcacuccagccugagugaca

SEQ ID NO: 1269648 - RNA, 25 nt, Human
cauugcacuccagccugagugacag

SEQ ID NO: 1269649 - RNA, 19 nt, Human
ccaaagugcugggauuaca

SEQ ID NO: 1269650 - RNA, 21 nt, Human
ccaaagugcugggauuacagg

SEQ ID NO: 1269651 - RNA, 21 nt, Human
ccaaagugcugggauuacagg

SEQ ID NO: 1269652 - RNA, 22 nt, Human
ccaaagugcugggauuacaggc

SEQ ID NO: 1269653 - RNA, 23 nt, Human
ccaaagugcugggauuacaggcu

SEQ ID NO: 1269654 - RNA, 24 nt, Human
ccaaagugcugggauuacaggugu

SEQ ID NO: 1269655 - RNA, 20 nt, Human
ccaccacgccuggcuaauuu

SEQ ID NO: 1269656 - RNA, 23 nt, Human
ccaccccagcuuccugaguagcu

SEQ ID NO: 1269657 - RNA, 19 nt, Human
ccaccgcgcccagccuucc

SEQ ID NO: 1269658 - RNA, 20 nt, Human
ccacggagcuccaccucuaa

SEQ ID NO: 1269659 - RNA, 24 nt, Human
ccacuguccaacaaacauaaaaca

SEQ ID NO: 1269660 - RNA, 24 nt, Human
cccaaagugcugggauuacaggcu

SEQ ID NO: 1269661 - RNA, 22 nt, Human
cccaaguagcugggacuacagg

SEQ ID NO: 1269662 - RNA, 23 nt, Human
cccaaguagcugggacuacaggu

SEQ ID NO: 1269663 - RNA, 19 nt, Human
ccccacggagcuccaccuc

SEQ ID NO: 1269664 - RNA, 28 nt, Human
ccccuaauaaauaaauaaaaauaaaaaa

SEQ ID NO: 1269665 - RNA, 23 nt, Human
cccgaguagcugggacuacaggc

SEQ ID NO: 1269666 - RNA, 24 nt, Human
cccgaguagcugggacuacaggca

SEQ ID NO: 1269667 - RNA, 27 nt, Human
cccggaaccggggcagagaagaggaac

SEQ ID NO: 1269668 - RNA, 22 nt, Human
cccgucucggccucccaaagug

SEQ ID NO: 1269669 - RNA, 24 nt, Human
cccuccgggcgccaccucccagcg

SEQ ID NO: 1269670 - RNA, 24 nt, Human
cccucuguugcccaggcuggagug

SEQ ID NO: 1269671 - RNA, 18 nt, Human
cccuguacaggccgcuuc

SEQ ID NO: 1269672 - RNA, 19 nt, Human
ccgccaccacgcccgcccg

SEQ ID NO: 1269673 - RNA, 19 nt, Human
ccuccggcuccggcucauu

SEQ ID NO: 1269674 - RNA, 23 nt, Human
ccuccgggcgccaccucccagcg

SEQ ID NO: 1269675 - RNA, 25 nt, Human
ccucuguugcccaggcuggagugua

SEQ ID NO: 1269676 - RNA, 22 nt, Human
ccugaguagcugggauuacagg

SEQ ID NO: 1269677 - RNA, 23 nt, Human
ccugaguagcugggauuacaggu

SEQ ID NO: 1269678 - RNA, 24 nt, Human
ccugaguagcugggauuacaggug

SEQ ID NO: 1269679 - RNA, 24 nt, Human
ccugccucagccucccgaguagcu

SEQ ID NO: 1269680 - RNA, 19 nt, Human
ccuguaaucccagcuacuc

SEQ ID NO: 1269681 - RNA, 21 nt, Human
ccuguaaucccagcuacucag

SEQ ID NO: 1269682 - RNA, 20 nt, Human
ccuguaaucucaacacuuug

SEQ ID NO: 1269683 - RNA, 22 nt, Human
cgaaagaccccaucuacagccc

SEQ ID NO: 1269684 - RNA, 21 nt, Human
cgccggggccuccgccugcag

SEQ ID NO: 1269685 - RNA, 19 nt, Human
cgccuccuggguucacgcc

SEQ ID NO: 1269686 - RNA, 24 nt, Human
cgcucugucacccaggcuggagug

SEQ ID NO: 1269687 - RNA, 22 nt, Human
cgguguggcaugaucucggcuc

SEQ ID NO: 1269688 - RNA, 19 nt, Human
cuagauuccaacaaccuga

SEQ ID NO: 1269689 - RNA, 20 nt, Human
cuagcaagccuccuagcugc

SEQ ID NO: 1269690 - RNA, 24 nt, Human
cucacugcaagcuccaccucccgg

SEQ ID NO: 1269691 - RNA, 24 nt, Human
cucagccucccaaguagcugggac

SEQ ID NO: 1269692 - RNA, 24 nt, Human
cucagccucccgaguagcugggac

SEQ ID NO: 1269693 - RNA, 24 nt, Human
cucaugccuguaaucucaacacuu

SEQ ID NO: 1269694 - RNA, 19 nt, Human
cucauuugaaaugaagaac

SEQ ID NO: 1269695 - RNA, 21 nt, Human
cucccggguucacgccauucu

SEQ ID NO: 1269696 - RNA, 24 nt, Human
cucccucuguugcccaggcuggag

SEQ ID NO: 1269697 - RNA, 23 nt, Human
cuccugaccucgugaucugcccg

SEQ ID NO: 1269698 - RNA, 22 nt, Human
cuccugaccuugugauccgccc

SEQ ID NO: 1269699 - RNA, 25 nt, Human
cuccugccucagccucccaaguagc

SEQ ID NO: 1269700 - RNA, 22 nt, Human
cuccugccucagccucccgagu

SEQ ID NO: 1269701 - RNA, 21 nt, Human
cuccuggguucacgccauucu

SEQ ID NO: 1269702 - RNA, 24 nt, Human
cucgcucugucacccaggcuggag

SEQ ID NO: 1269703 - RNA, 24 nt, Human
cucucgaagcugaguggugcccag

SEQ ID NO: 1269704 - RNA, 21 nt, Human
cugaguagcugggauuacagg

SEQ ID NO: 1269705 - RNA, 23 nt, Human
cugaguagcugggauuacaggug

SEQ ID NO: 1269706 - RNA, 24 nt, Human
cugaguagcugggauuacaggugu

SEQ ID NO: 1269707 - RNA, 24 nt, Human
cugcaagcuccaccucccggguuc

SEQ ID NO: 1269708 - RNA, 19 nt, Human
cugcaggagccgcugcccc

SEQ ID NO: 1269709 - RNA, 23 nt, Human
cugccucagccucccaaguagcu

SEQ ID NO: 1269710 - RNA, 21 nt, Human
cuggccccgaccccaggcacg

SEQ ID NO: 1269711 - RNA, 19 nt, Human
cugucacccaggcuggagu

SEQ ID NO: 1269712 - RNA, 20 nt, Human
cuucucagcagaacuucugg

SEQ ID NO: 1269713 - RNA, 23 nt, Human
cuugagaucaggaguuugagauc

SEQ ID NO: 1269714 - RNA, 24 nt, Human
gaaaaaaaaggcauaacucugcga

SEQ ID NO: 1269715 - RNA, 21 nt, Human
gaaagaccccaucuacagccc

SEQ ID NO: 1269716 - RNA, 21 nt, Human
gaaccggggcagagaagagga

SEQ ID NO: 1269717 - RNA, 21 nt, Human
gaagaaucgcuugaaccaggg

SEQ ID NO: 1269718 - RNA, 22 nt, Human
gaccucgugaucugcccgucuc

SEQ ID NO: 1269719 - RNA, 24 nt, Human
gaccucgugaucugcccgucucgg

SEQ ID NO: 1269720 - RNA, 22 nt, Human
gaccuugugauccgcccaccuc

SEQ ID NO: 1269721 - RNA, 22 nt, Human
gaccuugugauccgcccaccuc

SEQ ID NO: 1269722 - RNA, 24 nt, Human
gaccuugugauccgcccaccucgg

SEQ ID NO: 1269723 - RNA, 22 nt, Human
gagaauaccccccuucucaaaa

SEQ ID NO: 1269724 - RNA, 22 nt, Human
gagaaucucuauucugcaggua

SEQ ID NO: 1269725 - RNA, 19 nt, Human
gagauacuuccaccccagc

SEQ ID NO: 1269726 - RNA, 23 nt, Human
gagaucacgucauugcacuccag

SEQ ID NO: 1269727 - RNA, 24 nt, Human
gagaugggguuucaccguguuagc

SEQ ID NO: 1269728 - RNA, 23 nt, Human
gaggcagaagaaucgcuugaacc

SEQ ID NO: 1269729 - RNA, 25 nt, Human
gaguagcugggacuacaggcacccg

SEQ ID NO: 1269730 - RNA, 19 nt, Human
gaguagcugggauuacagg

SEQ ID NO: 1269731 - RNA, 24 nt, Human
gaguagcugggauuacagguguga

SEQ ID NO: 1269732 - RNA, 25 nt, Human
gaguagcugggauuacaggugugag

SEQ ID NO: 1269733 - RNA, 24 nt, Human
gaucacuugagaucaggaguuuga

SEQ ID NO: 1269734 - RNA, 18 nt, Human
gaugucgcccaggcugga

SEQ ID NO: 1269735 - RNA, 23 nt, Human
gauuacaggcuuuagccacugca

SEQ ID NO: 1269736 - RNA, 18 nt, Human
gauuacaggugugagcca

SEQ ID NO: 1269737 - RNA, 18 nt, Human
gauuacaggugugagcca

SEQ ID NO: 1269738 - RNA, 18 nt, Human
gauuacaggugugagcca

SEQ ID NO: 1269739 - RNA, 22 nt, Human
gauuacaggugugagccaccgc

SEQ ID NO: 1269740 - RNA, 22 nt, Human
gauuacaggugugagccaccgc

SEQ ID NO: 1269741 - RNA, 24 nt, Human
gauuacaggugugagccaucaugu

SEQ ID NO: 1269742 - RNA, 21 nt, Human
gcacaaacuuuaaaacuuaca

SEQ ID NO: 1269743 - RNA, 24 nt, Human
gcacuccagccugagugacagagu

SEQ ID NO: 1269744 - RNA, 18 nt, Human
gccacauggcaagaacug

SEQ ID NO: 1269745 - RNA, 22 nt, Human
gccaucuuggcgugagccaccg

SEQ ID NO: 1269746 - RNA, 20 nt, Human
gcccaggcuggaguacggug

SEQ ID NO: 1269747 - RNA, 26 nt, Human
gcccaggcuggaguacgguguggcau

SEQ ID NO: 1269748 - RNA, 23 nt, Human
gcccggcuaauuuuuuguauuuu

SEQ ID NO: 1269749 - RNA, 25 nt, Human
gccuccuggguucacgccauucucc

SEQ ID NO: 1269750 - RNA, 23 nt, Human
gccuggcuaauuuuuuguauuuu

SEQ ID NO: 1269751 - RNA, 21 nt, Human
gcucauucuccgccggggccu

SEQ ID NO: 1269752 - RNA, 25 nt, Human
gcucugucacccaggcuggagugca

SEQ ID NO: 1269753 - RNA, 20 nt, Human
gcuggagugcaguggcacca

SEQ ID NO: 1269754 - RNA, 21 nt, Human
gcugggauuacaggcuuuagc

SEQ ID NO: 1269755 - RNA, 19 nt, Human
gcugggcacaguggcucau

SEQ ID NO: 1269756 - RNA, 23 nt, Human
gcuggucucaaacuccugaccuc

SEQ ID NO: 1269757 - RNA, 24 nt, Human
ggaguacgguguggcaugaucucg

SEQ ID NO: 1269758 - RNA, 23 nt, Human
ggagucucccucuguugcccagg

SEQ ID NO: 1269759 - RNA, 24 nt, Human
ggauggucuugaucuccugaccuu

SEQ ID NO: 1269760 - RNA, 24 nt, Human
ggauuacaggugugagccaucaug

SEQ ID NO: 1269761 - RNA, 25 nt, Human
ggcagaucacuugagaucaggaguu

SEQ ID NO: 1269762 - RNA, 20 nt, Human
ggcaugguggcgcaugccug

SEQ ID NO: 1269763 - RNA, 27 nt, Human
ggccgaggcagaagaaucgcuugaacc

SEQ ID NO: 1269764 - RNA, 19 nt, Human
ggcgugagccaccgcaccc

SEQ ID NO: 1269765 - RNA, 23 nt, Human
ggcugggcacaguggcucaugcc

SEQ ID NO: 1269766 - RNA, 24 nt, Human
ggcuggucucaaacuccugaccuc

SEQ ID NO: 1269767 - RNA, 18 nt, Human
gggcacaguggcucaugc

SEQ ID NO: 1269768 - RNA, 24 nt, Human
gggcacaguggcucaugccuguaa

SEQ ID NO: 1269769 - RNA, 24 nt, Human
gggcaugguggcgcaugccuguaa

SEQ ID NO: 1269770 - RNA, 18 nt, Human
gggguuucaccguguuag

SEQ ID NO: 1269771 - RNA, 22 nt, Human
gggguuucaccguguuagccag

SEQ ID NO: 1269772 - RNA, 22 nt, Human
ggguuucaccguguuagccagg

SEQ ID NO: 1269773 - RNA, 20 nt, Human
ggucucgaucuccugaccuc

SEQ ID NO: 1269774 - RNA, 20 nt, Human
ggucuugaucuccugaccuu

SEQ ID NO: 1269775 - RNA, 24 nt, Human
gguggcgcaugccuguaaucccag

SEQ ID NO: 1269776 - RNA, 19 nt, Human
guaaaaagugcaacuuaga

SEQ ID NO: 1269777 - RNA, 20 nt, Human
guaccuguaagcacuuucag

SEQ ID NO: 1269778 - RNA, 24 nt, Human
guagcugggauuacaggugugagc

SEQ ID NO: 1269779 - RNA, 23 nt, Human
gucuagaugucgcccaggcugga

SEQ ID NO: 1269780 - RNA, 24 nt, Human
gucucgcucugucacccaggcugg

SEQ ID NO: 1269781 - RNA, 24 nt, Human
gugagccaccgcgcccagccuucc

SEQ ID NO: 1269782 - RNA, 24 nt, Human
gugauccgcccaccucggccuccc

SEQ ID NO: 1269783 - RNA, 19 nt, Human
gugcccagcugacagucag

SEQ ID NO: 1269784 - RNA, 19 nt, Human
gugggaggccucucgaagc

SEQ ID NO: 1269785 - RNA, 25 nt, Human
uaacaaugcccuaugaucucaugac

SEQ ID NO: 1269786 - RNA, 24 nt, Human
uaacaugaugaaacccccucucua

SEQ ID NO: 1269787 - RNA, 20 nt, Human
uaacuucuccaccgccaucu

SEQ ID NO: 1269788 - RNA, 21 nt, Human
uaacuucuccaccgccaucuc

SEQ ID NO: 1269789 - RNA, 19 nt, Human
uaaucuaauaacacugaaa

SEQ ID NO: 1269790 - RNA, 24 nt, Human
uaauuuuuuguauuuuuaguagag

SEQ ID NO: 1269791 - RNA, 24 nt, Human
uaauuuuuuguauuuuuaguagag

SEQ ID NO: 1269792 - RNA, 25 nt, Human
uaauuuuuuguauuuuuaguagaga

SEQ ID NO: 1269793 - RNA, 23 nt, Human
uacagccuguacagacauuacca

SEQ ID NO: 1269794 - RNA, 23 nt, Human
uacaggcacccgccaccacgccc

SEQ ID NO: 1269795 - RNA, 22 nt, Human
uacaggugccugccaccacgcc

SEQ ID NO: 1269796 - RNA, 24 nt, Human
uacaggugugagccaccgcgccca

SEQ ID NO: 1269797 - RNA, 24 nt, Human
uacaggugugagccaucauguccu

SEQ ID NO: 1269798 - RNA, 18 nt, Human
uaccccccuucucaaaaa

SEQ ID NO: 1269799 - RNA, 21 nt, Human
uaccccccuucucaaaaacaa

SEQ ID NO: 1269800 - RNA, 19 nt, Human
uacccuguaacaguaaaug

SEQ ID NO: 1269801 - RNA, 21 nt, Human
uacuccaaucagguagaaagg

SEQ ID NO: 1269802 - RNA, 19 nt, Human
uagaaucacagaucaggag

SEQ ID NO: 1269803 - RNA, 22 nt, Human
uagagacaggguuucacugugu

SEQ ID NO: 1269804 - RNA, 19 nt, Human
uagcugccaaguaacugcu

SEQ ID NO: 1269805 - RNA, 22 nt, Human
uagcugggcaugguggcgcaug

SEQ ID NO: 1269806 - RNA, 20 nt, Human
uaguagagacaggguuucac

SEQ ID NO: 1269807 - RNA, 24 nt, Human
uaguagagacaggguuucacugug

SEQ ID NO: 1269808 - RNA, 21 nt, Human
uaguagagaugggguuucacc

SEQ ID NO: 1269809 - RNA, 24 nt, Human
uaguagagaugggguuucaccgug

SEQ ID NO: 1269810 - RNA, 23 nt, Human
uauauugcccaggcuggucucaa

SEQ ID NO: 1269811 - RNA, 24 nt, Human
uauauugcccaggcuggucucaaa

SEQ ID NO: 1269812 - RNA, 20 nt, Human
uaucagcagacacuuagcua

SEQ ID NO: 1269813 - RNA, 21 nt, Human
uauggaacuuuaacaaugccc

SEQ ID NO: 1269814 - RNA, 20 nt, Human
ucaacugcauuucaguaggu

SEQ ID NO: 1269815 - RNA, 22 nt, Human
ucaaugaaaugcaguacuaaaa

SEQ ID NO: 1269816 - RNA, 24 nt, Human
ucacccaggcuggagugcaguggc

SEQ ID NO: 1269817 - RNA, 24 nt, Human
ucaccguguuagccaggauggucu

SEQ ID NO: 1269818 - RNA, 23 nt, Human
ucacgucauugcacuccagccug

SEQ ID NO: 1269819 - RNA, 24 nt, Human
ucacugcaagcuccaccucccggg

SEQ ID NO: 1269820 - RNA, 18 nt, Human
ucacugcaagcuccgccu

SEQ ID NO: 1269821 - RNA, 23 nt, Human
ucacugcaagcuccgccuccugg

SEQ ID NO: 1269822 - RNA, 24 nt, Human
ucacugcaagcuccgccuccuggg

SEQ ID NO: 1269823 - RNA, 24 nt, Human
ucacuguguuagccaggauggucu

SEQ ID NO: 1269824 - RNA, 19 nt, Human
ucacuugagaucaggaguu

SEQ ID NO: 1269825 - RNA, 20 nt, Human
ucagccucccaaguagcugg

SEQ ID NO: 1269826 - RNA, 23 nt, Human
ucagccucccgaguagcugggac

SEQ ID NO: 1269827 - RNA, 23 nt, Human
ucaggagauacuuccaccccagc

SEQ ID NO: 1269828 - RNA, 18 nt, Human
ucauugcacuccagccug

SEQ ID NO: 1269829 - RNA, 20 nt, Human
ucauugcacuccagccugag

SEQ ID NO: 1269830 - RNA, 21 nt, Human
ucauugcacuccagccugagu

SEQ ID NO: 1269831 - RNA, 24 nt, Human
ucauugcacuccagccugagugac

SEQ ID NO: 1269832 - RNA, 23 nt, Human
uccagccugagugacagagugag

SEQ ID NO: 1269833 - RNA, 24 nt, Human
uccagccugagugacagagugaga

SEQ ID NO: 1269834 - RNA, 23 nt, Human
ucccaaagugcugggauuacagg

SEQ ID NO: 1269835 - RNA, 24 nt, Human
ucccaaagugcugggauuacaggc

SEQ ID NO: 1269836 - RNA, 24 nt, Human
ucccaaguagcugggacuacaggu

SEQ ID NO: 1269837 - RNA, 19 nt, Human
ucccagcggaccgcccgga

SEQ ID NO: 1269838 - RNA, 22 nt, Human
ucccagcggaccgcccggaacc

SEQ ID NO: 1269839 - RNA, 22 nt, Human
ucccccaccccuaauaaauaaa

SEQ ID NO: 1269840 - RNA, 24 nt, Human
ucccgaguagcugggacuacaggc

SEQ ID NO: 1269841 - RNA, 21 nt, Human
ucccggguucacgccauucuc

SEQ ID NO: 1269842 - RNA, 24 nt, Human
ucccggguucacgccauucuccug

SEQ ID NO: 1269843 - RNA, 20 nt, Human
ucccuccgggcgccaccucc

SEQ ID NO: 1269844 - RNA, 20 nt, Human
ucccucuguugcccaggcug

SEQ ID NO: 1269845 - RNA, 24 nt, Human
ucccucuguugcccaggcuggagu

SEQ ID NO: 1269846 - RNA, 22 nt, Human
uccgccggggccuccgccugca

SEQ ID NO: 1269847 - RNA, 24 nt, Human
uccugaguagcugggauuacaggu

SEQ ID NO: 1269848 - RNA, 24 nt, Human
uccuggguucacgccauucuccug

SEQ ID NO: 1269849 - RNA, 23 nt, Human
ucgcccaggcuggaguacggugu

SEQ ID NO: 1269850 - RNA, 18 nt, Human
ucggccucccaaagugcu

SEQ ID NO: 1269851 - RNA, 20 nt, Human
ucgucuugcugccgccgcgc

SEQ ID NO: 1269852 - RNA, 20 nt, Human
ucuagaugucgcccaggcug

SEQ ID NO: 1269853 - RNA, 22 nt, Human
ucuagaugucgcccaggcugga

SEQ ID NO: 1269854 - RNA, 24 nt, Human
ucuagaugucgcccaggcuggagu

SEQ ID NO: 1269855 - RNA, 23 nt, Human
ucucacuauauugcccaggcugg

SEQ ID NO: 1269856 - RNA, 26 nt, Human
ucucacuauauugcccaggcuggucu

SEQ ID NO: 1269857 - RNA, 19 nt, Human
ucuccaaauuccacuugaa

SEQ ID NO: 1269858 - RNA, 23 nt, Human
ucucccucuguugcccaggcugg

SEQ ID NO: 1269859 - RNA, 24 nt, Human
ucucccucuguugcccaggcugga

SEQ ID NO: 1269860 - RNA, 19 nt, Human
ucucgcucugucacccagg

SEQ ID NO: 1269861 - RNA, 23 nt, Human
ucucgcucugucacccaggcugg

SEQ ID NO: 1269862 - RNA, 24 nt, Human
ucucgcucugucacccaggcugga

SEQ ID NO: 1269863 - RNA, 26 nt, Human
ucucgcucugucacccaggcuggagu

SEQ ID NO: 1269864 - RNA, 27 nt, Human
ucucgcucugucacccaggcuggagug

SEQ ID NO: 1269865 - RNA, 20 nt, Human
ucucggccucccaaagugcu

SEQ ID NO: 1269866 - RNA, 21 nt, Human
ucucuacuaaaaacacaaaaa

SEQ ID NO: 1269867 - RNA, 19 nt, Human
ucugccaggagaccaccac

SEQ ID NO: 1269868 - RNA, 24 nt, Human
ucugucacccaggcuggagugcag

SEQ ID NO: 1269869 - RNA, 22 nt, Human
ucuguguucucuucauugaaau

SEQ ID NO: 1269870 - RNA, 18 nt, Human
ucuguugcccaggcugga

SEQ ID NO: 1269871 - RNA, 24 nt, Human
ucuguugcccaggcuggaguguag

SEQ ID NO: 1269872 - RNA, 21 nt, Human
ugaaaugaagaacaugcuguc

SEQ ID NO: 1269873 - RNA, 22 nt, Human
ugaaaugaagaacaugcuguca

SEQ ID NO: 1269874 - RNA, 20 nt, Human
ugaaccagggaggcagaggu

SEQ ID NO: 1269875 - RNA, 18 nt, Human
ugaagcagaaguaauuuc

SEQ ID NO: 1269876 - RNA, 22 nt, Human
ugaagcagaaguaauuuccaag

SEQ ID NO: 1269877 - RNA, 21 nt, Human
ugacagaaaaaaaaggcauaa

SEQ ID NO: 1269878 - RNA, 18 nt, Human
ugacuccuaggcuaccca

SEQ ID NO: 1269879 - RNA, 23 nt, Human
ugagaaggccacauggcaagaac

SEQ ID NO: 1269880 - RNA, 20 nt, Human
ugagaauaccccccuucuca

SEQ ID NO: 1269881 - RNA, 25 nt, Human
ugagaauaccccccuucucaaaaac

SEQ ID NO: 1269882 - RNA, 21 nt, Human
ugagacaaaacaauggcaaau

SEQ ID NO: 1269883 - RNA, 22 nt, Human
ugagcugagaucacgucauugc

SEQ ID NO: 1269884 - RNA, 26 nt, Human
ugaggugggcagaucacuugagauca

SEQ ID NO: 1269885 - RNA, 20 nt, Human
ugauccaacccuacagauaa

SEQ ID NO: 1269886 - RNA, 22 nt, Human
ugcacuccagccugagugacag

SEQ ID NO: 1269887 - RNA, 21 nt, Human
ugcccaggcuggaguguagug

SEQ ID NO: 1269888 - RNA, 22 nt, Human
ugcccaggcuggaguguagugg

SEQ ID NO: 1269889 - RNA, 24 nt, Human
ugcccaggcuggaguguaguggcg

SEQ ID NO: 1269890 - RNA, 24 nt, Human
ugcccaggcuggucucaaacuccu

SEQ ID NO: 1269891 - RNA, 24 nt, Human
ugccucacuguaaauuacacuugc

SEQ ID NO: 1269892 - RNA, 24 nt, Human
ugccucagccucccaaguagcugg

SEQ ID NO: 1269893 - RNA, 24 nt, Human
ugccucagccucccgaguagcugg

SEQ ID NO: 1269894 - RNA, 24 nt, Human
ugccuguaaucccagcuacucagg

SEQ ID NO: 1269895 - RNA, 23 nt, Human
ugccuguaaucucaacacuuugg

SEQ ID NO: 1269896 - RNA, 24 nt, Human
ugccuguaaucucaacacuuuggg

SEQ ID NO: 1269897 - RNA, 21 nt, Human
ugcgauaacucacccacuguc

SEQ ID NO: 1269898 - RNA, 18 nt, Human
ugcucugagggguggaga

SEQ ID NO: 1269899 - RNA, 24 nt, Human
ugcugggauuacaggugugagcca

SEQ ID NO: 1269900 - RNA, 23 nt, Human
uggaacucauaccuugcuucuag

SEQ ID NO: 1269901 - RNA, 23 nt, Human
uggagcuccgagaagagcacuga

SEQ ID NO: 1269902 - RNA, 26 nt, Human
uggaguacgguguggcaugaucucgg

SEQ ID NO: 1269903 - RNA, 24 nt, Human
uggagucucccucuguugcccagg

SEQ ID NO: 1269904 - RNA, 23 nt, Human
uggagugcaguggcaccaucucg

SEQ ID NO: 1269905 - RNA, 24 nt, Human
uggagugcaguggcaccaucucgg

SEQ ID NO: 1269906 - RNA, 21 nt, Human
uggcaagaacugugggaggcc

SEQ ID NO: 1269907 - RNA, 19 nt, Human
uggcaccaucucggcucac

SEQ ID NO: 1269908 - RNA, 25 nt, Human
uggccuggcuaauggggcauauucc

SEQ ID NO: 1269909 - RNA, 21 nt, Human
uggcgcaugccuguaauccca

SEQ ID NO: 1269910 - RNA, 21 nt, Human
uggcucaugccuguaaucuca

SEQ ID NO: 1269911 - RNA, 24 nt, Human
uggcucaugccuguaaucucaaca

SEQ ID NO: 1269912 - RNA, 21 nt, Human
ugggacuacaggcacccgcca

SEQ ID NO: 1269913 - RNA, 22 nt, Human
ugggacuacaggcacccgccac

SEQ ID NO: 1269914 - RNA, 24 nt, Human
ugggacuacaggcacccgccacca

SEQ ID NO: 1269915 - RNA, 21 nt, Human
ugggacuacaggugccugcca

SEQ ID NO: 1269916 - RNA, 22 nt, Human
ugggacuacaggugccugccac

SEQ ID NO: 1269917 - RNA, 24 nt, Human
ugggacuacaggugccugccacca

SEQ ID NO: 1269918 - RNA, 18 nt, Human
ugggaggccucucgaagc

SEQ ID NO: 1269919 - RNA, 20 nt, Human
ugggaggcugaggugggcag

SEQ ID NO: 1269920 - RNA, 24 nt, Human
ugggaggcugaggugggcagauca

SEQ ID NO: 1269921 - RNA, 21 nt, Human
ugggauuacaggcuuuagcca

SEQ ID NO: 1269922 - RNA, 22 nt, Human
ugggauuacaggcuuuagccac

SEQ ID NO: 1269923 - RNA, 22 nt, Human
ugggauuacaggcuuuagccac

SEQ ID NO: 1269924 - RNA, 24 nt, Human
ugggauuacaggcuuuagccacug

SEQ ID NO: 1269925 - RNA, 18 nt, Human
ugggauuacaggugugag

SEQ ID NO: 1269926 - RNA, 19 nt, Human
ugggauuacaggugugagc

SEQ ID NO: 1269927 - RNA, 19 nt, Human
ugggauuacaggugugagc

SEQ ID NO: 1269928 - RNA, 21 nt, Human
ugggauuacaggugugagcca

SEQ ID NO: 1269929 - RNA, 21 nt, Human
ugggauuacaggugugagcca

SEQ ID NO: 1269930 - RNA, 21 nt, Human
ugggauuacaggugugagcca

SEQ ID NO: 1269931 - RNA, 22 nt, Human
ugggauuacaggugugagccac

SEQ ID NO: 1269932 - RNA, 23 nt, Human
ugggauuacaggugugagccacc

SEQ ID NO: 1269933 - RNA, 24 nt, Human
ugggauuacaggugugagccaccg

SEQ ID NO: 1269934 - RNA, 22 nt, Human
ugggauuacaggugugagccau

SEQ ID NO: 1269935 - RNA, 23 nt, Human
ugggauuacaggugugagccauc

SEQ ID NO: 1269936 - RNA, 24 nt, Human
ugggauuacaggugugagccauca

SEQ ID NO: 1269937 - RNA, 24 nt, Human
ugggcagaucacuugagaucagga

SEQ ID NO: 1269938 - RNA, 24 nt, Human
uggggguaaaaagugcaacuuaga

SEQ ID NO: 1269939 - RNA, 24 nt, Human
ugggguuucaccguguuagccagg

SEQ ID NO: 1269940 - RNA, 20 nt, Human
uggguucacgccauucuccu

SEQ ID NO: 1269941 - RNA, 18 nt, Human
uggugaaccaccgcagcu

SEQ ID NO: 1269942 - RNA, 24 nt, Human
ugguggcgcaugccuguaauccca

SEQ ID NO: 1269943 - RNA, 20 nt, Human
uuagcugggcaugguggcgc

SEQ ID NO: 1269944 - RNA, 21 nt, Human
uuaguagagacaggguuucac

SEQ ID NO: 1269945 - RNA, 24 nt, Human
uuaguagagacaggguuucacugu

SEQ ID NO: 1269946 - RNA, 18 nt, Human
uuaguagagaugggguuu

SEQ ID NO: 1269947 - RNA, 22 nt, Human
uuaguagagaugggguuucacc

SEQ ID NO: 1269948 - RNA, 24 nt, Human
uuaguagagaugggguuucaccgu

SEQ ID NO: 1269949 - RNA, 20 nt, Human
uucaaaggaucaccugcacc

SEQ ID NO: 1269950 - RNA, 21 nt, Human
uucacuguguuagccaggaug

SEQ ID NO: 1269951 - RNA, 21 nt, Human
uugaacauagaauauuagcau

SEQ ID NO: 1269952 - RNA, 18 nt, Human
uugaagaaacugccaugu

SEQ ID NO: 1269953 - RNA, 20 nt, Human
uugagaaucucuauucugca

SEQ ID NO: 1269954 - RNA, 21 nt, Human
uugagacaaaacaauggcaaa

SEQ ID NO: 1269955 - RNA, 23 nt, Human
uugagacagucucgcucugucac

SEQ ID NO: 1269956 - RNA, 18 nt, Human
uugcagugagcugagauc

SEQ ID NO: 1269957 - RNA, 19 nt, Human
uugcagugagcugagauca

SEQ ID NO: 1269958 - RNA, 20 nt, Human
uugcagugagcugagaucac

SEQ ID NO: 1269959 - RNA, 24 nt, Human
uugcccaggcuggaguguaguggc

SEQ ID NO: 1269960 - RNA, 25 nt, Human
uugggaggcugaggugggcagauca

SEQ ID NO: 1269961 - RNA, 23 nt, Human
uuguauuuuuaguagagaugggg

SEQ ID NO: 1269962 - RNA, 24 nt, Human
uuguuuuuuuuuuuugagacaguc

SEQ ID NO: 1269963 - RNA, 19 nt, Human
uuucaccguguuagccagg

SEQ ID NO: 1269964 - RNA, 19 nt, Human
uuucacuguguuagccagg

SEQ ID NO: 1269965 - RNA, 22 nt, Human
uuuccccagcucauaguugaau

SEQ ID NO: 1269966 - RNA, 20 nt, Human
uuuuguauuuuuaguagaga

SEQ ID NO: 1269967 - RNA, 24 nt, Human
uuuuuaguagagacaggguuucac

SEQ ID NO: 1269968 - RNA, 24 nt, Human
uuuuuaguagagaugggguuucac

SEQ ID NO: 1269969 - RNA, 21 nt, Human
uuuuuguauuuuuaguagaga

SEQ ID NO: 1269970 - RNA, 21 nt, Human
uuuuuguauuuuuaguagaga

SEQ ID NO: 1269971 - RNA, 24 nt, Human
uuuuuuguauuuuuaguagagaca

SEQ ID NO: 1269972 - RNA, 23 nt, Human
aaaaacacacaccaaggaaccaa

SEQ ID NO: 1269973 - RNA, 25 nt, Human
aaaaacacacaccaaggaaccaaga

SEQ ID NO: 1269974 - RNA, 23 nt, Human
aaaauagaaaaacauaagcuugg

SEQ ID NO: 1269975 - RNA, 20 nt, Human
aaacaaaaaugauaggguca

SEQ ID NO: 1269976 - RNA, 19 nt, Human
aaacacacaccaaggaacc

SEQ ID NO: 1269977 - RNA, 23 nt, Human
aaacauaagcuuggugaaggcaa

SEQ ID NO: 1269978 - RNA, 21 nt, Human
aaaucaaaaauuaccccaaag

SEQ ID NO: 1269979 - RNA, 25 nt, Human
aacauaacuuuucuuugaguucacu

SEQ ID NO: 1269980 - RNA, 18 nt, Human
aaccagcaacuccugagg

SEQ ID NO: 1269981 - RNA, 24 nt, Human
aaccaggccauccaucccaggacc

SEQ ID NO: 1269982 - RNA, 28 nt, Human
aagaacagcacgggaaagaccgguaccc

SEQ ID NO: 1269983 - RNA, 24 nt, Human
aagcuuucuuucuugguaaaaauc

SEQ ID NO: 1269984 - RNA, 24 nt, Human
aaggaaccaagaguuuagcuacuu

SEQ ID NO: 1269985 - RNA, 18 nt, Human
aaggagcagcaaaucaca

SEQ ID NO: 1269986 - RNA, 19 nt, Human
aaucuggaccagagauaca

SEQ ID NO: 1269987 - RNA, 27 nt, Human
aaugaacaaacaaaaacacacaccaag

SEQ ID NO: 1269988 - RNA, 18 nt, Human
acaaacaaaaacacacac

SEQ ID NO: 1269989 - RNA, 21 nt, Human
accccaaagacauagacaagu

SEQ ID NO: 1269990 - RNA, 25 nt, Human
agguaguugcccaacauaacuuuuc

SEQ ID NO: 1269991 - RNA, 20 nt, Human
aggucccuccaacaacacau

SEQ ID NO: 1269992 - RNA, 25 nt, Human
agugauaagggaaagagcugagaaa

SEQ ID NO: 1269993 - RNA, 21 nt, Human
aguugcccaacauaacuuuuc

SEQ ID NO: 1269994 - RNA, 25 nt, Human
aucccaggaccugccaauuuucauc

SEQ ID NO: 1269995 - RNA, 20 nt, Human
augauaacagcuccugcaug

SEQ ID NO: 1269996 - RNA, 26 nt, Human
auuuggguggggacacagccaaacua

SEQ ID NO: 1269997 - RNA, 24 nt, Human
caaaaacacacaccaaggaaccaa

SEQ ID NO: 1269998 - RNA, 20 nt, Human
caaaaauuaccccaaagaca

SEQ ID NO: 1269999 - RNA, 28 nt, Human
caaacaaaaacacacaccaaccccgggg

SEQ ID NO: 1270000 - RNA, 26 nt, Human
caaacuauaucaaucaccaucagaaa

SEQ ID NO: 1270001 - RNA, 23 nt, Human
caacaacacaugggaauucaaga

SEQ ID NO: 1270002 - RNA, 19 nt, Human
caagcagagauaacaaaac

SEQ ID NO: 1270003 - RNA, 22 nt, Human
caaggaaccaagaguuuagcua

SEQ ID NO: 1270004 - RNA, 24 nt, Human
caauggcaucuacucaagucaaac

SEQ ID NO: 1270005 - RNA, 18 nt, Human
caaugucaucaacccaaa

SEQ ID NO: 1270006 - RNA, 22 nt, Human
cacaccaaggaaccaagaguuu

SEQ ID NO: 1270007 - RNA, 23 nt, Human
cagcaaaucacaucuuauauaga

SEQ ID NO: 1270008 - RNA, 27 nt, Human
cagcacgggaaagacuugcccccauga

SEQ ID NO: 1270009 - RNA, 21 nt, Human
cagucuaaugcaaacucagaa

SEQ ID NO: 1270010 - RNA, 23 nt, Human
ccauccaucccaggaccugccaa

SEQ ID NO: 1270011 - RNA, 21 nt, Human
cccaaagacauagacaaguac

SEQ ID NO: 1270012 - RNA, 22 nt, Human
cccaccaggucccuccaacaac

SEQ ID NO: 1270013 - RNA, 23 nt, Human
ccccaaagacauagacaaguacu

SEQ ID NO: 1270014 - RNA, 21 nt, Human
ccugaggcaaggcccaauaag

SEQ ID NO: 1270015 - RNA, 21 nt, Human
ccugaggcaaggcccaauaag

SEQ ID NO: 1270016 - RNA, 21 nt, Human
ccugcucugucagcccaaggg

SEQ ID NO: 1270017 - RNA, 20 nt, Human
ccuugucuaacacgcucuuc

SEQ ID NO: 1270018 - RNA, 24 nt, Human
cggaaggcaaggagcagcaaauca

SEQ ID NO: 1270019 - RNA, 18 nt, Human
cgggaaagacuugccccc

SEQ ID NO: 1270020 - RNA, 23 nt, Human
gaaaacucccucuuauaauaacc

SEQ ID NO: 1270021 - RNA, 25 nt, Human
gaccugccaauuuucaucccauuca

SEQ ID NO: 1270022 - RNA, 21 nt, Human
gagacuuccucacuaucacaa

SEQ ID NO: 1270023 - RNA, 21 nt, Human
gaucuaaaaaacaauaaaacc

SEQ ID NO: 1270024 - RNA, 22 nt, Human
gcagaguggugggaguaggagg

SEQ ID NO: 1270025 - RNA, 22 nt, Human
gcuacuuuccuuuucuaaaacu

SEQ ID NO: 1270026 - RNA, 20 nt, Human
ggggcagaguucacugcaag

SEQ ID NO: 1270027 - RNA, 24 nt, Human
gguaaaaaucaaacaauccacaaa

SEQ ID NO: 1270028 - RNA, 18 nt, Human
guacuagaaaugaacaaa

SEQ ID NO: 1270029 - RNA, 22 nt, Human
uaaaaaacaauaaaaccuugaa

SEQ ID NO: 1270030 - RNA, 25 nt, Human
uaacaaaacuuugagguaguugccc

SEQ ID NO: 1270031 - RNA, 26 nt, Human
uacuagaaaugaacaaacaaaaacac

SEQ ID NO: 1270032 - RNA, 21 nt, Human
uacuguuuuucaccgugaaca

SEQ ID NO: 1270033 - RNA, 25 nt, Human
uagaaguagccacuuucuggauggg

SEQ ID NO: 1270034 - RNA, 24 nt, Human
uagagcucacucaaguagaaaucu

SEQ ID NO: 1270035 - RNA, 23 nt, Human
uaggagaaagcuuucuuucuugg

SEQ ID NO: 1270036 - RNA, 21 nt, Human
uaucacaagaacagcacggga

SEQ ID NO: 1270037 - RNA, 19 nt, Human
ucaacccaaagggaacccc

SEQ ID NO: 1270038 - RNA, 20 nt, Human
ucagaaaccuuggcaguuuu

SEQ ID NO: 1270039 - RNA, 19 nt, Human
uccacauggcuggggaggc

SEQ ID NO: 1270040 - RNA, 18 nt, Human
ucccagggcccugguuac

SEQ ID NO: 1270041 - RNA, 24 nt, Human
ucccauaaaccuggacucccuaag

SEQ ID NO: 1270042 - RNA, 19 nt, Human
ucccuccaacaacacaugg

SEQ ID NO: 1270043 - RNA, 24 nt, Human
ucugccuucuccuauuauauuccc

SEQ ID NO: 1270044 - RNA, 23 nt, Human
ugaacaaaaauugcaagcagaga

SEQ ID NO: 1270045 - RNA, 24 nt, Human
ugaacaaacaaaaacacacaccaa

SEQ ID NO: 1270046 - RNA, 22 nt, Human
ugagauuuggguggggacacag

SEQ ID NO: 1270047 - RNA, 24 nt, Human
ugaggcaaggcccaauaagggcaa

SEQ ID NO: 1270048 - RNA, 24 nt, Human
ugaggcaaggcccaauaagggcaa

SEQ ID NO: 1270049 - RNA, 22 nt, Human
ugguccgcacagaugagaacug

SEQ ID NO: 1270050 - RNA, 20 nt, Human
ugucaucaacccaaagggaa

SEQ ID NO: 1270051 - RNA, 24 nt, Human
uucaagaugagauuugggugggga

SEQ ID NO: 1270052 - RNA, 18 nt, Human
uucauagagugcuuggac

SEQ ID NO: 1270053 - RNA, 23 nt, Human
uugaauguuucccauaaaccugg

SEQ ID NO: 1270054 - RNA, 21 nt, Human
uuuuucaccgugaacagucua

SEQ ID NO: 1270055 - RNA, 20 nt, Human
aaaaacaccguucuggauca

SEQ ID NO: 1270056 - RNA, 18 nt, Human
aaacaauaaaaacuggca

SEQ ID NO: 1270057 - RNA, 18 nt, Human
aaacaauguuaauaccau

SEQ ID NO: 1270058 - RNA, 21 nt, Human
aaacaccguucuggaucagaa

SEQ ID NO: 1270059 - RNA, 23 nt, Human
aaacaccguucuggaucagaauc

SEQ ID NO: 1270060 - RNA, 21 nt, Human
aaacccagauagcuggcauca

SEQ ID NO: 1270061 - RNA, 21 nt, Human
aaagcuucagccuaugccaga

SEQ ID NO: 1270062 - RNA, 18 nt, Human
aaaggcauguuauggccc

SEQ ID NO: 1270063 - RNA, 21 nt, Human
aaagugcugggauuccauuua

SEQ ID NO: 1270064 - RNA, 22 nt, Human
aaagugcugggauuccauuuaa

SEQ ID NO: 1270065 - RNA, 22 nt, Human
aaauaacaacguggagaauaac

SEQ ID NO: 1270066 - RNA, 22 nt, Human
aaauggaucaccucauuucaaa

SEQ ID NO: 1270067 - RNA, 18 nt, Human
aacagaaagguaacacaa

SEQ ID NO: 1270068 - RNA, 21 nt, Human
aacucaggcucccuucuccaa

SEQ ID NO: 1270069 - RNA, 21 nt, Human
aagauggagaaagacuguauu

SEQ ID NO: 1270070 - RNA, 23 nt, Human
aaucacacagcuagcccacagca

SEQ ID NO: 1270071 - RNA, 20 nt, Human
aauccaaaagcuuugccagg

SEQ ID NO: 1270072 - RNA, 24 nt, Human
aauucuguaacacaaaacaauaac

SEQ ID NO: 1270073 - RNA, 18 nt, Human
acaaagaucaaauaucua

SEQ ID NO: 1270074 - RNA, 22 nt, Human
acaagacaauguaaaugaaagc

SEQ ID NO: 1270075 - RNA, 24 nt, Human
acaaugaauuuacccauaucuaau

SEQ ID NO: 1270076 - RNA, 30 nt, Human
acacuuauucaaagcuauauauaagaaacc

SEQ ID NO: 1270077 - RNA, 19 nt, Human
acagaaagagcuuucucau

SEQ ID NO: 1270078 - RNA, 22 nt, Human
acagauacacuaauucuguaac

SEQ ID NO: 1270079 - RNA, 18 nt, Human
acgggguuucaccguggu

SEQ ID NO: 1270080 - RNA, 19 nt, Human
acgggguuucaccgugguc

SEQ ID NO: 1270081 - RNA, 23 nt, Human
acucacaaaauuuacauuucuua

SEQ ID NO: 1270082 - RNA, 20 nt, Human
acucagggccauguacaagc

SEQ ID NO: 1270083 - RNA, 26 nt, Human
acucugucgcccaggcuggagugcug

SEQ ID NO: 1270084 - RNA, 20 nt, Human
acugcaagcuccgccucccg

SEQ ID NO: 1270085 - RNA, 22 nt, Human
agaaagagcuuucucaugaucc

SEQ ID NO: 1270086 - RNA, 20 nt, Human
agaaagagucaaaacaaaug

SEQ ID NO: 1270087 - RNA, 22 nt, Human
agaaaggaaaauaaauaauuuc

SEQ ID NO: 1270088 - RNA, 24 nt, Human
agaacaaaaucacacacaagagca

SEQ ID NO: 1270089 - RNA, 18 nt, Human
agacaagguaucuacaca

SEQ ID NO: 1270090 - RNA, 26 nt, Human
agaccaaagauggagaaaggggaccc

SEQ ID NO: 1270091 - RNA, 19 nt, Human
agagacgggguuucaccgu

SEQ ID NO: 1270092 - RNA, 18 nt, Human
agauuugaaaguugcucc

SEQ ID NO: 1270093 - RNA, 19 nt, Human
agcacagaaaacacacuca

SEQ ID NO: 1270094 - RNA, 20 nt, Human
aggcccagagaggcuaacgg

SEQ ID NO: 1270095 - RNA, 21 nt, Human
agggggucuugcagcaaaaug

SEQ ID NO: 1270096 - RNA, 21 nt, Human
aguagagacgggguuucaccg

SEQ ID NO: 1270097 - RNA, 21 nt, Human
aguagcuaaccauacagaaug

SEQ ID NO: 1270098 - RNA, 18 nt, Human
aguagcugggacuacagg

SEQ ID NO: 1270099 - RNA, 19 nt, Human
agugcuguggcgugaucuc

SEQ ID NO: 1270100 - RNA, 19 nt, Human
auaaaaacuggcagaggca

SEQ ID NO: 1270101 - RNA, 22 nt, Human
auagagagacaagguaucuaca

SEQ ID NO: 1270102 - RNA, 24 nt, Human
auccaaguggcuucuucacagcuu

SEQ ID NO: 1270103 - RNA, 20 nt, Human
augcauuucugauacagaaa

SEQ ID NO: 1270104 - RNA, 23 nt, Human
auuagaagguauaauuuauuuuu

SEQ ID NO: 1270105 - RNA, 21 nt, Human
caaaguaccauacuggauaug

SEQ ID NO: 1270106 - RNA, 22 nt, Human
caaagugcugggauuccauuua

SEQ ID NO: 1270107 - RNA, 21 nt, Human
caauaaaaacuggcagaggca

SEQ ID NO: 1270108 - RNA, 19 nt, Human
caaugaauuuacccauauc

SEQ ID NO: 1270109 - RNA, 21 nt, Human
cacagccaacagcaggaauuu

SEQ ID NO: 1270110 - RNA, 22 nt, Human
cacauuuacagauguaucagau

SEQ ID NO: 1270111 - RNA, 24 nt, Human
caccucggccucccaaagugcugg

SEQ ID NO: 1270112 - RNA, 24 nt, Human
cacucugucgcccaggcuggagug

SEQ ID NO: 1270113 - RNA, 21 nt, Human
cagaaucaaaauguauucauc

SEQ ID NO: 1270114 - RNA, 24 nt, Human
cagaaucagcaaauggaucaccuc

SEQ ID NO: 1270115 - RNA, 20 nt, Human
cagcaaaaugggaguacacg

SEQ ID NO: 1270116 - RNA, 26 nt, Human
cagcaaauggaucaccucauuucaaa

SEQ ID NO: 1270117 - RNA, 18 nt, Human
cagcaauaaagaagaucc

SEQ ID NO: 1270118 - RNA, 21 nt, Human
cagcaauaaagaagauccauc

SEQ ID NO: 1270119 - RNA, 22 nt, Human
cagcacagaaaacacacucaca

SEQ ID NO: 1270120 - RNA, 24 nt, Human
cagccaaacggucaccuaucucuc

SEQ ID NO: 1270121 - RNA, 20 nt, Human
cagcuagcccacagcagagc

SEQ ID NO: 1270122 - RNA, 22 nt, Human
caggccauucuccugccucagc

SEQ ID NO: 1270123 - RNA, 21 nt, Human
caggcgcccgccacugcgccc

SEQ ID NO: 1270124 - RNA, 26 nt, Human
cauacauuacacaaugaauuuacccu

SEQ ID NO: 1270125 - RNA, 27 nt, Human
caugauccugaaacaauguuaauacca

SEQ ID NO: 1270126 - RNA, 23 nt, Human
cauucucauuuaacacuuaaggg

SEQ ID NO: 1270127 - RNA, 19 nt, Human
ccaaagugcugggauucca

SEQ ID NO: 1270128 - RNA, 20 nt, Human
ccaaagugcugggauuccau

SEQ ID NO: 1270129 - RNA, 19 nt, Human
ccagagugccuucaggagc

SEQ ID NO: 1270130 - RNA, 19 nt, Human
cccaaaucacacagcuagc

SEQ ID NO: 1270131 - RNA, 22 nt, Human
ccccaaaucacacagcuagccc

SEQ ID NO: 1270132 - RNA, 23 nt, Human
cccccaaaucacacagcuagccc

SEQ ID NO: 1270133 - RNA, 20 nt, Human
ccccugcugugacugccaug

SEQ ID NO: 1270134 - RNA, 23 nt, Human
cccgaguagcugggacuacaggc

SEQ ID NO: 1270135 - RNA, 24 nt, Human
cccgaguagcugggacuacaggcg

SEQ ID NO: 1270136 - RNA, 23 nt, Human
cccggguucaggccauucuccug

SEQ ID NO: 1270137 - RNA, 18 nt, Human
cccucuaccccugcugug

SEQ ID NO: 1270138 - RNA, 24 nt, Human
ccuaugccagagugccuucaggag

SEQ ID NO: 1270139 - RNA, 24 nt, Human
ccucccggguucaggccauucucc

SEQ ID NO: 1270140 - RNA, 23 nt, Human
ccugccucagccucccgaguagc

SEQ ID NO: 1270141 - RNA, 18 nt, Human
ccugucauuauuccaaug

SEQ ID NO: 1270142 - RNA, 25 nt, Human
ccuuuggaaucuacugagugcuuuc

SEQ ID NO: 1270143 - RNA, 19 nt, Human
cgccucccggguucaggcc

SEQ ID NO: 1270144 - RNA, 24 nt, Human
cucacucugucgcccaggcuggag

SEQ ID NO: 1270145 - RNA, 24 nt, Human
cucagccucccgaguagcugggac

SEQ ID NO: 1270146 - RNA, 19 nt, Human
cucauucauucucuuucuc

SEQ ID NO: 1270147 - RNA, 22 nt, Human
cuccugaccucgugaucugccc

SEQ ID NO: 1270148 - RNA, 23 nt, Human
cugccucagccucccgaguagcu

SEQ ID NO: 1270149 - RNA, 22 nt, Human
cuguauuuuuaguagagacggg

SEQ ID NO: 1270150 - RNA, 18 nt, Human
cugucuucucuaaugccc

SEQ ID NO: 1270151 - RNA, 19 nt, Human
cugucuucucuaaugcccc

SEQ ID NO: 1270152 - RNA, 18 nt, Human
cugugaccacaaaucucc

SEQ ID NO: 1270153 - RNA, 21 nt, Human
cugugacggaagcugaaauga

SEQ ID NO: 1270154 - RNA, 18 nt, Human
cuuaaaaccacagacucc

SEQ ID NO: 1270155 - RNA, 24 nt, Human
cuuaaaaccacagacuccaaauuu

SEQ ID NO: 1270156 - RNA, 24 nt, Human
cuucaaucuaauaagcagcaauau

SEQ ID NO: 1270157 - RNA, 18 nt, Human
cuuugaaauccaaaagcu

SEQ ID NO: 1270158 - RNA, 22 nt, Human
gaccaugguaaucuuuaacuug

SEQ ID NO: 1270159 - RNA, 22 nt, Human
gaccucgugaucugcccaccuc

SEQ ID NO: 1270160 - RNA, 22 nt, Human
gaccucgugaucugcccaccuc

SEQ ID NO: 1270161 - RNA, 24 nt, Human
gaccucgugaucugcccaccucgg

SEQ ID NO: 1270162 - RNA, 21 nt, Human
gacgggguuucaccguggucu

SEQ ID NO: 1270163 - RNA, 22 nt, Human
gacuacaggcgcccgccacugc

SEQ ID NO: 1270164 - RNA, 20 nt, Human
gagacgggguuucaccgugg

SEQ ID NO: 1270165 - RNA, 21 nt, Human
gagacgggguuucaccguggu

SEQ ID NO: 1270166 - RNA, 20 nt, Human
gaguagcugggacuacaggc

SEQ ID NO: 1270167 - RNA, 25 nt, Human
gaguagcugggacuacaggcgcccg

SEQ ID NO: 1270168 - RNA, 21 nt, Human
gcccaagcugccaaaaugacu

SEQ ID NO: 1270169 - RNA, 20 nt, Human
gcccaggcuggagugcugug

SEQ ID NO: 1270170 - RNA, 24 nt, Human
gcccaggcuggagugcuguggcgu

SEQ ID NO: 1270171 - RNA, 20 nt, Human
gccuaugccagagugccuuc

SEQ ID NO: 1270172 - RNA, 21 nt, Human
ggaagggaguucaauuauuug

SEQ ID NO: 1270173 - RNA, 20 nt, Human
ggacuucccccaaaucacac

SEQ ID NO: 1270174 - RNA, 20 nt, Human
ggcagcaauaaucagccaaa

SEQ ID NO: 1270175 - RNA, 22 nt, Human
ggcuggagugcuguggcgugau

SEQ ID NO: 1270176 - RNA, 22 nt, Human
guaaaauagaaauauauaaaug

SEQ ID NO: 1270177 - RNA, 18 nt, Human
guacauauguauacuuac

SEQ ID NO: 1270178 - RNA, 19 nt, Human
guagagacgggguuucacc

SEQ ID NO: 1270179 - RNA, 24 nt, Human
guagagcuucuuccaaagcagaaa

SEQ ID NO: 1270180 - RNA, 20 nt, Human
guauauuugcagcauuugaa

SEQ ID NO: 1270181 - RNA, 20 nt, Human
gucuccugucccucuacccc

SEQ ID NO: 1270182 - RNA, 24 nt, Human
gugaucugcccaccucggccuccc

SEQ ID NO: 1270183 - RNA, 24 nt, Human
uaaaauagaaauauauaaaugacc

SEQ ID NO: 1270184 - RNA, 21 nt, Human
uaaaauaggcagcaauaauca

SEQ ID NO: 1270185 - RNA, 19 nt, Human
uaaagggcacagccaacag

SEQ ID NO: 1270186 - RNA, 24 nt, Human
uaacacaaagcuucagccuaugcc

SEQ ID NO: 1270187 - RNA, 20 nt, Human
uaagguaaaauauauuuaca

SEQ ID NO: 1270188 - RNA, 22 nt, Human
uaagguaaaauauauuuacaga

SEQ ID NO: 1270189 - RNA, 24 nt, Human
uaauuuucuguauuuuuaguagag

SEQ ID NO: 1270190 - RNA, 25 nt, Human
uaauuuucuguauuuuuaguagaga

SEQ ID NO: 1270191 - RNA, 23 nt, Human
uacaagcaauuacuuccuuagua

SEQ ID NO: 1270192 - RNA, 21 nt, Human
uacagaauguucuaaaauagg

SEQ ID NO: 1270193 - RNA, 23 nt, Human
uacucaacaaaggcauguuaugg

SEQ ID NO: 1270194 - RNA, 20 nt, Human
uacucaagacgacaagacaa

SEQ ID NO: 1270195 - RNA, 21 nt, Human
uagaaauauauaaaugaccau

SEQ ID NO: 1270196 - RNA, 20 nt, Human
uagaacagaaagguaacaca

SEQ ID NO: 1270197 - RNA, 28 nt, Human
uagaagguauaauuuauuuuuauaagag

SEQ ID NO: 1270198 - RNA, 20 nt, Human
uagaaguaaucagaccucac

SEQ ID NO: 1270199 - RNA, 24 nt, Human
uagaaguaaucagaccucacacaa

SEQ ID NO: 1270200 - RNA, 23 nt, Human
uagagagacaagguaucuacaca

SEQ ID NO: 1270201 - RNA, 21 nt, Human
uaguagagacgggguuucacc

SEQ ID NO: 1270202 - RNA, 23 nt, Human
uaguagagacgggguuucaccgu

SEQ ID NO: 1270203 - RNA, 24 nt, Human
uaguagagacgggguuucaccgug

SEQ ID NO: 1270204 - RNA, 23 nt, Human
uaucucucaauguaauggcugcu

SEQ ID NO: 1270205 - RNA, 21 nt, Human
uauucauccaucuccauaacc

SEQ ID NO: 1270206 - RNA, 22 nt, Human
ucaaaacaaaugauacucaaga

SEQ ID NO: 1270207 - RNA, 23 nt, Human
ucaaacccagauagcuggcauca

SEQ ID NO: 1270208 - RNA, 21 nt, Human
ucaaauaucuaauucuucuau

SEQ ID NO: 1270209 - RNA, 20 nt, Human
ucacacacauuuaauaaggu

SEQ ID NO: 1270210 - RNA, 24 nt, Human
ucacucugucgcccaggcuggagu

SEQ ID NO: 1270211 - RNA, 18 nt, Human
ucacugcaagcuccgccu

SEQ ID NO: 1270212 - RNA, 19 nt, Human
ucacugcaagcuccgccuc

SEQ ID NO: 1270213 - RNA, 24 nt, Human
ucacugcaagcuccgccucccggg

SEQ ID NO: 1270214 - RNA, 23 nt, Human
ucagccucccgaguagcugggac

SEQ ID NO: 1270215 - RNA, 25 nt, Human
ucaggccauucuccugccucagccu

SEQ ID NO: 1270216 - RNA, 19 nt, Human
uccaaaagagauaaagcac

SEQ ID NO: 1270217 - RNA, 18 nt, Human
ucccaaagugcugggauu

SEQ ID NO: 1270218 - RNA, 21 nt, Human
ucccccaaaucacacagcuag

SEQ ID NO: 1270219 - RNA, 24 nt, Human
ucccgaguagcugggacuacaggc

SEQ ID NO: 1270220 - RNA, 24 nt, Human
ucccggguucaggccauucuccug

SEQ ID NO: 1270221 - RNA, 18 nt, Human
ucgcccaggcuggagugc

SEQ ID NO: 1270222 - RNA, 18 nt, Human
ucggccucccaaagugcu

SEQ ID NO: 1270223 - RNA, 22 nt, Human
ucuaaaggcgaggaugucugug

SEQ ID NO: 1270224 - RNA, 19 nt, Human
ucuagauacugcugcuuca

SEQ ID NO: 1270225 - RNA, 23 nt, Human
ucuauguaucuuucuuuuucucu

SEQ ID NO: 1270226 - RNA, 23 nt, Human
ucucacucugucgcccaggcugg

SEQ ID NO: 1270227 - RNA, 24 nt, Human
ucucacucugucgcccaggcugga

SEQ ID NO: 1270228 - RNA, 22 nt, Human
ucuccauaaccaacauagacuc

SEQ ID NO: 1270229 - RNA, 24 nt, Human
ucuccugccucagccucccgagua

SEQ ID NO: 1270230 - RNA, 26 nt, Human
ucuccugucccucuaccccugcugug

SEQ ID NO: 1270231 - RNA, 24 nt, Human
ucucuguaaaaacaaacaagaaaa

SEQ ID NO: 1270232 - RNA, 18 nt, Human
ucugucgcccaggcugga

SEQ ID NO: 1270233 - RNA, 19 nt, Human
ugaaauaacaacguggaga

SEQ ID NO: 1270234 - RNA, 24 nt, Human
ugaauaaauaucuaaaggcgagga

SEQ ID NO: 1270235 - RNA, 21 nt, Human
ugagaauuaaaacacacacaa

SEQ ID NO: 1270236 - RNA, 25 nt, Human
ugaguccucaguaaacucaggcucc

SEQ ID NO: 1270237 - RNA, 20 nt, Human
ugauagagagacaagguauc

SEQ ID NO: 1270238 - RNA, 24 nt, Human
ugaucugcccaccucggccuccca

SEQ ID NO: 1270239 - RNA, 21 nt, Human
ugccagagugccuucaggagc

SEQ ID NO: 1270240 - RNA, 22 nt, Human
ugccagguagaaagagucaaaa

SEQ ID NO: 1270241 - RNA, 24 nt, Human
ugccucagccucccgaguagcugg

SEQ ID NO: 1270242 - RNA, 22 nt, Human
ugcuccauaaaguaggucuacc

SEQ ID NO: 1270243 - RNA, 21 nt, Human
uggacagaggcccagagaggc

SEQ ID NO: 1270244 - RNA, 22 nt, Human
uggagaauaacuguguaaaagc

SEQ ID NO: 1270245 - RNA, 19 nt, Human
uggagugcuguggcgugau

SEQ ID NO: 1270246 - RNA, 22 nt, Human
uggcagaggcaauuuccuuacu

SEQ ID NO: 1270247 - RNA, 20 nt, Human
uggcccacucuaaauauggg

SEQ ID NO: 1270248 - RNA, 21 nt, Human
ugggacuacaggcgcccgcca

SEQ ID NO: 1270249 - RNA, 22 nt, Human
ugggacuacaggcgcccgccac

SEQ ID NO: 1270250 - RNA, 22 nt, Human
ugggacuacaggcgcccgccac

SEQ ID NO: 1270251 - RNA, 24 nt, Human
ugggacuacaggcgcccgccacug

SEQ ID NO: 1270252 - RNA, 19 nt, Human
ugggguauaacuaauuaaa

SEQ ID NO: 1270253 - RNA, 20 nt, Human
ugucauagaugagaauuaaa

SEQ ID NO: 1270254 - RNA, 21 nt, Human
ugucuccugucccucuacccc

SEQ ID NO: 1270255 - RNA, 18 nt, Human
ugugccuacauuuucuca

SEQ ID NO: 1270256 - RNA, 24 nt, Human
uuacuuaugaauuuugcugguaag

SEQ ID NO: 1270257 - RNA, 21 nt, Human
uuagaacagaaagguaacaca

SEQ ID NO: 1270258 - RNA, 18 nt, Human
uuaguagagacgggguuu

SEQ ID NO: 1270259 - RNA, 22 nt, Human
uuaguagagacgggguuucacc

SEQ ID NO: 1270260 - RNA, 24 nt, Human
uuaguagagacgggguuucaccgu

SEQ ID NO: 1270261 - RNA, 19 nt, Human
uucagaaucaaaauguauu

SEQ ID NO: 1270262 - RNA, 21 nt, Human
uucaggccauucuccugccuc

SEQ ID NO: 1270263 - RNA, 24 nt, Human
uucuauguaucuuucuuuuucucu

SEQ ID NO: 1270264 - RNA, 21 nt, Human
uuucuguauuuuuaguagaga

SEQ ID NO: 1270265 - RNA, 18 nt, Human
uuuuccacagauacacua

SEQ ID NO: 1270266 - RNA, 24 nt, Human
uuuucuguauuuuuaguagagacg

SEQ ID NO: 1270267 - RNA, 20 nt, Human
uuuugagugcaaaaauagca

SEQ ID NO: 1270268 - RNA, 21 nt, Human
uuuugagugcaaaaauagcag

SEQ ID NO: 1270269 - RNA, 24 nt, Human
uuuuuaguagagacgggguuucac

SEQ ID NO: 1270270 - RNA, 25 nt, Human
uuuuuuuucaaacccagauagcugg

SEQ ID NO: 1270271 - RNA, 25 nt, Human
aggcggccagggagaagugcugagc

SEQ ID NO: 1270272 - RNA, 19 nt, Human
caacagaaaucccaauccu

SEQ ID NO: 1270273 - RNA, 22 nt, Human
caaugccaaaccuuugcaacag

SEQ ID NO: 1270274 - RNA, 24 nt, Human
cagagugugguccaggucgaaucu

SEQ ID NO: 1270275 - RNA, 20 nt, Human
ccauuccaguguccgacaag

SEQ ID NO: 1270276 - RNA, 21 nt, Human
cccuggcacacagaagagcuc

SEQ ID NO: 1270277 - RNA, 24 nt, Human
ccuauggacaaauaucaacuuauu

SEQ ID NO: 1270278 - RNA, 19 nt, Human
cgcggggagcaccagggag

SEQ ID NO: 1270279 - RNA, 23 nt, Human
cuuauuggucaauaaaacuuguu

SEQ ID NO: 1270280 - RNA, 19 nt, Human
gcugagccauggcugcgcg

SEQ ID NO: 1270281 - RNA, 21 nt, Human
gucgcaggcggccagggagaa

SEQ ID NO: 1270282 - RNA, 19 nt, Human
gugcugagccauggcugcg

SEQ ID NO: 1270283 - RNA, 20 nt, Human
uaggaacugggcaaagcuau

SEQ ID NO: 1270284 - RNA, 18 nt, Human
uccaccacccuggcacac

SEQ ID NO: 1270285 - RNA, 19 nt, Human
uccaguguccgacaagaag

SEQ ID NO: 1270286 - RNA, 22 nt, Human
uccuuaacuaggaacugggcaa

SEQ ID NO: 1270287 - RNA, 21 nt, Human
ugauuuauagaaaggagaccu

SEQ ID NO: 1270288 - RNA, 26 nt, Human
ugccaaaccuuugcaacagaaauccc

SEQ ID NO: 1270289 - RNA, 22 nt, Human
ugccauggcuugcccugagaac

SEQ ID NO: 1270290 - RNA, 18 nt, Human
ugccucugccagcaccuc

SEQ ID NO: 1270291 - RNA, 20 nt, Human
ugccucugccagcaccucug

SEQ ID NO: 1270292 - RNA, 18 nt, Human
ugcugagccauggcugcg

SEQ ID NO: 1270293 - RNA, 24 nt, Human
uggcugcgcggggagcaccaggga

SEQ ID NO: 1270294 - RNA, 20 nt, Human
ugggcaaagcuauuauaaau

SEQ ID NO: 1270295 - RNA, 21 nt, Human
uguucaguuuuguuaaauagu

SEQ ID NO: 1270296 - RNA, 22 nt, Human
uugcaacagaaaucccaauccu

SEQ ID NO: 1270297 - RNA, 18 nt, Human
uugccauaugccucugcc

SEQ ID NO: 1270298 - RNA, 23 nt, Human
aaaaaaggaaaacagggagagag

SEQ ID NO: 1270299 - RNA, 22 nt, Human
aaaaacaaagcacaauagaagg

SEQ ID NO: 1270300 - RNA, 21 nt, Human
aaacaggguccaagcagugca

SEQ ID NO: 1270301 - RNA, 20 nt, Human
aaaggaaacagggugcagaa

SEQ ID NO: 1270302 - RNA, 19 nt, Human
aaaggcaguacaaucuaca

SEQ ID NO: 1270303 - RNA, 24 nt, Human
aaccugggcgacagagcaagacuc

SEQ ID NO: 1270304 - RNA, 19 nt, Human
aagcauucaaaguugcgcu

SEQ ID NO: 1270305 - RNA, 19 nt, Human
aaggcaguacaaucuacag

SEQ ID NO: 1270306 - RNA, 23 nt, Human
aaguaccauaaaucacacagaac

SEQ ID NO: 1270307 - RNA, 24 nt, Human
aaucgcuugaacccgggaggugga

SEQ ID NO: 1270308 - RNA, 20 nt, Human
aaugacagagccaaaaugaa

SEQ ID NO: 1270309 - RNA, 24 nt, Human
acaaagcacaauagaaggcauacu

SEQ ID NO: 1270310 - RNA, 18 nt, Human
acaagccuaacaaagacc

SEQ ID NO: 1270311 - RNA, 23 nt, Human
acagagcaagacuccguccuccg

SEQ ID NO: 1270312 - RNA, 22 nt, Human
acagcaaccaguucagaggccc

SEQ ID NO: 1270313 - RNA, 18 nt, Human
accccgucucuacuaaaa

SEQ ID NO: 1270314 - RNA, 23 nt, Human
accugggcgacagagcaagacuc

SEQ ID NO: 1270315 - RNA, 25 nt, Human
acucuaggcccaauuuuuaccuggc

SEQ ID NO: 1270316 - RNA, 18 nt, Human
acugcacuccaaccuggg

SEQ ID NO: 1270317 - RNA, 24 nt, Human
acugcacuccaaccugggcgacag

SEQ ID NO: 1270318 - RNA, 23 nt, Human
agaaauccaagugacagcaacca

SEQ ID NO: 1270319 - RNA, 18 nt, Human
agaaggugguaggagacc

SEQ ID NO: 1270320 - RNA, 22 nt, Human
agaaucgcuugaacccgggagg

SEQ ID NO: 1270321 - RNA, 27 nt, Human
agagaggauugggaggcuaaggagggc

SEQ ID NO: 1270322 - RNA, 26 nt, Human
agaggauugggaggcuaaggagggcg

SEQ ID NO: 1270323 - RNA, 20 nt, Human
agcauggugaaaccccgucu

SEQ ID NO: 1270324 - RNA, 20 nt, Human
agcaugugauauuccagaac

SEQ ID NO: 1270325 - RNA, 23 nt, Human
agccgggcguggcggcgcgcgcc

SEQ ID NO: 1270326 - RNA, 22 nt, Human
agccuggccagcauggugaaac

SEQ ID NO: 1270327 - RNA, 24 nt, Human
agccuggccagcauggugaaaccc

SEQ ID NO: 1270328 - RNA, 23 nt, Human
aggaaguaggaaguugggaagaa

SEQ ID NO: 1270329 - RNA, 24 nt, Human
aggcaggagaaucgcuugaacccg

SEQ ID NO: 1270330 - RNA, 22 nt, Human
aggcgaacgcccguuuuccuca

SEQ ID NO: 1270331 - RNA, 20 nt, Human
aggcugaggcaggagaaucg

SEQ ID NO: 1270332 - RNA, 24 nt, Human
aggcugaggcaggagaaucgcuug

SEQ ID NO: 1270333 - RNA, 24 nt, Human
agggcagguagcaauagaaaguga

SEQ ID NO: 1270334 - RNA, 24 nt, Human
agguggagguugcagugagccgag

SEQ ID NO: 1270335 - RNA, 26 nt, Human
aggugguaggagaccuugugcaggag

SEQ ID NO: 1270336 - RNA, 19 nt, Human
agugacuagaggugaagga

SEQ ID NO: 1270337 - RNA, 24 nt, Human
aucgcgccacugcacuccaaccug

SEQ ID NO: 1270338 - RNA, 23 nt, Human
caacauauuuaacacuuuaaccc

SEQ ID NO: 1270339 - RNA, 22 nt, Human
caagcagugcagauaaaggcag

SEQ ID NO: 1270340 - RNA, 27 nt, Human
caaguugaaaacuguuaugacuauuca

SEQ ID NO: 1270341 - RNA, 26 nt, Human
cacaaaacaaguaagaaagcauucaa

SEQ ID NO: 1270342 - RNA, 22 nt, Human
caccaccgucucaaucuugagg

SEQ ID NO: 1270343 - RNA, 23 nt, Human
cacuccaaccugggcgacagagc

SEQ ID NO: 1270344 - RNA, 23 nt, Human
cacugcacuccaaccugggcgac

SEQ ID NO: 1270345 - RNA, 24 nt, Human
cacugcacuccaaccugggcgaca

SEQ ID NO: 1270346 - RNA, 26 nt, Human
cacugcacuccaaccugggcgacaga

SEQ ID NO: 1270347 - RNA, 20 nt, Human
cagaaaagucagcaaaaaca

SEQ ID NO: 1270348 - RNA, 21 nt, Human
cagagcaagacuccguccucc

SEQ ID NO: 1270349 - RNA, 24 nt, Human
cagagcaagacuccguccuccguc

SEQ ID NO: 1270350 - RNA, 18 nt, Human
cagaggcccugggaauaa

SEQ ID NO: 1270351 - RNA, 18 nt, Human
cagcaaaaacaaagcaca

SEQ ID NO: 1270352 - RNA, 18 nt, Human
cagcaaaaacaaagcaca

SEQ ID NO: 1270353 - RNA, 19 nt, Human
cagcaaaaacaaagcacaa

SEQ ID NO: 1270354 - RNA, 21 nt, Human
cagcaaaaacaaagcacaaua

SEQ ID NO: 1270355 - RNA, 23 nt, Human
cagcaaaaacaaagcacaauaga

SEQ ID NO: 1270356 - RNA, 20 nt, Human
cagcaugaaggucauaugga

SEQ ID NO: 1270357 - RNA, 24 nt, Human
cagcauggugaaaccccgucucua

SEQ ID NO: 1270358 - RNA, 24 nt, Human
cagcuacucgggaggcugaggcag

SEQ ID NO: 1270359 - RNA, 19 nt, Human
caggcucccaaagcuagaa

SEQ ID NO: 1270360 - RNA, 18 nt, Human
cauacucauugcugaugc

SEQ ID NO: 1270361 - RNA, 18 nt, Human
cauggugaaaccccgucu

SEQ ID NO: 1270362 - RNA, 19 nt, Human
cauggugaaaccccgucuc

SEQ ID NO: 1270363 - RNA, 21 nt, Human
cauggugaaaccccgucucua

SEQ ID NO: 1270364 - RNA, 19 nt, Human
ccaaaggaaacagggugca

SEQ ID NO: 1270365 - RNA, 21 nt, Human
ccacugcacuccaaccugggc

SEQ ID NO: 1270366 - RNA, 24 nt, Human
ccacugcacuccaaccugggcgac

SEQ ID NO: 1270367 - RNA, 28 nt, Human
ccaucuagaugugucucucuuuaacuau

SEQ ID NO: 1270368 - RNA, 21 nt, Human
cccauacugcucaaugcagag

SEQ ID NO: 1270369 - RNA, 21 nt, Human
cccgggagguggagguugcag

SEQ ID NO: 1270370 - RNA, 25 nt, Human
ccuccgucucaaaaaaaaaaaaaaa

SEQ ID NO: 1270371 - RNA, 22 nt, Human
ccucugaguucauuaacgucca

SEQ ID NO: 1270372 - RNA, 23 nt, Human
ccuggccagcauggugaaacccc

SEQ ID NO: 1270373 - RNA, 24 nt, Human
ccuggccagcauggugaaaccccg

SEQ ID NO: 1270374 - RNA, 19 nt, Human
ccuguagucccagcuacuc

SEQ ID NO: 1270375 - RNA, 21 nt, Human
ccuguagucccagcuacucgg

SEQ ID NO: 1270376 - RNA, 22 nt, Human
ccuguagucccagcuacucggg

SEQ ID NO: 1270377 - RNA, 24 nt, Human
cgagaccagccuggccagcauggu

SEQ ID NO: 1270378 - RNA, 19 nt, Human
cgagaucgcgccacugcac

SEQ ID NO: 1270379 - RNA, 22 nt, Human
cgcaccgcccacccuacagucu

SEQ ID NO: 1270380 - RNA, 26 nt, Human
cgccacugcacuccaaccugggcgac

SEQ ID NO: 1270381 - RNA, 24 nt, Human
cgccuguagucccagcuacucggg

SEQ ID NO: 1270382 - RNA, 29 nt, Human
cgggagguggagguugcagugacaacggu

SEQ ID NO: 1270383 - RNA, 24 nt, Human
cgggagguggagguugcagugagc

SEQ ID NO: 1270384 - RNA, 24 nt, Human
cuaacaaagaccaaguuguucaaa

SEQ ID NO: 1270385 - RNA, 18 nt, Human
cucaaaaaaaaaaaaaaa

SEQ ID NO: 1270386 - RNA, 19 nt, Human
cuccgucucaaaaaaaaaa

SEQ ID NO: 1270387 - RNA, 21 nt, Human
gaaaacagggagagagaggga

SEQ ID NO: 1270388 - RNA, 22 nt, Human
gaaacaagaacaaguugaaaac

SEQ ID NO: 1270389 - RNA, 23 nt, Human
gagguugcagugagccgagaucg

SEQ ID NO: 1270390 - RNA, 18 nt, Human
gcaauagaaagugacuag

SEQ ID NO: 1270391 - RNA, 21 nt, Human
gcaccgcccacccuacagucu

SEQ ID NO: 1270392 - RNA, 24 nt, Human
gccacugcacuccaaccugggcga

SEQ ID NO: 1270393 - RNA, 24 nt, Human
gccagcauggugaaaccccgucuc

SEQ ID NO: 1270394 - RNA, 20 nt, Human
gccgagaucgcgccacugca

SEQ ID NO: 1270395 - RNA, 23 nt, Human
gcggcgcgcgccuguagucccag

SEQ ID NO: 1270396 - RNA, 20 nt, Human
gcucacugcuuuucuccucu

SEQ ID NO: 1270397 - RNA, 24 nt, Human
ggaagaaggggaggggcguaagag

SEQ ID NO: 1270398 - RNA, 21 nt, Human
ggaauaaacaggguccaagca

SEQ ID NO: 1270399 - RNA, 20 nt, Human
ggagguugcagugagccgag

SEQ ID NO: 1270400 - RNA, 22 nt, Human
ggagguugcagugagccgagau

SEQ ID NO: 1270401 - RNA, 23 nt, Human
ggagguugcagugagccgagauc

SEQ ID NO: 1270402 - RNA, 24 nt, Human
ggagguugcagugagccgagaucg

SEQ ID NO: 1270403 - RNA, 22 nt, Human
ggcguggcggcgcgcgccugua

SEQ ID NO: 1270404 - RNA, 19 nt, Human
gggaagaaggggaggggcg

SEQ ID NO: 1270405 - RNA, 18 nt, Human
gugacuagaggugaagga

SEQ ID NO: 1270406 - RNA, 19 nt, Human
guugcagugagccgagauc

SEQ ID NO: 1270407 - RNA, 26 nt, Human
uaaaucacacagaacaaguggcucac

SEQ ID NO: 1270408 - RNA, 20 nt, Human
uaacaaagaccaaguuguuc

SEQ ID NO: 1270409 - RNA, 20 nt, Human
uaacagaaacaagaacaagu

SEQ ID NO: 1270410 - RNA, 23 nt, Human
uaacagaaacaagaacaaguuga

SEQ ID NO: 1270411 - RNA, 24 nt, Human
uaacagaaacaagaacaaguugaa

SEQ ID NO: 1270412 - RNA, 26 nt, Human
uaacagaaacaagaacaaguugaaaa

SEQ ID NO: 1270413 - RNA, 19 nt, Human
uaacagucggaccaaccgc

SEQ ID NO: 1270414 - RNA, 19 nt, Human
uaaggagggcggaucacga

SEQ ID NO: 1270415 - RNA, 24 nt, Human
uaaguuuagaaucagaaaaaaaaa

SEQ ID NO: 1270416 - RNA, 21 nt, Human
uacaguaucauuugcuuggcu

SEQ ID NO: 1270417 - RNA, 22 nt, Human
uaccuggcccaugccucuagcc

SEQ ID NO: 1270418 - RNA, 24 nt, Human
uagaaucagaaaaaaaaauuuuac

SEQ ID NO: 1270419 - RNA, 22 nt, Human
uaggcaacauauuuaacacuuu

SEQ ID NO: 1270420 - RNA, 22 nt, Human
uaggucacaaaacaaguaagaa

SEQ ID NO: 1270421 - RNA, 22 nt, Human
ucaaaaaaaaaaaaaaaaaaaa

SEQ ID NO: 1270422 - RNA, 23 nt, Human
ucaaaaaaaaaaaaaaaaaaaaa

SEQ ID NO: 1270423 - RNA, 25 nt, Human
ucaaaagaauaucuguacagcucaa

SEQ ID NO: 1270424 - RNA, 23 nt, Human
ucacgagaucgggguucgagacc

SEQ ID NO: 1270425 - RNA, 21 nt, Human
ucagcaaaaacaaagcacaau

SEQ ID NO: 1270426 - RNA, 24 nt, Human
ucagcaaaaacaaagcacaauaga

SEQ ID NO: 1270427 - RNA, 19 nt, Human
ucaguuucuccugcuuagg

SEQ ID NO: 1270428 - RNA, 19 nt, Human
uccaaaggaaacagggugc

SEQ ID NO: 1270429 - RNA, 21 nt, Human
ucccugaaaaguauuuuucca

SEQ ID NO: 1270430 - RNA, 23 nt, Human
uccgucucaaaaaaaaaaaaaaa

SEQ ID NO: 1270431 - RNA, 30 nt, Human
uccuccgucucaaaaaaaaaaaaaaaaaaa

SEQ ID NO: 1270432 - RNA, 19 nt, Human
ucgcaccgcccacccuaca

SEQ ID NO: 1270433 - RNA, 23 nt, Human
ucgcgccacugcacuccaaccug

SEQ ID NO: 1270434 - RNA, 24 nt, Human
ucgcuugaacccgggagguggagg

SEQ ID NO: 1270435 - RNA, 24 nt, Human
ucgggaggcugaggcaggagaauc

SEQ ID NO: 1270436 - RNA, 23 nt, Human
ucucuacuaaaaauauaaaaauu

SEQ ID NO: 1270437 - RNA, 21 nt, Human
ucuuucuuuaaagaacccuug

SEQ ID NO: 1270438 - RNA, 22 nt, Human
ugagccgagaucgcgccacugc

SEQ ID NO: 1270439 - RNA, 20 nt, Human
ugaggcaggagaaucgcuug

SEQ ID NO: 1270440 - RNA, 24 nt, Human
ugaggcaggagaaucgcuugaacc

SEQ ID NO: 1270441 - RNA, 25 nt, Human
ugaggcaggagaaucgcuugaaccc

SEQ ID NO: 1270442 - RNA, 24 nt, Human
ugccucuagccuuuuguucaguuu

SEQ ID NO: 1270443 - RNA, 21 nt, Human
uggaacaggcucccaaagcua

SEQ ID NO: 1270444 - RNA, 21 nt, Human
uggcaggagccaauguagggc

SEQ ID NO: 1270445 - RNA, 24 nt, Human
uggccagcauggugaaaccccguc

SEQ ID NO: 1270446 - RNA, 24 nt, Human
uggcggcgcgcgccuguaguccca

SEQ ID NO: 1270447 - RNA, 21 nt, Human
ugggaagaaggggaggggcgu

SEQ ID NO: 1270448 - RNA, 24 nt, Human
ugggaggcuaaggagggcggauca

SEQ ID NO: 1270449 - RNA, 24 nt, Human
uguucccaauugaaaucaaaagaa

SEQ ID NO: 1270450 - RNA, 22 nt, Human
uguuucugagcuaucacuuuuu

SEQ ID NO: 1270451 - RNA, 20 nt, Human
uuagccgggcguggcggcgc

SEQ ID NO: 1270452 - RNA, 20 nt, Human
uuagccgggcguggcggcgc

SEQ ID NO: 1270453 - RNA, 22 nt, Human
uuagccgggcguggcggcgcgc

SEQ ID NO: 1270454 - RNA, 24 nt, Human
uucaaacuauguuucuaggaauau

SEQ ID NO: 1270455 - RNA, 20 nt, Human
uucacaguauuuaagcaauu

SEQ ID NO: 1270456 - RNA, 20 nt, Human
uucauaugucucuauauugu

SEQ ID NO: 1270457 - RNA, 24 nt, Human
uugaacccgggagguggagguugc

SEQ ID NO: 1270458 - RNA, 18 nt, Human
uugcagugagccgagauc

SEQ ID NO: 1270459 - RNA, 19 nt, Human
uugcagugagccgagaucg

SEQ ID NO: 1270460 - RNA, 20 nt, Human
uugcagugagccgagaucgc

SEQ ID NO: 1270461 - RNA, 22 nt, Human
uugcagugagccgagaucgcgc

SEQ ID NO: 1270462 - RNA, 25 nt, Human
uugggaggcuaaggagggcggauca

SEQ ID NO: 1270463 - RNA, 25 nt, Human
uuuagaaucagaaaaaaaaauuuua

SEQ ID NO: 1270464 - RNA, 22 nt, Human
uuuguucaguuucuccugcuua

SEQ ID NO: 1270465 - RNA, 24 nt, Human
aaauaacaaauaacaccucccccc

SEQ ID NO: 1270466 - RNA, 21 nt, Human
aaauaacaccuccccccacac

SEQ ID NO: 1270467 - RNA, 18 nt, Human
aaaucuccaaggcagcca

SEQ ID NO: 1270468 - RNA, 19 nt, Human
aacaaauaacaccuccccc

SEQ ID NO: 1270469 - RNA, 20 nt, Human
aacaaauaacaccucccccc

SEQ ID NO: 1270470 - RNA, 22 nt, Human
aacaaauaacaccuccccccac

SEQ ID NO: 1270471 - RNA, 26 nt, Human
acacacauacacaaagagguacaaua

SEQ ID NO: 1270472 - RNA, 25 nt, Human
acacacauacacaaagagguacaug

SEQ ID NO: 1270473 - RNA, 20 nt, Human
acacuggagagcaggcacug

SEQ ID NO: 1270474 - RNA, 24 nt, Human
acacuggagagcaggcacuguuac

SEQ ID NO: 1270475 - RNA, 19 nt, Human
acaguaagaagaacaagac

SEQ ID NO: 1270476 - RNA, 24 nt, Human
accacaguaagaagaacaagacaa

SEQ ID NO: 1270477 - RNA, 22 nt, Human
agacacuggagagcaggcacuu

SEQ ID NO: 1270478 - RNA, 21 nt, Human
caacacaaauaacaaauaaca

SEQ ID NO: 1270479 - RNA, 23 nt, Human
caacacaaauaacaaauaacacc

SEQ ID NO: 1270480 - RNA, 25 nt, Human
caacacaaauaacaaauaacaccuc

SEQ ID NO: 1270481 - RNA, 22 nt, Human
cacaaauaacaaauaacaccuc

SEQ ID NO: 1270482 - RNA, 18 nt, Human
caccuccccccacacaca

SEQ ID NO: 1270483 - RNA, 21 nt, Human
caccuccccccacacacauac

SEQ ID NO: 1270484 - RNA, 22 nt, Human
ccaaaucuccaaggcagccaaa

SEQ ID NO: 1270485 - RNA, 21 nt, Human
ccccccacacacauacacaaa

SEQ ID NO: 1270486 - RNA, 25 nt, Human
ccuuccugccucaaaaaagugaaga

SEQ ID NO: 1270487 - RNA, 23 nt, Human
cuccuacaugcugggagcagucg

SEQ ID NO: 1270488 - RNA, 21 nt, Human
cugugauuuuacaacugcucc

SEQ ID NO: 1270489 - RNA, 22 nt, Human
cuuuaaacauggaaguuacuac

SEQ ID NO: 1270490 - RNA, 22 nt, Human
gagagcaggcacuguuacggcu

SEQ ID NO: 1270491 - RNA, 19 nt, Human
ggcaacacaaauaacaaau

SEQ ID NO: 1270492 - RNA, 22 nt, Human
ggcaacacaaauaacaaauaac

SEQ ID NO: 1270493 - RNA, 26 nt, Human
ggcaacacaaauaacaaauaacaccu

SEQ ID NO: 1270494 - RNA, 20 nt, Human
uaacaaauaacaccuccccc

SEQ ID NO: 1270495 - RNA, 21 nt, Human
uaacaaauaacaccucccccc

SEQ ID NO: 1270496 - RNA, 18 nt, Human
uacaacugcuccuacaug

SEQ ID NO: 1270497 - RNA, 19 nt, Human
uacaugaagaucuggccac

SEQ ID NO: 1270498 - RNA, 20 nt, Human
uaccacaguaagaagaacaa

SEQ ID NO: 1270499 - RNA, 24 nt, Human
ucaaaaaagugaagaccagaaaaa

SEQ ID NO: 1270500 - RNA, 27 nt, Human
ucgaaagauccuuccugccucaaaaaa

SEQ ID NO: 1270501 - RNA, 22 nt, Human
ucuccaaaucuccaaggcagcc

SEQ ID NO: 1270502 - RNA, 23 nt, Human
ucuccaaaucuccaaggcagcca

SEQ ID NO: 1270503 - RNA, 20 nt, Human
ugagaugucauauggauuug

SEQ ID NO: 1270504 - RNA, 23 nt, Human
ugagaugucauauggauuuguuu

SEQ ID NO: 1270505 - RNA, 24 nt, Human
uggcaacacaaauaacaaauaaca

SEQ ID NO: 1270506 - RNA, 22 nt, Human
uuaccacaguaagaagaacaag

SEQ ID NO: 1270507 - RNA, 19 nt, Human
uucagacacuggagagcag

SEQ ID NO: 1270508 - RNA, 24 nt, Human
uuccugccucaaaaaagugaagac

SEQ ID NO: 1270509 - RNA, 23 nt, Human
uuuuacaacugcuccuacaugcu

SEQ ID NO: 1270510 - RNA, 19 nt, Human
agcagccuuuuuuuuuuuu

SEQ ID NO: 1270511 - RNA, 23 nt, Human
agcagccuuuuuuuuuuuuuuuu

SEQ ID NO: 1270512 - RNA, 19 nt, Human
auccuucugccucuucguu

SEQ ID NO: 1270513 - RNA, 23 nt, Human
cacaggcccagauccuucugccu

SEQ ID NO: 1270514 - RNA, 21 nt, Human
ccuucugccucuucguugucc

SEQ ID NO: 1270515 - RNA, 25 nt, Human
cucuucguuguccugcuugucaaau

SEQ ID NO: 1270516 - RNA, 24 nt, Human
cuuuuuuuuuuuuuuuuuaaaggg

SEQ ID NO: 1270517 - RNA, 23 nt, Human
uccuucugccucuucguuguccu

SEQ ID NO: 1270518 - RNA, 22 nt, Human
ucugcgagaagcagccuuuuuu

SEQ ID NO: 1270519 - RNA, 26 nt, Human
ugcgagaagcagccuuuucucccggg

SEQ ID NO: 1270520 - RNA, 20 nt, Human
uuuuuuuuuuuuuaaaggga

SEQ ID NO: 1270521 - RNA, 22 nt, Human
aaaaaaaaccuuuaagccuuca

SEQ ID NO: 1270522 - RNA, 20 nt, Human
aaauaaaugagaacaugcaa

SEQ ID NO: 1270523 - RNA, 25 nt, Human
aaaugucuauucagaucuuuugccc

SEQ ID NO: 1270524 - RNA, 18 nt, Human
aacuacccuucccagccu

SEQ ID NO: 1270525 - RNA, 19 nt, Human
aacucucccuucaggccca

SEQ ID NO: 1270526 - RNA, 18 nt, Human
aagaaaagacaaacucgc

SEQ ID NO: 1270527 - RNA, 18 nt, Human
aagcaaaaggaaaaaaaa

SEQ ID NO: 1270528 - RNA, 26 nt, Human
aagcaaaaggaaaaaaaaagggaccc

SEQ ID NO: 1270529 - RNA, 19 nt, Human
aagugcagagauuacaggc

SEQ ID NO: 1270530 - RNA, 18 nt, Human
aaugcaauauacaguauc

SEQ ID NO: 1270531 - RNA, 18 nt, Human
accauauuuucuuuauuu

SEQ ID NO: 1270532 - RNA, 19 nt, Human
acuaauuuacauucccacc

SEQ ID NO: 1270533 - RNA, 21 nt, Human
acucuaugcuauaucauuuca

SEQ ID NO: 1270534 - RNA, 24 nt, Human
agcuggucucaaacuccugagcuc

SEQ ID NO: 1270535 - RNA, 27 nt, Human
aggaaggaauuugguugaagguuacac

SEQ ID NO: 1270536 - RNA, 24 nt, Human
auaguuuugauuugcauuucucug

SEQ ID NO: 1270537 - RNA, 24 nt, Human
auggcugaauaguacuccauugug

SEQ ID NO: 1270538 - RNA, 20 nt, Human
auucacuauugccuguuuug

SEQ ID NO: 1270539 - RNA, 18 nt, Human
auuuuacuccauaucucc

SEQ ID NO: 1270540 - RNA, 25 nt, Human
caaacuccugagcucaagcaauccu

SEQ ID NO: 1270541 - RNA, 20 nt, Human
caaagaaaacauccuuugga

SEQ ID NO: 1270542 - RNA, 22 nt, Human
caaagaaaacauccuuuggaag

SEQ ID NO: 1270543 - RNA, 26 nt, Human
caaagugcagagauuacaggcuugug

SEQ ID NO: 1270544 - RNA, 18 nt, Human
caaaugacaggaucucau

SEQ ID NO: 1270545 - RNA, 21 nt, Human
caaauuucuggcugauuuaua

SEQ ID NO: 1270546 - RNA, 23 nt, Human
caaccgucaaugaagaacugaaa

SEQ ID NO: 1270547 - RNA, 22 nt, Human
caaggguagcgucagaaggcua

SEQ ID NO: 1270548 - RNA, 20 nt, Human
caccaacaguguaccagagu

SEQ ID NO: 1270549 - RNA, 22 nt, Human
caccaacaguguaccagaguuc

SEQ ID NO: 1270550 - RNA, 25 nt, Human
cagcaaagagacaaauacacaacug

SEQ ID NO: 1270551 - RNA, 21 nt, Human
cauaucuccaugaguccacug

SEQ ID NO: 1270552 - RNA, 22 nt, Human
caugagauugaaaaugcgugau

SEQ ID NO: 1270553 - RNA, 19 nt, Human
cauuucaaauuucuggcug

SEQ ID NO: 1270554 - RNA, 19 nt, Human
ccaccaugcccgacccaga

SEQ ID NO: 1270555 - RNA, 21 nt, Human
ccaguagauucugggcugccu

SEQ ID NO: 1270556 - RNA, 24 nt, Human
cccaaagugcagagauuacaggcu

SEQ ID NO: 1270557 - RNA, 20 nt, Human
cccagucucagguaagaaaa

SEQ ID NO: 1270558 - RNA, 24 nt, Human
ccucuaguuccauccauguuuugc

SEQ ID NO: 1270559 - RNA, 22 nt, Human
ccucuugaaacuacccuuccca

SEQ ID NO: 1270560 - RNA, 20 nt, Human
ccugagcucaagcaauccuc

SEQ ID NO: 1270561 - RNA, 18 nt, Human
ccuucaugcccugcauuu

SEQ ID NO: 1270562 - RNA, 23 nt, Human
cgcccuugugugccaguggucug

SEQ ID NO: 1270563 - RNA, 19 nt, Human
cuaaagcuauaagccaagc

SEQ ID NO: 1270564 - RNA, 23 nt, Human
cuagccgccccguggcauuuucc

SEQ ID NO: 1270565 - RNA, 24 nt, Human
cucaagcaauccucccacuuuggc

SEQ ID NO: 1270566 - RNA, 20 nt, Human
cuccuacaaauaaaugagaa

SEQ ID NO: 1270567 - RNA, 18 nt, Human
cucuugaaacuacccuuc

SEQ ID NO: 1270568 - RNA, 20 nt, Human
cuuuauggcugaauaguacu

SEQ ID NO: 1270569 - RNA, 24 nt, Human
cuuucuguccugacauauuucauu

SEQ ID NO: 1270570 - RNA, 18 nt, Human
cuuuugcccaucuuuaau

SEQ ID NO: 1270571 - RNA, 23 nt, Human
gaaagcaaccgucaaugaagaac

SEQ ID NO: 1270572 - RNA, 18 nt, Human
gaaggcuaaagcuauaag

SEQ ID NO: 1270573 - RNA, 23 nt, Human
gagauuacaggcuugugccacca

SEQ ID NO: 1270574 - RNA, 24 nt, Human
gauuacaggcuugugccaccaugc

SEQ ID NO: 1270575 - RNA, 19 nt, Human
gcaaaaggaaaaaaaaacc

SEQ ID NO: 1270576 - RNA, 18 nt, Human
gcagugggauugcuggau

SEQ ID NO: 1270577 - RNA, 20 nt, Human
gccagcuauauuaaaacuaa

SEQ ID NO: 1270578 - RNA, 23 nt, Human
guaccagaguucccucuucucca

SEQ ID NO: 1270579 - RNA, 19 nt, Human
gugcuccuuucagccaggg

SEQ ID NO: 1270580 - RNA, 24 nt, Human
uaaaagccauuuuuaacuagggug

SEQ ID NO: 1270581 - RNA, 23 nt, Human
uaacucagcuagccgccccgugg

SEQ ID NO: 1270582 - RNA, 18 nt, Human
uaagcaaaaggaaaaaaa

SEQ ID NO: 1270583 - RNA, 21 nt, Human
uacaugagaaaaaucaaauca

SEQ ID NO: 1270584 - RNA, 18 nt, Human
uagcacaagggugucaga

SEQ ID NO: 1270585 - RNA, 23 nt, Human
uaugaaauuuuguggacaugaga

SEQ ID NO: 1270586 - RNA, 23 nt, Human
uauguuacccaagcuggucucaa

SEQ ID NO: 1270587 - RNA, 24 nt, Human
uauguuacccaagcuggucucaaa

SEQ ID NO: 1270588 - RNA, 24 nt, Human
uauuugcauaugaaauuuugugga

SEQ ID NO: 1270589 - RNA, 18 nt, Human
ucagccagggcugucugu

SEQ ID NO: 1270590 - RNA, 24 nt, Human
uccauagugguuauacuaauuuac

SEQ ID NO: 1270591 - RNA, 24 nt, Human
ucccaaagugcagagauuacaggc

SEQ ID NO: 1270592 - RNA, 21 nt, Human
ucgaaguauucucucugugcu

SEQ ID NO: 1270593 - RNA, 23 nt, Human
ucucaaacuccugagcucaagca

SEQ ID NO: 1270594 - RNA, 24 nt, Human
ucuccauagugguuauacuaauuu

SEQ ID NO: 1270595 - RNA, 24 nt, Human
ucucugaugaccaaugauguugag

SEQ ID NO: 1270596 - RNA, 18 nt, Human
ucucugugcuccuuucag

SEQ ID NO: 1270597 - RNA, 19 nt, Human
ucuuugcaagcauucacuc

SEQ ID NO: 1270598 - RNA, 20 nt, Human
ugacuuggugauuacaaauc

SEQ ID NO: 1270599 - RNA, 24 nt, Human
ugagaaaaggaaggaauuugguug

SEQ ID NO: 1270600 - RNA, 21 nt, Human
ugagaacaugcaaagucuguc

SEQ ID NO: 1270601 - RNA, 20 nt, Human
uggaucauaugaucauucua

SEQ ID NO: 1270602 - RNA, 22 nt, Human
uggccugaccaucaagcaauau

SEQ ID NO: 1270603 - RNA, 19 nt, Human
uggcugaauaguacuccau

SEQ ID NO: 1270604 - RNA, 22 nt, Human
ugggauugcuggaucauaugau

SEQ ID NO: 1270605 - RNA, 19 nt, Human
ugugccaccaugcccgacc

SEQ ID NO: 1270606 - RNA, 19 nt, Human
uguggaauuccugccugcu

SEQ ID NO: 1270607 - RNA, 25 nt, Human
uuagaaguuuccuggccugaccauc

SEQ ID NO: 1270608 - RNA, 21 nt, Human
uuagcuccuacaaauaaauga

SEQ ID NO: 1270609 - RNA, 23 nt, Human
uuagcuccuacaaauaaaugaga

SEQ ID NO: 1270610 - RNA, 18 nt, Human
uuccuggccugaccaucu

SEQ ID NO: 1270611 - RNA, 24 nt, Human
uucuaugucuauacauguuuagcu

SEQ ID NO: 1270612 - RNA, 19 nt, Human
uuguacccauuaaccaucu

SEQ ID NO: 1270613 - RNA, 19 nt, Human
uuguauguguaugucuucu

SEQ ID NO: 1270614 - RNA, 23 nt, Human
uuuacauucccaccaacagugua

SEQ ID NO: 1270615 - RNA, 23 nt, Human
uuucuggcugauuuauaaaccuu

SEQ ID NO: 1270616 - RNA, 21 nt, Human
uuugcaagcauucacuauugc

SEQ ID NO: 1270617 - RNA, 22 nt, Human
uuuuaauuuuuuccuauggagu

SEQ ID NO: 1270618 - RNA, 21 nt, Human
uuuuggguauauauccagcag

SEQ ID NO: 1270619 - RNA, 23 nt, Human
aaaaaaaugcuauaguacaguaa

SEQ ID NO: 1270620 - RNA, 18 nt, Human
aaacauaaagaaagcuga

SEQ ID NO: 1270621 - RNA, 21 nt, Human
aaccagaaaauagaggcaggg

SEQ ID NO: 1270622 - RNA, 23 nt, Human
aagcaaccugacucaugaaaggu

SEQ ID NO: 1270623 - RNA, 19 nt, Human
aagcauuugguagcaaaau

SEQ ID NO: 1270624 - RNA, 22 nt, Human
aaugcaaaagagaaagagagaa

SEQ ID NO: 1270625 - RNA, 19 nt, Human
acagagaaaagagacacag

SEQ ID NO: 1270626 - RNA, 23 nt, Human
agaaaagagacacagagaaggac

SEQ ID NO: 1270627 - RNA, 24 nt, Human
agaaaagagacacagagaaggaca

SEQ ID NO: 1270628 - RNA, 19 nt, Human
agaaacugauaaaaccaga

SEQ ID NO: 1270629 - RNA, 19 nt, Human
agaaagagggggaggcugu

SEQ ID NO: 1270630 - RNA, 21 nt, Human
agaacagagaaaagagacaca

SEQ ID NO: 1270631 - RNA, 22 nt, Human
agaacuaagaugcaaauuucca

SEQ ID NO: 1270632 - RNA, 21 nt, Human
agagaaaagagacacagagaa

SEQ ID NO: 1270633 - RNA, 22 nt, Human
agagaaagaaaaagaugaagag

SEQ ID NO: 1270634 - RNA, 19 nt, Human
agagaaagagagaaaguaa

SEQ ID NO: 1270635 - RNA, 19 nt, Human
agggggaggcugugaaaag

SEQ ID NO: 1270636 - RNA, 23 nt, Human
aggucugaagaaagagggggagg

SEQ ID NO: 1270637 - RNA, 22 nt, Human
auguuacuggauuagaaagagg

SEQ ID NO: 1270638 - RNA, 21 nt, Human
auuaagcauaaaggggaggga

SEQ ID NO: 1270639 - RNA, 19 nt, Human
caacacgcacagagcugaa

SEQ ID NO: 1270640 - RNA, 20 nt, Human
caaugugcagaugacaaaau

SEQ ID NO: 1270641 - RNA, 19 nt, Human
cacagguucacaacaaacc

SEQ ID NO: 1270642 - RNA, 18 nt, Human
cagagaaaagagacacag

SEQ ID NO: 1270643 - RNA, 18 nt, Human
cagagagaaagaaaaaga

SEQ ID NO: 1270644 - RNA, 23 nt, Human
cagagcugaaggguugcagcaaa

SEQ ID NO: 1270645 - RNA, 19 nt, Human
cagguuuauauaugucaag

SEQ ID NO: 1270646 - RNA, 22 nt, Human
ccaaaagcauuugguagcaaaa

SEQ ID NO: 1270647 - RNA, 21 nt, Human
cugaagaaagagggggaggcu

SEQ ID NO: 1270648 - RNA, 20 nt, Human
gacauggaaugcaaaagaga

SEQ ID NO: 1270649 - RNA, 19 nt, Human
gagaacacagguucacaac

SEQ ID NO: 1270650 - RNA, 18 nt, Human
gagaacagagaaaagaga

SEQ ID NO: 1270651 - RNA, 27 nt, Human
gagaacagagaaaagagaccgguaccc

SEQ ID NO: 1270652 - RNA, 22 nt, Human
gcaugggcuucucccucacaug

SEQ ID NO: 1270653 - RNA, 21 nt, Human
gcuaaugaaauuaagaaagga

SEQ ID NO: 1270654 - RNA, 20 nt, Human
ggaggcugugaaaaguucug

SEQ ID NO: 1270655 - RNA, 18 nt, Human
gucaggacaaauguggag

SEQ ID NO: 1270656 - RNA, 20 nt, Human
guggagaacacagguucaca

SEQ ID NO: 1270657 - RNA, 21 nt, Human
uaaaaccagaaaauagaggcu

SEQ ID NO: 1270658 - RNA, 19 nt, Human
uaaaagccauaaaagccaa

SEQ ID NO: 1270659 - RNA, 20 nt, Human
uaacagaacuaagaugcaaa

SEQ ID NO: 1270660 - RNA, 18 nt, Human
uagcaaaauauaaaguag

SEQ ID NO: 1270661 - RNA, 21 nt, Human
uagcacauaauugacuuuaau

SEQ ID NO: 1270662 - RNA, 24 nt, Human
uagcuguggagcaaaaaaaugcua

SEQ ID NO: 1270663 - RNA, 23 nt, Human
ucaggacaaauguggagaacaca

SEQ ID NO: 1270664 - RNA, 24 nt, Human
uccaugugacuucacauuccaccg

SEQ ID NO: 1270665 - RNA, 22 nt, Human
uccugcaugggcuucucccuca

SEQ ID NO: 1270666 - RNA, 22 nt, Human
ucugaagaaagagggggaggcu

SEQ ID NO: 1270667 - RNA, 20 nt, Human
ucugcuaagcaaccugacuc

SEQ ID NO: 1270668 - RNA, 19 nt, Human
ucuguccugcuucccaaaa

SEQ ID NO: 1270669 - RNA, 20 nt, Human
ucuguccugcuucccaaaag

SEQ ID NO: 1270670 - RNA, 21 nt, Human
ugaagagucaggacaaaugug

SEQ ID NO: 1270671 - RNA, 20 nt, Human
ugacaaaauggcacucagaa

SEQ ID NO: 1270672 - RNA, 21 nt, Human
ugagaacagagaaaagagaca

SEQ ID NO: 1270673 - RNA, 22 nt, Human
ugagaacagagaaaagagacac

SEQ ID NO: 1270674 - RNA, 25 nt, Human
ugaguaaaacacauuuacacauugg

SEQ ID NO: 1270675 - RNA, 22 nt, Human
uggaaaacauaaagaaagcuga

SEQ ID NO: 1270676 - RNA, 18 nt, Human
uggaagacugagaacaga

SEQ ID NO: 1270677 - RNA, 21 nt, Human
uggaaugcaaaagagaaagag

SEQ ID NO: 1270678 - RNA, 19 nt, Human
uggcaaaauuucaaaauga

SEQ ID NO: 1270679 - RNA, 22 nt, Human
uggccugaucauaaaagccaua

SEQ ID NO: 1270680 - RNA, 23 nt, Human
uguccugcuucccaaaaggucaa

SEQ ID NO: 1270681 - RNA, 21 nt, Human
ugugcagaugacaaaauggca

SEQ ID NO: 1270682 - RNA, 18 nt, Human
uguggagcaaaaaaaugc

SEQ ID NO: 1270683 - RNA, 26 nt, Human
uguggagcaaaaaaaugcuauaguac

SEQ ID NO: 1270684 - RNA, 24 nt, Human
uguuuaauucucauaauagcucua

SEQ ID NO: 1270685 - RNA, 22 nt, Human
uucacaacaaaccagguagaaa

SEQ ID NO: 1270686 - RNA, 23 nt, Human
uucacacagcuacuaaguaacag

SEQ ID NO: 1270687 - RNA, 18 nt, Human
uuucacacagcuacuaag

SEQ ID NO: 1270688 - RNA, 18 nt, Human
aauaucuacauuuagaaa

SEQ ID NO: 1270689 - RNA, 27 nt, Human
aaugcaaaaacaagacauuuuauugaa

SEQ ID NO: 1270690 - RNA, 27 nt, Human
agaggccagcagcugccacacugagcu

SEQ ID NO: 1270691 - RNA, 19 nt, Human
caaaagcacuuccuuacuc

SEQ ID NO: 1270692 - RNA, 19 nt, Human
caaguagcggcccagaggc

SEQ ID NO: 1270693 - RNA, 23 nt, Human
cagcagcugccacacugagcucc

SEQ ID NO: 1270694 - RNA, 22 nt, Human
ccccaguaccucauucaaaagc

SEQ ID NO: 1270695 - RNA, 22 nt, Human
cgaggaaagaauuaggaacuuc

SEQ ID NO: 1270696 - RNA, 18 nt, Human
cggcccagaggccagcag

SEQ ID NO: 1270697 - RNA, 24 nt, Human
cugccacacugagcuccgcuaggc

SEQ ID NO: 1270698 - RNA, 18 nt, Human
gaaagaauuaggaacuuc

SEQ ID NO: 1270699 - RNA, 19 nt, Human
gcagaguuucacaguuaac

SEQ ID NO: 1270700 - RNA, 21 nt, Human
gcggcccagaggccagcagcu

SEQ ID NO: 1270701 - RNA, 20 nt, Human
ggcccagaggccagcagcug

SEQ ID NO: 1270702 - RNA, 19 nt, Human
uaggaacuuccaacaccuu

SEQ ID NO: 1270703 - RNA, 23 nt, Human
uagguauaauucaauuaacacag

SEQ ID NO: 1270704 - RNA, 21 nt, Human
uccaacaccuuggcccccagu

SEQ ID NO: 1270705 - RNA, 22 nt, Human
ugacaaguagcggcccagaggc

SEQ ID NO: 1270706 - RNA, 22 nt, Human
uucccaauacgcagaguuucac

SEQ ID NO: 1270707 - RNA, 20 nt, Human
aaguucaaaaacaggcaaaa

SEQ ID NO: 1270708 - RNA, 20 nt, Human
acagguguucacgacauaaa

SEQ ID NO: 1270709 - RNA, 22 nt, Human
cacccgcaccuccggacccagc

SEQ ID NO: 1270710 - RNA, 21 nt, Human
cagcucuccucgucccgcccc

SEQ ID NO: 1270711 - RNA, 22 nt, Human
ccccggccugccgcgcgcugga

SEQ ID NO: 1270712 - RNA, 22 nt, Human
cccgcaccuccggacccagcca

SEQ ID NO: 1270713 - RNA, 27 nt, Human
cccgcgccgcacccgcaccuccggacc

SEQ ID NO: 1270714 - RNA, 18 nt, Human
ccggacccagccacaggc

SEQ ID NO: 1270715 - RNA, 21 nt, Human
cgcacccgcaccuccggaccc

SEQ ID NO: 1270716 - RNA, 23 nt, Human
cuucuacuguugcugaugacagg

SEQ ID NO: 1270717 - RNA, 18 nt, Human
gaaacucagaaaaacugc

SEQ ID NO: 1270718 - RNA, 22 nt, Human
gcgccgcacccgcaccuccgga

SEQ ID NO: 1270719 - RNA, 23 nt, Human
guuuuguccacuuuuugaaugca

SEQ ID NO: 1270720 - RNA, 20 nt, Human
uacuguugcugaugacaggg

SEQ ID NO: 1270721 - RNA, 21 nt, Human
uauuuuucccaucuucuacug

SEQ ID NO: 1270722 - RNA, 26 nt, Human
ucaaaaacaggcaaaaugaaucaaag

SEQ ID NO: 1270723 - RNA, 21 nt, Human
ucuucacuuuggcagugguua

SEQ ID NO: 1270724 - RNA, 21 nt, Human
ucuucuacuguugcugaugac

SEQ ID NO: 1270725 - RNA, 21 nt, Human
uguccccgcagcucuccucgu

SEQ ID NO: 1270726 - RNA, 24 nt, Human
uuuacuaaaaaauaaaaauaaaaa

SEQ ID NO: 1270727 - RNA, 23 nt, Human
agugcugggagagagggaagaga

SEQ ID NO: 1270728 - RNA, 20 nt, Human
cagcagaauagaaucuucua

SEQ ID NO: 1270729 - RNA, 20 nt, Human
ccuucaaaauucagaguuuu

SEQ ID NO: 1270730 - RNA, 23 nt, Human
gaggagaaagugcugggagagag

SEQ ID NO: 1270731 - RNA, 24 nt, Human
uccacuggccagcagaauagaauc

SEQ ID NO: 1270732 - RNA, 23 nt, Human
uccuucaaaauucagaguuuuga

SEQ ID NO: 1270733 - RNA, 21 nt, Human
ugacaagggaggagaaagugg

SEQ ID NO: 1270734 - RNA, 23 nt, Human
ugggagagagggaagagaucagg

SEQ ID NO: 1270735 - RNA, 21 nt, Human
aaaaagagcaucacgucaaaa

SEQ ID NO: 1270736 - RNA, 24 nt, Human
aaaacaggcaugugcuaugcccuu

SEQ ID NO: 1270737 - RNA, 19 nt, Human
aaaauaaucuauugagagc

SEQ ID NO: 1270738 - RNA, 21 nt, Human
aaaauaccaacagaaacaugg

SEQ ID NO: 1270739 - RNA, 18 nt, Human
aaacacacaaagcuauag

SEQ ID NO: 1270740 - RNA, 23 nt, Human
aaacaggcaugugcuaugcccuu

SEQ ID NO: 1270741 - RNA, 18 nt, Human
acaaaacaaauccacaga

SEQ ID NO: 1270742 - RNA, 19 nt, Human
acaaaacaaauccacagaa

SEQ ID NO: 1270743 - RNA, 20 nt, Human
acaaacacacaaagcuauag

SEQ ID NO: 1270744 - RNA, 24 nt, Human
acaacacacauacaugcacacaca

SEQ ID NO: 1270745 - RNA, 33 nt, Human
acacacacaacaacacacauacaugcacacagu

SEQ ID NO: 1270746 - RNA, 29 nt, Human
acacacacaacaacacacauacaugcagu

SEQ ID NO: 1270747 - RNA, 18 nt, Human
acagaaaaaaaaucccua

SEQ ID NO: 1270748 - RNA, 24 nt, Human
acaguacuaaaaucagcucaacca

SEQ ID NO: 1270749 - RNA, 25 nt, Human
acccuguaauucagauuaagaacua

SEQ ID NO: 1270750 - RNA, 24 nt, Human
agaaauauaagaauaaacagcgug

SEQ ID NO: 1270751 - RNA, 19 nt, Human
agcuauaggauuaaaagga

SEQ ID NO: 1270752 - RNA, 21 nt, Human
aggaggaaaggcgggauggcu

SEQ ID NO: 1270753 - RNA, 18 nt, Human
aggcgaaguugcagcugc

SEQ ID NO: 1270754 - RNA, 21 nt, Human
aggcgaaguugcagcugcggg

SEQ ID NO: 1270755 - RNA, 19 nt, Human
auauauguauauauauaaa

SEQ ID NO: 1270756 - RNA, 26 nt, Human
augcacacacaaacacacaaagcuau

SEQ ID NO: 1270757 - RNA, 21 nt, Human
auuuuuuuucuuuuugccuga

SEQ ID NO: 1270758 - RNA, 20 nt, Human
caaaagaacauaaucaaugc

SEQ ID NO: 1270759 - RNA, 23 nt, Human
caaaccaacuuacaaaggacaag

SEQ ID NO: 1270760 - RNA, 24 nt, Human
caaaggacaaggcuuucgccaaaa

SEQ ID NO: 1270761 - RNA, 28 nt, Human
caacacacauacaugcacacacaaacac

SEQ ID NO: 1270762 - RNA, 21 nt, Human
caacuuacaaaggacaaggcu

SEQ ID NO: 1270763 - RNA, 24 nt, Human
cacaagaucaaaccaacuuacaaa

SEQ ID NO: 1270764 - RNA, 22 nt, Human
cacacacacaacaacacacaua

SEQ ID NO: 1270765 - RNA, 26 nt, Human
cacacacacacaacaacacacauaca

SEQ ID NO: 1270766 - RNA, 20 nt, Human
cacccucuaccccuccaucu

SEQ ID NO: 1270767 - RNA, 22 nt, Human
cacgggcaggaggaaaggcggg

SEQ ID NO: 1270768 - RNA, 24 nt, Human
cacguccguccuccugcuucuucg

SEQ ID NO: 1270769 - RNA, 21 nt, Human
cacuugcaaccuuccauuaug

SEQ ID NO: 1270770 - RNA, 24 nt, Human
cagcucaaccacaaacauccuauc

SEQ ID NO: 1270771 - RNA, 22 nt, Human
caggcucaaaggcuccaggcga

SEQ ID NO: 1270772 - RNA, 19 nt, Human
cauacauuacaaugcuaag

SEQ ID NO: 1270773 - RNA, 20 nt, Human
ccaaaauaccaacagaaaca

SEQ ID NO: 1270774 - RNA, 23 nt, Human
ccaaaguacaacacaagcuucua

SEQ ID NO: 1270775 - RNA, 23 nt, Human
cccccuccgccggcagagccaga

SEQ ID NO: 1270776 - RNA, 20 nt, Human
ccccggcugagcccaggcuc

SEQ ID NO: 1270777 - RNA, 24 nt, Human
cccuccgccggcagagccagagcc

SEQ ID NO: 1270778 - RNA, 24 nt, Human
cccuuuaucuggcaagaaaacagg

SEQ ID NO: 1270779 - RNA, 19 nt, Human
ccgcacugccggcgccugc

SEQ ID NO: 1270780 - RNA, 21 nt, Human
ccggcgccugccauggccaag

SEQ ID NO: 1270781 - RNA, 22 nt, Human
ccggcugggcugaggcccgcgc

SEQ ID NO: 1270782 - RNA, 21 nt, Human
ccggggaagcggcgacucggc

SEQ ID NO: 1270783 - RNA, 18 nt, Human
ccucuaccccuccaucuc

SEQ ID NO: 1270784 - RNA, 21 nt, Human
ccuguaauucagauuaagaac

SEQ ID NO: 1270785 - RNA, 23 nt, Human
cggcugagcccaggcucaaaggc

SEQ ID NO: 1270786 - RNA, 19 nt, Human
cggcugggcugaggcccgc

SEQ ID NO: 1270787 - RNA, 27 nt, Human
cggcugggcugaggcccgcgccgggga

SEQ ID NO: 1270788 - RNA, 23 nt, Human
cgugugccuuucucagaagcucu

SEQ ID NO: 1270789 - RNA, 23 nt, Human
cuauaacuauaaaauaaucuauu

SEQ ID NO: 1270790 - RNA, 23 nt, Human
cuccccuucaacaaaacaaaucc

SEQ ID NO: 1270791 - RNA, 19 nt, Human
cuccgcccccuccgccggc

SEQ ID NO: 1270792 - RNA, 25 nt, Human
cugaaggcaauaaaauguauaaucc

SEQ ID NO: 1270793 - RNA, 21 nt, Human
cugauuagauaagccccuuca

SEQ ID NO: 1270794 - RNA, 26 nt, Human
cuucaaaaucucuucacuucccuucu

SEQ ID NO: 1270795 - RNA, 23 nt, Human
cuucacuucccuucuccccuuca

SEQ ID NO: 1270796 - RNA, 20 nt, Human
cuugguccuacaaucaguag

SEQ ID NO: 1270797 - RNA, 23 nt, Human
gaaaaacagcugaccuaucuaca

SEQ ID NO: 1270798 - RNA, 20 nt, Human
gacaaggcuuucgccaaaac

SEQ ID NO: 1270799 - RNA, 18 nt, Human
gagagggccgggugggcc

SEQ ID NO: 1270800 - RNA, 20 nt, Human
gccaagccggcugggcugag

SEQ ID NO: 1270801 - RNA, 19 nt, Human
gcucaaccacaaacauccu

SEQ ID NO: 1270802 - RNA, 18 nt, Human
ggcggggagcgcaggggc

SEQ ID NO: 1270803 - RNA, 26 nt, Human
ggcugggcugaggcccgcgccgggga

SEQ ID NO: 1270804 - RNA, 19 nt, Human
gggcggggagcgcaggggc

SEQ ID NO: 1270805 - RNA, 23 nt, Human
uaaaaucagcucaaccacaaaca

SEQ ID NO: 1270806 - RNA, 20 nt, Human
uaaaugagacuugguugcau

SEQ ID NO: 1270807 - RNA, 19 nt, Human
uaagaaaacaggcaugugc

SEQ ID NO: 1270808 - RNA, 25 nt, Human
uaaggaacauguuaaaauuaguuca

SEQ ID NO: 1270809 - RNA, 21 nt, Human
uacaacacaagcuucuauaug

SEQ ID NO: 1270810 - RNA, 24 nt, Human
uacaguaguuucaacuuugaaaca

SEQ ID NO: 1270811 - RNA, 22 nt, Human
uagauuuuaucauauuuuccaa

SEQ ID NO: 1270812 - RNA, 22 nt, Human
uaguaauacccuguaauucaga

SEQ ID NO: 1270813 - RNA, 18 nt, Human
uauauauguauauauaua

SEQ ID NO: 1270814 - RNA, 20 nt, Human
uauauguauauauauaaaac

SEQ ID NO: 1270815 - RNA, 19 nt, Human
uauccugugaaaaacuguu

SEQ ID NO: 1270816 - RNA, 23 nt, Human
uauguauauauauaaaacauaua

SEQ ID NO: 1270817 - RNA, 27 nt, Human
ucaaaagaacauaaucaaugcugaagg

SEQ ID NO: 1270818 - RNA, 27 nt, Human
ucaacaaaacaaauccacagaaaaaaa

SEQ ID NO: 1270819 - RNA, 20 nt, Human
ucaaccacaaacauccuauc

SEQ ID NO: 1270820 - RNA, 24 nt, Human
ucacguccguccuccugcuucuuc

SEQ ID NO: 1270821 - RNA, 22 nt, Human
ucauauccugugaaaaacuguu

SEQ ID NO: 1270822 - RNA, 25 nt, Human
uccaaaauaccaacagaaacaugga

SEQ ID NO: 1270823 - RNA, 21 nt, Human
uccaaugccuuuauuaauuuu

SEQ ID NO: 1270824 - RNA, 22 nt, Human
uccacaaucacucuggaaaaac

SEQ ID NO: 1270825 - RNA, 19 nt, Human
uccacagaaaaaaaauccc

SEQ ID NO: 1270826 - RNA, 20 nt, Human
uccugcuugagucacacccu

SEQ ID NO: 1270827 - RNA, 25 nt, Human
ucggcggugacggcugcuagauccc

SEQ ID NO: 1270828 - RNA, 25 nt, Human
ugaaaaucccaaaguacaacacaag

SEQ ID NO: 1270829 - RNA, 22 nt, Human
ugaccuaucuacaguacuaaaa

SEQ ID NO: 1270830 - RNA, 18 nt, Human
ugagucacacccucuacc

SEQ ID NO: 1270831 - RNA, 22 nt, Human
ugcuagauccccggcugagccc

SEQ ID NO: 1270832 - RNA, 22 nt, Human
ugcucugacccuagaaacccuu

SEQ ID NO: 1270833 - RNA, 20 nt, Human
ugcugaaggcaauaaaaugu

SEQ ID NO: 1270834 - RNA, 20 nt, Human
uggaaaaacagcugaccuau

SEQ ID NO: 1270835 - RNA, 23 nt, Human
uggaaaaacagcugaccuaucua

SEQ ID NO: 1270836 - RNA, 23 nt, Human
uguguaucuuccuggguagucuc

SEQ ID NO: 1270837 - RNA, 23 nt, Human
uuaauguacuuuaacaaaaggga

SEQ ID NO: 1270838 - RNA, 18 nt, Human
uucaugugaaggguacuc

SEQ ID NO: 1270839 - RNA, 21 nt, Human
uucucuccgcccccuccgccg

SEQ ID NO: 1270840 - RNA, 21 nt, Human
uugcagcugcggguucucucc

SEQ ID NO: 1270841 - RNA, 22 nt, Human
uuuaaacuguguaucuuccugg

SEQ ID NO: 1270842 - RNA, 19 nt, Human
aaagcagaagucagaagcc

SEQ ID NO: 1270843 - RNA, 23 nt, Human
aacauuaucaugaacagagaaga

SEQ ID NO: 1270844 - RNA, 20 nt, Human
aagaaaagcagaagucagaa

SEQ ID NO: 1270845 - RNA, 18 nt, Human
aagcagaagucagaagcc

SEQ ID NO: 1270846 - RNA, 19 nt, Human
aagcagaagucagaagccu

SEQ ID NO: 1270847 - RNA, 21 nt, Human
aauaacacauguugggacuuc

SEQ ID NO: 1270848 - RNA, 19 nt, Human
aauaaccuuagaccaaaga

SEQ ID NO: 1270849 - RNA, 23 nt, Human
acaucaucucuuccauauuccag

SEQ ID NO: 1270850 - RNA, 19 nt, Human
accaaagaaaagcagaagu

SEQ ID NO: 1270851 - RNA, 20 nt, Human
acccagguaagaucauuuuc

SEQ ID NO: 1270852 - RNA, 18 nt, Human
accugcugcuguugaugc

SEQ ID NO: 1270853 - RNA, 18 nt, Human
accugcugcuguugaugc

SEQ ID NO: 1270854 - RNA, 19 nt, Human
acuuaauaaccuuagacca

SEQ ID NO: 1270855 - RNA, 26 nt, Human
agaaaagcagaagucagaagccugga

SEQ ID NO: 1270856 - RNA, 21 nt, Human
agaauucaaaauuauaagucu

SEQ ID NO: 1270857 - RNA, 19 nt, Human
agagaagauuuuauggaag

SEQ ID NO: 1270858 - RNA, 18 nt, Human
agccucuaacaggagaag

SEQ ID NO: 1270859 - RNA, 20 nt, Human
auagccaaauuuuuuaugcc

SEQ ID NO: 1270860 - RNA, 19 nt, Human
augaagaaauuggaauguu

SEQ ID NO: 1270861 - RNA, 22 nt, Human
augaagcacaaauuuuucaagu

SEQ ID NO: 1270862 - RNA, 22 nt, Human
caaacccuccuuuaaaaacaga

SEQ ID NO: 1270863 - RNA, 25 nt, Human
caccagugcuaaaaaagacuuuuga

SEQ ID NO: 1270864 - RNA, 24 nt, Human
cagauugaagucuuacagaaauau

SEQ ID NO: 1270865 - RNA, 22 nt, Human
caggaaucucucacaaugcuuu

SEQ ID NO: 1270866 - RNA, 19 nt, Human
caggagaagaguguccaga

SEQ ID NO: 1270867 - RNA, 21 nt, Human
cauagccaaauuuuuuaugcc

SEQ ID NO: 1270868 - RNA, 24 nt, Human
ccacucguguaaccaaaacuccau

SEQ ID NO: 1270869 - RNA, 23 nt, Human
ccuccuuuaaaaacagauugaaa

SEQ ID NO: 1270870 - RNA, 24 nt, Human
cucucacaaugcuuuaaaacccag

SEQ ID NO: 1270871 - RNA, 22 nt, Human
cugcugcuguugaugccacucg

SEQ ID NO: 1270872 - RNA, 20 nt, Human
cuuaaaauuucaaacccucc

SEQ ID NO: 1270873 - RNA, 22 nt, Human
cuuaauaaccuuagaccaaaga

SEQ ID NO: 1270874 - RNA, 20 nt, Human
gaaaagcagaagucagaagc

SEQ ID NO: 1270875 - RNA, 21 nt, Human
gaucacagcauaucacacuua

SEQ ID NO: 1270876 - RNA, 18 nt, Human
ggaaucucucacaaugcu

SEQ ID NO: 1270877 - RNA, 24 nt, Human
uaacaaguucaccagugcuaaaaa

SEQ ID NO: 1270878 - RNA, 19 nt, Human
uaaccuuagaccaaagaua

SEQ ID NO: 1270879 - RNA, 20 nt, Human
uaagaucauuuucugcacca

SEQ ID NO: 1270880 - RNA, 20 nt, Human
uaccugauacugagccucua

SEQ ID NO: 1270881 - RNA, 18 nt, Human
uagcaggauaggauaaca

SEQ ID NO: 1270882 - RNA, 19 nt, Human
uagugcaaugccaccugcu

SEQ ID NO: 1270883 - RNA, 19 nt, Human
uaucacacuuaauaaccuu

SEQ ID NO: 1270884 - RNA, 24 nt, Human
uauuacaaaguccuucacaaauaa

SEQ ID NO: 1270885 - RNA, 18 nt, Human
uauuccagauuggaccau

SEQ ID NO: 1270886 - RNA, 21 nt, Human
ucagauaccugauacugagcc

SEQ ID NO: 1270887 - RNA, 24 nt, Human
ucuaacaggagaagaguguccaga

SEQ ID NO: 1270888 - RNA, 25 nt, Human
ucucucacaaugcuuuaaaacccag

SEQ ID NO: 1270889 - RNA, 24 nt, Human
ucuucacauuugcaucaguagcug

SEQ ID NO: 1270890 - RNA, 25 nt, Human
ugaugaagaaauuggaauguuuuuu

SEQ ID NO: 1270891 - RNA, 21 nt, Human
ugccccagugaauguaaguau

SEQ ID NO: 1270892 - RNA, 23 nt, Human
ugcuaaaaaagacuuuugacagc

SEQ ID NO: 1270893 - RNA, 18 nt, Human
ugggacuucacgaagaga

SEQ ID NO: 1270894 - RNA, 24 nt, Human
uguaaccaaaacuccauagccaaa

SEQ ID NO: 1270895 - RNA, 19 nt, Human
uucacauuugcaucaguag

SEQ ID NO: 1270896 - RNA, 18 nt, Human
uucaggaaucucucacaa

SEQ ID NO: 1270897 - RNA, 27 nt, Human
uucccuugcaggcagagaagagaagau

SEQ ID NO: 1270898 - RNA, 24 nt, Human
aacaucuugcuguugucauuuuuu

SEQ ID NO: 1270899 - RNA, 18 nt, Human
aagauccaaaaacuauaa

SEQ ID NO: 1270900 - RNA, 20 nt, Human
acuggcagaaauucucuggu

SEQ ID NO: 1270901 - RNA, 22 nt, Human
acuguagcauccucuuuuccaa

SEQ ID NO: 1270902 - RNA, 19 nt, Human
agggaggugggagguggag

SEQ ID NO: 1270903 - RNA, 20 nt, Human
auccguauugggaaauaauu

SEQ ID NO: 1270904 - RNA, 21 nt, Human
caugacuuugugcacugaaga

SEQ ID NO: 1270905 - RNA, 23 nt, Human
caugucugucuuucucacugcca

SEQ ID NO: 1270906 - RNA, 20 nt, Human
cccccugacgacgggcuccg

SEQ ID NO: 1270907 - RNA, 21 nt, Human
cccugacgacgggcuccgcag

SEQ ID NO: 1270908 - RNA, 21 nt, Human
cccuuaggagagcucagcaau

SEQ ID NO: 1270909 - RNA, 22 nt, Human
ccuggcuccuuggcgcccccug

SEQ ID NO: 1270910 - RNA, 24 nt, Human
cggcugcauucuucaaagccccaa

SEQ ID NO: 1270911 - RNA, 18 nt, Human
cuccuuggcgcccccuga

SEQ ID NO: 1270912 - RNA, 21 nt, Human
cuuaugcuaaagauccaaaaa

SEQ ID NO: 1270913 - RNA, 24 nt, Human
cuuuccccggcugcauucuucaaa

SEQ ID NO: 1270914 - RNA, 23 nt, Human
cuuugugcacugaagaaguaugg

SEQ ID NO: 1270915 - RNA, 24 nt, Human
gauuucccugaaaauugaugcauu

SEQ ID NO: 1270916 - RNA, 22 nt, Human
gggcggggcgcagggagguggg

SEQ ID NO: 1270917 - RNA, 18 nt, Human
ggguggaaucuacaugca

SEQ ID NO: 1270918 - RNA, 18 nt, Human
gguaauaaucaauguaca

SEQ ID NO: 1270919 - RNA, 21 nt, Human
gucuuucucacugccaggaag

SEQ ID NO: 1270920 - RNA, 20 nt, Human
guuagaacaugucugguaaa

SEQ ID NO: 1270921 - RNA, 24 nt, Human
uaaaauaaaacaucuugcuguugu

SEQ ID NO: 1270922 - RNA, 21 nt, Human
uaaaccaguuaaaacuaagca

SEQ ID NO: 1270923 - RNA, 26 nt, Human
uaagcaguauagcaauguuguaauga

SEQ ID NO: 1270924 - RNA, 18 nt, Human
uacagagggguauuuggg

SEQ ID NO: 1270925 - RNA, 24 nt, Human
uaccuguaauaccaaaaggaucua

SEQ ID NO: 1270926 - RNA, 20 nt, Human
uacuuugggcaauacaaagu

SEQ ID NO: 1270927 - RNA, 21 nt, Human
uagcaccgccgggaggcuccu

SEQ ID NO: 1270928 - RNA, 21 nt, Human
uaucaaagguuuucugaaauc

SEQ ID NO: 1270929 - RNA, 22 nt, Human
uaucagauuuugggcugacuuu

SEQ ID NO: 1270930 - RNA, 20 nt, Human
uauuacacaucuguauuuaa

SEQ ID NO: 1270931 - RNA, 23 nt, Human
uauuugccaacauuaauuauuuc

SEQ ID NO: 1270932 - RNA, 23 nt, Human
ucaaagguuuucugaaauccuag

SEQ ID NO: 1270933 - RNA, 19 nt, Human
ucacaaaaacuuagguuua

SEQ ID NO: 1270934 - RNA, 22 nt, Human
ucaguucauuucugcuacaaua

SEQ ID NO: 1270935 - RNA, 20 nt, Human
uccuaggaguagggaauacc

SEQ ID NO: 1270936 - RNA, 21 nt, Human
ucucugguuugaugcaucacu

SEQ ID NO: 1270937 - RNA, 20 nt, Human
ucugaaauccuaggaguagg

SEQ ID NO: 1270938 - RNA, 21 nt, Human
ugaaacuacuguagcauccuc

SEQ ID NO: 1270939 - RNA, 20 nt, Human
ugaaggugcuuuguuucaga

SEQ ID NO: 1270940 - RNA, 21 nt, Human
ugacuggcagaaauucucugg

SEQ ID NO: 1270941 - RNA, 21 nt, Human
ugcacaguggucacaugugac

SEQ ID NO: 1270942 - RNA, 23 nt, Human
ugcuuauuuccaaagaaaccaua

SEQ ID NO: 1270943 - RNA, 18 nt, Human
uggcuccuuggcgccccc

SEQ ID NO: 1270944 - RNA, 22 nt, Human
ugggagguggaggguagcaccc

SEQ ID NO: 1270945 - RNA, 19 nt, Human
uggguccacaacacugaac

SEQ ID NO: 1270946 - RNA, 23 nt, Human
uguacagagggguauuuggggau

SEQ ID NO: 1270947 - RNA, 24 nt, Human
uguacagagggguauuuggggauu

SEQ ID NO: 1270948 - RNA, 22 nt, Human
ugucauuuuuuucauauuccca

SEQ ID NO: 1270949 - RNA, 24 nt, Human
ugugugugauuaucaaacccauau

SEQ ID NO: 1270950 - RNA, 19 nt, Human
uuacuugguuagacaugau

SEQ ID NO: 1270951 - RNA, 22 nt, Human
uucucugguuugaugcaucacu

SEQ ID NO: 1270952 - RNA, 18 nt, Human
uugaugaagaauguuuua

SEQ ID NO: 1270953 - RNA, 19 nt, Human
uugugcacugaagaaguau

SEQ ID NO: 1270954 - RNA, 20 nt, Human
uuuaaacaugacuuugugca

SEQ ID NO: 1270955 - RNA, 24 nt, Human
uuuaauauccugagaguuaagauu

SEQ ID NO: 1270956 - RNA, 20 nt, Human
uuucuuggacuucauucuga

SEQ ID NO: 1270957 - RNA, 19 nt, Human
uuuggcuucuugguacagu

SEQ ID NO: 1270958 - RNA, 22 nt, Human
aaaacaccuaaguaacauuucc

SEQ ID NO: 1270959 - RNA, 18 nt, Human
aaaacccaauccauccac

SEQ ID NO: 1270960 - RNA, 31 nt, Human
aaaauaccuauacacacacacacacacacag

SEQ ID NO: 1270961 - RNA, 23 nt, Human
aaacaagaacacaugagaacaca

SEQ ID NO: 1270962 - RNA, 23 nt, Human
aaaggcaucucuaccacccaaaa

SEQ ID NO: 1270963 - RNA, 25 nt, Human
aaaggcaucucuaccacccaaaaac

SEQ ID NO: 1270964 - RNA, 29 nt, Human
aaagugcacaugcacacacacacacacac

SEQ ID NO: 1270965 - RNA, 19 nt, Human
aaauaccauauacuauucu

SEQ ID NO: 1270966 - RNA, 18 nt, Human
aaauaccuauacacacac

SEQ ID NO: 1270967 - RNA, 24 nt, Human
aagcuuacaugccugagacuucaa

SEQ ID NO: 1270968 - RNA, 23 nt, Human
acacacacacacacacacacaca

SEQ ID NO: 1270969 - RNA, 23 nt, Human
acacacacacacacacacacaca

SEQ ID NO: 1270970 - RNA, 23 nt, Human
acacacacacacacacacacaca

SEQ ID NO: 1270971 - RNA, 23 nt, Human
acacacacacacacacacacaca

SEQ ID NO: 1270972 - RNA, 23 nt, Human
acacacacacacacacacacaca

SEQ ID NO: 1270973 - RNA, 23 nt, Human
acacacacacacacacacacaca

SEQ ID NO: 1270974 - RNA, 23 nt, Human
acacacacacacacacacacaca

SEQ ID NO: 1270975 - RNA, 23 nt, Human
acacacacacacacacacacaca

SEQ ID NO: 1270976 - RNA, 23 nt, Human
acacacacacacacacacacaca

SEQ ID NO: 1270977 - RNA, 23 nt, Human
acacacacacacacacacacaca

SEQ ID NO: 1270978 - RNA, 23 nt, Human
acacacacacacacacacacaca

SEQ ID NO: 1270979 - RNA, 29 nt, Human
acacacacacacacacacacacagccuca

SEQ ID NO: 1270980 - RNA, 23 nt, Human
acacacacacacacacacacaua

SEQ ID NO: 1270981 - RNA, 23 nt, Human
acacacacacacacacacauaua

SEQ ID NO: 1270982 - RNA, 28 nt, Human
acacacacacacacacacauauagggau

SEQ ID NO: 1270983 - RNA, 19 nt, Human
acacagccucagaugccuc

SEQ ID NO: 1270984 - RNA, 27 nt, Human
acacagccucagaugccucuggaagag

SEQ ID NO: 1270985 - RNA, 25 nt, Human
acacgcacaaguuaguauucuuaca

SEQ ID NO: 1270986 - RNA, 21 nt, Human
acagaacgagacuccucuuaa

SEQ ID NO: 1270987 - RNA, 24 nt, Human
accacuguucacugacaaugcauu

SEQ ID NO: 1270988 - RNA, 23 nt, Human
acccaauccauccacucuaacug

SEQ ID NO: 1270989 - RNA, 19 nt, Human
acccuggucugaccacuuc

SEQ ID NO: 1270990 - RNA, 22 nt, Human
acucuuguugcccaggcuggag

SEQ ID NO: 1270991 - RNA, 20 nt, Human
acuuugaaaauguacuuaga

SEQ ID NO: 1270992 - RNA, 21 nt, Human
agaaagggagggagggaggga

SEQ ID NO: 1270993 - RNA, 19 nt, Human
agacuucaagucaaaguca

SEQ ID NO: 1270994 - RNA, 19 nt, Human
agaggugaugagaggcagc

SEQ ID NO: 1270995 - RNA, 20 nt, Human
agcaaaaagcaaucugugcu

SEQ ID NO: 1270996 - RNA, 24 nt, Human
agcaacaagcacaaucuccaaaaa

SEQ ID NO: 1270997 - RNA, 19 nt, Human
aggaagaagucagguagaa

SEQ ID NO: 1270998 - RNA, 19 nt, Human
aggaaggaaggaagaaagg

SEQ ID NO: 1270999 - RNA, 21 nt, Human
aggcagaggugaugagaggca

SEQ ID NO: 1271000 - RNA, 19 nt, Human
agugcagaggugagauaug

SEQ ID NO: 1271001 - RNA, 23 nt, Human
auaaaacaagaacacaugagaac

SEQ ID NO: 1271002 - RNA, 23 nt, Human
auauagggauggguggggguggg

SEQ ID NO: 1271003 - RNA, 23 nt, Human
augcacacacacacacacacaca

SEQ ID NO: 1271004 - RNA, 23 nt, Human
augcacacacacacacacacaca

SEQ ID NO: 1271005 - RNA, 21 nt, Human
augggaccaaaacccaaucca

SEQ ID NO: 1271006 - RNA, 23 nt, Human
auuucuguucuccaguuuggaga

SEQ ID NO: 1271007 - RNA, 19 nt, Human
caaaacccaauccauccac

SEQ ID NO: 1271008 - RNA, 22 nt, Human
caaaagcaaagccuugaccuuc

SEQ ID NO: 1271009 - RNA, 26 nt, Human
caaagcaacaagcacaaucuccaaaa

SEQ ID NO: 1271010 - RNA, 19 nt, Human
caaguuaaagcaauuacua

SEQ ID NO: 1271011 - RNA, 18 nt, Human
cacacacacacacacaca

SEQ ID NO: 1271012 - RNA, 18 nt, Human
cacacacacacacacaca

SEQ ID NO: 1271013 - RNA, 20 nt, Human
cacacacacacacacacaca

SEQ ID NO: 1271014 - RNA, 20 nt, Human
cacacacacacacacacaca

SEQ ID NO: 1271015 - RNA, 20 nt, Human
cacacacacacacacacaca

SEQ ID NO: 1271016 - RNA, 20 nt, Human
cacacacacacacacacaca

SEQ ID NO: 1271017 - RNA, 20 nt, Human
cacacacacacacacacaca

SEQ ID NO: 1271018 - RNA, 20 nt, Human
cacacacacacacacacaca

SEQ ID NO: 1271019 - RNA, 20 nt, Human
cacacacacacacacacaca

SEQ ID NO: 1271020 - RNA, 20 nt, Human
cacacacacacacacacaca

SEQ ID NO: 1271021 - RNA, 20 nt, Human
cacacacacacacacacaca

SEQ ID NO: 1271022 - RNA, 20 nt, Human
cacacacacacacacacaca

SEQ ID NO: 1271023 - RNA, 20 nt, Human
cacacacacacacacacaca

SEQ ID NO: 1271024 - RNA, 20 nt, Human
cacacacacacacacacaca

SEQ ID NO: 1271025 - RNA, 20 nt, Human
cacacacacacacacacaca

SEQ ID NO: 1271026 - RNA, 20 nt, Human
cacacacacacacacacaca

SEQ ID NO: 1271027 - RNA, 20 nt, Human
cacacacacacacacacaca

SEQ ID NO: 1271028 - RNA, 20 nt, Human
cacacacacacacacacaca

SEQ ID NO: 1271029 - RNA, 20 nt, Human
cacacacacacacacacaca

SEQ ID NO: 1271030 - RNA, 20 nt, Human
cacacacacacacacacaca

SEQ ID NO: 1271031 - RNA, 20 nt, Human
cacacacacacacacacaca

SEQ ID NO: 1271032 - RNA, 22 nt, Human
cacacacacacacacacacaca

SEQ ID NO: 1271033 - RNA, 22 nt, Human
cacacacacacacacacacaca

SEQ ID NO: 1271034 - RNA, 22 nt, Human
cacacacacacacacacacaca

SEQ ID NO: 1271035 - RNA, 22 nt, Human
cacacacacacacacacacaca

SEQ ID NO: 1271036 - RNA, 22 nt, Human
cacacacacacacacacacaca

SEQ ID NO: 1271037 - RNA, 22 nt, Human
cacacacacacacacacacaca

SEQ ID NO: 1271038 - RNA, 22 nt, Human
cacacacacacacacacacaca

SEQ ID NO: 1271039 - RNA, 22 nt, Human
cacacacacacacacacacaca

SEQ ID NO: 1271040 - RNA, 22 nt, Human
cacacacacacacacacacaca

SEQ ID NO: 1271041 - RNA, 26 nt, Human
cacacacacacacacacacacacaca

SEQ ID NO: 1271042 - RNA, 26 nt, Human
cacacacacacacacacacacacaca

SEQ ID NO: 1271043 - RNA, 26 nt, Human
cacacacacacacacacacacacaca

SEQ ID NO: 1271044 - RNA, 26 nt, Human
cacacacacacacacacacacacaca

SEQ ID NO: 1271045 - RNA, 26 nt, Human
cacacacacacacacacacacacaca

SEQ ID NO: 1271046 - RNA, 26 nt, Human
cacacacacacacacacacacacaca

SEQ ID NO: 1271047 - RNA, 26 nt, Human
cacacacacacacacacacacacaua

SEQ ID NO: 1271048 - RNA, 26 nt, Human
cacacacacacacacacacagccuca

SEQ ID NO: 1271049 - RNA, 20 nt, Human
cacacacacacacacacaua

SEQ ID NO: 1271050 - RNA, 22 nt, Human
cacacacacacacacacauaua

SEQ ID NO: 1271051 - RNA, 19 nt, Human
cacacacacacacacauau

SEQ ID NO: 1271052 - RNA, 20 nt, Human
cacacacagccucagaugcc

SEQ ID NO: 1271053 - RNA, 20 nt, Human
caccaacaagcaaagcaaca

SEQ ID NO: 1271054 - RNA, 20 nt, Human
cacccuuccucacagucaaa

SEQ ID NO: 1271055 - RNA, 24 nt, Human
cacucuuguugcccaggcuggagu

SEQ ID NO: 1271056 - RNA, 20 nt, Human
cacuucugccuagacaaggg

SEQ ID NO: 1271057 - RNA, 18 nt, Human
cagccucaugggaccaaa

SEQ ID NO: 1271058 - RNA, 23 nt, Human
caugacaaacacccauuuucaau

SEQ ID NO: 1271059 - RNA, 22 nt, Human
ccaaaacccaauccauccaccg

SEQ ID NO: 1271060 - RNA, 20 nt, Human
ccaacaagcaaagcaacaag

SEQ ID NO: 1271061 - RNA, 24 nt, Human
ccaacaagcaaagcaacaagcaca

SEQ ID NO: 1271062 - RNA, 20 nt, Human
ccaauccauccacucuaacu

SEQ ID NO: 1271063 - RNA, 19 nt, Human
ccaugacauuuccacauca

SEQ ID NO: 1271064 - RNA, 19 nt, Human
cccaggcuggagugcaacg

SEQ ID NO: 1271065 - RNA, 20 nt, Human
cccauguccaugacauuucc

SEQ ID NO: 1271066 - RNA, 19 nt, Human
ccccuggcugcaggugcgg

SEQ ID NO: 1271067 - RNA, 19 nt, Human
ccucuaaggacuuagcaaa

SEQ ID NO: 1271068 - RNA, 20 nt, Human
ccuuuuauucaacuuuccua

SEQ ID NO: 1271069 - RNA, 21 nt, Human
cucuaccacccaaaaacucaa

SEQ ID NO: 1271070 - RNA, 18 nt, Human
cucuuguugcccaggcug

SEQ ID NO: 1271071 - RNA, 19 nt, Human
cugaaaaaugcaagucacc

SEQ ID NO: 1271072 - RNA, 21 nt, Human
cugagcacccuuccucacagu

SEQ ID NO: 1271073 - RNA, 19 nt, Human
cuggagccccacgacaugc

SEQ ID NO: 1271074 - RNA, 24 nt, Human
cuggagugcaacggcgugaucuca

SEQ ID NO: 1271075 - RNA, 23 nt, Human
cugugaaccucucuucccaguuu

SEQ ID NO: 1271076 - RNA, 20 nt, Human
cuguuccugagcacccuucc

SEQ ID NO: 1271077 - RNA, 21 nt, Human
cuuagacuaaguacacaauga

SEQ ID NO: 1271078 - RNA, 18 nt, Human
cuuguagccuuuucuuuc

SEQ ID NO: 1271079 - RNA, 26 nt, Human
cuuguagccuuuucuuucacuuucuu

SEQ ID NO: 1271080 - RNA, 24 nt, Human
cuuguugcccaggcuggagugcaa

SEQ ID NO: 1271081 - RNA, 21 nt, Human
gaaagucaccaugacaaacac

SEQ ID NO: 1271082 - RNA, 22 nt, Human
gagacagaguuucacucuuguu

SEQ ID NO: 1271083 - RNA, 21 nt, Human
gagggaggaagggagggaggg

SEQ ID NO: 1271084 - RNA, 19 nt, Human
gagggagggagggagggag

SEQ ID NO: 1271085 - RNA, 19 nt, Human
gagggagggagggagggag

SEQ ID NO: 1271086 - RNA, 20 nt, Human
gagggagggagggagggagg

SEQ ID NO: 1271087 - RNA, 20 nt, Human
gagggagggagggagggagg

SEQ ID NO: 1271088 - RNA, 23 nt, Human
gagggaggguaagaagcaauagg

SEQ ID NO: 1271089 - RNA, 21 nt, Human
gcaaaaagcaaucugugcuua

SEQ ID NO: 1271090 - RNA, 27 nt, Human
gcaaagcaacaagcacaaucuccaaaa

SEQ ID NO: 1271091 - RNA, 24 nt, Human
gcccaggcuggagugcaacggcgu

SEQ ID NO: 1271092 - RNA, 19 nt, Human
gcuggagugcaacggcgug

SEQ ID NO: 1271093 - RNA, 21 nt, Human
ggaagggagggaggguaagaa

SEQ ID NO: 1271094 - RNA, 23 nt, Human
ggaagggagggaggguaagaagc

SEQ ID NO: 1271095 - RNA, 21 nt, Human
ggaggaagggagggaggguaa

SEQ ID NO: 1271096 - RNA, 20 nt, Human
ggagggagggaggaagggag

SEQ ID NO: 1271097 - RNA, 19 nt, Human
ggagggagggagggaggaa

SEQ ID NO: 1271098 - RNA, 19 nt, Human
ggagggagggagggaggaa

SEQ ID NO: 1271099 - RNA, 19 nt, Human
ggagggagggagggaggga

SEQ ID NO: 1271100 - RNA, 19 nt, Human
ggagggagggagggaggga

SEQ ID NO: 1271101 - RNA, 20 nt, Human
ggagggagggagggagggag

SEQ ID NO: 1271102 - RNA, 20 nt, Human
ggagggagggagggagggag

SEQ ID NO: 1271103 - RNA, 23 nt, Human
ggagggagggagggagggaggaa

SEQ ID NO: 1271104 - RNA, 20 nt, Human
gggagggagggaggaaggga

SEQ ID NO: 1271105 - RNA, 21 nt, Human
gggagggagggaggaagggag

SEQ ID NO: 1271106 - RNA, 25 nt, Human
gggugggggugggggggagaaaacc

SEQ ID NO: 1271107 - RNA, 21 nt, Human
ggugaugagaggcagcaaaaa

SEQ ID NO: 1271108 - RNA, 24 nt, Human
guaacauuuccucuaaggacuuag

SEQ ID NO: 1271109 - RNA, 22 nt, Human
guagccuuuucuuucacuuucu

SEQ ID NO: 1271110 - RNA, 21 nt, Human
gucacuuucaauauucugcaa

SEQ ID NO: 1271111 - RNA, 20 nt, Human
uaaaaagcauguucuuauaa

SEQ ID NO: 1271112 - RNA, 24 nt, Human
uaaaaagcauguucuuauaaaaca

SEQ ID NO: 1271113 - RNA, 22 nt, Human
uaaugcacgaaacauaugcaug

SEQ ID NO: 1271114 - RNA, 26 nt, Human
uacaaaguccaccauguuugugaaag

SEQ ID NO: 1271115 - RNA, 25 nt, Human
uacacacacacacacacacacacac

SEQ ID NO: 1271116 - RNA, 24 nt, Human
uacacucccuuugcacuaguagcc

SEQ ID NO: 1271117 - RNA, 22 nt, Human
uagaaacuagaacugccaauga

SEQ ID NO: 1271118 - RNA, 19 nt, Human
uagaaucauaagaagucac

SEQ ID NO: 1271119 - RNA, 23 nt, Human
uagccugggauccccuggcugca

SEQ ID NO: 1271120 - RNA, 18 nt, Human
uaguagaaauaaugcacg

SEQ ID NO: 1271121 - RNA, 23 nt, Human
uaguagccugggauccccuggcu

SEQ ID NO: 1271122 - RNA, 21 nt, Human
uauaaucucugagaccccaua

SEQ ID NO: 1271123 - RNA, 25 nt, Human
uauacacacacacacacacacacac

SEQ ID NO: 1271124 - RNA, 25 nt, Human
uauacacacacacacacacacacag

SEQ ID NO: 1271125 - RNA, 20 nt, Human
uauacagauuaauaugcaau

SEQ ID NO: 1271126 - RNA, 21 nt, Human
uaucaggaauggagcuaugac

SEQ ID NO: 1271127 - RNA, 18 nt, Human
uauucagugguuccaguu

SEQ ID NO: 1271128 - RNA, 20 nt, Human
ucaaaagcaaagccuugacu

SEQ ID NO: 1271129 - RNA, 22 nt, Human
ucacucuuguugcccaggcugg

SEQ ID NO: 1271130 - RNA, 23 nt, Human
ucacucuuguugcccaggcugga

SEQ ID NO: 1271131 - RNA, 22 nt, Human
ucagaugccucuggaagagaca

SEQ ID NO: 1271132 - RNA, 23 nt, Human
ucauaacaaauacugaaaugcag

SEQ ID NO: 1271133 - RNA, 20 nt, Human
ucauaagaagucacucaagg

SEQ ID NO: 1271134 - RNA, 18 nt, Human
uccaaagauuuuacucag

SEQ ID NO: 1271135 - RNA, 18 nt, Human
ucccacaaggaacucuag

SEQ ID NO: 1271136 - RNA, 21 nt, Human
uccugagcacccuuccucaca

SEQ ID NO: 1271137 - RNA, 21 nt, Human
ucuaugauacaguauaaaaag

SEQ ID NO: 1271138 - RNA, 19 nt, Human
ucuccaguuuggagagcuc

SEQ ID NO: 1271139 - RNA, 25 nt, Human
ucucugagaccccauaaccuguaga

SEQ ID NO: 1271140 - RNA, 23 nt, Human
ucucuucaaaccacuguaagggc

SEQ ID NO: 1271141 - RNA, 21 nt, Human
ucugaccacuucugccuagga

SEQ ID NO: 1271142 - RNA, 23 nt, Human
ucugagaccccauaaccuguaga

SEQ ID NO: 1271143 - RNA, 20 nt, Human
ucugucuugaggcagagguc

SEQ ID NO: 1271144 - RNA, 24 nt, Human
ucuguguaugauugccugcuacuu

SEQ ID NO: 1271145 - RNA, 26 nt, Human
ucuucaaaccacuguaagggcaaaua

SEQ ID NO: 1271146 - RNA, 22 nt, Human
ucuuguugcccaggcuggagug

SEQ ID NO: 1271147 - RNA, 22 nt, Human
ugaaaauauuucuguucuccag

SEQ ID NO: 1271148 - RNA, 22 nt, Human
ugaagagaaugaauuccaauca

SEQ ID NO: 1271149 - RNA, 24 nt, Human
ugagaacacaugaguauaaugucu

SEQ ID NO: 1271150 - RNA, 26 nt, Human
ugagcacccuuccucacagucaaaac

SEQ ID NO: 1271151 - RNA, 23 nt, Human
ugauacaguauaaaaagcauguu

SEQ ID NO: 1271152 - RNA, 21 nt, Human
ugaugagaggcagcaaaaagc

SEQ ID NO: 1271153 - RNA, 20 nt, Human
ugcaauuucuggagccccac

SEQ ID NO: 1271154 - RNA, 25 nt, Human
ugcacacacacacacacacacacac

SEQ ID NO: 1271155 - RNA, 23 nt, Human
ugcagucaaaauucaucuacccc

SEQ ID NO: 1271156 - RNA, 18 nt, Human
ugcccaggcuggagugca

SEQ ID NO: 1271157 - RNA, 21 nt, Human
ugcccaggcuggagugcaacg

SEQ ID NO: 1271158 - RNA, 19 nt, Human
uggagugcaacggcgugau

SEQ ID NO: 1271159 - RNA, 20 nt, Human
ugguuuuggguucauugugu

SEQ ID NO: 1271160 - RNA, 21 nt, Human
ugugaaccucucuucccaguu

SEQ ID NO: 1271161 - RNA, 18 nt, Human
ugugaccacuguucacug

SEQ ID NO: 1271162 - RNA, 20 nt, Human
uguugcccaggcuggagugc

SEQ ID NO: 1271163 - RNA, 26 nt, Human
uucaacuuuccuaagcaggaaaacaa

SEQ ID NO: 1271164 - RNA, 21 nt, Human
uucaagucaaagucaauuugc

SEQ ID NO: 1271165 - RNA, 21 nt, Human
uucacauuuuguagaaagcuu

SEQ ID NO: 1271166 - RNA, 24 nt, Human
uucacucuuguugcccaggcugga

SEQ ID NO: 1271167 - RNA, 24 nt, Human
uucacuuugaaaauguacuuagac

SEQ ID NO: 1271168 - RNA, 24 nt, Human
uuccacaucaugaaugugaccacu

SEQ ID NO: 1271169 - RNA, 33 nt, Human
uucccaaagugcacaugcacacacacacacagu

SEQ ID NO: 1271170 - RNA, 23 nt, Human
uugaaaauauuucuguucuccag

SEQ ID NO: 1271171 - RNA, 19 nt, Human
uugaagcauggauucacau

SEQ ID NO: 1271172 - RNA, 24 nt, Human
uugaagcauggauucacauuuugu

SEQ ID NO: 1271173 - RNA, 18 nt, Human
uugcccaggcuggagugc

SEQ ID NO: 1271174 - RNA, 24 nt, Human
uuucacucuuguugcccaggcugg

SEQ ID NO: 1271175 - RNA, 24 nt, Human
uuuuucuaugcuccccaguggcug

SEQ ID NO: 1271176 - RNA, 23 nt, Human
agcguucgggccgcucgcccuuc

SEQ ID NO: 1271177 - RNA, 19 nt, Human
caaaagcugcccauugcac

SEQ ID NO: 1271178 - RNA, 21 nt, Human
cauugcacuuugacccuuuaa

SEQ ID NO: 1271179 - RNA, 21 nt, Human
cauugcacuuugacccuuuaa

SEQ ID NO: 1271180 - RNA, 22 nt, Human
ccaguuaguugcccccaaaauc

SEQ ID NO: 1271181 - RNA, 19 nt, Human
ccccaaaaucaaaagcugc

SEQ ID NO: 1271182 - RNA, 24 nt, Human
cccccaaaaucaaaagcugcccau

SEQ ID NO: 1271183 - RNA, 18 nt, Human
cccgcgcgcuuguccccg

SEQ ID NO: 1271184 - RNA, 19 nt, Human
cccgcgcgcuuguccccgc

SEQ ID NO: 1271185 - RNA, 20 nt, Human
cccgcgcgcuuguccccgca

SEQ ID NO: 1271186 - RNA, 21 nt, Human
cccgcgcgcuuguccccgcag

SEQ ID NO: 1271187 - RNA, 18 nt, Human
ccgcagccgcggcugcug

SEQ ID NO: 1271188 - RNA, 25 nt, Human
cugcagccgcagccgcggcugcugc

SEQ ID NO: 1271189 - RNA, 24 nt, Human
guccuagucaccacugcagccgca

SEQ ID NO: 1271190 - RNA, 21 nt, Human
uccuagucaccacugcagccg

SEQ ID NO: 1271191 - RNA, 23 nt, Human
uccuagucaccacugcagccgca

SEQ ID NO: 1271192 - RNA, 23 nt, Human
uuccugcccgccggaccuccgag

SEQ ID NO: 1271193 - RNA, 20 nt, Human
aagcaaaauauauuguaauu

SEQ ID NO: 1271194 - RNA, 21 nt, Human
cccaagacaucagauaauuuu

SEQ ID NO: 1271195 - RNA, 22 nt, Human
gagaagcucugaacuuaggcaa

SEQ ID NO: 1271196 - RNA, 23 nt, Human
uaaaacagagagaagcucugaac

SEQ ID NO: 1271197 - RNA, 20 nt, Human
ugcccaagacaucagauaau

SEQ ID NO: 1271198 - RNA, 22 nt, Human
uguaaaacagagagaagcucug

SEQ ID NO: 1271199 - RNA, 23 nt, Human
uguaaaacagagagaagcucuga

SEQ ID NO: 1271200 - RNA, 23 nt, Human
uguuguuguuuucucuuuuucuc

SEQ ID NO: 1271201 - RNA, 23 nt, Human
uguuguuuucucuuuuucucugu

SEQ ID NO: 1271202 - RNA, 19 nt, Human
uuccagaaaggcaguugga

SEQ ID NO: 1271203 - RNA, 21 nt, Human
uuguuguuguuuucucuuuuu

SEQ ID NO: 1271204 - RNA, 19 nt, Human
aaacaugucuugccuccca

SEQ ID NO: 1271205 - RNA, 18 nt, Human
aacuauaucccaaccacc

SEQ ID NO: 1271206 - RNA, 20 nt, Human
aagcacacguucccagaauc

SEQ ID NO: 1271207 - RNA, 22 nt, Human
acacaaaaucuggaaguccaca

SEQ ID NO: 1271208 - RNA, 18 nt, Human
acagucugaucucucuuu

SEQ ID NO: 1271209 - RNA, 21 nt, Human
acucagcacaccaaggaccug

SEQ ID NO: 1271210 - RNA, 26 nt, Human
agaaggucagcaaaaaacaugugagc

SEQ ID NO: 1271211 - RNA, 23 nt, Human
agacagacucagucucugcccuc

SEQ ID NO: 1271212 - RNA, 23 nt, Human
agagaaacgacagugggcccagg

SEQ ID NO: 1271213 - RNA, 18 nt, Human
aggucuuuagaucauaac

SEQ ID NO: 1271214 - RNA, 23 nt, Human
agguucuggagguagacagugaa

SEQ ID NO: 1271215 - RNA, 18 nt, Human
auggagacaaguaaacag

SEQ ID NO: 1271216 - RNA, 22 nt, Human
caagacagacucagucucugcc

SEQ ID NO: 1271217 - RNA, 18 nt, Human
caagggaagguacuauga

SEQ ID NO: 1271218 - RNA, 22 nt, Human
caccauagggcgguuuuucucc

SEQ ID NO: 1271219 - RNA, 20 nt, Human
cacuuccaguuguccugccu

SEQ ID NO: 1271220 - RNA, 21 nt, Human
cagcaaaaaaggaauguagca

SEQ ID NO: 1271221 - RNA, 22 nt, Human
cagcacaccaaggaccugcacc

SEQ ID NO: 1271222 - RNA, 24 nt, Human
cagcacaccaaggaccugcaccgg

SEQ ID NO: 1271223 - RNA, 22 nt, Human
cagcccuggaucccuuaaaccu

SEQ ID NO: 1271224 - RNA, 25 nt, Human
caggagaacacccaagcauucccca

SEQ ID NO: 1271225 - RNA, 24 nt, Human
cagggugauaauaaggagaagguc

SEQ ID NO: 1271226 - RNA, 20 nt, Human
cccaaacaucucaguggagu

SEQ ID NO: 1271227 - RNA, 21 nt, Human
ccugagggcuguaucacaggc

SEQ ID NO: 1271228 - RNA, 20 nt, Human
cggccucugaguucccucag

SEQ ID NO: 1271229 - RNA, 22 nt, Human
cugcaaacaugucuugccuccc

SEQ ID NO: 1271230 - RNA, 18 nt, Human
cugcaagaggcuuuccuc

SEQ ID NO: 1271231 - RNA, 23 nt, Human
cugcggcuuuccacaguacauug

SEQ ID NO: 1271232 - RNA, 24 nt, Human
cuuaaaccuugauuucauacaaca

SEQ ID NO: 1271233 - RNA, 21 nt, Human
gagaacacccaagcauucccc

SEQ ID NO: 1271234 - RNA, 18 nt, Human
gagguucuggagguagac

SEQ ID NO: 1271235 - RNA, 22 nt, Human
gauucugugugagguucuggag

SEQ ID NO: 1271236 - RNA, 20 nt, Human
gcacaccaaggaccugcacc

SEQ ID NO: 1271237 - RNA, 21 nt, Human
gcccuggaucccuuaaaccuu

SEQ ID NO: 1271238 - RNA, 20 nt, Human
gggcagaggucccugcggcu

SEQ ID NO: 1271239 - RNA, 24 nt, Human
gggcugggggacggucaggucuuu

SEQ ID NO: 1271240 - RNA, 18 nt, Human
gucucugcccucggguag

SEQ ID NO: 1271241 - RNA, 21 nt, Human
guucaagggaagguacuauga

SEQ ID NO: 1271242 - RNA, 22 nt, Human
uaacaaggcacauccugcacag

SEQ ID NO: 1271243 - RNA, 23 nt, Human
uaagcacacguucccagaaucuc

SEQ ID NO: 1271244 - RNA, 20 nt, Human
uaaggagcuuccaggagaac

SEQ ID NO: 1271245 - RNA, 23 nt, Human
uaaggagcuuccaggagaacacc

SEQ ID NO: 1271246 - RNA, 23 nt, Human
uacacaaaaucuggaaguccaca

SEQ ID NO: 1271247 - RNA, 24 nt, Human
uaccccgcuuucaagggcagaggu

SEQ ID NO: 1271248 - RNA, 21 nt, Human
uacuaagugccagauucugug

SEQ ID NO: 1271249 - RNA, 19 nt, Human
uaugacuggacgugcacgu

SEQ ID NO: 1271250 - RNA, 24 nt, Human
ucacguggggagaaaccuuggaca

SEQ ID NO: 1271251 - RNA, 21 nt, Human
ucagcaaaaaacaugugagca

SEQ ID NO: 1271252 - RNA, 21 nt, Human
ucagcaaaaaaggaauguagc

SEQ ID NO: 1271253 - RNA, 20 nt, Human
ucaggucuuucucaucccac

SEQ ID NO: 1271254 - RNA, 23 nt, Human
ucccuuucuacauagacacagua

SEQ ID NO: 1271255 - RNA, 19 nt, Human
ugaacaaauguacaaucgg

SEQ ID NO: 1271256 - RNA, 22 nt, Human
ugauuaaaauaaggagcuucca

SEQ ID NO: 1271257 - RNA, 19 nt, Human
ugcuuguaaacauuuuguu

SEQ ID NO: 1271258 - RNA, 22 nt, Human
uguagcaggagagcagggugau

SEQ ID NO: 1271259 - RNA, 26 nt, Human
uguccugccuuucuggacugaacaaa

SEQ ID NO: 1271260 - RNA, 18 nt, Human
ugugagcuccagguuggg

SEQ ID NO: 1271261 - RNA, 20 nt, Human
uguuaaagacucaguauacu

SEQ ID NO: 1271262 - RNA, 19 nt, Human
uuacugcaaacaugucuug

SEQ ID NO: 1271263 - RNA, 27 nt, Human
uucagcaaaaaaggaauguagcaggag

SEQ ID NO: 1271264 - RNA, 21 nt, Human
uucccagaaucuccugagggc

SEQ ID NO: 1271265 - RNA, 22 nt, Human
uucccugcacccaggucuuuag

SEQ ID NO: 1271266 - RNA, 25 nt, Human
uucucaucccacgaggccauauuuc

SEQ ID NO: 1271267 - RNA, 21 nt, Human
uugguacaaaugaauaccccg

SEQ ID NO: 1271268 - RNA, 22 nt, Human
uuuauacaauaagaggauaaaa

SEQ ID NO: 1271269 - RNA, 25 nt, Human
uuuauacauguuagaaauuuauaca

SEQ ID NO: 1271270 - RNA, 22 nt, Human
aaacauggucacaauauucaca

SEQ ID NO: 1271271 - RNA, 22 nt, Human
aaacuagcacuaucuuguuaca

SEQ ID NO: 1271272 - RNA, 25 nt, Human
aaaguacucccuuaccuucuccuca

SEQ ID NO: 1271273 - RNA, 23 nt, Human
aaagucuuacaagaaaggcaaga

SEQ ID NO: 1271274 - RNA, 22 nt, Human
aaauccucacagaaaugaagaa

SEQ ID NO: 1271275 - RNA, 24 nt, Human
aaauccucacagaaaugaagaaga

SEQ ID NO: 1271276 - RNA, 24 nt, Human
aagaaaggcaagaguuugggaggg

SEQ ID NO: 1271277 - RNA, 18 nt, Human
aaggagccaacacaucug

SEQ ID NO: 1271278 - RNA, 20 nt, Human
aaugaugcaacgauggaugg

SEQ ID NO: 1271279 - RNA, 22 nt, Human
aaugggaugguugguuacccua

SEQ ID NO: 1271280 - RNA, 23 nt, Human
aauucaccuccccaaacucacca

SEQ ID NO: 1271281 - RNA, 18 nt, Human
acaaagcacaccaauuaa

SEQ ID NO: 1271282 - RNA, 24 nt, Human
acaaggcauugaauggauaagauc

SEQ ID NO: 1271283 - RNA, 23 nt, Human
acacaaugcucucaaugcuaaaa

SEQ ID NO: 1271284 - RNA, 22 nt, Human
acauauuaaagauuacaagacc

SEQ ID NO: 1271285 - RNA, 24 nt, Human
acgagaagucuuacgacaaagcca

SEQ ID NO: 1271286 - RNA, 23 nt, Human
acucaccaaaguacucccuuacc

SEQ ID NO: 1271287 - RNA, 24 nt, Human
acucccuuaccuucuccucagugg

SEQ ID NO: 1271288 - RNA, 20 nt, Human
acuuacaaugacagccaucu

SEQ ID NO: 1271289 - RNA, 22 nt, Human
acuucagauucuugauuuuuuu

SEQ ID NO: 1271290 - RNA, 23 nt, Human
agauaugacagaaauuggcuuua

SEQ ID NO: 1271291 - RNA, 24 nt, Human
agaugauuugaaacuccuguuuuc

SEQ ID NO: 1271292 - RNA, 21 nt, Human
aggcaggaggggaggcacaug

SEQ ID NO: 1271293 - RNA, 20 nt, Human
auuucccuucuucuuugucc

SEQ ID NO: 1271294 - RNA, 23 nt, Human
caaagcacaccaauuaauccagc

SEQ ID NO: 1271295 - RNA, 20 nt, Human
caaaguacucccuuaccuuc

SEQ ID NO: 1271296 - RNA, 22 nt, Human
caaaguacucccuuaccuucuc

SEQ ID NO: 1271297 - RNA, 23 nt, Human
caacaauauuuuaugauuucagc

SEQ ID NO: 1271298 - RNA, 23 nt, Human
caaugcuaaaaugggaugguugg

SEQ ID NO: 1271299 - RNA, 22 nt, Human
cacacgucuaaagagguuaccu

SEQ ID NO: 1271300 - RNA, 23 nt, Human
cacaggcaaagucgaagaugaac

SEQ ID NO: 1271301 - RNA, 21 nt, Human
caccuccccaaacucaccaaa

SEQ ID NO: 1271302 - RNA, 20 nt, Human
cagcaguuucauuaaaaucc

SEQ ID NO: 1271303 - RNA, 19 nt, Human
caguggcuuuuuggggguc

SEQ ID NO: 1271304 - RNA, 20 nt, Human
caguguugggauucauuuug

SEQ ID NO: 1271305 - RNA, 18 nt, Human
cauagagcaaucaaggga

SEQ ID NO: 1271306 - RNA, 26 nt, Human
cauccccuucuccaccauguccaauc

SEQ ID NO: 1271307 - RNA, 23 nt, Human
caugacaguggcuuuuugggggu

SEQ ID NO: 1271308 - RNA, 22 nt, Human
cauuuucuuugguaagaaguuu

SEQ ID NO: 1271309 - RNA, 20 nt, Human
ccagccugugcuccuucugc

SEQ ID NO: 1271310 - RNA, 25 nt, Human
ccccaaacucaccaaaguacucccu

SEQ ID NO: 1271311 - RNA, 24 nt, Human
ccuccccaaacucaccaaaguacu

SEQ ID NO: 1271312 - RNA, 27 nt, Human
ccuuccauuucugugaagucaaaaauc

SEQ ID NO: 1271313 - RNA, 22 nt, Human
cuaaaacuuacggguuuugugc

SEQ ID NO: 1271314 - RNA, 21 nt, Human
cucauuaucugaccucuuaga

SEQ ID NO: 1271315 - RNA, 23 nt, Human
cuccauaugugcuugcacauccc

SEQ ID NO: 1271316 - RNA, 18 nt, Human
cucccuuaccuucuccuc

SEQ ID NO: 1271317 - RNA, 19 nt, Human
cugcucaggcagggccuca

SEQ ID NO: 1271318 - RNA, 20 nt, Human
cugcuccucauuuucaaaug

SEQ ID NO: 1271319 - RNA, 25 nt, Human
gaagaugauuugaaacuccuguuuu

SEQ ID NO: 1271320 - RNA, 21 nt, Human
gagccaacacaucuguuauca

SEQ ID NO: 1271321 - RNA, 20 nt, Human
gaggauauuuuagcugcaau

SEQ ID NO: 1271322 - RNA, 24 nt, Human
gauggaugaccauucugaacuacc

SEQ ID NO: 1271323 - RNA, 19 nt, Human
gcagcugcuauuuuugacu

SEQ ID NO: 1271324 - RNA, 23 nt, Human
gccaacacaucuguuaucaaaaa

SEQ ID NO: 1271325 - RNA, 22 nt, Human
gcuugcacauccccuucuccac

SEQ ID NO: 1271326 - RNA, 20 nt, Human
ggcagggccucacgggaugg

SEQ ID NO: 1271327 - RNA, 22 nt, Human
ggcuggcugcucaggcagggcc

SEQ ID NO: 1271328 - RNA, 20 nt, Human
ggggaugguccacgaccucu

SEQ ID NO: 1271329 - RNA, 24 nt, Human
gugcccugcaaagauuuucuucac

SEQ ID NO: 1271330 - RNA, 22 nt, Human
guggauccugagccugcuccuc

SEQ ID NO: 1271331 - RNA, 28 nt, Human
uaaacuagcacuaucuuguuacaaagca

SEQ ID NO: 1271332 - RNA, 18 nt, Human
uaaccaaaagcuuucauu

SEQ ID NO: 1271333 - RNA, 19 nt, Human
uacaagaaaggcaagaguu

SEQ ID NO: 1271334 - RNA, 22 nt, Human
uacaagaaaggcaagaguuugg

SEQ ID NO: 1271335 - RNA, 18 nt, Human
uacggguuuugugcauuu

SEQ ID NO: 1271336 - RNA, 19 nt, Human
uacugcugugguuuguugc

SEQ ID NO: 1271337 - RNA, 19 nt, Human
uagaaaccaggauuguugg

SEQ ID NO: 1271338 - RNA, 28 nt, Human
ucaaauguucagaaacucaguuugucuc

SEQ ID NO: 1271339 - RNA, 21 nt, Human
ucacaauauucacaauguuaa

SEQ ID NO: 1271340 - RNA, 20 nt, Human
uccagaggcaggaggggagg

SEQ ID NO: 1271341 - RNA, 18 nt, Human
uccagggaagggucuccc

SEQ ID NO: 1271342 - RNA, 21 nt, Human
uccauccaucaucaaaauuac

SEQ ID NO: 1271343 - RNA, 19 nt, Human
ucccuuaccuucuccucag

SEQ ID NO: 1271344 - RNA, 23 nt, Human
ucccuucuucuuuguccagagga

SEQ ID NO: 1271345 - RNA, 23 nt, Human
uccuagugaugacagagacacag

SEQ ID NO: 1271346 - RNA, 21 nt, Human
uccucacagaaaugaagaaga

SEQ ID NO: 1271347 - RNA, 22 nt, Human
uccucacagaaaugaagaagau

SEQ ID NO: 1271348 - RNA, 20 nt, Human
ucucaaugcuaaaaugggau

SEQ ID NO: 1271349 - RNA, 24 nt, Human
ucugaacuacaaauuaugguugcc

SEQ ID NO: 1271350 - RNA, 19 nt, Human
ucuucaugacaguggcuuu

SEQ ID NO: 1271351 - RNA, 19 nt, Human
ucuucugggggcacccugg

SEQ ID NO: 1271352 - RNA, 20 nt, Human
ucuuggucuuccaguguugg

SEQ ID NO: 1271353 - RNA, 23 nt, Human
ugaaaaguaaccaaaagcuuuca

SEQ ID NO: 1271354 - RNA, 22 nt, Human
ugacagagacacagguacuaau

SEQ ID NO: 1271355 - RNA, 24 nt, Human
ugagagacagauucauaaaaauca

SEQ ID NO: 1271356 - RNA, 24 nt, Human
ugagccugcuccucauuuucaaau

SEQ ID NO: 1271357 - RNA, 21 nt, Human
ugauuucuauccucuggcccc

SEQ ID NO: 1271358 - RNA, 23 nt, Human
ugauuuggcauauuacuuaaaau

SEQ ID NO: 1271359 - RNA, 20 nt, Human
ugccauuaaccaaagggcua

SEQ ID NO: 1271360 - RNA, 21 nt, Human
ugcccaugcuaauucagcagc

SEQ ID NO: 1271361 - RNA, 23 nt, Human
ugcugugguuuguugccuauuuu

SEQ ID NO: 1271362 - RNA, 20 nt, Human
ugcuuucagacccucuaaaa

SEQ ID NO: 1271363 - RNA, 18 nt, Human
uggaaauaaauaaaaacu

SEQ ID NO: 1271364 - RNA, 20 nt, Human
uggauccugagccugcuccu

SEQ ID NO: 1271365 - RNA, 18 nt, Human
uggcagcccagccugugc

SEQ ID NO: 1271366 - RNA, 19 nt, Human
uggcuuugggaguucaggu

SEQ ID NO: 1271367 - RNA, 22 nt, Human
ugggaugguugguuacccuauu

SEQ ID NO: 1271368 - RNA, 21 nt, Human
ugggauucauuuugggggaug

SEQ ID NO: 1271369 - RNA, 19 nt, Human
ugggggaugguccacgacc

SEQ ID NO: 1271370 - RNA, 23 nt, Human
uggggguccaugcuauggcagcc

SEQ ID NO: 1271371 - RNA, 19 nt, Human
uggguugccauuaaccaaa

SEQ ID NO: 1271372 - RNA, 18 nt, Human
uguaguaugcucuguuuu

SEQ ID NO: 1271373 - RNA, 25 nt, Human
ugucacauuuaagcaacucacaucc

SEQ ID NO: 1271374 - RNA, 23 nt, Human
ugugcauuuccuccaaccuucca

SEQ ID NO: 1271375 - RNA, 18 nt, Human
uguggauccugagccugc

SEQ ID NO: 1271376 - RNA, 24 nt, Human
uuaauccacaggcaaagucgaaga

SEQ ID NO: 1271377 - RNA, 21 nt, Human
uuacggguuuugugcauuucc

SEQ ID NO: 1271378 - RNA, 23 nt, Human
uucaagauagcaaacgucaaccc

SEQ ID NO: 1271379 - RNA, 18 nt, Human
uucaguaguauguguccu

SEQ ID NO: 1271380 - RNA, 21 nt, Human
uucauagagcaaucaagggaa

SEQ ID NO: 1271381 - RNA, 19 nt, Human
uucauuuucuuugguaaga

SEQ ID NO: 1271382 - RNA, 18 nt, Human
uucccuucuucuuugucc

SEQ ID NO: 1271383 - RNA, 18 nt, Human
uugcacauccccuucucc

SEQ ID NO: 1271384 - RNA, 19 nt, Human
uugccuauuuuccugaugg

SEQ ID NO: 1271385 - RNA, 23 nt, Human
uuuaagauaucuguaacguggau

SEQ ID NO: 1271386 - RNA, 20 nt, Human
uuuagcaucguuucuauggc

SEQ ID NO: 1271387 - RNA, 23 nt, Human
uuucagauuucaaacaaugucaa

SEQ ID NO: 1271388 - RNA, 23 nt, Human
uuucuauccucuggccccuuuag

SEQ ID NO: 1271389 - RNA, 22 nt, Human
uuugacugagcauuggugucuu

SEQ ID NO: 1271390 - RNA, 24 nt, Human
uuugauagacaauguugcuuucag

SEQ ID NO: 1271391 - RNA, 23 nt, Human
uuuugguuauuuaccuuccuagu

SEQ ID NO: 1271392 - RNA, 18 nt, Human
aagggagggagcgaggcc

SEQ ID NO: 1271393 - RNA, 23 nt, Human
aggugaagggagggagcgaggcc

SEQ ID NO: 1271394 - RNA, 21 nt, Human
caggagaggaaaggugaaggg

SEQ ID NO: 1271395 - RNA, 21 nt, Human
cauuucucaagugucuacaug

SEQ ID NO: 1271396 - RNA, 23 nt, Human
cccgccaggagaggaaaggugaa

SEQ ID NO: 1271397 - RNA, 18 nt, Human
cccgccgccgggcccgcc

SEQ ID NO: 1271398 - RNA, 19 nt, Human
cgccgccgggcccgccagg

SEQ ID NO: 1271399 - RNA, 24 nt, Human
cugucugaagacacagugugccac

SEQ ID NO: 1271400 - RNA, 24 nt, Human
cuucaaacagaaacauuucucaag

SEQ ID NO: 1271401 - RNA, 19 nt, Human
gacuucuguuucucccucu

SEQ ID NO: 1271402 - RNA, 19 nt, Human
gagaggaaaggugaaggga

SEQ ID NO: 1271403 - RNA, 24 nt, Human
gcccgccaggagaggaaaggugaa

SEQ ID NO: 1271404 - RNA, 19 nt, Human
ggaagagguucuucucugg

SEQ ID NO: 1271405 - RNA, 20 nt, Human
uccccgguaacacgccccgu

SEQ ID NO: 1271406 - RNA, 23 nt, Human
ucuguuucucccucuauuuucuu

SEQ ID NO: 1271407 - RNA, 21 nt, Human
ugaagggagggagcgaggccg

SEQ ID NO: 1271408 - RNA, 19 nt, Human
ugugccacagacuuaagac

SEQ ID NO: 1271409 - RNA, 22 nt, Human
uuuacuggaauuuuacauuuuc

SEQ ID NO: 1271410 - RNA, 20 nt, Human
acaaucaaauguuuacagca

SEQ ID NO: 1271411 - RNA, 21 nt, Human
gcagugaagaggcaaauaagu

SEQ ID NO: 1271412 - RNA, 24 nt, Human
gcagugaagaggcaaauaagugaa

SEQ ID NO: 1271413 - RNA, 21 nt, Human
ggaagaggacuuaaccuuggc

SEQ ID NO: 1271414 - RNA, 18 nt, Human
ggagaacacgaucacagc

SEQ ID NO: 1271415 - RNA, 23 nt, Human
uacagcagugaagaggcaaauaa

SEQ ID NO: 1271416 - RNA, 23 nt, Human
uggccacaaucaaauguuuacag

SEQ ID NO: 1271417 - RNA, 19 nt, Human
aaacucaaacacacaaaca

SEQ ID NO: 1271418 - RNA, 22 nt, Human
aaccacaaucagauuuacagcc

SEQ ID NO: 1271419 - RNA, 18 nt, Human
aaccagaaucuucuuuau

SEQ ID NO: 1271420 - RNA, 20 nt, Human
aacccacacucccacuccca

SEQ ID NO: 1271421 - RNA, 22 nt, Human
aagaagagaaagucuuccaagg

SEQ ID NO: 1271422 - RNA, 21 nt, Human
aagaagccagccucuugcagg

SEQ ID NO: 1271423 - RNA, 26 nt, Human
aagacacauauacacaaacacaaagu

SEQ ID NO: 1271424 - RNA, 19 nt, Human
acaaacacaaacaugugca

SEQ ID NO: 1271425 - RNA, 19 nt, Human
acucauucuuccuccugcc

SEQ ID NO: 1271426 - RNA, 18 nt, Human
acucccacccccaacccu

SEQ ID NO: 1271427 - RNA, 19 nt, Human
acucccacccccaacccua

SEQ ID NO: 1271428 - RNA, 28 nt, Human
acucccacccccaacccuaccccuaaaa

SEQ ID NO: 1271429 - RNA, 24 nt, Human
agaauuuuuuuuuccuguuucaca

SEQ ID NO: 1271430 - RNA, 19 nt, Human
agacacauauacacaaaca

SEQ ID NO: 1271431 - RNA, 19 nt, Human
agacuuggaacugccaaua

SEQ ID NO: 1271432 - RNA, 20 nt, Human
agcaugaccauuccuccuca

SEQ ID NO: 1271433 - RNA, 18 nt, Human
auccaugagaaauggggc

SEQ ID NO: 1271434 - RNA, 22 nt, Human
caaacaguaauaccuacaagaa

SEQ ID NO: 1271435 - RNA, 22 nt, Human
caaaguacccaggauccacgca

SEQ ID NO: 1271436 - RNA, 19 nt, Human
cacacucccacucccaccc

SEQ ID NO: 1271437 - RNA, 21 nt, Human
cacacucccacucccaccccc

SEQ ID NO: 1271438 - RNA, 22 nt, Human
cacacucccacucccaccccca

SEQ ID NO: 1271439 - RNA, 23 nt, Human
cacccccaacccuaccccuaaaa

SEQ ID NO: 1271440 - RNA, 26 nt, Human
cagcauauuaaacaguucucuugcuu

SEQ ID NO: 1271441 - RNA, 20 nt, Human
cagggcacggguagguuaag

SEQ ID NO: 1271442 - RNA, 18 nt, Human
cagggcccuacagccccc

SEQ ID NO: 1271443 - RNA, 24 nt, Human
cauauacacaaacacaaacaugug

SEQ ID NO: 1271444 - RNA, 19 nt, Human
ccaaaguacccaggaucca

SEQ ID NO: 1271445 - RNA, 19 nt, Human
ccaaaguacccaggaucca

SEQ ID NO: 1271446 - RNA, 21 nt, Human
ccaacccacacucccacuccc

SEQ ID NO: 1271447 - RNA, 25 nt, Human
ccaacccacacucccacucccaccc

SEQ ID NO: 1271448 - RNA, 23 nt, Human
ccaacccuaccccuaaaauugga

SEQ ID NO: 1271449 - RNA, 18 nt, Human
ccacauccugagacuugg

SEQ ID NO: 1271450 - RNA, 19 nt, Human
ccacucccacccccaaccc

SEQ ID NO: 1271451 - RNA, 21 nt, Human
cccacacucccacucccaccc

SEQ ID NO: 1271452 - RNA, 24 nt, Human
cccacacucccacucccaccccca

SEQ ID NO: 1271453 - RNA, 18 nt, Human
cccacccccaacccuacc

SEQ ID NO: 1271454 - RNA, 19 nt, Human
cccccagcuggccagggag

SEQ ID NO: 1271455 - RNA, 20 nt, Human
cccuaaaauuggaucgaacc

SEQ ID NO: 1271456 - RNA, 22 nt, Human
cccucacuguccaaaguaccca

SEQ ID NO: 1271457 - RNA, 18 nt, Human
ccucuugcagggcacggg

SEQ ID NO: 1271458 - RNA, 25 nt, Human
cucacuguccaaaguacccaggauc

SEQ ID NO: 1271459 - RNA, 18 nt, Human
cucccacucccaccccca

SEQ ID NO: 1271460 - RNA, 22 nt, Human
cucccacucccacccccaaccc

SEQ ID NO: 1271461 - RNA, 23 nt, Human
gacaagaagagaaagucuuccaa

SEQ ID NO: 1271462 - RNA, 18 nt, Human
gacagcaacaaccaaaac

SEQ ID NO: 1271463 - RNA, 21 nt, Human
gaccaagcccagcagggcccu

SEQ ID NO: 1271464 - RNA, 25 nt, Human
gacucauucuuccuccugccaaccc

SEQ ID NO: 1271465 - RNA, 19 nt, Human
gacuuggaacugccaauag

SEQ ID NO: 1271466 - RNA, 24 nt, Human
gagcuauggagccacagagcaggc

SEQ ID NO: 1271467 - RNA, 25 nt, Human
uaaaagacacauauacacaaacaca

SEQ ID NO: 1271468 - RNA, 21 nt, Human
uaaagcccagucagcaaaugu

SEQ ID NO: 1271469 - RNA, 24 nt, Human
uacacaaacacaaacaugugcagu

SEQ ID NO: 1271470 - RNA, 24 nt, Human
uauacacaaacacaaacaugugca

SEQ ID NO: 1271471 - RNA, 18 nt, Human
uaugaccacauccugaga

SEQ ID NO: 1271472 - RNA, 19 nt, Human
ucccacccccaacccuacc

SEQ ID NO: 1271473 - RNA, 21 nt, Human
ucccacccccaacccuacccc

SEQ ID NO: 1271474 - RNA, 20 nt, Human
uccucaguuuuucuucggcc

SEQ ID NO: 1271475 - RNA, 23 nt, Human
uccugccaacccacacucccacu

SEQ ID NO: 1271476 - RNA, 21 nt, Human
ucuccuggaucuccccucuug

SEQ ID NO: 1271477 - RNA, 21 nt, Human
ugacaagaagagaaagucuuc

SEQ ID NO: 1271478 - RNA, 23 nt, Human
ugacagcaacaaccaaaaccaca

SEQ ID NO: 1271479 - RNA, 28 nt, Human
ugaccaagaagccagccucuugcagggc

SEQ ID NO: 1271480 - RNA, 23 nt, Human
ugacuuaauugucuccaaaguag

SEQ ID NO: 1271481 - RNA, 22 nt, Human
ugccaacccacacucccacucc

SEQ ID NO: 1271482 - RNA, 25 nt, Human
ugccaacccacacucccacucccac

SEQ ID NO: 1271483 - RNA, 21 nt, Human
uuaaaagacacauauacacaa

SEQ ID NO: 1271484 - RNA, 18 nt, Human
uuaaagcccagucagcaa

SEQ ID NO: 1271485 - RNA, 25 nt, Human
uucacaaauaaggaaacuuggaucc

SEQ ID NO: 1271486 - RNA, 22 nt, Human
uuccaaggaagcaugaccauuc

SEQ ID NO: 1271487 - RNA, 18 nt, Human
uucuuccguucccuaucu

SEQ ID NO: 1271488 - RNA, 19 nt, Human
uugcagauugacucuuaau

SEQ ID NO: 1271489 - RNA, 24 nt, Human
uuggauccuagaagcuaaauuagu

SEQ ID NO: 1271490 - RNA, 19 nt, Human
aaacacaauuuagaccaug

SEQ ID NO: 1271491 - RNA, 23 nt, Human
aaauacacaccaaaaaaaagcac

SEQ ID NO: 1271492 - RNA, 23 nt, Human
aaauuucuuuccaggagcuuucc

SEQ ID NO: 1271493 - RNA, 24 nt, Human
aauaauaacagugacaacagcaau

SEQ ID NO: 1271494 - RNA, 23 nt, Human
aaugaaauacacaccaaaaaaaa

SEQ ID NO: 1271495 - RNA, 23 nt, Human
acagagaaguugggccuugaggg

SEQ ID NO: 1271496 - RNA, 22 nt, Human
acuaaaauauaaggcuuuucug

SEQ ID NO: 1271497 - RNA, 23 nt, Human
acugcugaucugcccaaaacccu

SEQ ID NO: 1271498 - RNA, 23 nt, Human
agaaagccucuucucuaugaaaa

SEQ ID NO: 1271499 - RNA, 18 nt, Human
agaacacguuccccauug

SEQ ID NO: 1271500 - RNA, 19 nt, Human
agccagaggaggguggggu

SEQ ID NO: 1271501 - RNA, 20 nt, Human
aggagggugggguuucacaa

SEQ ID NO: 1271502 - RNA, 21 nt, Human
agggggagggaacaaacagaa

SEQ ID NO: 1271503 - RNA, 21 nt, Human
aucaggaagauacugcccaaa

SEQ ID NO: 1271504 - RNA, 23 nt, Human
aucucuuuuuaaaagcacagcca

SEQ ID NO: 1271505 - RNA, 21 nt, Human
augcaacacaccaagggccag

SEQ ID NO: 1271506 - RNA, 25 nt, Human
caaaaaaaagcacacaugcagauaa

SEQ ID NO: 1271507 - RNA, 19 nt, Human
caccaaaaaaaagcacaca

SEQ ID NO: 1271508 - RNA, 21 nt, Human
caccaaaaaaaagcacacaug

SEQ ID NO: 1271509 - RNA, 24 nt, Human
caccaaaaaaaagcacacaugcag

SEQ ID NO: 1271510 - RNA, 26 nt, Human
caccaaaaaaaagcacacaugcagau

SEQ ID NO: 1271511 - RNA, 18 nt, Human
cagaggugaacugccuuc

SEQ ID NO: 1271512 - RNA, 21 nt, Human
cagccuuuuuuuccuccuccc

SEQ ID NO: 1271513 - RNA, 22 nt, Human
caucccauucaaucacacagcc

SEQ ID NO: 1271514 - RNA, 24 nt, Human
caucccauucaaucacacagccag

SEQ ID NO: 1271515 - RNA, 19 nt, Human
ccacuugaagucguucuga

SEQ ID NO: 1271516 - RNA, 19 nt, Human
ccauugcuuugcaagcauc

SEQ ID NO: 1271517 - RNA, 20 nt, Human
cccauucaaucacacagcca

SEQ ID NO: 1271518 - RNA, 19 nt, Human
ccccaugacuugcuuucag

SEQ ID NO: 1271519 - RNA, 19 nt, Human
cccuguuucccucccuucu

SEQ ID NO: 1271520 - RNA, 27 nt, Human
cccuguuucccucccuucuuuccuucc

SEQ ID NO: 1271521 - RNA, 19 nt, Human
ccucccuucuuuccuuccu

SEQ ID NO: 1271522 - RNA, 19 nt, Human
ccuugggaaaggcucugcc

SEQ ID NO: 1271523 - RNA, 18 nt, Human
cucccggaaaccugcccc

SEQ ID NO: 1271524 - RNA, 24 nt, Human
cucccggaaaccugccccgagaac

SEQ ID NO: 1271525 - RNA, 24 nt, Human
cucccuguuucccucccuucuuuc

SEQ ID NO: 1271526 - RNA, 20 nt, Human
cucccuucuuuccuuccuuu

SEQ ID NO: 1271527 - RNA, 21 nt, Human
cuuacugcugaucugcccaaa

SEQ ID NO: 1271528 - RNA, 22 nt, Human
cuucuuagaauucacugaagua

SEQ ID NO: 1271529 - RNA, 21 nt, Human
cuuuuuggcaucugcucccgg

SEQ ID NO: 1271530 - RNA, 22 nt, Human
gagcagaggugaacugccuucu

SEQ ID NO: 1271531 - RNA, 19 nt, Human
ggagcuaugcaacacacca

SEQ ID NO: 1271532 - RNA, 21 nt, Human
gggaacaaacagaaacauaac

SEQ ID NO: 1271533 - RNA, 19 nt, Human
gugggguuucacaagacca

SEQ ID NO: 1271534 - RNA, 19 nt, Human
uaaaagcacagccacuguc

SEQ ID NO: 1271535 - RNA, 24 nt, Human
uaacauacaaaguuagucucagga

SEQ ID NO: 1271536 - RNA, 24 nt, Human
uaauucacaaacaaucaaauccuu

SEQ ID NO: 1271537 - RNA, 19 nt, Human
uacacaccaaaaaaaagca

SEQ ID NO: 1271538 - RNA, 20 nt, Human
uagaauucacugaaguauuu

SEQ ID NO: 1271539 - RNA, 26 nt, Human
uagcuaagaagacaucaggaagauac

SEQ ID NO: 1271540 - RNA, 22 nt, Human
uauuacaauauagacagagaag

SEQ ID NO: 1271541 - RNA, 19 nt, Human
uauuuauauuuuuuaauga

SEQ ID NO: 1271542 - RNA, 21 nt, Human
ucaaagcuuaucuuugugccc

SEQ ID NO: 1271543 - RNA, 22 nt, Human
uccacgugguuggaauaaacac

SEQ ID NO: 1271544 - RNA, 24 nt, Human
ucuauauuacaauauagacagaga

SEQ ID NO: 1271545 - RNA, 19 nt, Human
ucucaggugaggugaaccu

SEQ ID NO: 1271546 - RNA, 19 nt, Human
ucugcagauacauucacuu

SEQ ID NO: 1271547 - RNA, 24 nt, Human
ucugcagauacauucacuuaguuc

SEQ ID NO: 1271548 - RNA, 24 nt, Human
ucuuuccaggagcuuuccacgugg

SEQ ID NO: 1271549 - RNA, 24 nt, Human
ugaaauacacaccaaaaaaaagca

SEQ ID NO: 1271550 - RNA, 22 nt, Human
ugaucugcccaaaacccucuca

SEQ ID NO: 1271551 - RNA, 23 nt, Human
ugcuugaagccauuaaauauaug

SEQ ID NO: 1271552 - RNA, 18 nt, Human
uggaauaaacacaauuua

SEQ ID NO: 1271553 - RNA, 22 nt, Human
uguaaaauuucuuuccaggagc

SEQ ID NO: 1271554 - RNA, 18 nt, Human
uucacaaacaaucaaauc

SEQ ID NO: 1271555 - RNA, 19 nt, Human
uucacugaaguauuuccua

SEQ ID NO: 1271556 - RNA, 18 nt, Human
uugaaggguauaucaaau

SEQ ID NO: 1271557 - RNA, 21 nt, Human
uuggcaauugaaggguauauc

SEQ ID NO: 1271558 - RNA, 23 nt, Human
uuuccauuuuugagccauuaaaa

SEQ ID NO: 1271559 - RNA, 32 nt, Human
uuucccucccuucuuuccuuccuuucuucccc

SEQ ID NO: 1271560 - RNA, 19 nt, Human
uuuccuuccuuucuuccuu

SEQ ID NO: 1271561 - RNA, 24 nt, Human
uuuucuucuuuuucccuuucuccc

SEQ ID NO: 1271562 - RNA, 25 nt, Human
aaacugcauugaccaugggaaaguu

SEQ ID NO: 1271563 - RNA, 18 nt, Human
caagugauuuacaaugaa

SEQ ID NO: 1271564 - RNA, 21 nt, Human
caggacacacuagauacauua

SEQ ID NO: 1271565 - RNA, 23 nt, Human
ccaaagcaaggcugauaaaaacu

SEQ ID NO: 1271566 - RNA, 18 nt, Human
gauaaaaacugcauugac

SEQ ID NO: 1271567 - RNA, 23 nt, Human
ggaaagacagucaauaaaacaag

SEQ ID NO: 1271568 - RNA, 24 nt, Human
ggaaagcaaaugcugugcagccug

SEQ ID NO: 1271569 - RNA, 24 nt, Human
ggccugcauggaggaggugcugcu

SEQ ID NO: 1271570 - RNA, 22 nt, Human
ggucacacauggggcuggaggc

SEQ ID NO: 1271571 - RNA, 19 nt, Human
ggugcugcuguggucuggc

SEQ ID NO: 1271572 - RNA, 19 nt, Human
guccuuggagguccuaucc

SEQ ID NO: 1271573 - RNA, 19 nt, Human
gugcugcuguggucuggcc

SEQ ID NO: 1271574 - RNA, 19 nt, Human
uacauuaggagcacauagc

SEQ ID NO: 1271575 - RNA, 18 nt, Human
uaccuuuauuugaaaucu

SEQ ID NO: 1271576 - RNA, 23 nt, Human
uaggagcacauagcaaaguaaca

SEQ ID NO: 1271577 - RNA, 21 nt, Human
uaucuuaguuauucauucauu

SEQ ID NO: 1271578 - RNA, 22 nt, Human
uccaaagcaaggcugauaaaaa

SEQ ID NO: 1271579 - RNA, 18 nt, Human
ugacaagggucacacaug

SEQ ID NO: 1271580 - RNA, 20 nt, Human
ugcauggaggaggugcugcu

SEQ ID NO: 1271581 - RNA, 22 nt, Human
ugcauggaggaggugcugcugu

SEQ ID NO: 1271582 - RNA, 18 nt, Human
uguggggcagagagauga

SEQ ID NO: 1271583 - RNA, 23 nt, Human
aaacuaaaagagaauagcaucag

SEQ ID NO: 1271584 - RNA, 23 nt, Human
aaacuacuaaagaagucaggcgu

SEQ ID NO: 1271585 - RNA, 19 nt, Human
aaccaggcagggccuggcu

SEQ ID NO: 1271586 - RNA, 21 nt, Human
aacucacuagucccucacccu

SEQ ID NO: 1271587 - RNA, 23 nt, Human
aagcagacauaaagacaguugac

SEQ ID NO: 1271588 - RNA, 23 nt, Human
aagugaccuuucaaucuucagac

SEQ ID NO: 1271589 - RNA, 19 nt, Human
acaagcagacauaaagaca

SEQ ID NO: 1271590 - RNA, 19 nt, Human
acaaguuauuucgucuccc

SEQ ID NO: 1271591 - RNA, 22 nt, Human
acauaguagaacucaaaaauau

SEQ ID NO: 1271592 - RNA, 24 nt, Human
accacugccaacuccucuacuaca

SEQ ID NO: 1271593 - RNA, 21 nt, Human
acccaccccgucaccugaccu

SEQ ID NO: 1271594 - RNA, 21 nt, Human
agaagaaaaacuaaaagagaa

SEQ ID NO: 1271595 - RNA, 22 nt, Human
agaagaggcaauugauuuagcg

SEQ ID NO: 1271596 - RNA, 24 nt, Human
agaaguagaagaaaaacuaaaaga

SEQ ID NO: 1271597 - RNA, 25 nt, Human
agaaguagaagaaaaacuaaaagag

SEQ ID NO: 1271598 - RNA, 21 nt, Human
agaauagcaucagauaaaaca

SEQ ID NO: 1271599 - RNA, 18 nt, Human
agagaauagcaucagaua

SEQ ID NO: 1271600 - RNA, 22 nt, Human
agcccacacuaguaaccaggca

SEQ ID NO: 1271601 - RNA, 24 nt, Human
aggccacucaucccugcacuccac

SEQ ID NO: 1271602 - RNA, 25 nt, Human
agggaagaagucugaagcgugggug

SEQ ID NO: 1271603 - RNA, 19 nt, Human
agguuguuuuuagugucua

SEQ ID NO: 1271604 - RNA, 21 nt, Human
aguauggggaucagggaagaa

SEQ ID NO: 1271605 - RNA, 21 nt, Human
agucccucacccuaagcugga

SEQ ID NO: 1271606 - RNA, 18 nt, Human
auauuugcuaaaugagag

SEQ ID NO: 1271607 - RNA, 24 nt, Human
auuguuucacaacauucccuagga

SEQ ID NO: 1271608 - RNA, 19 nt, Human
caagauccagguuaauccc

SEQ ID NO: 1271609 - RNA, 23 nt, Human
cacauaguagaacucaaaaauau

SEQ ID NO: 1271610 - RNA, 23 nt, Human
cacauauacacacaaccuaugca

SEQ ID NO: 1271611 - RNA, 25 nt, Human
cacauauacacacaaccuaugcaca

SEQ ID NO: 1271612 - RNA, 24 nt, Human
caccccgucaccugaccuuaugcu

SEQ ID NO: 1271613 - RNA, 20 nt, Human
cacuaguaaccaggcagggc

SEQ ID NO: 1271614 - RNA, 19 nt, Human
cacuccacuaucccucacc

SEQ ID NO: 1271615 - RNA, 21 nt, Human
cagaaaugccacacaggcuuu

SEQ ID NO: 1271616 - RNA, 19 nt, Human
cagauggccugcuucugcu

SEQ ID NO: 1271617 - RNA, 19 nt, Human
caggacccuaaggaauguc

SEQ ID NO: 1271618 - RNA, 24 nt, Human
caguugacauuuccaaaaaggcac

SEQ ID NO: 1271619 - RNA, 23 nt, Human
ccaauuaacagacauuuaaaacc

SEQ ID NO: 1271620 - RNA, 24 nt, Human
ccacgcaguaccacugccaacucc

SEQ ID NO: 1271621 - RNA, 20 nt, Human
ccacuaucccucaccuucuc

SEQ ID NO: 1271622 - RNA, 22 nt, Human
ccagcccacacuaguaaccagg

SEQ ID NO: 1271623 - RNA, 18 nt, Human
cccaccccgucaccugac

SEQ ID NO: 1271624 - RNA, 18 nt, Human
ccccaagauuuuaggacc

SEQ ID NO: 1271625 - RNA, 22 nt, Human
ccuucucacauauacacacaac

SEQ ID NO: 1271626 - RNA, 22 nt, Human
cgugaggagcucccuaaugacu

SEQ ID NO: 1271627 - RNA, 24 nt, Human
cgugaggagcucccuaaugacuug

SEQ ID NO: 1271628 - RNA, 22 nt, Human
cucaucccugcacuccacuauc

SEQ ID NO: 1271629 - RNA, 21 nt, Human
cuccacuaucccucaccuucu

SEQ ID NO: 1271630 - RNA, 20 nt, Human
cucuccuuuggcugaaaaug

SEQ ID NO: 1271631 - RNA, 25 nt, Human
cugaaucaaaagcugaauuguuuca

SEQ ID NO: 1271632 - RNA, 19 nt, Human
cuggucacuagggaggggc

SEQ ID NO: 1271633 - RNA, 24 nt, Human
cuuccaauuaacagacauuuaaaa

SEQ ID NO: 1271634 - RNA, 30 nt, Human
cuucugcugcaaaaugagcugggguccagg

SEQ ID NO: 1271635 - RNA, 22 nt, Human
gaaguggagacaauuacauaga

SEQ ID NO: 1271636 - RNA, 25 nt, Human
gaaguucucuuauauccuuuaucuu

SEQ ID NO: 1271637 - RNA, 18 nt, Human
gagaggugaagaagugga

SEQ ID NO: 1271638 - RNA, 18 nt, Human
gagagucaguagaggaca

SEQ ID NO: 1271639 - RNA, 22 nt, Human
gcacuccccacuauuuggaggc

SEQ ID NO: 1271640 - RNA, 18 nt, Human
gcagucuucaaucccacg

SEQ ID NO: 1271641 - RNA, 19 nt, Human
ggaaugucagcauuuaaaa

SEQ ID NO: 1271642 - RNA, 19 nt, Human
ggacauguuguccuucccc

SEQ ID NO: 1271643 - RNA, 21 nt, Human
gggcaggacccuaaggaaugu

SEQ ID NO: 1271644 - RNA, 20 nt, Human
gugaagaaguggagacaauu

SEQ ID NO: 1271645 - RNA, 19 nt, Human
uaaaaccuacucaauuuga

SEQ ID NO: 1271646 - RNA, 18 nt, Human
uaaaaggcacgcaagaac

SEQ ID NO: 1271647 - RNA, 19 nt, Human
uaaaaugcaccucucuccu

SEQ ID NO: 1271648 - RNA, 21 nt, Human
uaaccuucuugauguccagca

SEQ ID NO: 1271649 - RNA, 18 nt, Human
uaaggaauuaucagagaa

SEQ ID NO: 1271650 - RNA, 21 nt, Human
uaagugauccccuugccuaaa

SEQ ID NO: 1271651 - RNA, 20 nt, Human
uaaugcaucuguuucagcuu

SEQ ID NO: 1271652 - RNA, 20 nt, Human
uacaagcagacauaaagaca

SEQ ID NO: 1271653 - RNA, 22 nt, Human
uacaagcagacauaaagacagu

SEQ ID NO: 1271654 - RNA, 22 nt, Human
uagaaaaagcacauuuuaaaag

SEQ ID NO: 1271655 - RNA, 22 nt, Human
uagaagaaaaacuaaaagagaa

SEQ ID NO: 1271656 - RNA, 22 nt, Human
uagaagaaaaacuaaaagagaa

SEQ ID NO: 1271657 - RNA, 25 nt, Human
uagccaggccacucaucccugcacu

SEQ ID NO: 1271658 - RNA, 24 nt, Human
uauagagucaaaauucuauucccu

SEQ ID NO: 1271659 - RNA, 21 nt, Human
uaucuucaucaccuagcccag

SEQ ID NO: 1271660 - RNA, 27 nt, Human
uccaaaaaggcacacguaauuuaugaa

SEQ ID NO: 1271661 - RNA, 20 nt, Human
ucccugcacuccacuauccc

SEQ ID NO: 1271662 - RNA, 22 nt, Human
ucccugcacuccacuaucccuc

SEQ ID NO: 1271663 - RNA, 20 nt, Human
ucuagcagucuucaaucccc

SEQ ID NO: 1271664 - RNA, 21 nt, Human
ucuaggcuucuuuugaaguuc

SEQ ID NO: 1271665 - RNA, 20 nt, Human
ucucacauauacacacaacc

SEQ ID NO: 1271666 - RNA, 21 nt, Human
ucuucaaucccacgcaguacc

SEQ ID NO: 1271667 - RNA, 20 nt, Human
ugacauacacauaguagaac

SEQ ID NO: 1271668 - RNA, 22 nt, Human
ugacauuuccaaaaaggcacac

SEQ ID NO: 1271669 - RNA, 22 nt, Human
ugagagaaaaacauauuuugaa

SEQ ID NO: 1271670 - RNA, 19 nt, Human
ugcacuccacuaucccuca

SEQ ID NO: 1271671 - RNA, 19 nt, Human
ugcauggagaguuuugagu

SEQ ID NO: 1271672 - RNA, 22 nt, Human
ugcauggagaguuuugaguaua

SEQ ID NO: 1271673 - RNA, 20 nt, Human
ugccuagucacucucugucu

SEQ ID NO: 1271674 - RNA, 21 nt, Human
ugccuagucacucucugucuu

SEQ ID NO: 1271675 - RNA, 18 nt, Human
ugcucugccuagccaggc

SEQ ID NO: 1271676 - RNA, 21 nt, Human
uggcagcgugcaaugcaugga

SEQ ID NO: 1271677 - RNA, 22 nt, Human
ugggauuacuuagagagaguca

SEQ ID NO: 1271678 - RNA, 23 nt, Human
ugggauuacuuagagagagucag

SEQ ID NO: 1271679 - RNA, 19 nt, Human
uggucacuagggaggggcu

SEQ ID NO: 1271680 - RNA, 19 nt, Human
ugugcaauccucuucggug

SEQ ID NO: 1271681 - RNA, 19 nt, Human
uuaaaaggcacgcaagaac

SEQ ID NO: 1271682 - RNA, 19 nt, Human
uucaaaggacagcaaacuc

SEQ ID NO: 1271683 - RNA, 21 nt, Human
uucaaaggacagcaaacucac

SEQ ID NO: 1271684 - RNA, 21 nt, Human
uucacucuaaaucaacaguuu

SEQ ID NO: 1271685 - RNA, 22 nt, Human
uuccccaagauuuuaggaccua

SEQ ID NO: 1271686 - RNA, 20 nt, Human
uugcuggcucaacacugucu

SEQ ID NO: 1271687 - RNA, 22 nt, Human
uugcuggcucaacacugucugc

SEQ ID NO: 1271688 - RNA, 26 nt, Human
aaaauaaauccucccaacuaauuaga

SEQ ID NO: 1271689 - RNA, 19 nt, Human
aaacacaccccaccaucaa

SEQ ID NO: 1271690 - RNA, 20 nt, Human
aaacacaccccaccaucaac

SEQ ID NO: 1271691 - RNA, 21 nt, Human
aaacaggcaaagauucaaagu

SEQ ID NO: 1271692 - RNA, 20 nt, Human
aagacaaaaauucugaagga

SEQ ID NO: 1271693 - RNA, 22 nt, Human
aauucugaaggagauccugcua

SEQ ID NO: 1271694 - RNA, 22 nt, Human
acaccccaccaucaaccugaga

SEQ ID NO: 1271695 - RNA, 22 nt, Human
agacaaaaauucugaaggagau

SEQ ID NO: 1271696 - RNA, 22 nt, Human
caaaauaaauccucccaacuaa

SEQ ID NO: 1271697 - RNA, 24 nt, Human
caaacaggcaaagauucaaaguca

SEQ ID NO: 1271698 - RNA, 26 nt, Human
caaacaggcaaagauucaaagucaag

SEQ ID NO: 1271699 - RNA, 25 nt, Human
caaauaauguacuugucaugagccc

SEQ ID NO: 1271700 - RNA, 23 nt, Human
caacuaauuagaaacguaagaca

SEQ ID NO: 1271701 - RNA, 18 nt, Human
caagacaaaaauucugaa

SEQ ID NO: 1271702 - RNA, 24 nt, Human
cacaccccaccaucaaccugagac

SEQ ID NO: 1271703 - RNA, 19 nt, Human
caccaucaaccugagaccu

SEQ ID NO: 1271704 - RNA, 23 nt, Human
caccccaccaucaaccugagacc

SEQ ID NO: 1271705 - RNA, 23 nt, Human
cagcuucugacugauuggccaca

SEQ ID NO: 1271706 - RNA, 23 nt, Human
caggcaaagauucaaagucaaga

SEQ ID NO: 1271707 - RNA, 18 nt, Human
cccaccaucaaccugaga

SEQ ID NO: 1271708 - RNA, 20 nt, Human
cucuguuggucugcguaaga

SEQ ID NO: 1271709 - RNA, 25 nt, Human
cuucuugugguuacauguuuucaau

SEQ ID NO: 1271710 - RNA, 21 nt, Human
cuuugucacaugaaucuccua

SEQ ID NO: 1271711 - RNA, 18 nt, Human
gucugcguaagaugccac

SEQ ID NO: 1271712 - RNA, 24 nt, Human
uagaaacguaagacaauaaagacg

SEQ ID NO: 1271713 - RNA, 19 nt, Human
uagacaaacaggcaaagau

SEQ ID NO: 1271714 - RNA, 20 nt, Human
uagcaaaauaaauccuccca

SEQ ID NO: 1271715 - RNA, 25 nt, Human
uagcaaaauaaauccucccaacuaa

SEQ ID NO: 1271716 - RNA, 20 nt, Human
ucaagacaaaaauucugaag

SEQ ID NO: 1271717 - RNA, 19 nt, Human
ucacaaaauuucagaggca

SEQ ID NO: 1271718 - RNA, 23 nt, Human
uggccacagcuauagauccacgg

SEQ ID NO: 1271719 - RNA, 19 nt, Human
uuucagaggcaaaucuuug

SEQ ID NO: 1271720 - RNA, 20 nt, Human
uuugaaagguaccaaaauag

SEQ ID NO: 1271721 - RNA, 20 nt, Human
aaaaaaaaaaaacgaaccca

SEQ ID NO: 1271722 - RNA, 22 nt, Human
aaaaaaaaaaaacgaacccaac

SEQ ID NO: 1271723 - RNA, 20 nt, Human
aaaaaaaaacgaacccaaca

SEQ ID NO: 1271724 - RNA, 24 nt, Human
aaaaaaaaacgaacccaacaguuc

SEQ ID NO: 1271725 - RNA, 24 nt, Human
aaaaaaaaagaaaacaacacauag

SEQ ID NO: 1271726 - RNA, 19 nt, Human
aaaaaaaacgaacccaaca

SEQ ID NO: 1271727 - RNA, 25 nt, Human
aaaaaaacgaacccaacaguucaga

SEQ ID NO: 1271728 - RNA, 23 nt, Human
aaaagaaagaaagaaaaacaaaa

SEQ ID NO: 1271729 - RNA, 21 nt, Human
aaaagcuucuaaaguguuucu

SEQ ID NO: 1271730 - RNA, 23 nt, Human
aaaagcuucuaaaguguuucugg

SEQ ID NO: 1271731 - RNA, 22 nt, Human
aaaauaccuuuucccuucuuug

SEQ ID NO: 1271732 - RNA, 28 nt, Human
aaacaaaauuuuaaucccuagaccaaaa

SEQ ID NO: 1271733 - RNA, 21 nt, Human
aaauaguaaacaaucugaagc

SEQ ID NO: 1271734 - RNA, 18 nt, Human
aacaaaaacaaaaauacc

SEQ ID NO: 1271735 - RNA, 25 nt, Human
aaccugcugccuuuucagaggaccu

SEQ ID NO: 1271736 - RNA, 21 nt, Human
aacuccacagccccuugcccu

SEQ ID NO: 1271737 - RNA, 21 nt, Human
aagaaaacaacacauagccaa

SEQ ID NO: 1271738 - RNA, 21 nt, Human
aagaaagaaagaaaaacaaaa

SEQ ID NO: 1271739 - RNA, 23 nt, Human
aagcagaaauuggaagaggggac

SEQ ID NO: 1271740 - RNA, 20 nt, Human
acacacaucuccucccuucu

SEQ ID NO: 1271741 - RNA, 20 nt, Human
acacuaguagacaccaaacu

SEQ ID NO: 1271742 - RNA, 18 nt, Human
acauaacauuuccuucau

SEQ ID NO: 1271743 - RNA, 22 nt, Human
accacaucacuccagcauuuca

SEQ ID NO: 1271744 - RNA, 20 nt, Human
accccaaagaaauuagaaaa

SEQ ID NO: 1271745 - RNA, 23 nt, Human
accccaaagaaauuagaaaacca

SEQ ID NO: 1271746 - RNA, 21 nt, Human
acuauaguaacauuucaacac

SEQ ID NO: 1271747 - RNA, 21 nt, Human
acugguuuugugagcugucug

SEQ ID NO: 1271748 - RNA, 21 nt, Human
agaaaaccacaucacuccagc

SEQ ID NO: 1271749 - RNA, 18 nt, Human
agaaaugugaauuacccc

SEQ ID NO: 1271750 - RNA, 23 nt, Human
agacaccaaacuccacagccccu

SEQ ID NO: 1271751 - RNA, 20 nt, Human
agcuggcacuggcgguagca

SEQ ID NO: 1271752 - RNA, 20 nt, Human
aggaaaaaaagcuucuaaag

SEQ ID NO: 1271753 - RNA, 22 nt, Human
aggagaaggcagguuuuaggga

SEQ ID NO: 1271754 - RNA, 25 nt, Human
aggcauucaaagaucugaaagaacu

SEQ ID NO: 1271755 - RNA, 24 nt, Human
aggguucagugaaaaaaaaaaaaa

SEQ ID NO: 1271756 - RNA, 22 nt, Human
agugcaugccacagaaggacuc

SEQ ID NO: 1271757 - RNA, 21 nt, Human
agugcuugaauuuuucccaag

SEQ ID NO: 1271758 - RNA, 22 nt, Human
auccauucuaccucaugucccu

SEQ ID NO: 1271759 - RNA, 19 nt, Human
aucuuaaauaguaaacaau

SEQ ID NO: 1271760 - RNA, 19 nt, Human
caaaagaaauggaauuuua

SEQ ID NO: 1271761 - RNA, 28 nt, Human
caaacacaugacccagugcuguaaugac

SEQ ID NO: 1271762 - RNA, 19 nt, Human
caaaggcugucuguagguc

SEQ ID NO: 1271763 - RNA, 18 nt, Human
caacugguuuugugagcu

SEQ ID NO: 1271764 - RNA, 24 nt, Human
caauagcaauuggaaaaaauaaaa

SEQ ID NO: 1271765 - RNA, 19 nt, Human
cacagaaggacucuagcuc

SEQ ID NO: 1271766 - RNA, 27 nt, Human
caccaaacuccacagccccuugcccuc

SEQ ID NO: 1271767 - RNA, 19 nt, Human
cagccccuugcccuccuug

SEQ ID NO: 1271768 - RNA, 20 nt, Human
cagcuaccugcuggaaccug

SEQ ID NO: 1271769 - RNA, 23 nt, Human
cagcuaccugcuggaaccugcug

SEQ ID NO: 1271770 - RNA, 19 nt, Human
cagucccuuuccucggaau

SEQ ID NO: 1271771 - RNA, 23 nt, Human
caugugcggcuuuuagcugacua

SEQ ID NO: 1271772 - RNA, 26 nt, Human
cauuauggcuauaauaauguauugcc

SEQ ID NO: 1271773 - RNA, 21 nt, Human
cauucugcuccucuaaaugca

SEQ ID NO: 1271774 - RNA, 20 nt, Human
ccaaagaaauuagaaaacca

SEQ ID NO: 1271775 - RNA, 21 nt, Human
ccacuaaucuaaaaccaaagc

SEQ ID NO: 1271776 - RNA, 19 nt, Human
cccaaggaaaaaaagcuuc

SEQ ID NO: 1271777 - RNA, 23 nt, Human
cccccauuggggugguuggagug

SEQ ID NO: 1271778 - RNA, 20 nt, Human
cccuagaccaaaaaagggca

SEQ ID NO: 1271779 - RNA, 28 nt, Human
cccuccugaaccuggaguccaccucgcu

SEQ ID NO: 1271780 - RNA, 21 nt, Human
ccuccuuggcccuccauugua

SEQ ID NO: 1271781 - RNA, 23 nt, Human
ccuccuuggcccuccauuguaag

SEQ ID NO: 1271782 - RNA, 19 nt, Human
ccucucagcucagcuaccu

SEQ ID NO: 1271783 - RNA, 23 nt, Human
ccugaaccuggaguccaccucuc

SEQ ID NO: 1271784 - RNA, 20 nt, Human
ccugcagccacuauaguaac

SEQ ID NO: 1271785 - RNA, 18 nt, Human
ccugcuggaaccugcugc

SEQ ID NO: 1271786 - RNA, 20 nt, Human
ccugcuggaaccugcugccu

SEQ ID NO: 1271787 - RNA, 24 nt, Human
ccuuaaagcuguacacacaucucc

SEQ ID NO: 1271788 - RNA, 21 nt, Human
ccuugcccuccuuggcccucc

SEQ ID NO: 1271789 - RNA, 22 nt, Human
ccuugcccuccuuggcccucca

SEQ ID NO: 1271790 - RNA, 20 nt, Human
ccuuuucccuucuuuguucc

SEQ ID NO: 1271791 - RNA, 24 nt, Human
cgcuuuagaaggcaaagcuguguu

SEQ ID NO: 1271792 - RNA, 21 nt, Human
cuaaaaacaacaaauucaagg

SEQ ID NO: 1271793 - RNA, 24 nt, Human
cuaaaaccaaagcugugguaccug

SEQ ID NO: 1271794 - RNA, 24 nt, Human
cuauaguaacauuucaacacaaaa

SEQ ID NO: 1271795 - RNA, 21 nt, Human
cuccacagccccuugcccucc

SEQ ID NO: 1271796 - RNA, 21 nt, Human
cuccugaaccuggaguccacc

SEQ ID NO: 1271797 - RNA, 21 nt, Human
cugaaagaacuaaacauaaca

SEQ ID NO: 1271798 - RNA, 26 nt, Human
cugaaagcagaaauuggaagaguuau

SEQ ID NO: 1271799 - RNA, 19 nt, Human
cugccaggaguggucaaag

SEQ ID NO: 1271800 - RNA, 19 nt, Human
cuguacacacaucuccucc

SEQ ID NO: 1271801 - RNA, 20 nt, Human
gaaaaaaaaaaaaaaagaaa

SEQ ID NO: 1271802 - RNA, 23 nt, Human
gaaaaaaaaaaaaaaagaaagaa

SEQ ID NO: 1271803 - RNA, 18 nt, Human
gaaaaggggagaaggagu

SEQ ID NO: 1271804 - RNA, 19 nt, Human
gaaagaacuaaacauaaca

SEQ ID NO: 1271805 - RNA, 20 nt, Human
gaaguaaacacacaucuaaa

SEQ ID NO: 1271806 - RNA, 18 nt, Human
gagaaaaaugccaaauaa

SEQ ID NO: 1271807 - RNA, 23 nt, Human
gagauggaaguauuuuuuaaaau

SEQ ID NO: 1271808 - RNA, 20 nt, Human
gaggguggagggaagaagug

SEQ ID NO: 1271809 - RNA, 19 nt, Human
gaguuucucaguucugggc

SEQ ID NO: 1271810 - RNA, 22 nt, Human
gauaguuaaucuguugaguuuc

SEQ ID NO: 1271811 - RNA, 19 nt, Human
gaugggauuucuuuuuggu

SEQ ID NO: 1271812 - RNA, 22 nt, Human
gcaggaaaaaaaaaaaaaaaaa

SEQ ID NO: 1271813 - RNA, 21 nt, Human
gcuguacacacaucuccuccc

SEQ ID NO: 1271814 - RNA, 21 nt, Human
ggaaaaaauaaaaaugaaagc

SEQ ID NO: 1271815 - RNA, 20 nt, Human
ggaaagcugccaguggggcc

SEQ ID NO: 1271816 - RNA, 21 nt, Human
ggcaauagcaauuggaaaaaa

SEQ ID NO: 1271817 - RNA, 22 nt, Human
ggguucagugaaaaaaaaaaaa

SEQ ID NO: 1271818 - RNA, 24 nt, Human
gguucagugggaaaaggggagaag

SEQ ID NO: 1271819 - RNA, 19 nt, Human
gugagacaacugaaaugga

SEQ ID NO: 1271820 - RNA, 18 nt, Human
gugcaugccacagaagga

SEQ ID NO: 1271821 - RNA, 21 nt, Human
gugcaugccacagaaggacuc

SEQ ID NO: 1271822 - RNA, 18 nt, Human
guuggagugaggguggag

SEQ ID NO: 1271823 - RNA, 24 nt, Human
uaagaaauguuucaaggguccaaa

SEQ ID NO: 1271824 - RNA, 18 nt, Human
uaagaguaaacucaucca

SEQ ID NO: 1271825 - RNA, 20 nt, Human
uaagaguaaacucauccaca

SEQ ID NO: 1271826 - RNA, 19 nt, Human
uaaggcagauugggguucc

SEQ ID NO: 1271827 - RNA, 24 nt, Human
uaaucccuagaccaaaaaagggca

SEQ ID NO: 1271828 - RNA, 20 nt, Human
uacaaagagaaccacgcuau

SEQ ID NO: 1271829 - RNA, 23 nt, Human
uacacuaagaaauguuucaaggg

SEQ ID NO: 1271830 - RNA, 26 nt, Human
uaccccaaagaaauuagaagguccuc

SEQ ID NO: 1271831 - RNA, 18 nt, Human
uagaccaaaaaagggcag

SEQ ID NO: 1271832 - RNA, 25 nt, Human
uagaccaaaaaagggcagaauuugu

SEQ ID NO: 1271833 - RNA, 26 nt, Human
uauccaaaagaaauggaauuuuauuc

SEQ ID NO: 1271834 - RNA, 29 nt, Human
uauuuuuuaaaaucacauugugccuggau

SEQ ID NO: 1271835 - RNA, 18 nt, Human
ucaaggguccaaauguca

SEQ ID NO: 1271836 - RNA, 23 nt, Human
ucaaggguccaaaugucauuaaa

SEQ ID NO: 1271837 - RNA, 24 nt, Human
ucagugaaaaaaaaaaaaaaagaa

SEQ ID NO: 1271838 - RNA, 18 nt, Human
ucagugggaaaaggggag

SEQ ID NO: 1271839 - RNA, 23 nt, Human
ucagugggaaaaggggagaagga

SEQ ID NO: 1271840 - RNA, 19 nt, Human
uccacaguaguaguaagac

SEQ ID NO: 1271841 - RNA, 20 nt, Human
uccauacacagcugccaccg

SEQ ID NO: 1271842 - RNA, 22 nt, Human
uccauacacagcugccaccgug

SEQ ID NO: 1271843 - RNA, 19 nt, Human
ucccuagaccaaaaaaggg

SEQ ID NO: 1271844 - RNA, 23 nt, Human
uccuucauacaucacaaaaacaa

SEQ ID NO: 1271845 - RNA, 20 nt, Human
ucucugcucauuuugaaagg

SEQ ID NO: 1271846 - RNA, 20 nt, Human
ugaaaagacugcaaauucca

SEQ ID NO: 1271847 - RNA, 20 nt, Human
ugaaaucacaaaucaaacac

SEQ ID NO: 1271848 - RNA, 22 nt, Human
ugaaaucacaaaucaaacacau

SEQ ID NO: 1271849 - RNA, 19 nt, Human
ugaagucacuuucuuggag

SEQ ID NO: 1271850 - RNA, 18 nt, Human
ugagacaacugaaaugga

SEQ ID NO: 1271851 - RNA, 24 nt, Human
ugaggguggagggaagaagugcuu

SEQ ID NO: 1271852 - RNA, 23 nt, Human
ugauaacagaccaaacaacaaaa

SEQ ID NO: 1271853 - RNA, 25 nt, Human
ugauaacagaccaaacaacaaaaac

SEQ ID NO: 1271854 - RNA, 22 nt, Human
ugccaaauaauucaauuuacag

SEQ ID NO: 1271855 - RNA, 21 nt, Human
ugccacagaaggacucuagcu

SEQ ID NO: 1271856 - RNA, 22 nt, Human
ugccacagaaggacucuagcuc

SEQ ID NO: 1271857 - RNA, 24 nt, Human
uggaaccugcugccuuuucagagg

SEQ ID NO: 1271858 - RNA, 23 nt, Human
uggagcaggaaaaaaaaaaaaaa

SEQ ID NO: 1271859 - RNA, 19 nt, Human
uggauucugggccaguccc

SEQ ID NO: 1271860 - RNA, 20 nt, Human
uggcacuggcgguagcauuu

SEQ ID NO: 1271861 - RNA, 21 nt, Human
uggggugguuggagugagggu

SEQ ID NO: 1271862 - RNA, 23 nt, Human
ugguaaagcauauccaaaagaaa

SEQ ID NO: 1271863 - RNA, 22 nt, Human
ugguaaggcugguugguuaaga

SEQ ID NO: 1271864 - RNA, 18 nt, Human
ugguguggacuucucugg

SEQ ID NO: 1271865 - RNA, 19 nt, Human
uguaaccagacacuggcuu

SEQ ID NO: 1271866 - RNA, 18 nt, Human
uguacuguaaacuuaaaa

SEQ ID NO: 1271867 - RNA, 23 nt, Human
ugucaauuaauuaaaauugaaau

SEQ ID NO: 1271868 - RNA, 20 nt, Human
uguguuguuugguaaggcug

SEQ ID NO: 1271869 - RNA, 18 nt, Human
uguucuaagaaaugugaa

SEQ ID NO: 1271870 - RNA, 18 nt, Human
uguuuugcuuucccaucc

SEQ ID NO: 1271871 - RNA, 25 nt, Human
uuaaggguucagugaaaaaaaaaaa

SEQ ID NO: 1271872 - RNA, 24 nt, Human
uuaccccaaagaaauuagaaaacc

SEQ ID NO: 1271873 - RNA, 19 nt, Human
uucacguuagcaaguuacc

SEQ ID NO: 1271874 - RNA, 20 nt, Human
uucucaguucugggcugaau

SEQ ID NO: 1271875 - RNA, 18 nt, Human
uugugccuggaugaacug

SEQ ID NO: 1271876 - RNA, 18 nt, Human
uugugcuacaaagagaac

SEQ ID NO: 1271877 - RNA, 21 nt, Human
uuuaaaguuauaugaccauuc

SEQ ID NO: 1271878 - RNA, 20 nt, Human
uuuacacuuacaaauaaaug

SEQ ID NO: 1271879 - RNA, 22 nt, Human
uuuguaaacaugaaguaaacac

SEQ ID NO: 1271880 - RNA, 24 nt, Human
uuugugagcugucugcggagggca

SEQ ID NO: 1271881 - RNA, 19 nt, Human
aaagugcuuggauuacagg

SEQ ID NO: 1271882 - RNA, 24 nt, Human
aaagugcuuggauuacagguguga

SEQ ID NO: 1271883 - RNA, 19 nt, Human
acccaggcuggagugcagu

SEQ ID NO: 1271884 - RNA, 23 nt, Human
acccaggcuggagugcaguggug

SEQ ID NO: 1271885 - RNA, 20 nt, Human
acccggccagugaaauaauu

SEQ ID NO: 1271886 - RNA, 21 nt, Human
acccggccagugaaauaauuu

SEQ ID NO: 1271887 - RNA, 19 nt, Human
acuacaggcgugugccacc

SEQ ID NO: 1271888 - RNA, 21 nt, Human
agccucuaguccucgcuucag

SEQ ID NO: 1271889 - RNA, 24 nt, Human
agcgauucuucugccucagccucc

SEQ ID NO: 1271890 - RNA, 21 nt, Human
agcugcuuggccuccagccuc

SEQ ID NO: 1271891 - RNA, 24 nt, Human
aggcgugugccaccacacccggcu

SEQ ID NO: 1271892 - RNA, 25 nt, Human
aggcuggagugcaguggugcgaucu

SEQ ID NO: 1271893 - RNA, 22 nt, Human
agguaauagaaccuucuggagc

SEQ ID NO: 1271894 - RNA, 19 nt, Human
aggugugaaccaccacacc

SEQ ID NO: 1271895 - RNA, 19 nt, Human
aguagcugggacuacaggc

SEQ ID NO: 1271896 - RNA, 23 nt, Human
aguagcugggacuacaggcgugu

SEQ ID NO: 1271897 - RNA, 22 nt, Human
agugcaguggugcgaucuuggc

SEQ ID NO: 1271898 - RNA, 23 nt, Human
agugcaguggugcgaucuuggcc

SEQ ID NO: 1271899 - RNA, 21 nt, Human
aguucagacuggucuuagguu

SEQ ID NO: 1271900 - RNA, 18 nt, Human
augggguuucaccauguu

SEQ ID NO: 1271901 - RNA, 19 nt, Human
augggguuucaccauguua

SEQ ID NO: 1271902 - RNA, 20 nt, Human
augggguuucaccauguuag

SEQ ID NO: 1271903 - RNA, 24 nt, Human
augggguuucaccauguuagccag

SEQ ID NO: 1271904 - RNA, 20 nt, Human
augguucuguaucuucccag

SEQ ID NO: 1271905 - RNA, 24 nt, Human
caaagugcuuggauuacaggugug

SEQ ID NO: 1271906 - RNA, 23 nt, Human
caaccuccaccucccagguucaa

SEQ ID NO: 1271907 - RNA, 20 nt, Human
caagcgauucuucugccuca

SEQ ID NO: 1271908 - RNA, 22 nt, Human
caagcgauucuucugccucagc

SEQ ID NO: 1271909 - RNA, 18 nt, Human
caccauguuagccaggau

SEQ ID NO: 1271910 - RNA, 21 nt, Human
caccauguuagccaggauggu

SEQ ID NO: 1271911 - RNA, 24 nt, Human
caccauguuagccaggaugguuuu

SEQ ID NO: 1271912 - RNA, 24 nt, Human
cacccaggcuggagugcaguggug

SEQ ID NO: 1271913 - RNA, 21 nt, Human
cacugcaaccuccaccuccca

SEQ ID NO: 1271914 - RNA, 24 nt, Human
caucaacaaaccagcagggcccaa

SEQ ID NO: 1271915 - RNA, 21 nt, Human
ccaaagugcuuggauuacagg

SEQ ID NO: 1271916 - RNA, 24 nt, Human
ccaaagugcuuggauuacaggugu

SEQ ID NO: 1271917 - RNA, 20 nt, Human
ccaccacacccggcuaauuu

SEQ ID NO: 1271918 - RNA, 24 nt, Human
ccaccucccagguucaagcgauuc

SEQ ID NO: 1271919 - RNA, 24 nt, Human
ccacugcaaccuccaccucccagg

SEQ ID NO: 1271920 - RNA, 27 nt, Human
ccacugcaaccuccaccucccagguuc

SEQ ID NO: 1271921 - RNA, 24 nt, Human
cccacugcaaccuccaccucccag

SEQ ID NO: 1271922 - RNA, 20 nt, Human
cccagguucaagcgauucuu

SEQ ID NO: 1271923 - RNA, 23 nt, Human
cccagguucaagcgauucuucug

SEQ ID NO: 1271924 - RNA, 23 nt, Human
cccgaguagcugggacuacaggc

SEQ ID NO: 1271925 - RNA, 24 nt, Human
cccgaguagcugggacuacaggcg

SEQ ID NO: 1271926 - RNA, 24 nt, Human
ccucccagguucaagcgauucuuc

SEQ ID NO: 1271927 - RNA, 24 nt, Human
cgcucugucacccaggcuggagug

SEQ ID NO: 1271928 - RNA, 23 nt, Human
cuaauuuuuuguauuuuuaguag

SEQ ID NO: 1271929 - RNA, 24 nt, Human
cucagccucccgaguagcugggac

SEQ ID NO: 1271930 - RNA, 18 nt, Human
cucaugaucuaccugccu

SEQ ID NO: 1271931 - RNA, 22 nt, Human
cuccagccucuaguccucgcuu

SEQ ID NO: 1271932 - RNA, 24 nt, Human
cuccugaccucaugaucuaccugc

SEQ ID NO: 1271933 - RNA, 24 nt, Human
cucgcucugucacccaggcuggag

SEQ ID NO: 1271934 - RNA, 23 nt, Human
cugcaaccuccaccucccagguu

SEQ ID NO: 1271935 - RNA, 24 nt, Human
cugcaaccuccaccucccagguuc

SEQ ID NO: 1271936 - RNA, 23 nt, Human
cugccucagccucccgaguagcu

SEQ ID NO: 1271937 - RNA, 23 nt, Human
cugccucggccucccaaagugcu

SEQ ID NO: 1271938 - RNA, 21 nt, Human
cugccuucccuagcccauguc

SEQ ID NO: 1271939 - RNA, 22 nt, Human
cuggagcuugcuauccucugug

SEQ ID NO: 1271940 - RNA, 20 nt, Human
cuggcuccuucagggcuccu

SEQ ID NO: 1271941 - RNA, 21 nt, Human
cuucccuagcccaugucuccu

SEQ ID NO: 1271942 - RNA, 21 nt, Human
cuuggauuacaggugugaacc

SEQ ID NO: 1271943 - RNA, 21 nt, Human
gaaagaaguaauagcaaagaa

SEQ ID NO: 1271944 - RNA, 22 nt, Human
gaccucaugaucuaccugccuc

SEQ ID NO: 1271945 - RNA, 22 nt, Human
gaccucaugaucuaccugccuc

SEQ ID NO: 1271946 - RNA, 24 nt, Human
gaccucaugaucuaccugccucgg

SEQ ID NO: 1271947 - RNA, 18 nt, Human
gagaugggguuucaccau

SEQ ID NO: 1271948 - RNA, 24 nt, Human
gagaugggguuucaccauguuagc

SEQ ID NO: 1271949 - RNA, 25 nt, Human
gaguagcugggacuacaggcgugug

SEQ ID NO: 1271950 - RNA, 19 nt, Human
gaucuucuuuggcucagcu

SEQ ID NO: 1271951 - RNA, 21 nt, Human
gauuacaggugugaaccacca

SEQ ID NO: 1271952 - RNA, 24 nt, Human
gcaaugaagauggcccgauuugga

SEQ ID NO: 1271953 - RNA, 24 nt, Human
gcgauucuucugccucagccuccc

SEQ ID NO: 1271954 - RNA, 25 nt, Human
gcucugucacccaggcuggagugca

SEQ ID NO: 1271955 - RNA, 21 nt, Human
gcuggcuccuucagggcuccu

SEQ ID NO: 1271956 - RNA, 22 nt, Human
ggaaggaacugucaguuuagug

SEQ ID NO: 1271957 - RNA, 19 nt, Human
ggacuacaggcgugugcca

SEQ ID NO: 1271958 - RNA, 22 nt, Human
ggauuacaggugugaaccacca

SEQ ID NO: 1271959 - RNA, 22 nt, Human
gggguuucaccauguuagccag

SEQ ID NO: 1271960 - RNA, 24 nt, Human
gguuucaccauguuagccaggaug

SEQ ID NO: 1271961 - RNA, 20 nt, Human
gguuuugaucuccugaccuc

SEQ ID NO: 1271962 - RNA, 18 nt, Human
guaauagaaccuucugga

SEQ ID NO: 1271963 - RNA, 23 nt, Human
guagagaugggguuucaccaugu

SEQ ID NO: 1271964 - RNA, 19 nt, Human
gucacagccauaauugucc

SEQ ID NO: 1271965 - RNA, 21 nt, Human
gucuccagugcugaaaugauu

SEQ ID NO: 1271966 - RNA, 24 nt, Human
gucucgcucugucacccaggcugg

SEQ ID NO: 1271967 - RNA, 24 nt, Human
gucuucucuuucaccaagggggug

SEQ ID NO: 1271968 - RNA, 24 nt, Human
uaauuuuuuguauuuuuaguagag

SEQ ID NO: 1271969 - RNA, 25 nt, Human
uaauuuuuuguauuuuuaguagaga

SEQ ID NO: 1271970 - RNA, 23 nt, Human
uacaggcgugugccaccacaccc

SEQ ID NO: 1271971 - RNA, 23 nt, Human
uacaggugugaaccaccacaccc

SEQ ID NO: 1271972 - RNA, 23 nt, Human
uaccugccucggccucccaaagu

SEQ ID NO: 1271973 - RNA, 22 nt, Human
uagagaugggguuucaccaugu

SEQ ID NO: 1271974 - RNA, 24 nt, Human
uaguagagaugggguuucaccaug

SEQ ID NO: 1271975 - RNA, 26 nt, Human
uaguagagaugggguuucaccauguu

SEQ ID NO: 1271976 - RNA, 24 nt, Human
ucaccauguuagccaggaugguuu

SEQ ID NO: 1271977 - RNA, 24 nt, Human
ucacccaggcuggagugcaguggu

SEQ ID NO: 1271978 - RNA, 23 nt, Human
ucagccucccgaguagcugggac

SEQ ID NO: 1271979 - RNA, 19 nt, Human
ucagcugcuuggccuccag

SEQ ID NO: 1271980 - RNA, 22 nt, Human
ucaguuuagugcccgccacguu

SEQ ID NO: 1271981 - RNA, 20 nt, Human
uccaugugggucccugggcg

SEQ ID NO: 1271982 - RNA, 23 nt, Human
ucccaaagugcuuggauuacagg

SEQ ID NO: 1271983 - RNA, 20 nt, Human
ucccagguucaagcgauucu

SEQ ID NO: 1271984 - RNA, 24 nt, Human
ucccagguucaagcgauucuucug

SEQ ID NO: 1271985 - RNA, 19 nt, Human
ucccaguagccagggagcc

SEQ ID NO: 1271986 - RNA, 24 nt, Human
ucccgaguagcugggacuacaggc

SEQ ID NO: 1271987 - RNA, 18 nt, Human
ucccugggcggaccuggg

SEQ ID NO: 1271988 - RNA, 24 nt, Human
uccuccacaugaagcaggcuccau

SEQ ID NO: 1271989 - RNA, 25 nt, Human
uccuggguggccuuucagacagugu

SEQ ID NO: 1271990 - RNA, 24 nt, Human
ucgcucugucacccaggcuggagu

SEQ ID NO: 1271991 - RNA, 19 nt, Human
ucucgcucugucacccagg

SEQ ID NO: 1271992 - RNA, 23 nt, Human
ucucgcucugucacccaggcugg

SEQ ID NO: 1271993 - RNA, 24 nt, Human
ucucgcucugucacccaggcugga

SEQ ID NO: 1271994 - RNA, 26 nt, Human
ucucgcucugucacccaggcuggagu

SEQ ID NO: 1271995 - RNA, 27 nt, Human
ucucgcucugucacccaggcuggagug

SEQ ID NO: 1271996 - RNA, 24 nt, Human
ucugucacccaggcuggagugcag

SEQ ID NO: 1271997 - RNA, 19 nt, Human
ugaaggaaggaacugucag

SEQ ID NO: 1271998 - RNA, 18 nt, Human
ugagacagagucucgcuc

SEQ ID NO: 1271999 - RNA, 22 nt, Human
ugagacagagucucgcucuguc

SEQ ID NO: 1272000 - RNA, 24 nt, Human
ugccucagccucccgaguagcugg

SEQ ID NO: 1272001 - RNA, 21 nt, Human
ugccucggccucccaaagugc

SEQ ID NO: 1272002 - RNA, 25 nt, Human
ugccucggccucccaaagugcuugg

SEQ ID NO: 1272003 - RNA, 22 nt, Human
ugccuuuaguccaugugggucc

SEQ ID NO: 1272004 - RNA, 23 nt, Human
ugcuuuauuuccuguuuccucca

SEQ ID NO: 1272005 - RNA, 23 nt, Human
uggagugcaguggugcgaucuug

SEQ ID NO: 1272006 - RNA, 24 nt, Human
uggagugcaguggugcgaucuugg

SEQ ID NO: 1272007 - RNA, 23 nt, Human
uggauuacaggugugaaccacca

SEQ ID NO: 1272008 - RNA, 18 nt, Human
uggcccaggugaucuucu

SEQ ID NO: 1272009 - RNA, 21 nt, Human
uggccuccagccucuaguccu

SEQ ID NO: 1272010 - RNA, 18 nt, Human
ugggacuacaggcgugug

SEQ ID NO: 1272011 - RNA, 21 nt, Human
ugggacuacaggcgugugcca

SEQ ID NO: 1272012 - RNA, 22 nt, Human
ugggacuacaggcgugugccac

SEQ ID NO: 1272013 - RNA, 24 nt, Human
ugggacuacaggcgugugccacca

SEQ ID NO: 1272014 - RNA, 24 nt, Human
ugggguuucaccauguuagccagg

SEQ ID NO: 1272015 - RNA, 21 nt, Human
uguauuuuuaguagagauggg

SEQ ID NO: 1272016 - RNA, 19 nt, Human
uguccaugucuucucuuuc

SEQ ID NO: 1272017 - RNA, 18 nt, Human
uuaguagagaugggguuu

SEQ ID NO: 1272018 - RNA, 22 nt, Human
uuaguagagaugggguuucacc

SEQ ID NO: 1272019 - RNA, 24 nt, Human
uuaguagagaugggguuucaccau

SEQ ID NO: 1272020 - RNA, 23 nt, Human
uucaagcgauucuucugccucag

SEQ ID NO: 1272021 - RNA, 24 nt, Human
uucaagcgauucuucugccucagc

SEQ ID NO: 1272022 - RNA, 19 nt, Human
uucacaggaugguucugua

SEQ ID NO: 1272023 - RNA, 20 nt, Human
uucagacuggucuuagguug

SEQ ID NO: 1272024 - RNA, 19 nt, Human
uucccuagcccaugucucc

SEQ ID NO: 1272025 - RNA, 22 nt, Human
uuggauuacaggugugaaccac

SEQ ID NO: 1272026 - RNA, 19 nt, Human
uuucaccauguuagccagg

SEQ ID NO: 1272027 - RNA, 20 nt, Human
uuucaccauguuagccagga

SEQ ID NO: 1272028 - RNA, 21 nt, Human
uuugucugcccacuguugccu

SEQ ID NO: 1272029 - RNA, 24 nt, Human
uuuuuaguagagaugggguuucac

SEQ ID NO: 1272030 - RNA, 21 nt, Human
uuuuuguauuuuuaguagaga

SEQ ID NO: 1272031 - RNA, 24 nt, Human
uuuuuuguauuuuuaguagagaug

SEQ ID NO: 1272032 - RNA, 23 nt, Human
aaagccucuuguccccuuuccca

SEQ ID NO: 1272033 - RNA, 24 nt, Human
aauaccgccccaccucaaccccca

SEQ ID NO: 1272034 - RNA, 19 nt, Human
acagaauagcugguguccc

SEQ ID NO: 1272035 - RNA, 18 nt, Human
acauacagaaccaagaca

SEQ ID NO: 1272036 - RNA, 20 nt, Human
acccccaggaaacuggggag

SEQ ID NO: 1272037 - RNA, 21 nt, Human
acccccaggaaacuggggagc

SEQ ID NO: 1272038 - RNA, 20 nt, Human
accgccccaccucaaccccc

SEQ ID NO: 1272039 - RNA, 22 nt, Human
accucaacccccaggaaacugg

SEQ ID NO: 1272040 - RNA, 22 nt, Human
agaaccaagacauaguguccca

SEQ ID NO: 1272041 - RNA, 21 nt, Human
aggcagacaagaggcagguuu

SEQ ID NO: 1272042 - RNA, 19 nt, Human
agggguguggggguggggg

SEQ ID NO: 1272043 - RNA, 21 nt, Human
agguguauagggcgcagcccu

SEQ ID NO: 1272044 - RNA, 23 nt, Human
caacccaaaugggaagggacaac

SEQ ID NO: 1272045 - RNA, 18 nt, Human
cacacacuugggacacga

SEQ ID NO: 1272046 - RNA, 26 nt, Human
caccucaacccccaggaaacugggga

SEQ ID NO: 1272047 - RNA, 21 nt, Human
cacguacgugaggcugggcac

SEQ ID NO: 1272048 - RNA, 19 nt, Human
cacugugcagagcccaggc

SEQ ID NO: 1272049 - RNA, 26 nt, Human
cagaaccaagacauagugucccaagu

SEQ ID NO: 1272050 - RNA, 23 nt, Human
cagcaaccuagucguggucacac

SEQ ID NO: 1272051 - RNA, 24 nt, Human
cagcagccugcuccucugcgccac

SEQ ID NO: 1272052 - RNA, 21 nt, Human
cauacagaaccaagacauagu

SEQ ID NO: 1272053 - RNA, 19 nt, Human
ccaaaagacugaggccacc

SEQ ID NO: 1272054 - RNA, 20 nt, Human
ccacagguugaaccuaggug

SEQ ID NO: 1272055 - RNA, 18 nt, Human
cccaggacauacagaacc

SEQ ID NO: 1272056 - RNA, 20 nt, Human
ccccaccucaacccccagga

SEQ ID NO: 1272057 - RNA, 22 nt, Human
ccccaccucaacccccaggaaa

SEQ ID NO: 1272058 - RNA, 25 nt, Human
cccuuuacaaacagguguauagggc

SEQ ID NO: 1272059 - RNA, 24 nt, Human
ccgccccaccucaacccccaggaa

SEQ ID NO: 1272060 - RNA, 26 nt, Human
ccuauggcagggcacguacgugaggc

SEQ ID NO: 1272061 - RNA, 20 nt, Human
ccucuuguccccuuucccag

SEQ ID NO: 1272062 - RNA, 22 nt, Human
ccugggcagcagccugcuccuc

SEQ ID NO: 1272063 - RNA, 22 nt, Human
cgccaaaagacugaggccacca

SEQ ID NO: 1272064 - RNA, 21 nt, Human
cgugggucggugucgggugug

SEQ ID NO: 1272065 - RNA, 21 nt, Human
cugcaguaccucuuagggacc

SEQ ID NO: 1272066 - RNA, 23 nt, Human
cugggugucuguuucugcaguca

SEQ ID NO: 1272067 - RNA, 18 nt, Human
cuuguucuguggggugag

SEQ ID NO: 1272068 - RNA, 19 nt, Human
gaaccuagguggcugcugg

SEQ ID NO: 1272069 - RNA, 22 nt, Human
gcagcagccugcuccucugcgc

SEQ ID NO: 1272070 - RNA, 19 nt, Human
gcaggaagaggaggaugag

SEQ ID NO: 1272071 - RNA, 20 nt, Human
gccaaaagacugaggccacc

SEQ ID NO: 1272072 - RNA, 25 nt, Human
gccaaaagacugaggccaccacgga

SEQ ID NO: 1272073 - RNA, 24 nt, Human
gccccaccucaacccccaggaaac

SEQ ID NO: 1272074 - RNA, 27 nt, Human
gggaacaggagaaucggcuuuuugggg

SEQ ID NO: 1272075 - RNA, 23 nt, Human
gggaagggacaacggagguugcc

SEQ ID NO: 1272076 - RNA, 19 nt, Human
gggugugggggugggggca

SEQ ID NO: 1272077 - RNA, 22 nt, Human
gggugugggggugggggcacgg

SEQ ID NO: 1272078 - RNA, 18 nt, Human
ggugugggggugggggca

SEQ ID NO: 1272079 - RNA, 21 nt, Human
gucccaggacauacagaacca

SEQ ID NO: 1272080 - RNA, 19 nt, Human
gugcagagcccaggcgcgu

SEQ ID NO: 1272081 - RNA, 20 nt, Human
uagacugugauguugaaaau

SEQ ID NO: 1272082 - RNA, 20 nt, Human
uauggcagggcacguacgug

SEQ ID NO: 1272083 - RNA, 25 nt, Human
ucccucaccauuacauucuaggagg

SEQ ID NO: 1272084 - RNA, 20 nt, Human
ucccugacccuggaagaagg

SEQ ID NO: 1272085 - RNA, 20 nt, Human
uccuuuggaaguggcccuag

SEQ ID NO: 1272086 - RNA, 27 nt, Human
ucggguguguguguacgucugugugug

SEQ ID NO: 1272087 - RNA, 20 nt, Human
ugaaacuggacgccuuccuu

SEQ ID NO: 1272088 - RNA, 24 nt, Human
ugaggggugugggggugggggcac

SEQ ID NO: 1272089 - RNA, 18 nt, Human
ugauguugaaaauuuugu

SEQ ID NO: 1272090 - RNA, 24 nt, Human
ugcacagaauagcuggugucccac

SEQ ID NO: 1272091 - RNA, 18 nt, Human
uggaagaaggguugggag

SEQ ID NO: 1272092 - RNA, 22 nt, Human
uggaagaaggguugggaggggu

SEQ ID NO: 1272093 - RNA, 24 nt, Human
uggaagaaggguugggagggguug

SEQ ID NO: 1272094 - RNA, 24 nt, Human
uggacgccuuccuucccggcgauc

SEQ ID NO: 1272095 - RNA, 24 nt, Human
uggagucugcaugcugagaugcug

SEQ ID NO: 1272096 - RNA, 20 nt, Human
uggcaaggcagggagcuggu

SEQ ID NO: 1272097 - RNA, 20 nt, Human
ugggaggaacugcuauggac

SEQ ID NO: 1272098 - RNA, 21 nt, Human
ugggagggguugcacagaaua

SEQ ID NO: 1272099 - RNA, 19 nt, Human
ugucccaggacauacagaa

SEQ ID NO: 1272100 - RNA, 19 nt, Human
ugugggggugggggcacgg

SEQ ID NO: 1272101 - RNA, 20 nt, Human
uguguacgucugugugugua

SEQ ID NO: 1272102 - RNA, 22 nt, Human
uguguguacgucugugugugua

SEQ ID NO: 1272103 - RNA, 20 nt, Human
uguguguguacgucugugug

SEQ ID NO: 1272104 - RNA, 21 nt, Human
uguguguguacgucugugugu

SEQ ID NO: 1272105 - RNA, 19 nt, Human
uuccuuaggggcuuuaucu

SEQ ID NO: 1272106 - RNA, 19 nt, Human
uugcucccuucuagcaacc

SEQ ID NO: 1272107 - RNA, 21 nt, Human
uuuagaauaccgccccaccuc

SEQ ID NO: 1272108 - RNA, 23 nt, Human
uuucccagauccaccaagcgucu

SEQ ID NO: 1272109 - RNA, 20 nt, Human
uuuggaaguggcccuagggg

SEQ ID NO: 1272110 - RNA, 21 nt, Human
aaacaugcagaccacaaaggg

SEQ ID NO: 1272111 - RNA, 24 nt, Human
aaagaaccuagucccaggggagac

SEQ ID NO: 1272112 - RNA, 22 nt, Human
aacucaagaugacaaaagggag

SEQ ID NO: 1272113 - RNA, 22 nt, Human
aacuuuccaauagaccucacug

SEQ ID NO: 1272114 - RNA, 19 nt, Human
aagcagcccuuucuucagg

SEQ ID NO: 1272115 - RNA, 19 nt, Human
aagcagcccuuucuucagg

SEQ ID NO: 1272116 - RNA, 26 nt, Human
acacagccccaucuucagggagcucc

SEQ ID NO: 1272117 - RNA, 23 nt, Human
acagagaagagggggcucccaga

SEQ ID NO: 1272118 - RNA, 25 nt, Human
accucacuccucaccagcuccccua

SEQ ID NO: 1272119 - RNA, 20 nt, Human
agaaacaugcagaccacaaa

SEQ ID NO: 1272120 - RNA, 19 nt, Human
agccagagggugggguggg

SEQ ID NO: 1272121 - RNA, 18 nt, Human
agccugacgaugacagag

SEQ ID NO: 1272122 - RNA, 22 nt, Human
agcucugagccugguuuugggg

SEQ ID NO: 1272123 - RNA, 22 nt, Human
aggcagacacagccccguccuc

SEQ ID NO: 1272124 - RNA, 23 nt, Human
auccucccauauuccccccuucu

SEQ ID NO: 1272125 - RNA, 23 nt, Human
augcagccucauccucaggcagc

SEQ ID NO: 1272126 - RNA, 22 nt, Human
caaaagggagugcuggaggggu

SEQ ID NO: 1272127 - RNA, 23 nt, Human
caacacccuggaccucaggaaag

SEQ ID NO: 1272128 - RNA, 24 nt, Human
caaccuaaaacccauguacucauu

SEQ ID NO: 1272129 - RNA, 23 nt, Human
caagccaaacaaaaccucacuga

SEQ ID NO: 1272130 - RNA, 19 nt, Human
cagagccaccucacuccuc

SEQ ID NO: 1272131 - RNA, 19 nt, Human
cagccagugguccugggga

SEQ ID NO: 1272132 - RNA, 23 nt, Human
caugcagaccacaaaggggcagc

SEQ ID NO: 1272133 - RNA, 19 nt, Human
ccaaacaaaaccucacuga

SEQ ID NO: 1272134 - RNA, 21 nt, Human
ccagcagagaccuuccaggac

SEQ ID NO: 1272135 - RNA, 23 nt, Human
ccagucugaggcagacacagccc

SEQ ID NO: 1272136 - RNA, 19 nt, Human
ccauugccuucagggagcu

SEQ ID NO: 1272137 - RNA, 21 nt, Human
cccagugaggccucauagcuc

SEQ ID NO: 1272138 - RNA, 24 nt, Human
cccauauuccccccuucuccagcc

SEQ ID NO: 1272139 - RNA, 23 nt, Human
ccccaucuucagggauucccagu

SEQ ID NO: 1272140 - RNA, 23 nt, Human
cccuggaccucaggaaagaauug

SEQ ID NO: 1272141 - RNA, 22 nt, Human
cccuggccccuccccacucucc

SEQ ID NO: 1272142 - RNA, 19 nt, Human
cccuucccuucuccgugcc

SEQ ID NO: 1272143 - RNA, 21 nt, Human
ccgcgagguggguggguggag

SEQ ID NO: 1272144 - RNA, 18 nt, Human
ccgggaccggggagcggc

SEQ ID NO: 1272145 - RNA, 18 nt, Human
ccucagagcgcucccugu

SEQ ID NO: 1272146 - RNA, 21 nt, Human
ccucaggcagccccagucuga

SEQ ID NO: 1272147 - RNA, 24 nt, Human
ccucagggagccccagucugaggg

SEQ ID NO: 1272148 - RNA, 24 nt, Human
ccucagggagcuccagucugaggg

SEQ ID NO: 1272149 - RNA, 21 nt, Human
ccuuaccaagaaacaugcaga

SEQ ID NO: 1272150 - RNA, 19 nt, Human
cgagguggguggguggagg

SEQ ID NO: 1272151 - RNA, 24 nt, Human
cucccacugaaggcuaacuuucca

SEQ ID NO: 1272152 - RNA, 18 nt, Human
cuccgugucuguggcggg

SEQ ID NO: 1272153 - RNA, 18 nt, Human
cucucucacccuaccuga

SEQ ID NO: 1272154 - RNA, 20 nt, Human
cugcagacucucacauucaa

SEQ ID NO: 1272155 - RNA, 22 nt, Human
cugcgugccuuugccacuccuc

SEQ ID NO: 1272156 - RNA, 20 nt, Human
cugggcgccauggggagcca

SEQ ID NO: 1272157 - RNA, 20 nt, Human
cuguucucaagcaaccucua

SEQ ID NO: 1272158 - RNA, 23 nt, Human
cuucccuucccuucuccgugccu

SEQ ID NO: 1272159 - RNA, 20 nt, Human
gaagguaauuuccccgccag

SEQ ID NO: 1272160 - RNA, 19 nt, Human
gagccugacgaugacagag

SEQ ID NO: 1272161 - RNA, 23 nt, Human
gagcuccagucugagggagaagc

SEQ ID NO: 1272162 - RNA, 18 nt, Human
gagguggguggguggagg

SEQ ID NO: 1272163 - RNA, 19 nt, Human
gcaaguggggagccugacg

SEQ ID NO: 1272164 - RNA, 22 nt, Human
gcagaccacaaaggggcagcaa

SEQ ID NO: 1272165 - RNA, 19 nt, Human
gccccauccucagggagcc

SEQ ID NO: 1272166 - RNA, 24 nt, Human
gccccuccccacucucccagucuc

SEQ ID NO: 1272167 - RNA, 19 nt, Human
gcccugcccucagggagcu

SEQ ID NO: 1272168 - RNA, 19 nt, Human
gcccuguccucagggagcc

SEQ ID NO: 1272169 - RNA, 18 nt, Human
gccugggcgccaugggga

SEQ ID NO: 1272170 - RNA, 20 nt, Human
gcgaagggaggguuccggga

SEQ ID NO: 1272171 - RNA, 18 nt, Human
gcgggucugggaguucug

SEQ ID NO: 1272172 - RNA, 21 nt, Human
gcucugagccugguuuugggg

SEQ ID NO: 1272173 - RNA, 20 nt, Human
ggacuucccuucccuucucc

SEQ ID NO: 1272174 - RNA, 23 nt, Human
ggagaaacagccccauccucagg

SEQ ID NO: 1272175 - RNA, 23 nt, Human
ggagaaacagccccauccucagg

SEQ ID NO: 1272176 - RNA, 22 nt, Human
ggagaagcagcccuuucuucag

SEQ ID NO: 1272177 - RNA, 18 nt, Human
ggaggguggcgaagggag

SEQ ID NO: 1272178 - RNA, 21 nt, Human
ggcagacacagccccguccuc

SEQ ID NO: 1272179 - RNA, 21 nt, Human
ggccaugaguuugcaacaccc

SEQ ID NO: 1272180 - RNA, 23 nt, Human
gggagacacaacgcuguccugag

SEQ ID NO: 1272181 - RNA, 18 nt, Human
gggcacccuuaccaagaa

SEQ ID NO: 1272182 - RNA, 24 nt, Human
ggggagacacaacgcuguccugag

SEQ ID NO: 1272183 - RNA, 20 nt, Human
ggugggguggggugcaaaug

SEQ ID NO: 1272184 - RNA, 19 nt, Human
gucaccuuucuucgcagga

SEQ ID NO: 1272185 - RNA, 18 nt, Human
uaggucccuggccccucc

SEQ ID NO: 1272186 - RNA, 21 nt, Human
ucacugggagggcagucggag

SEQ ID NO: 1272187 - RNA, 21 nt, Human
ucagagguccaccuucacugg

SEQ ID NO: 1272188 - RNA, 22 nt, Human
uccaauagaccucacuguuucu

SEQ ID NO: 1272189 - RNA, 19 nt, Human
ucccagagacacuugacug

SEQ ID NO: 1272190 - RNA, 18 nt, Human
ucccagagggcggcagga

SEQ ID NO: 1272191 - RNA, 23 nt, Human
ucccauauuccccccuucuccag

SEQ ID NO: 1272192 - RNA, 18 nt, Human
uccccccuucuccagccc

SEQ ID NO: 1272193 - RNA, 24 nt, Human
uccuggggaccgcgaggugggugg

SEQ ID NO: 1272194 - RNA, 19 nt, Human
ucucaagcaaccucuaguc

SEQ ID NO: 1272195 - RNA, 18 nt, Human
ucuccugggacugagggg

SEQ ID NO: 1272196 - RNA, 26 nt, Human
ugaagguaaaacguggcccaaggcca

SEQ ID NO: 1272197 - RNA, 20 nt, Human
ugacaaaagggagugcugga

SEQ ID NO: 1272198 - RNA, 21 nt, Human
ugacaaaagggagugcuggag

SEQ ID NO: 1272199 - RNA, 22 nt, Human
ugacaaaagggagugcuggagg

SEQ ID NO: 1272200 - RNA, 18 nt, Human
ugacucagggagccccag

SEQ ID NO: 1272201 - RNA, 22 nt, Human
ugagccugguuuugggggaagg

SEQ ID NO: 1272202 - RNA, 19 nt, Human
ugaggaaaaggauguaggc

SEQ ID NO: 1272203 - RNA, 19 nt, Human
ugaggcagacacagccccg

SEQ ID NO: 1272204 - RNA, 20 nt, Human
ugaggggagacacaacgcug

SEQ ID NO: 1272205 - RNA, 18 nt, Human
ugaggggagaugcagccu

SEQ ID NO: 1272206 - RNA, 22 nt, Human
ugaggggcagucccagagggcg

SEQ ID NO: 1272207 - RNA, 26 nt, Human
ugauagaggagagcucugagccuggu

SEQ ID NO: 1272208 - RNA, 23 nt, Human
ugcagaagacacaaagaaccuag

SEQ ID NO: 1272209 - RNA, 21 nt, Human
ugcagaccacaaaggggcagc

SEQ ID NO: 1272210 - RNA, 19 nt, Human
ugccugggcgccaugggga

SEQ ID NO: 1272211 - RNA, 18 nt, Human
uggccccuccccacucuc

SEQ ID NO: 1272212 - RNA, 18 nt, Human
ugggggaggccccagucu

SEQ ID NO: 1272213 - RNA, 25 nt, Human
ugggguggggugcaaaugucccauu

SEQ ID NO: 1272214 - RNA, 23 nt, Human
uuaccaagaaacaugcagaccac

SEQ ID NO: 1272215 - RNA, 24 nt, Human
uucucaagcaaccucuagucucau

SEQ ID NO: 1272216 - RNA, 18 nt, Human
uuggcagccagugguccu

SEQ ID NO: 1272217 - RNA, 18 nt, Human
uugucugcagacucucac

SEQ ID NO: 1272218 - RNA, 22 nt, Human
uuucauucaucaaagcgugaca

SEQ ID NO: 1272219 - RNA, 22 nt, Human
acccccauuccuuuagacccaa

SEQ ID NO: 1272220 - RNA, 24 nt, Human
aggugaggugggggcuaggaggga

SEQ ID NO: 1272221 - RNA, 18 nt, Human
augcagggccucucuguc

SEQ ID NO: 1272222 - RNA, 20 nt, Human
augcuucccaugccagaaug

SEQ ID NO: 1272223 - RNA, 23 nt, Human
cacccccauuccuuuagacccaa

SEQ ID NO: 1272224 - RNA, 22 nt, Human
ccacacaugcuucccaugccaa

SEQ ID NO: 1272225 - RNA, 21 nt, Human
cccuauggccaggccgucacc

SEQ ID NO: 1272226 - RNA, 22 nt, Human
cccuauggccaggccgucaccu

SEQ ID NO: 1272227 - RNA, 24 nt, Human
cccuauggccaggccgucaccuuc

SEQ ID NO: 1272228 - RNA, 20 nt, Human
ccuauggccaggccgucacc

SEQ ID NO: 1272229 - RNA, 25 nt, Human
ccuugcauguuuacauuuccuucuc

SEQ ID NO: 1272230 - RNA, 22 nt, Human
cucucugucuccacugucaaac

SEQ ID NO: 1272231 - RNA, 21 nt, Human
gccaggccgucaccuucccuu

SEQ ID NO: 1272232 - RNA, 22 nt, Human
gccgucaccuucccuuucaugu

SEQ ID NO: 1272233 - RNA, 18 nt, Human
gcugugugcuugagagca

SEQ ID NO: 1272234 - RNA, 21 nt, Human
ggcuaggagggagccccaggg

SEQ ID NO: 1272235 - RNA, 18 nt, Human
gggcagccaggcaggcac

SEQ ID NO: 1272236 - RNA, 20 nt, Human
ggguuuguguuuuccuuuca

SEQ ID NO: 1272237 - RNA, 19 nt, Human
gucaccuucccuuucaugu

SEQ ID NO: 1272238 - RNA, 20 nt, Human
guggggguuguuuuucuacu

SEQ ID NO: 1272239 - RNA, 22 nt, Human
uacccacagcuuuauuuugcuu

SEQ ID NO: 1272240 - RNA, 22 nt, Human
uagaagcccacacaugcuuccc

SEQ ID NO: 1272241 - RNA, 20 nt, Human
uaggagggagccccagggua

SEQ ID NO: 1272242 - RNA, 23 nt, Human
ucacagcaguaccugaccuugca

SEQ ID NO: 1272243 - RNA, 23 nt, Human
uccauaggggugagaagugugcu

SEQ ID NO: 1272244 - RNA, 19 nt, Human
ucccaugccagaauggggu

SEQ ID NO: 1272245 - RNA, 22 nt, Human
ucucagugagccaguaggugag

SEQ ID NO: 1272246 - RNA, 21 nt, Human
ucuccacugucaaacugggag

SEQ ID NO: 1272247 - RNA, 18 nt, Human
ugccugaccagaauaaag

SEQ ID NO: 1272248 - RNA, 20 nt, Human
ugggguggaacuggaacgac

SEQ ID NO: 1272249 - RNA, 18 nt, Human
ugugcuugagagcagugg

SEQ ID NO: 1272250 - RNA, 23 nt, Human
ugugugcuugagagcaguggggg

SEQ ID NO: 1272251 - RNA, 24 nt, Human
uucagauugagaauuccuuaagga

SEQ ID NO: 1272252 - RNA, 22 nt, Human
uuccugggcccuauggccaggc

SEQ ID NO: 1272253 - RNA, 26 nt, Human
uuccuuaaggauugaggcuaugaauc

SEQ ID NO: 1272254 - RNA, 26 nt, Human
uugagagcaguggggguuguuuuucu

SEQ ID NO: 1272255 - RNA, 20 nt, Human
aaacacacaccaacauugac

SEQ ID NO: 1272256 - RNA, 18 nt, Human
aacuauacuccuguccca

SEQ ID NO: 1272257 - RNA, 22 nt, Human
aagcccuuggccacaacuauac

SEQ ID NO: 1272258 - RNA, 24 nt, Human
acaacuauacuccugucccacccc

SEQ ID NO: 1272259 - RNA, 23 nt, Human
acagaguaaaacccaauccuagc

SEQ ID NO: 1272260 - RNA, 25 nt, Human
acaggcaggccaaguucacugaagc

SEQ ID NO: 1272261 - RNA, 19 nt, Human
acaguagcaaugcugggag

SEQ ID NO: 1272262 - RNA, 19 nt, Human
agagaggaaugaucugcuc

SEQ ID NO: 1272263 - RNA, 22 nt, Human
agagcagugcuuccagaguucc

SEQ ID NO: 1272264 - RNA, 18 nt, Human
agaguuccuccugcaccu

SEQ ID NO: 1272265 - RNA, 20 nt, Human
agccaucuuuccccaccccc

SEQ ID NO: 1272266 - RNA, 22 nt, Human
agcccagcccaucuguuuacag

SEQ ID NO: 1272267 - RNA, 21 nt, Human
agcugagugagccaaaugggg

SEQ ID NO: 1272268 - RNA, 23 nt, Human
aggaaagggaaacuggugaaagg

SEQ ID NO: 1272269 - RNA, 19 nt, Human
aggcaggcagggcaguugg

SEQ ID NO: 1272270 - RNA, 24 nt, Human
aggccaugcucagugcuggggaca

SEQ ID NO: 1272271 - RNA, 22 nt, Human
caagcccuuggccacaacuaua

SEQ ID NO: 1272272 - RNA, 20 nt, Human
caaugcugggagcuagaggc

SEQ ID NO: 1272273 - RNA, 22 nt, Human
cacagguugggugaggggcagg

SEQ ID NO: 1272274 - RNA, 19 nt, Human
caccccaccacgauggccu

SEQ ID NO: 1272275 - RNA, 22 nt, Human
cagcucuucucgccccauggcc

SEQ ID NO: 1272276 - RNA, 18 nt, Human
cagggagccaaggugggc

SEQ ID NO: 1272277 - RNA, 18 nt, Human
cagugcuggggacaggag

SEQ ID NO: 1272278 - RNA, 18 nt, Human
caucuacaaaaaaggccc

SEQ ID NO: 1272279 - RNA, 19 nt, Human
ccacagccauuuccaccca

SEQ ID NO: 1272280 - RNA, 22 nt, Human
cccaccccaccacgauggccug

SEQ ID NO: 1272281 - RNA, 23 nt, Human
ccccaccccccuccuauuuacag

SEQ ID NO: 1272282 - RNA, 23 nt, Human
cccccagcccucacaggcaccuc

SEQ ID NO: 1272283 - RNA, 28 nt, Human
ccuccuauuuacaggaaccuuccuaggc

SEQ ID NO: 1272284 - RNA, 19 nt, Human
ccuuacaucagcucuucuc

SEQ ID NO: 1272285 - RNA, 22 nt, Human
ccuuacugugggagagcugcag

SEQ ID NO: 1272286 - RNA, 24 nt, Human
cuagaaucucuuucauuagcacau

SEQ ID NO: 1272287 - RNA, 21 nt, Human
cucaaaggggcccugguuguc

SEQ ID NO: 1272288 - RNA, 18 nt, Human
cucacugcuugggaagug

SEQ ID NO: 1272289 - RNA, 23 nt, Human
cuccuggcuccgucaagcccauc

SEQ ID NO: 1272290 - RNA, 21 nt, Human
cugcgcccacgggcccuuacc

SEQ ID NO: 1272291 - RNA, 20 nt, Human
cugggcacauugccagcugg

SEQ ID NO: 1272292 - RNA, 20 nt, Human
cugucccaccccaccacgau

SEQ ID NO: 1272293 - RNA, 19 nt, Human
cuuaggccaugcucagugc

SEQ ID NO: 1272294 - RNA, 23 nt, Human
cuuccuaggcuagggcugcgccc

SEQ ID NO: 1272295 - RNA, 18 nt, Human
cuuuccccaccccccucc

SEQ ID NO: 1272296 - RNA, 23 nt, Human
gagagcagugcuuccagaguucc

SEQ ID NO: 1272297 - RNA, 20 nt, Human
gagcugcagggagccaaggu

SEQ ID NO: 1272298 - RNA, 22 nt, Human
gccaugcucagugcuggggaca

SEQ ID NO: 1272299 - RNA, 19 nt, Human
gcccugggcugccugaacc

SEQ ID NO: 1272300 - RNA, 19 nt, Human
gcgcucacugcuugggaag

SEQ ID NO: 1272301 - RNA, 22 nt, Human
ggagagcugcagggagccaagg

SEQ ID NO: 1272302 - RNA, 19 nt, Human
ggcacauugccagcugggu

SEQ ID NO: 1272303 - RNA, 19 nt, Human
gggcccuggccauccccaa

SEQ ID NO: 1272304 - RNA, 26 nt, Human
uacaaaaaaggcccccgcuggaacag

SEQ ID NO: 1272305 - RNA, 23 nt, Human
uacccuuggccugcacaguagca

SEQ ID NO: 1272306 - RNA, 22 nt, Human
uaccugacgcgcugggcuccug

SEQ ID NO: 1272307 - RNA, 24 nt, Human
uaggacagaacaggcaggccaagu

SEQ ID NO: 1272308 - RNA, 20 nt, Human
ucaagaacaccuuggaagcu

SEQ ID NO: 1272309 - RNA, 23 nt, Human
ucacaggcaccucuuuguucucc

SEQ ID NO: 1272310 - RNA, 24 nt, Human
uccaagaaacugcguuccucaaag

SEQ ID NO: 1272311 - RNA, 23 nt, Human
uccacagguaccugacgcgcugg

SEQ ID NO: 1272312 - RNA, 20 nt, Human
ucccaccccaccacgauggc

SEQ ID NO: 1272313 - RNA, 25 nt, Human
uccccaaaggaggccaaagguccau

SEQ ID NO: 1272314 - RNA, 20 nt, Human
ucccugaagguugggguagc

SEQ ID NO: 1272315 - RNA, 20 nt, Human
ucuacaaaaaaggcccccgc

SEQ ID NO: 1272316 - RNA, 24 nt, Human
ucucgccccauggcugaggccaga

SEQ ID NO: 1272317 - RNA, 20 nt, Human
ugaggccagagaggaaugau

SEQ ID NO: 1272318 - RNA, 24 nt, Human
ugagucaauugaauucaugggcca

SEQ ID NO: 1272319 - RNA, 19 nt, Human
ugaucugcucuucaggcag

SEQ ID NO: 1272320 - RNA, 20 nt, Human
ugcggcagcaagagcccagc

SEQ ID NO: 1272321 - RNA, 24 nt, Human
uggccacaacuauacuccuguccc

SEQ ID NO: 1272322 - RNA, 18 nt, Human
ugggaagugcaggggguc

SEQ ID NO: 1272323 - RNA, 21 nt, Human
ugggagcuagaggcaggcagg

SEQ ID NO: 1272324 - RNA, 24 nt, Human
ugggcuccuggcuccgucaagccc

SEQ ID NO: 1272325 - RNA, 20 nt, Human
uggggacaggaguuuugccc

SEQ ID NO: 1272326 - RNA, 19 nt, Human
uggggucaccccuucugag

SEQ ID NO: 1272327 - RNA, 24 nt, Human
ugggugcugagcauugagucacug

SEQ ID NO: 1272328 - RNA, 18 nt, Human
ugugauggggccaaugag

SEQ ID NO: 1272329 - RNA, 25 nt, Human
uuacaucagcucuucucgccccaug

SEQ ID NO: 1272330 - RNA, 21 nt, Human
uuaggccaugcucagugcugg

SEQ ID NO: 1272331 - RNA, 18 nt, Human
uucauuagcacauuccaa

SEQ ID NO: 1272332 - RNA, 19 nt, Human
uuccuaggcuagggcugcg

SEQ ID NO: 1272333 - RNA, 19 nt, Human
uucgccaccuuuuccucag

SEQ ID NO: 1272334 - RNA, 24 nt, Human
uucgccaccuuuuccucagcaaac

SEQ ID NO: 1272335 - RNA, 19 nt, Human
uugucuagaaucucuuuca

SEQ ID NO: 1272336 - RNA, 18 nt, Human
uuuacaggaaccuuccua

SEQ ID NO: 1272337 - RNA, 21 nt, Human
acucuggugugggucuugacg

SEQ ID NO: 1272338 - RNA, 21 nt, Human
cacuccuuauccucggccuug

SEQ ID NO: 1272339 - RNA, 25 nt, Human
cagugaauuccugauagggagacuu

SEQ ID NO: 1272340 - RNA, 21 nt, Human
cugaagccuggguccgcugcc

SEQ ID NO: 1272341 - RNA, 18 nt, Human
cugauagggagacuuggu

SEQ ID NO: 1272342 - RNA, 22 nt, Human
cuugguaaauacagucuccuuc

SEQ ID NO: 1272343 - RNA, 19 nt, Human
gcugcaccgagacucuggu

SEQ ID NO: 1272344 - RNA, 22 nt, Human
guagccacaucugaagccuggg

SEQ ID NO: 1272345 - RNA, 21 nt, Human
uaaaaacccuauguuguagcc

SEQ ID NO: 1272346 - RNA, 24 nt, Human
uauaaaaacccuauguuguagcca

SEQ ID NO: 1272347 - RNA, 18 nt, Human
uggucagugaauuccuga

SEQ ID NO: 1272348 - RNA, 21 nt, Human
aagagcuaccgggacugagcc

SEQ ID NO: 1272349 - RNA, 21 nt, Human
aaggagcugggagcgauaggc

SEQ ID NO: 1272350 - RNA, 20 nt, Human
aagugccccccaaggcuguu

SEQ ID NO: 1272351 - RNA, 22 nt, Human
aagugccccccaaggcuguugc

SEQ ID NO: 1272352 - RNA, 20 nt, Human
acagcuuccagagcuuccuu

SEQ ID NO: 1272353 - RNA, 24 nt, Human
acagcuuccagagcuuccuuccca

SEQ ID NO: 1272354 - RNA, 21 nt, Human
accccaguucccucccaaguc

SEQ ID NO: 1272355 - RNA, 25 nt, Human
accccaguucccucccaagucccag

SEQ ID NO: 1272356 - RNA, 19 nt, Human
acccgcucccuccuucucu

SEQ ID NO: 1272357 - RNA, 18 nt, Human
agccccugaccccaguuc

SEQ ID NO: 1272358 - RNA, 22 nt, Human
agccggagccggccagaggugc

SEQ ID NO: 1272359 - RNA, 21 nt, Human
agccugaggcgggcggcuggc

SEQ ID NO: 1272360 - RNA, 22 nt, Human
aggcggcagggcugagugggua

SEQ ID NO: 1272361 - RNA, 22 nt, Human
aggcggcggcuguggcggaggc

SEQ ID NO: 1272362 - RNA, 18 nt, Human
auucuuccauccuucccc

SEQ ID NO: 1272363 - RNA, 21 nt, Human
caagucccagggccugacccc

SEQ ID NO: 1272364 - RNA, 25 nt, Human
caagugccccccaaggcuguugcuc

SEQ ID NO: 1272365 - RNA, 18 nt, Human
caccacacugccaggagc

SEQ ID NO: 1272366 - RNA, 20 nt, Human
cagagcccccaugcagcccc

SEQ ID NO: 1272367 - RNA, 22 nt, Human
cagagcuuccuucccaccacac

SEQ ID NO: 1272368 - RNA, 23 nt, Human
cagggcgcgggccgggcugaagu

SEQ ID NO: 1272369 - RNA, 20 nt, Human
ccaggagcugccagagcccc

SEQ ID NO: 1272370 - RNA, 22 nt, Human
ccaggagcugccagagccccca

SEQ ID NO: 1272371 - RNA, 20 nt, Human
cccaccacacugccaggagc

SEQ ID NO: 1272372 - RNA, 25 nt, Human
cccaccacacugccaggagcugcca

SEQ ID NO: 1272373 - RNA, 20 nt, Human
cccccaugcagccccugacc

SEQ ID NO: 1272374 - RNA, 22 nt, Human
ccccgcccccugcccggccaag

SEQ ID NO: 1272375 - RNA, 22 nt, Human
ccccggcaggggucgcgggcgg

SEQ ID NO: 1272376 - RNA, 22 nt, Human
ccgcccggcuccccccgaccac

SEQ ID NO: 1272377 - RNA, 21 nt, Human
ccuaagguccauacccccgcc

SEQ ID NO: 1272378 - RNA, 19 nt, Human
ccugacccugauaucuggg

SEQ ID NO: 1272379 - RNA, 24 nt, Human
ccugacccugauaucuggggcaag

SEQ ID NO: 1272380 - RNA, 18 nt, Human
ccuuccccguuccuaagg

SEQ ID NO: 1272381 - RNA, 23 nt, Human
cgccccgcccccugcccggccaa

SEQ ID NO: 1272382 - RNA, 23 nt, Human
cgccggaauccagggcacuguuc

SEQ ID NO: 1272383 - RNA, 25 nt, Human
cggcagcggcagcgagcggcucaag

SEQ ID NO: 1272384 - RNA, 19 nt, Human
cggcccgcacgguccgugu

SEQ ID NO: 1272385 - RNA, 19 nt, Human
cggcggcagcggcagcgag

SEQ ID NO: 1272386 - RNA, 20 nt, Human
cggucgcggcggcggcggcg

SEQ ID NO: 1272387 - RNA, 19 nt, Human
cguggagauggcguugggc

SEQ ID NO: 1272388 - RNA, 24 nt, Human
cuccccccgaccaccccgcgggcc

SEQ ID NO: 1272389 - RNA, 21 nt, Human
cucccuccuucucugccgccc

SEQ ID NO: 1272390 - RNA, 21 nt, Human
cugaccccaguucccucccaa

SEQ ID NO: 1272391 - RNA, 20 nt, Human
cugccgcccggcuccccccg

SEQ ID NO: 1272392 - RNA, 18 nt, Human
cugcggcugcggcggagg

SEQ ID NO: 1272393 - RNA, 18 nt, Human
cuggggcaaggugcucgg

SEQ ID NO: 1272394 - RNA, 18 nt, Human
gagauggcguugggcacg

SEQ ID NO: 1272395 - RNA, 18 nt, Human
gagccggagccggccaga

SEQ ID NO: 1272396 - RNA, 24 nt, Human
gagcuuccuucccaccacacugcc

SEQ ID NO: 1272397 - RNA, 21 nt, Human
gauaucuggggcaaggugcuc

SEQ ID NO: 1272398 - RNA, 24 nt, Human
gcagcgagcggcucaagggcuucg

SEQ ID NO: 1272399 - RNA, 21 nt, Human
gcaggcggcagggcugagugg

SEQ ID NO: 1272400 - RNA, 18 nt, Human
gccagagcccccaugcag

SEQ ID NO: 1272401 - RNA, 20 nt, Human
gcccacggcugggccuccgg

SEQ ID NO: 1272402 - RNA, 22 nt, Human
gccccgcccccugcccggccaa

SEQ ID NO: 1272403 - RNA, 20 nt, Human
gcggaauggaggcacgcccc

SEQ ID NO: 1272404 - RNA, 18 nt, Human
gcggcagcggcagcgagc

SEQ ID NO: 1272405 - RNA, 20 nt, Human
gcggcggcggcagcggcagc

SEQ ID NO: 1272406 - RNA, 23 nt, Human
gcgggcggaguggggccgggggu

SEQ ID NO: 1272407 - RNA, 25 nt, Human
gcguuggggcgggugcgcguuccgg

SEQ ID NO: 1272408 - RNA, 20 nt, Human
gcucgccccgcccccugccc

SEQ ID NO: 1272409 - RNA, 22 nt, Human
gcugcggcggaggcugcggcgg

SEQ ID NO: 1272410 - RNA, 27 nt, Human
gcuggggcgggggcggcccgcacgguu

SEQ ID NO: 1272411 - RNA, 23 nt, Human
ggaauccagggcacuguucccuc

SEQ ID NO: 1272412 - RNA, 20 nt, Human
ggaguggggucagccaacug

SEQ ID NO: 1272413 - RNA, 24 nt, Human
ggcaggcggcagggcugagugggu

SEQ ID NO: 1272414 - RNA, 20 nt, Human
ggcagggcugaguggguagg

SEQ ID NO: 1272415 - RNA, 23 nt, Human
ggcgggggcggcccgcacggucc

SEQ ID NO: 1272416 - RNA, 18 nt, Human
ggcugcggcgggggcgga

SEQ ID NO: 1272417 - RNA, 22 nt, Human
gggccggggauagggccggggu

SEQ ID NO: 1272418 - RNA, 20 nt, Human
gggcggaguggggccggggg

SEQ ID NO: 1272419 - RNA, 20 nt, Human
gggcuucggcuuaccggucu

SEQ ID NO: 1272420 - RNA, 19 nt, Human
ggggccgcgggcggggccg

SEQ ID NO: 1272421 - RNA, 19 nt, Human
ggggccggggguggaggcg

SEQ ID NO: 1272422 - RNA, 20 nt, Human
ggucgcggcggcggcggcgg

SEQ ID NO: 1272423 - RNA, 23 nt, Human
gucgcggcggcggcggcggcagc

SEQ ID NO: 1272424 - RNA, 21 nt, Human
guggaggcggcggcuguggcg

SEQ ID NO: 1272425 - RNA, 24 nt, Human
guggggccggggguggaggcggcc

SEQ ID NO: 1272426 - RNA, 21 nt, Human
uacccgcucccuccuucucug

SEQ ID NO: 1272427 - RNA, 22 nt, Human
uaggaggccguacccgcucccu

SEQ ID NO: 1272428 - RNA, 27 nt, Human
ucagucacagcuuccagagcuuccuuc

SEQ ID NO: 1272429 - RNA, 22 nt, Human
uccauacccccgccggaaucca

SEQ ID NO: 1272430 - RNA, 23 nt, Human
ucccaagucccagggccugaccc

SEQ ID NO: 1272431 - RNA, 18 nt, Human
ucccaccacacugccagg

SEQ ID NO: 1272432 - RNA, 19 nt, Human
ucccaccacacugccagga

SEQ ID NO: 1272433 - RNA, 24 nt, Human
ucccagggccugacccugauaucu

SEQ ID NO: 1272434 - RNA, 24 nt, Human
ucccauggcaacggccgcgucacc

SEQ ID NO: 1272435 - RNA, 24 nt, Human
ucccucgcggucgcggcggcggcg

SEQ ID NO: 1272436 - RNA, 19 nt, Human
ugaaauggugugcagaggc

SEQ ID NO: 1272437 - RNA, 23 nt, Human
ugcccggccaaggccacgccggc

SEQ ID NO: 1272438 - RNA, 22 nt, Human
ugcucagucacagcuuccagag

SEQ ID NO: 1272439 - RNA, 18 nt, Human
uggcagagagagccugag

SEQ ID NO: 1272440 - RNA, 20 nt, Human
uggcggcagcuccggcucca

SEQ ID NO: 1272441 - RNA, 19 nt, Human
uggggccggggguggaggc

SEQ ID NO: 1272442 - RNA, 20 nt, Human
uggguagggcugacggggag

SEQ ID NO: 1272443 - RNA, 21 nt, Human
uuccggggguugggcaggcgc

SEQ ID NO: 1272444 - RNA, 27 nt, Human
uucucugccgcccggcuccccccgacu

SEQ ID NO: 1272445 - RNA, 19 nt, Human
uugcucagucacagcuucc

SEQ ID NO: 1272446 - RNA, 21 nt, Human
aaaacccggucauugggcugc

SEQ ID NO: 1272447 - RNA, 20 nt, Human
aaccccaacaagagggagcc

SEQ ID NO: 1272448 - RNA, 21 nt, Human
aacccggucauugggcugcag

SEQ ID NO: 1272449 - RNA, 21 nt, Human
aagggagguggguccaggcca

SEQ ID NO: 1272450 - RNA, 23 nt, Human
aaugaaaccuuccaggacuugaa

SEQ ID NO: 1272451 - RNA, 19 nt, Human
acaaagagaggaccuggac

SEQ ID NO: 1272452 - RNA, 21 nt, Human
agaaacucuagucugaaugau

SEQ ID NO: 1272453 - RNA, 18 nt, Human
agcgcugagaaguccgaa

SEQ ID NO: 1272454 - RNA, 21 nt, Human
agcuuagaaagcuaaguucuc

SEQ ID NO: 1272455 - RNA, 18 nt, Human
aggcggagcgcugagaag

SEQ ID NO: 1272456 - RNA, 19 nt, Human
aguggcauucccagugauu

SEQ ID NO: 1272457 - RNA, 22 nt, Human
aucuccucccuggcuucugcug

SEQ ID NO: 1272458 - RNA, 19 nt, Human
auucauucccuuuugccca

SEQ ID NO: 1272459 - RNA, 18 nt, Human
caagagggagcucauagc

SEQ ID NO: 1272460 - RNA, 23 nt, Human
cauugugggcuuagagaaacucu

SEQ ID NO: 1272461 - RNA, 22 nt, Human
cccaacaagagggagcucauag

SEQ ID NO: 1272462 - RNA, 23 nt, Human
ccccagguggccgggugcggugg

SEQ ID NO: 1272463 - RNA, 18 nt, Human
cccucuuccucccuuucc

SEQ ID NO: 1272464 - RNA, 18 nt, Human
cccucuuccucccuuucc

SEQ ID NO: 1272465 - RNA, 22 nt, Human
cccuuuugcccagcuuucucau

SEQ ID NO: 1272466 - RNA, 21 nt, Human
ccugggugacugaacaugauc

SEQ ID NO: 1272467 - RNA, 28 nt, Human
cucauagcccaugcuaagauaccuuguc

SEQ ID NO: 1272468 - RNA, 20 nt, Human
cuccaacuagggcccucuuc

SEQ ID NO: 1272469 - RNA, 21 nt, Human
cucccacccaggguugcugcu

SEQ ID NO: 1272470 - RNA, 22 nt, Human
cucuuuaaaaaaccugccuucu

SEQ ID NO: 1272471 - RNA, 22 nt, Human
cugaacaugaucagucggugca

SEQ ID NO: 1272472 - RNA, 20 nt, Human
cugcccuaagacuauuagaa

SEQ ID NO: 1272473 - RNA, 23 nt, Human
cuguaucuccucccuggcuucug

SEQ ID NO: 1272474 - RNA, 18 nt, Human
gaaagcuaaguucuccac

SEQ ID NO: 1272475 - RNA, 19 nt, Human
gaagaaccccaacaagagg

SEQ ID NO: 1272476 - RNA, 24 nt, Human
gaccagucucagaagaaccccaac

SEQ ID NO: 1272477 - RNA, 22 nt, Human
gagaaacucuagucugaaugau

SEQ ID NO: 1272478 - RNA, 22 nt, Human
gcccugugggguggucgauggg

SEQ ID NO: 1272479 - RNA, 19 nt, Human
gcggagcgcugagaagucc

SEQ ID NO: 1272480 - RNA, 20 nt, Human
gcucugugcccuguggggug

SEQ ID NO: 1272481 - RNA, 21 nt, Human
ggcauucccagugauucagcu

SEQ ID NO: 1272482 - RNA, 22 nt, Human
ggcucuggcagaugcgaaaacc

SEQ ID NO: 1272483 - RNA, 20 nt, Human
gggugacugaacaugaucag

SEQ ID NO: 1272484 - RNA, 24 nt, Human
gggugcgguggcucaugccuguaa

SEQ ID NO: 1272485 - RNA, 22 nt, Human
gguggccgggugcgguggcuca

SEQ ID NO: 1272486 - RNA, 24 nt, Human
gguggccgggugcgguggcucaug

SEQ ID NO: 1272487 - RNA, 18 nt, Human
guggcucaugccuguaau

SEQ ID NO: 1272488 - RNA, 18 nt, Human
uaacaaaagucugccccu

SEQ ID NO: 1272489 - RNA, 22 nt, Human
uaacaaaagucugccccuccca

SEQ ID NO: 1272490 - RNA, 20 nt, Human
uaacugaauugaaauuuaaa

SEQ ID NO: 1272491 - RNA, 19 nt, Human
uaccagggcauuugaggua

SEQ ID NO: 1272492 - RNA, 22 nt, Human
uaccuugucucauuuagaacau

SEQ ID NO: 1272493 - RNA, 18 nt, Human
uagagugacaggggcucu

SEQ ID NO: 1272494 - RNA, 26 nt, Human
ucauucccuuuugcccagcuuucuca

SEQ ID NO: 1272495 - RNA, 23 nt, Human
ucucccaauacaugcaggagccu

SEQ ID NO: 1272496 - RNA, 21 nt, Human
ucugugcccuguggggugguc

SEQ ID NO: 1272497 - RNA, 21 nt, Human
ugaacuggauaaccuuaaaua

SEQ ID NO: 1272498 - RNA, 23 nt, Human
ugaaggugcugaccucacccucc

SEQ ID NO: 1272499 - RNA, 24 nt, Human
ugaccagucucagaagaaccccaa

SEQ ID NO: 1272500 - RNA, 19 nt, Human
ugaccucacccuccugucc

SEQ ID NO: 1272501 - RNA, 24 nt, Human
ugcgaaaacccggucauugggcug

SEQ ID NO: 1272502 - RNA, 21 nt, Human
uggaauaacaaaagucugccc

SEQ ID NO: 1272503 - RNA, 20 nt, Human
uggcaagggaggugggucca

SEQ ID NO: 1272504 - RNA, 21 nt, Human
uggcagaugcgaaaacccggu

SEQ ID NO: 1272505 - RNA, 23 nt, Human
uggcagaugcgaaaacccgguca

SEQ ID NO: 1272506 - RNA, 24 nt, Human
uggccgggugcgguggcucaugcc

SEQ ID NO: 1272507 - RNA, 19 nt, Human
uggcucaugccuguaaucc

SEQ ID NO: 1272508 - RNA, 18 nt, Human
uucaucucuaaggagguu

SEQ ID NO: 1272509 - RNA, 21 nt, Human
uucugcugauggaucucucca

SEQ ID NO: 1272510 - RNA, 19 nt, Human
uugaaggugcugaccucac

SEQ ID NO: 1272511 - RNA, 19 nt, Human
uuuacuuuucuuacauuuu

SEQ ID NO: 1272512 - RNA, 20 nt, Human
uuucucaucauuuaauuugg

SEQ ID NO: 1272513 - RNA, 18 nt, Human
aaggggccugagggcagc

SEQ ID NO: 1272514 - RNA, 20 nt, Human
aaugacaagggccgcuggaa

SEQ ID NO: 1272515 - RNA, 21 nt, Human
agcaccgaggaagagagaggg

SEQ ID NO: 1272516 - RNA, 21 nt, Human
aggcagcauggaggccugggc

SEQ ID NO: 1272517 - RNA, 18 nt, Human
aucaggguuccaagugcc

SEQ ID NO: 1272518 - RNA, 18 nt, Human
cagcauggaggccugggc

SEQ ID NO: 1272519 - RNA, 19 nt, Human
cagcauggaggccugggca

SEQ ID NO: 1272520 - RNA, 24 nt, Human
cagcauggaggccugggcaugacg

SEQ ID NO: 1272521 - RNA, 25 nt, Human
caggguuccaagugccccugaguuu

SEQ ID NO: 1272522 - RNA, 21 nt, Human
ccacaaacagcaaugacaagg

SEQ ID NO: 1272523 - RNA, 21 nt, Human
ccugaguuugucauccacccu

SEQ ID NO: 1272524 - RNA, 24 nt, Human
ccugccuuucccuggaaagggcgg

SEQ ID NO: 1272525 - RNA, 24 nt, Human
ccugugaccagugaggcuuggggc

SEQ ID NO: 1272526 - RNA, 25 nt, Human
cgaggaagagagaggggcaagaugu

SEQ ID NO: 1272527 - RNA, 19 nt, Human
cuuggaucccacaaacagc

SEQ ID NO: 1272528 - RNA, 23 nt, Human
cuugggcuucacaaggggccuga

SEQ ID NO: 1272529 - RNA, 19 nt, Human
gggcuucacaaggggcccc

SEQ ID NO: 1272530 - RNA, 25 nt, Human
ggguuccaagugccccugaguuugu

SEQ ID NO: 1272531 - RNA, 24 nt, Human
gguuccaagugccccugaguuugu

SEQ ID NO: 1272532 - RNA, 19 nt, Human
gucugaaggcagcauggag

SEQ ID NO: 1272533 - RNA, 23 nt, Human
uacgucuuuucuuggaucccaca

SEQ ID NO: 1272534 - RNA, 20 nt, Human
ucccuggaaagggcggcaaa

SEQ ID NO: 1272535 - RNA, 21 nt, Human
ugacaagggccgcuggaaagc

SEQ ID NO: 1272536 - RNA, 20 nt, Human
uggaggccugggcaugacgu

SEQ ID NO: 1272537 - RNA, 20 nt, Human
ugggcaugacgucccuggcc

SEQ ID NO: 1272538 - RNA, 27 nt, Human
ugguucgcuuuuugaugaucuugggcu

SEQ ID NO: 1272539 - RNA, 22 nt, Human
ugugaucaggguuccaagugcc

SEQ ID NO: 1272540 - RNA, 18 nt, Human
uuugaugaucuugggcuu

SEQ ID NO: 1272541 - RNA, 19 nt, Human
acaauaaaguggguuucca

SEQ ID NO: 1272542 - RNA, 21 nt, Human
caacacguccuuagagagaag

SEQ ID NO: 1272543 - RNA, 22 nt, Human
cagcuggcuuuuuccauagccu

SEQ ID NO: 1272544 - RNA, 20 nt, Human
ccauagccuuuuccaccuuc

SEQ ID NO: 1272545 - RNA, 21 nt, Human
cccacuugcuguuuuccucuu

SEQ ID NO: 1272546 - RNA, 18 nt, Human
cuugcuguuuuccucuuc

SEQ ID NO: 1272547 - RNA, 18 nt, Human
gaaagagcaacacguccu

SEQ ID NO: 1272548 - RNA, 20 nt, Human
gagagaagguccuggcauag

SEQ ID NO: 1272549 - RNA, 23 nt, Human
ucagccaacagcuggcuuuuucc

SEQ ID NO: 1272550 - RNA, 19 nt, Human
uccaccuucauacagaacu

SEQ ID NO: 1272551 - RNA, 30 nt, Human
uccucuuccuccuuuuguaggacaugaaaa

SEQ ID NO: 1272552 - RNA, 21 nt, Human
uccuggcauaggaccucacaa

SEQ ID NO: 1272553 - RNA, 22 nt, Human
ucucagggcuggucugagccag

SEQ ID NO: 1272554 - RNA, 18 nt, Human
ugaaagagcaacacgucc

SEQ ID NO: 1272555 - RNA, 18 nt, Human
ugagaggguuucccacuu

SEQ ID NO: 1272556 - RNA, 18 nt, Human
uuccuccuuuuguaggac

SEQ ID NO: 1272557 - RNA, 20 nt, Human
aaguuuccauguugauggua

SEQ ID NO: 1272558 - RNA, 18 nt, Human
agaagagggaugaaggga

SEQ ID NO: 1272559 - RNA, 21 nt, Human
agugaaaggcuuuaaaaagga

SEQ ID NO: 1272560 - RNA, 18 nt, Human
augguaaauggaaaaacu

SEQ ID NO: 1272561 - RNA, 22 nt, Human
cugagcucugggacaaaaaggg

SEQ ID NO: 1272562 - RNA, 18 nt, Human
cuuagaaauucucagcuc

SEQ ID NO: 1272563 - RNA, 18 nt, Human
cuugauccugcgcaguga

SEQ ID NO: 1272564 - RNA, 18 nt, Human
gaaauucucagcucugcu

SEQ ID NO: 1272565 - RNA, 24 nt, Human
gaaauucucagcucugcucucaua

SEQ ID NO: 1272566 - RNA, 20 nt, Human
gaccaggcuucuugagcccc

SEQ ID NO: 1272567 - RNA, 25 nt, Human
gcuggcagccucugucccggcuuga

SEQ ID NO: 1272568 - RNA, 19 nt, Human
ggaaaaacuuuugagucag

SEQ ID NO: 1272569 - RNA, 18 nt, Human
uagccuggcuggcugacc

SEQ ID NO: 1272570 - RNA, 21 nt, Human
uagccuggcuggcugaccagg

SEQ ID NO: 1272571 - RNA, 22 nt, Human
uccaguggguugaagagggcuu

SEQ ID NO: 1272572 - RNA, 26 nt, Human
ugaccaggcuucuugagccccacagc

SEQ ID NO: 1272573 - RNA, 20 nt, Human
ugaugguaaauggaaaaacu

SEQ ID NO: 1272574 - RNA, 22 nt, Human
uucuugagccccacaggccucu

SEQ ID NO: 1272575 - RNA, 19 nt, Human
aaccuaggaacucaaacca

SEQ ID NO: 1272576 - RNA, 20 nt, Human
accacugcugcccugaacaa

SEQ ID NO: 1272577 - RNA, 21 nt, Human
agacagaugcccuagguccuc

SEQ ID NO: 1272578 - RNA, 20 nt, Human
aggaacucaaaccaggucuc

SEQ ID NO: 1272579 - RNA, 21 nt, Human
aggaacucaaaccaggucucc

SEQ ID NO: 1272580 - RNA, 22 nt, Human
aggggugggagacacagggggc

SEQ ID NO: 1272581 - RNA, 20 nt, Human
cacugcaggccagggggcgu

SEQ ID NO: 1272582 - RNA, 23 nt, Human
ccucugaguccccucugugcagg

SEQ ID NO: 1272583 - RNA, 24 nt, Human
ccucugugcaggccuagggguggg

SEQ ID NO: 1272584 - RNA, 21 nt, Human
cuccagacaccacugcugccc

SEQ ID NO: 1272585 - RNA, 20 nt, Human
cugaguccccucugugcagg

SEQ ID NO: 1272586 - RNA, 21 nt, Human
gaaaaggcaaagaaagcaaaa

SEQ ID NO: 1272587 - RNA, 20 nt, Human
gaagaaacuugaggcucaga

SEQ ID NO: 1272588 - RNA, 21 nt, Human
gacuuguacugugagccucag

SEQ ID NO: 1272589 - RNA, 20 nt, Human
gccuaggggugggagacaca

SEQ ID NO: 1272590 - RNA, 21 nt, Human
gcucuggaaaaggcaaagaaa

SEQ ID NO: 1272591 - RNA, 22 nt, Human
ggaaaaggcaaagaaagcaaaa

SEQ ID NO: 1272592 - RNA, 22 nt, Human
ggagacacagggggcaucgcug

SEQ ID NO: 1272593 - RNA, 21 nt, Human
ggcucagaaggacgcuaggua

SEQ ID NO: 1272594 - RNA, 26 nt, Human
gggagagacaaggagcacuuucaaaa

SEQ ID NO: 1272595 - RNA, 23 nt, Human
gugagccucaggcagggcugggg

SEQ ID NO: 1272596 - RNA, 18 nt, Human
uaggggugggagacacag

SEQ ID NO: 1272597 - RNA, 20 nt, Human
uccagacaccacugcugccc

SEQ ID NO: 1272598 - RNA, 18 nt, Human
ucucaaacuuucaucuuc

SEQ ID NO: 1272599 - RNA, 22 nt, Human
ucuccagacaccacugcugccc

SEQ ID NO: 1272600 - RNA, 26 nt, Human
ucuccagacaccacugcugcccugaa

SEQ ID NO: 1272601 - RNA, 20 nt, Human
uggaaaaggcaaagaaagca

SEQ ID NO: 1272602 - RNA, 22 nt, Human
uggaaaaggcaaagaaagcaaa

SEQ ID NO: 1272603 - RNA, 25 nt, Human
uggaaaaggcaaagaaagcaaaagu

SEQ ID NO: 1272604 - RNA, 23 nt, Human
aaauguguguuguauauauuuug

SEQ ID NO: 1272605 - RNA, 18 nt, Human
aacaaaauccacccuagc

SEQ ID NO: 1272606 - RNA, 21 nt, Human
accugaaucuugacuuugcau

SEQ ID NO: 1272607 - RNA, 18 nt, Human
caaaagaucauaaccaca

SEQ ID NO: 1272608 - RNA, 22 nt, Human
cagcaggaacacugugugaugc

SEQ ID NO: 1272609 - RNA, 20 nt, Human
caugcugucuccucucucca

SEQ ID NO: 1272610 - RNA, 22 nt, Human
cccugugauagugaaugucuuc

SEQ ID NO: 1272611 - RNA, 23 nt, Human
ccugugauagugaaugucuuccc

SEQ ID NO: 1272612 - RNA, 19 nt, Human
cuccagcaggaacacugug

SEQ ID NO: 1272613 - RNA, 20 nt, Human
cuggaggcuucaugucuugg

SEQ ID NO: 1272614 - RNA, 20 nt, Human
gcaaaucuuccaaacuggag

SEQ ID NO: 1272615 - RNA, 23 nt, Human
uagggacagcaacaaaauccacc

SEQ ID NO: 1272616 - RNA, 23 nt, Human
uagugaaugucuucccgcugccu

SEQ ID NO: 1272617 - RNA, 22 nt, Human
uccaaaagaucauaaccaccac

SEQ ID NO: 1272618 - RNA, 22 nt, Human
uccuugggauaaugccucuguc

SEQ ID NO: 1272619 - RNA, 19 nt, Human
ugauaccugaccagggccu

SEQ ID NO: 1272620 - RNA, 26 nt, Human
ugcugcuguccuuuuguaacuguuca

SEQ ID NO: 1272621 - RNA, 26 nt, Human
uggcaaaucuuccaaacuggaggcuu

SEQ ID NO: 1272622 - RNA, 19 nt, Human
uguaacgcucugcaccccc

SEQ ID NO: 1272623 - RNA, 19 nt, Human
uguaugacaguguccuugg

SEQ ID NO: 1272624 - RNA, 24 nt, Human
ugucacuguaacgcucugcacccc

SEQ ID NO: 1272625 - RNA, 25 nt, Human
uugggauaaugccucugucacugua

SEQ ID NO: 1272626 - RNA, 19 nt, Human
agaccuggcacagcuggug

SEQ ID NO: 1272627 - RNA, 21 nt, Human
cacagcuggugcacccgcagc

SEQ ID NO: 1272628 - RNA, 19 nt, Human
cacccgcagcagggaagau

SEQ ID NO: 1272629 - RNA, 19 nt, Human
ugccuggaugagaccuggc

SEQ ID NO: 1272630 - RNA, 22 nt, Human
uggugcacccgcagcagggaag

SEQ ID NO: 1272631 - RNA, 22 nt, Human
aaaugccuggcaucccaggagu

SEQ ID NO: 1272632 - RNA, 23 nt, Human
aaccaugcuggagggccccccac

SEQ ID NO: 1272633 - RNA, 21 nt, Human
aagaagcaugugaauggcuca

SEQ ID NO: 1272634 - RNA, 19 nt, Human
aagcugcuaucucguuccc

SEQ ID NO: 1272635 - RNA, 18 nt, Human
aagggccucugggcaggu

SEQ ID NO: 1272636 - RNA, 18 nt, Human
aaggggcagagguggggg

SEQ ID NO: 1272637 - RNA, 21 nt, Human
aaggggcagaggugggggcag

SEQ ID NO: 1272638 - RNA, 19 nt, Human
aagggugccuccagguagc

SEQ ID NO: 1272639 - RNA, 21 nt, Human
aaucacucaaaaucaaguuaa

SEQ ID NO: 1272640 - RNA, 18 nt, Human
acagcggaggggcaggca

SEQ ID NO: 1272641 - RNA, 22 nt, Human
accauugcccucaugggcccag

SEQ ID NO: 1272642 - RNA, 21 nt, Human
acccauuuucucccccuugag

SEQ ID NO: 1272643 - RNA, 18 nt, Human
acccuaccugcccuacac

SEQ ID NO: 1272644 - RNA, 19 nt, Human
agaacaaagcagccccuuu

SEQ ID NO: 1272645 - RNA, 24 nt, Human
agaagaacaaagcagccccuuucu

SEQ ID NO: 1272646 - RNA, 21 nt, Human
agacggugggggcggggggug

SEQ ID NO: 1272647 - RNA, 21 nt, Human
agagacggugggggcgggggg

SEQ ID NO: 1272648 - RNA, 19 nt, Human
agcccaccaagucacacca

SEQ ID NO: 1272649 - RNA, 20 nt, Human
agcugauaugucuuugacac

SEQ ID NO: 1272650 - RNA, 24 nt, Human
aggaagcggcugacccguuggcuc

SEQ ID NO: 1272651 - RNA, 23 nt, Human
aggagaaaagcuucuuggaacug

SEQ ID NO: 1272652 - RNA, 24 nt, Human
aggagacaugcacgaugggucucu

SEQ ID NO: 1272653 - RNA, 18 nt, Human
agggagagacgguggggg

SEQ ID NO: 1272654 - RNA, 28 nt, Human
agggagagacggugggggccaggagccu

SEQ ID NO: 1272655 - RNA, 26 nt, Human
agggagagacggugggggcggggggu

SEQ ID NO: 1272656 - RNA, 20 nt, Human
aggggcagaggugggggcag

SEQ ID NO: 1272657 - RNA, 21 nt, Human
agugaagggugggggugcugg

SEQ ID NO: 1272658 - RNA, 22 nt, Human
auauggacaaaucacucaaaau

SEQ ID NO: 1272659 - RNA, 19 nt, Human
augaaaugccuggcauccc

SEQ ID NO: 1272660 - RNA, 21 nt, Human
caaaucacucaaaaucaaguu

SEQ ID NO: 1272661 - RNA, 23 nt, Human
caacagagaccccugcucaggga

SEQ ID NO: 1272662 - RNA, 21 nt, Human
caacccggggcugggggcuga

SEQ ID NO: 1272663 - RNA, 24 nt, Human
caacccggggcugggggcugacag

SEQ ID NO: 1272664 - RNA, 20 nt, Human
caaggucagcagcaugcugc

SEQ ID NO: 1272665 - RNA, 19 nt, Human
caagugccaggaugagcug

SEQ ID NO: 1272666 - RNA, 19 nt, Human
caauguauuccagcagaau

SEQ ID NO: 1272667 - RNA, 25 nt, Human
cacaacccccgcuccccacggacug

SEQ ID NO: 1272668 - RNA, 25 nt, Human
cacacacccuaccugccccccugag

SEQ ID NO: 1272669 - RNA, 23 nt, Human
cacaccuugacuuggccuccagg

SEQ ID NO: 1272670 - RNA, 18 nt, Human
cacauguggcuaccgagc

SEQ ID NO: 1272671 - RNA, 23 nt, Human
caccccaaaugacccuccccaga

SEQ ID NO: 1272672 - RNA, 19 nt, Human
cacccccaccagcccaccc

SEQ ID NO: 1272673 - RNA, 22 nt, Human
cacccucucuucccaaggucag

SEQ ID NO: 1272674 - RNA, 22 nt, Human
cagaggugggggcagucaacag

SEQ ID NO: 1272675 - RNA, 23 nt, Human
cagagucagcaaccaugcuggag

SEQ ID NO: 1272676 - RNA, 19 nt, Human
cagcacccccaccagccca

SEQ ID NO: 1272677 - RNA, 24 nt, Human
cagccaggcucuggggaacuccag

SEQ ID NO: 1272678 - RNA, 18 nt, Human
cagcccacccucucuucc

SEQ ID NO: 1272679 - RNA, 23 nt, Human
cagggcaauguauuccagcagaa

SEQ ID NO: 1272680 - RNA, 18 nt, Human
caggggcuuggccauguc

SEQ ID NO: 1272681 - RNA, 21 nt, Human
caguccccggcagguuuggcc

SEQ ID NO: 1272682 - RNA, 25 nt, Human
caguguccacagguugauuugcuug

SEQ ID NO: 1272683 - RNA, 20 nt, Human
caucaacucuccugucccuu

SEQ ID NO: 1272684 - RNA, 24 nt, Human
ccaaaugacccuccccagagcugc

SEQ ID NO: 1272685 - RNA, 22 nt, Human
ccacagguugauuugcuugugu

SEQ ID NO: 1272686 - RNA, 19 nt, Human
ccacauguggcuaccgagc

SEQ ID NO: 1272687 - RNA, 21 nt, Human
ccaccccaaaugacccucccc

SEQ ID NO: 1272688 - RNA, 19 nt, Human
ccacccucucuucccaagg

SEQ ID NO: 1272689 - RNA, 19 nt, Human
ccagcacccccaccagccc

SEQ ID NO: 1272690 - RNA, 19 nt, Human
ccagcccaucccaucauca

SEQ ID NO: 1272691 - RNA, 20 nt, Human
ccauuucuuugccugggugg

SEQ ID NO: 1272692 - RNA, 22 nt, Human
cccaaaugacccuccccagagc

SEQ ID NO: 1272693 - RNA, 18 nt, Human
ccccaaaugacccucccc

SEQ ID NO: 1272694 - RNA, 24 nt, Human
ccccaaaugacccuccccagagcu

SEQ ID NO: 1272695 - RNA, 20 nt, Human
ccccaccagcccacccucuc

SEQ ID NO: 1272696 - RNA, 21 nt, Human
cccccuugagaccugccugau

SEQ ID NO: 1272697 - RNA, 22 nt, Human
ccccuugagaccugccugauuu

SEQ ID NO: 1272698 - RNA, 21 nt, Human
cccgagcccaccaagucacac

SEQ ID NO: 1272699 - RNA, 22 nt, Human
cccggagcacaggagggcucug

SEQ ID NO: 1272700 - RNA, 19 nt, Human
cccuaccugcccuacacuc

SEQ ID NO: 1272701 - RNA, 25 nt, Human
cccugguguguggugugacacaccu

SEQ ID NO: 1272702 - RNA, 20 nt, Human
ccgaaggaaagaaccgccac

SEQ ID NO: 1272703 - RNA, 23 nt, Human
ccgagcccaccaagucacaccag

SEQ ID NO: 1272704 - RNA, 22 nt, Human
ccuccagguagcaaaggcccaa

SEQ ID NO: 1272705 - RNA, 22 nt, Human
ccucccagccacgugccagccc

SEQ ID NO: 1272706 - RNA, 20 nt, Human
ccucccauuucuuugccugg

SEQ ID NO: 1272707 - RNA, 21 nt, Human
ccucccauuucuuugccuggg

SEQ ID NO: 1272708 - RNA, 24 nt, Human
ccucugggcaggugaugcccaugu

SEQ ID NO: 1272709 - RNA, 22 nt, Human
ccugcagcuggagcuacccuac

SEQ ID NO: 1272710 - RNA, 21 nt, Human
ccugccguugcccgagcccac

SEQ ID NO: 1272711 - RNA, 22 nt, Human
ccugucagccucaccugccacc

SEQ ID NO: 1272712 - RNA, 19 nt, Human
cgccacaggccagggagcu

SEQ ID NO: 1272713 - RNA, 20 nt, Human
cuccagcacccccaccagcc

SEQ ID NO: 1272714 - RNA, 24 nt, Human
cuccagcacccccaccagcccacc

SEQ ID NO: 1272715 - RNA, 23 nt, Human
cuccuccagcacccccaccagcc

SEQ ID NO: 1272716 - RNA, 21 nt, Human
cucuauggaggcccauuccua

SEQ ID NO: 1272717 - RNA, 24 nt, Human
cugaugggcagguggcugccucuc

SEQ ID NO: 1272718 - RNA, 19 nt, Human
cugcugggugcuggcugca

SEQ ID NO: 1272719 - RNA, 19 nt, Human
cuguccccgcaagcugaac

SEQ ID NO: 1272720 - RNA, 20 nt, Human
cuucacaacccccgcucccc

SEQ ID NO: 1272721 - RNA, 18 nt, Human
gaaaagcuucuuggaacu

SEQ ID NO: 1272722 - RNA, 24 nt, Human
gaaggugacuuugaaggcuuuuuu

SEQ ID NO: 1272723 - RNA, 19 nt, Human
gacacaccuugacuuggcc

SEQ ID NO: 1272724 - RNA, 22 nt, Human
gagaccugccugauuuggauaa

SEQ ID NO: 1272725 - RNA, 22 nt, Human
gagguccuugcccuggugugug

SEQ ID NO: 1272726 - RNA, 20 nt, Human
gcagccccuuucuguccuug

SEQ ID NO: 1272727 - RNA, 19 nt, Human
gcagcguauuccuuuucag

SEQ ID NO: 1272728 - RNA, 18 nt, Human
gcaggcagcacuggaaug

SEQ ID NO: 1272729 - RNA, 18 nt, Human
gccccagucagaaggccc

SEQ ID NO: 1272730 - RNA, 21 nt, Human
gccccuuucuguccuugggag

SEQ ID NO: 1272731 - RNA, 21 nt, Human
gcgcggcugugagggaaugag

SEQ ID NO: 1272732 - RNA, 24 nt, Human
gcugaugggcagguggcugccucu

SEQ ID NO: 1272733 - RNA, 21 nt, Human
gcuuguugccccuggggcugg

SEQ ID NO: 1272734 - RNA, 21 nt, Human
ggaaaggggcagagguggggg

SEQ ID NO: 1272735 - RNA, 23 nt, Human
ggaagcagcucagcccugcagcu

SEQ ID NO: 1272736 - RNA, 20 nt, Human
ggagccacaucaagccacca

SEQ ID NO: 1272737 - RNA, 22 nt, Human
ggcagagaucagagcugagggg

SEQ ID NO: 1272738 - RNA, 24 nt, Human
ggcagcgcggcugugagggaauga

SEQ ID NO: 1272739 - RNA, 19 nt, Human
gggcagaggugggggcagu

SEQ ID NO: 1272740 - RNA, 23 nt, Human
ggugucugcuuuugcagcuaggu

SEQ ID NO: 1272741 - RNA, 21 nt, Human
ggugugugugugugugugugu

SEQ ID NO: 1272742 - RNA, 24 nt, Human
guauuccaacacaggccugucuau

SEQ ID NO: 1272743 - RNA, 24 nt, Human
guauuccagcagaaugaacacucu

SEQ ID NO: 1272744 - RNA, 20 nt, Human
gucaaaugagguccuuuuga

SEQ ID NO: 1272745 - RNA, 25 nt, Human
gugcuggcugcauggacacagcugc

SEQ ID NO: 1272746 - RNA, 20 nt, Human
gugugugugugugugugugu

SEQ ID NO: 1272747 - RNA, 21 nt, Human
gugugugugugugugugugug

SEQ ID NO: 1272748 - RNA, 21 nt, Human
gugugugugugugugugugug

SEQ ID NO: 1272749 - RNA, 21 nt, Human
gugugugugugugugugugug

SEQ ID NO: 1272750 - RNA, 22 nt, Human
guucuucuucccuuucaauugc

SEQ ID NO: 1272751 - RNA, 30 nt, Human
uaaaacgggugugugugugugugugugugg

SEQ ID NO: 1272752 - RNA, 23 nt, Human
uaacuaaaacaaauaaaaaauca

SEQ ID NO: 1272753 - RNA, 23 nt, Human
uaacuauuuccuugucagccucc

SEQ ID NO: 1272754 - RNA, 20 nt, Human
uaacucagccacacgaguga

SEQ ID NO: 1272755 - RNA, 18 nt, Human
uaauuuccaucaacucuc

SEQ ID NO: 1272756 - RNA, 21 nt, Human
uacagcagggccaaauugaga

SEQ ID NO: 1272757 - RNA, 21 nt, Human
uacugaggaccauugcccuca

SEQ ID NO: 1272758 - RNA, 24 nt, Human
uagacgauagucguuguucuucuu

SEQ ID NO: 1272759 - RNA, 24 nt, Human
uauuuccauauggacaaaucacuc

SEQ ID NO: 1272760 - RNA, 20 nt, Human
ucaaaaaaaaaaaaaaaaaa

SEQ ID NO: 1272761 - RNA, 22 nt, Human
ucaaaaaaaaaaaaaaaaaaaa

SEQ ID NO: 1272762 - RNA, 23 nt, Human
ucaaaaaaaaaaaaaaaaaaaaa

SEQ ID NO: 1272763 - RNA, 23 nt, Human
ucaaauagauccggaacaccuau

SEQ ID NO: 1272764 - RNA, 24 nt, Human
ucacaacccccgcuccccacggac

SEQ ID NO: 1272765 - RNA, 24 nt, Human
ucagcaaaccaagguuugcucucu

SEQ ID NO: 1272766 - RNA, 23 nt, Human
ucagcagcaugcugcuucaggcc

SEQ ID NO: 1272767 - RNA, 20 nt, Human
ucagccucaccugccaccuc

SEQ ID NO: 1272768 - RNA, 25 nt, Human
ucaguccccaguugaguacuguggu

SEQ ID NO: 1272769 - RNA, 21 nt, Human
ucauagcugcuucaaguccaa

SEQ ID NO: 1272770 - RNA, 19 nt, Human
uccaaagugcucacaacgg

SEQ ID NO: 1272771 - RNA, 18 nt, Human
uccagguagcaaaggccc

SEQ ID NO: 1272772 - RNA, 21 nt, Human
ucccaaggucagcagcaugcu

SEQ ID NO: 1272773 - RNA, 19 nt, Human
ucccacgcccucacccucc

SEQ ID NO: 1272774 - RNA, 19 nt, Human
ucccagcaaagcgaggggg

SEQ ID NO: 1272775 - RNA, 21 nt, Human
ucccggagcacaggagggcuc

SEQ ID NO: 1272776 - RNA, 24 nt, Human
ucccggagcacaggagggcucugc

SEQ ID NO: 1272777 - RNA, 23 nt, Human
ucccuggaaaggggcagaggugg

SEQ ID NO: 1272778 - RNA, 27 nt, Human
ucccuggagaugagguccuugcccugg

SEQ ID NO: 1272779 - RNA, 24 nt, Human
uccucccuggaaaggggcagaggu

SEQ ID NO: 1272780 - RNA, 21 nt, Human
uccuugggagaaaaccuguuc

SEQ ID NO: 1272781 - RNA, 20 nt, Human
uccuugucagccucccaagc

SEQ ID NO: 1272782 - RNA, 24 nt, Human
ucuacucucaaaaaaaaaaaaaaa

SEQ ID NO: 1272783 - RNA, 23 nt, Human
ucucuugggcucaugaggcugua

SEQ ID NO: 1272784 - RNA, 18 nt, Human
ucugguagccacucacuu

SEQ ID NO: 1272785 - RNA, 23 nt, Human
ugaaagcagaaaaagcacugaga

SEQ ID NO: 1272786 - RNA, 18 nt, Human
ugaagggugggggugcug

SEQ ID NO: 1272787 - RNA, 22 nt, Human
ugaagggugggggugcuggcca

SEQ ID NO: 1272788 - RNA, 18 nt, Human
ugacuuccuccuguuccc

SEQ ID NO: 1272789 - RNA, 21 nt, Human
ugacuuggccuccaggcccag

SEQ ID NO: 1272790 - RNA, 22 nt, Human
ugcaauggccacagugauggcc

SEQ ID NO: 1272791 - RNA, 23 nt, Human
ugcagaugcagggccgggcagcu

SEQ ID NO: 1272792 - RNA, 20 nt, Human
ugcauuuguggcacuuccuc

SEQ ID NO: 1272793 - RNA, 18 nt, Human
ugcugggugcuggcugca

SEQ ID NO: 1272794 - RNA, 21 nt, Human
uggaauggaaaucacuaagua

SEQ ID NO: 1272795 - RNA, 20 nt, Human
uggacacagcugcugcccag

SEQ ID NO: 1272796 - RNA, 21 nt, Human
uggaggcccauuccuaaaggg

SEQ ID NO: 1272797 - RNA, 21 nt, Human
uggccuccaggcccagcugga

SEQ ID NO: 1272798 - RNA, 22 nt, Human
uggcuaauuggcaacccggggc

SEQ ID NO: 1272799 - RNA, 21 nt, Human
uggcucauuucaaaauguuug

SEQ ID NO: 1272800 - RNA, 18 nt, Human
ugggcaggggacuggagg

SEQ ID NO: 1272801 - RNA, 20 nt, Human
uggggacagcggaggggcag

SEQ ID NO: 1272802 - RNA, 22 nt, Human
uggggacagcggaggggcaggc

SEQ ID NO: 1272803 - RNA, 18 nt, Human
ugggugguggugaccaug

SEQ ID NO: 1272804 - RNA, 25 nt, Human
ugguaaaacgggugugugugugugu

SEQ ID NO: 1272805 - RNA, 22 nt, Human
uggugugggggaagcacggagu

SEQ ID NO: 1272806 - RNA, 21 nt, Human
ugucuggcuccuuugucccca

SEQ ID NO: 1272807 - RNA, 23 nt, Human
ugugagcgggcgcccaccguucc

SEQ ID NO: 1272808 - RNA, 18 nt, Human
uguggcacuuccucugug

SEQ ID NO: 1272809 - RNA, 23 nt, Human
ugugugcaggagcucucuggcua

SEQ ID NO: 1272810 - RNA, 18 nt, Human
ugugugugugugugugug

SEQ ID NO: 1272811 - RNA, 18 nt, Human
ugugugugugugugugug

SEQ ID NO: 1272812 - RNA, 18 nt, Human
ugugugugugugugugug

SEQ ID NO: 1272813 - RNA, 18 nt, Human
ugugugugugugugugug

SEQ ID NO: 1272814 - RNA, 18 nt, Human
ugugugugugugugugug

SEQ ID NO: 1272815 - RNA, 18 nt, Human
ugugugugugugugugug

SEQ ID NO: 1272816 - RNA, 18 nt, Human
ugugugugugugugugug

SEQ ID NO: 1272817 - RNA, 18 nt, Human
ugugugugugugugugug

SEQ ID NO: 1272818 - RNA, 18 nt, Human
ugugugugugugugugug

SEQ ID NO: 1272819 - RNA, 18 nt, Human
ugugugugugugugugug

SEQ ID NO: 1272820 - RNA, 18 nt, Human
ugugugugugugugugug

SEQ ID NO: 1272821 - RNA, 18 nt, Human
ugugugugugugugugug

SEQ ID NO: 1272822 - RNA, 18 nt, Human
ugugugugugugugugug

SEQ ID NO: 1272823 - RNA, 18 nt, Human
ugugugugugugugugug

SEQ ID NO: 1272824 - RNA, 18 nt, Human
ugugugugugugugugug

SEQ ID NO: 1272825 - RNA, 21 nt, Human
ugugugugugugugugugugu

SEQ ID NO: 1272826 - RNA, 21 nt, Human
ugugugugugugugugugugu

SEQ ID NO: 1272827 - RNA, 21 nt, Human
ugugugugugugugugugugu

SEQ ID NO: 1272828 - RNA, 21 nt, Human
ugugugugugugugugugugu

SEQ ID NO: 1272829 - RNA, 21 nt, Human
ugugugugugugugugugugu

SEQ ID NO: 1272830 - RNA, 21 nt, Human
ugugugugugugugugugugu

SEQ ID NO: 1272831 - RNA, 21 nt, Human
ugugugugugugugugugugu

SEQ ID NO: 1272832 - RNA, 21 nt, Human
ugugugugugugugugugugu

SEQ ID NO: 1272833 - RNA, 21 nt, Human
ugugugugugugugugugugu

SEQ ID NO: 1272834 - RNA, 21 nt, Human
ugugugugugugugugugugu

SEQ ID NO: 1272835 - RNA, 21 nt, Human
ugugugugugugugugugugu

SEQ ID NO: 1272836 - RNA, 21 nt, Human
ugugugugugugugugugugu

SEQ ID NO: 1272837 - RNA, 21 nt, Human
ugugugugugugugugugugu

SEQ ID NO: 1272838 - RNA, 21 nt, Human
ugugugugugugugugugugu

SEQ ID NO: 1272839 - RNA, 21 nt, Human
ugugugugugugugugugugu

SEQ ID NO: 1272840 - RNA, 21 nt, Human
ugugugugugugugugugugu

SEQ ID NO: 1272841 - RNA, 21 nt, Human
ugugugugugugugugugugu

SEQ ID NO: 1272842 - RNA, 21 nt, Human
ugugugugugugugugugugu

SEQ ID NO: 1272843 - RNA, 21 nt, Human
ugugugugugugugugugugu

SEQ ID NO: 1272844 - RNA, 21 nt, Human
ugugugugugugugugugugu

SEQ ID NO: 1272845 - RNA, 21 nt, Human
ugugugugugugugugugugu

SEQ ID NO: 1272846 - RNA, 21 nt, Human
ugugugugugugugugugugu

SEQ ID NO: 1272847 - RNA, 21 nt, Human
ugugugugugugugugugugu

SEQ ID NO: 1272848 - RNA, 21 nt, Human
ugugugugugugugugugugu

SEQ ID NO: 1272849 - RNA, 21 nt, Human
ugugugugugugugugugugu

SEQ ID NO: 1272850 - RNA, 21 nt, Human
ugugugugugugugugugugu

SEQ ID NO: 1272851 - RNA, 21 nt, Human
ugugugugugugugugugugu

SEQ ID NO: 1272852 - RNA, 21 nt, Human
ugugugugugugugugugugu

SEQ ID NO: 1272853 - RNA, 22 nt, Human
ugugugugugugugugugugug

SEQ ID NO: 1272854 - RNA, 22 nt, Human
ugugugugugugugugugugug

SEQ ID NO: 1272855 - RNA, 22 nt, Human
ugugugugugugugugugugug

SEQ ID NO: 1272856 - RNA, 22 nt, Human
ugugugugugugugugugugug

SEQ ID NO: 1272857 - RNA, 22 nt, Human
ugugugugugugugugugugug

SEQ ID NO: 1272858 - RNA, 22 nt, Human
ugugugugugugugugugugug

SEQ ID NO: 1272859 - RNA, 22 nt, Human
ugugugugugugugugugugug

SEQ ID NO: 1272860 - RNA, 22 nt, Human
ugugugugugugugugugugug

SEQ ID NO: 1272861 - RNA, 22 nt, Human
ugugugugugugugugugugug

SEQ ID NO: 1272862 - RNA, 22 nt, Human
ugugugugugugugugugugug

SEQ ID NO: 1272863 - RNA, 22 nt, Human
ugugugugugugugugugugug

SEQ ID NO: 1272864 - RNA, 19 nt, Human
uucccuggagaugaggucc

SEQ ID NO: 1272865 - RNA, 20 nt, Human
uucccuggagaugagguccu

SEQ ID NO: 1272866 - RNA, 21 nt, Human
uuccugacgcugaugggcagg

SEQ ID NO: 1272867 - RNA, 22 nt, Human
uuccugccccagucagaaggcc

SEQ ID NO: 1272868 - RNA, 20 nt, Human
uuugaaggcuuuuuucccca

SEQ ID NO: 1272869 - RNA, 26 nt, Human
uuugcagcguauuccuuuucagaugc

SEQ ID NO: 1272870 - RNA, 21 nt, Human
ccagggccucagugccuggcc

SEQ ID NO: 1272871 - RNA, 21 nt, Human
ccugccccugggcaccccagc

SEQ ID NO: 1272872 - RNA, 18 nt, Human
cgggccggcccugccccu

SEQ ID NO: 1272873 - RNA, 18 nt, Human
gcagccaaugcaggcccc

SEQ ID NO: 1272874 - RNA, 20 nt, Human
gcccugccccugggcacccc

SEQ ID NO: 1272875 - RNA, 21 nt, Human
gccucuguccuuguucucugc

SEQ ID NO: 1272876 - RNA, 18 nt, Human
gcgggccggcccugcccc

SEQ ID NO: 1272877 - RNA, 25 nt, Human
ucuccagggccucagugccuggccu

SEQ ID NO: 1272878 - RNA, 20 nt, Human
ucuguccuuguucucugcuu

SEQ ID NO: 1272879 - RNA, 25 nt, Human
ucugugugugugagcaugagugugu

SEQ ID NO: 1272880 - RNA, 20 nt, Human
uggccucuguccuuguucuc

SEQ ID NO: 1272881 - RNA, 21 nt, Human
uggccucuguccuuguucucu

SEQ ID NO: 1272882 - RNA, 24 nt, Human
uggccucuguccuuguucucugcu

SEQ ID NO: 1272883 - RNA, 21 nt, Human
uggcgggccggcccugccccu

SEQ ID NO: 1272884 - RNA, 24 nt, Human
uggggggguggccacacagcucuc

SEQ ID NO: 1272885 - RNA, 19 nt, Human
ugguacaauguggacacuu

SEQ ID NO: 1272886 - RNA, 27 nt, Human
uggugugccgggggcaagguugggggg

SEQ ID NO: 1272887 - RNA, 26 nt, Human
ugugagcaugagugugugcgugugug

SEQ ID NO: 1272888 - RNA, 19 nt, Human
ugugcaaguggaacagcug

SEQ ID NO: 1272889 - RNA, 19 nt, Human
ugugccgggggcaagguug

SEQ ID NO: 1272890 - RNA, 21 nt, Human
ugugugugagcaugagugugu

SEQ ID NO: 1272891 - RNA, 23 nt, Human
ugugugugagcaugagugugugc

SEQ ID NO: 1272892 - RNA, 22 nt, Human
uucucugcucauccuugcagcc

SEQ ID NO: 1272893 - RNA, 18 nt, Human
aaacacacagagaccagc

SEQ ID NO: 1272894 - RNA, 22 nt, Human
aaggagcauuccaggaggaggg

SEQ ID NO: 1272895 - RNA, 20 nt, Human
aaggggugaggauggggcug

SEQ ID NO: 1272896 - RNA, 21 nt, Human
aaggggugaggauggggcugu

SEQ ID NO: 1272897 - RNA, 22 nt, Human
aaugagugcaggcaacaagagg

SEQ ID NO: 1272898 - RNA, 25 nt, Human
acacacaaacacacgcacacuccac

SEQ ID NO: 1272899 - RNA, 25 nt, Human
acacacacacaaacacacgcacagu

SEQ ID NO: 1272900 - RNA, 23 nt, Human
acacacacacacacacacaaaca

SEQ ID NO: 1272901 - RNA, 19 nt, Human
acacugacacccacauccc

SEQ ID NO: 1272902 - RNA, 21 nt, Human
acagacacugacaagucacca

SEQ ID NO: 1272903 - RNA, 21 nt, Human
acccugagggcugacccugaa

SEQ ID NO: 1272904 - RNA, 22 nt, Human
accugggggccacauguaugca

SEQ ID NO: 1272905 - RNA, 19 nt, Human
acuaaaaaaacaaccccaa

SEQ ID NO: 1272906 - RNA, 27 nt, Human
agacagacagcaaggcaaaggggaccc

SEQ ID NO: 1272907 - RNA, 25 nt, Human
agacagcaaggcaaaggggugagga

SEQ ID NO: 1272908 - RNA, 21 nt, Human
agacuggcucuacucaaacua

SEQ ID NO: 1272909 - RNA, 21 nt, Human
agagaggcaaauggggaacag

SEQ ID NO: 1272910 - RNA, 22 nt, Human
agaggugucaggcccaucucug

SEQ ID NO: 1272911 - RNA, 26 nt, Human
agcauccccccauccccccuccaccu

SEQ ID NO: 1272912 - RNA, 19 nt, Human
agccaacauguacugagca

SEQ ID NO: 1272913 - RNA, 23 nt, Human
aggaagcacccagguggugccag

SEQ ID NO: 1272914 - RNA, 23 nt, Human
aggaggagggggcuuggucuuca

SEQ ID NO: 1272915 - RNA, 24 nt, Human
aggcaacaagagggcaaggggugg

SEQ ID NO: 1272916 - RNA, 28 nt, Human
aggcacacacagacacagacacugacaa

SEQ ID NO: 1272917 - RNA, 19 nt, Human
aggcuucacucagcacccu

SEQ ID NO: 1272918 - RNA, 19 nt, Human
agggcaagggguggggugg

SEQ ID NO: 1272919 - RNA, 19 nt, Human
agggcaguccuauccuagg

SEQ ID NO: 1272920 - RNA, 19 nt, Human
agggcugacccugaacacc

SEQ ID NO: 1272921 - RNA, 19 nt, Human
aggggcuuucccagagcac

SEQ ID NO: 1272922 - RNA, 22 nt, Human
agggggccaggaaggagggcag

SEQ ID NO: 1272923 - RNA, 24 nt, Human
agggggccaggaaggagggcaguc

SEQ ID NO: 1272924 - RNA, 21 nt, Human
agggugccuugggaaccccaa

SEQ ID NO: 1272925 - RNA, 20 nt, Human
auccccccauccccccucca

SEQ ID NO: 1272926 - RNA, 22 nt, Human
caaaaugccucagucacccuga

SEQ ID NO: 1272927 - RNA, 21 nt, Human
caaacacacagagaccagcac

SEQ ID NO: 1272928 - RNA, 21 nt, Human
caacaagagggcaaggggugg

SEQ ID NO: 1272929 - RNA, 24 nt, Human
caacacacagacacugacacacca

SEQ ID NO: 1272930 - RNA, 19 nt, Human
caaggcaaaggggugagga

SEQ ID NO: 1272931 - RNA, 23 nt, Human
caaggcagggcugucugcaccca

SEQ ID NO: 1272932 - RNA, 21 nt, Human
caagggagacaagucuccccu

SEQ ID NO: 1272933 - RNA, 21 nt, Human
cacacacaaacacacgcacac

SEQ ID NO: 1272934 - RNA, 29 nt, Human
cacacacacaaacacacgcacacuccaca

SEQ ID NO: 1272935 - RNA, 20 nt, Human
cacacacacacacacacaca

SEQ ID NO: 1272936 - RNA, 19 nt, Human
cacacgcacacuccacaca

SEQ ID NO: 1272937 - RNA, 24 nt, Human
cacacgcacacuccacacaucaca

SEQ ID NO: 1272938 - RNA, 19 nt, Human
cacagacacugacaaguca

SEQ ID NO: 1272939 - RNA, 21 nt, Human
cacagacacugacaagucacc

SEQ ID NO: 1272940 - RNA, 22 nt, Human
cacccaccugcuggcacacaca

SEQ ID NO: 1272941 - RNA, 18 nt, Human
cacugagaccuccagcag

SEQ ID NO: 1272942 - RNA, 22 nt, Human
cagacagcaaggcaaaggggug

SEQ ID NO: 1272943 - RNA, 18 nt, Human
cagcaacaucuauaacau

SEQ ID NO: 1272944 - RNA, 24 nt, Human
cagcagcauccccccauccccccu

SEQ ID NO: 1272945 - RNA, 22 nt, Human
cagccccuucccucccugaccc

SEQ ID NO: 1272946 - RNA, 20 nt, Human
cagcuuuauugauagaacaa

SEQ ID NO: 1272947 - RNA, 20 nt, Human
caggauagcccagcugagac

SEQ ID NO: 1272948 - RNA, 23 nt, Human
cagggaaaaggagaaugaaugag

SEQ ID NO: 1272949 - RNA, 20 nt, Human
cagggcugucugcacccacu

SEQ ID NO: 1272950 - RNA, 21 nt, Human
caggggcagugacaagcggug

SEQ ID NO: 1272951 - RNA, 22 nt, Human
cagggugccuugggaaccccaa

SEQ ID NO: 1272952 - RNA, 24 nt, Human
caguuguuuggcaggagaccucag

SEQ ID NO: 1272953 - RNA, 27 nt, Human
caucaacacacagacacugacacacca

SEQ ID NO: 1272954 - RNA, 23 nt, Human
cauccccccauccccccuccacc

SEQ ID NO: 1272955 - RNA, 22 nt, Human
cauccccccuccaccuugugcc

SEQ ID NO: 1272956 - RNA, 19 nt, Human
cauccucaaggcagggcug

SEQ ID NO: 1272957 - RNA, 31 nt, Human
cauccucacucugacagccugagccaggggg

SEQ ID NO: 1272958 - RNA, 19 nt, Human
cauguacugagcaccuuua

SEQ ID NO: 1272959 - RNA, 29 nt, Human
ccaacacacacacacacacacacaaacac

SEQ ID NO: 1272960 - RNA, 18 nt, Human
ccacaucccccacccacc

SEQ ID NO: 1272961 - RNA, 23 nt, Human
ccagcagcauccccccauccccc

SEQ ID NO: 1272962 - RNA, 19 nt, Human
ccaggaaggagggcagucc

SEQ ID NO: 1272963 - RNA, 21 nt, Human
cccaacacacacacacacaca

SEQ ID NO: 1272964 - RNA, 29 nt, Human
cccacugagaccuccagcagcaucccccc

SEQ ID NO: 1272965 - RNA, 19 nt, Human
cccaggucaagccauccuc

SEQ ID NO: 1272966 - RNA, 28 nt, Human
ccccaacacacacacacacacacacaaa

SEQ ID NO: 1272967 - RNA, 19 nt, Human
ccccaccggcacccugggg

SEQ ID NO: 1272968 - RNA, 19 nt, Human
ccccacucugggcuucagc

SEQ ID NO: 1272969 - RNA, 18 nt, Human
ccccagcacccugagggc

SEQ ID NO: 1272970 - RNA, 19 nt, Human
ccccagcgagggcacagag

SEQ ID NO: 1272971 - RNA, 24 nt, Human
ccccagggcuguaguacuuggcuc

SEQ ID NO: 1272972 - RNA, 26 nt, Human
cccccauccccccuccaccuugugcc

SEQ ID NO: 1272973 - RNA, 18 nt, Human
ccccccauccccccucca

SEQ ID NO: 1272974 - RNA, 19 nt, Human
ccccccuccaccuugugcc

SEQ ID NO: 1272975 - RNA, 23 nt, Human
cccccggaguccuuuucaccaac

SEQ ID NO: 1272976 - RNA, 18 nt, Human
ccccuucccucccugacc

SEQ ID NO: 1272977 - RNA, 20 nt, Human
cccuccaccuugugcccuuc

SEQ ID NO: 1272978 - RNA, 26 nt, Human
ccuaggagccugucugugcucccaag

SEQ ID NO: 1272979 - RNA, 23 nt, Human
ccucugagggaagcaggcacagg

SEQ ID NO: 1272980 - RNA, 25 nt, Human
ccugagccaggggcuuucccagagc

SEQ ID NO: 1272981 - RNA, 19 nt, Human
ccugggcuggggauaaagg

SEQ ID NO: 1272982 - RNA, 19 nt, Human
ccuggucuccccuggcggg

SEQ ID NO: 1272983 - RNA, 22 nt, Human
ccuugggccacuccccuucccc

SEQ ID NO: 1272984 - RNA, 18 nt, Human
cggagcagccaggguugc

SEQ ID NO: 1272985 - RNA, 18 nt, Human
cuacucaaacuagcugug

SEQ ID NO: 1272986 - RNA, 30 nt, Human
cucccaagacuggcucuacucaaacuagcc

SEQ ID NO: 1272987 - RNA, 21 nt, Human
cuccccuggcgggggucacuc

SEQ ID NO: 1272988 - RNA, 21 nt, Human
cuccccuuccccacucugggc

SEQ ID NO: 1272989 - RNA, 20 nt, Human
cucccugacccuucuccugg

SEQ ID NO: 1272990 - RNA, 20 nt, Human
cuccugggcuggggauaaag

SEQ ID NO: 1272991 - RNA, 22 nt, Human
cuccugggcuggggauaaaggc

SEQ ID NO: 1272992 - RNA, 19 nt, Human
cugacccagagggcgaggc

SEQ ID NO: 1272993 - RNA, 23 nt, Human
cugauacagagaugcuggcucac

SEQ ID NO: 1272994 - RNA, 25 nt, Human
cugcgcuccaguccaauuaacucag

SEQ ID NO: 1272995 - RNA, 22 nt, Human
cugcugaggaacacacaaacac

SEQ ID NO: 1272996 - RNA, 18 nt, Human
cuggcccccggaguccuu

SEQ ID NO: 1272997 - RNA, 18 nt, Human
cugucggagcagccaggg

SEQ ID NO: 1272998 - RNA, 21 nt, Human
cugugugaccuugggccacuc

SEQ ID NO: 1272999 - RNA, 22 nt, Human
cuucuccugggcuggggauaaa

SEQ ID NO: 1273000 - RNA, 18 nt, Human
cuuugaggucucagggcu

SEQ ID NO: 1273001 - RNA, 22 nt, Human
gaagaaugcauggagaccuaga

SEQ ID NO: 1273002 - RNA, 19 nt, Human
gaccuccagcagcaucccc

SEQ ID NO: 1273003 - RNA, 21 nt, Human
gagcagccaggguugcggggc

SEQ ID NO: 1273004 - RNA, 24 nt, Human
gagggcaagggguggggugggcag

SEQ ID NO: 1273005 - RNA, 23 nt, Human
gauagcccagcugagacuuccau

SEQ ID NO: 1273006 - RNA, 18 nt, Human
gcaaggcaaaggggugag

SEQ ID NO: 1273007 - RNA, 21 nt, Human
gcacacuccacacaucacaca

SEQ ID NO: 1273008 - RNA, 24 nt, Human
gccagccuggucuccccuggcgga

SEQ ID NO: 1273009 - RNA, 21 nt, Human
gccccagcacccugagggcug

SEQ ID NO: 1273010 - RNA, 18 nt, Human
gcugggaggauggcggga

SEQ ID NO: 1273011 - RNA, 25 nt, Human
gcugugugacuaaaaaaacaacccc

SEQ ID NO: 1273012 - RNA, 21 nt, Human
ggcagaagggucugcagccug

SEQ ID NO: 1273013 - RNA, 18 nt, Human
ggcugggguggucagaca

SEQ ID NO: 1273014 - RNA, 22 nt, Human
gggccacuccccuuccccacuc

SEQ ID NO: 1273015 - RNA, 24 nt, Human
ggggccacauguaugcaguucagc

SEQ ID NO: 1273016 - RNA, 20 nt, Human
guggaaggagcauuccagga

SEQ ID NO: 1273017 - RNA, 20 nt, Human
guuccugcugucaggagaac

SEQ ID NO: 1273018 - RNA, 19 nt, Human
uaacauccccaccggcacc

SEQ ID NO: 1273019 - RNA, 23 nt, Human
uacugagcaccuuuacuguccac

SEQ ID NO: 1273020 - RNA, 18 nt, Human
uagaugcucccuaagguc

SEQ ID NO: 1273021 - RNA, 19 nt, Human
uagccaaacucccugcagu

SEQ ID NO: 1273022 - RNA, 22 nt, Human
uaggagggucccugggaaauga

SEQ ID NO: 1273023 - RNA, 19 nt, Human
ucaagccauccucaaggca

SEQ ID NO: 1273024 - RNA, 20 nt, Human
ucacaggcacacacagacac

SEQ ID NO: 1273025 - RNA, 18 nt, Human
ucagccucacccauucac

SEQ ID NO: 1273026 - RNA, 20 nt, Human
uccacacaucacacacauuc

SEQ ID NO: 1273027 - RNA, 20 nt, Human
uccacaucagccucacccau

SEQ ID NO: 1273028 - RNA, 24 nt, Human
uccagcagcauccccccauccccc

SEQ ID NO: 1273029 - RNA, 19 nt, Human
ucccaagggcaggauagcc

SEQ ID NO: 1273030 - RNA, 20 nt, Human
ucccuaaggucccuucuagu

SEQ ID NO: 1273031 - RNA, 18 nt, Human
ucccucuggaccucgccu

SEQ ID NO: 1273032 - RNA, 18 nt, Human
ucccucuggaccucgccu

SEQ ID NO: 1273033 - RNA, 20 nt, Human
ucccugcaguuguuuggcag

SEQ ID NO: 1273034 - RNA, 19 nt, Human
ucccuucuaguuauaaggg

SEQ ID NO: 1273035 - RNA, 24 nt, Human
ucuagggcaggaagaaugcaugga

SEQ ID NO: 1273036 - RNA, 19 nt, Human
ucuauggauccugagggga

SEQ ID NO: 1273037 - RNA, 24 nt, Human
ucucagggcuggugcagccccuuc

SEQ ID NO: 1273038 - RNA, 23 nt, Human
ucuccugggcuggggauaaaggc

SEQ ID NO: 1273039 - RNA, 20 nt, Human
ucugcagccugggaugagag

SEQ ID NO: 1273040 - RNA, 22 nt, Human
ugacaagcggugugacaccccc

SEQ ID NO: 1273041 - RNA, 21 nt, Human
ugacagccugagccaggggcu

SEQ ID NO: 1273042 - RNA, 21 nt, Human
ugaccuugggccacuccccuu

SEQ ID NO: 1273043 - RNA, 27 nt, Human
ugacuaaaaaaacaaccccaaucauuu

SEQ ID NO: 1273044 - RNA, 19 nt, Human
ugagaggccagaauuugga

SEQ ID NO: 1273045 - RNA, 22 nt, Human
ugagauggugauuaugugggug

SEQ ID NO: 1273046 - RNA, 18 nt, Human
ugaggaacacacaaacac

SEQ ID NO: 1273047 - RNA, 19 nt, Human
ugagggaagcaggcacagg

SEQ ID NO: 1273048 - RNA, 19 nt, Human
ugcacgaggggaucaaacu

SEQ ID NO: 1273049 - RNA, 18 nt, Human
ugcagccccuucccuccc

SEQ ID NO: 1273050 - RNA, 23 nt, Human
ugcagccugggaugagaggccag

SEQ ID NO: 1273051 - RNA, 29 nt, Human
ugccccaacacacacacacacacacacag

SEQ ID NO: 1273052 - RNA, 19 nt, Human
ugccucagucacccugacc

SEQ ID NO: 1273053 - RNA, 22 nt, Human
ugccucagucacccugacccag

SEQ ID NO: 1273054 - RNA, 21 nt, Human
uggcaggagaccucaggggca

SEQ ID NO: 1273055 - RNA, 18 nt, Human
uggcggggugggcugggg

SEQ ID NO: 1273056 - RNA, 24 nt, Human
ugggaaccccaaagagggagcacu

SEQ ID NO: 1273057 - RNA, 20 nt, Human
ugggcagaugccaucccucc

SEQ ID NO: 1273058 - RNA, 21 nt, Human
uggggagaugugcuggaucca

SEQ ID NO: 1273059 - RNA, 18 nt, Human
ugggggcuuggaggugaa

SEQ ID NO: 1273060 - RNA, 19 nt, Human
ugugggccugggcaugagg

SEQ ID NO: 1273061 - RNA, 21 nt, Human
ugugugacuaaaaaaacaacc

SEQ ID NO: 1273062 - RNA, 20 nt, Human
uuagccaaacucccugcagu

SEQ ID NO: 1273063 - RNA, 24 nt, Human
uuccaggaggagggggcuuggucu

SEQ ID NO: 1273064 - RNA, 20 nt, Human
uucccagagcacagggaaaa

SEQ ID NO: 1273065 - RNA, 21 nt, Human
uuccugcugaggaacacacaa

SEQ ID NO: 1273066 - RNA, 21 nt, Human
uuccugcugucaggagaaccc

SEQ ID NO: 1273067 - RNA, 19 nt, Human
uugguggcggggugggcug

SEQ ID NO: 1273068 - RNA, 23 nt, Human
uuuacagugcccacuggcauaca

SEQ ID NO: 1273069 - RNA, 20 nt, Human
uuugagguccauccucacuc

SEQ ID NO: 1273070 - RNA, 20 nt, Human
uuugaggucucagggcuggu

SEQ ID NO: 1273071 - RNA, 20 nt, Human
aaagaugaagaacugggugg

SEQ ID NO: 1273072 - RNA, 21 nt, Human
aaccaagcagcaucaacagaa

SEQ ID NO: 1273073 - RNA, 22 nt, Human
acacaacacaucuguaaaauaa

SEQ ID NO: 1273074 - RNA, 19 nt, Human
accaagcagcaucaacaga

SEQ ID NO: 1273075 - RNA, 22 nt, Human
accaagcagcaucaacagaaga

SEQ ID NO: 1273076 - RNA, 18 nt, Human
acugcaaugguggagcag

SEQ ID NO: 1273077 - RNA, 18 nt, Human
agacagaaaaagugcagg

SEQ ID NO: 1273078 - RNA, 19 nt, Human
agauuuggaagauccagug

SEQ ID NO: 1273079 - RNA, 22 nt, Human
agcccuguggaacaggguccaa

SEQ ID NO: 1273080 - RNA, 24 nt, Human
aggaacaccauucccucccaccuu

SEQ ID NO: 1273081 - RNA, 18 nt, Human
agggagaggccagugcug

SEQ ID NO: 1273082 - RNA, 18 nt, Human
cacacaacacaucuguaa

SEQ ID NO: 1273083 - RNA, 24 nt, Human
caccauucccucccaccuuuccug

SEQ ID NO: 1273084 - RNA, 19 nt, Human
cagaaaaagugcaggagca

SEQ ID NO: 1273085 - RNA, 21 nt, Human
cagcagccccauguagauauu

SEQ ID NO: 1273086 - RNA, 23 nt, Human
caugcuugacgaugaagggcaga

SEQ ID NO: 1273087 - RNA, 22 nt, Human
cucccaccuuuccuggcaucug

SEQ ID NO: 1273088 - RNA, 22 nt, Human
cuccugcuucuucccucucgca

SEQ ID NO: 1273089 - RNA, 18 nt, Human
cucucccgagaaucauuc

SEQ ID NO: 1273090 - RNA, 20 nt, Human
gaacaggguccaagugacua

SEQ ID NO: 1273091 - RNA, 20 nt, Human
gaccuccugcuucuucccuc

SEQ ID NO: 1273092 - RNA, 24 nt, Human
gacgaugaagggcagacagaaaaa

SEQ ID NO: 1273093 - RNA, 22 nt, Human
gacuagcuccgacuuugagucc

SEQ ID NO: 1273094 - RNA, 18 nt, Human
gcagagccuguggcggcg

SEQ ID NO: 1273095 - RNA, 24 nt, Human
ggauacaauaaaggaggaagcagc

SEQ ID NO: 1273096 - RNA, 20 nt, Human
gugagauuuggaagauccag

SEQ ID NO: 1273097 - RNA, 22 nt, Human
guggcggcguuuccugcccaca

SEQ ID NO: 1273098 - RNA, 22 nt, Human
gugugucuucugguucagguca

SEQ ID NO: 1273099 - RNA, 20 nt, Human
uaaaacaagucacacaacac

SEQ ID NO: 1273100 - RNA, 23 nt, Human
uaacucagcgucuugaagugauc

SEQ ID NO: 1273101 - RNA, 22 nt, Human
uaacuuccgguacaacauuccc

SEQ ID NO: 1273102 - RNA, 18 nt, Human
uaaguaagcacaaggcca

SEQ ID NO: 1273103 - RNA, 23 nt, Human
uagaugcugaacuuggccucaua

SEQ ID NO: 1273104 - RNA, 21 nt, Human
uagggaggcuuccauuguuga

SEQ ID NO: 1273105 - RNA, 19 nt, Human
uauuagcccuguggaacag

SEQ ID NO: 1273106 - RNA, 23 nt, Human
ucagugcguaaaacucaaaagcc

SEQ ID NO: 1273107 - RNA, 21 nt, Human
ucccgagaaucauuccucagu

SEQ ID NO: 1273108 - RNA, 18 nt, Human
ugacaaaccaagcagcau

SEQ ID NO: 1273109 - RNA, 23 nt, Human
ugagaccuccugcuucuucccuc

SEQ ID NO: 1273110 - RNA, 22 nt, Human
ugagggagaggccagugcugau

SEQ ID NO: 1273111 - RNA, 24 nt, Human
ugaugguggugagggagaggccag

SEQ ID NO: 1273112 - RNA, 20 nt, Human
ugcaaugguggagcagagcc

SEQ ID NO: 1273113 - RNA, 19 nt, Human
ugguggugagggagaggcc

SEQ ID NO: 1273114 - RNA, 25 nt, Human
ugguggugagggagaggccagugcu

SEQ ID NO: 1273115 - RNA, 20 nt, Human
ugguggugagggagaggccc

SEQ ID NO: 1273116 - RNA, 21 nt, Human
uguggaacaggguccaaguga

SEQ ID NO: 1273117 - RNA, 19 nt, Human
acuugguuguccccuuucu

SEQ ID NO: 1273118 - RNA, 21 nt, Human
acuugguuguccccuuucuag

SEQ ID NO: 1273119 - RNA, 20 nt, Human
aggagcccccuccccgcaag

SEQ ID NO: 1273120 - RNA, 21 nt, Human
agggcuuucugggcaucggcc

SEQ ID NO: 1273121 - RNA, 22 nt, Human
aggguggggagaggugggcagg

SEQ ID NO: 1273122 - RNA, 18 nt, Human
cagcuucuggauguacuc

SEQ ID NO: 1273123 - RNA, 18 nt, Human
caggagcccccuccccgc

SEQ ID NO: 1273124 - RNA, 22 nt, Human
caggguggggagaggugggcag

SEQ ID NO: 1273125 - RNA, 20 nt, Human
cagucuguggcaggagcugg

SEQ ID NO: 1273126 - RNA, 19 nt, Human
ccacuuggggcaguggguc

SEQ ID NO: 1273127 - RNA, 23 nt, Human
ccaguacucuuuaaaagcucccc

SEQ ID NO: 1273128 - RNA, 20 nt, Human
cccagaucgggacacguggc

SEQ ID NO: 1273129 - RNA, 23 nt, Human
cggccuggucuggggccugggcu

SEQ ID NO: 1273130 - RNA, 19 nt, Human
cuggaagucccauggccca

SEQ ID NO: 1273131 - RNA, 26 nt, Human
gaaaaaccauacuauggugaccacca

SEQ ID NO: 1273132 - RNA, 19 nt, Human
gacccauauuuucuaaucc

SEQ ID NO: 1273133 - RNA, 20 nt, Human
gagcagcagcucguaacgug

SEQ ID NO: 1273134 - RNA, 21 nt, Human
gcagcuucuggauguacuccu

SEQ ID NO: 1273135 - RNA, 19 nt, Human
gcccaggagcccccucccc

SEQ ID NO: 1273136 - RNA, 19 nt, Human
gcuggcagcuucuggaugu

SEQ ID NO: 1273137 - RNA, 20 nt, Human
gcuggcagcuucuggaugua

SEQ ID NO: 1273138 - RNA, 22 nt, Human
ggccugggcuggcagcuucugg

SEQ ID NO: 1273139 - RNA, 24 nt, Human
gggcaucggccuggucuggggccu

SEQ ID NO: 1273140 - RNA, 20 nt, Human
ggucuggggccugggcuggc

SEQ ID NO: 1273141 - RNA, 18 nt, Human
guccagggcuuucugggc

SEQ ID NO: 1273142 - RNA, 20 nt, Human
guggggagaggugggcagga

SEQ ID NO: 1273143 - RNA, 21 nt, Human
guuguccccuuucuagaaagg

SEQ ID NO: 1273144 - RNA, 21 nt, Human
uacuauggugaccaccagucc

SEQ ID NO: 1273145 - RNA, 27 nt, Human
uacuauguguuuuucaccaguacucuu

SEQ ID NO: 1273146 - RNA, 21 nt, Human
ucaggguggggagaggugggc

SEQ ID NO: 1273147 - RNA, 18 nt, Human
ucccauggcccaggagcc

SEQ ID NO: 1273148 - RNA, 18 nt, Human
ucugaaagcaccacuugg

SEQ ID NO: 1273149 - RNA, 20 nt, Human
ucugggcaucggccuggucu

SEQ ID NO: 1273150 - RNA, 20 nt, Human
ucuguggcaggagcuggguu

SEQ ID NO: 1273151 - RNA, 18 nt, Human
ugaaaaaccauacuaugg

SEQ ID NO: 1273152 - RNA, 20 nt, Human
uggcaggagcuggguucagg

SEQ ID NO: 1273153 - RNA, 23 nt, Human
uggcaggagcuggguucaggaga

SEQ ID NO: 1273154 - RNA, 24 nt, Human
uggcaggagcuggguucagggugg

SEQ ID NO: 1273155 - RNA, 26 nt, Human
uucaggguggggagaggugggcagga

SEQ ID NO: 1273156 - RNA, 25 nt, Human
aaacacacaugcucccagggcuacc

SEQ ID NO: 1273157 - RNA, 24 nt, Human
aaagcucucccugauaaaucaccu

SEQ ID NO: 1273158 - RNA, 24 nt, Human
aaagugcugggauuacaggcguga

SEQ ID NO: 1273159 - RNA, 23 nt, Human
aaccaggacgcauuacuauaacc

SEQ ID NO: 1273160 - RNA, 24 nt, Human
aagcacuuggcauccucaccucuc

SEQ ID NO: 1273161 - RNA, 22 nt, Human
aagcauguugagugagguggua

SEQ ID NO: 1273162 - RNA, 21 nt, Human
aaggagaaacagguccgcgga

SEQ ID NO: 1273163 - RNA, 19 nt, Human
aagugcugggauuacaggc

SEQ ID NO: 1273164 - RNA, 19 nt, Human
aagugcugggauuacaggc

SEQ ID NO: 1273165 - RNA, 24 nt, Human
aaucaccugaggcaaaccucuguc

SEQ ID NO: 1273166 - RNA, 25 nt, Human
aaugccucccccacaaccaccacau

SEQ ID NO: 1273167 - RNA, 26 nt, Human
acaaagagacucaagugacuugccca

SEQ ID NO: 1273168 - RNA, 27 nt, Human
acaaauacgaaaucuccaaaacuccgu

SEQ ID NO: 1273169 - RNA, 19 nt, Human
acacaaacacacaugcucc

SEQ ID NO: 1273170 - RNA, 21 nt, Human
acacacacgcgcacacacaca

SEQ ID NO: 1273171 - RNA, 21 nt, Human
acaccugucuggacucuccca

SEQ ID NO: 1273172 - RNA, 20 nt, Human
acacuggcacucucaccccu

SEQ ID NO: 1273173 - RNA, 22 nt, Human
acaggacgagcuuggcaaagau

SEQ ID NO: 1273174 - RNA, 18 nt, Human
acaggcugaggccucugu

SEQ ID NO: 1273175 - RNA, 23 nt, Human
acauacacacacgcgcacacaca

SEQ ID NO: 1273176 - RNA, 20 nt, Human
accacauuuuauuuggcauu

SEQ ID NO: 1273177 - RNA, 21 nt, Human
accauggugacccucccaccc

SEQ ID NO: 1273178 - RNA, 21 nt, Human
acccugaagccuacaggaaac

SEQ ID NO: 1273179 - RNA, 20 nt, Human
acccuugaugaauacaccca

SEQ ID NO: 1273180 - RNA, 18 nt, Human
accuguaaugccuccccc

SEQ ID NO: 1273181 - RNA, 21 nt, Human
accuguaaugccucccccaca

SEQ ID NO: 1273182 - RNA, 18 nt, Human
acucaguaaggaguggcu

SEQ ID NO: 1273183 - RNA, 22 nt, Human
acucuaaccugccccuccccau

SEQ ID NO: 1273184 - RNA, 19 nt, Human
acugaguagcugggauuac

SEQ ID NO: 1273185 - RNA, 30 nt, Human
acuuggcauccucaccucucugugucuccu

SEQ ID NO: 1273186 - RNA, 24 nt, Human
agaaaacccuaccugggacagccc

SEQ ID NO: 1273187 - RNA, 22 nt, Human
agaagcagggagagccagccca

SEQ ID NO: 1273188 - RNA, 20 nt, Human
agacuucuaggucuacaucu

SEQ ID NO: 1273189 - RNA, 21 nt, Human
agaggcaucccagcuccagag

SEQ ID NO: 1273190 - RNA, 19 nt, Human
agcagagagagaggccucc

SEQ ID NO: 1273191 - RNA, 19 nt, Human
agcagggagagccagccca

SEQ ID NO: 1273192 - RNA, 19 nt, Human
aggaggguccggggcaggg

SEQ ID NO: 1273193 - RNA, 19 nt, Human
aggcauccuuaugagaaag

SEQ ID NO: 1273194 - RNA, 24 nt, Human
aggccuccccacaccauccccacc

SEQ ID NO: 1273195 - RNA, 23 nt, Human
aggcgugaguuacugcacccggc

SEQ ID NO: 1273196 - RNA, 24 nt, Human
aggugaucugcccaccucggccuc

SEQ ID NO: 1273197 - RNA, 26 nt, Human
aggugcuggagaccucauaaggaagc

SEQ ID NO: 1273198 - RNA, 27 nt, Human
aggugcuggagaccucauaaggaagcc

SEQ ID NO: 1273199 - RNA, 22 nt, Human
aggugcuggcaggcacugggug

SEQ ID NO: 1273200 - RNA, 18 nt, Human
agguuggacacagaugcc

SEQ ID NO: 1273201 - RNA, 18 nt, Human
aguagcugggauuacagg

SEQ ID NO: 1273202 - RNA, 19 nt, Human
aguagcugggauuacaggc

SEQ ID NO: 1273203 - RNA, 19 nt, Human
aguagcugggauuacaggc

SEQ ID NO: 1273204 - RNA, 18 nt, Human
agugcugggauuacaggc

SEQ ID NO: 1273205 - RNA, 20 nt, Human
aguggaguggcgcaaucucg

SEQ ID NO: 1273206 - RNA, 24 nt, Human
aguggaguggcgcaaucucggcuc

SEQ ID NO: 1273207 - RNA, 22 nt, Human
auaacacacaacacacacauac

SEQ ID NO: 1273208 - RNA, 18 nt, Human
aucccgggagaggcaggg

SEQ ID NO: 1273209 - RNA, 24 nt, Human
auccucaccucucugugucuccau

SEQ ID NO: 1273210 - RNA, 20 nt, Human
auccugccgguuuccggggu

SEQ ID NO: 1273211 - RNA, 21 nt, Human
aucucagcuacccucgaagca

SEQ ID NO: 1273212 - RNA, 19 nt, Human
augcucccagggcuaccaa

SEQ ID NO: 1273213 - RNA, 21 nt, Human
augcuugcucguaaccacacc

SEQ ID NO: 1273214 - RNA, 18 nt, Human
auucuccugucucagccu

SEQ ID NO: 1273215 - RNA, 18 nt, Human
caaaaaacuccuacacga

SEQ ID NO: 1273216 - RNA, 24 nt, Human
caaagugcugggauuacaggcgug

SEQ ID NO: 1273217 - RNA, 22 nt, Human
caaggcaguugguauggguccc

SEQ ID NO: 1273218 - RNA, 22 nt, Human
caagugauucuccugucucagc

SEQ ID NO: 1273219 - RNA, 20 nt, Human
cacacaacacacacauacac

SEQ ID NO: 1273220 - RNA, 28 nt, Human
cacacacauacacacacgcgcacacaca

SEQ ID NO: 1273221 - RNA, 33 nt, Human
cacacacgcgcacacacacaaacacacauggug

SEQ ID NO: 1273222 - RNA, 18 nt, Human
cacaccugucuggacucu

SEQ ID NO: 1273223 - RNA, 23 nt, Human
cacacgcgcacacacacaaacac

SEQ ID NO: 1273224 - RNA, 23 nt, Human
caccauggugacccucccacccc

SEQ ID NO: 1273225 - RNA, 19 nt, Human
caccccagcaccccacacc

SEQ ID NO: 1273226 - RNA, 21 nt, Human
caccccagcaccccacaccuc

SEQ ID NO: 1273227 - RNA, 21 nt, Human
caccccagcugcccauaccug

SEQ ID NO: 1273228 - RNA, 22 nt, Human
caccgacacucucccaugcucc

SEQ ID NO: 1273229 - RNA, 24 nt, Human
caccucggccucccaaagugcugg

SEQ ID NO: 1273230 - RNA, 24 nt, Human
caccugagaagaguauuagguuca

SEQ ID NO: 1273231 - RNA, 18 nt, Human
cacucaguaaggaguggc

SEQ ID NO: 1273232 - RNA, 21 nt, Human
cacuggcacucucaccccugc

SEQ ID NO: 1273233 - RNA, 22 nt, Human
cagaaacagaaucuaccccuau

SEQ ID NO: 1273234 - RNA, 22 nt, Human
cagcacggugcguagcaggcag

SEQ ID NO: 1273235 - RNA, 26 nt, Human
cagcagcagaugcucuguucucccag

SEQ ID NO: 1273236 - RNA, 19 nt, Human
cagcauccgggccauuccu

SEQ ID NO: 1273237 - RNA, 27 nt, Human
cagcccaccauggugacccucccaccc

SEQ ID NO: 1273238 - RNA, 19 nt, Human
cagccccuaacacaguccu

SEQ ID NO: 1273239 - RNA, 18 nt, Human
cagcccucuuccucagcu

SEQ ID NO: 1273240 - RNA, 21 nt, Human
cagcugaccucugaucacacc

SEQ ID NO: 1273241 - RNA, 20 nt, Human
caggaaacauugccugccau

SEQ ID NO: 1273242 - RNA, 21 nt, Human
caggcgcccaccaccaugccc

SEQ ID NO: 1273243 - RNA, 21 nt, Human
cagggagagagcugccagaaa

SEQ ID NO: 1273244 - RNA, 19 nt, Human
caguggguaaacugaggcc

SEQ ID NO: 1273245 - RNA, 24 nt, Human
caguguuucccuauguuggccagg

SEQ ID NO: 1273246 - RNA, 21 nt, Human
caguugguauggguccccuca

SEQ ID NO: 1273247 - RNA, 20 nt, Human
cauaacacacaacacacaca

SEQ ID NO: 1273248 - RNA, 20 nt, Human
cauacggucccagcuuuacc

SEQ ID NO: 1273249 - RNA, 25 nt, Human
cauccccaccagcuacugguaguac

SEQ ID NO: 1273250 - RNA, 20 nt, Human
caucuacugucuaugaccuu

SEQ ID NO: 1273251 - RNA, 22 nt, Human
ccaaagugcugggauuacaggc

SEQ ID NO: 1273252 - RNA, 22 nt, Human
ccaaagugcugggauuacaggc

SEQ ID NO: 1273253 - RNA, 24 nt, Human
ccaaagugcugggauuacaggcgu

SEQ ID NO: 1273254 - RNA, 20 nt, Human
ccaaauacugaaacccuucu

SEQ ID NO: 1273255 - RNA, 25 nt, Human
ccacacauaacacacaacacacaca

SEQ ID NO: 1273256 - RNA, 23 nt, Human
ccagaaaggcuggaggguggcug

SEQ ID NO: 1273257 - RNA, 20 nt, Human
ccagcacggugcguagcagg

SEQ ID NO: 1273258 - RNA, 21 nt, Human
ccagcccagcagcagaugcuc

SEQ ID NO: 1273259 - RNA, 21 nt, Human
ccagcugaccucugaucacac

SEQ ID NO: 1273260 - RNA, 22 nt, Human
ccagcuuuaccuguaaugccuc

SEQ ID NO: 1273261 - RNA, 18 nt, Human
ccaggccaaggcaguugg

SEQ ID NO: 1273262 - RNA, 23 nt, Human
ccauacccccaccuggggaacug

SEQ ID NO: 1273263 - RNA, 21 nt, Human
cccacaccauccccaccagcu

SEQ ID NO: 1273264 - RNA, 22 nt, Human
cccacaccauccccaccagcua

SEQ ID NO: 1273265 - RNA, 19 nt, Human
cccacagcuguuguuccca

SEQ ID NO: 1273266 - RNA, 22 nt, Human
cccagcaccccacaccucuacc

SEQ ID NO: 1273267 - RNA, 23 nt, Human
ccccagcaccccacaccucuacc

SEQ ID NO: 1273268 - RNA, 20 nt, Human
ccccagcugcccauaccugg

SEQ ID NO: 1273269 - RNA, 19 nt, Human
cccccugcccggcccugcu

SEQ ID NO: 1273270 - RNA, 22 nt, Human
ccccuucauccugccgguuucc

SEQ ID NO: 1273271 - RNA, 20 nt, Human
cccguacauccugguuugcc

SEQ ID NO: 1273272 - RNA, 23 nt, Human
cccuaacacaguccugagcuuaa

SEQ ID NO: 1273273 - RNA, 21 nt, Human
ccggcccugcuucccucacac

SEQ ID NO: 1273274 - RNA, 20 nt, Human
ccuauguuggccaggcuggu

SEQ ID NO: 1273275 - RNA, 22 nt, Human
ccuauguuggccaggcuggucu

SEQ ID NO: 1273276 - RNA, 22 nt, Human
ccuauguuggccaggcuggucu

SEQ ID NO: 1273277 - RNA, 19 nt, Human
ccucccccacaaccaccac

SEQ ID NO: 1273278 - RNA, 22 nt, Human
ccucccuggcaccccagucccu

SEQ ID NO: 1273279 - RNA, 21 nt, Human
ccuccuggauucaagugauuc

SEQ ID NO: 1273280 - RNA, 24 nt, Human
ccuccuggauucaagugauucucc

SEQ ID NO: 1273281 - RNA, 24 nt, Human
ccugaccucaggugaucugcccac

SEQ ID NO: 1273282 - RNA, 23 nt, Human
ccuggauucaagugauucuccuc

SEQ ID NO: 1273283 - RNA, 23 nt, Human
ccuggauucaagugauucuccug

SEQ ID NO: 1273284 - RNA, 21 nt, Human
ccuuuggaccucaccucuguu

SEQ ID NO: 1273285 - RNA, 23 nt, Human
cgacauccuccacacguccagaa

SEQ ID NO: 1273286 - RNA, 23 nt, Human
cgagggacucgcgaaguaaucca

SEQ ID NO: 1273287 - RNA, 26 nt, Human
cgcacacacacaaacacacaugcucc

SEQ ID NO: 1273288 - RNA, 22 nt, Human
cgcauuacuauaaccacuaucc

SEQ ID NO: 1273289 - RNA, 22 nt, Human
cgggaacagaaacagaaucuac

SEQ ID NO: 1273290 - RNA, 28 nt, Human
cggggcagggcccagggagagagcugcc

SEQ ID NO: 1273291 - RNA, 18 nt, Human
cgucuaagggcugcccac

SEQ ID NO: 1273292 - RNA, 24 nt, Human
cuacucccaggcucucccaccccu

SEQ ID NO: 1273293 - RNA, 19 nt, Human
cuaggucuacaucuaugcc

SEQ ID NO: 1273294 - RNA, 23 nt, Human
cucacugcaaccuccuccuccug

SEQ ID NO: 1273295 - RNA, 24 nt, Human
cucacugcaaccuccuccuccugg

SEQ ID NO: 1273296 - RNA, 24 nt, Human
cucacugcaaccuccuccuccugg

SEQ ID NO: 1273297 - RNA, 24 nt, Human
cucagccuacugaguagcugggau

SEQ ID NO: 1273298 - RNA, 21 nt, Human
cucaugggcguagcugguucu

SEQ ID NO: 1273299 - RNA, 22 nt, Human
cucccaccccucccuggcaccc

SEQ ID NO: 1273300 - RNA, 25 nt, Human
cucccaggcucucccaccccucccu

SEQ ID NO: 1273301 - RNA, 23 nt, Human
cucccagggcuaccaaugacucc

SEQ ID NO: 1273302 - RNA, 23 nt, Human
cucccuggcaccccagucccugg

SEQ ID NO: 1273303 - RNA, 24 nt, Human
cucucccaccccucccuggcaccc

SEQ ID NO: 1273304 - RNA, 20 nt, Human
cucugucacccaggcuagag

SEQ ID NO: 1273305 - RNA, 22 nt, Human
cugagaagaguauuagguucac

SEQ ID NO: 1273306 - RNA, 22 nt, Human
cugaguagcugggauuacaggc

SEQ ID NO: 1273307 - RNA, 22 nt, Human
cugaucacaccauacccccacc

SEQ ID NO: 1273308 - RNA, 23 nt, Human
cugcaaccuccuccuccuggauu

SEQ ID NO: 1273309 - RNA, 24 nt, Human
cugcaaccuccuccuccuggauuc

SEQ ID NO: 1273310 - RNA, 21 nt, Human
cugccuggcuccugguguccc

SEQ ID NO: 1273311 - RNA, 22 nt, Human
cugcugggaccuaacucccguc

SEQ ID NO: 1273312 - RNA, 20 nt, Human
cugcuucccucacacccaca

SEQ ID NO: 1273313 - RNA, 19 nt, Human
cuggcacucucaccccugc

SEQ ID NO: 1273314 - RNA, 23 nt, Human
cugucucagccuacugaguagcu

SEQ ID NO: 1273315 - RNA, 21 nt, Human
cuucacucuaaccugccccuc

SEQ ID NO: 1273316 - RNA, 21 nt, Human
cuucaggaaugaggccucccc

SEQ ID NO: 1273317 - RNA, 20 nt, Human
cuucuguuuccucuuugccc

SEQ ID NO: 1273318 - RNA, 23 nt, Human
cuuggcauccucaccucucugug

SEQ ID NO: 1273319 - RNA, 19 nt, Human
gaacuuagaguagggagua

SEQ ID NO: 1273320 - RNA, 26 nt, Human
gaagagaucagacugggcuuuagucu

SEQ ID NO: 1273321 - RNA, 22 nt, Human
gacccucccaccccagcugccc

SEQ ID NO: 1273322 - RNA, 24 nt, Human
gaccucaggugaucugcccaccuc

SEQ ID NO: 1273323 - RNA, 21 nt, Human
gagacagagucucgcucuguc

SEQ ID NO: 1273324 - RNA, 22 nt, Human
gagagcuccccaccccagcacc

SEQ ID NO: 1273325 - RNA, 26 nt, Human
gagaggccuccagccagcacacucag

SEQ ID NO: 1273326 - RNA, 20 nt, Human
gaggaacgcggggcugcccc

SEQ ID NO: 1273327 - RNA, 24 nt, Human
gaggugcuggagaccucauaagga

SEQ ID NO: 1273328 - RNA, 18 nt, Human
gaguaaaggagaaacagg

SEQ ID NO: 1273329 - RNA, 20 nt, Human
gaguaccccaucaggaugcu

SEQ ID NO: 1273330 - RNA, 20 nt, Human
gaguagcugggauuacaggc

SEQ ID NO: 1273331 - RNA, 25 nt, Human
gaguagcugggauuacaggcgccca

SEQ ID NO: 1273332 - RNA, 21 nt, Human
gaguggcgcaaucucggcuca

SEQ ID NO: 1273333 - RNA, 24 nt, Human
gauuacaggcgcccaccaccaugc

SEQ ID NO: 1273334 - RNA, 22 nt, Human
gauuacaggcgugaguuacugc

SEQ ID NO: 1273335 - RNA, 23 nt, Human
gauuacaggcgugaguuacugca

SEQ ID NO: 1273336 - RNA, 22 nt, Human
gcaaccuccuccuccuggauuc

SEQ ID NO: 1273337 - RNA, 21 nt, Human
gcauuacuauaaccacuaucc

SEQ ID NO: 1273338 - RNA, 18 nt, Human
gccccuggccagcuucug

SEQ ID NO: 1273339 - RNA, 20 nt, Human
gcucacugcaaccuccuccu

SEQ ID NO: 1273340 - RNA, 22 nt, Human
gcucacugcaaccuccuccucc

SEQ ID NO: 1273341 - RNA, 26 nt, Human
gcucacugcaaccuccuccuccugga

SEQ ID NO: 1273342 - RNA, 19 nt, Human
gcucccagcugaccucuga

SEQ ID NO: 1273343 - RNA, 24 nt, Human
gcucugucacccaggcuagagugg

SEQ ID NO: 1273344 - RNA, 19 nt, Human
gcugcccacuccugccagg

SEQ ID NO: 1273345 - RNA, 23 nt, Human
gcuggucuugaacuccugaccuc

SEQ ID NO: 1273346 - RNA, 21 nt, Human
ggacaucuacugucuaugacc

SEQ ID NO: 1273347 - RNA, 22 nt, Human
ggagagccagcccagcagcaga

SEQ ID NO: 1273348 - RNA, 21 nt, Human
ggccaggaaauggaaggccaa

SEQ ID NO: 1273349 - RNA, 23 nt, Human
ggcccugcuucccucacacccac

SEQ ID NO: 1273350 - RNA, 24 nt, Human
ggcuggucuugaacuccugaccuc

SEQ ID NO: 1273351 - RNA, 23 nt, Human
gggaacagaaacagaaucuaccc

SEQ ID NO: 1273352 - RNA, 22 nt, Human
gggaacugcuggcucuggcuag

SEQ ID NO: 1273353 - RNA, 22 nt, Human
gggacagccccuaacacagucc

SEQ ID NO: 1273354 - RNA, 21 nt, Human
ggguccggggcagggcccagg

SEQ ID NO: 1273355 - RNA, 20 nt, Human
ggucugcccaugcuugcucg

SEQ ID NO: 1273356 - RNA, 19 nt, Human
ggucuugaacuccugaccu

SEQ ID NO: 1273357 - RNA, 18 nt, Human
guagcugggauuacaggc

SEQ ID NO: 1273358 - RNA, 20 nt, Human
gucaaagugacuugccccaa

SEQ ID NO: 1273359 - RNA, 23 nt, Human
gucaccuuuauuacccuguguac

SEQ ID NO: 1273360 - RNA, 23 nt, Human
gucccuccuucaggaaugaggcc

SEQ ID NO: 1273361 - RNA, 24 nt, Human
gugaucugcccaccucggccuccc

SEQ ID NO: 1273362 - RNA, 21 nt, Human
gugauucuccugucucagccu

SEQ ID NO: 1273363 - RNA, 19 nt, Human
gugguaccauccacccaca

SEQ ID NO: 1273364 - RNA, 20 nt, Human
uaaaaugaagccacaguguc

SEQ ID NO: 1273365 - RNA, 21 nt, Human
uaaaaugaagccacagugucc

SEQ ID NO: 1273366 - RNA, 25 nt, Human
uaaaucaccugaggcaaaccucugu

SEQ ID NO: 1273367 - RNA, 31 nt, Human
uaacacacaacacacacauacacacacgcgg

SEQ ID NO: 1273368 - RNA, 19 nt, Human
uaagaaaugccugcagaau

SEQ ID NO: 1273369 - RNA, 28 nt, Human
uaagacgggaacagaaacagaaucuacc

SEQ ID NO: 1273370 - RNA, 24 nt, Human
uaauuuuuguauuuuuaguugaga

SEQ ID NO: 1273371 - RNA, 22 nt, Human
uacacacacgcgcacacacaca

SEQ ID NO: 1273372 - RNA, 23 nt, Human
uacacacacgcgcacacacacaa

SEQ ID NO: 1273373 - RNA, 24 nt, Human
uacagcauccgggccauuccuagg

SEQ ID NO: 1273374 - RNA, 19 nt, Human
uacaggcgugaguuacugc

SEQ ID NO: 1273375 - RNA, 22 nt, Human
uacccccaccuggggaacugcu

SEQ ID NO: 1273376 - RNA, 18 nt, Human
uacccccuggauuauccu

SEQ ID NO: 1273377 - RNA, 22 nt, Human
uaccuguaaugccucccccaca

SEQ ID NO: 1273378 - RNA, 20 nt, Human
uacuauaaccacuaucccca

SEQ ID NO: 1273379 - RNA, 24 nt, Human
uacugaguagcugggauuacaggc

SEQ ID NO: 1273380 - RNA, 18 nt, Human
uagcucccagcugaccuc

SEQ ID NO: 1273381 - RNA, 21 nt, Human
uagcugguucucaggcuuucu

SEQ ID NO: 1273382 - RNA, 24 nt, Human
uauguuggccaggcuggucuugaa

SEQ ID NO: 1273383 - RNA, 18 nt, Human
uauuuuauuuucugggga

SEQ ID NO: 1273384 - RNA, 19 nt, Human
ucaacuuccuuguccaaaa

SEQ ID NO: 1273385 - RNA, 27 nt, Human
ucacacccacagcuguuguucccaaaa

SEQ ID NO: 1273386 - RNA, 18 nt, Human
ucacugcaaccuccuccc

SEQ ID NO: 1273387 - RNA, 22 nt, Human
ucacugcaaccuccuccuccug

SEQ ID NO: 1273388 - RNA, 23 nt, Human
ucacugcaaccuccuccuccugg

SEQ ID NO: 1273389 - RNA, 27 nt, Human
ucacugcaaccuccuccuccuggauuc

SEQ ID NO: 1273390 - RNA, 20 nt, Human
ucagccuacugaguagcugg

SEQ ID NO: 1273391 - RNA, 18 nt, Human
uccacacguccagaagcu

SEQ ID NO: 1273392 - RNA, 22 nt, Human
uccagaaaacccuaccugggac

SEQ ID NO: 1273393 - RNA, 23 nt, Human
uccagggaauuugggugcacagu

SEQ ID NO: 1273394 - RNA, 24 nt, Human
ucccaaagugcugggauuacaggc

SEQ ID NO: 1273395 - RNA, 18 nt, Human
ucccaccccagcugccca

SEQ ID NO: 1273396 - RNA, 20 nt, Human
ucccaccccagcugcccaua

SEQ ID NO: 1273397 - RNA, 24 nt, Human
ucccaccccucccuggcaccccag

SEQ ID NO: 1273398 - RNA, 22 nt, Human
ucccuauguuggccaggcuggu

SEQ ID NO: 1273399 - RNA, 22 nt, Human
ucccuccagacagacgccccag

SEQ ID NO: 1273400 - RNA, 23 nt, Human
uccgugaccgaggaacgcggggc

SEQ ID NO: 1273401 - RNA, 25 nt, Human
uccucagcuggaacaaccgagaggc

SEQ ID NO: 1273402 - RNA, 21 nt, Human
uccugccgguuuccggggugg

SEQ ID NO: 1273403 - RNA, 21 nt, Human
uccuggauucaagugauucuc

SEQ ID NO: 1273404 - RNA, 24 nt, Human
uccuggauucaagugauucuccug

SEQ ID NO: 1273405 - RNA, 18 nt, Human
ucggccucccaaagugcu

SEQ ID NO: 1273406 - RNA, 18 nt, Human
ucucaccccugccuggcu

SEQ ID NO: 1273407 - RNA, 20 nt, Human
ucucccaccccucccuggca

SEQ ID NO: 1273408 - RNA, 23 nt, Human
ucucccugauaaaucaccugagg

SEQ ID NO: 1273409 - RNA, 18 nt, Human
ucuccugucucagccuac

SEQ ID NO: 1273410 - RNA, 19 nt, Human
ucucgcucugucacccagg

SEQ ID NO: 1273411 - RNA, 23 nt, Human
ucucgcucugucacccaggcuag

SEQ ID NO: 1273412 - RNA, 26 nt, Human
ucucgcucugucacccaggcuagagu

SEQ ID NO: 1273413 - RNA, 27 nt, Human
ucucgcucugucacccaggcuagagug

SEQ ID NO: 1273414 - RNA, 18 nt, Human
ucugaucacaccauaccc

SEQ ID NO: 1273415 - RNA, 20 nt, Human
ucugcauuucuguucuaggg

SEQ ID NO: 1273416 - RNA, 22 nt, Human
ucugucacccaggcuagagugg

SEQ ID NO: 1273417 - RNA, 24 nt, Human
ucugucacccaggcuagaguggag

SEQ ID NO: 1273418 - RNA, 24 nt, Human
ucuuccucagcuggaacaaccgag

SEQ ID NO: 1273419 - RNA, 23 nt, Human
ucuugaacuccugaccucaggug

SEQ ID NO: 1273420 - RNA, 24 nt, Human
ugaagccacaguguccaggaaucc

SEQ ID NO: 1273421 - RNA, 23 nt, Human
ugaccagguuggacacagaugcc

SEQ ID NO: 1273422 - RNA, 23 nt, Human
ugacccucccaccccagcugccc

SEQ ID NO: 1273423 - RNA, 18 nt, Human
ugaccucaggugaucugc

SEQ ID NO: 1273424 - RNA, 20 nt, Human
ugaccucaggugaucugccc

SEQ ID NO: 1273425 - RNA, 21 nt, Human
ugaccucaggugaucugccca

SEQ ID NO: 1273426 - RNA, 24 nt, Human
ugaccucaggugaucugcccaccu

SEQ ID NO: 1273427 - RNA, 21 nt, Human
ugagaaaacugcaagccacag

SEQ ID NO: 1273428 - RNA, 19 nt, Human
ugagaagaguauuagguuc

SEQ ID NO: 1273429 - RNA, 22 nt, Human
ugagacaguguuucccuauguu

SEQ ID NO: 1273430 - RNA, 22 nt, Human
ugagauuguugucuccuccagu

SEQ ID NO: 1273431 - RNA, 25 nt, Human
ugagauuguugucuccuccaguggg

SEQ ID NO: 1273432 - RNA, 18 nt, Human
ugaguaucagcuaccuuu

SEQ ID NO: 1273433 - RNA, 24 nt, Human
ugaucugcccaccucggccuccca

SEQ ID NO: 1273434 - RNA, 19 nt, Human
ugcugaaugauaaauuaua

SEQ ID NO: 1273435 - RNA, 23 nt, Human
ugcugaggggcuccacccaggug

SEQ ID NO: 1273436 - RNA, 20 nt, Human
ugcugggauuacaggcguga

SEQ ID NO: 1273437 - RNA, 20 nt, Human
uggauucaagugauucuccu

SEQ ID NO: 1273438 - RNA, 24 nt, Human
uggauucaagugauucuccugucu

SEQ ID NO: 1273439 - RNA, 23 nt, Human
uggcacaaagagacucaagugac

SEQ ID NO: 1273440 - RNA, 18 nt, Human
uggcagaggugggauuca

SEQ ID NO: 1273441 - RNA, 24 nt, Human
uggccaggcuggucuugaacuccu

SEQ ID NO: 1273442 - RNA, 24 nt, Human
uggcuccuggugucccaccgacac

SEQ ID NO: 1273443 - RNA, 21 nt, Human
ugggauuacaggcgcccacca

SEQ ID NO: 1273444 - RNA, 24 nt, Human
ugggauuacaggcgcccaccacca

SEQ ID NO: 1273445 - RNA, 25 nt, Human
ugggauuacaggcgcccaccaccau

SEQ ID NO: 1273446 - RNA, 18 nt, Human
ugggauuacaggcgugag

SEQ ID NO: 1273447 - RNA, 18 nt, Human
ugggauuacaggcgugag

SEQ ID NO: 1273448 - RNA, 18 nt, Human
ugggauuacaggcgugag

SEQ ID NO: 1273449 - RNA, 22 nt, Human
ugggauuacaggcgugaguuac

SEQ ID NO: 1273450 - RNA, 22 nt, Human
ugggauuacaggcgugaguuac

SEQ ID NO: 1273451 - RNA, 24 nt, Human
ugggauuacaggcgugaguuacug

SEQ ID NO: 1273452 - RNA, 24 nt, Human
ugggauuacaggcgugaguuacug

SEQ ID NO: 1273453 - RNA, 25 nt, Human
ugggauuacaggcgugaguuacugc

SEQ ID NO: 1273454 - RNA, 18 nt, Human
uggguccccucacucagu

SEQ ID NO: 1273455 - RNA, 19 nt, Human
uggugcugaacaggacgag

SEQ ID NO: 1273456 - RNA, 20 nt, Human
uguccaaaaaacuccuacac

SEQ ID NO: 1273457 - RNA, 25 nt, Human
uguccaaaaaacuccuacacgaggg

SEQ ID NO: 1273458 - RNA, 20 nt, Human
ugucccaccgacacucuccc

SEQ ID NO: 1273459 - RNA, 24 nt, Human
ugugacuccagggaauuugggugc

SEQ ID NO: 1273460 - RNA, 24 nt, Human
ugugccacccaugucccuccuuca

SEQ ID NO: 1273461 - RNA, 22 nt, Human
ugugcugaaugauaaauuauau

SEQ ID NO: 1273462 - RNA, 18 nt, Human
ugugugcugaaugauaaa

SEQ ID NO: 1273463 - RNA, 21 nt, Human
uuaaagcacuuggcauccuca

SEQ ID NO: 1273464 - RNA, 23 nt, Human
uucaagugauucuccugucucag

SEQ ID NO: 1273465 - RNA, 22 nt, Human
uucacacucagaccucuauuuc

SEQ ID NO: 1273466 - RNA, 23 nt, Human
uucacacucagaccucuauuucu

SEQ ID NO: 1273467 - RNA, 24 nt, Human
uucacucuaaccugccccucccca

SEQ ID NO: 1273468 - RNA, 18 nt, Human
uucacuucucucccaaca

SEQ ID NO: 1273469 - RNA, 21 nt, Human
uuccucagcuggaacaaccga

SEQ ID NO: 1273470 - RNA, 23 nt, Human
uuccugagccuucacucuaaccu

SEQ ID NO: 1273471 - RNA, 18 nt, Human
uucucaaugggaucgaca

SEQ ID NO: 1273472 - RNA, 27 nt, Human
uugaugccacacauaacacacaacaca

SEQ ID NO: 1273473 - RNA, 23 nt, Human
uuggcaaagaucccgggagaggc

SEQ ID NO: 1273474 - RNA, 21 nt, Human
uuucccuauguuggccaggcu

SEQ ID NO: 1273475 - RNA, 18 nt, Human
uuucuguucuacauuugg

SEQ ID NO: 1273476 - RNA, 24 nt, Human
uuuucugagaggugcuggcaggca

SEQ ID NO: 1273477 - RNA, 22 nt, Human
uuuuguauuuuuaguugagaca

SEQ ID NO: 1273478 - RNA, 20 nt, Human
uuuuuguauuuuuaguugag

SEQ ID NO: 1273479 - RNA, 23 nt, Human
agaaguaucuuguuuaggggcug

SEQ ID NO: 1273480 - RNA, 27 nt, Human
agaggugugggcccggugacgaccgac

SEQ ID NO: 1273481 - RNA, 23 nt, Human
aggcggccuccugagcucgcagc

SEQ ID NO: 1273482 - RNA, 22 nt, Human
aucugccccuaggaauccccau

SEQ ID NO: 1273483 - RNA, 19 nt, Human
caaagaaccccacuccagu

SEQ ID NO: 1273484 - RNA, 23 nt, Human
caaauccucccacccccaggacu

SEQ ID NO: 1273485 - RNA, 21 nt, Human
cacucaaagaaccccacucca

SEQ ID NO: 1273486 - RNA, 22 nt, Human
caggacucaggagggaggggca

SEQ ID NO: 1273487 - RNA, 19 nt, Human
caggaggacagcugaccuc

SEQ ID NO: 1273488 - RNA, 18 nt, Human
cagugagcucccucaaau

SEQ ID NO: 1273489 - RNA, 19 nt, Human
cagugagcucccucaaauc

SEQ ID NO: 1273490 - RNA, 20 nt, Human
ccacucaaagaaccccacuc

SEQ ID NO: 1273491 - RNA, 18 nt, Human
ccacuccaguggggcuug

SEQ ID NO: 1273492 - RNA, 19 nt, Human
ccaggccagguaggcagug

SEQ ID NO: 1273493 - RNA, 21 nt, Human
cccacccccaggacucaggag

SEQ ID NO: 1273494 - RNA, 18 nt, Human
ccccguagccuuucccuu

SEQ ID NO: 1273495 - RNA, 20 nt, Human
ccucgucccugccuccccca

SEQ ID NO: 1273496 - RNA, 25 nt, Human
ccuucccucgucccugccuccccca

SEQ ID NO: 1273497 - RNA, 21 nt, Human
cggccuccugagcucgcagcc

SEQ ID NO: 1273498 - RNA, 21 nt, Human
cucccccacucaaagaacccc

SEQ ID NO: 1273499 - RNA, 19 nt, Human
gagagcgcacaugcugugu

SEQ ID NO: 1273500 - RNA, 19 nt, Human
gagcucgcagccagccagg

SEQ ID NO: 1273501 - RNA, 21 nt, Human
gccagguaggcagugagcucc

SEQ ID NO: 1273502 - RNA, 20 nt, Human
gccccguagccuuucccuuc

SEQ ID NO: 1273503 - RNA, 21 nt, Human
ggcaggagaggugugggcccg

SEQ ID NO: 1273504 - RNA, 22 nt, Human
ggcuggggacaggguggggaag

SEQ ID NO: 1273505 - RNA, 21 nt, Human
gggcagacagccccaggccag

SEQ ID NO: 1273506 - RNA, 28 nt, Human
gggcaggagaggugugggcccggugugc

SEQ ID NO: 1273507 - RNA, 22 nt, Human
gugcaguccucaggcggccucc

SEQ ID NO: 1273508 - RNA, 24 nt, Human
gugggcagacagccccaggccagg

SEQ ID NO: 1273509 - RNA, 22 nt, Human
gugugggcagacagccccaggc

SEQ ID NO: 1273510 - RNA, 24 nt, Human
uagccuuucccuuccggagggccu

SEQ ID NO: 1273511 - RNA, 24 nt, Human
uaggcagugagcucccucaaaucc

SEQ ID NO: 1273512 - RNA, 20 nt, Human
ucccucaaauccucccaccc

SEQ ID NO: 1273513 - RNA, 19 nt, Human
ucccucgucccugccuccc

SEQ ID NO: 1273514 - RNA, 21 nt, Human
ucccugccucccccacucaaa

SEQ ID NO: 1273515 - RNA, 21 nt, Human
ugaggcacaugccccguagcc

SEQ ID NO: 1273516 - RNA, 21 nt, Human
ugccucccccacucaaagaac

SEQ ID NO: 1273517 - RNA, 19 nt, Human
uggggacaggguggggaag

SEQ ID NO: 1273518 - RNA, 18 nt, Human
aaacaccucaccuugucu

SEQ ID NO: 1273519 - RNA, 23 nt, Human
aaagaacauccuuauuuacacca

SEQ ID NO: 1273520 - RNA, 19 nt, Human
aaagcaguuucaucguuuu

SEQ ID NO: 1273521 - RNA, 24 nt, Human
aaagugcugcaauuacagguguga

SEQ ID NO: 1273522 - RNA, 20 nt, Human
aaccugguuuucggcucugg

SEQ ID NO: 1273523 - RNA, 20 nt, Human
aacuaaguaaccaacccccc

SEQ ID NO: 1273524 - RNA, 20 nt, Human
aacuuguaaaccacccccuc

SEQ ID NO: 1273525 - RNA, 22 nt, Human
aagcaaccccccacuccugggc

SEQ ID NO: 1273526 - RNA, 19 nt, Human
aagggagaaggggaggggg

SEQ ID NO: 1273527 - RNA, 18 nt, Human
aaguaaccaacccccaga

SEQ ID NO: 1273528 - RNA, 24 nt, Human
aagugaucugccugccucagccuc

SEQ ID NO: 1273529 - RNA, 21 nt, Human
aaguggcacaaucuuggcuca

SEQ ID NO: 1273530 - RNA, 20 nt, Human
aaucuccgccuccccgguuc

SEQ ID NO: 1273531 - RNA, 18 nt, Human
aauuacaggugugagcca

SEQ ID NO: 1273532 - RNA, 21 nt, Human
aauuacaggugugagccacca

SEQ ID NO: 1273533 - RNA, 24 nt, Human
aauuacaggugugagccaccaugc

SEQ ID NO: 1273534 - RNA, 20 nt, Human
acagaaacaaaacagagauc

SEQ ID NO: 1273535 - RNA, 24 nt, Human
acauagcccuuccccauguacagc

SEQ ID NO: 1273536 - RNA, 24 nt, Human
acccuguuggccaggcuggucuug

SEQ ID NO: 1273537 - RNA, 25 nt, Human
acccuguuggccaggcuggucuuga

SEQ ID NO: 1273538 - RNA, 23 nt, Human
acgcaucucuguagugggaggcc

SEQ ID NO: 1273539 - RNA, 20 nt, Human
agaaaaaauucccucaggua

SEQ ID NO: 1273540 - RNA, 19 nt, Human
agacagaggaucacauagg

SEQ ID NO: 1273541 - RNA, 18 nt, Human
agagaaagagggccugag

SEQ ID NO: 1273542 - RNA, 22 nt, Human
agaguaacucacagaaacaaaa

SEQ ID NO: 1273543 - RNA, 24 nt, Human
aggaaaagaacauccuuauuuaca

SEQ ID NO: 1273544 - RNA, 20 nt, Human
aggcaagggagaaggggagg

SEQ ID NO: 1273545 - RNA, 20 nt, Human
aggcaagggagaaggggagg

SEQ ID NO: 1273546 - RNA, 26 nt, Human
aggcaagggagaaggggagggggugc

SEQ ID NO: 1273547 - RNA, 21 nt, Human
aggcagggaggacuagggccg

SEQ ID NO: 1273548 - RNA, 18 nt, Human
agggagaaggggaggggg

SEQ ID NO: 1273549 - RNA, 23 nt, Human
agugauguggcaggcaagacagg

SEQ ID NO: 1273550 - RNA, 24 nt, Human
agugauguggcaggcaagacaggg

SEQ ID NO: 1273551 - RNA, 19 nt, Human
agugggaggccacaugaaa

SEQ ID NO: 1273552 - RNA, 18 nt, Human
auacgcaucucuguagug

SEQ ID NO: 1273553 - RNA, 23 nt, Human
aucacaacugagcggcugagaac

SEQ ID NO: 1273554 - RNA, 25 nt, Human
augaaagugaaccuaacucauguac

SEQ ID NO: 1273555 - RNA, 24 nt, Human
augauugacuacaaugauucaugc

SEQ ID NO: 1273556 - RNA, 18 nt, Human
augcggggcucgcgcccc

SEQ ID NO: 1273557 - RNA, 21 nt, Human
augggacuuaggggacuuucc

SEQ ID NO: 1273558 - RNA, 18 nt, Human
augggguuucacccuguu

SEQ ID NO: 1273559 - RNA, 20 nt, Human
augggguuucacccuguugg

SEQ ID NO: 1273560 - RNA, 24 nt, Human
augggguuucacccuguuggccag

SEQ ID NO: 1273561 - RNA, 19 nt, Human
auuguggugguggaggugg

SEQ ID NO: 1273562 - RNA, 24 nt, Human
auuuuuguauuuuuaguagagaug

SEQ ID NO: 1273563 - RNA, 24 nt, Human
caaagugcugcaauuacaggugug

SEQ ID NO: 1273564 - RNA, 22 nt, Human
caagcaauuuuccugccucagc

SEQ ID NO: 1273565 - RNA, 22 nt, Human
caagugaucugccugccucagc

SEQ ID NO: 1273566 - RNA, 21 nt, Human
caauucagaaccagaggccaa

SEQ ID NO: 1273567 - RNA, 26 nt, Human
cacagacagaaaucauuuuaagacag

SEQ ID NO: 1273568 - RNA, 19 nt, Human
cacccucuccccaggccag

SEQ ID NO: 1273569 - RNA, 21 nt, Human
cacccuguuggccaggcuggu

SEQ ID NO: 1273570 - RNA, 24 nt, Human
cacccuguuggccaggcuggucuu

SEQ ID NO: 1273571 - RNA, 23 nt, Human
cacuugguaaaggcaacacagcu

SEQ ID NO: 1273572 - RNA, 28 nt, Human
cagauaggcaagggagaaggggaggggg

SEQ ID NO: 1273573 - RNA, 19 nt, Human
cagcaguagugggcucugg

SEQ ID NO: 1273574 - RNA, 20 nt, Human
cagcaguagugggcucuggc

SEQ ID NO: 1273575 - RNA, 21 nt, Human
cagcaguagugggcucuggga

SEQ ID NO: 1273576 - RNA, 21 nt, Human
cagccccacuuucucauccug

SEQ ID NO: 1273577 - RNA, 21 nt, Human
caggaaaagaacauccuuauu

SEQ ID NO: 1273578 - RNA, 21 nt, Human
caggcgcccaccaucacgccu

SEQ ID NO: 1273579 - RNA, 22 nt, Human
caguagugggcucuggccccgc

SEQ ID NO: 1273580 - RNA, 21 nt, Human
cauagacaaacaggccauuca

SEQ ID NO: 1273581 - RNA, 27 nt, Human
cauccugacaacccucuuucccacacc

SEQ ID NO: 1273582 - RNA, 21 nt, Human
ccaaagugcugcaauuacagg

SEQ ID NO: 1273583 - RNA, 24 nt, Human
ccaaagugcugcaauuacaggugu

SEQ ID NO: 1273584 - RNA, 20 nt, Human
ccaccaugcccagcuugaac

SEQ ID NO: 1273585 - RNA, 20 nt, Human
ccacugcuguucaugagacc

SEQ ID NO: 1273586 - RNA, 24 nt, Human
ccaggccagcuacucuaacucaua

SEQ ID NO: 1273587 - RNA, 18 nt, Human
ccagggaggcacccucuc

SEQ ID NO: 1273588 - RNA, 22 nt, Human
ccaguggccagcuaucuagugg

SEQ ID NO: 1273589 - RNA, 22 nt, Human
ccauagacaaacaggccauuca

SEQ ID NO: 1273590 - RNA, 22 nt, Human
cccacaccgggucauacagagg

SEQ ID NO: 1273591 - RNA, 18 nt, Human
cccacagagaaagagggc

SEQ ID NO: 1273592 - RNA, 19 nt, Human
cccacagagaaagagggcc

SEQ ID NO: 1273593 - RNA, 19 nt, Human
cccccagaaagcaguuuca

SEQ ID NO: 1273594 - RNA, 23 nt, Human
ccccgguucaagcaauuuuccug

SEQ ID NO: 1273595 - RNA, 18 nt, Human
cccucgggcuccucccgc

SEQ ID NO: 1273596 - RNA, 18 nt, Human
cccucgggcuccucccgc

SEQ ID NO: 1273597 - RNA, 23 nt, Human
ccuccagaugaucccucugacuu

SEQ ID NO: 1273598 - RNA, 20 nt, Human
ccugacaacccucuuuccca

SEQ ID NO: 1273599 - RNA, 21 nt, Human
ccugaccucaagugaucugcc

SEQ ID NO: 1273600 - RNA, 23 nt, Human
ccugaccucaagugaucugccug

SEQ ID NO: 1273601 - RNA, 24 nt, Human
ccugccucagccucccaaagugcu

SEQ ID NO: 1273602 - RNA, 18 nt, Human
ccugccucagcuuccugu

SEQ ID NO: 1273603 - RNA, 21 nt, Human
ccuucucuucccuaaaaaaaa

SEQ ID NO: 1273604 - RNA, 18 nt, Human
cggggacagcugccgccg

SEQ ID NO: 1273605 - RNA, 18 nt, Human
cucaagugaucugccugc

SEQ ID NO: 1273606 - RNA, 23 nt, Human
cucaagugaucugccugccucag

SEQ ID NO: 1273607 - RNA, 23 nt, Human
cucagcuuccuguguagcuggga

SEQ ID NO: 1273608 - RNA, 21 nt, Human
cucauaacccucugaagacac

SEQ ID NO: 1273609 - RNA, 26 nt, Human
cuccugaccucaagugaucugccugc

SEQ ID NO: 1273610 - RNA, 18 nt, Human
cucuaacucauaacccuc

SEQ ID NO: 1273611 - RNA, 20 nt, Human
cucugucgcccaggcuggaa

SEQ ID NO: 1273612 - RNA, 20 nt, Human
cugaagacacuugguaaagg

SEQ ID NO: 1273613 - RNA, 24 nt, Human
cugaugaaauggaagaaagcauua

SEQ ID NO: 1273614 - RNA, 24 nt, Human
cugccucagccucccaaagugcug

SEQ ID NO: 1273615 - RNA, 23 nt, Human
cugccucagcuuccuguguagcu

SEQ ID NO: 1273616 - RNA, 23 nt, Human
cuguuggccaggcuggucuugaa

SEQ ID NO: 1273617 - RNA, 22 nt, Human
cuuuccuuuccuuugacagagu

SEQ ID NO: 1273618 - RNA, 24 nt, Human
gaccucaagugaucugccugccuc

SEQ ID NO: 1273619 - RNA, 27 nt, Human
gagaaggggagggggugcaguggggau

SEQ ID NO: 1273620 - RNA, 22 nt, Human
gagacccacagagaaagagggc

SEQ ID NO: 1273621 - RNA, 20 nt, Human
gagaugggguuucacccugu

SEQ ID NO: 1273622 - RNA, 24 nt, Human
gagaugggguuucacccuguuggc

SEQ ID NO: 1273623 - RNA, 18 nt, Human
gagcggcugagaacugga

SEQ ID NO: 1273624 - RNA, 21 nt, Human
gagcucaggacauuuggacag

SEQ ID NO: 1273625 - RNA, 21 nt, Human
gaucugccugccucagccucc

SEQ ID NO: 1273626 - RNA, 23 nt, Human
gcccaggcuggaaugaaguggca

SEQ ID NO: 1273627 - RNA, 18 nt, Human
gcccucuccacugccagg

SEQ ID NO: 1273628 - RNA, 24 nt, Human
gccucagcuuccuguguagcuggg

SEQ ID NO: 1273629 - RNA, 22 nt, Human
gccuggguaauuuuuguauuuu

SEQ ID NO: 1273630 - RNA, 20 nt, Human
gccuugaucaucagaaaggg

SEQ ID NO: 1273631 - RNA, 23 nt, Human
gcucaauaaacuuguaaaccacc

SEQ ID NO: 1273632 - RNA, 24 nt, Human
gcucugucgcccaggcuggaauga

SEQ ID NO: 1273633 - RNA, 23 nt, Human
gcuggucuugaacuccugaccuc

SEQ ID NO: 1273634 - RNA, 24 nt, Human
ggacuagggccgagcuucugagaa

SEQ ID NO: 1273635 - RNA, 18 nt, Human
ggagcgcgacccggaagc

SEQ ID NO: 1273636 - RNA, 18 nt, Human
ggcaugaccaguggccag

SEQ ID NO: 1273637 - RNA, 24 nt, Human
ggcuggucuugaacuccugaccuc

SEQ ID NO: 1273638 - RNA, 18 nt, Human
gggaaaggaauacagagu

SEQ ID NO: 1273639 - RNA, 22 nt, Human
gggguuucacccuguuggccag

SEQ ID NO: 1273640 - RNA, 19 nt, Human
ggucuugaacuccugaccu

SEQ ID NO: 1273641 - RNA, 20 nt, Human
guaaccaacccccagaaagc

SEQ ID NO: 1273642 - RNA, 18 nt, Human
guagcugggauuacaggc

SEQ ID NO: 1273643 - RNA, 18 nt, Human
guagcugggauuacaggc

SEQ ID NO: 1273644 - RNA, 19 nt, Human
guauccauucacuacuuga

SEQ ID NO: 1273645 - RNA, 19 nt, Human
gugaagaaaggcaccagcc

SEQ ID NO: 1273646 - RNA, 18 nt, Human
gugaucugccugccucag

SEQ ID NO: 1273647 - RNA, 24 nt, Human
gugaucugccugccucagccuccc

SEQ ID NO: 1273648 - RNA, 19 nt, Human
guggucuuaucgucacccu

SEQ ID NO: 1273649 - RNA, 24 nt, Human
guuucgcucugucgcccaggcugg

SEQ ID NO: 1273650 - RNA, 23 nt, Human
uaaaaggaacaggaaaagaacau

SEQ ID NO: 1273651 - RNA, 20 nt, Human
uaaaaugaguaguauauccc

SEQ ID NO: 1273652 - RNA, 24 nt, Human
uaaagaucaaacccagggaggcac

SEQ ID NO: 1273653 - RNA, 22 nt, Human
uaaccaacccccagaaagcagu

SEQ ID NO: 1273654 - RNA, 24 nt, Human
uaacuaaguaaccaacccccagaa

SEQ ID NO: 1273655 - RNA, 19 nt, Human
uaacucacagaaacaaaac

SEQ ID NO: 1273656 - RNA, 19 nt, Human
uaacucacagaaacaaaac

SEQ ID NO: 1273657 - RNA, 23 nt, Human
uaagacagaggaucacauaggca

SEQ ID NO: 1273658 - RNA, 21 nt, Human
uaaggacacugcagaaggcug

SEQ ID NO: 1273659 - RNA, 24 nt, Human
uaauuuuuguauuuuuaguagaga

SEQ ID NO: 1273660 - RNA, 20 nt, Human
uacacccagcugacaaacac

SEQ ID NO: 1273661 - RNA, 20 nt, Human
uacagccaggguaaggacac

SEQ ID NO: 1273662 - RNA, 24 nt, Human
uacaggugugagccaccaugccca

SEQ ID NO: 1273663 - RNA, 23 nt, Human
uagacaaacaggccauucaagug

SEQ ID NO: 1273664 - RNA, 21 nt, Human
uagguggucuuaucgucaccc

SEQ ID NO: 1273665 - RNA, 19 nt, Human
uaguagagaugggguuuca

SEQ ID NO: 1273666 - RNA, 21 nt, Human
uaguagagaugggguuucacc

SEQ ID NO: 1273667 - RNA, 24 nt, Human
uaguagagaugggguuucacccug

SEQ ID NO: 1273668 - RNA, 19 nt, Human
uauccugagcucugugaac

SEQ ID NO: 1273669 - RNA, 19 nt, Human
uauuguggugguggaggug

SEQ ID NO: 1273670 - RNA, 22 nt, Human
ucaaccugguuuucggcucugg

SEQ ID NO: 1273671 - RNA, 22 nt, Human
ucaagugaucugccugccucag

SEQ ID NO: 1273672 - RNA, 21 nt, Human
ucacaaccaucuucacucguc

SEQ ID NO: 1273673 - RNA, 21 nt, Human
ucacacaugcaugcaaagggc

SEQ ID NO: 1273674 - RNA, 22 nt, Human
ucacacaugcaugcaaagggca

SEQ ID NO: 1273675 - RNA, 24 nt, Human
ucacggagacuccaagagccacgg

SEQ ID NO: 1273676 - RNA, 19 nt, Human
ucacugcaaucuccgccuc

SEQ ID NO: 1273677 - RNA, 24 nt, Human
ucacugcaaucuccgccuccccgg

SEQ ID NO: 1273678 - RNA, 24 nt, Human
ucacugcaaucuccgccuccccgg

SEQ ID NO: 1273679 - RNA, 26 nt, Human
ucacugcaaucuccgccuccccgguu

SEQ ID NO: 1273680 - RNA, 21 nt, Human
ucagucucagaugggugcugg

SEQ ID NO: 1273681 - RNA, 22 nt, Human
uccaaucagaaacacacagcuu

SEQ ID NO: 1273682 - RNA, 23 nt, Human
ucccaaagugcugcaauuacagg

SEQ ID NO: 1273683 - RNA, 23 nt, Human
uccccaggccagcuacucuaacu

SEQ ID NO: 1273684 - RNA, 20 nt, Human
uccccauguacagccagggu

SEQ ID NO: 1273685 - RNA, 18 nt, Human
uccccgguucaagcaauu

SEQ ID NO: 1273686 - RNA, 24 nt, Human
uccccgguucaagcaauuuuccug

SEQ ID NO: 1273687 - RNA, 24 nt, Human
uccgccuccccgguucaagcaauu

SEQ ID NO: 1273688 - RNA, 24 nt, Human
uccuguguagcugggauuacaggc

SEQ ID NO: 1273689 - RNA, 21 nt, Human
ucgcccaggcuggaaugaagu

SEQ ID NO: 1273690 - RNA, 22 nt, Human
ucgcucugucgcccaggcugga

SEQ ID NO: 1273691 - RNA, 19 nt, Human
ucgggcuccucccgccucg

SEQ ID NO: 1273692 - RNA, 21 nt, Human
ucuccacuuaucuucugcuac

SEQ ID NO: 1273693 - RNA, 21 nt, Human
ucucuguagugggaggccaca

SEQ ID NO: 1273694 - RNA, 21 nt, Human
ucugauccauaauucugacau

SEQ ID NO: 1273695 - RNA, 22 nt, Human
ucugcaauucagaaccagaggc

SEQ ID NO: 1273696 - RNA, 18 nt, Human
ucugucgcccaggcugga

SEQ ID NO: 1273697 - RNA, 22 nt, Human
ucuucccuaaaaaaaauugaga

SEQ ID NO: 1273698 - RNA, 21 nt, Human
ucuugaacuccugaccucaag

SEQ ID NO: 1273699 - RNA, 19 nt, Human
ugaagggcaagagugaaau

SEQ ID NO: 1273700 - RNA, 21 nt, Human
ugaagggcaagagugaaaugg

SEQ ID NO: 1273701 - RNA, 23 nt, Human
ugaaguggcacaaucuuggcuca

SEQ ID NO: 1273702 - RNA, 20 nt, Human
ugacaaacacuuugggucug

SEQ ID NO: 1273703 - RNA, 18 nt, Human
ugacacaucuguaaaaca

SEQ ID NO: 1273704 - RNA, 18 nt, Human
ugaccucaagugaucugc

SEQ ID NO: 1273705 - RNA, 24 nt, Human
ugaccucaagugaucugccugccu

SEQ ID NO: 1273706 - RNA, 23 nt, Human
ugacuucugggcauacgcaucuc

SEQ ID NO: 1273707 - RNA, 19 nt, Human
ugagaugcaggcuccucca

SEQ ID NO: 1273708 - RNA, 22 nt, Human
ugcaauuacaggugugagccac

SEQ ID NO: 1273709 - RNA, 24 nt, Human
ugcaauuacaggugugagccacca

SEQ ID NO: 1273710 - RNA, 22 nt, Human
ugccagggaaggaagcuggcca

SEQ ID NO: 1273711 - RNA, 25 nt, Human
ugccucagccucccaaagugcugca

SEQ ID NO: 1273712 - RNA, 24 nt, Human
ugccucagcuuccuguguagcugg

SEQ ID NO: 1273713 - RNA, 24 nt, Human
uggaaugaaguggcacaaucuugg

SEQ ID NO: 1273714 - RNA, 18 nt, Human
uggaggaggcucugaugu

SEQ ID NO: 1273715 - RNA, 21 nt, Human
uggcaaccccuagccacuccu

SEQ ID NO: 1273716 - RNA, 24 nt, Human
uggcacaaucuuggcucacugcaa

SEQ ID NO: 1273717 - RNA, 22 nt, Human
uggccaggcugaauccuuccug

SEQ ID NO: 1273718 - RNA, 24 nt, Human
uggccaggcuggucuugaacuccu

SEQ ID NO: 1273719 - RNA, 18 nt, Human
ugggaggccacaugaaag

SEQ ID NO: 1273720 - RNA, 21 nt, Human
ugggauuacaggcgcccacca

SEQ ID NO: 1273721 - RNA, 22 nt, Human
ugggauuacaggcgcccaccau

SEQ ID NO: 1273722 - RNA, 21 nt, Human
ugggcucuggccccgccaagg

SEQ ID NO: 1273723 - RNA, 24 nt, Human
ugggguuucacccuguuggccagg

SEQ ID NO: 1273724 - RNA, 18 nt, Human
uggugguggaggugggga

SEQ ID NO: 1273725 - RNA, 22 nt, Human
uggugguggagguggggaguuc

SEQ ID NO: 1273726 - RNA, 23 nt, Human
uguaaaagcuugcacaaagccgg

SEQ ID NO: 1273727 - RNA, 25 nt, Human
uguaaaccacccccucucuuuagag

SEQ ID NO: 1273728 - RNA, 24 nt, Human
uguagcugggauuacaggcgccca

SEQ ID NO: 1273729 - RNA, 21 nt, Human
uguauuuuuaguagagauggg

SEQ ID NO: 1273730 - RNA, 21 nt, Human
ugucgcccaggcuggaaugaa

SEQ ID NO: 1273731 - RNA, 19 nt, Human
ugugcagggccuugaucau

SEQ ID NO: 1273732 - RNA, 21 nt, Human
uguggcaggcaagacagggac

SEQ ID NO: 1273733 - RNA, 18 nt, Human
uguggugguggagguggg

SEQ ID NO: 1273734 - RNA, 21 nt, Human
uguggugguggagguggggag

SEQ ID NO: 1273735 - RNA, 21 nt, Human
uguguagcugggauuacaggc

SEQ ID NO: 1273736 - RNA, 18 nt, Human
uguuucuauccugagcuc

SEQ ID NO: 1273737 - RNA, 18 nt, Human
uuaguagagaugggguuu

SEQ ID NO: 1273738 - RNA, 24 nt, Human
uuaguagagaugggguuucacccu

SEQ ID NO: 1273739 - RNA, 25 nt, Human
uuaguagagaugggguuucacccug

SEQ ID NO: 1273740 - RNA, 20 nt, Human
uuauuuuccuauucugagcu

SEQ ID NO: 1273741 - RNA, 21 nt, Human
uucaagcaauuuuccugccuc

SEQ ID NO: 1273742 - RNA, 24 nt, Human
uucaagcaauuuuccugccucagc

SEQ ID NO: 1273743 - RNA, 23 nt, Human
uuccaauauaaaaucccaaguua

SEQ ID NO: 1273744 - RNA, 18 nt, Human
uuccccauguacagccag

SEQ ID NO: 1273745 - RNA, 24 nt, Human
uugaucacaacugagcggcugaga

SEQ ID NO: 1273746 - RNA, 23 nt, Human
uugaugcuuccagcuagauggca

SEQ ID NO: 1273747 - RNA, 23 nt, Human
uugcuaccuacuaaaagcacuua

SEQ ID NO: 1273748 - RNA, 22 nt, Human
uuucacccuguuggccaggcug

SEQ ID NO: 1273749 - RNA, 24 nt, Human
uuucacccuguuggccaggcuggu

SEQ ID NO: 1273750 - RNA, 19 nt, Human
uuucgcucugucgcccagg

SEQ ID NO: 1273751 - RNA, 22 nt, Human
uuucgcucugucgcccaggcug

SEQ ID NO: 1273752 - RNA, 23 nt, Human
uuucgcucugucgcccaggcugg

SEQ ID NO: 1273753 - RNA, 24 nt, Human
uuucgcucugucgcccaggcugga

SEQ ID NO: 1273754 - RNA, 25 nt, Human
uuuuguuuuuauuuuuccccuuuca

SEQ ID NO: 1273755 - RNA, 24 nt, Human
uuuuuaguagagaugggguuucac

SEQ ID NO: 1273756 - RNA, 20 nt, Human
uuuuuguauuuuuaguagag

SEQ ID NO: 1273757 - RNA, 22 nt, Human
cagcugcucgcuguccacuggg

SEQ ID NO: 1273758 - RNA, 24 nt, Human
caucacagucgcggcucagcugcu

SEQ ID NO: 1273759 - RNA, 20 nt, Human
ccacugggccgaagaggcgg

SEQ ID NO: 1273760 - RNA, 24 nt, Human
ccuugcugccgcauggguucugac

SEQ ID NO: 1273761 - RNA, 20 nt, Human
cggcggcaggccuugcugcc

SEQ ID NO: 1273762 - RNA, 19 nt, Human
ucagcugcucgcuguccac

SEQ ID NO: 1273763 - RNA, 22 nt, Human
aaaaaaaaaaaaaaaaaaagaa

SEQ ID NO: 1273764 - RNA, 21 nt, Human
aaaaaugcaccaagcuuauga

SEQ ID NO: 1273765 - RNA, 23 nt, Human
aaacagauuugaacagcuaaaac

SEQ ID NO: 1273766 - RNA, 21 nt, Human
aaagggaccugcuccggcugc

SEQ ID NO: 1273767 - RNA, 18 nt, Human
aaaugcggcggcucaaau

SEQ ID NO: 1273768 - RNA, 23 nt, Human
aacaccaaccaacucucucacuc

SEQ ID NO: 1273769 - RNA, 22 nt, Human
aagagacaaacagauuugaaca

SEQ ID NO: 1273770 - RNA, 27 nt, Human
aagagacaaacagauuugaacagcuaa

SEQ ID NO: 1273771 - RNA, 22 nt, Human
acaccacuucucuugcaaacug

SEQ ID NO: 1273772 - RNA, 23 nt, Human
agaccuagagaaggaucgggacg

SEQ ID NO: 1273773 - RNA, 21 nt, Human
agccaagcugaauggggcgcg

SEQ ID NO: 1273774 - RNA, 22 nt, Human
aggaaugugugggcggucgagg

SEQ ID NO: 1273775 - RNA, 23 nt, Human
caccaaccaacucucucacucac

SEQ ID NO: 1273776 - RNA, 18 nt, Human
caccuuugugucacuguu

SEQ ID NO: 1273777 - RNA, 18 nt, Human
cagccaagcugaaugggg

SEQ ID NO: 1273778 - RNA, 20 nt, Human
cagcgaucucucucuucucc

SEQ ID NO: 1273779 - RNA, 21 nt, Human
ccaggaagaauuugcugaaaa

SEQ ID NO: 1273780 - RNA, 25 nt, Human
cccaacaccaaccaacucucucacu

SEQ ID NO: 1273781 - RNA, 20 nt, Human
ccuccggcccaacaccaacc

SEQ ID NO: 1273782 - RNA, 20 nt, Human
ccuguacaccacuucucuug

SEQ ID NO: 1273783 - RNA, 21 nt, Human
cgagguggcugcugccgauuu

SEQ ID NO: 1273784 - RNA, 21 nt, Human
cgaugagucuucccgcuuucc

SEQ ID NO: 1273785 - RNA, 23 nt, Human
cggcccaacaccaaccaacucuc

SEQ ID NO: 1273786 - RNA, 26 nt, Human
cuaaaacaucuuaaaaaugcaccaaa

SEQ ID NO: 1273787 - RNA, 18 nt, Human
cugacggccaggaagaau

SEQ ID NO: 1273788 - RNA, 21 nt, Human
cuuaugaagucucaaacaaaa

SEQ ID NO: 1273789 - RNA, 22 nt, Human
gaucuuaccuacgagaccuaga

SEQ ID NO: 1273790 - RNA, 20 nt, Human
ggcuuagaagacaggccuua

SEQ ID NO: 1273791 - RNA, 19 nt, Human
guuggauuuaguugguugg

SEQ ID NO: 1273792 - RNA, 22 nt, Human
uaacuuggugacacuuuaguga

SEQ ID NO: 1273793 - RNA, 24 nt, Human
uacaccacuucucuuggggaagcc

SEQ ID NO: 1273794 - RNA, 22 nt, Human
uacaucuguaacuuggugacac

SEQ ID NO: 1273795 - RNA, 24 nt, Human
uagagguuuauuaucagucugugc

SEQ ID NO: 1273796 - RNA, 22 nt, Human
uagcauacuauguaugcaaaag

SEQ ID NO: 1273797 - RNA, 21 nt, Human
ucaacaagcuagaaaugguga

SEQ ID NO: 1273798 - RNA, 23 nt, Human
uccacgaaauggcggaccaccgc

SEQ ID NO: 1273799 - RNA, 24 nt, Human
ucccgagacagcgaucucucucuu

SEQ ID NO: 1273800 - RNA, 23 nt, Human
ucgacuaaaaaaaaaaaaaaaaa

SEQ ID NO: 1273801 - RNA, 25 nt, Human
ucgacuaaaaaaaaaaaaaaaaaaa

SEQ ID NO: 1273802 - RNA, 24 nt, Human
ucucccgagacagcgaucucucuc

SEQ ID NO: 1273803 - RNA, 21 nt, Human
ucucucucuucuccuaucucu

SEQ ID NO: 1273804 - RNA, 18 nt, Human
ugacgacuggccagccug

SEQ ID NO: 1273805 - RNA, 21 nt, Human
ugagcugauuggccaggaaug

SEQ ID NO: 1273806 - RNA, 20 nt, Human
ugagucuucccgcuuuccuc

SEQ ID NO: 1273807 - RNA, 19 nt, Human
ugcucgggaaccaaagggc

SEQ ID NO: 1273808 - RNA, 19 nt, Human
uggccaggaaugugugggc

SEQ ID NO: 1273809 - RNA, 19 nt, Human
ugggcggucgagguggcug

SEQ ID NO: 1273810 - RNA, 20 nt, Human
ugugaaacgacaccagccaa

SEQ ID NO: 1273811 - RNA, 25 nt, Human
uguuguggauuuuuccugcuuuuuu

SEQ ID NO: 1273812 - RNA, 23 nt, Human
uucaagagacaaacagauuugaa

SEQ ID NO: 1273813 - RNA, 19 nt, Human
uugaauuuucuguacauac

SEQ ID NO: 1273814 - RNA, 22 nt, Human
uuuccuguacaccacuucucuu

SEQ ID NO: 1273815 - RNA, 23 nt, Human
uuuucuguacauacuccugucaa

SEQ ID NO: 1273816 - RNA, 25 nt, Human
aaaagaaagaggaacugagaaagag

SEQ ID NO: 1273817 - RNA, 19 nt, Human
aaaguuucgucagucugug

SEQ ID NO: 1273818 - RNA, 27 nt, Human
aacagagcaacaggaauuagaaaagaa

SEQ ID NO: 1273819 - RNA, 18 nt, Human
aaccccaguucuccuacc

SEQ ID NO: 1273820 - RNA, 21 nt, Human
aaccugggagcaggggagggc

SEQ ID NO: 1273821 - RNA, 23 nt, Human
aagacaggagacagaagugagga

SEQ ID NO: 1273822 - RNA, 21 nt, Human
aagcagagguccuguucuaug

SEQ ID NO: 1273823 - RNA, 23 nt, Human
aaggaagaaacagagcaacagga

SEQ ID NO: 1273824 - RNA, 18 nt, Human
acaggaagcuggggcucc

SEQ ID NO: 1273825 - RNA, 21 nt, Human
accccaacccccaucagcugg

SEQ ID NO: 1273826 - RNA, 22 nt, Human
accccaugacuauagggggcug

SEQ ID NO: 1273827 - RNA, 25 nt, Human
acccucguuggugcaucugucuuca

SEQ ID NO: 1273828 - RNA, 18 nt, Human
accucugugcucugagac

SEQ ID NO: 1273829 - RNA, 20 nt, Human
agaaaagaaagaggaacuga

SEQ ID NO: 1273830 - RNA, 22 nt, Human
agacagaagugaggaccuaagc

SEQ ID NO: 1273831 - RNA, 25 nt, Human
agacagaagugaggaccuaagccug

SEQ ID NO: 1273832 - RNA, 18 nt, Human
agacaggaagagagcugg

SEQ ID NO: 1273833 - RNA, 22 nt, Human
agacaggaagagagcuggucaa

SEQ ID NO: 1273834 - RNA, 18 nt, Human
agagaaagggagggcaag

SEQ ID NO: 1273835 - RNA, 19 nt, Human
agagagaaaccuacagaaa

SEQ ID NO: 1273836 - RNA, 25 nt, Human
agaggcugugcagggagacuucuag

SEQ ID NO: 1273837 - RNA, 21 nt, Human
agcaacaggaauuagaaaaga

SEQ ID NO: 1273838 - RNA, 21 nt, Human
agcaccccaacccccaucagc

SEQ ID NO: 1273839 - RNA, 20 nt, Human
agccccuugccccugcaggc

SEQ ID NO: 1273840 - RNA, 26 nt, Human
agcuauugggacaaauggacaucaga

SEQ ID NO: 1273841 - RNA, 18 nt, Human
agcugucccuucauagcc

SEQ ID NO: 1273842 - RNA, 19 nt, Human
aggaagcaccccaaccccc

SEQ ID NO: 1273843 - RNA, 20 nt, Human
agggaagggaggugcaugga

SEQ ID NO: 1273844 - RNA, 19 nt, Human
agggaccagcgguguggga

SEQ ID NO: 1273845 - RNA, 20 nt, Human
aggggcugggcacuuccacc

SEQ ID NO: 1273846 - RNA, 24 nt, Human
aggggcugggcacuuccacccaga

SEQ ID NO: 1273847 - RNA, 21 nt, Human
aguccaggccaugcuuagccu

SEQ ID NO: 1273848 - RNA, 23 nt, Human
auggagccugcagguaaagugau

SEQ ID NO: 1273849 - RNA, 21 nt, Human
caccgccgccgucccgcaggc

SEQ ID NO: 1273850 - RNA, 26 nt, Human
cacgugcaugcccaaaacacuguaca

SEQ ID NO: 1273851 - RNA, 21 nt, Human
cacuguacaacacugucccgg

SEQ ID NO: 1273852 - RNA, 22 nt, Human
cagaauggcuccuugggaggga

SEQ ID NO: 1273853 - RNA, 21 nt, Human
cagcugugcuuuggcccugcu

SEQ ID NO: 1273854 - RNA, 21 nt, Human
caggagacagaagugaggacc

SEQ ID NO: 1273855 - RNA, 18 nt, Human
cagggagacuucuaggug

SEQ ID NO: 1273856 - RNA, 24 nt, Human
cagggugguucccaucagccuuga

SEQ ID NO: 1273857 - RNA, 21 nt, Human
caguccaggccaugcuuagcc

SEQ ID NO: 1273858 - RNA, 18 nt, Human
cauuccagacccucguug

SEQ ID NO: 1273859 - RNA, 22 nt, Human
ccaaaacacuguacaacacugu

SEQ ID NO: 1273860 - RNA, 23 nt, Human
ccacugggagcaggugcugggcu

SEQ ID NO: 1273861 - RNA, 24 nt, Human
ccagcagagagugauccuggggcc

SEQ ID NO: 1273862 - RNA, 20 nt, Human
ccccaugacuauagggggcu

SEQ ID NO: 1273863 - RNA, 26 nt, Human
ccccggagaccuggcccagcccugcc

SEQ ID NO: 1273864 - RNA, 18 nt, Human
cccuccagugcuggcccc

SEQ ID NO: 1273865 - RNA, 18 nt, Human
cccucggcgccacaccug

SEQ ID NO: 1273866 - RNA, 20 nt, Human
ccggggagggggaggugggu

SEQ ID NO: 1273867 - RNA, 25 nt, Human
ccugcaggaccccugccuccccgga

SEQ ID NO: 1273868 - RNA, 21 nt, Human
ccugcaggcccagucauagcu

SEQ ID NO: 1273869 - RNA, 21 nt, Human
ccugcaggccccucucucugg

SEQ ID NO: 1273870 - RNA, 18 nt, Human
ccugcaggccuggagggc

SEQ ID NO: 1273871 - RNA, 25 nt, Human
ccugccugcucaccugguccccugg

SEQ ID NO: 1273872 - RNA, 18 nt, Human
ccuguagagaucacugcu

SEQ ID NO: 1273873 - RNA, 22 nt, Human
cggggagggggagguggguccc

SEQ ID NO: 1273874 - RNA, 20 nt, Human
cgggucggggcagggacgcg

SEQ ID NO: 1273875 - RNA, 21 nt, Human
cuccagaccauuccagacccu

SEQ ID NO: 1273876 - RNA, 24 nt, Human
cugacccugcuuuccagaccacug

SEQ ID NO: 1273877 - RNA, 19 nt, Human
cugcaggccccucucucug

SEQ ID NO: 1273878 - RNA, 22 nt, Human
cuggaacccaggcccagagagc

SEQ ID NO: 1273879 - RNA, 21 nt, Human
cuggcaucgucugggucugaa

SEQ ID NO: 1273880 - RNA, 21 nt, Human
cuggguucucaccugccucag

SEQ ID NO: 1273881 - RNA, 28 nt, Human
cugugcagggagacuucuagguggccag

SEQ ID NO: 1273882 - RNA, 24 nt, Human
cuuccacccagagucacacacaga

SEQ ID NO: 1273883 - RNA, 18 nt, Human
gaaaggaggacagacgug

SEQ ID NO: 1273884 - RNA, 19 nt, Human
gaacgcagauggaccucua

SEQ ID NO: 1273885 - RNA, 23 nt, Human
gaccccugccuccccggagaccu

SEQ ID NO: 1273886 - RNA, 20 nt, Human
gacccugcuuuccagaccac

SEQ ID NO: 1273887 - RNA, 21 nt, Human
gacgugggggguggagagaga

SEQ ID NO: 1273888 - RNA, 23 nt, Human
gagaaagagggagacaacaaaga

SEQ ID NO: 1273889 - RNA, 18 nt, Human
gagacaacaaagacagga

SEQ ID NO: 1273890 - RNA, 19 nt, Human
gagagaaagggagggcaag

SEQ ID NO: 1273891 - RNA, 20 nt, Human
gaggaccaggcaggacccag

SEQ ID NO: 1273892 - RNA, 23 nt, Human
gaguaucacgugcaugcccaaaa

SEQ ID NO: 1273893 - RNA, 19 nt, Human
gcagggacgcggcaugugg

SEQ ID NO: 1273894 - RNA, 18 nt, Human
gccaccgccgccgucccg

SEQ ID NO: 1273895 - RNA, 19 nt, Human
gccucagggagggaaggga

SEQ ID NO: 1273896 - RNA, 20 nt, Human
gccuggggccuccugcccac

SEQ ID NO: 1273897 - RNA, 22 nt, Human
gccuggggccuccugcccacug

SEQ ID NO: 1273898 - RNA, 18 nt, Human
gcgccaccgccgccgucc

SEQ ID NO: 1273899 - RNA, 18 nt, Human
ggagggaagggaggugca

SEQ ID NO: 1273900 - RNA, 24 nt, Human
ggagggaagggaggugcauggagc

SEQ ID NO: 1273901 - RNA, 21 nt, Human
ggcaagggagaagggaagaga

SEQ ID NO: 1273902 - RNA, 24 nt, Human
ggcauguggccggggagggggagg

SEQ ID NO: 1273903 - RNA, 20 nt, Human
gggacaaauggacaucagaa

SEQ ID NO: 1273904 - RNA, 18 nt, Human
gggcagagggcaggcccc

SEQ ID NO: 1273905 - RNA, 24 nt, Human
gggcaggggcugggcacuuccacc

SEQ ID NO: 1273906 - RNA, 20 nt, Human
ggggaaggggagggcaguag

SEQ ID NO: 1273907 - RNA, 23 nt, Human
gggguggagagagaaagggaggg

SEQ ID NO: 1273908 - RNA, 22 nt, Human
gguggagagagaaagggagggc

SEQ ID NO: 1273909 - RNA, 24 nt, Human
guggccggggagggggaggugggu

SEQ ID NO: 1273910 - RNA, 21 nt, Human
uaccucugugcucugagacuc

SEQ ID NO: 1273911 - RNA, 24 nt, Human
uagaggcugugcagggagacuucu

SEQ ID NO: 1273912 - RNA, 18 nt, Human
ucagacacugagaagagc

SEQ ID NO: 1273913 - RNA, 19 nt, Human
ucagcuggguaggugggga

SEQ ID NO: 1273914 - RNA, 18 nt, Human
uccagccagccccuugcc

SEQ ID NO: 1273915 - RNA, 20 nt, Human
uccccggagaccuggcccag

SEQ ID NO: 1273916 - RNA, 23 nt, Human
uccccggagaccuggcccagccc

SEQ ID NO: 1273917 - RNA, 23 nt, Human
uccccucggcgccacaccugcag

SEQ ID NO: 1273918 - RNA, 22 nt, Human
ucccuucauagccuuggccuga

SEQ ID NO: 1273919 - RNA, 22 nt, Human
uccugcccacuguccuuugcag

SEQ ID NO: 1273920 - RNA, 21 nt, Human
uccuugggagggaggaccagg

SEQ ID NO: 1273921 - RNA, 19 nt, Human
uccuuugcagcagggaccc

SEQ ID NO: 1273922 - RNA, 21 nt, Human
uccuuugcagcagggacccca

SEQ ID NO: 1273923 - RNA, 22 nt, Human
ucggaggggcaaugacagucuu

SEQ ID NO: 1273924 - RNA, 19 nt, Human
ucggcgccacaccugcagg

SEQ ID NO: 1273925 - RNA, 20 nt, Human
ucgucugggucugaacgcag

SEQ ID NO: 1273926 - RNA, 21 nt, Human
ucucuggguucucaccugccu

SEQ ID NO: 1273927 - RNA, 21 nt, Human
ucugacccugcuuuccagacc

SEQ ID NO: 1273928 - RNA, 23 nt, Human
ucugugcucugagacuccagcca

SEQ ID NO: 1273929 - RNA, 24 nt, Human
ucuucugcuccuggggaaaaggug

SEQ ID NO: 1273930 - RNA, 26 nt, Human
ugaaauaauacaaaacaucucacaga

SEQ ID NO: 1273931 - RNA, 22 nt, Human
ugagaaagagggagacaacaaa

SEQ ID NO: 1273932 - RNA, 18 nt, Human
ugagaagagcuguauccu

SEQ ID NO: 1273933 - RNA, 24 nt, Human
ugagaagagcuguauccucagcac

SEQ ID NO: 1273934 - RNA, 18 nt, Human
ugagcagaagccacugug

SEQ ID NO: 1273935 - RNA, 18 nt, Human
ugaggugagcgcaccuca

SEQ ID NO: 1273936 - RNA, 18 nt, Human
ugaggugugcugcuggag

SEQ ID NO: 1273937 - RNA, 22 nt, Human
ugaguaaaggggaaggggaggg

SEQ ID NO: 1273938 - RNA, 23 nt, Human
ugcaugcccaaaacacuguacaa

SEQ ID NO: 1273939 - RNA, 21 nt, Human
ugcccagcugugcuuuggccc

SEQ ID NO: 1273940 - RNA, 18 nt, Human
ugccccugcaggccugga

SEQ ID NO: 1273941 - RNA, 24 nt, Human
ugccugcucaccugcaggccccuc

SEQ ID NO: 1273942 - RNA, 18 nt, Human
ugcuggaggggccaucag

SEQ ID NO: 1273943 - RNA, 23 nt, Human
ugcuggugaaauaauacaaaaca

SEQ ID NO: 1273944 - RNA, 18 nt, Human
ugcuuaugugugugugcu

SEQ ID NO: 1273945 - RNA, 20 nt, Human
uggaaaagucaugugggugg

SEQ ID NO: 1273946 - RNA, 20 nt, Human
uggaacccaggcccagagag

SEQ ID NO: 1273947 - RNA, 19 nt, Human
uggaagggaggcugcagcg

SEQ ID NO: 1273948 - RNA, 19 nt, Human
uggagagagaaagggaggg

SEQ ID NO: 1273949 - RNA, 18 nt, Human
ugggagcaggggagggca

SEQ ID NO: 1273950 - RNA, 21 nt, Human
ugggagcaggugcugggcuga

SEQ ID NO: 1273951 - RNA, 23 nt, Human
ugggagcaggugcugggcugacc

SEQ ID NO: 1273952 - RNA, 21 nt, Human
ugggcacuuccacccagaguc

SEQ ID NO: 1273953 - RNA, 20 nt, Human
ugggcugacccaccaggacc

SEQ ID NO: 1273954 - RNA, 23 nt, Human
ugggcugaguaaaggggaagggg

SEQ ID NO: 1273955 - RNA, 19 nt, Human
uggggcagagggcaggccc

SEQ ID NO: 1273956 - RNA, 18 nt, Human
ugugcaaaagcagagguc

SEQ ID NO: 1273957 - RNA, 22 nt, Human
ugugggugggccccuccagugc

SEQ ID NO: 1273958 - RNA, 24 nt, Human
ugugggugggccccuccagugcug

SEQ ID NO: 1273959 - RNA, 21 nt, Human
ugugugaguaucacgugcaug

SEQ ID NO: 1273960 - RNA, 18 nt, Human
ugugugcuggaggggcca

SEQ ID NO: 1273961 - RNA, 18 nt, Human
uguuucuuuggauggcuc

SEQ ID NO: 1273962 - RNA, 22 nt, Human
uucauagccuuggccugaaagg

SEQ ID NO: 1273963 - RNA, 20 nt, Human
uucccuggaacccaggccca

SEQ ID NO: 1273964 - RNA, 20 nt, Human
uucuagguggccagcugggc

SEQ ID NO: 1273965 - RNA, 19 nt, Human
uuggagucugcagggaggc

SEQ ID NO: 1273966 - RNA, 24 nt, Human
uuggugcaucugucuucaucuguu

SEQ ID NO: 1273967 - RNA, 25 nt, Human
aaagaaggaaaggccaugaguccug

SEQ ID NO: 1273968 - RNA, 23 nt, Human
aaagauuccaaaccagcagaaca

SEQ ID NO: 1273969 - RNA, 24 nt, Human
aaagugcugggauuacagguguga

SEQ ID NO: 1273970 - RNA, 22 nt, Human
aacacaauuggcaaaugaagcc

SEQ ID NO: 1273971 - RNA, 18 nt, Human
aagugcugggauuacagg

SEQ ID NO: 1273972 - RNA, 19 nt, Human
aagugcugggauuacaggu

SEQ ID NO: 1273973 - RNA, 26 nt, Human
aagugcugggauuacaggugugagcc

SEQ ID NO: 1273974 - RNA, 24 nt, Human
acgacaguggugcaaucucggcuc

SEQ ID NO: 1273975 - RNA, 22 nt, Human
acuaaaugacacagggcuauga

SEQ ID NO: 1273976 - RNA, 23 nt, Human
acuggaguacagagauaaucucc

SEQ ID NO: 1273977 - RNA, 18 nt, Human
acuguaucaaaaaacaag

SEQ ID NO: 1273978 - RNA, 24 nt, Human
agcgauuaucucgccucagccucc

SEQ ID NO: 1273979 - RNA, 24 nt, Human
caaagugcugggauuacaggugug

SEQ ID NO: 1273980 - RNA, 18 nt, Human
cacaucuuggcuaaggag

SEQ ID NO: 1273981 - RNA, 18 nt, Human
cacugcaaccucugccuc

SEQ ID NO: 1273982 - RNA, 21 nt, Human
cacugcaaccucugccuccca

SEQ ID NO: 1273983 - RNA, 19 nt, Human
cagcagaacagaaauggac

SEQ ID NO: 1273984 - RNA, 22 nt, Human
ccaaaagugcugaacacuaaau

SEQ ID NO: 1273985 - RNA, 20 nt, Human
ccaaagugcugggauuacag

SEQ ID NO: 1273986 - RNA, 21 nt, Human
ccaaagugcugggauuacagg

SEQ ID NO: 1273987 - RNA, 21 nt, Human
ccaaagugcugggauuacagg

SEQ ID NO: 1273988 - RNA, 24 nt, Human
ccaaagugcugggauuacaggugu

SEQ ID NO: 1273989 - RNA, 21 nt, Human
ccaacucuacugucaacaugu

SEQ ID NO: 1273990 - RNA, 24 nt, Human
ccaacugauguucccaaaagugcu

SEQ ID NO: 1273991 - RNA, 24 nt, Human
ccagcagaacagaaauggaccuga

SEQ ID NO: 1273992 - RNA, 21 nt, Human
cccaagaauccaguuccaacu

SEQ ID NO: 1273993 - RNA, 21 nt, Human
ccuaccccucaaucucaagac

SEQ ID NO: 1273994 - RNA, 20 nt, Human
ccucccagguucaagcgauu

SEQ ID NO: 1273995 - RNA, 20 nt, Human
cgaacuaaacaacacaauug

SEQ ID NO: 1273996 - RNA, 24 nt, Human
cucacugcaaccucugccucccag

SEQ ID NO: 1273997 - RNA, 24 nt, Human
cucacugcaaccucugccucccag

SEQ ID NO: 1273998 - RNA, 19 nt, Human
cucuuaucacccaggcugg

SEQ ID NO: 1273999 - RNA, 23 nt, Human
cugcaaccucugccucccagguu

SEQ ID NO: 1274000 - RNA, 24 nt, Human
cugcaaccucugccucccagguuc

SEQ ID NO: 1274001 - RNA, 23 nt, Human
gaacuaaacaacacaauuggcaa

SEQ ID NO: 1274002 - RNA, 23 nt, Human
gacaguggugcaaucucggcuca

SEQ ID NO: 1274003 - RNA, 18 nt, Human
gauuacaggugugagcca

SEQ ID NO: 1274004 - RNA, 21 nt, Human
gauuacaggugugagccaccg

SEQ ID NO: 1274005 - RNA, 24 nt, Human
gauuacaggugugagccaccgugc

SEQ ID NO: 1274006 - RNA, 22 nt, Human
gcaaccucugccucccagguuc

SEQ ID NO: 1274007 - RNA, 23 nt, Human
gccucagccucccaaagugcugg

SEQ ID NO: 1274008 - RNA, 24 nt, Human
gcgauuaucucgccucagccuccc

SEQ ID NO: 1274009 - RNA, 23 nt, Human
ggaguuucacucuuaucacccag

SEQ ID NO: 1274010 - RNA, 19 nt, Human
guguagcccucccuacccc

SEQ ID NO: 1274011 - RNA, 23 nt, Human
uaaaagcuuuucaaaguuugagu

SEQ ID NO: 1274012 - RNA, 24 nt, Human
uaaaguucaccaacugauguuccc

SEQ ID NO: 1274013 - RNA, 18 nt, Human
uaaggagaugccacugga

SEQ ID NO: 1274014 - RNA, 24 nt, Human
uacaggugugagccaccgugccca

SEQ ID NO: 1274015 - RNA, 23 nt, Human
uagacagcaaaauuuaaaguuca

SEQ ID NO: 1274016 - RNA, 22 nt, Human
uaucucgccucagccucccaaa

SEQ ID NO: 1274017 - RNA, 22 nt, Human
ucacucuuaucacccaggcugg

SEQ ID NO: 1274018 - RNA, 23 nt, Human
ucacucuuaucacccaggcugga

SEQ ID NO: 1274019 - RNA, 19 nt, Human
ucacugcaaccucugccuc

SEQ ID NO: 1274020 - RNA, 24 nt, Human
ucacugcaaccucugccucccagg

SEQ ID NO: 1274021 - RNA, 25 nt, Human
ucacugcaaccucugccucccaggu

SEQ ID NO: 1274022 - RNA, 22 nt, Human
ucagucaguguagcccucccua

SEQ ID NO: 1274023 - RNA, 18 nt, Human
uccaacucuacugucaac

SEQ ID NO: 1274024 - RNA, 23 nt, Human
ucccaaagugcugggauuacagg

SEQ ID NO: 1274025 - RNA, 23 nt, Human
ucccagguucaagcgauuaucuc

SEQ ID NO: 1274026 - RNA, 24 nt, Human
ucgccucagccucccaaagugcug

SEQ ID NO: 1274027 - RNA, 24 nt, Human
ugcugggauuacaggugugagcca

SEQ ID NO: 1274028 - RNA, 18 nt, Human
ugggauuacaggugugag

SEQ ID NO: 1274029 - RNA, 21 nt, Human
ugggauuacaggugugagcca

SEQ ID NO: 1274030 - RNA, 22 nt, Human
ugggauuacaggugugagccac

SEQ ID NO: 1274031 - RNA, 23 nt, Human
ugggauuacaggugugagccacc

SEQ ID NO: 1274032 - RNA, 23 nt, Human
ugggauuacaggugugagccacc

SEQ ID NO: 1274033 - RNA, 24 nt, Human
ugggauuacaggugugagccaccg

SEQ ID NO: 1274034 - RNA, 23 nt, Human
uggggcagaauucaauuucuauc

SEQ ID NO: 1274035 - RNA, 23 nt, Human
uucaagcgauuaucucgccucag

SEQ ID NO: 1274036 - RNA, 24 nt, Human
uucacucuuaucacccaggcugga

SEQ ID NO: 1274037 - RNA, 23 nt, Human
uucccaaaagugcugaacacuaa

SEQ ID NO: 1274038 - RNA, 28 nt, Human
uucugggcagggaaauacagcuuaaaga

SEQ ID NO: 1274039 - RNA, 22 nt, Human
uuuacagaucugggcugaggcc

SEQ ID NO: 1274040 - RNA, 27 nt, Human
aaaaaccacaaagggugaccgguaccc

SEQ ID NO: 1274041 - RNA, 24 nt, Human
aaacauggucaaaugugaaaccgc

SEQ ID NO: 1274042 - RNA, 24 nt, Human
aaagugcugggauuacaggcguga

SEQ ID NO: 1274043 - RNA, 23 nt, Human
aacacauuuacaaaacuacugca

SEQ ID NO: 1274044 - RNA, 22 nt, Human
aagcaagcaagccugagaggca

SEQ ID NO: 1274045 - RNA, 24 nt, Human
aagcaagcaagccugagaggcauu

SEQ ID NO: 1274046 - RNA, 19 nt, Human
aagcuguuuuuuuuuuuuu

SEQ ID NO: 1274047 - RNA, 19 nt, Human
aagugcugggauuacaggc

SEQ ID NO: 1274048 - RNA, 19 nt, Human
aagugcugggauuacaggc

SEQ ID NO: 1274049 - RNA, 26 nt, Human
aagugcugggauuacaggcgugagcc

SEQ ID NO: 1274050 - RNA, 22 nt, Human
acagaaaaucuaacaugguuga

SEQ ID NO: 1274051 - RNA, 24 nt, Human
accauauuggucaggcuggucuug

SEQ ID NO: 1274052 - RNA, 25 nt, Human
acccgccucggccucccaaagugcu

SEQ ID NO: 1274053 - RNA, 24 nt, Human
accuugugauccacccgccucggc

SEQ ID NO: 1274054 - RNA, 19 nt, Human
acuacaggagcgugccacu

SEQ ID NO: 1274055 - RNA, 23 nt, Human
acucugcuccccagaggcuccaa

SEQ ID NO: 1274056 - RNA, 19 nt, Human
acugcaacauccaccuccu

SEQ ID NO: 1274057 - RNA, 22 nt, Human
acuguuucuggaagacuacaga

SEQ ID NO: 1274058 - RNA, 28 nt, Human
agaaauaugugaaggauaaccgguaccc

SEQ ID NO: 1274059 - RNA, 24 nt, Human
agaagacagagagaaaauccuggu

SEQ ID NO: 1274060 - RNA, 19 nt, Human
agacagagagaaaauccug

SEQ ID NO: 1274061 - RNA, 19 nt, Human
agagagaagacagagagaa

SEQ ID NO: 1274062 - RNA, 24 nt, Human
agcgauucuccugccucagccucc

SEQ ID NO: 1274063 - RNA, 23 nt, Human
aggaggaacagaucugcacagaa

SEQ ID NO: 1274064 - RNA, 20 nt, Human
aggcgugagccaccaugacc

SEQ ID NO: 1274065 - RNA, 21 nt, Human
aguagcugggacuacaggagc

SEQ ID NO: 1274066 - RNA, 23 nt, Human
aguagcugggacuacaggagcgu

SEQ ID NO: 1274067 - RNA, 20 nt, Human
agugcaguggcgggaucucg

SEQ ID NO: 1274068 - RNA, 23 nt, Human
agugcaguggcgggaucucggcu

SEQ ID NO: 1274069 - RNA, 24 nt, Human
agugcaguggcgggaucucggcuc

SEQ ID NO: 1274070 - RNA, 18 nt, Human
agugcugggauuacaggc

SEQ ID NO: 1274071 - RNA, 23 nt, Human
auauuggucaggcuggucuugaa

SEQ ID NO: 1274072 - RNA, 20 nt, Human
augggguuucaccauauugg

SEQ ID NO: 1274073 - RNA, 21 nt, Human
augggguuucaccauauuggu

SEQ ID NO: 1274074 - RNA, 24 nt, Human
augggguuucaccauauuggucag

SEQ ID NO: 1274075 - RNA, 23 nt, Human
caaaggaacuugacuauguagca

SEQ ID NO: 1274076 - RNA, 24 nt, Human
caaagugcugggauuacaggcgug

SEQ ID NO: 1274077 - RNA, 18 nt, Human
caacugggcagucugacc

SEQ ID NO: 1274078 - RNA, 20 nt, Human
caagcgauucuccugccuca

SEQ ID NO: 1274079 - RNA, 22 nt, Human
caagcgauucuccugccucagc

SEQ ID NO: 1274080 - RNA, 30 nt, Human
cacacacccagagagaagacagagagaaag

SEQ ID NO: 1274081 - RNA, 21 nt, Human
caccauauuggucaggcuggu

SEQ ID NO: 1274082 - RNA, 23 nt, Human
caccauauuggucaggcuggucu

SEQ ID NO: 1274083 - RNA, 24 nt, Human
caccauauuggucaggcuggucuu

SEQ ID NO: 1274084 - RNA, 18 nt, Human
cacccagagagaagacag

SEQ ID NO: 1274085 - RNA, 23 nt, Human
cacccgccucggccucccaaagu

SEQ ID NO: 1274086 - RNA, 23 nt, Human
cacugcaacauccaccuccuggg

SEQ ID NO: 1274087 - RNA, 21 nt, Human
cagagagaaaauccuggucca

SEQ ID NO: 1274088 - RNA, 20 nt, Human
cagaggcuccaagaagcaag

SEQ ID NO: 1274089 - RNA, 19 nt, Human
caggagccuccaaugagca

SEQ ID NO: 1274090 - RNA, 24 nt, Human
cauacacacacacacacccagaga

SEQ ID NO: 1274091 - RNA, 27 nt, Human
cauacacacacacacacccagagagaa

SEQ ID NO: 1274092 - RNA, 19 nt, Human
cauuguggcuauuaaaucc

SEQ ID NO: 1274093 - RNA, 22 nt, Human
ccaaagugcugggauuacaggc

SEQ ID NO: 1274094 - RNA, 22 nt, Human
ccaaagugcugggauuacaggc

SEQ ID NO: 1274095 - RNA, 24 nt, Human
ccaaagugcugggauuacaggcgu

SEQ ID NO: 1274096 - RNA, 24 nt, Human
ccaccuccuggguucaagcgauuc

SEQ ID NO: 1274097 - RNA, 19 nt, Human
ccagagagaagacagagag

SEQ ID NO: 1274098 - RNA, 21 nt, Human
ccagagagaagacagagagaa

SEQ ID NO: 1274099 - RNA, 18 nt, Human
ccaugaccagcccuccau

SEQ ID NO: 1274100 - RNA, 24 nt, Human
cccaaugacuguaauuuauaaacu

SEQ ID NO: 1274101 - RNA, 24 nt, Human
cccacacccuuugauccuuccaga

SEQ ID NO: 1274102 - RNA, 23 nt, Human
cccgaguagcugggacuacagga

SEQ ID NO: 1274103 - RNA, 25 nt, Human
ccuaggcugcagugcaguggcggga

SEQ ID NO: 1274104 - RNA, 18 nt, Human
ccuccaaugagcacugua

SEQ ID NO: 1274105 - RNA, 24 nt, Human
ccuccuggguucaagcgauucucc

SEQ ID NO: 1274106 - RNA, 20 nt, Human
ccugaccuugugauccaccc

SEQ ID NO: 1274107 - RNA, 24 nt, Human
ccugccucagccucccgaguagcu

SEQ ID NO: 1274108 - RNA, 23 nt, Human
ccuggguucaagcgauucuccug

SEQ ID NO: 1274109 - RNA, 24 nt, Human
cgccucggccucccaaagugcugg

SEQ ID NO: 1274110 - RNA, 21 nt, Human
cuaagcaagcaagccugagag

SEQ ID NO: 1274111 - RNA, 23 nt, Human
cuaauuuuuguauuuuuaguaga

SEQ ID NO: 1274112 - RNA, 24 nt, Human
cuacucugcuccccagaggcucca

SEQ ID NO: 1274113 - RNA, 24 nt, Human
cucacugcaacauccaccuccugg

SEQ ID NO: 1274114 - RNA, 24 nt, Human
cucagccucccgaguagcugggac

SEQ ID NO: 1274115 - RNA, 24 nt, Human
cuccugaccuugugauccacccgc

SEQ ID NO: 1274116 - RNA, 21 nt, Human
cuccuggguucaagcgauucu

SEQ ID NO: 1274117 - RNA, 23 nt, Human
cugcaacauccaccuccuggguu

SEQ ID NO: 1274118 - RNA, 24 nt, Human
cugcaacauccaccuccuggguuc

SEQ ID NO: 1274119 - RNA, 22 nt, Human
cuggaagacuacagaaaaucua

SEQ ID NO: 1274120 - RNA, 24 nt, Human
cuguacauacacacacacacaccc

SEQ ID NO: 1274121 - RNA, 22 nt, Human
gaccuugugauccacccgccuc

SEQ ID NO: 1274122 - RNA, 22 nt, Human
gaccuugugauccacccgccuc

SEQ ID NO: 1274123 - RNA, 24 nt, Human
gaccuugugauccacccgccucgg

SEQ ID NO: 1274124 - RNA, 23 nt, Human
gacucagaauaaaugacugccac

SEQ ID NO: 1274125 - RNA, 21 nt, Human
gagacggagucuugcucuguc

SEQ ID NO: 1274126 - RNA, 24 nt, Human
gagaugggguuucaccauauuggu

SEQ ID NO: 1274127 - RNA, 20 nt, Human
gagcaguaugaacugcccac

SEQ ID NO: 1274128 - RNA, 26 nt, Human
gaguagcugggacuacaggagcgugc

SEQ ID NO: 1274129 - RNA, 22 nt, Human
gaugcggacuccaacaaaggca

SEQ ID NO: 1274130 - RNA, 18 nt, Human
gauuacaggcgugagcca

SEQ ID NO: 1274131 - RNA, 21 nt, Human
gauuacaggcgugagccacca

SEQ ID NO: 1274132 - RNA, 22 nt, Human
gauuacaggcgugagccaccau

SEQ ID NO: 1274133 - RNA, 20 nt, Human
gccucagccucccgaguagc

SEQ ID NO: 1274134 - RNA, 24 nt, Human
gcgauucuccugccucagccuccc

SEQ ID NO: 1274135 - RNA, 18 nt, Human
ggaaggagcaggaggagg

SEQ ID NO: 1274136 - RNA, 24 nt, Human
ggauuacaggcgugagccaccaug

SEQ ID NO: 1274137 - RNA, 24 nt, Human
ggcuaagcuguuuuuuuuuuuuuu

SEQ ID NO: 1274138 - RNA, 23 nt, Human
ggcuggucuugaacuccugaccu

SEQ ID NO: 1274139 - RNA, 19 nt, Human
gggaaggagcaggaggagg

SEQ ID NO: 1274140 - RNA, 26 nt, Human
gggaaggagcaggaggaggaacagau

SEQ ID NO: 1274141 - RNA, 22 nt, Human
gggguuucaccauauuggucag

SEQ ID NO: 1274142 - RNA, 20 nt, Human
ggucuugaacuccugaccuu

SEQ ID NO: 1274143 - RNA, 23 nt, Human
gguuugugaaaggcugcuggccu

SEQ ID NO: 1274144 - RNA, 24 nt, Human
guacauacacacacacacacccag

SEQ ID NO: 1274145 - RNA, 24 nt, Human
gugauccacccgccucggccuccc

SEQ ID NO: 1274146 - RNA, 21 nt, Human
uaaaaaaagugaauguggcuu

SEQ ID NO: 1274147 - RNA, 24 nt, Human
uaagcaagcaagccugagaggcau

SEQ ID NO: 1274148 - RNA, 23 nt, Human
uaaucuccucccuccccauagcc

SEQ ID NO: 1274149 - RNA, 24 nt, Human
uaauuuuuguauuuuuaguagaga

SEQ ID NO: 1274150 - RNA, 24 nt, Human
uacaggcgugagccaccaugacca

SEQ ID NO: 1274151 - RNA, 21 nt, Human
uagaaggacaaacuauuugau

SEQ ID NO: 1274152 - RNA, 21 nt, Human
uagaggcaggguuugugaaag

SEQ ID NO: 1274153 - RNA, 19 nt, Human
uaguagagaugggguuuca

SEQ ID NO: 1274154 - RNA, 23 nt, Human
uaguagagaugggguuucaccau

SEQ ID NO: 1274155 - RNA, 26 nt, Human
uaguagagaugggguuucaccauauu

SEQ ID NO: 1274156 - RNA, 19 nt, Human
ucaagcgauucuccugccu

SEQ ID NO: 1274157 - RNA, 20 nt, Human
ucaauuacagagacagccaa

SEQ ID NO: 1274158 - RNA, 24 nt, Human
ucacugcaacauccaccuccuggg

SEQ ID NO: 1274159 - RNA, 27 nt, Human
ucacugcaacauccaccuccuggguuc

SEQ ID NO: 1274160 - RNA, 19 nt, Human
ucagaauaaaugacugcca

SEQ ID NO: 1274161 - RNA, 23 nt, Human
ucagccucccgaguagcugggac

SEQ ID NO: 1274162 - RNA, 24 nt, Human
ucccaaagugcugggauuacaggc

SEQ ID NO: 1274163 - RNA, 18 nt, Human
ucccgaguagcugggacu

SEQ ID NO: 1274164 - RNA, 21 nt, Human
uccuggguucaagcgauucuc

SEQ ID NO: 1274165 - RNA, 24 nt, Human
uccuggguucaagcgauucuccug

SEQ ID NO: 1274166 - RNA, 22 nt, Human
ucgccuaggcugcagugcagug

SEQ ID NO: 1274167 - RNA, 20 nt, Human
ucuaagcaagcaagccugag

SEQ ID NO: 1274168 - RNA, 21 nt, Human
ucuagcagugagagagcccuc

SEQ ID NO: 1274169 - RNA, 23 nt, Human
ucucacaucccucaaagguuauc

SEQ ID NO: 1274170 - RNA, 24 nt, Human
ucuccugccucagccucccgagua

SEQ ID NO: 1274171 - RNA, 20 nt, Human
ucucugggcucccaggaccu

SEQ ID NO: 1274172 - RNA, 25 nt, Human
ucucugggcucccaggaccuguggu

SEQ ID NO: 1274173 - RNA, 21 nt, Human
ucucuuaaagcaaaaauucau

SEQ ID NO: 1274174 - RNA, 20 nt, Human
ucugggcucccaggaccugu

SEQ ID NO: 1274175 - RNA, 20 nt, Human
ucuguacauacacacacaca

SEQ ID NO: 1274176 - RNA, 19 nt, Human
ucuugaacuccugaccuug

SEQ ID NO: 1274177 - RNA, 19 nt, Human
ucuugcucugucgccuagg

SEQ ID NO: 1274178 - RNA, 20 nt, Human
ucuugcucugucgccuaggc

SEQ ID NO: 1274179 - RNA, 22 nt, Human
ucuugcucugucgccuaggcug

SEQ ID NO: 1274180 - RNA, 21 nt, Human
ugaacugcccaccucaacugg

SEQ ID NO: 1274181 - RNA, 20 nt, Human
ugagaaauaugugaaggaua

SEQ ID NO: 1274182 - RNA, 20 nt, Human
ugagagagcccucuccaugc

SEQ ID NO: 1274183 - RNA, 21 nt, Human
ugaggagauaggcucuaucca

SEQ ID NO: 1274184 - RNA, 21 nt, Human
ugcagugcaguggcgggaucu

SEQ ID NO: 1274185 - RNA, 24 nt, Human
ugcagugcaguggcgggaucucgg

SEQ ID NO: 1274186 - RNA, 22 nt, Human
ugcaguggcgggaucucggcuc

SEQ ID NO: 1274187 - RNA, 23 nt, Human
ugccuaaacucucugggcuccca

SEQ ID NO: 1274188 - RNA, 24 nt, Human
ugccucagccucccgaguagcugg

SEQ ID NO: 1274189 - RNA, 21 nt, Human
ugcuccaacuaggcuucucac

SEQ ID NO: 1274190 - RNA, 24 nt, Human
ugcucugucgccuaggcugcagug

SEQ ID NO: 1274191 - RNA, 24 nt, Human
ugcugggauuacaggcgugagcca

SEQ ID NO: 1274192 - RNA, 19 nt, Human
ugcugugacgccacccucg

SEQ ID NO: 1274193 - RNA, 22 nt, Human
ugcuugaguuaacugucccaca

SEQ ID NO: 1274194 - RNA, 21 nt, Human
uggcaaaaaucacauuguggc

SEQ ID NO: 1274195 - RNA, 22 nt, Human
ugggacuacaggagcgugccac

SEQ ID NO: 1274196 - RNA, 22 nt, Human
ugggacuacaggagcgugccac

SEQ ID NO: 1274197 - RNA, 24 nt, Human
ugggacuacaggagcgugccacua

SEQ ID NO: 1274198 - RNA, 18 nt, Human
ugggauuacaggcgugag

SEQ ID NO: 1274199 - RNA, 22 nt, Human
ugggauuacaggcgugagccac

SEQ ID NO: 1274200 - RNA, 23 nt, Human
ugggauuacaggcgugagccacc

SEQ ID NO: 1274201 - RNA, 24 nt, Human
ugggauuacaggcgugagccacca

SEQ ID NO: 1274202 - RNA, 25 nt, Human
ugggauuacaggcgugagccaccau

SEQ ID NO: 1274203 - RNA, 24 nt, Human
ugggguuucaccauauuggucagg

SEQ ID NO: 1274204 - RNA, 23 nt, Human
uggguucaagcgauucuccugcc

SEQ ID NO: 1274205 - RNA, 24 nt, Human
uggucaggcuggucuugaacuccu

SEQ ID NO: 1274206 - RNA, 18 nt, Human
ugguggacacuugugaaa

SEQ ID NO: 1274207 - RNA, 22 nt, Human
uguacauacacacacacacacc

SEQ ID NO: 1274208 - RNA, 21 nt, Human
uguauuuuuaguagagauggg

SEQ ID NO: 1274209 - RNA, 27 nt, Human
uguccuguguuuuguaaagaugagggu

SEQ ID NO: 1274210 - RNA, 22 nt, Human
ugugaaaggcugcuggccucca

SEQ ID NO: 1274211 - RNA, 18 nt, Human
uuaguagagaugggguuu

SEQ ID NO: 1274212 - RNA, 22 nt, Human
uuaguagagaugggguuucacc

SEQ ID NO: 1274213 - RNA, 24 nt, Human
uuaguagagaugggguuucaccau

SEQ ID NO: 1274214 - RNA, 21 nt, Human
uucaagcgauucuccugccuc

SEQ ID NO: 1274215 - RNA, 23 nt, Human
uucaagcgauucuccugccucag

SEQ ID NO: 1274216 - RNA, 24 nt, Human
uucaagcgauucuccugccucagc

SEQ ID NO: 1274217 - RNA, 22 nt, Human
uucaauaaucuccucccucccc

SEQ ID NO: 1274218 - RNA, 25 nt, Human
uuccugcaauucuaaauccgcccuu

SEQ ID NO: 1274219 - RNA, 18 nt, Human
uugacacuuccugguagc

SEQ ID NO: 1274220 - RNA, 23 nt, Human
uugcauuauuuaaucaccauuca

SEQ ID NO: 1274221 - RNA, 21 nt, Human
uuuagaggcaggguuugugaa

SEQ ID NO: 1274222 - RNA, 23 nt, Human
uuuauaaggggacuagaaggaca

SEQ ID NO: 1274223 - RNA, 24 nt, Human
uuucaccauauuggucaggcuggu

SEQ ID NO: 1274224 - RNA, 20 nt, Human
uuuuguauuuuuaguagaga

SEQ ID NO: 1274225 - RNA, 24 nt, Human
uuuuuaguagagaugggguuucac

SEQ ID NO: 1274226 - RNA, 20 nt, Human
uuuuuguauuuuuaguagag

SEQ ID NO: 1274227 - RNA, 20 nt, Human
uuuuuuuuuuuuuaaagaug

SEQ ID NO: 1274228 - RNA, 19 nt, Human
uuuuuuuuuuuuuuuuuaa

SEQ ID NO: 1274229 - RNA, 21 nt, Human
accacagccaccaccaccccg

SEQ ID NO: 1274230 - RNA, 23 nt, Human
agaagggccccaacacauagccc

SEQ ID NO: 1274231 - RNA, 18 nt, Human
aggccggaggugggggug

SEQ ID NO: 1274232 - RNA, 24 nt, Human
aggccggagguggggguguugggg

SEQ ID NO: 1274233 - RNA, 23 nt, Human
auggagucgcuguuggccugggg

SEQ ID NO: 1274234 - RNA, 19 nt, Human
caccauggaaacaacucca

SEQ ID NO: 1274235 - RNA, 19 nt, Human
cagccaccaccaccccgac

SEQ ID NO: 1274236 - RNA, 21 nt, Human
cagccaccaccaccccgacca

SEQ ID NO: 1274237 - RNA, 25 nt, Human
caucaccauggaaacaacuccaaag

SEQ ID NO: 1274238 - RNA, 20 nt, Human
cauuaccacagccaccacca

SEQ ID NO: 1274239 - RNA, 24 nt, Human
ccaacacauagcccaccauggagu

SEQ ID NO: 1274240 - RNA, 19 nt, Human
ccacugggcuccccagucg

SEQ ID NO: 1274241 - RNA, 21 nt, Human
ccaucaccauggaaacaacuc

SEQ ID NO: 1274242 - RNA, 26 nt, Human
ccccaucaccauggaaacaacuccaa

SEQ ID NO: 1274243 - RNA, 19 nt, Human
cccgaacauccuggaagcc

SEQ ID NO: 1274244 - RNA, 22 nt, Human
cccgaccagggugaugaggaag

SEQ ID NO: 1274245 - RNA, 23 nt, Human
ccucccgccgcugcagccccgac

SEQ ID NO: 1274246 - RNA, 21 nt, Human
cgcccgaacauccuggaagcc

SEQ ID NO: 1274247 - RNA, 20 nt, Human
cguaugcucaucgucccagg

SEQ ID NO: 1274248 - RNA, 18 nt, Human
gcagccggagggcugggu

SEQ ID NO: 1274249 - RNA, 18 nt, Human
gcgcuucgggagggcgcc

SEQ ID NO: 1274250 - RNA, 21 nt, Human
ggagguggggguguuggggga

SEQ ID NO: 1274251 - RNA, 18 nt, Human
ggcaugccagggugggga

SEQ ID NO: 1274252 - RNA, 23 nt, Human
ggcaugccaggguggggagggcg

SEQ ID NO: 1274253 - RNA, 22 nt, Human
ggccccaucaccauggaaacaa

SEQ ID NO: 1274254 - RNA, 24 nt, Human
ggccggagguggggguguuggggg

SEQ ID NO: 1274255 - RNA, 19 nt, Human
gggaggcucaggccggagg

SEQ ID NO: 1274256 - RNA, 22 nt, Human
ggggagggcgucaggccgcugc

SEQ ID NO: 1274257 - RNA, 18 nt, Human
gggggaugcggaugggcc

SEQ ID NO: 1274258 - RNA, 21 nt, Human
ggggguguugggggaugcgga

SEQ ID NO: 1274259 - RNA, 22 nt, Human
gggugaugaggaagaagggccc

SEQ ID NO: 1274260 - RNA, 20 nt, Human
uaccacagccaccaccaccc

SEQ ID NO: 1274261 - RNA, 18 nt, Human
uaccucccgccgcugcag

SEQ ID NO: 1274262 - RNA, 19 nt, Human
uaccucccgccgcugcagc

SEQ ID NO: 1274263 - RNA, 22 nt, Human
ucaggccgcugcuaggaugcgg

SEQ ID NO: 1274264 - RNA, 23 nt, Human
ucaucgucccaggucaagggggc

SEQ ID NO: 1274265 - RNA, 19 nt, Human
ucccgccgcugcagccccg

SEQ ID NO: 1274266 - RNA, 23 nt, Human
ucgcuguuggccuggggggcauu

SEQ ID NO: 1274267 - RNA, 19 nt, Human
ucuggccccaucaccaugg

SEQ ID NO: 1274268 - RNA, 19 nt, Human
ugccaggguggggagggcg

SEQ ID NO: 1274269 - RNA, 24 nt, Human
ugccggcgcucugcagcccagccg

SEQ ID NO: 1274270 - RNA, 20 nt, Human
ugccuggggauuugugccca

SEQ ID NO: 1274271 - RNA, 22 nt, Human
uggucagcaugggcaguggcgc

SEQ ID NO: 1274272 - RNA, 21 nt, Human
uuaccacagccaccaccaccc

SEQ ID NO: 1274273 - RNA, 19 nt, Human
uugggggaugcggaugggc

SEQ ID NO: 1274274 - RNA, 21 nt, Human
aaaagguauaaaguugccaga

SEQ ID NO: 1274275 - RNA, 19 nt, Human
aaacaaacaagggcugcaa

SEQ ID NO: 1274276 - RNA, 22 nt, Human
aaagcucuuaaagcccucacag

SEQ ID NO: 1274277 - RNA, 19 nt, Human
aacaagaccaagaggagaa

SEQ ID NO: 1274278 - RNA, 19 nt, Human
aacagcacagcauccaggg

SEQ ID NO: 1274279 - RNA, 20 nt, Human
aacaugccuauggccucaga

SEQ ID NO: 1274280 - RNA, 21 nt, Human
aacugagaaguuuuggggguc

SEQ ID NO: 1274281 - RNA, 22 nt, Human
aagcagccugugaagugugggc

SEQ ID NO: 1274282 - RNA, 18 nt, Human
aagcagggcagaaaccga

SEQ ID NO: 1274283 - RNA, 19 nt, Human
aagccugugcuccuacaag

SEQ ID NO: 1274284 - RNA, 22 nt, Human
aagcucacuucacaggaaccaa

SEQ ID NO: 1274285 - RNA, 23 nt, Human
aagcucacuucacaggaaccaag

SEQ ID NO: 1274286 - RNA, 20 nt, Human
acaaacaagggcugcaagac

SEQ ID NO: 1274287 - RNA, 25 nt, Human
acaauggaaagaacgacuuuccaaa

SEQ ID NO: 1274288 - RNA, 19 nt, Human
acaggcaaggauauguagu

SEQ ID NO: 1274289 - RNA, 25 nt, Human
acauucuccuuuuugccucuugcca

SEQ ID NO: 1274290 - RNA, 23 nt, Human
acauuuuuuuuuagggagcaaga

SEQ ID NO: 1274291 - RNA, 22 nt, Human
acccauagcccugauccacguc

SEQ ID NO: 1274292 - RNA, 22 nt, Human
acccaucucugccucuccccag

SEQ ID NO: 1274293 - RNA, 23 nt, Human
accuccucucccucugggaccaa

SEQ ID NO: 1274294 - RNA, 23 nt, Human
accucgccaccacccuggguucu

SEQ ID NO: 1274295 - RNA, 19 nt, Human
acgaggcagcaaauccgaa

SEQ ID NO: 1274296 - RNA, 24 nt, Human
acuugaaaagacaacucaaaaagg

SEQ ID NO: 1274297 - RNA, 20 nt, Human
agaccccaaggcaucucccc

SEQ ID NO: 1274298 - RNA, 22 nt, Human
agagggaauuuggccaggcagg

SEQ ID NO: 1274299 - RNA, 21 nt, Human
agcccaccuccucucccucug

SEQ ID NO: 1274300 - RNA, 22 nt, Human
agccuccaggaaagcaucuccc

SEQ ID NO: 1274301 - RNA, 18 nt, Human
aggaaccaagcugugggc

SEQ ID NO: 1274302 - RNA, 24 nt, Human
aggaagaaaacagcaauaacugaa

SEQ ID NO: 1274303 - RNA, 20 nt, Human
aggcaggcucagggccccuu

SEQ ID NO: 1274304 - RNA, 21 nt, Human
aggccucacucuccagugcag

SEQ ID NO: 1274305 - RNA, 20 nt, Human
agggaauuuggccaggcagg

SEQ ID NO: 1274306 - RNA, 21 nt, Human
agggaccacuguccagaauuc

SEQ ID NO: 1274307 - RNA, 18 nt, Human
aggugagucacagugggg

SEQ ID NO: 1274308 - RNA, 22 nt, Human
auccauuuuuuugcuuuucuca

SEQ ID NO: 1274309 - RNA, 24 nt, Human
auccuauggcagccccuccuguua

SEQ ID NO: 1274310 - RNA, 22 nt, Human
auccugugauccucccagacca

SEQ ID NO: 1274311 - RNA, 21 nt, Human
augaaauuaaccaaggcugac

SEQ ID NO: 1274312 - RNA, 22 nt, Human
augaguuccugugguccugggg

SEQ ID NO: 1274313 - RNA, 21 nt, Human
augcauucugaguaucacaca

SEQ ID NO: 1274314 - RNA, 22 nt, Human
auggggcugggggcucugccuc

SEQ ID NO: 1274315 - RNA, 18 nt, Human
auuggagacaaguaucca

SEQ ID NO: 1274316 - RNA, 24 nt, Human
caaaaagguauaaaguugccagau

SEQ ID NO: 1274317 - RNA, 22 nt, Human
caacccccaggccccucucugg

SEQ ID NO: 1274318 - RNA, 18 nt, Human
caagacuaaaagacccau

SEQ ID NO: 1274319 - RNA, 22 nt, Human
cacagaccccaaggcaucuccc

SEQ ID NO: 1274320 - RNA, 20 nt, Human
cacagcaagcucacuucacu

SEQ ID NO: 1274321 - RNA, 20 nt, Human
cacagcccaauuucaucugc

SEQ ID NO: 1274322 - RNA, 22 nt, Human
cacagcccaccuccucucccuc

SEQ ID NO: 1274323 - RNA, 18 nt, Human
cacccuuucucuaaccca

SEQ ID NO: 1274324 - RNA, 25 nt, Human
caccuccucucccucugggaccaag

SEQ ID NO: 1274325 - RNA, 24 nt, Human
caccucgccaccacccuggguucu

SEQ ID NO: 1274326 - RNA, 20 nt, Human
cagaccccaaggcaucuccc

SEQ ID NO: 1274327 - RNA, 21 nt, Human
cagcaaggcggcaaggcccuu

SEQ ID NO: 1274328 - RNA, 22 nt, Human
cagcacacaugaguuccugugg

SEQ ID NO: 1274329 - RNA, 19 nt, Human
cagcauccagggaaggagg

SEQ ID NO: 1274330 - RNA, 18 nt, Human
caggaaccaagcuguggg

SEQ ID NO: 1274331 - RNA, 24 nt, Human
caggaugaaaaaacugaggcacga

SEQ ID NO: 1274332 - RNA, 22 nt, Human
caggcgugggggcagaagaagg

SEQ ID NO: 1274333 - RNA, 25 nt, Human
cagggcagaaaccgaagugcuuuug

SEQ ID NO: 1274334 - RNA, 22 nt, Human
caggguguguucuccuccugca

SEQ ID NO: 1274335 - RNA, 22 nt, Human
caucagcacccauagcccugau

SEQ ID NO: 1274336 - RNA, 23 nt, Human
caucccgcguccccggccgaggg

SEQ ID NO: 1274337 - RNA, 21 nt, Human
cauccuauggcagccccuccu

SEQ ID NO: 1274338 - RNA, 19 nt, Human
caugagguucuguaguugc

SEQ ID NO: 1274339 - RNA, 20 nt, Human
ccaaggaaggaagaaaacag

SEQ ID NO: 1274340 - RNA, 18 nt, Human
ccacaugugccacacagg

SEQ ID NO: 1274341 - RNA, 18 nt, Human
ccaccacccuggguucug

SEQ ID NO: 1274342 - RNA, 25 nt, Human
cccacacccaccacagcccaauuuc

SEQ ID NO: 1274343 - RNA, 24 nt, Human
cccccaggccccucucuggugagc

SEQ ID NO: 1274344 - RNA, 18 nt, Human
ccccuggugguuccguac

SEQ ID NO: 1274345 - RNA, 22 nt, Human
cccugcugaggcacagcccacc

SEQ ID NO: 1274346 - RNA, 22 nt, Human
cccuggcuggcaccugcccccc

SEQ ID NO: 1274347 - RNA, 23 nt, Human
ccuacuagaaccuucuccccugg

SEQ ID NO: 1274348 - RNA, 19 nt, Human
ccuccaugccaacaugcuc

SEQ ID NO: 1274349 - RNA, 21 nt, Human
ccuccugcaaguccaucuuua

SEQ ID NO: 1274350 - RNA, 23 nt, Human
ccuccuguuauuauuuaauagcc

SEQ ID NO: 1274351 - RNA, 19 nt, Human
ccucuaggcaggcacgacu

SEQ ID NO: 1274352 - RNA, 20 nt, Human
ccugccccccaacuggaguu

SEQ ID NO: 1274353 - RNA, 22 nt, Human
ccugcgcucugccagcucccac

SEQ ID NO: 1274354 - RNA, 19 nt, Human
ccugggccuuguugggacc

SEQ ID NO: 1274355 - RNA, 25 nt, Human
cgaacaggcaaaggccucacucucc

SEQ ID NO: 1274356 - RNA, 19 nt, Human
cgaagagggucugagaagc

SEQ ID NO: 1274357 - RNA, 19 nt, Human
cgggguggguagggagggc

SEQ ID NO: 1274358 - RNA, 18 nt, Human
cucaaagacguuucccuu

SEQ ID NO: 1274359 - RNA, 21 nt, Human
cuccccaagaugaccacaguu

SEQ ID NO: 1274360 - RNA, 24 nt, Human
cucccggccccgcaucaucccgcg

SEQ ID NO: 1274361 - RNA, 27 nt, Human
cucccuccagguuucucagccuccagg

SEQ ID NO: 1274362 - RNA, 23 nt, Human
cucccugggcugaguggccucca

SEQ ID NO: 1274363 - RNA, 18 nt, Human
cuccuaacaucaguccuc

SEQ ID NO: 1274364 - RNA, 19 nt, Human
cucugccagcucccaccuc

SEQ ID NO: 1274365 - RNA, 23 nt, Human
cucugccagcucccaccucgcca

SEQ ID NO: 1274366 - RNA, 21 nt, Human
cugugggcugauccuacagac

SEQ ID NO: 1274367 - RNA, 23 nt, Human
cuguuuccugggccuuguuggga

SEQ ID NO: 1274368 - RNA, 18 nt, Human
cuguuucuuuucuguucu

SEQ ID NO: 1274369 - RNA, 19 nt, Human
cuuauguuuggggcuaagg

SEQ ID NO: 1274370 - RNA, 23 nt, Human
cuuuuggaaguccacagggauuc

SEQ ID NO: 1274371 - RNA, 23 nt, Human
gaacaggcaaaggccucacucuc

SEQ ID NO: 1274372 - RNA, 22 nt, Human
gaacuucuucccugcgcucugc

SEQ ID NO: 1274373 - RNA, 25 nt, Human
gaagaagucagccugacauuuuaaa

SEQ ID NO: 1274374 - RNA, 18 nt, Human
gaagccaugccaguaaaa

SEQ ID NO: 1274375 - RNA, 22 nt, Human
gaccaaaguuucugccacagcc

SEQ ID NO: 1274376 - RNA, 20 nt, Human
gaccacuguccagaauucuc

SEQ ID NO: 1274377 - RNA, 23 nt, Human
gacugcgugccuuccauuugggg

SEQ ID NO: 1274378 - RNA, 19 nt, Human
gagagggguucuuguuccc

SEQ ID NO: 1274379 - RNA, 20 nt, Human
gagcaagaagauacuuuugu

SEQ ID NO: 1274380 - RNA, 18 nt, Human
gaggaugggaggcuggaa

SEQ ID NO: 1274381 - RNA, 23 nt, Human
gaggcagcaaauccgaacaggca

SEQ ID NO: 1274382 - RNA, 25 nt, Human
gaggcaguuucuuauccucucuggg

SEQ ID NO: 1274383 - RNA, 18 nt, Human
gaggcauucccuacccuu

SEQ ID NO: 1274384 - RNA, 21 nt, Human
gcaccugccccccaacuggag

SEQ ID NO: 1274385 - RNA, 25 nt, Human
gcaggcacgacugcgugccuuccau

SEQ ID NO: 1274386 - RNA, 24 nt, Human
gcucaaguccccagcaaggcggca

SEQ ID NO: 1274387 - RNA, 18 nt, Human
ggaauuuggccaggcagg

SEQ ID NO: 1274388 - RNA, 23 nt, Human
ggauugagaagaagucagccuga

SEQ ID NO: 1274389 - RNA, 19 nt, Human
ggcagcuugaaacacacga

SEQ ID NO: 1274390 - RNA, 22 nt, Human
ggcugagaggcucaagucccca

SEQ ID NO: 1274391 - RNA, 18 nt, Human
gggaaggagggggccugg

SEQ ID NO: 1274392 - RNA, 20 nt, Human
gggcacagcacugccucagc

SEQ ID NO: 1274393 - RNA, 23 nt, Human
gggcagaaaccgaagugcuuuug

SEQ ID NO: 1274394 - RNA, 19 nt, Human
gggcaggcaggcucagggc

SEQ ID NO: 1274395 - RNA, 22 nt, Human
gggcgggcagcuccagagagca

SEQ ID NO: 1274396 - RNA, 20 nt, Human
gggcgugaguccugccuccc

SEQ ID NO: 1274397 - RNA, 23 nt, Human
gggggccuggaggccaacaaggg

SEQ ID NO: 1274398 - RNA, 18 nt, Human
gggggucggggggugggg

SEQ ID NO: 1274399 - RNA, 18 nt, Human
ggguagggagggcuucga

SEQ ID NO: 1274400 - RNA, 19 nt, Human
ggguuugccacccacagga

SEQ ID NO: 1274401 - RNA, 19 nt, Human
gugaagaacagaaagguga

SEQ ID NO: 1274402 - RNA, 21 nt, Human
gugccuccuucucuugguauc

SEQ ID NO: 1274403 - RNA, 24 nt, Human
gugguccuggggcacccaguugcc

SEQ ID NO: 1274404 - RNA, 19 nt, Human
guuccauuuucccugcaca

SEQ ID NO: 1274405 - RNA, 19 nt, Human
guuucucacggggugggua

SEQ ID NO: 1274406 - RNA, 18 nt, Human
uaaaagacccaucucugc

SEQ ID NO: 1274407 - RNA, 22 nt, Human
uaaaagacccaucucugccucu

SEQ ID NO: 1274408 - RNA, 18 nt, Human
uaaagcucaaauugaucu

SEQ ID NO: 1274409 - RNA, 19 nt, Human
uaacgugaugccccugcaa

SEQ ID NO: 1274410 - RNA, 18 nt, Human
uagccccuccccauccug

SEQ ID NO: 1274411 - RNA, 18 nt, Human
uauggcagccccuccugu

SEQ ID NO: 1274412 - RNA, 21 nt, Human
ucaaagcucuuaaagcccuca

SEQ ID NO: 1274413 - RNA, 18 nt, Human
ucaacccccaggccccuc

SEQ ID NO: 1274414 - RNA, 23 nt, Human
ucacagcaagcucacuucacagg

SEQ ID NO: 1274415 - RNA, 24 nt, Human
ucacuacuaaucuaucuucccaac

SEQ ID NO: 1274416 - RNA, 24 nt, Human
ucagugagaucuggccauguccuu

SEQ ID NO: 1274417 - RNA, 19 nt, Human
ucaguuccaugccaggagc

SEQ ID NO: 1274418 - RNA, 23 nt, Human
uccacagggauucccacacccac

SEQ ID NO: 1274419 - RNA, 19 nt, Human
uccaugcaauugguuucca

SEQ ID NO: 1274420 - RNA, 22 nt, Human
uccaugccaggagcugcaggag

SEQ ID NO: 1274421 - RNA, 23 nt, Human
ucccacacccaccacagcccaau

SEQ ID NO: 1274422 - RNA, 24 nt, Human
uccccaagaugaccacaguugucc

SEQ ID NO: 1274423 - RNA, 23 nt, Human
ucccuccagguuucucagccucc

SEQ ID NO: 1274424 - RNA, 20 nt, Human
ucccugcacagguaaggaac

SEQ ID NO: 1274425 - RNA, 22 nt, Human
ucccugcgcucugccagcuccc

SEQ ID NO: 1274426 - RNA, 22 nt, Human
uccuccuaacaucaguccucag

SEQ ID NO: 1274427 - RNA, 20 nt, Human
uccugccucccugggcugag

SEQ ID NO: 1274428 - RNA, 22 nt, Human
uccugugguccuggggcaccca

SEQ ID NO: 1274429 - RNA, 20 nt, Human
ucuaagauuucacuuaguuu

SEQ ID NO: 1274430 - RNA, 22 nt, Human
ucuaggcuuugagucauguuug

SEQ ID NO: 1274431 - RNA, 19 nt, Human
ucuaugcaccaucaggacc

SEQ ID NO: 1274432 - RNA, 23 nt, Human
ucucaacccccaggccccucucu

SEQ ID NO: 1274433 - RNA, 24 nt, Human
ucucaacccccaggccccucucug

SEQ ID NO: 1274434 - RNA, 23 nt, Human
ucucaggggccauucuccaguag

SEQ ID NO: 1274435 - RNA, 21 nt, Human
ucuccagugcagucugggagg

SEQ ID NO: 1274436 - RNA, 18 nt, Human
ucucgcugaaguccagaa

SEQ ID NO: 1274437 - RNA, 21 nt, Human
ucugaaucaaggccacaggag

SEQ ID NO: 1274438 - RNA, 22 nt, Human
ucugaaucaaggccacaggagc

SEQ ID NO: 1274439 - RNA, 20 nt, Human
ucugccagcucccaccucgc

SEQ ID NO: 1274440 - RNA, 24 nt, Human
ucuguuuccugggccuuguuggga

SEQ ID NO: 1274441 - RNA, 22 nt, Human
ucuucuggggacuucuuucagu

SEQ ID NO: 1274442 - RNA, 20 nt, Human
ugaaaaaacugaggcacgaa

SEQ ID NO: 1274443 - RNA, 23 nt, Human
ugaaaagacaacucaaaaaggua

SEQ ID NO: 1274444 - RNA, 21 nt, Human
ugaaggacaggcgugggggca

SEQ ID NO: 1274445 - RNA, 23 nt, Human
ugaaggacaggcgugggggcaga

SEQ ID NO: 1274446 - RNA, 21 nt, Human
ugaagugugggcagcuugaaa

SEQ ID NO: 1274447 - RNA, 23 nt, Human
ugacucccaaguuccauuuuccc

SEQ ID NO: 1274448 - RNA, 19 nt, Human
ugacugcauggggcugggg

SEQ ID NO: 1274449 - RNA, 23 nt, Human
ugagaagcagucauauugaccca

SEQ ID NO: 1274450 - RNA, 19 nt, Human
ugagaggcucaagucccca

SEQ ID NO: 1274451 - RNA, 18 nt, Human
ugaggugacugcaugggg

SEQ ID NO: 1274452 - RNA, 19 nt, Human
ugaggugacugcauggggc

SEQ ID NO: 1274453 - RNA, 21 nt, Human
ugaguaucacacauucuccuu

SEQ ID NO: 1274454 - RNA, 21 nt, Human
ugaguggccuccaugccaaca

SEQ ID NO: 1274455 - RNA, 21 nt, Human
ugauccuggaacuucuucccu

SEQ ID NO: 1274456 - RNA, 19 nt, Human
ugcaagacuaaaagaccca

SEQ ID NO: 1274457 - RNA, 24 nt, Human
ugcaggguguguucuccuccugca

SEQ ID NO: 1274458 - RNA, 25 nt, Human
ugccacagccaaugaaacaagacca

SEQ ID NO: 1274459 - RNA, 21 nt, Human
ugccacccacaggaugaggcc

SEQ ID NO: 1274460 - RNA, 18 nt, Human
ugcccagagggaauuugg

SEQ ID NO: 1274461 - RNA, 21 nt, Human
ugccggggggucggggggugg

SEQ ID NO: 1274462 - RNA, 21 nt, Human
uggaaagaacgacuuuccaaa

SEQ ID NO: 1274463 - RNA, 21 nt, Human
uggaaguccacagggauuccc

SEQ ID NO: 1274464 - RNA, 20 nt, Human
uggcacaauauuaacgccuc

SEQ ID NO: 1274465 - RNA, 20 nt, Human
ugggaccaaaguuucugcca

SEQ ID NO: 1274466 - RNA, 18 nt, Human
ugggccaggaaaagcucc

SEQ ID NO: 1274467 - RNA, 20 nt, Human
ugggguaucacugucccagg

SEQ ID NO: 1274468 - RNA, 18 nt, Human
uguccagaauucucugau

SEQ ID NO: 1274469 - RNA, 21 nt, Human
uguccagaauucucugauagu

SEQ ID NO: 1274470 - RNA, 24 nt, Human
uuaaacaaacaagggcugcaagac

SEQ ID NO: 1274471 - RNA, 21 nt, Human
uuaaagcucaaauugaucuac

SEQ ID NO: 1274472 - RNA, 25 nt, Human
uucaggaggaggggaauuuccugcc

SEQ ID NO: 1274473 - RNA, 18 nt, Human
uuccagcucgccccaagc

SEQ ID NO: 1274474 - RNA, 19 nt, Human
uucccacacccaccacagc

SEQ ID NO: 1274475 - RNA, 21 nt, Human
uucccacccuuucucuaaccc

SEQ ID NO: 1274476 - RNA, 25 nt, Human
uucucagccuccaggaaagcaucuc

SEQ ID NO: 1274477 - RNA, 22 nt, Human
uugaaaucugauagaagcccau

SEQ ID NO: 1274478 - RNA, 21 nt, Human
uugccagugccaacuaugugu

SEQ ID NO: 1274479 - RNA, 21 nt, Human
uuucucacgggguggguaggg

SEQ ID NO: 1274480 - RNA, 24 nt, Human
uuucugccacagccaaugaaacaa

SEQ ID NO: 1274481 - RNA, 20 nt, Human
aaauaguuuauucauccagc

SEQ ID NO: 1274482 - RNA, 23 nt, Human
aacccuucuccccguuucugcca

SEQ ID NO: 1274483 - RNA, 20 nt, Human
aagacuagagaggggugguu

SEQ ID NO: 1274484 - RNA, 18 nt, Human
aagaguauggcagaccuu

SEQ ID NO: 1274485 - RNA, 23 nt, Human
aagcugcuccccaucccgccacc

SEQ ID NO: 1274486 - RNA, 20 nt, Human
aaggaaacaaaaaauaccag

SEQ ID NO: 1274487 - RNA, 23 nt, Human
aaguaacaacccccugaaggcac

SEQ ID NO: 1274488 - RNA, 20 nt, Human
aaguucuuguuaaacagccc

SEQ ID NO: 1274489 - RNA, 22 nt, Human
accaagcugcuccccaucccgc

SEQ ID NO: 1274490 - RNA, 25 nt, Human
accacggggccagcgcucagauucc

SEQ ID NO: 1274491 - RNA, 27 nt, Human
acccuggagcucucaaguaacaacccc

SEQ ID NO: 1274492 - RNA, 22 nt, Human
acccuucuccccguuucugcca

SEQ ID NO: 1274493 - RNA, 22 nt, Human
acgcugcccaccagcggcgggc

SEQ ID NO: 1274494 - RNA, 20 nt, Human
agaagccgagagagccagcg

SEQ ID NO: 1274495 - RNA, 24 nt, Human
agacaucccggguggugucgguga

SEQ ID NO: 1274496 - RNA, 23 nt, Human
agccagagcacaggcuuucuccc

SEQ ID NO: 1274497 - RNA, 22 nt, Human
agccggcgccccaccucaggcc

SEQ ID NO: 1274498 - RNA, 19 nt, Human
agcuggcgggagggccggu

SEQ ID NO: 1274499 - RNA, 18 nt, Human
aggaaacaaaaaauacca

SEQ ID NO: 1274500 - RNA, 21 nt, Human
aggcccgggcgcgggucggga

SEQ ID NO: 1274501 - RNA, 21 nt, Human
aggccgcggcucccuacccag

SEQ ID NO: 1274502 - RNA, 20 nt, Human
agggaccgugugucugggcc

SEQ ID NO: 1274503 - RNA, 19 nt, Human
agucccuacuucgggaucc

SEQ ID NO: 1274504 - RNA, 22 nt, Human
aucccgccacccgaaacaccau

SEQ ID NO: 1274505 - RNA, 22 nt, Human
auuaaggaaacaaaaaauacca

SEQ ID NO: 1274506 - RNA, 19 nt, Human
caaaaaauaccaguaagac

SEQ ID NO: 1274507 - RNA, 23 nt, Human
caccagcggcgggccgcgagacc

SEQ ID NO: 1274508 - RNA, 23 nt, Human
cacccgaaacaccaucccugccc

SEQ ID NO: 1274509 - RNA, 24 nt, Human
cagagcagaagccgagagagccag

SEQ ID NO: 1274510 - RNA, 23 nt, Human
cagauuccugcccugccgaucau

SEQ ID NO: 1274511 - RNA, 20 nt, Human
cagcuucugugagaagcaac

SEQ ID NO: 1274512 - RNA, 21 nt, Human
cagggcagagucugggcuauc

SEQ ID NO: 1274513 - RNA, 19 nt, Human
cagggggcagccugcagcc

SEQ ID NO: 1274514 - RNA, 24 nt, Human
cagucacuuguucuaauuucuagc

SEQ ID NO: 1274515 - RNA, 23 nt, Human
caugaaaacucaaccgucagaga

SEQ ID NO: 1274516 - RNA, 18 nt, Human
ccagagcagaagccgaga

SEQ ID NO: 1274517 - RNA, 19 nt, Human
ccagccagccagagcacag

SEQ ID NO: 1274518 - RNA, 19 nt, Human
cccaaaggaugcccaggaa

SEQ ID NO: 1274519 - RNA, 24 nt, Human
cccaccagccccacgcuugucagc

SEQ ID NO: 1274520 - RNA, 18 nt, Human
ccccagcccaccagcccc

SEQ ID NO: 1274521 - RNA, 23 nt, Human
ccccgcggccgggccuccucccg

SEQ ID NO: 1274522 - RNA, 23 nt, Human
cccgcaggcccgggcgcgggucg

SEQ ID NO: 1274523 - RNA, 19 nt, Human
cccgcaggcggcgcagcuu

SEQ ID NO: 1274524 - RNA, 23 nt, Human
cccgccacccgaaacaccauccc

SEQ ID NO: 1274525 - RNA, 23 nt, Human
cccgccgccaagagccgcggccg

SEQ ID NO: 1274526 - RNA, 19 nt, Human
cccucgccgcgccagcagg

SEQ ID NO: 1274527 - RNA, 18 nt, Human
cccugccccaccucccag

SEQ ID NO: 1274528 - RNA, 19 nt, Human
cccuggcuucucccccucc

SEQ ID NO: 1274529 - RNA, 18 nt, Human
cccuggggcugcccgacc

SEQ ID NO: 1274530 - RNA, 22 nt, Human
ccgcggagggccggauaucacc

SEQ ID NO: 1274531 - RNA, 18 nt, Human
ccgcggcgggccgggcgc

SEQ ID NO: 1274532 - RNA, 18 nt, Human
ccgcucgagucgcccgca

SEQ ID NO: 1274533 - RNA, 19 nt, Human
ccggguggugucggugaug

SEQ ID NO: 1274534 - RNA, 18 nt, Human
ccguaggccccagggguc

SEQ ID NO: 1274535 - RNA, 20 nt, Human
ccucccaggugacagacucc

SEQ ID NO: 1274536 - RNA, 25 nt, Human
ccugaccugagggaccgugugucug

SEQ ID NO: 1274537 - RNA, 21 nt, Human
ccugccugccgcagaugagga

SEQ ID NO: 1274538 - RNA, 20 nt, Human
ccugcgagccgaacuccucu

SEQ ID NO: 1274539 - RNA, 22 nt, Human
ccuggcuucucccccucccuuu

SEQ ID NO: 1274540 - RNA, 18 nt, Human
ccuggggcugcccgaccc

SEQ ID NO: 1274541 - RNA, 22 nt, Human
cgaggccggcugggagagccag

SEQ ID NO: 1274542 - RNA, 19 nt, Human
cgcagccgcuccucgucgc

SEQ ID NO: 1274543 - RNA, 23 nt, Human
cgcggccgggccuccucccgcag

SEQ ID NO: 1274544 - RNA, 19 nt, Human
cgcucagauuccugcccug

SEQ ID NO: 1274545 - RNA, 18 nt, Human
cggcggcgcggacgcugc

SEQ ID NO: 1274546 - RNA, 19 nt, Human
cggcggcgcggacgcugcu

SEQ ID NO: 1274547 - RNA, 21 nt, Human
cgggagggccggugggcggcg

SEQ ID NO: 1274548 - RNA, 18 nt, Human
cgggccucuucccguaac

SEQ ID NO: 1274549 - RNA, 23 nt, Human
cgggccucuucccguaaccgcuc

SEQ ID NO: 1274550 - RNA, 19 nt, Human
cggggcgggagacgcugcc

SEQ ID NO: 1274551 - RNA, 22 nt, Human
cguaaccgcuccucgccccgcg

SEQ ID NO: 1274552 - RNA, 19 nt, Human
cucccaagcucccggaauc

SEQ ID NO: 1274553 - RNA, 23 nt, Human
cuccucucugcucucagccccag

SEQ ID NO: 1274554 - RNA, 21 nt, Human
cucucagccccagucccuacu

SEQ ID NO: 1274555 - RNA, 23 nt, Human
cucucagccccagucccuacuuc

SEQ ID NO: 1274556 - RNA, 21 nt, Human
cucugcucucagccccagucc

SEQ ID NO: 1274557 - RNA, 22 nt, Human
cugaccgggaacaaguccccgc

SEQ ID NO: 1274558 - RNA, 18 nt, Human
cugauacugaagccuguu

SEQ ID NO: 1274559 - RNA, 21 nt, Human
cugcucacuccuccugaccug

SEQ ID NO: 1274560 - RNA, 22 nt, Human
cuggugacccuccugugccucu

SEQ ID NO: 1274561 - RNA, 19 nt, Human
cuucaggauagaggcccag

SEQ ID NO: 1274562 - RNA, 19 nt, Human
cuucccguaaccgcuccuc

SEQ ID NO: 1274563 - RNA, 21 nt, Human
gaaacaccaucccugccccac

SEQ ID NO: 1274564 - RNA, 25 nt, Human
gaaacaccaucccugccccaccucc

SEQ ID NO: 1274565 - RNA, 22 nt, Human
gagcccgaggccggcugggaga

SEQ ID NO: 1274566 - RNA, 19 nt, Human
gagcuggcgggagggccgg

SEQ ID NO: 1274567 - RNA, 22 nt, Human
gagggaccgugugucugggccu

SEQ ID NO: 1274568 - RNA, 19 nt, Human
gcagccgggccucgccccg

SEQ ID NO: 1274569 - RNA, 18 nt, Human
gcagcggcgcauccucgc

SEQ ID NO: 1274570 - RNA, 18 nt, Human
gcccuggggcugcccgac

SEQ ID NO: 1274571 - RNA, 19 nt, Human
gcccuggggcugcccgacc

SEQ ID NO: 1274572 - RNA, 21 nt, Human
gccgaucauccagacaucaga

SEQ ID NO: 1274573 - RNA, 23 nt, Human
gccggcugggagagccagggcuc

SEQ ID NO: 1274574 - RNA, 20 nt, Human
gccgggccuccucccgcagc

SEQ ID NO: 1274575 - RNA, 18 nt, Human
gccugaguugcgccgggc

SEQ ID NO: 1274576 - RNA, 18 nt, Human
gcgccagcagggcccgcu

SEQ ID NO: 1274577 - RNA, 23 nt, Human
gcggccgggguaacagaaacgcc

SEQ ID NO: 1274578 - RNA, 19 nt, Human
gcuccucgccccgcggccg

SEQ ID NO: 1274579 - RNA, 20 nt, Human
ggccggugggcggcggcgcg

SEQ ID NO: 1274580 - RNA, 22 nt, Human
ggcggcggcgcggacgcugcuc

SEQ ID NO: 1274581 - RNA, 18 nt, Human
ggcuggaagcccagggcc

SEQ ID NO: 1274582 - RNA, 24 nt, Human
gggccgcgagacccgggcccugcg

SEQ ID NO: 1274583 - RNA, 18 nt, Human
gggccgggcgcgcagcgg

SEQ ID NO: 1274584 - RNA, 19 nt, Human
ggguaacagaaacgccggc

SEQ ID NO: 1274585 - RNA, 21 nt, Human
gggugguuaauguuucuggag

SEQ ID NO: 1274586 - RNA, 22 nt, Human
ggugacccuccugugccucugg

SEQ ID NO: 1274587 - RNA, 22 nt, Human
gguguuucuuauuuuucuggcu

SEQ ID NO: 1274588 - RNA, 18 nt, Human
gucuagagucgcagcuuc

SEQ ID NO: 1274589 - RNA, 19 nt, Human
uaacaacccccugaaggca

SEQ ID NO: 1274590 - RNA, 24 nt, Human
uaauaaauaguuuauucauccagc

SEQ ID NO: 1274591 - RNA, 20 nt, Human
uaauuucuagcaccuucccu

SEQ ID NO: 1274592 - RNA, 18 nt, Human
uaggcuggcccagagcag

SEQ ID NO: 1274593 - RNA, 24 nt, Human
ucaaggcaagugugaauucagcac

SEQ ID NO: 1274594 - RNA, 18 nt, Human
ucaccguaggccccaggg

SEQ ID NO: 1274595 - RNA, 18 nt, Human
ucccaagcucccggaauc

SEQ ID NO: 1274596 - RNA, 19 nt, Human
ucccaggaggcugugccgg

SEQ ID NO: 1274597 - RNA, 24 nt, Human
ucccaggaggcugugccggcugcu

SEQ ID NO: 1274598 - RNA, 18 nt, Human
ucccagggagcaggcuga

SEQ ID NO: 1274599 - RNA, 22 nt, Human
ucccccucccuuuaaaggaagc

SEQ ID NO: 1274600 - RNA, 19 nt, Human
ucccucuucaggauagagg

SEQ ID NO: 1274601 - RNA, 23 nt, Human
ucccucuucaggauagaggccca

SEQ ID NO: 1274602 - RNA, 20 nt, Human
ucccuggcguggccaugccc

SEQ ID NO: 1274603 - RNA, 24 nt, Human
uccucgcguaaccgggccucuucc

SEQ ID NO: 1274604 - RNA, 18 nt, Human
uccucggagcugccccgg

SEQ ID NO: 1274605 - RNA, 20 nt, Human
uccucucugcucucagcccc

SEQ ID NO: 1274606 - RNA, 21 nt, Human
uccuggcuggaagcccagggc

SEQ ID NO: 1274607 - RNA, 20 nt, Human
ucgggaccgaggagggagga

SEQ ID NO: 1274608 - RNA, 20 nt, Human
ucgugucaggacgagacuga

SEQ ID NO: 1274609 - RNA, 19 nt, Human
ucuggcugcaggccugguc

SEQ ID NO: 1274610 - RNA, 23 nt, Human
ugacgcagggcucccaagcuccc

SEQ ID NO: 1274611 - RNA, 21 nt, Human
ugaggagcuggcgggagggcc

SEQ ID NO: 1274612 - RNA, 18 nt, Human
ugaggcgggcccgcccgc

SEQ ID NO: 1274613 - RNA, 21 nt, Human
ugccccggaccgaggcgcggc

SEQ ID NO: 1274614 - RNA, 23 nt, Human
ugcucacuccuccugaccugagg

SEQ ID NO: 1274615 - RNA, 20 nt, Human
ugcuccccaucccgccaccc

SEQ ID NO: 1274616 - RNA, 18 nt, Human
uggaagcccagggccugc

SEQ ID NO: 1274617 - RNA, 22 nt, Human
uggagcucucaaguaacaaccc

SEQ ID NO: 1274618 - RNA, 19 nt, Human
uggcccagagcagaagccg

SEQ ID NO: 1274619 - RNA, 24 nt, Human
uggccggcagggggcagccugcag

SEQ ID NO: 1274620 - RNA, 18 nt, Human
uggcuggaagcccagggc

SEQ ID NO: 1274621 - RNA, 20 nt, Human
uggcuggaagcccagggccu

SEQ ID NO: 1274622 - RNA, 22 nt, Human
uggcuggaagcccagggccugc

SEQ ID NO: 1274623 - RNA, 21 nt, Human
uggcuggagccugauuaugag

SEQ ID NO: 1274624 - RNA, 20 nt, Human
uggggcugcccgacccuccu

SEQ ID NO: 1274625 - RNA, 23 nt, Human
uggugacccuccugugccucugg

SEQ ID NO: 1274626 - RNA, 23 nt, Human
uuccugcccugccgaucauccag

SEQ ID NO: 1274627 - RNA, 21 nt, Human
uucuggagccugccucccagg

SEQ ID NO: 1274628 - RNA, 21 nt, Human
uuuauucauccagcaguuuca

SEQ ID NO: 1274629 - RNA, 21 nt, Human
accccgcccccccuccccccg

SEQ ID NO: 1274630 - RNA, 23 nt, Human
accccgcccccccuccccccgca

SEQ ID NO: 1274631 - RNA, 23 nt, Human
acccgccugccuucccgcgcccc

SEQ ID NO: 1274632 - RNA, 23 nt, Human
aggccacaccccgcccccccucc

SEQ ID NO: 1274633 - RNA, 22 nt, Human
caccccgcccccccuccccccc

SEQ ID NO: 1274634 - RNA, 23 nt, Human
ccaacuuccgaaucaguucagcc

SEQ ID NO: 1274635 - RNA, 25 nt, Human
ccagaggcguccugcaaggcaccgg

SEQ ID NO: 1274636 - RNA, 18 nt, Human
cccccgcagcucgcccgc

SEQ ID NO: 1274637 - RNA, 23 nt, Human
ccccgcccccccuccccccgcag

SEQ ID NO: 1274638 - RNA, 21 nt, Human
ccccgcgcuccucgcgcgucc

SEQ ID NO: 1274639 - RNA, 18 nt, Human
ccccggugcuuggguguu

SEQ ID NO: 1274640 - RNA, 19 nt, Human
cccugggaggcccaggcgu

SEQ ID NO: 1274641 - RNA, 21 nt, Human
ccgccugccuucccgcgcccc

SEQ ID NO: 1274642 - RNA, 22 nt, Human
ccggcacccaugugcacccgcc

SEQ ID NO: 1274643 - RNA, 21 nt, Human
cgcagcucgcccgccggcacc

SEQ ID NO: 1274644 - RNA, 24 nt, Human
cgcccccccuccccccgcagcucg

SEQ ID NO: 1274645 - RNA, 24 nt, Human
cgcccggcccgcgcguaccugcag

SEQ ID NO: 1274646 - RNA, 21 nt, Human
cgccgccagcccuccugaucu

SEQ ID NO: 1274647 - RNA, 18 nt, Human
cgcgcguccggggcccgg

SEQ ID NO: 1274648 - RNA, 21 nt, Human
cgcguccggggcccggccucc

SEQ ID NO: 1274649 - RNA, 20 nt, Human
cucggagcugccaucccugg

SEQ ID NO: 1274650 - RNA, 21 nt, Human
cugccaucccugggaggccca

SEQ ID NO: 1274651 - RNA, 18 nt, Human
cuggggccaccacacaca

SEQ ID NO: 1274652 - RNA, 23 nt, Human
cuggggccaccacacacaugcaa

SEQ ID NO: 1274653 - RNA, 26 nt, Human
cuuggcuccuuccgucuuucuuucug

SEQ ID NO: 1274654 - RNA, 18 nt, Human
gaguuggcuccaaaacuc

SEQ ID NO: 1274655 - RNA, 25 nt, Human
gccccgcccggcccgcgcguaccug

SEQ ID NO: 1274656 - RNA, 20 nt, Human
gccgaaugcgccgccagccc

SEQ ID NO: 1274657 - RNA, 26 nt, Human
gccuucccgcgccccgcgcuccucgc

SEQ ID NO: 1274658 - RNA, 19 nt, Human
gcgccccgcgcuccucgcg

SEQ ID NO: 1274659 - RNA, 21 nt, Human
ggaggcggggaggccacaccc

SEQ ID NO: 1274660 - RNA, 22 nt, Human
guccgggugaggaggugcccac

SEQ ID NO: 1274661 - RNA, 21 nt, Human
guucuguuccccggugcuugg

SEQ ID NO: 1274662 - RNA, 21 nt, Human
uacaaagagauccaacuuccg

SEQ ID NO: 1274663 - RNA, 25 nt, Human
uccccccgcagcucgcccgccggca

SEQ ID NO: 1274664 - RNA, 20 nt, Human
ucccggacgccgaaugcgcc

SEQ ID NO: 1274665 - RNA, 22 nt, Human
ucccugggaggcccaggcguag

SEQ ID NO: 1274666 - RNA, 22 nt, Human
uggcgcgcccgccgcccgcccg

SEQ ID NO: 1274667 - RNA, 18 nt, Human
ugggaggcccaggcguag

SEQ ID NO: 1274668 - RNA, 22 nt, Human
uggggagcucuccgcccucggg

SEQ ID NO: 1274669 - RNA, 20 nt, Human
ugugcacccgccugccuucc

SEQ ID NO: 1274670 - RNA, 22 nt, Human
uguucuguuccccggugcuugg

SEQ ID NO: 1274671 - RNA, 23 nt, Human
uuggguguuugcuuccuaguccu

SEQ ID NO: 1274672 - RNA, 22 nt, Human
aaaccuggagugggacgagaaa

SEQ ID NO: 1274673 - RNA, 23 nt, Human
aaauguaucucuagguggagacc

SEQ ID NO: 1274674 - RNA, 23 nt, Human
aagaggagaagggcuugggggua

SEQ ID NO: 1274675 - RNA, 22 nt, Human
acagugcccacagaggucugcu

SEQ ID NO: 1274676 - RNA, 22 nt, Human
acaguuuauuaaaaaauuuuaa

SEQ ID NO: 1274677 - RNA, 22 nt, Human
agaaaaaagcuuagagcuuagc

SEQ ID NO: 1274678 - RNA, 21 nt, Human
agaaagcaagguacaaucuga

SEQ ID NO: 1274679 - RNA, 20 nt, Human
agaggagaagggcuuggggg

SEQ ID NO: 1274680 - RNA, 18 nt, Human
agaggcacaggcuguuga

SEQ ID NO: 1274681 - RNA, 19 nt, Human
agaggucugcucccgggaa

SEQ ID NO: 1274682 - RNA, 19 nt, Human
agcaaugagagaaaaaagc

SEQ ID NO: 1274683 - RNA, 20 nt, Human
aggggcuccuggaaagauac

SEQ ID NO: 1274684 - RNA, 20 nt, Human
auggcagugagggaaaagua

SEQ ID NO: 1274685 - RNA, 18 nt, Human
caaagguagaccagaggc

SEQ ID NO: 1274686 - RNA, 22 nt, Human
caaucugaggggcuccuggaaa

SEQ ID NO: 1274687 - RNA, 24 nt, Human
cacccugacagcacuuuaggacag

SEQ ID NO: 1274688 - RNA, 25 nt, Human
cacuagucacauuccagucauugug

SEQ ID NO: 1274689 - RNA, 22 nt, Human
ccaaaccugagucccucugacc

SEQ ID NO: 1274690 - RNA, 20 nt, Human
ccacagaggucugcucccgg

SEQ ID NO: 1274691 - RNA, 18 nt, Human
ccagccuucagcuugugc

SEQ ID NO: 1274692 - RNA, 18 nt, Human
ccaggcugagaggcccau

SEQ ID NO: 1274693 - RNA, 27 nt, Human
ccgccucacagugcccacagagguugg

SEQ ID NO: 1274694 - RNA, 19 nt, Human
ccguuccgccucacagugc

SEQ ID NO: 1274695 - RNA, 22 nt, Human
ccuccucgaaggugacaagaau

SEQ ID NO: 1274696 - RNA, 21 nt, Human
cucacagugcccacagagguc

SEQ ID NO: 1274697 - RNA, 20 nt, Human
cucccgggaagccgcgguca

SEQ ID NO: 1274698 - RNA, 22 nt, Human
cuccugagaucacuagucacau

SEQ ID NO: 1274699 - RNA, 19 nt, Human
cuccugccccgccgcuccg

SEQ ID NO: 1274700 - RNA, 18 nt, Human
gaccagaggcacaggcug

SEQ ID NO: 1274701 - RNA, 21 nt, Human
gcaaguuacucuccagccuuc

SEQ ID NO: 1274702 - RNA, 18 nt, Human
gccccgccgcuccguucc

SEQ ID NO: 1274703 - RNA, 19 nt, Human
gccccgccgcuccguuccg

SEQ ID NO: 1274704 - RNA, 23 nt, Human
gcgagucccggcccgauuguccu

SEQ ID NO: 1274705 - RNA, 21 nt, Human
gcuccugccccgccgcuccgu

SEQ ID NO: 1274706 - RNA, 21 nt, Human
guaacugcaagucccaccccc

SEQ ID NO: 1274707 - RNA, 22 nt, Human
gucacauuccagucauugugac

SEQ ID NO: 1274708 - RNA, 20 nt, Human
uagccucugaauuacuuaag

SEQ ID NO: 1274709 - RNA, 19 nt, Human
uaguguauagccucagcag

SEQ ID NO: 1274710 - RNA, 23 nt, Human
uaucuauucucuuggcaugauua

SEQ ID NO: 1274711 - RNA, 24 nt, Human
uaucucaacagaggggcugucuau

SEQ ID NO: 1274712 - RNA, 22 nt, Human
uaucuguccccuccauaucuca

SEQ ID NO: 1274713 - RNA, 25 nt, Human
ucaaagguagaccagaggcacaggc

SEQ ID NO: 1274714 - RNA, 22 nt, Human
ucacccggacaccgcgaguccc

SEQ ID NO: 1274715 - RNA, 20 nt, Human
uccaccaugggcaagugauu

SEQ ID NO: 1274716 - RNA, 20 nt, Human
uccaguaucuguccccucca

SEQ ID NO: 1274717 - RNA, 21 nt, Human
ucccaaaccugagucccucug

SEQ ID NO: 1274718 - RNA, 21 nt, Human
ucccgggaagccgcggucacc

SEQ ID NO: 1274719 - RNA, 21 nt, Human
ucucuagguggagaccaacuc

SEQ ID NO: 1274720 - RNA, 19 nt, Human
ugaauuacuuaagcuguaa

SEQ ID NO: 1274721 - RNA, 20 nt, Human
ugacaagaauugggaagagg

SEQ ID NO: 1274722 - RNA, 21 nt, Human
ugacaagaauugggaagagga

SEQ ID NO: 1274723 - RNA, 24 nt, Human
ugccaggcugagaggcccauaucu

SEQ ID NO: 1274724 - RNA, 25 nt, Human
ugccccgccgcuccguuccgccuca

SEQ ID NO: 1274725 - RNA, 19 nt, Human
ugggaaaggaagagguaug

SEQ ID NO: 1274726 - RNA, 21 nt, Human
ugggaagaggagaagggcuug

SEQ ID NO: 1274727 - RNA, 19 nt, Human
ugggugggaugggaaagga

SEQ ID NO: 1274728 - RNA, 18 nt, Human
uggugccacccugacagc

SEQ ID NO: 1274729 - RNA, 18 nt, Human
uggugccacccugacagg

SEQ ID NO: 1274730 - RNA, 26 nt, Human
ugucgggaaggugucuauuggugaga

SEQ ID NO: 1274731 - RNA, 18 nt, Human
ugugccauggcagugagg

SEQ ID NO: 1274732 - RNA, 25 nt, Human
uguuaaagugcucagcuacaacauu

SEQ ID NO: 1274733 - RNA, 22 nt, Human
uuaauggacaucaccaccacaa

SEQ ID NO: 1274734 - RNA, 22 nt, Human
uuacucuccagccuucagcuug

SEQ ID NO: 1274735 - RNA, 23 nt, Human
uucagggcacaguuuauuaaaaa

SEQ ID NO: 1274736 - RNA, 20 nt, Human
aaacaaagccacacauggac

SEQ ID NO: 1274737 - RNA, 21 nt, Human
aaagaauggccuaaaccaaaa

SEQ ID NO: 1274738 - RNA, 21 nt, Human
aauggugcugcaaacaaagcc

SEQ ID NO: 1274739 - RNA, 21 nt, Human
aauucuuguccuaaaaggaaa

SEQ ID NO: 1274740 - RNA, 21 nt, Human
acucuaagcuauggaaagaag

SEQ ID NO: 1274741 - RNA, 20 nt, Human
acuucaaauggugcugcaaa

SEQ ID NO: 1274742 - RNA, 20 nt, Human
agcaagucaagggggaaaca

SEQ ID NO: 1274743 - RNA, 20 nt, Human
caauaacguuuuucucccaa

SEQ ID NO: 1274744 - RNA, 25 nt, Human
caugccauucuuccaagaagccuua

SEQ ID NO: 1274745 - RNA, 23 nt, Human
ccacccaauaacguuuuucuccc

SEQ ID NO: 1274746 - RNA, 22 nt, Human
cugguaauguacagcgacaucu

SEQ ID NO: 1274747 - RNA, 18 nt, Human
cugucauaguuacagucu

SEQ ID NO: 1274748 - RNA, 24 nt, Human
gaagagagcugcagucccgucggg

SEQ ID NO: 1274749 - RNA, 19 nt, Human
gacugguuguuuaagacaa

SEQ ID NO: 1274750 - RNA, 20 nt, Human
ggaguuggaaaagguuggca

SEQ ID NO: 1274751 - RNA, 21 nt, Human
uaaaaggaaaugacugguugu

SEQ ID NO: 1274752 - RNA, 23 nt, Human
uaacaccaaaguuauuuuagcca

SEQ ID NO: 1274753 - RNA, 20 nt, Human
uaaguuauaaagaauggccu

SEQ ID NO: 1274754 - RNA, 26 nt, Human
uaguaaauucuuguccuaaaaggaaa

SEQ ID NO: 1274755 - RNA, 19 nt, Human
uauuacaauccauuggugu

SEQ ID NO: 1274756 - RNA, 19 nt, Human
ugccaagauuaacaccaaa

SEQ ID NO: 1274757 - RNA, 22 nt, Human
ugucauaguuacagucuauagg

SEQ ID NO: 1274758 - RNA, 18 nt, Human
uuaacguuucugguaaug

SEQ ID NO: 1274759 - RNA, 18 nt, Human
uucuuccaagaagccuua

SEQ ID NO: 1274760 - RNA, 22 nt, Human
aagaagaagggaacaugguugg

SEQ ID NO: 1274761 - RNA, 25 nt, Human
aagaagaagggaacaugguuggagg

SEQ ID NO: 1274762 - RNA, 21 nt, Human
acaugcucucaguaagguaua

SEQ ID NO: 1274763 - RNA, 19 nt, Human
agaugcuaacgaaacacag

SEQ ID NO: 1274764 - RNA, 22 nt, Human
agggaacaugguuggaggccca

SEQ ID NO: 1274765 - RNA, 19 nt, Human
agucaggaaaagaaggacu

SEQ ID NO: 1274766 - RNA, 18 nt, Human
agucuuuucagugagcuc

SEQ ID NO: 1274767 - RNA, 19 nt, Human
augaacuucuuuauuaacu

SEQ ID NO: 1274768 - RNA, 21 nt, Human
cacuaaacuugauuugggggc

SEQ ID NO: 1274769 - RNA, 26 nt, Human
cagcaaaugcuuuuccuaaggcacaa

SEQ ID NO: 1274770 - RNA, 19 nt, Human
cagugagcucaggaacccu

SEQ ID NO: 1274771 - RNA, 25 nt, Human
ccuacugucuacuaaaacccucaga

SEQ ID NO: 1274772 - RNA, 18 nt, Human
cuggagccagaugcuaac

SEQ ID NO: 1274773 - RNA, 21 nt, Human
cuucagagcaacuucuuggca

SEQ ID NO: 1274774 - RNA, 21 nt, Human
gaaacacagcaaaugcuuuuc

SEQ ID NO: 1274775 - RNA, 19 nt, Human
ggggcagcucacugaaaua

SEQ ID NO: 1274776 - RNA, 20 nt, Human
gucaggaaaagaaggacucg

SEQ ID NO: 1274777 - RNA, 20 nt, Human
uaagaagaagggaacauggu

SEQ ID NO: 1274778 - RNA, 21 nt, Human
uacagucaauucagaagagug

SEQ ID NO: 1274779 - RNA, 19 nt, Human
ucuacuaaaacccucagag

SEQ ID NO: 1274780 - RNA, 19 nt, Human
ugacuucagagcaacuucu

SEQ ID NO: 1274781 - RNA, 21 nt, Human
ugagagaaacagugcuuugaa

SEQ ID NO: 1274782 - RNA, 26 nt, Human
ugagggcacuaaacuugauuuggggg

SEQ ID NO: 1274783 - RNA, 20 nt, Human
uggaaguugaaggucugucc

SEQ ID NO: 1274784 - RNA, 21 nt, Human
uggcaaaaugaaaagagcugc

SEQ ID NO: 1274785 - RNA, 18 nt, Human
uguggugcuaagaagaag

SEQ ID NO: 1274786 - RNA, 21 nt, Human
uguuggguuuugauuauuugu

SEQ ID NO: 1274787 - RNA, 18 nt, Human
uuaaaccaaaaugaacuu

SEQ ID NO: 1274788 - RNA, 19 nt, Human
uuuaaaggaaaacaaacag

SEQ ID NO: 1274789 - RNA, 22 nt, Human
aaggugacagugagggguucuu

SEQ ID NO: 1274790 - RNA, 18 nt, Human
agauggaguuuguagggc

SEQ ID NO: 1274791 - RNA, 18 nt, Human
caugaagugagaagaaaa

SEQ ID NO: 1274792 - RNA, 21 nt, Human
ggaguaguuuucacaugaagu

SEQ ID NO: 1274793 - RNA, 19 nt, Human
ggauaaggacagagcuuga

SEQ ID NO: 1274794 - RNA, 23 nt, Human
ggauaaggacagagcuugaaggg

SEQ ID NO: 1274795 - RNA, 21 nt, Human
gguauucucgggaaggugaca

SEQ ID NO: 1274796 - RNA, 22 nt, Human
guccucuucuguucagauauuu

SEQ ID NO: 1274797 - RNA, 24 nt, Human
ucagccacuggaguaguuuucaca

SEQ ID NO: 1274798 - RNA, 21 nt, Human
ucagucagccacuggaguagu

SEQ ID NO: 1274799 - RNA, 22 nt, Human
ucuauaauugaugacugugagc

SEQ ID NO: 1274800 - RNA, 19 nt, Human
ugaagggucagcaauucag

SEQ ID NO: 1274801 - RNA, 21 nt, Human
ugaagugagaagaaaagcuga

SEQ ID NO: 1274802 - RNA, 23 nt, Human
uggucuuaggguauucucgggaa

SEQ ID NO: 1274803 - RNA, 18 nt, Human
aaaaaagcucuaaaguca

SEQ ID NO: 1274804 - RNA, 24 nt, Human
aacagaaaccccuuggggccugag

SEQ ID NO: 1274805 - RNA, 21 nt, Human
agagaauagaaacagaaaccc

SEQ ID NO: 1274806 - RNA, 24 nt, Human
cacagccauccgccucaagguggg

SEQ ID NO: 1274807 - RNA, 20 nt, Human
cagcugggaauucugggcag

SEQ ID NO: 1274808 - RNA, 18 nt, Human
cagugcaggaaguagggu

SEQ ID NO: 1274809 - RNA, 21 nt, Human
cgugcacaggcagaggcugug

SEQ ID NO: 1274810 - RNA, 21 nt, Human
cucaagguggggaugaaagga

SEQ ID NO: 1274811 - RNA, 19 nt, Human
gacaggcugacacagacag

SEQ ID NO: 1274812 - RNA, 20 nt, Human
gacaggcugacacagacagc

SEQ ID NO: 1274813 - RNA, 19 nt, Human
gaggcugugggucagugca

SEQ ID NO: 1274814 - RNA, 20 nt, Human
ugaaaggagaugaccuggug

SEQ ID NO: 1274815 - RNA, 20 nt, Human
ugaaaggagaugaccuggug

SEQ ID NO: 1274816 - RNA, 18 nt, Human
ugaccugguggcugcgug

SEQ ID NO: 1274817 - RNA, 21 nt, Human
ugggcagggacaagcaggcgu

SEQ ID NO: 1274818 - RNA, 19 nt, Human
uucaugugcuucucuugag

SEQ ID NO: 1274819 - RNA, 23 nt, Human
uugagacgaagggaaaaguggua

SEQ ID NO: 1274820 - RNA, 21 nt, Human
aggacagaugcugcuggagga

SEQ ID NO: 1274821 - RNA, 18 nt, Human
aggaggccaaggggccag

SEQ ID NO: 1274822 - RNA, 20 nt, Human
aggaggccaaggggccagcu

SEQ ID NO: 1274823 - RNA, 22 nt, Human
caacugccagggaccucgagca

SEQ ID NO: 1274824 - RNA, 21 nt, Human
cacuugccaaggaccacaacu

SEQ ID NO: 1274825 - RNA, 19 nt, Human
cccugaggagagaggacag

SEQ ID NO: 1274826 - RNA, 21 nt, Human
gccaaggaccacaacugccag

SEQ ID NO: 1274827 - RNA, 22 nt, Human
gucaccagauggggauggggag

SEQ ID NO: 1274828 - RNA, 20 nt, Human
ucccugaggagagaggacag

SEQ ID NO: 1274829 - RNA, 26 nt, Human
ucucuaggaggccaaggggccagcuu

SEQ ID NO: 1274830 - RNA, 18 nt, Human
ugccaaggaccacaacug

SEQ ID NO: 1274831 - RNA, 19 nt, Human
ugccucccugaggagagag

SEQ ID NO: 1274832 - RNA, 22 nt, Human
ugcugcuggaggagaugucagg

SEQ ID NO: 1274833 - RNA, 22 nt, Human
ugcuugccucccugaggagaga

SEQ ID NO: 1274834 - RNA, 21 nt, Human
uggguggaggaggaaggacuc

SEQ ID NO: 1274835 - RNA, 22 nt, Human
uguagccaggccuuuggucacc

SEQ ID NO: 1274836 - RNA, 19 nt, Human
uuggggucuuuugaagagg

SEQ ID NO: 1274837 - RNA, 19 nt, Human
agaaauccugcaucucagu

SEQ ID NO: 1274838 - RNA, 24 nt, Human
agacacauucaggugccuuugcag

SEQ ID NO: 1274839 - RNA, 21 nt, Human
agggugggcugucucuccacc

SEQ ID NO: 1274840 - RNA, 19 nt, Human
caagacagcugucucaggc

SEQ ID NO: 1274841 - RNA, 18 nt, Human
caggggucacaguggaca

SEQ ID NO: 1274842 - RNA, 20 nt, Human
cauucaggugccuuugcaga

SEQ ID NO: 1274843 - RNA, 22 nt, Human
cucacauuaugcuaacagggac

SEQ ID NO: 1274844 - RNA, 23 nt, Human
cucacauuaugcuaacagggacg

SEQ ID NO: 1274845 - RNA, 18 nt, Human
gaacaggggucacagugg

SEQ ID NO: 1274846 - RNA, 19 nt, Human
gcagaaagagaugccagag

SEQ ID NO: 1274847 - RNA, 20 nt, Human
gucacaguggacacaagggu

SEQ ID NO: 1274848 - RNA, 23 nt, Human
uaugcuaacagggacgcagacac

SEQ ID NO: 1274849 - RNA, 18 nt, Human
ugaagucacaaaggggag

SEQ ID NO: 1274850 - RNA, 19 nt, Human
aaccucaccgagagcccaa

SEQ ID NO: 1274851 - RNA, 21 nt, Human
agaagaggagagagagaggcc

SEQ ID NO: 1274852 - RNA, 21 nt, Human
agaggccagagccuggggaug

SEQ ID NO: 1274853 - RNA, 25 nt, Human
agccaggugcucugcauggcaaggu

SEQ ID NO: 1274854 - RNA, 21 nt, Human
agcccaaacucucaccuacag

SEQ ID NO: 1274855 - RNA, 23 nt, Human
agccuuuuccuucucccaaccuc

SEQ ID NO: 1274856 - RNA, 19 nt, Human
cacccccuggcccauaagc

SEQ ID NO: 1274857 - RNA, 25 nt, Human
cccugcgugucucaguuucucuccu

SEQ ID NO: 1274858 - RNA, 23 nt, Human
ccugcagccgggucagagugagc

SEQ ID NO: 1274859 - RNA, 23 nt, Human
ccuggcccauaagccuuuuccuu

SEQ ID NO: 1274860 - RNA, 21 nt, Human
cucccucccacccccuggccc

SEQ ID NO: 1274861 - RNA, 20 nt, Human
cuggcccauaagccuuuucc

SEQ ID NO: 1274862 - RNA, 19 nt, Human
gagagagagaggccagagc

SEQ ID NO: 1274863 - RNA, 23 nt, Human
gguugcccucaggguccuccuug

SEQ ID NO: 1274864 - RNA, 19 nt, Human
gugguugcccucagggucc

SEQ ID NO: 1274865 - RNA, 21 nt, Human
guucugguccccuugagucuu

SEQ ID NO: 1274866 - RNA, 20 nt, Human
ucccaaccucaccgagagcc

SEQ ID NO: 1274867 - RNA, 21 nt, Human
ucccaaccucaccgagagccc

SEQ ID NO: 1274868 - RNA, 22 nt, Human
ucccaaccucaccgagagccca

SEQ ID NO: 1274869 - RNA, 18 nt, Human
uccgggguuggcuccuuc

SEQ ID NO: 1274870 - RNA, 23 nt, Human
ucucccaaccucaccgagagccc

SEQ ID NO: 1274871 - RNA, 24 nt, Human
ucucccaaccucaccgagagccca

SEQ ID NO: 1274872 - RNA, 19 nt, Human
uggcagaugagaagccagg

SEQ ID NO: 1274873 - RNA, 19 nt, Human
uggcccauaagccuuuucc

SEQ ID NO: 1274874 - RNA, 24 nt, Human
ugguugcccucaggguccuccuug

SEQ ID NO: 1274875 - RNA, 21 nt, Human
ugucagggaccacaagcccug

SEQ ID NO: 1274876 - RNA, 22 nt, Human
uuccugcagccgggucagagug

SEQ ID NO: 1274877 - RNA, 19 nt, Human
uugcccucaggguccuccu

SEQ ID NO: 1274878 - RNA, 23 nt, Human
aaagucuuucccuugggaaacca

SEQ ID NO: 1274879 - RNA, 20 nt, Human
aaaugcagacacacagauaa

SEQ ID NO: 1274880 - RNA, 18 nt, Human
aauuagccaggcauggug

SEQ ID NO: 1274881 - RNA, 26 nt, Human
acagagugaggcccugucccuacaaa

SEQ ID NO: 1274882 - RNA, 20 nt, Human
accacugcaaaacuccaucu

SEQ ID NO: 1274883 - RNA, 24 nt, Human
accagcuugugcaacagagugagg

SEQ ID NO: 1274884 - RNA, 22 nt, Human
accaggucuugggugcccaggu

SEQ ID NO: 1274885 - RNA, 21 nt, Human
acccaccccggggcacgcaca

SEQ ID NO: 1274886 - RNA, 21 nt, Human
accccccuccccccucccccc

SEQ ID NO: 1274887 - RNA, 23 nt, Human
accccccuccccccucccccccc

SEQ ID NO: 1274888 - RNA, 23 nt, Human
accccccuccccccucccccccc

SEQ ID NO: 1274889 - RNA, 25 nt, Human
accccccuccccccuccccccccac

SEQ ID NO: 1274890 - RNA, 20 nt, Human
acccgcccucccuccuuauc

SEQ ID NO: 1274891 - RNA, 19 nt, Human
agagauacagggaccuugc

SEQ ID NO: 1274892 - RNA, 19 nt, Human
agagcagguaguuguaacg

SEQ ID NO: 1274893 - RNA, 22 nt, Human
agaggucacacuggacccagag

SEQ ID NO: 1274894 - RNA, 22 nt, Human
agcauuuugggaggccaaggca

SEQ ID NO: 1274895 - RNA, 24 nt, Human
aggaauugaaggcugcaaugagcu

SEQ ID NO: 1274896 - RNA, 18 nt, Human
aggcaggaggauugccug

SEQ ID NO: 1274897 - RNA, 24 nt, Human
aggcaggaggauugccugagccca

SEQ ID NO: 1274898 - RNA, 21 nt, Human
aggcugaggcaggaggauugc

SEQ ID NO: 1274899 - RNA, 24 nt, Human
aggcugaggcaggaggauugccug

SEQ ID NO: 1274900 - RNA, 24 nt, Human
aggugcaguggcucacaccuguaa

SEQ ID NO: 1274901 - RNA, 24 nt, Human
aguggcucacaccuguaaucucag

SEQ ID NO: 1274902 - RNA, 24 nt, Human
aguucaaggaggccaggaguucaa

SEQ ID NO: 1274903 - RNA, 18 nt, Human
auccugcucuuggcucuu

SEQ ID NO: 1274904 - RNA, 19 nt, Human
augucugagguggccacaa

SEQ ID NO: 1274905 - RNA, 24 nt, Human
caagugaauaugcguaccccccuc

SEQ ID NO: 1274906 - RNA, 22 nt, Human
cacaaccuaaucucuguguacc

SEQ ID NO: 1274907 - RNA, 23 nt, Human
cacacacagagcagguaguugua

SEQ ID NO: 1274908 - RNA, 24 nt, Human
cacaccuguaaucucagcauuuug

SEQ ID NO: 1274909 - RNA, 22 nt, Human
cacauggaaaugcccugggaac

SEQ ID NO: 1274910 - RNA, 24 nt, Human
caccuguaaucucagcauuuuggg

SEQ ID NO: 1274911 - RNA, 18 nt, Human
cagagugaggcccugucc

SEQ ID NO: 1274912 - RNA, 20 nt, Human
cagauggaguccagcaugga

SEQ ID NO: 1274913 - RNA, 24 nt, Human
cagcauuuugggaggccaaggcag

SEQ ID NO: 1274914 - RNA, 25 nt, Human
cagcauuuugggaggccaaggcagg

SEQ ID NO: 1274915 - RNA, 24 nt, Human
cagcuacucaggaggcugaggcag

SEQ ID NO: 1274916 - RNA, 18 nt, Human
caggucuugggugcccag

SEQ ID NO: 1274917 - RNA, 21 nt, Human
caggucuugggugcccagguc

SEQ ID NO: 1274918 - RNA, 23 nt, Human
ccacacucccucuccaaaaaaua

SEQ ID NO: 1274919 - RNA, 23 nt, Human
ccagagccugcagaggucacacu

SEQ ID NO: 1274920 - RNA, 19 nt, Human
ccauagcaugcuggcaccc

SEQ ID NO: 1274921 - RNA, 23 nt, Human
ccaucuaaaaaaaaaauggccau

SEQ ID NO: 1274922 - RNA, 23 nt, Human
cccauagcaugcuggcacccgcc

SEQ ID NO: 1274923 - RNA, 22 nt, Human
ccccccuccccccccacacaca

SEQ ID NO: 1274924 - RNA, 24 nt, Human
ccccccuccccccccacacacaga

SEQ ID NO: 1274925 - RNA, 19 nt, Human
ccccccuccccccuccccc

SEQ ID NO: 1274926 - RNA, 22 nt, Human
cccccuccccccucccccccca

SEQ ID NO: 1274927 - RNA, 22 nt, Human
ccccucugucuuccaagaccug

SEQ ID NO: 1274928 - RNA, 22 nt, Human
cccucccuccuuaucucuccca

SEQ ID NO: 1274929 - RNA, 22 nt, Human
cccucccuccuuaucucuccca

SEQ ID NO: 1274930 - RNA, 21 nt, Human
ccuccacccugauggguaguc

SEQ ID NO: 1274931 - RNA, 18 nt, Human
ccuggagcacauggaaau

SEQ ID NO: 1274932 - RNA, 21 nt, Human
ccuugccuggggcaaaaagga

SEQ ID NO: 1274933 - RNA, 21 nt, Human
cucacaccuguaaucucagca

SEQ ID NO: 1274934 - RNA, 21 nt, Human
cucacaccuguaaucucagca

SEQ ID NO: 1274935 - RNA, 19 nt, Human
cucauccugcucuuggcuc

SEQ ID NO: 1274936 - RNA, 19 nt, Human
cuccccccuccccccccac

SEQ ID NO: 1274937 - RNA, 22 nt, Human
cucuguguaccacaggccucac

SEQ ID NO: 1274938 - RNA, 19 nt, Human
cugaaacccaugacugcug

SEQ ID NO: 1274939 - RNA, 23 nt, Human
cugacacuggagaaacccaauug

SEQ ID NO: 1274940 - RNA, 21 nt, Human
cuguagucccagcuacucagg

SEQ ID NO: 1274941 - RNA, 18 nt, Human
gaaaggaaaccaggucuu

SEQ ID NO: 1274942 - RNA, 23 nt, Human
gaauaugcguaccccccuccccc

SEQ ID NO: 1274943 - RNA, 23 nt, Human
gaauaugcguaccccccuccccc

SEQ ID NO: 1274944 - RNA, 22 nt, Human
gacuucaagugaauaugcguac

SEQ ID NO: 1274945 - RNA, 19 nt, Human
gauugcaccacugcaaaac

SEQ ID NO: 1274946 - RNA, 19 nt, Human
gcugcaaugagcuaugauu

SEQ ID NO: 1274947 - RNA, 20 nt, Human
ggaaaacaugugcaacuggg

SEQ ID NO: 1274948 - RNA, 20 nt, Human
ggagcacucagggagaugag

SEQ ID NO: 1274949 - RNA, 22 nt, Human
ggaggauugccugagcccagga

SEQ ID NO: 1274950 - RNA, 22 nt, Human
ggcaaaaaggauuagaaaaugc

SEQ ID NO: 1274951 - RNA, 18 nt, Human
ggcgaggugcaguggcuc

SEQ ID NO: 1274952 - RNA, 20 nt, Human
gggaaaccagggagcacuca

SEQ ID NO: 1274953 - RNA, 20 nt, Human
gugcagcucuucugggcggg

SEQ ID NO: 1274954 - RNA, 18 nt, Human
gugcaguggcucacaccu

SEQ ID NO: 1274955 - RNA, 21 nt, Human
uaaagcagcuccccucugucu

SEQ ID NO: 1274956 - RNA, 21 nt, Human
uaagugguggaagauggagca

SEQ ID NO: 1274957 - RNA, 18 nt, Human
uaccacaggccucacgca

SEQ ID NO: 1274958 - RNA, 22 nt, Human
uagauaagcaucuuugugagag

SEQ ID NO: 1274959 - RNA, 22 nt, Human
uagcaugcuggcacccgcccuc

SEQ ID NO: 1274960 - RNA, 20 nt, Human
uagccucuaaagcagcuccc

SEQ ID NO: 1274961 - RNA, 23 nt, Human
uagcuaaaugagcaauauaguau

SEQ ID NO: 1274962 - RNA, 23 nt, Human
ucaaagcaacuuagccucuaaag

SEQ ID NO: 1274963 - RNA, 18 nt, Human
ucaaggaggccaggaguu

SEQ ID NO: 1274964 - RNA, 18 nt, Human
ucacaucacagacuuucu

SEQ ID NO: 1274965 - RNA, 24 nt, Human
ucagagcugcuguuccagagccug

SEQ ID NO: 1274966 - RNA, 25 nt, Human
ucagagcugcuguuccagagccugc

SEQ ID NO: 1274967 - RNA, 21 nt, Human
uccaucuaaaaaaaaaauggc

SEQ ID NO: 1274968 - RNA, 20 nt, Human
uccccccuccccccccacac

SEQ ID NO: 1274969 - RNA, 22 nt, Human
ucccuacaaaaaauucuaaaaa

SEQ ID NO: 1274970 - RNA, 20 nt, Human
ucuacugcugugaguugggg

SEQ ID NO: 1274971 - RNA, 18 nt, Human
ucucaaacaaagcuggga

SEQ ID NO: 1274972 - RNA, 21 nt, Human
ucucugcugagggcucugucc

SEQ ID NO: 1274973 - RNA, 24 nt, Human
ucuggcgaggugcaguggcucaca

SEQ ID NO: 1274974 - RNA, 23 nt, Human
ucuuugguuugcugacacuggag

SEQ ID NO: 1274975 - RNA, 18 nt, Human
ugaaacccaugacugcug

SEQ ID NO: 1274976 - RNA, 20 nt, Human
ugaggcaggaggauugccug

SEQ ID NO: 1274977 - RNA, 24 nt, Human
ugaggcaggaggauugccugagcc

SEQ ID NO: 1274978 - RNA, 25 nt, Human
ugaggcaggaggauugccugagccc

SEQ ID NO: 1274979 - RNA, 19 nt, Human
ugaguuggggugaacccac

SEQ ID NO: 1274980 - RNA, 22 nt, Human
ugcaaugagcuaugauugcacc

SEQ ID NO: 1274981 - RNA, 21 nt, Human
ugcagcucuucugggcgggga

SEQ ID NO: 1274982 - RNA, 24 nt, Human
ugccugagcccaggaauugaaggc

SEQ ID NO: 1274983 - RNA, 21 nt, Human
ugcugaaacccaugacugcug

SEQ ID NO: 1274984 - RNA, 23 nt, Human
uggagguuuucuccuauaacuga

SEQ ID NO: 1274985 - RNA, 22 nt, Human
uggcacccgcccucccuccuua

SEQ ID NO: 1274986 - RNA, 21 nt, Human
uggcucacaccuguaaucuca

SEQ ID NO: 1274987 - RNA, 22 nt, Human
uggcucacaccuguaaucucag

SEQ ID NO: 1274988 - RNA, 24 nt, Human
uggcucacaccuguaaucucagca

SEQ ID NO: 1274989 - RNA, 18 nt, Human
uggcuguguuggccccac

SEQ ID NO: 1274990 - RNA, 21 nt, Human
ugggaggggucuccugggaug

SEQ ID NO: 1274991 - RNA, 24 nt, Human
ugggaugaaugaaaggaaaccagg

SEQ ID NO: 1274992 - RNA, 22 nt, Human
uggggagguuagauaagcaucu

SEQ ID NO: 1274993 - RNA, 21 nt, Human
uggguagucaggccuggagca

SEQ ID NO: 1274994 - RNA, 24 nt, Human
ugguuugcugacacuggagaaacc

SEQ ID NO: 1274995 - RNA, 22 nt, Human
uguaacgccuccaccucauccu

SEQ ID NO: 1274996 - RNA, 18 nt, Human
ugucucagagauacaggg

SEQ ID NO: 1274997 - RNA, 21 nt, Human
ugugcaacagagugaggcccu

SEQ ID NO: 1274998 - RNA, 19 nt, Human
ugugcuggacucagaauug

SEQ ID NO: 1274999 - RNA, 20 nt, Human
ugugcuggacucagaauugg

SEQ ID NO: 1275000 - RNA, 21 nt, Human
uguggugguuucacuucaaga

SEQ ID NO: 1275001 - RNA, 22 nt, Human
uguguaccacaggccucacgca

SEQ ID NO: 1275002 - RNA, 18 nt, Human
uucaagauuuucaggauc

SEQ ID NO: 1275003 - RNA, 24 nt, Human
uucaaggaggccaggaguucaaga

SEQ ID NO: 1275004 - RNA, 20 nt, Human
uucuagaguaagcuuuuagg

SEQ ID NO: 1275005 - RNA, 24 nt, Human
uugccugagcccaggaauugaagg

SEQ ID NO: 1275006 - RNA, 23 nt, Human
uugcugacacuggagaaacccaa

SEQ ID NO: 1275007 - RNA, 22 nt, Human
uuggauuuuacuguggagauuu

SEQ ID NO: 1275008 - RNA, 25 nt, Human
uuuggauuuuacuguggagauuuug

SEQ ID NO: 1275009 - RNA, 22 nt, Human
aaacaaacaccugaucaaacca

SEQ ID NO: 1275010 - RNA, 24 nt, Human
aaacagaaauugcaaguaggaacc

SEQ ID NO: 1275011 - RNA, 18 nt, Human
aaaccuucccucuuaaac

SEQ ID NO: 1275012 - RNA, 19 nt, Human
aaagugcuaggauuauagg

SEQ ID NO: 1275013 - RNA, 19 nt, Human
aaagugcuaggauuauagg

SEQ ID NO: 1275014 - RNA, 24 nt, Human
aaagugcugggauuacagguguga

SEQ ID NO: 1275015 - RNA, 21 nt, Human
aacaaacaccugaucaaacca

SEQ ID NO: 1275016 - RNA, 19 nt, Human
aaccccggguauuuacccc

SEQ ID NO: 1275017 - RNA, 18 nt, Human
aaccucaggugauccacc

SEQ ID NO: 1275018 - RNA, 25 nt, Human
aagcaauucuccugccucagccucc

SEQ ID NO: 1275019 - RNA, 26 nt, Human
aagcaugaaaacaacauuuaucuccu

SEQ ID NO: 1275020 - RNA, 20 nt, Human
aaggagagaagguugggguu

SEQ ID NO: 1275021 - RNA, 20 nt, Human
aaguagcugggauuacaggc

SEQ ID NO: 1275022 - RNA, 26 nt, Human
aaguagcugggauuacaggccucugc

SEQ ID NO: 1275023 - RNA, 18 nt, Human
aagugcugggauuacagg

SEQ ID NO: 1275024 - RNA, 19 nt, Human
aagugcugggauuacaggu

SEQ ID NO: 1275025 - RNA, 26 nt, Human
aagugcugggauuacaggugugagcu

SEQ ID NO: 1275026 - RNA, 23 nt, Human
aaugaugaaugcuuuccaaaaga

SEQ ID NO: 1275027 - RNA, 19 nt, Human
aauggagggaccagcugga

SEQ ID NO: 1275028 - RNA, 24 nt, Human
aauuuuauauuuuuaguagagaug

SEQ ID NO: 1275029 - RNA, 21 nt, Human
acaccccuccccuuuuaaaau

SEQ ID NO: 1275030 - RNA, 18 nt, Human
accaagcaugaaaacaac

SEQ ID NO: 1275031 - RNA, 18 nt, Human
accauguuggccaggcug

SEQ ID NO: 1275032 - RNA, 18 nt, Human
accauguuggccaggcug

SEQ ID NO: 1275033 - RNA, 18 nt, Human
acgagguuucaccguguu

SEQ ID NO: 1275034 - RNA, 20 nt, Human
acgagguuucaccguguuag

SEQ ID NO: 1275035 - RNA, 24 nt, Human
acucuuguugcccaggcuggagug

SEQ ID NO: 1275036 - RNA, 23 nt, Human
acugcaaucucugaacauaaauu

SEQ ID NO: 1275037 - RNA, 20 nt, Human
agaauggacacuguguuacc

SEQ ID NO: 1275038 - RNA, 22 nt, Human
agacuugaaaguugaaaucacu

SEQ ID NO: 1275039 - RNA, 25 nt, Human
agagaagguugggguuuguuuuuga

SEQ ID NO: 1275040 - RNA, 21 nt, Human
agagugcugggauuacaggug

SEQ ID NO: 1275041 - RNA, 24 nt, Human
agagugcugggauuacagguguga

SEQ ID NO: 1275042 - RNA, 20 nt, Human
agccacaggugcaguaagga

SEQ ID NO: 1275043 - RNA, 21 nt, Human
agccuccugaguagcugggac

SEQ ID NO: 1275044 - RNA, 25 nt, Human
agccugguaaauucuagucagaccg

SEQ ID NO: 1275045 - RNA, 21 nt, Human
agcuggccuucuuugguuugg

SEQ ID NO: 1275046 - RNA, 21 nt, Human
agcugggacuacaggggcccg

SEQ ID NO: 1275047 - RNA, 19 nt, Human
aggcccaguuguaaaauuu

SEQ ID NO: 1275048 - RNA, 25 nt, Human
aggcuggagugcaguggugcgaucu

SEQ ID NO: 1275049 - RNA, 21 nt, Human
agggacuccaucauugcaagu

SEQ ID NO: 1275050 - RNA, 24 nt, Human
aggugauccaccugccucggccuc

SEQ ID NO: 1275051 - RNA, 22 nt, Human
aguagaaaugggguuucaccau

SEQ ID NO: 1275052 - RNA, 18 nt, Human
aguagcugggacuacagg

SEQ ID NO: 1275053 - RNA, 21 nt, Human
agugcaguggugcgaucucag

SEQ ID NO: 1275054 - RNA, 23 nt, Human
agugcaguggugcgaucucagcu

SEQ ID NO: 1275055 - RNA, 24 nt, Human
agugcaguggugcgaucucagcuc

SEQ ID NO: 1275056 - RNA, 23 nt, Human
agugcaguggugcggucuuggcu

SEQ ID NO: 1275057 - RNA, 24 nt, Human
agugcaguggugcggucuuggcuc

SEQ ID NO: 1275058 - RNA, 22 nt, Human
agugcugggauuacagguguga

SEQ ID NO: 1275059 - RNA, 24 nt, Human
aguggugcgaucucagcucacugc

SEQ ID NO: 1275060 - RNA, 22 nt, Human
auauaaagcuauuuuaucuaca

SEQ ID NO: 1275061 - RNA, 21 nt, Human
auggaaagcaggcccaaauca

SEQ ID NO: 1275062 - RNA, 18 nt, Human
augggguuucaccauguu

SEQ ID NO: 1275063 - RNA, 18 nt, Human
augggguuucaccauguu

SEQ ID NO: 1275064 - RNA, 22 nt, Human
augggguuucaccauguuggcc

SEQ ID NO: 1275065 - RNA, 22 nt, Human
augggguuucaccauguuggcc

SEQ ID NO: 1275066 - RNA, 23 nt, Human
augggguuucaccauguuggcca

SEQ ID NO: 1275067 - RNA, 24 nt, Human
augggguuucaccauguuggccag

SEQ ID NO: 1275068 - RNA, 24 nt, Human
augggguuucaccauguuggccag

SEQ ID NO: 1275069 - RNA, 19 nt, Human
auuauaggagugugucacc

SEQ ID NO: 1275070 - RNA, 21 nt, Human
auucuccugccucagccuccc

SEQ ID NO: 1275071 - RNA, 23 nt, Human
caaaauggcggccccaucauccc

SEQ ID NO: 1275072 - RNA, 25 nt, Human
caaagugcuaggauuauaggagugu

SEQ ID NO: 1275073 - RNA, 24 nt, Human
caaagugcugggauuacaggugug

SEQ ID NO: 1275074 - RNA, 22 nt, Human
caagcaauucuccugccucagc

SEQ ID NO: 1275075 - RNA, 23 nt, Human
caagcaugaaaacaacauuuauc

SEQ ID NO: 1275076 - RNA, 24 nt, Human
caccaggccuagcuaauuuuugua

SEQ ID NO: 1275077 - RNA, 21 nt, Human
caccauguuggccaggcuggu

SEQ ID NO: 1275078 - RNA, 21 nt, Human
caccauguuggccaggcuggu

SEQ ID NO: 1275079 - RNA, 21 nt, Human
caccauguuggccaggcuggu

SEQ ID NO: 1275080 - RNA, 22 nt, Human
caccauguuggccaggcugguc

SEQ ID NO: 1275081 - RNA, 27 nt, Human
caccauguuggccaggcuggucuggaa

SEQ ID NO: 1275082 - RNA, 24 nt, Human
caccauguuggccaggcugguuuc

SEQ ID NO: 1275083 - RNA, 31 nt, Human; identical to SEQ ID NO: 466129

SEQ ID NO: 1275084 - RNA, 21 nt, Human
cacccacaucggccucccaaa

SEQ ID NO: 1275085 - RNA, 23 nt, Human
caccccuccccuuuuaaaauccc

SEQ ID NO: 1275086 - RNA, 18 nt, Human
caccguguuagccaggau

SEQ ID NO: 1275087 - RNA, 24 nt, Human
caccguguuagccaggauggucuc

SEQ ID NO: 1275088 - RNA, 23 nt, Human
caccugccucggccucccaaagu

SEQ ID NO: 1275089 - RNA, 18 nt, Human
cacugcaaccucugccuc

SEQ ID NO: 1275090 - RNA, 21 nt, Human
cacugcaaccucugccuccca

SEQ ID NO: 1275091 - RNA, 26 nt, Human
cacuggccuuuuuuuuuuuuuuugag

SEQ ID NO: 1275092 - RNA, 22 nt, Human
cacuguguuaccaagcaugaaa

SEQ ID NO: 1275093 - RNA, 22 nt, Human
cagagugcugggauuacaggug

SEQ ID NO: 1275094 - RNA, 24 nt, Human
cagagugcugggauuacaggugug

SEQ ID NO: 1275095 - RNA, 18 nt, Human
cagcaauagauaacaaac

SEQ ID NO: 1275096 - RNA, 22 nt, Human
caggugauccaccugccucggc

SEQ ID NO: 1275097 - RNA, 22 nt, Human
caggugcaguaaggagccgaca

SEQ ID NO: 1275098 - RNA, 20 nt, Human
caguaaggagccgacaaaau

SEQ ID NO: 1275099 - RNA, 26 nt, Human
caguaggucucucaacagugggcuua

SEQ ID NO: 1275100 - RNA, 23 nt, Human
caucuuccucucuuaguagccca

SEQ ID NO: 1275101 - RNA, 24 nt, Human
cauguuggccaggcuggucuggaa

SEQ ID NO: 1275102 - RNA, 23 nt, Human
cauguuggccaggcugguuucaa

SEQ ID NO: 1275103 - RNA, 25 nt, Human
ccaaagugcuaggauuauaggagug

SEQ ID NO: 1275104 - RNA, 21 nt, Human
ccaaagugcugggauuacagg

SEQ ID NO: 1275105 - RNA, 21 nt, Human
ccaaagugcugggauuacagg

SEQ ID NO: 1275106 - RNA, 24 nt, Human
ccaaagugcugggauuacaggugu

SEQ ID NO: 1275107 - RNA, 19 nt, Human
ccacaucggccucccaaag

SEQ ID NO: 1275108 - RNA, 21 nt, Human
ccagacaacuggcugcuucac

SEQ ID NO: 1275109 - RNA, 21 nt, Human
ccagagugcugggauuacagg

SEQ ID NO: 1275110 - RNA, 21 nt, Human
ccagagugcugggauuacagg

SEQ ID NO: 1275111 - RNA, 24 nt, Human
ccagagugcugggauuacaggugu

SEQ ID NO: 1275112 - RNA, 25 nt, Human
cccaaguagcugggauuacaggccu

SEQ ID NO: 1275113 - RNA, 23 nt, Human
ccccagacaacuggcugcuucac

SEQ ID NO: 1275114 - RNA, 18 nt, Human
ccccgguucacgccaucc

SEQ ID NO: 1275115 - RNA, 22 nt, Human
ccccuuuucucucggaaguccc

SEQ ID NO: 1275116 - RNA, 19 nt, Human
cccuguucguacaccccuc

SEQ ID NO: 1275117 - RNA, 23 nt, Human
ccgacaaaauggcacccuccgag

SEQ ID NO: 1275118 - RNA, 18 nt, Human
ccgcuggaggcccaguug

SEQ ID NO: 1275119 - RNA, 23 nt, Human
ccgcuuuagccuccugaguagcu

SEQ ID NO: 1275120 - RNA, 24 nt, Human
ccuaaccucaggugauccacccac

SEQ ID NO: 1275121 - RNA, 23 nt, Human
ccuauuaaaccuucccucuuaaa

SEQ ID NO: 1275122 - RNA, 24 nt, Human
ccuauuaucuucauaaacugagaa

SEQ ID NO: 1275123 - RNA, 21 nt, Human
ccuccagcugccccuuuucuc

SEQ ID NO: 1275124 - RNA, 24 nt, Human
ccucccagauucaagcaauucucc

SEQ ID NO: 1275125 - RNA, 25 nt, Human
ccucgcgacuccucgcguguguccg

SEQ ID NO: 1275126 - RNA, 21 nt, Human
ccucuguagcuaugaaugucc

SEQ ID NO: 1275127 - RNA, 22 nt, Human
ccugaccccgugauccgcccac

SEQ ID NO: 1275128 - RNA, 21 nt, Human
ccugaccucaggugauccacc

SEQ ID NO: 1275129 - RNA, 23 nt, Human
ccugaccucaggugauccaccug

SEQ ID NO: 1275130 - RNA, 23 nt, Human
ccugaccucaggugauccaccug

SEQ ID NO: 1275131 - RNA, 23 nt, Human
ccugaguagcugggacuacaggg

SEQ ID NO: 1275132 - RNA, 23 nt, Human
ccugccucagccucccaaguagc

SEQ ID NO: 1275133 - RNA, 20 nt, Human
cgacaaaauggcacccuccg

SEQ ID NO: 1275134 - RNA, 23 nt, Human
cgacaaaauggcacccuccgaga

SEQ ID NO: 1275135 - RNA, 24 nt, Human
cgagguuucaccguguuagccagg

SEQ ID NO: 1275136 - RNA, 24 nt, Human
cgcccaggcuggagugcaguggug

SEQ ID NO: 1275137 - RNA, 20 nt, Human
cgcuuuagccuccugaguaa

SEQ ID NO: 1275138 - RNA, 25 nt, Human
cuaauacucuuauaauuucuuaugc

SEQ ID NO: 1275139 - RNA, 24 nt, Human
cuaauuuuauauuuuuaguagaga

SEQ ID NO: 1275140 - RNA, 24 nt, Human
cucacugcaaccucugccucccag

SEQ ID NO: 1275141 - RNA, 23 nt, Human
cucagccucccaaguagcuggga

SEQ ID NO: 1275142 - RNA, 20 nt, Human
cuccugaccccgugauccgc

SEQ ID NO: 1275143 - RNA, 19 nt, Human
cucgcccucccagagugcu

SEQ ID NO: 1275144 - RNA, 22 nt, Human
cucgggguugucaucacggucc

SEQ ID NO: 1275145 - RNA, 18 nt, Human
cugacuucuucacuuugu

SEQ ID NO: 1275146 - RNA, 23 nt, Human
cugcaaccucugccucccagauu

SEQ ID NO: 1275147 - RNA, 24 nt, Human
cugcaaccucugccucccagauuc

SEQ ID NO: 1275148 - RNA, 24 nt, Human
cugcaagcuccgccuccccgguuc

SEQ ID NO: 1275149 - RNA, 25 nt, Human
cugccccuuuucucucggaaguccc

SEQ ID NO: 1275150 - RNA, 23 nt, Human
cugccucagccucccaaguagcu

SEQ ID NO: 1275151 - RNA, 23 nt, Human
cugccucggccucccaaagugcu

SEQ ID NO: 1275152 - RNA, 21 nt, Human
cuguucguacaccccuccccu

SEQ ID NO: 1275153 - RNA, 23 nt, Human
cuguuuuccuuucucuuucuuuu

SEQ ID NO: 1275154 - RNA, 24 nt, Human
cuuacucuuguugcccaggcugga

SEQ ID NO: 1275155 - RNA, 24 nt, Human
cuuguugcccaggcuggagugcag

SEQ ID NO: 1275156 - RNA, 18 nt, Human
cuuuguacuguuucucuu

SEQ ID NO: 1275157 - RNA, 19 nt, Human
gaaagauagucuaugccuu

SEQ ID NO: 1275158 - RNA, 19 nt, Human
gacacaggaguuaagaaga

SEQ ID NO: 1275159 - RNA, 22 nt, Human
gaccccgugauccgcccaccuc

SEQ ID NO: 1275160 - RNA, 24 nt, Human
gaccucaggugauccaccugccuc

SEQ ID NO: 1275161 - RNA, 18 nt, Human
gacgccgccuccucaagc

SEQ ID NO: 1275162 - RNA, 18 nt, Human
gagaugggguuucaccau

SEQ ID NO: 1275163 - RNA, 24 nt, Human
gagaugggguuucaccauguuggc

SEQ ID NO: 1275164 - RNA, 25 nt, Human
gagccgacaaaauggcacccuccga

SEQ ID NO: 1275165 - RNA, 19 nt, Human
gagcuguuuuccuuucucu

SEQ ID NO: 1275166 - RNA, 26 nt, Human
gaguagcugggacuacaggggcccgc

SEQ ID NO: 1275167 - RNA, 18 nt, Human
gauuacaggugugagcca

SEQ ID NO: 1275168 - RNA, 18 nt, Human
gauuacaggugugagcca

SEQ ID NO: 1275169 - RNA, 22 nt, Human
gauuacaggugugagccagggc

SEQ ID NO: 1275170 - RNA, 18 nt, Human
gauuacaggugugagcua

SEQ ID NO: 1275171 - RNA, 21 nt, Human
gauuacaggugugagcuaccg

SEQ ID NO: 1275172 - RNA, 24 nt, Human
gauuacaggugugagcuaccgugc

SEQ ID NO: 1275173 - RNA, 22 nt, Human
gauuauaggagugugucaccau

SEQ ID NO: 1275174 - RNA, 21 nt, Human
gcaucagagcucuuggguggc

SEQ ID NO: 1275175 - RNA, 20 nt, Human
gccagccuucccagcuaugu

SEQ ID NO: 1275176 - RNA, 19 nt, Human
gcccaggcuggagugcagu

SEQ ID NO: 1275177 - RNA, 19 nt, Human
gcccaggcuggagugcagu

SEQ ID NO: 1275178 - RNA, 20 nt, Human
gcccaggcuggagugcagug

SEQ ID NO: 1275179 - RNA, 23 nt, Human
gcccaggcuggagugcaguggug

SEQ ID NO: 1275180 - RNA, 22 nt, Human
gccuagcuaauuuuuguauuuu

SEQ ID NO: 1275181 - RNA, 25 nt, Human
gcucugucgcccaggcuggagugca

SEQ ID NO: 1275182 - RNA, 23 nt, Human
gcuggucuggaacuccuaaccuc

SEQ ID NO: 1275183 - RNA, 23 nt, Human
gcugguuucaaacuccugaccuc

SEQ ID NO: 1275184 - RNA, 23 nt, Human
gcuuaggguggggcggccagccu

SEQ ID NO: 1275185 - RNA, 23 nt, Human
ggagucuugcucugucgcccagg

SEQ ID NO: 1275186 - RNA, 24 nt, Human
ggcugguuucaaacuccugaccuc

SEQ ID NO: 1275187 - RNA, 22 nt, Human
gggguuucaccauguuggccag

SEQ ID NO: 1275188 - RNA, 22 nt, Human
gggguuucaccauguuggccag

SEQ ID NO: 1275189 - RNA, 18 nt, Human
ggguuucaccauguuggc

SEQ ID NO: 1275190 - RNA, 22 nt, Human
ggguuucaccauguuggccagg

SEQ ID NO: 1275191 - RNA, 23 nt, Human
guagagaugggguuucaccaugu

SEQ ID NO: 1275192 - RNA, 18 nt, Human
guagcugggauuacaggc

SEQ ID NO: 1275193 - RNA, 24 nt, Human
gucuugcucugucgcccaggcugg

SEQ ID NO: 1275194 - RNA, 24 nt, Human
gugauccacccacaucggccuccc

SEQ ID NO: 1275195 - RNA, 24 nt, Human
gugauccaccugccucggccuccc

SEQ ID NO: 1275196 - RNA, 24 nt, Human
gugauccgcccaccucgcccuccc

SEQ ID NO: 1275197 - RNA, 21 nt, Human
gugcucagcucacaaguguuc

SEQ ID NO: 1275198 - RNA, 24 nt, Human
guuuuuuuguauuuuuaguagaga

SEQ ID NO: 1275199 - RNA, 24 nt, Human
uaaaacacaggcagaguagauuua

SEQ ID NO: 1275200 - RNA, 19 nt, Human
uaaacaaacaccugaucaa

SEQ ID NO: 1275201 - RNA, 23 nt, Human
uaaacaaacaccugaucaaacca

SEQ ID NO: 1275202 - RNA, 18 nt, Human
uaacaaagagcagccugu

SEQ ID NO: 1275203 - RNA, 20 nt, Human
uaacagggacuccaucauug

SEQ ID NO: 1275204 - RNA, 23 nt, Human
uaagaagaaauuacuuagguaga

SEQ ID NO: 1275205 - RNA, 24 nt, Human
uaagguuuguuuuuuuuaauuaaa

SEQ ID NO: 1275206 - RNA, 22 nt, Human
uaauaagacuugaaaguugaaa

SEQ ID NO: 1275207 - RNA, 18 nt, Human
uaauuugccauccggcug

SEQ ID NO: 1275208 - RNA, 22 nt, Human
uaauuuuuguauuuuuaguaga

SEQ ID NO: 1275209 - RNA, 22 nt, Human
uacaccagagcaaauuaaagug

SEQ ID NO: 1275210 - RNA, 23 nt, Human
uacaggggcccgccaccacgccc

SEQ ID NO: 1275211 - RNA, 23 nt, Human
uacaggugugagccagggcgccu

SEQ ID NO: 1275212 - RNA, 19 nt, Human
uaccccagacaacuggcug

SEQ ID NO: 1275213 - RNA, 24 nt, Human
uacucuuguugcccaggcuggagu

SEQ ID NO: 1275214 - RNA, 21 nt, Human
uagaaaacaaacagaaauugc

SEQ ID NO: 1275215 - RNA, 22 nt, Human
uagaaaugggguuucaccaugu

SEQ ID NO: 1275216 - RNA, 20 nt, Human
uagaaugaugaaugcuuucc

SEQ ID NO: 1275217 - RNA, 22 nt, Human
uagagaugggguuucaccaugu

SEQ ID NO: 1275218 - RNA, 21 nt, Human
uagcccagaaaccccagguuc

SEQ ID NO: 1275219 - RNA, 20 nt, Human
uagccuccugaguagcuggg

SEQ ID NO: 1275220 - RNA, 22 nt, Human
uaggauuauaggagugugucac

SEQ ID NO: 1275221 - RNA, 24 nt, Human
uaggauuauaggagugugucacca

SEQ ID NO: 1275222 - RNA, 24 nt, Human
uaguagaaaugggguuucaccaug

SEQ ID NO: 1275223 - RNA, 26 nt, Human
uaguagaaaugggguuucaccauguu

SEQ ID NO: 1275224 - RNA, 21 nt, Human
uaguagagacgagguuucacc

SEQ ID NO: 1275225 - RNA, 24 nt, Human
uaguagagacgagguuucaccgug

SEQ ID NO: 1275226 - RNA, 26 nt, Human
uaguagagacgagguuucaccguguu

SEQ ID NO: 1275227 - RNA, 24 nt, Human
uaguagagaugggguuucaccaug

SEQ ID NO: 1275228 - RNA, 25 nt, Human
uaguagagaugggguuucaccaugu

SEQ ID NO: 1275229 - RNA, 24 nt, Human
uauguaaacaaacaccugaucaaa

SEQ ID NO: 1275230 - RNA, 19 nt, Human
uauguauguguguguguau

SEQ ID NO: 1275231 - RNA, 18 nt, Human
uauugcccuucgaagcau

SEQ ID NO: 1275232 - RNA, 24 nt, Human
ucaccguguuagccaggauggucu

SEQ ID NO: 1275233 - RNA, 18 nt, Human
ucacugcaaccucugccu

SEQ ID NO: 1275234 - RNA, 19 nt, Human
ucacugcaaccucugccuc

SEQ ID NO: 1275235 - RNA, 23 nt, Human
ucacugcaaccucugccucccag

SEQ ID NO: 1275236 - RNA, 24 nt, Human
ucacugcaaccucugccucccaga

SEQ ID NO: 1275237 - RNA, 18 nt, Human
ucacugcaagcuccgccu

SEQ ID NO: 1275238 - RNA, 19 nt, Human
ucacugcaagcuccgccuc

SEQ ID NO: 1275239 - RNA, 19 nt, Human
ucacugcaagcuccgccuc

SEQ ID NO: 1275240 - RNA, 24 nt, Human
ucacugcaagcuccgccuccccgg

SEQ ID NO: 1275241 - RNA, 25 nt, Human
ucacuuugugaaucaguccuucaca

SEQ ID NO: 1275242 - RNA, 20 nt, Human
ucagccucccaaguagcugg

SEQ ID NO: 1275243 - RNA, 27 nt, Human
ucagcucacugcaaccucugccuccca

SEQ ID NO: 1275244 - RNA, 21 nt, Human
ucaggugauccaccugccucg

SEQ ID NO: 1275245 - RNA, 18 nt, Human
ucaguugguaaccgggaa

SEQ ID NO: 1275246 - RNA, 20 nt, Human
uccaagcuuuguuguuccau

SEQ ID NO: 1275247 - RNA, 18 nt, Human
ucccaaagugcuaggauu

SEQ ID NO: 1275248 - RNA, 23 nt, Human
ucccaaagugcugggauuacagg

SEQ ID NO: 1275249 - RNA, 24 nt, Human
ucccaaguagcugggauuacaggc

SEQ ID NO: 1275250 - RNA, 23 nt, Human
ucccagagugcugggauuacagg

SEQ ID NO: 1275251 - RNA, 21 nt, Human
ucccagauucaagcaauucuc

SEQ ID NO: 1275252 - RNA, 24 nt, Human
ucccagauucaagcaauucuccug

SEQ ID NO: 1275253 - RNA, 21 nt, Human
uccccaggugacugcccucug

SEQ ID NO: 1275254 - RNA, 23 nt, Human
uccccaggugacugcccucugac

SEQ ID NO: 1275255 - RNA, 21 nt, Human
uccccgguucacgccauccug

SEQ ID NO: 1275256 - RNA, 25 nt, Human
uccugaguagcugggacuacagggg

SEQ ID NO: 1275257 - RNA, 18 nt, Human
uccuuggaguuuucccca

SEQ ID NO: 1275258 - RNA, 18 nt, Human
uccuugugacacaggagu

SEQ ID NO: 1275259 - RNA, 21 nt, Human
uccuuguggcuuacucccugu

SEQ ID NO: 1275260 - RNA, 24 nt, Human
ucgcccaggcuggagugcaguggu

SEQ ID NO: 1275261 - RNA, 23 nt, Human
ucggaaguccccucucucacuag

SEQ ID NO: 1275262 - RNA, 18 nt, Human
ucggccucccaaagugcu

SEQ ID NO: 1275263 - RNA, 18 nt, Human
ucggccucccaaagugcu

SEQ ID NO: 1275264 - RNA, 19 nt, Human
ucuauccuguaaacugucc

SEQ ID NO: 1275265 - RNA, 26 nt, Human
ucuccugccucagccucccaaguagc

SEQ ID NO: 1275266 - RNA, 21 nt, Human
ucucggaaguccccucucuca

SEQ ID NO: 1275267 - RNA, 20 nt, Human
ucugaacauaaauugugaag

SEQ ID NO: 1275268 - RNA, 24 nt, Human
ucugucgcccaggcuggagugcag

SEQ ID NO: 1275269 - RNA, 24 nt, Human
ucuuacucuuguugcccaggcugg

SEQ ID NO: 1275270 - RNA, 25 nt, Human
ucuuacucuuguugcccaggcugga

SEQ ID NO: 1275271 - RNA, 22 nt, Human
ucuucaucaucacuugcugcuu

SEQ ID NO: 1275272 - RNA, 23 nt, Human
ucuugcucugucgcccaggcugg

SEQ ID NO: 1275273 - RNA, 24 nt, Human
ucuugcucugucgcccaggcugga

SEQ ID NO: 1275274 - RNA, 22 nt, Human
ucuuguugcccaggcuggagug

SEQ ID NO: 1275275 - RNA, 18 nt, Human
ucuuuggucucgaacccu

SEQ ID NO: 1275276 - RNA, 18 nt, Human
ugaaauaugcccuggucu

SEQ ID NO: 1275277 - RNA, 24 nt, Human
ugaccucaggugauccaccugccu

SEQ ID NO: 1275278 - RNA, 18 nt, Human
ugagauaaggacugaaau

SEQ ID NO: 1275279 - RNA, 22 nt, Human
ugagauggagucuugcucuguc

SEQ ID NO: 1275280 - RNA, 19 nt, Human
ugaggcuuggaaagauagu

SEQ ID NO: 1275281 - RNA, 24 nt, Human
ugauccgcccaccucgcccuccca

SEQ ID NO: 1275282 - RNA, 22 nt, Human
ugcagcaauagauaacaaacac

SEQ ID NO: 1275283 - RNA, 22 nt, Human
ugcaguggugcgaucucagcuc

SEQ ID NO: 1275284 - RNA, 22 nt, Human
ugcaguggugcggucuuggcuc

SEQ ID NO: 1275285 - RNA, 18 nt, Human
ugcccaggcuggagugca

SEQ ID NO: 1275286 - RNA, 21 nt, Human
ugcccaggcuggagugcagug

SEQ ID NO: 1275287 - RNA, 24 nt, Human
ugcccaggcuggagugcaguggug

SEQ ID NO: 1275288 - RNA, 24 nt, Human
ugccucagccucccaaguagcugg

SEQ ID NO: 1275289 - RNA, 21 nt, Human
ugccucggccucccaaagugc

SEQ ID NO: 1275290 - RNA, 24 nt, Human
ugccucggccucccaaagugcuag

SEQ ID NO: 1275291 - RNA, 19 nt, Human
ugccuucgcuuugugaucu

SEQ ID NO: 1275292 - RNA, 24 nt, Human
ugcucugucgcccaggcuggagug

SEQ ID NO: 1275293 - RNA, 20 nt, Human
ugcugggauuacagguguga

SEQ ID NO: 1275294 - RNA, 24 nt, Human
ugcugggauuacaggugugagcca

SEQ ID NO: 1275295 - RNA, 22 nt, Human
uggaaaaucuguuguuuagugu

SEQ ID NO: 1275296 - RNA, 23 nt, Human
uggagucuugcucugucgcccag

SEQ ID NO: 1275297 - RNA, 23 nt, Human
uggagugcaguggugcgaucuca

SEQ ID NO: 1275298 - RNA, 24 nt, Human
uggagugcaguggugcgaucucag

SEQ ID NO: 1275299 - RNA, 20 nt, Human
uggagugcaguggugcgguc

SEQ ID NO: 1275300 - RNA, 23 nt, Human
uggagugcaguggugcggucuug

SEQ ID NO: 1275301 - RNA, 24 nt, Human
uggagugcaguggugcggucuugg

SEQ ID NO: 1275302 - RNA, 24 nt, Human
uggcaugggauggcaaaccccggg

SEQ ID NO: 1275303 - RNA, 24 nt, Human
uggccaggcuggucuggaacuccu

SEQ ID NO: 1275304 - RNA, 24 nt, Human
uggccaggcugguuucaaacuccu

SEQ ID NO: 1275305 - RNA, 21 nt, Human
uggcccagguuuaguuuauac

SEQ ID NO: 1275306 - RNA, 20 nt, Human
uggccuuuuuuuuuuuuuuu

SEQ ID NO: 1275307 - RNA, 18 nt, Human
uggcucacugcaagcucc

SEQ ID NO: 1275308 - RNA, 19 nt, Human
uggcugcucugggaguguc

SEQ ID NO: 1275309 - RNA, 21 nt, Human
ugggacuacaggggcccgcca

SEQ ID NO: 1275310 - RNA, 22 nt, Human
ugggacuacaggggcccgccac

SEQ ID NO: 1275311 - RNA, 24 nt, Human
ugggacuacaggggcccgccacca

SEQ ID NO: 1275312 - RNA, 19 nt, Human
ugggauuacaggccucugc

SEQ ID NO: 1275313 - RNA, 21 nt, Human
ugggauuacaggccucugcca

SEQ ID NO: 1275314 - RNA, 22 nt, Human
ugggauuacaggccucugccac

SEQ ID NO: 1275315 - RNA, 24 nt, Human
ugggauuacaggccucugccacca

SEQ ID NO: 1275316 - RNA, 18 nt, Human
ugggauuacaggugugag

SEQ ID NO: 1275317 - RNA, 18 nt, Human
ugggauuacaggugugag

SEQ ID NO: 1275318 - RNA, 19 nt, Human
ugggauuacaggugugagc

SEQ ID NO: 1275319 - RNA, 20 nt, Human
ugggauuacaggugugagcc

SEQ ID NO: 1275320 - RNA, 21 nt, Human
ugggauuacaggugugagcca

SEQ ID NO: 1275321 - RNA, 21 nt, Human
ugggauuacaggugugagcca

SEQ ID NO: 1275322 - RNA, 22 nt, Human
ugggauuacaggugugagccag

SEQ ID NO: 1275323 - RNA, 23 nt, Human
ugggauuacaggugugagccagg

SEQ ID NO: 1275324 - RNA, 27 nt, Human
ugggauuacaggugugagccagggcgc

SEQ ID NO: 1275325 - RNA, 21 nt, Human
ugggauuacaggugugagcua

SEQ ID NO: 1275326 - RNA, 22 nt, Human
ugggauuacaggugugagcuac

SEQ ID NO: 1275327 - RNA, 23 nt, Human
ugggauuacaggugugagcuacc

SEQ ID NO: 1275328 - RNA, 23 nt, Human
ugggauuacaggugugagcuacc

SEQ ID NO: 1275329 - RNA, 24 nt, Human
ugggauuacaggugugagcuaccg

SEQ ID NO: 1275330 - RNA, 24 nt, Human
ugggguuucaccauguuggccagg

SEQ ID NO: 1275331 - RNA, 24 nt, Human
ugggguuucaccauguuggccagg

SEQ ID NO: 1275332 - RNA, 23 nt, Human
uggucuggaacuccuaaccucag

SEQ ID NO: 1275333 - RNA, 24 nt, Human
uggugcgaucucagcucacugcaa

SEQ ID NO: 1275334 - RNA, 21 nt, Human
ugguuuggguggcaaggagag

SEQ ID NO: 1275335 - RNA, 23 nt, Human
uguaaacaaacaccugaucaaac

SEQ ID NO: 1275336 - RNA, 24 nt, Human
uguaaacaaacaccugaucaaacc

SEQ ID NO: 1275337 - RNA, 19 nt, Human
uguauguaugugugugugu

SEQ ID NO: 1275338 - RNA, 20 nt, Human
uguauguguguguguaugug

SEQ ID NO: 1275339 - RNA, 19 nt, Human
uguccuuggaguuuucccc

SEQ ID NO: 1275340 - RNA, 21 nt, Human
ugugggaagucagggacccug

SEQ ID NO: 1275341 - RNA, 19 nt, Human
uguguauguaugugugugu

SEQ ID NO: 1275342 - RNA, 21 nt, Human
uguguauguaugugugugugu

SEQ ID NO: 1275343 - RNA, 22 nt, Human
uguguauguaugugugugugua

SEQ ID NO: 1275344 - RNA, 23 nt, Human
uguguauguauguguguguguaa

SEQ ID NO: 1275345 - RNA, 23 nt, Human
uguguauguauguguguguguau

SEQ ID NO: 1275346 - RNA, 19 nt, Human
uguguguauguaugugugu

SEQ ID NO: 1275347 - RNA, 19 nt, Human
uguguguauguaugugugu

SEQ ID NO: 1275348 - RNA, 23 nt, Human
uguguguauguaugugugugugu

SEQ ID NO: 1275349 - RNA, 21 nt, Human
uguguguguauguaugugugu

SEQ ID NO: 1275350 - RNA, 22 nt, Human
uguguguguauguaugugugug

SEQ ID NO: 1275351 - RNA, 19 nt, Human
uguguuuguguguguaugu

SEQ ID NO: 1275352 - RNA, 19 nt, Human
uguucguacaccccucccc

SEQ ID NO: 1275353 - RNA, 18 nt, Human
uuaaaacuucaacaauaa

SEQ ID NO: 1275354 - RNA, 18 nt, Human
uuaauacuguguuugugu

SEQ ID NO: 1275355 - RNA, 26 nt, Human
uuaauacuuuuauaauuucuuacacc

SEQ ID NO: 1275356 - RNA, 21 nt, Human
uuacuuagguagacagugagg

SEQ ID NO: 1275357 - RNA, 23 nt, Human
uuagccuccugaguagcugggac

SEQ ID NO: 1275358 - RNA, 18 nt, Human
uuaguagaaaugggguuu

SEQ ID NO: 1275359 - RNA, 22 nt, Human
uuaguagaaaugggguuucacc

SEQ ID NO: 1275360 - RNA, 24 nt, Human
uuaguagaaaugggguuucaccau

SEQ ID NO: 1275361 - RNA, 22 nt, Human
uuaguagagacgagguuucacc

SEQ ID NO: 1275362 - RNA, 24 nt, Human
uuaguagagacgagguuucaccgu

SEQ ID NO: 1275363 - RNA, 18 nt, Human
uuaguagagaugggguuu

SEQ ID NO: 1275364 - RNA, 22 nt, Human
uuaguagagaugggguuucacc

SEQ ID NO: 1275365 - RNA, 24 nt, Human
uuaguagagaugggguuucaccau

SEQ ID NO: 1275366 - RNA, 21 nt, Human
uucaagcaauucuccugccuc

SEQ ID NO: 1275367 - RNA, 24 nt, Human
uucaagcaauucuccugccucagc

SEQ ID NO: 1275368 - RNA, 24 nt, Human
uucauggacauuuagcaguucccc

SEQ ID NO: 1275369 - RNA, 23 nt, Human
uucauggauauuuaucacuuccc

SEQ ID NO: 1275370 - RNA, 21 nt, Human
uuccuuggagacucuugaugg

SEQ ID NO: 1275371 - RNA, 24 nt, Human
uucggcucaucugccuccagcugc

SEQ ID NO: 1275372 - RNA, 18 nt, Human
uucuuuggucucgaaccc

SEQ ID NO: 1275373 - RNA, 18 nt, Human
uugagauaaggacugaaa

SEQ ID NO: 1275374 - RNA, 21 nt, Human
uugagauggagucuugcucug

SEQ ID NO: 1275375 - RNA, 24 nt, Human
uugcaaguaggaaccuuauauagg

SEQ ID NO: 1275376 - RNA, 22 nt, Human
uugcaaguuuuccuuggagacu

SEQ ID NO: 1275377 - RNA, 24 nt, Human
uugcccaggcuggagugcaguggu

SEQ ID NO: 1275378 - RNA, 24 nt, Human
uugcucugucgcccaggcuggagu

SEQ ID NO: 1275379 - RNA, 21 nt, Human
uuggagacucuugauggccca

SEQ ID NO: 1275380 - RNA, 25 nt, Human
uuguacuguuucucuuuauuucuca

SEQ ID NO: 1275381 - RNA, 23 nt, Human
uuguauuuuuaguagaaaugggg

SEQ ID NO: 1275382 - RNA, 21 nt, Human
uuuaucuacauggaaaaucug

SEQ ID NO: 1275383 - RNA, 24 nt, Human
uuucaccauguuggccaggcuggu

SEQ ID NO: 1275384 - RNA, 24 nt, Human
uuucaccauguuggccaggcuggu

SEQ ID NO: 1275385 - RNA, 19 nt, Human
uuucaccguguuagccagg

SEQ ID NO: 1275386 - RNA, 18 nt, Human
uuuccuuucucuuucuuu

SEQ ID NO: 1275387 - RNA, 23 nt, Human
uuuguguguguauguaugugugu

SEQ ID NO: 1275388 - RNA, 19 nt, Human
uuuuauauuuuuaguagag

SEQ ID NO: 1275389 - RNA, 20 nt, Human
uuuuauauuuuuaguagaga

SEQ ID NO: 1275390 - RNA, 24 nt, Human
uuuuuaguagaaaugggguuucac

SEQ ID NO: 1275391 - RNA, 24 nt, Human
uuuuuaguagagacgagguuucac

SEQ ID NO: 1275392 - RNA, 24 nt, Human
uuuuuaguagagaugggguuucac

SEQ ID NO: 1275393 - RNA, 18 nt, Human
uuuuuguauuuuuaguag

SEQ ID NO: 1275394 - RNA, 21 nt, Human
uuuuuguauuuuuaguagaga

SEQ ID NO: 1275395 - RNA, 21 nt, Human
uuuuuuguauuuuuaguagag

SEQ ID NO: 1275396 - RNA, 24 nt, Human
uuuuuuguauuuuuaguagagacg

SEQ ID NO: 1275397 - RNA, 24 nt, Human
uuuuuuuuuuuugagauggagucu

SEQ ID NO: 1275398 - RNA, 22 nt, Human
uuuuuuuuuuuuuugagaugga

SEQ ID NO: 1275399 - RNA, 23 nt, Human
aaacgaaaaggaaugggaaugag

SEQ ID NO: 1275400 - RNA, 19 nt, Human
aacuagacuucugacgcug

SEQ ID NO: 1275401 - RNA, 20 nt, Human
aaugacaguaacaaacaaga

SEQ ID NO: 1275402 - RNA, 19 nt, Human
acacgcugcacaacugaca

SEQ ID NO: 1275403 - RNA, 25 nt, Human
acagcugccuauaaaacuagacuuc

SEQ ID NO: 1275404 - RNA, 18 nt, Human
aucaacuguguuccaaaa

SEQ ID NO: 1275405 - RNA, 24 nt, Human
caacugacaucacaggacagcugc

SEQ ID NO: 1275406 - RNA, 23 nt, Human
cacucaucuccuucagcauccca

SEQ ID NO: 1275407 - RNA, 19 nt, Human
cagguccaaacaaugaagg

SEQ ID NO: 1275408 - RNA, 22 nt, Human
ccacagaugaagcacauguucc

SEQ ID NO: 1275409 - RNA, 28 nt, Human
cgcugcacaacugacaucacaggacagc

SEQ ID NO: 1275410 - RNA, 19 nt, Human
cugauucuaaacgaaaagg

SEQ ID NO: 1275411 - RNA, 22 nt, Human
uaaaacuagacuucugacgcug

SEQ ID NO: 1275412 - RNA, 18 nt, Human
uaauaaugagguggcaca

SEQ ID NO: 1275413 - RNA, 21 nt, Human
uagauaauaaugagguggcac

SEQ ID NO: 1275414 - RNA, 20 nt, Human
uauauuugaaacucaaggaa

SEQ ID NO: 1275415 - RNA, 18 nt, Human
ugaauauugugaugugac

SEQ ID NO: 1275416 - RNA, 18 nt, Human
ugacaguaacaaacaaga

SEQ ID NO: 1275417 - RNA, 24 nt, Human
ugggaaugacaguaacaaacaaga

SEQ ID NO: 1275418 - RNA, 22 nt, Human
uuuuugaacugccacauucacu

SEQ ID NO: 1275419 - RNA, 21 nt, Human
aaaaauaccccaacuuuagga

SEQ ID NO: 1275420 - RNA, 21 nt, Human
aaacagacaucccuauuuccu

SEQ ID NO: 1275421 - RNA, 22 nt, Human
aaacagcccaaggugaagcuca

SEQ ID NO: 1275422 - RNA, 24 nt, Human
aaagauccucaaaggucuguguua

SEQ ID NO: 1275423 - RNA, 20 nt, Human
aagacuuuuuagaaagauga

SEQ ID NO: 1275424 - RNA, 19 nt, Human
aagcuacagaaaguccuga

SEQ ID NO: 1275425 - RNA, 20 nt, Human
aaguagauaugcucaagaaa

SEQ ID NO: 1275426 - RNA, 20 nt, Human
aaguagcugggauuacaggc

SEQ ID NO: 1275427 - RNA, 26 nt, Human
aaguagcugggauuacaggcgcaugc

SEQ ID NO: 1275428 - RNA, 23 nt, Human
acagaguggcugggccugacccc

SEQ ID NO: 1275429 - RNA, 23 nt, Human
accagacuggagugcaauggcgu

SEQ ID NO: 1275430 - RNA, 25 nt, Human
acuaggagaaagcaugcaaaacagc

SEQ ID NO: 1275431 - RNA, 27 nt, Human
acucugucaaccagacuggagugcaau

SEQ ID NO: 1275432 - RNA, 19 nt, Human
acuggagugcaauggcgug

SEQ ID NO: 1275433 - RNA, 24 nt, Human
acuucaauagaaaguaagcuaaaa

SEQ ID NO: 1275434 - RNA, 25 nt, Human
agaaaaaaauaacacuaaauaagga

SEQ ID NO: 1275435 - RNA, 22 nt, Human
agaagagauggguuuuugccau

SEQ ID NO: 1275436 - RNA, 19 nt, Human
agccacauccagggagcca

SEQ ID NO: 1275437 - RNA, 23 nt, Human
agcuacagaaaguccugacuauc

SEQ ID NO: 1275438 - RNA, 19 nt, Human
agggagccaaggauauagu

SEQ ID NO: 1275439 - RNA, 18 nt, Human
agggcugaugaaagagga

SEQ ID NO: 1275440 - RNA, 18 nt, Human
aggggaagggcugaggcu

SEQ ID NO: 1275441 - RNA, 19 nt, Human
aguagcugggauuacaggc

SEQ ID NO: 1275442 - RNA, 21 nt, Human
agugcaauggcgugaucucag

SEQ ID NO: 1275443 - RNA, 24 nt, Human
agugcaauggcgugaucucagcuc

SEQ ID NO: 1275444 - RNA, 21 nt, Human
auaagacaagguggcuccuuc

SEQ ID NO: 1275445 - RNA, 20 nt, Human
aucccuauuuccuuccuagg

SEQ ID NO: 1275446 - RNA, 20 nt, Human
auggguuuuugccauguugg

SEQ ID NO: 1275447 - RNA, 21 nt, Human
auuacaggcgcaugccaccau

SEQ ID NO: 1275448 - RNA, 23 nt, Human
caacugauauaagaacuaagaaa

SEQ ID NO: 1275449 - RNA, 25 nt, Human
caagaucagaagggacacuaacacc

SEQ ID NO: 1275450 - RNA, 22 nt, Human
cacaacacuaaucacugucccc

SEQ ID NO: 1275451 - RNA, 23 nt, Human
cacaccauguacucuaaaaugag

SEQ ID NO: 1275452 - RNA, 18 nt, Human
caccauguacucuaaaau

SEQ ID NO: 1275453 - RNA, 23 nt, Human
cacucugucaaccagacuggagu

SEQ ID NO: 1275454 - RNA, 18 nt, Human
cacuguugggugauagaa

SEQ ID NO: 1275455 - RNA, 20 nt, Human
cacuuugacagcuucccucu

SEQ ID NO: 1275456 - RNA, 25 nt, Human
cagcauaaauagguauuugugaaug

SEQ ID NO: 1275457 - RNA, 22 nt, Human
cagcucacugcaaccuccuccu

SEQ ID NO: 1275458 - RNA, 23 nt, Human
cagguuccuucacacauaauuuc

SEQ ID NO: 1275459 - RNA, 22 nt, Human
caugcuaaaaugaaugcaucca

SEQ ID NO: 1275460 - RNA, 24 nt, Human
cauguuggccaggcuggucucaaa

SEQ ID NO: 1275461 - RNA, 22 nt, Human
ccacauccagggagccaaggau

SEQ ID NO: 1275462 - RNA, 19 nt, Human
ccagcuuacucuucucucc

SEQ ID NO: 1275463 - RNA, 22 nt, Human
ccagcuuacucuucucucccuc

SEQ ID NO: 1275464 - RNA, 23 nt, Human
ccagcuuacucuucucucccucc

SEQ ID NO: 1275465 - RNA, 19 nt, Human
ccauguuggccaggcuggu

SEQ ID NO: 1275466 - RNA, 22 nt, Human
ccauguuggccaggcuggucuc

SEQ ID NO: 1275467 - RNA, 20 nt, Human
cccaacccaggucuggcuuc

SEQ ID NO: 1275468 - RNA, 18 nt, Human
cccaaggacaggguugca

SEQ ID NO: 1275469 - RNA, 19 nt, Human
cccagggcacaggggucag

SEQ ID NO: 1275470 - RNA, 20 nt, Human
cccagguucaagcaauucuc

SEQ ID NO: 1275471 - RNA, 23 nt, Human
ccccacugcagggugugugccca

SEQ ID NO: 1275472 - RNA, 19 nt, Human
ccgaaguagcugggauuac

SEQ ID NO: 1275473 - RNA, 23 nt, Human
ccgaaguagcugggauuacaggc

SEQ ID NO: 1275474 - RNA, 24 nt, Human
ccgaaguagcugggauuacaggcg

SEQ ID NO: 1275475 - RNA, 22 nt, Human
ccucccagguucaagcaauucu

SEQ ID NO: 1275476 - RNA, 18 nt, Human
ccuccucccagguucaag

SEQ ID NO: 1275477 - RNA, 22 nt, Human
ccugcagcccagugcccagggc

SEQ ID NO: 1275478 - RNA, 25 nt, Human
cuaauuaaagaagacugagaagccc

SEQ ID NO: 1275479 - RNA, 20 nt, Human
cuacuucaauagaaaguaag

SEQ ID NO: 1275480 - RNA, 19 nt, Human
cuagggcccuucacuccuc

SEQ ID NO: 1275481 - RNA, 19 nt, Human
cucaagugauuugcccacc

SEQ ID NO: 1275482 - RNA, 23 nt, Human
cucacugcaaccuccuccuccca

SEQ ID NO: 1275483 - RNA, 24 nt, Human
cucacugcaaccuccuccucccag

SEQ ID NO: 1275484 - RNA, 22 nt, Human
cuccaaccugcagcccagugcc

SEQ ID NO: 1275485 - RNA, 20 nt, Human
cucccagguucaagcaauuc

SEQ ID NO: 1275486 - RNA, 21 nt, Human
cucucuacaggcccaggagag

SEQ ID NO: 1275487 - RNA, 23 nt, Human
cugcaaccuccuccucccagguu

SEQ ID NO: 1275488 - RNA, 24 nt, Human
cugcaaccuccuccucccagguuc

SEQ ID NO: 1275489 - RNA, 24 nt, Human
cuggagugcaauggcgugaucuca

SEQ ID NO: 1275490 - RNA, 19 nt, Human
cugugguccaagagugugg

SEQ ID NO: 1275491 - RNA, 23 nt, Human
cuuacucuucucucccucccaga

SEQ ID NO: 1275492 - RNA, 22 nt, Human
cuucacugugcccccugcugcc

SEQ ID NO: 1275493 - RNA, 20 nt, Human
cuucagcacuucacugugcc

SEQ ID NO: 1275494 - RNA, 19 nt, Human
cuugucuccuuccacuucu

SEQ ID NO: 1275495 - RNA, 21 nt, Human
gaacuuaaagaauauuuggga

SEQ ID NO: 1275496 - RNA, 25 nt, Human
gacccaacccaggucuggcuucugu

SEQ ID NO: 1275497 - RNA, 22 nt, Human
gaccucaagugauuugcccacc

SEQ ID NO: 1275498 - RNA, 20 nt, Human
gaggaagggcgaagaguaaa

SEQ ID NO: 1275499 - RNA, 22 nt, Human
gaguaaaggugccaggggaagg

SEQ ID NO: 1275500 - RNA, 19 nt, Human
gaguauguguuauccccac

SEQ ID NO: 1275501 - RNA, 20 nt, Human
gauagaguggcaggccagaa

SEQ ID NO: 1275502 - RNA, 22 nt, Human
gaucagaagggacacuaacacc

SEQ ID NO: 1275503 - RNA, 18 nt, Human
gauuacaggcgcaugcca

SEQ ID NO: 1275504 - RNA, 24 nt, Human
gauuacaggcgcaugccaccaugc

SEQ ID NO: 1275505 - RNA, 22 nt, Human
gcaaccuccuccucccagguuc

SEQ ID NO: 1275506 - RNA, 20 nt, Human
gccagguauuagaagguucc

SEQ ID NO: 1275507 - RNA, 20 nt, Human
gccauguuggccaggcuggu

SEQ ID NO: 1275508 - RNA, 22 nt, Human
gcucacugcaaccuccuccucc

SEQ ID NO: 1275509 - RNA, 22 nt, Human
gcuuacucuucucucccuccca

SEQ ID NO: 1275510 - RNA, 24 nt, Human
ggagacagagguuuacaaaaggaa

SEQ ID NO: 1275511 - RNA, 23 nt, Human
ggcuugucuccuuccacuucuuu

SEQ ID NO: 1275512 - RNA, 22 nt, Human
ggguuuuugccauguuggccag

SEQ ID NO: 1275513 - RNA, 21 nt, Human
gucauucaggaguagauuaau

SEQ ID NO: 1275514 - RNA, 22 nt, Human
uaaagcacuaggagaaagcaug

SEQ ID NO: 1275515 - RNA, 20 nt, Human
uaauuuuuauauuuuuuaga

SEQ ID NO: 1275516 - RNA, 24 nt, Human
uagaagagauggguuuuugccaug

SEQ ID NO: 1275517 - RNA, 18 nt, Human
uagaagaugugggaaucc

SEQ ID NO: 1275518 - RNA, 19 nt, Human
uagggcccuucacuccucc

SEQ ID NO: 1275519 - RNA, 23 nt, Human
uaucacuggaacucaguuaaaau

SEQ ID NO: 1275520 - RNA, 20 nt, Human
uaugguuuugagagaucuuc

SEQ ID NO: 1275521 - RNA, 22 nt, Human
uaugguuuugagagaucuucuu

SEQ ID NO: 1275522 - RNA, 22 nt, Human
ucaagaaagcuaucccaaggac

SEQ ID NO: 1275523 - RNA, 18 nt, Human
ucacugcaaccuccuccc

SEQ ID NO: 1275524 - RNA, 24 nt, Human
ucacugcaaccuccuccucccagg

SEQ ID NO: 1275525 - RNA, 25 nt, Human
ucagcucacugcaaccuccuccucc

SEQ ID NO: 1275526 - RNA, 20 nt, Human
ucagggcugaugaaagagga

SEQ ID NO: 1275527 - RNA, 19 nt, Human
uccaauauuguccaacuag

SEQ ID NO: 1275528 - RNA, 20 nt, Human
uccaccaugccaggaggaag

SEQ ID NO: 1275529 - RNA, 21 nt, Human
ucccagguucaagcaauucuc

SEQ ID NO: 1275530 - RNA, 24 nt, Human
ucccagguucaagcaauucucgug

SEQ ID NO: 1275531 - RNA, 24 nt, Human
uccgaaguagcugggauuacaggc

SEQ ID NO: 1275532 - RNA, 25 nt, Human
ucuacaggcccaggagagaacagcu

SEQ ID NO: 1275533 - RNA, 24 nt, Human
ucucacucugucaaccagacugga

SEQ ID NO: 1275534 - RNA, 18 nt, Human
ucucagggcugaugaaag

SEQ ID NO: 1275535 - RNA, 21 nt, Human
ucuguggauuuugauuaucua

SEQ ID NO: 1275536 - RNA, 23 nt, Human
ugaagcucacuuggcagcugaga

SEQ ID NO: 1275537 - RNA, 25 nt, Human
ugaaggauacaaauggagccgaaaa

SEQ ID NO: 1275538 - RNA, 18 nt, Human
ugaccucaagugauuugc

SEQ ID NO: 1275539 - RNA, 22 nt, Human
ugaccucaagugauuugcccac

SEQ ID NO: 1275540 - RNA, 20 nt, Human
ugacucaaccuccgaaguag

SEQ ID NO: 1275541 - RNA, 24 nt, Human
ugacucaaccuccgaaguagcugg

SEQ ID NO: 1275542 - RNA, 22 nt, Human
ugagaaaaaaauaacacuaaau

SEQ ID NO: 1275543 - RNA, 23 nt, Human
ugagucucacucugucaaccaga

SEQ ID NO: 1275544 - RNA, 21 nt, Human
ugauagaguggcaggccagaa

SEQ ID NO: 1275545 - RNA, 18 nt, Human
ugccaggaggaagggcga

SEQ ID NO: 1275546 - RNA, 19 nt, Human
ugccaggggaagggcugag

SEQ ID NO: 1275547 - RNA, 24 nt, Human
ugccauguuggccaggcuggucuc

SEQ ID NO: 1275548 - RNA, 27 nt, Human
ugccauguuggccaggcuggucucaaa

SEQ ID NO: 1275549 - RNA, 19 nt, Human
ugcccagcacacuuugaca

SEQ ID NO: 1275550 - RNA, 24 nt, Human
ugcuaaaaugaaugcauccaagga

SEQ ID NO: 1275551 - RNA, 22 nt, Human
ugcuacugcagccuaaugacuu

SEQ ID NO: 1275552 - RNA, 19 nt, Human
uggagugcaauggcgugau

SEQ ID NO: 1275553 - RNA, 24 nt, Human
uggagugcaauggcgugaucucag

SEQ ID NO: 1275554 - RNA, 19 nt, Human
uggcagcugagagugaguu

SEQ ID NO: 1275555 - RNA, 22 nt, Human
uggccaggcuggucucaaacuc

SEQ ID NO: 1275556 - RNA, 24 nt, Human
uggcgugaucucagcucacugcaa

SEQ ID NO: 1275557 - RNA, 21 nt, Human
ugggauuacaggcgcaugcca

SEQ ID NO: 1275558 - RNA, 22 nt, Human
ugggauuacaggcgcaugccac

SEQ ID NO: 1275559 - RNA, 24 nt, Human
ugggauuacaggcgcaugccacca

SEQ ID NO: 1275560 - RNA, 25 nt, Human
ugggauuacaggcgcaugccaccau

SEQ ID NO: 1275561 - RNA, 20 nt, Human
uggguuuuugccauguuggc

SEQ ID NO: 1275562 - RNA, 24 nt, Human
uggguuuuugccauguuggccagg

SEQ ID NO: 1275563 - RNA, 23 nt, Human
uguaaauacgggguaagguacau

SEQ ID NO: 1275564 - RNA, 18 nt, Human
ugucauaucacuggaacu

SEQ ID NO: 1275565 - RNA, 18 nt, Human
uuacucuucucucccucc

SEQ ID NO: 1275566 - RNA, 24 nt, Human
uuagaagagauggguuuuugccau

SEQ ID NO: 1275567 - RNA, 18 nt, Human
uuaggagguuaaggucac

SEQ ID NO: 1275568 - RNA, 18 nt, Human
uucaauagaaaguaagcu

SEQ ID NO: 1275569 - RNA, 27 nt, Human
uucagacuuaagacuuuuuagaaagau

SEQ ID NO: 1275570 - RNA, 18 nt, Human
uucccaguaacggcgcuu

SEQ ID NO: 1275571 - RNA, 24 nt, Human
uuccguuuucucuauaaauaguuc

SEQ ID NO: 1275572 - RNA, 19 nt, Human
uucgccaggacccaaccca

SEQ ID NO: 1275573 - RNA, 24 nt, Human
uugccauguuggccaggcuggucu

SEQ ID NO: 1275574 - RNA, 18 nt, Human
uuuaagaaauagaagcca

SEQ ID NO: 1275575 - RNA, 23 nt, Human
uuuugccauguuggccaggcugg

SEQ ID NO: 1275576 - RNA, 23 nt, Human
uuuuugccauguuggccaggcug

SEQ ID NO: 1275577 - RNA, 24 nt, Human
uuuuuuucuaacuucugugagauu

SEQ ID NO: 1275578 - RNA, 21 nt, Human
agccaggccccgugagaagcu

SEQ ID NO: 1275579 - RNA, 20 nt, Human
auguggaggccgagcagcug

SEQ ID NO: 1275580 - RNA, 21 nt, Human
caggccccgugagaagcuaug

SEQ ID NO: 1275581 - RNA, 24 nt, Human
cguuccuguaggaagaacuagaga

SEQ ID NO: 1275582 - RNA, 24 nt, Human
uaaaagcagaaauaaggaaaaugc

SEQ ID NO: 1275583 - RNA, 27 nt, Human
uaagagaacugagacauguggaggccg

SEQ ID NO: 1275584 - RNA, 19 nt, Human
uccgagaggaccugauggu

SEQ ID NO: 1275585 - RNA, 19 nt, Human
ugagcgaguuggugggguc

SEQ ID NO: 1275586 - RNA, 20 nt, Human
ugagcgaguuggugggguca

SEQ ID NO: 1275587 - RNA, 22 nt, Human
uguaggaagaacuagagauucc

SEQ ID NO: 1275588 - RNA, 23 nt, Human
ugucaggcgugagcgaguuggug

SEQ ID NO: 1275589 - RNA, 18 nt, Human
uacaagccuugagagaca

SEQ ID NO: 1275590 - RNA, 20 nt, Human
acagccaagucucccuugcc

SEQ ID NO: 1275591 - RNA, 21 nt, Human
caacugguccauccaccuccc

SEQ ID NO: 1275592 - RNA, 22 nt, Human
cacagccaagucucccuugccc

SEQ ID NO: 1275593 - RNA, 23 nt, Human
cacagccaagucucccuugcccc

SEQ ID NO: 1275594 - RNA, 22 nt, Human
caccacagccuaccugccccuc

SEQ ID NO: 1275595 - RNA, 21 nt, Human
caccagcccaccccaggggac

SEQ ID NO: 1275596 - RNA, 23 nt, Human
caccagcccaccccaggggacac

SEQ ID NO: 1275597 - RNA, 18 nt, Human
cagccuaccugccccucc

SEQ ID NO: 1275598 - RNA, 25 nt, Human
caguggaccuugccuccaucucacc

SEQ ID NO: 1275599 - RNA, 20 nt, Human
caugccacucugaagcccac

SEQ ID NO: 1275600 - RNA, 19 nt, Human
ccaugccacucugaagccc

SEQ ID NO: 1275601 - RNA, 19 nt, Human
ccccaggggacaccaacug

SEQ ID NO: 1275602 - RNA, 23 nt, Human
cucacagccaagucucccuugcc

SEQ ID NO: 1275603 - RNA, 21 nt, Human
cuccugccucacagccaaguc

SEQ ID NO: 1275604 - RNA, 18 nt, Human
cuggcaccacagccuacc

SEQ ID NO: 1275605 - RNA, 24 nt, Human
gacaccaacugguccauccaccuc

SEQ ID NO: 1275606 - RNA, 18 nt, Human
gaccuugccuccaucuca

SEQ ID NO: 1275607 - RNA, 21 nt, Human
guccauguugagccuuccuca

SEQ ID NO: 1275608 - RNA, 22 nt, Human
guugagccuuccucaaaggcag

SEQ ID NO: 1275609 - RNA, 18 nt, Human
ucugaagcccacaccauu

SEQ ID NO: 1275610 - RNA, 19 nt, Human
ucuuccccagagccccaca

SEQ ID NO: 1275611 - RNA, 19 nt, Human
ugccaugccacucugaagc

SEQ ID NO: 1275612 - RNA, 19 nt, Human
ugccccuccugccucacag

SEQ ID NO: 1275613 - RNA, 21 nt, Human
uguccauguugagccuuccuc

SEQ ID NO: 1275614 - RNA, 22 nt, Human
aaacaacaagacgcuugacuug

SEQ ID NO: 1275615 - RNA, 18 nt, Human
aagcagcaccaggagcgg

SEQ ID NO: 1275616 - RNA, 25 nt, Human
aagcagcaccaggagcggcagaaga

SEQ ID NO: 1275617 - RNA, 25 nt, Human
agcaccaggagcggcagaagaagga

SEQ ID NO: 1275618 - RNA, 21 nt, Human
aggcggcagcaguggacaagg

SEQ ID NO: 1275619 - RNA, 24 nt, Human
caaacgagcacacaagcagcacca

SEQ ID NO: 1275620 - RNA, 24 nt, Human
caagcagcaccaggagcggcagaa

SEQ ID NO: 1275621 - RNA, 20 nt, Human
cacaagcagcaccaggagcg

SEQ ID NO: 1275622 - RNA, 24 nt, Human
cacaagcagcaccaggagcggcag

SEQ ID NO: 1275623 - RNA, 18 nt, Human
caggagcggcagaagaag

SEQ ID NO: 1275624 - RNA, 23 nt, Human
caggagcggcagaagaaggaggc

SEQ ID NO: 1275625 - RNA, 18 nt, Human
caguaaaggaauggggaa

SEQ ID NO: 1275626 - RNA, 18 nt, Human
caugccacuaauggagaa

SEQ ID NO: 1275627 - RNA, 20 nt, Human
gagaaaggggguauuuucac

SEQ ID NO: 1275628 - RNA, 19 nt, Human
gagcaugccacuaauggag

SEQ ID NO: 1275629 - RNA, 21 nt, Human
gaggcggcagcaguggacaag

SEQ ID NO: 1275630 - RNA, 21 nt, Human
gaggcggcagcaguggacaag

SEQ ID NO: 1275631 - RNA, 21 nt, Human
gcagaagaaggaggcggcagc

SEQ ID NO: 1275632 - RNA, 18 nt, Human
gcggcagcaguggacaag

SEQ ID NO: 1275633 - RNA, 21 nt, Human
gggaaaacuaucuaggauucu

SEQ ID NO: 1275634 - RNA, 23 nt, Human
gguauuuucacagaaucaguauu

SEQ ID NO: 1275635 - RNA, 19 nt, Human
uaaaauucuccaauugaac

SEQ ID NO: 1275636 - RNA, 19 nt, Human
uaagagcugaaugagcaug

SEQ ID NO: 1275637 - RNA, 21 nt, Human
ucagcugccgcuucacaaaag

SEQ ID NO: 1275638 - RNA, 24 nt, Human
uccucagcugccgcuucacaaaag

SEQ ID NO: 1275639 - RNA, 21 nt, Human
ugcauguaacagcuaaguaca

SEQ ID NO: 1275640 - RNA, 19 nt, Human
uggggaagggggaaaugaa

SEQ ID NO: 1275641 - RNA, 23 nt, Human
uguuguuguuuuuuuguuguugu

SEQ ID NO: 1275642 - RNA, 20 nt, Human
uuguuguuguuguuaaaaca

SEQ ID NO: 1275643 - RNA, 19 nt, Human
uuguuguuuuuuuguuguu

SEQ ID NO: 1275644 - RNA, 23 nt, Human
uuucacagaaucaguauuuuucc

SEQ ID NO: 1275645 - RNA, 22 nt, Human
uuuguuguuguuguuaaaacag

SEQ ID NO: 1275646 - RNA, 23 nt, Human
uuuuguuguuguuguuaaaacag

SEQ ID NO: 1275647 - RNA, 24 nt, Human
uuuuuuuguuguuguuguuaaaac

SEQ ID NO: 1275648 - RNA, 18 nt, Human
aagcagcaccaggagcgg

SEQ ID NO: 1275649 - RNA, 24 nt, Human
caaacgagcacacaagcagcacca

SEQ ID NO: 1275650 - RNA, 20 nt, Human
cacaagcagcaccaggagcg

SEQ ID NO: 1275651 - RNA, 19 nt, Human
ucagcugccgcuucacaaa

SEQ ID NO: 1275652 - RNA, 24 nt, Human
uccucagcugccgcuucacaaaag

SEQ ID NO: 1275653 - RNA, 21 nt, Human
aaacagaaaguaacaccagaa

SEQ ID NO: 1275654 - RNA, 21 nt, Human
aaaugucacugacuccugaaa

SEQ ID NO: 1275655 - RNA, 22 nt, Human
aaguucacagcuacauccucaa

SEQ ID NO: 1275656 - RNA, 22 nt, Human
aauaacuaauauaagagacaga

SEQ ID NO: 1275657 - RNA, 19 nt, Human
aauauaagagacagaagga

SEQ ID NO: 1275658 - RNA, 18 nt, Human
agacagaaggaccagccu

SEQ ID NO: 1275659 - RNA, 18 nt, Human
agcuacauccucaaaugu

SEQ ID NO: 1275660 - RNA, 27 nt, Human
aggaaaaacagaaaguaaccgguaccc

SEQ ID NO: 1275661 - RNA, 23 nt, Human
caaugucuuuggggaaucucaca

SEQ ID NO: 1275662 - RNA, 28 nt, Human
guucacagcuacauccucaaaugucacu

SEQ ID NO: 1275663 - RNA, 21 nt, Human
uaggaaaaacagaaaguaaca

SEQ ID NO: 1275664 - RNA, 26 nt, Human
uaggaaaaacagaaaguaacaccaga

SEQ ID NO: 1275665 - RNA, 21 nt, Human
uauuaggaagugauugauaaa

SEQ ID NO: 1275666 - RNA, 22 nt, Human
aaaaacaauuuguuuugaaaac

SEQ ID NO: 1275667 - RNA, 21 nt, Human
aaaaccuaauaacaaguauca

SEQ ID NO: 1275668 - RNA, 23 nt, Human
aaaauuacaacugagacagugag

SEQ ID NO: 1275669 - RNA, 19 nt, Human
aaacaagaaucuaccauac

SEQ ID NO: 1275670 - RNA, 25 nt, Human
aaacauuuagcacuguuaauggaca

SEQ ID NO: 1275671 - RNA, 19 nt, Human
aaaggacuuuggucuuccc

SEQ ID NO: 1275672 - RNA, 21 nt, Human
aacauuugaaaacaccaucgc

SEQ ID NO: 1275673 - RNA, 25 nt, Human
aaccaauuccaucuugcuucuaacc

SEQ ID NO: 1275674 - RNA, 23 nt, Human
aaccuaauaacaaguaucauuca

SEQ ID NO: 1275675 - RNA, 23 nt, Human
aagagccaaggaagcugugguuu

SEQ ID NO: 1275676 - RNA, 22 nt, Human
aagcacccauaaauaauggcaa

SEQ ID NO: 1275677 - RNA, 21 nt, Human
aauagcagcccuuuccaaaac

SEQ ID NO: 1275678 - RNA, 20 nt, Human
aaucuauaaaguguuuccuu

SEQ ID NO: 1275679 - RNA, 22 nt, Human
aaucuuuucuucucuguguuga

SEQ ID NO: 1275680 - RNA, 23 nt, Human
acugcaauccacuuggggagacu

SEQ ID NO: 1275681 - RNA, 25 nt, Human
agaacaaauucacuacaaauuuuca

SEQ ID NO: 1275682 - RNA, 18 nt, Human
agcacuguuaauggacag

SEQ ID NO: 1275683 - RNA, 23 nt, Human
aggaagcugugguuucgcauuug

SEQ ID NO: 1275684 - RNA, 23 nt, Human
aggcuucaguuuuccaccuccag

SEQ ID NO: 1275685 - RNA, 19 nt, Human
agguagucgccaucucaaa

SEQ ID NO: 1275686 - RNA, 24 nt, Human
aucgcaaaauuacaacugagacag

SEQ ID NO: 1275687 - RNA, 25 nt, Human
auuacaacugagacagugagagauc

SEQ ID NO: 1275688 - RNA, 21 nt, Human
caaaaaacuaaaacuauagca

SEQ ID NO: 1275689 - RNA, 22 nt, Human
caaaaccuaauaacaaguauca

SEQ ID NO: 1275690 - RNA, 23 nt, Human
caacucacugguccccuacccac

SEQ ID NO: 1275691 - RNA, 24 nt, Human
caagaggacagcuucgacucccuc

SEQ ID NO: 1275692 - RNA, 21 nt, Human
caaggcccggcaagccaaagg

SEQ ID NO: 1275693 - RNA, 23 nt, Human
cacacagccggcuuugcaugccc

SEQ ID NO: 1275694 - RNA, 23 nt, Human
cacugcuauagaaaucuauaaag

SEQ ID NO: 1275695 - RNA, 24 nt, Human
cagaaucaaggcccggcaagccaa

SEQ ID NO: 1275696 - RNA, 22 nt, Human
cagagcuuuccuuagacuaaaa

SEQ ID NO: 1275697 - RNA, 19 nt, Human
cagcguguggccacguggu

SEQ ID NO: 1275698 - RNA, 21 nt, Human
cagcuggaggcugcaagauuc

SEQ ID NO: 1275699 - RNA, 21 nt, Human
cauggcgcccagcaggaaugg

SEQ ID NO: 1275700 - RNA, 22 nt, Human
ccaaaacaaacccgcuuccugc

SEQ ID NO: 1275701 - RNA, 24 nt, Human
ccaagauagccauuugguugugcc

SEQ ID NO: 1275702 - RNA, 22 nt, Human
ccagagggcauauucaaaaaca

SEQ ID NO: 1275703 - RNA, 21 nt, Human
ccauaaauaauggcaagaaca

SEQ ID NO: 1275704 - RNA, 19 nt, Human
ccauacagaaagguagucg

SEQ ID NO: 1275705 - RNA, 27 nt, Human
ccauccagaaauuaagccaacacaaga

SEQ ID NO: 1275706 - RNA, 23 nt, Human
ccccuguacucuauggaucagcu

SEQ ID NO: 1275707 - RNA, 22 nt, Human
cccgcgcccggagagucgggac

SEQ ID NO: 1275708 - RNA, 21 nt, Human
cccuagauaacuacuauaggu

SEQ ID NO: 1275709 - RNA, 20 nt, Human
ccuccaaaaaacuaaaacua

SEQ ID NO: 1275710 - RNA, 19 nt, Human
ccucgcacaugaaagcacc

SEQ ID NO: 1275711 - RNA, 19 nt, Human
cgacuaaucaacuuuccca

SEQ ID NO: 1275712 - RNA, 21 nt, Human
cgcaaaauuacaacugagaca

SEQ ID NO: 1275713 - RNA, 18 nt, Human
cgcacaugaaagcaccca

SEQ ID NO: 1275714 - RNA, 24 nt, Human
cgcgccggcagaggcuucagccug

SEQ ID NO: 1275715 - RNA, 21 nt, Human
cuaaaacuauagcaaggcuuc

SEQ ID NO: 1275716 - RNA, 19 nt, Human
cuaaccuccaagcuguccu

SEQ ID NO: 1275717 - RNA, 18 nt, Human
cucaaaaucugagaaagc

SEQ ID NO: 1275718 - RNA, 21 nt, Human
cucaucuggucuuguggcccc

SEQ ID NO: 1275719 - RNA, 21 nt, Human
cuccaaaaaacuaaaacuaua

SEQ ID NO: 1275720 - RNA, 20 nt, Human
cucccucugauuucaucucc

SEQ ID NO: 1275721 - RNA, 19 nt, Human
cuccucaggauaacaucac

SEQ ID NO: 1275722 - RNA, 20 nt, Human
cucgccauaaaaccuuacua

SEQ ID NO: 1275723 - RNA, 24 nt, Human
cuguccuuguucauuccuggucgu

SEQ ID NO: 1275724 - RNA, 19 nt, Human
cugugcguuaucacaucaa

SEQ ID NO: 1275725 - RNA, 20 nt, Human
cuuaaaaacugcaauccacu

SEQ ID NO: 1275726 - RNA, 22 nt, Human
cuucagccuggagcucagggug

SEQ ID NO: 1275727 - RNA, 19 nt, Human
cuuuucuucucuguguuga

SEQ ID NO: 1275728 - RNA, 23 nt, Human
gaucauaacccuccaaaaaacua

SEQ ID NO: 1275729 - RNA, 24 nt, Human
gaucauaacccuccaaaaaacuaa

SEQ ID NO: 1275730 - RNA, 21 nt, Human
gcaaaaagagccaaggaagcu

SEQ ID NO: 1275731 - RNA, 21 nt, Human
gcaagauucuaaaccuccccc

SEQ ID NO: 1275732 - RNA, 20 nt, Human
ggagcucaggguggcgggca

SEQ ID NO: 1275733 - RNA, 27 nt, Human
ggcagaggcuucagccuggagcucagg

SEQ ID NO: 1275734 - RNA, 23 nt, Human
ggcaugauguugaagccccacuu

SEQ ID NO: 1275735 - RNA, 23 nt, Human
ggcuucagccuggagcucagggu

SEQ ID NO: 1275736 - RNA, 23 nt, Human
gguagaugaaucuuuucuucucu

SEQ ID NO: 1275737 - RNA, 23 nt, Human
guacaacagcuguuaccaaaacc

SEQ ID NO: 1275738 - RNA, 23 nt, Human
gugcgcgccggcagaggcuucag

SEQ ID NO: 1275739 - RNA, 23 nt, Human
uaaaaccuuacuauguaacacug

SEQ ID NO: 1275740 - RNA, 23 nt, Human
uaacacugcuauagaaaucuaua

SEQ ID NO: 1275741 - RNA, 22 nt, Human
uaagccaacacaagaggacaac

SEQ ID NO: 1275742 - RNA, 23 nt, Human
uaauaacaaguaucauucaaagc

SEQ ID NO: 1275743 - RNA, 24 nt, Human
uacaacagcuguuaccaaaaccua

SEQ ID NO: 1275744 - RNA, 28 nt, Human
uagcaaggcuucaguuuuccaccuccag

SEQ ID NO: 1275745 - RNA, 23 nt, Human
uagucgccaucucaaaacucuca

SEQ ID NO: 1275746 - RNA, 21 nt, Human
uauuagaggaaaauaacucag

SEQ ID NO: 1275747 - RNA, 30 nt, Human
uauucaaaaacaagaaucuaccauacagag

SEQ ID NO: 1275748 - RNA, 19 nt, Human
ucacuacaaauuuucaaaa

SEQ ID NO: 1275749 - RNA, 21 nt, Human
ucagagcuuuccuuagacuaa

SEQ ID NO: 1275750 - RNA, 23 nt, Human
ucagagcuuuccuuagacuaaaa

SEQ ID NO: 1275751 - RNA, 19 nt, Human
ucaggauaacaucacuauu

SEQ ID NO: 1275752 - RNA, 22 nt, Human
uccgcagaaucaaggcccggca

SEQ ID NO: 1275753 - RNA, 18 nt, Human
ucucaaaaucugagaaag

SEQ ID NO: 1275754 - RNA, 24 nt, Human
ucuuguggcccccauccagaaauu

SEQ ID NO: 1275755 - RNA, 23 nt, Human
ugaaaacaccaucgcaaaauuac

SEQ ID NO: 1275756 - RNA, 21 nt, Human
ugaaacaaagacaauagcagc

SEQ ID NO: 1275757 - RNA, 24 nt, Human
ugaaagcacccauaaauaauggca

SEQ ID NO: 1275758 - RNA, 18 nt, Human
ugaagcuuucucuucuaa

SEQ ID NO: 1275759 - RNA, 23 nt, Human
uggcaagaacaaauucacuacaa

SEQ ID NO: 1275760 - RNA, 25 nt, Human
uggcagcagcguguggccacguggu

SEQ ID NO: 1275761 - RNA, 21 nt, Human
uguggcccccauccagaaauu

SEQ ID NO: 1275762 - RNA, 21 nt, Human
uucuaaaccucccccaauugc

SEQ ID NO: 1275763 - RNA, 23 nt, Human
uucuuucuugcuugaucuucgau

SEQ ID NO: 1275764 - RNA, 21 nt, Human
uugaucuucgauaauacuggg

SEQ ID NO: 1275765 - RNA, 23 nt, Human
uugaucuucgauaauacugggaa

SEQ ID NO: 1275766 - RNA, 19 nt, Human
uuucaaauuuucagagcuu

SEQ ID NO: 1275767 - RNA, 24 nt, Human
aaacaguauucuauggacucccaa

SEQ ID NO: 1275768 - RNA, 20 nt, Human
aacaacaaccacguccuccc

SEQ ID NO: 1275769 - RNA, 19 nt, Human
aaccacguccucccugcuc

SEQ ID NO: 1275770 - RNA, 18 nt, Human
aagccacugggggaaaau

SEQ ID NO: 1275771 - RNA, 20 nt, Human
acccgaagccccuccuucuu

SEQ ID NO: 1275772 - RNA, 20 nt, Human
acucuggugauauguuuugg

SEQ ID NO: 1275773 - RNA, 19 nt, Human
agaguagugauccucccuc

SEQ ID NO: 1275774 - RNA, 24 nt, Human
agggaaaaaguccaauuucuuuca

SEQ ID NO: 1275775 - RNA, 19 nt, Human
agggagccuccaacucagc

SEQ ID NO: 1275776 - RNA, 24 nt, Human
agggcugaaguugucacucuggug

SEQ ID NO: 1275777 - RNA, 23 nt, Human
aggggccucagaggacccaaacg

SEQ ID NO: 1275778 - RNA, 20 nt, Human
agggguaaggccagugggag

SEQ ID NO: 1275779 - RNA, 19 nt, Human
agguccuguggucucuuca

SEQ ID NO: 1275780 - RNA, 19 nt, Human
augcagcagccacuauacu

SEQ ID NO: 1275781 - RNA, 26 nt, Human
caaaggagagagaauagaggcaggga

SEQ ID NO: 1275782 - RNA, 24 nt, Human
caaauccuccagaacaacaaccac

SEQ ID NO: 1275783 - RNA, 22 nt, Human
caauggcuccuguccaaggccu

SEQ ID NO: 1275784 - RNA, 22 nt, Human
caaugugccuucucugauguuc

SEQ ID NO: 1275785 - RNA, 19 nt, Human
cacaauggcuccuguccaa

SEQ ID NO: 1275786 - RNA, 19 nt, Human
cacagugggcuacggugac

SEQ ID NO: 1275787 - RNA, 18 nt, Human
cacuauacuggcacugga

SEQ ID NO: 1275788 - RNA, 23 nt, Human
cacugcugacuucaaaacucuua

SEQ ID NO: 1275789 - RNA, 21 nt, Human
cagaacaacaaccacguccuc

SEQ ID NO: 1275790 - RNA, 19 nt, Human
cagagcucccggagccgac

SEQ ID NO: 1275791 - RNA, 19 nt, Human
cagauucaggggagccagg

SEQ ID NO: 1275792 - RNA, 21 nt, Human
cagauucaggggagccaggga

SEQ ID NO: 1275793 - RNA, 20 nt, Human
cagucaugaagcucucuauu

SEQ ID NO: 1275794 - RNA, 21 nt, Human
caucaucaguauuaaagggaa

SEQ ID NO: 1275795 - RNA, 21 nt, Human
ccaaggccuuuacuguuuccu

SEQ ID NO: 1275796 - RNA, 21 nt, Human
ccaaugcuguugccaucccca

SEQ ID NO: 1275797 - RNA, 19 nt, Human
ccagcuucagacuguucuc

SEQ ID NO: 1275798 - RNA, 26 nt, Human
cccgaagccccuccuucuucagauuc

SEQ ID NO: 1275799 - RNA, 19 nt, Human
ccuccagaacaacaaccac

SEQ ID NO: 1275800 - RNA, 19 nt, Human
ccugcacccgggccuggag

SEQ ID NO: 1275801 - RNA, 20 nt, Human
ccuguggucucuucauaacg

SEQ ID NO: 1275802 - RNA, 22 nt, Human
cuacggugacuuuuccuaaagu

SEQ ID NO: 1275803 - RNA, 23 nt, Human
cuccaacucagcccccaagaauu

SEQ ID NO: 1275804 - RNA, 22 nt, Human
cugaaacagcgucuuagcucau

SEQ ID NO: 1275805 - RNA, 23 nt, Human
cugcuccagcaccagcagcucca

SEQ ID NO: 1275806 - RNA, 24 nt, Human
cuguagcacuguugacagagcucc

SEQ ID NO: 1275807 - RNA, 18 nt, Human
gaacaacaaccacguccu

SEQ ID NO: 1275808 - RNA, 20 nt, Human
gaaggaagggguaaggccag

SEQ ID NO: 1275809 - RNA, 20 nt, Human
gacuguaucuucagagacac

SEQ ID NO: 1275810 - RNA, 20 nt, Human
gagccgacuuagugcuucuc

SEQ ID NO: 1275811 - RNA, 21 nt, Human
gagccuccaacucagccccca

SEQ ID NO: 1275812 - RNA, 25 nt, Human
gauucacugcugacuucaaaacucu

SEQ ID NO: 1275813 - RNA, 22 nt, Human
gcaaaggagagagaauagaggc

SEQ ID NO: 1275814 - RNA, 26 nt, Human
gcaaaggagagagaauagaggcaggg

SEQ ID NO: 1275815 - RNA, 27 nt, Human
gcaaaggagagagaauagaggcaggga

SEQ ID NO: 1275816 - RNA, 22 nt, Human
gcugaaguugucacucugguga

SEQ ID NO: 1275817 - RNA, 21 nt, Human
guagaguagugauccucccuc

SEQ ID NO: 1275818 - RNA, 20 nt, Human
uaacuuccgaaguauuccuc

SEQ ID NO: 1275819 - RNA, 23 nt, Human
uacaugaagcuaacccugaaggc

SEQ ID NO: 1275820 - RNA, 18 nt, Human
uagaguagugauccuccc

SEQ ID NO: 1275821 - RNA, 22 nt, Human
uagcauaucaucuacagugaaa

SEQ ID NO: 1275822 - RNA, 21 nt, Human
uaggagaaagcugcuauagca

SEQ ID NO: 1275823 - RNA, 30 nt, Human
uagugauccucccucacuacccgaagcccu

SEQ ID NO: 1275824 - RNA, 23 nt, Human
uaugcagcagccacuauacuggc

SEQ ID NO: 1275825 - RNA, 24 nt, Human
ucaaugugccuucucugauguucu

SEQ ID NO: 1275826 - RNA, 18 nt, Human
ucaggggagccagggaau

SEQ ID NO: 1275827 - RNA, 19 nt, Human
ucaucagacauuuacugaa

SEQ ID NO: 1275828 - RNA, 22 nt, Human
uccaaggccuuuacuguuuccu

SEQ ID NO: 1275829 - RNA, 19 nt, Human
uccagaacaacaaccacgu

SEQ ID NO: 1275830 - RNA, 26 nt, Human
ucccugcucucugggugaugcuccug

SEQ ID NO: 1275831 - RNA, 23 nt, Human
uccucuccaagcugacuuuauug

SEQ ID NO: 1275832 - RNA, 22 nt, Human
ucugugacauucugcuauucac

SEQ ID NO: 1275833 - RNA, 19 nt, Human
ucuuuggcuggucuggguc

SEQ ID NO: 1275834 - RNA, 23 nt, Human
ugacagagcucccggagccgacu

SEQ ID NO: 1275835 - RNA, 24 nt, Human
ugacagagcucccggagccgacuu

SEQ ID NO: 1275836 - RNA, 19 nt, Human
ugagauguccugcagugaa

SEQ ID NO: 1275837 - RNA, 21 nt, Human
ugagauguccugcagugaaga

SEQ ID NO: 1275838 - RNA, 22 nt, Human
ugagggcugaaguugucacucu

SEQ ID NO: 1275839 - RNA, 19 nt, Human
ugaggugaagccacugggg

SEQ ID NO: 1275840 - RNA, 22 nt, Human
ugccacagugggcuacggugac

SEQ ID NO: 1275841 - RNA, 20 nt, Human
ugcuauagcauauccaaaaa

SEQ ID NO: 1275842 - RNA, 25 nt, Human
uggacgccccuaauuuuaauauucu

SEQ ID NO: 1275843 - RNA, 22 nt, Human
uggucaaggggccucagaggac

SEQ ID NO: 1275844 - RNA, 21 nt, Human
ugucacucuggugauauguuu

SEQ ID NO: 1275845 - RNA, 21 nt, Human
uguccuguuucuccaagaucc

SEQ ID NO: 1275846 - RNA, 21 nt, Human
uguccuguuucuccaagaucc

SEQ ID NO: 1275847 - RNA, 21 nt, Human
uuacaugaagcuaacccugaa

SEQ ID NO: 1275848 - RNA, 22 nt, Human
uuccagaacaagcaacauuuca

SEQ ID NO: 1275849 - RNA, 18 nt, Human
uugcagaggcugagggcu

SEQ ID NO: 1275850 - RNA, 22 nt, Human
uuucuccaagauccagcugcaa

SEQ ID NO: 1275851 - RNA, 20 nt, Human
uuuggagaacuuucuuuggg

SEQ ID NO: 1275852 - RNA, 25 nt, Human
aaaaaaguaaauucuacuuuacaga

SEQ ID NO: 1275853 - RNA, 21 nt, Human
aacccugaaaaaagucagagg

SEQ ID NO: 1275854 - RNA, 19 nt, Human
aagggaacagaaaagaggg

SEQ ID NO: 1275855 - RNA, 19 nt, Human
aauaggaacccugaaaaaa

SEQ ID NO: 1275856 - RNA, 25 nt, Human
acccugaaaaaagucagagguguga

SEQ ID NO: 1275857 - RNA, 22 nt, Human
acgccacaggacaaucgcucac

SEQ ID NO: 1275858 - RNA, 19 nt, Human
agcaaguuucuuuuggguc

SEQ ID NO: 1275859 - RNA, 18 nt, Human
agucaaggcugcagcugu

SEQ ID NO: 1275860 - RNA, 22 nt, Human
aguccucugcuuuaacugucag

SEQ ID NO: 1275861 - RNA, 19 nt, Human
augggcuguaacauuucac

SEQ ID NO: 1275862 - RNA, 21 nt, Human
caaaguucccagaaucagcuc

SEQ ID NO: 1275863 - RNA, 23 nt, Human
caaaguucccagaaucagcucac

SEQ ID NO: 1275864 - RNA, 21 nt, Human
caccaggaccacacauccugg

SEQ ID NO: 1275865 - RNA, 19 nt, Human
cagaaucagcucacagccu

SEQ ID NO: 1275866 - RNA, 22 nt, Human
cagccuggguagcuggcagagc

SEQ ID NO: 1275867 - RNA, 19 nt, Human
caggacaaucgcucaccag

SEQ ID NO: 1275868 - RNA, 19 nt, Human
caggauagucaagaacugc

SEQ ID NO: 1275869 - RNA, 18 nt, Human
cauaacccugggccacaa

SEQ ID NO: 1275870 - RNA, 24 nt, Human
caucaauaggaacccugaaaaaag

SEQ ID NO: 1275871 - RNA, 22 nt, Human
ccacaaacucggucccggacgc

SEQ ID NO: 1275872 - RNA, 22 nt, Human
ccuccucuugcugcugccgcua

SEQ ID NO: 1275873 - RNA, 20 nt, Human
ccugcugaggcugauaugag

SEQ ID NO: 1275874 - RNA, 19 nt, Human
ccuggguagcuggcagagc

SEQ ID NO: 1275875 - RNA, 25 nt, Human
cgccuucauccccgaaauccugcuc

SEQ ID NO: 1275876 - RNA, 22 nt, Human
cuccuggggcccgucuuggcca

SEQ ID NO: 1275877 - RNA, 23 nt, Human
cugcuccagcaccagcaauucca

SEQ ID NO: 1275878 - RNA, 23 nt, Human
cugcuccuaaccaucaauaggaa

SEQ ID NO: 1275879 - RNA, 18 nt, Human
cuguucuccggcugaugc

SEQ ID NO: 1275880 - RNA, 18 nt, Human
cuguucuccggcugaugc

SEQ ID NO: 1275881 - RNA, 22 nt, Human
cuugcucaugaauggccuggaa

SEQ ID NO: 1275882 - RNA, 25 nt, Human
cuuucaaccacucccuuucucucga

SEQ ID NO: 1275883 - RNA, 19 nt, Human
cuuuggugugggucucugg

SEQ ID NO: 1275884 - RNA, 23 nt, Human
cuuuuuuauucccuuugagauuu

SEQ ID NO: 1275885 - RNA, 18 nt, Human
gaccuuccaucugauuca

SEQ ID NO: 1275886 - RNA, 24 nt, Human
gagcuaccucccgguugcuggagu

SEQ ID NO: 1275887 - RNA, 23 nt, Human
gaggacagcauuacgccauucug

SEQ ID NO: 1275888 - RNA, 23 nt, Human
gauucagcaugguggauuauguc

SEQ ID NO: 1275889 - RNA, 18 nt, Human
gcacacauaacccugggc

SEQ ID NO: 1275890 - RNA, 25 nt, Human
ggaguucuuccauaugaaguagccc

SEQ ID NO: 1275891 - RNA, 19 nt, Human
ggcgagaggagaggaaagg

SEQ ID NO: 1275892 - RNA, 25 nt, Human
ggcugaugcucuaacauccgggcuu

SEQ ID NO: 1275893 - RNA, 28 nt, Human
gggaacagaaaagaggguaccgguaccc

SEQ ID NO: 1275894 - RNA, 19 nt, Human
guaaagucuucuuuugcag

SEQ ID NO: 1275895 - RNA, 21 nt, Human
gugaagugcacacauaacccu

SEQ ID NO: 1275896 - RNA, 23 nt, Human
uaacauccgggcuuggagcuccu

SEQ ID NO: 1275897 - RNA, 21 nt, Human
uagcuuuuuaaaggaaauuac

SEQ ID NO: 1275898 - RNA, 22 nt, Human
uaggaacccugaaaaaagucag

SEQ ID NO: 1275899 - RNA, 22 nt, Human
uauuuuuuuaaugacaguggcc

SEQ ID NO: 1275900 - RNA, 19 nt, Human
uccccgaaauccugcuccu

SEQ ID NO: 1275901 - RNA, 20 nt, Human
uccccgaaauccugcuccua

SEQ ID NO: 1275902 - RNA, 24 nt, Human
uccucuugcugcugccgccuucau

SEQ ID NO: 1275903 - RNA, 21 nt, Human
uccugaugcuguucagccugg

SEQ ID NO: 1275904 - RNA, 19 nt, Human
ucgcucaccaggaccacac

SEQ ID NO: 1275905 - RNA, 19 nt, Human
ucucuggccucagccacug

SEQ ID NO: 1275906 - RNA, 24 nt, Human
ugaaaaaagucagaggugugaagu

SEQ ID NO: 1275907 - RNA, 18 nt, Human
ugaagugcacacauaacc

SEQ ID NO: 1275908 - RNA, 19 nt, Human
ugagaugcuccugaugcug

SEQ ID NO: 1275909 - RNA, 22 nt, Human
ugagaugcuccugaugcuguuc

SEQ ID NO: 1275910 - RNA, 22 nt, Human
ugagcaaguuucuuuuggguca

SEQ ID NO: 1275911 - RNA, 24 nt, Human
ugaggcugauaugagggaggacag

SEQ ID NO: 1275912 - RNA, 22 nt, Human
ugcuuuaaggaggcuguccuug

SEQ ID NO: 1275913 - RNA, 22 nt, Human
uggaagucugcuuuaaggaggc

SEQ ID NO: 1275914 - RNA, 23 nt, Human
uggauauucccauuuaagcuguc

SEQ ID NO: 1275915 - RNA, 25 nt, Human
uggcaaaguucccagaaucagcuca

SEQ ID NO: 1275916 - RNA, 21 nt, Human
ugguggagggggacgaaucug

SEQ ID NO: 1275917 - RNA, 23 nt, Human
uggugugggucucuggccucagc

SEQ ID NO: 1275918 - RNA, 18 nt, Human
uucacguaaagucuucuu

SEQ ID NO: 1275919 - RNA, 20 nt, Human
uucaggagauggaccuucca

SEQ ID NO: 1275920 - RNA, 22 nt, Human
uucaggagauggaccuuccauc

SEQ ID NO: 1275921 - RNA, 24 nt, Human
aaagugcugggacugcaggcguga

SEQ ID NO: 1275922 - RNA, 20 nt, Human
aacaaggccucagaagaaaa

SEQ ID NO: 1275923 - RNA, 19 nt, Human
aagugcugggacugcaggc

SEQ ID NO: 1275924 - RNA, 26 nt, Human
aagugcugggacugcaggcgugagcc

SEQ ID NO: 1275925 - RNA, 24 nt, Human
caaagugcugggacugcaggcgug

SEQ ID NO: 1275926 - RNA, 21 nt, Human
caggcgugagccaccgcgccc

SEQ ID NO: 1275927 - RNA, 22 nt, Human
ccaaagugcugggacugcaggc

SEQ ID NO: 1275928 - RNA, 24 nt, Human
ccaaagugcugggacugcaggcgu

SEQ ID NO: 1275929 - RNA, 25 nt, Human
ccaaugacagccagugguuuuaauu

SEQ ID NO: 1275930 - RNA, 24 nt, Human
cccaaagugcugggacugcaggcg

SEQ ID NO: 1275931 - RNA, 22 nt, Human
cccgucucggccucccaaagug

SEQ ID NO: 1275932 - RNA, 25 nt, Human
ccucugggugaccagaccuuggccc

SEQ ID NO: 1275933 - RNA, 24 nt, Human
cgugauccgcccgucucggccucc

SEQ ID NO: 1275934 - RNA, 21 nt, Human
cucagaggaaucccggagaaa

SEQ ID NO: 1275935 - RNA, 21 nt, Human
cugggaaugcaggaagguuuu

SEQ ID NO: 1275936 - RNA, 18 nt, Human
gacugcaggcgugagcca

SEQ ID NO: 1275937 - RNA, 21 nt, Human
gacugcaggcgugagccaccg

SEQ ID NO: 1275938 - RNA, 22 nt, Human
gacugcaggcgugagccaccgc

SEQ ID NO: 1275939 - RNA, 19 nt, Human
gcuucaauuucaccaccuc

SEQ ID NO: 1275940 - RNA, 20 nt, Human
ggcuucaauuucaccaccuc

SEQ ID NO: 1275941 - RNA, 22 nt, Human
ucaccaccucgugauccgcccg

SEQ ID NO: 1275942 - RNA, 18 nt, Human
ucccaaagugcugggacu

SEQ ID NO: 1275943 - RNA, 24 nt, Human
ucccaaagugcugggacugcaggc

SEQ ID NO: 1275944 - RNA, 20 nt, Human
ucucggccucccaaagugcu

SEQ ID NO: 1275945 - RNA, 18 nt, Human
ugggacugcaggcgugag

SEQ ID NO: 1275946 - RNA, 19 nt, Human
ugggacugcaggcgugagc

SEQ ID NO: 1275947 - RNA, 21 nt, Human
ugggacugcaggcgugagcca

SEQ ID NO: 1275948 - RNA, 23 nt, Human
ugggacugcaggcgugagccacc

SEQ ID NO: 1275949 - RNA, 24 nt, Human
ugggacugcaggcgugagccaccg

SEQ ID NO: 1275950 - RNA, 20 nt, Human
aagugggaacucugauuaaa

SEQ ID NO: 1275951 - RNA, 20 nt, Human
acaggaagcacaccugggga

SEQ ID NO: 1275952 - RNA, 18 nt, Human
accccaaaguaaaagauc

SEQ ID NO: 1275953 - RNA, 22 nt, Human
agaccagagcaguaacuaaagg

SEQ ID NO: 1275954 - RNA, 23 nt, Human
agaguuuucugauuauuucuuaa

SEQ ID NO: 1275955 - RNA, 21 nt, Human
aggaagcacaccuggggaggc

SEQ ID NO: 1275956 - RNA, 20 nt, Human
aggaauuuuugugcagguag

SEQ ID NO: 1275957 - RNA, 18 nt, Human
agguagcuaucucuugcc

SEQ ID NO: 1275958 - RNA, 22 nt, Human
aucuaucuguucugcaacaagu

SEQ ID NO: 1275959 - RNA, 24 nt, Human
aucuucuuuugaaauguccugcug

SEQ ID NO: 1275960 - RNA, 24 nt, Human
caacugaaggcuuuuccacauuca

SEQ ID NO: 1275961 - RNA, 23 nt, Human
caaguucuuccaucucuaaucuu

SEQ ID NO: 1275962 - RNA, 24 nt, Human
cacagucagugcauuuacugguau

SEQ ID NO: 1275963 - RNA, 26 nt, Human
cagagaaucucuccagugugagguuu

SEQ ID NO: 1275964 - RNA, 19 nt, Human
cagagcaguaacuaaaggc

SEQ ID NO: 1275965 - RNA, 20 nt, Human
caguaacuaaaggccuuucu

SEQ ID NO: 1275966 - RNA, 19 nt, Human
caugguggaaggugaaggg

SEQ ID NO: 1275967 - RNA, 20 nt, Human
cauucauuacauucauaggg

SEQ ID NO: 1275968 - RNA, 23 nt, Human
cauucauuacauucauaggguug

SEQ ID NO: 1275969 - RNA, 20 nt, Human
cauugaauaagaccagagca

SEQ ID NO: 1275970 - RNA, 19 nt, Human
ccacugugaauucucuggu

SEQ ID NO: 1275971 - RNA, 24 nt, Human
cccacacucacugcauuuguaggg

SEQ ID NO: 1275972 - RNA, 20 nt, Human
cccagaaucaugcucucuca

SEQ ID NO: 1275973 - RNA, 23 nt, Human
cccagaaucaugcucucuccacu

SEQ ID NO: 1275974 - RNA, 20 nt, Human
cgauccuccuucuguuuccc

SEQ ID NO: 1275975 - RNA, 21 nt, Human
cuaguaugaguuuucugguga

SEQ ID NO: 1275976 - RNA, 18 nt, Human
cugaaccacaucuauaga

SEQ ID NO: 1275977 - RNA, 21 nt, Human
cugaaggcuuuuccacaguca

SEQ ID NO: 1275978 - RNA, 21 nt, Human
cugaaggcuuuuccacauuca

SEQ ID NO: 1275979 - RNA, 23 nt, Human
cugaaggcuuuuccacauucagu

SEQ ID NO: 1275980 - RNA, 23 nt, Human
cuuccaguuuuucagaugaggaa

SEQ ID NO: 1275981 - RNA, 20 nt, Human
cuugaagaagggcagagucu

SEQ ID NO: 1275982 - RNA, 21 nt, Human
cuugagacaguggcucugucc

SEQ ID NO: 1275983 - RNA, 21 nt, Human
gaacaagugcuaaccaaucac

SEQ ID NO: 1275984 - RNA, 20 nt, Human
gaagagaacugcgcuugcau

SEQ ID NO: 1275985 - RNA, 20 nt, Human
gaggucuguacuccaacuga

SEQ ID NO: 1275986 - RNA, 18 nt, Human
gaucauucuaaguaguca

SEQ ID NO: 1275987 - RNA, 21 nt, Human
gcaguaacuaaaggccuuucu

SEQ ID NO: 1275988 - RNA, 20 nt, Human
gccuaaagauaugaagugac

SEQ ID NO: 1275989 - RNA, 28 nt, Human
gggaagcaggcaugccuuacauggcccc

SEQ ID NO: 1275990 - RNA, 21 nt, Human
guacaggaagcacaccugggg

SEQ ID NO: 1275991 - RNA, 24 nt, Human
uaaacuggccucuagauuuccaau

SEQ ID NO: 1275992 - RNA, 23 nt, Human
uaaauaagucacaauucugaacc

SEQ ID NO: 1275993 - RNA, 20 nt, Human
uaacuacuacaagcucacuu

SEQ ID NO: 1275994 - RNA, 24 nt, Human
uaagaccagagcaguaacuaaagg

SEQ ID NO: 1275995 - RNA, 24 nt, Human
uacagacuuucucuuugcaaguuc

SEQ ID NO: 1275996 - RNA, 22 nt, Human
uauuuaugacaauucucuucca

SEQ ID NO: 1275997 - RNA, 20 nt, Human
ucagagaaucucuccagugu

SEQ ID NO: 1275998 - RNA, 20 nt, Human
ucaugguggaaggugaaggg

SEQ ID NO: 1275999 - RNA, 21 nt, Human
uccacugugaauucucuggug

SEQ ID NO: 1276000 - RNA, 26 nt, Human
uccccacacucaguauguauauuuga

SEQ ID NO: 1276001 - RNA, 24 nt, Human
ucuaaugguuuccccacacucagu

SEQ ID NO: 1276002 - RNA, 24 nt, Human
ucuacacucaguacauuuacaggg

SEQ ID NO: 1276003 - RNA, 21 nt, Human
ucucuucuucugggcucuucu

SEQ ID NO: 1276004 - RNA, 21 nt, Human
ucuuggccccacguucaagcu

SEQ ID NO: 1276005 - RNA, 23 nt, Human
ugaaucacaccugauguacaaua

SEQ ID NO: 1276006 - RNA, 19 nt, Human
ugacuccuuaauaacuacu

SEQ ID NO: 1276007 - RNA, 19 nt, Human
ugagacaguggcucugucc

SEQ ID NO: 1276008 - RNA, 23 nt, Human
ugagacaguggcucuguccgaag

SEQ ID NO: 1276009 - RNA, 21 nt, Human
ugcauuuacugguaugaaggu

SEQ ID NO: 1276010 - RNA, 19 nt, Human
ugcccuagauuauucuccu

SEQ ID NO: 1276011 - RNA, 21 nt, Human
uggaaggugaaggggaagcag

SEQ ID NO: 1276012 - RNA, 24 nt, Human
uggccucuagauuuccagauuucu

SEQ ID NO: 1276013 - RNA, 24 nt, Human
uggcuaaaggcuuucccacauuca

SEQ ID NO: 1276014 - RNA, 19 nt, Human
uguagggcuuuucuccuga

SEQ ID NO: 1276015 - RNA, 22 nt, Human
uguagggcuuuucuccugaaag

SEQ ID NO: 1276016 - RNA, 20 nt, Human
uguccugcugcucuacucuu

SEQ ID NO: 1276017 - RNA, 21 nt, Human
uucccacacucacugcauuug

SEQ ID NO: 1276018 - RNA, 20 nt, Human
uucccugggaagggucucca

SEQ ID NO: 1276019 - RNA, 24 nt, Human
uucuacauucauuacauuuauagg

SEQ ID NO: 1276020 - RNA, 26 nt, Human
uucuuuguauaauuaaaucugaguuu

SEQ ID NO: 1276021 - RNA, 19 nt, Human
uuuacagggucucucucca

SEQ ID NO: 1276022 - RNA, 22 nt, Human
uuugagcaucuuucaacaugua

SEQ ID NO: 1276023 - RNA, 21 nt, Human
uuuucuccaguguugaguuau

SEQ ID NO: 1276024 - RNA, 19 nt, Human
aaccugcuccuucacucug

SEQ ID NO: 1276025 - RNA, 22 nt, Human
aaguucuccaaguacccaccgg

SEQ ID NO: 1276026 - RNA, 18 nt, Human
aggaagcuucaggacuac

SEQ ID NO: 1276027 - RNA, 23 nt, Human
aggaagcuucaggacuacaccaa

SEQ ID NO: 1276028 - RNA, 21 nt, Human
auggagcuugaguucuugagc

SEQ ID NO: 1276029 - RNA, 26 nt, Human
caaguacccaccggacucaggagccc

SEQ ID NO: 1276030 - RNA, 24 nt, Human
caccaaagaaccagaaccugcucc

SEQ ID NO: 1276031 - RNA, 19 nt, Human
caugacugcucucuacaug

SEQ ID NO: 1276032 - RNA, 18 nt, Human
cgcucugaauaaugggau

SEQ ID NO: 1276033 - RNA, 19 nt, Human
cuacaccaaagaaccagaa

SEQ ID NO: 1276034 - RNA, 22 nt, Human
cuccaaguacccaccggacuca

SEQ ID NO: 1276035 - RNA, 22 nt, Human
gacugcucucuacaugaaacau

SEQ ID NO: 1276036 - RNA, 20 nt, Human
ggagcccagcuggcuuugcc

SEQ ID NO: 1276037 - RNA, 21 nt, Human
gugaacuuucuuaggaagcuu

SEQ ID NO: 1276038 - RNA, 19 nt, Human
uccaaguacccaccggacu

SEQ ID NO: 1276039 - RNA, 19 nt, Human
uccauacgcgcucugaaua

SEQ ID NO: 1276040 - RNA, 23 nt, Human
ucuccaaguacccaccggacucu

SEQ ID NO: 1276041 - RNA, 21 nt, Human
uguugcauuguguggagugca

SEQ ID NO: 1276042 - RNA, 18 nt, Human
uucuccaaguacccaccg

SEQ ID NO: 1276043 - RNA, 21 nt, Human
aaaaaaacaggcaggcuuaga

SEQ ID NO: 1276044 - RNA, 21 nt, Human
aaaaaacuuaaucuugagcuc

SEQ ID NO: 1276045 - RNA, 19 nt, Human
aaaaacaggcaggcuuaga

SEQ ID NO: 1276046 - RNA, 26 nt, Human
aaacaaaaaacuuaaucuugagcucu

SEQ ID NO: 1276047 - RNA, 19 nt, Human
aaacuccaggcucucuggc

SEQ ID NO: 1276048 - RNA, 19 nt, Human
aacacacacacacacacac

SEQ ID NO: 1276049 - RNA, 19 nt, Human
aacauaccuagaucauaua

SEQ ID NO: 1276050 - RNA, 22 nt, Human
aagcauaugaauacaacagucu

SEQ ID NO: 1276051 - RNA, 23 nt, Human
aaggugguuucuauguccaauua

SEQ ID NO: 1276052 - RNA, 23 nt, Human
acaaacauaaaagguaugucucc

SEQ ID NO: 1276053 - RNA, 22 nt, Human
acacacacacacacacacacga

SEQ ID NO: 1276054 - RNA, 20 nt, Human
acacacgaaaagccuguaac

SEQ ID NO: 1276055 - RNA, 22 nt, Human
acuuggcaacugauugcaacau

SEQ ID NO: 1276056 - RNA, 19 nt, Human
agacacccuccuucuggug

SEQ ID NO: 1276057 - RNA, 22 nt, Human
agaucauauaaauuugugaagg

SEQ ID NO: 1276058 - RNA, 24 nt, Human
aggaguuccuccacguacucacuu

SEQ ID NO: 1276059 - RNA, 22 nt, Human
auauaaguaaacauacauucua

SEQ ID NO: 1276060 - RNA, 19 nt, Human
aucaguuucccuaguucug

SEQ ID NO: 1276061 - RNA, 20 nt, Human
augaacaucaacuauccuag

SEQ ID NO: 1276062 - RNA, 21 nt, Human
augaagaccaaauugccucca

SEQ ID NO: 1276063 - RNA, 24 nt, Human
auucccauauuuccaucuacuaug

SEQ ID NO: 1276064 - RNA, 20 nt, Human
caaaacacacacacacacac

SEQ ID NO: 1276065 - RNA, 23 nt, Human
caaacauaaaagguaugucuccc

SEQ ID NO: 1276066 - RNA, 21 nt, Human
caaacuccaugagcugauuaa

SEQ ID NO: 1276067 - RNA, 25 nt, Human
caaggucaaaacaauaguucuuugu

SEQ ID NO: 1276068 - RNA, 18 nt, Human
cacacacacacacacaca

SEQ ID NO: 1276069 - RNA, 33 nt, Human; identical to SEQ ID NO: 1165615

SEQ ID NO: 1276070 - RNA, 25 nt, Human
cacacacacgaaaagccuguaaccu

SEQ ID NO: 1276071 - RNA, 18 nt, Human
cacaguguuugaauucca

SEQ ID NO: 1276072 - RNA, 21 nt, Human
cagaaagaaaauugcugacau

SEQ ID NO: 1276073 - RNA, 24 nt, Human
cagcuaaaccuaaugaagaccaaa

SEQ ID NO: 1276074 - RNA, 24 nt, Human
ccaaauugccuccaaggucaaaac

SEQ ID NO: 1276075 - RNA, 21 nt, Human
ccaggcucucuggccuuggga

SEQ ID NO: 1276076 - RNA, 19 nt, Human
ccagggaaguggaaaaaaa

SEQ ID NO: 1276077 - RNA, 20 nt, Human
ccaucaguuucccuaguucu

SEQ ID NO: 1276078 - RNA, 25 nt, Human
cccacgacaauggauauaguugcuu

SEQ ID NO: 1276079 - RNA, 24 nt, Human
ccuacagcuaaaccuaaugaagac

SEQ ID NO: 1276080 - RNA, 18 nt, Human
cuaaaccuaaugaagacc

SEQ ID NO: 1276081 - RNA, 21 nt, Human
cuaugauacugccacucugaa

SEQ ID NO: 1276082 - RNA, 24 nt, Human
cucaagaaguauaaauuuuacaaa

SEQ ID NO: 1276083 - RNA, 22 nt, Human
cucucuggccuugggauuccag

SEQ ID NO: 1276084 - RNA, 20 nt, Human
cugaaauaucuaguguagca

SEQ ID NO: 1276085 - RNA, 20 nt, Human
cuugagcucuaguucuugac

SEQ ID NO: 1276086 - RNA, 24 nt, Human
cuuuuuuaucucaagaaguauaaa

SEQ ID NO: 1276087 - RNA, 20 nt, Human
gaacaucaacuauccuacag

SEQ ID NO: 1276088 - RNA, 19 nt, Human
gaagacaagcauaugaaua

SEQ ID NO: 1276089 - RNA, 19 nt, Human
gaccuaagacacccuccuu

SEQ ID NO: 1276090 - RNA, 21 nt, Human
ggaccuaagacacccuccuuc

SEQ ID NO: 1276091 - RNA, 24 nt, Human
guaugucucccuucaauauuuccu

SEQ ID NO: 1276092 - RNA, 23 nt, Human
uaaaacagauccucuagccagga

SEQ ID NO: 1276093 - RNA, 21 nt, Human
uaaagaaaaaguuuucuguuc

SEQ ID NO: 1276094 - RNA, 22 nt, Human
uaaguggagcaauauuauuggc

SEQ ID NO: 1276095 - RNA, 20 nt, Human
uaaugaacaucaacuauccu

SEQ ID NO: 1276096 - RNA, 21 nt, Human
uaauugaugcugcauugacgc

SEQ ID NO: 1276097 - RNA, 24 nt, Human
uacaugaacacucagcuauguaua

SEQ ID NO: 1276098 - RNA, 24 nt, Human
uaggaugugacuuggcaacugauu

SEQ ID NO: 1276099 - RNA, 18 nt, Human
uaguucagauggaucuua

SEQ ID NO: 1276100 - RNA, 18 nt, Human
uaguucagauggaucuua

SEQ ID NO: 1276101 - RNA, 22 nt, Human
uaguucagauggaucuuaccag

SEQ ID NO: 1276102 - RNA, 24 nt, Human
uaucacaguuaaaauuauaguuaa

SEQ ID NO: 1276103 - RNA, 19 nt, Human
uauuuaauagagggacacc

SEQ ID NO: 1276104 - RNA, 21 nt, Human
ucaaaacacacacacacacac

SEQ ID NO: 1276105 - RNA, 27 nt, Human
ucaaaacacacacacacacacacacga

SEQ ID NO: 1276106 - RNA, 18 nt, Human
ucacuggggucuauuguu

SEQ ID NO: 1276107 - RNA, 20 nt, Human
ucagaaagaaaauugcugac

SEQ ID NO: 1276108 - RNA, 19 nt, Human
ucaguaaguggagcaauau

SEQ ID NO: 1276109 - RNA, 22 nt, Human
uccaagcuagcugcccaucauc

SEQ ID NO: 1276110 - RNA, 21 nt, Human
uccacauuuucucuauuuuuc

SEQ ID NO: 1276111 - RNA, 25 nt, Human
ucccacgacaauggauauaguugcu

SEQ ID NO: 1276112 - RNA, 21 nt, Human
ucuauacuucaguaaguggag

SEQ ID NO: 1276113 - RNA, 24 nt, Human
ucugaaaagcugucuacauccaaa

SEQ ID NO: 1276114 - RNA, 24 nt, Human
ucuggccuugggauuccaggagga

SEQ ID NO: 1276115 - RNA, 21 nt, Human
ucuuucuuuuaucaauucucc

SEQ ID NO: 1276116 - RNA, 18 nt, Human
ugaaaaaaggauguuuua

SEQ ID NO: 1276117 - RNA, 24 nt, Human
ugaaaacauaccuagaucauauaa

SEQ ID NO: 1276118 - RNA, 24 nt, Human
ugaaagccuaaaauguaggaguuc

SEQ ID NO: 1276119 - RNA, 22 nt, Human
ugaaauaucuaguguagcacau

SEQ ID NO: 1276120 - RNA, 25 nt, Human
ugaaauaucuaguguagcacauaau

SEQ ID NO: 1276121 - RNA, 19 nt, Human
ugccucaggucaucuucau

SEQ ID NO: 1276122 - RNA, 20 nt, Human
ugcuaauugaauuacacuuc

SEQ ID NO: 1276123 - RNA, 24 nt, Human
ugcuuuuggacauccaaacuccag

SEQ ID NO: 1276124 - RNA, 26 nt, Human
uggaaaaaaaacaaaaaacaaaaaac

SEQ ID NO: 1276125 - RNA, 27 nt, Human
ugggauguacugaaaaaaggauguuuu

SEQ ID NO: 1276126 - RNA, 25 nt, Human
ugguucuccagcuugcagacaaccu

SEQ ID NO: 1276127 - RNA, 25 nt, Human
uguucccagggaaguggaaaaaaaa

SEQ ID NO: 1276128 - RNA, 20 nt, Human
uucaauauuuccucuuaaug

SEQ ID NO: 1276129 - RNA, 19 nt, Human
uucaauuuccuuucuuuuc

SEQ ID NO: 1276130 - RNA, 21 nt, Human
uuccuccacguacucacuuca

SEQ ID NO: 1276131 - RNA, 22 nt, Human
uucuguucaucucuauacuuca

SEQ ID NO: 1276132 - RNA, 21 nt, Human
uuggacauccaaacuccaggc

SEQ ID NO: 1276133 - RNA, 18 nt, Human
aaccaagacacucugcag

SEQ ID NO: 1276134 - RNA, 22 nt, Human
aagguggcaccaaacucaaaca

SEQ ID NO: 1276135 - RNA, 21 nt, Human
acugcaacguuauucucucaa

SEQ ID NO: 1276136 - RNA, 18 nt, Human
aggaaaaaucaggcugga

SEQ ID NO: 1276137 - RNA, 20 nt, Human
aggaaaaaucaggcuggaaa

SEQ ID NO: 1276138 - RNA, 19 nt, Human
aggaaggcuggcucuggcu

SEQ ID NO: 1276139 - RNA, 24 nt, Human
aggcuggaaaagaacgggcaaggu

SEQ ID NO: 1276140 - RNA, 18 nt, Human
auacacuuuucuacaccc

SEQ ID NO: 1276141 - RNA, 18 nt, Human
auggguuuaacauccacc

SEQ ID NO: 1276142 - RNA, 20 nt, Human
auuuguugggugggaacaca

SEQ ID NO: 1276143 - RNA, 19 nt, Human
caaagcucauaacacagca

SEQ ID NO: 1276144 - RNA, 21 nt, Human
caagacacucugcagagccaa

SEQ ID NO: 1276145 - RNA, 23 nt, Human
caguaaagugcuucagugugugc

SEQ ID NO: 1276146 - RNA, 18 nt, Human
cagugugugccuguagcu

SEQ ID NO: 1276147 - RNA, 22 nt, Human
ccaaggagugcugggucuaagg

SEQ ID NO: 1276148 - RNA, 22 nt, Human
cucacagugaucucgauccugg

SEQ ID NO: 1276149 - RNA, 18 nt, Human
cucugcuuccauacuugc

SEQ ID NO: 1276150 - RNA, 24 nt, Human
cugcagagccaauccaaggagugc

SEQ ID NO: 1276151 - RNA, 18 nt, Human
cuuaacuccacaaccacu

SEQ ID NO: 1276152 - RNA, 23 nt, Human
cuuaucacauuuguuggguggga

SEQ ID NO: 1276153 - RNA, 21 nt, Human
cuucccaugcaggaaaaauca

SEQ ID NO: 1276154 - RNA, 20 nt, Human
gaaaagaacgggcaauuggc

SEQ ID NO: 1276155 - RNA, 22 nt, Human
gagccaauccaaggagugcugg

SEQ ID NO: 1276156 - RNA, 21 nt, Human
gcugcagagaguuugaggagg

SEQ ID NO: 1276157 - RNA, 18 nt, Human
ggaacacaucugugcccc

SEQ ID NO: 1276158 - RNA, 21 nt, Human
gguuuaacauccaccaaugac

SEQ ID NO: 1276159 - RNA, 20 nt, Human
guucacuauuccugucugcu

SEQ ID NO: 1276160 - RNA, 22 nt, Human
uaaaggggccaauaagguggca

SEQ ID NO: 1276161 - RNA, 24 nt, Human
uaacacagcacucagaacguuuua

SEQ ID NO: 1276162 - RNA, 24 nt, Human
uacaguggugagcaauaauaguga

SEQ ID NO: 1276163 - RNA, 23 nt, Human
uagcaggcagcaguugaaaggaa

SEQ ID NO: 1276164 - RNA, 24 nt, Human
uaucacauuuguugggugggaaca

SEQ ID NO: 1276165 - RNA, 24 nt, Human
ucaaccaagacacucugcagagcc

SEQ ID NO: 1276166 - RNA, 21 nt, Human
ucccuguaauucuucuagcuu

SEQ ID NO: 1276167 - RNA, 24 nt, Human
uccuauggaauaauugaaugaaua

SEQ ID NO: 1276168 - RNA, 22 nt, Human
ucucaaccaagacacucugcag

SEQ ID NO: 1276169 - RNA, 25 nt, Human
ucucaaccaagacacucugcagagc

SEQ ID NO: 1276170 - RNA, 22 nt, Human
ucuucccaugcaggaaaaauca

SEQ ID NO: 1276171 - RNA, 22 nt, Human
ugacaagcacuugcccaguaga

SEQ ID NO: 1276172 - RNA, 19 nt, Human
ugaggagguguccaugggg

SEQ ID NO: 1276173 - RNA, 20 nt, Human
ugccaaaugagacuaccuga

SEQ ID NO: 1276174 - RNA, 19 nt, Human
uggcaccaaacucaaacaa

SEQ ID NO: 1276175 - RNA, 25 nt, Human
ugggaaggaguccauaggggucuua

SEQ ID NO: 1276176 - RNA, 24 nt, Human
uguccugggaagggaaccucaggg

SEQ ID NO: 1276177 - RNA, 22 nt, Human
ugugccccauuauuaacugagu

SEQ ID NO: 1276178 - RNA, 19 nt, Human
uguugugaggauuaaagga

SEQ ID NO: 1276179 - RNA, 21 nt, Human
uucuacaccccaguuuccuua

SEQ ID NO: 1276180 - RNA, 22 nt, Human
uuugaggagguguccauggggu

SEQ ID NO: 1276181 - RNA, 18 nt, Human
aaacaagguacacaugug

SEQ ID NO: 1276182 - RNA, 21 nt, Human
aaagaaaucaagccugcccau

SEQ ID NO: 1276183 - RNA, 22 nt, Human
aagaauaauggagugacuccac

SEQ ID NO: 1276184 - RNA, 21 nt, Human
aagagcacucaucagucauuc

SEQ ID NO: 1276185 - RNA, 20 nt, Human
aauuccuggaaaucuucccc

SEQ ID NO: 1276186 - RNA, 20 nt, Human
agacaauggagaacagccau

SEQ ID NO: 1276187 - RNA, 22 nt, Human
aggcaguagcauuuguaguggu

SEQ ID NO: 1276188 - RNA, 24 nt, Human
agguaggggacuccuuucucugca

SEQ ID NO: 1276189 - RNA, 18 nt, Human
aguuuucagacaacaguu

SEQ ID NO: 1276190 - RNA, 21 nt, Human
aucacugucuuucacuguauu

SEQ ID NO: 1276191 - RNA, 24 nt, Human
cacuguauugccaugauucacacc

SEQ ID NO: 1276192 - RNA, 23 nt, Human
caguaguaacccagggaugacuu

SEQ ID NO: 1276193 - RNA, 21 nt, Human
cccccuuuuguuccaaguccc

SEQ ID NO: 1276194 - RNA, 23 nt, Human
cccuuuuguuccaagucccggag

SEQ ID NO: 1276195 - RNA, 21 nt, Human
ccgcugcaguccacgaggcgu

SEQ ID NO: 1276196 - RNA, 20 nt, Human
ccuggaaaucuuccccaucc

SEQ ID NO: 1276197 - RNA, 20 nt, Human
cuggaaaucuuccccauccg

SEQ ID NO: 1276198 - RNA, 25 nt, Human
cuggcucucuucuucccauugaucc

SEQ ID NO: 1276199 - RNA, 18 nt, Human
cuuacucucuguuucugu

SEQ ID NO: 1276200 - RNA, 18 nt, Human
cuugugauaaugcuucag

SEQ ID NO: 1276201 - RNA, 23 nt, Human
gaaaucuuccccauccagggcac

SEQ ID NO: 1276202 - RNA, 20 nt, Human
gaacagccauccaugggucg

SEQ ID NO: 1276203 - RNA, 22 nt, Human
gaaccauacuguugcaaacaag

SEQ ID NO: 1276204 - RNA, 22 nt, Human
gacaauggagaacagccaucca

SEQ ID NO: 1276205 - RNA, 23 nt, Human
gacuuggugacggaaaagaaggc

SEQ ID NO: 1276206 - RNA, 19 nt, Human
gagaggggaggaaagagag

SEQ ID NO: 1276207 - RNA, 20 nt, Human
gcaaaguugcgagagggaga

SEQ ID NO: 1276208 - RNA, 18 nt, Human
ggagaggggaggaaagag

SEQ ID NO: 1276209 - RNA, 20 nt, Human
ggcggcaaaguugcgagagg

SEQ ID NO: 1276210 - RNA, 23 nt, Human
ggcguucggacacuuuuucccgg

SEQ ID NO: 1276211 - RNA, 22 nt, Human
gggaaacaaaaugagacucaag

SEQ ID NO: 1276212 - RNA, 26 nt, Human
gggaggaaagagaguucaucagaguu

SEQ ID NO: 1276213 - RNA, 18 nt, Human
guugcagauuacauguua

SEQ ID NO: 1276214 - RNA, 20 nt, Human
uacaugcuugggcuuuuugg

SEQ ID NO: 1276215 - RNA, 21 nt, Human
uagaaucagaagcaaggagac

SEQ ID NO: 1276216 - RNA, 25 nt, Human
uagaaucagaagcaaggagacacag

SEQ ID NO: 1276217 - RNA, 19 nt, Human
uagcauuuguagugguucc

SEQ ID NO: 1276218 - RNA, 24 nt, Human
uccacagcuccauuagccacuucc

SEQ ID NO: 1276219 - RNA, 19 nt, Human
uccauuagccacuuccuuc

SEQ ID NO: 1276220 - RNA, 18 nt, Human
uccgggggagaggggagg

SEQ ID NO: 1276221 - RNA, 25 nt, Human
uccucuggguuuuccaugcgugugg

SEQ ID NO: 1276222 - RNA, 18 nt, Human
uccuggcuggcucucuuc

SEQ ID NO: 1276223 - RNA, 21 nt, Human
ucuguuucugucaucucuccc

SEQ ID NO: 1276224 - RNA, 23 nt, Human
ucuucugucuguuuguuuugagg

SEQ ID NO: 1276225 - RNA, 21 nt, Human
ugagaaggauguucaguagua

SEQ ID NO: 1276226 - RNA, 21 nt, Human
uggcgugcuucgggcagggcu

SEQ ID NO: 1276227 - RNA, 23 nt, Human
uguaagccguucucucuucucuc

SEQ ID NO: 1276228 - RNA, 21 nt, Human
ugucuugugauaaugcuucag

SEQ ID NO: 1276229 - RNA, 22 nt, Human
uguuucugucaucucuccccca

SEQ ID NO: 1276230 - RNA, 23 nt, Human
uucacuguauugccaugauucac

SEQ ID NO: 1276231 - RNA, 24 nt, Human
uuccucuggguuuuccaugcgugu

SEQ ID NO: 1276232 - RNA, 19 nt, Human
uuccuggaaaucuucccca

SEQ ID NO: 1276233 - RNA, 21 nt, Human
uucuggucuccagaaccauac

SEQ ID NO: 1276234 - RNA, 21 nt, Human
uugcuggauuccucuuggcag

SEQ ID NO: 1276235 - RNA, 20 nt, Human
uuuccuuuuuaucugucagg

SEQ ID NO: 1276236 - RNA, 20 nt, Human
uuucucagaaacuuucaaau

SEQ ID NO: 1276237 - RNA, 22 nt, Human
uuucugucaucucucccccaca

SEQ ID NO: 1276238 - RNA, 21 nt, Human
uuugcuggauuccucuuggca

SEQ ID NO: 1276239 - RNA, 22 nt, Human
uuuguagugguuccuaagcaug

SEQ ID NO: 1276240 - RNA, 20 nt, Human
uuuucucagaaacuuucaaa

SEQ ID NO: 1276241 - RNA, 22 nt, Human
aaacagaagaagauauauacag

SEQ ID NO: 1276242 - RNA, 24 nt, Human
aaaccagucugagaccaaaccaca

SEQ ID NO: 1276243 - RNA, 22 nt, Human
aaagcaaauacugcauguucuc

SEQ ID NO: 1276244 - RNA, 20 nt, Human
aaagugauucucaugccuca

SEQ ID NO: 1276245 - RNA, 24 nt, Human
aaagugcugagaugauaaguguga

SEQ ID NO: 1276246 - RNA, 19 nt, Human
aaagugcuggaauuauagg

SEQ ID NO: 1276247 - RNA, 24 nt, Human
aaagugcuggaauuauaggcauga

SEQ ID NO: 1276248 - RNA, 18 nt, Human
aacaaucccuguguccca

SEQ ID NO: 1276249 - RNA, 19 nt, Human
aacagcucugcuguaaugu

SEQ ID NO: 1276250 - RNA, 19 nt, Human
aaccacagaccuggagccu

SEQ ID NO: 1276251 - RNA, 21 nt, Human
aaccacagucacaaagauuua

SEQ ID NO: 1276252 - RNA, 19 nt, Human
aaccagucugagaccaaac

SEQ ID NO: 1276253 - RNA, 23 nt, Human
aacccuaacacagggauagaaaa

SEQ ID NO: 1276254 - RNA, 20 nt, Human
aacuaaacucccgggaagua

SEQ ID NO: 1276255 - RNA, 23 nt, Human
aagaaaaacagguaaaaucccag

SEQ ID NO: 1276256 - RNA, 21 nt, Human
aagcaaauacugcauguucuc

SEQ ID NO: 1276257 - RNA, 26 nt, Human
aagugcuggaauuauaggcaugagcc

SEQ ID NO: 1276258 - RNA, 23 nt, Human
aaugaugagacuacguggaaaga

SEQ ID NO: 1276259 - RNA, 24 nt, Human
aaugcauucauuucuugaccaccu

SEQ ID NO: 1276260 - RNA, 21 nt, Human
aauuauaggcaugagccacua

SEQ ID NO: 1276261 - RNA, 22 nt, Human
aauuauaggcaugagccacuac

SEQ ID NO: 1276262 - RNA, 19 nt, Human
acaacucacugaaggaggu

SEQ ID NO: 1276263 - RNA, 18 nt, Human
acagugguuuguugauug

SEQ ID NO: 1276264 - RNA, 23 nt, Human
accauguuggucaggcuggucuc

SEQ ID NO: 1276265 - RNA, 19 nt, Human
acccaggcuggagugcagu

SEQ ID NO: 1276266 - RNA, 23 nt, Human
accucagccucccaaagugcugg

SEQ ID NO: 1276267 - RNA, 20 nt, Human
acuuccugaguagcugggac

SEQ ID NO: 1276268 - RNA, 19 nt, Human
agacaaaauguuuagaaau

SEQ ID NO: 1276269 - RNA, 19 nt, Human
agccacuacgcccauccug

SEQ ID NO: 1276270 - RNA, 22 nt, Human
agcguuucaccauguuggucag

SEQ ID NO: 1276271 - RNA, 23 nt, Human
agcguuucaccauguuggucagg

SEQ ID NO: 1276272 - RNA, 21 nt, Human
aggcaugagccacuacgccca

SEQ ID NO: 1276273 - RNA, 25 nt, Human
aggcuggagugcaguggcgcgaucu

SEQ ID NO: 1276274 - RNA, 21 nt, Human
agggcagucaggaacacucaa

SEQ ID NO: 1276275 - RNA, 19 nt, Human
aggggucaggguaguaggu

SEQ ID NO: 1276276 - RNA, 18 nt, Human
aguagagauggggucuca

SEQ ID NO: 1276277 - RNA, 19 nt, Human
aguagcugggacuacaagc

SEQ ID NO: 1276278 - RNA, 20 nt, Human
agucuuugaauuucuuccug

SEQ ID NO: 1276279 - RNA, 19 nt, Human
agugauccacccaccucag

SEQ ID NO: 1276280 - RNA, 21 nt, Human
agugcaguggcgcgaucucag

SEQ ID NO: 1276281 - RNA, 23 nt, Human
agugcaguggcgcgaucucagcu

SEQ ID NO: 1276282 - RNA, 24 nt, Human
agugcaguggcgcgaucucagcuc

SEQ ID NO: 1276283 - RNA, 23 nt, Human
aguugcugaaggucaaggaggcc

SEQ ID NO: 1276284 - RNA, 18 nt, Human
auagaaaagcaaauacug

SEQ ID NO: 1276285 - RNA, 24 nt, Human
auagcguuucaccauguuggucag

SEQ ID NO: 1276286 - RNA, 24 nt, Human
auagcucauugcagccccagucuc

SEQ ID NO: 1276287 - RNA, 21 nt, Human
auccucuuccuccuccugcca

SEQ ID NO: 1276288 - RNA, 22 nt, Human
augaaaaaccagucugagacca

SEQ ID NO: 1276289 - RNA, 22 nt, Human
augccucagccuccugagcagc

SEQ ID NO: 1276290 - RNA, 19 nt, Human
auggggucucauuauguug

SEQ ID NO: 1276291 - RNA, 24 nt, Human
auggggucucauuauguuguccag

SEQ ID NO: 1276292 - RNA, 20 nt, Human
auguuguccaggcuggucuc

SEQ ID NO: 1276293 - RNA, 25 nt, Human
auuuuuaguagagauggggucucau

SEQ ID NO: 1276294 - RNA, 24 nt, Human
auuuuuauauuuuuaguagagaua

SEQ ID NO: 1276295 - RNA, 25 nt, Human
caaacuccugagcucaagcgauccu

SEQ ID NO: 1276296 - RNA, 24 nt, Human
caaagugcugagaugauaagugug

SEQ ID NO: 1276297 - RNA, 24 nt, Human
caaagugcuggaauuauaggcaug

SEQ ID NO: 1276298 - RNA, 19 nt, Human
caacaaucccuguguccca

SEQ ID NO: 1276299 - RNA, 23 nt, Human
caacaaucccugugucccaaaac

SEQ ID NO: 1276300 - RNA, 20 nt, Human
caagagauucuccuaccuuu

SEQ ID NO: 1276301 - RNA, 21 nt, Human
cacaccacuggaagaaaaaca

SEQ ID NO: 1276302 - RNA, 21 nt, Human
caccauguuggucaggcuggu

SEQ ID NO: 1276303 - RNA, 24 nt, Human
caccauguuggucaggcuggucuc

SEQ ID NO: 1276304 - RNA, 22 nt, Human
cacccaccucagccucccaaag

SEQ ID NO: 1276305 - RNA, 23 nt, Human
cacccaccucagccucccaaagu

SEQ ID NO: 1276306 - RNA, 19 nt, Human
cacccaggcuagugugcag

SEQ ID NO: 1276307 - RNA, 24 nt, Human
cacccaggcuggagugcaguggcg

SEQ ID NO: 1276308 - RNA, 23 nt, Human
cacgcaccaucacacccagcuaa

SEQ ID NO: 1276309 - RNA, 21 nt, Human
cacuacaaccuccgccuccca

SEQ ID NO: 1276310 - RNA, 21 nt, Human
cagccccagucucaggcucaa

SEQ ID NO: 1276311 - RNA, 18 nt, Human
cagcugagauuacaggug

SEQ ID NO: 1276312 - RNA, 23 nt, Human
cagggcucuggggugaaaccaaa

SEQ ID NO: 1276313 - RNA, 24 nt, Human
cagggucuugcucugucacccagg

SEQ ID NO: 1276314 - RNA, 22 nt, Human
caucaccaggaacagcucugcu

SEQ ID NO: 1276315 - RNA, 24 nt, Human
ccaaagugcuggaauuauaggcau

SEQ ID NO: 1276316 - RNA, 26 nt, Human
ccacccaccucagccucccaaagugc

SEQ ID NO: 1276317 - RNA, 21 nt, Human
ccauugugccuggccuagaac

SEQ ID NO: 1276318 - RNA, 19 nt, Human
cccaccacauuaaggccau

SEQ ID NO: 1276319 - RNA, 23 nt, Human
cccaggcuagugugcaguggcau

SEQ ID NO: 1276320 - RNA, 23 nt, Human
cccauccugcauauuguuaaaaa

SEQ ID NO: 1276321 - RNA, 21 nt, Human
cccugaccucaggcugccugc

SEQ ID NO: 1276322 - RNA, 21 nt, Human
cccugugucccaaaacaacac

SEQ ID NO: 1276323 - RNA, 20 nt, Human
ccuaacauauuggccacaca

SEQ ID NO: 1276324 - RNA, 18 nt, Human
ccucaacagggcauagaa

SEQ ID NO: 1276325 - RNA, 24 nt, Human
ccugaccucaagugauccacccac

SEQ ID NO: 1276326 - RNA, 18 nt, Human
ccugaccucaggcugccu

SEQ ID NO: 1276327 - RNA, 20 nt, Human
ccugagcucaagcgauccuc

SEQ ID NO: 1276328 - RNA, 19 nt, Human
ccugaguagcugggacuac

SEQ ID NO: 1276329 - RNA, 24 nt, Human
ccugcauauuguuaaaaaacaaag

SEQ ID NO: 1276330 - RNA, 24 nt, Human
cgcucugccacccaggcuggagug

SEQ ID NO: 1276331 - RNA, 18 nt, Human
cguggaaagaaccacaga

SEQ ID NO: 1276332 - RNA, 22 nt, Human
cuaaacucccgggaaguaacgu

SEQ ID NO: 1276333 - RNA, 24 nt, Human
cucaagagauucuccuaccuuuac

SEQ ID NO: 1276334 - RNA, 27 nt, Human
cucaagcgauccucuuccuccuccugc

SEQ ID NO: 1276335 - RNA, 24 nt, Human
cucaagugauccacccaccucagc

SEQ ID NO: 1276336 - RNA, 24 nt, Human
cucacuacaaccuccgccucccag

SEQ ID NO: 1276337 - RNA, 19 nt, Human
cucccaggguaaagugauu

SEQ ID NO: 1276338 - RNA, 22 nt, Human
cuccuggauaccuuaaagaaaa

SEQ ID NO: 1276339 - RNA, 22 nt, Human
cucuggggugaaaccaaaacag

SEQ ID NO: 1276340 - RNA, 18 nt, Human
cucugucacccaggcuag

SEQ ID NO: 1276341 - RNA, 23 nt, Human
cucugucacccaggcuagugugc

SEQ ID NO: 1276342 - RNA, 18 nt, Human
cugagcagcugagauuac

SEQ ID NO: 1276343 - RNA, 21 nt, Human
cugagcagcugagauuacagg

SEQ ID NO: 1276344 - RNA, 23 nt, Human
cugagcccuuucaaggugggaca

SEQ ID NO: 1276345 - RNA, 21 nt, Human
cugaggguaagaagaacuuau

SEQ ID NO: 1276346 - RNA, 22 nt, Human
cugccugcagagaacacaacua

SEQ ID NO: 1276347 - RNA, 22 nt, Human
cugccuuaaaaacagaagaaga

SEQ ID NO: 1276348 - RNA, 20 nt, Human
cuggagccucucagaaggug

SEQ ID NO: 1276349 - RNA, 23 nt, Human
cuggagccucucagaagguggag

SEQ ID NO: 1276350 - RNA, 22 nt, Human
cuuccugccuuaaaaacagaag

SEQ ID NO: 1276351 - RNA, 21 nt, Human
cuucuaguugcugaaggucaa

SEQ ID NO: 1276352 - RNA, 29 nt, Human
gaaaaacagguaaaaucccagaugccugg

SEQ ID NO: 1276353 - RNA, 24 nt, Human
gaccucaagugauccacccaccuc

SEQ ID NO: 1276354 - RNA, 24 nt, Human
gaguagcugggacuacaagcacgc

SEQ ID NO: 1276355 - RNA, 18 nt, Human
gauuacaggugccugcca

SEQ ID NO: 1276356 - RNA, 21 nt, Human
gauucucaugccucagccucc

SEQ ID NO: 1276357 - RNA, 19 nt, Human
gcaagggcagucaggaaca

SEQ ID NO: 1276358 - RNA, 19 nt, Human
gcacgcaccaucacaccca

SEQ ID NO: 1276359 - RNA, 20 nt, Human
gcauaaucauagcucauugc

SEQ ID NO: 1276360 - RNA, 21 nt, Human
gccuccugagcagcugagauu

SEQ ID NO: 1276361 - RNA, 25 nt, Human
gcucugccacccaggcuggagugca

SEQ ID NO: 1276362 - RNA, 19 nt, Human
gcuggagugcaguggcgcg

SEQ ID NO: 1276363 - RNA, 23 nt, Human
gcuggucucaaacuccugaccuc

SEQ ID NO: 1276364 - RNA, 21 nt, Human
ggaaagaaccacagaccugga

SEQ ID NO: 1276365 - RNA, 21 nt, Human
ggccugggggccggggcaagg

SEQ ID NO: 1276366 - RNA, 24 nt, Human
ggcuggucucaaacuccugaccuc

SEQ ID NO: 1276367 - RNA, 20 nt, Human
gggcacaccacuggaagaaa

SEQ ID NO: 1276368 - RNA, 18 nt, Human
gguacuuaucagcuagua

SEQ ID NO: 1276369 - RNA, 24 nt, Human
ggucucauuauguuguccaggcug

SEQ ID NO: 1276370 - RNA, 24 nt, Human
gugauccacccaccucagccuccc

SEQ ID NO: 1276371 - RNA, 23 nt, Human
gugauucucaugccucagccucc

SEQ ID NO: 1276372 - RNA, 18 nt, Human
guuccuauguuuuccaua

SEQ ID NO: 1276373 - RNA, 23 nt, Human
uaaagugauucucaugccucagc

SEQ ID NO: 1276374 - RNA, 25 nt, Human
uaaaugcaacaaucccuguguccca

SEQ ID NO: 1276375 - RNA, 20 nt, Human
uaacacagggauagaaaagc

SEQ ID NO: 1276376 - RNA, 26 nt, Human
uaacagaucacgcaucaccaggaacc

SEQ ID NO: 1276377 - RNA, 23 nt, Human
uaagaagaacuuaugcaugaaaa

SEQ ID NO: 1276378 - RNA, 18 nt, Human
uaagugucaagaacucuu

SEQ ID NO: 1276379 - RNA, 24 nt, Human
uaauuuuuauauuuuuaguagaga

SEQ ID NO: 1276380 - RNA, 21 nt, Human
uaccaugugaccaaucagaau

SEQ ID NO: 1276381 - RNA, 22 nt, Human
uagagauagcguuucaccaugu

SEQ ID NO: 1276382 - RNA, 24 nt, Human
uagcguuucaccauguuggucagg

SEQ ID NO: 1276383 - RNA, 24 nt, Human
uaguagagauagcguuucaccaug

SEQ ID NO: 1276384 - RNA, 24 nt, Human
uaguagagauggggucucauuaug

SEQ ID NO: 1276385 - RNA, 23 nt, Human
uauguuguccaggcuggucucaa

SEQ ID NO: 1276386 - RNA, 24 nt, Human
uauguuguccaggcuggucucaaa

SEQ ID NO: 1276387 - RNA, 24 nt, Human
ucaaagugcugagaugauaagugu

SEQ ID NO: 1276388 - RNA, 20 nt, Human
ucaagugauccacccaccuc

SEQ ID NO: 1276389 - RNA, 18 nt, Human
ucacuacaaccuccgccu

SEQ ID NO: 1276390 - RNA, 19 nt, Human
ucacuacaaccuccgccuc

SEQ ID NO: 1276391 - RNA, 24 nt, Human
ucacuacaaccuccgccucccagg

SEQ ID NO: 1276392 - RNA, 27 nt, Human
ucacuacaaccuccgccucccagggua

SEQ ID NO: 1276393 - RNA, 21 nt, Human
ucagaaugcguggcccaccac

SEQ ID NO: 1276394 - RNA, 18 nt, Human
ucagccucccaaagugcu

SEQ ID NO: 1276395 - RNA, 27 nt, Human
ucagcucacuacaaccuccgccuccca

SEQ ID NO: 1276396 - RNA, 18 nt, Human
ucaggaacacucaaaggg

SEQ ID NO: 1276397 - RNA, 20 nt, Human
ucaguuuuccauccauaguc

SEQ ID NO: 1276398 - RNA, 21 nt, Human
uccacaauguggcggagaggg

SEQ ID NO: 1276399 - RNA, 21 nt, Human
uccacccaccucagccuccca

SEQ ID NO: 1276400 - RNA, 22 nt, Human
ucccaaaacaacacucuuuacc

SEQ ID NO: 1276401 - RNA, 24 nt, Human
ucccaaagugcuggaauuauaggc

SEQ ID NO: 1276402 - RNA, 19 nt, Human
ucccaggguaaagugauuc

SEQ ID NO: 1276403 - RNA, 20 nt, Human
uccucaagauucacaaaaag

SEQ ID NO: 1276404 - RNA, 18 nt, Human
uccugaguagcugggacu

SEQ ID NO: 1276405 - RNA, 24 nt, Human
ucgcucugccacccaggcuggagu

SEQ ID NO: 1276406 - RNA, 23 nt, Human
ucucaaacuccugagcucaagcg

SEQ ID NO: 1276407 - RNA, 21 nt, Human
ucucaggcucaagagauucuc

SEQ ID NO: 1276408 - RNA, 23 nt, Human
ucucauuauguuguccaggcugg

SEQ ID NO: 1276409 - RNA, 24 nt, Human
ucucauuauguuguccaggcuggu

SEQ ID NO: 1276410 - RNA, 23 nt, Human
ucucgcucugccacccaggcugg

SEQ ID NO: 1276411 - RNA, 24 nt, Human
ucucgcucugccacccaggcugga

SEQ ID NO: 1276412 - RNA, 26 nt, Human
ucucgcucugccacccaggcuggagu

SEQ ID NO: 1276413 - RNA, 27 nt, Human
ucucgcucugccacccaggcuggagug

SEQ ID NO: 1276414 - RNA, 24 nt, Human
ucugccacccaggcuggagugcag

SEQ ID NO: 1276415 - RNA, 24 nt, Human
ucugucacccaggcuagugugcag

SEQ ID NO: 1276416 - RNA, 19 nt, Human
ucuugcucugucacccagg

SEQ ID NO: 1276417 - RNA, 22 nt, Human
ucuugcucugucacccaggcua

SEQ ID NO: 1276418 - RNA, 23 nt, Human
ucuugcucugucacccaggcuag

SEQ ID NO: 1276419 - RNA, 27 nt, Human
ucuugcucugucacccaggcuagugug

SEQ ID NO: 1276420 - RNA, 23 nt, Human
ugaaaaaccagucugagaccaaa

SEQ ID NO: 1276421 - RNA, 20 nt, Human
ugaaaacccuaacacaggga

SEQ ID NO: 1276422 - RNA, 22 nt, Human
ugaaaacccuaacacagggaua

SEQ ID NO: 1276423 - RNA, 22 nt, Human
ugaaaccaaaacagugguuugu

SEQ ID NO: 1276424 - RNA, 22 nt, Human
ugagaccaaaccacagucacaa

SEQ ID NO: 1276425 - RNA, 23 nt, Human
ugagaccaaaccacagucacaaa

SEQ ID NO: 1276426 - RNA, 21 nt, Human
ugagaugauaagugugagcca

SEQ ID NO: 1276427 - RNA, 24 nt, Human
ugagaugauaagugugagccauug

SEQ ID NO: 1276428 - RNA, 19 nt, Human
ugagauuacaggugccugc

SEQ ID NO: 1276429 - RNA, 21 nt, Human
ugagauuacaggugccugcca

SEQ ID NO: 1276430 - RNA, 21 nt, Human
ugagauuacaggugccugcca

SEQ ID NO: 1276431 - RNA, 22 nt, Human
ugagauuacaggugccugccau

SEQ ID NO: 1276432 - RNA, 24 nt, Human
ugagcagcugagauuacaggugcc

SEQ ID NO: 1276433 - RNA, 21 nt, Human
ugagcucaagcgauccucuuc

SEQ ID NO: 1276434 - RNA, 24 nt, Human
ugauccacccaccucagccuccca

SEQ ID NO: 1276435 - RNA, 22 nt, Human
ugcaugaaaaaccagucugaga

SEQ ID NO: 1276436 - RNA, 22 nt, Human
ugccucagccuccugagcagcu

SEQ ID NO: 1276437 - RNA, 24 nt, Human
ugccucagccuccugagcagcuga

SEQ ID NO: 1276438 - RNA, 21 nt, Human
ugccuggcuauuuuguuauca

SEQ ID NO: 1276439 - RNA, 20 nt, Human
uggaaagaaccacagaccug

SEQ ID NO: 1276440 - RNA, 18 nt, Human
uggaauuauaggcaugag

SEQ ID NO: 1276441 - RNA, 21 nt, Human
uggaauuauaggcaugagcca

SEQ ID NO: 1276442 - RNA, 22 nt, Human
uggaauuauaggcaugagccac

SEQ ID NO: 1276443 - RNA, 22 nt, Human
uggaauuauaggcaugagccac

SEQ ID NO: 1276444 - RNA, 24 nt, Human
uggaauuauaggcaugagccacua

SEQ ID NO: 1276445 - RNA, 24 nt, Human
uggaauuauaggcaugagccacua

SEQ ID NO: 1276446 - RNA, 20 nt, Human
uggaggagggagaggaucag

SEQ ID NO: 1276447 - RNA, 21 nt, Human
uggagggacuguuuaauaaug

SEQ ID NO: 1276448 - RNA, 23 nt, Human
uggagugcaguggcgcgaucuca

SEQ ID NO: 1276449 - RNA, 24 nt, Human
uggagugcaguggcgcgaucucag

SEQ ID NO: 1276450 - RNA, 24 nt, Human
uggcgcgaucucagcucacuacaa

SEQ ID NO: 1276451 - RNA, 21 nt, Human
ugggacuacaagcacgcacca

SEQ ID NO: 1276452 - RNA, 26 nt, Human
ugggacuacaagcacgcaccaucaca

SEQ ID NO: 1276453 - RNA, 19 nt, Human
ugggcuuuuuguuuuuugu

SEQ ID NO: 1276454 - RNA, 24 nt, Human
uggggucucauuauguuguccagg

SEQ ID NO: 1276455 - RNA, 21 nt, Human
uggggugaaaccaaaacagug

SEQ ID NO: 1276456 - RNA, 24 nt, Human
uggucaggcuggucucaaacuccu

SEQ ID NO: 1276457 - RNA, 21 nt, Human
ugucacccaggcuagugugca

SEQ ID NO: 1276458 - RNA, 24 nt, Human
uguccaggcuggucucaaacuccu

SEQ ID NO: 1276459 - RNA, 23 nt, Human
ugugcaguggcauaaucauagcu

SEQ ID NO: 1276460 - RNA, 27 nt, Human
uguucauuccucaagauucacaaaaag

SEQ ID NO: 1276461 - RNA, 25 nt, Human
uguuuaauaaugagucuccuggaua

SEQ ID NO: 1276462 - RNA, 18 nt, Human
uguuuuguuuuuaauuuu

SEQ ID NO: 1276463 - RNA, 24 nt, Human
uuaguagagauagcguuucaccau

SEQ ID NO: 1276464 - RNA, 18 nt, Human
uuaguagagauggggucu

SEQ ID NO: 1276465 - RNA, 20 nt, Human
uuaguagagauggggucuca

SEQ ID NO: 1276466 - RNA, 24 nt, Human
uuaguagagauggggucucauuau

SEQ ID NO: 1276467 - RNA, 19 nt, Human
uuccuauguuuuccauauu

SEQ ID NO: 1276468 - RNA, 21 nt, Human
uuccucaagauucacaaaaag

SEQ ID NO: 1276469 - RNA, 22 nt, Human
uuccucaagauucacaaaaagu

SEQ ID NO: 1276470 - RNA, 28 nt, Human
uugaccaccuauuaagugucaagaacuc

SEQ ID NO: 1276471 - RNA, 20 nt, Human
uugcugaaggucaaggaggc

SEQ ID NO: 1276472 - RNA, 22 nt, Human
uugcugaaggucaaggaggccu

SEQ ID NO: 1276473 - RNA, 22 nt, Human
uuguuccugaacuaaccucaac

SEQ ID NO: 1276474 - RNA, 20 nt, Human
uuguugcagaaaugaauaga

SEQ ID NO: 1276475 - RNA, 30 nt, Human
uuguuuuguuuuuaauuuuuaguagagaug

SEQ ID NO: 1276476 - RNA, 20 nt, Human
uuguuuuuuguuuuguuuuu

SEQ ID NO: 1276477 - RNA, 24 nt, Human
uuucaccauguuggucaggcuggu

SEQ ID NO: 1276478 - RNA, 19 nt, Human
uuuuuaauuuuuaguagag

SEQ ID NO: 1276479 - RNA, 20 nt, Human
uuuuuaauuuuuaguagaga

SEQ ID NO: 1276480 - RNA, 24 nt, Human
uuuuuaguagagauagcguuucac

SEQ ID NO: 1276481 - RNA, 20 nt, Human
uuuuuauauuuuuaguagag

SEQ ID NO: 1276482 - RNA, 21 nt, Human
caagaaucaauauuccuccca

SEQ ID NO: 1276483 - RNA, 20 nt, Human
aaaaaaaagauaaaaguaaa

SEQ ID NO: 1276484 - RNA, 25 nt, Human
aaaaaacauauccaaaguaacucaa

SEQ ID NO: 1276485 - RNA, 22 nt, Human
aaaguaacucaagaaaaaagua

SEQ ID NO: 1276486 - RNA, 19 nt, Human
aagcccacacuaucugugc

SEQ ID NO: 1276487 - RNA, 25 nt, Human
aaguaaaagcucaauauuggaccua

SEQ ID NO: 1276488 - RNA, 19 nt, Human
acagcuguuggcuuguuuu

SEQ ID NO: 1276489 - RNA, 21 nt, Human
acucaagaaaaaaguaccaug

SEQ ID NO: 1276490 - RNA, 20 nt, Human
agaagaaaaacauggcuuua

SEQ ID NO: 1276491 - RNA, 23 nt, Human
agaagaaagcuggguccaccgaa

SEQ ID NO: 1276492 - RNA, 19 nt, Human
aggugucuuaaaugccuga

SEQ ID NO: 1276493 - RNA, 20 nt, Human
agucaguaccaaugagucuc

SEQ ID NO: 1276494 - RNA, 19 nt, Human
auccugaagacccugcaac

SEQ ID NO: 1276495 - RNA, 21 nt, Human
aucgaauacgcacgagacccc

SEQ ID NO: 1276496 - RNA, 21 nt, Human
auggcauugaaaaaacauauc

SEQ ID NO: 1276497 - RNA, 24 nt, Human
caaaaacaaaagcauauuucuaac

SEQ ID NO: 1276498 - RNA, 21 nt, Human
caaaauaggcauccugaagac

SEQ ID NO: 1276499 - RNA, 23 nt, Human
caaaauaggcauccugaagaccc

SEQ ID NO: 1276500 - RNA, 21 nt, Human
caaugagucucaacaaauaac

SEQ ID NO: 1276501 - RNA, 20 nt, Human
cagaagaaagcuggguccac

SEQ ID NO: 1276502 - RNA, 23 nt, Human
caguaccaaugagucucaacaaa

SEQ ID NO: 1276503 - RNA, 21 nt, Human
ccacagugcgaggaugagguu

SEQ ID NO: 1276504 - RNA, 19 nt, Human
cccggacgaugaugugagg

SEQ ID NO: 1276505 - RNA, 18 nt, Human
cugaaacuuacauucugc

SEQ ID NO: 1276506 - RNA, 22 nt, Human
cugaaauccagacuuucagcag

SEQ ID NO: 1276507 - RNA, 22 nt, Human
cuguauauuuacugcuacucaa

SEQ ID NO: 1276508 - RNA, 22 nt, Human
gaacacccaguaggaggaaaua

SEQ ID NO: 1276509 - RNA, 24 nt, Human
gagucucaacaaauaaccuaaaua

SEQ ID NO: 1276510 - RNA, 20 nt, Human
gauuggggggggcggggggc

SEQ ID NO: 1276511 - RNA, 22 nt, Human
gcauugaaaaaacauauccaaa

SEQ ID NO: 1276512 - RNA, 20 nt, Human
gcuguauccaaaaaaaaguu

SEQ ID NO: 1276513 - RNA, 18 nt, Human
ggcgggcggugggggagg

SEQ ID NO: 1276514 - RNA, 21 nt, Human
gggcgggcggugggggaggug

SEQ ID NO: 1276515 - RNA, 18 nt, Human
ggggcggggggcgggcgg

SEQ ID NO: 1276516 - RNA, 19 nt, Human
ggggcggggggcgggcggu

SEQ ID NO: 1276517 - RNA, 22 nt, Human
gggggcggggggcgggcggugg

SEQ ID NO: 1276518 - RNA, 18 nt, Human
ggggggcggggggcgggc

SEQ ID NO: 1276519 - RNA, 21 nt, Human
ggggggcggggggcgggcggu

SEQ ID NO: 1276520 - RNA, 27 nt, Human
uaaaaaaaagauaaaaguaaauacuug

SEQ ID NO: 1276521 - RNA, 18 nt, Human
uaaaguguccuaucaccc

SEQ ID NO: 1276522 - RNA, 24 nt, Human
uacaauacaaaauaccuagaagcu

SEQ ID NO: 1276523 - RNA, 21 nt, Human
uacuauuuaccaggagagcuc

SEQ ID NO: 1276524 - RNA, 18 nt, Human
uacuugccauguucuuag

SEQ ID NO: 1276525 - RNA, 18 nt, Human
uagcaauugaaucagugc

SEQ ID NO: 1276526 - RNA, 21 nt, Human
uagugugaagcccacacuauc

SEQ ID NO: 1276527 - RNA, 21 nt, Human
uauaaacugaccuacuuuuaa

SEQ ID NO: 1276528 - RNA, 22 nt, Human
uaucauaucgccuuagaaacau

SEQ ID NO: 1276529 - RNA, 19 nt, Human
uauccaaaaaaaaguucua

SEQ ID NO: 1276530 - RNA, 20 nt, Human
uaucugguuuuuaaaugauu

SEQ ID NO: 1276531 - RNA, 19 nt, Human
uauucugugucuauagugu

SEQ ID NO: 1276532 - RNA, 20 nt, Human
uauucugugucuauagugug

SEQ ID NO: 1276533 - RNA, 21 nt, Human
ucacagaagaaaaacauggcu

SEQ ID NO: 1276534 - RNA, 27 nt, Human
ucgccuuagaaacauuucaguuuuacu

SEQ ID NO: 1276535 - RNA, 24 nt, Human
ucucaacaaauaaccuaaauauca

SEQ ID NO: 1276536 - RNA, 19 nt, Human
ucuuggguuaacuuuugag

SEQ ID NO: 1276537 - RNA, 19 nt, Human
ucuuggguuaacuuuugag

SEQ ID NO: 1276538 - RNA, 18 nt, Human
ugaaaaaacauauccaaa

SEQ ID NO: 1276539 - RNA, 21 nt, Human
ugaacgcaucgaauacgcacg

SEQ ID NO: 1276540 - RNA, 21 nt, Human
ugaagcccacacuaucugugc

SEQ ID NO: 1276541 - RNA, 23 nt, Human
ugaagucucuuuaaagucauauu

SEQ ID NO: 1276542 - RNA, 21 nt, Human
ugacaaguuuuuuugcuagug

SEQ ID NO: 1276543 - RNA, 19 nt, Human
ugagauauacagcuguugg

SEQ ID NO: 1276544 - RNA, 22 nt, Human
ugauaaauugucacagaagaaa

SEQ ID NO: 1276545 - RNA, 18 nt, Human
ugauacaauaccuaucug

SEQ ID NO: 1276546 - RNA, 18 nt, Human
ugccugagguucacugca

SEQ ID NO: 1276547 - RNA, 19 nt, Human
ugccugagguucacugcac

SEQ ID NO: 1276548 - RNA, 21 nt, Human
ugggugcacaaaucuaaaaca

SEQ ID NO: 1276549 - RNA, 18 nt, Human
uguagagacgguuuuuuc

SEQ ID NO: 1276550 - RNA, 24 nt, Human
uguucaaaaacaaaagcauauuuc

SEQ ID NO: 1276551 - RNA, 23 nt, Human
uuaaaugauuccugcuugauuga

SEQ ID NO: 1276552 - RNA, 19 nt, Human
uucaaauuuccccaucugg

SEQ ID NO: 1276553 - RNA, 22 nt, Human
uucaagugccuggaaacuaaca

SEQ ID NO: 1276554 - RNA, 25 nt, Human
uuggcuuguuuugggaccacacuuu

SEQ ID NO: 1276555 - RNA, 19 nt, Human
uuuaaaguguccuaucacc

SEQ ID NO: 1276556 - RNA, 22 nt, Human
uuuccuguuuugccaaugggug

SEQ ID NO: 1276557 - RNA, 25 nt, Human
uuucuuggcaaaauaggcauccuga

SEQ ID NO: 1276558 - RNA, 23 nt, Human
uuugaagucucuuuaaagucaua

SEQ ID NO: 1276559 - RNA, 23 nt, Human
uuuuuugaggucagugcuuuuag

SEQ ID NO: 1276560 - RNA, 20 nt, Human
aaaaagggaaaaaaaauaaa

SEQ ID NO: 1276561 - RNA, 22 nt, Human
aaaauaaaaaucccguuacaaa

SEQ ID NO: 1276562 - RNA, 25 nt, Human
aaacaagcacaagugauguguucuu

SEQ ID NO: 1276563 - RNA, 18 nt, Human
aaacaggauggggagagg

SEQ ID NO: 1276564 - RNA, 21 nt, Human
aaagagaaggcuguuguagua

SEQ ID NO: 1276565 - RNA, 22 nt, Human
aaauagcauuacuauuaaggca

SEQ ID NO: 1276566 - RNA, 22 nt, Human
aagagaaaacaauucaacuuug

SEQ ID NO: 1276567 - RNA, 22 nt, Human
aagcuacauauugcucgcucug

SEQ ID NO: 1276568 - RNA, 22 nt, Human
aagucauucaugauaaaacuga

SEQ ID NO: 1276569 - RNA, 19 nt, Human
aaucagaauugcugacacc

SEQ ID NO: 1276570 - RNA, 21 nt, Human
acccacugccacgcuccuaga

SEQ ID NO: 1276571 - RNA, 22 nt, Human
accuuccgacuugaaaaaaguu

SEQ ID NO: 1276572 - RNA, 22 nt, Human
agaaaacaauucaacuuugauc

SEQ ID NO: 1276573 - RNA, 20 nt, Human
agugauaauggagaaagucc

SEQ ID NO: 1276574 - RNA, 22 nt, Human
aguucuauaggccuuaagugac

SEQ ID NO: 1276575 - RNA, 19 nt, Human
auaaaaaucccguuacaaa

SEQ ID NO: 1276576 - RNA, 19 nt, Human
auaaagcaauauacacaac

SEQ ID NO: 1276577 - RNA, 20 nt, Human
aucuagaacacuaccuggag

SEQ ID NO: 1276578 - RNA, 20 nt, Human
caagugaauagauuagaaga

SEQ ID NO: 1276579 - RNA, 23 nt, Human
caauacaguguaaaauaguauuc

SEQ ID NO: 1276580 - RNA, 19 nt, Human
cacaagugauguguucuuu

SEQ ID NO: 1276581 - RNA, 19 nt, Human
cacccauuaauuccacauc

SEQ ID NO: 1276582 - RNA, 21 nt, Human
cacccauuaauuccacaucac

SEQ ID NO: 1276583 - RNA, 18 nt, Human
cagaaucagaauugcuga

SEQ ID NO: 1276584 - RNA, 22 nt, Human
cagaaucagaauugcugacacc

SEQ ID NO: 1276585 - RNA, 19 nt, Human
cagauacaaguuucccaaa

SEQ ID NO: 1276586 - RNA, 19 nt, Human
caguuugcuucccugauac

SEQ ID NO: 1276587 - RNA, 22 nt, Human
caucuagacuuacuaaauaauu

SEQ ID NO: 1276588 - RNA, 26 nt, Human
caugaaacuagcaauauaucguuuaa

SEQ ID NO: 1276589 - RNA, 24 nt, Human
cucuuauacagugcacauaugaau

SEQ ID NO: 1276590 - RNA, 28 nt, Human
cucuuauuagcuacuaaaaauuggaaag

SEQ ID NO: 1276591 - RNA, 22 nt, Human
cuuaagacaguucugcaaacuu

SEQ ID NO: 1276592 - RNA, 19 nt, Human
gaaacaggauggggagagg

SEQ ID NO: 1276593 - RNA, 24 nt, Human
gauaauggagaaaguccauaaaaa

SEQ ID NO: 1276594 - RNA, 21 nt, Human
gccacgcuccuagauugauug

SEQ ID NO: 1276595 - RNA, 26 nt, Human
ggacagaugagaaaauagcuuuggug

SEQ ID NO: 1276596 - RNA, 21 nt, Human
ggccuuaagugacugcuaaaa

SEQ ID NO: 1276597 - RNA, 24 nt, Human
ggggagagggauuagaaugugaca

SEQ ID NO: 1276598 - RNA, 25 nt, Human
guaaaagccugauccuauuucagaa

SEQ ID NO: 1276599 - RNA, 25 nt, Human
uaaaaaaaaaucuaaaaacuaaacu

SEQ ID NO: 1276600 - RNA, 22 nt, Human
uaaaaacuacauaauaguguua

SEQ ID NO: 1276601 - RNA, 26 nt, Human
uaaaaauaaauaucuuaaauagcauu

SEQ ID NO: 1276602 - RNA, 18 nt, Human
uaaaaaucccguuacaaa

SEQ ID NO: 1276603 - RNA, 23 nt, Human
uaaagcagcauuuaaaaacuaca

SEQ ID NO: 1276604 - RNA, 20 nt, Human
uaagaacaggaccuuccgac

SEQ ID NO: 1276605 - RNA, 22 nt, Human
uaagaguacucucuuauacagu

SEQ ID NO: 1276606 - RNA, 23 nt, Human
uacagugucacaucuaaaguucc

SEQ ID NO: 1276607 - RNA, 24 nt, Human
uagaagaucugaaauguuauaaag

SEQ ID NO: 1276608 - RNA, 23 nt, Human
uaggccuuaagugacugcuaaaa

SEQ ID NO: 1276609 - RNA, 21 nt, Human
uaguaagaacaggaccuuccg

SEQ ID NO: 1276610 - RNA, 21 nt, Human
uaguaugggaauacuuaaagu

SEQ ID NO: 1276611 - RNA, 23 nt, Human
uauacacaacgaauaaauaauuu

SEQ ID NO: 1276612 - RNA, 21 nt, Human
uauugcucgcucuguauuccc

SEQ ID NO: 1276613 - RNA, 24 nt, Human
ucaagcuacauauugcucgcucug

SEQ ID NO: 1276614 - RNA, 20 nt, Human
ucagaaucagaauugcugac

SEQ ID NO: 1276615 - RNA, 21 nt, Human
uccacaggacagaugagaaaa

SEQ ID NO: 1276616 - RNA, 19 nt, Human
uccacaguuccacucaucc

SEQ ID NO: 1276617 - RNA, 20 nt, Human
uccacaucacuuguuccaca

SEQ ID NO: 1276618 - RNA, 20 nt, Human
ucccguuacaaaagugaagu

SEQ ID NO: 1276619 - RNA, 22 nt, Human
ucuaaauuaacccaugaaggaa

SEQ ID NO: 1276620 - RNA, 18 nt, Human
ucugaaauguuauaaagc

SEQ ID NO: 1276621 - RNA, 25 nt, Human
ugaaacuagcaauauaucguuuaaa

SEQ ID NO: 1276622 - RNA, 27 nt, Human
ugaaaucuacacaggcaaaaucagagg

SEQ ID NO: 1276623 - RNA, 19 nt, Human
ugacaagcucaucaaacaa

SEQ ID NO: 1276624 - RNA, 22 nt, Human
ugacaagcucaucaaacaagca

SEQ ID NO: 1276625 - RNA, 21 nt, Human
ugacaccagcagauacaaguu

SEQ ID NO: 1276626 - RNA, 26 nt, Human
ugacaccagcagauacaaguuuccca

SEQ ID NO: 1276627 - RNA, 18 nt, Human
ugauugucuguacagcug

SEQ ID NO: 1276628 - RNA, 21 nt, Human
uguacagcuguugcacccauu

SEQ ID NO: 1276629 - RNA, 22 nt, Human
uguucaaguauaaaaauccaau

SEQ ID NO: 1276630 - RNA, 24 nt, Human
uugcacccauuaauuccacaucac

SEQ ID NO: 1276631 - RNA, 22 nt, Human
uuuaagaauaaaaauugcaagu

SEQ ID NO: 1276632 - RNA, 19 nt, Human
uuuuuuuuuuuaaagcugu

SEQ ID NO: 1276633 - RNA, 19 nt, Human
aaaaaaaccaacgugaaag

SEQ ID NO: 1276634 - RNA, 23 nt, Human
aaaaaaaccaacgugaaaguuga

SEQ ID NO: 1276635 - RNA, 24 nt, Human
aaaaaaccaacgugaaaguugaua

SEQ ID NO: 1276636 - RNA, 22 nt, Human
aaaaaccaacgugaaaguugau

SEQ ID NO: 1276637 - RNA, 21 nt, Human
aaauaaauaaauaaaugaaua

SEQ ID NO: 1276638 - RNA, 20 nt, Human
aacauagugaaaccuugucu

SEQ ID NO: 1276639 - RNA, 21 nt, Human
aacauagugaaaccuugucuc

SEQ ID NO: 1276640 - RNA, 21 nt, Human
aaccacauggcccccaauccc

SEQ ID NO: 1276641 - RNA, 21 nt, Human
aaccuucagccugugcagccc

SEQ ID NO: 1276642 - RNA, 19 nt, Human
aagcccaaggcagaaaucc

SEQ ID NO: 1276643 - RNA, 18 nt, Human
aauuagccaggcauggug

SEQ ID NO: 1276644 - RNA, 18 nt, Human
acaaaggagagugccaaa

SEQ ID NO: 1276645 - RNA, 24 nt, Human
acagagcgagacccugucucuaaa

SEQ ID NO: 1276646 - RNA, 23 nt, Human
accuugucucuacaaaaauacaa

SEQ ID NO: 1276647 - RNA, 19 nt, Human
acuacaaaugucacaaaug

SEQ ID NO: 1276648 - RNA, 18 nt, Human
acucuguucugggcuuug

SEQ ID NO: 1276649 - RNA, 19 nt, Human
acucuguucugggcuuugc

SEQ ID NO: 1276650 - RNA, 24 nt, Human
acugcacuccagccuuggcaacag

SEQ ID NO: 1276651 - RNA, 24 nt, Human
acugcacuccagccuuggcaacag

SEQ ID NO: 1276652 - RNA, 19 nt, Human
acugcacuccagccuuggg

SEQ ID NO: 1276653 - RNA, 21 nt, Human
agaaggaaaaaaucuugagaa

SEQ ID NO: 1276654 - RNA, 23 nt, Human
agccaggcaugguggugugugcc

SEQ ID NO: 1276655 - RNA, 23 nt, Human
agccugggcaacauagugaaacc

SEQ ID NO: 1276656 - RNA, 24 nt, Human
agccugggcaacauagugaaaccu

SEQ ID NO: 1276657 - RNA, 25 nt, Human
agccugggcaacauagugaaaccuu

SEQ ID NO: 1276658 - RNA, 20 nt, Human
aggaaggauuucauuuggca

SEQ ID NO: 1276659 - RNA, 28 nt, Human
aggagcagcagaggauggaccgguaccc

SEQ ID NO: 1276660 - RNA, 18 nt, Human
aggcaugguggugugugc

SEQ ID NO: 1276661 - RNA, 20 nt, Human
aggcccuaugaaugcaggug

SEQ ID NO: 1276662 - RNA, 24 nt, Human
aggcugaggguggaggaucgcuug

SEQ ID NO: 1276663 - RNA, 24 nt, Human
agguggagguugcagugagccaag

SEQ ID NO: 1276664 - RNA, 19 nt, Human
agucugggugcaguggcuc

SEQ ID NO: 1276665 - RNA, 22 nt, Human
aguggcucaugccuguaauccc

SEQ ID NO: 1276666 - RNA, 22 nt, Human
aguggcucaugccuguaauccc

SEQ ID NO: 1276667 - RNA, 24 nt, Human
aguggcucaugccuguaaucccgg

SEQ ID NO: 1276668 - RNA, 23 nt, Human
auaaaaaacauauaagccauuaa

SEQ ID NO: 1276669 - RNA, 25 nt, Human
aucaacuacccuuucaacaguucaa

SEQ ID NO: 1276670 - RNA, 22 nt, Human
aucccggcacuuugggaggcca

SEQ ID NO: 1276671 - RNA, 23 nt, Human
aucgcuugagcccaggaggugga

SEQ ID NO: 1276672 - RNA, 25 nt, Human
aucguuccacugcacuccagccuug

SEQ ID NO: 1276673 - RNA, 23 nt, Human
aucuaugcuggucaagucucccc

SEQ ID NO: 1276674 - RNA, 18 nt, Human
augcaauuuguuuuaaag

SEQ ID NO: 1276675 - RNA, 19 nt, Human
augccuguaaucccggcac

SEQ ID NO: 1276676 - RNA, 20 nt, Human
auuacaaaaaggcccuauga

SEQ ID NO: 1276677 - RNA, 20 nt, Human
caacagagcgagacccuguc

SEQ ID NO: 1276678 - RNA, 22 nt, Human
caacagagcgagacccugucuc

SEQ ID NO: 1276679 - RNA, 21 nt, Human
caacauagugaaaccuugucu

SEQ ID NO: 1276680 - RNA, 22 nt, Human
caacauagugaaaccuugucuc

SEQ ID NO: 1276681 - RNA, 24 nt, Human
caacauagugaaaccuugucucua

SEQ ID NO: 1276682 - RNA, 20 nt, Human
caacuggaauaaaacaucuu

SEQ ID NO: 1276683 - RNA, 22 nt, Human
caaucccaguccuuagcaugaa

SEQ ID NO: 1276684 - RNA, 19 nt, Human
cacaaggcaggaguaaaca

SEQ ID NO: 1276685 - RNA, 21 nt, Human
cacaaucauccuuaagcccaa

SEQ ID NO: 1276686 - RNA, 23 nt, Human
cacuccagccuuggcaacagagc

SEQ ID NO: 1276687 - RNA, 19 nt, Human
cacugcacuccagccuugg

SEQ ID NO: 1276688 - RNA, 21 nt, Human
cacugcacuccagccuuggca

SEQ ID NO: 1276689 - RNA, 22 nt, Human
cacugcacuccagccuuggcaa

SEQ ID NO: 1276690 - RNA, 23 nt, Human
cacugcacuccagccuuggcaac

SEQ ID NO: 1276691 - RNA, 24 nt, Human
cacugcacuccagccuuggcaaca

SEQ ID NO: 1276692 - RNA, 22 nt, Human
cagauuaaaaaaaccaacguga

SEQ ID NO: 1276693 - RNA, 23 nt, Human
cagcauaaaaaacauauaagcca

SEQ ID NO: 1276694 - RNA, 29 nt, Human
caggagguggagguugcagugacaacggu

SEQ ID NO: 1276695 - RNA, 24 nt, Human
caggagguggagguugcagugagc

SEQ ID NO: 1276696 - RNA, 21 nt, Human
caguuuaaaauguaaauucua

SEQ ID NO: 1276697 - RNA, 18 nt, Human
caugaagaaacaaucaua

SEQ ID NO: 1276698 - RNA, 20 nt, Human
caugccuguaaucccggcac

SEQ ID NO: 1276699 - RNA, 24 nt, Human
caugccuguaaucccggcacuuug

SEQ ID NO: 1276700 - RNA, 20 nt, Human
ccacugcacuccagccuugg

SEQ ID NO: 1276701 - RNA, 20 nt, Human
ccacugcacuccagccuugg

SEQ ID NO: 1276702 - RNA, 21 nt, Human
ccacugcacuccagccuuggc

SEQ ID NO: 1276703 - RNA, 24 nt, Human
ccacugcacuccagccuuggcaac

SEQ ID NO: 1276704 - RNA, 21 nt, Human
cccaggagguggagguugcag

SEQ ID NO: 1276705 - RNA, 23 nt, Human
cccccucgcucuuuuuuuaaaag

SEQ ID NO: 1276706 - RNA, 21 nt, Human
ccccgccacaaggcaggaguu

SEQ ID NO: 1276707 - RNA, 18 nt, Human
cccguagucccagcuacu

SEQ ID NO: 1276708 - RNA, 21 nt, Human
cccguagucccagcuacuugg

SEQ ID NO: 1276709 - RNA, 22 nt, Human
cccguagucccagcuacuuggg

SEQ ID NO: 1276710 - RNA, 21 nt, Human
ccugggcaacauagugaaacc

SEQ ID NO: 1276711 - RNA, 24 nt, Human
ccugggcaacauagugaaaccuug

SEQ ID NO: 1276712 - RNA, 19 nt, Human
ccuucacaacacagagaaa

SEQ ID NO: 1276713 - RNA, 21 nt, Human
cgccacaaggcaggaguaaac

SEQ ID NO: 1276714 - RNA, 24 nt, Human
cggcacuuugggaggccaaggugg

SEQ ID NO: 1276715 - RNA, 19 nt, Human
cguuccacugcacuccagc

SEQ ID NO: 1276716 - RNA, 26 nt, Human
cuaaccuucagccugugcagcccaca

SEQ ID NO: 1276717 - RNA, 23 nt, Human
cucaugccuguaaucccggcacu

SEQ ID NO: 1276718 - RNA, 24 nt, Human
cucaugccuguaaucccggcacuu

SEQ ID NO: 1276719 - RNA, 21 nt, Human
cuggaggaacuugacaaacau

SEQ ID NO: 1276720 - RNA, 21 nt, Human
cuggcagaagagaagggcaaa

SEQ ID NO: 1276721 - RNA, 23 nt, Human
cugggauagagauuaguucucau

SEQ ID NO: 1276722 - RNA, 18 nt, Human
cuuauccucuauuuaacc

SEQ ID NO: 1276723 - RNA, 20 nt, Human
cuugaguuuuuucagucugg

SEQ ID NO: 1276724 - RNA, 19 nt, Human
cuuugcuggaggaacuuga

SEQ ID NO: 1276725 - RNA, 20 nt, Human
gagaaugaaugcuuucuuau

SEQ ID NO: 1276726 - RNA, 18 nt, Human
gagguugcagugagccaa

SEQ ID NO: 1276727 - RNA, 23 nt, Human
gagguugcagugagccaagaucg

SEQ ID NO: 1276728 - RNA, 24 nt, Human
gaucgcuugagcccaggaggugga

SEQ ID NO: 1276729 - RNA, 18 nt, Human
gcacauauauauguuaag

SEQ ID NO: 1276730 - RNA, 24 nt, Human
gcacuccagccuuggcaacagagc

SEQ ID NO: 1276731 - RNA, 20 nt, Human
gcacuuugggaggccaaggu

SEQ ID NO: 1276732 - RNA, 23 nt, Human
gcacuuugggaggccaagguggg

SEQ ID NO: 1276733 - RNA, 24 nt, Human
gcccaggagguggagguugcagug

SEQ ID NO: 1276734 - RNA, 20 nt, Human
ggagaaugggggugaauuug

SEQ ID NO: 1276735 - RNA, 20 nt, Human
ggagguugcagugagccaag

SEQ ID NO: 1276736 - RNA, 23 nt, Human
ggagguugcagugagccaagauc

SEQ ID NO: 1276737 - RNA, 24 nt, Human
ggagguugcagugagccaagaucg

SEQ ID NO: 1276738 - RNA, 18 nt, Human
ggcccuaugaaugcaggu

SEQ ID NO: 1276739 - RNA, 19 nt, Human
gggagaaugaaugcuuucu

SEQ ID NO: 1276740 - RNA, 23 nt, Human
ggugcaguggcucaugccuguaa

SEQ ID NO: 1276741 - RNA, 21 nt, Human
gguggaggaucgcuugagccc

SEQ ID NO: 1276742 - RNA, 25 nt, Human
uaaaaccauagacauacagcauaaa

SEQ ID NO: 1276743 - RNA, 23 nt, Human
uaagcccaaggcagaaaucccag

SEQ ID NO: 1276744 - RNA, 22 nt, Human
uacauaaaucaucuccuuaucc

SEQ ID NO: 1276745 - RNA, 22 nt, Human
uacccuuucaacaguucaaagc

SEQ ID NO: 1276746 - RNA, 22 nt, Human
uagccaggcaugguggugugug

SEQ ID NO: 1276747 - RNA, 22 nt, Human
uauaagaugaaaagcaguggag

SEQ ID NO: 1276748 - RNA, 21 nt, Human
uaucuacucugcacauauaua

SEQ ID NO: 1276749 - RNA, 24 nt, Human
uaucuacucugcacauauauaugu

SEQ ID NO: 1276750 - RNA, 24 nt, Human
uaugaucaacuacccuuucaacag

SEQ ID NO: 1276751 - RNA, 19 nt, Human
ucaaagcaguaaugaugac

SEQ ID NO: 1276752 - RNA, 21 nt, Human
uccacugcacuccagccuugg

SEQ ID NO: 1276753 - RNA, 23 nt, Human
uccagccuuggcaacagagcgag

SEQ ID NO: 1276754 - RNA, 24 nt, Human
uccagccuuggcaacagagcgaga

SEQ ID NO: 1276755 - RNA, 19 nt, Human
ucccagauaucuacucuga

SEQ ID NO: 1276756 - RNA, 23 nt, Human
ucccaguccuuagcaugaaccuu

SEQ ID NO: 1276757 - RNA, 20 nt, Human
ucccccucgcucuuuuuuua

SEQ ID NO: 1276758 - RNA, 24 nt, Human
ucgcuugagcccaggagguggagg

SEQ ID NO: 1276759 - RNA, 27 nt, Human
ucucagacugcauagaagaugaacccu

SEQ ID NO: 1276760 - RNA, 18 nt, Human
ucucuaaauaaauaaaua

SEQ ID NO: 1276761 - RNA, 21 nt, Human
ucucuacaaaaauacaaaaaa

SEQ ID NO: 1276762 - RNA, 21 nt, Human
ucuguucugggcuuugcugga

SEQ ID NO: 1276763 - RNA, 23 nt, Human
ucuugaguuuuuucagucuggag

SEQ ID NO: 1276764 - RNA, 20 nt, Human
ugaacaacaacucuguucug

SEQ ID NO: 1276765 - RNA, 19 nt, Human
ugaagaaacaaucauauuc

SEQ ID NO: 1276766 - RNA, 23 nt, Human
ugagcuccggaguuugaggccag

SEQ ID NO: 1276767 - RNA, 24 nt, Human
ugaggccagccugggcaacauagu

SEQ ID NO: 1276768 - RNA, 22 nt, Human
ugcaauuuguuuuaaaggagca

SEQ ID NO: 1276769 - RNA, 24 nt, Human
ugcccguagucccagcuacuuggg

SEQ ID NO: 1276770 - RNA, 23 nt, Human
ugccuguaaucccggcacuuugg

SEQ ID NO: 1276771 - RNA, 24 nt, Human
ugccuguaaucccggcacuuuggg

SEQ ID NO: 1276772 - RNA, 22 nt, Human
ugcuuuauuccuucacaacaca

SEQ ID NO: 1276773 - RNA, 18 nt, Human
uggaagguggcuuucuca

SEQ ID NO: 1276774 - RNA, 20 nt, Human
uggcccccaaucccaguccu

SEQ ID NO: 1276775 - RNA, 24 nt, Human
uggcucaugccuguaaucccggca

SEQ ID NO: 1276776 - RNA, 18 nt, Human
ugggaagacugcuugagc

SEQ ID NO: 1276777 - RNA, 20 nt, Human
ugggaggccaaggugggaag

SEQ ID NO: 1276778 - RNA, 23 nt, Human
ugggaggcugaggguggaggauc

SEQ ID NO: 1276779 - RNA, 19 nt, Human
ugggauagagauuaguucu

SEQ ID NO: 1276780 - RNA, 24 nt, Human
ugggcaacauagugaaaccuuguc

SEQ ID NO: 1276781 - RNA, 24 nt, Human
ugguggugugugcccguaguccca

SEQ ID NO: 1276782 - RNA, 18 nt, Human
uggugugugcccguaguc

SEQ ID NO: 1276783 - RNA, 24 nt, Human
uggugugugcccguagucccagcu

SEQ ID NO: 1276784 - RNA, 21 nt, Human
ugucauaaaguauuuaugaag

SEQ ID NO: 1276785 - RNA, 18 nt, Human
ugugguagaaagagauaa

SEQ ID NO: 1276786 - RNA, 20 nt, Human
uguuuuaaaggagcagcaga

SEQ ID NO: 1276787 - RNA, 18 nt, Human
uuagaaggaaaaaaucuu

SEQ ID NO: 1276788 - RNA, 20 nt, Human
uuagaugccuuaaaagcacc

SEQ ID NO: 1276789 - RNA, 24 nt, Human
uuagccaggcaugguggugugugc

SEQ ID NO: 1276790 - RNA, 19 nt, Human
uuccacugcacuccagccu

SEQ ID NO: 1276791 - RNA, 24 nt, Human
uugagcccaggagguggagguugc

SEQ ID NO: 1276792 - RNA, 20 nt, Human
uugcagugagccaagaucgu

SEQ ID NO: 1276793 - RNA, 23 nt, Human
uugcuuuauuccuucacaacaca

SEQ ID NO: 1276794 - RNA, 24 nt, Human
uugggaggcugaggguggaggauc

SEQ ID NO: 1276795 - RNA, 21 nt, Human
uuguaaagaguucagugugug

SEQ ID NO: 1276796 - RNA, 19 nt, Human
uuuuucagucuggaaggug

SEQ ID NO: 1276797 - RNA, 19 nt, Human
aaacaaaaaccuacaaaga

SEQ ID NO: 1276798 - RNA, 18 nt, Human
aaaccccaucagaaugac

SEQ ID NO: 1276799 - RNA, 19 nt, Human
aaaccuccaggccucuccc

SEQ ID NO: 1276800 - RNA, 21 nt, Human
aacaaaagugauaauguccau

SEQ ID NO: 1276801 - RNA, 21 nt, Human
aagaaggacuagaaucagaua

SEQ ID NO: 1276802 - RNA, 26 nt, Human
aagcaaguacaguguuuggaaaacaa

SEQ ID NO: 1276803 - RNA, 19 nt, Human
aagcagcaucuuuguugag

SEQ ID NO: 1276804 - RNA, 20 nt, Human
aagcagguugcugaauccca

SEQ ID NO: 1276805 - RNA, 20 nt, Human
aagcagguugcugaauccca

SEQ ID NO: 1276806 - RNA, 18 nt, Human
aagcuucccagagcuugc

SEQ ID NO: 1276807 - RNA, 19 nt, Human
aaugcacaacuacagacaa

SEQ ID NO: 1276808 - RNA, 21 nt, Human
acaaacaaaaaccuacaaaga

SEQ ID NO: 1276809 - RNA, 20 nt, Human
acaacuacagacaacaaaaa

SEQ ID NO: 1276810 - RNA, 18 nt, Human
acagacaacaaaaaccgu

SEQ ID NO: 1276811 - RNA, 19 nt, Human
acaguguuuggaaaacaaa

SEQ ID NO: 1276812 - RNA, 19 nt, Human
acgggaaggagagacggca

SEQ ID NO: 1276813 - RNA, 19 nt, Human
agaaauucccuuauuacca

SEQ ID NO: 1276814 - RNA, 22 nt, Human
agaagcuagagaucagggugcc

SEQ ID NO: 1276815 - RNA, 22 nt, Human
agaucaaggggcuggaaggaug

SEQ ID NO: 1276816 - RNA, 21 nt, Human
agcauccuccuuucauugugg

SEQ ID NO: 1276817 - RNA, 19 nt, Human
agcccgggagagacggcag

SEQ ID NO: 1276818 - RNA, 18 nt, Human
agccuuccggguuacagg

SEQ ID NO: 1276819 - RNA, 25 nt, Human
aggaagccuugaaauccuuugccaa

SEQ ID NO: 1276820 - RNA, 26 nt, Human
aggcagagagggagcaagggaucuag

SEQ ID NO: 1276821 - RNA, 21 nt, Human
aggcagggaugggagaagcag

SEQ ID NO: 1276822 - RNA, 20 nt, Human
aggcaggguacagcccggga

SEQ ID NO: 1276823 - RNA, 19 nt, Human
aggcaucagagauccauuc

SEQ ID NO: 1276824 - RNA, 18 nt, Human
agggauggauuucugcac

SEQ ID NO: 1276825 - RNA, 23 nt, Human
aguaaugggcaacgcucaaggaa

SEQ ID NO: 1276826 - RNA, 21 nt, Human
aucucauuaugagggccccac

SEQ ID NO: 1276827 - RNA, 24 nt, Human
augcuggcgccacuccagccgcgu

SEQ ID NO: 1276828 - RNA, 22 nt, Human
auggugguggcugcugcgccuu

SEQ ID NO: 1276829 - RNA, 21 nt, Human
auuaaucccuaaaacuuucag

SEQ ID NO: 1276830 - RNA, 19 nt, Human
auucugggggcuacaaaca

SEQ ID NO: 1276831 - RNA, 22 nt, Human
auuggcuccuguagaaaguaaa

SEQ ID NO: 1276832 - RNA, 21 nt, Human
auugucuacaccuccugaagu

SEQ ID NO: 1276833 - RNA, 19 nt, Human
caaacaaaaaccuacaaag

SEQ ID NO: 1276834 - RNA, 26 nt, Human
caaacaaaaaccuacaaagaguucua

SEQ ID NO: 1276835 - RNA, 28 nt, Human
caaacaaaaaccuacaaagaguucuaga

SEQ ID NO: 1276836 - RNA, 18 nt, Human
cacaggccacagagaagc

SEQ ID NO: 1276837 - RNA, 19 nt, Human
cacucagacuuuuccuaca

SEQ ID NO: 1276838 - RNA, 18 nt, Human
cacuggugauugcaggca

SEQ ID NO: 1276839 - RNA, 22 nt, Human
cagcacaguggggauuagggag

SEQ ID NO: 1276840 - RNA, 19 nt, Human
caggacaaaccgucccacc

SEQ ID NO: 1276841 - RNA, 22 nt, Human
caucacaccaaaaccuaagacu

SEQ ID NO: 1276842 - RNA, 22 nt, Human
caucagaaugacgggcuaaucc

SEQ ID NO: 1276843 - RNA, 24 nt, Human
caucaggaguccuuaggaauaggg

SEQ ID NO: 1276844 - RNA, 21 nt, Human
ccaagaagagguuuaaaucuc

SEQ ID NO: 1276845 - RNA, 22 nt, Human
ccagcauggcuggguucuggga

SEQ ID NO: 1276846 - RNA, 18 nt, Human
ccaggacuuauuuucaug

SEQ ID NO: 1276847 - RNA, 23 nt, Human
ccagugaggggccggacgaaggu

SEQ ID NO: 1276848 - RNA, 18 nt, Human
cccacgucugacuuuccu

SEQ ID NO: 1276849 - RNA, 22 nt, Human
cccauggcacaggccacagaga

SEQ ID NO: 1276850 - RNA, 28 nt, Human
cccccuacccccauuucuccaggaagcc

SEQ ID NO: 1276851 - RNA, 23 nt, Human
cccucaccauccuaauguaccua

SEQ ID NO: 1276852 - RNA, 20 nt, Human
cccuuauuaccaccccggcc

SEQ ID NO: 1276853 - RNA, 21 nt, Human
cccuuuuguggcuuucccucc

SEQ ID NO: 1276854 - RNA, 23 nt, Human
ccuccugaaguuuccugucaccu

SEQ ID NO: 1276855 - RNA, 22 nt, Human
ccuugugccagccucagucuuc

SEQ ID NO: 1276856 - RNA, 21 nt, Human
cgcagauaagcaaaaugacug

SEQ ID NO: 1276857 - RNA, 19 nt, Human
cgccuucggcccccuuugc

SEQ ID NO: 1276858 - RNA, 20 nt, Human
cgugcagacucgagcaggaa

SEQ ID NO: 1276859 - RNA, 25 nt, Human
cuauagcccccuuuuguggcuuucc

SEQ ID NO: 1276860 - RNA, 24 nt, Human
cucacaguucuggaggcugagaag

SEQ ID NO: 1276861 - RNA, 24 nt, Human
cuccauaacaaaccgugggguacc

SEQ ID NO: 1276862 - RNA, 19 nt, Human
cucccccuacccccauuuc

SEQ ID NO: 1276863 - RNA, 27 nt, Human
cucccccuacccccauuucuccaggaa

SEQ ID NO: 1276864 - RNA, 23 nt, Human
cucugccuugcugaaaacuggag

SEQ ID NO: 1276865 - RNA, 19 nt, Human
cugauuaucacaggagaua

SEQ ID NO: 1276866 - RNA, 18 nt, Human
cugcugggugaagacagg

SEQ ID NO: 1276867 - RNA, 19 nt, Human
cuggaaauaccucaucuuc

SEQ ID NO: 1276868 - RNA, 22 nt, Human
cuuauuaccaccccggccagac

SEQ ID NO: 1276869 - RNA, 22 nt, Human
cuugggcgaagcuguuggagcu

SEQ ID NO: 1276870 - RNA, 22 nt, Human
cuuucauugugggaccuucuca

SEQ ID NO: 1276871 - RNA, 22 nt, Human
cuuuccuuuuuauaucuggggu

SEQ ID NO: 1276872 - RNA, 22 nt, Human
gaaaacaaacaaaaaccuacaa

SEQ ID NO: 1276873 - RNA, 24 nt, Human
gaaaacaaacaaaaaccuacaaag

SEQ ID NO: 1276874 - RNA, 20 nt, Human
gaagagcaaauauggcucau

SEQ ID NO: 1276875 - RNA, 21 nt, Human
gaaucccaguuuucacuucua

SEQ ID NO: 1276876 - RNA, 21 nt, Human
gagcaggacaaaccgucccac

SEQ ID NO: 1276877 - RNA, 23 nt, Human
gaguccuuaggaauagggauggg

SEQ ID NO: 1276878 - RNA, 20 nt, Human
gagugugggaggcaggaagg

SEQ ID NO: 1276879 - RNA, 19 nt, Human
gaucccucccccuaccccc

SEQ ID NO: 1276880 - RNA, 18 nt, Human
gcaccagaguuccugggg

SEQ ID NO: 1276881 - RNA, 18 nt, Human
gcagauccuggaagcagc

SEQ ID NO: 1276882 - RNA, 24 nt, Human
gccccaccuccuaauaccagcaca

SEQ ID NO: 1276883 - RNA, 19 nt, Human
gcgcaaaaccuccaggccu

SEQ ID NO: 1276884 - RNA, 22 nt, Human
gcuccagccagugucugccugc

SEQ ID NO: 1276885 - RNA, 24 nt, Human
ggaaaacaaacaaaaaccuacaaa

SEQ ID NO: 1276886 - RNA, 22 nt, Human
ggaaauaccucaucuuccagaa

SEQ ID NO: 1276887 - RNA, 22 nt, Human
ggauuugggagugugggaggca

SEQ ID NO: 1276888 - RNA, 19 nt, Human
ggcagagagggagcaaggg

SEQ ID NO: 1276889 - RNA, 20 nt, Human
ggcagggaugggagaagcag

SEQ ID NO: 1276890 - RNA, 21 nt, Human
ggcgaagcuguuggagcuggg

SEQ ID NO: 1276891 - RNA, 21 nt, Human
ggguuacaggcacaagggcca

SEQ ID NO: 1276892 - RNA, 18 nt, Human
ggugguggcugcugcgcc

SEQ ID NO: 1276893 - RNA, 19 nt, Human
ggugguggcugcugcgccu

SEQ ID NO: 1276894 - RNA, 25 nt, Human
gucaccuucucuucaaguagcuuug

SEQ ID NO: 1276895 - RNA, 20 nt, Human
gucacuaaucucauuaugag

SEQ ID NO: 1276896 - RNA, 21 nt, Human
gugaagagcaaauauggcuca

SEQ ID NO: 1276897 - RNA, 18 nt, Human
guggcugcugcgccuucg

SEQ ID NO: 1276898 - RNA, 19 nt, Human
gugggaggcaggaaggccg

SEQ ID NO: 1276899 - RNA, 23 nt, Human
guggugggcaggcaucagagauc

SEQ ID NO: 1276900 - RNA, 22 nt, Human
uaaugcacaacuacagacaaca

SEQ ID NO: 1276901 - RNA, 23 nt, Human
uaaugcacaacuacagacaacaa

SEQ ID NO: 1276902 - RNA, 23 nt, Human
uaccagcacaguggggauuagga

SEQ ID NO: 1276903 - RNA, 18 nt, Human
uaggggagacugaaggca

SEQ ID NO: 1276904 - RNA, 18 nt, Human
uaggggagacugaaggca

SEQ ID NO: 1276905 - RNA, 24 nt, Human
uaugaaaguggcgaucaaagcuag

SEQ ID NO: 1276906 - RNA, 21 nt, Human
ucaaggaaaaccccaucagaa

SEQ ID NO: 1276907 - RNA, 19 nt, Human
ucacuuggccuuucacugg

SEQ ID NO: 1276908 - RNA, 21 nt, Human
ucaucuaacccuaaucacauc

SEQ ID NO: 1276909 - RNA, 22 nt, Human
uccacauauggauucugggggc

SEQ ID NO: 1276910 - RNA, 18 nt, Human
uccacucagacuuuuccu

SEQ ID NO: 1276911 - RNA, 24 nt, Human
uccaucacaccaaaaccuaagacu

SEQ ID NO: 1276912 - RNA, 22 nt, Human
ucccagagcuugcugaaagaca

SEQ ID NO: 1276913 - RNA, 21 nt, Human
ucccugaggacaauuucucug

SEQ ID NO: 1276914 - RNA, 21 nt, Human
uccucacuuggccuuucacug

SEQ ID NO: 1276915 - RNA, 18 nt, Human
uccuuuuuauaucugggg

SEQ ID NO: 1276916 - RNA, 19 nt, Human
ucuaacccuaaucacaucc

SEQ ID NO: 1276917 - RNA, 23 nt, Human
ucuauagcaagaaggaccggggc

SEQ ID NO: 1276918 - RNA, 19 nt, Human
ucucccugaggacaauuuc

SEQ ID NO: 1276919 - RNA, 23 nt, Human
ucuggaaauaccucaucuuccag

SEQ ID NO: 1276920 - RNA, 18 nt, Human
ugacaguacugagcuuaa

SEQ ID NO: 1276921 - RNA, 18 nt, Human
ugaggaccacgagguccu

SEQ ID NO: 1276922 - RNA, 20 nt, Human
ugaggaccacgagguccucu

SEQ ID NO: 1276923 - RNA, 21 nt, Human
ugauaaggucacuaaucucau

SEQ ID NO: 1276924 - RNA, 18 nt, Human
ugcacagauucugggugu

SEQ ID NO: 1276925 - RNA, 24 nt, Human
ugccagcauggcuggguucuggga

SEQ ID NO: 1276926 - RNA, 21 nt, Human
ugccagggcuuaacgaucccu

SEQ ID NO: 1276927 - RNA, 20 nt, Human
ugccugguucucauuaguga

SEQ ID NO: 1276928 - RNA, 20 nt, Human
ugcugaaaacuggagcugcu

SEQ ID NO: 1276929 - RNA, 21 nt, Human
ugcuguucugcauaagcuuug

SEQ ID NO: 1276930 - RNA, 21 nt, Human
uggaaaacaaacaaaaaccua

SEQ ID NO: 1276931 - RNA, 23 nt, Human
uggaaaacaaacaaaaaccuaca

SEQ ID NO: 1276932 - RNA, 19 nt, Human
uggagauucuucucagaaa

SEQ ID NO: 1276933 - RNA, 24 nt, Human
uggauucugggggcuacaaacauu

SEQ ID NO: 1276934 - RNA, 23 nt, Human
uggcuuucccuccauaacaaacc

SEQ ID NO: 1276935 - RNA, 19 nt, Human
ugggagaagcaggcagggu

SEQ ID NO: 1276936 - RNA, 24 nt, Human
ugucucauccucuugauaagguca

SEQ ID NO: 1276937 - RNA, 21 nt, Human
ugucuugggacaugguucugc

SEQ ID NO: 1276938 - RNA, 27 nt, Human
uuaaugcacaacuacagacaacaaaaa

SEQ ID NO: 1276939 - RNA, 21 nt, Human
uuccaucacaccaaaaccuaa

SEQ ID NO: 1276940 - RNA, 18 nt, Human
uucucaguuuggacauaa

SEQ ID NO: 1276941 - RNA, 20 nt, Human
uucucaguuuggacauaauc

SEQ ID NO: 1276942 - RNA, 22 nt, Human
uugaaaggaaacgggaaggaga

SEQ ID NO: 1276943 - RNA, 21 nt, Human
uugagcguacacuccccaaac

SEQ ID NO: 1276944 - RNA, 25 nt, Human
uuggugcugauuaucacaggagaua

SEQ ID NO: 1276945 - RNA, 23 nt, Human
uuuauaagcuucccagagcuugc

SEQ ID NO: 1276946 - RNA, 18 nt, Human
uuuccugucaccuucucu

SEQ ID NO: 1276947 - RNA, 19 nt, Human
uuugucuguaaccgugaga

SEQ ID NO: 1276948 - RNA, 18 nt, Human
uuuguggcuuucccucca

SEQ ID NO: 1276949 - RNA, 18 nt, Human
aaaaaaccaaaacuaaga

SEQ ID NO: 1276950 - RNA, 20 nt, Human
aaaaggcaggauaaguagug

SEQ ID NO: 1276951 - RNA, 21 nt, Human
aaaugaacauuuuuacuucca

SEQ ID NO: 1276952 - RNA, 19 nt, Human
aaauuccucagugcuuuuc

SEQ ID NO: 1276953 - RNA, 18 nt, Human
aaccuauuccaucagcag

SEQ ID NO: 1276954 - RNA, 21 nt, Human
aacuucacacucaaacagggc

SEQ ID NO: 1276955 - RNA, 21 nt, Human
aagaaaccagaaaucuuccag

SEQ ID NO: 1276956 - RNA, 24 nt, Human
aagaaaccagaaaucuuccaggca

SEQ ID NO: 1276957 - RNA, 25 nt, Human
aagaacauaaaagaaaauaaauuau

SEQ ID NO: 1276958 - RNA, 19 nt, Human
aagggucuuuucaagcagg

SEQ ID NO: 1276959 - RNA, 22 nt, Human
aaguaaauccuaauagaaccaa

SEQ ID NO: 1276960 - RNA, 18 nt, Human
acaauuuugcuaaccccu

SEQ ID NO: 1276961 - RNA, 19 nt, Human
acacaaagucuugcacaua

SEQ ID NO: 1276962 - RNA, 21 nt, Human
acacacuuugugucucagagc

SEQ ID NO: 1276963 - RNA, 20 nt, Human
acacaucguacccaugucca

SEQ ID NO: 1276964 - RNA, 21 nt, Human
accccuuugucuagacuacaa

SEQ ID NO: 1276965 - RNA, 21 nt, Human
accugcaucacacaacaaaga

SEQ ID NO: 1276966 - RNA, 21 nt, Human
acuucaaacugugagcugaag

SEQ ID NO: 1276967 - RNA, 21 nt, Human
acuucacacucaaacagggca

SEQ ID NO: 1276968 - RNA, 21 nt, Human
agaaaccagaaaucuuccagg

SEQ ID NO: 1276969 - RNA, 20 nt, Human
agagagaaaacaccugaaga

SEQ ID NO: 1276970 - RNA, 19 nt, Human
agaggaaaacagacaugga

SEQ ID NO: 1276971 - RNA, 21 nt, Human
agcaaaacacaucguacccau

SEQ ID NO: 1276972 - RNA, 19 nt, Human
agcaacuuuccucuugugu

SEQ ID NO: 1276973 - RNA, 19 nt, Human
agcaggaaagccuucauca

SEQ ID NO: 1276974 - RNA, 20 nt, Human
agcucaguaccguacagcaa

SEQ ID NO: 1276975 - RNA, 18 nt, Human
aggagcucgcgcgaggag

SEQ ID NO: 1276976 - RNA, 22 nt, Human
agggagguucccguggaggagg

SEQ ID NO: 1276977 - RNA, 19 nt, Human
aggggugaggcugauuggg

SEQ ID NO: 1276978 - RNA, 18 nt, Human
agugaaagaaaccagaaa

SEQ ID NO: 1276979 - RNA, 21 nt, Human
auaaauccaaaccacaaaaca

SEQ ID NO: 1276980 - RNA, 21 nt, Human
auaacacaccacaccccugcc

SEQ ID NO: 1276981 - RNA, 23 nt, Human
auuaacuagaaaaaaagacugcc

SEQ ID NO: 1276982 - RNA, 19 nt, Human
caaaaaggcaggauaagua

SEQ ID NO: 1276983 - RNA, 25 nt, Human
caacauguuaagcugcacucugccc

SEQ ID NO: 1276984 - RNA, 22 nt, Human
caacugccaucauagaacaucc

SEQ ID NO: 1276985 - RNA, 21 nt, Human
cacaauacacggagacacaag

SEQ ID NO: 1276986 - RNA, 23 nt, Human
cacaaugcuaucuaaacuagauu

SEQ ID NO: 1276987 - RNA, 18 nt, Human
cacugcugucagugcucc

SEQ ID NO: 1276988 - RNA, 25 nt, Human
caggauaaguagugaaagaaaccag

SEQ ID NO: 1276989 - RNA, 21 nt, Human
cagugcuuuucauucuccuua

SEQ ID NO: 1276990 - RNA, 24 nt, Human
ccaaucaagucaacauguggccaa

SEQ ID NO: 1276991 - RNA, 21 nt, Human
ccaugaauacgaaaggaggga

SEQ ID NO: 1276992 - RNA, 22 nt, Human
ccauguauacuauucucauccu

SEQ ID NO: 1276993 - RNA, 24 nt, Human
ccucagugcuuuucauucuccuua

SEQ ID NO: 1276994 - RNA, 19 nt, Human
ccugccgucugucuggcag

SEQ ID NO: 1276995 - RNA, 18 nt, Human
cggcggcccagggcccgg

SEQ ID NO: 1276996 - RNA, 19 nt, Human
cguacccauguccagagcu

SEQ ID NO: 1276997 - RNA, 20 nt, Human
cuacccaagggaauggaacc

SEQ ID NO: 1276998 - RNA, 19 nt, Human
cucagugcuuuucauucuc

SEQ ID NO: 1276999 - RNA, 19 nt, Human
cuuucccuacaucaugaaa

SEQ ID NO: 1277000 - RNA, 23 nt, Human
gaacauccaugaauacgaaagga

SEQ ID NO: 1277001 - RNA, 21 nt, Human
gaagcaaaacacaucguaccc

SEQ ID NO: 1277002 - RNA, 22 nt, Human
gcccagggcccgggagccgcuc

SEQ ID NO: 1277003 - RNA, 23 nt, Human
gcgcacuguaccugcaucacaca

SEQ ID NO: 1277004 - RNA, 24 nt, Human
gcgcacuguaccugcaucacacaa

SEQ ID NO: 1277005 - RNA, 24 nt, Human
gcuccggcugcggcggcgccuggg

SEQ ID NO: 1277006 - RNA, 18 nt, Human
ggcauacauauucccgaa

SEQ ID NO: 1277007 - RNA, 21 nt, Human
ggcggcggcccagggcccggg

SEQ ID NO: 1277008 - RNA, 21 nt, Human
gggagggagguucccguggag

SEQ ID NO: 1277009 - RNA, 21 nt, Human
gggcaauguguguccaauuuc

SEQ ID NO: 1277010 - RNA, 18 nt, Human
gguauggggugggaaagg

SEQ ID NO: 1277011 - RNA, 21 nt, Human
ggugggucuuguugaagaaug

SEQ ID NO: 1277012 - RNA, 23 nt, Human
guaaauccuaauagaaccaaaaa

SEQ ID NO: 1277013 - RNA, 22 nt, Human
uaaauccuaauagaaccaaaaa

SEQ ID NO: 1277014 - RNA, 25 nt, Human
uaacuagaaaaaaagacugccacaa

SEQ ID NO: 1277015 - RNA, 22 nt, Human
uaaguagugaaagaaaccagaa

SEQ ID NO: 1277016 - RNA, 21 nt, Human
uacaacacaaagucuugcaca

SEQ ID NO: 1277017 - RNA, 19 nt, Human
uagaaaaaaagacugccac

SEQ ID NO: 1277018 - RNA, 21 nt, Human
uagggaaaaaaaguauugaug

SEQ ID NO: 1277019 - RNA, 21 nt, Human
uaguauaacacaccacacccc

SEQ ID NO: 1277020 - RNA, 22 nt, Human
uauacagagaagcaaaacacau

SEQ ID NO: 1277021 - RNA, 19 nt, Human
ucaacauguggccaagggu

SEQ ID NO: 1277022 - RNA, 23 nt, Human
uccaaggccagcucuagcaaacc

SEQ ID NO: 1277023 - RNA, 23 nt, Human
uccagagcuuucuagaaaucuca

SEQ ID NO: 1277024 - RNA, 21 nt, Human
uccuggccggcggcggcccag

SEQ ID NO: 1277025 - RNA, 24 nt, Human
uccuggccggcggcggcccagggc

SEQ ID NO: 1277026 - RNA, 19 nt, Human
ucuagacuacaacacaaag

SEQ ID NO: 1277027 - RNA, 23 nt, Human
ucuuagaaauauauacauucaac

SEQ ID NO: 1277028 - RNA, 22 nt, Human
ugaaaagaaguucauuaacuca

SEQ ID NO: 1277029 - RNA, 26 nt, Human
ugaaagaaaccagaaaucuuccaggc

SEQ ID NO: 1277030 - RNA, 24 nt, Human
ugaaaucauaaauguauuuagcug

SEQ ID NO: 1277031 - RNA, 21 nt, Human
ugacuuaagagagaaaacacc

SEQ ID NO: 1277032 - RNA, 20 nt, Human
ugaggagagaggaaaacaga

SEQ ID NO: 1277033 - RNA, 18 nt, Human
ugcagccaacacaaguau

SEQ ID NO: 1277034 - RNA, 22 nt, Human
ugccccugccauuuuacuuccu

SEQ ID NO: 1277035 - RNA, 24 nt, Human
ugcuccaugaagugugagcuuauc

SEQ ID NO: 1277036 - RNA, 18 nt, Human
ugcugagagaaacccugu

SEQ ID NO: 1277037 - RNA, 18 nt, Human
uggcagugcugagagaaa

SEQ ID NO: 1277038 - RNA, 21 nt, Human
ugggaggggagggagguuccc

SEQ ID NO: 1277039 - RNA, 22 nt, Human
ugggaggggagggagguucccg

SEQ ID NO: 1277040 - RNA, 18 nt, Human
uggggugggaaaggagua

SEQ ID NO: 1277041 - RNA, 24 nt, Human
ugguacagcucaguaccguacaga

SEQ ID NO: 1277042 - RNA, 21 nt, Human
ugguagcaucccuggaaaugc

SEQ ID NO: 1277043 - RNA, 24 nt, Human
uguaccugcaucacacaacaaaga

SEQ ID NO: 1277044 - RNA, 23 nt, Human
ugucauggauacuaaucauaaag

SEQ ID NO: 1277045 - RNA, 21 nt, Human
uguccagagcuuucuagaaau

SEQ ID NO: 1277046 - RNA, 18 nt, Human
ugucucuugcccaccccu

SEQ ID NO: 1277047 - RNA, 21 nt, Human
uuagaaauauauacauucaac

SEQ ID NO: 1277048 - RNA, 24 nt, Human
uuauacagagaagcaaaacacauc

SEQ ID NO: 1277049 - RNA, 22 nt, Human
uuccucagugcuuuucauucuc

SEQ ID NO: 1277050 - RNA, 25 nt, Human
uuccucagugcuuuucauucuccuu

SEQ ID NO: 1277051 - RNA, 20 nt, Human
uuggcaagggagaaugggca

SEQ ID NO: 1277052 - RNA, 20 nt, Human
uuguugaagaauggcuuuga

SEQ ID NO: 1277053 - RNA, 23 nt, Human
aaaaagccagaacaaauuugaua

SEQ ID NO: 1277054 - RNA, 19 nt, Human
aaaaggcuaaacauucuca

SEQ ID NO: 1277055 - RNA, 27 nt, Human
aagcaaaggaacauaaguguaaaaugu

SEQ ID NO: 1277056 - RNA, 21 nt, Human
aaggagaaggcuagaagaggg

SEQ ID NO: 1277057 - RNA, 20 nt, Human
acagacaggcuugaaaggag

SEQ ID NO: 1277058 - RNA, 21 nt, Human
acuauauggagcucacaaucu

SEQ ID NO: 1277059 - RNA, 22 nt, Human
acugcuauugcucaugcaaaag

SEQ ID NO: 1277060 - RNA, 18 nt, Human
acugugucgcccaggcag

SEQ ID NO: 1277061 - RNA, 25 nt, Human
acuugauuuucauacuauauggagc

SEQ ID NO: 1277062 - RNA, 22 nt, Human
agacaaaggcaaucccgacaca

SEQ ID NO: 1277063 - RNA, 18 nt, Human
agacagagucucacugug

SEQ ID NO: 1277064 - RNA, 23 nt, Human
aggcauguuuguugcggcucagg

SEQ ID NO: 1277065 - RNA, 19 nt, Human
aggguagcucaggagguuc

SEQ ID NO: 1277066 - RNA, 24 nt, Human
agggugggggaagauaaaugcuug

SEQ ID NO: 1277067 - RNA, 22 nt, Human
caaacugaucaaaaaaucugcc

SEQ ID NO: 1277068 - RNA, 21 nt, Human
cacuguaugugugugcagaga

SEQ ID NO: 1277069 - RNA, 19 nt, Human
cacugugucgcccaggcag

SEQ ID NO: 1277070 - RNA, 23 nt, Human
caggguuucuguuuuucaagugu

SEQ ID NO: 1277071 - RNA, 18 nt, Human
ccaaaaaagccagaacaa

SEQ ID NO: 1277072 - RNA, 19 nt, Human
ccaaaaaagccagaacaaa

SEQ ID NO: 1277073 - RNA, 25 nt, Human
ccaaaaaagccagaacaaauuugau

SEQ ID NO: 1277074 - RNA, 24 nt, Human
ccacauggaagcagagacaaaggc

SEQ ID NO: 1277075 - RNA, 19 nt, Human
ccagccaucuuccccccuc

SEQ ID NO: 1277076 - RNA, 24 nt, Human
ccuccuagugcuaaugccuaauuu

SEQ ID NO: 1277077 - RNA, 22 nt, Human
cugucucuucuggggacuucuc

SEQ ID NO: 1277078 - RNA, 22 nt, Human
gaaaagccacauggaagcagag

SEQ ID NO: 1277079 - RNA, 23 nt, Human
gaaaagccacauggaagcagaga

SEQ ID NO: 1277080 - RNA, 21 nt, Human
gacaaaagguaacuauuuuuu

SEQ ID NO: 1277081 - RNA, 22 nt, Human
gagaaaggcagaaaagcuucua

SEQ ID NO: 1277082 - RNA, 18 nt, Human
gagacagagucucacugu

SEQ ID NO: 1277083 - RNA, 21 nt, Human
ggccaggcgcagcggcucacg

SEQ ID NO: 1277084 - RNA, 25 nt, Human
gucauugucucucuugcccaugugc

SEQ ID NO: 1277085 - RNA, 20 nt, Human
gugccaaaaaagccagaaca

SEQ ID NO: 1277086 - RNA, 19 nt, Human
gugguuccuucacuguaug

SEQ ID NO: 1277087 - RNA, 24 nt, Human
uaaauauuuuccaaauaaaauucu

SEQ ID NO: 1277088 - RNA, 23 nt, Human
uaacagacaggcuugaaaggaga

SEQ ID NO: 1277089 - RNA, 28 nt, Human
uacaaaaggaaaagccacauggaagcag

SEQ ID NO: 1277090 - RNA, 22 nt, Human
uacauacaugaagaauaaauua

SEQ ID NO: 1277091 - RNA, 21 nt, Human
uagacaugacauccaaaggac

SEQ ID NO: 1277092 - RNA, 22 nt, Human
uauuuuacauacaugaagaaua

SEQ ID NO: 1277093 - RNA, 20 nt, Human
uccaaaggacaaaagguaac

SEQ ID NO: 1277094 - RNA, 22 nt, Human
ucuauuuacuuauuuauuuauu

SEQ ID NO: 1277095 - RNA, 24 nt, Human
ugaaacauaaucgcauauggcccu

SEQ ID NO: 1277096 - RNA, 26 nt, Human
ugacaacgagcaauguauucaccccu

SEQ ID NO: 1277097 - RNA, 20 nt, Human
ugagaaugggccaggcgcag

SEQ ID NO: 1277098 - RNA, 19 nt, Human
ugagacagagucucacugu

SEQ ID NO: 1277099 - RNA, 22 nt, Human
ugcagugguguaaucucugcug

SEQ ID NO: 1277100 - RNA, 20 nt, Human
ugccaaaaaagccagaacaa

SEQ ID NO: 1277101 - RNA, 21 nt, Human
ugccaaaaaagccagaacaaa

SEQ ID NO: 1277102 - RNA, 24 nt, Human
ugccaaaaaagccagaacaaauuu

SEQ ID NO: 1277103 - RNA, 18 nt, Human
uggaacagugacaacgag

SEQ ID NO: 1277104 - RNA, 19 nt, Human
uggaagcagagacaaaggc

SEQ ID NO: 1277105 - RNA, 18 nt, Human
ugugcagagaaaggcaga

SEQ ID NO: 1277106 - RNA, 19 nt, Human
uuacuuauuuauuuauuuu

SEQ ID NO: 1277107 - RNA, 20 nt, Human
uuagugccaaaaaagccaga

SEQ ID NO: 1277108 - RNA, 21 nt, Human
uuccaaaguuuagacaugaca

SEQ ID NO: 1277109 - RNA, 21 nt, Human
uuccuucacuguaugugugug

SEQ ID NO: 1277110 - RNA, 21 nt, Human
uugcagugguguaaucucugc

SEQ ID NO: 1277111 - RNA, 21 nt, Human
uuuacauacaugaagaauaaa

SEQ ID NO: 1277112 - RNA, 24 nt, Human
uuugcaaaauucuuagaagauugc

SEQ ID NO: 1277113 - RNA, 24 nt, Human
aaacaagagccguuccagccagag

SEQ ID NO: 1277114 - RNA, 22 nt, Human
aaagccgccacaaaacaucagg

SEQ ID NO: 1277115 - RNA, 22 nt, Human
aaccagaaggagggaacuccca

SEQ ID NO: 1277116 - RNA, 23 nt, Human
aacccaaggcucucaaagcucca

SEQ ID NO: 1277117 - RNA, 23 nt, Human
aaggggcucauuuauuuuuuucu

SEQ ID NO: 1277118 - RNA, 18 nt, Human
acccaagcucaaaggacc

SEQ ID NO: 1277119 - RNA, 19 nt, Human
acccggaaguagggagccc

SEQ ID NO: 1277120 - RNA, 18 nt, Human
accucgucuaccacuccu

SEQ ID NO: 1277121 - RNA, 18 nt, Human
acggggcggggcggggcg

SEQ ID NO: 1277122 - RNA, 18 nt, Human
acuagccucagacuucug

SEQ ID NO: 1277123 - RNA, 24 nt, Human
acucacuaaaaggaagguucugcc

SEQ ID NO: 1277124 - RNA, 20 nt, Human
acugcuguccaucaaaugcu

SEQ ID NO: 1277125 - RNA, 20 nt, Human
agaaaacacuggaacacugc

SEQ ID NO: 1277126 - RNA, 20 nt, Human
agacagcaagaaccagaagg

SEQ ID NO: 1277127 - RNA, 18 nt, Human
agacauugauaaaggcag

SEQ ID NO: 1277128 - RNA, 19 nt, Human
agagggcacacggugaaaa

SEQ ID NO: 1277129 - RNA, 21 nt, Human
agauagguuuuuuccuguggu

SEQ ID NO: 1277130 - RNA, 21 nt, Human
agaucucuccagaaaccguac

SEQ ID NO: 1277131 - RNA, 19 nt, Human
agcgguaaaacaagagccg

SEQ ID NO: 1277132 - RNA, 27 nt, Human
agcugugggaauccugagagacagaca

SEQ ID NO: 1277133 - RNA, 24 nt, Human
aggcaacuaggaagacaggccagg

SEQ ID NO: 1277134 - RNA, 19 nt, Human
aggcagaagguaccaagac

SEQ ID NO: 1277135 - RNA, 21 nt, Human
aggcagacagcaagaaccaga

SEQ ID NO: 1277136 - RNA, 22 nt, Human
aggcagacagcaagaaccagaa

SEQ ID NO: 1277137 - RNA, 21 nt, Human
aguagagauaaacuggggggc

SEQ ID NO: 1277138 - RNA, 18 nt, Human
auaguauauaucuuucuc

SEQ ID NO: 1277139 - RNA, 23 nt, Human
auaucacagucuccauuuucaag

SEQ ID NO: 1277140 - RNA, 22 nt, Human
auggacauuucccuuauuuuag

SEQ ID NO: 1277141 - RNA, 18 nt, Human
augguagcaaugaaugaa

SEQ ID NO: 1277142 - RNA, 26 nt, Human
caaauggcugaaagcucagaaaauca

SEQ ID NO: 1277143 - RNA, 22 nt, Human
caacagcagccagcugcaaugc

SEQ ID NO: 1277144 - RNA, 26 nt, Human
caagaaccagaaggagggaacuccca

SEQ ID NO: 1277145 - RNA, 19 nt, Human
cacaaggccacagugagca

SEQ ID NO: 1277146 - RNA, 25 nt, Human
cacugcaaaaaauaaaaaucaaagg

SEQ ID NO: 1277147 - RNA, 20 nt, Human
cacuggcugcuggacagaac

SEQ ID NO: 1277148 - RNA, 24 nt, Human
cagcaagaaccagaaggagggaag

SEQ ID NO: 1277149 - RNA, 20 nt, Human
cagcauggagccuucaucuc

SEQ ID NO: 1277150 - RNA, 22 nt, Human
cagcauggagccuucaucuccu

SEQ ID NO: 1277151 - RNA, 20 nt, Human
cagcugccaccgucagaggg

SEQ ID NO: 1277152 - RNA, 20 nt, Human
caggucccuucagagccgug

SEQ ID NO: 1277153 - RNA, 19 nt, Human
caugugauuuacugggcac

SEQ ID NO: 1277154 - RNA, 22 nt, Human
ccaaagcggaacccagcacccc

SEQ ID NO: 1277155 - RNA, 19 nt, Human
ccagcugcaaugcaaaguc

SEQ ID NO: 1277156 - RNA, 23 nt, Human
cccagcacccaccuucagcagac

SEQ ID NO: 1277157 - RNA, 23 nt, Human
cccaggaccaggcaggguggggc

SEQ ID NO: 1277158 - RNA, 22 nt, Human
ccccaccacccaacaccgagca

SEQ ID NO: 1277159 - RNA, 20 nt, Human
cccccggaggcuuuuagcuu

SEQ ID NO: 1277160 - RNA, 21 nt, Human
cccccggaggcuuuuagcuuc

SEQ ID NO: 1277161 - RNA, 18 nt, Human
ccgggaccagcuguggga

SEQ ID NO: 1277162 - RNA, 22 nt, Human
cgguagaaagguaaagucaaga

SEQ ID NO: 1277163 - RNA, 23 nt, Human
cgguagaaagguaaagucaagaa

SEQ ID NO: 1277164 - RNA, 18 nt, Human
cuaauccugaaaauaacu

SEQ ID NO: 1277165 - RNA, 22 nt, Human
cuaauccugaaaauaacuucua

SEQ ID NO: 1277166 - RNA, 20 nt, Human
cuacaagccaaaugcuuccc

SEQ ID NO: 1277167 - RNA, 19 nt, Human
cuagggccaugaggggacc

SEQ ID NO: 1277168 - RNA, 24 nt, Human
cuaucugucagcgguaaaacaaga

SEQ ID NO: 1277169 - RNA, 18 nt, Human
cuccagaaaccguacucc

SEQ ID NO: 1277170 - RNA, 19 nt, Human
cuuuuuuuuuuuaaagcac

SEQ ID NO: 1277171 - RNA, 19 nt, Human
gaaaagguggucuggaugu

SEQ ID NO: 1277172 - RNA, 19 nt, Human
gacaggcaugcccgggacc

SEQ ID NO: 1277173 - RNA, 19 nt, Human
gaccaggcaggguggggcu

SEQ ID NO: 1277174 - RNA, 19 nt, Human
gauccucuguacauauuca

SEQ ID NO: 1277175 - RNA, 19 nt, Human
gcacggggcggggcggggc

SEQ ID NO: 1277176 - RNA, 22 nt, Human
gccacagugagcacgguagaaa

SEQ ID NO: 1277177 - RNA, 21 nt, Human
gcguuucuuaggucacucuga

SEQ ID NO: 1277178 - RNA, 18 nt, Human
gcuuugaaaaagcucuga

SEQ ID NO: 1277179 - RNA, 18 nt, Human
ggaacccagcacccaccu

SEQ ID NO: 1277180 - RNA, 20 nt, Human
ggaggcagacagcaagaacc

SEQ ID NO: 1277181 - RNA, 21 nt, Human
ggaggucgucuuugguguucu

SEQ ID NO: 1277182 - RNA, 23 nt, Human
ggaucugauaucuuugagagagc

SEQ ID NO: 1277183 - RNA, 21 nt, Human
ggcacacggugaaaauuuaca

SEQ ID NO: 1277184 - RNA, 21 nt, Human
ggccacaaguacagcagcggg

SEQ ID NO: 1277185 - RNA, 22 nt, Human
ggccacagugagcacgguagaa

SEQ ID NO: 1277186 - RNA, 23 nt, Human
gggaacucccauuuugcgauguc

SEQ ID NO: 1277187 - RNA, 21 nt, Human
gggcggggcggggcggggggg

SEQ ID NO: 1277188 - RNA, 25 nt, Human
ggggcucauuuauuuuuuucugucu

SEQ ID NO: 1277189 - RNA, 19 nt, Human
gggugcuguaggcaacagg

SEQ ID NO: 1277190 - RNA, 20 nt, Human
gguagggggaacagggucau

SEQ ID NO: 1277191 - RNA, 24 nt, Human
gguucauuaugugcucagaggugc

SEQ ID NO: 1277192 - RNA, 21 nt, Human
guacagcagcgggcugugagu

SEQ ID NO: 1277193 - RNA, 19 nt, Human
guaccaagacaaccccauu

SEQ ID NO: 1277194 - RNA, 20 nt, Human
gugacccugcucuuaaaaau

SEQ ID NO: 1277195 - RNA, 24 nt, Human
gugcguuucuuaggucacucugag

SEQ ID NO: 1277196 - RNA, 18 nt, Human
guggccagucacacccua

SEQ ID NO: 1277197 - RNA, 21 nt, Human
uaaaacaagagccguuccagc

SEQ ID NO: 1277198 - RNA, 21 nt, Human
uaaaagagaaccaugggaaca

SEQ ID NO: 1277199 - RNA, 24 nt, Human
uaaaggcagaguugacauaaacgg

SEQ ID NO: 1277200 - RNA, 18 nt, Human
uaaaggguaccccuuggg

SEQ ID NO: 1277201 - RNA, 21 nt, Human
uaaauaauaacaaaagccgcc

SEQ ID NO: 1277202 - RNA, 21 nt, Human
uaacaaaagccgccacaaaac

SEQ ID NO: 1277203 - RNA, 20 nt, Human
uaacaugcacacaugaagcu

SEQ ID NO: 1277204 - RNA, 21 nt, Human
uaacaugcacacaugaagcuu

SEQ ID NO: 1277205 - RNA, 19 nt, Human
uacaggucccuucagagcc

SEQ ID NO: 1277206 - RNA, 20 nt, Human
uagagauaaacuggggggca

SEQ ID NO: 1277207 - RNA, 23 nt, Human
uaguagagauaaacuggggggca

SEQ ID NO: 1277208 - RNA, 19 nt, Human
uaguucaaagccauugacc

SEQ ID NO: 1277209 - RNA, 20 nt, Human
uauaacugaggaucugaagc

SEQ ID NO: 1277210 - RNA, 19 nt, Human
ucaaagccauugaccaacc

SEQ ID NO: 1277211 - RNA, 19 nt, Human
ucacacccuaccuggcuca

SEQ ID NO: 1277212 - RNA, 27 nt, Human
ucagcgguaaaacaagagccguuccuu

SEQ ID NO: 1277213 - RNA, 23 nt, Human
ucauuacuagccucagacuucug

SEQ ID NO: 1277214 - RNA, 25 nt, Human
uccagggcugagccauggcaucucu

SEQ ID NO: 1277215 - RNA, 18 nt, Human
ucccagggaucuggacaa

SEQ ID NO: 1277216 - RNA, 27 nt, Human
uccccaccaaagcggaacccagcaccc

SEQ ID NO: 1277217 - RNA, 22 nt, Human
uccuccucauuacuagccucag

SEQ ID NO: 1277218 - RNA, 22 nt, Human
ucuccccaccaaagcggaaccc

SEQ ID NO: 1277219 - RNA, 18 nt, Human
ucucuccaacaaugggaa

SEQ ID NO: 1277220 - RNA, 23 nt, Human
ucucuguguccuaaaccaaacaa

SEQ ID NO: 1277221 - RNA, 23 nt, Human
ucugauccuacaggucccuucag

SEQ ID NO: 1277222 - RNA, 24 nt, Human
ucugucugcagcaauggugaaagg

SEQ ID NO: 1277223 - RNA, 23 nt, Human
ugaagcacuucacuuggaaaugc

SEQ ID NO: 1277224 - RNA, 24 nt, Human
ugaauuuucaggcagaagguacca

SEQ ID NO: 1277225 - RNA, 23 nt, Human
ugagagacagacaugaagcacuu

SEQ ID NO: 1277226 - RNA, 18 nt, Human
ugagagagcccagagcug

SEQ ID NO: 1277227 - RNA, 18 nt, Human
ugaggaucugaagccuca

SEQ ID NO: 1277228 - RNA, 21 nt, Human
ugagggauuuuuaucaacagc

SEQ ID NO: 1277229 - RNA, 20 nt, Human
ugaguaaguuguacagguuc

SEQ ID NO: 1277230 - RNA, 22 nt, Human
ugauaagcacuauuuucugaaa

SEQ ID NO: 1277231 - RNA, 23 nt, Human
ugcaaaaaauaaaaaucaaaggc

SEQ ID NO: 1277232 - RNA, 19 nt, Human
ugcccgggaccagcugugg

SEQ ID NO: 1277233 - RNA, 21 nt, Human
ugcgggggcgucgggcggggg

SEQ ID NO: 1277234 - RNA, 23 nt, Human
uggaaaugcuuugaaaaagcucu

SEQ ID NO: 1277235 - RNA, 20 nt, Human
uggaagaaaagguggucugg

SEQ ID NO: 1277236 - RNA, 19 nt, Human
ugggguagggggaacaggg

SEQ ID NO: 1277237 - RNA, 18 nt, Human
ugggugcuguaggcaaca

SEQ ID NO: 1277238 - RNA, 21 nt, Human
ugggugcuguaggcaacaggu

SEQ ID NO: 1277239 - RNA, 19 nt, Human
ugguagcaaugaaugaaua

SEQ ID NO: 1277240 - RNA, 23 nt, Human
ugguccccugaaucuaaguuccc

SEQ ID NO: 1277241 - RNA, 21 nt, Human
uguacaaaugcaaauuucagu

SEQ ID NO: 1277242 - RNA, 22 nt, Human
uguccuaaaccaaacaaggggc

SEQ ID NO: 1277243 - RNA, 21 nt, Human
ugucucaggugggaaaacgga

SEQ ID NO: 1277244 - RNA, 21 nt, Human
ugugacacagcugacacagca

SEQ ID NO: 1277245 - RNA, 20 nt, Human
uuaaaggguaccccuugggc

SEQ ID NO: 1277246 - RNA, 19 nt, Human
uuaagcuuggaaacuuuaa

SEQ ID NO: 1277247 - RNA, 24 nt, Human
uuagaaagguuuucaaugcuuucc

SEQ ID NO: 1277248 - RNA, 24 nt, Human
uuauuuuuuucugucugcagcaau

SEQ ID NO: 1277249 - RNA, 18 nt, Human
uucaaagccauugaccaa

SEQ ID NO: 1277250 - RNA, 23 nt, Human
uucaaagccauugaccaacccag

SEQ ID NO: 1277251 - RNA, 22 nt, Human
uucaugaauuuucaggcagaag

SEQ ID NO: 1277252 - RNA, 19 nt, Human
uuccccaccacccaacacc

SEQ ID NO: 1277253 - RNA, 21 nt, Human
uucccugaccuuggaaaugcu

SEQ ID NO: 1277254 - RNA, 21 nt, Human
uucugauccuacaggucccuu

SEQ ID NO: 1277255 - RNA, 21 nt, Human
uuggaaaugcuuugaaaaagc

SEQ ID NO: 1277256 - RNA, 23 nt, Human
uuugaguuuaggucucaggucag

SEQ ID NO: 1277257 - RNA, 20 nt, Human
uuuuuuuaaagcaccaagug

SEQ ID NO: 1277258 - RNA, 18 nt, Human
uuggcuuaccugauggcu

SEQ ID NO: 1277259 - RNA, 21 nt, Human
acaaggagucuccuuuacuuu

SEQ ID NO: 1277260 - RNA, 23 nt, Human
accauauaauaacauagcuuaaa

SEQ ID NO: 1277261 - RNA, 25 nt, Human
caggggcuccccuccacaaggaguc

SEQ ID NO: 1277262 - RNA, 21 nt, Human
ggcaggggcuccccuccacaa

SEQ ID NO: 1277263 - RNA, 21 nt, Human
uguauuuccuuuuuccucuuu

SEQ ID NO: 1277264 - RNA, 19 nt, Human
aaaauguuuauauuuauug

SEQ ID NO: 1277265 - RNA, 21 nt, Human
aaccgcacaccaucagcagca

SEQ ID NO: 1277266 - RNA, 20 nt, Human
aagaaaauaagcccaaaagc

SEQ ID NO: 1277267 - RNA, 18 nt, Human
aagcccaaaagccaagga

SEQ ID NO: 1277268 - RNA, 25 nt, Human
aagugucuucuucaguuucagaccc

SEQ ID NO: 1277269 - RNA, 23 nt, Human
accccagggaugccagaugucag

SEQ ID NO: 1277270 - RNA, 22 nt, Human
acccugaaggcucaugaucucu

SEQ ID NO: 1277271 - RNA, 18 nt, Human
acgcugugccacaucuug

SEQ ID NO: 1277272 - RNA, 19 nt, Human
agaaaauaagcccaaaagc

SEQ ID NO: 1277273 - RNA, 21 nt, Human
aggaggaagugucuucuucag

SEQ ID NO: 1277274 - RNA, 24 nt, Human
aggcaauccuuuugcacgugucuc

SEQ ID NO: 1277275 - RNA, 22 nt, Human
aggggucuguggccuucaucag

SEQ ID NO: 1277276 - RNA, 24 nt, Human
aguaaugagaugcaucccaauuuc

SEQ ID NO: 1277277 - RNA, 21 nt, Human
auaaaaaaagaugccauacaa

SEQ ID NO: 1277278 - RNA, 22 nt, Human
aucuugggggcagaagggcagu

SEQ ID NO: 1277279 - RNA, 25 nt, Human
caaagcgaagucaguaaaagacaga

SEQ ID NO: 1277280 - RNA, 24 nt, Human
caagaaaauaagcccaaaagccaa

SEQ ID NO: 1277281 - RNA, 25 nt, Human
cacaaguacaggacuaugucaggaa

SEQ ID NO: 1277282 - RNA, 23 nt, Human
cacgaacacaagcagagucagcc

SEQ ID NO: 1277283 - RNA, 18 nt, Human
cagcaggugcccuccuuu

SEQ ID NO: 1277284 - RNA, 22 nt, Human
cagcccgacgcugugccacauc

SEQ ID NO: 1277285 - RNA, 18 nt, Human
cagcguggccacgaacac

SEQ ID NO: 1277286 - RNA, 23 nt, Human
caggacgaucagcagcguggcca

SEQ ID NO: 1277287 - RNA, 21 nt, Human
cauccuucacaaguacaggac

SEQ ID NO: 1277288 - RNA, 18 nt, Human
ccgccccaggcccccuac

SEQ ID NO: 1277289 - RNA, 20 nt, Human
cgaacacaagcagagucagc

SEQ ID NO: 1277290 - RNA, 24 nt, Human
cgagcggaucugauucugugugga

SEQ ID NO: 1277291 - RNA, 23 nt, Human
cgccccaggcccccuaccgcugg

SEQ ID NO: 1277292 - RNA, 20 nt, Human
cggcggugagcgcgggcggc

SEQ ID NO: 1277293 - RNA, 25 nt, Human
cggcggugagcgcgggcggcggcgc

SEQ ID NO: 1277294 - RNA, 21 nt, Human
cggcucggggcggcuggcgcg

SEQ ID NO: 1277295 - RNA, 19 nt, Human
cggcuggcgcggacggcgg

SEQ ID NO: 1277296 - RNA, 24 nt, Human
cguggccacgaacacaagcagagu

SEQ ID NO: 1277297 - RNA, 22 nt, Human
cucaugaucucccucuugggau

SEQ ID NO: 1277298 - RNA, 24 nt, Human
cucaugaucucccucuugggaucc

SEQ ID NO: 1277299 - RNA, 19 nt, Human
cuugggggcagaagggcag

SEQ ID NO: 1277300 - RNA, 22 nt, Human
gaacacaagcagagucagcccg

SEQ ID NO: 1277301 - RNA, 21 nt, Human
gaggaggaagugucuucuuca

SEQ ID NO: 1277302 - RNA, 23 nt, Human
gauccugugucucccaccaguuc

SEQ ID NO: 1277303 - RNA, 26 nt, Human
gcccucgucgcuguccacccgugucu

SEQ ID NO: 1277304 - RNA, 18 nt, Human
ggaucugauucugugugg

SEQ ID NO: 1277305 - RNA, 18 nt, Human
ggcggcggcgcguccugc

SEQ ID NO: 1277306 - RNA, 21 nt, Human
ggcggcggcgcguccugcgcu

SEQ ID NO: 1277307 - RNA, 18 nt, Human
gggcggcuggcgcggacg

SEQ ID NO: 1277308 - RNA, 19 nt, Human
guagaaagcuggugaaaca

SEQ ID NO: 1277309 - RNA, 23 nt, Human
gucgcccggccgcggcuguagcg

SEQ ID NO: 1277310 - RNA, 23 nt, Human
guggccacgaacacaagcagagu

SEQ ID NO: 1277311 - RNA, 18 nt, Human
uaaaagacagaagcuggc

SEQ ID NO: 1277312 - RNA, 22 nt, Human
uaaaagacagaagcuggcaacu

SEQ ID NO: 1277313 - RNA, 22 nt, Human
uaaguuaaaaugggaagaaaaa

SEQ ID NO: 1277314 - RNA, 21 nt, Human
uacaggacuaugucagggguc

SEQ ID NO: 1277315 - RNA, 24 nt, Human
ucucugagaccccagggaugccag

SEQ ID NO: 1277316 - RNA, 24 nt, Human
ucucugagaccccagggaugccag

SEQ ID NO: 1277317 - RNA, 23 nt, Human
ucugagaccccagggaugccaga

SEQ ID NO: 1277318 - RNA, 19 nt, Human
ucuugggggcagaagggca

SEQ ID NO: 1277319 - RNA, 20 nt, Human
ucuugggggcagaagggcag

SEQ ID NO: 1277320 - RNA, 18 nt, Human
ugccauacaaaauaccaa

SEQ ID NO: 1277321 - RNA, 24 nt, Human
ugggggcagaagggcagucggcuc

SEQ ID NO: 1277322 - RNA, 23 nt, Human
uucagucauuaguaaauuucaaa

SEQ ID NO: 1277323 - RNA, 19 nt, Human
aacaaggccugagccaaca

SEQ ID NO: 1277324 - RNA, 24 nt, Human
aagacauuucucaaacaaaaaaaa

SEQ ID NO: 1277325 - RNA, 22 nt, Human
aauggauaauaacccaacugcc

SEQ ID NO: 1277326 - RNA, 20 nt, Human
agcaguucccagggaugaug

SEQ ID NO: 1277327 - RNA, 24 nt, Human
aggcagcccaggcugagggcugca

SEQ ID NO: 1277328 - RNA, 21 nt, Human
auaaaaaaaaagcaacaccac

SEQ ID NO: 1277329 - RNA, 21 nt, Human
caaaagcagcaauacacggaa

SEQ ID NO: 1277330 - RNA, 21 nt, Human
caacugcaaacuaccaacaua

SEQ ID NO: 1277331 - RNA, 21 nt, Human
cacccuucuuuggucaccaag

SEQ ID NO: 1277332 - RNA, 19 nt, Human
cagcaaaagcagcaauaca

SEQ ID NO: 1277333 - RNA, 24 nt, Human
cagcaaaagcagcaauacacggaa

SEQ ID NO: 1277334 - RNA, 22 nt, Human
caggcagcccaggcugagggcu

SEQ ID NO: 1277335 - RNA, 18 nt, Human
ccaacugcaaacuaccaa

SEQ ID NO: 1277336 - RNA, 20 nt, Human
ccacuccaaguuguuuaaca

SEQ ID NO: 1277337 - RNA, 21 nt, Human
cccaacugcaaacuaccaaca

SEQ ID NO: 1277338 - RNA, 21 nt, Human
cugcaaucauaaaaccaggcu

SEQ ID NO: 1277339 - RNA, 20 nt, Human
cuuucucuucgucuucaggc

SEQ ID NO: 1277340 - RNA, 19 nt, Human
gaaaugaauacacccuucu

SEQ ID NO: 1277341 - RNA, 24 nt, Human
gcagcaauacacggaaaugaauac

SEQ ID NO: 1277342 - RNA, 21 nt, Human
gcugcaaucauaaaaccaggc

SEQ ID NO: 1277343 - RNA, 21 nt, Human
ggcugcaaucauaaaaccagg

SEQ ID NO: 1277344 - RNA, 23 nt, Human
uacaaaagguuaauuuuuaugaa

SEQ ID NO: 1277345 - RNA, 19 nt, Human
ucagcaaaagcagcaauac

SEQ ID NO: 1277346 - RNA, 21 nt, Human
ucuucaggcagcccaggcuga

SEQ ID NO: 1277347 - RNA, 25 nt, Human
ucuuuggucaccaagucuguuguuc

SEQ ID NO: 1277348 - RNA, 24 nt, Human
uguuuggaggggaggaaauugaau

SEQ ID NO: 1277349 - RNA, 24 nt, Human
uuacuuuuauaaaaaaaaagcaac

SEQ ID NO: 1277350 - RNA, 23 nt, Human
uucucuucgucuucaggcagccc

SEQ ID NO: 1277351 - RNA, 22 nt, Human
uuuggaggggaggaaauugaau

SEQ ID NO: 1277352 - RNA, 20 nt, Human
agagggguggagguuggggc

SEQ ID NO: 1277353 - RNA, 20 nt, Human
aucccaucucuuuccucuug

SEQ ID NO: 1277354 - RNA, 22 nt, Human
augguggccccugaacauugua

SEQ ID NO: 1277355 - RNA, 21 nt, Human
caauucauaucaaaauacgga

SEQ ID NO: 1277356 - RNA, 24 nt, Human
cacagagagggguggagguugggg

SEQ ID NO: 1277357 - RNA, 19 nt, Human
caccaugugugccaggugc

SEQ ID NO: 1277358 - RNA, 21 nt, Human
cauaucaaaauacggaaucca

SEQ ID NO: 1277359 - RNA, 19 nt, Human
ccaucuccaccuuccuugc

SEQ ID NO: 1277360 - RNA, 24 nt, Human
ccccugaacauuguaugagguagg

SEQ ID NO: 1277361 - RNA, 22 nt, Human
cccuuuucuuccugagaaugga

SEQ ID NO: 1277362 - RNA, 20 nt, Human
gaggccaucgcauuucccac

SEQ ID NO: 1277363 - RNA, 20 nt, Human
gauuggaccugggacuggag

SEQ ID NO: 1277364 - RNA, 21 nt, Human
gcguggggcaccuugccucuu

SEQ ID NO: 1277365 - RNA, 23 nt, Human
ggagcuggucggcccugcaggug

SEQ ID NO: 1277366 - RNA, 21 nt, Human
ggagguuggggcagguggggg

SEQ ID NO: 1277367 - RNA, 19 nt, Human
ggggaugguggccccugaa

SEQ ID NO: 1277368 - RNA, 24 nt, Human
ggguggagguuggggcaggugggg

SEQ ID NO: 1277369 - RNA, 22 nt, Human
ggguuuccggcuuuuggccacu

SEQ ID NO: 1277370 - RNA, 20 nt, Human
gucaauaucacagagagggg

SEQ ID NO: 1277371 - RNA, 22 nt, Human
uagcaggcaucuuccaccagau

SEQ ID NO: 1277372 - RNA, 24 nt, Human
uagcaggcaucuuccaccagauuu

SEQ ID NO: 1277373 - RNA, 23 nt, Human
ucaauaucacagagaggggugga

SEQ ID NO: 1277374 - RNA, 19 nt, Human
ucgucuucagcaccacgau

SEQ ID NO: 1277375 - RNA, 19 nt, Human
ucucuugacagcguuuacu

SEQ ID NO: 1277376 - RNA, 21 nt, Human
uggaggccaucgcauuuccca

SEQ ID NO: 1277377 - RNA, 22 nt, Human
uggaggccaucgcauuucccac

SEQ ID NO: 1277378 - RNA, 18 nt, Human
ugguggccccugaacauu

SEQ ID NO: 1277379 - RNA, 20 nt, Human
ugguggccccugaacauugu

SEQ ID NO: 1277380 - RNA, 18 nt, Human
uguaagcauccaucucca

SEQ ID NO: 1277381 - RNA, 19 nt, Human
uguugaaugaucaacuuuu

SEQ ID NO: 1277382 - RNA, 21 nt, Human
uucagcaccacgauccacagg

SEQ ID NO: 1277383 - RNA, 22 nt, Human
uucccacaugauaacaauucau

SEQ ID NO: 1277384 - RNA, 25 nt, Human
uuccuugcuccauuguuuauccgac

SEQ ID NO: 1277385 - RNA, 18 nt, Human
uugcaccgucucuugaca

SEQ ID NO: 1277386 - RNA, 23 nt, Human
uuggggcaggugggggauggugg

SEQ ID NO: 1277387 - RNA, 21 nt, Human
aagccucguuccgcugguccc

SEQ ID NO: 1277388 - RNA, 20 nt, Human
ucccugaacaaaaacuccua

SEQ ID NO: 1277389 - RNA, 21 nt, Human
ucguuccgcuggucccugaac

SEQ ID NO: 1277390 - RNA, 23 nt, Human
aaacauuuuaagcuucggugguc

SEQ ID NO: 1277391 - RNA, 22 nt, Human
aaacgucucuguggcuucugag

SEQ ID NO: 1277392 - RNA, 20 nt, Human
aacuuagcccugccauugua

SEQ ID NO: 1277393 - RNA, 21 nt, Human
aagcagccauaggcccucuca

SEQ ID NO: 1277394 - RNA, 22 nt, Human
aagcagccauaggcccucucag

SEQ ID NO: 1277395 - RNA, 21 nt, Human
aagccaggaucuagacccacg

SEQ ID NO: 1277396 - RNA, 24 nt, Human
aagccaggaucuagacccacgcag

SEQ ID NO: 1277397 - RNA, 19 nt, Human
aagcucaugcuuugcuacc

SEQ ID NO: 1277398 - RNA, 24 nt, Human
accuacuucaggacaacugugauu

SEQ ID NO: 1277399 - RNA, 19 nt, Human
acuagcaaagccaggaucu

SEQ ID NO: 1277400 - RNA, 23 nt, Human
acuuucaaagacgcuguaagaaa

SEQ ID NO: 1277401 - RNA, 26 nt, Human
agacgcuguaagaaagcuacugagcu

SEQ ID NO: 1277402 - RNA, 21 nt, Human
agccaggaucuagacccacgc

SEQ ID NO: 1277403 - RNA, 21 nt, Human
auaccagugacgccauugaga

SEQ ID NO: 1277404 - RNA, 21 nt, Human
caaaccuucucugguaaaggc

SEQ ID NO: 1277405 - RNA, 24 nt, Human
caaacucuucaguccuugcagaag

SEQ ID NO: 1277406 - RNA, 22 nt, Human
caacuaggaacuagcaaagcca

SEQ ID NO: 1277407 - RNA, 20 nt, Human
caagauuccuuucaauccug

SEQ ID NO: 1277408 - RNA, 18 nt, Human
cacacaacuaggaacuag

SEQ ID NO: 1277409 - RNA, 24 nt, Human
cacgcaaaccucucuuugaagcuc

SEQ ID NO: 1277410 - RNA, 25 nt, Human
caggcaagaaaauguucuuggauga

SEQ ID NO: 1277411 - RNA, 23 nt, Human
cccacgcaaaccucucuuugaag

SEQ ID NO: 1277412 - RNA, 22 nt, Human
ccuacuucaggacaacugugau

SEQ ID NO: 1277413 - RNA, 23 nt, Human
cgucacacaacuaggaacuagca

SEQ ID NO: 1277414 - RNA, 23 nt, Human
cuacugagcugcuucacaaacgu

SEQ ID NO: 1277415 - RNA, 21 nt, Human
cuagacccacgcaaaccucuc

SEQ ID NO: 1277416 - RNA, 22 nt, Human
cuccaggcugaccugcacugcc

SEQ ID NO: 1277417 - RNA, 20 nt, Human
cugccagcgauacuugaucc

SEQ ID NO: 1277418 - RNA, 21 nt, Human
cuuauggccacguccauaacu

SEQ ID NO: 1277419 - RNA, 19 nt, Human
gaaaaauaaagguagaggc

SEQ ID NO: 1277420 - RNA, 21 nt, Human
gaaugaugaauccagaaaaga

SEQ ID NO: 1277421 - RNA, 20 nt, Human
gaccugcacugccugaaaga

SEQ ID NO: 1277422 - RNA, 18 nt, Human
gcccaacgucacacaacu

SEQ ID NO: 1277423 - RNA, 19 nt, Human
gugaaagcagccauaggcc

SEQ ID NO: 1277424 - RNA, 19 nt, Human
uaagacagauaggaaaagu

SEQ ID NO: 1277425 - RNA, 21 nt, Human
uaccaaauaucgugucauucu

SEQ ID NO: 1277426 - RNA, 18 nt, Human
uacuucaggacaacugug

SEQ ID NO: 1277427 - RNA, 26 nt, Human
uagcaaagccaggaucuagacccacg

SEQ ID NO: 1277428 - RNA, 22 nt, Human
uaggaaaaauaaagguagaggc

SEQ ID NO: 1277429 - RNA, 21 nt, Human
uagggcuuauggccacgucca

SEQ ID NO: 1277430 - RNA, 18 nt, Human
uccaggcugaccugcacu

SEQ ID NO: 1277431 - RNA, 18 nt, Human
ucccgcaaaaauaucuuc

SEQ ID NO: 1277432 - RNA, 18 nt, Human
ucugagagggagucucug

SEQ ID NO: 1277433 - RNA, 22 nt, Human
ucugcaagauuccuuucaaucc

SEQ ID NO: 1277434 - RNA, 22 nt, Human
ugaaaauaaagcaaaaaguugu

SEQ ID NO: 1277435 - RNA, 23 nt, Human
ugaaaauauaccagugacgccau

SEQ ID NO: 1277436 - RNA, 18 nt, Human
ugacaggcaagaaaaugu

SEQ ID NO: 1277437 - RNA, 21 nt, Human
ugacaggcaagaaaauguucu

SEQ ID NO: 1277438 - RNA, 22 nt, Human
ugagaaaauggagacaaaaugu

SEQ ID NO: 1277439 - RNA, 27 nt, Human
ugagaaaauggagacaaaaugugauag

SEQ ID NO: 1277440 - RNA, 23 nt, Human
ugcauaauggaaccuguguccaa

SEQ ID NO: 1277441 - RNA, 25 nt, Human
ugccauuguaacgugaaagcagcca

SEQ ID NO: 1277442 - RNA, 22 nt, Human
ugccugaaguugaagaaauaua

SEQ ID NO: 1277443 - RNA, 20 nt, Human
uggcaugauugugacaggca

SEQ ID NO: 1277444 - RNA, 25 nt, Human
ugggggaagaucucaaacucuucag

SEQ ID NO: 1277445 - RNA, 24 nt, Human
uucaauccugaaauacuauaaauu

SEQ ID NO: 1277446 - RNA, 19 nt, Human
uucacaaacgucucugugg

SEQ ID NO: 1277447 - RNA, 18 nt, Human
uugaagaaauauaguguc

SEQ ID NO: 1277448 - RNA, 19 nt, Human
uuugaagcucaugcuuugc

SEQ ID NO: 1277449 - RNA, 24 nt, Human
aaaaaagaaaaagaagcucucaaa

SEQ ID NO: 1277450 - RNA, 20 nt, Human
aaaagaaaaagaagcucuca

SEQ ID NO: 1277451 - RNA, 19 nt, Human
aaaccccuuugauccucag

SEQ ID NO: 1277452 - RNA, 23 nt, Human
aaagaagcucucaaauaucccuu

SEQ ID NO: 1277453 - RNA, 21 nt, Human
aaccccuuugauccucagcgg

SEQ ID NO: 1277454 - RNA, 20 nt, Human
aaccgaccugaauugcaaac

SEQ ID NO: 1277455 - RNA, 20 nt, Human
aacuugcuucccaaugucug

SEQ ID NO: 1277456 - RNA, 18 nt, Human
aagcacauggcucagaaa

SEQ ID NO: 1277457 - RNA, 19 nt, Human
aagcacauggcucagaaac

SEQ ID NO: 1277458 - RNA, 20 nt, Human
acacugcaaagaagacacac

SEQ ID NO: 1277459 - RNA, 20 nt, Human
agacagccaccuucucucug

SEQ ID NO: 1277460 - RNA, 18 nt, Human
agcucuuaaagagacaau

SEQ ID NO: 1277461 - RNA, 21 nt, Human
aggagcagucgaagaaggagg

SEQ ID NO: 1277462 - RNA, 18 nt, Human
aucacagugacuaaaacu

SEQ ID NO: 1277463 - RNA, 24 nt, Human
caaaauacaaccgaccugaauugc

SEQ ID NO: 1277464 - RNA, 24 nt, Human
caaauguauacacauauguagaca

SEQ ID NO: 1277465 - RNA, 23 nt, Human
cacaaaaaagaaaaagaagcucu

SEQ ID NO: 1277466 - RNA, 20 nt, Human
caguagaggcuagaacugga

SEQ ID NO: 1277467 - RNA, 27 nt, Human
cagugacuaaaacuuuuucugaaaucc

SEQ ID NO: 1277468 - RNA, 22 nt, Human
ccaaaucucaugauuuucuaaa

SEQ ID NO: 1277469 - RNA, 21 nt, Human
cccuuucccaaacguuuccca

SEQ ID NO: 1277470 - RNA, 21 nt, Human
ccuaaacauuugcugccccca

SEQ ID NO: 1277471 - RNA, 18 nt, Human
cguagacagccaccuucu

SEQ ID NO: 1277472 - RNA, 20 nt, Human
cuaaaccacaaaaaagaaaa

SEQ ID NO: 1277473 - RNA, 23 nt, Human
cuaaauggaaucacagugacuaa

SEQ ID NO: 1277474 - RNA, 27 nt, Human
cuaagagaggagcagucgaagaaggag

SEQ ID NO: 1277475 - RNA, 23 nt, Human
cucaaauaucccuuucccaaacg

SEQ ID NO: 1277476 - RNA, 22 nt, Human
cucccugaagacagagagugaa

SEQ ID NO: 1277477 - RNA, 18 nt, Human
cucguagacagccaccuu

SEQ ID NO: 1277478 - RNA, 22 nt, Human
cugaagacagagagugaacccu

SEQ ID NO: 1277479 - RNA, 25 nt, Human
cugaggacucucccucuucuuguaa

SEQ ID NO: 1277480 - RNA, 19 nt, Human
gaagaaggaggggaacugc

SEQ ID NO: 1277481 - RNA, 20 nt, Human
gagcugcugugaggguuggu

SEQ ID NO: 1277482 - RNA, 23 nt, Human
gauuaugaaaacagcuaaaggaa

SEQ ID NO: 1277483 - RNA, 26 nt, Human
ggcuggaaguccaagauggagcugcu

SEQ ID NO: 1277484 - RNA, 21 nt, Human
gucgaagaaggaggggaacug

SEQ ID NO: 1277485 - RNA, 22 nt, Human
uaaagagacaauguuaggagua

SEQ ID NO: 1277486 - RNA, 19 nt, Human
uaaauggaaucacagugac

SEQ ID NO: 1277487 - RNA, 21 nt, Human
uaacacagauggaaugauucc

SEQ ID NO: 1277488 - RNA, 26 nt, Human
uaacuaaaccacaaaaaagaaaaaga

SEQ ID NO: 1277489 - RNA, 29 nt, Human
uaacuaaaccacaaaaaagaaaaagaaaa

SEQ ID NO: 1277490 - RNA, 21 nt, Human
uagcaaacacugcaaagaaga

SEQ ID NO: 1277491 - RNA, 22 nt, Human
uagcaaacacugcaaagaagac

SEQ ID NO: 1277492 - RNA, 21 nt, Human
uauacagcauucgcagguuag

SEQ ID NO: 1277493 - RNA, 25 nt, Human
ucaaaauuagcaaacacugcaaaga

SEQ ID NO: 1277494 - RNA, 23 nt, Human
ucaaauaacuaaaccacaaaaaa

SEQ ID NO: 1277495 - RNA, 20 nt, Human
ucaaauaucccuuucccaaa

SEQ ID NO: 1277496 - RNA, 26 nt, Human
ucaauaucaucaaauaacuaaaccac

SEQ ID NO: 1277497 - RNA, 22 nt, Human
uccaugccgagagagaggacuc

SEQ ID NO: 1277498 - RNA, 22 nt, Human
ugaggacucucccucuucuugu

SEQ ID NO: 1277499 - RNA, 24 nt, Human
ugcugagcaugggcucuggaagcc

SEQ ID NO: 1277500 - RNA, 22 nt, Human
ugggcucuggaagccacagcuc

SEQ ID NO: 1277501 - RNA, 24 nt, Human
ugugacucaaaauuagcaaacacu

SEQ ID NO: 1277502 - RNA, 22 nt, Human
uuagcaaacacugcaaagaaga

SEQ ID NO: 1277503 - RNA, 19 nt, Human
uuggaagcuaaauggaauc

SEQ ID NO: 1277504 - RNA, 23 nt, Human
aaaaaaaaaaaaaaaaaaaagag

SEQ ID NO: 1277505 - RNA, 18 nt, Human
aaaacccuaagggaugua

SEQ ID NO: 1277506 - RNA, 20 nt, Human
aaacaacaauaacaacugua

SEQ ID NO: 1277507 - RNA, 19 nt, Human
aaagaaaaaacacaagaaa

SEQ ID NO: 1277508 - RNA, 24 nt, Human
aaagaaaaaacacaagaaacccca

SEQ ID NO: 1277509 - RNA, 26 nt, Human
aaagaaaaaacacaagaaaccccaag

SEQ ID NO: 1277510 - RNA, 23 nt, Human
aaagagacgaacagagggucaga

SEQ ID NO: 1277511 - RNA, 23 nt, Human
aaaguaccaaaaccaaacuugug

SEQ ID NO: 1277512 - RNA, 23 nt, Human
aacaaaaacaacaauaacaacug

SEQ ID NO: 1277513 - RNA, 24 nt, Human
aacaacaaaaacaacaauaacaac

SEQ ID NO: 1277514 - RNA, 22 nt, Human
aacugaauacaaagaggaacaa

SEQ ID NO: 1277515 - RNA, 22 nt, Human
aacuugcaccucaaaaaacuuu

SEQ ID NO: 1277516 - RNA, 23 nt, Human
aagaaaaaacacaagaaacccca

SEQ ID NO: 1277517 - RNA, 22 nt, Human
aagcaccaaccccacaucgcag

SEQ ID NO: 1277518 - RNA, 21 nt, Human
aauaauaaaaacccuaaggga

SEQ ID NO: 1277519 - RNA, 21 nt, Human
aaucaaugagaaaaaaaaaaa

SEQ ID NO: 1277520 - RNA, 23 nt, Human
aaucuuccaaaacuggcauccga

SEQ ID NO: 1277521 - RNA, 21 nt, Human
acgaacagagggucagaacgc

SEQ ID NO: 1277522 - RNA, 23 nt, Human
agaaaaaacacaagaaaccccaa

SEQ ID NO: 1277523 - RNA, 24 nt, Human
agaaaaaacacaagaaaccccaaa

SEQ ID NO: 1277524 - RNA, 26 nt, Human
agaaggagaaagagaaucaaacaaaa

SEQ ID NO: 1277525 - RNA, 23 nt, Human
agaggaaagagacgaacagaggg

SEQ ID NO: 1277526 - RNA, 18 nt, Human
aggaaagagacgaacaga

SEQ ID NO: 1277527 - RNA, 24 nt, Human
aggaacaaaaaguaccaaaaccaa

SEQ ID NO: 1277528 - RNA, 19 nt, Human
aggaagacugggaauaccu

SEQ ID NO: 1277529 - RNA, 24 nt, Human
aguguggagagucgcaaagaaaaa

SEQ ID NO: 1277530 - RNA, 22 nt, Human
aucaaacaaaauguauagaaac

SEQ ID NO: 1277531 - RNA, 20 nt, Human
aucuugcauguguaguuuua

SEQ ID NO: 1277532 - RNA, 23 nt, Human
caaagaaaaaacacaagaaaccc

SEQ ID NO: 1277533 - RNA, 27 nt, Human
caaagaaaaaacacaagaaaccccaaa

SEQ ID NO: 1277534 - RNA, 24 nt, Human
caacaaaaacaacaauaacaacug

SEQ ID NO: 1277535 - RNA, 23 nt, Human
caagcaccaaccccacaucgcag

SEQ ID NO: 1277536 - RNA, 25 nt, Human
caaggcuaaguaaagcuuuaaauca

SEQ ID NO: 1277537 - RNA, 18 nt, Human
caccucacuaauaaaaug

SEQ ID NO: 1277538 - RNA, 24 nt, Human
cauggugaaucuuccaaaacuggc

SEQ ID NO: 1277539 - RNA, 21 nt, Human
ccagcgcugcuuggaacacag

SEQ ID NO: 1277540 - RNA, 19 nt, Human
ccagcuacacacgucgcug

SEQ ID NO: 1277541 - RNA, 22 nt, Human
ccucaaaaaacuuuucagaaga

SEQ ID NO: 1277542 - RNA, 21 nt, Human
cgaggguacagaucaaggcua

SEQ ID NO: 1277543 - RNA, 19 nt, Human
cuucaagcaccaaccccac

SEQ ID NO: 1277544 - RNA, 24 nt, Human
gaagaaagaggagaggaaagagac

SEQ ID NO: 1277545 - RNA, 21 nt, Human
gaagguaaauauaaaccuauu

SEQ ID NO: 1277546 - RNA, 24 nt, Human
gagaaagagaaucaaacaaaaugu

SEQ ID NO: 1277547 - RNA, 19 nt, Human
gaucauugguucugauuug

SEQ ID NO: 1277548 - RNA, 20 nt, Human
gcaaagaaaaaacacaagaa

SEQ ID NO: 1277549 - RNA, 23 nt, Human
gcaaagaaaaaacacaagaaacc

SEQ ID NO: 1277550 - RNA, 25 nt, Human
gcaaagaaaaaacacaagaaacccc

SEQ ID NO: 1277551 - RNA, 24 nt, Human
gggcuauuuaagaaacuagaaaca

SEQ ID NO: 1277552 - RNA, 20 nt, Human
gguaaggcuuggauuaggcu

SEQ ID NO: 1277553 - RNA, 23 nt, Human
guaaagcuuuaaaucaauaguga

SEQ ID NO: 1277554 - RNA, 20 nt, Human
guagcacagcuggguaaggc

SEQ ID NO: 1277555 - RNA, 22 nt, Human
uaaacugguucauacaccccua

SEQ ID NO: 1277556 - RNA, 22 nt, Human
uaauaauaauaaaaacccuaag

SEQ ID NO: 1277557 - RNA, 19 nt, Human
uacaaagaggaacaaaaag

SEQ ID NO: 1277558 - RNA, 26 nt, Human
uagaaacaaauuagcuggacaugcaa

SEQ ID NO: 1277559 - RNA, 23 nt, Human
uaggccaagggaucauugguucu

SEQ ID NO: 1277560 - RNA, 20 nt, Human
uaguaguauuuccuugcuuu

SEQ ID NO: 1277561 - RNA, 23 nt, Human
ucacccagaguuuaaacaaauca

SEQ ID NO: 1277562 - RNA, 25 nt, Human
ucauugguucugauuugcauucauc

SEQ ID NO: 1277563 - RNA, 19 nt, Human
uccugugaagucugggagg

SEQ ID NO: 1277564 - RNA, 21 nt, Human
ucucuacaguaaauaaaaccu

SEQ ID NO: 1277565 - RNA, 20 nt, Human
ucugcagugcuccaggcacg

SEQ ID NO: 1277566 - RNA, 23 nt, Human
ugaagaaagaggagaggaaagag

SEQ ID NO: 1277567 - RNA, 18 nt, Human
ugacaguagcacagcugg

SEQ ID NO: 1277568 - RNA, 20 nt, Human
ugagagaaggagaaagagaa

SEQ ID NO: 1277569 - RNA, 18 nt, Human
ugauuacugcuacaucuc

SEQ ID NO: 1277570 - RNA, 18 nt, Human
ugcaugggcugaaaucac

SEQ ID NO: 1277571 - RNA, 24 nt, Human
ugcgagcggcagccccagcuacac

SEQ ID NO: 1277572 - RNA, 19 nt, Human
uggaaguucuauacaacug

SEQ ID NO: 1277573 - RNA, 18 nt, Human
uggggggugggggaaggg

SEQ ID NO: 1277574 - RNA, 20 nt, Human
uggggggugggggaagggca

SEQ ID NO: 1277575 - RNA, 23 nt, Human
uggggggugggggaagggcaaaa

SEQ ID NO: 1277576 - RNA, 19 nt, Human
ugugaagucugggagguug

SEQ ID NO: 1277577 - RNA, 31 nt, Human
uuaaucaaugagaaaaaaaaaaaaaaaaaaa

SEQ ID NO: 1277578 - RNA, 19 nt, Human
uucacaguuuaauauuggg

SEQ ID NO: 1277579 - RNA, 21 nt, Human
uucauguagugauugaaucuc

SEQ ID NO: 1277580 - RNA, 21 nt, Human
uuggaaguucuauacaacuga

SEQ ID NO: 1277581 - RNA, 18 nt, Human
uuuguaaaagcccugaga

SEQ ID NO: 1277582 - RNA, 19 nt, Human
aaaaagagagcuucugcag

SEQ ID NO: 1277583 - RNA, 24 nt, Human
aagacccacccccauaauuaaauc

SEQ ID NO: 1277584 - RNA, 26 nt, Human
aaucaccucccaccggguuccuccca

SEQ ID NO: 1277585 - RNA, 23 nt, Human
aauuauuuuuuacauauaagcau

SEQ ID NO: 1277586 - RNA, 19 nt, Human
aauucaagaugagauuugg

SEQ ID NO: 1277587 - RNA, 20 nt, Human
acaaagaggagcaagucaca

SEQ ID NO: 1277588 - RNA, 22 nt, Human
acccccauaauuaaaucaccuc

SEQ ID NO: 1277589 - RNA, 26 nt, Human
agagauaugugcccuuuaaaugggcc

SEQ ID NO: 1277590 - RNA, 21 nt, Human
agauaugugcccuuuaaaugg

SEQ ID NO: 1277591 - RNA, 19 nt, Human
agauuauguaaauuucaug

SEQ ID NO: 1277592 - RNA, 21 nt, Human
aggcaaaaagagagcuucugc

SEQ ID NO: 1277593 - RNA, 21 nt, Human
auauguaguagaauuuauaua

SEQ ID NO: 1277594 - RNA, 19 nt, Human
aucaccucccaccggguuc

SEQ ID NO: 1277595 - RNA, 25 nt, Human
aucaccucccaccggguuccuccca

SEQ ID NO: 1277596 - RNA, 21 nt, Human
augaagacauacccaagacug

SEQ ID NO: 1277597 - RNA, 21 nt, Human
auuuggguggggacacagcca

SEQ ID NO: 1277598 - RNA, 23 nt, Human
caaaacaaagagguuuauugaac

SEQ ID NO: 1277599 - RNA, 27 nt, Human
caacgggagaaguuugaaaaaagagaa

SEQ ID NO: 1277600 - RNA, 23 nt, Human
cacccccauaauuaaaucaccuc

SEQ ID NO: 1277601 - RNA, 23 nt, Human
cacguuagaaccaaaagaugaga

SEQ ID NO: 1277602 - RNA, 25 nt, Human
cagagaaacccccauuuuuaaaacc

SEQ ID NO: 1277603 - RNA, 23 nt, Human
cagcacaggaaagacccaccccc

SEQ ID NO: 1277604 - RNA, 27 nt, Human
cagcacaggaaagacccacccccauaa

SEQ ID NO: 1277605 - RNA, 26 nt, Human
caggaaagacccacccccauaauuaa

SEQ ID NO: 1277606 - RNA, 23 nt, Human
cccccauaauuaaaucaccuccc

SEQ ID NO: 1277607 - RNA, 22 nt, Human
ccucccacagacaugugggaau

SEQ ID NO: 1277608 - RNA, 20 nt, Human
ccucccaccggguuccuccc

SEQ ID NO: 1277609 - RNA, 19 nt, Human
gacauuaagaauagugggg

SEQ ID NO: 1277610 - RNA, 28 nt, Human
gagaacagcacaggaaagaccgguaccc

SEQ ID NO: 1277611 - RNA, 19 nt, Human
gagcuucugcagagaaacc

SEQ ID NO: 1277612 - RNA, 21 nt, Human
ggaguuacaauucaagaugag

SEQ ID NO: 1277613 - RNA, 22 nt, Human
uaacauaaguaaauagauucuc

SEQ ID NO: 1277614 - RNA, 23 nt, Human
uaagaauaguggggugcuaaaga

SEQ ID NO: 1277615 - RNA, 20 nt, Human
uacuuguaaucugcucuaga

SEQ ID NO: 1277616 - RNA, 23 nt, Human
uagaaccaaaagaugagagauau

SEQ ID NO: 1277617 - RNA, 24 nt, Human
uauccuauugacccuucucauaaa

SEQ ID NO: 1277618 - RNA, 18 nt, Human
uauuaggagaacagcaca

SEQ ID NO: 1277619 - RNA, 21 nt, Human
uauuuguguauguguauauaa

SEQ ID NO: 1277620 - RNA, 19 nt, Human
uccacauggcugaggaggc

SEQ ID NO: 1277621 - RNA, 21 nt, Human
ucuaaacuagauuauguaaau

SEQ ID NO: 1277622 - RNA, 19 nt, Human
ucugcagagaaacccccau

SEQ ID NO: 1277623 - RNA, 22 nt, Human
ugagauuuggguggggacacag

SEQ ID NO: 1277624 - RNA, 22 nt, Human
ugagcugcugaugugugugcuu

SEQ ID NO: 1277625 - RNA, 19 nt, Human
uggaagacaaagaggagca

SEQ ID NO: 1277626 - RNA, 19 nt, Human
uggcaggaggcaaaaagag

SEQ ID NO: 1277627 - RNA, 21 nt, Human
uggcaggaggcaaaaagagag

SEQ ID NO: 1277628 - RNA, 22 nt, Human
uguauuuguguauguguauaua

SEQ ID NO: 1277629 - RNA, 24 nt, Human
uguguauuuguguauguguauaua

SEQ ID NO: 1277630 - RNA, 24 nt, Human
uucaagaugagauuugggugggga

SEQ ID NO: 1277631 - RNA, 24 nt, Human
uugaaaguuucuuuauccuauuga

SEQ ID NO: 1277632 - RNA, 20 nt, Human
uuguguauuuguguaugugu

SEQ ID NO: 1277633 - RNA, 18 nt, Human
uuuucccaguaaugcuga

SEQ ID NO: 1277634 - RNA, 23 nt, Human
aaagaaaaaaaaaaaggccacau

SEQ ID NO: 1277635 - RNA, 25 nt, Human
aaauacuccugggguugacccaaac

SEQ ID NO: 1277636 - RNA, 24 nt, Human
aacagacuguguaaaagaauuaga

SEQ ID NO: 1277637 - RNA, 22 nt, Human
aagagguccggcuggccgcgcc

SEQ ID NO: 1277638 - RNA, 19 nt, Human
acccucagaacacaggccc

SEQ ID NO: 1277639 - RNA, 18 nt, Human
acgcaugcccccgccaag

SEQ ID NO: 1277640 - RNA, 23 nt, Human
agcaguagcagugagagcgagcc

SEQ ID NO: 1277641 - RNA, 26 nt, Human
aggcccagagaccuggcaggccggga

SEQ ID NO: 1277642 - RNA, 18 nt, Human
auucucaauaauuuacua

SEQ ID NO: 1277643 - RNA, 21 nt, Human
caagagggaugcaccucccag

SEQ ID NO: 1277644 - RNA, 22 nt, Human
caaggacacuggcgucuccccc

SEQ ID NO: 1277645 - RNA, 22 nt, Human
caccaggacccgcgcugaaggc

SEQ ID NO: 1277646 - RNA, 18 nt, Human
cacccagcagccgcgcac

SEQ ID NO: 1277647 - RNA, 18 nt, Human
caccuggaaugggugacu

SEQ ID NO: 1277648 - RNA, 22 nt, Human
cagcuugcuggagacucugcgg

SEQ ID NO: 1277649 - RNA, 26 nt, Human
cagcuugcuggagacucugcggucag

SEQ ID NO: 1277650 - RNA, 19 nt, Human
caggggagccccagcuucc

SEQ ID NO: 1277651 - RNA, 24 nt, Human
caguccaagcucacacgguuaucu

SEQ ID NO: 1277652 - RNA, 18 nt, Human
cagugaacagcugaggcg

SEQ ID NO: 1277653 - RNA, 21 nt, Human
cagugcgcagcccugugggca

SEQ ID NO: 1277654 - RNA, 30 nt, Human
ccagauaaaagauaaaaagaaaaaaaaaaa

SEQ ID NO: 1277655 - RNA, 18 nt, Human
cccaagcgcucgcccccg

SEQ ID NO: 1277656 - RNA, 25 nt, Human
cccacuaggagccccugcugcucca

SEQ ID NO: 1277657 - RNA, 21 nt, Human
cccccgcgccuccucccucgc

SEQ ID NO: 1277658 - RNA, 19 nt, Human
ccccgccgcccgcccgccc

SEQ ID NO: 1277659 - RNA, 19 nt, Human
ccccgcgccuccucccucg

SEQ ID NO: 1277660 - RNA, 23 nt, Human
cccgccaagggcuccccagcccc

SEQ ID NO: 1277661 - RNA, 21 nt, Human
cccgcgcugaaggcccagaga

SEQ ID NO: 1277662 - RNA, 18 nt, Human
cccggagccgggagccgg

SEQ ID NO: 1277663 - RNA, 23 nt, Human
ccgcaggucggugacuggaccag

SEQ ID NO: 1277664 - RNA, 20 nt, Human
ccgccgcccgcccgcccgca

SEQ ID NO: 1277665 - RNA, 21 nt, Human
ccgcgcccccgccgccucccc

SEQ ID NO: 1277666 - RNA, 20 nt, Human
ccgcgccuccucccucgcgg

SEQ ID NO: 1277667 - RNA, 23 nt, Human
ccgcguccgccucccgcccgccu

SEQ ID NO: 1277668 - RNA, 19 nt, Human
ccucccgcccgccucccgc

SEQ ID NO: 1277669 - RNA, 22 nt, Human
ccuccggcugugaccucagcuu

SEQ ID NO: 1277670 - RNA, 22 nt, Human
ccuggcccacuaggagccccug

SEQ ID NO: 1277671 - RNA, 19 nt, Human
ccuucugcaaauacuccug

SEQ ID NO: 1277672 - RNA, 20 nt, Human
cgccaagggcuccccagccc

SEQ ID NO: 1277673 - RNA, 18 nt, Human
cgcgcugccgcggccacg

SEQ ID NO: 1277674 - RNA, 21 nt, Human
cgcucaguccaagcucacacg

SEQ ID NO: 1277675 - RNA, 19 nt, Human
cgcucuggaaaggaagagg

SEQ ID NO: 1277676 - RNA, 23 nt, Human
cggaugccguucacccagcagcc

SEQ ID NO: 1277677 - RNA, 22 nt, Human
cgggaaaggcgucgcgcaggcg

SEQ ID NO: 1277678 - RNA, 21 nt, Human
cgggagccgggccgaguccca

SEQ ID NO: 1277679 - RNA, 20 nt, Human
cggggucggcccgucacucc

SEQ ID NO: 1277680 - RNA, 21 nt, Human
cuaaacauccccugccugugg

SEQ ID NO: 1277681 - RNA, 18 nt, Human
cuagucggcaaugccuuc

SEQ ID NO: 1277682 - RNA, 18 nt, Human
cucgaagaacuccucuuc

SEQ ID NO: 1277683 - RNA, 21 nt, Human
cucuccugugggcaggggagc

SEQ ID NO: 1277684 - RNA, 24 nt, Human
cucuucgucgccgcgccggcugac

SEQ ID NO: 1277685 - RNA, 18 nt, Human
cugcagccaauacccccc

SEQ ID NO: 1277686 - RNA, 22 nt, Human
cuggccgcgcccccgccgccuc

SEQ ID NO: 1277687 - RNA, 19 nt, Human
cuugucaaaaucucccuca

SEQ ID NO: 1277688 - RNA, 18 nt, Human
cuuugcagggauggggaa

SEQ ID NO: 1277689 - RNA, 21 nt, Human
gaacacaggcccuguggccuc

SEQ ID NO: 1277690 - RNA, 23 nt, Human
gagaccgcgcugccgcggccacg

SEQ ID NO: 1277691 - RNA, 24 nt, Human
gcagcagcugugaccaugggggcc

SEQ ID NO: 1277692 - RNA, 18 nt, Human
gccgcagcaccaggaccc

SEQ ID NO: 1277693 - RNA, 19 nt, Human
gccuccucccucgcggccc

SEQ ID NO: 1277694 - RNA, 18 nt, Human
gcgcgccccggccggggu

SEQ ID NO: 1277695 - RNA, 22 nt, Human
gcggcgcggcggcgaguggcuc

SEQ ID NO: 1277696 - RNA, 21 nt, Human
ggagccccugcugcuccacuu

SEQ ID NO: 1277697 - RNA, 21 nt, Human
gggaaugguggggagucaggg

SEQ ID NO: 1277698 - RNA, 25 nt, Human
gggaaugguggggagucaggguggc

SEQ ID NO: 1277699 - RNA, 20 nt, Human
gggagggaaugguggggagu

SEQ ID NO: 1277700 - RNA, 19 nt, Human
gggcaggggagccccagcu

SEQ ID NO: 1277701 - RNA, 23 nt, Human
ggucggugacuggaccagccggg

SEQ ID NO: 1277702 - RNA, 19 nt, Human
guagagcacgcugcggucc

SEQ ID NO: 1277703 - RNA, 21 nt, Human
uaaaaacagacuguguaaaag

SEQ ID NO: 1277704 - RNA, 20 nt, Human
uaacuuuuucagaaguucug

SEQ ID NO: 1277705 - RNA, 24 nt, Human
uagcagugagagcgagccccacag

SEQ ID NO: 1277706 - RNA, 18 nt, Human
ucaaaaucucccucaaga

SEQ ID NO: 1277707 - RNA, 19 nt, Human
ucagagcuggcagugaaca

SEQ ID NO: 1277708 - RNA, 20 nt, Human
ucagagcuggcagugaacag

SEQ ID NO: 1277709 - RNA, 22 nt, Human
uccacuugcaggacacccaggc

SEQ ID NO: 1277710 - RNA, 18 nt, Human
uccccagccccgccgccc

SEQ ID NO: 1277711 - RNA, 19 nt, Human
uccccagccccgccgcccg

SEQ ID NO: 1277712 - RNA, 18 nt, Human
ucccguccuuucaaguuc

SEQ ID NO: 1277713 - RNA, 21 nt, Human
uccgucggcuuugcagggaug

SEQ ID NO: 1277714 - RNA, 30 nt, Human
ucgcacgcaugcccccgccaagggcucccu

SEQ ID NO: 1277715 - RNA, 21 nt, Human
ucgcccccgccucgcgccccc

SEQ ID NO: 1277716 - RNA, 21 nt, Human
ugacuugucaaaaucucccuc

SEQ ID NO: 1277717 - RNA, 22 nt, Human
ugacuugucaaaaucucccuca

SEQ ID NO: 1277718 - RNA, 18 nt, Human
ugcccaaggacacuggcg

SEQ ID NO: 1277719 - RNA, 21 nt, Human
ugcccuggcagugcgcagccc

SEQ ID NO: 1277720 - RNA, 22 nt, Human
ugccuguggcaccuggaauggg

SEQ ID NO: 1277721 - RNA, 21 nt, Human
uggcagugcgcagcccugugg

SEQ ID NO: 1277722 - RNA, 23 nt, Human
uggccgcgcccccgccgccuccg

SEQ ID NO: 1277723 - RNA, 23 nt, Human
uggccuccggcugugaccucagc

SEQ ID NO: 1277724 - RNA, 28 nt, Human
ugggaagaaccaccaacgcucaguccaa

SEQ ID NO: 1277725 - RNA, 21 nt, Human
ugggacgucugggaguuccag

SEQ ID NO: 1277726 - RNA, 19 nt, Human
ugggaguuccagagcuggg

SEQ ID NO: 1277727 - RNA, 18 nt, Human
uggggagucaggguggcu

SEQ ID NO: 1277728 - RNA, 25 nt, Human
uggggcagcagcugugaccaugggg

SEQ ID NO: 1277729 - RNA, 21 nt, Human
ugggugacuugucaaaaucuc

SEQ ID NO: 1277730 - RNA, 21 nt, Human
ugucaaaaucucccucaagac

SEQ ID NO: 1277731 - RNA, 21 nt, Human
ugugaccaugggggccagcac

SEQ ID NO: 1277732 - RNA, 21 nt, Human
uguguaaaagaauuagaauuc

SEQ ID NO: 1277733 - RNA, 22 nt, Human
uucaccaagagggaugcaccuc

SEQ ID NO: 1277734 - RNA, 18 nt, Human
uucauuauggcagcucug

SEQ ID NO: 1277735 - RNA, 18 nt, Human
uuccagagcuggggcagc

SEQ ID NO: 1277736 - RNA, 21 nt, Human
uugacccaaacccaguuucca

SEQ ID NO: 1277737 - RNA, 20 nt, Human
uugcaggggaaaagccuguu

SEQ ID NO: 1277738 - RNA, 23 nt, Human
uuuugcaggggaaaagccuguuc

SEQ ID NO: 1277739 - RNA, 22 nt, Human
aaaaaaaaguuuacacgaccag

SEQ ID NO: 1277740 - RNA, 25 nt, Human
aaaaaaccauacacagacucuagca

SEQ ID NO: 1277741 - RNA, 20 nt, Human
aaacaaaaacauguaaccuu

SEQ ID NO: 1277742 - RNA, 19 nt, Human
aaacagaaagggaaaaagg

SEQ ID NO: 1277743 - RNA, 20 nt, Human
aaagaacaaagugaagaaau

SEQ ID NO: 1277744 - RNA, 23 nt, Human
aaaggaccuuaaaaaaccauaca

SEQ ID NO: 1277745 - RNA, 18 nt, Human
aaaguggugccugcccuu

SEQ ID NO: 1277746 - RNA, 24 nt, Human
aaccauacacagacucuagcaaaa

SEQ ID NO: 1277747 - RNA, 18 nt, Human
aaccuuuuuccuguuucu

SEQ ID NO: 1277748 - RNA, 19 nt, Human
aagcagcaggccgggugga

SEQ ID NO: 1277749 - RNA, 18 nt, Human
aagcaggaagcuggccca

SEQ ID NO: 1277750 - RNA, 21 nt, Human
aagcaggaagcuggcccagga

SEQ ID NO: 1277751 - RNA, 22 nt, Human
aagggaaaaaggaccuuaaaaa

SEQ ID NO: 1277752 - RNA, 18 nt, Human
acaaaguggugccugccc

SEQ ID NO: 1277753 - RNA, 22 nt, Human
acacagacucuagcaaaagcca

SEQ ID NO: 1277754 - RNA, 25 nt, Human
acacagcccauggcaaagacaugcu

SEQ ID NO: 1277755 - RNA, 24 nt, Human
acaguuuuuauauuacaaccucaa

SEQ ID NO: 1277756 - RNA, 19 nt, Human
accucaaggacagggaggg

SEQ ID NO: 1277757 - RNA, 22 nt, Human
acucugcucccaagagcccagg

SEQ ID NO: 1277758 - RNA, 24 nt, Human
acuuuaaaaaagagggaaggugag

SEQ ID NO: 1277759 - RNA, 22 nt, Human
agaaaaagaacaaagugaagaa

SEQ ID NO: 1277760 - RNA, 22 nt, Human
agaaaagaaagucuugaaaggg

SEQ ID NO: 1277761 - RNA, 20 nt, Human
agaaaguagccauguuuuca

SEQ ID NO: 1277762 - RNA, 23 nt, Human
agaggcuggaggucauuuggacu

SEQ ID NO: 1277763 - RNA, 21 nt, Human
agagggaauaaagugcuucuc

SEQ ID NO: 1277764 - RNA, 19 nt, Human
agcuccugcgggugcuccc

SEQ ID NO: 1277765 - RNA, 21 nt, Human
agcuuagaaaguagccauguu

SEQ ID NO: 1277766 - RNA, 19 nt, Human
aggaacacgaagagaccca

SEQ ID NO: 1277767 - RNA, 19 nt, Human
aggaagcgguggugucuga

SEQ ID NO: 1277768 - RNA, 20 nt, Human
aggaggaauaaaaacgagca

SEQ ID NO: 1277769 - RNA, 18 nt, Human
aggcagccuggggggcuc

SEQ ID NO: 1277770 - RNA, 21 nt, Human
aggcaggcgugagggggccca

SEQ ID NO: 1277771 - RNA, 22 nt, Human
aggcagggagaggcuggccaga

SEQ ID NO: 1277772 - RNA, 22 nt, Human
agguacaacagaugcgacacca

SEQ ID NO: 1277773 - RNA, 22 nt, Human
aggucgaggcaggggcagcguu

SEQ ID NO: 1277774 - RNA, 19 nt, Human
aggugugggugacgggcgu

SEQ ID NO: 1277775 - RNA, 20 nt, Human
agguuuguuuuuguuuucuu

SEQ ID NO: 1277776 - RNA, 22 nt, Human
auaaaaacgagcacaucucagg

SEQ ID NO: 1277777 - RNA, 23 nt, Human
auccugaaggaaagaugaagcug

SEQ ID NO: 1277778 - RNA, 19 nt, Human
caaccucaaggacagggag

SEQ ID NO: 1277779 - RNA, 23 nt, Human
caaguacaaaaggaugauccuga

SEQ ID NO: 1277780 - RNA, 23 nt, Human
cacacgggacaugaaagcgaggu

SEQ ID NO: 1277781 - RNA, 21 nt, Human
cacaucuccaggcccuuacug

SEQ ID NO: 1277782 - RNA, 23 nt, Human
cacuggacucugcucccaagagc

SEQ ID NO: 1277783 - RNA, 26 nt, Human
cacuggacucugcucccaagagccca

SEQ ID NO: 1277784 - RNA, 18 nt, Human
cacuguggcaucuuccca

SEQ ID NO: 1277785 - RNA, 19 nt, Human
cagagaauucccacccaca

SEQ ID NO: 1277786 - RNA, 18 nt, Human
cagaugcgacaccaugca

SEQ ID NO: 1277787 - RNA, 18 nt, Human
cagcuccugcgggugcuc

SEQ ID NO: 1277788 - RNA, 21 nt, Human
caggugucggcgugguccagc

SEQ ID NO: 1277789 - RNA, 22 nt, Human
caguaaacaaaaacauguaacc

SEQ ID NO: 1277790 - RNA, 18 nt, Human
cagugucuucguuggacc

SEQ ID NO: 1277791 - RNA, 25 nt, Human
cauggcaaagacaugcuucgagaag

SEQ ID NO: 1277792 - RNA, 18 nt, Human
ccaaaacacacgggacau

SEQ ID NO: 1277793 - RNA, 21 nt, Human
ccaaagguacaacagaugcga

SEQ ID NO: 1277794 - RNA, 22 nt, Human
ccagugagacugcucgcaacuu

SEQ ID NO: 1277795 - RNA, 20 nt, Human
cccacacguacagaaacaca

SEQ ID NO: 1277796 - RNA, 24 nt, Human
cccacccacacguacagaaacaca

SEQ ID NO: 1277797 - RNA, 22 nt, Human
cccugcacacgaacagaagcuc

SEQ ID NO: 1277798 - RNA, 18 nt, Human
cccuggucacuguggcau

SEQ ID NO: 1277799 - RNA, 25 nt, Human
ccgaagccccaccucugugcuaugc

SEQ ID NO: 1277800 - RNA, 20 nt, Human
ccgcucccugcccgaagccc

SEQ ID NO: 1277801 - RNA, 19 nt, Human
ccggcacaagagcugccug

SEQ ID NO: 1277802 - RNA, 21 nt, Human
ccggguggaaagccagaaggg

SEQ ID NO: 1277803 - RNA, 22 nt, Human
ccgucagagaauucccacccac

SEQ ID NO: 1277804 - RNA, 20 nt, Human
ccgucuaaaaugcagucccg

SEQ ID NO: 1277805 - RNA, 18 nt, Human
ccuuuuuccuguuucucu

SEQ ID NO: 1277806 - RNA, 20 nt, Human
cgacaccaugcagacacgca

SEQ ID NO: 1277807 - RNA, 18 nt, Human
cgaggaacacgaagagac

SEQ ID NO: 1277808 - RNA, 21 nt, Human
cggaaacgcuccacgguccuc

SEQ ID NO: 1277809 - RNA, 21 nt, Human
cggugugaccucacaggccca

SEQ ID NO: 1277810 - RNA, 24 nt, Human
cgucuaaaaugcagucccggaaac

SEQ ID NO: 1277811 - RNA, 22 nt, Human
cuacagcuucaauuuccaaaaa

SEQ ID NO: 1277812 - RNA, 19 nt, Human
cuccccagagggaccggcc

SEQ ID NO: 1277813 - RNA, 22 nt, Human
cucccccgcacaugcgauaccu

SEQ ID NO: 1277814 - RNA, 22 nt, Human
cuccugccucugcacgcaggca

SEQ ID NO: 1277815 - RNA, 24 nt, Human
cucgcuggauccuucccaccuucc

SEQ ID NO: 1277816 - RNA, 18 nt, Human
cucuuaccuuacaaacag

SEQ ID NO: 1277817 - RNA, 19 nt, Human
cuguaguguggaccucccc

SEQ ID NO: 1277818 - RNA, 23 nt, Human
cuguucuguagccaaaccaauuu

SEQ ID NO: 1277819 - RNA, 19 nt, Human
cuuccccaacugccuacug

SEQ ID NO: 1277820 - RNA, 23 nt, Human
gaaaaugccaagaggaaaccucc

SEQ ID NO: 1277821 - RNA, 21 nt, Human
gaaacgaggaacacgaagaga

SEQ ID NO: 1277822 - RNA, 20 nt, Human
gaccaguuuuuuauugucau

SEQ ID NO: 1277823 - RNA, 18 nt, Human
gaggagcuggacguggag

SEQ ID NO: 1277824 - RNA, 22 nt, Human
gagguuuguuuuuguuuucuuu

SEQ ID NO: 1277825 - RNA, 24 nt, Human
gcaggcaggcagccuggggggcuc

SEQ ID NO: 1277826 - RNA, 20 nt, Human
gcagggagaggcuggccaga

SEQ ID NO: 1277827 - RNA, 21 nt, Human
gccuggggggcuccugggugc

SEQ ID NO: 1277828 - RNA, 25 nt, Human
gcuuagaaaguagccauguuuucaa

SEQ ID NO: 1277829 - RNA, 23 nt, Human
ggaaggcaggcgugagggggccc

SEQ ID NO: 1277830 - RNA, 19 nt, Human
ggaaucuccgcucccugcc

SEQ ID NO: 1277831 - RNA, 23 nt, Human
ggacucugcucccaagagcccag

SEQ ID NO: 1277832 - RNA, 18 nt, Human
ggacugcaggguggccug

SEQ ID NO: 1277833 - RNA, 19 nt, Human
ggagagggaauaaagugcu

SEQ ID NO: 1277834 - RNA, 20 nt, Human
ggcugaagugcugagcagug

SEQ ID NO: 1277835 - RNA, 25 nt, Human
gggaaaaaggaccuuaaaaaaccau

SEQ ID NO: 1277836 - RNA, 18 nt, Human
gggcccagcuccugcggg

SEQ ID NO: 1277837 - RNA, 23 nt, Human
ggggcccagcuccugcgggugcu

SEQ ID NO: 1277838 - RNA, 19 nt, Human
ggugcccaaguugcuacaa

SEQ ID NO: 1277839 - RNA, 21 nt, Human
guccugauggcugaagugcug

SEQ ID NO: 1277840 - RNA, 23 nt, Human
gugcagacguacaccuguccagg

SEQ ID NO: 1277841 - RNA, 18 nt, Human
guggagggcagccccccu

SEQ ID NO: 1277842 - RNA, 21 nt, Human
guggagggcagccccccuucu

SEQ ID NO: 1277843 - RNA, 24 nt, Human
guggagggcagccccccuucugug

SEQ ID NO: 1277844 - RNA, 19 nt, Human
uaaaaaagagggaagguga

SEQ ID NO: 1277845 - RNA, 22 nt, Human
uaaaaugcagucccggaaacgc

SEQ ID NO: 1277846 - RNA, 22 nt, Human
uacaacagaugcgacaccaugc

SEQ ID NO: 1277847 - RNA, 22 nt, Human
uaccagcccgucuuccagaugc

SEQ ID NO: 1277848 - RNA, 22 nt, Human
uacuccaaaaaagguaaaagga

SEQ ID NO: 1277849 - RNA, 18 nt, Human
uagggcauuugauaagag

SEQ ID NO: 1277850 - RNA, 18 nt, Human
uauagcaaguacuccaaa

SEQ ID NO: 1277851 - RNA, 22 nt, Human
uauagcaaguacuccaaaaaag

SEQ ID NO: 1277852 - RNA, 23 nt, Human
ucaauuuccaaaaaaaaaaaaaa

SEQ ID NO: 1277853 - RNA, 23 nt, Human
ucaauuuccaaaaaaaaaaaaaa

SEQ ID NO: 1277854 - RNA, 19 nt, Human
ucacuguggcaucuuccca

SEQ ID NO: 1277855 - RNA, 19 nt, Human
ucagaacucagcguaagcu

SEQ ID NO: 1277856 - RNA, 18 nt, Human
ucauuugagguggagauc

SEQ ID NO: 1277857 - RNA, 19 nt, Human
uccacgguccucuccugcc

SEQ ID NO: 1277858 - RNA, 22 nt, Human
uccacgguccucuccugccucu

SEQ ID NO: 1277859 - RNA, 20 nt, Human
ucccagagcaacugcgucuc

SEQ ID NO: 1277860 - RNA, 21 nt, Human
ucccaggugucggcguggucc

SEQ ID NO: 1277861 - RNA, 21 nt, Human
ucccaucuccccagagggacc

SEQ ID NO: 1277862 - RNA, 18 nt, Human
ucccggaaacgcuccacg

SEQ ID NO: 1277863 - RNA, 23 nt, Human
ucccugcacacgaacagaagcuc

SEQ ID NO: 1277864 - RNA, 19 nt, Human
ucccuggagugaugucuga

SEQ ID NO: 1277865 - RNA, 18 nt, Human
uccuccgacccgcgcucc

SEQ ID NO: 1277866 - RNA, 22 nt, Human
ucgggcagcacucuacagcuuc

SEQ ID NO: 1277867 - RNA, 27 nt, Human
ucuccaagagcuuccagcaucaaguac

SEQ ID NO: 1277868 - RNA, 19 nt, Human
ucugugagcugcuuucccu

SEQ ID NO: 1277869 - RNA, 25 nt, Human
ugaaacgaggaacacgaagagaccc

SEQ ID NO: 1277870 - RNA, 19 nt, Human
ugaagaaauguucagcucc

SEQ ID NO: 1277871 - RNA, 19 nt, Human
ugaagcugguuuuaacggc

SEQ ID NO: 1277872 - RNA, 20 nt, Human
ugacugcaagcaggaagcug

SEQ ID NO: 1277873 - RNA, 21 nt, Human
ugacugcugcucaauuaagau

SEQ ID NO: 1277874 - RNA, 21 nt, Human
ugagguggagaucagagauca

SEQ ID NO: 1277875 - RNA, 24 nt, Human
ugaugggugcagacguacaccugu

SEQ ID NO: 1277876 - RNA, 19 nt, Human
ugcagacacgcagcuguga

SEQ ID NO: 1277877 - RNA, 20 nt, Human
ugccaguaagaagccaggcu

SEQ ID NO: 1277878 - RNA, 21 nt, Human
ugcccaaguugcuacaaagug

SEQ ID NO: 1277879 - RNA, 23 nt, Human
ugcgggugcucccuggagugaug

SEQ ID NO: 1277880 - RNA, 19 nt, Human
ugcucccaagagcccaggc

SEQ ID NO: 1277881 - RNA, 22 nt, Human
uggaaagacaggauuuccccac

SEQ ID NO: 1277882 - RNA, 18 nt, Human
uggaaggacacagcccau

SEQ ID NO: 1277883 - RNA, 23 nt, Human
uggaccucccccgcacaugcgau

SEQ ID NO: 1277884 - RNA, 22 nt, Human
uggacucaccuaugaggaaucu

SEQ ID NO: 1277885 - RNA, 20 nt, Human
uggaggcagggagaggcugg

SEQ ID NO: 1277886 - RNA, 18 nt, Human
uggcgacagcaagcagca

SEQ ID NO: 1277887 - RNA, 19 nt, Human
uggcgacagcaagcagcag

SEQ ID NO: 1277888 - RNA, 18 nt, Human
uggguguccuacaaguuu

SEQ ID NO: 1277889 - RNA, 18 nt, Human
uguggaggagacaugagu

SEQ ID NO: 1277890 - RNA, 22 nt, Human
uguggcgauaugacugcugcuc

SEQ ID NO: 1277891 - RNA, 20 nt, Human
uguguggaccgcauguggag

SEQ ID NO: 1277892 - RNA, 22 nt, Human
uguuuaagcuuuuucuccaaga

SEQ ID NO: 1277893 - RNA, 24 nt, Human
uguuuuuguuuucuuucuguucug

SEQ ID NO: 1277894 - RNA, 20 nt, Human
uuccucaaagcuagccucuu

SEQ ID NO: 1277895 - RNA, 28 nt, Human
uuccuggguaucucaagaucccaggugu

SEQ ID NO: 1277896 - RNA, 18 nt, Human
uugccccuugcugugucu

SEQ ID NO: 1277897 - RNA, 21 nt, Human
uuucugcccugugaauucuag

SEQ ID NO: 1277898 - RNA, 24 nt, Human
aaacaaaacgggagcgcggccuga

SEQ ID NO: 1277899 - RNA, 24 nt, Human
aagcucaaaagauuaaccccuuaa

SEQ ID NO: 1277900 - RNA, 19 nt, Human
aucccauuucaucccucua

SEQ ID NO: 1277901 - RNA, 23 nt, Human
cacucacagccaaaugaggaagu

SEQ ID NO: 1277902 - RNA, 25 nt, Human
ccagacccgauggagcgagcaccga

SEQ ID NO: 1277903 - RNA, 26 nt, Human
ccagacccgauggagcgagcaccgag

SEQ ID NO: 1277904 - RNA, 20 nt, Human
cccacagcgccagacccggg

SEQ ID NO: 1277905 - RNA, 23 nt, Human
ccccuuaaaaacaaaacgggagc

SEQ ID NO: 1277906 - RNA, 20 nt, Human
ccgcugccagccccgccaga

SEQ ID NO: 1277907 - RNA, 22 nt, Human
cucaaaagauuaaccccuuaaa

SEQ ID NO: 1277908 - RNA, 18 nt, Human
cuuugccucuccuucacc

SEQ ID NO: 1277909 - RNA, 22 nt, Human
gaaguauauacugcccacuuug

SEQ ID NO: 1277910 - RNA, 21 nt, Human
gccccacggcucccggcccac

SEQ ID NO: 1277911 - RNA, 27 nt, Human
uauacugcccacuuugccucuccuuca

SEQ ID NO: 1277912 - RNA, 21 nt, Human
ucccucuaucacucacagcca

SEQ ID NO: 1277913 - RNA, 26 nt, Human
ucuucaaucccaacaaaaaucccauu

SEQ ID NO: 1277914 - RNA, 18 nt, Human
ugccagccccgccagacc

SEQ ID NO: 1277915 - RNA, 18 nt, Human
uuaaccccuuaaaaacaa

SEQ ID NO: 1277916 - RNA, 19 nt, Human
aaaccagcugaagcuggcg

SEQ ID NO: 1277917 - RNA, 19 nt, Human
aagagaccaagaagggaca

SEQ ID NO: 1277918 - RNA, 24 nt, Human
aagcacgaauauucccccccgugc

SEQ ID NO: 1277919 - RNA, 19 nt, Human
aagggacagaaaaaaaggg

SEQ ID NO: 1277920 - RNA, 19 nt, Human
aaguagccccuuggcagga

SEQ ID NO: 1277921 - RNA, 23 nt, Human
aaguccuugaggaaggggguggg

SEQ ID NO: 1277922 - RNA, 20 nt, Human
accacgcaacaggaaacaac

SEQ ID NO: 1277923 - RNA, 21 nt, Human
acucaucccacacugugcccu

SEQ ID NO: 1277924 - RNA, 18 nt, Human
agaaaaaaagggguuucu

SEQ ID NO: 1277925 - RNA, 21 nt, Human
agaaguaaaguaggcaaaaag

SEQ ID NO: 1277926 - RNA, 18 nt, Human
agacaggggagaggggga

SEQ ID NO: 1277927 - RNA, 20 nt, Human
agacaggggagagggggagu

SEQ ID NO: 1277928 - RNA, 25 nt, Human
aggcaaaaaguuaaaaggagggacc

SEQ ID NO: 1277929 - RNA, 19 nt, Human
aguugauuucagaucuucc

SEQ ID NO: 1277930 - RNA, 26 nt, Human
auacagccugcacugcuugacacacu

SEQ ID NO: 1277931 - RNA, 25 nt, Human
auauauacauaucuuaauguaugca

SEQ ID NO: 1277932 - RNA, 22 nt, Human
caaaaacaaacucugauccccc

SEQ ID NO: 1277933 - RNA, 21 nt, Human
caccacgcaacaggaaacaac

SEQ ID NO: 1277934 - RNA, 24 nt, Human
caccacgcaacaggaaacaacccu

SEQ ID NO: 1277935 - RNA, 18 nt, Human
cacccugcuuuugcugcc

SEQ ID NO: 1277936 - RNA, 23 nt, Human
cacugugcccugcgacucacccu

SEQ ID NO: 1277937 - RNA, 21 nt, Human
caggagccccgagccgcuuuu

SEQ ID NO: 1277938 - RNA, 21 nt, Human
cauaaaggacucacuucuccg

SEQ ID NO: 1277939 - RNA, 22 nt, Human
cauaugcgugcaugugugcgug

SEQ ID NO: 1277940 - RNA, 19 nt, Human
cauucuugaugugcuggga

SEQ ID NO: 1277941 - RNA, 22 nt, Human
ccaaggaaagcacgaauauucc

SEQ ID NO: 1277942 - RNA, 21 nt, Human
ccacaguaucuuaucaguuaa

SEQ ID NO: 1277943 - RNA, 23 nt, Human
ccauagccauugaauacagccug

SEQ ID NO: 1277944 - RNA, 21 nt, Human
ccccccgugcucuuaaugccc

SEQ ID NO: 1277945 - RNA, 20 nt, Human
ccccgaugcaagucuuuccc

SEQ ID NO: 1277946 - RNA, 23 nt, Human
cccugcgacucacccugucgcuu

SEQ ID NO: 1277947 - RNA, 20 nt, Human
ccgggaaaaaucuccguucu

SEQ ID NO: 1277948 - RNA, 21 nt, Human
ccucaccacgcaacaggaaac

SEQ ID NO: 1277949 - RNA, 21 nt, Human
ccucugaagagccucuggcuu

SEQ ID NO: 1277950 - RNA, 25 nt, Human
ccucuggcuuuaucaucauccuguu

SEQ ID NO: 1277951 - RNA, 20 nt, Human
ccuugaggaagggggugggu

SEQ ID NO: 1277952 - RNA, 20 nt, Human
cgagagacagcuagcgcucg

SEQ ID NO: 1277953 - RNA, 21 nt, Human
cuccgcgcaggaaguagcccc

SEQ ID NO: 1277954 - RNA, 22 nt, Human
gagaccaagaagggacagaaaa

SEQ ID NO: 1277955 - RNA, 19 nt, Human
gcucugggugcuauuaacc

SEQ ID NO: 1277956 - RNA, 18 nt, Human
gcuggaccccacccugcu

SEQ ID NO: 1277957 - RNA, 26 nt, Human
gcuuucaggagccccgagccgcuuuu

SEQ ID NO: 1277958 - RNA, 18 nt, Human
ggagcuugcaagcuagug

SEQ ID NO: 1277959 - RNA, 18 nt, Human
ggaguccgucuggcucuc

SEQ ID NO: 1277960 - RNA, 25 nt, Human
gggauugggacuggccuggggucuc

SEQ ID NO: 1277961 - RNA, 18 nt, Human
gggcugcgagugaaggag

SEQ ID NO: 1277962 - RNA, 18 nt, Human
ggguauguuacucauugc

SEQ ID NO: 1277963 - RNA, 19 nt, Human
ggguuucuugauuccggga

SEQ ID NO: 1277964 - RNA, 24 nt, Human
ggucuccuacucuccuacuccgcg

SEQ ID NO: 1277965 - RNA, 20 nt, Human
guaaaaaugcugcauaaacg

SEQ ID NO: 1277966 - RNA, 19 nt, Human
guaguaugguuucauuuuc

SEQ ID NO: 1277967 - RNA, 21 nt, Human
gugaagcuuuuuaaauagaga

SEQ ID NO: 1277968 - RNA, 20 nt, Human
gugcaugugugcgugaagcu

SEQ ID NO: 1277969 - RNA, 18 nt, Human
uaaaaaugcugcauaaac

SEQ ID NO: 1277970 - RNA, 24 nt, Human
uaaacaacaugucgccaugacaac

SEQ ID NO: 1277971 - RNA, 25 nt, Human
uacuuugguuuagacaggggagagg

SEQ ID NO: 1277972 - RNA, 19 nt, Human
uagcgcucgaaauucucuu

SEQ ID NO: 1277973 - RNA, 22 nt, Human
uaggacgaaaccagcugaagcu

SEQ ID NO: 1277974 - RNA, 18 nt, Human
uaggguaucccacuagaa

SEQ ID NO: 1277975 - RNA, 22 nt, Human
uauauacauaucuuaauguaug

SEQ ID NO: 1277976 - RNA, 24 nt, Human
uaucccacuagaagccucacauca

SEQ ID NO: 1277977 - RNA, 19 nt, Human
ucagucaggcaggcauucc

SEQ ID NO: 1277978 - RNA, 22 nt, Human
uccccgaugcaagucuuucccg

SEQ ID NO: 1277979 - RNA, 25 nt, Human
uccgcaaaaacaaacucugaucccc

SEQ ID NO: 1277980 - RNA, 18 nt, Human
uccuugaggaagggggug

SEQ ID NO: 1277981 - RNA, 24 nt, Human
ucucaugcuaaacaacaugucgcc

SEQ ID NO: 1277982 - RNA, 24 nt, Human
ucuccuacucuccuacuccgcgca

SEQ ID NO: 1277983 - RNA, 19 nt, Human
ucugggugcagcucagcuc

SEQ ID NO: 1277984 - RNA, 21 nt, Human
ucuuaaugcccagccccuuca

SEQ ID NO: 1277985 - RNA, 23 nt, Human
ugcccagccccuucauuaaagac

SEQ ID NO: 1277986 - RNA, 23 nt, Human
ugccugcugauuucgcuggaccc

SEQ ID NO: 1277987 - RNA, 18 nt, Human
ugcugcuuucaggagccc

SEQ ID NO: 1277988 - RNA, 21 nt, Human
uggaagagaccaagaagggac

SEQ ID NO: 1277989 - RNA, 21 nt, Human
uggcgaaauccaagauggcgc

SEQ ID NO: 1277990 - RNA, 19 nt, Human
ugggaaaaauugggaacug

SEQ ID NO: 1277991 - RNA, 22 nt, Human
ugggaaaaauugggaacuggug

SEQ ID NO: 1277992 - RNA, 25 nt, Human
ugggaaaaauugggaacuggugcaa

SEQ ID NO: 1277993 - RNA, 19 nt, Human
uguauacagccugucuuuu

SEQ ID NO: 1277994 - RNA, 23 nt, Human
uguuucgaaguuccuucuuagga

SEQ ID NO: 1277995 - RNA, 22 nt, Human
uuaacauuugcaacauuuuuaa

SEQ ID NO: 1277996 - RNA, 25 nt, Human
uuaugcucuguuaaccucauuuguu

SEQ ID NO: 1277997 - RNA, 25 nt, Human
uuccauagccauugaauacagccug

SEQ ID NO: 1277998 - RNA, 23 nt, Human
uugggacuggccuggggucuccu

SEQ ID NO: 1277999 - RNA, 20 nt, Human
uugggcguuaucaaccggac

SEQ ID NO: 1278000 - RNA, 19 nt, Human
uugucagggaaaauuaaaa

SEQ ID NO: 1278001 - RNA, 24 nt, Human
uuuacugaguaccuucucuauguc

SEQ ID NO: 1278002 - RNA, 20 nt, Human
aaaaugucuccgccagcacg

SEQ ID NO: 1278003 - RNA, 18 nt, Human
aagcuucucucugaaucc

SEQ ID NO: 1278004 - RNA, 18 nt, Human
acagagcagaggacagga

SEQ ID NO: 1278005 - RNA, 20 nt, Human
acagcaaagcagcuggaggg

SEQ ID NO: 1278006 - RNA, 20 nt, Human
acagcaaagcagcuggaggg

SEQ ID NO: 1278007 - RNA, 24 nt, Human
acgcugcugucaucuccaguauac

SEQ ID NO: 1278008 - RNA, 22 nt, Human
acuggagaggaagucuggggac

SEQ ID NO: 1278009 - RNA, 21 nt, Human
agaaugaaaagggaugggugg

SEQ ID NO: 1278010 - RNA, 24 nt, Human
agcgcacaaacuuggacagggacg

SEQ ID NO: 1278011 - RNA, 22 nt, Human
aggaguccagaggaucugggcc

SEQ ID NO: 1278012 - RNA, 24 nt, Human
aguggaggguaaccacuggagagg

SEQ ID NO: 1278013 - RNA, 19 nt, Human
cacaagcagaccaucccuu

SEQ ID NO: 1278014 - RNA, 20 nt, Human
caccagcaccgcaagggcuc

SEQ ID NO: 1278015 - RNA, 20 nt, Human
caccagcaccgcaagggcuc

SEQ ID NO: 1278016 - RNA, 18 nt, Human
cacgugagguccuuuguu

SEQ ID NO: 1278017 - RNA, 18 nt, Human
cacugcauucauagugug

SEQ ID NO: 1278018 - RNA, 19 nt, Human
cacuggagaggaagucugg

SEQ ID NO: 1278019 - RNA, 25 nt, Human
cacuuuuacuguucucucuuaggga

SEQ ID NO: 1278020 - RNA, 20 nt, Human
cagcaaagcagcuggaggga

SEQ ID NO: 1278021 - RNA, 20 nt, Human
cagcacaauacagcaaagca

SEQ ID NO: 1278022 - RNA, 23 nt, Human
cagcacaauacagcaaagcagcu

SEQ ID NO: 1278023 - RNA, 21 nt, Human
cagcacgcucucaaaagcuuc

SEQ ID NO: 1278024 - RNA, 18 nt, Human
cagcugccuuuguuucuu

SEQ ID NO: 1278025 - RNA, 19 nt, Human
cagcuggagggauugccuu

SEQ ID NO: 1278026 - RNA, 23 nt, Human
caggcaucuuuaucuggggucuu

SEQ ID NO: 1278027 - RNA, 20 nt, Human
caucugaggaguccagagga

SEQ ID NO: 1278028 - RNA, 21 nt, Human
cauuucuguucuaaauccaaa

SEQ ID NO: 1278029 - RNA, 22 nt, Human
cccaggcacgccacggacacca

SEQ ID NO: 1278030 - RNA, 18 nt, Human
cccuguugcuggcugagg

SEQ ID NO: 1278031 - RNA, 20 nt, Human
cccuguugcuggcugagguc

SEQ ID NO: 1278032 - RNA, 24 nt, Human
ccucagagauccuaaaguuuccug

SEQ ID NO: 1278033 - RNA, 21 nt, Human
ccugcgugaaaccucuuuaug

SEQ ID NO: 1278034 - RNA, 21 nt, Human
ccuggcuuuguccacucgcug

SEQ ID NO: 1278035 - RNA, 21 nt, Human
ccugugaaggacgccgccccc

SEQ ID NO: 1278036 - RNA, 22 nt, Human
cucaaaacguuuccgcacaagc

SEQ ID NO: 1278037 - RNA, 24 nt, Human
cucucuguccuguucugcuggaga

SEQ ID NO: 1278038 - RNA, 18 nt, Human
cugacacugugaccgccg

SEQ ID NO: 1278039 - RNA, 22 nt, Human
cuucccgcagcccucgccagaa

SEQ ID NO: 1278040 - RNA, 22 nt, Human
cuuuccuucugcuuucaaaaug

SEQ ID NO: 1278041 - RNA, 23 nt, Human
gaggaguccagaggaucugggcc

SEQ ID NO: 1278042 - RNA, 20 nt, Human
gcacaagcagaccaucccuu

SEQ ID NO: 1278043 - RNA, 25 nt, Human
ggacaccagcaccgcaagggcucuu

SEQ ID NO: 1278044 - RNA, 20 nt, Human
uaagcucauuuuccacccag

SEQ ID NO: 1278045 - RNA, 23 nt, Human
uaagcucugagcucaggauuuca

SEQ ID NO: 1278046 - RNA, 21 nt, Human
uagugugacaggagacagcac

SEQ ID NO: 1278047 - RNA, 20 nt, Human
ucacgugagguccuuuguuc

SEQ ID NO: 1278048 - RNA, 21 nt, Human
ucacugcauucauagugugac

SEQ ID NO: 1278049 - RNA, 24 nt, Human
uccagggcaguggaggguaaccac

SEQ ID NO: 1278050 - RNA, 19 nt, Human
ucccugugaaggacgccgc

SEQ ID NO: 1278051 - RNA, 21 nt, Human
ucccugugaaggacgccgccc

SEQ ID NO: 1278052 - RNA, 21 nt, Human
uccgcacaagcagaccauccc

SEQ ID NO: 1278053 - RNA, 23 nt, Human
ucuccaguauaccucagagaucc

SEQ ID NO: 1278054 - RNA, 19 nt, Human
ucucugaccuccaugaagg

SEQ ID NO: 1278055 - RNA, 20 nt, Human
ucucuugggugauauucugg

SEQ ID NO: 1278056 - RNA, 18 nt, Human
ucugucuccuuuccuucu

SEQ ID NO: 1278057 - RNA, 18 nt, Human
ugaaaagggauggguggc

SEQ ID NO: 1278058 - RNA, 21 nt, Human
ugaaaccucuuuauggggcuu

SEQ ID NO: 1278059 - RNA, 21 nt, Human
ugagcucaggauuucacguga

SEQ ID NO: 1278060 - RNA, 19 nt, Human
ugagguccuuuguucggga

SEQ ID NO: 1278061 - RNA, 22 nt, Human
ugagguccuuuguucgggaggc

SEQ ID NO: 1278062 - RNA, 22 nt, Human
ugccuuuguuucuuccucucug

SEQ ID NO: 1278063 - RNA, 20 nt, Human
uggaagaccuuccgcagaac

SEQ ID NO: 1278064 - RNA, 22 nt, Human
ugggagcagccaaauauaaaau

SEQ ID NO: 1278065 - RNA, 20 nt, Human
ugggccauucuuuuccaguc

SEQ ID NO: 1278066 - RNA, 20 nt, Human
uuccgcagaacagaacgcuc

SEQ ID NO: 1278067 - RNA, 25 nt, Human
uucuacgcugcugucaucuccagua

SEQ ID NO: 1278068 - RNA, 21 nt, Human
uucucccuguugcuggcugag

SEQ ID NO: 1278069 - RNA, 18 nt, Human
uuugacccaguggaggac

SEQ ID NO: 1278070 - RNA, 24 nt, Human
uuuuacuguucucucuuagggaag

SEQ ID NO: 1278071 - RNA, 18 nt, Human
aaaauuaagaucuugccu

SEQ ID NO: 1278072 - RNA, 20 nt, Human
aaagcacccuccaagucucc

SEQ ID NO: 1278073 - RNA, 21 nt, Human
aaauuaggagugaggaaagga

SEQ ID NO: 1278074 - RNA, 20 nt, Human
aacuuauucccucaaccuua

SEQ ID NO: 1278075 - RNA, 23 nt, Human
aagaucuugccucagcccugagg

SEQ ID NO: 1278076 - RNA, 25 nt, Human
acaaaacaucagcaguucucuccaa

SEQ ID NO: 1278077 - RNA, 18 nt, Human
acuugaaugggcaacagc

SEQ ID NO: 1278078 - RNA, 21 nt, Human
agagaacacacaucccaucac

SEQ ID NO: 1278079 - RNA, 18 nt, Human
agagagugaggcucacaa

SEQ ID NO: 1278080 - RNA, 22 nt, Human
agaggccaguccucugugaguc

SEQ ID NO: 1278081 - RNA, 19 nt, Human
agauucgggaggccacugc

SEQ ID NO: 1278082 - RNA, 25 nt, Human
agcagguuuggcuuuauccagccuc

SEQ ID NO: 1278083 - RNA, 19 nt, Human
agcugguuucuucucccuu

SEQ ID NO: 1278084 - RNA, 23 nt, Human
aggcaggaggaucccuugagccc

SEQ ID NO: 1278085 - RNA, 24 nt, Human
aggcaggaggaucccuugagccca

SEQ ID NO: 1278086 - RNA, 24 nt, Human
aggcugaggcaggaggaucccuug

SEQ ID NO: 1278087 - RNA, 21 nt, Human
aggucaguuucucacuucucu

SEQ ID NO: 1278088 - RNA, 21 nt, Human
agucuccuucggucuccacug

SEQ ID NO: 1278089 - RNA, 20 nt, Human
auugcaccacugcacuccag

SEQ ID NO: 1278090 - RNA, 19 nt, Human
caaaagcacccuccaaguc

SEQ ID NO: 1278091 - RNA, 22 nt, Human
caaaagcacccuccaagucucc

SEQ ID NO: 1278092 - RNA, 18 nt, Human
caacacacaggaaccacc

SEQ ID NO: 1278093 - RNA, 22 nt, Human
cacacagagagagugaggcuca

SEQ ID NO: 1278094 - RNA, 21 nt, Human
cacacauuaccauuaaaacuc

SEQ ID NO: 1278095 - RNA, 22 nt, Human
cacagcccgagaauucagcaaa

SEQ ID NO: 1278096 - RNA, 22 nt, Human
cacaucccaucacacauuacca

SEQ ID NO: 1278097 - RNA, 23 nt, Human
caccacugcacuccagccagcca

SEQ ID NO: 1278098 - RNA, 20 nt, Human
cacugcacuccagccagcca

SEQ ID NO: 1278099 - RNA, 18 nt, Human
cagaagaugguuucugac

SEQ ID NO: 1278100 - RNA, 22 nt, Human
cagcaccagccgagggcuccuc

SEQ ID NO: 1278101 - RNA, 19 nt, Human
cagcccgagaauucagcaa

SEQ ID NO: 1278102 - RNA, 23 nt, Human
cagguuuaaaacuaggguuuucu

SEQ ID NO: 1278103 - RNA, 20 nt, Human
caguucucuccaaaagcacc

SEQ ID NO: 1278104 - RNA, 25 nt, Human
caucacacauuaccauuaaaacucc

SEQ ID NO: 1278105 - RNA, 18 nt, Human
ccacugcacuccagccag

SEQ ID NO: 1278106 - RNA, 19 nt, Human
ccacugcacuccagccagc

SEQ ID NO: 1278107 - RNA, 24 nt, Human
ccacugcacuccagccagccauga

SEQ ID NO: 1278108 - RNA, 21 nt, Human
ccaggccccccacggccagcc

SEQ ID NO: 1278109 - RNA, 23 nt, Human
cccacggccagccaggcgagagg

SEQ ID NO: 1278110 - RNA, 20 nt, Human
cccaucacacauuaccauua

SEQ ID NO: 1278111 - RNA, 27 nt, Human
ccccacacaucucacacgcucccucca

SEQ ID NO: 1278112 - RNA, 21 nt, Human
ccccccacggccagccaggcu

SEQ ID NO: 1278113 - RNA, 19 nt, Human
ccccugggacuauaaccca

SEQ ID NO: 1278114 - RNA, 26 nt, Human
ccccugggacuauaacccagcagggg

SEQ ID NO: 1278115 - RNA, 18 nt, Human
cccuuugcuugaauucuu

SEQ ID NO: 1278116 - RNA, 18 nt, Human
ccuccaagucuccuucgg

SEQ ID NO: 1278117 - RNA, 20 nt, Human
ccuccagagcuaagagcagg

SEQ ID NO: 1278118 - RNA, 19 nt, Human
ccucuauucaggauggggg

SEQ ID NO: 1278119 - RNA, 23 nt, Human
cgggcgauauuaggguccuggga

SEQ ID NO: 1278120 - RNA, 19 nt, Human
cguccaggccccccacggc

SEQ ID NO: 1278121 - RNA, 23 nt, Human
cucaaccuuaaauaucuugugac

SEQ ID NO: 1278122 - RNA, 23 nt, Human
cuccagagcuaagagcaggagaa

SEQ ID NO: 1278123 - RNA, 24 nt, Human
cuccaguaacagaccugagguacc

SEQ ID NO: 1278124 - RNA, 23 nt, Human
cucccagcauccucgggcgauau

SEQ ID NO: 1278125 - RNA, 22 nt, Human
cuccuggaguuggcugagaugc

SEQ ID NO: 1278126 - RNA, 20 nt, Human
cugggagauucgggaggcca

SEQ ID NO: 1278127 - RNA, 19 nt, Human
cuucucccuuuuugcaguc

SEQ ID NO: 1278128 - RNA, 25 nt, Human
cuugccucagcccugaggaacuggc

SEQ ID NO: 1278129 - RNA, 26 nt, Human
gaacacacaucccaucacacauuacc

SEQ ID NO: 1278130 - RNA, 24 nt, Human
gaacuguaguccuagcuacuuggg

SEQ ID NO: 1278131 - RNA, 27 nt, Human
gagaacagcaagagguagccgguaccc

SEQ ID NO: 1278132 - RNA, 21 nt, Human
gagguugcagugagccaugau

SEQ ID NO: 1278133 - RNA, 23 nt, Human
gagguugcagugagccaugauug

SEQ ID NO: 1278134 - RNA, 18 nt, Human
gcagcacgcugccccaca

SEQ ID NO: 1278135 - RNA, 20 nt, Human
gcugaccagcucaguuccca

SEQ ID NO: 1278136 - RNA, 22 nt, Human
ggaauuugagguugcagugagc

SEQ ID NO: 1278137 - RNA, 21 nt, Human
ggccucuaaucuccaucccag

SEQ ID NO: 1278138 - RNA, 21 nt, Human
uaaaaaucaagccucuaugac

SEQ ID NO: 1278139 - RNA, 26 nt, Human
uaauacacucugcuccuacucaaaau

SEQ ID NO: 1278140 - RNA, 21 nt, Human
uaaucuccaucccagcacagc

SEQ ID NO: 1278141 - RNA, 22 nt, Human
uaaucuccaucccagcacagcc

SEQ ID NO: 1278142 - RNA, 24 nt, Human
uaccauaagagaacacacauccca

SEQ ID NO: 1278143 - RNA, 25 nt, Human
uaccauuaaaacuccauucccggga

SEQ ID NO: 1278144 - RNA, 22 nt, Human
uagcaauccucuuccugauccc

SEQ ID NO: 1278145 - RNA, 23 nt, Human
uagcaauccucuuccugaucccu

SEQ ID NO: 1278146 - RNA, 24 nt, Human
uagcuacuugggaggcugaggcag

SEQ ID NO: 1278147 - RNA, 20 nt, Human
uagcugguuucuucucccuu

SEQ ID NO: 1278148 - RNA, 28 nt, Human
ucagcaguucucuccaaaagcacccucc

SEQ ID NO: 1278149 - RNA, 22 nt, Human
ucagcguuccucccagcauccu

SEQ ID NO: 1278150 - RNA, 25 nt, Human
ucaguuucucacuucucuuuccuua

SEQ ID NO: 1278151 - RNA, 23 nt, Human
uccacacacagagagagugaggc

SEQ ID NO: 1278152 - RNA, 22 nt, Human
uccagagcuaagagcaggagaa

SEQ ID NO: 1278153 - RNA, 19 nt, Human
uccaggccccccacggcca

SEQ ID NO: 1278154 - RNA, 23 nt, Human
ucccagaugccaagagugaguuc

SEQ ID NO: 1278155 - RNA, 20 nt, Human
uccccugggacuauaaccca

SEQ ID NO: 1278156 - RNA, 22 nt, Human
ucccuggucaagaggcagaggc

SEQ ID NO: 1278157 - RNA, 22 nt, Human
ucuccaguaacagaccugaccu

SEQ ID NO: 1278158 - RNA, 25 nt, Human
ucucucacgggaaagaauucagggu

SEQ ID NO: 1278159 - RNA, 22 nt, Human
ucugcaccugguccuugggcuc

SEQ ID NO: 1278160 - RNA, 25 nt, Human
ucugcuccuacucaaaauuaagauc

SEQ ID NO: 1278161 - RNA, 22 nt, Human
ugaagagcagcugaccagcuca

SEQ ID NO: 1278162 - RNA, 18 nt, Human
ugacagauucacugcagc

SEQ ID NO: 1278163 - RNA, 22 nt, Human
ugagaacagcaagagguagcug

SEQ ID NO: 1278164 - RNA, 23 nt, Human
ugagaacagcaagagguagcugg

SEQ ID NO: 1278165 - RNA, 22 nt, Human
ugagcccaggaauuugagguug

SEQ ID NO: 1278166 - RNA, 19 nt, Human
ugaggcaggaggaucccuu

SEQ ID NO: 1278167 - RNA, 24 nt, Human
ugaggcaggaggaucccuugagcc

SEQ ID NO: 1278168 - RNA, 25 nt, Human
ugaggcaggaggaucccuugagccc

SEQ ID NO: 1278169 - RNA, 23 nt, Human
ugagguugcagugagccaugauu

SEQ ID NO: 1278170 - RNA, 23 nt, Human
ugauagccuuuugucccucuggg

SEQ ID NO: 1278171 - RNA, 22 nt, Human
ugcagugagccaugauugcacc

SEQ ID NO: 1278172 - RNA, 20 nt, Human
uggccucuaaucuccauccc

SEQ ID NO: 1278173 - RNA, 20 nt, Human
ugggaggcugaggcaggagg

SEQ ID NO: 1278174 - RNA, 23 nt, Human
ugggaggcugaggcaggaggauc

SEQ ID NO: 1278175 - RNA, 21 nt, Human
ugguuugugcaaucuucagcc

SEQ ID NO: 1278176 - RNA, 18 nt, Human
ugucuuuccagugugaga

SEQ ID NO: 1278177 - RNA, 20 nt, Human
ugucuuuucucuccaguaac

SEQ ID NO: 1278178 - RNA, 20 nt, Human
uucacugcagcaccagccga

SEQ ID NO: 1278179 - RNA, 21 nt, Human
uucaggaugggggcacucugg

SEQ ID NO: 1278180 - RNA, 21 nt, Human
uucauugguuucucugccucu

SEQ ID NO: 1278181 - RNA, 23 nt, Human
uucccgggacuucaggagaguuu

SEQ ID NO: 1278182 - RNA, 22 nt, Human
uugcagugagccaugauugcac

SEQ ID NO: 1278183 - RNA, 23 nt, Human
uugcauugcucucuuuggaugua

SEQ ID NO: 1278184 - RNA, 18 nt, Human
uugucuuuccagugugag

SEQ ID NO: 1278185 - RNA, 23 nt, Human
uuucuucucccuuuuugcagucu

SEQ ID NO: 1278186 - RNA, 21 nt, Human
uuugugcaaucuucagccuaa

SEQ ID NO: 1278187 - RNA, 21 nt, Human
uuuugguggaccuaagucacc

SEQ ID NO: 1278188 - RNA, 18 nt, Human
uuuuuuaaguuuuccaga

SEQ ID NO: 1278189 - RNA, 22 nt, Human
aaaagaaagcgacuuucauaaa

SEQ ID NO: 1278190 - RNA, 22 nt, Human
aaacaaacugcaagccccccac

SEQ ID NO: 1278191 - RNA, 21 nt, Human
aaaccacccuagaccaaaaug

SEQ ID NO: 1278192 - RNA, 23 nt, Human
aaacugguuuauuuuuccuuuua

SEQ ID NO: 1278193 - RNA, 19 nt, Human
aaagaaaccacccuagacc

SEQ ID NO: 1278194 - RNA, 21 nt, Human
aaagcaagaagaaacuuacgu

SEQ ID NO: 1278195 - RNA, 25 nt, Human
aagaaaaaaugguuuaaaaagaaac

SEQ ID NO: 1278196 - RNA, 19 nt, Human
aagcaacagcaauuacugc

SEQ ID NO: 1278197 - RNA, 18 nt, Human
aagccccccacccccccg

SEQ ID NO: 1278198 - RNA, 18 nt, Human
aaggaagaaggcaagaga

SEQ ID NO: 1278199 - RNA, 21 nt, Human
aauaucuauucagcaucuggc

SEQ ID NO: 1278200 - RNA, 22 nt, Human
acaggcaucaccgugguaagac

SEQ ID NO: 1278201 - RNA, 19 nt, Human
accgugguaagaccgcggc

SEQ ID NO: 1278202 - RNA, 20 nt, Human
agacgggaggaggggaaagc

SEQ ID NO: 1278203 - RNA, 20 nt, Human
agaggggagacgggaggagg

SEQ ID NO: 1278204 - RNA, 24 nt, Human
agaucacccuaagauaaugaauuu

SEQ ID NO: 1278205 - RNA, 23 nt, Human
aggggaaagcaggucucugaaaa

SEQ ID NO: 1278206 - RNA, 18 nt, Human
aggggagacgggaggagg

SEQ ID NO: 1278207 - RNA, 19 nt, Human
aucuggaguaacacugucc

SEQ ID NO: 1278208 - RNA, 24 nt, Human
augaauaaaaagaaagcgacuuuc

SEQ ID NO: 1278209 - RNA, 30 nt, Human
caaaacaaacugcaagccccccaccccccu

SEQ ID NO: 1278210 - RNA, 18 nt, Human
caaaauguucugcuccuc

SEQ ID NO: 1278211 - RNA, 24 nt, Human
caacauaggauaaaauaauaucuu

SEQ ID NO: 1278212 - RNA, 19 nt, Human
cacacaggcaucaccgugg

SEQ ID NO: 1278213 - RNA, 20 nt, Human
cagaagaugcugcaggaaaa

SEQ ID NO: 1278214 - RNA, 23 nt, Human
caggaaaauaaaucuaaacaaaa

SEQ ID NO: 1278215 - RNA, 19 nt, Human
ccaaaacaaacugcaagcc

SEQ ID NO: 1278216 - RNA, 21 nt, Human
ccaaaacaaacugcaagcccc

SEQ ID NO: 1278217 - RNA, 22 nt, Human
ccaacuacaaauuaaaaauaaa

SEQ ID NO: 1278218 - RNA, 23 nt, Human
ccccccacccccccgaacgucug

SEQ ID NO: 1278219 - RNA, 18 nt, Human
ccucucgccuuccuucuu

SEQ ID NO: 1278220 - RNA, 24 nt, Human
cuccucucgccuuccuucuuguua

SEQ ID NO: 1278221 - RNA, 19 nt, Human
cucugaaaagcaagaagaa

SEQ ID NO: 1278222 - RNA, 21 nt, Human
cugcaagccccccaccccccc

SEQ ID NO: 1278223 - RNA, 23 nt, Human
cugcaagccccccacccccccga

SEQ ID NO: 1278224 - RNA, 20 nt, Human
gaaaccacccuagaccaaaa

SEQ ID NO: 1278225 - RNA, 18 nt, Human
gacaacaagcaacagcaa

SEQ ID NO: 1278226 - RNA, 19 nt, Human
gagaggggagacgggagga

SEQ ID NO: 1278227 - RNA, 21 nt, Human
gagaggggagacgggaggagg

SEQ ID NO: 1278228 - RNA, 24 nt, Human
gaggggaaagcaggucucugaaaa

SEQ ID NO: 1278229 - RNA, 23 nt, Human
ggaaagcaggucucugaaaagca

SEQ ID NO: 1278230 - RNA, 25 nt, Human
ggauguauaauaugcacugcaauuu

SEQ ID NO: 1278231 - RNA, 24 nt, Human
gggaggaggggaaagcaggucucu

SEQ ID NO: 1278232 - RNA, 18 nt, Human
gggcagaucacccuaaga

SEQ ID NO: 1278233 - RNA, 20 nt, Human
guauuuauuugcagcaaucc

SEQ ID NO: 1278234 - RNA, 23 nt, Human
uaaaaaagcaauccuucuaugua

SEQ ID NO: 1278235 - RNA, 22 nt, Human
uaaaaagaaaccacccuagacc

SEQ ID NO: 1278236 - RNA, 23 nt, Human
uaaaaagaaaccacccuagacca

SEQ ID NO: 1278237 - RNA, 21 nt, Human
uaaaaagaaagcgacuuucau

SEQ ID NO: 1278238 - RNA, 28 nt, Human
uaaaauaauaucuuacaggugagaggca

SEQ ID NO: 1278239 - RNA, 23 nt, Human
uaaaauaguuucucaaagauuaa

SEQ ID NO: 1278240 - RNA, 23 nt, Human
uaaaucuaaacaaaaagacuuuu

SEQ ID NO: 1278241 - RNA, 26 nt, Human
uauaaaggacugaaauaauaggaaaa

SEQ ID NO: 1278242 - RNA, 21 nt, Human
uaugcacugcaauuuuauaug

SEQ ID NO: 1278243 - RNA, 21 nt, Human
uccaaaacaaacugcaagccc

SEQ ID NO: 1278244 - RNA, 19 nt, Human
uccccaaagucugauuggc

SEQ ID NO: 1278245 - RNA, 21 nt, Human
ugaaaagcaagaagaaacuua

SEQ ID NO: 1278246 - RNA, 20 nt, Human
ugcaagccccccaccccccc

SEQ ID NO: 1278247 - RNA, 21 nt, Human
uggacugucauuagugagaaa

SEQ ID NO: 1278248 - RNA, 18 nt, Human
uguccccuagguuuaacu

SEQ ID NO: 1278249 - RNA, 20 nt, Human
uuaaaaagaaaccacccuag

SEQ ID NO: 1278250 - RNA, 19 nt, Human
uucagcaucuggcucacag

SEQ ID NO: 1278251 - RNA, 24 nt, Human
uuccuucuuguuauugcuuuaaau

SEQ ID NO: 1278252 - RNA, 20 nt, Human
aaagugcugggauuacaggc

SEQ ID NO: 1278253 - RNA, 22 nt, Human
aaagugcugggauuacaggcga

SEQ ID NO: 1278254 - RNA, 18 nt, Human
aagugcugggauuacagg

SEQ ID NO: 1278255 - RNA, 19 nt, Human
aagugcugggauuacaggc

SEQ ID NO: 1278256 - RNA, 26 nt, Human
aagugcugggauuacaggcgagagcc

SEQ ID NO: 1278257 - RNA, 22 nt, Human
agacagucgaagcugcugaagc

SEQ ID NO: 1278258 - RNA, 18 nt, Human
aggcuggacucgaacucc

SEQ ID NO: 1278259 - RNA, 24 nt, Human
aggugaucugcccaccucggccuc

SEQ ID NO: 1278260 - RNA, 18 nt, Human
agugcugggauuacaggc

SEQ ID NO: 1278261 - RNA, 22 nt, Human
augaaccagcuggaucugcuca

SEQ ID NO: 1278262 - RNA, 27 nt, Human
caaagugcugggauuacaggcgagagc

SEQ ID NO: 1278263 - RNA, 24 nt, Human
caccucggccucccaaagugcugg

SEQ ID NO: 1278264 - RNA, 21 nt, Human
cagcuccagccccgggaugaa

SEQ ID NO: 1278265 - RNA, 23 nt, Human
cagcuuccuuccgggccuuggag

SEQ ID NO: 1278266 - RNA, 19 nt, Human
ccaaagugcugggauuaca

SEQ ID NO: 1278267 - RNA, 22 nt, Human
ccaaagugcugggauuacaggc

SEQ ID NO: 1278268 - RNA, 23 nt, Human
ccaaagugcugggauuacaggcg

SEQ ID NO: 1278269 - RNA, 21 nt, Human
ccacggcgugugucuccggcc

SEQ ID NO: 1278270 - RNA, 19 nt, Human
ccgccgcugcucacggugu

SEQ ID NO: 1278271 - RNA, 23 nt, Human
ccggccgcggguuccaccuccuc

SEQ ID NO: 1278272 - RNA, 24 nt, Human
ccugaccucaggugaucugcccac

SEQ ID NO: 1278273 - RNA, 18 nt, Human
cgcggguuccaccuccuc

SEQ ID NO: 1278274 - RNA, 22 nt, Human
cggccgcggguuccaccuccuc

SEQ ID NO: 1278275 - RNA, 24 nt, Human
cggguuccaccuccuccccugccg

SEQ ID NO: 1278276 - RNA, 24 nt, Human
cggguuccaccuccuccccugccg

SEQ ID NO: 1278277 - RNA, 19 nt, Human
cguugccagcuguggcccc

SEQ ID NO: 1278278 - RNA, 23 nt, Human
cucgccgcggguuccaccuccuc

SEQ ID NO: 1278279 - RNA, 24 nt, Human
gaccucaggugaucugcccaccuc

SEQ ID NO: 1278280 - RNA, 18 nt, Human
gauuacaggcgagagccg

SEQ ID NO: 1278281 - RNA, 25 nt, Human
gcggguuccaccuccuccccugccg

SEQ ID NO: 1278282 - RNA, 25 nt, Human
gcggguuccaccuccuccccugccg

SEQ ID NO: 1278283 - RNA, 19 nt, Human
gcguugccagcuguggccc

SEQ ID NO: 1278284 - RNA, 23 nt, Human
gcuggacucgaacuccugaccuc

SEQ ID NO: 1278285 - RNA, 24 nt, Human
gcuguggccccugccccugccguu

SEQ ID NO: 1278286 - RNA, 18 nt, Human
ggccucagcuuccuuccg

SEQ ID NO: 1278287 - RNA, 24 nt, Human
ggcuggacucgaacuccugaccuc

SEQ ID NO: 1278288 - RNA, 22 nt, Human
gugaagcagcagcuccagcccc

SEQ ID NO: 1278289 - RNA, 24 nt, Human
gugaucugcccaccucggccuccc

SEQ ID NO: 1278290 - RNA, 18 nt, Human
gugugucuccggccgcgg

SEQ ID NO: 1278291 - RNA, 22 nt, Human
uaaaauuaaaguaggcguugcc

SEQ ID NO: 1278292 - RNA, 19 nt, Human
uaaaguaggcguugccagc

SEQ ID NO: 1278293 - RNA, 24 nt, Human
ucccaaagugcugggauuacaggc

SEQ ID NO: 1278294 - RNA, 21 nt, Human
uccccugccgccgcugcucac

SEQ ID NO: 1278295 - RNA, 23 nt, Human
uccccugccgccgcugcucaccg

SEQ ID NO: 1278296 - RNA, 23 nt, Human
uccccugccgccgcugcucacgg

SEQ ID NO: 1278297 - RNA, 24 nt, Human
uccuccccugccgccgcugcucac

SEQ ID NO: 1278298 - RNA, 18 nt, Human
ucgaagcugcugaagccc

SEQ ID NO: 1278299 - RNA, 23 nt, Human
ucgaagcugcugaagcccugcuu

SEQ ID NO: 1278300 - RNA, 18 nt, Human
ucggccucccaaagugcu

SEQ ID NO: 1278301 - RNA, 24 nt, Human
ucugcucaucucggggguggaagc

SEQ ID NO: 1278302 - RNA, 19 nt, Human
ugaagcagcagcuccagcc

SEQ ID NO: 1278303 - RNA, 18 nt, Human
ugaccucaggugaucugc

SEQ ID NO: 1278304 - RNA, 20 nt, Human
ugaccucaggugaucugccc

SEQ ID NO: 1278305 - RNA, 21 nt, Human
ugaccucaggugaucugccca

SEQ ID NO: 1278306 - RNA, 24 nt, Human
ugaccucaggugaucugcccaccu

SEQ ID NO: 1278307 - RNA, 24 nt, Human
ugaucugcccaccucggccuccca

SEQ ID NO: 1278308 - RNA, 19 nt, Human
uggaagcaucugcucacag

SEQ ID NO: 1278309 - RNA, 19 nt, Human
ugggauuacaggcgagagc

SEQ ID NO: 1278310 - RNA, 20 nt, Human
ugggauuacaggcgagagcc

SEQ ID NO: 1278311 - RNA, 21 nt, Human
ugggauuacaggcgagagccg

SEQ ID NO: 1278312 - RNA, 21 nt, Human
ugggauuacaggcgagagccg

SEQ ID NO: 1278313 - RNA, 22 nt, Human
ugggauuacaggcgagagccgc

SEQ ID NO: 1278314 - RNA, 24 nt, Human
ugggauuacaggcgagagccgcug

SEQ ID NO: 1278315 - RNA, 22 nt, Human
uugccagcuguggccccugccc

SEQ ID NO: 1278316 - RNA, 23 nt, Human
aaaaaaaaaaaaaaaggaaaaag

SEQ ID NO: 1278317 - RNA, 22 nt, Human
aaagaccagcuuuuucaaacac

SEQ ID NO: 1278318 - RNA, 20 nt, Human
aaagcaauugaaauggagca

SEQ ID NO: 1278319 - RNA, 20 nt, Human
aaagccaagaggugcgagua

SEQ ID NO: 1278320 - RNA, 21 nt, Human
aaaucuucaacagcacugucc

SEQ ID NO: 1278321 - RNA, 22 nt, Human
aacauacacauagauguaaaga

SEQ ID NO: 1278322 - RNA, 18 nt, Human
aacugcagcuccuacaua

SEQ ID NO: 1278323 - RNA, 22 nt, Human
aacugcagcuccuacauacauu

SEQ ID NO: 1278324 - RNA, 21 nt, Human
aagaacaagacauaaaccaag

SEQ ID NO: 1278325 - RNA, 20 nt, Human
aagaaugagggucaaaaaga

SEQ ID NO: 1278326 - RNA, 20 nt, Human
aagaccuaaucuacaacaaa

SEQ ID NO: 1278327 - RNA, 23 nt, Human
aagcaaguggaggucuuugggau

SEQ ID NO: 1278328 - RNA, 24 nt, Human
aauaccuaccugcccuugguggua

SEQ ID NO: 1278329 - RNA, 22 nt, Human
acagaacacaagaaaugcaaag

SEQ ID NO: 1278330 - RNA, 23 nt, Human
acagagcaagaccccguaucccc

SEQ ID NO: 1278331 - RNA, 18 nt, Human
acagcaaggccucugagc

SEQ ID NO: 1278332 - RNA, 22 nt, Human
accaaucccaacacuuucagaa

SEQ ID NO: 1278333 - RNA, 23 nt, Human
acuccagccugggagacagagca

SEQ ID NO: 1278334 - RNA, 18 nt, Human
acugcacuccagccuggg

SEQ ID NO: 1278335 - RNA, 24 nt, Human
acugcacuccagccugggagacag

SEQ ID NO: 1278336 - RNA, 23 nt, Human
acugcaguucacgaaacacaguc

SEQ ID NO: 1278337 - RNA, 21 nt, Human
acuucauuccuguaacaggcu

SEQ ID NO: 1278338 - RNA, 20 nt, Human
agaaaaccacucaucuugac

SEQ ID NO: 1278339 - RNA, 23 nt, Human
agacaaaaaugucccauccaaga

SEQ ID NO: 1278340 - RNA, 21 nt, Human
agccaagaagcauuuuccaga

SEQ ID NO: 1278341 - RNA, 22 nt, Human
agccaagaagcauuuuccagaa

SEQ ID NO: 1278342 - RNA, 25 nt, Human
agccaagaggugcgaguacccaaga

SEQ ID NO: 1278343 - RNA, 21 nt, Human
aggaaaaagaaaaccacucau

SEQ ID NO: 1278344 - RNA, 23 nt, Human
aggaaaaagaaaaccacucauug

SEQ ID NO: 1278345 - RNA, 20 nt, Human
aggaacacacauuugagagc

SEQ ID NO: 1278346 - RNA, 21 nt, Human
aggaagccguuccuuuucaga

SEQ ID NO: 1278347 - RNA, 20 nt, Human
aggcaaguuuucucugucuu

SEQ ID NO: 1278348 - RNA, 23 nt, Human
aggcaggagagucucuugaaccc

SEQ ID NO: 1278349 - RNA, 20 nt, Human
aggcggaggucacagugagc

SEQ ID NO: 1278350 - RNA, 24 nt, Human
aggcggaggucacagugagcugag

SEQ ID NO: 1278351 - RNA, 24 nt, Human
aggcugaggcaggagagucucuug

SEQ ID NO: 1278352 - RNA, 21 nt, Human
agggaggcugaggcaggagag

SEQ ID NO: 1278353 - RNA, 18 nt, Human
aguggccccagccaagaa

SEQ ID NO: 1278354 - RNA, 24 nt, Human
aguggcucacaccuguaaucccag

SEQ ID NO: 1278355 - RNA, 30 nt, Human
auccccguaucaaaaaaaaaaaaaaaaaaa

SEQ ID NO: 1278356 - RNA, 19 nt, Human
augacuccaugagguuuuc

SEQ ID NO: 1278357 - RNA, 24 nt, Human
auugugucacugcacuccagccug

SEQ ID NO: 1278358 - RNA, 22 nt, Human
caaaaucucaagaacaagacau

SEQ ID NO: 1278359 - RNA, 23 nt, Human
caaacaaacagaggagcguggca

SEQ ID NO: 1278360 - RNA, 20 nt, Human
caaagcaauugaaauggagc

SEQ ID NO: 1278361 - RNA, 19 nt, Human
caacauacacauagauguc

SEQ ID NO: 1278362 - RNA, 18 nt, Human
caagaaaugcaaagccac

SEQ ID NO: 1278363 - RNA, 19 nt, Human
caagaaaugcaaagccacc

SEQ ID NO: 1278364 - RNA, 21 nt, Human
caagaaaugcaccugggagac

SEQ ID NO: 1278365 - RNA, 23 nt, Human
caagaacaagacauaaaccaaga

SEQ ID NO: 1278366 - RNA, 21 nt, Human
caagacaaggaaugaggaagc

SEQ ID NO: 1278367 - RNA, 23 nt, Human
caagaggugcgaguacccaagac

SEQ ID NO: 1278368 - RNA, 18 nt, Human
caagaugacuccaugagg

SEQ ID NO: 1278369 - RNA, 18 nt, Human
caaggagagaaagccaau

SEQ ID NO: 1278370 - RNA, 21 nt, Human
cacaagaaaugcaaagccacc

SEQ ID NO: 1278371 - RNA, 21 nt, Human
cacaagaacugcagcuccuac

SEQ ID NO: 1278372 - RNA, 24 nt, Human
cacaccuguaaucccagcuaccag

SEQ ID NO: 1278373 - RNA, 18 nt, Human
caccuguaaucccagcua

SEQ ID NO: 1278374 - RNA, 24 nt, Human
caccuguaaucccagcuaccaggg

SEQ ID NO: 1278375 - RNA, 18 nt, Human
cacugcacuccagccugg

SEQ ID NO: 1278376 - RNA, 19 nt, Human
cacugcacuccagccuggg

SEQ ID NO: 1278377 - RNA, 19 nt, Human
cacugcacuccagccuggg

SEQ ID NO: 1278378 - RNA, 21 nt, Human
cacugcacuccagccugggag

SEQ ID NO: 1278379 - RNA, 22 nt, Human
cacugcacuccagccugggaga

SEQ ID NO: 1278380 - RNA, 23 nt, Human
cacugcacuccagccugggagac

SEQ ID NO: 1278381 - RNA, 24 nt, Human
cacugcacuccagccugggagaca

SEQ ID NO: 1278382 - RNA, 24 nt, Human
cacugcacuccagccugggagaca

SEQ ID NO: 1278383 - RNA, 25 nt, Human
cagaaaaacuuucaccuguggggaa

SEQ ID NO: 1278384 - RNA, 22 nt, Human
cagaacacaagaaaugcaaagc

SEQ ID NO: 1278385 - RNA, 25 nt, Human
cagaacacaagaaaugcaaagccac

SEQ ID NO: 1278386 - RNA, 25 nt, Human
cagaacacaagaaaugcaaagccag

SEQ ID NO: 1278387 - RNA, 21 nt, Human
cagagcaagaccccguauccc

SEQ ID NO: 1278388 - RNA, 18 nt, Human
cagaugcagcuggccaca

SEQ ID NO: 1278389 - RNA, 18 nt, Human
cagugguggguccuggca

SEQ ID NO: 1278390 - RNA, 19 nt, Human
cauggcugaucgcuggaca

SEQ ID NO: 1278391 - RNA, 21 nt, Human
ccaaucccaacacuuucagaa

SEQ ID NO: 1278392 - RNA, 24 nt, Human
ccauugccuguuaagucccaucug

SEQ ID NO: 1278393 - RNA, 20 nt, Human
ccccgcgugccguccgcgcc

SEQ ID NO: 1278394 - RNA, 22 nt, Human
ccccgcgugccguccgcgcccg

SEQ ID NO: 1278395 - RNA, 22 nt, Human
ccgcgcccgcgcccgggguccu

SEQ ID NO: 1278396 - RNA, 18 nt, Human
ccgcgcccgggguccucc

SEQ ID NO: 1278397 - RNA, 18 nt, Human
ccucaaaucuucaacagc

SEQ ID NO: 1278398 - RNA, 19 nt, Human
ccuggcccuucucucacgu

SEQ ID NO: 1278399 - RNA, 20 nt, Human
ccuguaaucccagcuaccag

SEQ ID NO: 1278400 - RNA, 23 nt, Human
cgcccgggguccuccgcccgcuc

SEQ ID NO: 1278401 - RNA, 20 nt, Human
cgcugaacugaaaucuccac

SEQ ID NO: 1278402 - RNA, 22 nt, Human
cuaacccugaguauuucauagc

SEQ ID NO: 1278403 - RNA, 25 nt, Human
cuaguucauucccuaggucauaccc

SEQ ID NO: 1278404 - RNA, 20 nt, Human
cucacaccuguaaucccagc

SEQ ID NO: 1278405 - RNA, 23 nt, Human
cucacaccuguaaucccagcuac

SEQ ID NO: 1278406 - RNA, 23 nt, Human
cucacuaagcuugauaaaggcug

SEQ ID NO: 1278407 - RNA, 19 nt, Human
cugaacugaaaucuccacu

SEQ ID NO: 1278408 - RNA, 21 nt, Human
cugcugcccaauacauaucca

SEQ ID NO: 1278409 - RNA, 19 nt, Human
cuggcccuucucucacguc

SEQ ID NO: 1278410 - RNA, 20 nt, Human
gaagaauaaacaccccuucu

SEQ ID NO: 1278411 - RNA, 24 nt, Human
gacucccagaguuguuccaccccu

SEQ ID NO: 1278412 - RNA, 22 nt, Human
gacucggagcugagggcagcgg

SEQ ID NO: 1278413 - RNA, 19 nt, Human
gagagaaagccaaugggaa

SEQ ID NO: 1278414 - RNA, 23 nt, Human
gagauugugucacugcacuccag

SEQ ID NO: 1278415 - RNA, 22 nt, Human
gagggucaaaaagaugcagaaa

SEQ ID NO: 1278416 - RNA, 23 nt, Human
gaggucacagugagcugagauug

SEQ ID NO: 1278417 - RNA, 18 nt, Human
gcaaagccacccuuccuu

SEQ ID NO: 1278418 - RNA, 19 nt, Human
gcacagacauaccuacaag

SEQ ID NO: 1278419 - RNA, 20 nt, Human
gcacagucucuuuuuaguuc

SEQ ID NO: 1278420 - RNA, 28 nt, Human
gcacggcuucagucaaagagggaacgcc

SEQ ID NO: 1278421 - RNA, 24 nt, Human
gcacuccagccugggagacagagc

SEQ ID NO: 1278422 - RNA, 22 nt, Human
gcaggagagucucuugaaccca

SEQ ID NO: 1278423 - RNA, 23 nt, Human
gccuucacgcaccauucagacag

SEQ ID NO: 1278424 - RNA, 18 nt, Human
gcuuccaggaaaggccaa

SEQ ID NO: 1278425 - RNA, 26 nt, Human
ggaacagauaguuaaguacuuggaca

SEQ ID NO: 1278426 - RNA, 21 nt, Human
ggaggcggaggucacagugag

SEQ ID NO: 1278427 - RNA, 22 nt, Human
ggaggucacagugagcugagau

SEQ ID NO: 1278428 - RNA, 24 nt, Human
ggaggucacagugagcugagauug

SEQ ID NO: 1278429 - RNA, 19 nt, Human
ggaguccccggcuccuccu

SEQ ID NO: 1278430 - RNA, 21 nt, Human
ggcuuccuagguuucaguugu

SEQ ID NO: 1278431 - RNA, 21 nt, Human
gggaaggagggcggggcagag

SEQ ID NO: 1278432 - RNA, 23 nt, Human
gggaaggagggcggggcagaggg

SEQ ID NO: 1278433 - RNA, 18 nt, Human
gggugggugcaguggcuc

SEQ ID NO: 1278434 - RNA, 23 nt, Human
ggugcaguggcucacaccuguaa

SEQ ID NO: 1278435 - RNA, 19 nt, Human
guaaagauaggaaaggagg

SEQ ID NO: 1278436 - RNA, 18 nt, Human
gugcaguggcucacaccu

SEQ ID NO: 1278437 - RNA, 21 nt, Human
guuaaauauucuucagcaaag

SEQ ID NO: 1278438 - RNA, 20 nt, Human
guuccguagucagcuccauc

SEQ ID NO: 1278439 - RNA, 22 nt, Human
uaaaaaaacaaagaagaagaag

SEQ ID NO: 1278440 - RNA, 20 nt, Human
uaaagagcgcauuucaguaa

SEQ ID NO: 1278441 - RNA, 22 nt, Human
uaagcaaguggaggucuuuggg

SEQ ID NO: 1278442 - RNA, 18 nt, Human
uaagcagaaacagcccac

SEQ ID NO: 1278443 - RNA, 26 nt, Human
uacaaaaaaaaacugaccuuuacuuc

SEQ ID NO: 1278444 - RNA, 22 nt, Human
uacaaagagcacugcaugaaag

SEQ ID NO: 1278445 - RNA, 23 nt, Human
uacagcaggcacuuacuaggugc

SEQ ID NO: 1278446 - RNA, 18 nt, Human
uaccagggaggcugaggc

SEQ ID NO: 1278447 - RNA, 21 nt, Human
uaccagggaggcugaggcagg

SEQ ID NO: 1278448 - RNA, 20 nt, Human
uaccuacaagcagucaucac

SEQ ID NO: 1278449 - RNA, 20 nt, Human
uaggauuccuaacccugagu

SEQ ID NO: 1278450 - RNA, 23 nt, Human
uauuaauuacugcuugagguuuu

SEQ ID NO: 1278451 - RNA, 21 nt, Human
ucaaaaaaaaaaaaaaaaaaa

SEQ ID NO: 1278452 - RNA, 19 nt, Human
ucaaaaagaugcagaaaca

SEQ ID NO: 1278453 - RNA, 20 nt, Human
ucacuaagcuugauaaaggc

SEQ ID NO: 1278454 - RNA, 24 nt, Human
ucacuaagcuugauaaaggcugaa

SEQ ID NO: 1278455 - RNA, 24 nt, Human
ucacugcacuccagccugggagac

SEQ ID NO: 1278456 - RNA, 21 nt, Human
ucacugcaguucacgaaacac

SEQ ID NO: 1278457 - RNA, 21 nt, Human
ucagaaaaacuuucaccugug

SEQ ID NO: 1278458 - RNA, 21 nt, Human
ucagaauuuuaaaaagucaac

SEQ ID NO: 1278459 - RNA, 23 nt, Human
ucagacagaugcagcuggccaca

SEQ ID NO: 1278460 - RNA, 21 nt, Human
ucagucaaagauucauuuccu

SEQ ID NO: 1278461 - RNA, 21 nt, Human
uccagaaaauucagcuccacu

SEQ ID NO: 1278462 - RNA, 19 nt, Human
uccauaugacccagugcuc

SEQ ID NO: 1278463 - RNA, 18 nt, Human
ucccaacacuuucagaaa

SEQ ID NO: 1278464 - RNA, 25 nt, Human
uccccguaucaaaaaaaaaaaaaaa

SEQ ID NO: 1278465 - RNA, 21 nt, Human
uccuagguuucaguuguaaau

SEQ ID NO: 1278466 - RNA, 24 nt, Human
uccuggcagugcucuccagccugg

SEQ ID NO: 1278467 - RNA, 21 nt, Human
uccuuaauuucuucuucuuua

SEQ ID NO: 1278468 - RNA, 19 nt, Human
ucuagcuggguuuucugua

SEQ ID NO: 1278469 - RNA, 19 nt, Human
ucugucucaguuugaagca

SEQ ID NO: 1278470 - RNA, 19 nt, Human
ucuucaacagcacugucca

SEQ ID NO: 1278471 - RNA, 22 nt, Human
ucuucaauuuacaucuuacuuc

SEQ ID NO: 1278472 - RNA, 21 nt, Human
ugaaacagcaguucuuaauau

SEQ ID NO: 1278473 - RNA, 21 nt, Human
ugaaauaagcagaaacagccc

SEQ ID NO: 1278474 - RNA, 20 nt, Human
ugaaaugucaaacccuacug

SEQ ID NO: 1278475 - RNA, 22 nt, Human
ugaacggaaguuuacacuggau

SEQ ID NO: 1278476 - RNA, 21 nt, Human
ugacccagugcucuuuaacaa

SEQ ID NO: 1278477 - RNA, 18 nt, Human
ugagacaagugcuaggau

SEQ ID NO: 1278478 - RNA, 22 nt, Human
ugagcugagauugugucacugc

SEQ ID NO: 1278479 - RNA, 24 nt, Human
ugaggcaggagagucucuugaacc

SEQ ID NO: 1278480 - RNA, 25 nt, Human
ugaggcaggagagucucuugaaccc

SEQ ID NO: 1278481 - RNA, 20 nt, Human
ugagggcagcgguggguccc

SEQ ID NO: 1278482 - RNA, 24 nt, Human
ugagggcagcggugggucccaaga

SEQ ID NO: 1278483 - RNA, 20 nt, Human
ugcuguacuuucucaaaacc

SEQ ID NO: 1278484 - RNA, 18 nt, Human
ugcuguucucuacuguuu

SEQ ID NO: 1278485 - RNA, 19 nt, Human
uggacagaagggcaacagu

SEQ ID NO: 1278486 - RNA, 22 nt, Human
uggcacagacauaccuacaagc

SEQ ID NO: 1278487 - RNA, 19 nt, Human
uggcaggugggggaugggc

SEQ ID NO: 1278488 - RNA, 24 nt, Human
uggcaggugggggaugggccuccc

SEQ ID NO: 1278489 - RNA, 21 nt, Human
uggcccuucucucacgucccc

SEQ ID NO: 1278490 - RNA, 18 nt, Human
uggcggagcaucaacaaa

SEQ ID NO: 1278491 - RNA, 21 nt, Human
uggcucacaccuguaauccca

SEQ ID NO: 1278492 - RNA, 21 nt, Human
ugggaaggagggcggggcaga

SEQ ID NO: 1278493 - RNA, 20 nt, Human
uggggaagugggggcaugug

SEQ ID NO: 1278494 - RNA, 23 nt, Human
ugggggaugggccuccccaaggc

SEQ ID NO: 1278495 - RNA, 24 nt, Human
uggguacauggcaguggagcucca

SEQ ID NO: 1278496 - RNA, 19 nt, Human
ugggugggugcaguggcuc

SEQ ID NO: 1278497 - RNA, 19 nt, Human
uguauauuuacagaaaagu

SEQ ID NO: 1278498 - RNA, 24 nt, Human
uguauuaauauucugacuuuaaua

SEQ ID NO: 1278499 - RNA, 19 nt, Human
ugucaaacccuacugggua

SEQ ID NO: 1278500 - RNA, 21 nt, Human
uguguaauguagggauacagc

SEQ ID NO: 1278501 - RNA, 19 nt, Human
uuaaaaaaacaaagaagaa

SEQ ID NO: 1278502 - RNA, 27 nt, Human
uucacuaaagucaaauauuuacaauga

SEQ ID NO: 1278503 - RNA, 27 nt, Human
uuccagaaaauucagcuccacuguuaa

SEQ ID NO: 1278504 - RNA, 22 nt, Human
uuccagugguggguccuggcaa

SEQ ID NO: 1278505 - RNA, 22 nt, Human
uucuuugaagugcugugugggg

SEQ ID NO: 1278506 - RNA, 23 nt, Human
uugggugggugcaguggcucaca

SEQ ID NO: 1278507 - RNA, 25 nt, Human
uuuaaaaagucaacauacacauaga

SEQ ID NO: 1278508 - RNA, 24 nt, Human
uuuaaaauauccauuagaaaagca

SEQ ID NO: 1278509 - RNA, 22 nt, Human
uuucagaguccugagacaagug

SEQ ID NO: 1278510 - RNA, 18 nt, Human
uuugaagugcuguguggg

SEQ ID NO: 1278511 - RNA, 23 nt, Human
uuuuuugcuguucucuacuguuu

SEQ ID NO: 1278512 - RNA, 19 nt, Human
accagcagcaccccagccc

SEQ ID NO: 1278513 - RNA, 21 nt, Human
agcucuggcugugcgaugagg

SEQ ID NO: 1278514 - RNA, 24 nt, Human
cucaggaugggaggagacaucuga

SEQ ID NO: 1278515 - RNA, 18 nt, Human
gacaucugaugugggauc

SEQ ID NO: 1278516 - RNA, 19 nt, Human
ggaugggaggagacaucug

SEQ ID NO: 1278517 - RNA, 23 nt, Human
ggcuggugugcagagcagcacug

SEQ ID NO: 1278518 - RNA, 19 nt, Human
ugagggcuuggccauuccu

SEQ ID NO: 1278519 - RNA, 19 nt, Human
ugggaggagacaucugaug

SEQ ID NO: 1278520 - RNA, 21 nt, Human
acuguguugcccaagcuaaca

SEQ ID NO: 1278521 - RNA, 20 nt, Human
agccaccacaccuggcuuug

SEQ ID NO: 1278522 - RNA, 19 nt, Human
aggugugagccaccacacc

SEQ ID NO: 1278523 - RNA, 24 nt, Human
aucuccgccaagccgccuccacca

SEQ ID NO: 1278524 - RNA, 22 nt, Human
cacucugucacccagccuucuu

SEQ ID NO: 1278525 - RNA, 24 nt, Human
caggggcugggcucuccucucggg

SEQ ID NO: 1278526 - RNA, 20 nt, Human
ccaagccgccuccaccaggg

SEQ ID NO: 1278527 - RNA, 19 nt, Human
ccaccacaccuggcuuugu

SEQ ID NO: 1278528 - RNA, 18 nt, Human
ccaggggcugggcucucc

SEQ ID NO: 1278529 - RNA, 24 nt, Human
cccagccuucuuaguagcugggac

SEQ ID NO: 1278530 - RNA, 24 nt, Human
ccucacucugucacccagccuucu

SEQ ID NO: 1278531 - RNA, 25 nt, Human
ccucacucugucacccagccuucuu

SEQ ID NO: 1278532 - RNA, 18 nt, Human
ccuggucuuuugcaaggg

SEQ ID NO: 1278533 - RNA, 23 nt, Human
gccaagccgccuccaccaggggc

SEQ ID NO: 1278534 - RNA, 21 nt, Human
ggacgucuggcugagcugcug

SEQ ID NO: 1278535 - RNA, 19 nt, Human
ggaggaacagacacaacca

SEQ ID NO: 1278536 - RNA, 22 nt, Human
ggaucucacuguguugcccaag

SEQ ID NO: 1278537 - RNA, 20 nt, Human
ggcucccauagaaaaacccu

SEQ ID NO: 1278538 - RNA, 18 nt, Human
guagagaugggaucucac

SEQ ID NO: 1278539 - RNA, 18 nt, Human
guagagaugggaucucac

SEQ ID NO: 1278540 - RNA, 22 nt, Human
uaccggaggaacagacacaacc

SEQ ID NO: 1278541 - RNA, 22 nt, Human
uagagaugggaucucacugugu

SEQ ID NO: 1278542 - RNA, 18 nt, Human
uagcugggacuggaggug

SEQ ID NO: 1278543 - RNA, 19 nt, Human
ucaccccuuaccggaggaa

SEQ ID NO: 1278544 - RNA, 18 nt, Human
uccgccaagccgccucca

SEQ ID NO: 1278545 - RNA, 22 nt, Human
uccgcgccccucggcgaaucac

SEQ ID NO: 1278546 - RNA, 18 nt, Human
ucucacuguguugcccaa

SEQ ID NO: 1278547 - RNA, 23 nt, Human
ucucacuguguugcccaagcuaa

SEQ ID NO: 1278548 - RNA, 23 nt, Human
ucuuaguagcugggacuggaggu

SEQ ID NO: 1278549 - RNA, 27 nt, Human
ugacccgaggucugucugguccgcgcc

SEQ ID NO: 1278550 - RNA, 24 nt, Human
ugggacuggaggugugagccacca

SEQ ID NO: 1278551 - RNA, 18 nt, Human
ugggaucucacuguguug

SEQ ID NO: 1278552 - RNA, 24 nt, Human
uguagagaugggaucucacugugu

SEQ ID NO: 1278553 - RNA, 22 nt, Human
ugucugguccgcgccccucggc

SEQ ID NO: 1278554 - RNA, 24 nt, Human
uuguagagaugggaucucacugug

SEQ ID NO: 1278555 - RNA, 24 nt, Human
uuuguagagaugggaucucacugu

SEQ ID NO: 1278556 - RNA, 24 nt, Human
uuuuuuguagagaugggaucucac

SEQ ID NO: 1278557 - RNA, 19 nt, Human
agacauggccacccacugg

SEQ ID NO: 1278558 - RNA, 19 nt, Human
agacauggccacccacugg

SEQ ID NO: 1278559 - RNA, 23 nt, Human
caagcugacaugaagacauggcc

SEQ ID NO: 1278560 - RNA, 20 nt, Human
cacuuggggucagaccauuc

SEQ ID NO: 1278561 - RNA, 18 nt, Human
cauggagcaagggagugc

SEQ ID NO: 1278562 - RNA, 19 nt, Human
gaggagaaaccuggguuuc

SEQ ID NO: 1278563 - RNA, 20 nt, Human
gcugaggagaaaccuggguu

SEQ ID NO: 1278564 - RNA, 20 nt, Human
ggagugcuggacuacacagg

SEQ ID NO: 1278565 - RNA, 19 nt, Human
uagcagcaucucuggucuc

SEQ ID NO: 1278566 - RNA, 21 nt, Human
ucagaccauucaugguggugg

SEQ ID NO: 1278567 - RNA, 24 nt, Human
ucagaccauucauggugguggugg

SEQ ID NO: 1278568 - RNA, 19 nt, Human
ugguggggccgucccgugu

SEQ ID NO: 1278569 - RNA, 21 nt, Human
ugguggugguggggccguccc

SEQ ID NO: 1278570 - RNA, 18 nt, Human
uggugguggugguggggc

SEQ ID NO: 1278571 - RNA, 20 nt, Human
uggugguggugguggggccc

SEQ ID NO: 1278572 - RNA, 24 nt, Human
uuagcagcaucucuggucuccauc

SEQ ID NO: 1278573 - RNA, 25 nt, Human
uucaaaugucauggagcaagggagu

SEQ ID NO: 1278574 - RNA, 24 nt, Human
uucauggugguggugguggggccu

SEQ ID NO: 1278575 - RNA, 20 nt, Human
uucucagcuuuggcacaguc

SEQ ID NO: 1278576 - RNA, 21 nt, Human
uugcugaggagaaaccugggu

SEQ ID NO: 1278577 - RNA, 20 nt, Human
aaccuccaccuccugggcuc

SEQ ID NO: 1278578 - RNA, 24 nt, Human
aaggauucuccucccucagccucc

SEQ ID NO: 1278579 - RNA, 24 nt, Human
aaggugcugagaucacagguguga

SEQ ID NO: 1278580 - RNA, 19 nt, Human
aaguagcugggaaugcagg

SEQ ID NO: 1278581 - RNA, 20 nt, Human
acagaacucaagggacagga

SEQ ID NO: 1278582 - RNA, 21 nt, Human
acaggugcccaccaccacacc

SEQ ID NO: 1278583 - RNA, 22 nt, Human
accauagggaaaugucuucuca

SEQ ID NO: 1278584 - RNA, 23 nt, Human
accuaucagguacuggaggugaa

SEQ ID NO: 1278585 - RNA, 25 nt, Human
acucuguugcccaggcuggagugca

SEQ ID NO: 1278586 - RNA, 19 nt, Human
agaucacaggugugagcca

SEQ ID NO: 1278587 - RNA, 18 nt, Human
aggaaggagaugaguugg

SEQ ID NO: 1278588 - RNA, 21 nt, Human
aggaaggcagguuugggcugg

SEQ ID NO: 1278589 - RNA, 25 nt, Human
aggcuggagugcaguggcaugaucu

SEQ ID NO: 1278590 - RNA, 24 nt, Human
aggugauccgccugccucggccuc

SEQ ID NO: 1278591 - RNA, 26 nt, Human
aggugcugagaucacaggugugagcc

SEQ ID NO: 1278592 - RNA, 18 nt, Human
aguagcugggauuacagg

SEQ ID NO: 1278593 - RNA, 24 nt, Human
agugauucuccugccucagccucc

SEQ ID NO: 1278594 - RNA, 18 nt, Human
agugcaguggcaugaucu

SEQ ID NO: 1278595 - RNA, 19 nt, Human
agugcaguggcaugaucuc

SEQ ID NO: 1278596 - RNA, 21 nt, Human
agugcaguggcaugaucucug

SEQ ID NO: 1278597 - RNA, 20 nt, Human
augggguuucaccauguugu

SEQ ID NO: 1278598 - RNA, 24 nt, Human
augggguuucaccauguuguccag

SEQ ID NO: 1278599 - RNA, 24 nt, Human
auuuuuguauuuuuaguagagaug

SEQ ID NO: 1278600 - RNA, 24 nt, Human
caaaggauucuccucccucagccu

SEQ ID NO: 1278601 - RNA, 23 nt, Human
caaccuccaccuccugggcucaa

SEQ ID NO: 1278602 - RNA, 24 nt, Human
caaccuccaccuccugggcucaag

SEQ ID NO: 1278603 - RNA, 22 nt, Human
caagccccuccagagaagcaag

SEQ ID NO: 1278604 - RNA, 24 nt, Human
caaggugcugagaucacaggugug

SEQ ID NO: 1278605 - RNA, 22 nt, Human
caagugauucuccugccucagc

SEQ ID NO: 1278606 - RNA, 19 nt, Human
cacagaacucaagggacag

SEQ ID NO: 1278607 - RNA, 19 nt, Human
cacaggugugagccaccac

SEQ ID NO: 1278608 - RNA, 24 nt, Human
caccacaccuggcuaauuuuugua

SEQ ID NO: 1278609 - RNA, 24 nt, Human
caccauguuguccaggcuggucuc

SEQ ID NO: 1278610 - RNA, 27 nt, Human
caccauguuguccaggcuggucucaaa

SEQ ID NO: 1278611 - RNA, 21 nt, Human
cacccaccuagacugcagagu

SEQ ID NO: 1278612 - RNA, 21 nt, Human
cacugcaaccuccaccuccug

SEQ ID NO: 1278613 - RNA, 23 nt, Human
cacugcaaccuccaccuccuggg

SEQ ID NO: 1278614 - RNA, 20 nt, Human
cacuggacauuucaagcccc

SEQ ID NO: 1278615 - RNA, 24 nt, Human
caggugcccaccaccacaccuggc

SEQ ID NO: 1278616 - RNA, 23 nt, Human
cauguuguccaggcuggucucaa

SEQ ID NO: 1278617 - RNA, 24 nt, Human
cauguuguccaggcuggucucaaa

SEQ ID NO: 1278618 - RNA, 20 nt, Human
cauuguaacacagacaaagc

SEQ ID NO: 1278619 - RNA, 21 nt, Human
ccaaggugcugagaucacagg

SEQ ID NO: 1278620 - RNA, 24 nt, Human
ccaaggugcugagaucacaggugu

SEQ ID NO: 1278621 - RNA, 24 nt, Human
ccaccuccugggcucaagugauuc

SEQ ID NO: 1278622 - RNA, 21 nt, Human
ccagggggcaacgugugccag

SEQ ID NO: 1278623 - RNA, 23 nt, Human
cccaaguagcugggaaugcaggu

SEQ ID NO: 1278624 - RNA, 23 nt, Human
cccaggcuggagugcaguggcau

SEQ ID NO: 1278625 - RNA, 23 nt, Human
cccgaguagcugggauuacaggu

SEQ ID NO: 1278626 - RNA, 24 nt, Human
cccgaguagcugggauuacaggug

SEQ ID NO: 1278627 - RNA, 21 nt, Human
ccgaguagcugggauuacagg

SEQ ID NO: 1278628 - RNA, 18 nt, Human
ccgcaggguuggcaggcc

SEQ ID NO: 1278629 - RNA, 22 nt, Human
ccucagccucccaaguagcugg

SEQ ID NO: 1278630 - RNA, 22 nt, Human
ccuccaccuccugggcucaagu

SEQ ID NO: 1278631 - RNA, 24 nt, Human
ccucccauguucaaaggauucucc

SEQ ID NO: 1278632 - RNA, 24 nt, Human
ccuccugggcucaagugauucucc

SEQ ID NO: 1278633 - RNA, 21 nt, Human
ccugaccuaaggugauccgcc

SEQ ID NO: 1278634 - RNA, 23 nt, Human
ccugaccuaaggugauccgccug

SEQ ID NO: 1278635 - RNA, 23 nt, Human
ccugggcucaagugauucuccuc

SEQ ID NO: 1278636 - RNA, 23 nt, Human
ccugggcucaagugauucuccug

SEQ ID NO: 1278637 - RNA, 21 nt, Human
cgacagagaggggcaggguac

SEQ ID NO: 1278638 - RNA, 23 nt, Human
cuaaggugauccgccugccucgg

SEQ ID NO: 1278639 - RNA, 23 nt, Human
cuaauuuuuguauuuuuaguaga

SEQ ID NO: 1278640 - RNA, 23 nt, Human
cucaagugauucuccugccucag

SEQ ID NO: 1278641 - RNA, 24 nt, Human
cucaagugauucuccugccucagc

SEQ ID NO: 1278642 - RNA, 24 nt, Human
cucacugcaaccuccaccuccugg

SEQ ID NO: 1278643 - RNA, 27 nt, Human
cucacugcaaccuccaccuccugggcu

SEQ ID NO: 1278644 - RNA, 24 nt, Human
cucagccucccgaguagcugggau

SEQ ID NO: 1278645 - RNA, 21 nt, Human
cucccaaggugcugagaucac

SEQ ID NO: 1278646 - RNA, 25 nt, Human
cucccucagccucccaaguagcugg

SEQ ID NO: 1278647 - RNA, 26 nt, Human
cuccugaccuaaggugauccgccugc

SEQ ID NO: 1278648 - RNA, 20 nt, Human
cuccugggcucaagugauuc

SEQ ID NO: 1278649 - RNA, 21 nt, Human
cuccugggcucaagugauucu

SEQ ID NO: 1278650 - RNA, 25 nt, Human
cuccugggcucaagugauucuccug

SEQ ID NO: 1278651 - RNA, 18 nt, Human
cugcaaccuccaccuccu

SEQ ID NO: 1278652 - RNA, 23 nt, Human
cugcaaccuccaccuccugggcu

SEQ ID NO: 1278653 - RNA, 24 nt, Human
cugcaaccuccaccuccugggcuc

SEQ ID NO: 1278654 - RNA, 23 nt, Human
cugccucagccucccgaguagcu

SEQ ID NO: 1278655 - RNA, 23 nt, Human
cugccucggccucccaaggugcu

SEQ ID NO: 1278656 - RNA, 26 nt, Human
cuuacugugcugggaguacuugugga

SEQ ID NO: 1278657 - RNA, 19 nt, Human
cuuguggagugcgggcugu

SEQ ID NO: 1278658 - RNA, 20 nt, Human
cuuguggagugcgggcugug

SEQ ID NO: 1278659 - RNA, 20 nt, Human
cuuuuguauuuuuaguggag

SEQ ID NO: 1278660 - RNA, 19 nt, Human
gacacagaacucaagggac

SEQ ID NO: 1278661 - RNA, 21 nt, Human
gacaggaaggagaugaguugg

SEQ ID NO: 1278662 - RNA, 19 nt, Human
gacagugucaggcaaggac

SEQ ID NO: 1278663 - RNA, 24 nt, Human
gaccuaaggugauccgccugccuc

SEQ ID NO: 1278664 - RNA, 20 nt, Human
gagaugaguuggaggcuggg

SEQ ID NO: 1278665 - RNA, 20 nt, Human
gagaugggguuucaccaugu

SEQ ID NO: 1278666 - RNA, 23 nt, Human
gagaugggguuucaccauguugu

SEQ ID NO: 1278667 - RNA, 20 nt, Human
gaggcugggacagggguccc

SEQ ID NO: 1278668 - RNA, 19 nt, Human
gaguuggaggcugggacag

SEQ ID NO: 1278669 - RNA, 18 nt, Human
gaucacaggugugagcca

SEQ ID NO: 1278670 - RNA, 22 nt, Human
gaugggguuucaccauguuguc

SEQ ID NO: 1278671 - RNA, 20 nt, Human
gcccaggcuggagugcagug

SEQ ID NO: 1278672 - RNA, 20 nt, Human
gccucagccucccgaguagc

SEQ ID NO: 1278673 - RNA, 20 nt, Human
gccuguuccccaccacaucc

SEQ ID NO: 1278674 - RNA, 24 nt, Human
gcuggagugcaguggcaugaucuc

SEQ ID NO: 1278675 - RNA, 25 nt, Human
ggacaggggucccugccagggaugc

SEQ ID NO: 1278676 - RNA, 19 nt, Human
gggcuaggaaggcagguuu

SEQ ID NO: 1278677 - RNA, 22 nt, Human
gggcucaagugauucuccugcc

SEQ ID NO: 1278678 - RNA, 22 nt, Human
gggguuucaccauguuguccag

SEQ ID NO: 1278679 - RNA, 22 nt, Human
ggguuucaccauguuguccagg

SEQ ID NO: 1278680 - RNA, 23 nt, Human
guagagaugggguuucaccaugu

SEQ ID NO: 1278681 - RNA, 18 nt, Human
guagcugggauuacaggu

SEQ ID NO: 1278682 - RNA, 19 nt, Human
gugauccgccugccucggc

SEQ ID NO: 1278683 - RNA, 24 nt, Human
gugauucuccugccucagccuccc

SEQ ID NO: 1278684 - RNA, 21 nt, Human
gugcugagaucacagguguga

SEQ ID NO: 1278685 - RNA, 21 nt, Human
gugugagccaccacgcugggc

SEQ ID NO: 1278686 - RNA, 23 nt, Human
guuucaccauguuguccaggcug

SEQ ID NO: 1278687 - RNA, 22 nt, Human
uaacuuuuguauuuuuagugga

SEQ ID NO: 1278688 - RNA, 24 nt, Human
uaauuuuuguauuuuuaguagaga

SEQ ID NO: 1278689 - RNA, 22 nt, Human
uacaggugcccaccaccacacc

SEQ ID NO: 1278690 - RNA, 24 nt, Human
uacucuguugcccaggcuggagug

SEQ ID NO: 1278691 - RNA, 22 nt, Human
uagagaugggguuucaccaugu

SEQ ID NO: 1278692 - RNA, 18 nt, Human
uagcauuguaacacagac

SEQ ID NO: 1278693 - RNA, 22 nt, Human
uagcuacgacagagaggggcag

SEQ ID NO: 1278694 - RNA, 19 nt, Human
uagcugggaaugcaggugc

SEQ ID NO: 1278695 - RNA, 25 nt, Human
uaggaaggcagguuugggcuggaga

SEQ ID NO: 1278696 - RNA, 24 nt, Human
uaguagagaugggguuucaccaug

SEQ ID NO: 1278697 - RNA, 26 nt, Human
uaguagagaugggguuucaccauguu

SEQ ID NO: 1278698 - RNA, 19 nt, Human
uauguguuucucaguugga

SEQ ID NO: 1278699 - RNA, 20 nt, Human
uauguuccaaaggacugacg

SEQ ID NO: 1278700 - RNA, 21 nt, Human
ucaccauguuguccaggcugg

SEQ ID NO: 1278701 - RNA, 23 nt, Human
ucacugcaaccuccaccuccugg

SEQ ID NO: 1278702 - RNA, 24 nt, Human
ucacugcaaccuccaccuccuggg

SEQ ID NO: 1278703 - RNA, 25 nt, Human
ucacugcaaccuccaccuccugggc

SEQ ID NO: 1278704 - RNA, 27 nt, Human
ucacugcaaccuccaccuccugggcuc

SEQ ID NO: 1278705 - RNA, 20 nt, Human
ucagccucccaaguagcugg

SEQ ID NO: 1278706 - RNA, 20 nt, Human
ucagccucccgaguagcugg

SEQ ID NO: 1278707 - RNA, 19 nt, Human
uccaaaggacugacggacc

SEQ ID NO: 1278708 - RNA, 22 nt, Human
uccagagaagcaagucuuacug

SEQ ID NO: 1278709 - RNA, 23 nt, Human
ucccaaggugcugagaucacagg

SEQ ID NO: 1278710 - RNA, 24 nt, Human
ucccaaguagcugggaaugcaggu

SEQ ID NO: 1278711 - RNA, 24 nt, Human
ucccagguagacagugguugaggc

SEQ ID NO: 1278712 - RNA, 23 nt, Human
ucccgaguagcugggauuacagg

SEQ ID NO: 1278713 - RNA, 24 nt, Human
ucccgaguagcugggauuacaggu

SEQ ID NO: 1278714 - RNA, 21 nt, Human
uccugggcucaagugauucuc

SEQ ID NO: 1278715 - RNA, 24 nt, Human
uccugggcucaagugauucuccug

SEQ ID NO: 1278716 - RNA, 18 nt, Human
ucggccucccaaggugcu

SEQ ID NO: 1278717 - RNA, 22 nt, Human
ucuagacuccauccuccauccc

SEQ ID NO: 1278718 - RNA, 20 nt, Human
ucuccucccucagccuccca

SEQ ID NO: 1278719 - RNA, 24 nt, Human
ucuccugccucagccucccgagua

SEQ ID NO: 1278720 - RNA, 18 nt, Human
ucuguugcccaggcugga

SEQ ID NO: 1278721 - RNA, 24 nt, Human
ucuguugcccaggcuggagugcag

SEQ ID NO: 1278722 - RNA, 22 nt, Human
ucuuacucuguugcccaggcug

SEQ ID NO: 1278723 - RNA, 23 nt, Human
ucuuacucuguugcccaggcugg

SEQ ID NO: 1278724 - RNA, 24 nt, Human
ucuuacucuguugcccaggcugga

SEQ ID NO: 1278725 - RNA, 19 nt, Human
ugacacagaacucaaggga

SEQ ID NO: 1278726 - RNA, 22 nt, Human
ugaccgugauugccugggauga

SEQ ID NO: 1278727 - RNA, 18 nt, Human
ugaccuaaggugauccgc

SEQ ID NO: 1278728 - RNA, 24 nt, Human
ugaccuaaggugauccgccugccu

SEQ ID NO: 1278729 - RNA, 18 nt, Human
ugacguuggacucauugg

SEQ ID NO: 1278730 - RNA, 22 nt, Human
ugagaucacaggugugagccac

SEQ ID NO: 1278731 - RNA, 24 nt, Human
ugagaucacaggugugagccacca

SEQ ID NO: 1278732 - RNA, 23 nt, Human
ugaucucugcucacugcaaccuc

SEQ ID NO: 1278733 - RNA, 20 nt, Human
ugauucuccugccucagccu

SEQ ID NO: 1278734 - RNA, 18 nt, Human
ugcagaguggauuugggu

SEQ ID NO: 1278735 - RNA, 18 nt, Human
ugcccaggcuggagugca

SEQ ID NO: 1278736 - RNA, 21 nt, Human
ugcccaggcuggagugcagug

SEQ ID NO: 1278737 - RNA, 22 nt, Human
ugcccaggcuggagugcagugg

SEQ ID NO: 1278738 - RNA, 24 nt, Human
ugcccaggcuggagugcaguggca

SEQ ID NO: 1278739 - RNA, 21 nt, Human
ugcccugggcuuuaauuauuu

SEQ ID NO: 1278740 - RNA, 24 nt, Human
ugccucagccucccgaguagcugg

SEQ ID NO: 1278741 - RNA, 21 nt, Human
ugccucggccucccaaggugc

SEQ ID NO: 1278742 - RNA, 24 nt, Human
ugccucggccucccaaggugcuga

SEQ ID NO: 1278743 - RNA, 22 nt, Human
ugccugggaugagaguggagac

SEQ ID NO: 1278744 - RNA, 21 nt, Human
ugccugguuuagggaauauuc

SEQ ID NO: 1278745 - RNA, 24 nt, Human
ugcugagaucacaggugugagcca

SEQ ID NO: 1278746 - RNA, 24 nt, Human
uggagucuuacucuguugcccagg

SEQ ID NO: 1278747 - RNA, 19 nt, Human
uggagugcaguggcaugau

SEQ ID NO: 1278748 - RNA, 22 nt, Human
uggagugcaguggcaugaucuc

SEQ ID NO: 1278749 - RNA, 23 nt, Human
uggagugcaguggcaugaucucu

SEQ ID NO: 1278750 - RNA, 24 nt, Human
uggagugcaguggcaugaucucug

SEQ ID NO: 1278751 - RNA, 23 nt, Human
uggauuuggguggcaucuuggcu

SEQ ID NO: 1278752 - RNA, 24 nt, Human
ugggaaugcaggugcgugccacca

SEQ ID NO: 1278753 - RNA, 20 nt, Human
ugggaugagaguggagacgg

SEQ ID NO: 1278754 - RNA, 21 nt, Human
ugggauuacaggugcccacca

SEQ ID NO: 1278755 - RNA, 24 nt, Human
ugggauuacaggugcccaccacca

SEQ ID NO: 1278756 - RNA, 18 nt, Human
ugggcucaagugauucuc

SEQ ID NO: 1278757 - RNA, 24 nt, Human
ugggcucaagugauucuccugccu

SEQ ID NO: 1278758 - RNA, 20 nt, Human
ugggcuggagacuugggcuu

SEQ ID NO: 1278759 - RNA, 24 nt, Human
ugggguuucaccauguuguccagg

SEQ ID NO: 1278760 - RNA, 24 nt, Human
uguccaggcuggucucaaacuccu

SEQ ID NO: 1278761 - RNA, 22 nt, Human
ugugacacagaacucaagggac

SEQ ID NO: 1278762 - RNA, 24 nt, Human
uuacucuguugcccaggcuggagu

SEQ ID NO: 1278763 - RNA, 18 nt, Human
uuaguagagaugggguuu

SEQ ID NO: 1278764 - RNA, 22 nt, Human
uuaguagagaugggguuucacc

SEQ ID NO: 1278765 - RNA, 24 nt, Human
uuaguagagaugggguuucaccau

SEQ ID NO: 1278766 - RNA, 18 nt, Human
uucuucuuguggccucug

SEQ ID NO: 1278767 - RNA, 19 nt, Human
uugauauguguuucucagu

SEQ ID NO: 1278768 - RNA, 19 nt, Human
uugcuugggacccaggggg

SEQ ID NO: 1278769 - RNA, 20 nt, Human
uuggaggcugggacaggggu

SEQ ID NO: 1278770 - RNA, 21 nt, Human
uugggaggcaucccagguaga

SEQ ID NO: 1278771 - RNA, 23 nt, Human
uuguauuuuuaguagagaugggg

SEQ ID NO: 1278772 - RNA, 22 nt, Human
uuuaaagauggagucuuacucu

SEQ ID NO: 1278773 - RNA, 22 nt, Human
uuucaccauguuguccaggcug

SEQ ID NO: 1278774 - RNA, 24 nt, Human
uuucaccauguuguccaggcuggu

SEQ ID NO: 1278775 - RNA, 24 nt, Human
uuuuuaguagagaugggguuucac

SEQ ID NO: 1278776 - RNA, 21 nt, Human
uuuuucuucuuguggccucug

SEQ ID NO: 1278777 - RNA, 20 nt, Human
uuuuuguauuuuuaguagag

SEQ ID NO: 1278778 - RNA, 23 nt, Human
aacuccaaguuaucuccaacuuu

SEQ ID NO: 1278779 - RNA, 19 nt, Human
aggcaauuucugaucgaga

SEQ ID NO: 1278780 - RNA, 23 nt, Human
ccaaggcaauuucugaucgagaa

SEQ ID NO: 1278781 - RNA, 22 nt, Human
ccuaucccaucucaacaucaaa

SEQ ID NO: 1278782 - RNA, 21 nt, Human
cucucugacaagagugucuga

SEQ ID NO: 1278783 - RNA, 19 nt, Human
cuggauuucuucuuugcuu

SEQ ID NO: 1278784 - RNA, 20 nt, Human
gguaucaaagaagauaagcu

SEQ ID NO: 1278785 - RNA, 22 nt, Human
uaucaaagaagauaagcugaca

SEQ ID NO: 1278786 - RNA, 26 nt, Human
uaucaaagaagauaagcugacaugau

SEQ ID NO: 1278787 - RNA, 22 nt, Human
ucucuaugauuacaacagagau

SEQ ID NO: 1278788 - RNA, 18 nt, Human
ucugacaagagugucuga

SEQ ID NO: 1278789 - RNA, 19 nt, Human
ugagaaaauauucaguuua

SEQ ID NO: 1278790 - RNA, 21 nt, Human
uggauuucuucuuugcuuuuc

SEQ ID NO: 1278791 - RNA, 24 nt, Human
uuaagauacaggcuuguaauucau

SEQ ID NO: 1278792 - RNA, 26 nt, Human
aaaaaagacccuaccuuacauaugaa

SEQ ID NO: 1278793 - RNA, 18 nt, Human
aaaaacauaaaaacucaa

SEQ ID NO: 1278794 - RNA, 23 nt, Human
aaaaagaagaaaaaggagaaaag

SEQ ID NO: 1278795 - RNA, 23 nt, Human
aaaaaggagaaaagagaaaaaga

SEQ ID NO: 1278796 - RNA, 28 nt, Human
aaacaaaaacauaaaaacucaaccaaaa

SEQ ID NO: 1278797 - RNA, 22 nt, Human
aaacagcagugaagauaaaagc

SEQ ID NO: 1278798 - RNA, 22 nt, Human
aaauuuucuuccccauagaagc

SEQ ID NO: 1278799 - RNA, 29 nt, Human
aaccaaaaaguggaaucaaaagggacccc

SEQ ID NO: 1278800 - RNA, 24 nt, Human
aacuagaccuccaagauccgccca

SEQ ID NO: 1278801 - RNA, 24 nt, Human
aacuuucacugaauauuuuaacau

SEQ ID NO: 1278802 - RNA, 21 nt, Human
aagaagaaaaaggagaaaaga

SEQ ID NO: 1278803 - RNA, 24 nt, Human
aagaagaaaaaggagaaaagagaa

SEQ ID NO: 1278804 - RNA, 21 nt, Human
aagaaucuugcagaaaucagc

SEQ ID NO: 1278805 - RNA, 18 nt, Human
aagcauccuuauaagagg

SEQ ID NO: 1278806 - RNA, 19 nt, Human
aaggaucuugagauggaga

SEQ ID NO: 1278807 - RNA, 25 nt, Human
aaguccuaaaaguacuaguugagcu

SEQ ID NO: 1278808 - RNA, 19 nt, Human
agaaaaagaaaaaaaagga

SEQ ID NO: 1278809 - RNA, 25 nt, Human
agaaaaagaaaaaaaaggaacaaaa

SEQ ID NO: 1278810 - RNA, 26 nt, Human
agaaaaagaaaaaaaaggaacaaaaa

SEQ ID NO: 1278811 - RNA, 24 nt, Human
agaaaaaggagaaaagagaaaaag

SEQ ID NO: 1278812 - RNA, 21 nt, Human
agaagaaaaaggagaaaagag

SEQ ID NO: 1278813 - RNA, 21 nt, Human
agaaggaaccagaccuaagga

SEQ ID NO: 1278814 - RNA, 19 nt, Human
agacucuagaagugaaagc

SEQ ID NO: 1278815 - RNA, 22 nt, Human
agcauggcccaauucuuccuca

SEQ ID NO: 1278816 - RNA, 19 nt, Human
agccaggagccaaggaaug

SEQ ID NO: 1278817 - RNA, 24 nt, Human
agcuucuggcaauauauuucuuuc

SEQ ID NO: 1278818 - RNA, 19 nt, Human
aggcaggaaggaaauuuga

SEQ ID NO: 1278819 - RNA, 24 nt, Human
aggcaggaaggaaauuugacuaua

SEQ ID NO: 1278820 - RNA, 25 nt, Human
aggcaggaaggaaauuugacuauag

SEQ ID NO: 1278821 - RNA, 23 nt, Human
aguaacuaauacuggagucuaua

SEQ ID NO: 1278822 - RNA, 21 nt, Human
aguguuuuccugggggcuggg

SEQ ID NO: 1278823 - RNA, 19 nt, Human
aucacuuuuacccaauuug

SEQ ID NO: 1278824 - RNA, 18 nt, Human
auggaaaauagcuuacuc

SEQ ID NO: 1278825 - RNA, 18 nt, Human
auuucugccauuguucuc

SEQ ID NO: 1278826 - RNA, 22 nt, Human
caaaaaagacccuaccuuacau

SEQ ID NO: 1278827 - RNA, 24 nt, Human
caaaaacauaaaaacucaaccaaa

SEQ ID NO: 1278828 - RNA, 21 nt, Human
caaaacacaagaaucuugcag

SEQ ID NO: 1278829 - RNA, 31 nt, Human
caaaugaccuucuccucuguaauguuuucuu

SEQ ID NO: 1278830 - RNA, 20 nt, Human
caagagacagcaaacagcag

SEQ ID NO: 1278831 - RNA, 22 nt, Human
cacuacguuaaaacagcaaaac

SEQ ID NO: 1278832 - RNA, 19 nt, Human
cagacucuagaagugaaag

SEQ ID NO: 1278833 - RNA, 24 nt, Human
cagcagacucuagaagugaaagcu

SEQ ID NO: 1278834 - RNA, 19 nt, Human
cagcccugcccucaccccu

SEQ ID NO: 1278835 - RNA, 20 nt, Human
cagugagucacuacguuaaa

SEQ ID NO: 1278836 - RNA, 21 nt, Human
cauauuaacaccaaaagaaau

SEQ ID NO: 1278837 - RNA, 20 nt, Human
ccauuguucucuugugauaa

SEQ ID NO: 1278838 - RNA, 22 nt, Human
cuacgggaaacuagaccuccaa

SEQ ID NO: 1278839 - RNA, 22 nt, Human
cucagcagaacuccacuguucc

SEQ ID NO: 1278840 - RNA, 18 nt, Human
cuggcaaaauucuguagc

SEQ ID NO: 1278841 - RNA, 20 nt, Human
cuucaauuucaccaaaucuc

SEQ ID NO: 1278842 - RNA, 24 nt, Human
gaaaaagaaaaaaaaggaacaaaa

SEQ ID NO: 1278843 - RNA, 21 nt, Human
gaaaacaaaaacauaaaaacu

SEQ ID NO: 1278844 - RNA, 18 nt, Human
gaaggaaccagaccuaag

SEQ ID NO: 1278845 - RNA, 19 nt, Human
gagaaaagagaaaaagaaa

SEQ ID NO: 1278846 - RNA, 19 nt, Human
ggacuuggcacacgucauu

SEQ ID NO: 1278847 - RNA, 20 nt, Human
guauauaaaaaaagaagucu

SEQ ID NO: 1278848 - RNA, 21 nt, Human
uaacagcccugcccucacccc

SEQ ID NO: 1278849 - RNA, 23 nt, Human
uaacaugucaucaucaagagaca

SEQ ID NO: 1278850 - RNA, 18 nt, Human
uaacuaauaccauuucug

SEQ ID NO: 1278851 - RNA, 18 nt, Human
uaaguugacucauuuugc

SEQ ID NO: 1278852 - RNA, 18 nt, Human
uaccugaaaacaaaaaca

SEQ ID NO: 1278853 - RNA, 19 nt, Human
uacuauuauuaucauaccu

SEQ ID NO: 1278854 - RNA, 19 nt, Human
uagaagaguaugugaccau

SEQ ID NO: 1278855 - RNA, 26 nt, Human
uaguguuuuccugggggcuggggaag

SEQ ID NO: 1278856 - RNA, 19 nt, Human
uauauaaaaaaagaagucc

SEQ ID NO: 1278857 - RNA, 24 nt, Human
uauauaaagauaaguugacucauu

SEQ ID NO: 1278858 - RNA, 20 nt, Human
ucaaaacagaacuuaaaaaa

SEQ ID NO: 1278859 - RNA, 24 nt, Human
ucaaauucuccucuuaaacuguac

SEQ ID NO: 1278860 - RNA, 21 nt, Human
uccaagauccgcccaugauuu

SEQ ID NO: 1278861 - RNA, 23 nt, Human
uccuagaucccucagcagaacuc

SEQ ID NO: 1278862 - RNA, 22 nt, Human
ucuugcagaaaucagcugccag

SEQ ID NO: 1278863 - RNA, 28 nt, Human
ugaaaacaaaaacauaaaaacucaacca

SEQ ID NO: 1278864 - RNA, 18 nt, Human
ugaagauaaaagcugaga

SEQ ID NO: 1278865 - RNA, 18 nt, Human
ugaccauggaagcagaga

SEQ ID NO: 1278866 - RNA, 21 nt, Human
ugagaaauucaaaacacaaga

SEQ ID NO: 1278867 - RNA, 18 nt, Human
ugaguauaaguguuuguu

SEQ ID NO: 1278868 - RNA, 18 nt, Human
ugcagaauaaggggaaaa

SEQ ID NO: 1278869 - RNA, 22 nt, Human
ugccauuguucucuugugauaa

SEQ ID NO: 1278870 - RNA, 20 nt, Human
uggauuaucugagcaucccc

SEQ ID NO: 1278871 - RNA, 21 nt, Human
uggcaaaauucuguagcuucu

SEQ ID NO: 1278872 - RNA, 23 nt, Human
uggcaauauauuucuuuccuggu

SEQ ID NO: 1278873 - RNA, 25 nt, Human
uuagucuaaucaaauucuccucuua

SEQ ID NO: 1278874 - RNA, 23 nt, Human
uucaccaaaucucaauuauauau

SEQ ID NO: 1278875 - RNA, 24 nt, Human
uuccugggggcuggggaaggauuu

SEQ ID NO: 1278876 - RNA, 24 nt, Human
uugacucauuuugcaauuguucuu

SEQ ID NO: 1278877 - RNA, 18 nt, Human
uugcagaaaucagcugcc

SEQ ID NO: 1278878 - RNA, 26 nt, Human
caaaaagaccccuuggggcuuacaaa

SEQ ID NO: 1278879 - RNA, 20 nt, Human
caagcuacaaaaaaauaguu

SEQ ID NO: 1278880 - RNA, 22 nt, Human
cccuuggggcuuacaaaaucuu

SEQ ID NO: 1278881 - RNA, 19 nt, Human
cuuuaauagcugagaugaa

SEQ ID NO: 1278882 - RNA, 21 nt, Human
gaugaagaugaugagaaggga

SEQ ID NO: 1278883 - RNA, 23 nt, Human
uaaauggaaaggguuuugaauuu

SEQ ID NO: 1278884 - RNA, 23 nt, Human
uaauagcugagaugaagaugaug

SEQ ID NO: 1278885 - RNA, 18 nt, Human
uagagaacuggauaauag

SEQ ID NO: 1278886 - RNA, 19 nt, Human
ucauggaucaaaaagaccc

SEQ ID NO: 1278887 - RNA, 22 nt, Human
ugaaaggaagucagauuuuagu

SEQ ID NO: 1278888 - RNA, 21 nt, Human
uguacaacuguauauaucuuu

SEQ ID NO: 1278889 - RNA, 18 nt, Human
uuuaauagcugagaugaa

SEQ ID NO: 1278890 - RNA, 24 nt, Human
uuucaagcuacaaaaaaauaguuu

SEQ ID NO: 1278891 - RNA, 21 nt, Human
aaaacagacaacucacugcuu

SEQ ID NO: 1278892 - RNA, 18 nt, Human
aaaauuagcugggcaugg

SEQ ID NO: 1278893 - RNA, 20 nt, Human
aaaauucugaacaaggauaa

SEQ ID NO: 1278894 - RNA, 26 nt, Human
aaacaaaacaaacacucacucacugg

SEQ ID NO: 1278895 - RNA, 23 nt, Human
aaaccccuucaucucuuggagaa

SEQ ID NO: 1278896 - RNA, 19 nt, Human
aaagacacaaaacagacaa

SEQ ID NO: 1278897 - RNA, 18 nt, Human
aacaagucacucaccacc

SEQ ID NO: 1278898 - RNA, 26 nt, Human
aagaaaaucaaagacacaaaacagac

SEQ ID NO: 1278899 - RNA, 22 nt, Human
aagaaacauaaaucuauuagcu

SEQ ID NO: 1278900 - RNA, 25 nt, Human
aagcaaucagaggccacuacacaca

SEQ ID NO: 1278901 - RNA, 24 nt, Human
aagcugaggcaggaggaucacuug

SEQ ID NO: 1278902 - RNA, 22 nt, Human
aaugccaaaaaaucaggaauaa

SEQ ID NO: 1278903 - RNA, 23 nt, Human
acaaaaaaaggacuuuacaugaa

SEQ ID NO: 1278904 - RNA, 22 nt, Human
acagaaaauuugaaaccccaau

SEQ ID NO: 1278905 - RNA, 24 nt, Human
acagagcaagacucugucgcaaaa

SEQ ID NO: 1278906 - RNA, 21 nt, Human
accuggaaaccccuucaucuc

SEQ ID NO: 1278907 - RNA, 22 nt, Human
acucuagaaagugcuacagggg

SEQ ID NO: 1278908 - RNA, 23 nt, Human
acugcacucuggcuuggcgacag

SEQ ID NO: 1278909 - RNA, 25 nt, Human
acugcacucuggcuuggcgacagag

SEQ ID NO: 1278910 - RNA, 22 nt, Human
acuugaaacgaggaggcggagg

SEQ ID NO: 1278911 - RNA, 23 nt, Human
agaaaaaacaaaacaaacacuca

SEQ ID NO: 1278912 - RNA, 25 nt, Human
agaaaacuacucacaaucaacccac

SEQ ID NO: 1278913 - RNA, 24 nt, Human
agacagcuuauuucaaccccaagc

SEQ ID NO: 1278914 - RNA, 18 nt, Human
agagaaggcauuagggau

SEQ ID NO: 1278915 - RNA, 29 nt, Human
agcaagacucugucgcaaaaaaaaaaaaa

SEQ ID NO: 1278916 - RNA, 26 nt, Human
agcuacauuuuccauaagguuaucau

SEQ ID NO: 1278917 - RNA, 23 nt, Human
agcugggcaugguggugcaugcu

SEQ ID NO: 1278918 - RNA, 22 nt, Human
agcuuauuucaaccccaagcaa

SEQ ID NO: 1278919 - RNA, 23 nt, Human
aggaagcugaggcaggaggauca

SEQ ID NO: 1278920 - RNA, 18 nt, Human
aggcaggaggaucacuug

SEQ ID NO: 1278921 - RNA, 20 nt, Human
aggcaggaggaucacuugaa

SEQ ID NO: 1278922 - RNA, 21 nt, Human
aggcggagcuugcagugaacu

SEQ ID NO: 1278923 - RNA, 24 nt, Human
aggcggagcuugcagugaacugag

SEQ ID NO: 1278924 - RNA, 21 nt, Human
aguuggaagugaccuugaagc

SEQ ID NO: 1278925 - RNA, 24 nt, Human
aucacaccacugcacucuggcuug

SEQ ID NO: 1278926 - RNA, 18 nt, Human
auguaaguuucaaagcca

SEQ ID NO: 1278927 - RNA, 21 nt, Human
auguacauauacccaaacaca

SEQ ID NO: 1278928 - RNA, 23 nt, Human
caaaaaaaggacuuuacaugaaa

SEQ ID NO: 1278929 - RNA, 20 nt, Human
caaaaacuauaaaaagcuac

SEQ ID NO: 1278930 - RNA, 23 nt, Human
caaaacaaacacucacucacugg

SEQ ID NO: 1278931 - RNA, 25 nt, Human
caaaacaaacacucacucacuggca

SEQ ID NO: 1278932 - RNA, 27 nt, Human
caaaacagacaacucacugcuuuauca

SEQ ID NO: 1278933 - RNA, 23 nt, Human
caagacucugucgcaaaaaaaaa

SEQ ID NO: 1278934 - RNA, 26 nt, Human
caauagauuucucuuuguuaaaguuu

SEQ ID NO: 1278935 - RNA, 22 nt, Human
cacaaucaacccacacacauug

SEQ ID NO: 1278936 - RNA, 21 nt, Human
cacacaggugucuaauguuag

SEQ ID NO: 1278937 - RNA, 19 nt, Human
cacauauauauguaugugu

SEQ ID NO: 1278938 - RNA, 22 nt, Human
cacucacuggcagaguugagag

SEQ ID NO: 1278939 - RNA, 22 nt, Human
cacucuggcuuggcgacagagc

SEQ ID NO: 1278940 - RNA, 18 nt, Human
cacugcacucuggcuugg

SEQ ID NO: 1278941 - RNA, 20 nt, Human
cacugcacucuggcuuggcg

SEQ ID NO: 1278942 - RNA, 21 nt, Human
cacugcacucuggcuuggcga

SEQ ID NO: 1278943 - RNA, 23 nt, Human
cacugcacucuggcuuggcgaca

SEQ ID NO: 1278944 - RNA, 23 nt, Human
cacugcacucuggcuuggcgaca

SEQ ID NO: 1278945 - RNA, 19 nt, Human
cagaacagaaugugauaua

SEQ ID NO: 1278946 - RNA, 24 nt, Human
cagaguugagagaaggcauuaggg

SEQ ID NO: 1278947 - RNA, 19 nt, Human
cauugcaauguaaauugau

SEQ ID NO: 1278948 - RNA, 19 nt, Human
ccaagcaaucagaggccac

SEQ ID NO: 1278949 - RNA, 19 nt, Human
ccacuaagugaugauugug

SEQ ID NO: 1278950 - RNA, 19 nt, Human
ccacugcacucuggcuugg

SEQ ID NO: 1278951 - RNA, 19 nt, Human
ccacugcacucuggcuugg

SEQ ID NO: 1278952 - RNA, 20 nt, Human
ccacugcacucuggcuuggc

SEQ ID NO: 1278953 - RNA, 23 nt, Human
ccacugcacucuggcuuggcgac

SEQ ID NO: 1278954 - RNA, 25 nt, Human
cccacacacauugacuacacacuca

SEQ ID NO: 1278955 - RNA, 27 nt, Human
cccacacacauugacuacacacucaca

SEQ ID NO: 1278956 - RNA, 19 nt, Human
cccacacguauauguaggu

SEQ ID NO: 1278957 - RNA, 20 nt, Human
ccuggaaaccccuucaucuc

SEQ ID NO: 1278958 - RNA, 20 nt, Human
ccuguccuucugaagauaga

SEQ ID NO: 1278959 - RNA, 23 nt, Human
cgaagaaugccaaaaaaucagga

SEQ ID NO: 1278960 - RNA, 22 nt, Human
cgcaaaaaaaaaaaaaaaaaaa

SEQ ID NO: 1278961 - RNA, 21 nt, Human
cgcuuuauggagauuguggag

SEQ ID NO: 1278962 - RNA, 26 nt, Human
cucacaaucaacccacacacauugac

SEQ ID NO: 1278963 - RNA, 24 nt, Human
cucugucgcaaaaaaaaaaaaaaa

SEQ ID NO: 1278964 - RNA, 25 nt, Human
cuguauacacccacacguauaugua

SEQ ID NO: 1278965 - RNA, 21 nt, Human
cuuggcgacagagcaagacuc

SEQ ID NO: 1278966 - RNA, 25 nt, Human
cuugucacauauauauguaugugug

SEQ ID NO: 1278967 - RNA, 26 nt, Human
cuuuuuugcuggugaggaauuggagg

SEQ ID NO: 1278968 - RNA, 21 nt, Human
gaaaaucaaagacacaaaaca

SEQ ID NO: 1278969 - RNA, 18 nt, Human
gaaaccccuucaucucuu

SEQ ID NO: 1278970 - RNA, 19 nt, Human
gaagaaaaaacaaaacaaa

SEQ ID NO: 1278971 - RNA, 19 nt, Human
gacagcuuauuucaacccc

SEQ ID NO: 1278972 - RNA, 22 nt, Human
gagaaggcauuagggauaaaau

SEQ ID NO: 1278973 - RNA, 20 nt, Human
gagaucacaccacugcacuc

SEQ ID NO: 1278974 - RNA, 20 nt, Human
gagcaagacucugucgcaaa

SEQ ID NO: 1278975 - RNA, 23 nt, Human
gaggaucacuugaaacgaggagg

SEQ ID NO: 1278976 - RNA, 24 nt, Human
gaucacuugaaacgaggaggcgga

SEQ ID NO: 1278977 - RNA, 23 nt, Human
gaugcuacaaucugggacuuggg

SEQ ID NO: 1278978 - RNA, 20 nt, Human
gcaaaaaaaaaaaaaaaaaa

SEQ ID NO: 1278979 - RNA, 23 nt, Human
gcacucuggcuuggcgacagagc

SEQ ID NO: 1278980 - RNA, 18 nt, Human
gcuacaaucugggacuug

SEQ ID NO: 1278981 - RNA, 22 nt, Human
gcuuggcgacagagcaagacuc

SEQ ID NO: 1278982 - RNA, 18 nt, Human
ggagaacaaauagguaca

SEQ ID NO: 1278983 - RNA, 24 nt, Human
ggagcuugcagugaacugagauca

SEQ ID NO: 1278984 - RNA, 25 nt, Human
ggugcaugcuuguaaucccaccuac

SEQ ID NO: 1278985 - RNA, 23 nt, Human
guauguacauauacccaaacaca

SEQ ID NO: 1278986 - RNA, 18 nt, Human
guggugcaugcuuguaau

SEQ ID NO: 1278987 - RNA, 19 nt, Human
uaaaaaaugcaugcaauga

SEQ ID NO: 1278988 - RNA, 19 nt, Human
uaaaggucaaaguuggaag

SEQ ID NO: 1278989 - RNA, 24 nt, Human
uaacaacauccaguggaaaggggc

SEQ ID NO: 1278990 - RNA, 19 nt, Human
uaacaagucacucaccacc

SEQ ID NO: 1278991 - RNA, 18 nt, Human
uaagaaaaucaaagacac

SEQ ID NO: 1278992 - RNA, 22 nt, Human
uaauacuugucacauauauaug

SEQ ID NO: 1278993 - RNA, 27 nt, Human
uaauacuugucacauauauauguaugu

SEQ ID NO: 1278994 - RNA, 23 nt, Human
uacaaagaacacuaaggaccaaa

SEQ ID NO: 1278995 - RNA, 19 nt, Human
uacagaacagaaugugaua

SEQ ID NO: 1278996 - RNA, 25 nt, Human
uauauaauaccaugcuauguaugua

SEQ ID NO: 1278997 - RNA, 26 nt, Human
uauauacuaaaaaaugcaugcagugu

SEQ ID NO: 1278998 - RNA, 20 nt, Human
uauauguaugugugugugua

SEQ ID NO: 1278999 - RNA, 21 nt, Human
uauauguauguguguguguau

SEQ ID NO: 1279000 - RNA, 18 nt, Human
uauguacuuccauuauag

SEQ ID NO: 1279001 - RNA, 19 nt, Human
uauguauguguguguguau

SEQ ID NO: 1279002 - RNA, 19 nt, Human
uauuuuacaaaaaaaggac

SEQ ID NO: 1279003 - RNA, 18 nt, Human
ucaaaaaauuccuuuucc

SEQ ID NO: 1279004 - RNA, 28 nt, Human
ucaacccacacacauugacuacacagug

SEQ ID NO: 1279005 - RNA, 21 nt, Human
ucaaccccaagcaaucagagg

SEQ ID NO: 1279006 - RNA, 19 nt, Human
ucacaaucaacccacacac

SEQ ID NO: 1279007 - RNA, 23 nt, Human
ucacaccacugcacucuggcuug

SEQ ID NO: 1279008 - RNA, 21 nt, Human
ucauggaauaaaggucaaagu

SEQ ID NO: 1279009 - RNA, 22 nt, Human
ucauuccuucucacccuuaaaa

SEQ ID NO: 1279010 - RNA, 19 nt, Human
ucuaacaacauccagugga

SEQ ID NO: 1279011 - RNA, 20 nt, Human
ucuaauguuaguccucaacu

SEQ ID NO: 1279012 - RNA, 23 nt, Human
ucuggcuuggcgacagagcaaga

SEQ ID NO: 1279013 - RNA, 22 nt, Human
ugaaaccccaauagauuucucu

SEQ ID NO: 1279014 - RNA, 22 nt, Human
ugaacauauacaggauucaugg

SEQ ID NO: 1279015 - RNA, 20 nt, Human
ugacuacacacucacaaaua

SEQ ID NO: 1279016 - RNA, 20 nt, Human
ugacucuagaaagugcuaca

SEQ ID NO: 1279017 - RNA, 18 nt, Human
ugagaucacaccacugca

SEQ ID NO: 1279018 - RNA, 18 nt, Human
ugagcuaaugagaggauu

SEQ ID NO: 1279019 - RNA, 20 nt, Human
ugaggcaggaggaucacuug

SEQ ID NO: 1279020 - RNA, 23 nt, Human
ugaggcaggaggaucacuugaaa

SEQ ID NO: 1279021 - RNA, 19 nt, Human
ugauuguguucaugaaagu

SEQ ID NO: 1279022 - RNA, 24 nt, Human
ugcauucuaaaagaauacauauuu

SEQ ID NO: 1279023 - RNA, 26 nt, Human
ugccaaaaaaucaggaauaaacuuaa

SEQ ID NO: 1279024 - RNA, 24 nt, Human
ugcuuguaaucccaccuacucagg

SEQ ID NO: 1279025 - RNA, 18 nt, Human
uggaaaccccuucaucuc

SEQ ID NO: 1279026 - RNA, 19 nt, Human
uggaaaggggcauuuagua

SEQ ID NO: 1279027 - RNA, 21 nt, Human
uggugcaugcuuguaauccca

SEQ ID NO: 1279028 - RNA, 24 nt, Human
ugguggugcaugcuuguaauccca

SEQ ID NO: 1279029 - RNA, 27 nt, Human
uguaaauugauuuuaaagucauaaugg

SEQ ID NO: 1279030 - RNA, 20 nt, Human
uguauguguguguguaugug

SEQ ID NO: 1279031 - RNA, 18 nt, Human
ugucacauauauauguau

SEQ ID NO: 1279032 - RNA, 22 nt, Human
ugucgcaaaaaaaaaaaaaaaa

SEQ ID NO: 1279033 - RNA, 19 nt, Human
uuaaucaucccucugauau

SEQ ID NO: 1279034 - RNA, 24 nt, Human
uuagcugggcaugguggugcaugc

SEQ ID NO: 1279035 - RNA, 19 nt, Human
uugcagugaacugagauca

SEQ ID NO: 1279036 - RNA, 20 nt, Human
uugcagugaacugagaucac

SEQ ID NO: 1279037 - RNA, 20 nt, Human
uuuaacaagucacucaccac

SEQ ID NO: 1279038 - RNA, 22 nt, Human
uuuacaugaaaauucugaacaa

SEQ ID NO: 1279039 - RNA, 18 nt, Human
aaaauuagcugggcaugg

SEQ ID NO: 1279040 - RNA, 18 nt, Human
aacaagucacucaccacc

SEQ ID NO: 1279041 - RNA, 24 nt, Human
aagcugaggcaggaggaucacuug

SEQ ID NO: 1279042 - RNA, 22 nt, Human
acuugaaacgaggaggcggagg

SEQ ID NO: 1279043 - RNA, 23 nt, Human
agcugggcaugguggugcaugcu

SEQ ID NO: 1279044 - RNA, 18 nt, Human
aggcaggaggaucacuug

SEQ ID NO: 1279045 - RNA, 20 nt, Human
aggcaggaggaucacuugaa

SEQ ID NO: 1279046 - RNA, 21 nt, Human
aggcggagcuugcagugaacu

SEQ ID NO: 1279047 - RNA, 24 nt, Human
aggcggagcuugcagugaacugag

SEQ ID NO: 1279048 - RNA, 21 nt, Human
aguuggaagugaccuugaagc

SEQ ID NO: 1279049 - RNA, 21 nt, Human
aucacaccacugcacucuggc

SEQ ID NO: 1279050 - RNA, 24 nt, Human
caggaagcugaggcaggaggauca

SEQ ID NO: 1279051 - RNA, 19 nt, Human
ccacuaagugaugauugug

SEQ ID NO: 1279052 - RNA, 23 nt, Human
gaggaucacuugaaacgaggagg

SEQ ID NO: 1279053 - RNA, 24 nt, Human
gaucacuugaaacgaggaggcgga

SEQ ID NO: 1279054 - RNA, 24 nt, Human
ggagcuugcagugaacugagauca

SEQ ID NO: 1279055 - RNA, 25 nt, Human
ggugcaugcuuguaaucccaccuac

SEQ ID NO: 1279056 - RNA, 19 nt, Human
gguggugcaugcuuguaau

SEQ ID NO: 1279057 - RNA, 19 nt, Human
uaacaagucacucaccacc

SEQ ID NO: 1279058 - RNA, 18 nt, Human
ucacaccacugcacucug

SEQ ID NO: 1279059 - RNA, 21 nt, Human
ucauggaauaaaggucaaagu

SEQ ID NO: 1279060 - RNA, 22 nt, Human
ugaacauauacaggauucaugg

SEQ ID NO: 1279061 - RNA, 18 nt, Human
ugagaucacaccacugca

SEQ ID NO: 1279062 - RNA, 24 nt, Human
ugagaucacaccacugcacucugg

SEQ ID NO: 1279063 - RNA, 20 nt, Human
ugaggcaggaggaucacuug

SEQ ID NO: 1279064 - RNA, 24 nt, Human
ugaggcaggaggaucacuugaaac

SEQ ID NO: 1279065 - RNA, 19 nt, Human
ugauuguguucaugaaagu

SEQ ID NO: 1279066 - RNA, 24 nt, Human
ugcuuguaaucccaccuacucagg

SEQ ID NO: 1279067 - RNA, 21 nt, Human
uggugcaugcuuguaauccca

SEQ ID NO: 1279068 - RNA, 24 nt, Human
ugguggugcaugcuuguaauccca

SEQ ID NO: 1279069 - RNA, 20 nt, Human
uguaaucccaccuacucagg

SEQ ID NO: 1279070 - RNA, 19 nt, Human
uuaaucaucccucugauau

SEQ ID NO: 1279071 - RNA, 24 nt, Human
uuagcugggcaugguggugcaugc

SEQ ID NO: 1279072 - RNA, 19 nt, Human
uugcagugaacugagauca

SEQ ID NO: 1279073 - RNA, 20 nt, Human
uugcagugaacugagaucac

SEQ ID NO: 1279074 - RNA, 20 nt, Human
uuuaacaagucacucaccac

SEQ ID NO: 1279075 - RNA, 18 nt, Human
uuuaagacugauauuuac

SEQ ID NO: 1279076 - RNA, 23 nt, Human
aaugugagaaugucaaagaagga

SEQ ID NO: 1279077 - RNA, 18 nt, Human
accuuuacuggcuccagu

SEQ ID NO: 1279078 - RNA, 19 nt, Human
cagacagacuggacacugc

SEQ ID NO: 1279079 - RNA, 21 nt, Human
ccaaacaaaugugagaauguc

SEQ ID NO: 1279080 - RNA, 27 nt, Human
cuggcaauuaauggauaaacucuuuuu

SEQ ID NO: 1279081 - RNA, 20 nt, Human
cuggugccucuguccagucc

SEQ ID NO: 1279082 - RNA, 21 nt, Human
cuggugccucuguccagucca

SEQ ID NO: 1279083 - RNA, 19 nt, Human
cuucaggaaucgccaaucc

SEQ ID NO: 1279084 - RNA, 19 nt, Human
gaaacuucaggaaucgcca

SEQ ID NO: 1279085 - RNA, 20 nt, Human
gaccuugcuuuucuucauac

SEQ ID NO: 1279086 - RNA, 24 nt, Human
ucugaaccucaauaacaggcagca

SEQ ID NO: 1279087 - RNA, 19 nt, Human
ugagaaugucaaagaagga

SEQ ID NO: 1279088 - RNA, 24 nt, Human
uuaguuuaagaguuaccuuucuca

SEQ ID NO: 1279089 - RNA, 24 nt, Human
uucaaguuucagccaaacaaaugu

SEQ ID NO: 1279090 - RNA, 22 nt, Human
cagcugccgcugaggcuggaac

SEQ ID NO: 1279091 - RNA, 22 nt, Human
uccgucgagcgauccagcugcc

SEQ ID NO: 1279092 - RNA, 20 nt, Human
aaaaaaaacaaugaacaaag

SEQ ID NO: 1279093 - RNA, 22 nt, Human
aaaaaaaacaaugaacaaaguu

SEQ ID NO: 1279094 - RNA, 22 nt, Human
aaaaagcaaaauaaaauagcau

SEQ ID NO: 1279095 - RNA, 19 nt, Human
aaaaugaauaaauauggcc

SEQ ID NO: 1279096 - RNA, 24 nt, Human
aaacacacacaaaaucaaaucauc

SEQ ID NO: 1279097 - RNA, 18 nt, Human
aaacagguaaacaguuug

SEQ ID NO: 1279098 - RNA, 23 nt, Human
aaacaguccuuuccagcaaccuc

SEQ ID NO: 1279099 - RNA, 20 nt, Human
aaaugaacaaguacaagaaa

SEQ ID NO: 1279100 - RNA, 20 nt, Human
aacaaaaaaaacaaugaaca

SEQ ID NO: 1279101 - RNA, 19 nt, Human
aacaauacuggcuuucccc

SEQ ID NO: 1279102 - RNA, 21 nt, Human
aacacuuacuaagcauuuccu

SEQ ID NO: 1279103 - RNA, 18 nt, Human
aacaucugccacucugcc

SEQ ID NO: 1279104 - RNA, 18 nt, Human
aagacaaggacacacaug

SEQ ID NO: 1279105 - RNA, 19 nt, Human
aagagguuggccugcaucc

SEQ ID NO: 1279106 - RNA, 22 nt, Human
aagcaaaacaaaaguaacgugg

SEQ ID NO: 1279107 - RNA, 20 nt, Human
aagcauuuccuggguaugcc

SEQ ID NO: 1279108 - RNA, 19 nt, Human
aaguacaagaaaacagucc

SEQ ID NO: 1279109 - RNA, 25 nt, Human
acacaacaaaacuagaauggcugag

SEQ ID NO: 1279110 - RNA, 26 nt, Human
accaccacacagucaguacuggccug

SEQ ID NO: 1279111 - RNA, 18 nt, Human
agaaaagaaaauaaugaa

SEQ ID NO: 1279112 - RNA, 21 nt, Human
agaaauacuguagaaagccau

SEQ ID NO: 1279113 - RNA, 18 nt, Human
agacaaggacacacaugc

SEQ ID NO: 1279114 - RNA, 19 nt, Human
agacaaggacacacaugca

SEQ ID NO: 1279115 - RNA, 22 nt, Human
agucuugacauuguagaaauaa

SEQ ID NO: 1279116 - RNA, 25 nt, Human
agugcagcaugugccaaauguuuug

SEQ ID NO: 1279117 - RNA, 20 nt, Human
auaaaacacaacuggcagaa

SEQ ID NO: 1279118 - RNA, 18 nt, Human
auguaauaaggugaagcc

SEQ ID NO: 1279119 - RNA, 22 nt, Human
auuaccaaauauuaagcuguga

SEQ ID NO: 1279120 - RNA, 22 nt, Human
caaaacgguaagcccuuaagag

SEQ ID NO: 1279121 - RNA, 23 nt, Human
caaaacgguaagcccuuaagagc

SEQ ID NO: 1279122 - RNA, 23 nt, Human
caaaacuagaauggcugaggcac

SEQ ID NO: 1279123 - RNA, 20 nt, Human
caaaaguaacgugggaacuu

SEQ ID NO: 1279124 - RNA, 23 nt, Human
caaauuaauuuacagucaguuuu

SEQ ID NO: 1279125 - RNA, 21 nt, Human
caaauuccaagauagaaaaga

SEQ ID NO: 1279126 - RNA, 21 nt, Human
caacacacaacaaaacuagaa

SEQ ID NO: 1279127 - RNA, 22 nt, Human
cacaacaaaacuagaauggcug

SEQ ID NO: 1279128 - RNA, 24 nt, Human
cacaauaucuuauagcccauucca

SEQ ID NO: 1279129 - RNA, 24 nt, Human
cacacaugcacuuggaagaaagaa

SEQ ID NO: 1279130 - RNA, 22 nt, Human
cacucugccaauucuauauccc

SEQ ID NO: 1279131 - RNA, 24 nt, Human
cagguaaacaguuugaaauaaugc

SEQ ID NO: 1279132 - RNA, 19 nt, Human
cagguucuccaccuggaau

SEQ ID NO: 1279133 - RNA, 24 nt, Human
ccaacaacaagcuuaaacacuaaa

SEQ ID NO: 1279134 - RNA, 20 nt, Human
cgguaagcccuuaagagcag

SEQ ID NO: 1279135 - RNA, 26 nt, Human
cuauucuaggaaagacaaauggccag

SEQ ID NO: 1279136 - RNA, 25 nt, Human
cugguacuaaauaaauggcaacaaa

SEQ ID NO: 1279137 - RNA, 18 nt, Human
cuuaugacaugccacaag

SEQ ID NO: 1279138 - RNA, 22 nt, Human
cuuccauugucuagcacaucua

SEQ ID NO: 1279139 - RNA, 23 nt, Human
gaaaaaguuuaugcgaagguggu

SEQ ID NO: 1279140 - RNA, 18 nt, Human
gaaaauaaugaauagcau

SEQ ID NO: 1279141 - RNA, 21 nt, Human
gaaaaugaauaaauauggcca

SEQ ID NO: 1279142 - RNA, 25 nt, Human
gaacaaguacaagaaaacaguccuu

SEQ ID NO: 1279143 - RNA, 21 nt, Human
gacaaaacgguaagcccuuaa

SEQ ID NO: 1279144 - RNA, 20 nt, Human
gagcaaauuccaagauagaa

SEQ ID NO: 1279145 - RNA, 25 nt, Human
gcaaaaccuggaagaauaugagagc

SEQ ID NO: 1279146 - RNA, 18 nt, Human
gcaaacuauuuuauguua

SEQ ID NO: 1279147 - RNA, 22 nt, Human
gcaacaaaaaugcugacauggg

SEQ ID NO: 1279148 - RNA, 21 nt, Human
gccaauucuauaucccaucau

SEQ ID NO: 1279149 - RNA, 19 nt, Human
ggaaaagggguuuagaauu

SEQ ID NO: 1279150 - RNA, 20 nt, Human
gugcagcaugugccaaaugu

SEQ ID NO: 1279151 - RNA, 22 nt, Human
uaaaauagcacugaccaaaaga

SEQ ID NO: 1279152 - RNA, 22 nt, Human
uaaaauagcacugaccaaaaga

SEQ ID NO: 1279153 - RNA, 24 nt, Human
uaaucaaagagguuggccugcauc

SEQ ID NO: 1279154 - RNA, 24 nt, Human
uacacuuugucaauuagucaagag

SEQ ID NO: 1279155 - RNA, 20 nt, Human
uacuauagauauaguuaagg

SEQ ID NO: 1279156 - RNA, 23 nt, Human
uagauggucaaguguguggaaaa

SEQ ID NO: 1279157 - RNA, 18 nt, Human
uauaaagccuccuacucc

SEQ ID NO: 1279158 - RNA, 21 nt, Human
uauggccaugcauugauuacc

SEQ ID NO: 1279159 - RNA, 21 nt, Human
uauuaaacacacacaaaauca

SEQ ID NO: 1279160 - RNA, 22 nt, Human
ucagaaagacaaacaaaaaaaa

SEQ ID NO: 1279161 - RNA, 20 nt, Human
ucagucuuucugugucagaa

SEQ ID NO: 1279162 - RNA, 21 nt, Human
uccaacaacaagcuuaaacac

SEQ ID NO: 1279163 - RNA, 23 nt, Human
uccuggguaugccacuauauuaa

SEQ ID NO: 1279164 - RNA, 23 nt, Human
ucuaggaaagacaaauggccaga

SEQ ID NO: 1279165 - RNA, 21 nt, Human
ucugucagguucuccaccugg

SEQ ID NO: 1279166 - RNA, 19 nt, Human
ugaaaaaagcaggaacaaa

SEQ ID NO: 1279167 - RNA, 24 nt, Human
ugaaaugggugaaugauaggaacu

SEQ ID NO: 1279168 - RNA, 26 nt, Human
ugaacaucugccacucugccaauucu

SEQ ID NO: 1279169 - RNA, 22 nt, Human
ugacauuguagaaauaauuuua

SEQ ID NO: 1279170 - RNA, 20 nt, Human
ugagaaaggcuaaaauuguu

SEQ ID NO: 1279171 - RNA, 19 nt, Human
ugagcaaauuccaagauag

SEQ ID NO: 1279172 - RNA, 22 nt, Human
ugaggugucuugcacagugaaa

SEQ ID NO: 1279173 - RNA, 20 nt, Human
ugagugaacaauccuccccc

SEQ ID NO: 1279174 - RNA, 23 nt, Human
ugauauaguuuauuucaauuuuu

SEQ ID NO: 1279175 - RNA, 19 nt, Human
ugcgaagguggugccugag

SEQ ID NO: 1279176 - RNA, 24 nt, Human
uggaagaauaugagagcugacagu

SEQ ID NO: 1279177 - RNA, 21 nt, Human
uggaaugccacagcuaguuuu

SEQ ID NO: 1279178 - RNA, 23 nt, Human
uggaaugccacagcuaguuuuuc

SEQ ID NO: 1279179 - RNA, 23 nt, Human
uggcaacaaaaaugcugacaugg

SEQ ID NO: 1279180 - RNA, 22 nt, Human
uggccugcauccuuccauuguc

SEQ ID NO: 1279181 - RNA, 20 nt, Human
uggcugaggcacaaaugaac

SEQ ID NO: 1279182 - RNA, 26 nt, Human
uggcugaggcacaaaugaacaaguac

SEQ ID NO: 1279183 - RNA, 24 nt, Human
ugucagaaagacaaacaaaaaaaa

SEQ ID NO: 1279184 - RNA, 22 nt, Human
uguggaaaaugaauaaauaugg

SEQ ID NO: 1279185 - RNA, 19 nt, Human
ugugucagaaagacaaaca

SEQ ID NO: 1279186 - RNA, 20 nt, Human
uuaaaaaagcaaaauaaaau

SEQ ID NO: 1279187 - RNA, 20 nt, Human
uuaaaauuaucuguugaugc

SEQ ID NO: 1279188 - RNA, 23 nt, Human
uuaaacacacacaaaaucaaauc

SEQ ID NO: 1279189 - RNA, 21 nt, Human
uuauaaaguccuuuggcuagu

SEQ ID NO: 1279190 - RNA, 25 nt, Human
uucauuauacaaaggauucacuguu

SEQ ID NO: 1279191 - RNA, 22 nt, Human
uuuacagucaguuuuaucauuu

SEQ ID NO: 1279192 - RNA, 24 nt, Human
uuucuauauugucaaacaugauug

SEQ ID NO: 1279193 - RNA, 24 nt, Human
aaccucugcagaagcuggacuacc

SEQ ID NO: 1279194 - RNA, 21 nt, Human
aagaaaacagagagauauuag

SEQ ID NO: 1279195 - RNA, 21 nt, Human
acacuaaagaaaacagagaga

SEQ ID NO: 1279196 - RNA, 22 nt, Human
acacuaaagaaaacagagagau

SEQ ID NO: 1279197 - RNA, 19 nt, Human
aggcagcaggaggucaggg

SEQ ID NO: 1279198 - RNA, 21 nt, Human
aggcagcaggaggucagggug

SEQ ID NO: 1279199 - RNA, 21 nt, Human
augaaaggcagcuccucgggc

SEQ ID NO: 1279200 - RNA, 20 nt, Human
ccguacucuucccacugcca

SEQ ID NO: 1279201 - RNA, 22 nt, Human
cuccaaugcaauaacugcuaug

SEQ ID NO: 1279202 - RNA, 26 nt, Human
cucuucccacugccauugagaccgac

SEQ ID NO: 1279203 - RNA, 21 nt, Human
cuggacuaccguacucuuccc

SEQ ID NO: 1279204 - RNA, 20 nt, Human
ggaggucagggugagguuug

SEQ ID NO: 1279205 - RNA, 23 nt, Human
gugagggacugcugcuccaaugc

SEQ ID NO: 1279206 - RNA, 25 nt, Human
uccaaugcaauaacugcuauggauu

SEQ ID NO: 1279207 - RNA, 19 nt, Human
ucugcagaagcuggacuac

SEQ ID NO: 1279208 - RNA, 22 nt, Human
ugaggggccagagcugucgaag

SEQ ID NO: 1279209 - RNA, 22 nt, Human
uuacacuaaagaaaacagagag

SEQ ID NO: 1279210 - RNA, 25 nt, Human
uuacacuaaagaaaacagagagaua

SEQ ID NO: 1279211 - RNA, 18 nt, Human
uucaaagugagggacugc

SEQ ID NO: 1279212 - RNA, 20 nt, Human
uuugaggggccagagcuguc

SEQ ID NO: 1279213 - RNA, 19 nt, Human
aaaaagaggcagacugaca

SEQ ID NO: 1279214 - RNA, 19 nt, Human
aaaagcaccuacccucacc

SEQ ID NO: 1279215 - RNA, 21 nt, Human
aaaagucacccccaccaagcc

SEQ ID NO: 1279216 - RNA, 23 nt, Human
aaacagaaagagacagagagcga

SEQ ID NO: 1279217 - RNA, 20 nt, Human
aaagugcccuccuccucuca

SEQ ID NO: 1279218 - RNA, 20 nt, Human
aacucuacaaacucuggguc

SEQ ID NO: 1279219 - RNA, 19 nt, Human
aagaaaaaagcaccuaccc

SEQ ID NO: 1279220 - RNA, 19 nt, Human
acagcggcucuggaaccaa

SEQ ID NO: 1279221 - RNA, 18 nt, Human
acccccaccaagccccga

SEQ ID NO: 1279222 - RNA, 18 nt, Human
acccccgcccccaccccg

SEQ ID NO: 1279223 - RNA, 19 nt, Human
acccucacccccgccccca

SEQ ID NO: 1279224 - RNA, 20 nt, Human
acccucacccccgcccccac

SEQ ID NO: 1279225 - RNA, 20 nt, Human
acugcaccucacacccuuac

SEQ ID NO: 1279226 - RNA, 22 nt, Human
agaaacagaaagagacagagag

SEQ ID NO: 1279227 - RNA, 23 nt, Human
agaaacagaaagagacagagagc

SEQ ID NO: 1279228 - RNA, 18 nt, Human
agaaagcugcugcagcga

SEQ ID NO: 1279229 - RNA, 25 nt, Human
agaaggaagaggggcagaaacagaa

SEQ ID NO: 1279230 - RNA, 20 nt, Human
agagaacgagaaauaaaggc

SEQ ID NO: 1279231 - RNA, 24 nt, Human
agaggaaaaaacuauuauagaagg

SEQ ID NO: 1279232 - RNA, 26 nt, Human
agauugggagguuauguuugggagug

SEQ ID NO: 1279233 - RNA, 21 nt, Human
aggaaauacacaaaggccaaa

SEQ ID NO: 1279234 - RNA, 23 nt, Human
aggcaguguuuuuuuuagaggug

SEQ ID NO: 1279235 - RNA, 24 nt, Human
aggugcucaguacagcggcucugg

SEQ ID NO: 1279236 - RNA, 19 nt, Human
agucacagaaggaagaagg

SEQ ID NO: 1279237 - RNA, 23 nt, Human
aucuagaacgauucuccaguugu

SEQ ID NO: 1279238 - RNA, 21 nt, Human
caaaaucgucuccuggacaac

SEQ ID NO: 1279239 - RNA, 25 nt, Human
caaaugcaaauaaguacaugcucca

SEQ ID NO: 1279240 - RNA, 24 nt, Human
caacaauaacucuuaauauuuucu

SEQ ID NO: 1279241 - RNA, 23 nt, Human
caacggguucaggcagcguuacc

SEQ ID NO: 1279242 - RNA, 18 nt, Human
caaugugaaauauccaaa

SEQ ID NO: 1279243 - RNA, 21 nt, Human
cacacaaaaaaguuuaacccu

SEQ ID NO: 1279244 - RNA, 26 nt, Human
cacccccaccaagccccgacagccug

SEQ ID NO: 1279245 - RNA, 22 nt, Human
caccuacccucacccccgcccc

SEQ ID NO: 1279246 - RNA, 18 nt, Human
caccucacacccuuacac

SEQ ID NO: 1279247 - RNA, 23 nt, Human
cacuuuaacuaugccugaacugc

SEQ ID NO: 1279248 - RNA, 22 nt, Human
cagccgagccgcuccugcccgc

SEQ ID NO: 1279249 - RNA, 19 nt, Human
cagcucaucagaacugcaa

SEQ ID NO: 1279250 - RNA, 20 nt, Human
caggggccuggcagggugcu

SEQ ID NO: 1279251 - RNA, 22 nt, Human
ccaagcagccgucugcccgggc

SEQ ID NO: 1279252 - RNA, 19 nt, Human
ccagaagugaguucaaaaa

SEQ ID NO: 1279253 - RNA, 23 nt, Human
ccaggccuccagccucucccucu

SEQ ID NO: 1279254 - RNA, 19 nt, Human
cccaccaagccccgacagc

SEQ ID NO: 1279255 - RNA, 20 nt, Human
cccccuaguuuuuuuaaaaa

SEQ ID NO: 1279256 - RNA, 20 nt, Human
cccucuuuugguauuuaaac

SEQ ID NO: 1279257 - RNA, 22 nt, Human
ccuucacaaccuggggggugga

SEQ ID NO: 1279258 - RNA, 19 nt, Human
cgacaagacugcccuuugc

SEQ ID NO: 1279259 - RNA, 22 nt, Human
cgagcaaaacuaggccccgaaa

SEQ ID NO: 1279260 - RNA, 21 nt, Human
cggccggacuaacaaaaaaga

SEQ ID NO: 1279261 - RNA, 24 nt, Human
cgggcggcgcuguucugcccaggc

SEQ ID NO: 1279262 - RNA, 21 nt, Human
cugggucucgggcugccaaaa

SEQ ID NO: 1279263 - RNA, 20 nt, Human
cuuuuuuauuuucccucuuu

SEQ ID NO: 1279264 - RNA, 22 nt, Human
gaaaaaacgagguagaaaagga

SEQ ID NO: 1279265 - RNA, 19 nt, Human
gaaaaaagcaccuacccuc

SEQ ID NO: 1279266 - RNA, 20 nt, Human
gaaaaggacaaacauggaga

SEQ ID NO: 1279267 - RNA, 19 nt, Human
gacaaaaaaaaaaaaucaa

SEQ ID NO: 1279268 - RNA, 24 nt, Human
gagaacucucacuuuaacuaugcc

SEQ ID NO: 1279269 - RNA, 19 nt, Human
gaggaggggaggacaagga

SEQ ID NO: 1279270 - RNA, 20 nt, Human
gagguuauguuugggagugg

SEQ ID NO: 1279271 - RNA, 18 nt, Human
gcauaagaaaaaagcacc

SEQ ID NO: 1279272 - RNA, 20 nt, Human
gccagggcccgggacagcga

SEQ ID NO: 1279273 - RNA, 18 nt, Human
gcccgcgcgaggcccgcu

SEQ ID NO: 1279274 - RNA, 23 nt, Human
gccuccagccucucccucuccac

SEQ ID NO: 1279275 - RNA, 20 nt, Human
gcugccaaaagucaccccca

SEQ ID NO: 1279276 - RNA, 21 nt, Human
gcugccaaaagucacccccac

SEQ ID NO: 1279277 - RNA, 23 nt, Human
ggacaacugcaccucacacccuu

SEQ ID NO: 1279278 - RNA, 20 nt, Human
ggaggaggucggggagaggg

SEQ ID NO: 1279279 - RNA, 22 nt, Human
ggcagaaacagaaagagacaga

SEQ ID NO: 1279280 - RNA, 24 nt, Human
ggcagaccacuuauuaugaaauau

SEQ ID NO: 1279281 - RNA, 22 nt, Human
ggcuggaguugaaguccggaca

SEQ ID NO: 1279282 - RNA, 22 nt, Human
gggaacaaagaaaaagaggccg

SEQ ID NO: 1279283 - RNA, 18 nt, Human
gggagaggggcgggcgca

SEQ ID NO: 1279284 - RNA, 21 nt, Human
gggcagaaacagaaagagaca

SEQ ID NO: 1279285 - RNA, 20 nt, Human
ggggcagaaacagaaagaga

SEQ ID NO: 1279286 - RNA, 21 nt, Human
ggucggggagaggggcgggcg

SEQ ID NO: 1279287 - RNA, 24 nt, Human
uaaaaugcuccagagaaaggcuuu

SEQ ID NO: 1279288 - RNA, 19 nt, Human
uaacaauauuaccuucagg

SEQ ID NO: 1279289 - RNA, 24 nt, Human
uaagaaaaaagcaccuacccucac

SEQ ID NO: 1279290 - RNA, 22 nt, Human
uaaguacaugcuccauuaaauu

SEQ ID NO: 1279291 - RNA, 19 nt, Human
uaaucuggucucaccggaa

SEQ ID NO: 1279292 - RNA, 19 nt, Human
uacaaaaucgucuccugga

SEQ ID NO: 1279293 - RNA, 18 nt, Human
uacaaaguuaagucacag

SEQ ID NO: 1279294 - RNA, 21 nt, Human
uacagccucgucugaaauaaa

SEQ ID NO: 1279295 - RNA, 20 nt, Human
uacccucacccccgccccca

SEQ ID NO: 1279296 - RNA, 22 nt, Human
uacuuguccauauccccuuuac

SEQ ID NO: 1279297 - RNA, 23 nt, Human
uacuuguccauauccccuuuaca

SEQ ID NO: 1279298 - RNA, 23 nt, Human
uagaacgauucuccaguuguaca

SEQ ID NO: 1279299 - RNA, 22 nt, Human
uagaagggaaaccaaauggaag

SEQ ID NO: 1279300 - RNA, 20 nt, Human
ucacuuguuuguaaguuuaa

SEQ ID NO: 1279301 - RNA, 21 nt, Human
ucaggcagcguuacccgugga

SEQ ID NO: 1279302 - RNA, 19 nt, Human
ucauauucgagcaaaacua

SEQ ID NO: 1279303 - RNA, 18 nt, Human
uccagccucucccucucc

SEQ ID NO: 1279304 - RNA, 19 nt, Human
uccccuuuacaaaguuaag

SEQ ID NO: 1279305 - RNA, 22 nt, Human
uccggacagacagggcccaaga

SEQ ID NO: 1279306 - RNA, 22 nt, Human
ucucgggcugccaaaagucacc

SEQ ID NO: 1279307 - RNA, 24 nt, Human
ucucgggcugccaaaagucacccc

SEQ ID NO: 1279308 - RNA, 24 nt, Human
ucuuuuuuauauugauaaaucaga

SEQ ID NO: 1279309 - RNA, 19 nt, Human
ugaacugccagcaaaugca

SEQ ID NO: 1279310 - RNA, 23 nt, Human
ugacggccggacuaacaaaaaag

SEQ ID NO: 1279311 - RNA, 23 nt, Human
ugcaaaucuaaaaugcuccagag

SEQ ID NO: 1279312 - RNA, 21 nt, Human
ugcauaagaaaaaagcaccua

SEQ ID NO: 1279313 - RNA, 22 nt, Human
uggaggaggggaggacaaggaa

SEQ ID NO: 1279314 - RNA, 21 nt, Human
ugggaggaggucggggagagg

SEQ ID NO: 1279315 - RNA, 20 nt, Human
ugggggguggaggaggggag

SEQ ID NO: 1279316 - RNA, 21 nt, Human
uggugaaaaaacgagguagaa

SEQ ID NO: 1279317 - RNA, 20 nt, Human
uguacaagaaaaauacuaua

SEQ ID NO: 1279318 - RNA, 22 nt, Human
uguggcucugcaccuccagaag

SEQ ID NO: 1279319 - RNA, 21 nt, Human
uugugacaaaaaaaaaaaauc

SEQ ID NO: 1279320 - RNA, 24 nt, Human
uuucaacauuacaaugagcaauua

SEQ ID NO: 1279321 - RNA, 20 nt, Human
uuugcagaaucuggacgagg

SEQ ID NO: 1279322 - RNA, 21 nt, Human
uuuucaaauauuuacuggaag

SEQ ID NO: 1279323 - RNA, 24 nt, Human
aaaaaagaaaaccaaaguggucca

SEQ ID NO: 1279324 - RNA, 24 nt, Human
aaaaaguacugauuuuaaaaacua

SEQ ID NO: 1279325 - RNA, 18 nt, Human
aaacaaacaguucugaga

SEQ ID NO: 1279326 - RNA, 20 nt, Human
aaagaaaaccaaaguggucc

SEQ ID NO: 1279327 - RNA, 24 nt, Human
aacaguucugagaccauucuucca

SEQ ID NO: 1279328 - RNA, 24 nt, Human
aagaaaaccaaagugguccacaaa

SEQ ID NO: 1279329 - RNA, 22 nt, Human
acacccaguguguaagccagaa

SEQ ID NO: 1279330 - RNA, 18 nt, Human
accacguucacgcucagc

SEQ ID NO: 1279331 - RNA, 23 nt, Human
acguucacgcucagcuuucaguu

SEQ ID NO: 1279332 - RNA, 24 nt, Human
acuugaaggagcccuuucccaucu

SEQ ID NO: 1279333 - RNA, 26 nt, Human
agaaaaccaaagugguccacaaaaca

SEQ ID NO: 1279334 - RNA, 24 nt, Human
auaccagcuucaaauucaccaaca

SEQ ID NO: 1279335 - RNA, 22 nt, Human
caacaccagcagcaacaaucag

SEQ ID NO: 1279336 - RNA, 18 nt, Human
caaggagauaucaauggu

SEQ ID NO: 1279337 - RNA, 26 nt, Human
cacgcaaaaaagaaaaccaaaguggu

SEQ ID NO: 1279338 - RNA, 21 nt, Human
cagcaacaaucaggacagcac

SEQ ID NO: 1279339 - RNA, 22 nt, Human
cagcaacaaucaggacagcaca

SEQ ID NO: 1279340 - RNA, 24 nt, Human
cagcacagucagccugagaugucc

SEQ ID NO: 1279341 - RNA, 23 nt, Human
cagccuccuucucaaauuuuuca

SEQ ID NO: 1279342 - RNA, 21 nt, Human
ccaccacugauuaagaguggg

SEQ ID NO: 1279343 - RNA, 23 nt, Human
ccagaaauuggcacaaaugcuac

SEQ ID NO: 1279344 - RNA, 18 nt, Human
ccagcuucaaauucacca

SEQ ID NO: 1279345 - RNA, 23 nt, Human
cguucacgcucagcuuucaguuu

SEQ ID NO: 1279346 - RNA, 26 nt, Human
cugagaugucccuguaaucauguuuu

SEQ ID NO: 1279347 - RNA, 21 nt, Human
cuuucaguuuauccaagaccc

SEQ ID NO: 1279348 - RNA, 23 nt, Human
cuuucaguuuauccaagacccag

SEQ ID NO: 1279349 - RNA, 24 nt, Human
cuuucccauuuuggcuuuuagggg

SEQ ID NO: 1279350 - RNA, 19 nt, Human
gaagucccuguguccuggg

SEQ ID NO: 1279351 - RNA, 19 nt, Human
gagcccuuucccaucucag

SEQ ID NO: 1279352 - RNA, 23 nt, Human
gcaaaaaagaaaaccaaaguggu

SEQ ID NO: 1279353 - RNA, 21 nt, Human
gcacaaaugcuacugugucgg

SEQ ID NO: 1279354 - RNA, 24 nt, Human
ggagcccuuucccaucucagcagc

SEQ ID NO: 1279355 - RNA, 24 nt, Human
guccaguuguuuccauuaaaaagu

SEQ ID NO: 1279356 - RNA, 24 nt, Human
uaaugggucucaaaauucugugac

SEQ ID NO: 1279357 - RNA, 25 nt, Human
uaaugggucucaaaauucugugaca

SEQ ID NO: 1279358 - RNA, 23 nt, Human
uaccagcuucaaauucaccaaca

SEQ ID NO: 1279359 - RNA, 23 nt, Human
ucaguuuauccaagacccaggca

SEQ ID NO: 1279360 - RNA, 23 nt, Human
uccacaaaacauucuccuuuccu

SEQ ID NO: 1279361 - RNA, 26 nt, Human
ucccaucucagcagccuccuucucaa

SEQ ID NO: 1279362 - RNA, 22 nt, Human
ucuuuugucgaugccaccgcau

SEQ ID NO: 1279363 - RNA, 18 nt, Human
ugagaccauucuuccacc

SEQ ID NO: 1279364 - RNA, 23 nt, Human
ugcauuguuaucauuaaccaguc

SEQ ID NO: 1279365 - RNA, 24 nt, Human
ugcauuguuaucauuaaccagucu

SEQ ID NO: 1279366 - RNA, 23 nt, Human
ugccacacgcaaaaaagaaaacc

SEQ ID NO: 1279367 - RNA, 23 nt, Human
uggaauccauuuuguuaacaccg

SEQ ID NO: 1279368 - RNA, 22 nt, Human
uggcagguauuagggauaauau

SEQ ID NO: 1279369 - RNA, 22 nt, Human
ugguccacaaaacauucuccuu

SEQ ID NO: 1279370 - RNA, 24 nt, Human
uuaaauggccaauugaaacaaaca

SEQ ID NO: 1279371 - RNA, 23 nt, Human
uucaccaacaccagcagcaacaa

SEQ ID NO: 1279372 - RNA, 18 nt, Human
uuccaccacugauuaaga

SEQ ID NO: 1279373 - RNA, 23 nt, Human
uucuccuuuccuucugaagguuu

SEQ ID NO: 1279374 - RNA, 24 nt, Human
uuuaacuuuuuuaaugggucucaa

SEQ ID NO: 1279375 - RNA, 26 nt, Human
uuuacuacuaaacuuaaaagguuuuc

SEQ ID NO: 1279376 - RNA, 26 nt, Human
uuucccauuuuggcuuuuaggggaag

SEQ ID NO: 1279377 - RNA, 22 nt, Human
acacccaguguguaagccagaa

SEQ ID NO: 1279378 - RNA, 24 nt, Human
acuugaaggagcccuuucccaucu

SEQ ID NO: 1279379 - RNA, 26 nt, Human
auguuuuugaugaagucucugugucc

SEQ ID NO: 1279380 - RNA, 23 nt, Human
auuuucuuaauguaagugcugac

SEQ ID NO: 1279381 - RNA, 22 nt, Human
caacaccagcagcaacaaucag

SEQ ID NO: 1279382 - RNA, 21 nt, Human
cagcaacaaucaggacagcac

SEQ ID NO: 1279383 - RNA, 22 nt, Human
cagcaacaaucaggacagcaca

SEQ ID NO: 1279384 - RNA, 23 nt, Human
cagccuccuucucaaauuuuuca

SEQ ID NO: 1279385 - RNA, 23 nt, Human
ccagaaauuggcacaaaugcuac

SEQ ID NO: 1279386 - RNA, 18 nt, Human
ccagcuucaaauucacca

SEQ ID NO: 1279387 - RNA, 21 nt, Human
ccagcuucaaauucaccaaca

SEQ ID NO: 1279388 - RNA, 24 nt, Human
ccaguagugguggacuugcccgaa

SEQ ID NO: 1279389 - RNA, 21 nt, Human
cuuucaguuuauccaagaccc

SEQ ID NO: 1279390 - RNA, 23 nt, Human
cuuucaguuuauccaagacccag

SEQ ID NO: 1279391 - RNA, 19 nt, Human
gaagucucuguguccuggg

SEQ ID NO: 1279392 - RNA, 19 nt, Human
gagcccuuucccaucucag

SEQ ID NO: 1279393 - RNA, 23 nt, Human
ggagcccuuucccaucucagcag

SEQ ID NO: 1279394 - RNA, 20 nt, Human
guagaauccauuuuguuaac

SEQ ID NO: 1279395 - RNA, 23 nt, Human
gugauaccauguucacacucagc

SEQ ID NO: 1279396 - RNA, 23 nt, Human
uaccagcuucaaauucaccaaca

SEQ ID NO: 1279397 - RNA, 18 nt, Human
uaccauguucacacucag

SEQ ID NO: 1279398 - RNA, 23 nt, Human
ucaguuuauccaagacccaggca

SEQ ID NO: 1279399 - RNA, 26 nt, Human
ucccaucucagcagccuccuucucaa

SEQ ID NO: 1279400 - RNA, 20 nt, Human
ucuuuugucgaugccaccgc

SEQ ID NO: 1279401 - RNA, 21 nt, Human
ugcccgaaucuauguguccaa

SEQ ID NO: 1279402 - RNA, 22 nt, Human
uggcagguauuagggauaauau

SEQ ID NO: 1279403 - RNA, 23 nt, Human
uguucacacucagcuuucaguuu

SEQ ID NO: 1279404 - RNA, 23 nt, Human
uucaccaacaccagcagcaacaa

SEQ ID NO: 1279405 - RNA, 22 nt, Human
uucccauuuuggcuuuuggggg

SEQ ID NO: 1279406 - RNA, 21 nt, Human
uugaugaagucucuguguccu

SEQ ID NO: 1279407 - RNA, 23 nt, Human
uuucccauuuuggcuuuuggggg

SEQ ID NO: 1279408 - RNA, 26 nt, Human
aaaagacauuuauacaguaaaaaaaa

SEQ ID NO: 1279409 - RNA, 21 nt, Human
aaacaugaaaaagauacuugg

SEQ ID NO: 1279410 - RNA, 24 nt, Human
aacaugaaaaagauacuuggauga

SEQ ID NO: 1279411 - RNA, 26 nt, Human
aacaugaaaaagauacuuggaugaaa

SEQ ID NO: 1279412 - RNA, 20 nt, Human
aagcccgacccgccccguuc

SEQ ID NO: 1279413 - RNA, 20 nt, Human
acccgccccguucccucccg

SEQ ID NO: 1279414 - RNA, 23 nt, Human
acccgccccguucccucccggua

SEQ ID NO: 1279415 - RNA, 27 nt, Human
caaaagacauuuauacaguaaaaaaaa

SEQ ID NO: 1279416 - RNA, 21 nt, Human
cagcugaccucgaagcccgac

SEQ ID NO: 1279417 - RNA, 18 nt, Human
ccgacccgccccguuccc

SEQ ID NO: 1279418 - RNA, 25 nt, Human
cgccccguucccucccgguaccgcg

SEQ ID NO: 1279419 - RNA, 19 nt, Human
cucgaagcccgacccgccc

SEQ ID NO: 1279420 - RNA, 18 nt, Human
gacccgccccguucccuc

SEQ ID NO: 1279421 - RNA, 24 nt, Human
gggaagccaaaggcuucccugcgg

SEQ ID NO: 1279422 - RNA, 22 nt, Human
ucauauguuuguccaaaacccu

SEQ ID NO: 1279423 - RNA, 21 nt, Human
ucuuuuguucucuuguuuuua

SEQ ID NO: 1279424 - RNA, 23 nt, Human
ucuuuuguucucuuguuuuuaac

SEQ ID NO: 1279425 - RNA, 18 nt, Human
ugaaugacaaaaaaaugg

SEQ ID NO: 1279426 - RNA, 19 nt, Human
ugaaugacaaaaaaauggc

SEQ ID NO: 1279427 - RNA, 20 nt, Human
ugaaugacaaaaaaauggcu

SEQ ID NO: 1279428 - RNA, 24 nt, Human
uugacaaaaguaauaggcauuuuu

SEQ ID NO: 1279429 - RNA, 21 nt, Human
uuuucuuuuguucucuuguuu

SEQ ID NO: 1279430 - RNA, 18 nt, Human
aggaaaaccaaccccagg

SEQ ID NO: 1279431 - RNA, 19 nt, Human
aggagcguggauguucacu

SEQ ID NO: 1279432 - RNA, 23 nt, Human
cacacugcaagcccucggcagcc

SEQ ID NO: 1279433 - RNA, 23 nt, Human
cacugccuuccuucaaccacucc

SEQ ID NO: 1279434 - RNA, 20 nt, Human
cagcacagcuacagagguuc

SEQ ID NO: 1279435 - RNA, 19 nt, Human
ccacacugcaagcccucgg

SEQ ID NO: 1279436 - RNA, 27 nt, Human
ccccagugagcagcacagcuacagagg

SEQ ID NO: 1279437 - RNA, 21 nt, Human
ccccauauacccaaaauauua

SEQ ID NO: 1279438 - RNA, 20 nt, Human
ccgccgccggcugcaggcgg

SEQ ID NO: 1279439 - RNA, 18 nt, Human
cgcauauaaaaaugacgc

SEQ ID NO: 1279440 - RNA, 18 nt, Human
cguuccgccgccggcugc

SEQ ID NO: 1279441 - RNA, 25 nt, Human
cuccaggcaggugcguccaccuuuc

SEQ ID NO: 1279442 - RNA, 20 nt, Human
cuggucuggccuggccacac

SEQ ID NO: 1279443 - RNA, 22 nt, Human
gccacacugcaagcccucggca

SEQ ID NO: 1279444 - RNA, 20 nt, Human
gcguccaccuuuccuccuca

SEQ ID NO: 1279445 - RNA, 21 nt, Human
ggccuggccacacugcaagcc

SEQ ID NO: 1279446 - RNA, 19 nt, Human
ggcugccccagugagcagc

SEQ ID NO: 1279447 - RNA, 18 nt, Human
uccgcauauaaaaaugac

SEQ ID NO: 1279448 - RNA, 22 nt, Human
ugccccagugagcagcacagcu

SEQ ID NO: 1279449 - RNA, 24 nt, Human
ugucucagccgccugcccucguuc

SEQ ID NO: 1279450 - RNA, 20 nt, Human
aaagucacaaauacuauucu

SEQ ID NO: 1279451 - RNA, 18 nt, Human
aaagugucccguccacca

SEQ ID NO: 1279452 - RNA, 23 nt, Human
aaugaggaagguuauaaaaggaa

SEQ ID NO: 1279453 - RNA, 22 nt, Human
agaaaaagaggaacgcaacgaa

SEQ ID NO: 1279454 - RNA, 23 nt, Human
agaaaaagaggaacgcaacgaag

SEQ ID NO: 1279455 - RNA, 21 nt, Human
agaggacagguuugggggaac

SEQ ID NO: 1279456 - RNA, 22 nt, Human
agaggagguggccugggaaccc

SEQ ID NO: 1279457 - RNA, 24 nt, Human
agagggaagguggggaagaagagc

SEQ ID NO: 1279458 - RNA, 19 nt, Human
agcauaagagcccugaaag

SEQ ID NO: 1279459 - RNA, 25 nt, Human
agccucgcccuccaccacgguucua

SEQ ID NO: 1279460 - RNA, 20 nt, Human
aggaaaggcugaagaggagu

SEQ ID NO: 1279461 - RNA, 21 nt, Human
aggaaauguuuggggagaaug

SEQ ID NO: 1279462 - RNA, 22 nt, Human
agggaagguggggaagaagagc

SEQ ID NO: 1279463 - RNA, 19 nt, Human
aguuccucccagccagccc

SEQ ID NO: 1279464 - RNA, 22 nt, Human
auguuggagcuguggaccggcc

SEQ ID NO: 1279465 - RNA, 21 nt, Human
caagagaaccgcuuguaggcg

SEQ ID NO: 1279466 - RNA, 22 nt, Human
caccgccccucccaccugccag

SEQ ID NO: 1279467 - RNA, 21 nt, Human
cagaaaaagaggaacgcaacg

SEQ ID NO: 1279468 - RNA, 20 nt, Human
cagauggccugcagcgcacc

SEQ ID NO: 1279469 - RNA, 24 nt, Human
cagcagccucagggaaguagggug

SEQ ID NO: 1279470 - RNA, 20 nt, Human
cagcccccacacccacucua

SEQ ID NO: 1279471 - RNA, 21 nt, Human
cagccggauuccccgccuucc

SEQ ID NO: 1279472 - RNA, 20 nt, Human
cagcgcaccgcccggccccc

SEQ ID NO: 1279473 - RNA, 20 nt, Human
cagggcgccggcagauggcc

SEQ ID NO: 1279474 - RNA, 19 nt, Human
cagggcucauccgccccuc

SEQ ID NO: 1279475 - RNA, 21 nt, Human
cauaagcaacuacacagccag

SEQ ID NO: 1279476 - RNA, 18 nt, Human
cauccgccccuccaaguc

SEQ ID NO: 1279477 - RNA, 18 nt, Human
ccaccgccccucccaccu

SEQ ID NO: 1279478 - RNA, 22 nt, Human
ccaccgccccucccaccugguc

SEQ ID NO: 1279479 - RNA, 19 nt, Human
ccagaaaaagaggaacgca

SEQ ID NO: 1279480 - RNA, 21 nt, Human
cccaaggcguugaaagagacc

SEQ ID NO: 1279481 - RNA, 18 nt, Human
ccccagaauuucuugggg

SEQ ID NO: 1279482 - RNA, 22 nt, Human
cccccgcgcuggccacguccgc

SEQ ID NO: 1279483 - RNA, 19 nt, Human
ccccgcgcuggccacgucc

SEQ ID NO: 1279484 - RNA, 23 nt, Human
ccccuccauuccgagcuugaaga

SEQ ID NO: 1279485 - RNA, 25 nt, Human
ccgccccucccaccugccagccccc

SEQ ID NO: 1279486 - RNA, 22 nt, Human
ccgccuccuaccccuaaaaauc

SEQ ID NO: 1279487 - RNA, 21 nt, Human
ccucacagccccacggucucc

SEQ ID NO: 1279488 - RNA, 21 nt, Human
ccuccuuauuccuuuccuuuc

SEQ ID NO: 1279489 - RNA, 20 nt, Human
ccugcagcgcaccgcccggc

SEQ ID NO: 1279490 - RNA, 22 nt, Human
ccugccagcccccacacccacu

SEQ ID NO: 1279491 - RNA, 24 nt, Human
ccuugaaaaaaaaaaaaccuuccu

SEQ ID NO: 1279492 - RNA, 21 nt, Human
cgagaggggcuguggggagag

SEQ ID NO: 1279493 - RNA, 18 nt, Human
cgcugcgggcugggccgg

SEQ ID NO: 1279494 - RNA, 20 nt, Human
cggcagauggccugcagcgc

SEQ ID NO: 1279495 - RNA, 22 nt, Human
cggcagauggccugcagcgcac

SEQ ID NO: 1279496 - RNA, 26 nt, Human
cggugcaaaacugagugggaaagaga

SEQ ID NO: 1279497 - RNA, 22 nt, Human
cgguggcccagccucgcccucc

SEQ ID NO: 1279498 - RNA, 25 nt, Human
cgugaaaccuaauaguaaacaacaa

SEQ ID NO: 1279499 - RNA, 18 nt, Human
cucccagccagcccucug

SEQ ID NO: 1279500 - RNA, 19 nt, Human
cucccccgccuccuacccc

SEQ ID NO: 1279501 - RNA, 24 nt, Human
cuccuggaagaagggaaguuucuu

SEQ ID NO: 1279502 - RNA, 19 nt, Human
cucgguggaacggccccca

SEQ ID NO: 1279503 - RNA, 21 nt, Human
cucugcgcucuucccccucca

SEQ ID NO: 1279504 - RNA, 18 nt, Human
cucuuuuaaaacaacagc

SEQ ID NO: 1279505 - RNA, 22 nt, Human
cuuucuagcauaagagcccuga

SEQ ID NO: 1279506 - RNA, 19 nt, Human
cuuuuccggcgagcucuga

SEQ ID NO: 1279507 - RNA, 22 nt, Human
gaggaaaggcugaagaggagug

SEQ ID NO: 1279508 - RNA, 21 nt, Human
gccagcccccacacccacucu

SEQ ID NO: 1279509 - RNA, 21 nt, Human
gccaugaacaguucagggccu

SEQ ID NO: 1279510 - RNA, 28 nt, Human
gcccagccucagaacagaggggaacgcc

SEQ ID NO: 1279511 - RNA, 21 nt, Human
gccccucccaccugccagccc

SEQ ID NO: 1279512 - RNA, 24 nt, Human
gccccucccaccugccagccccca

SEQ ID NO: 1279513 - RNA, 23 nt, Human
ggaagaagggaaguuucuuuucu

SEQ ID NO: 1279514 - RNA, 19 nt, Human
ggaaggacuugaagguucu

SEQ ID NO: 1279515 - RNA, 19 nt, Human
ggacagguuugggggaacu

SEQ ID NO: 1279516 - RNA, 19 nt, Human
ggacuugaagguucucaua

SEQ ID NO: 1279517 - RNA, 21 nt, Human
ggagcuguggaccggcccugu

SEQ ID NO: 1279518 - RNA, 22 nt, Human
ggcugaagaggaguggaaaccc

SEQ ID NO: 1279519 - RNA, 20 nt, Human
ggcugggccggcguacuugc

SEQ ID NO: 1279520 - RNA, 24 nt, Human
ggcugggcgcgcugcgggcugggc

SEQ ID NO: 1279521 - RNA, 24 nt, Human
gggcgcggugucagccggauuccc

SEQ ID NO: 1279522 - RNA, 18 nt, Human
ggguuucgaagacccucc

SEQ ID NO: 1279523 - RNA, 21 nt, Human
gguggccugggaacccggggc

SEQ ID NO: 1279524 - RNA, 18 nt, Human
gucuccuucacgcccacc

SEQ ID NO: 1279525 - RNA, 25 nt, Human
uacacagccaguuggaaaggggagg

SEQ ID NO: 1279526 - RNA, 18 nt, Human
uacagcauugcuuauaau

SEQ ID NO: 1279527 - RNA, 21 nt, Human
uaguaaacaacaauuuaacga

SEQ ID NO: 1279528 - RNA, 25 nt, Human
uauuccuuuccuuucuagcauaaga

SEQ ID NO: 1279529 - RNA, 19 nt, Human
ucccagccagcccucugcg

SEQ ID NO: 1279530 - RNA, 21 nt, Human
ucccccgccuccuaccccuaa

SEQ ID NO: 1279531 - RNA, 23 nt, Human
ucccccgccuccuaccccuaaaa

SEQ ID NO: 1279532 - RNA, 26 nt, Human
ucccccgccuccuaccccuaaaaauc

SEQ ID NO: 1279533 - RNA, 25 nt, Human
uccccuccagaaaaagaggaacgca

SEQ ID NO: 1279534 - RNA, 18 nt, Human
ucccggagggcucccggu

SEQ ID NO: 1279535 - RNA, 21 nt, Human
uccuggacaagcucucgauuu

SEQ ID NO: 1279536 - RNA, 19 nt, Human
ucucccccgccuccuaccc

SEQ ID NO: 1279537 - RNA, 23 nt, Human
ucucucucuucuaacauuccccu

SEQ ID NO: 1279538 - RNA, 20 nt, Human
ucugcgcucuucccccucca

SEQ ID NO: 1279539 - RNA, 20 nt, Human
ucuucuaacauuccccucca

SEQ ID NO: 1279540 - RNA, 20 nt, Human
ucuugcccucgucuccuuca

SEQ ID NO: 1279541 - RNA, 21 nt, Human
ugaaauguaccuuccuugaaa

SEQ ID NO: 1279542 - RNA, 20 nt, Human
ugaagagccgguggcccagc

SEQ ID NO: 1279543 - RNA, 21 nt, Human
ugaagaggaguggaaacccca

SEQ ID NO: 1279544 - RNA, 18 nt, Human
uggaaaccccaaacccac

SEQ ID NO: 1279545 - RNA, 23 nt, Human
uggaucaaagucacaaauacuau

SEQ ID NO: 1279546 - RNA, 19 nt, Human
ugggaaagagaaaggggcg

SEQ ID NO: 1279547 - RNA, 28 nt, Human
ugggaaagagaaaggggcggagagcgac

SEQ ID NO: 1279548 - RNA, 23 nt, Human
uggggagaggguuucgaagaccc

SEQ ID NO: 1279549 - RNA, 22 nt, Human
uuccuuucuagcauaagagccc

SEQ ID NO: 1279550 - RNA, 21 nt, Human
uugaaagagaccagcuccagu

SEQ ID NO: 1279551 - RNA, 21 nt, Human
uuugggggaacuucgguacgu

SEQ ID NO: 1279552 - RNA, 20 nt, Human
uuuguccaccgccccuccca

SEQ ID NO: 1279553 - RNA, 18 nt, Human
gacaguucuuucuuuuuc

SEQ ID NO: 1279554 - RNA, 21 nt, Human
ucuuucuuuuucucucuagcu

SEQ ID NO: 1279555 - RNA, 25 nt, Human
aaacaaaaagucagaacaaaccagc

SEQ ID NO: 1279556 - RNA, 27 nt, Human
aaaccagcaccaagcaaacacaaagaa

SEQ ID NO: 1279557 - RNA, 20 nt, Human
aaagaaacaaaaagucagaa

SEQ ID NO: 1279558 - RNA, 23 nt, Human
aacaaaccagcccugcacagaug

SEQ ID NO: 1279559 - RNA, 21 nt, Human
aacaaauaaaccagcaccaag

SEQ ID NO: 1279560 - RNA, 24 nt, Human
aacacaaagaaacaaaaagucaga

SEQ ID NO: 1279561 - RNA, 21 nt, Human
aaccagcaccaagcaaacaca

SEQ ID NO: 1279562 - RNA, 19 nt, Human
aagcaaacacaaagaaaca

SEQ ID NO: 1279563 - RNA, 18 nt, Human
acaaaccagcccugcaca

SEQ ID NO: 1279564 - RNA, 21 nt, Human
acaaaccagcccugcacagau

SEQ ID NO: 1279565 - RNA, 23 nt, Human
acaaagaaacaaaaagucagaac

SEQ ID NO: 1279566 - RNA, 23 nt, Human
acaacaaauaaaccagcaccaag

SEQ ID NO: 1279567 - RNA, 19 nt, Human
acugccaagggacagcugg

SEQ ID NO: 1279568 - RNA, 21 nt, Human
agaaaacaacaaauaaaccag

SEQ ID NO: 1279569 - RNA, 24 nt, Human
agaaaucgcugcaaaaccccagcc

SEQ ID NO: 1279570 - RNA, 18 nt, Human
agaaggagagaggagagg

SEQ ID NO: 1279571 - RNA, 19 nt, Human
agagggaggggaccagcgc

SEQ ID NO: 1279572 - RNA, 22 nt, Human
agcaaacacaaagaaacaaaaa

SEQ ID NO: 1279573 - RNA, 22 nt, Human
agcgaacaaaggccaagaauca

SEQ ID NO: 1279574 - RNA, 24 nt, Human
agugaaaaaaccgcgucgccugga

SEQ ID NO: 1279575 - RNA, 21 nt, Human
cacaaagaaacaaaaagucag

SEQ ID NO: 1279576 - RNA, 26 nt, Human
cagaacaaaccagcccugcacagaug

SEQ ID NO: 1279577 - RNA, 23 nt, Human
cagagccugaagacagagggagg

SEQ ID NO: 1279578 - RNA, 27 nt, Human
ccagcaccaagcaaacacaaagaaaca

SEQ ID NO: 1279579 - RNA, 21 nt, Human
cccagaaaacaacaaauaaac

SEQ ID NO: 1279580 - RNA, 22 nt, Human
ccccgagccgagagacggaaac

SEQ ID NO: 1279581 - RNA, 24 nt, Human
ccccuuuuucuguuaugaagggga

SEQ ID NO: 1279582 - RNA, 20 nt, Human
cccggacggguuuacgacca

SEQ ID NO: 1279583 - RNA, 21 nt, Human
cccggacggguuuacgaccac

SEQ ID NO: 1279584 - RNA, 18 nt, Human
ccgcgcccgcccgccgcc

SEQ ID NO: 1279585 - RNA, 22 nt, Human
ccgcgcccgcccgccgcccgcc

SEQ ID NO: 1279586 - RNA, 20 nt, Human
ccgugcugcucuuaguauca

SEQ ID NO: 1279587 - RNA, 25 nt, Human
ccugcacagauguaacggcccagga

SEQ ID NO: 1279588 - RNA, 27 nt, Human
cgagcaguccuccuggcuagacucucu

SEQ ID NO: 1279589 - RNA, 22 nt, Human
cgagccgagagacggaaaccag

SEQ ID NO: 1279590 - RNA, 22 nt, Human
cgccaucucguggcggcugcgc

SEQ ID NO: 1279591 - RNA, 18 nt, Human
cggcccaggagauggcga

SEQ ID NO: 1279592 - RNA, 19 nt, Human
cugccaagggacagcuggc

SEQ ID NO: 1279593 - RNA, 22 nt, Human
cuuuaaauuaccauaccaauca

SEQ ID NO: 1279594 - RNA, 21 nt, Human
gaaaaaaccgcgucgccugga

SEQ ID NO: 1279595 - RNA, 21 nt, Human
gaaaacaacaaauaaaccagc

SEQ ID NO: 1279596 - RNA, 19 nt, Human
gagaaggagagaggagagg

SEQ ID NO: 1279597 - RNA, 20 nt, Human
gagaaggagagaggagagga

SEQ ID NO: 1279598 - RNA, 26 nt, Human
gagcaguccuccuggcuagacucucu

SEQ ID NO: 1279599 - RNA, 20 nt, Human
gccccgagccgagagacgga

SEQ ID NO: 1279600 - RNA, 18 nt, Human
gcccgcccgccgcccgcc

SEQ ID NO: 1279601 - RNA, 23 nt, Human
gccuagcgaaugcgcguugcuuu

SEQ ID NO: 1279602 - RNA, 24 nt, Human
gccugaagacagagggaggggacc

SEQ ID NO: 1279603 - RNA, 21 nt, Human
ggagagaggagaggaugugcc

SEQ ID NO: 1279604 - RNA, 18 nt, Human
ggcucagaaaucaaaccc

SEQ ID NO: 1279605 - RNA, 23 nt, Human
gggcagagccugaagacagaggg

SEQ ID NO: 1279606 - RNA, 24 nt, Human
gggcuccagcacaggugcgaguuc

SEQ ID NO: 1279607 - RNA, 21 nt, Human
gugcgaguuccugggcagagc

SEQ ID NO: 1279608 - RNA, 22 nt, Human
uaaaccagcaccaagcaaacac

SEQ ID NO: 1279609 - RNA, 22 nt, Human
uagcaacuugagagacuuuggu

SEQ ID NO: 1279610 - RNA, 20 nt, Human
ucagaaaucaaacccgcgcc

SEQ ID NO: 1279611 - RNA, 21 nt, Human
ucagaacaaaccagcccugca

SEQ ID NO: 1279612 - RNA, 21 nt, Human
ucagaagcgaacaaaggccaa

SEQ ID NO: 1279613 - RNA, 19 nt, Human
uccagccccgagccgagag

SEQ ID NO: 1279614 - RNA, 27 nt, Human
ucccccagaaaacaacagcggcucucc

SEQ ID NO: 1279615 - RNA, 18 nt, Human
ucccggcuccccggcggc

SEQ ID NO: 1279616 - RNA, 20 nt, Human
ugaaggggagcgggacaagu

SEQ ID NO: 1279617 - RNA, 18 nt, Human
ugauauggcuuuuucccc

SEQ ID NO: 1279618 - RNA, 20 nt, Human
ugccaagggacagcuggccg

SEQ ID NO: 1279619 - RNA, 19 nt, Human
ugccaagggacagcuggcu

SEQ ID NO: 1279620 - RNA, 21 nt, Human
ugccaagggacagcuggcucc

SEQ ID NO: 1279621 - RNA, 23 nt, Human
uggcuagacucucucuagcaacu

SEQ ID NO: 1279622 - RNA, 20 nt, Human
ugggagggaggaacagggcu

SEQ ID NO: 1279623 - RNA, 24 nt, Human
aaacugcuauaaaaccgcaggucu

SEQ ID NO: 1279624 - RNA, 26 nt, Human
caccacaaccccgucugcucaggcac

SEQ ID NO: 1279625 - RNA, 26 nt, Human
ccccgucugcucaggcacaagcugaa

SEQ ID NO: 1279626 - RNA, 18 nt, Human
aaaaaaacgcacaaacag

SEQ ID NO: 1279627 - RNA, 23 nt, Human
aaaaaaacgcacaaacaggcacu

SEQ ID NO: 1279628 - RNA, 18 nt, Human
aaaaaacgcacaaacagg

SEQ ID NO: 1279629 - RNA, 23 nt, Human
aaagaaaaaaacgcacaaacagg

SEQ ID NO: 1279630 - RNA, 18 nt, Human
agcaaagcccagaaugua

SEQ ID NO: 1279631 - RNA, 19 nt, Human
cacaaacaggcacuagaua

SEQ ID NO: 1279632 - RNA, 24 nt, Human
cagcggaagaaagaaaaaaacgca

SEQ ID NO: 1279633 - RNA, 25 nt, Human
gaaaauggggaagcagcggaagaaa

SEQ ID NO: 1279634 - RNA, 23 nt, Human
ggaagaaagaaaaaaacgcacaa

SEQ ID NO: 1279635 - RNA, 19 nt, Human
gggaagcagcggaagaaag

SEQ ID NO: 1279636 - RNA, 18 nt, Human
uacagcaaagcccagaau

SEQ ID NO: 1279637 - RNA, 21 nt, Human
ucacaagcuguguuuccgcug

SEQ ID NO: 1279638 - RNA, 22 nt, Human
aaaaagacaaaaagaauaagcg

SEQ ID NO: 1279639 - RNA, 20 nt, Human
aaagaugucauucuuaaguc

SEQ ID NO: 1279640 - RNA, 18 nt, Human
aaagcagauaggugaccu

SEQ ID NO: 1279641 - RNA, 21 nt, Human
aacccugguagugcaguaacc

SEQ ID NO: 1279642 - RNA, 21 nt, Human
aagaaagaaaaaaauauaaaa

SEQ ID NO: 1279643 - RNA, 19 nt, Human
aagaugucauucuuaaguc

SEQ ID NO: 1279644 - RNA, 22 nt, Human
aagcagauaggugaccuuugau

SEQ ID NO: 1279645 - RNA, 21 nt, Human
aaguauucaaugauuuaguug

SEQ ID NO: 1279646 - RNA, 25 nt, Human
aauaagcggugaaaaauccuaggga

SEQ ID NO: 1279647 - RNA, 20 nt, Human
agaaaaaaaauucggauaau

SEQ ID NO: 1279648 - RNA, 23 nt, Human
agggauuacugugaccuagacaa

SEQ ID NO: 1279649 - RNA, 23 nt, Human
auaauauaauaauuaucuaaagc

SEQ ID NO: 1279650 - RNA, 21 nt, Human
caaaaaauacguaguaagaau

SEQ ID NO: 1279651 - RNA, 19 nt, Human
cacugcauuucccuucucu

SEQ ID NO: 1279652 - RNA, 27 nt, Human
cagcucccuggaaaauaaaccaguaac

SEQ ID NO: 1279653 - RNA, 20 nt, Human
ccacggagaagggcgcgcgc

SEQ ID NO: 1279654 - RNA, 24 nt, Human
cccacgcgcgagggaaggagcgcg

SEQ ID NO: 1279655 - RNA, 21 nt, Human
ccgccgccucccggagggccc

SEQ ID NO: 1279656 - RNA, 19 nt, Human
cgcgcacgcgcucucaccg

SEQ ID NO: 1279657 - RNA, 18 nt, Human
cuagggauuacugugacc

SEQ ID NO: 1279658 - RNA, 19 nt, Human
cuccaagacagaguuuggu

SEQ ID NO: 1279659 - RNA, 25 nt, Human
cucuaacuucucucuucacaccaau

SEQ ID NO: 1279660 - RNA, 22 nt, Human
gaauaagcggugaaaaauccua

SEQ ID NO: 1279661 - RNA, 19 nt, Human
gagccgagaggagcggccu

SEQ ID NO: 1279662 - RNA, 24 nt, Human
gaggcuccaagacagaguuugguu

SEQ ID NO: 1279663 - RNA, 19 nt, Human
gagggaaggagcgcggagc

SEQ ID NO: 1279664 - RNA, 21 nt, Human
gagugagcuaaaaggaggcuc

SEQ ID NO: 1279665 - RNA, 20 nt, Human
gcgagggaaggagcgcggag

SEQ ID NO: 1279666 - RNA, 21 nt, Human
uaaaaaggucaauuaagcuag

SEQ ID NO: 1279667 - RNA, 20 nt, Human
uaauucacugcauuucccuu

SEQ ID NO: 1279668 - RNA, 20 nt, Human
uagaaaacaugcagcaacag

SEQ ID NO: 1279669 - RNA, 21 nt, Human
uagcagagacuaucaguggcu

SEQ ID NO: 1279670 - RNA, 25 nt, Human
ucccuggaaaauaaaccaguaaccc

SEQ ID NO: 1279671 - RNA, 26 nt, Human
ucuaaagcaaauaucaucauuggcuc

SEQ ID NO: 1279672 - RNA, 24 nt, Human
ucugcugagugucgggaguuggug

SEQ ID NO: 1279673 - RNA, 20 nt, Human
ugagcuaaaaggaggcucca

SEQ ID NO: 1279674 - RNA, 23 nt, Human
ugcgcccgccccucuccccgcgg

SEQ ID NO: 1279675 - RNA, 22 nt, Human
uguggagugagcuaaaaggagg

SEQ ID NO: 1279676 - RNA, 21 nt, Human
uuaaaaagacaaaaagaauaa

SEQ ID NO: 1279677 - RNA, 18 nt, Human
uugguucccaacaguguc

SEQ ID NO: 1279678 - RNA, 23 nt, Human
uuguggagugagcuaaaaggagg

SEQ ID NO: 1279679 - RNA, 28 nt, Human
aaaaaaaguaaaaaaugagcaugaagaa

SEQ ID NO: 1279680 - RNA, 22 nt, Human
aaaauauucccauccuuaccug

SEQ ID NO: 1279681 - RNA, 24 nt, Human
aaaaugccauuuauaacacuaaaa

SEQ ID NO: 1279682 - RNA, 23 nt, Human
aaagcuaaacagacauuuccaau

SEQ ID NO: 1279683 - RNA, 23 nt, Human
aaaggguugcugaaugcuucccc

SEQ ID NO: 1279684 - RNA, 23 nt, Human
aaaugugcugaagaaccuagagc

SEQ ID NO: 1279685 - RNA, 23 nt, Human
aacacagaaagcacaccuuuacg

SEQ ID NO: 1279686 - RNA, 20 nt, Human
aagaugaagauauaacuaaa

SEQ ID NO: 1279687 - RNA, 24 nt, Human
aagcaauuugaguuuguuuuaugg

SEQ ID NO: 1279688 - RNA, 23 nt, Human
aagcauugaaagaaauuuaacau

SEQ ID NO: 1279689 - RNA, 25 nt, Human
aaguaaaaaaugagcaugaagaaga

SEQ ID NO: 1279690 - RNA, 18 nt, Human
aauaugcaacaugcccuc

SEQ ID NO: 1279691 - RNA, 21 nt, Human
aaucucagugccagccccucc

SEQ ID NO: 1279692 - RNA, 23 nt, Human
aaugugaugagaaaaguaccuuu

SEQ ID NO: 1279693 - RNA, 21 nt, Human
acaaagauacaucauuccaaa

SEQ ID NO: 1279694 - RNA, 22 nt, Human
agcauugaaagaaauuuaacau

SEQ ID NO: 1279695 - RNA, 18 nt, Human
agccccuccuccccccag

SEQ ID NO: 1279696 - RNA, 18 nt, Human
caaaaucagcaacugcug

SEQ ID NO: 1279697 - RNA, 25 nt, Human
caaagugcuuuaaaacuucaucuga

SEQ ID NO: 1279698 - RNA, 20 nt, Human
caagaccauacuucagaucu

SEQ ID NO: 1279699 - RNA, 21 nt, Human
caaucuugaaaaaaaaaucuc

SEQ ID NO: 1279700 - RNA, 19 nt, Human
caccgcaauacaauucaac

SEQ ID NO: 1279701 - RNA, 23 nt, Human
cacuaaaaugacuaguaagucag

SEQ ID NO: 1279702 - RNA, 20 nt, Human
cagacuuaaugugcucuguc

SEQ ID NO: 1279703 - RNA, 24 nt, Human
cagccugcaguuucuugcacuaga

SEQ ID NO: 1279704 - RNA, 22 nt, Human
caguacaauacauucacuauac

SEQ ID NO: 1279705 - RNA, 21 nt, Human
cccacagguuugguagggcag

SEQ ID NO: 1279706 - RNA, 23 nt, Human
ccuucaguucuaaaacaaaccuc

SEQ ID NO: 1279707 - RNA, 20 nt, Human
cuacaucgagagccccccug

SEQ ID NO: 1279708 - RNA, 22 nt, Human
cuuggcacaguuaugaccagca

SEQ ID NO: 1279709 - RNA, 20 nt, Human
cuuuaaaacuucaucugaag

SEQ ID NO: 1279710 - RNA, 18 nt, Human
gaaaaacuuaaggaaugg

SEQ ID NO: 1279711 - RNA, 18 nt, Human
gaacauaugugaguugau

SEQ ID NO: 1279712 - RNA, 18 nt, Human
gcacugaaguauuucaaa

SEQ ID NO: 1279713 - RNA, 19 nt, Human
gcaguuuauuuuaaaugug

SEQ ID NO: 1279714 - RNA, 19 nt, Human
gccagccccuccucccccc

SEQ ID NO: 1279715 - RNA, 21 nt, Human
ggaccaagaccauacuucaga

SEQ ID NO: 1279716 - RNA, 23 nt, Human
ggagaaaagaacacucaaggcau

SEQ ID NO: 1279717 - RNA, 20 nt, Human
gggagaaaagaacacucaag

SEQ ID NO: 1279718 - RNA, 19 nt, Human
uaaaacacagaaagcacac

SEQ ID NO: 1279719 - RNA, 23 nt, Human
uaaaaugacuaguaagucagaug

SEQ ID NO: 1279720 - RNA, 23 nt, Human
uaaagcuaaacagacauuuccaa

SEQ ID NO: 1279721 - RNA, 22 nt, Human
uaacaaaauauucccauccuua

SEQ ID NO: 1279722 - RNA, 22 nt, Human
uaaccaguuugauaaugaaggu

SEQ ID NO: 1279723 - RNA, 18 nt, Human
uaacuaaacuucacacac

SEQ ID NO: 1279724 - RNA, 22 nt, Human
uacacaguauaacaaaauauuc

SEQ ID NO: 1279725 - RNA, 20 nt, Human
uagaacuuaugaauauagag

SEQ ID NO: 1279726 - RNA, 20 nt, Human
uagagguuuacucaucuaac

SEQ ID NO: 1279727 - RNA, 20 nt, Human
uauaacacuaaaaugacuag

SEQ ID NO: 1279728 - RNA, 22 nt, Human
uauagagguuuacucaucuaac

SEQ ID NO: 1279729 - RNA, 22 nt, Human
uaucaaaguaaugaaaaugggu

SEQ ID NO: 1279730 - RNA, 19 nt, Human
uaugcaccaacuaguugcg

SEQ ID NO: 1279731 - RNA, 18 nt, Human
uauucaggaccaagacca

SEQ ID NO: 1279732 - RNA, 18 nt, Human
ucaaaaucagcaacugcu

SEQ ID NO: 1279733 - RNA, 19 nt, Human
ucaaaaucagcaacugcug

SEQ ID NO: 1279734 - RNA, 18 nt, Human
ucaauguguguuaaauga

SEQ ID NO: 1279735 - RNA, 23 nt, Human
ucacuaaauggguaucuuggucc

SEQ ID NO: 1279736 - RNA, 18 nt, Human
ucaguucuaaaacaaacc

SEQ ID NO: 1279737 - RNA, 24 nt, Human
uccauuaccuaaagucuuucuacu

SEQ ID NO: 1279738 - RNA, 22 nt, Human
uccccugaaaaaagguggcugu

SEQ ID NO: 1279739 - RNA, 24 nt, Human
ucuaaaacaaaccucuguugcuuu

SEQ ID NO: 1279740 - RNA, 24 nt, Human
ugaagaagaggcaauaggggucuu

SEQ ID NO: 1279741 - RNA, 22 nt, Human
ugaauagacuauuuuguacaaa

SEQ ID NO: 1279742 - RNA, 25 nt, Human
ugaggaaaaacuuaaggaauggucc

SEQ ID NO: 1279743 - RNA, 23 nt, Human
ugcacugaaguauuucaaagucu

SEQ ID NO: 1279744 - RNA, 25 nt, Human
ugccagccccuccuccccccagguu

SEQ ID NO: 1279745 - RNA, 19 nt, Human
uggcacaguuaugaccagc

SEQ ID NO: 1279746 - RNA, 24 nt, Human
uuaaagcacaguuuucacagacac

SEQ ID NO: 1279747 - RNA, 21 nt, Human
uuaaaugaaugaacgaacuga

SEQ ID NO: 1279748 - RNA, 21 nt, Human
uuaacucuacaaagauacauc

SEQ ID NO: 1279749 - RNA, 19 nt, Human
uuacucaucuaacaaacag

SEQ ID NO: 1279750 - RNA, 19 nt, Human
uuauaaauacuuugaaucc

SEQ ID NO: 1279751 - RNA, 21 nt, Human
uuuaaagggcaaaaggauuug

SEQ ID NO: 1279752 - RNA, 18 nt, Human
aacuggaacugagaaccc

SEQ ID NO: 1279753 - RNA, 18 nt, Human
aagaaaacuuuuucuggc

SEQ ID NO: 1279754 - RNA, 18 nt, Human
aagaaaacuuuuucuggc

SEQ ID NO: 1279755 - RNA, 26 nt, Human
aagagaagacagcauuuggugacaaa

SEQ ID NO: 1279756 - RNA, 18 nt, Human
aagggggacuccagacag

SEQ ID NO: 1279757 - RNA, 28 nt, Human
acuuuuucuggcuuuuuuuuuuccucuu

SEQ ID NO: 1279758 - RNA, 22 nt, Human
agggggacuccagacagcgguc

SEQ ID NO: 1279759 - RNA, 19 nt, Human
augagacaacagacuugga

SEQ ID NO: 1279760 - RNA, 18 nt, Human
cacccccucuuccguccc

SEQ ID NO: 1279761 - RNA, 20 nt, Human
ccagacagcggucuugaagc

SEQ ID NO: 1279762 - RNA, 20 nt, Human
ccucuuccgucccgcaccuc

SEQ ID NO: 1279763 - RNA, 22 nt, Human
cgagccucuggccuucaccccc

SEQ ID NO: 1279764 - RNA, 22 nt, Human
cuccagaaaagaaaacuuuuuc

SEQ ID NO: 1279765 - RNA, 20 nt, Human
gagaaagagaagacagcauu

SEQ ID NO: 1279766 - RNA, 18 nt, Human
gccccgagccucuggccu

SEQ ID NO: 1279767 - RNA, 19 nt, Human
uccagacagcggucuugaa

SEQ ID NO: 1279768 - RNA, 23 nt, Human
ugagaacccagcagguacuucua

SEQ ID NO: 1279769 - RNA, 19 nt, Human
ugagacaacagacuuggaa

SEQ ID NO: 1279770 - RNA, 22 nt, Human
uuuuuuuuuuccucuuccuccc

SEQ ID NO: 1279771 - RNA, 24 nt, Human
aaaaaauaaauauugugaacaccc

SEQ ID NO: 1279772 - RNA, 20 nt, Human
aaauaaauacccccaggccc

SEQ ID NO: 1279773 - RNA, 18 nt, Human
aaauacccccaggccccc

SEQ ID NO: 1279774 - RNA, 23 nt, Human
aagcacccucaguccccugcccu

SEQ ID NO: 1279775 - RNA, 19 nt, Human
accccaggacggcaaagug

SEQ ID NO: 1279776 - RNA, 27 nt, Human
acuuccuucaaaccccuuccccagcug

SEQ ID NO: 1279777 - RNA, 22 nt, Human
agaauaaacauggacucaaaca

SEQ ID NO: 1279778 - RNA, 19 nt, Human
agaccagaugcccccaccc

SEQ ID NO: 1279779 - RNA, 22 nt, Human
agagccucccaaacucgggaau

SEQ ID NO: 1279780 - RNA, 19 nt, Human
agaugagcacccccccacc

SEQ ID NO: 1279781 - RNA, 25 nt, Human
agaugcccccaccccuccccacuuc

SEQ ID NO: 1279782 - RNA, 23 nt, Human
agcuggaccaggcggcaucugcc

SEQ ID NO: 1279783 - RNA, 18 nt, Human
agggcuagagacuauacc

SEQ ID NO: 1279784 - RNA, 24 nt, Human
auacccccaggccccccucccauu

SEQ ID NO: 1279785 - RNA, 20 nt, Human
auuuggggccccagccauuc

SEQ ID NO: 1279786 - RNA, 21 nt, Human
caaagucccuucucuacccuc

SEQ ID NO: 1279787 - RNA, 23 nt, Human
caaagucccuucucuacccucuc

SEQ ID NO: 1279788 - RNA, 23 nt, Human
caccagccccagccuuagagggc

SEQ ID NO: 1279789 - RNA, 19 nt, Human
caccccaggacggcaaagu

SEQ ID NO: 1279790 - RNA, 23 nt, Human
caccccuccccacuuccaacuuc

SEQ ID NO: 1279791 - RNA, 18 nt, Human
cagaacccaggcccauga

SEQ ID NO: 1279792 - RNA, 23 nt, Human
cagaacccaggcccaugaagucu

SEQ ID NO: 1279793 - RNA, 21 nt, Human
cagaggucacgagaugagcac

SEQ ID NO: 1279794 - RNA, 23 nt, Human
cagaugcccccaccccuccccac

SEQ ID NO: 1279795 - RNA, 22 nt, Human
caggccccccucccauuaccaa

SEQ ID NO: 1279796 - RNA, 23 nt, Human
ccaccccuccccacuuccaacuu

SEQ ID NO: 1279797 - RNA, 20 nt, Human
ccagccuuagagggcuagag

SEQ ID NO: 1279798 - RNA, 21 nt, Human
cccaccccuccccacuuccaa

SEQ ID NO: 1279799 - RNA, 22 nt, Human
cccacuuccaacuuccuucaaa

SEQ ID NO: 1279800 - RNA, 22 nt, Human
ccccaccccuccccacuuccaa

SEQ ID NO: 1279801 - RNA, 22 nt, Human
ccccaccccuccccacuuccaa

SEQ ID NO: 1279802 - RNA, 21 nt, Human
cccccaccccuccccacuucc

SEQ ID NO: 1279803 - RNA, 22 nt, Human
cccccaccccuccccacuucca

SEQ ID NO: 1279804 - RNA, 25 nt, Human
cccccccaccuuguuuuuuuuaaaa

SEQ ID NO: 1279805 - RNA, 23 nt, Human
cccccuucgacuccuccccaggc

SEQ ID NO: 1279806 - RNA, 18 nt, Human
ccccuucgacuccucccc

SEQ ID NO: 1279807 - RNA, 19 nt, Human
ccccuucgacuccucccca

SEQ ID NO: 1279808 - RNA, 24 nt, Human
ccccuucgacuccuccccaggccc

SEQ ID NO: 1279809 - RNA, 24 nt, Human
cccugcauccagcugguccauuuc

SEQ ID NO: 1279810 - RNA, 21 nt, Human
cccuucucuacccucucugca

SEQ ID NO: 1279811 - RNA, 23 nt, Human
ccugcaaagucccuucucuaccc

SEQ ID NO: 1279812 - RNA, 22 nt, Human
ccuuccccagcugcaacucuaa

SEQ ID NO: 1279813 - RNA, 27 nt, Human
cuaaauaaauacccccaggccccccuc

SEQ ID NO: 1279814 - RNA, 23 nt, Human
cucaagcacccucaguccccugc

SEQ ID NO: 1279815 - RNA, 23 nt, Human
cucacauccuacucaagcacccu

SEQ ID NO: 1279816 - RNA, 25 nt, Human
cuccccaggcccagcugagggggga

SEQ ID NO: 1279817 - RNA, 23 nt, Human
cuccuggauuuggggccccagcc

SEQ ID NO: 1279818 - RNA, 23 nt, Human
cugaaaaaacucaacagaaccca

SEQ ID NO: 1279819 - RNA, 18 nt, Human
cugagaccagaugccccc

SEQ ID NO: 1279820 - RNA, 21 nt, Human
cugagaccagaugcccccacc

SEQ ID NO: 1279821 - RNA, 22 nt, Human
cugaugcuagggcaccccuccc

SEQ ID NO: 1279822 - RNA, 20 nt, Human
cugcagcccccuucgacucc

SEQ ID NO: 1279823 - RNA, 22 nt, Human
cuguuggggcugaucaccagcc

SEQ ID NO: 1279824 - RNA, 23 nt, Human
cuuccuucaaaccccuuccccag

SEQ ID NO: 1279825 - RNA, 20 nt, Human
gaaaaaacucaacagaaccc

SEQ ID NO: 1279826 - RNA, 26 nt, Human
gaacacccacccaccucugaugaaaa

SEQ ID NO: 1279827 - RNA, 22 nt, Human
gaucaccagccccagccuuaga

SEQ ID NO: 1279828 - RNA, 19 nt, Human
gggaccgcuccgcgggcca

SEQ ID NO: 1279829 - RNA, 22 nt, Human
ggggggaggaggggaaagggcc

SEQ ID NO: 1279830 - RNA, 19 nt, Human
uaaauacccccaggccccc

SEQ ID NO: 1279831 - RNA, 20 nt, Human
uacccccaggccccccuccc

SEQ ID NO: 1279832 - RNA, 21 nt, Human
uacucggccgcgggaccgcuc

SEQ ID NO: 1279833 - RNA, 23 nt, Human
ucaacagaacccaggcccaugaa

SEQ ID NO: 1279834 - RNA, 25 nt, Human
ucaccagccccagccuuagagggcu

SEQ ID NO: 1279835 - RNA, 23 nt, Human
ucccauuaccaaaugaaaaaaua

SEQ ID NO: 1279836 - RNA, 23 nt, Human
uccccugcccugcauccagcugg

SEQ ID NO: 1279837 - RNA, 23 nt, Human
uccgguacucggccgcgggaccg

SEQ ID NO: 1279838 - RNA, 22 nt, Human
ucucacauccuacucaagcacc

SEQ ID NO: 1279839 - RNA, 24 nt, Human
ucugcagcccccuucgacuccucc

SEQ ID NO: 1279840 - RNA, 21 nt, Human
ugaaaaaacucaacagaaccc

SEQ ID NO: 1279841 - RNA, 24 nt, Human
ugaaaaaacucaacagaacccagg

SEQ ID NO: 1279842 - RNA, 22 nt, Human
ugaaacauggaguuugugaagg

SEQ ID NO: 1279843 - RNA, 23 nt, Human
ugaggggggaggaggggaaaggg

SEQ ID NO: 1279844 - RNA, 24 nt, Human
ugaugaaaaucuccuggauuuggg

SEQ ID NO: 1279845 - RNA, 20 nt, Human
ugcaaagucccuucucuacc

SEQ ID NO: 1279846 - RNA, 18 nt, Human
uggcagaggucacgagau

SEQ ID NO: 1279847 - RNA, 28 nt, Human
uggguggcagaggucacgagaugagcac

SEQ ID NO: 1279848 - RNA, 21 nt, Human
uucucuacccucucugcagcc

SEQ ID NO: 1279849 - RNA, 22 nt, Human
uugauacugaaaaaacucaaca

SEQ ID NO: 1279850 - RNA, 18 nt, Human
uugugaaggaugugggug

SEQ ID NO: 1279851 - RNA, 23 nt, Human
acagaggcccaggacccaauccg

SEQ ID NO: 1279852 - RNA, 23 nt, Human
accacaaacacccucuguccuga

SEQ ID NO: 1279853 - RNA, 22 nt, Human
accucgguucugccucuucacc

SEQ ID NO: 1279854 - RNA, 23 nt, Human
agagacacaccuucccccgcccc

SEQ ID NO: 1279855 - RNA, 20 nt, Human
agagggaagggagcacagag

SEQ ID NO: 1279856 - RNA, 19 nt, Human
aggacccaauccgcuucuc

SEQ ID NO: 1279857 - RNA, 28 nt, Human
agggaagggagcacagaguuaguggggg

SEQ ID NO: 1279858 - RNA, 26 nt, Human
caagccaagaccgacaggugugccug

SEQ ID NO: 1279859 - RNA, 18 nt, Human
caaugggcucccgaccuu

SEQ ID NO: 1279860 - RNA, 23 nt, Human
cacagcucagaguccccaagccu

SEQ ID NO: 1279861 - RNA, 22 nt, Human
cagaguccccaagccugggccc

SEQ ID NO: 1279862 - RNA, 23 nt, Human
cauuggcugggaucaaagccaaa

SEQ ID NO: 1279863 - RNA, 19 nt, Human
ccagcaguguguguucucc

SEQ ID NO: 1279864 - RNA, 23 nt, Human
ccaggagagggaagggagcacaa

SEQ ID NO: 1279865 - RNA, 18 nt, Human
cccaggagagggaaggga

SEQ ID NO: 1279866 - RNA, 23 nt, Human
cccucuguccugacaccgucacc

SEQ ID NO: 1279867 - RNA, 19 nt, Human
ccguccagguagggguggg

SEQ ID NO: 1279868 - RNA, 18 nt, Human
ccugggcccguccaggua

SEQ ID NO: 1279869 - RNA, 19 nt, Human
cgcagucuucggugcuggg

SEQ ID NO: 1279870 - RNA, 24 nt, Human
cuccuugcccuuguucuccuuaac

SEQ ID NO: 1279871 - RNA, 24 nt, Human
cucgcccuccggcaggcucagaca

SEQ ID NO: 1279872 - RNA, 18 nt, Human
gagaacaucagacucaug

SEQ ID NO: 1279873 - RNA, 19 nt, Human
gagacacaccuucccccgc

SEQ ID NO: 1279874 - RNA, 18 nt, Human
gagagacacaccuucccc

SEQ ID NO: 1279875 - RNA, 20 nt, Human
gaguccccaagccugggccc

SEQ ID NO: 1279876 - RNA, 22 nt, Human
gcacauuggcugggaucaaagc

SEQ ID NO: 1279877 - RNA, 21 nt, Human
gcccaggacccaauccgcuuc

SEQ ID NO: 1279878 - RNA, 20 nt, Human
gcccuuguucuccuuaacac

SEQ ID NO: 1279879 - RNA, 21 nt, Human
gcucagacaucaaugggcucc

SEQ ID NO: 1279880 - RNA, 19 nt, Human
uagcuuccggcuucaggcc

SEQ ID NO: 1279881 - RNA, 18 nt, Human
uagguagcuuccggcuuc

SEQ ID NO: 1279882 - RNA, 24 nt, Human
uauuagggagugagggagcacaaa

SEQ ID NO: 1279883 - RNA, 21 nt, Human
ucaccacaaacacccucuguc

SEQ ID NO: 1279884 - RNA, 22 nt, Human
ucaccagcaguguguguucucc

SEQ ID NO: 1279885 - RNA, 18 nt, Human
uccccaagccugggcccg

SEQ ID NO: 1279886 - RNA, 20 nt, Human
uucaccacaaacacccucug

SEQ ID NO: 1279887 - RNA, 19 nt, Human
uugcccuuguucuccuuaa

SEQ ID NO: 1279888 - RNA, 21 nt, Human
aaagcuccuucagaaaagcuc

SEQ ID NO: 1279889 - RNA, 22 nt, Human
aacacgcccccccacgccccca

SEQ ID NO: 1279890 - RNA, 23 nt, Human
aaccauuccagagaaccccacca

SEQ ID NO: 1279891 - RNA, 24 nt, Human
aaccccccucccacggccccgcca

SEQ ID NO: 1279892 - RNA, 20 nt, Human
aaccccgcucucccuccggc

SEQ ID NO: 1279893 - RNA, 21 nt, Human
aacuccugcccuccugcuccc

SEQ ID NO: 1279894 - RNA, 25 nt, Human
aagcagcccaccucacagcaggaag

SEQ ID NO: 1279895 - RNA, 22 nt, Human
aagccagugcccaccccuccac

SEQ ID NO: 1279896 - RNA, 18 nt, Human
aaggccucagaugcacag

SEQ ID NO: 1279897 - RNA, 26 nt, Human
aauggaacacgcccccccacgccccc

SEQ ID NO: 1279898 - RNA, 22 nt, Human
acacgcagcugucccugccccu

SEQ ID NO: 1279899 - RNA, 23 nt, Human
acacgcccccccacgcccccacc

SEQ ID NO: 1279900 - RNA, 23 nt, Human
acagagccaaccccagggcacac

SEQ ID NO: 1279901 - RNA, 20 nt, Human
accccuccccggccagggag

SEQ ID NO: 1279902 - RNA, 20 nt, Human
accccugcccccuugcucuc

SEQ ID NO: 1279903 - RNA, 20 nt, Human
accccugcccucuugcucuc

SEQ ID NO: 1279904 - RNA, 21 nt, Human
accccugcccucuugcucucc

SEQ ID NO: 1279905 - RNA, 21 nt, Human
accccuguucuccuguucucc

SEQ ID NO: 1279906 - RNA, 23 nt, Human
acccugcccuccugacccuccca

SEQ ID NO: 1279907 - RNA, 24 nt, Human
accuccauccucagccucuggaca

SEQ ID NO: 1279908 - RNA, 22 nt, Human
accugcagcaguaagcagccuc

SEQ ID NO: 1279909 - RNA, 20 nt, Human
acggccguucccucuggccg

SEQ ID NO: 1279910 - RNA, 18 nt, Human
agaagcagacccaggccu

SEQ ID NO: 1279911 - RNA, 25 nt, Human
agaagcagacccaggccugaggcgg

SEQ ID NO: 1279912 - RNA, 22 nt, Human
agaggaggaaggggagggaggu

SEQ ID NO: 1279913 - RNA, 22 nt, Human
agaggccuugcagccuucugcc

SEQ ID NO: 1279914 - RNA, 19 nt, Human
agcaccugaugcccuccac

SEQ ID NO: 1279915 - RNA, 21 nt, Human
agccucagugccacacggugc

SEQ ID NO: 1279916 - RNA, 22 nt, Human
aggcacuggguggcagaggagg

SEQ ID NO: 1279917 - RNA, 22 nt, Human
agugcccaccccuccacagagc

SEQ ID NO: 1279918 - RNA, 20 nt, Human
auccucagccucuggacaug

SEQ ID NO: 1279919 - RNA, 25 nt, Human
auggaacacgcccccccacgccccc

SEQ ID NO: 1279920 - RNA, 24 nt, Human
augguccacggaugcgccucccga

SEQ ID NO: 1279921 - RNA, 20 nt, Human
caaccccccucccacggccc

SEQ ID NO: 1279922 - RNA, 25 nt, Human
caacuccugcccuccugcucccucc

SEQ ID NO: 1279923 - RNA, 19 nt, Human
cacaaucucugugagauga

SEQ ID NO: 1279924 - RNA, 19 nt, Human
cacacauguuuauugauaa

SEQ ID NO: 1279925 - RNA, 18 nt, Human
cacagggcaugaggccac

SEQ ID NO: 1279926 - RNA, 22 nt, Human
cacagggucaugguguggacac

SEQ ID NO: 1279927 - RNA, 22 nt, Human
caccaugaugcugccccucccg

SEQ ID NO: 1279928 - RNA, 22 nt, Human
caccccugcccuccagccuucc

SEQ ID NO: 1279929 - RNA, 26 nt, Human
caccccugccuuccugcccccccacc

SEQ ID NO: 1279930 - RNA, 20 nt, Human
cacccugcccuccugacccu

SEQ ID NO: 1279931 - RNA, 24 nt, Human
cacccugcccuccugacccuccca

SEQ ID NO: 1279932 - RNA, 19 nt, Human
caccucacagcaggaaggc

SEQ ID NO: 1279933 - RNA, 24 nt, Human
caccucacagcaggaaggcagcag

SEQ ID NO: 1279934 - RNA, 18 nt, Human
caccugcagcaguaagca

SEQ ID NO: 1279935 - RNA, 20 nt, Human
caccuguccucugccagccc

SEQ ID NO: 1279936 - RNA, 20 nt, Human
cacgcccccaccuguccucu

SEQ ID NO: 1279937 - RNA, 23 nt, Human
cacgcccccaccuguccucugcc

SEQ ID NO: 1279938 - RNA, 22 nt, Human
cacgcccccccacgcccccacc

SEQ ID NO: 1279939 - RNA, 25 nt, Human
cacgcccccccacgcccccaccugu

SEQ ID NO: 1279940 - RNA, 22 nt, Human
cacucacugaccccggaguccc

SEQ ID NO: 1279941 - RNA, 26 nt, Human
cacuggaccccacaggccacucccag

SEQ ID NO: 1279942 - RNA, 23 nt, Human
cagaaggaagcagcccaccucac

SEQ ID NO: 1279943 - RNA, 23 nt, Human
cagaaggcagcgcagcccaagac

SEQ ID NO: 1279944 - RNA, 21 nt, Human
cagacccaggccugaggcgga

SEQ ID NO: 1279945 - RNA, 26 nt, Human
cagaccccaacacuggccaccagaaa

SEQ ID NO: 1279946 - RNA, 26 nt, Human
cagagccaaccccagggcacacagga

SEQ ID NO: 1279947 - RNA, 20 nt, Human
cagcaccuggaggcccugcc

SEQ ID NO: 1279948 - RNA, 24 nt, Human
cagcaggaaggcagcagcagaacc

SEQ ID NO: 1279949 - RNA, 21 nt, Human
cagcaguaagcagccucucag

SEQ ID NO: 1279950 - RNA, 19 nt, Human
cagcccccccuucacccug

SEQ ID NO: 1279951 - RNA, 20 nt, Human
cagcccccuucccacagccc

SEQ ID NO: 1279952 - RNA, 22 nt, Human
cagccucucagccccugagccu

SEQ ID NO: 1279953 - RNA, 18 nt, Human
cagcgcagcccaagacuc

SEQ ID NO: 1279954 - RNA, 19 nt, Human
cagggcacacaggaagcag

SEQ ID NO: 1279955 - RNA, 18 nt, Human
cauacacucacugacccc

SEQ ID NO: 1279956 - RNA, 22 nt, Human
caucccacggccgugagcugcc

SEQ ID NO: 1279957 - RNA, 25 nt, Human
caucccucuucugcucccccucacc

SEQ ID NO: 1279958 - RNA, 23 nt, Human
caugguccacggaugcgccuccc

SEQ ID NO: 1279959 - RNA, 23 nt, Human
ccaaagccagugcccaccccucc

SEQ ID NO: 1279960 - RNA, 21 nt, Human
ccacaaccccccucccacggc

SEQ ID NO: 1279961 - RNA, 20 nt, Human
ccacagccaccgagucagca

SEQ ID NO: 1279962 - RNA, 22 nt, Human
ccaccagcaucacacgcagcug

SEQ ID NO: 1279963 - RNA, 22 nt, Human
ccacgcccccaccuguccucug

SEQ ID NO: 1279964 - RNA, 22 nt, Human
ccacggaugcgccucccgaccc

SEQ ID NO: 1279965 - RNA, 24 nt, Human
ccagcaccccuccccggccaggga

SEQ ID NO: 1279966 - RNA, 19 nt, Human
ccagcccacaaccccccuc

SEQ ID NO: 1279967 - RNA, 20 nt, Human
ccagccguccucacagggca

SEQ ID NO: 1279968 - RNA, 20 nt, Human
ccagcugcccccauggucca

SEQ ID NO: 1279969 - RNA, 22 nt, Human
ccauccucagccucuggacaug

SEQ ID NO: 1279970 - RNA, 20 nt, Human
ccauuccagagaaccccacc

SEQ ID NO: 1279971 - RNA, 18 nt, Human
cccacaaccccccuccca

SEQ ID NO: 1279972 - RNA, 23 nt, Human
cccacagagcucaggaggcggac

SEQ ID NO: 1279973 - RNA, 26 nt, Human
cccaccccuccacagagccaacccca

SEQ ID NO: 1279974 - RNA, 23 nt, Human
cccaccccugccuuccugccccc

SEQ ID NO: 1279975 - RNA, 21 nt, Human
cccacggccccgccagccguc

SEQ ID NO: 1279976 - RNA, 19 nt, Human
cccacggccgugagcugcc

SEQ ID NO: 1279977 - RNA, 20 nt, Human
cccagcaccugaugcccucc

SEQ ID NO: 1279978 - RNA, 21 nt, Human
cccagccucagcaccacuggc

SEQ ID NO: 1279979 - RNA, 21 nt, Human
cccaugccugggcugcagggc

SEQ ID NO: 1279980 - RNA, 20 nt, Human
ccccacaggccacucccaga

SEQ ID NO: 1279981 - RNA, 24 nt, Human
ccccaccuguccucugccagccca

SEQ ID NO: 1279982 - RNA, 21 nt, Human
ccccacgcccaauggcccucc

SEQ ID NO: 1279983 - RNA, 20 nt, Human
ccccaggaaggugcggggug

SEQ ID NO: 1279984 - RNA, 20 nt, Human
ccccaucaccccuacucucc

SEQ ID NO: 1279985 - RNA, 22 nt, Human
ccccaucaccccuacucuccug

SEQ ID NO: 1279986 - RNA, 18 nt, Human
ccccccaccucccuccug

SEQ ID NO: 1279987 - RNA, 18 nt, Human
ccccccucccacggcccc

SEQ ID NO: 1279988 - RNA, 18 nt, Human
ccccccuucacccugccc

SEQ ID NO: 1279989 - RNA, 20 nt, Human
cccccucaccccugcccucc

SEQ ID NO: 1279990 - RNA, 20 nt, Human
cccccucaccccugcccucc

SEQ ID NO: 1279991 - RNA, 21 nt, Human
cccccucaccccugcccuccc

SEQ ID NO: 1279992 - RNA, 21 nt, Human
cccccucaccccugcccuccc

SEQ ID NO: 1279993 - RNA, 18 nt, Human
cccccucccacggccccg

SEQ ID NO: 1279994 - RNA, 28 nt, Human
ccccgccagcccacaaccccccucccac

SEQ ID NO: 1279995 - RNA, 27 nt, Human
ccccggagucccugccaggaaagcucc

SEQ ID NO: 1279996 - RNA, 19 nt, Human
ccccucaccccugcccucc

SEQ ID NO: 1279997 - RNA, 19 nt, Human
ccccucaucccucuucugc

SEQ ID NO: 1279998 - RNA, 23 nt, Human
ccccuccacagagccaaccccag

SEQ ID NO: 1279999 - RNA, 19 nt, Human
ccccugcccucccuuaccc

SEQ ID NO: 1280000 - RNA, 20 nt, Human
ccccugcccucccuuacccc

SEQ ID NO: 1280001 - RNA, 20 nt, Human
ccccugcccucuugcucucc

SEQ ID NO: 1280002 - RNA, 20 nt, Human
ccccugccuuccugcccccc

SEQ ID NO: 1280003 - RNA, 22 nt, Human
ccccuguucuccuguucuccug

SEQ ID NO: 1280004 - RNA, 18 nt, Human
ccccuugcucucucaccc

SEQ ID NO: 1280005 - RNA, 22 nt, Human
cccgcaaagcaagggcaaaggc

SEQ ID NO: 1280006 - RNA, 19 nt, Human
cccuacucuccugcucucc

SEQ ID NO: 1280007 - RNA, 20 nt, Human
cccuccacagagccaacccc

SEQ ID NO: 1280008 - RNA, 22 nt, Human
cccucccagccucagcaccacu

SEQ ID NO: 1280009 - RNA, 19 nt, Human
cccuccugacccucccacc

SEQ ID NO: 1280010 - RNA, 24 nt, Human
cccuccugacccucccaccccugc

SEQ ID NO: 1280011 - RNA, 20 nt, Human
cccuccugccuucccacccc

SEQ ID NO: 1280012 - RNA, 20 nt, Human
cccugcccuccugacccucc

SEQ ID NO: 1280013 - RNA, 19 nt, Human
cccugcccuccugcucccc

SEQ ID NO: 1280014 - RNA, 23 nt, Human
cccugcccuccugcucccccuca

SEQ ID NO: 1280015 - RNA, 19 nt, Human
cccugccuccacgcucccc

SEQ ID NO: 1280016 - RNA, 23 nt, Human
ccgcucucccuccggcauggggc

SEQ ID NO: 1280017 - RNA, 22 nt, Human
ccucaucccucuucugcucccc

SEQ ID NO: 1280018 - RNA, 21 nt, Human
ccuccagcccccccuucaccc

SEQ ID NO: 1280019 - RNA, 23 nt, Human
ccucccaccccugccuuccugcc

SEQ ID NO: 1280020 - RNA, 18 nt, Human
ccucccagccucagcacc

SEQ ID NO: 1280021 - RNA, 22 nt, Human
ccucccgacuguuccagcaccu

SEQ ID NO: 1280022 - RNA, 19 nt, Human
ccucccuuaccccuguucu

SEQ ID NO: 1280023 - RNA, 19 nt, Human
ccuccgccaccccugccua

SEQ ID NO: 1280024 - RNA, 18 nt, Human
ccuccggcauggggccuc

SEQ ID NO: 1280025 - RNA, 19 nt, Human
ccuccugacccucccaccc

SEQ ID NO: 1280026 - RNA, 21 nt, Human
ccuccugcucccccucacccc

SEQ ID NO: 1280027 - RNA, 20 nt, Human
ccuccugucccaacgccugc

SEQ ID NO: 1280028 - RNA, 20 nt, Human
ccucggaaacccuggagccc

SEQ ID NO: 1280029 - RNA, 20 nt, Human
ccucgucaccgcugcccucc

SEQ ID NO: 1280030 - RNA, 19 nt, Human
ccucuggacaugaggaccc

SEQ ID NO: 1280031 - RNA, 22 nt, Human
ccucuggacaugaggacccuga

SEQ ID NO: 1280032 - RNA, 19 nt, Human
ccucuugcucuccucaccc

SEQ ID NO: 1280033 - RNA, 24 nt, Human
ccugaaagaccacugguucccucu

SEQ ID NO: 1280034 - RNA, 18 nt, Human
ccugacccucccaccccu

SEQ ID NO: 1280035 - RNA, 24 nt, Human
ccugcagcuggacaggccgggguc

SEQ ID NO: 1280036 - RNA, 21 nt, Human
ccugcucucucaccccugccc

SEQ ID NO: 1280037 - RNA, 19 nt, Human
ccugggcugcagggcagcc

SEQ ID NO: 1280038 - RNA, 18 nt, Human
ccuggggaccugcccggg

SEQ ID NO: 1280039 - RNA, 23 nt, Human
ccuucagaaaagcucauucugaa

SEQ ID NO: 1280040 - RNA, 22 nt, Human
ccuuccaccuccauccucagcc

SEQ ID NO: 1280041 - RNA, 20 nt, Human
ccuuccugcccccccaccuc

SEQ ID NO: 1280042 - RNA, 18 nt, Human
ccuuugucuuccaggccu

SEQ ID NO: 1280043 - RNA, 22 nt, Human
ccuuugucuuccaggccugggc

SEQ ID NO: 1280044 - RNA, 19 nt, Human
cgacccgcaggcgugagcu

SEQ ID NO: 1280045 - RNA, 24 nt, Human
cggagucccugccaggaaagcucc

SEQ ID NO: 1280046 - RNA, 18 nt, Human
cguccaaaauguagguca

SEQ ID NO: 1280047 - RNA, 18 nt, Human
cgugggcagcaggagggc

SEQ ID NO: 1280048 - RNA, 19 nt, Human
cuaaagccucagcuggaau

SEQ ID NO: 1280049 - RNA, 20 nt, Human
cuacucuggagacacagagg

SEQ ID NO: 1280050 - RNA, 23 nt, Human
cucccauguaccuuccacaaaag

SEQ ID NO: 1280051 - RNA, 18 nt, Human
cucccccucaccccugcc

SEQ ID NO: 1280052 - RNA, 18 nt, Human
cucccccucaccccugcc

SEQ ID NO: 1280053 - RNA, 19 nt, Human
cuccucaccccugcccucc

SEQ ID NO: 1280054 - RNA, 19 nt, Human
cuccucaccccugcccucc

SEQ ID NO: 1280055 - RNA, 19 nt, Human
cuccucaccccugcccucc

SEQ ID NO: 1280056 - RNA, 19 nt, Human
cuccucaccccugcucucc

SEQ ID NO: 1280057 - RNA, 19 nt, Human
cuccugaccccugcccucc

SEQ ID NO: 1280058 - RNA, 22 nt, Human
cuccugcucccccucaucccuc

SEQ ID NO: 1280059 - RNA, 18 nt, Human
cucucaccccugcccucc

SEQ ID NO: 1280060 - RNA, 20 nt, Human
cucucucaccccugcccccu

SEQ ID NO: 1280061 - RNA, 20 nt, Human
cucugcuccagcugcagcac

SEQ ID NO: 1280062 - RNA, 19 nt, Human
cucuuccagcaccccuccc

SEQ ID NO: 1280063 - RNA, 23 nt, Human
cugcagccuccuaaagugcuuug

SEQ ID NO: 1280064 - RNA, 23 nt, Human
cugcuccagcugcagcacggggc

SEQ ID NO: 1280065 - RNA, 23 nt, Human
cugcucccuccucaccccugccc

SEQ ID NO: 1280066 - RNA, 23 nt, Human
cugcucccuccucaccccugccc

SEQ ID NO: 1280067 - RNA, 19 nt, Human
cugcucucucaccccugcc

SEQ ID NO: 1280068 - RNA, 20 nt, Human
cugcucucucaccccugccc

SEQ ID NO: 1280069 - RNA, 21 nt, Human
cugcucucucaccccugcccc

SEQ ID NO: 1280070 - RNA, 23 nt, Human
cuggacaugaggacccugagacc

SEQ ID NO: 1280071 - RNA, 23 nt, Human
cuuccaccuccauccucagccuc

SEQ ID NO: 1280072 - RNA, 21 nt, Human
cuugcucucucaccccugccc

SEQ ID NO: 1280073 - RNA, 18 nt, Human
gaacacgcccccccacgc

SEQ ID NO: 1280074 - RNA, 19 nt, Human
gaaggaaauccacuuaaaa

SEQ ID NO: 1280075 - RNA, 26 nt, Human
gaaggcagcgcagcccaagacucggg

SEQ ID NO: 1280076 - RNA, 21 nt, Human
gacaggcugcccucgucaccg

SEQ ID NO: 1280077 - RNA, 22 nt, Human
gacaguguggcccagcugcccc

SEQ ID NO: 1280078 - RNA, 20 nt, Human
gaccccacaggccacuccca

SEQ ID NO: 1280079 - RNA, 22 nt, Human
gacccgcaggcgugagcuccuc

SEQ ID NO: 1280080 - RNA, 19 nt, Human
gacccucccaccccugccu

SEQ ID NO: 1280081 - RNA, 19 nt, Human
gagaaccccaccaccucuc

SEQ ID NO: 1280082 - RNA, 19 nt, Human
gagaggcauggggggaacc

SEQ ID NO: 1280083 - RNA, 22 nt, Human
gaggaaggggagggagguguuc

SEQ ID NO: 1280084 - RNA, 22 nt, Human
gaugcccuccacgacuccccac

SEQ ID NO: 1280085 - RNA, 20 nt, Human
gcacuggguggcagaggagg

SEQ ID NO: 1280086 - RNA, 20 nt, Human
gcagacccaggccugaggcg

SEQ ID NO: 1280087 - RNA, 19 nt, Human
gcagaccccaacacuggcc

SEQ ID NO: 1280088 - RNA, 22 nt, Human
gcagcagcagaacccacagggc

SEQ ID NO: 1280089 - RNA, 19 nt, Human
gcagggcagcccugcccuc

SEQ ID NO: 1280090 - RNA, 22 nt, Human
gccaaccccagggcacacagga

SEQ ID NO: 1280091 - RNA, 21 nt, Human
gccacacggugcagaccccaa

SEQ ID NO: 1280092 - RNA, 24 nt, Human
gccagaaggcacggccguucccuc

SEQ ID NO: 1280093 - RNA, 18 nt, Human
gccagcccacaacccccc

SEQ ID NO: 1280094 - RNA, 23 nt, Human
gccagugcccaccccuccacaga

SEQ ID NO: 1280095 - RNA, 20 nt, Human
gcccaccccuccacagagcc

SEQ ID NO: 1280096 - RNA, 24 nt, Human
gcccaccucacagcaggaaggcag

SEQ ID NO: 1280097 - RNA, 21 nt, Human
gcccacucucagagccccagc

SEQ ID NO: 1280098 - RNA, 19 nt, Human
gccccaggaaggugcgggg

SEQ ID NO: 1280099 - RNA, 21 nt, Human
gcccuccugcucccccaacuc

SEQ ID NO: 1280100 - RNA, 20 nt, Human
gccucagcuggaauggaaca

SEQ ID NO: 1280101 - RNA, 19 nt, Human
gccucucauacacucacug

SEQ ID NO: 1280102 - RNA, 25 nt, Human
gccucuuucugcugcccuuuagaag

SEQ ID NO: 1280103 - RNA, 23 nt, Human
gccugcccuccugcucccccuca

SEQ ID NO: 1280104 - RNA, 21 nt, Human
gcggaagggaagcacccuccg

SEQ ID NO: 1280105 - RNA, 24 nt, Human
gcucuugaaguuuccaacacaggg

SEQ ID NO: 1280106 - RNA, 22 nt, Human
gcuguccccucgcuguccgugg

SEQ ID NO: 1280107 - RNA, 22 nt, Human
gcuugggcuugggccgugggca

SEQ ID NO: 1280108 - RNA, 24 nt, Human
ggaacacgcccccccacgccccca

SEQ ID NO: 1280109 - RNA, 18 nt, Human
ggaacgcugcccucugcu

SEQ ID NO: 1280110 - RNA, 23 nt, Human
ggaaggcagcagcagaacccaca

SEQ ID NO: 1280111 - RNA, 22 nt, Human
ggcagaagcagacccaggccug

SEQ ID NO: 1280112 - RNA, 19 nt, Human
ggcagcccccuucccacag

SEQ ID NO: 1280113 - RNA, 18 nt, Human
ggccagaaggaagcagcc

SEQ ID NO: 1280114 - RNA, 21 nt, Human
ggcguggcggggaggggagcu

SEQ ID NO: 1280115 - RNA, 21 nt, Human
ggcugcagggcagcccugccc

SEQ ID NO: 1280116 - RNA, 22 nt, Human
gggagcugccguccaaagggaa

SEQ ID NO: 1280117 - RNA, 19 nt, Human
gggaggcugggaggagggc

SEQ ID NO: 1280118 - RNA, 23 nt, Human
gggaggggagcugccguccaaag

SEQ ID NO: 1280119 - RNA, 18 nt, Human
gggcacagggcaugaggc

SEQ ID NO: 1280120 - RNA, 24 nt, Human
gggcagcccugcccucucuccucg

SEQ ID NO: 1280121 - RNA, 19 nt, Human
gggccagggccaagaagua

SEQ ID NO: 1280122 - RNA, 21 nt, Human
ggguggcagaggaggaagggg

SEQ ID NO: 1280123 - RNA, 20 nt, Human
ggucaucauaugggcacagg

SEQ ID NO: 1280124 - RNA, 18 nt, Human
gucacgcuucauggcucg

SEQ ID NO: 1280125 - RNA, 24 nt, Human
gucagucccaugccugggcugcag

SEQ ID NO: 1280126 - RNA, 22 nt, Human
gucaugguguggacacaggcac

SEQ ID NO: 1280127 - RNA, 18 nt, Human
gugccacacggugcagac

SEQ ID NO: 1280128 - RNA, 19 nt, Human
gugcgugacgggaggcugg

SEQ ID NO: 1280129 - RNA, 22 nt, Human
gugggcagcaggagggcuggag

SEQ ID NO: 1280130 - RNA, 18 nt, Human
uaagcagccucucagccc

SEQ ID NO: 1280131 - RNA, 23 nt, Human
uaagcagccucucagccccugag

SEQ ID NO: 1280132 - RNA, 18 nt, Human
ucacacauguuuauugau

SEQ ID NO: 1280133 - RNA, 19 nt, Human
ucagagccccagcucuccg

SEQ ID NO: 1280134 - RNA, 19 nt, Human
ucagcacagcccacggggc

SEQ ID NO: 1280135 - RNA, 23 nt, Human
ucagccccugagccuggggaccu

SEQ ID NO: 1280136 - RNA, 19 nt, Human
ucagucccaugccugggcu

SEQ ID NO: 1280137 - RNA, 21 nt, Human
ucagugccacacggugcagac

SEQ ID NO: 1280138 - RNA, 23 nt, Human
ucauacacucacugaccccggaa

SEQ ID NO: 1280139 - RNA, 19 nt, Human
uccaaagccagugcccacc

SEQ ID NO: 1280140 - RNA, 22 nt, Human
uccaaagccagugcccaccccu

SEQ ID NO: 1280141 - RNA, 18 nt, Human
uccacagagccaacccca

SEQ ID NO: 1280142 - RNA, 18 nt, Human
ucccaacgccugcccucc

SEQ ID NO: 1280143 - RNA, 23 nt, Human
ucccaccccugccuuccugcccc

SEQ ID NO: 1280144 - RNA, 23 nt, Human
ucccagccucagcaccacuggcu

SEQ ID NO: 1280145 - RNA, 21 nt, Human
ucccccaacuccugcccuccu

SEQ ID NO: 1280146 - RNA, 19 nt, Human
ucccuccggcauggggccu

SEQ ID NO: 1280147 - RNA, 21 nt, Human
ucccuccugccuucccacccc

SEQ ID NO: 1280148 - RNA, 21 nt, Human
ucccucuucugcucccccuca

SEQ ID NO: 1280149 - RNA, 21 nt, Human
ucccuuggcucggagucccug

SEQ ID NO: 1280150 - RNA, 19 nt, Human
uccucaccccugcccucca

SEQ ID NO: 1280151 - RNA, 24 nt, Human
uccucaccccugcccuccuauucc

SEQ ID NO: 1280152 - RNA, 24 nt, Human
uccucaccccugcccuccugcucc

SEQ ID NO: 1280153 - RNA, 24 nt, Human
uccucaccccugcucuccugcucu

SEQ ID NO: 1280154 - RNA, 24 nt, Human
uccugaccccugcccuccugcucc

SEQ ID NO: 1280155 - RNA, 26 nt, Human
uccugcccuccugcucccuccucacc

SEQ ID NO: 1280156 - RNA, 24 nt, Human
uccugcucccccaacuccugcccu

SEQ ID NO: 1280157 - RNA, 18 nt, Human
ucggagucccugugcccc

SEQ ID NO: 1280158 - RNA, 21 nt, Human
ucggcagcccccuucccacag

SEQ ID NO: 1280159 - RNA, 19 nt, Human
ucuaugguccugcagcugg

SEQ ID NO: 1280160 - RNA, 23 nt, Human
ucucaccccugcccuccuguccc

SEQ ID NO: 1280161 - RNA, 21 nt, Human
ucucagagccccagcucuccg

SEQ ID NO: 1280162 - RNA, 24 nt, Human
ucucauacacucacugaccccgga

SEQ ID NO: 1280163 - RNA, 20 nt, Human
ucuccugcucuccucacccc

SEQ ID NO: 1280164 - RNA, 19 nt, Human
ucuccugcucucucacccc

SEQ ID NO: 1280165 - RNA, 25 nt, Human
ucucgaccaggcuagcaggccacag

SEQ ID NO: 1280166 - RNA, 24 nt, Human
ucucucgaccaggcuagcaggcca

SEQ ID NO: 1280167 - RNA, 21 nt, Human
ucucugugagaugagagaucc

SEQ ID NO: 1280168 - RNA, 21 nt, Human
ugaacgccccagaggccagug

SEQ ID NO: 1280169 - RNA, 22 nt, Human
ugaccccugcccuccugcuccc

SEQ ID NO: 1280170 - RNA, 24 nt, Human
ugaccccugcccuccugcuccccc

SEQ ID NO: 1280171 - RNA, 19 nt, Human
ugacugcagcaauuucccu

SEQ ID NO: 1280172 - RNA, 20 nt, Human
ugagaaccugucucugcaga

SEQ ID NO: 1280173 - RNA, 24 nt, Human
ugagcagguggcugggccggcaag

SEQ ID NO: 1280174 - RNA, 19 nt, Human
ugaggacccugagacccug

SEQ ID NO: 1280175 - RNA, 20 nt, Human
ugaggcggacaguccagccc

SEQ ID NO: 1280176 - RNA, 19 nt, Human
ugauaaaccguccaaaaug

SEQ ID NO: 1280177 - RNA, 18 nt, Human
ugcagccuucugcccaca

SEQ ID NO: 1280178 - RNA, 24 nt, Human
ugccacacggugcagaccccaaca

SEQ ID NO: 1280179 - RNA, 25 nt, Human
ugcccccccaccucccuccugccuu

SEQ ID NO: 1280180 - RNA, 20 nt, Human
ugccccucccgacuguucca

SEQ ID NO: 1280181 - RNA, 18 nt, Human
ugcccgggcagcacaggg

SEQ ID NO: 1280182 - RNA, 20 nt, Human
ugcccuccagcccccccuuc

SEQ ID NO: 1280183 - RNA, 19 nt, Human
ugcccucccuuaccccugu

SEQ ID NO: 1280184 - RNA, 23 nt, Human
ugcccuccugcucccccaacucc

SEQ ID NO: 1280185 - RNA, 19 nt, Human
ugcccugacaucccuuggc

SEQ ID NO: 1280186 - RNA, 18 nt, Human
ugccugggcugcagggca

SEQ ID NO: 1280187 - RNA, 18 nt, Human
ugccugggcugcagggca

SEQ ID NO: 1280188 - RNA, 28 nt, Human
ugccugggcugcagggcagcccugcccu

SEQ ID NO: 1280189 - RNA, 19 nt, Human
ugcucucucaccccugccc

SEQ ID NO: 1280190 - RNA, 19 nt, Human
ugcucucucaccccugccc

SEQ ID NO: 1280191 - RNA, 24 nt, Human
uggaacacgcccccccacgccccc

SEQ ID NO: 1280192 - RNA, 19 nt, Human
uggaauggaacacgccccc

SEQ ID NO: 1280193 - RNA, 21 nt, Human
uggaccccacaggccacuccc

SEQ ID NO: 1280194 - RNA, 22 nt, Human
uggagaggcauggggggaaccc

SEQ ID NO: 1280195 - RNA, 18 nt, Human
uggcagaggaggaagggg

SEQ ID NO: 1280196 - RNA, 20 nt, Human
uggcccucccucccagccuc

SEQ ID NO: 1280197 - RNA, 19 nt, Human
ugggcugcagggcagcccu

SEQ ID NO: 1280198 - RNA, 23 nt, Human
ugggcuugggccgugggcagcag

SEQ ID NO: 1280199 - RNA, 19 nt, Human
ugucaggaggaaaccauuc

SEQ ID NO: 1280200 - RNA, 23 nt, Human
ugugagaaggaagguggccuccg

SEQ ID NO: 1280201 - RNA, 21 nt, Human
uguggacacaggcacacaugg

SEQ ID NO: 1280202 - RNA, 19 nt, Human
uuccagcaccuggaggccc

SEQ ID NO: 1280203 - RNA, 21 nt, Human
uucuccugcucccuccucacc

SEQ ID NO: 1280204 - RNA, 19 nt, Human
uugaaguuuccaacacagg

SEQ ID NO: 1280205 - RNA, 18 nt, Human
uugauaaaccguccaaaa

SEQ ID NO: 1280206 - RNA, 23 nt, Human
uugcagccuucugcccacacggg

SEQ ID NO: 1280207 - RNA, 19 nt, Human
uugcucucucaccccugcc

SEQ ID NO: 1280208 - RNA, 23 nt, Human
uugcucucuccucaccccugccc

SEQ ID NO: 1280209 - RNA, 23 nt, Human
accagaacagcacagagagccgg

SEQ ID NO: 1280210 - RNA, 24 nt, Human
accugaagauacuggaagcaguuu

SEQ ID NO: 1280211 - RNA, 19 nt, Human
agaaggagaggaccccaga

SEQ ID NO: 1280212 - RNA, 24 nt, Human
aggaccccagaacucagguccugg

SEQ ID NO: 1280213 - RNA, 23 nt, Human
aggagaggaccccagaacucagg

SEQ ID NO: 1280214 - RNA, 18 nt, Human
aggauccaccgggcuggg

SEQ ID NO: 1280215 - RNA, 18 nt, Human
aggcuggagucucccugc

SEQ ID NO: 1280216 - RNA, 26 nt, Human
aguccaggagcuucuccaaacaggug

SEQ ID NO: 1280217 - RNA, 19 nt, Human
auggugcugccucccuugg

SEQ ID NO: 1280218 - RNA, 18 nt, Human
cagaacucagguccugga

SEQ ID NO: 1280219 - RNA, 19 nt, Human
cagcuccaccaggcagggg

SEQ ID NO: 1280220 - RNA, 20 nt, Human
cagcugggcgcauucugggu

SEQ ID NO: 1280221 - RNA, 21 nt, Human
ccccagaggauccaccgggcu

SEQ ID NO: 1280222 - RNA, 20 nt, Human
ccgccgaggccacaaacagg

SEQ ID NO: 1280223 - RNA, 20 nt, Human
cgcauucuggguccauggug

SEQ ID NO: 1280224 - RNA, 20 nt, Human
cugcgaagguuccugccagg

SEQ ID NO: 1280225 - RNA, 18 nt, Human
cuggccgccgaggccaca

SEQ ID NO: 1280226 - RNA, 21 nt, Human
gaccuugcuucucuccugguc

SEQ ID NO: 1280227 - RNA, 18 nt, Human
gagaaggagaggacccca

SEQ ID NO: 1280228 - RNA, 20 nt, Human
gcccuggggcuggcaguguc

SEQ ID NO: 1280229 - RNA, 21 nt, Human
gcugggcuggagcccuggggc

SEQ ID NO: 1280230 - RNA, 24 nt, Human
gcugggcuggagcccuggggcugg

SEQ ID NO: 1280231 - RNA, 20 nt, Human
ggaagcaguuuuccugggcu

SEQ ID NO: 1280232 - RNA, 23 nt, Human
ggagcccuggggcuggcaguguc

SEQ ID NO: 1280233 - RNA, 24 nt, Human
ggagcuucuccaaacaggugucau

SEQ ID NO: 1280234 - RNA, 21 nt, Human
ggcagugucccacagaaggac

SEQ ID NO: 1280235 - RNA, 22 nt, Human
ggcugggcuggagcccuggggc

SEQ ID NO: 1280236 - RNA, 18 nt, Human
gggcuggagcccuggggc

SEQ ID NO: 1280237 - RNA, 21 nt, Human
gugcugccucccuugguccug

SEQ ID NO: 1280238 - RNA, 18 nt, Human
uaaaccaguccaggagcu

SEQ ID NO: 1280239 - RNA, 24 nt, Human
ucagugaccguuuuaaaccagucc

SEQ ID NO: 1280240 - RNA, 19 nt, Human
uccauggugaggccgcagg

SEQ ID NO: 1280241 - RNA, 22 nt, Human
ucccacagaaggacauggugcu

SEQ ID NO: 1280242 - RNA, 23 nt, Human
uccugagccccaguggcagacuc

SEQ ID NO: 1280243 - RNA, 21 nt, Human
uccugggcugcgaagguuccu

SEQ ID NO: 1280244 - RNA, 18 nt, Human
uccuucagugaccguuuu

SEQ ID NO: 1280245 - RNA, 19 nt, Human
ugaccguuuuaaaccaguc

SEQ ID NO: 1280246 - RNA, 30 nt, Human
uggacuuucagcacaugggacagcagcucu

SEQ ID NO: 1280247 - RNA, 21 nt, Human
uggccgccgaggccacaaaca

SEQ ID NO: 1280248 - RNA, 20 nt, Human
ugggacagcagcuccaccag

SEQ ID NO: 1280249 - RNA, 21 nt, Human
ugggaucuaccagaacagcac

SEQ ID NO: 1280250 - RNA, 23 nt, Human
uuccugggcugcgaagguuccug

SEQ ID NO: 1280251 - RNA, 20 nt, Human
aaacacugacacacagccuc

SEQ ID NO: 1280252 - RNA, 20 nt, Human
aagcacucauugacaaggcc

SEQ ID NO: 1280253 - RNA, 20 nt, Human
aagccagacccucccaaugu

SEQ ID NO: 1280254 - RNA, 18 nt, Human
aagcccagcaaacacuga

SEQ ID NO: 1280255 - RNA, 20 nt, Human
aauaaaaaagacaauaagga

SEQ ID NO: 1280256 - RNA, 21 nt, Human
aaugcuaggacacaucccaaa

SEQ ID NO: 1280257 - RNA, 19 nt, Human
accaugaacaacugacccg

SEQ ID NO: 1280258 - RNA, 22 nt, Human
agacaaaacugacuagagucua

SEQ ID NO: 1280259 - RNA, 20 nt, Human
agccaaaaaaggagccacaa

SEQ ID NO: 1280260 - RNA, 26 nt, Human
agccaaaaaaggagccacaagcccag

SEQ ID NO: 1280261 - RNA, 25 nt, Human
aggaggaggaaguccagcucagcaa

SEQ ID NO: 1280262 - RNA, 21 nt, Human
aucccccugcgcuuucuaucg

SEQ ID NO: 1280263 - RNA, 22 nt, Human
augaggaggaggaggaggaagu

SEQ ID NO: 1280264 - RNA, 21 nt, Human
caagcacucauugacaaggcc

SEQ ID NO: 1280265 - RNA, 20 nt, Human
caaggccaagugccucggcc

SEQ ID NO: 1280266 - RNA, 25 nt, Human
cacagaagcaguacaaaaacagcga

SEQ ID NO: 1280267 - RNA, 22 nt, Human
caccaugaacaacugacccgga

SEQ ID NO: 1280268 - RNA, 23 nt, Human
cacugugcaaagcuuacaccaug

SEQ ID NO: 1280269 - RNA, 20 nt, Human
cagcgcugagcgggucaaga

SEQ ID NO: 1280270 - RNA, 19 nt, Human
cagguuagaugucugugcc

SEQ ID NO: 1280271 - RNA, 26 nt, Human
ccagccaaaaaaggagccacaagccc

SEQ ID NO: 1280272 - RNA, 21 nt, Human
cccgcgccgggggccaucccc

SEQ ID NO: 1280273 - RNA, 24 nt, Human
ccuaugacucaaaauccuugaaac

SEQ ID NO: 1280274 - RNA, 21 nt, Human
cgcugagcgggucaagagccc

SEQ ID NO: 1280275 - RNA, 20 nt, Human
cugugcccagaaccccuaaa

SEQ ID NO: 1280276 - RNA, 21 nt, Human
cuuuauccagccaaaaaagga

SEQ ID NO: 1280277 - RNA, 23 nt, Human
gacacacagccucgagcacugcg

SEQ ID NO: 1280278 - RNA, 24 nt, Human
gagacaaaacugacuagagucuau

SEQ ID NO: 1280279 - RNA, 19 nt, Human
gcaguacaaaaacagcgac

SEQ ID NO: 1280280 - RNA, 23 nt, Human
gccacaagcccagcaaacacuga

SEQ ID NO: 1280281 - RNA, 21 nt, Human
gccuaagguucuggagacaaa

SEQ ID NO: 1280282 - RNA, 24 nt, Human
ggaaaacaagcacucauugacaag

SEQ ID NO: 1280283 - RNA, 22 nt, Human
ggaaaacaagccaagggugagc

SEQ ID NO: 1280284 - RNA, 26 nt, Human
ggacacaucccaaaacacacuaggca

SEQ ID NO: 1280285 - RNA, 21 nt, Human
gggcgguggggucagcgcuug

SEQ ID NO: 1280286 - RNA, 20 nt, Human
gggcucggggcucggggcag

SEQ ID NO: 1280287 - RNA, 24 nt, Human
ggucaugaggaggaggaggaggaa

SEQ ID NO: 1280288 - RNA, 20 nt, Human
guuuaaaggaaaacaagcac

SEQ ID NO: 1280289 - RNA, 21 nt, Human
guuuccccucccucuucugcu

SEQ ID NO: 1280290 - RNA, 25 nt, Human
guuuuuuuuuucaaucuuggaguua

SEQ ID NO: 1280291 - RNA, 19 nt, Human
uaaaaaagacaauaaggau

SEQ ID NO: 1280292 - RNA, 22 nt, Human
uaaaaaagacaauaaggauuaa

SEQ ID NO: 1280293 - RNA, 25 nt, Human
uacacagaggggaccagcuuggaau

SEQ ID NO: 1280294 - RNA, 18 nt, Human
uaccagguuagaugucug

SEQ ID NO: 1280295 - RNA, 18 nt, Human
uauagcuaugaggaacag

SEQ ID NO: 1280296 - RNA, 18 nt, Human
ucaaagaaguaggaaaau

SEQ ID NO: 1280297 - RNA, 20 nt, Human
ucaguagagugauacacaga

SEQ ID NO: 1280298 - RNA, 22 nt, Human
ugaaugacaguuuagccuugca

SEQ ID NO: 1280299 - RNA, 24 nt, Human
ugacccggaccacuaccauuccaa

SEQ ID NO: 1280300 - RNA, 22 nt, Human
ugacucaaaauccuugaaacaa

SEQ ID NO: 1280301 - RNA, 21 nt, Human
ugagcgggucaagagcccgcg

SEQ ID NO: 1280302 - RNA, 20 nt, Human
ugcaucugccccaagggcuu

SEQ ID NO: 1280303 - RNA, 20 nt, Human
ugcgagagagaguuccaugc

SEQ ID NO: 1280304 - RNA, 19 nt, Human
uggggucagcgcugagcgg

SEQ ID NO: 1280305 - RNA, 19 nt, Human
uguaaaugcuaggacacau

SEQ ID NO: 1280306 - RNA, 23 nt, Human
ugugaagagccacagaagcagua

SEQ ID NO: 1280307 - RNA, 19 nt, Human
uuaaacggaccccacaaua

SEQ ID NO: 1280308 - RNA, 22 nt, Human
uuaaaggaaaacaagcacucau

SEQ ID NO: 1280309 - RNA, 21 nt, Human
uuuccccucccucuucugcuu

SEQ ID NO: 1280310 - RNA, 18 nt, Human
uuuccuucuucuccaauu

SEQ ID NO: 1280311 - RNA, 24 nt, Human
uuuuugcaauaauugaggcacaac

SEQ ID NO: 1280312 - RNA, 24 nt, Human
aaagcagacuaggagcugugcaga

SEQ ID NO: 1280313 - RNA, 24 nt, Human
aaagugcugggauuacaggcauga

SEQ ID NO: 1280314 - RNA, 21 nt, Human
aaaugaucuucccaccucggc

SEQ ID NO: 1280315 - RNA, 22 nt, Human
aaccuaacaucacccagcguca

SEQ ID NO: 1280316 - RNA, 19 nt, Human
aagugcugggauuacaggc

SEQ ID NO: 1280317 - RNA, 21 nt, Human
aagugcugggauuacaggcau

SEQ ID NO: 1280318 - RNA, 26 nt, Human
aagugcugggauuacaggcaugagcc

SEQ ID NO: 1280319 - RNA, 20 nt, Human
accccaggcucugagcacac

SEQ ID NO: 1280320 - RNA, 22 nt, Human
accucauuucaucccgagccaa

SEQ ID NO: 1280321 - RNA, 18 nt, Human
acuggagacugugagaac

SEQ ID NO: 1280322 - RNA, 23 nt, Human
aggaggaugcuuugaugggucag

SEQ ID NO: 1280323 - RNA, 22 nt, Human
aggcaggugcgucaccccaggc

SEQ ID NO: 1280324 - RNA, 24 nt, Human
aggcaugagccagcaugccuguaa

SEQ ID NO: 1280325 - RNA, 23 nt, Human
aggugucuccacacccugacccc

SEQ ID NO: 1280326 - RNA, 18 nt, Human
agugcugggauuacaggc

SEQ ID NO: 1280327 - RNA, 21 nt, Human
auggcaggguacuggugggug

SEQ ID NO: 1280328 - RNA, 21 nt, Human
auugagcagccuuucucagca

SEQ ID NO: 1280329 - RNA, 24 nt, Human
caaagugcugggauuacaggcaug

SEQ ID NO: 1280330 - RNA, 20 nt, Human
cacacaccucauuucauccc

SEQ ID NO: 1280331 - RNA, 26 nt, Human
cacccagcgucaucugaagaaccugc

SEQ ID NO: 1280332 - RNA, 24 nt, Human
caccucggccucccaaagugcugg

SEQ ID NO: 1280333 - RNA, 19 nt, Human
cacucuguugcucuggcag

SEQ ID NO: 1280334 - RNA, 20 nt, Human
cacucuguugcucuggcagg

SEQ ID NO: 1280335 - RNA, 26 nt, Human
cagaaaccuaacaucacccagcguca

SEQ ID NO: 1280336 - RNA, 23 nt, Human
cagcaagucugacuccaaagccc

SEQ ID NO: 1280337 - RNA, 23 nt, Human
cagcaugccuguaaacuggcugc

SEQ ID NO: 1280338 - RNA, 24 nt, Human
cagcccccaggugcucaggcucaa

SEQ ID NO: 1280339 - RNA, 21 nt, Human
cagcgucaucugaagaaccug

SEQ ID NO: 1280340 - RNA, 23 nt, Human
ccaaagugcugggauuacaggca

SEQ ID NO: 1280341 - RNA, 24 nt, Human
ccaaagugcugggauuacaggcau

SEQ ID NO: 1280342 - RNA, 23 nt, Human
ccagaaaccuaacaucacccagc

SEQ ID NO: 1280343 - RNA, 20 nt, Human
ccagcgucaucugaagaacc

SEQ ID NO: 1280344 - RNA, 24 nt, Human
cccaaagugcugggauuacaggca

SEQ ID NO: 1280345 - RNA, 19 nt, Human
cccagggaaucaggaggau

SEQ ID NO: 1280346 - RNA, 18 nt, Human
cccgagccaacacugcuc

SEQ ID NO: 1280347 - RNA, 18 nt, Human
ccuccugcagaagccgaa

SEQ ID NO: 1280348 - RNA, 18 nt, Human
ccuuccugucuccucucc

SEQ ID NO: 1280349 - RNA, 20 nt, Human
cuauugucccauggcagggu

SEQ ID NO: 1280350 - RNA, 19 nt, Human
cucacggaggcuucaaagc

SEQ ID NO: 1280351 - RNA, 25 nt, Human
cugagcacacaccucauuucauccc

SEQ ID NO: 1280352 - RNA, 19 nt, Human
cuggaagaagccgcugaag

SEQ ID NO: 1280353 - RNA, 19 nt, Human
cuggcaggucuugaacucc

SEQ ID NO: 1280354 - RNA, 23 nt, Human
cuggcaggucuugaacuccuggg

SEQ ID NO: 1280355 - RNA, 22 nt, Human
cuucccaaucccuguuuuugac

SEQ ID NO: 1280356 - RNA, 18 nt, Human
gauuacaggcaugagcca

SEQ ID NO: 1280357 - RNA, 22 nt, Human
gauuacaggcaugagccagcau

SEQ ID NO: 1280358 - RNA, 22 nt, Human
gccucuugugaagggccugucc

SEQ ID NO: 1280359 - RNA, 19 nt, Human
ggacguugaggccuaaagu

SEQ ID NO: 1280360 - RNA, 24 nt, Human
ggauuacaggcaugagccagcaug

SEQ ID NO: 1280361 - RNA, 20 nt, Human
gucucacucuguugcucugg

SEQ ID NO: 1280362 - RNA, 23 nt, Human
guugcucugaugucacuggagac

SEQ ID NO: 1280363 - RNA, 22 nt, Human
uaacuuccaagucgagcccagu

SEQ ID NO: 1280364 - RNA, 22 nt, Human
uacaggcaugagccagcaugcc

SEQ ID NO: 1280365 - RNA, 23 nt, Human
uagagacaggggucucacucugu

SEQ ID NO: 1280366 - RNA, 24 nt, Human
uaggugucuccacacccugacccc

SEQ ID NO: 1280367 - RNA, 20 nt, Human
ucacugugguugcucugaug

SEQ ID NO: 1280368 - RNA, 18 nt, Human
uccaaagcccgugugccc

SEQ ID NO: 1280369 - RNA, 21 nt, Human
uccacacccugaccccaaucc

SEQ ID NO: 1280370 - RNA, 24 nt, Human
uccagaaaccuaacaucacccagc

SEQ ID NO: 1280371 - RNA, 24 nt, Human
ucccaaagugcugggauuacaggc

SEQ ID NO: 1280372 - RNA, 24 nt, Human
ucccuaaggauuuucuuguugcuu

SEQ ID NO: 1280373 - RNA, 18 nt, Human
ucggccucccaaagugcu

SEQ ID NO: 1280374 - RNA, 19 nt, Human
ucucacucuguugcucugg

SEQ ID NO: 1280375 - RNA, 24 nt, Human
ucuggcaggucuugaacuccuggg

SEQ ID NO: 1280376 - RNA, 19 nt, Human
ugaaggcaccauguguauc

SEQ ID NO: 1280377 - RNA, 18 nt, Human
ugacuccaaagcccgugu

SEQ ID NO: 1280378 - RNA, 19 nt, Human
ugacuucugcuuuuuggau

SEQ ID NO: 1280379 - RNA, 21 nt, Human
ugagcuguucauagaaauggg

SEQ ID NO: 1280380 - RNA, 18 nt, Human
ugaguuuuuggaacugaa

SEQ ID NO: 1280381 - RNA, 19 nt, Human
ugaugucacuggagacugu

SEQ ID NO: 1280382 - RNA, 24 nt, Human
ugcacagaaaaaugaaacuguugu

SEQ ID NO: 1280383 - RNA, 21 nt, Human
uggaagaagccgcugaaggca

SEQ ID NO: 1280384 - RNA, 18 nt, Human
ugggauuacaggcaugag

SEQ ID NO: 1280385 - RNA, 19 nt, Human
ugggauuacaggcaugagc

SEQ ID NO: 1280386 - RNA, 21 nt, Human
ugggauuacaggcaugagcca

SEQ ID NO: 1280387 - RNA, 22 nt, Human
ugggauuacaggcaugagccag

SEQ ID NO: 1280388 - RNA, 23 nt, Human
ugggauuacaggcaugagccagc

SEQ ID NO: 1280389 - RNA, 24 nt, Human
ugggauuacaggcaugagccagca

SEQ ID NO: 1280390 - RNA, 25 nt, Human
ugggauuacaggcaugagccagcau

SEQ ID NO: 1280391 - RNA, 27 nt, Human
ugggauuacaggcaugagccagcaugc

SEQ ID NO: 1280392 - RNA, 22 nt, Human
uuacauuaggugucuccacacc

SEQ ID NO: 1280393 - RNA, 27 nt, Human
uucaaagcaggggaggacuugguugga

SEQ ID NO: 1280394 - RNA, 24 nt, Human
uugacagaugaggacguugaggcc

SEQ ID NO: 1280395 - RNA, 21 nt, Human
uuucugucccauugcuggaag

SEQ ID NO: 1280396 - RNA, 18 nt, Human
uuucuuguugcuuuuaaa

SEQ ID NO: 1280397 - RNA, 20 nt, Human
uuuggaacugaaagcagacu

SEQ ID NO: 1280398 - RNA, 18 nt, Human
uuuuuuuguagagacagg

SEQ ID NO: 1280399 - RNA, 30 nt, Human
uuuuuuuuuuuguagagacaggggucucaa

SEQ ID NO: 1280400 - RNA, 27 nt, Human
uuuuuuuuuuuuuuuguagagacaggg

SEQ ID NO: 1280401 - RNA, 19 nt, Human
ccugucagacagugguuac

SEQ ID NO: 1280402 - RNA, 22 nt, Human
cuugcagaauuaccauuuggga

SEQ ID NO: 1280403 - RNA, 22 nt, Human
ucagacagugguuacugauuaa

SEQ ID NO: 1280404 - RNA, 22 nt, Human
uugcuugcagaauuaccauuug

SEQ ID NO: 1280405 - RNA, 19 nt, Human
aaaaagaaacaaaccugcu

SEQ ID NO: 1280406 - RNA, 22 nt, Human
aaaagaaaaagaaacaaaccug

SEQ ID NO: 1280407 - RNA, 21 nt, Human
aaaaggaaacuugccauaccc

SEQ ID NO: 1280408 - RNA, 19 nt, Human
aaacagaugaaguugggac

SEQ ID NO: 1280409 - RNA, 24 nt, Human
aaacagaugaaguugggacaaaac

SEQ ID NO: 1280410 - RNA, 21 nt, Human
aaacaugagcuugaaacagaa

SEQ ID NO: 1280411 - RNA, 19 nt, Human
aaacuugccauacccucua

SEQ ID NO: 1280412 - RNA, 22 nt, Human
aaaggaagaaggaauaggggag

SEQ ID NO: 1280413 - RNA, 21 nt, Human
aagaaacauuuccaaaaaacc

SEQ ID NO: 1280414 - RNA, 24 nt, Human
aagacaggcagaaaagccugagga

SEQ ID NO: 1280415 - RNA, 23 nt, Human
aagaggagguagaaagaggggac

SEQ ID NO: 1280416 - RNA, 23 nt, Human
aagcagcgcuggccauggucucc

SEQ ID NO: 1280417 - RNA, 18 nt, Human
aagggugugagccgcugg

SEQ ID NO: 1280418 - RNA, 20 nt, Human
aaucucugcccuggcacccc

SEQ ID NO: 1280419 - RNA, 22 nt, Human
acaaaaauagacuccggaaagu

SEQ ID NO: 1280420 - RNA, 20 nt, Human
acagaaagcagcgcuggcca

SEQ ID NO: 1280421 - RNA, 22 nt, Human
acagcauugagugaagugcgcc

SEQ ID NO: 1280422 - RNA, 30 nt, Human
accaugcuacgaaccauuaggcaaacaucu

SEQ ID NO: 1280423 - RNA, 18 nt, Human
accccaggaggagggagc

SEQ ID NO: 1280424 - RNA, 23 nt, Human
acccucuaauuuuggaaagacug

SEQ ID NO: 1280425 - RNA, 26 nt, Human
accuuagcaucccugccuggccguca

SEQ ID NO: 1280426 - RNA, 19 nt, Human
acgcugacagcacagaauc

SEQ ID NO: 1280427 - RNA, 23 nt, Human
agaaaaaaggaaacuugccauac

SEQ ID NO: 1280428 - RNA, 18 nt, Human
agaaaagaaaaagaaaca

SEQ ID NO: 1280429 - RNA, 25 nt, Human
agaaaaggaagaaggaauaggggag

SEQ ID NO: 1280430 - RNA, 20 nt, Human
agaagggagggaaggaagga

SEQ ID NO: 1280431 - RNA, 21 nt, Human
agagagcagucaucagagugc

SEQ ID NO: 1280432 - RNA, 26 nt, Human
agagaggaaggaagggagggaaggag

SEQ ID NO: 1280433 - RNA, 22 nt, Human
agagaggaagggagggagggaa

SEQ ID NO: 1280434 - RNA, 24 nt, Human
agaggaaggaagggagggaaggag

SEQ ID NO: 1280435 - RNA, 18 nt, Human
agaggaagggaggaagga

SEQ ID NO: 1280436 - RNA, 19 nt, Human
agaggaagggagggaggga

SEQ ID NO: 1280437 - RNA, 26 nt, Human
agaggaagggagggagggaaagaagg

SEQ ID NO: 1280438 - RNA, 22 nt, Human
agagggaggggacggccuggug

SEQ ID NO: 1280439 - RNA, 19 nt, Human
agagggggcagcagcagcg

SEQ ID NO: 1280440 - RNA, 19 nt, Human
agagucccuccgaggcauu

SEQ ID NO: 1280441 - RNA, 26 nt, Human
agcacagaauccaggcaauauccaca

SEQ ID NO: 1280442 - RNA, 22 nt, Human
aggaaggaagggagggaaggag

SEQ ID NO: 1280443 - RNA, 18 nt, Human
aggaaggaggggaaggaa

SEQ ID NO: 1280444 - RNA, 20 nt, Human
aggaaggaggggaaggaagg

SEQ ID NO: 1280445 - RNA, 21 nt, Human
aggaagggaggaaggaaggaa

SEQ ID NO: 1280446 - RNA, 18 nt, Human
aggaagggagggaaggag

SEQ ID NO: 1280447 - RNA, 19 nt, Human
aggaagggagggaaggagg

SEQ ID NO: 1280448 - RNA, 25 nt, Human
aggcaauauccacacccucugccca

SEQ ID NO: 1280449 - RNA, 21 nt, Human
agggaggaaggaaggaaagga

SEQ ID NO: 1280450 - RNA, 27 nt, Human
agggagggaaagaagggagggaaggaa

SEQ ID NO: 1280451 - RNA, 18 nt, Human
agggagggagggaaagaa

SEQ ID NO: 1280452 - RNA, 19 nt, Human
agggagggagggaaagaag

SEQ ID NO: 1280453 - RNA, 19 nt, Human
aggggaaggaagggaggag

SEQ ID NO: 1280454 - RNA, 21 nt, Human
aggggagagaggaagggaggg

SEQ ID NO: 1280455 - RNA, 19 nt, Human
aggggcuugggcuggaccg

SEQ ID NO: 1280456 - RNA, 21 nt, Human
auaaaaaggcaccuggagaca

SEQ ID NO: 1280457 - RNA, 23 nt, Human
aucacuuaucagauuuuuuucuu

SEQ ID NO: 1280458 - RNA, 24 nt, Human
auccaaccuccaucuuccuaggcu

SEQ ID NO: 1280459 - RNA, 19 nt, Human
augcagaaguggcuuuggg

SEQ ID NO: 1280460 - RNA, 24 nt, Human
augccgcauugcucugggaggcca

SEQ ID NO: 1280461 - RNA, 23 nt, Human
caaaccccaggagccgccgagga

SEQ ID NO: 1280462 - RNA, 24 nt, Human
cacaauuucagaaaaaguuguagg

SEQ ID NO: 1280463 - RNA, 18 nt, Human
cacccaucccuguggcuc

SEQ ID NO: 1280464 - RNA, 24 nt, Human
caccuuagcaucccugccuggccg

SEQ ID NO: 1280465 - RNA, 18 nt, Human
cacuccgugaccacaucc

SEQ ID NO: 1280466 - RNA, 22 nt, Human
cagaaaagccugaggaccgcac

SEQ ID NO: 1280467 - RNA, 19 nt, Human
cagacagugacggcugagc

SEQ ID NO: 1280468 - RNA, 21 nt, Human
cagcagcgccagugguggaga

SEQ ID NO: 1280469 - RNA, 24 nt, Human
cagcagcgccagugguggagaagc

SEQ ID NO: 1280470 - RNA, 20 nt, Human
caggaaccugaaagccgacu

SEQ ID NO: 1280471 - RNA, 18 nt, Human
caggcaauauccacaccc

SEQ ID NO: 1280472 - RNA, 20 nt, Human
cagucgucuguugcaaagau

SEQ ID NO: 1280473 - RNA, 18 nt, Human
caguuguccccuacccuc

SEQ ID NO: 1280474 - RNA, 18 nt, Human
cauuccaucuagccuggc

SEQ ID NO: 1280475 - RNA, 19 nt, Human
cauuccaucuagccuggcu

SEQ ID NO: 1280476 - RNA, 18 nt, Human
ccagccuauacaaaacuc

SEQ ID NO: 1280477 - RNA, 21 nt, Human
ccagucgucuguugcaaagau

SEQ ID NO: 1280478 - RNA, 21 nt, Human
ccagugggcaccagcagugcu

SEQ ID NO: 1280479 - RNA, 19 nt, Human
cccauguacaaagcugaac

SEQ ID NO: 1280480 - RNA, 20 nt, Human
cccugaagauaaggaguuag

SEQ ID NO: 1280481 - RNA, 25 nt, Human
ccgcggaguugaccgugugcugugu

SEQ ID NO: 1280482 - RNA, 23 nt, Human
ccguuccauccagacccgggacc

SEQ ID NO: 1280483 - RNA, 18 nt, Human
ccucaccuuucagacugg

SEQ ID NO: 1280484 - RNA, 20 nt, Human
ccucauggcugcagagagca

SEQ ID NO: 1280485 - RNA, 20 nt, Human
ccuccacucccucuccccgc

SEQ ID NO: 1280486 - RNA, 19 nt, Human
cgacuccuugacuagacac

SEQ ID NO: 1280487 - RNA, 23 nt, Human
cgagcagccagcagaagccagga

SEQ ID NO: 1280488 - RNA, 18 nt, Human
cgaggggguguggccugg

SEQ ID NO: 1280489 - RNA, 22 nt, Human
cgccagugggcaccagcagugc

SEQ ID NO: 1280490 - RNA, 23 nt, Human
cgccagugguggagaagcggugg

SEQ ID NO: 1280491 - RNA, 27 nt, Human
cgccagugguggagaagcgguggcugc

SEQ ID NO: 1280492 - RNA, 20 nt, Human
cgugcaggaggccgaggggg

SEQ ID NO: 1280493 - RNA, 20 nt, Human
cucauccggggaacuguggg

SEQ ID NO: 1280494 - RNA, 21 nt, Human
cugaaggcgaggcuggggaga

SEQ ID NO: 1280495 - RNA, 24 nt, Human
cugagccacaccuuagcaucccug

SEQ ID NO: 1280496 - RNA, 21 nt, Human
cugcauguggccaggagacug

SEQ ID NO: 1280497 - RNA, 24 nt, Human
cugcccguuugccgugcacugggg

SEQ ID NO: 1280498 - RNA, 19 nt, Human
cuggguccccucucccugg

SEQ ID NO: 1280499 - RNA, 20 nt, Human
gaaaacccgagagcaacaaa

SEQ ID NO: 1280500 - RNA, 18 nt, Human
gaaagaagagaggaaggg

SEQ ID NO: 1280501 - RNA, 22 nt, Human
gaaauaaaaaccaugcuacgaa

SEQ ID NO: 1280502 - RNA, 18 nt, Human
gaagaggagguagaaaga

SEQ ID NO: 1280503 - RNA, 18 nt, Human
gaaggaaggaaaggaggg

SEQ ID NO: 1280504 - RNA, 20 nt, Human
gaagggaggagagaaaaaag

SEQ ID NO: 1280505 - RNA, 25 nt, Human
gaagggagggagggaaagaagggag

SEQ ID NO: 1280506 - RNA, 21 nt, Human
gacccgggcugagggguggac

SEQ ID NO: 1280507 - RNA, 24 nt, Human
gacccuccacucccucuccccgcu

SEQ ID NO: 1280508 - RNA, 20 nt, Human
gagcucugcacacccauccc

SEQ ID NO: 1280509 - RNA, 21 nt, Human
gaggaaggaaggaaaggaggg

SEQ ID NO: 1280510 - RNA, 18 nt, Human
gaggaccgcaccacugca

SEQ ID NO: 1280511 - RNA, 21 nt, Human
gaggcauggccaucucugagc

SEQ ID NO: 1280512 - RNA, 22 nt, Human
gagggaaggaaggaggaaagag

SEQ ID NO: 1280513 - RNA, 18 nt, Human
gagggaaggagggaggga

SEQ ID NO: 1280514 - RNA, 20 nt, Human
gaggggacggccuggugugc

SEQ ID NO: 1280515 - RNA, 23 nt, Human
gagggguaaaggaaaggaaggag

SEQ ID NO: 1280516 - RNA, 19 nt, Human
gaucucaccugacccucca

SEQ ID NO: 1280517 - RNA, 26 nt, Human
gcacaauuucagaaaaaggggaacgc

SEQ ID NO: 1280518 - RNA, 18 nt, Human
gcaccugcccguuugccg

SEQ ID NO: 1280519 - RNA, 18 nt, Human
gcacuguccacuguggug

SEQ ID NO: 1280520 - RNA, 19 nt, Human
gcagcagcagcgccagugg

SEQ ID NO: 1280521 - RNA, 20 nt, Human
gccaaaaucuaccuggaaac

SEQ ID NO: 1280522 - RNA, 21 nt, Human
gccacauccucauggcugcag

SEQ ID NO: 1280523 - RNA, 20 nt, Human
gccaggagacuggcuccugg

SEQ ID NO: 1280524 - RNA, 19 nt, Human
gcgaggcuggggagagggg

SEQ ID NO: 1280525 - RNA, 21 nt, Human
gcucuucaaaccccaggagcc

SEQ ID NO: 1280526 - RNA, 22 nt, Human
gcuggaccgauucacccagaag

SEQ ID NO: 1280527 - RNA, 19 nt, Human
ggaaaacaugagcuugaaa

SEQ ID NO: 1280528 - RNA, 18 nt, Human
ggaaagagaggaaggaag

SEQ ID NO: 1280529 - RNA, 18 nt, Human
ggaaaggaaggaggggaa

SEQ ID NO: 1280530 - RNA, 25 nt, Human
ggaaaggagggguaaaggaaaggaa

SEQ ID NO: 1280531 - RNA, 19 nt, Human
ggaaggagggagggaggga

SEQ ID NO: 1280532 - RNA, 20 nt, Human
ggaaggagggagggagggag

SEQ ID NO: 1280533 - RNA, 19 nt, Human
ggacugggagagggggcag

SEQ ID NO: 1280534 - RNA, 22 nt, Human
ggagggaggaaagaagagagga

SEQ ID NO: 1280535 - RNA, 19 nt, Human
ggagggagggagggaggaa

SEQ ID NO: 1280536 - RNA, 19 nt, Human
ggagggagggagggaggaa

SEQ ID NO: 1280537 - RNA, 18 nt, Human
ggaggggacggccuggug

SEQ ID NO: 1280538 - RNA, 23 nt, Human
ggcaauauccacacccucugccc

SEQ ID NO: 1280539 - RNA, 18 nt, Human
ggcaggcucagcucauga

SEQ ID NO: 1280540 - RNA, 21 nt, Human
ggccacacuuucugcaugugg

SEQ ID NO: 1280541 - RNA, 19 nt, Human
ggccagcgugguggcuucc

SEQ ID NO: 1280542 - RNA, 18 nt, Human
ggcuggggaggucugagg

SEQ ID NO: 1280543 - RNA, 23 nt, Human
gggaaggaaggaggaaagagagg

SEQ ID NO: 1280544 - RNA, 22 nt, Human
gggaaggagagggccagcgugg

SEQ ID NO: 1280545 - RNA, 23 nt, Human
gggagggaggaaagaagagagga

SEQ ID NO: 1280546 - RNA, 23 nt, Human
gggagggagggaggaaagaagag

SEQ ID NO: 1280547 - RNA, 21 nt, Human
gggcagcagcagcgccagugg

SEQ ID NO: 1280548 - RNA, 22 nt, Human
gggcagcagcagcgccaguggu

SEQ ID NO: 1280549 - RNA, 20 nt, Human
gggcuggggaggucugaggu

SEQ ID NO: 1280550 - RNA, 23 nt, Human
gggggccggccggggcagcucug

SEQ ID NO: 1280551 - RNA, 18 nt, Human
ggguggucuugagucuug

SEQ ID NO: 1280552 - RNA, 18 nt, Human
gguagaaagagacggggg

SEQ ID NO: 1280553 - RNA, 18 nt, Human
gguggagaagcgguggcu

SEQ ID NO: 1280554 - RNA, 21 nt, Human
gucgucuguugcaaagaugac

SEQ ID NO: 1280555 - RNA, 22 nt, Human
gugggcaccagcagugcucccg

SEQ ID NO: 1280556 - RNA, 18 nt, Human
uaaaaucaucacuuauca

SEQ ID NO: 1280557 - RNA, 21 nt, Human
uaagacgucucaacacucucc

SEQ ID NO: 1280558 - RNA, 25 nt, Human
uaaguuuuccaaaguaguucauacu

SEQ ID NO: 1280559 - RNA, 19 nt, Human
uacuaagaguggaggggag

SEQ ID NO: 1280560 - RNA, 19 nt, Human
uacugcucaguuguccccu

SEQ ID NO: 1280561 - RNA, 25 nt, Human
uagcaucccugccuggccgucagga

SEQ ID NO: 1280562 - RNA, 20 nt, Human
uagggaacguuuagggaccu

SEQ ID NO: 1280563 - RNA, 19 nt, Human
uaggggagagaggaaggga

SEQ ID NO: 1280564 - RNA, 20 nt, Human
ucaccugacccuccacuccc

SEQ ID NO: 1280565 - RNA, 18 nt, Human
ucacgcugcugcugguga

SEQ ID NO: 1280566 - RNA, 19 nt, Human
ucacugggggaacggcacc

SEQ ID NO: 1280567 - RNA, 25 nt, Human
ucagaaacagaugaaguugggacaa

SEQ ID NO: 1280568 - RNA, 21 nt, Human
ucaggugagaaggaaggggga

SEQ ID NO: 1280569 - RNA, 21 nt, Human
ucaucacuuaucagauuuuuu

SEQ ID NO: 1280570 - RNA, 21 nt, Human
uccaaaaaaccuguuaaggcu

SEQ ID NO: 1280571 - RNA, 19 nt, Human
uccacucagaaaaaggagg

SEQ ID NO: 1280572 - RNA, 20 nt, Human
ucccaggccccggaggugcc

SEQ ID NO: 1280573 - RNA, 19 nt, Human
ucccggggcuguggaggcg

SEQ ID NO: 1280574 - RNA, 18 nt, Human
ucccguguccucgugucc

SEQ ID NO: 1280575 - RNA, 22 nt, Human
ucucaugggacagagucccucc

SEQ ID NO: 1280576 - RNA, 21 nt, Human
ugaaaagggguuuuccagccu

SEQ ID NO: 1280577 - RNA, 19 nt, Human
ugacccuccacucccucuc

SEQ ID NO: 1280578 - RNA, 20 nt, Human
ugacgugaggggcuggaggc

SEQ ID NO: 1280579 - RNA, 18 nt, Human
ugagaucucaccugaccc

SEQ ID NO: 1280580 - RNA, 21 nt, Human
ugagcuguuaaguuuuccaaa

SEQ ID NO: 1280581 - RNA, 21 nt, Human
ugagggggcacuuacagggac

SEQ ID NO: 1280582 - RNA, 24 nt, Human
ugcagagagcagucaucagagugc

SEQ ID NO: 1280583 - RNA, 23 nt, Human
ugcaggguggggccgaagcaauc

SEQ ID NO: 1280584 - RNA, 24 nt, Human
ugccaagaaugcguaagaaauaaa

SEQ ID NO: 1280585 - RNA, 24 nt, Human
ugccuggaaucucugcccuggcac

SEQ ID NO: 1280586 - RNA, 18 nt, Human
uggaaacauccagcucug

SEQ ID NO: 1280587 - RNA, 21 nt, Human
uggaagaggagguagaaagga

SEQ ID NO: 1280588 - RNA, 19 nt, Human
uggaccauggcagcccagu

SEQ ID NO: 1280589 - RNA, 18 nt, Human
uggcuccuggguggcacu

SEQ ID NO: 1280590 - RNA, 19 nt, Human
ugggagagggggcagcagc

SEQ ID NO: 1280591 - RNA, 18 nt, Human
uggggaggucugaggucc

SEQ ID NO: 1280592 - RNA, 23 nt, Human
uggggguggguggggagacucag

SEQ ID NO: 1280593 - RNA, 24 nt, Human
uggguccccucucccuggggcccc

SEQ ID NO: 1280594 - RNA, 18 nt, Human
ugguggcuuccagcccua

SEQ ID NO: 1280595 - RNA, 24 nt, Human
uguagggaacguuuagggaccuga

SEQ ID NO: 1280596 - RNA, 21 nt, Human
ugugugucacgcugcugcugg

SEQ ID NO: 1280597 - RNA, 27 nt, Human
uuaaaaccgagauuaaaauccaacuga

SEQ ID NO: 1280598 - RNA, 21 nt, Human
uuaaaccaaacaaugacaauu

SEQ ID NO: 1280599 - RNA, 20 nt, Human
uuccuaguuggucuugaaga

SEQ ID NO: 1280600 - RNA, 21 nt, Human
uuccuaguuggucuugaagac

SEQ ID NO: 1280601 - RNA, 20 nt, Human
uucggggaaggagagggcca

SEQ ID NO: 1280602 - RNA, 21 nt, Human
uucggggaaggagagggccag

SEQ ID NO: 1280603 - RNA, 23 nt, Human
uucggggaaggagagggccagcg

SEQ ID NO: 1280604 - RNA, 21 nt, Human
uuggucuugaagacggagaaa

SEQ ID NO: 1280605 - RNA, 23 nt, Human
uuuuucuuuuuaaacaaaaacuu

SEQ ID NO: 1280606 - RNA, 19 nt, Human
aggaacucgaacucgcggc

SEQ ID NO: 1280607 - RNA, 21 nt, Human
ccgcgccagcgccggccccgg

SEQ ID NO: 1280608 - RNA, 23 nt, Human
ccggccccgggcucugccguacc

SEQ ID NO: 1280609 - RNA, 23 nt, Human
cgccagcgccggccccgggcucc

SEQ ID NO: 1280610 - RNA, 21 nt, Human
cgcugggugagucccacuccc

SEQ ID NO: 1280611 - RNA, 18 nt, Human
gagucccacucccccgcg

SEQ ID NO: 1280612 - RNA, 19 nt, Human
ggcccuccagccgcgccag

SEQ ID NO: 1280613 - RNA, 18 nt, Human
uccagccgcgccagcgcc

SEQ ID NO: 1280614 - RNA, 24 nt, Human
aauuucuccucuguaagaauggcu

SEQ ID NO: 1280615 - RNA, 18 nt, Human
agaaacgugcuccacucc

SEQ ID NO: 1280616 - RNA, 21 nt, Human
agggaugaucuggcugucacc

SEQ ID NO: 1280617 - RNA, 19 nt, Human
cagagccuggggggcgcgg

SEQ ID NO: 1280618 - RNA, 18 nt, Human
cccaaacgaccucucaag

SEQ ID NO: 1280619 - RNA, 19 nt, Human
cccgagccggagcuggagg

SEQ ID NO: 1280620 - RNA, 19 nt, Human
ccuaaagcccaaacgaccu

SEQ ID NO: 1280621 - RNA, 21 nt, Human
cgcggguagcuggcagagccu

SEQ ID NO: 1280622 - RNA, 21 nt, Human
cggagccggagcccgagccgg

SEQ ID NO: 1280623 - RNA, 21 nt, Human
cggguagcuggcagagccugg

SEQ ID NO: 1280624 - RNA, 23 nt, Human
cuggccccgggcucagagcgcgg

SEQ ID NO: 1280625 - RNA, 23 nt, Human
cugucaccagaagucaccuugga

SEQ ID NO: 1280626 - RNA, 20 nt, Human
gagccggagcccgagccgga

SEQ ID NO: 1280627 - RNA, 20 nt, Human
gagccggagccggagcccga

SEQ ID NO: 1280628 - RNA, 22 nt, Human
gcagcagcagguuggagggcgc

SEQ ID NO: 1280629 - RNA, 21 nt, Human
gcccgagccggagcuggaggc

SEQ ID NO: 1280630 - RNA, 23 nt, Human
gcggcggcagcagcagguuggag

SEQ ID NO: 1280631 - RNA, 21 nt, Human
gcuuucuuucucgcuggggac

SEQ ID NO: 1280632 - RNA, 22 nt, Human
ggcggcagcagcagguuggagg

SEQ ID NO: 1280633 - RNA, 19 nt, Human
ggcggcggcagcagcaggu

SEQ ID NO: 1280634 - RNA, 18 nt, Human
gggaccuggucggcgccc

SEQ ID NO: 1280635 - RNA, 24 nt, Human
gggcgcgcggcgggggccaagggg

SEQ ID NO: 1280636 - RNA, 18 nt, Human
gggcgcggcggcggcagc

SEQ ID NO: 1280637 - RNA, 22 nt, Human
ggggggcgcggcggcggcagca

SEQ ID NO: 1280638 - RNA, 23 nt, Human
uaaaugcuuucuuucucgcuggg

SEQ ID NO: 1280639 - RNA, 18 nt, Human
uaagaauggcuaaaugcu

SEQ ID NO: 1280640 - RNA, 21 nt, Human
uccacuccuaaagcccaaacg

SEQ ID NO: 1280641 - RNA, 22 nt, Human
ucuuucucgcuggggacucgag

SEQ ID NO: 1280642 - RNA, 20 nt, Human
ugaagauguuaauguugcuu

SEQ ID NO: 1280643 - RNA, 18 nt, Human
uggcagagccuggggggc

SEQ ID NO: 1280644 - RNA, 20 nt, Human
uggcagagccuggggggcgg

SEQ ID NO: 1280645 - RNA, 22 nt, Human
uuccaugggaaucuggccccgg

SEQ ID NO: 1280646 - RNA, 19 nt, Human
aaagugcugggauuccagg

SEQ ID NO: 1280647 - RNA, 24 nt, Human
aaagugcugggauuccaggcggga

SEQ ID NO: 1280648 - RNA, 24 nt, Human
aacgauucuccugccucagccucc

SEQ ID NO: 1280649 - RNA, 20 nt, Human
aaggggcucaccagagcucc

SEQ ID NO: 1280650 - RNA, 19 nt, Human
aagugcugggauuccaggc

SEQ ID NO: 1280651 - RNA, 24 nt, Human
aauuacaggcacaugcugucaugc

SEQ ID NO: 1280652 - RNA, 25 nt, Human
acccgccuuggccucccaaagugcu

SEQ ID NO: 1280653 - RNA, 22 nt, Human
acgcagugaagcaggaagguuu

SEQ ID NO: 1280654 - RNA, 20 nt, Human
aggaauccaccuuguagacc

SEQ ID NO: 1280655 - RNA, 22 nt, Human
aggcauugguggucgccgagcu

SEQ ID NO: 1280656 - RNA, 24 nt, Human
aggcauugguggucgccgagcuga

SEQ ID NO: 1280657 - RNA, 22 nt, Human
aggcgggagcacugugcccggc

SEQ ID NO: 1280658 - RNA, 25 nt, Human
aggcuggagugcagugguacuaucu

SEQ ID NO: 1280659 - RNA, 24 nt, Human
aggugauccacccgccuuggccuc

SEQ ID NO: 1280660 - RNA, 18 nt, Human
aguagcuggaauuacagg

SEQ ID NO: 1280661 - RNA, 18 nt, Human
augggguuucgccauguu

SEQ ID NO: 1280662 - RNA, 24 nt, Human
augggguuucgccauguuggccag

SEQ ID NO: 1280663 - RNA, 20 nt, Human
caaacgauucuccugccuca

SEQ ID NO: 1280664 - RNA, 22 nt, Human
caaacgauucuccugccucagc

SEQ ID NO: 1280665 - RNA, 19 nt, Human
caagaagcucucagagccu

SEQ ID NO: 1280666 - RNA, 26 nt, Human
caagugccuuuacuucucugggcuuc

SEQ ID NO: 1280667 - RNA, 24 nt, Human
caaugagcuccugcccaaaaacuc

SEQ ID NO: 1280668 - RNA, 23 nt, Human
cacccgccuuggccucccaaagu

SEQ ID NO: 1280669 - RNA, 24 nt, Human
cacccgccuuggccucccaaagug

SEQ ID NO: 1280670 - RNA, 21 nt, Human
cacugcaaccuccgccuccug

SEQ ID NO: 1280671 - RNA, 23 nt, Human
cacugcaaccuccgccuccuggg

SEQ ID NO: 1280672 - RNA, 21 nt, Human
cagaaacagaugcuagcguug

SEQ ID NO: 1280673 - RNA, 20 nt, Human
cagagccugagcccuggguc

SEQ ID NO: 1280674 - RNA, 20 nt, Human
caggcagcccuggguggggg

SEQ ID NO: 1280675 - RNA, 19 nt, Human
cagggccgggguccuggug

SEQ ID NO: 1280676 - RNA, 19 nt, Human
cauguuggccaggcugguc

SEQ ID NO: 1280677 - RNA, 18 nt, Human
ccaaagugcugggauucc

SEQ ID NO: 1280678 - RNA, 23 nt, Human
ccaccgccuccccaggaauccac

SEQ ID NO: 1280679 - RNA, 21 nt, Human
ccaggcuggucuuccuggccu

SEQ ID NO: 1280680 - RNA, 19 nt, Human
ccauguuggccaggcuggu

SEQ ID NO: 1280681 - RNA, 21 nt, Human
ccauguuggccaggcuggucu

SEQ ID NO: 1280682 - RNA, 22 nt, Human
cccagguaggcauugguggucg

SEQ ID NO: 1280683 - RNA, 23 nt, Human
cccgaguagcuggaauuacaggc

SEQ ID NO: 1280684 - RNA, 24 nt, Human
ccgccuccuggguucaaacgauuc

SEQ ID NO: 1280685 - RNA, 22 nt, Human
ccggccccuaguguguuuugug

SEQ ID NO: 1280686 - RNA, 21 nt, Human
ccucaggugauccacccgccu

SEQ ID NO: 1280687 - RNA, 24 nt, Human
ccucauaaaagacaugccuggcuu

SEQ ID NO: 1280688 - RNA, 19 nt, Human
ccuccgccuccuggguuca

SEQ ID NO: 1280689 - RNA, 21 nt, Human
ccuccugcccucuuuggggcc

SEQ ID NO: 1280690 - RNA, 24 nt, Human
ccuccuggguucaaacgauucucc

SEQ ID NO: 1280691 - RNA, 23 nt, Human
ccugccucagccucccgaguagc

SEQ ID NO: 1280692 - RNA, 18 nt, Human
ccuggccucaggugaucc

SEQ ID NO: 1280693 - RNA, 22 nt, Human
ccuggccucaggugauccaccc

SEQ ID NO: 1280694 - RNA, 23 nt, Human
ccuggccucaggugauccacccg

SEQ ID NO: 1280695 - RNA, 23 nt, Human
ccuggguucaaacgauucuccug

SEQ ID NO: 1280696 - RNA, 21 nt, Human
ccuuguugcaaugagcuccug

SEQ ID NO: 1280697 - RNA, 24 nt, Human
cgccauguuggccaggcuggucuu

SEQ ID NO: 1280698 - RNA, 25 nt, Human
cgccauguuggccaggcuggucuuc

SEQ ID NO: 1280699 - RNA, 24 nt, Human
cgccgagcugacucccucccauuu

SEQ ID NO: 1280700 - RNA, 24 nt, Human
cucaggugauccacccgccuuggc

SEQ ID NO: 1280701 - RNA, 18 nt, Human
cuccccaggaauccaccu

SEQ ID NO: 1280702 - RNA, 22 nt, Human
cuccugccucagccucccgagu

SEQ ID NO: 1280703 - RNA, 21 nt, Human
cuccuggguucaaacgauucu

SEQ ID NO: 1280704 - RNA, 23 nt, Human
cugcaaccuccgccuccuggguu

SEQ ID NO: 1280705 - RNA, 18 nt, Human
cugccaggccuggcugug

SEQ ID NO: 1280706 - RNA, 23 nt, Human
cugccucagccucccgaguagcu

SEQ ID NO: 1280707 - RNA, 20 nt, Human
cuggccccccuuguccugac

SEQ ID NO: 1280708 - RNA, 19 nt, Human
cugucgcccaggcuggagu

SEQ ID NO: 1280709 - RNA, 24 nt, Human
cuuccuggccucaggugauccacc

SEQ ID NO: 1280710 - RNA, 24 nt, Human
gaauuacaggcacaugcugucaug

SEQ ID NO: 1280711 - RNA, 23 nt, Human
gacgcagugaagcaggaagguuu

SEQ ID NO: 1280712 - RNA, 18 nt, Human
gagagcggccuguccuug

SEQ ID NO: 1280713 - RNA, 18 nt, Human
gagaugggguuucgccau

SEQ ID NO: 1280714 - RNA, 24 nt, Human
gagaugggguuucgccauguuggc

SEQ ID NO: 1280715 - RNA, 18 nt, Human
gagcggccuguccuugga

SEQ ID NO: 1280716 - RNA, 25 nt, Human
gaguagcuggaauuacaggcacaug

SEQ ID NO: 1280717 - RNA, 22 nt, Human
gcaaccuccgccuccuggguuc

SEQ ID NO: 1280718 - RNA, 23 nt, Human
gcaagaagcucucagagccugag

SEQ ID NO: 1280719 - RNA, 21 nt, Human
gcauugguggucgccgagcug

SEQ ID NO: 1280720 - RNA, 18 nt, Human
gccauguuggccaggcug

SEQ ID NO: 1280721 - RNA, 20 nt, Human
gcccaggcuggagugcagug

SEQ ID NO: 1280722 - RNA, 19 nt, Human
gcccugggugggggcuggg

SEQ ID NO: 1280723 - RNA, 22 nt, Human
gccuuggccucccaaagugcug

SEQ ID NO: 1280724 - RNA, 22 nt, Human
gcgcuuuguucugguguuuguu

SEQ ID NO: 1280725 - RNA, 24 nt, Human
gcuaauuuuuuucucuauuuuuag

SEQ ID NO: 1280726 - RNA, 25 nt, Human
gcucugucgcccaggcuggagugca

SEQ ID NO: 1280727 - RNA, 19 nt, Human
gcuggagugcagugguacu

SEQ ID NO: 1280728 - RNA, 23 nt, Human
ggagucuugcucugucgcccagg

SEQ ID NO: 1280729 - RNA, 23 nt, Human
ggcccagguagugcauacagcaa

SEQ ID NO: 1280730 - RNA, 20 nt, Human
gggccgggguccugguggag

SEQ ID NO: 1280731 - RNA, 21 nt, Human
gggccgggguccugguggagg

SEQ ID NO: 1280732 - RNA, 21 nt, Human
gggccuugugccccccaucug

SEQ ID NO: 1280733 - RNA, 22 nt, Human
gggguuucgccauguuggccag

SEQ ID NO: 1280734 - RNA, 18 nt, Human
ggguuucgccauguuggc

SEQ ID NO: 1280735 - RNA, 23 nt, Human
guagagaugggguuucgccaugu

SEQ ID NO: 1280736 - RNA, 24 nt, Human
gucuugcucugucgcccaggcugg

SEQ ID NO: 1280737 - RNA, 24 nt, Human
gugauccacccgccuuggccuccc

SEQ ID NO: 1280738 - RNA, 21 nt, Human
gugcagggccgggguccuggu

SEQ ID NO: 1280739 - RNA, 21 nt, Human
uaaaagacaugccuggcuucc

SEQ ID NO: 1280740 - RNA, 28 nt, Human
uaauuuuuuucucuauuuuuaguagaga

SEQ ID NO: 1280741 - RNA, 22 nt, Human
uagagaugggguuucgccaugu

SEQ ID NO: 1280742 - RNA, 24 nt, Human
uaguagagaugggguuucgccaug

SEQ ID NO: 1280743 - RNA, 19 nt, Human
ucaaacgauucuccugccu

SEQ ID NO: 1280744 - RNA, 23 nt, Human
ucacugcaaccuccgccuccugg

SEQ ID NO: 1280745 - RNA, 24 nt, Human
ucacugcaaccuccgccuccuggg

SEQ ID NO: 1280746 - RNA, 25 nt, Human
ucacugcaaccuccgccuccugggu

SEQ ID NO: 1280747 - RNA, 27 nt, Human
ucacugcaaccuccgccuccuggguuc

SEQ ID NO: 1280748 - RNA, 22 nt, Human
ucagccucccgaguagcuggaa

SEQ ID NO: 1280749 - RNA, 24 nt, Human
ucccaaagugcugggauuccaggc

SEQ ID NO: 1280750 - RNA, 24 nt, Human
ucccgaguagcuggaauuacaggc

SEQ ID NO: 1280751 - RNA, 23 nt, Human
uccuccugcccucuuuggggccu

SEQ ID NO: 1280752 - RNA, 21 nt, Human
uccuggguucaaacgauucuc

SEQ ID NO: 1280753 - RNA, 24 nt, Human
uccuggguucaaacgauucuccug

SEQ ID NO: 1280754 - RNA, 21 nt, Human
uccuuggagcgcuuuguucug

SEQ ID NO: 1280755 - RNA, 22 nt, Human
ucgccauguuggccaggcuggu

SEQ ID NO: 1280756 - RNA, 24 nt, Human
ucgccauguuggccaggcuggucu

SEQ ID NO: 1280757 - RNA, 22 nt, Human
ucgcccaggcuggagugcagug

SEQ ID NO: 1280758 - RNA, 21 nt, Human
ucucccagaaacagaugcuag

SEQ ID NO: 1280759 - RNA, 24 nt, Human
ucugucgcccaggcuggagugcag

SEQ ID NO: 1280760 - RNA, 23 nt, Human
ucuugcucugucgcccaggcugg

SEQ ID NO: 1280761 - RNA, 24 nt, Human
ucuugcucugucgcccaggcugga

SEQ ID NO: 1280762 - RNA, 20 nt, Human
ugacucccucccauuuccuc

SEQ ID NO: 1280763 - RNA, 22 nt, Human
ugagguggagucuugcucuguc

SEQ ID NO: 1280764 - RNA, 19 nt, Human
ugcagggccgggguccugg

SEQ ID NO: 1280765 - RNA, 18 nt, Human
ugccaucgaggugugggg

SEQ ID NO: 1280766 - RNA, 27 nt, Human
ugcccaaaaacuccauaaagagaagcu

SEQ ID NO: 1280767 - RNA, 24 nt, Human
ugccucagccucccgaguagcugg

SEQ ID NO: 1280768 - RNA, 21 nt, Human
ugccuggcuuccuccugcccu

SEQ ID NO: 1280769 - RNA, 24 nt, Human
ugcucugucgcccaggcuggagug

SEQ ID NO: 1280770 - RNA, 19 nt, Human
ugcugggauuccaggcggg

SEQ ID NO: 1280771 - RNA, 18 nt, Human
uggaauuacaggcacaug

SEQ ID NO: 1280772 - RNA, 19 nt, Human
uggaauuacaggcacaugc

SEQ ID NO: 1280773 - RNA, 19 nt, Human
uggaauuacaggcacaugc

SEQ ID NO: 1280774 - RNA, 21 nt, Human
uggaauuacaggcacaugcug

SEQ ID NO: 1280775 - RNA, 22 nt, Human
uggaauuacaggcacaugcugu

SEQ ID NO: 1280776 - RNA, 23 nt, Human
uggaauuacaggcacaugcuguc

SEQ ID NO: 1280777 - RNA, 24 nt, Human
uggaauuacaggcacaugcuguca

SEQ ID NO: 1280778 - RNA, 24 nt, Human
uggagcgcuuuguucugguguuug

SEQ ID NO: 1280779 - RNA, 21 nt, Human
uggaggucccccaucagcccu

SEQ ID NO: 1280780 - RNA, 23 nt, Human
uggaggucccccaucagcccugg

SEQ ID NO: 1280781 - RNA, 23 nt, Human
uggagucuugcucugucgcccag

SEQ ID NO: 1280782 - RNA, 24 nt, Human
uggagucuugcucugucgcccagg

SEQ ID NO: 1280783 - RNA, 23 nt, Human
uggagugcagugguacuaucucg

SEQ ID NO: 1280784 - RNA, 24 nt, Human
uggagugcagugguacuaucucgg

SEQ ID NO: 1280785 - RNA, 24 nt, Human
uggccucaggugauccacccgccu

SEQ ID NO: 1280786 - RNA, 21 nt, Human
ugggaggggugggagaaggcg

SEQ ID NO: 1280787 - RNA, 19 nt, Human
ugggggcugggauuccccu

SEQ ID NO: 1280788 - RNA, 24 nt, Human
ugggguuucgccauguuggccagg

SEQ ID NO: 1280789 - RNA, 23 nt, Human
uggguucaaacgauucuccugcc

SEQ ID NO: 1280790 - RNA, 24 nt, Human
uggguucaaacgauucuccugccu

SEQ ID NO: 1280791 - RNA, 18 nt, Human
uuaguagagaugggguuu

SEQ ID NO: 1280792 - RNA, 22 nt, Human
uuaguagagaugggguuucgcc

SEQ ID NO: 1280793 - RNA, 24 nt, Human
uuaguagagaugggguuucgccau

SEQ ID NO: 1280794 - RNA, 24 nt, Human
uucaaacgauucuccugccucagc

SEQ ID NO: 1280795 - RNA, 18 nt, Human
uuggccucccaaagugcu

SEQ ID NO: 1280796 - RNA, 20 nt, Human
uuguuuguuuguuuguuuuu

SEQ ID NO: 1280797 - RNA, 26 nt, Human
uuguuuguuuguuuuuguuguuuuuu

SEQ ID NO: 1280798 - RNA, 24 nt, Human
uuucgccauguuggccaggcuggu

SEQ ID NO: 1280799 - RNA, 21 nt, Human
uuucucuauuuuuaguagaga

SEQ ID NO: 1280800 - RNA, 22 nt, Human
uuugagguggagucuugcucug

SEQ ID NO: 1280801 - RNA, 21 nt, Human
uuuucucuauuuuuaguagag

SEQ ID NO: 1280802 - RNA, 24 nt, Human
uuuucucuauuuuuaguagagaug

SEQ ID NO: 1280803 - RNA, 23 nt, Human
uuuuuaguagagaugggguuucg

SEQ ID NO: 1280804 - RNA, 24 nt, Human
uuuuuaguagagaugggguuucgc

SEQ ID NO: 1280805 - RNA, 18 nt, Human
uuuuuugagguggagucu

SEQ ID NO: 1280806 - RNA, 23 nt, Human
aaacuccuggccucaagcagucc

SEQ ID NO: 1280807 - RNA, 19 nt, Human
aaaguacugggauuacacg

SEQ ID NO: 1280808 - RNA, 24 nt, Human
aaaguacugggauuacacguauga

SEQ ID NO: 1280809 - RNA, 18 nt, Human
aagcaguccucuugccuc

SEQ ID NO: 1280810 - RNA, 26 nt, Human
aaguacugggauuacacguaugagcc

SEQ ID NO: 1280811 - RNA, 24 nt, Human
caaaguacugggauuacacguaug

SEQ ID NO: 1280812 - RNA, 21 nt, Human
caagcaguccucuugccucca

SEQ ID NO: 1280813 - RNA, 23 nt, Human
caagcaguccucuugccuccacc

SEQ ID NO: 1280814 - RNA, 21 nt, Human
caauggcagaggaugcgacgg

SEQ ID NO: 1280815 - RNA, 19 nt, Human
ccaaaguacugggauuaca

SEQ ID NO: 1280816 - RNA, 22 nt, Human
ccaaaguacugggauuacacgu

SEQ ID NO: 1280817 - RNA, 24 nt, Human
ccaaaguacugggauuacacguau

SEQ ID NO: 1280818 - RNA, 22 nt, Human
ccucuugccuccaccuuccaaa

SEQ ID NO: 1280819 - RNA, 24 nt, Human
cucaagcaguccucuugccuccac

SEQ ID NO: 1280820 - RNA, 18 nt, Human
cuggccucaagcaguccu

SEQ ID NO: 1280821 - RNA, 18 nt, Human
gauuacacguaugagcca

SEQ ID NO: 1280822 - RNA, 21 nt, Human
gcaguccucuugccuccaccu

SEQ ID NO: 1280823 - RNA, 23 nt, Human
gcugaucugaaacuccuggccuc

SEQ ID NO: 1280824 - RNA, 19 nt, Human
guagugguaacuauccaca

SEQ ID NO: 1280825 - RNA, 19 nt, Human
uacacguaugagccaccca

SEQ ID NO: 1280826 - RNA, 24 nt, Human
uacugggauuacacguaugagcca

SEQ ID NO: 1280827 - RNA, 19 nt, Human
uagagauggaggucuugcu

SEQ ID NO: 1280828 - RNA, 23 nt, Human
uaggaauauuccgagggacaaug

SEQ ID NO: 1280829 - RNA, 23 nt, Human
uauauugcuugggcugaucugaa

SEQ ID NO: 1280830 - RNA, 18 nt, Human
ucuugcuauauugcuugg

SEQ ID NO: 1280831 - RNA, 23 nt, Human
ucuugcuauauugcuugggcuga

SEQ ID NO: 1280832 - RNA, 19 nt, Human
uggcagaggaugcgacgga

SEQ ID NO: 1280833 - RNA, 24 nt, Human
uggccucaagcaguccucuugccu

SEQ ID NO: 1280834 - RNA, 22 nt, Human
ugggauuacacguaugagccac

SEQ ID NO: 1280835 - RNA, 23 nt, Human
ugggauuacacguaugagccacc

SEQ ID NO: 1280836 - RNA, 20 nt, Human
uguagagauggaggucuugc

SEQ ID NO: 1280837 - RNA, 24 nt, Human
uuguagagauggaggucuugcuau

SEQ ID NO: 1280838 - RNA, 19 nt, Human
uuuguagagauggaggucu

SEQ ID NO: 1280839 - RNA, 18 nt, Human
cccacgccuccucucccg

SEQ ID NO: 1280840 - RNA, 18 nt, Human
ccccacgccuccucuccc

SEQ ID NO: 1280841 - RNA, 21 nt, Human
cccccacgccuccucucccgc

SEQ ID NO: 1280842 - RNA, 22 nt, Human
cgacccccacgccuccucuccc

SEQ ID NO: 1280843 - RNA, 22 nt, Human
cucccgcgcaugcgcgucuuac

SEQ ID NO: 1280844 - RNA, 19 nt, Human
aaagugcugggauuacagg

SEQ ID NO: 1280845 - RNA, 24 nt, Human
aaagugcugggauuacaggcaaga

SEQ ID NO: 1280846 - RNA, 24 nt, Human
aaagugcugggauuacagguguga

SEQ ID NO: 1280847 - RNA, 18 nt, Human
aagugcugggauuacagg

SEQ ID NO: 1280848 - RNA, 18 nt, Human
aagugcugggauuacagg

SEQ ID NO: 1280849 - RNA, 19 nt, Human
aagugcugggauuacaggc

SEQ ID NO: 1280850 - RNA, 26 nt, Human
aagugcugggauuacaggcaagagcc

SEQ ID NO: 1280851 - RNA, 19 nt, Human
aagugcugggauuacaggu

SEQ ID NO: 1280852 - RNA, 26 nt, Human
aagugcugggauuacaggugugagcc

SEQ ID NO: 1280853 - RNA, 24 nt, Human
aaguguccgccugccucagccucc

SEQ ID NO: 1280854 - RNA, 18 nt, Human
acagcagagaggccccaa

SEQ ID NO: 1280855 - RNA, 21 nt, Human
acagcagagaggccccaagga

SEQ ID NO: 1280856 - RNA, 18 nt, Human
acaggcaagagccacugc

SEQ ID NO: 1280857 - RNA, 19 nt, Human
acagguaccugccaccacg

SEQ ID NO: 1280858 - RNA, 24 nt, Human
accauguuggccaggcuggucucg

SEQ ID NO: 1280859 - RNA, 20 nt, Human
accgcagcucacugcagcug

SEQ ID NO: 1280860 - RNA, 28 nt, Human
accgcagcucacugcagcuuugcgugca

SEQ ID NO: 1280861 - RNA, 23 nt, Human
acgcaguggcacgaucucggcuc

SEQ ID NO: 1280862 - RNA, 23 nt, Human
acggguuucaccauguuggccag

SEQ ID NO: 1280863 - RNA, 25 nt, Human
acucugucacccaggcuggagugca

SEQ ID NO: 1280864 - RNA, 24 nt, Human
agcgauucuccugccucagucucc

SEQ ID NO: 1280865 - RNA, 19 nt, Human
aggcuggagugcaguggca

SEQ ID NO: 1280866 - RNA, 25 nt, Human
aggcuggagugcaguggcaugaucu

SEQ ID NO: 1280867 - RNA, 19 nt, Human
aggugagugcaggaauugg

SEQ ID NO: 1280868 - RNA, 19 nt, Human
aggugcacaccaccacacc

SEQ ID NO: 1280869 - RNA, 18 nt, Human
aguagcugggauuacagg

SEQ ID NO: 1280870 - RNA, 18 nt, Human
agucuccugaauagcugg

SEQ ID NO: 1280871 - RNA, 23 nt, Human
agugcaguggcaugaccgcagcu

SEQ ID NO: 1280872 - RNA, 24 nt, Human
agugcaguggcaugaccgcagcuc

SEQ ID NO: 1280873 - RNA, 19 nt, Human
agugcaguggcaugaucuc

SEQ ID NO: 1280874 - RNA, 21 nt, Human
agugcaguggcaugaucucag

SEQ ID NO: 1280875 - RNA, 23 nt, Human
agugcaguggcaugaucucagcu

SEQ ID NO: 1280876 - RNA, 24 nt, Human
agugcaguggcaugaucucagcuc

SEQ ID NO: 1280877 - RNA, 18 nt, Human
agugcugggauuacaggc

SEQ ID NO: 1280878 - RNA, 24 nt, Human
auuuuuaguagagacggguuucac

SEQ ID NO: 1280879 - RNA, 24 nt, Human
auuuuuguauuuuuaguagagacg

SEQ ID NO: 1280880 - RNA, 24 nt, Human
caaagcucuaagguggcauggcug

SEQ ID NO: 1280881 - RNA, 27 nt, Human
caaagugcugggauuacaggcaagagc

SEQ ID NO: 1280882 - RNA, 24 nt, Human
caaagugcugggauuacaggugug

SEQ ID NO: 1280883 - RNA, 20 nt, Human
caagcgauucuccugccuca

SEQ ID NO: 1280884 - RNA, 21 nt, Human
caagcgauucuccugccucag

SEQ ID NO: 1280885 - RNA, 21 nt, Human
caaguguccgccugccucagc

SEQ ID NO: 1280886 - RNA, 19 nt, Human
cacaccaccacaccuggcu

SEQ ID NO: 1280887 - RNA, 24 nt, Human
caccacaccuggcuaauuuuugua

SEQ ID NO: 1280888 - RNA, 21 nt, Human
caccauguuggccaggcuggu

SEQ ID NO: 1280889 - RNA, 24 nt, Human
caccauguuggccaggcuggucuc

SEQ ID NO: 1280890 - RNA, 27 nt, Human
caccauguuggccaggcuggucucgaa

SEQ ID NO: 1280891 - RNA, 21 nt, Human
caccgcaaccuccgccuccca

SEQ ID NO: 1280892 - RNA, 22 nt, Human
caccgcaaccuccgccucccag

SEQ ID NO: 1280893 - RNA, 23 nt, Human
cacugcagccucugccuccuggg

SEQ ID NO: 1280894 - RNA, 19 nt, Human
cagccucugccuccugggc

SEQ ID NO: 1280895 - RNA, 23 nt, Human
cagccucugccuccugggcucaa

SEQ ID NO: 1280896 - RNA, 21 nt, Human
cagguaccugccaccacgccu

SEQ ID NO: 1280897 - RNA, 23 nt, Human
caggugauccgcccacuuugucc

SEQ ID NO: 1280898 - RNA, 21 nt, Human
cagucuccugaauagcugggg

SEQ ID NO: 1280899 - RNA, 24 nt, Human
cauguuggccaggcuggucucgaa

SEQ ID NO: 1280900 - RNA, 19 nt, Human
ccaaagugcugggauuaca

SEQ ID NO: 1280901 - RNA, 21 nt, Human
ccaaagugcugggauuacagg

SEQ ID NO: 1280902 - RNA, 21 nt, Human
ccaaagugcugggauuacagg

SEQ ID NO: 1280903 - RNA, 23 nt, Human
ccaaagugcugggauuacaggca

SEQ ID NO: 1280904 - RNA, 24 nt, Human
ccaaagugcugggauuacaggugu

SEQ ID NO: 1280905 - RNA, 21 nt, Human
ccacugcgccuggcuugaagu

SEQ ID NO: 1280906 - RNA, 24 nt, Human
cccaaagugcugggauuacaggca

SEQ ID NO: 1280907 - RNA, 23 nt, Human
cccaagcuggaacgcaguggcac

SEQ ID NO: 1280908 - RNA, 19 nt, Human
cccaggcuggagugcagug

SEQ ID NO: 1280909 - RNA, 23 nt, Human
cccaggcuggagugcaguggcau

SEQ ID NO: 1280910 - RNA, 23 nt, Human
cccagguucaagcgauucuccug

SEQ ID NO: 1280911 - RNA, 24 nt, Human
ccccaaagugcugggauuacaggc

SEQ ID NO: 1280912 - RNA, 18 nt, Human
ccccaaggaggugucuuc

SEQ ID NO: 1280913 - RNA, 20 nt, Human
ccccugggcucaaguguccg

SEQ ID NO: 1280914 - RNA, 23 nt, Human
cccgaguagcugggauuacaggu

SEQ ID NO: 1280915 - RNA, 24 nt, Human
cccgaguagcugggauuacaggua

SEQ ID NO: 1280916 - RNA, 23 nt, Human
cccugggcucaaguguccgccug

SEQ ID NO: 1280917 - RNA, 21 nt, Human
ccgaguagcugggauuacagg

SEQ ID NO: 1280918 - RNA, 23 nt, Human
ccgcaaccuccgccucccagguu

SEQ ID NO: 1280919 - RNA, 24 nt, Human
ccgcaaccuccgccucccagguuc

SEQ ID NO: 1280920 - RNA, 24 nt, Human
ccgccucccagguucaagcgauuc

SEQ ID NO: 1280921 - RNA, 26 nt, Human
ccgccugccucagccucccaaagugc

SEQ ID NO: 1280922 - RNA, 24 nt, Human
ccucccagguucaagcgauucucc

SEQ ID NO: 1280923 - RNA, 19 nt, Human
ccucugccuccugggcuca

SEQ ID NO: 1280924 - RNA, 24 nt, Human
ccugaauagcuggggcuauaggug

SEQ ID NO: 1280925 - RNA, 24 nt, Human
ccugaccucaggugauccgcccac

SEQ ID NO: 1280926 - RNA, 24 nt, Human
ccugccucagccucccaaagugcu

SEQ ID NO: 1280927 - RNA, 22 nt, Human
ccugggcucaaguguccgccug

SEQ ID NO: 1280928 - RNA, 22 nt, Human
ccuugaagacuugggagccagg

SEQ ID NO: 1280929 - RNA, 24 nt, Human
cgcucuguugcccaggcuggagug

SEQ ID NO: 1280930 - RNA, 24 nt, Human
cggagucucgcucuguugcccagg

SEQ ID NO: 1280931 - RNA, 23 nt, Human
cuaauuuuuguauuuuuaguaga

SEQ ID NO: 1280932 - RNA, 20 nt, Human
cucaaguguccgccugccuc

SEQ ID NO: 1280933 - RNA, 24 nt, Human
cucaccgcaaccuccgccucccag

SEQ ID NO: 1280934 - RNA, 24 nt, Human
cucacugcagccucugccuccugg

SEQ ID NO: 1280935 - RNA, 24 nt, Human
cuccugaauagcuggggcuauagg

SEQ ID NO: 1280936 - RNA, 24 nt, Human
cucgcucuguugcccaggcuggag

SEQ ID NO: 1280937 - RNA, 23 nt, Human
cugcagccucugccuccugggcu

SEQ ID NO: 1280938 - RNA, 22 nt, Human
cugccucaccucccgaguagcu

SEQ ID NO: 1280939 - RNA, 24 nt, Human
cugccucagccucccaaagugcug

SEQ ID NO: 1280940 - RNA, 23 nt, Human
cugccucagucuccugaauagcu

SEQ ID NO: 1280941 - RNA, 26 nt, Human
cugcuacuguuuuuuuuuuuuuuuuu

SEQ ID NO: 1280942 - RNA, 24 nt, Human
cuggagugcaguggcaugaucuca

SEQ ID NO: 1280943 - RNA, 19 nt, Human
cugucacccaggcuggagu

SEQ ID NO: 1280944 - RNA, 24 nt, Human
cuuacucugucacccaggcuggag

SEQ ID NO: 1280945 - RNA, 19 nt, Human
cuuguaccuuucugacacu

SEQ ID NO: 1280946 - RNA, 24 nt, Human
gaccucaggugauccgcccacuuu

SEQ ID NO: 1280947 - RNA, 24 nt, Human
gacggguuucaccauguuggccag

SEQ ID NO: 1280948 - RNA, 20 nt, Human
gagacagggucuuacucugu

SEQ ID NO: 1280949 - RNA, 22 nt, Human
gaguagcugggauuacagguac

SEQ ID NO: 1280950 - RNA, 20 nt, Human
gaguccaucuuguaccuuuc

SEQ ID NO: 1280951 - RNA, 18 nt, Human
gauuacaggcaagagcca

SEQ ID NO: 1280952 - RNA, 22 nt, Human
gauuacaggcaagagccacugc

SEQ ID NO: 1280953 - RNA, 22 nt, Human
gauuacaggcaagagccacugc

SEQ ID NO: 1280954 - RNA, 18 nt, Human
gauuacaggugugagcca

SEQ ID NO: 1280955 - RNA, 22 nt, Human
gauuacaggugugagccacugc

SEQ ID NO: 1280956 - RNA, 22 nt, Human
gauuacaggugugagccacugc

SEQ ID NO: 1280957 - RNA, 19 nt, Human
gcaggaauuggguuuagaa

SEQ ID NO: 1280958 - RNA, 23 nt, Human
gcccaagcuggaacgcaguggca

SEQ ID NO: 1280959 - RNA, 24 nt, Human
gcccaggcuggagugcaguggcau

SEQ ID NO: 1280960 - RNA, 18 nt, Human
gccccaaggaggugucuu

SEQ ID NO: 1280961 - RNA, 24 nt, Human
gccucagucuccugaauagcuggg

SEQ ID NO: 1280962 - RNA, 19 nt, Human
gcuacuguuuuuuuuuuuu

SEQ ID NO: 1280963 - RNA, 20 nt, Human
gcuacuguuuuuuuuuuuuu

SEQ ID NO: 1280964 - RNA, 21 nt, Human
gcucacugcagccucugccuc

SEQ ID NO: 1280965 - RNA, 25 nt, Human
gcucugucgcccaagcuggaacgca

SEQ ID NO: 1280966 - RNA, 25 nt, Human
gcucuguugcccaggcuggagugca

SEQ ID NO: 1280967 - RNA, 19 nt, Human
gcuggaacgcaguggcacg

SEQ ID NO: 1280968 - RNA, 19 nt, Human
gcuggagugcaguggcaug

SEQ ID NO: 1280969 - RNA, 23 nt, Human
gcuggagugcaguggcaugaccg

SEQ ID NO: 1280970 - RNA, 23 nt, Human
gcuggucucgaacuccugaccuc

SEQ ID NO: 1280971 - RNA, 18 nt, Human
ggagccaggaggggcaca

SEQ ID NO: 1280972 - RNA, 23 nt, Human
ggagucucgcucuguugcccagg

SEQ ID NO: 1280973 - RNA, 22 nt, Human
ggauuacaggcaagagccacug

SEQ ID NO: 1280974 - RNA, 20 nt, Human
ggcggagucucgcucuguug

SEQ ID NO: 1280975 - RNA, 24 nt, Human
ggcucaaguguccgccugccucag

SEQ ID NO: 1280976 - RNA, 24 nt, Human
ggcuggucucgaacuccugaccuc

SEQ ID NO: 1280977 - RNA, 21 nt, Human
ggcuugaaguuuuuaaagagc

SEQ ID NO: 1280978 - RNA, 19 nt, Human
ggguuuagaaacaaagcuu

SEQ ID NO: 1280979 - RNA, 22 nt, Human
ggguuucaccauguuggccagg

SEQ ID NO: 1280980 - RNA, 19 nt, Human
ggucucgaacuccugaccu

SEQ ID NO: 1280981 - RNA, 18 nt, Human
guagcugggauuacaggu

SEQ ID NO: 1280982 - RNA, 24 nt, Human
gucucgcucuguugcccaggcugg

SEQ ID NO: 1280983 - RNA, 23 nt, Human
guguccgccugccucagccuccc

SEQ ID NO: 1280984 - RNA, 22 nt, Human
gugucuuguuccucuaguguca

SEQ ID NO: 1280985 - RNA, 22 nt, Human
uaaaaguugaaguuggaagcag

SEQ ID NO: 1280986 - RNA, 24 nt, Human
uaauuuuuguauuuuuaguagaga

SEQ ID NO: 1280987 - RNA, 23 nt, Human
uacaaagcucuaagguggcaugg

SEQ ID NO: 1280988 - RNA, 22 nt, Human
uacagguaccugccaccacgcc

SEQ ID NO: 1280989 - RNA, 22 nt, Human
uacaggugugagccacugcgcc

SEQ ID NO: 1280990 - RNA, 23 nt, Human
uacaggugugagccacugcgccu

SEQ ID NO: 1280991 - RNA, 24 nt, Human
uacucugucacccaggcuggagug

SEQ ID NO: 1280992 - RNA, 21 nt, Human
uagagacggguuucaccaugu

SEQ ID NO: 1280993 - RNA, 23 nt, Human
uaggagggucacaccauguagcg

SEQ ID NO: 1280994 - RNA, 21 nt, Human
uaggugcacaccaccacaccu

SEQ ID NO: 1280995 - RNA, 24 nt, Human
uaggugcacaccaccacaccuggc

SEQ ID NO: 1280996 - RNA, 23 nt, Human
uaguagagacggguuucaccaug

SEQ ID NO: 1280997 - RNA, 22 nt, Human
ucacccaggcuggagugcagug

SEQ ID NO: 1280998 - RNA, 24 nt, Human
ucaccgcaaccuccgccucccagg

SEQ ID NO: 1280999 - RNA, 25 nt, Human
ucaccgcaaccuccgccucccaggu

SEQ ID NO: 1281000 - RNA, 27 nt, Human
ucaccgcaaccuccgccucccagguuc

SEQ ID NO: 1281001 - RNA, 24 nt, Human
ucacugcagccucugccuccuggg

SEQ ID NO: 1281002 - RNA, 25 nt, Human
ucacugcagccucugccuccugggc

SEQ ID NO: 1281003 - RNA, 24 nt, Human
ucacugcagcugugaaccccuggg

SEQ ID NO: 1281004 - RNA, 27 nt, Human
ucagcucaccgcaaccuccgccuccca

SEQ ID NO: 1281005 - RNA, 23 nt, Human
ucagucuccugaauagcuggggc

SEQ ID NO: 1281006 - RNA, 20 nt, Human
ucaugcuuaaaaguugaagu

SEQ ID NO: 1281007 - RNA, 23 nt, Human
ucccaaagugcugggauuacagg

SEQ ID NO: 1281008 - RNA, 21 nt, Human
ucccagguucaagcgauucuc

SEQ ID NO: 1281009 - RNA, 24 nt, Human
ucccagguucaagcgauucuccug

SEQ ID NO: 1281010 - RNA, 20 nt, Human
uccccaaagugcugggauua

SEQ ID NO: 1281011 - RNA, 24 nt, Human
uccccaaagugcugggauuacagg

SEQ ID NO: 1281012 - RNA, 23 nt, Human
ucccgaguagcugggauuacagg

SEQ ID NO: 1281013 - RNA, 24 nt, Human
ucccgaguagcugggauuacaggu

SEQ ID NO: 1281014 - RNA, 24 nt, Human
uccugaauagcuggggcuauaggu

SEQ ID NO: 1281015 - RNA, 21 nt, Human
uccugggcucaagccauucuc

SEQ ID NO: 1281016 - RNA, 22 nt, Human
uccugggcucaagccauucucc

SEQ ID NO: 1281017 - RNA, 22 nt, Human
uccugggcucaagccauucucc

SEQ ID NO: 1281018 - RNA, 24 nt, Human
uccugggcucaagccauucuccug

SEQ ID NO: 1281019 - RNA, 24 nt, Human
ucgcucuguugcccaggcuggagu

SEQ ID NO: 1281020 - RNA, 23 nt, Human
ucucgaacuccugaccucaggug

SEQ ID NO: 1281021 - RNA, 19 nt, Human
ucucgcucuguugcccagg

SEQ ID NO: 1281022 - RNA, 22 nt, Human
ucucgcucuguugcccaggcug

SEQ ID NO: 1281023 - RNA, 23 nt, Human
ucucgcucuguugcccaggcugg

SEQ ID NO: 1281024 - RNA, 24 nt, Human
ucucgcucuguugcccaggcugga

SEQ ID NO: 1281025 - RNA, 26 nt, Human
ucucgcucuguugcccaggcuggagu

SEQ ID NO: 1281026 - RNA, 24 nt, Human
ucugucacccaggcuggagugcag

SEQ ID NO: 1281027 - RNA, 18 nt, Human
ucuguugcccaggcugga

SEQ ID NO: 1281028 - RNA, 24 nt, Human
ucuguugcccaggcuggagugcag

SEQ ID NO: 1281029 - RNA, 23 nt, Human
ucuuacucugucacccaggcugg

SEQ ID NO: 1281030 - RNA, 24 nt, Human
ucuuacucugucacccaggcugga

SEQ ID NO: 1281031 - RNA, 23 nt, Human
ucuugcucugucgcccaagcugg

SEQ ID NO: 1281032 - RNA, 24 nt, Human
ucuugcucugucgcccaagcugga

SEQ ID NO: 1281033 - RNA, 19 nt, Human
ucuugcuguguugcccaca

SEQ ID NO: 1281034 - RNA, 23 nt, Human
ugaaccccugggcucaagugucc

SEQ ID NO: 1281035 - RNA, 22 nt, Human
ugaaguuggaagcaguucccua

SEQ ID NO: 1281036 - RNA, 24 nt, Human
ugaaguuggaagcaguucccuagg

SEQ ID NO: 1281037 - RNA, 19 nt, Human
ugacagcagagaggcccca

SEQ ID NO: 1281038 - RNA, 20 nt, Human
ugaccgcagcucacugcagc

SEQ ID NO: 1281039 - RNA, 18 nt, Human
ugaccucaggugauccgc

SEQ ID NO: 1281040 - RNA, 21 nt, Human
ugaccucaggugauccgccca

SEQ ID NO: 1281041 - RNA, 22 nt, Human
ugaccucaggugauccgcccac

SEQ ID NO: 1281042 - RNA, 24 nt, Human
ugaccucaggugauccgcccacuu

SEQ ID NO: 1281043 - RNA, 19 nt, Human
ugagacagggucuuacucu

SEQ ID NO: 1281044 - RNA, 22 nt, Human
ugagacagggucuuacucuguc

SEQ ID NO: 1281045 - RNA, 22 nt, Human
ugaggcggagucucgcucuguu

SEQ ID NO: 1281046 - RNA, 18 nt, Human
ugaggucagauuucccgg

SEQ ID NO: 1281047 - RNA, 24 nt, Human
ugauccgcccacuuuguccucccc

SEQ ID NO: 1281048 - RNA, 18 nt, Human
ugcccaggcuggagugca

SEQ ID NO: 1281049 - RNA, 22 nt, Human
ugcccaggcuggagugcagugg

SEQ ID NO: 1281050 - RNA, 24 nt, Human
ugcccaggcuggagugcaguggca

SEQ ID NO: 1281051 - RNA, 19 nt, Human
ugccucaccucccgaguag

SEQ ID NO: 1281052 - RNA, 23 nt, Human
ugccucaccucccgaguagcugg

SEQ ID NO: 1281053 - RNA, 24 nt, Human
ugccucagccucccaaagugcugg

SEQ ID NO: 1281054 - RNA, 24 nt, Human
ugccucagucuccugaauagcugg

SEQ ID NO: 1281055 - RNA, 19 nt, Human
ugccuccugggcucaagcc

SEQ ID NO: 1281056 - RNA, 19 nt, Human
ugcucugucgcccaagcug

SEQ ID NO: 1281057 - RNA, 22 nt, Human
ugcugggauuacaggcaagagc

SEQ ID NO: 1281058 - RNA, 24 nt, Human
ugcugggauuacaggugugagcca

SEQ ID NO: 1281059 - RNA, 24 nt, Human
uggaacgcaguggcacgaucucgg

SEQ ID NO: 1281060 - RNA, 20 nt, Human
uggagugcaguggcaugacc

SEQ ID NO: 1281061 - RNA, 21 nt, Human
uggagugcaguggcaugaccg

SEQ ID NO: 1281062 - RNA, 19 nt, Human
uggagugcaguggcaugau

SEQ ID NO: 1281063 - RNA, 24 nt, Human
uggagugcaguggcaugaucucag

SEQ ID NO: 1281064 - RNA, 23 nt, Human
uggcaugaccgcagcucacugca

SEQ ID NO: 1281065 - RNA, 24 nt, Human
uggcaugaucucagcucaccgcaa

SEQ ID NO: 1281066 - RNA, 19 nt, Human
uggcauggcugugacagca

SEQ ID NO: 1281067 - RNA, 24 nt, Human
uggccaggcuggucucgaacuccu

SEQ ID NO: 1281068 - RNA, 19 nt, Human
ugggagccaggaggggcac

SEQ ID NO: 1281069 - RNA, 21 nt, Human
ugggagccaggaggggcacag

SEQ ID NO: 1281070 - RNA, 22 nt, Human
ugggauuacaggcaagagccac

SEQ ID NO: 1281071 - RNA, 22 nt, Human
ugggauuacaggcaagagccac

SEQ ID NO: 1281072 - RNA, 24 nt, Human
ugggauuacaggcaagagccacug

SEQ ID NO: 1281073 - RNA, 24 nt, Human
ugggauuacaggcaagagccacug

SEQ ID NO: 1281074 - RNA, 21 nt, Human
ugggauuacagguaccugcca

SEQ ID NO: 1281075 - RNA, 22 nt, Human
ugggauuacagguaccugccac

SEQ ID NO: 1281076 - RNA, 24 nt, Human
ugggauuacagguaccugccacca

SEQ ID NO: 1281077 - RNA, 18 nt, Human
ugggauuacaggugugag

SEQ ID NO: 1281078 - RNA, 19 nt, Human
ugggauuacaggugugagc

SEQ ID NO: 1281079 - RNA, 21 nt, Human
ugggauuacaggugugagcca

SEQ ID NO: 1281080 - RNA, 22 nt, Human
ugggauuacaggugugagccac

SEQ ID NO: 1281081 - RNA, 22 nt, Human
ugggauuacaggugugagccac

SEQ ID NO: 1281082 - RNA, 24 nt, Human
ugggauuacaggugugagccacug

SEQ ID NO: 1281083 - RNA, 23 nt, Human
uggggucuugcuguguugcccac

SEQ ID NO: 1281084 - RNA, 26 nt, Human
uguauuuauuuauuuauuuauuuauu

SEQ ID NO: 1281085 - RNA, 23 nt, Human
ugucuuguuccucuagugucagg

SEQ ID NO: 1281086 - RNA, 24 nt, Human
uguguugcccacacuugucuugag

SEQ ID NO: 1281087 - RNA, 24 nt, Human
uuaggaggcuucuguccacaucau

SEQ ID NO: 1281088 - RNA, 23 nt, Human
uuaguagagacggguuucaccau

SEQ ID NO: 1281089 - RNA, 24 nt, Human
uuaguagagacggguuucaccaug

SEQ ID NO: 1281090 - RNA, 27 nt, Human
uuauuuauuuauuuauuuauuuuuuug

SEQ ID NO: 1281091 - RNA, 21 nt, Human
uucaagcgauucuccugccuc

SEQ ID NO: 1281092 - RNA, 23 nt, Human
uucaagcgauucuccugccucag

SEQ ID NO: 1281093 - RNA, 25 nt, Human
uucaagcgauucuccugccucaguc

SEQ ID NO: 1281094 - RNA, 18 nt, Human
uucccuaggagggucaca

SEQ ID NO: 1281095 - RNA, 21 nt, Human
uucugugagacagggucuuac

SEQ ID NO: 1281096 - RNA, 21 nt, Human
uugagacagucuugcucuguc

SEQ ID NO: 1281097 - RNA, 24 nt, Human
uugcccaggcuggagugcaguggc

SEQ ID NO: 1281098 - RNA, 24 nt, Human
uuuaguagagacggguuucaccau

SEQ ID NO: 1281099 - RNA, 24 nt, Human
uuucaccauguuggccaggcuggu

SEQ ID NO: 1281100 - RNA, 23 nt, Human
uuucccgggagaaucuucuccuu

SEQ ID NO: 1281101 - RNA, 20 nt, Human
uuuuuguauuuuuaguagag

SEQ ID NO: 1281102 - RNA, 23 nt, Human
uuuuuuuuuuuuugagacagucu

SEQ ID NO: 1281103 - RNA, 18 nt, Human
uuuuuuuuuuuuuuuuug

SEQ ID NO: 1281104 - RNA, 18 nt, Human
aaaccccagcccgcaccc

SEQ ID NO: 1281105 - RNA, 23 nt, Human
aaauuaucggcgcucaagcgcaa

SEQ ID NO: 1281106 - RNA, 21 nt, Human
aagagcugccuuggggggugg

SEQ ID NO: 1281107 - RNA, 22 nt, Human
accacaguuccauuuguacauc

SEQ ID NO: 1281108 - RNA, 18 nt, Human
accccagagccagaagag

SEQ ID NO: 1281109 - RNA, 24 nt, Human
accgagaacaaaccagcacccucc

SEQ ID NO: 1281110 - RNA, 21 nt, Human
acuucugcuaccauuauggcc

SEQ ID NO: 1281111 - RNA, 21 nt, Human
agaaaaccccagcccgcaccc

SEQ ID NO: 1281112 - RNA, 21 nt, Human
agcaacuccugauguggacaa

SEQ ID NO: 1281113 - RNA, 25 nt, Human
aggaagcccaguuugaaaaacaaac

SEQ ID NO: 1281114 - RNA, 22 nt, Human
cacgggccagggcuucccgagg

SEQ ID NO: 1281115 - RNA, 20 nt, Human
cagacagccaagggauccau

SEQ ID NO: 1281116 - RNA, 22 nt, Human
cagccagagcccagggcugccc

SEQ ID NO: 1281117 - RNA, 24 nt, Human
caggagaaaaccccagcccgcacc

SEQ ID NO: 1281118 - RNA, 20 nt, Human
ccacuggccgaccccagagc

SEQ ID NO: 1281119 - RNA, 24 nt, Human
ccagagccagaagaguagcaagaa

SEQ ID NO: 1281120 - RNA, 18 nt, Human
ccagcccgcacccucacc

SEQ ID NO: 1281121 - RNA, 21 nt, Human
cccaggagaaaaccccagccc

SEQ ID NO: 1281122 - RNA, 22 nt, Human
ccccagagccagaagaguagca

SEQ ID NO: 1281123 - RNA, 19 nt, Human
ccccgcgcgccguucaccg

SEQ ID NO: 1281124 - RNA, 20 nt, Human
ccccgcgcgccguucaccga

SEQ ID NO: 1281125 - RNA, 22 nt, Human
cccgcacccucaccacaguucc

SEQ ID NO: 1281126 - RNA, 21 nt, Human
ccucagacagccaagggaucc

SEQ ID NO: 1281127 - RNA, 22 nt, Human
cgagaacaaaccagcacccucc

SEQ ID NO: 1281128 - RNA, 21 nt, Human
cgcacccucaccacaguucca

SEQ ID NO: 1281129 - RNA, 20 nt, Human
cuccacuuacuuucccgauc

SEQ ID NO: 1281130 - RNA, 20 nt, Human
cuccugaauccacuggccga

SEQ ID NO: 1281131 - RNA, 24 nt, Human
cuucugcuaccauuauggccacaa

SEQ ID NO: 1281132 - RNA, 20 nt, Human
gaacaaaccagcacccuccg

SEQ ID NO: 1281133 - RNA, 19 nt, Human
gaauccacuggccgacccc

SEQ ID NO: 1281134 - RNA, 20 nt, Human
gcccaggagaaaaccccagc

SEQ ID NO: 1281135 - RNA, 20 nt, Human
gggaauaggcaguugggggg

SEQ ID NO: 1281136 - RNA, 20 nt, Human
gggggugggaggcuaaggaa

SEQ ID NO: 1281137 - RNA, 22 nt, Human
ggugacgcccaggagaaaaccc

SEQ ID NO: 1281138 - RNA, 21 nt, Human
ucaccgagaacaaaccagcac

SEQ ID NO: 1281139 - RNA, 23 nt, Human
ucaccugagcgugcucacuacuu

SEQ ID NO: 1281140 - RNA, 18 nt, Human
ucauugagaccauggaau

SEQ ID NO: 1281141 - RNA, 21 nt, Human
uccacuggccgaccccagagc

SEQ ID NO: 1281142 - RNA, 23 nt, Human
uccacuggccgaccccagagccc

SEQ ID NO: 1281143 - RNA, 20 nt, Human
uccauuuguacauccaggaa

SEQ ID NO: 1281144 - RNA, 21 nt, Human
uccccagccagagcccagggc

SEQ ID NO: 1281145 - RNA, 22 nt, Human
uccugaauccacuggccgaccc

SEQ ID NO: 1281146 - RNA, 20 nt, Human
ucuucugggugggcccugga

SEQ ID NO: 1281147 - RNA, 23 nt, Human
ugaaaaacaaaccacgccuguaa

SEQ ID NO: 1281148 - RNA, 23 nt, Human
ugacgcccaggagaaaaccccag

SEQ ID NO: 1281149 - RNA, 18 nt, Human
ugccuuggggggugggag

SEQ ID NO: 1281150 - RNA, 20 nt, Human
uggagcaguccucagacagc

SEQ ID NO: 1281151 - RNA, 21 nt, Human
uggaugaaaagagcugccuug

SEQ ID NO: 1281152 - RNA, 27 nt, Human
uggauucccgcacuucuggagcagucc

SEQ ID NO: 1281153 - RNA, 24 nt, Human
ugggcagugggaauaggcaguugg

SEQ ID NO: 1281154 - RNA, 20 nt, Human
uggggggugggaggcuaagg

SEQ ID NO: 1281155 - RNA, 22 nt, Human
uggggggugggaggcuaaggaa

SEQ ID NO: 1281156 - RNA, 24 nt, Human
uuaaggacaaaagcgugaguccau

SEQ ID NO: 1281157 - RNA, 21 nt, Human
uuuuggcgucaugggaacucc

SEQ ID NO: 1281158 - RNA, 23 nt, Human
uuuuuuuuuuuuuuuuuuuaugg

SEQ ID NO: 1281159 - RNA, 18 nt, Human
aaaauuaaaacaucagcc

SEQ ID NO: 1281160 - RNA, 20 nt, Human
aacauagugagaccccccca

SEQ ID NO: 1281161 - RNA, 23 nt, Human
aacauagugagacccccccaucu

SEQ ID NO: 1281162 - RNA, 25 nt, Human
aagaagaaaaaguagagagacacga

SEQ ID NO: 1281163 - RNA, 21 nt, Human
aagaagaagaaaaaguagaga

SEQ ID NO: 1281164 - RNA, 23 nt, Human
aagaggccaagagacaugguggg

SEQ ID NO: 1281165 - RNA, 20 nt, Human
aaugucaaaagaaugaaaug

SEQ ID NO: 1281166 - RNA, 21 nt, Human
acaucacagugcucaaggagc

SEQ ID NO: 1281167 - RNA, 25 nt, Human
agaaaaaguagagagacacgaggac

SEQ ID NO: 1281168 - RNA, 21 nt, Human
agaagaagaaaaaguagagag

SEQ ID NO: 1281169 - RNA, 22 nt, Human
agacccccccaucucugcaaaa

SEQ ID NO: 1281170 - RNA, 21 nt, Human
agacucaacaccaaaccagaa

SEQ ID NO: 1281171 - RNA, 23 nt, Human
agcaagaagaagaaaaaguagag

SEQ ID NO: 1281172 - RNA, 25 nt, Human
agcaagaagaagaaaaaguagagag

SEQ ID NO: 1281173 - RNA, 22 nt, Human
agccugggcaacauagugagac

SEQ ID NO: 1281174 - RNA, 23 nt, Human
agccugggcaacauagugagacc

SEQ ID NO: 1281175 - RNA, 24 nt, Human
agccugggcaacauagugagaccc

SEQ ID NO: 1281176 - RNA, 20 nt, Human
agcuucuugggaggcugagg

SEQ ID NO: 1281177 - RNA, 24 nt, Human
agcuucuugggaggcugagguggg

SEQ ID NO: 1281178 - RNA, 19 nt, Human
aggcagcaggagagagacu

SEQ ID NO: 1281179 - RNA, 22 nt, Human
aggccaagagacaugacuauga

SEQ ID NO: 1281180 - RNA, 24 nt, Human
aggcugaggugggaggauugcuug

SEQ ID NO: 1281181 - RNA, 22 nt, Human
aggugggaggauugcuugagcu

SEQ ID NO: 1281182 - RNA, 23 nt, Human
agguugaggcugcagugagccau

SEQ ID NO: 1281183 - RNA, 24 nt, Human
agugagccauugcauuccagccug

SEQ ID NO: 1281184 - RNA, 18 nt, Human
auacuggacccucccaag

SEQ ID NO: 1281185 - RNA, 18 nt, Human
augucaaaagaaugaaau

SEQ ID NO: 1281186 - RNA, 18 nt, Human
auugcauuccagccuggg

SEQ ID NO: 1281187 - RNA, 24 nt, Human
auugcauuccagccugggucacgg

SEQ ID NO: 1281188 - RNA, 19 nt, Human
auugcuugagcucaggagg

SEQ ID NO: 1281189 - RNA, 20 nt, Human
caaaauuaaaacaucagccg

SEQ ID NO: 1281190 - RNA, 22 nt, Human
caaaauuaaaacaucagccgac

SEQ ID NO: 1281191 - RNA, 23 nt, Human
cagcagaccgagucgaaaucuga

SEQ ID NO: 1281192 - RNA, 23 nt, Human
caucuuuaucuugagagaggaag

SEQ ID NO: 1281193 - RNA, 23 nt, Human
cauuccagccugggucacggagc

SEQ ID NO: 1281194 - RNA, 18 nt, Human
cauugcauuccagccugg

SEQ ID NO: 1281195 - RNA, 19 nt, Human
cauugcauuccagccuggg

SEQ ID NO: 1281196 - RNA, 20 nt, Human
cauugcauuccagccugggu

SEQ ID NO: 1281197 - RNA, 22 nt, Human
cauugcauuccagccuggguca

SEQ ID NO: 1281198 - RNA, 20 nt, Human
ccauugcauuccagccuggg

SEQ ID NO: 1281199 - RNA, 21 nt, Human
ccauugcauuccagccugggu

SEQ ID NO: 1281200 - RNA, 22 nt, Human
ccauugcauuccagccuggguc

SEQ ID NO: 1281201 - RNA, 24 nt, Human
ccauugcauuccagccugggucac

SEQ ID NO: 1281202 - RNA, 25 nt, Human
cccgccccggcccccaccucgggag

SEQ ID NO: 1281203 - RNA, 21 nt, Human
cccggcccccaccucgggagc

SEQ ID NO: 1281204 - RNA, 22 nt, Human
ccucauacuggacccucccaag

SEQ ID NO: 1281205 - RNA, 24 nt, Human
cgagaccagccugggcaacauagu

SEQ ID NO: 1281206 - RNA, 24 nt, Human
cgccccggcccccaccucgggagc

SEQ ID NO: 1281207 - RNA, 18 nt, Human
cugcagugagccauugca

SEQ ID NO: 1281208 - RNA, 21 nt, Human
cuuagcacugaacucgucaca

SEQ ID NO: 1281209 - RNA, 24 nt, Human
gaccguguccccauccagcaagac

SEQ ID NO: 1281210 - RNA, 22 nt, Human
gagccucccacggcccgcccag

SEQ ID NO: 1281211 - RNA, 24 nt, Human
gaggugggaggauugcuugagcuc

SEQ ID NO: 1281212 - RNA, 24 nt, Human
gcaggagagagacucaacaccaaa

SEQ ID NO: 1281213 - RNA, 24 nt, Human
gcauuccagccugggucacggagc

SEQ ID NO: 1281214 - RNA, 19 nt, Human
gccauugcauuccagccug

SEQ ID NO: 1281215 - RNA, 24 nt, Human
gcucaggagguugaggcugcagug

SEQ ID NO: 1281216 - RNA, 24 nt, Human
gcuugagcucaggagguugaggcu

SEQ ID NO: 1281217 - RNA, 21 nt, Human
ggagccucccacggcccgccc

SEQ ID NO: 1281218 - RNA, 22 nt, Human
ggaggauugcuugagcucagga

SEQ ID NO: 1281219 - RNA, 27 nt, Human
gucauccucucaccucauacuggaccc

SEQ ID NO: 1281220 - RNA, 25 nt, Human
uaaaaaccucagaucagcagaccga

SEQ ID NO: 1281221 - RNA, 20 nt, Human
uaaaauauucaaauaauguc

SEQ ID NO: 1281222 - RNA, 24 nt, Human
uagagagacacgaggacacacaca

SEQ ID NO: 1281223 - RNA, 23 nt, Human
uagcuucuugggaggcugaggug

SEQ ID NO: 1281224 - RNA, 24 nt, Human
uagcuucuugggaggcugaggugg

SEQ ID NO: 1281225 - RNA, 22 nt, Human
uagugagacccccccaucucug

SEQ ID NO: 1281226 - RNA, 22 nt, Human
ucaaagcaaguauugcuuuacc

SEQ ID NO: 1281227 - RNA, 19 nt, Human
ucacggagcugguggccag

SEQ ID NO: 1281228 - RNA, 24 nt, Human
ucagcagaccgagucgaaaucuga

SEQ ID NO: 1281229 - RNA, 19 nt, Human
ucccaaggaggaugugacc

SEQ ID NO: 1281230 - RNA, 21 nt, Human
ucucagguuuccuacauggcu

SEQ ID NO: 1281231 - RNA, 23 nt, Human
ugaaaugauagcgauauagccaa

SEQ ID NO: 1281232 - RNA, 23 nt, Human
ugaaugcaguccgucauaugacc

SEQ ID NO: 1281233 - RNA, 21 nt, Human
ugagagaggaagaggccaaga

SEQ ID NO: 1281234 - RNA, 20 nt, Human
ugaggugggaggauugcuug

SEQ ID NO: 1281235 - RNA, 22 nt, Human
ugaggugggaggauugcuugag

SEQ ID NO: 1281236 - RNA, 22 nt, Human
ugaggugggaggauugcuugag

SEQ ID NO: 1281237 - RNA, 23 nt, Human
ugaggugggaggauugcuugagc

SEQ ID NO: 1281238 - RNA, 24 nt, Human
ugaggugggaggauugcuugagcu

SEQ ID NO: 1281239 - RNA, 20 nt, Human
ugcauuccagccugggucac

SEQ ID NO: 1281240 - RNA, 18 nt, Human
ugcucaaggagccggcag

SEQ ID NO: 1281241 - RNA, 22 nt, Human
ugggaggcugaggugggaggau

SEQ ID NO: 1281242 - RNA, 24 nt, Human
ugggaggcugaggugggaggauug

SEQ ID NO: 1281243 - RNA, 20 nt, Human
uggugguguguacauguggu

SEQ ID NO: 1281244 - RNA, 21 nt, Human
uguccccauccagcaagacca

SEQ ID NO: 1281245 - RNA, 20 nt, Human
ugugaccaaauguuugcaga

SEQ ID NO: 1281246 - RNA, 24 nt, Human
uugcuugagcucaggagguugagg

SEQ ID NO: 1281247 - RNA, 20 nt, Human
uugggaggcugaggugggag

SEQ ID NO: 1281248 - RNA, 19 nt, Human
uuuaacauaccccuuggcc

SEQ ID NO: 1281249 - RNA, 24 nt, Human
uuuauuagucuuauuuuccaguaa

SEQ ID NO: 1281250 - RNA, 20 nt, Human
aaaaccugagauugugaaga

SEQ ID NO: 1281251 - RNA, 24 nt, Human
aaaggagaaauguugaacagagag

SEQ ID NO: 1281252 - RNA, 24 nt, Human
aaagugcugggauuacagguguga

SEQ ID NO: 1281253 - RNA, 21 nt, Human
aacauccuacaaugccccgga

SEQ ID NO: 1281254 - RNA, 20 nt, Human
aagaaaaggcagacucauga

SEQ ID NO: 1281255 - RNA, 24 nt, Human
aagaaaaggcagacucaugacuga

SEQ ID NO: 1281256 - RNA, 21 nt, Human
aagaaugauccagccccaaau

SEQ ID NO: 1281257 - RNA, 25 nt, Human
aagcgauccucccaccucagccucc

SEQ ID NO: 1281258 - RNA, 18 nt, Human
aagugcugggauuacagg

SEQ ID NO: 1281259 - RNA, 19 nt, Human
aagugcugggauuacaggu

SEQ ID NO: 1281260 - RNA, 22 nt, Human
aauagugcugaaagugagagac

SEQ ID NO: 1281261 - RNA, 19 nt, Human
acagcuguccuaagacuuu

SEQ ID NO: 1281262 - RNA, 24 nt, Human
acccugauuccaucuuagagauca

SEQ ID NO: 1281263 - RNA, 24 nt, Human
acucuauccagccucaacuguuuu

SEQ ID NO: 1281264 - RNA, 19 nt, Human
acugcagccucuaccuccu

SEQ ID NO: 1281265 - RNA, 24 nt, Human
agcguccacuuuucuccccugggc

SEQ ID NO: 1281266 - RNA, 18 nt, Human
aggcccugagcgugacau

SEQ ID NO: 1281267 - RNA, 22 nt, Human
aguacagaguucuggagagaga

SEQ ID NO: 1281268 - RNA, 23 nt, Human
aguagcugagaccacaggcgugu

SEQ ID NO: 1281269 - RNA, 18 nt, Human
agugagggguucauguac

SEQ ID NO: 1281270 - RNA, 20 nt, Human
agugcaguggugcaaucccg

SEQ ID NO: 1281271 - RNA, 21 nt, Human
aguggggcugggagguggcug

SEQ ID NO: 1281272 - RNA, 22 nt, Human
aucacuuugcaauaaaaccuga

SEQ ID NO: 1281273 - RNA, 19 nt, Human
auggagcaguaaguacaga

SEQ ID NO: 1281274 - RNA, 24 nt, Human
caaagugcugggauuacaggugug

SEQ ID NO: 1281275 - RNA, 27 nt, Human
caagcgauccucccaccucagccuccc

SEQ ID NO: 1281276 - RNA, 24 nt, Human
caaggucuugcuauuuugcccagg

SEQ ID NO: 1281277 - RNA, 19 nt, Human
caaucucugguuucuuugc

SEQ ID NO: 1281278 - RNA, 20 nt, Human
cacauauuuaugaaaaugcc

SEQ ID NO: 1281279 - RNA, 24 nt, Human
caccucagccucccgaguagcuga

SEQ ID NO: 1281280 - RNA, 21 nt, Human
caccuggcuaauuuuuuuccc

SEQ ID NO: 1281281 - RNA, 21 nt, Human
cacguguggucagcaaaucca

SEQ ID NO: 1281282 - RNA, 23 nt, Human
cacugcagccucuaccuccuggg

SEQ ID NO: 1281283 - RNA, 21 nt, Human
cacuuugcaauaaaaccugag

SEQ ID NO: 1281284 - RNA, 21 nt, Human
cacuuuucuccccugggccau

SEQ ID NO: 1281285 - RNA, 20 nt, Human
cagcaucuuuuaaccucagu

SEQ ID NO: 1281286 - RNA, 23 nt, Human
cagccucuaccuccuggguucaa

SEQ ID NO: 1281287 - RNA, 19 nt, Human
cagggcuucucagccaggg

SEQ ID NO: 1281288 - RNA, 20 nt, Human
cauccaagcacacuuggcca

SEQ ID NO: 1281289 - RNA, 23 nt, Human
caugaagaaaaggcagacucaug

SEQ ID NO: 1281290 - RNA, 25 nt, Human
caugaagaaaaggcagacucaugac

SEQ ID NO: 1281291 - RNA, 24 nt, Human
cauuuucaauugauucauuggggg

SEQ ID NO: 1281292 - RNA, 20 nt, Human
ccaaagugcugggauuacag

SEQ ID NO: 1281293 - RNA, 21 nt, Human
ccaaagugcugggauuacagg

SEQ ID NO: 1281294 - RNA, 21 nt, Human
ccaaagugcugggauuacagg

SEQ ID NO: 1281295 - RNA, 24 nt, Human
ccaaagugcugggauuacaggugu

SEQ ID NO: 1281296 - RNA, 23 nt, Human
ccaccucagccucccgaguagcu

SEQ ID NO: 1281297 - RNA, 22 nt, Human
ccaugaagaaaaggcagacuca

SEQ ID NO: 1281298 - RNA, 23 nt, Human
cccaccucagccucccgaguagc

SEQ ID NO: 1281299 - RNA, 19 nt, Human
cccaggcuggagugcagug

SEQ ID NO: 1281300 - RNA, 21 nt, Human
cccccagagaacauguggcca

SEQ ID NO: 1281301 - RNA, 22 nt, Human
cccccagagaacauguggccau

SEQ ID NO: 1281302 - RNA, 18 nt, Human
cccuggagagcaggaugg

SEQ ID NO: 1281303 - RNA, 21 nt, Human
ccuacaaugccccggacaacu

SEQ ID NO: 1281304 - RNA, 21 nt, Human
ccucaguuuaaagaugacuau

SEQ ID NO: 1281305 - RNA, 24 nt, Human
ccuccuggguucaagcgauccucc

SEQ ID NO: 1281306 - RNA, 19 nt, Human
ccucuaccuccuggguuca

SEQ ID NO: 1281307 - RNA, 23 nt, Human
ccugaguucaagcaauuuucccg

SEQ ID NO: 1281308 - RNA, 20 nt, Human
ccuggguucaagcgauccuc

SEQ ID NO: 1281309 - RNA, 23 nt, Human
ccuggguucaagcgauccuccca

SEQ ID NO: 1281310 - RNA, 21 nt, Human
ccuguagcugucaacucugug

SEQ ID NO: 1281311 - RNA, 19 nt, Human
cggcuggaggagguggugc

SEQ ID NO: 1281312 - RNA, 24 nt, Human
cggggaguggggcugggagguggc

SEQ ID NO: 1281313 - RNA, 19 nt, Human
cuacguggcaauaagcagu

SEQ ID NO: 1281314 - RNA, 24 nt, Human
cucacugcagccucuaccuccugg

SEQ ID NO: 1281315 - RNA, 22 nt, Human
cucucggcagcugggacuucau

SEQ ID NO: 1281316 - RNA, 20 nt, Human
cucugugcuauaguacugcu

SEQ ID NO: 1281317 - RNA, 23 nt, Human
cugcagccucuaccuccuggguu

SEQ ID NO: 1281318 - RNA, 18 nt, Human
cugcccggaacauggcgg

SEQ ID NO: 1281319 - RNA, 20 nt, Human
cugcggggaguggggcuggg

SEQ ID NO: 1281320 - RNA, 18 nt, Human
cuguagcccaggcuggag

SEQ ID NO: 1281321 - RNA, 25 nt, Human
cuucagggcuucucagccagggggu

SEQ ID NO: 1281322 - RNA, 21 nt, Human
gaaaaugccaccccaggaauu

SEQ ID NO: 1281323 - RNA, 21 nt, Human
gacugcggggaguggggcugg

SEQ ID NO: 1281324 - RNA, 24 nt, Human
gagagagaaggaauugagagaguu

SEQ ID NO: 1281325 - RNA, 24 nt, Human
gagaggaccucauuuuuauaacuc

SEQ ID NO: 1281326 - RNA, 19 nt, Human
gaguaaucccaaagugcug

SEQ ID NO: 1281327 - RNA, 26 nt, Human
gaguagcugagaccacaggcguguau

SEQ ID NO: 1281328 - RNA, 20 nt, Human
gaguucuggagagagaagga

SEQ ID NO: 1281329 - RNA, 19 nt, Human
gauuacaggugugauucac

SEQ ID NO: 1281330 - RNA, 20 nt, Human
gauuacaggugugauucacu

SEQ ID NO: 1281331 - RNA, 18 nt, Human
gcaacaucgaugggaguu

SEQ ID NO: 1281332 - RNA, 20 nt, Human
gcagaaugagccgcucaccc

SEQ ID NO: 1281333 - RNA, 19 nt, Human
gcccaggcuggagugcagu

SEQ ID NO: 1281334 - RNA, 20 nt, Human
gcccaggcuggagugcagug

SEQ ID NO: 1281335 - RNA, 23 nt, Human
gcccaggcuggagugcaguggug

SEQ ID NO: 1281336 - RNA, 18 nt, Human
gcggggaguggggcuggg

SEQ ID NO: 1281337 - RNA, 22 nt, Human
gcuaauuuuuuucccuuuuucu

SEQ ID NO: 1281338 - RNA, 21 nt, Human
gcucacugcagccucuaccuc

SEQ ID NO: 1281339 - RNA, 23 nt, Human
gcuggaggagguggugcuacugg

SEQ ID NO: 1281340 - RNA, 19 nt, Human
ggagguggcuguuugcacg

SEQ ID NO: 1281341 - RNA, 21 nt, Human
ggcaaggucuugcuauuuugc

SEQ ID NO: 1281342 - RNA, 20 nt, Human
ggcuggucuugaacuccuga

SEQ ID NO: 1281343 - RNA, 18 nt, Human
gggaguggggcugggagg

SEQ ID NO: 1281344 - RNA, 18 nt, Human
ggggaguggggcugggag

SEQ ID NO: 1281345 - RNA, 19 nt, Human
gucucaaucucugguuucu

SEQ ID NO: 1281346 - RNA, 24 nt, Human
gucuugcuauuuugcccaggcugg

SEQ ID NO: 1281347 - RNA, 20 nt, Human
uaagacucuggcuuugucag

SEQ ID NO: 1281348 - RNA, 18 nt, Human
uaaucccaaagugcuggg

SEQ ID NO: 1281349 - RNA, 21 nt, Human
uacagaguucuggagagagaa

SEQ ID NO: 1281350 - RNA, 22 nt, Human
uaccguuugugcaaguugugca

SEQ ID NO: 1281351 - RNA, 24 nt, Human
uaccuccuggguucaagcgauccu

SEQ ID NO: 1281352 - RNA, 22 nt, Human
uacugcuuuuuuuuuuuuccuu

SEQ ID NO: 1281353 - RNA, 21 nt, Human
uacuuacaugugaucugcgua

SEQ ID NO: 1281354 - RNA, 21 nt, Human
uagagaucauccaagcacacu

SEQ ID NO: 1281355 - RNA, 20 nt, Human
uagaggcaaggucuugcuau

SEQ ID NO: 1281356 - RNA, 24 nt, Human
uagaggcccugagcgugacauuuc

SEQ ID NO: 1281357 - RNA, 25 nt, Human
uaguacugcuuuuuuuuuuuuccuu

SEQ ID NO: 1281358 - RNA, 18 nt, Human
uaugucuuuacuucaggg

SEQ ID NO: 1281359 - RNA, 24 nt, Human
uauuuugcccaggcuggucuugaa

SEQ ID NO: 1281360 - RNA, 23 nt, Human
ucaagaaaggagaaauguugaaa

SEQ ID NO: 1281361 - RNA, 24 nt, Human
ucacccucagaauugcuuuuaauc

SEQ ID NO: 1281362 - RNA, 23 nt, Human
ucacugcagccucuaccuccugg

SEQ ID NO: 1281363 - RNA, 24 nt, Human
ucacugcagccucuaccuccuggg

SEQ ID NO: 1281364 - RNA, 18 nt, Human
ucagcagcguugucccug

SEQ ID NO: 1281365 - RNA, 20 nt, Human
ucagggagacugcggggagu

SEQ ID NO: 1281366 - RNA, 26 nt, Human
ucagugcagcuguguuuggggcuuug

SEQ ID NO: 1281367 - RNA, 24 nt, Human
ucauggcuuauacuuuugauagau

SEQ ID NO: 1281368 - RNA, 23 nt, Human
ucccaaagugcugggauuacagg

SEQ ID NO: 1281369 - RNA, 24 nt, Human
ucccgaguagcugagaccacaggc

SEQ ID NO: 1281370 - RNA, 19 nt, Human
ucccuggagagcaggaugg

SEQ ID NO: 1281371 - RNA, 26 nt, Human
uccucccaccucagccucccgaguag

SEQ ID NO: 1281372 - RNA, 21 nt, Human
uccugaguucaagcaauuuuc

SEQ ID NO: 1281373 - RNA, 24 nt, Human
uccugaguucaagcaauuuucccg

SEQ ID NO: 1281374 - RNA, 21 nt, Human
uccuggguucaagcgauccuc

SEQ ID NO: 1281375 - RNA, 25 nt, Human
ucuacguggcaauaagcaguugcuc

SEQ ID NO: 1281376 - RNA, 23 nt, Human
ucucugguuucuuugcucagugc

SEQ ID NO: 1281377 - RNA, 19 nt, Human
ucuguagcccaggcuggag

SEQ ID NO: 1281378 - RNA, 24 nt, Human
ucuguagcccaggcuggagugcag

SEQ ID NO: 1281379 - RNA, 23 nt, Human
ucuugaacuccugaguucaagca

SEQ ID NO: 1281380 - RNA, 23 nt, Human
ucuugcuauuuugcccaggcugg

SEQ ID NO: 1281381 - RNA, 24 nt, Human
ucuugcuauuuugcccaggcuggu

SEQ ID NO: 1281382 - RNA, 24 nt, Human
ugaaaaugccaccccaggaauugc

SEQ ID NO: 1281383 - RNA, 19 nt, Human
ugaacagagaggaccucau

SEQ ID NO: 1281384 - RNA, 20 nt, Human
ugaagaaaaggcagacucau

SEQ ID NO: 1281385 - RNA, 19 nt, Human
ugacugauggcaacaucga

SEQ ID NO: 1281386 - RNA, 21 nt, Human
ugagaccacaggcguguauca

SEQ ID NO: 1281387 - RNA, 23 nt, Human
ugagggaaugucauuuugucuca

SEQ ID NO: 1281388 - RNA, 21 nt, Human
ugaguucaagcaauuuucccg

SEQ ID NO: 1281389 - RNA, 24 nt, Human
ugaguucaagcaauuuucccgucu

SEQ ID NO: 1281390 - RNA, 23 nt, Human
ugaugggauuucuuuaguuucug

SEQ ID NO: 1281391 - RNA, 20 nt, Human
ugcagcuguguuuggggcuu

SEQ ID NO: 1281392 - RNA, 22 nt, Human
ugcaguggugcaaucccggcuc

SEQ ID NO: 1281393 - RNA, 19 nt, Human
ugccaccccaggaauugca

SEQ ID NO: 1281394 - RNA, 24 nt, Human
ugcccaggcuggucuugaacuccu

SEQ ID NO: 1281395 - RNA, 27 nt, Human
ugcccaggcuggucuugaacuccugag

SEQ ID NO: 1281396 - RNA, 19 nt, Human
ugccccggacaacucccac

SEQ ID NO: 1281397 - RNA, 22 nt, Human
ugcccggaacauggcgguaaga

SEQ ID NO: 1281398 - RNA, 18 nt, Human
ugcccuggggugcucugg

SEQ ID NO: 1281399 - RNA, 21 nt, Human
ugcccuggggugcucuggaac

SEQ ID NO: 1281400 - RNA, 19 nt, Human
ugcggggaguggggcuggg

SEQ ID NO: 1281401 - RNA, 18 nt, Human
ugcugggauuacaggugu

SEQ ID NO: 1281402 - RNA, 24 nt, Human
ugcugggauuacaggugugauuca

SEQ ID NO: 1281403 - RNA, 18 nt, Human
uggagacaauuuuggugg

SEQ ID NO: 1281404 - RNA, 18 nt, Human
uggagcaguaaguacaga

SEQ ID NO: 1281405 - RNA, 24 nt, Human
uggagugcaguggugcaaucccgg

SEQ ID NO: 1281406 - RNA, 22 nt, Human
uggcaacaucgaugggaguuuu

SEQ ID NO: 1281407 - RNA, 24 nt, Human
uggcuaauuuuuuucccuuuuucu

SEQ ID NO: 1281408 - RNA, 21 nt, Human
ugggauuacaggugugauuca

SEQ ID NO: 1281409 - RNA, 22 nt, Human
ugggauuacaggugugauucac

SEQ ID NO: 1281410 - RNA, 23 nt, Human
ugggauuacaggugugauucacu

SEQ ID NO: 1281411 - RNA, 25 nt, Human
ugggauuacaggugugauucacucu

SEQ ID NO: 1281412 - RNA, 24 nt, Human
uggugcaaucccggcucacugcag

SEQ ID NO: 1281413 - RNA, 19 nt, Human
ugguugcggcuggaggagg

SEQ ID NO: 1281414 - RNA, 21 nt, Human
uguagcccaggcuggagugca

SEQ ID NO: 1281415 - RNA, 18 nt, Human
ugucccuggagagcagga

SEQ ID NO: 1281416 - RNA, 18 nt, Human
uguggcccuuaggcucuc

SEQ ID NO: 1281417 - RNA, 24 nt, Human
uucaagcgauccucccaccucagc

SEQ ID NO: 1281418 - RNA, 18 nt, Human
uucauugucauuaccagu

SEQ ID NO: 1281419 - RNA, 24 nt, Human
uucucagccagggggugauuuugc

SEQ ID NO: 1281420 - RNA, 18 nt, Human
uugcucagugcagcugug

SEQ ID NO: 1281421 - RNA, 23 nt, Human
uuggugguugcggcuggaggagg

SEQ ID NO: 1281422 - RNA, 19 nt, Human
uugucccuggagagcagga

SEQ ID NO: 1281423 - RNA, 21 nt, Human
uuuccuuucucuuucuccacc

SEQ ID NO: 1281424 - RNA, 23 nt, Human
uuuuucagcagcguugucccugg

SEQ ID NO: 1281425 - RNA, 18 nt, Human
aaacagcauuuacuacuu

SEQ ID NO: 1281426 - RNA, 19 nt, Human
aaagaggucaugauuuuga

SEQ ID NO: 1281427 - RNA, 19 nt, Human
aaaggcacaaacaaguucu

SEQ ID NO: 1281428 - RNA, 20 nt, Human
aacacggcaaaacccugucu

SEQ ID NO: 1281429 - RNA, 21 nt, Human
aacacggcaaaacccugucuc

SEQ ID NO: 1281430 - RNA, 23 nt, Human
aacacuacuugcaccaaaaucac

SEQ ID NO: 1281431 - RNA, 25 nt, Human
aaccaaugaaaugaacauccucuca

SEQ ID NO: 1281432 - RNA, 23 nt, Human
aagaaugcauacucuugggcccc

SEQ ID NO: 1281433 - RNA, 22 nt, Human
acaaaacagaaugaauuagcag

SEQ ID NO: 1281434 - RNA, 25 nt, Human
acaaaacagaaugaauuagcagaaa

SEQ ID NO: 1281435 - RNA, 21 nt, Human
acaauuaucccaaaauagcac

SEQ ID NO: 1281436 - RNA, 22 nt, Human
acccaaauuuugaggauuaaca

SEQ ID NO: 1281437 - RNA, 24 nt, Human
acccugucucuacuaaaaauauga

SEQ ID NO: 1281438 - RNA, 21 nt, Human
acuaaacuuggagaauuacag

SEQ ID NO: 1281439 - RNA, 18 nt, Human
acugcaguccagccuggg

SEQ ID NO: 1281440 - RNA, 20 nt, Human
acugcaguccagccugggag

SEQ ID NO: 1281441 - RNA, 24 nt, Human
acugcaguccagccugggagacag

SEQ ID NO: 1281442 - RNA, 19 nt, Human
agagcaagaauuuaaaccc

SEQ ID NO: 1281443 - RNA, 24 nt, Human
agcacuuugggaugccaagguggg

SEQ ID NO: 1281444 - RNA, 24 nt, Human
agcagaaaaauguauguuauaaaa

SEQ ID NO: 1281445 - RNA, 20 nt, Human
agccuggccaacacggcaag

SEQ ID NO: 1281446 - RNA, 18 nt, Human
aggcaggagaaucgcacc

SEQ ID NO: 1281447 - RNA, 19 nt, Human
aggcaggagaaucgcacca

SEQ ID NO: 1281448 - RNA, 20 nt, Human
aggcugaggcaggagaaucg

SEQ ID NO: 1281449 - RNA, 20 nt, Human
aggcugaggcaggagaaucg

SEQ ID NO: 1281450 - RNA, 19 nt, Human
aggucaggaguucaagacc

SEQ ID NO: 1281451 - RNA, 25 nt, Human
aguaucuacucuuucaaaauauaac

SEQ ID NO: 1281452 - RNA, 24 nt, Human
agucaaguaacacauaugaaaauu

SEQ ID NO: 1281453 - RNA, 24 nt, Human
aucaccugaggucaggaguucaag

SEQ ID NO: 1281454 - RNA, 18 nt, Human
aucauauacauaaaaaug

SEQ ID NO: 1281455 - RNA, 24 nt, Human
aucgcaccacugcaguccagccug

SEQ ID NO: 1281456 - RNA, 19 nt, Human
augaaaauucauguccaca

SEQ ID NO: 1281457 - RNA, 20 nt, Human
augaaaugaacauccucuca

SEQ ID NO: 1281458 - RNA, 26 nt, Human
auuaggucacacaaaacagaaugaau

SEQ ID NO: 1281459 - RNA, 23 nt, Human
caaaauagcaccaaccuucagac

SEQ ID NO: 1281460 - RNA, 18 nt, Human
caagaauuuaaacccaag

SEQ ID NO: 1281461 - RNA, 24 nt, Human
caagguggguggaucaccugaggu

SEQ ID NO: 1281462 - RNA, 26 nt, Human
caagguggguggaucaccugagguca

SEQ ID NO: 1281463 - RNA, 23 nt, Human
cacacaaaacagaaugaauuagc

SEQ ID NO: 1281464 - RNA, 22 nt, Human
caccauggugaagaguuguuca

SEQ ID NO: 1281465 - RNA, 19 nt, Human
caccucagauccuauaaac

SEQ ID NO: 1281466 - RNA, 22 nt, Human
caccucagauccuauaaacuaa

SEQ ID NO: 1281467 - RNA, 23 nt, Human
caccugaggucaggaguucaaga

SEQ ID NO: 1281468 - RNA, 24 nt, Human
cacgcucguaaucccagcacuuug

SEQ ID NO: 1281469 - RNA, 18 nt, Human
cacugcaguccagccugg

SEQ ID NO: 1281470 - RNA, 24 nt, Human
cacugcaguccagccugggagaca

SEQ ID NO: 1281471 - RNA, 24 nt, Human
cacugugacaauuuggcuggguua

SEQ ID NO: 1281472 - RNA, 23 nt, Human
cagaaugaauuagcagaaaaaug

SEQ ID NO: 1281473 - RNA, 21 nt, Human
cagcacuuugggaugccaagg

SEQ ID NO: 1281474 - RNA, 24 nt, Human
cagcacuuugggaugccaaggugg

SEQ ID NO: 1281475 - RNA, 20 nt, Human
cagccugggagacagaguga

SEQ ID NO: 1281476 - RNA, 23 nt, Human
caguccagccugggagacagagu

SEQ ID NO: 1281477 - RNA, 21 nt, Human
ccaaaaugaaugauccaauga

SEQ ID NO: 1281478 - RNA, 23 nt, Human
ccaagccugauacgguuccaaug

SEQ ID NO: 1281479 - RNA, 22 nt, Human
ccaaugauccuuuaaguuaucu

SEQ ID NO: 1281480 - RNA, 20 nt, Human
ccacugcaguccagccuggg

SEQ ID NO: 1281481 - RNA, 24 nt, Human
ccacugcaguccagccugggagac

SEQ ID NO: 1281482 - RNA, 24 nt, Human
ccgcuacucgggaggcugaggcag

SEQ ID NO: 1281483 - RNA, 22 nt, Human
ccuggccaacacggcaaaaccc

SEQ ID NO: 1281484 - RNA, 24 nt, Human
ccuggccaacacggcaaaacccug

SEQ ID NO: 1281485 - RNA, 19 nt, Human
ccuguaauccccgcuacuc

SEQ ID NO: 1281486 - RNA, 19 nt, Human
ccuguaauccccgcuacuc

SEQ ID NO: 1281487 - RNA, 21 nt, Human
cgcaccacugcaguccagccu

SEQ ID NO: 1281488 - RNA, 24 nt, Human
cgcucguaaucccagcacuuuggg

SEQ ID NO: 1281489 - RNA, 22 nt, Human
cucacgcucguaaucccagcac

SEQ ID NO: 1281490 - RNA, 24 nt, Human
cucacgcucguaaucccagcacuu

SEQ ID NO: 1281491 - RNA, 18 nt, Human
cugccccugccccugccc

SEQ ID NO: 1281492 - RNA, 19 nt, Human
cugccccugccccugcccc

SEQ ID NO: 1281493 - RNA, 18 nt, Human
gagaaucgcaccacugca

SEQ ID NO: 1281494 - RNA, 23 nt, Human
gaguuugcuuaaacacaacugcu

SEQ ID NO: 1281495 - RNA, 21 nt, Human
gaucaccugaggucaggaguu

SEQ ID NO: 1281496 - RNA, 23 nt, Human
gaucaccugaggucaggaguuca

SEQ ID NO: 1281497 - RNA, 24 nt, Human
gaucaccugaggucaggaguucaa

SEQ ID NO: 1281498 - RNA, 20 nt, Human
gcaccacugcaguccagccu

SEQ ID NO: 1281499 - RNA, 24 nt, Human
gccaacacggcaaaacccugucuc

SEQ ID NO: 1281500 - RNA, 26 nt, Human
gccaagguggguggaucaccugaggu

SEQ ID NO: 1281501 - RNA, 21 nt, Human
gcuuugugacagugacaaagu

SEQ ID NO: 1281502 - RNA, 19 nt, Human
gggcguggcagcgcgugcc

SEQ ID NO: 1281503 - RNA, 24 nt, Human
gggcguggcagcgcgugccuguaa

SEQ ID NO: 1281504 - RNA, 21 nt, Human
gguggaucaccugaggucagg

SEQ ID NO: 1281505 - RNA, 20 nt, Human
gugcauguuuucacuacgug

SEQ ID NO: 1281506 - RNA, 21 nt, Human
uaaaugcaguacuuacacucc

SEQ ID NO: 1281507 - RNA, 23 nt, Human
uaacuaauagccaccucagaucc

SEQ ID NO: 1281508 - RNA, 20 nt, Human
uagcaccaaccuucagacug

SEQ ID NO: 1281509 - RNA, 20 nt, Human
uagcauacaguuggcauugg

SEQ ID NO: 1281510 - RNA, 18 nt, Human
uagccaccucagauccua

SEQ ID NO: 1281511 - RNA, 23 nt, Human
uagccgggugcugugacucacgg

SEQ ID NO: 1281512 - RNA, 22 nt, Human
uaggucacacaaaacagaauga

SEQ ID NO: 1281513 - RNA, 24 nt, Human
uagugugauccuggacuacacuga

SEQ ID NO: 1281514 - RNA, 22 nt, Human
uauaacacccaaauuuugagga

SEQ ID NO: 1281515 - RNA, 21 nt, Human
ucaaagcaaauuuuucauuca

SEQ ID NO: 1281516 - RNA, 20 nt, Human
ucaguaucuggucaaagcaa

SEQ ID NO: 1281517 - RNA, 23 nt, Human
uccagccugggagacagagugag

SEQ ID NO: 1281518 - RNA, 24 nt, Human
uccagccugggagacagagugaga

SEQ ID NO: 1281519 - RNA, 20 nt, Human
ucccagcacuuugggaugcc

SEQ ID NO: 1281520 - RNA, 18 nt, Human
ucccuaauuaaaagauga

SEQ ID NO: 1281521 - RNA, 22 nt, Human
uccuucaguaucuggucaaagc

SEQ ID NO: 1281522 - RNA, 23 nt, Human
ucgcaccacugcaguccagccug

SEQ ID NO: 1281523 - RNA, 24 nt, Human
ucgggaggcugaggcaggagaauc

SEQ ID NO: 1281524 - RNA, 20 nt, Human
ucuccgaaaaaagaaauuac

SEQ ID NO: 1281525 - RNA, 23 nt, Human
ucucuacuaaaaauaugaaaacu

SEQ ID NO: 1281526 - RNA, 21 nt, Human
ucugcauuuaacaacauccug

SEQ ID NO: 1281527 - RNA, 18 nt, Human
ucuuaguaauugggcagu

SEQ ID NO: 1281528 - RNA, 19 nt, Human
ugaaaacuggcggggcgug

SEQ ID NO: 1281529 - RNA, 20 nt, Human
ugaaaacuggcggggcgugg

SEQ ID NO: 1281530 - RNA, 23 nt, Human
ugaaaugaacauccucucaaaua

SEQ ID NO: 1281531 - RNA, 24 nt, Human
ugacucacgcucguaaucccagca

SEQ ID NO: 1281532 - RNA, 24 nt, Human
ugagaugaggccccgagagaggcu

SEQ ID NO: 1281533 - RNA, 22 nt, Human
ugagauuggggucuucagaucu

SEQ ID NO: 1281534 - RNA, 19 nt, Human
ugaggcaggagaaucgcac

SEQ ID NO: 1281535 - RNA, 19 nt, Human
ugagguagguaguauuauc

SEQ ID NO: 1281536 - RNA, 23 nt, Human
ugagguagguaguauuaucaucc

SEQ ID NO: 1281537 - RNA, 23 nt, Human
ugauacgguuccaaugaacacac

SEQ ID NO: 1281538 - RNA, 27 nt, Human
ugccccugccccuagaguaucugauuu

SEQ ID NO: 1281539 - RNA, 24 nt, Human
ugccuguaauccccgcuacucggg

SEQ ID NO: 1281540 - RNA, 21 nt, Human
uggacagaguaguccaugguu

SEQ ID NO: 1281541 - RNA, 24 nt, Human
uggaucaccugaggucaggaguuc

SEQ ID NO: 1281542 - RNA, 27 nt, Human
uggaucaccugaggucaggaguucaag

SEQ ID NO: 1281543 - RNA, 24 nt, Human
uggguggaucaccugaggucagga

SEQ ID NO: 1281544 - RNA, 21 nt, Human
ugugauccuggacuacacuga

SEQ ID NO: 1281545 - RNA, 18 nt, Human
uuaauccucauaaaaauc

SEQ ID NO: 1281546 - RNA, 21 nt, Human
uuaaugcuguuuguugggacc

SEQ ID NO: 1281547 - RNA, 22 nt, Human
uucaaagaauaaaaugaaugcc

SEQ ID NO: 1281548 - RNA, 23 nt, Human
uucaaagaauaaaaugaaugccc

SEQ ID NO: 1281549 - RNA, 22 nt, Human
uuuaaacccaagcaagucugac

SEQ ID NO: 1281550 - RNA, 23 nt, Human
uuuaaacccaagcaagucugacu

SEQ ID NO: 1281551 - RNA, 22 nt, Human
uuuccuuaucuauaauaggggu

SEQ ID NO: 1281552 - RNA, 18 nt, Human
uuugaauuucugagauug

SEQ ID NO: 1281553 - RNA, 24 nt, Human
uuuuauuguaggcccugauguuag

SEQ ID NO: 1281554 - RNA, 27 nt, Human
aaacaaacaugcauaauacuuuaaaac

SEQ ID NO: 1281555 - RNA, 18 nt, Human
aacaaaggugggaacaca

SEQ ID NO: 1281556 - RNA, 20 nt, Human
aagcauauuuuugucaauag

SEQ ID NO: 1281557 - RNA, 26 nt, Human
acaaacugacuaugugcuugcauuua

SEQ ID NO: 1281558 - RNA, 24 nt, Human
accaauucaacuuccuacaaacca

SEQ ID NO: 1281559 - RNA, 22 nt, Human
agaaaaaaaugcaggaauaaca

SEQ ID NO: 1281560 - RNA, 18 nt, Human
agaaaauucucuaucaca

SEQ ID NO: 1281561 - RNA, 28 nt, Human
agaaaggaaguagaacuuaaggggaccc

SEQ ID NO: 1281562 - RNA, 19 nt, Human
aguaaaacauuuccaucuc

SEQ ID NO: 1281563 - RNA, 20 nt, Human
aguaaguaauggauauucaa

SEQ ID NO: 1281564 - RNA, 23 nt, Human
agugaaacggcaaagaacaucaa

SEQ ID NO: 1281565 - RNA, 19 nt, Human
aguugauuucaguuuuucc

SEQ ID NO: 1281566 - RNA, 24 nt, Human
auaacaccaauucaacuuccuaca

SEQ ID NO: 1281567 - RNA, 24 nt, Human
auacaaauguaccuuuuucuuaaa

SEQ ID NO: 1281568 - RNA, 23 nt, Human
aucuaauuuaaucauuaacacca

SEQ ID NO: 1281569 - RNA, 21 nt, Human
caaaauguucacguuugcauc

SEQ ID NO: 1281570 - RNA, 21 nt, Human
caaagaacaucaaacagguua

SEQ ID NO: 1281571 - RNA, 18 nt, Human
caaccgaggcagaagcag

SEQ ID NO: 1281572 - RNA, 23 nt, Human
cacaguguuuaguuucacuaugg

SEQ ID NO: 1281573 - RNA, 19 nt, Human
cacaguucuucuaagauaa

SEQ ID NO: 1281574 - RNA, 22 nt, Human
cacuccagaaagagcacgcaga

SEQ ID NO: 1281575 - RNA, 21 nt, Human
ccagaaagagcacgcagagca

SEQ ID NO: 1281576 - RNA, 22 nt, Human
ccuacaaaccagagaggagacu

SEQ ID NO: 1281577 - RNA, 21 nt, Human
cuaaaaccuucauagccuaau

SEQ ID NO: 1281578 - RNA, 22 nt, Human
cugaaaaaugccacaauucuuu

SEQ ID NO: 1281579 - RNA, 19 nt, Human
cugcugcugcugcugcugc

SEQ ID NO: 1281580 - RNA, 19 nt, Human
cugcugcugcugcugcugc

SEQ ID NO: 1281581 - RNA, 18 nt, Human
cuggaucugaaaauaauc

SEQ ID NO: 1281582 - RNA, 25 nt, Human
cuuggcacagaguuaacaaaucaua

SEQ ID NO: 1281583 - RNA, 18 nt, Human
gaaaauucucuaucacaa

SEQ ID NO: 1281584 - RNA, 24 nt, Human
gaaaauucucuaucacaauuuacc

SEQ ID NO: 1281585 - RNA, 21 nt, Human
gaaaugggccacuccagaaag

SEQ ID NO: 1281586 - RNA, 18 nt, Human
gagcaggucuagcauccu

SEQ ID NO: 1281587 - RNA, 21 nt, Human
gaggcagagggguugaaagga

SEQ ID NO: 1281588 - RNA, 23 nt, Human
ggagaaaggaaguagaacuuaag

SEQ ID NO: 1281589 - RNA, 23 nt, Human
ggcaaccgaggcagaagcaggga

SEQ ID NO: 1281590 - RNA, 24 nt, Human
gugaaacggcaaagaacaucaaac

SEQ ID NO: 1281591 - RNA, 20 nt, Human
uaacaugguaggcacaaaua

SEQ ID NO: 1281592 - RNA, 23 nt, Human
uaaucaaaauaaaugugauuuca

SEQ ID NO: 1281593 - RNA, 18 nt, Human
uaauuuaaucauuaacac

SEQ ID NO: 1281594 - RNA, 25 nt, Human
uacaaaauguucacguuugcaucag

SEQ ID NO: 1281595 - RNA, 18 nt, Human
uacaguuuauugaccaau

SEQ ID NO: 1281596 - RNA, 19 nt, Human
uagaguagugaacauaaug

SEQ ID NO: 1281597 - RNA, 22 nt, Human
uagguauuuucgacaaaauuuc

SEQ ID NO: 1281598 - RNA, 23 nt, Human
uaucaucaugagauguuuuucuu

SEQ ID NO: 1281599 - RNA, 20 nt, Human
ucaaaauaaaugugauuucc

SEQ ID NO: 1281600 - RNA, 23 nt, Human
ucuuuggaaagcuggucagagag

SEQ ID NO: 1281601 - RNA, 21 nt, Human
ugaaaauaaucaaaaauuuua

SEQ ID NO: 1281602 - RNA, 23 nt, Human
ugaaguagcaaaaaggcagagaa

SEQ ID NO: 1281603 - RNA, 20 nt, Human
ugaauucauucauaaacacu

SEQ ID NO: 1281604 - RNA, 20 nt, Human
ugagagaccaucugaaggaa

SEQ ID NO: 1281605 - RNA, 20 nt, Human
ugagagaccaucugaaggaa

SEQ ID NO: 1281606 - RNA, 20 nt, Human
ugagauguuuuucuucagga

SEQ ID NO: 1281607 - RNA, 19 nt, Human
ugcauuuaauuucaagggu

SEQ ID NO: 1281608 - RNA, 19 nt, Human
ugccacaauucuuuuucac

SEQ ID NO: 1281609 - RNA, 22 nt, Human
ugccacauuuauuaaacaaaca

SEQ ID NO: 1281610 - RNA, 20 nt, Human
ugcucagacuucggagcugu

SEQ ID NO: 1281611 - RNA, 21 nt, Human
ugcugcugcugcugcugcugc

SEQ ID NO: 1281612 - RNA, 21 nt, Human
ugcugcugcugcugcugcugc

SEQ ID NO: 1281613 - RNA, 21 nt, Human
ugcugcugcugcugcugcugc

SEQ ID NO: 1281614 - RNA, 21 nt, Human
ugcugcugcugcugcugcugc

SEQ ID NO: 1281615 - RNA, 21 nt, Human
ugcugcugcugcugcugcugc

SEQ ID NO: 1281616 - RNA, 21 nt, Human
ugcugcugcugcugcugcugc

SEQ ID NO: 1281617 - RNA, 21 nt, Human
ugcugcugcugcugcugcugc

SEQ ID NO: 1281618 - RNA, 21 nt, Human
ugcugcugcugcugcugcugc

SEQ ID NO: 1281619 - RNA, 21 nt, Human
ugcugcugcugcugcugcugc

SEQ ID NO: 1281620 - RNA, 18 nt, Human
uggaaagcuggucagaga

SEQ ID NO: 1281621 - RNA, 26 nt, Human
uggaauaauucauguaccuuuaugca

SEQ ID NO: 1281622 - RNA, 23 nt, Human
ugguaaucaaaauaaaugugauu

SEQ ID NO: 1281623 - RNA, 24 nt, Human
uguauuaaaaccaugccacauuua

SEQ ID NO: 1281624 - RNA, 18 nt, Human
uuaaaguaaguaauggau

SEQ ID NO: 1281625 - RNA, 18 nt, Human
uucaagaacuaaaaguca

SEQ ID NO: 1281626 - RNA, 24 nt, Human
uucacacaaaauuagacaaacuga

SEQ ID NO: 1281627 - RNA, 18 nt, Human
uucagaaaaccgaaaugg

SEQ ID NO: 1281628 - RNA, 21 nt, Human
uuccaucucuauuguggccaa

SEQ ID NO: 1281629 - RNA, 24 nt, Human
aaaagagauuuccauaacagcaac

SEQ ID NO: 1281630 - RNA, 22 nt, Human
aacagcccugucauaugaccuu

SEQ ID NO: 1281631 - RNA, 21 nt, Human
aagacagaaagggagggagga

SEQ ID NO: 1281632 - RNA, 24 nt, Human
aauaacacuugguuaaacuaugua

SEQ ID NO: 1281633 - RNA, 21 nt, Human
aauaagcagcucaaauaacac

SEQ ID NO: 1281634 - RNA, 18 nt, Human
aaugaucagaacuuauuu

SEQ ID NO: 1281635 - RNA, 24 nt, Human
aaugugcaugacgguguguuugug

SEQ ID NO: 1281636 - RNA, 21 nt, Human
accacacggcagacgagagca

SEQ ID NO: 1281637 - RNA, 19 nt, Human
accugacauccacuuuaca

SEQ ID NO: 1281638 - RNA, 18 nt, Human
acggagcagcuguaccuc

SEQ ID NO: 1281639 - RNA, 20 nt, Human
acggagcagcuguaccucua

SEQ ID NO: 1281640 - RNA, 18 nt, Human
acuguaugcuggaaaaaa

SEQ ID NO: 1281641 - RNA, 24 nt, Human
acuguaugcuggaaaaaaguuacu

SEQ ID NO: 1281642 - RNA, 20 nt, Human
agagaggaagacagaaaggg

SEQ ID NO: 1281643 - RNA, 20 nt, Human
agaggaagacagaaagggag

SEQ ID NO: 1281644 - RNA, 24 nt, Human
agaggcaagagagggagggagcag

SEQ ID NO: 1281645 - RNA, 24 nt, Human
agagggagggagagaggggaaugc

SEQ ID NO: 1281646 - RNA, 18 nt, Human
agagggagggagcaguag

SEQ ID NO: 1281647 - RNA, 18 nt, Human
agcaagagggagggagag

SEQ ID NO: 1281648 - RNA, 23 nt, Human
agcgcagacggguccggcugccu

SEQ ID NO: 1281649 - RNA, 21 nt, Human
agcgccccggacgugcccucc

SEQ ID NO: 1281650 - RNA, 24 nt, Human
agcuacuccaagcaguaggaaugc

SEQ ID NO: 1281651 - RNA, 23 nt, Human
aggaaagagaggaagacagaaag

SEQ ID NO: 1281652 - RNA, 24 nt, Human
aggaggaaagagaggaagacagaa

SEQ ID NO: 1281653 - RNA, 24 nt, Human
agggagggagcaguagaggaggaa

SEQ ID NO: 1281654 - RNA, 19 nt, Human
agggaggggugggguggcg

SEQ ID NO: 1281655 - RNA, 20 nt, Human
aggggaaugcgccgggcugc

SEQ ID NO: 1281656 - RNA, 21 nt, Human
caacagaugugaccuucuucu

SEQ ID NO: 1281657 - RNA, 21 nt, Human
caagcagagagacaaguacaa

SEQ ID NO: 1281658 - RNA, 21 nt, Human
caaggagcgcucucagcagcc

SEQ ID NO: 1281659 - RNA, 20 nt, Human
cagcagccgcacaggacuug

SEQ ID NO: 1281660 - RNA, 18 nt, Human
cagcgccccggacgugcc

SEQ ID NO: 1281661 - RNA, 21 nt, Human
caggccccuuucaaagaaaaa

SEQ ID NO: 1281662 - RNA, 25 nt, Human
caguaggaaugcaugaguggagauu

SEQ ID NO: 1281663 - RNA, 23 nt, Human
ccagcgccccggacgugcccucc

SEQ ID NO: 1281664 - RNA, 19 nt, Human
cccaaugucugcccacaug

SEQ ID NO: 1281665 - RNA, 19 nt, Human
cccaggcgcuccgucucca

SEQ ID NO: 1281666 - RNA, 24 nt, Human
ccgcacaggacuuggggcgaaucc

SEQ ID NO: 1281667 - RNA, 18 nt, Human
ccgggucgcgcucaggau

SEQ ID NO: 1281668 - RNA, 19 nt, Human
ccgggucgcgcucaggauu

SEQ ID NO: 1281669 - RNA, 22 nt, Human
ccucccaggcgcuccgucucca

SEQ ID NO: 1281670 - RNA, 19 nt, Human
ccucuggacuugaagugga

SEQ ID NO: 1281671 - RNA, 18 nt, Human
ccuggcgucuccagcgcc

SEQ ID NO: 1281672 - RNA, 21 nt, Human
ccuucagaaacauagauccac

SEQ ID NO: 1281673 - RNA, 18 nt, Human
cgaacaguccaggacucu

SEQ ID NO: 1281674 - RNA, 22 nt, Human
cgagaagggaccgcucugggca

SEQ ID NO: 1281675 - RNA, 24 nt, Human
cgccccggacgugcccucccaggc

SEQ ID NO: 1281676 - RNA, 18 nt, Human
cgucccagugcccggguc

SEQ ID NO: 1281677 - RNA, 21 nt, Human
cuccagcgccccggacgugcc

SEQ ID NO: 1281678 - RNA, 18 nt, Human
cuggugucaacuucacaa

SEQ ID NO: 1281679 - RNA, 22 nt, Human
cuucagucucacccccauguuc

SEQ ID NO: 1281680 - RNA, 19 nt, Human
gaagaaaagagaaccacac

SEQ ID NO: 1281681 - RNA, 18 nt, Human
gaagacagaaagggaggg

SEQ ID NO: 1281682 - RNA, 19 nt, Human
gacaaugaaagcccucuca

SEQ ID NO: 1281683 - RNA, 23 nt, Human
gagcaaggagcgcucucagcagc

SEQ ID NO: 1281684 - RNA, 19 nt, Human
gagggaggggugggguggc

SEQ ID NO: 1281685 - RNA, 22 nt, Human
gagguaacagcccugucauaug

SEQ ID NO: 1281686 - RNA, 23 nt, Human
gaugauuuacaauuauacugagg

SEQ ID NO: 1281687 - RNA, 21 nt, Human
gccaguugacaagagcagcag

SEQ ID NO: 1281688 - RNA, 23 nt, Human
gcuuucaacaauacuugaucuga

SEQ ID NO: 1281689 - RNA, 19 nt, Human
ggacugggacugccagcgc

SEQ ID NO: 1281690 - RNA, 21 nt, Human
ggacugggacugccagcgcug

SEQ ID NO: 1281691 - RNA, 18 nt, Human
ggagagcaagagggaggg

SEQ ID NO: 1281692 - RNA, 19 nt, Human
ggcaggcuccauggagaag

SEQ ID NO: 1281693 - RNA, 24 nt, Human
ggugggguggcgagaaucuggagc

SEQ ID NO: 1281694 - RNA, 19 nt, Human
gugcccucccaggcgcucc

SEQ ID NO: 1281695 - RNA, 18 nt, Human
uaacaagcagauacuccu

SEQ ID NO: 1281696 - RNA, 19 nt, Human
uaacaagcagauacuccua

SEQ ID NO: 1281697 - RNA, 19 nt, Human
uaaccaauaacaagcagag

SEQ ID NO: 1281698 - RNA, 20 nt, Human
uaagacagacacuuauaacc

SEQ ID NO: 1281699 - RNA, 20 nt, Human
uaagacagacacuuauaacu

SEQ ID NO: 1281700 - RNA, 21 nt, Human
uacauuaaguuugucuuuuua

SEQ ID NO: 1281701 - RNA, 24 nt, Human
uaccucuacccgcgacgcugggaa

SEQ ID NO: 1281702 - RNA, 20 nt, Human
uacuguaugcuggaaaaaag

SEQ ID NO: 1281703 - RNA, 23 nt, Human
uagaggaggaaagagaggaagac

SEQ ID NO: 1281704 - RNA, 24 nt, Human
uagcuggugucaacuucacaaaag

SEQ ID NO: 1281705 - RNA, 25 nt, Human
uaugcuggaaaaaaguuacuacauu

SEQ ID NO: 1281706 - RNA, 27 nt, Human
uauguguaguaaagauaagacagacac

SEQ ID NO: 1281707 - RNA, 18 nt, Human
ucagucucacccccaugu

SEQ ID NO: 1281708 - RNA, 20 nt, Human
ucagucucacccccauguuc

SEQ ID NO: 1281709 - RNA, 22 nt, Human
uccgcagagccgcggcuuggca

SEQ ID NO: 1281710 - RNA, 19 nt, Human
uccuucagaaacauagauc

SEQ ID NO: 1281711 - RNA, 26 nt, Human
uccuucagaaacauagauccaccuga

SEQ ID NO: 1281712 - RNA, 22 nt, Human
ucgggccuggcgucuccagcgc

SEQ ID NO: 1281713 - RNA, 23 nt, Human
ucuaaagacacauuuuuccauuu

SEQ ID NO: 1281714 - RNA, 22 nt, Human
ugacaagagcagcaguguagac

SEQ ID NO: 1281715 - RNA, 18 nt, Human
ugagaacaggccccuuuc

SEQ ID NO: 1281716 - RNA, 18 nt, Human
ugagggaugaagcugacu

SEQ ID NO: 1281717 - RNA, 21 nt, Human
ugagucagacaaugaaagccc

SEQ ID NO: 1281718 - RNA, 19 nt, Human
ugcaugacgguguguuugu

SEQ ID NO: 1281719 - RNA, 20 nt, Human
uggagucccgggcgcugucc

SEQ ID NO: 1281720 - RNA, 21 nt, Human
uggagucccgggcgcuguccc

SEQ ID NO: 1281721 - RNA, 21 nt, Human
ugggcaggcuccauggagaag

SEQ ID NO: 1281722 - RNA, 23 nt, Human
ugggcaggcuccauggagaagcu

SEQ ID NO: 1281723 - RNA, 22 nt, Human
uggugucaacuucacaaaaguc

SEQ ID NO: 1281724 - RNA, 25 nt, Human
uggugucaacuucacaaaaguccaa

SEQ ID NO: 1281725 - RNA, 21 nt, Human
ugucugccaggcauuucccuu

SEQ ID NO: 1281726 - RNA, 21 nt, Human
uuacuacauuuuguuguguuu

SEQ ID NO: 1281727 - RNA, 18 nt, Human
uucaaagaaaaaagagcc

SEQ ID NO: 1281728 - RNA, 21 nt, Human
aagagcagcaaaucuugaaca

SEQ ID NO: 1281729 - RNA, 19 nt, Human
aagcaccaccagaaggagg

SEQ ID NO: 1281730 - RNA, 22 nt, Human
auauucaaguauugagaaugcc

SEQ ID NO: 1281731 - RNA, 22 nt, Human
aucauuaaucuugucuugaagu

SEQ ID NO: 1281732 - RNA, 19 nt, Human
caaaguuccuccagcucuu

SEQ ID NO: 1281733 - RNA, 21 nt, Human
caccaacagggaaucccccag

SEQ ID NO: 1281734 - RNA, 23 nt, Human
caccaccagaaggaggagcucca

SEQ ID NO: 1281735 - RNA, 21 nt, Human
caccagaaggaggagcuccaa

SEQ ID NO: 1281736 - RNA, 23 nt, Human
cauauucaaguauugagaaugcc

SEQ ID NO: 1281737 - RNA, 20 nt, Human
ccagaaucuucuguuugucc

SEQ ID NO: 1281738 - RNA, 27 nt, Human
ccuccagcucuuucugcuggggccgcc

SEQ ID NO: 1281739 - RNA, 22 nt, Human
cgccuugucccucugcuucuca

SEQ ID NO: 1281740 - RNA, 21 nt, Human
cugcacucugguacagcuugg

SEQ ID NO: 1281741 - RNA, 18 nt, Human
gacuccacuagcaguuuc

SEQ ID NO: 1281742 - RNA, 18 nt, Human
gcaugccuucugcacucu

SEQ ID NO: 1281743 - RNA, 20 nt, Human
gccuugucccucugcuucuc

SEQ ID NO: 1281744 - RNA, 18 nt, Human
uacagcuuggugaugauu

SEQ ID NO: 1281745 - RNA, 18 nt, Human
uacaguguuuauaaagug

SEQ ID NO: 1281746 - RNA, 19 nt, Human
uacaguguuuauaaagugc

SEQ ID NO: 1281747 - RNA, 21 nt, Human
uacaguguuuauaaagugcaa

SEQ ID NO: 1281748 - RNA, 22 nt, Human
uaccaagggaaagaggagugac

SEQ ID NO: 1281749 - RNA, 23 nt, Human
uaccaagggaaagaggagugacg

SEQ ID NO: 1281750 - RNA, 18 nt, Human
ucccccaggcauucuucc

SEQ ID NO: 1281751 - RNA, 20 nt, Human
ucccucugcuucucaucuuc

SEQ ID NO: 1281752 - RNA, 23 nt, Human
ucccucugcuucucaucuucagc

SEQ ID NO: 1281753 - RNA, 18 nt, Human
ugaauucuuggaugacgc

SEQ ID NO: 1281754 - RNA, 19 nt, Human
ugacguccaagagcagcaa

SEQ ID NO: 1281755 - RNA, 21 nt, Human
ugccacagaauuugcuacaaa

SEQ ID NO: 1281756 - RNA, 20 nt, Human
uggcaugccuucugcacucu

SEQ ID NO: 1281757 - RNA, 23 nt, Human
uucaaauucuuccuucuuggcag

SEQ ID NO: 1281758 - RNA, 24 nt, Human
uucaaauucuuccuucuuggcagu

SEQ ID NO: 1281759 - RNA, 23 nt, Human
uuucugcugauguucaaauucuu

SEQ ID NO: 1281760 - RNA, 20 nt, Human
aaaaaggcuuugaaauuaaa

SEQ ID NO: 1281761 - RNA, 21 nt, Human
aaaacagauaaaauggacuuu

SEQ ID NO: 1281762 - RNA, 25 nt, Human
aaacaaaaauaaggccauuuucaug

SEQ ID NO: 1281763 - RNA, 20 nt, Human
aaacagauaaaauggacuuu

SEQ ID NO: 1281764 - RNA, 24 nt, Human
aaacauccagaccaggggucagca

SEQ ID NO: 1281765 - RNA, 22 nt, Human
aaacaugaauauaauaaccuuc

SEQ ID NO: 1281766 - RNA, 22 nt, Human
aaagagaucaacuuuaggauua

SEQ ID NO: 1281767 - RNA, 19 nt, Human
aaagugucaauagagaagu

SEQ ID NO: 1281768 - RNA, 24 nt, Human
aacacagcuguuuaagauaaaaua

SEQ ID NO: 1281769 - RNA, 25 nt, Human
acagugaccuuccaauauguucucu

SEQ ID NO: 1281770 - RNA, 18 nt, Human
accaggggucagcaaaau

SEQ ID NO: 1281771 - RNA, 19 nt, Human
aguuuuaaaguaacaauau

SEQ ID NO: 1281772 - RNA, 28 nt, Human
auauaugggugugugugugugugugugg

SEQ ID NO: 1281773 - RNA, 21 nt, Human
aucacaguuuuaaaguaacaa

SEQ ID NO: 1281774 - RNA, 21 nt, Human
caaaaaaggcuuugaaauuaa

SEQ ID NO: 1281775 - RNA, 18 nt, Human
caccguaguauccucaaa

SEQ ID NO: 1281776 - RNA, 20 nt, Human
cacugugccauucccagggc

SEQ ID NO: 1281777 - RNA, 22 nt, Human
caguaaaaauaagguuuugaug

SEQ ID NO: 1281778 - RNA, 22 nt, Human
cauuauugucucaugucagaaa

SEQ ID NO: 1281779 - RNA, 22 nt, Human
ccaaaacacuuuuacaggaaca

SEQ ID NO: 1281780 - RNA, 25 nt, Human
ccaaaacacuuuuacaggaacacag

SEQ ID NO: 1281781 - RNA, 23 nt, Human
ccacaauagagucuuucuuaacu

SEQ ID NO: 1281782 - RNA, 19 nt, Human
ccacugugccauucccagg

SEQ ID NO: 1281783 - RNA, 23 nt, Human
ccugaaaagcuaguguccucucu

SEQ ID NO: 1281784 - RNA, 24 nt, Human
cuacaucuguagaaaauacagcua

SEQ ID NO: 1281785 - RNA, 22 nt, Human
cuagcauuaaaaaacauccaga

SEQ ID NO: 1281786 - RNA, 18 nt, Human
cuccucuuuccaccuuuc

SEQ ID NO: 1281787 - RNA, 24 nt, Human
cuuuuuaaauucacuuaagcuaca

SEQ ID NO: 1281788 - RNA, 21 nt, Human
gaauuagcgcuuacugcauuu

SEQ ID NO: 1281789 - RNA, 18 nt, Human
gauugcuacguucuccuc

SEQ ID NO: 1281790 - RNA, 18 nt, Human
gcauuaaaaaacauccag

SEQ ID NO: 1281791 - RNA, 21 nt, Human
ggugugugugugugugugugu

SEQ ID NO: 1281792 - RNA, 23 nt, Human
guguguguguguguguguguaau

SEQ ID NO: 1281793 - RNA, 25 nt, Human
guuacuacuauauuccccucccaaa

SEQ ID NO: 1281794 - RNA, 20 nt, Human
uaagcaaaucagccccuuuc

SEQ ID NO: 1281795 - RNA, 24 nt, Human
uaagcaaaucagccccuuucaaaa

SEQ ID NO: 1281796 - RNA, 21 nt, Human
uacguucuccucuuuccaccu

SEQ ID NO: 1281797 - RNA, 25 nt, Human
uacuguccacauauuggauuaguua

SEQ ID NO: 1281798 - RNA, 21 nt, Human
uagcauuaaaaaacauccaga

SEQ ID NO: 1281799 - RNA, 22 nt, Human
uauauauaugcaugcauauagu

SEQ ID NO: 1281800 - RNA, 25 nt, Human
uauauauaugcaugcauauaugcug

SEQ ID NO: 1281801 - RNA, 19 nt, Human
uauaugggugugugugugu

SEQ ID NO: 1281802 - RNA, 19 nt, Human
uauaugggugugugugugu

SEQ ID NO: 1281803 - RNA, 19 nt, Human
uauaugggugugugugugu

SEQ ID NO: 1281804 - RNA, 23 nt, Human
uauuccccucccaaauuuuuaga

SEQ ID NO: 1281805 - RNA, 19 nt, Human
uauugcuuuuuaauggcac

SEQ ID NO: 1281806 - RNA, 20 nt, Human
ucaaacuuuuucugcucuuc

SEQ ID NO: 1281807 - RNA, 18 nt, Human
uccacauauuggauuagu

SEQ ID NO: 1281808 - RNA, 21 nt, Human
ucuaauccaaaacacuuuuac

SEQ ID NO: 1281809 - RNA, 21 nt, Human
ugaaaaaugaaugaaaacgaa

SEQ ID NO: 1281810 - RNA, 18 nt, Human
ugaaaagcuaguguccuc

SEQ ID NO: 1281811 - RNA, 18 nt, Human
ugaaaaugguauugcuuu

SEQ ID NO: 1281812 - RNA, 21 nt, Human
ugaaauaguccagcaaaauca

SEQ ID NO: 1281813 - RNA, 23 nt, Human
ugaauaaaauguauuuuucauaa

SEQ ID NO: 1281814 - RNA, 23 nt, Human
ugcaaauacucuaaugaacagca

SEQ ID NO: 1281815 - RNA, 24 nt, Human
uguagaaaauacagcuacuucuga

SEQ ID NO: 1281816 - RNA, 18 nt, Human
uguguauauauauauaug

SEQ ID NO: 1281817 - RNA, 22 nt, Human
uguguauauauauauaugcaug

SEQ ID NO: 1281818 - RNA, 23 nt, Human
uguguguauauauauauaugcau

SEQ ID NO: 1281819 - RNA, 18 nt, Human
uguguguguauauauaua

SEQ ID NO: 1281820 - RNA, 24 nt, Human
uguguguguauauauauauaugau

SEQ ID NO: 1281821 - RNA, 26 nt, Human
uguguguguguauauauauauaaugu

SEQ ID NO: 1281822 - RNA, 23 nt, Human
uguguguguguauauauauauau

SEQ ID NO: 1281823 - RNA, 23 nt, Human
uguguguguguguauauauauau

SEQ ID NO: 1281824 - RNA, 20 nt, Human
uguguguguguguguauaua

SEQ ID NO: 1281825 - RNA, 18 nt, Human
ugugugugugugugugug

SEQ ID NO: 1281826 - RNA, 24 nt, Human
uguguguguguguguguguauaua

SEQ ID NO: 1281827 - RNA, 20 nt, Human
uuaaaaaccaaacaacagac

SEQ ID NO: 1281828 - RNA, 24 nt, Human
uuaaaaaccaaacaacagaccuuc

SEQ ID NO: 1281829 - RNA, 22 nt, Human
uuaaauauuguuccacugugcc

SEQ ID NO: 1281830 - RNA, 24 nt, Human
uuaauggcaccuuuugaguuuucu

SEQ ID NO: 1281831 - RNA, 23 nt, Human
uuaucuggaagaccccugauuau

SEQ ID NO: 1281832 - RNA, 22 nt, Human
uuccaccuuucuaacgagguua

SEQ ID NO: 1281833 - RNA, 19 nt, Human
uugaaauuaagauuacugu

SEQ ID NO: 1281834 - RNA, 18 nt, Human
uuuagaaggaacaguaaa

SEQ ID NO: 1281835 - RNA, 20 nt, Human
uuuaugcacucuuuuuaaau

SEQ ID NO: 1281836 - RNA, 18 nt, Human
aaaaauauuaaagaaggc

SEQ ID NO: 1281837 - RNA, 18 nt, Human
aacauuccaaaucuugcu

SEQ ID NO: 1281838 - RNA, 24 nt, Human
aaucaaaauggcuucccauugcuu

SEQ ID NO: 1281839 - RNA, 24 nt, Human
aggcauuaggaauuuuuuuaaacc

SEQ ID NO: 1281840 - RNA, 21 nt, Human
auaguuauauuaaauggguac

SEQ ID NO: 1281841 - RNA, 23 nt, Human
caaaauggcuucccauugcuuga

SEQ ID NO: 1281842 - RNA, 23 nt, Human
caauagcuuuucuccacgagcuc

SEQ ID NO: 1281843 - RNA, 20 nt, Human
cacaucucacgguacuacuu

SEQ ID NO: 1281844 - RNA, 19 nt, Human
cagacggugguucuuuugc

SEQ ID NO: 1281845 - RNA, 21 nt, Human
cauugcuugacguuuguuuuc

SEQ ID NO: 1281846 - RNA, 24 nt, Human
ccaugcuaaauucucuuugauugu

SEQ ID NO: 1281847 - RNA, 23 nt, Human
cucaaucuuuguuccacuggaga

SEQ ID NO: 1281848 - RNA, 21 nt, Human
gcauagcuucaauuuaagugc

SEQ ID NO: 1281849 - RNA, 18 nt, Human
ggggaguagggcucaauu

SEQ ID NO: 1281850 - RNA, 21 nt, Human
uaaaaauauuaaagaaggcua

SEQ ID NO: 1281851 - RNA, 19 nt, Human
uaaagaaggcuaaaaggca

SEQ ID NO: 1281852 - RNA, 25 nt, Human
uaacuuucucuucagucgaaugaga

SEQ ID NO: 1281853 - RNA, 22 nt, Human
uaccuacaaagagaaaaaaucc

SEQ ID NO: 1281854 - RNA, 23 nt, Human
uacucaagaaaucaaaauggcuu

SEQ ID NO: 1281855 - RNA, 19 nt, Human
ucacgguacuacuuuucuc

SEQ ID NO: 1281856 - RNA, 26 nt, Human
ucagucgaaugagacuggccaaaauc

SEQ ID NO: 1281857 - RNA, 23 nt, Human
ucaucuguuuguacauuuugggg

SEQ ID NO: 1281858 - RNA, 24 nt, Human
ugaaaaacaguguuacacuuccaa

SEQ ID NO: 1281859 - RNA, 19 nt, Human
ugaggcacacacucgcaau

SEQ ID NO: 1281860 - RNA, 25 nt, Human
ugaggcacacacucgcaaucugaaa

SEQ ID NO: 1281861 - RNA, 25 nt, Human
ugcacuuuauuccaucaaacaucac

SEQ ID NO: 1281862 - RNA, 21 nt, Human
ugcaucaaggcucuuauucaa

SEQ ID NO: 1281863 - RNA, 25 nt, Human
ugguuugugucuuucagguguuugg

SEQ ID NO: 1281864 - RNA, 20 nt, Human
ugucuucuucuuuuaaauua

SEQ ID NO: 1281865 - RNA, 22 nt, Human
uuaaugcuuacaagauuacuca

SEQ ID NO: 1281866 - RNA, 19 nt, Human
uuaguucuguuuucuucca

SEQ ID NO: 1281867 - RNA, 21 nt, Human
uugacguuuguuuuccaaaua

SEQ ID NO: 1281868 - RNA, 24 nt, Human
uuucuauccuguggcauagcuuca

SEQ ID NO: 1281869 - RNA, 22 nt, Human
uuucugguuagccagaauguuc

SEQ ID NO: 1281870 - RNA, 22 nt, Human
aaaaauauuauccaguauucac

SEQ ID NO: 1281871 - RNA, 28 nt, Human
aaagauuauaaagaaaaaaauuagacaa

SEQ ID NO: 1281872 - RNA, 19 nt, Human
aaauauccaccccagauac

SEQ ID NO: 1281873 - RNA, 23 nt, Human
aaaucugcaaaucacauccauua

SEQ ID NO: 1281874 - RNA, 19 nt, Human
aaccccaaaagcuaagaaa

SEQ ID NO: 1281875 - RNA, 24 nt, Human
aagcagaaaagauuauaaagaaaa

SEQ ID NO: 1281876 - RNA, 19 nt, Human
aagcuaagaaaacauucua

SEQ ID NO: 1281877 - RNA, 20 nt, Human
aaggcgugcgaguggauggc

SEQ ID NO: 1281878 - RNA, 23 nt, Human
aaguggggagugggcaagcgggg

SEQ ID NO: 1281879 - RNA, 24 nt, Human
aauacagaaaggauaaaaaccaga

SEQ ID NO: 1281880 - RNA, 22 nt, Human
acaagcaaggacuuaaagauac

SEQ ID NO: 1281881 - RNA, 23 nt, Human
acauaccuauauguauuucuaca

SEQ ID NO: 1281882 - RNA, 18 nt, Human
acugcccucccuaaacac

SEQ ID NO: 1281883 - RNA, 22 nt, Human
acuugcacugaacuaggucucc

SEQ ID NO: 1281884 - RNA, 22 nt, Human
agaaaaagcaauuuugaaucug

SEQ ID NO: 1281885 - RNA, 24 nt, Human
agaacccuaauccaagugcccuac

SEQ ID NO: 1281886 - RNA, 28 nt, Human
agaguugcucaucuacauuauaaggcag

SEQ ID NO: 1281887 - RNA, 21 nt, Human
aggcaaaaaucauaaaucagg

SEQ ID NO: 1281888 - RNA, 22 nt, Human
aggcuaagccaucuguucauca

SEQ ID NO: 1281889 - RNA, 18 nt, Human
agugagugacuggacugc

SEQ ID NO: 1281890 - RNA, 24 nt, Human
augaauauagacuucaugagucac

SEQ ID NO: 1281891 - RNA, 20 nt, Human
auggauacacacauauaugu

SEQ ID NO: 1281892 - RNA, 20 nt, Human
augugugugugugugcgugu

SEQ ID NO: 1281893 - RNA, 22 nt, Human
augugugugugugugcgugugu

SEQ ID NO: 1281894 - RNA, 21 nt, Human
auuaaugccauucagaacagc

SEQ ID NO: 1281895 - RNA, 19 nt, Human
caacgucagcccgccgcuc

SEQ ID NO: 1281896 - RNA, 22 nt, Human
cacaagcaaggacuuaaagaua

SEQ ID NO: 1281897 - RNA, 20 nt, Human
caccccagauacugaaucau

SEQ ID NO: 1281898 - RNA, 19 nt, Human
cacugcaaacauccugcug

SEQ ID NO: 1281899 - RNA, 26 nt, Human
cagaaaagauuauaaagaaaaaaauu

SEQ ID NO: 1281900 - RNA, 21 nt, Human
cagaauccugugacuaagcuu

SEQ ID NO: 1281901 - RNA, 20 nt, Human
cagcgaggcuuccugcggag

SEQ ID NO: 1281902 - RNA, 23 nt, Human
ccagauacugaaucauauauaau

SEQ ID NO: 1281903 - RNA, 18 nt, Human
ccccaaaagcuaagaaaa

SEQ ID NO: 1281904 - RNA, 20 nt, Human
ccugcggagcccaggcugga

SEQ ID NO: 1281905 - RNA, 19 nt, Human
cucugcaccacuuacaguc

SEQ ID NO: 1281906 - RNA, 22 nt, Human
cugcuugcuuggcgagggcugg

SEQ ID NO: 1281907 - RNA, 18 nt, Human
cuuacagucuucaauccc

SEQ ID NO: 1281908 - RNA, 23 nt, Human
cuuccugcggagcccaggcugga

SEQ ID NO: 1281909 - RNA, 21 nt, Human
cuugcgugaucacugcccucc

SEQ ID NO: 1281910 - RNA, 24 nt, Human
cuugcgugaucacugcccucccua

SEQ ID NO: 1281911 - RNA, 22 nt, Human
gaaggcaaauucacagaggagu

SEQ ID NO: 1281912 - RNA, 22 nt, Human
gagcuaugggucgcugaaaaug

SEQ ID NO: 1281913 - RNA, 19 nt, Human
gagucacuuuuuucucucc

SEQ ID NO: 1281914 - RNA, 21 nt, Human
gcccuggaaaugaagcaccac

SEQ ID NO: 1281915 - RNA, 18 nt, Human
gcuugcuuggcgagggcu

SEQ ID NO: 1281916 - RNA, 19 nt, Human
ggagaguugcucaucuaca

SEQ ID NO: 1281917 - RNA, 19 nt, Human
ggcgugcgaguggauggca

SEQ ID NO: 1281918 - RNA, 20 nt, Human
ggcuguggggagaagggauu

SEQ ID NO: 1281919 - RNA, 18 nt, Human
gggaaguggggagugggc

SEQ ID NO: 1281920 - RNA, 22 nt, Human
gggaagugucucggcugccugg

SEQ ID NO: 1281921 - RNA, 22 nt, Human
gguacugcucauuccacgaagc

SEQ ID NO: 1281922 - RNA, 19 nt, Human
gucuucaauccccccucca

SEQ ID NO: 1281923 - RNA, 19 nt, Human
guggauggcaggcucaguc

SEQ ID NO: 1281924 - RNA, 21 nt, Human
gugugugcgugugugugugug

SEQ ID NO: 1281925 - RNA, 30 nt, Human
gugugugcgugugugugugugugugugugg

SEQ ID NO: 1281926 - RNA, 20 nt, Human
uaaaauaaauagauauuuug

SEQ ID NO: 1281927 - RNA, 19 nt, Human
uaaaccccaaaagcuaaga

SEQ ID NO: 1281928 - RNA, 21 nt, Human
uaaaccccaaaagcuaagaaa

SEQ ID NO: 1281929 - RNA, 25 nt, Human
uaagcuucuaaauuggccuggaagg

SEQ ID NO: 1281930 - RNA, 22 nt, Human
uacagaaaggauaaaaaccaga

SEQ ID NO: 1281931 - RNA, 19 nt, Human
uagaaccagcuggcuggga

SEQ ID NO: 1281932 - RNA, 22 nt, Human
uagccaacagccgaaaagcccu

SEQ ID NO: 1281933 - RNA, 25 nt, Human
uagguuguaaauugucugcuuaggc

SEQ ID NO: 1281934 - RNA, 27 nt, Human
uaguguguauggauacacacauauagu

SEQ ID NO: 1281935 - RNA, 24 nt, Human
uauaaagaaaaaaauuagacaaau

SEQ ID NO: 1281936 - RNA, 22 nt, Human
uauauguauuucuacauguaua

SEQ ID NO: 1281937 - RNA, 24 nt, Human
uauauguauuucuacauguauaua

SEQ ID NO: 1281938 - RNA, 24 nt, Human
uaugauaaugugaagaaagagggg

SEQ ID NO: 1281939 - RNA, 19 nt, Human
uauggauacacacauauau

SEQ ID NO: 1281940 - RNA, 19 nt, Human
ucacuuggaauagguaauc

SEQ ID NO: 1281941 - RNA, 19 nt, Human
ucagaugcccuggaaauga

SEQ ID NO: 1281942 - RNA, 21 nt, Human
ucagcccgccgcuccggcuug

SEQ ID NO: 1281943 - RNA, 18 nt, Human
uccauuaggaaguaaagc

SEQ ID NO: 1281944 - RNA, 22 nt, Human
ucccuaaacacggagccggcuc

SEQ ID NO: 1281945 - RNA, 20 nt, Human
uccugcggagcccaggcugg

SEQ ID NO: 1281946 - RNA, 21 nt, Human
uccugcggagcccaggcugga

SEQ ID NO: 1281947 - RNA, 18 nt, Human
uccugcugcuugcuuggc

SEQ ID NO: 1281948 - RNA, 21 nt, Human
uccuucuaccuuuaacucuag

SEQ ID NO: 1281949 - RNA, 19 nt, Human
ucuacauguauauauauau

SEQ ID NO: 1281950 - RNA, 21 nt, Human
ucuguuugauuuuauucugcc

SEQ ID NO: 1281951 - RNA, 21 nt, Human
ugaagaaagaggggaaaaucc

SEQ ID NO: 1281952 - RNA, 22 nt, Human
ugacuggacugccccagcuucu

SEQ ID NO: 1281953 - RNA, 24 nt, Human
ugagaugagaucucagaaaucauc

SEQ ID NO: 1281954 - RNA, 19 nt, Human
ugagaugugugugugugug

SEQ ID NO: 1281955 - RNA, 23 nt, Human
ugagaugugugugugugugcgug

SEQ ID NO: 1281956 - RNA, 21 nt, Human
ugaggcaaaaaucauaaauca

SEQ ID NO: 1281957 - RNA, 21 nt, Human
ugauauggcaugucucucuca

SEQ ID NO: 1281958 - RNA, 24 nt, Human
ugccccagcuucugaaaucgaaau

SEQ ID NO: 1281959 - RNA, 21 nt, Human
ugcgugugugugugugugugu

SEQ ID NO: 1281960 - RNA, 21 nt, Human
ugcgugugugugugugugugu

SEQ ID NO: 1281961 - RNA, 20 nt, Human
ugcucccuucaucccauguc

SEQ ID NO: 1281962 - RNA, 20 nt, Human
uggaaucgcugggaaguguc

SEQ ID NO: 1281963 - RNA, 18 nt, Human
uggauacacacauauaug

SEQ ID NO: 1281964 - RNA, 20 nt, Human
uggcuguggggagaagggau

SEQ ID NO: 1281965 - RNA, 24 nt, Human
ugggaagugucucggcugccuggc

SEQ ID NO: 1281966 - RNA, 20 nt, Human
uggggagugggcaagcgggg

SEQ ID NO: 1281967 - RNA, 23 nt, Human
uguauauauauauuugauauaua

SEQ ID NO: 1281968 - RNA, 26 nt, Human
uguauggauacacacauauauguucc

SEQ ID NO: 1281969 - RNA, 25 nt, Human
ugucuaacuucuuuuaugauaaugu

SEQ ID NO: 1281970 - RNA, 21 nt, Human
ugugcgugugugugugugugu

SEQ ID NO: 1281971 - RNA, 21 nt, Human
ugugcgugugugugugugugu

SEQ ID NO: 1281972 - RNA, 22 nt, Human
uguggggagaagggauugcgau

SEQ ID NO: 1281973 - RNA, 19 nt, Human
uguguauggauacacacau

SEQ ID NO: 1281974 - RNA, 19 nt, Human
ugugugcgugugugugugu

SEQ ID NO: 1281975 - RNA, 21 nt, Human
ugugugcgugugugugugugu

SEQ ID NO: 1281976 - RNA, 21 nt, Human
ugugugugcgugugugugugu

SEQ ID NO: 1281977 - RNA, 25 nt, Human
ugugugugcgugugugugugugugu

SEQ ID NO: 1281978 - RNA, 20 nt, Human
ugugugugugugcgugugug

SEQ ID NO: 1281979 - RNA, 22 nt, Human
ugugugugugugcgugugugug

SEQ ID NO: 1281980 - RNA, 25 nt, Human
ugugugugugugcgugugugugugu

SEQ ID NO: 1281981 - RNA, 21 nt, Human
ugugugugugugugcgugugu

SEQ ID NO: 1281982 - RNA, 18 nt, Human
ugugugugugugugugug

SEQ ID NO: 1281983 - RNA, 18 nt, Human
ugugugugugugugugug

SEQ ID NO: 1281984 - RNA, 23 nt, Human
uguguguguguguguguguguaa

SEQ ID NO: 1281985 - RNA, 22 nt, Human
uguguguguguguguguguguu

SEQ ID NO: 1281986 - RNA, 20 nt, Human
uguuagaagagaucuagagu

SEQ ID NO: 1281987 - RNA, 22 nt, Human
uuaaauauuagcaauguaauuu

SEQ ID NO: 1281988 - RNA, 21 nt, Human
uuagguuguaaauugucugcu

SEQ ID NO: 1281989 - RNA, 18 nt, Human
uucagcuaccuggcagcu

SEQ ID NO: 1281990 - RNA, 20 nt, Human
uucagcuaccuggcagcucg

SEQ ID NO: 1281991 - RNA, 22 nt, Human
uucaugagucacuuuuuucucu

SEQ ID NO: 1281992 - RNA, 20 nt, Human
uucuacauguauauauauau

SEQ ID NO: 1281993 - RNA, 19 nt, Human
uuggcgagggcuggcugug

SEQ ID NO: 1281994 - RNA, 23 nt, Human
uuggcgagggcuggcugugggga

SEQ ID NO: 1281995 - RNA, 20 nt, Human
uuguuagaagagaucuagag

SEQ ID NO: 1281996 - RNA, 18 nt, Human
aagcagcaccaggagcgg

SEQ ID NO: 1281997 - RNA, 24 nt, Human
caaacgagcacacaagcagcacca

SEQ ID NO: 1281998 - RNA, 18 nt, Human
caauaaaggaauggggaa

SEQ ID NO: 1281999 - RNA, 20 nt, Human
cacaagcagcaccaggagcg

SEQ ID NO: 1282000 - RNA, 25 nt, Human
ccagguccgcaccaaacgagcacac

SEQ ID NO: 1282001 - RNA, 19 nt, Human
cuggaguaaagaagcaggu

SEQ ID NO: 1282002 - RNA, 18 nt, Human
gaguaaagaagcagguuc

SEQ ID NO: 1282003 - RNA, 23 nt, Human
gcacauauaccaguuauguacaa

SEQ ID NO: 1282004 - RNA, 21 nt, Human
gggaagggggaaaugaaagac

SEQ ID NO: 1282005 - RNA, 21 nt, Human
ucagcugccacuucacaaaag

SEQ ID NO: 1282006 - RNA, 24 nt, Human
uccucagcugccacuucacaaaag

SEQ ID NO: 1282007 - RNA, 20 nt, Human
ucuggaguaaagaagcaggu

SEQ ID NO: 1282008 - RNA, 19 nt, Human
uggggaagggggaaaugaa

SEQ ID NO: 1282009 - RNA, 23 nt, Human
ugugcacauauaccaguuaugua

SEQ ID NO: 1282010 - RNA, 23 nt, Human
ugugcacauauaccaguuaugua

SEQ ID NO: 1282011 - RNA, 19 nt, Human
agauaucgaagcaguaaac

SEQ ID NO: 1282012 - RNA, 23 nt, Human
cauucuugcugcucucuuuuaau

SEQ ID NO: 1282013 - RNA, 19 nt, Human
cgaagcaguaaacuuaagu

SEQ ID NO: 1282014 - RNA, 21 nt, Human
cugcccaggccuguggccacc

SEQ ID NO: 1282015 - RNA, 22 nt, Human
ggcggccaccugcccgcgucug

SEQ ID NO: 1282016 - RNA, 18 nt, Human
guuacaguuggaguuaca

SEQ ID NO: 1282017 - RNA, 30 nt, Human
ugaccaaacauggauucucuccuccucagg

SEQ ID NO: 1282018 - RNA, 25 nt, Human
aaaaaaaaguauuaaaggcagauga

SEQ ID NO: 1282019 - RNA, 19 nt, Human
aaaaccauaccaaggccau

SEQ ID NO: 1282020 - RNA, 22 nt, Human
aaaggcgucccauggagauucu

SEQ ID NO: 1282021 - RNA, 23 nt, Human
aaaggcgucccauggagauucug

SEQ ID NO: 1282022 - RNA, 26 nt, Human
aaauccugcaguaauacugaugcucc

SEQ ID NO: 1282023 - RNA, 18 nt, Human
aauagguucuccuuagag

SEQ ID NO: 1282024 - RNA, 23 nt, Human
aauauaaauaaaaccauaccaag

SEQ ID NO: 1282025 - RNA, 22 nt, Human
aauuuguuucuuccaaauccug

SEQ ID NO: 1282026 - RNA, 18 nt, Human
acuuagaagagugaaaaa

SEQ ID NO: 1282027 - RNA, 23 nt, Human
aggagacuggcaaggcagagcuu

SEQ ID NO: 1282028 - RNA, 20 nt, Human
auccugcacggagcugaagc

SEQ ID NO: 1282029 - RNA, 25 nt, Human
augcuccagaaaggcgucccaugga

SEQ ID NO: 1282030 - RNA, 19 nt, Human
cauccauccugcacggagc

SEQ ID NO: 1282031 - RNA, 19 nt, Human
ccugcacggagcugaagcu

SEQ ID NO: 1282032 - RNA, 21 nt, Human
cuccucuaguuucauuagcgu

SEQ ID NO: 1282033 - RNA, 22 nt, Human
cuccuuagaguuucuuuuuuuu

SEQ ID NO: 1282034 - RNA, 20 nt, Human
cuggcaaggcagagcuuucu

SEQ ID NO: 1282035 - RNA, 19 nt, Human
gaguuucuuuuuuuuucuu

SEQ ID NO: 1282036 - RNA, 25 nt, Human
gcuccagaaaggcgucccauggaga

SEQ ID NO: 1282037 - RNA, 21 nt, Human
uccagaaaggcgucccaugga

SEQ ID NO: 1282038 - RNA, 24 nt, Human
ugcuccagaaaggcgucccaugga

SEQ ID NO: 1282039 - RNA, 19 nt, Human
ugucaacaaacccguccaa

SEQ ID NO: 1282040 - RNA, 21 nt, Human
uucauuagcguuuagucgugg

SEQ ID NO: 1282041 - RNA, 21 nt, Human
uucgaguuaaucuggaaaacu

SEQ ID NO: 1282042 - RNA, 23 nt, Human
uuuccagcuuccucuuaaauuuc

SEQ ID NO: 1282043 - RNA, 22 nt, Human
agagcucccccugucugugccc

SEQ ID NO: 1282044 - RNA, 22 nt, Human
agccacacaccccugggcagca

SEQ ID NO: 1282045 - RNA, 23 nt, Human
agccacacaccccugggcagcac

SEQ ID NO: 1282046 - RNA, 21 nt, Human
caccccaaacucuagcccugc

SEQ ID NO: 1282047 - RNA, 18 nt, Human
caccccugggcagcacug

SEQ ID NO: 1282048 - RNA, 23 nt, Human
cacuucucagccuuccuggaacu

SEQ ID NO: 1282049 - RNA, 20 nt, Human
cagugagacagagcuccccc

SEQ ID NO: 1282050 - RNA, 22 nt, Human
cccccugucugugcccuggagg

SEQ ID NO: 1282051 - RNA, 18 nt, Human
ccccugggcagcacuguc

SEQ ID NO: 1282052 - RNA, 21 nt, Human
ccccugggcagcacuguccca

SEQ ID NO: 1282053 - RNA, 22 nt, Human
ccugcagguuuuuuaccacagc

SEQ ID NO: 1282054 - RNA, 22 nt, Human
cuaccuggaggccaagacccaa

SEQ ID NO: 1282055 - RNA, 22 nt, Human
cuggaggccaagacccaaccaa

SEQ ID NO: 1282056 - RNA, 19 nt, Human
cuggugauguggucacuuu

SEQ ID NO: 1282057 - RNA, 20 nt, Human
cuuccuggaacugagccugg

SEQ ID NO: 1282058 - RNA, 20 nt, Human
gccacacaccccugggcagc

SEQ ID NO: 1282059 - RNA, 18 nt, Human
gugagacagagcuccccc

SEQ ID NO: 1282060 - RNA, 23 nt, Human
uaacacaugcaugaacucaugua

SEQ ID NO: 1282061 - RNA, 24 nt, Human
uaacacaugcaugaacucauguag

SEQ ID NO: 1282062 - RNA, 24 nt, Human
uaccacagccaccaccaagaauca

SEQ ID NO: 1282063 - RNA, 25 nt, Human
uaccacagccaccaccaagaaucac

SEQ ID NO: 1282064 - RNA, 19 nt, Human
uaggagaggccacaguuac

SEQ ID NO: 1282065 - RNA, 24 nt, Human
uauauucauauauacauauacaug

SEQ ID NO: 1282066 - RNA, 20 nt, Human
uaugggagcugcuccauaga

SEQ ID NO: 1282067 - RNA, 21 nt, Human
ucacuuuuggggagacuguug

SEQ ID NO: 1282068 - RNA, 21 nt, Human
ucagccuuccuggaacugagc

SEQ ID NO: 1282069 - RNA, 23 nt, Human
ucauuuauuuuauguaacugagg

SEQ ID NO: 1282070 - RNA, 19 nt, Human
ucugugcccuggaggugga

SEQ ID NO: 1282071 - RNA, 20 nt, Human
ucugugcccugggaacagug

SEQ ID NO: 1282072 - RNA, 21 nt, Human
ugagacagagcucccccuguc

SEQ ID NO: 1282073 - RNA, 22 nt, Human
ugcccugggaacaguguguccu

SEQ ID NO: 1282074 - RNA, 25 nt, Human
uggaggccaagacccaaccaaagcc

SEQ ID NO: 1282075 - RNA, 18 nt, Human
uggagguggagguaagag

SEQ ID NO: 1282076 - RNA, 22 nt, Human
ugggagugggagugacauacug

SEQ ID NO: 1282077 - RNA, 26 nt, Human
ugucugugcccugggaacagugugac

SEQ ID NO: 1282078 - RNA, 19 nt, Human
uguggucacuuuuggggag

SEQ ID NO: 1282079 - RNA, 24 nt, Human
uuacagugagacagagcucccccu

SEQ ID NO: 1282080 - RNA, 22 nt, Human
uuacuacaguaaagcaauuuaa

SEQ ID NO: 1282081 - RNA, 24 nt, Human
aaaagaaaaaaaaauuucugcaga

SEQ ID NO: 1282082 - RNA, 25 nt, Human
aaaagaaaaaaaaauuucugcagag

SEQ ID NO: 1282083 - RNA, 22 nt, Human
aaaagccucuuuucuuuccacc

SEQ ID NO: 1282084 - RNA, 18 nt, Human
aaaauuagcugggcaugg

SEQ ID NO: 1282085 - RNA, 23 nt, Human
aaacaguauuacacaguugcuuu

SEQ ID NO: 1282086 - RNA, 21 nt, Human
aaagcaaagaggcagcagagc

SEQ ID NO: 1282087 - RNA, 23 nt, Human
aaagcaaagaggcagcagagcuu

SEQ ID NO: 1282088 - RNA, 22 nt, Human
aagacuuaucuugcaagagccc

SEQ ID NO: 1282089 - RNA, 23 nt, Human
aagagcccaggaaagccccaaau

SEQ ID NO: 1282090 - RNA, 20 nt, Human
aagcaaaagaaaaaaaaagg

SEQ ID NO: 1282091 - RNA, 18 nt, Human
aagcaaagaggcagcaga

SEQ ID NO: 1282092 - RNA, 20 nt, Human
aagcagugcugagcagccca

SEQ ID NO: 1282093 - RNA, 22 nt, Human
aagcgucucaugcugagagggg

SEQ ID NO: 1282094 - RNA, 22 nt, Human
aaggacaccaccuggaggcuga

SEQ ID NO: 1282095 - RNA, 21 nt, Human
aauauaagaaauauucucuua

SEQ ID NO: 1282096 - RNA, 24 nt, Human
aaucacuugaacccaggaggcgga

SEQ ID NO: 1282097 - RNA, 21 nt, Human
acagcaucaaguaaggccuuu

SEQ ID NO: 1282098 - RNA, 22 nt, Human
acagugugagcaguguggcagu

SEQ ID NO: 1282099 - RNA, 21 nt, Human
accagcaccgacuguuacaca

SEQ ID NO: 1282100 - RNA, 21 nt, Human
acccaguauggagucugugcc

SEQ ID NO: 1282101 - RNA, 23 nt, Human
acccaucccuuucccaguaucag

SEQ ID NO: 1282102 - RNA, 24 nt, Human
accucgucucuacuaaaaauacaa

SEQ ID NO: 1282103 - RNA, 24 nt, Human
accugaggucaggaguucaagacc

SEQ ID NO: 1282104 - RNA, 20 nt, Human
acgaggcugaggcaggagaa

SEQ ID NO: 1282105 - RNA, 22 nt, Human
acggugggaauagagauauggc

SEQ ID NO: 1282106 - RNA, 23 nt, Human
acuucuguccaggcacacacccc

SEQ ID NO: 1282107 - RNA, 23 nt, Human
acuuuauucacuguuauagacag

SEQ ID NO: 1282108 - RNA, 23 nt, Human
agaccugggguggcuggaggugg

SEQ ID NO: 1282109 - RNA, 21 nt, Human
agagaguaacauggucaccac

SEQ ID NO: 1282110 - RNA, 24 nt, Human
agagauauggcuggaccaaccccc

SEQ ID NO: 1282111 - RNA, 18 nt, Human
agagaugcuaggaauuca

SEQ ID NO: 1282112 - RNA, 20 nt, Human
agaggcagcagagcuugcug

SEQ ID NO: 1282113 - RNA, 20 nt, Human
agaggcuucggucggucccc

SEQ ID NO: 1282114 - RNA, 19 nt, Human
agauguccucggggaaaaa

SEQ ID NO: 1282115 - RNA, 24 nt, Human
agauuugggaggccaaggagggug

SEQ ID NO: 1282116 - RNA, 18 nt, Human
agcaccaccugaggcugg

SEQ ID NO: 1282117 - RNA, 21 nt, Human
agccagcccuggaaauuugca

SEQ ID NO: 1282118 - RNA, 20 nt, Human
agccuggccaacauguugaa

SEQ ID NO: 1282119 - RNA, 23 nt, Human
agccuggccaacauguugaaacc

SEQ ID NO: 1282120 - RNA, 22 nt, Human
aggaaguggggaaucuagaagg

SEQ ID NO: 1282121 - RNA, 18 nt, Human
aggaggagggggccagcc

SEQ ID NO: 1282122 - RNA, 22 nt, Human
aggaggguggaucaccugaggu

SEQ ID NO: 1282123 - RNA, 18 nt, Human
aggcacacaccccuggcc

SEQ ID NO: 1282124 - RNA, 19 nt, Human
aggcacacaccccuggcca

SEQ ID NO: 1282125 - RNA, 18 nt, Human
aggcaggagaaucacuug

SEQ ID NO: 1282126 - RNA, 23 nt, Human
aggcaggagaaucacuugaaccc

SEQ ID NO: 1282127 - RNA, 26 nt, Human
aggcagguggaugcuauauggucaga

SEQ ID NO: 1282128 - RNA, 24 nt, Human
aggcugaggcaggagaaucacuug

SEQ ID NO: 1282129 - RNA, 23 nt, Human
aggcugcugacugaaagccccaa

SEQ ID NO: 1282130 - RNA, 23 nt, Human
aggggcaggaaaagcuguggccc

SEQ ID NO: 1282131 - RNA, 24 nt, Human
agggggccaguagcacauccuggg

SEQ ID NO: 1282132 - RNA, 18 nt, Human
aguaaauggggugggguc

SEQ ID NO: 1282133 - RNA, 23 nt, Human
aucaccugaggucaggaguucaa

SEQ ID NO: 1282134 - RNA, 24 nt, Human
auggagccagccugggguggagug

SEQ ID NO: 1282135 - RNA, 18 nt, Human
auggccccaaacccuguc

SEQ ID NO: 1282136 - RNA, 22 nt, Human
augggcaucucagagagaaagc

SEQ ID NO: 1282137 - RNA, 19 nt, Human
caaagaggaugcugccucc

SEQ ID NO: 1282138 - RNA, 24 nt, Human
caaagccaccaccaagauucauga

SEQ ID NO: 1282139 - RNA, 24 nt, Human
caacauguugaaaccucgucucua

SEQ ID NO: 1282140 - RNA, 19 nt, Human
caaggacaccaccuggagg

SEQ ID NO: 1282141 - RNA, 22 nt, Human
caaggacaccaccuggaggcug

SEQ ID NO: 1282142 - RNA, 24 nt, Human
caaggaggguggaucaccugaggu

SEQ ID NO: 1282143 - RNA, 26 nt, Human
caaggaggguggaucaccugagguca

SEQ ID NO: 1282144 - RNA, 21 nt, Human
cacagagaguaacauggucac

SEQ ID NO: 1282145 - RNA, 27 nt, Human
caccugaggcuggggacugggguaccc

SEQ ID NO: 1282146 - RNA, 23 nt, Human
caccugaggucaggaguucaaga

SEQ ID NO: 1282147 - RNA, 18 nt, Human
caccugggaccccucagc

SEQ ID NO: 1282148 - RNA, 24 nt, Human
cacgaggcugaggcaggagaauca

SEQ ID NO: 1282149 - RNA, 21 nt, Human
cacgcccccaacccagcaauc

SEQ ID NO: 1282150 - RNA, 21 nt, Human
cacuacagacugagcucccag

SEQ ID NO: 1282151 - RNA, 22 nt, Human
cacugcccacugaccacaagga

SEQ ID NO: 1282152 - RNA, 21 nt, Human
cacuguguagccggaaguccc

SEQ ID NO: 1282153 - RNA, 18 nt, Human
cagagaaaaaugggagga

SEQ ID NO: 1282154 - RNA, 25 nt, Human
cagcccaccaggccuggcuugguuu

SEQ ID NO: 1282155 - RNA, 21 nt, Human
caggggcaggaaaagcugugg

SEQ ID NO: 1282156 - RNA, 18 nt, Human
cagugagucuugugucug

SEQ ID NO: 1282157 - RNA, 22 nt, Human
cagugagucuugugucuguucc

SEQ ID NO: 1282158 - RNA, 19 nt, Human
caucaggcaggacaggcuc

SEQ ID NO: 1282159 - RNA, 23 nt, Human
cauggugucaguguuaggccagu

SEQ ID NO: 1282160 - RNA, 21 nt, Human
ccacgcccccaacccagcaau

SEQ ID NO: 1282161 - RNA, 25 nt, Human
ccacugaccacaaggacaccaccug

SEQ ID NO: 1282162 - RNA, 21 nt, Human
ccaggcacacaccccuggcca

SEQ ID NO: 1282163 - RNA, 19 nt, Human
ccagggcugcugcagugaa

SEQ ID NO: 1282164 - RNA, 18 nt, Human
ccaucaggcaggacaggc

SEQ ID NO: 1282165 - RNA, 22 nt, Human
cccaccaggccuggcuugguuu

SEQ ID NO: 1282166 - RNA, 19 nt, Human
cccaggcagggaagagcuc

SEQ ID NO: 1282167 - RNA, 20 nt, Human
ccccacagacccccuucggg

SEQ ID NO: 1282168 - RNA, 19 nt, Human
cccccaacccagcaaucuc

SEQ ID NO: 1282169 - RNA, 22 nt, Human
ccccuagaugcccugcaggucc

SEQ ID NO: 1282170 - RNA, 19 nt, Human
ccccuggccagcacuggcc

SEQ ID NO: 1282171 - RNA, 19 nt, Human
ccccuggguucucagcagu

SEQ ID NO: 1282172 - RNA, 20 nt, Human
cccucuggagacucagcucc

SEQ ID NO: 1282173 - RNA, 22 nt, Human
cccugcagguccagcccauggu

SEQ ID NO: 1282174 - RNA, 18 nt, Human
cccugugccagggcugcu

SEQ ID NO: 1282175 - RNA, 20 nt, Human
cccugugccagggcugcugc

SEQ ID NO: 1282176 - RNA, 18 nt, Human
cccuucagaaaaugaaaa

SEQ ID NO: 1282177 - RNA, 23 nt, Human
ccguuucccagccuuuucugugu

SEQ ID NO: 1282178 - RNA, 18 nt, Human
ccucaugugugugggggg

SEQ ID NO: 1282179 - RNA, 18 nt, Human
ccucuggagacucagcuc

SEQ ID NO: 1282180 - RNA, 18 nt, Human
ccucuuuucuuuccacca

SEQ ID NO: 1282181 - RNA, 22 nt, Human
ccugcagucguuuuaccaaagc

SEQ ID NO: 1282182 - RNA, 21 nt, Human
ccuggccaacauguugaaacc

SEQ ID NO: 1282183 - RNA, 24 nt, Human
ccuggccaacauguugaaaccucg

SEQ ID NO: 1282184 - RNA, 19 nt, Human
ccuggccagcacuggccca

SEQ ID NO: 1282185 - RNA, 24 nt, Human
ccuggccagcacuggcccaucuca

SEQ ID NO: 1282186 - RNA, 22 nt, Human
ccugggguggcuggagguggag

SEQ ID NO: 1282187 - RNA, 22 nt, Human
ccuguaaucucagcuacucacg

SEQ ID NO: 1282188 - RNA, 25 nt, Human
cgccuguaaucucagcuacucacga

SEQ ID NO: 1282189 - RNA, 21 nt, Human
cuccagaugcauccucaguuc

SEQ ID NO: 1282190 - RNA, 18 nt, Human
cucccacgcccccaaccc

SEQ ID NO: 1282191 - RNA, 22 nt, Human
cucggggaaaaugaacuagacu

SEQ ID NO: 1282192 - RNA, 20 nt, Human
cucguggugccccguccagc

SEQ ID NO: 1282193 - RNA, 18 nt, Human
cugaccacaaggacacca

SEQ ID NO: 1282194 - RNA, 24 nt, Human
cugcugacugaaagccccaagcac

SEQ ID NO: 1282195 - RNA, 19 nt, Human
cugcugcauggaaggcugg

SEQ ID NO: 1282196 - RNA, 20 nt, Human
cugcugcauggaaggcuggu

SEQ ID NO: 1282197 - RNA, 23 nt, Human
cuggguccuuucuggacaccccu

SEQ ID NO: 1282198 - RNA, 19 nt, Human
cuguccccacagacccccu

SEQ ID NO: 1282199 - RNA, 21 nt, Human
cugugaaacccucagucaccc

SEQ ID NO: 1282200 - RNA, 19 nt, Human
cuugcaagagcccaggaaa

SEQ ID NO: 1282201 - RNA, 20 nt, Human
cuugcagagaaagauguccu

SEQ ID NO: 1282202 - RNA, 18 nt, Human
gaacugaugacuuuggga

SEQ ID NO: 1282203 - RNA, 20 nt, Human
gacauuuacuagauuuggga

SEQ ID NO: 1282204 - RNA, 23 nt, Human
gagaaucacuugaacccaggagg

SEQ ID NO: 1282205 - RNA, 18 nt, Human
gagccagccuggggugga

SEQ ID NO: 1282206 - RNA, 24 nt, Human
gagcuugcugcuaagguaaccuga

SEQ ID NO: 1282207 - RNA, 19 nt, Human
gaggggcaauggggagaca

SEQ ID NO: 1282208 - RNA, 24 nt, Human
gaguccaacccuaugaggagcuga

SEQ ID NO: 1282209 - RNA, 23 nt, Human
gaguuucucaguucccaaagagg

SEQ ID NO: 1282210 - RNA, 21 nt, Human
gaucaccugaggucaggaguu

SEQ ID NO: 1282211 - RNA, 23 nt, Human
gaucaccugaggucaggaguuca

SEQ ID NO: 1282212 - RNA, 24 nt, Human
gaucaccugaggucaggaguucaa

SEQ ID NO: 1282213 - RNA, 19 nt, Human
gcaggaaaagcuguggccc

SEQ ID NO: 1282214 - RNA, 22 nt, Human
gcaggagaaucacuugaaccca

SEQ ID NO: 1282215 - RNA, 20 nt, Human
ggaacccagagaaacggugg

SEQ ID NO: 1282216 - RNA, 18 nt, Human
ggagacucagcucccugc

SEQ ID NO: 1282217 - RNA, 27 nt, Human
ggagguggagcugguccuccccugggg

SEQ ID NO: 1282218 - RNA, 20 nt, Human
ggauggagccagccuggggu

SEQ ID NO: 1282219 - RNA, 21 nt, Human
ggcaggaagauuuuugaucug

SEQ ID NO: 1282220 - RNA, 18 nt, Human
ggccaaggaggguggauc

SEQ ID NO: 1282221 - RNA, 22 nt, Human
ggccaggaggggucuccuugga

SEQ ID NO: 1282222 - RNA, 18 nt, Human
ggccccuggugcccccaa

SEQ ID NO: 1282223 - RNA, 21 nt, Human
gggaaagugaggaagcagggg

SEQ ID NO: 1282224 - RNA, 19 nt, Human
gggaggcugagaccugggg

SEQ ID NO: 1282225 - RNA, 20 nt, Human
gggcacagagaguaacaugg

SEQ ID NO: 1282226 - RNA, 24 nt, Human
gggcaugguggcgggcgccuguaa

SEQ ID NO: 1282227 - RNA, 24 nt, Human
ggguacaggggcaggaaaagcugu

SEQ ID NO: 1282228 - RNA, 21 nt, Human
gguggaucaccugaggucagg

SEQ ID NO: 1282229 - RNA, 24 nt, Human
gguggcgggcgccuguaaucucag

SEQ ID NO: 1282230 - RNA, 19 nt, Human
ggugggaauagagauaugg

SEQ ID NO: 1282231 - RNA, 19 nt, Human
gucaacaaaggaggagggg

SEQ ID NO: 1282232 - RNA, 23 nt, Human
guccagcaggucucugagggcua

SEQ ID NO: 1282233 - RNA, 21 nt, Human
guggaucaccugaggucagga

SEQ ID NO: 1282234 - RNA, 20 nt, Human
gugggcaguuguccagcagg

SEQ ID NO: 1282235 - RNA, 18 nt, Human
uaaaagaagagccagagu

SEQ ID NO: 1282236 - RNA, 18 nt, Human
uaaaagaagagccagagu

SEQ ID NO: 1282237 - RNA, 20 nt, Human
uacagcaucaaguaaggccu

SEQ ID NO: 1282238 - RNA, 18 nt, Human
uaccaaagccaccaccaa

SEQ ID NO: 1282239 - RNA, 24 nt, Human
uaccaaagccaccaccaagauuca

SEQ ID NO: 1282240 - RNA, 18 nt, Human
uauagacagguguacugc

SEQ ID NO: 1282241 - RNA, 23 nt, Human
ucaccugaggucaggaguucaag

SEQ ID NO: 1282242 - RNA, 22 nt, Human
ucagagagaaagcaaagaggca

SEQ ID NO: 1282243 - RNA, 19 nt, Human
ucagauacaagcaaaagaa

SEQ ID NO: 1282244 - RNA, 25 nt, Human
ucagauacaagcaaaagaaaaaaaa

SEQ ID NO: 1282245 - RNA, 19 nt, Human
ucagcucuccucacugccu

SEQ ID NO: 1282246 - RNA, 23 nt, Human
ucauugggaaaguuggggugggg

SEQ ID NO: 1282247 - RNA, 18 nt, Human
uccaccagcaccgacugu

SEQ ID NO: 1282248 - RNA, 20 nt, Human
uccagugagacagagcugcg

SEQ ID NO: 1282249 - RNA, 24 nt, Human
uccuuggaggggucuguuucuguc

SEQ ID NO: 1282250 - RNA, 24 nt, Human
ucucaagcagcauaugcccagcuc

SEQ ID NO: 1282251 - RNA, 24 nt, Human
ucucacucuaugcagagggguccc

SEQ ID NO: 1282252 - RNA, 28 nt, Human
ucucacucuaugcagaggggucccuggc

SEQ ID NO: 1282253 - RNA, 21 nt, Human
ucucuacuaaaaauacaaaaa

SEQ ID NO: 1282254 - RNA, 18 nt, Human
ucugcugagaugagucca

SEQ ID NO: 1282255 - RNA, 18 nt, Human
ucuggauggagccagccu

SEQ ID NO: 1282256 - RNA, 24 nt, Human
ucugggcuaaagcagaccgggguc

SEQ ID NO: 1282257 - RNA, 20 nt, Human
ucuuuggguuagacaggcug

SEQ ID NO: 1282258 - RNA, 21 nt, Human
ucuuuggguuagacaggcugg

SEQ ID NO: 1282259 - RNA, 18 nt, Human
ugaaaaagaaaaacuugc

SEQ ID NO: 1282260 - RNA, 21 nt, Human
ugaacuagacugaccuggaca

SEQ ID NO: 1282261 - RNA, 18 nt, Human
ugaaucucaagcagcaua

SEQ ID NO: 1282262 - RNA, 21 nt, Human
ugaccaagcgucucaugcuuu

SEQ ID NO: 1282263 - RNA, 22 nt, Human
ugaccugauggguggucaguga

SEQ ID NO: 1282264 - RNA, 21 nt, Human
ugacugaaagccccaagcacc

SEQ ID NO: 1282265 - RNA, 24 nt, Human
ugacuuggucaacaccaugaucag

SEQ ID NO: 1282266 - RNA, 19 nt, Human
ugagacagagcugcgccuc

SEQ ID NO: 1282267 - RNA, 19 nt, Human
ugagcucccaguaggacac

SEQ ID NO: 1282268 - RNA, 24 nt, Human
ugaggcaggagaaucacuugaacc

SEQ ID NO: 1282269 - RNA, 25 nt, Human
ugaggcaggagaaucacuugaaccc

SEQ ID NO: 1282270 - RNA, 21 nt, Human
ugagguacuuuuccugcacuc

SEQ ID NO: 1282271 - RNA, 18 nt, Human
ugaguccaacccuaugag

SEQ ID NO: 1282272 - RNA, 24 nt, Human
ugaguggcccauugugggaaccca

SEQ ID NO: 1282273 - RNA, 18 nt, Human
ugaucagaggacagaugg

SEQ ID NO: 1282274 - RNA, 20 nt, Human
ugauggguggucagugaugc

SEQ ID NO: 1282275 - RNA, 18 nt, Human
ugcagagaaaaagccucu

SEQ ID NO: 1282276 - RNA, 28 nt, Human
ugcagagaaagauguccucggggaaaau

SEQ ID NO: 1282277 - RNA, 19 nt, Human
ugccccguccagcccacca

SEQ ID NO: 1282278 - RNA, 20 nt, Human
ugcccugugccagggcugcu

SEQ ID NO: 1282279 - RNA, 18 nt, Human
ugccugugaaacccucag

SEQ ID NO: 1282280 - RNA, 21 nt, Human
ugcuaagguaaccugaccaag

SEQ ID NO: 1282281 - RNA, 21 nt, Human
uggaaagucaucagcuccaaa

SEQ ID NO: 1282282 - RNA, 23 nt, Human
uggacauggggcaggaagauuuu

SEQ ID NO: 1282283 - RNA, 21 nt, Human
uggaggcaucugaggggcaau

SEQ ID NO: 1282284 - RNA, 24 nt, Human
uggaucaccugaggucaggaguuc

SEQ ID NO: 1282285 - RNA, 27 nt, Human
uggaucaccugaggucaggaguucaag

SEQ ID NO: 1282286 - RNA, 21 nt, Human
uggauggagccagccuggggu

SEQ ID NO: 1282287 - RNA, 23 nt, Human
uggcacuacagacugagcuccca

SEQ ID NO: 1282288 - RNA, 18 nt, Human
uggcauggccugugggca

SEQ ID NO: 1282289 - RNA, 19 nt, Human
uggcugaaaagacaguccu

SEQ ID NO: 1282290 - RNA, 18 nt, Human
uggcuggaccaacccccu

SEQ ID NO: 1282291 - RNA, 19 nt, Human
uggcuggagguggagcugg

SEQ ID NO: 1282292 - RNA, 18 nt, Human
ugggaaaaacccaguaug

SEQ ID NO: 1282293 - RNA, 22 nt, Human
ugggaaaguuggggugggggug

SEQ ID NO: 1282294 - RNA, 21 nt, Human
ugggaaggaggauggccccca

SEQ ID NO: 1282295 - RNA, 23 nt, Human
ugggaaggaggauggcccccagc

SEQ ID NO: 1282296 - RNA, 27 nt, Human
ugggaaggaggauggcccccagccugg

SEQ ID NO: 1282297 - RNA, 20 nt, Human
ugggaccccucagcagagag

SEQ ID NO: 1282298 - RNA, 21 nt, Human
ugggaggagaagauggucagg

SEQ ID NO: 1282299 - RNA, 24 nt, Human
ugggaggccaaggaggguggauca

SEQ ID NO: 1282300 - RNA, 21 nt, Human
uggggacuggguacaggacca

SEQ ID NO: 1282301 - RNA, 22 nt, Human
uggggggaugcuuggcauggcc

SEQ ID NO: 1282302 - RNA, 21 nt, Human
ugggguggaguggauggaucu

SEQ ID NO: 1282303 - RNA, 25 nt, Human
ugggguggcuggagguggagcuggu

SEQ ID NO: 1282304 - RNA, 25 nt, Human
uggguggucagugaugcagugugug

SEQ ID NO: 1282305 - RNA, 22 nt, Human
uggugcagguccucagcucucc

SEQ ID NO: 1282306 - RNA, 21 nt, Human
uggugcccccaagcagugcug

SEQ ID NO: 1282307 - RNA, 24 nt, Human
ugguggcgggcgccuguaaucuca

SEQ ID NO: 1282308 - RNA, 23 nt, Human
ugguggugagugggggcgacaug

SEQ ID NO: 1282309 - RNA, 27 nt, Human
uguccugggcaccuugcacugggcagu

SEQ ID NO: 1282310 - RNA, 23 nt, Human
uguggggccaucaggcaggacag

SEQ ID NO: 1282311 - RNA, 21 nt, Human
uguucuugcuuagagguuuug

SEQ ID NO: 1282312 - RNA, 18 nt, Human
uuagcugggcaugguggc

SEQ ID NO: 1282313 - RNA, 24 nt, Human
uuagcugggcaugguggcgggcgc

SEQ ID NO: 1282314 - RNA, 18 nt, Human
uucccaguaucagcacuc

SEQ ID NO: 1282315 - RNA, 20 nt, Human
uuccuuggagccagcccugg

SEQ ID NO: 1282316 - RNA, 19 nt, Human
uucugcacaggaggccacg

SEQ ID NO: 1282317 - RNA, 20 nt, Human
uugaguggcccauuguggga

SEQ ID NO: 1282318 - RNA, 22 nt, Human
uugcuuagagguuuugacagcg

SEQ ID NO: 1282319 - RNA, 23 nt, Human
uuuaccaaagccaccaccaagau

SEQ ID NO: 1282320 - RNA, 20 nt, Human
uuucauauucugggagugcu

SEQ ID NO: 1282321 - RNA, 21 nt, Human
uuugcaggguguggccacagg

SEQ ID NO: 1282322 - RNA, 26 nt, Human
aaaagauaaacaaauuagaggccaag

SEQ ID NO: 1282323 - RNA, 19 nt, Human
aaagaggccacugggaggc

SEQ ID NO: 1282324 - RNA, 19 nt, Human
aaaguuaggcuaggaaagg

SEQ ID NO: 1282325 - RNA, 18 nt, Human
aaaguuuugcuccuggag

SEQ ID NO: 1282326 - RNA, 22 nt, Human
aagauaaacaaauuagaggcca

SEQ ID NO: 1282327 - RNA, 23 nt, Human
aagcagcaaacgcuaggccugga

SEQ ID NO: 1282328 - RNA, 21 nt, Human
aagcaggaggcugggcaugga

SEQ ID NO: 1282329 - RNA, 18 nt, Human
aagccuuugggaggaaga

SEQ ID NO: 1282330 - RNA, 23 nt, Human
aagcuuguuuuccugcaacugga

SEQ ID NO: 1282331 - RNA, 24 nt, Human
aagcuuguuuuccugcaacuggau

SEQ ID NO: 1282332 - RNA, 21 nt, Human
aaguggccgaaaggcaggagc

SEQ ID NO: 1282333 - RNA, 19 nt, Human
aaguggugggccuggaggg

SEQ ID NO: 1282334 - RNA, 19 nt, Human
aaugagccaugauaggacc

SEQ ID NO: 1282335 - RNA, 21 nt, Human
acaacagagggagacccugaa

SEQ ID NO: 1282336 - RNA, 20 nt, Human
acacagcagggaagaagagc

SEQ ID NO: 1282337 - RNA, 25 nt, Human
accacaaauggaagaaaggccauga

SEQ ID NO: 1282338 - RNA, 19 nt, Human
acgggccuguagacgcacu

SEQ ID NO: 1282339 - RNA, 18 nt, Human
acuacacuccagccuugg

SEQ ID NO: 1282340 - RNA, 18 nt, Human
acuacacuccagccuugg

SEQ ID NO: 1282341 - RNA, 19 nt, Human
acuacacuccagccuugga

SEQ ID NO: 1282342 - RNA, 25 nt, Human
acuacacuccagccuuggacaacag

SEQ ID NO: 1282343 - RNA, 19 nt, Human
acuacacuccagccuuggg

SEQ ID NO: 1282344 - RNA, 21 nt, Human
acuggauugugagggccagag

SEQ ID NO: 1282345 - RNA, 23 nt, Human
agaaguugggcaaaaggcugauu

SEQ ID NO: 1282346 - RNA, 26 nt, Human
agacagaaguugggcaaaagggaccc

SEQ ID NO: 1282347 - RNA, 19 nt, Human
agacagggaagagcugggu

SEQ ID NO: 1282348 - RNA, 19 nt, Human
agacgggccuguagacgca

SEQ ID NO: 1282349 - RNA, 28 nt, Human
agaggcaggagcugagucccccaagggg

SEQ ID NO: 1282350 - RNA, 22 nt, Human
agaggcugcagaaaggcaggag

SEQ ID NO: 1282351 - RNA, 19 nt, Human
agaggcugccagcugcuca

SEQ ID NO: 1282352 - RNA, 20 nt, Human
agaggcugggccuguacaug

SEQ ID NO: 1282353 - RNA, 20 nt, Human
agcagcaaacgcuaggccug

SEQ ID NO: 1282354 - RNA, 24 nt, Human
agccacgugggagguugagguggg

SEQ ID NO: 1282355 - RNA, 21 nt, Human
aggaagaggugggccuggaga

SEQ ID NO: 1282356 - RNA, 25 nt, Human
aggaggccagggugaggaagaggug

SEQ ID NO: 1282357 - RNA, 19 nt, Human
aggcacuaggccuggaaau

SEQ ID NO: 1282358 - RNA, 18 nt, Human
aggcaggagacgggccug

SEQ ID NO: 1282359 - RNA, 20 nt, Human
aggcaggagacgggccugua

SEQ ID NO: 1282360 - RNA, 22 nt, Human
aggcaggagcugacacuucggc

SEQ ID NO: 1282361 - RNA, 21 nt, Human
aggcaggagcugaguccaaag

SEQ ID NO: 1282362 - RNA, 22 nt, Human
aggcaggagcuucaccugagga

SEQ ID NO: 1282363 - RNA, 25 nt, Human
aggcaggagcuucaccugaggaugc

SEQ ID NO: 1282364 - RNA, 19 nt, Human
aggcaggaggagcugggcc

SEQ ID NO: 1282365 - RNA, 21 nt, Human
aggcaggaggagcugggccug

SEQ ID NO: 1282366 - RNA, 23 nt, Human
aggcaggcagauucguggccugg

SEQ ID NO: 1282367 - RNA, 22 nt, Human
aggccagagucgggccuggaga

SEQ ID NO: 1282368 - RNA, 22 nt, Human
aggccgccgagaggauggagcu

SEQ ID NO: 1282369 - RNA, 22 nt, Human
aggccggagcugggccugggga

SEQ ID NO: 1282370 - RNA, 23 nt, Human
agguugaggugggaggaucgcuu

SEQ ID NO: 1282371 - RNA, 19 nt, Human
agucccagcuacugggaag

SEQ ID NO: 1282372 - RNA, 24 nt, Human
aguggcaagcaccuguagucucag

SEQ ID NO: 1282373 - RNA, 22 nt, Human
auaaacaaauuagaggccaaga

SEQ ID NO: 1282374 - RNA, 19 nt, Human
aucugggucuggagggucc

SEQ ID NO: 1282375 - RNA, 20 nt, Human
augguaggauugcuugagcc

SEQ ID NO: 1282376 - RNA, 20 nt, Human
caaagcagcaaacgcuaggc

SEQ ID NO: 1282377 - RNA, 18 nt, Human
caacagagggagacccug

SEQ ID NO: 1282378 - RNA, 23 nt, Human
caacuggaguaaguucagggcuu

SEQ ID NO: 1282379 - RNA, 18 nt, Human
caacuggauggucccacg

SEQ ID NO: 1282380 - RNA, 19 nt, Human
caccuguagucucagccac

SEQ ID NO: 1282381 - RNA, 23 nt, Human
caccuguagucucagccacgugg

SEQ ID NO: 1282382 - RNA, 24 nt, Human
caccuguagucucagccacguggg

SEQ ID NO: 1282383 - RNA, 18 nt, Human
cacggcaugaucuuggcc

SEQ ID NO: 1282384 - RNA, 23 nt, Human
cagaagucuuucaugguaggucc

SEQ ID NO: 1282385 - RNA, 18 nt, Human
cagaugaguuucgucucc

SEQ ID NO: 1282386 - RNA, 24 nt, Human
cagccaguuucucuuccuggauuc

SEQ ID NO: 1282387 - RNA, 23 nt, Human
cagccuuggacaacagagggaga

SEQ ID NO: 1282388 - RNA, 22 nt, Human
cagcuguagucccagcuacugg

SEQ ID NO: 1282389 - RNA, 23 nt, Human
cagcuguagucccagcuacuggg

SEQ ID NO: 1282390 - RNA, 21 nt, Human
caggcagauucguggccuggg

SEQ ID NO: 1282391 - RNA, 24 nt, Human
cagggccuggagaagaugcaaagc

SEQ ID NO: 1282392 - RNA, 24 nt, Human
cagucagucucucuuccuggauuc

SEQ ID NO: 1282393 - RNA, 19 nt, Human
ccaccgugaggcaaaugcu

SEQ ID NO: 1282394 - RNA, 19 nt, Human
ccacugaacuccauccuga

SEQ ID NO: 1282395 - RNA, 19 nt, Human
ccagcacugggaaacuagg

SEQ ID NO: 1282396 - RNA, 18 nt, Human
ccaguuucucuuccugga

SEQ ID NO: 1282397 - RNA, 19 nt, Human
cccacugugagguagaggc

SEQ ID NO: 1282398 - RNA, 18 nt, Human
cccaugcaggccuuugag

SEQ ID NO: 1282399 - RNA, 20 nt, Human
ccucauuuuccguuccccag

SEQ ID NO: 1282400 - RNA, 18 nt, Human
ccuggagaggcugaccug

SEQ ID NO: 1282401 - RNA, 24 nt, Human
ccuggcaugaggcgugcccagagg

SEQ ID NO: 1282402 - RNA, 19 nt, Human
ccuguagaggccacuggga

SEQ ID NO: 1282403 - RNA, 19 nt, Human
cgacaugaggcaggagcug

SEQ ID NO: 1282404 - RNA, 20 nt, Human
cgaggccgggcccaugcagg

SEQ ID NO: 1282405 - RNA, 23 nt, Human
cgcugucaccccucuggaaucca

SEQ ID NO: 1282406 - RNA, 22 nt, Human
cgggccuggagacacagcaggg

SEQ ID NO: 1282407 - RNA, 22 nt, Human
cuacuacacuccagccuuggac

SEQ ID NO: 1282408 - RNA, 19 nt, Human
cucaagggaaucuucagcu

SEQ ID NO: 1282409 - RNA, 18 nt, Human
cucgcuggucuuugucuc

SEQ ID NO: 1282410 - RNA, 18 nt, Human
cugagaggaagagcuggg

SEQ ID NO: 1282411 - RNA, 18 nt, Human
cugccaggaggcaagagc

SEQ ID NO: 1282412 - RNA, 23 nt, Human
cuggaagguugaggcugcaguca

SEQ ID NO: 1282413 - RNA, 19 nt, Human
cuggagaggccgcagacag

SEQ ID NO: 1282414 - RNA, 21 nt, Human
cuggcaugaggcgugcccaga

SEQ ID NO: 1282415 - RNA, 18 nt, Human
cugggcccggggaggcca

SEQ ID NO: 1282416 - RNA, 18 nt, Human
cugggccuaaagaggcca

SEQ ID NO: 1282417 - RNA, 23 nt, Human
cugguggcugugguggcucgcug

SEQ ID NO: 1282418 - RNA, 19 nt, Human
gaauccacguauacgaaaa

SEQ ID NO: 1282419 - RNA, 21 nt, Human
gacaugaggcaggagcugagu

SEQ ID NO: 1282420 - RNA, 21 nt, Human
gaggagcuggaccuguacaag

SEQ ID NO: 1282421 - RNA, 20 nt, Human
gaggggaugggcccguugag

SEQ ID NO: 1282422 - RNA, 21 nt, Human
gagugacagggcaagguccug

SEQ ID NO: 1282423 - RNA, 21 nt, Human
gaguuucgucuccuccacugg

SEQ ID NO: 1282424 - RNA, 18 nt, Human
gauugcuugagccuggga

SEQ ID NO: 1282425 - RNA, 22 nt, Human
gauugcuugagccugggaguuu

SEQ ID NO: 1282426 - RNA, 27 nt, Human
gcaaagcagcaaacgcuaggccuggaa

SEQ ID NO: 1282427 - RNA, 20 nt, Human
gcagacagggaagagcuggg

SEQ ID NO: 1282428 - RNA, 21 nt, Human
gcaggagcuaggccugcagag

SEQ ID NO: 1282429 - RNA, 20 nt, Human
gcaggagcugggcccgcaga

SEQ ID NO: 1282430 - RNA, 21 nt, Human
gcaggagcugggcccgcagag

SEQ ID NO: 1282431 - RNA, 26 nt, Human
gccagagucgggccuggagacacagg

SEQ ID NO: 1282432 - RNA, 19 nt, Human
gccgaaaggcaggagcuug

SEQ ID NO: 1282433 - RNA, 25 nt, Human
gccgaaaggcaggagcuuuggacug

SEQ ID NO: 1282434 - RNA, 24 nt, Human
gccugcagaagccuuuggcgacug

SEQ ID NO: 1282435 - RNA, 19 nt, Human
gccuggacaggcugcaaaa

SEQ ID NO: 1282436 - RNA, 19 nt, Human
gccuggagaagaugcaaag

SEQ ID NO: 1282437 - RNA, 20 nt, Human
ggaaggcugacaugguagga

SEQ ID NO: 1282438 - RNA, 21 nt, Human
ggaagggaaaaacggggccug

SEQ ID NO: 1282439 - RNA, 21 nt, Human
ggagaggccgacuggaggaag

SEQ ID NO: 1282440 - RNA, 19 nt, Human
ggagcugggcccgcagagg

SEQ ID NO: 1282441 - RNA, 21 nt, Human
ggagcugggcccggggaggcc

SEQ ID NO: 1282442 - RNA, 23 nt, Human
ggaggaugagcucguccuggaga

SEQ ID NO: 1282443 - RNA, 23 nt, Human
ggaggcaggaggagcugggcccc

SEQ ID NO: 1282444 - RNA, 21 nt, Human
ggagguugaggugggaggauc

SEQ ID NO: 1282445 - RNA, 22 nt, Human
ggagguugaggugggaggaucg

SEQ ID NO: 1282446 - RNA, 21 nt, Human
ggaguaaguucagggcuugga

SEQ ID NO: 1282447 - RNA, 18 nt, Human
ggaguuugaggcuauaau

SEQ ID NO: 1282448 - RNA, 22 nt, Human
ggcauaguggcaagcaccugua

SEQ ID NO: 1282449 - RNA, 19 nt, Human
ggccgaaagaggucaccgu

SEQ ID NO: 1282450 - RNA, 18 nt, Human
ggccuggggaggccaccg

SEQ ID NO: 1282451 - RNA, 19 nt, Human
ggccuggggaggccgacuu

SEQ ID NO: 1282452 - RNA, 23 nt, Human
ggcgugcccagagggacagaggc

SEQ ID NO: 1282453 - RNA, 19 nt, Human
gggaagaagagcugggcug

SEQ ID NO: 1282454 - RNA, 24 nt, Human
gggaagcaggaggcugggcaugga

SEQ ID NO: 1282455 - RNA, 19 nt, Human
gggaggaagagcuuggccu

SEQ ID NO: 1282456 - RNA, 19 nt, Human
gggaggcaggaggagcugg

SEQ ID NO: 1282457 - RNA, 25 nt, Human
gggcaaaaggcugauuugaggaagu

SEQ ID NO: 1282458 - RNA, 22 nt, Human
gggccgaaagaggucaccguga

SEQ ID NO: 1282459 - RNA, 23 nt, Human
gggccuggagacacagcagggaa

SEQ ID NO: 1282460 - RNA, 23 nt, Human
ggugggccuggagagcccacugu

SEQ ID NO: 1282461 - RNA, 23 nt, Human
ggugggccuggagggucuacugu

SEQ ID NO: 1282462 - RNA, 19 nt, Human
guaugcaucaaaaagcaaa

SEQ ID NO: 1282463 - RNA, 23 nt, Human
gucuacugugugguaagagucug

SEQ ID NO: 1282464 - RNA, 18 nt, Human
gugaggcagaggcuggcc

SEQ ID NO: 1282465 - RNA, 19 nt, Human
gugaggcagaggcugggcc

SEQ ID NO: 1282466 - RNA, 18 nt, Human
guggccuagagaggcugc

SEQ ID NO: 1282467 - RNA, 22 nt, Human
uacaaaggcaauugcgaggcag

SEQ ID NO: 1282468 - RNA, 25 nt, Human
uacuacacuccagccuuggacaaca

SEQ ID NO: 1282469 - RNA, 18 nt, Human
uagaggccgggccuguag

SEQ ID NO: 1282470 - RNA, 20 nt, Human
uagaggcugcagaaaggcag

SEQ ID NO: 1282471 - RNA, 20 nt, Human
uagaggcugccgaaaggcag

SEQ ID NO: 1282472 - RNA, 20 nt, Human
uagcacuacuacacuccagc

SEQ ID NO: 1282473 - RNA, 18 nt, Human
uaggguuuauccaucuug

SEQ ID NO: 1282474 - RNA, 23 nt, Human
uaguggcaagcaccuguagucuc

SEQ ID NO: 1282475 - RNA, 24 nt, Human
uaguggcaagcaccuguagucuca

SEQ ID NO: 1282476 - RNA, 20 nt, Human
uaguugggcauaguggcaag

SEQ ID NO: 1282477 - RNA, 20 nt, Human
ucaaaagugugcugugagga

SEQ ID NO: 1282478 - RNA, 21 nt, Human
ucauuuuccguuccccagcau

SEQ ID NO: 1282479 - RNA, 27 nt, Human
uccacguauacgaaaauuccaaauauu

SEQ ID NO: 1282480 - RNA, 19 nt, Human
uccacugugaggcagaggc

SEQ ID NO: 1282481 - RNA, 20 nt, Human
ucugcccugaggcacgggcu

SEQ ID NO: 1282482 - RNA, 24 nt, Human
ucuguggccuagagaggccggggc

SEQ ID NO: 1282483 - RNA, 21 nt, Human
ucuuagaagguggggaauaau

SEQ ID NO: 1282484 - RNA, 19 nt, Human
ucuuuuagcaugaacuggg

SEQ ID NO: 1282485 - RNA, 23 nt, Human
ugaacucccucauuuuccguucc

SEQ ID NO: 1282486 - RNA, 21 nt, Human
ugacagggcaagguccuguuu

SEQ ID NO: 1282487 - RNA, 18 nt, Human
ugacaugguaggauugcu

SEQ ID NO: 1282488 - RNA, 22 nt, Human
ugagccugggaguuugaggcua

SEQ ID NO: 1282489 - RNA, 25 nt, Human
ugaggaugccacagugagacaccau

SEQ ID NO: 1282490 - RNA, 18 nt, Human
ugaggcagaggcugggcc

SEQ ID NO: 1282491 - RNA, 18 nt, Human
ugaggcagaggcugggcc

SEQ ID NO: 1282492 - RNA, 18 nt, Human
ugaggcagcagcugccuu

SEQ ID NO: 1282493 - RNA, 18 nt, Human
ugaggcaggagacgggcc

SEQ ID NO: 1282494 - RNA, 20 nt, Human
ugaggcaggagacgggccuc

SEQ ID NO: 1282495 - RNA, 20 nt, Human
ugaggcaggagacgggccug

SEQ ID NO: 1282496 - RNA, 19 nt, Human
ugaggcaggagcugacacu

SEQ ID NO: 1282497 - RNA, 22 nt, Human
ugaggccgaggccgggcccaug

SEQ ID NO: 1282498 - RNA, 19 nt, Human
ugagggaggagcuggaccu

SEQ ID NO: 1282499 - RNA, 21 nt, Human
ugagggaggagcuggaccugu

SEQ ID NO: 1282500 - RNA, 20 nt, Human
ugagguccccaugccuggac

SEQ ID NO: 1282501 - RNA, 18 nt, Human
ugaggugggaggaucgcu

SEQ ID NO: 1282502 - RNA, 19 nt, Human
ugaggugggaggaucgcuu

SEQ ID NO: 1282503 - RNA, 23 nt, Human
ugaguccaaagacguuguuggga

SEQ ID NO: 1282504 - RNA, 22 nt, Human
ugcaaaaggcaaaagcugugcc

SEQ ID NO: 1282505 - RNA, 18 nt, Human
ugcacaaaaggaaacgcu

SEQ ID NO: 1282506 - RNA, 20 nt, Human
ugcccagagggacagaggca

SEQ ID NO: 1282507 - RNA, 21 nt, Human
ugcccagccaguuucucuucc

SEQ ID NO: 1282508 - RNA, 23 nt, Human
ugccggaagggaaaaacggggcc

SEQ ID NO: 1282509 - RNA, 23 nt, Human
ugccuggaaaagucgccaugggg

SEQ ID NO: 1282510 - RNA, 19 nt, Human
uggaagguugaggcugcag

SEQ ID NO: 1282511 - RNA, 22 nt, Human
uggaagguugaggcugcaguca

SEQ ID NO: 1282512 - RNA, 20 nt, Human
uggagaggccgacuggaggg

SEQ ID NO: 1282513 - RNA, 20 nt, Human
uggagaggcugaccugagga

SEQ ID NO: 1282514 - RNA, 20 nt, Human
uggagaggcugacucgagga

SEQ ID NO: 1282515 - RNA, 21 nt, Human
uggaggaaguccagggccugg

SEQ ID NO: 1282516 - RNA, 22 nt, Human
uggaggaaguccagggccugga

SEQ ID NO: 1282517 - RNA, 23 nt, Human
uggaggaaguuuugggacuggag

SEQ ID NO: 1282518 - RNA, 22 nt, Human
uggcagcuuucuccaacuuugg

SEQ ID NO: 1282519 - RNA, 22 nt, Human
uggcaggcaggagcuggaccug

SEQ ID NO: 1282520 - RNA, 22 nt, Human
ugggaggaagagcuuggccugg

SEQ ID NO: 1282521 - RNA, 18 nt, Human
ugggaggcaggagcuggg

SEQ ID NO: 1282522 - RNA, 21 nt, Human
ugggaggcaggaggagcuggg

SEQ ID NO: 1282523 - RNA, 21 nt, Human
ugggagggagagcuuggucug

SEQ ID NO: 1282524 - RNA, 18 nt, Human
ugggagguugagguggga

SEQ ID NO: 1282525 - RNA, 23 nt, Human
ugggagguugaggugggaggauc

SEQ ID NO: 1282526 - RNA, 21 nt, Human
ugggcaaaaggcugauuugag

SEQ ID NO: 1282527 - RNA, 21 nt, Human
ugggccaaaggagguugugag

SEQ ID NO: 1282528 - RNA, 19 nt, Human
ugggccgaaagaggucacc

SEQ ID NO: 1282529 - RNA, 20 nt, Human
ugggccuaaagagaccauug

SEQ ID NO: 1282530 - RNA, 20 nt, Human
ugggccuaaagaggccacug

SEQ ID NO: 1282531 - RNA, 26 nt, Human
ugggccucaacaggccaggacccguc

SEQ ID NO: 1282532 - RNA, 18 nt, Human
uggggaggccaccgugag

SEQ ID NO: 1282533 - RNA, 22 nt, Human
uggucuuugucucuuagaaggu

SEQ ID NO: 1282534 - RNA, 18 nt, Human
ugugaggaaugagcuggg

SEQ ID NO: 1282535 - RNA, 18 nt, Human
ugugaggcagaggcuggg

SEQ ID NO: 1282536 - RNA, 18 nt, Human
ugugaggccgaggccggg

SEQ ID NO: 1282537 - RNA, 21 nt, Human
uguugagguccccaugccugg

SEQ ID NO: 1282538 - RNA, 25 nt, Human
uuaaggacauucugggccuggacag

SEQ ID NO: 1282539 - RNA, 18 nt, Human
uuaguugggcauaguggc

SEQ ID NO: 1282540 - RNA, 24 nt, Human
uuccccagcauuggcggguucugg

SEQ ID NO: 1282541 - RNA, 19 nt, Human
uugcaccuggagaggccgc

SEQ ID NO: 1282542 - RNA, 24 nt, Human
uugcuugagccugggaguuugagg

SEQ ID NO: 1282543 - RNA, 18 nt, Human
uuggaagcccaggagcau

SEQ ID NO: 1282544 - RNA, 18 nt, Human
uuggacuggagaggccgc

SEQ ID NO: 1282545 - RNA, 18 nt, Human
uuggccuguagaggcugc

SEQ ID NO: 1282546 - RNA, 19 nt, Human
uugggaggccagagucggg

SEQ ID NO: 1282547 - RNA, 18 nt, Human
uugugaggaaugagcugg

SEQ ID NO: 1282548 - RNA, 21 nt, Human
uuuuccugcaacuggaugguc

SEQ ID NO: 1282549 - RNA, 22 nt, Human
aaaaauagacccguauugauca

SEQ ID NO: 1282550 - RNA, 22 nt, Human
aaaccaacacaaaucuugcaac

SEQ ID NO: 1282551 - RNA, 21 nt, Human
aaacccagaagaacgcaggcg

SEQ ID NO: 1282552 - RNA, 22 nt, Human
aaagccuaacauuuuauuuccu

SEQ ID NO: 1282553 - RNA, 24 nt, Human
aaagugcugggcuuacaggcauga

SEQ ID NO: 1282554 - RNA, 23 nt, Human
aagacccauggagacugugguaa

SEQ ID NO: 1282555 - RNA, 25 nt, Human
aagcaauucucccaccuuagccucc

SEQ ID NO: 1282556 - RNA, 22 nt, Human
aauagaucucuugggaguucau

SEQ ID NO: 1282557 - RNA, 21 nt, Human
aaugaaggaguugugccuaaa

SEQ ID NO: 1282558 - RNA, 23 nt, Human
acacaacccuaucuagccaaacc

SEQ ID NO: 1282559 - RNA, 18 nt, Human
acaucacucuccauucca

SEQ ID NO: 1282560 - RNA, 19 nt, Human
accagcaggaaccaaugcc

SEQ ID NO: 1282561 - RNA, 24 nt, Human
accauguugaccaggcuggucuug

SEQ ID NO: 1282562 - RNA, 20 nt, Human
acccgccuccgccucccaaa

SEQ ID NO: 1282563 - RNA, 23 nt, Human
acccuugcccacaucacucucca

SEQ ID NO: 1282564 - RNA, 22 nt, Human
accugcugagguggccccucca

SEQ ID NO: 1282565 - RNA, 18 nt, Human
acgggguuucaccauguu

SEQ ID NO: 1282566 - RNA, 19 nt, Human
acgggguuucaccauguug

SEQ ID NO: 1282567 - RNA, 24 nt, Human
acgggguuucaccauguugaccag

SEQ ID NO: 1282568 - RNA, 20 nt, Human
agaagcauccucagugaguu

SEQ ID NO: 1282569 - RNA, 21 nt, Human
agaaguuacccagugagagug

SEQ ID NO: 1282570 - RNA, 19 nt, Human
agagcgacaagugcccuuc

SEQ ID NO: 1282571 - RNA, 18 nt, Human
aggcaggaugcucugggc

SEQ ID NO: 1282572 - RNA, 21 nt, Human
agugcaauggugcaaucucag

SEQ ID NO: 1282573 - RNA, 19 nt, Human
aguugggugggggguugcu

SEQ ID NO: 1282574 - RNA, 22 nt, Human
auagacccguauugaucauaca

SEQ ID NO: 1282575 - RNA, 20 nt, Human
auggaacccugguccugccu

SEQ ID NO: 1282576 - RNA, 21 nt, Human
caaaaacacagcauuaggcca

SEQ ID NO: 1282577 - RNA, 22 nt, Human
caaaaccaacacaaaucuugca

SEQ ID NO: 1282578 - RNA, 22 nt, Human
caaagaggcacuaaacauaaug

SEQ ID NO: 1282579 - RNA, 24 nt, Human
caaagugcugggcuuacaggcaug

SEQ ID NO: 1282580 - RNA, 23 nt, Human
caaaucucucaccauccaucaua

SEQ ID NO: 1282581 - RNA, 21 nt, Human
caagaccauacaucucuccca

SEQ ID NO: 1282582 - RNA, 27 nt, Human
caauggauccacccgccuccgccuccc

SEQ ID NO: 1282583 - RNA, 21 nt, Human
caccauguugaccaggcuggu

SEQ ID NO: 1282584 - RNA, 22 nt, Human
caccauguugaccaggcugguc

SEQ ID NO: 1282585 - RNA, 24 nt, Human
caccauguugaccaggcuggucuu

SEQ ID NO: 1282586 - RNA, 23 nt, Human
cacccgccuccgccucccaaagu

SEQ ID NO: 1282587 - RNA, 24 nt, Human
caccuuagccucccguguagcugg

SEQ ID NO: 1282588 - RNA, 21 nt, Human
cacugcaaccuccgccucccg

SEQ ID NO: 1282589 - RNA, 23 nt, Human
cacugcaaccuccgccucccggg

SEQ ID NO: 1282590 - RNA, 21 nt, Human
cagcuucccacugcccucacc

SEQ ID NO: 1282591 - RNA, 24 nt, Human
caggaauggaacccugguccugcc

SEQ ID NO: 1282592 - RNA, 20 nt, Human
cagguacaaaaacacagcau

SEQ ID NO: 1282593 - RNA, 23 nt, Human
cauguugaccaggcuggucuuga

SEQ ID NO: 1282594 - RNA, 24 nt, Human
cauguugaccaggcuggucuugag

SEQ ID NO: 1282595 - RNA, 24 nt, Human
cauucagaacccaccugcugaggu

SEQ ID NO: 1282596 - RNA, 19 nt, Human
ccaaacccagaagaacgca

SEQ ID NO: 1282597 - RNA, 24 nt, Human
ccaaagugcugggcuuacaggcau

SEQ ID NO: 1282598 - RNA, 22 nt, Human
ccacccgccuccgccucccaaa

SEQ ID NO: 1282599 - RNA, 20 nt, Human
ccacugcccucaccugggag

SEQ ID NO: 1282600 - RNA, 21 nt, Human
ccacugcccucaccugggagg

SEQ ID NO: 1282601 - RNA, 20 nt, Human
cccacaagauuuaauagauc

SEQ ID NO: 1282602 - RNA, 20 nt, Human
cccacacugggcgugccucc

SEQ ID NO: 1282603 - RNA, 23 nt, Human
cccacacugggcgugccuccuag

SEQ ID NO: 1282604 - RNA, 23 nt, Human
cccaccuuagccucccguguagc

SEQ ID NO: 1282605 - RNA, 21 nt, Human
cccaggagagggucagagcac

SEQ ID NO: 1282606 - RNA, 20 nt, Human
ccccugucagguacaaaaac

SEQ ID NO: 1282607 - RNA, 24 nt, Human
cccguguagcugggacuacaggcu

SEQ ID NO: 1282608 - RNA, 27 nt, Human
ccgccucccggguucaagcaauucuuu

SEQ ID NO: 1282609 - RNA, 24 nt, Human
ccgccuccgccucccaaagugcug

SEQ ID NO: 1282610 - RNA, 19 nt, Human
ccguguagcugggacuaca

SEQ ID NO: 1282611 - RNA, 22 nt, Human
ccuaucuagccaaacccagaag

SEQ ID NO: 1282612 - RNA, 22 nt, Human
ccucaccagcagcauaugacaa

SEQ ID NO: 1282613 - RNA, 24 nt, Human
ccuccaccacuugggcacuagcau

SEQ ID NO: 1282614 - RNA, 24 nt, Human
ccucccggguucaagcaauucucc

SEQ ID NO: 1282615 - RNA, 22 nt, Human
ccugaccucaauggauccaccc

SEQ ID NO: 1282616 - RNA, 18 nt, Human
ccugccagugccagggag

SEQ ID NO: 1282617 - RNA, 20 nt, Human
ccuugcccacaucacucucc

SEQ ID NO: 1282618 - RNA, 18 nt, Human
cgacuuagauacuaguga

SEQ ID NO: 1282619 - RNA, 24 nt, Human
cgccuccgccucccaaagugcugg

SEQ ID NO: 1282620 - RNA, 23 nt, Human
cggcaaaagacccauggagacug

SEQ ID NO: 1282621 - RNA, 24 nt, Human
cgggguuucaccauguugaccagg

SEQ ID NO: 1282622 - RNA, 23 nt, Human
cuagaguucuccaucaaaaccaa

SEQ ID NO: 1282623 - RNA, 20 nt, Human
cuagaguucuccaucaaaag

SEQ ID NO: 1282624 - RNA, 20 nt, Human
cucaccagcagcauaugaca

SEQ ID NO: 1282625 - RNA, 21 nt, Human
cucaccagcagcauaugacaa

SEQ ID NO: 1282626 - RNA, 24 nt, Human
cucacugcaaccuccgccucccgg

SEQ ID NO: 1282627 - RNA, 23 nt, Human
cucccguguagcugggacuacag

SEQ ID NO: 1282628 - RNA, 23 nt, Human
cugcaaccuccgccucccggguu

SEQ ID NO: 1282629 - RNA, 24 nt, Human
cugcaaccuccgccucccggguuc

SEQ ID NO: 1282630 - RNA, 23 nt, Human
cugcauucagaacccaccugcug

SEQ ID NO: 1282631 - RNA, 22 nt, Human
cugcugaaaucggcccuuugaa

SEQ ID NO: 1282632 - RNA, 20 nt, Human
cuggugacggguagaaggaa

SEQ ID NO: 1282633 - RNA, 22 nt, Human
cuggugggaggugagaaacaag

SEQ ID NO: 1282634 - RNA, 19 nt, Human
cugucgcccaggcuggagu

SEQ ID NO: 1282635 - RNA, 24 nt, Human
cuuagccucccguguagcugggac

SEQ ID NO: 1282636 - RNA, 20 nt, Human
cuucuacagaagcauccuca

SEQ ID NO: 1282637 - RNA, 21 nt, Human
cuugagcuccugaccucaaug

SEQ ID NO: 1282638 - RNA, 18 nt, Human
cuuuuuuuuuuuuuuuug

SEQ ID NO: 1282639 - RNA, 19 nt, Human
gaaaaugacacccuugccc

SEQ ID NO: 1282640 - RNA, 18 nt, Human
gaaguagagagugaggug

SEQ ID NO: 1282641 - RNA, 23 nt, Human
gaauggaacccugguccugccuc

SEQ ID NO: 1282642 - RNA, 24 nt, Human
gaccucaauggauccacccgccuc

SEQ ID NO: 1282643 - RNA, 20 nt, Human
gagacgggguuucaccaugu

SEQ ID NO: 1282644 - RNA, 22 nt, Human
gagacugugguaaccagguggg

SEQ ID NO: 1282645 - RNA, 24 nt, Human
gagagggucagagcacaugugcuc

SEQ ID NO: 1282646 - RNA, 21 nt, Human
gagcagaagcugagcagggaa

SEQ ID NO: 1282647 - RNA, 21 nt, Human
gagcagggaagaaauggugug

SEQ ID NO: 1282648 - RNA, 22 nt, Human
gauccacccgccuccgccuccc

SEQ ID NO: 1282649 - RNA, 19 nt, Human
gcccaggcuggagugcaau

SEQ ID NO: 1282650 - RNA, 20 nt, Human
gcccaggcuggagugcaaug

SEQ ID NO: 1282651 - RNA, 18 nt, Human
gccucagauucuucacug

SEQ ID NO: 1282652 - RNA, 21 nt, Human
gcggggacagccuuggcugca

SEQ ID NO: 1282653 - RNA, 27 nt, Human
gcucugucgcccaggcuggagugcaau

SEQ ID NO: 1282654 - RNA, 23 nt, Human
gcuggucuugagcuccugaccuc

SEQ ID NO: 1282655 - RNA, 22 nt, Human
gcuuacaggcaugagccacugc

SEQ ID NO: 1282656 - RNA, 19 nt, Human
ggaaaacacaagggcuugg

SEQ ID NO: 1282657 - RNA, 25 nt, Human
ggaggugccaccauuucuccccauu

SEQ ID NO: 1282658 - RNA, 21 nt, Human
ggcaccugcucugagggcggg

SEQ ID NO: 1282659 - RNA, 24 nt, Human
ggcuggucuugagcuccugaccuc

SEQ ID NO: 1282660 - RNA, 22 nt, Human
ggcuuacaggcaugagccacug

SEQ ID NO: 1282661 - RNA, 21 nt, Human
gggccucagauucuucacugg

SEQ ID NO: 1282662 - RNA, 23 nt, Human
gggguuucaccauguugaccagg

SEQ ID NO: 1282663 - RNA, 23 nt, Human
guagagacgggguuucaccaugu

SEQ ID NO: 1282664 - RNA, 21 nt, Human
uaaaaugagugaccccuguca

SEQ ID NO: 1282665 - RNA, 21 nt, Human
uaaacauaauggaaaacacaa

SEQ ID NO: 1282666 - RNA, 19 nt, Human
uaaagcccgacuuagauac

SEQ ID NO: 1282667 - RNA, 30 nt, Human; identical to SEQ ID NO: 260408

SEQ ID NO: 1282668 - RNA, 29 nt, Human
uacaaccaauggccuucccauagcucaca

SEQ ID NO: 1282669 - RNA, 19 nt, Human
uacagcagaggaagaugaa

SEQ ID NO: 1282670 - RNA, 23 nt, Human
uacaggcaugagccacugcgccc

SEQ ID NO: 1282671 - RNA, 19 nt, Human
uacucaucguguuucucac

SEQ ID NO: 1282672 - RNA, 22 nt, Human
uagagacgggguuucaccaugu

SEQ ID NO: 1282673 - RNA, 21 nt, Human
uagcaaagaggcacuaaacau

SEQ ID NO: 1282674 - RNA, 25 nt, Human
uagcaaauacaaccaauggccuucc

SEQ ID NO: 1282675 - RNA, 19 nt, Human
uagcaaugugagguaaggc

SEQ ID NO: 1282676 - RNA, 24 nt, Human
uaguagagacgggguuucaccaug

SEQ ID NO: 1282677 - RNA, 26 nt, Human
uaguagagacgggguuucaccauguu

SEQ ID NO: 1282678 - RNA, 20 nt, Human
ucaagcaauucucccaccuu

SEQ ID NO: 1282679 - RNA, 18 nt, Human
ucaauuacuugucucaau

SEQ ID NO: 1282680 - RNA, 23 nt, Human
ucacugcaaccuccgccucccgg

SEQ ID NO: 1282681 - RNA, 24 nt, Human
ucacugcaaccuccgccucccggg

SEQ ID NO: 1282682 - RNA, 25 nt, Human
ucacugcaaccuccgccucccgggu

SEQ ID NO: 1282683 - RNA, 27 nt, Human
ucacugcaaccuccgccucccggguuc

SEQ ID NO: 1282684 - RNA, 19 nt, Human
ucagauucuucacugucaa

SEQ ID NO: 1282685 - RNA, 20 nt, Human
ucagauucuucacugucaac

SEQ ID NO: 1282686 - RNA, 20 nt, Human
ucaguuaguaaagaaggagg

SEQ ID NO: 1282687 - RNA, 19 nt, Human
uccacccgccuccgccucc

SEQ ID NO: 1282688 - RNA, 24 nt, Human
ucccaaagugcugggcuuacaggc

SEQ ID NO: 1282689 - RNA, 18 nt, Human
ucccacugcccucaccug

SEQ ID NO: 1282690 - RNA, 18 nt, Human
uccccaaccucucugggc

SEQ ID NO: 1282691 - RNA, 21 nt, Human
ucccggguucaagcaauucuc

SEQ ID NO: 1282692 - RNA, 23 nt, Human
ucccggguucaagcaauucuccc

SEQ ID NO: 1282693 - RNA, 24 nt, Human
ucccguguagcugggacuacaggc

SEQ ID NO: 1282694 - RNA, 24 nt, Human
uccgccucccggguucaagcaauu

SEQ ID NO: 1282695 - RNA, 18 nt, Human
ucgcccaggcuggagugc

SEQ ID NO: 1282696 - RNA, 23 nt, Human
ucucagggcugugugacuuuacu

SEQ ID NO: 1282697 - RNA, 26 nt, Human
ucucccaccuuagccucccguguagc

SEQ ID NO: 1282698 - RNA, 18 nt, Human
ucugauuucuuucuuucu

SEQ ID NO: 1282699 - RNA, 24 nt, Human
ucugucgcccaggcuggagugcaa

SEQ ID NO: 1282700 - RNA, 23 nt, Human
ucuugagcuccugaccucaaugg

SEQ ID NO: 1282701 - RNA, 23 nt, Human
ucuugcucugucgcccaggcugg

SEQ ID NO: 1282702 - RNA, 24 nt, Human
ucuugcucugucgcccaggcugga

SEQ ID NO: 1282703 - RNA, 18 nt, Human
ugaaaaagacuggaaggu

SEQ ID NO: 1282704 - RNA, 21 nt, Human
ugaaagcucuuuugaaagcaa

SEQ ID NO: 1282705 - RNA, 19 nt, Human
ugaaauuagacgcaaugac

SEQ ID NO: 1282706 - RNA, 18 nt, Human
ugacaaaguagggauuuu

SEQ ID NO: 1282707 - RNA, 24 nt, Human
ugaccaggcuggucuugagcuccu

SEQ ID NO: 1282708 - RNA, 20 nt, Human
ugagcagggaagaaauggug

SEQ ID NO: 1282709 - RNA, 27 nt, Human
ugagggcgggcaguuggagcgagucuc

SEQ ID NO: 1282710 - RNA, 22 nt, Human
ugagguaaggccugccagugcc

SEQ ID NO: 1282711 - RNA, 23 nt, Human
ugcaauggugcaaucucagcucc

SEQ ID NO: 1282712 - RNA, 18 nt, Human
ugccaccauuucucccca

SEQ ID NO: 1282713 - RNA, 19 nt, Human
ugcucugagggcgggcagu

SEQ ID NO: 1282714 - RNA, 24 nt, Human
ugcucugucgcccaggcuggagug

SEQ ID NO: 1282715 - RNA, 21 nt, Human
ugcuggggaucaguuaguaaa

SEQ ID NO: 1282716 - RNA, 24 nt, Human
ugcuggggaucaguuaguaaagaa

SEQ ID NO: 1282717 - RNA, 18 nt, Human
uggaacccugguccugcc

SEQ ID NO: 1282718 - RNA, 23 nt, Human
uggaacccugguccugccucuca

SEQ ID NO: 1282719 - RNA, 19 nt, Human
uggagcgagucucacccau

SEQ ID NO: 1282720 - RNA, 23 nt, Human
uggagugcaauggugcaaucuca

SEQ ID NO: 1282721 - RNA, 24 nt, Human
uggagugcaauggugcaaucucag

SEQ ID NO: 1282722 - RNA, 19 nt, Human
ugggacuacaggcucccgc

SEQ ID NO: 1282723 - RNA, 21 nt, Human
ugggacuacaggcucccgcca

SEQ ID NO: 1282724 - RNA, 22 nt, Human
ugggcuuacaggcaugagccac

SEQ ID NO: 1282725 - RNA, 22 nt, Human
ugggcuuacaggcaugagccac

SEQ ID NO: 1282726 - RNA, 24 nt, Human
ugggcuuacaggcaugagccacug

SEQ ID NO: 1282727 - RNA, 24 nt, Human
ugggcuuacaggcaugagccacug

SEQ ID NO: 1282728 - RNA, 24 nt, Human
uggugcaaucucagcucacugcaa

SEQ ID NO: 1282729 - RNA, 23 nt, Human
uggugguugucaaaucucucacc

SEQ ID NO: 1282730 - RNA, 19 nt, Human
uguagcugggacuacaggc

SEQ ID NO: 1282731 - RNA, 24 nt, Human
uguagcugggacuacaggcucccg

SEQ ID NO: 1282732 - RNA, 21 nt, Human
uguauuuuuaguagagacggg

SEQ ID NO: 1282733 - RNA, 20 nt, Human
ugucgcccaggcuggagugc

SEQ ID NO: 1282734 - RNA, 23 nt, Human
uguuaaauaagauuccagaaagu

SEQ ID NO: 1282735 - RNA, 19 nt, Human
uuaacauuucaguccauuc

SEQ ID NO: 1282736 - RNA, 20 nt, Human
uuacaggcaugagccacugc

SEQ ID NO: 1282737 - RNA, 18 nt, Human
uuaguagagacgggguuu

SEQ ID NO: 1282738 - RNA, 22 nt, Human
uuaguagagacgggguuucacc

SEQ ID NO: 1282739 - RNA, 24 nt, Human
uuaguagagacgggguuucaccau

SEQ ID NO: 1282740 - RNA, 24 nt, Human
uucaagcaauucucccaccuuagc

SEQ ID NO: 1282741 - RNA, 23 nt, Human
uuccauagagggacacaacccua

SEQ ID NO: 1282742 - RNA, 19 nt, Human
uucugauuucuuucuuucu

SEQ ID NO: 1282743 - RNA, 20 nt, Human
uucugauuucuuucuuucuu

SEQ ID NO: 1282744 - RNA, 25 nt, Human
uucugauuucuuucuuucuuuuuuu

SEQ ID NO: 1282745 - RNA, 24 nt, Human
uugaaguagagagugaggugaagc

SEQ ID NO: 1282746 - RNA, 18 nt, Human
uuggaacuggauagagca

SEQ ID NO: 1282747 - RNA, 23 nt, Human
uuguauuuuuaguagagacgggg

SEQ ID NO: 1282748 - RNA, 20 nt, Human
uugugcuucgugugccuggg

SEQ ID NO: 1282749 - RNA, 24 nt, Human
uuucaccauguugaccaggcuggu

SEQ ID NO: 1282750 - RNA, 20 nt, Human
uuugaaauuagacgcaauga

SEQ ID NO: 1282751 - RNA, 20 nt, Human
uuuuauuuccuugcugggga

SEQ ID NO: 1282752 - RNA, 24 nt, Human
uuuuuaguagagacgggguuucac

SEQ ID NO: 1282753 - RNA, 22 nt, Human
uuuuuguauuuuuaguagagaa

SEQ ID NO: 1282754 - RNA, 21 nt, Human
uuuuuuguauuuuuaguagag

SEQ ID NO: 1282755 - RNA, 24 nt, Human
uuuuuuguauuuuuaguagagacg

SEQ ID NO: 1282756 - RNA, 23 nt, Human
uuuuuuuuuuuuugagagagucu

SEQ ID NO: 1282757 - RNA, 22 nt, Human
aaaaccuccagcaucucugcuc

SEQ ID NO: 1282758 - RNA, 26 nt, Human
aaaaggaaauuuacuauggggcggga

SEQ ID NO: 1282759 - RNA, 27 nt, Human
aaacagaaaguacgacaaaggggaccc

SEQ ID NO: 1282760 - RNA, 21 nt, Human
aaacagaaaguacgacaaagu

SEQ ID NO: 1282761 - RNA, 24 nt, Human
aaagugccgcgauuacaggcguga

SEQ ID NO: 1282762 - RNA, 22 nt, Human
aaaugucucuccugggcaagcc

SEQ ID NO: 1282763 - RNA, 25 nt, Human
aacagcucuucagcugaagccaacc

SEQ ID NO: 1282764 - RNA, 18 nt, Human
aacaggcagggcaggugg

SEQ ID NO: 1282765 - RNA, 23 nt, Human
aagaugucgcaucuuuuuaaaug

SEQ ID NO: 1282766 - RNA, 18 nt, Human
aagcagaggccucccagg

SEQ ID NO: 1282767 - RNA, 19 nt, Human
aagcagaggccucccaggg

SEQ ID NO: 1282768 - RNA, 24 nt, Human
aaguagcuggggcuacaggcacgu

SEQ ID NO: 1282769 - RNA, 18 nt, Human
aagugcugggaucacagg

SEQ ID NO: 1282770 - RNA, 23 nt, Human
aagugcugggaucacagguguga

SEQ ID NO: 1282771 - RNA, 26 nt, Human
aagugcugggaucacaggugugagcc

SEQ ID NO: 1282772 - RNA, 18 nt, Human
aauagcugggauuacagg

SEQ ID NO: 1282773 - RNA, 20 nt, Human
acaggguuucaccacuuugg

SEQ ID NO: 1282774 - RNA, 24 nt, Human
acaggguuucaccacuuuggccag

SEQ ID NO: 1282775 - RNA, 23 nt, Human
acccacgaagccaccacugaccc

SEQ ID NO: 1282776 - RNA, 19 nt, Human
acgaagccaccacugaccc

SEQ ID NO: 1282777 - RNA, 18 nt, Human
acucugucacccaagcug

SEQ ID NO: 1282778 - RNA, 27 nt, Human
acucugucacccaagcuggagugcaau

SEQ ID NO: 1282779 - RNA, 18 nt, Human
acugacucccugcccucc

SEQ ID NO: 1282780 - RNA, 22 nt, Human
acugcaccuggcccuguucaga

SEQ ID NO: 1282781 - RNA, 23 nt, Human
agcacagcuccguccccucccca

SEQ ID NO: 1282782 - RNA, 19 nt, Human
agcaguuuuugccgcauuc

SEQ ID NO: 1282783 - RNA, 18 nt, Human
aggcagggucucuguugc

SEQ ID NO: 1282784 - RNA, 19 nt, Human
aggccucccagggacaaga

SEQ ID NO: 1282785 - RNA, 21 nt, Human
agggacaagagcugagaagga

SEQ ID NO: 1282786 - RNA, 24 nt, Human
aggugaucugccugccucggccuc

SEQ ID NO: 1282787 - RNA, 21 nt, Human
agugcaguggugcugucauag

SEQ ID NO: 1282788 - RNA, 20 nt, Human
agugcugggaucacaggugu

SEQ ID NO: 1282789 - RNA, 20 nt, Human
auaaauuucccucagagcag

SEQ ID NO: 1282790 - RNA, 24 nt, Human
auagcugggauuacaggugugagc

SEQ ID NO: 1282791 - RNA, 21 nt, Human
auccuccugcuucagccuccc

SEQ ID NO: 1282792 - RNA, 24 nt, Human
aucuuucuaggaauuuuuuuguug

SEQ ID NO: 1282793 - RNA, 23 nt, Human
auuucuccuuugacccuuuggcu

SEQ ID NO: 1282794 - RNA, 23 nt, Human
auuugcagcuauaaauuucccuc

SEQ ID NO: 1282795 - RNA, 24 nt, Human
auuuuuguguuuuuaguagagaca

SEQ ID NO: 1282796 - RNA, 23 nt, Human
caaaacagcucuucagcugaagc

SEQ ID NO: 1282797 - RNA, 24 nt, Human
caaagugaaacccacgaagccacc

SEQ ID NO: 1282798 - RNA, 24 nt, Human
caaagugccgcgauuacaggcgug

SEQ ID NO: 1282799 - RNA, 19 nt, Human
caacaggcagggcaggugg

SEQ ID NO: 1282800 - RNA, 18 nt, Human
caacuuggaaaauuccag

SEQ ID NO: 1282801 - RNA, 22 nt, Human
caagugauuuuccugccucagc

SEQ ID NO: 1282802 - RNA, 24 nt, Human
caagugcugggaucacagguguga

SEQ ID NO: 1282803 - RNA, 18 nt, Human
cacagcuccguccccucc

SEQ ID NO: 1282804 - RNA, 22 nt, Human
cacaggugugagccacugcacc

SEQ ID NO: 1282805 - RNA, 19 nt, Human
caccacacccagccaagau

SEQ ID NO: 1282806 - RNA, 23 nt, Human
caccacgccuggcuaauuuuugu

SEQ ID NO: 1282807 - RNA, 21 nt, Human
caccacuuuggccagguuggu

SEQ ID NO: 1282808 - RNA, 24 nt, Human
caccacuuuggccagguuggucuc

SEQ ID NO: 1282809 - RNA, 23 nt, Human
cacucugucacccaagcuggagu

SEQ ID NO: 1282810 - RNA, 24 nt, Human
cacucugucacccaagcuggagug

SEQ ID NO: 1282811 - RNA, 21 nt, Human
cacugcaaccucugccuccug

SEQ ID NO: 1282812 - RNA, 23 nt, Human
cacugcaaccucugccuccuggg

SEQ ID NO: 1282813 - RNA, 20 nt, Human
cacuucuguucccucaucca

SEQ ID NO: 1282814 - RNA, 23 nt, Human
cacuucuguucccucauccagag

SEQ ID NO: 1282815 - RNA, 19 nt, Human
cagauaaggugacauagug

SEQ ID NO: 1282816 - RNA, 21 nt, Human
cagcucuucagcugaagccaa

SEQ ID NO: 1282817 - RNA, 20 nt, Human
cagggacaagagcugagaag

SEQ ID NO: 1282818 - RNA, 19 nt, Human
cagggucucuguugcccag

SEQ ID NO: 1282819 - RNA, 24 nt, Human
caggguuucaccacuuuggccagg

SEQ ID NO: 1282820 - RNA, 22 nt, Human
caggugaucugccugccucggc

SEQ ID NO: 1282821 - RNA, 22 nt, Human
cauaguggcaaaugucucuccu

SEQ ID NO: 1282822 - RNA, 22 nt, Human
ccaaagugccgcgauuacaggc

SEQ ID NO: 1282823 - RNA, 24 nt, Human
ccaaagugccgcgauuacaggcgu

SEQ ID NO: 1282824 - RNA, 19 nt, Human
ccaagugcugggaucacag

SEQ ID NO: 1282825 - RNA, 23 nt, Human
ccaagugcugggaucacaggugu

SEQ ID NO: 1282826 - RNA, 24 nt, Human
ccaagugcugggaucacaggugug

SEQ ID NO: 1282827 - RNA, 26 nt, Human
ccacacccagccaagaugguggaccc

SEQ ID NO: 1282828 - RNA, 24 nt, Human
ccacacccagccaagaugucgcaa

SEQ ID NO: 1282829 - RNA, 20 nt, Human
ccaccacgccuggcuaauuu

SEQ ID NO: 1282830 - RNA, 19 nt, Human
ccacugcaccuggcccugu

SEQ ID NO: 1282831 - RNA, 20 nt, Human
ccagggacaagagcugagaa

SEQ ID NO: 1282832 - RNA, 23 nt, Human
cccaagcuggagugcaauggcau

SEQ ID NO: 1282833 - RNA, 24 nt, Human
cccaaguagcuggggcuacaggca

SEQ ID NO: 1282834 - RNA, 24 nt, Human
cccaagugcugggaucacaggugu

SEQ ID NO: 1282835 - RNA, 22 nt, Human
cccagggcaagcccagauaagg

SEQ ID NO: 1282836 - RNA, 23 nt, Human
ccgcacccagcgacaggacugug

SEQ ID NO: 1282837 - RNA, 24 nt, Human
ccucccagggacaagagcugagaa

SEQ ID NO: 1282838 - RNA, 26 nt, Human
ccucccagggacaagagcugagaagg

SEQ ID NO: 1282839 - RNA, 23 nt, Human
ccucccugaugacuuuagcaccu

SEQ ID NO: 1282840 - RNA, 26 nt, Human
ccuccugcuucagccucccaaguagc

SEQ ID NO: 1282841 - RNA, 22 nt, Human
ccucugccuccuggguucaagu

SEQ ID NO: 1282842 - RNA, 18 nt, Human
ccugagguucaaaaccuc

SEQ ID NO: 1282843 - RNA, 24 nt, Human
ccuggccucaggccauccuccuaa

SEQ ID NO: 1282844 - RNA, 18 nt, Human
ccuggcuggagugcagug

SEQ ID NO: 1282845 - RNA, 21 nt, Human
ccuggcuggagugcaguggug

SEQ ID NO: 1282846 - RNA, 23 nt, Human
ccuggguucaagugauuuuccuc

SEQ ID NO: 1282847 - RNA, 23 nt, Human
ccuggguucaagugauuuuccug

SEQ ID NO: 1282848 - RNA, 24 nt, Human
cgcgauuacaggcgugagccacca

SEQ ID NO: 1282849 - RNA, 24 nt, Human
cgugaauagcugggauuacaggug

SEQ ID NO: 1282850 - RNA, 24 nt, Human
cuagcuauccuccugcuucagccu

SEQ ID NO: 1282851 - RNA, 27 nt, Human
cuagcuauccuccugcuucagccuccc

SEQ ID NO: 1282852 - RNA, 27 nt, Human
cuaggaauuuuuuuguuguuguuuuga

SEQ ID NO: 1282853 - RNA, 24 nt, Human
cucacucugucacccaagcuggag

SEQ ID NO: 1282854 - RNA, 24 nt, Human
cucacugcaaccucugccuccugg

SEQ ID NO: 1282855 - RNA, 21 nt, Human
cuccagcaucucugcucuucc

SEQ ID NO: 1282856 - RNA, 25 nt, Human
cucccugcccucccugaugacuuua

SEQ ID NO: 1282857 - RNA, 21 nt, Human
cuccgcacccagcgacaggac

SEQ ID NO: 1282858 - RNA, 19 nt, Human
cuccguccccuccccacgg

SEQ ID NO: 1282859 - RNA, 21 nt, Human
cuccuggccucaggccaucuu

SEQ ID NO: 1282860 - RNA, 23 nt, Human
cuccugggcucuagcuauccucc

SEQ ID NO: 1282861 - RNA, 24 nt, Human
cucgugaauagcugggauuacagg

SEQ ID NO: 1282862 - RNA, 20 nt, Human
cugaccucaggugaucugcc

SEQ ID NO: 1282863 - RNA, 23 nt, Human
cugaccucaggugaucugccugc

SEQ ID NO: 1282864 - RNA, 23 nt, Human
cugcaaccucugccuccuggguu

SEQ ID NO: 1282865 - RNA, 24 nt, Human
cugcaaccucugccuccuggguuc

SEQ ID NO: 1282866 - RNA, 23 nt, Human
cugccucagccucgugaauagcu

SEQ ID NO: 1282867 - RNA, 23 nt, Human
cugccuccuggguucaagugauu

SEQ ID NO: 1282868 - RNA, 23 nt, Human
cugcuucagccucccaaguagcu

SEQ ID NO: 1282869 - RNA, 24 nt, Human
cuggagugcaauggcaugaucuca

SEQ ID NO: 1282870 - RNA, 24 nt, Human
cuggccucaggccauccuccuaac

SEQ ID NO: 1282871 - RNA, 18 nt, Human
cugucucagugccccagg

SEQ ID NO: 1282872 - RNA, 19 nt, Human
cugucucagugccccaggg

SEQ ID NO: 1282873 - RNA, 20 nt, Human
cuucugguauggauuucugg

SEQ ID NO: 1282874 - RNA, 23 nt, Human
cuuugaacuccugggcucuagcu

SEQ ID NO: 1282875 - RNA, 19 nt, Human
gaauagcugggauuacagg

SEQ ID NO: 1282876 - RNA, 19 nt, Human
gaauagcugggauuacagg

SEQ ID NO: 1282877 - RNA, 24 nt, Human
gaauagcugggauuacagguguga

SEQ ID NO: 1282878 - RNA, 25 nt, Human
gaauagcugggauuacaggugugag

SEQ ID NO: 1282879 - RNA, 24 nt, Human
gaccucaggugaucugccugccuc

SEQ ID NO: 1282880 - RNA, 18 nt, Human
gaucacaggugugagcca

SEQ ID NO: 1282881 - RNA, 22 nt, Human
gaucacaggugugagccacugc

SEQ ID NO: 1282882 - RNA, 23 nt, Human
gaucacaggugugagccacugca

SEQ ID NO: 1282883 - RNA, 18 nt, Human
gauuacaggcgugagcca

SEQ ID NO: 1282884 - RNA, 21 nt, Human
gauuacaggcgugagccacca

SEQ ID NO: 1282885 - RNA, 22 nt, Human
gauuacaggcgugagccaccac

SEQ ID NO: 1282886 - RNA, 18 nt, Human
gauuacaggugugagcca

SEQ ID NO: 1282887 - RNA, 21 nt, Human
gauuacaggugugagccacca

SEQ ID NO: 1282888 - RNA, 22 nt, Human
gauuacaggugugagccaccac

SEQ ID NO: 1282889 - RNA, 19 nt, Human
gcuggagugcaauggcaug

SEQ ID NO: 1282890 - RNA, 21 nt, Human
gcuggagugcaguggugcugg

SEQ ID NO: 1282891 - RNA, 19 nt, Human
gcugggauuacagguguga

SEQ ID NO: 1282892 - RNA, 23 nt, Human
gcuggucucgaacuccuggccuc

SEQ ID NO: 1282893 - RNA, 22 nt, Human
ggaaauuuacuauggggcggga

SEQ ID NO: 1282894 - RNA, 19 nt, Human
ggacaagagcugagaagga

SEQ ID NO: 1282895 - RNA, 21 nt, Human
ggagaaggugguuugcaggau

SEQ ID NO: 1282896 - RNA, 18 nt, Human
ggagggccuggggccugc

SEQ ID NO: 1282897 - RNA, 23 nt, Human
ggcggaagagcucugcaaucucu

SEQ ID NO: 1282898 - RNA, 19 nt, Human
ggcuacaggcacgugccau

SEQ ID NO: 1282899 - RNA, 24 nt, Human
ggcuggucucgaacuccuggccuc

SEQ ID NO: 1282900 - RNA, 20 nt, Human
gggaaaaggaaauuuacuau

SEQ ID NO: 1282901 - RNA, 19 nt, Human
gggcucuagcuauccuccu

SEQ ID NO: 1282902 - RNA, 19 nt, Human
ggucucgaacuucugaccu

SEQ ID NO: 1282903 - RNA, 20 nt, Human
ggucucgaacuucugaccuc

SEQ ID NO: 1282904 - RNA, 23 nt, Human
gugaaacagaaaguacgacaaag

SEQ ID NO: 1282905 - RNA, 21 nt, Human
gugauuuuccugccucagccu

SEQ ID NO: 1282906 - RNA, 21 nt, Human
gugcgugcugcugcuucuuuu

SEQ ID NO: 1282907 - RNA, 19 nt, Human
guucccucauccagagagg

SEQ ID NO: 1282908 - RNA, 21 nt, Human
uaaaaaguguguucaauuucu

SEQ ID NO: 1282909 - RNA, 19 nt, Human
uaagcacagcuccgucccc

SEQ ID NO: 1282910 - RNA, 20 nt, Human
uaagcacagcuccguccccu

SEQ ID NO: 1282911 - RNA, 23 nt, Human
uaagucuggucagccuuuugguu

SEQ ID NO: 1282912 - RNA, 24 nt, Human
uaauuuuuguguuuuuaguagaga

SEQ ID NO: 1282913 - RNA, 24 nt, Human
uacaggcgugagccaccacaccca

SEQ ID NO: 1282914 - RNA, 22 nt, Human
uacaggugugagccaccacgcc

SEQ ID NO: 1282915 - RNA, 23 nt, Human
uacaggugugagccaccacgccu

SEQ ID NO: 1282916 - RNA, 21 nt, Human
uagagacaggguuucaccacu

SEQ ID NO: 1282917 - RNA, 19 nt, Human
uaguagagacaggguuuca

SEQ ID NO: 1282918 - RNA, 26 nt, Human
uaguagagacaggguuucaccacuuu

SEQ ID NO: 1282919 - RNA, 19 nt, Human
ucaagugauuuuccugccu

SEQ ID NO: 1282920 - RNA, 21 nt, Human
ucaccacuuuggccagguugg

SEQ ID NO: 1282921 - RNA, 24 nt, Human
ucacugcaaccucugccuccuggg

SEQ ID NO: 1282922 - RNA, 25 nt, Human
ucacugcaaccucugccuccugggu

SEQ ID NO: 1282923 - RNA, 27 nt, Human
ucacugcaaccucugccuccuggguuc

SEQ ID NO: 1282924 - RNA, 20 nt, Human
ucagccucccaaguagcugg

SEQ ID NO: 1282925 - RNA, 21 nt, Human
ucagccucccaaguagcuggg

SEQ ID NO: 1282926 - RNA, 23 nt, Human
ucagccucccaaguagcuggggc

SEQ ID NO: 1282927 - RNA, 25 nt, Human
ucaggccauccuccuaacuaguucu

SEQ ID NO: 1282928 - RNA, 21 nt, Human
ucaggccauggcugaguggga

SEQ ID NO: 1282929 - RNA, 22 nt, Human
uccagagagggcggaagagcuc

SEQ ID NO: 1282930 - RNA, 24 nt, Human
uccagcaucucugcucuucccuaa

SEQ ID NO: 1282931 - RNA, 24 nt, Human
ucccaaagugccgcgauuacaggc

SEQ ID NO: 1282932 - RNA, 24 nt, Human
ucccaaguagcuggggcuacaggc

SEQ ID NO: 1282933 - RNA, 23 nt, Human
uccccaagugcugggaucacagg

SEQ ID NO: 1282934 - RNA, 22 nt, Human
ucccucagagcaguuuuugccg

SEQ ID NO: 1282935 - RNA, 19 nt, Human
uccgcacccagcgacagga

SEQ ID NO: 1282936 - RNA, 20 nt, Human
uccugggcaagccugggaug

SEQ ID NO: 1282937 - RNA, 21 nt, Human
uccuggguucaagugauuuuc

SEQ ID NO: 1282938 - RNA, 24 nt, Human
uccuggguucaagugauuuuccug

SEQ ID NO: 1282939 - RNA, 20 nt, Human
ucgaggcagggucucuguug

SEQ ID NO: 1282940 - RNA, 24 nt, Human
ucgugaauagcugggauuacaggu

SEQ ID NO: 1282941 - RNA, 21 nt, Human
ucguugcagcuuugaacuccu

SEQ ID NO: 1282942 - RNA, 24 nt, Human
ucguugcagcuuugaacuccuggg

SEQ ID NO: 1282943 - RNA, 22 nt, Human
ucucacucugucacccaagcug

SEQ ID NO: 1282944 - RNA, 24 nt, Human
ucucacucugucacccaagcugga

SEQ ID NO: 1282945 - RNA, 26 nt, Human
ucucacucugucacccaagcuggagu

SEQ ID NO: 1282946 - RNA, 27 nt, Human
ucucacucugucacccaagcuggagug

SEQ ID NO: 1282947 - RNA, 20 nt, Human
ucucgaacuccuggccucag

SEQ ID NO: 1282948 - RNA, 23 nt, Human
ucucgaacuucugaccucaggug

SEQ ID NO: 1282949 - RNA, 23 nt, Human
ucucuccugggcaagccugggau

SEQ ID NO: 1282950 - RNA, 24 nt, Human
ucucugggaagugacaagcagagg

SEQ ID NO: 1282951 - RNA, 18 nt, Human
ucucuguugcccaggcug

SEQ ID NO: 1282952 - RNA, 18 nt, Human
ucucuguugcccaggcug

SEQ ID NO: 1282953 - RNA, 25 nt, Human
ucucuguugcccaggcuggucucga

SEQ ID NO: 1282954 - RNA, 23 nt, Human
ucugaccucaggugaucugccug

SEQ ID NO: 1282955 - RNA, 24 nt, Human
ucugucacccaagcuggagugcaa

SEQ ID NO: 1282956 - RNA, 19 nt, Human
ucuguucccucauccagag

SEQ ID NO: 1282957 - RNA, 24 nt, Human
ucuguugcccaggcuggucucgaa

SEQ ID NO: 1282958 - RNA, 21 nt, Human
ugaaacagaaaguacgacaaa

SEQ ID NO: 1282959 - RNA, 24 nt, Human
ugaaacagaaaguacgacaaagug

SEQ ID NO: 1282960 - RNA, 19 nt, Human
ugaaacccacgaagccacc

SEQ ID NO: 1282961 - RNA, 24 nt, Human
ugaaacccacgaagccaccacuga

SEQ ID NO: 1282962 - RNA, 25 nt, Human
ugaacuccugggcucuagcuauccu

SEQ ID NO: 1282963 - RNA, 20 nt, Human
ugacauaguggcaaaugucu

SEQ ID NO: 1282964 - RNA, 18 nt, Human
ugaccucaggugaucugc

SEQ ID NO: 1282965 - RNA, 20 nt, Human
ugaccucaggugaucugccu

SEQ ID NO: 1282966 - RNA, 24 nt, Human
ugaccucaggugaucugccugccu

SEQ ID NO: 1282967 - RNA, 18 nt, Human
ugagacagagucucacuc

SEQ ID NO: 1282968 - RNA, 22 nt, Human
ugagacagagucucacucuguc

SEQ ID NO: 1282969 - RNA, 21 nt, Human
ugagccccuggcugggcuggg

SEQ ID NO: 1282970 - RNA, 22 nt, Human
ugagccccuggcugggcugggg

SEQ ID NO: 1282971 - RNA, 23 nt, Human
ugcaccuggcccuguucagauuu

SEQ ID NO: 1282972 - RNA, 20 nt, Human
ugcagcuuugaacuccuggg

SEQ ID NO: 1282973 - RNA, 23 nt, Human
ugcagcuuugaacuccugggcuc

SEQ ID NO: 1282974 - RNA, 18 nt, Human
ugcaggauuccgaucucu

SEQ ID NO: 1282975 - RNA, 24 nt, Human
ugcccaggcuggucucgaacuccu

SEQ ID NO: 1282976 - RNA, 24 nt, Human
ugccucagccucgugaauagcugg

SEQ ID NO: 1282977 - RNA, 22 nt, Human
ugccuccuggguucaagugauu

SEQ ID NO: 1282978 - RNA, 22 nt, Human
ugccucggccucccaaagugcc

SEQ ID NO: 1282979 - RNA, 25 nt, Human
ugccucggccucccaaagugccgcg

SEQ ID NO: 1282980 - RNA, 24 nt, Human
ugcugggaucacaggugugagcca

SEQ ID NO: 1282981 - RNA, 24 nt, Human
ugcuucagccucccaaguagcugg

SEQ ID NO: 1282982 - RNA, 19 nt, Human
uggagugcaauggcaugau

SEQ ID NO: 1282983 - RNA, 24 nt, Human
uggagugcaauggcaugaucucag

SEQ ID NO: 1282984 - RNA, 21 nt, Human
uggagugcaguggugcuguca

SEQ ID NO: 1282985 - RNA, 25 nt, Human
uggagugcaguggugcugucauagg

SEQ ID NO: 1282986 - RNA, 28 nt, Human
uggagugcaguggugcuguccuagcacg

SEQ ID NO: 1282987 - RNA, 24 nt, Human
uggcaugaucucagcucacugcaa

SEQ ID NO: 1282988 - RNA, 24 nt, Human
uggccagguuggucucgaacuucu

SEQ ID NO: 1282989 - RNA, 20 nt, Human
uggccucaggccauccuccu

SEQ ID NO: 1282990 - RNA, 20 nt, Human
uggcuggagugcaguggugc

SEQ ID NO: 1282991 - RNA, 23 nt, Human
ugggacuuugccaggcugucucc

SEQ ID NO: 1282992 - RNA, 19 nt, Human
ugggaucacaggugugagc

SEQ ID NO: 1282993 - RNA, 21 nt, Human
ugggaucacaggugugagcca

SEQ ID NO: 1282994 - RNA, 22 nt, Human
ugggaucacaggugugagccac

SEQ ID NO: 1282995 - RNA, 22 nt, Human
ugggaucacaggugugagccac

SEQ ID NO: 1282996 - RNA, 24 nt, Human
ugggaucacaggugugagccacug

SEQ ID NO: 1282997 - RNA, 18 nt, Human
ugggauuacaggugugag

SEQ ID NO: 1282998 - RNA, 19 nt, Human
ugggauuacaggugugagc

SEQ ID NO: 1282999 - RNA, 22 nt, Human
ugggauuacaggugugagccac

SEQ ID NO: 1283000 - RNA, 23 nt, Human
ugggauuacaggugugagccacc

SEQ ID NO: 1283001 - RNA, 24 nt, Human
ugggauuacaggugugagccacca

SEQ ID NO: 1283002 - RNA, 21 nt, Human
uggggcuacaggcacgugcca

SEQ ID NO: 1283003 - RNA, 22 nt, Human
uggggcuacaggcacgugccau

SEQ ID NO: 1283004 - RNA, 23 nt, Human
uggguucaagugauuuuccugcc

SEQ ID NO: 1283005 - RNA, 24 nt, Human
uggguucaagugauuuuccugccu

SEQ ID NO: 1283006 - RNA, 20 nt, Human
ugucacccaagcuggagugc

SEQ ID NO: 1283007 - RNA, 22 nt, Human
ugucacccaagcuggagugcaa

SEQ ID NO: 1283008 - RNA, 23 nt, Human
uguccaggacacagucauuugac

SEQ ID NO: 1283009 - RNA, 22 nt, Human
ugugcgugcugcugcuucuuuu

SEQ ID NO: 1283010 - RNA, 19 nt, Human
uguugcccaggcuggucuc

SEQ ID NO: 1283011 - RNA, 20 nt, Human
uguugcccaggcuggucucg

SEQ ID NO: 1283012 - RNA, 22 nt, Human
uguugcccaggcuggucucgaa

SEQ ID NO: 1283013 - RNA, 18 nt, Human
uguuguacugacucccug

SEQ ID NO: 1283014 - RNA, 21 nt, Human
uguuguuuucauccaucucua

SEQ ID NO: 1283015 - RNA, 18 nt, Human
uuaguagagacaggguuu

SEQ ID NO: 1283016 - RNA, 21 nt, Human
uucaagugauuuuccugccuc

SEQ ID NO: 1283017 - RNA, 23 nt, Human
uucaagugauuuuccugccucag

SEQ ID NO: 1283018 - RNA, 24 nt, Human
uucaagugauuuuccugccucagc

SEQ ID NO: 1283019 - RNA, 23 nt, Human
uuccauugugauuggagaaggug

SEQ ID NO: 1283020 - RNA, 21 nt, Human
uuggagaaggugguuugcagg

SEQ ID NO: 1283021 - RNA, 18 nt, Human
uuggccagguuggucucg

SEQ ID NO: 1283022 - RNA, 23 nt, Human
uuggucauuuguaucuuucuagg

SEQ ID NO: 1283023 - RNA, 24 nt, Human
uuuuuaguagagacaggguuucac

SEQ ID NO: 1283024 - RNA, 20 nt, Human
uuuuuguguuuuuaguagag

SEQ ID NO: 1283025 - RNA, 23 nt, Human
aaaaaaaaaggaaaaacaaaacc

SEQ ID NO: 1283026 - RNA, 24 nt, Human
aaaaaaggaaaaacaaaacccaga

SEQ ID NO: 1283027 - RNA, 23 nt, Human
aaaaacaucucaauccucuaggg

SEQ ID NO: 1283028 - RNA, 23 nt, Human
aaacauuuagcacagcuuaaaua

SEQ ID NO: 1283029 - RNA, 21 nt, Human
aaacucaaaaaaaaaaaaaaa

SEQ ID NO: 1283030 - RNA, 19 nt, Human
aacaugguaaaaccccauc

SEQ ID NO: 1283031 - RNA, 20 nt, Human
aacaugguaaaaccccaucu

SEQ ID NO: 1283032 - RNA, 21 nt, Human
aacaugguaaaaccccaucuc

SEQ ID NO: 1283033 - RNA, 21 nt, Human
aacaugguaaaaccccaucuc

SEQ ID NO: 1283034 - RNA, 20 nt, Human
aagaaaacauuuagcacagc

SEQ ID NO: 1283035 - RNA, 21 nt, Human
aagaaccagggucagcaagug

SEQ ID NO: 1283036 - RNA, 20 nt, Human
aagaagcaggacugaguccu

SEQ ID NO: 1283037 - RNA, 27 nt, Human
aagcagaagguaauggagaggggaccc

SEQ ID NO: 1283038 - RNA, 24 nt, Human
aaucauuugaacccgggaggcaga

SEQ ID NO: 1283039 - RNA, 20 nt, Human
acaaaacccagaaugcagaa

SEQ ID NO: 1283040 - RNA, 24 nt, Human
accccaucucuacuaaaaauacaa

SEQ ID NO: 1283041 - RNA, 22 nt, Human
acugaaugcagaggcugaggca

SEQ ID NO: 1283042 - RNA, 22 nt, Human
agaaucauuugaacccgggagg

SEQ ID NO: 1283043 - RNA, 24 nt, Human
agacugaggcaggagaaucauuug

SEQ ID NO: 1283044 - RNA, 25 nt, Human
agagaguuuucauuugcuuauuuag

SEQ ID NO: 1283045 - RNA, 21 nt, Human
agcaaaacucaaaaaaaaaaa

SEQ ID NO: 1283046 - RNA, 22 nt, Human
agccuggccaacaugguaaaac

SEQ ID NO: 1283047 - RNA, 24 nt, Human
agccuggccaacaugguaaaaccc

SEQ ID NO: 1283048 - RNA, 23 nt, Human
agcgugguggcgggcaccuguaa

SEQ ID NO: 1283049 - RNA, 23 nt, Human
aggagacugaggcaggagaauca

SEQ ID NO: 1283050 - RNA, 22 nt, Human
aggcaaaagaagcaggagggac

SEQ ID NO: 1283051 - RNA, 23 nt, Human
aggcagauguugccagugagcug

SEQ ID NO: 1283052 - RNA, 18 nt, Human
aggcaggagaaucauuug

SEQ ID NO: 1283053 - RNA, 24 nt, Human
aggcaggagaaucauuugaacccg

SEQ ID NO: 1283054 - RNA, 19 nt, Human
aggcagggccugcucugug

SEQ ID NO: 1283055 - RNA, 21 nt, Human
aggcagggccugcucuguggc

SEQ ID NO: 1283056 - RNA, 26 nt, Human
aggcagguggaucaacugaggucagg

SEQ ID NO: 1283057 - RNA, 18 nt, Human
aggcugaggcagguggau

SEQ ID NO: 1283058 - RNA, 23 nt, Human
aggcugaggcagguggaucaacu

SEQ ID NO: 1283059 - RNA, 22 nt, Human
agguggaucaacugaggucagg

SEQ ID NO: 1283060 - RNA, 22 nt, Human
auaguucuaagauuuagaaaaa

SEQ ID NO: 1283061 - RNA, 24 nt, Human
aucacgccauugcacuccagccug

SEQ ID NO: 1283062 - RNA, 23 nt, Human
auuacaacauguuuuauuucacu

SEQ ID NO: 1283063 - RNA, 24 nt, Human
auugcacuccagccugggcgacaa

SEQ ID NO: 1283064 - RNA, 25 nt, Human
auugcacuccagccugggcgacaag

SEQ ID NO: 1283065 - RNA, 24 nt, Human
caaaagaagcaggacugaguccug

SEQ ID NO: 1283066 - RNA, 19 nt, Human
caccguguauucccauacc

SEQ ID NO: 1283067 - RNA, 24 nt, Human
caccuguaaucccagcuacucagg

SEQ ID NO: 1283068 - RNA, 24 nt, Human
cacuccagccugggcgacaagagc

SEQ ID NO: 1283069 - RNA, 22 nt, Human
cagcuuaaauaaaaguugagaa

SEQ ID NO: 1283070 - RNA, 20 nt, Human
caggcaccuuuccucuuuuc

SEQ ID NO: 1283071 - RNA, 18 nt, Human
caggccaagccuuaguac

SEQ ID NO: 1283072 - RNA, 24 nt, Human
cagguggaucaacugaggucagga

SEQ ID NO: 1283073 - RNA, 26 nt, Human
cagugaggcagggccugcucuguggc

SEQ ID NO: 1283074 - RNA, 19 nt, Human
cauugcacuccagccuggg

SEQ ID NO: 1283075 - RNA, 21 nt, Human
cauugcacuccagccugggcg

SEQ ID NO: 1283076 - RNA, 22 nt, Human
cauugcacuccagccugggcga

SEQ ID NO: 1283077 - RNA, 24 nt, Human
cauugcacuccagccugggcgaca

SEQ ID NO: 1283078 - RNA, 25 nt, Human
cauuuagcacagcuuaaauaaaagu

SEQ ID NO: 1283079 - RNA, 24 nt, Human
ccacaaccucuuauuucaucucaa

SEQ ID NO: 1283080 - RNA, 21 nt, Human
ccaggcaccuuuccucuuuuc

SEQ ID NO: 1283081 - RNA, 20 nt, Human
ccauugcacuccagccuggg

SEQ ID NO: 1283082 - RNA, 21 nt, Human
ccauugcacuccagccugggc

SEQ ID NO: 1283083 - RNA, 22 nt, Human
ccauugcacuccagccugggcg

SEQ ID NO: 1283084 - RNA, 23 nt, Human
ccauugcacuccagccugggcga

SEQ ID NO: 1283085 - RNA, 24 nt, Human
ccauugcacuccagccugggcgac

SEQ ID NO: 1283086 - RNA, 22 nt, Human
ccucuagggccaagaccugccc

SEQ ID NO: 1283087 - RNA, 24 nt, Human
ccuggccaacaugguaaaacccca

SEQ ID NO: 1283088 - RNA, 21 nt, Human
ccuguaaucccagcuacucag

SEQ ID NO: 1283089 - RNA, 30 nt, Human
cgacaagagcaaaacucaaaaaaaaaaaaa

SEQ ID NO: 1283090 - RNA, 24 nt, Human
cgaggcaaaagaagcaggacugag

SEQ ID NO: 1283091 - RNA, 26 nt, Human
cgccauugcacuccagccugggcgac

SEQ ID NO: 1283092 - RNA, 22 nt, Human
cucaaacacagcuauuacaaca

SEQ ID NO: 1283093 - RNA, 21 nt, Human
cucgaggcaaaagaagcagga

SEQ ID NO: 1283094 - RNA, 23 nt, Human
cuggccaacaugguaaaacccca

SEQ ID NO: 1283095 - RNA, 21 nt, Human
cuguaaucccagcuacucagg

SEQ ID NO: 1283096 - RNA, 22 nt, Human
cuuaccucugacucuaaggccc

SEQ ID NO: 1283097 - RNA, 21 nt, Human
gaaaagcagguauccaaaaga

SEQ ID NO: 1283098 - RNA, 21 nt, Human
gaacccagaacugaccagcag

SEQ ID NO: 1283099 - RNA, 18 nt, Human
gaacccgggaggcagaug

SEQ ID NO: 1283100 - RNA, 23 nt, Human
gagaucacgccauugcacuccag

SEQ ID NO: 1283101 - RNA, 18 nt, Human
gaucaacugaggucagga

SEQ ID NO: 1283102 - RNA, 24 nt, Human
gaucaacugaggucaggagucuaa

SEQ ID NO: 1283103 - RNA, 27 nt, Human
gcaaaacucaaaaaaaaaaaaaaaaaa

SEQ ID NO: 1283104 - RNA, 24 nt, Human
gccaacaugguaaaaccccaucuc

SEQ ID NO: 1283105 - RNA, 22 nt, Human
gccauugcacuccagccugggc

SEQ ID NO: 1283106 - RNA, 24 nt, Human
gccauugcacuccagccugggcga

SEQ ID NO: 1283107 - RNA, 20 nt, Human
gcgggcaccuguaaucccag

SEQ ID NO: 1283108 - RNA, 25 nt, Human
ggaaaaacaaaacccagaaugcaga

SEQ ID NO: 1283109 - RNA, 19 nt, Human
ggcaccuguaaucccagcu

SEQ ID NO: 1283110 - RNA, 27 nt, Human
ggcgacaagagcaaaacucaaaaaaaa

SEQ ID NO: 1283111 - RNA, 21 nt, Human
ggcgggcaccuguaaucccag

SEQ ID NO: 1283112 - RNA, 22 nt, Human
guggaucaacugaggucaggag

SEQ ID NO: 1283113 - RNA, 21 nt, Human
uaaaaaggaagggucauacaa

SEQ ID NO: 1283114 - RNA, 21 nt, Human
uaaacugaaugcagaggcuga

SEQ ID NO: 1283115 - RNA, 18 nt, Human
uaaagaacuaaaucuggu

SEQ ID NO: 1283116 - RNA, 24 nt, Human
uaagaccagccuggccaacauggu

SEQ ID NO: 1283117 - RNA, 21 nt, Human
uaccaaaaauaugugaauaaa

SEQ ID NO: 1283118 - RNA, 19 nt, Human
uacuuugcgaacauguggu

SEQ ID NO: 1283119 - RNA, 18 nt, Human
uagcccaggcaccuuucc

SEQ ID NO: 1283120 - RNA, 21 nt, Human
uagggccaagaccugccccuu

SEQ ID NO: 1283121 - RNA, 19 nt, Human
uauauagaagggcaugagg

SEQ ID NO: 1283122 - RNA, 24 nt, Human
uauuucacuggaaaauucuguaaa

SEQ ID NO: 1283123 - RNA, 20 nt, Human
uauuuugagcuaguuacagg

SEQ ID NO: 1283124 - RNA, 22 nt, Human
ucaaaaaaaaaaaaaaaaaaaa

SEQ ID NO: 1283125 - RNA, 23 nt, Human
ucaaaaaaaaaaaaaaaaaaaaa

SEQ ID NO: 1283126 - RNA, 18 nt, Human
ucaagaauggggaacuaa

SEQ ID NO: 1283127 - RNA, 23 nt, Human
ucacaaagccauuaagugaaccc

SEQ ID NO: 1283128 - RNA, 23 nt, Human
ucacgccauugcacuccagccug

SEQ ID NO: 1283129 - RNA, 22 nt, Human
ucacucgaggcaaaagaagcag

SEQ ID NO: 1283130 - RNA, 24 nt, Human
uccaaaagaacucugcuuggcccu

SEQ ID NO: 1283131 - RNA, 19 nt, Human
uccagccugggcgacaaga

SEQ ID NO: 1283132 - RNA, 25 nt, Human
ucgaggcaaaagaagcaggacugag

SEQ ID NO: 1283133 - RNA, 21 nt, Human
ucuaagaccagccuggccaac

SEQ ID NO: 1283134 - RNA, 24 nt, Human
ucuaaggcccugugggaugaaaag

SEQ ID NO: 1283135 - RNA, 23 nt, Human
ucuagcucuguugcuaccuuacc

SEQ ID NO: 1283136 - RNA, 21 nt, Human
ucucuacuaaaaauacaaaaa

SEQ ID NO: 1283137 - RNA, 19 nt, Human
ugaaaaacagaggaaaauc

SEQ ID NO: 1283138 - RNA, 24 nt, Human
ugaaaagcagguauccaaaagaac

SEQ ID NO: 1283139 - RNA, 23 nt, Human
ugaacccagaacugaccagcaga

SEQ ID NO: 1283140 - RNA, 21 nt, Human
ugagaaggaggguaagagugc

SEQ ID NO: 1283141 - RNA, 23 nt, Human
ugagaaggaggguaagagugcau

SEQ ID NO: 1283142 - RNA, 19 nt, Human
ugagagggcuaagaaggua

SEQ ID NO: 1283143 - RNA, 24 nt, Human
ugagcuaguuacaggcaguaacac

SEQ ID NO: 1283144 - RNA, 22 nt, Human
ugagcugagaucacgccauugc

SEQ ID NO: 1283145 - RNA, 20 nt, Human
ugaggcaggagaaucauuug

SEQ ID NO: 1283146 - RNA, 24 nt, Human
ugaggcaggagaaucauuugaacc

SEQ ID NO: 1283147 - RNA, 25 nt, Human
ugaggcaggagaaucauuugaaccc

SEQ ID NO: 1283148 - RNA, 20 nt, Human
ugaggcagguggaucaacug

SEQ ID NO: 1283149 - RNA, 26 nt, Human
ugaggcagguggaucaacugagguca

SEQ ID NO: 1283150 - RNA, 25 nt, Human
ugcagaggcugaggcagguggauca

SEQ ID NO: 1283151 - RNA, 21 nt, Human
ugcauagguagcccaggcacu

SEQ ID NO: 1283152 - RNA, 19 nt, Human
ugcauugccccauucuagc

SEQ ID NO: 1283153 - RNA, 20 nt, Human
ugcauugccccauucuagcu

SEQ ID NO: 1283154 - RNA, 21 nt, Human
uggagagaguuuucauuugcu

SEQ ID NO: 1283155 - RNA, 23 nt, Human
uggaucaacugaggucaggaguc

SEQ ID NO: 1283156 - RNA, 24 nt, Human
uggaucaacugaggucaggagucu

SEQ ID NO: 1283157 - RNA, 22 nt, Human
uggcgggcaccuguaaucccag

SEQ ID NO: 1283158 - RNA, 24 nt, Human
ugguggcgggcaccuguaauccca

SEQ ID NO: 1283159 - RNA, 18 nt, Human
uguaaagaacuaaaucug

SEQ ID NO: 1283160 - RNA, 22 nt, Human
uguugccagugagcugagauca

SEQ ID NO: 1283161 - RNA, 24 nt, Human
uuacauucacaaagccauuaagug

SEQ ID NO: 1283162 - RNA, 18 nt, Human
uuagcugagcgugguggc

SEQ ID NO: 1283163 - RNA, 24 nt, Human
uugccagugagcugagaucacgcc

SEQ ID NO: 1283164 - RNA, 21 nt, Human
uuuagugaaaaacagaggaaa

SEQ ID NO: 1283165 - RNA, 21 nt, Human
aaaaaaaaaaaaaaaaggcaa

SEQ ID NO: 1283166 - RNA, 26 nt, Human
aaaaaaaaaaaaaaaggcaauccuca

SEQ ID NO: 1283167 - RNA, 19 nt, Human
aaaauacaaaaauuagccc

SEQ ID NO: 1283168 - RNA, 21 nt, Human
aaagugcuucuuccuuuguua

SEQ ID NO: 1283169 - RNA, 21 nt, Human
aaaucaaccucccacagccac

SEQ ID NO: 1283170 - RNA, 19 nt, Human
aacagcauucuccccaacu

SEQ ID NO: 1283171 - RNA, 20 nt, Human
aacauggugaaacaccgucu

SEQ ID NO: 1283172 - RNA, 21 nt, Human
aacauggugaaacaccgucuc

SEQ ID NO: 1283173 - RNA, 18 nt, Human
aagaaagaggcugaaaug

SEQ ID NO: 1283174 - RNA, 18 nt, Human
aagcaacgaagauacaag

SEQ ID NO: 1283175 - RNA, 19 nt, Human
aagcaggggaagaaggggu

SEQ ID NO: 1283176 - RNA, 18 nt, Human
aaggagccuguucuccag

SEQ ID NO: 1283177 - RNA, 19 nt, Human
aaggagccuguucuccagg

SEQ ID NO: 1283178 - RNA, 21 nt, Human
aaggggccuuaugguagcagg

SEQ ID NO: 1283179 - RNA, 19 nt, Human
aaguggaccagcuuuauaa

SEQ ID NO: 1283180 - RNA, 18 nt, Human
aauugcuugaaccuggga

SEQ ID NO: 1283181 - RNA, 24 nt, Human
aauugcuugaaccugggaggcaga

SEQ ID NO: 1283182 - RNA, 25 nt, Human
acagagaaaaaaacacauuacucca

SEQ ID NO: 1283183 - RNA, 24 nt, Human
acagagcaaggcucuguguuaaaa

SEQ ID NO: 1283184 - RNA, 26 nt, Human
accacaaaccccaaagggcugauuug

SEQ ID NO: 1283185 - RNA, 20 nt, Human
accagauggcacugcugcuc

SEQ ID NO: 1283186 - RNA, 22 nt, Human
acccucacaaagggaaugcagc

SEQ ID NO: 1283187 - RNA, 19 nt, Human
accugaaccccucaaagac

SEQ ID NO: 1283188 - RNA, 23 nt, Human
acuccagccugggagacagagca

SEQ ID NO: 1283189 - RNA, 18 nt, Human
acugcacuccagccuggg

SEQ ID NO: 1283190 - RNA, 24 nt, Human
acugcacuccagccugggagacag

SEQ ID NO: 1283191 - RNA, 24 nt, Human
agagguugcagugagccaagaucg

SEQ ID NO: 1283192 - RNA, 22 nt, Human
agaugcagugugacaacugccu

SEQ ID NO: 1283193 - RNA, 18 nt, Human
agcaaagaccaaagaagc

SEQ ID NO: 1283194 - RNA, 19 nt, Human
agcaacgaagauacaagaa

SEQ ID NO: 1283195 - RNA, 24 nt, Human
agcacuuugggaggccaauguggg

SEQ ID NO: 1283196 - RNA, 23 nt, Human
agcaugguggcacaugccuguaa

SEQ ID NO: 1283197 - RNA, 20 nt, Human
agccauaugcuaacagccuu

SEQ ID NO: 1283198 - RNA, 19 nt, Human
agccuggccaacaugguga

SEQ ID NO: 1283199 - RNA, 24 nt, Human
agccugggagacagagcaaggcuc

SEQ ID NO: 1283200 - RNA, 21 nt, Human
agcggaucaaaaucucagcuc

SEQ ID NO: 1283201 - RNA, 24 nt, Human
aggcagagguugcagugagccaag

SEQ ID NO: 1283202 - RNA, 22 nt, Human
aggcaggagaauugcuugaacc

SEQ ID NO: 1283203 - RNA, 24 nt, Human
aggcaggagaauugcuugaaccug

SEQ ID NO: 1283204 - RNA, 18 nt, Human
aggccaaugugggcgggu

SEQ ID NO: 1283205 - RNA, 22 nt, Human
aggcucaaagcuuuaaaggcaa

SEQ ID NO: 1283206 - RNA, 21 nt, Human
aggcugaggcaggagaauugc

SEQ ID NO: 1283207 - RNA, 24 nt, Human
aggcugaggcaggagaauugcuug

SEQ ID NO: 1283208 - RNA, 21 nt, Human
aggggaagaagggguggggag

SEQ ID NO: 1283209 - RNA, 18 nt, Human
agggguggggaggggagg

SEQ ID NO: 1283210 - RNA, 24 nt, Human
agggguggggaggggaggagagau

SEQ ID NO: 1283211 - RNA, 19 nt, Human
aggguuccuucucugcccu

SEQ ID NO: 1283212 - RNA, 21 nt, Human
agucccaccuucccugaccac

SEQ ID NO: 1283213 - RNA, 24 nt, Human
aucgcaccacugcacuccagccug

SEQ ID NO: 1283214 - RNA, 24 nt, Human
auugacuguaccacaguggcucuu

SEQ ID NO: 1283215 - RNA, 20 nt, Human
caaagaaccccaaaaggggc

SEQ ID NO: 1283216 - RNA, 20 nt, Human
caaagcuuuaaaggcaaauc

SEQ ID NO: 1283217 - RNA, 24 nt, Human
caaccugagaccuuccuuggaagc

SEQ ID NO: 1283218 - RNA, 18 nt, Human
caagaacagccuggccaa

SEQ ID NO: 1283219 - RNA, 24 nt, Human
caagaacagccuggccaacauggu

SEQ ID NO: 1283220 - RNA, 19 nt, Human
cacacccaaagaaccccaa

SEQ ID NO: 1283221 - RNA, 19 nt, Human
cacagacgcuucuggggga

SEQ ID NO: 1283222 - RNA, 18 nt, Human
cacaugaucucaggcacc

SEQ ID NO: 1283223 - RNA, 25 nt, Human
cacccaaagaaccccaaaaggggcu

SEQ ID NO: 1283224 - RNA, 24 nt, Human
cacgccuguaaucccagcacuuug

SEQ ID NO: 1283225 - RNA, 18 nt, Human
cacugcacuccagccugg

SEQ ID NO: 1283226 - RNA, 19 nt, Human
cacugcacuccagccuggg

SEQ ID NO: 1283227 - RNA, 22 nt, Human
cacugcacuccagccugggaga

SEQ ID NO: 1283228 - RNA, 25 nt, Human
cacugcacuccagccugggagacag

SEQ ID NO: 1283229 - RNA, 27 nt, Human
cagaaagccaaggcagaaagccgauca

SEQ ID NO: 1283230 - RNA, 23 nt, Human
cagagaaaaaaacacauuacucc

SEQ ID NO: 1283231 - RNA, 19 nt, Human
cagcacuuugggaggccaa

SEQ ID NO: 1283232 - RNA, 24 nt, Human
cagcacuuugggaggccaaugugg

SEQ ID NO: 1283233 - RNA, 23 nt, Human
cagccacacccaaagaaccccaa

SEQ ID NO: 1283234 - RNA, 18 nt, Human
cagccggcaaaagcccca

SEQ ID NO: 1283235 - RNA, 18 nt, Human
cagugaggcaguguggaa

SEQ ID NO: 1283236 - RNA, 24 nt, Human
caugccuguaauuccggcuacuug

SEQ ID NO: 1283237 - RNA, 21 nt, Human
ccaaagggcugauuugacuuu

SEQ ID NO: 1283238 - RNA, 19 nt, Human
ccacugcacuccagccugg

SEQ ID NO: 1283239 - RNA, 20 nt, Human
ccacugcacuccagccuggg

SEQ ID NO: 1283240 - RNA, 22 nt, Human
ccacugcacuccagccugggag

SEQ ID NO: 1283241 - RNA, 23 nt, Human
ccacugcacuccagccugggaga

SEQ ID NO: 1283242 - RNA, 24 nt, Human
ccacugcacuccagccugggagac

SEQ ID NO: 1283243 - RNA, 25 nt, Human
ccacugcacuccagccugggagaca

SEQ ID NO: 1283244 - RNA, 18 nt, Human
cccaaagggcugauuuga

SEQ ID NO: 1283245 - RNA, 19 nt, Human
cccacagccaccuuuggcu

SEQ ID NO: 1283246 - RNA, 22 nt, Human
ccccaacaccaaguugggccuu

SEQ ID NO: 1283247 - RNA, 23 nt, Human
ccccaacaccaaguugggccuua

SEQ ID NO: 1283248 - RNA, 20 nt, Human
ccccucaaagacauggcaaa

SEQ ID NO: 1283249 - RNA, 23 nt, Human
ccuaggaaaggaauucugcagac

SEQ ID NO: 1283250 - RNA, 23 nt, Human
ccuggccaacauggugaaacacc

SEQ ID NO: 1283251 - RNA, 24 nt, Human
ccuggccaacauggugaaacaccg

SEQ ID NO: 1283252 - RNA, 22 nt, Human
ccugggagacagagcaaggcuc

SEQ ID NO: 1283253 - RNA, 25 nt, Human
ccugggaggcagagguugcagugag

SEQ ID NO: 1283254 - RNA, 21 nt, Human
cgcaccacugcacuccagccu

SEQ ID NO: 1283255 - RNA, 23 nt, Human
cgccuguaaucccagcacuuugg

SEQ ID NO: 1283256 - RNA, 24 nt, Human
cgccuguaaucccagcacuuuggg

SEQ ID NO: 1283257 - RNA, 24 nt, Human
cggcuacuugggaggcugaggcag

SEQ ID NO: 1283258 - RNA, 21 nt, Human
cgggucacuugaggccaggag

SEQ ID NO: 1283259 - RNA, 24 nt, Human
cgggucacuugaggccaggaguuc

SEQ ID NO: 1283260 - RNA, 23 nt, Human
cuaaaagaaagaggcugaaaugu

SEQ ID NO: 1283261 - RNA, 22 nt, Human
cucacgccuguaaucccagcac

SEQ ID NO: 1283262 - RNA, 24 nt, Human
cucacgccuguaaucccagcacuu

SEQ ID NO: 1283263 - RNA, 24 nt, Human
cucuguguuaaaaaaaaaaaaaaa

SEQ ID NO: 1283264 - RNA, 23 nt, Human
cuguguuaaaaaaaaaaaaaaaa

SEQ ID NO: 1283265 - RNA, 25 nt, Human
gaaaauucaucaguuucuugggaag

SEQ ID NO: 1283266 - RNA, 26 nt, Human
gaagauacaagaauuaaaacagcaau

SEQ ID NO: 1283267 - RNA, 24 nt, Human
gaagcacaugaucucaggcaccag

SEQ ID NO: 1283268 - RNA, 19 nt, Human
gaagcaccuucucuggcac

SEQ ID NO: 1283269 - RNA, 21 nt, Human
gaagggguggggaggggagga

SEQ ID NO: 1283270 - RNA, 21 nt, Human
gacauggcaagcaggugacau

SEQ ID NO: 1283271 - RNA, 23 nt, Human
gagaauugcuugaaccugggagg

SEQ ID NO: 1283272 - RNA, 18 nt, Human
gagguugcagugagccaa

SEQ ID NO: 1283273 - RNA, 21 nt, Human
gaucacucuuguccacagaga

SEQ ID NO: 1283274 - RNA, 20 nt, Human
gcaccacugcacuccagccu

SEQ ID NO: 1283275 - RNA, 24 nt, Human
gcacuccagccugggagacagagc

SEQ ID NO: 1283276 - RNA, 24 nt, Human
gcagccacacccaaagaaccccaa

SEQ ID NO: 1283277 - RNA, 20 nt, Human
gcaggggaagaagggguggg

SEQ ID NO: 1283278 - RNA, 24 nt, Human
gccaacauggugaaacaccgucuc

SEQ ID NO: 1283279 - RNA, 20 nt, Human
gccaagaucgcaccacugca

SEQ ID NO: 1283280 - RNA, 20 nt, Human
gccuguaauuccggcuacuu

SEQ ID NO: 1283281 - RNA, 21 nt, Human
gcuacuacacuugaaagacca

SEQ ID NO: 1283282 - RNA, 28 nt, Human
gcucuguguuaaaaaaaaaaaaaaaaaa

SEQ ID NO: 1283283 - RNA, 19 nt, Human
ggaagaagggguggggagg

SEQ ID NO: 1283284 - RNA, 23 nt, Human
ggaagcaggggaagaaggggugg

SEQ ID NO: 1283285 - RNA, 18 nt, Human
ggaggccaaugugggcgg

SEQ ID NO: 1283286 - RNA, 20 nt, Human
ggcucacgccuguaauccca

SEQ ID NO: 1283287 - RNA, 21 nt, Human
ggcucacgccuguaaucccag

SEQ ID NO: 1283288 - RNA, 18 nt, Human
ggcugauuugacuuucuc

SEQ ID NO: 1283289 - RNA, 20 nt, Human
gggaagaagggguggggagg

SEQ ID NO: 1283290 - RNA, 19 nt, Human
gggaauggaagcaggggaa

SEQ ID NO: 1283291 - RNA, 20 nt, Human
gggaggccaaugugggcggg

SEQ ID NO: 1283292 - RNA, 24 nt, Human
gggcacgggggcucacgccuguaa

SEQ ID NO: 1283293 - RNA, 24 nt, Human
gggcucacgccuguaaucccagca

SEQ ID NO: 1283294 - RNA, 24 nt, Human
gggggcucacgccuguaaucccag

SEQ ID NO: 1283295 - RNA, 23 nt, Human
gggucacuugaggccaggaguuc

SEQ ID NO: 1283296 - RNA, 28 nt, Human
gguaccagagacagacccuaggaaagga

SEQ ID NO: 1283297 - RNA, 24 nt, Human
ggucacuugaggccaggaguucaa

SEQ ID NO: 1283298 - RNA, 24 nt, Human
gguggcacaugccuguaauuccgg

SEQ ID NO: 1283299 - RNA, 22 nt, Human
guggggaggggaggagagauga

SEQ ID NO: 1283300 - RNA, 24 nt, Human
guugggccuuaauuuucccaucug

SEQ ID NO: 1283301 - RNA, 20 nt, Human
uaaaaauacaaaaauuagcc

SEQ ID NO: 1283302 - RNA, 21 nt, Human
uaaaaauacaaaaauuagccc

SEQ ID NO: 1283303 - RNA, 22 nt, Human
uaacagccuuccuagaggacac

SEQ ID NO: 1283304 - RNA, 20 nt, Human
uaagcaaagaccaaagaagc

SEQ ID NO: 1283305 - RNA, 18 nt, Human
uacaaagccaccuuaggc

SEQ ID NO: 1283306 - RNA, 20 nt, Human
uacaagaauuaaaacagcaa

SEQ ID NO: 1283307 - RNA, 24 nt, Human
uacacaucacuuccuggaagugga

SEQ ID NO: 1283308 - RNA, 18 nt, Human
uacccauccuugagcaac

SEQ ID NO: 1283309 - RNA, 26 nt, Human
uaucuggcaauaaauuuguagccaca

SEQ ID NO: 1283310 - RNA, 22 nt, Human
ucacuugaggccaggaguucaa

SEQ ID NO: 1283311 - RNA, 23 nt, Human
ucacuugaggccaggaguucaag

SEQ ID NO: 1283312 - RNA, 18 nt, Human
uccacagagaaaaaaaca

SEQ ID NO: 1283313 - RNA, 20 nt, Human
uccacagagaaaaaaacaca

SEQ ID NO: 1283314 - RNA, 20 nt, Human
ucccaucugaccugucucua

SEQ ID NO: 1283315 - RNA, 23 nt, Human
ucgcaccacugcacuccagccug

SEQ ID NO: 1283316 - RNA, 22 nt, Human
ucuccaggcugaccugaacccc

SEQ ID NO: 1283317 - RNA, 22 nt, Human
ucuccaggcugaccugaacccu

SEQ ID NO: 1283318 - RNA, 23 nt, Human
ucuguguuaaaaaaaaaaaaaaa

SEQ ID NO: 1283319 - RNA, 19 nt, Human
ucuuccuaacuaaccuaau

SEQ ID NO: 1283320 - RNA, 22 nt, Human
ucuuggaagcaccuucucuggc

SEQ ID NO: 1283321 - RNA, 21 nt, Human
ugaaacaccgucuccacuaaa

SEQ ID NO: 1283322 - RNA, 22 nt, Human
ugaaacaccgucuccacuaaaa

SEQ ID NO: 1283323 - RNA, 18 nt, Human
ugaaagaccagaguaugg

SEQ ID NO: 1283324 - RNA, 22 nt, Human
ugaaagaccagaguaugguuau

SEQ ID NO: 1283325 - RNA, 24 nt, Human
ugaaccugggaggcagagguugca

SEQ ID NO: 1283326 - RNA, 19 nt, Human
ugaaguguuucugugaugc

SEQ ID NO: 1283327 - RNA, 21 nt, Human
ugaccugaaccccucaaagac

SEQ ID NO: 1283328 - RNA, 21 nt, Human
ugacucuuugccauguucuug

SEQ ID NO: 1283329 - RNA, 20 nt, Human
ugacuguaccacaguggcuc

SEQ ID NO: 1283330 - RNA, 24 nt, Human
ugaggcaggagaauugcuugaacc

SEQ ID NO: 1283331 - RNA, 25 nt, Human
ugaggcaggagaauugcuugaaccu

SEQ ID NO: 1283332 - RNA, 20 nt, Human
ugauagcggaucaaaaucuc

SEQ ID NO: 1283333 - RNA, 22 nt, Human
ugcagccacacccaaagaaccc

SEQ ID NO: 1283334 - RNA, 21 nt, Human
ugcaucagaaagccaaggcag

SEQ ID NO: 1283335 - RNA, 23 nt, Human
ugccuguaauuccggcuacuugg

SEQ ID NO: 1283336 - RNA, 24 nt, Human
ugccuguaauuccggcuacuuggg

SEQ ID NO: 1283337 - RNA, 20 nt, Human
uggaacuccuggaucuuucu

SEQ ID NO: 1283338 - RNA, 21 nt, Human
uggaagaaaucaaccucccac

SEQ ID NO: 1283339 - RNA, 18 nt, Human
uggaagcaggggaagaag

SEQ ID NO: 1283340 - RNA, 23 nt, Human
uggaagcaggggaagaaggggug

SEQ ID NO: 1283341 - RNA, 22 nt, Human
uggaagguacaaagccaccuua

SEQ ID NO: 1283342 - RNA, 24 nt, Human
uggaagguacaaagccaccuuagg

SEQ ID NO: 1283343 - RNA, 19 nt, Human
uggcacaugccuguaauuc

SEQ ID NO: 1283344 - RNA, 20 nt, Human
uggcacaugccuguaauucc

SEQ ID NO: 1283345 - RNA, 21 nt, Human
uggcacaugccuguaauuccg

SEQ ID NO: 1283346 - RNA, 18 nt, Human
uggccaacauggugaaac

SEQ ID NO: 1283347 - RNA, 23 nt, Human
ugggaaaauaucuggcaauaaau

SEQ ID NO: 1283348 - RNA, 24 nt, Human
ugggaggcagagguugcagugagc

SEQ ID NO: 1283349 - RNA, 18 nt, Human
ugggaggccaaugugggc

SEQ ID NO: 1283350 - RNA, 24 nt, Human
ugggaggccaaugugggcggguca

SEQ ID NO: 1283351 - RNA, 19 nt, Human
ugggaggcugaggcaggag

SEQ ID NO: 1283352 - RNA, 22 nt, Human
ugggaggcugaggcaggagaau

SEQ ID NO: 1283353 - RNA, 18 nt, Human
uggggaggggaggagaga

SEQ ID NO: 1283354 - RNA, 20 nt, Human
uggggaggggaggagagaug

SEQ ID NO: 1283355 - RNA, 23 nt, Human
uggggaggggaggagagaugaag

SEQ ID NO: 1283356 - RNA, 21 nt, Human
ugggggagagcuaauggucau

SEQ ID NO: 1283357 - RNA, 23 nt, Human
ugguggcacaugccuguaauucc

SEQ ID NO: 1283358 - RNA, 19 nt, Human
uguucaagaucaagcaccu

SEQ ID NO: 1283359 - RNA, 20 nt, Human
uuaaaaaaaaaaaaaaaaaa

SEQ ID NO: 1283360 - RNA, 25 nt, Human
uuaaaacagcaauccuugcugggca

SEQ ID NO: 1283361 - RNA, 20 nt, Human
uucagagacagaaacauacc

SEQ ID NO: 1283362 - RNA, 24 nt, Human
uugaaccugggaggcagagguugc

SEQ ID NO: 1283363 - RNA, 22 nt, Human
uugcagugagccaagaucgcac

SEQ ID NO: 1283364 - RNA, 24 nt, Human
uugcuugaaccugggaggcagagg

SEQ ID NO: 1283365 - RNA, 23 nt, Human
uugggaggcugaggcaggagaau

SEQ ID NO: 1283366 - RNA, 22 nt, Human
uuuaauuccuuguccuaagauu

SEQ ID NO: 1283367 - RNA, 23 nt, Human
uuugcagauuuuuuauagcuuuu

SEQ ID NO: 1283368 - RNA, 20 nt, Human
aaacccagaaagaaagccca

SEQ ID NO: 1283369 - RNA, 28 nt, Human
aaagaacacuaagagagggacaaggcua

SEQ ID NO: 1283370 - RNA, 22 nt, Human
aagaacacuaagagagggaccg

SEQ ID NO: 1283371 - RNA, 19 nt, Human
aaggcuagaagccgcaggc

SEQ ID NO: 1283372 - RNA, 20 nt, Human
aggagcuguggaaaacaugg

SEQ ID NO: 1283373 - RNA, 18 nt, Human
auuuggguuggcuggagg

SEQ ID NO: 1283374 - RNA, 22 nt, Human
caaacccagaaagaaagcccaa

SEQ ID NO: 1283375 - RNA, 26 nt, Human
caaacccagaaagaaagcccaacuag

SEQ ID NO: 1283376 - RNA, 22 nt, Human
cacacaugagaacugaaauggc

SEQ ID NO: 1283377 - RNA, 22 nt, Human
caccacauaauucaacuagcaa

SEQ ID NO: 1283378 - RNA, 27 nt, Human
ccaaacccagaaagaaagcccaacuag

SEQ ID NO: 1283379 - RNA, 20 nt, Human
ccgcaggcugucuacacuau

SEQ ID NO: 1283380 - RNA, 18 nt, Human
cucugugugcccacuggu

SEQ ID NO: 1283381 - RNA, 22 nt, Human
gaaaaacacaccacauaauuca

SEQ ID NO: 1283382 - RNA, 22 nt, Human
gcccaaacccagaaagaaagcc

SEQ ID NO: 1283383 - RNA, 23 nt, Human
gcccaaacccagaaagaaagccc

SEQ ID NO: 1283384 - RNA, 19 nt, Human
ggaggagcuguggaaaaca

SEQ ID NO: 1283385 - RNA, 22 nt, Human
uaaaaugaaaggcuuccaggca

SEQ ID NO: 1283386 - RNA, 21 nt, Human
uacacacaugagaacugaaau

SEQ ID NO: 1283387 - RNA, 20 nt, Human
uauagcaggcgcuauuuggg

SEQ ID NO: 1283388 - RNA, 23 nt, Human
uccaggcaguuaucugauuaaag

SEQ ID NO: 1283389 - RNA, 20 nt, Human
ugagaacugaaauggcccaa

SEQ ID NO: 1283390 - RNA, 23 nt, Human
uggugcuggagaucgccauggcu

SEQ ID NO: 1283391 - RNA, 23 nt, Human
uucaacuagcaaagaagacugcu

SEQ ID NO: 1283392 - RNA, 24 nt, Human
uugcuuauuacggaaaaacacacc

SEQ ID NO: 1283393 - RNA, 21 nt, Human
aaagugcuuccugucccuucg

SEQ ID NO: 1283394 - RNA, 21 nt, Human
aagcagaaauuaucacacagc

SEQ ID NO: 1283395 - RNA, 20 nt, Human
aagguacccguacccaagga

SEQ ID NO: 1283396 - RNA, 18 nt, Human
aagugcgggcaagcccag

SEQ ID NO: 1283397 - RNA, 23 nt, Human
aaugcaguggcaguggugccacu

SEQ ID NO: 1283398 - RNA, 21 nt, Human
acaauagucuccugacucccu

SEQ ID NO: 1283399 - RNA, 28 nt, Human
acugccuugcucaaaauguuucuuuaga

SEQ ID NO: 1283400 - RNA, 21 nt, Human
agaauaguaaauuuuauuacu

SEQ ID NO: 1283401 - RNA, 18 nt, Human
agaaugcuuuaaaaugca

SEQ ID NO: 1283402 - RNA, 22 nt, Human
agacauuaggauucucuaaacu

SEQ ID NO: 1283403 - RNA, 23 nt, Human
agcagccaggcacccagggcgcc

SEQ ID NO: 1283404 - RNA, 21 nt, Human
aggcccagaggccgcccagca

SEQ ID NO: 1283405 - RNA, 22 nt, Human
aggcccagaggccgcccagcag

SEQ ID NO: 1283406 - RNA, 20 nt, Human
aggcguccgggaucagagug

SEQ ID NO: 1283407 - RNA, 19 nt, Human
agggcgcccgggacggugc

SEQ ID NO: 1283408 - RNA, 18 nt, Human
auagaaaaaaaagaagcu

SEQ ID NO: 1283409 - RNA, 18 nt, Human
aucaaaaccccacaucaa

SEQ ID NO: 1283410 - RNA, 20 nt, Human
auccaucuccagcuggggcc

SEQ ID NO: 1283411 - RNA, 23 nt, Human
auugcaaaagcaacaguaucaaa

SEQ ID NO: 1283412 - RNA, 19 nt, Human
caaaagcaacaguaucaaa

SEQ ID NO: 1283413 - RNA, 24 nt, Human
caaagugcgggcaagcccagugca

SEQ ID NO: 1283414 - RNA, 23 nt, Human
caagcccaagcccaagggggcgc

SEQ ID NO: 1283415 - RNA, 24 nt, Human
caaggcaaacuucucuuacugacc

SEQ ID NO: 1283416 - RNA, 23 nt, Human
caaugccaacccuggugcagcaa

SEQ ID NO: 1283417 - RNA, 23 nt, Human
caccgcccccaggcugcacaggc

SEQ ID NO: 1283418 - RNA, 21 nt, Human
cagaaaaccagcccugaacag

SEQ ID NO: 1283419 - RNA, 25 nt, Human
cagaggccgcccagcagccaggcac

SEQ ID NO: 1283420 - RNA, 19 nt, Human
cagggacaggguggaguag

SEQ ID NO: 1283421 - RNA, 21 nt, Human
caggguccaggcccagaggcc

SEQ ID NO: 1283422 - RNA, 22 nt, Human
cauaacaguagaagcaucuaga

SEQ ID NO: 1283423 - RNA, 21 nt, Human
ccaaaguguccauauuagcca

SEQ ID NO: 1283424 - RNA, 21 nt, Human
ccaagcccaagggggcgcuga

SEQ ID NO: 1283425 - RNA, 18 nt, Human
ccacuagcauccugggag

SEQ ID NO: 1283426 - RNA, 18 nt, Human
ccacugccugcugccacu

SEQ ID NO: 1283427 - RNA, 19 nt, Human
ccacugccugcugccacug

SEQ ID NO: 1283428 - RNA, 22 nt, Human
ccagcagccaggcacccagggc

SEQ ID NO: 1283429 - RNA, 23 nt, Human
ccagcccugaacaggcauuagaa

SEQ ID NO: 1283430 - RNA, 20 nt, Human
ccaggcacuugcuuugugcu

SEQ ID NO: 1283431 - RNA, 20 nt, Human
ccaggcccagaggccgccca

SEQ ID NO: 1283432 - RNA, 21 nt, Human
ccagugcauuuaaugaccaaa

SEQ ID NO: 1283433 - RNA, 19 nt, Human
ccaucuagucaguucauau

SEQ ID NO: 1283434 - RNA, 23 nt, Human
cccacaucaaugugcaucuuccu

SEQ ID NO: 1283435 - RNA, 20 nt, Human
cccgugcaugcagaaaacca

SEQ ID NO: 1283436 - RNA, 22 nt, Human
ccuuccccggcccgagggcaag

SEQ ID NO: 1283437 - RNA, 24 nt, Human
cgagggcaagcccaagcccaaggg

SEQ ID NO: 1283438 - RNA, 21 nt, Human
cuagcaauggacaaacucaac

SEQ ID NO: 1283439 - RNA, 19 nt, Human
cuagcauccugggaggcau

SEQ ID NO: 1283440 - RNA, 23 nt, Human
cuaguccuggguuuaggagacaa

SEQ ID NO: 1283441 - RNA, 18 nt, Human
cucccaccgcccccaggc

SEQ ID NO: 1283442 - RNA, 24 nt, Human
cucccuagcaauggacaaacucaa

SEQ ID NO: 1283443 - RNA, 18 nt, Human
cugccacugccugcugcc

SEQ ID NO: 1283444 - RNA, 27 nt, Human
cugccugcugccacugccugcugccac

SEQ ID NO: 1283445 - RNA, 24 nt, Human
cugccugcugccacugccuucugc

SEQ ID NO: 1283446 - RNA, 24 nt, Human
cuggcaucgcggucagccuucccc

SEQ ID NO: 1283447 - RNA, 21 nt, Human
cugguaacuaagaaagauaaa

SEQ ID NO: 1283448 - RNA, 21 nt, Human
cuggugcagcaauaaaggggg

SEQ ID NO: 1283449 - RNA, 23 nt, Human
cuugugaaugagcugaccuggaa

SEQ ID NO: 1283450 - RNA, 18 nt, Human
gaaggagaugcagaaguc

SEQ ID NO: 1283451 - RNA, 20 nt, Human
gcacaggguccaggcccaga

SEQ ID NO: 1283452 - RNA, 21 nt, Human
gcagaaaaccagcccugaaca

SEQ ID NO: 1283453 - RNA, 25 nt, Human
gcagggacaggguggaguagggcuc

SEQ ID NO: 1283454 - RNA, 19 nt, Human
gcauagaaaaaaaagaagc

SEQ ID NO: 1283455 - RNA, 22 nt, Human
gccaaagugcgggcaagcccag

SEQ ID NO: 1283456 - RNA, 18 nt, Human
gcccgggacggugcggag

SEQ ID NO: 1283457 - RNA, 18 nt, Human
gccuggcacgggcgcggg

SEQ ID NO: 1283458 - RNA, 19 nt, Human
gccuggcacgggcgcgggg

SEQ ID NO: 1283459 - RNA, 18 nt, Human
gcugccgcuucccuaugc

SEQ ID NO: 1283460 - RNA, 18 nt, Human
gcugcggcgccuggcacg

SEQ ID NO: 1283461 - RNA, 18 nt, Human
ggcaaacuucucuuacug

SEQ ID NO: 1283462 - RNA, 20 nt, Human
ggcgccccucccacugcugc

SEQ ID NO: 1283463 - RNA, 20 nt, Human
ggcugacauccgaugcugcc

SEQ ID NO: 1283464 - RNA, 18 nt, Human
gggacaagagaggcuggc

SEQ ID NO: 1283465 - RNA, 18 nt, Human
gggcgcggggcucccacc

SEQ ID NO: 1283466 - RNA, 21 nt, Human
guaaugagauuguuuucauua

SEQ ID NO: 1283467 - RNA, 19 nt, Human
gucaaaaucagacacauca

SEQ ID NO: 1283468 - RNA, 20 nt, Human
uaagaaagauaaaugggcag

SEQ ID NO: 1283469 - RNA, 23 nt, Human
uacuugcugccaaggcaaacuuc

SEQ ID NO: 1283470 - RNA, 24 nt, Human
uagccgggaccagggcccggggaa

SEQ ID NO: 1283471 - RNA, 22 nt, Human
uaggaaggccaaagugcgggca
